United States Patent Application Publication US 2005/0255487 A1 - sequence listing, part 4

SEQ ID NO: 81984 - RNA, 19 nt, Homo sapiens
  misc_RNA (1)...(19): siRNA sense strand
gaagcuggccaaggucuac

SEQ ID NO: 81985 - RNA, 19 nt, Homo sapiens
  misc_RNA (1)...(19): siRNA sense strand
ccaauggggcuuccuggua

SEQ ID NO: 81986 - RNA, 19 nt, Homo sapiens
  misc_RNA (1)...(19): siRNA sense strand
uaacuuccaccucaaaaga

SEQ ID NO: 81987 - RNA, 19 nt, Homo sapiens
  misc_RNA (1)...(19): siRNA sense strand
cggcugcugcuuccaggua

SEQ ID NO: 81988 - RNA, 19 nt, Homo sapiens
  misc_RNA (1)...(19): siRNA sense strand
caccaccgcuaugaugauc

SEQ ID NO: 81989 - RNA, 19 nt, Homo sapiens
  misc_RNA (1)...(19): siRNA sense strand
gagaggaacuggaaaugua

SEQ ID NO: 81990 - RNA, 19 nt, Homo sapiens
  misc_RNA (1)...(19): siRNA sense strand
gaacaaaucucagcagaac

SEQ ID NO: 81991 - RNA, 19 nt, Homo sapiens
  misc_RNA (1)...(19): siRNA sense strand
gagaagagcagaacaaauc

SEQ ID NO: 81992 - RNA, 19 nt, Homo sapiens
  misc_RNA (1)...(19): siRNA sense strand
gaaauaaaggcccuacuca

SEQ ID NO: 81993 - RNA, 19 nt, Homo sapiens
  misc_RNA (1)...(19): siRNA sense strand
gguauccagucgagaaaga

SEQ ID NO: 81994 - RNA, 19 nt, Homo sapiens
  misc_RNA (1)...(19): siRNA sense strand
uaaggugguuggaggcaaa

SEQ ID NO: 81995 - RNA, 19 nt, Homo sapiens
  misc_RNA (1)...(19): siRNA sense strand
ggaagacagaugcuaauag

SEQ ID NO: 81996 - RNA, 19 nt, Homo sapiens
  misc_RNA (1)...(19): siRNA sense strand
gggaagacagaugcuaaua

SEQ ID NO: 81997 - RNA, 19 nt, Homo sapiens
  misc_RNA (1)...(19): siRNA sense strand
ugagauaucaguauuugga

SEQ ID NO: 81998 - RNA, 19 nt, Homo sapiens
  misc_RNA (1)...(19): siRNA sense strand
cgagaaagagcuauaugug

SEQ ID NO: 81999 - RNA, 19 nt, Homo sapiens
  misc_RNA (1)...(19): siRNA sense strand
gauaucaguauuuggaaga

SEQ ID NO: 82000 - RNA, 19 nt, Homo sapiens
  misc_RNA (1)...(19): siRNA sense strand
ggagaagagcagaacaaau

SEQ ID NO: 82001 - RNA, 19 nt, Homo sapiens
  misc_RNA (1)...(19): siRNA sense strand
gagaaugccgagcccgaaa

SEQ ID NO: 82002 - RNA, 19 nt, Homo sapiens
  misc_RNA (1)...(19): siRNA sense strand
uaaagaagcccgguaaacg

SEQ ID NO: 82003 - RNA, 19 nt, Homo sapiens
  misc_RNA (1)...(19): siRNA sense strand
guaaagaagcccgguaaac

SEQ ID NO: 82004 - RNA, 19 nt, Homo sapiens
  misc_RNA (1)...(19): siRNA sense strand
gagauaucaguauuuggaa

SEQ ID NO: 82005 - RNA, 19 nt, Homo sapiens
  misc_RNA (1)...(19): siRNA sense strand
uaccaaggcugggaagaca

SEQ ID NO: 82006 - RNA, 19 nt, Homo sapiens
  misc_RNA (1)...(19): siRNA sense strand
gugguuggaggcaaaguaa

SEQ ID NO: 82007 - RNA, 19 nt, Homo sapiens
  misc_RNA (1)...(19): siRNA sense strand
ucagagaggaacuggaaau

SEQ ID NO: 82008 - RNA, 19 nt, Homo sapiens
  misc_RNA (1)...(19): siRNA sense strand
ugaaauaaaggcccuacuc

SEQ ID NO: 82009 - RNA, 19 nt, Homo sapiens
  misc_RNA (1)...(19): siRNA sense strand
ggaugacaguaaggugguu

SEQ ID NO: 82010 - RNA, 19 nt, Homo sapiens
  misc_RNA (1)...(19): siRNA sense strand
gcagagugcaagagaaugc

SEQ ID NO: 82011 - RNA, 19 nt, Homo sapiens
  misc_RNA (1)...(19): siRNA sense strand
ggugguuggaggcaaagua

SEQ ID NO: 82012 - RNA, 19 nt, Homo sapiens
  misc_RNA (1)...(19): siRNA sense strand
guugguauccagucgagaa

SEQ ID NO: 82013 - RNA, 19 nt, Homo sapiens
  misc_RNA (1)...(19): siRNA sense strand
aaagaagcccgguaaacgu

SEQ ID NO: 82014 - RNA, 19 nt, Homo sapiens
  misc_RNA (1)...(19): siRNA sense strand
ccuacucacuggagaagag

SEQ ID NO: 82015 - RNA, 19 nt, Homo sapiens
  misc_RNA (1)...(19): siRNA sense strand
aauaaaggcccuacucacu

SEQ ID NO: 82016 - RNA, 19 nt, Homo sapiens
  misc_RNA (1)...(19): siRNA sense strand
guauuuggaagaguuggua

SEQ ID NO: 82017 - RNA, 19 nt, Homo sapiens
  misc_RNA (1)...(19): siRNA sense strand
aaguaaagaagcccgguaa

SEQ ID NO: 82018 - RNA, 19 nt, Homo sapiens
  misc_RNA (1)...(19): siRNA sense strand
ccaaggcugggaagacaga

SEQ ID NO: 82019 - RNA, 19 nt, Homo sapiens
  misc_RNA (1)...(19): siRNA sense strand
gaagagcagaacaaaucuc

SEQ ID NO: 82020 - RNA, 19 nt, Homo sapiens
  misc_RNA (1)...(19): siRNA sense strand
acaaaucucagcagaacuc

SEQ ID NO: 82021 - RNA, 19 nt, Homo sapiens
  misc_RNA (1)...(19): siRNA sense strand
cggcagagugcaagagaau

SEQ ID NO: 82022 - RNA, 19 nt, Homo sapiens
  misc_RNA (1)...(19): siRNA sense strand
agaacaaaucucagcagaa

SEQ ID NO: 82023 - RNA, 19 nt, Homo sapiens
  misc_RNA (1)...(19): siRNA sense strand
ucgagaaagagcuauaugu

SEQ ID NO: 82024 - RNA, 19 nt, Homo sapiens
  misc_RNA (1)...(19): siRNA sense strand
cagccaaaauugacuugaa

SEQ ID NO: 82025 - RNA, 19 nt, Homo sapiens
  misc_RNA (1)...(19): siRNA sense strand
gguuggaggcaaaguaaag

SEQ ID NO: 82026 - RNA, 19 nt, Homo sapiens
  misc_RNA (1)...(19): siRNA sense strand
gcacacagaugaugaaaug

SEQ ID NO: 82027 - RNA, 19 nt, Homo sapiens
  misc_RNA (1)...(19): siRNA sense strand
ggaauucaaugauguguau

SEQ ID NO: 82028 - RNA, 19 nt, Homo sapiens
  misc_RNA (1)...(19): siRNA sense strand
gaacugcgguuacuuaaac

SEQ ID NO: 82029 - RNA, 19 nt, Homo sapiens
  misc_RNA (1)...(19): siRNA sense strand
caaggucucuggaggaauu

SEQ ID NO: 82030 - RNA, 19 nt, Homo sapiens
  misc_RNA (1)...(19): siRNA sense strand
gucagaagcuuacagauga

SEQ ID NO: 82031 - RNA, 19 nt, Homo sapiens
  misc_RNA (1)...(19): siRNA sense strand
gggcagaucugaacaacau

SEQ ID NO: 82032 - RNA, 19 nt, Homo sapiens
  misc_RNA (1)...(19): siRNA sense strand
gaaaagaaccuacagagaa

SEQ ID NO: 82033 - RNA, 19 nt, Homo sapiens
  misc_RNA (1)...(19): siRNA sense strand
acauucagcugacauaauu

SEQ ID NO: 82034 - RNA, 19 nt, Homo sapiens
  misc_RNA (1)...(19): siRNA sense strand
caaauucuccgaggucuaa

SEQ ID NO: 82035 - RNA, 19 nt, Homo sapiens
  misc_RNA (1)...(19): siRNA sense strand
gaagcucuccagaccauuu

SEQ ID NO: 82036 - RNA, 19 nt, Homo sapiens
  misc_RNA (1)...(19): siRNA sense strand
gcuuacagaugaccauguu

SEQ ID NO: 82037 - RNA, 19 nt, Homo sapiens
  misc_RNA (1)...(19): siRNA sense strand
ugaacuggaugcauuacaa

SEQ ID NO: 82038 - RNA, 19 nt, Homo sapiens
  misc_RNA (1)...(19): siRNA sense strand
uaaucuagcugugaaugaa

SEQ ID NO: 82039 - RNA, 19 nt, Homo sapiens
  misc_RNA (1)...(19): siRNA sense strand
agagaacugcgguuacuua

SEQ ID NO: 82040 - RNA, 19 nt, Homo sapiens
  misc_RNA (1)...(19): siRNA sense strand
gagaacugcgguuacuuaa

SEQ ID NO: 82041 - RNA, 19 nt, Homo sapiens
  misc_RNA (1)...(19): siRNA sense strand
ggcaggagcugaacaagac

SEQ ID NO: 82042 - RNA, 19 nt, Homo sapiens
  misc_RNA (1)...(19): siRNA sense strand
ccagacaguugauauuugg

SEQ ID NO: 82043 - RNA, 19 nt, Homo sapiens
  misc_RNA (1)...(19): siRNA sense strand
cuacagagaacugcgguua

SEQ ID NO: 82044 - RNA, 19 nt, Homo sapiens
  misc_RNA (1)...(19): siRNA sense strand
ucagugggaugcauaaugg

SEQ ID NO: 82045 - RNA, 19 nt, Homo sapiens
  misc_RNA (1)...(19): siRNA sense strand
ucuccgaggucuaaaguau

SEQ ID NO: 82046 - RNA, 19 nt, Homo sapiens
  misc_RNA (1)...(19): siRNA sense strand
gagcugaagauucuggauu

SEQ ID NO: 82047 - RNA, 19 nt, Homo sapiens
  misc_RNA (1)...(19): siRNA sense strand
cauaauggccgagcuguug

SEQ ID NO: 82048 - RNA, 19 nt, Homo sapiens
  misc_RNA (1)...(19): siRNA sense strand
gcagaucugaacaacauug

SEQ ID NO: 82049 - RNA, 19 nt, Homo sapiens
  misc_RNA (1)...(19): siRNA sense strand
cagaugaccauguucaguu

SEQ ID NO: 82050 - RNA, 19 nt, Homo sapiens
  misc_RNA (1)...(19): siRNA sense strand
gaccauguucaguuccuua

SEQ ID NO: 82051 - RNA, 19 nt, Homo sapiens
  misc_RNA (1)...(19): siRNA sense strand
ccauuucaguccaucauuc

SEQ ID NO: 82052 - RNA, 19 nt, Homo sapiens
  misc_RNA (1)...(19): siRNA sense strand
gcgguuacuuaaacauaug

SEQ ID NO: 82053 - RNA, 19 nt, Homo sapiens
  misc_RNA (1)...(19): siRNA sense strand
gagcugaacaagacaaucu

SEQ ID NO: 82054 - RNA, 19 nt, Homo sapiens
  misc_RNA (1)...(19): siRNA sense strand
ccuaaaaccuaguaaucua

SEQ ID NO: 82055 - RNA, 19 nt, Homo sapiens
  misc_RNA (1)...(19): siRNA sense strand
guaaucuagcugugaauga

SEQ ID NO: 82056 - RNA, 19 nt, Homo sapiens
  misc_RNA (1)...(19): siRNA sense strand
cauguucaguuccuuaucu

SEQ ID NO: 82057 - RNA, 19 nt, Homo sapiens
  misc_RNA (1)...(19): siRNA sense strand
gccgagcuguugacuggaa

SEQ ID NO: 82058 - RNA, 19 nt, Homo sapiens
  misc_RNA (1)...(19): siRNA sense strand
aaaugugauuggucuguug

SEQ ID NO: 82059 - RNA, 19 nt, Homo sapiens
  misc_RNA (1)...(19): siRNA sense strand
acugugagcugaagauucu

SEQ ID NO: 82060 - RNA, 19 nt, Homo sapiens
  misc_RNA (1)...(19): siRNA sense strand
uccgaggucuaaaguauau

SEQ ID NO: 82061 - RNA, 19 nt, Homo sapiens
  misc_RNA (1)...(19): siRNA sense strand
uuccuuaucuaccaaauuc

SEQ ID NO: 82062 - RNA, 19 nt, Homo sapiens
  misc_RNA (1)...(19): siRNA sense strand
aagaagcucuccagaccau

SEQ ID NO: 82063 - RNA, 19 nt, Homo sapiens
  misc_RNA (1)...(19): siRNA sense strand
agcugaagauucuggauuu

SEQ ID NO: 82064 - RNA, 19 nt, Homo sapiens
  misc_RNA (1)...(19): siRNA sense strand
uggaggaauucaaugaugu

SEQ ID NO: 82065 - RNA, 19 nt, Homo sapiens
  misc_RNA (1)...(19): siRNA sense strand
guccaucauucaugcgaaa

SEQ ID NO: 82066 - RNA, 19 nt, Homo sapiens
  misc_RNA (1)...(19): siRNA sense strand
gugaaaugucagaagcuua

SEQ ID NO: 82067 - RNA, 19 nt, Homo sapiens
  misc_RNA (1)...(19): siRNA sense strand
ugucagaagcuuacagaug

SEQ ID NO: 82068 - RNA, 19 nt, Homo sapiens
  misc_RNA (1)...(19): siRNA sense strand
ggaggaauucaaugaugug

SEQ ID NO: 82069 - RNA, 19 nt, Homo sapiens
  misc_RNA (1)...(19): siRNA sense strand
cacagaugaugaaaugaca

SEQ ID NO: 82070 - RNA, 19 nt, Homo sapiens
  misc_RNA (1)...(19): siRNA sense strand
acagagaacugcgguuacu

SEQ ID NO: 82071 - RNA, 19 nt, Homo sapiens
  misc_RNA (1)...(19): siRNA sense strand
cuccugagaucaugcugaa

SEQ ID NO: 82072 - RNA, 19 nt, Homo sapiens
  misc_RNA (1)...(19): siRNA sense strand
cuggaggaauucaaugaug

SEQ ID NO: 82073 - RNA, 19 nt, Homo sapiens
  misc_RNA (1)...(19): siRNA sense strand
ugaaaugucagaagcuuac

SEQ ID NO: 82074 - RNA, 19 nt, Homo sapiens
  misc_RNA (1)...(19): siRNA sense strand
gcauaauggccgagcuguu

SEQ ID NO: 82075 - RNA, 19 nt, Homo sapiens
  misc_RNA (1)...(19): siRNA sense strand
gaacuggaugcauuacaac

SEQ ID NO: 82076 - RNA, 19 nt, Homo sapiens
  misc_RNA (1)...(19): siRNA sense strand
agaugaccauguucaguuc

SEQ ID NO: 82077 - RNA, 19 nt, Homo sapiens
  misc_RNA (1)...(19): siRNA sense strand
aaccagacaguugauauuu

SEQ ID NO: 82078 - RNA, 19 nt, Homo sapiens
  misc_RNA (1)...(19): siRNA sense strand
accagacaguugauauuug

SEQ ID NO: 82079 - RNA, 19 nt, Homo sapiens
  misc_RNA (1)...(19): siRNA sense strand
ugugaaaugucagaagcuu

SEQ ID NO: 82080 - RNA, 19 nt, Homo sapiens
  misc_RNA (1)...(19): siRNA sense strand
caggcuacguggccacuag

SEQ ID NO: 82081 - RNA, 19 nt, Homo sapiens
  misc_RNA (1)...(19): siRNA sense strand
uauacauucagcugacaua

SEQ ID NO: 82082 - RNA, 19 nt, Homo sapiens
  misc_RNA (1)...(19): siRNA sense strand
uuacagaugaccauguuca

SEQ ID NO: 82083 - RNA, 19 nt, Homo sapiens
  misc_RNA (1)...(19): siRNA sense strand
ugaagacugugagcugaag

SEQ ID NO: 82084 - RNA, 19 nt, Homo sapiens
  misc_RNA (1)...(19): siRNA sense strand
ugcgguuacuuaaacauau

SEQ ID NO: 82085 - RNA, 19 nt, Homo sapiens
  misc_RNA (1)...(19): siRNA sense strand
ugcaaggucucuggaggaa

SEQ ID NO: 82086 - RNA, 19 nt, Homo sapiens
  misc_RNA (1)...(19): siRNA sense strand
gguuacguguggcagugaa

SEQ ID NO: 82087 - RNA, 19 nt, Homo sapiens
  misc_RNA (1)...(19): siRNA sense strand
aggagaggcccacguucua

SEQ ID NO: 82088 - RNA, 19 nt, Homo sapiens
  misc_RNA (1)...(19): siRNA sense strand
gcauuacaaccagacaguu

SEQ ID NO: 82089 - RNA, 19 nt, Homo sapiens
  misc_RNA (1)...(19): siRNA sense strand
ucaguuccuuaucuaccaa

SEQ ID NO: 82090 - RNA, 19 nt, Homo sapiens
  misc_RNA (1)...(19): siRNA sense strand
cggcaggagcugaacaaga

SEQ ID NO: 82091 - RNA, 19 nt, Homo sapiens
  misc_RNA (1)...(19): siRNA sense strand
aaaagaaccuacagagaac

SEQ ID NO: 82092 - RNA, 19 nt, Homo sapiens
  misc_RNA (1)...(19): siRNA sense strand
gaagacugugagcugaaga

SEQ ID NO: 82093 - RNA, 19 nt, Homo sapiens
  misc_RNA (1)...(19): siRNA sense strand
ccaaauucuccgaggucua

SEQ ID NO: 82094 - RNA, 19 nt, Homo sapiens
  misc_RNA (1)...(19): siRNA sense strand
ggagaggcccacguucuac

SEQ ID NO: 82095 - RNA, 19 nt, Homo sapiens
  misc_RNA (1)...(19): siRNA sense strand
ccagaccauuucaguccau

SEQ ID NO: 82096 - RNA, 19 nt, Homo sapiens
  misc_RNA (1)...(19): siRNA sense strand
caguugauauuuggucagu

SEQ ID NO: 82097 - RNA, 19 nt, Homo sapiens
  misc_RNA (1)...(19): siRNA sense strand
gcacacagaugaugaaaug

SEQ ID NO: 82098 - RNA, 19 nt, Homo sapiens
  misc_RNA (1)...(19): siRNA sense strand
ggaauucaaugauguguau

SEQ ID NO: 82099 - RNA, 19 nt, Homo sapiens
  misc_RNA (1)...(19): siRNA sense strand
gaacugcgguuacuuaaac

SEQ ID NO: 82100 - RNA, 19 nt, Homo sapiens
  misc_RNA (1)...(19): siRNA sense strand
caaggucucuggaggaauu

SEQ ID NO: 82101 - RNA, 19 nt, Homo sapiens
  misc_RNA (1)...(19): siRNA sense strand
gucagaagcuuacagauga

SEQ ID NO: 82102 - RNA, 19 nt, Homo sapiens
  misc_RNA (1)...(19): siRNA sense strand
gggcagaucugaacaacau

SEQ ID NO: 82103 - RNA, 19 nt, Homo sapiens
  misc_RNA (1)...(19): siRNA sense strand
gaaaagaaccuacagagaa

SEQ ID NO: 82104 - RNA, 19 nt, Homo sapiens
  misc_RNA (1)...(19): siRNA sense strand
acauucagcugacauaauu

SEQ ID NO: 82105 - RNA, 19 nt, Homo sapiens
  misc_RNA (1)...(19): siRNA sense strand
caaauucuccgaggucuaa

SEQ ID NO: 82106 - RNA, 19 nt, Homo sapiens
  misc_RNA (1)...(19): siRNA sense strand
gaagcucuccagaccauuu

SEQ ID NO: 82107 - RNA, 19 nt, Homo sapiens
  misc_RNA (1)...(19): siRNA sense strand
gcuuacagaugaccauguu

SEQ ID NO: 82108 - RNA, 19 nt, Homo sapiens
  misc_RNA (1)...(19): siRNA sense strand
ugaacuggaugcauuacaa

SEQ ID NO: 82109 - RNA, 19 nt, Homo sapiens
  misc_RNA (1)...(19): siRNA sense strand
uaaucuagcugugaaugaa

SEQ ID NO: 82110 - RNA, 19 nt, Homo sapiens
  misc_RNA (1)...(19): siRNA sense strand
agagaacugcgguuacuua

SEQ ID NO: 82111 - RNA, 19 nt, Homo sapiens
  misc_RNA (1)...(19): siRNA sense strand
gagaacugcgguuacuuaa

SEQ ID NO: 82112 - RNA, 19 nt, Homo sapiens
  misc_RNA (1)...(19): siRNA sense strand
ggcaggagcugaacaagac

SEQ ID NO: 82113 - RNA, 19 nt, Homo sapiens
  misc_RNA (1)...(19): siRNA sense strand
ccagacaguugauauuugg

SEQ ID NO: 82114 - RNA, 19 nt, Homo sapiens
  misc_RNA (1)...(19): siRNA sense strand
cuacagagaacugcgguua

SEQ ID NO: 82115 - RNA, 19 nt, Homo sapiens
  misc_RNA (1)...(19): siRNA sense strand
ucagugggaugcauaaugg

SEQ ID NO: 82116 - RNA, 19 nt, Homo sapiens
  misc_RNA (1)...(19): siRNA sense strand
ucuccgaggucuaaaguau

SEQ ID NO: 82117 - RNA, 19 nt, Homo sapiens
  misc_RNA (1)...(19): siRNA sense strand
gagcugaagauucuggauu

SEQ ID NO: 82118 - RNA, 19 nt, Homo sapiens
  misc_RNA (1)...(19): siRNA sense strand
cauaauggccgagcuguug

SEQ ID NO: 82119 - RNA, 19 nt, Homo sapiens
  misc_RNA (1)...(19): siRNA sense strand
gcagaucugaacaacauug

SEQ ID NO: 82120 - RNA, 19 nt, Homo sapiens
  misc_RNA (1)...(19): siRNA sense strand
cagaugaccauguucaguu

SEQ ID NO: 82121 - RNA, 19 nt, Homo sapiens
  misc_RNA (1)...(19): siRNA sense strand
gaccauguucaguuccuua

SEQ ID NO: 82122 - RNA, 19 nt, Homo sapiens
  misc_RNA (1)...(19): siRNA sense strand
ccauuucaguccaucauuc

SEQ ID NO: 82123 - RNA, 19 nt, Homo sapiens
  misc_RNA (1)...(19): siRNA sense strand
gcgguuacuuaaacauaug

SEQ ID NO: 82124 - RNA, 19 nt, Homo sapiens
  misc_RNA (1)...(19): siRNA sense strand
gagcugaacaagacaaucu

SEQ ID NO: 82125 - RNA, 19 nt, Homo sapiens
  misc_RNA (1)...(19): siRNA sense strand
ccuaaaaccuaguaaucua

SEQ ID NO: 82126 - RNA, 19 nt, Homo sapiens
  misc_RNA (1)...(19): siRNA sense strand
guaaucuagcugugaauga

SEQ ID NO: 82127 - RNA, 19 nt, Homo sapiens
  misc_RNA (1)...(19): siRNA sense strand
cauguucaguuccuuaucu

SEQ ID NO: 82128 - RNA, 19 nt, Homo sapiens
  misc_RNA (1)...(19): siRNA sense strand
gccgagcuguugacuggaa

SEQ ID NO: 82129 - RNA, 19 nt, Homo sapiens
  misc_RNA (1)...(19): siRNA sense strand
aaaugugauuggucuguug

SEQ ID NO: 82130 - RNA, 19 nt, Homo sapiens
  misc_RNA (1)...(19): siRNA sense strand
acugugagcugaagauucu

SEQ ID NO: 82131 - RNA, 19 nt, Homo sapiens
  misc_RNA (1)...(19): siRNA sense strand
uccgaggucuaaaguauau

SEQ ID NO: 82132 - RNA, 19 nt, Homo sapiens
  misc_RNA (1)...(19): siRNA sense strand
uuccuuaucuaccaaauuc

SEQ ID NO: 82133 - RNA, 19 nt, Homo sapiens
  misc_RNA (1)...(19): siRNA sense strand
aagaagcucuccagaccau

SEQ ID NO: 82134 - RNA, 19 nt, Homo sapiens
  misc_RNA (1)...(19): siRNA sense strand
agcugaagauucuggauuu

SEQ ID NO: 82135 - RNA, 19 nt, Homo sapiens
  misc_RNA (1)...(19): siRNA sense strand
uggaggaauucaaugaugu

SEQ ID NO: 82136 - RNA, 19 nt, Homo sapiens
  misc_RNA (1)...(19): siRNA sense strand
guccaucauucaugcgaaa

SEQ ID NO: 82137 - RNA, 19 nt, Homo sapiens
  misc_RNA (1)...(19): siRNA sense strand
gugaaaugucagaagcuua

SEQ ID NO: 82138 - RNA, 19 nt, Homo sapiens
  misc_RNA (1)...(19): siRNA sense strand
ugucagaagcuuacagaug

SEQ ID NO: 82139 - RNA, 19 nt, Homo sapiens
  misc_RNA (1)...(19): siRNA sense strand
ggaggaauucaaugaugug

SEQ ID NO: 82140 - RNA, 19 nt, Homo sapiens
  misc_RNA (1)...(19): siRNA sense strand
cacagaugaugaaaugaca

SEQ ID NO: 82141 - RNA, 19 nt, Homo sapiens
  misc_RNA (1)...(19): siRNA sense strand
acagagaacugcgguuacu

SEQ ID NO: 82142 - RNA, 19 nt, Homo sapiens
  misc_RNA (1)...(19): siRNA sense strand
cuccugagaucaugcugaa

SEQ ID NO: 82143 - RNA, 19 nt, Homo sapiens
  misc_RNA (1)...(19): siRNA sense strand
cuggaggaauucaaugaug

SEQ ID NO: 82144 - RNA, 19 nt, Homo sapiens
  misc_RNA (1)...(19): siRNA sense strand
ugaaaugucagaagcuuac

SEQ ID NO: 82145 - RNA, 19 nt, Homo sapiens
  misc_RNA (1)...(19): siRNA sense strand
gcauaauggccgagcuguu

SEQ ID NO: 82146 - RNA, 19 nt, Homo sapiens
  misc_RNA (1)...(19): siRNA sense strand
gaacuggaugcauuacaac

SEQ ID NO: 82147 - RNA, 19 nt, Homo sapiens
  misc_RNA (1)...(19): siRNA sense strand
agaugaccauguucaguuc

SEQ ID NO: 82148 - RNA, 19 nt, Homo sapiens
  misc_RNA (1)...(19): siRNA sense strand
aaccagacaguugauauuu

SEQ ID NO: 82149 - RNA, 19 nt, Homo sapiens
  misc_RNA (1)...(19): siRNA sense strand
accagacaguugauauuug

SEQ ID NO: 82150 - RNA, 19 nt, Homo sapiens
  misc_RNA (1)...(19): siRNA sense strand
ugugaaaugucagaagcuu

SEQ ID NO: 82151 - RNA, 19 nt, Homo sapiens
  misc_RNA (1)...(19): siRNA sense strand
caggcuacguggccacuag

SEQ ID NO: 82152 - RNA, 19 nt, Homo sapiens
  misc_RNA (1)...(19): siRNA sense strand
uauacauucagcugacaua

SEQ ID NO: 82153 - RNA, 19 nt, Homo sapiens
  misc_RNA (1)...(19): siRNA sense strand
uuacagaugaccauguuca

SEQ ID NO: 82154 - RNA, 19 nt, Homo sapiens
  misc_RNA (1)...(19): siRNA sense strand
ugaagacugugagcugaag

SEQ ID NO: 82155 - RNA, 19 nt, Homo sapiens
  misc_RNA (1)...(19): siRNA sense strand
ugcgguuacuuaaacauau

SEQ ID NO: 82156 - RNA, 19 nt, Homo sapiens
  misc_RNA (1)...(19): siRNA sense strand
ugcaaggucucuggaggaa

SEQ ID NO: 82157 - RNA, 19 nt, Homo sapiens
  misc_RNA (1)...(19): siRNA sense strand
gguuacguguggcagugaa

SEQ ID NO: 82158 - RNA, 19 nt, Homo sapiens
  misc_RNA (1)...(19): siRNA sense strand
aggagaggcccacguucua

SEQ ID NO: 82159 - RNA, 19 nt, Homo sapiens
  misc_RNA (1)...(19): siRNA sense strand
gcauuacaaccagacaguu

SEQ ID NO: 82160 - RNA, 19 nt, Homo sapiens
  misc_RNA (1)...(19): siRNA sense strand
ucaguuccuuaucuaccaa

SEQ ID NO: 82161 - RNA, 19 nt, Homo sapiens
  misc_RNA (1)...(19): siRNA sense strand
cggcaggagcugaacaaga

SEQ ID NO: 82162 - RNA, 19 nt, Homo sapiens
  misc_RNA (1)...(19): siRNA sense strand
aaaagaaccuacagagaac

SEQ ID NO: 82163 - RNA, 19 nt, Homo sapiens
  misc_RNA (1)...(19): siRNA sense strand
gaagacugugagcugaaga

SEQ ID NO: 82164 - RNA, 19 nt, Homo sapiens
  misc_RNA (1)...(19): siRNA sense strand
ccaaauucuccgaggucua

SEQ ID NO: 82165 - RNA, 19 nt, Homo sapiens
  misc_RNA (1)...(19): siRNA sense strand
ggagaggcccacguucuac

SEQ ID NO: 82166 - RNA, 19 nt, Homo sapiens
  misc_RNA (1)...(19): siRNA sense strand
ccagaccauuucaguccau

SEQ ID NO: 82167 - RNA, 19 nt, Homo sapiens
  misc_RNA (1)...(19): siRNA sense strand
caguugauauuuggucagu

SEQ ID NO: 82168 - RNA, 19 nt, Homo sapiens
  misc_RNA (1)...(19): siRNA sense strand
gcacacagaugaugaaaug

SEQ ID NO: 82169 - RNA, 19 nt, Homo sapiens
  misc_RNA (1)...(19): siRNA sense strand
ggaauucaaugauguguau

SEQ ID NO: 82170 - RNA, 19 nt, Homo sapiens
  misc_RNA (1)...(19): siRNA sense strand
gaacugcgguuacuuaaac

SEQ ID NO: 82171 - RNA, 19 nt, Homo sapiens
  misc_RNA (1)...(19): siRNA sense strand
caaggucucuggaggaauu

SEQ ID NO: 82172 - RNA, 19 nt, Homo sapiens
  misc_RNA (1)...(19): siRNA sense strand
gucagaagcuuacagauga

SEQ ID NO: 82173 - RNA, 19 nt, Homo sapiens
  misc_RNA (1)...(19): siRNA sense strand
gggcagaucugaacaacau

SEQ ID NO: 82174 - RNA, 19 nt, Homo sapiens
  misc_RNA (1)...(19): siRNA sense strand
gaaaagaaccuacagagaa

SEQ ID NO: 82175 - RNA, 19 nt, Homo sapiens
  misc_RNA (1)...(19): siRNA sense strand
acauucagcugacauaauu

SEQ ID NO: 82176 - RNA, 19 nt, Homo sapiens
  misc_RNA (1)...(19): siRNA sense strand
caaauucuccgaggucuaa

SEQ ID NO: 82177 - RNA, 19 nt, Homo sapiens
  misc_RNA (1)...(19): siRNA sense strand
gaagcucuccagaccauuu

SEQ ID NO: 82178 - RNA, 19 nt, Homo sapiens
  misc_RNA (1)...(19): siRNA sense strand
gcuuacagaugaccauguu

SEQ ID NO: 82179 - RNA, 19 nt, Homo sapiens
  misc_RNA (1)...(19): siRNA sense strand
ugaacuggaugcauuacaa

SEQ ID NO: 82180 - RNA, 19 nt, Homo sapiens
  misc_RNA (1)...(19): siRNA sense strand
uaaucuagcugugaaugaa

SEQ ID NO: 82181 - RNA, 19 nt, Homo sapiens
  misc_RNA (1)...(19): siRNA sense strand
agagaacugcgguuacuua

SEQ ID NO: 82182 - RNA, 19 nt, Homo sapiens
  misc_RNA (1)...(19): siRNA sense strand
gagaacugcgguuacuuaa

SEQ ID NO: 82183 - RNA, 19 nt, Homo sapiens
  misc_RNA (1)...(19): siRNA sense strand
ggcaggagcugaacaagac

SEQ ID NO: 82184 - RNA, 19 nt, Homo sapiens
  misc_RNA (1)...(19): siRNA sense strand
ccagacaguugauauuugg

SEQ ID NO: 82185 - RNA, 19 nt, Homo sapiens
  misc_RNA (1)...(19): siRNA sense strand
cuacagagaacugcgguua

SEQ ID NO: 82186 - RNA, 19 nt, Homo sapiens
  misc_RNA (1)...(19): siRNA sense strand
ucagugggaugcauaaugg

SEQ ID NO: 82187 - RNA, 19 nt, Homo sapiens
  misc_RNA (1)...(19): siRNA sense strand
ucuccgaggucuaaaguau

SEQ ID NO: 82188 - RNA, 19 nt, Homo sapiens
  misc_RNA (1)...(19): siRNA sense strand
gagcugaagauucuggauu

SEQ ID NO: 82189 - RNA, 19 nt, Homo sapiens
  misc_RNA (1)...(19): siRNA sense strand
cauaauggccgagcuguug

SEQ ID NO: 82190 - RNA, 19 nt, Homo sapiens
  misc_RNA (1)...(19): siRNA sense strand
gcagaucugaacaacauug

SEQ ID NO: 82191 - RNA, 19 nt, Homo sapiens
  misc_RNA (1)...(19): siRNA sense strand
cagaugaccauguucaguu

SEQ ID NO: 82192 - RNA, 19 nt, Homo sapiens
  misc_RNA (1)...(19): siRNA sense strand
gaccauguucaguuccuua

SEQ ID NO: 82193 - RNA, 19 nt, Homo sapiens
  misc_RNA (1)...(19): siRNA sense strand
ccauuucaguccaucauuc

SEQ ID NO: 82194 - RNA, 19 nt, Homo sapiens
  misc_RNA (1)...(19): siRNA sense strand
gcgguuacuuaaacauaug

SEQ ID NO: 82195 - RNA, 19 nt, Homo sapiens
  misc_RNA (1)...(19): siRNA sense strand
gagcugaacaagacaaucu

SEQ ID NO: 82196 - RNA, 19 nt, Homo sapiens
  misc_RNA (1)...(19): siRNA sense strand
ccuaaaaccuaguaaucua

SEQ ID NO: 82197 - RNA, 19 nt, Homo sapiens
  misc_RNA (1)...(19): siRNA sense strand
guaaucuagcugugaauga

SEQ ID NO: 82198 - RNA, 19 nt, Homo sapiens
  misc_RNA (1)...(19): siRNA sense strand
cauguucaguuccuuaucu

SEQ ID NO: 82199 - RNA, 19 nt, Homo sapiens
  misc_RNA (1)...(19): siRNA sense strand
gccgagcuguugacuggaa

SEQ ID NO: 82200 - RNA, 19 nt, Homo sapiens
  misc_RNA (1)...(19): siRNA sense strand
aaaugugauuggucuguug

SEQ ID NO: 82201 - RNA, 19 nt, Homo sapiens
  misc_RNA (1)...(19): siRNA sense strand
acugugagcugaagauucu

SEQ ID NO: 82202 - RNA, 19 nt, Homo sapiens
  misc_RNA (1)...(19): siRNA sense strand
uccgaggucuaaaguauau

SEQ ID NO: 82203 - RNA, 19 nt, Homo sapiens
  misc_RNA (1)...(19): siRNA sense strand
uuccuuaucuaccaaauuc

SEQ ID NO: 82204 - RNA, 19 nt, Homo sapiens
  misc_RNA (1)...(19): siRNA sense strand
aagaagcucuccagaccau

SEQ ID NO: 82205 - RNA, 19 nt, Homo sapiens
  misc_RNA (1)...(19): siRNA sense strand
agcugaagauucuggauuu

SEQ ID NO: 82206 - RNA, 19 nt, Homo sapiens
  misc_RNA (1)...(19): siRNA sense strand
uggaggaauucaaugaugu

SEQ ID NO: 82207 - RNA, 19 nt, Homo sapiens
  misc_RNA (1)...(19): siRNA sense strand
guccaucauucaugcgaaa

SEQ ID NO: 82208 - RNA, 19 nt, Homo sapiens
  misc_RNA (1)...(19): siRNA sense strand
gugaaaugucagaagcuua

SEQ ID NO: 82209 - RNA, 19 nt, Homo sapiens
  misc_RNA (1)...(19): siRNA sense strand
ugucagaagcuuacagaug

SEQ ID NO: 82210 - RNA, 19 nt, Homo sapiens
  misc_RNA (1)...(19): siRNA sense strand
ggaggaauucaaugaugug

SEQ ID NO: 82211 - RNA, 19 nt, Homo sapiens
  misc_RNA (1)...(19): siRNA sense strand
cacagaugaugaaaugaca

SEQ ID NO: 82212 - RNA, 19 nt, Homo sapiens
  misc_RNA (1)...(19): siRNA sense strand
acagagaacugcgguuacu

SEQ ID NO: 82213 - RNA, 19 nt, Homo sapiens
  misc_RNA (1)...(19): siRNA sense strand
cuccugagaucaugcugaa

SEQ ID NO: 82214 - RNA, 19 nt, Homo sapiens
  misc_RNA (1)...(19): siRNA sense strand
cuggaggaauucaaugaug

SEQ ID NO: 82215 - RNA, 19 nt, Homo sapiens
  misc_RNA (1)...(19): siRNA sense strand
ugaaaugucagaagcuuac

SEQ ID NO: 82216 - RNA, 19 nt, Homo sapiens
  misc_RNA (1)...(19): siRNA sense strand
gcauaauggccgagcuguu

SEQ ID NO: 82217 - RNA, 19 nt, Homo sapiens
  misc_RNA (1)...(19): siRNA sense strand
gaacuggaugcauuacaac

SEQ ID NO: 82218 - RNA, 19 nt, Homo sapiens
  misc_RNA (1)...(19): siRNA sense strand
agaugaccauguucaguuc

SEQ ID NO: 82219 - RNA, 19 nt, Homo sapiens
  misc_RNA (1)...(19): siRNA sense strand
aaccagacaguugauauuu

SEQ ID NO: 82220 - RNA, 19 nt, Homo sapiens
  misc_RNA (1)...(19): siRNA sense strand
accagacaguugauauuug

SEQ ID NO: 82221 - RNA, 19 nt, Homo sapiens
  misc_RNA (1)...(19): siRNA sense strand
ugugaaaugucagaagcuu

SEQ ID NO: 82222 - RNA, 19 nt, Homo sapiens
  misc_RNA (1)...(19): siRNA sense strand
caggcuacguggccacuag

SEQ ID NO: 82223 - RNA, 19 nt, Homo sapiens
  misc_RNA (1)...(19): siRNA sense strand
uauacauucagcugacaua

SEQ ID NO: 82224 - RNA, 19 nt, Homo sapiens
  misc_RNA (1)...(19): siRNA sense strand
uuacagaugaccauguuca

SEQ ID NO: 82225 - RNA, 19 nt, Homo sapiens
  misc_RNA (1)...(19): siRNA sense strand
ugaagacugugagcugaag

SEQ ID NO: 82226 - RNA, 19 nt, Homo sapiens
  misc_RNA (1)...(19): siRNA sense strand
ugcgguuacuuaaacauau

SEQ ID NO: 82227 - RNA, 19 nt, Homo sapiens
  misc_RNA (1)...(19): siRNA sense strand
ugcaaggucucuggaggaa

SEQ ID NO: 82228 - RNA, 19 nt, Homo sapiens
  misc_RNA (1)...(19): siRNA sense strand
gguuacguguggcagugaa

SEQ ID NO: 82229 - RNA, 19 nt, Homo sapiens
  misc_RNA (1)...(19): siRNA sense strand
aggagaggcccacguucua

SEQ ID NO: 82230 - RNA, 19 nt, Homo sapiens
  misc_RNA (1)...(19): siRNA sense strand
gcauuacaaccagacaguu

SEQ ID NO: 82231 - RNA, 19 nt, Homo sapiens
  misc_RNA (1)...(19): siRNA sense strand
ucaguuccuuaucuaccaa

SEQ ID NO: 82232 - RNA, 19 nt, Homo sapiens
  misc_RNA (1)...(19): siRNA sense strand
cggcaggagcugaacaaga

SEQ ID NO: 82233 - RNA, 19 nt, Homo sapiens
  misc_RNA (1)...(19): siRNA sense strand
aaaagaaccuacagagaac

SEQ ID NO: 82234 - RNA, 19 nt, Homo sapiens
  misc_RNA (1)...(19): siRNA sense strand
gaagacugugagcugaaga

SEQ ID NO: 82235 - RNA, 19 nt, Homo sapiens
  misc_RNA (1)...(19): siRNA sense strand
ccaaauucuccgaggucua

SEQ ID NO: 82236 - RNA, 19 nt, Homo sapiens
  misc_RNA (1)...(19): siRNA sense strand
ggagaggcccacguucuac

SEQ ID NO: 82237 - RNA, 19 nt, Homo sapiens
  misc_RNA (1)...(19): siRNA sense strand
ccagaccauuucaguccau

SEQ ID NO: 82238 - RNA, 19 nt, Homo sapiens
  misc_RNA (1)...(19): siRNA sense strand
caguugauauuuggucagu

SEQ ID NO: 82239 - RNA, 19 nt, Homo sapiens
  misc_RNA (1)...(19): siRNA sense strand
gcacacagaugaugaaaug

SEQ ID NO: 82240 - RNA, 19 nt, Homo sapiens
  misc_RNA (1)...(19): siRNA sense strand
ggaauucaaugauguguau

SEQ ID NO: 82241 - RNA, 19 nt, Homo sapiens
  misc_RNA (1)...(19): siRNA sense strand
gaacugcgguuacuuaaac

SEQ ID NO: 82242 - RNA, 19 nt, Homo sapiens
  misc_RNA (1)...(19): siRNA sense strand
caaggucucuggaggaauu

SEQ ID NO: 82243 - RNA, 19 nt, Homo sapiens
  misc_RNA (1)...(19): siRNA sense strand
gucagaagcuuacagauga

SEQ ID NO: 82244 - RNA, 19 nt, Homo sapiens
  misc_RNA (1)...(19): siRNA sense strand
gggcagaucugaacaacau

SEQ ID NO: 82245 - RNA, 19 nt, Homo sapiens
  misc_RNA (1)...(19): siRNA sense strand
gaaaagaaccuacagagaa

SEQ ID NO: 82246 - RNA, 19 nt, Homo sapiens
  misc_RNA (1)...(19): siRNA sense strand
acauucagcugacauaauu

SEQ ID NO: 82247 - RNA, 19 nt, Homo sapiens
  misc_RNA (1)...(19): siRNA sense strand
caaauucuccgaggucuaa

SEQ ID NO: 82248 - RNA, 19 nt, Homo sapiens
  misc_RNA (1)...(19): siRNA sense strand
gaagcucuccagaccauuu

SEQ ID NO: 82249 - RNA, 19 nt, Homo sapiens
  misc_RNA (1)...(19): siRNA sense strand
gcuuacagaugaccauguu

SEQ ID NO: 82250 - RNA, 19 nt, Homo sapiens
  misc_RNA (1)...(19): siRNA sense strand
ugaacuggaugcauuacaa

SEQ ID NO: 82251 - RNA, 19 nt, Homo sapiens
  misc_RNA (1)...(19): siRNA sense strand
uaaucuagcugugaaugaa

SEQ ID NO: 82252 - RNA, 19 nt, Homo sapiens
  misc_RNA (1)...(19): siRNA sense strand
agagaacugcgguuacuua

SEQ ID NO: 82253 - RNA, 19 nt, Homo sapiens
  misc_RNA (1)...(19): siRNA sense strand
gagaacugcgguuacuuaa

SEQ ID NO: 82254 - RNA, 19 nt, Homo sapiens
  misc_RNA (1)...(19): siRNA sense strand
ggcaggagcugaacaagac

SEQ ID NO: 82255 - RNA, 19 nt, Homo sapiens
  misc_RNA (1)...(19): siRNA sense strand
ccagacaguugauauuugg

SEQ ID NO: 82256 - RNA, 19 nt, Homo sapiens
  misc_RNA (1)...(19): siRNA sense strand
cuacagagaacugcgguua

SEQ ID NO: 82257 - RNA, 19 nt, Homo sapiens
  misc_RNA (1)...(19): siRNA sense strand
ucagugggaugcauaaugg

SEQ ID NO: 82258 - RNA, 19 nt, Homo sapiens
  misc_RNA (1)...(19): siRNA sense strand
ucuccgaggucuaaaguau

SEQ ID NO: 82259 - RNA, 19 nt, Homo sapiens
  misc_RNA (1)...(19): siRNA sense strand
gagcugaagauucuggauu

SEQ ID NO: 82260 - RNA, 19 nt, Homo sapiens
  misc_RNA (1)...(19): siRNA sense strand
cauaauggccgagcuguug

SEQ ID NO: 82261 - RNA, 19 nt, Homo sapiens
  misc_RNA (1)...(19): siRNA sense strand
gcagaucugaacaacauug

SEQ ID NO: 82262 - RNA, 19 nt, Homo sapiens
  misc_RNA (1)...(19): siRNA sense strand
cagaugaccauguucaguu

SEQ ID NO: 82263 - RNA, 19 nt, Homo sapiens
  misc_RNA (1)...(19): siRNA sense strand
gaccauguucaguuccuua

SEQ ID NO: 82264 - RNA, 19 nt, Homo sapiens
  misc_RNA (1)...(19): siRNA sense strand
ccauuucaguccaucauuc

SEQ ID NO: 82265 - RNA, 19 nt, Homo sapiens
  misc_RNA (1)...(19): siRNA sense strand
gcgguuacuuaaacauaug

SEQ ID NO: 82266 - RNA, 19 nt, Homo sapiens
  misc_RNA (1)...(19): siRNA sense strand
gagcugaacaagacaaucu

SEQ ID NO: 82267 - RNA, 19 nt, Homo sapiens
  misc_RNA (1)...(19): siRNA sense strand
ccuaaaaccuaguaaucua

SEQ ID NO: 82268 - RNA, 19 nt, Homo sapiens
  misc_RNA (1)...(19): siRNA sense strand
guaaucuagcugugaauga

SEQ ID NO: 82269 - RNA, 19 nt, Homo sapiens
  misc_RNA (1)...(19): siRNA sense strand
cauguucaguuccuuaucu

SEQ ID NO: 82270 - RNA, 19 nt, Homo sapiens
  misc_RNA (1)...(19): siRNA sense strand
gccgagcuguugacuggaa

SEQ ID NO: 82271 - RNA, 19 nt, Homo sapiens
  misc_RNA (1)...(19): siRNA sense strand
aaaugugauuggucuguug

SEQ ID NO: 82272 - RNA, 19 nt, Homo sapiens
  misc_RNA (1)...(19): siRNA sense strand
acugugagcugaagauucu

SEQ ID NO: 82273 - RNA, 19 nt, Homo sapiens
  misc_RNA (1)...(19): siRNA sense strand
uccgaggucuaaaguauau

SEQ ID NO: 82274 - RNA, 19 nt, Homo sapiens
  misc_RNA (1)...(19): siRNA sense strand
uuccuuaucuaccaaauuc

SEQ ID NO: 82275 - RNA, 19 nt, Homo sapiens
  misc_RNA (1)...(19): siRNA sense strand
aagaagcucuccagaccau

SEQ ID NO: 82276 - RNA, 19 nt, Homo sapiens
  misc_RNA (1)...(19): siRNA sense strand
agcugaagauucuggauuu

SEQ ID NO: 82277 - RNA, 19 nt, Homo sapiens
  misc_RNA (1)...(19): siRNA sense strand
uggaggaauucaaugaugu

SEQ ID NO: 82278 - RNA, 19 nt, Homo sapiens
  misc_RNA (1)...(19): siRNA sense strand
guccaucauucaugcgaaa

SEQ ID NO: 82279 - RNA, 19 nt, Homo sapiens
  misc_RNA (1)...(19): siRNA sense strand
gugaaaugucagaagcuua

SEQ ID NO: 82280 - RNA, 19 nt, Homo sapiens
  misc_RNA (1)...(19): siRNA sense strand
ugucagaagcuuacagaug

SEQ ID NO: 82281 - RNA, 19 nt, Homo sapiens
  misc_RNA (1)...(19): siRNA sense strand
ggaggaauucaaugaugug

SEQ ID NO: 82282 - RNA, 19 nt, Homo sapiens
  misc_RNA (1)...(19): siRNA sense strand
cacagaugaugaaaugaca

SEQ ID NO: 82283 - RNA, 19 nt, Homo sapiens
  misc_RNA (1)...(19): siRNA sense strand
acagagaacugcgguuacu

SEQ ID NO: 82284 - RNA, 19 nt, Homo sapiens
  misc_RNA (1)...(19): siRNA sense strand
cuccugagaucaugcugaa

SEQ ID NO: 82285 - RNA, 19 nt, Homo sapiens
  misc_RNA (1)...(19): siRNA sense strand
cuggaggaauucaaugaug

SEQ ID NO: 82286 - RNA, 19 nt, Homo sapiens
  misc_RNA (1)...(19): siRNA sense strand
ugaaaugucagaagcuuac

SEQ ID NO: 82287 - RNA, 19 nt, Homo sapiens
  misc_RNA (1)...(19): siRNA sense strand
gcauaauggccgagcuguu

SEQ ID NO: 82288 - RNA, 19 nt, Homo sapiens
  misc_RNA (1)...(19): siRNA sense strand
gaacuggaugcauuacaac

SEQ ID NO: 82289 - RNA, 19 nt, Homo sapiens
  misc_RNA (1)...(19): siRNA sense strand
agaugaccauguucaguuc

SEQ ID NO: 82290 - RNA, 19 nt, Homo sapiens
  misc_RNA (1)...(19): siRNA sense strand
aaccagacaguugauauuu

SEQ ID NO: 82291 - RNA, 19 nt, Homo sapiens
  misc_RNA (1)...(19): siRNA sense strand
accagacaguugauauuug

SEQ ID NO: 82292 - RNA, 19 nt, Homo sapiens
  misc_RNA (1)...(19): siRNA sense strand
ugugaaaugucagaagcuu

SEQ ID NO: 82293 - RNA, 19 nt, Homo sapiens
  misc_RNA (1)...(19): siRNA sense strand
caggcuacguggccacuag

SEQ ID NO: 82294 - RNA, 19 nt, Homo sapiens
  misc_RNA (1)...(19): siRNA sense strand
uauacauucagcugacaua

SEQ ID NO: 82295 - RNA, 19 nt, Homo sapiens
  misc_RNA (1)...(19): siRNA sense strand
uuacagaugaccauguuca

SEQ ID NO: 82296 - RNA, 19 nt, Homo sapiens
  misc_RNA (1)...(19): siRNA sense strand
ugaagacugugagcugaag

SEQ ID NO: 82297 - RNA, 19 nt, Homo sapiens
  misc_RNA (1)...(19): siRNA sense strand
ugcgguuacuuaaacauau

SEQ ID NO: 82298 - RNA, 19 nt, Homo sapiens
  misc_RNA (1)...(19): siRNA sense strand
ugcaaggucucuggaggaa

SEQ ID NO: 82299 - RNA, 19 nt, Homo sapiens
  misc_RNA (1)...(19): siRNA sense strand
gguuacguguggcagugaa

SEQ ID NO: 82300 - RNA, 19 nt, Homo sapiens
  misc_RNA (1)...(19): siRNA sense strand
aggagaggcccacguucua

SEQ ID NO: 82301 - RNA, 19 nt, Homo sapiens
  misc_RNA (1)...(19): siRNA sense strand
gcauuacaaccagacaguu

SEQ ID NO: 82302 - RNA, 19 nt, Homo sapiens
  misc_RNA (1)...(19): siRNA sense strand
ucaguuccuuaucuaccaa

SEQ ID NO: 82303 - RNA, 19 nt, Homo sapiens
  misc_RNA (1)...(19): siRNA sense strand
cggcaggagcugaacaaga

SEQ ID NO: 82304 - RNA, 19 nt, Homo sapiens
  misc_RNA (1)...(19): siRNA sense strand
aaaagaaccuacagagaac

SEQ ID NO: 82305 - RNA, 19 nt, Homo sapiens
  misc_RNA (1)...(19): siRNA sense strand
gaagacugugagcugaaga

SEQ ID NO: 82306 - RNA, 19 nt, Homo sapiens
  misc_RNA (1)...(19): siRNA sense strand
ccaaauucuccgaggucua

SEQ ID NO: 82307 - RNA, 19 nt, Homo sapiens
  misc_RNA (1)...(19): siRNA sense strand
ggagaggcccacguucuac

SEQ ID NO: 82308 - RNA, 19 nt, Homo sapiens
  misc_RNA (1)...(19): siRNA sense strand
ccagaccauuucaguccau

SEQ ID NO: 82309 - RNA, 19 nt, Homo sapiens
  misc_RNA (1)...(19): siRNA sense strand
caguugauauuuggucagu

SEQ ID NO: 82310 - RNA, 19 nt, Homo sapiens
  misc_RNA (1)...(19): siRNA sense strand
ggaaggacauggacaaggu

SEQ ID NO: 82311 - RNA, 19 nt, Homo sapiens
  misc_RNA (1)...(19): siRNA sense strand
caaacucgcacaaccauga

SEQ ID NO: 82312 - RNA, 19 nt, Homo sapiens
  misc_RNA (1)...(19): siRNA sense strand
uggacaaggucgagacauu

SEQ ID NO: 82313 - RNA, 19 nt, Homo sapiens
  misc_RNA (1)...(19): siRNA sense strand
gcagaccuacagcaaguuu

SEQ ID NO: 82314 - RNA, 19 nt, Homo sapiens
  misc_RNA (1)...(19): siRNA sense strand
ggacugggcagauccucaa

SEQ ID NO: 82315 - RNA, 19 nt, Homo sapiens
  misc_RNA (1)...(19): siRNA sense strand
ggacaaggucgagacauuc

SEQ ID NO: 82316 - RNA, 19 nt, Homo sapiens
  misc_RNA (1)...(19): siRNA sense strand
aagcagaccuacagcaagu

SEQ ID NO: 82317 - RNA, 19 nt, Homo sapiens
  misc_RNA (1)...(19): siRNA sense strand
acgcacugcucaagaacua

SEQ ID NO: 82318 - RNA, 19 nt, Homo sapiens
  misc_RNA (1)...(19): siRNA sense strand
gggcugcucuacugcuuca

SEQ ID NO: 82319 - RNA, 19 nt, Homo sapiens
  misc_RNA (1)...(19): siRNA sense strand
ucaagcagaccuacagcaa

SEQ ID NO: 82320 - RNA, 19 nt, Homo sapiens
  misc_RNA (1)...(19): siRNA sense strand
gaacuacgggcugcucuac

SEQ ID NO: 82321 - RNA, 19 nt, Homo sapiens
  misc_RNA (1)...(19): siRNA sense strand
agaccuacagcaaguuuga

SEQ ID NO: 82322 - RNA, 19 nt, Homo sapiens
  misc_RNA (1)...(19): siRNA sense strand
ucaggaaggacauggacaa

SEQ ID NO: 82323 - RNA, 19 nt, Homo sapiens
  misc_RNA (1)...(19): siRNA sense strand
augacgcacugcucaagaa

SEQ ID NO: 82324 - RNA, 19 nt, Homo sapiens
  misc_RNA (1)...(19): siRNA sense strand
acuacgggcugcucuacug

SEQ ID NO: 82325 - RNA, 19 nt, Homo sapiens
  misc_RNA (1)...(19): siRNA sense strand
cuacagcaaguuugacaca

SEQ ID NO: 82326 - RNA, 19 nt, Homo sapiens
  misc_RNA (1)...(19): siRNA sense strand
gcagaccuacagcaaguuu

SEQ ID NO: 82327 - RNA, 19 nt, Homo sapiens
  misc_RNA (1)...(19): siRNA sense strand
ggacugggcagauccucaa

SEQ ID NO: 82328 - RNA, 19 nt, Homo sapiens
  misc_RNA (1)...(19): siRNA sense strand
aagcagaccuacagcaagu

SEQ ID NO: 82329 - RNA, 19 nt, Homo sapiens
  misc_RNA (1)...(19): siRNA sense strand
ucaagcagaccuacagcaa

SEQ ID NO: 82330 - RNA, 19 nt, Homo sapiens
  misc_RNA (1)...(19): siRNA sense strand
agaccuacagcaaguuuga

SEQ ID NO: 82331 - RNA, 19 nt, Homo sapiens
  misc_RNA (1)...(19): siRNA sense strand
ggaaggacauggacaaggu

SEQ ID NO: 82332 - RNA, 19 nt, Homo sapiens
  misc_RNA (1)...(19): siRNA sense strand
caaacucgcacaaccauga

SEQ ID NO: 82333 - RNA, 19 nt, Homo sapiens
  misc_RNA (1)...(19): siRNA sense strand
uggacaaggucgagacauu

SEQ ID NO: 82334 - RNA, 19 nt, Homo sapiens
  misc_RNA (1)...(19): siRNA sense strand
gcagaccuacagcaaguuu

SEQ ID NO: 82335 - RNA, 19 nt, Homo sapiens
  misc_RNA (1)...(19): siRNA sense strand
ggacugggcagauccucaa

SEQ ID NO: 82336 - RNA, 19 nt, Homo sapiens
  misc_RNA (1)...(19): siRNA sense strand
ggacaaggucgagacauuc

SEQ ID NO: 82337 - RNA, 19 nt, Homo sapiens
  misc_RNA (1)...(19): siRNA sense strand
aagcagaccuacagcaagu

SEQ ID NO: 82338 - RNA, 19 nt, Homo sapiens
  misc_RNA (1)...(19): siRNA sense strand
acgcacugcucaagaacua

SEQ ID NO: 82339 - RNA, 19 nt, Homo sapiens
  misc_RNA (1)...(19): siRNA sense strand
gggcugcucuacugcuuca

SEQ ID NO: 82340 - RNA, 19 nt, Homo sapiens
  misc_RNA (1)...(19): siRNA sense strand
ucaagcagaccuacagcaa

SEQ ID NO: 82341 - RNA, 19 nt, Homo sapiens
  misc_RNA (1)...(19): siRNA sense strand
gaacuacgggcugcucuac

SEQ ID NO: 82342 - RNA, 19 nt, Homo sapiens
  misc_RNA (1)...(19): siRNA sense strand
agaccuacagcaaguuuga

SEQ ID NO: 82343 - RNA, 19 nt, Homo sapiens
  misc_RNA (1)...(19): siRNA sense strand
ucaggaaggacauggacaa

SEQ ID NO: 82344 - RNA, 19 nt, Homo sapiens
  misc_RNA (1)...(19): siRNA sense strand
augacgcacugcucaagaa

SEQ ID NO: 82345 - RNA, 19 nt, Homo sapiens
  misc_RNA (1)...(19): siRNA sense strand
acuacgggcugcucuacug

SEQ ID NO: 82346 - RNA, 19 nt, Homo sapiens
  misc_RNA (1)...(19): siRNA sense strand
cuacagcaaguuugacaca

SEQ ID NO: 82347 - RNA, 19 nt, Homo sapiens
  misc_RNA (1)...(19): siRNA sense strand
gcagaccuacagcaaguuu

SEQ ID NO: 82348 - RNA, 19 nt, Homo sapiens
  misc_RNA (1)...(19): siRNA sense strand
ggacugggcagauccucaa

SEQ ID NO: 82349 - RNA, 19 nt, Homo sapiens
  misc_RNA (1)...(19): siRNA sense strand
aagcagaccuacagcaagu

SEQ ID NO: 82350 - RNA, 19 nt, Homo sapiens
  misc_RNA (1)...(19): siRNA sense strand
ucaagcagaccuacagcaa

SEQ ID NO: 82351 - RNA, 19 nt, Homo sapiens
  misc_RNA (1)...(19): siRNA sense strand
agaccuacagcaaguuuga

SEQ ID NO: 82352 - RNA, 19 nt, Homo sapiens
  misc_RNA (1)...(19): siRNA sense strand
gaagagaucuacugcaaau

SEQ ID NO: 82353 - RNA, 19 nt, Homo sapiens
  misc_RNA (1)...(19): siRNA sense strand
cagaagaggugcaguguga

SEQ ID NO: 82354 - RNA, 19 nt, Homo sapiens
  misc_RNA (1)...(19): siRNA sense strand
gcacaacaguggcaauuca

SEQ ID NO: 82355 - RNA, 19 nt, Homo sapiens
  misc_RNA (1)...(19): siRNA sense strand
caacaaauccaaacacuuc

SEQ ID NO: 82356 - RNA, 19 nt, Homo sapiens
  misc_RNA (1)...(19): siRNA sense strand
ggugaaaucuauuguaaag

SEQ ID NO: 82357 - RNA, 19 nt, Homo sapiens
  misc_RNA (1)...(19): siRNA sense strand
caacaacucugacugaaaa

SEQ ID NO: 82358 - RNA, 19 nt, Homo sapiens
  misc_RNA (1)...(19): siRNA sense strand
ggaaagcccuggcacaaaa

SEQ ID NO: 82359 - RNA, 19 nt, Homo sapiens
  misc_RNA (1)...(19): siRNA sense strand
gaaggugaaaucuauugua

SEQ ID NO: 82360 - RNA, 19 nt, Homo sapiens
  misc_RNA (1)...(19): siRNA sense strand
ucacaggccuacaacaaau

SEQ ID NO: 82361 - RNA, 19 nt, Homo sapiens
  misc_RNA (1)...(19): siRNA sense strand
gcugagaaguguuccagau

SEQ ID NO: 82362 - RNA, 19 nt, Homo sapiens
  misc_RNA (1)...(19): siRNA sense strand
gaaagaaguaugggccaaa

SEQ ID NO: 82363 - RNA, 19 nt, Homo sapiens
  misc_RNA (1)...(19): siRNA sense strand
gagaaguguuccagaugug

SEQ ID NO: 82364 - RNA, 19 nt, Homo sapiens
  misc_RNA (1)...(19): siRNA sense strand
caaauccaaacacuucuaa

SEQ ID NO: 82365 - RNA, 19 nt, Homo sapiens
  misc_RNA (1)...(19): siRNA sense strand
ugagaaguguuccagaugu

SEQ ID NO: 82366 - RNA, 19 nt, Homo sapiens
  misc_RNA (1)...(19): siRNA sense strand
uguaaaggaugcuaugcaa

SEQ ID NO: 82367 - RNA, 19 nt, Homo sapiens
  misc_RNA (1)...(19): siRNA sense strand
gaagaggugcagugugaug

SEQ ID NO: 82368 - RNA, 19 nt, Homo sapiens
  misc_RNA (1)...(19): siRNA sense strand
gcaaauccugcuacggaaa

SEQ ID NO: 82369 - RNA, 19 nt, Homo sapiens
  misc_RNA (1)...(19): siRNA sense strand
uaaaggaugcuaugcaaag

SEQ ID NO: 82370 - RNA, 19 nt, Homo sapiens
  misc_RNA (1)...(19): siRNA sense strand
gcgagaggcugggcaucaa

SEQ ID NO: 82371 - RNA, 19 nt, Homo sapiens
  misc_RNA (1)...(19): siRNA sense strand
augaagagaucuacugcaa

SEQ ID NO: 82372 - RNA, 19 nt, Homo sapiens
  misc_RNA (1)...(19): siRNA sense strand
aaaggaugcuaugcaaaga

SEQ ID NO: 82373 - RNA, 19 nt, Homo sapiens
  misc_RNA (1)...(19): siRNA sense strand
guaaaggaugcuaugcaaa

SEQ ID NO: 82374 - RNA, 19 nt, Homo sapiens
  misc_RNA (1)...(19): siRNA sense strand
caguggcaauucacgauga

SEQ ID NO: 82375 - RNA, 19 nt, Homo sapiens
  misc_RNA (1)...(19): siRNA sense strand
aaucaacaacucugacuga

SEQ ID NO: 82376 - RNA, 19 nt, Homo sapiens
  misc_RNA (1)...(19): siRNA sense strand
ucaacaacucugacugaaa

SEQ ID NO: 82377 - RNA, 19 nt, Homo sapiens
  misc_RNA (1)...(19): siRNA sense strand
ccucacaggccuacaacaa

SEQ ID NO: 82378 - RNA, 19 nt, Homo sapiens
  misc_RNA (1)...(19): siRNA sense strand
gcaucaaaccagagagugu

SEQ ID NO: 82379 - RNA, 19 nt, Homo sapiens
  misc_RNA (1)...(19): siRNA sense strand
gauaauuggagcuggaaag

SEQ ID NO: 82380 - RNA, 19 nt, Homo sapiens
  misc_RNA (1)...(19): siRNA sense strand
ccaaaaggcuacgguuaug

SEQ ID NO: 82381 - RNA, 19 nt, Homo sapiens
  misc_RNA (1)...(19): siRNA sense strand
gaugcuaugcaaagaacuu

SEQ ID NO: 82382 - RNA, 19 nt, Homo sapiens
  misc_RNA (1)...(19): siRNA sense strand
uguauaugcugccgagaag

SEQ ID NO: 82383 - RNA, 19 nt, Homo sapiens
  misc_RNA (1)...(19): siRNA sense strand
caucaaaccagagaguguu

SEQ ID NO: 82384 - RNA, 19 nt, Homo sapiens
  misc_RNA (1)...(19): siRNA sense strand
ugaagagaucuacugcaaa

SEQ ID NO: 82385 - RNA, 19 nt, Homo sapiens
  misc_RNA (1)...(19): siRNA sense strand
uacaacaaauccaaacacu

SEQ ID NO: 82386 - RNA, 19 nt, Homo sapiens
  misc_RNA (1)...(19): siRNA sense strand
caaauccugcuacggaaag

SEQ ID NO: 82387 - RNA, 19 nt, Homo sapiens
  misc_RNA (1)...(19): siRNA sense strand
aagaaggugaaaucuauug

SEQ ID NO: 82388 - RNA, 19 nt, Homo sapiens
  misc_RNA (1)...(19): siRNA sense strand
caaagugugggaagagucu

SEQ ID NO: 82389 - RNA, 19 nt, Homo sapiens
  misc_RNA (1)...(19): siRNA sense strand
acaaauccaaacacuucua

SEQ ID NO: 82390 - RNA, 19 nt, Homo sapiens
  misc_RNA (1)...(19): siRNA sense strand
uagcacaacaguggcaauu

SEQ ID NO: 82391 - RNA, 19 nt, Homo sapiens
  misc_RNA (1)...(19): siRNA sense strand
ugcuuucucugcaugguuu

SEQ ID NO: 82392 - RNA, 19 nt, Homo sapiens
  misc_RNA (1)...(19): siRNA sense strand
auauggaggugcugagaag

SEQ ID NO: 82393 - RNA, 19 nt, Homo sapiens
  misc_RNA (1)...(19): siRNA sense strand
gaggugcugagaaguguuc

SEQ ID NO: 82394 - RNA, 19 nt, Homo sapiens
  misc_RNA (1)...(19): siRNA sense strand
cgagaggcugggcaucaaa

SEQ ID NO: 82395 - RNA, 19 nt, Homo sapiens
  misc_RNA (1)...(19): siRNA sense strand
uggaaagcccuggcacaaa

SEQ ID NO: 82396 - RNA, 19 nt, Homo sapiens
  misc_RNA (1)...(19): siRNA sense strand
gagaucuacugcaaauccu

SEQ ID NO: 82397 - RNA, 19 nt, Homo sapiens
  misc_RNA (1)...(19): siRNA sense strand
uuuccgaugugcaaagugu

SEQ ID NO: 82398 - RNA, 19 nt, Homo sapiens
  misc_RNA (1)...(19): siRNA sense strand
gggcaucaaaccagagagu

SEQ ID NO: 82399 - RNA, 19 nt, Homo sapiens
  misc_RNA (1)...(19): siRNA sense strand
cuggcacgcuuaacaugga

SEQ ID NO: 82400 - RNA, 19 nt, Homo sapiens
  misc_RNA (1)...(19): siRNA sense strand
aaagaaguaugggccaaaa

SEQ ID NO: 82401 - RNA, 19 nt, Homo sapiens
  misc_RNA (1)...(19): siRNA sense strand
gaacuccucucagcuccua

SEQ ID NO: 82402 - RNA, 19 nt, Homo sapiens
  misc_RNA (1)...(19): siRNA sense strand
gcaacagcaucuacuacuu

SEQ ID NO: 82403 - RNA, 19 nt, Homo sapiens
  misc_RNA (1)...(19): siRNA sense strand
gaagcugcgcugugacuuu

SEQ ID NO: 82404 - RNA, 19 nt, Homo sapiens
  misc_RNA (1)...(19): siRNA sense strand
caacagcaucuacuacuuc

SEQ ID NO: 82405 - RNA, 19 nt, Homo sapiens
  misc_RNA (1)...(19): siRNA sense strand
ccucucagcuccuaaagca

SEQ ID NO: 82406 - RNA, 19 nt, Homo sapiens
  misc_RNA (1)...(19): siRNA sense strand
gcagcaacagcaucuacua

SEQ ID NO: 82407 - RNA, 19 nt, Homo sapiens
  misc_RNA (1)...(19): siRNA sense strand
ucaaguacuuccugacgau

SEQ ID NO: 82408 - RNA, 19 nt, Homo sapiens
  misc_RNA (1)...(19): siRNA sense strand
aggagaagcugcgcuguga

SEQ ID NO: 82409 - RNA, 19 nt, Homo sapiens
  misc_RNA (1)...(19): siRNA sense strand
gagacacgcacaucaucaa

SEQ ID NO: 82410 - RNA, 19 nt, Homo sapiens
  misc_RNA (1)...(19): siRNA sense strand
aagcugcgcugugacuuug

SEQ ID NO: 82411 - RNA, 19 nt, Homo sapiens
  misc_RNA (1)...(19): siRNA sense strand
gcuacaacaugggcagcaa

SEQ ID NO: 82412 - RNA, 19 nt, Homo sapiens
  misc_RNA (1)...(19): siRNA sense strand
acaacugugugcagaugug

SEQ ID NO: 82413 - RNA, 19 nt, Homo sapiens
  misc_RNA (1)...(19): siRNA sense strand
gagaagcugcgcugugacu

SEQ ID NO: 82414 - RNA, 19 nt, Homo sapiens
  misc_RNA (1)...(19): siRNA sense strand
cgagacacgcacaucauca

SEQ ID NO: 82415 - RNA, 19 nt, Homo sapiens
  misc_RNA (1)...(19): siRNA sense strand
gcuccuaaagcacaacugu

SEQ ID NO: 82416 - RNA, 19 nt, Homo sapiens
  misc_RNA (1)...(19): siRNA sense strand
ggagaaaccugcugucguu

SEQ ID NO: 82417 - RNA, 19 nt, Homo sapiens
  misc_RNA (1)...(19): siRNA sense strand
ggauugaccuggaauuuga

SEQ ID NO: 82418 - RNA, 19 nt, Homo sapiens
  misc_RNA (1)...(19): siRNA sense strand
gacgaacacuggucagaua

SEQ ID NO: 82419 - RNA, 19 nt, Homo sapiens
  misc_RNA (1)...(19): siRNA sense strand
uaguagagauggacaguua

SEQ ID NO: 82420 - RNA, 19 nt, Homo sapiens
  misc_RNA (1)...(19): siRNA sense strand
gaugcuauauguuccguua

SEQ ID NO: 82421 - RNA, 19 nt, Homo sapiens
  misc_RNA (1)...(19): siRNA sense strand
ggaauuugaugcagauguu

SEQ ID NO: 82422 - RNA, 19 nt, Homo sapiens
  misc_RNA (1)...(19): siRNA sense strand
gcaauuggucguucagaua

SEQ ID NO: 82423 - RNA, 19 nt, Homo sapiens
  misc_RNA (1)...(19): siRNA sense strand
ggacggcugcaucaaauua

SEQ ID NO: 82424 - RNA, 19 nt, Homo sapiens
  misc_RNA (1)...(19): siRNA sense strand
uaaagauacuugacacaga

SEQ ID NO: 82425 - RNA, 19 nt, Homo sapiens
  misc_RNA (1)...(19): siRNA sense strand
ucaaaucgaugcaucacaa

SEQ ID NO: 82426 - RNA, 19 nt, Homo sapiens
  misc_RNA (1)...(19): siRNA sense strand
gaaccaaagugggcuugaa

SEQ ID NO: 82427 - RNA, 19 nt, Homo sapiens
  misc_RNA (1)...(19): siRNA sense strand
gaaguuuguucugccauuu

SEQ ID NO: 82428 - RNA, 19 nt, Homo sapiens
  misc_RNA (1)...(19): siRNA sense strand
gauggacaguuaauagcua

SEQ ID NO: 82429 - RNA, 19 nt, Homo sapiens
  misc_RNA (1)...(19): siRNA sense strand
ucaagggauuauacucuua

SEQ ID NO: 82430 - RNA, 19 nt, Homo sapiens
  misc_RNA (1)...(19): siRNA sense strand
cuaaauacauucucucaag

SEQ ID NO: 82431 - RNA, 19 nt, Homo sapiens
  misc_RNA (1)...(19): siRNA sense strand
gaagucacgugccuugcuu

SEQ ID NO: 82432 - RNA, 19 nt, Homo sapiens
  misc_RNA (1)...(19): siRNA sense strand
gauccuggcuucugguuca

SEQ ID NO: 82433 - RNA, 19 nt, Homo sapiens
  misc_RNA (1)...(19): siRNA sense strand
gaacucagcauccuacucu

SEQ ID NO: 82434 - RNA, 19 nt, Homo sapiens
  misc_RNA (1)...(19): siRNA sense strand
gugcagcgaugacuucaga

SEQ ID NO: 82435 - RNA, 19 nt, Homo sapiens
  misc_RNA (1)...(19): siRNA sense strand
acacaccgaugcuauaugu

SEQ ID NO: 82436 - RNA, 19 nt, Homo sapiens
  misc_RNA (1)...(19): siRNA sense strand
gagaggacgaucagucuuu

SEQ ID NO: 82437 - RNA, 19 nt, Homo sapiens
  misc_RNA (1)...(19): siRNA sense strand
gcuaaacuuugggaaauau

SEQ ID NO: 82438 - RNA, 19 nt, Homo sapiens
  misc_RNA (1)...(19): siRNA sense strand
gcaguucaguaugcaauug

SEQ ID NO: 82439 - RNA, 19 nt, Homo sapiens
  misc_RNA (1)...(19): siRNA sense strand
uaaaggaccaugccgugua

SEQ ID NO: 82440 - RNA, 19 nt, Homo sapiens
  misc_RNA (1)...(19): siRNA sense strand
gcugaugcuucgauaaaga

SEQ ID NO: 82441 - RNA, 19 nt, Homo sapiens
  misc_RNA (1)...(19): siRNA sense strand
ucuacaagcugaucauuag

SEQ ID NO: 82442 - RNA, 19 nt, Homo sapiens
  misc_RNA (1)...(19): siRNA sense strand
gaaaagacucuguagcuaa

SEQ ID NO: 82443 - RNA, 19 nt, Homo sapiens
  misc_RNA (1)...(19): siRNA sense strand
ggaaaagacucuguagcua

SEQ ID NO: 82444 - RNA, 19 nt, Homo sapiens
  misc_RNA (1)...(19): siRNA sense strand
ugacggugcugaaguuugu

SEQ ID NO: 82445 - RNA, 19 nt, Homo sapiens
  misc_RNA (1)...(19): siRNA sense strand
gaaugagaccgcacaacaa

SEQ ID NO: 82446 - RNA, 19 nt, Homo sapiens
  misc_RNA (1)...(19): siRNA sense strand
uaucaacaccuuucaaugu

SEQ ID NO: 82447 - RNA, 19 nt, Homo sapiens
  misc_RNA (1)...(19): siRNA sense strand
uagcuaaacuuugggaaau

SEQ ID NO: 82448 - RNA, 19 nt, Homo sapiens
  misc_RNA (1)...(19): siRNA sense strand
caucacaacuuuugagaaa

SEQ ID NO: 82449 - RNA, 19 nt, Homo sapiens
  misc_RNA (1)...(19): siRNA sense strand
gcuccugcaucucaucaaa

SEQ ID NO: 82450 - RNA, 19 nt, Homo sapiens
  misc_RNA (1)...(19): siRNA sense strand
caaggacggcugcaucaaa

SEQ ID NO: 82451 - RNA, 19 nt, Homo sapiens
  misc_RNA (1)...(19): siRNA sense strand
acucuucgccuuuaugaua

SEQ ID NO: 82452 - RNA, 19 nt, Homo sapiens
  misc_RNA (1)...(19): siRNA sense strand
gauaucaacaccuuucaau

SEQ ID NO: 82453 - RNA, 19 nt, Homo sapiens
  misc_RNA (1)...(19): siRNA sense strand
gcuauauguuccguuaauu

SEQ ID NO: 82454 - RNA, 19 nt, Homo sapiens
  misc_RNA (1)...(19): siRNA sense strand
ucuggagacuuuauacuug

SEQ ID NO: 82455 - RNA, 19 nt, Homo sapiens
  misc_RNA (1)...(19): siRNA sense strand
uacauucucucaaguggaa

SEQ ID NO: 82456 - RNA, 19 nt, Homo sapiens
  misc_RNA (1)...(19): siRNA sense strand
aaagugccaugccaauaga

SEQ ID NO: 82457 - RNA, 19 nt, Homo sapiens
  misc_RNA (1)...(19): siRNA sense strand
caaauuaugggaugguguu

SEQ ID NO: 82458 - RNA, 19 nt, Homo sapiens
  misc_RNA (1)...(19): siRNA sense strand
ccagugauucgaacucuuu

SEQ ID NO: 82459 - RNA, 19 nt, Homo sapiens
  misc_RNA (1)...(19): siRNA sense strand
caagggauuauacucuuaa

SEQ ID NO: 82460 - RNA, 19 nt, Homo sapiens
  misc_RNA (1)...(19): siRNA sense strand
gcugaaauguuacguucca

SEQ ID NO: 82461 - RNA, 19 nt, Homo sapiens
  misc_RNA (1)...(19): siRNA sense strand
caacacaccgaugcuauau

SEQ ID NO: 82462 - RNA, 19 nt, Homo sapiens
  misc_RNA (1)...(19): siRNA sense strand
ucaacacaccgaugcuaua

SEQ ID NO: 82463 - RNA, 19 nt, Homo sapiens
  misc_RNA (1)...(19): siRNA sense strand
gccaauagaggucaugaug

SEQ ID NO: 82464 - RNA, 19 nt, Homo sapiens
  misc_RNA (1)...(19): siRNA sense strand
ugaaguuuguucugccauu

SEQ ID NO: 82465 - RNA, 19 nt, Homo sapiens
  misc_RNA (1)...(19): siRNA sense strand
ugacaccgcaguucaguau

SEQ ID NO: 82466 - RNA, 19 nt, Homo sapiens
  misc_RNA (1)...(19): siRNA sense strand
gaucaacacaccgaugcua

SEQ ID NO: 82467 - RNA, 19 nt, Homo sapiens
  misc_RNA (1)...(19): siRNA sense strand
gaaauguuacguuccaucu

SEQ ID NO: 82468 - RNA, 19 nt, Homo sapiens
  misc_RNA (1)...(19): siRNA sense strand
augcagauguucagacuau

SEQ ID NO: 82469 - RNA, 19 nt, Homo sapiens
  misc_RNA (1)...(19): siRNA sense strand
aaaagacucuguagcuaaa

SEQ ID NO: 82470 - RNA, 19 nt, Homo sapiens
  misc_RNA (1)...(19): siRNA sense strand
gggaugguguuucaaaucg

SEQ ID NO: 82471 - RNA, 19 nt, Homo sapiens
  misc_RNA (1)...(19): siRNA sense strand
ugaaugagaccgcacaaca

SEQ ID NO: 82472 - RNA, 19 nt, Homo sapiens
  misc_RNA (1)...(19): siRNA sense strand
aaagagccuucaaauacau

SEQ ID NO: 82473 - RNA, 19 nt, Homo sapiens
  misc_RNA (1)...(19): siRNA sense strand
guagcuaaacuuugggaaa

SEQ ID NO: 82474 - RNA, 19 nt, Homo sapiens
  misc_RNA (1)...(19): siRNA sense strand
acaugacggugcugaaguu

SEQ ID NO: 82475 - RNA, 19 nt, Homo sapiens
  misc_RNA (1)...(19): siRNA sense strand
gaugguguuucaaaucgau

SEQ ID NO: 82476 - RNA, 19 nt, Homo sapiens
  misc_RNA (1)...(19): siRNA sense strand
caucaaacucggaauggaa

SEQ ID NO: 82477 - RNA, 19 nt, Homo sapiens
  misc_RNA (1)...(19): siRNA sense strand
gcagauguucagacuaugu

SEQ ID NO: 82478 - RNA, 19 nt, Homo sapiens
  misc_RNA (1)...(19): siRNA sense strand
aaggacggcugcaucaaau

SEQ ID NO: 82479 - RNA, 19 nt, Homo sapiens
  misc_RNA (1)...(19): siRNA sense strand
gaagcugaaauguuacguu

SEQ ID NO: 82480 - RNA, 19 nt, Homo sapiens
  misc_RNA (1)...(19): siRNA sense strand
gagaucgaccacugacuga

SEQ ID NO: 82481 - RNA, 19 nt, Homo sapiens
  misc_RNA (1)...(19): siRNA sense strand
gggauugaccuggaauuug

SEQ ID NO: 82482 - RNA, 19 nt, Homo sapiens
  misc_RNA (1)...(19): siRNA sense strand
aaugagaccgcacaacaaa

SEQ ID NO: 82483 - RNA, 19 nt, Homo sapiens
  misc_RNA (1)...(19): siRNA sense strand
aaaggaccaugccguguag

SEQ ID NO: 82484 - RNA, 19 nt, Homo sapiens
  misc_RNA (1)...(19): siRNA sense strand
ggaaaaccacccagugauu

SEQ ID NO: 82485 - RNA, 19 nt, Homo sapiens
  misc_RNA (1)...(19): siRNA sense strand
gaacacuggucagauacac

SEQ ID NO: 82486 - RNA, 19 nt, Homo sapiens
  misc_RNA (1)...(19): siRNA sense strand
gauucgaacucuuuaugac

SEQ ID NO: 82487 - RNA, 19 nt, Homo sapiens
  misc_RNA (1)...(19): siRNA sense strand
ucacgugccuugcuuucca

SEQ ID NO: 82488 - RNA, 19 nt, Homo sapiens
  misc_RNA (1)...(19): siRNA sense strand
ggacagccgagcggagaaa

SEQ ID NO: 82489 - RNA, 19 nt, Homo sapiens
  misc_RNA (1)...(19): siRNA sense strand
ggacgaacacuggucagau

SEQ ID NO: 82490 - RNA, 19 nt, Homo sapiens
  misc_RNA (1)...(19): siRNA sense strand
ggaccaugccguguagcua

SEQ ID NO: 82491 - RNA, 19 nt, Homo sapiens
  misc_RNA (1)...(19): siRNA sense strand
acaauucuagugccaauau

SEQ ID NO: 82492 - RNA, 19 nt, Homo sapiens
  misc_RNA (1)...(19): siRNA sense strand
uuacaauucuagugccaau

SEQ ID NO: 82493 - RNA, 19 nt, Homo sapiens
  misc_RNA (1)...(19): siRNA sense strand
gagaggauguuggccaaaa

SEQ ID NO: 82494 - RNA, 19 nt, Homo sapiens
  misc_RNA (1)...(19): siRNA sense strand
aaaucaagccucagucugu

SEQ ID NO: 82495 - RNA, 19 nt, Homo sapiens
  misc_RNA (1)...(19): siRNA sense strand
guagagauggacaguuaau

SEQ ID NO: 82496 - RNA, 19 nt, Homo sapiens
  misc_RNA (1)...(19): siRNA sense strand
gauaaagauacuugacaca

SEQ ID NO: 82497 - RNA, 19 nt, Homo sapiens
  misc_RNA (1)...(19): siRNA sense strand
gccaauauguacguaacug

SEQ ID NO: 82498 - RNA, 19 nt, Homo sapiens
  misc_RNA (1)...(19): siRNA sense strand
ccaaagugggcuugaagga

SEQ ID NO: 82499 - RNA, 19 nt, Homo sapiens
  misc_RNA (1)...(19): siRNA sense strand
aaaagagccuucaaauaca

SEQ ID NO: 82500 - RNA, 19 nt, Homo sapiens
  misc_RNA (1)...(19): siRNA sense strand
gcuacugggucugcugaug

SEQ ID NO: 82501 - RNA, 19 nt, Homo sapiens
  misc_RNA (1)...(19): siRNA sense strand
agagauggacaguuaauag

SEQ ID NO: 82502 - RNA, 19 nt, Homo sapiens
  misc_RNA (1)...(19): siRNA sense strand
ggaugguguuucaaaucga

SEQ ID NO: 82503 - RNA, 19 nt, Homo sapiens
  misc_RNA (1)...(19): siRNA sense strand
caauauuguacgcugcaua

SEQ ID NO: 82504 - RNA, 19 nt, Homo sapiens
  misc_RNA (1)...(19): siRNA sense strand
caccgaggacuauguguug

SEQ ID NO: 82505 - RNA, 19 nt, Homo sapiens
  misc_RNA (1)...(19): siRNA sense strand
agaggacgaucagucuuug

SEQ ID NO: 82506 - RNA, 19 nt, Homo sapiens
  misc_RNA (1)...(19): siRNA sense strand
ugucacaucacauaaagga

SEQ ID NO: 82507 - RNA, 19 nt, Homo sapiens
  misc_RNA (1)...(19): siRNA sense strand
gaaauaucaacgggacgaa

SEQ ID NO: 82508 - RNA, 19 nt, Homo sapiens
  misc_RNA (1)...(19): siRNA sense strand
caauucuagugccaauaug

SEQ ID NO: 82509 - RNA, 19 nt, Homo sapiens
  misc_RNA (1)...(19): siRNA sense strand
gcaauccucaagaucaaca

SEQ ID NO: 82510 - RNA, 19 nt, Homo sapiens
  misc_RNA (1)...(19): siRNA sense strand
aauguuacguuccaucucu

SEQ ID NO: 82511 - RNA, 19 nt, Homo sapiens
  misc_RNA (1)...(19): siRNA sense strand
ccguguagcuaccuauagu

SEQ ID NO: 82512 - RNA, 19 nt, Homo sapiens
  misc_RNA (1)...(19): siRNA sense strand
gugauucgaacucuuuaug

SEQ ID NO: 82513 - RNA, 19 nt, Homo sapiens
  misc_RNA (1)...(19): siRNA sense strand
uaaccacaccgaggacuau

SEQ ID NO: 82514 - RNA, 19 nt, Homo sapiens
  misc_RNA (1)...(19): siRNA sense strand
guaugcaauuggucguuca

SEQ ID NO: 82515 - RNA, 19 nt, Homo sapiens
  misc_RNA (1)...(19): siRNA sense strand
caaauacauucaggaagcu

SEQ ID NO: 82516 - RNA, 19 nt, Homo sapiens
  misc_RNA (1)...(19): siRNA sense strand
gauggaagcucgugcaaug

SEQ ID NO: 82517 - RNA, 19 nt, Homo sapiens
  misc_RNA (1)...(19): siRNA sense strand
ggacaaugcugccagugaa

SEQ ID NO: 82518 - RNA, 19 nt, Homo sapiens
  misc_RNA (1)...(19): siRNA sense strand
ugagaaggcugcuuugauu

SEQ ID NO: 82519 - RNA, 19 nt, Homo sapiens
  misc_RNA (1)...(19): siRNA sense strand
gaacauuccuuaugaagcu

SEQ ID NO: 82520 - RNA, 19 nt, Homo sapiens
  misc_RNA (1)...(19): siRNA sense strand
gauccaaugugucaaugaa

SEQ ID NO: 82521 - RNA, 19 nt, Homo sapiens
  misc_RNA (1)...(19): siRNA sense strand
caggaaagccaaaggguua

SEQ ID NO: 82522 - RNA, 19 nt, Homo sapiens
  misc_RNA (1)...(19): siRNA sense strand
gcacggaacauguuacuuc

SEQ ID NO: 82523 - RNA, 19 nt, Homo sapiens
  misc_RNA (1)...(19): siRNA sense strand
gguuauggcuucugugaau

SEQ ID NO: 82524 - RNA, 19 nt, Homo sapiens
  misc_RNA (1)...(19): siRNA sense strand
ucaacuggcuuaugcuuug

SEQ ID NO: 82525 - RNA, 19 nt, Homo sapiens
  misc_RNA (1)...(19): siRNA sense strand
gagaaggcugcuuugauua

SEQ ID NO: 82526 - RNA, 19 nt, Homo sapiens
  misc_RNA (1)...(19): siRNA sense strand
gaacaaagaagagcugaag

SEQ ID NO: 82527 - RNA, 19 nt, Homo sapiens
  misc_RNA (1)...(19): siRNA sense strand
gaaggcugcuuugauuaug

SEQ ID NO: 82528 - RNA, 19 nt, Homo sapiens
  misc_RNA (1)...(19): siRNA sense strand
ccaagucacuccacaggau

SEQ ID NO: 82529 - RNA, 19 nt, Homo sapiens
  misc_RNA (1)...(19): siRNA sense strand
caccagagcagauguuuga

SEQ ID NO: 82530 - RNA, 19 nt, Homo sapiens
  misc_RNA (1)...(19): siRNA sense strand
ggaccuauaccuaguggaa

SEQ ID NO: 82531 - RNA, 19 nt, Homo sapiens
  misc_RNA (1)...(19): siRNA sense strand
gcacagguagugaugagaa

SEQ ID NO: 82532 - RNA, 19 nt, Homo sapiens
  misc_RNA (1)...(19): siRNA sense strand
gagcugaugaaacaaauga

SEQ ID NO: 82533 - RNA, 19 nt, Homo sapiens
  misc_RNA (1)...(19): siRNA sense strand
gcaguugaaggacaucuuu

SEQ ID NO: 82534 - RNA, 19 nt, Homo sapiens
  misc_RNA (1)...(19): siRNA sense strand
gggaggcacuuuacuuucu

SEQ ID NO: 82535 - RNA, 19 nt, Homo sapiens
  misc_RNA (1)...(19): siRNA sense strand
cggaacauguuacuucaga

SEQ ID NO: 82536 - RNA, 19 nt, Homo sapiens
  misc_RNA (1)...(19): siRNA sense strand
cugcaucgccagacaaaua

SEQ ID NO: 82537 - RNA, 19 nt, Homo sapiens
  misc_RNA (1)...(19): siRNA sense strand
gcagauguuugagcugaug

SEQ ID NO: 82538 - RNA, 19 nt, Homo sapiens
  misc_RNA (1)...(19): siRNA sense strand
cagggucccaguccaauua

SEQ ID NO: 82539 - RNA, 19 nt, Homo sapiens
  misc_RNA (1)...(19): siRNA sense strand
guuagaugccagaggauua

SEQ ID NO: 82540 - RNA, 19 nt, Homo sapiens
  misc_RNA (1)...(19): siRNA sense strand
gguauacgauagagagaca

SEQ ID NO: 82541 - RNA, 19 nt, Homo sapiens
  misc_RNA (1)...(19): siRNA sense strand
ggaaugcaaggagcaagua

SEQ ID NO: 82542 - RNA, 19 nt, Homo sapiens
  misc_RNA (1)...(19): siRNA sense strand
gcagggaacaggaaugcaa

SEQ ID NO: 82543 - RNA, 19 nt, Homo sapiens
  misc_RNA (1)...(19): siRNA sense strand
gaggacccaugcuagauca

SEQ ID NO: 82544 - RNA, 19 nt, Homo sapiens
  misc_RNA (1)...(19): siRNA sense strand
caagaggacccaugcuaga

SEQ ID NO: 82545 - RNA, 19 nt, Homo sapiens
  misc_RNA (1)...(19): siRNA sense strand
ggaggcacggaacauguua

SEQ ID NO: 82546 - RNA, 19 nt, Homo sapiens
  misc_RNA (1)...(19): siRNA sense strand
ggaacauguuacuucagaa

SEQ ID NO: 82547 - RNA, 19 nt, Homo sapiens
  misc_RNA (1)...(19): siRNA sense strand
gcaaggagcaaguauacag

SEQ ID NO: 82548 - RNA, 19 nt, Homo sapiens
  misc_RNA (1)...(19): siRNA sense strand
gguuggaccuguuguuagu

SEQ ID NO: 82549 - RNA, 19 nt, Homo sapiens
  misc_RNA (1)...(19): siRNA sense strand
ggaggcccgugcaauggaa

SEQ ID NO: 82550 - RNA, 19 nt, Homo sapiens
  misc_RNA (1)...(19): siRNA sense strand
gauggaggcccgugcaaug

SEQ ID NO: 82551 - RNA, 19 nt, Homo sapiens
  misc_RNA (1)...(19): siRNA sense strand
cagaccagauugccauguu

SEQ ID NO: 82552 - RNA, 19 nt, Homo sapiens
  misc_RNA (1)...(19): siRNA sense strand
ugaaggacaucuuuucuga

SEQ ID NO: 82553 - RNA, 19 nt, Homo sapiens
  misc_RNA (1)...(19): siRNA sense strand
ggacaucuuuucugagguu

SEQ ID NO: 82554 - RNA, 19 nt, Homo sapiens
  misc_RNA (1)...(19): siRNA sense strand
guuauggcuucugugaaua

SEQ ID NO: 82555 - RNA, 19 nt, Homo sapiens
  misc_RNA (1)...(19): siRNA sense strand
guggaucguucucuacguu

SEQ ID NO: 82556 - RNA, 19 nt, Homo sapiens
  misc_RNA (1)...(19): siRNA sense strand
gaccaagagacagcacuua

SEQ ID NO: 82557 - RNA, 19 nt, Homo sapiens
  misc_RNA (1)...(19): siRNA sense strand
gcaagcacagguagugaug

SEQ ID NO: 82558 - RNA, 19 nt, Homo sapiens
  misc_RNA (1)...(19): siRNA sense strand
guuguuaguuucagauugg

SEQ ID NO: 82559 - RNA, 19 nt, Homo sapiens
  misc_RNA (1)...(19): siRNA sense strand
cagaguauccugauuuuaa

SEQ ID NO: 82560 - RNA, 19 nt, Homo sapiens
  misc_RNA (1)...(19): siRNA sense strand
cagaggaccuauaccuagu

SEQ ID NO: 82561 - RNA, 19 nt, Homo sapiens
  misc_RNA (1)...(19): siRNA sense strand
ggaggcacuuuacuuucug

SEQ ID NO: 82562 - RNA, 19 nt, Homo sapiens
  misc_RNA (1)...(19): siRNA sense strand
gauccuugccugcgaaugu

SEQ ID NO: 82563 - RNA, 19 nt, Homo sapiens
  misc_RNA (1)...(19): siRNA sense strand
ucagauugguauacgauag

SEQ ID NO: 82564 - RNA, 19 nt, Homo sapiens
  misc_RNA (1)...(19): siRNA sense strand
gcaaguauacaggguggaa

SEQ ID NO: 82565 - RNA, 19 nt, Homo sapiens
  misc_RNA (1)...(19): siRNA sense strand
gaacauguuacuucagaac

SEQ ID NO: 82566 - RNA, 19 nt, Homo sapiens
  misc_RNA (1)...(19): siRNA sense strand
cugaagagcaguugaagga

SEQ ID NO: 82567 - RNA, 19 nt, Homo sapiens
  misc_RNA (1)...(19): siRNA sense strand
gugaauaccaagaccaaga

SEQ ID NO: 82568 - RNA, 19 nt, Homo sapiens
  misc_RNA (1)...(19): siRNA sense strand
gagcaaaggcagaguaucc

SEQ ID NO: 82569 - RNA, 19 nt, Homo sapiens
  misc_RNA (1)...(19): siRNA sense strand
ucaaugaaccagcagaauc

SEQ ID NO: 82570 - RNA, 19 nt, Homo sapiens
  misc_RNA (1)...(19): siRNA sense strand
uuaugaagcuacugaagag

SEQ ID NO: 82571 - RNA, 19 nt, Homo sapiens
  misc_RNA (1)...(19): siRNA sense strand
ucuaauggcagaaccaaga

SEQ ID NO: 82572 - RNA, 19 nt, Homo sapiens
  misc_RNA (1)...(19): siRNA sense strand
ccagacaggucccagucau

SEQ ID NO: 82573 - RNA, 19 nt, Homo sapiens
  misc_RNA (1)...(19): siRNA sense strand
cauggaggcaagaggguua

SEQ ID NO: 82574 - RNA, 19 nt, Homo sapiens
  misc_RNA (1)...(19): siRNA sense strand
gucauugagucaccuuaug

SEQ ID NO: 82575 - RNA, 19 nt, Homo sapiens
  misc_RNA (1)...(19): siRNA sense strand
gguagagccuagagguuac

SEQ ID NO: 82576 - RNA, 19 nt, Homo sapiens
  misc_RNA (1)...(19): siRNA sense strand
cacggaacauguuacuuca

SEQ ID NO: 82577 - RNA, 19 nt, Homo sapiens
  misc_RNA (1)...(19): siRNA sense strand
gcagggucccaguccaauu

SEQ ID NO: 82578 - RNA, 19 nt, Homo sapiens
  misc_RNA (1)...(19): siRNA sense strand
uggcgcaccuccucugaug

SEQ ID NO: 82579 - RNA, 19 nt, Homo sapiens
  misc_RNA (1)...(19): siRNA sense strand
gagcccagaccucuaaugg

SEQ ID NO: 82580 - RNA, 19 nt, Homo sapiens
  misc_RNA (1)...(19): siRNA sense strand
agaaggcugcuuugauuau

SEQ ID NO: 82581 - RNA, 19 nt, Homo sapiens
  misc_RNA (1)...(19): siRNA sense strand
gaggcaagaggguuagaug

SEQ ID NO: 82582 - RNA, 19 nt, Homo sapiens
  misc_RNA (1)...(19): siRNA sense strand
aaaggguuauggcuucugu

SEQ ID NO: 82583 - RNA, 19 nt, Homo sapiens
  misc_RNA (1)...(19): siRNA sense strand
aggaacaaauacagaaauc

SEQ ID NO: 82584 - RNA, 19 nt, Homo sapiens
  misc_RNA (1)...(19): siRNA sense strand
aggcagaguauccugauuu

SEQ ID NO: 82585 - RNA, 19 nt, Homo sapiens
  misc_RNA (1)...(19): siRNA sense strand
agaccagauugccauguug

SEQ ID NO: 82586 - RNA, 19 nt, Homo sapiens
  misc_RNA (1)...(19): siRNA sense strand
gagguagagccuagagguu

SEQ ID NO: 82587 - RNA, 19 nt, Homo sapiens
  misc_RNA (1)...(19): siRNA sense strand
gacaaugcugccagugaaa

SEQ ID NO: 82588 - RNA, 19 nt, Homo sapiens
  misc_RNA (1)...(19): siRNA sense strand
gauuaugcagguucuacaa

SEQ ID NO: 82589 - RNA, 19 nt, Homo sapiens
  misc_RNA (1)...(19): siRNA sense strand
ucacuccacaggaucauga

SEQ ID NO: 82590 - RNA, 19 nt, Homo sapiens
  misc_RNA (1)...(19): siRNA sense strand
gaaugcaaggagcaaguau

SEQ ID NO: 82591 - RNA, 19 nt, Homo sapiens
  misc_RNA (1)...(19): siRNA sense strand
gaggccagaggcauggaua

SEQ ID NO: 82592 - RNA, 19 nt, Homo sapiens
  misc_RNA (1)...(19): siRNA sense strand
agguagagccuagagguua

SEQ ID NO: 82593 - RNA, 19 nt, Homo sapiens
  misc_RNA (1)...(19): siRNA sense strand
gaauuguggauccggaaau

SEQ ID NO: 82594 - RNA, 19 nt, Homo sapiens
  misc_RNA (1)...(19): siRNA sense strand
uuggaccuguuguuaguuu

SEQ ID NO: 82595 - RNA, 19 nt, Homo sapiens
  misc_RNA (1)...(19): siRNA sense strand
uggcuucugugaauaccaa

SEQ ID NO: 82596 - RNA, 19 nt, Homo sapiens
  misc_RNA (1)...(19): siRNA sense strand
ggcagaguauccugauuuu

SEQ ID NO: 82597 - RNA, 19 nt, Homo sapiens
  misc_RNA (1)...(19): siRNA sense strand
ccaagagacagcacuuagu

SEQ ID NO: 82598 - RNA, 19 nt, Homo sapiens
  misc_RNA (1)...(19): siRNA sense strand
uucuguaacuggagaggua

SEQ ID NO: 82599 - RNA, 19 nt, Homo sapiens
  misc_RNA (1)...(19): siRNA sense strand
gaauaccaagaccaagaga

SEQ ID NO: 82600 - RNA, 19 nt, Homo sapiens
  misc_RNA (1)...(19): siRNA sense strand
ggacccaugcuagaucaga

SEQ ID NO: 82601 - RNA, 19 nt, Homo sapiens
  misc_RNA (1)...(19): siRNA sense strand
ggaaagccaaaggguuaug

SEQ ID NO: 82602 - RNA, 19 nt, Homo sapiens
  misc_RNA (1)...(19): siRNA sense strand
ggaccuguuguuaguuuca

SEQ ID NO: 82603 - RNA, 19 nt, Homo sapiens
  misc_RNA (1)...(19): siRNA sense strand
cagguagugaugagaauug

SEQ ID NO: 82604 - RNA, 19 nt, Homo sapiens
  misc_RNA (1)...(19): siRNA sense strand
acaaagaagagcugaagag

SEQ ID NO: 82605 - RNA, 19 nt, Homo sapiens
  misc_RNA (1)...(19): siRNA sense strand
cuuaugaagcuacugaaga

SEQ ID NO: 82606 - RNA, 19 nt, Homo sapiens
  misc_RNA (1)...(19): siRNA sense strand
gagagacaggaaagccaaa

SEQ ID NO: 82607 - RNA, 19 nt, Homo sapiens
  misc_RNA (1)...(19): siRNA sense strand
gaaagccaaaggguuaugg

SEQ ID NO: 82608 - RNA, 19 nt, Homo sapiens
  misc_RNA (1)...(19): siRNA sense strand
gauuagaggcccgugcaau

SEQ ID NO: 82609 - RNA, 19 nt, Homo sapiens
  misc_RNA (1)...(19): siRNA sense strand
gaggcacuuuacuuucugu

SEQ ID NO: 82610 - RNA, 19 nt, Homo sapiens
  misc_RNA (1)...(19): siRNA sense strand
cagauugguauacgauaga

SEQ ID NO: 82611 - RNA, 19 nt, Homo sapiens
  misc_RNA (1)...(19): siRNA sense strand
ggauccaaugugucaauga

SEQ ID NO: 82612 - RNA, 19 nt, Homo sapiens
  misc_RNA (1)...(19): siRNA sense strand
aagcacagguagugaugag

SEQ ID NO: 82613 - RNA, 19 nt, Homo sapiens
  misc_RNA (1)...(19): siRNA sense strand
ggaucguucucuacguucu

SEQ ID NO: 82614 - RNA, 19 nt, Homo sapiens
  misc_RNA (1)...(19): siRNA sense strand
cacagguagugaugagaau

SEQ ID NO: 82615 - RNA, 19 nt, Homo sapiens
  misc_RNA (1)...(19): siRNA sense strand
caugagaaggcugcuuuga

SEQ ID NO: 82616 - RNA, 19 nt, Homo sapiens
  misc_RNA (1)...(19): siRNA sense strand
ggacaaaucuguugccuuu

SEQ ID NO: 82617 - RNA, 19 nt, Homo sapiens
  misc_RNA (1)...(19): siRNA sense strand
ucaagaagcucaacaagua

SEQ ID NO: 82618 - RNA, 19 nt, Homo sapiens
  misc_RNA (1)...(19): siRNA sense strand
gaaauuauguccuaucaga

SEQ ID NO: 82619 - RNA, 19 nt, Homo sapiens
  misc_RNA (1)...(19): siRNA sense strand
ugaugaagcugcuaauaua

SEQ ID NO: 82620 - RNA, 19 nt, Homo sapiens
  misc_RNA (1)...(19): siRNA sense strand
gaauggaaauuauguccua

SEQ ID NO: 82621 - RNA, 19 nt, Homo sapiens
  misc_RNA (1)...(19): siRNA sense strand
agaaacggcuuuacuagua

SEQ ID NO: 82622 - RNA, 19 nt, Homo sapiens
  misc_RNA (1)...(19): siRNA sense strand
gauacaaguucauggauuu

SEQ ID NO: 82623 - RNA, 19 nt, Homo sapiens
  misc_RNA (1)...(19): siRNA sense strand
caucaaaucuggaagaaug

SEQ ID NO: 82624 - RNA, 19 nt, Homo sapiens
  misc_RNA (1)...(19): siRNA sense strand
gaaucaaccuauagacaaa

SEQ ID NO: 82625 - RNA, 19 nt, Homo sapiens
  misc_RNA (1)...(19): siRNA sense strand
aagcagagauuaaagcuaa

SEQ ID NO: 82626 - RNA, 19 nt, Homo sapiens
  misc_RNA (1)...(19): siRNA sense strand
gaucagacccuuauaacaa

SEQ ID NO: 82627 - RNA, 19 nt, Homo sapiens
  misc_RNA (1)...(19): siRNA sense strand
guagauauguggaagaaau

SEQ ID NO: 82628 - RNA, 19 nt, Homo sapiens
  misc_RNA (1)...(19): siRNA sense strand
guaugaagcugcccaguau

SEQ ID NO: 82629 - RNA, 19 nt, Homo sapiens
  misc_RNA (1)...(19): siRNA sense strand
acaaaucuguugccuuuaa

SEQ ID NO: 82630 - RNA, 19 nt, Homo sapiens
  misc_RNA (1)...(19): siRNA sense strand
guagauagauacaaguuca

SEQ ID NO: 82631 - RNA, 19 nt, Homo sapiens
  misc_RNA (1)...(19): siRNA sense strand
gaagaucggaguagagauu

SEQ ID NO: 82632 - RNA, 19 nt, Homo sapiens
  misc_RNA (1)...(19): siRNA sense strand
cagcacucauggaauauua

SEQ ID NO: 82633 - RNA, 19 nt, Homo sapiens
  misc_RNA (1)...(19): siRNA sense strand
uuucagagaugccuuauga

SEQ ID NO: 82634 - RNA, 19 nt, Homo sapiens
  misc_RNA (1)...(19): siRNA sense strand
ggagagacuauaacaagua

SEQ ID NO: 82635 - RNA, 19 nt, Homo sapiens
  misc_RNA (1)...(19): siRNA sense strand
gcacuuuauugaagaagaa

SEQ ID NO: 82636 - RNA, 19 nt, Homo sapiens
  misc_RNA (1)...(19): siRNA sense strand
gaagaaagcggaaaagaaa

SEQ ID NO: 82637 - RNA, 19 nt, Homo sapiens
  misc_RNA (1)...(19): siRNA sense strand
aauaacagcuguccgaaga

SEQ ID NO: 82638 - RNA, 19 nt, Homo sapiens
  misc_RNA (1)...(19): siRNA sense strand
gagagacuauaacaaguau

SEQ ID NO: 82639 - RNA, 19 nt, Homo sapiens
  misc_RNA (1)...(19): siRNA sense strand
uauagugccuguucugaaa

SEQ ID NO: 82640 - RNA, 19 nt, Homo sapiens
  misc_RNA (1)...(19): siRNA sense strand
cugcagcacucauggaaua

SEQ ID NO: 82641 - RNA, 19 nt, Homo sapiens
  misc_RNA (1)...(19): siRNA sense strand
gaagaggguaucaauauuc

SEQ ID NO: 82642 - RNA, 19 nt, Homo sapiens
  misc_RNA (1)...(19): siRNA sense strand
acaaagcacggaagacuua

SEQ ID NO: 82643 - RNA, 19 nt, Homo sapiens
  misc_RNA (1)...(19): siRNA sense strand
ugagaagucuggagaaauc

SEQ ID NO: 82644 - RNA, 19 nt, Homo sapiens
  misc_RNA (1)...(19): siRNA sense strand
gagcaacccucuucguaca

SEQ ID NO: 82645 - RNA, 19 nt, Homo sapiens
  misc_RNA (1)...(19): siRNA sense strand
ugaagaggguaucaauauu

SEQ ID NO: 82646 - RNA, 19 nt, Homo sapiens
  misc_RNA (1)...(19): siRNA sense strand
uagaagagaauccauauga

SEQ ID NO: 82647 - RNA, 19 nt, Homo sapiens
  misc_RNA (1)...(19): siRNA sense strand
ucagaauacuccucaagaa

SEQ ID NO: 82648 - RNA, 19 nt, Homo sapiens
  misc_RNA (1)...(19): siRNA sense strand
ggaaguguuaucuuucaua

SEQ ID NO: 82649 - RNA, 19 nt, Homo sapiens
  misc_RNA (1)...(19): siRNA sense strand
gaagcugugaggaucauua

SEQ ID NO: 82650 - RNA, 19 nt, Homo sapiens
  misc_RNA (1)...(19): siRNA sense strand
gaaacggcuuuacuaguag

SEQ ID NO: 82651 - RNA, 19 nt, Homo sapiens
  misc_RNA (1)...(19): siRNA sense strand
ggacaauaauacccgaguu

SEQ ID NO: 82652 - RNA, 19 nt, Homo sapiens
  misc_RNA (1)...(19): siRNA sense strand
gaagagagucgcaugaagu

SEQ ID NO: 82653 - RNA, 19 nt, Homo sapiens
  misc_RNA (1)...(19): siRNA sense strand
uguaggaucuuaugcagaa

SEQ ID NO: 82654 - RNA, 19 nt, Homo sapiens
  misc_RNA (1)...(19): siRNA sense strand
aagaugaaguggauagaaa

SEQ ID NO: 82655 - RNA, 19 nt, Homo sapiens
  misc_RNA (1)...(19): siRNA sense strand
aaaggaauaugagacagua

SEQ ID NO: 82656 - RNA, 19 nt, Homo sapiens
  misc_RNA (1)...(19): siRNA sense strand
gaaagagccauaagcacuu

SEQ ID NO: 82657 - RNA, 19 nt, Homo sapiens
  misc_RNA (1)...(19): siRNA sense strand
gaagaugcaagauaccaaa

SEQ ID NO: 82658 - RNA, 19 nt, Homo sapiens
  misc_RNA (1)...(19): siRNA sense strand
gcacagaaucaaccuauag

SEQ ID NO: 82659 - RNA, 19 nt, Homo sapiens
  misc_RNA (1)...(19): siRNA sense strand
ucuggaaacuguacauuga

SEQ ID NO: 82660 - RNA, 19 nt, Homo sapiens
  misc_RNA (1)...(19): siRNA sense strand
gagacuauaacaaguauga

SEQ ID NO: 82661 - RNA, 19 nt, Homo sapiens
  misc_RNA (1)...(19): siRNA sense strand
ucuguugccuuuaagauuu

SEQ ID NO: 82662 - RNA, 19 nt, Homo sapiens
  misc_RNA (1)...(19): siRNA sense strand
gaggaucagacccuuauaa

SEQ ID NO: 82663 - RNA, 19 nt, Homo sapiens
  misc_RNA (1)...(19): siRNA sense strand
ugaaaggcuuggaccguaa

SEQ ID NO: 82664 - RNA, 19 nt, Homo sapiens
  misc_RNA (1)...(19): siRNA sense strand
gaaaagggagauaugaaua

SEQ ID NO: 82665 - RNA, 19 nt, Homo sapiens
  misc_RNA (1)...(19): siRNA sense strand
acaaguggaugaacugaug

SEQ ID NO: 82666 - RNA, 19 nt, Homo sapiens
  misc_RNA (1)...(19): siRNA sense strand
gaguuauguuugcuuauga

SEQ ID NO: 82667 - RNA, 19 nt, Homo sapiens
  misc_RNA (1)...(19): siRNA sense strand
gaugcaagauaccaaauac

SEQ ID NO: 82668 - RNA, 19 nt, Homo sapiens
  misc_RNA (1)...(19): siRNA sense strand
uggaugaacugauggaaau

SEQ ID NO: 82669 - RNA, 19 nt, Homo sapiens
  misc_RNA (1)...(19): siRNA sense strand
ccgaagaguuuaucaacga

SEQ ID NO: 82670 - RNA, 19 nt, Homo sapiens
  misc_RNA (1)...(19): siRNA sense strand
aguuguagcuccuucuaua

SEQ ID NO: 82671 - RNA, 19 nt, Homo sapiens
  misc_RNA (1)...(19): siRNA sense strand
gguaugaagcugcccagua

SEQ ID NO: 82672 - RNA, 19 nt, Homo sapiens
  misc_RNA (1)...(19): siRNA sense strand
cuaccaaguuacaaagaaa

SEQ ID NO: 82673 - RNA, 19 nt, Homo sapiens
  misc_RNA (1)...(19): siRNA sense strand
gacaauaauacccgaguuu

SEQ ID NO: 82674 - RNA, 19 nt, Homo sapiens
  misc_RNA (1)...(19): siRNA sense strand
gagcagaaggcaucaaauc

SEQ ID NO: 82675 - RNA, 19 nt, Homo sapiens
  misc_RNA (1)...(19): siRNA sense strand
gaucggaguagagauuaua

SEQ ID NO: 82676 - RNA, 19 nt, Homo sapiens
  misc_RNA (1)...(19): siRNA sense strand
gaggguaucaauauucauu

SEQ ID NO: 82677 - RNA, 19 nt, Homo sapiens
  misc_RNA (1)...(19): siRNA sense strand
gaauaugagacaguaauga

SEQ ID NO: 82678 - RNA, 19 nt, Homo sapiens
  misc_RNA (1)...(19): siRNA sense strand
agaagaguaugaagggaaa

SEQ ID NO: 82679 - RNA, 19 nt, Homo sapiens
  misc_RNA (1)...(19): siRNA sense strand
guacauugaagcagagauu

SEQ ID NO: 82680 - RNA, 19 nt, Homo sapiens
  misc_RNA (1)...(19): siRNA sense strand
caagauaccaaauacuguu

SEQ ID NO: 82681 - RNA, 19 nt, Homo sapiens
  misc_RNA (1)...(19): siRNA sense strand
gagagcagaaggcaucaaa

SEQ ID NO: 82682 - RNA, 19 nt, Homo sapiens
  misc_RNA (1)...(19): siRNA sense strand
gcaggcagcugaguauguc

SEQ ID NO: 82683 - RNA, 19 nt, Homo sapiens
  misc_RNA (1)...(19): siRNA sense strand
gugaugaagcugcuaauau

SEQ ID NO: 82684 - RNA, 19 nt, Homo sapiens
  misc_RNA (1)...(19): siRNA sense strand
cagagaaggugaagaaagc

SEQ ID NO: 82685 - RNA, 19 nt, Homo sapiens
  misc_RNA (1)...(19): siRNA sense strand
gaaggcaucaaaucuggaa

SEQ ID NO: 82686 - RNA, 19 nt, Homo sapiens
  misc_RNA (1)...(19): siRNA sense strand
uaugaaugcuagacgugua

SEQ ID NO: 82687 - RNA, 19 nt, Homo sapiens
  misc_RNA (1)...(19): siRNA sense strand
guaaugcaguacucaccaa

SEQ ID NO: 82688 - RNA, 19 nt, Homo sapiens
  misc_RNA (1)...(19): siRNA sense strand
gaugaacugauggaaauuu

SEQ ID NO: 82689 - RNA, 19 nt, Homo sapiens
  misc_RNA (1)...(19): siRNA sense strand
aaacuucucccuccuccua

SEQ ID NO: 82690 - RNA, 19 nt, Homo sapiens
  misc_RNA (1)...(19): siRNA sense strand
uuacagcauucaaagaaga

SEQ ID NO: 82691 - RNA, 19 nt, Homo sapiens
  misc_RNA (1)...(19): siRNA sense strand
aaagacgguuuacagcauu

SEQ ID NO: 82692 - RNA, 19 nt, Homo sapiens
  misc_RNA (1)...(19): siRNA sense strand
ggcccgauuucuagcauuu

SEQ ID NO: 82693 - RNA, 19 nt, Homo sapiens
  misc_RNA (1)...(19): siRNA sense strand
gaagcugcccaguaucuug

SEQ ID NO: 82694 - RNA, 19 nt, Homo sapiens
  misc_RNA (1)...(19): siRNA sense strand
gaauccauaugaccuugau

SEQ ID NO: 82695 - RNA, 19 nt, Homo sapiens
  misc_RNA (1)...(19): siRNA sense strand
ucugaaagaugaaguggau

SEQ ID NO: 82696 - RNA, 19 nt, Homo sapiens
  misc_RNA (1)...(19): siRNA sense strand
guaguaaggacaaaucugu

SEQ ID NO: 82697 - RNA, 19 nt, Homo sapiens
  misc_RNA (1)...(19): siRNA sense strand
gagagucgcaugaaguaug

SEQ ID NO: 82698 - RNA, 19 nt, Homo sapiens
  misc_RNA (1)...(19): siRNA sense strand
ggcacagaaucaaccuaua

SEQ ID NO: 82699 - RNA, 19 nt, Homo sapiens
  misc_RNA (1)...(19): siRNA sense strand
gcaacccucuucguacaga

SEQ ID NO: 82700 - RNA, 19 nt, Homo sapiens
  misc_RNA (1)...(19): siRNA sense strand
cguggaagcuguaggaucu

SEQ ID NO: 82701 - RNA, 19 nt, Homo sapiens
  misc_RNA (1)...(19): siRNA sense strand
ccaacgaggauucagauga

SEQ ID NO: 82702 - RNA, 19 nt, Homo sapiens
  misc_RNA (1)...(19): siRNA sense strand
aaggaugucucccgugcua

SEQ ID NO: 82703 - RNA, 19 nt, Homo sapiens
  misc_RNA (1)...(19): siRNA sense strand
ucaaugaggacaauaauac

SEQ ID NO: 82704 - RNA, 19 nt, Homo sapiens
  misc_RNA (1)...(19): siRNA sense strand
gauugaagaucggaguaga

SEQ ID NO: 82705 - RNA, 19 nt, Homo sapiens
  misc_RNA (1)...(19): siRNA sense strand
ggaguagagauuauaugaa

SEQ ID NO: 82706 - RNA, 19 nt, Homo sapiens
  misc_RNA (1)...(19): siRNA sense strand
cguggaaaguaaugcagua

SEQ ID NO: 82707 - RNA, 19 nt, Homo sapiens
  misc_RNA (1)...(19): siRNA sense strand
gcaagauaccaaauacugu

SEQ ID NO: 82708 - RNA, 19 nt, Homo sapiens
  misc_RNA (1)...(19): siRNA sense strand
gaagcagagauuaaagcua

SEQ ID NO: 82709 - RNA, 19 nt, Homo sapiens
  misc_RNA (1)...(19): siRNA sense strand
gaaauuagaagagaaucca

SEQ ID NO: 82710 - RNA, 19 nt, Homo sapiens
  misc_RNA (1)...(19): siRNA sense strand
gaugaagcugcuaauauau

SEQ ID NO: 82711 - RNA, 19 nt, Homo sapiens
  misc_RNA (1)...(19): siRNA sense strand
ggaauaugagacaguaaug

SEQ ID NO: 82712 - RNA, 19 nt, Homo sapiens
  misc_RNA (1)...(19): siRNA sense strand
uggaagcuguaggaucuua

SEQ ID NO: 82713 - RNA, 19 nt, Homo sapiens
  misc_RNA (1)...(19): siRNA sense strand
agauacaaguucauggauu

SEQ ID NO: 82714 - RNA, 19 nt, Homo sapiens
  misc_RNA (1)...(19): siRNA sense strand
agagucgcaugaaguauga

SEQ ID NO: 82715 - RNA, 19 nt, Homo sapiens
  misc_RNA (1)...(19): siRNA sense strand
gaauacuccucaagaagcu

SEQ ID NO: 82716 - RNA, 19 nt, Homo sapiens
  misc_RNA (1)...(19): siRNA sense strand
gggaggaccuggagaaguu

SEQ ID NO: 82717 - RNA, 19 nt, Homo sapiens
  misc_RNA (1)...(19): siRNA sense strand
gaagaacugugucaacaag

SEQ ID NO: 82718 - RNA, 19 nt, Homo sapiens
  misc_RNA (1)...(19): siRNA sense strand
ucggaacccuucagcuuua

SEQ ID NO: 82719 - RNA, 19 nt, Homo sapiens
  misc_RNA (1)...(19): siRNA sense strand
caacaaggaccaucugaca

SEQ ID NO: 82720 - RNA, 19 nt, Homo sapiens
  misc_RNA (1)...(19): siRNA sense strand
ugaaggacguggccacugu

SEQ ID NO: 82721 - RNA, 19 nt, Homo sapiens
  misc_RNA (1)...(19): siRNA sense strand
gcacaaccaccaccucauc

SEQ ID NO: 82722 - RNA, 19 nt, Homo sapiens
  misc_RNA (1)...(19): siRNA sense strand
cgcaggagauccaugagaa

SEQ ID NO: 82723 - RNA, 19 nt, Homo sapiens
  misc_RNA (1)...(19): siRNA sense strand
ccacgccagugaccaguug

SEQ ID NO: 82724 - RNA, 19 nt, Homo sapiens
  misc_RNA (1)...(19): siRNA sense strand
ucaacgugcucuucuacga

SEQ ID NO: 82725 - RNA, 19 nt, Homo sapiens
  misc_RNA (1)...(19): siRNA sense strand
gcucgcacuugcucaacaa

SEQ ID NO: 82726 - RNA, 19 nt, Homo sapiens
  misc_RNA (1)...(19): siRNA sense strand
ccacgcaggagauccauga

SEQ ID NO: 82727 - RNA, 19 nt, Homo sapiens
  misc_RNA (1)...(19): siRNA sense strand
gcuucaacgugcucuucua

SEQ ID NO: 82728 - RNA, 19 nt, Homo sapiens
  misc_RNA (1)...(19): siRNA sense strand
cagacagccugaagaacug

SEQ ID NO: 82729 - RNA, 19 nt, Homo sapiens
  misc_RNA (1)...(19): siRNA sense strand
agaacugugucaacaagga

SEQ ID NO: 82730 - RNA, 19 nt, Homo sapiens
  misc_RNA (1)...(19): siRNA sense strand
cugaagaacugugucaaca

SEQ ID NO: 82731 - RNA, 19 nt, Homo sapiens
  misc_RNA (1)...(19): siRNA sense strand
ccagacagccugaagaacu

SEQ ID NO: 82732 - RNA, 19 nt, Homo sapiens
  misc_RNA (1)...(19): siRNA sense strand
ucaaagcccuccgcaucau

SEQ ID NO: 82733 - RNA, 19 nt, Homo sapiens
  misc_RNA (1)...(19): siRNA sense strand
gccacauccugaaccugua

SEQ ID NO: 82734 - RNA, 19 nt, Homo sapiens
  misc_RNA (1)...(19): siRNA sense strand
gccaaggccuucggcuuca

SEQ ID NO: 82735 - RNA, 19 nt, Homo sapiens
  misc_RNA (1)...(19): siRNA sense strand
gucggaacccuucagcuuu

SEQ ID NO: 82736 - RNA, 19 nt, Homo sapiens
  misc_RNA (1)...(19): siRNA sense strand
auagagaccacgccaguga

SEQ ID NO: 82737 - RNA, 19 nt, Homo sapiens
  misc_RNA (1)...(19): siRNA sense strand
ugaagaacugugucaacaa

SEQ ID NO: 82738 - RNA, 19 nt, Homo sapiens
  misc_RNA (1)...(19): siRNA sense strand
augagaagguccugaacga

SEQ ID NO: 82739 - RNA, 19 nt, Homo sapiens
  misc_RNA (1)...(19): siRNA sense strand
ucaacgacuucaccgucaa

SEQ ID NO: 82740 - RNA, 19 nt, Homo sapiens
  misc_RNA (1)...(19): siRNA sense strand
gcagcucgcacuugcucaa

SEQ ID NO: 82741 - RNA, 19 nt, Homo sapiens
  misc_RNA (1)...(19): siRNA sense strand
ccagggcccucugaaggau

SEQ ID NO: 82742 - RNA, 19 nt, Homo sapiens
  misc_RNA (1)...(19): siRNA sense strand
cguccgaccuccgaucaug

SEQ ID NO: 82743 - RNA, 19 nt, Homo sapiens
  misc_RNA (1)...(19): siRNA sense strand
gacaacaucgacaucaagu

SEQ ID NO: 82744 - RNA, 19 nt, Homo sapiens
  misc_RNA (1)...(19): siRNA sense strand
ggaccuggagaaguucaaa

SEQ ID NO: 82745 - RNA, 19 nt, Homo sapiens
  misc_RNA (1)...(19): siRNA sense strand
cuucuacgacccuuacuug

SEQ ID NO: 82746 - RNA, 19 nt, Homo sapiens
  misc_RNA (1)...(19): siRNA sense strand
ugacaacaucgacaucaag

SEQ ID NO: 82747 - RNA, 19 nt, Homo sapiens
  misc_RNA (1)...(19): siRNA sense strand
gcaggagauccaugagaag

SEQ ID NO: 82748 - RNA, 19 nt, Homo sapiens
  misc_RNA (1)...(19): siRNA sense strand
gagauccgcagagccauca

SEQ ID NO: 82749 - RNA, 19 nt, Homo sapiens
  misc_RNA (1)...(19): siRNA sense strand
ggggagaccuugggcauca

SEQ ID NO: 82750 - RNA, 19 nt, Homo sapiens
  misc_RNA (1)...(19): siRNA sense strand
ccaaggccuucggcuucaa

SEQ ID NO: 82751 - RNA, 19 nt, Homo sapiens
  misc_RNA (1)...(19): siRNA sense strand
ccagaaagcuuaagaaauu

SEQ ID NO: 82752 - RNA, 19 nt, Homo sapiens
  misc_RNA (1)...(19): siRNA sense strand
gggaggaccuggagaaguu

SEQ ID NO: 82753 - RNA, 19 nt, Homo sapiens
  misc_RNA (1)...(19): siRNA sense strand
gcacugcaaucucaacgaa

SEQ ID NO: 82754 - RNA, 19 nt, Homo sapiens
  misc_RNA (1)...(19): siRNA sense strand
ggaauucuuugucacauca

SEQ ID NO: 82755 - RNA, 19 nt, Homo sapiens
  misc_RNA (1)...(19): siRNA sense strand
cgagaaagccuuagcacaa

SEQ ID NO: 82756 - RNA, 19 nt, Homo sapiens
  misc_RNA (1)...(19): siRNA sense strand
ugaaggaccuggccacugu

SEQ ID NO: 82757 - RNA, 19 nt, Homo sapiens
  misc_RNA (1)...(19): siRNA sense strand
ucagagcccuucagcuuug

SEQ ID NO: 82758 - RNA, 19 nt, Homo sapiens
  misc_RNA (1)...(19): siRNA sense strand
gagaaagccuuagcacaag

SEQ ID NO: 82759 - RNA, 19 nt, Homo sapiens
  misc_RNA (1)...(19): siRNA sense strand
caucaaugacuuuaccaua

SEQ ID NO: 82760 - RNA, 19 nt, Homo sapiens
  misc_RNA (1)...(19): siRNA sense strand
gcagggagcauuccuugug

SEQ ID NO: 82761 - RNA, 19 nt, Homo sapiens
  misc_RNA (1)...(19): siRNA sense strand
ucuacacccugcaggauuu

SEQ ID NO: 82762 - RNA, 19 nt, Homo sapiens
  misc_RNA (1)...(19): siRNA sense strand
gcucaauggugccacauac

SEQ ID NO: 82763 - RNA, 19 nt, Homo sapiens
  misc_RNA (1)...(19): siRNA sense strand
cagggagcauuccuuguga

SEQ ID NO: 82764 - RNA, 19 nt, Homo sapiens
  misc_RNA (1)...(19): siRNA sense strand
cagaaagcuuaagaaauug

SEQ ID NO: 82765 - RNA, 19 nt, Homo sapiens
  misc_RNA (1)...(19): siRNA sense strand
gaaguucaaggcccugaga

SEQ ID NO: 82766 - RNA, 19 nt, Homo sapiens
  misc_RNA (1)...(19): siRNA sense strand
gcaaucucaacgaacauaa

SEQ ID NO: 82767 - RNA, 19 nt, Homo sapiens
  misc_RNA (1)...(19): siRNA sense strand
ucgcaucccagaaagcuua

SEQ ID NO: 82768 - RNA, 19 nt, Homo sapiens
  misc_RNA (1)...(19): siRNA sense strand
ggaggaacacguggcugua

SEQ ID NO: 82769 - RNA, 19 nt, Homo sapiens
  misc_RNA (1)...(19): siRNA sense strand
uggauucagcgucauauuu

SEQ ID NO: 82770 - RNA, 19 nt, Homo sapiens
  misc_RNA (1)...(19): siRNA sense strand
caaggaauucuuugucaca

SEQ ID NO: 82771 - RNA, 19 nt, Homo sapiens
  misc_RNA (1)...(19): siRNA sense strand
gauucagcgucauauuuua

SEQ ID NO: 82772 - RNA, 19 nt, Homo sapiens
  misc_RNA (1)...(19): siRNA sense strand
caucugcacuccucacacu

SEQ ID NO: 82773 - RNA, 19 nt, Homo sapiens
  misc_RNA (1)...(19): siRNA sense strand
caggguccguugaaagaug

SEQ ID NO: 82774 - RNA, 19 nt, Homo sapiens
  misc_RNA (1)...(19): siRNA sense strand
ggauucagcgucauauuuu

SEQ ID NO: 82775 - RNA, 19 nt, Homo sapiens
  misc_RNA (1)...(19): siRNA sense strand
agucagagcccuucagcuu

SEQ ID NO: 82776 - RNA, 19 nt, Homo sapiens
  misc_RNA (1)...(19): siRNA sense strand
gccacauccucaaccugua

SEQ ID NO: 82777 - RNA, 19 nt, Homo sapiens
  misc_RNA (1)...(19): siRNA sense strand
ucagcgccuuggucaguaa

SEQ ID NO: 82778 - RNA, 19 nt, Homo sapiens
  misc_RNA (1)...(19): siRNA sense strand
gguggacgagaaagccuua

SEQ ID NO: 82779 - RNA, 19 nt, Homo sapiens
  misc_RNA (1)...(19): siRNA sense strand
ggacgagaaagccuuagca

SEQ ID NO: 82780 - RNA, 19 nt, Homo sapiens
  misc_RNA (1)...(19): siRNA sense strand
gcaggcgguugcaguucga

SEQ ID NO: 82781 - RNA, 19 nt, Homo sapiens
  misc_RNA (1)...(19): siRNA sense strand
acaggucgcaucccagaaa

SEQ ID NO: 82782 - RNA, 19 nt, Homo sapiens
  misc_RNA (1)...(19): siRNA sense strand
gaaggcacgcggguucaga

SEQ ID NO: 82783 - RNA, 19 nt, Homo sapiens
  misc_RNA (1)...(19): siRNA sense strand
ugcaggauuugcuguauca

SEQ ID NO: 82784 - RNA, 19 nt, Homo sapiens
  misc_RNA (1)...(19): siRNA sense strand
gaugaggcagggagcauuc

SEQ ID NO: 82785 - RNA, 19 nt, Homo sapiens
  misc_RNA (1)...(19): siRNA sense strand
gagauccgccgagccauca

SEQ ID NO: 82786 - RNA, 19 nt, Homo sapiens
  misc_RNA (1)...(19): siRNA sense strand
gucagagcccuucagcuuu

SEQ ID NO: 82787 - RNA, 19 nt, Homo sapiens
  misc_RNA (1)...(19): siRNA sense strand
uaaccaccaccucaucaau

SEQ ID NO: 82788 - RNA, 19 nt, Homo sapiens
  misc_RNA (1)...(19): siRNA sense strand
gagagugaucgugcggaua

SEQ ID NO: 82789 - RNA, 19 nt, Homo sapiens
  misc_RNA (1)...(19): siRNA sense strand
ucaaggcccugagagugau

SEQ ID NO: 82790 - RNA, 19 nt, Homo sapiens
  misc_RNA (1)...(19): siRNA sense strand
caauggugccacauacaga

SEQ ID NO: 82791 - RNA, 19 nt, Homo sapiens
  misc_RNA (1)...(19): siRNA sense strand
gcgccuuggucaguaauag

SEQ ID NO: 82792 - RNA, 19 nt, Homo sapiens
  misc_RNA (1)...(19): siRNA sense strand
gcucaggguccguugaaag

SEQ ID NO: 82793 - RNA, 19 nt, Homo sapiens
  misc_RNA (1)...(19): siRNA sense strand
uagcacaagcccucaagga

SEQ ID NO: 82794 - RNA, 19 nt, Homo sapiens
  misc_RNA (1)...(19): siRNA sense strand
cauaaccaccaccucauca

SEQ ID NO: 82795 - RNA, 19 nt, Homo sapiens
  misc_RNA (1)...(19): siRNA sense strand
caucagcgccuuggucagu

SEQ ID NO: 82796 - RNA, 19 nt, Homo sapiens
  misc_RNA (1)...(19): siRNA sense strand
ucccagaaagcuuaagaaa

SEQ ID NO: 82797 - RNA, 19 nt, Homo sapiens
  misc_RNA (1)...(19): siRNA sense strand
acugcaaucucaacgaaca

SEQ ID NO: 82798 - RNA, 19 nt, Homo sapiens
  misc_RNA (1)...(19): siRNA sense strand
agagugaucgugcggauag

SEQ ID NO: 82799 - RNA, 19 nt, Homo sapiens
  misc_RNA (1)...(19): siRNA sense strand
gagacgcugggccucauug

SEQ ID NO: 82800 - RNA, 19 nt, Homo sapiens
  misc_RNA (1)...(19): siRNA sense strand
ggagacgcugggccucauu

SEQ ID NO: 82801 - RNA, 19 nt, Homo sapiens
  misc_RNA (1)...(19): siRNA sense strand
acagcggacucuaccaucu

SEQ ID NO: 82802 - RNA, 19 nt, Homo sapiens
  misc_RNA (1)...(19): siRNA sense strand
cccagaaagcuuaagaaau

SEQ ID NO: 82803 - RNA, 19 nt, Homo sapiens
  misc_RNA (1)...(19): siRNA sense strand
guugaaagaugccccgaau

SEQ ID NO: 82804 - RNA, 19 nt, Homo sapiens
  misc_RNA (1)...(19): siRNA sense strand
ccagaaagcuuaagaaauu

SEQ ID NO: 82805 - RNA, 19 nt, Homo sapiens
  misc_RNA (1)...(19): siRNA sense strand
gggaggaccuggagaaguu

SEQ ID NO: 82806 - RNA, 19 nt, Homo sapiens
  misc_RNA (1)...(19): siRNA sense strand
gcacugcaaucucaacgaa

SEQ ID NO: 82807 - RNA, 19 nt, Homo sapiens
  misc_RNA (1)...(19): siRNA sense strand
ggaauucuuugucacauca

SEQ ID NO: 82808 - RNA, 19 nt, Homo sapiens
  misc_RNA (1)...(19): siRNA sense strand
cgagaaagccuuagcacaa

SEQ ID NO: 82809 - RNA, 19 nt, Homo sapiens
  misc_RNA (1)...(19): siRNA sense strand
ugaaggaccuggccacugu

SEQ ID NO: 82810 - RNA, 19 nt, Homo sapiens
  misc_RNA (1)...(19): siRNA sense strand
ucagagcccuucagcuuug

SEQ ID NO: 82811 - RNA, 19 nt, Homo sapiens
  misc_RNA (1)...(19): siRNA sense strand
gagaaagccuuagcacaag

SEQ ID NO: 82812 - RNA, 19 nt, Homo sapiens
  misc_RNA (1)...(19): siRNA sense strand
caucaaugacuuuaccaua

SEQ ID NO: 82813 - RNA, 19 nt, Homo sapiens
  misc_RNA (1)...(19): siRNA sense strand
gcagggagcauuccuugug

SEQ ID NO: 82814 - RNA, 19 nt, Homo sapiens
  misc_RNA (1)...(19): siRNA sense strand
ggaaauccacgagaagguu

SEQ ID NO: 82815 - RNA, 19 nt, Homo sapiens
  misc_RNA (1)...(19): siRNA sense strand
ucuacacccugcaggauuu

SEQ ID NO: 82816 - RNA, 19 nt, Homo sapiens
  misc_RNA (1)...(19): siRNA sense strand
gcucaauggugccacauac

SEQ ID NO: 82817 - RNA, 19 nt, Homo sapiens
  misc_RNA (1)...(19): siRNA sense strand
cagggagcauuccuuguga

SEQ ID NO: 82818 - RNA, 19 nt, Homo sapiens
  misc_RNA (1)...(19): siRNA sense strand
cagaaagcuuaagaaauug

SEQ ID NO: 82819 - RNA, 19 nt, Homo sapiens
  misc_RNA (1)...(19): siRNA sense strand
gaaguucaaggcccugaga

SEQ ID NO: 82820 - RNA, 19 nt, Homo sapiens
  misc_RNA (1)...(19): siRNA sense strand
gcaaucucaacgaacauaa

SEQ ID NO: 82821 - RNA, 19 nt, Homo sapiens
  misc_RNA (1)...(19): siRNA sense strand
ucgcaucccagaaagcuua

SEQ ID NO: 82822 - RNA, 19 nt, Homo sapiens
  misc_RNA (1)...(19): siRNA sense strand
ggaggaacacguggcugua

SEQ ID NO: 82823 - RNA, 19 nt, Homo sapiens
  misc_RNA (1)...(19): siRNA sense strand
uggauucagcgucauauuu

SEQ ID NO: 82824 - RNA, 19 nt, Homo sapiens
  misc_RNA (1)...(19): siRNA sense strand
caaggaauucuuugucaca

SEQ ID NO: 82825 - RNA, 19 nt, Homo sapiens
  misc_RNA (1)...(19): siRNA sense strand
gauucagcgucauauuuua

SEQ ID NO: 82826 - RNA, 19 nt, Homo sapiens
  misc_RNA (1)...(19): siRNA sense strand
caucugcacuccucacacu

SEQ ID NO: 82827 - RNA, 19 nt, Homo sapiens
  misc_RNA (1)...(19): siRNA sense strand
caggguccguugaaagaug

SEQ ID NO: 82828 - RNA, 19 nt, Homo sapiens
  misc_RNA (1)...(19): siRNA sense strand
ggauucagcgucauauuuu

SEQ ID NO: 82829 - RNA, 19 nt, Homo sapiens
  misc_RNA (1)...(19): siRNA sense strand
agucagagcccuucagcuu

SEQ ID NO: 82830 - RNA, 19 nt, Homo sapiens
  misc_RNA (1)...(19): siRNA sense strand
gccacauccucaaccugua

SEQ ID NO: 82831 - RNA, 19 nt, Homo sapiens
  misc_RNA (1)...(19): siRNA sense strand
ucagcgccuuggucaguaa

SEQ ID NO: 82832 - RNA, 19 nt, Homo sapiens
  misc_RNA (1)...(19): siRNA sense strand
gguggacgagaaagccuua

SEQ ID NO: 82833 - RNA, 19 nt, Homo sapiens
  misc_RNA (1)...(19): siRNA sense strand
gcaggaaauccacgagaag

SEQ ID NO: 82834 - RNA, 19 nt, Homo sapiens
  misc_RNA (1)...(19): siRNA sense strand
ggacgagaaagccuuagca

SEQ ID NO: 82835 - RNA, 19 nt, Homo sapiens
  misc_RNA (1)...(19): siRNA sense strand
gcaggcgguugcaguucga

SEQ ID NO: 82836 - RNA, 19 nt, Homo sapiens
  misc_RNA (1)...(19): siRNA sense strand
acaggucgcaucccagaaa

SEQ ID NO: 82837 - RNA, 19 nt, Homo sapiens
  misc_RNA (1)...(19): siRNA sense strand
gaaggcacgcggguucaga

SEQ ID NO: 82838 - RNA, 19 nt, Homo sapiens
  misc_RNA (1)...(19): siRNA sense strand
ugcaggauuugcuguauca

SEQ ID NO: 82839 - RNA, 19 nt, Homo sapiens
  misc_RNA (1)...(19): siRNA sense strand
gaugaggcagggagcauuc

SEQ ID NO: 82840 - RNA, 19 nt, Homo sapiens
  misc_RNA (1)...(19): siRNA sense strand
gagauccgccgagccauca

SEQ ID NO: 82841 - RNA, 19 nt, Homo sapiens
  misc_RNA (1)...(19): siRNA sense strand
gucagagcccuucagcuuu

SEQ ID NO: 82842 - RNA, 19 nt, Homo sapiens
  misc_RNA (1)...(19): siRNA sense strand
uaaccaccaccucaucaau

SEQ ID NO: 82843 - RNA, 19 nt, Homo sapiens
  misc_RNA (1)...(19): siRNA sense strand
gagagugaucgugcggaua

SEQ ID NO: 82844 - RNA, 19 nt, Homo sapiens
  misc_RNA (1)...(19): siRNA sense strand
ucaaggcccugagagugau

SEQ ID NO: 82845 - RNA, 19 nt, Homo sapiens
  misc_RNA (1)...(19): siRNA sense strand
caauggugccacauacaga

SEQ ID NO: 82846 - RNA, 19 nt, Homo sapiens
  misc_RNA (1)...(19): siRNA sense strand
gcgccuuggucaguaauag

SEQ ID NO: 82847 - RNA, 19 nt, Homo sapiens
  misc_RNA (1)...(19): siRNA sense strand
gcucaggguccguugaaag

SEQ ID NO: 82848 - RNA, 19 nt, Homo sapiens
  misc_RNA (1)...(19): siRNA sense strand
uagcacaagcccucaagga

SEQ ID NO: 82849 - RNA, 19 nt, Homo sapiens
  misc_RNA (1)...(19): siRNA sense strand
cauaaccaccaccucauca

SEQ ID NO: 82850 - RNA, 19 nt, Homo sapiens
  misc_RNA (1)...(19): siRNA sense strand
caucagcgccuuggucagu

SEQ ID NO: 82851 - RNA, 19 nt, Homo sapiens
  misc_RNA (1)...(19): siRNA sense strand
ucccagaaagcuuaagaaa

SEQ ID NO: 82852 - RNA, 19 nt, Homo sapiens
  misc_RNA (1)...(19): siRNA sense strand
acugcaaucucaacgaaca

SEQ ID NO: 82853 - RNA, 19 nt, Homo sapiens
  misc_RNA (1)...(19): siRNA sense strand
agagugaucgugcggauag

SEQ ID NO: 82854 - RNA, 19 nt, Homo sapiens
  misc_RNA (1)...(19): siRNA sense strand
gagacgcugggccucauug

SEQ ID NO: 82855 - RNA, 19 nt, Homo sapiens
  misc_RNA (1)...(19): siRNA sense strand
ggagacgcugggccucauu

SEQ ID NO: 82856 - RNA, 19 nt, Homo sapiens
  misc_RNA (1)...(19): siRNA sense strand
acagcggacucuaccaucu

SEQ ID NO: 82857 - RNA, 19 nt, Homo sapiens
  misc_RNA (1)...(19): siRNA sense strand
cccagaaagcuuaagaaau

SEQ ID NO: 82858 - RNA, 19 nt, Homo sapiens
  misc_RNA (1)...(19): siRNA sense strand
guugaaagaugccccgaau

SEQ ID NO: 82859 - RNA, 19 nt, Homo sapiens
  misc_RNA (1)...(19): siRNA sense strand
gcagugagcuggcaagauu

SEQ ID NO: 82860 - RNA, 19 nt, Homo sapiens
  misc_RNA (1)...(19): siRNA sense strand
ggaaucugcuuaugcaaua

SEQ ID NO: 82861 - RNA, 19 nt, Homo sapiens
  misc_RNA (1)...(19): siRNA sense strand
gcucuacucucaaugcuuu

SEQ ID NO: 82862 - RNA, 19 nt, Homo sapiens
  misc_RNA (1)...(19): siRNA sense strand
uaauagacaucgauacuug

SEQ ID NO: 82863 - RNA, 19 nt, Homo sapiens
  misc_RNA (1)...(19): siRNA sense strand
gaaguaauguuugugguau

SEQ ID NO: 82864 - RNA, 19 nt, Homo sapiens
  misc_RNA (1)...(19): siRNA sense strand
agacaucgauacuugaauu

SEQ ID NO: 82865 - RNA, 19 nt, Homo sapiens
  misc_RNA (1)...(19): siRNA sense strand
caaugugucuuugccguua

SEQ ID NO: 82866 - RNA, 19 nt, Homo sapiens
  misc_RNA (1)...(19): siRNA sense strand
caaagguuauucugcauau

SEQ ID NO: 82867 - RNA, 19 nt, Homo sapiens
  misc_RNA (1)...(19): siRNA sense strand
ggaaguaauguuuguggua

SEQ ID NO: 82868 - RNA, 19 nt, Homo sapiens
  misc_RNA (1)...(19): siRNA sense strand
gcuuugaacugguuaaaca

SEQ ID NO: 82869 - RNA, 19 nt, Homo sapiens
  misc_RNA (1)...(19): siRNA sense strand
ugacuucagugaccaagaa

SEQ ID NO: 82870 - RNA, 19 nt, Homo sapiens
  misc_RNA (1)...(19): siRNA sense strand
cagauuccguuucuucuau

SEQ ID NO: 82871 - RNA, 19 nt, Homo sapiens
  misc_RNA (1)...(19): siRNA sense strand
caaaagcacuucuuaccuu

SEQ ID NO: 82872 - RNA, 19 nt, Homo sapiens
  misc_RNA (1)...(19): siRNA sense strand
agaagcaaaucaugcaguu

SEQ ID NO: 82873 - RNA, 19 nt, Homo sapiens
  misc_RNA (1)...(19): siRNA sense strand
gcagauuccguuucuucua

SEQ ID NO: 82874 - RNA, 19 nt, Homo sapiens
  misc_RNA (1)...(19): siRNA sense strand
cuuccaaguuucccagaua

SEQ ID NO: 82875 - RNA, 19 nt, Homo sapiens
  misc_RNA (1)...(19): siRNA sense strand
aaacaggaagcacuccaua

SEQ ID NO: 82876 - RNA, 19 nt, Homo sapiens
  misc_RNA (1)...(19): siRNA sense strand
caucgauacuugaauucuu

SEQ ID NO: 82877 - RNA, 19 nt, Homo sapiens
  misc_RNA (1)...(19): siRNA sense strand
acaggaagcacuccauauu

SEQ ID NO: 82878 - RNA, 19 nt, Homo sapiens
  misc_RNA (1)...(19): siRNA sense strand
aauggaggcucuacucuca

SEQ ID NO: 82879 - RNA, 19 nt, Homo sapiens
  misc_RNA (1)...(19): siRNA sense strand
cagcagaaguacauauguc

SEQ ID NO: 82880 - RNA, 19 nt, Homo sapiens
  misc_RNA (1)...(19): siRNA sense strand
ccgggaaagucuuaauaga

SEQ ID NO: 82881 - RNA, 19 nt, Homo sapiens
  misc_RNA (1)...(19): siRNA sense strand
ugaccaagaagaugaaaug

SEQ ID NO: 82882 - RNA, 19 nt, Homo sapiens
  misc_RNA (1)...(19): siRNA sense strand
ucucauaacuggguuugau

SEQ ID NO: 82883 - RNA, 19 nt, Homo sapiens
  misc_RNA (1)...(19): siRNA sense strand
ggaggaugcugggccuuca

SEQ ID NO: 82884 - RNA, 19 nt, Homo sapiens
  misc_RNA (1)...(19): siRNA sense strand
caggaagcacuccauauug

SEQ ID NO: 82885 - RNA, 19 nt, Homo sapiens
  misc_RNA (1)...(19): siRNA sense strand
ucaaagguuauucugcaua

SEQ ID NO: 82886 - RNA, 19 nt, Homo sapiens
  misc_RNA (1)...(19): siRNA sense strand
ugaagaguuuaaagccauu

SEQ ID NO: 82887 - RNA, 19 nt, Homo sapiens
  misc_RNA (1)...(19): siRNA sense strand
gaacugguuaaacaagaug

SEQ ID NO: 82888 - RNA, 19 nt, Homo sapiens
  misc_RNA (1)...(19): siRNA sense strand
cagcagauguguggaggau

SEQ ID NO: 82889 - RNA, 19 nt, Homo sapiens
  misc_RNA (1)...(19): siRNA sense strand
aaucaugcaguucucauaa

SEQ ID NO: 82890 - RNA, 19 nt, Homo sapiens
  misc_RNA (1)...(19): siRNA sense strand
gauuaucugggaggcauua

SEQ ID NO: 82891 - RNA, 19 nt, Homo sapiens
  misc_RNA (1)...(19): siRNA sense strand
cgccuucuauggaauaaau

SEQ ID NO: 82892 - RNA, 19 nt, Homo sapiens
  misc_RNA (1)...(19): siRNA sense strand
aaacuccaccgccuucuau

SEQ ID NO: 82893 - RNA, 19 nt, Homo sapiens
  misc_RNA (1)...(19): siRNA sense strand
ugagaaaccagcagaugug

SEQ ID NO: 82894 - RNA, 19 nt, Homo sapiens
  misc_RNA (1)...(19): siRNA sense strand
ucauaacuggguuugauaa

SEQ ID NO: 82895 - RNA, 19 nt, Homo sapiens
  misc_RNA (1)...(19): siRNA sense strand
ucagugaccaagaagauga

SEQ ID NO: 82896 - RNA, 19 nt, Homo sapiens
  misc_RNA (1)...(19): siRNA sense strand
ucauugacuguucguauaa

SEQ ID NO: 82897 - RNA, 19 nt, Homo sapiens
  misc_RNA (1)...(19): siRNA sense strand
agauuccguuucuucuaua

SEQ ID NO: 82898 - RNA, 19 nt, Homo sapiens
  misc_RNA (1)...(19): siRNA sense strand
aggaagcacuccauauugg

SEQ ID NO: 82899 - RNA, 19 nt, Homo sapiens
  misc_RNA (1)...(19): siRNA sense strand
ugaacugguuaaacaagau

SEQ ID NO: 82900 - RNA, 19 nt, Homo sapiens
  misc_RNA (1)...(19): siRNA sense strand
uuuguuuccugaagaguuu

SEQ ID NO: 82901 - RNA, 19 nt, Homo sapiens
  misc_RNA (1)...(19): siRNA sense strand
ccuauuuguuuccugaaga

SEQ ID NO: 82902 - RNA, 19 nt, Homo sapiens
  misc_RNA (1)...(19): siRNA sense strand
ugguucacauucuggauuu

SEQ ID NO: 82903 - RNA, 19 nt, Homo sapiens
  misc_RNA (1)...(19): siRNA sense strand
gauuccguuucuucuauau

SEQ ID NO: 82904 - RNA, 19 nt, Homo sapiens
  misc_RNA (1)...(19): siRNA sense strand
aguaauguuugugguauug

SEQ ID NO: 82905 - RNA, 19 nt, Homo sapiens
  misc_RNA (1)...(19): siRNA sense strand
ugacacaagugagaaacca

SEQ ID NO: 82906 - RNA, 19 nt, Homo sapiens
  misc_RNA (1)...(19): siRNA sense strand
gcaaaucaugcaguucuca

SEQ ID NO: 82907 - RNA, 19 nt, Homo sapiens
  misc_RNA (1)...(19): siRNA sense strand
uaaaacuggugaaagauuc

SEQ ID NO: 82908 - RNA, 19 nt, Homo sapiens
  misc_RNA (1)...(19): siRNA sense strand
gugagaaaccagcagaugu

SEQ ID NO: 82909 - RNA, 19 nt, Homo sapiens
  misc_RNA (1)...(19): siRNA sense strand
aaguaaaacuggugaaaga

SEQ ID NO: 82910 - RNA, 19 nt, Homo sapiens
  misc_RNA (1)...(19): siRNA sense strand
aaugggaaguaauguuugu

SEQ ID NO: 82911 - RNA, 19 nt, Homo sapiens
  misc_RNA (1)...(19): siRNA sense strand
aagguuauucugcauauga

SEQ ID NO: 82912 - RNA, 19 nt, Homo sapiens
  misc_RNA (1)...(19): siRNA sense strand
gcaauggaggcucuacucu

SEQ ID NO: 82913 - RNA, 19 nt, Homo sapiens
  misc_RNA (1)...(19): siRNA sense strand
cauaacuggguuugauaaa

SEQ ID NO: 82914 - RNA, 19 nt, Homo sapiens
  misc_RNA (1)...(19): siRNA sense strand
aaaucaugcaguucucaua

SEQ ID NO: 82915 - RNA, 19 nt, Homo sapiens
  misc_RNA (1)...(19): siRNA sense strand
uggaggcucuacucucaau

SEQ ID NO: 82916 - RNA, 19 nt, Homo sapiens
  misc_RNA (1)...(19): siRNA sense strand
gaagaguuuaaagccauuu

SEQ ID NO: 82917 - RNA, 19 nt, Homo sapiens
  misc_RNA (1)...(19): siRNA sense strand
caaguuucccagauacuca

SEQ ID NO: 82918 - RNA, 19 nt, Homo sapiens
  misc_RNA (1)...(19): siRNA sense strand
cugcauaugacuucaguga

SEQ ID NO: 82919 - RNA, 19 nt, Homo sapiens
  misc_RNA (1)...(19): siRNA sense strand
aguggaaucugcuuaugca

SEQ ID NO: 82920 - RNA, 19 nt, Homo sapiens
  misc_RNA (1)...(19): siRNA sense strand
gguauugcagauuccguuu

SEQ ID NO: 82921 - RNA, 19 nt, Homo sapiens
  misc_RNA (1)...(19): siRNA sense strand
guaaaacuggugaaagauu

SEQ ID NO: 82922 - RNA, 19 nt, Homo sapiens
  misc_RNA (1)...(19): siRNA sense strand
gagaaaccagcagaugugu

SEQ ID NO: 82923 - RNA, 19 nt, Homo sapiens
  misc_RNA (1)...(19): siRNA sense strand
guuaaacaagaugcaagua

SEQ ID NO: 82924 - RNA, 19 nt, Homo sapiens
  misc_RNA (1)...(19): siRNA sense strand
uugaacugguuaaacaaga

SEQ ID NO: 82925 - RNA, 19 nt, Homo sapiens
  misc_RNA (1)...(19): siRNA sense strand
ccaccgccuucuauggaau

SEQ ID NO: 82926 - RNA, 19 nt, Homo sapiens
  misc_RNA (1)...(19): siRNA sense strand
gggaaguucuuggggagua

SEQ ID NO: 82927 - RNA, 19 nt, Homo sapiens
  misc_RNA (1)...(19): siRNA sense strand
aagaagaugaaauggcaaa

SEQ ID NO: 82928 - RNA, 19 nt, Homo sapiens
  misc_RNA (1)...(19): siRNA sense strand
uauugcagauuccguuucu

SEQ ID NO: 82929 - RNA, 19 nt, Homo sapiens
  misc_RNA (1)...(19): siRNA sense strand
gccauuuauuuaagaagca

SEQ ID NO: 82930 - RNA, 19 nt, Homo sapiens
  misc_RNA (1)...(19): siRNA sense strand
gaggcauuauacagcauca

SEQ ID NO: 82931 - RNA, 19 nt, Homo sapiens
  misc_RNA (1)...(19): siRNA sense strand
aagcacuucuuaccuuugg

SEQ ID NO: 82932 - RNA, 19 nt, Homo sapiens
  misc_RNA (1)...(19): siRNA sense strand
gcaaguaaaacuggugaaa

SEQ ID NO: 82933 - RNA, 19 nt, Homo sapiens
  misc_RNA (1)...(19): siRNA sense strand
gaagcaaaucaugcaguuc

SEQ ID NO: 82934 - RNA, 19 nt, Homo sapiens
  misc_RNA (1)...(19): siRNA sense strand
gguuaaacaagaugcaagu

SEQ ID NO: 82935 - RNA, 19 nt, Homo sapiens
  misc_RNA (1)...(19): siRNA sense strand
uaauguuugugguauugca

SEQ ID NO: 82936 - RNA, 19 nt, Homo sapiens
  misc_RNA (1)...(19): siRNA sense strand
caaaaugggaaguaauguu

SEQ ID NO: 82937 - RNA, 19 nt, Homo sapiens
  misc_RNA (1)...(19): siRNA sense strand
aagcaaaucaugcaguucu

SEQ ID NO: 82938 - RNA, 19 nt, Homo sapiens
  misc_RNA (1)...(19): siRNA sense strand
ucccagauacucagcagaa

SEQ ID NO: 82939 - RNA, 19 nt, Homo sapiens
  misc_RNA (1)...(19): siRNA sense strand
uaucugggaggcauuauac

SEQ ID NO: 82940 - RNA, 19 nt, Homo sapiens
  misc_RNA (1)...(19): siRNA sense strand
gaaagaggccuucaaguug

SEQ ID NO: 82941 - RNA, 19 nt, Homo sapiens
  misc_RNA (1)...(19): siRNA sense strand
gaacaacgagcacagaauu

SEQ ID NO: 82942 - RNA, 19 nt, Homo sapiens
  misc_RNA (1)...(19): siRNA sense strand
cgcaguaccuggccacuua

SEQ ID NO: 82943 - RNA, 19 nt, Homo sapiens
  misc_RNA (1)...(19): siRNA sense strand
cagcaugggcagagaaaua

SEQ ID NO: 82944 - RNA, 19 nt, Homo sapiens
  misc_RNA (1)...(19): siRNA sense strand
guucauaacuguccucaac

SEQ ID NO: 82945 - RNA, 19 nt, Homo sapiens
  misc_RNA (1)...(19): siRNA sense strand
cauacuggauccugaagaa

SEQ ID NO: 82946 - RNA, 19 nt, Homo sapiens
  misc_RNA (1)...(19): siRNA sense strand
gcagaaaccggauaugaag

SEQ ID NO: 82947 - RNA, 19 nt, Homo sapiens
  misc_RNA (1)...(19): siRNA sense strand
aaagaggccuucaaguugu

SEQ ID NO: 82948 - RNA, 19 nt, Homo sapiens
  misc_RNA (1)...(19): siRNA sense strand
gcacagaauugcgcaguac

SEQ ID NO: 82949 - RNA, 19 nt, Homo sapiens
  misc_RNA (1)...(19): siRNA sense strand
ggacaucuuugcccacaac

SEQ ID NO: 82950 - RNA, 19 nt, Homo sapiens
  misc_RNA (1)...(19): siRNA sense strand
ucauaacuguccucaacaa

SEQ ID NO: 82951 - RNA, 19 nt, Homo sapiens
  misc_RNA (1)...(19): siRNA sense strand
gauccaggacuucaucaug

SEQ ID NO: 82952 - RNA, 19 nt, Homo sapiens
  misc_RNA (1)...(19): siRNA sense strand
gugcagaaaccggauauga

SEQ ID NO: 82953 - RNA, 19 nt, Homo sapiens
  misc_RNA (1)...(19): siRNA sense strand
gagaaauaaggucugaaga

SEQ ID NO: 82954 - RNA, 19 nt, Homo sapiens
  misc_RNA (1)...(19): siRNA sense strand
gggacgcguucauaacugu

SEQ ID NO: 82955 - RNA, 19 nt, Homo sapiens
  misc_RNA (1)...(19): siRNA sense strand
gcaucaguuucugggauuu

SEQ ID NO: 82956 - RNA, 19 nt, Homo sapiens
  misc_RNA (1)...(19): siRNA sense strand
gcagaacaacgagcacaga

SEQ ID NO: 82957 - RNA, 19 nt, Homo sapiens
  misc_RNA (1)...(19): siRNA sense strand
ucacagaggaggaguuugg

SEQ ID NO: 82958 - RNA, 19 nt, Homo sapiens
  misc_RNA (1)...(19): siRNA sense strand
cagaggagucaguaccuuu

SEQ ID NO: 82959 - RNA, 19 nt, Homo sapiens
  misc_RNA (1)...(19): siRNA sense strand
ggcagcggcaggcaacaua

SEQ ID NO: 82960 - RNA, 19 nt, Homo sapiens
  misc_RNA (1)...(19): siRNA sense strand
ccuguggcaucaccaaguu

SEQ ID NO: 82961 - RNA, 19 nt, Homo sapiens
  misc_RNA (1)...(19): siRNA sense strand
ccagaggagucaguaccuu

SEQ ID NO: 82962 - RNA, 19 nt, Homo sapiens
  misc_RNA (1)...(19): siRNA sense strand
ucaucaugcugcagaacaa

SEQ ID NO: 82963 - RNA, 19 nt, Homo sapiens
  misc_RNA (1)...(19): siRNA sense strand
gagacccuguggcgcauca

SEQ ID NO: 82964 - RNA, 19 nt, Homo sapiens
  misc_RNA (1)...(19): siRNA sense strand
agaaauaaggucugaagag

SEQ ID NO: 82965 - RNA, 19 nt, Homo sapiens
  misc_RNA (1)...(19): siRNA sense strand
ccggaaaggugugaucaag

SEQ ID NO: 82966 - RNA, 19 nt, Homo sapiens
  misc_RNA (1)...(19): siRNA sense strand
cagaacaacgagcacagaa

SEQ ID NO: 82967 - RNA, 19 nt, Homo sapiens
  misc_RNA (1)...(19): siRNA sense strand
agcaauaccuguggcauca

SEQ ID NO: 82968 - RNA, 19 nt, Homo sapiens
  misc_RNA (1)...(19): siRNA sense strand
cgcaucaguuucugggauu

SEQ ID NO: 82969 - RNA, 19 nt, Homo sapiens
  misc_RNA (1)...(19): siRNA sense strand
ggauaugggcagagacagu

SEQ ID NO: 82970 - RNA, 19 nt, Homo sapiens
  misc_RNA (1)...(19): siRNA sense strand
ccaagaaguaccagaaggu

SEQ ID NO: 82971 - RNA, 19 nt, Homo sapiens
  misc_RNA (1)...(19): siRNA sense strand
ggaguuuggccagcucuau

SEQ ID NO: 82972 - RNA, 19 nt, Homo sapiens
  misc_RNA (1)...(19): siRNA sense strand
ugcagaaaccggauaugaa

SEQ ID NO: 82973 - RNA, 19 nt, Homo sapiens
  misc_RNA (1)...(19): siRNA sense strand
aagaggccuucaaguuguu

SEQ ID NO: 82974 - RNA, 19 nt, Homo sapiens
  misc_RNA (1)...(19): siRNA sense strand
ggagagaagggcuauuucc

SEQ ID NO: 82975 - RNA, 19 nt, Homo sapiens
  misc_RNA (1)...(19): siRNA sense strand
gaguuuggccagcucuaug

SEQ ID NO: 82976 - RNA, 19 nt, Homo sapiens
  misc_RNA (1)...(19): siRNA sense strand
gggugacuccauucaguga

SEQ ID NO: 82977 - RNA, 19 nt, Homo sapiens
  misc_RNA (1)...(19): siRNA sense strand
gggagagaagggcuauuuc

SEQ ID NO: 82978 - RNA, 19 nt, Homo sapiens
  misc_RNA (1)...(19): siRNA sense strand
agagaaauaaggucugaag

SEQ ID NO: 82979 - RNA, 19 nt, Homo sapiens
  misc_RNA (1)...(19): siRNA sense strand
gaggagucaguaccuuuca

SEQ ID NO: 82980 - RNA, 19 nt, Homo sapiens
  misc_RNA (1)...(19): siRNA sense strand
ccgugaccaucaacaugaa

SEQ ID NO: 82981 - RNA, 19 nt, Homo sapiens
  misc_RNA (1)...(19): siRNA sense strand
gcaguaccuggccacuuau

SEQ ID NO: 82982 - RNA, 19 nt, Homo sapiens
  misc_RNA (1)...(19): siRNA sense strand
gagaccaucuguuuauuua

SEQ ID NO: 82983 - RNA, 19 nt, Homo sapiens
  misc_RNA (1)...(19): siRNA sense strand
caagaaagauacugagaaa

SEQ ID NO: 82984 - RNA, 19 nt, Homo sapiens
  misc_RNA (1)...(19): siRNA sense strand
caagaaaguugccaagaaa

SEQ ID NO: 82985 - RNA, 19 nt, Homo sapiens
  misc_RNA (1)...(19): siRNA sense strand
caacacgguuucuauaauu

SEQ ID NO: 82986 - RNA, 19 nt, Homo sapiens
  misc_RNA (1)...(19): siRNA sense strand
gaaagauacugagaaagaa

SEQ ID NO: 82987 - RNA, 19 nt, Homo sapiens
  misc_RNA (1)...(19): siRNA sense strand
gggcaaggauucagccaua

SEQ ID NO: 82988 - RNA, 19 nt, Homo sapiens
  misc_RNA (1)...(19): siRNA sense strand
ggacaacacgguuucuaua

SEQ ID NO: 82989 - RNA, 19 nt, Homo sapiens
  misc_RNA (1)...(19): siRNA sense strand
ccaagaaaguugccaagaa

SEQ ID NO: 82990 - RNA, 19 nt, Homo sapiens
  misc_RNA (1)...(19): siRNA sense strand
uaagaaaggugaagacaag

SEQ ID NO: 82991 - RNA, 19 nt, Homo sapiens
  misc_RNA (1)...(19): siRNA sense strand
aaacaaaggugaugaaucg

SEQ ID NO: 82992 - RNA, 19 nt, Homo sapiens
  misc_RNA (1)...(19): siRNA sense strand
caaagaagaaugcaaagaa

SEQ ID NO: 82993 - RNA, 19 nt, Homo sapiens
  misc_RNA (1)...(19): siRNA sense strand
aaagcuagaugcaaagaaa

SEQ ID NO: 82994 - RNA, 19 nt, Homo sapiens
  misc_RNA (1)...(19): siRNA sense strand
caaagaaggaugcaaagaa

SEQ ID NO: 82995 - RNA, 19 nt, Homo sapiens
  misc_RNA (1)...(19): siRNA sense strand
gauguaccguucuuuaaug

SEQ ID NO: 82996 - RNA, 19 nt, Homo sapiens
  misc_RNA (1)...(19): siRNA sense strand
cacgaaagaugccaagaaa

SEQ ID NO: 82997 - RNA, 19 nt, Homo sapiens
  misc_RNA (1)...(19): siRNA sense strand
gcaaggauauagagaaagg

SEQ ID NO: 82998 - RNA, 19 nt, Homo sapiens
  misc_RNA (1)...(19): siRNA sense strand
cagcagaaauugguaagaa

SEQ ID NO: 82999 - RNA, 19 nt, Homo sapiens
  misc_RNA (1)...(19): siRNA sense strand
uaagaaggaugcaaagaag

SEQ ID NO: 83000 - RNA, 19 nt, Homo sapiens
  misc_RNA (1)...(19): siRNA sense strand
guacagacagugacucaaa

SEQ ID NO: 83001 - RNA, 19 nt, Homo sapiens
  misc_RNA (1)...(19): siRNA sense strand
caaagaagaagggcaagua

SEQ ID NO: 83002 - RNA, 19 nt, Homo sapiens
  misc_RNA (1)...(19): siRNA sense strand
gaucguagacaaccauuau

SEQ ID NO: 83003 - RNA, 19 nt, Homo sapiens
  misc_RNA (1)...(19): siRNA sense strand
caaaggaugaugucaagaa

SEQ ID NO: 83004 - RNA, 19 nt, Homo sapiens
  misc_RNA (1)...(19): siRNA sense strand
gcaaagacucggcaacaga

SEQ ID NO: 83005 - RNA, 19 nt, Homo sapiens
  misc_RNA (1)...(19): siRNA sense strand
gacaacacgguuucuauaa

SEQ ID NO: 83006 - RNA, 19 nt, Homo sapiens
  misc_RNA (1)...(19): siRNA sense strand
agaaagauacugagaaaga

SEQ ID NO: 83007 - RNA, 19 nt, Homo sapiens
  misc_RNA (1)...(19): siRNA sense strand
gagagaccaucuguuuauu

SEQ ID NO: 83008 - RNA, 19 nt, Homo sapiens
  misc_RNA (1)...(19): siRNA sense strand
ucaaagaaaggcaaggaua

SEQ ID NO: 83009 - RNA, 19 nt, Homo sapiens
  misc_RNA (1)...(19): siRNA sense strand
guaccguucuuuaaugaga

SEQ ID NO: 83010 - RNA, 19 nt, Homo sapiens
  misc_RNA (1)...(19): siRNA sense strand
aaagaaggaugcaaagaag

SEQ ID NO: 83011 - RNA, 19 nt, Homo sapiens
  misc_RNA (1)...(19): siRNA sense strand
aaagaaggaugcaaagaag

SEQ ID NO: 83012 - RNA, 19 nt, Homo sapiens
  misc_RNA (1)...(19): siRNA sense strand
gaaagaugccaagaaaguu

SEQ ID NO: 83013 - RNA, 19 nt, Homo sapiens
  misc_RNA (1)...(19): siRNA sense strand
aaaggaugaugucaagaaa

SEQ ID NO: 83014 - RNA, 19 nt, Homo sapiens
  misc_RNA (1)...(19): siRNA sense strand
caaagaagggcaaggauuc

SEQ ID NO: 83015 - RNA, 19 nt, Homo sapiens
  misc_RNA (1)...(19): siRNA sense strand
ggagguacagagaaagaua

SEQ ID NO: 83016 - RNA, 19 nt, Homo sapiens
  misc_RNA (1)...(19): siRNA sense strand
caaagaaaggcaaggauau

SEQ ID NO: 83017 - RNA, 19 nt, Homo sapiens
  misc_RNA (1)...(19): siRNA sense strand
gaagacaagacaacacaga

SEQ ID NO: 83018 - RNA, 19 nt, Homo sapiens
  misc_RNA (1)...(19): siRNA sense strand
gauaagaagaagcccagua

SEQ ID NO: 83019 - RNA, 19 nt, Homo sapiens
  misc_RNA (1)...(19): siRNA sense strand
cgaaggaugccaagaaaga

SEQ ID NO: 83020 - RNA, 19 nt, Homo sapiens
  misc_RNA (1)...(19): siRNA sense strand
cgaaagaugccaagaaagu

SEQ ID NO: 83021 - RNA, 19 nt, Homo sapiens
  misc_RNA (1)...(19): siRNA sense strand
aaaaggaggugcaaagaaa

SEQ ID NO: 83022 - RNA, 19 nt, Homo sapiens
  misc_RNA (1)...(19): siRNA sense strand
aaagaaaggcaaggauaua

SEQ ID NO: 83023 - RNA, 19 nt, Homo sapiens
  misc_RNA (1)...(19): siRNA sense strand
caagaaagagucuaagaag

SEQ ID NO: 83024 - RNA, 19 nt, Homo sapiens
  misc_RNA (1)...(19): siRNA sense strand
aagaagaagcccaguagua

SEQ ID NO: 83025 - RNA, 19 nt, Homo sapiens
  misc_RNA (1)...(19): siRNA sense strand
gcaaagacucagcaacaga

SEQ ID NO: 83026 - RNA, 19 nt, Homo sapiens
  misc_RNA (1)...(19): siRNA sense strand
gaguaaacuuugggccaua

SEQ ID NO: 83027 - RNA, 19 nt, Homo sapiens
  misc_RNA (1)...(19): siRNA sense strand
caaagacucagcaacagaa

SEQ ID NO: 83028 - RNA, 19 nt, Homo sapiens
  misc_RNA (1)...(19): siRNA sense strand
ugagagaccaucuguuuau

SEQ ID NO: 83029 - RNA, 19 nt, Homo sapiens
  misc_RNA (1)...(19): siRNA sense strand
aaagaagaaugcaaagaag

SEQ ID NO: 83030 - RNA, 19 nt, Homo sapiens
  misc_RNA (1)...(19): siRNA sense strand
gcaaagaagaaugcaaaga

SEQ ID NO: 83031 - RNA, 19 nt, Homo sapiens
  misc_RNA (1)...(19): siRNA sense strand
gggcaaagacucagcaaca

SEQ ID NO: 83032 - RNA, 19 nt, Homo sapiens
  misc_RNA (1)...(19): siRNA sense strand
aagaggagaucguagacaa

SEQ ID NO: 83033 - RNA, 19 nt, Homo sapiens
  misc_RNA (1)...(19): siRNA sense strand
cuaagaaggaugcaaagaa

SEQ ID NO: 83034 - RNA, 19 nt, Homo sapiens
  misc_RNA (1)...(19): siRNA sense strand
agaaagagucuaagaagga

SEQ ID NO: 83035 - RNA, 19 nt, Homo sapiens
  misc_RNA (1)...(19): siRNA sense strand
guacagagaaagauagcaa

SEQ ID NO: 83036 - RNA, 19 nt, Homo sapiens
  misc_RNA (1)...(19): siRNA sense strand
caaagacucggcaacagaa

SEQ ID NO: 83037 - RNA, 19 nt, Homo sapiens
  misc_RNA (1)...(19): siRNA sense strand
cgagguggauucuaaagca

SEQ ID NO: 83038 - RNA, 19 nt, Homo sapiens
  misc_RNA (1)...(19): siRNA sense strand
gauaauuacauuccaguca

SEQ ID NO: 83039 - RNA, 19 nt, Homo sapiens
  misc_RNA (1)...(19): siRNA sense strand
gcaaagaaggaugcaaaga

SEQ ID NO: 83040 - RNA, 19 nt, Homo sapiens
  misc_RNA (1)...(19): siRNA sense strand
uaagaaggacgccacgaaa

SEQ ID NO: 83041 - RNA, 19 nt, Homo sapiens
  misc_RNA (1)...(19): siRNA sense strand
aggaugaugucaagaaaga

SEQ ID NO: 83042 - RNA, 19 nt, Homo sapiens
  misc_RNA (1)...(19): siRNA sense strand
ggauguaccguucuuuaau

SEQ ID NO: 83043 - RNA, 19 nt, Homo sapiens
  misc_RNA (1)...(19): siRNA sense strand
ucugagagaccaucuguuu

SEQ ID NO: 83044 - RNA, 19 nt, Homo sapiens
  misc_RNA (1)...(19): siRNA sense strand
ucaagaaagagucuaagaa

SEQ ID NO: 83045 - RNA, 19 nt, Homo sapiens
  misc_RNA (1)...(19): siRNA sense strand
gaucaaaaccuucucaaau

SEQ ID NO: 83046 - RNA, 19 nt, Homo sapiens
  misc_RNA (1)...(19): siRNA sense strand
gaaaguugccaagaaagau

SEQ ID NO: 83047 - RNA, 19 nt, Homo sapiens
  misc_RNA (1)...(19): siRNA sense strand
gaagaagcccaguaguaca

SEQ ID NO: 83048 - RNA, 19 nt, Homo sapiens
  misc_RNA (1)...(19): siRNA sense strand
cagaaggacacaacagauu

SEQ ID NO: 83049 - RNA, 19 nt, Homo sapiens
  misc_RNA (1)...(19): siRNA sense strand
acaacacgguuucuauaau

SEQ ID NO: 83050 - RNA, 19 nt, Homo sapiens
  misc_RNA (1)...(19): siRNA sense strand
ccaagauuccaaagaguaa

SEQ ID NO: 83051 - RNA, 19 nt, Homo sapiens
  misc_RNA (1)...(19): siRNA sense strand
gaaaggcaaggauauagag

SEQ ID NO: 83052 - RNA, 19 nt, Homo sapiens
  misc_RNA (1)...(19): siRNA sense strand
ccaagaaagauacugagaa

SEQ ID NO: 83053 - RNA, 19 nt, Homo sapiens
  misc_RNA (1)...(19): siRNA sense strand
ccacgaaagaugccaagaa

SEQ ID NO: 83054 - RNA, 19 nt, Homo sapiens
  misc_RNA (1)...(19): siRNA sense strand
gaggugcaaagaaagauaa

SEQ ID NO: 83055 - RNA, 19 nt, Homo sapiens
  misc_RNA (1)...(19): siRNA sense strand
ggaggugcaaagaaagaua

SEQ ID NO: 83056 - RNA, 19 nt, Homo sapiens
  misc_RNA (1)...(19): siRNA sense strand
aggcaaggauauagagaaa

SEQ ID NO: 83057 - RNA, 19 nt, Homo sapiens
  misc_RNA (1)...(19): siRNA sense strand
gguaagaaagauaagaaga

SEQ ID NO: 83058 - RNA, 19 nt, Homo sapiens
  misc_RNA (1)...(19): siRNA sense strand
guaagaaaggugaagacaa

SEQ ID NO: 83059 - RNA, 19 nt, Homo sapiens
  misc_RNA (1)...(19): siRNA sense strand
aaagaaggaugaggaugga

SEQ ID NO: 83060 - RNA, 19 nt, Homo sapiens
  misc_RNA (1)...(19): siRNA sense strand
gcaaggauucagccauaga

SEQ ID NO: 83061 - RNA, 19 nt, Homo sapiens
  misc_RNA (1)...(19): siRNA sense strand
ucaaagaagggcaaggauu

SEQ ID NO: 83062 - RNA, 19 nt, Homo sapiens
  misc_RNA (1)...(19): siRNA sense strand
aaaaggagguacagagaaa

SEQ ID NO: 83063 - RNA, 19 nt, Homo sapiens
  misc_RNA (1)...(19): siRNA sense strand
acacuuugcccuguuauuu

SEQ ID NO: 83064 - RNA, 19 nt, Homo sapiens
  misc_RNA (1)...(19): siRNA sense strand
gaaaggugaagacaagaca

SEQ ID NO: 83065 - RNA, 19 nt, Homo sapiens
  misc_RNA (1)...(19): siRNA sense strand
aaaguugccaagaaagaua

SEQ ID NO: 83066 - RNA, 19 nt, Homo sapiens
  misc_RNA (1)...(19): siRNA sense strand
caauuaagaggagaucgua

SEQ ID NO: 83067 - RNA, 19 nt, Homo sapiens
  misc_RNA (1)...(19): siRNA sense strand
caaagaaggaugaaaagaa

SEQ ID NO: 83068 - RNA, 19 nt, Homo sapiens
  misc_RNA (1)...(19): siRNA sense strand
gaaggacgccacgaaagau

SEQ ID NO: 83069 - RNA, 19 nt, Homo sapiens
  misc_RNA (1)...(19): siRNA sense strand
aagaaaagcuagaugcaaa

SEQ ID NO: 83070 - RNA, 19 nt, Homo sapiens
  misc_RNA (1)...(19): siRNA sense strand
gcagaaauugguaagaaag

SEQ ID NO: 83071 - RNA, 19 nt, Homo sapiens
  misc_RNA (1)...(19): siRNA sense strand
gaccaucuguuuauuuagc

SEQ ID NO: 83072 - RNA, 19 nt, Homo sapiens
  misc_RNA (1)...(19): siRNA sense strand
gcaaacaaaggugaugaau

SEQ ID NO: 83073 - RNA, 19 nt, Homo sapiens
  misc_RNA (1)...(19): siRNA sense strand
uaaagcagcagaaauuggu

SEQ ID NO: 83074 - RNA, 19 nt, Homo sapiens
  misc_RNA (1)...(19): siRNA sense strand
agaaggacgccacgaaaga

SEQ ID NO: 83075 - RNA, 19 nt, Homo sapiens
  misc_RNA (1)...(19): siRNA sense strand
gcaaagaaagauagcaaaa

SEQ ID NO: 83076 - RNA, 19 nt, Homo sapiens
  misc_RNA (1)...(19): siRNA sense strand
gggacaacacgguuucuau

SEQ ID NO: 83077 - RNA, 19 nt, Homo sapiens
  misc_RNA (1)...(19): siRNA sense strand
agaaggaugcaaagaagaa

SEQ ID NO: 83078 - RNA, 19 nt, Homo sapiens
  misc_RNA (1)...(19): siRNA sense strand
agaaggaugcaaagaagaa

SEQ ID NO: 83079 - RNA, 19 nt, Homo sapiens
  misc_RNA (1)...(19): siRNA sense strand
aaagaugccaagaaaguug

SEQ ID NO: 83080 - RNA, 19 nt, Homo sapiens
  misc_RNA (1)...(19): siRNA sense strand
caaggauucagccauagaa

SEQ ID NO: 83081 - RNA, 19 nt, Homo sapiens
  misc_RNA (1)...(19): siRNA sense strand
caaacaaaggugaugaauc

SEQ ID NO: 83082 - RNA, 19 nt, Homo sapiens
  misc_RNA (1)...(19): siRNA sense strand
gcaacaggcugaaccauua

SEQ ID NO: 83083 - RNA, 19 nt, Homo sapiens
  misc_RNA (1)...(19): siRNA sense strand
gcaaagauauccuguuagu

SEQ ID NO: 83084 - RNA, 19 nt, Homo sapiens
  misc_RNA (1)...(19): siRNA sense strand
gaaccagccuucacccuuu

SEQ ID NO: 83085 - RNA, 19 nt, Homo sapiens
  misc_RNA (1)...(19): siRNA sense strand
aagcaaagauauccuguua

SEQ ID NO: 83086 - RNA, 19 nt, Homo sapiens
  misc_RNA (1)...(19): siRNA sense strand
gaucaaggaugugaaagaa

SEQ ID NO: 83087 - RNA, 19 nt, Homo sapiens
  misc_RNA (1)...(19): siRNA sense strand
gaacauccaguaaauaaga

SEQ ID NO: 83088 - RNA, 19 nt, Homo sapiens
  misc_RNA (1)...(19): siRNA sense strand
gcaaagcaguugagaaugg

SEQ ID NO: 83089 - RNA, 19 nt, Homo sapiens
  misc_RNA (1)...(19): siRNA sense strand
gcaugaacauccaguaaau

SEQ ID NO: 83090 - RNA, 19 nt, Homo sapiens
  misc_RNA (1)...(19): siRNA sense strand
caacagaaagcaaagauau

SEQ ID NO: 83091 - RNA, 19 nt, Homo sapiens
  misc_RNA (1)...(19): siRNA sense strand
auaaagagaucaaggaugu

SEQ ID NO: 83092 - RNA, 19 nt, Homo sapiens
  misc_RNA (1)...(19): siRNA sense strand
ucaaggaugugaaagaaau

SEQ ID NO: 83093 - RNA, 19 nt, Homo sapiens
  misc_RNA (1)...(19): siRNA sense strand
caaaggaucugggucaaca

SEQ ID NO: 83094 - RNA, 19 nt, Homo sapiens
  misc_RNA (1)...(19): siRNA sense strand
gaucuaaacucugaaaucg

SEQ ID NO: 83095 - RNA, 19 nt, Homo sapiens
  misc_RNA (1)...(19): siRNA sense strand
cuaaauaguccaacagaaa

SEQ ID NO: 83096 - RNA, 19 nt, Homo sapiens
  misc_RNA (1)...(19): siRNA sense strand
caaguuucccugccaguua

SEQ ID NO: 83097 - RNA, 19 nt, Homo sapiens
  misc_RNA (1)...(19): siRNA sense strand
gaacggcuucucugucaaa

SEQ ID NO: 83098 - RNA, 19 nt, Homo sapiens
  misc_RNA (1)...(19): siRNA sense strand
caaccuguaucuucugaga

SEQ ID NO: 83099 - RNA, 19 nt, Homo sapiens
  misc_RNA (1)...(19): siRNA sense strand
gagcaugaacauccaguaa

SEQ ID NO: 83100 - RNA, 19 nt, Homo sapiens
  misc_RNA (1)...(19): siRNA sense strand
aaacugaaaucggguguug

SEQ ID NO: 83101 - RNA, 19 nt, Homo sapiens
  misc_RNA (1)...(19): siRNA sense strand
ccaagacucuaugaugaaa

SEQ ID NO: 83102 - RNA, 19 nt, Homo sapiens
  misc_RNA (1)...(19): siRNA sense strand
ugagugccuuugccaguua

SEQ ID NO: 83103 - RNA, 19 nt, Homo sapiens
  misc_RNA (1)...(19): siRNA sense strand
gaaaucgacaccaaucaga

SEQ ID NO: 83104 - RNA, 19 nt, Homo sapiens
  misc_RNA (1)...(19): siRNA sense strand
ggacaacacaaacaaagga

SEQ ID NO: 83105 - RNA, 19 nt, Homo sapiens
  misc_RNA (1)...(19): siRNA sense strand
ugagaaaacugggguaaua

SEQ ID NO: 83106 - RNA, 19 nt, Homo sapiens
  misc_RNA (1)...(19): siRNA sense strand
cagcaaagcaguugagaau

SEQ ID NO: 83107 - RNA, 19 nt, Homo sapiens
  misc_RNA (1)...(19): siRNA sense strand
gaaacaagugcaaccaaug

SEQ ID NO: 83108 - RNA, 19 nt, Homo sapiens
  misc_RNA (1)...(19): siRNA sense strand
caucuuuggucuucaauca

SEQ ID NO: 83109 - RNA, 19 nt, Homo sapiens
  misc_RNA (1)...(19): siRNA sense strand
cuacuuuggucagcaauuu

SEQ ID NO: 83110 - RNA, 19 nt, Homo sapiens
  misc_RNA (1)...(19): siRNA sense strand
uaccaaaucuacugacaau

SEQ ID NO: 83111 - RNA, 19 nt, Homo sapiens
  misc_RNA (1)...(19): siRNA sense strand
caugaugacuuugaugcua

SEQ ID NO: 83112 - RNA, 19 nt, Homo sapiens
  misc_RNA (1)...(19): siRNA sense strand
gaaaggcccugaaaagaca

SEQ ID NO: 83113 - RNA, 19 nt, Homo sapiens
  misc_RNA (1)...(19): siRNA sense strand
gagccaagacucuaugaug

SEQ ID NO: 83114 - RNA, 19 nt, Homo sapiens
  misc_RNA (1)...(19): siRNA sense strand
caaaguaccaaaccaggaa

SEQ ID NO: 83115 - RNA, 19 nt, Homo sapiens
  misc_RNA (1)...(19): siRNA sense strand
gaauggugauguugacuac

SEQ ID NO: 83116 - RNA, 19 nt, Homo sapiens
  misc_RNA (1)...(19): siRNA sense strand
ggaucugggucaacauuuc

SEQ ID NO: 83117 - RNA, 19 nt, Homo sapiens
  misc_RNA (1)...(19): siRNA sense strand
gagaaggccagcaucaguu

SEQ ID NO: 83118 - RNA, 19 nt, Homo sapiens
  misc_RNA (1)...(19): siRNA sense strand
ccaguuauuucaacagcaa

SEQ ID NO: 83119 - RNA, 19 nt, Homo sapiens
  misc_RNA (1)...(19): siRNA sense strand
ugaccaaacuaacaaacug

SEQ ID NO: 83120 - RNA, 19 nt, Homo sapiens
  misc_RNA (1)...(19): siRNA sense strand
gcugaaccauuaguuguug

SEQ ID NO: 83121 - RNA, 19 nt, Homo sapiens
  misc_RNA (1)...(19): siRNA sense strand
gguaauagagcaugaacau

SEQ ID NO: 83122 - RNA, 19 nt, Homo sapiens
  misc_RNA (1)...(19): siRNA sense strand
acaccaaucagaauucuuu

SEQ ID NO: 83123 - RNA, 19 nt, Homo sapiens
  misc_RNA (1)...(19): siRNA sense strand
agaaacaagugcaaccaau

SEQ ID NO: 83124 - RNA, 19 nt, Homo sapiens
  misc_RNA (1)...(19): siRNA sense strand
ggaugugaaagaaauguuu

SEQ ID NO: 83125 - RNA, 19 nt, Homo sapiens
  misc_RNA (1)...(19): siRNA sense strand
ggagugaggcccuaaggau

SEQ ID NO: 83126 - RNA, 19 nt, Homo sapiens
  misc_RNA (1)...(19): siRNA sense strand
ggagaaggccagcaucagu

SEQ ID NO: 83127 - RNA, 19 nt, Homo sapiens
  misc_RNA (1)...(19): siRNA sense strand
uaguggaucuaaacucuga

SEQ ID NO: 83128 - RNA, 19 nt, Homo sapiens
  misc_RNA (1)...(19): siRNA sense strand
agccaagacucuaugauga

SEQ ID NO: 83129 - RNA, 19 nt, Homo sapiens
  misc_RNA (1)...(19): siRNA sense strand
gccaaugacuugcuugcau

SEQ ID NO: 83130 - RNA, 19 nt, Homo sapiens
  misc_RNA (1)...(19): siRNA sense strand
agaaagagaauucgaguag

SEQ ID NO: 83131 - RNA, 19 nt, Homo sapiens
  misc_RNA (1)...(19): siRNA sense strand
gauucuagaugaccaaacu

SEQ ID NO: 83132 - RNA, 19 nt, Homo sapiens
  misc_RNA (1)...(19): siRNA sense strand
caaaagcacccucaaagaa

SEQ ID NO: 83133 - RNA, 19 nt, Homo sapiens
  misc_RNA (1)...(19): siRNA sense strand
caaaucuacugacaaugca

SEQ ID NO: 83134 - RNA, 19 nt, Homo sapiens
  misc_RNA (1)...(19): siRNA sense strand
aaagccagcucccagacaa

SEQ ID NO: 83135 - RNA, 19 nt, Homo sapiens
  misc_RNA (1)...(19): siRNA sense strand
gauagaggaagccagcaaa

SEQ ID NO: 83136 - RNA, 19 nt, Homo sapiens
  misc_RNA (1)...(19): siRNA sense strand
guacaaguccagcuguuuc

SEQ ID NO: 83137 - RNA, 19 nt, Homo sapiens
  misc_RNA (1)...(19): siRNA sense strand
gaaguagaaacaagugcaa

SEQ ID NO: 83138 - RNA, 19 nt, Homo sapiens
  misc_RNA (1)...(19): siRNA sense strand
ggucaacauuucccuuucu

SEQ ID NO: 83139 - RNA, 19 nt, Homo sapiens
  misc_RNA (1)...(19): siRNA sense strand
gaucagaagaaagagaauu

SEQ ID NO: 83140 - RNA, 19 nt, Homo sapiens
  misc_RNA (1)...(19): siRNA sense strand
ugaugaaacuaaagggaau

SEQ ID NO: 83141 - RNA, 19 nt, Homo sapiens
  misc_RNA (1)...(19): siRNA sense strand
cagcaucuuuggucuucaa

SEQ ID NO: 83142 - RNA, 19 nt, Homo sapiens
  misc_RNA (1)...(19): siRNA sense strand
ccaacagaaagcaaagaua

SEQ ID NO: 83143 - RNA, 19 nt, Homo sapiens
  misc_RNA (1)...(19): siRNA sense strand
ccuaaauaguccaacagaa

SEQ ID NO: 83144 - RNA, 19 nt, Homo sapiens
  misc_RNA (1)...(19): siRNA sense strand
gagugaggcccuaaggauu

SEQ ID NO: 83145 - RNA, 19 nt, Homo sapiens
  misc_RNA (1)...(19): siRNA sense strand
gaauaucuccuagcaaggu

SEQ ID NO: 83146 - RNA, 19 nt, Homo sapiens
  misc_RNA (1)...(19): siRNA sense strand
cuacugacaaugcauuuga

SEQ ID NO: 83147 - RNA, 19 nt, Homo sapiens
  misc_RNA (1)...(19): siRNA sense strand
gaacaagaucaaugaacca

SEQ ID NO: 83148 - RNA, 19 nt, Homo sapiens
  misc_RNA (1)...(19): siRNA sense strand
ggagaaugcagaccaugau

SEQ ID NO: 83149 - RNA, 19 nt, Homo sapiens
  misc_RNA (1)...(19): siRNA sense strand
guuuaaggauuuccaacug

SEQ ID NO: 83150 - RNA, 19 nt, Homo sapiens
  misc_RNA (1)...(19): siRNA sense strand
uuacguguguggaggagaa

SEQ ID NO: 83151 - RNA, 19 nt, Homo sapiens
  misc_RNA (1)...(19): siRNA sense strand
ggauaaagagaucaaggau

SEQ ID NO: 83152 - RNA, 19 nt, Homo sapiens
  misc_RNA (1)...(19): siRNA sense strand
gggauaaagagaucaagga

SEQ ID NO: 83153 - RNA, 19 nt, Homo sapiens
  misc_RNA (1)...(19): siRNA sense strand
gauggguggucaaccuuca

SEQ ID NO: 83154 - RNA, 19 nt, Homo sapiens
  misc_RNA (1)...(19): siRNA sense strand
aaagagaauucgaguagcu

SEQ ID NO: 83155 - RNA, 19 nt, Homo sapiens
  misc_RNA (1)...(19): siRNA sense strand
gcauccuucuugccugaaa

SEQ ID NO: 83156 - RNA, 19 nt, Homo sapiens
  misc_RNA (1)...(19): siRNA sense strand
ggaucuaaacucugaaauc

SEQ ID NO: 83157 - RNA, 19 nt, Homo sapiens
  misc_RNA (1)...(19): siRNA sense strand
ggcaacaggcugaaccauu

SEQ ID NO: 83158 - RNA, 19 nt, Homo sapiens
  misc_RNA (1)...(19): siRNA sense strand
ccaaaucuacugacaaugc

SEQ ID NO: 83159 - RNA, 19 nt, Homo sapiens
  misc_RNA (1)...(19): siRNA sense strand
uaacgaaguagaaacaagu

SEQ ID NO: 83160 - RNA, 19 nt, Homo sapiens
  misc_RNA (1)...(19): siRNA sense strand
uaaccggacuggcaaacag

SEQ ID NO: 83161 - RNA, 19 nt, Homo sapiens
  misc_RNA (1)...(19): siRNA sense strand
ucacacagccagaccaauc

SEQ ID NO: 83162 - RNA, 19 nt, Homo sapiens
  misc_RNA (1)...(19): siRNA sense strand
uaaauaguccaacagaaag

SEQ ID NO: 83163 - RNA, 19 nt, Homo sapiens
  misc_RNA (1)...(19): siRNA sense strand
cccuaaggauucuagauga

SEQ ID NO: 83164 - RNA, 19 nt, Homo sapiens
  misc_RNA (1)...(19): siRNA sense strand
caacacaaacaaaggaucu

SEQ ID NO: 83165 - RNA, 19 nt, Homo sapiens
  misc_RNA (1)...(19): siRNA sense strand
ugcagaccaugaugacuuu

SEQ ID NO: 83166 - RNA, 19 nt, Homo sapiens
  misc_RNA (1)...(19): siRNA sense strand
caaaaugggguaucugaaa

SEQ ID NO: 83167 - RNA, 19 nt, Homo sapiens
  misc_RNA (1)...(19): siRNA sense strand
ugaccuaaauaguccaaca

SEQ ID NO: 83168 - RNA, 19 nt, Homo sapiens
  misc_RNA (1)...(19): siRNA sense strand
gaggagaaggccagcauca

SEQ ID NO: 83169 - RNA, 19 nt, Homo sapiens
  misc_RNA (1)...(19): siRNA sense strand
ggcauuugguuacgugugu

SEQ ID NO: 83170 - RNA, 19 nt, Homo sapiens
  misc_RNA (1)...(19): siRNA sense strand
caugaacauccaguaaaua

SEQ ID NO: 83171 - RNA, 19 nt, Homo sapiens
  misc_RNA (1)...(19): siRNA sense strand
gccaagacucuaugaugaa

SEQ ID NO: 83172 - RNA, 19 nt, Homo sapiens
  misc_RNA (1)...(19): siRNA sense strand
uaucccaccuccacaaagu

SEQ ID NO: 83173 - RNA, 19 nt, Homo sapiens
  misc_RNA (1)...(19): siRNA sense strand
gcguaaagcaggacuugga

SEQ ID NO: 83174 - RNA, 19 nt, Homo sapiens
  misc_RNA (1)...(19): siRNA sense strand
ccagaccaaucgacaccuu

SEQ ID NO: 83175 - RNA, 19 nt, Homo sapiens
  misc_RNA (1)...(19): siRNA sense strand
gaccaaacuaacaaacuga

SEQ ID NO: 83176 - RNA, 19 nt, Homo sapiens
  misc_RNA (1)...(19): siRNA sense strand
cuacaccuccugaccuaaa

SEQ ID NO: 83177 - RNA, 19 nt, Homo sapiens
  misc_RNA (1)...(19): siRNA sense strand
cauggaacacagcaucuuu

SEQ ID NO: 83178 - RNA, 19 nt, Homo sapiens
  misc_RNA (1)...(19): siRNA sense strand
ccaggaagaggcagaagga

SEQ ID NO: 83179 - RNA, 19 nt, Homo sapiens
  misc_RNA (1)...(19): siRNA sense strand
guaaagcaggacuuggaaa

SEQ ID NO: 83180 - RNA, 19 nt, Homo sapiens
  misc_RNA (1)...(19): siRNA sense strand
cauacagaauggcguaaag

SEQ ID NO: 83181 - RNA, 19 nt, Homo sapiens
  misc_RNA (1)...(19): siRNA sense strand
ccaaucagaauucuuuaag

SEQ ID NO: 83182 - RNA, 19 nt, Homo sapiens
  misc_RNA (1)...(19): siRNA sense strand
gaacaaagcggauuuccaa

SEQ ID NO: 83183 - RNA, 19 nt, Homo sapiens
  misc_RNA (1)...(19): siRNA sense strand
gagcgagccuuugcugauu

SEQ ID NO: 83184 - RNA, 19 nt, Homo sapiens
  misc_RNA (1)...(19): siRNA sense strand
acgcguaccugcuguauau

SEQ ID NO: 83185 - RNA, 19 nt, Homo sapiens
  misc_RNA (1)...(19): siRNA sense strand
gaucaacccacagaacaaa

SEQ ID NO: 83186 - RNA, 19 nt, Homo sapiens
  misc_RNA (1)...(19): siRNA sense strand
gguagugucugucauuucg

SEQ ID NO: 83187 - RNA, 19 nt, Homo sapiens
  misc_RNA (1)...(19): siRNA sense strand
gcaccauccugcaccuugu

SEQ ID NO: 83188 - RNA, 19 nt, Homo sapiens
  misc_RNA (1)...(19): siRNA sense strand
ccacagaacaaagcggauu

SEQ ID NO: 83189 - RNA, 19 nt, Homo sapiens
  misc_RNA (1)...(19): siRNA sense strand
gggcgcugcaguucgguua

SEQ ID NO: 83190 - RNA, 19 nt, Homo sapiens
  misc_RNA (1)...(19): siRNA sense strand
gcaccuuguugucaugaac

SEQ ID NO: 83191 - RNA, 19 nt, Homo sapiens
  misc_RNA (1)...(19): siRNA sense strand
cagaucaacccacagaaca

SEQ ID NO: 83192 - RNA, 19 nt, Homo sapiens
  misc_RNA (1)...(19): siRNA sense strand
ucauuucgcgguucuuaga

SEQ ID NO: 83193 - RNA, 19 nt, Homo sapiens
  misc_RNA (1)...(19): siRNA sense strand
auacagaucaacccacaga

SEQ ID NO: 83194 - RNA, 19 nt, Homo sapiens
  misc_RNA (1)...(19): siRNA sense strand
gcgguuugccugagaauac

SEQ ID NO: 83195 - RNA, 19 nt, Homo sapiens
  misc_RNA (1)...(19): siRNA sense strand
ucucgggcuucaucucuug

SEQ ID NO: 83196 - RNA, 19 nt, Homo sapiens
  misc_RNA (1)...(19): siRNA sense strand
ggacgcguaccugcuguau

SEQ ID NO: 83197 - RNA, 19 nt, Homo sapiens
  misc_RNA (1)...(19): siRNA sense strand
ucgguagugucugucauuu

SEQ ID NO: 83198 - RNA, 19 nt, Homo sapiens
  misc_RNA (1)...(19): siRNA sense strand
cggcgucgguagugucugu

SEQ ID NO: 83199 - RNA, 19 nt, Homo sapiens
  misc_RNA (1)...(19): siRNA sense strand
ugucauuucgcgguucuua

SEQ ID NO: 83200 - RNA, 19 nt, Homo sapiens
  misc_RNA (1)...(19): siRNA sense strand
cacagaacaaagcggauuu

SEQ ID NO: 83201 - RNA, 19 nt, Homo sapiens
  misc_RNA (1)...(19): siRNA sense strand
ccuagcgguuugccugaga

SEQ ID NO: 83202 - RNA, 19 nt, Homo sapiens
  misc_RNA (1)...(19): siRNA sense strand
gacgcguaccugcuguaua

SEQ ID NO: 83203 - RNA, 19 nt, Homo sapiens
  misc_RNA (1)...(19): siRNA sense strand
gcagagagcagggauguag

SEQ ID NO: 83204 - RNA, 19 nt, Homo sapiens
  misc_RNA (1)...(19): siRNA sense strand
ggaagcaaacgcugaagau

SEQ ID NO: 83205 - RNA, 19 nt, Homo sapiens
  misc_RNA (1)...(19): siRNA sense strand
ggccucaucuucaucaaca

SEQ ID NO: 83206 - RNA, 19 nt, Homo sapiens
  misc_RNA (1)...(19): siRNA sense strand
gcacgucucccuguuuguu

SEQ ID NO: 83207 - RNA, 19 nt, Homo sapiens
  misc_RNA (1)...(19): siRNA sense strand
cgacagcgacaccagguuu

SEQ ID NO: 83208 - RNA, 19 nt, Homo sapiens
  misc_RNA (1)...(19): siRNA sense strand
agaggagccuggcaaguuc

SEQ ID NO: 83209 - RNA, 19 nt, Homo sapiens
  misc_RNA (1)...(19): siRNA sense strand
ugaggaaggccaagcagaa

SEQ ID NO: 83210 - RNA, 19 nt, Homo sapiens
  misc_RNA (1)...(19): siRNA sense strand
agcaaacgcugaagaucuu

SEQ ID NO: 83211 - RNA, 19 nt, Homo sapiens
  misc_RNA (1)...(19): siRNA sense strand
guuggacguugccugcuuu

SEQ ID NO: 83212 - RNA, 19 nt, Homo sapiens
  misc_RNA (1)...(19): siRNA sense strand
ccgcacgucucccuguuug

SEQ ID NO: 83213 - RNA, 19 nt, Homo sapiens
  misc_RNA (1)...(19): siRNA sense strand
gagguggagcugcccagua

SEQ ID NO: 83214 - RNA, 19 nt, Homo sapiens
  misc_RNA (1)...(19): siRNA sense strand
cccaagaucgugcagauga

SEQ ID NO: 83215 - RNA, 19 nt, Homo sapiens
  misc_RNA (1)...(19): siRNA sense strand
gaagcaaacgcugaagauc

SEQ ID NO: 83216 - RNA, 19 nt, Homo sapiens
  misc_RNA (1)...(19): siRNA sense strand
agguggagcugcccaguau

SEQ ID NO: 83217 - RNA, 19 nt, Homo sapiens
  misc_RNA (1)...(19): siRNA sense strand
gaagcuggcagugcagaga

SEQ ID NO: 83218 - RNA, 19 nt, Homo sapiens
  misc_RNA (1)...(19): siRNA sense strand
aagaggagccuggcaaguu

SEQ ID NO: 83219 - RNA, 19 nt, Homo sapiens
  misc_RNA (1)...(19): siRNA sense strand
ggagcugcccaguauugaa

SEQ ID NO: 83220 - RNA, 19 nt, Homo sapiens
  misc_RNA (1)...(19): siRNA sense strand
gggaagcaaacgcugaaga

SEQ ID NO: 83221 - RNA, 19 nt, Homo sapiens
  misc_RNA (1)...(19): siRNA sense strand
gagcugcccaguauugaag

SEQ ID NO: 83222 - RNA, 19 nt, Homo sapiens
  misc_RNA (1)...(19): siRNA sense strand
gcaccuccacccagacugu

SEQ ID NO: 83223 - RNA, 19 nt, Homo sapiens
  misc_RNA (1)...(19): siRNA sense strand
gcccuaaggugcacaugcu

SEQ ID NO: 83224 - RNA, 19 nt, Homo sapiens
  misc_RNA (1)...(19): siRNA sense strand
ucaccaagcccaccuucug

SEQ ID NO: 83225 - RNA, 19 nt, Homo sapiens
  misc_RNA (1)...(19): siRNA sense strand
guggagcugcccaguauug

SEQ ID NO: 83226 - RNA, 19 nt, Homo sapiens
  misc_RNA (1)...(19): siRNA sense strand
gaagaggagccuggcaagu

SEQ ID NO: 83227 - RNA, 19 nt, Homo sapiens
  misc_RNA (1)...(19): siRNA sense strand
gaacccucaucaggucuuc

SEQ ID NO: 83228 - RNA, 19 nt, Homo sapiens
  misc_RNA (1)...(19): siRNA sense strand
uguacaugcugcugaagga

SEQ ID NO: 83229 - RNA, 19 nt, Homo sapiens
  misc_RNA (1)...(19): siRNA sense strand
cgucugcaauuucaugucu

SEQ ID NO: 83230 - RNA, 19 nt, Homo sapiens
  misc_RNA (1)...(19): siRNA sense strand
ugugcgacgucugcaauuu

SEQ ID NO: 83231 - RNA, 19 nt, Homo sapiens
  misc_RNA (1)...(19): siRNA sense strand
ugcgaggucugcaggaaga

SEQ ID NO: 83232 - RNA, 19 nt, Homo sapiens
  misc_RNA (1)...(19): siRNA sense strand
cgacgucugcaauuucaug

SEQ ID NO: 83233 - RNA, 19 nt, Homo sapiens
  misc_RNA (1)...(19): siRNA sense strand
ggcuguacaugcugcugaa

SEQ ID NO: 83234 - RNA, 19 nt, Homo sapiens
  misc_RNA (1)...(19): siRNA sense strand
gcaaacgcugaagaucuuu

SEQ ID NO: 83235 - RNA, 19 nt, Homo sapiens
  misc_RNA (1)...(19): siRNA sense strand
ccaagaucgugcagaugag

SEQ ID NO: 83236 - RNA, 19 nt, Homo sapiens
  misc_RNA (1)...(19): siRNA sense strand
gagccuggcaaguucacaa

SEQ ID NO: 83237 - RNA, 19 nt, Homo sapiens
  misc_RNA (1)...(19): siRNA sense strand
aagcaaacgcugaagaucu

SEQ ID NO: 83238 - RNA, 19 nt, Homo sapiens
  misc_RNA (1)...(19): siRNA sense strand
aaacgcugaagaucuuuga

SEQ ID NO: 83239 - RNA, 19 nt, Homo sapiens
  misc_RNA (1)...(19): siRNA sense strand
gaggaaggccaagcagaag

SEQ ID NO: 83240 - RNA, 19 nt, Homo sapiens
  misc_RNA (1)...(19): siRNA sense strand
ucagcaagacgcagagcuu

SEQ ID NO: 83241 - RNA, 19 nt, Homo sapiens
  misc_RNA (1)...(19): siRNA sense strand
gcagaagaucagucacucu

SEQ ID NO: 83242 - RNA, 19 nt, Homo sapiens
  misc_RNA (1)...(19): siRNA sense strand
ucgugcagaugaguaacua

SEQ ID NO: 83243 - RNA, 19 nt, Homo sapiens
  misc_RNA (1)...(19): siRNA sense strand
ccugcuggaugcccacgaa

SEQ ID NO: 83244 - RNA, 19 nt, Homo sapiens
  misc_RNA (1)...(19): siRNA sense strand
gggcacagggaaugaccuu

SEQ ID NO: 83245 - RNA, 19 nt, Homo sapiens
  misc_RNA (1)...(19): siRNA sense strand
ggauugcccaggguuccua

SEQ ID NO: 83246 - RNA, 19 nt, Homo sapiens
  misc_RNA (1)...(19): siRNA sense strand
guauugaaggccucaucuu

SEQ ID NO: 83247 - RNA, 19 nt, Homo sapiens
  misc_RNA (1)...(19): siRNA sense strand
ugcgacgucugcaauuuca

SEQ ID NO: 83248 - RNA, 19 nt, Homo sapiens
  misc_RNA (1)...(19): siRNA sense strand
gaacauuccuggauuaagg

SEQ ID NO: 83249 - RNA, 19 nt, Homo sapiens
  misc_RNA (1)...(19): siRNA sense strand
gaaucaagcucaucgacuu

SEQ ID NO: 83250 - RNA, 19 nt, Homo sapiens
  misc_RNA (1)...(19): siRNA sense strand
gcaaguagccuccgagaug

SEQ ID NO: 83251 - RNA, 19 nt, Homo sapiens
  misc_RNA (1)...(19): siRNA sense strand
ggaggaccauuaugagaug

SEQ ID NO: 83252 - RNA, 19 nt, Homo sapiens
  misc_RNA (1)...(19): siRNA sense strand
ccacgcgucugaaggagua

SEQ ID NO: 83253 - RNA, 19 nt, Homo sapiens
  misc_RNA (1)...(19): siRNA sense strand
cagccaaguucaucaagaa

SEQ ID NO: 83254 - RNA, 19 nt, Homo sapiens
  misc_RNA (1)...(19): siRNA sense strand
gcagccaaguucaucaaga

SEQ ID NO: 83255 - RNA, 19 nt, Homo sapiens
  misc_RNA (1)...(19): siRNA sense strand
cagagauugugaacuauga

SEQ ID NO: 83256 - RNA, 19 nt, Homo sapiens
  misc_RNA (1)...(19): siRNA sense strand
ggacguggaggaccauuau

SEQ ID NO: 83257 - RNA, 19 nt, Homo sapiens
  misc_RNA (1)...(19): siRNA sense strand
gaggaguacuucagcaaca

SEQ ID NO: 83258 - RNA, 19 nt, Homo sapiens
  misc_RNA (1)...(19): siRNA sense strand
ggaguacgcagccaaguuc

SEQ ID NO: 83259 - RNA, 19 nt, Homo sapiens
  misc_RNA (1)...(19): siRNA sense strand
caacagcuacgccgacuuc

SEQ ID NO: 83260 - RNA, 19 nt, Homo sapiens
  misc_RNA (1)...(19): siRNA sense strand
gaucccaagcggagaauga

SEQ ID NO: 83261 - RNA, 19 nt, Homo sapiens
  misc_RNA (1)...(19): siRNA sense strand
uucacuaccugcacucuaa

SEQ ID NO: 83262 - RNA, 19 nt, Homo sapiens
  misc_RNA (1)...(19): siRNA sense strand
ucaugcugcuggacaagaa

SEQ ID NO: 83263 - RNA, 19 nt, Homo sapiens
  misc_RNA (1)...(19): siRNA sense strand
ccccagagauugugaacua

SEQ ID NO: 83264 - RNA, 19 nt, Homo sapiens
  misc_RNA (1)...(19): siRNA sense strand
caacaucucagccgugaac

SEQ ID NO: 83265 - RNA, 19 nt, Homo sapiens
  misc_RNA (1)...(19): siRNA sense strand
gcggggagcucuuugacuu

SEQ ID NO: 83266 - RNA, 19 nt, Homo sapiens
  misc_RNA (1)...(19): siRNA sense strand
gaaggaguacaccaucaag

SEQ ID NO: 83267 - RNA, 19 nt, Homo sapiens
  misc_RNA (1)...(19): siRNA sense strand
ccacccaguuccucaagca

SEQ ID NO: 83268 - RNA, 19 nt, Homo sapiens
  misc_RNA (1)...(19): siRNA sense strand
aggagacgcucaccaacau

SEQ ID NO: 83269 - RNA, 19 nt, Homo sapiens
  misc_RNA (1)...(19): siRNA sense strand
ucaagucgcacuccagcuu

SEQ ID NO: 83270 - RNA, 19 nt, Homo sapiens
  misc_RNA (1)...(19): siRNA sense strand
gccggcugcucgucaaaga

SEQ ID NO: 83271 - RNA, 19 nt, Homo sapiens
  misc_RNA (1)...(19): siRNA sense strand
ucucagccgugaacuacga

SEQ ID NO: 83272 - RNA, 19 nt, Homo sapiens
  misc_RNA (1)...(19): siRNA sense strand
guacgcagccaaguucauc

SEQ ID NO: 83273 - RNA, 19 nt, Homo sapiens
  misc_RNA (1)...(19): siRNA sense strand
ugaaggaguacaccaucaa

SEQ ID NO: 83274 - RNA, 19 nt, Homo sapiens
  misc_RNA (1)...(19): siRNA sense strand
ccagagauugugaacuaug

SEQ ID NO: 83275 - RNA, 19 nt, Homo sapiens
  misc_RNA (1)...(19): siRNA sense strand
cacgacaucuucgagaaca

SEQ ID NO: 83276 - RNA, 19 nt, Homo sapiens
  misc_RNA (1)...(19): siRNA sense strand
aaagaucccaagcggagaa

SEQ ID NO: 83277 - RNA, 19 nt, Homo sapiens
  misc_RNA (1)...(19): siRNA sense strand
guggaggaccauuaugaga

SEQ ID NO: 83278 - RNA, 19 nt, Homo sapiens
  misc_RNA (1)...(19): siRNA sense strand
cuaagcgcaucgcacacuu

SEQ ID NO: 83279 - RNA, 19 nt, Homo sapiens
  misc_RNA (1)...(19): siRNA sense strand
gaacauccugcgggagauc

SEQ ID NO: 83280 - RNA, 19 nt, Homo sapiens
  misc_RNA (1)...(19): siRNA sense strand
cugaaggaguacaccauca

SEQ ID NO: 83281 - RNA, 19 nt, Homo sapiens
  misc_RNA (1)...(19): siRNA sense strand
ucgcacacuuugaccugaa

SEQ ID NO: 83282 - RNA, 19 nt, Homo sapiens
  misc_RNA (1)...(19): siRNA sense strand
uaagcgcaucgcacacuuu

SEQ ID NO: 83283 - RNA, 19 nt, Homo sapiens
  misc_RNA (1)...(19): siRNA sense strand
gcacgacaucuucgagaac

SEQ ID NO: 83284 - RNA, 19 nt, Homo sapiens
  misc_RNA (1)...(19): siRNA sense strand
caggagacgcucaccaaca

SEQ ID NO: 83285 - RNA, 19 nt, Homo sapiens
  misc_RNA (1)...(19): siRNA sense strand
cggcaucgcgcacaagauc

SEQ ID NO: 83286 - RNA, 19 nt, Homo sapiens
  misc_RNA (1)...(19): siRNA sense strand
gugcccaacccacgaauca

SEQ ID NO: 83287 - RNA, 19 nt, Homo sapiens
  misc_RNA (1)...(19): siRNA sense strand
gcgcaucgcacacuuugac

SEQ ID NO: 83288 - RNA, 19 nt, Homo sapiens
  misc_RNA (1)...(19): siRNA sense strand
ugcacgacaucuucgagaa

SEQ ID NO: 83289 - RNA, 19 nt, Homo sapiens
  misc_RNA (1)...(19): siRNA sense strand
aggagaaggaggccuggua

SEQ ID NO: 83290 - RNA, 19 nt, Homo sapiens
  misc_RNA (1)...(19): siRNA sense strand
caucucagccgugaacuac

SEQ ID NO: 83291 - RNA, 19 nt, Homo sapiens
  misc_RNA (1)...(19): siRNA sense strand
gcaagcagaugguuaaauu

SEQ ID NO: 83292 - RNA, 19 nt, Homo sapiens
  misc_RNA (1)...(19): siRNA sense strand
gaaggaagagcuacuguua

SEQ ID NO: 83293 - RNA, 19 nt, Homo sapiens
  misc_RNA (1)...(19): siRNA sense strand
ccaaacgacucacuccuua

SEQ ID NO: 83294 - RNA, 19 nt, Homo sapiens
  misc_RNA (1)...(19): siRNA sense strand
uaaccaggauacaagauua

SEQ ID NO: 83295 - RNA, 19 nt, Homo sapiens
  misc_RNA (1)...(19): siRNA sense strand
ccaaacaguccaagucuua

SEQ ID NO: 83296 - RNA, 19 nt, Homo sapiens
  misc_RNA (1)...(19): siRNA sense strand
gaucugagcacaccaaaug

SEQ ID NO: 83297 - RNA, 19 nt, Homo sapiens
  misc_RNA (1)...(19): siRNA sense strand
gaucuuaggacaucaacua

SEQ ID NO: 83298 - RNA, 19 nt, Homo sapiens
  misc_RNA (1)...(19): siRNA sense strand
ggagccaacucuaagacua

SEQ ID NO: 83299 - RNA, 19 nt, Homo sapiens
  misc_RNA (1)...(19): siRNA sense strand
gaaggaggagccaauguuu

SEQ ID NO: 83300 - RNA, 19 nt, Homo sapiens
  misc_RNA (1)...(19): siRNA sense strand
caugagaggagaagaaaua

SEQ ID NO: 83301 - RNA, 19 nt, Homo sapiens
  misc_RNA (1)...(19): siRNA sense strand
aagcagagcuaaagggaaa

SEQ ID NO: 83302 - RNA, 19 nt, Homo sapiens
  misc_RNA (1)...(19): siRNA sense strand
gcuguugggucauuuggua

SEQ ID NO: 83303 - RNA, 19 nt, Homo sapiens
  misc_RNA (1)...(19): siRNA sense strand
uaaauuugcugccaacauc

SEQ ID NO: 83304 - RNA, 19 nt, Homo sapiens
  misc_RNA (1)...(19): siRNA sense strand
ucaaaggacuucaagaaag

SEQ ID NO: 83305 - RNA, 19 nt, Homo sapiens
  misc_RNA (1)...(19): siRNA sense strand
gcaagaaggagaagaggaa

SEQ ID NO: 83306 - RNA, 19 nt, Homo sapiens
  misc_RNA (1)...(19): siRNA sense strand
ccacagcuauauaagcaaa

SEQ ID NO: 83307 - RNA, 19 nt, Homo sapiens
  misc_RNA (1)...(19): siRNA sense strand
agagagagcuuuacaucau

SEQ ID NO: 83308 - RNA, 19 nt, Homo sapiens
  misc_RNA (1)...(19): siRNA sense strand
gcuguaagaccuuucuaua

SEQ ID NO: 83309 - RNA, 19 nt, Homo sapiens
  misc_RNA (1)...(19): siRNA sense strand
gcaagcaagcagaugguua

SEQ ID NO: 83310 - RNA, 19 nt, Homo sapiens
  misc_RNA (1)...(19): siRNA sense strand
uagaagguguugugagaaa

SEQ ID NO: 83311 - RNA, 19 nt, Homo sapiens
  misc_RNA (1)...(19): siRNA sense strand
uagggaagcuggagucgaa

SEQ ID NO: 83312 - RNA, 19 nt, Homo sapiens
  misc_RNA (1)...(19): siRNA sense strand
caagcaagcagaugguuaa

SEQ ID NO: 83313 - RNA, 19 nt, Homo sapiens
  misc_RNA (1)...(19): siRNA sense strand
caaaggacuucaagaaagg

SEQ ID NO: 83314 - RNA, 19 nt, Homo sapiens
  misc_RNA (1)...(19): siRNA sense strand
gauacaagauuagacaaca

SEQ ID NO: 83315 - RNA, 19 nt, Homo sapiens
  misc_RNA (1)...(19): siRNA sense strand
ggcggaagauuaugcuaaa

SEQ ID NO: 83316 - RNA, 19 nt, Homo sapiens
  misc_RNA (1)...(19): siRNA sense strand
caugugagccauucaaauu

SEQ ID NO: 83317 - RNA, 19 nt, Homo sapiens
  misc_RNA (1)...(19): siRNA sense strand
gaagaggaaggaagagcua

SEQ ID NO: 83318 - RNA, 19 nt, Homo sapiens
  misc_RNA (1)...(19): siRNA sense strand
guuagagacuugacaauac

SEQ ID NO: 83319 - RNA, 19 nt, Homo sapiens
  misc_RNA (1)...(19): siRNA sense strand
gagagagcuuuacaucaug

SEQ ID NO: 83320 - RNA, 19 nt, Homo sapiens
  misc_RNA (1)...(19): siRNA sense strand
gaauaaacaguucccaugu

SEQ ID NO: 83321 - RNA, 19 nt, Homo sapiens
  misc_RNA (1)...(19): siRNA sense strand
ggaagauuaugcuaaagag

SEQ ID NO: 83322 - RNA, 19 nt, Homo sapiens
  misc_RNA (1)...(19): siRNA sense strand
uguagaagguguugugaga

SEQ ID NO: 83323 - RNA, 19 nt, Homo sapiens
  misc_RNA (1)...(19): siRNA sense strand
auaaacaguucccauguga

SEQ ID NO: 83324 - RNA, 19 nt, Homo sapiens
  misc_RNA (1)...(19): siRNA sense strand
guccaagucuuacgauaug

SEQ ID NO: 83325 - RNA, 19 nt, Homo sapiens
  misc_RNA (1)...(19): siRNA sense strand
gcuaacagagagagcuuua

SEQ ID NO: 83326 - RNA, 19 nt, Homo sapiens
  misc_RNA (1)...(19): siRNA sense strand
acagcaagacguugaguua

SEQ ID NO: 83327 - RNA, 19 nt, Homo sapiens
  misc_RNA (1)...(19): siRNA sense strand
gaaaagcuguugggucauu

SEQ ID NO: 83328 - RNA, 19 nt, Homo sapiens
  misc_RNA (1)...(19): siRNA sense strand
gaaguuauggaagaaauug

SEQ ID NO: 83329 - RNA, 19 nt, Homo sapiens
  misc_RNA (1)...(19): siRNA sense strand
ccacgaaguuauggaagaa

SEQ ID NO: 83330 - RNA, 19 nt, Homo sapiens
  misc_RNA (1)...(19): siRNA sense strand
gguuagagacuugacaaua

SEQ ID NO: 83331 - RNA, 19 nt, Homo sapiens
  misc_RNA (1)...(19): siRNA sense strand
gaagauuuaugugaucagu

SEQ ID NO: 83332 - RNA, 19 nt, Homo sapiens
  misc_RNA (1)...(19): siRNA sense strand
gggaaacagugcuucuuag

SEQ ID NO: 83333 - RNA, 19 nt, Homo sapiens
  misc_RNA (1)...(19): siRNA sense strand
gcucaaagaauacaugauc

SEQ ID NO: 83334 - RNA, 19 nt, Homo sapiens
  misc_RNA (1)...(19): siRNA sense strand
caacagagucauugaucuu

SEQ ID NO: 83335 - RNA, 19 nt, Homo sapiens
  misc_RNA (1)...(19): siRNA sense strand
guacacagcaagacguuga

SEQ ID NO: 83336 - RNA, 19 nt, Homo sapiens
  misc_RNA (1)...(19): siRNA sense strand
ccgagaaacuuuaauuaac

SEQ ID NO: 83337 - RNA, 19 nt, Homo sapiens
  misc_RNA (1)...(19): siRNA sense strand
aaauauccauuggcuguaa

SEQ ID NO: 83338 - RNA, 19 nt, Homo sapiens
  misc_RNA (1)...(19): siRNA sense strand
gcaagacguugaguuacau

SEQ ID NO: 83339 - RNA, 19 nt, Homo sapiens
  misc_RNA (1)...(19): siRNA sense strand
guucagaagauuuauguga

SEQ ID NO: 83340 - RNA, 19 nt, Homo sapiens
  misc_RNA (1)...(19): siRNA sense strand
gaagagcuacuguuaacca

SEQ ID NO: 83341 - RNA, 19 nt, Homo sapiens
  misc_RNA (1)...(19): siRNA sense strand
ugaguuacauguucagaag

SEQ ID NO: 83342 - RNA, 19 nt, Homo sapiens
  misc_RNA (1)...(19): siRNA sense strand
aagaauacaugauccucaa

SEQ ID NO: 83343 - RNA, 19 nt, Homo sapiens
  misc_RNA (1)...(19): siRNA sense strand
agaauauugugaagcauug

SEQ ID NO: 83344 - RNA, 19 nt, Homo sapiens
  misc_RNA (1)...(19): siRNA sense strand
ggaaauccaaacuccuaaa

SEQ ID NO: 83345 - RNA, 19 nt, Homo sapiens
  misc_RNA (1)...(19): siRNA sense strand
gaaacagugcuucuuaguc

SEQ ID NO: 83346 - RNA, 19 nt, Homo sapiens
  misc_RNA (1)...(19): siRNA sense strand
uaccaugccugacccaaga

SEQ ID NO: 83347 - RNA, 19 nt, Homo sapiens
  misc_RNA (1)...(19): siRNA sense strand
ggaaggaagagcuacuguu

SEQ ID NO: 83348 - RNA, 19 nt, Homo sapiens
  misc_RNA (1)...(19): siRNA sense strand
gacguugaguuacauguuc

SEQ ID NO: 83349 - RNA, 19 nt, Homo sapiens
  misc_RNA (1)...(19): siRNA sense strand
ggaaacagugcuucuuagu

SEQ ID NO: 83350 - RNA, 19 nt, Homo sapiens
  misc_RNA (1)...(19): siRNA sense strand
uaacagagagagcuuuaca

SEQ ID NO: 83351 - RNA, 19 nt, Homo sapiens
  misc_RNA (1)...(19): siRNA sense strand
gugcaagaguucauacaag

SEQ ID NO: 83352 - RNA, 19 nt, Homo sapiens
  misc_RNA (1)...(19): siRNA sense strand
ucagaagauuuaugugauc

SEQ ID NO: 83353 - RNA, 19 nt, Homo sapiens
  misc_RNA (1)...(19): siRNA sense strand
guaagaccuuucuauacca

SEQ ID NO: 83354 - RNA, 19 nt, Homo sapiens
  misc_RNA (1)...(19): siRNA sense strand
gcagaugguuaaauuugcu

SEQ ID NO: 83355 - RNA, 19 nt, Homo sapiens
  misc_RNA (1)...(19): siRNA sense strand
uuucugggauugcauaaug

SEQ ID NO: 83356 - RNA, 19 nt, Homo sapiens
  misc_RNA (1)...(19): siRNA sense strand
gaagauuaugcuaaagaga

SEQ ID NO: 83357 - RNA, 19 nt, Homo sapiens
  misc_RNA (1)...(19): siRNA sense strand
gagcauuguggauguagaa

SEQ ID NO: 83358 - RNA, 19 nt, Homo sapiens
  misc_RNA (1)...(19): siRNA sense strand
aauaaacaguucccaugug

SEQ ID NO: 83359 - RNA, 19 nt, Homo sapiens
  misc_RNA (1)...(19): siRNA sense strand
ugacaccaugguacaaaua

SEQ ID NO: 83360 - RNA, 19 nt, Homo sapiens
  misc_RNA (1)...(19): siRNA sense strand
gcuaaagagagauauggaa

SEQ ID NO: 83361 - RNA, 19 nt, Homo sapiens
  misc_RNA (1)...(19): siRNA sense strand
ccacgcagcgcaagaguca

SEQ ID NO: 83362 - RNA, 19 nt, Homo sapiens
  misc_RNA (1)...(19): siRNA sense strand
gagcuuuacaucauggaaa

SEQ ID NO: 83363 - RNA, 19 nt, Homo sapiens
  misc_RNA (1)...(19): siRNA sense strand
guucauacaagcagagcua

SEQ ID NO: 83364 - RNA, 19 nt, Homo sapiens
  misc_RNA (1)...(19): siRNA sense strand
uuagagacuugacaauaca

SEQ ID NO: 83365 - RNA, 19 nt, Homo sapiens
  misc_RNA (1)...(19): siRNA sense strand
gagcggaagacucuaauac

SEQ ID NO: 83366 - RNA, 19 nt, Homo sapiens
  misc_RNA (1)...(19): siRNA sense strand
ugaaggaggagccaauguu

SEQ ID NO: 83367 - RNA, 19 nt, Homo sapiens
  misc_RNA (1)...(19): siRNA sense strand
cagaagauuuaugugauca

SEQ ID NO: 83368 - RNA, 19 nt, Homo sapiens
  misc_RNA (1)...(19): siRNA sense strand
ugagaaaagugaaucagaa

SEQ ID NO: 83369 - RNA, 19 nt, Homo sapiens
  misc_RNA (1)...(19): siRNA sense strand
aagcagaugguuaaauuug

SEQ ID NO: 83370 - RNA, 19 nt, Homo sapiens
  misc_RNA (1)...(19): siRNA sense strand
caagcagaugguuaaauuu

SEQ ID NO: 83371 - RNA, 19 nt, Homo sapiens
  misc_RNA (1)...(19): siRNA sense strand
gagcucaaagaauacauga

SEQ ID NO: 83372 - RNA, 19 nt, Homo sapiens
  misc_RNA (1)...(19): siRNA sense strand
aggaagagcuacuguuaac

SEQ ID NO: 83373 - RNA, 19 nt, Homo sapiens
  misc_RNA (1)...(19): siRNA sense strand
guacgugcaagaguucaua

SEQ ID NO: 83374 - RNA, 19 nt, Homo sapiens
  misc_RNA (1)...(19): siRNA sense strand
cugccaacaucaacaaaga

SEQ ID NO: 83375 - RNA, 19 nt, Homo sapiens
  misc_RNA (1)...(19): siRNA sense strand
ucauugaucuuaggacauc

SEQ ID NO: 83376 - RNA, 19 nt, Homo sapiens
  misc_RNA (1)...(19): siRNA sense strand
gacaacagagucauugauc

SEQ ID NO: 83377 - RNA, 19 nt, Homo sapiens
  misc_RNA (1)...(19): siRNA sense strand
ggauguagaagguguugug

SEQ ID NO: 83378 - RNA, 19 nt, Homo sapiens
  misc_RNA (1)...(19): siRNA sense strand
acuagaauauugugaagca

SEQ ID NO: 83379 - RNA, 19 nt, Homo sapiens
  misc_RNA (1)...(19): siRNA sense strand
caaacgacucacuccuuaa

SEQ ID NO: 83380 - RNA, 19 nt, Homo sapiens
  misc_RNA (1)...(19): siRNA sense strand
gaguuacuaugcuguuucu

SEQ ID NO: 83381 - RNA, 19 nt, Homo sapiens
  misc_RNA (1)...(19): siRNA sense strand
gauuggaacgaguuacuau

SEQ ID NO: 83382 - RNA, 19 nt, Homo sapiens
  misc_RNA (1)...(19): siRNA sense strand
agggaaacagugcuucuua

SEQ ID NO: 83383 - RNA, 19 nt, Homo sapiens
  misc_RNA (1)...(19): siRNA sense strand
acaccaugguacaaauauu

SEQ ID NO: 83384 - RNA, 19 nt, Homo sapiens
  misc_RNA (1)...(19): siRNA sense strand
cuaaagagagauauggaau

SEQ ID NO: 83385 - RNA, 19 nt, Homo sapiens
  misc_RNA (1)...(19): siRNA sense strand
caacuagucaggcagucuu

SEQ ID NO: 83386 - RNA, 19 nt, Homo sapiens
  misc_RNA (1)...(19): siRNA sense strand
ggauuggaacgaguuacua

SEQ ID NO: 83387 - RNA, 19 nt, Homo sapiens
  misc_RNA (1)...(19): siRNA sense strand
uguaagaccuuucuauacc

SEQ ID NO: 83388 - RNA, 19 nt, Homo sapiens
  misc_RNA (1)...(19): siRNA sense strand
ggaagcuggagucgaaaug

SEQ ID NO: 83389 - RNA, 19 nt, Homo sapiens
  misc_RNA (1)...(19): siRNA sense strand
agauuaugcuaaagagaga

SEQ ID NO: 83390 - RNA, 19 nt, Homo sapiens
  misc_RNA (1)...(19): siRNA sense strand
gaaauccaaacuccuaaaa

SEQ ID NO: 83391 - RNA, 19 nt, Homo sapiens
  misc_RNA (1)...(19): siRNA sense strand
ggugguaucuugucuguuu

SEQ ID NO: 83392 - RNA, 19 nt, Homo sapiens
  misc_RNA (1)...(19): siRNA sense strand
gauaguagaaucacagaua

SEQ ID NO: 83393 - RNA, 19 nt, Homo sapiens
  misc_RNA (1)...(19): siRNA sense strand
gauaucaguugccuguaua

SEQ ID NO: 83394 - RNA, 19 nt, Homo sapiens
  misc_RNA (1)...(19): siRNA sense strand
ggacuaauccaaacacuga

SEQ ID NO: 83395 - RNA, 19 nt, Homo sapiens
  misc_RNA (1)...(19): siRNA sense strand
gugcaucacuuuagaagaa

SEQ ID NO: 83396 - RNA, 19 nt, Homo sapiens
  misc_RNA (1)...(19): siRNA sense strand
gaaacucuguuguuacuca

SEQ ID NO: 83397 - RNA, 19 nt, Homo sapiens
  misc_RNA (1)...(19): siRNA sense strand
gcaaaggagcuauguugua

SEQ ID NO: 83398 - RNA, 19 nt, Homo sapiens
  misc_RNA (1)...(19): siRNA sense strand
gagcugaaguugugccaaa

SEQ ID NO: 83399 - RNA, 19 nt, Homo sapiens
  misc_RNA (1)...(19): siRNA sense strand
gggcaaugcuuaaaucugu

SEQ ID NO: 83400 - RNA, 19 nt, Homo sapiens
  misc_RNA (1)...(19): siRNA sense strand
cagauaaauuuccauggua

SEQ ID NO: 83401 - RNA, 19 nt, Homo sapiens
  misc_RNA (1)...(19): siRNA sense strand
gaugacuacuucaaggaua

SEQ ID NO: 83402 - RNA, 19 nt, Homo sapiens
  misc_RNA (1)...(19): siRNA sense strand
gagcaaaggagcuauguug

SEQ ID NO: 83403 - RNA, 19 nt, Homo sapiens
  misc_RNA (1)...(19): siRNA sense strand
ggauaucaguugccuguau

SEQ ID NO: 83404 - RNA, 19 nt, Homo sapiens
  misc_RNA (1)...(19): siRNA sense strand
ggaugaaacugagauuaga

SEQ ID NO: 83405 - RNA, 19 nt, Homo sapiens
  misc_RNA (1)...(19): siRNA sense strand
gagaaacucuguuguuacu

SEQ ID NO: 83406 - RNA, 19 nt, Homo sapiens
  misc_RNA (1)...(19): siRNA sense strand
gaacugguguguccaaagg

SEQ ID NO: 83407 - RNA, 19 nt, Homo sapiens
  misc_RNA (1)...(19): siRNA sense strand
cugagaaacucuguuguua

SEQ ID NO: 83408 - RNA, 19 nt, Homo sapiens
  misc_RNA (1)...(19): siRNA sense strand
gaagcuucuuugcuagaua

SEQ ID NO: 83409 - RNA, 19 nt, Homo sapiens
  misc_RNA (1)...(19): siRNA sense strand
gcuguuaacuaccacugua

SEQ ID NO: 83410 - RNA, 19 nt, Homo sapiens
  misc_RNA (1)...(19): siRNA sense strand
caaaggagcuauguuguac

SEQ ID NO: 83411 - RNA, 19 nt, Homo sapiens
  misc_RNA (1)...(19): siRNA sense strand
caaccacgaugaauccuau

SEQ ID NO: 83412 - RNA, 19 nt, Homo sapiens
  misc_RNA (1)...(19): siRNA sense strand
gcuauggauuuguuucauu

SEQ ID NO: 83413 - RNA, 19 nt, Homo sapiens
  misc_RNA (1)...(19): siRNA sense strand
aaacugagauuagaagcuu

SEQ ID NO: 83414 - RNA, 19 nt, Homo sapiens
  misc_RNA (1)...(19): siRNA sense strand
gaauugauguuaggaugga

SEQ ID NO: 83415 - RNA, 19 nt, Homo sapiens
  misc_RNA (1)...(19): siRNA sense strand
ggaaauggcccacaaaaga

SEQ ID NO: 83416 - RNA, 19 nt, Homo sapiens
  misc_RNA (1)...(19): siRNA sense strand
ucaguugccuguauauaau

SEQ ID NO: 83417 - RNA, 19 nt, Homo sapiens
  misc_RNA (1)...(19): siRNA sense strand
uacaaacggugguaucuug

SEQ ID NO: 83418 - RNA, 19 nt, Homo sapiens
  misc_RNA (1)...(19): siRNA sense strand
gaaguugugccaaaugaau

SEQ ID NO: 83419 - RNA, 19 nt, Homo sapiens
  misc_RNA (1)...(19): siRNA sense strand
caccacaguuucagaaugu

SEQ ID NO: 83420 - RNA, 19 nt, Homo sapiens
  misc_RNA (1)...(19): siRNA sense strand
ccagagaacagacugagaa

SEQ ID NO: 83421 - RNA, 19 nt, Homo sapiens
  misc_RNA (1)...(19): siRNA sense strand
ugaauccuauaacucagua

SEQ ID NO: 83422 - RNA, 19 nt, Homo sapiens
  misc_RNA (1)...(19): siRNA sense strand
gagaacagacugagaaacu

SEQ ID NO: 83423 - RNA, 19 nt, Homo sapiens
  misc_RNA (1)...(19): siRNA sense strand
ggucaucacuggauaucag

SEQ ID NO: 83424 - RNA, 19 nt, Homo sapiens
  misc_RNA (1)...(19): siRNA sense strand
gaagucgggcaaugcuuaa

SEQ ID NO: 83425 - RNA, 19 nt, Homo sapiens
  misc_RNA (1)...(19): siRNA sense strand
gcagccacguccuuugguu

SEQ ID NO: 83426 - RNA, 19 nt, Homo sapiens
  misc_RNA (1)...(19): siRNA sense strand
uaacuaccacuguaaugaa

SEQ ID NO: 83427 - RNA, 19 nt, Homo sapiens
  misc_RNA (1)...(19): siRNA sense strand
gugaaagaagugaagauaa

SEQ ID NO: 83428 - RNA, 19 nt, Homo sapiens
  misc_RNA (1)...(19): siRNA sense strand
gcaaugcuuaaaucuguuu

SEQ ID NO: 83429 - RNA, 19 nt, Homo sapiens
  misc_RNA (1)...(19): siRNA sense strand
ccaccacaguuucagaaug

SEQ ID NO: 83430 - RNA, 19 nt, Homo sapiens
  misc_RNA (1)...(19): siRNA sense strand
gaaagaagugaagauaauc

SEQ ID NO: 83431 - RNA, 19 nt, Homo sapiens
  misc_RNA (1)...(19): siRNA sense strand
gcagaagauaguagaauca

SEQ ID NO: 83432 - RNA, 19 nt, Homo sapiens
  misc_RNA (1)...(19): siRNA sense strand
cgaugaauccuauaacuca

SEQ ID NO: 83433 - RNA, 19 nt, Homo sapiens
  misc_RNA (1)...(19): siRNA sense strand
uccaaacacugaaacuuau

SEQ ID NO: 83434 - RNA, 19 nt, Homo sapiens
  misc_RNA (1)...(19): siRNA sense strand
acagauaaauuuccauggu

SEQ ID NO: 83435 - RNA, 19 nt, Homo sapiens
  misc_RNA (1)...(19): siRNA sense strand
gauguuaggauggaugaaa

SEQ ID NO: 83436 - RNA, 19 nt, Homo sapiens
  misc_RNA (1)...(19): siRNA sense strand
agaagucgggcaaugcuua

SEQ ID NO: 83437 - RNA, 19 nt, Homo sapiens
  misc_RNA (1)...(19): siRNA sense strand
uagaagaagucgggcaaug

SEQ ID NO: 83438 - RNA, 19 nt, Homo sapiens
  misc_RNA (1)...(19): siRNA sense strand
ccaaacacugaaacuuaua

SEQ ID NO: 83439 - RNA, 19 nt, Homo sapiens
  misc_RNA (1)...(19): siRNA sense strand
guucaggcauauccuacuu

SEQ ID NO: 83440 - RNA, 19 nt, Homo sapiens
  misc_RNA (1)...(19): siRNA sense strand
gaacagacugagaaacucu

SEQ ID NO: 83441 - RNA, 19 nt, Homo sapiens
  misc_RNA (1)...(19): siRNA sense strand
gaugaaacugagauuagaa

SEQ ID NO: 83442 - RNA, 19 nt, Homo sapiens
  misc_RNA (1)...(19): siRNA sense strand
gaaauggcccacaaaagaa

SEQ ID NO: 83443 - RNA, 19 nt, Homo sapiens
  misc_RNA (1)...(19): siRNA sense strand
uccaggagcugaaguugug

SEQ ID NO: 83444 - RNA, 19 nt, Homo sapiens
  misc_RNA (1)...(19): siRNA sense strand
uauccuacuuacccaaauu

SEQ ID NO: 83445 - RNA, 19 nt, Homo sapiens
  misc_RNA (1)...(19): siRNA sense strand
cugaaguugugccaaauga

SEQ ID NO: 83446 - RNA, 19 nt, Homo sapiens
  misc_RNA (1)...(19): siRNA sense strand
uaucuugucuguuuaaucc

SEQ ID NO: 83447 - RNA, 19 nt, Homo sapiens
  misc_RNA (1)...(19): siRNA sense strand
uuauucagcuguuaacuac

SEQ ID NO: 83448 - RNA, 19 nt, Homo sapiens
  misc_RNA (1)...(19): siRNA sense strand
ccacuguaaugaaguugau

SEQ ID NO: 83449 - RNA, 19 nt, Homo sapiens
  misc_RNA (1)...(19): siRNA sense strand
cuaccacuguaaugaaguu

SEQ ID NO: 83450 - RNA, 19 nt, Homo sapiens
  misc_RNA (1)...(19): siRNA sense strand
auccaaacacugaaacuua

SEQ ID NO: 83451 - RNA, 19 nt, Homo sapiens
  misc_RNA (1)...(19): siRNA sense strand
gugguaucuugucuguuua

SEQ ID NO: 83452 - RNA, 19 nt, Homo sapiens
  misc_RNA (1)...(19): siRNA sense strand
aagcuucuuugcuagauau

SEQ ID NO: 83453 - RNA, 19 nt, Homo sapiens
  misc_RNA (1)...(19): siRNA sense strand
gaagcugggcccugcaauc

SEQ ID NO: 83454 - RNA, 19 nt, Homo sapiens
  misc_RNA (1)...(19): siRNA sense strand
uuacccaaauucaccaguu

SEQ ID NO: 83455 - RNA, 19 nt, Homo sapiens
  misc_RNA (1)...(19): siRNA sense strand
gaagaagucgggcaaugcu

SEQ ID NO: 83456 - RNA, 19 nt, Homo sapiens
  misc_RNA (1)...(19): siRNA sense strand
agacugagaaacucuguug

SEQ ID NO: 83457 - RNA, 19 nt, Homo sapiens
  misc_RNA (1)...(19): siRNA sense strand
gcaaucaggaaacaaaauu

SEQ ID NO: 83458 - RNA, 19 nt, Homo sapiens
  misc_RNA (1)...(19): siRNA sense strand
ugacguggaugugcagaag

SEQ ID NO: 83459 - RNA, 19 nt, Homo sapiens
  misc_RNA (1)...(19): siRNA sense strand
ggcaaugcuuaaaucuguu

SEQ ID NO: 83460 - RNA, 19 nt, Homo sapiens
  misc_RNA (1)...(19): siRNA sense strand
guuggaggaauugauguua

SEQ ID NO: 83461 - RNA, 19 nt, Homo sapiens
  misc_RNA (1)...(19): siRNA sense strand
uuuaugugcuuaucaugug

SEQ ID NO: 83462 - RNA, 19 nt, Homo sapiens
  misc_RNA (1)...(19): siRNA sense strand
gcaaauccugaaacuccaa

SEQ ID NO: 83463 - RNA, 19 nt, Homo sapiens
  misc_RNA (1)...(19): siRNA sense strand
uuaacuaccacuguaauga

SEQ ID NO: 83464 - RNA, 19 nt, Homo sapiens
  misc_RNA (1)...(19): siRNA sense strand
ugcagaagauaguagaauc

SEQ ID NO: 83465 - RNA, 19 nt, Homo sapiens
  misc_RNA (1)...(19): siRNA sense strand
cagagaacagacugagaaa

SEQ ID NO: 83466 - RNA, 19 nt, Homo sapiens
  misc_RNA (1)...(19): siRNA sense strand
aaacggugguaucuugucu

SEQ ID NO: 83467 - RNA, 19 nt, Homo sapiens
  misc_RNA (1)...(19): siRNA sense strand
cacgaugaauccuauaacu

SEQ ID NO: 83468 - RNA, 19 nt, Homo sapiens
  misc_RNA (1)...(19): siRNA sense strand
acacugaaacuuauaugca

SEQ ID NO: 83469 - RNA, 19 nt, Homo sapiens
  misc_RNA (1)...(19): siRNA sense strand
augacuacuucaaggauaa

SEQ ID NO: 83470 - RNA, 19 nt, Homo sapiens
  misc_RNA (1)...(19): siRNA sense strand
agugaaagaagugaagaua

SEQ ID NO: 83471 - RNA, 19 nt, Homo sapiens
  misc_RNA (1)...(19): siRNA sense strand
gaaacugagauuagaagcu

SEQ ID NO: 83472 - RNA, 19 nt, Homo sapiens
  misc_RNA (1)...(19): siRNA sense strand
uaucagaugccaccacagu

SEQ ID NO: 83473 - RNA, 19 nt, Homo sapiens
  misc_RNA (1)...(19): siRNA sense strand
ucaggcauauccuacuuac

SEQ ID NO: 83474 - RNA, 19 nt, Homo sapiens
  misc_RNA (1)...(19): siRNA sense strand
cuuauucagcuguuaacua

SEQ ID NO: 83475 - RNA, 19 nt, Homo sapiens
  misc_RNA (1)...(19): siRNA sense strand
acuccaaacucaaccaucu

SEQ ID NO: 83476 - RNA, 19 nt, Homo sapiens
  misc_RNA (1)...(19): siRNA sense strand
uaucaguugccuguauaua

SEQ ID NO: 83477 - RNA, 19 nt, Homo sapiens
  misc_RNA (1)...(19): siRNA sense strand
uccugaaacuccaaacuca

SEQ ID NO: 83478 - RNA, 19 nt, Homo sapiens
  misc_RNA (1)...(19): siRNA sense strand
uacucaagaugacuacuuc

SEQ ID NO: 83479 - RNA, 19 nt, Homo sapiens
  misc_RNA (1)...(19): siRNA sense strand
uccuauaacucaguauguu

SEQ ID NO: 83480 - RNA, 19 nt, Homo sapiens
  misc_RNA (1)...(19): siRNA sense strand
ggagcaaaggagcuauguu

SEQ ID NO: 83481 - RNA, 19 nt, Homo sapiens
  misc_RNA (1)...(19): siRNA sense strand
aaacucuguuguuacucaa

SEQ ID NO: 83482 - RNA, 19 nt, Homo sapiens
  misc_RNA (1)...(19): siRNA sense strand
cauauccuacuuacccaaa

SEQ ID NO: 83483 - RNA, 19 nt, Homo sapiens
  misc_RNA (1)...(19): siRNA sense strand
gauggaugaaacugagauu

SEQ ID NO: 83484 - RNA, 19 nt, Homo sapiens
  misc_RNA (1)...(19): siRNA sense strand
uggaugaaacugagauuag

SEQ ID NO: 83485 - RNA, 19 nt, Homo sapiens
  misc_RNA (1)...(19): siRNA sense strand
uacccaaauucaccaguuc

SEQ ID NO: 83486 - RNA, 19 nt, Homo sapiens
  misc_RNA (1)...(19): siRNA sense strand
gucgggcaaugcuuaaauc

SEQ ID NO: 83487 - RNA, 19 nt, Homo sapiens
  misc_RNA (1)...(19): siRNA sense strand
ucaagaugacuacuucaag

SEQ ID NO: 83488 - RNA, 19 nt, Homo sapiens
  misc_RNA (1)...(19): siRNA sense strand
gcugaaguugugccaaaug

SEQ ID NO: 83489 - RNA, 19 nt, Homo sapiens
  misc_RNA (1)...(19): siRNA sense strand
gauccaggagcugaaguug

SEQ ID NO: 83490 - RNA, 19 nt, Homo sapiens
  misc_RNA (1)...(19): siRNA sense strand
guucaggucaucacuggau

SEQ ID NO: 83491 - RNA, 19 nt, Homo sapiens
  misc_RNA (1)...(19): siRNA sense strand
gcaaauaucucaugaagcu

SEQ ID NO: 83492 - RNA, 19 nt, Homo sapiens
  misc_RNA (1)...(19): siRNA sense strand
gaacguaugcugaacauga

SEQ ID NO: 83493 - RNA, 19 nt, Homo sapiens
  misc_RNA (1)...(19): siRNA sense strand
ccaagaaaguccaaucuga

SEQ ID NO: 83494 - RNA, 19 nt, Homo sapiens
  misc_RNA (1)...(19): siRNA sense strand
ggauuaaacugcaaauauc

SEQ ID NO: 83495 - RNA, 19 nt, Homo sapiens
  misc_RNA (1)...(19): siRNA sense strand
uaauauggcuacacuaaga

SEQ ID NO: 83496 - RNA, 19 nt, Homo sapiens
  misc_RNA (1)...(19): siRNA sense strand
caaacaaccugcuaucauc

SEQ ID NO: 83497 - RNA, 19 nt, Homo sapiens
  misc_RNA (1)...(19): siRNA sense strand
uagaauggguggagaagaa

SEQ ID NO: 83498 - RNA, 19 nt, Homo sapiens
  misc_RNA (1)...(19): siRNA sense strand
guagaugacuggauuaaac

SEQ ID NO: 83499 - RNA, 19 nt, Homo sapiens
  misc_RNA (1)...(19): siRNA sense strand
gcuuguagaugacuggauu

SEQ ID NO: 83500 - RNA, 19 nt, Homo sapiens
  misc_RNA (1)...(19): siRNA sense strand
ccagaagauuguuuguuga

SEQ ID NO: 83501 - RNA, 19 nt, Homo sapiens
  misc_RNA (1)...(19): siRNA sense strand
uaaaugaacguaugcugaa

SEQ ID NO: 83502 - RNA, 19 nt, Homo sapiens
  misc_RNA (1)...(19): siRNA sense strand
uccagaagauuguuuguug

SEQ ID NO: 83503 - RNA, 19 nt, Homo sapiens
  misc_RNA (1)...(19): siRNA sense strand
agauugugcuuguagauga

SEQ ID NO: 83504 - RNA, 19 nt, Homo sapiens
  misc_RNA (1)...(19): siRNA sense strand
gaagaagcagagauacguu

SEQ ID NO: 83505 - RNA, 19 nt, Homo sapiens
  misc_RNA (1)...(19): siRNA sense strand
gacaauggaagcggauaua

SEQ ID NO: 83506 - RNA, 19 nt, Homo sapiens
  misc_RNA (1)...(19): siRNA sense strand
gcugguaucaaccuuauga

SEQ ID NO: 83507 - RNA, 19 nt, Homo sapiens
  misc_RNA (1)...(19): siRNA sense strand
ggcuuugguuguugaagua

SEQ ID NO: 83508 - RNA, 19 nt, Homo sapiens
  misc_RNA (1)...(19): siRNA sense strand
ccaucucccuucuuuguau

SEQ ID NO: 83509 - RNA, 19 nt, Homo sapiens
  misc_RNA (1)...(19): siRNA sense strand
ccaaaguucagcucaaaga

SEQ ID NO: 83510 - RNA, 19 nt, Homo sapiens
  misc_RNA (1)...(19): siRNA sense strand
gaccagauaauaauuugga

SEQ ID NO: 83511 - RNA, 19 nt, Homo sapiens
  misc_RNA (1)...(19): siRNA sense strand
caagaaaguccaaucugau

SEQ ID NO: 83512 - RNA, 19 nt, Homo sapiens
  misc_RNA (1)...(19): siRNA sense strand
gagcacaaaagacuuaaua

SEQ ID NO: 83513 - RNA, 19 nt, Homo sapiens
  misc_RNA (1)...(19): siRNA sense strand
aagaggagguggcggcuau

SEQ ID NO: 83514 - RNA, 19 nt, Homo sapiens
  misc_RNA (1)...(19): siRNA sense strand
cauggaggcuuugguuguu

SEQ ID NO: 83515 - RNA, 19 nt, Homo sapiens
  misc_RNA (1)...(19): siRNA sense strand
ggcuauauccaucgaaauu

SEQ ID NO: 83516 - RNA, 19 nt, Homo sapiens
  misc_RNA (1)...(19): siRNA sense strand
uggagaagaagcagagaua

SEQ ID NO: 83517 - RNA, 19 nt, Homo sapiens
  misc_RNA (1)...(19): siRNA sense strand
cuuaauauggcuacacuaa

SEQ ID NO: 83518 - RNA, 19 nt, Homo sapiens
  misc_RNA (1)...(19): siRNA sense strand
aauggaagcggauauagaa

SEQ ID NO: 83519 - RNA, 19 nt, Homo sapiens
  misc_RNA (1)...(19): siRNA sense strand
ccaaacaaccugcuaucau

SEQ ID NO: 83520 - RNA, 19 nt, Homo sapiens
  misc_RNA (1)...(19): siRNA sense strand
cugcaaauaucucaugaag

SEQ ID NO: 83521 - RNA, 19 nt, Homo sapiens
  misc_RNA (1)...(19): siRNA sense strand
caauggaagcggauauaga

SEQ ID NO: 83522 - RNA, 19 nt, Homo sapiens
  misc_RNA (1)...(19): siRNA sense strand
uuacagugguggaggcuau

SEQ ID NO: 83523 - RNA, 19 nt, Homo sapiens
  misc_RNA (1)...(19): siRNA sense strand
gcacaaaagacuuaauaug

SEQ ID NO: 83524 - RNA, 19 nt, Homo sapiens
  misc_RNA (1)...(19): siRNA sense strand
ucacguagcccuuuuauca

SEQ ID NO: 83525 - RNA, 19 nt, Homo sapiens
  misc_RNA (1)...(19): siRNA sense strand
gaaggggagguucuaguua

SEQ ID NO: 83526 - RNA, 19 nt, Homo sapiens
  misc_RNA (1)...(19): siRNA sense strand
gcuauauccaucgaaauuu

SEQ ID NO: 83527 - RNA, 19 nt, Homo sapiens
  misc_RNA (1)...(19): siRNA sense strand
gaccugggaagccaaaguu

SEQ ID NO: 83528 - RNA, 19 nt, Homo sapiens
  misc_RNA (1)...(19): siRNA sense strand
uggaccagauaauaauuug

SEQ ID NO: 83529 - RNA, 19 nt, Homo sapiens
  misc_RNA (1)...(19): siRNA sense strand
uaaccaaacaaccugcuau

SEQ ID NO: 83530 - RNA, 19 nt, Homo sapiens
  misc_RNA (1)...(19): siRNA sense strand
caucucccuucuuuguauu

SEQ ID NO: 83531 - RNA, 19 nt, Homo sapiens
  misc_RNA (1)...(19): siRNA sense strand
gggagguucuaguuacagu

SEQ ID NO: 83532 - RNA, 19 nt, Homo sapiens
  misc_RNA (1)...(19): siRNA sense strand
aaacugcaaauaucucaug

SEQ ID NO: 83533 - RNA, 19 nt, Homo sapiens
  misc_RNA (1)...(19): siRNA sense strand
aaaguucagcucaaagaga

SEQ ID NO: 83534 - RNA, 19 nt, Homo sapiens
  misc_RNA (1)...(19): siRNA sense strand
cucccaagauggcccgaua

SEQ ID NO: 83535 - RNA, 19 nt, Homo sapiens
  misc_RNA (1)...(19): siRNA sense strand
gcagauugugcuuguagau

SEQ ID NO: 83536 - RNA, 19 nt, Homo sapiens
  misc_RNA (1)...(19): siRNA sense strand
aaguucagcucaaagagau

SEQ ID NO: 83537 - RNA, 19 nt, Homo sapiens
  misc_RNA (1)...(19): siRNA sense strand
gacuuaauauggcuacacu

SEQ ID NO: 83538 - RNA, 19 nt, Homo sapiens
  misc_RNA (1)...(19): siRNA sense strand
gauuggcaguacacgguau

SEQ ID NO: 83539 - RNA, 19 nt, Homo sapiens
  misc_RNA (1)...(19): siRNA sense strand
ugaagcugcugccuguauc

SEQ ID NO: 83540 - RNA, 19 nt, Homo sapiens
  misc_RNA (1)...(19): siRNA sense strand
ugacuggauuaaacugcaa

SEQ ID NO: 83541 - RNA, 19 nt, Homo sapiens
  misc_RNA (1)...(19): siRNA sense strand
agccaaaguucagcucaaa

SEQ ID NO: 83542 - RNA, 19 nt, Homo sapiens
  misc_RNA (1)...(19): siRNA sense strand
gggcagauugugcuuguag

SEQ ID NO: 83543 - RNA, 19 nt, Homo sapiens
  misc_RNA (1)...(19): siRNA sense strand
aagaaaguccaaucugaug

SEQ ID NO: 83544 - RNA, 19 nt, Homo sapiens
  misc_RNA (1)...(19): siRNA sense strand
guucagcucaaagagauuu

SEQ ID NO: 83545 - RNA, 19 nt, Homo sapiens
  misc_RNA (1)...(19): siRNA sense strand
aaacaaccugcuaucauca

SEQ ID NO: 83546 - RNA, 19 nt, Homo sapiens
  misc_RNA (1)...(19): siRNA sense strand
guaaccaaacaaccugcua

SEQ ID NO: 83547 - RNA, 19 nt, Homo sapiens
  misc_RNA (1)...(19): siRNA sense strand
cgagccaucucugcuaaag

SEQ ID NO: 83548 - RNA, 19 nt, Homo sapiens
  misc_RNA (1)...(19): siRNA sense strand
ugggcuauauccaucgaaa

SEQ ID NO: 83549 - RNA, 19 nt, Homo sapiens
  misc_RNA (1)...(19): siRNA sense strand
gaagcugcugccuguauca

SEQ ID NO: 83550 - RNA, 19 nt, Homo sapiens
  misc_RNA (1)...(19): siRNA sense strand
aagaagcagagauacguuu

SEQ ID NO: 83551 - RNA, 19 nt, Homo sapiens
  misc_RNA (1)...(19): siRNA sense strand
cgacaauggaagcggauau

SEQ ID NO: 83552 - RNA, 19 nt, Homo sapiens
  misc_RNA (1)...(19): siRNA sense strand
cugcugguaucaaccuuau

SEQ ID NO: 83553 - RNA, 19 nt, Homo sapiens
  misc_RNA (1)...(19): siRNA sense strand
aagauuguuuguugacaca

SEQ ID NO: 83554 - RNA, 19 nt, Homo sapiens
  misc_RNA (1)...(19): siRNA sense strand
gcugcugguaucaaccuua

SEQ ID NO: 83555 - RNA, 19 nt, Homo sapiens
  misc_RNA (1)...(19): siRNA sense strand
ccauggaggcuuugguugu

SEQ ID NO: 83556 - RNA, 19 nt, Homo sapiens
  misc_RNA (1)...(19): siRNA sense strand
ggcagauugugcuuguaga

SEQ ID NO: 83557 - RNA, 19 nt, Homo sapiens
  misc_RNA (1)...(19): siRNA sense strand
gagaagaagcagagauacg

SEQ ID NO: 83558 - RNA, 19 nt, Homo sapiens
  misc_RNA (1)...(19): siRNA sense strand
aagccaaaguucagcucaa

SEQ ID NO: 83559 - RNA, 19 nt, Homo sapiens
  misc_RNA (1)...(19): siRNA sense strand
uggaggcuuugguuguuga

SEQ ID NO: 83560 - RNA, 19 nt, Homo sapiens
  misc_RNA (1)...(19): siRNA sense strand
cucgagccaucucugcuaa

SEQ ID NO: 83561 - RNA, 19 nt, Homo sapiens
  misc_RNA (1)...(19): siRNA sense strand
aaauuuugcuggaaacaga

SEQ ID NO: 83562 - RNA, 19 nt, Homo sapiens
  misc_RNA (1)...(19): siRNA sense strand
uggaggcuauagaggaguu

SEQ ID NO: 83563 - RNA, 19 nt, Homo sapiens
  misc_RNA (1)...(19): siRNA sense strand
ugaaguaaccaaacaaccu

SEQ ID NO: 83564 - RNA, 19 nt, Homo sapiens
  misc_RNA (1)...(19): siRNA sense strand
cacaaaagacuuaauaugg

SEQ ID NO: 83565 - RNA, 19 nt, Homo sapiens
  misc_RNA (1)...(19): siRNA sense strand
ggagaagaagcagagauac

SEQ ID NO: 83566 - RNA, 19 nt, Homo sapiens
  misc_RNA (1)...(19): siRNA sense strand
gauuaauucuggguuucca

SEQ ID NO: 83567 - RNA, 19 nt, Homo sapiens
  misc_RNA (1)...(19): siRNA sense strand
gcaaauaucucaugaagcu

SEQ ID NO: 83568 - RNA, 19 nt, Homo sapiens
  misc_RNA (1)...(19): siRNA sense strand
gaacguaugcugaacauga

SEQ ID NO: 83569 - RNA, 19 nt, Homo sapiens
  misc_RNA (1)...(19): siRNA sense strand
ccaagaaaguccaaucuga

SEQ ID NO: 83570 - RNA, 19 nt, Homo sapiens
  misc_RNA (1)...(19): siRNA sense strand
ggauuaaacugcaaauauc

SEQ ID NO: 83571 - RNA, 19 nt, Homo sapiens
  misc_RNA (1)...(19): siRNA sense strand
caaacaaccugcuaucauc

SEQ ID NO: 83572 - RNA, 19 nt, Homo sapiens
  misc_RNA (1)...(19): siRNA sense strand
guagaugacuggauuaaac

SEQ ID NO: 83573 - RNA, 19 nt, Homo sapiens
  misc_RNA (1)...(19): siRNA sense strand
gcuuguagaugacuggauu

SEQ ID NO: 83574 - RNA, 19 nt, Homo sapiens
  misc_RNA (1)...(19): siRNA sense strand
uaaaugaacguaugcugaa

SEQ ID NO: 83575 - RNA, 19 nt, Homo sapiens
  misc_RNA (1)...(19): siRNA sense strand
agauugugcuuguagauga

SEQ ID NO: 83576 - RNA, 19 nt, Homo sapiens
  misc_RNA (1)...(19): siRNA sense strand
ccaucucccuucuuuguau

SEQ ID NO: 83577 - RNA, 19 nt, Homo sapiens
  misc_RNA (1)...(19): siRNA sense strand
gacaauggaagcggauaua

SEQ ID NO: 83578 - RNA, 19 nt, Homo sapiens
  misc_RNA (1)...(19): siRNA sense strand
gcugguaucaaccuuauga

SEQ ID NO: 83579 - RNA, 19 nt, Homo sapiens
  misc_RNA (1)...(19): siRNA sense strand
ggcuuugguuguugaagua

SEQ ID NO: 83580 - RNA, 19 nt, Homo sapiens
  misc_RNA (1)...(19): siRNA sense strand
caagaaaguccaaucugau

SEQ ID NO: 83581 - RNA, 19 nt, Homo sapiens
  misc_RNA (1)...(19): siRNA sense strand
cauggaggcuuugguuguu

SEQ ID NO: 83582 - RNA, 19 nt, Homo sapiens
  misc_RNA (1)...(19): siRNA sense strand
aagaggagguggcggcuau

SEQ ID NO: 83583 - RNA, 19 nt, Homo sapiens
  misc_RNA (1)...(19): siRNA sense strand
cugcaaauaucucaugaag

SEQ ID NO: 83584 - RNA, 19 nt, Homo sapiens
  misc_RNA (1)...(19): siRNA sense strand
aauggaagcggauauagaa

SEQ ID NO: 83585 - RNA, 19 nt, Homo sapiens
  misc_RNA (1)...(19): siRNA sense strand
ccaaacaaccugcuaucau

SEQ ID NO: 83586 - RNA, 19 nt, Homo sapiens
  misc_RNA (1)...(19): siRNA sense strand
caauggaagcggauauaga

SEQ ID NO: 83587 - RNA, 19 nt, Homo sapiens
  misc_RNA (1)...(19): siRNA sense strand
uuacagugguggaggcuau

SEQ ID NO: 83588 - RNA, 19 nt, Homo sapiens
  misc_RNA (1)...(19): siRNA sense strand
gaaggggagguucuaguua

SEQ ID NO: 83589 - RNA, 19 nt, Homo sapiens
  misc_RNA (1)...(19): siRNA sense strand
uaaccaaacaaccugcuau

SEQ ID NO: 83590 - RNA, 19 nt, Homo sapiens
  misc_RNA (1)...(19): siRNA sense strand
aaacugcaaauaucucaug

SEQ ID NO: 83591 - RNA, 19 nt, Homo sapiens
  misc_RNA (1)...(19): siRNA sense strand
gggagguucuaguuacagu

SEQ ID NO: 83592 - RNA, 19 nt, Homo sapiens
  misc_RNA (1)...(19): siRNA sense strand
caucucccuucuuuguauu

SEQ ID NO: 83593 - RNA, 19 nt, Homo sapiens
  misc_RNA (1)...(19): siRNA sense strand
gcagauugugcuuguagau

SEQ ID NO: 83594 - RNA, 19 nt, Homo sapiens
  misc_RNA (1)...(19): siRNA sense strand
cucccaagauggcccgaua

SEQ ID NO: 83595 - RNA, 19 nt, Homo sapiens
  misc_RNA (1)...(19): siRNA sense strand
ugacuggauuaaacugcaa

SEQ ID NO: 83596 - RNA, 19 nt, Homo sapiens
  misc_RNA (1)...(19): siRNA sense strand
gauuggcaguacacgguau

SEQ ID NO: 83597 - RNA, 19 nt, Homo sapiens
  misc_RNA (1)...(19): siRNA sense strand
ugaagcugcugccuguauc

SEQ ID NO: 83598 - RNA, 19 nt, Homo sapiens
  misc_RNA (1)...(19): siRNA sense strand
aagaaaguccaaucugaug

SEQ ID NO: 83599 - RNA, 19 nt, Homo sapiens
  misc_RNA (1)...(19): siRNA sense strand
gggcagauugugcuuguag

SEQ ID NO: 83600 - RNA, 19 nt, Homo sapiens
  misc_RNA (1)...(19): siRNA sense strand
guaaccaaacaaccugcua

SEQ ID NO: 83601 - RNA, 19 nt, Homo sapiens
  misc_RNA (1)...(19): siRNA sense strand
cgagccaucucugcuaaag

SEQ ID NO: 83602 - RNA, 19 nt, Homo sapiens
  misc_RNA (1)...(19): siRNA sense strand
aaacaaccugcuaucauca

SEQ ID NO: 83603 - RNA, 19 nt, Homo sapiens
  misc_RNA (1)...(19): siRNA sense strand
gaagcugcugccuguauca

SEQ ID NO: 83604 - RNA, 19 nt, Homo sapiens
  misc_RNA (1)...(19): siRNA sense strand
cugcugguaucaaccuuau

SEQ ID NO: 83605 - RNA, 19 nt, Homo sapiens
  misc_RNA (1)...(19): siRNA sense strand
cgacaauggaagcggauau

SEQ ID NO: 83606 - RNA, 19 nt, Homo sapiens
  misc_RNA (1)...(19): siRNA sense strand
ggcagauugugcuuguaga

SEQ ID NO: 83607 - RNA, 19 nt, Homo sapiens
  misc_RNA (1)...(19): siRNA sense strand
gcugcugguaucaaccuua

SEQ ID NO: 83608 - RNA, 19 nt, Homo sapiens
  misc_RNA (1)...(19): siRNA sense strand
ccauggaggcuuugguugu

SEQ ID NO: 83609 - RNA, 19 nt, Homo sapiens
  misc_RNA (1)...(19): siRNA sense strand
uggaggcuuugguuguuga

SEQ ID NO: 83610 - RNA, 19 nt, Homo sapiens
  misc_RNA (1)...(19): siRNA sense strand
cucgagccaucucugcuaa

SEQ ID NO: 83611 - RNA, 19 nt, Homo sapiens
  misc_RNA (1)...(19): siRNA sense strand
ugaaguaaccaaacaaccu

SEQ ID NO: 83612 - RNA, 19 nt, Homo sapiens
  misc_RNA (1)...(19): siRNA sense strand
uggaggcuauagaggaguu

SEQ ID NO: 83613 - RNA, 19 nt, Homo sapiens
  misc_RNA (1)...(19): siRNA sense strand
aaacagaaaugcaggauaa

SEQ ID NO: 83614 - RNA, 19 nt, Homo sapiens
  misc_RNA (1)...(19): siRNA sense strand
cagcagcuaucucgaauua

SEQ ID NO: 83615 - RNA, 19 nt, Homo sapiens
  misc_RNA (1)...(19): siRNA sense strand
gaugagauuugcccacaua

SEQ ID NO: 83616 - RNA, 19 nt, Homo sapiens
  misc_RNA (1)...(19): siRNA sense strand
ugaauuaccuggcugcuuu

SEQ ID NO: 83617 - RNA, 19 nt, Homo sapiens
  misc_RNA (1)...(19): siRNA sense strand
gagaucagauuuaaagguu

SEQ ID NO: 83618 - RNA, 19 nt, Homo sapiens
  misc_RNA (1)...(19): siRNA sense strand
gaauaaagcgugaaguuga

SEQ ID NO: 83619 - RNA, 19 nt, Homo sapiens
  misc_RNA (1)...(19): siRNA sense strand
gaacaguuauccagauuca

SEQ ID NO: 83620 - RNA, 19 nt, Homo sapiens
  misc_RNA (1)...(19): siRNA sense strand
aaggauagguuuacagaua

SEQ ID NO: 83621 - RNA, 19 nt, Homo sapiens
  misc_RNA (1)...(19): siRNA sense strand
gaagaaacuugguauugau

SEQ ID NO: 83622 - RNA, 19 nt, Homo sapiens
  misc_RNA (1)...(19): siRNA sense strand
agacagagaucagauuuaa

SEQ ID NO: 83623 - RNA, 19 nt, Homo sapiens
  misc_RNA (1)...(19): siRNA sense strand
gaugaagccuguaagagaa

SEQ ID NO: 83624 - RNA, 19 nt, Homo sapiens
  misc_RNA (1)...(19): siRNA sense strand
gcagcuaucucgaauuaug

SEQ ID NO: 83625 - RNA, 19 nt, Homo sapiens
  misc_RNA (1)...(19): siRNA sense strand
ggaaaaugcuucagacuuu

SEQ ID NO: 83626 - RNA, 19 nt, Homo sapiens
  misc_RNA (1)...(19): siRNA sense strand
gcagagacgucuuugacaa

SEQ ID NO: 83627 - RNA, 19 nt, Homo sapiens
  misc_RNA (1)...(19): siRNA sense strand
cuaaugagguccuaucuau

SEQ ID NO: 83628 - RNA, 19 nt, Homo sapiens
  misc_RNA (1)...(19): siRNA sense strand
ugaagaaacuugguauuga

SEQ ID NO: 83629 - RNA, 19 nt, Homo sapiens
  misc_RNA (1)...(19): siRNA sense strand
ggaaguugguuacuccauu

SEQ ID NO: 83630 - RNA, 19 nt, Homo sapiens
  misc_RNA (1)...(19): siRNA sense strand
gggcauuacuuaacuguga

SEQ ID NO: 83631 - RNA, 19 nt, Homo sapiens
  misc_RNA (1)...(19): siRNA sense strand
gcuuaucagugcuggauua

SEQ ID NO: 83632 - RNA, 19 nt, Homo sapiens
  misc_RNA (1)...(19): siRNA sense strand
cugaaugggugcuuuauaa

SEQ ID NO: 83633 - RNA, 19 nt, Homo sapiens
  misc_RNA (1)...(19): siRNA sense strand
gagaguugcugaugagaug

SEQ ID NO: 83634 - RNA, 19 nt, Homo sapiens
  misc_RNA (1)...(19): siRNA sense strand
ggugacagcuauuaguaaa

SEQ ID NO: 83635 - RNA, 19 nt, Homo sapiens
  misc_RNA (1)...(19): siRNA sense strand
caacaaaugcuaugcuuau

SEQ ID NO: 83636 - RNA, 19 nt, Homo sapiens
  misc_RNA (1)...(19): siRNA sense strand
ccacauagauggagaucau

SEQ ID NO: 83637 - RNA, 19 nt, Homo sapiens
  misc_RNA (1)...(19): siRNA sense strand
gagaguggcugcaaugagu

SEQ ID NO: 83638 - RNA, 19 nt, Homo sapiens
  misc_RNA (1)...(19): siRNA sense strand
ggagcguuaugguguaaua

SEQ ID NO: 83639 - RNA, 19 nt, Homo sapiens
  misc_RNA (1)...(19): siRNA sense strand
uaacaccuauccugagauu

SEQ ID NO: 83640 - RNA, 19 nt, Homo sapiens
  misc_RNA (1)...(19): siRNA sense strand
gaaguugguuacuccauuc

SEQ ID NO: 83641 - RNA, 19 nt, Homo sapiens
  misc_RNA (1)...(19): siRNA sense strand
gaacagggcauuacuuaac

SEQ ID NO: 83642 - RNA, 19 nt, Homo sapiens
  misc_RNA (1)...(19): siRNA sense strand
aaugagguccuaucuauua

SEQ ID NO: 83643 - RNA, 19 nt, Homo sapiens
  misc_RNA (1)...(19): siRNA sense strand
gacuacaacuguucuaaug

SEQ ID NO: 83644 - RNA, 19 nt, Homo sapiens
  misc_RNA (1)...(19): siRNA sense strand
gagaauaaagcgugaaguu

SEQ ID NO: 83645 - RNA, 19 nt, Homo sapiens
  misc_RNA (1)...(19): siRNA sense strand
gcagcaauucgaacaguua

SEQ ID NO: 83646 - RNA, 19 nt, Homo sapiens
  misc_RNA (1)...(19): siRNA sense strand
caaggaauauucacaguac

SEQ ID NO: 83647 - RNA, 19 nt, Homo sapiens
  misc_RNA (1)...(19): siRNA sense strand
gcagguggcacauuuagaa

SEQ ID NO: 83648 - RNA, 19 nt, Homo sapiens
  misc_RNA (1)...(19): siRNA sense strand
ugaaguuggugacauuaaa

SEQ ID NO: 83649 - RNA, 19 nt, Homo sapiens
  misc_RNA (1)...(19): siRNA sense strand
cgaauuauggacagauuua

SEQ ID NO: 83650 - RNA, 19 nt, Homo sapiens
  misc_RNA (1)...(19): siRNA sense strand
acacagagaaagcuuauaa

SEQ ID NO: 83651 - RNA, 19 nt, Homo sapiens
  misc_RNA (1)...(19): siRNA sense strand
gaaaaugcuucagacuuua

SEQ ID NO: 83652 - RNA, 19 nt, Homo sapiens
  misc_RNA (1)...(19): siRNA sense strand
gagaaggaguugcgagcuu

SEQ ID NO: 83653 - RNA, 19 nt, Homo sapiens
  misc_RNA (1)...(19): siRNA sense strand
gacacuggcuacagauauu

SEQ ID NO: 83654 - RNA, 19 nt, Homo sapiens
  misc_RNA (1)...(19): siRNA sense strand
gaauacaaggauagguuua

SEQ ID NO: 83655 - RNA, 19 nt, Homo sapiens
  misc_RNA (1)...(19): siRNA sense strand
gcagggacuauuauauuaa

SEQ ID NO: 83656 - RNA, 19 nt, Homo sapiens
  misc_RNA (1)...(19): siRNA sense strand
ggaauacaaggauagguuu

SEQ ID NO: 83657 - RNA, 19 nt, Homo sapiens
  misc_RNA (1)...(19): siRNA sense strand
gaauggagcaauuggaaga

SEQ ID NO: 83658 - RNA, 19 nt, Homo sapiens
  misc_RNA (1)...(19): siRNA sense strand
ugaaggaaguuguaagaca

SEQ ID NO: 83659 - RNA, 19 nt, Homo sapiens
  misc_RNA (1)...(19): siRNA sense strand
ggauagguuuacagauauu

SEQ ID NO: 83660 - RNA, 19 nt, Homo sapiens
  misc_RNA (1)...(19): siRNA sense strand
aaugggugcuuuauaauga

SEQ ID NO: 83661 - RNA, 19 nt, Homo sapiens
  misc_RNA (1)...(19): siRNA sense strand
uuaccuggcugcuuuaaau

SEQ ID NO: 83662 - RNA, 19 nt, Homo sapiens
  misc_RNA (1)...(19): siRNA sense strand
cuacaauccucgaaucaga

SEQ ID NO: 83663 - RNA, 19 nt, Homo sapiens
  misc_RNA (1)...(19): siRNA sense strand
guugagaucuucuauacuc

SEQ ID NO: 83664 - RNA, 19 nt, Homo sapiens
  misc_RNA (1)...(19): siRNA sense strand
agcagggacuauuauauua

SEQ ID NO: 83665 - RNA, 19 nt, Homo sapiens
  misc_RNA (1)...(19): siRNA sense strand
uuacaagcagggacuauua

SEQ ID NO: 83666 - RNA, 19 nt, Homo sapiens
  misc_RNA (1)...(19): siRNA sense strand
caagaaagccgcagaugag

SEQ ID NO: 83667 - RNA, 19 nt, Homo sapiens
  misc_RNA (1)...(19): siRNA sense strand
ggaguacaugcgaucauua

SEQ ID NO: 83668 - RNA, 19 nt, Homo sapiens
  misc_RNA (1)...(19): siRNA sense strand
gaaugggugcuuuauaaug

SEQ ID NO: 83669 - RNA, 19 nt, Homo sapiens
  misc_RNA (1)...(19): siRNA sense strand
gugaagaucggucuaaaga

SEQ ID NO: 83670 - RNA, 19 nt, Homo sapiens
  misc_RNA (1)...(19): siRNA sense strand
gaugagagcccuggaacuu

SEQ ID NO: 83671 - RNA, 19 nt, Homo sapiens
  misc_RNA (1)...(19): siRNA sense strand
gcgugaaguugaugauuug

SEQ ID NO: 83672 - RNA, 19 nt, Homo sapiens
  misc_RNA (1)...(19): siRNA sense strand
ugagauggaugugauguug

SEQ ID NO: 83673 - RNA, 19 nt, Homo sapiens
  misc_RNA (1)...(19): siRNA sense strand
guacacauccuguugagau

SEQ ID NO: 83674 - RNA, 19 nt, Homo sapiens
  misc_RNA (1)...(19): siRNA sense strand
agagacgucuuugacaaua

SEQ ID NO: 83675 - RNA, 19 nt, Homo sapiens
  misc_RNA (1)...(19): siRNA sense strand
acaguuauccagauucaua

SEQ ID NO: 83676 - RNA, 19 nt, Homo sapiens
  misc_RNA (1)...(19): siRNA sense strand
gcauuaauccguucaccaa

SEQ ID NO: 83677 - RNA, 19 nt, Homo sapiens
  misc_RNA (1)...(19): siRNA sense strand
ugacacugcugaacgucua

SEQ ID NO: 83678 - RNA, 19 nt, Homo sapiens
  misc_RNA (1)...(19): siRNA sense strand
ccaagaaagccgcagauga

SEQ ID NO: 83679 - RNA, 19 nt, Homo sapiens
  misc_RNA (1)...(19): siRNA sense strand
uaagacagagaucagauuu

SEQ ID NO: 83680 - RNA, 19 nt, Homo sapiens
  misc_RNA (1)...(19): siRNA sense strand
ggagauagagagcgagaga

SEQ ID NO: 83681 - RNA, 19 nt, Homo sapiens
  misc_RNA (1)...(19): siRNA sense strand
ggacacuggcuacagauau

SEQ ID NO: 83682 - RNA, 19 nt, Homo sapiens
  misc_RNA (1)...(19): siRNA sense strand
aaacuucaauccaaggaau

SEQ ID NO: 83683 - RNA, 19 nt, Homo sapiens
  misc_RNA (1)...(19): siRNA sense strand
agagggagaucuucuucuu

SEQ ID NO: 83684 - RNA, 19 nt, Homo sapiens
  misc_RNA (1)...(19): siRNA sense strand
gagauuugcccacauagau

SEQ ID NO: 83685 - RNA, 19 nt, Homo sapiens
  misc_RNA (1)...(19): siRNA sense strand
gcagaugaggccaagauga

SEQ ID NO: 83686 - RNA, 19 nt, Homo sapiens
  misc_RNA (1)...(19): siRNA sense strand
uaugagcgcuacucuagau

SEQ ID NO: 83687 - RNA, 19 nt, Homo sapiens
  misc_RNA (1)...(19): siRNA sense strand
gaacgugauagaggagaua

SEQ ID NO: 83688 - RNA, 19 nt, Homo sapiens
  misc_RNA (1)...(19): siRNA sense strand
cgaaacagaaggucuacaa

SEQ ID NO: 83689 - RNA, 19 nt, Homo sapiens
  misc_RNA (1)...(19): siRNA sense strand
auggagaucugacugaauu

SEQ ID NO: 83690 - RNA, 19 nt, Homo sapiens
  misc_RNA (1)...(19): siRNA sense strand
gggaauacaaggauagguu

SEQ ID NO: 83691 - RNA, 19 nt, Homo sapiens
  misc_RNA (1)...(19): siRNA sense strand
ccaaggaauauucacagua

SEQ ID NO: 83692 - RNA, 19 nt, Homo sapiens
  misc_RNA (1)...(19): siRNA sense strand
caaaugcuaugcuuaucag

SEQ ID NO: 83693 - RNA, 19 nt, Homo sapiens
  misc_RNA (1)...(19): siRNA sense strand
uuuaggaucaguuguguua

SEQ ID NO: 83694 - RNA, 19 nt, Homo sapiens
  misc_RNA (1)...(19): siRNA sense strand
ggucuacaauccucgaauc

SEQ ID NO: 83695 - RNA, 19 nt, Homo sapiens
  misc_RNA (1)...(19): siRNA sense strand
ugaugaagccuguaagaga

SEQ ID NO: 83696 - RNA, 19 nt, Homo sapiens
  misc_RNA (1)...(19): siRNA sense strand
ucauaugugugaagaggaa

SEQ ID NO: 83697 - RNA, 19 nt, Homo sapiens
  misc_RNA (1)...(19): siRNA sense strand
uaacuguccucuccuaacu

SEQ ID NO: 83698 - RNA, 19 nt, Homo sapiens
  misc_RNA (1)...(19): siRNA sense strand
ugauaacuguccucuccua

SEQ ID NO: 83699 - RNA, 19 nt, Homo sapiens
  misc_RNA (1)...(19): siRNA sense strand
gaguguggcucagagaguu

SEQ ID NO: 83700 - RNA, 19 nt, Homo sapiens
  misc_RNA (1)...(19): siRNA sense strand
ggguagacaucaguccuuu

SEQ ID NO: 83701 - RNA, 19 nt, Homo sapiens
  misc_RNA (1)...(19): siRNA sense strand
cgagagagggagaaagaaa

SEQ ID NO: 83702 - RNA, 19 nt, Homo sapiens
  misc_RNA (1)...(19): siRNA sense strand
uuaugcagguggcacauuu

SEQ ID NO: 83703 - RNA, 19 nt, Homo sapiens
  misc_RNA (1)...(19): siRNA sense strand
aagcagggacuauuauauu

SEQ ID NO: 83704 - RNA, 19 nt, Homo sapiens
  misc_RNA (1)...(19): siRNA sense strand
gaauuaccuggcugcuuua

SEQ ID NO: 83705 - RNA, 19 nt, Homo sapiens
  misc_RNA (1)...(19): siRNA sense strand
agacaucaguccuuuguac

SEQ ID NO: 83706 - RNA, 19 nt, Homo sapiens
  misc_RNA (1)...(19): siRNA sense strand
gaaacagaaggucuacaau

SEQ ID NO: 83707 - RNA, 19 nt, Homo sapiens
  misc_RNA (1)...(19): siRNA sense strand
guaagacagagaucagauu

SEQ ID NO: 83708 - RNA, 19 nt, Homo sapiens
  misc_RNA (1)...(19): siRNA sense strand
ggcuacagauauucuaaug

SEQ ID NO: 83709 - RNA, 19 nt, Homo sapiens
  misc_RNA (1)...(19): siRNA sense strand
agaggacacuggcuacaga

SEQ ID NO: 83710 - RNA, 19 nt, Homo sapiens
  misc_RNA (1)...(19): siRNA sense strand
uugaugacuugguacauuu

SEQ ID NO: 83711 - RNA, 19 nt, Homo sapiens
  misc_RNA (1)...(19): siRNA sense strand
uaauuugccucgucgaagu

SEQ ID NO: 83712 - RNA, 19 nt, Homo sapiens
  misc_RNA (1)...(19): siRNA sense strand
uaucagugcuggauuacca

SEQ ID NO: 83713 - RNA, 19 nt, Homo sapiens
  misc_RNA (1)...(19): siRNA sense strand
gaaauaagguucaugcaau

SEQ ID NO: 83714 - RNA, 19 nt, Homo sapiens
  misc_RNA (1)...(19): siRNA sense strand
ggacccaacuggaacauuu

SEQ ID NO: 83715 - RNA, 19 nt, Homo sapiens
  misc_RNA (1)...(19): siRNA sense strand
gauuaugcuucuuggauua

SEQ ID NO: 83716 - RNA, 19 nt, Homo sapiens
  misc_RNA (1)...(19): siRNA sense strand
uagaagaacucaucaggaa

SEQ ID NO: 83717 - RNA, 19 nt, Homo sapiens
  misc_RNA (1)...(19): siRNA sense strand
gaagauggauguuuugaaa

SEQ ID NO: 83718 - RNA, 19 nt, Homo sapiens
  misc_RNA (1)...(19): siRNA sense strand
gagcagcauuucuuucuau

SEQ ID NO: 83719 - RNA, 19 nt, Homo sapiens
  misc_RNA (1)...(19): siRNA sense strand
ugagaaaggucaccaagga

SEQ ID NO: 83720 - RNA, 19 nt, Homo sapiens
  misc_RNA (1)...(19): siRNA sense strand
ggagaggaaguacuuauuu

SEQ ID NO: 83721 - RNA, 19 nt, Homo sapiens
  misc_RNA (1)...(19): siRNA sense strand
gcaauucagugugauguga

SEQ ID NO: 83722 - RNA, 19 nt, Homo sapiens
  misc_RNA (1)...(19): siRNA sense strand
uagaagaacucgcaaaucu

SEQ ID NO: 83723 - RNA, 19 nt, Homo sapiens
  misc_RNA (1)...(19): siRNA sense strand
gagaggaaguacuuauuuc

SEQ ID NO: 83724 - RNA, 19 nt, Homo sapiens
  misc_RNA (1)...(19): siRNA sense strand
gaagaacucaucaggaaga

SEQ ID NO: 83725 - RNA, 19 nt, Homo sapiens
  misc_RNA (1)...(19): siRNA sense strand
gaucaaaguugcaggacau

SEQ ID NO: 83726 - RNA, 19 nt, Homo sapiens
  misc_RNA (1)...(19): siRNA sense strand
gaaaugauuggcagaauuc

SEQ ID NO: 83727 - RNA, 19 nt, Homo sapiens
  misc_RNA (1)...(19): siRNA sense strand
guaaaggaaugacaacucu

SEQ ID NO: 83728 - RNA, 19 nt, Homo sapiens
  misc_RNA (1)...(19): siRNA sense strand
ggaaauaagguucaugcaa

SEQ ID NO: 83729 - RNA, 19 nt, Homo sapiens
  misc_RNA (1)...(19): siRNA sense strand
ggagcagcauuucuuucua

SEQ ID NO: 83730 - RNA, 19 nt, Homo sapiens
  misc_RNA (1)...(19): siRNA sense strand
gaacucaucaggaagacaa

SEQ ID NO: 83731 - RNA, 19 nt, Homo sapiens
  misc_RNA (1)...(19): siRNA sense strand
gcgaugcuaccaccuaaua

SEQ ID NO: 83732 - RNA, 19 nt, Homo sapiens
  misc_RNA (1)...(19): siRNA sense strand
agaaaugauuggcagaauu

SEQ ID NO: 83733 - RNA, 19 nt, Homo sapiens
  misc_RNA (1)...(19): siRNA sense strand
ggaaugacaacucuucugu

SEQ ID NO: 83734 - RNA, 19 nt, Homo sapiens
  misc_RNA (1)...(19): siRNA sense strand
ggaauucaacgaccugaga

SEQ ID NO: 83735 - RNA, 19 nt, Homo sapiens
  misc_RNA (1)...(19): siRNA sense strand
ggaaaaguggcauucauua

SEQ ID NO: 83736 - RNA, 19 nt, Homo sapiens
  misc_RNA (1)...(19): siRNA sense strand
gcagcauuucuuucuauua

SEQ ID NO: 83737 - RNA, 19 nt, Homo sapiens
  misc_RNA (1)...(19): siRNA sense strand
gagggauccugauaugguu

SEQ ID NO: 83738 - RNA, 19 nt, Homo sapiens
  misc_RNA (1)...(19): siRNA sense strand
gaugugagggauccugaua

SEQ ID NO: 83739 - RNA, 19 nt, Homo sapiens
  misc_RNA (1)...(19): siRNA sense strand
cagcauuucuuucuauuac

SEQ ID NO: 83740 - RNA, 19 nt, Homo sapiens
  misc_RNA (1)...(19): siRNA sense strand
acagaaaggagcagcauuu

SEQ ID NO: 83741 - RNA, 19 nt, Homo sapiens
  misc_RNA (1)...(19): siRNA sense strand
guaaauauggaaugcgauu

SEQ ID NO: 83742 - RNA, 19 nt, Homo sapiens
  misc_RNA (1)...(19): siRNA sense strand
gaaagcuaccgcagaacaa

SEQ ID NO: 83743 - RNA, 19 nt, Homo sapiens
  misc_RNA (1)...(19): siRNA sense strand
ugauuaugcuucuuggauu

SEQ ID NO: 83744 - RNA, 19 nt, Homo sapiens
  misc_RNA (1)...(19): siRNA sense strand
gcagugggacaccauagaa

SEQ ID NO: 83745 - RNA, 19 nt, Homo sapiens
  misc_RNA (1)...(19): siRNA sense strand
ggacauccuaauauuguga

SEQ ID NO: 83746 - RNA, 19 nt, Homo sapiens
  misc_RNA (1)...(19): siRNA sense strand
cugaagcuuugcaaucuaa

SEQ ID NO: 83747 - RNA, 19 nt, Homo sapiens
  misc_RNA (1)...(19): siRNA sense strand
caaauuucuucucaaacug

SEQ ID NO: 83748 - RNA, 19 nt, Homo sapiens
  misc_RNA (1)...(19): siRNA sense strand
gcacagccuucgugacacu

SEQ ID NO: 83749 - RNA, 19 nt, Homo sapiens
  misc_RNA (1)...(19): siRNA sense strand
uuugaaagcuaccgcagaa

SEQ ID NO: 83750 - RNA, 19 nt, Homo sapiens
  misc_RNA (1)...(19): siRNA sense strand
aaaguggcauucauuacug

SEQ ID NO: 83751 - RNA, 19 nt, Homo sapiens
  misc_RNA (1)...(19): siRNA sense strand
caacuggaacauuugagaa

SEQ ID NO: 83752 - RNA, 19 nt, Homo sapiens
  misc_RNA (1)...(19): siRNA sense strand
ggagguacuggccuuggua

SEQ ID NO: 83753 - RNA, 19 nt, Homo sapiens
  misc_RNA (1)...(19): siRNA sense strand
ugugagggauccugauaug

SEQ ID NO: 83754 - RNA, 19 nt, Homo sapiens
  misc_RNA (1)...(19): siRNA sense strand
gaauucaacgaccugagaa

SEQ ID NO: 83755 - RNA, 19 nt, Homo sapiens
  misc_RNA (1)...(19): siRNA sense strand
aagcgaugcuaccaccuaa

SEQ ID NO: 83756 - RNA, 19 nt, Homo sapiens
  misc_RNA (1)...(19): siRNA sense strand
gcgauucaaugugauucaa

SEQ ID NO: 83757 - RNA, 19 nt, Homo sapiens
  misc_RNA (1)...(19): siRNA sense strand
guagugauuaugcuucuug

SEQ ID NO: 83758 - RNA, 19 nt, Homo sapiens
  misc_RNA (1)...(19): siRNA sense strand
ccuaauaguuuucaaggaa

SEQ ID NO: 83759 - RNA, 19 nt, Homo sapiens
  misc_RNA (1)...(19): siRNA sense strand
aaacaaugcagcagggaau

SEQ ID NO: 83760 - RNA, 19 nt, Homo sapiens
  misc_RNA (1)...(19): siRNA sense strand
uggaacauuugagaaagaa

SEQ ID NO: 83761 - RNA, 19 nt, Homo sapiens
  misc_RNA (1)...(19): siRNA sense strand
accaagugcuucugccaaa

SEQ ID NO: 83762 - RNA, 19 nt, Homo sapiens
  misc_RNA (1)...(19): siRNA sense strand
gagguacuggccuugguaa

SEQ ID NO: 83763 - RNA, 19 nt, Homo sapiens
  misc_RNA (1)...(19): siRNA sense strand
caccauagaagaacucauc

SEQ ID NO: 83764 - RNA, 19 nt, Homo sapiens
  misc_RNA (1)...(19): siRNA sense strand
ggagcagugggacaccaua

SEQ ID NO: 83765 - RNA, 19 nt, Homo sapiens
  misc_RNA (1)...(19): siRNA sense strand
cacugaagcuuugcaaucu

SEQ ID NO: 83766 - RNA, 19 nt, Homo sapiens
  misc_RNA (1)...(19): siRNA sense strand
cuggaacauuugagaaaga

SEQ ID NO: 83767 - RNA, 19 nt, Homo sapiens
  misc_RNA (1)...(19): siRNA sense strand
ccaacuggaacauuugaga

SEQ ID NO: 83768 - RNA, 19 nt, Homo sapiens
  misc_RNA (1)...(19): siRNA sense strand
gcuuugcaaucuaaauucu

SEQ ID NO: 83769 - RNA, 19 nt, Homo sapiens
  misc_RNA (1)...(19): siRNA sense strand
gaagcuuugcaaucuaaau

SEQ ID NO: 83770 - RNA, 19 nt, Homo sapiens
  misc_RNA (1)...(19): siRNA sense strand
aaaggaaugacaacucuuc

SEQ ID NO: 83771 - RNA, 19 nt, Homo sapiens
  misc_RNA (1)...(19): siRNA sense strand
gguaaaggaaugacaacuc

SEQ ID NO: 83772 - RNA, 19 nt, Homo sapiens
  misc_RNA (1)...(19): siRNA sense strand
gccggaagauggauguuuu

SEQ ID NO: 83773 - RNA, 19 nt, Homo sapiens
  misc_RNA (1)...(19): siRNA sense strand
aaaucuugcugcuuuccuu

SEQ ID NO: 83774 - RNA, 19 nt, Homo sapiens
  misc_RNA (1)...(19): siRNA sense strand
acacugaagcuuugcaauc

SEQ ID NO: 83775 - RNA, 19 nt, Homo sapiens
  misc_RNA (1)...(19): siRNA sense strand
ugaaagcuaccgcagaaca

SEQ ID NO: 83776 - RNA, 19 nt, Homo sapiens
  misc_RNA (1)...(19): siRNA sense strand
ugccaaagcagguguggaa

SEQ ID NO: 83777 - RNA, 19 nt, Homo sapiens
  misc_RNA (1)...(19): siRNA sense strand
gugauuaugcuucuuggau

SEQ ID NO: 83778 - RNA, 19 nt, Homo sapiens
  misc_RNA (1)...(19): siRNA sense strand
guagaagaacucgcaaauc

SEQ ID NO: 83779 - RNA, 19 nt, Homo sapiens
  misc_RNA (1)...(19): siRNA sense strand
aagaaaugauuggcagaau

SEQ ID NO: 83780 - RNA, 19 nt, Homo sapiens
  misc_RNA (1)...(19): siRNA sense strand
aaagaaaugauuggcagaa

SEQ ID NO: 83781 - RNA, 19 nt, Homo sapiens
  misc_RNA (1)...(19): siRNA sense strand
gaugcuaccaccuaauagu

SEQ ID NO: 83782 - RNA, 19 nt, Homo sapiens
  misc_RNA (1)...(19): siRNA sense strand
aaagcgaugcuaccaccua

SEQ ID NO: 83783 - RNA, 19 nt, Homo sapiens
  misc_RNA (1)...(19): siRNA sense strand
gcuuuccuuuguagugauu

SEQ ID NO: 83784 - RNA, 19 nt, Homo sapiens
  misc_RNA (1)...(19): siRNA sense strand
gcacagaaaggagcagcau

SEQ ID NO: 83785 - RNA, 19 nt, Homo sapiens
  misc_RNA (1)...(19): siRNA sense strand
cuucgugacacuagaaauu

SEQ ID NO: 83786 - RNA, 19 nt, Homo sapiens
  misc_RNA (1)...(19): siRNA sense strand
ggaaaaccauaacugacau

SEQ ID NO: 83787 - RNA, 19 nt, Homo sapiens
  misc_RNA (1)...(19): siRNA sense strand
cuaauuaaagcacagaaag

SEQ ID NO: 83788 - RNA, 19 nt, Homo sapiens
  misc_RNA (1)...(19): siRNA sense strand
gggagguacuggccuuggu

SEQ ID NO: 83789 - RNA, 19 nt, Homo sapiens
  misc_RNA (1)...(19): siRNA sense strand
gcuaccaccuaauaguuuu

SEQ ID NO: 83790 - RNA, 19 nt, Homo sapiens
  misc_RNA (1)...(19): siRNA sense strand
uggcacagccuucgugaca

SEQ ID NO: 83791 - RNA, 19 nt, Homo sapiens
  misc_RNA (1)...(19): siRNA sense strand
gaaaaccauaacugacaua

SEQ ID NO: 83792 - RNA, 19 nt, Homo sapiens
  misc_RNA (1)...(19): siRNA sense strand
ugagggauccugauauggu

SEQ ID NO: 83793 - RNA, 19 nt, Homo sapiens
  misc_RNA (1)...(19): siRNA sense strand
cgucuggacccaacuggaa

SEQ ID NO: 83794 - RNA, 19 nt, Homo sapiens
  misc_RNA (1)...(19): siRNA sense strand
acugaagcuuugcaaucua

SEQ ID NO: 83795 - RNA, 19 nt, Homo sapiens
  misc_RNA (1)...(19): siRNA sense strand
aaacuggaaauaagguuca

SEQ ID NO: 83796 - RNA, 19 nt, Homo sapiens
  misc_RNA (1)...(19): siRNA sense strand
gaggaaguacuuauuucag

SEQ ID NO: 83797 - RNA, 19 nt, Homo sapiens
  misc_RNA (1)...(19): siRNA sense strand
agaggaaguacuuauuuca

SEQ ID NO: 83798 - RNA, 19 nt, Homo sapiens
  misc_RNA (1)...(19): siRNA sense strand
uguagaagaacucgcaaau

SEQ ID NO: 83799 - RNA, 19 nt, Homo sapiens
  misc_RNA (1)...(19): siRNA sense strand
uucaugcaauucaguguga

SEQ ID NO: 83800 - RNA, 19 nt, Homo sapiens
  misc_RNA (1)...(19): siRNA sense strand
aaagcuaccgcagaacaaa

SEQ ID NO: 83801 - RNA, 19 nt, Homo sapiens
  misc_RNA (1)...(19): siRNA sense strand
gugggacaccauagaagaa

SEQ ID NO: 83802 - RNA, 19 nt, Homo sapiens
  misc_RNA (1)...(19): siRNA sense strand
uggagaggaaguacuuauu

SEQ ID NO: 83803 - RNA, 19 nt, Homo sapiens
  misc_RNA (1)...(19): siRNA sense strand
cugcuuuccuuuguaguga

SEQ ID NO: 83804 - RNA, 19 nt, Homo sapiens
  misc_RNA (1)...(19): siRNA sense strand
gguacuggccuugguaaag

SEQ ID NO: 83805 - RNA, 19 nt, Homo sapiens
  misc_RNA (1)...(19): siRNA sense strand
caacuaauuaaagcacaga

SEQ ID NO: 83806 - RNA, 19 nt, Homo sapiens
  misc_RNA (1)...(19): siRNA sense strand
cuucucaaacuggaaauaa

SEQ ID NO: 83807 - RNA, 19 nt, Homo sapiens
  misc_RNA (1)...(19): siRNA sense strand
acaaugcagcagggaauuu

SEQ ID NO: 83808 - RNA, 19 nt, Homo sapiens
  misc_RNA (1)...(19): siRNA sense strand
guggagaggaaguacuuau

SEQ ID NO: 83809 - RNA, 19 nt, Homo sapiens
  misc_RNA (1)...(19): siRNA sense strand
gauucaaccagggccuaua

SEQ ID NO: 83810 - RNA, 19 nt, Homo sapiens
  misc_RNA (1)...(19): siRNA sense strand
aauuaaagcacagaaagga

SEQ ID NO: 83811 - RNA, 19 nt, Homo sapiens
  misc_RNA (1)...(19): siRNA sense strand
gacccaacuggaacauuug

SEQ ID NO: 83812 - RNA, 19 nt, Homo sapiens
  misc_RNA (1)...(19): siRNA sense strand
gagcagugggacaccauag

SEQ ID NO: 83813 - RNA, 19 nt, Homo sapiens
  misc_RNA (1)...(19): siRNA sense strand
ggacggacuuuauaagaug

SEQ ID NO: 83814 - RNA, 19 nt, Homo sapiens
  misc_RNA (1)...(19): siRNA sense strand
ggaccaagcugucauuaac

SEQ ID NO: 83815 - RNA, 19 nt, Homo sapiens
  misc_RNA (1)...(19): siRNA sense strand
ggccauaaauuccgaaauc

SEQ ID NO: 83816 - RNA, 19 nt, Homo sapiens
  misc_RNA (1)...(19): siRNA sense strand
aggaauugcugcaggauuu

SEQ ID NO: 83817 - RNA, 19 nt, Homo sapiens
  misc_RNA (1)...(19): siRNA sense strand
uaacagguauggauuuaac

SEQ ID NO: 83818 - RNA, 19 nt, Homo sapiens
  misc_RNA (1)...(19): siRNA sense strand
gggcaucgaugggcugauu

SEQ ID NO: 83819 - RNA, 19 nt, Homo sapiens
  misc_RNA (1)...(19): siRNA sense strand
gagaugagcguuucuaugc

SEQ ID NO: 83820 - RNA, 19 nt, Homo sapiens
  misc_RNA (1)...(19): siRNA sense strand
gaacuggaggcccuucuga

SEQ ID NO: 83821 - RNA, 19 nt, Homo sapiens
  misc_RNA (1)...(19): siRNA sense strand
gguauggauuuaacaguca

SEQ ID NO: 83822 - RNA, 19 nt, Homo sapiens
  misc_RNA (1)...(19): siRNA sense strand
ugagaguucugggccauaa

SEQ ID NO: 83823 - RNA, 19 nt, Homo sapiens
  misc_RNA (1)...(19): siRNA sense strand
uggaggcccuucugaaaga

SEQ ID NO: 83824 - RNA, 19 nt, Homo sapiens
  misc_RNA (1)...(19): siRNA sense strand
ggagaugagcguuucuaug

SEQ ID NO: 83825 - RNA, 19 nt, Homo sapiens
  misc_RNA (1)...(19): siRNA sense strand
ccaguguggucaaagaguu

SEQ ID NO: 83826 - RNA, 19 nt, Homo sapiens
  misc_RNA (1)...(19): siRNA sense strand
uaggaagugugacuccaaa

SEQ ID NO: 83827 - RNA, 19 nt, Homo sapiens
  misc_RNA (1)...(19): siRNA sense strand
ggaagaacaagaccucagu

SEQ ID NO: 83828 - RNA, 19 nt, Homo sapiens
  misc_RNA (1)...(19): siRNA sense strand
aggccaagcucacagaaga

SEQ ID NO: 83829 - RNA, 19 nt, Homo sapiens
  misc_RNA (1)...(19): siRNA sense strand
ggccagauuucaagacucu

SEQ ID NO: 83830 - RNA, 19 nt, Homo sapiens
  misc_RNA (1)...(19): siRNA sense strand
ucaaagaguugggcaucga

SEQ ID NO: 83831 - RNA, 19 nt, Homo sapiens
  misc_RNA (1)...(19): siRNA sense strand
uaaauuccgaaauccagua

SEQ ID NO: 83832 - RNA, 19 nt, Homo sapiens
  misc_RNA (1)...(19): siRNA sense strand
caaggccgaguucccauaa

SEQ ID NO: 83833 - RNA, 19 nt, Homo sapiens
  misc_RNA (1)...(19): siRNA sense strand
cgggauuuaucaacucaaa

SEQ ID NO: 83834 - RNA, 19 nt, Homo sapiens
  misc_RNA (1)...(19): siRNA sense strand
gaccucaccagccaggaua

SEQ ID NO: 83835 - RNA, 19 nt, Homo sapiens
  misc_RNA (1)...(19): siRNA sense strand
cgaaauccaguaggaauug

SEQ ID NO: 83836 - RNA, 19 nt, Homo sapiens
  misc_RNA (1)...(19): siRNA sense strand
gggaggaggacuucucuuc

SEQ ID NO: 83837 - RNA, 19 nt, Homo sapiens
  misc_RNA (1)...(19): siRNA sense strand
ccgacuaccugguggugaa

SEQ ID NO: 83838 - RNA, 19 nt, Homo sapiens
  misc_RNA (1)...(19): siRNA sense strand
aggccgaguucccauaauu

SEQ ID NO: 83839 - RNA, 19 nt, Homo sapiens
  misc_RNA (1)...(19): siRNA sense strand
uauaagaugggcuuugguu

SEQ ID NO: 83840 - RNA, 19 nt, Homo sapiens
  misc_RNA (1)...(19): siRNA sense strand
agucacagaugccauugga

SEQ ID NO: 83841 - RNA, 19 nt, Homo sapiens
  misc_RNA (1)...(19): siRNA sense strand
guugagauaggaaguguga

SEQ ID NO: 83842 - RNA, 19 nt, Homo sapiens
  misc_RNA (1)...(19): siRNA sense strand
cggcaguccuggugaagau

SEQ ID NO: 83843 - RNA, 19 nt, Homo sapiens
  misc_RNA (1)...(19): siRNA sense strand
uggacggacuuuauaagau

SEQ ID NO: 83844 - RNA, 19 nt, Homo sapiens
  misc_RNA (1)...(19): siRNA sense strand
ucgaugggcugauuguuac

SEQ ID NO: 83845 - RNA, 19 nt, Homo sapiens
  misc_RNA (1)...(19): siRNA sense strand
gaggaccaagcugucauua

SEQ ID NO: 83846 - RNA, 19 nt, Homo sapiens
  misc_RNA (1)...(19): siRNA sense strand
ccaaggccgaguucccaua

SEQ ID NO: 83847 - RNA, 19 nt, Homo sapiens
  misc_RNA (1)...(19): siRNA sense strand
guggacggacuuuauaaga

SEQ ID NO: 83848 - RNA, 19 nt, Homo sapiens
  misc_RNA (1)...(19): siRNA sense strand
ggaagccccuccgggauuu

SEQ ID NO: 83849 - RNA, 19 nt, Homo sapiens
  misc_RNA (1)...(19): siRNA sense strand
gaaauccaguaggaauugc

SEQ ID NO: 83850 - RNA, 19 nt, Homo sapiens
  misc_RNA (1)...(19): siRNA sense strand
acacggcccucaccuucug

SEQ ID NO: 83851 - RNA, 19 nt, Homo sapiens
  misc_RNA (1)...(19): siRNA sense strand
cauuaacagguauggauuu

SEQ ID NO: 83852 - RNA, 19 nt, Homo sapiens
  misc_RNA (1)...(19): siRNA sense strand
uaagaugggcuuugguuuu

SEQ ID NO: 83853 - RNA, 19 nt, Homo sapiens
  misc_RNA (1)...(19): siRNA sense strand
ccacgggagaugagcguuu

SEQ ID NO: 83854 - RNA, 19 nt, Homo sapiens
  misc_RNA (1)...(19): siRNA sense strand
aggaggacauugccagugu

SEQ ID NO: 83855 - RNA, 19 nt, Homo sapiens
  misc_RNA (1)...(19): siRNA sense strand
gaauugcugcaggauuuga

SEQ ID NO: 83856 - RNA, 19 nt, Homo sapiens
  misc_RNA (1)...(19): siRNA sense strand
ggaauugcugcaggauuug

SEQ ID NO: 83857 - RNA, 19 nt, Homo sapiens
  misc_RNA (1)...(19): siRNA sense strand
ccgaaauccaguaggaauu

SEQ ID NO: 83858 - RNA, 19 nt, Homo sapiens
  misc_RNA (1)...(19): siRNA sense strand
gggagaugagcguuucuau

SEQ ID NO: 83859 - RNA, 19 nt, Homo sapiens
  misc_RNA (1)...(19): siRNA sense strand
ggcccaggaugcugugauc

SEQ ID NO: 83860 - RNA, 19 nt, Homo sapiens
  misc_RNA (1)...(19): siRNA sense strand
aaaccauucgggagaugua

SEQ ID NO: 83861 - RNA, 19 nt, Homo sapiens
  misc_RNA (1)...(19): siRNA sense strand
acucugacaugcuggaagu

SEQ ID NO: 83862 - RNA, 19 nt, Homo sapiens
  misc_RNA (1)...(19): siRNA sense strand
aggacgcgcuggagaagau

SEQ ID NO: 83863 - RNA, 19 nt, Homo sapiens
  misc_RNA (1)...(19): siRNA sense strand
ggccgaguucccauaauug

SEQ ID NO: 83864 - RNA, 19 nt, Homo sapiens
  misc_RNA (1)...(19): siRNA sense strand
gaccaagcugucauuaaca

SEQ ID NO: 83865 - RNA, 19 nt, Homo sapiens
  misc_RNA (1)...(19): siRNA sense strand
ucaaaccauucgggagaug

SEQ ID NO: 83866 - RNA, 19 nt, Homo sapiens
  misc_RNA (1)...(19): siRNA sense strand
gaagcaggccaagcucaca

SEQ ID NO: 83867 - RNA, 19 nt, Homo sapiens
  misc_RNA (1)...(19): siRNA sense strand
ccacgggccagauuucaag

SEQ ID NO: 83868 - RNA, 19 nt, Homo sapiens
  misc_RNA (1)...(19): siRNA sense strand
gcccugcgcucugaaacag

SEQ ID NO: 83869 - RNA, 19 nt, Homo sapiens
  misc_RNA (1)...(19): siRNA sense strand
caagcucacagaagaugga

SEQ ID NO: 83870 - RNA, 19 nt, Homo sapiens
  misc_RNA (1)...(19): siRNA sense strand
ucauuaacagguauggauu

SEQ ID NO: 83871 - RNA, 19 nt, Homo sapiens
  misc_RNA (1)...(19): siRNA sense strand
ugacaugcuggaagugaga

SEQ ID NO: 83872 - RNA, 19 nt, Homo sapiens
  misc_RNA (1)...(19): siRNA sense strand
acuggaggcccuucugaaa

SEQ ID NO: 83873 - RNA, 19 nt, Homo sapiens
  misc_RNA (1)...(19): siRNA sense strand
uuuauaagaugggcuuugg

SEQ ID NO: 83874 - RNA, 19 nt, Homo sapiens
  misc_RNA (1)...(19): siRNA sense strand
aucgaugggcugauuguua

SEQ ID NO: 83875 - RNA, 19 nt, Homo sapiens
  misc_RNA (1)...(19): siRNA sense strand
gcggaggacuacgcagaag

SEQ ID NO: 83876 - RNA, 19 nt, Homo sapiens
  misc_RNA (1)...(19): siRNA sense strand
gcaggccaagcucacagaa

SEQ ID NO: 83877 - RNA, 19 nt, Homo sapiens
  misc_RNA (1)...(19): siRNA sense strand
gucauuaacagguauggau

SEQ ID NO: 83878 - RNA, 19 nt, Homo sapiens
  misc_RNA (1)...(19): siRNA sense strand
gcguggagacaccugcaaa

SEQ ID NO: 83879 - RNA, 19 nt, Homo sapiens
  misc_RNA (1)...(19): siRNA sense strand
ggaacuggaggcccuucug

SEQ ID NO: 83880 - RNA, 19 nt, Homo sapiens
  misc_RNA (1)...(19): siRNA sense strand
cgggagauguaugcacuca

SEQ ID NO: 83881 - RNA, 19 nt, Homo sapiens
  misc_RNA (1)...(19): siRNA sense strand
ucaccagccaggauaagga

SEQ ID NO: 83882 - RNA, 19 nt, Homo sapiens
  misc_RNA (1)...(19): siRNA sense strand
cacgggagaugagcguuuc

SEQ ID NO: 83883 - RNA, 19 nt, Homo sapiens
  misc_RNA (1)...(19): siRNA sense strand
ggaacgcuaugaugagcaa

SEQ ID NO: 83884 - RNA, 19 nt, Homo sapiens
  misc_RNA (1)...(19): siRNA sense strand
aaguggagcucaacaguga

SEQ ID NO: 83885 - RNA, 19 nt, Homo sapiens
  misc_RNA (1)...(19): siRNA sense strand
ucucugagcugcgcacuug

SEQ ID NO: 83886 - RNA, 19 nt, Homo sapiens
  misc_RNA (1)...(19): siRNA sense strand
gcccgcugguucucaauuu

SEQ ID NO: 83887 - RNA, 19 nt, Homo sapiens
  misc_RNA (1)...(19): siRNA sense strand
gccagcacauccucgacua

SEQ ID NO: 83888 - RNA, 19 nt, Homo sapiens
  misc_RNA (1)...(19): siRNA sense strand
gcucuggcuucucgauuuc

SEQ ID NO: 83889 - RNA, 19 nt, Homo sapiens
  misc_RNA (1)...(19): siRNA sense strand
gacgucgacuuccucauca

SEQ ID NO: 83890 - RNA, 19 nt, Homo sapiens
  misc_RNA (1)...(19): siRNA sense strand
gguuggaacgcuaugauga

SEQ ID NO: 83891 - RNA, 19 nt, Homo sapiens
  misc_RNA (1)...(19): siRNA sense strand
gcuucucgauuucuugugu

SEQ ID NO: 83892 - RNA, 19 nt, Homo sapiens
  misc_RNA (1)...(19): siRNA sense strand
cgacgucgacuuccucauc

SEQ ID NO: 83893 - RNA, 19 nt, Homo sapiens
  misc_RNA (1)...(19): siRNA sense strand
ggacucucccuacaucauc

SEQ ID NO: 83894 - RNA, 19 nt, Homo sapiens
  misc_RNA (1)...(19): siRNA sense strand
cuacuucgagcgucucuau

SEQ ID NO: 83895 - RNA, 19 nt, Homo sapiens
  misc_RNA (1)...(19): siRNA sense strand
caucaucuacaucgaggaa

SEQ ID NO: 83896 - RNA, 19 nt, Homo sapiens
  misc_RNA (1)...(19): siRNA sense strand
gcugcgcacuugguuggaa

SEQ ID NO: 83897 - RNA, 19 nt, Homo sapiens
  misc_RNA (1)...(19): siRNA sense strand
ugcucuggcuucucgauuu

SEQ ID NO: 83898 - RNA, 19 nt, Homo sapiens
  misc_RNA (1)...(19): siRNA sense strand
ccucgugccucgugcucuu

SEQ ID NO: 83899 - RNA, 19 nt, Homo sapiens
  misc_RNA (1)...(19): siRNA sense strand
cacggacucucccuacauc

SEQ ID NO: 83900 - RNA, 19 nt, Homo sapiens
  misc_RNA (1)...(19): siRNA sense strand
ucgacuuccucaucaucua

SEQ ID NO: 83901 - RNA, 19 nt, Homo sapiens
  misc_RNA (1)...(19): siRNA sense strand
cgaaguggagcucaacagu

SEQ ID NO: 83902 - RNA, 19 nt, Homo sapiens
  misc_RNA (1)...(19): siRNA sense strand
ccacggacucucccuacau

SEQ ID NO: 83903 - RNA, 19 nt, Homo sapiens
  misc_RNA (1)...(19): siRNA sense strand
gcccaacuccgaggugguu

SEQ ID NO: 83904 - RNA, 19 nt, Homo sapiens
  misc_RNA (1)...(19): siRNA sense strand
ggacagaaauugaauauga

SEQ ID NO: 83905 - RNA, 19 nt, Homo sapiens
  misc_RNA (1)...(19): siRNA sense strand
ggacuaacgugaagaagua

SEQ ID NO: 83906 - RNA, 19 nt, Homo sapiens
  misc_RNA (1)...(19): siRNA sense strand
gaaccucucucaaauagaa

SEQ ID NO: 83907 - RNA, 19 nt, Homo sapiens
  misc_RNA (1)...(19): siRNA sense strand
caucagagguaguuuauuu

SEQ ID NO: 83908 - RNA, 19 nt, Homo sapiens
  misc_RNA (1)...(19): siRNA sense strand
ggacagacagugacgauua

SEQ ID NO: 83909 - RNA, 19 nt, Homo sapiens
  misc_RNA (1)...(19): siRNA sense strand
gaacaaauggagaaagaua

SEQ ID NO: 83910 - RNA, 19 nt, Homo sapiens
  misc_RNA (1)...(19): siRNA sense strand
ggagauacuuuagaagaua

SEQ ID NO: 83911 - RNA, 19 nt, Homo sapiens
  misc_RNA (1)...(19): siRNA sense strand
gagaacaaauggagaaaga

SEQ ID NO: 83912 - RNA, 19 nt, Homo sapiens
  misc_RNA (1)...(19): siRNA sense strand
gaagaaguaucgauaucaa

SEQ ID NO: 83913 - RNA, 19 nt, Homo sapiens
  misc_RNA (1)...(19): siRNA sense strand
ccaguacaaugacaauuua

SEQ ID NO: 83914 - RNA, 19 nt, Homo sapiens
  misc_RNA (1)...(19): siRNA sense strand
gaacaagaauuuggagaau

SEQ ID NO: 83915 - RNA, 19 nt, Homo sapiens
  misc_RNA (1)...(19): siRNA sense strand
ccaaggagauacuuuagaa

SEQ ID NO: 83916 - RNA, 19 nt, Homo sapiens
  misc_RNA (1)...(19): siRNA sense strand
caauuaagcuagaacaaga

SEQ ID NO: 83917 - RNA, 19 nt, Homo sapiens
  misc_RNA (1)...(19): siRNA sense strand
caauggcacuuuagaauau

SEQ ID NO: 83918 - RNA, 19 nt, Homo sapiens
  misc_RNA (1)...(19): siRNA sense strand
gacaacagcauuuauguaa

SEQ ID NO: 83919 - RNA, 19 nt, Homo sapiens
  misc_RNA (1)...(19): siRNA sense strand
ggagaaagauauccaagag

SEQ ID NO: 83920 - RNA, 19 nt, Homo sapiens
  misc_RNA (1)...(19): siRNA sense strand
gaaaagaaccucucucaaa

SEQ ID NO: 83921 - RNA, 19 nt, Homo sapiens
  misc_RNA (1)...(19): siRNA sense strand
ggcaaacacuguauacuug

SEQ ID NO: 83922 - RNA, 19 nt, Homo sapiens
  misc_RNA (1)...(19): siRNA sense strand
gguuuaggcuucaguauug

SEQ ID NO: 83923 - RNA, 19 nt, Homo sapiens
  misc_RNA (1)...(19): siRNA sense strand
ugaagacagugaaguuuaa

SEQ ID NO: 83924 - RNA, 19 nt, Homo sapiens
  misc_RNA (1)...(19): siRNA sense strand
ggagauagacuacuaaugg

SEQ ID NO: 83925 - RNA, 19 nt, Homo sapiens
  misc_RNA (1)...(19): siRNA sense strand
gaaaggaacgugcccgauu

SEQ ID NO: 83926 - RNA, 19 nt, Homo sapiens
  misc_RNA (1)...(19): siRNA sense strand
gacccuggcauauuuauua

SEQ ID NO: 83927 - RNA, 19 nt, Homo sapiens
  misc_RNA (1)...(19): siRNA sense strand
gaacgugcccgauugaaga

SEQ ID NO: 83928 - RNA, 19 nt, Homo sapiens
  misc_RNA (1)...(19): siRNA sense strand
gcaaguaggagauagacua

SEQ ID NO: 83929 - RNA, 19 nt, Homo sapiens
  misc_RNA (1)...(19): siRNA sense strand
gauggaagguugcaaguag

SEQ ID NO: 83930 - RNA, 19 nt, Homo sapiens
  misc_RNA (1)...(19): siRNA sense strand
gaaagaggcaaacacugua

SEQ ID NO: 83931 - RNA, 19 nt, Homo sapiens
  misc_RNA (1)...(19): siRNA sense strand
cgaagaggcaguagcaaua

SEQ ID NO: 83932 - RNA, 19 nt, Homo sapiens
  misc_RNA (1)...(19): siRNA sense strand
gagcacaaguuuauagaag

SEQ ID NO: 83933 - RNA, 19 nt, Homo sapiens
  misc_RNA (1)...(19): siRNA sense strand
gaacacaucagagguaguu

SEQ ID NO: 83934 - RNA, 19 nt, Homo sapiens
  misc_RNA (1)...(19): siRNA sense strand
ggccugggcuucaacauug

SEQ ID NO: 83935 - RNA, 19 nt, Homo sapiens
  misc_RNA (1)...(19): siRNA sense strand
gcccagaacucgugcaugu

SEQ ID NO: 83936 - RNA, 19 nt, Homo sapiens
  misc_RNA (1)...(19): siRNA sense strand
gaaccagugugcagucugu

SEQ ID NO: 83937 - RNA, 19 nt, Homo sapiens
  misc_RNA (1)...(19): siRNA sense strand
ggaaaccagugauccugaa

SEQ ID NO: 83938 - RNA, 19 nt, Homo sapiens
  misc_RNA (1)...(19): siRNA sense strand
gaaugagguugauguguca

SEQ ID NO: 83939 - RNA, 19 nt, Homo sapiens
  misc_RNA (1)...(19): siRNA sense strand
ggccugggauucaguauug

SEQ ID NO: 83940 - RNA, 19 nt, Homo sapiens
  misc_RNA (1)...(19): siRNA sense strand
aaaggaggguggaaagaaa

SEQ ID NO: 83941 - RNA, 19 nt, Homo sapiens
  misc_RNA (1)...(19): siRNA sense strand
gaagauggagaagguauuu

SEQ ID NO: 83942 - RNA, 19 nt, Homo sapiens
  misc_RNA (1)...(19): siRNA sense strand
aaugcaagcuuguuauuga

SEQ ID NO: 83943 - RNA, 19 nt, Homo sapiens
  misc_RNA (1)...(19): siRNA sense strand
cguagaagacgaccuauuu

SEQ ID NO: 83944 - RNA, 19 nt, Homo sapiens
  misc_RNA (1)...(19): siRNA sense strand
gacuaucacuuugucauuu

SEQ ID NO: 83945 - RNA, 19 nt, Homo sapiens
  misc_RNA (1)...(19): siRNA sense strand
gaagauuacgcucgauuug

SEQ ID NO: 83946 - RNA, 19 nt, Homo sapiens
  misc_RNA (1)...(19): siRNA sense strand
gauauguccugcagucuca

SEQ ID NO: 83947 - RNA, 19 nt, Homo sapiens
  misc_RNA (1)...(19): siRNA sense strand
ugaauaagcgucuaacaga

SEQ ID NO: 83948 - RNA, 19 nt, Homo sapiens
  misc_RNA (1)...(19): siRNA sense strand
uggcaacaauggcacuuua

SEQ ID NO: 83949 - RNA, 19 nt, Homo sapiens
  misc_RNA (1)...(19): siRNA sense strand
gauagacuacuaaugguaa

SEQ ID NO: 83950 - RNA, 19 nt, Homo sapiens
  misc_RNA (1)...(19): siRNA sense strand
caacagcauuuauguaacu

SEQ ID NO: 83951 - RNA, 19 nt, Homo sapiens
  misc_RNA (1)...(19): siRNA sense strand
ucaaaggcccuaaagguuu

SEQ ID NO: 83952 - RNA, 19 nt, Homo sapiens
  misc_RNA (1)...(19): siRNA sense strand
gaaaucaaacuguucaaag

SEQ ID NO: 83953 - RNA, 19 nt, Homo sapiens
  misc_RNA (1)...(19): siRNA sense strand
agaugacccuggcauauuu

SEQ ID NO: 83954 - RNA, 19 nt, Homo sapiens
  misc_RNA (1)...(19): siRNA sense strand
gaacaaacuaugugauaag

SEQ ID NO: 83955 - RNA, 19 nt, Homo sapiens
  misc_RNA (1)...(19): siRNA sense strand
gugaacaaacuaugugaua

SEQ ID NO: 83956 - RNA, 19 nt, Homo sapiens
  misc_RNA (1)...(19): siRNA sense strand
aaaggaacgugcccgauug

SEQ ID NO: 83957 - RNA, 19 nt, Homo sapiens
  misc_RNA (1)...(19): siRNA sense strand
ggagacaacagcauuuaug

SEQ ID NO: 83958 - RNA, 19 nt, Homo sapiens
  misc_RNA (1)...(19): siRNA sense strand
gcaagcuuguuauugaaga

SEQ ID NO: 83959 - RNA, 19 nt, Homo sapiens
  misc_RNA (1)...(19): siRNA sense strand
ugccaaaccuggagugauu

SEQ ID NO: 83960 - RNA, 19 nt, Homo sapiens
  misc_RNA (1)...(19): siRNA sense strand
gacagacagugacgauuau

SEQ ID NO: 83961 - RNA, 19 nt, Homo sapiens
  misc_RNA (1)...(19): siRNA sense strand
aaagaaccucucucaaaua

SEQ ID NO: 83962 - RNA, 19 nt, Homo sapiens
  misc_RNA (1)...(19): siRNA sense strand
uggcagagacuaucacuuu

SEQ ID NO: 83963 - RNA, 19 nt, Homo sapiens
  misc_RNA (1)...(19): siRNA sense strand
gagagcagaugaugaacca

SEQ ID NO: 83964 - RNA, 19 nt, Homo sapiens
  misc_RNA (1)...(19): siRNA sense strand
gggagguacucaccaauuc

SEQ ID NO: 83965 - RNA, 19 nt, Homo sapiens
  misc_RNA (1)...(19): siRNA sense strand
guccugcagucucauauuu

SEQ ID NO: 83966 - RNA, 19 nt, Homo sapiens
  misc_RNA (1)...(19): siRNA sense strand
gagaugacccuggcauauu

SEQ ID NO: 83967 - RNA, 19 nt, Homo sapiens
  misc_RNA (1)...(19): siRNA sense strand
ggccaguccugcuccuaua

SEQ ID NO: 83968 - RNA, 19 nt, Homo sapiens
  misc_RNA (1)...(19): siRNA sense strand
ucucauauuucuccucuga

SEQ ID NO: 83969 - RNA, 19 nt, Homo sapiens
  misc_RNA (1)...(19): siRNA sense strand
ggaaaucaaacuguucaaa

SEQ ID NO: 83970 - RNA, 19 nt, Homo sapiens
  misc_RNA (1)...(19): siRNA sense strand
gcccagcucuaucccauug

SEQ ID NO: 83971 - RNA, 19 nt, Homo sapiens
  misc_RNA (1)...(19): siRNA sense strand
uuacaaggcaggaaauaaa

SEQ ID NO: 83972 - RNA, 19 nt, Homo sapiens
  misc_RNA (1)...(19): siRNA sense strand
ucagagccauguucgacua

SEQ ID NO: 83973 - RNA, 19 nt, Homo sapiens
  misc_RNA (1)...(19): siRNA sense strand
ugacgauuauagcacaaua

SEQ ID NO: 83974 - RNA, 19 nt, Homo sapiens
  misc_RNA (1)...(19): siRNA sense strand
caacaauggcacuuuagaa

SEQ ID NO: 83975 - RNA, 19 nt, Homo sapiens
  misc_RNA (1)...(19): siRNA sense strand
aagaaccucucucaaauag

SEQ ID NO: 83976 - RNA, 19 nt, Homo sapiens
  misc_RNA (1)...(19): siRNA sense strand
aaagaacacaucagaggua

SEQ ID NO: 83977 - RNA, 19 nt, Homo sapiens
  misc_RNA (1)...(19): siRNA sense strand
gcaguagcaauauuaaaga

SEQ ID NO: 83978 - RNA, 19 nt, Homo sapiens
  misc_RNA (1)...(19): siRNA sense strand
gagauagacuacuaauggu

SEQ ID NO: 83979 - RNA, 19 nt, Homo sapiens
  misc_RNA (1)...(19): siRNA sense strand
ucagagguuucccacagua

SEQ ID NO: 83980 - RNA, 19 nt, Homo sapiens
  misc_RNA (1)...(19): siRNA sense strand
gaagaggcaguagcaauau

SEQ ID NO: 83981 - RNA, 19 nt, Homo sapiens
  misc_RNA (1)...(19): siRNA sense strand
ccauugccaucuucauaaa

SEQ ID NO: 83982 - RNA, 19 nt, Homo sapiens
  misc_RNA (1)...(19): siRNA sense strand
gcaaacacuguauacuuga

SEQ ID NO: 83983 - RNA, 19 nt, Homo sapiens
  misc_RNA (1)...(19): siRNA sense strand
gccaguacaaugacaauuu

SEQ ID NO: 83984 - RNA, 19 nt, Homo sapiens
  misc_RNA (1)...(19): siRNA sense strand
gcaagguaguccugcacaa

SEQ ID NO: 83985 - RNA, 19 nt, Homo sapiens
  misc_RNA (1)...(19): siRNA sense strand
acaauggcacuuuagaaua

SEQ ID NO: 83986 - RNA, 19 nt, Homo sapiens
  misc_RNA (1)...(19): siRNA sense strand
ggagaugacccuggcauau

SEQ ID NO: 83987 - RNA, 19 nt, Homo sapiens
  misc_RNA (1)...(19): siRNA sense strand
cacaauuccuuaugucaau

SEQ ID NO: 83988 - RNA, 19 nt, Homo sapiens
  misc_RNA (1)...(19): siRNA sense strand
acagugggcugccaaguca

SEQ ID NO: 83989 - RNA, 19 nt, Homo sapiens
  misc_RNA (1)...(19): siRNA sense strand
cgacuaacccacgaaguaa

SEQ ID NO: 83990 - RNA, 19 nt, Homo sapiens
  misc_RNA (1)...(19): siRNA sense strand
gugaagaaguaucgauauc

SEQ ID NO: 83991 - RNA, 19 nt, Homo sapiens
  misc_RNA (1)...(19): siRNA sense strand
uagaaaauguccauggaua

SEQ ID NO: 83992 - RNA, 19 nt, Homo sapiens
  misc_RNA (1)...(19): siRNA sense strand
ggagaugaauaagcgucua

SEQ ID NO: 83993 - RNA, 19 nt, Homo sapiens
  misc_RNA (1)...(19): siRNA sense strand
ugaggacgcuccacaugau

SEQ ID NO: 83994 - RNA, 19 nt, Homo sapiens
  misc_RNA (1)...(19): siRNA sense strand
aaaagaaccucucucaaau

SEQ ID NO: 83995 - RNA, 19 nt, Homo sapiens
  misc_RNA (1)...(19): siRNA sense strand
gcaacaauggcacuuuaga

SEQ ID NO: 83996 - RNA, 19 nt, Homo sapiens
  misc_RNA (1)...(19): siRNA sense strand
acacaucagagguaguuua

SEQ ID NO: 83997 - RNA, 19 nt, Homo sapiens
  misc_RNA (1)...(19): siRNA sense strand
caagagcacaaguuuauag

SEQ ID NO: 83998 - RNA, 19 nt, Homo sapiens
  misc_RNA (1)...(19): siRNA sense strand
ccagggagguacucaccaa

SEQ ID NO: 83999 - RNA, 19 nt, Homo sapiens
  misc_RNA (1)...(19): siRNA sense strand
gauugaagacagugaaguu

SEQ ID NO: 84000 - RNA, 19 nt, Homo sapiens
  misc_RNA (1)...(19): siRNA sense strand
ggcagagacuaucacuuug

SEQ ID NO: 84001 - RNA, 19 nt, Homo sapiens
  misc_RNA (1)...(19): siRNA sense strand
gcaauuaagcuagaacaag

SEQ ID NO: 84002 - RNA, 19 nt, Homo sapiens
  misc_RNA (1)...(19): siRNA sense strand
gagaugaauaagcgucuaa

SEQ ID NO: 84003 - RNA, 19 nt, Homo sapiens
  misc_RNA (1)...(19): siRNA sense strand
gcagaaagaggcaaacacu

SEQ ID NO: 84004 - RNA, 19 nt, Homo sapiens
  misc_RNA (1)...(19): siRNA sense strand
ggaccucgcugccaagaaa

SEQ ID NO: 84005 - RNA, 19 nt, Homo sapiens
  misc_RNA (1)...(19): siRNA sense strand
caaggugacugaagugaaa

SEQ ID NO: 84006 - RNA, 19 nt, Homo sapiens
  misc_RNA (1)...(19): siRNA sense strand
gaagagaaguuaggaagca

SEQ ID NO: 84007 - RNA, 19 nt, Homo sapiens
  misc_RNA (1)...(19): siRNA sense strand
gaagaacagagaagaguuu

SEQ ID NO: 84008 - RNA, 19 nt, Homo sapiens
  misc_RNA (1)...(19): siRNA sense strand
ggauacaccuucaacaauc

SEQ ID NO: 84009 - RNA, 19 nt, Homo sapiens
  misc_RNA (1)...(19): siRNA sense strand
ggaguuggauuuccugcuu

SEQ ID NO: 84010 - RNA, 19 nt, Homo sapiens
  misc_RNA (1)...(19): siRNA sense strand
aaaggucacuggguuauuu

SEQ ID NO: 84011 - RNA, 19 nt, Homo sapiens
  misc_RNA (1)...(19): siRNA sense strand
caagguacuuucaucaaug

SEQ ID NO: 84012 - RNA, 19 nt, Homo sapiens
  misc_RNA (1)...(19): siRNA sense strand
gcauaaccuucucugugua

SEQ ID NO: 84013 - RNA, 19 nt, Homo sapiens
  misc_RNA (1)...(19): siRNA sense strand
ggacuacaaugguuaucau

SEQ ID NO: 84014 - RNA, 19 nt, Homo sapiens
  misc_RNA (1)...(19): siRNA sense strand
caaagcagcagaauggauu

SEQ ID NO: 84015 - RNA, 19 nt, Homo sapiens
  misc_RNA (1)...(19): siRNA sense strand
gaguguggccggaugaaua

SEQ ID NO: 84016 - RNA, 19 nt, Homo sapiens
  misc_RNA (1)...(19): siRNA sense strand
caagauccauccaauguac

SEQ ID NO: 84017 - RNA, 19 nt, Homo sapiens
  misc_RNA (1)...(19): siRNA sense strand
cagcucaccuuucagauuc

SEQ ID NO: 84018 - RNA, 19 nt, Homo sapiens
  misc_RNA (1)...(19): siRNA sense strand
ucacaaagcagcagaaugg

SEQ ID NO: 84019 - RNA, 19 nt, Homo sapiens
  misc_RNA (1)...(19): siRNA sense strand
gcaagauccauccaaugua

SEQ ID NO: 84020 - RNA, 19 nt, Homo sapiens
  misc_RNA (1)...(19): siRNA sense strand
gaaguuaggaagcaaauac

SEQ ID NO: 84021 - RNA, 19 nt, Homo sapiens
  misc_RNA (1)...(19): siRNA sense strand
ugaaggauguagaaaguca

SEQ ID NO: 84022 - RNA, 19 nt, Homo sapiens
  misc_RNA (1)...(19): siRNA sense strand
gggaagagcccuagauuuu

SEQ ID NO: 84023 - RNA, 19 nt, Homo sapiens
  misc_RNA (1)...(19): siRNA sense strand
ucaagguacuuucaucaau

SEQ ID NO: 84024 - RNA, 19 nt, Homo sapiens
  misc_RNA (1)...(19): siRNA sense strand
gauuugcgcuaccuguuug

SEQ ID NO: 84025 - RNA, 19 nt, Homo sapiens
  misc_RNA (1)...(19): siRNA sense strand
ugaauguccucuacaacuu

SEQ ID NO: 84026 - RNA, 19 nt, Homo sapiens
  misc_RNA (1)...(19): siRNA sense strand
gcagaaagacgaaaauuug

SEQ ID NO: 84027 - RNA, 19 nt, Homo sapiens
  misc_RNA (1)...(19): siRNA sense strand
gauacaccuucaacaauca

SEQ ID NO: 84028 - RNA, 19 nt, Homo sapiens
  misc_RNA (1)...(19): siRNA sense strand
ucacugcucuacuucauca

SEQ ID NO: 84029 - RNA, 19 nt, Homo sapiens
  misc_RNA (1)...(19): siRNA sense strand
ugaauauccucaccagaga

SEQ ID NO: 84030 - RNA, 19 nt, Homo sapiens
  misc_RNA (1)...(19): siRNA sense strand
gaggccauaucacagauga

SEQ ID NO: 84031 - RNA, 19 nt, Homo sapiens
  misc_RNA (1)...(19): siRNA sense strand
aggcaaagcugaaggaucu

SEQ ID NO: 84032 - RNA, 19 nt, Homo sapiens
  misc_RNA (1)...(19): siRNA sense strand
ggucaaggcacuucuggaa

SEQ ID NO: 84033 - RNA, 19 nt, Homo sapiens
  misc_RNA (1)...(19): siRNA sense strand
acaaggcccuggacaacuu

SEQ ID NO: 84034 - RNA, 19 nt, Homo sapiens
  misc_RNA (1)...(19): siRNA sense strand
cuacauccauggccucuuc

SEQ ID NO: 84035 - RNA, 19 nt, Homo sapiens
  misc_RNA (1)...(19): siRNA sense strand
gaacagagaagaguuuagg

SEQ ID NO: 84036 - RNA, 19 nt, Homo sapiens
  misc_RNA (1)...(19): siRNA sense strand
guccgaauguccugagaaa

SEQ ID NO: 84037 - RNA, 19 nt, Homo sapiens
  misc_RNA (1)...(19): siRNA sense strand
uguagaaagucaaggaaga

SEQ ID NO: 84038 - RNA, 19 nt, Homo sapiens
  misc_RNA (1)...(19): siRNA sense strand
ccacggcucgcaagaauga

SEQ ID NO: 84039 - RNA, 19 nt, Homo sapiens
  misc_RNA (1)...(19): siRNA sense strand
caacauggacuacaauggu

SEQ ID NO: 84040 - RNA, 19 nt, Homo sapiens
  misc_RNA (1)...(19): siRNA sense strand
aaacuuggauacaccuuca

SEQ ID NO: 84041 - RNA, 19 nt, Homo sapiens
  misc_RNA (1)...(19): siRNA sense strand
gggccucacugcucuacuu

SEQ ID NO: 84042 - RNA, 19 nt, Homo sapiens
  misc_RNA (1)...(19): siRNA sense strand
aaacagugcugguggaaaa

SEQ ID NO: 84043 - RNA, 19 nt, Homo sapiens
  misc_RNA (1)...(19): siRNA sense strand
gugauaagcugaccuaccu

SEQ ID NO: 84044 - RNA, 19 nt, Homo sapiens
  misc_RNA (1)...(19): siRNA sense strand
ucagcacccuggagaagaa

SEQ ID NO: 84045 - RNA, 19 nt, Homo sapiens
  misc_RNA (1)...(19): siRNA sense strand
gaaccgagaagucaaugca

SEQ ID NO: 84046 - RNA, 19 nt, Homo sapiens
  misc_RNA (1)...(19): siRNA sense strand
ccgaauguccugagaaaga

SEQ ID NO: 84047 - RNA, 19 nt, Homo sapiens
  misc_RNA (1)...(19): siRNA sense strand
ggaagaauucucuaaucug

SEQ ID NO: 84048 - RNA, 19 nt, Homo sapiens
  misc_RNA (1)...(19): siRNA sense strand
caaccuaauagacagcaua

SEQ ID NO: 84049 - RNA, 19 nt, Homo sapiens
  misc_RNA (1)...(19): siRNA sense strand
ugacgaagaagaacagaga

SEQ ID NO: 84050 - RNA, 19 nt, Homo sapiens
  misc_RNA (1)...(19): siRNA sense strand
gagaacagccacccagagu

SEQ ID NO: 84051 - RNA, 19 nt, Homo sapiens
  misc_RNA (1)...(19): siRNA sense strand
caaccucauuugaagaauc

SEQ ID NO: 84052 - RNA, 19 nt, Homo sapiens
  misc_RNA (1)...(19): siRNA sense strand
uaaucuggaucgggacaua

SEQ ID NO: 84053 - RNA, 19 nt, Homo sapiens
  misc_RNA (1)...(19): siRNA sense strand
ucagcaagauccauccaau

SEQ ID NO: 84054 - RNA, 19 nt, Homo sapiens
  misc_RNA (1)...(19): siRNA sense strand
gaagaagaacagagaagag

SEQ ID NO: 84055 - RNA, 19 nt, Homo sapiens
  misc_RNA (1)...(19): siRNA sense strand
cuucaacaaucagaacuuu

SEQ ID NO: 84056 - RNA, 19 nt, Homo sapiens
  misc_RNA (1)...(19): siRNA sense strand
agaauucucuaaucuggau

SEQ ID NO: 84057 - RNA, 19 nt, Homo sapiens
  misc_RNA (1)...(19): siRNA sense strand
uggaagaauucucuaaucu

SEQ ID NO: 84058 - RNA, 19 nt, Homo sapiens
  misc_RNA (1)...(19): siRNA sense strand
ucaaugcaguggaguugga

SEQ ID NO: 84059 - RNA, 19 nt, Homo sapiens
  misc_RNA (1)...(19): siRNA sense strand
gagggcugcuccugacgaa

SEQ ID NO: 84060 - RNA, 19 nt, Homo sapiens
  misc_RNA (1)...(19): siRNA sense strand
ugaacgaccucagcaagau

SEQ ID NO: 84061 - RNA, 19 nt, Homo sapiens
  misc_RNA (1)...(19): siRNA sense strand
gaaggagaacugucuuugg

SEQ ID NO: 84062 - RNA, 19 nt, Homo sapiens
  misc_RNA (1)...(19): siRNA sense strand
caacuucacucaggacacu

SEQ ID NO: 84063 - RNA, 19 nt, Homo sapiens
  misc_RNA (1)...(19): siRNA sense strand
gaaaggucacuggguuauu

SEQ ID NO: 84064 - RNA, 19 nt, Homo sapiens
  misc_RNA (1)...(19): siRNA sense strand
gaacuuccugggagaaaca

SEQ ID NO: 84065 - RNA, 19 nt, Homo sapiens
  misc_RNA (1)...(19): siRNA sense strand
agauggcccugcaauguga

SEQ ID NO: 84066 - RNA, 19 nt, Homo sapiens
  misc_RNA (1)...(19): siRNA sense strand
agaaugcccuguacuucga

SEQ ID NO: 84067 - RNA, 19 nt, Homo sapiens
  misc_RNA (1)...(19): siRNA sense strand
auggagaacuuacagaaug

SEQ ID NO: 84068 - RNA, 19 nt, Homo sapiens
  misc_RNA (1)...(19): siRNA sense strand
acagaugacugggacagaa

SEQ ID NO: 84069 - RNA, 19 nt, Homo sapiens
  misc_RNA (1)...(19): siRNA sense strand
ggaccagccacuccuaugu

SEQ ID NO: 84070 - RNA, 19 nt, Homo sapiens
  misc_RNA (1)...(19): siRNA sense strand
caauggaagaauucucuaa

SEQ ID NO: 84071 - RNA, 19 nt, Homo sapiens
  misc_RNA (1)...(19): siRNA sense strand
guagaaagucaaggaagaa

SEQ ID NO: 84072 - RNA, 19 nt, Homo sapiens
  misc_RNA (1)...(19): siRNA sense strand
ccagauggcccugcaaugu

SEQ ID NO: 84073 - RNA, 19 nt, Homo sapiens
  misc_RNA (1)...(19): siRNA sense strand
guccacggcucgcaagaau

SEQ ID NO: 84074 - RNA, 19 nt, Homo sapiens
  misc_RNA (1)...(19): siRNA sense strand
guuccugacugccaucaug

SEQ ID NO: 84075 - RNA, 19 nt, Homo sapiens
  misc_RNA (1)...(19): siRNA sense strand
gggauggaaucgcucauac

SEQ ID NO: 84076 - RNA, 19 nt, Homo sapiens
  misc_RNA (1)...(19): siRNA sense strand
gcacaaggcccuggacaac

SEQ ID NO: 84077 - RNA, 19 nt, Homo sapiens
  misc_RNA (1)...(19): siRNA sense strand
guggggagcugucaaggua

SEQ ID NO: 84078 - RNA, 19 nt, Homo sapiens
  misc_RNA (1)...(19): siRNA sense strand
acacaggcugggaucauua

SEQ ID NO: 84079 - RNA, 19 nt, Homo sapiens
  misc_RNA (1)...(19): siRNA sense strand
ggacgggugacuuuacaau

SEQ ID NO: 84080 - RNA, 19 nt, Homo sapiens
  misc_RNA (1)...(19): siRNA sense strand
uuggagagaucauguaugg

SEQ ID NO: 84081 - RNA, 19 nt, Homo sapiens
  misc_RNA (1)...(19): siRNA sense strand
agacggaguuuaagagcau

SEQ ID NO: 84082 - RNA, 19 nt, Homo sapiens
  misc_RNA (1)...(19): siRNA sense strand
ucaacaaucagaacuuuca

SEQ ID NO: 84083 - RNA, 19 nt, Homo sapiens
  misc_RNA (1)...(19): siRNA sense strand
ggauguagaaagucaagga

SEQ ID NO: 84084 - RNA, 19 nt, Homo sapiens
  misc_RNA (1)...(19): siRNA sense strand
caggcaacauggacuacaa

SEQ ID NO: 84085 - RNA, 19 nt, Homo sapiens
  misc_RNA (1)...(19): siRNA sense strand
gcaaagguccccuaugaug

SEQ ID NO: 84086 - RNA, 19 nt, Homo sapiens
  misc_RNA (1)...(19): siRNA sense strand
gaagaaaacuuggauacac

SEQ ID NO: 84087 - RNA, 19 nt, Homo sapiens
  misc_RNA (1)...(19): siRNA sense strand
auagagggaucugcuaaga

SEQ ID NO: 84088 - RNA, 19 nt, Homo sapiens
  misc_RNA (1)...(19): siRNA sense strand
cgaagaagaacagagaaga

SEQ ID NO: 84089 - RNA, 19 nt, Homo sapiens
  misc_RNA (1)...(19): siRNA sense strand
caacagaaucaaggagcua

SEQ ID NO: 84090 - RNA, 19 nt, Homo sapiens
  misc_RNA (1)...(19): siRNA sense strand
cagaacugauggccaaagu

SEQ ID NO: 84091 - RNA, 19 nt, Homo sapiens
  misc_RNA (1)...(19): siRNA sense strand
gaaacagugcugguggaaa

SEQ ID NO: 84092 - RNA, 19 nt, Homo sapiens
  misc_RNA (1)...(19): siRNA sense strand
agcauaaccuucucugugu

SEQ ID NO: 84093 - RNA, 19 nt, Homo sapiens
  misc_RNA (1)...(19): siRNA sense strand
ggccauuccugcagauaag

SEQ ID NO: 84094 - RNA, 19 nt, Homo sapiens
  misc_RNA (1)...(19): siRNA sense strand
ccagaccuccucaacagaa

SEQ ID NO: 84095 - RNA, 19 nt, Homo sapiens
  misc_RNA (1)...(19): siRNA sense strand
gaauguccucuacaacuuc

SEQ ID NO: 84096 - RNA, 19 nt, Homo sapiens
  misc_RNA (1)...(19): siRNA sense strand
acugaaggauguagaaagu

SEQ ID NO: 84097 - RNA, 19 nt, Homo sapiens
  misc_RNA (1)...(19): siRNA sense strand
gaccagccacuccuauguu

SEQ ID NO: 84098 - RNA, 19 nt, Homo sapiens
  misc_RNA (1)...(19): siRNA sense strand
ccagcucaccuuucagauu

SEQ ID NO: 84099 - RNA, 19 nt, Homo sapiens
  misc_RNA (1)...(19): siRNA sense strand
gcgggugacagacgaguuu

SEQ ID NO: 84100 - RNA, 19 nt, Homo sapiens
  misc_RNA (1)...(19): siRNA sense strand
ccuugcuucuccagauuua

SEQ ID NO: 84101 - RNA, 19 nt, Homo sapiens
  misc_RNA (1)...(19): siRNA sense strand
gcaaagcugaaggaucuga

SEQ ID NO: 84102 - RNA, 19 nt, Homo sapiens
  misc_RNA (1)...(19): siRNA sense strand
aggcugggaucauuacaga

SEQ ID NO: 84103 - RNA, 19 nt, Homo sapiens
  misc_RNA (1)...(19): siRNA sense strand
cacacaggcugggaucauu

SEQ ID NO: 84104 - RNA, 19 nt, Homo sapiens
  misc_RNA (1)...(19): siRNA sense strand
ggaccucgcugccaagaaa

SEQ ID NO: 84105 - RNA, 19 nt, Homo sapiens
  misc_RNA (1)...(19): siRNA sense strand
gaagagaaguuaggaagca

SEQ ID NO: 84106 - RNA, 19 nt, Homo sapiens
  misc_RNA (1)...(19): siRNA sense strand
gaagaacagagaagaguuu

SEQ ID NO: 84107 - RNA, 19 nt, Homo sapiens
  misc_RNA (1)...(19): siRNA sense strand
ggauacaccuucaacaauc

SEQ ID NO: 84108 - RNA, 19 nt, Homo sapiens
  misc_RNA (1)...(19): siRNA sense strand
ggaguuggauuuccugcuu

SEQ ID NO: 84109 - RNA, 19 nt, Homo sapiens
  misc_RNA (1)...(19): siRNA sense strand
aaaggucacuggguuauuu

SEQ ID NO: 84110 - RNA, 19 nt, Homo sapiens
  misc_RNA (1)...(19): siRNA sense strand
caagguacuuucaucaaug

SEQ ID NO: 84111 - RNA, 19 nt, Homo sapiens
  misc_RNA (1)...(19): siRNA sense strand
gcauaaccuucucugugua

SEQ ID NO: 84112 - RNA, 19 nt, Homo sapiens
  misc_RNA (1)...(19): siRNA sense strand
ggacuacaaugguuaucau

SEQ ID NO: 84113 - RNA, 19 nt, Homo sapiens
  misc_RNA (1)...(19): siRNA sense strand
gaguguggccggaugaaua

SEQ ID NO: 84114 - RNA, 19 nt, Homo sapiens
  misc_RNA (1)...(19): siRNA sense strand
cagcucaccuuucagauuc

SEQ ID NO: 84115 - RNA, 19 nt, Homo sapiens
  misc_RNA (1)...(19): siRNA sense strand
caagauccauccaauguac

SEQ ID NO: 84116 - RNA, 19 nt, Homo sapiens
  misc_RNA (1)...(19): siRNA sense strand
gcaagauccauccaaugua

SEQ ID NO: 84117 - RNA, 19 nt, Homo sapiens
  misc_RNA (1)...(19): siRNA sense strand
gaaguuaggaagcaaauac

SEQ ID NO: 84118 - RNA, 19 nt, Homo sapiens
  misc_RNA (1)...(19): siRNA sense strand
ugaaggauguagaaaguca

SEQ ID NO: 84119 - RNA, 19 nt, Homo sapiens
  misc_RNA (1)...(19): siRNA sense strand
gggaagagcccuagauuuu

SEQ ID NO: 84120 - RNA, 19 nt, Homo sapiens
  misc_RNA (1)...(19): siRNA sense strand
ucaagguacuuucaucaau

SEQ ID NO: 84121 - RNA, 19 nt, Homo sapiens
  misc_RNA (1)...(19): siRNA sense strand
gauuugcgcuaccuguuug

SEQ ID NO: 84122 - RNA, 19 nt, Homo sapiens
  misc_RNA (1)...(19): siRNA sense strand
ugaauguccucuacaacuu

SEQ ID NO: 84123 - RNA, 19 nt, Homo sapiens
  misc_RNA (1)...(19): siRNA sense strand
gcagaaagacgaaaauuug

SEQ ID NO: 84124 - RNA, 19 nt, Homo sapiens
  misc_RNA (1)...(19): siRNA sense strand
gauacaccuucaacaauca

SEQ ID NO: 84125 - RNA, 19 nt, Homo sapiens
  misc_RNA (1)...(19): siRNA sense strand
ugaauauccucaccagaga

SEQ ID NO: 84126 - RNA, 19 nt, Homo sapiens
  misc_RNA (1)...(19): siRNA sense strand
gaggccauaucacagauga

SEQ ID NO: 84127 - RNA, 19 nt, Homo sapiens
  misc_RNA (1)...(19): siRNA sense strand
aggcaaagcugaaggaucu

SEQ ID NO: 84128 - RNA, 19 nt, Homo sapiens
  misc_RNA (1)...(19): siRNA sense strand
ggucaaggcacuucuggaa

SEQ ID NO: 84129 - RNA, 19 nt, Homo sapiens
  misc_RNA (1)...(19): siRNA sense strand
acaaggcccuggacaacuu

SEQ ID NO: 84130 - RNA, 19 nt, Homo sapiens
  misc_RNA (1)...(19): siRNA sense strand
cuacauccauggccucuuc

SEQ ID NO: 84131 - RNA, 19 nt, Homo sapiens
  misc_RNA (1)...(19): siRNA sense strand
gaacagagaagaguuuagg

SEQ ID NO: 84132 - RNA, 19 nt, Homo sapiens
  misc_RNA (1)...(19): siRNA sense strand
guccgaauguccugagaaa

SEQ ID NO: 84133 - RNA, 19 nt, Homo sapiens
  misc_RNA (1)...(19): siRNA sense strand
uguagaaagucaaggaaga

SEQ ID NO: 84134 - RNA, 19 nt, Homo sapiens
  misc_RNA (1)...(19): siRNA sense strand
ccacggcucgcaagaauga

SEQ ID NO: 84135 - RNA, 19 nt, Homo sapiens
  misc_RNA (1)...(19): siRNA sense strand
caacauggacuacaauggu

SEQ ID NO: 84136 - RNA, 19 nt, Homo sapiens
  misc_RNA (1)...(19): siRNA sense strand
aaacuuggauacaccuuca

SEQ ID NO: 84137 - RNA, 19 nt, Homo sapiens
  misc_RNA (1)...(19): siRNA sense strand
gugauaagcugaccuaccu

SEQ ID NO: 84138 - RNA, 19 nt, Homo sapiens
  misc_RNA (1)...(19): siRNA sense strand
ucagcacccuggagaagaa

SEQ ID NO: 84139 - RNA, 19 nt, Homo sapiens
  misc_RNA (1)...(19): siRNA sense strand
gaaccgagaagucaaugca

SEQ ID NO: 84140 - RNA, 19 nt, Homo sapiens
  misc_RNA (1)...(19): siRNA sense strand
ccgaauguccugagaaaga

SEQ ID NO: 84141 - RNA, 19 nt, Homo sapiens
  misc_RNA (1)...(19): siRNA sense strand
ggaagaauucucuaaucug

SEQ ID NO: 84142 - RNA, 19 nt, Homo sapiens
  misc_RNA (1)...(19): siRNA sense strand
caaccuaauagacagcaua

SEQ ID NO: 84143 - RNA, 19 nt, Homo sapiens
  misc_RNA (1)...(19): siRNA sense strand
ugacgaagaagaacagaga

SEQ ID NO: 84144 - RNA, 19 nt, Homo sapiens
  misc_RNA (1)...(19): siRNA sense strand
gagaacagccacccagagu

SEQ ID NO: 84145 - RNA, 19 nt, Homo sapiens
  misc_RNA (1)...(19): siRNA sense strand
caaccucauuugaagaauc

SEQ ID NO: 84146 - RNA, 19 nt, Homo sapiens
  misc_RNA (1)...(19): siRNA sense strand
uaaucuggaucgggacaua

SEQ ID NO: 84147 - RNA, 19 nt, Homo sapiens
  misc_RNA (1)...(19): siRNA sense strand
ucaaugcaguggaguugga

SEQ ID NO: 84148 - RNA, 19 nt, Homo sapiens
  misc_RNA (1)...(19): siRNA sense strand
gaagaagaacagagaagag

SEQ ID NO: 84149 - RNA, 19 nt, Homo sapiens
  misc_RNA (1)...(19): siRNA sense strand
gagggcugcuccugacgaa

SEQ ID NO: 84150 - RNA, 19 nt, Homo sapiens
  misc_RNA (1)...(19): siRNA sense strand
cuucaacaaucagaacuuu

SEQ ID NO: 84151 - RNA, 19 nt, Homo sapiens
  misc_RNA (1)...(19): siRNA sense strand
agaauucucuaaucuggau

SEQ ID NO: 84152 - RNA, 19 nt, Homo sapiens
  misc_RNA (1)...(19): siRNA sense strand
uggaagaauucucuaaucu

SEQ ID NO: 84153 - RNA, 19 nt, Homo sapiens
  misc_RNA (1)...(19): siRNA sense strand
ucagcaagauccauccaau

SEQ ID NO: 84154 - RNA, 19 nt, Homo sapiens
  misc_RNA (1)...(19): siRNA sense strand
gaaaggucacuggguuauu

SEQ ID NO: 84155 - RNA, 19 nt, Homo sapiens
  misc_RNA (1)...(19): siRNA sense strand
gaaggagaacugucuuugg

SEQ ID NO: 84156 - RNA, 19 nt, Homo sapiens
  misc_RNA (1)...(19): siRNA sense strand
caacuucacucaggacacu

SEQ ID NO: 84157 - RNA, 19 nt, Homo sapiens
  misc_RNA (1)...(19): siRNA sense strand
caauggaagaauucucuaa

SEQ ID NO: 84158 - RNA, 19 nt, Homo sapiens
  misc_RNA (1)...(19): siRNA sense strand
agauggcccugcaauguga

SEQ ID NO: 84159 - RNA, 19 nt, Homo sapiens
  misc_RNA (1)...(19): siRNA sense strand
agaaugcccuguacuucga

SEQ ID NO: 84160 - RNA, 19 nt, Homo sapiens
  misc_RNA (1)...(19): siRNA sense strand
auggagaacuuacagaaug

SEQ ID NO: 84161 - RNA, 19 nt, Homo sapiens
  misc_RNA (1)...(19): siRNA sense strand
acagaugacugggacagaa

SEQ ID NO: 84162 - RNA, 19 nt, Homo sapiens
  misc_RNA (1)...(19): siRNA sense strand
ggaccagccacuccuaugu

SEQ ID NO: 84163 - RNA, 19 nt, Homo sapiens
  misc_RNA (1)...(19): siRNA sense strand
guagaaagucaaggaagaa

SEQ ID NO: 84164 - RNA, 19 nt, Homo sapiens
  misc_RNA (1)...(19): siRNA sense strand
ccagauggcccugcaaugu

SEQ ID NO: 84165 - RNA, 19 nt, Homo sapiens
  misc_RNA (1)...(19): siRNA sense strand
guccacggcucgcaagaau

SEQ ID NO: 84166 - RNA, 19 nt, Homo sapiens
  misc_RNA (1)...(19): siRNA sense strand
guuccugacugccaucaug

SEQ ID NO: 84167 - RNA, 19 nt, Homo sapiens
  misc_RNA (1)...(19): siRNA sense strand
gggauggaaucgcucauac

SEQ ID NO: 84168 - RNA, 19 nt, Homo sapiens
  misc_RNA (1)...(19): siRNA sense strand
gcacaaggcccuggacaac

SEQ ID NO: 84169 - RNA, 19 nt, Homo sapiens
  misc_RNA (1)...(19): siRNA sense strand
guggggagcugucaaggua

SEQ ID NO: 84170 - RNA, 19 nt, Homo sapiens
  misc_RNA (1)...(19): siRNA sense strand
acacaggcugggaucauua

SEQ ID NO: 84171 - RNA, 19 nt, Homo sapiens
  misc_RNA (1)...(19): siRNA sense strand
ggacgggugacuuuacaau

SEQ ID NO: 84172 - RNA, 19 nt, Homo sapiens
  misc_RNA (1)...(19): siRNA sense strand
uuggagagaucauguaugg

SEQ ID NO: 84173 - RNA, 19 nt, Homo sapiens
  misc_RNA (1)...(19): siRNA sense strand
agacggaguuuaagagcau

SEQ ID NO: 84174 - RNA, 19 nt, Homo sapiens
  misc_RNA (1)...(19): siRNA sense strand
ucaacaaucagaacuuuca

SEQ ID NO: 84175 - RNA, 19 nt, Homo sapiens
  misc_RNA (1)...(19): siRNA sense strand
ggauguagaaagucaagga

SEQ ID NO: 84176 - RNA, 19 nt, Homo sapiens
  misc_RNA (1)...(19): siRNA sense strand
caggcaacauggacuacaa

SEQ ID NO: 84177 - RNA, 19 nt, Homo sapiens
  misc_RNA (1)...(19): siRNA sense strand
gcaaagguccccuaugaug

SEQ ID NO: 84178 - RNA, 19 nt, Homo sapiens
  misc_RNA (1)...(19): siRNA sense strand
gaagaaaacuuggauacac

SEQ ID NO: 84179 - RNA, 19 nt, Homo sapiens
  misc_RNA (1)...(19): siRNA sense strand
auagagggaucugcuaaga

SEQ ID NO: 84180 - RNA, 19 nt, Homo sapiens
  misc_RNA (1)...(19): siRNA sense strand
cgaagaagaacagagaaga

SEQ ID NO: 84181 - RNA, 19 nt, Homo sapiens
  misc_RNA (1)...(19): siRNA sense strand
caacagaaucaaggagcua

SEQ ID NO: 84182 - RNA, 19 nt, Homo sapiens
  misc_RNA (1)...(19): siRNA sense strand
cagaacugauggccaaagu

SEQ ID NO: 84183 - RNA, 19 nt, Homo sapiens
  misc_RNA (1)...(19): siRNA sense strand
gaccagccacuccuauguu

SEQ ID NO: 84184 - RNA, 19 nt, Homo sapiens
  misc_RNA (1)...(19): siRNA sense strand
ggccauuccugcagauaag

SEQ ID NO: 84185 - RNA, 19 nt, Homo sapiens
  misc_RNA (1)...(19): siRNA sense strand
ccagaccuccucaacagaa

SEQ ID NO: 84186 - RNA, 19 nt, Homo sapiens
  misc_RNA (1)...(19): siRNA sense strand
agcauaaccuucucugugu

SEQ ID NO: 84187 - RNA, 19 nt, Homo sapiens
  misc_RNA (1)...(19): siRNA sense strand
ccagcucaccuuucagauu

SEQ ID NO: 84188 - RNA, 19 nt, Homo sapiens
  misc_RNA (1)...(19): siRNA sense strand
gaauguccucuacaacuuc

SEQ ID NO: 84189 - RNA, 19 nt, Homo sapiens
  misc_RNA (1)...(19): siRNA sense strand
acugaaggauguagaaagu

SEQ ID NO: 84190 - RNA, 19 nt, Homo sapiens
  misc_RNA (1)...(19): siRNA sense strand
gaccuaugcuuugcgagau

SEQ ID NO: 84191 - RNA, 19 nt, Homo sapiens
  misc_RNA (1)...(19): siRNA sense strand
ccuugcuucuccagauuua

SEQ ID NO: 84192 - RNA, 19 nt, Homo sapiens
  misc_RNA (1)...(19): siRNA sense strand
gcaaagcugaaggaucuga

SEQ ID NO: 84193 - RNA, 19 nt, Homo sapiens
  misc_RNA (1)...(19): siRNA sense strand
aggcugggaucauuacaga

SEQ ID NO: 84194 - RNA, 19 nt, Homo sapiens
  misc_RNA (1)...(19): siRNA sense strand
cacacaggcugggaucauu

SEQ ID NO: 84195 - RNA, 19 nt, Homo sapiens
  misc_RNA (1)...(19): siRNA sense strand
gcgggugacagacgaguuu

SEQ ID NO: 84196 - RNA, 19 nt, Homo sapiens
  misc_RNA (1)...(19): siRNA sense strand
ucaggacacucuggagaug

SEQ ID NO: 84197 - RNA, 19 nt, Homo sapiens
  misc_RNA (1)...(19): siRNA sense strand
gagaacuccauuaagauca

SEQ ID NO: 84198 - RNA, 19 nt, Homo sapiens
  misc_RNA (1)...(19): siRNA sense strand
ugacagacgaguuuaacau

SEQ ID NO: 84199 - RNA, 19 nt, Homo sapiens
  misc_RNA (1)...(19): siRNA sense strand
ccagccacauggagaacuu

SEQ ID NO: 84200 - RNA, 19 nt, Homo sapiens
  misc_RNA (1)...(19): siRNA sense strand
aagaaaggucacuggguua

SEQ ID NO: 84201 - RNA, 19 nt, Homo sapiens
  misc_RNA (1)...(19): siRNA sense strand
uuacagaggcaaagcugaa

SEQ ID NO: 84202 - RNA, 19 nt, Homo sapiens
  misc_RNA (1)...(19): siRNA sense strand
acgcaaagguccccuauga

SEQ ID NO: 84203 - RNA, 19 nt, Homo sapiens
  misc_RNA (1)...(19): siRNA sense strand
gaguucagggucuucauga

SEQ ID NO: 84204 - RNA, 19 nt, Homo sapiens
  misc_RNA (1)...(19): siRNA sense strand
gcaaggacaugguuaaauu

SEQ ID NO: 84205 - RNA, 19 nt, Homo sapiens
  misc_RNA (1)...(19): siRNA sense strand
gagaagagacguagaguua

SEQ ID NO: 84206 - RNA, 19 nt, Homo sapiens
  misc_RNA (1)...(19): siRNA sense strand
ggaagaagaguuacuauaa

SEQ ID NO: 84207 - RNA, 19 nt, Homo sapiens
  misc_RNA (1)...(19): siRNA sense strand
gagcggaggugucccaaua

SEQ ID NO: 84208 - RNA, 19 nt, Homo sapiens
  misc_RNA (1)...(19): siRNA sense strand
gcacagaagucaacccaaa

SEQ ID NO: 84209 - RNA, 19 nt, Homo sapiens
  misc_RNA (1)...(19): siRNA sense strand
ggacgacccugaccucaaa

SEQ ID NO: 84210 - RNA, 19 nt, Homo sapiens
  misc_RNA (1)...(19): siRNA sense strand
gcaggcggcucaaagauuu

SEQ ID NO: 84211 - RNA, 19 nt, Homo sapiens
  misc_RNA (1)...(19): siRNA sense strand
ggaaggagcccguggauga

SEQ ID NO: 84212 - RNA, 19 nt, Homo sapiens
  misc_RNA (1)...(19): siRNA sense strand
gaacaagaaucgcaucucu

SEQ ID NO: 84213 - RNA, 19 nt, Homo sapiens
  misc_RNA (1)...(19): siRNA sense strand
gaagaagaguuacuauaag

SEQ ID NO: 84214 - RNA, 19 nt, Homo sapiens
  misc_RNA (1)...(19): siRNA sense strand
agagacagcuuaacagaaa

SEQ ID NO: 84215 - RNA, 19 nt, Homo sapiens
  misc_RNA (1)...(19): siRNA sense strand
gaaaccaaauuacguaaag

SEQ ID NO: 84216 - RNA, 19 nt, Homo sapiens
  misc_RNA (1)...(19): siRNA sense strand
gagaagccgucaagacuga

SEQ ID NO: 84217 - RNA, 19 nt, Homo sapiens
  misc_RNA (1)...(19): siRNA sense strand
gaagagacguagaguuaca

SEQ ID NO: 84218 - RNA, 19 nt, Homo sapiens
  misc_RNA (1)...(19): siRNA sense strand
gaucaagcuuuguauguug

SEQ ID NO: 84219 - RNA, 19 nt, Homo sapiens
  misc_RNA (1)...(19): siRNA sense strand
gaauaucgaacucuucuuu

SEQ ID NO: 84220 - RNA, 19 nt, Homo sapiens
  misc_RNA (1)...(19): siRNA sense strand
caacagaggacaacaaguu

SEQ ID NO: 84221 - RNA, 19 nt, Homo sapiens
  misc_RNA (1)...(19): siRNA sense strand
ggaaagagacagcuuaaca

SEQ ID NO: 84222 - RNA, 19 nt, Homo sapiens
  misc_RNA (1)...(19): siRNA sense strand
ccacugggcuggccucuau

SEQ ID NO: 84223 - RNA, 19 nt, Homo sapiens
  misc_RNA (1)...(19): siRNA sense strand
caaugagacugacaucaaa

SEQ ID NO: 84224 - RNA, 19 nt, Homo sapiens
  misc_RNA (1)...(19): siRNA sense strand
gagaagcuguccaucuuug

SEQ ID NO: 84225 - RNA, 19 nt, Homo sapiens
  misc_RNA (1)...(19): siRNA sense strand
ggaagaagaagaaacagaa

SEQ ID NO: 84226 - RNA, 19 nt, Homo sapiens
  misc_RNA (1)...(19): siRNA sense strand
gcaccucauuugccgaaua

SEQ ID NO: 84227 - RNA, 19 nt, Homo sapiens
  misc_RNA (1)...(19): siRNA sense strand
ggaagugaauggacgucua

SEQ ID NO: 84228 - RNA, 19 nt, Homo sapiens
  misc_RNA (1)...(19): siRNA sense strand
gaacggugcucaugcuuac

SEQ ID NO: 84229 - RNA, 19 nt, Homo sapiens
  misc_RNA (1)...(19): siRNA sense strand
gaaauacuccgacuacauc

SEQ ID NO: 84230 - RNA, 19 nt, Homo sapiens
  misc_RNA (1)...(19): siRNA sense strand
gaucuucgauacuuucuuc

SEQ ID NO: 84231 - RNA, 19 nt, Homo sapiens
  misc_RNA (1)...(19): siRNA sense strand
ggacaacaaguucaaauuc

SEQ ID NO: 84232 - RNA, 19 nt, Homo sapiens
  misc_RNA (1)...(19): siRNA sense strand
acaugcagcuuucauauau

SEQ ID NO: 84233 - RNA, 19 nt, Homo sapiens
  misc_RNA (1)...(19): siRNA sense strand
gaaccaacacccaaacaga

SEQ ID NO: 84234 - RNA, 19 nt, Homo sapiens
  misc_RNA (1)...(19): siRNA sense strand
uggagcagguggagaguua

SEQ ID NO: 84235 - RNA, 19 nt, Homo sapiens
  misc_RNA (1)...(19): siRNA sense strand
cacagaugcugacaaauga

SEQ ID NO: 84236 - RNA, 19 nt, Homo sapiens
  misc_RNA (1)...(19): siRNA sense strand
ccacagaugcugacaaaug

SEQ ID NO: 84237 - RNA, 19 nt, Homo sapiens
  misc_RNA (1)...(19): siRNA sense strand
gcacgaauuucugcaaaca

SEQ ID NO: 84238 - RNA, 19 nt, Homo sapiens
  misc_RNA (1)...(19): siRNA sense strand
guaaggacaugagugcauu

SEQ ID NO: 84239 - RNA, 19 nt, Homo sapiens
  misc_RNA (1)...(19): siRNA sense strand
gggaagaagaguuacuaua

SEQ ID NO: 84240 - RNA, 19 nt, Homo sapiens
  misc_RNA (1)...(19): siRNA sense strand
gcaagauugugguggaguu

SEQ ID NO: 84241 - RNA, 19 nt, Homo sapiens
  misc_RNA (1)...(19): siRNA sense strand
ucaguuaugugacuuggaa

SEQ ID NO: 84242 - RNA, 19 nt, Homo sapiens
  misc_RNA (1)...(19): siRNA sense strand
ggacaugcagcuuucauau

SEQ ID NO: 84243 - RNA, 19 nt, Homo sapiens
  misc_RNA (1)...(19): siRNA sense strand
ggacaugguuaaauuuggu

SEQ ID NO: 84244 - RNA, 19 nt, Homo sapiens
  misc_RNA (1)...(19): siRNA sense strand
ggaagaagaaagagaugaa

SEQ ID NO: 84245 - RNA, 19 nt, Homo sapiens
  misc_RNA (1)...(19): siRNA sense strand
gaaccaagcaagaagugaa

SEQ ID NO: 84246 - RNA, 19 nt, Homo sapiens
  misc_RNA (1)...(19): siRNA sense strand
ccaaagaaccaacggagaa

SEQ ID NO: 84247 - RNA, 19 nt, Homo sapiens
  misc_RNA (1)...(19): siRNA sense strand
gaagaaacagaacaagaau

SEQ ID NO: 84248 - RNA, 19 nt, Homo sapiens
  misc_RNA (1)...(19): siRNA sense strand
cuaccuggcuaaagucaaa

SEQ ID NO: 84249 - RNA, 19 nt, Homo sapiens
  misc_RNA (1)...(19): siRNA sense strand
gagaaugucaggaacuuug

SEQ ID NO: 84250 - RNA, 19 nt, Homo sapiens
  misc_RNA (1)...(19): siRNA sense strand
gacaacaaguucaaauucu

SEQ ID NO: 84251 - RNA, 19 nt, Homo sapiens
  misc_RNA (1)...(19): siRNA sense strand
caacgagucuggcuuugag

SEQ ID NO: 84252 - RNA, 19 nt, Homo sapiens
  misc_RNA (1)...(19): siRNA sense strand
cgagaaagaugagaagaag

SEQ ID NO: 84253 - RNA, 19 nt, Homo sapiens
  misc_RNA (1)...(19): siRNA sense strand
ccaggaagcugcgguauac

SEQ ID NO: 84254 - RNA, 19 nt, Homo sapiens
  misc_RNA (1)...(19): siRNA sense strand
gacaugcagcuuucauaua

SEQ ID NO: 84255 - RNA, 19 nt, Homo sapiens
  misc_RNA (1)...(19): siRNA sense strand
gaagucaacccaaagaucu

SEQ ID NO: 84256 - RNA, 19 nt, Homo sapiens
  misc_RNA (1)...(19): siRNA sense strand
gaagaagaaagagaugaaa

SEQ ID NO: 84257 - RNA, 19 nt, Homo sapiens
  misc_RNA (1)...(19): siRNA sense strand
ggaaauacuccgacuacau

SEQ ID NO: 84258 - RNA, 19 nt, Homo sapiens
  misc_RNA (1)...(19): siRNA sense strand
agaagaaacagaacaagaa

SEQ ID NO: 84259 - RNA, 19 nt, Homo sapiens
  misc_RNA (1)...(19): siRNA sense strand
ccaaugagacugacaucaa

SEQ ID NO: 84260 - RNA, 19 nt, Homo sapiens
  misc_RNA (1)...(19): siRNA sense strand
gaauuggccggaucaaaga

SEQ ID NO: 84261 - RNA, 19 nt, Homo sapiens
  misc_RNA (1)...(19): siRNA sense strand
caaagaaccaacacccaaa

SEQ ID NO: 84262 - RNA, 19 nt, Homo sapiens
  misc_RNA (1)...(19): siRNA sense strand
gagaucaagcuuuguaugu

SEQ ID NO: 84263 - RNA, 19 nt, Homo sapiens
  misc_RNA (1)...(19): siRNA sense strand
gaagggagacguggagaug

SEQ ID NO: 84264 - RNA, 19 nt, Homo sapiens
  misc_RNA (1)...(19): siRNA sense strand
gugaauggacgucuagaaa

SEQ ID NO: 84265 - RNA, 19 nt, Homo sapiens
  misc_RNA (1)...(19): siRNA sense strand
ccagagcacuaccggaaau

SEQ ID NO: 84266 - RNA, 19 nt, Homo sapiens
  misc_RNA (1)...(19): siRNA sense strand
auaagaaggugugcauuga

SEQ ID NO: 84267 - RNA, 19 nt, Homo sapiens
  misc_RNA (1)...(19): siRNA sense strand
gaaggaggcagaugacgau

SEQ ID NO: 84268 - RNA, 19 nt, Homo sapiens
  misc_RNA (1)...(19): siRNA sense strand
ggaaaccaaauuacguaaa

SEQ ID NO: 84269 - RNA, 19 nt, Homo sapiens
  misc_RNA (1)...(19): siRNA sense strand
caaaaccaaucuaugauga

SEQ ID NO: 84270 - RNA, 19 nt, Homo sapiens
  misc_RNA (1)...(19): siRNA sense strand
gcaacauccuggacaagca

SEQ ID NO: 84271 - RNA, 19 nt, Homo sapiens
  misc_RNA (1)...(19): siRNA sense strand
ggaggcagaugacgaugag

SEQ ID NO: 84272 - RNA, 19 nt, Homo sapiens
  misc_RNA (1)...(19): siRNA sense strand
uaccagaucuucgauacuu

SEQ ID NO: 84273 - RNA, 19 nt, Homo sapiens
  misc_RNA (1)...(19): siRNA sense strand
ggagaacggugcucaugcu

SEQ ID NO: 84274 - RNA, 19 nt, Homo sapiens
  misc_RNA (1)...(19): siRNA sense strand
gaaagagacagcuuaacag

SEQ ID NO: 84275 - RNA, 19 nt, Homo sapiens
  misc_RNA (1)...(19): siRNA sense strand
ucagggaccacaucuguaa

SEQ ID NO: 84276 - RNA, 19 nt, Homo sapiens
  misc_RNA (1)...(19): siRNA sense strand
gcaacgggcagauguuuca

SEQ ID NO: 84277 - RNA, 19 nt, Homo sapiens
  misc_RNA (1)...(19): siRNA sense strand
ggacugugucucuguuauu

SEQ ID NO: 84278 - RNA, 19 nt, Homo sapiens
  misc_RNA (1)...(19): siRNA sense strand
caaggacaugguuaaauuu

SEQ ID NO: 84279 - RNA, 19 nt, Homo sapiens
  misc_RNA (1)...(19): siRNA sense strand
auaaaugaaugguggauca

SEQ ID NO: 84280 - RNA, 19 nt, Homo sapiens
  misc_RNA (1)...(19): siRNA sense strand
acaaagaccaggaugagaa

SEQ ID NO: 84281 - RNA, 19 nt, Homo sapiens
  misc_RNA (1)...(19): siRNA sense strand
caucaaggaagaagacaaa

SEQ ID NO: 84282 - RNA, 19 nt, Homo sapiens
  misc_RNA (1)...(19): siRNA sense strand
aaacagucaugaacuccaa

SEQ ID NO: 84283 - RNA, 19 nt, Homo sapiens
  misc_RNA (1)...(19): siRNA sense strand
gagagagugccucagcuaa

SEQ ID NO: 84284 - RNA, 19 nt, Homo sapiens
  misc_RNA (1)...(19): siRNA sense strand
gcaaagugaaagucaucua

SEQ ID NO: 84285 - RNA, 19 nt, Homo sapiens
  misc_RNA (1)...(19): siRNA sense strand
gaagaguuacuauaagaag

SEQ ID NO: 84286 - RNA, 19 nt, Homo sapiens
  misc_RNA (1)...(19): siRNA sense strand
aaaccaaucuaugaugaug

SEQ ID NO: 84287 - RNA, 19 nt, Homo sapiens
  misc_RNA (1)...(19): siRNA sense strand
gcggaggugucccaauaug

SEQ ID NO: 84288 - RNA, 19 nt, Homo sapiens
  misc_RNA (1)...(19): siRNA sense strand
ccugagcccuaccgaauug

SEQ ID NO: 84289 - RNA, 19 nt, Homo sapiens
  misc_RNA (1)...(19): siRNA sense strand
gaucaagacuacgcgagau

SEQ ID NO: 84290 - RNA, 19 nt, Homo sapiens
  misc_RNA (1)...(19): siRNA sense strand
ccaaauuacguaaagaaga

SEQ ID NO: 84291 - RNA, 19 nt, Homo sapiens
  misc_RNA (1)...(19): siRNA sense strand
ggaacuuugucuccuucaa

SEQ ID NO: 84292 - RNA, 19 nt, Homo sapiens
  misc_RNA (1)...(19): siRNA sense strand
gaaguuugugagcaacaua

SEQ ID NO: 84293 - RNA, 19 nt, Homo sapiens
  misc_RNA (1)...(19): siRNA sense strand
auaaagauuuguccuugga

SEQ ID NO: 84294 - RNA, 19 nt, Homo sapiens
  misc_RNA (1)...(19): siRNA sense strand
cgaauuggccggaucaaag

SEQ ID NO: 84295 - RNA, 19 nt, Homo sapiens
  misc_RNA (1)...(19): siRNA sense strand
aagaaggugugcauugaug

SEQ ID NO: 84296 - RNA, 19 nt, Homo sapiens
  misc_RNA (1)...(19): siRNA sense strand
augaggaagucgaugauaa

SEQ ID NO: 84297 - RNA, 19 nt, Homo sapiens
  misc_RNA (1)...(19): siRNA sense strand
gcaauuccgacucgaccua

SEQ ID NO: 84298 - RNA, 19 nt, Homo sapiens
  misc_RNA (1)...(19): siRNA sense strand
gaacucuucuuuucugguu

SEQ ID NO: 84299 - RNA, 19 nt, Homo sapiens
  misc_RNA (1)...(19): siRNA sense strand
agucuggcuuugagaguua

SEQ ID NO: 84300 - RNA, 19 nt, Homo sapiens
  misc_RNA (1)...(19): siRNA sense strand
ggccaaagcccgagagagu

SEQ ID NO: 84301 - RNA, 19 nt, Homo sapiens
  misc_RNA (1)...(19): siRNA sense strand
ccguagcccuggaaacaaa

SEQ ID NO: 84302 - RNA, 19 nt, Homo sapiens
  misc_RNA (1)...(19): siRNA sense strand
uauaagaaggugugcauug

SEQ ID NO: 84303 - RNA, 19 nt, Homo sapiens
  misc_RNA (1)...(19): siRNA sense strand
ugaaaaggaugacagagaa

SEQ ID NO: 84304 - RNA, 19 nt, Homo sapiens
  misc_RNA (1)...(19): siRNA sense strand
ggacugaugugguagauuu

SEQ ID NO: 84305 - RNA, 19 nt, Homo sapiens
  misc_RNA (1)...(19): siRNA sense strand
ucaaagaacugaagaagaa

SEQ ID NO: 84306 - RNA, 19 nt, Homo sapiens
  misc_RNA (1)...(19): siRNA sense strand
guaccgagguuacacguua

SEQ ID NO: 84307 - RNA, 19 nt, Homo sapiens
  misc_RNA (1)...(19): siRNA sense strand
cagcaaacaucaagagaua

SEQ ID NO: 84308 - RNA, 19 nt, Homo sapiens
  misc_RNA (1)...(19): siRNA sense strand
gagaaugacuuccuucaga

SEQ ID NO: 84309 - RNA, 19 nt, Homo sapiens
  misc_RNA (1)...(19): siRNA sense strand
ucacaggacucuaaggaua

SEQ ID NO: 84310 - RNA, 19 nt, Homo sapiens
  misc_RNA (1)...(19): siRNA sense strand
gaaagucgaugguggugaa

SEQ ID NO: 84311 - RNA, 19 nt, Homo sapiens
  misc_RNA (1)...(19): siRNA sense strand
gcauauaaauuaccuggaa

SEQ ID NO: 84312 - RNA, 19 nt, Homo sapiens
  misc_RNA (1)...(19): siRNA sense strand
ucaccaagcuggaucauga

SEQ ID NO: 84313 - RNA, 19 nt, Homo sapiens
  misc_RNA (1)...(19): siRNA sense strand
gaaauuacuuccuggagau

SEQ ID NO: 84314 - RNA, 19 nt, Homo sapiens
  misc_RNA (1)...(19): siRNA sense strand
ggaaacagaauucuagauu

SEQ ID NO: 84315 - RNA, 19 nt, Homo sapiens
  misc_RNA (1)...(19): siRNA sense strand
cagagcagauuguaaguuu

SEQ ID NO: 84316 - RNA, 19 nt, Homo sapiens
  misc_RNA (1)...(19): siRNA sense strand
ggagacagauuggcuuuga

SEQ ID NO: 84317 - RNA, 19 nt, Homo sapiens
  misc_RNA (1)...(19): siRNA sense strand
ccaaagaagucaaccacaa

SEQ ID NO: 84318 - RNA, 19 nt, Homo sapiens
  misc_RNA (1)...(19): siRNA sense strand
gacaaugaauuugcgaaua

SEQ ID NO: 84319 - RNA, 19 nt, Homo sapiens
  misc_RNA (1)...(19): siRNA sense strand
gcacaaauaccucgccaaa

SEQ ID NO: 84320 - RNA, 19 nt, Homo sapiens
  misc_RNA (1)...(19): siRNA sense strand
gcacugaaauacuuaccaa

SEQ ID NO: 84321 - RNA, 19 nt, Homo sapiens
  misc_RNA (1)...(19): siRNA sense strand
gggcagcacugaaauacuu

SEQ ID NO: 84322 - RNA, 19 nt, Homo sapiens
  misc_RNA (1)...(19): siRNA sense strand
cuugggagcugcaccauua

SEQ ID NO: 84323 - RNA, 19 nt, Homo sapiens
  misc_RNA (1)...(19): siRNA sense strand
gaaauagcuucuaaacaag

SEQ ID NO: 84324 - RNA, 19 nt, Homo sapiens
  misc_RNA (1)...(19): siRNA sense strand
ucaaugugcugaauuucua

SEQ ID NO: 84325 - RNA, 19 nt, Homo sapiens
  misc_RNA (1)...(19): siRNA sense strand
uuaagaaccucauuggaaa

SEQ ID NO: 84326 - RNA, 19 nt, Homo sapiens
  misc_RNA (1)...(19): siRNA sense strand
cuaaagacauagacagauu

SEQ ID NO: 84327 - RNA, 19 nt, Homo sapiens
  misc_RNA (1)...(19): siRNA sense strand
gaauuaacuagcacgauua

SEQ ID NO: 84328 - RNA, 19 nt, Homo sapiens
  misc_RNA (1)...(19): siRNA sense strand
uaacagacaagccaaguuu

SEQ ID NO: 84329 - RNA, 19 nt, Homo sapiens
  misc_RNA (1)...(19): siRNA sense strand
gcaaacaucaagagauauu

SEQ ID NO: 84330 - RNA, 19 nt, Homo sapiens
  misc_RNA (1)...(19): siRNA sense strand
gcucugguauuuaucauug

SEQ ID NO: 84331 - RNA, 19 nt, Homo sapiens
  misc_RNA (1)...(19): siRNA sense strand
uaaaugagcagcuguacaa

SEQ ID NO: 84332 - RNA, 19 nt, Homo sapiens
  misc_RNA (1)...(19): siRNA sense strand
gaagauaagcagcauuuca

SEQ ID NO: 84333 - RNA, 19 nt, Homo sapiens
  misc_RNA (1)...(19): siRNA sense strand
cagaauccauggagacaaa

SEQ ID NO: 84334 - RNA, 19 nt, Homo sapiens
  misc_RNA (1)...(19): siRNA sense strand
gaacucugccucaggauga

SEQ ID NO: 84335 - RNA, 19 nt, Homo sapiens
  misc_RNA (1)...(19): siRNA sense strand
gagagaaccauauauacaa

SEQ ID NO: 84336 - RNA, 19 nt, Homo sapiens
  misc_RNA (1)...(19): siRNA sense strand
cagcaugacugcagagaga

SEQ ID NO: 84337 - RNA, 19 nt, Homo sapiens
  misc_RNA (1)...(19): siRNA sense strand
gggcaggguuuguggguaa

SEQ ID NO: 84338 - RNA, 19 nt, Homo sapiens
  misc_RNA (1)...(19): siRNA sense strand
agaauuaacuagcacgauu

SEQ ID NO: 84339 - RNA, 19 nt, Homo sapiens
  misc_RNA (1)...(19): siRNA sense strand
gaugaacuuucuuuacaga

SEQ ID NO: 84340 - RNA, 19 nt, Homo sapiens
  misc_RNA (1)...(19): siRNA sense strand
gauaugaggagacagauug

SEQ ID NO: 84341 - RNA, 19 nt, Homo sapiens
  misc_RNA (1)...(19): siRNA sense strand
uacgacaaauggaagauua

SEQ ID NO: 84342 - RNA, 19 nt, Homo sapiens
  misc_RNA (1)...(19): siRNA sense strand
uagaauccaucuucaaguu

SEQ ID NO: 84343 - RNA, 19 nt, Homo sapiens
  misc_RNA (1)...(19): siRNA sense strand
aggauuaccuaaagacaua

SEQ ID NO: 84344 - RNA, 19 nt, Homo sapiens
  misc_RNA (1)...(19): siRNA sense strand
ucuaugaccuuauugaaug

SEQ ID NO: 84345 - RNA, 19 nt, Homo sapiens
  misc_RNA (1)...(19): siRNA sense strand
gauggaggccuguuucaaa

SEQ ID NO: 84346 - RNA, 19 nt, Homo sapiens
  misc_RNA (1)...(19): siRNA sense strand
gaaauggugggcccaauau

SEQ ID NO: 84347 - RNA, 19 nt, Homo sapiens
  misc_RNA (1)...(19): siRNA sense strand
caugaucuaugaccuuauu

SEQ ID NO: 84348 - RNA, 19 nt, Homo sapiens
  misc_RNA (1)...(19): siRNA sense strand
ucaaacagcugaaggaaaa

SEQ ID NO: 84349 - RNA, 19 nt, Homo sapiens
  misc_RNA (1)...(19): siRNA sense strand
ggcccaagccugacuauuu

SEQ ID NO: 84350 - RNA, 19 nt, Homo sapiens
  misc_RNA (1)...(19): siRNA sense strand
gaauccaucuucaaguuca

SEQ ID NO: 84351 - RNA, 19 nt, Homo sapiens
  misc_RNA (1)...(19): siRNA sense strand
agucaucgcugccaaagaa

SEQ ID NO: 84352 - RNA, 19 nt, Homo sapiens
  misc_RNA (1)...(19): siRNA sense strand
gacauagacagauuacaua

SEQ ID NO: 84353 - RNA, 19 nt, Homo sapiens
  misc_RNA (1)...(19): siRNA sense strand
uaaagaagcgauaguugaa

SEQ ID NO: 84354 - RNA, 19 nt, Homo sapiens
  misc_RNA (1)...(19): siRNA sense strand
caagagauauuugagaaag

SEQ ID NO: 84355 - RNA, 19 nt, Homo sapiens
  misc_RNA (1)...(19): siRNA sense strand
ccaaaauccuuaacaagua

SEQ ID NO: 84356 - RNA, 19 nt, Homo sapiens
  misc_RNA (1)...(19): siRNA sense strand
cagaaacucuacugcuuga

SEQ ID NO: 84357 - RNA, 19 nt, Homo sapiens
  misc_RNA (1)...(19): siRNA sense strand
gaauucauccucaauguuc

SEQ ID NO: 84358 - RNA, 19 nt, Homo sapiens
  misc_RNA (1)...(19): siRNA sense strand
gaaaauauuugcacuagca

SEQ ID NO: 84359 - RNA, 19 nt, Homo sapiens
  misc_RNA (1)...(19): siRNA sense strand
ggucaucacaggacucuaa

SEQ ID NO: 84360 - RNA, 19 nt, Homo sapiens
  misc_RNA (1)...(19): siRNA sense strand
augcaaagcuucuuaagug

SEQ ID NO: 84361 - RNA, 19 nt, Homo sapiens
  misc_RNA (1)...(19): siRNA sense strand
guugugcgcuuaauggaaa

SEQ ID NO: 84362 - RNA, 19 nt, Homo sapiens
  misc_RNA (1)...(19): siRNA sense strand
aaugaggacugauguggua

SEQ ID NO: 84363 - RNA, 19 nt, Homo sapiens
  misc_RNA (1)...(19): siRNA sense strand
cacaugaucuaugaccuua

SEQ ID NO: 84364 - RNA, 19 nt, Homo sapiens
  misc_RNA (1)...(19): siRNA sense strand
gaucaagacuuuugggaaa

SEQ ID NO: 84365 - RNA, 19 nt, Homo sapiens
  misc_RNA (1)...(19): siRNA sense strand
cgucaacgaugugaaauug

SEQ ID NO: 84366 - RNA, 19 nt, Homo sapiens
  misc_RNA (1)...(19): siRNA sense strand
ugaggcagcugaugaaagu

SEQ ID NO: 84367 - RNA, 19 nt, Homo sapiens
  misc_RNA (1)...(19): siRNA sense strand
gcauggagcugagggacaa

SEQ ID NO: 84368 - RNA, 19 nt, Homo sapiens
  misc_RNA (1)...(19): siRNA sense strand
guauauuuccugcuucaua

SEQ ID NO: 84369 - RNA, 19 nt, Homo sapiens
  misc_RNA (1)...(19): siRNA sense strand
gaacgagguccagcgauuu

SEQ ID NO: 84370 - RNA, 19 nt, Homo sapiens
  misc_RNA (1)...(19): siRNA sense strand
cggaugaacuuucuuuaca

SEQ ID NO: 84371 - RNA, 19 nt, Homo sapiens
  misc_RNA (1)...(19): siRNA sense strand
gaugugaaauugguguuug

SEQ ID NO: 84372 - RNA, 19 nt, Homo sapiens
  misc_RNA (1)...(19): siRNA sense strand
ugaacgagguccagcgauu

SEQ ID NO: 84373 - RNA, 19 nt, Homo sapiens
  misc_RNA (1)...(19): siRNA sense strand
gaaaacaucgucaaaguga

SEQ ID NO: 84374 - RNA, 19 nt, Homo sapiens
  misc_RNA (1)...(19): siRNA sense strand
ccaaagagcucagcaaaau

SEQ ID NO: 84375 - RNA, 19 nt, Homo sapiens
  misc_RNA (1)...(19): siRNA sense strand
gcacaucuuagaaacauau

SEQ ID NO: 84376 - RNA, 19 nt, Homo sapiens
  misc_RNA (1)...(19): siRNA sense strand
ccucaagucuggaugauag

SEQ ID NO: 84377 - RNA, 19 nt, Homo sapiens
  misc_RNA (1)...(19): siRNA sense strand
ggaaaucauccacuacuuc

SEQ ID NO: 84378 - RNA, 19 nt, Homo sapiens
  misc_RNA (1)...(19): siRNA sense strand
ggagauaugaggagacaga

SEQ ID NO: 84379 - RNA, 19 nt, Homo sapiens
  misc_RNA (1)...(19): siRNA sense strand
ugugguagauuuccuaaug

SEQ ID NO: 84380 - RNA, 19 nt, Homo sapiens
  misc_RNA (1)...(19): siRNA sense strand
gaugaagaugggaauauuu

SEQ ID NO: 84381 - RNA, 19 nt, Homo sapiens
  misc_RNA (1)...(19): siRNA sense strand
gcagauuacgggaauuuga

SEQ ID NO: 84382 - RNA, 19 nt, Homo sapiens
  misc_RNA (1)...(19): siRNA sense strand
ugaaagcgcuagaauccau

SEQ ID NO: 84383 - RNA, 19 nt, Homo sapiens
  misc_RNA (1)...(19): siRNA sense strand
ugacaaaaguguugaagaa

SEQ ID NO: 84384 - RNA, 19 nt, Homo sapiens
  misc_RNA (1)...(19): siRNA sense strand
guggguaacauugaaauua

SEQ ID NO: 84385 - RNA, 19 nt, Homo sapiens
  misc_RNA (1)...(19): siRNA sense strand
gaacagcaaacaucaagag

SEQ ID NO: 84386 - RNA, 19 nt, Homo sapiens
  misc_RNA (1)...(19): siRNA sense strand
cgaucugccuccuaaguuu

SEQ ID NO: 84387 - RNA, 19 nt, Homo sapiens
  misc_RNA (1)...(19): siRNA sense strand
gaagggugguaccgagguu

SEQ ID NO: 84388 - RNA, 19 nt, Homo sapiens
  misc_RNA (1)...(19): siRNA sense strand
gaagaaggucacagccaaa

SEQ ID NO: 84389 - RNA, 19 nt, Homo sapiens
  misc_RNA (1)...(19): siRNA sense strand
gcucggcucuuaacucagu

SEQ ID NO: 84390 - RNA, 19 nt, Homo sapiens
  misc_RNA (1)...(19): siRNA sense strand
gcagaggagacgaacagua

SEQ ID NO: 84391 - RNA, 19 nt, Homo sapiens
  misc_RNA (1)...(19): siRNA sense strand
uaacaaguacggagauaug

SEQ ID NO: 84392 - RNA, 19 nt, Homo sapiens
  misc_RNA (1)...(19): siRNA sense strand
cagaggcacguccagauua

SEQ ID NO: 84393 - RNA, 19 nt, Homo sapiens
  misc_RNA (1)...(19): siRNA sense strand
ggacaacaacaccaggaaa

SEQ ID NO: 84394 - RNA, 19 nt, Homo sapiens
  misc_RNA (1)...(19): siRNA sense strand
ucucuggccuuguuuguga

SEQ ID NO: 84395 - RNA, 19 nt, Homo sapiens
  misc_RNA (1)...(19): siRNA sense strand
gcacgacgagaacaaagaa

SEQ ID NO: 84396 - RNA, 19 nt, Homo sapiens
  misc_RNA (1)...(19): siRNA sense strand
ggaaacgauuagagcaugu

SEQ ID NO: 84397 - RNA, 19 nt, Homo sapiens
  misc_RNA (1)...(19): siRNA sense strand
gaaguccucaugucucuau

SEQ ID NO: 84398 - RNA, 19 nt, Homo sapiens
  misc_RNA (1)...(19): siRNA sense strand
ugaccgaucagcucaagua

SEQ ID NO: 84399 - RNA, 19 nt, Homo sapiens
  misc_RNA (1)...(19): siRNA sense strand
aaacccagacaaugaauuu

SEQ ID NO: 84400 - RNA, 19 nt, Homo sapiens
  misc_RNA (1)...(19): siRNA sense strand
gccaguauauucagugcuu

SEQ ID NO: 84401 - RNA, 19 nt, Homo sapiens
  misc_RNA (1)...(19): siRNA sense strand
caaggagugugauaacuac

SEQ ID NO: 84402 - RNA, 19 nt, Homo sapiens
  misc_RNA (1)...(19): siRNA sense strand
ggcccaauauuagaaauga

SEQ ID NO: 84403 - RNA, 19 nt, Homo sapiens
  misc_RNA (1)...(19): siRNA sense strand
ucaccuggcuguugcuuuc

SEQ ID NO: 84404 - RNA, 19 nt, Homo sapiens
  misc_RNA (1)...(19): siRNA sense strand
gaagaaaccucucuauugg

SEQ ID NO: 84405 - RNA, 19 nt, Homo sapiens
  misc_RNA (1)...(19): siRNA sense strand
ggaagaaaccucucuauug

SEQ ID NO: 84406 - RNA, 19 nt, Homo sapiens
  misc_RNA (1)...(19): siRNA sense strand
caaagaggaucccaucuau

SEQ ID NO: 84407 - RNA, 19 nt, Homo sapiens
  misc_RNA (1)...(19): siRNA sense strand
ccaaagaggaucccaucua

SEQ ID NO: 84408 - RNA, 19 nt, Homo sapiens
  misc_RNA (1)...(19): siRNA sense strand
ggacggagcagugauggaa

SEQ ID NO: 84409 - RNA, 19 nt, Homo sapiens
  misc_RNA (1)...(19): siRNA sense strand
aagaggaucccaucuauga

SEQ ID NO: 84410 - RNA, 19 nt, Homo sapiens
  misc_RNA (1)...(19): siRNA sense strand
gauaacccaccuaagcuuu

SEQ ID NO: 84411 - RNA, 19 nt, Homo sapiens
  misc_RNA (1)...(19): siRNA sense strand
gcuaugagcuccccuacaa

SEQ ID NO: 84412 - RNA, 19 nt, Homo sapiens
  misc_RNA (1)...(19): siRNA sense strand
acaaggucauguucucuuu

SEQ ID NO: 84413 - RNA, 19 nt, Homo sapiens
  misc_RNA (1)...(19): siRNA sense strand
acagggaaaugacaucuuc

SEQ ID NO: 84414 - RNA, 19 nt, Homo sapiens
  misc_RNA (1)...(19): siRNA sense strand
cuacaacccugccacugau

SEQ ID NO: 84415 - RNA, 19 nt, Homo sapiens
  misc_RNA (1)...(19): siRNA sense strand
cgccuggacugcaaaguga

SEQ ID NO: 84416 - RNA, 19 nt, Homo sapiens
  misc_RNA (1)...(19): siRNA sense strand
accaagagguggaggaaga

SEQ ID NO: 84417 - RNA, 19 nt, Homo sapiens
  misc_RNA (1)...(19): siRNA sense strand
gcagaaggcccagggaaag

SEQ ID NO: 84418 - RNA, 19 nt, Homo sapiens
  misc_RNA (1)...(19): siRNA sense strand
cggaagaaaccucucuauu

SEQ ID NO: 84419 - RNA, 19 nt, Homo sapiens
  misc_RNA (1)...(19): siRNA sense strand
ccuguaugcugagcccuua

SEQ ID NO: 84420 - RNA, 19 nt, Homo sapiens
  misc_RNA (1)...(19): siRNA sense strand
gggacaaggucauguucuc

SEQ ID NO: 84421 - RNA, 19 nt, Homo sapiens
  misc_RNA (1)...(19): siRNA sense strand
ugaaggaggagggcuauga

SEQ ID NO: 84422 - RNA, 19 nt, Homo sapiens
  misc_RNA (1)...(19): siRNA sense strand
ccaggacucccuauacuca

SEQ ID NO: 84423 - RNA, 19 nt, Homo sapiens
  misc_RNA (1)...(19): siRNA sense strand
ggcagaaggcccagggaaa

SEQ ID NO: 84424 - RNA, 19 nt, Homo sapiens
  misc_RNA (1)...(19): siRNA sense strand
ggaccaagagguggaggaa

SEQ ID NO: 84425 - RNA, 19 nt, Homo sapiens
  misc_RNA (1)...(19): siRNA sense strand
ucuauugggacuuguauga

SEQ ID NO: 84426 - RNA, 19 nt, Homo sapiens
  misc_RNA (1)...(19): siRNA sense strand
ccuacaacccugccacuga

SEQ ID NO: 84427 - RNA, 19 nt, Homo sapiens
  misc_RNA (1)...(19): siRNA sense strand
gacaaggucauguucucuu

SEQ ID NO: 84428 - RNA, 19 nt, Homo sapiens
  misc_RNA (1)...(19): siRNA sense strand
ccacaacucagcccuguac

SEQ ID NO: 84429 - RNA, 19 nt, Homo sapiens
  misc_RNA (1)...(19): siRNA sense strand
cgaguucuuugaccauaag

SEQ ID NO: 84430 - RNA, 19 nt, Homo sapiens
  misc_RNA (1)...(19): siRNA sense strand
ucgaguucuuugaccauaa

SEQ ID NO: 84431 - RNA, 19 nt, Homo sapiens
  misc_RNA (1)...(19): siRNA sense strand
gaaggaggagggcuaugag

SEQ ID NO: 84432 - RNA, 19 nt, Homo sapiens
  misc_RNA (1)...(19): siRNA sense strand
ggcaggagagggaguacaa

SEQ ID NO: 84433 - RNA, 19 nt, Homo sapiens
  misc_RNA (1)...(19): siRNA sense strand
ggacugugggcucucuaga

SEQ ID NO: 84434 - RNA, 19 nt, Homo sapiens
  misc_RNA (1)...(19): siRNA sense strand
gugccaagcucgggugaag

SEQ ID NO: 84435 - RNA, 19 nt, Homo sapiens
  misc_RNA (1)...(19): siRNA sense strand
uaacggugcagaggacuga

SEQ ID NO: 84436 - RNA, 19 nt, Homo sapiens
  misc_RNA (1)...(19): siRNA sense strand
gggaguacaacggaagaaa

SEQ ID NO: 84437 - RNA, 19 nt, Homo sapiens
  misc_RNA (1)...(19): siRNA sense strand
ggaguacaacggaagaaac

SEQ ID NO: 84438 - RNA, 19 nt, Homo sapiens
  misc_RNA (1)...(19): siRNA sense strand
gccaagcucgggugaagga

SEQ ID NO: 84439 - RNA, 19 nt, Homo sapiens
  misc_RNA (1)...(19): siRNA sense strand
cuaccgauaacccaccuaa

SEQ ID NO: 84440 - RNA, 19 nt, Homo sapiens
  misc_RNA (1)...(19): siRNA sense strand
guacagccagguccagaag

SEQ ID NO: 84441 - RNA, 19 nt, Homo sapiens
  misc_RNA (1)...(19): siRNA sense strand
uaacccaccuaagcuuucu

SEQ ID NO: 84442 - RNA, 19 nt, Homo sapiens
  misc_RNA (1)...(19): siRNA sense strand
cccagggccuuuaugaucu

SEQ ID NO: 84443 - RNA, 19 nt, Homo sapiens
  misc_RNA (1)...(19): siRNA sense strand
caacggaagaaaccucucu

SEQ ID NO: 84444 - RNA, 19 nt, Homo sapiens
  misc_RNA (1)...(19): siRNA sense strand
gcacagggaaaugacaucu

SEQ ID NO: 84445 - RNA, 19 nt, Homo sapiens
  misc_RNA (1)...(19): siRNA sense strand
ggacaaggucauguucucu

SEQ ID NO: 84446 - RNA, 19 nt, Homo sapiens
  misc_RNA (1)...(19): siRNA sense strand
cccuggagaugcuggagaa

SEQ ID NO: 84447 - RNA, 19 nt, Homo sapiens
  misc_RNA (1)...(19): siRNA sense strand
agacggcacagggaaauga

SEQ ID NO: 84448 - RNA, 19 nt, Homo sapiens
  misc_RNA (1)...(19): siRNA sense strand
agagcugacucccaugaag

SEQ ID NO: 84449 - RNA, 19 nt, Homo sapiens
  misc_RNA (1)...(19): siRNA sense strand
cgauaacccaccuaagcuu

SEQ ID NO: 84450 - RNA, 19 nt, Homo sapiens
  misc_RNA (1)...(19): siRNA sense strand
ccagggccuuuaugaucug

SEQ ID NO: 84451 - RNA, 19 nt, Homo sapiens
  misc_RNA (1)...(19): siRNA sense strand
ugcagacgcugugccgaaa

SEQ ID NO: 84452 - RNA, 19 nt, Homo sapiens
  misc_RNA (1)...(19): siRNA sense strand
gagggaguacaacggaaga

SEQ ID NO: 84453 - RNA, 19 nt, Homo sapiens
  misc_RNA (1)...(19): siRNA sense strand
uggagaugcuggagaacuc

SEQ ID NO: 84454 - RNA, 19 nt, Homo sapiens
  misc_RNA (1)...(19): siRNA sense strand
gaguagggacugacaagac

SEQ ID NO: 84455 - RNA, 19 nt, Homo sapiens
  misc_RNA (1)...(19): siRNA sense strand
ggagauaccuucuguuacu

SEQ ID NO: 84456 - RNA, 19 nt, Homo sapiens
  misc_RNA (1)...(19): siRNA sense strand
gagaugagcuauuccaagu

SEQ ID NO: 84457 - RNA, 19 nt, Homo sapiens
  misc_RNA (1)...(19): siRNA sense strand
gcaagaccaugcuacuauu

SEQ ID NO: 84458 - RNA, 19 nt, Homo sapiens
  misc_RNA (1)...(19): siRNA sense strand
gaugagcuauuccaaguuc

SEQ ID NO: 84459 - RNA, 19 nt, Homo sapiens
  misc_RNA (1)...(19): siRNA sense strand
gcaguguucuguaccaaug

SEQ ID NO: 84460 - RNA, 19 nt, Homo sapiens
  misc_RNA (1)...(19): siRNA sense strand
gacugaagauggugaauuc

SEQ ID NO: 84461 - RNA, 19 nt, Homo sapiens
  misc_RNA (1)...(19): siRNA sense strand
cucaucaacuugcuacuua

SEQ ID NO: 84462 - RNA, 19 nt, Homo sapiens
  misc_RNA (1)...(19): siRNA sense strand
guaccaaugccaucaauau

SEQ ID NO: 84463 - RNA, 19 nt, Homo sapiens
  misc_RNA (1)...(19): siRNA sense strand
guucgacucuucuaugaug

SEQ ID NO: 84464 - RNA, 19 nt, Homo sapiens
  misc_RNA (1)...(19): siRNA sense strand
gacagcagaucccagaauc

SEQ ID NO: 84465 - RNA, 19 nt, Homo sapiens
  misc_RNA (1)...(19): siRNA sense strand
ugggagauaccuucuguua

SEQ ID NO: 84466 - RNA, 19 nt, Homo sapiens
  misc_RNA (1)...(19): siRNA sense strand
ccuagaggcuggccaguca

SEQ ID NO: 84467 - RNA, 19 nt, Homo sapiens
  misc_RNA (1)...(19): siRNA sense strand
gauaccuucuguuacuuug

SEQ ID NO: 84468 - RNA, 19 nt, Homo sapiens
  misc_RNA (1)...(19): siRNA sense strand
gagagaaaccucacauugc

SEQ ID NO: 84469 - RNA, 19 nt, Homo sapiens
  misc_RNA (1)...(19): siRNA sense strand
uaaaguccuugggcccaua

SEQ ID NO: 84470 - RNA, 19 nt, Homo sapiens
  misc_RNA (1)...(19): siRNA sense strand
ccugauaggugcccuccuu

SEQ ID NO: 84471 - RNA, 19 nt, Homo sapiens
  misc_RNA (1)...(19): siRNA sense strand
gccagucacuagucauuuc

SEQ ID NO: 84472 - RNA, 19 nt, Homo sapiens
  misc_RNA (1)...(19): siRNA sense strand
gagauaccuucuguuacuu

SEQ ID NO: 84473 - RNA, 19 nt, Homo sapiens
  misc_RNA (1)...(19): siRNA sense strand
uuccugaacugcuuuguga

SEQ ID NO: 84474 - RNA, 19 nt, Homo sapiens
  misc_RNA (1)...(19): siRNA sense strand
gcaaacuggagaugagcua

SEQ ID NO: 84475 - RNA, 19 nt, Homo sapiens
  misc_RNA (1)...(19): siRNA sense strand
ggaauccuguacuaugucu

SEQ ID NO: 84476 - RNA, 19 nt, Homo sapiens
  misc_RNA (1)...(19): siRNA sense strand
gggcuuugcggaugaugua

SEQ ID NO: 84477 - RNA, 19 nt, Homo sapiens
  misc_RNA (1)...(19): siRNA sense strand
agagaaaccucacauugcu

SEQ ID NO: 84478 - RNA, 19 nt, Homo sapiens
  misc_RNA (1)...(19): siRNA sense strand
ugccucagcuccugcauau

SEQ ID NO: 84479 - RNA, 19 nt, Homo sapiens
  misc_RNA (1)...(19): siRNA sense strand
ccucagcuccugcauauca

SEQ ID NO: 84480 - RNA, 19 nt, Homo sapiens
  misc_RNA (1)...(19): siRNA sense strand
cauaagcugcugcuaccua

SEQ ID NO: 84481 - RNA, 19 nt, Homo sapiens
  misc_RNA (1)...(19): siRNA sense strand
acucuucuaugaugucuga

SEQ ID NO: 84482 - RNA, 19 nt, Homo sapiens
  misc_RNA (1)...(19): siRNA sense strand
cauuucugcuuccaucauu

SEQ ID NO: 84483 - RNA, 19 nt, Homo sapiens
  misc_RNA (1)...(19): siRNA sense strand
ucaucaacuugcuacuuaa

SEQ ID NO: 84484 - RNA, 19 nt, Homo sapiens
  misc_RNA (1)...(19): siRNA sense strand
gagugagacugaagauggu

SEQ ID NO: 84485 - RNA, 19 nt, Homo sapiens
  misc_RNA (1)...(19): siRNA sense strand
ugggaauccuguacuaugu

SEQ ID NO: 84486 - RNA, 19 nt, Homo sapiens
  misc_RNA (1)...(19): siRNA sense strand
ugacaguacaccagaguga

SEQ ID NO: 84487 - RNA, 19 nt, Homo sapiens
  misc_RNA (1)...(19): siRNA sense strand
ucgggaugaucaugucuuu

SEQ ID NO: 84488 - RNA, 19 nt, Homo sapiens
  misc_RNA (1)...(19): siRNA sense strand
cggaugauguacugaaucu

SEQ ID NO: 84489 - RNA, 19 nt, Homo sapiens
  misc_RNA (1)...(19): siRNA sense strand
ggauugcucuaccacaacu

SEQ ID NO: 84490 - RNA, 19 nt, Homo sapiens
  misc_RNA (1)...(19): siRNA sense strand
ugaacugcuuugugaagga

SEQ ID NO: 84491 - RNA, 19 nt, Homo sapiens
  misc_RNA (1)...(19): siRNA sense strand
ugggauugcucuaccacaa

SEQ ID NO: 84492 - RNA, 19 nt, Homo sapiens
  misc_RNA (1)...(19): siRNA sense strand
caucaacuugcuacuuaaa

SEQ ID NO: 84493 - RNA, 19 nt, Homo sapiens
  misc_RNA (1)...(19): siRNA sense strand
ccacaacugguacccauca

SEQ ID NO: 84494 - RNA, 19 nt, Homo sapiens
  misc_RNA (1)...(19): siRNA sense strand
gaauuuguggcccugauag

SEQ ID NO: 84495 - RNA, 19 nt, Homo sapiens
  misc_RNA (1)...(19): siRNA sense strand
ucguucgacucuucuauga

SEQ ID NO: 84496 - RNA, 19 nt, Homo sapiens
  misc_RNA (1)...(19): siRNA sense strand
ccgcauacccagacucaau

SEQ ID NO: 84497 - RNA, 19 nt, Homo sapiens
  misc_RNA (1)...(19): siRNA sense strand
ucacuagucauuucugcuu

SEQ ID NO: 84498 - RNA, 19 nt, Homo sapiens
  misc_RNA (1)...(19): siRNA sense strand
ugaauuuguggcccugaua

SEQ ID NO: 84499 - RNA, 19 nt, Homo sapiens
  misc_RNA (1)...(19): siRNA sense strand
gcccauacaugagagaaac

SEQ ID NO: 84500 - RNA, 19 nt, Homo sapiens
  misc_RNA (1)...(19): siRNA sense strand
ggacuugggaauccuguac

SEQ ID NO: 84501 - RNA, 19 nt, Homo sapiens
  misc_RNA (1)...(19): siRNA sense strand
cgacagcagaucccagaau

SEQ ID NO: 84502 - RNA, 19 nt, Homo sapiens
  misc_RNA (1)...(19): siRNA sense strand
caggcaaacuggagaugag

SEQ ID NO: 84503 - RNA, 19 nt, Homo sapiens
  misc_RNA (1)...(19): siRNA sense strand
uacccagacucaauaucaa

SEQ ID NO: 84504 - RNA, 19 nt, Homo sapiens
  misc_RNA (1)...(19): siRNA sense strand
agaccaugcuacuauucuu

SEQ ID NO: 84505 - RNA, 19 nt, Homo sapiens
  misc_RNA (1)...(19): siRNA sense strand
ugugggagauaccuucugu

SEQ ID NO: 84506 - RNA, 19 nt, Homo sapiens
  misc_RNA (1)...(19): siRNA sense strand
gcuggccagucacuaguca

SEQ ID NO: 84507 - RNA, 19 nt, Homo sapiens
  misc_RNA (1)...(19): siRNA sense strand
ucagcucguucgacucuuc

SEQ ID NO: 84508 - RNA, 19 nt, Homo sapiens
  misc_RNA (1)...(19): siRNA sense strand
aaacuggagaugagcuauu

SEQ ID NO: 84509 - RNA, 19 nt, Homo sapiens
  misc_RNA (1)...(19): siRNA sense strand
cgcauacccagacucaaua

SEQ ID NO: 84510 - RNA, 19 nt, Homo sapiens
  misc_RNA (1)...(19): siRNA sense strand
ucuucaaccugguagaguu

SEQ ID NO: 84511 - RNA, 19 nt, Homo sapiens
  misc_RNA (1)...(19): siRNA sense strand
caagaccaugcuacuauuc

SEQ ID NO: 84512 - RNA, 19 nt, Homo sapiens
  misc_RNA (1)...(19): siRNA sense strand
gccaucugcugcaugaucu

SEQ ID NO: 84513 - RNA, 19 nt, Homo sapiens
  misc_RNA (1)...(19): siRNA sense strand
uaucaagacaggcaaacug

SEQ ID NO: 84514 - RNA, 19 nt, Homo sapiens
  misc_RNA (1)...(19): siRNA sense strand
gcauacccagacucaauau

SEQ ID NO: 84515 - RNA, 19 nt, Homo sapiens
  misc_RNA (1)...(19): siRNA sense strand
ggagcaguguaaggcauuc

SEQ ID NO: 84516 - RNA, 19 nt, Homo sapiens
  misc_RNA (1)...(19): siRNA sense strand
ccaaugccaucaauauccu

SEQ ID NO: 84517 - RNA, 19 nt, Homo sapiens
  misc_RNA (1)...(19): siRNA sense strand
accuacagcugccucacua

SEQ ID NO: 84518 - RNA, 19 nt, Homo sapiens
  misc_RNA (1)...(19): siRNA sense strand
cuugccaucugcugcauga

SEQ ID NO: 84519 - RNA, 19 nt, Homo sapiens
  misc_RNA (1)...(19): siRNA sense strand
gaccaugcuacuauucuuc

SEQ ID NO: 84520 - RNA, 19 nt, Homo sapiens
  misc_RNA (1)...(19): siRNA sense strand
uuucaccacuuugggauug

SEQ ID NO: 84521 - RNA, 19 nt, Homo sapiens
  misc_RNA (1)...(19): siRNA sense strand
cucacuaccucuccucaug

SEQ ID NO: 84522 - RNA, 19 nt, Homo sapiens
  misc_RNA (1)...(19): siRNA sense strand
uugggacacuucagcaaga

SEQ ID NO: 84523 - RNA, 19 nt, Homo sapiens
  misc_RNA (1)...(19): siRNA sense strand
caccuucuccauucgauau

SEQ ID NO: 84524 - RNA, 19 nt, Homo sapiens
  misc_RNA (1)...(19): siRNA sense strand
caauaucaagacaggcaaa

SEQ ID NO: 84525 - RNA, 19 nt, Homo sapiens
  misc_RNA (1)...(19): siRNA sense strand
cagacucaauaucaagaca

SEQ ID NO: 84526 - RNA, 19 nt, Homo sapiens
  misc_RNA (1)...(19): siRNA sense strand
guucaacuuccucuacuca

SEQ ID NO: 84527 - RNA, 19 nt, Homo sapiens
  misc_RNA (1)...(19): siRNA sense strand
auacccagacucaauauca

SEQ ID NO: 84528 - RNA, 19 nt, Homo sapiens
  misc_RNA (1)...(19): siRNA sense strand
agacugaagauggugaauu

SEQ ID NO: 84529 - RNA, 19 nt, Homo sapiens
  misc_RNA (1)...(19): siRNA sense strand
ggucuauuucaccaacuuu

SEQ ID NO: 84530 - RNA, 19 nt, Homo sapiens
  misc_RNA (1)...(19): siRNA sense strand
ucaacuuccucuacucacu

SEQ ID NO: 84531 - RNA, 19 nt, Homo sapiens
  misc_RNA (1)...(19): siRNA sense strand
gaggcuggccagucacuag

SEQ ID NO: 84532 - RNA, 19 nt, Homo sapiens
  misc_RNA (1)...(19): siRNA sense strand
caucuggacuugggaaucc

SEQ ID NO: 84533 - RNA, 19 nt, Homo sapiens
  misc_RNA (1)...(19): siRNA sense strand
acuugggaauccuguacua

SEQ ID NO: 84534 - RNA, 19 nt, Homo sapiens
  misc_RNA (1)...(19): siRNA sense strand
ggucaaagauguucauucu

SEQ ID NO: 84535 - RNA, 19 nt, Homo sapiens
  misc_RNA (1)...(19): siRNA sense strand
gcaguucccugaccagcua

SEQ ID NO: 84536 - RNA, 19 nt, Homo sapiens
  misc_RNA (1)...(19): siRNA sense strand
ccagacgugucacucauua

SEQ ID NO: 84537 - RNA, 19 nt, Homo sapiens
  misc_RNA (1)...(19): siRNA sense strand
ggaugucuuugugcuauua

SEQ ID NO: 84538 - RNA, 19 nt, Homo sapiens
  misc_RNA (1)...(19): siRNA sense strand
ggauugccaucgccuauga

SEQ ID NO: 84539 - RNA, 19 nt, Homo sapiens
  misc_RNA (1)...(19): siRNA sense strand
ggaggcgucuagaagagua

SEQ ID NO: 84540 - RNA, 19 nt, Homo sapiens
  misc_RNA (1)...(19): siRNA sense strand
cauggaagcuuggcucuga

SEQ ID NO: 84541 - RNA, 19 nt, Homo sapiens
  misc_RNA (1)...(19): siRNA sense strand
caacuucccugagguggau

SEQ ID NO: 84542 - RNA, 19 nt, Homo sapiens
  misc_RNA (1)...(19): siRNA sense strand
guagagagggccagagaug

SEQ ID NO: 84543 - RNA, 19 nt, Homo sapiens
  misc_RNA (1)...(19): siRNA sense strand
ccugcagccucauuccuua

SEQ ID NO: 84544 - RNA, 19 nt, Homo sapiens
  misc_RNA (1)...(19): siRNA sense strand
cucaggcucucauacauuu

SEQ ID NO: 84545 - RNA, 19 nt, Homo sapiens
  misc_RNA (1)...(19): siRNA sense strand
guauggugccuucuaugua

SEQ ID NO: 84546 - RNA, 19 nt, Homo sapiens
  misc_RNA (1)...(19): siRNA sense strand
cagggaagacucaggauga

SEQ ID NO: 84547 - RNA, 19 nt, Homo sapiens
  misc_RNA (1)...(19): siRNA sense strand
ugagguggaugucuuugug

SEQ ID NO: 84548 - RNA, 19 nt, Homo sapiens
  misc_RNA (1)...(19): siRNA sense strand
cugccaagcuugccaacuu

SEQ ID NO: 84549 - RNA, 19 nt, Homo sapiens
  misc_RNA (1)...(19): siRNA sense strand
gaccagcuauugggagaug

SEQ ID NO: 84550 - RNA, 19 nt, Homo sapiens
  misc_RNA (1)...(19): siRNA sense strand
caaaugaucauggaagcuu

SEQ ID NO: 84551 - RNA, 19 nt, Homo sapiens
  misc_RNA (1)...(19): siRNA sense strand
uauggugccuucuauguag

SEQ ID NO: 84552 - RNA, 19 nt, Homo sapiens
  misc_RNA (1)...(19): siRNA sense strand
gccuggaagucaucaaaug

SEQ ID NO: 84553 - RNA, 19 nt, Homo sapiens
  misc_RNA (1)...(19): siRNA sense strand
gcucaggcucucauacauu

SEQ ID NO: 84554 - RNA, 19 nt, Homo sapiens
  misc_RNA (1)...(19): siRNA sense strand
guggaugucuuugugcuau

SEQ ID NO: 84555 - RNA, 19 nt, Homo sapiens
  misc_RNA (1)...(19): siRNA sense strand
gagacgacagggucaaaga

SEQ ID NO: 84556 - RNA, 19 nt, Homo sapiens
  misc_RNA (1)...(19): siRNA sense strand
cacauuaugcggacuuauu

SEQ ID NO: 84557 - RNA, 19 nt, Homo sapiens
  misc_RNA (1)...(19): siRNA sense strand
agaguauggugccuucuau

SEQ ID NO: 84558 - RNA, 19 nt, Homo sapiens
  misc_RNA (1)...(19): siRNA sense strand
cccaugcccuggaggcuuu

SEQ ID NO: 84559 - RNA, 19 nt, Homo sapiens
  misc_RNA (1)...(19): siRNA sense strand
gcagccucauuccuuaguu

SEQ ID NO: 84560 - RNA, 19 nt, Homo sapiens
  misc_RNA (1)...(19): siRNA sense strand
gugaggcacuggcccacuu

SEQ ID NO: 84561 - RNA, 19 nt, Homo sapiens
  misc_RNA (1)...(19): siRNA sense strand
cgacagggucaaagauguu

SEQ ID NO: 84562 - RNA, 19 nt, Homo sapiens
  misc_RNA (1)...(19): siRNA sense strand
ggaccuggacggaguguac

SEQ ID NO: 84563 - RNA, 19 nt, Homo sapiens
  misc_RNA (1)...(19): siRNA sense strand
ggacugcuuacuccucuuc

SEQ ID NO: 84564 - RNA, 19 nt, Homo sapiens
  misc_RNA (1)...(19): siRNA sense strand
gacgacagggucaaagaug

SEQ ID NO: 84565 - RNA, 19 nt, Homo sapiens
  misc_RNA (1)...(19): siRNA sense strand
ccagggaggcgucuagaag

SEQ ID NO: 84566 - RNA, 19 nt, Homo sapiens
  misc_RNA (1)...(19): siRNA sense strand
agucagagcugugggaaac

SEQ ID NO: 84567 - RNA, 19 nt, Homo sapiens
  misc_RNA (1)...(19): siRNA sense strand
gaagacgauaucugguaga

SEQ ID NO: 84568 - RNA, 19 nt, Homo sapiens
  misc_RNA (1)...(19): siRNA sense strand
acgaagacgauaucuggua

SEQ ID NO: 84569 - RNA, 19 nt, Homo sapiens
  misc_RNA (1)...(19): siRNA sense strand
gcccugacccagaccuuga

SEQ ID NO: 84570 - RNA, 19 nt, Homo sapiens
  misc_RNA (1)...(19): siRNA sense strand
cagccucauuccuuaguuc

SEQ ID NO: 84571 - RNA, 19 nt, Homo sapiens
  misc_RNA (1)...(19): siRNA sense strand
ccaccugccuggaagucau

SEQ ID NO: 84572 - RNA, 19 nt, Homo sapiens
  misc_RNA (1)...(19): siRNA sense strand
cacacauuaugcggacuua

SEQ ID NO: 84573 - RNA, 19 nt, Homo sapiens
  misc_RNA (1)...(19): siRNA sense strand
gcaagcguagcuauguguu

SEQ ID NO: 84574 - RNA, 19 nt, Homo sapiens
  misc_RNA (1)...(19): siRNA sense strand
cagggaggcgucuagaaga

SEQ ID NO: 84575 - RNA, 19 nt, Homo sapiens
  misc_RNA (1)...(19): siRNA sense strand
acauuaugcggacuuauug

SEQ ID NO: 84576 - RNA, 19 nt, Homo sapiens
  misc_RNA (1)...(19): siRNA sense strand
ucccugagguggaugucuu

SEQ ID NO: 84577 - RNA, 19 nt, Homo sapiens
  misc_RNA (1)...(19): siRNA sense strand
aagaguauggugccuucua

SEQ ID NO: 84578 - RNA, 19 nt, Homo sapiens
  misc_RNA (1)...(19): siRNA sense strand
gaguggaagacgagggauu

SEQ ID NO: 84579 - RNA, 19 nt, Homo sapiens
  misc_RNA (1)...(19): siRNA sense strand
gugaacgaguugccuugca

SEQ ID NO: 84580 - RNA, 19 nt, Homo sapiens
  misc_RNA (1)...(19): siRNA sense strand
caagcguagcuauguguug

SEQ ID NO: 84581 - RNA, 19 nt, Homo sapiens
  misc_RNA (1)...(19): siRNA sense strand
ggacggcuaagggcacgaa

SEQ ID NO: 84582 - RNA, 19 nt, Homo sapiens
  misc_RNA (1)...(19): siRNA sense strand
acgacagggucaaagaugu

SEQ ID NO: 84583 - RNA, 19 nt, Homo sapiens
  misc_RNA (1)...(19): siRNA sense strand
ccuuggagcucugugucaa

SEQ ID NO: 84584 - RNA, 19 nt, Homo sapiens
  misc_RNA (1)...(19): siRNA sense strand
uaagggcacgaagacgaua

SEQ ID NO: 84585 - RNA, 19 nt, Homo sapiens
  misc_RNA (1)...(19): siRNA sense strand
gaacuguccucucuacauu

SEQ ID NO: 84586 - RNA, 19 nt, Homo sapiens
  misc_RNA (1)...(19): siRNA sense strand
aagaauagcuguaggauca

SEQ ID NO: 84587 - RNA, 19 nt, Homo sapiens
  misc_RNA (1)...(19): siRNA sense strand
gcaccaccaugauuauuga

SEQ ID NO: 84588 - RNA, 19 nt, Homo sapiens
  misc_RNA (1)...(19): siRNA sense strand
gaggcaaagugguauauga

SEQ ID NO: 84589 - RNA, 19 nt, Homo sapiens
  misc_RNA (1)...(19): siRNA sense strand
ggaggcaccaccaugauua

SEQ ID NO: 84590 - RNA, 19 nt, Homo sapiens
  misc_RNA (1)...(19): siRNA sense strand
aaagguggcucccucauug

SEQ ID NO: 84591 - RNA, 19 nt, Homo sapiens
  misc_RNA (1)...(19): siRNA sense strand
ucaugaaucuguuggcuaa

SEQ ID NO: 84592 - RNA, 19 nt, Homo sapiens
  misc_RNA (1)...(19): siRNA sense strand
ccaccaugauuauugauuu

SEQ ID NO: 84593 - RNA, 19 nt, Homo sapiens
  misc_RNA (1)...(19): siRNA sense strand
gaaaaccauuugcugaaua

SEQ ID NO: 84594 - RNA, 19 nt, Homo sapiens
  misc_RNA (1)...(19): siRNA sense strand
ggagugaccagguuaaaga

SEQ ID NO: 84595 - RNA, 19 nt, Homo sapiens
  misc_RNA (1)...(19): siRNA sense strand
gcacagauggcacucacua

SEQ ID NO: 84596 - RNA, 19 nt, Homo sapiens
  misc_RNA (1)...(19): siRNA sense strand
gcugagagccaucaccaua

SEQ ID NO: 84597 - RNA, 19 nt, Homo sapiens
  misc_RNA (1)...(19): siRNA sense strand
gcaguuaccagcacaaaug

SEQ ID NO: 84598 - RNA, 19 nt, Homo sapiens
  misc_RNA (1)...(19): siRNA sense strand
gaaagguggcucccucauu

SEQ ID NO: 84599 - RNA, 19 nt, Homo sapiens
  misc_RNA (1)...(19): siRNA sense strand
caaggacuaucucagcaaa

SEQ ID NO: 84600 - RNA, 19 nt, Homo sapiens
  misc_RNA (1)...(19): siRNA sense strand
gagcaagucugcagcuaag

SEQ ID NO: 84601 - RNA, 19 nt, Homo sapiens
  misc_RNA (1)...(19): siRNA sense strand
ggcaggagaugggaaguuu

SEQ ID NO: 84602 - RNA, 19 nt, Homo sapiens
  misc_RNA (1)...(19): siRNA sense strand
gauuauugauuucgccauu

SEQ ID NO: 84603 - RNA, 19 nt, Homo sapiens
  misc_RNA (1)...(19): siRNA sense strand
ggagaagucgccacacuga

SEQ ID NO: 84604 - RNA, 19 nt, Homo sapiens
  misc_RNA (1)...(19): siRNA sense strand
caccaaggcugcucucuca

SEQ ID NO: 84605 - RNA, 19 nt, Homo sapiens
  misc_RNA (1)...(19): siRNA sense strand
caacagggacugauaacug

SEQ ID NO: 84606 - RNA, 19 nt, Homo sapiens
  misc_RNA (1)...(19): siRNA sense strand
cagcacaaaugcagccaaa

SEQ ID NO: 84607 - RNA, 19 nt, Homo sapiens
  misc_RNA (1)...(19): siRNA sense strand
ggacugauaacugcacuuu

SEQ ID NO: 84608 - RNA, 19 nt, Homo sapiens
  misc_RNA (1)...(19): siRNA sense strand
auaaagaucuguacauggu

SEQ ID NO: 84609 - RNA, 19 nt, Homo sapiens
  misc_RNA (1)...(19): siRNA sense strand
aaacagauuuguggcaguu

SEQ ID NO: 84610 - RNA, 19 nt, Homo sapiens
  misc_RNA (1)...(19): siRNA sense strand
gaaaauggagacuuaauug

SEQ ID NO: 84611 - RNA, 19 nt, Homo sapiens
  misc_RNA (1)...(19): siRNA sense strand
ggagaugggaaguuuauuc

SEQ ID NO: 84612 - RNA, 19 nt, Homo sapiens
  misc_RNA (1)...(19): siRNA sense strand
ccacaacagggacugauaa

SEQ ID NO: 84613 - RNA, 19 nt, Homo sapiens
  misc_RNA (1)...(19): siRNA sense strand
ggcacucacuacuggaaua

SEQ ID NO: 84614 - RNA, 19 nt, Homo sapiens
  misc_RNA (1)...(19): siRNA sense strand
gcugugaacuguccucucu

SEQ ID NO: 84615 - RNA, 19 nt, Homo sapiens
  misc_RNA (1)...(19): siRNA sense strand
gcagagggagcaaagaaga

SEQ ID NO: 84616 - RNA, 19 nt, Homo sapiens
  misc_RNA (1)...(19): siRNA sense strand
acugauaacugcacuuuca

SEQ ID NO: 84617 - RNA, 19 nt, Homo sapiens
  misc_RNA (1)...(19): siRNA sense strand
gaccggacuugcacaccua

SEQ ID NO: 84618 - RNA, 19 nt, Homo sapiens
  misc_RNA (1)...(19): siRNA sense strand
agauaaagguguuaacucu

SEQ ID NO: 84619 - RNA, 19 nt, Homo sapiens
  misc_RNA (1)...(19): siRNA sense strand
gaauagcuguaggaucaga

SEQ ID NO: 84620 - RNA, 19 nt, Homo sapiens
  misc_RNA (1)...(19): siRNA sense strand
ggugaaugguguugaagau

SEQ ID NO: 84621 - RNA, 19 nt, Homo sapiens
  misc_RNA (1)...(19): siRNA sense strand
agaaagcucuugggaagga

SEQ ID NO: 84622 - RNA, 19 nt, Homo sapiens
  misc_RNA (1)...(19): siRNA sense strand
cuauaaagaucuguacaug

SEQ ID NO: 84623 - RNA, 19 nt, Homo sapiens
  misc_RNA (1)...(19): siRNA sense strand
ugaaucuguuggcuaauga

SEQ ID NO: 84624 - RNA, 19 nt, Homo sapiens
  misc_RNA (1)...(19): siRNA sense strand
gaagguggucuauggugaa

SEQ ID NO: 84625 - RNA, 19 nt, Homo sapiens
  misc_RNA (1)...(19): siRNA sense strand
gugaccagguuaaagaaga

SEQ ID NO: 84626 - RNA, 19 nt, Homo sapiens
  misc_RNA (1)...(19): siRNA sense strand
ugucauggguccaccuuug

SEQ ID NO: 84627 - RNA, 19 nt, Homo sapiens
  misc_RNA (1)...(19): siRNA sense strand
ucaucaggcuguuaacuuc

SEQ ID NO: 84628 - RNA, 19 nt, Homo sapiens
  misc_RNA (1)...(19): siRNA sense strand
gcaggagaugggaaguuua

SEQ ID NO: 84629 - RNA, 19 nt, Homo sapiens
  misc_RNA (1)...(19): siRNA sense strand
gcacucacuacuggaauaa

SEQ ID NO: 84630 - RNA, 19 nt, Homo sapiens
  misc_RNA (1)...(19): siRNA sense strand
ugaccagguuaaagaagaa

SEQ ID NO: 84631 - RNA, 19 nt, Homo sapiens
  misc_RNA (1)...(19): siRNA sense strand
agaagucgccacacugaaa

SEQ ID NO: 84632 - RNA, 19 nt, Homo sapiens
  misc_RNA (1)...(19): siRNA sense strand
gaugcugacauuguuauuu

SEQ ID NO: 84633 - RNA, 19 nt, Homo sapiens
  misc_RNA (1)...(19): siRNA sense strand
gaagucgccacacugaaau

SEQ ID NO: 84634 - RNA, 19 nt, Homo sapiens
  misc_RNA (1)...(19): siRNA sense strand
ggaaaauggagacuuaauu

SEQ ID NO: 84635 - RNA, 19 nt, Homo sapiens
  misc_RNA (1)...(19): siRNA sense strand
caagaggcaaagugguaua

SEQ ID NO: 84636 - RNA, 19 nt, Homo sapiens
  misc_RNA (1)...(19): siRNA sense strand
augcugacauuguuauuug

SEQ ID NO: 84637 - RNA, 19 nt, Homo sapiens
  misc_RNA (1)...(19): siRNA sense strand
acacccgacuuccucauga

SEQ ID NO: 84638 - RNA, 19 nt, Homo sapiens
  misc_RNA (1)...(19): siRNA sense strand
cuacuggaauaaagaaugg

SEQ ID NO: 84639 - RNA, 19 nt, Homo sapiens
  misc_RNA (1)...(19): siRNA sense strand
gauaaagguguuaacucuu

SEQ ID NO: 84640 - RNA, 19 nt, Homo sapiens
  misc_RNA (1)...(19): siRNA sense strand
gauaacugcacuuucaaca

SEQ ID NO: 84641 - RNA, 19 nt, Homo sapiens
  misc_RNA (1)...(19): siRNA sense strand
gauguuggcucuggggaua

SEQ ID NO: 84642 - RNA, 19 nt, Homo sapiens
  misc_RNA (1)...(19): siRNA sense strand
gagaugggaagguggucua

SEQ ID NO: 84643 - RNA, 19 nt, Homo sapiens
  misc_RNA (1)...(19): siRNA sense strand
gaaguuuauuccucgaaaa

SEQ ID NO: 84644 - RNA, 19 nt, Homo sapiens
  misc_RNA (1)...(19): siRNA sense strand
ucaggaggcaccaccauga

SEQ ID NO: 84645 - RNA, 19 nt, Homo sapiens
  misc_RNA (1)...(19): siRNA sense strand
gcacaaaugcagccaaaau

SEQ ID NO: 84646 - RNA, 19 nt, Homo sapiens
  misc_RNA (1)...(19): siRNA sense strand
caagauguuuauggccuau

SEQ ID NO: 84647 - RNA, 19 nt, Homo sapiens
  misc_RNA (1)...(19): siRNA sense strand
caggagaugggaaguuuau

SEQ ID NO: 84648 - RNA, 19 nt, Homo sapiens
  misc_RNA (1)...(19): siRNA sense strand
caccaugauuauugauuuc

SEQ ID NO: 84649 - RNA, 19 nt, Homo sapiens
  misc_RNA (1)...(19): siRNA sense strand
ugaaauccagagugacaaa

SEQ ID NO: 84650 - RNA, 19 nt, Homo sapiens
  misc_RNA (1)...(19): siRNA sense strand
ggaagaauagcuguaggau

SEQ ID NO: 84651 - RNA, 19 nt, Homo sapiens
  misc_RNA (1)...(19): siRNA sense strand
uggcgaagcugggcugauc

SEQ ID NO: 84652 - RNA, 19 nt, Homo sapiens
  misc_RNA (1)...(19): siRNA sense strand
ugagcaagucugcagcuaa

SEQ ID NO: 84653 - RNA, 19 nt, Homo sapiens
  misc_RNA (1)...(19): siRNA sense strand
ccaaaaggcacaaggacua

SEQ ID NO: 84654 - RNA, 19 nt, Homo sapiens
  misc_RNA (1)...(19): siRNA sense strand
gugguaaaauggaugaaaa

SEQ ID NO: 84655 - RNA, 19 nt, Homo sapiens
  misc_RNA (1)...(19): siRNA sense strand
caagauaaagguguuaacu

SEQ ID NO: 84656 - RNA, 19 nt, Homo sapiens
  misc_RNA (1)...(19): siRNA sense strand
ccacagcagggaccaggaa

SEQ ID NO: 84657 - RNA, 19 nt, Homo sapiens
  misc_RNA (1)...(19): siRNA sense strand
gagaagucgccacacugaa

SEQ ID NO: 84658 - RNA, 19 nt, Homo sapiens
  misc_RNA (1)...(19): siRNA sense strand
ggcaccaccaugauuauug

SEQ ID NO: 84659 - RNA, 19 nt, Homo sapiens
  misc_RNA (1)...(19): siRNA sense strand
gcaagucugcagcuaaggu

SEQ ID NO: 84660 - RNA, 19 nt, Homo sapiens
  misc_RNA (1)...(19): siRNA sense strand
ucacuacuggaauaaagaa

SEQ ID NO: 84661 - RNA, 19 nt, Homo sapiens
  misc_RNA (1)...(19): siRNA sense strand
gccggaguguucaguguca

SEQ ID NO: 84662 - RNA, 19 nt, Homo sapiens
  misc_RNA (1)...(19): siRNA sense strand
ucuguuggcuaaugaugau

SEQ ID NO: 84663 - RNA, 19 nt, Homo sapiens
  misc_RNA (1)...(19): siRNA sense strand
aaauggagacuuaauugca

SEQ ID NO: 84664 - RNA, 19 nt, Homo sapiens
  misc_RNA (1)...(19): siRNA sense strand
cgacuacagccuucaugug

SEQ ID NO: 84665 - RNA, 19 nt, Homo sapiens
  misc_RNA (1)...(19): siRNA sense strand
gucugcagcuaaggugaua

SEQ ID NO: 84666 - RNA, 19 nt, Homo sapiens
  misc_RNA (1)...(19): siRNA sense strand
gagugaccagguuaaagaa

SEQ ID NO: 84667 - RNA, 19 nt, Homo sapiens
  misc_RNA (1)...(19): siRNA sense strand
gagcgugcacccuauaagg

SEQ ID NO: 84668 - RNA, 19 nt, Homo sapiens
  misc_RNA (1)...(19): siRNA sense strand
gaggcaccaccaugauuau

SEQ ID NO: 84669 - RNA, 19 nt, Homo sapiens
  misc_RNA (1)...(19): siRNA sense strand
aaaguuugcugcgacuaca

SEQ ID NO: 84670 - RNA, 19 nt, Homo sapiens
  misc_RNA (1)...(19): siRNA sense strand
auaugaagccggaguguuc

SEQ ID NO: 84671 - RNA, 19 nt, Homo sapiens
  misc_RNA (1)...(19): siRNA sense strand
acucacuacuggaauaaag

SEQ ID NO: 84672 - RNA, 19 nt, Homo sapiens
  misc_RNA (1)...(19): siRNA sense strand
gaaagcucuugggaaggau

SEQ ID NO: 84673 - RNA, 19 nt, Homo sapiens
  misc_RNA (1)...(19): siRNA sense strand
cacccgacuuccucaugaa

SEQ ID NO: 84674 - RNA, 19 nt, Homo sapiens
  misc_RNA (1)...(19): siRNA sense strand
ugaacuguccucucuacau

SEQ ID NO: 84675 - RNA, 19 nt, Homo sapiens
  misc_RNA (1)...(19): siRNA sense strand
ggaggcaucgacacacaca

SEQ ID NO: 84676 - RNA, 19 nt, Homo sapiens
  misc_RNA (1)...(19): siRNA sense strand
aaaggaagaauagcuguag

SEQ ID NO: 84677 - RNA, 19 nt, Homo sapiens
  misc_RNA (1)...(19): siRNA sense strand
ggaaggaugauuuuaccaa

SEQ ID NO: 84678 - RNA, 19 nt, Homo sapiens
  misc_RNA (1)...(19): siRNA sense strand
ugagagccaucaccauagc

SEQ ID NO: 84679 - RNA, 19 nt, Homo sapiens
  misc_RNA (1)...(19): siRNA sense strand
cagcagggaccaggaaaca

SEQ ID NO: 84680 - RNA, 19 nt, Homo sapiens
  misc_RNA (1)...(19): siRNA sense strand
cgaaaaccauuugcugaau

SEQ ID NO: 84681 - RNA, 19 nt, Homo sapiens
  misc_RNA (1)...(19): siRNA sense strand
aggcaaagugguauaugaa

SEQ ID NO: 84682 - RNA, 19 nt, Homo sapiens
  misc_RNA (1)...(19): siRNA sense strand
uucaagaggcaaaguggua

SEQ ID NO: 84683 - RNA, 19 nt, Homo sapiens
  misc_RNA (1)...(19): siRNA sense strand
ugugcaagauaaagguguu

SEQ ID NO: 84684 - RNA, 19 nt, Homo sapiens
  misc_RNA (1)...(19): siRNA sense strand
ccggaggcaucgacacaca

SEQ ID NO: 84685 - RNA, 19 nt, Homo sapiens
  misc_RNA (1)...(19): siRNA sense strand
gaacaaggccacugaguau

SEQ ID NO: 84686 - RNA, 19 nt, Homo sapiens
  misc_RNA (1)...(19): siRNA sense strand
ggagagggcuuugauguca

SEQ ID NO: 84687 - RNA, 19 nt, Homo sapiens
  misc_RNA (1)...(19): siRNA sense strand
gcacaagccuaacaucuac

SEQ ID NO: 84688 - RNA, 19 nt, Homo sapiens
  misc_RNA (1)...(19): siRNA sense strand
agaaggagcuggagucugu

SEQ ID NO: 84689 - RNA, 19 nt, Homo sapiens
  misc_RNA (1)...(19): siRNA sense strand
auacaaaggugccaacauc

SEQ ID NO: 84690 - RNA, 19 nt, Homo sapiens
  misc_RNA (1)...(19): siRNA sense strand
ucaccacucugacguguau

SEQ ID NO: 84691 - RNA, 19 nt, Homo sapiens
  misc_RNA (1)...(19): siRNA sense strand
ucaacaagcacaagccuaa

SEQ ID NO: 84692 - RNA, 19 nt, Homo sapiens
  misc_RNA (1)...(19): siRNA sense strand
ggugguggcaucuccuuua

SEQ ID NO: 84693 - RNA, 19 nt, Homo sapiens
  misc_RNA (1)...(19): siRNA sense strand
ggacagaggccagacuuca

SEQ ID NO: 84694 - RNA, 19 nt, Homo sapiens
  misc_RNA (1)...(19): siRNA sense strand
gaauacaagaucuucaaug

SEQ ID NO: 84695 - RNA, 19 nt, Homo sapiens
  misc_RNA (1)...(19): siRNA sense strand
gugguggcaucuccuuuaa

SEQ ID NO: 84696 - RNA, 19 nt, Homo sapiens
  misc_RNA (1)...(19): siRNA sense strand
agaacaaggccacugagua

SEQ ID NO: 84697 - RNA, 19 nt, Homo sapiens
  misc_RNA (1)...(19): siRNA sense strand
gguggcaucuccuuuaacu

SEQ ID NO: 84698 - RNA, 19 nt, Homo sapiens
  misc_RNA (1)...(19): siRNA sense strand
gcccugaccugcaucuaca

SEQ ID NO: 84699 - RNA, 19 nt, Homo sapiens
  misc_RNA (1)...(19): siRNA sense strand
gcuuugaugucaugaaguc

SEQ ID NO: 84700 - RNA, 19 nt, Homo sapiens
  misc_RNA (1)...(19): siRNA sense strand
aauacaagaucuucaaugc

SEQ ID NO: 84701 - RNA, 19 nt, Homo sapiens
  misc_RNA (1)...(19): siRNA sense strand
gcacgaauacaagaucuuc

SEQ ID NO: 84702 - RNA, 19 nt, Homo sapiens
  misc_RNA (1)...(19): siRNA sense strand
guguggcgcugauuggauu

SEQ ID NO: 84703 - RNA, 19 nt, Homo sapiens
  misc_RNA (1)...(19): siRNA sense strand
gggcuuugaugucaugaag

SEQ ID NO: 84704 - RNA, 19 nt, Homo sapiens
  misc_RNA (1)...(19): siRNA sense strand
gcgaggcagcguccuauga

SEQ ID NO: 84705 - RNA, 19 nt, Homo sapiens
  misc_RNA (1)...(19): siRNA sense strand
ugcccugccuguauguuua

SEQ ID NO: 84706 - RNA, 19 nt, Homo sapiens
  misc_RNA (1)...(19): siRNA sense strand
gguaaguccacauucuuga

SEQ ID NO: 84707 - RNA, 19 nt, Homo sapiens
  misc_RNA (1)...(19): siRNA sense strand
uggagaugcuuugggagua

SEQ ID NO: 84708 - RNA, 19 nt, Homo sapiens
  misc_RNA (1)...(19): siRNA sense strand
ggagaugcuuugggaguac

SEQ ID NO: 84709 - RNA, 19 nt, Homo sapiens
  misc_RNA (1)...(19): siRNA sense strand
ucacagacgccaucauucu

SEQ ID NO: 84710 - RNA, 19 nt, Homo sapiens
  misc_RNA (1)...(19): siRNA sense strand
ugaaggcgcagcccaagga

SEQ ID NO: 84711 - RNA, 19 nt, Homo sapiens
  misc_RNA (1)...(19): siRNA sense strand
ugaccugcaucuacaccaa

SEQ ID NO: 84712 - RNA, 19 nt, Homo sapiens
  misc_RNA (1)...(19): siRNA sense strand
caagaucuucaaugcagaa

SEQ ID NO: 84713 - RNA, 19 nt, Homo sapiens
  misc_RNA (1)...(19): siRNA sense strand
agaagaacaaggccacuga

SEQ ID NO: 84714 - RNA, 19 nt, Homo sapiens
  misc_RNA (1)...(19): siRNA sense strand
ggguaaguccacauucuug

SEQ ID NO: 84715 - RNA, 19 nt, Homo sapiens
  misc_RNA (1)...(19): siRNA sense strand
cggacgaguucaucgaugu

SEQ ID NO: 84716 - RNA, 19 nt, Homo sapiens
  misc_RNA (1)...(19): siRNA sense strand
gaagcugaaccuggacuau

SEQ ID NO: 84717 - RNA, 19 nt, Homo sapiens
  misc_RNA (1)...(19): siRNA sense strand
cuucacagacgccaucauu

SEQ ID NO: 84718 - RNA, 19 nt, Homo sapiens
  misc_RNA (1)...(19): siRNA sense strand
gcauccgccucaacaagca

SEQ ID NO: 84719 - RNA, 19 nt, Homo sapiens
  misc_RNA (1)...(19): siRNA sense strand
gaggacagaggccagacuu

SEQ ID NO: 84720 - RNA, 19 nt, Homo sapiens
  misc_RNA (1)...(19): siRNA sense strand
acaaggccacugaguauca

SEQ ID NO: 84721 - RNA, 19 nt, Homo sapiens
  misc_RNA (1)...(19): siRNA sense strand
cuacuucaagcccaagaaa

SEQ ID NO: 84722 - RNA, 19 nt, Homo sapiens
  misc_RNA (1)...(19): siRNA sense strand
gcuaagcucgccaaguauc

SEQ ID NO: 84723 - RNA, 19 nt, Homo sapiens
  misc_RNA (1)...(19): siRNA sense strand
gagagggcuuugaugucau

SEQ ID NO: 84724 - RNA, 19 nt, Homo sapiens
  misc_RNA (1)...(19): siRNA sense strand
gaggcagcguccuaugagu

SEQ ID NO: 84725 - RNA, 19 nt, Homo sapiens
  misc_RNA (1)...(19): siRNA sense strand
cggcugacgucaucaucau

SEQ ID NO: 84726 - RNA, 19 nt, Homo sapiens
  misc_RNA (1)...(19): siRNA sense strand
ggucauugaauacaaaggu

SEQ ID NO: 84727 - RNA, 19 nt, Homo sapiens
  misc_RNA (1)...(19): siRNA sense strand
uccuuuaacucgacaguca

SEQ ID NO: 84728 - RNA, 19 nt, Homo sapiens
  misc_RNA (1)...(19): siRNA sense strand
agagggcuuugaugucaug

SEQ ID NO: 84729 - RNA, 19 nt, Homo sapiens
  misc_RNA (1)...(19): siRNA sense strand
gaaggcgcagcccaaggaa

SEQ ID NO: 84730 - RNA, 19 nt, Homo sapiens
  misc_RNA (1)...(19): siRNA sense strand
gucaugaagucgggugaug

SEQ ID NO: 84731 - RNA, 19 nt, Homo sapiens
  misc_RNA (1)...(19): siRNA sense strand
cgccaucauucuccggaaa

SEQ ID NO: 84732 - RNA, 19 nt, Homo sapiens
  misc_RNA (1)...(19): siRNA sense strand
caaggccacugaguaucau

SEQ ID NO: 84733 - RNA, 19 nt, Homo sapiens
  misc_RNA (1)...(19): siRNA sense strand
cagcucauccugcacgaau

SEQ ID NO: 84734 - RNA, 19 nt, Homo sapiens
  misc_RNA (1)...(19): siRNA sense strand
agccuaacaucuacuucaa

SEQ ID NO: 84735 - RNA, 19 nt, Homo sapiens
  misc_RNA (1)...(19): siRNA sense strand
gcaucuacaccaagaagag

SEQ ID NO: 84736 - RNA, 19 nt, Homo sapiens
  misc_RNA (1)...(19): siRNA sense strand
cgaauacaagaucuucaau

SEQ ID NO: 84737 - RNA, 19 nt, Homo sapiens
  misc_RNA (1)...(19): siRNA sense strand
gaauacaaaggugccaaca

SEQ ID NO: 84738 - RNA, 19 nt, Homo sapiens
  misc_RNA (1)...(19): siRNA sense strand
gcugcggcaugaagcugaa

SEQ ID NO: 84739 - RNA, 19 nt, Homo sapiens
  misc_RNA (1)...(19): siRNA sense strand
ggacgaguucaucgaugug

SEQ ID NO: 84740 - RNA, 19 nt, Homo sapiens
  misc_RNA (1)...(19): siRNA sense strand
gcucggacacagaagaaca

SEQ ID NO: 84741 - RNA, 19 nt, Homo sapiens
  misc_RNA (1)...(19): siRNA sense strand
gggcauccgccucaacaag

SEQ ID NO: 84742 - RNA, 19 nt, Homo sapiens
  misc_RNA (1)...(19): siRNA sense strand
ugauuggauuucccucugu

SEQ ID NO: 84743 - RNA, 19 nt, Homo sapiens
  misc_RNA (1)...(19): siRNA sense strand
aaggagagggcuuugaugu

SEQ ID NO: 84744 - RNA, 19 nt, Homo sapiens
  misc_RNA (1)...(19): siRNA sense strand
gaagugcuuuuccgagaag

SEQ ID NO: 84745 - RNA, 19 nt, Homo sapiens
  misc_RNA (1)...(19): siRNA sense strand
agcacaagccuaacaucua

SEQ ID NO: 84746 - RNA, 19 nt, Homo sapiens
  misc_RNA (1)...(19): siRNA sense strand
ggagaaggagcuggagucu

SEQ ID NO: 84747 - RNA, 19 nt, Homo sapiens
  misc_RNA (1)...(19): siRNA sense strand
ucgaccagaucuccaugga

SEQ ID NO: 84748 - RNA, 19 nt, Homo sapiens
  misc_RNA (1)...(19): siRNA sense strand
uccacauucuugagucuga

SEQ ID NO: 84749 - RNA, 19 nt, Homo sapiens
  misc_RNA (1)...(19): siRNA sense strand
cuaagaagcugacuaaugc

SEQ ID NO: 84750 - RNA, 19 nt, Homo sapiens
  misc_RNA (1)...(19): siRNA sense strand
gcuaagaagcugacuaaug

SEQ ID NO: 84751 - RNA, 19 nt, Homo sapiens
  misc_RNA (1)...(19): siRNA sense strand
ccacucaacuuggcucaca

SEQ ID NO: 84752 - RNA, 19 nt, Homo sapiens
  misc_RNA (1)...(19): siRNA sense strand
cugcuaagaagcugacuaa

SEQ ID NO: 84753 - RNA, 19 nt, Homo sapiens
  misc_RNA (1)...(19): siRNA sense strand
gcaugaacgacacccuguu

SEQ ID NO: 84754 - RNA, 19 nt, Homo sapiens
  misc_RNA (1)...(19): siRNA sense strand
ggaaguccuuuuauuacca

SEQ ID NO: 84755 - RNA, 19 nt, Homo sapiens
  misc_RNA (1)...(19): siRNA sense strand
cuaagaagcugacuaaugc

SEQ ID NO: 84756 - RNA, 19 nt, Homo sapiens
  misc_RNA (1)...(19): siRNA sense strand
gcuaagaagcugacuaaug

SEQ ID NO: 84757 - RNA, 19 nt, Homo sapiens
  misc_RNA (1)...(19): siRNA sense strand
ccacucaacuuggcucaca

SEQ ID NO: 84758 - RNA, 19 nt, Homo sapiens
  misc_RNA (1)...(19): siRNA sense strand
cugcuaagaagcugacuaa

SEQ ID NO: 84759 - RNA, 19 nt, Homo sapiens
  misc_RNA (1)...(19): siRNA sense strand
gcaugaacgacacccuguu

SEQ ID NO: 84760 - RNA, 19 nt, Homo sapiens
  misc_RNA (1)...(19): siRNA sense strand
ggaaguccuuuuauuacca

SEQ ID NO: 84761 - RNA, 19 nt, Homo sapiens
  misc_RNA (1)...(19): siRNA sense strand
cuaagaagcugacuaaugc

SEQ ID NO: 84762 - RNA, 19 nt, Homo sapiens
  misc_RNA (1)...(19): siRNA sense strand
gcuaagaagcugacuaaug

SEQ ID NO: 84763 - RNA, 19 nt, Homo sapiens
  misc_RNA (1)...(19): siRNA sense strand
ccacucaacuuggcucaca

SEQ ID NO: 84764 - RNA, 19 nt, Homo sapiens
  misc_RNA (1)...(19): siRNA sense strand
cugcuaagaagcugacuaa

SEQ ID NO: 84765 - RNA, 19 nt, Homo sapiens
  misc_RNA (1)...(19): siRNA sense strand
gcaugaacgacacccuguu

SEQ ID NO: 84766 - RNA, 19 nt, Homo sapiens
  misc_RNA (1)...(19): siRNA sense strand
ggaaguccuuuuauuacca

SEQ ID NO: 84767 - RNA, 19 nt, Homo sapiens
  misc_RNA (1)...(19): siRNA sense strand
cuaagaagcugacuaaugc

SEQ ID NO: 84768 - RNA, 19 nt, Homo sapiens
  misc_RNA (1)...(19): siRNA sense strand
gcuaagaagcugacuaaug

SEQ ID NO: 84769 - RNA, 19 nt, Homo sapiens
  misc_RNA (1)...(19): siRNA sense strand
ccacucaacuuggcucaca

SEQ ID NO: 84770 - RNA, 19 nt, Homo sapiens
  misc_RNA (1)...(19): siRNA sense strand
cugcuaagaagcugacuaa

SEQ ID NO: 84771 - RNA, 19 nt, Homo sapiens
  misc_RNA (1)...(19): siRNA sense strand
gcaugaacgacacccuguu

SEQ ID NO: 84772 - RNA, 19 nt, Homo sapiens
  misc_RNA (1)...(19): siRNA sense strand
ggaaguccuuuuauuacca

SEQ ID NO: 84773 - RNA, 19 nt, Homo sapiens
  misc_RNA (1)...(19): siRNA sense strand
cuaagaagcugacuaaugc

SEQ ID NO: 84774 - RNA, 19 nt, Homo sapiens
  misc_RNA (1)...(19): siRNA sense strand
gcuaagaagcugacuaaug

SEQ ID NO: 84775 - RNA, 19 nt, Homo sapiens
  misc_RNA (1)...(19): siRNA sense strand
ccacucaacuuggcucaca

SEQ ID NO: 84776 - RNA, 19 nt, Homo sapiens
  misc_RNA (1)...(19): siRNA sense strand
cugcuaagaagcugacuaa

SEQ ID NO: 84777 - RNA, 19 nt, Homo sapiens
  misc_RNA (1)...(19): siRNA sense strand
gcaugaacgacacccuguu

SEQ ID NO: 84778 - RNA, 19 nt, Homo sapiens
  misc_RNA (1)...(19): siRNA sense strand
ggaaguccuuuuauuacca

SEQ ID NO: 84779 - RNA, 19 nt, Homo sapiens
  misc_RNA (1)...(19): siRNA sense strand
cuaagaagcugacuaaugc

SEQ ID NO: 84780 - RNA, 19 nt, Homo sapiens
  misc_RNA (1)...(19): siRNA sense strand
gcuaagaagcugacuaaug

SEQ ID NO: 84781 - RNA, 19 nt, Homo sapiens
  misc_RNA (1)...(19): siRNA sense strand
ccacucaacuuggcucaca

SEQ ID NO: 84782 - RNA, 19 nt, Homo sapiens
  misc_RNA (1)...(19): siRNA sense strand
cugcuaagaagcugacuaa

SEQ ID NO: 84783 - RNA, 19 nt, Homo sapiens
  misc_RNA (1)...(19): siRNA sense strand
gcaugaacgacacccuguu

SEQ ID NO: 84784 - RNA, 19 nt, Homo sapiens
  misc_RNA (1)...(19): siRNA sense strand
ggaaguccuuuuauuacca

SEQ ID NO: 84785 - RNA, 19 nt, Homo sapiens
  misc_RNA (1)...(19): siRNA sense strand
ccacucaacuuggcucaca

SEQ ID NO: 84786 - RNA, 19 nt, Homo sapiens
  misc_RNA (1)...(19): siRNA sense strand
gcaugaacgacacccuguu

SEQ ID NO: 84787 - RNA, 19 nt, Homo sapiens
  misc_RNA (1)...(19): siRNA sense strand
ggaaguccuuuuauuacca

SEQ ID NO: 84788 - RNA, 19 nt, Homo sapiens
  misc_RNA (1)...(19): siRNA sense strand
ccacucaacuuggcucaca

SEQ ID NO: 84789 - RNA, 19 nt, Homo sapiens
  misc_RNA (1)...(19): siRNA sense strand
gcaugaacgacacccuguu

SEQ ID NO: 84790 - RNA, 19 nt, Homo sapiens
  misc_RNA (1)...(19): siRNA sense strand
ggaaguccuuuuauuacca

SEQ ID NO: 84791 - RNA, 19 nt, Homo sapiens
  misc_RNA (1)...(19): siRNA sense strand
ggaguagaaucaaguuaua

SEQ ID NO: 84792 - RNA, 19 nt, Homo sapiens
  misc_RNA (1)...(19): siRNA sense strand
aaagagaaccuaccaauuu

SEQ ID NO: 84793 - RNA, 19 nt, Homo sapiens
  misc_RNA (1)...(19): siRNA sense strand
ggaauggaccgaauaguaa

SEQ ID NO: 84794 - RNA, 19 nt, Homo sapiens
  misc_RNA (1)...(19): siRNA sense strand
gaagaaaguuuaucagacu

SEQ ID NO: 84795 - RNA, 19 nt, Homo sapiens
  misc_RNA (1)...(19): siRNA sense strand
gaaagaagggacacuguuu

SEQ ID NO: 84796 - RNA, 19 nt, Homo sapiens
  misc_RNA (1)...(19): siRNA sense strand
aagagaaccuaccaauuua

SEQ ID NO: 84797 - RNA, 19 nt, Homo sapiens
  misc_RNA (1)...(19): siRNA sense strand
gcaagacuuccuauuguua

SEQ ID NO: 84798 - RNA, 19 nt, Homo sapiens
  misc_RNA (1)...(19): siRNA sense strand
gaagggacacuguuuggua

SEQ ID NO: 84799 - RNA, 19 nt, Homo sapiens
  misc_RNA (1)...(19): siRNA sense strand
ggagauauguuccgaaugc

SEQ ID NO: 84800 - RNA, 19 nt, Homo sapiens
  misc_RNA (1)...(19): siRNA sense strand
gaaauaccaucuuacacau

SEQ ID NO: 84801 - RNA, 19 nt, Homo sapiens
  misc_RNA (1)...(19): siRNA sense strand
gggaauggaccgaauagua

SEQ ID NO: 84802 - RNA, 19 nt, Homo sapiens
  misc_RNA (1)...(19): siRNA sense strand
gcauaaccauguacaacaa

SEQ ID NO: 84803 - RNA, 19 nt, Homo sapiens
  misc_RNA (1)...(19): siRNA sense strand
uuaacaaacuugcugauga

SEQ ID NO: 84804 - RNA, 19 nt, Homo sapiens
  misc_RNA (1)...(19): siRNA sense strand
ugaagaaguuaaugcguuu

SEQ ID NO: 84805 - RNA, 19 nt, Homo sapiens
  misc_RNA (1)...(19): siRNA sense strand
gaggagauauguuccgaau

SEQ ID NO: 84806 - RNA, 19 nt, Homo sapiens
  misc_RNA (1)...(19): siRNA sense strand
uaacaaacuugcugaugau

SEQ ID NO: 84807 - RNA, 19 nt, Homo sapiens
  misc_RNA (1)...(19): siRNA sense strand
uaaagggcauaaccaugua

SEQ ID NO: 84808 - RNA, 19 nt, Homo sapiens
  misc_RNA (1)...(19): siRNA sense strand
ccauugaucucuccuacaa

SEQ ID NO: 84809 - RNA, 19 nt, Homo sapiens
  misc_RNA (1)...(19): siRNA sense strand
acagauuccuucacaauug

SEQ ID NO: 84810 - RNA, 19 nt, Homo sapiens
  misc_RNA (1)...(19): siRNA sense strand
uagcaagacuuccuauugu

SEQ ID NO: 84811 - RNA, 19 nt, Homo sapiens
  misc_RNA (1)...(19): siRNA sense strand
ugaagaggaugaugacuca

SEQ ID NO: 84812 - RNA, 19 nt, Homo sapiens
  misc_RNA (1)...(19): siRNA sense strand
ggaaaggcuugaucugagu

SEQ ID NO: 84813 - RNA, 19 nt, Homo sapiens
  misc_RNA (1)...(19): siRNA sense strand
guaaagggcauaaccaugu

SEQ ID NO: 84814 - RNA, 19 nt, Homo sapiens
  misc_RNA (1)...(19): siRNA sense strand
acaauugccaucuacauua

SEQ ID NO: 84815 - RNA, 19 nt, Homo sapiens
  misc_RNA (1)...(19): siRNA sense strand
guagcaagacuuccuauug

SEQ ID NO: 84816 - RNA, 19 nt, Homo sapiens
  misc_RNA (1)...(19): siRNA sense strand
gaaccuaccaauuuacuuc

SEQ ID NO: 84817 - RNA, 19 nt, Homo sapiens
  misc_RNA (1)...(19): siRNA sense strand
uauaauguguuaccaggaa

SEQ ID NO: 84818 - RNA, 19 nt, Homo sapiens
  misc_RNA (1)...(19): siRNA sense strand
uggaacaucuucaucuuga

SEQ ID NO: 84819 - RNA, 19 nt, Homo sapiens
  misc_RNA (1)...(19): siRNA sense strand
ccagaaagaucaaugucau

SEQ ID NO: 84820 - RNA, 19 nt, Homo sapiens
  misc_RNA (1)...(19): siRNA sense strand
agaacaaucuucaggcuau

SEQ ID NO: 84821 - RNA, 19 nt, Homo sapiens
  misc_RNA (1)...(19): siRNA sense strand
caaagagaaccuaccaauu

SEQ ID NO: 84822 - RNA, 19 nt, Homo sapiens
  misc_RNA (1)...(19): siRNA sense strand
gaacaaagagaaccuacca

SEQ ID NO: 84823 - RNA, 19 nt, Homo sapiens
  misc_RNA (1)...(19): siRNA sense strand
ccaauuuacuucauaagca

SEQ ID NO: 84824 - RNA, 19 nt, Homo sapiens
  misc_RNA (1)...(19): siRNA sense strand
uaaaucaguuggucaccuu

SEQ ID NO: 84825 - RNA, 19 nt, Homo sapiens
  misc_RNA (1)...(19): siRNA sense strand
gaagugaaagaagaagaua

SEQ ID NO: 84826 - RNA, 19 nt, Homo sapiens
  misc_RNA (1)...(19): siRNA sense strand
ggaaagaagggacacuguu

SEQ ID NO: 84827 - RNA, 19 nt, Homo sapiens
  misc_RNA (1)...(19): siRNA sense strand
gaggaauuauaccuagaaa

SEQ ID NO: 84828 - RNA, 19 nt, Homo sapiens
  misc_RNA (1)...(19): siRNA sense strand
gguaagaggagauauguuc

SEQ ID NO: 84829 - RNA, 19 nt, Homo sapiens
  misc_RNA (1)...(19): siRNA sense strand
aaacagacagcuuggaauu

SEQ ID NO: 84830 - RNA, 19 nt, Homo sapiens
  misc_RNA (1)...(19): siRNA sense strand
gaacggaucccuggcuaug

SEQ ID NO: 84831 - RNA, 19 nt, Homo sapiens
  misc_RNA (1)...(19): siRNA sense strand
ccaaacaguuauaccugaa

SEQ ID NO: 84832 - RNA, 19 nt, Homo sapiens
  misc_RNA (1)...(19): siRNA sense strand
uaucacuucuucaggcaua

SEQ ID NO: 84833 - RNA, 19 nt, Homo sapiens
  misc_RNA (1)...(19): siRNA sense strand
agaagaagauacagagcaa

SEQ ID NO: 84834 - RNA, 19 nt, Homo sapiens
  misc_RNA (1)...(19): siRNA sense strand
gaccgugucuccuucuaug

SEQ ID NO: 84835 - RNA, 19 nt, Homo sapiens
  misc_RNA (1)...(19): siRNA sense strand
gaagauugcaguuuuguuu

SEQ ID NO: 84836 - RNA, 19 nt, Homo sapiens
  misc_RNA (1)...(19): siRNA sense strand
gcaauuccaucgccuccau

SEQ ID NO: 84837 - RNA, 19 nt, Homo sapiens
  misc_RNA (1)...(19): siRNA sense strand
gaaaucaggggcaacuuua

SEQ ID NO: 84838 - RNA, 19 nt, Homo sapiens
  misc_RNA (1)...(19): siRNA sense strand
caagacuuccuauuguuaa

SEQ ID NO: 84839 - RNA, 19 nt, Homo sapiens
  misc_RNA (1)...(19): siRNA sense strand
acuuguaccugucauuuaa

SEQ ID NO: 84840 - RNA, 19 nt, Homo sapiens
  misc_RNA (1)...(19): siRNA sense strand
gaaguuaaugcguuugaau

SEQ ID NO: 84841 - RNA, 19 nt, Homo sapiens
  misc_RNA (1)...(19): siRNA sense strand
ugaggaggaugaagaagug

SEQ ID NO: 84842 - RNA, 19 nt, Homo sapiens
  misc_RNA (1)...(19): siRNA sense strand
acagacagcuuggaauuca

SEQ ID NO: 84843 - RNA, 19 nt, Homo sapiens
  misc_RNA (1)...(19): siRNA sense strand
acucagugguauagcauua

SEQ ID NO: 84844 - RNA, 19 nt, Homo sapiens
  misc_RNA (1)...(19): siRNA sense strand
ugaagagccuagccuacuu

SEQ ID NO: 84845 - RNA, 19 nt, Homo sapiens
  misc_RNA (1)...(19): siRNA sense strand
acucaaguaucguucuuaa

SEQ ID NO: 84846 - RNA, 19 nt, Homo sapiens
  misc_RNA (1)...(19): siRNA sense strand
guaccugucauuuaacaaa

SEQ ID NO: 84847 - RNA, 19 nt, Homo sapiens
  misc_RNA (1)...(19): siRNA sense strand
aggaagaucuaccacagaa

SEQ ID NO: 84848 - RNA, 19 nt, Homo sapiens
  misc_RNA (1)...(19): siRNA sense strand
acucaaaucuggaacaucu

SEQ ID NO: 84849 - RNA, 19 nt, Homo sapiens
  misc_RNA (1)...(19): siRNA sense strand
caauugccaucuacauuag

SEQ ID NO: 84850 - RNA, 19 nt, Homo sapiens
  misc_RNA (1)...(19): siRNA sense strand
aagggacacuguuugguaa

SEQ ID NO: 84851 - RNA, 19 nt, Homo sapiens
  misc_RNA (1)...(19): siRNA sense strand
gcugaacaacaacaagaua

SEQ ID NO: 84852 - RNA, 19 nt, Homo sapiens
  misc_RNA (1)...(19): siRNA sense strand
gaaaggcuugaucugagua

SEQ ID NO: 84853 - RNA, 19 nt, Homo sapiens
  misc_RNA (1)...(19): siRNA sense strand
gauuauagcauggaggaaa

SEQ ID NO: 84854 - RNA, 19 nt, Homo sapiens
  misc_RNA (1)...(19): siRNA sense strand
cauaagaucauacucaagu

SEQ ID NO: 84855 - RNA, 19 nt, Homo sapiens
  misc_RNA (1)...(19): siRNA sense strand
cagaagaaauuugcaaugc

SEQ ID NO: 84856 - RNA, 19 nt, Homo sapiens
  misc_RNA (1)...(19): siRNA sense strand
gaagagccuagccuacuug

SEQ ID NO: 84857 - RNA, 19 nt, Homo sapiens
  misc_RNA (1)...(19): siRNA sense strand
aagccaaugucaauccuuu

SEQ ID NO: 84858 - RNA, 19 nt, Homo sapiens
  misc_RNA (1)...(19): siRNA sense strand
ugauacagauuccuucaca

SEQ ID NO: 84859 - RNA, 19 nt, Homo sapiens
  misc_RNA (1)...(19): siRNA sense strand
ucagugguauagcauuaaa

SEQ ID NO: 84860 - RNA, 19 nt, Homo sapiens
  misc_RNA (1)...(19): siRNA sense strand
ccuaccaauuuacuucaua

SEQ ID NO: 84861 - RNA, 19 nt, Homo sapiens
  misc_RNA (1)...(19): siRNA sense strand
agaaauaccaucuuacaca

SEQ ID NO: 84862 - RNA, 19 nt, Homo sapiens
  misc_RNA (1)...(19): siRNA sense strand
ggaaggaaacaaucucagu

SEQ ID NO: 84863 - RNA, 19 nt, Homo sapiens
  misc_RNA (1)...(19): siRNA sense strand
guuaaugcguuugaauaug

SEQ ID NO: 84864 - RNA, 19 nt, Homo sapiens
  misc_RNA (1)...(19): siRNA sense strand
ggaaacaaucucagugaag

SEQ ID NO: 84865 - RNA, 19 nt, Homo sapiens
  misc_RNA (1)...(19): siRNA sense strand
guuugaauauggauggaaa

SEQ ID NO: 84866 - RNA, 19 nt, Homo sapiens
  misc_RNA (1)...(19): siRNA sense strand
uuaaugcguuugaauaugg

SEQ ID NO: 84867 - RNA, 19 nt, Homo sapiens
  misc_RNA (1)...(19): siRNA sense strand
ggaugaagaagugaaagaa

SEQ ID NO: 84868 - RNA, 19 nt, Homo sapiens
  misc_RNA (1)...(19): siRNA sense strand
ccaagcgggugcucucugu

SEQ ID NO: 84869 - RNA, 19 nt, Homo sapiens
  misc_RNA (1)...(19): siRNA sense strand
gggaggaggaggaggauga

SEQ ID NO: 84870 - RNA, 19 nt, Homo sapiens
  misc_RNA (1)...(19): siRNA sense strand
ggaggaugaagaagugaaa

SEQ ID NO: 84871 - RNA, 19 nt, Homo sapiens
  misc_RNA (1)...(19): siRNA sense strand
aaucauaccagaaagauca

SEQ ID NO: 84872 - RNA, 19 nt, Homo sapiens
  misc_RNA (1)...(19): siRNA sense strand
guuggucaccuuagaauug

SEQ ID NO: 84873 - RNA, 19 nt, Homo sapiens
  misc_RNA (1)...(19): siRNA sense strand
gauacagauuccuucacaa

SEQ ID NO: 84874 - RNA, 19 nt, Homo sapiens
  misc_RNA (1)...(19): siRNA sense strand
augaagaagugaaagaaga

SEQ ID NO: 84875 - RNA, 19 nt, Homo sapiens
  misc_RNA (1)...(19): siRNA sense strand
ccgcuacugucuccuauuc

SEQ ID NO: 84876 - RNA, 19 nt, Homo sapiens
  misc_RNA (1)...(19): siRNA sense strand
ucaaguaucguucuuaaac

SEQ ID NO: 84877 - RNA, 19 nt, Homo sapiens
  misc_RNA (1)...(19): siRNA sense strand
gcaaugcugaagaggauga

SEQ ID NO: 84878 - RNA, 19 nt, Homo sapiens
  misc_RNA (1)...(19): siRNA sense strand
ggcuaucgaugaagaaagu

SEQ ID NO: 84879 - RNA, 19 nt, Homo sapiens
  misc_RNA (1)...(19): siRNA sense strand
gaacaaucuucaggcuauc

SEQ ID NO: 84880 - RNA, 19 nt, Homo sapiens
  misc_RNA (1)...(19): siRNA sense strand
ucaaugagaacaaucuuca

SEQ ID NO: 84881 - RNA, 19 nt, Homo sapiens
  misc_RNA (1)...(19): siRNA sense strand
ucaaacagacagcuuggaa

SEQ ID NO: 84882 - RNA, 19 nt, Homo sapiens
  misc_RNA (1)...(19): siRNA sense strand
cagcagaggaggagacaga

SEQ ID NO: 84883 - RNA, 19 nt, Homo sapiens
  misc_RNA (1)...(19): siRNA sense strand
ugaaagaagaagauacaga

SEQ ID NO: 84884 - RNA, 19 nt, Homo sapiens
  misc_RNA (1)...(19): siRNA sense strand
gaauucagcaaacaacagu

SEQ ID NO: 84885 - RNA, 19 nt, Homo sapiens
  misc_RNA (1)...(19): siRNA sense strand
acaaagagaaccuaccaau

SEQ ID NO: 84886 - RNA, 19 nt, Homo sapiens
  misc_RNA (1)...(19): siRNA sense strand
gucauuguacuacguuaua

SEQ ID NO: 84887 - RNA, 19 nt, Homo sapiens
  misc_RNA (1)...(19): siRNA sense strand
gcagaggaggagacagaaa

SEQ ID NO: 84888 - RNA, 19 nt, Homo sapiens
  misc_RNA (1)...(19): siRNA sense strand
ugaagaagugaaagaagaa

SEQ ID NO: 84889 - RNA, 19 nt, Homo sapiens
  misc_RNA (1)...(19): siRNA sense strand
ugucaauccuuuagcuuuc

SEQ ID NO: 84890 - RNA, 19 nt, Homo sapiens
  misc_RNA (1)...(19): siRNA sense strand
ggaauacuuguaccuguca

SEQ ID NO: 84891 - RNA, 19 nt, Homo sapiens
  misc_RNA (1)...(19): siRNA sense strand
guacaucgaugccgugaag

SEQ ID NO: 84892 - RNA, 19 nt, Homo sapiens
  misc_RNA (1)...(19): siRNA sense strand
ucacggcucuguugaaugu

SEQ ID NO: 84893 - RNA, 19 nt, Homo sapiens
  misc_RNA (1)...(19): siRNA sense strand
gaaggacacuaucaguaca

SEQ ID NO: 84894 - RNA, 19 nt, Homo sapiens
  misc_RNA (1)...(19): siRNA sense strand
gacaucagcuccugguuca

SEQ ID NO: 84895 - RNA, 19 nt, Homo sapiens
  misc_RNA (1)...(19): siRNA sense strand
ggaggaggccuucgaguuc

SEQ ID NO: 84896 - RNA, 19 nt, Homo sapiens
  misc_RNA (1)...(19): siRNA sense strand
ggacugcccaaaccacuuu

SEQ ID NO: 84897 - RNA, 19 nt, Homo sapiens
  misc_RNA (1)...(19): siRNA sense strand
gcaguucgucuucagcuuu

SEQ ID NO: 84898 - RNA, 19 nt, Homo sapiens
  misc_RNA (1)...(19): siRNA sense strand
gcaucccaguggaagauaa

SEQ ID NO: 84899 - RNA, 19 nt, Homo sapiens
  misc_RNA (1)...(19): siRNA sense strand
caucacggcucuguugaau

SEQ ID NO: 84900 - RNA, 19 nt, Homo sapiens
  misc_RNA (1)...(19): siRNA sense strand
gggcaucacggcucuguug

SEQ ID NO: 84901 - RNA, 19 nt, Homo sapiens
  misc_RNA (1)...(19): siRNA sense strand
uggccuaccugaugaugaa

SEQ ID NO: 84902 - RNA, 19 nt, Homo sapiens
  misc_RNA (1)...(19): siRNA sense strand
ccaccucucccagcuguua

SEQ ID NO: 84903 - RNA, 19 nt, Homo sapiens
  misc_RNA (1)...(19): siRNA sense strand
caucaucucgcccaacuuc

SEQ ID NO: 84904 - RNA, 19 nt, Homo sapiens
  misc_RNA (1)...(19): siRNA sense strand
ugaaggacacuaucaguac

SEQ ID NO: 84905 - RNA, 19 nt, Homo sapiens
  misc_RNA (1)...(19): siRNA sense strand
ccacuuugaaggacacuau

SEQ ID NO: 84906 - RNA, 19 nt, Homo sapiens
  misc_RNA (1)...(19): siRNA sense strand
gcaucacggcucuguugaa

SEQ ID NO: 84907 - RNA, 19 nt, Homo sapiens
  misc_RNA (1)...(19): siRNA sense strand
caucagcuccugguucaug

SEQ ID NO: 84908 - RNA, 19 nt, Homo sapiens
  misc_RNA (1)...(19): siRNA sense strand
uugaaggacacuaucagua

SEQ ID NO: 84909 - RNA, 19 nt, Homo sapiens
  misc_RNA (1)...(19): siRNA sense strand
caagugcaucccaguggaa

SEQ ID NO: 84910 - RNA, 19 nt, Homo sapiens
  misc_RNA (1)...(19): siRNA sense strand
ccuaccugaugaugaagaa

SEQ ID NO: 84911 - RNA, 19 nt, Homo sapiens
  misc_RNA (1)...(19): siRNA sense strand
uggaggaggccuucgaguu

SEQ ID NO: 84912 - RNA, 19 nt, Homo sapiens
  misc_RNA (1)...(19): siRNA sense strand
ugccuggccuaccugauga

SEQ ID NO: 84913 - RNA, 19 nt, Homo sapiens
  misc_RNA (1)...(19): siRNA sense strand
caguucgucuucagcuuuc

SEQ ID NO: 84914 - RNA, 19 nt, Homo sapiens
  misc_RNA (1)...(19): siRNA sense strand
uggaagccauagaguacau

SEQ ID NO: 84915 - RNA, 19 nt, Homo sapiens
  misc_RNA (1)...(19): siRNA sense strand
ucgcccaacuucagcuuca

SEQ ID NO: 84916 - RNA, 19 nt, Homo sapiens
  misc_RNA (1)...(19): siRNA sense strand
guacaucgaugccgugaag

SEQ ID NO: 84917 - RNA, 19 nt, Homo sapiens
  misc_RNA (1)...(19): siRNA sense strand
ucacggcucuguugaaugu

SEQ ID NO: 84918 - RNA, 19 nt, Homo sapiens
  misc_RNA (1)...(19): siRNA sense strand
gaaggacacuaucaguaca

SEQ ID NO: 84919 - RNA, 19 nt, Homo sapiens
  misc_RNA (1)...(19): siRNA sense strand
gacaucagcuccugguuca

SEQ ID NO: 84920 - RNA, 19 nt, Homo sapiens
  misc_RNA (1)...(19): siRNA sense strand
ggaggaggccuucgaguuc

SEQ ID NO: 84921 - RNA, 19 nt, Homo sapiens
  misc_RNA (1)...(19): siRNA sense strand
ggacugcccaaaccacuuu

SEQ ID NO: 84922 - RNA, 19 nt, Homo sapiens
  misc_RNA (1)...(19): siRNA sense strand
gcaguucgucuucagcuuu

SEQ ID NO: 84923 - RNA, 19 nt, Homo sapiens
  misc_RNA (1)...(19): siRNA sense strand
gcaucccaguggaagauaa

SEQ ID NO: 84924 - RNA, 19 nt, Homo sapiens
  misc_RNA (1)...(19): siRNA sense strand
caucacggcucuguugaau

SEQ ID NO: 84925 - RNA, 19 nt, Homo sapiens
  misc_RNA (1)...(19): siRNA sense strand
gggcaucacggcucuguug

SEQ ID NO: 84926 - RNA, 19 nt, Homo sapiens
  misc_RNA (1)...(19): siRNA sense strand
uggccuaccugaugaugaa

SEQ ID NO: 84927 - RNA, 19 nt, Homo sapiens
  misc_RNA (1)...(19): siRNA sense strand
ccaccucucccagcuguua

SEQ ID NO: 84928 - RNA, 19 nt, Homo sapiens
  misc_RNA (1)...(19): siRNA sense strand
caucaucucgcccaacuuc

SEQ ID NO: 84929 - RNA, 19 nt, Homo sapiens
  misc_RNA (1)...(19): siRNA sense strand
ugaaggacacuaucaguac

SEQ ID NO: 84930 - RNA, 19 nt, Homo sapiens
  misc_RNA (1)...(19): siRNA sense strand
ccacuuugaaggacacuau

SEQ ID NO: 84931 - RNA, 19 nt, Homo sapiens
  misc_RNA (1)...(19): siRNA sense strand
gcaucacggcucuguugaa

SEQ ID NO: 84932 - RNA, 19 nt, Homo sapiens
  misc_RNA (1)...(19): siRNA sense strand
caucagcuccugguucaug

SEQ ID NO: 84933 - RNA, 19 nt, Homo sapiens
  misc_RNA (1)...(19): siRNA sense strand
uugaaggacacuaucagua

SEQ ID NO: 84934 - RNA, 19 nt, Homo sapiens
  misc_RNA (1)...(19): siRNA sense strand
caagugcaucccaguggaa

SEQ ID NO: 84935 - RNA, 19 nt, Homo sapiens
  misc_RNA (1)...(19): siRNA sense strand
ccuaccugaugaugaagaa

SEQ ID NO: 84936 - RNA, 19 nt, Homo sapiens
  misc_RNA (1)...(19): siRNA sense strand
uggaggaggccuucgaguu

SEQ ID NO: 84937 - RNA, 19 nt, Homo sapiens
  misc_RNA (1)...(19): siRNA sense strand
ugccuggccuaccugauga

SEQ ID NO: 84938 - RNA, 19 nt, Homo sapiens
  misc_RNA (1)...(19): siRNA sense strand
caguucgucuucagcuuuc

SEQ ID NO: 84939 - RNA, 19 nt, Homo sapiens
  misc_RNA (1)...(19): siRNA sense strand
uggaagccauagaguacau

SEQ ID NO: 84940 - RNA, 19 nt, Homo sapiens
  misc_RNA (1)...(19): siRNA sense strand
ucgcccaacuucagcuuca

SEQ ID NO: 84941 - RNA, 19 nt, Homo sapiens
  misc_RNA (1)...(19): siRNA sense strand
ggagacagcugccauauuu

SEQ ID NO: 84942 - RNA, 19 nt, Homo sapiens
  misc_RNA (1)...(19): siRNA sense strand
ggaaagagagucauuauaa

SEQ ID NO: 84943 - RNA, 19 nt, Homo sapiens
  misc_RNA (1)...(19): siRNA sense strand
gaaccugucugcuuugaaa

SEQ ID NO: 84944 - RNA, 19 nt, Homo sapiens
  misc_RNA (1)...(19): siRNA sense strand
uggaagagcuugcugauuu

SEQ ID NO: 84945 - RNA, 19 nt, Homo sapiens
  misc_RNA (1)...(19): siRNA sense strand
gaagaucuguggccaauca

SEQ ID NO: 84946 - RNA, 19 nt, Homo sapiens
  misc_RNA (1)...(19): siRNA sense strand
gaaggaagggccaguauuu

SEQ ID NO: 84947 - RNA, 19 nt, Homo sapiens
  misc_RNA (1)...(19): siRNA sense strand
gaaaggaaaugugaaggaa

SEQ ID NO: 84948 - RNA, 19 nt, Homo sapiens
  misc_RNA (1)...(19): siRNA sense strand
gaaaggaguaguucuauga

SEQ ID NO: 84949 - RNA, 19 nt, Homo sapiens
  misc_RNA (1)...(19): siRNA sense strand
gaaaagaauugcugugauu

SEQ ID NO: 84950 - RNA, 19 nt, Homo sapiens
  misc_RNA (1)...(19): siRNA sense strand
cuaaagagaugaugugcuu

SEQ ID NO: 84951 - RNA, 19 nt, Homo sapiens
  misc_RNA (1)...(19): siRNA sense strand
cuacauagauaccauggaa

SEQ ID NO: 84952 - RNA, 19 nt, Homo sapiens
  misc_RNA (1)...(19): siRNA sense strand
ggaagagcuugcugauuug

SEQ ID NO: 84953 - RNA, 19 nt, Homo sapiens
  misc_RNA (1)...(19): siRNA sense strand
gcucuugccuucuuugcua

SEQ ID NO: 84954 - RNA, 19 nt, Homo sapiens
  misc_RNA (1)...(19): siRNA sense strand
ugaagaagcagccugauuu

SEQ ID NO: 84955 - RNA, 19 nt, Homo sapiens
  misc_RNA (1)...(19): siRNA sense strand
ggagaugaaugucuuugau

SEQ ID NO: 84956 - RNA, 19 nt, Homo sapiens
  misc_RNA (1)...(19): siRNA sense strand
gaaaugauggcagaaauau

SEQ ID NO: 84957 - RNA, 19 nt, Homo sapiens
  misc_RNA (1)...(19): siRNA sense strand
gaucuguggccaaucauua

SEQ ID NO: 84958 - RNA, 19 nt, Homo sapiens
  misc_RNA (1)...(19): siRNA sense strand
gggauucacuggaaagaga

SEQ ID NO: 84959 - RNA, 19 nt, Homo sapiens
  misc_RNA (1)...(19): siRNA sense strand
caagcuggcauuacacuua

SEQ ID NO: 84960 - RNA, 19 nt, Homo sapiens
  misc_RNA (1)...(19): siRNA sense strand
gauguaugccaaagaauuu

SEQ ID NO: 84961 - RNA, 19 nt, Homo sapiens
  misc_RNA (1)...(19): siRNA sense strand
cagggagacuacauagaua

SEQ ID NO: 84962 - RNA, 19 nt, Homo sapiens
  misc_RNA (1)...(19): siRNA sense strand
ggaagccucugaugacaag

SEQ ID NO: 84963 - RNA, 19 nt, Homo sapiens
  misc_RNA (1)...(19): siRNA sense strand
gaauuugaccuucuaaagu

SEQ ID NO: 84964 - RNA, 19 nt, Homo sapiens
  misc_RNA (1)...(19): siRNA sense strand
cauugaugcuguuaucuuu

SEQ ID NO: 84965 - RNA, 19 nt, Homo sapiens
  misc_RNA (1)...(19): siRNA sense strand
aaggaaaugugaaggaauu

SEQ ID NO: 84966 - RNA, 19 nt, Homo sapiens
  misc_RNA (1)...(19): siRNA sense strand
uaucccaacuucaugcaua

SEQ ID NO: 84967 - RNA, 19 nt, Homo sapiens
  misc_RNA (1)...(19): siRNA sense strand
caggauguaugccaaagaa

SEQ ID NO: 84968 - RNA, 19 nt, Homo sapiens
  misc_RNA (1)...(19): siRNA sense strand
ggauguaugccaaagaauu

SEQ ID NO: 84969 - RNA, 19 nt, Homo sapiens
  misc_RNA (1)...(19): siRNA sense strand
ucuaugacuucaacaauga

SEQ ID NO: 84970 - RNA, 19 nt, Homo sapiens
  misc_RNA (1)...(19): siRNA sense strand
gaagaaggaagggccagua

SEQ ID NO: 84971 - RNA, 19 nt, Homo sapiens
  misc_RNA (1)...(19): siRNA sense strand
ucacaccaaugcucaucua

SEQ ID NO: 84972 - RNA, 19 nt, Homo sapiens
  misc_RNA (1)...(19): siRNA sense strand
ugaaaugauggcagaaaua

SEQ ID NO: 84973 - RNA, 19 nt, Homo sapiens
  misc_RNA (1)...(19): siRNA sense strand
caucaauacuucuaaagag

SEQ ID NO: 84974 - RNA, 19 nt, Homo sapiens
  misc_RNA (1)...(19): siRNA sense strand
ugacauugaugcuguuauc

SEQ ID NO: 84975 - RNA, 19 nt, Homo sapiens
  misc_RNA (1)...(19): siRNA sense strand
gagucagcauccaaccuua

SEQ ID NO: 84976 - RNA, 19 nt, Homo sapiens
  misc_RNA (1)...(19): siRNA sense strand
gaaagugaaaggaaaugug

SEQ ID NO: 84977 - RNA, 19 nt, Homo sapiens
  misc_RNA (1)...(19): siRNA sense strand
gugaaaugauggcagaaau

SEQ ID NO: 84978 - RNA, 19 nt, Homo sapiens
  misc_RNA (1)...(19): siRNA sense strand
ccacucagguauuuaaagg

SEQ ID NO: 84979 - RNA, 19 nt, Homo sapiens
  misc_RNA (1)...(19): siRNA sense strand
guggagagccaacgccaua

SEQ ID NO: 84980 - RNA, 19 nt, Homo sapiens
  misc_RNA (1)...(19): siRNA sense strand
cuucucgacuuacacauuu

SEQ ID NO: 84981 - RNA, 19 nt, Homo sapiens
  misc_RNA (1)...(19): siRNA sense strand
gaagggccaguauuuacaa

SEQ ID NO: 84982 - RNA, 19 nt, Homo sapiens
  misc_RNA (1)...(19): siRNA sense strand
cuuggaaccugucugcuuu

SEQ ID NO: 84983 - RNA, 19 nt, Homo sapiens
  misc_RNA (1)...(19): siRNA sense strand
guuugaccaugaaauguuu

SEQ ID NO: 84984 - RNA, 19 nt, Homo sapiens
  misc_RNA (1)...(19): siRNA sense strand
ugaaaggaguaguucuaug

SEQ ID NO: 84985 - RNA, 19 nt, Homo sapiens
  misc_RNA (1)...(19): siRNA sense strand
gcacuccaauccacuaucg

SEQ ID NO: 84986 - RNA, 19 nt, Homo sapiens
  misc_RNA (1)...(19): siRNA sense strand
uaaaugaugaccugccaaa

SEQ ID NO: 84987 - RNA, 19 nt, Homo sapiens
  misc_RNA (1)...(19): siRNA sense strand
ggcuauagcuuugacuuuc

SEQ ID NO: 84988 - RNA, 19 nt, Homo sapiens
  misc_RNA (1)...(19): siRNA sense strand
ggaagggccaguauuuaca

SEQ ID NO: 84989 - RNA, 19 nt, Homo sapiens
  misc_RNA (1)...(19): siRNA sense strand
gaaaggccaacucuugcaa

SEQ ID NO: 84990 - RNA, 19 nt, Homo sapiens
  misc_RNA (1)...(19): siRNA sense strand
gggcuuggauccugaaucg

SEQ ID NO: 84991 - RNA, 19 nt, Homo sapiens
  misc_RNA (1)...(19): siRNA sense strand
gcuggcauuacacuuauua

SEQ ID NO: 84992 - RNA, 19 nt, Homo sapiens
  misc_RNA (1)...(19): siRNA sense strand
ggccaacucuugcaaucau

SEQ ID NO: 84993 - RNA, 19 nt, Homo sapiens
  misc_RNA (1)...(19): siRNA sense strand
caagugcugcguagaagaa

SEQ ID NO: 84994 - RNA, 19 nt, Homo sapiens
  misc_RNA (1)...(19): siRNA sense strand
cacugaaucugaagggaaa

SEQ ID NO: 84995 - RNA, 19 nt, Homo sapiens
  misc_RNA (1)...(19): siRNA sense strand
ugacaagaguaguugaaag

SEQ ID NO: 84996 - RNA, 19 nt, Homo sapiens
  misc_RNA (1)...(19): siRNA sense strand
uaaagacauugcccucaca

SEQ ID NO: 84997 - RNA, 19 nt, Homo sapiens
  misc_RNA (1)...(19): siRNA sense strand
ccagggaggaugacauuga

SEQ ID NO: 84998 - RNA, 19 nt, Homo sapiens
  misc_RNA (1)...(19): siRNA sense strand
aaagugaaaggaaauguga

SEQ ID NO: 84999 - RNA, 19 nt, Homo sapiens
  misc_RNA (1)...(19): siRNA sense strand
gaugaccugccaaaucgua

SEQ ID NO: 85000 - RNA, 19 nt, Homo sapiens
  misc_RNA (1)...(19): siRNA sense strand
gcucaucuaccucuggaaa

SEQ ID NO: 85001 - RNA, 19 nt, Homo sapiens
  misc_RNA (1)...(19): siRNA sense strand
gcacuggccaucacaccaa

SEQ ID NO: 85002 - RNA, 19 nt, Homo sapiens
  misc_RNA (1)...(19): siRNA sense strand
guugaaaggaguaguucua

SEQ ID NO: 85003 - RNA, 19 nt, Homo sapiens
  misc_RNA (1)...(19): siRNA sense strand
caucaagugcugcguagaa

SEQ ID NO: 85004 - RNA, 19 nt, Homo sapiens
  misc_RNA (1)...(19): siRNA sense strand
caauacuucuaaagagaug

SEQ ID NO: 85005 - RNA, 19 nt, Homo sapiens
  misc_RNA (1)...(19): siRNA sense strand
agacagcugccauauuuga

SEQ ID NO: 85006 - RNA, 19 nt, Homo sapiens
  misc_RNA (1)...(19): siRNA sense strand
gcugauguguuguucucuu

SEQ ID NO: 85007 - RNA, 19 nt, Homo sapiens
  misc_RNA (1)...(19): siRNA sense strand
gagaugaaugucuuugaug

SEQ ID NO: 85008 - RNA, 19 nt, Homo sapiens
  misc_RNA (1)...(19): siRNA sense strand
guaguucuaugacuucaac

SEQ ID NO: 85009 - RNA, 19 nt, Homo sapiens
  misc_RNA (1)...(19): siRNA sense strand
ugaaauguuuggccugaag

SEQ ID NO: 85010 - RNA, 19 nt, Homo sapiens
  misc_RNA (1)...(19): siRNA sense strand
guuguucucuucucgacuu

SEQ ID NO: 85011 - RNA, 19 nt, Homo sapiens
  misc_RNA (1)...(19): siRNA sense strand
ccugaagccuaaacacaga

SEQ ID NO: 85012 - RNA, 19 nt, Homo sapiens
  misc_RNA (1)...(19): siRNA sense strand
gacaauaggcaaguuuaug

SEQ ID NO: 85013 - RNA, 19 nt, Homo sapiens
  misc_RNA (1)...(19): siRNA sense strand
gagacuacauagauaccau

SEQ ID NO: 85014 - RNA, 19 nt, Homo sapiens
  misc_RNA (1)...(19): siRNA sense strand
ucagggagacuacauagau

SEQ ID NO: 85015 - RNA, 19 nt, Homo sapiens
  misc_RNA (1)...(19): siRNA sense strand
gccaacucuugcaaucaua

SEQ ID NO: 85016 - RNA, 19 nt, Homo sapiens
  misc_RNA (1)...(19): siRNA sense strand
gccacaggcuauagcuuug

SEQ ID NO: 85017 - RNA, 19 nt, Homo sapiens
  misc_RNA (1)...(19): siRNA sense strand
ggaugacauugaugcuguu

SEQ ID NO: 85018 - RNA, 19 nt, Homo sapiens
  misc_RNA (1)...(19): siRNA sense strand
uagcuuugacuuuccauuu

SEQ ID NO: 85019 - RNA, 19 nt, Homo sapiens
  misc_RNA (1)...(19): siRNA sense strand
gaugacaagaguaguugaa

SEQ ID NO: 85020 - RNA, 19 nt, Homo sapiens
  misc_RNA (1)...(19): siRNA sense strand
gagccaacgccauaccauu

SEQ ID NO: 85021 - RNA, 19 nt, Homo sapiens
  misc_RNA (1)...(19): siRNA sense strand
gggccacucagguauuuaa

SEQ ID NO: 85022 - RNA, 19 nt, Homo sapiens
  misc_RNA (1)...(19): siRNA sense strand
cagagggauucacuggaaa

SEQ ID NO: 85023 - RNA, 19 nt, Homo sapiens
  misc_RNA (1)...(19): siRNA sense strand
ggaguaguucuaugacuuc

SEQ ID NO: 85024 - RNA, 19 nt, Homo sapiens
  misc_RNA (1)...(19): siRNA sense strand
ucagguauuuaaaggucua

SEQ ID NO: 85025 - RNA, 19 nt, Homo sapiens
  misc_RNA (1)...(19): siRNA sense strand
gagccauuaugcccauuuc

SEQ ID NO: 85026 - RNA, 19 nt, Homo sapiens
  misc_RNA (1)...(19): siRNA sense strand
gccaaucauuagcaaacaa

SEQ ID NO: 85027 - RNA, 19 nt, Homo sapiens
  misc_RNA (1)...(19): siRNA sense strand
cuacggauauccugcugau

SEQ ID NO: 85028 - RNA, 19 nt, Homo sapiens
  misc_RNA (1)...(19): siRNA sense strand
ccaaacagccaagcagguu

SEQ ID NO: 85029 - RNA, 19 nt, Homo sapiens
  misc_RNA (1)...(19): siRNA sense strand
gugaagaagcagccugauu

SEQ ID NO: 85030 - RNA, 19 nt, Homo sapiens
  misc_RNA (1)...(19): siRNA sense strand
ccaauccacuaucguguac

SEQ ID NO: 85031 - RNA, 19 nt, Homo sapiens
  misc_RNA (1)...(19): siRNA sense strand
gaagaagcagccugauuuu

SEQ ID NO: 85032 - RNA, 19 nt, Homo sapiens
  misc_RNA (1)...(19): siRNA sense strand
uggaaagagagucauuaua

SEQ ID NO: 85033 - RNA, 19 nt, Homo sapiens
  misc_RNA (1)...(19): siRNA sense strand
guaguugaaaggaguaguu

SEQ ID NO: 85034 - RNA, 19 nt, Homo sapiens
  misc_RNA (1)...(19): siRNA sense strand
ggcccaaucugcugucucu

SEQ ID NO: 85035 - RNA, 19 nt, Homo sapiens
  misc_RNA (1)...(19): siRNA sense strand
cagggaggaugacauugau

SEQ ID NO: 85036 - RNA, 19 nt, Homo sapiens
  misc_RNA (1)...(19): siRNA sense strand
ugaaaggaaaugugaagga

SEQ ID NO: 85037 - RNA, 19 nt, Homo sapiens
  misc_RNA (1)...(19): siRNA sense strand
uggaagaucuguggccaau

SEQ ID NO: 85038 - RNA, 19 nt, Homo sapiens
  misc_RNA (1)...(19): siRNA sense strand
cagcauccaaccuuaaaug

SEQ ID NO: 85039 - RNA, 19 nt, Homo sapiens
  misc_RNA (1)...(19): siRNA sense strand
gcuagcucuugccuucuuu

SEQ ID NO: 85040 - RNA, 19 nt, Homo sapiens
  misc_RNA (1)...(19): siRNA sense strand
aagcuggcauuacacuuau

SEQ ID NO: 85041 - RNA, 19 nt, Homo sapiens
  misc_RNA (1)...(19): siRNA sense strand
cgagaagaauggugacuuu

SEQ ID NO: 85042 - RNA, 19 nt, Homo sapiens
  misc_RNA (1)...(19): siRNA sense strand
ggcaguugcuggacuuuga

SEQ ID NO: 85043 - RNA, 19 nt, Homo sapiens
  misc_RNA (1)...(19): siRNA sense strand
ucaagaggaagaagucuaa

SEQ ID NO: 85044 - RNA, 19 nt, Homo sapiens
  misc_RNA (1)...(19): siRNA sense strand
cgagugcccucaccugugu

SEQ ID NO: 85045 - RNA, 19 nt, Homo sapiens
  misc_RNA (1)...(19): siRNA sense strand
gccauugaguucauugaug

SEQ ID NO: 85046 - RNA, 19 nt, Homo sapiens
  misc_RNA (1)...(19): siRNA sense strand
ccaccucucucucaacgau

SEQ ID NO: 85047 - RNA, 19 nt, Homo sapiens
  misc_RNA (1)...(19): siRNA sense strand
ggaagaagucuaacaucuc

SEQ ID NO: 85048 - RNA, 19 nt, Homo sapiens
  misc_RNA (1)...(19): siRNA sense strand
cagggaggcuucagcagau

SEQ ID NO: 85049 - RNA, 19 nt, Homo sapiens
  misc_RNA (1)...(19): siRNA sense strand
uggccuaccucaugcagaa

SEQ ID NO: 85050 - RNA, 19 nt, Homo sapiens
  misc_RNA (1)...(19): siRNA sense strand
aggaagaagucuaacaucu

SEQ ID NO: 85051 - RNA, 19 nt, Homo sapiens
  misc_RNA (1)...(19): siRNA sense strand
ggaggccauugaguucauu

SEQ ID NO: 85052 - RNA, 19 nt, Homo sapiens
  misc_RNA (1)...(19): siRNA sense strand
gauccugcccaaccucuau

SEQ ID NO: 85053 - RNA, 19 nt, Homo sapiens
  misc_RNA (1)...(19): siRNA sense strand
caugagcuguggccuggau

SEQ ID NO: 85054 - RNA, 19 nt, Homo sapiens
  misc_RNA (1)...(19): siRNA sense strand
gaggaagaagucuaacauc

SEQ ID NO: 85055 - RNA, 19 nt, Homo sapiens
  misc_RNA (1)...(19): siRNA sense strand
agaagaauggugacuuuca

SEQ ID NO: 85056 - RNA, 19 nt, Homo sapiens
  misc_RNA (1)...(19): siRNA sense strand
caaccucccaaacuucuuc

SEQ ID NO: 85057 - RNA, 19 nt, Homo sapiens
  misc_RNA (1)...(19): siRNA sense strand
aaacugggcauccgcuaca

SEQ ID NO: 85058 - RNA, 19 nt, Homo sapiens
  misc_RNA (1)...(19): siRNA sense strand
gcagaagcuccaccucucu

SEQ ID NO: 85059 - RNA, 19 nt, Homo sapiens
  misc_RNA (1)...(19): siRNA sense strand
gcugaccgcgacuccauga

SEQ ID NO: 85060 - RNA, 19 nt, Homo sapiens
  misc_RNA (1)...(19): siRNA sense strand
gagaagaauggugacuuuc

SEQ ID NO: 85061 - RNA, 19 nt, Homo sapiens
  misc_RNA (1)...(19): siRNA sense strand
ucucaacgaugccuaugac

SEQ ID NO: 85062 - RNA, 19 nt, Homo sapiens
  misc_RNA (1)...(19): siRNA sense strand
uggagagccuggccaaacu

SEQ ID NO: 85063 - RNA, 19 nt, Homo sapiens
  misc_RNA (1)...(19): siRNA sense strand
gucaagaggaagaagucua

SEQ ID NO: 85064 - RNA, 19 nt, Homo sapiens
  misc_RNA (1)...(19): siRNA sense strand
agaggaagaagucuaacau

SEQ ID NO: 85065 - RNA, 19 nt, Homo sapiens
  misc_RNA (1)...(19): siRNA sense strand
guagagugcuucaacaaga

SEQ ID NO: 85066 - RNA, 19 nt, Homo sapiens
  misc_RNA (1)...(19): siRNA sense strand
ucaacaagauuucgagaga

SEQ ID NO: 85067 - RNA, 19 nt, Homo sapiens
  misc_RNA (1)...(19): siRNA sense strand
ggaaugccaugaacaaggu

SEQ ID NO: 85068 - RNA, 19 nt, Homo sapiens
  misc_RNA (1)...(19): siRNA sense strand
ggguuuggcugccgaugua

SEQ ID NO: 85069 - RNA, 19 nt, Homo sapiens
  misc_RNA (1)...(19): siRNA sense strand
caugcuggaugcugccuua

SEQ ID NO: 85070 - RNA, 19 nt, Homo sapiens
  misc_RNA (1)...(19): siRNA sense strand
guauugaccugauggacau

SEQ ID NO: 85071 - RNA, 19 nt, Homo sapiens
  misc_RNA (1)...(19): siRNA sense strand
caagaggaaugccaugaac

SEQ ID NO: 85072 - RNA, 19 nt, Homo sapiens
  misc_RNA (1)...(19): siRNA sense strand
cccaagaccucgugaaguc

SEQ ID NO: 85073 - RNA, 19 nt, Homo sapiens
  misc_RNA (1)...(19): siRNA sense strand
gagagaugguagagugcuu

SEQ ID NO: 85074 - RNA, 19 nt, Homo sapiens
  misc_RNA (1)...(19): siRNA sense strand
aauguucacugcagguauu

SEQ ID NO: 85075 - RNA, 19 nt, Homo sapiens
  misc_RNA (1)...(19): siRNA sense strand
guaccuccgugacaucauc

SEQ ID NO: 85076 - RNA, 19 nt, Homo sapiens
  misc_RNA (1)...(19): siRNA sense strand
uacccgggacucaguauua

SEQ ID NO: 85077 - RNA, 19 nt, Homo sapiens
  misc_RNA (1)...(19): siRNA sense strand
cagcaagaccaccguguug

SEQ ID NO: 85078 - RNA, 19 nt, Homo sapiens
  misc_RNA (1)...(19): siRNA sense strand
ugagaacaaggaacugaaa

SEQ ID NO: 85079 - RNA, 19 nt, Homo sapiens
  misc_RNA (1)...(19): siRNA sense strand
cggaguagcccucggugaa

SEQ ID NO: 85080 - RNA, 19 nt, Homo sapiens
  misc_RNA (1)...(19): siRNA sense strand
uagagugcuucaacaagau

SEQ ID NO: 85081 - RNA, 19 nt, Homo sapiens
  misc_RNA (1)...(19): siRNA sense strand
ucaacgagcuggccuucac

SEQ ID NO: 85082 - RNA, 19 nt, Homo sapiens
  misc_RNA (1)...(19): siRNA sense strand
caacuacccgggacucagu

SEQ ID NO: 85083 - RNA, 19 nt, Homo sapiens
  misc_RNA (1)...(19): siRNA sense strand
gcccaaaggagaugaugug

SEQ ID NO: 85084 - RNA, 19 nt, Homo sapiens
  misc_RNA (1)...(19): siRNA sense strand
ggagguggacguggguuug

SEQ ID NO: 85085 - RNA, 19 nt, Homo sapiens
  misc_RNA (1)...(19): siRNA sense strand
agaggaaugccaugaacaa

SEQ ID NO: 85086 - RNA, 19 nt, Homo sapiens
  misc_RNA (1)...(19): siRNA sense strand
gcugguaccuccgugacau

SEQ ID NO: 85087 - RNA, 19 nt, Homo sapiens
  misc_RNA (1)...(19): siRNA sense strand
gaugguagagugcuucaac

SEQ ID NO: 85088 - RNA, 19 nt, Homo sapiens
  misc_RNA (1)...(19): siRNA sense strand
cgacugagaacaaggaacu

SEQ ID NO: 85089 - RNA, 19 nt, Homo sapiens
  misc_RNA (1)...(19): siRNA sense strand
uaugagucccuucguguga

SEQ ID NO: 85090 - RNA, 19 nt, Homo sapiens
  misc_RNA (1)...(19): siRNA sense strand
cccgagauuuccagcaaga

SEQ ID NO: 85091 - RNA, 19 nt, Homo sapiens
  misc_RNA (1)...(19): siRNA sense strand
acaagaggaaugccaugaa

SEQ ID NO: 85092 - RNA, 19 nt, Homo sapiens
  misc_RNA (1)...(19): siRNA sense strand
ccgagagccucaacuacgu

SEQ ID NO: 85093 - RNA, 19 nt, Homo sapiens
  misc_RNA (1)...(19): siRNA sense strand
ccacgacugagaacaagga

SEQ ID NO: 85094 - RNA, 19 nt, Homo sapiens
  misc_RNA (1)...(19): siRNA sense strand
gaucucuggugcaggaaaa

SEQ ID NO: 85095 - RNA, 19 nt, Homo sapiens
  misc_RNA (1)...(19): siRNA sense strand
gacccaagaccucgugaag

SEQ ID NO: 85096 - RNA, 19 nt, Homo sapiens
  misc_RNA (1)...(19): siRNA sense strand
guggcguccuggaacauga

SEQ ID NO: 85097 - RNA, 19 nt, Homo sapiens
  misc_RNA (1)...(19): siRNA sense strand
ccagcaagaccaccguguu

SEQ ID NO: 85098 - RNA, 19 nt, Homo sapiens
  misc_RNA (1)...(19): siRNA sense strand
cgcccgagauuuccagcaa

SEQ ID NO: 85099 - RNA, 19 nt, Homo sapiens
  misc_RNA (1)...(19): siRNA sense strand
gauaccaggagaccuucaa

SEQ ID NO: 85100 - RNA, 19 nt, Homo sapiens
  misc_RNA (1)...(19): siRNA sense strand
gguagagugcuucaacaag

SEQ ID NO: 85101 - RNA, 19 nt, Homo sapiens
  misc_RNA (1)...(19): siRNA sense strand
cgugauugcugccguccau

SEQ ID NO: 85102 - RNA, 19 nt, Homo sapiens
  misc_RNA (1)...(19): siRNA sense strand
gcccacgacugagaacaag

SEQ ID NO: 85103 - RNA, 19 nt, Homo sapiens
  misc_RNA (1)...(19): siRNA sense strand
ggaguagcccucggugaag

SEQ ID NO: 85104 - RNA, 19 nt, Homo sapiens
  misc_RNA (1)...(19): siRNA sense strand
cuucaccgcccacaagaug

SEQ ID NO: 85105 - RNA, 19 nt, Homo sapiens
  misc_RNA (1)...(19): siRNA sense strand
gagaacagcauuaaacuga

SEQ ID NO: 85106 - RNA, 19 nt, Homo sapiens
  misc_RNA (1)...(19): siRNA sense strand
gaauucagccgcagcaaau

SEQ ID NO: 85107 - RNA, 19 nt, Homo sapiens
  misc_RNA (1)...(19): siRNA sense strand
gcaccaaccccaucauuua

SEQ ID NO: 85108 - RNA, 19 nt, Homo sapiens
  misc_RNA (1)...(19): siRNA sense strand
ggagaacaucuuugucuug

SEQ ID NO: 85109 - RNA, 19 nt, Homo sapiens
  misc_RNA (1)...(19): siRNA sense strand
gcaccacggucuucacucu

SEQ ID NO: 85110 - RNA, 19 nt, Homo sapiens
  misc_RNA (1)...(19): siRNA sense strand
ggacaaggagaacagcauu

SEQ ID NO: 85111 - RNA, 19 nt, Homo sapiens
  misc_RNA (1)...(19): siRNA sense strand
cagcuaaccugcucuuguc

SEQ ID NO: 85112 - RNA, 19 nt, Homo sapiens
  misc_RNA (1)...(19): siRNA sense strand
ggaauucagccgcagcaaa

SEQ ID NO: 85113 - RNA, 19 nt, Homo sapiens
  misc_RNA (1)...(19): siRNA sense strand
gacaaggagaacagcauua

SEQ ID NO: 85114 - RNA, 19 nt, Homo sapiens
  misc_RNA (1)...(19): siRNA sense strand
gcucaagaccguaauuauc

SEQ ID NO: 85115 - RNA, 19 nt, Homo sapiens
  misc_RNA (1)...(19): siRNA sense strand
auucucaucugcugcuuua

SEQ ID NO: 85116 - RNA, 19 nt, Homo sapiens
  misc_RNA (1)...(19): siRNA sense strand
agacucugcuggcaaauuc

SEQ ID NO: 85117 - RNA, 19 nt, Homo sapiens
  misc_RNA (1)...(19): siRNA sense strand
gauaucaucguccggcauu

SEQ ID NO: 85118 - RNA, 19 nt, Homo sapiens
  misc_RNA (1)...(19): siRNA sense strand
ggacaacccagagaccauu

SEQ ID NO: 85119 - RNA, 19 nt, Homo sapiens
  misc_RNA (1)...(19): siRNA sense strand
ucacaaugcugaaaaugaa

SEQ ID NO: 85120 - RNA, 19 nt, Homo sapiens
  misc_RNA (1)...(19): siRNA sense strand
cggagacucugcuggcaaa

SEQ ID NO: 85121 - RNA, 19 nt, Homo sapiens
  misc_RNA (1)...(19): siRNA sense strand
gcaauaacuuccgccucuu

SEQ ID NO: 85122 - RNA, 19 nt, Homo sapiens
  misc_RNA (1)...(19): siRNA sense strand
gcagcaaaucggacaauuc

SEQ ID NO: 85123 - RNA, 19 nt, Homo sapiens
  misc_RNA (1)...(19): siRNA sense strand
ggaagggaguauguuugug

SEQ ID NO: 85124 - RNA, 19 nt, Homo sapiens
  misc_RNA (1)...(19): siRNA sense strand
acaaggagaacagcauuaa

SEQ ID NO: 85125 - RNA, 19 nt, Homo sapiens
  misc_RNA (1)...(19): siRNA sense strand
caagcacuauauccucuuc

SEQ ID NO: 85126 - RNA, 19 nt, Homo sapiens
  misc_RNA (1)...(19): siRNA sense strand
gggaagggaguauguuugu

SEQ ID NO: 85127 - RNA, 19 nt, Homo sapiens
  misc_RNA (1)...(19): siRNA sense strand
caaggagaacagcauuaaa

SEQ ID NO: 85128 - RNA, 19 nt, Homo sapiens
  misc_RNA (1)...(19): siRNA sense strand
ggagaacagcauuaaacug

SEQ ID NO: 85129 - RNA, 19 nt, Homo sapiens
  misc_RNA (1)...(19): siRNA sense strand
gcgggaagggaguauguuu

SEQ ID NO: 85130 - RNA, 19 nt, Homo sapiens
  misc_RNA (1)...(19): siRNA sense strand
ggaaacgucaacucuucuu

SEQ ID NO: 85131 - RNA, 19 nt, Homo sapiens
  misc_RNA (1)...(19): siRNA sense strand
cuggaaacgucaacucuuc

SEQ ID NO: 85132 - RNA, 19 nt, Homo sapiens
  misc_RNA (1)...(19): siRNA sense strand
gacaacccagagaccauua

SEQ ID NO: 85133 - RNA, 19 nt, Homo sapiens
  misc_RNA (1)...(19): siRNA sense strand
cauuaugucuucuggaaac

SEQ ID NO: 85134 - RNA, 19 nt, Homo sapiens
  misc_RNA (1)...(19): siRNA sense strand
cgacccauguacuauuuua

SEQ ID NO: 85135 - RNA, 19 nt, Homo sapiens
  misc_RNA (1)...(19): siRNA sense strand
ggugaagaccugugacauc

SEQ ID NO: 85136 - RNA, 19 nt, Homo sapiens
  misc_RNA (1)...(19): siRNA sense strand
caacgggagcaauaacuuc

SEQ ID NO: 85137 - RNA, 19 nt, Homo sapiens
  misc_RNA (1)...(19): siRNA sense strand
uggagaacaucuuugucuu

SEQ ID NO: 85138 - RNA, 19 nt, Homo sapiens
  misc_RNA (1)...(19): siRNA sense strand
ggucuucacucugcuucug

SEQ ID NO: 85139 - RNA, 19 nt, Homo sapiens
  misc_RNA (1)...(19): siRNA sense strand
accauuaugucuucuggaa

SEQ ID NO: 85140 - RNA, 19 nt, Homo sapiens
  misc_RNA (1)...(19): siRNA sense strand
gaaacgucaacucuucuuc

SEQ ID NO: 85141 - RNA, 19 nt, Homo sapiens
  misc_RNA (1)...(19): siRNA sense strand
cgccugacguuccgcaaga

SEQ ID NO: 85142 - RNA, 19 nt, Homo sapiens
  misc_RNA (1)...(19): siRNA sense strand
gagacucugcuggcaaauu

SEQ ID NO: 85143 - RNA, 19 nt, Homo sapiens
  misc_RNA (1)...(19): siRNA sense strand
gccauugagcgcuauauca

SEQ ID NO: 85144 - RNA, 19 nt, Homo sapiens
  misc_RNA (1)...(19): siRNA sense strand
gggcaccgcucuucauccu

SEQ ID NO: 85145 - RNA, 19 nt, Homo sapiens
  misc_RNA (1)...(19): siRNA sense strand
gcgcugcucaagaccguaa

SEQ ID NO: 85146 - RNA, 19 nt, Homo sapiens
  misc_RNA (1)...(19): siRNA sense strand
gcuuuaucauccuggagaa

SEQ ID NO: 85147 - RNA, 19 nt, Homo sapiens
  misc_RNA (1)...(19): siRNA sense strand
acacgggaaagcugaauau

SEQ ID NO: 85148 - RNA, 19 nt, Homo sapiens
  misc_RNA (1)...(19): siRNA sense strand
uuuacacucugaccaacaa

SEQ ID NO: 85149 - RNA, 19 nt, Homo sapiens
  misc_RNA (1)...(19): siRNA sense strand
gacuacgucaacuaugaua

SEQ ID NO: 85150 - RNA, 19 nt, Homo sapiens
  misc_RNA (1)...(19): siRNA sense strand
accgacccauguacuauuu

SEQ ID NO: 85151 - RNA, 19 nt, Homo sapiens
  misc_RNA (1)...(19): siRNA sense strand
ugaccucggugguguucau

SEQ ID NO: 85152 - RNA, 19 nt, Homo sapiens
  misc_RNA (1)...(19): siRNA sense strand
caauaacuuccgccucuuc

SEQ ID NO: 85153 - RNA, 19 nt, Homo sapiens
  misc_RNA (1)...(19): siRNA sense strand
caacccagagaccauuaug

SEQ ID NO: 85154 - RNA, 19 nt, Homo sapiens
  misc_RNA (1)...(19): siRNA sense strand
cauccuggagaacaucuuu

SEQ ID NO: 85155 - RNA, 19 nt, Homo sapiens
  misc_RNA (1)...(19): siRNA sense strand
cuacgucaacuaugauauc

SEQ ID NO: 85156 - RNA, 19 nt, Homo sapiens
  misc_RNA (1)...(19): siRNA sense strand
ugagcgcuauaucacaaug

SEQ ID NO: 85157 - RNA, 19 nt, Homo sapiens
  misc_RNA (1)...(19): siRNA sense strand
auugagcgcuauaucacaa

SEQ ID NO: 85158 - RNA, 19 nt, Homo sapiens
  misc_RNA (1)...(19): siRNA sense strand
ccaccgacccauguacuau

SEQ ID NO: 85159 - RNA, 19 nt, Homo sapiens
  misc_RNA (1)...(19): siRNA sense strand
cucaucugcugcuuuauca

SEQ ID NO: 85160 - RNA, 19 nt, Homo sapiens
  misc_RNA (1)...(19): siRNA sense strand
gaauaucagcgcggacaag

SEQ ID NO: 85161 - RNA, 19 nt, Homo sapiens
  misc_RNA (1)...(19): siRNA sense strand
caucugcugcuuuaucauc

SEQ ID NO: 85162 - RNA, 19 nt, Homo sapiens
  misc_RNA (1)...(19): siRNA sense strand
uacgucaacuaugauauca

SEQ ID NO: 85163 - RNA, 19 nt, Homo sapiens
  misc_RNA (1)...(19): siRNA sense strand
cagcaaaucggacaauucc

SEQ ID NO: 85164 - RNA, 19 nt, Homo sapiens
  misc_RNA (1)...(19): siRNA sense strand
ucauuuacacucugaccaa

SEQ ID NO: 85165 - RNA, 19 nt, Homo sapiens
  misc_RNA (1)...(19): siRNA sense strand
ucggugguguucauucuca

SEQ ID NO: 85166 - RNA, 19 nt, Homo sapiens
  misc_RNA (1)...(19): siRNA sense strand
ccugucagccuccguguuc

SEQ ID NO: 85167 - RNA, 19 nt, Homo sapiens
  misc_RNA (1)...(19): siRNA sense strand
aaggagaacagcauuaaac

SEQ ID NO: 85168 - RNA, 19 nt, Homo sapiens
  misc_RNA (1)...(19): siRNA sense strand
cuucagagcggaguacuuc

SEQ ID NO: 85169 - RNA, 19 nt, Homo sapiens
  misc_RNA (1)...(19): siRNA sense strand
ucaagaccguaauuaucgu

SEQ ID NO: 85170 - RNA, 19 nt, Homo sapiens
  misc_RNA (1)...(19): siRNA sense strand
cccaucauuuacacucuga

SEQ ID NO: 85171 - RNA, 19 nt, Homo sapiens
  misc_RNA (1)...(19): siRNA sense strand
cgcagcaaaucggacaauu

SEQ ID NO: 85172 - RNA, 19 nt, Homo sapiens
  misc_RNA (1)...(19): siRNA sense strand
gaaaugagcgccaccuuua

SEQ ID NO: 85173 - RNA, 19 nt, Homo sapiens
  misc_RNA (1)...(19): siRNA sense strand
gaaagcaucuugccacaga

SEQ ID NO: 85174 - RNA, 19 nt, Homo sapiens
  misc_RNA (1)...(19): siRNA sense strand
gaauucaacucugccauga

SEQ ID NO: 85175 - RNA, 19 nt, Homo sapiens
  misc_RNA (1)...(19): siRNA sense strand
ggacuuggaaucacuguuu

SEQ ID NO: 85176 - RNA, 19 nt, Homo sapiens
  misc_RNA (1)...(19): siRNA sense strand
cuacagugacucuuacuua

SEQ ID NO: 85177 - RNA, 19 nt, Homo sapiens
  misc_RNA (1)...(19): siRNA sense strand
ucucuaugcucacaucuuu

SEQ ID NO: 85178 - RNA, 19 nt, Homo sapiens
  misc_RNA (1)...(19): siRNA sense strand
gcaaucgagaggcacauua

SEQ ID NO: 85179 - RNA, 19 nt, Homo sapiens
  misc_RNA (1)...(19): siRNA sense strand
gcgacgugcuggccuauga

SEQ ID NO: 85180 - RNA, 19 nt, Homo sapiens
  misc_RNA (1)...(19): siRNA sense strand
gaaccacagugcuucuaca

SEQ ID NO: 85181 - RNA, 19 nt, Homo sapiens
  misc_RNA (1)...(19): siRNA sense strand
guuuguaucuucaucaugu

SEQ ID NO: 85182 - RNA, 19 nt, Homo sapiens
  misc_RNA (1)...(19): siRNA sense strand
gcucacaucuuuggcuaug

SEQ ID NO: 85183 - RNA, 19 nt, Homo sapiens
  misc_RNA (1)...(19): siRNA sense strand
gagaggcacauuacgguuu

SEQ ID NO: 85184 - RNA, 19 nt, Homo sapiens
  misc_RNA (1)...(19): siRNA sense strand
cuacuucuaucucauguuc

SEQ ID NO: 85185 - RNA, 19 nt, Homo sapiens
  misc_RNA (1)...(19): siRNA sense strand
gaaucgggauaccaugaug

SEQ ID NO: 85186 - RNA, 19 nt, Homo sapiens
  misc_RNA (1)...(19): siRNA sense strand
gaaauucuuccuucuccuu

SEQ ID NO: 85187 - RNA, 19 nt, Homo sapiens
  misc_RNA (1)...(19): siRNA sense strand
ugaagacuguggucauugu

SEQ ID NO: 85188 - RNA, 19 nt, Homo sapiens
  misc_RNA (1)...(19): siRNA sense strand
ggacuauggccaucguuau

SEQ ID NO: 85189 - RNA, 19 nt, Homo sapiens
  misc_RNA (1)...(19): siRNA sense strand
gaaugucucggcauaguuc

SEQ ID NO: 85190 - RNA, 19 nt, Homo sapiens
  misc_RNA (1)...(19): siRNA sense strand
uaaccgaaguggaaagcau

SEQ ID NO: 85191 - RNA, 19 nt, Homo sapiens
  misc_RNA (1)...(19): siRNA sense strand
ccagaggacuaugagaaug

SEQ ID NO: 85192 - RNA, 19 nt, Homo sapiens
  misc_RNA (1)...(19): siRNA sense strand
cgaguccauugccuucuuu

SEQ ID NO: 85193 - RNA, 19 nt, Homo sapiens
  misc_RNA (1)...(19): siRNA sense strand
uggaaucacuguuuguauc

SEQ ID NO: 85194 - RNA, 19 nt, Homo sapiens
  misc_RNA (1)...(19): siRNA sense strand
gggauaccaugaugagucu

SEQ ID NO: 85195 - RNA, 19 nt, Homo sapiens
  misc_RNA (1)...(19): siRNA sense strand
gguaauggugguucucuau

SEQ ID NO: 85196 - RNA, 19 nt, Homo sapiens
  misc_RNA (1)...(19): siRNA sense strand
cggcaucuguggccaacuu

SEQ ID NO: 85197 - RNA, 19 nt, Homo sapiens
  misc_RNA (1)...(19): siRNA sense strand
agaaaugagcgccaccuuu

SEQ ID NO: 85198 - RNA, 19 nt, Homo sapiens
  misc_RNA (1)...(19): siRNA sense strand
cugcuggacuccuggauug

SEQ ID NO: 85199 - RNA, 19 nt, Homo sapiens
  misc_RNA (1)...(19): siRNA sense strand
guggucaucuggacuaugg

SEQ ID NO: 85200 - RNA, 19 nt, Homo sapiens
  misc_RNA (1)...(19): siRNA sense strand
gaaucacuguuuguaucuu

SEQ ID NO: 85201 - RNA, 19 nt, Homo sapiens
  misc_RNA (1)...(19): siRNA sense strand
agugugggcuggaacugua

SEQ ID NO: 85202 - RNA, 19 nt, Homo sapiens
  misc_RNA (1)...(19): siRNA sense strand
ugaaugaaccacagugcuu

SEQ ID NO: 85203 - RNA, 19 nt, Homo sapiens
  misc_RNA (1)...(19): siRNA sense strand
ucugaagacuguggucauu

SEQ ID NO: 85204 - RNA, 19 nt, Homo sapiens
  misc_RNA (1)...(19): siRNA sense strand
cuacuuccaucccuguaau

SEQ ID NO: 85205 - RNA, 19 nt, Homo sapiens
  misc_RNA (1)...(19): siRNA sense strand
ggucaugguggcaaucuau

SEQ ID NO: 85206 - RNA, 19 nt, Homo sapiens
  misc_RNA (1)...(19): siRNA sense strand
gacuuggaaucacuguuug

SEQ ID NO: 85207 - RNA, 19 nt, Homo sapiens
  misc_RNA (1)...(19): siRNA sense strand
uacagugacucuuacuuag

SEQ ID NO: 85208 - RNA, 19 nt, Homo sapiens
  misc_RNA (1)...(19): siRNA sense strand
gaugggacuuggaaucacu

SEQ ID NO: 85209 - RNA, 19 nt, Homo sapiens
  misc_RNA (1)...(19): siRNA sense strand
ucaacuuggugaccuuugu

SEQ ID NO: 85210 - RNA, 19 nt, Homo sapiens
  misc_RNA (1)...(19): siRNA sense strand
ggaaucacuguuuguaucu

SEQ ID NO: 85211 - RNA, 19 nt, Homo sapiens
  misc_RNA (1)...(19): siRNA sense strand
cgaaguggaaagcaucuug

SEQ ID NO: 85212 - RNA, 19 nt, Homo sapiens
  misc_RNA (1)...(19): siRNA sense strand
caacacaggacccaauacu

SEQ ID NO: 85213 - RNA, 19 nt, Homo sapiens
  misc_RNA (1)...(19): siRNA sense strand
uuccaucccuguaauuuca

SEQ ID NO: 85214 - RNA, 19 nt, Homo sapiens
  misc_RNA (1)...(19): siRNA sense strand
ggguagugguggucauugu

SEQ ID NO: 85215 - RNA, 19 nt, Homo sapiens
  misc_RNA (1)...(19): siRNA sense strand
caucuuggcuggaguucac

SEQ ID NO: 85216 - RNA, 19 nt, Homo sapiens
  misc_RNA (1)...(19): siRNA sense strand
gacuauggccaucguuaug

SEQ ID NO: 85217 - RNA, 19 nt, Homo sapiens
  misc_RNA (1)...(19): siRNA sense strand
ggaaucgggauaccaugau

SEQ ID NO: 85218 - RNA, 19 nt, Homo sapiens
  misc_RNA (1)...(19): siRNA sense strand
uuggugaccuuugugguaa

SEQ ID NO: 85219 - RNA, 19 nt, Homo sapiens
  misc_RNA (1)...(19): siRNA sense strand
guaauggugguucucuaug

SEQ ID NO: 85220 - RNA, 19 nt, Homo sapiens
  misc_RNA (1)...(19): siRNA sense strand
gccagaggacuaugagaau

SEQ ID NO: 85221 - RNA, 19 nt, Homo sapiens
  misc_RNA (1)...(19): siRNA sense strand
uaauggugguucucuaugc

SEQ ID NO: 85222 - RNA, 19 nt, Homo sapiens
  misc_RNA (1)...(19): siRNA sense strand
ccacagaauggaacacagu

SEQ ID NO: 85223 - RNA, 19 nt, Homo sapiens
  misc_RNA (1)...(19): siRNA sense strand
gggcuggaacuguaucugu

SEQ ID NO: 85224 - RNA, 19 nt, Homo sapiens
  misc_RNA (1)...(19): siRNA sense strand
ccaacuuacuggcuauugc

SEQ ID NO: 85225 - RNA, 19 nt, Homo sapiens
  misc_RNA (1)...(19): siRNA sense strand
aaucacuguuuguaucuuc

SEQ ID NO: 85226 - RNA, 19 nt, Homo sapiens
  misc_RNA (1)...(19): siRNA sense strand
ccauugccuucuuuuauaa

SEQ ID NO: 85227 - RNA, 19 nt, Homo sapiens
  misc_RNA (1)...(19): siRNA sense strand
uccauugccuucuuuuaua

SEQ ID NO: 85228 - RNA, 19 nt, Homo sapiens
  misc_RNA (1)...(19): siRNA sense strand
gcuggccuaugagaaauuc

SEQ ID NO: 85229 - RNA, 19 nt, Homo sapiens
  misc_RNA (1)...(19): siRNA sense strand
gcuggaacuguaucuguga

SEQ ID NO: 85230 - RNA, 19 nt, Homo sapiens
  misc_RNA (1)...(19): siRNA sense strand
uggguuggccuacuucuau

SEQ ID NO: 85231 - RNA, 19 nt, Homo sapiens
  misc_RNA (1)...(19): siRNA sense strand
caacuuacuggcuauugca

SEQ ID NO: 85232 - RNA, 19 nt, Homo sapiens
  misc_RNA (1)...(19): siRNA sense strand
gauaccaugaugagucuuc

SEQ ID NO: 85233 - RNA, 19 nt, Homo sapiens
  misc_RNA (1)...(19): siRNA sense strand
uauguucgccagaggacua

SEQ ID NO: 85234 - RNA, 19 nt, Homo sapiens
  misc_RNA (1)...(19): siRNA sense strand
ggugaccuuugugguaaug

SEQ ID NO: 85235 - RNA, 19 nt, Homo sapiens
  misc_RNA (1)...(19): siRNA sense strand
cgccagaggacuaugagaa

SEQ ID NO: 85236 - RNA, 19 nt, Homo sapiens
  misc_RNA (1)...(19): siRNA sense strand
gugcuggccuaugagaaau

SEQ ID NO: 85237 - RNA, 19 nt, Homo sapiens
  misc_RNA (1)...(19): siRNA sense strand
cgugcuggccuaugagaaa

SEQ ID NO: 85238 - RNA, 19 nt, Homo sapiens
  misc_RNA (1)...(19): siRNA sense strand
ggaacacagucagcaagcu

SEQ ID NO: 85239 - RNA, 19 nt, Homo sapiens
  misc_RNA (1)...(19): siRNA sense strand
cagaggacuaugagaaugu

SEQ ID NO: 85240 - RNA, 19 nt, Homo sapiens
  misc_RNA (1)...(19): siRNA sense strand
ggugaugggacuuggaauc

SEQ ID NO: 85241 - RNA, 19 nt, Homo sapiens
  misc_RNA (1)...(19): siRNA sense strand
guucaacacaggacccaau

SEQ ID NO: 85242 - RNA, 19 nt, Homo sapiens
  misc_RNA (1)...(19): siRNA sense strand
gaagacuguggucauugug

SEQ ID NO: 85243 - RNA, 19 nt, Homo sapiens
  misc_RNA (1)...(19): siRNA sense strand
cggaaucgggauaccauga

SEQ ID NO: 85244 - RNA, 19 nt, Homo sapiens
  misc_RNA (1)...(19): siRNA sense strand
cuuacuggcuauugcaauc

SEQ ID NO: 85245 - RNA, 19 nt, Homo sapiens
  misc_RNA (1)...(19): siRNA sense strand
cccaauacucggagacuga

SEQ ID NO: 85246 - RNA, 19 nt, Homo sapiens
  misc_RNA (1)...(19): siRNA sense strand
uggacuauggccaucguua

SEQ ID NO: 85247 - RNA, 19 nt, Homo sapiens
  misc_RNA (1)...(19): siRNA sense strand
cuuggugaccuuuguggua

SEQ ID NO: 85248 - RNA, 19 nt, Homo sapiens
  misc_RNA (1)...(19): siRNA sense strand
cagcuccacacacggauga

SEQ ID NO: 85249 - RNA, 19 nt, Homo sapiens
  misc_RNA (1)...(19): siRNA sense strand
ccucaaccacaccaucuug

SEQ ID NO: 85250 - RNA, 19 nt, Homo sapiens
  misc_RNA (1)...(19): siRNA sense strand
gcugccaucucuacuucca

SEQ ID NO: 85251 - RNA, 19 nt, Homo sapiens
  misc_RNA (1)...(19): siRNA sense strand
uuagucuucugggccauuu

SEQ ID NO: 85252 - RNA, 19 nt, Homo sapiens
  misc_RNA (1)...(19): siRNA sense strand
ccucuacagugacucuuac

SEQ ID NO: 85253 - RNA, 19 nt, Homo sapiens
  misc_RNA (1)...(19): siRNA sense strand
cacagugcuucuacaacga

SEQ ID NO: 85254 - RNA, 19 nt, Homo sapiens
  misc_RNA (1)...(19): siRNA sense strand
acuucuaucucauguucaa

SEQ ID NO: 85255 - RNA, 19 nt, Homo sapiens
  misc_RNA (1)...(19): siRNA sense strand
ggauugguuuuguuacuuc

SEQ ID NO: 85256 - RNA, 19 nt, Homo sapiens
  misc_RNA (1)...(19): siRNA sense strand
caacuuggugaccuuugug

SEQ ID NO: 85257 - RNA, 19 nt, Homo sapiens
  misc_RNA (1)...(19): siRNA sense strand
gaaaugagcgccaccuuua

SEQ ID NO: 85258 - RNA, 19 nt, Homo sapiens
  misc_RNA (1)...(19): siRNA sense strand
gaaagcaucuugccacaga

SEQ ID NO: 85259 - RNA, 19 nt, Homo sapiens
  misc_RNA (1)...(19): siRNA sense strand
gaauucaacucugccauga

SEQ ID NO: 85260 - RNA, 19 nt, Homo sapiens
  misc_RNA (1)...(19): siRNA sense strand
ggacuuggaaucacuguuu

SEQ ID NO: 85261 - RNA, 19 nt, Homo sapiens
  misc_RNA (1)...(19): siRNA sense strand
cuacagugacucuuacuua

SEQ ID NO: 85262 - RNA, 19 nt, Homo sapiens
  misc_RNA (1)...(19): siRNA sense strand
ucucuaugcucacaucuuu

SEQ ID NO: 85263 - RNA, 19 nt, Homo sapiens
  misc_RNA (1)...(19): siRNA sense strand
gcaaucgagaggcacauua

SEQ ID NO: 85264 - RNA, 19 nt, Homo sapiens
  misc_RNA (1)...(19): siRNA sense strand
gcgacgugcuggccuauga

SEQ ID NO: 85265 - RNA, 19 nt, Homo sapiens
  misc_RNA (1)...(19): siRNA sense strand
gaaccacagugcuucuaca

SEQ ID NO: 85266 - RNA, 19 nt, Homo sapiens
  misc_RNA (1)...(19): siRNA sense strand
guuuguaucuucaucaugu

SEQ ID NO: 85267 - RNA, 19 nt, Homo sapiens
  misc_RNA (1)...(19): siRNA sense strand
gcucacaucuuuggcuaug

SEQ ID NO: 85268 - RNA, 19 nt, Homo sapiens
  misc_RNA (1)...(19): siRNA sense strand
gagaggcacauuacgguuu

SEQ ID NO: 85269 - RNA, 19 nt, Homo sapiens
  misc_RNA (1)...(19): siRNA sense strand
cuacuucuaucucauguuc

SEQ ID NO: 85270 - RNA, 19 nt, Homo sapiens
  misc_RNA (1)...(19): siRNA sense strand
gaaucgggauaccaugaug

SEQ ID NO: 85271 - RNA, 19 nt, Homo sapiens
  misc_RNA (1)...(19): siRNA sense strand
gaaauucuuccuucuccuu

SEQ ID NO: 85272 - RNA, 19 nt, Homo sapiens
  misc_RNA (1)...(19): siRNA sense strand
ugaagacuguggucauugu

SEQ ID NO: 85273 - RNA, 19 nt, Homo sapiens
  misc_RNA (1)...(19): siRNA sense strand
ggacuauggccaucguuau

SEQ ID NO: 85274 - RNA, 19 nt, Homo sapiens
  misc_RNA (1)...(19): siRNA sense strand
gaaugucucggcauaguuc

SEQ ID NO: 85275 - RNA, 19 nt, Homo sapiens
  misc_RNA (1)...(19): siRNA sense strand
uaaccgaaguggaaagcau

SEQ ID NO: 85276 - RNA, 19 nt, Homo sapiens
  misc_RNA (1)...(19): siRNA sense strand
ccagaggacuaugagaaug

SEQ ID NO: 85277 - RNA, 19 nt, Homo sapiens
  misc_RNA (1)...(19): siRNA sense strand
cgaguccauugccuucuuu

SEQ ID NO: 85278 - RNA, 19 nt, Homo sapiens
  misc_RNA (1)...(19): siRNA sense strand
uggaaucacuguuuguauc

SEQ ID NO: 85279 - RNA, 19 nt, Homo sapiens
  misc_RNA (1)...(19): siRNA sense strand
gggauaccaugaugagucu

SEQ ID NO: 85280 - RNA, 19 nt, Homo sapiens
  misc_RNA (1)...(19): siRNA sense strand
gguaauggugguucucuau

SEQ ID NO: 85281 - RNA, 19 nt, Homo sapiens
  misc_RNA (1)...(19): siRNA sense strand
cggcaucuguggccaacuu

SEQ ID NO: 85282 - RNA, 19 nt, Homo sapiens
  misc_RNA (1)...(19): siRNA sense strand
agaaaugagcgccaccuuu

SEQ ID NO: 85283 - RNA, 19 nt, Homo sapiens
  misc_RNA (1)...(19): siRNA sense strand
cugcuggacuccuggauug

SEQ ID NO: 85284 - RNA, 19 nt, Homo sapiens
  misc_RNA (1)...(19): siRNA sense strand
guggucaucuggacuaugg

SEQ ID NO: 85285 - RNA, 19 nt, Homo sapiens
  misc_RNA (1)...(19): siRNA sense strand
gaaucacuguuuguaucuu

SEQ ID NO: 85286 - RNA, 19 nt, Homo sapiens
  misc_RNA (1)...(19): siRNA sense strand
agugugggcuggaacugua

SEQ ID NO: 85287 - RNA, 19 nt, Homo sapiens
  misc_RNA (1)...(19): siRNA sense strand
ugaaugaaccacagugcuu

SEQ ID NO: 85288 - RNA, 19 nt, Homo sapiens
  misc_RNA (1)...(19): siRNA sense strand
ucugaagacuguggucauu

SEQ ID NO: 85289 - RNA, 19 nt, Homo sapiens
  misc_RNA (1)...(19): siRNA sense strand
cuacuuccaucccuguaau

SEQ ID NO: 85290 - RNA, 19 nt, Homo sapiens
  misc_RNA (1)...(19): siRNA sense strand
ggucaugguggcaaucuau

SEQ ID NO: 85291 - RNA, 19 nt, Homo sapiens
  misc_RNA (1)...(19): siRNA sense strand
gacuuggaaucacuguuug

SEQ ID NO: 85292 - RNA, 19 nt, Homo sapiens
  misc_RNA (1)...(19): siRNA sense strand
uacagugacucuuacuuag

SEQ ID NO: 85293 - RNA, 19 nt, Homo sapiens
  misc_RNA (1)...(19): siRNA sense strand
gaugggacuuggaaucacu

SEQ ID NO: 85294 - RNA, 19 nt, Homo sapiens
  misc_RNA (1)...(19): siRNA sense strand
ucaacuuggugaccuuugu

SEQ ID NO: 85295 - RNA, 19 nt, Homo sapiens
  misc_RNA (1)...(19): siRNA sense strand
ggaaucacuguuuguaucu

SEQ ID NO: 85296 - RNA, 19 nt, Homo sapiens
  misc_RNA (1)...(19): siRNA sense strand
cgaaguggaaagcaucuug

SEQ ID NO: 85297 - RNA, 19 nt, Homo sapiens
  misc_RNA (1)...(19): siRNA sense strand
caacacaggacccaauacu

SEQ ID NO: 85298 - RNA, 19 nt, Homo sapiens
  misc_RNA (1)...(19): siRNA sense strand
uuccaucccuguaauuuca

SEQ ID NO: 85299 - RNA, 19 nt, Homo sapiens
  misc_RNA (1)...(19): siRNA sense strand
ggguagugguggucauugu

SEQ ID NO: 85300 - RNA, 19 nt, Homo sapiens
  misc_RNA (1)...(19): siRNA sense strand
caucuuggcuggaguucac

SEQ ID NO: 85301 - RNA, 19 nt, Homo sapiens
  misc_RNA (1)...(19): siRNA sense strand
gacuauggccaucguuaug

SEQ ID NO: 85302 - RNA, 19 nt, Homo sapiens
  misc_RNA (1)...(19): siRNA sense strand
ggaaucgggauaccaugau

SEQ ID NO: 85303 - RNA, 19 nt, Homo sapiens
  misc_RNA (1)...(19): siRNA sense strand
uuggugaccuuugugguaa

SEQ ID NO: 85304 - RNA, 19 nt, Homo sapiens
  misc_RNA (1)...(19): siRNA sense strand
guaauggugguucucuaug

SEQ ID NO: 85305 - RNA, 19 nt, Homo sapiens
  misc_RNA (1)...(19): siRNA sense strand
gccagaggacuaugagaau

SEQ ID NO: 85306 - RNA, 19 nt, Homo sapiens
  misc_RNA (1)...(19): siRNA sense strand
uaauggugguucucuaugc

SEQ ID NO: 85307 - RNA, 19 nt, Homo sapiens
  misc_RNA (1)...(19): siRNA sense strand
ccacagaauggaacacagu

SEQ ID NO: 85308 - RNA, 19 nt, Homo sapiens
  misc_RNA (1)...(19): siRNA sense strand
gggcuggaacuguaucugu

SEQ ID NO: 85309 - RNA, 19 nt, Homo sapiens
  misc_RNA (1)...(19): siRNA sense strand
ccaacuuacuggcuauugc

SEQ ID NO: 85310 - RNA, 19 nt, Homo sapiens
  misc_RNA (1)...(19): siRNA sense strand
aaucacuguuuguaucuuc

SEQ ID NO: 85311 - RNA, 19 nt, Homo sapiens
  misc_RNA (1)...(19): siRNA sense strand
ccauugccuucuuuuauaa

SEQ ID NO: 85312 - RNA, 19 nt, Homo sapiens
  misc_RNA (1)...(19): siRNA sense strand
uccauugccuucuuuuaua

SEQ ID NO: 85313 - RNA, 19 nt, Homo sapiens
  misc_RNA (1)...(19): siRNA sense strand
gcuggccuaugagaaauuc

SEQ ID NO: 85314 - RNA, 19 nt, Homo sapiens
  misc_RNA (1)...(19): siRNA sense strand
gcuggaacuguaucuguga

SEQ ID NO: 85315 - RNA, 19 nt, Homo sapiens
  misc_RNA (1)...(19): siRNA sense strand
uggguuggccuacuucuau

SEQ ID NO: 85316 - RNA, 19 nt, Homo sapiens
  misc_RNA (1)...(19): siRNA sense strand
caacuuacuggcuauugca

SEQ ID NO: 85317 - RNA, 19 nt, Homo sapiens
  misc_RNA (1)...(19): siRNA sense strand
gauaccaugaugagucuuc

SEQ ID NO: 85318 - RNA, 19 nt, Homo sapiens
  misc_RNA (1)...(19): siRNA sense strand
uauguucgccagaggacua

SEQ ID NO: 85319 - RNA, 19 nt, Homo sapiens
  misc_RNA (1)...(19): siRNA sense strand
ggugaccuuugugguaaug

SEQ ID NO: 85320 - RNA, 19 nt, Homo sapiens
  misc_RNA (1)...(19): siRNA sense strand
cgccagaggacuaugagaa

SEQ ID NO: 85321 - RNA, 19 nt, Homo sapiens
  misc_RNA (1)...(19): siRNA sense strand
gugcuggccuaugagaaau

SEQ ID NO: 85322 - RNA, 19 nt, Homo sapiens
  misc_RNA (1)...(19): siRNA sense strand
cgugcuggccuaugagaaa

SEQ ID NO: 85323 - RNA, 19 nt, Homo sapiens
  misc_RNA (1)...(19): siRNA sense strand
ggaacacagucagcaagcu

SEQ ID NO: 85324 - RNA, 19 nt, Homo sapiens
  misc_RNA (1)...(19): siRNA sense strand
cagaggacuaugagaaugu

SEQ ID NO: 85325 - RNA, 19 nt, Homo sapiens
  misc_RNA (1)...(19): siRNA sense strand
ggugaugggacuuggaauc

SEQ ID NO: 85326 - RNA, 19 nt, Homo sapiens
  misc_RNA (1)...(19): siRNA sense strand
guucaacacaggacccaau

SEQ ID NO: 85327 - RNA, 19 nt, Homo sapiens
  misc_RNA (1)...(19): siRNA sense strand
gaagacuguggucauugug

SEQ ID NO: 85328 - RNA, 19 nt, Homo sapiens
  misc_RNA (1)...(19): siRNA sense strand
cggaaucgggauaccauga

SEQ ID NO: 85329 - RNA, 19 nt, Homo sapiens
  misc_RNA (1)...(19): siRNA sense strand
cuuacuggcuauugcaauc

SEQ ID NO: 85330 - RNA, 19 nt, Homo sapiens
  misc_RNA (1)...(19): siRNA sense strand
cccaauacucggagacuga

SEQ ID NO: 85331 - RNA, 19 nt, Homo sapiens
  misc_RNA (1)...(19): siRNA sense strand
uggacuauggccaucguua

SEQ ID NO: 85332 - RNA, 19 nt, Homo sapiens
  misc_RNA (1)...(19): siRNA sense strand
cuuggugaccuuuguggua

SEQ ID NO: 85333 - RNA, 19 nt, Homo sapiens
  misc_RNA (1)...(19): siRNA sense strand
cagcuccacacacggauga

SEQ ID NO: 85334 - RNA, 19 nt, Homo sapiens
  misc_RNA (1)...(19): siRNA sense strand
ccucaaccacaccaucuug

SEQ ID NO: 85335 - RNA, 19 nt, Homo sapiens
  misc_RNA (1)...(19): siRNA sense strand
gcugccaucucuacuucca

SEQ ID NO: 85336 - RNA, 19 nt, Homo sapiens
  misc_RNA (1)...(19): siRNA sense strand
uuagucuucugggccauuu

SEQ ID NO: 85337 - RNA, 19 nt, Homo sapiens
  misc_RNA (1)...(19): siRNA sense strand
ccucuacagugacucuuac

SEQ ID NO: 85338 - RNA, 19 nt, Homo sapiens
  misc_RNA (1)...(19): siRNA sense strand
cacagugcuucuacaacga

SEQ ID NO: 85339 - RNA, 19 nt, Homo sapiens
  misc_RNA (1)...(19): siRNA sense strand
acuucuaucucauguucaa

SEQ ID NO: 85340 - RNA, 19 nt, Homo sapiens
  misc_RNA (1)...(19): siRNA sense strand
ggauugguuuuguuacuuc

SEQ ID NO: 85341 - RNA, 19 nt, Homo sapiens
  misc_RNA (1)...(19): siRNA sense strand
caacuuggugaccuuugug

SEQ ID NO: 85342 - RNA, 19 nt, Homo sapiens
  misc_RNA (1)...(19): siRNA sense strand
agcaauaacucguguagca

SEQ ID NO: 85343 - RNA, 19 nt, Homo sapiens
  misc_RNA (1)...(19): siRNA sense strand
gcuacgccgucuacuggaa

SEQ ID NO: 85344 - RNA, 19 nt, Homo sapiens
  misc_RNA (1)...(19): siRNA sense strand
gaggugagcaucaaugacu

SEQ ID NO: 85345 - RNA, 19 nt, Homo sapiens
  misc_RNA (1)...(19): siRNA sense strand
ccaacgagacccuguacga

SEQ ID NO: 85346 - RNA, 19 nt, Homo sapiens
  misc_RNA (1)...(19): siRNA sense strand
augacuaccuggacaucua

SEQ ID NO: 85347 - RNA, 19 nt, Homo sapiens
  misc_RNA (1)...(19): siRNA sense strand
cggagaaguuccagcucuu

SEQ ID NO: 85348 - RNA, 19 nt, Homo sapiens
  misc_RNA (1)...(19): siRNA sense strand
cgaccaacgagacccugua

SEQ ID NO: 85349 - RNA, 19 nt, Homo sapiens
  misc_RNA (1)...(19): siRNA sense strand
gccugcgacugaaggugua

SEQ ID NO: 85350 - RNA, 19 nt, Homo sapiens
  misc_RNA (1)...(19): siRNA sense strand
ccgagcgcauggagcacua

SEQ ID NO: 85351 - RNA, 19 nt, Homo sapiens
  misc_RNA (1)...(19): siRNA sense strand
gaaggugaguggugacuau

SEQ ID NO: 85352 - RNA, 19 nt, Homo sapiens
  misc_RNA (1)...(19): siRNA sense strand
gaucuccgcuucaccauca

SEQ ID NO: 85353 - RNA, 19 nt, Homo sapiens
  misc_RNA (1)...(19): siRNA sense strand
gcaccacgauuacuacauc

SEQ ID NO: 85354 - RNA, 19 nt, Homo sapiens
  misc_RNA (1)...(19): siRNA sense strand
aaacaucuacuacaaggua

SEQ ID NO: 85355 - RNA, 19 nt, Homo sapiens
  misc_RNA (1)...(19): siRNA sense strand
ucacuccucuccuaauuau

SEQ ID NO: 85356 - RNA, 19 nt, Homo sapiens
  misc_RNA (1)...(19): siRNA sense strand
ccagagcccuccaaacauc

SEQ ID NO: 85357 - RNA, 19 nt, Homo sapiens
  misc_RNA (1)...(19): siRNA sense strand
gaguauagcccuaaucucu

SEQ ID NO: 85358 - RNA, 19 nt, Homo sapiens
  misc_RNA (1)...(19): siRNA sense strand
caaaccuccuucucacuug

SEQ ID NO: 85359 - RNA, 19 nt, Homo sapiens
  misc_RNA (1)...(19): siRNA sense strand
ccaucaaguuccaggagua

SEQ ID NO: 85360 - RNA, 19 nt, Homo sapiens
  misc_RNA (1)...(19): siRNA sense strand
gaaaaccugugucugaaau

SEQ ID NO: 85361 - RNA, 19 nt, Homo sapiens
  misc_RNA (1)...(19): siRNA sense strand
ccucacuccucuccuaauu

SEQ ID NO: 85362 - RNA, 19 nt, Homo sapiens
  misc_RNA (1)...(19): siRNA sense strand
gcucgcaccacgauuacua

SEQ ID NO: 85363 - RNA, 19 nt, Homo sapiens
  misc_RNA (1)...(19): siRNA sense strand
ggaggugugugccuaacca

SEQ ID NO: 85364 - RNA, 19 nt, Homo sapiens
  misc_RNA (1)...(19): siRNA sense strand
cuccaaacaucuacuacaa

SEQ ID NO: 85365 - RNA, 19 nt, Homo sapiens
  misc_RNA (1)...(19): siRNA sense strand
ggcagagggugguuaugug

SEQ ID NO: 85366 - RNA, 19 nt, Homo sapiens
  misc_RNA (1)...(19): siRNA sense strand
ccaaaccuccuucucacuu

SEQ ID NO: 85367 - RNA, 19 nt, Homo sapiens
  misc_RNA (1)...(19): siRNA sense strand
ggcccucacuccucuccua

SEQ ID NO: 85368 - RNA, 19 nt, Homo sapiens
  misc_RNA (1)...(19): siRNA sense strand
ggaacucggcgaauaagag

SEQ ID NO: 85369 - RNA, 19 nt, Homo sapiens
  misc_RNA (1)...(19): siRNA sense strand
gaaaugcccauggaaagag

SEQ ID NO: 85370 - RNA, 19 nt, Homo sapiens
  misc_RNA (1)...(19): siRNA sense strand
cacgauuacuacaucauug

SEQ ID NO: 85371 - RNA, 19 nt, Homo sapiens
  misc_RNA (1)...(19): siRNA sense strand
ccacgauuacuacaucauu

SEQ ID NO: 85372 - RNA, 19 nt, Homo sapiens
  misc_RNA (1)...(19): siRNA sense strand
uacuggaacucggcgaaua

SEQ ID NO: 85373 - RNA, 19 nt, Homo sapiens
  misc_RNA (1)...(19): siRNA sense strand
ugaaaugcccauggaaaga

SEQ ID NO: 85374 - RNA, 19 nt, Homo sapiens
  misc_RNA (1)...(19): siRNA sense strand
ugucugaaaugcccaugga

SEQ ID NO: 85375 - RNA, 19 nt, Homo sapiens
  misc_RNA (1)...(19): siRNA sense strand
gagccugucuacuggaacu

SEQ ID NO: 85376 - RNA, 19 nt, Homo sapiens
  misc_RNA (1)...(19): siRNA sense strand
cuaugggcauccuguguau

SEQ ID NO: 85377 - RNA, 19 nt, Homo sapiens
  misc_RNA (1)...(19): siRNA sense strand
ggccaagccuucggagagu

SEQ ID NO: 85378 - RNA, 19 nt, Homo sapiens
  misc_RNA (1)...(19): siRNA sense strand
acuccucuccuaauuauga

SEQ ID NO: 85379 - RNA, 19 nt, Homo sapiens
  misc_RNA (1)...(19): siRNA sense strand
aaaugcccauggaaagaga

SEQ ID NO: 85380 - RNA, 19 nt, Homo sapiens
  misc_RNA (1)...(19): siRNA sense strand
ccaggaguauagcccuaau

SEQ ID NO: 85381 - RNA, 19 nt, Homo sapiens
  misc_RNA (1)...(19): siRNA sense strand
ucaaguuccaggaguauag

SEQ ID NO: 85382 - RNA, 19 nt, Homo sapiens
  misc_RNA (1)...(19): siRNA sense strand
ucugaaaugcccauggaaa

SEQ ID NO: 85383 - RNA, 19 nt, Homo sapiens
  misc_RNA (1)...(19): siRNA sense strand
aaaccuccuucucacuugu

SEQ ID NO: 85384 - RNA, 19 nt, Homo sapiens
  misc_RNA (1)...(19): siRNA sense strand
caucuacuacaagguauga

SEQ ID NO: 85385 - RNA, 19 nt, Homo sapiens
  misc_RNA (1)...(19): siRNA sense strand
uaugugcuguacccucaga

SEQ ID NO: 85386 - RNA, 19 nt, Homo sapiens
  misc_RNA (1)...(19): siRNA sense strand
acuaugggcauccugugua

SEQ ID NO: 85387 - RNA, 19 nt, Homo sapiens
  misc_RNA (1)...(19): siRNA sense strand
ccaggcagagggugguuau

SEQ ID NO: 85388 - RNA, 19 nt, Homo sapiens
  misc_RNA (1)...(19): siRNA sense strand
gccuggagccugucuacug

SEQ ID NO: 85389 - RNA, 19 nt, Homo sapiens
  misc_RNA (1)...(19): siRNA sense strand
aaaccugugucugaaaugc

SEQ ID NO: 85390 - RNA, 19 nt, Homo sapiens
  misc_RNA (1)...(19): siRNA sense strand
gcaaugaccuccuguccua

SEQ ID NO: 85391 - RNA, 19 nt, Homo sapiens
  misc_RNA (1)...(19): siRNA sense strand
ugacaaugcuccacaauuu

SEQ ID NO: 85392 - RNA, 19 nt, Homo sapiens
  misc_RNA (1)...(19): siRNA sense strand
gcaaagagguagucuguca

SEQ ID NO: 85393 - RNA, 19 nt, Homo sapiens
  misc_RNA (1)...(19): siRNA sense strand
gccgaaagcuagacaauaa

SEQ ID NO: 85394 - RNA, 19 nt, Homo sapiens
  misc_RNA (1)...(19): siRNA sense strand
ggaaaggcauccugaagaa

SEQ ID NO: 85395 - RNA, 19 nt, Homo sapiens
  misc_RNA (1)...(19): siRNA sense strand
ggaauuguccguacaguaa

SEQ ID NO: 85396 - RNA, 19 nt, Homo sapiens
  misc_RNA (1)...(19): siRNA sense strand
ggcaaagacugucagcuua

SEQ ID NO: 85397 - RNA, 19 nt, Homo sapiens
  misc_RNA (1)...(19): siRNA sense strand
caaacaagcuccaagaagu

SEQ ID NO: 85398 - RNA, 19 nt, Homo sapiens
  misc_RNA (1)...(19): siRNA sense strand
acacugagcuggaacuuug

SEQ ID NO: 85399 - RNA, 19 nt, Homo sapiens
  misc_RNA (1)...(19): siRNA sense strand
cgacaaugcuccucaguuc

SEQ ID NO: 85400 - RNA, 19 nt, Homo sapiens
  misc_RNA (1)...(19): siRNA sense strand
caacaacacggcucucuuu

SEQ ID NO: 85401 - RNA, 19 nt, Homo sapiens
  misc_RNA (1)...(19): siRNA sense strand
gaaagagaauagcauugug

SEQ ID NO: 85402 - RNA, 19 nt, Homo sapiens
  misc_RNA (1)...(19): siRNA sense strand
caauagccguggacacuuu

SEQ ID NO: 85403 - RNA, 19 nt, Homo sapiens
  misc_RNA (1)...(19): siRNA sense strand
cggcagcgauuccaccuua

SEQ ID NO: 85404 - RNA, 19 nt, Homo sapiens
  misc_RNA (1)...(19): siRNA sense strand
gugagucuguggagcauua

SEQ ID NO: 85405 - RNA, 19 nt, Homo sapiens
  misc_RNA (1)...(19): siRNA sense strand
gcaguuuggugcugagauu

SEQ ID NO: 85406 - RNA, 19 nt, Homo sapiens
  misc_RNA (1)...(19): siRNA sense strand
gaacugacggcacucauug

SEQ ID NO: 85407 - RNA, 19 nt, Homo sapiens
  misc_RNA (1)...(19): siRNA sense strand
gaaugaagaucggccaaug

SEQ ID NO: 85408 - RNA, 19 nt, Homo sapiens
  misc_RNA (1)...(19): siRNA sense strand
auacagggcuggucucuga

SEQ ID NO: 85409 - RNA, 19 nt, Homo sapiens
  misc_RNA (1)...(19): siRNA sense strand
gaacucacauaccugaauc

SEQ ID NO: 85410 - RNA, 19 nt, Homo sapiens
  misc_RNA (1)...(19): siRNA sense strand
ugacugugcuggacguuaa

SEQ ID NO: 85411 - RNA, 19 nt, Homo sapiens
  misc_RNA (1)...(19): siRNA sense strand
gaucccaacugcaacaaga

SEQ ID NO: 85412 - RNA, 19 nt, Homo sapiens
  misc_RNA (1)...(19): siRNA sense strand
ugaagaaccgguugcaaua

SEQ ID NO: 85413 - RNA, 19 nt, Homo sapiens
  misc_RNA (1)...(19): siRNA sense strand
caacacggcucucuuugag

SEQ ID NO: 85414 - RNA, 19 nt, Homo sapiens
  misc_RNA (1)...(19): siRNA sense strand
uaacugugcuagacgagaa

SEQ ID NO: 85415 - RNA, 19 nt, Homo sapiens
  misc_RNA (1)...(19): siRNA sense strand
ucaaugacgugaaugacaa

SEQ ID NO: 85416 - RNA, 19 nt, Homo sapiens
  misc_RNA (1)...(19): siRNA sense strand
gaaugacaaugcuccacaa

SEQ ID NO: 85417 - RNA, 19 nt, Homo sapiens
  misc_RNA (1)...(19): siRNA sense strand
gcucuucuguguccuaaau

SEQ ID NO: 85418 - RNA, 19 nt, Homo sapiens
  misc_RNA (1)...(19): siRNA sense strand
gaacaagacggcacuggau

SEQ ID NO: 85419 - RNA, 19 nt, Homo sapiens
  misc_RNA (1)...(19): siRNA sense strand
ccaguacacuuuccagaau

SEQ ID NO: 85420 - RNA, 19 nt, Homo sapiens
  misc_RNA (1)...(19): siRNA sense strand
gugcugagauuggcaacua

SEQ ID NO: 85421 - RNA, 19 nt, Homo sapiens
  misc_RNA (1)...(19): siRNA sense strand
gaacaguuggacauucuuu

SEQ ID NO: 85422 - RNA, 19 nt, Homo sapiens
  misc_RNA (1)...(19): siRNA sense strand
ugaggcaccuggaggagua

SEQ ID NO: 85423 - RNA, 19 nt, Homo sapiens
  misc_RNA (1)...(19): siRNA sense strand
ccacacagcacgcuccuuu

SEQ ID NO: 85424 - RNA, 19 nt, Homo sapiens
  misc_RNA (1)...(19): siRNA sense strand
ggccacaucugcuccuuug

SEQ ID NO: 85425 - RNA, 19 nt, Homo sapiens
  misc_RNA (1)...(19): siRNA sense strand
aagaagaccucugcacuga

SEQ ID NO: 85426 - RNA, 19 nt, Homo sapiens
  misc_RNA (1)...(19): siRNA sense strand
gagcuuugcuggcccuguu

SEQ ID NO: 85427 - RNA, 19 nt, Homo sapiens
  misc_RNA (1)...(19): siRNA sense strand
ccugggaucuccauuauca

SEQ ID NO: 85428 - RNA, 19 nt, Homo sapiens
  misc_RNA (1)...(19): siRNA sense strand
gagcccaccucuggaauug

SEQ ID NO: 85429 - RNA, 19 nt, Homo sapiens
  misc_RNA (1)...(19): siRNA sense strand
ccaaugcccauauaaugua

SEQ ID NO: 85430 - RNA, 19 nt, Homo sapiens
  misc_RNA (1)...(19): siRNA sense strand
gcgagcacauggaaagcua

SEQ ID NO: 85431 - RNA, 19 nt, Homo sapiens
  misc_RNA (1)...(19): siRNA sense strand
gaguggacauggcggcuuu

SEQ ID NO: 85432 - RNA, 19 nt, Homo sapiens
  misc_RNA (1)...(19): siRNA sense strand
gaggacgucuucaucuuca

SEQ ID NO: 85433 - RNA, 19 nt, Homo sapiens
  misc_RNA (1)...(19): siRNA sense strand
ggccguggcucugcaguuu

SEQ ID NO: 85434 - RNA, 19 nt, Homo sapiens
  misc_RNA (1)...(19): siRNA sense strand
gagccugggaucuccauua

SEQ ID NO: 85435 - RNA, 19 nt, Homo sapiens
  misc_RNA (1)...(19): siRNA sense strand
ggccaccgcuguccaacaa

SEQ ID NO: 85436 - RNA, 19 nt, Homo sapiens
  misc_RNA (1)...(19): siRNA sense strand
gcaaggaugcagcuaacaa

SEQ ID NO: 85437 - RNA, 19 nt, Homo sapiens
  misc_RNA (1)...(19): siRNA sense strand
cuaugaggcucgccaagaa

SEQ ID NO: 85438 - RNA, 19 nt, Homo sapiens
  misc_RNA (1)...(19): siRNA sense strand
caagugcggcucacauauu

SEQ ID NO: 85439 - RNA, 19 nt, Homo sapiens
  misc_RNA (1)...(19): siRNA sense strand
ccaagaauaugugauugug

SEQ ID NO: 85440 - RNA, 19 nt, Homo sapiens
  misc_RNA (1)...(19): siRNA sense strand
gaaggcagacacuacuuau

SEQ ID NO: 85441 - RNA, 19 nt, Homo sapiens
  misc_RNA (1)...(19): siRNA sense strand
gcaaacaagcuccaagaag

SEQ ID NO: 85442 - RNA, 19 nt, Homo sapiens
  misc_RNA (1)...(19): siRNA sense strand
ggacaagguggcugugcua

SEQ ID NO: 85443 - RNA, 19 nt, Homo sapiens
  misc_RNA (1)...(19): siRNA sense strand
gccaucagcuaccagauca

SEQ ID NO: 85444 - RNA, 19 nt, Homo sapiens
  misc_RNA (1)...(19): siRNA sense strand
gacaauggcaucccacaga

SEQ ID NO: 85445 - RNA, 19 nt, Homo sapiens
  misc_RNA (1)...(19): siRNA sense strand
uaucacagcucgggacaau

SEQ ID NO: 85446 - RNA, 19 nt, Homo sapiens
  misc_RNA (1)...(19): siRNA sense strand
caaggacgccaacggauug

SEQ ID NO: 85447 - RNA, 19 nt, Homo sapiens
  misc_RNA (1)...(19): siRNA sense strand
gcagcuaccucagggacaa

SEQ ID NO: 85448 - RNA, 19 nt, Homo sapiens
  misc_RNA (1)...(19): siRNA sense strand
cggaaucgcuuugccauca

SEQ ID NO: 85449 - RNA, 19 nt, Homo sapiens
  misc_RNA (1)...(19): siRNA sense strand
ggacuucgaggcagagaga

SEQ ID NO: 85450 - RNA, 19 nt, Homo sapiens
  misc_RNA (1)...(19): siRNA sense strand
ucacagaugccaacacuca

SEQ ID NO: 85451 - RNA, 19 nt, Homo sapiens
  misc_RNA (1)...(19): siRNA sense strand
gggaugcgcucgacuuagg

SEQ ID NO: 85452 - RNA, 19 nt, Homo sapiens
  misc_RNA (1)...(19): siRNA sense strand
gugccaggcuuccucagaa

SEQ ID NO: 85453 - RNA, 19 nt, Homo sapiens
  misc_RNA (1)...(19): siRNA sense strand
caagacaaaugggcagugu

SEQ ID NO: 85454 - RNA, 19 nt, Homo sapiens
  misc_RNA (1)...(19): siRNA sense strand
ccaguucguucgucauguu

SEQ ID NO: 85455 - RNA, 19 nt, Homo sapiens
  misc_RNA (1)...(19): siRNA sense strand
ugugagaacuacaugaaau

SEQ ID NO: 85456 - RNA, 19 nt, Homo sapiens
  misc_RNA (1)...(19): siRNA sense strand
gcccugugcucaacaacuu

SEQ ID NO: 85457 - RNA, 19 nt, Homo sapiens
  misc_RNA (1)...(19): siRNA sense strand
ucccugagcuguuccaaau

SEQ ID NO: 85458 - RNA, 19 nt, Homo sapiens
  misc_RNA (1)...(19): siRNA sense strand
uaugaugccugcccuaagu

SEQ ID NO: 85459 - RNA, 19 nt, Homo sapiens
  misc_RNA (1)...(19): siRNA sense strand
ggaugcagcuaacaacaac

SEQ ID NO: 85460 - RNA, 19 nt, Homo sapiens
  misc_RNA (1)...(19): siRNA sense strand
gaugaacgggaccauguuu

SEQ ID NO: 85461 - RNA, 19 nt, Homo sapiens
  misc_RNA (1)...(19): siRNA sense strand
ggaggugacuggccacacu

SEQ ID NO: 85462 - RNA, 19 nt, Homo sapiens
  misc_RNA (1)...(19): siRNA sense strand
gaugguggccgugacagua

SEQ ID NO: 85463 - RNA, 19 nt, Homo sapiens
  misc_RNA (1)...(19): siRNA sense strand
acaagcagcagcauagaaa

SEQ ID NO: 85464 - RNA, 19 nt, Homo sapiens
  misc_RNA (1)...(19): siRNA sense strand
gaugcccacuucaaugaga

SEQ ID NO: 85465 - RNA, 19 nt, Homo sapiens
  misc_RNA (1)...(19): siRNA sense strand
cucaggagccauuacauua

SEQ ID NO: 85466 - RNA, 19 nt, Homo sapiens
  misc_RNA (1)...(19): siRNA sense strand
acaauggcaucccacagaa

SEQ ID NO: 85467 - RNA, 19 nt, Homo sapiens
  misc_RNA (1)...(19): siRNA sense strand
ggagcaaggcgaucugugu

SEQ ID NO: 85468 - RNA, 19 nt, Homo sapiens
  misc_RNA (1)...(19): siRNA sense strand
ggugacgccuaauaucaug

SEQ ID NO: 85469 - RNA, 19 nt, Homo sapiens
  misc_RNA (1)...(19): siRNA sense strand
gcaauggcauacagugcau

SEQ ID NO: 85470 - RNA, 19 nt, Homo sapiens
  misc_RNA (1)...(19): siRNA sense strand
ccagaacgacacagacgua

SEQ ID NO: 85471 - RNA, 19 nt, Homo sapiens
  misc_RNA (1)...(19): siRNA sense strand
gaaggaguaccaccuacga

SEQ ID NO: 85472 - RNA, 19 nt, Homo sapiens
  misc_RNA (1)...(19): siRNA sense strand
ggaacucacauaccugaau

SEQ ID NO: 85473 - RNA, 19 nt, Homo sapiens
  misc_RNA (1)...(19): siRNA sense strand
gccuagagcugaacaagac

SEQ ID NO: 85474 - RNA, 19 nt, Homo sapiens
  misc_RNA (1)...(19): siRNA sense strand
gccaagugcggcucacaua

SEQ ID NO: 85475 - RNA, 19 nt, Homo sapiens
  misc_RNA (1)...(19): siRNA sense strand
gcacaucaacaucacagau

SEQ ID NO: 85476 - RNA, 19 nt, Homo sapiens
  misc_RNA (1)...(19): siRNA sense strand
gggagacccuucgcgagaa

SEQ ID NO: 85477 - RNA, 19 nt, Homo sapiens
  misc_RNA (1)...(19): siRNA sense strand
ccugugcucugcagacuug

SEQ ID NO: 85478 - RNA, 19 nt, Homo sapiens
  misc_RNA (1)...(19): siRNA sense strand
gaguuucgccugcuacaga

SEQ ID NO: 85479 - RNA, 19 nt, Homo sapiens
  misc_RNA (1)...(19): siRNA sense strand
gggcuggugacgccuaaua

SEQ ID NO: 85480 - RNA, 19 nt, Homo sapiens
  misc_RNA (1)...(19): siRNA sense strand
cagccacacucgcaaggaa

SEQ ID NO: 85481 - RNA, 19 nt, Homo sapiens
  misc_RNA (1)...(19): siRNA sense strand
uggaggugauggucaauga

SEQ ID NO: 85482 - RNA, 19 nt, Homo sapiens
  misc_RNA (1)...(19): siRNA sense strand
agaaggcagacacuacuua

SEQ ID NO: 85483 - RNA, 19 nt, Homo sapiens
  misc_RNA (1)...(19): siRNA sense strand
uguggagcauuacuucuuu

SEQ ID NO: 85484 - RNA, 19 nt, Homo sapiens
  misc_RNA (1)...(19): siRNA sense strand
ccacugaccgggacaagga

SEQ ID NO: 85485 - RNA, 19 nt, Homo sapiens
  misc_RNA (1)...(19): siRNA sense strand
ggagacccuucgcgagaau

SEQ ID NO: 85486 - RNA, 19 nt, Homo sapiens
  misc_RNA (1)...(19): siRNA sense strand
cuacuuauguggaggugau

SEQ ID NO: 85487 - RNA, 19 nt, Homo sapiens
  misc_RNA (1)...(19): siRNA sense strand
gaaguucugcccacaagca

SEQ ID NO: 85488 - RNA, 19 nt, Homo sapiens
  misc_RNA (1)...(19): siRNA sense strand
acucuugccucccauguga

SEQ ID NO: 85489 - RNA, 19 nt, Homo sapiens
  misc_RNA (1)...(19): siRNA sense strand
ggugaaagagaauagcauu

SEQ ID NO: 85490 - RNA, 19 nt, Homo sapiens
  misc_RNA (1)...(19): siRNA sense strand
gcacacagcuggcuacuuc

SEQ ID NO: 85491 - RNA, 19 nt, Homo sapiens
  misc_RNA (1)...(19): siRNA sense strand
caaauuaccuugggccaua

SEQ ID NO: 85492 - RNA, 19 nt, Homo sapiens
  misc_RNA (1)...(19): siRNA sense strand
gggaagagguggaauccua

SEQ ID NO: 85493 - RNA, 19 nt, Homo sapiens
  misc_RNA (1)...(19): siRNA sense strand
agacauggcugacuucauu

SEQ ID NO: 85494 - RNA, 19 nt, Homo sapiens
  misc_RNA (1)...(19): siRNA sense strand
gagagaacguggcccagua

SEQ ID NO: 85495 - RNA, 19 nt, Homo sapiens
  misc_RNA (1)...(19): siRNA sense strand
gcugugaagugaauuauga

SEQ ID NO: 85496 - RNA, 19 nt, Homo sapiens
  misc_RNA (1)...(19): siRNA sense strand
cgacaacaauccaaccuuu

SEQ ID NO: 85497 - RNA, 19 nt, Homo sapiens
  misc_RNA (1)...(19): siRNA sense strand
ggugacaacuguacuaaug

SEQ ID NO: 85498 - RNA, 19 nt, Homo sapiens
  misc_RNA (1)...(19): siRNA sense strand
cagcugaaauacuacaaua

SEQ ID NO: 85499 - RNA, 19 nt, Homo sapiens
  misc_RNA (1)...(19): siRNA sense strand
uuucagagcucccacuaua

SEQ ID NO: 85500 - RNA, 19 nt, Homo sapiens
  misc_RNA (1)...(19): siRNA sense strand
cgaaaccgcuucuccauca

SEQ ID NO: 85501 - RNA, 19 nt, Homo sapiens
  misc_RNA (1)...(19): siRNA sense strand
gcaaugccguggugcacua

SEQ ID NO: 85502 - RNA, 19 nt, Homo sapiens
  misc_RNA (1)...(19): siRNA sense strand
gggaggaaguugauuucua

SEQ ID NO: 85503 - RNA, 19 nt, Homo sapiens
  misc_RNA (1)...(19): siRNA sense strand
caacaacuaugucaccaau

SEQ ID NO: 85504 - RNA, 19 nt, Homo sapiens
  misc_RNA (1)...(19): siRNA sense strand
ccgaauuucucuucuuuaa

SEQ ID NO: 85505 - RNA, 19 nt, Homo sapiens
  misc_RNA (1)...(19): siRNA sense strand
ggaggaaguugauuucuac

SEQ ID NO: 85506 - RNA, 19 nt, Homo sapiens
  misc_RNA (1)...(19): siRNA sense strand
caacaucccugaggucuuc

SEQ ID NO: 85507 - RNA, 19 nt, Homo sapiens
  misc_RNA (1)...(19): siRNA sense strand
gaucgugauucuggacuua

SEQ ID NO: 85508 - RNA, 19 nt, Homo sapiens
  misc_RNA (1)...(19): siRNA sense strand
gaauggagaugcccugucu

SEQ ID NO: 85509 - RNA, 19 nt, Homo sapiens
  misc_RNA (1)...(19): siRNA sense strand
gcacaguacucccaaggau

SEQ ID NO: 85510 - RNA, 19 nt, Homo sapiens
  misc_RNA (1)...(19): siRNA sense strand
caacugugaugucagcaaa

SEQ ID NO: 85511 - RNA, 19 nt, Homo sapiens
  misc_RNA (1)...(19): siRNA sense strand
ggugagcccucuugacuau

SEQ ID NO: 85512 - RNA, 19 nt, Homo sapiens
  misc_RNA (1)...(19): siRNA sense strand
gacggugacuuuauuguug

SEQ ID NO: 85513 - RNA, 19 nt, Homo sapiens
  misc_RNA (1)...(19): siRNA sense strand
ccacuggacuacaaacuug

SEQ ID NO: 85514 - RNA, 19 nt, Homo sapiens
  misc_RNA (1)...(19): siRNA sense strand
caccauggaugcccucuuu

SEQ ID NO: 85515 - RNA, 19 nt, Homo sapiens
  misc_RNA (1)...(19): siRNA sense strand
ggaccaagcccaucugugu

SEQ ID NO: 85516 - RNA, 19 nt, Homo sapiens
  misc_RNA (1)...(19): siRNA sense strand
ggaugaguuugauguguuu

SEQ ID NO: 85517 - RNA, 19 nt, Homo sapiens
  misc_RNA (1)...(19): siRNA sense strand
gguagaagcucgagaccau

SEQ ID NO: 85518 - RNA, 19 nt, Homo sapiens
  misc_RNA (1)...(19): siRNA sense strand
gcuacugccucauaacuau

SEQ ID NO: 85519 - RNA, 19 nt, Homo sapiens
  misc_RNA (1)...(19): siRNA sense strand
cagauuauguaccagauug

SEQ ID NO: 85520 - RNA, 19 nt, Homo sapiens
  misc_RNA (1)...(19): siRNA sense strand
caacacggcauccgacgua

SEQ ID NO: 85521 - RNA, 19 nt, Homo sapiens
  misc_RNA (1)...(19): siRNA sense strand
ccaccugccucuuguguga

SEQ ID NO: 85522 - RNA, 19 nt, Homo sapiens
  misc_RNA (1)...(19): siRNA sense strand
ugacagcccugguagacuu

SEQ ID NO: 85523 - RNA, 19 nt, Homo sapiens
  misc_RNA (1)...(19): siRNA sense strand
gcacugcucucugucaaca

SEQ ID NO: 85524 - RNA, 19 nt, Homo sapiens
  misc_RNA (1)...(19): siRNA sense strand
caacuguacuaaugugugu

SEQ ID NO: 85525 - RNA, 19 nt, Homo sapiens
  misc_RNA (1)...(19): siRNA sense strand
ccaagaagaacguguguga

SEQ ID NO: 85526 - RNA, 19 nt, Homo sapiens
  misc_RNA (1)...(19): siRNA sense strand
gacaacaauccaaccuuua

SEQ ID NO: 85527 - RNA, 19 nt, Homo sapiens
  misc_RNA (1)...(19): siRNA sense strand
gcacuucacugagaaucug

SEQ ID NO: 85528 - RNA, 19 nt, Homo sapiens
  misc_RNA (1)...(19): siRNA sense strand
gcaccaaugcccagauuau

SEQ ID NO: 85529 - RNA, 19 nt, Homo sapiens
  misc_RNA (1)...(19): siRNA sense strand
acaaugggcguuucaauga

SEQ ID NO: 85530 - RNA, 19 nt, Homo sapiens
  misc_RNA (1)...(19): siRNA sense strand
gaucuguccugggcaacua

SEQ ID NO: 85531 - RNA, 19 nt, Homo sapiens
  misc_RNA (1)...(19): siRNA sense strand
ccaaugcccagauuaugua

SEQ ID NO: 85532 - RNA, 19 nt, Homo sapiens
  misc_RNA (1)...(19): siRNA sense strand
gcaagagucagcccagcua

SEQ ID NO: 85533 - RNA, 19 nt, Homo sapiens
  misc_RNA (1)...(19): siRNA sense strand
gacgugcacuucacugaga

SEQ ID NO: 85534 - RNA, 19 nt, Homo sapiens
  misc_RNA (1)...(19): siRNA sense strand
gcaaccacaugacgagcuu

SEQ ID NO: 85535 - RNA, 19 nt, Homo sapiens
  misc_RNA (1)...(19): siRNA sense strand
caagugcgauugcccaucu

SEQ ID NO: 85536 - RNA, 19 nt, Homo sapiens
  misc_RNA (1)...(19): siRNA sense strand
gcaaggagguccggaaagc

SEQ ID NO: 85537 - RNA, 19 nt, Homo sapiens
  misc_RNA (1)...(19): siRNA sense strand
gacccagacugcaacaaga

SEQ ID NO: 85538 - RNA, 19 nt, Homo sapiens
  misc_RNA (1)...(19): siRNA sense strand
gcaagaagucucuggaucu

SEQ ID NO: 85539 - RNA, 19 nt, Homo sapiens
  misc_RNA (1)...(19): siRNA sense strand
cggugcagcugaaauacua

SEQ ID NO: 85540 - RNA, 19 nt, Homo sapiens
  misc_RNA (1)...(19): siRNA sense strand
ggacaugacuuccccuuca

SEQ ID NO: 85541 - RNA, 19 nt, Homo sapiens
  misc_RNA (1)...(19): siRNA sense strand
ggaaaggucaccagaagag

SEQ ID NO: 85542 - RNA, 19 nt, Homo sapiens
  misc_RNA (1)...(19): siRNA sense strand
caguauguguuggcuguua

SEQ ID NO: 85543 - RNA, 19 nt, Homo sapiens
  misc_RNA (1)...(19): siRNA sense strand
cgauggagacggugacuuu

SEQ ID NO: 85544 - RNA, 19 nt, Homo sapiens
  misc_RNA (1)...(19): siRNA sense strand
ucaaacccguguccugcua

SEQ ID NO: 85545 - RNA, 19 nt, Homo sapiens
  misc_RNA (1)...(19): siRNA sense strand
ccaugacccugauaucuca

SEQ ID NO: 85546 - RNA, 19 nt, Homo sapiens
  misc_RNA (1)...(19): siRNA sense strand
uggagacggugacuuuauu

SEQ ID NO: 85547 - RNA, 19 nt, Homo sapiens
  misc_RNA (1)...(19): siRNA sense strand
gcaggacacggcacagauu

SEQ ID NO: 85548 - RNA, 19 nt, Homo sapiens
  misc_RNA (1)...(19): siRNA sense strand
ucuuuaacuuccugcauua

SEQ ID NO: 85549 - RNA, 19 nt, Homo sapiens
  misc_RNA (1)...(19): siRNA sense strand
ggaagaagaggaggaggaa

SEQ ID NO: 85550 - RNA, 19 nt, Homo sapiens
  misc_RNA (1)...(19): siRNA sense strand
gcagggcuuugagaagaaa

SEQ ID NO: 85551 - RNA, 19 nt, Homo sapiens
  misc_RNA (1)...(19): siRNA sense strand
cggcagggcuuugagaaga

SEQ ID NO: 85552 - RNA, 19 nt, Homo sapiens
  misc_RNA (1)...(19): siRNA sense strand
caagaagucucuggaucug

SEQ ID NO: 85553 - RNA, 19 nt, Homo sapiens
  misc_RNA (1)...(19): siRNA sense strand
gcgacggguugcuguugua

SEQ ID NO: 85554 - RNA, 19 nt, Homo sapiens
  misc_RNA (1)...(19): siRNA sense strand
ugagcccucuugacuauga

SEQ ID NO: 85555 - RNA, 19 nt, Homo sapiens
  misc_RNA (1)...(19): siRNA sense strand
ggagagcagggcugggaua

SEQ ID NO: 85556 - RNA, 19 nt, Homo sapiens
  misc_RNA (1)...(19): siRNA sense strand
ugaagacacugacauacgu

SEQ ID NO: 85557 - RNA, 19 nt, Homo sapiens
  misc_RNA (1)...(19): siRNA sense strand
gagcaccagucugugugua

SEQ ID NO: 85558 - RNA, 19 nt, Homo sapiens
  misc_RNA (1)...(19): siRNA sense strand
ugacaacuguacuaaugug

SEQ ID NO: 85559 - RNA, 19 nt, Homo sapiens
  misc_RNA (1)...(19): siRNA sense strand
gaagagaacagccccauug

SEQ ID NO: 85560 - RNA, 19 nt, Homo sapiens
  misc_RNA (1)...(19): siRNA sense strand
gaacguggcccaguauguc

SEQ ID NO: 85561 - RNA, 19 nt, Homo sapiens
  misc_RNA (1)...(19): siRNA sense strand
ugaacgacgugaaugacaa

SEQ ID NO: 85562 - RNA, 19 nt, Homo sapiens
  misc_RNA (1)...(19): siRNA sense strand
ugagaagcaugacuuugug

SEQ ID NO: 85563 - RNA, 19 nt, Homo sapiens
  misc_RNA (1)...(19): siRNA sense strand
ucacugaggugcgcgaugu

SEQ ID NO: 85564 - RNA, 19 nt, Homo sapiens
  misc_RNA (1)...(19): siRNA sense strand
guagugcgcuuggacaaag

SEQ ID NO: 85565 - RNA, 19 nt, Homo sapiens
  misc_RNA (1)...(19): siRNA sense strand
caauggcugugaagugaau

SEQ ID NO: 85566 - RNA, 19 nt, Homo sapiens
  misc_RNA (1)...(19): siRNA sense strand
gagcugcgcccaggaaaug

SEQ ID NO: 85567 - RNA, 19 nt, Homo sapiens
  misc_RNA (1)...(19): siRNA sense strand
ggaccgugaugcucauagu

SEQ ID NO: 85568 - RNA, 19 nt, Homo sapiens
  misc_RNA (1)...(19): siRNA sense strand
gcacguccaucaccuucuc

SEQ ID NO: 85569 - RNA, 19 nt, Homo sapiens
  misc_RNA (1)...(19): siRNA sense strand
cauaacagugggcggaaua

SEQ ID NO: 85570 - RNA, 19 nt, Homo sapiens
  misc_RNA (1)...(19): siRNA sense strand
acacagugcggcucaauga

SEQ ID NO: 85571 - RNA, 19 nt, Homo sapiens
  misc_RNA (1)...(19): siRNA sense strand
gccauucuguccuucgauu

SEQ ID NO: 85572 - RNA, 19 nt, Homo sapiens
  misc_RNA (1)...(19): siRNA sense strand
gcugaaauacuacaauaag

SEQ ID NO: 85573 - RNA, 19 nt, Homo sapiens
  misc_RNA (1)...(19): siRNA sense strand
cgaugagugucuuccugua

SEQ ID NO: 85574 - RNA, 19 nt, Homo sapiens
  misc_RNA (1)...(19): siRNA sense strand
ccucugaagucuuugagau

SEQ ID NO: 85575 - RNA, 19 nt, Homo sapiens
  misc_RNA (1)...(19): siRNA sense strand
ccaaggaggcgacgaugga

SEQ ID NO: 85576 - RNA, 19 nt, Homo sapiens
  misc_RNA (1)...(19): siRNA sense strand
gaacgacgugaaugacaau

SEQ ID NO: 85577 - RNA, 19 nt, Homo sapiens
  misc_RNA (1)...(19): siRNA sense strand
cagcgugacuguccuggau

SEQ ID NO: 85578 - RNA, 19 nt, Homo sapiens
  misc_RNA (1)...(19): siRNA sense strand
gauggagacggugacuuua

SEQ ID NO: 85579 - RNA, 19 nt, Homo sapiens
  misc_RNA (1)...(19): siRNA sense strand
gagaagaaagguccugucu

SEQ ID NO: 85580 - RNA, 19 nt, Homo sapiens
  misc_RNA (1)...(19): siRNA sense strand
gggagauccugccacugaa

SEQ ID NO: 85581 - RNA, 19 nt, Homo sapiens
  misc_RNA (1)...(19): siRNA sense strand
gcagcugugauccagguua

SEQ ID NO: 85582 - RNA, 19 nt, Homo sapiens
  misc_RNA (1)...(19): siRNA sense strand
ggcauacggugcagcugaa

SEQ ID NO: 85583 - RNA, 19 nt, Homo sapiens
  misc_RNA (1)...(19): siRNA sense strand
gaucaccaguggcaauacu

SEQ ID NO: 85584 - RNA, 19 nt, Homo sapiens
  misc_RNA (1)...(19): siRNA sense strand
gcuccgaauuucucuucuu

SEQ ID NO: 85585 - RNA, 19 nt, Homo sapiens
  misc_RNA (1)...(19): siRNA sense strand
acauagacauggcugacuu

SEQ ID NO: 85586 - RNA, 19 nt, Homo sapiens
  misc_RNA (1)...(19): siRNA sense strand
uggaugcccucuuugauag

SEQ ID NO: 85587 - RNA, 19 nt, Homo sapiens
  misc_RNA (1)...(19): siRNA sense strand
ucaaugagaagcaugacuu

SEQ ID NO: 85588 - RNA, 19 nt, Homo sapiens
  misc_RNA (1)...(19): siRNA sense strand
ggcagggcuuugagaagaa

SEQ ID NO: 85589 - RNA, 19 nt, Homo sapiens
  misc_RNA (1)...(19): siRNA sense strand
gucaagaccagcagcauga

SEQ ID NO: 85590 - RNA, 19 nt, Homo sapiens
  misc_RNA (1)...(19): siRNA sense strand
guaaagagguuaugucaca

SEQ ID NO: 85591 - RNA, 19 nt, Homo sapiens
  misc_RNA (1)...(19): siRNA sense strand
auaaauaccucggacauua

SEQ ID NO: 85592 - RNA, 19 nt, Homo sapiens
  misc_RNA (1)...(19): siRNA sense strand
aaagagaacugguauucaa

SEQ ID NO: 85593 - RNA, 19 nt, Homo sapiens
  misc_RNA (1)...(19): siRNA sense strand
gaaauucaguuugaugaca

SEQ ID NO: 85594 - RNA, 19 nt, Homo sapiens
  misc_RNA (1)...(19): siRNA sense strand
gaaugagaaugaaucugaa

SEQ ID NO: 85595 - RNA, 19 nt, Homo sapiens
  misc_RNA (1)...(19): siRNA sense strand
gagaacugguauucaaaga

SEQ ID NO: 85596 - RNA, 19 nt, Homo sapiens
  misc_RNA (1)...(19): siRNA sense strand
ggaguaugcucagguaauc

SEQ ID NO: 85597 - RNA, 19 nt, Homo sapiens
  misc_RNA (1)...(19): siRNA sense strand
ggaaauggacggcuagaag

SEQ ID NO: 85598 - RNA, 19 nt, Homo sapiens
  misc_RNA (1)...(19): siRNA sense strand
ucaggaguaugcucaggua

SEQ ID NO: 85599 - RNA, 19 nt, Homo sapiens
  misc_RNA (1)...(19): siRNA sense strand
agaaugagaaugaaucuga

SEQ ID NO: 85600 - RNA, 19 nt, Homo sapiens
  misc_RNA (1)...(19): siRNA sense strand
gauaacaaagcugauguaa

SEQ ID NO: 85601 - RNA, 19 nt, Homo sapiens
  misc_RNA (1)...(19): siRNA sense strand
ggauaacaaagcugaugua

SEQ ID NO: 85602 - RNA, 19 nt, Homo sapiens
  misc_RNA (1)...(19): siRNA sense strand
uggagaugaugaugaaauu

SEQ ID NO: 85603 - RNA, 19 nt, Homo sapiens
  misc_RNA (1)...(19): siRNA sense strand
gcccaagaauaaagguaaa

SEQ ID NO: 85604 - RNA, 19 nt, Homo sapiens
  misc_RNA (1)...(19): siRNA sense strand
gagacuaccaggauaacaa

SEQ ID NO: 85605 - RNA, 19 nt, Homo sapiens
  misc_RNA (1)...(19): siRNA sense strand
gauaaauaccucggacauu

SEQ ID NO: 85606 - RNA, 19 nt, Homo sapiens
  misc_RNA (1)...(19): siRNA sense strand
guaagaaugagaaugaauc

SEQ ID NO: 85607 - RNA, 19 nt, Homo sapiens
  misc_RNA (1)...(19): siRNA sense strand
uaaauaccucggacauuau

SEQ ID NO: 85608 - RNA, 19 nt, Homo sapiens
  misc_RNA (1)...(19): siRNA sense strand
ggauaaauaccucggacau

SEQ ID NO: 85609 - RNA, 19 nt, Homo sapiens
  misc_RNA (1)...(19): siRNA sense strand
ucaguuugaugacauugga

SEQ ID NO: 85610 - RNA, 19 nt, Homo sapiens
  misc_RNA (1)...(19): siRNA sense strand
ggguaagaaugagaaugaa

SEQ ID NO: 85611 - RNA, 19 nt, Homo sapiens
  misc_RNA (1)...(19): siRNA sense strand
caagaauaaagguaaagga

SEQ ID NO: 85612 - RNA, 19 nt, Homo sapiens
  misc_RNA (1)...(19): siRNA sense strand
gaugaugaagauauugaug

SEQ ID NO: 85613 - RNA, 19 nt, Homo sapiens
  misc_RNA (1)...(19): siRNA sense strand
guguuucgaugguguaaag

SEQ ID NO: 85614 - RNA, 19 nt, Homo sapiens
  misc_RNA (1)...(19): siRNA sense strand
aaaauacaaugcagacgaa

SEQ ID NO: 85615 - RNA, 19 nt, Homo sapiens
  misc_RNA (1)...(19): siRNA sense strand
ggcuagaagcaauguguuu

SEQ ID NO: 85616 - RNA, 19 nt, Homo sapiens
  misc_RNA (1)...(19): siRNA sense strand
gguaagaaugagaaugaau

SEQ ID NO: 85617 - RNA, 19 nt, Homo sapiens
  misc_RNA (1)...(19): siRNA sense strand
caaugcagacgaagcuaga

SEQ ID NO: 85618 - RNA, 19 nt, Homo sapiens
  misc_RNA (1)...(19): siRNA sense strand
guguaaagagguuauguca

SEQ ID NO: 85619 - RNA, 19 nt, Homo sapiens
  misc_RNA (1)...(19): siRNA sense strand
agacuaccaggauaacaaa

SEQ ID NO: 85620 - RNA, 19 nt, Homo sapiens
  misc_RNA (1)...(19): siRNA sense strand
aagaggauggucaggagua

SEQ ID NO: 85621 - RNA, 19 nt, Homo sapiens
  misc_RNA (1)...(19): siRNA sense strand
gcuagaagcaauguguuuc

SEQ ID NO: 85622 - RNA, 19 nt, Homo sapiens
  misc_RNA (1)...(19): siRNA sense strand
uaaagguaaaggagguaaa

SEQ ID NO: 85623 - RNA, 19 nt, Homo sapiens
  misc_RNA (1)...(19): siRNA sense strand
ugaaacugauacauuuggu

SEQ ID NO: 85624 - RNA, 19 nt, Homo sapiens
  misc_RNA (1)...(19): siRNA sense strand
cuccgagacuaccaggaua

SEQ ID NO: 85625 - RNA, 19 nt, Homo sapiens
  misc_RNA (1)...(19): siRNA sense strand
uagaagcaauguguuucga

SEQ ID NO: 85626 - RNA, 19 nt, Homo sapiens
  misc_RNA (1)...(19): siRNA sense strand
gagcuuccagagcaugcua

SEQ ID NO: 85627 - RNA, 19 nt, Homo sapiens
  misc_RNA (1)...(19): siRNA sense strand
ugaugaagauauugaugac

SEQ ID NO: 85628 - RNA, 19 nt, Homo sapiens
  misc_RNA (1)...(19): siRNA sense strand
uccuggagaugaugaugaa

SEQ ID NO: 85629 - RNA, 19 nt, Homo sapiens
  misc_RNA (1)...(19): siRNA sense strand
ucgaugguguaaagagguu

SEQ ID NO: 85630 - RNA, 19 nt, Homo sapiens
  misc_RNA (1)...(19): siRNA sense strand
gcagacgaagcuagaaguc

SEQ ID NO: 85631 - RNA, 19 nt, Homo sapiens
  misc_RNA (1)...(19): siRNA sense strand
aagagaacugguauucaaa

SEQ ID NO: 85632 - RNA, 19 nt, Homo sapiens
  misc_RNA (1)...(19): siRNA sense strand
gggguaagaaugagaauga

SEQ ID NO: 85633 - RNA, 19 nt, Homo sapiens
  misc_RNA (1)...(19): siRNA sense strand
ggagaugaugaugaaauuc

SEQ ID NO: 85634 - RNA, 19 nt, Homo sapiens
  misc_RNA (1)...(19): siRNA sense strand
agaggauggucaggaguau

SEQ ID NO: 85635 - RNA, 19 nt, Homo sapiens
  misc_RNA (1)...(19): siRNA sense strand
gggaaauggacggcuagaa

SEQ ID NO: 85636 - RNA, 19 nt, Homo sapiens
  misc_RNA (1)...(19): siRNA sense strand
ggacggcuagaagcaaugu

SEQ ID NO: 85637 - RNA, 19 nt, Homo sapiens
  misc_RNA (1)...(19): siRNA sense strand
gaagaacuccuuaaacuaa

SEQ ID NO: 85638 - RNA, 19 nt, Homo sapiens
  misc_RNA (1)...(19): siRNA sense strand
gcaguuagcuaaauuacaa

SEQ ID NO: 85639 - RNA, 19 nt, Homo sapiens
  misc_RNA (1)...(19): siRNA sense strand
guaagaggcauacuaaaua

SEQ ID NO: 85640 - RNA, 19 nt, Homo sapiens
  misc_RNA (1)...(19): siRNA sense strand
gaacagagagccauugcua

SEQ ID NO: 85641 - RNA, 19 nt, Homo sapiens
  misc_RNA (1)...(19): siRNA sense strand
guacauuucuagugaagua

SEQ ID NO: 85642 - RNA, 19 nt, Homo sapiens
  misc_RNA (1)...(19): siRNA sense strand
uaacaucucucccaaacuu

SEQ ID NO: 85643 - RNA, 19 nt, Homo sapiens
  misc_RNA (1)...(19): siRNA sense strand
caaagacgaucaaucaaau

SEQ ID NO: 85644 - RNA, 19 nt, Homo sapiens
  misc_RNA (1)...(19): siRNA sense strand
caaaucaacucuucaaugg

SEQ ID NO: 85645 - RNA, 19 nt, Homo sapiens
  misc_RNA (1)...(19): siRNA sense strand
ggacaaagcccuagaagag

SEQ ID NO: 85646 - RNA, 19 nt, Homo sapiens
  misc_RNA (1)...(19): siRNA sense strand
uaagccagcucuaccauaa

SEQ ID NO: 85647 - RNA, 19 nt, Homo sapiens
  misc_RNA (1)...(19): siRNA sense strand
guuagaaacugcugaagaa

SEQ ID NO: 85648 - RNA, 19 nt, Homo sapiens
  misc_RNA (1)...(19): siRNA sense strand
gcacuucuaugacauggaa

SEQ ID NO: 85649 - RNA, 19 nt, Homo sapiens
  misc_RNA (1)...(19): siRNA sense strand
gugaacaucuuaaugacua

SEQ ID NO: 85650 - RNA, 19 nt, Homo sapiens
  misc_RNA (1)...(19): siRNA sense strand
caacaaagcaaggucaaua

SEQ ID NO: 85651 - RNA, 19 nt, Homo sapiens
  misc_RNA (1)...(19): siRNA sense strand
uagaagcgaugaagauaaa

SEQ ID NO: 85652 - RNA, 19 nt, Homo sapiens
  misc_RNA (1)...(19): siRNA sense strand
agaacuagcucaaccacua

SEQ ID NO: 85653 - RNA, 19 nt, Homo sapiens
  misc_RNA (1)...(19): siRNA sense strand
ggaagaacuccuuaaacua

SEQ ID NO: 85654 - RNA, 19 nt, Homo sapiens
  misc_RNA (1)...(19): siRNA sense strand
cuuaaugacuagcuucuua

SEQ ID NO: 85655 - RNA, 19 nt, Homo sapiens
  misc_RNA (1)...(19): siRNA sense strand
caaguucuuugaucaguuu

SEQ ID NO: 85656 - RNA, 19 nt, Homo sapiens
  misc_RNA (1)...(19): siRNA sense strand
ggaaacaucaaauucauug

SEQ ID NO: 85657 - RNA, 19 nt, Homo sapiens
  misc_RNA (1)...(19): siRNA sense strand
gaccaaagacgaucaauca

SEQ ID NO: 85658 - RNA, 19 nt, Homo sapiens
  misc_RNA (1)...(19): siRNA sense strand
caaggacagucgaaggaua

SEQ ID NO: 85659 - RNA, 19 nt, Homo sapiens
  misc_RNA (1)...(19): siRNA sense strand
gaauaaggaccgcauguug

SEQ ID NO: 85660 - RNA, 19 nt, Homo sapiens
  misc_RNA (1)...(19): siRNA sense strand
gauaacaucucucccaaac

SEQ ID NO: 85661 - RNA, 19 nt, Homo sapiens
  misc_RNA (1)...(19): siRNA sense strand
aaacuguugugacugaaua

SEQ ID NO: 85662 - RNA, 19 nt, Homo sapiens
  misc_RNA (1)...(19): siRNA sense strand
gauaaaggauuugugaaca

SEQ ID NO: 85663 - RNA, 19 nt, Homo sapiens
  misc_RNA (1)...(19): siRNA sense strand
ugacaucccuuuggugaaa

SEQ ID NO: 85664 - RNA, 19 nt, Homo sapiens
  misc_RNA (1)...(19): siRNA sense strand
gcucagucguuccuaauga

SEQ ID NO: 85665 - RNA, 19 nt, Homo sapiens
  misc_RNA (1)...(19): siRNA sense strand
gauagaagcgaugaagaua

SEQ ID NO: 85666 - RNA, 19 nt, Homo sapiens
  misc_RNA (1)...(19): siRNA sense strand
agucuaaacucauccuuaa

SEQ ID NO: 85667 - RNA, 19 nt, Homo sapiens
  misc_RNA (1)...(19): siRNA sense strand
agaaacugcugaagaagaa

SEQ ID NO: 85668 - RNA, 19 nt, Homo sapiens
  misc_RNA (1)...(19): siRNA sense strand
gaaauguugaugucuauga

SEQ ID NO: 85669 - RNA, 19 nt, Homo sapiens
  misc_RNA (1)...(19): siRNA sense strand
gcaaagcaccacauucaga

SEQ ID NO: 85670 - RNA, 19 nt, Homo sapiens
  misc_RNA (1)...(19): siRNA sense strand
cgaaugugcuccuugaugu

SEQ ID NO: 85671 - RNA, 19 nt, Homo sapiens
  misc_RNA (1)...(19): siRNA sense strand
caaaugaggcugucaaugg

SEQ ID NO: 85672 - RNA, 19 nt, Homo sapiens
  misc_RNA (1)...(19): siRNA sense strand
gauguuaaguaaggaauug

SEQ ID NO: 85673 - RNA, 19 nt, Homo sapiens
  misc_RNA (1)...(19): siRNA sense strand
aaaccgaacuagaaauguu

SEQ ID NO: 85674 - RNA, 19 nt, Homo sapiens
  misc_RNA (1)...(19): siRNA sense strand
guagauaaaggauuuguga

SEQ ID NO: 85675 - RNA, 19 nt, Homo sapiens
  misc_RNA (1)...(19): siRNA sense strand
gaaaugagggcuccuaaac

SEQ ID NO: 85676 - RNA, 19 nt, Homo sapiens
  misc_RNA (1)...(19): siRNA sense strand
gagaugggaggcaaguuua

SEQ ID NO: 85677 - RNA, 19 nt, Homo sapiens
  misc_RNA (1)...(19): siRNA sense strand
gcuccuugauguuaaguaa

SEQ ID NO: 85678 - RNA, 19 nt, Homo sapiens
  misc_RNA (1)...(19): siRNA sense strand
gaacgagccaaguccuuaa

SEQ ID NO: 85679 - RNA, 19 nt, Homo sapiens
  misc_RNA (1)...(19): siRNA sense strand
agaaggaacuguugaagca

SEQ ID NO: 85680 - RNA, 19 nt, Homo sapiens
  misc_RNA (1)...(19): siRNA sense strand
ccagguagcggaauuggua

SEQ ID NO: 85681 - RNA, 19 nt, Homo sapiens
  misc_RNA (1)...(19): siRNA sense strand
ccaaagacgaucaaucaaa

SEQ ID NO: 85682 - RNA, 19 nt, Homo sapiens
  misc_RNA (1)...(19): siRNA sense strand
gaaucuauccuucauaagu

SEQ ID NO: 85683 - RNA, 19 nt, Homo sapiens
  misc_RNA (1)...(19): siRNA sense strand
gaacuguugaagcaaauaa

SEQ ID NO: 85684 - RNA, 19 nt, Homo sapiens
  misc_RNA (1)...(19): siRNA sense strand
ggacugaguuucuuauucc

SEQ ID NO: 85685 - RNA, 19 nt, Homo sapiens
  misc_RNA (1)...(19): siRNA sense strand
gaugcaaucuucaggaaag

SEQ ID NO: 85686 - RNA, 19 nt, Homo sapiens
  misc_RNA (1)...(19): siRNA sense strand
agauauaacccaagaguuu

SEQ ID NO: 85687 - RNA, 19 nt, Homo sapiens
  misc_RNA (1)...(19): siRNA sense strand
gaagauauaacccaagagu

SEQ ID NO: 85688 - RNA, 19 nt, Homo sapiens
  misc_RNA (1)...(19): siRNA sense strand
ugacuagcuucuuacagua

SEQ ID NO: 85689 - RNA, 19 nt, Homo sapiens
  misc_RNA (1)...(19): siRNA sense strand
ggugagcauuucagaacua

SEQ ID NO: 85690 - RNA, 19 nt, Homo sapiens
  misc_RNA (1)...(19): siRNA sense strand
gaacuagaaauguugaugu

SEQ ID NO: 85691 - RNA, 19 nt, Homo sapiens
  misc_RNA (1)...(19): siRNA sense strand
caaaguauagcucacugua

SEQ ID NO: 85692 - RNA, 19 nt, Homo sapiens
  misc_RNA (1)...(19): siRNA sense strand
uagaagagccaaaguauag

SEQ ID NO: 85693 - RNA, 19 nt, Homo sapiens
  misc_RNA (1)...(19): siRNA sense strand
acgaaucuauccuucauaa

SEQ ID NO: 85694 - RNA, 19 nt, Homo sapiens
  misc_RNA (1)...(19): siRNA sense strand
uacaguacauuucuaguga

SEQ ID NO: 85695 - RNA, 19 nt, Homo sapiens
  misc_RNA (1)...(19): siRNA sense strand
gcaaguucuuugaucaguu

SEQ ID NO: 85696 - RNA, 19 nt, Homo sapiens
  misc_RNA (1)...(19): siRNA sense strand
caucaugccucccacacaa

SEQ ID NO: 85697 - RNA, 19 nt, Homo sapiens
  misc_RNA (1)...(19): siRNA sense strand
gacagugggaccuagauua

SEQ ID NO: 85698 - RNA, 19 nt, Homo sapiens
  misc_RNA (1)...(19): siRNA sense strand
aaacaacuccgcaaacgaa

SEQ ID NO: 85699 - RNA, 19 nt, Homo sapiens
  misc_RNA (1)...(19): siRNA sense strand
gcaaacaacuccgcaaacg

SEQ ID NO: 85700 - RNA, 19 nt, Homo sapiens
  misc_RNA (1)...(19): siRNA sense strand
gaaggaaagggacugaguu

SEQ ID NO: 85701 - RNA, 19 nt, Homo sapiens
  misc_RNA (1)...(19): siRNA sense strand
caaauucauuggagagcuu

SEQ ID NO: 85702 - RNA, 19 nt, Homo sapiens
  misc_RNA (1)...(19): siRNA sense strand
gcaaucuucaggaaaguaa

SEQ ID NO: 85703 - RNA, 19 nt, Homo sapiens
  misc_RNA (1)...(19): siRNA sense strand
caacuacuacuaucuuuca

SEQ ID NO: 85704 - RNA, 19 nt, Homo sapiens
  misc_RNA (1)...(19): siRNA sense strand
caaauaaaguuggauccau

SEQ ID NO: 85705 - RNA, 19 nt, Homo sapiens
  misc_RNA (1)...(19): siRNA sense strand
gggacugaguuucuuauuc

SEQ ID NO: 85706 - RNA, 19 nt, Homo sapiens
  misc_RNA (1)...(19): siRNA sense strand
gcaaaacgcucagaaaugg

SEQ ID NO: 85707 - RNA, 19 nt, Homo sapiens
  misc_RNA (1)...(19): siRNA sense strand
guaaucauccugucacuag

SEQ ID NO: 85708 - RNA, 19 nt, Homo sapiens
  misc_RNA (1)...(19): siRNA sense strand
cuuaauggaucaguacuuu

SEQ ID NO: 85709 - RNA, 19 nt, Homo sapiens
  misc_RNA (1)...(19): siRNA sense strand
aaguauagcucacuguaug

SEQ ID NO: 85710 - RNA, 19 nt, Homo sapiens
  misc_RNA (1)...(19): siRNA sense strand
gaagggauagccacaagug

SEQ ID NO: 85711 - RNA, 19 nt, Homo sapiens
  misc_RNA (1)...(19): siRNA sense strand
aagaagauauaacccaaga

SEQ ID NO: 85712 - RNA, 19 nt, Homo sapiens
  misc_RNA (1)...(19): siRNA sense strand
gaaaggacagcuuaaugca

SEQ ID NO: 85713 - RNA, 19 nt, Homo sapiens
  misc_RNA (1)...(19): siRNA sense strand
gaccgcauguuggagauuu

SEQ ID NO: 85714 - RNA, 19 nt, Homo sapiens
  misc_RNA (1)...(19): siRNA sense strand
ucagacgccuccuaauuuc

SEQ ID NO: 85715 - RNA, 19 nt, Homo sapiens
  misc_RNA (1)...(19): siRNA sense strand
gaugacaacuccgcagcaa

SEQ ID NO: 85716 - RNA, 19 nt, Homo sapiens
  misc_RNA (1)...(19): siRNA sense strand
caagaucgagaaugguuaa

SEQ ID NO: 85717 - RNA, 19 nt, Homo sapiens
  misc_RNA (1)...(19): siRNA sense strand
ucacgaaucuauccuucau

SEQ ID NO: 85718 - RNA, 19 nt, Homo sapiens
  misc_RNA (1)...(19): siRNA sense strand
ccaaacuucauguagauaa

SEQ ID NO: 85719 - RNA, 19 nt, Homo sapiens
  misc_RNA (1)...(19): siRNA sense strand
aaacuaauccaccacuuau

SEQ ID NO: 85720 - RNA, 19 nt, Homo sapiens
  misc_RNA (1)...(19): siRNA sense strand
ggauaugccaccucgguuu

SEQ ID NO: 85721 - RNA, 19 nt, Homo sapiens
  misc_RNA (1)...(19): siRNA sense strand
gcccgaaugugcuccuuga

SEQ ID NO: 85722 - RNA, 19 nt, Homo sapiens
  misc_RNA (1)...(19): siRNA sense strand
uugcuaagaucaagauguu

SEQ ID NO: 85723 - RNA, 19 nt, Homo sapiens
  misc_RNA (1)...(19): siRNA sense strand
caggugcacugcuauaaca

SEQ ID NO: 85724 - RNA, 19 nt, Homo sapiens
  misc_RNA (1)...(19): siRNA sense strand
gaaaaugcucccagaaauu

SEQ ID NO: 85725 - RNA, 19 nt, Homo sapiens
  misc_RNA (1)...(19): siRNA sense strand
gaucgagaaugguuaacag

SEQ ID NO: 85726 - RNA, 19 nt, Homo sapiens
  misc_RNA (1)...(19): siRNA sense strand
gagaaaugagggcuccuaa

SEQ ID NO: 85727 - RNA, 19 nt, Homo sapiens
  misc_RNA (1)...(19): siRNA sense strand
ucaaaucaacucuucaaug

SEQ ID NO: 85728 - RNA, 19 nt, Homo sapiens
  misc_RNA (1)...(19): siRNA sense strand
gcaggauaccguagaguug

SEQ ID NO: 85729 - RNA, 19 nt, Homo sapiens
  misc_RNA (1)...(19): siRNA sense strand
ggaggcaaguuuaugaaaa

SEQ ID NO: 85730 - RNA, 19 nt, Homo sapiens
  misc_RNA (1)...(19): siRNA sense strand
acaagucagugcccuguau

SEQ ID NO: 85731 - RNA, 19 nt, Homo sapiens
  misc_RNA (1)...(19): siRNA sense strand
uaaaggauuugugaacauc

SEQ ID NO: 85732 - RNA, 19 nt, Homo sapiens
  misc_RNA (1)...(19): siRNA sense strand
ccagaaauugaucagaaua

SEQ ID NO: 85733 - RNA, 19 nt, Homo sapiens
  misc_RNA (1)...(19): siRNA sense strand
ucccagaaauugaucagaa

SEQ ID NO: 85734 - RNA, 19 nt, Homo sapiens
  misc_RNA (1)...(19): siRNA sense strand
gagaaugguuaacagaacu

SEQ ID NO: 85735 - RNA, 19 nt, Homo sapiens
  misc_RNA (1)...(19): siRNA sense strand
gaagcgaugaagauaaaga

SEQ ID NO: 85736 - RNA, 19 nt, Homo sapiens
  misc_RNA (1)...(19): siRNA sense strand
cugaaacuguugugacuga

SEQ ID NO: 85737 - RNA, 19 nt, Homo sapiens
  misc_RNA (1)...(19): siRNA sense strand
caacaagucccacaaauaa

SEQ ID NO: 85738 - RNA, 19 nt, Homo sapiens
  misc_RNA (1)...(19): siRNA sense strand
gcucagaggugaucaaaga

SEQ ID NO: 85739 - RNA, 19 nt, Homo sapiens
  misc_RNA (1)...(19): siRNA sense strand
gaucaaagacgccaacuug

SEQ ID NO: 85740 - RNA, 19 nt, Homo sapiens
  misc_RNA (1)...(19): siRNA sense strand
ggacacagcuugggcuaug

SEQ ID NO: 85741 - RNA, 19 nt, Homo sapiens
  misc_RNA (1)...(19): siRNA sense strand
gcaauuaccaguuucaaug

SEQ ID NO: 85742 - RNA, 19 nt, Homo sapiens
  misc_RNA (1)...(19): siRNA sense strand
gacaaaaucuuacagguuu

SEQ ID NO: 85743 - RNA, 19 nt, Homo sapiens
  misc_RNA (1)...(19): siRNA sense strand
ccaacaagucccacaaaua

SEQ ID NO: 85744 - RNA, 19 nt, Homo sapiens
  misc_RNA (1)...(19): siRNA sense strand
ggacguagaagacauguuc

SEQ ID NO: 85745 - RNA, 19 nt, Homo sapiens
  misc_RNA (1)...(19): siRNA sense strand
ucaacuaccucccucagaa

SEQ ID NO: 85746 - RNA, 19 nt, Homo sapiens
  misc_RNA (1)...(19): siRNA sense strand
ucaaagacgccaacuugua

SEQ ID NO: 85747 - RNA, 19 nt, Homo sapiens
  misc_RNA (1)...(19): siRNA sense strand
gcgcagagauucagguucu

SEQ ID NO: 85748 - RNA, 19 nt, Homo sapiens
  misc_RNA (1)...(19): siRNA sense strand
gcuauggcuuugugaacua

SEQ ID NO: 85749 - RNA, 19 nt, Homo sapiens
  misc_RNA (1)...(19): siRNA sense strand
cagcauuggugaaguugaa

SEQ ID NO: 85750 - RNA, 19 nt, Homo sapiens
  misc_RNA (1)...(19): siRNA sense strand
gaagaggcaauuaccaguu

SEQ ID NO: 85751 - RNA, 19 nt, Homo sapiens
  misc_RNA (1)...(19): siRNA sense strand
caacaagugcaaaggguuu

SEQ ID NO: 85752 - RNA, 19 nt, Homo sapiens
  misc_RNA (1)...(19): siRNA sense strand
gcagagagagcgaucaaca

SEQ ID NO: 85753 - RNA, 19 nt, Homo sapiens
  misc_RNA (1)...(19): siRNA sense strand
gcagauguuugggccguuu

SEQ ID NO: 85754 - RNA, 19 nt, Homo sapiens
  misc_RNA (1)...(19): siRNA sense strand
aagaggcaauuaccaguuu

SEQ ID NO: 85755 - RNA, 19 nt, Homo sapiens
  misc_RNA (1)...(19): siRNA sense strand
cagcagcauuggugaaguu

SEQ ID NO: 85756 - RNA, 19 nt, Homo sapiens
  misc_RNA (1)...(19): siRNA sense strand
gacauguucucucgguuug

SEQ ID NO: 85757 - RNA, 19 nt, Homo sapiens
  misc_RNA (1)...(19): siRNA sense strand
ccauuaaggugucguaugc

SEQ ID NO: 85758 - RNA, 19 nt, Homo sapiens
  misc_RNA (1)...(19): siRNA sense strand
gaacaugacccaggaugag

SEQ ID NO: 85759 - RNA, 19 nt, Homo sapiens
  misc_RNA (1)...(19): siRNA sense strand
caaagacgccaacuuguac

SEQ ID NO: 85760 - RNA, 19 nt, Homo sapiens
  misc_RNA (1)...(19): siRNA sense strand
ggaucagacuacagguuug

SEQ ID NO: 85761 - RNA, 19 nt, Homo sapiens
  misc_RNA (1)...(19): siRNA sense strand
gacgccaacuuguacauca

SEQ ID NO: 85762 - RNA, 19 nt, Homo sapiens
  misc_RNA (1)...(19): siRNA sense strand
caugacaaacuaugaagaa

SEQ ID NO: 85763 - RNA, 19 nt, Homo sapiens
  misc_RNA (1)...(19): siRNA sense strand
caguuucaauggucauaaa

SEQ ID NO: 85764 - RNA, 19 nt, Homo sapiens
  misc_RNA (1)...(19): siRNA sense strand
gaaggacguagaagacaug

SEQ ID NO: 85765 - RNA, 19 nt, Homo sapiens
  misc_RNA (1)...(19): siRNA sense strand
cagcuugggcuauggcuuu

SEQ ID NO: 85766 - RNA, 19 nt, Homo sapiens
  misc_RNA (1)...(19): siRNA sense strand
gaccaugacaaacuaugaa

SEQ ID NO: 85767 - RNA, 19 nt, Homo sapiens
  misc_RNA (1)...(19): siRNA sense strand
ggacaaaaucuuacagguu

SEQ ID NO: 85768 - RNA, 19 nt, Homo sapiens
  misc_RNA (1)...(19): siRNA sense strand
gagcucagaggugaucaaa

SEQ ID NO: 85769 - RNA, 19 nt, Homo sapiens
  misc_RNA (1)...(19): siRNA sense strand
ggaccaugacccagaagga

SEQ ID NO: 85770 - RNA, 19 nt, Homo sapiens
  misc_RNA (1)...(19): siRNA sense strand
ccagagggguugcguuuau

SEQ ID NO: 85771 - RNA, 19 nt, Homo sapiens
  misc_RNA (1)...(19): siRNA sense strand
agacauguucucucgguuu

SEQ ID NO: 85772 - RNA, 19 nt, Homo sapiens
  misc_RNA (1)...(19): siRNA sense strand
caugacccaggaugaguua

SEQ ID NO: 85773 - RNA, 19 nt, Homo sapiens
  misc_RNA (1)...(19): siRNA sense strand
ccucugagcccaucacagu

SEQ ID NO: 85774 - RNA, 19 nt, Homo sapiens
  misc_RNA (1)...(19): siRNA sense strand
ggaggcagaagaggcaauu

SEQ ID NO: 85775 - RNA, 19 nt, Homo sapiens
  misc_RNA (1)...(19): siRNA sense strand
cgcgaaggaugcagagaga

SEQ ID NO: 85776 - RNA, 19 nt, Homo sapiens
  misc_RNA (1)...(19): siRNA sense strand
uggaucagacuacagguuu

SEQ ID NO: 85777 - RNA, 19 nt, Homo sapiens
  misc_RNA (1)...(19): siRNA sense strand
gcgucaacgugccaggaaa

SEQ ID NO: 85778 - RNA, 19 nt, Homo sapiens
  misc_RNA (1)...(19): siRNA sense strand
cuuacagguuuccuucaaa

SEQ ID NO: 85779 - RNA, 19 nt, Homo sapiens
  misc_RNA (1)...(19): siRNA sense strand
gcaaaacuuauucgggaua

SEQ ID NO: 85780 - RNA, 19 nt, Homo sapiens
  misc_RNA (1)...(19): siRNA sense strand
ucuuacagguuuccuucaa

SEQ ID NO: 85781 - RNA, 19 nt, Homo sapiens
  misc_RNA (1)...(19): siRNA sense strand
gcagaagaggcaauuacca

SEQ ID NO: 85782 - RNA, 19 nt, Homo sapiens
  misc_RNA (1)...(19): siRNA sense strand
gcguuuauccgguuugaca

SEQ ID NO: 85783 - RNA, 19 nt, Homo sapiens
  misc_RNA (1)...(19): siRNA sense strand
agaaggacguagaagacau

SEQ ID NO: 85784 - RNA, 19 nt, Homo sapiens
  misc_RNA (1)...(19): siRNA sense strand
cuaccucccucagaacaug

SEQ ID NO: 85785 - RNA, 19 nt, Homo sapiens
  misc_RNA (1)...(19): siRNA sense strand
gacaucgggagaacgaauu

SEQ ID NO: 85786 - RNA, 19 nt, Homo sapiens
  misc_RNA (1)...(19): siRNA sense strand
gacccaggaugaguuacga

SEQ ID NO: 85787 - RNA, 19 nt, Homo sapiens
  misc_RNA (1)...(19): siRNA sense strand
ugaccaugacaaacuauga

SEQ ID NO: 85788 - RNA, 19 nt, Homo sapiens
  misc_RNA (1)...(19): siRNA sense strand
gaucagacuacagguuugu

SEQ ID NO: 85789 - RNA, 19 nt, Homo sapiens
  misc_RNA (1)...(19): siRNA sense strand
ccagaaggacguagaagac

SEQ ID NO: 85790 - RNA, 19 nt, Homo sapiens
  misc_RNA (1)...(19): siRNA sense strand
ggccauagccagccugaac

SEQ ID NO: 85791 - RNA, 19 nt, Homo sapiens
  misc_RNA (1)...(19): siRNA sense strand
ggugacaucgggagaacga

SEQ ID NO: 85792 - RNA, 19 nt, Homo sapiens
  misc_RNA (1)...(19): siRNA sense strand
gauaaaguagcaggacaca

SEQ ID NO: 85793 - RNA, 19 nt, Homo sapiens
  misc_RNA (1)...(19): siRNA sense strand
uuacagguuuccuucaaaa

SEQ ID NO: 85794 - RNA, 19 nt, Homo sapiens
  misc_RNA (1)...(19): siRNA sense strand
caacaccaacaagugcaaa

SEQ ID NO: 85795 - RNA, 19 nt, Homo sapiens
  misc_RNA (1)...(19): siRNA sense strand
ggcaauuaccaguuucaau

SEQ ID NO: 85796 - RNA, 19 nt, Homo sapiens
  misc_RNA (1)...(19): siRNA sense strand
gaggcagaagaggcaauua

SEQ ID NO: 85797 - RNA, 19 nt, Homo sapiens
  misc_RNA (1)...(19): siRNA sense strand
accaacaagucccacaaau

SEQ ID NO: 85798 - RNA, 19 nt, Homo sapiens
  misc_RNA (1)...(19): siRNA sense strand
gaaguugaaucugcaaaac

SEQ ID NO: 85799 - RNA, 19 nt, Homo sapiens
  misc_RNA (1)...(19): siRNA sense strand
caauuaccaguuucaaugg

SEQ ID NO: 85800 - RNA, 19 nt, Homo sapiens
  misc_RNA (1)...(19): siRNA sense strand
gcuggugcauuuucaucua

SEQ ID NO: 85801 - RNA, 19 nt, Homo sapiens
  misc_RNA (1)...(19): siRNA sense strand
aagaccacauggccgaaga

SEQ ID NO: 85802 - RNA, 19 nt, Homo sapiens
  misc_RNA (1)...(19): siRNA sense strand
ggcuauggcuuugugaacu

SEQ ID NO: 85803 - RNA, 19 nt, Homo sapiens
  misc_RNA (1)...(19): siRNA sense strand
aaaccaacaagucccacaa

SEQ ID NO: 85804 - RNA, 19 nt, Homo sapiens
  misc_RNA (1)...(19): siRNA sense strand
cgaagaggcuaucaaagga

SEQ ID NO: 85805 - RNA, 19 nt, Homo sapiens
  misc_RNA (1)...(19): siRNA sense strand
ccucaacggccucaaauua

SEQ ID NO: 85806 - RNA, 19 nt, Homo sapiens
  misc_RNA (1)...(19): siRNA sense strand
gcuacggguuugugaacua

SEQ ID NO: 85807 - RNA, 19 nt, Homo sapiens
  misc_RNA (1)...(19): siRNA sense strand
gcgaacaacccaagucaga

SEQ ID NO: 85808 - RNA, 19 nt, Homo sapiens
  misc_RNA (1)...(19): siRNA sense strand
gaacaacccaagucagaag

SEQ ID NO: 85809 - RNA, 19 nt, Homo sapiens
  misc_RNA (1)...(19): siRNA sense strand
guacaaauggagccacuga

SEQ ID NO: 85810 - RNA, 19 nt, Homo sapiens
  misc_RNA (1)...(19): siRNA sense strand
gcuggugcaucuucgugua

SEQ ID NO: 85811 - RNA, 19 nt, Homo sapiens
  misc_RNA (1)...(19): siRNA sense strand
gaacaugacccaggaugag

SEQ ID NO: 85812 - RNA, 19 nt, Homo sapiens
  misc_RNA (1)...(19): siRNA sense strand
gcaaguugguucgggacaa

SEQ ID NO: 85813 - RNA, 19 nt, Homo sapiens
  misc_RNA (1)...(19): siRNA sense strand
ucaacggccucaaauuaca

SEQ ID NO: 85814 - RNA, 19 nt, Homo sapiens
  misc_RNA (1)...(19): siRNA sense strand
cugcaggucuccuucaaga

SEQ ID NO: 85815 - RNA, 19 nt, Homo sapiens
  misc_RNA (1)...(19): siRNA sense strand
guuuccggcuggacaauuu

SEQ ID NO: 85816 - RNA, 19 nt, Homo sapiens
  misc_RNA (1)...(19): siRNA sense strand
caucgaguccugcaaguug

SEQ ID NO: 85817 - RNA, 19 nt, Homo sapiens
  misc_RNA (1)...(19): siRNA sense strand
agaccaaccucaucgucaa

SEQ ID NO: 85818 - RNA, 19 nt, Homo sapiens
  misc_RNA (1)...(19): siRNA sense strand
cagcugagcccaucacagu

SEQ ID NO: 85819 - RNA, 19 nt, Homo sapiens
  misc_RNA (1)...(19): siRNA sense strand
gaccuuggcuacggguuug

SEQ ID NO: 85820 - RNA, 19 nt, Homo sapiens
  misc_RNA (1)...(19): siRNA sense strand
ccaagaccaugagccagaa

SEQ ID NO: 85821 - RNA, 19 nt, Homo sapiens
  misc_RNA (1)...(19): siRNA sense strand
gaucacaggcagagaccuu

SEQ ID NO: 85822 - RNA, 19 nt, Homo sapiens
  misc_RNA (1)...(19): siRNA sense strand
ucaaggucauccgugauuu

SEQ ID NO: 85823 - RNA, 19 nt, Homo sapiens
  misc_RNA (1)...(19): siRNA sense strand
ggccgaagaggcuaucaaa

SEQ ID NO: 85824 - RNA, 19 nt, Homo sapiens
  misc_RNA (1)...(19): siRNA sense strand
gcagacaaagccaucaaca

SEQ ID NO: 85825 - RNA, 19 nt, Homo sapiens
  misc_RNA (1)...(19): siRNA sense strand
ccaacaagugcaaggguuu

SEQ ID NO: 85826 - RNA, 19 nt, Homo sapiens
  misc_RNA (1)...(19): siRNA sense strand
ccaaccucaucgucaacua

SEQ ID NO: 85827 - RNA, 19 nt, Homo sapiens
  misc_RNA (1)...(19): siRNA sense strand
ugaccaugaccaacuauga

SEQ ID NO: 85828 - RNA, 19 nt, Homo sapiens
  misc_RNA (1)...(19): siRNA sense strand
ggacaauuugcucaacaug

SEQ ID NO: 85829 - RNA, 19 nt, Homo sapiens
  misc_RNA (1)...(19): siRNA sense strand
ccaucaagguguccuaugc

SEQ ID NO: 85830 - RNA, 19 nt, Homo sapiens
  misc_RNA (1)...(19): siRNA sense strand
agacgaagaccaucaaggu

SEQ ID NO: 85831 - RNA, 19 nt, Homo sapiens
  misc_RNA (1)...(19): siRNA sense strand
ccgaagaggcuaucaaagg

SEQ ID NO: 85832 - RNA, 19 nt, Homo sapiens
  misc_RNA (1)...(19): siRNA sense strand
gcccaucacagucaaguuc

SEQ ID NO: 85833 - RNA, 19 nt, Homo sapiens
  misc_RNA (1)...(19): siRNA sense strand
ggccacuccuugguacaaa

SEQ ID NO: 85834 - RNA, 19 nt, Homo sapiens
  misc_RNA (1)...(19): siRNA sense strand
caaguugguucgggacaag

SEQ ID NO: 85835 - RNA, 19 nt, Homo sapiens
  misc_RNA (1)...(19): siRNA sense strand
gucaaggucauccgugauu

SEQ ID NO: 85836 - RNA, 19 nt, Homo sapiens
  misc_RNA (1)...(19): siRNA sense strand
gcugagcccaucacaguca

SEQ ID NO: 85837 - RNA, 19 nt, Homo sapiens
  misc_RNA (1)...(19): siRNA sense strand
gcuaucaaaggacugaaug

SEQ ID NO: 85838 - RNA, 19 nt, Homo sapiens
  misc_RNA (1)...(19): siRNA sense strand
gacaucgaguccugcaagu

SEQ ID NO: 85839 - RNA, 19 nt, Homo sapiens
  misc_RNA (1)...(19): siRNA sense strand
ucaacuaccugccccagaa

SEQ ID NO: 85840 - RNA, 19 nt, Homo sapiens
  misc_RNA (1)...(19): siRNA sense strand
cuacggguuugugaacuau

SEQ ID NO: 85841 - RNA, 19 nt, Homo sapiens
  misc_RNA (1)...(19): siRNA sense strand
caaggucauccgugauuuc

SEQ ID NO: 85842 - RNA, 19 nt, Homo sapiens
  misc_RNA (1)...(19): siRNA sense strand
aggaugaguucaagagucu

SEQ ID NO: 85843 - RNA, 19 nt, Homo sapiens
  misc_RNA (1)...(19): siRNA sense strand
cagcaagaccaaccucauc

SEQ ID NO: 85844 - RNA, 19 nt, Homo sapiens
  misc_RNA (1)...(19): siRNA sense strand
cgaacaacccaagucagaa

SEQ ID NO: 85845 - RNA, 19 nt, Homo sapiens
  misc_RNA (1)...(19): siRNA sense strand
ucaccaacgucaaggucau

SEQ ID NO: 85846 - RNA, 19 nt, Homo sapiens
  misc_RNA (1)...(19): siRNA sense strand
gacccaggaugaguucaag

SEQ ID NO: 85847 - RNA, 19 nt, Homo sapiens
  misc_RNA (1)...(19): siRNA sense strand
ucgugaccaugaccaacua

SEQ ID NO: 85848 - RNA, 19 nt, Homo sapiens
  misc_RNA (1)...(19): siRNA sense strand
ccuacggcgucaagagguu

SEQ ID NO: 85849 - RNA, 19 nt, Homo sapiens
  misc_RNA (1)...(19): siRNA sense strand
caacaagugcaaggguuuc

SEQ ID NO: 85850 - RNA, 19 nt, Homo sapiens
  misc_RNA (1)...(19): siRNA sense strand
cggcagcauuggcgacauc

SEQ ID NO: 85851 - RNA, 19 nt, Homo sapiens
  misc_RNA (1)...(19): siRNA sense strand
caacgggccacuccuuggu

SEQ ID NO: 85852 - RNA, 19 nt, Homo sapiens
  misc_RNA (1)...(19): siRNA sense strand
ccaaugaugcagacaaagc

SEQ ID NO: 85853 - RNA, 19 nt, Homo sapiens
  misc_RNA (1)...(19): siRNA sense strand
gccacuccuugguacaaau

SEQ ID NO: 85854 - RNA, 19 nt, Homo sapiens
  misc_RNA (1)...(19): siRNA sense strand
gaggcuaucaaaggacuga

SEQ ID NO: 85855 - RNA, 19 nt, Homo sapiens
  misc_RNA (1)...(19): siRNA sense strand
uuacagacgaagaccauca

SEQ ID NO: 85856 - RNA, 19 nt, Homo sapiens
  misc_RNA (1)...(19): siRNA sense strand
gaagguuaguguacaaauu

SEQ ID NO: 85857 - RNA, 19 nt, Homo sapiens
  misc_RNA (1)...(19): siRNA sense strand
gcagagcccugagauacua

SEQ ID NO: 85858 - RNA, 19 nt, Homo sapiens
  misc_RNA (1)...(19): siRNA sense strand
gaaaacaaguggcaucaaa

SEQ ID NO: 85859 - RNA, 19 nt, Homo sapiens
  misc_RNA (1)...(19): siRNA sense strand
gaagauagggaacaaggaa

SEQ ID NO: 85860 - RNA, 19 nt, Homo sapiens
  misc_RNA (1)...(19): siRNA sense strand
gcccugagauacuacuaua

SEQ ID NO: 85861 - RNA, 19 nt, Homo sapiens
  misc_RNA (1)...(19): siRNA sense strand
ccaaaguucucaucuaugg

SEQ ID NO: 85862 - RNA, 19 nt, Homo sapiens
  misc_RNA (1)...(19): siRNA sense strand
gaagaaaacuguggcauuc

SEQ ID NO: 85863 - RNA, 19 nt, Homo sapiens
  misc_RNA (1)...(19): siRNA sense strand
gcaaggccaccaucaaaga

SEQ ID NO: 85864 - RNA, 19 nt, Homo sapiens
  misc_RNA (1)...(19): siRNA sense strand
guacgagaccugcuucuau

SEQ ID NO: 85865 - RNA, 19 nt, Homo sapiens
  misc_RNA (1)...(19): siRNA sense strand
agaacaagccuccaaaguu

SEQ ID NO: 85866 - RNA, 19 nt, Homo sapiens
  misc_RNA (1)...(19): siRNA sense strand
gcaggaagacaagcuauga

SEQ ID NO: 85867 - RNA, 19 nt, Homo sapiens
  misc_RNA (1)...(19): siRNA sense strand
gcaaagauguggggacaaa

SEQ ID NO: 85868 - RNA, 19 nt, Homo sapiens
  misc_RNA (1)...(19): siRNA sense strand
guacuacccugccuuugag

SEQ ID NO: 85869 - RNA, 19 nt, Homo sapiens
  misc_RNA (1)...(19): siRNA sense strand
gagcagagcccugagauac

SEQ ID NO: 85870 - RNA, 19 nt, Homo sapiens
  misc_RNA (1)...(19): siRNA sense strand
gacagaaugacauaugaaa

SEQ ID NO: 85871 - RNA, 19 nt, Homo sapiens
  misc_RNA (1)...(19): siRNA sense strand
gaaagcaaggccaccauca

SEQ ID NO: 85872 - RNA, 19 nt, Homo sapiens
  misc_RNA (1)...(19): siRNA sense strand
cggaagcccuggcaaagau

SEQ ID NO: 85873 - RNA, 19 nt, Homo sapiens
  misc_RNA (1)...(19): siRNA sense strand
gaacauccgcacacaaggu

SEQ ID NO: 85874 - RNA, 19 nt, Homo sapiens
  misc_RNA (1)...(19): siRNA sense strand
uaaugacgcugaagaaagc

SEQ ID NO: 85875 - RNA, 19 nt, Homo sapiens
  misc_RNA (1)...(19): siRNA sense strand
ccuccaaaguucucaucua

SEQ ID NO: 85876 - RNA, 19 nt, Homo sapiens
  misc_RNA (1)...(19): siRNA sense strand
ccugagauacuacuauaaa

SEQ ID NO: 85877 - RNA, 19 nt, Homo sapiens
  misc_RNA (1)...(19): siRNA sense strand
gcaccuuccugccuaaugc

SEQ ID NO: 85878 - RNA, 19 nt, Homo sapiens
  misc_RNA (1)...(19): siRNA sense strand
cuccaaaguucucaucuau

SEQ ID NO: 85879 - RNA, 19 nt, Homo sapiens
  misc_RNA (1)...(19): siRNA sense strand
gauagggaacaaggaauuu

SEQ ID NO: 85880 - RNA, 19 nt, Homo sapiens
  misc_RNA (1)...(19): siRNA sense strand
ccaauugcaucuccuucug

SEQ ID NO: 85881 - RNA, 19 nt, Homo sapiens
  misc_RNA (1)...(19): siRNA sense strand
caaagacuaugcugauucc

SEQ ID NO: 85882 - RNA, 19 nt, Homo sapiens
  misc_RNA (1)...(19): siRNA sense strand
gaccgaagguuaguguaca

SEQ ID NO: 85883 - RNA, 19 nt, Homo sapiens
  misc_RNA (1)...(19): siRNA sense strand
guucucaucuaugggaauu

SEQ ID NO: 85884 - RNA, 19 nt, Homo sapiens
  misc_RNA (1)...(19): siRNA sense strand
aagcaaggccaccaucaaa

SEQ ID NO: 85885 - RNA, 19 nt, Homo sapiens
  misc_RNA (1)...(19): siRNA sense strand
ucucaucuaugggaauuug

SEQ ID NO: 85886 - RNA, 19 nt, Homo sapiens
  misc_RNA (1)...(19): siRNA sense strand
ucaaagacuaugcugauuc

SEQ ID NO: 85887 - RNA, 19 nt, Homo sapiens
  misc_RNA (1)...(19): siRNA sense strand
uacgagaccugcuucuauc

SEQ ID NO: 85888 - RNA, 19 nt, Homo sapiens
  misc_RNA (1)...(19): siRNA sense strand
gcggguugaccgaagguua

SEQ ID NO: 85889 - RNA, 19 nt, Homo sapiens
  misc_RNA (1)...(19): siRNA sense strand
gcaugacacaggaggaguu

SEQ ID NO: 85890 - RNA, 19 nt, Homo sapiens
  misc_RNA (1)...(19): siRNA sense strand
ggaagauagggaacaagga

SEQ ID NO: 85891 - RNA, 19 nt, Homo sapiens
  misc_RNA (1)...(19): siRNA sense strand
ucacagucauaguagaaca

SEQ ID NO: 85892 - RNA, 19 nt, Homo sapiens
  misc_RNA (1)...(19): siRNA sense strand
cagaacauccgcacacaag

SEQ ID NO: 85893 - RNA, 19 nt, Homo sapiens
  misc_RNA (1)...(19): siRNA sense strand
gucguggacugaucuguuc

SEQ ID NO: 85894 - RNA, 19 nt, Homo sapiens
  misc_RNA (1)...(19): siRNA sense strand
gcugcgaccaguacaaguu

SEQ ID NO: 85895 - RNA, 19 nt, Homo sapiens
  misc_RNA (1)...(19): siRNA sense strand
ugacagaaugacauaugaa

SEQ ID NO: 85896 - RNA, 19 nt, Homo sapiens
  misc_RNA (1)...(19): siRNA sense strand
caaguggcaucaaaaguca

SEQ ID NO: 85897 - RNA, 19 nt, Homo sapiens
  misc_RNA (1)...(19): siRNA sense strand
gauuccaacugcuugaaaa

SEQ ID NO: 85898 - RNA, 19 nt, Homo sapiens
  misc_RNA (1)...(19): siRNA sense strand
augacagaaugacauauga

SEQ ID NO: 85899 - RNA, 19 nt, Homo sapiens
  misc_RNA (1)...(19): siRNA sense strand
uagaacaagccuccaaagu

SEQ ID NO: 85900 - RNA, 19 nt, Homo sapiens
  misc_RNA (1)...(19): siRNA sense strand
aaagcaaggccaccaucaa

SEQ ID NO: 85901 - RNA, 19 nt, Homo sapiens
  misc_RNA (1)...(19): siRNA sense strand
ugagcagagcccugagaua

SEQ ID NO: 85902 - RNA, 19 nt, Homo sapiens
  misc_RNA (1)...(19): siRNA sense strand
agauagggaacaaggaauu

SEQ ID NO: 85903 - RNA, 19 nt, Homo sapiens
  misc_RNA (1)...(19): siRNA sense strand
uuaaugacgcugaagaaag

SEQ ID NO: 85904 - RNA, 19 nt, Homo sapiens
  misc_RNA (1)...(19): siRNA sense strand
aguacuacccugccuuuga

SEQ ID NO: 85905 - RNA, 19 nt, Homo sapiens
  misc_RNA (1)...(19): siRNA sense strand
agaguacuacccugccuuu

SEQ ID NO: 85906 - RNA, 19 nt, Homo sapiens
  misc_RNA (1)...(19): siRNA sense strand
aaacuguggcauucuggaa

SEQ ID NO: 85907 - RNA, 19 nt, Homo sapiens
  misc_RNA (1)...(19): siRNA sense strand
ucaucuaugggaauuugua

SEQ ID NO: 85908 - RNA, 19 nt, Homo sapiens
  misc_RNA (1)...(19): siRNA sense strand
guagaacaagccuccaaag

SEQ ID NO: 85909 - RNA, 19 nt, Homo sapiens
  misc_RNA (1)...(19): siRNA sense strand
ugucacagucauaguagaa

SEQ ID NO: 85910 - RNA, 19 nt, Homo sapiens
  misc_RNA (1)...(19): siRNA sense strand
aaucggaagcccuggcaaa

SEQ ID NO: 85911 - RNA, 19 nt, Homo sapiens
  misc_RNA (1)...(19): siRNA sense strand
aaugacagaaugacauaug

SEQ ID NO: 85912 - RNA, 19 nt, Homo sapiens
  misc_RNA (1)...(19): siRNA sense strand
acagcaccuuccugccuaa

SEQ ID NO: 85913 - RNA, 19 nt, Homo sapiens
  misc_RNA (1)...(19): siRNA sense strand
cacccugaauacuggacua

SEQ ID NO: 85914 - RNA, 19 nt, Homo sapiens
  misc_RNA (1)...(19): siRNA sense strand
ccugaauacuggacuaagc

SEQ ID NO: 85915 - RNA, 19 nt, Homo sapiens
  misc_RNA (1)...(19): siRNA sense strand
gaagguuaguguacaaauu

SEQ ID NO: 85916 - RNA, 19 nt, Homo sapiens
  misc_RNA (1)...(19): siRNA sense strand
gcagagcccugagauacua

SEQ ID NO: 85917 - RNA, 19 nt, Homo sapiens
  misc_RNA (1)...(19): siRNA sense strand
gaaaacaaguggcaucaaa

SEQ ID NO: 85918 - RNA, 19 nt, Homo sapiens
  misc_RNA (1)...(19): siRNA sense strand
gaagauagggaacaaggaa

SEQ ID NO: 85919 - RNA, 19 nt, Homo sapiens
  misc_RNA (1)...(19): siRNA sense strand
gcccugagauacuacuaua

SEQ ID NO: 85920 - RNA, 19 nt, Homo sapiens
  misc_RNA (1)...(19): siRNA sense strand
ccaaaguucucaucuaugg

SEQ ID NO: 85921 - RNA, 19 nt, Homo sapiens
  misc_RNA (1)...(19): siRNA sense strand
gaagaaaacuguggcauuc

SEQ ID NO: 85922 - RNA, 19 nt, Homo sapiens
  misc_RNA (1)...(19): siRNA sense strand
gcaaggccaccaucaaaga

SEQ ID NO: 85923 - RNA, 19 nt, Homo sapiens
  misc_RNA (1)...(19): siRNA sense strand
guacgagaccugcuucuau

SEQ ID NO: 85924 - RNA, 19 nt, Homo sapiens
  misc_RNA (1)...(19): siRNA sense strand
agaacaagccuccaaaguu

SEQ ID NO: 85925 - RNA, 19 nt, Homo sapiens
  misc_RNA (1)...(19): siRNA sense strand
gcaggaagacaagcuauga

SEQ ID NO: 85926 - RNA, 19 nt, Homo sapiens
  misc_RNA (1)...(19): siRNA sense strand
gcaaagauguggggacaaa

SEQ ID NO: 85927 - RNA, 19 nt, Homo sapiens
  misc_RNA (1)...(19): siRNA sense strand
guacuacccugccuuugag

SEQ ID NO: 85928 - RNA, 19 nt, Homo sapiens
  misc_RNA (1)...(19): siRNA sense strand
gagcagagcccugagauac

SEQ ID NO: 85929 - RNA, 19 nt, Homo sapiens
  misc_RNA (1)...(19): siRNA sense strand
gacagaaugacauaugaaa

SEQ ID NO: 85930 - RNA, 19 nt, Homo sapiens
  misc_RNA (1)...(19): siRNA sense strand
gaaagcaaggccaccauca

SEQ ID NO: 85931 - RNA, 19 nt, Homo sapiens
  misc_RNA (1)...(19): siRNA sense strand
cggaagcccuggcaaagau

SEQ ID NO: 85932 - RNA, 19 nt, Homo sapiens
  misc_RNA (1)...(19): siRNA sense strand
gaacauccgcacacaaggu

SEQ ID NO: 85933 - RNA, 19 nt, Homo sapiens
  misc_RNA (1)...(19): siRNA sense strand
uaaugacgcugaagaaagc

SEQ ID NO: 85934 - RNA, 19 nt, Homo sapiens
  misc_RNA (1)...(19): siRNA sense strand
gcaccuuccugccuaaugc

SEQ ID NO: 85935 - RNA, 19 nt, Homo sapiens
  misc_RNA (1)...(19): siRNA sense strand
ccugagauacuacuauaaa

SEQ ID NO: 85936 - RNA, 19 nt, Homo sapiens
  misc_RNA (1)...(19): siRNA sense strand
cuccaaaguucucaucuau

SEQ ID NO: 85937 - RNA, 19 nt, Homo sapiens
  misc_RNA (1)...(19): siRNA sense strand
ccuccaaaguucucaucua

SEQ ID NO: 85938 - RNA, 19 nt, Homo sapiens
  misc_RNA (1)...(19): siRNA sense strand
gauagggaacaaggaauuu

SEQ ID NO: 85939 - RNA, 19 nt, Homo sapiens
  misc_RNA (1)...(19): siRNA sense strand
ccaauugcaucuccuucug

SEQ ID NO: 85940 - RNA, 19 nt, Homo sapiens
  misc_RNA (1)...(19): siRNA sense strand
caaagacuaugcugauucc

SEQ ID NO: 85941 - RNA, 19 nt, Homo sapiens
  misc_RNA (1)...(19): siRNA sense strand
gaccgaagguuaguguaca

SEQ ID NO: 85942 - RNA, 19 nt, Homo sapiens
  misc_RNA (1)...(19): siRNA sense strand
guucucaucuaugggaauu

SEQ ID NO: 85943 - RNA, 19 nt, Homo sapiens
  misc_RNA (1)...(19): siRNA sense strand
aagcaaggccaccaucaaa

SEQ ID NO: 85944 - RNA, 19 nt, Homo sapiens
  misc_RNA (1)...(19): siRNA sense strand
ucucaucuaugggaauuug

SEQ ID NO: 85945 - RNA, 19 nt, Homo sapiens
  misc_RNA (1)...(19): siRNA sense strand
ucaaagacuaugcugauuc

SEQ ID NO: 85946 - RNA, 19 nt, Homo sapiens
  misc_RNA (1)...(19): siRNA sense strand
uacgagaccugcuucuauc

SEQ ID NO: 85947 - RNA, 19 nt, Homo sapiens
  misc_RNA (1)...(19): siRNA sense strand
gcggguugaccgaagguua

SEQ ID NO: 85948 - RNA, 19 nt, Homo sapiens
  misc_RNA (1)...(19): siRNA sense strand
gcaugacacaggaggaguu

SEQ ID NO: 85949 - RNA, 19 nt, Homo sapiens
  misc_RNA (1)...(19): siRNA sense strand
ggaagauagggaacaagga

SEQ ID NO: 85950 - RNA, 19 nt, Homo sapiens
  misc_RNA (1)...(19): siRNA sense strand
ucacagucauaguagaaca

SEQ ID NO: 85951 - RNA, 19 nt, Homo sapiens
  misc_RNA (1)...(19): siRNA sense strand
cagaacauccgcacacaag

SEQ ID NO: 85952 - RNA, 19 nt, Homo sapiens
  misc_RNA (1)...(19): siRNA sense strand
gucguggacugaucuguuc

SEQ ID NO: 85953 - RNA, 19 nt, Homo sapiens
  misc_RNA (1)...(19): siRNA sense strand
gcugcgaccaguacaaguu

SEQ ID NO: 85954 - RNA, 19 nt, Homo sapiens
  misc_RNA (1)...(19): siRNA sense strand
ugacagaaugacauaugaa

SEQ ID NO: 85955 - RNA, 19 nt, Homo sapiens
  misc_RNA (1)...(19): siRNA sense strand
caaguggcaucaaaaguca

SEQ ID NO: 85956 - RNA, 19 nt, Homo sapiens
  misc_RNA (1)...(19): siRNA sense strand
gauuccaacugcuugaaaa

SEQ ID NO: 85957 - RNA, 19 nt, Homo sapiens
  misc_RNA (1)...(19): siRNA sense strand
augacagaaugacauauga

SEQ ID NO: 85958 - RNA, 19 nt, Homo sapiens
  misc_RNA (1)...(19): siRNA sense strand
uagaacaagccuccaaagu

SEQ ID NO: 85959 - RNA, 19 nt, Homo sapiens
  misc_RNA (1)...(19): siRNA sense strand
aaagcaaggccaccaucaa

SEQ ID NO: 85960 - RNA, 19 nt, Homo sapiens
  misc_RNA (1)...(19): siRNA sense strand
ugagcagagcccugagaua

SEQ ID NO: 85961 - RNA, 19 nt, Homo sapiens
  misc_RNA (1)...(19): siRNA sense strand
agauagggaacaaggaauu

SEQ ID NO: 85962 - RNA, 19 nt, Homo sapiens
  misc_RNA (1)...(19): siRNA sense strand
uuaaugacgcugaagaaag

SEQ ID NO: 85963 - RNA, 19 nt, Homo sapiens
  misc_RNA (1)...(19): siRNA sense strand
aguacuacccugccuuuga

SEQ ID NO: 85964 - RNA, 19 nt, Homo sapiens
  misc_RNA (1)...(19): siRNA sense strand
ugucacagucauaguagaa

SEQ ID NO: 85965 - RNA, 19 nt, Homo sapiens
  misc_RNA (1)...(19): siRNA sense strand
aaacuguggcauucuggaa

SEQ ID NO: 85966 - RNA, 19 nt, Homo sapiens
  misc_RNA (1)...(19): siRNA sense strand
ucaucuaugggaauuugua

SEQ ID NO: 85967 - RNA, 19 nt, Homo sapiens
  misc_RNA (1)...(19): siRNA sense strand
agaguacuacccugccuuu

SEQ ID NO: 85968 - RNA, 19 nt, Homo sapiens
  misc_RNA (1)...(19): siRNA sense strand
guagaacaagccuccaaag

SEQ ID NO: 85969 - RNA, 19 nt, Homo sapiens
  misc_RNA (1)...(19): siRNA sense strand
aaucggaagcccuggcaaa

SEQ ID NO: 85970 - RNA, 19 nt, Homo sapiens
  misc_RNA (1)...(19): siRNA sense strand
aaugacagaaugacauaug

SEQ ID NO: 85971 - RNA, 19 nt, Homo sapiens
  misc_RNA (1)...(19): siRNA sense strand
acagcaccuuccugccuaa

SEQ ID NO: 85972 - RNA, 19 nt, Homo sapiens
  misc_RNA (1)...(19): siRNA sense strand
ccugaauacuggacuaagc

SEQ ID NO: 85973 - RNA, 19 nt, Homo sapiens
  misc_RNA (1)...(19): siRNA sense strand
cacccugaauacuggacua

SEQ ID NO: 85974 - RNA, 19 nt, Homo sapiens
  misc_RNA (1)...(19): siRNA sense strand
ccaggaagcugaagaagaa

SEQ ID NO: 85975 - RNA, 19 nt, Homo sapiens
  misc_RNA (1)...(19): siRNA sense strand
gagcgcagggcaccaaaua

SEQ ID NO: 85976 - RNA, 19 nt, Homo sapiens
  misc_RNA (1)...(19): siRNA sense strand
gaacagcagccggaaccua

SEQ ID NO: 85977 - RNA, 19 nt, Homo sapiens
  misc_RNA (1)...(19): siRNA sense strand
gcagcagccucucguaugg

SEQ ID NO: 85978 - RNA, 19 nt, Homo sapiens
  misc_RNA (1)...(19): siRNA sense strand
gcaccgcaccaccaacuuu

SEQ ID NO: 85979 - RNA, 19 nt, Homo sapiens
  misc_RNA (1)...(19): siRNA sense strand
caacccggcuauccuacuu

SEQ ID NO: 85980 - RNA, 19 nt, Homo sapiens
  misc_RNA (1)...(19): siRNA sense strand
gcaccaggaagcugaagaa

SEQ ID NO: 85981 - RNA, 19 nt, Homo sapiens
  misc_RNA (1)...(19): siRNA sense strand
gcgccaagaucaagaaagc

SEQ ID NO: 85982 - RNA, 19 nt, Homo sapiens
  misc_RNA (1)...(19): siRNA sense strand
agaagaagaagaacgagaa

SEQ ID NO: 85983 - RNA, 19 nt, Homo sapiens
  misc_RNA (1)...(19): siRNA sense strand
ggaagcugaagaagaagaa

SEQ ID NO: 85984 - RNA, 19 nt, Homo sapiens
  misc_RNA (1)...(19): siRNA sense strand
ugaagaagaagaagaacga

SEQ ID NO: 85985 - RNA, 19 nt, Homo sapiens
  misc_RNA (1)...(19): siRNA sense strand
gaaagccacaggcaucaag

SEQ ID NO: 85986 - RNA, 19 nt, Homo sapiens
  misc_RNA (1)...(19): siRNA sense strand
agaagaagaacgagaagga

SEQ ID NO: 85987 - RNA, 19 nt, Homo sapiens
  misc_RNA (1)...(19): siRNA sense strand
gaagaagaagaacgagaag

SEQ ID NO: 85988 - RNA, 19 nt, Homo sapiens
  misc_RNA (1)...(19): siRNA sense strand
gagcagcugcagagacuca

SEQ ID NO: 85989 - RNA, 19 nt, Homo sapiens
  misc_RNA (1)...(19): siRNA sense strand
ccgagcagcugcagagacu

SEQ ID NO: 85990 - RNA, 19 nt, Homo sapiens
  misc_RNA (1)...(19): siRNA sense strand
caaagacgagagcgaguag

SEQ ID NO: 85991 - RNA, 19 nt, Homo sapiens
  misc_RNA (1)...(19): siRNA sense strand
acaaagacgagagcgagua

SEQ ID NO: 85992 - RNA, 19 nt, Homo sapiens
  misc_RNA (1)...(19): siRNA sense strand
aggcggaguuccaggcaaa

SEQ ID NO: 85993 - RNA, 19 nt, Homo sapiens
  misc_RNA (1)...(19): siRNA sense strand
aacagcagccggaaccuaa

SEQ ID NO: 85994 - RNA, 19 nt, Homo sapiens
  misc_RNA (1)...(19): siRNA sense strand
caacgagucccagaucaag

SEQ ID NO: 85995 - RNA, 19 nt, Homo sapiens
  misc_RNA (1)...(19): siRNA sense strand
caggcaaaccgcuacauca

SEQ ID NO: 85996 - RNA, 19 nt, Homo sapiens
  misc_RNA (1)...(19): siRNA sense strand
cggcaacccggcuauccua

SEQ ID NO: 85997 - RNA, 19 nt, Homo sapiens
  misc_RNA (1)...(19): siRNA sense strand
gaacgagaaggaggacaag

SEQ ID NO: 85998 - RNA, 19 nt, Homo sapiens
  misc_RNA (1)...(19): siRNA sense strand
guacugcacacguuauucg

SEQ ID NO: 85999 - RNA, 19 nt, Homo sapiens
  misc_RNA (1)...(19): siRNA sense strand
ucaacgagucccagaucaa

SEQ ID NO: 86000 - RNA, 19 nt, Homo sapiens
  misc_RNA (1)...(19): siRNA sense strand
gaagaagaacccgaacaaa

SEQ ID NO: 86001 - RNA, 19 nt, Homo sapiens
  misc_RNA (1)...(19): siRNA sense strand
agaagaacccgaacaaaga

SEQ ID NO: 86002 - RNA, 19 nt, Homo sapiens
  misc_RNA (1)...(19): siRNA sense strand
agucacagaucaagauuug

SEQ ID NO: 86003 - RNA, 19 nt, Homo sapiens
  misc_RNA (1)...(19): siRNA sense strand
gcacgguggcgccaagaaa

SEQ ID NO: 86004 - RNA, 19 nt, Homo sapiens
  misc_RNA (1)...(19): siRNA sense strand
gaagaacccgaacaaagag

SEQ ID NO: 86005 - RNA, 19 nt, Homo sapiens
  misc_RNA (1)...(19): siRNA sense strand
gcaagucggacagcgagua

SEQ ID NO: 86006 - RNA, 19 nt, Homo sapiens
  misc_RNA (1)...(19): siRNA sense strand
agaagaagaacccgaacaa

SEQ ID NO: 86007 - RNA, 19 nt, Homo sapiens
  misc_RNA (1)...(19): siRNA sense strand
aagaagaacccgaacaaag

SEQ ID NO: 86008 - RNA, 19 nt, Homo sapiens
  misc_RNA (1)...(19): siRNA sense strand
gaaaaccaaagaagaagaa

SEQ ID NO: 86009 - RNA, 19 nt, Homo sapiens
  misc_RNA (1)...(19): siRNA sense strand
ucaccaacuucuucaucga

SEQ ID NO: 86010 - RNA, 19 nt, Homo sapiens
  misc_RNA (1)...(19): siRNA sense strand
ucacagaucaagauuuggu

SEQ ID NO: 86011 - RNA, 19 nt, Homo sapiens
  misc_RNA (1)...(19): siRNA sense strand
cggcgugggucuacuguac

SEQ ID NO: 86012 - RNA, 19 nt, Homo sapiens
  misc_RNA (1)...(19): siRNA sense strand
gaaggccacgggcaacaag

SEQ ID NO: 86013 - RNA, 19 nt, Homo sapiens
  misc_RNA (1)...(19): siRNA sense strand
ccgcaucaccaacuucuuc

SEQ ID NO: 86014 - RNA, 19 nt, Homo sapiens
  misc_RNA (1)...(19): siRNA sense strand
gagucacagaucaagauuu

SEQ ID NO: 86015 - RNA, 19 nt, Homo sapiens
  misc_RNA (1)...(19): siRNA sense strand
caacgagucacagaucaag

SEQ ID NO: 86016 - RNA, 19 nt, Homo sapiens
  misc_RNA (1)...(19): siRNA sense strand
ccaacuucuucaucgacaa

SEQ ID NO: 86017 - RNA, 19 nt, Homo sapiens
  misc_RNA (1)...(19): siRNA sense strand
caucaccaacuucuucauc

SEQ ID NO: 86018 - RNA, 19 nt, Homo sapiens
  misc_RNA (1)...(19): siRNA sense strand
cgagucacagaucaagauu

SEQ ID NO: 86019 - RNA, 19 nt, Homo sapiens
  misc_RNA (1)...(19): siRNA sense strand
gagcagagguuuaccacaa

SEQ ID NO: 86020 - RNA, 19 nt, Homo sapiens
  misc_RNA (1)...(19): siRNA sense strand
ggaaagaugccaccaaugu

SEQ ID NO: 86021 - RNA, 19 nt, Homo sapiens
  misc_RNA (1)...(19): siRNA sense strand
gaagacugcuauugggaaa

SEQ ID NO: 86022 - RNA, 19 nt, Homo sapiens
  misc_RNA (1)...(19): siRNA sense strand
gcaacaagcuggccaugca

SEQ ID NO: 86023 - RNA, 19 nt, Homo sapiens
  misc_RNA (1)...(19): siRNA sense strand
ggagaaauaugggaaagau

SEQ ID NO: 86024 - RNA, 19 nt, Homo sapiens
  misc_RNA (1)...(19): siRNA sense strand
ccaacauccuggagaauaa

SEQ ID NO: 86025 - RNA, 19 nt, Homo sapiens
  misc_RNA (1)...(19): siRNA sense strand
cgagauggauggaacagaa

SEQ ID NO: 86026 - RNA, 19 nt, Homo sapiens
  misc_RNA (1)...(19): siRNA sense strand
ugaagaaugucaucaagga

SEQ ID NO: 86027 - RNA, 19 nt, Homo sapiens
  misc_RNA (1)...(19): siRNA sense strand
aaagcuggcuacacugaua

SEQ ID NO: 86028 - RNA, 19 nt, Homo sapiens
  misc_RNA (1)...(19): siRNA sense strand
ggaaagcuggcuacacuga

SEQ ID NO: 86029 - RNA, 19 nt, Homo sapiens
  misc_RNA (1)...(19): siRNA sense strand
ugauaagacucgcuauaug

SEQ ID NO: 86030 - RNA, 19 nt, Homo sapiens
  misc_RNA (1)...(19): siRNA sense strand
gaaacugaacgucacagaa

SEQ ID NO: 86031 - RNA, 19 nt, Homo sapiens
  misc_RNA (1)...(19): siRNA sense strand
ugacuuggcuggcaacucu

SEQ ID NO: 86032 - RNA, 19 nt, Homo sapiens
  misc_RNA (1)...(19): siRNA sense strand
gaagauugacaaacugaug

SEQ ID NO: 86033 - RNA, 19 nt, Homo sapiens
  misc_RNA (1)...(19): siRNA sense strand
gcaacugccuccugcucaa

SEQ ID NO: 86034 - RNA, 19 nt, Homo sapiens
  misc_RNA (1)...(19): siRNA sense strand
guacaaguccuucaucaag

SEQ ID NO: 86035 - RNA, 19 nt, Homo sapiens
  misc_RNA (1)...(19): siRNA sense strand
gaacgucacagaacaagag

SEQ ID NO: 86036 - RNA, 19 nt, Homo sapiens
  misc_RNA (1)...(19): siRNA sense strand
cuucaucgcugaccugguu

SEQ ID NO: 86037 - RNA, 19 nt, Homo sapiens
  misc_RNA (1)...(19): siRNA sense strand
gaaucccacuguugagguu

SEQ ID NO: 86038 - RNA, 19 nt, Homo sapiens
  misc_RNA (1)...(19): siRNA sense strand
gauaagacucgcuauaugg

SEQ ID NO: 86039 - RNA, 19 nt, Homo sapiens
  misc_RNA (1)...(19): siRNA sense strand
gcucaaagucaaccagauu

SEQ ID NO: 86040 - RNA, 19 nt, Homo sapiens
  misc_RNA (1)...(19): siRNA sense strand
gaaagaugccaccaaugug

SEQ ID NO: 86041 - RNA, 19 nt, Homo sapiens
  misc_RNA (1)...(19): siRNA sense strand
acaaccagcuccucagaau

SEQ ID NO: 86042 - RNA, 19 nt, Homo sapiens
  misc_RNA (1)...(19): siRNA sense strand
aagagaagauugacaaacu

SEQ ID NO: 86043 - RNA, 19 nt, Homo sapiens
  misc_RNA (1)...(19): siRNA sense strand
caaaggcuguugagcacau

SEQ ID NO: 86044 - RNA, 19 nt, Homo sapiens
  misc_RNA (1)...(19): siRNA sense strand
gcaaagcuggugccguuga

SEQ ID NO: 86045 - RNA, 19 nt, Homo sapiens
  misc_RNA (1)...(19): siRNA sense strand
gagaagauugacaaacuga

SEQ ID NO: 86046 - RNA, 19 nt, Homo sapiens
  misc_RNA (1)...(19): siRNA sense strand
gaacaagagaagauugaca

SEQ ID NO: 86047 - RNA, 19 nt, Homo sapiens
  misc_RNA (1)...(19): siRNA sense strand
uggcaacucugaagucauc

SEQ ID NO: 86048 - RNA, 19 nt, Homo sapiens
  misc_RNA (1)...(19): siRNA sense strand
ucacagaacaagagaagau

SEQ ID NO: 86049 - RNA, 19 nt, Homo sapiens
  misc_RNA (1)...(19): siRNA sense strand
uggcugaccuguacaaguc

SEQ ID NO: 86050 - RNA, 19 nt, Homo sapiens
  misc_RNA (1)...(19): siRNA sense strand
aguaugaccuggacuucaa

SEQ ID NO: 86051 - RNA, 19 nt, Homo sapiens
  misc_RNA (1)...(19): siRNA sense strand
gcauuggagcagagguuua

SEQ ID NO: 86052 - RNA, 19 nt, Homo sapiens
  misc_RNA (1)...(19): siRNA sense strand
ugggaaagaugccaccaau

SEQ ID NO: 86053 - RNA, 19 nt, Homo sapiens
  misc_RNA (1)...(19): siRNA sense strand
gcacugggcagaucaagac

SEQ ID NO: 86054 - RNA, 19 nt, Homo sapiens
  misc_RNA (1)...(19): siRNA sense strand
cagaacaagagaagauuga

SEQ ID NO: 86055 - RNA, 19 nt, Homo sapiens
  misc_RNA (1)...(19): siRNA sense strand
guacaaccagcuccucaga

SEQ ID NO: 86056 - RNA, 19 nt, Homo sapiens
  misc_RNA (1)...(19): siRNA sense strand
ugggaaagcuggcuacacu

SEQ ID NO: 86057 - RNA, 19 nt, Homo sapiens
  misc_RNA (1)...(19): siRNA sense strand
gcuggcaacucugaaguca

SEQ ID NO: 86058 - RNA, 19 nt, Homo sapiens
  misc_RNA (1)...(19): siRNA sense strand
agaaugucaucaaggagaa

SEQ ID NO: 86059 - RNA, 19 nt, Homo sapiens
  misc_RNA (1)...(19): siRNA sense strand
gagcuccgggacaaugaua

SEQ ID NO: 86060 - RNA, 19 nt, Homo sapiens
  misc_RNA (1)...(19): siRNA sense strand
uaucgaagaucccuuugac

SEQ ID NO: 86061 - RNA, 19 nt, Homo sapiens
  misc_RNA (1)...(19): siRNA sense strand
aaccagcuccucagaauug

SEQ ID NO: 86062 - RNA, 19 nt, Homo sapiens
  misc_RNA (1)...(19): siRNA sense strand
gagauggauggaacagaaa

SEQ ID NO: 86063 - RNA, 19 nt, Homo sapiens
  misc_RNA (1)...(19): siRNA sense strand
ggcaggaacuucagaaacc

SEQ ID NO: 86064 - RNA, 19 nt, Homo sapiens
  misc_RNA (1)...(19): siRNA sense strand
caaggagaaauaugggaaa

SEQ ID NO: 86065 - RNA, 19 nt, Homo sapiens
  misc_RNA (1)...(19): siRNA sense strand
aaugauaagacucgcuaua

SEQ ID NO: 86066 - RNA, 19 nt, Homo sapiens
  misc_RNA (1)...(19): siRNA sense strand
caacauccuggagaauaaa

SEQ ID NO: 86067 - RNA, 19 nt, Homo sapiens
  misc_RNA (1)...(19): siRNA sense strand
ggcguucaaugucaucaau

SEQ ID NO: 86068 - RNA, 19 nt, Homo sapiens
  misc_RNA (1)...(19): siRNA sense strand
acaaacugaugaucgagau

SEQ ID NO: 86069 - RNA, 19 nt, Homo sapiens
  misc_RNA (1)...(19): siRNA sense strand
agagaagauugacaaacug

SEQ ID NO: 86070 - RNA, 19 nt, Homo sapiens
  misc_RNA (1)...(19): siRNA sense strand
uaccacaaccugaagaaug

SEQ ID NO: 86071 - RNA, 19 nt, Homo sapiens
  misc_RNA (1)...(19): siRNA sense strand
caaccagcuccucagaauu

SEQ ID NO: 86072 - RNA, 19 nt, Homo sapiens
  misc_RNA (1)...(19): siRNA sense strand
gucauggugucucaucguu

SEQ ID NO: 86073 - RNA, 19 nt, Homo sapiens
  misc_RNA (1)...(19): siRNA sense strand
accacaaccugaagaaugu

SEQ ID NO: 86074 - RNA, 19 nt, Homo sapiens
  misc_RNA (1)...(19): siRNA sense strand
gagcacaucaauaaaacua

SEQ ID NO: 86075 - RNA, 19 nt, Homo sapiens
  misc_RNA (1)...(19): siRNA sense strand
cccaacauccuggagaaua

SEQ ID NO: 86076 - RNA, 19 nt, Homo sapiens
  misc_RNA (1)...(19): siRNA sense strand
ccugaagaaugucaucaag

SEQ ID NO: 86077 - RNA, 19 nt, Homo sapiens
  misc_RNA (1)...(19): siRNA sense strand
ggauggaacagaaaauaaa

SEQ ID NO: 86078 - RNA, 19 nt, Homo sapiens
  misc_RNA (1)...(19): siRNA sense strand
aaacugaacgucacagaac

SEQ ID NO: 86079 - RNA, 19 nt, Homo sapiens
  misc_RNA (1)...(19): siRNA sense strand
gaaagcuggcuacacugau

SEQ ID NO: 86080 - RNA, 19 nt, Homo sapiens
  misc_RNA (1)...(19): siRNA sense strand
gugcaggaauccagguagu

SEQ ID NO: 86081 - RNA, 19 nt, Homo sapiens
  misc_RNA (1)...(19): siRNA sense strand
gccuggagcugcugaagac

SEQ ID NO: 86082 - RNA, 19 nt, Homo sapiens
  misc_RNA (1)...(19): siRNA sense strand
cuucaacugguaucuauga

SEQ ID NO: 86083 - RNA, 19 nt, Homo sapiens
  misc_RNA (1)...(19): siRNA sense strand
ucaggucugggaaguauga

SEQ ID NO: 86084 - RNA, 19 nt, Homo sapiens
  misc_RNA (1)...(19): siRNA sense strand
gggaagccaugcgcauugg

SEQ ID NO: 86085 - RNA, 19 nt, Homo sapiens
  misc_RNA (1)...(19): siRNA sense strand
caaagcuggugccguugag

SEQ ID NO: 86086 - RNA, 19 nt, Homo sapiens
  misc_RNA (1)...(19): siRNA sense strand
gagaaauaugggaaagaug

SEQ ID NO: 86087 - RNA, 19 nt, Homo sapiens
  misc_RNA (1)...(19): siRNA sense strand
caauggcgguucucaugcu

SEQ ID NO: 86088 - RNA, 19 nt, Homo sapiens
  misc_RNA (1)...(19): siRNA sense strand
gcugugcacugggcagauc

SEQ ID NO: 86089 - RNA, 19 nt, Homo sapiens
  misc_RNA (1)...(19): siRNA sense strand
caacugccuccugcucaaa

SEQ ID NO: 86090 - RNA, 19 nt, Homo sapiens
  misc_RNA (1)...(19): siRNA sense strand
aacaagagaagauugacaa

SEQ ID NO: 86091 - RNA, 19 nt, Homo sapiens
  misc_RNA (1)...(19): siRNA sense strand
acagugaccaacccaaaga

SEQ ID NO: 86092 - RNA, 19 nt, Homo sapiens
  misc_RNA (1)...(19): siRNA sense strand
cggguuugcucccaacauc

SEQ ID NO: 86093 - RNA, 19 nt, Homo sapiens
  misc_RNA (1)...(19): siRNA sense strand
uugacaaacugaugaucga

SEQ ID NO: 86094 - RNA, 19 nt, Homo sapiens
  misc_RNA (1)...(19): siRNA sense strand
ugaacgagaaguccugcaa

SEQ ID NO: 86095 - RNA, 19 nt, Homo sapiens
  misc_RNA (1)...(19): siRNA sense strand
gagcugcugaagacugcua

SEQ ID NO: 86096 - RNA, 19 nt, Homo sapiens
  misc_RNA (1)...(19): siRNA sense strand
cgccugcccugguuagcaa

SEQ ID NO: 86097 - RNA, 19 nt, Homo sapiens
  misc_RNA (1)...(19): siRNA sense strand
gcgcauuggagcagagguu

SEQ ID NO: 86098 - RNA, 19 nt, Homo sapiens
  misc_RNA (1)...(19): siRNA sense strand
caagaaacugaacgucaca

SEQ ID NO: 86099 - RNA, 19 nt, Homo sapiens
  misc_RNA (1)...(19): siRNA sense strand
gcccaguggugcuucaacu

SEQ ID NO: 86100 - RNA, 19 nt, Homo sapiens
  misc_RNA (1)...(19): siRNA sense strand
ugcuucaacugguaucuau

SEQ ID NO: 86101 - RNA, 19 nt, Homo sapiens
  misc_RNA (1)...(19): siRNA sense strand
aagauugacaaacugauga

SEQ ID NO: 86102 - RNA, 19 nt, Homo sapiens
  misc_RNA (1)...(19): siRNA sense strand
cugguuagcaagaaacuga

SEQ ID NO: 86103 - RNA, 19 nt, Homo sapiens
  misc_RNA (1)...(19): siRNA sense strand
ggacuacccaguggugucu

SEQ ID NO: 86104 - RNA, 19 nt, Homo sapiens
  misc_RNA (1)...(19): siRNA sense strand
gggaaagaugccaccaaug

SEQ ID NO: 86105 - RNA, 19 nt, Homo sapiens
  misc_RNA (1)...(19): siRNA sense strand
gaaugucaucaaggagaaa

SEQ ID NO: 86106 - RNA, 19 nt, Homo sapiens
  misc_RNA (1)...(19): siRNA sense strand
acaagagaagauugacaaa

SEQ ID NO: 86107 - RNA, 19 nt, Homo sapiens
  misc_RNA (1)...(19): siRNA sense strand
caagagaagauugacaaac

SEQ ID NO: 86108 - RNA, 19 nt, Homo sapiens
  misc_RNA (1)...(19): siRNA sense strand
ugaccaacccaaagaggau

SEQ ID NO: 86109 - RNA, 19 nt, Homo sapiens
  misc_RNA (1)...(19): siRNA sense strand
cauccuggagaauaaagaa

SEQ ID NO: 86110 - RNA, 19 nt, Homo sapiens
  misc_RNA (1)...(19): siRNA sense strand
cguucaaugucaucaaugg

SEQ ID NO: 86111 - RNA, 19 nt, Homo sapiens
  misc_RNA (1)...(19): siRNA sense strand
ugucaucaauggcgguucu

SEQ ID NO: 86112 - RNA, 19 nt, Homo sapiens
  misc_RNA (1)...(19): siRNA sense strand
gaagauagauuaacaagug

SEQ ID NO: 86113 - RNA, 19 nt, Homo sapiens
  misc_RNA (1)...(19): siRNA sense strand
gaaauuagguuacacaaca

SEQ ID NO: 86114 - RNA, 19 nt, Homo sapiens
  misc_RNA (1)...(19): siRNA sense strand
gaagaaagaugcaucagau

SEQ ID NO: 86115 - RNA, 19 nt, Homo sapiens
  misc_RNA (1)...(19): siRNA sense strand
ggacuacccuaucaaguaa

SEQ ID NO: 86116 - RNA, 19 nt, Homo sapiens
  misc_RNA (1)...(19): siRNA sense strand
gaacauggcuccacaacca

SEQ ID NO: 86117 - RNA, 19 nt, Homo sapiens
  misc_RNA (1)...(19): siRNA sense strand
gcacaaaugucuaguucuu

SEQ ID NO: 86118 - RNA, 19 nt, Homo sapiens
  misc_RNA (1)...(19): siRNA sense strand
gaaacuaggccuuggcuua

SEQ ID NO: 86119 - RNA, 19 nt, Homo sapiens
  misc_RNA (1)...(19): siRNA sense strand
cgacuuaccagaugaauua

SEQ ID NO: 86120 - RNA, 19 nt, Homo sapiens
  misc_RNA (1)...(19): siRNA sense strand
ggaaguggaucaaccagaa

SEQ ID NO: 86121 - RNA, 19 nt, Homo sapiens
  misc_RNA (1)...(19): siRNA sense strand
gaucccagcuccauagaaa

SEQ ID NO: 86122 - RNA, 19 nt, Homo sapiens
  misc_RNA (1)...(19): siRNA sense strand
gauuaugacuuguguauca

SEQ ID NO: 86123 - RNA, 19 nt, Homo sapiens
  misc_RNA (1)...(19): siRNA sense strand
auaaacagcugucagaauu

SEQ ID NO: 86124 - RNA, 19 nt, Homo sapiens
  misc_RNA (1)...(19): siRNA sense strand
gaugauauuuggcuuaugu

SEQ ID NO: 86125 - RNA, 19 nt, Homo sapiens
  misc_RNA (1)...(19): siRNA sense strand
ggugaacucuccuauaaug

SEQ ID NO: 86126 - RNA, 19 nt, Homo sapiens
  misc_RNA (1)...(19): siRNA sense strand
gaccagaauucaaugcuuu

SEQ ID NO: 86127 - RNA, 19 nt, Homo sapiens
  misc_RNA (1)...(19): siRNA sense strand
caucacggguauacaaaua

SEQ ID NO: 86128 - RNA, 19 nt, Homo sapiens
  misc_RNA (1)...(19): siRNA sense strand
uaaacaagcuacugaagau

SEQ ID NO: 86129 - RNA, 19 nt, Homo sapiens
  misc_RNA (1)...(19): siRNA sense strand
ccggugaacucuccuauaa

SEQ ID NO: 86130 - RNA, 19 nt, Homo sapiens
  misc_RNA (1)...(19): siRNA sense strand
gaugaacaguccaguaaau

SEQ ID NO: 86131 - RNA, 19 nt, Homo sapiens
  misc_RNA (1)...(19): siRNA sense strand
gagacacgcuggcacugua

SEQ ID NO: 86132 - RNA, 19 nt, Homo sapiens
  misc_RNA (1)...(19): siRNA sense strand
gauaaugccuaaucaaguc

SEQ ID NO: 86133 - RNA, 19 nt, Homo sapiens
  misc_RNA (1)...(19): siRNA sense strand
gacaagggauaaugccuaa

SEQ ID NO: 86134 - RNA, 19 nt, Homo sapiens
  misc_RNA (1)...(19): siRNA sense strand
guaugaaucugcaaacaau

SEQ ID NO: 86135 - RNA, 19 nt, Homo sapiens
  misc_RNA (1)...(19): siRNA sense strand
gagcacgacuuaccagaug

SEQ ID NO: 86136 - RNA, 19 nt, Homo sapiens
  misc_RNA (1)...(19): siRNA sense strand
cuaauucucucuccaauca

SEQ ID NO: 86137 - RNA, 19 nt, Homo sapiens
  misc_RNA (1)...(19): siRNA sense strand
gcaugcauguucaagagua

SEQ ID NO: 86138 - RNA, 19 nt, Homo sapiens
  misc_RNA (1)...(19): siRNA sense strand
gcaaagccuuggauacugu

SEQ ID NO: 86139 - RNA, 19 nt, Homo sapiens
  misc_RNA (1)...(19): siRNA sense strand
gggaguaaauggaggugua

SEQ ID NO: 86140 - RNA, 19 nt, Homo sapiens
  misc_RNA (1)...(19): siRNA sense strand
acagagcaguccuggauua

SEQ ID NO: 86141 - RNA, 19 nt, Homo sapiens
  misc_RNA (1)...(19): siRNA sense strand
ucuauaagauccagaaaga

SEQ ID NO: 86142 - RNA, 19 nt, Homo sapiens
  misc_RNA (1)...(19): siRNA sense strand
gggaaugaauguaacaaau

SEQ ID NO: 86143 - RNA, 19 nt, Homo sapiens
  misc_RNA (1)...(19): siRNA sense strand
caaagaaccagcagaauca

SEQ ID NO: 86144 - RNA, 19 nt, Homo sapiens
  misc_RNA (1)...(19): siRNA sense strand
caagugagggagaugauua

SEQ ID NO: 86145 - RNA, 19 nt, Homo sapiens
  misc_RNA (1)...(19): siRNA sense strand
aaucaacucuacagaauug

SEQ ID NO: 86146 - RNA, 19 nt, Homo sapiens
  misc_RNA (1)...(19): siRNA sense strand
ccaaguaugccaacucuaa

SEQ ID NO: 86147 - RNA, 19 nt, Homo sapiens
  misc_RNA (1)...(19): siRNA sense strand
ugugauggcuguuuaaaga

SEQ ID NO: 86148 - RNA, 19 nt, Homo sapiens
  misc_RNA (1)...(19): siRNA sense strand
gagaaguguuucaaugaga

SEQ ID NO: 86149 - RNA, 19 nt, Homo sapiens
  misc_RNA (1)...(19): siRNA sense strand
gcaaagaaccagcagaauc

SEQ ID NO: 86150 - RNA, 19 nt, Homo sapiens
  misc_RNA (1)...(19): siRNA sense strand
gaugaugccucgaauaacu

SEQ ID NO: 86151 - RNA, 19 nt, Homo sapiens
  misc_RNA (1)...(19): siRNA sense strand
ggaaauaugggacagauag

SEQ ID NO: 86152 - RNA, 19 nt, Homo sapiens
  misc_RNA (1)...(19): siRNA sense strand
guucaauaaugccugguua

SEQ ID NO: 86153 - RNA, 19 nt, Homo sapiens
  misc_RNA (1)...(19): siRNA sense strand
caacagagcaguccuggau

SEQ ID NO: 86154 - RNA, 19 nt, Homo sapiens
  misc_RNA (1)...(19): siRNA sense strand
uaaaucagaugccgacaca

SEQ ID NO: 86155 - RNA, 19 nt, Homo sapiens
  misc_RNA (1)...(19): siRNA sense strand
uaacuuaucuccauuugcu

SEQ ID NO: 86156 - RNA, 19 nt, Homo sapiens
  misc_RNA (1)...(19): siRNA sense strand
ccagaaagaacuagaagaa

SEQ ID NO: 86157 - RNA, 19 nt, Homo sapiens
  misc_RNA (1)...(19): siRNA sense strand
auacauaucuuaccucgau

SEQ ID NO: 86158 - RNA, 19 nt, Homo sapiens
  misc_RNA (1)...(19): siRNA sense strand
agaggucacuguuagagua

SEQ ID NO: 86159 - RNA, 19 nt, Homo sapiens
  misc_RNA (1)...(19): siRNA sense strand
gaagagagaagcacugagu

SEQ ID NO: 86160 - RNA, 19 nt, Homo sapiens
  misc_RNA (1)...(19): siRNA sense strand
ucgaauaacuccacaaucu

SEQ ID NO: 86161 - RNA, 19 nt, Homo sapiens
  misc_RNA (1)...(19): siRNA sense strand
cagaugaugccucgaauaa

SEQ ID NO: 86162 - RNA, 19 nt, Homo sapiens
  misc_RNA (1)...(19): siRNA sense strand
gagagaagcacugaguuaa

SEQ ID NO: 86163 - RNA, 19 nt, Homo sapiens
  misc_RNA (1)...(19): siRNA sense strand
cgacagggaugcagcaaca

SEQ ID NO: 86164 - RNA, 19 nt, Homo sapiens
  misc_RNA (1)...(19): siRNA sense strand
ggaagaaagcauuaaggaa

SEQ ID NO: 86165 - RNA, 19 nt, Homo sapiens
  misc_RNA (1)...(19): siRNA sense strand
caacagguaugaugaacag

SEQ ID NO: 86166 - RNA, 19 nt, Homo sapiens
  misc_RNA (1)...(19): siRNA sense strand
ugagggagaugauuauauc

SEQ ID NO: 86167 - RNA, 19 nt, Homo sapiens
  misc_RNA (1)...(19): siRNA sense strand
ucacagggaaugaauguaa

SEQ ID NO: 86168 - RNA, 19 nt, Homo sapiens
  misc_RNA (1)...(19): siRNA sense strand
ggaauacuaccaccuucua

SEQ ID NO: 86169 - RNA, 19 nt, Homo sapiens
  misc_RNA (1)...(19): siRNA sense strand
caaacaaucgagcggaaua

SEQ ID NO: 86170 - RNA, 19 nt, Homo sapiens
  misc_RNA (1)...(19): siRNA sense strand
gggcaugaauccuggaaug

SEQ ID NO: 86171 - RNA, 19 nt, Homo sapiens
  misc_RNA (1)...(19): siRNA sense strand
gaugcagcuucuaaacaua

SEQ ID NO: 86172 - RNA, 19 nt, Homo sapiens
  misc_RNA (1)...(19): siRNA sense strand
ggaccagaauucaaugcuu

SEQ ID NO: 86173 - RNA, 19 nt, Homo sapiens
  misc_RNA (1)...(19): siRNA sense strand
caacagaugcaacaaggaa

SEQ ID NO: 86174 - RNA, 19 nt, Homo sapiens
  misc_RNA (1)...(19): siRNA sense strand
cuaacgaccucucacagaa

SEQ ID NO: 86175 - RNA, 19 nt, Homo sapiens
  misc_RNA (1)...(19): siRNA sense strand
aauaagagcagccugagua

SEQ ID NO: 86176 - RNA, 19 nt, Homo sapiens
  misc_RNA (1)...(19): siRNA sense strand
ggaagaaagaugcaucaga

SEQ ID NO: 86177 - RNA, 19 nt, Homo sapiens
  misc_RNA (1)...(19): siRNA sense strand
gaggaagaccagccaagua

SEQ ID NO: 86178 - RNA, 19 nt, Homo sapiens
  misc_RNA (1)...(19): siRNA sense strand
caagcucucugaggucuuu

SEQ ID NO: 86179 - RNA, 19 nt, Homo sapiens
  misc_RNA (1)...(19): siRNA sense strand
ggaaauggcaaugcagauu

SEQ ID NO: 86180 - RNA, 19 nt, Homo sapiens
  misc_RNA (1)...(19): siRNA sense strand
guucauuucuuccguccua

SEQ ID NO: 86181 - RNA, 19 nt, Homo sapiens
  misc_RNA (1)...(19): siRNA sense strand
gcuaaaagguugccaucua

SEQ ID NO: 86182 - RNA, 19 nt, Homo sapiens
  misc_RNA (1)...(19): siRNA sense strand
gagcaguccuggauuaggu

SEQ ID NO: 86183 - RNA, 19 nt, Homo sapiens
  misc_RNA (1)...(19): siRNA sense strand
gccagcagaucccuaauuc

SEQ ID NO: 86184 - RNA, 19 nt, Homo sapiens
  misc_RNA (1)...(19): siRNA sense strand
gcuguuggcugcauucauc

SEQ ID NO: 86185 - RNA, 19 nt, Homo sapiens
  misc_RNA (1)...(19): siRNA sense strand
gcagcggacuggugugguu

SEQ ID NO: 86186 - RNA, 19 nt, Homo sapiens
  misc_RNA (1)...(19): siRNA sense strand
guccaugacuacaaggaua

SEQ ID NO: 86187 - RNA, 19 nt, Homo sapiens
  misc_RNA (1)...(19): siRNA sense strand
ggagaguauacauaucuua

SEQ ID NO: 86188 - RNA, 19 nt, Homo sapiens
  misc_RNA (1)...(19): siRNA sense strand
gagaagcacugaguuaaaa

SEQ ID NO: 86189 - RNA, 19 nt, Homo sapiens
  misc_RNA (1)...(19): siRNA sense strand
ugacuuggagcacgacuua

SEQ ID NO: 86190 - RNA, 19 nt, Homo sapiens
  misc_RNA (1)...(19): siRNA sense strand
gaaucaauuuggccagaug

SEQ ID NO: 86191 - RNA, 19 nt, Homo sapiens
  misc_RNA (1)...(19): siRNA sense strand
aaauggagguguaggaguu

SEQ ID NO: 86192 - RNA, 19 nt, Homo sapiens
  misc_RNA (1)...(19): siRNA sense strand
caugaauccuggaauguug

SEQ ID NO: 86193 - RNA, 19 nt, Homo sapiens
  misc_RNA (1)...(19): siRNA sense strand
gcacgaacuaggaaagaaa

SEQ ID NO: 86194 - RNA, 19 nt, Homo sapiens
  misc_RNA (1)...(19): siRNA sense strand
uuaaucagcuucagacaag

SEQ ID NO: 86195 - RNA, 19 nt, Homo sapiens
  misc_RNA (1)...(19): siRNA sense strand
gaaauggcaaugcagauuc

SEQ ID NO: 86196 - RNA, 19 nt, Homo sapiens
  misc_RNA (1)...(19): siRNA sense strand
gcaaugaaagcacagaugu

SEQ ID NO: 86197 - RNA, 19 nt, Homo sapiens
  misc_RNA (1)...(19): siRNA sense strand
gaauugcugcgaucuggua

SEQ ID NO: 86198 - RNA, 19 nt, Homo sapiens
  misc_RNA (1)...(19): siRNA sense strand
gaaaacaccagcaaugaaa

SEQ ID NO: 86199 - RNA, 19 nt, Homo sapiens
  misc_RNA (1)...(19): siRNA sense strand
uagagaaucgugugaauga

SEQ ID NO: 86200 - RNA, 19 nt, Homo sapiens
  misc_RNA (1)...(19): siRNA sense strand
cgucugugauggcuguuua

SEQ ID NO: 86201 - RNA, 19 nt, Homo sapiens
  misc_RNA (1)...(19): siRNA sense strand
ugaagaaauugaugguguu

SEQ ID NO: 86202 - RNA, 19 nt, Homo sapiens
  misc_RNA (1)...(19): siRNA sense strand
caggagaggucacuguuag

SEQ ID NO: 86203 - RNA, 19 nt, Homo sapiens
  misc_RNA (1)...(19): siRNA sense strand
cuaugcagcucuuggacua

SEQ ID NO: 86204 - RNA, 19 nt, Homo sapiens
  misc_RNA (1)...(19): siRNA sense strand
uaacaagugcaaaggaauu

SEQ ID NO: 86205 - RNA, 19 nt, Homo sapiens
  misc_RNA (1)...(19): siRNA sense strand
ccaagcgacugcaggaaug

SEQ ID NO: 86206 - RNA, 19 nt, Homo sapiens
  misc_RNA (1)...(19): siRNA sense strand
guggagagauggcagaauc

SEQ ID NO: 86207 - RNA, 19 nt, Homo sapiens
  misc_RNA (1)...(19): siRNA sense strand
caucuggccugcuggauuc

SEQ ID NO: 86208 - RNA, 19 nt, Homo sapiens
  misc_RNA (1)...(19): siRNA sense strand
agagagaagcacugaguua

SEQ ID NO: 86209 - RNA, 19 nt, Homo sapiens
  misc_RNA (1)...(19): siRNA sense strand
aaccaggaaugacuucuaa

SEQ ID NO: 86210 - RNA, 19 nt, Homo sapiens
  misc_RNA (1)...(19): siRNA sense strand
ggaccagacuacagaagca

SEQ ID NO: 86211 - RNA, 19 nt, Homo sapiens
  misc_RNA (1)...(19): siRNA sense strand
gcucaaccauccacuacug

SEQ ID NO: 86212 - RNA, 19 nt, Homo sapiens
  misc_RNA (1)...(19): siRNA sense strand
gaaggaauaugagagaguu

SEQ ID NO: 86213 - RNA, 19 nt, Homo sapiens
  misc_RNA (1)...(19): siRNA sense strand
ccaccaaccuuuaagcaaa

SEQ ID NO: 86214 - RNA, 19 nt, Homo sapiens
  misc_RNA (1)...(19): siRNA sense strand
gcucaagugucaauaacaa

SEQ ID NO: 86215 - RNA, 19 nt, Homo sapiens
  misc_RNA (1)...(19): siRNA sense strand
guaaagaaccaaagaagga

SEQ ID NO: 86216 - RNA, 19 nt, Homo sapiens
  misc_RNA (1)...(19): siRNA sense strand
ccaggagaguccagugaua

SEQ ID NO: 86217 - RNA, 19 nt, Homo sapiens
  misc_RNA (1)...(19): siRNA sense strand
ugacaugaauggcuauugu

SEQ ID NO: 86218 - RNA, 19 nt, Homo sapiens
  misc_RNA (1)...(19): siRNA sense strand
gcuuugaccgugauucuua

SEQ ID NO: 86219 - RNA, 19 nt, Homo sapiens
  misc_RNA (1)...(19): siRNA sense strand
gaccgugauucuuauuauu

SEQ ID NO: 86220 - RNA, 19 nt, Homo sapiens
  misc_RNA (1)...(19): siRNA sense strand
gaauggcuauuguuugcau

SEQ ID NO: 86221 - RNA, 19 nt, Homo sapiens
  misc_RNA (1)...(19): siRNA sense strand
uaacaaaguguagcucuga

SEQ ID NO: 86222 - RNA, 19 nt, Homo sapiens
  misc_RNA (1)...(19): siRNA sense strand
gcaucuaucugguggacau

SEQ ID NO: 86223 - RNA, 19 nt, Homo sapiens
  misc_RNA (1)...(19): siRNA sense strand
ugaccgugauucuuauuau

SEQ ID NO: 86224 - RNA, 19 nt, Homo sapiens
  misc_RNA (1)...(19): siRNA sense strand
aaccaaagaaggaauauga

SEQ ID NO: 86225 - RNA, 19 nt, Homo sapiens
  misc_RNA (1)...(19): siRNA sense strand
ccaaagaaggaauaugaga

SEQ ID NO: 86226 - RNA, 19 nt, Homo sapiens
  misc_RNA (1)...(19): siRNA sense strand
agugauaacugcacagcuu

SEQ ID NO: 86227 - RNA, 19 nt, Homo sapiens
  misc_RNA (1)...(19): siRNA sense strand
aaagaaggaauaugagaga

SEQ ID NO: 86228 - RNA, 19 nt, Homo sapiens
  misc_RNA (1)...(19): siRNA sense strand
cauauuauuucugcagaug

SEQ ID NO: 86229 - RNA, 19 nt, Homo sapiens
  misc_RNA (1)...(19): siRNA sense strand
ggacaugagucaaaacuac

SEQ ID NO: 86230 - RNA, 19 nt, Homo sapiens
  misc_RNA (1)...(19): siRNA sense strand
guguagcucugacaugaau

SEQ ID NO: 86231 - RNA, 19 nt, Homo sapiens
  misc_RNA (1)...(19): siRNA sense strand
aaguguagcucugacauga

SEQ ID NO: 86232 - RNA, 19 nt, Homo sapiens
  misc_RNA (1)...(19): siRNA sense strand
gcaggugugaaguggguua

SEQ ID NO: 86233 - RNA, 19 nt, Homo sapiens
  misc_RNA (1)...(19): siRNA sense strand
ggaggaggauggagaugcu

SEQ ID NO: 86234 - RNA, 19 nt, Homo sapiens
  misc_RNA (1)...(19): siRNA sense strand
gcauggacagugcaucuau

SEQ ID NO: 86235 - RNA, 19 nt, Homo sapiens
  misc_RNA (1)...(19): siRNA sense strand
cagcuuuaguucagacaga

SEQ ID NO: 86236 - RNA, 19 nt, Homo sapiens
  misc_RNA (1)...(19): siRNA sense strand
caggagaguccagugauaa

SEQ ID NO: 86237 - RNA, 19 nt, Homo sapiens
  misc_RNA (1)...(19): siRNA sense strand
agucgucgguuccacauau

SEQ ID NO: 86238 - RNA, 19 nt, Homo sapiens
  misc_RNA (1)...(19): siRNA sense strand
ggugugaaguggguuauac

SEQ ID NO: 86239 - RNA, 19 nt, Homo sapiens
  misc_RNA (1)...(19): siRNA sense strand
uaaagaaccaaagaaggaa

SEQ ID NO: 86240 - RNA, 19 nt, Homo sapiens
  misc_RNA (1)...(19): siRNA sense strand
cuacaggcaguccucagua

SEQ ID NO: 86241 - RNA, 19 nt, Homo sapiens
  misc_RNA (1)...(19): siRNA sense strand
ugauaacugcacagcuuua

SEQ ID NO: 86242 - RNA, 19 nt, Homo sapiens
  misc_RNA (1)...(19): siRNA sense strand
gaugguacagaaaucgaaa

SEQ ID NO: 86243 - RNA, 19 nt, Homo sapiens
  misc_RNA (1)...(19): siRNA sense strand
gaaccaaagaaggaauaug

SEQ ID NO: 86244 - RNA, 19 nt, Homo sapiens
  misc_RNA (1)...(19): siRNA sense strand
cugcacagcuuuaguucag

SEQ ID NO: 86245 - RNA, 19 nt, Homo sapiens
  misc_RNA (1)...(19): siRNA sense strand
uguccgaugugaacacuuc

SEQ ID NO: 86246 - RNA, 19 nt, Homo sapiens
  misc_RNA (1)...(19): siRNA sense strand
gacaugaauggcuauuguu

SEQ ID NO: 86247 - RNA, 19 nt, Homo sapiens
  misc_RNA (1)...(19): siRNA sense strand
caugaauggcuauuguuug

SEQ ID NO: 86248 - RNA, 19 nt, Homo sapiens
  misc_RNA (1)...(19): siRNA sense strand
acaugaauggcuauuguuu

SEQ ID NO: 86249 - RNA, 19 nt, Homo sapiens
  misc_RNA (1)...(19): siRNA sense strand
aagaaccaaagaaggaaua

SEQ ID NO: 86250 - RNA, 19 nt, Homo sapiens
  misc_RNA (1)...(19): siRNA sense strand
gugauaacugcacagcuuu

SEQ ID NO: 86251 - RNA, 19 nt, Homo sapiens
  misc_RNA (1)...(19): siRNA sense strand
auacugguguccgauguga

SEQ ID NO: 86252 - RNA, 19 nt, Homo sapiens
  misc_RNA (1)...(19): siRNA sense strand
uaaccguccaccaaccuuu

SEQ ID NO: 86253 - RNA, 19 nt, Homo sapiens
  misc_RNA (1)...(19): siRNA sense strand
gauaacugcacagcuuuag

SEQ ID NO: 86254 - RNA, 19 nt, Homo sapiens
  misc_RNA (1)...(19): siRNA sense strand
cauggacagugcaucuauc

SEQ ID NO: 86255 - RNA, 19 nt, Homo sapiens
  misc_RNA (1)...(19): siRNA sense strand
acguguggcucaaguguca

SEQ ID NO: 86256 - RNA, 19 nt, Homo sapiens
  misc_RNA (1)...(19): siRNA sense strand
ccgaugugaacacuucuuu

SEQ ID NO: 86257 - RNA, 19 nt, Homo sapiens
  misc_RNA (1)...(19): siRNA sense strand
caaaguguagcucugacau

SEQ ID NO: 86258 - RNA, 19 nt, Homo sapiens
  misc_RNA (1)...(19): siRNA sense strand
aagaguauguggcuuugac

SEQ ID NO: 86259 - RNA, 19 nt, Homo sapiens
  misc_RNA (1)...(19): siRNA sense strand
ucgguuccacauauuauuu

SEQ ID NO: 86260 - RNA, 19 nt, Homo sapiens
  misc_RNA (1)...(19): siRNA sense strand
ucaagugucaauaacaaag

SEQ ID NO: 86261 - RNA, 19 nt, Homo sapiens
  misc_RNA (1)...(19): siRNA sense strand
aaccguccaccaaccuuua

SEQ ID NO: 86262 - RNA, 19 nt, Homo sapiens
  misc_RNA (1)...(19): siRNA sense strand
augaauggcuauuguuugc

SEQ ID NO: 86263 - RNA, 19 nt, Homo sapiens
  misc_RNA (1)...(19): siRNA sense strand
caagugucaauaacaaagu

SEQ ID NO: 86264 - RNA, 19 nt, Homo sapiens
  misc_RNA (1)...(19): siRNA sense strand
guggcucaagugucaauaa

SEQ ID NO: 86265 - RNA, 19 nt, Homo sapiens
  misc_RNA (1)...(19): siRNA sense strand
uauuauuucugcagauggu

SEQ ID NO: 86266 - RNA, 19 nt, Homo sapiens
  misc_RNA (1)...(19): siRNA sense strand
gaaauaagaagcaccacua

SEQ ID NO: 86267 - RNA, 19 nt, Homo sapiens
  misc_RNA (1)...(19): siRNA sense strand
gagagaagcagcagacuuu

SEQ ID NO: 86268 - RNA, 19 nt, Homo sapiens
  misc_RNA (1)...(19): siRNA sense strand
gcacgagaauugauagaga

SEQ ID NO: 86269 - RNA, 19 nt, Homo sapiens
  misc_RNA (1)...(19): siRNA sense strand
agacagaccugcguaaauu

SEQ ID NO: 86270 - RNA, 19 nt, Homo sapiens
  misc_RNA (1)...(19): siRNA sense strand
ggagagauuucccaacaau

SEQ ID NO: 86271 - RNA, 19 nt, Homo sapiens
  misc_RNA (1)...(19): siRNA sense strand
ccaagaugcuggagagauu

SEQ ID NO: 86272 - RNA, 19 nt, Homo sapiens
  misc_RNA (1)...(19): siRNA sense strand
ggaaguaccagcacaguga

SEQ ID NO: 86273 - RNA, 19 nt, Homo sapiens
  misc_RNA (1)...(19): siRNA sense strand
agaacaagcucaacuacuu

SEQ ID NO: 86274 - RNA, 19 nt, Homo sapiens
  misc_RNA (1)...(19): siRNA sense strand
gcaagaacaagcucaacua

SEQ ID NO: 86275 - RNA, 19 nt, Homo sapiens
  misc_RNA (1)...(19): siRNA sense strand
ggacgugagcgacagaaua

SEQ ID NO: 86276 - RNA, 19 nt, Homo sapiens
  misc_RNA (1)...(19): siRNA sense strand
gauagucucugcccaucaa

SEQ ID NO: 86277 - RNA, 19 nt, Homo sapiens
  misc_RNA (1)...(19): siRNA sense strand
agaaggaacuggagaagau

SEQ ID NO: 86278 - RNA, 19 nt, Homo sapiens
  misc_RNA (1)...(19): siRNA sense strand
caaccucucuucuguaucu

SEQ ID NO: 86279 - RNA, 19 nt, Homo sapiens
  misc_RNA (1)...(19): siRNA sense strand
gagaauugauagagaagau

SEQ ID NO: 86280 - RNA, 19 nt, Homo sapiens
  misc_RNA (1)...(19): siRNA sense strand
ggagagccguggugaagau

SEQ ID NO: 86281 - RNA, 19 nt, Homo sapiens
  misc_RNA (1)...(19): siRNA sense strand
ggaaugccaccuacuuuga

SEQ ID NO: 86282 - RNA, 19 nt, Homo sapiens
  misc_RNA (1)...(19): siRNA sense strand
gaggacaggcucaaucaaa

SEQ ID NO: 86283 - RNA, 19 nt, Homo sapiens
  misc_RNA (1)...(19): siRNA sense strand
guaaauucaggaccuauaa

SEQ ID NO: 86284 - RNA, 19 nt, Homo sapiens
  misc_RNA (1)...(19): siRNA sense strand
ccaacaaucuacccaaaca

SEQ ID NO: 86285 - RNA, 19 nt, Homo sapiens
  misc_RNA (1)...(19): siRNA sense strand
gaauuacuggcuucugaua

SEQ ID NO: 86286 - RNA, 19 nt, Homo sapiens
  misc_RNA (1)...(19): siRNA sense strand
ggaagagccugccuuucuc

SEQ ID NO: 86287 - RNA, 19 nt, Homo sapiens
  misc_RNA (1)...(19): siRNA sense strand
guaaggagaacccuaccua

SEQ ID NO: 86288 - RNA, 19 nt, Homo sapiens
  misc_RNA (1)...(19): siRNA sense strand
ccacacaacauccucauau

SEQ ID NO: 86289 - RNA, 19 nt, Homo sapiens
  misc_RNA (1)...(19): siRNA sense strand
gcacgaagacgucauugca

SEQ ID NO: 86290 - RNA, 19 nt, Homo sapiens
  misc_RNA (1)...(19): siRNA sense strand
gaauacaccaucaccaugu

SEQ ID NO: 86291 - RNA, 19 nt, Homo sapiens
  misc_RNA (1)...(19): siRNA sense strand
cagccacccugcaagagua

SEQ ID NO: 86292 - RNA, 19 nt, Homo sapiens
  misc_RNA (1)...(19): siRNA sense strand
ggaacaagacgauggagau

SEQ ID NO: 86293 - RNA, 19 nt, Homo sapiens
  misc_RNA (1)...(19): siRNA sense strand
cgaacgacgugcucaaaca

SEQ ID NO: 86294 - RNA, 19 nt, Homo sapiens
  misc_RNA (1)...(19): siRNA sense strand
gaauugauagagaagauga

SEQ ID NO: 86295 - RNA, 19 nt, Homo sapiens
  misc_RNA (1)...(19): siRNA sense strand
uacaagaugucccacuuug

SEQ ID NO: 86296 - RNA, 19 nt, Homo sapiens
  misc_RNA (1)...(19): siRNA sense strand
caagaugucccacuuugug

SEQ ID NO: 86297 - RNA, 19 nt, Homo sapiens
  misc_RNA (1)...(19): siRNA sense strand
gaagaugauugcgauggau

SEQ ID NO: 86298 - RNA, 19 nt, Homo sapiens
  misc_RNA (1)...(19): siRNA sense strand
gcagugggcagacacaguu

SEQ ID NO: 86299 - RNA, 19 nt, Homo sapiens
  misc_RNA (1)...(19): siRNA sense strand
gaacgugauccgcuacuuc

SEQ ID NO: 86300 - RNA, 19 nt, Homo sapiens
  misc_RNA (1)...(19): siRNA sense strand
gaagcacgaagacgucauu

SEQ ID NO: 86301 - RNA, 19 nt, Homo sapiens
  misc_RNA (1)...(19): siRNA sense strand
gaacaagacgauggagaug

SEQ ID NO: 86302 - RNA, 19 nt, Homo sapiens
  misc_RNA (1)...(19): siRNA sense strand
gccaugaucuccgacuuug

SEQ ID NO: 86303 - RNA, 19 nt, Homo sapiens
  misc_RNA (1)...(19): siRNA sense strand
ggacaggcucaaucaaaug

SEQ ID NO: 86304 - RNA, 19 nt, Homo sapiens
  misc_RNA (1)...(19): siRNA sense strand
aagaguauguggagcagaa

SEQ ID NO: 86305 - RNA, 19 nt, Homo sapiens
  misc_RNA (1)...(19): siRNA sense strand
ggagaaggaccggcaauuc

SEQ ID NO: 86306 - RNA, 19 nt, Homo sapiens
  misc_RNA (1)...(19): siRNA sense strand
ccaucaaccucucuucugu

SEQ ID NO: 86307 - RNA, 19 nt, Homo sapiens
  misc_RNA (1)...(19): siRNA sense strand
gagcugagggcacaauugu

SEQ ID NO: 86308 - RNA, 19 nt, Homo sapiens
  misc_RNA (1)...(19): siRNA sense strand
cagcacggacgucaaguuu

SEQ ID NO: 86309 - RNA, 19 nt, Homo sapiens
  misc_RNA (1)...(19): siRNA sense strand
cacgagaauugauagagaa

SEQ ID NO: 86310 - RNA, 19 nt, Homo sapiens
  misc_RNA (1)...(19): siRNA sense strand
gcaccuuccugcugauugg

SEQ ID NO: 86311 - RNA, 19 nt, Homo sapiens
  misc_RNA (1)...(19): siRNA sense strand
ugaggaaggugaugcacau

SEQ ID NO: 86312 - RNA, 19 nt, Homo sapiens
  misc_RNA (1)...(19): siRNA sense strand
aggaauuacuggcuucuga

SEQ ID NO: 86313 - RNA, 19 nt, Homo sapiens
  misc_RNA (1)...(19): siRNA sense strand
ggagagaagcagcagacuu

SEQ ID NO: 86314 - RNA, 19 nt, Homo sapiens
  misc_RNA (1)...(19): siRNA sense strand
agacagaggccaagagcaa

SEQ ID NO: 86315 - RNA, 19 nt, Homo sapiens
  misc_RNA (1)...(19): siRNA sense strand
uagagaagcagcuccaguu

SEQ ID NO: 86316 - RNA, 19 nt, Homo sapiens
  misc_RNA (1)...(19): siRNA sense strand
cgagagcuccgguggaaug

SEQ ID NO: 86317 - RNA, 19 nt, Homo sapiens
  misc_RNA (1)...(19): siRNA sense strand
cgucauugcacgagaauug

SEQ ID NO: 86318 - RNA, 19 nt, Homo sapiens
  misc_RNA (1)...(19): siRNA sense strand
gaaggggacuacaagaugu

SEQ ID NO: 86319 - RNA, 19 nt, Homo sapiens
  misc_RNA (1)...(19): siRNA sense strand
aaugauggcagccuguaua

SEQ ID NO: 86320 - RNA, 19 nt, Homo sapiens
  misc_RNA (1)...(19): siRNA sense strand
cagagaugcugagcgaaga

SEQ ID NO: 86321 - RNA, 19 nt, Homo sapiens
  misc_RNA (1)...(19): siRNA sense strand
cuggagagauuucccaaca

SEQ ID NO: 86322 - RNA, 19 nt, Homo sapiens
  misc_RNA (1)...(19): siRNA sense strand
cgaacagaauacaccauca

SEQ ID NO: 86323 - RNA, 19 nt, Homo sapiens
  misc_RNA (1)...(19): siRNA sense strand
cagauggaauccucuacau

SEQ ID NO: 86324 - RNA, 19 nt, Homo sapiens
  misc_RNA (1)...(19): siRNA sense strand
ccaccuacuuugacuaugc

SEQ ID NO: 86325 - RNA, 19 nt, Homo sapiens
  misc_RNA (1)...(19): siRNA sense strand
ugcgauggauccucagaaa

SEQ ID NO: 86326 - RNA, 19 nt, Homo sapiens
  misc_RNA (1)...(19): siRNA sense strand
caagaggacaggcucaauc

SEQ ID NO: 86327 - RNA, 19 nt, Homo sapiens
  misc_RNA (1)...(19): siRNA sense strand
agaagaugauugcgaugga

SEQ ID NO: 86328 - RNA, 19 nt, Homo sapiens
  misc_RNA (1)...(19): siRNA sense strand
ggugauaguugggaaaauu

SEQ ID NO: 86329 - RNA, 19 nt, Homo sapiens
  misc_RNA (1)...(19): siRNA sense strand
gagaagcagcagacuuugu

SEQ ID NO: 86330 - RNA, 19 nt, Homo sapiens
  misc_RNA (1)...(19): siRNA sense strand
gagccguggugaagaugga

SEQ ID NO: 86331 - RNA, 19 nt, Homo sapiens
  misc_RNA (1)...(19): siRNA sense strand
gacgugagcgacagaauag

SEQ ID NO: 86332 - RNA, 19 nt, Homo sapiens
  misc_RNA (1)...(19): siRNA sense strand
gcgaagacuguaaggagaa

SEQ ID NO: 86333 - RNA, 19 nt, Homo sapiens
  misc_RNA (1)...(19): siRNA sense strand
ugacgaaacuuccuuuuac

SEQ ID NO: 86334 - RNA, 19 nt, Homo sapiens
  misc_RNA (1)...(19): siRNA sense strand
ucaaacacccguucuucug

SEQ ID NO: 86335 - RNA, 19 nt, Homo sapiens
  misc_RNA (1)...(19): siRNA sense strand
gcucaaacacccguucuuc

SEQ ID NO: 86336 - RNA, 19 nt, Homo sapiens
  misc_RNA (1)...(19): siRNA sense strand
agacgucauugcacgagaa

SEQ ID NO: 86337 - RNA, 19 nt, Homo sapiens
  misc_RNA (1)...(19): siRNA sense strand
acaagacgauggagaugag

SEQ ID NO: 86338 - RNA, 19 nt, Homo sapiens
  misc_RNA (1)...(19): siRNA sense strand
ucaucggccuuugcagaua

SEQ ID NO: 86339 - RNA, 19 nt, Homo sapiens
  misc_RNA (1)...(19): siRNA sense strand
aggacaggcucaaucaaau

SEQ ID NO: 86340 - RNA, 19 nt, Homo sapiens
  misc_RNA (1)...(19): siRNA sense strand
uggaagagccugccuuucu

SEQ ID NO: 86341 - RNA, 19 nt, Homo sapiens
  misc_RNA (1)...(19): siRNA sense strand
gaccuaaagccacacaaca

SEQ ID NO: 86342 - RNA, 19 nt, Homo sapiens
  misc_RNA (1)...(19): siRNA sense strand
caucaaccucucuucugua

SEQ ID NO: 86343 - RNA, 19 nt, Homo sapiens
  misc_RNA (1)...(19): siRNA sense strand
cguaaauucaggaccuaua

SEQ ID NO: 86344 - RNA, 19 nt, Homo sapiens
  misc_RNA (1)...(19): siRNA sense strand
ggccaugaucuccgacuuu

SEQ ID NO: 86345 - RNA, 19 nt, Homo sapiens
  misc_RNA (1)...(19): siRNA sense strand
gaccggcaauuccaguaca

SEQ ID NO: 86346 - RNA, 19 nt, Homo sapiens
  misc_RNA (1)...(19): siRNA sense strand
guccagcuguugcgagaau

SEQ ID NO: 86347 - RNA, 19 nt, Homo sapiens
  misc_RNA (1)...(19): siRNA sense strand
ggagcugagggcacaauug

SEQ ID NO: 86348 - RNA, 19 nt, Homo sapiens
  misc_RNA (1)...(19): siRNA sense strand
ucccaacaaucuacccaaa

SEQ ID NO: 86349 - RNA, 19 nt, Homo sapiens
  misc_RNA (1)...(19): siRNA sense strand
acagugacgcuuccugaaa

SEQ ID NO: 86350 - RNA, 19 nt, Homo sapiens
  misc_RNA (1)...(19): siRNA sense strand
cuacaagaugucccacuuu

SEQ ID NO: 86351 - RNA, 19 nt, Homo sapiens
  misc_RNA (1)...(19): siRNA sense strand
gaacagaauacaccaucac

SEQ ID NO: 86352 - RNA, 19 nt, Homo sapiens
  misc_RNA (1)...(19): siRNA sense strand
gacuuuggccucugcaaga

SEQ ID NO: 86353 - RNA, 19 nt, Homo sapiens
  misc_RNA (1)...(19): siRNA sense strand
agaaggacuuugcgcaucu

SEQ ID NO: 86354 - RNA, 19 nt, Homo sapiens
  misc_RNA (1)...(19): siRNA sense strand
caucggccuuugcagauag

SEQ ID NO: 86355 - RNA, 19 nt, Homo sapiens
  misc_RNA (1)...(19): siRNA sense strand
gaucuccuccgagccauga

SEQ ID NO: 86356 - RNA, 19 nt, Homo sapiens
  misc_RNA (1)...(19): siRNA sense strand
uuuacuacguggucucuga

SEQ ID NO: 86357 - RNA, 19 nt, Homo sapiens
  misc_RNA (1)...(19): siRNA sense strand
cacacaacauccucauauc

SEQ ID NO: 86358 - RNA, 19 nt, Homo sapiens
  misc_RNA (1)...(19): siRNA sense strand
ucaacaucguucacagaga

SEQ ID NO: 86359 - RNA, 19 nt, Homo sapiens
  misc_RNA (1)...(19): siRNA sense strand
ugugauuccugcugauuca

SEQ ID NO: 86360 - RNA, 19 nt, Homo sapiens
  misc_RNA (1)...(19): siRNA sense strand
ggaauuacuggcuucugau

SEQ ID NO: 86361 - RNA, 19 nt, Homo sapiens
  misc_RNA (1)...(19): siRNA sense strand
gggagggucugaggaaggu

SEQ ID NO: 86362 - RNA, 19 nt, Homo sapiens
  misc_RNA (1)...(19): siRNA sense strand
gacguccuguggauccaaa

SEQ ID NO: 86363 - RNA, 19 nt, Homo sapiens
  misc_RNA (1)...(19): siRNA sense strand
cagaauacaccaucaccau

SEQ ID NO: 86364 - RNA, 19 nt, Homo sapiens
  misc_RNA (1)...(19): siRNA sense strand
cagacagaccugcguaaau

SEQ ID NO: 86365 - RNA, 19 nt, Homo sapiens
  misc_RNA (1)...(19): siRNA sense strand
uccgagccaugagaaauaa

SEQ ID NO: 86366 - RNA, 19 nt, Homo sapiens
  misc_RNA (1)...(19): siRNA sense strand
ggaaggagaugacaaaauu

SEQ ID NO: 86367 - RNA, 19 nt, Homo sapiens
  misc_RNA (1)...(19): siRNA sense strand
ggaggacacuuugugauuu

SEQ ID NO: 86368 - RNA, 19 nt, Homo sapiens
  misc_RNA (1)...(19): siRNA sense strand
gaagaggaccaacaucauu

SEQ ID NO: 86369 - RNA, 19 nt, Homo sapiens
  misc_RNA (1)...(19): siRNA sense strand
gaugugaucuuugcugaug

SEQ ID NO: 86370 - RNA, 19 nt, Homo sapiens
  misc_RNA (1)...(19): siRNA sense strand
gcaccacggucucccaugu

SEQ ID NO: 86371 - RNA, 19 nt, Homo sapiens
  misc_RNA (1)...(19): siRNA sense strand
gccgugaccucauuaacuu

SEQ ID NO: 86372 - RNA, 19 nt, Homo sapiens
  misc_RNA (1)...(19): siRNA sense strand
gaggacacuuugugauuuc

SEQ ID NO: 86373 - RNA, 19 nt, Homo sapiens
  misc_RNA (1)...(19): siRNA sense strand
gagggugucuucauuuguc

SEQ ID NO: 86374 - RNA, 19 nt, Homo sapiens
  misc_RNA (1)...(19): siRNA sense strand
ggaccagauccacaucaaa

SEQ ID NO: 86375 - RNA, 19 nt, Homo sapiens
  misc_RNA (1)...(19): siRNA sense strand
ggucgaggcggaggcuuua

SEQ ID NO: 86376 - RNA, 19 nt, Homo sapiens
  misc_RNA (1)...(19): siRNA sense strand
aaugguggaugugaucuuu

SEQ ID NO: 86377 - RNA, 19 nt, Homo sapiens
  misc_RNA (1)...(19): siRNA sense strand
caagcuagcagcagcaauc

SEQ ID NO: 86378 - RNA, 19 nt, Homo sapiens
  misc_RNA (1)...(19): siRNA sense strand
gcucgacacccacacaaau

SEQ ID NO: 86379 - RNA, 19 nt, Homo sapiens
  misc_RNA (1)...(19): siRNA sense strand
ccaagaagaggaccaacau

SEQ ID NO: 86380 - RNA, 19 nt, Homo sapiens
  misc_RNA (1)...(19): siRNA sense strand
gaccagauccacaucaaac

SEQ ID NO: 86381 - RNA, 19 nt, Homo sapiens
  misc_RNA (1)...(19): siRNA sense strand
aagaagaggaccaacauca

SEQ ID NO: 86382 - RNA, 19 nt, Homo sapiens
  misc_RNA (1)...(19): siRNA sense strand
uggaggacacuuugugauu

SEQ ID NO: 86383 - RNA, 19 nt, Homo sapiens
  misc_RNA (1)...(19): siRNA sense strand
cauuaaggccaacugcauu

SEQ ID NO: 86384 - RNA, 19 nt, Homo sapiens
  misc_RNA (1)...(19): siRNA sense strand
aguugacccuugagccaua

SEQ ID NO: 86385 - RNA, 19 nt, Homo sapiens
  misc_RNA (1)...(19): siRNA sense strand
cguaauggaggacacuuug

SEQ ID NO: 86386 - RNA, 19 nt, Homo sapiens
  misc_RNA (1)...(19): siRNA sense strand
cggauggucuagucuaugc

SEQ ID NO: 86387 - RNA, 19 nt, Homo sapiens
  misc_RNA (1)...(19): siRNA sense strand
guguuugccuccgaaguga

SEQ ID NO: 86388 - RNA, 19 nt, Homo sapiens
  misc_RNA (1)...(19): siRNA sense strand
uaauggaggacacuuugug

SEQ ID NO: 86389 - RNA, 19 nt, Homo sapiens
  misc_RNA (1)...(19): siRNA sense strand
gaaucaguuuauggagaga

SEQ ID NO: 86390 - RNA, 19 nt, Homo sapiens
  misc_RNA (1)...(19): siRNA sense strand
ugaagccgcaggagcaguu

SEQ ID NO: 86391 - RNA, 19 nt, Homo sapiens
  misc_RNA (1)...(19): siRNA sense strand
gcguaauggaggacacuuu

SEQ ID NO: 86392 - RNA, 19 nt, Homo sapiens
  misc_RNA (1)...(19): siRNA sense strand
acaaauaccgcaugcucau

SEQ ID NO: 86393 - RNA, 19 nt, Homo sapiens
  misc_RNA (1)...(19): siRNA sense strand
gagaugacaaaauugagua

SEQ ID NO: 86394 - RNA, 19 nt, Homo sapiens
  misc_RNA (1)...(19): siRNA sense strand
aggagcaguugacccuuga

SEQ ID NO: 86395 - RNA, 19 nt, Homo sapiens
  misc_RNA (1)...(19): siRNA sense strand
gcaacaggagaacaugaag

SEQ ID NO: 86396 - RNA, 19 nt, Homo sapiens
  misc_RNA (1)...(19): siRNA sense strand
cacuuugugauuuccauua

SEQ ID NO: 86397 - RNA, 19 nt, Homo sapiens
  misc_RNA (1)...(19): siRNA sense strand
gccaagaagaggaccaaca

SEQ ID NO: 86398 - RNA, 19 nt, Homo sapiens
  misc_RNA (1)...(19): siRNA sense strand
guaauggaggacacuuugu

SEQ ID NO: 86399 - RNA, 19 nt, Homo sapiens
  misc_RNA (1)...(19): siRNA sense strand
cucgacacccacacaaaua

SEQ ID NO: 86400 - RNA, 19 nt, Homo sapiens
  misc_RNA (1)...(19): siRNA sense strand
ccauuaaggccaacugcau

SEQ ID NO: 86401 - RNA, 19 nt, Homo sapiens
  misc_RNA (1)...(19): siRNA sense strand
ggaaaccagucggggaaga

SEQ ID NO: 86402 - RNA, 19 nt, Homo sapiens
  misc_RNA (1)...(19): siRNA sense strand
caagaagaggaccaacauc

SEQ ID NO: 86403 - RNA, 19 nt, Homo sapiens
  misc_RNA (1)...(19): siRNA sense strand
ggaaaggccugggaaguga

SEQ ID NO: 86404 - RNA, 19 nt, Homo sapiens
  misc_RNA (1)...(19): siRNA sense strand
gugcagaaguuacacagua

SEQ ID NO: 86405 - RNA, 19 nt, Homo sapiens
  misc_RNA (1)...(19): siRNA sense strand
gaacaaagggaccaacugu

SEQ ID NO: 86406 - RNA, 19 nt, Homo sapiens
  misc_RNA (1)...(19): siRNA sense strand
gaagggcugugucuaugga

SEQ ID NO: 86407 - RNA, 19 nt, Homo sapiens
  misc_RNA (1)...(19): siRNA sense strand
caggugggcucuucaguga

SEQ ID NO: 86408 - RNA, 19 nt, Homo sapiens
  misc_RNA (1)...(19): siRNA sense strand
gggacaagaugcugcagaa

SEQ ID NO: 86409 - RNA, 19 nt, Homo sapiens
  misc_RNA (1)...(19): siRNA sense strand
ggccacaccuuccuacaga

SEQ ID NO: 86410 - RNA, 19 nt, Homo sapiens
  misc_RNA (1)...(19): siRNA sense strand
gaacuucaaaggugauuuc

SEQ ID NO: 86411 - RNA, 19 nt, Homo sapiens
  misc_RNA (1)...(19): siRNA sense strand
ggugggcucuucagugaug

SEQ ID NO: 86412 - RNA, 19 nt, Homo sapiens
  misc_RNA (1)...(19): siRNA sense strand
ggacgaggcccagauggaa

SEQ ID NO: 86413 - RNA, 19 nt, Homo sapiens
  misc_RNA (1)...(19): siRNA sense strand
aggcccagauggaacauua

SEQ ID NO: 86414 - RNA, 19 nt, Homo sapiens
  misc_RNA (1)...(19): siRNA sense strand
ccaacugugugaccuccua

SEQ ID NO: 86415 - RNA, 19 nt, Homo sapiens
  misc_RNA (1)...(19): siRNA sense strand
cagaagggcaugaagaaga

SEQ ID NO: 86416 - RNA, 19 nt, Homo sapiens
  misc_RNA (1)...(19): siRNA sense strand
acacuaugcuguacaacug

SEQ ID NO: 86417 - RNA, 19 nt, Homo sapiens
  misc_RNA (1)...(19): siRNA sense strand
cuaugagacugacaacuau

SEQ ID NO: 86418 - RNA, 19 nt, Homo sapiens
  misc_RNA (1)...(19): siRNA sense strand
gggaaccgccucagcaaga

SEQ ID NO: 86419 - RNA, 19 nt, Homo sapiens
  misc_RNA (1)...(19): siRNA sense strand
acuaugagacugacaacua

SEQ ID NO: 86420 - RNA, 19 nt, Homo sapiens
  misc_RNA (1)...(19): siRNA sense strand
cacaguccauguucagcua

SEQ ID NO: 86421 - RNA, 19 nt, Homo sapiens
  misc_RNA (1)...(19): siRNA sense strand
gggaaaggccugggaagug

SEQ ID NO: 86422 - RNA, 19 nt, Homo sapiens
  misc_RNA (1)...(19): siRNA sense strand
acaaagggaccaacugugu

SEQ ID NO: 86423 - RNA, 19 nt, Homo sapiens
  misc_RNA (1)...(19): siRNA sense strand
cagcaagaguggccugaag

SEQ ID NO: 86424 - RNA, 19 nt, Homo sapiens
  misc_RNA (1)...(19): siRNA sense strand
ucaaggagugcuucaccua

SEQ ID NO: 86425 - RNA, 19 nt, Homo sapiens
  misc_RNA (1)...(19): siRNA sense strand
gagguggagcgacugauga

SEQ ID NO: 86426 - RNA, 19 nt, Homo sapiens
  misc_RNA (1)...(19): siRNA sense strand
ggagguggagcgacugaug

SEQ ID NO: 86427 - RNA, 19 nt, Homo sapiens
  misc_RNA (1)...(19): siRNA sense strand
ugccucagcuggugcagaa

SEQ ID NO: 86428 - RNA, 19 nt, Homo sapiens
  misc_RNA (1)...(19): siRNA sense strand
gaaaggccugggaagugaa

SEQ ID NO: 86429 - RNA, 19 nt, Homo sapiens
  misc_RNA (1)...(19): siRNA sense strand
ggagugcgacagcguagug

SEQ ID NO: 86430 - RNA, 19 nt, Homo sapiens
  misc_RNA (1)...(19): siRNA sense strand
aaagggaccaacuguguga

SEQ ID NO: 86431 - RNA, 19 nt, Homo sapiens
  misc_RNA (1)...(19): siRNA sense strand
ggacucagaggcgcugcua

SEQ ID NO: 86432 - RNA, 19 nt, Homo sapiens
  misc_RNA (1)...(19): siRNA sense strand
agaagggcaugaagaagag

SEQ ID NO: 86433 - RNA, 19 nt, Homo sapiens
  misc_RNA (1)...(19): siRNA sense strand
gccgugcucuucaccuaug

SEQ ID NO: 86434 - RNA, 19 nt, Homo sapiens
  misc_RNA (1)...(19): siRNA sense strand
gggcuuaggcacugauauc

SEQ ID NO: 86435 - RNA, 19 nt, Homo sapiens
  misc_RNA (1)...(19): siRNA sense strand
guacaacugccuggacuuc

SEQ ID NO: 86436 - RNA, 19 nt, Homo sapiens
  misc_RNA (1)...(19): siRNA sense strand
gaucgagguguaccgcaaa

SEQ ID NO: 86437 - RNA, 19 nt, Homo sapiens
  misc_RNA (1)...(19): siRNA sense strand
gcagaaguuacacaguaga

SEQ ID NO: 86438 - RNA, 19 nt, Homo sapiens
  misc_RNA (1)...(19): siRNA sense strand
cugaagggcugugucuaug

SEQ ID NO: 86439 - RNA, 19 nt, Homo sapiens
  misc_RNA (1)...(19): siRNA sense strand
ggaaccgccucagcaagag

SEQ ID NO: 86440 - RNA, 19 nt, Homo sapiens
  misc_RNA (1)...(19): siRNA sense strand
gccgucagcuacacuaugc

SEQ ID NO: 86441 - RNA, 19 nt, Homo sapiens
  misc_RNA (1)...(19): siRNA sense strand
gucaacaggugggcucuuc

SEQ ID NO: 86442 - RNA, 19 nt, Homo sapiens
  misc_RNA (1)...(19): siRNA sense strand
ccugaagggcugugucuau

SEQ ID NO: 86443 - RNA, 19 nt, Homo sapiens
  misc_RNA (1)...(19): siRNA sense strand
ggggauaucugggacaaga

SEQ ID NO: 86444 - RNA, 19 nt, Homo sapiens
  misc_RNA (1)...(19): siRNA sense strand
guggagagccuggcacugu

SEQ ID NO: 86445 - RNA, 19 nt, Homo sapiens
  misc_RNA (1)...(19): siRNA sense strand
ccugggaagugaacaaagg

SEQ ID NO: 86446 - RNA, 19 nt, Homo sapiens
  misc_RNA (1)...(19): siRNA sense strand
aaggagugcuucaccuaca

SEQ ID NO: 86447 - RNA, 19 nt, Homo sapiens
  misc_RNA (1)...(19): siRNA sense strand
ggucucaauucugaagcuu

SEQ ID NO: 86448 - RNA, 19 nt, Homo sapiens
  misc_RNA (1)...(19): siRNA sense strand
gugccucccuugcccuuca

SEQ ID NO: 86449 - RNA, 19 nt, Homo sapiens
  misc_RNA (1)...(19): siRNA sense strand
agcacgagaucgaggugua

SEQ ID NO: 86450 - RNA, 19 nt, Homo sapiens
  misc_RNA (1)...(19): siRNA sense strand
guuccacaguccauguuca

SEQ ID NO: 86451 - RNA, 19 nt, Homo sapiens
  misc_RNA (1)...(19): siRNA sense strand
gcagaagggcaugaagaag

SEQ ID NO: 86452 - RNA, 19 nt, Homo sapiens
  misc_RNA (1)...(19): siRNA sense strand
ugucagcuuuccucagcaa

SEQ ID NO: 86453 - RNA, 19 nt, Homo sapiens
  misc_RNA (1)...(19): siRNA sense strand
acaccuuccuacagaacuu

SEQ ID NO: 86454 - RNA, 19 nt, Homo sapiens
  misc_RNA (1)...(19): siRNA sense strand
gguacuaugagacugacaa

SEQ ID NO: 86455 - RNA, 19 nt, Homo sapiens
  misc_RNA (1)...(19): siRNA sense strand
gccacaccuuccuacagaa

SEQ ID NO: 86456 - RNA, 19 nt, Homo sapiens
  misc_RNA (1)...(19): siRNA sense strand
uaugagacugacaacuaua

SEQ ID NO: 86457 - RNA, 19 nt, Homo sapiens
  misc_RNA (1)...(19): siRNA sense strand
aggccgugcucuucaccua

SEQ ID NO: 86458 - RNA, 19 nt, Homo sapiens
  misc_RNA (1)...(19): siRNA sense strand
ggcaagaagaguugugucu

SEQ ID NO: 86459 - RNA, 19 nt, Homo sapiens
  misc_RNA (1)...(19): siRNA sense strand
ggaacugcagcacgagauc

SEQ ID NO: 86460 - RNA, 19 nt, Homo sapiens
  misc_RNA (1)...(19): siRNA sense strand
ugcagaaguuacacaguag

SEQ ID NO: 86461 - RNA, 19 nt, Homo sapiens
  misc_RNA (1)...(19): siRNA sense strand
gcugugcgaggacauguuc

SEQ ID NO: 86462 - RNA, 19 nt, Homo sapiens
  misc_RNA (1)...(19): siRNA sense strand
cagcuuuccucagcaacau

SEQ ID NO: 86463 - RNA, 19 nt, Homo sapiens
  misc_RNA (1)...(19): siRNA sense strand
ugcagaagggcaugaagaa

SEQ ID NO: 86464 - RNA, 19 nt, Homo sapiens
  misc_RNA (1)...(19): siRNA sense strand
guagguaccuggaaacuug

SEQ ID NO: 86465 - RNA, 19 nt, Homo sapiens
  misc_RNA (1)...(19): siRNA sense strand
aaacuugucuccagugaaa

SEQ ID NO: 86466 - RNA, 19 nt, Homo sapiens
  misc_RNA (1)...(19): siRNA sense strand
gaaaugggauggaaaauca

SEQ ID NO: 86467 - RNA, 19 nt, Homo sapiens
  misc_RNA (1)...(19): siRNA sense strand
caagagcaccauaaccuua

SEQ ID NO: 86468 - RNA, 19 nt, Homo sapiens
  misc_RNA (1)...(19): siRNA sense strand
gggaugugaucaccauuaa

SEQ ID NO: 86469 - RNA, 19 nt, Homo sapiens
  misc_RNA (1)...(19): siRNA sense strand
ggaaacuugucuccaguga

SEQ ID NO: 86470 - RNA, 19 nt, Homo sapiens
  misc_RNA (1)...(19): siRNA sense strand
gaugugaucaccauuaaau

SEQ ID NO: 86471 - RNA, 19 nt, Homo sapiens
  misc_RNA (1)...(19): siRNA sense strand
gaaagucaagagcaccaua

SEQ ID NO: 86472 - RNA, 19 nt, Homo sapiens
  misc_RNA (1)...(19): siRNA sense strand
ggccaaaccuaacaugauc

SEQ ID NO: 86473 - RNA, 19 nt, Homo sapiens
  misc_RNA (1)...(19): siRNA sense strand
gugcagaaaugggauggaa

SEQ ID NO: 86474 - RNA, 19 nt, Homo sapiens
  misc_RNA (1)...(19): siRNA sense strand
gaucaccauuaaaucugaa

SEQ ID NO: 86475 - RNA, 19 nt, Homo sapiens
  misc_RNA (1)...(19): siRNA sense strand
gguggaaugcgucaugaaa

SEQ ID NO: 86476 - RNA, 19 nt, Homo sapiens
  misc_RNA (1)...(19): siRNA sense strand
auacugagauuuccuucau

SEQ ID NO: 86477 - RNA, 19 nt, Homo sapiens
  misc_RNA (1)...(19): siRNA sense strand
ccaggaauuugacgaaguc

SEQ ID NO: 86478 - RNA, 19 nt, Homo sapiens
  misc_RNA (1)...(19): siRNA sense strand
gaaaacgagaggaugauaa

SEQ ID NO: 86479 - RNA, 19 nt, Homo sapiens
  misc_RNA (1)...(19): siRNA sense strand
ugaucaccauuaaaucuga

SEQ ID NO: 86480 - RNA, 19 nt, Homo sapiens
  misc_RNA (1)...(19): siRNA sense strand
gaaguaggagugggcuuug

SEQ ID NO: 86481 - RNA, 19 nt, Homo sapiens
  misc_RNA (1)...(19): siRNA sense strand
gaaacuugucuccagugaa

SEQ ID NO: 86482 - RNA, 19 nt, Homo sapiens
  misc_RNA (1)...(19): siRNA sense strand
aaagucaagagcaccauaa

SEQ ID NO: 86483 - RNA, 19 nt, Homo sapiens
  misc_RNA (1)...(19): siRNA sense strand
gccaggaauuugacgaagu

SEQ ID NO: 86484 - RNA, 19 nt, Homo sapiens
  misc_RNA (1)...(19): siRNA sense strand
gcagaaaugggauggaaaa

SEQ ID NO: 86485 - RNA, 19 nt, Homo sapiens
  misc_RNA (1)...(19): siRNA sense strand
ccugguacaugugcagaaa

SEQ ID NO: 86486 - RNA, 19 nt, Homo sapiens
  misc_RNA (1)...(19): siRNA sense strand
ugguacaugugcagaaaug

SEQ ID NO: 86487 - RNA, 19 nt, Homo sapiens
  misc_RNA (1)...(19): siRNA sense strand
auaaacuggugguggaaug

SEQ ID NO: 86488 - RNA, 19 nt, Homo sapiens
  misc_RNA (1)...(19): siRNA sense strand
acgagaggaugauaaacug

SEQ ID NO: 86489 - RNA, 19 nt, Homo sapiens
  misc_RNA (1)...(19): siRNA sense strand
uggaaugcgucaugaaagg

SEQ ID NO: 86490 - RNA, 19 nt, Homo sapiens
  misc_RNA (1)...(19): siRNA sense strand
uacugagauuuccuucaua

SEQ ID NO: 86491 - RNA, 19 nt, Homo sapiens
  misc_RNA (1)...(19): siRNA sense strand
cacugcagaugacaggaaa

SEQ ID NO: 86492 - RNA, 19 nt, Homo sapiens
  misc_RNA (1)...(19): siRNA sense strand
ugagauuuccuucauacug

SEQ ID NO: 86493 - RNA, 19 nt, Homo sapiens
  misc_RNA (1)...(19): siRNA sense strand
gggcuuugccaccaggaaa

SEQ ID NO: 86494 - RNA, 19 nt, Homo sapiens
  misc_RNA (1)...(19): siRNA sense strand
agaaguaggagugggcuuu

SEQ ID NO: 86495 - RNA, 19 nt, Homo sapiens
  misc_RNA (1)...(19): siRNA sense strand
ggaugugaucaccauuaaa

SEQ ID NO: 86496 - RNA, 19 nt, Homo sapiens
  misc_RNA (1)...(19): siRNA sense strand
ucaagagcaccauaaccuu

SEQ ID NO: 86497 - RNA, 19 nt, Homo sapiens
  misc_RNA (1)...(19): siRNA sense strand
gugguggaaugcgucauga

SEQ ID NO: 86498 - RNA, 19 nt, Homo sapiens
  misc_RNA (1)...(19): siRNA sense strand
acugagauuuccuucauac

SEQ ID NO: 86499 - RNA, 19 nt, Homo sapiens
  misc_RNA (1)...(19): siRNA sense strand
ucacugcagaugacaggaa

SEQ ID NO: 86500 - RNA, 19 nt, Homo sapiens
  misc_RNA (1)...(19): siRNA sense strand
gggccaggaauuugacgaa

SEQ ID NO: 86501 - RNA, 19 nt, Homo sapiens
  misc_RNA (1)...(19): siRNA sense strand
gauaaacuggugguggaau

SEQ ID NO: 86502 - RNA, 19 nt, Homo sapiens
  misc_RNA (1)...(19): siRNA sense strand
ggugguggaaugcgucaug

SEQ ID NO: 86503 - RNA, 19 nt, Homo sapiens
  misc_RNA (1)...(19): siRNA sense strand
cggaagagcucauccagaa

SEQ ID NO: 86504 - RNA, 19 nt, Homo sapiens
  misc_RNA (1)...(19): siRNA sense strand
guuggaaggugacaauaaa

SEQ ID NO: 86505 - RNA, 19 nt, Homo sapiens
  misc_RNA (1)...(19): siRNA sense strand
gaacucaacggcgacauaa

SEQ ID NO: 86506 - RNA, 19 nt, Homo sapiens
  misc_RNA (1)...(19): siRNA sense strand
aaugugagcuggagacaau

SEQ ID NO: 86507 - RNA, 19 nt, Homo sapiens
  misc_RNA (1)...(19): siRNA sense strand
gggagaaagucaagacagu

SEQ ID NO: 86508 - RNA, 19 nt, Homo sapiens
  misc_RNA (1)...(19): siRNA sense strand
agaaucagcaagagaauuu

SEQ ID NO: 86509 - RNA, 19 nt, Homo sapiens
  misc_RNA (1)...(19): siRNA sense strand
acaauaaacuggugacaac

SEQ ID NO: 86510 - RNA, 19 nt, Homo sapiens
  misc_RNA (1)...(19): siRNA sense strand
ucaagacagugguucaguu

SEQ ID NO: 86511 - RNA, 19 nt, Homo sapiens
  misc_RNA (1)...(19): siRNA sense strand
auaaacuggugacaacuuu

SEQ ID NO: 86512 - RNA, 19 nt, Homo sapiens
  misc_RNA (1)...(19): siRNA sense strand
gaaagucaagacagugguu

SEQ ID NO: 86513 - RNA, 19 nt, Homo sapiens
  misc_RNA (1)...(19): siRNA sense strand
caagacagugguucaguug

SEQ ID NO: 86514 - RNA, 19 nt, Homo sapiens
  misc_RNA (1)...(19): siRNA sense strand
caaucggucugccggaaga

SEQ ID NO: 86515 - RNA, 19 nt, Homo sapiens
  misc_RNA (1)...(19): siRNA sense strand
ucaccaauaccaugacauu

SEQ ID NO: 86516 - RNA, 19 nt, Homo sapiens
  misc_RNA (1)...(19): siRNA sense strand
agacagugguucaguugga

SEQ ID NO: 86517 - RNA, 19 nt, Homo sapiens
  misc_RNA (1)...(19): siRNA sense strand
cgaacucaacggcgacaua

SEQ ID NO: 86518 - RNA, 19 nt, Homo sapiens
  misc_RNA (1)...(19): siRNA sense strand
gaaucagcaagagaauuua

SEQ ID NO: 86519 - RNA, 19 nt, Homo sapiens
  misc_RNA (1)...(19): siRNA sense strand
caagagaaucagcaagaga

SEQ ID NO: 86520 - RNA, 19 nt, Homo sapiens
  misc_RNA (1)...(19): siRNA sense strand
gacagugguucaguuggaa

SEQ ID NO: 86521 - RNA, 19 nt, Homo sapiens
  misc_RNA (1)...(19): siRNA sense strand
gagaaucagcaagagaauu

SEQ ID NO: 86522 - RNA, 19 nt, Homo sapiens
  misc_RNA (1)...(19): siRNA sense strand
gacaauaaacuggugacaa

SEQ ID NO: 86523 - RNA, 19 nt, Homo sapiens
  misc_RNA (1)...(19): siRNA sense strand
ggaaggugacaauaaacug

SEQ ID NO: 86524 - RNA, 19 nt, Homo sapiens
  misc_RNA (1)...(19): siRNA sense strand
gacauaaucaccaauacca

SEQ ID NO: 86525 - RNA, 19 nt, Homo sapiens
  misc_RNA (1)...(19): siRNA sense strand
ggcgacauaaucaccaaua

SEQ ID NO: 86526 - RNA, 19 nt, Homo sapiens
  misc_RNA (1)...(19): siRNA sense strand
caacugcagagccaggaaa

SEQ ID NO: 86527 - RNA, 19 nt, Homo sapiens
  misc_RNA (1)...(19): siRNA sense strand
gguccaaagugauccaaaa

SEQ ID NO: 86528 - RNA, 19 nt, Homo sapiens
  misc_RNA (1)...(19): siRNA sense strand
aagagaaucagcaagagaa

SEQ ID NO: 86529 - RNA, 19 nt, Homo sapiens
  misc_RNA (1)...(19): siRNA sense strand
ucaagucugugaccgaacu

SEQ ID NO: 86530 - RNA, 19 nt, Homo sapiens
  misc_RNA (1)...(19): siRNA sense strand
gcgacauaaucaccaauac

SEQ ID NO: 86531 - RNA, 19 nt, Homo sapiens
  misc_RNA (1)...(19): siRNA sense strand
ccaaagugauccaaaacga

SEQ ID NO: 86532 - RNA, 19 nt, Homo sapiens
  misc_RNA (1)...(19): siRNA sense strand
ucaagagaaucagcaagag

SEQ ID NO: 86533 - RNA, 19 nt, Homo sapiens
  misc_RNA (1)...(19): siRNA sense strand
aaacuggugacaacuuuca

SEQ ID NO: 86534 - RNA, 19 nt, Homo sapiens
  misc_RNA (1)...(19): siRNA sense strand
gcagagccaggaaaacuuu

SEQ ID NO: 86535 - RNA, 19 nt, Homo sapiens
  misc_RNA (1)...(19): siRNA sense strand
ugacauugggugacauugu

SEQ ID NO: 86536 - RNA, 19 nt, Homo sapiens
  misc_RNA (1)...(19): siRNA sense strand
gaaugugagcuggagacaa

SEQ ID NO: 86537 - RNA, 19 nt, Homo sapiens
  misc_RNA (1)...(19): siRNA sense strand
auaaucaccaauaccauga

SEQ ID NO: 86538 - RNA, 19 nt, Homo sapiens
  misc_RNA (1)...(19): siRNA sense strand
gaguuucuccggcaaguac

SEQ ID NO: 86539 - RNA, 19 nt, Homo sapiens
  misc_RNA (1)...(19): siRNA sense strand
acucaacggcgacauaauc

SEQ ID NO: 86540 - RNA, 19 nt, Homo sapiens
  misc_RNA (1)...(19): siRNA sense strand
aauaaacuggugacaacuu

SEQ ID NO: 86541 - RNA, 19 nt, Homo sapiens
  misc_RNA (1)...(19): siRNA sense strand
ucaguuggaaggugacaau

SEQ ID NO: 86542 - RNA, 19 nt, Homo sapiens
  misc_RNA (1)...(19): siRNA sense strand
ggaagagcucauccagaag

SEQ ID NO: 86543 - RNA, 19 nt, Homo sapiens
  misc_RNA (1)...(19): siRNA sense strand
ggagagaaguuugaagaaa

SEQ ID NO: 86544 - RNA, 19 nt, Homo sapiens
  misc_RNA (1)...(19): siRNA sense strand
cagauuguaucaucacuug

SEQ ID NO: 86545 - RNA, 19 nt, Homo sapiens
  misc_RNA (1)...(19): siRNA sense strand
gaagaaaccacagcugaug

SEQ ID NO: 86546 - RNA, 19 nt, Homo sapiens
  misc_RNA (1)...(19): siRNA sense strand
gggaauagcuuugcgaaaa

SEQ ID NO: 86547 - RNA, 19 nt, Homo sapiens
  misc_RNA (1)...(19): siRNA sense strand
ggagugggaugggaaggaa

SEQ ID NO: 86548 - RNA, 19 nt, Homo sapiens
  misc_RNA (1)...(19): siRNA sense strand
caagccagauuguaucauc

SEQ ID NO: 86549 - RNA, 19 nt, Homo sapiens
  misc_RNA (1)...(19): siRNA sense strand
aaacugagagcacuuugaa

SEQ ID NO: 86550 - RNA, 19 nt, Homo sapiens
  misc_RNA (1)...(19): siRNA sense strand
gaaauuagugguggagugu

SEQ ID NO: 86551 - RNA, 19 nt, Homo sapiens
  misc_RNA (1)...(19): siRNA sense strand
gugcauugguucagcauca

SEQ ID NO: 86552 - RNA, 19 nt, Homo sapiens
  misc_RNA (1)...(19): siRNA sense strand
gaaagaugggaaauuagug

SEQ ID NO: 86553 - RNA, 19 nt, Homo sapiens
  misc_RNA (1)...(19): siRNA sense strand
ggagcuaggagugggaaua

SEQ ID NO: 86554 - RNA, 19 nt, Homo sapiens
  misc_RNA (1)...(19): siRNA sense strand
guacucggaucuaugaaaa

SEQ ID NO: 86555 - RNA, 19 nt, Homo sapiens
  misc_RNA (1)...(19): siRNA sense strand
caacacaguuuucuuguac

SEQ ID NO: 86556 - RNA, 19 nt, Homo sapiens
  misc_RNA (1)...(19): siRNA sense strand
ugaaagaugggaaauuagu

SEQ ID NO: 86557 - RNA, 19 nt, Homo sapiens
  misc_RNA (1)...(19): siRNA sense strand
gggagagaaguuugaagaa

SEQ ID NO: 86558 - RNA, 19 nt, Homo sapiens
  misc_RNA (1)...(19): siRNA sense strand
cuuuacagauggugcauug

SEQ ID NO: 86559 - RNA, 19 nt, Homo sapiens
  misc_RNA (1)...(19): siRNA sense strand
gauuguaucaucacuugug

SEQ ID NO: 86560 - RNA, 19 nt, Homo sapiens
  misc_RNA (1)...(19): siRNA sense strand
uggagugugucaugaacaa

SEQ ID NO: 86561 - RNA, 19 nt, Homo sapiens
  misc_RNA (1)...(19): siRNA sense strand
gagcuaggagugggaauag

SEQ ID NO: 86562 - RNA, 19 nt, Homo sapiens
  misc_RNA (1)...(19): siRNA sense strand
gagugugucaugaacaaug

SEQ ID NO: 86563 - RNA, 19 nt, Homo sapiens
  misc_RNA (1)...(19): siRNA sense strand
uacagauggugcauugguu

SEQ ID NO: 86564 - RNA, 19 nt, Homo sapiens
  misc_RNA (1)...(19): siRNA sense strand
aggcuuugaugaauacaug

SEQ ID NO: 86565 - RNA, 19 nt, Homo sapiens
  misc_RNA (1)...(19): siRNA sense strand
gagagcacuuugaaaacaa

SEQ ID NO: 86566 - RNA, 19 nt, Homo sapiens
  misc_RNA (1)...(19): siRNA sense strand
ugaagaaaccacagcugau

SEQ ID NO: 86567 - RNA, 19 nt, Homo sapiens
  misc_RNA (1)...(19): siRNA sense strand
ugggagagaaguuugaaga

SEQ ID NO: 86568 - RNA, 19 nt, Homo sapiens
  misc_RNA (1)...(19): siRNA sense strand
ccacagcugauggcagaaa

SEQ ID NO: 86569 - RNA, 19 nt, Homo sapiens
  misc_RNA (1)...(19): siRNA sense strand
gugguggagugugucauga

SEQ ID NO: 86570 - RNA, 19 nt, Homo sapiens
  misc_RNA (1)...(19): siRNA sense strand
gguggagugugucaugaac

SEQ ID NO: 86571 - RNA, 19 nt, Homo sapiens
  misc_RNA (1)...(19): siRNA sense strand
ugagagcacuuugaaaaca

SEQ ID NO: 86572 - RNA, 19 nt, Homo sapiens
  misc_RNA (1)...(19): siRNA sense strand
aauuagugguggagugugu

SEQ ID NO: 86573 - RNA, 19 nt, Homo sapiens
  misc_RNA (1)...(19): siRNA sense strand
ggaagcugguggugaauuu

SEQ ID NO: 86574 - RNA, 19 nt, Homo sapiens
  misc_RNA (1)...(19): siRNA sense strand
gaagaauuaugaugaguuc

SEQ ID NO: 86575 - RNA, 19 nt, Homo sapiens
  misc_RNA (1)...(19): siRNA sense strand
gaaagcaacauacagacaa

SEQ ID NO: 86576 - RNA, 19 nt, Homo sapiens
  misc_RNA (1)...(19): siRNA sense strand
gcgggaagcugguggugaa

SEQ ID NO: 86577 - RNA, 19 nt, Homo sapiens
  misc_RNA (1)...(19): siRNA sense strand
gugagaagaauuaugauga

SEQ ID NO: 86578 - RNA, 19 nt, Homo sapiens
  misc_RNA (1)...(19): siRNA sense strand
agagugagaagaauuauga

SEQ ID NO: 86579 - RNA, 19 nt, Homo sapiens
  misc_RNA (1)...(19): siRNA sense strand
gggcaggacuucacuuggu

SEQ ID NO: 86580 - RNA, 19 nt, Homo sapiens
  misc_RNA (1)...(19): siRNA sense strand
gcaaggaaagcaacauaca

SEQ ID NO: 86581 - RNA, 19 nt, Homo sapiens
  misc_RNA (1)...(19): siRNA sense strand
gagaagaauuaugaugagu

SEQ ID NO: 86582 - RNA, 19 nt, Homo sapiens
  misc_RNA (1)...(19): siRNA sense strand
ggaaagcaacauacagaca

SEQ ID NO: 86583 - RNA, 19 nt, Homo sapiens
  misc_RNA (1)...(19): siRNA sense strand
ugagaagaauuaugaugag

SEQ ID NO: 86584 - RNA, 19 nt, Homo sapiens
  misc_RNA (1)...(19): siRNA sense strand
uggagagugagaagaauua

SEQ ID NO: 86585 - RNA, 19 nt, Homo sapiens
  misc_RNA (1)...(19): siRNA sense strand
ucggaggcgugaccuauga

SEQ ID NO: 86586 - RNA, 19 nt, Homo sapiens
  misc_RNA (1)...(19): siRNA sense strand
gauggagagugagaagaau

SEQ ID NO: 86587 - RNA, 19 nt, Homo sapiens
  misc_RNA (1)...(19): siRNA sense strand
aaagcaacauacagacaau

SEQ ID NO: 86588 - RNA, 19 nt, Homo sapiens
  misc_RNA (1)...(19): siRNA sense strand
caaggccacugugcagaug

SEQ ID NO: 86589 - RNA, 19 nt, Homo sapiens
  misc_RNA (1)...(19): siRNA sense strand
aaggaaagcaacauacaga

SEQ ID NO: 86590 - RNA, 19 nt, Homo sapiens
  misc_RNA (1)...(19): siRNA sense strand
gagcaagagacuggccuaa

SEQ ID NO: 86591 - RNA, 19 nt, Homo sapiens
  misc_RNA (1)...(19): siRNA sense strand
gaucuccagcgauguaauc

SEQ ID NO: 86592 - RNA, 19 nt, Homo sapiens
  misc_RNA (1)...(19): siRNA sense strand
ucacuuggucccagcacua

SEQ ID NO: 86593 - RNA, 19 nt, Homo sapiens
  misc_RNA (1)...(19): siRNA sense strand
gccacaccaugaccaacaa

SEQ ID NO: 86594 - RNA, 19 nt, Homo sapiens
  misc_RNA (1)...(19): siRNA sense strand
uaugagcgcgugagcaaga

SEQ ID NO: 86595 - RNA, 19 nt, Homo sapiens
  misc_RNA (1)...(19): siRNA sense strand
uggcaaggaaagcaacaua

SEQ ID NO: 86596 - RNA, 19 nt, Homo sapiens
  misc_RNA (1)...(19): siRNA sense strand
guucacuguuggcaaggaa

SEQ ID NO: 86597 - RNA, 19 nt, Homo sapiens
  misc_RNA (1)...(19): siRNA sense strand
ccuaugagcgcgugagcaa

SEQ ID NO: 86598 - RNA, 19 nt, Homo sapiens
  misc_RNA (1)...(19): siRNA sense strand
gagagugagaagaauuaug

SEQ ID NO: 86599 - RNA, 19 nt, Homo sapiens
  misc_RNA (1)...(19): siRNA sense strand
agauggagagugagaagaa

SEQ ID NO: 86600 - RNA, 19 nt, Homo sapiens
  misc_RNA (1)...(19): siRNA sense strand
caccaugaccaacaaguuc

SEQ ID NO: 86601 - RNA, 19 nt, Homo sapiens
  misc_RNA (1)...(19): siRNA sense strand
ggagagugagaagaauuau

SEQ ID NO: 86602 - RNA, 19 nt, Homo sapiens
  misc_RNA (1)...(19): siRNA sense strand
aguucgagauggagaguga

SEQ ID NO: 86603 - RNA, 19 nt, Homo sapiens
  misc_RNA (1)...(19): siRNA sense strand
caaggaaagcaacauacag

SEQ ID NO: 86604 - RNA, 19 nt, Homo sapiens
  misc_RNA (1)...(19): siRNA sense strand
caucggaggcgugaccuau

SEQ ID NO: 86605 - RNA, 19 nt, Homo sapiens
  misc_RNA (1)...(19): siRNA sense strand
gggaagcugguggugaauu

SEQ ID NO: 86606 - RNA, 19 nt, Homo sapiens
  misc_RNA (1)...(19): siRNA sense strand
ugaccaacaaguucacugu

SEQ ID NO: 86607 - RNA, 19 nt, Homo sapiens
  misc_RNA (1)...(19): siRNA sense strand
ucaccagaccucagagauc

SEQ ID NO: 86608 - RNA, 19 nt, Homo sapiens
  misc_RNA (1)...(19): siRNA sense strand
ggccacaccaugaccaaca

SEQ ID NO: 86609 - RNA, 19 nt, Homo sapiens
  misc_RNA (1)...(19): siRNA sense strand
ugggaucuccagcgaugua

SEQ ID NO: 86610 - RNA, 19 nt, Homo sapiens
  misc_RNA (1)...(19): siRNA sense strand
gagauggagagugagaaga

SEQ ID NO: 86611 - RNA, 19 nt, Homo sapiens
  misc_RNA (1)...(19): siRNA sense strand
acaccaugaccaacaaguu

SEQ ID NO: 86612 - RNA, 19 nt, Homo sapiens
  misc_RNA (1)...(19): siRNA sense strand
gcaaugaacuagaguauuu

SEQ ID NO: 86613 - RNA, 19 nt, Homo sapiens
  misc_RNA (1)...(19): siRNA sense strand
gaaccaaggugauugauuu

SEQ ID NO: 86614 - RNA, 19 nt, Homo sapiens
  misc_RNA (1)...(19): siRNA sense strand
gaacaggccucuaguuauu

SEQ ID NO: 86615 - RNA, 19 nt, Homo sapiens
  misc_RNA (1)...(19): siRNA sense strand
caacaacacuuucauguga

SEQ ID NO: 86616 - RNA, 19 nt, Homo sapiens
  misc_RNA (1)...(19): siRNA sense strand
ggaaaucgauaaugacuau

SEQ ID NO: 86617 - RNA, 19 nt, Homo sapiens
  misc_RNA (1)...(19): siRNA sense strand
uaucagagauggauuauga

SEQ ID NO: 86618 - RNA, 19 nt, Homo sapiens
  misc_RNA (1)...(19): siRNA sense strand
gcacaagggucuuagagaa

SEQ ID NO: 86619 - RNA, 19 nt, Homo sapiens
  misc_RNA (1)...(19): siRNA sense strand
gacaggcacuucuucauua

SEQ ID NO: 86620 - RNA, 19 nt, Homo sapiens
  misc_RNA (1)...(19): siRNA sense strand
ucaaagccaucaagucuua

SEQ ID NO: 86621 - RNA, 19 nt, Homo sapiens
  misc_RNA (1)...(19): siRNA sense strand
ccacaaagcucauggacuu

SEQ ID NO: 86622 - RNA, 19 nt, Homo sapiens
  misc_RNA (1)...(19): siRNA sense strand
gcacauaucagauuaauca

SEQ ID NO: 86623 - RNA, 19 nt, Homo sapiens
  misc_RNA (1)...(19): siRNA sense strand
ucacucagcuccauuauga

SEQ ID NO: 86624 - RNA, 19 nt, Homo sapiens
  misc_RNA (1)...(19): siRNA sense strand
uuaagcaucugcccuauua

SEQ ID NO: 86625 - RNA, 19 nt, Homo sapiens
  misc_RNA (1)...(19): siRNA sense strand
ggacauaucacucaagaaa

SEQ ID NO: 86626 - RNA, 19 nt, Homo sapiens
  misc_RNA (1)...(19): siRNA sense strand
gaaguuaccuaugaguuaa

SEQ ID NO: 86627 - RNA, 19 nt, Homo sapiens
  misc_RNA (1)...(19): siRNA sense strand
ggagaugaguggaggauuu

SEQ ID NO: 86628 - RNA, 19 nt, Homo sapiens
  misc_RNA (1)...(19): siRNA sense strand
ggucaaaucugccauaaca

SEQ ID NO: 86629 - RNA, 19 nt, Homo sapiens
  misc_RNA (1)...(19): siRNA sense strand
guagggaaaucgauaauga

SEQ ID NO: 86630 - RNA, 19 nt, Homo sapiens
  misc_RNA (1)...(19): siRNA sense strand
gaaauuggaccaugagaaa

SEQ ID NO: 86631 - RNA, 19 nt, Homo sapiens
  misc_RNA (1)...(19): siRNA sense strand
gauggagucuucucuauga

SEQ ID NO: 86632 - RNA, 19 nt, Homo sapiens
  misc_RNA (1)...(19): siRNA sense strand
caacaaggauggugucuuc

SEQ ID NO: 86633 - RNA, 19 nt, Homo sapiens
  misc_RNA (1)...(19): siRNA sense strand
agagagagcuggacuuuga

SEQ ID NO: 86634 - RNA, 19 nt, Homo sapiens
  misc_RNA (1)...(19): siRNA sense strand
gcucagauguuuccaaguu

SEQ ID NO: 86635 - RNA, 19 nt, Homo sapiens
  misc_RNA (1)...(19): siRNA sense strand
gaggauggcucagauguuu

SEQ ID NO: 86636 - RNA, 19 nt, Homo sapiens
  misc_RNA (1)...(19): siRNA sense strand
ggacauggacuuugacauu

SEQ ID NO: 86637 - RNA, 19 nt, Homo sapiens
  misc_RNA (1)...(19): siRNA sense strand
gaaggacacugccuaguca

SEQ ID NO: 86638 - RNA, 19 nt, Homo sapiens
  misc_RNA (1)...(19): siRNA sense strand
ccaaggaagcccuguauua

SEQ ID NO: 86639 - RNA, 19 nt, Homo sapiens
  misc_RNA (1)...(19): siRNA sense strand
ucaauaaacuagcaaguga

SEQ ID NO: 86640 - RNA, 19 nt, Homo sapiens
  misc_RNA (1)...(19): siRNA sense strand
caagaaacccuuugauuau

SEQ ID NO: 86641 - RNA, 19 nt, Homo sapiens
  misc_RNA (1)...(19): siRNA sense strand
gaaaggcacuggugauucu

SEQ ID NO: 86642 - RNA, 19 nt, Homo sapiens
  misc_RNA (1)...(19): siRNA sense strand
caacaucaaugcccugcua

SEQ ID NO: 86643 - RNA, 19 nt, Homo sapiens
  misc_RNA (1)...(19): siRNA sense strand
caacacagcucuucugaac

SEQ ID NO: 86644 - RNA, 19 nt, Homo sapiens
  misc_RNA (1)...(19): siRNA sense strand
ggagaaggucgaacuauaa

SEQ ID NO: 86645 - RNA, 19 nt, Homo sapiens
  misc_RNA (1)...(19): siRNA sense strand
caacaggucuuccuaugau

SEQ ID NO: 86646 - RNA, 19 nt, Homo sapiens
  misc_RNA (1)...(19): siRNA sense strand
caaacugucuucccucaaa

SEQ ID NO: 86647 - RNA, 19 nt, Homo sapiens
  misc_RNA (1)...(19): siRNA sense strand
gaacucaggugauuguagu

SEQ ID NO: 86648 - RNA, 19 nt, Homo sapiens
  misc_RNA (1)...(19): siRNA sense strand
ugaagcagcuccacuguau

SEQ ID NO: 86649 - RNA, 19 nt, Homo sapiens
  misc_RNA (1)...(19): siRNA sense strand
ccaaggagauggagcauuc

SEQ ID NO: 86650 - RNA, 19 nt, Homo sapiens
  misc_RNA (1)...(19): siRNA sense strand
ccaaguggcugaugucaau

SEQ ID NO: 86651 - RNA, 19 nt, Homo sapiens
  misc_RNA (1)...(19): siRNA sense strand
gggaacaggccucuaguua

SEQ ID NO: 86652 - RNA, 19 nt, Homo sapiens
  misc_RNA (1)...(19): siRNA sense strand
ggacucuucuuacaauuug

SEQ ID NO: 86653 - RNA, 19 nt, Homo sapiens
  misc_RNA (1)...(19): siRNA sense strand
ugacgucucuuaucagauu

SEQ ID NO: 86654 - RNA, 19 nt, Homo sapiens
  misc_RNA (1)...(19): siRNA sense strand
ggaauucacuucuuuaagc

SEQ ID NO: 86655 - RNA, 19 nt, Homo sapiens
  misc_RNA (1)...(19): siRNA sense strand
gggaauaauuucuauguuc

SEQ ID NO: 86656 - RNA, 19 nt, Homo sapiens
  misc_RNA (1)...(19): siRNA sense strand
uaacagggccuuuggacua

SEQ ID NO: 86657 - RNA, 19 nt, Homo sapiens
  misc_RNA (1)...(19): siRNA sense strand
ccacagacuuggacacuga

SEQ ID NO: 86658 - RNA, 19 nt, Homo sapiens
  misc_RNA (1)...(19): siRNA sense strand
gagcaacugugccugugua

SEQ ID NO: 86659 - RNA, 19 nt, Homo sapiens
  misc_RNA (1)...(19): siRNA sense strand
aggaagcccuguauuauuu

SEQ ID NO: 86660 - RNA, 19 nt, Homo sapiens
  misc_RNA (1)...(19): siRNA sense strand
guucacagcuucucuauac

SEQ ID NO: 86661 - RNA, 19 nt, Homo sapiens
  misc_RNA (1)...(19): siRNA sense strand
gaaaauaucacccucuaua

SEQ ID NO: 86662 - RNA, 19 nt, Homo sapiens
  misc_RNA (1)...(19): siRNA sense strand
ccaaacccauggacuauga

SEQ ID NO: 86663 - RNA, 19 nt, Homo sapiens
  misc_RNA (1)...(19): siRNA sense strand
gcacauccauuucuaucug

SEQ ID NO: 86664 - RNA, 19 nt, Homo sapiens
  misc_RNA (1)...(19): siRNA sense strand
caagagguguggcguuuga

SEQ ID NO: 86665 - RNA, 19 nt, Homo sapiens
  misc_RNA (1)...(19): siRNA sense strand
gacaagagguguggcguuu

SEQ ID NO: 86666 - RNA, 19 nt, Homo sapiens
  misc_RNA (1)...(19): siRNA sense strand
ugacaaugcuccuauguuc

SEQ ID NO: 86667 - RNA, 19 nt, Homo sapiens
  misc_RNA (1)...(19): siRNA sense strand
gaaguuggaaccacaauug

SEQ ID NO: 86668 - RNA, 19 nt, Homo sapiens
  misc_RNA (1)...(19): siRNA sense strand
gaggagggcugcuuugaca

SEQ ID NO: 86669 - RNA, 19 nt, Homo sapiens
  misc_RNA (1)...(19): siRNA sense strand
ccgaggagcuggugaguga

SEQ ID NO: 86670 - RNA, 19 nt, Homo sapiens
  misc_RNA (1)...(19): siRNA sense strand
cagaggaccuaguuaaaga

SEQ ID NO: 86671 - RNA, 19 nt, Homo sapiens
  misc_RNA (1)...(19): siRNA sense strand
cuacaaaugccaacaagua

SEQ ID NO: 86672 - RNA, 19 nt, Homo sapiens
  misc_RNA (1)...(19): siRNA sense strand
gaagugcgauauguucuga

SEQ ID NO: 86673 - RNA, 19 nt, Homo sapiens
  misc_RNA (1)...(19): siRNA sense strand
ggauguggccaauguauuu

SEQ ID NO: 86674 - RNA, 19 nt, Homo sapiens
  misc_RNA (1)...(19): siRNA sense strand
ggaacuggcacauccauuu

SEQ ID NO: 86675 - RNA, 19 nt, Homo sapiens
  misc_RNA (1)...(19): siRNA sense strand
gccauaagcuggacaucaa

SEQ ID NO: 86676 - RNA, 19 nt, Homo sapiens
  misc_RNA (1)...(19): siRNA sense strand
ggacagaccauccagcuau

SEQ ID NO: 86677 - RNA, 19 nt, Homo sapiens
  misc_RNA (1)...(19): siRNA sense strand
gagagagucauugcuauua

SEQ ID NO: 86678 - RNA, 19 nt, Homo sapiens
  misc_RNA (1)...(19): siRNA sense strand
ggacaggcacuucuucauu

SEQ ID NO: 86679 - RNA, 19 nt, Homo sapiens
  misc_RNA (1)...(19): siRNA sense strand
gcagaagauuacacauauu

SEQ ID NO: 86680 - RNA, 19 nt, Homo sapiens
  misc_RNA (1)...(19): siRNA sense strand
caaccaagauacaggaaug

SEQ ID NO: 86681 - RNA, 19 nt, Homo sapiens
  misc_RNA (1)...(19): siRNA sense strand
ccucugaaguuaccuauga

SEQ ID NO: 86682 - RNA, 19 nt, Homo sapiens
  misc_RNA (1)...(19): siRNA sense strand
gaagauggaccccuaaaua

SEQ ID NO: 86683 - RNA, 19 nt, Homo sapiens
  misc_RNA (1)...(19): siRNA sense strand
aguaaagacucuccgguua

SEQ ID NO: 86684 - RNA, 19 nt, Homo sapiens
  misc_RNA (1)...(19): siRNA sense strand
gcagugagguaccggauca

SEQ ID NO: 86685 - RNA, 19 nt, Homo sapiens
  misc_RNA (1)...(19): siRNA sense strand
ucagaguccuuauuacaaa

SEQ ID NO: 86686 - RNA, 19 nt, Homo sapiens
  misc_RNA (1)...(19): siRNA sense strand
gugaggaggucauguucua

SEQ ID NO: 86687 - RNA, 19 nt, Homo sapiens
  misc_RNA (1)...(19): siRNA sense strand
gaagggagaacuguacuuu

SEQ ID NO: 86688 - RNA, 19 nt, Homo sapiens
  misc_RNA (1)...(19): siRNA sense strand
ucaaagacaucaacuggau

SEQ ID NO: 86689 - RNA, 19 nt, Homo sapiens
  misc_RNA (1)...(19): siRNA sense strand
gaacugguggcgacucuaa

SEQ ID NO: 86690 - RNA, 19 nt, Homo sapiens
  misc_RNA (1)...(19): siRNA sense strand
cagacaaccucaauaugaa

SEQ ID NO: 86691 - RNA, 19 nt, Homo sapiens
  misc_RNA (1)...(19): siRNA sense strand
gaauggcacagauauguuu

SEQ ID NO: 86692 - RNA, 19 nt, Homo sapiens
  misc_RNA (1)...(19): siRNA sense strand
gcaggugcauuuacugaug

SEQ ID NO: 86693 - RNA, 19 nt, Homo sapiens
  misc_RNA (1)...(19): siRNA sense strand
ugacaacgcacccagauuu

SEQ ID NO: 86694 - RNA, 19 nt, Homo sapiens
  misc_RNA (1)...(19): siRNA sense strand
gaagcacugugaacaagga

SEQ ID NO: 86695 - RNA, 19 nt, Homo sapiens
  misc_RNA (1)...(19): siRNA sense strand
gaggaucugugguugagaa

SEQ ID NO: 86696 - RNA, 19 nt, Homo sapiens
  misc_RNA (1)...(19): siRNA sense strand
caaugugucugauaucaau

SEQ ID NO: 86697 - RNA, 19 nt, Homo sapiens
  misc_RNA (1)...(19): siRNA sense strand
uucaagaacuggauuauga

SEQ ID NO: 86698 - RNA, 19 nt, Homo sapiens
  misc_RNA (1)...(19): siRNA sense strand
caauauggcaggugcauuu

SEQ ID NO: 86699 - RNA, 19 nt, Homo sapiens
  misc_RNA (1)...(19): siRNA sense strand
ugaaguuaccuaugaguua

SEQ ID NO: 86700 - RNA, 19 nt, Homo sapiens
  misc_RNA (1)...(19): siRNA sense strand
ccacacagguccacaucuu

SEQ ID NO: 86701 - RNA, 19 nt, Homo sapiens
  misc_RNA (1)...(19): siRNA sense strand
caaugacaauccaccuaua

SEQ ID NO: 86702 - RNA, 19 nt, Homo sapiens
  misc_RNA (1)...(19): siRNA sense strand
gaacuacaugggauucuuu

SEQ ID NO: 86703 - RNA, 19 nt, Homo sapiens
  misc_RNA (1)...(19): siRNA sense strand
gaugguaccuuggaugaga

SEQ ID NO: 86704 - RNA, 19 nt, Homo sapiens
  misc_RNA (1)...(19): siRNA sense strand
uggcugaugucaaugauaa

SEQ ID NO: 86705 - RNA, 19 nt, Homo sapiens
  misc_RNA (1)...(19): siRNA sense strand
agacaucgcuauccaagug

SEQ ID NO: 86706 - RNA, 19 nt, Homo sapiens
  misc_RNA (1)...(19): siRNA sense strand
ccacgaauccaccaaauug

SEQ ID NO: 86707 - RNA, 19 nt, Homo sapiens
  misc_RNA (1)...(19): siRNA sense strand
ucagacaaccucaauauga

SEQ ID NO: 86708 - RNA, 19 nt, Homo sapiens
  misc_RNA (1)...(19): siRNA sense strand
uggaggaugucaaugauaa

SEQ ID NO: 86709 - RNA, 19 nt, Homo sapiens
  misc_RNA (1)...(19): siRNA sense strand
guccacaucuucaugauug

SEQ ID NO: 86710 - RNA, 19 nt, Homo sapiens
  misc_RNA (1)...(19): siRNA sense strand
uacaugggauucuuuauga

SEQ ID NO: 86711 - RNA, 19 nt, Homo sapiens
  misc_RNA (1)...(19): siRNA sense strand
ggagacaggugugaaaugg

SEQ ID NO: 86712 - RNA, 19 nt, Homo sapiens
  misc_RNA (1)...(19): siRNA sense strand
gaagacauauggccauuua

SEQ ID NO: 86713 - RNA, 19 nt, Homo sapiens
  misc_RNA (1)...(19): siRNA sense strand
gaagauuucugaugcuauu

SEQ ID NO: 86714 - RNA, 19 nt, Homo sapiens
  misc_RNA (1)...(19): siRNA sense strand
gcagugcccuucagaguuu

SEQ ID NO: 86715 - RNA, 19 nt, Homo sapiens
  misc_RNA (1)...(19): siRNA sense strand
gcagagaaaucccugaaug

SEQ ID NO: 86716 - RNA, 19 nt, Homo sapiens
  misc_RNA (1)...(19): siRNA sense strand
agaaaucccugaaugauau

SEQ ID NO: 86717 - RNA, 19 nt, Homo sapiens
  misc_RNA (1)...(19): siRNA sense strand
gacguggacuucuuugaua

SEQ ID NO: 86718 - RNA, 19 nt, Homo sapiens
  misc_RNA (1)...(19): siRNA sense strand
gagaaaucccugaaugaua

SEQ ID NO: 86719 - RNA, 19 nt, Homo sapiens
  misc_RNA (1)...(19): siRNA sense strand
gaggaugacuguuggaaug

SEQ ID NO: 86720 - RNA, 19 nt, Homo sapiens
  misc_RNA (1)...(19): siRNA sense strand
uggaagaaaugcuaaauga

SEQ ID NO: 86721 - RNA, 19 nt, Homo sapiens
  misc_RNA (1)...(19): siRNA sense strand
caagaaguuugaugaauuc

SEQ ID NO: 86722 - RNA, 19 nt, Homo sapiens
  misc_RNA (1)...(19): siRNA sense strand
gcaaugaggaugacuguug

SEQ ID NO: 86723 - RNA, 19 nt, Homo sapiens
  misc_RNA (1)...(19): siRNA sense strand
gaagagugccaaugagaaa

SEQ ID NO: 86724 - RNA, 19 nt, Homo sapiens
  misc_RNA (1)...(19): siRNA sense strand
gaugaagaaugcauacaau

SEQ ID NO: 86725 - RNA, 19 nt, Homo sapiens
  misc_RNA (1)...(19): siRNA sense strand
ccaaaggcuucaacaagaa

SEQ ID NO: 86726 - RNA, 19 nt, Homo sapiens
  misc_RNA (1)...(19): siRNA sense strand
gaacgacguggacuucuuu

SEQ ID NO: 86727 - RNA, 19 nt, Homo sapiens
  misc_RNA (1)...(19): siRNA sense strand
ugaaacaggccaagaaauu

SEQ ID NO: 86728 - RNA, 19 nt, Homo sapiens
  misc_RNA (1)...(19): siRNA sense strand
gcagagagaguggagauaa

SEQ ID NO: 86729 - RNA, 19 nt, Homo sapiens
  misc_RNA (1)...(19): siRNA sense strand
gaagaaaugcuaaaugacu

SEQ ID NO: 86730 - RNA, 19 nt, Homo sapiens
  misc_RNA (1)...(19): siRNA sense strand
ggaaguggcugugaguauc

SEQ ID NO: 86731 - RNA, 19 nt, Homo sapiens
  misc_RNA (1)...(19): siRNA sense strand
ggaacgacguggacuucuu

SEQ ID NO: 86732 - RNA, 19 nt, Homo sapiens
  misc_RNA (1)...(19): siRNA sense strand
agacauauggccauuuaua

SEQ ID NO: 86733 - RNA, 19 nt, Homo sapiens
  misc_RNA (1)...(19): siRNA sense strand
gauaauaguguucaagugu

SEQ ID NO: 86734 - RNA, 19 nt, Homo sapiens
  misc_RNA (1)...(19): siRNA sense strand
ggacuucuuugauaucagu

SEQ ID NO: 86735 - RNA, 19 nt, Homo sapiens
  misc_RNA (1)...(19): siRNA sense strand
gaggauggcugcaggaaac

SEQ ID NO: 86736 - RNA, 19 nt, Homo sapiens
  misc_RNA (1)...(19): siRNA sense strand
gaaccuggaagaaaugcua

SEQ ID NO: 86737 - RNA, 19 nt, Homo sapiens
  misc_RNA (1)...(19): siRNA sense strand
gcaagaugaagaaugcaua

SEQ ID NO: 86738 - RNA, 19 nt, Homo sapiens
  misc_RNA (1)...(19): siRNA sense strand
ggagaugucccucgcaaau

SEQ ID NO: 86739 - RNA, 19 nt, Homo sapiens
  misc_RNA (1)...(19): siRNA sense strand
ucguagaguugaaacguua

SEQ ID NO: 86740 - RNA, 19 nt, Homo sapiens
  misc_RNA (1)...(19): siRNA sense strand
gaaacaggccaagaaauuc

SEQ ID NO: 86741 - RNA, 19 nt, Homo sapiens
  misc_RNA (1)...(19): siRNA sense strand
uuacugaugucaaggagaa

SEQ ID NO: 86742 - RNA, 19 nt, Homo sapiens
  misc_RNA (1)...(19): siRNA sense strand
ggauaauaguguucaagug

SEQ ID NO: 86743 - RNA, 19 nt, Homo sapiens
  misc_RNA (1)...(19): siRNA sense strand
gaacaugcaggauaauagu

SEQ ID NO: 86744 - RNA, 19 nt, Homo sapiens
  misc_RNA (1)...(19): siRNA sense strand
gagcaaggucuccguggua

SEQ ID NO: 86745 - RNA, 19 nt, Homo sapiens
  misc_RNA (1)...(19): siRNA sense strand
gaacucccaguaccacuuu

SEQ ID NO: 86746 - RNA, 19 nt, Homo sapiens
  misc_RNA (1)...(19): siRNA sense strand
gaagccauguuacaacuac

SEQ ID NO: 86747 - RNA, 19 nt, Homo sapiens
  misc_RNA (1)...(19): siRNA sense strand
caacggugaucauuugaag

SEQ ID NO: 86748 - RNA, 19 nt, Homo sapiens
  misc_RNA (1)...(19): siRNA sense strand
uccaaaggcuucaacaaga

SEQ ID NO: 86749 - RNA, 19 nt, Homo sapiens
  misc_RNA (1)...(19): siRNA sense strand
ggaagagugccaaugagaa

SEQ ID NO: 86750 - RNA, 19 nt, Homo sapiens
  misc_RNA (1)...(19): siRNA sense strand
gaaaugugaaccuggaaga

SEQ ID NO: 86751 - RNA, 19 nt, Homo sapiens
  misc_RNA (1)...(19): siRNA sense strand
gaaaguaguggagaaggaa

SEQ ID NO: 86752 - RNA, 19 nt, Homo sapiens
  misc_RNA (1)...(19): siRNA sense strand
uacuuucgcucaaggcuua

SEQ ID NO: 86753 - RNA, 19 nt, Homo sapiens
  misc_RNA (1)...(19): siRNA sense strand
gaggguccuuucaacauug

SEQ ID NO: 86754 - RNA, 19 nt, Homo sapiens
  misc_RNA (1)...(19): siRNA sense strand
cuucagaguuugacuacaa

SEQ ID NO: 86755 - RNA, 19 nt, Homo sapiens
  misc_RNA (1)...(19): siRNA sense strand
gcgaacagugcaaucauuu

SEQ ID NO: 86756 - RNA, 19 nt, Homo sapiens
  misc_RNA (1)...(19): siRNA sense strand
gaauggaacaauuucauag

SEQ ID NO: 86757 - RNA, 19 nt, Homo sapiens
  misc_RNA (1)...(19): siRNA sense strand
gaaugugugagcaaguaua

SEQ ID NO: 86758 - RNA, 19 nt, Homo sapiens
  misc_RNA (1)...(19): siRNA sense strand
ugaaaguaguggagaagga

SEQ ID NO: 86759 - RNA, 19 nt, Homo sapiens
  misc_RNA (1)...(19): siRNA sense strand
gaaacggcaaugaggauga

SEQ ID NO: 86760 - RNA, 19 nt, Homo sapiens
  misc_RNA (1)...(19): siRNA sense strand
ucaagugucucagaagguu

SEQ ID NO: 86761 - RNA, 19 nt, Homo sapiens
  misc_RNA (1)...(19): siRNA sense strand
agaugucccucgcaaauug

SEQ ID NO: 86762 - RNA, 19 nt, Homo sapiens
  misc_RNA (1)...(19): siRNA sense strand
aaauugaagcuccagguua

SEQ ID NO: 86763 - RNA, 19 nt, Homo sapiens
  misc_RNA (1)...(19): siRNA sense strand
ccucccagcuggacgaauu

SEQ ID NO: 86764 - RNA, 19 nt, Homo sapiens
  misc_RNA (1)...(19): siRNA sense strand
gcaaaguaaagaugauuuc

SEQ ID NO: 86765 - RNA, 19 nt, Homo sapiens
  misc_RNA (1)...(19): siRNA sense strand
ccagcaagaugaagaaugc

SEQ ID NO: 86766 - RNA, 19 nt, Homo sapiens
  misc_RNA (1)...(19): siRNA sense strand
auacugauccuucgucaaa

SEQ ID NO: 86767 - RNA, 19 nt, Homo sapiens
  misc_RNA (1)...(19): siRNA sense strand
gugaagauuucugaugcua

SEQ ID NO: 86768 - RNA, 19 nt, Homo sapiens
  misc_RNA (1)...(19): siRNA sense strand
ccaaggggaucucgauuuu

SEQ ID NO: 86769 - RNA, 19 nt, Homo sapiens
  misc_RNA (1)...(19): siRNA sense strand
cagagaaaucccugaauga

SEQ ID NO: 86770 - RNA, 19 nt, Homo sapiens
  misc_RNA (1)...(19): siRNA sense strand
ugacugugaagccauguua

SEQ ID NO: 86771 - RNA, 19 nt, Homo sapiens
  misc_RNA (1)...(19): siRNA sense strand
uggaaugugugagcaagua

SEQ ID NO: 86772 - RNA, 19 nt, Homo sapiens
  misc_RNA (1)...(19): siRNA sense strand
cucaagagauggaggagaa

SEQ ID NO: 86773 - RNA, 19 nt, Homo sapiens
  misc_RNA (1)...(19): siRNA sense strand
aaguacagccugcaaagua

SEQ ID NO: 86774 - RNA, 19 nt, Homo sapiens
  misc_RNA (1)...(19): siRNA sense strand
guuacuacguggugggaaa

SEQ ID NO: 86775 - RNA, 19 nt, Homo sapiens
  misc_RNA (1)...(19): siRNA sense strand
aguacagccugcaaaguaa

SEQ ID NO: 86776 - RNA, 19 nt, Homo sapiens
  misc_RNA (1)...(19): siRNA sense strand
gugaugaccagcaagauga

SEQ ID NO: 86777 - RNA, 19 nt, Homo sapiens
  misc_RNA (1)...(19): siRNA sense strand
agaggguccuuucaacauu

SEQ ID NO: 86778 - RNA, 19 nt, Homo sapiens
  misc_RNA (1)...(19): siRNA sense strand
cugccgagcucaagucgaa

SEQ ID NO: 86779 - RNA, 19 nt, Homo sapiens
  misc_RNA (1)...(19): siRNA sense strand
gggaagagugccaaugaga

SEQ ID NO: 86780 - RNA, 19 nt, Homo sapiens
  misc_RNA (1)...(19): siRNA sense strand
gauccuucgucaaaucaug

SEQ ID NO: 86781 - RNA, 19 nt, Homo sapiens
  misc_RNA (1)...(19): siRNA sense strand
gcuagaggguccuuucaac

SEQ ID NO: 86782 - RNA, 19 nt, Homo sapiens
  misc_RNA (1)...(19): siRNA sense strand
gagaaguacagccugcaaa

SEQ ID NO: 86783 - RNA, 19 nt, Homo sapiens
  misc_RNA (1)...(19): siRNA sense strand
cuucagugcucgcuucaga

SEQ ID NO: 86784 - RNA, 19 nt, Homo sapiens
  misc_RNA (1)...(19): siRNA sense strand
gaugugaagauuucugaug

SEQ ID NO: 86785 - RNA, 19 nt, Homo sapiens
  misc_RNA (1)...(19): siRNA sense strand
caacuacugcucaaacauc

SEQ ID NO: 86786 - RNA, 19 nt, Homo sapiens
  misc_RNA (1)...(19): siRNA sense strand
guuacaagaaguuugauga

SEQ ID NO: 86787 - RNA, 19 nt, Homo sapiens
  misc_RNA (1)...(19): siRNA sense strand
gaaguggcugugaguauca

SEQ ID NO: 86788 - RNA, 19 nt, Homo sapiens
  misc_RNA (1)...(19): siRNA sense strand
cagcaaaccagacauacug

SEQ ID NO: 86789 - RNA, 19 nt, Homo sapiens
  misc_RNA (1)...(19): siRNA sense strand
gcaggauaauaguguucaa

SEQ ID NO: 86790 - RNA, 19 nt, Homo sapiens
  misc_RNA (1)...(19): siRNA sense strand
ccaucgaugugaagauuuc

SEQ ID NO: 86791 - RNA, 19 nt, Homo sapiens
  misc_RNA (1)...(19): siRNA sense strand
caaauugaagcuccagguu

SEQ ID NO: 86792 - RNA, 19 nt, Homo sapiens
  misc_RNA (1)...(19): siRNA sense strand
caguaccacuuuacagaug

SEQ ID NO: 86793 - RNA, 19 nt, Homo sapiens
  misc_RNA (1)...(19): siRNA sense strand
gagcucaagucgaaaaguu

SEQ ID NO: 86794 - RNA, 19 nt, Homo sapiens
  misc_RNA (1)...(19): siRNA sense strand
gugaagacauauggccauu

SEQ ID NO: 86795 - RNA, 19 nt, Homo sapiens
  misc_RNA (1)...(19): siRNA sense strand
gguccucccuuccgagcaa

SEQ ID NO: 86796 - RNA, 19 nt, Homo sapiens
  misc_RNA (1)...(19): siRNA sense strand
uggaacaauuucauagaug

SEQ ID NO: 86797 - RNA, 19 nt, Homo sapiens
  misc_RNA (1)...(19): siRNA sense strand
gagaugucccucgcaaauu

SEQ ID NO: 86798 - RNA, 19 nt, Homo sapiens
  misc_RNA (1)...(19): siRNA sense strand
augaguaucuggaaugugu

SEQ ID NO: 86799 - RNA, 19 nt, Homo sapiens
  misc_RNA (1)...(19): siRNA sense strand
ugaugaaaguaguggagaa

SEQ ID NO: 86800 - RNA, 19 nt, Homo sapiens
  misc_RNA (1)...(19): siRNA sense strand
gauuucugaugcuauuaug

SEQ ID NO: 86801 - RNA, 19 nt, Homo sapiens
  misc_RNA (1)...(19): siRNA sense strand
acccagagguccagguuga

SEQ ID NO: 86802 - RNA, 19 nt, Homo sapiens
  misc_RNA (1)...(19): siRNA sense strand
ggccauuuauacaugcaaa

SEQ ID NO: 86803 - RNA, 19 nt, Homo sapiens
  misc_RNA (1)...(19): siRNA sense strand
gcagugacaggaaauggau

SEQ ID NO: 86804 - RNA, 19 nt, Homo sapiens
  misc_RNA (1)...(19): siRNA sense strand
cgggagaugucgugagcaa

SEQ ID NO: 86805 - RNA, 19 nt, Homo sapiens
  misc_RNA (1)...(19): siRNA sense strand
ccacuuuacagaugaguau

SEQ ID NO: 86806 - RNA, 19 nt, Homo sapiens
  misc_RNA (1)...(19): siRNA sense strand
guacagccugcaaaguaaa

SEQ ID NO: 86807 - RNA, 19 nt, Homo sapiens
  misc_RNA (1)...(19): siRNA sense strand
gaaguggaaguggcuguga

SEQ ID NO: 86808 - RNA, 19 nt, Homo sapiens
  misc_RNA (1)...(19): siRNA sense strand
ggagaaggaaguggaagug

SEQ ID NO: 86809 - RNA, 19 nt, Homo sapiens
  misc_RNA (1)...(19): siRNA sense strand
cgacguggacuucuuugau

SEQ ID NO: 86810 - RNA, 19 nt, Homo sapiens
  misc_RNA (1)...(19): siRNA sense strand
gaaguacagccugcaaagu

SEQ ID NO: 86811 - RNA, 19 nt, Homo sapiens
  misc_RNA (1)...(19): siRNA sense strand
ucaaggagaaacugaaaca

SEQ ID NO: 86812 - RNA, 19 nt, Homo sapiens
  misc_RNA (1)...(19): siRNA sense strand
gaaaggaguuugucuucuc

SEQ ID NO: 86813 - RNA, 19 nt, Homo sapiens
  misc_RNA (1)...(19): siRNA sense strand
gaguuugucuucucuuuca

SEQ ID NO: 86814 - RNA, 19 nt, Homo sapiens
  misc_RNA (1)...(19): siRNA sense strand
ugagcgagaucuaccaguu

SEQ ID NO: 86815 - RNA, 19 nt, Homo sapiens
  misc_RNA (1)...(19): siRNA sense strand
ggaaaugccaggcgcucaa

SEQ ID NO: 86816 - RNA, 19 nt, Homo sapiens
  misc_RNA (1)...(19): siRNA sense strand
cagcaugugugaccgaaag

SEQ ID NO: 86817 - RNA, 19 nt, Homo sapiens
  misc_RNA (1)...(19): siRNA sense strand
gccacaaccucucgcucaa

SEQ ID NO: 86818 - RNA, 19 nt, Homo sapiens
  misc_RNA (1)...(19): siRNA sense strand
caacgagugcuucaucaag

SEQ ID NO: 86819 - RNA, 19 nt, Homo sapiens
  misc_RNA (1)...(19): siRNA sense strand
cgaaaggaguuugucuucu

SEQ ID NO: 86820 - RNA, 19 nt, Homo sapiens
  misc_RNA (1)...(19): siRNA sense strand
gcucaacgagugcuucauc

SEQ ID NO: 86821 - RNA, 19 nt, Homo sapiens
  misc_RNA (1)...(19): siRNA sense strand
ccagcgaguucauguucga

SEQ ID NO: 86822 - RNA, 19 nt, Homo sapiens
  misc_RNA (1)...(19): siRNA sense strand
aggaguuugucuucucuuu

SEQ ID NO: 86823 - RNA, 19 nt, Homo sapiens
  misc_RNA (1)...(19): siRNA sense strand
caugaugaacggccacuug

SEQ ID NO: 86824 - RNA, 19 nt, Homo sapiens
  misc_RNA (1)...(19): siRNA sense strand
gagcgagaucuaccaguuc

SEQ ID NO: 86825 - RNA, 19 nt, Homo sapiens
  misc_RNA (1)...(19): siRNA sense strand
ccgaaaggaguuugucuuc

SEQ ID NO: 86826 - RNA, 19 nt, Homo sapiens
  misc_RNA (1)...(19): siRNA sense strand
ggaguuugucuucucuuuc

SEQ ID NO: 86827 - RNA, 19 nt, Homo sapiens
  misc_RNA (1)...(19): siRNA sense strand
ucauggccauccagaguuc

SEQ ID NO: 86828 - RNA, 19 nt, Homo sapiens
  misc_RNA (1)...(19): siRNA sense strand
aaaggaguuugucuucucu

SEQ ID NO: 86829 - RNA, 19 nt, Homo sapiens
  misc_RNA (1)...(19): siRNA sense strand
ggccagcgaguucauguuc

SEQ ID NO: 86830 - RNA, 19 nt, Homo sapiens
  misc_RNA (1)...(19): siRNA sense strand
gaacgggcucggcuucaac

SEQ ID NO: 86831 - RNA, 19 nt, Homo sapiens
  misc_RNA (1)...(19): siRNA sense strand
gcagucgcccagcaugugu

SEQ ID NO: 86832 - RNA, 19 nt, Homo sapiens
  misc_RNA (1)...(19): siRNA sense strand
gaaaugccaggcgcucaag

SEQ ID NO: 86833 - RNA, 19 nt, Homo sapiens
  misc_RNA (1)...(19): siRNA sense strand
ggucaccuaccaagacauc

SEQ ID NO: 86834 - RNA, 19 nt, Homo sapiens
  misc_RNA (1)...(19): siRNA sense strand
ucaagcccauguacagcau

SEQ ID NO: 86835 - RNA, 19 nt, Homo sapiens
  misc_RNA (1)...(19): siRNA sense strand
cgucauggccauccagagu

SEQ ID NO: 86836 - RNA, 19 nt, Homo sapiens
  misc_RNA (1)...(19): siRNA sense strand
ucaaugggauuucuucuuu

SEQ ID NO: 86837 - RNA, 19 nt, Homo sapiens
  misc_RNA (1)...(19): siRNA sense strand
gagcgucugucaggauauu

SEQ ID NO: 86838 - RNA, 19 nt, Homo sapiens
  misc_RNA (1)...(19): siRNA sense strand
ucagcgagaucuaccaguu

SEQ ID NO: 86839 - RNA, 19 nt, Homo sapiens
  misc_RNA (1)...(19): siRNA sense strand
cagcuagcgggucguauua

SEQ ID NO: 86840 - RNA, 19 nt, Homo sapiens
  misc_RNA (1)...(19): siRNA sense strand
caacuucaaugggauuucu

SEQ ID NO: 86841 - RNA, 19 nt, Homo sapiens
  misc_RNA (1)...(19): siRNA sense strand
ggccugcacuccagcaugu

SEQ ID NO: 86842 - RNA, 19 nt, Homo sapiens
  misc_RNA (1)...(19): siRNA sense strand
gaaugccacucgcccuaca

SEQ ID NO: 86843 - RNA, 19 nt, Homo sapiens
  misc_RNA (1)...(19): siRNA sense strand
gccacaaucucucgcucaa

SEQ ID NO: 86844 - RNA, 19 nt, Homo sapiens
  misc_RNA (1)...(19): siRNA sense strand
caaugggauuucuucuuuc

SEQ ID NO: 86845 - RNA, 19 nt, Homo sapiens
  misc_RNA (1)...(19): siRNA sense strand
caacgagugcuucaucaag

SEQ ID NO: 86846 - RNA, 19 nt, Homo sapiens
  misc_RNA (1)...(19): siRNA sense strand
gcucaacgagugcuucauc

SEQ ID NO: 86847 - RNA, 19 nt, Homo sapiens
  misc_RNA (1)...(19): siRNA sense strand
gaacucggugcgccacaau

SEQ ID NO: 86848 - RNA, 19 nt, Homo sapiens
  misc_RNA (1)...(19): siRNA sense strand
ggaagugccaggcgcucaa

SEQ ID NO: 86849 - RNA, 19 nt, Homo sapiens
  misc_RNA (1)...(19): siRNA sense strand
ccagcgaguucauguucga

SEQ ID NO: 86850 - RNA, 19 nt, Homo sapiens
  misc_RNA (1)...(19): siRNA sense strand
ucagcuagcgggucguauu

SEQ ID NO: 86851 - RNA, 19 nt, Homo sapiens
  misc_RNA (1)...(19): siRNA sense strand
ggccagcgaguucauguuc

SEQ ID NO: 86852 - RNA, 19 nt, Homo sapiens
  misc_RNA (1)...(19): siRNA sense strand
agagcuacuugcaccagaa

SEQ ID NO: 86853 - RNA, 19 nt, Homo sapiens
  misc_RNA (1)...(19): siRNA sense strand
aagauuucguccucaacuu

SEQ ID NO: 86854 - RNA, 19 nt, Homo sapiens
  misc_RNA (1)...(19): siRNA sense strand
gcgucugucaggauauuaa

SEQ ID NO: 86855 - RNA, 19 nt, Homo sapiens
  misc_RNA (1)...(19): siRNA sense strand
gcgccucgccuuaccucaa

SEQ ID NO: 86856 - RNA, 19 nt, Homo sapiens
  misc_RNA (1)...(19): siRNA sense strand
uauuaagcccugcgucaug

SEQ ID NO: 86857 - RNA, 19 nt, Homo sapiens
  misc_RNA (1)...(19): siRNA sense strand
gauuucguccucaacuuca

SEQ ID NO: 86858 - RNA, 19 nt, Homo sapiens
  misc_RNA (1)...(19): siRNA sense strand
gaacaacucuccagugaac

SEQ ID NO: 86859 - RNA, 19 nt, Homo sapiens
  misc_RNA (1)...(19): siRNA sense strand
aauaguagcugucaaaugg

SEQ ID NO: 86860 - RNA, 19 nt, Homo sapiens
  misc_RNA (1)...(19): siRNA sense strand
acaagaagaucacccugaa

SEQ ID NO: 86861 - RNA, 19 nt, Homo sapiens
  misc_RNA (1)...(19): siRNA sense strand
ccagugaacgggaauagua

SEQ ID NO: 86862 - RNA, 19 nt, Homo sapiens
  misc_RNA (1)...(19): siRNA sense strand
gggaauaguagcugucaaa

SEQ ID NO: 86863 - RNA, 19 nt, Homo sapiens
  misc_RNA (1)...(19): siRNA sense strand
uugaacaacucuccaguga

SEQ ID NO: 86864 - RNA, 19 nt, Homo sapiens
  misc_RNA (1)...(19): siRNA sense strand
caaauggccuucccuucca

SEQ ID NO: 86865 - RNA, 19 nt, Homo sapiens
  misc_RNA (1)...(19): siRNA sense strand
gaauaguagcugucaaaug

SEQ ID NO: 86866 - RNA, 19 nt, Homo sapiens
  misc_RNA (1)...(19): siRNA sense strand
aagcagggcuggcagaaca

SEQ ID NO: 86867 - RNA, 19 nt, Homo sapiens
  misc_RNA (1)...(19): siRNA sense strand
guccggagcuuucgucuac

SEQ ID NO: 86868 - RNA, 19 nt, Homo sapiens
  misc_RNA (1)...(19): siRNA sense strand
ccuacaacauguucgagaa

SEQ ID NO: 86869 - RNA, 19 nt, Homo sapiens
  misc_RNA (1)...(19): siRNA sense strand
ugaacggcaucuaccaguu

SEQ ID NO: 86870 - RNA, 19 nt, Homo sapiens
  misc_RNA (1)...(19): siRNA sense strand
gaagaaggacgcggugaag

SEQ ID NO: 86871 - RNA, 19 nt, Homo sapiens
  misc_RNA (1)...(19): siRNA sense strand
gacccggacuccuacaaca

SEQ ID NO: 86872 - RNA, 19 nt, Homo sapiens
  misc_RNA (1)...(19): siRNA sense strand
gaacagcauccgccacaac

SEQ ID NO: 86873 - RNA, 19 nt, Homo sapiens
  misc_RNA (1)...(19): siRNA sense strand
gccacaaccucucgcucaa

SEQ ID NO: 86874 - RNA, 19 nt, Homo sapiens
  misc_RNA (1)...(19): siRNA sense strand
ggacuccuacaacauguuc

SEQ ID NO: 86875 - RNA, 19 nt, Homo sapiens
  misc_RNA (1)...(19): siRNA sense strand
ggaauaguagcugucaaau

SEQ ID NO: 86876 - RNA, 19 nt, Homo sapiens
  misc_RNA (1)...(19): siRNA sense strand
ucacagaggaucggcuuga

SEQ ID NO: 86877 - RNA, 19 nt, Homo sapiens
  misc_RNA (1)...(19): siRNA sense strand
ugaaggacaaggaggagaa

SEQ ID NO: 86878 - RNA, 19 nt, Homo sapiens
  misc_RNA (1)...(19): siRNA sense strand
gggagauguucgagucaca

SEQ ID NO: 86879 - RNA, 19 nt, Homo sapiens
  misc_RNA (1)...(19): siRNA sense strand
agaaggacgcggugaagga

SEQ ID NO: 86880 - RNA, 19 nt, Homo sapiens
  misc_RNA (1)...(19): siRNA sense strand
cagaggaucggcuugaaca

SEQ ID NO: 86881 - RNA, 19 nt, Homo sapiens
  misc_RNA (1)...(19): siRNA sense strand
cacagaggaucggcuugaa

SEQ ID NO: 86882 - RNA, 19 nt, Homo sapiens
  misc_RNA (1)...(19): siRNA sense strand
agaagaaggacgcggugaa

SEQ ID NO: 86883 - RNA, 19 nt, Homo sapiens
  misc_RNA (1)...(19): siRNA sense strand
ggacaggcugcaccucaag

SEQ ID NO: 86884 - RNA, 19 nt, Homo sapiens
  misc_RNA (1)...(19): siRNA sense strand
gcggcgagcagagcuacua

SEQ ID NO: 86885 - RNA, 19 nt, Homo sapiens
  misc_RNA (1)...(19): siRNA sense strand
gagauguucgagucacaga

SEQ ID NO: 86886 - RNA, 19 nt, Homo sapiens
  misc_RNA (1)...(19): siRNA sense strand
gcucgucgucccugaguca

SEQ ID NO: 86887 - RNA, 19 nt, Homo sapiens
  misc_RNA (1)...(19): siRNA sense strand
cagcguggacaacaucaug

SEQ ID NO: 86888 - RNA, 19 nt, Homo sapiens
  misc_RNA (1)...(19): siRNA sense strand
ggacaucaagaccgagaac

SEQ ID NO: 86889 - RNA, 19 nt, Homo sapiens
  misc_RNA (1)...(19): siRNA sense strand
caucuaccaguucaucaug

SEQ ID NO: 86890 - RNA, 19 nt, Homo sapiens
  misc_RNA (1)...(19): siRNA sense strand
gcaucuaccaguucaucau

SEQ ID NO: 86891 - RNA, 19 nt, Homo sapiens
  misc_RNA (1)...(19): siRNA sense strand
gcacagaguuggaugaagu

SEQ ID NO: 86892 - RNA, 19 nt, Homo sapiens
  misc_RNA (1)...(19): siRNA sense strand
gaacuucacuggugcuaag

SEQ ID NO: 86893 - RNA, 19 nt, Homo sapiens
  misc_RNA (1)...(19): siRNA sense strand
gacaauagcaacaaguaua

SEQ ID NO: 86894 - RNA, 19 nt, Homo sapiens
  misc_RNA (1)...(19): siRNA sense strand
ccacagcgaugucaugaug

SEQ ID NO: 86895 - RNA, 19 nt, Homo sapiens
  misc_RNA (1)...(19): siRNA sense strand
ccaaccagcuccuuuaaca

SEQ ID NO: 86896 - RNA, 19 nt, Homo sapiens
  misc_RNA (1)...(19): siRNA sense strand
cgaaucagcugacgacagu

SEQ ID NO: 86897 - RNA, 19 nt, Homo sapiens
  misc_RNA (1)...(19): siRNA sense strand
gcaaugauccgaugauguc

SEQ ID NO: 86898 - RNA, 19 nt, Homo sapiens
  misc_RNA (1)...(19): siRNA sense strand
cacagaauguuguugguuu

SEQ ID NO: 86899 - RNA, 19 nt, Homo sapiens
  misc_RNA (1)...(19): siRNA sense strand
uggacgaccugcuggauaa

SEQ ID NO: 86900 - RNA, 19 nt, Homo sapiens
  misc_RNA (1)...(19): siRNA sense strand
uaacuuugauucccucauc

SEQ ID NO: 86901 - RNA, 19 nt, Homo sapiens
  misc_RNA (1)...(19): siRNA sense strand
gcaggcaccaugaaucuga

SEQ ID NO: 86902 - RNA, 19 nt, Homo sapiens
  misc_RNA (1)...(19): siRNA sense strand
caagagaacaagccagcua

SEQ ID NO: 86903 - RNA, 19 nt, Homo sapiens
  misc_RNA (1)...(19): siRNA sense strand
aagcaggccucaucucaga

SEQ ID NO: 86904 - RNA, 19 nt, Homo sapiens
  misc_RNA (1)...(19): siRNA sense strand
ggacaauagcaacaaguau

SEQ ID NO: 86905 - RNA, 19 nt, Homo sapiens
  misc_RNA (1)...(19): siRNA sense strand
guacucaacuagugcaaac

SEQ ID NO: 86906 - RNA, 19 nt, Homo sapiens
  misc_RNA (1)...(19): siRNA sense strand
cagcagcagucuccuguca

SEQ ID NO: 86907 - RNA, 19 nt, Homo sapiens
  misc_RNA (1)...(19): siRNA sense strand
gcaccaugaaucugaauga

SEQ ID NO: 86908 - RNA, 19 nt, Homo sapiens
  misc_RNA (1)...(19): siRNA sense strand
cacaaccugucacugcaua

SEQ ID NO: 86909 - RNA, 19 nt, Homo sapiens
  misc_RNA (1)...(19): siRNA sense strand
gcugauggguuggauuuua

SEQ ID NO: 86910 - RNA, 19 nt, Homo sapiens
  misc_RNA (1)...(19): siRNA sense strand
gacaaacggcucacucugu

SEQ ID NO: 86911 - RNA, 19 nt, Homo sapiens
  misc_RNA (1)...(19): siRNA sense strand
uaccuucucuuccauguca

SEQ ID NO: 86912 - RNA, 19 nt, Homo sapiens
  misc_RNA (1)...(19): siRNA sense strand
gauaagggcgacagcaaca

SEQ ID NO: 86913 - RNA, 19 nt, Homo sapiens
  misc_RNA (1)...(19): siRNA sense strand
gugcaaaccugcccgucau

SEQ ID NO: 86914 - RNA, 19 nt, Homo sapiens
  misc_RNA (1)...(19): siRNA sense strand
caagccagcuaccuucucu

SEQ ID NO: 86915 - RNA, 19 nt, Homo sapiens
  misc_RNA (1)...(19): siRNA sense strand
ugaaugaugggcugacuga

SEQ ID NO: 86916 - RNA, 19 nt, Homo sapiens
  misc_RNA (1)...(19): siRNA sense strand
ccucccagcucuccaagug

SEQ ID NO: 86917 - RNA, 19 nt, Homo sapiens
  misc_RNA (1)...(19): siRNA sense strand
ugccacggcugacugauau

SEQ ID NO: 86918 - RNA, 19 nt, Homo sapiens
  misc_RNA (1)...(19): siRNA sense strand
guucacgcaccaauucuaa

SEQ ID NO: 86919 - RNA, 19 nt, Homo sapiens
  misc_RNA (1)...(19): siRNA sense strand
gaauguuguugguuugaac

SEQ ID NO: 86920 - RNA, 19 nt, Homo sapiens
  misc_RNA (1)...(19): siRNA sense strand
ucucuuccaugucacacua

SEQ ID NO: 86921 - RNA, 19 nt, Homo sapiens
  misc_RNA (1)...(19): siRNA sense strand
gcucuagcuucccguauac

SEQ ID NO: 86922 - RNA, 19 nt, Homo sapiens
  misc_RNA (1)...(19): siRNA sense strand
acagaauguuguugguuug

SEQ ID NO: 86923 - RNA, 19 nt, Homo sapiens
  misc_RNA (1)...(19): siRNA sense strand
gcaacaaguauaccaagag

SEQ ID NO: 86924 - RNA, 19 nt, Homo sapiens
  misc_RNA (1)...(19): siRNA sense strand
gcaacaugggcuugaguga

SEQ ID NO: 86925 - RNA, 19 nt, Homo sapiens
  misc_RNA (1)...(19): siRNA sense strand
gcaaaggccggagcuccaa

SEQ ID NO: 86926 - RNA, 19 nt, Homo sapiens
  misc_RNA (1)...(19): siRNA sense strand
aaugggagcuuggaaugug

SEQ ID NO: 86927 - RNA, 19 nt, Homo sapiens
  misc_RNA (1)...(19): siRNA sense strand
gaccuggacauguucaaug

SEQ ID NO: 86928 - RNA, 19 nt, Homo sapiens
  misc_RNA (1)...(19): siRNA sense strand
cgaauucugucagcaacau

SEQ ID NO: 86929 - RNA, 19 nt, Homo sapiens
  misc_RNA (1)...(19): siRNA sense strand
ccagcuaccuucucuucca

SEQ ID NO: 86930 - RNA, 19 nt, Homo sapiens
  misc_RNA (1)...(19): siRNA sense strand
aaugaugggcugacugaaa

SEQ ID NO: 86931 - RNA, 19 nt, Homo sapiens
  misc_RNA (1)...(19): siRNA sense strand
aacaugggcuugagugagu

SEQ ID NO: 86932 - RNA, 19 nt, Homo sapiens
  misc_RNA (1)...(19): siRNA sense strand
gauccgaugauguccuuug

SEQ ID NO: 86933 - RNA, 19 nt, Homo sapiens
  misc_RNA (1)...(19): siRNA sense strand
gaacgugaugcuucgcaau

SEQ ID NO: 86934 - RNA, 19 nt, Homo sapiens
  misc_RNA (1)...(19): siRNA sense strand
gugcccuacuucaaggaua

SEQ ID NO: 86935 - RNA, 19 nt, Homo sapiens
  misc_RNA (1)...(19): siRNA sense strand
ucaaugggagcuuggaaug

SEQ ID NO: 86936 - RNA, 19 nt, Homo sapiens
  misc_RNA (1)...(19): siRNA sense strand
cuaagcaggccucaucuca

SEQ ID NO: 86937 - RNA, 19 nt, Homo sapiens
  misc_RNA (1)...(19): siRNA sense strand
ggaggaggacgaugaagac

SEQ ID NO: 86938 - RNA, 19 nt, Homo sapiens
  misc_RNA (1)...(19): siRNA sense strand
ucccucaucuccacacaga

SEQ ID NO: 86939 - RNA, 19 nt, Homo sapiens
  misc_RNA (1)...(19): siRNA sense strand
gcuaccuucucuuccaugu

SEQ ID NO: 86940 - RNA, 19 nt, Homo sapiens
  misc_RNA (1)...(19): siRNA sense strand
agccgugccuugucgaauu

SEQ ID NO: 86941 - RNA, 19 nt, Homo sapiens
  misc_RNA (1)...(19): siRNA sense strand
ugcccuacuucaaggauaa

SEQ ID NO: 86942 - RNA, 19 nt, Homo sapiens
  misc_RNA (1)...(19): siRNA sense strand
ccgaggaggaggacgauga

SEQ ID NO: 86943 - RNA, 19 nt, Homo sapiens
  misc_RNA (1)...(19): siRNA sense strand
gaacucauggaugcugaug

SEQ ID NO: 86944 - RNA, 19 nt, Homo sapiens
  misc_RNA (1)...(19): siRNA sense strand
uggacaauagcaacaagua

SEQ ID NO: 86945 - RNA, 19 nt, Homo sapiens
  misc_RNA (1)...(19): siRNA sense strand
acuuggaccuggacauguu

SEQ ID NO: 86946 - RNA, 19 nt, Homo sapiens
  misc_RNA (1)...(19): siRNA sense strand
agaacaagccagcuaccuu

SEQ ID NO: 86947 - RNA, 19 nt, Homo sapiens
  misc_RNA (1)...(19): siRNA sense strand
cagccugucaccuucagua

SEQ ID NO: 86948 - RNA, 19 nt, Homo sapiens
  misc_RNA (1)...(19): siRNA sense strand
cagcucagccagccuguca

SEQ ID NO: 86949 - RNA, 19 nt, Homo sapiens
  misc_RNA (1)...(19): siRNA sense strand
caagcacagaguuggauga

SEQ ID NO: 86950 - RNA, 19 nt, Homo sapiens
  misc_RNA (1)...(19): siRNA sense strand
agaauguuguugguuugaa

SEQ ID NO: 86951 - RNA, 19 nt, Homo sapiens
  misc_RNA (1)...(19): siRNA sense strand
gggcagccgaggaaauguu

SEQ ID NO: 86952 - RNA, 19 nt, Homo sapiens
  misc_RNA (1)...(19): siRNA sense strand
cgacuuggaccuggacaug

SEQ ID NO: 86953 - RNA, 19 nt, Homo sapiens
  misc_RNA (1)...(19): siRNA sense strand
gccgugccuugucgaauuc

SEQ ID NO: 86954 - RNA, 19 nt, Homo sapiens
  misc_RNA (1)...(19): siRNA sense strand
ccaugcagaccauccaaga

SEQ ID NO: 86955 - RNA, 19 nt, Homo sapiens
  misc_RNA (1)...(19): siRNA sense strand
caccaugaaucugaaugau

SEQ ID NO: 86956 - RNA, 19 nt, Homo sapiens
  misc_RNA (1)...(19): siRNA sense strand
uggguuggauuuuaacuuu

SEQ ID NO: 86957 - RNA, 19 nt, Homo sapiens
  misc_RNA (1)...(19): siRNA sense strand
cgaggaggaggacgaugaa

SEQ ID NO: 86958 - RNA, 19 nt, Homo sapiens
  misc_RNA (1)...(19): siRNA sense strand
ggaacuucacuggugcuaa

SEQ ID NO: 86959 - RNA, 19 nt, Homo sapiens
  misc_RNA (1)...(19): siRNA sense strand
ccucaucuccacacagaau

SEQ ID NO: 86960 - RNA, 19 nt, Homo sapiens
  misc_RNA (1)...(19): siRNA sense strand
gcacaaccugucacugcau

SEQ ID NO: 86961 - RNA, 19 nt, Homo sapiens
  misc_RNA (1)...(19): siRNA sense strand
ggaccuggacauguucaau

SEQ ID NO: 86962 - RNA, 19 nt, Homo sapiens
  misc_RNA (1)...(19): siRNA sense strand
gucagccagucuaugcaaa

SEQ ID NO: 86963 - RNA, 19 nt, Homo sapiens
  misc_RNA (1)...(19): siRNA sense strand
caggcaccaugaaucugaa

SEQ ID NO: 86964 - RNA, 19 nt, Homo sapiens
  misc_RNA (1)...(19): siRNA sense strand
gguuggauuuuaacuuuga

SEQ ID NO: 86965 - RNA, 19 nt, Homo sapiens
  misc_RNA (1)...(19): siRNA sense strand
ucgcaaugauccgaugaug

SEQ ID NO: 86966 - RNA, 19 nt, Homo sapiens
  misc_RNA (1)...(19): siRNA sense strand
ugcagaccauccaagagaa

SEQ ID NO: 86967 - RNA, 19 nt, Homo sapiens
  misc_RNA (1)...(19): siRNA sense strand
cauggacaauagcaacaag

SEQ ID NO: 86968 - RNA, 19 nt, Homo sapiens
  misc_RNA (1)...(19): siRNA sense strand
ccugucaccuucaguaagc

SEQ ID NO: 86969 - RNA, 19 nt, Homo sapiens
  misc_RNA (1)...(19): siRNA sense strand
acaauagcaacaaguauac

SEQ ID NO: 86970 - RNA, 19 nt, Homo sapiens
  misc_RNA (1)...(19): siRNA sense strand
uauccguagugaacucaug

SEQ ID NO: 86971 - RNA, 19 nt, Homo sapiens
  misc_RNA (1)...(19): siRNA sense strand
ucacuucggacucacuuag

SEQ ID NO: 86972 - RNA, 19 nt, Homo sapiens
  misc_RNA (1)...(19): siRNA sense strand
cagcuaccuucucuuccau

SEQ ID NO: 86973 - RNA, 19 nt, Homo sapiens
  misc_RNA (1)...(19): siRNA sense strand
agcaacaaguauaccaaga

SEQ ID NO: 86974 - RNA, 19 nt, Homo sapiens
  misc_RNA (1)...(19): siRNA sense strand
gaacaagcauucucuguga

SEQ ID NO: 86975 - RNA, 19 nt, Homo sapiens
  misc_RNA (1)...(19): siRNA sense strand
ggaagaagauccagcagaa

SEQ ID NO: 86976 - RNA, 19 nt, Homo sapiens
  misc_RNA (1)...(19): siRNA sense strand
caacaaacccaccuacuuu

SEQ ID NO: 86977 - RNA, 19 nt, Homo sapiens
  misc_RNA (1)...(19): siRNA sense strand
ugaaagagguggcugacuu

SEQ ID NO: 86978 - RNA, 19 nt, Homo sapiens
  misc_RNA (1)...(19): siRNA sense strand
gcaagugccucgucacagu

SEQ ID NO: 86979 - RNA, 19 nt, Homo sapiens
  misc_RNA (1)...(19): siRNA sense strand
ucucugagcuggacaguga

SEQ ID NO: 86980 - RNA, 19 nt, Homo sapiens
  misc_RNA (1)...(19): siRNA sense strand
aggcagagaucaccuguaa

SEQ ID NO: 86981 - RNA, 19 nt, Homo sapiens
  misc_RNA (1)...(19): siRNA sense strand
ggaugaagaugaugaggau

SEQ ID NO: 86982 - RNA, 19 nt, Homo sapiens
  misc_RNA (1)...(19): siRNA sense strand
gcaaguacgucaucaccau

SEQ ID NO: 86983 - RNA, 19 nt, Homo sapiens
  misc_RNA (1)...(19): siRNA sense strand
caccaaagaugcuggagaa

SEQ ID NO: 86984 - RNA, 19 nt, Homo sapiens
  misc_RNA (1)...(19): siRNA sense strand
ugacaaggaucgcaccuau

SEQ ID NO: 86985 - RNA, 19 nt, Homo sapiens
  misc_RNA (1)...(19): siRNA sense strand
gcaccuacaucaucaacau

SEQ ID NO: 86986 - RNA, 19 nt, Homo sapiens
  misc_RNA (1)...(19): siRNA sense strand
ccaaugagcccaccuacuu

SEQ ID NO: 86987 - RNA, 19 nt, Homo sapiens
  misc_RNA (1)...(19): siRNA sense strand
caagaaagccaucgccuau

SEQ ID NO: 86988 - RNA, 19 nt, Homo sapiens
  misc_RNA (1)...(19): siRNA sense strand
aagcggagauugcauuuga

SEQ ID NO: 86989 - RNA, 19 nt, Homo sapiens
  misc_RNA (1)...(19): siRNA sense strand
ggacaagcccgcugaguuc

SEQ ID NO: 86990 - RNA, 19 nt, Homo sapiens
  misc_RNA (1)...(19): siRNA sense strand
caacaaggccaaccgauuc

SEQ ID NO: 86991 - RNA, 19 nt, Homo sapiens
  misc_RNA (1)...(19): siRNA sense strand
ggaaccggguguacaaugu

SEQ ID NO: 86992 - RNA, 19 nt, Homo sapiens
  misc_RNA (1)...(19): siRNA sense strand
gcacguacgcuguguccua

SEQ ID NO: 86993 - RNA, 19 nt, Homo sapiens
  misc_RNA (1)...(19): siRNA sense strand
ccagccaccuucacuauug

SEQ ID NO: 86994 - RNA, 19 nt, Homo sapiens
  misc_RNA (1)...(19): siRNA sense strand
gaugagcauucuguuauga

SEQ ID NO: 86995 - RNA, 19 nt, Homo sapiens
  misc_RNA (1)...(19): siRNA sense strand
caagcaagguggacaucaa

SEQ ID NO: 86996 - RNA, 19 nt, Homo sapiens
  misc_RNA (1)...(19): siRNA sense strand
gcacagaggagccagugaa

SEQ ID NO: 86997 - RNA, 19 nt, Homo sapiens
  misc_RNA (1)...(19): siRNA sense strand
ugaccuaccugucccaguu

SEQ ID NO: 86998 - RNA, 19 nt, Homo sapiens
  misc_RNA (1)...(19): siRNA sense strand
ggacgcugauccugcacua

SEQ ID NO: 86999 - RNA, 19 nt, Homo sapiens
  misc_RNA (1)...(19): siRNA sense strand
aggcggagcugaccauuga

SEQ ID NO: 87000 - RNA, 19 nt, Homo sapiens
  misc_RNA (1)...(19): siRNA sense strand
ucucaaggguggacuggua

SEQ ID NO: 87001 - RNA, 19 nt, Homo sapiens
  misc_RNA (1)...(19): siRNA sense strand
gcaaacagacgcccaagca

SEQ ID NO: 87002 - RNA, 19 nt, Homo sapiens
  misc_RNA (1)...(19): siRNA sense strand
gcaccuaccacaucaccua

SEQ ID NO: 87003 - RNA, 19 nt, Homo sapiens
  misc_RNA (1)...(19): siRNA sense strand
ggaugagcauucuguuaug

SEQ ID NO: 87004 - RNA, 19 nt, Homo sapiens
  misc_RNA (1)...(19): siRNA sense strand
caagcuggaugugcaguuu

SEQ ID NO: 87005 - RNA, 19 nt, Homo sapiens
  misc_RNA (1)...(19): siRNA sense strand
caacaucaccgacaacaag

SEQ ID NO: 87006 - RNA, 19 nt, Homo sapiens
  misc_RNA (1)...(19): siRNA sense strand
gaaccaugacgguaccuuu

SEQ ID NO: 87007 - RNA, 19 nt, Homo sapiens
  misc_RNA (1)...(19): siRNA sense strand
gcaccuaugcugucuccua

SEQ ID NO: 87008 - RNA, 19 nt, Homo sapiens
  misc_RNA (1)...(19): siRNA sense strand
gcacggagaucagcaagac

SEQ ID NO: 87009 - RNA, 19 nt, Homo sapiens
  misc_RNA (1)...(19): siRNA sense strand
aagccaagaucgaauguga

SEQ ID NO: 87010 - RNA, 19 nt, Homo sapiens
  misc_RNA (1)...(19): siRNA sense strand
ccaccuacuuugacaucua

SEQ ID NO: 87011 - RNA, 19 nt, Homo sapiens
  misc_RNA (1)...(19): siRNA sense strand
ccgcugaguucaccauuga

SEQ ID NO: 87012 - RNA, 19 nt, Homo sapiens
  misc_RNA (1)...(19): siRNA sense strand
gugaggagguguacgugaa

SEQ ID NO: 87013 - RNA, 19 nt, Homo sapiens
  misc_RNA (1)...(19): siRNA sense strand
ccuggcaccuacaccauua

SEQ ID NO: 87014 - RNA, 19 nt, Homo sapiens
  misc_RNA (1)...(19): siRNA sense strand
gcagagaucaccuguaagg

SEQ ID NO: 87015 - RNA, 19 nt, Homo sapiens
  misc_RNA (1)...(19): siRNA sense strand
ggccuugucugucaccauu

SEQ ID NO: 87016 - RNA, 19 nt, Homo sapiens
  misc_RNA (1)...(19): siRNA sense strand
gcaagcaugucaccaacag

SEQ ID NO: 87017 - RNA, 19 nt, Homo sapiens
  misc_RNA (1)...(19): siRNA sense strand
ccugacugcuucccagaua

SEQ ID NO: 87018 - RNA, 19 nt, Homo sapiens
  misc_RNA (1)...(19): siRNA sense strand
ccacagccuucacgaaaca

SEQ ID NO: 87019 - RNA, 19 nt, Homo sapiens
  misc_RNA (1)...(19): siRNA sense strand
ggaaccaggugacuaugag

SEQ ID NO: 87020 - RNA, 19 nt, Homo sapiens
  misc_RNA (1)...(19): siRNA sense strand
ucacuauugucaccaaaga

SEQ ID NO: 87021 - RNA, 19 nt, Homo sapiens
  misc_RNA (1)...(19): siRNA sense strand
gacauugacuucgacauca

SEQ ID NO: 87022 - RNA, 19 nt, Homo sapiens
  misc_RNA (1)...(19): siRNA sense strand
gaaagagguggcugacuuc

SEQ ID NO: 87023 - RNA, 19 nt, Homo sapiens
  misc_RNA (1)...(19): siRNA sense strand
gggacuacauccucauugu

SEQ ID NO: 87024 - RNA, 19 nt, Homo sapiens
  misc_RNA (1)...(19): siRNA sense strand
gacgggacaugcaaaguca

SEQ ID NO: 87025 - RNA, 19 nt, Homo sapiens
  misc_RNA (1)...(19): siRNA sense strand
agaaaggccugcaccagau

SEQ ID NO: 87026 - RNA, 19 nt, Homo sapiens
  misc_RNA (1)...(19): siRNA sense strand
aaaugaagcuggagaacgu

SEQ ID NO: 87027 - RNA, 19 nt, Homo sapiens
  misc_RNA (1)...(19): siRNA sense strand
gaggaugcccgcaaacaga

SEQ ID NO: 87028 - RNA, 19 nt, Homo sapiens
  misc_RNA (1)...(19): siRNA sense strand
ccuccaaggucugugcuua

SEQ ID NO: 87029 - RNA, 19 nt, Homo sapiens
  misc_RNA (1)...(19): siRNA sense strand
uaaggugguucccaacaau

SEQ ID NO: 87030 - RNA, 19 nt, Homo sapiens
  misc_RNA (1)...(19): siRNA sense strand
ccaacaaacccaccuacuu

SEQ ID NO: 87031 - RNA, 19 nt, Homo sapiens
  misc_RNA (1)...(19): siRNA sense strand
ggccacagccuucacgaaa

SEQ ID NO: 87032 - RNA, 19 nt, Homo sapiens
  misc_RNA (1)...(19): siRNA sense strand
caucaucaacaucaaguuu

SEQ ID NO: 87033 - RNA, 19 nt, Homo sapiens
  misc_RNA (1)...(19): siRNA sense strand
caacguggaugagcauucu

SEQ ID NO: 87034 - RNA, 19 nt, Homo sapiens
  misc_RNA (1)...(19): siRNA sense strand
guucaacggugcccacauc

SEQ ID NO: 87035 - RNA, 19 nt, Homo sapiens
  misc_RNA (1)...(19): siRNA sense strand
ccaccaagcccauuaagca

SEQ ID NO: 87036 - RNA, 19 nt, Homo sapiens
  misc_RNA (1)...(19): siRNA sense strand
gcagugacagugacuuaug

SEQ ID NO: 87037 - RNA, 19 nt, Homo sapiens
  misc_RNA (1)...(19): siRNA sense strand
ggacaugcaaagucaccua

SEQ ID NO: 87038 - RNA, 19 nt, Homo sapiens
  misc_RNA (1)...(19): siRNA sense strand
gaggguggcuuggucaaca

SEQ ID NO: 87039 - RNA, 19 nt, Homo sapiens
  misc_RNA (1)...(19): siRNA sense strand
gaugcaagaucccuaacag

SEQ ID NO: 87040 - RNA, 19 nt, Homo sapiens
  misc_RNA (1)...(19): siRNA sense strand
aaaguucagggccuuaaua

SEQ ID NO: 87041 - RNA, 19 nt, Homo sapiens
  misc_RNA (1)...(19): siRNA sense strand
gcgaggugcuggucuacau

SEQ ID NO: 87042 - RNA, 19 nt, Homo sapiens
  misc_RNA (1)...(19): siRNA sense strand
ggagauugcauuugaggau

SEQ ID NO: 87043 - RNA, 19 nt, Homo sapiens
  misc_RNA (1)...(19): siRNA sense strand
ggaccucacagcugaaugu

SEQ ID NO: 87044 - RNA, 19 nt, Homo sapiens
  misc_RNA (1)...(19): siRNA sense strand
caaggugaccgugcucuuu

SEQ ID NO: 87045 - RNA, 19 nt, Homo sapiens
  misc_RNA (1)...(19): siRNA sense strand
guucagggccuuaauagca

SEQ ID NO: 87046 - RNA, 19 nt, Homo sapiens
  misc_RNA (1)...(19): siRNA sense strand
uaugaggucuccaucaagu

SEQ ID NO: 87047 - RNA, 19 nt, Homo sapiens
  misc_RNA (1)...(19): siRNA sense strand
gguaugcacccacugagaa

SEQ ID NO: 87048 - RNA, 19 nt, Homo sapiens
  misc_RNA (1)...(19): siRNA sense strand
ugguggagguccuguauga

SEQ ID NO: 87049 - RNA, 19 nt, Homo sapiens
  misc_RNA (1)...(19): siRNA sense strand
cuaaggugguucccaacaa

SEQ ID NO: 87050 - RNA, 19 nt, Homo sapiens
  misc_RNA (1)...(19): siRNA sense strand
caaagcggagauugcauuu

SEQ ID NO: 87051 - RNA, 19 nt, Homo sapiens
  misc_RNA (1)...(19): siRNA sense strand
agagguggcugacuucaag

SEQ ID NO: 87052 - RNA, 19 nt, Homo sapiens
  misc_RNA (1)...(19): siRNA sense strand
caccuaugcugucuccuau

SEQ ID NO: 87053 - RNA, 19 nt, Homo sapiens
  misc_RNA (1)...(19): siRNA sense strand
gcaggcaccaacaugauga

SEQ ID NO: 87054 - RNA, 19 nt, Homo sapiens
  misc_RNA (1)...(19): siRNA sense strand
caaagcaggcaccaacaug

SEQ ID NO: 87055 - RNA, 19 nt, Homo sapiens
  misc_RNA (1)...(19): siRNA sense strand
ccaggaaccaggugacuau

SEQ ID NO: 87056 - RNA, 19 nt, Homo sapiens
  misc_RNA (1)...(19): siRNA sense strand
ggacgggacaugcaaaguc

SEQ ID NO: 87057 - RNA, 19 nt, Homo sapiens
  misc_RNA (1)...(19): siRNA sense strand
guauggcggugaugagauc

SEQ ID NO: 87058 - RNA, 19 nt, Homo sapiens
  misc_RNA (1)...(19): siRNA sense strand
ccuaugcugucuccuaugu

SEQ ID NO: 87059 - RNA, 19 nt, Homo sapiens
  misc_RNA (1)...(19): siRNA sense strand
guggaugagcauucuguua

SEQ ID NO: 87060 - RNA, 19 nt, Homo sapiens
  misc_RNA (1)...(19): siRNA sense strand
ggccauguggucacuuaua

SEQ ID NO: 87061 - RNA, 19 nt, Homo sapiens
  misc_RNA (1)...(19): siRNA sense strand
acuaugaggucuccaucaa

SEQ ID NO: 87062 - RNA, 19 nt, Homo sapiens
  misc_RNA (1)...(19): siRNA sense strand
gguggaagccgcagagauc

SEQ ID NO: 87063 - RNA, 19 nt, Homo sapiens
  misc_RNA (1)...(19): siRNA sense strand
caucaacugugaggacaug

SEQ ID NO: 87064 - RNA, 19 nt, Homo sapiens
  misc_RNA (1)...(19): siRNA sense strand
gcacccacacuguccacua

SEQ ID NO: 87065 - RNA, 19 nt, Homo sapiens
  misc_RNA (1)...(19): siRNA sense strand
acaccuaugugacagacaa

SEQ ID NO: 87066 - RNA, 19 nt, Homo sapiens
  misc_RNA (1)...(19): siRNA sense strand
caauggugauggcucaugu

SEQ ID NO: 87067 - RNA, 19 nt, Homo sapiens
  misc_RNA (1)...(19): siRNA sense strand
agggagaccugaagcucua

SEQ ID NO: 87068 - RNA, 19 nt, Homo sapiens
  misc_RNA (1)...(19): siRNA sense strand
gcacguuccgcugcacaua

SEQ ID NO: 87069 - RNA, 19 nt, Homo sapiens
  misc_RNA (1)...(19): siRNA sense strand
gcgggacuuugagaucaua

SEQ ID NO: 87070 - RNA, 19 nt, Homo sapiens
  misc_RNA (1)...(19): siRNA sense strand
gaaccagccagcguccuuu

SEQ ID NO: 87071 - RNA, 19 nt, Homo sapiens
  misc_RNA (1)...(19): siRNA sense strand
ggccagcucucaggacaug

SEQ ID NO: 87072 - RNA, 19 nt, Homo sapiens
  misc_RNA (1)...(19): siRNA sense strand
ucaacaaggccaaccgauu

SEQ ID NO: 87073 - RNA, 19 nt, Homo sapiens
  misc_RNA (1)...(19): siRNA sense strand
ggaggugaccacugaguuc

SEQ ID NO: 87074 - RNA, 19 nt, Homo sapiens
  misc_RNA (1)...(19): siRNA sense strand
gcacggacaucgccuacaa

SEQ ID NO: 87075 - RNA, 19 nt, Homo sapiens
  misc_RNA (1)...(19): siRNA sense strand
gcgaagcccucaugaacaa

SEQ ID NO: 87076 - RNA, 19 nt, Homo sapiens
  misc_RNA (1)...(19): siRNA sense strand
cgucaucgcuugcuacuuc

SEQ ID NO: 87077 - RNA, 19 nt, Homo sapiens
  misc_RNA (1)...(19): siRNA sense strand
ccagagcggccuaucauuu

SEQ ID NO: 87078 - RNA, 19 nt, Homo sapiens
  misc_RNA (1)...(19): siRNA sense strand
gcaccauccucuucaugau

SEQ ID NO: 87079 - RNA, 19 nt, Homo sapiens
  misc_RNA (1)...(19): siRNA sense strand
cggucuacaugaucaaaua

SEQ ID NO: 87080 - RNA, 19 nt, Homo sapiens
  misc_RNA (1)...(19): siRNA sense strand
uaucucagcuacaaguuuc

SEQ ID NO: 87081 - RNA, 19 nt, Homo sapiens
  misc_RNA (1)...(19): siRNA sense strand
gccuagaggugcaccaguu

SEQ ID NO: 87082 - RNA, 19 nt, Homo sapiens
  misc_RNA (1)...(19): siRNA sense strand
cauccuaucucagcuacaa

SEQ ID NO: 87083 - RNA, 19 nt, Homo sapiens
  misc_RNA (1)...(19): siRNA sense strand
ggccaacucucaguacuuc

SEQ ID NO: 87084 - RNA, 19 nt, Homo sapiens
  misc_RNA (1)...(19): siRNA sense strand
ccacguacuugguagacau

SEQ ID NO: 87085 - RNA, 19 nt, Homo sapiens
  misc_RNA (1)...(19): siRNA sense strand
ucaugaugcucuacuucuu

SEQ ID NO: 87086 - RNA, 19 nt, Homo sapiens
  misc_RNA (1)...(19): siRNA sense strand
cgacuucacggucuacaug

SEQ ID NO: 87087 - RNA, 19 nt, Homo sapiens
  misc_RNA (1)...(19): siRNA sense strand
gagcggcgugugcuucgua

SEQ ID NO: 87088 - RNA, 19 nt, Homo sapiens
  misc_RNA (1)...(19): siRNA sense strand
ucuauccgcuggugaaggu

SEQ ID NO: 87089 - RNA, 19 nt, Homo sapiens
  misc_RNA (1)...(19): siRNA sense strand
cacaggaggagacgcguuu

SEQ ID NO: 87090 - RNA, 19 nt, Homo sapiens
  misc_RNA (1)...(19): siRNA sense strand
gggcugcaccauccucuuc

SEQ ID NO: 87091 - RNA, 19 nt, Homo sapiens
  misc_RNA (1)...(19): siRNA sense strand
gaggccaacucucaguacu

SEQ ID NO: 87092 - RNA, 19 nt, Homo sapiens
  misc_RNA (1)...(19): siRNA sense strand
gaagcccucaugaacaagu

SEQ ID NO: 87093 - RNA, 19 nt, Homo sapiens
  misc_RNA (1)...(19): siRNA sense strand
aaggugccauccuaucuca

SEQ ID NO: 87094 - RNA, 19 nt, Homo sapiens
  misc_RNA (1)...(19): siRNA sense strand
gcucuucguguaccuguuc

SEQ ID NO: 87095 - RNA, 19 nt, Homo sapiens
  misc_RNA (1)...(19): siRNA sense strand
ucaaggugccauccuaucu

SEQ ID NO: 87096 - RNA, 19 nt, Homo sapiens
  misc_RNA (1)...(19): siRNA sense strand
caugaugcucuacuucuuc

SEQ ID NO: 87097 - RNA, 19 nt, Homo sapiens
  misc_RNA (1)...(19): siRNA sense strand
acacucgccucaccaacag

SEQ ID NO: 87098 - RNA, 19 nt, Homo sapiens
  misc_RNA (1)...(19): siRNA sense strand
ccaucgaggccaacucuca

SEQ ID NO: 87099 - RNA, 19 nt, Homo sapiens
  misc_RNA (1)...(19): siRNA sense strand
gcugcgaagcccucaugaa

SEQ ID NO: 87100 - RNA, 19 nt, Homo sapiens
  misc_RNA (1)...(19): siRNA sense strand
cguagagccuccugaaaug

SEQ ID NO: 87101 - RNA, 19 nt, Homo sapiens
  misc_RNA (1)...(19): siRNA sense strand
cgaggaagaucgaccuauc

SEQ ID NO: 87102 - RNA, 19 nt, Homo sapiens
  misc_RNA (1)...(19): siRNA sense strand
gggauucucuggcuuuuaa

SEQ ID NO: 87103 - RNA, 19 nt, Homo sapiens
  misc_RNA (1)...(19): siRNA sense strand
gaaaacgccugaagaagag

SEQ ID NO: 87104 - RNA, 19 nt, Homo sapiens
  misc_RNA (1)...(19): siRNA sense strand
gagauggacccgccaaauc

SEQ ID NO: 87105 - RNA, 19 nt, Homo sapiens
  misc_RNA (1)...(19): siRNA sense strand
gggagcaucugcaggucaa

SEQ ID NO: 87106 - RNA, 19 nt, Homo sapiens
  misc_RNA (1)...(19): siRNA sense strand
gaaaugauugggccuaugc

SEQ ID NO: 87107 - RNA, 19 nt, Homo sapiens
  misc_RNA (1)...(19): siRNA sense strand
ggagauggacccgccaaau

SEQ ID NO: 87108 - RNA, 19 nt, Homo sapiens
  misc_RNA (1)...(19): siRNA sense strand
gaccaagacgcuacguaga

SEQ ID NO: 87109 - RNA, 19 nt, Homo sapiens
  misc_RNA (1)...(19): siRNA sense strand
ggaaccagcaacaccugaa

SEQ ID NO: 87110 - RNA, 19 nt, Homo sapiens
  misc_RNA (1)...(19): siRNA sense strand
ggcccgagcaguucaguga

SEQ ID NO: 87111 - RNA, 19 nt, Homo sapiens
  misc_RNA (1)...(19): siRNA sense strand
guagagccuccugaaauga

SEQ ID NO: 87112 - RNA, 19 nt, Homo sapiens
  misc_RNA (1)...(19): siRNA sense strand
ugaaaacgccugaagaaga

SEQ ID NO: 87113 - RNA, 19 nt, Homo sapiens
  misc_RNA (1)...(19): siRNA sense strand
ugaaaugauugggccuaug

SEQ ID NO: 87114 - RNA, 19 nt, Homo sapiens
  misc_RNA (1)...(19): siRNA sense strand
ccgagcaguucagugauga

SEQ ID NO: 87115 - RNA, 19 nt, Homo sapiens
  misc_RNA (1)...(19): siRNA sense strand
cuacguagagccuccugaa

SEQ ID NO: 87116 - RNA, 19 nt, Homo sapiens
  misc_RNA (1)...(19): siRNA sense strand
gaaccagcaacaccugaag

SEQ ID NO: 87117 - RNA, 19 nt, Homo sapiens
  misc_RNA (1)...(19): siRNA sense strand
gugugaagaugguccugau

SEQ ID NO: 87118 - RNA, 19 nt, Homo sapiens
  misc_RNA (1)...(19): siRNA sense strand
ggugaaaacgccugaagaa

SEQ ID NO: 87119 - RNA, 19 nt, Homo sapiens
  misc_RNA (1)...(19): siRNA sense strand
agagccuccugaaaugauu

SEQ ID NO: 87120 - RNA, 19 nt, Homo sapiens
  misc_RNA (1)...(19): siRNA sense strand
ggaaccagcaacucaacgu

SEQ ID NO: 87121 - RNA, 19 nt, Homo sapiens
  misc_RNA (1)...(19): siRNA sense strand
cccgagcaguucagugaug

SEQ ID NO: 87122 - RNA, 19 nt, Homo sapiens
  misc_RNA (1)...(19): siRNA sense strand
ugaaguggaaccagcaaca

SEQ ID NO: 87123 - RNA, 19 nt, Homo sapiens
  misc_RNA (1)...(19): siRNA sense strand
acguagagccuccugaaau

SEQ ID NO: 87124 - RNA, 19 nt, Homo sapiens
  misc_RNA (1)...(19): siRNA sense strand
agacugggugugaguguga

SEQ ID NO: 87125 - RNA, 19 nt, Homo sapiens
  misc_RNA (1)...(19): siRNA sense strand
caaauccagaggaggugaa

SEQ ID NO: 87126 - RNA, 19 nt, Homo sapiens
  misc_RNA (1)...(19): siRNA sense strand
ggaagaagauugcuaccau

SEQ ID NO: 87127 - RNA, 19 nt, Homo sapiens
  misc_RNA (1)...(19): siRNA sense strand
ccacugaggucuucacuuc

SEQ ID NO: 87128 - RNA, 19 nt, Homo sapiens
  misc_RNA (1)...(19): siRNA sense strand
gaaggaggcuggaauugag

SEQ ID NO: 87129 - RNA, 19 nt, Homo sapiens
  misc_RNA (1)...(19): siRNA sense strand
ccaggaagaugaauacaug

SEQ ID NO: 87130 - RNA, 19 nt, Homo sapiens
  misc_RNA (1)...(19): siRNA sense strand
gaaucuuccuugcuuauga

SEQ ID NO: 87131 - RNA, 19 nt, Homo sapiens
  misc_RNA (1)...(19): siRNA sense strand
ggagaaccgugaacuggaa

SEQ ID NO: 87132 - RNA, 19 nt, Homo sapiens
  misc_RNA (1)...(19): siRNA sense strand
gggcauggcuaucuacaau

SEQ ID NO: 87133 - RNA, 19 nt, Homo sapiens
  misc_RNA (1)...(19): siRNA sense strand
acaagaagauuggcuacua

SEQ ID NO: 87134 - RNA, 19 nt, Homo sapiens
  misc_RNA (1)...(19): siRNA sense strand
ccacugagaagaucaauga

SEQ ID NO: 87135 - RNA, 19 nt, Homo sapiens
  misc_RNA (1)...(19): siRNA sense strand
caagaagauuggcuacuau

SEQ ID NO: 87136 - RNA, 19 nt, Homo sapiens
  misc_RNA (1)...(19): siRNA sense strand
guacaaggagcgucucuuu

SEQ ID NO: 87137 - RNA, 19 nt, Homo sapiens
  misc_RNA (1)...(19): siRNA sense strand
gagugcauuugcuuuauaa

SEQ ID NO: 87138 - RNA, 19 nt, Homo sapiens
  misc_RNA (1)...(19): siRNA sense strand
gccaauacccgcagcauuu

SEQ ID NO: 87139 - RNA, 19 nt, Homo sapiens
  misc_RNA (1)...(19): siRNA sense strand
cgagugcauuugcuuuaua

SEQ ID NO: 87140 - RNA, 19 nt, Homo sapiens
  misc_RNA (1)...(19): siRNA sense strand
gcauuugcuuuauaaguga

SEQ ID NO: 87141 - RNA, 19 nt, Homo sapiens
  misc_RNA (1)...(19): siRNA sense strand
gcauggcuaucuacaaugu

SEQ ID NO: 87142 - RNA, 19 nt, Homo sapiens
  misc_RNA (1)...(19): siRNA sense strand
caacgacccuaucaagauc

SEQ ID NO: 87143 - RNA, 19 nt, Homo sapiens
  misc_RNA (1)...(19): siRNA sense strand
aaagaucauugcugagaaa

SEQ ID NO: 87144 - RNA, 19 nt, Homo sapiens
  misc_RNA (1)...(19): siRNA sense strand
ggaugcagccuuugccuuu

SEQ ID NO: 87145 - RNA, 19 nt, Homo sapiens
  misc_RNA (1)...(19): siRNA sense strand
gcacuggcccugaacaaga

SEQ ID NO: 87146 - RNA, 19 nt, Homo sapiens
  misc_RNA (1)...(19): siRNA sense strand
gauauugacgucucuauuc

SEQ ID NO: 87147 - RNA, 19 nt, Homo sapiens
  misc_RNA (1)...(19): siRNA sense strand
caacaugacaucccaggaa

SEQ ID NO: 87148 - RNA, 19 nt, Homo sapiens
  misc_RNA (1)...(19): siRNA sense strand
gaucauugcugagaaagag

SEQ ID NO: 87149 - RNA, 19 nt, Homo sapiens
  misc_RNA (1)...(19): siRNA sense strand
ggaggaaccuaaggaagau

SEQ ID NO: 87150 - RNA, 19 nt, Homo sapiens
  misc_RNA (1)...(19): siRNA sense strand
gggcuacgguuccauguuc

SEQ ID NO: 87151 - RNA, 19 nt, Homo sapiens
  misc_RNA (1)...(19): siRNA sense strand
acaauugguucaagaucua

SEQ ID NO: 87152 - RNA, 19 nt, Homo sapiens
  misc_RNA (1)...(19): siRNA sense strand
ggaagaaguacgucugguu

SEQ ID NO: 87153 - RNA, 19 nt, Homo sapiens
  misc_RNA (1)...(19): siRNA sense strand
gguggcagcuacaagaaga

SEQ ID NO: 87154 - RNA, 19 nt, Homo sapiens
  misc_RNA (1)...(19): siRNA sense strand
gacaauugguucaagaucu

SEQ ID NO: 87155 - RNA, 19 nt, Homo sapiens
  misc_RNA (1)...(19): siRNA sense strand
cggauggcauggacgcuua

SEQ ID NO: 87156 - RNA, 19 nt, Homo sapiens
  misc_RNA (1)...(19): siRNA sense strand
ggugguaugcugacaauug

SEQ ID NO: 87157 - RNA, 19 nt, Homo sapiens
  misc_RNA (1)...(19): siRNA sense strand
uacaacaaccagaccauua

SEQ ID NO: 87158 - RNA, 19 nt, Homo sapiens
  misc_RNA (1)...(19): siRNA sense strand
gcugacaauugguucaaga

SEQ ID NO: 87159 - RNA, 19 nt, Homo sapiens
  misc_RNA (1)...(19): siRNA sense strand
ccagcaggaugcagccuuu

SEQ ID NO: 87160 - RNA, 19 nt, Homo sapiens
  misc_RNA (1)...(19): siRNA sense strand
gcauggauguccucacucu

SEQ ID NO: 87161 - RNA, 19 nt, Homo sapiens
  misc_RNA (1)...(19): siRNA sense strand
gaauuuguggagaaacuaa

SEQ ID NO: 87162 - RNA, 19 nt, Homo sapiens
  misc_RNA (1)...(19): siRNA sense strand
ggagaagucccggcuguug

SEQ ID NO: 87163 - RNA, 19 nt, Homo sapiens
  misc_RNA (1)...(19): siRNA sense strand
gaaccuaaggaagauauug

SEQ ID NO: 87164 - RNA, 19 nt, Homo sapiens
  misc_RNA (1)...(19): siRNA sense strand
caugacaucccaggaauuu

SEQ ID NO: 87165 - RNA, 19 nt, Homo sapiens
  misc_RNA (1)...(19): siRNA sense strand
gcaguccugugccucauca

SEQ ID NO: 87166 - RNA, 19 nt, Homo sapiens
  misc_RNA (1)...(19): siRNA sense strand
cauugcagcuccaggaaga

SEQ ID NO: 87167 - RNA, 19 nt, Homo sapiens
  misc_RNA (1)...(19): siRNA sense strand
ccaccaaguaccuauauga

SEQ ID NO: 87168 - RNA, 19 nt, Homo sapiens
  misc_RNA (1)...(19): siRNA sense strand
cuauaucacucuuguugug

SEQ ID NO: 87169 - RNA, 19 nt, Homo sapiens
  misc_RNA (1)...(19): siRNA sense strand
gaauacauggcuuggcauu

SEQ ID NO: 87170 - RNA, 19 nt, Homo sapiens
  misc_RNA (1)...(19): siRNA sense strand
gggcauggauguccucacu

SEQ ID NO: 87171 - RNA, 19 nt, Homo sapiens
  misc_RNA (1)...(19): siRNA sense strand
gcaccaaggaugaucuuuc

SEQ ID NO: 87172 - RNA, 19 nt, Homo sapiens
  misc_RNA (1)...(19): siRNA sense strand
aaacuaaccaagcgacuga

SEQ ID NO: 87173 - RNA, 19 nt, Homo sapiens
  misc_RNA (1)...(19): siRNA sense strand
ccaggaauuuguggagaaa

SEQ ID NO: 87174 - RNA, 19 nt, Homo sapiens
  misc_RNA (1)...(19): siRNA sense strand
gaaaagaucauugcugaga

SEQ ID NO: 87175 - RNA, 19 nt, Homo sapiens
  misc_RNA (1)...(19): siRNA sense strand
ugaaggaggcuggaauuga

SEQ ID NO: 87176 - RNA, 19 nt, Homo sapiens
  misc_RNA (1)...(19): siRNA sense strand
gaaggagaaccgugaacug

SEQ ID NO: 87177 - RNA, 19 nt, Homo sapiens
  misc_RNA (1)...(19): siRNA sense strand
aagaaggaguggaggaaga

SEQ ID NO: 87178 - RNA, 19 nt, Homo sapiens
  misc_RNA (1)...(19): siRNA sense strand
cuaucaagaucauccuuau

SEQ ID NO: 87179 - RNA, 19 nt, Homo sapiens
  misc_RNA (1)...(19): siRNA sense strand
ggaagauauugacgucucu

SEQ ID NO: 87180 - RNA, 19 nt, Homo sapiens
  misc_RNA (1)...(19): siRNA sense strand
aagauuggcuacuaugaca

SEQ ID NO: 87181 - RNA, 19 nt, Homo sapiens
  misc_RNA (1)...(19): siRNA sense strand
cagaguuucuucucagauc

SEQ ID NO: 87182 - RNA, 19 nt, Homo sapiens
  misc_RNA (1)...(19): siRNA sense strand
gaucuuuccugguccaaaa

SEQ ID NO: 87183 - RNA, 19 nt, Homo sapiens
  misc_RNA (1)...(19): siRNA sense strand
ucauugugcuuuccuaugg

SEQ ID NO: 87184 - RNA, 19 nt, Homo sapiens
  misc_RNA (1)...(19): siRNA sense strand
gcgcaggacaccaugaaga

SEQ ID NO: 87185 - RNA, 19 nt, Homo sapiens
  misc_RNA (1)...(19): siRNA sense strand
ugacaucccaggaauuugu

SEQ ID NO: 87186 - RNA, 19 nt, Homo sapiens
  misc_RNA (1)...(19): siRNA sense strand
cuacgacccuucuaucaac

SEQ ID NO: 87187 - RNA, 19 nt, Homo sapiens
  misc_RNA (1)...(19): siRNA sense strand
guacgucugguuccucauu

SEQ ID NO: 87188 - RNA, 19 nt, Homo sapiens
  misc_RNA (1)...(19): siRNA sense strand
cgaaucaucgugggacuuu

SEQ ID NO: 87189 - RNA, 19 nt, Homo sapiens
  misc_RNA (1)...(19): siRNA sense strand
gcgugaaacucuuugaaaa

SEQ ID NO: 87190 - RNA, 19 nt, Homo sapiens
  misc_RNA (1)...(19): siRNA sense strand
ggacuucaacuacaacaac

SEQ ID NO: 87191 - RNA, 19 nt, Homo sapiens
  misc_RNA (1)...(19): siRNA sense strand
ugcauuugcuuuauaagug

SEQ ID NO: 87192 - RNA, 19 nt, Homo sapiens
  misc_RNA (1)...(19): siRNA sense strand
caaggaggaaccuaaggaa

SEQ ID NO: 87193 - RNA, 19 nt, Homo sapiens
  misc_RNA (1)...(19): siRNA sense strand
gaccauuaccgaccaaauc

SEQ ID NO: 87194 - RNA, 19 nt, Homo sapiens
  misc_RNA (1)...(19): siRNA sense strand
gaggcuggaauugagauua

SEQ ID NO: 87195 - RNA, 19 nt, Homo sapiens
  misc_RNA (1)...(19): siRNA sense strand
gaugcagccuuugccuuug

SEQ ID NO: 87196 - RNA, 19 nt, Homo sapiens
  misc_RNA (1)...(19): siRNA sense strand
gggacauccugccggacua

SEQ ID NO: 87197 - RNA, 19 nt, Homo sapiens
  misc_RNA (1)...(19): siRNA sense strand
gaucuacgacccuucuauc

SEQ ID NO: 87198 - RNA, 19 nt, Homo sapiens
  misc_RNA (1)...(19): siRNA sense strand
gaagauuggcuacuaugac

SEQ ID NO: 87199 - RNA, 19 nt, Homo sapiens
  misc_RNA (1)...(19): siRNA sense strand
gccagaguuucuucucaga

SEQ ID NO: 87200 - RNA, 19 nt, Homo sapiens
  misc_RNA (1)...(19): siRNA sense strand
ccaaggaggaaccuaagga

SEQ ID NO: 87201 - RNA, 19 nt, Homo sapiens
  misc_RNA (1)...(19): siRNA sense strand
uggaggacuucaacuacaa

SEQ ID NO: 87202 - RNA, 19 nt, Homo sapiens
  misc_RNA (1)...(19): siRNA sense strand
ccgcagcauuuccaacaug

SEQ ID NO: 87203 - RNA, 19 nt, Homo sapiens
  misc_RNA (1)...(19): siRNA sense strand
ucucugaacugcgccauca

SEQ ID NO: 87204 - RNA, 19 nt, Homo sapiens
  misc_RNA (1)...(19): siRNA sense strand
acaacgacccuaucaagau

SEQ ID NO: 87205 - RNA, 19 nt, Homo sapiens
  misc_RNA (1)...(19): siRNA sense strand
ggagaaggagaaccgugaa

SEQ ID NO: 87206 - RNA, 19 nt, Homo sapiens
  misc_RNA (1)...(19): siRNA sense strand
auacauggcuuggcauuuu

SEQ ID NO: 87207 - RNA, 19 nt, Homo sapiens
  misc_RNA (1)...(19): siRNA sense strand
ucacaaagaaggaagaaaa

SEQ ID NO: 87208 - RNA, 19 nt, Homo sapiens
  misc_RNA (1)...(19): siRNA sense strand
ccuaucaagaucauccuua

SEQ ID NO: 87209 - RNA, 19 nt, Homo sapiens
  misc_RNA (1)...(19): siRNA sense strand
caaaucuaccgggcaauga

SEQ ID NO: 87210 - RNA, 19 nt, Homo sapiens
  misc_RNA (1)...(19): siRNA sense strand
ggaauuuguggagaaacua

SEQ ID NO: 87211 - RNA, 19 nt, Homo sapiens
  misc_RNA (1)...(19): siRNA sense strand
gacugaagcccggaaaguu

SEQ ID NO: 87212 - RNA, 19 nt, Homo sapiens
  misc_RNA (1)...(19): siRNA sense strand
gggcugcucacuggcuuua

SEQ ID NO: 87213 - RNA, 19 nt, Homo sapiens
  misc_RNA (1)...(19): siRNA sense strand
cuacaacgacccuaucaag

SEQ ID NO: 87214 - RNA, 19 nt, Homo sapiens
  misc_RNA (1)...(19): siRNA sense strand
gcucaccagcccugucaaa

SEQ ID NO: 87215 - RNA, 19 nt, Homo sapiens
  misc_RNA (1)...(19): siRNA sense strand
acaaggagcgucucuuugg

SEQ ID NO: 87216 - RNA, 19 nt, Homo sapiens
  misc_RNA (1)...(19): siRNA sense strand
ggaaccucauugugcuuuc

SEQ ID NO: 87217 - RNA, 19 nt, Homo sapiens
  misc_RNA (1)...(19): siRNA sense strand
gucgagugcauuugcuuua

SEQ ID NO: 87218 - RNA, 19 nt, Homo sapiens
  misc_RNA (1)...(19): siRNA sense strand
gaagauauugacgucucua

SEQ ID NO: 87219 - RNA, 19 nt, Homo sapiens
  misc_RNA (1)...(19): siRNA sense strand
ggccacaucacaacugaga

SEQ ID NO: 87220 - RNA, 19 nt, Homo sapiens
  misc_RNA (1)...(19): siRNA sense strand
gugguaugcugacaauugg

SEQ ID NO: 87221 - RNA, 19 nt, Homo sapiens
  misc_RNA (1)...(19): siRNA sense strand
caaagaaggaagaaaagaa

SEQ ID NO: 87222 - RNA, 19 nt, Homo sapiens
  misc_RNA (1)...(19): siRNA sense strand
ccuccuauaucacucuugu

SEQ ID NO: 87223 - RNA, 19 nt, Homo sapiens
  misc_RNA (1)...(19): siRNA sense strand
acugaagcccggaaaguuu

SEQ ID NO: 87224 - RNA, 19 nt, Homo sapiens
  misc_RNA (1)...(19): siRNA sense strand
gggugucucuggccaugug

SEQ ID NO: 87225 - RNA, 19 nt, Homo sapiens
  misc_RNA (1)...(19): siRNA sense strand
cccaggaauuuguggagaa

SEQ ID NO: 87226 - RNA, 19 nt, Homo sapiens
  misc_RNA (1)...(19): siRNA sense strand
ggaagaagauugcuaccau

SEQ ID NO: 87227 - RNA, 19 nt, Homo sapiens
  misc_RNA (1)...(19): siRNA sense strand
ccacugaggucuucacuuc

SEQ ID NO: 87228 - RNA, 19 nt, Homo sapiens
  misc_RNA (1)...(19): siRNA sense strand
gaaggaggcuggaauugag

SEQ ID NO: 87229 - RNA, 19 nt, Homo sapiens
  misc_RNA (1)...(19): siRNA sense strand
ccaggaagaugaauacaug

SEQ ID NO: 87230 - RNA, 19 nt, Homo sapiens
  misc_RNA (1)...(19): siRNA sense strand
gaaucuuccuugcuuauga

SEQ ID NO: 87231 - RNA, 19 nt, Homo sapiens
  misc_RNA (1)...(19): siRNA sense strand
ggagaaccgugaacuggaa

SEQ ID NO: 87232 - RNA, 19 nt, Homo sapiens
  misc_RNA (1)...(19): siRNA sense strand
gggcauggcuaucuacaau

SEQ ID NO: 87233 - RNA, 19 nt, Homo sapiens
  misc_RNA (1)...(19): siRNA sense strand
acaagaagauuggcuacua

SEQ ID NO: 87234 - RNA, 19 nt, Homo sapiens
  misc_RNA (1)...(19): siRNA sense strand
ccacugagaagaucaauga

SEQ ID NO: 87235 - RNA, 19 nt, Homo sapiens
  misc_RNA (1)...(19): siRNA sense strand
caagaagauuggcuacuau

SEQ ID NO: 87236 - RNA, 19 nt, Homo sapiens
  misc_RNA (1)...(19): siRNA sense strand
guacaaggagcgucucuuu

SEQ ID NO: 87237 - RNA, 19 nt, Homo sapiens
  misc_RNA (1)...(19): siRNA sense strand
gagugcauuugcuuuauaa

SEQ ID NO: 87238 - RNA, 19 nt, Homo sapiens
  misc_RNA (1)...(19): siRNA sense strand
gccaauacccgcagcauuu

SEQ ID NO: 87239 - RNA, 19 nt, Homo sapiens
  misc_RNA (1)...(19): siRNA sense strand
cgagugcauuugcuuuaua

SEQ ID NO: 87240 - RNA, 19 nt, Homo sapiens
  misc_RNA (1)...(19): siRNA sense strand
gcauuugcuuuauaaguga

SEQ ID NO: 87241 - RNA, 19 nt, Homo sapiens
  misc_RNA (1)...(19): siRNA sense strand
gcauggcuaucuacaaugu

SEQ ID NO: 87242 - RNA, 19 nt, Homo sapiens
  misc_RNA (1)...(19): siRNA sense strand
caacgacccuaucaagauc

SEQ ID NO: 87243 - RNA, 19 nt, Homo sapiens
  misc_RNA (1)...(19): siRNA sense strand
aaagaucauugcugagaaa

SEQ ID NO: 87244 - RNA, 19 nt, Homo sapiens
  misc_RNA (1)...(19): siRNA sense strand
ggaugcagccuuugccuuu

SEQ ID NO: 87245 - RNA, 19 nt, Homo sapiens
  misc_RNA (1)...(19): siRNA sense strand
gcacuggcccugaacaaga

SEQ ID NO: 87246 - RNA, 19 nt, Homo sapiens
  misc_RNA (1)...(19): siRNA sense strand
gauauugacgucucuauuc

SEQ ID NO: 87247 - RNA, 19 nt, Homo sapiens
  misc_RNA (1)...(19): siRNA sense strand
caacaugacaucccaggaa

SEQ ID NO: 87248 - RNA, 19 nt, Homo sapiens
  misc_RNA (1)...(19): siRNA sense strand
gaucauugcugagaaagag

SEQ ID NO: 87249 - RNA, 19 nt, Homo sapiens
  misc_RNA (1)...(19): siRNA sense strand
ggaggaaccuaaggaagau

SEQ ID NO: 87250 - RNA, 19 nt, Homo sapiens
  misc_RNA (1)...(19): siRNA sense strand
gggcuacgguuccauguuc

SEQ ID NO: 87251 - RNA, 19 nt, Homo sapiens
  misc_RNA (1)...(19): siRNA sense strand
acaauugguucaagaucua

SEQ ID NO: 87252 - RNA, 19 nt, Homo sapiens
  misc_RNA (1)...(19): siRNA sense strand
ggaagaaguacgucugguu

SEQ ID NO: 87253 - RNA, 19 nt, Homo sapiens
  misc_RNA (1)...(19): siRNA sense strand
gguggcagcuacaagaaga

SEQ ID NO: 87254 - RNA, 19 nt, Homo sapiens
  misc_RNA (1)...(19): siRNA sense strand
gacaauugguucaagaucu

SEQ ID NO: 87255 - RNA, 19 nt, Homo sapiens
  misc_RNA (1)...(19): siRNA sense strand
cggauggcauggacgcuua

SEQ ID NO: 87256 - RNA, 19 nt, Homo sapiens
  misc_RNA (1)...(19): siRNA sense strand
ggugguaugcugacaauug

SEQ ID NO: 87257 - RNA, 19 nt, Homo sapiens
  misc_RNA (1)...(19): siRNA sense strand
uacaacaaccagaccauua

SEQ ID NO: 87258 - RNA, 19 nt, Homo sapiens
  misc_RNA (1)...(19): siRNA sense strand
gcugacaauugguucaaga

SEQ ID NO: 87259 - RNA, 19 nt, Homo sapiens
  misc_RNA (1)...(19): siRNA sense strand
ccagcaggaugcagccuuu

SEQ ID NO: 87260 - RNA, 19 nt, Homo sapiens
  misc_RNA (1)...(19): siRNA sense strand
gcauggauguccucacucu

SEQ ID NO: 87261 - RNA, 19 nt, Homo sapiens
  misc_RNA (1)...(19): siRNA sense strand
gaauuuguggagaaacuaa

SEQ ID NO: 87262 - RNA, 19 nt, Homo sapiens
  misc_RNA (1)...(19): siRNA sense strand
ggagaagucccggcuguug

SEQ ID NO: 87263 - RNA, 19 nt, Homo sapiens
  misc_RNA (1)...(19): siRNA sense strand
gaaccuaaggaagauauug

SEQ ID NO: 87264 - RNA, 19 nt, Homo sapiens
  misc_RNA (1)...(19): siRNA sense strand
caugacaucccaggaauuu

SEQ ID NO: 87265 - RNA, 19 nt, Homo sapiens
  misc_RNA (1)...(19): siRNA sense strand
gcaguccugugccucauca

SEQ ID NO: 87266 - RNA, 19 nt, Homo sapiens
  misc_RNA (1)...(19): siRNA sense strand
cauugcagcuccaggaaga

SEQ ID NO: 87267 - RNA, 19 nt, Homo sapiens
  misc_RNA (1)...(19): siRNA sense strand
ccaccaaguaccuauauga

SEQ ID NO: 87268 - RNA, 19 nt, Homo sapiens
  misc_RNA (1)...(19): siRNA sense strand
cuauaucacucuuguugug

SEQ ID NO: 87269 - RNA, 19 nt, Homo sapiens
  misc_RNA (1)...(19): siRNA sense strand
gaauacauggcuuggcauu

SEQ ID NO: 87270 - RNA, 19 nt, Homo sapiens
  misc_RNA (1)...(19): siRNA sense strand
gggcauggauguccucacu

SEQ ID NO: 87271 - RNA, 19 nt, Homo sapiens
  misc_RNA (1)...(19): siRNA sense strand
gcaccaaggaugaucuuuc

SEQ ID NO: 87272 - RNA, 19 nt, Homo sapiens
  misc_RNA (1)...(19): siRNA sense strand
aaacuaaccaagcgacuga

SEQ ID NO: 87273 - RNA, 19 nt, Homo sapiens
  misc_RNA (1)...(19): siRNA sense strand
ccaggaauuuguggagaaa

SEQ ID NO: 87274 - RNA, 19 nt, Homo sapiens
  misc_RNA (1)...(19): siRNA sense strand
gaaaagaucauugcugaga

SEQ ID NO: 87275 - RNA, 19 nt, Homo sapiens
  misc_RNA (1)...(19): siRNA sense strand
ugaaggaggcuggaauuga

SEQ ID NO: 87276 - RNA, 19 nt, Homo sapiens
  misc_RNA (1)...(19): siRNA sense strand
gaaggagaaccgugaacug

SEQ ID NO: 87277 - RNA, 19 nt, Homo sapiens
  misc_RNA (1)...(19): siRNA sense strand
aagaaggaguggaggaaga

SEQ ID NO: 87278 - RNA, 19 nt, Homo sapiens
  misc_RNA (1)...(19): siRNA sense strand
cuaucaagaucauccuuau

SEQ ID NO: 87279 - RNA, 19 nt, Homo sapiens
  misc_RNA (1)...(19): siRNA sense strand
ggaagauauugacgucucu

SEQ ID NO: 87280 - RNA, 19 nt, Homo sapiens
  misc_RNA (1)...(19): siRNA sense strand
aagauuggcuacuaugaca

SEQ ID NO: 87281 - RNA, 19 nt, Homo sapiens
  misc_RNA (1)...(19): siRNA sense strand
cagaguuucuucucagauc

SEQ ID NO: 87282 - RNA, 19 nt, Homo sapiens
  misc_RNA (1)...(19): siRNA sense strand
gaucuuuccugguccaaaa

SEQ ID NO: 87283 - RNA, 19 nt, Homo sapiens
  misc_RNA (1)...(19): siRNA sense strand
ucauugugcuuuccuaugg

SEQ ID NO: 87284 - RNA, 19 nt, Homo sapiens
  misc_RNA (1)...(19): siRNA sense strand
gcgcaggacaccaugaaga

SEQ ID NO: 87285 - RNA, 19 nt, Homo sapiens
  misc_RNA (1)...(19): siRNA sense strand
ugacaucccaggaauuugu

SEQ ID NO: 87286 - RNA, 19 nt, Homo sapiens
  misc_RNA (1)...(19): siRNA sense strand
cuacgacccuucuaucaac

SEQ ID NO: 87287 - RNA, 19 nt, Homo sapiens
  misc_RNA (1)...(19): siRNA sense strand
guacgucugguuccucauu

SEQ ID NO: 87288 - RNA, 19 nt, Homo sapiens
  misc_RNA (1)...(19): siRNA sense strand
cgaaucaucgugggacuuu

SEQ ID NO: 87289 - RNA, 19 nt, Homo sapiens
  misc_RNA (1)...(19): siRNA sense strand
gcgugaaacucuuugaaaa

SEQ ID NO: 87290 - RNA, 19 nt, Homo sapiens
  misc_RNA (1)...(19): siRNA sense strand
ggacuucaacuacaacaac

SEQ ID NO: 87291 - RNA, 19 nt, Homo sapiens
  misc_RNA (1)...(19): siRNA sense strand
ugcauuugcuuuauaagug

SEQ ID NO: 87292 - RNA, 19 nt, Homo sapiens
  misc_RNA (1)...(19): siRNA sense strand
caaggaggaaccuaaggaa

SEQ ID NO: 87293 - RNA, 19 nt, Homo sapiens
  misc_RNA (1)...(19): siRNA sense strand
gaccauuaccgaccaaauc

SEQ ID NO: 87294 - RNA, 19 nt, Homo sapiens
  misc_RNA (1)...(19): siRNA sense strand
gaggcuggaauugagauua

SEQ ID NO: 87295 - RNA, 19 nt, Homo sapiens
  misc_RNA (1)...(19): siRNA sense strand
gaugcagccuuugccuuug

SEQ ID NO: 87296 - RNA, 19 nt, Homo sapiens
  misc_RNA (1)...(19): siRNA sense strand
gggacauccugccggacua

SEQ ID NO: 87297 - RNA, 19 nt, Homo sapiens
  misc_RNA (1)...(19): siRNA sense strand
gaucuacgacccuucuauc

SEQ ID NO: 87298 - RNA, 19 nt, Homo sapiens
  misc_RNA (1)...(19): siRNA sense strand
gaagauuggcuacuaugac

SEQ ID NO: 87299 - RNA, 19 nt, Homo sapiens
  misc_RNA (1)...(19): siRNA sense strand
gccagaguuucuucucaga

SEQ ID NO: 87300 - RNA, 19 nt, Homo sapiens
  misc_RNA (1)...(19): siRNA sense strand
ccaaggaggaaccuaagga

SEQ ID NO: 87301 - RNA, 19 nt, Homo sapiens
  misc_RNA (1)...(19): siRNA sense strand
uggaggacuucaacuacaa

SEQ ID NO: 87302 - RNA, 19 nt, Homo sapiens
  misc_RNA (1)...(19): siRNA sense strand
ccgcagcauuuccaacaug

SEQ ID NO: 87303 - RNA, 19 nt, Homo sapiens
  misc_RNA (1)...(19): siRNA sense strand
ucucugaacugcgccauca

SEQ ID NO: 87304 - RNA, 19 nt, Homo sapiens
  misc_RNA (1)...(19): siRNA sense strand
acaacgacccuaucaagau

SEQ ID NO: 87305 - RNA, 19 nt, Homo sapiens
  misc_RNA (1)...(19): siRNA sense strand
ggagaaggagaaccgugaa

SEQ ID NO: 87306 - RNA, 19 nt, Homo sapiens
  misc_RNA (1)...(19): siRNA sense strand
auacauggcuuggcauuuu

SEQ ID NO: 87307 - RNA, 19 nt, Homo sapiens
  misc_RNA (1)...(19): siRNA sense strand
ucacaaagaaggaagaaaa

SEQ ID NO: 87308 - RNA, 19 nt, Homo sapiens
  misc_RNA (1)...(19): siRNA sense strand
ccuaucaagaucauccuua

SEQ ID NO: 87309 - RNA, 19 nt, Homo sapiens
  misc_RNA (1)...(19): siRNA sense strand
caaaucuaccgggcaauga

SEQ ID NO: 87310 - RNA, 19 nt, Homo sapiens
  misc_RNA (1)...(19): siRNA sense strand
ggaauuuguggagaaacua

SEQ ID NO: 87311 - RNA, 19 nt, Homo sapiens
  misc_RNA (1)...(19): siRNA sense strand
gacugaagcccggaaaguu

SEQ ID NO: 87312 - RNA, 19 nt, Homo sapiens
  misc_RNA (1)...(19): siRNA sense strand
gggcugcucacuggcuuua

SEQ ID NO: 87313 - RNA, 19 nt, Homo sapiens
  misc_RNA (1)...(19): siRNA sense strand
cuacaacgacccuaucaag

SEQ ID NO: 87314 - RNA, 19 nt, Homo sapiens
  misc_RNA (1)...(19): siRNA sense strand
gcucaccagcccugucaaa

SEQ ID NO: 87315 - RNA, 19 nt, Homo sapiens
  misc_RNA (1)...(19): siRNA sense strand
acaaggagcgucucuuugg

SEQ ID NO: 87316 - RNA, 19 nt, Homo sapiens
  misc_RNA (1)...(19): siRNA sense strand
ggaaccucauugugcuuuc

SEQ ID NO: 87317 - RNA, 19 nt, Homo sapiens
  misc_RNA (1)...(19): siRNA sense strand
gucgagugcauuugcuuua

SEQ ID NO: 87318 - RNA, 19 nt, Homo sapiens
  misc_RNA (1)...(19): siRNA sense strand
gaagauauugacgucucua

SEQ ID NO: 87319 - RNA, 19 nt, Homo sapiens
  misc_RNA (1)...(19): siRNA sense strand
ggccacaucacaacugaga

SEQ ID NO: 87320 - RNA, 19 nt, Homo sapiens
  misc_RNA (1)...(19): siRNA sense strand
gugguaugcugacaauugg

SEQ ID NO: 87321 - RNA, 19 nt, Homo sapiens
  misc_RNA (1)...(19): siRNA sense strand
caaagaaggaagaaaagaa

SEQ ID NO: 87322 - RNA, 19 nt, Homo sapiens
  misc_RNA (1)...(19): siRNA sense strand
ccuccuauaucacucuugu

SEQ ID NO: 87323 - RNA, 19 nt, Homo sapiens
  misc_RNA (1)...(19): siRNA sense strand
acugaagcccggaaaguuu

SEQ ID NO: 87324 - RNA, 19 nt, Homo sapiens
  misc_RNA (1)...(19): siRNA sense strand
gggugucucuggccaugug

SEQ ID NO: 87325 - RNA, 19 nt, Homo sapiens
  misc_RNA (1)...(19): siRNA sense strand
cccaggaauuuguggagaa

SEQ ID NO: 87326 - RNA, 19 nt, Homo sapiens
  misc_RNA (1)...(19): siRNA sense strand
ggaagaagauugcuaccau

SEQ ID NO: 87327 - RNA, 19 nt, Homo sapiens
  misc_RNA (1)...(19): siRNA sense strand
ccacugaggucuucacuuc

SEQ ID NO: 87328 - RNA, 19 nt, Homo sapiens
  misc_RNA (1)...(19): siRNA sense strand
gaaggaggcuggaauugag

SEQ ID NO: 87329 - RNA, 19 nt, Homo sapiens
  misc_RNA (1)...(19): siRNA sense strand
ccaggaagaugaauacaug

SEQ ID NO: 87330 - RNA, 19 nt, Homo sapiens
  misc_RNA (1)...(19): siRNA sense strand
gaaucuuccuugcuuauga

SEQ ID NO: 87331 - RNA, 19 nt, Homo sapiens
  misc_RNA (1)...(19): siRNA sense strand
ggagaaccgugaacuggaa

SEQ ID NO: 87332 - RNA, 19 nt, Homo sapiens
  misc_RNA (1)...(19): siRNA sense strand
gggcauggcuaucuacaau

SEQ ID NO: 87333 - RNA, 19 nt, Homo sapiens
  misc_RNA (1)...(19): siRNA sense strand
acaagaagauuggcuacua

SEQ ID NO: 87334 - RNA, 19 nt, Homo sapiens
  misc_RNA (1)...(19): siRNA sense strand
ccacugagaagaucaauga

SEQ ID NO: 87335 - RNA, 19 nt, Homo sapiens
  misc_RNA (1)...(19): siRNA sense strand
caagaagauuggcuacuau

SEQ ID NO: 87336 - RNA, 19 nt, Homo sapiens
  misc_RNA (1)...(19): siRNA sense strand
guacaaggagcgucucuuu

SEQ ID NO: 87337 - RNA, 19 nt, Homo sapiens
  misc_RNA (1)...(19): siRNA sense strand
gagugcauuugcuuuauaa

SEQ ID NO: 87338 - RNA, 19 nt, Homo sapiens
  misc_RNA (1)...(19): siRNA sense strand
gccaauacccgcagcauuu

SEQ ID NO: 87339 - RNA, 19 nt, Homo sapiens
  misc_RNA (1)...(19): siRNA sense strand
cgagugcauuugcuuuaua

SEQ ID NO: 87340 - RNA, 19 nt, Homo sapiens
  misc_RNA (1)...(19): siRNA sense strand
gcauuugcuuuauaaguga

SEQ ID NO: 87341 - RNA, 19 nt, Homo sapiens
  misc_RNA (1)...(19): siRNA sense strand
gcauggcuaucuacaaugu

SEQ ID NO: 87342 - RNA, 19 nt, Homo sapiens
  misc_RNA (1)...(19): siRNA sense strand
caacgacccuaucaagauc

SEQ ID NO: 87343 - RNA, 19 nt, Homo sapiens
  misc_RNA (1)...(19): siRNA sense strand
aaagaucauugcugagaaa

SEQ ID NO: 87344 - RNA, 19 nt, Homo sapiens
  misc_RNA (1)...(19): siRNA sense strand
ggaugcagccuuugccuuu

SEQ ID NO: 87345 - RNA, 19 nt, Homo sapiens
  misc_RNA (1)...(19): siRNA sense strand
gcacuggcccugaacaaga

SEQ ID NO: 87346 - RNA, 19 nt, Homo sapiens
  misc_RNA (1)...(19): siRNA sense strand
gauauugacgucucuauuc

SEQ ID NO: 87347 - RNA, 19 nt, Homo sapiens
  misc_RNA (1)...(19): siRNA sense strand
caacaugacaucccaggaa

SEQ ID NO: 87348 - RNA, 19 nt, Homo sapiens
  misc_RNA (1)...(19): siRNA sense strand
gaucauugcugagaaagag

SEQ ID NO: 87349 - RNA, 19 nt, Homo sapiens
  misc_RNA (1)...(19): siRNA sense strand
ggaggaaccuaaggaagau

SEQ ID NO: 87350 - RNA, 19 nt, Homo sapiens
  misc_RNA (1)...(19): siRNA sense strand
gggcuacgguuccauguuc

SEQ ID NO: 87351 - RNA, 19 nt, Homo sapiens
  misc_RNA (1)...(19): siRNA sense strand
acaauugguucaagaucua

SEQ ID NO: 87352 - RNA, 19 nt, Homo sapiens
  misc_RNA (1)...(19): siRNA sense strand
ggaagaaguacgucugguu

SEQ ID NO: 87353 - RNA, 19 nt, Homo sapiens
  misc_RNA (1)...(19): siRNA sense strand
gguggcagcuacaagaaga

SEQ ID NO: 87354 - RNA, 19 nt, Homo sapiens
  misc_RNA (1)...(19): siRNA sense strand
gacaauugguucaagaucu

SEQ ID NO: 87355 - RNA, 19 nt, Homo sapiens
  misc_RNA (1)...(19): siRNA sense strand
cggauggcauggacgcuua

SEQ ID NO: 87356 - RNA, 19 nt, Homo sapiens
  misc_RNA (1)...(19): siRNA sense strand
ggugguaugcugacaauug

SEQ ID NO: 87357 - RNA, 19 nt, Homo sapiens
  misc_RNA (1)...(19): siRNA sense strand
uacaacaaccagaccauua

SEQ ID NO: 87358 - RNA, 19 nt, Homo sapiens
  misc_RNA (1)...(19): siRNA sense strand
gcugacaauugguucaaga

SEQ ID NO: 87359 - RNA, 19 nt, Homo sapiens
  misc_RNA (1)...(19): siRNA sense strand
ccagcaggaugcagccuuu

SEQ ID NO: 87360 - RNA, 19 nt, Homo sapiens
  misc_RNA (1)...(19): siRNA sense strand
gcauggauguccucacucu

SEQ ID NO: 87361 - RNA, 19 nt, Homo sapiens
  misc_RNA (1)...(19): siRNA sense strand
gaauuuguggagaaacuaa

SEQ ID NO: 87362 - RNA, 19 nt, Homo sapiens
  misc_RNA (1)...(19): siRNA sense strand
ggagaagucccggcuguug

SEQ ID NO: 87363 - RNA, 19 nt, Homo sapiens
  misc_RNA (1)...(19): siRNA sense strand
gaaccuaaggaagauauug

SEQ ID NO: 87364 - RNA, 19 nt, Homo sapiens
  misc_RNA (1)...(19): siRNA sense strand
caugacaucccaggaauuu

SEQ ID NO: 87365 - RNA, 19 nt, Homo sapiens
  misc_RNA (1)...(19): siRNA sense strand
gcaguccugugccucauca

SEQ ID NO: 87366 - RNA, 19 nt, Homo sapiens
  misc_RNA (1)...(19): siRNA sense strand
cauugcagcuccaggaaga

SEQ ID NO: 87367 - RNA, 19 nt, Homo sapiens
  misc_RNA (1)...(19): siRNA sense strand
ccaccaaguaccuauauga

SEQ ID NO: 87368 - RNA, 19 nt, Homo sapiens
  misc_RNA (1)...(19): siRNA sense strand
cuauaucacucuuguugug

SEQ ID NO: 87369 - RNA, 19 nt, Homo sapiens
  misc_RNA (1)...(19): siRNA sense strand
gaauacauggcuuggcauu

SEQ ID NO: 87370 - RNA, 19 nt, Homo sapiens
  misc_RNA (1)...(19): siRNA sense strand
gggcauggauguccucacu

SEQ ID NO: 87371 - RNA, 19 nt, Homo sapiens
  misc_RNA (1)...(19): siRNA sense strand
gcaccaaggaugaucuuuc

SEQ ID NO: 87372 - RNA, 19 nt, Homo sapiens
  misc_RNA (1)...(19): siRNA sense strand
aaacuaaccaagcgacuga

SEQ ID NO: 87373 - RNA, 19 nt, Homo sapiens
  misc_RNA (1)...(19): siRNA sense strand
ccaggaauuuguggagaaa

SEQ ID NO: 87374 - RNA, 19 nt, Homo sapiens
  misc_RNA (1)...(19): siRNA sense strand
gaaaagaucauugcugaga

SEQ ID NO: 87375 - RNA, 19 nt, Homo sapiens
  misc_RNA (1)...(19): siRNA sense strand
ugaaggaggcuggaauuga

SEQ ID NO: 87376 - RNA, 19 nt, Homo sapiens
  misc_RNA (1)...(19): siRNA sense strand
gaaggagaaccgugaacug

SEQ ID NO: 87377 - RNA, 19 nt, Homo sapiens
  misc_RNA (1)...(19): siRNA sense strand
aagaaggaguggaggaaga

SEQ ID NO: 87378 - RNA, 19 nt, Homo sapiens
  misc_RNA (1)...(19): siRNA sense strand
cuaucaagaucauccuuau

SEQ ID NO: 87379 - RNA, 19 nt, Homo sapiens
  misc_RNA (1)...(19): siRNA sense strand
ggaagauauugacgucucu

SEQ ID NO: 87380 - RNA, 19 nt, Homo sapiens
  misc_RNA (1)...(19): siRNA sense strand
aagauuggcuacuaugaca

SEQ ID NO: 87381 - RNA, 19 nt, Homo sapiens
  misc_RNA (1)...(19): siRNA sense strand
cagaguuucuucucagauc

SEQ ID NO: 87382 - RNA, 19 nt, Homo sapiens
  misc_RNA (1)...(19): siRNA sense strand
gaucuuuccugguccaaaa

SEQ ID NO: 87383 - RNA, 19 nt, Homo sapiens
  misc_RNA (1)...(19): siRNA sense strand
ucauugugcuuuccuaugg

SEQ ID NO: 87384 - RNA, 19 nt, Homo sapiens
  misc_RNA (1)...(19): siRNA sense strand
gcgcaggacaccaugaaga

SEQ ID NO: 87385 - RNA, 19 nt, Homo sapiens
  misc_RNA (1)...(19): siRNA sense strand
ugacaucccaggaauuugu

SEQ ID NO: 87386 - RNA, 19 nt, Homo sapiens
  misc_RNA (1)...(19): siRNA sense strand
cuacgacccuucuaucaac

SEQ ID NO: 87387 - RNA, 19 nt, Homo sapiens
  misc_RNA (1)...(19): siRNA sense strand
guacgucugguuccucauu

SEQ ID NO: 87388 - RNA, 19 nt, Homo sapiens
  misc_RNA (1)...(19): siRNA sense strand
cgaaucaucgugggacuuu

SEQ ID NO: 87389 - RNA, 19 nt, Homo sapiens
  misc_RNA (1)...(19): siRNA sense strand
gcgugaaacucuuugaaaa

SEQ ID NO: 87390 - RNA, 19 nt, Homo sapiens
  misc_RNA (1)...(19): siRNA sense strand
ggacuucaacuacaacaac

SEQ ID NO: 87391 - RNA, 19 nt, Homo sapiens
  misc_RNA (1)...(19): siRNA sense strand
ugcauuugcuuuauaagug

SEQ ID NO: 87392 - RNA, 19 nt, Homo sapiens
  misc_RNA (1)...(19): siRNA sense strand
caaggaggaaccuaaggaa

SEQ ID NO: 87393 - RNA, 19 nt, Homo sapiens
  misc_RNA (1)...(19): siRNA sense strand
gaccauuaccgaccaaauc

SEQ ID NO: 87394 - RNA, 19 nt, Homo sapiens
  misc_RNA (1)...(19): siRNA sense strand
gaggcuggaauugagauua

SEQ ID NO: 87395 - RNA, 19 nt, Homo sapiens
  misc_RNA (1)...(19): siRNA sense strand
gaugcagccuuugccuuug

SEQ ID NO: 87396 - RNA, 19 nt, Homo sapiens
  misc_RNA (1)...(19): siRNA sense strand
gggacauccugccggacua

SEQ ID NO: 87397 - RNA, 19 nt, Homo sapiens
  misc_RNA (1)...(19): siRNA sense strand
gaucuacgacccuucuauc

SEQ ID NO: 87398 - RNA, 19 nt, Homo sapiens
  misc_RNA (1)...(19): siRNA sense strand
gaagauuggcuacuaugac

SEQ ID NO: 87399 - RNA, 19 nt, Homo sapiens
  misc_RNA (1)...(19): siRNA sense strand
gccagaguuucuucucaga

SEQ ID NO: 87400 - RNA, 19 nt, Homo sapiens
  misc_RNA (1)...(19): siRNA sense strand
ccaaggaggaaccuaagga

SEQ ID NO: 87401 - RNA, 19 nt, Homo sapiens
  misc_RNA (1)...(19): siRNA sense strand
uggaggacuucaacuacaa

SEQ ID NO: 87402 - RNA, 19 nt, Homo sapiens
  misc_RNA (1)...(19): siRNA sense strand
ccgcagcauuuccaacaug

SEQ ID NO: 87403 - RNA, 19 nt, Homo sapiens
  misc_RNA (1)...(19): siRNA sense strand
ucucugaacugcgccauca

SEQ ID NO: 87404 - RNA, 19 nt, Homo sapiens
  misc_RNA (1)...(19): siRNA sense strand
acaacgacccuaucaagau

SEQ ID NO: 87405 - RNA, 19 nt, Homo sapiens
  misc_RNA (1)...(19): siRNA sense strand
ggagaaggagaaccgugaa

SEQ ID NO: 87406 - RNA, 19 nt, Homo sapiens
  misc_RNA (1)...(19): siRNA sense strand
auacauggcuuggcauuuu

SEQ ID NO: 87407 - RNA, 19 nt, Homo sapiens
  misc_RNA (1)...(19): siRNA sense strand
ucacaaagaaggaagaaaa

SEQ ID NO: 87408 - RNA, 19 nt, Homo sapiens
  misc_RNA (1)...(19): siRNA sense strand
ccuaucaagaucauccuua

SEQ ID NO: 87409 - RNA, 19 nt, Homo sapiens
  misc_RNA (1)...(19): siRNA sense strand
caaaucuaccgggcaauga

SEQ ID NO: 87410 - RNA, 19 nt, Homo sapiens
  misc_RNA (1)...(19): siRNA sense strand
ggaauuuguggagaaacua

SEQ ID NO: 87411 - RNA, 19 nt, Homo sapiens
  misc_RNA (1)...(19): siRNA sense strand
gacugaagcccggaaaguu

SEQ ID NO: 87412 - RNA, 19 nt, Homo sapiens
  misc_RNA (1)...(19): siRNA sense strand
gggcugcucacuggcuuua

SEQ ID NO: 87413 - RNA, 19 nt, Homo sapiens
  misc_RNA (1)...(19): siRNA sense strand
cuacaacgacccuaucaag

SEQ ID NO: 87414 - RNA, 19 nt, Homo sapiens
  misc_RNA (1)...(19): siRNA sense strand
gcucaccagcccugucaaa

SEQ ID NO: 87415 - RNA, 19 nt, Homo sapiens
  misc_RNA (1)...(19): siRNA sense strand
acaaggagcgucucuuugg

SEQ ID NO: 87416 - RNA, 19 nt, Homo sapiens
  misc_RNA (1)...(19): siRNA sense strand
ggaaccucauugugcuuuc

SEQ ID NO: 87417 - RNA, 19 nt, Homo sapiens
  misc_RNA (1)...(19): siRNA sense strand
gucgagugcauuugcuuua

SEQ ID NO: 87418 - RNA, 19 nt, Homo sapiens
  misc_RNA (1)...(19): siRNA sense strand
gaagauauugacgucucua

SEQ ID NO: 87419 - RNA, 19 nt, Homo sapiens
  misc_RNA (1)...(19): siRNA sense strand
ggccacaucacaacugaga

SEQ ID NO: 87420 - RNA, 19 nt, Homo sapiens
  misc_RNA (1)...(19): siRNA sense strand
gugguaugcugacaauugg

SEQ ID NO: 87421 - RNA, 19 nt, Homo sapiens
  misc_RNA (1)...(19): siRNA sense strand
caaagaaggaagaaaagaa

SEQ ID NO: 87422 - RNA, 19 nt, Homo sapiens
  misc_RNA (1)...(19): siRNA sense strand
ccuccuauaucacucuugu

SEQ ID NO: 87423 - RNA, 19 nt, Homo sapiens
  misc_RNA (1)...(19): siRNA sense strand
acugaagcccggaaaguuu

SEQ ID NO: 87424 - RNA, 19 nt, Homo sapiens
  misc_RNA (1)...(19): siRNA sense strand
gggugucucuggccaugug

SEQ ID NO: 87425 - RNA, 19 nt, Homo sapiens
  misc_RNA (1)...(19): siRNA sense strand
cccaggaauuuguggagaa

SEQ ID NO: 87426 - RNA, 19 nt, Homo sapiens
  misc_RNA (1)...(19): siRNA sense strand
ggaagaagauugcuaccau

SEQ ID NO: 87427 - RNA, 19 nt, Homo sapiens
  misc_RNA (1)...(19): siRNA sense strand
ccacugaggucuucacuuc

SEQ ID NO: 87428 - RNA, 19 nt, Homo sapiens
  misc_RNA (1)...(19): siRNA sense strand
gaaggaggcuggaauugag

SEQ ID NO: 87429 - RNA, 19 nt, Homo sapiens
  misc_RNA (1)...(19): siRNA sense strand
acaagaagauuggcuacua

SEQ ID NO: 87430 - RNA, 19 nt, Homo sapiens
  misc_RNA (1)...(19): siRNA sense strand
caagaagauuggcuacuau

SEQ ID NO: 87431 - RNA, 19 nt, Homo sapiens
  misc_RNA (1)...(19): siRNA sense strand
guacaaggagcgucucuuu

SEQ ID NO: 87432 - RNA, 19 nt, Homo sapiens
  misc_RNA (1)...(19): siRNA sense strand
gccaauacccgcagcauuu

SEQ ID NO: 87433 - RNA, 19 nt, Homo sapiens
  misc_RNA (1)...(19): siRNA sense strand
caacgacccuaucaagauc

SEQ ID NO: 87434 - RNA, 19 nt, Homo sapiens
  misc_RNA (1)...(19): siRNA sense strand
gcacuggcccugaacaaga

SEQ ID NO: 87435 - RNA, 19 nt, Homo sapiens
  misc_RNA (1)...(19): siRNA sense strand
caacaugacaucccaggaa

SEQ ID NO: 87436 - RNA, 19 nt, Homo sapiens
  misc_RNA (1)...(19): siRNA sense strand
acaauugguucaagaucua

SEQ ID NO: 87437 - RNA, 19 nt, Homo sapiens
  misc_RNA (1)...(19): siRNA sense strand
ggaagaaguacgucugguu

SEQ ID NO: 87438 - RNA, 19 nt, Homo sapiens
  misc_RNA (1)...(19): siRNA sense strand
gguggcagcuacaagaaga

SEQ ID NO: 87439 - RNA, 19 nt, Homo sapiens
  misc_RNA (1)...(19): siRNA sense strand
gacaauugguucaagaucu

SEQ ID NO: 87440 - RNA, 19 nt, Homo sapiens
  misc_RNA (1)...(19): siRNA sense strand
cggauggcauggacgcuua

SEQ ID NO: 87441 - RNA, 19 nt, Homo sapiens
  misc_RNA (1)...(19): siRNA sense strand
ggugguaugcugacaauug

SEQ ID NO: 87442 - RNA, 19 nt, Homo sapiens
  misc_RNA (1)...(19): siRNA sense strand
uacaacaaccagaccauua

SEQ ID NO: 87443 - RNA, 19 nt, Homo sapiens
  misc_RNA (1)...(19): siRNA sense strand
gcugacaauugguucaaga

SEQ ID NO: 87444 - RNA, 19 nt, Homo sapiens
  misc_RNA (1)...(19): siRNA sense strand
gaauuuguggagaaacuaa

SEQ ID NO: 87445 - RNA, 19 nt, Homo sapiens
  misc_RNA (1)...(19): siRNA sense strand
caugacaucccaggaauuu

SEQ ID NO: 87446 - RNA, 19 nt, Homo sapiens
  misc_RNA (1)...(19): siRNA sense strand
ccaccaaguaccuauauga

SEQ ID NO: 87447 - RNA, 19 nt, Homo sapiens
  misc_RNA (1)...(19): siRNA sense strand
gcaccaaggaugaucuuuc

SEQ ID NO: 87448 - RNA, 19 nt, Homo sapiens
  misc_RNA (1)...(19): siRNA sense strand
aaacuaaccaagcgacuga

SEQ ID NO: 87449 - RNA, 19 nt, Homo sapiens
  misc_RNA (1)...(19): siRNA sense strand
ccaggaauuuguggagaaa

SEQ ID NO: 87450 - RNA, 19 nt, Homo sapiens
  misc_RNA (1)...(19): siRNA sense strand
ugaaggaggcuggaauuga

SEQ ID NO: 87451 - RNA, 19 nt, Homo sapiens
  misc_RNA (1)...(19): siRNA sense strand
cuaucaagaucauccuuau

SEQ ID NO: 87452 - RNA, 19 nt, Homo sapiens
  misc_RNA (1)...(19): siRNA sense strand
aagauuggcuacuaugaca

SEQ ID NO: 87453 - RNA, 19 nt, Homo sapiens
  misc_RNA (1)...(19): siRNA sense strand
cagaguuucuucucagauc

SEQ ID NO: 87454 - RNA, 19 nt, Homo sapiens
  misc_RNA (1)...(19): siRNA sense strand
gaucuuuccugguccaaaa

SEQ ID NO: 87455 - RNA, 19 nt, Homo sapiens
  misc_RNA (1)...(19): siRNA sense strand
ucauugugcuuuccuaugg

SEQ ID NO: 87456 - RNA, 19 nt, Homo sapiens
  misc_RNA (1)...(19): siRNA sense strand
ugacaucccaggaauuugu

SEQ ID NO: 87457 - RNA, 19 nt, Homo sapiens
  misc_RNA (1)...(19): siRNA sense strand
cuacgacccuucuaucaac

SEQ ID NO: 87458 - RNA, 19 nt, Homo sapiens
  misc_RNA (1)...(19): siRNA sense strand
guacgucugguuccucauu

SEQ ID NO: 87459 - RNA, 19 nt, Homo sapiens
  misc_RNA (1)...(19): siRNA sense strand
cgaaucaucgugggacuuu

SEQ ID NO: 87460 - RNA, 19 nt, Homo sapiens
  misc_RNA (1)...(19): siRNA sense strand
gcgugaaacucuuugaaaa

SEQ ID NO: 87461 - RNA, 19 nt, Homo sapiens
  misc_RNA (1)...(19): siRNA sense strand
ggacuucaacuacaacaac

SEQ ID NO: 87462 - RNA, 19 nt, Homo sapiens
  misc_RNA (1)...(19): siRNA sense strand
gaccauuaccgaccaaauc

SEQ ID NO: 87463 - RNA, 19 nt, Homo sapiens
  misc_RNA (1)...(19): siRNA sense strand
gaggcuggaauugagauua

SEQ ID NO: 87464 - RNA, 19 nt, Homo sapiens
  misc_RNA (1)...(19): siRNA sense strand
gggacauccugccggacua

SEQ ID NO: 87465 - RNA, 19 nt, Homo sapiens
  misc_RNA (1)...(19): siRNA sense strand
gaucuacgacccuucuauc

SEQ ID NO: 87466 - RNA, 19 nt, Homo sapiens
  misc_RNA (1)...(19): siRNA sense strand
gaagauuggcuacuaugac

SEQ ID NO: 87467 - RNA, 19 nt, Homo sapiens
  misc_RNA (1)...(19): siRNA sense strand
gccagaguuucuucucaga

SEQ ID NO: 87468 - RNA, 19 nt, Homo sapiens
  misc_RNA (1)...(19): siRNA sense strand
uggaggacuucaacuacaa

SEQ ID NO: 87469 - RNA, 19 nt, Homo sapiens
  misc_RNA (1)...(19): siRNA sense strand
acaacgacccuaucaagau

SEQ ID NO: 87470 - RNA, 19 nt, Homo sapiens
  misc_RNA (1)...(19): siRNA sense strand
caaaucuaccgggcaauga

SEQ ID NO: 87471 - RNA, 19 nt, Homo sapiens
  misc_RNA (1)...(19): siRNA sense strand
ggaauuuguggagaaacua

SEQ ID NO: 87472 - RNA, 19 nt, Homo sapiens
  misc_RNA (1)...(19): siRNA sense strand
ccgcagcauuuccaacaug

SEQ ID NO: 87473 - RNA, 19 nt, Homo sapiens
  misc_RNA (1)...(19): siRNA sense strand
ccuaucaagaucauccuua

SEQ ID NO: 87474 - RNA, 19 nt, Homo sapiens
  misc_RNA (1)...(19): siRNA sense strand
cuacaacgacccuaucaag

SEQ ID NO: 87475 - RNA, 19 nt, Homo sapiens
  misc_RNA (1)...(19): siRNA sense strand
acaaggagcgucucuuugg

SEQ ID NO: 87476 - RNA, 19 nt, Homo sapiens
  misc_RNA (1)...(19): siRNA sense strand
gacugaagcccggaaaguu

SEQ ID NO: 87477 - RNA, 19 nt, Homo sapiens
  misc_RNA (1)...(19): siRNA sense strand
gcucaccagcccugucaaa

SEQ ID NO: 87478 - RNA, 19 nt, Homo sapiens
  misc_RNA (1)...(19): siRNA sense strand
ggaaccucauugugcuuuc

SEQ ID NO: 87479 - RNA, 19 nt, Homo sapiens
  misc_RNA (1)...(19): siRNA sense strand
ggccacaucacaacugaga

SEQ ID NO: 87480 - RNA, 19 nt, Homo sapiens
  misc_RNA (1)...(19): siRNA sense strand
gugguaugcugacaauugg

SEQ ID NO: 87481 - RNA, 19 nt, Homo sapiens
  misc_RNA (1)...(19): siRNA sense strand
ggauguggaaccucauugu

SEQ ID NO: 87482 - RNA, 19 nt, Homo sapiens
  misc_RNA (1)...(19): siRNA sense strand
gggugucucuggccaugug

SEQ ID NO: 87483 - RNA, 19 nt, Homo sapiens
  misc_RNA (1)...(19): siRNA sense strand
cccaggaauuuguggagaa

SEQ ID NO: 87484 - RNA, 19 nt, Homo sapiens
  misc_RNA (1)...(19): siRNA sense strand
acugaagcccggaaaguuu

SEQ ID NO: 87485 - RNA, 19 nt, Homo sapiens
  misc_RNA (1)...(19): siRNA sense strand
guacaucggggcacuguuu

SEQ ID NO: 87486 - RNA, 19 nt, Homo sapiens
  misc_RNA (1)...(19): siRNA sense strand
gguaugcugacaauugguu

SEQ ID NO: 87487 - RNA, 19 nt, Homo sapiens
  misc_RNA (1)...(19): siRNA sense strand
ccaaaucuaccgggcaaug

SEQ ID NO: 87488 - RNA, 19 nt, Homo sapiens
  misc_RNA (1)...(19): siRNA sense strand
gauguggaaccucauugug

SEQ ID NO: 87489 - RNA, 19 nt, Homo sapiens
  misc_RNA (1)...(19): siRNA sense strand
caccaaggaugaucuuucc

SEQ ID NO: 87490 - RNA, 19 nt, Homo sapiens
  misc_RNA (1)...(19): siRNA sense strand
cgcagcauuuccaacauga

SEQ ID NO: 87491 - RNA, 19 nt, Homo sapiens
  misc_RNA (1)...(19): siRNA sense strand
uuacuuuccgccagaguuu

SEQ ID NO: 87492 - RNA, 19 nt, Homo sapiens
  misc_RNA (1)...(19): siRNA sense strand
aacaugacaucccaggaau

SEQ ID NO: 87493 - RNA, 19 nt, Homo sapiens
  misc_RNA (1)...(19): siRNA sense strand
caagaucuacgacccuucu

SEQ ID NO: 87494 - RNA, 19 nt, Homo sapiens
  misc_RNA (1)...(19): siRNA sense strand
ggacauccugccggacuau

SEQ ID NO: 87495 - RNA, 19 nt, Homo sapiens
  misc_RNA (1)...(19): siRNA sense strand
caacccuacccgcgugaaa

SEQ ID NO: 87496 - RNA, 19 nt, Homo sapiens
  misc_RNA (1)...(19): siRNA sense strand
gcagcuacaagaagauugg

SEQ ID NO: 87497 - RNA, 19 nt, Homo sapiens
  misc_RNA (1)...(19): siRNA sense strand
caggguggcagcuacaaga

SEQ ID NO: 87498 - RNA, 19 nt, Homo sapiens
  misc_RNA (1)...(19): siRNA sense strand
gcaccgcuggccuaugaug

SEQ ID NO: 87499 - RNA, 19 nt, Homo sapiens
  misc_RNA (1)...(19): siRNA sense strand
gaaaaguggggcuggaaga

SEQ ID NO: 87500 - RNA, 19 nt, Homo sapiens
  misc_RNA (1)...(19): siRNA sense strand
ccgccagaguuucuucuca

SEQ ID NO: 87501 - RNA, 19 nt, Homo sapiens
  misc_RNA (1)...(19): siRNA sense strand
agaagauuggcuacuauga

SEQ ID NO: 87502 - RNA, 19 nt, Homo sapiens
  misc_RNA (1)...(19): siRNA sense strand
acugaggucuucacuucga

SEQ ID NO: 87503 - RNA, 19 nt, Homo sapiens
  misc_RNA (1)...(19): siRNA sense strand
cuacaacaaccagaccauu

SEQ ID NO: 87504 - RNA, 19 nt, Homo sapiens
  misc_RNA (1)...(19): siRNA sense strand
cuggaggacuucaacuaca

SEQ ID NO: 87505 - RNA, 19 nt, Homo sapiens
  misc_RNA (1)...(19): siRNA sense strand
gccuggaggacuucaacua

SEQ ID NO: 87506 - RNA, 19 nt, Homo sapiens
  misc_RNA (1)...(19): siRNA sense strand
uacaacgacccuaucaaga

SEQ ID NO: 87507 - RNA, 19 nt, Homo sapiens
  misc_RNA (1)...(19): siRNA sense strand
ccauccagcagaccacuga

SEQ ID NO: 87508 - RNA, 19 nt, Homo sapiens
  misc_RNA (1)...(19): siRNA sense strand
ccaauacccgcagcauuuc

SEQ ID NO: 87509 - RNA, 19 nt, Homo sapiens
  misc_RNA (1)...(19): siRNA sense strand
gccaccaaguaccuauaug

SEQ ID NO: 87510 - RNA, 19 nt, Homo sapiens
  misc_RNA (1)...(19): siRNA sense strand
cgcgugaaacucuuugaaa

SEQ ID NO: 87511 - RNA, 19 nt, Homo sapiens
  misc_RNA (1)...(19): siRNA sense strand
ggccaugugguguuugaug

SEQ ID NO: 87512 - RNA, 19 nt, Homo sapiens
  misc_RNA (1)...(19): siRNA sense strand
gcauuuccaacaugacauc

SEQ ID NO: 87513 - RNA, 19 nt, Homo sapiens
  misc_RNA (1)...(19): siRNA sense strand
gcacaguggaugagaugac

SEQ ID NO: 87514 - RNA, 19 nt, Homo sapiens
  misc_RNA (1)...(19): siRNA sense strand
gagugaaggaggcuggaau

SEQ ID NO: 87515 - RNA, 19 nt, Homo sapiens
  misc_RNA (1)...(19): siRNA sense strand
caggccaagccaccaagua

SEQ ID NO: 87516 - RNA, 19 nt, Homo sapiens
  misc_RNA (1)...(19): siRNA sense strand
aaaucuaccgggcaaugaa

SEQ ID NO: 87517 - RNA, 19 nt, Homo sapiens
  misc_RNA (1)...(19): siRNA sense strand
gaaccucauugugcuuucc

SEQ ID NO: 87518 - RNA, 19 nt, Homo sapiens
  misc_RNA (1)...(19): siRNA sense strand
gaaaagcaaucacaguguu

SEQ ID NO: 87519 - RNA, 19 nt, Homo sapiens
  misc_RNA (1)...(19): siRNA sense strand
cguagagccuccugaaaug

SEQ ID NO: 87520 - RNA, 19 nt, Homo sapiens
  misc_RNA (1)...(19): siRNA sense strand
cgaggaagaucgaccuauc

SEQ ID NO: 87521 - RNA, 19 nt, Homo sapiens
  misc_RNA (1)...(19): siRNA sense strand
gaaaacgccugaagaaggu

SEQ ID NO: 87522 - RNA, 19 nt, Homo sapiens
  misc_RNA (1)...(19): siRNA sense strand
gagauggacccgccaaauc

SEQ ID NO: 87523 - RNA, 19 nt, Homo sapiens
  misc_RNA (1)...(19): siRNA sense strand
gggagcaucugcaggucaa

SEQ ID NO: 87524 - RNA, 19 nt, Homo sapiens
  misc_RNA (1)...(19): siRNA sense strand
gaaaugauugggccuaugc

SEQ ID NO: 87525 - RNA, 19 nt, Homo sapiens
  misc_RNA (1)...(19): siRNA sense strand
ugaagaaggugaaaagcaa

SEQ ID NO: 87526 - RNA, 19 nt, Homo sapiens
  misc_RNA (1)...(19): siRNA sense strand
ggagauggacccgccaaau

SEQ ID NO: 87527 - RNA, 19 nt, Homo sapiens
  misc_RNA (1)...(19): siRNA sense strand
gaccaagacgcuacguaga

SEQ ID NO: 87528 - RNA, 19 nt, Homo sapiens
  misc_RNA (1)...(19): siRNA sense strand
ggaaccagcaacaccugaa

SEQ ID NO: 87529 - RNA, 19 nt, Homo sapiens
  misc_RNA (1)...(19): siRNA sense strand
ggcccgagcaguucaguga

SEQ ID NO: 87530 - RNA, 19 nt, Homo sapiens
  misc_RNA (1)...(19): siRNA sense strand
guagagccuccugaaauga

SEQ ID NO: 87531 - RNA, 19 nt, Homo sapiens
  misc_RNA (1)...(19): siRNA sense strand
ugaaaugauugggccuaug

SEQ ID NO: 87532 - RNA, 19 nt, Homo sapiens
  misc_RNA (1)...(19): siRNA sense strand
ccgagcaguucagugauga

SEQ ID NO: 87533 - RNA, 19 nt, Homo sapiens
  misc_RNA (1)...(19): siRNA sense strand
cuacguagagccuccugaa

SEQ ID NO: 87534 - RNA, 19 nt, Homo sapiens
  misc_RNA (1)...(19): siRNA sense strand
aaagcaaucacaguguuaa

SEQ ID NO: 87535 - RNA, 19 nt, Homo sapiens
  misc_RNA (1)...(19): siRNA sense strand
gaaccagcaacaccugaag

SEQ ID NO: 87536 - RNA, 19 nt, Homo sapiens
  misc_RNA (1)...(19): siRNA sense strand
gugugaagaugguccugau

SEQ ID NO: 87537 - RNA, 19 nt, Homo sapiens
  misc_RNA (1)...(19): siRNA sense strand
ggugaaaacgccugaagaa

SEQ ID NO: 87538 - RNA, 19 nt, Homo sapiens
  misc_RNA (1)...(19): siRNA sense strand
agagccuccugaaaugauu

SEQ ID NO: 87539 - RNA, 19 nt, Homo sapiens
  misc_RNA (1)...(19): siRNA sense strand
ggaaccagcaacucaacgu

SEQ ID NO: 87540 - RNA, 19 nt, Homo sapiens
  misc_RNA (1)...(19): siRNA sense strand
cccgagcaguucagugaug

SEQ ID NO: 87541 - RNA, 19 nt, Homo sapiens
  misc_RNA (1)...(19): siRNA sense strand
acguagagccuccugaaau

SEQ ID NO: 87542 - RNA, 19 nt, Homo sapiens
  misc_RNA (1)...(19): siRNA sense strand
ugaaguggaaccagcaaca

SEQ ID NO: 87543 - RNA, 19 nt, Homo sapiens
  misc_RNA (1)...(19): siRNA sense strand
agacugggugugaguguga

SEQ ID NO: 87544 - RNA, 19 nt, Homo sapiens
  misc_RNA (1)...(19): siRNA sense strand
caaauccagaggaggugaa

SEQ ID NO: 87545 - RNA, 19 nt, Homo sapiens
  misc_RNA (1)...(19): siRNA sense strand
gaagaucgaccuauuauug

SEQ ID NO: 87546 - RNA, 19 nt, Homo sapiens
  misc_RNA (1)...(19): siRNA sense strand
cgaggaagaucgaccuauu

SEQ ID NO: 87547 - RNA, 19 nt, Homo sapiens
  misc_RNA (1)...(19): siRNA sense strand
gaggaagaucgaccuauua

SEQ ID NO: 87548 - RNA, 19 nt, Homo sapiens
  misc_RNA (1)...(19): siRNA sense strand
gaaaagcaaucacaguguu

SEQ ID NO: 87549 - RNA, 19 nt, Homo sapiens
  misc_RNA (1)...(19): siRNA sense strand
gaaaacgccugaagaaggu

SEQ ID NO: 87550 - RNA, 19 nt, Homo sapiens
  misc_RNA (1)...(19): siRNA sense strand
gagauggacccgccaaauc

SEQ ID NO: 87551 - RNA, 19 nt, Homo sapiens
  misc_RNA (1)...(19): siRNA sense strand
gggagcaucugcaggucaa

SEQ ID NO: 87552 - RNA, 19 nt, Homo sapiens
  misc_RNA (1)...(19): siRNA sense strand
ggaagaucgaccuauuauu

SEQ ID NO: 87553 - RNA, 19 nt, Homo sapiens
  misc_RNA (1)...(19): siRNA sense strand
ugaagaaggugaaaagcaa

SEQ ID NO: 87554 - RNA, 19 nt, Homo sapiens
  misc_RNA (1)...(19): siRNA sense strand
ggagauggacccgccaaau

SEQ ID NO: 87555 - RNA, 19 nt, Homo sapiens
  misc_RNA (1)...(19): siRNA sense strand
gaccaaggcgcuauguaca

SEQ ID NO: 87556 - RNA, 19 nt, Homo sapiens
  misc_RNA (1)...(19): siRNA sense strand
ggaaccagcaacaccugaa

SEQ ID NO: 87557 - RNA, 19 nt, Homo sapiens
  misc_RNA (1)...(19): siRNA sense strand
ggcccgagcaguucaguga

SEQ ID NO: 87558 - RNA, 19 nt, Homo sapiens
  misc_RNA (1)...(19): siRNA sense strand
ccgagcaguucagugauga

SEQ ID NO: 87559 - RNA, 19 nt, Homo sapiens
  misc_RNA (1)...(19): siRNA sense strand
gaaccagcaacaccugaag

SEQ ID NO: 87560 - RNA, 19 nt, Homo sapiens
  misc_RNA (1)...(19): siRNA sense strand
aaagcaaucacaguguuaa

SEQ ID NO: 87561 - RNA, 19 nt, Homo sapiens
  misc_RNA (1)...(19): siRNA sense strand
gugugaagaugguccugau

SEQ ID NO: 87562 - RNA, 19 nt, Homo sapiens
  misc_RNA (1)...(19): siRNA sense strand
aggaagaucgaccuauuau

SEQ ID NO: 87563 - RNA, 19 nt, Homo sapiens
  misc_RNA (1)...(19): siRNA sense strand
ggugaaaacgccugaagaa

SEQ ID NO: 87564 - RNA, 19 nt, Homo sapiens
  misc_RNA (1)...(19): siRNA sense strand
ggaaccagcaacucaacgu

SEQ ID NO: 87565 - RNA, 19 nt, Homo sapiens
  misc_RNA (1)...(19): siRNA sense strand
ugaaguggaaccagcaaca

SEQ ID NO: 87566 - RNA, 19 nt, Homo sapiens
  misc_RNA (1)...(19): siRNA sense strand
gaccuauuauuggccuaga

SEQ ID NO: 87567 - RNA, 19 nt, Homo sapiens
  misc_RNA (1)...(19): siRNA sense strand
cccgagcaguucagugaug

SEQ ID NO: 87568 - RNA, 19 nt, Homo sapiens
  misc_RNA (1)...(19): siRNA sense strand
agacugggugugaguguga

SEQ ID NO: 87569 - RNA, 19 nt, Homo sapiens
  misc_RNA (1)...(19): siRNA sense strand
caaauccagaggaggugaa

SEQ ID NO: 87570 - RNA, 19 nt, Homo sapiens
  misc_RNA (1)...(19): siRNA sense strand
agaccaaggcgcuauguac

SEQ ID NO: 87571 - RNA, 19 nt, Homo sapiens
  misc_RNA (1)...(19): siRNA sense strand
gaagaucgaccuauuauug

SEQ ID NO: 87572 - RNA, 19 nt, Homo sapiens
  misc_RNA (1)...(19): siRNA sense strand
cgaggaagaucgaccuauu

SEQ ID NO: 87573 - RNA, 19 nt, Homo sapiens
  misc_RNA (1)...(19): siRNA sense strand
gaggaagaucgaccuauua

SEQ ID NO: 87574 - RNA, 19 nt, Homo sapiens
  misc_RNA (1)...(19): siRNA sense strand
gaaaagcaaucacaguguu

SEQ ID NO: 87575 - RNA, 19 nt, Homo sapiens
  misc_RNA (1)...(19): siRNA sense strand
gaaaacgccugaagaaggu

SEQ ID NO: 87576 - RNA, 19 nt, Homo sapiens
  misc_RNA (1)...(19): siRNA sense strand
gagauggacccgccaaauc

SEQ ID NO: 87577 - RNA, 19 nt, Homo sapiens
  misc_RNA (1)...(19): siRNA sense strand
gggagcaucugcaggucaa

SEQ ID NO: 87578 - RNA, 19 nt, Homo sapiens
  misc_RNA (1)...(19): siRNA sense strand
ggaagaucgaccuauuauu

SEQ ID NO: 87579 - RNA, 19 nt, Homo sapiens
  misc_RNA (1)...(19): siRNA sense strand
ugaagaaggugaaaagcaa

SEQ ID NO: 87580 - RNA, 19 nt, Homo sapiens
  misc_RNA (1)...(19): siRNA sense strand
ggagauggacccgccaaau

SEQ ID NO: 87581 - RNA, 19 nt, Homo sapiens
  misc_RNA (1)...(19): siRNA sense strand
gaccaaggcgcuauguaca

SEQ ID NO: 87582 - RNA, 19 nt, Homo sapiens
  misc_RNA (1)...(19): siRNA sense strand
ggaaccagcaacaccugaa

SEQ ID NO: 87583 - RNA, 19 nt, Homo sapiens
  misc_RNA (1)...(19): siRNA sense strand
ggcccgagcaguucaguga

SEQ ID NO: 87584 - RNA, 19 nt, Homo sapiens
  misc_RNA (1)...(19): siRNA sense strand
ccgagcaguucagugauga

SEQ ID NO: 87585 - RNA, 19 nt, Homo sapiens
  misc_RNA (1)...(19): siRNA sense strand
gaaccagcaacaccugaag

SEQ ID NO: 87586 - RNA, 19 nt, Homo sapiens
  misc_RNA (1)...(19): siRNA sense strand
aaagcaaucacaguguuaa

SEQ ID NO: 87587 - RNA, 19 nt, Homo sapiens
  misc_RNA (1)...(19): siRNA sense strand
gugugaagaugguccugau

SEQ ID NO: 87588 - RNA, 19 nt, Homo sapiens
  misc_RNA (1)...(19): siRNA sense strand
aggaagaucgaccuauuau

SEQ ID NO: 87589 - RNA, 19 nt, Homo sapiens
  misc_RNA (1)...(19): siRNA sense strand
ggugaaaacgccugaagaa

SEQ ID NO: 87590 - RNA, 19 nt, Homo sapiens
  misc_RNA (1)...(19): siRNA sense strand
ggaaccagcaacucaacgu

SEQ ID NO: 87591 - RNA, 19 nt, Homo sapiens
  misc_RNA (1)...(19): siRNA sense strand
ugaaguggaaccagcaaca

SEQ ID NO: 87592 - RNA, 19 nt, Homo sapiens
  misc_RNA (1)...(19): siRNA sense strand
gaccuauuauuggccuaga

SEQ ID NO: 87593 - RNA, 19 nt, Homo sapiens
  misc_RNA (1)...(19): siRNA sense strand
cccgagcaguucagugaug

SEQ ID NO: 87594 - RNA, 19 nt, Homo sapiens
  misc_RNA (1)...(19): siRNA sense strand
agacugggugugaguguga

SEQ ID NO: 87595 - RNA, 19 nt, Homo sapiens
  misc_RNA (1)...(19): siRNA sense strand
caaauccagaggaggugaa

SEQ ID NO: 87596 - RNA, 19 nt, Homo sapiens
  misc_RNA (1)...(19): siRNA sense strand
agaccaaggcgcuauguac

SEQ ID NO: 87597 - RNA, 19 nt, Homo sapiens
  misc_RNA (1)...(19): siRNA sense strand
gaagaucgaccuauuauug

SEQ ID NO: 87598 - RNA, 19 nt, Homo sapiens
  misc_RNA (1)...(19): siRNA sense strand
cgaggaagaucgaccuauu

SEQ ID NO: 87599 - RNA, 19 nt, Homo sapiens
  misc_RNA (1)...(19): siRNA sense strand
gaggaagaucgaccuauua

SEQ ID NO: 87600 - RNA, 19 nt, Homo sapiens
  misc_RNA (1)...(19): siRNA sense strand
gaaaagcaaucacaguguu

SEQ ID NO: 87601 - RNA, 19 nt, Homo sapiens
  misc_RNA (1)...(19): siRNA sense strand
gaaaacgccugaagaaggu

SEQ ID NO: 87602 - RNA, 19 nt, Homo sapiens
  misc_RNA (1)...(19): siRNA sense strand
gggagcaucugcaggucaa

SEQ ID NO: 87603 - RNA, 19 nt, Homo sapiens
  misc_RNA (1)...(19): siRNA sense strand
ggaagaucgaccuauuauu

SEQ ID NO: 87604 - RNA, 19 nt, Homo sapiens
  misc_RNA (1)...(19): siRNA sense strand
ugaagaaggugaaaagcaa

SEQ ID NO: 87605 - RNA, 19 nt, Homo sapiens
  misc_RNA (1)...(19): siRNA sense strand
gagguggacccgccaaauc

SEQ ID NO: 87606 - RNA, 19 nt, Homo sapiens
  misc_RNA (1)...(19): siRNA sense strand
gaccaaggcgcuauguaca

SEQ ID NO: 87607 - RNA, 19 nt, Homo sapiens
  misc_RNA (1)...(19): siRNA sense strand
ggaaccagcaacaccugaa

SEQ ID NO: 87608 - RNA, 19 nt, Homo sapiens
  misc_RNA (1)...(19): siRNA sense strand
ggcccgagcaguucaguga

SEQ ID NO: 87609 - RNA, 19 nt, Homo sapiens
  misc_RNA (1)...(19): siRNA sense strand
ccgagcaguucagugauga

SEQ ID NO: 87610 - RNA, 19 nt, Homo sapiens
  misc_RNA (1)...(19): siRNA sense strand
gaaccagcaacaccugaag

SEQ ID NO: 87611 - RNA, 19 nt, Homo sapiens
  misc_RNA (1)...(19): siRNA sense strand
aaagcaaucacaguguuaa

SEQ ID NO: 87612 - RNA, 19 nt, Homo sapiens
  misc_RNA (1)...(19): siRNA sense strand
gugugaagaugguccugau

SEQ ID NO: 87613 - RNA, 19 nt, Homo sapiens
  misc_RNA (1)...(19): siRNA sense strand
ggagguggacccgccaaau

SEQ ID NO: 87614 - RNA, 19 nt, Homo sapiens
  misc_RNA (1)...(19): siRNA sense strand
aggaagaucgaccuauuau

SEQ ID NO: 87615 - RNA, 19 nt, Homo sapiens
  misc_RNA (1)...(19): siRNA sense strand
ggugaaaacgccugaagaa

SEQ ID NO: 87616 - RNA, 19 nt, Homo sapiens
  misc_RNA (1)...(19): siRNA sense strand
ggaaccagcaacucaacgu

SEQ ID NO: 87617 - RNA, 19 nt, Homo sapiens
  misc_RNA (1)...(19): siRNA sense strand
ugaaguggaaccagcaaca

SEQ ID NO: 87618 - RNA, 19 nt, Homo sapiens
  misc_RNA (1)...(19): siRNA sense strand
gaccuauuauuggccuaga

SEQ ID NO: 87619 - RNA, 19 nt, Homo sapiens
  misc_RNA (1)...(19): siRNA sense strand
cccgagcaguucagugaug

SEQ ID NO: 87620 - RNA, 19 nt, Homo sapiens
  misc_RNA (1)...(19): siRNA sense strand
agacugggugugaguguga

SEQ ID NO: 87621 - RNA, 19 nt, Homo sapiens
  misc_RNA (1)...(19): siRNA sense strand
agaccaaggcgcuauguac

SEQ ID NO: 87622 - RNA, 19 nt, Homo sapiens
  misc_RNA (1)...(19): siRNA sense strand
caaauccagaggaggugaa

SEQ ID NO: 87623 - RNA, 19 nt, Homo sapiens
  misc_RNA (1)...(19): siRNA sense strand
gaagaucgaccuauuauug

SEQ ID NO: 87624 - RNA, 19 nt, Homo sapiens
  misc_RNA (1)...(19): siRNA sense strand
cgaggaagaucgaccuauu

SEQ ID NO: 87625 - RNA, 19 nt, Homo sapiens
  misc_RNA (1)...(19): siRNA sense strand
gaggaagaucgaccuauua

SEQ ID NO: 87626 - RNA, 19 nt, Homo sapiens
  misc_RNA (1)...(19): siRNA sense strand
gaaaagcaaucacaguguu

SEQ ID NO: 87627 - RNA, 19 nt, Homo sapiens
  misc_RNA (1)...(19): siRNA sense strand
gaaaacgccugaagaaggu

SEQ ID NO: 87628 - RNA, 19 nt, Homo sapiens
  misc_RNA (1)...(19): siRNA sense strand
gagauggacccgccaaauc

SEQ ID NO: 87629 - RNA, 19 nt, Homo sapiens
  misc_RNA (1)...(19): siRNA sense strand
gggagcaucugcaggucaa

SEQ ID NO: 87630 - RNA, 19 nt, Homo sapiens
  misc_RNA (1)...(19): siRNA sense strand
ggaagaucgaccuauuauu

SEQ ID NO: 87631 - RNA, 19 nt, Homo sapiens
  misc_RNA (1)...(19): siRNA sense strand
ugaagaaggugaaaagcaa

SEQ ID NO: 87632 - RNA, 19 nt, Homo sapiens
  misc_RNA (1)...(19): siRNA sense strand
ggagauggacccgccaaau

SEQ ID NO: 87633 - RNA, 19 nt, Homo sapiens
  misc_RNA (1)...(19): siRNA sense strand
gaccaaggcgcuauguaca

SEQ ID NO: 87634 - RNA, 19 nt, Homo sapiens
  misc_RNA (1)...(19): siRNA sense strand
ggaaccagcaacaccugaa

SEQ ID NO: 87635 - RNA, 19 nt, Homo sapiens
  misc_RNA (1)...(19): siRNA sense strand
ggcccgagcaguucaguga

SEQ ID NO: 87636 - RNA, 19 nt, Homo sapiens
  misc_RNA (1)...(19): siRNA sense strand
ccgagcaguucagugauga

SEQ ID NO: 87637 - RNA, 19 nt, Homo sapiens
  misc_RNA (1)...(19): siRNA sense strand
gaaccagcaacaccugaag

SEQ ID NO: 87638 - RNA, 19 nt, Homo sapiens
  misc_RNA (1)...(19): siRNA sense strand
aaagcaaucacaguguuaa

SEQ ID NO: 87639 - RNA, 19 nt, Homo sapiens
  misc_RNA (1)...(19): siRNA sense strand
gugugaagaugguccugau

SEQ ID NO: 87640 - RNA, 19 nt, Homo sapiens
  misc_RNA (1)...(19): siRNA sense strand
aggaagaucgaccuauuau

SEQ ID NO: 87641 - RNA, 19 nt, Homo sapiens
  misc_RNA (1)...(19): siRNA sense strand
ggugaaaacgccugaagaa

SEQ ID NO: 87642 - RNA, 19 nt, Homo sapiens
  misc_RNA (1)...(19): siRNA sense strand
ggaaccagcaacucaacgu

SEQ ID NO: 87643 - RNA, 19 nt, Homo sapiens
  misc_RNA (1)...(19): siRNA sense strand
ugaaguggaaccagcaaca

SEQ ID NO: 87644 - RNA, 19 nt, Homo sapiens
  misc_RNA (1)...(19): siRNA sense strand
gaccuauuauuggccuaga

SEQ ID NO: 87645 - RNA, 19 nt, Homo sapiens
  misc_RNA (1)...(19): siRNA sense strand
cccgagcaguucagugaug

SEQ ID NO: 87646 - RNA, 19 nt, Homo sapiens
  misc_RNA (1)...(19): siRNA sense strand
agacugggugugaguguga

SEQ ID NO: 87647 - RNA, 19 nt, Homo sapiens
  misc_RNA (1)...(19): siRNA sense strand
caaauccagaggaggugaa

SEQ ID NO: 87648 - RNA, 19 nt, Homo sapiens
  misc_RNA (1)...(19): siRNA sense strand
agaccaaggcgcuauguac

SEQ ID NO: 87649 - RNA, 19 nt, Homo sapiens
  misc_RNA (1)...(19): siRNA sense strand
gaucaugcauccaaacuga

SEQ ID NO: 87650 - RNA, 19 nt, Homo sapiens
  misc_RNA (1)...(19): siRNA sense strand
gaaacaaguccgagcuauu

SEQ ID NO: 87651 - RNA, 19 nt, Homo sapiens
  misc_RNA (1)...(19): siRNA sense strand
ccaagaccuuccuccguua

SEQ ID NO: 87652 - RNA, 19 nt, Homo sapiens
  misc_RNA (1)...(19): siRNA sense strand
ggaagugacuggaguuacu

SEQ ID NO: 87653 - RNA, 19 nt, Homo sapiens
  misc_RNA (1)...(19): siRNA sense strand
aacuacaacuggucacuua

SEQ ID NO: 87654 - RNA, 19 nt, Homo sapiens
  misc_RNA (1)...(19): siRNA sense strand
gaagcugccuuggacauca

SEQ ID NO: 87655 - RNA, 19 nt, Homo sapiens
  misc_RNA (1)...(19): siRNA sense strand
aaacaaguccgagcuauug

SEQ ID NO: 87656 - RNA, 19 nt, Homo sapiens
  misc_RNA (1)...(19): siRNA sense strand
gaucaaggagcaaguagug

SEQ ID NO: 87657 - RNA, 19 nt, Homo sapiens
  misc_RNA (1)...(19): siRNA sense strand
gcagaucucacccuuguca

SEQ ID NO: 87658 - RNA, 19 nt, Homo sapiens
  misc_RNA (1)...(19): siRNA sense strand
ccgcguggcucaucuggaa

SEQ ID NO: 87659 - RNA, 19 nt, Homo sapiens
  misc_RNA (1)...(19): siRNA sense strand
gugcaugaccucccaguga

SEQ ID NO: 87660 - RNA, 19 nt, Homo sapiens
  misc_RNA (1)...(19): siRNA sense strand
caacaucagcgcucuaguc

SEQ ID NO: 87661 - RNA, 19 nt, Homo sapiens
  misc_RNA (1)...(19): siRNA sense strand
caagagagcaggaguucca

SEQ ID NO: 87662 - RNA, 19 nt, Homo sapiens
  misc_RNA (1)...(19): siRNA sense strand
aggcagaucucacccuugu

SEQ ID NO: 87663 - RNA, 19 nt, Homo sapiens
  misc_RNA (1)...(19): siRNA sense strand
agaaacaaguccgagcuau

SEQ ID NO: 87664 - RNA, 19 nt, Homo sapiens
  misc_RNA (1)...(19): siRNA sense strand
uggcucaucuggaauucuu

SEQ ID NO: 87665 - RNA, 19 nt, Homo sapiens
  misc_RNA (1)...(19): siRNA sense strand
gaaccuggccgugucucaa

SEQ ID NO: 87666 - RNA, 19 nt, Homo sapiens
  misc_RNA (1)...(19): siRNA sense strand
caacaggcaacuacaacug

SEQ ID NO: 87667 - RNA, 19 nt, Homo sapiens
  misc_RNA (1)...(19): siRNA sense strand
caacucaacaggcaacuac

SEQ ID NO: 87668 - RNA, 19 nt, Homo sapiens
  misc_RNA (1)...(19): siRNA sense strand
aaacugaagcugccuugga

SEQ ID NO: 87669 - RNA, 19 nt, Homo sapiens
  misc_RNA (1)...(19): siRNA sense strand
gacaagccagagcgcguua

SEQ ID NO: 87670 - RNA, 19 nt, Homo sapiens
  misc_RNA (1)...(19): siRNA sense strand
ucaaguaaccaccaaguac

SEQ ID NO: 87671 - RNA, 19 nt, Homo sapiens
  misc_RNA (1)...(19): siRNA sense strand
ccacaagagagcaggaguu

SEQ ID NO: 87672 - RNA, 19 nt, Homo sapiens
  misc_RNA (1)...(19): siRNA sense strand
ggacaugaggcugcuuuca

SEQ ID NO: 87673 - RNA, 19 nt, Homo sapiens
  misc_RNA (1)...(19): siRNA sense strand
agaccuuccuccguuauga

SEQ ID NO: 87674 - RNA, 19 nt, Homo sapiens
  misc_RNA (1)...(19): siRNA sense strand
gaccaacacagcagacaca

SEQ ID NO: 87675 - RNA, 19 nt, Homo sapiens
  misc_RNA (1)...(19): siRNA sense strand
gggcucucaucaccaguau

SEQ ID NO: 87676 - RNA, 19 nt, Homo sapiens
  misc_RNA (1)...(19): siRNA sense strand
cagaaacaaguccgagcua

SEQ ID NO: 87677 - RNA, 19 nt, Homo sapiens
  misc_RNA (1)...(19): siRNA sense strand
ggagcccaguacaacauca

SEQ ID NO: 87678 - RNA, 19 nt, Homo sapiens
  misc_RNA (1)...(19): siRNA sense strand
cggcugcucuucuucaaac

SEQ ID NO: 87679 - RNA, 19 nt, Homo sapiens
  misc_RNA (1)...(19): siRNA sense strand
ccaaacaccggcugcucuu

SEQ ID NO: 87680 - RNA, 19 nt, Homo sapiens
  misc_RNA (1)...(19): siRNA sense strand
caacuacaacuggucacuu

SEQ ID NO: 87681 - RNA, 19 nt, Homo sapiens
  misc_RNA (1)...(19): siRNA sense strand
guacaacaucagcgcucua

SEQ ID NO: 87682 - RNA, 19 nt, Homo sapiens
  misc_RNA (1)...(19): siRNA sense strand
gaagcuaccagaccaacac

SEQ ID NO: 87683 - RNA, 19 nt, Homo sapiens
  misc_RNA (1)...(19): siRNA sense strand
ccuacaggguguggaaguu

SEQ ID NO: 87684 - RNA, 19 nt, Homo sapiens
  misc_RNA (1)...(19): siRNA sense strand
cgcgagaucuccggcuuug

SEQ ID NO: 87685 - RNA, 19 nt, Homo sapiens
  misc_RNA (1)...(19): siRNA sense strand
acaugaggcugcuuucacu

SEQ ID NO: 87686 - RNA, 19 nt, Homo sapiens
  misc_RNA (1)...(19): siRNA sense strand
gagagggucaggcagaucu

SEQ ID NO: 87687 - RNA, 19 nt, Homo sapiens
  misc_RNA (1)...(19): siRNA sense strand
ugaggcugcuuucacuauc

SEQ ID NO: 87688 - RNA, 19 nt, Homo sapiens
  misc_RNA (1)...(19): siRNA sense strand
cggcgugguuaacuucuuc

SEQ ID NO: 87689 - RNA, 19 nt, Homo sapiens
  misc_RNA (1)...(19): siRNA sense strand
gcgcgagaucuccggcuuu

SEQ ID NO: 87690 - RNA, 19 nt, Homo sapiens
  misc_RNA (1)...(19): siRNA sense strand
cgacggcgugguuaacuuc

SEQ ID NO: 87691 - RNA, 19 nt, Homo sapiens
  misc_RNA (1)...(19): siRNA sense strand
ucaccgacggcgugguuaa

SEQ ID NO: 87692 - RNA, 19 nt, Homo sapiens
  misc_RNA (1)...(19): siRNA sense strand
caggaucaaggagcaagua

SEQ ID NO: 87693 - RNA, 19 nt, Homo sapiens
  misc_RNA (1)...(19): siRNA sense strand
gcaggaguuccaggccuuu

SEQ ID NO: 87694 - RNA, 19 nt, Homo sapiens
  misc_RNA (1)...(19): siRNA sense strand
ggccgugucucaaguaacc

SEQ ID NO: 87695 - RNA, 19 nt, Homo sapiens
  misc_RNA (1)...(19): siRNA sense strand
caagaccuuccuccguuau

SEQ ID NO: 87696 - RNA, 19 nt, Homo sapiens
  misc_RNA (1)...(19): siRNA sense strand
uacaggguguggaaguuca

SEQ ID NO: 87697 - RNA, 19 nt, Homo sapiens
  misc_RNA (1)...(19): siRNA sense strand
gcguggcucaucuggaauu

SEQ ID NO: 87698 - RNA, 19 nt, Homo sapiens
  misc_RNA (1)...(19): siRNA sense strand
ccgacggcgugguuaacuu

SEQ ID NO: 87699 - RNA, 19 nt, Homo sapiens
  misc_RNA (1)...(19): siRNA sense strand
cguggaacacuaucucaug

SEQ ID NO: 87700 - RNA, 19 nt, Homo sapiens
  misc_RNA (1)...(19): siRNA sense strand
gggcuggaccaacucaaca

SEQ ID NO: 87701 - RNA, 19 nt, Homo sapiens
  misc_RNA (1)...(19): siRNA sense strand
cuucuggucaggagguaua

SEQ ID NO: 87702 - RNA, 19 nt, Homo sapiens
  misc_RNA (1)...(19): siRNA sense strand
ccugugcgcucugguccuu

SEQ ID NO: 87703 - RNA, 19 nt, Homo sapiens
  misc_RNA (1)...(19): siRNA sense strand
cuacaacuggucacuuaca

SEQ ID NO: 87704 - RNA, 19 nt, Homo sapiens
  misc_RNA (1)...(19): siRNA sense strand
ggagguauaccaggugaac

SEQ ID NO: 87705 - RNA, 19 nt, Homo sapiens
  misc_RNA (1)...(19): siRNA sense strand
ugaagaacaugucaaagaa

SEQ ID NO: 87706 - RNA, 19 nt, Homo sapiens
  misc_RNA (1)...(19): siRNA sense strand
caauuguacucauguguga

SEQ ID NO: 87707 - RNA, 19 nt, Homo sapiens
  misc_RNA (1)...(19): siRNA sense strand
gaaggccuauaaacaagug

SEQ ID NO: 87708 - RNA, 19 nt, Homo sapiens
  misc_RNA (1)...(19): siRNA sense strand
ccgugaauccuaucauuua

SEQ ID NO: 87709 - RNA, 19 nt, Homo sapiens
  misc_RNA (1)...(19): siRNA sense strand
caggaaggccuauaaacaa

SEQ ID NO: 87710 - RNA, 19 nt, Homo sapiens
  misc_RNA (1)...(19): siRNA sense strand
ucaaagaagucugaagcau

SEQ ID NO: 87711 - RNA, 19 nt, Homo sapiens
  misc_RNA (1)...(19): siRNA sense strand
ucaggaaggccuauaaaca

SEQ ID NO: 87712 - RNA, 19 nt, Homo sapiens
  misc_RNA (1)...(19): siRNA sense strand
gguggugguugugguguuu

SEQ ID NO: 87713 - RNA, 19 nt, Homo sapiens
  misc_RNA (1)...(19): siRNA sense strand
aagaacaugucaaagaagu

SEQ ID NO: 87714 - RNA, 19 nt, Homo sapiens
  misc_RNA (1)...(19): siRNA sense strand
gaacaugucaaagaagucu

SEQ ID NO: 87715 - RNA, 19 nt, Homo sapiens
  misc_RNA (1)...(19): siRNA sense strand
gcucaucugcuucugcuau

SEQ ID NO: 87716 - RNA, 19 nt, Homo sapiens
  misc_RNA (1)...(19): siRNA sense strand
acaccugagugauacuaaa

SEQ ID NO: 87717 - RNA, 19 nt, Homo sapiens
  misc_RNA (1)...(19): siRNA sense strand
gaagaacaugucaaagaag

SEQ ID NO: 87718 - RNA, 19 nt, Homo sapiens
  misc_RNA (1)...(19): siRNA sense strand
cgugaauccuaucauuuau

SEQ ID NO: 87719 - RNA, 19 nt, Homo sapiens
  misc_RNA (1)...(19): siRNA sense strand
ccugagugauacuaaagaa

SEQ ID NO: 87720 - RNA, 19 nt, Homo sapiens
  misc_RNA (1)...(19): siRNA sense strand
ugaauccuaucauuuaugc

SEQ ID NO: 87721 - RNA, 19 nt, Homo sapiens
  misc_RNA (1)...(19): siRNA sense strand
gcaucggcguggagaacuu

SEQ ID NO: 87722 - RNA, 19 nt, Homo sapiens
  misc_RNA (1)...(19): siRNA sense strand
ucaaccaauuguacucaug

SEQ ID NO: 87723 - RNA, 19 nt, Homo sapiens
  misc_RNA (1)...(19): siRNA sense strand
gagcaccaccaaccuguuc

SEQ ID NO: 87724 - RNA, 19 nt, Homo sapiens
  misc_RNA (1)...(19): siRNA sense strand
guucauccacuacuucuuc

SEQ ID NO: 87725 - RNA, 19 nt, Homo sapiens
  misc_RNA (1)...(19): siRNA sense strand
ggcaacagccuagugauca

SEQ ID NO: 87726 - RNA, 19 nt, Homo sapiens
  misc_RNA (1)...(19): siRNA sense strand
ccaccaaccuguucauccu

SEQ ID NO: 87727 - RNA, 19 nt, Homo sapiens
  misc_RNA (1)...(19): siRNA sense strand
caaccaauuguacucaugu

SEQ ID NO: 87728 - RNA, 19 nt, Homo sapiens
  misc_RNA (1)...(19): siRNA sense strand
ucugcaaguucauccacua

SEQ ID NO: 87729 - RNA, 19 nt, Homo sapiens
  misc_RNA (1)...(19): siRNA sense strand
gggcaacagccuagugauc

SEQ ID NO: 87730 - RNA, 19 nt, Homo sapiens
  misc_RNA (1)...(19): siRNA sense strand
gccuucaucugcaaguuca

SEQ ID NO: 87731 - RNA, 19 nt, Homo sapiens
  misc_RNA (1)...(19): siRNA sense strand
gcaacagccuagugaucac

SEQ ID NO: 87732 - RNA, 19 nt, Homo sapiens
  misc_RNA (1)...(19): siRNA sense strand
caaagauucacaccugagu

SEQ ID NO: 87733 - RNA, 19 nt, Homo sapiens
  misc_RNA (1)...(19): siRNA sense strand
uuuaugcauuucucucuga

SEQ ID NO: 87734 - RNA, 19 nt, Homo sapiens
  misc_RNA (1)...(19): siRNA sense strand
ucucugggcugaguuugga

SEQ ID NO: 87735 - RNA, 19 nt, Homo sapiens
  misc_RNA (1)...(19): siRNA sense strand
aggaaggccuauaaacaag

SEQ ID NO: 87736 - RNA, 19 nt, Homo sapiens
  misc_RNA (1)...(19): siRNA sense strand
guguucaagugucacauuc

SEQ ID NO: 87737 - RNA, 19 nt, Homo sapiens
  misc_RNA (1)...(19): siRNA sense strand
ggaaggccuauaaacaagu

SEQ ID NO: 87738 - RNA, 19 nt, Homo sapiens
  misc_RNA (1)...(19): siRNA sense strand
gucugaagcauccaagaaa

SEQ ID NO: 87739 - RNA, 19 nt, Homo sapiens
  misc_RNA (1)...(19): siRNA sense strand
cuccgugaauccuaucauu

SEQ ID NO: 87740 - RNA, 19 nt, Homo sapiens
  misc_RNA (1)...(19): siRNA sense strand
gggcugaguuuggaguuuu

SEQ ID NO: 87741 - RNA, 19 nt, Homo sapiens
  misc_RNA (1)...(19): siRNA sense strand
ugucacauucgcaaagauu

SEQ ID NO: 87742 - RNA, 19 nt, Homo sapiens
  misc_RNA (1)...(19): siRNA sense strand
uggccuaccugcucuucug

SEQ ID NO: 87743 - RNA, 19 nt, Homo sapiens
  misc_RNA (1)...(19): siRNA sense strand
guccuuaaucacuugcaua

SEQ ID NO: 87744 - RNA, 19 nt, Homo sapiens
  misc_RNA (1)...(19): siRNA sense strand
ggagcaccaccaaccuguu

SEQ ID NO: 87745 - RNA, 19 nt, Homo sapiens
  misc_RNA (1)...(19): siRNA sense strand
gugaauccuaucauuuaug

SEQ ID NO: 87746 - RNA, 19 nt, Homo sapiens
  misc_RNA (1)...(19): siRNA sense strand
gcgccuucaucugcaaguu

SEQ ID NO: 87747 - RNA, 19 nt, Homo sapiens
  misc_RNA (1)...(19): siRNA sense strand
ucacauucgcaaagauuca

SEQ ID NO: 87748 - RNA, 19 nt, Homo sapiens
  misc_RNA (1)...(19): siRNA sense strand
gaucagagcuagauuaaaa

SEQ ID NO: 87749 - RNA, 19 nt, Homo sapiens
  misc_RNA (1)...(19): siRNA sense strand
ggagauauaucgucaagag

SEQ ID NO: 87750 - RNA, 19 nt, Homo sapiens
  misc_RNA (1)...(19): siRNA sense strand
guaaucagguuuucucuua

SEQ ID NO: 87751 - RNA, 19 nt, Homo sapiens
  misc_RNA (1)...(19): siRNA sense strand
caagacacaugauagaaga

SEQ ID NO: 87752 - RNA, 19 nt, Homo sapiens
  misc_RNA (1)...(19): siRNA sense strand
gaaauuggaacauaugaug

SEQ ID NO: 87753 - RNA, 19 nt, Homo sapiens
  misc_RNA (1)...(19): siRNA sense strand
ggaggaacuuuggaaauug

SEQ ID NO: 87754 - RNA, 19 nt, Homo sapiens
  misc_RNA (1)...(19): siRNA sense strand
gguagauuauggagauaua

SEQ ID NO: 87755 - RNA, 19 nt, Homo sapiens
  misc_RNA (1)...(19): siRNA sense strand
gaacauaugaugcuggaau

SEQ ID NO: 87756 - RNA, 19 nt, Homo sapiens
  misc_RNA (1)...(19): siRNA sense strand
gaacagaugaccuuugcuu

SEQ ID NO: 87757 - RNA, 19 nt, Homo sapiens
  misc_RNA (1)...(19): siRNA sense strand
uagauaacauggcuagaaa

SEQ ID NO: 87758 - RNA, 19 nt, Homo sapiens
  misc_RNA (1)...(19): siRNA sense strand
gcacagggcagauuaucaa

SEQ ID NO: 87759 - RNA, 19 nt, Homo sapiens
  misc_RNA (1)...(19): siRNA sense strand
gauauaucgucaagaguug

SEQ ID NO: 87760 - RNA, 19 nt, Homo sapiens
  misc_RNA (1)...(19): siRNA sense strand
uuacaaagguagauuaugg

SEQ ID NO: 87761 - RNA, 19 nt, Homo sapiens
  misc_RNA (1)...(19): siRNA sense strand
gaccuuugcuuggauguuu

SEQ ID NO: 87762 - RNA, 19 nt, Homo sapiens
  misc_RNA (1)...(19): siRNA sense strand
aaagguagauuauggagau

SEQ ID NO: 87763 - RNA, 19 nt, Homo sapiens
  misc_RNA (1)...(19): siRNA sense strand
gcucugauaugaccuaugg

SEQ ID NO: 87764 - RNA, 19 nt, Homo sapiens
  misc_RNA (1)...(19): siRNA sense strand
gucaagaguuggucuaaga

SEQ ID NO: 87765 - RNA, 19 nt, Homo sapiens
  misc_RNA (1)...(19): siRNA sense strand
aaagagaaauggacagaag

SEQ ID NO: 87766 - RNA, 19 nt, Homo sapiens
  misc_RNA (1)...(19): siRNA sense strand
ggagaaaaccuagaaauuu

SEQ ID NO: 87767 - RNA, 19 nt, Homo sapiens
  misc_RNA (1)...(19): siRNA sense strand
uggaggaacuuuggaaauu

SEQ ID NO: 87768 - RNA, 19 nt, Homo sapiens
  misc_RNA (1)...(19): siRNA sense strand
acgaaucagugucuagaua

SEQ ID NO: 87769 - RNA, 19 nt, Homo sapiens
  misc_RNA (1)...(19): siRNA sense strand
gaaauggacagaaggaaag

SEQ ID NO: 87770 - RNA, 19 nt, Homo sapiens
  misc_RNA (1)...(19): siRNA sense strand
ggaaacgaaucagugucua

SEQ ID NO: 87771 - RNA, 19 nt, Homo sapiens
  misc_RNA (1)...(19): siRNA sense strand
ugaagguccuggagaaaug

SEQ ID NO: 87772 - RNA, 19 nt, Homo sapiens
  misc_RNA (1)...(19): siRNA sense strand
ggaggcacagggcagauua

SEQ ID NO: 87773 - RNA, 19 nt, Homo sapiens
  misc_RNA (1)...(19): siRNA sense strand
gaggaacuuuggaaauugu

SEQ ID NO: 87774 - RNA, 19 nt, Homo sapiens
  misc_RNA (1)...(19): siRNA sense strand
ucaggaaauuggaacauau

SEQ ID NO: 87775 - RNA, 19 nt, Homo sapiens
  misc_RNA (1)...(19): siRNA sense strand
ucaauuuaauggcaaguga

SEQ ID NO: 87776 - RNA, 19 nt, Homo sapiens
  misc_RNA (1)...(19): siRNA sense strand
aaacuacaaugcaaaccuu

SEQ ID NO: 87777 - RNA, 19 nt, Homo sapiens
  misc_RNA (1)...(19): siRNA sense strand
gaaauuaacccugcagcau

SEQ ID NO: 87778 - RNA, 19 nt, Homo sapiens
  misc_RNA (1)...(19): siRNA sense strand
gcucaaaugccaccaccua

SEQ ID NO: 87779 - RNA, 19 nt, Homo sapiens
  misc_RNA (1)...(19): siRNA sense strand
ccugguaccuagagaauau

SEQ ID NO: 87780 - RNA, 19 nt, Homo sapiens
  misc_RNA (1)...(19): siRNA sense strand
agacagagauuacuuucag

SEQ ID NO: 87781 - RNA, 19 nt, Homo sapiens
  misc_RNA (1)...(19): siRNA sense strand
ggauaaagccacagaagag

SEQ ID NO: 87782 - RNA, 19 nt, Homo sapiens
  misc_RNA (1)...(19): siRNA sense strand
gacacaaacuacaaugcaa

SEQ ID NO: 87783 - RNA, 19 nt, Homo sapiens
  misc_RNA (1)...(19): siRNA sense strand
ucaugaagguccuggagaa

SEQ ID NO: 87784 - RNA, 19 nt, Homo sapiens
  misc_RNA (1)...(19): siRNA sense strand
cuagccaccuccuugauuu

SEQ ID NO: 87785 - RNA, 19 nt, Homo sapiens
  misc_RNA (1)...(19): siRNA sense strand
uaacagacgacuugcagaa

SEQ ID NO: 87786 - RNA, 19 nt, Homo sapiens
  misc_RNA (1)...(19): siRNA sense strand
gauauguuccugcugcuuu

SEQ ID NO: 87787 - RNA, 19 nt, Homo sapiens
  misc_RNA (1)...(19): siRNA sense strand
gauaaucuuccuacaacaa

SEQ ID NO: 87788 - RNA, 19 nt, Homo sapiens
  misc_RNA (1)...(19): siRNA sense strand
guaaucagugccuggauaa

SEQ ID NO: 87789 - RNA, 19 nt, Homo sapiens
  misc_RNA (1)...(19): siRNA sense strand
caaauuccacgucacuauu

SEQ ID NO: 87790 - RNA, 19 nt, Homo sapiens
  misc_RNA (1)...(19): siRNA sense strand
gaaauguggaaacgaauca

SEQ ID NO: 87791 - RNA, 19 nt, Homo sapiens
  misc_RNA (1)...(19): siRNA sense strand
cgaaucagugucuagauaa

SEQ ID NO: 87792 - RNA, 19 nt, Homo sapiens
  misc_RNA (1)...(19): siRNA sense strand
gcacacuucugcgaacugu

SEQ ID NO: 87793 - RNA, 19 nt, Homo sapiens
  misc_RNA (1)...(19): siRNA sense strand
ggaguaugacccagugaaa

SEQ ID NO: 87794 - RNA, 19 nt, Homo sapiens
  misc_RNA (1)...(19): siRNA sense strand
uauaauuucuccagguguu

SEQ ID NO: 87795 - RNA, 19 nt, Homo sapiens
  misc_RNA (1)...(19): siRNA sense strand
gaaaggugaucggacucuu

SEQ ID NO: 87796 - RNA, 19 nt, Homo sapiens
  misc_RNA (1)...(19): siRNA sense strand
gagcugcugugucuaaagg

SEQ ID NO: 87797 - RNA, 19 nt, Homo sapiens
  misc_RNA (1)...(19): siRNA sense strand
cagaugaccuuugcuugga

SEQ ID NO: 87798 - RNA, 19 nt, Homo sapiens
  misc_RNA (1)...(19): siRNA sense strand
aguaaucagugccuggaua

SEQ ID NO: 87799 - RNA, 19 nt, Homo sapiens
  misc_RNA (1)...(19): siRNA sense strand
guaugacccagugaaauua

SEQ ID NO: 87800 - RNA, 19 nt, Homo sapiens
  misc_RNA (1)...(19): siRNA sense strand
gcacucaacagaucuuuac

SEQ ID NO: 87801 - RNA, 19 nt, Homo sapiens
  misc_RNA (1)...(19): siRNA sense strand
uacgaaauguggaaacgaa

SEQ ID NO: 87802 - RNA, 19 nt, Homo sapiens
  misc_RNA (1)...(19): siRNA sense strand
uuuaccagauguuagguua

SEQ ID NO: 87803 - RNA, 19 nt, Homo sapiens
  misc_RNA (1)...(19): siRNA sense strand
gaugauugcacucaacaga

SEQ ID NO: 87804 - RNA, 19 nt, Homo sapiens
  misc_RNA (1)...(19): siRNA sense strand
ggaacuuuggaaauuguua

SEQ ID NO: 87805 - RNA, 19 nt, Homo sapiens
  misc_RNA (1)...(19): siRNA sense strand
ucaacuggaagcucaauuu

SEQ ID NO: 87806 - RNA, 19 nt, Homo sapiens
  misc_RNA (1)...(19): siRNA sense strand
guggauggaugaauucaag

SEQ ID NO: 87807 - RNA, 19 nt, Homo sapiens
  misc_RNA (1)...(19): siRNA sense strand
ucaaaugccaccaccuaaa

SEQ ID NO: 87808 - RNA, 19 nt, Homo sapiens
  misc_RNA (1)...(19): siRNA sense strand
ucauguaauucgaauggaa

SEQ ID NO: 87809 - RNA, 19 nt, Homo sapiens
  misc_RNA (1)...(19): siRNA sense strand
uagaacagaugaccuuugc

SEQ ID NO: 87810 - RNA, 19 nt, Homo sapiens
  misc_RNA (1)...(19): siRNA sense strand
ucaucgaugugaucaguga

SEQ ID NO: 87811 - RNA, 19 nt, Homo sapiens
  misc_RNA (1)...(19): siRNA sense strand
uaaagaggaucaagaaaag

SEQ ID NO: 87812 - RNA, 19 nt, Homo sapiens
  misc_RNA (1)...(19): siRNA sense strand
uaacauggcuagaaaagag

SEQ ID NO: 87813 - RNA, 19 nt, Homo sapiens
  misc_RNA (1)...(19): siRNA sense strand
gaaacgaaucagugucuag

SEQ ID NO: 87814 - RNA, 19 nt, Homo sapiens
  misc_RNA (1)...(19): siRNA sense strand
guacauggcaggcucugau

SEQ ID NO: 87815 - RNA, 19 nt, Homo sapiens
  misc_RNA (1)...(19): siRNA sense strand
caguuacaaugcucaaaug

SEQ ID NO: 87816 - RNA, 19 nt, Homo sapiens
  misc_RNA (1)...(19): siRNA sense strand
gaaugcaacaaaugugaug

SEQ ID NO: 87817 - RNA, 19 nt, Homo sapiens
  misc_RNA (1)...(19): siRNA sense strand
uaccagauguuagguuaga

SEQ ID NO: 87818 - RNA, 19 nt, Homo sapiens
  misc_RNA (1)...(19): siRNA sense strand
gaaucagugucuagauaac

SEQ ID NO: 87819 - RNA, 19 nt, Homo sapiens
  misc_RNA (1)...(19): siRNA sense strand
gaucggacucuuccuguca

SEQ ID NO: 87820 - RNA, 19 nt, Homo sapiens
  misc_RNA (1)...(19): siRNA sense strand
aaaaggagcugcugugucu

SEQ ID NO: 87821 - RNA, 19 nt, Homo sapiens
  misc_RNA (1)...(19): siRNA sense strand
aaaguaccaguucauguaa

SEQ ID NO: 87822 - RNA, 19 nt, Homo sapiens
  misc_RNA (1)...(19): siRNA sense strand
ugauugcacucaacagauc

SEQ ID NO: 87823 - RNA, 19 nt, Homo sapiens
  misc_RNA (1)...(19): siRNA sense strand
ugcagcaugugaacaguaa

SEQ ID NO: 87824 - RNA, 19 nt, Homo sapiens
  misc_RNA (1)...(19): siRNA sense strand
ggauggaugaauucaagaa

SEQ ID NO: 87825 - RNA, 19 nt, Homo sapiens
  misc_RNA (1)...(19): siRNA sense strand
agaaauggacagaaggaaa

SEQ ID NO: 87826 - RNA, 19 nt, Homo sapiens
  misc_RNA (1)...(19): siRNA sense strand
uggccaggaucaaacauga

SEQ ID NO: 87827 - RNA, 19 nt, Homo sapiens
  misc_RNA (1)...(19): siRNA sense strand
ggaugcccauugugagugu

SEQ ID NO: 87828 - RNA, 19 nt, Homo sapiens
  misc_RNA (1)...(19): siRNA sense strand
ucaaauuccacgucacuau

SEQ ID NO: 87829 - RNA, 19 nt, Homo sapiens
  misc_RNA (1)...(19): siRNA sense strand
aguaccaguucauguaauu

SEQ ID NO: 87830 - RNA, 19 nt, Homo sapiens
  misc_RNA (1)...(19): siRNA sense strand
agcaguggcuucuucgaaa

SEQ ID NO: 87831 - RNA, 19 nt, Homo sapiens
  misc_RNA (1)...(19): siRNA sense strand
ccacgucacuauuucucau

SEQ ID NO: 87832 - RNA, 19 nt, Homo sapiens
  misc_RNA (1)...(19): siRNA sense strand
agauauaucgucaagaguu

SEQ ID NO: 87833 - RNA, 19 nt, Homo sapiens
  misc_RNA (1)...(19): siRNA sense strand
aaguguggauggaugaauu

SEQ ID NO: 87834 - RNA, 19 nt, Homo sapiens
  misc_RNA (1)...(19): siRNA sense strand
gugaaugcaacaaauguga

SEQ ID NO: 87835 - RNA, 19 nt, Homo sapiens
  misc_RNA (1)...(19): siRNA sense strand
auauguuccugcugcuuua

SEQ ID NO: 87836 - RNA, 19 nt, Homo sapiens
  misc_RNA (1)...(19): siRNA sense strand
ggaaauuggaacauaugau

SEQ ID NO: 87837 - RNA, 19 nt, Homo sapiens
  misc_RNA (1)...(19): siRNA sense strand
uacaacaaguguggugauu

SEQ ID NO: 87838 - RNA, 19 nt, Homo sapiens
  misc_RNA (1)...(19): siRNA sense strand
aguaugacccagugaaauu

SEQ ID NO: 87839 - RNA, 19 nt, Homo sapiens
  misc_RNA (1)...(19): siRNA sense strand
uauccugauucucaaauuc

SEQ ID NO: 87840 - RNA, 19 nt, Homo sapiens
  misc_RNA (1)...(19): siRNA sense strand
gaugcuggaauggauauuu

SEQ ID NO: 87841 - RNA, 19 nt, Homo sapiens
  misc_RNA (1)...(19): siRNA sense strand
caauagacagagauuacuu

SEQ ID NO: 87842 - RNA, 19 nt, Homo sapiens
  misc_RNA (1)...(19): siRNA sense strand
ggacagaaggaaaggugau

SEQ ID NO: 87843 - RNA, 19 nt, Homo sapiens
  misc_RNA (1)...(19): siRNA sense strand
ccaaagagaaauggacaga

SEQ ID NO: 87844 - RNA, 19 nt, Homo sapiens
  misc_RNA (1)...(19): siRNA sense strand
caaguguggugauuguuuu

SEQ ID NO: 87845 - RNA, 19 nt, Homo sapiens
  misc_RNA (1)...(19): siRNA sense strand
acacaaacuacaaugcaaa

SEQ ID NO: 87846 - RNA, 19 nt, Homo sapiens
  misc_RNA (1)...(19): siRNA sense strand
gcaguggcuucuucgaaac

SEQ ID NO: 87847 - RNA, 19 nt, Homo sapiens
  misc_RNA (1)...(19): siRNA sense strand
aauuaacccugcagcaugu

SEQ ID NO: 87848 - RNA, 19 nt, Homo sapiens
  misc_RNA (1)...(19): siRNA sense strand
agaaacagcucgcaaacua

SEQ ID NO: 87849 - RNA, 19 nt, Homo sapiens
  misc_RNA (1)...(19): siRNA sense strand
ucaaggaccugcaguauga

SEQ ID NO: 87850 - RNA, 19 nt, Homo sapiens
  misc_RNA (1)...(19): siRNA sense strand
gaacucgacuugcggagaa

SEQ ID NO: 87851 - RNA, 19 nt, Homo sapiens
  misc_RNA (1)...(19): siRNA sense strand
ggaggcagcuggaggagaa

SEQ ID NO: 87852 - RNA, 19 nt, Homo sapiens
  misc_RNA (1)...(19): siRNA sense strand
gaagaaaggcaaagccaaa

SEQ ID NO: 87853 - RNA, 19 nt, Homo sapiens
  misc_RNA (1)...(19): siRNA sense strand
gaacaaagaccgggagaug

SEQ ID NO: 87854 - RNA, 19 nt, Homo sapiens
  misc_RNA (1)...(19): siRNA sense strand
gaggcaaguucgagaaauu

SEQ ID NO: 87855 - RNA, 19 nt, Homo sapiens
  misc_RNA (1)...(19): siRNA sense strand
ucaccgacauuaagaacua

SEQ ID NO: 87856 - RNA, 19 nt, Homo sapiens
  misc_RNA (1)...(19): siRNA sense strand
ucaagaaccucgugcuaga

SEQ ID NO: 87857 - RNA, 19 nt, Homo sapiens
  misc_RNA (1)...(19): siRNA sense strand
ucaugaagcuggcacagaa

SEQ ID NO: 87858 - RNA, 19 nt, Homo sapiens
  misc_RNA (1)...(19): siRNA sense strand
agacugagcuccacgaagu

SEQ ID NO: 87859 - RNA, 19 nt, Homo sapiens
  misc_RNA (1)...(19): siRNA sense strand
gugggagcaugaaguguua

SEQ ID NO: 87860 - RNA, 19 nt, Homo sapiens
  misc_RNA (1)...(19): siRNA sense strand
ccagugaggugguggugaa

SEQ ID NO: 87861 - RNA, 19 nt, Homo sapiens
  misc_RNA (1)...(19): siRNA sense strand
agaaggaggugcaguucaa

SEQ ID NO: 87862 - RNA, 19 nt, Homo sapiens
  misc_RNA (1)...(19): siRNA sense strand
aaauugaggccaaguauga

SEQ ID NO: 87863 - RNA, 19 nt, Homo sapiens
  misc_RNA (1)...(19): siRNA sense strand
gggacaagauccacaccuu

SEQ ID NO: 87864 - RNA, 19 nt, Homo sapiens
  misc_RNA (1)...(19): siRNA sense strand
gaggaagaauggccagauc

SEQ ID NO: 87865 - RNA, 19 nt, Homo sapiens
  misc_RNA (1)...(19): siRNA sense strand
ugagggcacuguagucaug

SEQ ID NO: 87866 - RNA, 19 nt, Homo sapiens
  misc_RNA (1)...(19): siRNA sense strand
gagaaauugaggccaagua

SEQ ID NO: 87867 - RNA, 19 nt, Homo sapiens
  misc_RNA (1)...(19): siRNA sense strand
gaaauugaggccaaguaug

SEQ ID NO: 87868 - RNA, 19 nt, Homo sapiens
  misc_RNA (1)...(19): siRNA sense strand
ugagcgagaugcagaaaca

SEQ ID NO: 87869 - RNA, 19 nt, Homo sapiens
  misc_RNA (1)...(19): siRNA sense strand
uauaugagcaccagaacaa

SEQ ID NO: 87870 - RNA, 19 nt, Homo sapiens
  misc_RNA (1)...(19): siRNA sense strand
ugaagaaccugcggcugaa

SEQ ID NO: 87871 - RNA, 19 nt, Homo sapiens
  misc_RNA (1)...(19): siRNA sense strand
agaacaaccugacagagau

SEQ ID NO: 87872 - RNA, 19 nt, Homo sapiens
  misc_RNA (1)...(19): siRNA sense strand
cagaacaaccugacagaga

SEQ ID NO: 87873 - RNA, 19 nt, Homo sapiens
  misc_RNA (1)...(19): siRNA sense strand
acagaaagagcaccgcaua

SEQ ID NO: 87874 - RNA, 19 nt, Homo sapiens
  misc_RNA (1)...(19): siRNA sense strand
gaaagggaagaaaggcaaa

SEQ ID NO: 87875 - RNA, 19 nt, Homo sapiens
  misc_RNA (1)...(19): siRNA sense strand
gaacuacuacaacgacauc

SEQ ID NO: 87876 - RNA, 19 nt, Homo sapiens
  misc_RNA (1)...(19): siRNA sense strand
ucaccaggaugcggaauga

SEQ ID NO: 87877 - RNA, 19 nt, Homo sapiens
  misc_RNA (1)...(19): siRNA sense strand
agcaggagcuggccaguga

SEQ ID NO: 87878 - RNA, 19 nt, Homo sapiens
  misc_RNA (1)...(19): siRNA sense strand
gaagaaggaggugcaguuc

SEQ ID NO: 87879 - RNA, 19 nt, Homo sapiens
  misc_RNA (1)...(19): siRNA sense strand
ggccaaguaugauaagaag

SEQ ID NO: 87880 - RNA, 19 nt, Homo sapiens
  misc_RNA (1)...(19): siRNA sense strand
gugaggugguggugaagaa

SEQ ID NO: 87881 - RNA, 19 nt, Homo sapiens
  misc_RNA (1)...(19): siRNA sense strand
ccaaguaugauaagaagau

SEQ ID NO: 87882 - RNA, 19 nt, Homo sapiens
  misc_RNA (1)...(19): siRNA sense strand
ccaggaugcggaaugauuu

SEQ ID NO: 87883 - RNA, 19 nt, Homo sapiens
  misc_RNA (1)...(19): siRNA sense strand
gggagaaagagcugaaaga

SEQ ID NO: 87884 - RNA, 19 nt, Homo sapiens
  misc_RNA (1)...(19): siRNA sense strand
gggaggagaugagcgagau

SEQ ID NO: 87885 - RNA, 19 nt, Homo sapiens
  misc_RNA (1)...(19): siRNA sense strand
gaacaaccugacagagaug

SEQ ID NO: 87886 - RNA, 19 nt, Homo sapiens
  misc_RNA (1)...(19): siRNA sense strand
gagaggcaaguucgagaaa

SEQ ID NO: 87887 - RNA, 19 nt, Homo sapiens
  misc_RNA (1)...(19): siRNA sense strand
ccgaggagaucaccaggau

SEQ ID NO: 87888 - RNA, 19 nt, Homo sapiens
  misc_RNA (1)...(19): siRNA sense strand
gcacuguagucaugaagcu

SEQ ID NO: 87889 - RNA, 19 nt, Homo sapiens
  misc_RNA (1)...(19): siRNA sense strand
gaagaacagcaccaucaag

SEQ ID NO: 87890 - RNA, 19 nt, Homo sapiens
  misc_RNA (1)...(19): siRNA sense strand
cagaggacaugagcaagga

SEQ ID NO: 87891 - RNA, 19 nt, Homo sapiens
  misc_RNA (1)...(19): siRNA sense strand
gaaagagcaccgcauacag

SEQ ID NO: 87892 - RNA, 19 nt, Homo sapiens
  misc_RNA (1)...(19): siRNA sense strand
gcagugggagcaugaagug

SEQ ID NO: 87893 - RNA, 19 nt, Homo sapiens
  misc_RNA (1)...(19): siRNA sense strand
gacgagcucuaucggaagu

SEQ ID NO: 87894 - RNA, 19 nt, Homo sapiens
  misc_RNA (1)...(19): siRNA sense strand
caaguaugauaagaagaug

SEQ ID NO: 87895 - RNA, 19 nt, Homo sapiens
  misc_RNA (1)...(19): siRNA sense strand
cagaagacaggguucaaga

SEQ ID NO: 87896 - RNA, 19 nt, Homo sapiens
  misc_RNA (1)...(19): siRNA sense strand
gaaacacaccgaggagauc

SEQ ID NO: 87897 - RNA, 19 nt, Homo sapiens
  misc_RNA (1)...(19): siRNA sense strand
acaaagaccgggagaugga

SEQ ID NO: 87898 - RNA, 19 nt, Homo sapiens
  misc_RNA (1)...(19): siRNA sense strand
ggacaacgugggcuucaag

SEQ ID NO: 87899 - RNA, 19 nt, Homo sapiens
  misc_RNA (1)...(19): siRNA sense strand
uggcagacccucuccagaa

SEQ ID NO: 87900 - RNA, 19 nt, Homo sapiens
  misc_RNA (1)...(19): siRNA sense strand
cgacaucacccucaacaac

SEQ ID NO: 87901 - RNA, 19 nt, Homo sapiens
  misc_RNA (1)...(19): siRNA sense strand
gggaggaacgaaacuacuu

SEQ ID NO: 87902 - RNA, 19 nt, Homo sapiens
  misc_RNA (1)...(19): siRNA sense strand
aggcugagcugcggaacaa

SEQ ID NO: 87903 - RNA, 19 nt, Homo sapiens
  misc_RNA (1)...(19): siRNA sense strand
ggaggaacgaaacuacuuc

SEQ ID NO: 87904 - RNA, 19 nt, Homo sapiens
  misc_RNA (1)...(19): siRNA sense strand
uccaggaggugcagcagaa

SEQ ID NO: 87905 - RNA, 19 nt, Homo sapiens
  misc_RNA (1)...(19): siRNA sense strand
ggcagacccucuccagaag

SEQ ID NO: 87906 - RNA, 19 nt, Homo sapiens
  misc_RNA (1)...(19): siRNA sense strand
gagggacgaacucgacuug

SEQ ID NO: 87907 - RNA, 19 nt, Homo sapiens
  misc_RNA (1)...(19): siRNA sense strand
auaagaagaugaagaugcu

SEQ ID NO: 87908 - RNA, 19 nt, Homo sapiens
  misc_RNA (1)...(19): siRNA sense strand
gcuggaggauguucuugag

SEQ ID NO: 87909 - RNA, 19 nt, Homo sapiens
  misc_RNA (1)...(19): siRNA sense strand
agaagaaggaggugcaguu

SEQ ID NO: 87910 - RNA, 19 nt, Homo sapiens
  misc_RNA (1)...(19): siRNA sense strand
gcagaaacagcucgcaaac

SEQ ID NO: 87911 - RNA, 19 nt, Homo sapiens
  misc_RNA (1)...(19): siRNA sense strand
ggacaugcgggcacugaag

SEQ ID NO: 87912 - RNA, 19 nt, Homo sapiens
  misc_RNA (1)...(19): siRNA sense strand
caucaaggaccugcaguau

SEQ ID NO: 87913 - RNA, 19 nt, Homo sapiens
  misc_RNA (1)...(19): siRNA sense strand
ucaacaaccuggcccucau

SEQ ID NO: 87914 - RNA, 19 nt, Homo sapiens
  misc_RNA (1)...(19): siRNA sense strand
gaagaaccugcggcugaaa

SEQ ID NO: 87915 - RNA, 19 nt, Homo sapiens
  misc_RNA (1)...(19): siRNA sense strand
gaaguggaggagaggaaga

SEQ ID NO: 87916 - RNA, 19 nt, Homo sapiens
  misc_RNA (1)...(19): siRNA sense strand
cgaagaacagcaccaucaa

SEQ ID NO: 87917 - RNA, 19 nt, Homo sapiens
  misc_RNA (1)...(19): siRNA sense strand
ggagaaagagcugaaagac

SEQ ID NO: 87918 - RNA, 19 nt, Homo sapiens
  misc_RNA (1)...(19): siRNA sense strand
gacaagauccacaccuucu

SEQ ID NO: 87919 - RNA, 19 nt, Homo sapiens
  misc_RNA (1)...(19): siRNA sense strand
caaccuggcccucaucaac

SEQ ID NO: 87920 - RNA, 19 nt, Homo sapiens
  misc_RNA (1)...(19): siRNA sense strand
uggaggacaugcggaagaa

SEQ ID NO: 87921 - RNA, 19 nt, Homo sapiens
  misc_RNA (1)...(19): siRNA sense strand
gcacguaugaggcaaagcu

SEQ ID NO: 87922 - RNA, 19 nt, Homo sapiens
  misc_RNA (1)...(19): siRNA sense strand
ucgaagaacagcaccauca

SEQ ID NO: 87923 - RNA, 19 nt, Homo sapiens
  misc_RNA (1)...(19): siRNA sense strand
gaaacagcucgcaaacuac

SEQ ID NO: 87924 - RNA, 19 nt, Homo sapiens
  misc_RNA (1)...(19): siRNA sense strand
ggagauggcagaggugucu

SEQ ID NO: 87925 - RNA, 19 nt, Homo sapiens
  misc_RNA (1)...(19): siRNA sense strand
agaaagagcaccgcauaca

SEQ ID NO: 87926 - RNA, 19 nt, Homo sapiens
  misc_RNA (1)...(19): siRNA sense strand
gguccuggcugccucuaac

SEQ ID NO: 87927 - RNA, 19 nt, Homo sapiens
  misc_RNA (1)...(19): siRNA sense strand
agguggagaucaaggugua

SEQ ID NO: 87928 - RNA, 19 nt, Homo sapiens
  misc_RNA (1)...(19): siRNA sense strand
acaacgacaucacccucaa

SEQ ID NO: 87929 - RNA, 19 nt, Homo sapiens
  misc_RNA (1)...(19): siRNA sense strand
agaaauugaggccaaguau

SEQ ID NO: 87930 - RNA, 19 nt, Homo sapiens
  misc_RNA (1)...(19): siRNA sense strand
gaaggcugagggcacugua

SEQ ID NO: 87931 - RNA, 19 nt, Homo sapiens
  misc_RNA (1)...(19): siRNA sense strand
caagaaccucgugcuagaa

SEQ ID NO: 87932 - RNA, 19 nt, Homo sapiens
  misc_RNA (1)...(19): siRNA sense strand
ggaagaauggccagaucca

SEQ ID NO: 87933 - RNA, 19 nt, Homo sapiens
  misc_RNA (1)...(19): siRNA sense strand
gaggccaaguaugauaaga

SEQ ID NO: 87934 - RNA, 19 nt, Homo sapiens
  misc_RNA (1)...(19): siRNA sense strand
agaucaagguguacaagca

SEQ ID NO: 87935 - RNA, 19 nt, Homo sapiens
  misc_RNA (1)...(19): siRNA sense strand
ugaaacacaccgaggagau

SEQ ID NO: 87936 - RNA, 19 nt, Homo sapiens
  misc_RNA (1)...(19): siRNA sense strand
aggauguucuugagucgaa

SEQ ID NO: 87937 - RNA, 19 nt, Homo sapiens
  misc_RNA (1)...(19): siRNA sense strand
cccgcaagcuggaggaugu

SEQ ID NO: 87938 - RNA, 19 nt, Homo sapiens
  misc_RNA (1)...(19): siRNA sense strand
gaaagucagggagaaagag

SEQ ID NO: 87939 - RNA, 19 nt, Homo sapiens
  misc_RNA (1)...(19): siRNA sense strand
ugaaagucagggagaaaga

SEQ ID NO: 87940 - RNA, 19 nt, Homo sapiens
  misc_RNA (1)...(19): siRNA sense strand
gcagaagacaggguucaag

SEQ ID NO: 87941 - RNA, 19 nt, Homo sapiens
  misc_RNA (1)...(19): siRNA sense strand
ccaucaaggaccugcagua

SEQ ID NO: 87942 - RNA, 19 nt, Homo sapiens
  misc_RNA (1)...(19): siRNA sense strand
gaagcuggcacagaaagag

SEQ ID NO: 87943 - RNA, 19 nt, Homo sapiens
  misc_RNA (1)...(19): siRNA sense strand
agaagacaggguucaagaa

SEQ ID NO: 87944 - RNA, 19 nt, Homo sapiens
  misc_RNA (1)...(19): siRNA sense strand
gaugagcgagaugcagaaa

SEQ ID NO: 87945 - RNA, 19 nt, Homo sapiens
  misc_RNA (1)...(19): siRNA sense strand
aaagcccguuugaaaguca

SEQ ID NO: 87946 - RNA, 19 nt, Homo sapiens
  misc_RNA (1)...(19): siRNA sense strand
gcugagggcacuguaguca

SEQ ID NO: 87947 - RNA, 19 nt, Homo sapiens
  misc_RNA (1)...(19): siRNA sense strand
guacaagcagaaagugaag

SEQ ID NO: 87948 - RNA, 19 nt, Homo sapiens
  misc_RNA (1)...(19): siRNA sense strand
ucacagaagucaugaauaa

SEQ ID NO: 87949 - RNA, 19 nt, Homo sapiens
  misc_RNA (1)...(19): siRNA sense strand
gggaggaauugguauauua

SEQ ID NO: 87950 - RNA, 19 nt, Homo sapiens
  misc_RNA (1)...(19): siRNA sense strand
gauaaacacuacccuugua

SEQ ID NO: 87951 - RNA, 19 nt, Homo sapiens
  misc_RNA (1)...(19): siRNA sense strand
uauaugaacucaggucuua

SEQ ID NO: 87952 - RNA, 19 nt, Homo sapiens
  misc_RNA (1)...(19): siRNA sense strand
caacagaucucgagaagac

SEQ ID NO: 87953 - RNA, 19 nt, Homo sapiens
  misc_RNA (1)...(19): siRNA sense strand
gaagacagcuggcuaaaau

SEQ ID NO: 87954 - RNA, 19 nt, Homo sapiens
  misc_RNA (1)...(19): siRNA sense strand
caagagguguugccaaaga

SEQ ID NO: 87955 - RNA, 19 nt, Homo sapiens
  misc_RNA (1)...(19): siRNA sense strand
gauccggaccuaauauaua

SEQ ID NO: 87956 - RNA, 19 nt, Homo sapiens
  misc_RNA (1)...(19): siRNA sense strand
ggaggauucuucucucaga

SEQ ID NO: 87957 - RNA, 19 nt, Homo sapiens
  misc_RNA (1)...(19): siRNA sense strand
gaaaguugauccaagaaaa

SEQ ID NO: 87958 - RNA, 19 nt, Homo sapiens
  misc_RNA (1)...(19): siRNA sense strand
gaaacaagcaaucuauaca

SEQ ID NO: 87959 - RNA, 19 nt, Homo sapiens
  misc_RNA (1)...(19): siRNA sense strand
gucaagagguguugccaaa

SEQ ID NO: 87960 - RNA, 19 nt, Homo sapiens
  misc_RNA (1)...(19): siRNA sense strand
uuacacaguuccacuuauu

SEQ ID NO: 87961 - RNA, 19 nt, Homo sapiens
  misc_RNA (1)...(19): siRNA sense strand
ggacuuggaacacguggua

SEQ ID NO: 87962 - RNA, 19 nt, Homo sapiens
  misc_RNA (1)...(19): siRNA sense strand
caaagauucacgaagauaa

SEQ ID NO: 87963 - RNA, 19 nt, Homo sapiens
  misc_RNA (1)...(19): siRNA sense strand
acacuacccuuguacuuug

SEQ ID NO: 87964 - RNA, 19 nt, Homo sapiens
  misc_RNA (1)...(19): siRNA sense strand
agaaucagcuccuguugga

SEQ ID NO: 87965 - RNA, 19 nt, Homo sapiens
  misc_RNA (1)...(19): siRNA sense strand
ggaagaaucagcuccuguu

SEQ ID NO: 87966 - RNA, 19 nt, Homo sapiens
  misc_RNA (1)...(19): siRNA sense strand
ggaguucaguuucuggaau

SEQ ID NO: 87967 - RNA, 19 nt, Homo sapiens
  misc_RNA (1)...(19): siRNA sense strand
gaaugagccugugccaaga

SEQ ID NO: 87968 - RNA, 19 nt, Homo sapiens
  misc_RNA (1)...(19): siRNA sense strand
aaacauggcugggaggaau

SEQ ID NO: 87969 - RNA, 19 nt, Homo sapiens
  misc_RNA (1)...(19): siRNA sense strand
ucacgaagauaaacacuac

SEQ ID NO: 87970 - RNA, 19 nt, Homo sapiens
  misc_RNA (1)...(19): siRNA sense strand
ggcaagaagugacaugcuu

SEQ ID NO: 87971 - RNA, 19 nt, Homo sapiens
  misc_RNA (1)...(19): siRNA sense strand
ccuagaagcauacaacaaa

SEQ ID NO: 87972 - RNA, 19 nt, Homo sapiens
  misc_RNA (1)...(19): siRNA sense strand
ggaaaguugauccaagaaa

SEQ ID NO: 87973 - RNA, 19 nt, Homo sapiens
  misc_RNA (1)...(19): siRNA sense strand
ggauucuucucucagauug

SEQ ID NO: 87974 - RNA, 19 nt, Homo sapiens
  misc_RNA (1)...(19): siRNA sense strand
ugccaaagauucacgaaga

SEQ ID NO: 87975 - RNA, 19 nt, Homo sapiens
  misc_RNA (1)...(19): siRNA sense strand
ggaaacaagcaaucuauac

SEQ ID NO: 87976 - RNA, 19 nt, Homo sapiens
  misc_RNA (1)...(19): siRNA sense strand
ccaagauccggaccuaaua

SEQ ID NO: 87977 - RNA, 19 nt, Homo sapiens
  misc_RNA (1)...(19): siRNA sense strand
ccggaaaguugauccaaga

SEQ ID NO: 87978 - RNA, 19 nt, Homo sapiens
  misc_RNA (1)...(19): siRNA sense strand
caggaaccaugauugaaug

SEQ ID NO: 87979 - RNA, 19 nt, Homo sapiens
  misc_RNA (1)...(19): siRNA sense strand
uuacugggcucgugcaauc

SEQ ID NO: 87980 - RNA, 19 nt, Homo sapiens
  misc_RNA (1)...(19): siRNA sense strand
gaagaaucagcuccuguug

SEQ ID NO: 87981 - RNA, 19 nt, Homo sapiens
  misc_RNA (1)...(19): siRNA sense strand
gaccaggaaccaugauuga

SEQ ID NO: 87982 - RNA, 19 nt, Homo sapiens
  misc_RNA (1)...(19): siRNA sense strand
gaguucaguuucuggaaug

SEQ ID NO: 87983 - RNA, 19 nt, Homo sapiens
  misc_RNA (1)...(19): siRNA sense strand
cagacaggaugguaacgaa

SEQ ID NO: 87984 - RNA, 19 nt, Homo sapiens
  misc_RNA (1)...(19): siRNA sense strand
ccaaagauucacgaagaua

SEQ ID NO: 87985 - RNA, 19 nt, Homo sapiens
  misc_RNA (1)...(19): siRNA sense strand
gaaucaugaucccacugaa

SEQ ID NO: 87986 - RNA, 19 nt, Homo sapiens
  misc_RNA (1)...(19): siRNA sense strand
cgagaagacagcuggcuaa

SEQ ID NO: 87987 - RNA, 19 nt, Homo sapiens
  misc_RNA (1)...(19): siRNA sense strand
ggaauugguauauuacaca

SEQ ID NO: 87988 - RNA, 19 nt, Homo sapiens
  misc_RNA (1)...(19): siRNA sense strand
gaaaagaugcccacuccaa

SEQ ID NO: 87989 - RNA, 19 nt, Homo sapiens
  misc_RNA (1)...(19): siRNA sense strand
gccaaagauucacgaagau

SEQ ID NO: 87990 - RNA, 19 nt, Homo sapiens
  misc_RNA (1)...(19): siRNA sense strand
gaagucaugaauaaacuca

SEQ ID NO: 87991 - RNA, 19 nt, Homo sapiens
  misc_RNA (1)...(19): siRNA sense strand
ccaggaaccaugauugaau

SEQ ID NO: 87992 - RNA, 19 nt, Homo sapiens
  misc_RNA (1)...(19): siRNA sense strand
ggaauuucguaaggcaaga

SEQ ID NO: 87993 - RNA, 19 nt, Homo sapiens
  misc_RNA (1)...(19): siRNA sense strand
caagauccggaccuaauau

SEQ ID NO: 87994 - RNA, 19 nt, Homo sapiens
  misc_RNA (1)...(19): siRNA sense strand
gccaagauccggaccuaau

SEQ ID NO: 87995 - RNA, 19 nt, Homo sapiens
  misc_RNA (1)...(19): siRNA sense strand
aaaggaaacaagcaaucua

SEQ ID NO: 87996 - RNA, 19 nt, Homo sapiens
  misc_RNA (1)...(19): siRNA sense strand
cagaagucaugaauaaacu

SEQ ID NO: 87997 - RNA, 19 nt, Homo sapiens
  misc_RNA (1)...(19): siRNA sense strand
gagaagacagcuggcuaaa

SEQ ID NO: 87998 - RNA, 19 nt, Homo sapiens
  misc_RNA (1)...(19): siRNA sense strand
gcugggaggaauugguaua

SEQ ID NO: 87999 - RNA, 19 nt, Homo sapiens
  misc_RNA (1)...(19): siRNA sense strand
gugccaagauccggaccua

SEQ ID NO: 88000 - RNA, 19 nt, Homo sapiens
  misc_RNA (1)...(19): siRNA sense strand
uauuacacaguuccacuua

SEQ ID NO: 88001 - RNA, 19 nt, Homo sapiens
  misc_RNA (1)...(19): siRNA sense strand
aaacacuacccuuguacuu

SEQ ID NO: 88002 - RNA, 19 nt, Homo sapiens
  misc_RNA (1)...(19): siRNA sense strand
gggaagacauacggaaugc

SEQ ID NO: 88003 - RNA, 19 nt, Homo sapiens
  misc_RNA (1)...(19): siRNA sense strand
agucaugaauaaacucaga

SEQ ID NO: 88004 - RNA, 19 nt, Homo sapiens
  misc_RNA (1)...(19): siRNA sense strand
gaggauucuucucucagau

SEQ ID NO: 88005 - RNA, 19 nt, Homo sapiens
  misc_RNA (1)...(19): siRNA sense strand
auccggaccuaauauauau

SEQ ID NO: 88006 - RNA, 19 nt, Homo sapiens
  misc_RNA (1)...(19): siRNA sense strand
ggaggaauugguauauuac

SEQ ID NO: 88007 - RNA, 19 nt, Homo sapiens
  misc_RNA (1)...(19): siRNA sense strand
aaaccggaaugccuagaag

SEQ ID NO: 88008 - RNA, 19 nt, Homo sapiens
  misc_RNA (1)...(19): siRNA sense strand
cgaccaggaaccaugauug

SEQ ID NO: 88009 - RNA, 19 nt, Homo sapiens
  misc_RNA (1)...(19): siRNA sense strand
acucaggucuuaccaacuc

SEQ ID NO: 88010 - RNA, 19 nt, Homo sapiens
  misc_RNA (1)...(19): siRNA sense strand
ucagaccagggaagacaua

SEQ ID NO: 88011 - RNA, 19 nt, Homo sapiens
  misc_RNA (1)...(19): siRNA sense strand
ugggaggaauugguauauu

SEQ ID NO: 88012 - RNA, 19 nt, Homo sapiens
  misc_RNA (1)...(19): siRNA sense strand
uaaaccggaaugccuagaa

SEQ ID NO: 88013 - RNA, 19 nt, Homo sapiens
  misc_RNA (1)...(19): siRNA sense strand
uaccaacuccgaccaggaa

SEQ ID NO: 88014 - RNA, 19 nt, Homo sapiens
  misc_RNA (1)...(19): siRNA sense strand
aaggaaacaagcaaucuau

SEQ ID NO: 88015 - RNA, 19 nt, Homo sapiens
  misc_RNA (1)...(19): siRNA sense strand
cagcaacagaucucgagaa

SEQ ID NO: 88016 - RNA, 19 nt, Homo sapiens
  misc_RNA (1)...(19): siRNA sense strand
ccucacagaagucaugaau

SEQ ID NO: 88017 - RNA, 19 nt, Homo sapiens
  misc_RNA (1)...(19): siRNA sense strand
agaaucaugaucccacuga

SEQ ID NO: 88018 - RNA, 19 nt, Homo sapiens
  misc_RNA (1)...(19): siRNA sense strand
ugcaccaucuuugggcuua

SEQ ID NO: 88019 - RNA, 19 nt, Homo sapiens
  misc_RNA (1)...(19): siRNA sense strand
ggaccuaauauauaugaac

SEQ ID NO: 88020 - RNA, 19 nt, Homo sapiens
  misc_RNA (1)...(19): siRNA sense strand
aagauccggaccuaauaua

SEQ ID NO: 88021 - RNA, 19 nt, Homo sapiens
  misc_RNA (1)...(19): siRNA sense strand
aaagaugcccacuccaauc

SEQ ID NO: 88022 - RNA, 19 nt, Homo sapiens
  misc_RNA (1)...(19): siRNA sense strand
uuauuuguccggaaaguug

SEQ ID NO: 88023 - RNA, 19 nt, Homo sapiens
  misc_RNA (1)...(19): siRNA sense strand
acacaguuccacuuauuca

SEQ ID NO: 88024 - RNA, 19 nt, Homo sapiens
  misc_RNA (1)...(19): siRNA sense strand
aggaaacaagcaaucuaua

SEQ ID NO: 88025 - RNA, 19 nt, Homo sapiens
  misc_RNA (1)...(19): siRNA sense strand
gggcuuacagggaucuuca

SEQ ID NO: 88026 - RNA, 19 nt, Homo sapiens
  misc_RNA (1)...(19): siRNA sense strand
acagaagucaugaauaaac

SEQ ID NO: 88027 - RNA, 19 nt, Homo sapiens
  misc_RNA (1)...(19): siRNA sense strand
agcaacagaucucgagaag

SEQ ID NO: 88028 - RNA, 19 nt, Homo sapiens
  misc_RNA (1)...(19): siRNA sense strand
gaggaauugguauauuaca

SEQ ID NO: 88029 - RNA, 19 nt, Homo sapiens
  misc_RNA (1)...(19): siRNA sense strand
gagguguugccaaagauuc

SEQ ID NO: 88030 - RNA, 19 nt, Homo sapiens
  misc_RNA (1)...(19): siRNA sense strand
gaauuucguaaggcaagaa

SEQ ID NO: 88031 - RNA, 19 nt, Homo sapiens
  misc_RNA (1)...(19): siRNA sense strand
ucggaggauucuucucuca

SEQ ID NO: 88032 - RNA, 19 nt, Homo sapiens
  misc_RNA (1)...(19): siRNA sense strand
cuagaagcauacaacaaaa

SEQ ID NO: 88033 - RNA, 19 nt, Homo sapiens
  misc_RNA (1)...(19): siRNA sense strand
uggcugggaggaauuggua

SEQ ID NO: 88034 - RNA, 19 nt, Homo sapiens
  misc_RNA (1)...(19): siRNA sense strand
aacacuacccuuguacuuu

SEQ ID NO: 88035 - RNA, 19 nt, Homo sapiens
  misc_RNA (1)...(19): siRNA sense strand
gcaacagaucucgagaaga

SEQ ID NO: 88036 - RNA, 19 nt, Homo sapiens
  misc_RNA (1)...(19): siRNA sense strand
agauaaacacuacccuugu

SEQ ID NO: 88037 - RNA, 19 nt, Homo sapiens
  misc_RNA (1)...(19): siRNA sense strand
aagagguguugccaaagau

SEQ ID NO: 88038 - RNA, 19 nt, Homo sapiens
  misc_RNA (1)...(19): siRNA sense strand
ccggaccuaauauauauga

SEQ ID NO: 88039 - RNA, 19 nt, Homo sapiens
  misc_RNA (1)...(19): siRNA sense strand
caacacagcugucuucuug

SEQ ID NO: 88040 - RNA, 19 nt, Homo sapiens
  misc_RNA (1)...(19): siRNA sense strand
ggcaagcccuguccacaua

SEQ ID NO: 88041 - RNA, 19 nt, Homo sapiens
  misc_RNA (1)...(19): siRNA sense strand
gaacaacacagcugucuuc

SEQ ID NO: 88042 - RNA, 19 nt, Homo sapiens
  misc_RNA (1)...(19): siRNA sense strand
ccaaaugggugcugaauac

SEQ ID NO: 88043 - RNA, 19 nt, Homo sapiens
  misc_RNA (1)...(19): siRNA sense strand
ucacggaggugcagacuau

SEQ ID NO: 88044 - RNA, 19 nt, Homo sapiens
  misc_RNA (1)...(19): siRNA sense strand
gcuggaaacccuguuauua

SEQ ID NO: 88045 - RNA, 19 nt, Homo sapiens
  misc_RNA (1)...(19): siRNA sense strand
gaagaaaggccacguguac

SEQ ID NO: 88046 - RNA, 19 nt, Homo sapiens
  misc_RNA (1)...(19): siRNA sense strand
ggacagaaaccucuuuaca

SEQ ID NO: 88047 - RNA, 19 nt, Homo sapiens
  misc_RNA (1)...(19): siRNA sense strand
gaagagagugauugucauu

SEQ ID NO: 88048 - RNA, 19 nt, Homo sapiens
  misc_RNA (1)...(19): siRNA sense strand
agaaaccucuuuacaccua

SEQ ID NO: 88049 - RNA, 19 nt, Homo sapiens
  misc_RNA (1)...(19): siRNA sense strand
cagauggacugcugcauga

SEQ ID NO: 88050 - RNA, 19 nt, Homo sapiens
  misc_RNA (1)...(19): siRNA sense strand
gcaaugugaugcugagauc

SEQ ID NO: 88051 - RNA, 19 nt, Homo sapiens
  misc_RNA (1)...(19): siRNA sense strand
aaagaugccuccuggaaau

SEQ ID NO: 88052 - RNA, 19 nt, Homo sapiens
  misc_RNA (1)...(19): siRNA sense strand
ucacggaaaucgauacugu

SEQ ID NO: 88053 - RNA, 19 nt, Homo sapiens
  misc_RNA (1)...(19): siRNA sense strand
ucaugucgguguccuuuaa

SEQ ID NO: 88054 - RNA, 19 nt, Homo sapiens
  misc_RNA (1)...(19): siRNA sense strand
guccguggcuuucucauug

SEQ ID NO: 88055 - RNA, 19 nt, Homo sapiens
  misc_RNA (1)...(19): siRNA sense strand
caaagaugccuccuggaaa

SEQ ID NO: 88056 - RNA, 19 nt, Homo sapiens
  misc_RNA (1)...(19): siRNA sense strand
gcucaugugcuucuuggua

SEQ ID NO: 88057 - RNA, 19 nt, Homo sapiens
  misc_RNA (1)...(19): siRNA sense strand
ggaagaagagagugauugu

SEQ ID NO: 88058 - RNA, 19 nt, Homo sapiens
  misc_RNA (1)...(19): siRNA sense strand
ggaagugccaccaagauuc

SEQ ID NO: 88059 - RNA, 19 nt, Homo sapiens
  misc_RNA (1)...(19): siRNA sense strand
gaguacaggugcucaugug

SEQ ID NO: 88060 - RNA, 19 nt, Homo sapiens
  misc_RNA (1)...(19): siRNA sense strand
ucaaagaugccuccuggaa

SEQ ID NO: 88061 - RNA, 19 nt, Homo sapiens
  misc_RNA (1)...(19): siRNA sense strand
uagcagagcggaugcagaa

SEQ ID NO: 88062 - RNA, 19 nt, Homo sapiens
  misc_RNA (1)...(19): siRNA sense strand
agacuggaguucaacauuc

SEQ ID NO: 88063 - RNA, 19 nt, Homo sapiens
  misc_RNA (1)...(19): siRNA sense strand
gaaguuccagcgugagcua

SEQ ID NO: 88064 - RNA, 19 nt, Homo sapiens
  misc_RNA (1)...(19): siRNA sense strand
acagguggcugggaaaguu

SEQ ID NO: 88065 - RNA, 19 nt, Homo sapiens
  misc_RNA (1)...(19): siRNA sense strand
ggauugaggaacugaagaa

SEQ ID NO: 88066 - RNA, 19 nt, Homo sapiens
  misc_RNA (1)...(19): siRNA sense strand
gauacuguggucuucauuu

SEQ ID NO: 88067 - RNA, 19 nt, Homo sapiens
  misc_RNA (1)...(19): siRNA sense strand
uggagcaggugaaagagaa

SEQ ID NO: 88068 - RNA, 19 nt, Homo sapiens
  misc_RNA (1)...(19): siRNA sense strand
caagauugccacccugaug

SEQ ID NO: 88069 - RNA, 19 nt, Homo sapiens
  misc_RNA (1)...(19): siRNA sense strand
gauccuagagccugacguu

SEQ ID NO: 88070 - RNA, 19 nt, Homo sapiens
  misc_RNA (1)...(19): siRNA sense strand
gaagugccaccaagauucu

SEQ ID NO: 88071 - RNA, 19 nt, Homo sapiens
  misc_RNA (1)...(19): siRNA sense strand
cagccacugucagaugaua

SEQ ID NO: 88072 - RNA, 19 nt, Homo sapiens
  misc_RNA (1)...(19): siRNA sense strand
ggucugugguggccucuag

SEQ ID NO: 88073 - RNA, 19 nt, Homo sapiens
  misc_RNA (1)...(19): siRNA sense strand
ccaagauucugcuggaaac

SEQ ID NO: 88074 - RNA, 19 nt, Homo sapiens
  misc_RNA (1)...(19): siRNA sense strand
aagaagagagugauuguca

SEQ ID NO: 88075 - RNA, 19 nt, Homo sapiens
  misc_RNA (1)...(19): siRNA sense strand
gggaagaagagagugauug

SEQ ID NO: 88076 - RNA, 19 nt, Homo sapiens
  misc_RNA (1)...(19): siRNA sense strand
ugagaaggaacaggugaua

SEQ ID NO: 88077 - RNA, 19 nt, Homo sapiens
  misc_RNA (1)...(19): siRNA sense strand
cucaugugcuucuugguaa

SEQ ID NO: 88078 - RNA, 19 nt, Homo sapiens
  misc_RNA (1)...(19): siRNA sense strand
ugaaagagaagaccaacca

SEQ ID NO: 88079 - RNA, 19 nt, Homo sapiens
  misc_RNA (1)...(19): siRNA sense strand
acagugacauguuuaacca

SEQ ID NO: 88080 - RNA, 19 nt, Homo sapiens
  misc_RNA (1)...(19): siRNA sense strand
gcacgggauugaggaacug

SEQ ID NO: 88081 - RNA, 19 nt, Homo sapiens
  misc_RNA (1)...(19): siRNA sense strand
uugaggaacugaagaaggu

SEQ ID NO: 88082 - RNA, 19 nt, Homo sapiens
  misc_RNA (1)...(19): siRNA sense strand
aggcugagcucaccaacca

SEQ ID NO: 88083 - RNA, 19 nt, Homo sapiens
  misc_RNA (1)...(19): siRNA sense strand
ugacauguuuaaccagaag

SEQ ID NO: 88084 - RNA, 19 nt, Homo sapiens
  misc_RNA (1)...(19): siRNA sense strand
agagagugauugucauugg

SEQ ID NO: 88085 - RNA, 19 nt, Homo sapiens
  misc_RNA (1)...(19): siRNA sense strand
gagcauggccagaaaugac

SEQ ID NO: 88086 - RNA, 19 nt, Homo sapiens
  misc_RNA (1)...(19): siRNA sense strand
cggauggcauuccucaugu

SEQ ID NO: 88087 - RNA, 19 nt, Homo sapiens
  misc_RNA (1)...(19): siRNA sense strand
uagagugcauccacaccuu

SEQ ID NO: 88088 - RNA, 19 nt, Homo sapiens
  misc_RNA (1)...(19): siRNA sense strand
gcagaugcugagaacauug

SEQ ID NO: 88089 - RNA, 19 nt, Homo sapiens
  misc_RNA (1)...(19): siRNA sense strand
cagugagcauggccagaaa

SEQ ID NO: 88090 - RNA, 19 nt, Homo sapiens
  misc_RNA (1)...(19): siRNA sense strand
gacagaaaccucuuuacac

SEQ ID NO: 88091 - RNA, 19 nt, Homo sapiens
  misc_RNA (1)...(19): siRNA sense strand
ccagugagcauggccagaa

SEQ ID NO: 88092 - RNA, 19 nt, Homo sapiens
  misc_RNA (1)...(19): siRNA sense strand
cccagccacugucagauga

SEQ ID NO: 88093 - RNA, 19 nt, Homo sapiens
  misc_RNA (1)...(19): siRNA sense strand
cuggaaaucuugcggacau

SEQ ID NO: 88094 - RNA, 19 nt, Homo sapiens
  misc_RNA (1)...(19): siRNA sense strand
aggagaaacagaaagcuuu

SEQ ID NO: 88095 - RNA, 19 nt, Homo sapiens
  misc_RNA (1)...(19): siRNA sense strand
gugauugucauuggcauuu

SEQ ID NO: 88096 - RNA, 19 nt, Homo sapiens
  misc_RNA (1)...(19): siRNA sense strand
uacaggugcucaugugcuu

SEQ ID NO: 88097 - RNA, 19 nt, Homo sapiens
  misc_RNA (1)...(19): siRNA sense strand
aagggaacuucauccagaa

SEQ ID NO: 88098 - RNA, 19 nt, Homo sapiens
  misc_RNA (1)...(19): siRNA sense strand
uaguggagcaggugaaaga

SEQ ID NO: 88099 - RNA, 19 nt, Homo sapiens
  misc_RNA (1)...(19): siRNA sense strand
agaagaaaggccacgugua

SEQ ID NO: 88100 - RNA, 19 nt, Homo sapiens
  misc_RNA (1)...(19): siRNA sense strand
cauugcagcaucucaaaga

SEQ ID NO: 88101 - RNA, 19 nt, Homo sapiens
  misc_RNA (1)...(19): siRNA sense strand
gaagacuggaguucaacau

SEQ ID NO: 88102 - RNA, 19 nt, Homo sapiens
  misc_RNA (1)...(19): siRNA sense strand
uggaaacccuguuauuagc

SEQ ID NO: 88103 - RNA, 19 nt, Homo sapiens
  misc_RNA (1)...(19): siRNA sense strand
ucucauuggugaucacagu

SEQ ID NO: 88104 - RNA, 19 nt, Homo sapiens
  misc_RNA (1)...(19): siRNA sense strand
cuuuacaccuaccucauug

SEQ ID NO: 88105 - RNA, 19 nt, Homo sapiens
  misc_RNA (1)...(19): siRNA sense strand
ccuccgagcgauccacuuu

SEQ ID NO: 88106 - RNA, 19 nt, Homo sapiens
  misc_RNA (1)...(19): siRNA sense strand
cauguuggaccuucggauu

SEQ ID NO: 88107 - RNA, 19 nt, Homo sapiens
  misc_RNA (1)...(19): siRNA sense strand
ggaaacccuguuauuagca

SEQ ID NO: 88108 - RNA, 19 nt, Homo sapiens
  misc_RNA (1)...(19): siRNA sense strand
cuggaaacccuguuauuag

SEQ ID NO: 88109 - RNA, 19 nt, Homo sapiens
  misc_RNA (1)...(19): siRNA sense strand
gagaagucaaacccacuga

SEQ ID NO: 88110 - RNA, 19 nt, Homo sapiens
  misc_RNA (1)...(19): siRNA sense strand
ugggaaaguucaggaagug

SEQ ID NO: 88111 - RNA, 19 nt, Homo sapiens
  misc_RNA (1)...(19): siRNA sense strand
gugacauguuuaaccagaa

SEQ ID NO: 88112 - RNA, 19 nt, Homo sapiens
  misc_RNA (1)...(19): siRNA sense strand
caaucacggagaagucaaa

SEQ ID NO: 88113 - RNA, 19 nt, Homo sapiens
  misc_RNA (1)...(19): siRNA sense strand
ccacccugaugaagagugu

SEQ ID NO: 88114 - RNA, 19 nt, Homo sapiens
  misc_RNA (1)...(19): siRNA sense strand
uagcagcccauaagacugu

SEQ ID NO: 88115 - RNA, 19 nt, Homo sapiens
  misc_RNA (1)...(19): siRNA sense strand
ggauggcauuccucauguc

SEQ ID NO: 88116 - RNA, 19 nt, Homo sapiens
  misc_RNA (1)...(19): siRNA sense strand
gauugucauuggcauuucu

SEQ ID NO: 88117 - RNA, 19 nt, Homo sapiens
  misc_RNA (1)...(19): siRNA sense strand
gaagaagagagugauuguc

SEQ ID NO: 88118 - RNA, 19 nt, Homo sapiens
  misc_RNA (1)...(19): siRNA sense strand
aaugggugcugaauacagu

SEQ ID NO: 88119 - RNA, 19 nt, Homo sapiens
  misc_RNA (1)...(19): siRNA sense strand
ggccacugcuuuucuuuga

SEQ ID NO: 88120 - RNA, 19 nt, Homo sapiens
  misc_RNA (1)...(19): siRNA sense strand
gugcugauuuccgagaugu

SEQ ID NO: 88121 - RNA, 19 nt, Homo sapiens
  misc_RNA (1)...(19): siRNA sense strand
ggagaaacagaaagcuuuu

SEQ ID NO: 88122 - RNA, 19 nt, Homo sapiens
  misc_RNA (1)...(19): siRNA sense strand
gcagagcggaugcagaaaa

SEQ ID NO: 88123 - RNA, 19 nt, Homo sapiens
  misc_RNA (1)...(19): siRNA sense strand
agaagagagugauugucau

SEQ ID NO: 88124 - RNA, 19 nt, Homo sapiens
  misc_RNA (1)...(19): siRNA sense strand
gcagacccugggcaucauu

SEQ ID NO: 88125 - RNA, 19 nt, Homo sapiens
  misc_RNA (1)...(19): siRNA sense strand
gggcauugcagcaucucaa

SEQ ID NO: 88126 - RNA, 19 nt, Homo sapiens
  misc_RNA (1)...(19): siRNA sense strand
uggaagugccaccaagauu

SEQ ID NO: 88127 - RNA, 19 nt, Homo sapiens
  misc_RNA (1)...(19): siRNA sense strand
gccacugucagaugauauu

SEQ ID NO: 88128 - RNA, 19 nt, Homo sapiens
  misc_RNA (1)...(19): siRNA sense strand
ccggauggcauuccucaug

SEQ ID NO: 88129 - RNA, 19 nt, Homo sapiens
  misc_RNA (1)...(19): siRNA sense strand
ucacauggccacugcuuuu

SEQ ID NO: 88130 - RNA, 19 nt, Homo sapiens
  misc_RNA (1)...(19): siRNA sense strand
gccgaucccucugaagaag

SEQ ID NO: 88131 - RNA, 19 nt, Homo sapiens
  misc_RNA (1)...(19): siRNA sense strand
caaccaggguccccaguuc

SEQ ID NO: 88132 - RNA, 19 nt, Homo sapiens
  misc_RNA (1)...(19): siRNA sense strand
aagauugccacccugauga

SEQ ID NO: 88133 - RNA, 19 nt, Homo sapiens
  misc_RNA (1)...(19): siRNA sense strand
gaugccuccuggaaaucuu

SEQ ID NO: 88134 - RNA, 19 nt, Homo sapiens
  misc_RNA (1)...(19): siRNA sense strand
caggagaaacagaaagcuu

SEQ ID NO: 88135 - RNA, 19 nt, Homo sapiens
  misc_RNA (1)...(19): siRNA sense strand
gcucuuucccuccaucauc

SEQ ID NO: 88136 - RNA, 19 nt, Homo sapiens
  misc_RNA (1)...(19): siRNA sense strand
ggaggugcagacuauagug

SEQ ID NO: 88137 - RNA, 19 nt, Homo sapiens
  misc_RNA (1)...(19): siRNA sense strand
ggugcugauuuccgagaug

SEQ ID NO: 88138 - RNA, 19 nt, Homo sapiens
  misc_RNA (1)...(19): siRNA sense strand
ggcauugcagcaucucaaa

SEQ ID NO: 88139 - RNA, 19 nt, Homo sapiens
  misc_RNA (1)...(19): siRNA sense strand
ggaaguacuugauaaaucu

SEQ ID NO: 88140 - RNA, 19 nt, Homo sapiens
  misc_RNA (1)...(19): siRNA sense strand
ucaggaagcucaaguuguu

SEQ ID NO: 88141 - RNA, 19 nt, Homo sapiens
  misc_RNA (1)...(19): siRNA sense strand
gguaugaggucguuaaugg

SEQ ID NO: 88142 - RNA, 19 nt, Homo sapiens
  misc_RNA (1)...(19): siRNA sense strand
cuaaucaccuucuccguuu

SEQ ID NO: 88143 - RNA, 19 nt, Homo sapiens
  misc_RNA (1)...(19): siRNA sense strand
ugaaggaucucuaugcaau

SEQ ID NO: 88144 - RNA, 19 nt, Homo sapiens
  misc_RNA (1)...(19): siRNA sense strand
gauauuaauugcaccaaag

SEQ ID NO: 88145 - RNA, 19 nt, Homo sapiens
  misc_RNA (1)...(19): siRNA sense strand
cuauuuagcugcagugaug

SEQ ID NO: 88146 - RNA, 19 nt, Homo sapiens
  misc_RNA (1)...(19): siRNA sense strand
caagagacgcaaauauauu

SEQ ID NO: 88147 - RNA, 19 nt, Homo sapiens
  misc_RNA (1)...(19): siRNA sense strand
gauccuaacagugaaauuu

SEQ ID NO: 88148 - RNA, 19 nt, Homo sapiens
  misc_RNA (1)...(19): siRNA sense strand
aaaccaaccuagaaauugu

SEQ ID NO: 88149 - RNA, 19 nt, Homo sapiens
  misc_RNA (1)...(19): siRNA sense strand
gagaauccuaguagugaua

SEQ ID NO: 88150 - RNA, 19 nt, Homo sapiens
  misc_RNA (1)...(19): siRNA sense strand
gauuggagagugugguuua

SEQ ID NO: 88151 - RNA, 19 nt, Homo sapiens
  misc_RNA (1)...(19): siRNA sense strand
uuucuuaucccaccaaaua

SEQ ID NO: 88152 - RNA, 19 nt, Homo sapiens
  misc_RNA (1)...(19): siRNA sense strand
uuucggagcuggugacuug

SEQ ID NO: 88153 - RNA, 19 nt, Homo sapiens
  misc_RNA (1)...(19): siRNA sense strand
gggcaucgcuuccuguuuu

SEQ ID NO: 88154 - RNA, 19 nt, Homo sapiens
  misc_RNA (1)...(19): siRNA sense strand
guggacaccugacgacuau

SEQ ID NO: 88155 - RNA, 19 nt, Homo sapiens
  misc_RNA (1)...(19): siRNA sense strand
ucaagagacgcaaauauau

SEQ ID NO: 88156 - RNA, 19 nt, Homo sapiens
  misc_RNA (1)...(19): siRNA sense strand
uaaagaagaggcggaguuu

SEQ ID NO: 88157 - RNA, 19 nt, Homo sapiens
  misc_RNA (1)...(19): siRNA sense strand
ggacaccugacgacuauau

SEQ ID NO: 88158 - RNA, 19 nt, Homo sapiens
  misc_RNA (1)...(19): siRNA sense strand
gauaaaucuuugugguaug

SEQ ID NO: 88159 - RNA, 19 nt, Homo sapiens
  misc_RNA (1)...(19): siRNA sense strand
aaacuggaaguacuugaua

SEQ ID NO: 88160 - RNA, 19 nt, Homo sapiens
  misc_RNA (1)...(19): siRNA sense strand
ucacaagauugaaaugcuu

SEQ ID NO: 88161 - RNA, 19 nt, Homo sapiens
  misc_RNA (1)...(19): siRNA sense strand
guaaagaagaggcggaguu

SEQ ID NO: 88162 - RNA, 19 nt, Homo sapiens
  misc_RNA (1)...(19): siRNA sense strand
gggagaauccuaguaguga

SEQ ID NO: 88163 - RNA, 19 nt, Homo sapiens
  misc_RNA (1)...(19): siRNA sense strand
auauaaacaugaccaguga

SEQ ID NO: 88164 - RNA, 19 nt, Homo sapiens
  misc_RNA (1)...(19): siRNA sense strand
ugacgacuauauaaacaug

SEQ ID NO: 88165 - RNA, 19 nt, Homo sapiens
  misc_RNA (1)...(19): siRNA sense strand
ucuauaugccucagaauuu

SEQ ID NO: 88166 - RNA, 19 nt, Homo sapiens
  misc_RNA (1)...(19): siRNA sense strand
ugacuguucuucuuucauc

SEQ ID NO: 88167 - RNA, 19 nt, Homo sapiens
  misc_RNA (1)...(19): siRNA sense strand
gaugagcauuugagacaca

SEQ ID NO: 88168 - RNA, 19 nt, Homo sapiens
  misc_RNA (1)...(19): siRNA sense strand
ggagaauccuaguagugau

SEQ ID NO: 88169 - RNA, 19 nt, Homo sapiens
  misc_RNA (1)...(19): siRNA sense strand
uggaaguacuugauaaauc

SEQ ID NO: 88170 - RNA, 19 nt, Homo sapiens
  misc_RNA (1)...(19): siRNA sense strand
gguaaagcuugagauccua

SEQ ID NO: 88171 - RNA, 19 nt, Homo sapiens
  misc_RNA (1)...(19): siRNA sense strand
gaagcgguaugaggucguu

SEQ ID NO: 88172 - RNA, 19 nt, Homo sapiens
  misc_RNA (1)...(19): siRNA sense strand
caccaaauacuacuuuaug

SEQ ID NO: 88173 - RNA, 19 nt, Homo sapiens
  misc_RNA (1)...(19): siRNA sense strand
caugaaggaucucuaugca

SEQ ID NO: 88174 - RNA, 19 nt, Homo sapiens
  misc_RNA (1)...(19): siRNA sense strand
gaggcggaguuuccaauag

SEQ ID NO: 88175 - RNA, 19 nt, Homo sapiens
  misc_RNA (1)...(19): siRNA sense strand
gagacgcaaauauauugua

SEQ ID NO: 88176 - RNA, 19 nt, Homo sapiens
  misc_RNA (1)...(19): siRNA sense strand
gcaguugccagguuuguca

SEQ ID NO: 88177 - RNA, 19 nt, Homo sapiens
  misc_RNA (1)...(19): siRNA sense strand
acacauacagcccugauga

SEQ ID NO: 88178 - RNA, 19 nt, Homo sapiens
  misc_RNA (1)...(19): siRNA sense strand
ccaucuauaugccucagaa

SEQ ID NO: 88179 - RNA, 19 nt, Homo sapiens
  misc_RNA (1)...(19): siRNA sense strand
caucaagagacgcaaauau

SEQ ID NO: 88180 - RNA, 19 nt, Homo sapiens
  misc_RNA (1)...(19): siRNA sense strand
caauaaguuugacguggau

SEQ ID NO: 88181 - RNA, 19 nt, Homo sapiens
  misc_RNA (1)...(19): siRNA sense strand
ggagugggcacaagacaca

SEQ ID NO: 88182 - RNA, 19 nt, Homo sapiens
  misc_RNA (1)...(19): siRNA sense strand
cuugagauccuaacaguga

SEQ ID NO: 88183 - RNA, 19 nt, Homo sapiens
  misc_RNA (1)...(19): siRNA sense strand
aaggaucucuaugcaauga

SEQ ID NO: 88184 - RNA, 19 nt, Homo sapiens
  misc_RNA (1)...(19): siRNA sense strand
gcugagggccaucuauaug

SEQ ID NO: 88185 - RNA, 19 nt, Homo sapiens
  misc_RNA (1)...(19): siRNA sense strand
agacgcaaauauauuguag

SEQ ID NO: 88186 - RNA, 19 nt, Homo sapiens
  misc_RNA (1)...(19): siRNA sense strand
ccacuuguuugccaauaag

SEQ ID NO: 88187 - RNA, 19 nt, Homo sapiens
  misc_RNA (1)...(19): siRNA sense strand
cauacagcccugaugagua

SEQ ID NO: 88188 - RNA, 19 nt, Homo sapiens
  misc_RNA (1)...(19): siRNA sense strand
acagggugauguaaaugaa

SEQ ID NO: 88189 - RNA, 19 nt, Homo sapiens
  misc_RNA (1)...(19): siRNA sense strand
aucaagagacgcaaauaua

SEQ ID NO: 88190 - RNA, 19 nt, Homo sapiens
  misc_RNA (1)...(19): siRNA sense strand
cuauaugccucagaauuuc

SEQ ID NO: 88191 - RNA, 19 nt, Homo sapiens
  misc_RNA (1)...(19): siRNA sense strand
cauauucuauagugguuca

SEQ ID NO: 88192 - RNA, 19 nt, Homo sapiens
  misc_RNA (1)...(19): siRNA sense strand
aagagacgcaaauauauug

SEQ ID NO: 88193 - RNA, 19 nt, Homo sapiens
  misc_RNA (1)...(19): siRNA sense strand
guaaagcuugagauccuaa

SEQ ID NO: 88194 - RNA, 19 nt, Homo sapiens
  misc_RNA (1)...(19): siRNA sense strand
aagcucaaguuguuaaugg

SEQ ID NO: 88195 - RNA, 19 nt, Homo sapiens
  misc_RNA (1)...(19): siRNA sense strand
ggaucucuaugcaaugagu

SEQ ID NO: 88196 - RNA, 19 nt, Homo sapiens
  misc_RNA (1)...(19): siRNA sense strand
uauagugguucaucacaag

SEQ ID NO: 88197 - RNA, 19 nt, Homo sapiens
  misc_RNA (1)...(19): siRNA sense strand
gaaggaucucuaugcaaug

SEQ ID NO: 88198 - RNA, 19 nt, Homo sapiens
  misc_RNA (1)...(19): siRNA sense strand
gaauccuaguagugauauu

SEQ ID NO: 88199 - RNA, 19 nt, Homo sapiens
  misc_RNA (1)...(19): siRNA sense strand
gguggaagaagcgguauga

SEQ ID NO: 88200 - RNA, 19 nt, Homo sapiens
  misc_RNA (1)...(19): siRNA sense strand
gccaucccauaaagaagaa

SEQ ID NO: 88201 - RNA, 19 nt, Homo sapiens
  misc_RNA (1)...(19): siRNA sense strand
ggaguuuccaauagcauau

SEQ ID NO: 88202 - RNA, 19 nt, Homo sapiens
  misc_RNA (1)...(19): siRNA sense strand
gaagaggcggaguuuccaa

SEQ ID NO: 88203 - RNA, 19 nt, Homo sapiens
  misc_RNA (1)...(19): siRNA sense strand
ccugacgacuauauaaaca

SEQ ID NO: 88204 - RNA, 19 nt, Homo sapiens
  misc_RNA (1)...(19): siRNA sense strand
acaccugacgacuauauaa

SEQ ID NO: 88205 - RNA, 19 nt, Homo sapiens
  misc_RNA (1)...(19): siRNA sense strand
cuauagugguucaucacaa

SEQ ID NO: 88206 - RNA, 19 nt, Homo sapiens
  misc_RNA (1)...(19): siRNA sense strand
guacuuugagggugauguu

SEQ ID NO: 88207 - RNA, 19 nt, Homo sapiens
  misc_RNA (1)...(19): siRNA sense strand
gaagcucaaguuguuaaug

SEQ ID NO: 88208 - RNA, 19 nt, Homo sapiens
  misc_RNA (1)...(19): siRNA sense strand
gcaaacuggaaguacuuga

SEQ ID NO: 88209 - RNA, 19 nt, Homo sapiens
  misc_RNA (1)...(19): siRNA sense strand
cccaccaaauacuacuuua

SEQ ID NO: 88210 - RNA, 19 nt, Homo sapiens
  misc_RNA (1)...(19): siRNA sense strand
cguggauguugaccucuuu

SEQ ID NO: 88211 - RNA, 19 nt, Homo sapiens
  misc_RNA (1)...(19): siRNA sense strand
ccaccaaauacuacuuuau

SEQ ID NO: 88212 - RNA, 19 nt, Homo sapiens
  misc_RNA (1)...(19): siRNA sense strand
uaugaggucguuaauggaa

SEQ ID NO: 88213 - RNA, 19 nt, Homo sapiens
  misc_RNA (1)...(19): siRNA sense strand
aaagaagaaagguggaaga

SEQ ID NO: 88214 - RNA, 19 nt, Homo sapiens
  misc_RNA (1)...(19): siRNA sense strand
caaacuggaaguacuugau

SEQ ID NO: 88215 - RNA, 19 nt, Homo sapiens
  misc_RNA (1)...(19): siRNA sense strand
ucaacugcaugaaggaucu

SEQ ID NO: 88216 - RNA, 19 nt, Homo sapiens
  misc_RNA (1)...(19): siRNA sense strand
caccugacgacuauauaaa

SEQ ID NO: 88217 - RNA, 19 nt, Homo sapiens
  misc_RNA (1)...(19): siRNA sense strand
ccaaauacuacuuuauggu

SEQ ID NO: 88218 - RNA, 19 nt, Homo sapiens
  misc_RNA (1)...(19): siRNA sense strand
ucuuugccauccaguguuu

SEQ ID NO: 88219 - RNA, 19 nt, Homo sapiens
  misc_RNA (1)...(19): siRNA sense strand
gacaccugacgacuauaua

SEQ ID NO: 88220 - RNA, 19 nt, Homo sapiens
  misc_RNA (1)...(19): siRNA sense strand
uggaugagcauuugagaca

SEQ ID NO: 88221 - RNA, 19 nt, Homo sapiens
  misc_RNA (1)...(19): siRNA sense strand
guguuuggaugagcauuug

SEQ ID NO: 88222 - RNA, 19 nt, Homo sapiens
  misc_RNA (1)...(19): siRNA sense strand
caccacuuguuugccaaua

SEQ ID NO: 88223 - RNA, 19 nt, Homo sapiens
  misc_RNA (1)...(19): siRNA sense strand
ggagaaaacaaccuggaaa

SEQ ID NO: 88224 - RNA, 19 nt, Homo sapiens
  misc_RNA (1)...(19): siRNA sense strand
aacuggaaguacuugauaa

SEQ ID NO: 88225 - RNA, 19 nt, Homo sapiens
  misc_RNA (1)...(19): siRNA sense strand
gaacuggaugcugcgcaaa

SEQ ID NO: 88226 - RNA, 19 nt, Homo sapiens
  misc_RNA (1)...(19): siRNA sense strand
cugcugagggccaucuaua

SEQ ID NO: 88227 - RNA, 19 nt, Homo sapiens
  misc_RNA (1)...(19): siRNA sense strand
uuaauggaaagcugacaaa

SEQ ID NO: 88228 - RNA, 19 nt, Homo sapiens
  misc_RNA (1)...(19): siRNA sense strand
gugcaaacuggaaguacuu

SEQ ID NO: 88229 - RNA, 19 nt, Homo sapiens
  misc_RNA (1)...(19): siRNA sense strand
aggcugaccucaacugcau

SEQ ID NO: 88230 - RNA, 19 nt, Homo sapiens
  misc_RNA (1)...(19): siRNA sense strand
aaagguaaagcuugagauc

SEQ ID NO: 88231 - RNA, 19 nt, Homo sapiens
  misc_RNA (1)...(19): siRNA sense strand
agaggcggaguuuccaaua

SEQ ID NO: 88232 - RNA, 19 nt, Homo sapiens
  misc_RNA (1)...(19): siRNA sense strand
ugaggucguuaauggaaag

SEQ ID NO: 88233 - RNA, 19 nt, Homo sapiens
  misc_RNA (1)...(19): siRNA sense strand
auaaaucuuugugguaugg

SEQ ID NO: 88234 - RNA, 19 nt, Homo sapiens
  misc_RNA (1)...(19): siRNA sense strand
gagcuggugacuugaacug

SEQ ID NO: 88235 - RNA, 19 nt, Homo sapiens
  misc_RNA (1)...(19): siRNA sense strand
gcaguacuuugagggugau

SEQ ID NO: 88236 - RNA, 19 nt, Homo sapiens
  misc_RNA (1)...(19): siRNA sense strand
auggaaagcugacaaacac

SEQ ID NO: 88237 - RNA, 19 nt, Homo sapiens
  misc_RNA (1)...(19): siRNA sense strand
aagaagaaagguggaagaa

SEQ ID NO: 88238 - RNA, 19 nt, Homo sapiens
  misc_RNA (1)...(19): siRNA sense strand
ggaagcucaaguuguuaau

SEQ ID NO: 88239 - RNA, 19 nt, Homo sapiens
  misc_RNA (1)...(19): siRNA sense strand
uaaaguggcugguuaauuc

SEQ ID NO: 88240 - RNA, 19 nt, Homo sapiens
  misc_RNA (1)...(19): siRNA sense strand
gaaagaacccucaaucaga

SEQ ID NO: 88241 - RNA, 19 nt, Homo sapiens
  misc_RNA (1)...(19): siRNA sense strand
gcuaacaaguuugagcuua

SEQ ID NO: 88242 - RNA, 19 nt, Homo sapiens
  misc_RNA (1)...(19): siRNA sense strand
gaacugaggcaucgcgaaa

SEQ ID NO: 88243 - RNA, 19 nt, Homo sapiens
  misc_RNA (1)...(19): siRNA sense strand
caccaagccuguuugcuaa

SEQ ID NO: 88244 - RNA, 19 nt, Homo sapiens
  misc_RNA (1)...(19): siRNA sense strand
ggaaaccucagagcuauaa

SEQ ID NO: 88245 - RNA, 19 nt, Homo sapiens
  misc_RNA (1)...(19): siRNA sense strand
cuaacaaguuugagcuuaa

SEQ ID NO: 88246 - RNA, 19 nt, Homo sapiens
  misc_RNA (1)...(19): siRNA sense strand
gcuauaaaguggagugaca

SEQ ID NO: 88247 - RNA, 19 nt, Homo sapiens
  misc_RNA (1)...(19): siRNA sense strand
ucaccaagccuguuugcua

SEQ ID NO: 88248 - RNA, 19 nt, Homo sapiens
  misc_RNA (1)...(19): siRNA sense strand
gagugaaacugcgauacaa

SEQ ID NO: 88249 - RNA, 19 nt, Homo sapiens
  misc_RNA (1)...(19): siRNA sense strand
aguuugagcuuaauaccua

SEQ ID NO: 88250 - RNA, 19 nt, Homo sapiens
  misc_RNA (1)...(19): siRNA sense strand
aaaguggagugacauggaa

SEQ ID NO: 88251 - RNA, 19 nt, Homo sapiens
  misc_RNA (1)...(19): siRNA sense strand
gcgaaagaacccucaauca

SEQ ID NO: 88252 - RNA, 19 nt, Homo sapiens
  misc_RNA (1)...(19): siRNA sense strand
cuauggaaacggagacuua

SEQ ID NO: 88253 - RNA, 19 nt, Homo sapiens
  misc_RNA (1)...(19): siRNA sense strand
cuauguacaugguauuugu

SEQ ID NO: 88254 - RNA, 19 nt, Homo sapiens
  misc_RNA (1)...(19): siRNA sense strand
cgaaagaacccucaaucag

SEQ ID NO: 88255 - RNA, 19 nt, Homo sapiens
  misc_RNA (1)...(19): siRNA sense strand
caugguauuuguaucuaug

SEQ ID NO: 88256 - RNA, 19 nt, Homo sapiens
  misc_RNA (1)...(19): siRNA sense strand
uaaaguggagugacaugga

SEQ ID NO: 88257 - RNA, 19 nt, Homo sapiens
  misc_RNA (1)...(19): siRNA sense strand
gccacuauguacaugguau

SEQ ID NO: 88258 - RNA, 19 nt, Homo sapiens
  misc_RNA (1)...(19): siRNA sense strand
cgauacaacccagcuggua

SEQ ID NO: 88259 - RNA, 19 nt, Homo sapiens
  misc_RNA (1)...(19): siRNA sense strand
uaauucaccaagccuguuu

SEQ ID NO: 88260 - RNA, 19 nt, Homo sapiens
  misc_RNA (1)...(19): siRNA sense strand
cuggaaaccucagagcuau

SEQ ID NO: 88261 - RNA, 19 nt, Homo sapiens
  misc_RNA (1)...(19): siRNA sense strand
acugaggcaucgcgaaaga

SEQ ID NO: 88262 - RNA, 19 nt, Homo sapiens
  misc_RNA (1)...(19): siRNA sense strand
gaacccucaaucagaguga

SEQ ID NO: 88263 - RNA, 19 nt, Homo sapiens
  misc_RNA (1)...(19): siRNA sense strand
guggaaugccuagaacuga

SEQ ID NO: 88264 - RNA, 19 nt, Homo sapiens
  misc_RNA (1)...(19): siRNA sense strand
uauggaaacggagacuuaa

SEQ ID NO: 88265 - RNA, 19 nt, Homo sapiens
  misc_RNA (1)...(19): siRNA sense strand
ccacggccacuauguacau

SEQ ID NO: 88266 - RNA, 19 nt, Homo sapiens
  misc_RNA (1)...(19): siRNA sense strand
gguauuuguaucuauggaa

SEQ ID NO: 88267 - RNA, 19 nt, Homo sapiens
  misc_RNA (1)...(19): siRNA sense strand
acuggaaaccucagagcua

SEQ ID NO: 88268 - RNA, 19 nt, Homo sapiens
  misc_RNA (1)...(19): siRNA sense strand
gaaaccucagagcuauaaa

SEQ ID NO: 88269 - RNA, 19 nt, Homo sapiens
  misc_RNA (1)...(19): siRNA sense strand
ucagagugaaacugcgaua

SEQ ID NO: 88270 - RNA, 19 nt, Homo sapiens
  misc_RNA (1)...(19): siRNA sense strand
ccacuauguacaugguauu

SEQ ID NO: 88271 - RNA, 19 nt, Homo sapiens
  misc_RNA (1)...(19): siRNA sense strand
agagugaaacugcgauaca

SEQ ID NO: 88272 - RNA, 19 nt, Homo sapiens
  misc_RNA (1)...(19): siRNA sense strand
uaaaguggcugguuaauuc

SEQ ID NO: 88273 - RNA, 19 nt, Homo sapiens
  misc_RNA (1)...(19): siRNA sense strand
gaaagaacccucaaucaga

SEQ ID NO: 88274 - RNA, 19 nt, Homo sapiens
  misc_RNA (1)...(19): siRNA sense strand
gcuaacaaguuugagcuua

SEQ ID NO: 88275 - RNA, 19 nt, Homo sapiens
  misc_RNA (1)...(19): siRNA sense strand
gaacugaggcaucgcgaaa

SEQ ID NO: 88276 - RNA, 19 nt, Homo sapiens
  misc_RNA (1)...(19): siRNA sense strand
caccaagccuguuugcuaa

SEQ ID NO: 88277 - RNA, 19 nt, Homo sapiens
  misc_RNA (1)...(19): siRNA sense strand
ggaaaccucagagcuauaa

SEQ ID NO: 88278 - RNA, 19 nt, Homo sapiens
  misc_RNA (1)...(19): siRNA sense strand
cuaacaaguuugagcuuaa

SEQ ID NO: 88279 - RNA, 19 nt, Homo sapiens
  misc_RNA (1)...(19): siRNA sense strand
gcuauaaaguggagugaca

SEQ ID NO: 88280 - RNA, 19 nt, Homo sapiens
  misc_RNA (1)...(19): siRNA sense strand
ucaccaagccuguuugcua

SEQ ID NO: 88281 - RNA, 19 nt, Homo sapiens
  misc_RNA (1)...(19): siRNA sense strand
gagugaaacugcgauacaa

SEQ ID NO: 88282 - RNA, 19 nt, Homo sapiens
  misc_RNA (1)...(19): siRNA sense strand
aguuugagcuuaauaccua

SEQ ID NO: 88283 - RNA, 19 nt, Homo sapiens
  misc_RNA (1)...(19): siRNA sense strand
aaaguggagugacauggaa

SEQ ID NO: 88284 - RNA, 19 nt, Homo sapiens
  misc_RNA (1)...(19): siRNA sense strand
gcgaaagaacccucaauca

SEQ ID NO: 88285 - RNA, 19 nt, Homo sapiens
  misc_RNA (1)...(19): siRNA sense strand
cuauggaaacggagacuua

SEQ ID NO: 88286 - RNA, 19 nt, Homo sapiens
  misc_RNA (1)...(19): siRNA sense strand
cuauguacaugguauuugu

SEQ ID NO: 88287 - RNA, 19 nt, Homo sapiens
  misc_RNA (1)...(19): siRNA sense strand
cgaaagaacccucaaucag

SEQ ID NO: 88288 - RNA, 19 nt, Homo sapiens
  misc_RNA (1)...(19): siRNA sense strand
caugguauuuguaucuaug

SEQ ID NO: 88289 - RNA, 19 nt, Homo sapiens
  misc_RNA (1)...(19): siRNA sense strand
uaaaguggagugacaugga

SEQ ID NO: 88290 - RNA, 19 nt, Homo sapiens
  misc_RNA (1)...(19): siRNA sense strand
gccacuauguacaugguau

SEQ ID NO: 88291 - RNA, 19 nt, Homo sapiens
  misc_RNA (1)...(19): siRNA sense strand
cgauacaacccagcuggua

SEQ ID NO: 88292 - RNA, 19 nt, Homo sapiens
  misc_RNA (1)...(19): siRNA sense strand
uaauucaccaagccuguuu

SEQ ID NO: 88293 - RNA, 19 nt, Homo sapiens
  misc_RNA (1)...(19): siRNA sense strand
cuggaaaccucagagcuau

SEQ ID NO: 88294 - RNA, 19 nt, Homo sapiens
  misc_RNA (1)...(19): siRNA sense strand
acugaggcaucgcgaaaga

SEQ ID NO: 88295 - RNA, 19 nt, Homo sapiens
  misc_RNA (1)...(19): siRNA sense strand
gaacccucaaucagaguga

SEQ ID NO: 88296 - RNA, 19 nt, Homo sapiens
  misc_RNA (1)...(19): siRNA sense strand
guggaaugccuagaacuga

SEQ ID NO: 88297 - RNA, 19 nt, Homo sapiens
  misc_RNA (1)...(19): siRNA sense strand
uauggaaacggagacuuaa

SEQ ID NO: 88298 - RNA, 19 nt, Homo sapiens
  misc_RNA (1)...(19): siRNA sense strand
ccacggccacuauguacau

SEQ ID NO: 88299 - RNA, 19 nt, Homo sapiens
  misc_RNA (1)...(19): siRNA sense strand
gguauuuguaucuauggaa

SEQ ID NO: 88300 - RNA, 19 nt, Homo sapiens
  misc_RNA (1)...(19): siRNA sense strand
acuggaaaccucagagcua

SEQ ID NO: 88301 - RNA, 19 nt, Homo sapiens
  misc_RNA (1)...(19): siRNA sense strand
gaaaccucagagcuauaaa

SEQ ID NO: 88302 - RNA, 19 nt, Homo sapiens
  misc_RNA (1)...(19): siRNA sense strand
ucagagugaaacugcgaua

SEQ ID NO: 88303 - RNA, 19 nt, Homo sapiens
  misc_RNA (1)...(19): siRNA sense strand
ccacuauguacaugguauu

SEQ ID NO: 88304 - RNA, 19 nt, Homo sapiens
  misc_RNA (1)...(19): siRNA sense strand
agagugaaacugcgauaca

SEQ ID NO: 88305 - RNA, 19 nt, Homo sapiens
  misc_RNA (1)...(19): siRNA sense strand
uaaaguggcugguuaauuc

SEQ ID NO: 88306 - RNA, 19 nt, Homo sapiens
  misc_RNA (1)...(19): siRNA sense strand
gaaagaacccucaaucaga

SEQ ID NO: 88307 - RNA, 19 nt, Homo sapiens
  misc_RNA (1)...(19): siRNA sense strand
gcuaacaaguuugagcuua

SEQ ID NO: 88308 - RNA, 19 nt, Homo sapiens
  misc_RNA (1)...(19): siRNA sense strand
gaacugaggcaucgcgaaa

SEQ ID NO: 88309 - RNA, 19 nt, Homo sapiens
  misc_RNA (1)...(19): siRNA sense strand
caccaagccuguuugcuaa

SEQ ID NO: 88310 - RNA, 19 nt, Homo sapiens
  misc_RNA (1)...(19): siRNA sense strand
ggaaaccucagagcuauaa

SEQ ID NO: 88311 - RNA, 19 nt, Homo sapiens
  misc_RNA (1)...(19): siRNA sense strand
cuaacaaguuugagcuuaa

SEQ ID NO: 88312 - RNA, 19 nt, Homo sapiens
  misc_RNA (1)...(19): siRNA sense strand
gcuauaaaguggagugaca

SEQ ID NO: 88313 - RNA, 19 nt, Homo sapiens
  misc_RNA (1)...(19): siRNA sense strand
ucaccaagccuguuugcua

SEQ ID NO: 88314 - RNA, 19 nt, Homo sapiens
  misc_RNA (1)...(19): siRNA sense strand
gagugaaacugcgauacaa

SEQ ID NO: 88315 - RNA, 19 nt, Homo sapiens
  misc_RNA (1)...(19): siRNA sense strand
aguuugagcuuaauaccua

SEQ ID NO: 88316 - RNA, 19 nt, Homo sapiens
  misc_RNA (1)...(19): siRNA sense strand
aaaguggagugacauggaa

SEQ ID NO: 88317 - RNA, 19 nt, Homo sapiens
  misc_RNA (1)...(19): siRNA sense strand
gcgaaagaacccucaauca

SEQ ID NO: 88318 - RNA, 19 nt, Homo sapiens
  misc_RNA (1)...(19): siRNA sense strand
cuauggaaacggagacuua

SEQ ID NO: 88319 - RNA, 19 nt, Homo sapiens
  misc_RNA (1)...(19): siRNA sense strand
cuauguacaugguauuugu

SEQ ID NO: 88320 - RNA, 19 nt, Homo sapiens
  misc_RNA (1)...(19): siRNA sense strand
cgaaagaacccucaaucag

SEQ ID NO: 88321 - RNA, 19 nt, Homo sapiens
  misc_RNA (1)...(19): siRNA sense strand
caugguauuuguaucuaug

SEQ ID NO: 88322 - RNA, 19 nt, Homo sapiens
  misc_RNA (1)...(19): siRNA sense strand
uaaaguggagugacaugga

SEQ ID NO: 88323 - RNA, 19 nt, Homo sapiens
  misc_RNA (1)...(19): siRNA sense strand
gccacuauguacaugguau

SEQ ID NO: 88324 - RNA, 19 nt, Homo sapiens
  misc_RNA (1)...(19): siRNA sense strand
cgauacaacccagcuggua

SEQ ID NO: 88325 - RNA, 19 nt, Homo sapiens
  misc_RNA (1)...(19): siRNA sense strand
uaauucaccaagccuguuu

SEQ ID NO: 88326 - RNA, 19 nt, Homo sapiens
  misc_RNA (1)...(19): siRNA sense strand
cuggaaaccucagagcuau

SEQ ID NO: 88327 - RNA, 19 nt, Homo sapiens
  misc_RNA (1)...(19): siRNA sense strand
acugaggcaucgcgaaaga

SEQ ID NO: 88328 - RNA, 19 nt, Homo sapiens
  misc_RNA (1)...(19): siRNA sense strand
gaacccucaaucagaguga

SEQ ID NO: 88329 - RNA, 19 nt, Homo sapiens
  misc_RNA (1)...(19): siRNA sense strand
guggaaugccuagaacuga

SEQ ID NO: 88330 - RNA, 19 nt, Homo sapiens
  misc_RNA (1)...(19): siRNA sense strand
uauggaaacggagacuuaa

SEQ ID NO: 88331 - RNA, 19 nt, Homo sapiens
  misc_RNA (1)...(19): siRNA sense strand
ccacggccacuauguacau

SEQ ID NO: 88332 - RNA, 19 nt, Homo sapiens
  misc_RNA (1)...(19): siRNA sense strand
gguauuuguaucuauggaa

SEQ ID NO: 88333 - RNA, 19 nt, Homo sapiens
  misc_RNA (1)...(19): siRNA sense strand
acuggaaaccucagagcua

SEQ ID NO: 88334 - RNA, 19 nt, Homo sapiens
  misc_RNA (1)...(19): siRNA sense strand
gaaaccucagagcuauaaa

SEQ ID NO: 88335 - RNA, 19 nt, Homo sapiens
  misc_RNA (1)...(19): siRNA sense strand
ucagagugaaacugcgaua

SEQ ID NO: 88336 - RNA, 19 nt, Homo sapiens
  misc_RNA (1)...(19): siRNA sense strand
ccacuauguacaugguauu

SEQ ID NO: 88337 - RNA, 19 nt, Homo sapiens
  misc_RNA (1)...(19): siRNA sense strand
agagugaaacugcgauaca

SEQ ID NO: 88338 - RNA, 19 nt, Homo sapiens
  misc_RNA (1)...(19): siRNA sense strand
gcaagcagcugaucuguga

SEQ ID NO: 88339 - RNA, 19 nt, Homo sapiens
  misc_RNA (1)...(19): siRNA sense strand
ggacauauaugcugaacaa

SEQ ID NO: 88340 - RNA, 19 nt, Homo sapiens
  misc_RNA (1)...(19): siRNA sense strand
guaaagaugcuacuguaua

SEQ ID NO: 88341 - RNA, 19 nt, Homo sapiens
  misc_RNA (1)...(19): siRNA sense strand
gcaagagcccauauuuaua

SEQ ID NO: 88342 - RNA, 19 nt, Homo sapiens
  misc_RNA (1)...(19): siRNA sense strand
ccaaauuccucauggcuaa

SEQ ID NO: 88343 - RNA, 19 nt, Homo sapiens
  misc_RNA (1)...(19): siRNA sense strand
gaacaaaccuguggaugac

SEQ ID NO: 88344 - RNA, 19 nt, Homo sapiens
  misc_RNA (1)...(19): siRNA sense strand
ggcaagagcccauauuuau

SEQ ID NO: 88345 - RNA, 19 nt, Homo sapiens
  misc_RNA (1)...(19): siRNA sense strand
gcaaguuccugguguuugu

SEQ ID NO: 88346 - RNA, 19 nt, Homo sapiens
  misc_RNA (1)...(19): siRNA sense strand
gcacggccuuugacuuuga

SEQ ID NO: 88347 - RNA, 19 nt, Homo sapiens
  misc_RNA (1)...(19): siRNA sense strand
gcaucaaguuguacaguga

SEQ ID NO: 88348 - RNA, 19 nt, Homo sapiens
  misc_RNA (1)...(19): siRNA sense strand
ggcgagagcuccuccauca

SEQ ID NO: 88349 - RNA, 19 nt, Homo sapiens
  misc_RNA (1)...(19): siRNA sense strand
gaccagcccugccuugaga

SEQ ID NO: 88350 - RNA, 19 nt, Homo sapiens
  misc_RNA (1)...(19): siRNA sense strand
gaacgacgucuuuggagaa

SEQ ID NO: 88351 - RNA, 19 nt, Homo sapiens
  misc_RNA (1)...(19): siRNA sense strand
uaaagaugcuacuguauac

SEQ ID NO: 88352 - RNA, 19 nt, Homo sapiens
  misc_RNA (1)...(19): siRNA sense strand
caucaaagacaucuacaaa

SEQ ID NO: 88353 - RNA, 19 nt, Homo sapiens
  misc_RNA (1)...(19): siRNA sense strand
gccaacuccugccaaauaa

SEQ ID NO: 88354 - RNA, 19 nt, Homo sapiens
  misc_RNA (1)...(19): siRNA sense strand
cgcaucaucuguauccuua

SEQ ID NO: 88355 - RNA, 19 nt, Homo sapiens
  misc_RNA (1)...(19): siRNA sense strand
gcaacgacaucaaagacau

SEQ ID NO: 88356 - RNA, 19 nt, Homo sapiens
  misc_RNA (1)...(19): siRNA sense strand
aaacggcgcuuccgcaagu

SEQ ID NO: 88357 - RNA, 19 nt, Homo sapiens
  misc_RNA (1)...(19): siRNA sense strand
ucaaagacaucuacaaacg

SEQ ID NO: 88358 - RNA, 19 nt, Homo sapiens
  misc_RNA (1)...(19): siRNA sense strand
uguaugagcccauugauga

SEQ ID NO: 88359 - RNA, 19 nt, Homo sapiens
  misc_RNA (1)...(19): siRNA sense strand
ugaacaaaccuguggauga

SEQ ID NO: 88360 - RNA, 19 nt, Homo sapiens
  misc_RNA (1)...(19): siRNA sense strand
uggagaagcugagcaguga

SEQ ID NO: 88361 - RNA, 19 nt, Homo sapiens
  misc_RNA (1)...(19): siRNA sense strand
caaacagaacgacgucuuu

SEQ ID NO: 88362 - RNA, 19 nt, Homo sapiens
  misc_RNA (1)...(19): siRNA sense strand
ugguaaagaugcuacugua

SEQ ID NO: 88363 - RNA, 19 nt, Homo sapiens
  misc_RNA (1)...(19): siRNA sense strand
caagagcccauauuuauac

SEQ ID NO: 88364 - RNA, 19 nt, Homo sapiens
  misc_RNA (1)...(19): siRNA sense strand
cgccaacuccugccaaaua

SEQ ID NO: 88365 - RNA, 19 nt, Homo sapiens
  misc_RNA (1)...(19): siRNA sense strand
uggcaagagcccauauuua

SEQ ID NO: 88366 - RNA, 19 nt, Homo sapiens
  misc_RNA (1)...(19): siRNA sense strand
gcaaacagaacgacgucuu

SEQ ID NO: 88367 - RNA, 19 nt, Homo sapiens
  misc_RNA (1)...(19): siRNA sense strand
uggcaaacuucgaugagaa

SEQ ID NO: 88368 - RNA, 19 nt, Homo sapiens
  misc_RNA (1)...(19): siRNA sense strand
agaaccaggucaacaggaa

SEQ ID NO: 88369 - RNA, 19 nt, Homo sapiens
  misc_RNA (1)...(19): siRNA sense strand
gaacaugaagcgcaaacag

SEQ ID NO: 88370 - RNA, 19 nt, Homo sapiens
  misc_RNA (1)...(19): siRNA sense strand
ggacgaggaauacgaugug

SEQ ID NO: 88371 - RNA, 19 nt, Homo sapiens
  misc_RNA (1)...(19): siRNA sense strand
uggcacggccuuugacuuu

SEQ ID NO: 88372 - RNA, 19 nt, Homo sapiens
  misc_RNA (1)...(19): siRNA sense strand
ugaccugauucccaaauuc

SEQ ID NO: 88373 - RNA, 19 nt, Homo sapiens
  misc_RNA (1)...(19): siRNA sense strand
ggcuaucagugacuuguau

SEQ ID NO: 88374 - RNA, 19 nt, Homo sapiens
  misc_RNA (1)...(19): siRNA sense strand
gacgccaacuccugccaaa

SEQ ID NO: 88375 - RNA, 19 nt, Homo sapiens
  misc_RNA (1)...(19): siRNA sense strand
gcaagguggugggcgugaa

SEQ ID NO: 88376 - RNA, 19 nt, Homo sapiens
  misc_RNA (1)...(19): siRNA sense strand
cagcaugcgugacgucuac

SEQ ID NO: 88377 - RNA, 19 nt, Homo sapiens
  misc_RNA (1)...(19): siRNA sense strand
ccacacacuuugagacaac

SEQ ID NO: 88378 - RNA, 19 nt, Homo sapiens
  misc_RNA (1)...(19): siRNA sense strand
ugacuuguaugagcccauu

SEQ ID NO: 88379 - RNA, 19 nt, Homo sapiens
  misc_RNA (1)...(19): siRNA sense strand
caacaggaagucagacauc

SEQ ID NO: 88380 - RNA, 19 nt, Homo sapiens
  misc_RNA (1)...(19): siRNA sense strand
caacuccugccaaauaauc

SEQ ID NO: 88381 - RNA, 19 nt, Homo sapiens
  misc_RNA (1)...(19): siRNA sense strand
ugaugggcauguuugagaa

SEQ ID NO: 88382 - RNA, 19 nt, Homo sapiens
  misc_RNA (1)...(19): siRNA sense strand
gacgaggaauacgauguga

SEQ ID NO: 88383 - RNA, 19 nt, Homo sapiens
  misc_RNA (1)...(19): siRNA sense strand
cgagagcuccuccaucaca

SEQ ID NO: 88384 - RNA, 19 nt, Homo sapiens
  misc_RNA (1)...(19): siRNA sense strand
gggcaaguacauagcuauu

SEQ ID NO: 88385 - RNA, 19 nt, Homo sapiens
  misc_RNA (1)...(19): siRNA sense strand
gaucuccuaugcacacaac

SEQ ID NO: 88386 - RNA, 19 nt, Homo sapiens
  misc_RNA (1)...(19): siRNA sense strand
ggaaggcuggccagguuau

SEQ ID NO: 88387 - RNA, 19 nt, Homo sapiens
  misc_RNA (1)...(19): siRNA sense strand
cauauaugcugaacaaacc

SEQ ID NO: 88388 - RNA, 19 nt, Homo sapiens
  misc_RNA (1)...(19): siRNA sense strand
caaacuucgaugagaauga

SEQ ID NO: 88389 - RNA, 19 nt, Homo sapiens
  misc_RNA (1)...(19): siRNA sense strand
gguaaagaugcuacuguau

SEQ ID NO: 88390 - RNA, 19 nt, Homo sapiens
  misc_RNA (1)...(19): siRNA sense strand
gcuaacgggcagcugguaa

SEQ ID NO: 88391 - RNA, 19 nt, Homo sapiens
  misc_RNA (1)...(19): siRNA sense strand
guauaagcguuuucaguug

SEQ ID NO: 88392 - RNA, 19 nt, Homo sapiens
  misc_RNA (1)...(19): siRNA sense strand
cuaccgcacugaugacuac

SEQ ID NO: 88393 - RNA, 19 nt, Homo sapiens
  misc_RNA (1)...(19): siRNA sense strand
gggcaagaucuacaaagug

SEQ ID NO: 88394 - RNA, 19 nt, Homo sapiens
  misc_RNA (1)...(19): siRNA sense strand
guggcaaacuucgaugaga

SEQ ID NO: 88395 - RNA, 19 nt, Homo sapiens
  misc_RNA (1)...(19): siRNA sense strand
aaacagaacgacgucuuug

SEQ ID NO: 88396 - RNA, 19 nt, Homo sapiens
  misc_RNA (1)...(19): siRNA sense strand
acaugaagcgcaaacagaa

SEQ ID NO: 88397 - RNA, 19 nt, Homo sapiens
  misc_RNA (1)...(19): siRNA sense strand
cagggcaaguacauagcua

SEQ ID NO: 88398 - RNA, 19 nt, Homo sapiens
  misc_RNA (1)...(19): siRNA sense strand
cgaggaauacgaugugauc

SEQ ID NO: 88399 - RNA, 19 nt, Homo sapiens
  misc_RNA (1)...(19): siRNA sense strand
guuauccgcaucaucugua

SEQ ID NO: 88400 - RNA, 19 nt, Homo sapiens
  misc_RNA (1)...(19): siRNA sense strand
agagccagguguucuguuc

SEQ ID NO: 88401 - RNA, 19 nt, Homo sapiens
  misc_RNA (1)...(19): siRNA sense strand
acgggcagcugguaaagau

SEQ ID NO: 88402 - RNA, 19 nt, Homo sapiens
  misc_RNA (1)...(19): siRNA sense strand
ccauugaccagaaguuugu

SEQ ID NO: 88403 - RNA, 19 nt, Homo sapiens
  misc_RNA (1)...(19): siRNA sense strand
ggagaccacggacccugaa

SEQ ID NO: 88404 - RNA, 19 nt, Homo sapiens
  misc_RNA (1)...(19): siRNA sense strand
ugacgucuaccggaaguuu

SEQ ID NO: 88405 - RNA, 19 nt, Homo sapiens
  misc_RNA (1)...(19): siRNA sense strand
cgacaucaaagacaucuac

SEQ ID NO: 88406 - RNA, 19 nt, Homo sapiens
  misc_RNA (1)...(19): siRNA sense strand
ccaaucugaugggcauguu

SEQ ID NO: 88407 - RNA, 19 nt, Homo sapiens
  misc_RNA (1)...(19): siRNA sense strand
gcccauugaccagaaguuu

SEQ ID NO: 88408 - RNA, 19 nt, Homo sapiens
  misc_RNA (1)...(19): siRNA sense strand
cagguuauccgcaucaucu

SEQ ID NO: 88409 - RNA, 19 nt, Homo sapiens
  misc_RNA (1)...(19): siRNA sense strand
aaacuucgaugagaaugac

SEQ ID NO: 88410 - RNA, 19 nt, Homo sapiens
  misc_RNA (1)...(19): siRNA sense strand
gaugggcauguuugagaaa

SEQ ID NO: 88411 - RNA, 19 nt, Homo sapiens
  misc_RNA (1)...(19): siRNA sense strand
acagaacgacgucuuugga

SEQ ID NO: 88412 - RNA, 19 nt, Homo sapiens
  misc_RNA (1)...(19): siRNA sense strand
acaaaccuguggaugacau

SEQ ID NO: 88413 - RNA, 19 nt, Homo sapiens
  misc_RNA (1)...(19): siRNA sense strand
ggaagucagacaucuacgu

SEQ ID NO: 88414 - RNA, 19 nt, Homo sapiens
  misc_RNA (1)...(19): siRNA sense strand
gcuauugccagcacuacug

SEQ ID NO: 88415 - RNA, 19 nt, Homo sapiens
  misc_RNA (1)...(19): siRNA sense strand
ugucgggcaucaugucugu

SEQ ID NO: 88416 - RNA, 19 nt, Homo sapiens
  misc_RNA (1)...(19): siRNA sense strand
cgacgucuuuggagaagcu

SEQ ID NO: 88417 - RNA, 19 nt, Homo sapiens
  misc_RNA (1)...(19): siRNA sense strand
gaaguuuguggcuaucagu

SEQ ID NO: 88418 - RNA, 19 nt, Homo sapiens
  misc_RNA (1)...(19): siRNA sense strand
accagaaguuuguggcuau

SEQ ID NO: 88419 - RNA, 19 nt, Homo sapiens
  misc_RNA (1)...(19): siRNA sense strand
ggcaaguacauagcuauug

SEQ ID NO: 88420 - RNA, 19 nt, Homo sapiens
  misc_RNA (1)...(19): siRNA sense strand
ggcacggccuuugacuuug

SEQ ID NO: 88421 - RNA, 19 nt, Homo sapiens
  misc_RNA (1)...(19): siRNA sense strand
cuaacgggcagcugguaaa

SEQ ID NO: 88422 - RNA, 19 nt, Homo sapiens
  misc_RNA (1)...(19): siRNA sense strand
caucaucuguauccuuagc

SEQ ID NO: 88423 - RNA, 19 nt, Homo sapiens
  misc_RNA (1)...(19): siRNA sense strand
gaugccaccacacacuuug

SEQ ID NO: 88424 - RNA, 19 nt, Homo sapiens
  misc_RNA (1)...(19): siRNA sense strand
ccacggacccugaaaagga

SEQ ID NO: 88425 - RNA, 19 nt, Homo sapiens
  misc_RNA (1)...(19): siRNA sense strand
ggcaaacuucgaugagaau

SEQ ID NO: 88426 - RNA, 19 nt, Homo sapiens
  misc_RNA (1)...(19): siRNA sense strand
caacgacaucaaagacauc

SEQ ID NO: 88427 - RNA, 19 nt, Homo sapiens
  misc_RNA (1)...(19): siRNA sense strand
acaggaagucagacaucua

SEQ ID NO: 88428 - RNA, 19 nt, Homo sapiens
  misc_RNA (1)...(19): siRNA sense strand
gacaucuacgugugcauga

SEQ ID NO: 88429 - RNA, 19 nt, Homo sapiens
  misc_RNA (1)...(19): siRNA sense strand
gcaaacuucgaugagaaug

SEQ ID NO: 88430 - RNA, 19 nt, Homo sapiens
  misc_RNA (1)...(19): siRNA sense strand
ggggcaagaucuacaaagu

SEQ ID NO: 88431 - RNA, 19 nt, Homo sapiens
  misc_RNA (1)...(19): siRNA sense strand
cugaugggcauguuugaga

SEQ ID NO: 88432 - RNA, 19 nt, Homo sapiens
  misc_RNA (1)...(19): siRNA sense strand
cgaugccaccacacacuuu

SEQ ID NO: 88433 - RNA, 19 nt, Homo sapiens
  misc_RNA (1)...(19): siRNA sense strand
gaucacgccugguggauuu

SEQ ID NO: 88434 - RNA, 19 nt, Homo sapiens
  misc_RNA (1)...(19): siRNA sense strand
ucaggcagcugcucacuuu

SEQ ID NO: 88435 - RNA, 19 nt, Homo sapiens
  misc_RNA (1)...(19): siRNA sense strand
caacagagcaguccagaug

SEQ ID NO: 88436 - RNA, 19 nt, Homo sapiens
  misc_RNA (1)...(19): siRNA sense strand
gaaaaugaaucucagcaaa

SEQ ID NO: 88437 - RNA, 19 nt, Homo sapiens
  misc_RNA (1)...(19): siRNA sense strand
acagaaagccgacucauga

SEQ ID NO: 88438 - RNA, 19 nt, Homo sapiens
  misc_RNA (1)...(19): siRNA sense strand
ccagaugucuacgagcaua

SEQ ID NO: 88439 - RNA, 19 nt, Homo sapiens
  misc_RNA (1)...(19): siRNA sense strand
gaaagccgacucaugaaca

SEQ ID NO: 88440 - RNA, 19 nt, Homo sapiens
  misc_RNA (1)...(19): siRNA sense strand
ccuaggaacuugugcaaca

SEQ ID NO: 88441 - RNA, 19 nt, Homo sapiens
  misc_RNA (1)...(19): siRNA sense strand
aggaacagcucucugauag

SEQ ID NO: 88442 - RNA, 19 nt, Homo sapiens
  misc_RNA (1)...(19): siRNA sense strand
gcacagcaacucaggaaca

SEQ ID NO: 88443 - RNA, 19 nt, Homo sapiens
  misc_RNA (1)...(19): siRNA sense strand
gcaggaggagugugaaaug

SEQ ID NO: 88444 - RNA, 19 nt, Homo sapiens
  misc_RNA (1)...(19): siRNA sense strand
caggaacagcucucugaua

SEQ ID NO: 88445 - RNA, 19 nt, Homo sapiens
  misc_RNA (1)...(19): siRNA sense strand
cggaggccauugcagcuaa

SEQ ID NO: 88446 - RNA, 19 nt, Homo sapiens
  misc_RNA (1)...(19): siRNA sense strand
gccaugcuguguacucuca

SEQ ID NO: 88447 - RNA, 19 nt, Homo sapiens
  misc_RNA (1)...(19): siRNA sense strand
cacccuaccuuugcuguga

SEQ ID NO: 88448 - RNA, 19 nt, Homo sapiens
  misc_RNA (1)...(19): siRNA sense strand
ccgcagccuugguaacuau

SEQ ID NO: 88449 - RNA, 19 nt, Homo sapiens
  misc_RNA (1)...(19): siRNA sense strand
aaaugaaucucagcaaacu

SEQ ID NO: 88450 - RNA, 19 nt, Homo sapiens
  misc_RNA (1)...(19): siRNA sense strand
cagcacagcaacucaggaa

SEQ ID NO: 88451 - RNA, 19 nt, Homo sapiens
  misc_RNA (1)...(19): siRNA sense strand
uguguacucucaaugacaa

SEQ ID NO: 88452 - RNA, 19 nt, Homo sapiens
  misc_RNA (1)...(19): siRNA sense strand
aaacugaacaugcucaaac

SEQ ID NO: 88453 - RNA, 19 nt, Homo sapiens
  misc_RNA (1)...(19): siRNA sense strand
guaacuaugagcuggaugu

SEQ ID NO: 88454 - RNA, 19 nt, Homo sapiens
  misc_RNA (1)...(19): siRNA sense strand
ggacauccuaggaacuugu

SEQ ID NO: 88455 - RNA, 19 nt, Homo sapiens
  misc_RNA (1)...(19): siRNA sense strand
ggcagcugcucacuuucuu

SEQ ID NO: 88456 - RNA, 19 nt, Homo sapiens
  misc_RNA (1)...(19): siRNA sense strand
cagaaagccgacucaugaa

SEQ ID NO: 88457 - RNA, 19 nt, Homo sapiens
  misc_RNA (1)...(19): siRNA sense strand
ugauggcacaccagaauga

SEQ ID NO: 88458 - RNA, 19 nt, Homo sapiens
  misc_RNA (1)...(19): siRNA sense strand
ggccauugcagcuaagaug

SEQ ID NO: 88459 - RNA, 19 nt, Homo sapiens
  misc_RNA (1)...(19): siRNA sense strand
gcaaacugaacaugcucaa

SEQ ID NO: 88460 - RNA, 19 nt, Homo sapiens
  misc_RNA (1)...(19): siRNA sense strand
uccugcaccucuagcauaa

SEQ ID NO: 88461 - RNA, 19 nt, Homo sapiens
  misc_RNA (1)...(19): siRNA sense strand
agaccucugccucaaguuu

SEQ ID NO: 88462 - RNA, 19 nt, Homo sapiens
  misc_RNA (1)...(19): siRNA sense strand
gagcaguccagaugucuac

SEQ ID NO: 88463 - RNA, 19 nt, Homo sapiens
  misc_RNA (1)...(19): siRNA sense strand
gaccucugccucaaguuug

SEQ ID NO: 88464 - RNA, 19 nt, Homo sapiens
  misc_RNA (1)...(19): siRNA sense strand
acagagcaguccagauguc

SEQ ID NO: 88465 - RNA, 19 nt, Homo sapiens
  misc_RNA (1)...(19): siRNA sense strand
ccaacuuugucagcaaugu

SEQ ID NO: 88466 - RNA, 19 nt, Homo sapiens
  misc_RNA (1)...(19): siRNA sense strand
gcacgcuucccuugauucu

SEQ ID NO: 88467 - RNA, 19 nt, Homo sapiens
  misc_RNA (1)...(19): siRNA sense strand
caaacugaacaugcucaaa

SEQ ID NO: 88468 - RNA, 19 nt, Homo sapiens
  misc_RNA (1)...(19): siRNA sense strand
cacagaaagccgacucaug

SEQ ID NO: 88469 - RNA, 19 nt, Homo sapiens
  misc_RNA (1)...(19): siRNA sense strand
gagcauaccuggggcugau

SEQ ID NO: 88470 - RNA, 19 nt, Homo sapiens
  misc_RNA (1)...(19): siRNA sense strand
ccugcacgcuucccuugau

SEQ ID NO: 88471 - RNA, 19 nt, Homo sapiens
  misc_RNA (1)...(19): siRNA sense strand
cagcuaagaugcguuuuca

SEQ ID NO: 88472 - RNA, 19 nt, Homo sapiens
  misc_RNA (1)...(19): siRNA sense strand
agcaaacccuggaaaauga

SEQ ID NO: 88473 - RNA, 19 nt, Homo sapiens
  misc_RNA (1)...(19): siRNA sense strand
ggaggccauugcagcuaag

SEQ ID NO: 88474 - RNA, 19 nt, Homo sapiens
  misc_RNA (1)...(19): siRNA sense strand
gcccguaguccugauguug

SEQ ID NO: 88475 - RNA, 19 nt, Homo sapiens
  misc_RNA (1)...(19): siRNA sense strand
gcuguguacucucaaugac

SEQ ID NO: 88476 - RNA, 19 nt, Homo sapiens
  misc_RNA (1)...(19): siRNA sense strand
gauggcacaccagaaugaa

SEQ ID NO: 88477 - RNA, 19 nt, Homo sapiens
  misc_RNA (1)...(19): siRNA sense strand
cuggauuccugcaccucua

SEQ ID NO: 88478 - RNA, 19 nt, Homo sapiens
  misc_RNA (1)...(19): siRNA sense strand
cgacccgcuuugcagauca

SEQ ID NO: 88479 - RNA, 19 nt, Homo sapiens
  misc_RNA (1)...(19): siRNA sense strand
ggaggcuacuucuauauua

SEQ ID NO: 88480 - RNA, 19 nt, Homo sapiens
  misc_RNA (1)...(19): siRNA sense strand
ccagauaccuuuaugauca

SEQ ID NO: 88481 - RNA, 19 nt, Homo sapiens
  misc_RNA (1)...(19): siRNA sense strand
gagagcaucuggagaacua

SEQ ID NO: 88482 - RNA, 19 nt, Homo sapiens
  misc_RNA (1)...(19): siRNA sense strand
gaagagagcaucuggagaa

SEQ ID NO: 88483 - RNA, 19 nt, Homo sapiens
  misc_RNA (1)...(19): siRNA sense strand
ggacugaucccaauucuga

SEQ ID NO: 88484 - RNA, 19 nt, Homo sapiens
  misc_RNA (1)...(19): siRNA sense strand
gcuacuaucuguccaauug

SEQ ID NO: 88485 - RNA, 19 nt, Homo sapiens
  misc_RNA (1)...(19): siRNA sense strand
gcauguugcucaucucuuu

SEQ ID NO: 88486 - RNA, 19 nt, Homo sapiens
  misc_RNA (1)...(19): siRNA sense strand
guaaccaaauugcaaauga

SEQ ID NO: 88487 - RNA, 19 nt, Homo sapiens
  misc_RNA (1)...(19): siRNA sense strand
gaauacaccaucuccauuu

SEQ ID NO: 88488 - RNA, 19 nt, Homo sapiens
  misc_RNA (1)...(19): siRNA sense strand
ggaaagauauuugcaaagg

SEQ ID NO: 88489 - RNA, 19 nt, Homo sapiens
  misc_RNA (1)...(19): siRNA sense strand
ugucaucaauguaccaaua

SEQ ID NO: 88490 - RNA, 19 nt, Homo sapiens
  misc_RNA (1)...(19): siRNA sense strand
uuacuuggaucagcauuua

SEQ ID NO: 88491 - RNA, 19 nt, Homo sapiens
  misc_RNA (1)...(19): siRNA sense strand
caggaaagauauuugcaaa

SEQ ID NO: 88492 - RNA, 19 nt, Homo sapiens
  misc_RNA (1)...(19): siRNA sense strand
uaacuucauuucccagauu

SEQ ID NO: 88493 - RNA, 19 nt, Homo sapiens
  misc_RNA (1)...(19): siRNA sense strand
caagaaauauccgacauag

SEQ ID NO: 88494 - RNA, 19 nt, Homo sapiens
  misc_RNA (1)...(19): siRNA sense strand
gcgaugagguggaauacau

SEQ ID NO: 88495 - RNA, 19 nt, Homo sapiens
  misc_RNA (1)...(19): siRNA sense strand
gaagaacaauaacuauagg

SEQ ID NO: 88496 - RNA, 19 nt, Homo sapiens
  misc_RNA (1)...(19): siRNA sense strand
gaggaacaauguccgaguu

SEQ ID NO: 88497 - RNA, 19 nt, Homo sapiens
  misc_RNA (1)...(19): siRNA sense strand
agaaauauccgacauagga

SEQ ID NO: 88498 - RNA, 19 nt, Homo sapiens
  misc_RNA (1)...(19): siRNA sense strand
auaaagagaucuacgaaca

SEQ ID NO: 88499 - RNA, 19 nt, Homo sapiens
  misc_RNA (1)...(19): siRNA sense strand
ggacaagaauacaccaucu

SEQ ID NO: 88500 - RNA, 19 nt, Homo sapiens
  misc_RNA (1)...(19): siRNA sense strand
gacgauagauaaagagauc

SEQ ID NO: 88501 - RNA, 19 nt, Homo sapiens
  misc_RNA (1)...(19): siRNA sense strand
gacaccagauguaguauuc

SEQ ID NO: 88502 - RNA, 19 nt, Homo sapiens
  misc_RNA (1)...(19): siRNA sense strand
ggacagcccuacggaggaa

SEQ ID NO: 88503 - RNA, 19 nt, Homo sapiens
  misc_RNA (1)...(19): siRNA sense strand
ucccaauucugaacucuua

SEQ ID NO: 88504 - RNA, 19 nt, Homo sapiens
  misc_RNA (1)...(19): siRNA sense strand
uaacagacuuugagaacuc

SEQ ID NO: 88505 - RNA, 19 nt, Homo sapiens
  misc_RNA (1)...(19): siRNA sense strand
gagaaaagguugucaucaa

SEQ ID NO: 88506 - RNA, 19 nt, Homo sapiens
  misc_RNA (1)...(19): siRNA sense strand
gaaagauauuugcaaaggu

SEQ ID NO: 88507 - RNA, 19 nt, Homo sapiens
  misc_RNA (1)...(19): siRNA sense strand
ccagagugauccuuuccua

SEQ ID NO: 88508 - RNA, 19 nt, Homo sapiens
  misc_RNA (1)...(19): siRNA sense strand
gacauuggauggagaguag

SEQ ID NO: 88509 - RNA, 19 nt, Homo sapiens
  misc_RNA (1)...(19): siRNA sense strand
gcacaaggacguucucaag

SEQ ID NO: 88510 - RNA, 19 nt, Homo sapiens
  misc_RNA (1)...(19): siRNA sense strand
aauacaccaucuccauuua

SEQ ID NO: 88511 - RNA, 19 nt, Homo sapiens
  misc_RNA (1)...(19): siRNA sense strand
ugagggaguuuaucgcaaa

SEQ ID NO: 88512 - RNA, 19 nt, Homo sapiens
  misc_RNA (1)...(19): siRNA sense strand
cgauaugacucaauagaca

SEQ ID NO: 88513 - RNA, 19 nt, Homo sapiens
  misc_RNA (1)...(19): siRNA sense strand
uacaccaucuccauuuaua

SEQ ID NO: 88514 - RNA, 19 nt, Homo sapiens
  misc_RNA (1)...(19): siRNA sense strand
guaugggaguuacaugauu

SEQ ID NO: 88515 - RNA, 19 nt, Homo sapiens
  misc_RNA (1)...(19): siRNA sense strand
ggugagaaauauaaugaca

SEQ ID NO: 88516 - RNA, 19 nt, Homo sapiens
  misc_RNA (1)...(19): siRNA sense strand
gcaauuaacagacuuugag

SEQ ID NO: 88517 - RNA, 19 nt, Homo sapiens
  misc_RNA (1)...(19): siRNA sense strand
acaaggacguucucaagug

SEQ ID NO: 88518 - RNA, 19 nt, Homo sapiens
  misc_RNA (1)...(19): siRNA sense strand
ugagaacucugccuaugug

SEQ ID NO: 88519 - RNA, 19 nt, Homo sapiens
  misc_RNA (1)...(19): siRNA sense strand
gagcauagacaccaucauc

SEQ ID NO: 88520 - RNA, 19 nt, Homo sapiens
  misc_RNA (1)...(19): siRNA sense strand
gaccagaguaugggaguua

SEQ ID NO: 88521 - RNA, 19 nt, Homo sapiens
  misc_RNA (1)...(19): siRNA sense strand
ucaguuggcuacuaucugu

SEQ ID NO: 88522 - RNA, 19 nt, Homo sapiens
  misc_RNA (1)...(19): siRNA sense strand
ggacuggagccauugaaga

SEQ ID NO: 88523 - RNA, 19 nt, Homo sapiens
  misc_RNA (1)...(19): siRNA sense strand
gauccuuuccuacaaauug

SEQ ID NO: 88524 - RNA, 19 nt, Homo sapiens
  misc_RNA (1)...(19): siRNA sense strand
uggcagacaaugagauuua

SEQ ID NO: 88525 - RNA, 19 nt, Homo sapiens
  misc_RNA (1)...(19): siRNA sense strand
uaaguguggugagaaauau

SEQ ID NO: 88526 - RNA, 19 nt, Homo sapiens
  misc_RNA (1)...(19): siRNA sense strand
caaaccauccugacuacaa

SEQ ID NO: 88527 - RNA, 19 nt, Homo sapiens
  misc_RNA (1)...(19): siRNA sense strand
cgacauaggagaggagaaa

SEQ ID NO: 88528 - RNA, 19 nt, Homo sapiens
  misc_RNA (1)...(19): siRNA sense strand
gaucagcauuuaggaaagu

SEQ ID NO: 88529 - RNA, 19 nt, Homo sapiens
  misc_RNA (1)...(19): siRNA sense strand
ccagauggaugagggaguu

SEQ ID NO: 88530 - RNA, 19 nt, Homo sapiens
  misc_RNA (1)...(19): siRNA sense strand
ugaacuaccuaaagcuaau

SEQ ID NO: 88531 - RNA, 19 nt, Homo sapiens
  misc_RNA (1)...(19): siRNA sense strand
ucugaacucuuaccuugaa

SEQ ID NO: 88532 - RNA, 19 nt, Homo sapiens
  misc_RNA (1)...(19): siRNA sense strand
gcauagacaccaucaucaa

SEQ ID NO: 88533 - RNA, 19 nt, Homo sapiens
  misc_RNA (1)...(19): siRNA sense strand
ggcagacaaugagauuuaa

SEQ ID NO: 88534 - RNA, 19 nt, Homo sapiens
  misc_RNA (1)...(19): siRNA sense strand
uucaguaccuuaacaagaa

SEQ ID NO: 88535 - RNA, 19 nt, Homo sapiens
  misc_RNA (1)...(19): siRNA sense strand
cuaaguguggugagaaaua

SEQ ID NO: 88536 - RNA, 19 nt, Homo sapiens
  misc_RNA (1)...(19): siRNA sense strand
ccgcugagcugggaggaaa

SEQ ID NO: 88537 - RNA, 19 nt, Homo sapiens
  misc_RNA (1)...(19): siRNA sense strand
gauguggacaccagaugua

SEQ ID NO: 88538 - RNA, 19 nt, Homo sapiens
  misc_RNA (1)...(19): siRNA sense strand
gaggcuacuucuauauuag

SEQ ID NO: 88539 - RNA, 19 nt, Homo sapiens
  misc_RNA (1)...(19): siRNA sense strand
aaacauuuacugaggauga

SEQ ID NO: 88540 - RNA, 19 nt, Homo sapiens
  misc_RNA (1)...(19): siRNA sense strand
gagugauccuuuccuacaa

SEQ ID NO: 88541 - RNA, 19 nt, Homo sapiens
  misc_RNA (1)...(19): siRNA sense strand
gacacuguuugaagagaaa

SEQ ID NO: 88542 - RNA, 19 nt, Homo sapiens
  misc_RNA (1)...(19): siRNA sense strand
gauuuggaaugggcaauug

SEQ ID NO: 88543 - RNA, 19 nt, Homo sapiens
  misc_RNA (1)...(19): siRNA sense strand
cuaagccggaucauauuua

SEQ ID NO: 88544 - RNA, 19 nt, Homo sapiens
  misc_RNA (1)...(19): siRNA sense strand
uaugggaguuacaugauug

SEQ ID NO: 88545 - RNA, 19 nt, Homo sapiens
  misc_RNA (1)...(19): siRNA sense strand
caucaucaaugggaaggaa

SEQ ID NO: 88546 - RNA, 19 nt, Homo sapiens
  misc_RNA (1)...(19): siRNA sense strand
cuucuaagccggaucauau

SEQ ID NO: 88547 - RNA, 19 nt, Homo sapiens
  misc_RNA (1)...(19): siRNA sense strand
ccaucuccauuuauagaaa

SEQ ID NO: 88548 - RNA, 19 nt, Homo sapiens
  misc_RNA (1)...(19): siRNA sense strand
gaguaugggaguuacauga

SEQ ID NO: 88549 - RNA, 19 nt, Homo sapiens
  misc_RNA (1)...(19): siRNA sense strand
ggacaccagauguaguauu

SEQ ID NO: 88550 - RNA, 19 nt, Homo sapiens
  misc_RNA (1)...(19): siRNA sense strand
agacagcuauuuaucuaag

SEQ ID NO: 88551 - RNA, 19 nt, Homo sapiens
  misc_RNA (1)...(19): siRNA sense strand
caggcucuuugcacaauaa

SEQ ID NO: 88552 - RNA, 19 nt, Homo sapiens
  misc_RNA (1)...(19): siRNA sense strand
uaaugacaguugccagaug

SEQ ID NO: 88553 - RNA, 19 nt, Homo sapiens
  misc_RNA (1)...(19): siRNA sense strand
guggacaccagauguagua

SEQ ID NO: 88554 - RNA, 19 nt, Homo sapiens
  misc_RNA (1)...(19): siRNA sense strand
gggaaaggacaaacccaaa

SEQ ID NO: 88555 - RNA, 19 nt, Homo sapiens
  misc_RNA (1)...(19): siRNA sense strand
ccuccaaacucagacauug

SEQ ID NO: 88556 - RNA, 19 nt, Homo sapiens
  misc_RNA (1)...(19): siRNA sense strand
ggaugaugcuaaugagucu

SEQ ID NO: 88557 - RNA, 19 nt, Homo sapiens
  misc_RNA (1)...(19): siRNA sense strand
ugacacuguuugaagagaa

SEQ ID NO: 88558 - RNA, 19 nt, Homo sapiens
  misc_RNA (1)...(19): siRNA sense strand
gagacccacugacacuguu

SEQ ID NO: 88559 - RNA, 19 nt, Homo sapiens
  misc_RNA (1)...(19): siRNA sense strand
cgacuugacgauagauaaa

SEQ ID NO: 88560 - RNA, 19 nt, Homo sapiens
  misc_RNA (1)...(19): siRNA sense strand
acaagaaauauccgacaua

SEQ ID NO: 88561 - RNA, 19 nt, Homo sapiens
  misc_RNA (1)...(19): siRNA sense strand
uuccaagccugcaguauau

SEQ ID NO: 88562 - RNA, 19 nt, Homo sapiens
  misc_RNA (1)...(19): siRNA sense strand
gagaauauucaguccacaa

SEQ ID NO: 88563 - RNA, 19 nt, Homo sapiens
  misc_RNA (1)...(19): siRNA sense strand
ggaaggcauugaucaucuc

SEQ ID NO: 88564 - RNA, 19 nt, Homo sapiens
  misc_RNA (1)...(19): siRNA sense strand
gacuggagccauugaagaa

SEQ ID NO: 88565 - RNA, 19 nt, Homo sapiens
  misc_RNA (1)...(19): siRNA sense strand
guccaauuguuauggcuuu

SEQ ID NO: 88566 - RNA, 19 nt, Homo sapiens
  misc_RNA (1)...(19): siRNA sense strand
uaugaucaguuggcuacua

SEQ ID NO: 88567 - RNA, 19 nt, Homo sapiens
  misc_RNA (1)...(19): siRNA sense strand
gaggccagauaccuuuaug

SEQ ID NO: 88568 - RNA, 19 nt, Homo sapiens
  misc_RNA (1)...(19): siRNA sense strand
ccauggaggugcaauuaac

SEQ ID NO: 88569 - RNA, 19 nt, Homo sapiens
  misc_RNA (1)...(19): siRNA sense strand
aaacugacucauccaacua

SEQ ID NO: 88570 - RNA, 19 nt, Homo sapiens
  misc_RNA (1)...(19): siRNA sense strand
gaacuaccuaaagcuaauu

SEQ ID NO: 88571 - RNA, 19 nt, Homo sapiens
  misc_RNA (1)...(19): siRNA sense strand
gaagguagcacagaaaaga

SEQ ID NO: 88572 - RNA, 19 nt, Homo sapiens
  misc_RNA (1)...(19): siRNA sense strand
ccaagucccucuucuuucc

SEQ ID NO: 88573 - RNA, 19 nt, Homo sapiens
  misc_RNA (1)...(19): siRNA sense strand
acaugaagguagcacagaa

SEQ ID NO: 88574 - RNA, 19 nt, Homo sapiens
  misc_RNA (1)...(19): siRNA sense strand
guggugagaaauauaauga

SEQ ID NO: 88575 - RNA, 19 nt, Homo sapiens
  misc_RNA (1)...(19): siRNA sense strand
gaucaguaaaucccgauau

SEQ ID NO: 88576 - RNA, 19 nt, Homo sapiens
  misc_RNA (1)...(19): siRNA sense strand
cggaucauauuuacaugga

SEQ ID NO: 88577 - RNA, 19 nt, Homo sapiens
  misc_RNA (1)...(19): siRNA sense strand
ucaaggaccggcacaagga

SEQ ID NO: 88578 - RNA, 19 nt, Homo sapiens
  misc_RNA (1)...(19): siRNA sense strand
ucaguaccuuaacaagaaa

SEQ ID NO: 88579 - RNA, 19 nt, Homo sapiens
  misc_RNA (1)...(19): siRNA sense strand
gagaagagcuccagagaag

SEQ ID NO: 88580 - RNA, 19 nt, Homo sapiens
  misc_RNA (1)...(19): siRNA sense strand
gaucaacccucauuuguuc

SEQ ID NO: 88581 - RNA, 19 nt, Homo sapiens
  misc_RNA (1)...(19): siRNA sense strand
gcacacagaaucuauggua

SEQ ID NO: 88582 - RNA, 19 nt, Homo sapiens
  misc_RNA (1)...(19): siRNA sense strand
ggaaugcccucaugaagca

SEQ ID NO: 88583 - RNA, 19 nt, Homo sapiens
  misc_RNA (1)...(19): siRNA sense strand
gaaccaagggcaaagauga

SEQ ID NO: 88584 - RNA, 19 nt, Homo sapiens
  misc_RNA (1)...(19): siRNA sense strand
ugaaggagaucuuugacaa

SEQ ID NO: 88585 - RNA, 19 nt, Homo sapiens
  misc_RNA (1)...(19): siRNA sense strand
gaacugguacacagaauga

SEQ ID NO: 88586 - RNA, 19 nt, Homo sapiens
  misc_RNA (1)...(19): siRNA sense strand
gaaguguccuuacucuguu

SEQ ID NO: 88587 - RNA, 19 nt, Homo sapiens
  misc_RNA (1)...(19): siRNA sense strand
gagcaaagauucucaaccu

SEQ ID NO: 88588 - RNA, 19 nt, Homo sapiens
  misc_RNA (1)...(19): siRNA sense strand
caagcuaucuucuuauucu

SEQ ID NO: 88589 - RNA, 19 nt, Homo sapiens
  misc_RNA (1)...(19): siRNA sense strand
caaagauucucaaccugaa

SEQ ID NO: 88590 - RNA, 19 nt, Homo sapiens
  misc_RNA (1)...(19): siRNA sense strand
gaagcagcauaaagaauuc

SEQ ID NO: 88591 - RNA, 19 nt, Homo sapiens
  misc_RNA (1)...(19): siRNA sense strand
gauucacccucauggcuua

SEQ ID NO: 88592 - RNA, 19 nt, Homo sapiens
  misc_RNA (1)...(19): siRNA sense strand
gaccagaggcccacaaaga

SEQ ID NO: 88593 - RNA, 19 nt, Homo sapiens
  misc_RNA (1)...(19): siRNA sense strand
gaacugaagcagcauaaag

SEQ ID NO: 88594 - RNA, 19 nt, Homo sapiens
  misc_RNA (1)...(19): siRNA sense strand
ggacuacuuucccagguau

SEQ ID NO: 88595 - RNA, 19 nt, Homo sapiens
  misc_RNA (1)...(19): siRNA sense strand
gaauggcuuuggaagacua

SEQ ID NO: 88596 - RNA, 19 nt, Homo sapiens
  misc_RNA (1)...(19): siRNA sense strand
gaagaagaggcccagguaa

SEQ ID NO: 88597 - RNA, 19 nt, Homo sapiens
  misc_RNA (1)...(19): siRNA sense strand
caaacuggcagagaaauuu

SEQ ID NO: 88598 - RNA, 19 nt, Homo sapiens
  misc_RNA (1)...(19): siRNA sense strand
guacacagaaugaaaggaa

SEQ ID NO: 88599 - RNA, 19 nt, Homo sapiens
  misc_RNA (1)...(19): siRNA sense strand
gcagagaaauuugugaaac

SEQ ID NO: 88600 - RNA, 19 nt, Homo sapiens
  misc_RNA (1)...(19): siRNA sense strand
ugaagcagcauaaagaauu

SEQ ID NO: 88601 - RNA, 19 nt, Homo sapiens
  misc_RNA (1)...(19): siRNA sense strand
caacugaagcgguuugaug

SEQ ID NO: 88602 - RNA, 19 nt, Homo sapiens
  misc_RNA (1)...(19): siRNA sense strand
agccaaaucucuaccauug

SEQ ID NO: 88603 - RNA, 19 nt, Homo sapiens
  misc_RNA (1)...(19): siRNA sense strand
cagagaaauuugugaaaca

SEQ ID NO: 88604 - RNA, 19 nt, Homo sapiens
  misc_RNA (1)...(19): siRNA sense strand
ccaaaucucuaccauugca

SEQ ID NO: 88605 - RNA, 19 nt, Homo sapiens
  misc_RNA (1)...(19): siRNA sense strand
gaaacaaggcgaggaggaa

SEQ ID NO: 88606 - RNA, 19 nt, Homo sapiens
  misc_RNA (1)...(19): siRNA sense strand
cagaaucuaugguacuuca

SEQ ID NO: 88607 - RNA, 19 nt, Homo sapiens
  misc_RNA (1)...(19): siRNA sense strand
aauacaaacuggcagagaa

SEQ ID NO: 88608 - RNA, 19 nt, Homo sapiens
  misc_RNA (1)...(19): siRNA sense strand
ggaagaugcuaauucucau

SEQ ID NO: 88609 - RNA, 19 nt, Homo sapiens
  misc_RNA (1)...(19): siRNA sense strand
gagggaaacagaaugaaga

SEQ ID NO: 88610 - RNA, 19 nt, Homo sapiens
  misc_RNA (1)...(19): siRNA sense strand
gaagguacaagacauuaca

SEQ ID NO: 88611 - RNA, 19 nt, Homo sapiens
  misc_RNA (1)...(19): siRNA sense strand
uucccaagcuaucuucuua

SEQ ID NO: 88612 - RNA, 19 nt, Homo sapiens
  misc_RNA (1)...(19): siRNA sense strand
gaacaacugaagcgguuug

SEQ ID NO: 88613 - RNA, 19 nt, Homo sapiens
  misc_RNA (1)...(19): siRNA sense strand
gcagcaagacaacuuucua

SEQ ID NO: 88614 - RNA, 19 nt, Homo sapiens
  misc_RNA (1)...(19): siRNA sense strand
ggaaguggccucucaccau

SEQ ID NO: 88615 - RNA, 19 nt, Homo sapiens
  misc_RNA (1)...(19): siRNA sense strand
ugaagaagaggcccaggua

SEQ ID NO: 88616 - RNA, 19 nt, Homo sapiens
  misc_RNA (1)...(19): siRNA sense strand
gaagcgguuugaugaaugg

SEQ ID NO: 88617 - RNA, 19 nt, Homo sapiens
  misc_RNA (1)...(19): siRNA sense strand
aguaaaggauuccaaagug

SEQ ID NO: 88618 - RNA, 19 nt, Homo sapiens
  misc_RNA (1)...(19): siRNA sense strand
cagccacccuccucuuuga

SEQ ID NO: 88619 - RNA, 19 nt, Homo sapiens
  misc_RNA (1)...(19): siRNA sense strand
cccaagcuaucuucuuauu

SEQ ID NO: 88620 - RNA, 19 nt, Homo sapiens
  misc_RNA (1)...(19): siRNA sense strand
cagcaagacaacuuucuaa

SEQ ID NO: 88621 - RNA, 19 nt, Homo sapiens
  misc_RNA (1)...(19): siRNA sense strand
gggaauggcuuuggaagac

SEQ ID NO: 88622 - RNA, 19 nt, Homo sapiens
  misc_RNA (1)...(19): siRNA sense strand
ccagugagccaaaucucua

SEQ ID NO: 88623 - RNA, 19 nt, Homo sapiens
  misc_RNA (1)...(19): siRNA sense strand
ccaaguaaaggauuccaaa

SEQ ID NO: 88624 - RNA, 19 nt, Homo sapiens
  misc_RNA (1)...(19): siRNA sense strand
ggcuggacuuuguucaaua

SEQ ID NO: 88625 - RNA, 19 nt, Homo sapiens
  misc_RNA (1)...(19): siRNA sense strand
gggcuggacuuuguucaau

SEQ ID NO: 88626 - RNA, 19 nt, Homo sapiens
  misc_RNA (1)...(19): siRNA sense strand
gcucaaaacugaaggagau

SEQ ID NO: 88627 - RNA, 19 nt, Homo sapiens
  misc_RNA (1)...(19): siRNA sense strand
ccagguaucaggcuuguug

SEQ ID NO: 88628 - RNA, 19 nt, Homo sapiens
  misc_RNA (1)...(19): siRNA sense strand
aaacgcaugucagggauga

SEQ ID NO: 88629 - RNA, 19 nt, Homo sapiens
  misc_RNA (1)...(19): siRNA sense strand
gcaagacaacuuucuaaaa

SEQ ID NO: 88630 - RNA, 19 nt, Homo sapiens
  misc_RNA (1)...(19): siRNA sense strand
gcaauaccagguucaguuc

SEQ ID NO: 88631 - RNA, 19 nt, Homo sapiens
  misc_RNA (1)...(19): siRNA sense strand
ucucuacgcugcuaucauc

SEQ ID NO: 88632 - RNA, 19 nt, Homo sapiens
  misc_RNA (1)...(19): siRNA sense strand
ggaaggcugcguccgaaug

SEQ ID NO: 88633 - RNA, 19 nt, Homo sapiens
  misc_RNA (1)...(19): siRNA sense strand
uggcacagaucuuaaacau

SEQ ID NO: 88634 - RNA, 19 nt, Homo sapiens
  misc_RNA (1)...(19): siRNA sense strand
caagacaacuuucuaaaac

SEQ ID NO: 88635 - RNA, 19 nt, Homo sapiens
  misc_RNA (1)...(19): siRNA sense strand
auaaagaauuccaggacuu

SEQ ID NO: 88636 - RNA, 19 nt, Homo sapiens
  misc_RNA (1)...(19): siRNA sense strand
ugaagcgguuugaugaaug

SEQ ID NO: 88637 - RNA, 19 nt, Homo sapiens
  misc_RNA (1)...(19): siRNA sense strand
ggaggcaggaugaagaaga

SEQ ID NO: 88638 - RNA, 19 nt, Homo sapiens
  misc_RNA (1)...(19): siRNA sense strand
ggacaccaagagaaguuaa

SEQ ID NO: 88639 - RNA, 19 nt, Homo sapiens
  misc_RNA (1)...(19): siRNA sense strand
aagaagaggcccagguaaa

SEQ ID NO: 88640 - RNA, 19 nt, Homo sapiens
  misc_RNA (1)...(19): siRNA sense strand
uaucagaggaugcuugguu

SEQ ID NO: 88641 - RNA, 19 nt, Homo sapiens
  misc_RNA (1)...(19): siRNA sense strand
caaggacagucaggccaaa

SEQ ID NO: 88642 - RNA, 19 nt, Homo sapiens
  misc_RNA (1)...(19): siRNA sense strand
gacagccacccuccucuuu

SEQ ID NO: 88643 - RNA, 19 nt, Homo sapiens
  misc_RNA (1)...(19): siRNA sense strand
aaacauggagcccuuguca

SEQ ID NO: 88644 - RNA, 19 nt, Homo sapiens
  misc_RNA (1)...(19): siRNA sense strand
gaaaccgacaggagauuca

SEQ ID NO: 88645 - RNA, 19 nt, Homo sapiens
  misc_RNA (1)...(19): siRNA sense strand
gaaggcugcguccgaaugu

SEQ ID NO: 88646 - RNA, 19 nt, Homo sapiens
  misc_RNA (1)...(19): siRNA sense strand
cagguucaguucuggaaga

SEQ ID NO: 88647 - RNA, 19 nt, Homo sapiens
  misc_RNA (1)...(19): siRNA sense strand
gcgcgaggauguuuuagaa

SEQ ID NO: 88648 - RNA, 19 nt, Homo sapiens
  misc_RNA (1)...(19): siRNA sense strand
gaggcaggaugaagaagag

SEQ ID NO: 88649 - RNA, 19 nt, Homo sapiens
  misc_RNA (1)...(19): siRNA sense strand
gggaaguaauggagaagag

SEQ ID NO: 88650 - RNA, 19 nt, Homo sapiens
  misc_RNA (1)...(19): siRNA sense strand
cacagaaucuaugguacuu

SEQ ID NO: 88651 - RNA, 19 nt, Homo sapiens
  misc_RNA (1)...(19): siRNA sense strand
ggagcagcaagacaacuuu

SEQ ID NO: 88652 - RNA, 19 nt, Homo sapiens
  misc_RNA (1)...(19): siRNA sense strand
ucaaggagggaauggcuuu

SEQ ID NO: 88653 - RNA, 19 nt, Homo sapiens
  misc_RNA (1)...(19): siRNA sense strand
gaggaggcaggaugaagaa

SEQ ID NO: 88654 - RNA, 19 nt, Homo sapiens
  misc_RNA (1)...(19): siRNA sense strand
uaaagaauuccaggacuug

SEQ ID NO: 88655 - RNA, 19 nt, Homo sapiens
  misc_RNA (1)...(19): siRNA sense strand
ccgaauguacgaacuggua

SEQ ID NO: 88656 - RNA, 19 nt, Homo sapiens
  misc_RNA (1)...(19): siRNA sense strand
gugaagguacaagacauua

SEQ ID NO: 88657 - RNA, 19 nt, Homo sapiens
  misc_RNA (1)...(19): siRNA sense strand
gcgaggauguuuuagaaga

SEQ ID NO: 88658 - RNA, 19 nt, Homo sapiens
  misc_RNA (1)...(19): siRNA sense strand
uugcucaucuacauaagaa

SEQ ID NO: 88659 - RNA, 19 nt, Homo sapiens
  misc_RNA (1)...(19): siRNA sense strand
gagccaaaucucuaccauu

SEQ ID NO: 88660 - RNA, 19 nt, Homo sapiens
  misc_RNA (1)...(19): siRNA sense strand
gaaggagaucuuugacaag

SEQ ID NO: 88661 - RNA, 19 nt, Homo sapiens
  misc_RNA (1)...(19): siRNA sense strand
gcuggacuuuguucaauac

SEQ ID NO: 88662 - RNA, 19 nt, Homo sapiens
  misc_RNA (1)...(19): siRNA sense strand
uggaagaugcuaauucuca

SEQ ID NO: 88663 - RNA, 19 nt, Homo sapiens
  misc_RNA (1)...(19): siRNA sense strand
ucuggaagaugcuaauucu

SEQ ID NO: 88664 - RNA, 19 nt, Homo sapiens
  misc_RNA (1)...(19): siRNA sense strand
cagcuccgguggccauaug

SEQ ID NO: 88665 - RNA, 19 nt, Homo sapiens
  misc_RNA (1)...(19): siRNA sense strand
ggugguagagcacguccua

SEQ ID NO: 88666 - RNA, 19 nt, Homo sapiens
  misc_RNA (1)...(19): siRNA sense strand
cuagaucaacccucauuug

SEQ ID NO: 88667 - RNA, 19 nt, Homo sapiens
  misc_RNA (1)...(19): siRNA sense strand
ggagggaauggcuuuggaa

SEQ ID NO: 88668 - RNA, 19 nt, Homo sapiens
  misc_RNA (1)...(19): siRNA sense strand
agaaguguccuuacucugu

SEQ ID NO: 88669 - RNA, 19 nt, Homo sapiens
  misc_RNA (1)...(19): siRNA sense strand
gaagcagcauuccccauug

SEQ ID NO: 88670 - RNA, 19 nt, Homo sapiens
  misc_RNA (1)...(19): siRNA sense strand
ugacgcaagcucugccuuu

SEQ ID NO: 88671 - RNA, 19 nt, Homo sapiens
  misc_RNA (1)...(19): siRNA sense strand
acauggagcccuugucaga

SEQ ID NO: 88672 - RNA, 19 nt, Homo sapiens
  misc_RNA (1)...(19): siRNA sense strand
aucagaggaugcuugguua

SEQ ID NO: 88673 - RNA, 19 nt, Homo sapiens
  misc_RNA (1)...(19): siRNA sense strand
ggugaagguacaagacauu

SEQ ID NO: 88674 - RNA, 19 nt, Homo sapiens
  misc_RNA (1)...(19): siRNA sense strand
ggagggaaacagaaugaag

SEQ ID NO: 88675 - RNA, 19 nt, Homo sapiens
  misc_RNA (1)...(19): siRNA sense strand
guaugucucuucccaagcu

SEQ ID NO: 88676 - RNA, 19 nt, Homo sapiens
  misc_RNA (1)...(19): siRNA sense strand
uagaucaacccucauuugu

SEQ ID NO: 88677 - RNA, 19 nt, Homo sapiens
  misc_RNA (1)...(19): siRNA sense strand
agaaccaaccucugucuga

SEQ ID NO: 88678 - RNA, 19 nt, Homo sapiens
  misc_RNA (1)...(19): siRNA sense strand
ggaaaccgacaggagauuc

SEQ ID NO: 88679 - RNA, 19 nt, Homo sapiens
  misc_RNA (1)...(19): siRNA sense strand
cccauggccucccaaguga

SEQ ID NO: 88680 - RNA, 19 nt, Homo sapiens
  misc_RNA (1)...(19): siRNA sense strand
gcccaguggucccuucaca

SEQ ID NO: 88681 - RNA, 19 nt, Homo sapiens
  misc_RNA (1)...(19): siRNA sense strand
gcugcugacugcccaccuu

SEQ ID NO: 88682 - RNA, 19 nt, Homo sapiens
  misc_RNA (1)...(19): siRNA sense strand
gcugguacccuggaggaaa

SEQ ID NO: 88683 - RNA, 19 nt, Homo sapiens
  misc_RNA (1)...(19): siRNA sense strand
aguggucccuucacaggaa

SEQ ID NO: 88684 - RNA, 19 nt, Homo sapiens
  misc_RNA (1)...(19): siRNA sense strand
ccgccauccuccaauaaag

SEQ ID NO: 88685 - RNA, 19 nt, Homo sapiens
  misc_RNA (1)...(19): siRNA sense strand
cccauggccucccaaguga

SEQ ID NO: 88686 - RNA, 19 nt, Homo sapiens
  misc_RNA (1)...(19): siRNA sense strand
gcccaguggucccuucaca

SEQ ID NO: 88687 - RNA, 19 nt, Homo sapiens
  misc_RNA (1)...(19): siRNA sense strand
gcugcugacugcccaccuu

SEQ ID NO: 88688 - RNA, 19 nt, Homo sapiens
  misc_RNA (1)...(19): siRNA sense strand
gcugguacccuggaggaaa

SEQ ID NO: 88689 - RNA, 19 nt, Homo sapiens
  misc_RNA (1)...(19): siRNA sense strand
aguggucccuucacaggaa

SEQ ID NO: 88690 - RNA, 19 nt, Homo sapiens
  misc_RNA (1)...(19): siRNA sense strand
ccgccauccuccaauaaag

SEQ ID NO: 88691 - RNA, 19 nt, Homo sapiens
  misc_RNA (1)...(19): siRNA sense strand
cccauggccucccaaguga

SEQ ID NO: 88692 - RNA, 19 nt, Homo sapiens
  misc_RNA (1)...(19): siRNA sense strand
gcccaguggucccuucaca

SEQ ID NO: 88693 - RNA, 19 nt, Homo sapiens
  misc_RNA (1)...(19): siRNA sense strand
gcugcugacugcccaccuu

SEQ ID NO: 88694 - RNA, 19 nt, Homo sapiens
  misc_RNA (1)...(19): siRNA sense strand
gcugguacccuggaggaaa

SEQ ID NO: 88695 - RNA, 19 nt, Homo sapiens
  misc_RNA (1)...(19): siRNA sense strand
aguggucccuucacaggaa

SEQ ID NO: 88696 - RNA, 19 nt, Homo sapiens
  misc_RNA (1)...(19): siRNA sense strand
ccgccauccuccaauaaag

SEQ ID NO: 88697 - RNA, 19 nt, Homo sapiens
  misc_RNA (1)...(19): siRNA sense strand
gaagauggauugccacaaa

SEQ ID NO: 88698 - RNA, 19 nt, Homo sapiens
  misc_RNA (1)...(19): siRNA sense strand
gaacagaaagucuucaguu

SEQ ID NO: 88699 - RNA, 19 nt, Homo sapiens
  misc_RNA (1)...(19): siRNA sense strand
guaccuaguuuccagcuuu

SEQ ID NO: 88700 - RNA, 19 nt, Homo sapiens
  misc_RNA (1)...(19): siRNA sense strand
ugacauccguuggaacuuu

SEQ ID NO: 88701 - RNA, 19 nt, Homo sapiens
  misc_RNA (1)...(19): siRNA sense strand
gaggauuuguaccuaguuu

SEQ ID NO: 88702 - RNA, 19 nt, Homo sapiens
  misc_RNA (1)...(19): siRNA sense strand
aacagaaagucuucaguuu

SEQ ID NO: 88703 - RNA, 19 nt, Homo sapiens
  misc_RNA (1)...(19): siRNA sense strand
gagaaaggcaccaucuaug

SEQ ID NO: 88704 - RNA, 19 nt, Homo sapiens
  misc_RNA (1)...(19): siRNA sense strand
gaggccaucgcacuuaaua

SEQ ID NO: 88705 - RNA, 19 nt, Homo sapiens
  misc_RNA (1)...(19): siRNA sense strand
cgagaaaggcaccaucuau

SEQ ID NO: 88706 - RNA, 19 nt, Homo sapiens
  misc_RNA (1)...(19): siRNA sense strand
agaaaggcaccaucuauga

SEQ ID NO: 88707 - RNA, 19 nt, Homo sapiens
  misc_RNA (1)...(19): siRNA sense strand
gagaagaugaagauggauu

SEQ ID NO: 88708 - RNA, 19 nt, Homo sapiens
  misc_RNA (1)...(19): siRNA sense strand
caacguggccaccuacugu

SEQ ID NO: 88709 - RNA, 19 nt, Homo sapiens
  misc_RNA (1)...(19): siRNA sense strand
gcaagcacauccucuucgu

SEQ ID NO: 88710 - RNA, 19 nt, Homo sapiens
  misc_RNA (1)...(19): siRNA sense strand
aggagaagaugaagaugga

SEQ ID NO: 88711 - RNA, 19 nt, Homo sapiens
  misc_RNA (1)...(19): siRNA sense strand
uggcguacuugaagcaauu

SEQ ID NO: 88712 - RNA, 19 nt, Homo sapiens
  misc_RNA (1)...(19): siRNA sense strand
gacauccguuggaacuuug

SEQ ID NO: 88713 - RNA, 19 nt, Homo sapiens
  misc_RNA (1)...(19): siRNA sense strand
gggcacauucaaaucuaua

SEQ ID NO: 88714 - RNA, 19 nt, Homo sapiens
  misc_RNA (1)...(19): siRNA sense strand
ccaagcaggagaagaugaa

SEQ ID NO: 88715 - RNA, 19 nt, Homo sapiens
  misc_RNA (1)...(19): siRNA sense strand
gggaggauuuguaccuagu

SEQ ID NO: 88716 - RNA, 19 nt, Homo sapiens
  misc_RNA (1)...(19): siRNA sense strand
gaaaggcaccaucuaugac

SEQ ID NO: 88717 - RNA, 19 nt, Homo sapiens
  misc_RNA (1)...(19): siRNA sense strand
ggucagcucagucaagaca

SEQ ID NO: 88718 - RNA, 19 nt, Homo sapiens
  misc_RNA (1)...(19): siRNA sense strand
uaugaggccaucgcacuua

SEQ ID NO: 88719 - RNA, 19 nt, Homo sapiens
  misc_RNA (1)...(19): siRNA sense strand
ucagcucagucaagacaga

SEQ ID NO: 88720 - RNA, 19 nt, Homo sapiens
  misc_RNA (1)...(19): siRNA sense strand
gcacauccucuucgucaac

SEQ ID NO: 88721 - RNA, 19 nt, Homo sapiens
  misc_RNA (1)...(19): siRNA sense strand
cagacauccuggcguacuu

SEQ ID NO: 88722 - RNA, 19 nt, Homo sapiens
  misc_RNA (1)...(19): siRNA sense strand
caccaucuaugacuaugag

SEQ ID NO: 88723 - RNA, 19 nt, Homo sapiens
  misc_RNA (1)...(19): siRNA sense strand
gcacauucaaaucuauauc

SEQ ID NO: 88724 - RNA, 19 nt, Homo sapiens
  misc_RNA (1)...(19): siRNA sense strand
gcaccaucuaugacuauga

SEQ ID NO: 88725 - RNA, 19 nt, Homo sapiens
  misc_RNA (1)...(19): siRNA sense strand
gggcuacggucagcucagu

SEQ ID NO: 88726 - RNA, 19 nt, Homo sapiens
  misc_RNA (1)...(19): siRNA sense strand
gaaaggggaugugaauggu

SEQ ID NO: 88727 - RNA, 19 nt, Homo sapiens
  misc_RNA (1)...(19): siRNA sense strand
gggcaagcacauccucuuc

SEQ ID NO: 88728 - RNA, 19 nt, Homo sapiens
  misc_RNA (1)...(19): siRNA sense strand
gaagcacuccuguccucau

SEQ ID NO: 88729 - RNA, 19 nt, Homo sapiens
  misc_RNA (1)...(19): siRNA sense strand
agaagaugaagauggauug

SEQ ID NO: 88730 - RNA, 19 nt, Homo sapiens
  misc_RNA (1)...(19): siRNA sense strand
ggucugacagcgcaauauc

SEQ ID NO: 88731 - RNA, 19 nt, Homo sapiens
  misc_RNA (1)...(19): siRNA sense strand
caccuacuguggucugaca

SEQ ID NO: 88732 - RNA, 19 nt, Homo sapiens
  misc_RNA (1)...(19): siRNA sense strand
ggaggauuuguaccuaguu

SEQ ID NO: 88733 - RNA, 19 nt, Homo sapiens
  misc_RNA (1)...(19): siRNA sense strand
aaggcaccaucuaugacua

SEQ ID NO: 88734 - RNA, 19 nt, Homo sapiens
  misc_RNA (1)...(19): siRNA sense strand
cuguaaagguccaugacau

SEQ ID NO: 88735 - RNA, 19 nt, Homo sapiens
  misc_RNA (1)...(19): siRNA sense strand
ucuccuagccugcuuugug

SEQ ID NO: 88736 - RNA, 19 nt, Homo sapiens
  misc_RNA (1)...(19): siRNA sense strand
augaggccaucgcacuuaa

SEQ ID NO: 88737 - RNA, 19 nt, Homo sapiens
  misc_RNA (1)...(19): siRNA sense strand
acggucagcucagucaaga

SEQ ID NO: 88738 - RNA, 19 nt, Homo sapiens
  misc_RNA (1)...(19): siRNA sense strand
uugggcacauucaaaucua

SEQ ID NO: 88739 - RNA, 19 nt, Homo sapiens
  misc_RNA (1)...(19): siRNA sense strand
aagcacuccuguccucauc

SEQ ID NO: 88740 - RNA, 19 nt, Homo sapiens
  misc_RNA (1)...(19): siRNA sense strand
gaagauggauugccacaaa

SEQ ID NO: 88741 - RNA, 19 nt, Homo sapiens
  misc_RNA (1)...(19): siRNA sense strand
guaccuaguuuccagcuuu

SEQ ID NO: 88742 - RNA, 19 nt, Homo sapiens
  misc_RNA (1)...(19): siRNA sense strand
gaggauuuguaccuaguuu

SEQ ID NO: 88743 - RNA, 19 nt, Homo sapiens
  misc_RNA (1)...(19): siRNA sense strand
gagaaaggcaccaucuaug

SEQ ID NO: 88744 - RNA, 19 nt, Homo sapiens
  misc_RNA (1)...(19): siRNA sense strand
gaggccaucgcacuuaaua

SEQ ID NO: 88745 - RNA, 19 nt, Homo sapiens
  misc_RNA (1)...(19): siRNA sense strand
cgagaaaggcaccaucuau

SEQ ID NO: 88746 - RNA, 19 nt, Homo sapiens
  misc_RNA (1)...(19): siRNA sense strand
agaaaggcaccaucuauga

SEQ ID NO: 88747 - RNA, 19 nt, Homo sapiens
  misc_RNA (1)...(19): siRNA sense strand
gagaagaugaagauggauu

SEQ ID NO: 88748 - RNA, 19 nt, Homo sapiens
  misc_RNA (1)...(19): siRNA sense strand
caacguggccaccuacugu

SEQ ID NO: 88749 - RNA, 19 nt, Homo sapiens
  misc_RNA (1)...(19): siRNA sense strand
gcaagcacauccucuucgu

SEQ ID NO: 88750 - RNA, 19 nt, Homo sapiens
  misc_RNA (1)...(19): siRNA sense strand
aggagaagaugaagaugga

SEQ ID NO: 88751 - RNA, 19 nt, Homo sapiens
  misc_RNA (1)...(19): siRNA sense strand
ccaagcaggagaagaugaa

SEQ ID NO: 88752 - RNA, 19 nt, Homo sapiens
  misc_RNA (1)...(19): siRNA sense strand
gggaggauuuguaccuagu

SEQ ID NO: 88753 - RNA, 19 nt, Homo sapiens
  misc_RNA (1)...(19): siRNA sense strand
gaaaggcaccaucuaugac

SEQ ID NO: 88754 - RNA, 19 nt, Homo sapiens
  misc_RNA (1)...(19): siRNA sense strand
uaugaggccaucgcacuua

SEQ ID NO: 88755 - RNA, 19 nt, Homo sapiens
  misc_RNA (1)...(19): siRNA sense strand
gcacauccucuucgucaac

SEQ ID NO: 88756 - RNA, 19 nt, Homo sapiens
  misc_RNA (1)...(19): siRNA sense strand
caccaucuaugacuaugag

SEQ ID NO: 88757 - RNA, 19 nt, Homo sapiens
  misc_RNA (1)...(19): siRNA sense strand
gcaccaucuaugacuauga

SEQ ID NO: 88758 - RNA, 19 nt, Homo sapiens
  misc_RNA (1)...(19): siRNA sense strand
gggcaagcacauccucuuc

SEQ ID NO: 88759 - RNA, 19 nt, Homo sapiens
  misc_RNA (1)...(19): siRNA sense strand
agaagaugaagauggauug

SEQ ID NO: 88760 - RNA, 19 nt, Homo sapiens
  misc_RNA (1)...(19): siRNA sense strand
ggucugacagcgcaauauc

SEQ ID NO: 88761 - RNA, 19 nt, Homo sapiens
  misc_RNA (1)...(19): siRNA sense strand
caccuacuguggucugaca

SEQ ID NO: 88762 - RNA, 19 nt, Homo sapiens
  misc_RNA (1)...(19): siRNA sense strand
ggaggauuuguaccuaguu

SEQ ID NO: 88763 - RNA, 19 nt, Homo sapiens
  misc_RNA (1)...(19): siRNA sense strand
aaggcaccaucuaugacua

SEQ ID NO: 88764 - RNA, 19 nt, Homo sapiens
  misc_RNA (1)...(19): siRNA sense strand
ucuccuagccugcuuugug

SEQ ID NO: 88765 - RNA, 19 nt, Homo sapiens
  misc_RNA (1)...(19): siRNA sense strand
augaggccaucgcacuuaa

SEQ ID NO: 88766 - RNA, 19 nt, Homo sapiens
  misc_RNA (1)...(19): siRNA sense strand
caagaagccugugaacuua

SEQ ID NO: 88767 - RNA, 19 nt, Homo sapiens
  misc_RNA (1)...(19): siRNA sense strand
guaagaaggucaauuggaa

SEQ ID NO: 88768 - RNA, 19 nt, Homo sapiens
  misc_RNA (1)...(19): siRNA sense strand
gagcagauccagacucuua

SEQ ID NO: 88769 - RNA, 19 nt, Homo sapiens
  misc_RNA (1)...(19): siRNA sense strand
uaggagaacuugucuuuaa

SEQ ID NO: 88770 - RNA, 19 nt, Homo sapiens
  misc_RNA (1)...(19): siRNA sense strand
gacaagaaauuggagaaua

SEQ ID NO: 88771 - RNA, 19 nt, Homo sapiens
  misc_RNA (1)...(19): siRNA sense strand
gcaagucugucauguauca

SEQ ID NO: 88772 - RNA, 19 nt, Homo sapiens
  misc_RNA (1)...(19): siRNA sense strand
ggaauugcauuacaacaug

SEQ ID NO: 88773 - RNA, 19 nt, Homo sapiens
  misc_RNA (1)...(19): siRNA sense strand
ucgaauaucuucaacauug

SEQ ID NO: 88774 - RNA, 19 nt, Homo sapiens
  misc_RNA (1)...(19): siRNA sense strand
caacaacccuuuccaagca

SEQ ID NO: 88775 - RNA, 19 nt, Homo sapiens
  misc_RNA (1)...(19): siRNA sense strand
ggaugcagcuguauuggaa

SEQ ID NO: 88776 - RNA, 19 nt, Homo sapiens
  misc_RNA (1)...(19): siRNA sense strand
aaacagaaaucccuuaugg

SEQ ID NO: 88777 - RNA, 19 nt, Homo sapiens
  misc_RNA (1)...(19): siRNA sense strand
gacugucacuggaucauua

SEQ ID NO: 88778 - RNA, 19 nt, Homo sapiens
  misc_RNA (1)...(19): siRNA sense strand
ccaaauccuucauuacuga

SEQ ID NO: 88779 - RNA, 19 nt, Homo sapiens
  misc_RNA (1)...(19): siRNA sense strand
uaagaguggucacagagua

SEQ ID NO: 88780 - RNA, 19 nt, Homo sapiens
  misc_RNA (1)...(19): siRNA sense strand
cggcaaaccucgcugcuuu

SEQ ID NO: 88781 - RNA, 19 nt, Homo sapiens
  misc_RNA (1)...(19): siRNA sense strand
caggaucccuccagucuuu

SEQ ID NO: 88782 - RNA, 19 nt, Homo sapiens
  misc_RNA (1)...(19): siRNA sense strand
gaauggauguugcacuuca

SEQ ID NO: 88783 - RNA, 19 nt, Homo sapiens
  misc_RNA (1)...(19): siRNA sense strand
gacaagcacuggagcaaau

SEQ ID NO: 88784 - RNA, 19 nt, Homo sapiens
  misc_RNA (1)...(19): siRNA sense strand
caacaggaaugaugacuac

SEQ ID NO: 88785 - RNA, 19 nt, Homo sapiens
  misc_RNA (1)...(19): siRNA sense strand
ggaagaaccuuuugugaug

SEQ ID NO: 88786 - RNA, 19 nt, Homo sapiens
  misc_RNA (1)...(19): siRNA sense strand
uaacaugcguggagugguu

SEQ ID NO: 88787 - RNA, 19 nt, Homo sapiens
  misc_RNA (1)...(19): siRNA sense strand
gagaauagaagaacugaau

SEQ ID NO: 88788 - RNA, 19 nt, Homo sapiens
  misc_RNA (1)...(19): siRNA sense strand
ugacuacacucucucaguu

SEQ ID NO: 88789 - RNA, 19 nt, Homo sapiens
  misc_RNA (1)...(19): siRNA sense strand
cagcauguauucccaaaug

SEQ ID NO: 88790 - RNA, 19 nt, Homo sapiens
  misc_RNA (1)...(19): siRNA sense strand
uguguaagccgaagaaaua

SEQ ID NO: 88791 - RNA, 19 nt, Homo sapiens
  misc_RNA (1)...(19): siRNA sense strand
gagcgauccuuguuaugaa

SEQ ID NO: 88792 - RNA, 19 nt, Homo sapiens
  misc_RNA (1)...(19): siRNA sense strand
gggaauggauguugcacuu

SEQ ID NO: 88793 - RNA, 19 nt, Homo sapiens
  misc_RNA (1)...(19): siRNA sense strand
ucaagaagccugugaacuu

SEQ ID NO: 88794 - RNA, 19 nt, Homo sapiens
  misc_RNA (1)...(19): siRNA sense strand
gacauggaauggcuuggua

SEQ ID NO: 88795 - RNA, 19 nt, Homo sapiens
  misc_RNA (1)...(19): siRNA sense strand
caagaaggguggaguuagu

SEQ ID NO: 88796 - RNA, 19 nt, Homo sapiens
  misc_RNA (1)...(19): siRNA sense strand
cggcagacauuuccaauuc

SEQ ID NO: 88797 - RNA, 19 nt, Homo sapiens
  misc_RNA (1)...(19): siRNA sense strand
ccugugaacuuaugaauca

SEQ ID NO: 88798 - RNA, 19 nt, Homo sapiens
  misc_RNA (1)...(19): siRNA sense strand
uaccagggcuucuccauug

SEQ ID NO: 88799 - RNA, 19 nt, Homo sapiens
  misc_RNA (1)...(19): siRNA sense strand
gauauggaauugcauuaca

SEQ ID NO: 88800 - RNA, 19 nt, Homo sapiens
  misc_RNA (1)...(19): siRNA sense strand
agacuaauuugguugcuuu

SEQ ID NO: 88801 - RNA, 19 nt, Homo sapiens
  misc_RNA (1)...(19): siRNA sense strand
cauagggauuucugcuuua

SEQ ID NO: 88802 - RNA, 19 nt, Homo sapiens
  misc_RNA (1)...(19): siRNA sense strand
gguaggagaacuugucuuu

SEQ ID NO: 88803 - RNA, 19 nt, Homo sapiens
  misc_RNA (1)...(19): siRNA sense strand
gaagaugggacauggaaug

SEQ ID NO: 88804 - RNA, 19 nt, Homo sapiens
  misc_RNA (1)...(19): siRNA sense strand
gaaauuggagaauaacaug

SEQ ID NO: 88805 - RNA, 19 nt, Homo sapiens
  misc_RNA (1)...(19): siRNA sense strand
gagcuagaauuuggagaaa

SEQ ID NO: 88806 - RNA, 19 nt, Homo sapiens
  misc_RNA (1)...(19): siRNA sense strand
gaaggucaauuggaagguu

SEQ ID NO: 88807 - RNA, 19 nt, Homo sapiens
  misc_RNA (1)...(19): siRNA sense strand
uguaguaacuguucuggaa

SEQ ID NO: 88808 - RNA, 19 nt, Homo sapiens
  misc_RNA (1)...(19): siRNA sense strand
auuggaagguuaacgauua

SEQ ID NO: 88809 - RNA, 19 nt, Homo sapiens
  misc_RNA (1)...(19): siRNA sense strand
ugacccagauuguuccuuu

SEQ ID NO: 88810 - RNA, 19 nt, Homo sapiens
  misc_RNA (1)...(19): siRNA sense strand
uggaauauguggcuaucua

SEQ ID NO: 88811 - RNA, 19 nt, Homo sapiens
  misc_RNA (1)...(19): siRNA sense strand
gaaaaugucuuguguaagc

SEQ ID NO: 88812 - RNA, 19 nt, Homo sapiens
  misc_RNA (1)...(19): siRNA sense strand
uggcaagucugucauguau

SEQ ID NO: 88813 - RNA, 19 nt, Homo sapiens
  misc_RNA (1)...(19): siRNA sense strand
acagccaaauccuucauua

SEQ ID NO: 88814 - RNA, 19 nt, Homo sapiens
  misc_RNA (1)...(19): siRNA sense strand
uauccuggcugcuggaauu

SEQ ID NO: 88815 - RNA, 19 nt, Homo sapiens
  misc_RNA (1)...(19): siRNA sense strand
gcuauuugcuuugauuguu

SEQ ID NO: 88816 - RNA, 19 nt, Homo sapiens
  misc_RNA (1)...(19): siRNA sense strand
acauagggauuucugcuuu

SEQ ID NO: 88817 - RNA, 19 nt, Homo sapiens
  misc_RNA (1)...(19): siRNA sense strand
aaaggaugaugagguauuu

SEQ ID NO: 88818 - RNA, 19 nt, Homo sapiens
  misc_RNA (1)...(19): siRNA sense strand
caucgaauaucuucaacau

SEQ ID NO: 88819 - RNA, 19 nt, Homo sapiens
  misc_RNA (1)...(19): siRNA sense strand
aauaaacgauguggacgua

SEQ ID NO: 88820 - RNA, 19 nt, Homo sapiens
  misc_RNA (1)...(19): siRNA sense strand
ugucaucuauuccuuauca

SEQ ID NO: 88821 - RNA, 19 nt, Homo sapiens
  misc_RNA (1)...(19): siRNA sense strand
gaauuguccucuccugcuu

SEQ ID NO: 88822 - RNA, 19 nt, Homo sapiens
  misc_RNA (1)...(19): siRNA sense strand
aaacuugggugcuggaauc

SEQ ID NO: 88823 - RNA, 19 nt, Homo sapiens
  misc_RNA (1)...(19): siRNA sense strand
uuacaaaugggaucaauga

SEQ ID NO: 88824 - RNA, 19 nt, Homo sapiens
  misc_RNA (1)...(19): siRNA sense strand
gcaccgaacuggcccuuuu

SEQ ID NO: 88825 - RNA, 19 nt, Homo sapiens
  misc_RNA (1)...(19): siRNA sense strand
gcaccuccauagacgugua

SEQ ID NO: 88826 - RNA, 19 nt, Homo sapiens
  misc_RNA (1)...(19): siRNA sense strand
gcaaacagaaaucccuuau

SEQ ID NO: 88827 - RNA, 19 nt, Homo sapiens
  misc_RNA (1)...(19): siRNA sense strand
gcaacaggaaugaugacua

SEQ ID NO: 88828 - RNA, 19 nt, Homo sapiens
  misc_RNA (1)...(19): siRNA sense strand
cauuugaucucucucuaug

SEQ ID NO: 88829 - RNA, 19 nt, Homo sapiens
  misc_RNA (1)...(19): siRNA sense strand
cacaaaugguggccuaaga

SEQ ID NO: 88830 - RNA, 19 nt, Homo sapiens
  misc_RNA (1)...(19): siRNA sense strand
cguaugggaugcagcugua

SEQ ID NO: 88831 - RNA, 19 nt, Homo sapiens
  misc_RNA (1)...(19): siRNA sense strand
gcugcuuuccucacuauua

SEQ ID NO: 88832 - RNA, 19 nt, Homo sapiens
  misc_RNA (1)...(19): siRNA sense strand
ucaaugacgucuacuacuc

SEQ ID NO: 88833 - RNA, 19 nt, Homo sapiens
  misc_RNA (1)...(19): siRNA sense strand
gaauacaggaguucuugga

SEQ ID NO: 88834 - RNA, 19 nt, Homo sapiens
  misc_RNA (1)...(19): siRNA sense strand
aaauuaugcuuucguaugg

SEQ ID NO: 88835 - RNA, 19 nt, Homo sapiens
  misc_RNA (1)...(19): siRNA sense strand
cuacuggucuaccucuuga

SEQ ID NO: 88836 - RNA, 19 nt, Homo sapiens
  misc_RNA (1)...(19): siRNA sense strand
gacuggagagcuagaauuu

SEQ ID NO: 88837 - RNA, 19 nt, Homo sapiens
  misc_RNA (1)...(19): siRNA sense strand
gaucuuacagacugagaaa

SEQ ID NO: 88838 - RNA, 19 nt, Homo sapiens
  misc_RNA (1)...(19): siRNA sense strand
ggacucacccggagcaaca

SEQ ID NO: 88839 - RNA, 19 nt, Homo sapiens
  misc_RNA (1)...(19): siRNA sense strand
gagacgugguggaacaaga

SEQ ID NO: 88840 - RNA, 19 nt, Homo sapiens
  misc_RNA (1)...(19): siRNA sense strand
aaagacaguggauauguuu

SEQ ID NO: 88841 - RNA, 19 nt, Homo sapiens
  misc_RNA (1)...(19): siRNA sense strand
gucacuggaucauuauaaa

SEQ ID NO: 88842 - RNA, 19 nt, Homo sapiens
  misc_RNA (1)...(19): siRNA sense strand
uaaccagaaugaagagauc

SEQ ID NO: 88843 - RNA, 19 nt, Homo sapiens
  misc_RNA (1)...(19): siRNA sense strand
gccaaauccuucauuacug

SEQ ID NO: 88844 - RNA, 19 nt, Homo sapiens
  misc_RNA (1)...(19): siRNA sense strand
ggcgagcgauccuuguuau

SEQ ID NO: 88845 - RNA, 19 nt, Homo sapiens
  misc_RNA (1)...(19): siRNA sense strand
caaugucaucuauuccuua

SEQ ID NO: 88846 - RNA, 19 nt, Homo sapiens
  misc_RNA (1)...(19): siRNA sense strand
gacagcauguauucccaaa

SEQ ID NO: 88847 - RNA, 19 nt, Homo sapiens
  misc_RNA (1)...(19): siRNA sense strand
cuacuacucucuacaacuc

SEQ ID NO: 88848 - RNA, 19 nt, Homo sapiens
  misc_RNA (1)...(19): siRNA sense strand
uaaacgauguggacguaca

SEQ ID NO: 88849 - RNA, 19 nt, Homo sapiens
  misc_RNA (1)...(19): siRNA sense strand
ggagcaacaggaaugauga

SEQ ID NO: 88850 - RNA, 19 nt, Homo sapiens
  misc_RNA (1)...(19): siRNA sense strand
ucccaaauguggcggauga

SEQ ID NO: 88851 - RNA, 19 nt, Homo sapiens
  misc_RNA (1)...(19): siRNA sense strand
ccuagacucugcgguauau

SEQ ID NO: 88852 - RNA, 19 nt, Homo sapiens
  misc_RNA (1)...(19): siRNA sense strand
uagcaccggaucacaaaua

SEQ ID NO: 88853 - RNA, 19 nt, Homo sapiens
  misc_RNA (1)...(19): siRNA sense strand
gaacuuguaagaaggucaa

SEQ ID NO: 88854 - RNA, 19 nt, Homo sapiens
  misc_RNA (1)...(19): siRNA sense strand
gcaugauguuauccuaaga

SEQ ID NO: 88855 - RNA, 19 nt, Homo sapiens
  misc_RNA (1)...(19): siRNA sense strand
ggaaugaugacuacacucu

SEQ ID NO: 88856 - RNA, 19 nt, Homo sapiens
  misc_RNA (1)...(19): siRNA sense strand
cuacuugcaugauguuauc

SEQ ID NO: 88857 - RNA, 19 nt, Homo sapiens
  misc_RNA (1)...(19): siRNA sense strand
gcucccggguuccaucaaa

SEQ ID NO: 88858 - RNA, 19 nt, Homo sapiens
  misc_RNA (1)...(19): siRNA sense strand
gcaauggaucggagaacaa

SEQ ID NO: 88859 - RNA, 19 nt, Homo sapiens
  misc_RNA (1)...(19): siRNA sense strand
gagagggacagcauguauu

SEQ ID NO: 88860 - RNA, 19 nt, Homo sapiens
  misc_RNA (1)...(19): siRNA sense strand
ggaagguuaacgauuauuc

SEQ ID NO: 88861 - RNA, 19 nt, Homo sapiens
  misc_RNA (1)...(19): siRNA sense strand
gauuacaaaugggaucaau

SEQ ID NO: 88862 - RNA, 19 nt, Homo sapiens
  misc_RNA (1)...(19): siRNA sense strand
uucaggaacacucauauua

SEQ ID NO: 88863 - RNA, 19 nt, Homo sapiens
  misc_RNA (1)...(19): siRNA sense strand
gggauauggaauugcauua

SEQ ID NO: 88864 - RNA, 19 nt, Homo sapiens
  misc_RNA (1)...(19): siRNA sense strand
uuacacgcauugaaaguuc

SEQ ID NO: 88865 - RNA, 19 nt, Homo sapiens
  misc_RNA (1)...(19): siRNA sense strand
guauggaucuuuuguacaa

SEQ ID NO: 88866 - RNA, 19 nt, Homo sapiens
  misc_RNA (1)...(19): siRNA sense strand
uaucaugcauccuuucuua

SEQ ID NO: 88867 - RNA, 19 nt, Homo sapiens
  misc_RNA (1)...(19): siRNA sense strand
cgaguuugaugaagaauuu

SEQ ID NO: 88868 - RNA, 19 nt, Homo sapiens
  misc_RNA (1)...(19): siRNA sense strand
ccagaaggcuauaauuaga

SEQ ID NO: 88869 - RNA, 19 nt, Homo sapiens
  misc_RNA (1)...(19): siRNA sense strand
gaacccugauugacaugua

SEQ ID NO: 88870 - RNA, 19 nt, Homo sapiens
  misc_RNA (1)...(19): siRNA sense strand
guacagacccgaagcauuc

SEQ ID NO: 88871 - RNA, 19 nt, Homo sapiens
  misc_RNA (1)...(19): siRNA sense strand
gcccagaaggcuauaauua

SEQ ID NO: 88872 - RNA, 19 nt, Homo sapiens
  misc_RNA (1)...(19): siRNA sense strand
gaauacacagugaaacuaa

SEQ ID NO: 88873 - RNA, 19 nt, Homo sapiens
  misc_RNA (1)...(19): siRNA sense strand
gaaccuggcagcaagaaga

SEQ ID NO: 88874 - RNA, 19 nt, Homo sapiens
  misc_RNA (1)...(19): siRNA sense strand
caacaucuuuaggccauaa

SEQ ID NO: 88875 - RNA, 19 nt, Homo sapiens
  misc_RNA (1)...(19): siRNA sense strand
aagaacaguuguacaaguu

SEQ ID NO: 88876 - RNA, 19 nt, Homo sapiens
  misc_RNA (1)...(19): siRNA sense strand
ggaauacacagugaaacua

SEQ ID NO: 88877 - RNA, 19 nt, Homo sapiens
  misc_RNA (1)...(19): siRNA sense strand
gaaauugacgggaugaagu

SEQ ID NO: 88878 - RNA, 19 nt, Homo sapiens
  misc_RNA (1)...(19): siRNA sense strand
gagagaacccugauugaca

SEQ ID NO: 88879 - RNA, 19 nt, Homo sapiens
  misc_RNA (1)...(19): siRNA sense strand
gaagcauucuccacuacau

SEQ ID NO: 88880 - RNA, 19 nt, Homo sapiens
  misc_RNA (1)...(19): siRNA sense strand
uagauacuuuccuguguuu

SEQ ID NO: 88881 - RNA, 19 nt, Homo sapiens
  misc_RNA (1)...(19): siRNA sense strand
aaagaacaguuguacaagu

SEQ ID NO: 88882 - RNA, 19 nt, Homo sapiens
  misc_RNA (1)...(19): siRNA sense strand
cuaauauccugucugcauu

SEQ ID NO: 88883 - RNA, 19 nt, Homo sapiens
  misc_RNA (1)...(19): siRNA sense strand
gggaugaaguugguacaga

SEQ ID NO: 88884 - RNA, 19 nt, Homo sapiens
  misc_RNA (1)...(19): siRNA sense strand
aaagcuuucuuguugguaa

SEQ ID NO: 88885 - RNA, 19 nt, Homo sapiens
  misc_RNA (1)...(19): siRNA sense strand
gagucgaguuugaugaaga

SEQ ID NO: 88886 - RNA, 19 nt, Homo sapiens
  misc_RNA (1)...(19): siRNA sense strand
caaaagaacaguuguacaa

SEQ ID NO: 88887 - RNA, 19 nt, Homo sapiens
  misc_RNA (1)...(19): siRNA sense strand
gauacuuuccuguguuuga

SEQ ID NO: 88888 - RNA, 19 nt, Homo sapiens
  misc_RNA (1)...(19): siRNA sense strand
gaucugcuggaacugcuua

SEQ ID NO: 88889 - RNA, 19 nt, Homo sapiens
  misc_RNA (1)...(19): siRNA sense strand
agacaagcacaaucucuuu

SEQ ID NO: 88890 - RNA, 19 nt, Homo sapiens
  misc_RNA (1)...(19): siRNA sense strand
ugagaaccgucuacaacau

SEQ ID NO: 88891 - RNA, 19 nt, Homo sapiens
  misc_RNA (1)...(19): siRNA sense strand
uuagauacuuuccuguguu

SEQ ID NO: 88892 - RNA, 19 nt, Homo sapiens
  misc_RNA (1)...(19): siRNA sense strand
agagaacccugauugacau

SEQ ID NO: 88893 - RNA, 19 nt, Homo sapiens
  misc_RNA (1)...(19): siRNA sense strand
ccaggaauacacagugaaa

SEQ ID NO: 88894 - RNA, 19 nt, Homo sapiens
  misc_RNA (1)...(19): siRNA sense strand
ucaugcauccuuucuuaaa

SEQ ID NO: 88895 - RNA, 19 nt, Homo sapiens
  misc_RNA (1)...(19): siRNA sense strand
ggauggaguccgugagaug

SEQ ID NO: 88896 - RNA, 19 nt, Homo sapiens
  misc_RNA (1)...(19): siRNA sense strand
caauuaagagauuccuuga

SEQ ID NO: 88897 - RNA, 19 nt, Homo sapiens
  misc_RNA (1)...(19): siRNA sense strand
cagcugagccuugcagaug

SEQ ID NO: 88898 - RNA, 19 nt, Homo sapiens
  misc_RNA (1)...(19): siRNA sense strand
gagccuugcagaugugauu

SEQ ID NO: 88899 - RNA, 19 nt, Homo sapiens
  misc_RNA (1)...(19): siRNA sense strand
guaaccaccugcuguucca

SEQ ID NO: 88900 - RNA, 19 nt, Homo sapiens
  misc_RNA (1)...(19): siRNA sense strand
ucccuacaauuaagagauu

SEQ ID NO: 88901 - RNA, 19 nt, Homo sapiens
  misc_RNA (1)...(19): siRNA sense strand
gacaagcacaaucucuuug

SEQ ID NO: 88902 - RNA, 19 nt, Homo sapiens
  misc_RNA (1)...(19): siRNA sense strand
ggcccaagcuccacuaucc

SEQ ID NO: 88903 - RNA, 19 nt, Homo sapiens
  misc_RNA (1)...(19): siRNA sense strand
gacacuggaucugcuggaa

SEQ ID NO: 88904 - RNA, 19 nt, Homo sapiens
  misc_RNA (1)...(19): siRNA sense strand
ggaaacaaaagaacaguug

SEQ ID NO: 88905 - RNA, 19 nt, Homo sapiens
  misc_RNA (1)...(19): siRNA sense strand
ccuaauauccugucugcau

SEQ ID NO: 88906 - RNA, 19 nt, Homo sapiens
  misc_RNA (1)...(19): siRNA sense strand
acaaguugcaggaugguaa

SEQ ID NO: 88907 - RNA, 19 nt, Homo sapiens
  misc_RNA (1)...(19): siRNA sense strand
uaauauccugucugcauuu

SEQ ID NO: 88908 - RNA, 19 nt, Homo sapiens
  misc_RNA (1)...(19): siRNA sense strand
gagaaccgucuacaacauc

SEQ ID NO: 88909 - RNA, 19 nt, Homo sapiens
  misc_RNA (1)...(19): siRNA sense strand
auuaagagauuccuugaac

SEQ ID NO: 88910 - RNA, 19 nt, Homo sapiens
  misc_RNA (1)...(19): siRNA sense strand
acacagugaaacuaaguaa

SEQ ID NO: 88911 - RNA, 19 nt, Homo sapiens
  misc_RNA (1)...(19): siRNA sense strand
caagugcccaugguugaaa

SEQ ID NO: 88912 - RNA, 19 nt, Homo sapiens
  misc_RNA (1)...(19): siRNA sense strand
aaaggaagugguuaacaug

SEQ ID NO: 88913 - RNA, 19 nt, Homo sapiens
  misc_RNA (1)...(19): siRNA sense strand
ggagagaacccugauugac

SEQ ID NO: 88914 - RNA, 19 nt, Homo sapiens
  misc_RNA (1)...(19): siRNA sense strand
gguacagacccgaagcauu

SEQ ID NO: 88915 - RNA, 19 nt, Homo sapiens
  misc_RNA (1)...(19): siRNA sense strand
aaggagagaacccugauug

SEQ ID NO: 88916 - RNA, 19 nt, Homo sapiens
  misc_RNA (1)...(19): siRNA sense strand
gcugagccuugcagaugug

SEQ ID NO: 88917 - RNA, 19 nt, Homo sapiens
  misc_RNA (1)...(19): siRNA sense strand
gcagacaagcacaaucucu

SEQ ID NO: 88918 - RNA, 19 nt, Homo sapiens
  misc_RNA (1)...(19): siRNA sense strand
cccgaagcauucuccacua

SEQ ID NO: 88919 - RNA, 19 nt, Homo sapiens
  misc_RNA (1)...(19): siRNA sense strand
ggagucgaguuugaugaag

SEQ ID NO: 88920 - RNA, 19 nt, Homo sapiens
  misc_RNA (1)...(19): siRNA sense strand
agucgaguuugaugaagaa

SEQ ID NO: 88921 - RNA, 19 nt, Homo sapiens
  misc_RNA (1)...(19): siRNA sense strand
aaaaggaagugguuaacau

SEQ ID NO: 88922 - RNA, 19 nt, Homo sapiens
  misc_RNA (1)...(19): siRNA sense strand
aaauugacgggaugaaguu

SEQ ID NO: 88923 - RNA, 19 nt, Homo sapiens
  misc_RNA (1)...(19): siRNA sense strand
gugagaaccgucuacaaca

SEQ ID NO: 88924 - RNA, 19 nt, Homo sapiens
  misc_RNA (1)...(19): siRNA sense strand
ggaacugcuuaucaugcau

SEQ ID NO: 88925 - RNA, 19 nt, Homo sapiens
  misc_RNA (1)...(19): siRNA sense strand
cagacaagcacaaucucuu

SEQ ID NO: 88926 - RNA, 19 nt, Homo sapiens
  misc_RNA (1)...(19): siRNA sense strand
ccugaugaaauuuauguga

SEQ ID NO: 88927 - RNA, 19 nt, Homo sapiens
  misc_RNA (1)...(19): siRNA sense strand
cuaaguaauaucccuacaa

SEQ ID NO: 88928 - RNA, 19 nt, Homo sapiens
  misc_RNA (1)...(19): siRNA sense strand
gcccaugguugaaauugac

SEQ ID NO: 88929 - RNA, 19 nt, Homo sapiens
  misc_RNA (1)...(19): siRNA sense strand
cccagaaggcuauaauuag

SEQ ID NO: 88930 - RNA, 19 nt, Homo sapiens
  misc_RNA (1)...(19): siRNA sense strand
uagcagacaagcacaaucu

SEQ ID NO: 88931 - RNA, 19 nt, Homo sapiens
  misc_RNA (1)...(19): siRNA sense strand
ccaacaagugcccaugguu

SEQ ID NO: 88932 - RNA, 19 nt, Homo sapiens
  misc_RNA (1)...(19): siRNA sense strand
auacuuuccuguguuugaa

SEQ ID NO: 88933 - RNA, 19 nt, Homo sapiens
  misc_RNA (1)...(19): siRNA sense strand
uggaacugcuuaucaugca

SEQ ID NO: 88934 - RNA, 19 nt, Homo sapiens
  misc_RNA (1)...(19): siRNA sense strand
ccgaagcauucuccacuac

SEQ ID NO: 88935 - RNA, 19 nt, Homo sapiens
  misc_RNA (1)...(19): siRNA sense strand
ccacuaucccaacggaaga

SEQ ID NO: 88936 - RNA, 19 nt, Homo sapiens
  misc_RNA (1)...(19): siRNA sense strand
ugguuaacauggcccagaa

SEQ ID NO: 88937 - RNA, 19 nt, Homo sapiens
  misc_RNA (1)...(19): siRNA sense strand
caaggagagaacccugauu

SEQ ID NO: 88938 - RNA, 19 nt, Homo sapiens
  misc_RNA (1)...(19): siRNA sense strand
aagcauucuccacuacaua

SEQ ID NO: 88939 - RNA, 19 nt, Homo sapiens
  misc_RNA (1)...(19): siRNA sense strand
cuccaggaauacacaguga

SEQ ID NO: 88940 - RNA, 19 nt, Homo sapiens
  misc_RNA (1)...(19): siRNA sense strand
cagaaggcuauaauuagau

SEQ ID NO: 88941 - RNA, 19 nt, Homo sapiens
  misc_RNA (1)...(19): siRNA sense strand
aacaagugcccaugguuga

SEQ ID NO: 88942 - RNA, 19 nt, Homo sapiens
  misc_RNA (1)...(19): siRNA sense strand
ggucacggacaaagcuuuc

SEQ ID NO: 88943 - RNA, 19 nt, Homo sapiens
  misc_RNA (1)...(19): siRNA sense strand
aaaaccagaugaucagcaa

SEQ ID NO: 88944 - RNA, 19 nt, Homo sapiens
  misc_RNA (1)...(19): siRNA sense strand
cggagucgaguuugaugaa

SEQ ID NO: 88945 - RNA, 19 nt, Homo sapiens
  misc_RNA (1)...(19): siRNA sense strand
ggcaaaugcugaaagauuc

SEQ ID NO: 88946 - RNA, 19 nt, Homo sapiens
  misc_RNA (1)...(19): siRNA sense strand
gggcauauacuguguagga

SEQ ID NO: 88947 - RNA, 19 nt, Homo sapiens
  misc_RNA (1)...(19): siRNA sense strand
gagcacagcgggcauauac

SEQ ID NO: 88948 - RNA, 19 nt, Homo sapiens
  misc_RNA (1)...(19): siRNA sense strand
gguggcaaaugcugaaaga

SEQ ID NO: 88949 - RNA, 19 nt, Homo sapiens
  misc_RNA (1)...(19): siRNA sense strand
gcacagcgggcauauacug

SEQ ID NO: 88950 - RNA, 19 nt, Homo sapiens
  misc_RNA (1)...(19): siRNA sense strand
ugccaacccugaagauuga

SEQ ID NO: 88951 - RNA, 19 nt, Homo sapiens
  misc_RNA (1)...(19): siRNA sense strand
uggcaaaugcugaaagauu

SEQ ID NO: 88952 - RNA, 19 nt, Homo sapiens
  misc_RNA (1)...(19): siRNA sense strand
gugccaacccugaagauug

SEQ ID NO: 88953 - RNA, 19 nt, Homo sapiens
  misc_RNA (1)...(19): siRNA sense strand
ccagaacgccaucacuugu

SEQ ID NO: 88954 - RNA, 19 nt, Homo sapiens
  misc_RNA (1)...(19): siRNA sense strand
gcaagugggagaggagaug

SEQ ID NO: 88955 - RNA, 19 nt, Homo sapiens
  misc_RNA (1)...(19): siRNA sense strand
gcccagaacgccaucacuu

SEQ ID NO: 88956 - RNA, 19 nt, Homo sapiens
  misc_RNA (1)...(19): siRNA sense strand
cagcgggcauauacugugu

SEQ ID NO: 88957 - RNA, 19 nt, Homo sapiens
  misc_RNA (1)...(19): siRNA sense strand
gcgggcauauacuguguag

SEQ ID NO: 88958 - RNA, 19 nt, Homo sapiens
  misc_RNA (1)...(19): siRNA sense strand
accaucagcuccaucaaca

SEQ ID NO: 88959 - RNA, 19 nt, Homo sapiens
  misc_RNA (1)...(19): siRNA sense strand
uuaacgcccuggagcagau

SEQ ID NO: 88960 - RNA, 19 nt, Homo sapiens
  misc_RNA (1)...(19): siRNA sense strand
caucagcuccaucaacaag

SEQ ID NO: 88961 - RNA, 19 nt, Homo sapiens
  misc_RNA (1)...(19): siRNA sense strand
aaucaccauucaccaguca

SEQ ID NO: 88962 - RNA, 19 nt, Homo sapiens
  misc_RNA (1)...(19): siRNA sense strand
cccugaagauugauggaau

SEQ ID NO: 88963 - RNA, 19 nt, Homo sapiens
  misc_RNA (1)...(19): siRNA sense strand
ucagcuccaucaacaagag

SEQ ID NO: 88964 - RNA, 19 nt, Homo sapiens
  misc_RNA (1)...(19): siRNA sense strand
agaggcugcuggucuugga

SEQ ID NO: 88965 - RNA, 19 nt, Homo sapiens
  misc_RNA (1)...(19): siRNA sense strand
cccagaacgccaucacuug

SEQ ID NO: 88966 - RNA, 19 nt, Homo sapiens
  misc_RNA (1)...(19): siRNA sense strand
ugucuguccugaagcaagu

SEQ ID NO: 88967 - RNA, 19 nt, Homo sapiens
  misc_RNA (1)...(19): siRNA sense strand
gaauugcucuggccuugaa

SEQ ID NO: 88968 - RNA, 19 nt, Homo sapiens
  misc_RNA (1)...(19): siRNA sense strand
ggcaaaugcugaaagauuc

SEQ ID NO: 88969 - RNA, 19 nt, Homo sapiens
  misc_RNA (1)...(19): siRNA sense strand
ccaucaaucucauaaagga

SEQ ID NO: 88970 - RNA, 19 nt, Homo sapiens
  misc_RNA (1)...(19): siRNA sense strand
gggcauauacuguguagga

SEQ ID NO: 88971 - RNA, 19 nt, Homo sapiens
  misc_RNA (1)...(19): siRNA sense strand
gagcacagcgggcauauac

SEQ ID NO: 88972 - RNA, 19 nt, Homo sapiens
  misc_RNA (1)...(19): siRNA sense strand
gguggcaaaugcugaaaga

SEQ ID NO: 88973 - RNA, 19 nt, Homo sapiens
  misc_RNA (1)...(19): siRNA sense strand
gcccaucaaucucauaaag

SEQ ID NO: 88974 - RNA, 19 nt, Homo sapiens
  misc_RNA (1)...(19): siRNA sense strand
gcacagcgggcauauacug

SEQ ID NO: 88975 - RNA, 19 nt, Homo sapiens
  misc_RNA (1)...(19): siRNA sense strand
ugccaacccugaagauuga

SEQ ID NO: 88976 - RNA, 19 nt, Homo sapiens
  misc_RNA (1)...(19): siRNA sense strand
uggcaaaugcugaaagauu

SEQ ID NO: 88977 - RNA, 19 nt, Homo sapiens
  misc_RNA (1)...(19): siRNA sense strand
cauccucuauuccuauuuc

SEQ ID NO: 88978 - RNA, 19 nt, Homo sapiens
  misc_RNA (1)...(19): siRNA sense strand
ucauggagaguucgaauug

SEQ ID NO: 88979 - RNA, 19 nt, Homo sapiens
  misc_RNA (1)...(19): siRNA sense strand
gugccaacccugaagauug

SEQ ID NO: 88980 - RNA, 19 nt, Homo sapiens
  misc_RNA (1)...(19): siRNA sense strand
ggacuuccaggcacugaau

SEQ ID NO: 88981 - RNA, 19 nt, Homo sapiens
  misc_RNA (1)...(19): siRNA sense strand
ccagaacgccaucacuugu

SEQ ID NO: 88982 - RNA, 19 nt, Homo sapiens
  misc_RNA (1)...(19): siRNA sense strand
cgaagcuccugcucaugga

SEQ ID NO: 88983 - RNA, 19 nt, Homo sapiens
  misc_RNA (1)...(19): siRNA sense strand
gcaagugggagaggagaug

SEQ ID NO: 88984 - RNA, 19 nt, Homo sapiens
  misc_RNA (1)...(19): siRNA sense strand
gcccagaacgccaucacuu

SEQ ID NO: 88985 - RNA, 19 nt, Homo sapiens
  misc_RNA (1)...(19): siRNA sense strand
cagcgggcauauacugugu

SEQ ID NO: 88986 - RNA, 19 nt, Homo sapiens
  misc_RNA (1)...(19): siRNA sense strand
uccaggcacugaauccuau

SEQ ID NO: 88987 - RNA, 19 nt, Homo sapiens
  misc_RNA (1)...(19): siRNA sense strand
gcgggcauauacuguguag

SEQ ID NO: 88988 - RNA, 19 nt, Homo sapiens
  misc_RNA (1)...(19): siRNA sense strand
accaucagcuccaucaaca

SEQ ID NO: 88989 - RNA, 19 nt, Homo sapiens
  misc_RNA (1)...(19): siRNA sense strand
uuaacgcccuggagcagau

SEQ ID NO: 88990 - RNA, 19 nt, Homo sapiens
  misc_RNA (1)...(19): siRNA sense strand
caucagcuccaucaacaag

SEQ ID NO: 88991 - RNA, 19 nt, Homo sapiens
  misc_RNA (1)...(19): siRNA sense strand
gccaacaguuuucuaagga

SEQ ID NO: 88992 - RNA, 19 nt, Homo sapiens
  misc_RNA (1)...(19): siRNA sense strand
aaucaccauucaccaguca

SEQ ID NO: 88993 - RNA, 19 nt, Homo sapiens
  misc_RNA (1)...(19): siRNA sense strand
agacggugcccaucaaucu

SEQ ID NO: 88994 - RNA, 19 nt, Homo sapiens
  misc_RNA (1)...(19): siRNA sense strand
gcucauggagaguucgaau

SEQ ID NO: 88995 - RNA, 19 nt, Homo sapiens
  misc_RNA (1)...(19): siRNA sense strand
ggcacugaauccuaugaag

SEQ ID NO: 88996 - RNA, 19 nt, Homo sapiens
  misc_RNA (1)...(19): siRNA sense strand
gugcccaucaaucucauaa

SEQ ID NO: 88997 - RNA, 19 nt, Homo sapiens
  misc_RNA (1)...(19): siRNA sense strand
cccugaagauugauggaau

SEQ ID NO: 88998 - RNA, 19 nt, Homo sapiens
  misc_RNA (1)...(19): siRNA sense strand
cccauccucuauuccuauu

SEQ ID NO: 88999 - RNA, 19 nt, Homo sapiens
  misc_RNA (1)...(19): siRNA sense strand
agaggcugcuggucuugga

SEQ ID NO: 89000 - RNA, 19 nt, Homo sapiens
  misc_RNA (1)...(19): siRNA sense strand
ucagcuccaucaacaagag

SEQ ID NO: 89001 - RNA, 19 nt, Homo sapiens
  misc_RNA (1)...(19): siRNA sense strand
ugucuguccugaagcaagu

SEQ ID NO: 89002 - RNA, 19 nt, Homo sapiens
  misc_RNA (1)...(19): siRNA sense strand
gcccauccucuauuccuau

SEQ ID NO: 89003 - RNA, 19 nt, Homo sapiens
  misc_RNA (1)...(19): siRNA sense strand
cccagaacgccaucacuug

SEQ ID NO: 89004 - RNA, 19 nt, Homo sapiens
  misc_RNA (1)...(19): siRNA sense strand
gaauugcucuggccuugaa

SEQ ID NO: 89005 - RNA, 19 nt, Homo sapiens
  misc_RNA (1)...(19): siRNA sense strand
ggcaaaugcugaaagauuc

SEQ ID NO: 89006 - RNA, 19 nt, Homo sapiens
  misc_RNA (1)...(19): siRNA sense strand
ccaucaaucucauaaagga

SEQ ID NO: 89007 - RNA, 19 nt, Homo sapiens
  misc_RNA (1)...(19): siRNA sense strand
gggcauauacuguguagga

SEQ ID NO: 89008 - RNA, 19 nt, Homo sapiens
  misc_RNA (1)...(19): siRNA sense strand
gagcacagcgggcauauac

SEQ ID NO: 89009 - RNA, 19 nt, Homo sapiens
  misc_RNA (1)...(19): siRNA sense strand
gguggcaaaugcugaaaga

SEQ ID NO: 89010 - RNA, 19 nt, Homo sapiens
  misc_RNA (1)...(19): siRNA sense strand
gcccaucaaucucauaaag

SEQ ID NO: 89011 - RNA, 19 nt, Homo sapiens
  misc_RNA (1)...(19): siRNA sense strand
gcacagcgggcauauacug

SEQ ID NO: 89012 - RNA, 19 nt, Homo sapiens
  misc_RNA (1)...(19): siRNA sense strand
ugccaacccugaagauuga

SEQ ID NO: 89013 - RNA, 19 nt, Homo sapiens
  misc_RNA (1)...(19): siRNA sense strand
uggcaaaugcugaaagauu

SEQ ID NO: 89014 - RNA, 19 nt, Homo sapiens
  misc_RNA (1)...(19): siRNA sense strand
cauccucuauuccuauuuc

SEQ ID NO: 89015 - RNA, 19 nt, Homo sapiens
  misc_RNA (1)...(19): siRNA sense strand
ucauggagaguucgaauug

SEQ ID NO: 89016 - RNA, 19 nt, Homo sapiens
  misc_RNA (1)...(19): siRNA sense strand
gugccaacccugaagauug

SEQ ID NO: 89017 - RNA, 19 nt, Homo sapiens
  misc_RNA (1)...(19): siRNA sense strand
ggacuuccaggcacugaau

SEQ ID NO: 89018 - RNA, 19 nt, Homo sapiens
  misc_RNA (1)...(19): siRNA sense strand
ccagaacgccaucacuugu

SEQ ID NO: 89019 - RNA, 19 nt, Homo sapiens
  misc_RNA (1)...(19): siRNA sense strand
cgaagcuccugcucaugga

SEQ ID NO: 89020 - RNA, 19 nt, Homo sapiens
  misc_RNA (1)...(19): siRNA sense strand
gcaagugggagaggagaug

SEQ ID NO: 89021 - RNA, 19 nt, Homo sapiens
  misc_RNA (1)...(19): siRNA sense strand
gcccagaacgccaucacuu

SEQ ID NO: 89022 - RNA, 19 nt, Homo sapiens
  misc_RNA (1)...(19): siRNA sense strand
cagcgggcauauacugugu

SEQ ID NO: 89023 - RNA, 19 nt, Homo sapiens
  misc_RNA (1)...(19): siRNA sense strand
uccaggcacugaauccuau

SEQ ID NO: 89024 - RNA, 19 nt, Homo sapiens
  misc_RNA (1)...(19): siRNA sense strand
gcgggcauauacuguguag

SEQ ID NO: 89025 - RNA, 19 nt, Homo sapiens
  misc_RNA (1)...(19): siRNA sense strand
accaucagcuccaucaaca

SEQ ID NO: 89026 - RNA, 19 nt, Homo sapiens
  misc_RNA (1)...(19): siRNA sense strand
uuaacgcccuggagcagau

SEQ ID NO: 89027 - RNA, 19 nt, Homo sapiens
  misc_RNA (1)...(19): siRNA sense strand
caucagcuccaucaacaag

SEQ ID NO: 89028 - RNA, 19 nt, Homo sapiens
  misc_RNA (1)...(19): siRNA sense strand
gccaacaguuuucuaagga

SEQ ID NO: 89029 - RNA, 19 nt, Homo sapiens
  misc_RNA (1)...(19): siRNA sense strand
aaucaccauucaccaguca

SEQ ID NO: 89030 - RNA, 19 nt, Homo sapiens
  misc_RNA (1)...(19): siRNA sense strand
agacggugcccaucaaucu

SEQ ID NO: 89031 - RNA, 19 nt, Homo sapiens
  misc_RNA (1)...(19): siRNA sense strand
gcucauggagaguucgaau

SEQ ID NO: 89032 - RNA, 19 nt, Homo sapiens
  misc_RNA (1)...(19): siRNA sense strand
ggcacugaauccuaugaag

SEQ ID NO: 89033 - RNA, 19 nt, Homo sapiens
  misc_RNA (1)...(19): siRNA sense strand
gugcccaucaaucucauaa

SEQ ID NO: 89034 - RNA, 19 nt, Homo sapiens
  misc_RNA (1)...(19): siRNA sense strand
cccugaagauugauggaau

SEQ ID NO: 89035 - RNA, 19 nt, Homo sapiens
  misc_RNA (1)...(19): siRNA sense strand
cccauccucuauuccuauu

SEQ ID NO: 89036 - RNA, 19 nt, Homo sapiens
  misc_RNA (1)...(19): siRNA sense strand
agaggcugcuggucuugga

SEQ ID NO: 89037 - RNA, 19 nt, Homo sapiens
  misc_RNA (1)...(19): siRNA sense strand
ucagcuccaucaacaagag

SEQ ID NO: 89038 - RNA, 19 nt, Homo sapiens
  misc_RNA (1)...(19): siRNA sense strand
ugucuguccugaagcaagu

SEQ ID NO: 89039 - RNA, 19 nt, Homo sapiens
  misc_RNA (1)...(19): siRNA sense strand
gcccauccucuauuccuau

SEQ ID NO: 89040 - RNA, 19 nt, Homo sapiens
  misc_RNA (1)...(19): siRNA sense strand
cccagaacgccaucacuug

SEQ ID NO: 89041 - RNA, 19 nt, Homo sapiens
  misc_RNA (1)...(19): siRNA sense strand
gaagaaagcuguggauaug

SEQ ID NO: 89042 - RNA, 19 nt, Homo sapiens
  misc_RNA (1)...(19): siRNA sense strand
gaacaugggagauucuuaa

SEQ ID NO: 89043 - RNA, 19 nt, Homo sapiens
  misc_RNA (1)...(19): siRNA sense strand
gcacaccauugcuucuuua

SEQ ID NO: 89044 - RNA, 19 nt, Homo sapiens
  misc_RNA (1)...(19): siRNA sense strand
ggaaggaggcuaugaaaga

SEQ ID NO: 89045 - RNA, 19 nt, Homo sapiens
  misc_RNA (1)...(19): siRNA sense strand
gaaagaacaugggagauuc

SEQ ID NO: 89046 - RNA, 19 nt, Homo sapiens
  misc_RNA (1)...(19): siRNA sense strand
gaaggaggcuaugaaagaa

SEQ ID NO: 89047 - RNA, 19 nt, Homo sapiens
  misc_RNA (1)...(19): siRNA sense strand
gguaguagauggaucaaga

SEQ ID NO: 89048 - RNA, 19 nt, Homo sapiens
  misc_RNA (1)...(19): siRNA sense strand
guagauggaucaagaacaa

SEQ ID NO: 89049 - RNA, 19 nt, Homo sapiens
  misc_RNA (1)...(19): siRNA sense strand
agacugacguguacuuuaa

SEQ ID NO: 89050 - RNA, 19 nt, Homo sapiens
  misc_RNA (1)...(19): siRNA sense strand
ggaauacuuuguagaggaa

SEQ ID NO: 89051 - RNA, 19 nt, Homo sapiens
  misc_RNA (1)...(19): siRNA sense strand
ggagaaagauuuuguuaug

SEQ ID NO: 89052 - RNA, 19 nt, Homo sapiens
  misc_RNA (1)...(19): siRNA sense strand
ggaaugaugcgccaccuuu

SEQ ID NO: 89053 - RNA, 19 nt, Homo sapiens
  misc_RNA (1)...(19): siRNA sense strand
ugaaagaccaacauguuua

SEQ ID NO: 89054 - RNA, 19 nt, Homo sapiens
  misc_RNA (1)...(19): siRNA sense strand
uagaguaucuguuauugga

SEQ ID NO: 89055 - RNA, 19 nt, Homo sapiens
  misc_RNA (1)...(19): siRNA sense strand
gaaucuggaucacuuaaag

SEQ ID NO: 89056 - RNA, 19 nt, Homo sapiens
  misc_RNA (1)...(19): siRNA sense strand
gaaagaccaacauguuuau

SEQ ID NO: 89057 - RNA, 19 nt, Homo sapiens
  misc_RNA (1)...(19): siRNA sense strand
gaguaucuguuauuggauu

SEQ ID NO: 89058 - RNA, 19 nt, Homo sapiens
  misc_RNA (1)...(19): siRNA sense strand
gaaugaugcgccaccuuua

SEQ ID NO: 89059 - RNA, 19 nt, Homo sapiens
  misc_RNA (1)...(19): siRNA sense strand
gagaaguacuaaucaucuu

SEQ ID NO: 89060 - RNA, 19 nt, Homo sapiens
  misc_RNA (1)...(19): siRNA sense strand
gaucuaaucaagacccuaa

SEQ ID NO: 89061 - RNA, 19 nt, Homo sapiens
  misc_RNA (1)...(19): siRNA sense strand
ugagcuaccuguugaaugu

SEQ ID NO: 89062 - RNA, 19 nt, Homo sapiens
  misc_RNA (1)...(19): siRNA sense strand
gaugaaagccauuacaaag

SEQ ID NO: 89063 - RNA, 19 nt, Homo sapiens
  misc_RNA (1)...(19): siRNA sense strand
ugaagaaccugaaagaacu

SEQ ID NO: 89064 - RNA, 19 nt, Homo sapiens
  misc_RNA (1)...(19): siRNA sense strand
aauggaagaccaagauuua

SEQ ID NO: 89065 - RNA, 19 nt, Homo sapiens
  misc_RNA (1)...(19): siRNA sense strand
acauacaagucgagaagua

SEQ ID NO: 89066 - RNA, 19 nt, Homo sapiens
  misc_RNA (1)...(19): siRNA sense strand
acaaagaguugcucacaca

SEQ ID NO: 89067 - RNA, 19 nt, Homo sapiens
  misc_RNA (1)...(19): siRNA sense strand
gguggcacguaccauguua

SEQ ID NO: 89068 - RNA, 19 nt, Homo sapiens
  misc_RNA (1)...(19): siRNA sense strand
ggaugaagaaccugaaaga

SEQ ID NO: 89069 - RNA, 19 nt, Homo sapiens
  misc_RNA (1)...(19): siRNA sense strand
ccuaauagacugacgugua

SEQ ID NO: 89070 - RNA, 19 nt, Homo sapiens
  misc_RNA (1)...(19): siRNA sense strand
ugaaagccauuacaaagag

SEQ ID NO: 89071 - RNA, 19 nt, Homo sapiens
  misc_RNA (1)...(19): siRNA sense strand
caacuugcgauccaucuaa

SEQ ID NO: 89072 - RNA, 19 nt, Homo sapiens
  misc_RNA (1)...(19): siRNA sense strand
acacaugccuggacauaca

SEQ ID NO: 89073 - RNA, 19 nt, Homo sapiens
  misc_RNA (1)...(19): siRNA sense strand
gcacguaccauguuauuuu

SEQ ID NO: 89074 - RNA, 19 nt, Homo sapiens
  misc_RNA (1)...(19): siRNA sense strand
caccauugcuucuuuaucu

SEQ ID NO: 89075 - RNA, 19 nt, Homo sapiens
  misc_RNA (1)...(19): siRNA sense strand
ggacauacaagucgagaag

SEQ ID NO: 89076 - RNA, 19 nt, Homo sapiens
  misc_RNA (1)...(19): siRNA sense strand
ggucuuaccaucauuuguu

SEQ ID NO: 89077 - RNA, 19 nt, Homo sapiens
  misc_RNA (1)...(19): siRNA sense strand
uggauugucugcagaaguu

SEQ ID NO: 89078 - RNA, 19 nt, Homo sapiens
  misc_RNA (1)...(19): siRNA sense strand
gaacaauggaagaccaaga

SEQ ID NO: 89079 - RNA, 19 nt, Homo sapiens
  misc_RNA (1)...(19): siRNA sense strand
cuaauagacugacguguac

SEQ ID NO: 89080 - RNA, 19 nt, Homo sapiens
  misc_RNA (1)...(19): siRNA sense strand
uguaaaaucuguggucuua

SEQ ID NO: 89081 - RNA, 19 nt, Homo sapiens
  misc_RNA (1)...(19): siRNA sense strand
ugcgauccaucuaauauuu

SEQ ID NO: 89082 - RNA, 19 nt, Homo sapiens
  misc_RNA (1)...(19): siRNA sense strand
gaagaaccugaaagaacua

SEQ ID NO: 89083 - RNA, 19 nt, Homo sapiens
  misc_RNA (1)...(19): siRNA sense strand
agccaucucuuuauaauuc

SEQ ID NO: 89084 - RNA, 19 nt, Homo sapiens
  misc_RNA (1)...(19): siRNA sense strand
ugaagaaagcuguggauau

SEQ ID NO: 89085 - RNA, 19 nt, Homo sapiens
  misc_RNA (1)...(19): siRNA sense strand
ugaaagaacaugggagauu

SEQ ID NO: 89086 - RNA, 19 nt, Homo sapiens
  misc_RNA (1)...(19): siRNA sense strand
ugcccuggcuguauucaua

SEQ ID NO: 89087 - RNA, 19 nt, Homo sapiens
  misc_RNA (1)...(19): siRNA sense strand
gaucaagaacaauggaaga

SEQ ID NO: 89088 - RNA, 19 nt, Homo sapiens
  misc_RNA (1)...(19): siRNA sense strand
gcgauccaucuaauauuua

SEQ ID NO: 89089 - RNA, 19 nt, Homo sapiens
  misc_RNA (1)...(19): siRNA sense strand
caauggaagaccaagauuu

SEQ ID NO: 89090 - RNA, 19 nt, Homo sapiens
  misc_RNA (1)...(19): siRNA sense strand
aaacacaugccuggacaua

SEQ ID NO: 89091 - RNA, 19 nt, Homo sapiens
  misc_RNA (1)...(19): siRNA sense strand
gcacggucuuaccaucauu

SEQ ID NO: 89092 - RNA, 19 nt, Homo sapiens
  misc_RNA (1)...(19): siRNA sense strand
gaaagccauuacaaagagu

SEQ ID NO: 89093 - RNA, 19 nt, Homo sapiens
  misc_RNA (1)...(19): siRNA sense strand
ggaagaccaagauuuaaag

SEQ ID NO: 89094 - RNA, 19 nt, Homo sapiens
  misc_RNA (1)...(19): siRNA sense strand
gcauuuggauggcaauacu

SEQ ID NO: 89095 - RNA, 19 nt, Homo sapiens
  misc_RNA (1)...(19): siRNA sense strand
ucacuuaaagcuacaauag

SEQ ID NO: 89096 - RNA, 19 nt, Homo sapiens
  misc_RNA (1)...(19): siRNA sense strand
ggauaugaccugccaugga

SEQ ID NO: 89097 - RNA, 19 nt, Homo sapiens
  misc_RNA (1)...(19): siRNA sense strand
gaugaaucuggaucacuua

SEQ ID NO: 89098 - RNA, 19 nt, Homo sapiens
  misc_RNA (1)...(19): siRNA sense strand
aagaguugcucacacauca

SEQ ID NO: 89099 - RNA, 19 nt, Homo sapiens
  misc_RNA (1)...(19): siRNA sense strand
uuagcagccuuacaacuug

SEQ ID NO: 89100 - RNA, 19 nt, Homo sapiens
  misc_RNA (1)...(19): siRNA sense strand
gaugaagaaccugaaagaa

SEQ ID NO: 89101 - RNA, 19 nt, Homo sapiens
  misc_RNA (1)...(19): siRNA sense strand
gaauugaaagaccaacaug

SEQ ID NO: 89102 - RNA, 19 nt, Homo sapiens
  misc_RNA (1)...(19): siRNA sense strand
acugugagcuaccuguuga

SEQ ID NO: 89103 - RNA, 19 nt, Homo sapiens
  misc_RNA (1)...(19): siRNA sense strand
ggaauugaaagaccaacau

SEQ ID NO: 89104 - RNA, 19 nt, Homo sapiens
  misc_RNA (1)...(19): siRNA sense strand
caucauuuguuuccuuugg

SEQ ID NO: 89105 - RNA, 19 nt, Homo sapiens
  misc_RNA (1)...(19): siRNA sense strand
uggaagaccaagauuuaaa

SEQ ID NO: 89106 - RNA, 19 nt, Homo sapiens
  misc_RNA (1)...(19): siRNA sense strand
ugagcaccauggacaaguu

SEQ ID NO: 89107 - RNA, 19 nt, Homo sapiens
  misc_RNA (1)...(19): siRNA sense strand
uagacugacguguacuuua

SEQ ID NO: 89108 - RNA, 19 nt, Homo sapiens
  misc_RNA (1)...(19): siRNA sense strand
gucuuaccaucauuuguuu

SEQ ID NO: 89109 - RNA, 19 nt, Homo sapiens
  misc_RNA (1)...(19): siRNA sense strand
aaucuguggucuuacuuug

SEQ ID NO: 89110 - RNA, 19 nt, Homo sapiens
  misc_RNA (1)...(19): siRNA sense strand
ggcaaaguacugugagcua

SEQ ID NO: 89111 - RNA, 19 nt, Homo sapiens
  misc_RNA (1)...(19): siRNA sense strand
uaucugaccaggaugcaaa

SEQ ID NO: 89112 - RNA, 19 nt, Homo sapiens
  misc_RNA (1)...(19): siRNA sense strand
cuaaaggcagcuaaaauua

SEQ ID NO: 89113 - RNA, 19 nt, Homo sapiens
  misc_RNA (1)...(19): siRNA sense strand
guuguuggaauacuuugua

SEQ ID NO: 89114 - RNA, 19 nt, Homo sapiens
  misc_RNA (1)...(19): siRNA sense strand
cacagugucgggcaaagua

SEQ ID NO: 89115 - RNA, 19 nt, Homo sapiens
  misc_RNA (1)...(19): siRNA sense strand
cagcauggcgcauuuggau

SEQ ID NO: 89116 - RNA, 19 nt, Homo sapiens
  misc_RNA (1)...(19): siRNA sense strand
ggaaacccaagaaaacaua

SEQ ID NO: 89117 - RNA, 19 nt, Homo sapiens
  misc_RNA (1)...(19): siRNA sense strand
uauaauucccuaagcauag

SEQ ID NO: 89118 - RNA, 19 nt, Homo sapiens
  misc_RNA (1)...(19): siRNA sense strand
ucaugauucucuacacugu

SEQ ID NO: 89119 - RNA, 19 nt, Homo sapiens
  misc_RNA (1)...(19): siRNA sense strand
ucaagaaauuccccuagaa

SEQ ID NO: 89120 - RNA, 19 nt, Homo sapiens
  misc_RNA (1)...(19): siRNA sense strand
ccugcuagcucaaguucug

SEQ ID NO: 89121 - RNA, 19 nt, Homo sapiens
  misc_RNA (1)...(19): siRNA sense strand
gagccaucucuuuauaauu

SEQ ID NO: 89122 - RNA, 19 nt, Homo sapiens
  misc_RNA (1)...(19): siRNA sense strand
uugaaagaccaacauguuu

SEQ ID NO: 89123 - RNA, 19 nt, Homo sapiens
  misc_RNA (1)...(19): siRNA sense strand
ccuagaagaauauaaugga

SEQ ID NO: 89124 - RNA, 19 nt, Homo sapiens
  misc_RNA (1)...(19): siRNA sense strand
aaugcucacuuauucguau

SEQ ID NO: 89125 - RNA, 19 nt, Homo sapiens
  misc_RNA (1)...(19): siRNA sense strand
uagcucaaguucugaaugc

SEQ ID NO: 89126 - RNA, 19 nt, Homo sapiens
  misc_RNA (1)...(19): siRNA sense strand
agaugaaagccauuacaaa

SEQ ID NO: 89127 - RNA, 19 nt, Homo sapiens
  misc_RNA (1)...(19): siRNA sense strand
accaagauuuaaagccuaa

SEQ ID NO: 89128 - RNA, 19 nt, Homo sapiens
  misc_RNA (1)...(19): siRNA sense strand
uagaugaaagccauuacaa

SEQ ID NO: 89129 - RNA, 19 nt, Homo sapiens
  misc_RNA (1)...(19): siRNA sense strand
cgagaaguacuaaucaucu

SEQ ID NO: 89130 - RNA, 19 nt, Homo sapiens
  misc_RNA (1)...(19): siRNA sense strand
agaaagcuguggauaugac

SEQ ID NO: 89131 - RNA, 19 nt, Homo sapiens
  misc_RNA (1)...(19): siRNA sense strand
uaccaucauuuguuuccuu

SEQ ID NO: 89132 - RNA, 19 nt, Homo sapiens
  misc_RNA (1)...(19): siRNA sense strand
cacguaccauguuauuuua

SEQ ID NO: 89133 - RNA, 19 nt, Homo sapiens
  misc_RNA (1)...(19): siRNA sense strand
agucagauuggaauaauug

SEQ ID NO: 89134 - RNA, 19 nt, Homo sapiens
  misc_RNA (1)...(19): siRNA sense strand
guaguagauggaucaagaa

SEQ ID NO: 89135 - RNA, 19 nt, Homo sapiens
  misc_RNA (1)...(19): siRNA sense strand
cugcagaaguucgcguuug

SEQ ID NO: 89136 - RNA, 19 nt, Homo sapiens
  misc_RNA (1)...(19): siRNA sense strand
augauucucuacacuguug

SEQ ID NO: 89137 - RNA, 19 nt, Homo sapiens
  misc_RNA (1)...(19): siRNA sense strand
guucaugauucucuacacu

SEQ ID NO: 89138 - RNA, 19 nt, Homo sapiens
  misc_RNA (1)...(19): siRNA sense strand
aguucugaaugcucacuua

SEQ ID NO: 89139 - RNA, 19 nt, Homo sapiens
  misc_RNA (1)...(19): siRNA sense strand
gcuaccuguugaauguaaa

SEQ ID NO: 89140 - RNA, 19 nt, Homo sapiens
  misc_RNA (1)...(19): siRNA sense strand
gaaccugaaagaacuaagc

SEQ ID NO: 89141 - RNA, 19 nt, Homo sapiens
  misc_RNA (1)...(19): siRNA sense strand
gagauucgguggacuacgu

SEQ ID NO: 89142 - RNA, 19 nt, Homo sapiens
  misc_RNA (1)...(19): siRNA sense strand
ucaaggcgcucggagauuc

SEQ ID NO: 89143 - RNA, 19 nt, Homo sapiens
  misc_RNA (1)...(19): siRNA sense strand
gaagcuggccgcuaacuac

SEQ ID NO: 89144 - RNA, 19 nt, Homo sapiens
  misc_RNA (1)...(19): siRNA sense strand
gcuacuggguggccauguu

SEQ ID NO: 89145 - RNA, 19 nt, Homo sapiens
  misc_RNA (1)...(19): siRNA sense strand
gauacuggguagccuucaa

SEQ ID NO: 89146 - RNA, 19 nt, Homo sapiens
  misc_RNA (1)...(19): siRNA sense strand
ggaagcuggccgcuaacua

SEQ ID NO: 89147 - RNA, 19 nt, Homo sapiens
  misc_RNA (1)...(19): siRNA sense strand
cagacacgcugguccaagu

SEQ ID NO: 89148 - RNA, 19 nt, Homo sapiens
  misc_RNA (1)...(19): siRNA sense strand
gcaagcgcgaggucaugua

SEQ ID NO: 89149 - RNA, 19 nt, Homo sapiens
  misc_RNA (1)...(19): siRNA sense strand
ccacugugcugcgucuguu

SEQ ID NO: 89150 - RNA, 19 nt, Homo sapiens
  misc_RNA (1)...(19): siRNA sense strand
gagcuacuuccacugugua

SEQ ID NO: 89151 - RNA, 19 nt, Homo sapiens
  misc_RNA (1)...(19): siRNA sense strand
uggguuaugcuaccaagua

SEQ ID NO: 89152 - RNA, 19 nt, Homo sapiens
  misc_RNA (1)...(19): siRNA sense strand
gguccucuaggccuauaua

SEQ ID NO: 89153 - RNA, 19 nt, Homo sapiens
  misc_RNA (1)...(19): siRNA sense strand
ccaaguuccuggcgcuagu

SEQ ID NO: 89154 - RNA, 19 nt, Homo sapiens
  misc_RNA (1)...(19): siRNA sense strand
ccuccugccugccaaguuc

SEQ ID NO: 89155 - RNA, 19 nt, Homo sapiens
  misc_RNA (1)...(19): siRNA sense strand
auauaggaauaaccucuug

SEQ ID NO: 89156 - RNA, 19 nt, Homo sapiens
  misc_RNA (1)...(19): siRNA sense strand
ucagagcuacuuccacugu

SEQ ID NO: 89157 - RNA, 19 nt, Homo sapiens
  misc_RNA (1)...(19): siRNA sense strand
gcgguccucuaggccuaua

SEQ ID NO: 89158 - RNA, 19 nt, Homo sapiens
  misc_RNA (1)...(19): siRNA sense strand
gggacgugcggauccuuaa

SEQ ID NO: 89159 - RNA, 19 nt, Homo sapiens
  misc_RNA (1)...(19): siRNA sense strand
agagcuacuuccacugugu

SEQ ID NO: 89160 - RNA, 19 nt, Homo sapiens
  misc_RNA (1)...(19): siRNA sense strand
ggguuaugcuaccaaguac

SEQ ID NO: 89161 - RNA, 19 nt, Homo sapiens
  misc_RNA (1)...(19): siRNA sense strand
ggacuacgugcaggucugu

SEQ ID NO: 89162 - RNA, 19 nt, Homo sapiens
  misc_RNA (1)...(19): siRNA sense strand
cuggguagccuucaaugug

SEQ ID NO: 89163 - RNA, 19 nt, Homo sapiens
  misc_RNA (1)...(19): siRNA sense strand
cagccgaggccuaccacuu

SEQ ID NO: 89164 - RNA, 19 nt, Homo sapiens
  misc_RNA (1)...(19): siRNA sense strand
gaaccuuccuuccacaaag

SEQ ID NO: 89165 - RNA, 19 nt, Homo sapiens
  misc_RNA (1)...(19): siRNA sense strand
gcucuugccgccucuacga

SEQ ID NO: 89166 - RNA, 19 nt, Homo sapiens
  misc_RNA (1)...(19): siRNA sense strand
gcacacggcucuucucagu

SEQ ID NO: 89167 - RNA, 19 nt, Homo sapiens
  misc_RNA (1)...(19): siRNA sense strand
gugauuaucuguacccaaa

SEQ ID NO: 89168 - RNA, 19 nt, Homo sapiens
  misc_RNA (1)...(19): siRNA sense strand
cacaguugcuucuuuauug

SEQ ID NO: 89169 - RNA, 19 nt, Homo sapiens
  misc_RNA (1)...(19): siRNA sense strand
gaugaacgcugggcagaug

SEQ ID NO: 89170 - RNA, 19 nt, Homo sapiens
  misc_RNA (1)...(19): siRNA sense strand
uaccacaguugcuucuuua

SEQ ID NO: 89171 - RNA, 19 nt, Homo sapiens
  misc_RNA (1)...(19): siRNA sense strand
gaugaccucuaucccaaga

SEQ ID NO: 89172 - RNA, 19 nt, Homo sapiens
  misc_RNA (1)...(19): siRNA sense strand
ugaggacagucaccaacua

SEQ ID NO: 89173 - RNA, 19 nt, Homo sapiens
  misc_RNA (1)...(19): siRNA sense strand
cuaccacaguugcuucuuu

SEQ ID NO: 89174 - RNA, 19 nt, Homo sapiens
  misc_RNA (1)...(19): siRNA sense strand
cauggccuauuuccagaua

SEQ ID NO: 89175 - RNA, 19 nt, Homo sapiens
  misc_RNA (1)...(19): siRNA sense strand
gcaaauuccgggagcaguu

SEQ ID NO: 89176 - RNA, 19 nt, Homo sapiens
  misc_RNA (1)...(19): siRNA sense strand
ggacagucaccaacuacuu

SEQ ID NO: 89177 - RNA, 19 nt, Homo sapiens
  misc_RNA (1)...(19): siRNA sense strand
cccaagaucuaccacaguu

SEQ ID NO: 89178 - RNA, 19 nt, Homo sapiens
  misc_RNA (1)...(19): siRNA sense strand
ggaggaagacagccaagau

SEQ ID NO: 89179 - RNA, 19 nt, Homo sapiens
  misc_RNA (1)...(19): siRNA sense strand
ccacaguugcuucuuuauu

SEQ ID NO: 89180 - RNA, 19 nt, Homo sapiens
  misc_RNA (1)...(19): siRNA sense strand
gaggaagacagccaagaug

SEQ ID NO: 89181 - RNA, 19 nt, Homo sapiens
  misc_RNA (1)...(19): siRNA sense strand
ccaacuacuucauugucaa

SEQ ID NO: 89182 - RNA, 19 nt, Homo sapiens
  misc_RNA (1)...(19): siRNA sense strand
acacggcucuucucagucu

SEQ ID NO: 89183 - RNA, 19 nt, Homo sapiens
  misc_RNA (1)...(19): siRNA sense strand
caucugccacccacuauug

SEQ ID NO: 89184 - RNA, 19 nt, Homo sapiens
  misc_RNA (1)...(19): siRNA sense strand
caaauuccgggagcaguuu

SEQ ID NO: 89185 - RNA, 19 nt, Homo sapiens
  misc_RNA (1)...(19): siRNA sense strand
caaaaucucugagcaugug

SEQ ID NO: 89186 - RNA, 19 nt, Homo sapiens
  misc_RNA (1)...(19): siRNA sense strand
agacuaugaagaugaguuu

SEQ ID NO: 89187 - RNA, 19 nt, Homo sapiens
  misc_RNA (1)...(19): siRNA sense strand
gacagucaccaacuacuuc

SEQ ID NO: 89188 - RNA, 19 nt, Homo sapiens
  misc_RNA (1)...(19): siRNA sense strand
uggccuauuuccagauauu

SEQ ID NO: 89189 - RNA, 19 nt, Homo sapiens
  misc_RNA (1)...(19): siRNA sense strand
gucaccaacuacuucauug

SEQ ID NO: 89190 - RNA, 19 nt, Homo sapiens
  misc_RNA (1)...(19): siRNA sense strand
gaguuucuccgcuaucugu

SEQ ID NO: 89191 - RNA, 19 nt, Homo sapiens
  misc_RNA (1)...(19): siRNA sense strand
ugaccucuaucccaagauc

SEQ ID NO: 89192 - RNA, 19 nt, Homo sapiens
  misc_RNA (1)...(19): siRNA sense strand
acaguugcuucuuuauugu

SEQ ID NO: 89193 - RNA, 19 nt, Homo sapiens
  misc_RNA (1)...(19): siRNA sense strand
uggcugaagugaagcagau

SEQ ID NO: 89194 - RNA, 19 nt, Homo sapiens
  misc_RNA (1)...(19): siRNA sense strand
cacccacuauuguucaaga

SEQ ID NO: 89195 - RNA, 19 nt, Homo sapiens
  misc_RNA (1)...(19): siRNA sense strand
cugggcagaugaccucuau

SEQ ID NO: 89196 - RNA, 19 nt, Homo sapiens
  misc_RNA (1)...(19): siRNA sense strand
ccaucagcguccucaaugu

SEQ ID NO: 89197 - RNA, 19 nt, Homo sapiens
  misc_RNA (1)...(19): siRNA sense strand
caacuuccucaguggcaaa

SEQ ID NO: 89198 - RNA, 19 nt, Homo sapiens
  misc_RNA (1)...(19): siRNA sense strand
ccucaucgcagccuaugug

SEQ ID NO: 89199 - RNA, 19 nt, Homo sapiens
  misc_RNA (1)...(19): siRNA sense strand
uggcggaaccaccacauga

SEQ ID NO: 89200 - RNA, 19 nt, Homo sapiens
  misc_RNA (1)...(19): siRNA sense strand
gcuucuuuauugucaccua

SEQ ID NO: 89201 - RNA, 19 nt, Homo sapiens
  misc_RNA (1)...(19): siRNA sense strand
ucaccagcgucaccacagu

SEQ ID NO: 89202 - RNA, 19 nt, Homo sapiens
  misc_RNA (1)...(19): siRNA sense strand
cuuccucaguggcaaauuc

SEQ ID NO: 89203 - RNA, 19 nt, Homo sapiens
  misc_RNA (1)...(19): siRNA sense strand
ggaagacagccaagaugcu

SEQ ID NO: 89204 - RNA, 19 nt, Homo sapiens
  misc_RNA (1)...(19): siRNA sense strand
aggcugcagucauggaaug

SEQ ID NO: 89205 - RNA, 19 nt, Homo sapiens
  misc_RNA (1)...(19): siRNA sense strand
gcccaucagcguccucaau

SEQ ID NO: 89206 - RNA, 19 nt, Homo sapiens
  misc_RNA (1)...(19): siRNA sense strand
gccaugcccucugcaaggu

SEQ ID NO: 89207 - RNA, 19 nt, Homo sapiens
  misc_RNA (1)...(19): siRNA sense strand
cgcuaucuguggcgugauu

SEQ ID NO: 89208 - RNA, 19 nt, Homo sapiens
  misc_RNA (1)...(19): siRNA sense strand
gcaaggucauccccuaucu

SEQ ID NO: 89209 - RNA, 19 nt, Homo sapiens
  misc_RNA (1)...(19): siRNA sense strand
caucuacaacuuccucagu

SEQ ID NO: 89210 - RNA, 19 nt, Homo sapiens
  misc_RNA (1)...(19): siRNA sense strand
gcaaagugauuccuuaucu

SEQ ID NO: 89211 - RNA, 19 nt, Homo sapiens
  misc_RNA (1)...(19): siRNA sense strand
gcaaauauuucgcaaacuc

SEQ ID NO: 89212 - RNA, 19 nt, Homo sapiens
  misc_RNA (1)...(19): siRNA sense strand
cagcaacuuugauaacaua

SEQ ID NO: 89213 - RNA, 19 nt, Homo sapiens
  misc_RNA (1)...(19): siRNA sense strand
uggauugucuccugcauua

SEQ ID NO: 89214 - RNA, 19 nt, Homo sapiens
  misc_RNA (1)...(19): siRNA sense strand
caaagugauuccuuaucua

SEQ ID NO: 89215 - RNA, 19 nt, Homo sapiens
  misc_RNA (1)...(19): siRNA sense strand
gagaguauuugggauguuu

SEQ ID NO: 89216 - RNA, 19 nt, Homo sapiens
  misc_RNA (1)...(19): siRNA sense strand
uggcuuaucugcaaauauu

SEQ ID NO: 89217 - RNA, 19 nt, Homo sapiens
  misc_RNA (1)...(19): siRNA sense strand
ccaauuagcauccucaaug

SEQ ID NO: 89218 - RNA, 19 nt, Homo sapiens
  misc_RNA (1)...(19): siRNA sense strand
gguguuggcuuaucugcaa

SEQ ID NO: 89219 - RNA, 19 nt, Homo sapiens
  misc_RNA (1)...(19): siRNA sense strand
ccaacgaagucccggauga

SEQ ID NO: 89220 - RNA, 19 nt, Homo sapiens
  misc_RNA (1)...(19): siRNA sense strand
ggaaguccuugaccacuca

SEQ ID NO: 89221 - RNA, 19 nt, Homo sapiens
  misc_RNA (1)...(19): siRNA sense strand
gauugucuccugcauuaua

SEQ ID NO: 89222 - RNA, 19 nt, Homo sapiens
  misc_RNA (1)...(19): siRNA sense strand
gguaaccaacuacuucaua

SEQ ID NO: 89223 - RNA, 19 nt, Homo sapiens
  misc_RNA (1)...(19): siRNA sense strand
caauuagcauccucaaugu

SEQ ID NO: 89224 - RNA, 19 nt, Homo sapiens
  misc_RNA (1)...(19): siRNA sense strand
uaacagcauugucaucauc

SEQ ID NO: 89225 - RNA, 19 nt, Homo sapiens
  misc_RNA (1)...(19): siRNA sense strand
ggaacguccugguuugugu

SEQ ID NO: 89226 - RNA, 19 nt, Homo sapiens
  misc_RNA (1)...(19): siRNA sense strand
ugaaauuuaucccaagaug

SEQ ID NO: 89227 - RNA, 19 nt, Homo sapiens
  misc_RNA (1)...(19): siRNA sense strand
guaaccaacuacuucauag

SEQ ID NO: 89228 - RNA, 19 nt, Homo sapiens
  misc_RNA (1)...(19): siRNA sense strand
ccacaucuguuucuuucug

SEQ ID NO: 89229 - RNA, 19 nt, Homo sapiens
  misc_RNA (1)...(19): siRNA sense strand
acagaucccuggaacauca

SEQ ID NO: 89230 - RNA, 19 nt, Homo sapiens
  misc_RNA (1)...(19): siRNA sense strand
ggugaaauuuaucccaaga

SEQ ID NO: 89231 - RNA, 19 nt, Homo sapiens
  misc_RNA (1)...(19): siRNA sense strand
cugcgaauccaauuauuua

SEQ ID NO: 89232 - RNA, 19 nt, Homo sapiens
  misc_RNA (1)...(19): siRNA sense strand
ugaggacgguaaccaacua

SEQ ID NO: 89233 - RNA, 19 nt, Homo sapiens
  misc_RNA (1)...(19): siRNA sense strand
gauccgagccagaaggaaa

SEQ ID NO: 89234 - RNA, 19 nt, Homo sapiens
  misc_RNA (1)...(19): siRNA sense strand
uaccacaucuguuucuuuc

SEQ ID NO: 89235 - RNA, 19 nt, Homo sapiens
  misc_RNA (1)...(19): siRNA sense strand
ggagcaggaccacuucaaa

SEQ ID NO: 89236 - RNA, 19 nt, Homo sapiens
  misc_RNA (1)...(19): siRNA sense strand
gaaauuuaucccaagaugu

SEQ ID NO: 89237 - RNA, 19 nt, Homo sapiens
  misc_RNA (1)...(19): siRNA sense strand
ggaagaaccaccacaugag

SEQ ID NO: 89238 - RNA, 19 nt, Homo sapiens
  misc_RNA (1)...(19): siRNA sense strand
ccacucaaaucagcaacuu

SEQ ID NO: 89239 - RNA, 19 nt, Homo sapiens
  misc_RNA (1)...(19): siRNA sense strand
ggaauuuaaagcugcguuu

SEQ ID NO: 89240 - RNA, 19 nt, Homo sapiens
  misc_RNA (1)...(19): siRNA sense strand
ugucacccuuugauguuua

SEQ ID NO: 89241 - RNA, 19 nt, Homo sapiens
  misc_RNA (1)...(19): siRNA sense strand
ucaaugugcuaaagagagu

SEQ ID NO: 89242 - RNA, 19 nt, Homo sapiens
  misc_RNA (1)...(19): siRNA sense strand
ggagcugaaugaaacucaa

SEQ ID NO: 89243 - RNA, 19 nt, Homo sapiens
  misc_RNA (1)...(19): siRNA sense strand
gcugcgaauccaauuauuu

SEQ ID NO: 89244 - RNA, 19 nt, Homo sapiens
  misc_RNA (1)...(19): siRNA sense strand
ggacgaacuagcacagaga

SEQ ID NO: 89245 - RNA, 19 nt, Homo sapiens
  misc_RNA (1)...(19): siRNA sense strand
guaccacaucuguuucuuu

SEQ ID NO: 89246 - RNA, 19 nt, Homo sapiens
  misc_RNA (1)...(19): siRNA sense strand
gcacagagagccggaaguc

SEQ ID NO: 89247 - RNA, 19 nt, Homo sapiens
  misc_RNA (1)...(19): siRNA sense strand
cuucggagcugaaugaaac

SEQ ID NO: 89248 - RNA, 19 nt, Homo sapiens
  misc_RNA (1)...(19): siRNA sense strand
gcuuguauaugccaauagu

SEQ ID NO: 89249 - RNA, 19 nt, Homo sapiens
  misc_RNA (1)...(19): siRNA sense strand
gacuguguaugccugguuu

SEQ ID NO: 89250 - RNA, 19 nt, Homo sapiens
  misc_RNA (1)...(19): siRNA sense strand
uggaagaaccaccacauga

SEQ ID NO: 89251 - RNA, 19 nt, Homo sapiens
  misc_RNA (1)...(19): siRNA sense strand
gauguuugcccauacugaa

SEQ ID NO: 89252 - RNA, 19 nt, Homo sapiens
  misc_RNA (1)...(19): siRNA sense strand
uuugcaaagugauuccuua

SEQ ID NO: 89253 - RNA, 19 nt, Homo sapiens
  misc_RNA (1)...(19): siRNA sense strand
ggacgguaaccaacuacuu

SEQ ID NO: 89254 - RNA, 19 nt, Homo sapiens
  misc_RNA (1)...(19): siRNA sense strand
guaacagcauugucaucau

SEQ ID NO: 89255 - RNA, 19 nt, Homo sapiens
  misc_RNA (1)...(19): siRNA sense strand
caauggagcaggaccacuu

SEQ ID NO: 89256 - RNA, 19 nt, Homo sapiens
  misc_RNA (1)...(19): siRNA sense strand
cgacagaucccuggaacau

SEQ ID NO: 89257 - RNA, 19 nt, Homo sapiens
  misc_RNA (1)...(19): siRNA sense strand
gcgcugggguggugaaauu

SEQ ID NO: 89258 - RNA, 19 nt, Homo sapiens
  misc_RNA (1)...(19): siRNA sense strand
ccuggaacaucaucuguag

SEQ ID NO: 89259 - RNA, 19 nt, Homo sapiens
  misc_RNA (1)...(19): siRNA sense strand
guuucuuucuggugacaua

SEQ ID NO: 89260 - RNA, 19 nt, Homo sapiens
  misc_RNA (1)...(19): siRNA sense strand
cacacuggcuuguauaugc

SEQ ID NO: 89261 - RNA, 19 nt, Homo sapiens
  misc_RNA (1)...(19): siRNA sense strand
gacgguaaccaacuacuuc

SEQ ID NO: 89262 - RNA, 19 nt, Homo sapiens
  misc_RNA (1)...(19): siRNA sense strand
caauaaaaccacccucuuu

SEQ ID NO: 89263 - RNA, 19 nt, Homo sapiens
  misc_RNA (1)...(19): siRNA sense strand
gcauugucaucaucuggau

SEQ ID NO: 89264 - RNA, 19 nt, Homo sapiens
  misc_RNA (1)...(19): siRNA sense strand
uggaacaucaucuguaguu

SEQ ID NO: 89265 - RNA, 19 nt, Homo sapiens
  misc_RNA (1)...(19): siRNA sense strand
cugcaaauauuucgcaaac

SEQ ID NO: 89266 - RNA, 19 nt, Homo sapiens
  misc_RNA (1)...(19): siRNA sense strand
gucaucaucuggauugucu

SEQ ID NO: 89267 - RNA, 19 nt, Homo sapiens
  misc_RNA (1)...(19): siRNA sense strand
ggaauaccugcacccgaaa

SEQ ID NO: 89268 - RNA, 19 nt, Homo sapiens
  misc_RNA (1)...(19): siRNA sense strand
gcccguaacagcauuguca

SEQ ID NO: 89269 - RNA, 19 nt, Homo sapiens
  misc_RNA (1)...(19): siRNA sense strand
cgacuaugacgacgaggaa

SEQ ID NO: 89270 - RNA, 19 nt, Homo sapiens
  misc_RNA (1)...(19): siRNA sense strand
cggcugaaauaaagcagau

SEQ ID NO: 89271 - RNA, 19 nt, Homo sapiens
  misc_RNA (1)...(19): siRNA sense strand
gcuguugccuuggaguuca

SEQ ID NO: 89272 - RNA, 19 nt, Homo sapiens
  misc_RNA (1)...(19): siRNA sense strand
gugauuccuuaucuacaga

SEQ ID NO: 89273 - RNA, 19 nt, Homo sapiens
  misc_RNA (1)...(19): siRNA sense strand
ucagcaacuuugauaacau

SEQ ID NO: 89274 - RNA, 19 nt, Homo sapiens
  misc_RNA (1)...(19): siRNA sense strand
ccggguacaucaucguguu

SEQ ID NO: 89275 - RNA, 19 nt, Homo sapiens
  misc_RNA (1)...(19): siRNA sense strand
ggauguuugcccauacuga

SEQ ID NO: 89276 - RNA, 19 nt, Homo sapiens
  misc_RNA (1)...(19): siRNA sense strand
ugcaaucugucacccuuug

SEQ ID NO: 89277 - RNA, 19 nt, Homo sapiens
  misc_RNA (1)...(19): siRNA sense strand
uguggcggcugaaauaaag

SEQ ID NO: 89278 - RNA, 19 nt, Homo sapiens
  misc_RNA (1)...(19): siRNA sense strand
auacauggcaccacugugu

SEQ ID NO: 89279 - RNA, 19 nt, Homo sapiens
  misc_RNA (1)...(19): siRNA sense strand
gaucggugguaugcaaucu

SEQ ID NO: 89280 - RNA, 19 nt, Homo sapiens
  misc_RNA (1)...(19): siRNA sense strand
gagcaggaccacuucaaaa

SEQ ID NO: 89281 - RNA, 19 nt, Homo sapiens
  misc_RNA (1)...(19): siRNA sense strand
gugcugcgaauccaauuau

SEQ ID NO: 89282 - RNA, 19 nt, Homo sapiens
  misc_RNA (1)...(19): siRNA sense strand
gcaaucugucacccuuuga

SEQ ID NO: 89283 - RNA, 19 nt, Homo sapiens
  misc_RNA (1)...(19): siRNA sense strand
aagcagauccgagccagaa

SEQ ID NO: 89284 - RNA, 19 nt, Homo sapiens
  misc_RNA (1)...(19): siRNA sense strand
guuggcuuaucugcaaaua

SEQ ID NO: 89285 - RNA, 19 nt, Homo sapiens
  misc_RNA (1)...(19): siRNA sense strand
cguaacagcauugucauca

SEQ ID NO: 89286 - RNA, 19 nt, Homo sapiens
  misc_RNA (1)...(19): siRNA sense strand
caauagugcugcgaaucca

SEQ ID NO: 89287 - RNA, 19 nt, Homo sapiens
  misc_RNA (1)...(19): siRNA sense strand
ggccaggacagccaacgaa

SEQ ID NO: 89288 - RNA, 19 nt, Homo sapiens
  misc_RNA (1)...(19): siRNA sense strand
ggugguaugcaaucuguca

SEQ ID NO: 89289 - RNA, 19 nt, Homo sapiens
  misc_RNA (1)...(19): siRNA sense strand
ugucgcaacuggucaucug

SEQ ID NO: 89290 - RNA, 19 nt, Homo sapiens
  misc_RNA (1)...(19): siRNA sense strand
aaagugauuccuuaucuac

SEQ ID NO: 89291 - RNA, 19 nt, Homo sapiens
  misc_RNA (1)...(19): siRNA sense strand
caggacagccaacgaaguc

SEQ ID NO: 89292 - RNA, 19 nt, Homo sapiens
  misc_RNA (1)...(19): siRNA sense strand
auugucuccugcauuauaa

SEQ ID NO: 89293 - RNA, 19 nt, Homo sapiens
  misc_RNA (1)...(19): siRNA sense strand
gaccaucaccugccuucca

SEQ ID NO: 89294 - RNA, 19 nt, Homo sapiens
  misc_RNA (1)...(19): siRNA sense strand
uuggaucggugguaugcaa

SEQ ID NO: 89295 - RNA, 19 nt, Homo sapiens
  misc_RNA (1)...(19): siRNA sense strand
ugagcuguaucgccuugga

SEQ ID NO: 89296 - RNA, 19 nt, Homo sapiens
  misc_RNA (1)...(19): siRNA sense strand
aagagaguauuugggaugu

SEQ ID NO: 89297 - RNA, 19 nt, Homo sapiens
  misc_RNA (1)...(19): siRNA sense strand
gugcuaaagagaguauuug

SEQ ID NO: 89298 - RNA, 19 nt, Homo sapiens
  misc_RNA (1)...(19): siRNA sense strand
gcuuaucugcaaauauuuc

SEQ ID NO: 89299 - RNA, 19 nt, Homo sapiens
  misc_RNA (1)...(19): siRNA sense strand
cacugugucucaugguguu

SEQ ID NO: 89300 - RNA, 19 nt, Homo sapiens
  misc_RNA (1)...(19): siRNA sense strand
gucacccuuugauguuuaa

SEQ ID NO: 89301 - RNA, 19 nt, Homo sapiens
  misc_RNA (1)...(19): siRNA sense strand
caaauauuucgcaaacucu

SEQ ID NO: 89302 - RNA, 19 nt, Homo sapiens
  misc_RNA (1)...(19): siRNA sense strand
cauccucaaugugcuaaag

SEQ ID NO: 89303 - RNA, 19 nt, Homo sapiens
  misc_RNA (1)...(19): siRNA sense strand
caccacaugaggacgguaa

SEQ ID NO: 89304 - RNA, 19 nt, Homo sapiens
  misc_RNA (1)...(19): siRNA sense strand
gcuguggcggcugaaauaa

SEQ ID NO: 89305 - RNA, 19 nt, Homo sapiens
  misc_RNA (1)...(19): siRNA sense strand
ucggugguaugcaaucugu

SEQ ID NO: 89306 - RNA, 19 nt, Homo sapiens
  misc_RNA (1)...(19): siRNA sense strand
cgcuguggcggcugaaaua

SEQ ID NO: 89307 - RNA, 19 nt, Homo sapiens
  misc_RNA (1)...(19): siRNA sense strand
caccguguucccaggcuua

SEQ ID NO: 89308 - RNA, 19 nt, Homo sapiens
  misc_RNA (1)...(19): siRNA sense strand
ccaaugaguugccauauaa

SEQ ID NO: 89309 - RNA, 19 nt, Homo sapiens
  misc_RNA (1)...(19): siRNA sense strand
gaagaaauguggcugauca

SEQ ID NO: 89310 - RNA, 19 nt, Homo sapiens
  misc_RNA (1)...(19): siRNA sense strand
gcggauagcuugugaugaa

SEQ ID NO: 89311 - RNA, 19 nt, Homo sapiens
  misc_RNA (1)...(19): siRNA sense strand
gcuguuaaauuauggcuua

SEQ ID NO: 89312 - RNA, 19 nt, Homo sapiens
  misc_RNA (1)...(19): siRNA sense strand
gcaaagaaagcuagaauug

SEQ ID NO: 89313 - RNA, 19 nt, Homo sapiens
  misc_RNA (1)...(19): siRNA sense strand
cagagagucuuauauauug

SEQ ID NO: 89314 - RNA, 19 nt, Homo sapiens
  misc_RNA (1)...(19): siRNA sense strand
ccagaacacuccagaauau

SEQ ID NO: 89315 - RNA, 19 nt, Homo sapiens
  misc_RNA (1)...(19): siRNA sense strand
gaaauguggcugaucauaa

SEQ ID NO: 89316 - RNA, 19 nt, Homo sapiens
  misc_RNA (1)...(19): siRNA sense strand
gaugaagaauucucagauu

SEQ ID NO: 89317 - RNA, 19 nt, Homo sapiens
  misc_RNA (1)...(19): siRNA sense strand
aaacagacguuaaggaaga

SEQ ID NO: 89318 - RNA, 19 nt, Homo sapiens
  misc_RNA (1)...(19): siRNA sense strand
gauaacaugucugaguaua

SEQ ID NO: 89319 - RNA, 19 nt, Homo sapiens
  misc_RNA (1)...(19): siRNA sense strand
caaaggugauggagaugua

SEQ ID NO: 89320 - RNA, 19 nt, Homo sapiens
  misc_RNA (1)...(19): siRNA sense strand
caucagagagucuuauaua

SEQ ID NO: 89321 - RNA, 19 nt, Homo sapiens
  misc_RNA (1)...(19): siRNA sense strand
gaaagaaacagaggacaaa

SEQ ID NO: 89322 - RNA, 19 nt, Homo sapiens
  misc_RNA (1)...(19): siRNA sense strand
caaauacuaugcugucaau

SEQ ID NO: 89323 - RNA, 19 nt, Homo sapiens
  misc_RNA (1)...(19): siRNA sense strand
gaugcaagcuauuccagaa

SEQ ID NO: 89324 - RNA, 19 nt, Homo sapiens
  misc_RNA (1)...(19): siRNA sense strand
agacugauauggcuguuaa

SEQ ID NO: 89325 - RNA, 19 nt, Homo sapiens
  misc_RNA (1)...(19): siRNA sense strand
uaaagccacugccgaagaa

SEQ ID NO: 89326 - RNA, 19 nt, Homo sapiens
  misc_RNA (1)...(19): siRNA sense strand
ucaggauucuguuacguua

SEQ ID NO: 89327 - RNA, 19 nt, Homo sapiens
  misc_RNA (1)...(19): siRNA sense strand
uaagaaaggagcaaagaaa

SEQ ID NO: 89328 - RNA, 19 nt, Homo sapiens
  misc_RNA (1)...(19): siRNA sense strand
caaaggaaccaaaucagaa

SEQ ID NO: 89329 - RNA, 19 nt, Homo sapiens
  misc_RNA (1)...(19): siRNA sense strand
caaaggucaugcuaaaugu

SEQ ID NO: 89330 - RNA, 19 nt, Homo sapiens
  misc_RNA (1)...(19): siRNA sense strand
agaaggaggucgaagaaau

SEQ ID NO: 89331 - RNA, 19 nt, Homo sapiens
  misc_RNA (1)...(19): siRNA sense strand
uaacaugucugaguauagu

SEQ ID NO: 89332 - RNA, 19 nt, Homo sapiens
  misc_RNA (1)...(19): siRNA sense strand
uaacuuaccauuacugaug

SEQ ID NO: 89333 - RNA, 19 nt, Homo sapiens
  misc_RNA (1)...(19): siRNA sense strand
ccgaagaaaugacaaaaua

SEQ ID NO: 89334 - RNA, 19 nt, Homo sapiens
  misc_RNA (1)...(19): siRNA sense strand
gaaggaggucgaagaaaug

SEQ ID NO: 89335 - RNA, 19 nt, Homo sapiens
  misc_RNA (1)...(19): siRNA sense strand
agucaaaggucaugcuaaa

SEQ ID NO: 89336 - RNA, 19 nt, Homo sapiens
  misc_RNA (1)...(19): siRNA sense strand
acaggagacuugagggaua

SEQ ID NO: 89337 - RNA, 19 nt, Homo sapiens
  misc_RNA (1)...(19): siRNA sense strand
caaagaaagcuagaauuga

SEQ ID NO: 89338 - RNA, 19 nt, Homo sapiens
  misc_RNA (1)...(19): siRNA sense strand
ggagaaggaggucgaagaa

SEQ ID NO: 89339 - RNA, 19 nt, Homo sapiens
  misc_RNA (1)...(19): siRNA sense strand
agaagaugcuguucaugaa

SEQ ID NO: 89340 - RNA, 19 nt, Homo sapiens
  misc_RNA (1)...(19): siRNA sense strand
ggagauguaucaaccuagu

SEQ ID NO: 89341 - RNA, 19 nt, Homo sapiens
  misc_RNA (1)...(19): siRNA sense strand
uaagaaauacgaagcauca

SEQ ID NO: 89342 - RNA, 19 nt, Homo sapiens
  misc_RNA (1)...(19): siRNA sense strand
cagaagaugcuguucauga

SEQ ID NO: 89343 - RNA, 19 nt, Homo sapiens
  misc_RNA (1)...(19): siRNA sense strand
gcagauauuuaagccuauu

SEQ ID NO: 89344 - RNA, 19 nt, Homo sapiens
  misc_RNA (1)...(19): siRNA sense strand
ugauauggcuguuaauugg

SEQ ID NO: 89345 - RNA, 19 nt, Homo sapiens
  misc_RNA (1)...(19): siRNA sense strand
gaauccgcaugacccauaa

SEQ ID NO: 89346 - RNA, 19 nt, Homo sapiens
  misc_RNA (1)...(19): siRNA sense strand
cccaaugaguugccauaua

SEQ ID NO: 89347 - RNA, 19 nt, Homo sapiens
  misc_RNA (1)...(19): siRNA sense strand
gugauagacuggguuguuu

SEQ ID NO: 89348 - RNA, 19 nt, Homo sapiens
  misc_RNA (1)...(19): siRNA sense strand
gcuggaggauuacaucaug

SEQ ID NO: 89349 - RNA, 19 nt, Homo sapiens
  misc_RNA (1)...(19): siRNA sense strand
gacuucaaacugcauauua

SEQ ID NO: 89350 - RNA, 19 nt, Homo sapiens
  misc_RNA (1)...(19): siRNA sense strand
gaacacuccagaauauaug

SEQ ID NO: 89351 - RNA, 19 nt, Homo sapiens
  misc_RNA (1)...(19): siRNA sense strand
ucaaaggucaugcuaaaug

SEQ ID NO: 89352 - RNA, 19 nt, Homo sapiens
  misc_RNA (1)...(19): siRNA sense strand
gagcaaagaaagcuagaau

SEQ ID NO: 89353 - RNA, 19 nt, Homo sapiens
  misc_RNA (1)...(19): siRNA sense strand
gauagcuugugaugaagaa

SEQ ID NO: 89354 - RNA, 19 nt, Homo sapiens
  misc_RNA (1)...(19): siRNA sense strand
ugaagacaguggagaugaa

SEQ ID NO: 89355 - RNA, 19 nt, Homo sapiens
  misc_RNA (1)...(19): siRNA sense strand
acggugauauuggaaauua

SEQ ID NO: 89356 - RNA, 19 nt, Homo sapiens
  misc_RNA (1)...(19): siRNA sense strand
cgguaucauuccauaaaua

SEQ ID NO: 89357 - RNA, 19 nt, Homo sapiens
  misc_RNA (1)...(19): siRNA sense strand
gagaagauccagacaagag

SEQ ID NO: 89358 - RNA, 19 nt, Homo sapiens
  misc_RNA (1)...(19): siRNA sense strand
gcucucaacuggcgguuca

SEQ ID NO: 89359 - RNA, 19 nt, Homo sapiens
  misc_RNA (1)...(19): siRNA sense strand
gauuacaucaugcuaagaa

SEQ ID NO: 89360 - RNA, 19 nt, Homo sapiens
  misc_RNA (1)...(19): siRNA sense strand
uaaaguaucaucagagagu

SEQ ID NO: 89361 - RNA, 19 nt, Homo sapiens
  misc_RNA (1)...(19): siRNA sense strand
ccaaaggaaccaaaucaga

SEQ ID NO: 89362 - RNA, 19 nt, Homo sapiens
  misc_RNA (1)...(19): siRNA sense strand
gauccagacaagagaauuu

SEQ ID NO: 89363 - RNA, 19 nt, Homo sapiens
  misc_RNA (1)...(19): siRNA sense strand
gaaguuaaaccgacaacag

SEQ ID NO: 89364 - RNA, 19 nt, Homo sapiens
  misc_RNA (1)...(19): siRNA sense strand
aaauguggcugaucauaag

SEQ ID NO: 89365 - RNA, 19 nt, Homo sapiens
  misc_RNA (1)...(19): siRNA sense strand
gaguugccauauaaugauu

SEQ ID NO: 89366 - RNA, 19 nt, Homo sapiens
  misc_RNA (1)...(19): siRNA sense strand
ggagguggcuacacaaucc

SEQ ID NO: 89367 - RNA, 19 nt, Homo sapiens
  misc_RNA (1)...(19): siRNA sense strand
cuacgacggugauauugga

SEQ ID NO: 89368 - RNA, 19 nt, Homo sapiens
  misc_RNA (1)...(19): siRNA sense strand
gacgguaucauuccauaaa

SEQ ID NO: 89369 - RNA, 19 nt, Homo sapiens
  misc_RNA (1)...(19): siRNA sense strand
ugagucauaugggcagaua

SEQ ID NO: 89370 - RNA, 19 nt, Homo sapiens
  misc_RNA (1)...(19): siRNA sense strand
caguugcccuugauuguga

SEQ ID NO: 89371 - RNA, 19 nt, Homo sapiens
  misc_RNA (1)...(19): siRNA sense strand
gaggauuacaucaugcuaa

SEQ ID NO: 89372 - RNA, 19 nt, Homo sapiens
  misc_RNA (1)...(19): siRNA sense strand
gaagauccagacaagagaa

SEQ ID NO: 89373 - RNA, 19 nt, Homo sapiens
  misc_RNA (1)...(19): siRNA sense strand
agaugaagauggagaagau

SEQ ID NO: 89374 - RNA, 19 nt, Homo sapiens
  misc_RNA (1)...(19): siRNA sense strand
caacagaucguguaaugac

SEQ ID NO: 89375 - RNA, 19 nt, Homo sapiens
  misc_RNA (1)...(19): siRNA sense strand
ugguauagaugaugaguca

SEQ ID NO: 89376 - RNA, 19 nt, Homo sapiens
  misc_RNA (1)...(19): siRNA sense strand
gcaaauacuaugcugucaa

SEQ ID NO: 89377 - RNA, 19 nt, Homo sapiens
  misc_RNA (1)...(19): siRNA sense strand
ugcuggagcugugaaguua

SEQ ID NO: 89378 - RNA, 19 nt, Homo sapiens
  misc_RNA (1)...(19): siRNA sense strand
aagcuagaauugaagaaga

SEQ ID NO: 89379 - RNA, 19 nt, Homo sapiens
  misc_RNA (1)...(19): siRNA sense strand
cuacuacgacggugauauu

SEQ ID NO: 89380 - RNA, 19 nt, Homo sapiens
  misc_RNA (1)...(19): siRNA sense strand
aauaagaccagauaacaug

SEQ ID NO: 89381 - RNA, 19 nt, Homo sapiens
  misc_RNA (1)...(19): siRNA sense strand
acuaaaguaucaucagaga

SEQ ID NO: 89382 - RNA, 19 nt, Homo sapiens
  misc_RNA (1)...(19): siRNA sense strand
ucaauaagaccagauaaca

SEQ ID NO: 89383 - RNA, 19 nt, Homo sapiens
  misc_RNA (1)...(19): siRNA sense strand
ccgcaugacccauaacuug

SEQ ID NO: 89384 - RNA, 19 nt, Homo sapiens
  misc_RNA (1)...(19): siRNA sense strand
cuaaauguguagaaguugu

SEQ ID NO: 89385 - RNA, 19 nt, Homo sapiens
  misc_RNA (1)...(19): siRNA sense strand
cgacggugauauuggaaau

SEQ ID NO: 89386 - RNA, 19 nt, Homo sapiens
  misc_RNA (1)...(19): siRNA sense strand
agacugcaguugcccuuga

SEQ ID NO: 89387 - RNA, 19 nt, Homo sapiens
  misc_RNA (1)...(19): siRNA sense strand
gaaaggagcaaagaaagcu

SEQ ID NO: 89388 - RNA, 19 nt, Homo sapiens
  misc_RNA (1)...(19): siRNA sense strand
caguggagaugaagaugga

SEQ ID NO: 89389 - RNA, 19 nt, Homo sapiens
  misc_RNA (1)...(19): siRNA sense strand
uauaguaagcagaugcaua

SEQ ID NO: 89390 - RNA, 19 nt, Homo sapiens
  misc_RNA (1)...(19): siRNA sense strand
aagaugcuguucaugaaga

SEQ ID NO: 89391 - RNA, 19 nt, Homo sapiens
  misc_RNA (1)...(19): siRNA sense strand
uagacuggguuguuucaau

SEQ ID NO: 89392 - RNA, 19 nt, Homo sapiens
  misc_RNA (1)...(19): siRNA sense strand
agacuggguuguuucaauc

SEQ ID NO: 89393 - RNA, 19 nt, Homo sapiens
  misc_RNA (1)...(19): siRNA sense strand
gcaagcuauuccagaagau

SEQ ID NO: 89394 - RNA, 19 nt, Homo sapiens
  misc_RNA (1)...(19): siRNA sense strand
ggauauuggugcuggaaaa

SEQ ID NO: 89395 - RNA, 19 nt, Homo sapiens
  misc_RNA (1)...(19): siRNA sense strand
ggugauagacuggguuguu

SEQ ID NO: 89396 - RNA, 19 nt, Homo sapiens
  misc_RNA (1)...(19): siRNA sense strand
auacgaagcaucaggauuc

SEQ ID NO: 89397 - RNA, 19 nt, Homo sapiens
  misc_RNA (1)...(19): siRNA sense strand
ucaaauuucuacggucaau

SEQ ID NO: 89398 - RNA, 19 nt, Homo sapiens
  misc_RNA (1)...(19): siRNA sense strand
gcuaagaaauacgaagcau

SEQ ID NO: 89399 - RNA, 19 nt, Homo sapiens
  misc_RNA (1)...(19): siRNA sense strand
cauaagaaaggagcaaaga

SEQ ID NO: 89400 - RNA, 19 nt, Homo sapiens
  misc_RNA (1)...(19): siRNA sense strand
cuggagcugugaaguuaaa

SEQ ID NO: 89401 - RNA, 19 nt, Homo sapiens
  misc_RNA (1)...(19): siRNA sense strand
gaagaugcuguucaugaag

SEQ ID NO: 89402 - RNA, 19 nt, Homo sapiens
  misc_RNA (1)...(19): siRNA sense strand
uggaggagguggcuacaca

SEQ ID NO: 89403 - RNA, 19 nt, Homo sapiens
  misc_RNA (1)...(19): siRNA sense strand
ugcuaaauguguagaaguu

SEQ ID NO: 89404 - RNA, 19 nt, Homo sapiens
  misc_RNA (1)...(19): siRNA sense strand
caggagacuugagggauau

SEQ ID NO: 89405 - RNA, 19 nt, Homo sapiens
  misc_RNA (1)...(19): siRNA sense strand
ugccauccuugaauuacua

SEQ ID NO: 89406 - RNA, 19 nt, Homo sapiens
  misc_RNA (1)...(19): siRNA sense strand
agaauccgcaugacccaua

SEQ ID NO: 89407 - RNA, 19 nt, Homo sapiens
  misc_RNA (1)...(19): siRNA sense strand
cgaagcaucaggauucugu

SEQ ID NO: 89408 - RNA, 19 nt, Homo sapiens
  misc_RNA (1)...(19): siRNA sense strand
ggacacaagugccagauug

SEQ ID NO: 89409 - RNA, 19 nt, Homo sapiens
  misc_RNA (1)...(19): siRNA sense strand
gcaguucccucgagcagua

SEQ ID NO: 89410 - RNA, 19 nt, Homo sapiens
  misc_RNA (1)...(19): siRNA sense strand
gagaaaugcuuugaugaga

SEQ ID NO: 89411 - RNA, 19 nt, Homo sapiens
  misc_RNA (1)...(19): siRNA sense strand
acagagaaaugcuuugaug

SEQ ID NO: 89412 - RNA, 19 nt, Homo sapiens
  misc_RNA (1)...(19): siRNA sense strand
gcacagagaaaugcuuuga

SEQ ID NO: 89413 - RNA, 19 nt, Homo sapiens
  misc_RNA (1)...(19): siRNA sense strand
gcgaaucccucaccagagu

SEQ ID NO: 89414 - RNA, 19 nt, Homo sapiens
  misc_RNA (1)...(19): siRNA sense strand
gagcagcccuugccugaac

SEQ ID NO: 89415 - RNA, 19 nt, Homo sapiens
  misc_RNA (1)...(19): siRNA sense strand
ggacugcggcacagagaaa

SEQ ID NO: 89416 - RNA, 19 nt, Homo sapiens
  misc_RNA (1)...(19): siRNA sense strand
gaacuccgaucugcucuac

SEQ ID NO: 89417 - RNA, 19 nt, Homo sapiens
  misc_RNA (1)...(19): siRNA sense strand
ccaacuauguggacuggau

SEQ ID NO: 89418 - RNA, 19 nt, Homo sapiens
  misc_RNA (1)...(19): siRNA sense strand
ugaccucugugaccucuga

SEQ ID NO: 89419 - RNA, 19 nt, Homo sapiens
  misc_RNA (1)...(19): siRNA sense strand
ccacaacucacaacuacga

SEQ ID NO: 89420 - RNA, 19 nt, Homo sapiens
  misc_RNA (1)...(19): siRNA sense strand
agaagaacggcguggcuua

SEQ ID NO: 89421 - RNA, 19 nt, Homo sapiens
  misc_RNA (1)...(19): siRNA sense strand
gaaggcacccgacauacag

SEQ ID NO: 89422 - RNA, 19 nt, Homo sapiens
  misc_RNA (1)...(19): siRNA sense strand
ggugcuacguggugaagga

SEQ ID NO: 89423 - RNA, 19 nt, Homo sapiens
  misc_RNA (1)...(19): siRNA sense strand
gcaggaggcacaagaagag

SEQ ID NO: 89424 - RNA, 19 nt, Homo sapiens
  misc_RNA (1)...(19): siRNA sense strand
cggcguggcuuaccucuac

SEQ ID NO: 89425 - RNA, 19 nt, Homo sapiens
  misc_RNA (1)...(19): siRNA sense strand
ugauccggcugaagaagaa

SEQ ID NO: 89426 - RNA, 19 nt, Homo sapiens
  misc_RNA (1)...(19): siRNA sense strand
cagagaaaugcuuugauga

SEQ ID NO: 89427 - RNA, 19 nt, Homo sapiens
  misc_RNA (1)...(19): siRNA sense strand
ucagcugccuggccuggaa

SEQ ID NO: 89428 - RNA, 19 nt, Homo sapiens
  misc_RNA (1)...(19): siRNA sense strand
cgaaggcacccgacauaca

SEQ ID NO: 89429 - RNA, 19 nt, Homo sapiens
  misc_RNA (1)...(19): siRNA sense strand
gcucugugccggcuacuuc

SEQ ID NO: 89430 - RNA, 19 nt, Homo sapiens
  misc_RNA (1)...(19): siRNA sense strand
gcagcagcccugaggucua

SEQ ID NO: 89431 - RNA, 19 nt, Homo sapiens
  misc_RNA (1)...(19): siRNA sense strand
cagcagcccugaggucuac

SEQ ID NO: 89432 - RNA, 19 nt, Homo sapiens
  misc_RNA (1)...(19): siRNA sense strand
gaagaacggcguggcuuac

SEQ ID NO: 89433 - RNA, 19 nt, Homo sapiens
  misc_RNA (1)...(19): siRNA sense strand
caccagaguccaacuguca

SEQ ID NO: 89434 - RNA, 19 nt, Homo sapiens
  misc_RNA (1)...(19): siRNA sense strand
ugccacaacucacaacuac

SEQ ID NO: 89435 - RNA, 19 nt, Homo sapiens
  misc_RNA (1)...(19): siRNA sense strand
guccugauccggcugaaga

SEQ ID NO: 89436 - RNA, 19 nt, Homo sapiens
  misc_RNA (1)...(19): siRNA sense strand
ggcaggaggcacaagaaga

SEQ ID NO: 89437 - RNA, 19 nt, Homo sapiens
  misc_RNA (1)...(19): siRNA sense strand
ggaacuccgaucugcucua

SEQ ID NO: 89438 - RNA, 19 nt, Homo sapiens
  misc_RNA (1)...(19): siRNA sense strand
gcagugcacacaggaagug

SEQ ID NO: 89439 - RNA, 19 nt, Homo sapiens
  misc_RNA (1)...(19): siRNA sense strand
cggcacagagaaaugcuuu

SEQ ID NO: 89440 - RNA, 19 nt, Homo sapiens
  misc_RNA (1)...(19): siRNA sense strand
ugcgaaggcacccgacaua

SEQ ID NO: 89441 - RNA, 19 nt, Homo sapiens
  misc_RNA (1)...(19): siRNA sense strand
acacccgcguggccaacua

SEQ ID NO: 89442 - RNA, 19 nt, Homo sapiens
  misc_RNA (1)...(19): siRNA sense strand
gcaaggacugcggcacaga

SEQ ID NO: 89443 - RNA, 19 nt, Homo sapiens
  misc_RNA (1)...(19): siRNA sense strand
gugccacaacucacaacua

SEQ ID NO: 89444 - RNA, 19 nt, Homo sapiens
  misc_RNA (1)...(19): siRNA sense strand
agagaaaugcuuugaugag

SEQ ID NO: 89445 - RNA, 19 nt, Homo sapiens
  misc_RNA (1)...(19): siRNA sense strand
gcagagggaccccaaagug

SEQ ID NO: 89446 - RNA, 19 nt, Homo sapiens
  misc_RNA (1)...(19): siRNA sense strand
gaaggaaccugaugcuuua

SEQ ID NO: 89447 - RNA, 19 nt, Homo sapiens
  misc_RNA (1)...(19): siRNA sense strand
ggacacagauuuagacuug

SEQ ID NO: 89448 - RNA, 19 nt, Homo sapiens
  misc_RNA (1)...(19): siRNA sense strand
gaaaugagagaaaugcuua

SEQ ID NO: 89449 - RNA, 19 nt, Homo sapiens
  misc_RNA (1)...(19): siRNA sense strand
gaacaaauacaugggauua

SEQ ID NO: 89450 - RNA, 19 nt, Homo sapiens
  misc_RNA (1)...(19): siRNA sense strand
ucaagcaacugucauauau

SEQ ID NO: 89451 - RNA, 19 nt, Homo sapiens
  misc_RNA (1)...(19): siRNA sense strand
gauguuagcucccuauauc

SEQ ID NO: 89452 - RNA, 19 nt, Homo sapiens
  misc_RNA (1)...(19): siRNA sense strand
gauaaggccucugugauga

SEQ ID NO: 89453 - RNA, 19 nt, Homo sapiens
  misc_RNA (1)...(19): siRNA sense strand
gagacacaaucauaucuuu

SEQ ID NO: 89454 - RNA, 19 nt, Homo sapiens
  misc_RNA (1)...(19): siRNA sense strand
gauacuagcuuugcagaau

SEQ ID NO: 89455 - RNA, 19 nt, Homo sapiens
  misc_RNA (1)...(19): siRNA sense strand
gaacauaaagucugcaaca

SEQ ID NO: 89456 - RNA, 19 nt, Homo sapiens
  misc_RNA (1)...(19): siRNA sense strand
ggauaugucuggguugaaa

SEQ ID NO: 89457 - RNA, 19 nt, Homo sapiens
  misc_RNA (1)...(19): siRNA sense strand
agaaugaaguguacccuaa

SEQ ID NO: 89458 - RNA, 19 nt, Homo sapiens
  misc_RNA (1)...(19): siRNA sense strand
gaggaaguaccauuauaua

SEQ ID NO: 89459 - RNA, 19 nt, Homo sapiens
  misc_RNA (1)...(19): siRNA sense strand
gaaaaugacucagcuauuc

SEQ ID NO: 89460 - RNA, 19 nt, Homo sapiens
  misc_RNA (1)...(19): siRNA sense strand
gauggaagcacuagacaaa

SEQ ID NO: 89461 - RNA, 19 nt, Homo sapiens
  misc_RNA (1)...(19): siRNA sense strand
caaacagaauguguccuua

SEQ ID NO: 89462 - RNA, 19 nt, Homo sapiens
  misc_RNA (1)...(19): siRNA sense strand
caaguagccucuuugacaa

SEQ ID NO: 89463 - RNA, 19 nt, Homo sapiens
  misc_RNA (1)...(19): siRNA sense strand
ugccaccacugaugaauua

SEQ ID NO: 89464 - RNA, 19 nt, Homo sapiens
  misc_RNA (1)...(19): siRNA sense strand
cgacacagccuggauauga

SEQ ID NO: 89465 - RNA, 19 nt, Homo sapiens
  misc_RNA (1)...(19): siRNA sense strand
uauaagaaaccaccuauga

SEQ ID NO: 89466 - RNA, 19 nt, Homo sapiens
  misc_RNA (1)...(19): siRNA sense strand
caccaaaguugaaucagaa

SEQ ID NO: 89467 - RNA, 19 nt, Homo sapiens
  misc_RNA (1)...(19): siRNA sense strand
caaccacagugcauuguau

SEQ ID NO: 89468 - RNA, 19 nt, Homo sapiens
  misc_RNA (1)...(19): siRNA sense strand
gaacuaaauccaaagauac

SEQ ID NO: 89469 - RNA, 19 nt, Homo sapiens
  misc_RNA (1)...(19): siRNA sense strand
ccacauacauaaagaaacu

SEQ ID NO: 89470 - RNA, 19 nt, Homo sapiens
  misc_RNA (1)...(19): siRNA sense strand
caaucaagaaguugcauua

SEQ ID NO: 89471 - RNA, 19 nt, Homo sapiens
  misc_RNA (1)...(19): siRNA sense strand
ugaaagcacagaugaauug

SEQ ID NO: 89472 - RNA, 19 nt, Homo sapiens
  misc_RNA (1)...(19): siRNA sense strand
gcucaucaguugccacuuc

SEQ ID NO: 89473 - RNA, 19 nt, Homo sapiens
  misc_RNA (1)...(19): siRNA sense strand
gaugaugacuuccaguuac

SEQ ID NO: 89474 - RNA, 19 nt, Homo sapiens
  misc_RNA (1)...(19): siRNA sense strand
ggaugaugacuuccaguua

SEQ ID NO: 89475 - RNA, 19 nt, Homo sapiens
  misc_RNA (1)...(19): siRNA sense strand
ugaaagccuuggaugguuu

SEQ ID NO: 89476 - RNA, 19 nt, Homo sapiens
  misc_RNA (1)...(19): siRNA sense strand
ugagagaaaugcuuacaca

SEQ ID NO: 89477 - RNA, 19 nt, Homo sapiens
  misc_RNA (1)...(19): siRNA sense strand
gaagaacuaaauccaaaga

SEQ ID NO: 89478 - RNA, 19 nt, Homo sapiens
  misc_RNA (1)...(19): siRNA sense strand
ucaaagcacaguuacagua

SEQ ID NO: 89479 - RNA, 19 nt, Homo sapiens
  misc_RNA (1)...(19): siRNA sense strand
auagugauauggucaauga

SEQ ID NO: 89480 - RNA, 19 nt, Homo sapiens
  misc_RNA (1)...(19): siRNA sense strand
gaaauuccuuuagauagca

SEQ ID NO: 89481 - RNA, 19 nt, Homo sapiens
  misc_RNA (1)...(19): siRNA sense strand
ugacucagcuauucaccaa

SEQ ID NO: 89482 - RNA, 19 nt, Homo sapiens
  misc_RNA (1)...(19): siRNA sense strand
ugaaguuaaugcuccuaua

SEQ ID NO: 89483 - RNA, 19 nt, Homo sapiens
  misc_RNA (1)...(19): siRNA sense strand
gaucaguugucaccauuag

SEQ ID NO: 89484 - RNA, 19 nt, Homo sapiens
  misc_RNA (1)...(19): siRNA sense strand
ucaccaaaguugaaucaga

SEQ ID NO: 89485 - RNA, 19 nt, Homo sapiens
  misc_RNA (1)...(19): siRNA sense strand
agaaggaaccugaugcuuu

SEQ ID NO: 89486 - RNA, 19 nt, Homo sapiens
  misc_RNA (1)...(19): siRNA sense strand
gcagaaugcucagagaaag

SEQ ID NO: 89487 - RNA, 19 nt, Homo sapiens
  misc_RNA (1)...(19): siRNA sense strand
gaaaaggagucauagaaca

SEQ ID NO: 89488 - RNA, 19 nt, Homo sapiens
  misc_RNA (1)...(19): siRNA sense strand
gcacugcacaggccacauu

SEQ ID NO: 89489 - RNA, 19 nt, Homo sapiens
  misc_RNA (1)...(19): siRNA sense strand
aggaagaacuaaauccaaa

SEQ ID NO: 89490 - RNA, 19 nt, Homo sapiens
  misc_RNA (1)...(19): siRNA sense strand
gugauauggucaaugaauu

SEQ ID NO: 89491 - RNA, 19 nt, Homo sapiens
  misc_RNA (1)...(19): siRNA sense strand
ugaguucgcaucuugauaa

SEQ ID NO: 89492 - RNA, 19 nt, Homo sapiens
  misc_RNA (1)...(19): siRNA sense strand
uacaagaaccuacugcuaa

SEQ ID NO: 89493 - RNA, 19 nt, Homo sapiens
  misc_RNA (1)...(19): siRNA sense strand
ucaaugaauucaaguugga

SEQ ID NO: 89494 - RNA, 19 nt, Homo sapiens
  misc_RNA (1)...(19): siRNA sense strand
gaucagacaccuaguccuu

SEQ ID NO: 89495 - RNA, 19 nt, Homo sapiens
  misc_RNA (1)...(19): siRNA sense strand
ccucacccaucaaauauug

SEQ ID NO: 89496 - RNA, 19 nt, Homo sapiens
  misc_RNA (1)...(19): siRNA sense strand
ccagcagacucaaauacaa

SEQ ID NO: 89497 - RNA, 19 nt, Homo sapiens
  misc_RNA (1)...(19): siRNA sense strand
gacacagccuggauaugaa

SEQ ID NO: 89498 - RNA, 19 nt, Homo sapiens
  misc_RNA (1)...(19): siRNA sense strand
gcuuggugcugauuuguga

SEQ ID NO: 89499 - RNA, 19 nt, Homo sapiens
  misc_RNA (1)...(19): siRNA sense strand
ggaugaaaguggauuacca

SEQ ID NO: 89500 - RNA, 19 nt, Homo sapiens
  misc_RNA (1)...(19): siRNA sense strand
cguguuaucugucgcuuug

SEQ ID NO: 89501 - RNA, 19 nt, Homo sapiens
  misc_RNA (1)...(19): siRNA sense strand
uuaaaccgguugaaucuuc

SEQ ID NO: 89502 - RNA, 19 nt, Homo sapiens
  misc_RNA (1)...(19): siRNA sense strand
gcaacugucauauauaaca

SEQ ID NO: 89503 - RNA, 19 nt, Homo sapiens
  misc_RNA (1)...(19): siRNA sense strand
gaugaaagaauuaccgaau

SEQ ID NO: 89504 - RNA, 19 nt, Homo sapiens
  misc_RNA (1)...(19): siRNA sense strand
uagcaagacuuuccucagu

SEQ ID NO: 89505 - RNA, 19 nt, Homo sapiens
  misc_RNA (1)...(19): siRNA sense strand
ggaaaugagagaaaugcuu

SEQ ID NO: 89506 - RNA, 19 nt, Homo sapiens
  misc_RNA (1)...(19): siRNA sense strand
cagagucacuggaacuuuc

SEQ ID NO: 89507 - RNA, 19 nt, Homo sapiens
  misc_RNA (1)...(19): siRNA sense strand
gcaacgacacagaaacuga

SEQ ID NO: 89508 - RNA, 19 nt, Homo sapiens
  misc_RNA (1)...(19): siRNA sense strand
caaaagagguggauauguc

SEQ ID NO: 89509 - RNA, 19 nt, Homo sapiens
  misc_RNA (1)...(19): siRNA sense strand
gaugggauaugagccagaa

SEQ ID NO: 89510 - RNA, 19 nt, Homo sapiens
  misc_RNA (1)...(19): siRNA sense strand
caaccucaguguggguaua

SEQ ID NO: 89511 - RNA, 19 nt, Homo sapiens
  misc_RNA (1)...(19): siRNA sense strand
gaaaugcuuacacacagaa

SEQ ID NO: 89512 - RNA, 19 nt, Homo sapiens
  misc_RNA (1)...(19): siRNA sense strand
acugcagggugaagaauua

SEQ ID NO: 89513 - RNA, 19 nt, Homo sapiens
  misc_RNA (1)...(19): siRNA sense strand
caagaagcccuaacguguu

SEQ ID NO: 89514 - RNA, 19 nt, Homo sapiens
  misc_RNA (1)...(19): siRNA sense strand
acaagaaccuacugcuaau

SEQ ID NO: 89515 - RNA, 19 nt, Homo sapiens
  misc_RNA (1)...(19): siRNA sense strand
acaaguagccucuuugaca

SEQ ID NO: 89516 - RNA, 19 nt, Homo sapiens
  misc_RNA (1)...(19): siRNA sense strand
aaacagaauguguccuuaa

SEQ ID NO: 89517 - RNA, 19 nt, Homo sapiens
  misc_RNA (1)...(19): siRNA sense strand
gccgcucaauuuaugaaua

SEQ ID NO: 89518 - RNA, 19 nt, Homo sapiens
  misc_RNA (1)...(19): siRNA sense strand
gaaagcgcaaguccucaaa

SEQ ID NO: 89519 - RNA, 19 nt, Homo sapiens
  misc_RNA (1)...(19): siRNA sense strand
ccaguuacguuccuucgau

SEQ ID NO: 89520 - RNA, 19 nt, Homo sapiens
  misc_RNA (1)...(19): siRNA sense strand
aacagaauguguccuuaaa

SEQ ID NO: 89521 - RNA, 19 nt, Homo sapiens
  misc_RNA (1)...(19): siRNA sense strand
ggugacaugauuuacauuu

SEQ ID NO: 89522 - RNA, 19 nt, Homo sapiens
  misc_RNA (1)...(19): siRNA sense strand
gaagaauuacucagagcuu

SEQ ID NO: 89523 - RNA, 19 nt, Homo sapiens
  misc_RNA (1)...(19): siRNA sense strand
gaaguuaaugcuccuauac

SEQ ID NO: 89524 - RNA, 19 nt, Homo sapiens
  misc_RNA (1)...(19): siRNA sense strand
ccgcucaauuuaugaauau

SEQ ID NO: 89525 - RNA, 19 nt, Homo sapiens
  misc_RNA (1)...(19): siRNA sense strand
cacauucacguauaugaua

SEQ ID NO: 89526 - RNA, 19 nt, Homo sapiens
  misc_RNA (1)...(19): siRNA sense strand
caaagcacaguuacaguau

SEQ ID NO: 89527 - RNA, 19 nt, Homo sapiens
  misc_RNA (1)...(19): siRNA sense strand
cuaauagucccagugaaua

SEQ ID NO: 89528 - RNA, 19 nt, Homo sapiens
  misc_RNA (1)...(19): siRNA sense strand
aaaguucaccugagccuaa

SEQ ID NO: 89529 - RNA, 19 nt, Homo sapiens
  misc_RNA (1)...(19): siRNA sense strand
gauaugagccagaagaacu

SEQ ID NO: 89530 - RNA, 19 nt, Homo sapiens
  misc_RNA (1)...(19): siRNA sense strand
ccgaauugaugggauauga

SEQ ID NO: 89531 - RNA, 19 nt, Homo sapiens
  misc_RNA (1)...(19): siRNA sense strand
uuaccgaauugaugggaua

SEQ ID NO: 89532 - RNA, 19 nt, Homo sapiens
  misc_RNA (1)...(19): siRNA sense strand
cagccuggauaugaaauuu

SEQ ID NO: 89533 - RNA, 19 nt, Homo sapiens
  misc_RNA (1)...(19): siRNA sense strand
gacaugaaagcacagauga

SEQ ID NO: 89534 - RNA, 19 nt, Homo sapiens
  misc_RNA (1)...(19): siRNA sense strand
acucagagcuuuggaucaa

SEQ ID NO: 89535 - RNA, 19 nt, Homo sapiens
  misc_RNA (1)...(19): siRNA sense strand
cccaauggaugaugacuuc

SEQ ID NO: 89536 - RNA, 19 nt, Homo sapiens
  misc_RNA (1)...(19): siRNA sense strand
uugaggaaguaccauuaua

SEQ ID NO: 89537 - RNA, 19 nt, Homo sapiens
  misc_RNA (1)...(19): siRNA sense strand
aaugugaguucgcaucuug

SEQ ID NO: 89538 - RNA, 19 nt, Homo sapiens
  misc_RNA (1)...(19): siRNA sense strand
caagcaacugucauauaua

SEQ ID NO: 89539 - RNA, 19 nt, Homo sapiens
  misc_RNA (1)...(19): siRNA sense strand
gcugauuugugaacccauu

SEQ ID NO: 89540 - RNA, 19 nt, Homo sapiens
  misc_RNA (1)...(19): siRNA sense strand
ggcaaucaauggaugaaag

SEQ ID NO: 89541 - RNA, 19 nt, Homo sapiens
  misc_RNA (1)...(19): siRNA sense strand
ccauauagagauacucaaa

SEQ ID NO: 89542 - RNA, 19 nt, Homo sapiens
  misc_RNA (1)...(19): siRNA sense strand
ugacaaacuuaagaaggaa

SEQ ID NO: 89543 - RNA, 19 nt, Homo sapiens
  misc_RNA (1)...(19): siRNA sense strand
gcauuguaugugugaauua

SEQ ID NO: 89544 - RNA, 19 nt, Homo sapiens
  misc_RNA (1)...(19): siRNA sense strand
gaaacucaagcaacuguca

SEQ ID NO: 89545 - RNA, 19 nt, Homo sapiens
  misc_RNA (1)...(19): siRNA sense strand
gagcuuuggaucaaguuaa

SEQ ID NO: 89546 - RNA, 19 nt, Homo sapiens
  misc_RNA (1)...(19): siRNA sense strand
gaaggaaccugaugcuuua

SEQ ID NO: 89547 - RNA, 19 nt, Homo sapiens
  misc_RNA (1)...(19): siRNA sense strand
ggacacagauuuagacuug

SEQ ID NO: 89548 - RNA, 19 nt, Homo sapiens
  misc_RNA (1)...(19): siRNA sense strand
gaaaugagagaaaugcuua

SEQ ID NO: 89549 - RNA, 19 nt, Homo sapiens
  misc_RNA (1)...(19): siRNA sense strand
gaacaaauacaugggauua

SEQ ID NO: 89550 - RNA, 19 nt, Homo sapiens
  misc_RNA (1)...(19): siRNA sense strand
ucaagcaacugucauauau

SEQ ID NO: 89551 - RNA, 19 nt, Homo sapiens
  misc_RNA (1)...(19): siRNA sense strand
gauguuagcucccuauauc

SEQ ID NO: 89552 - RNA, 19 nt, Homo sapiens
  misc_RNA (1)...(19): siRNA sense strand
gauaaggccucugugauga

SEQ ID NO: 89553 - RNA, 19 nt, Homo sapiens
  misc_RNA (1)...(19): siRNA sense strand
gagacacaaucauaucuuu

SEQ ID NO: 89554 - RNA, 19 nt, Homo sapiens
  misc_RNA (1)...(19): siRNA sense strand
gauacuagcuuugcagaau

SEQ ID NO: 89555 - RNA, 19 nt, Homo sapiens
  misc_RNA (1)...(19): siRNA sense strand
gaacauaaagucugcaaca

SEQ ID NO: 89556 - RNA, 19 nt, Homo sapiens
  misc_RNA (1)...(19): siRNA sense strand
ggauaugucuggguugaaa

SEQ ID NO: 89557 - RNA, 19 nt, Homo sapiens
  misc_RNA (1)...(19): siRNA sense strand
agaaugaaguguacccuaa

SEQ ID NO: 89558 - RNA, 19 nt, Homo sapiens
  misc_RNA (1)...(19): siRNA sense strand
gaggaaguaccauuauaua

SEQ ID NO: 89559 - RNA, 19 nt, Homo sapiens
  misc_RNA (1)...(19): siRNA sense strand
gaaaaugacucagcuauuc

SEQ ID NO: 89560 - RNA, 19 nt, Homo sapiens
  misc_RNA (1)...(19): siRNA sense strand
gauggaagcacuagacaaa

SEQ ID NO: 89561 - RNA, 19 nt, Homo sapiens
  misc_RNA (1)...(19): siRNA sense strand
caaacagaauguguccuua

SEQ ID NO: 89562 - RNA, 19 nt, Homo sapiens
  misc_RNA (1)...(19): siRNA sense strand
caaguagccucuuugacaa

SEQ ID NO: 89563 - RNA, 19 nt, Homo sapiens
  misc_RNA (1)...(19): siRNA sense strand
ugccaccacugaugaauua

SEQ ID NO: 89564 - RNA, 19 nt, Homo sapiens
  misc_RNA (1)...(19): siRNA sense strand
cgacacagccuggauauga

SEQ ID NO: 89565 - RNA, 19 nt, Homo sapiens
  misc_RNA (1)...(19): siRNA sense strand
uauaagaaaccaccuauga

SEQ ID NO: 89566 - RNA, 19 nt, Homo sapiens
  misc_RNA (1)...(19): siRNA sense strand
caccaaaguugaaucagaa

SEQ ID NO: 89567 - RNA, 19 nt, Homo sapiens
  misc_RNA (1)...(19): siRNA sense strand
caaccacagugcauuguau

SEQ ID NO: 89568 - RNA, 19 nt, Homo sapiens
  misc_RNA (1)...(19): siRNA sense strand
gaacuaaauccaaagauac

SEQ ID NO: 89569 - RNA, 19 nt, Homo sapiens
  misc_RNA (1)...(19): siRNA sense strand
ccacauacauaaagaaacu

SEQ ID NO: 89570 - RNA, 19 nt, Homo sapiens
  misc_RNA (1)...(19): siRNA sense strand
caaucaagaaguugcauua

SEQ ID NO: 89571 - RNA, 19 nt, Homo sapiens
  misc_RNA (1)...(19): siRNA sense strand
ugaaagcacagaugaauug

SEQ ID NO: 89572 - RNA, 19 nt, Homo sapiens
  misc_RNA (1)...(19): siRNA sense strand
gcucaucaguugccacuuc

SEQ ID NO: 89573 - RNA, 19 nt, Homo sapiens
  misc_RNA (1)...(19): siRNA sense strand
gaugaugacuuccaguuac

SEQ ID NO: 89574 - RNA, 19 nt, Homo sapiens
  misc_RNA (1)...(19): siRNA sense strand
ggaugaugacuuccaguua

SEQ ID NO: 89575 - RNA, 19 nt, Homo sapiens
  misc_RNA (1)...(19): siRNA sense strand
ugaaagccuuggaugguuu

SEQ ID NO: 89576 - RNA, 19 nt, Homo sapiens
  misc_RNA (1)...(19): siRNA sense strand
ugagagaaaugcuuacaca

SEQ ID NO: 89577 - RNA, 19 nt, Homo sapiens
  misc_RNA (1)...(19): siRNA sense strand
gaagaacuaaauccaaaga

SEQ ID NO: 89578 - RNA, 19 nt, Homo sapiens
  misc_RNA (1)...(19): siRNA sense strand
ucaaagcacaguuacagua

SEQ ID NO: 89579 - RNA, 19 nt, Homo sapiens
  misc_RNA (1)...(19): siRNA sense strand
auagugauauggucaauga

SEQ ID NO: 89580 - RNA, 19 nt, Homo sapiens
  misc_RNA (1)...(19): siRNA sense strand
gaaauuccuuuagauagca

SEQ ID NO: 89581 - RNA, 19 nt, Homo sapiens
  misc_RNA (1)...(19): siRNA sense strand
ugacucagcuauucaccaa

SEQ ID NO: 89582 - RNA, 19 nt, Homo sapiens
  misc_RNA (1)...(19): siRNA sense strand
gaucaguugucaccauuag

SEQ ID NO: 89583 - RNA, 19 nt, Homo sapiens
  misc_RNA (1)...(19): siRNA sense strand
ucaccaaaguugaaucaga

SEQ ID NO: 89584 - RNA, 19 nt, Homo sapiens
  misc_RNA (1)...(19): siRNA sense strand
agaaggaaccugaugcuuu

SEQ ID NO: 89585 - RNA, 19 nt, Homo sapiens
  misc_RNA (1)...(19): siRNA sense strand
gcagaaugcucagagaaag

SEQ ID NO: 89586 - RNA, 19 nt, Homo sapiens
  misc_RNA (1)...(19): siRNA sense strand
gaaaaggagucauagaaca

SEQ ID NO: 89587 - RNA, 19 nt, Homo sapiens
  misc_RNA (1)...(19): siRNA sense strand
gcacugcacaggccacauu

SEQ ID NO: 89588 - RNA, 19 nt, Homo sapiens
  misc_RNA (1)...(19): siRNA sense strand
aggaagaacuaaauccaaa

SEQ ID NO: 89589 - RNA, 19 nt, Homo sapiens
  misc_RNA (1)...(19): siRNA sense strand
gugauauggucaaugaauu

SEQ ID NO: 89590 - RNA, 19 nt, Homo sapiens
  misc_RNA (1)...(19): siRNA sense strand
gaucagacaccuaguccuu

SEQ ID NO: 89591 - RNA, 19 nt, Homo sapiens
  misc_RNA (1)...(19): siRNA sense strand
ugaguucgcaucuugauaa

SEQ ID NO: 89592 - RNA, 19 nt, Homo sapiens
  misc_RNA (1)...(19): siRNA sense strand
uacaagaaccuacugcuaa

SEQ ID NO: 89593 - RNA, 19 nt, Homo sapiens
  misc_RNA (1)...(19): siRNA sense strand
ucaaugaauucaaguugga

SEQ ID NO: 89594 - RNA, 19 nt, Homo sapiens
  misc_RNA (1)...(19): siRNA sense strand
ccucacccaucaaauauug

SEQ ID NO: 89595 - RNA, 19 nt, Homo sapiens
  misc_RNA (1)...(19): siRNA sense strand
ccagcagacucaaauacaa

SEQ ID NO: 89596 - RNA, 19 nt, Homo sapiens
  misc_RNA (1)...(19): siRNA sense strand
gacacagccuggauaugaa

SEQ ID NO: 89597 - RNA, 19 nt, Homo sapiens
  misc_RNA (1)...(19): siRNA sense strand
gcuuggugcugauuuguga

SEQ ID NO: 89598 - RNA, 19 nt, Homo sapiens
  misc_RNA (1)...(19): siRNA sense strand
cguguuaucugucgcuuug

SEQ ID NO: 89599 - RNA, 19 nt, Homo sapiens
  misc_RNA (1)...(19): siRNA sense strand
uuaaaccgguugaaucuuc

SEQ ID NO: 89600 - RNA, 19 nt, Homo sapiens
  misc_RNA (1)...(19): siRNA sense strand
gcaacugucauauauaaca

SEQ ID NO: 89601 - RNA, 19 nt, Homo sapiens
  misc_RNA (1)...(19): siRNA sense strand
gaugaaagaauuaccgaau

SEQ ID NO: 89602 - RNA, 19 nt, Homo sapiens
  misc_RNA (1)...(19): siRNA sense strand
uagcaagacuuuccucagu

SEQ ID NO: 89603 - RNA, 19 nt, Homo sapiens
  misc_RNA (1)...(19): siRNA sense strand
ggaaaugagagaaaugcuu

SEQ ID NO: 89604 - RNA, 19 nt, Homo sapiens
  misc_RNA (1)...(19): siRNA sense strand
cagagucacuggaacuuuc

SEQ ID NO: 89605 - RNA, 19 nt, Homo sapiens
  misc_RNA (1)...(19): siRNA sense strand
gcaacgacacagaaacuga

SEQ ID NO: 89606 - RNA, 19 nt, Homo sapiens
  misc_RNA (1)...(19): siRNA sense strand
caaaagagguggauauguc

SEQ ID NO: 89607 - RNA, 19 nt, Homo sapiens
  misc_RNA (1)...(19): siRNA sense strand
gaugggauaugagccagaa

SEQ ID NO: 89608 - RNA, 19 nt, Homo sapiens
  misc_RNA (1)...(19): siRNA sense strand
caaccucaguguggguaua

SEQ ID NO: 89609 - RNA, 19 nt, Homo sapiens
  misc_RNA (1)...(19): siRNA sense strand
gaaaugcuuacacacagaa

SEQ ID NO: 89610 - RNA, 19 nt, Homo sapiens
  misc_RNA (1)...(19): siRNA sense strand
caagaagcccuaacguguu

SEQ ID NO: 89611 - RNA, 19 nt, Homo sapiens
  misc_RNA (1)...(19): siRNA sense strand
acaagaaccuacugcuaau

SEQ ID NO: 89612 - RNA, 19 nt, Homo sapiens
  misc_RNA (1)...(19): siRNA sense strand
acaaguagccucuuugaca

SEQ ID NO: 89613 - RNA, 19 nt, Homo sapiens
  misc_RNA (1)...(19): siRNA sense strand
aaacagaauguguccuuaa

SEQ ID NO: 89614 - RNA, 19 nt, Homo sapiens
  misc_RNA (1)...(19): siRNA sense strand
gccgcucaauuuaugaaua

SEQ ID NO: 89615 - RNA, 19 nt, Homo sapiens
  misc_RNA (1)...(19): siRNA sense strand
gaaagcgcaaguccucaaa

SEQ ID NO: 89616 - RNA, 19 nt, Homo sapiens
  misc_RNA (1)...(19): siRNA sense strand
ccaguuacguuccuucgau

SEQ ID NO: 89617 - RNA, 19 nt, Homo sapiens
  misc_RNA (1)...(19): siRNA sense strand
aacagaauguguccuuaaa

SEQ ID NO: 89618 - RNA, 19 nt, Homo sapiens
  misc_RNA (1)...(19): siRNA sense strand
ggugacaugauuuacauuu

SEQ ID NO: 89619 - RNA, 19 nt, Homo sapiens
  misc_RNA (1)...(19): siRNA sense strand
ccgcucaauuuaugaauau

SEQ ID NO: 89620 - RNA, 19 nt, Homo sapiens
  misc_RNA (1)...(19): siRNA sense strand
cacauucacguauaugaua

SEQ ID NO: 89621 - RNA, 19 nt, Homo sapiens
  misc_RNA (1)...(19): siRNA sense strand
caaagcacaguuacaguau

SEQ ID NO: 89622 - RNA, 19 nt, Homo sapiens
  misc_RNA (1)...(19): siRNA sense strand
cuaauagucccagugaaua

SEQ ID NO: 89623 - RNA, 19 nt, Homo sapiens
  misc_RNA (1)...(19): siRNA sense strand
aaaguucaccugagccuaa

SEQ ID NO: 89624 - RNA, 19 nt, Homo sapiens
  misc_RNA (1)...(19): siRNA sense strand
gauaugagccagaagaacu

SEQ ID NO: 89625 - RNA, 19 nt, Homo sapiens
  misc_RNA (1)...(19): siRNA sense strand
ccgaauugaugggauauga

SEQ ID NO: 89626 - RNA, 19 nt, Homo sapiens
  misc_RNA (1)...(19): siRNA sense strand
uuaccgaauugaugggaua

SEQ ID NO: 89627 - RNA, 19 nt, Homo sapiens
  misc_RNA (1)...(19): siRNA sense strand
cagccuggauaugaaauuu

SEQ ID NO: 89628 - RNA, 19 nt, Homo sapiens
  misc_RNA (1)...(19): siRNA sense strand
gacaugaaagcacagauga

SEQ ID NO: 89629 - RNA, 19 nt, Homo sapiens
  misc_RNA (1)...(19): siRNA sense strand
cccaauggaugaugacuuc

SEQ ID NO: 89630 - RNA, 19 nt, Homo sapiens
  misc_RNA (1)...(19): siRNA sense strand
uugaggaaguaccauuaua

SEQ ID NO: 89631 - RNA, 19 nt, Homo sapiens
  misc_RNA (1)...(19): siRNA sense strand
aaugugaguucgcaucuug

SEQ ID NO: 89632 - RNA, 19 nt, Homo sapiens
  misc_RNA (1)...(19): siRNA sense strand
caagcaacugucauauaua

SEQ ID NO: 89633 - RNA, 19 nt, Homo sapiens
  misc_RNA (1)...(19): siRNA sense strand
gcugauuugugaacccauu

SEQ ID NO: 89634 - RNA, 19 nt, Homo sapiens
  misc_RNA (1)...(19): siRNA sense strand
ccauauagagauacucaaa

SEQ ID NO: 89635 - RNA, 19 nt, Homo sapiens
  misc_RNA (1)...(19): siRNA sense strand
ugacaaacuuaagaaggaa

SEQ ID NO: 89636 - RNA, 19 nt, Homo sapiens
  misc_RNA (1)...(19): siRNA sense strand
gcauuguaugugugaauua

SEQ ID NO: 89637 - RNA, 19 nt, Homo sapiens
  misc_RNA (1)...(19): siRNA sense strand
gaaacucaagcaacuguca

SEQ ID NO: 89638 - RNA, 19 nt, Homo sapiens
  misc_RNA (1)...(19): siRNA sense strand
gaugauggugacaugauuu

SEQ ID NO: 89639 - RNA, 19 nt, Homo sapiens
  misc_RNA (1)...(19): siRNA sense strand
caucaucaccauauagaga

SEQ ID NO: 89640 - RNA, 19 nt, Homo sapiens
  misc_RNA (1)...(19): siRNA sense strand
aagcacaguuacaguauuc

SEQ ID NO: 89641 - RNA, 19 nt, Homo sapiens
  misc_RNA (1)...(19): siRNA sense strand
gauuuagacuuggagaugu

SEQ ID NO: 89642 - RNA, 19 nt, Homo sapiens
  misc_RNA (1)...(19): siRNA sense strand
ggucaaugaauucaaguug

SEQ ID NO: 89643 - RNA, 19 nt, Homo sapiens
  misc_RNA (1)...(19): siRNA sense strand
ggaagcacuagacaaaguu

SEQ ID NO: 89644 - RNA, 19 nt, Homo sapiens
  misc_RNA (1)...(19): siRNA sense strand
gaaguaaagaaucugaagu

SEQ ID NO: 89645 - RNA, 19 nt, Homo sapiens
  misc_RNA (1)...(19): siRNA sense strand
gaggaagaacuaaauccaa

SEQ ID NO: 89646 - RNA, 19 nt, Homo sapiens
  misc_RNA (1)...(19): siRNA sense strand
gaaaguauucucaggcaaa

SEQ ID NO: 89647 - RNA, 19 nt, Homo sapiens
  misc_RNA (1)...(19): siRNA sense strand
gacaagcacugguggaguu

SEQ ID NO: 89648 - RNA, 19 nt, Homo sapiens
  misc_RNA (1)...(19): siRNA sense strand
gaacagugugcuucucuuu

SEQ ID NO: 89649 - RNA, 19 nt, Homo sapiens
  misc_RNA (1)...(19): siRNA sense strand
caucaugccuggucaguca

SEQ ID NO: 89650 - RNA, 19 nt, Homo sapiens
  misc_RNA (1)...(19): siRNA sense strand
cuaagcggcucaagacuga

SEQ ID NO: 89651 - RNA, 19 nt, Homo sapiens
  misc_RNA (1)...(19): siRNA sense strand
gcgaugagcugggagugaa

SEQ ID NO: 89652 - RNA, 19 nt, Homo sapiens
  misc_RNA (1)...(19): siRNA sense strand
gccaaggccucucucaaug

SEQ ID NO: 89653 - RNA, 19 nt, Homo sapiens
  misc_RNA (1)...(19): siRNA sense strand
caucuucugugaaaguauu

SEQ ID NO: 89654 - RNA, 19 nt, Homo sapiens
  misc_RNA (1)...(19): siRNA sense strand
gaagaucgaauacgcaaag

SEQ ID NO: 89655 - RNA, 19 nt, Homo sapiens
  misc_RNA (1)...(19): siRNA sense strand
ccacagccauuaccaugau

SEQ ID NO: 89656 - RNA, 19 nt, Homo sapiens
  misc_RNA (1)...(19): siRNA sense strand
caucagcuaugugguggua

SEQ ID NO: 89657 - RNA, 19 nt, Homo sapiens
  misc_RNA (1)...(19): siRNA sense strand
gcacucugaagaucgaaua

SEQ ID NO: 89658 - RNA, 19 nt, Homo sapiens
  misc_RNA (1)...(19): siRNA sense strand
gcggccaucuucugugaaa

SEQ ID NO: 89659 - RNA, 19 nt, Homo sapiens
  misc_RNA (1)...(19): siRNA sense strand
gaccgagucuucaaugucu

SEQ ID NO: 89660 - RNA, 19 nt, Homo sapiens
  misc_RNA (1)...(19): siRNA sense strand
gguggaauuugacucaguu

SEQ ID NO: 89661 - RNA, 19 nt, Homo sapiens
  misc_RNA (1)...(19): siRNA sense strand
agaaugaucaggauacuug

SEQ ID NO: 89662 - RNA, 19 nt, Homo sapiens
  misc_RNA (1)...(19): siRNA sense strand
gaacuacgcagccgacaac

SEQ ID NO: 89663 - RNA, 19 nt, Homo sapiens
  misc_RNA (1)...(19): siRNA sense strand
cggauguucuuuacacuau

SEQ ID NO: 89664 - RNA, 19 nt, Homo sapiens
  misc_RNA (1)...(19): siRNA sense strand
guucaagaaugaucaggau

SEQ ID NO: 89665 - RNA, 19 nt, Homo sapiens
  misc_RNA (1)...(19): siRNA sense strand
gcgaugcccuggagacucu

SEQ ID NO: 89666 - RNA, 19 nt, Homo sapiens
  misc_RNA (1)...(19): siRNA sense strand
ggaguuugaagauguguug

SEQ ID NO: 89667 - RNA, 19 nt, Homo sapiens
  misc_RNA (1)...(19): siRNA sense strand
uuacccaccucaacaacaa

SEQ ID NO: 89668 - RNA, 19 nt, Homo sapiens
  misc_RNA (1)...(19): siRNA sense strand
gcccugugcucauggucua

SEQ ID NO: 89669 - RNA, 19 nt, Homo sapiens
  misc_RNA (1)...(19): siRNA sense strand
caauggggcugauaucuau

SEQ ID NO: 89670 - RNA, 19 nt, Homo sapiens
  misc_RNA (1)...(19): siRNA sense strand
ccacggauguucuuuacac

SEQ ID NO: 89671 - RNA, 19 nt, Homo sapiens
  misc_RNA (1)...(19): siRNA sense strand
cgacaaccaaauauacauu

SEQ ID NO: 89672 - RNA, 19 nt, Homo sapiens
  misc_RNA (1)...(19): siRNA sense strand
ucaccacggauguucuuua

SEQ ID NO: 89673 - RNA, 19 nt, Homo sapiens
  misc_RNA (1)...(19): siRNA sense strand
ggagugaagcggccaucuu

SEQ ID NO: 89674 - RNA, 19 nt, Homo sapiens
  misc_RNA (1)...(19): siRNA sense strand
ucaaugucuucugcuuaua

SEQ ID NO: 89675 - RNA, 19 nt, Homo sapiens
  misc_RNA (1)...(19): siRNA sense strand
aagcggccaucuucuguga

SEQ ID NO: 89676 - RNA, 19 nt, Homo sapiens
  misc_RNA (1)...(19): siRNA sense strand
ccugaaccauuaccagaug

SEQ ID NO: 89677 - RNA, 19 nt, Homo sapiens
  misc_RNA (1)...(19): siRNA sense strand
gccaucuucugugaaagua

SEQ ID NO: 89678 - RNA, 19 nt, Homo sapiens
  misc_RNA (1)...(19): siRNA sense strand
cagccgacaaccaaauaua

SEQ ID NO: 89679 - RNA, 19 nt, Homo sapiens
  misc_RNA (1)...(19): siRNA sense strand
gaaccauuaccagaugaaa

SEQ ID NO: 89680 - RNA, 19 nt, Homo sapiens
  misc_RNA (1)...(19): siRNA sense strand
gggcagaagcugaaugucu

SEQ ID NO: 89681 - RNA, 19 nt, Homo sapiens
  misc_RNA (1)...(19): siRNA sense strand
gagaucaccccgcagaaua

SEQ ID NO: 89682 - RNA, 19 nt, Homo sapiens
  misc_RNA (1)...(19): siRNA sense strand
gauguucuuuacacuaucu

SEQ ID NO: 89683 - RNA, 19 nt, Homo sapiens
  misc_RNA (1)...(19): siRNA sense strand
gacaaccaaauauacauug

SEQ ID NO: 89684 - RNA, 19 nt, Homo sapiens
  misc_RNA (1)...(19): siRNA sense strand
guccagagaauugucauuu

SEQ ID NO: 89685 - RNA, 19 nt, Homo sapiens
  misc_RNA (1)...(19): siRNA sense strand
ugggcuuccugaaccauua

SEQ ID NO: 89686 - RNA, 19 nt, Homo sapiens
  misc_RNA (1)...(19): siRNA sense strand
caaugucuucugcuuauau

SEQ ID NO: 89687 - RNA, 19 nt, Homo sapiens
  misc_RNA (1)...(19): siRNA sense strand
gauugacggugugguggaa

SEQ ID NO: 89688 - RNA, 19 nt, Homo sapiens
  misc_RNA (1)...(19): siRNA sense strand
gaugguggaauuugacuca

SEQ ID NO: 89689 - RNA, 19 nt, Homo sapiens
  misc_RNA (1)...(19): siRNA sense strand
aagcacugguggaguuuga

SEQ ID NO: 89690 - RNA, 19 nt, Homo sapiens
  misc_RNA (1)...(19): siRNA sense strand
gaucaccacggauguucuu

SEQ ID NO: 89691 - RNA, 19 nt, Homo sapiens
  misc_RNA (1)...(19): siRNA sense strand
acagugugcuucucuuuac

SEQ ID NO: 89692 - RNA, 19 nt, Homo sapiens
  misc_RNA (1)...(19): siRNA sense strand
cuacgcagccgacaaccaa

SEQ ID NO: 89693 - RNA, 19 nt, Homo sapiens
  misc_RNA (1)...(19): siRNA sense strand
gcaauguggagaaggugaa

SEQ ID NO: 89694 - RNA, 19 nt, Homo sapiens
  misc_RNA (1)...(19): siRNA sense strand
uucaaugucuucugcuuau

SEQ ID NO: 89695 - RNA, 19 nt, Homo sapiens
  misc_RNA (1)...(19): siRNA sense strand
gguggaagcagaccuugug

SEQ ID NO: 89696 - RNA, 19 nt, Homo sapiens
  misc_RNA (1)...(19): siRNA sense strand
ucagcuauguggugguaau

SEQ ID NO: 89697 - RNA, 19 nt, Homo sapiens
  misc_RNA (1)...(19): siRNA sense strand
cugcuuauauggcaaugug

SEQ ID NO: 89698 - RNA, 19 nt, Homo sapiens
  misc_RNA (1)...(19): siRNA sense strand
caagaaugaucaggauacu

SEQ ID NO: 89699 - RNA, 19 nt, Homo sapiens
  misc_RNA (1)...(19): siRNA sense strand
caccacggauguucuuuac

SEQ ID NO: 89700 - RNA, 19 nt, Homo sapiens
  misc_RNA (1)...(19): siRNA sense strand
ccagagaauugucauuuuc

SEQ ID NO: 89701 - RNA, 19 nt, Homo sapiens
  misc_RNA (1)...(19): siRNA sense strand
guccauacccuuacacucu

SEQ ID NO: 89702 - RNA, 19 nt, Homo sapiens
  misc_RNA (1)...(19): siRNA sense strand
gaauugucauuuucaggaa

SEQ ID NO: 89703 - RNA, 19 nt, Homo sapiens
  misc_RNA (1)...(19): siRNA sense strand
ucuuugagaucugcgauga

SEQ ID NO: 89704 - RNA, 19 nt, Homo sapiens
  misc_RNA (1)...(19): siRNA sense strand
aggcgaugguggaauuuga

SEQ ID NO: 89705 - RNA, 19 nt, Homo sapiens
  misc_RNA (1)...(19): siRNA sense strand
gguggaguuugaagaugug

SEQ ID NO: 89706 - RNA, 19 nt, Homo sapiens
  misc_RNA (1)...(19): siRNA sense strand
ugaacagugugcuucucuu

SEQ ID NO: 89707 - RNA, 19 nt, Homo sapiens
  misc_RNA (1)...(19): siRNA sense strand
acucugaaguuguguuucu

SEQ ID NO: 89708 - RNA, 19 nt, Homo sapiens
  misc_RNA (1)...(19): siRNA sense strand
guuacaaagacuucaguga

SEQ ID NO: 89709 - RNA, 19 nt, Homo sapiens
  misc_RNA (1)...(19): siRNA sense strand
cuucaaugucuucugcuua

SEQ ID NO: 89710 - RNA, 19 nt, Homo sapiens
  misc_RNA (1)...(19): siRNA sense strand
cauggucuauggcuuggau

SEQ ID NO: 89711 - RNA, 19 nt, Homo sapiens
  misc_RNA (1)...(19): siRNA sense strand
aacagugugcuucucuuua

SEQ ID NO: 89712 - RNA, 19 nt, Homo sapiens
  misc_RNA (1)...(19): siRNA sense strand
cagagcaggcagccaagaa

SEQ ID NO: 89713 - RNA, 19 nt, Homo sapiens
  misc_RNA (1)...(19): siRNA sense strand
gucuauggcuuggaucaau

SEQ ID NO: 89714 - RNA, 19 nt, Homo sapiens
  misc_RNA (1)...(19): siRNA sense strand
ucaagaaugaucaggauac

SEQ ID NO: 89715 - RNA, 19 nt, Homo sapiens
  misc_RNA (1)...(19): siRNA sense strand
auacuugggacuacacaaa

SEQ ID NO: 89716 - RNA, 19 nt, Homo sapiens
  misc_RNA (1)...(19): siRNA sense strand
uggcuuggaucaaucuaag

SEQ ID NO: 89717 - RNA, 19 nt, Homo sapiens
  misc_RNA (1)...(19): siRNA sense strand
caaucucaguggacaaggu

SEQ ID NO: 89718 - RNA, 19 nt, Homo sapiens
  misc_RNA (1)...(19): siRNA sense strand
gcagccgacaaccaaauau

SEQ ID NO: 89719 - RNA, 19 nt, Homo sapiens
  misc_RNA (1)...(19): siRNA sense strand
ccauacccuuacacucuga

SEQ ID NO: 89720 - RNA, 19 nt, Homo sapiens
  misc_RNA (1)...(19): siRNA sense strand
gugaccgagucuucaaugu

SEQ ID NO: 89721 - RNA, 19 nt, Homo sapiens
  misc_RNA (1)...(19): siRNA sense strand
uucaggcgaugguggaauu

SEQ ID NO: 89722 - RNA, 19 nt, Homo sapiens
  misc_RNA (1)...(19): siRNA sense strand
ggauguucuuuacacuauc

SEQ ID NO: 89723 - RNA, 19 nt, Homo sapiens
  misc_RNA (1)...(19): siRNA sense strand
cuuacacucugaaguugug

SEQ ID NO: 89724 - RNA, 19 nt, Homo sapiens
  misc_RNA (1)...(19): siRNA sense strand
gccauuacccaccucaaca

SEQ ID NO: 89725 - RNA, 19 nt, Homo sapiens
  misc_RNA (1)...(19): siRNA sense strand
ccaagcagccagccaucau

SEQ ID NO: 89726 - RNA, 19 nt, Homo sapiens
  misc_RNA (1)...(19): siRNA sense strand
ugguggaguuugaagaugu

SEQ ID NO: 89727 - RNA, 19 nt, Homo sapiens
  misc_RNA (1)...(19): siRNA sense strand
caagcagccagccaucaug

SEQ ID NO: 89728 - RNA, 19 nt, Homo sapiens
  misc_RNA (1)...(19): siRNA sense strand
gagcgugaacagugugcuu

SEQ ID NO: 89729 - RNA, 19 nt, Homo sapiens
  misc_RNA (1)...(19): siRNA sense strand
aaugucuucugcuuauaug

SEQ ID NO: 89730 - RNA, 19 nt, Homo sapiens
  misc_RNA (1)...(19): siRNA sense strand
ggugaccgagucuucaaug

SEQ ID NO: 89731 - RNA, 19 nt, Homo sapiens
  misc_RNA (1)...(19): siRNA sense strand
guugcacucugaagaucga

SEQ ID NO: 89732 - RNA, 19 nt, Homo sapiens
  misc_RNA (1)...(19): siRNA sense strand
gcuguugcacucugaagau

SEQ ID NO: 89733 - RNA, 19 nt, Homo sapiens
  misc_RNA (1)...(19): siRNA sense strand
caggaagaauggaguucag

SEQ ID NO: 89734 - RNA, 19 nt, Homo sapiens
  misc_RNA (1)...(19): siRNA sense strand
ggcccuguccagagaauug

SEQ ID NO: 89735 - RNA, 19 nt, Homo sapiens
  misc_RNA (1)...(19): siRNA sense strand
gcacugguggaguuugaag

SEQ ID NO: 89736 - RNA, 19 nt, Homo sapiens
  misc_RNA (1)...(19): siRNA sense strand
ccauuacccaccucaacaa

SEQ ID NO: 89737 - RNA, 19 nt, Homo sapiens
  misc_RNA (1)...(19): siRNA sense strand
ccucaacaacaacuucaug

SEQ ID NO: 89738 - RNA, 19 nt, Homo sapiens
  misc_RNA (1)...(19): siRNA sense strand
gcagaugcaagauaaauuu

SEQ ID NO: 89739 - RNA, 19 nt, Homo sapiens
  misc_RNA (1)...(19): siRNA sense strand
uggaagaacuggaaaguga

SEQ ID NO: 89740 - RNA, 19 nt, Homo sapiens
  misc_RNA (1)...(19): siRNA sense strand
gagaauugaugauaugagu

SEQ ID NO: 89741 - RNA, 19 nt, Homo sapiens
  misc_RNA (1)...(19): siRNA sense strand
gauaugaguagucgcauug

SEQ ID NO: 89742 - RNA, 19 nt, Homo sapiens
  misc_RNA (1)...(19): siRNA sense strand
gaauugaugauaugaguag

SEQ ID NO: 89743 - RNA, 19 nt, Homo sapiens
  misc_RNA (1)...(19): siRNA sense strand
ccagaucauugggagaauu

SEQ ID NO: 89744 - RNA, 19 nt, Homo sapiens
  misc_RNA (1)...(19): siRNA sense strand
ggaagaacuggaaagugaa

SEQ ID NO: 89745 - RNA, 19 nt, Homo sapiens
  misc_RNA (1)...(19): siRNA sense strand
ucgcauugaugaucuggaa

SEQ ID NO: 89746 - RNA, 19 nt, Homo sapiens
  misc_RNA (1)...(19): siRNA sense strand
gaccagaucauugggagaa

SEQ ID NO: 89747 - RNA, 19 nt, Homo sapiens
  misc_RNA (1)...(19): siRNA sense strand
gaugcaagauaaauuucag

SEQ ID NO: 89748 - RNA, 19 nt, Homo sapiens
  misc_RNA (1)...(19): siRNA sense strand
ugggagaauugaugauaug

SEQ ID NO: 89749 - RNA, 19 nt, Homo sapiens
  misc_RNA (1)...(19): siRNA sense strand
ugaguagucgcauugauga

SEQ ID NO: 89750 - RNA, 19 nt, Homo sapiens
  misc_RNA (1)...(19): siRNA sense strand
ugauaugaguagucgcauu

SEQ ID NO: 89751 - RNA, 19 nt, Homo sapiens
  misc_RNA (1)...(19): siRNA sense strand
guagucgcauugaugaucu

SEQ ID NO: 89752 - RNA, 19 nt, Homo sapiens
  misc_RNA (1)...(19): siRNA sense strand
cagcagaugcaagauaaau

SEQ ID NO: 89753 - RNA, 19 nt, Homo sapiens
  misc_RNA (1)...(19): siRNA sense strand
uugaugaucuggaaaagaa

SEQ ID NO: 89754 - RNA, 19 nt, Homo sapiens
  misc_RNA (1)...(19): siRNA sense strand
cagaucauugggagaauug

SEQ ID NO: 89755 - RNA, 19 nt, Homo sapiens
  misc_RNA (1)...(19): siRNA sense strand
gcagcagaugcaagauaaa

SEQ ID NO: 89756 - RNA, 19 nt, Homo sapiens
  misc_RNA (1)...(19): siRNA sense strand
gauaaauuucagaccaugu

SEQ ID NO: 89757 - RNA, 19 nt, Homo sapiens
  misc_RNA (1)...(19): siRNA sense strand
uugggagaauugaugauau

SEQ ID NO: 89758 - RNA, 19 nt, Homo sapiens
  misc_RNA (1)...(19): siRNA sense strand
gggagaauugaugauauga

SEQ ID NO: 89759 - RNA, 19 nt, Homo sapiens
  misc_RNA (1)...(19): siRNA sense strand
uaugaguagucgcauugau

SEQ ID NO: 89760 - RNA, 19 nt, Homo sapiens
  misc_RNA (1)...(19): siRNA sense strand
ggagaauugaugauaugag

SEQ ID NO: 89761 - RNA, 19 nt, Homo sapiens
  misc_RNA (1)...(19): siRNA sense strand
gaugaucuggaaaagaaua

SEQ ID NO: 89762 - RNA, 19 nt, Homo sapiens
  misc_RNA (1)...(19): siRNA sense strand
gagacaaauuugggccuua

SEQ ID NO: 89763 - RNA, 19 nt, Homo sapiens
  misc_RNA (1)...(19): siRNA sense strand
agagaaagcugucccugau

SEQ ID NO: 89764 - RNA, 19 nt, Homo sapiens
  misc_RNA (1)...(19): siRNA sense strand
gagaauggacccugaugga

SEQ ID NO: 89765 - RNA, 19 nt, Homo sapiens
  misc_RNA (1)...(19): siRNA sense strand
gggaccaguuuccucguaa

SEQ ID NO: 89766 - RNA, 19 nt, Homo sapiens
  misc_RNA (1)...(19): siRNA sense strand
uccagucgccuucuacuua

SEQ ID NO: 89767 - RNA, 19 nt, Homo sapiens
  misc_RNA (1)...(19): siRNA sense strand
acauggagcuguccuugau

SEQ ID NO: 89768 - RNA, 19 nt, Homo sapiens
  misc_RNA (1)...(19): siRNA sense strand
gcaagcugauccagugucu

SEQ ID NO: 89769 - RNA, 19 nt, Homo sapiens
  misc_RNA (1)...(19): siRNA sense strand
gcccaacaccugccaaguu

SEQ ID NO: 89770 - RNA, 19 nt, Homo sapiens
  misc_RNA (1)...(19): siRNA sense strand
cccaacaccugccaaguuc

SEQ ID NO: 89771 - RNA, 19 nt, Homo sapiens
  misc_RNA (1)...(19): siRNA sense strand
ggacaggagcccagagagu

SEQ ID NO: 89772 - RNA, 19 nt, Homo sapiens
  misc_RNA (1)...(19): siRNA sense strand
gcugauccagugucucuuu

SEQ ID NO: 89773 - RNA, 19 nt, Homo sapiens
  misc_RNA (1)...(19): siRNA sense strand
caacaccugccaaguucaa

SEQ ID NO: 89774 - RNA, 19 nt, Homo sapiens
  misc_RNA (1)...(19): siRNA sense strand
ggacccugauggacuugga

SEQ ID NO: 89775 - RNA, 19 nt, Homo sapiens
  misc_RNA (1)...(19): siRNA sense strand
guucaacaccugcccucua

SEQ ID NO: 89776 - RNA, 19 nt, Homo sapiens
  misc_RNA (1)...(19): siRNA sense strand
ggaagguggugagcaucga

SEQ ID NO: 89777 - RNA, 19 nt, Homo sapiens
  misc_RNA (1)...(19): siRNA sense strand
cgggaccaguuuccucgua

SEQ ID NO: 89778 - RNA, 19 nt, Homo sapiens
  misc_RNA (1)...(19): siRNA sense strand
ggaccaguuuccucguaag

SEQ ID NO: 89779 - RNA, 19 nt, Homo sapiens
  misc_RNA (1)...(19): siRNA sense strand
agacaaauuugggccuuag

SEQ ID NO: 89780 - RNA, 19 nt, Homo sapiens
  misc_RNA (1)...(19): siRNA sense strand
gggcuuuaaccauuuauag

SEQ ID NO: 89781 - RNA, 19 nt, Homo sapiens
  misc_RNA (1)...(19): siRNA sense strand
ugggcgaggugcaggcuuu

SEQ ID NO: 89782 - RNA, 19 nt, Homo sapiens
  misc_RNA (1)...(19): siRNA sense strand
gaaccugcagggccucuag

SEQ ID NO: 89783 - RNA, 19 nt, Homo sapiens
  misc_RNA (1)...(19): siRNA sense strand
gagaaagcugucccugaug

SEQ ID NO: 89784 - RNA, 19 nt, Homo sapiens
  misc_RNA (1)...(19): siRNA sense strand
cagcagcaccgggucauug

SEQ ID NO: 89785 - RNA, 19 nt, Homo sapiens
  misc_RNA (1)...(19): siRNA sense strand
cccaguauuucaagcauag

SEQ ID NO: 89786 - RNA, 19 nt, Homo sapiens
  misc_RNA (1)...(19): siRNA sense strand
gcuuuaaccauuuauagca

SEQ ID NO: 89787 - RNA, 19 nt, Homo sapiens
  misc_RNA (1)...(19): siRNA sense strand
aauggacccugauggacuu

SEQ ID NO: 89788 - RNA, 19 nt, Homo sapiens
  misc_RNA (1)...(19): siRNA sense strand
ccagucgccuucuacuuac

SEQ ID NO: 89789 - RNA, 19 nt, Homo sapiens
  misc_RNA (1)...(19): siRNA sense strand
cagcagaacgagaucuugu

SEQ ID NO: 89790 - RNA, 19 nt, Homo sapiens
  misc_RNA (1)...(19): siRNA sense strand
ugacaucccagaagacucu

SEQ ID NO: 89791 - RNA, 19 nt, Homo sapiens
  misc_RNA (1)...(19): siRNA sense strand
cugcagggccucuagaugu

SEQ ID NO: 89792 - RNA, 19 nt, Homo sapiens
  misc_RNA (1)...(19): siRNA sense strand
ugauggacuuggacaugga

SEQ ID NO: 89793 - RNA, 19 nt, Homo sapiens
  misc_RNA (1)...(19): siRNA sense strand
caaugcaggaggcaagaga

SEQ ID NO: 89794 - RNA, 19 nt, Homo sapiens
  misc_RNA (1)...(19): siRNA sense strand
gcccaggaaugcccaacag

SEQ ID NO: 89795 - RNA, 19 nt, Homo sapiens
  misc_RNA (1)...(19): siRNA sense strand
ugcgccaacucaacaugua

SEQ ID NO: 89796 - RNA, 19 nt, Homo sapiens
  misc_RNA (1)...(19): siRNA sense strand
gcagcagaacgagaucuug

SEQ ID NO: 89797 - RNA, 19 nt, Homo sapiens
  misc_RNA (1)...(19): siRNA sense strand
uuucaagcauagcaacaug

SEQ ID NO: 89798 - RNA, 19 nt, Homo sapiens
  misc_RNA (1)...(19): siRNA sense strand
agccugagcuggcggucaa

SEQ ID NO: 89799 - RNA, 19 nt, Homo sapiens
  misc_RNA (1)...(19): siRNA sense strand
gcaggaggcaagagaaagc

SEQ ID NO: 89800 - RNA, 19 nt, Homo sapiens
  misc_RNA (1)...(19): siRNA sense strand
ucaagaaaguguggaaccu

SEQ ID NO: 89801 - RNA, 19 nt, Homo sapiens
  misc_RNA (1)...(19): siRNA sense strand
uaagcgaccagagccguuu

SEQ ID NO: 89802 - RNA, 19 nt, Homo sapiens
  misc_RNA (1)...(19): siRNA sense strand
ucaggcagcagaacgagau

SEQ ID NO: 89803 - RNA, 19 nt, Homo sapiens
  misc_RNA (1)...(19): siRNA sense strand
gcgagaauggacccugaug

SEQ ID NO: 89804 - RNA, 19 nt, Homo sapiens
  misc_RNA (1)...(19): siRNA sense strand
gcaagugccuagcuaugaa

SEQ ID NO: 89805 - RNA, 19 nt, Homo sapiens
  misc_RNA (1)...(19): siRNA sense strand
gaagccgggucaucuauuc

SEQ ID NO: 89806 - RNA, 19 nt, Homo sapiens
  misc_RNA (1)...(19): siRNA sense strand
gaccuugaccuacgaguuu

SEQ ID NO: 89807 - RNA, 19 nt, Homo sapiens
  misc_RNA (1)...(19): siRNA sense strand
ggaagucagugcagcucaa

SEQ ID NO: 89808 - RNA, 19 nt, Homo sapiens
  misc_RNA (1)...(19): siRNA sense strand
caacagcucggcacccauu

SEQ ID NO: 89809 - RNA, 19 nt, Homo sapiens
  misc_RNA (1)...(19): siRNA sense strand
uuccaucgcugcccuugua

SEQ ID NO: 89810 - RNA, 19 nt, Homo sapiens
  misc_RNA (1)...(19): siRNA sense strand
ggucaucuauuccgaaagc

SEQ ID NO: 89811 - RNA, 19 nt, Homo sapiens
  misc_RNA (1)...(19): siRNA sense strand
caggaucaccgccuacaaa

SEQ ID NO: 89812 - RNA, 19 nt, Homo sapiens
  misc_RNA (1)...(19): siRNA sense strand
ggaagccgggucaucuauu

SEQ ID NO: 89813 - RNA, 19 nt, Homo sapiens
  misc_RNA (1)...(19): siRNA sense strand
ggaccucagugcccuucug

SEQ ID NO: 89814 - RNA, 19 nt, Homo sapiens
  misc_RNA (1)...(19): siRNA sense strand
ggucuuaaagggcaggaaa

SEQ ID NO: 89815 - RNA, 19 nt, Homo sapiens
  misc_RNA (1)...(19): siRNA sense strand
uuaaagggcaggaaauaca

SEQ ID NO: 89816 - RNA, 19 nt, Homo sapiens
  misc_RNA (1)...(19): siRNA sense strand
gggcaggaaauacacuuug

SEQ ID NO: 89817 - RNA, 19 nt, Homo sapiens
  misc_RNA (1)...(19): siRNA sense strand
cgggucaucuauuccgaaa

SEQ ID NO: 89818 - RNA, 19 nt, Homo sapiens
  misc_RNA (1)...(19): siRNA sense strand
cuaugcaagugccuagcua

SEQ ID NO: 89819 - RNA, 19 nt, Homo sapiens
  misc_RNA (1)...(19): siRNA sense strand
ucuuaaagggcaggaaaua

SEQ ID NO: 89820 - RNA, 19 nt, Homo sapiens
  misc_RNA (1)...(19): siRNA sense strand
gaagucagugcagcucaau

SEQ ID NO: 89821 - RNA, 19 nt, Homo sapiens
  misc_RNA (1)...(19): siRNA sense strand
agucagugcagcucaauug

SEQ ID NO: 89822 - RNA, 19 nt, Homo sapiens
  misc_RNA (1)...(19): siRNA sense strand
ggcaggaaauacacuuugc

SEQ ID NO: 89823 - RNA, 19 nt, Homo sapiens
  misc_RNA (1)...(19): siRNA sense strand
ccaacgugaccuugaccua

SEQ ID NO: 89824 - RNA, 19 nt, Homo sapiens
  misc_RNA (1)...(19): siRNA sense strand
uaugaagucccaggcguaa

SEQ ID NO: 89825 - RNA, 19 nt, Homo sapiens
  misc_RNA (1)...(19): siRNA sense strand
uagggauccuccucacugu

SEQ ID NO: 89826 - RNA, 19 nt, Homo sapiens
  misc_RNA (1)...(19): siRNA sense strand
ugugggcgcugcguaccua

SEQ ID NO: 89827 - RNA, 19 nt, Homo sapiens
  misc_RNA (1)...(19): siRNA sense strand
cugcguaccuaugcaagug

SEQ ID NO: 89828 - RNA, 19 nt, Homo sapiens
  misc_RNA (1)...(19): siRNA sense strand
gccuggaucuggccaacgu

SEQ ID NO: 89829 - RNA, 19 nt, Homo sapiens
  misc_RNA (1)...(19): siRNA sense strand
gcucggcacccauuacacu

SEQ ID NO: 89830 - RNA, 19 nt, Homo sapiens
  misc_RNA (1)...(19): siRNA sense strand
gaagccgggucaucuauuc

SEQ ID NO: 89831 - RNA, 19 nt, Homo sapiens
  misc_RNA (1)...(19): siRNA sense strand
gaccuugaccuacgaguuu

SEQ ID NO: 89832 - RNA, 19 nt, Homo sapiens
  misc_RNA (1)...(19): siRNA sense strand
ggaagucagugcagcucaa

SEQ ID NO: 89833 - RNA, 19 nt, Homo sapiens
  misc_RNA (1)...(19): siRNA sense strand
caacagcucggcacccauu

SEQ ID NO: 89834 - RNA, 19 nt, Homo sapiens
  misc_RNA (1)...(19): siRNA sense strand
ggucaucuauuccgaaagc

SEQ ID NO: 89835 - RNA, 19 nt, Homo sapiens
  misc_RNA (1)...(19): siRNA sense strand
caggaucaccgccuacaaa

SEQ ID NO: 89836 - RNA, 19 nt, Homo sapiens
  misc_RNA (1)...(19): siRNA sense strand
ggaagccgggucaucuauu

SEQ ID NO: 89837 - RNA, 19 nt, Homo sapiens
  misc_RNA (1)...(19): siRNA sense strand
ggaccucagugcccuucug

SEQ ID NO: 89838 - RNA, 19 nt, Homo sapiens
  misc_RNA (1)...(19): siRNA sense strand
ggucuuaaagggcaggaaa

SEQ ID NO: 89839 - RNA, 19 nt, Homo sapiens
  misc_RNA (1)...(19): siRNA sense strand
uuaaagggcaggaaauaca

SEQ ID NO: 89840 - RNA, 19 nt, Homo sapiens
  misc_RNA (1)...(19): siRNA sense strand
gggcaggaaauacacuuug

SEQ ID NO: 89841 - RNA, 19 nt, Homo sapiens
  misc_RNA (1)...(19): siRNA sense strand
cgggucaucuauuccgaaa

SEQ ID NO: 89842 - RNA, 19 nt, Homo sapiens
  misc_RNA (1)...(19): siRNA sense strand
ucuuaaagggcaggaaaua

SEQ ID NO: 89843 - RNA, 19 nt, Homo sapiens
  misc_RNA (1)...(19): siRNA sense strand
ggcaggaaauacacuuugc

SEQ ID NO: 89844 - RNA, 19 nt, Homo sapiens
  misc_RNA (1)...(19): siRNA sense strand
gaagucagugcagcucaau

SEQ ID NO: 89845 - RNA, 19 nt, Homo sapiens
  misc_RNA (1)...(19): siRNA sense strand
agucagugcagcucaauug

SEQ ID NO: 89846 - RNA, 19 nt, Homo sapiens
  misc_RNA (1)...(19): siRNA sense strand
ccaacgugaccuugaccua

SEQ ID NO: 89847 - RNA, 19 nt, Homo sapiens
  misc_RNA (1)...(19): siRNA sense strand
gccuggaucuggccaacgu

SEQ ID NO: 89848 - RNA, 19 nt, Homo sapiens
  misc_RNA (1)...(19): siRNA sense strand
gcucggcacccauuacacu

SEQ ID NO: 89849 - RNA, 19 nt, Homo sapiens
  misc_RNA (1)...(19): siRNA sense strand
cuagaucgcuugacaauau

SEQ ID NO: 89850 - RNA, 19 nt, Homo sapiens
  misc_RNA (1)...(19): siRNA sense strand
gaagucagguuccauuugg

SEQ ID NO: 89851 - RNA, 19 nt, Homo sapiens
  misc_RNA (1)...(19): siRNA sense strand
gcacugaguucaagagcau

SEQ ID NO: 89852 - RNA, 19 nt, Homo sapiens
  misc_RNA (1)...(19): siRNA sense strand
gcaggagggucgacaugga

SEQ ID NO: 89853 - RNA, 19 nt, Homo sapiens
  misc_RNA (1)...(19): siRNA sense strand
gaaagacggcacugaguuc

SEQ ID NO: 89854 - RNA, 19 nt, Homo sapiens
  misc_RNA (1)...(19): siRNA sense strand
cauagaaucaggauagaaa

SEQ ID NO: 89855 - RNA, 19 nt, Homo sapiens
  misc_RNA (1)...(19): siRNA sense strand
gcagaagucagguuccauu

SEQ ID NO: 89856 - RNA, 19 nt, Homo sapiens
  misc_RNA (1)...(19): siRNA sense strand
ggcagaaugugaacaaagu

SEQ ID NO: 89857 - RNA, 19 nt, Homo sapiens
  misc_RNA (1)...(19): siRNA sense strand
ugaacaaagugaauuccaa

SEQ ID NO: 89858 - RNA, 19 nt, Homo sapiens
  misc_RNA (1)...(19): siRNA sense strand
caaagcaagccgacaguga

SEQ ID NO: 89859 - RNA, 19 nt, Homo sapiens
  misc_RNA (1)...(19): siRNA sense strand
agauagccaucacgcauaa

SEQ ID NO: 89860 - RNA, 19 nt, Homo sapiens
  misc_RNA (1)...(19): siRNA sense strand
aaacaagaucaacagguua

SEQ ID NO: 89861 - RNA, 19 nt, Homo sapiens
  misc_RNA (1)...(19): siRNA sense strand
gagagcagccgcuaucagu

SEQ ID NO: 89862 - RNA, 19 nt, Homo sapiens
  misc_RNA (1)...(19): siRNA sense strand
gcagaaaauucgagacaug

SEQ ID NO: 89863 - RNA, 19 nt, Homo sapiens
  misc_RNA (1)...(19): siRNA sense strand
gagcagccgcuaucaguuc

SEQ ID NO: 89864 - RNA, 19 nt, Homo sapiens
  misc_RNA (1)...(19): siRNA sense strand
gggaaaggcugagacaaaa

SEQ ID NO: 89865 - RNA, 19 nt, Homo sapiens
  misc_RNA (1)...(19): siRNA sense strand
cgggaaaggcugagacaaa

SEQ ID NO: 89866 - RNA, 19 nt, Homo sapiens
  misc_RNA (1)...(19): siRNA sense strand
acagugacaucccucuaga

SEQ ID NO: 89867 - RNA, 19 nt, Homo sapiens
  misc_RNA (1)...(19): siRNA sense strand
aaaacaagaucaacagguu

SEQ ID NO: 89868 - RNA, 19 nt, Homo sapiens
  misc_RNA (1)...(19): siRNA sense strand
aaacaugaaucgggaaagg

SEQ ID NO: 89869 - RNA, 19 nt, Homo sapiens
  misc_RNA (1)...(19): siRNA sense strand
gaaugugaacaaagugaau

SEQ ID NO: 89870 - RNA, 19 nt, Homo sapiens
  misc_RNA (1)...(19): siRNA sense strand
agaaagacggcacugaguu

SEQ ID NO: 89871 - RNA, 19 nt, Homo sapiens
  misc_RNA (1)...(19): siRNA sense strand
cgaaggagccaacaaaaga

SEQ ID NO: 89872 - RNA, 19 nt, Homo sapiens
  misc_RNA (1)...(19): siRNA sense strand
gcuaucaguuccggaaucu

SEQ ID NO: 89873 - RNA, 19 nt, Homo sapiens
  misc_RNA (1)...(19): siRNA sense strand
cagauugccugcagaaaau

SEQ ID NO: 89874 - RNA, 19 nt, Homo sapiens
  misc_RNA (1)...(19): siRNA sense strand
cagaagucagguuccauuu

SEQ ID NO: 89875 - RNA, 19 nt, Homo sapiens
  misc_RNA (1)...(19): siRNA sense strand
gaaaggcugagacaaaaga

SEQ ID NO: 89876 - RNA, 19 nt, Homo sapiens
  misc_RNA (1)...(19): siRNA sense strand
caccgaaggagccaacaaa

SEQ ID NO: 89877 - RNA, 19 nt, Homo sapiens
  misc_RNA (1)...(19): siRNA sense strand
uucgagacaugaucacuga

SEQ ID NO: 89878 - RNA, 19 nt, Homo sapiens
  misc_RNA (1)...(19): siRNA sense strand
cagaaugugaacaaaguga

SEQ ID NO: 89879 - RNA, 19 nt, Homo sapiens
  misc_RNA (1)...(19): siRNA sense strand
aagauagccaucacgcaua

SEQ ID NO: 89880 - RNA, 19 nt, Homo sapiens
  misc_RNA (1)...(19): siRNA sense strand
cuucauagaaucaggauag

SEQ ID NO: 89881 - RNA, 19 nt, Homo sapiens
  misc_RNA (1)...(19): siRNA sense strand
gcaagccgacagugacauc

SEQ ID NO: 89882 - RNA, 19 nt, Homo sapiens
  misc_RNA (1)...(19): siRNA sense strand
gacagugacaucccucuag

SEQ ID NO: 89883 - RNA, 19 nt, Homo sapiens
  misc_RNA (1)...(19): siRNA sense strand
agacggcacugaguucaag

SEQ ID NO: 89884 - RNA, 19 nt, Homo sapiens
  misc_RNA (1)...(19): siRNA sense strand
ucauucugcuguaaagaca

SEQ ID NO: 89885 - RNA, 19 nt, Homo sapiens
  misc_RNA (1)...(19): siRNA sense strand
cgacagugacaucccucua

SEQ ID NO: 89886 - RNA, 19 nt, Homo sapiens
  misc_RNA (1)...(19): siRNA sense strand
gaaaacaugaaucgggaaa

SEQ ID NO: 89887 - RNA, 19 nt, Homo sapiens
  misc_RNA (1)...(19): siRNA sense strand
gggcagaaugugaacaaag

SEQ ID NO: 89888 - RNA, 19 nt, Homo sapiens
  misc_RNA (1)...(19): siRNA sense strand
caagaucaacagguuagga

SEQ ID NO: 89889 - RNA, 19 nt, Homo sapiens
  misc_RNA (1)...(19): siRNA sense strand
cagaaagacggcacugagu

SEQ ID NO: 89890 - RNA, 19 nt, Homo sapiens
  misc_RNA (1)...(19): siRNA sense strand
agaagucagguuccauuug

SEQ ID NO: 89891 - RNA, 19 nt, Homo sapiens
  misc_RNA (1)...(19): siRNA sense strand
gcagaaugugaacaaagug

SEQ ID NO: 89892 - RNA, 19 nt, Homo sapiens
  misc_RNA (1)...(19): siRNA sense strand
gaaggagccaacaaaagaa

SEQ ID NO: 89893 - RNA, 19 nt, Homo sapiens
  misc_RNA (1)...(19): siRNA sense strand
gagggucgacauggacuga

SEQ ID NO: 89894 - RNA, 19 nt, Homo sapiens
  misc_RNA (1)...(19): siRNA sense strand
ggaagaggaugaugaacaa

SEQ ID NO: 89895 - RNA, 19 nt, Homo sapiens
  misc_RNA (1)...(19): siRNA sense strand
gagcauagguugucugcaa

SEQ ID NO: 89896 - RNA, 19 nt, Homo sapiens
  misc_RNA (1)...(19): siRNA sense strand
gcaagcgucuagaucauuu

SEQ ID NO: 89897 - RNA, 19 nt, Homo sapiens
  misc_RNA (1)...(19): siRNA sense strand
gaacaacucugcugaaaau

SEQ ID NO: 89898 - RNA, 19 nt, Homo sapiens
  misc_RNA (1)...(19): siRNA sense strand
gaaggcugccgaaauguua

SEQ ID NO: 89899 - RNA, 19 nt, Homo sapiens
  misc_RNA (1)...(19): siRNA sense strand
gauaucagcuuagaagaga

SEQ ID NO: 89900 - RNA, 19 nt, Homo sapiens
  misc_RNA (1)...(19): siRNA sense strand
cuucagagguggauugaua

SEQ ID NO: 89901 - RNA, 19 nt, Homo sapiens
  misc_RNA (1)...(19): siRNA sense strand
ugagaaggcugccgaaaug

SEQ ID NO: 89902 - RNA, 19 nt, Homo sapiens
  misc_RNA (1)...(19): siRNA sense strand
ucggaaauauggagcauua

SEQ ID NO: 89903 - RNA, 19 nt, Homo sapiens
  misc_RNA (1)...(19): siRNA sense strand
aaauaaagauccugagaga

SEQ ID NO: 89904 - RNA, 19 nt, Homo sapiens
  misc_RNA (1)...(19): siRNA sense strand
ggaaaguggucaagcagau

SEQ ID NO: 89905 - RNA, 19 nt, Homo sapiens
  misc_RNA (1)...(19): siRNA sense strand
cgagaacacuuuauaaacu

SEQ ID NO: 89906 - RNA, 19 nt, Homo sapiens
  misc_RNA (1)...(19): siRNA sense strand
gaaaucugcuguggaaagu

SEQ ID NO: 89907 - RNA, 19 nt, Homo sapiens
  misc_RNA (1)...(19): siRNA sense strand
aaugaaaucugcuguggaa

SEQ ID NO: 89908 - RNA, 19 nt, Homo sapiens
  misc_RNA (1)...(19): siRNA sense strand
gagcauugaccaggaaaua

SEQ ID NO: 89909 - RNA, 19 nt, Homo sapiens
  misc_RNA (1)...(19): siRNA sense strand
ggaaauaaagauccugaga

SEQ ID NO: 89910 - RNA, 19 nt, Homo sapiens
  misc_RNA (1)...(19): siRNA sense strand
uaucgcagcucgacuuguu

SEQ ID NO: 89911 - RNA, 19 nt, Homo sapiens
  misc_RNA (1)...(19): siRNA sense strand
auaaagauccugagagaaa

SEQ ID NO: 89912 - RNA, 19 nt, Homo sapiens
  misc_RNA (1)...(19): siRNA sense strand
gcauugaccaggaaauaaa

SEQ ID NO: 89913 - RNA, 19 nt, Homo sapiens
  misc_RNA (1)...(19): siRNA sense strand
gauacaagcagaagaagga

SEQ ID NO: 89914 - RNA, 19 nt, Homo sapiens
  misc_RNA (1)...(19): siRNA sense strand
ggcaucaacuucuaacuca

SEQ ID NO: 89915 - RNA, 19 nt, Homo sapiens
  misc_RNA (1)...(19): siRNA sense strand
uagguugucugcaaugaaa

SEQ ID NO: 89916 - RNA, 19 nt, Homo sapiens
  misc_RNA (1)...(19): siRNA sense strand
ggaggaagaggaugaugaa

SEQ ID NO: 89917 - RNA, 19 nt, Homo sapiens
  misc_RNA (1)...(19): siRNA sense strand
uagaagagauugagagcau

SEQ ID NO: 89918 - RNA, 19 nt, Homo sapiens
  misc_RNA (1)...(19): siRNA sense strand
ggauugauaucagcuuaga

SEQ ID NO: 89919 - RNA, 19 nt, Homo sapiens
  misc_RNA (1)...(19): siRNA sense strand
gcuuggaccuccuugagaa

SEQ ID NO: 89920 - RNA, 19 nt, Homo sapiens
  misc_RNA (1)...(19): siRNA sense strand
caagagaggcaucaacuuc

SEQ ID NO: 89921 - RNA, 19 nt, Homo sapiens
  misc_RNA (1)...(19): siRNA sense strand
gcuaucauguggcagaguu

SEQ ID NO: 89922 - RNA, 19 nt, Homo sapiens
  misc_RNA (1)...(19): siRNA sense strand
gaagagauugagagcauug

SEQ ID NO: 89923 - RNA, 19 nt, Homo sapiens
  misc_RNA (1)...(19): siRNA sense strand
guggauugauaucagcuua

SEQ ID NO: 89924 - RNA, 19 nt, Homo sapiens
  misc_RNA (1)...(19): siRNA sense strand
gcaacaggaagaacaagaa

SEQ ID NO: 89925 - RNA, 19 nt, Homo sapiens
  misc_RNA (1)...(19): siRNA sense strand
ccaagucugccaacuauga

SEQ ID NO: 89926 - RNA, 19 nt, Homo sapiens
  misc_RNA (1)...(19): siRNA sense strand
caaggagcccucaccauga

SEQ ID NO: 89927 - RNA, 19 nt, Homo sapiens
  misc_RNA (1)...(19): siRNA sense strand
caacuaugacggugaguga

SEQ ID NO: 89928 - RNA, 19 nt, Homo sapiens
  misc_RNA (1)...(19): siRNA sense strand
agaaggaguuggagcauag

SEQ ID NO: 89929 - RNA, 19 nt, Homo sapiens
  misc_RNA (1)...(19): siRNA sense strand
gcucgagaacacuuuauaa

SEQ ID NO: 89930 - RNA, 19 nt, Homo sapiens
  misc_RNA (1)...(19): siRNA sense strand
agagaggcaucaacuucua

SEQ ID NO: 89931 - RNA, 19 nt, Homo sapiens
  misc_RNA (1)...(19): siRNA sense strand
ccaauuccuccauggcuua

SEQ ID NO: 89932 - RNA, 19 nt, Homo sapiens
  misc_RNA (1)...(19): siRNA sense strand
gagcaacaucggaaauaug

SEQ ID NO: 89933 - RNA, 19 nt, Homo sapiens
  misc_RNA (1)...(19): siRNA sense strand
caaggcagcaccagaggaa

SEQ ID NO: 89934 - RNA, 19 nt, Homo sapiens
  misc_RNA (1)...(19): siRNA sense strand
ucaaagacaggcuaaaaua

SEQ ID NO: 89935 - RNA, 19 nt, Homo sapiens
  misc_RNA (1)...(19): siRNA sense strand
ugagcaacaucggaaauau

SEQ ID NO: 89936 - RNA, 19 nt, Homo sapiens
  misc_RNA (1)...(19): siRNA sense strand
aaggagcccucaccaugaa

SEQ ID NO: 89937 - RNA, 19 nt, Homo sapiens
  misc_RNA (1)...(19): siRNA sense strand
ugagagcauugaccaggaa

SEQ ID NO: 89938 - RNA, 19 nt, Homo sapiens
  misc_RNA (1)...(19): siRNA sense strand
guucgugaauauuaucuuc

SEQ ID NO: 89939 - RNA, 19 nt, Homo sapiens
  misc_RNA (1)...(19): siRNA sense strand
aaguagaaguggcgacuga

SEQ ID NO: 89940 - RNA, 19 nt, Homo sapiens
  misc_RNA (1)...(19): siRNA sense strand
aagaaggaguuggagcaua

SEQ ID NO: 89941 - RNA, 19 nt, Homo sapiens
  misc_RNA (1)...(19): siRNA sense strand
gagaggcaucaacuucuaa

SEQ ID NO: 89942 - RNA, 19 nt, Homo sapiens
  misc_RNA (1)...(19): siRNA sense strand
acaggaagaacaagaagaa

SEQ ID NO: 89943 - RNA, 19 nt, Homo sapiens
  misc_RNA (1)...(19): siRNA sense strand
gaaaaucacacugccaauu

SEQ ID NO: 89944 - RNA, 19 nt, Homo sapiens
  misc_RNA (1)...(19): siRNA sense strand
uaaagauccugagagaaag

SEQ ID NO: 89945 - RNA, 19 nt, Homo sapiens
  misc_RNA (1)...(19): siRNA sense strand
agagauacaagcagaagaa

SEQ ID NO: 89946 - RNA, 19 nt, Homo sapiens
  misc_RNA (1)...(19): siRNA sense strand
ccagcaagcgucuagauca

SEQ ID NO: 89947 - RNA, 19 nt, Homo sapiens
  misc_RNA (1)...(19): siRNA sense strand
gacggugagugacugguau

SEQ ID NO: 89948 - RNA, 19 nt, Homo sapiens
  misc_RNA (1)...(19): siRNA sense strand
cauagguugucugcaauga

SEQ ID NO: 89949 - RNA, 19 nt, Homo sapiens
  misc_RNA (1)...(19): siRNA sense strand
uaacucagugccauugcua

SEQ ID NO: 89950 - RNA, 19 nt, Homo sapiens
  misc_RNA (1)...(19): siRNA sense strand
cagcaagcgucuagaucau

SEQ ID NO: 89951 - RNA, 19 nt, Homo sapiens
  misc_RNA (1)...(19): siRNA sense strand
ugaacaaacacuccacaga

SEQ ID NO: 89952 - RNA, 19 nt, Homo sapiens
  misc_RNA (1)...(19): siRNA sense strand
agaggaugaugaacaaaca

SEQ ID NO: 89953 - RNA, 19 nt, Homo sapiens
  misc_RNA (1)...(19): siRNA sense strand
gaaaguggucaagcagaug

SEQ ID NO: 89954 - RNA, 19 nt, Homo sapiens
  misc_RNA (1)...(19): siRNA sense strand
gcuauggcaucucaaagac

SEQ ID NO: 89955 - RNA, 19 nt, Homo sapiens
  misc_RNA (1)...(19): siRNA sense strand
ccaccgaccugaaguaccu

SEQ ID NO: 89956 - RNA, 19 nt, Homo sapiens
  misc_RNA (1)...(19): siRNA sense strand
caccagaggaauucagaaa

SEQ ID NO: 89957 - RNA, 19 nt, Homo sapiens
  misc_RNA (1)...(19): siRNA sense strand
gagcuguucgaaacuggua

SEQ ID NO: 89958 - RNA, 19 nt, Homo sapiens
  misc_RNA (1)...(19): siRNA sense strand
ggagcugguuauccaaguc

SEQ ID NO: 89959 - RNA, 19 nt, Homo sapiens
  misc_RNA (1)...(19): siRNA sense strand
uauccaagucugccaacua

SEQ ID NO: 89960 - RNA, 19 nt, Homo sapiens
  misc_RNA (1)...(19): siRNA sense strand
augaacaacucugcugaaa

SEQ ID NO: 89961 - RNA, 19 nt, Homo sapiens
  misc_RNA (1)...(19): siRNA sense strand
gaagaggaugaugaacaaa

SEQ ID NO: 89962 - RNA, 19 nt, Homo sapiens
  misc_RNA (1)...(19): siRNA sense strand
ugaaaucugcuguggaaag

SEQ ID NO: 89963 - RNA, 19 nt, Homo sapiens
  misc_RNA (1)...(19): siRNA sense strand
gcguguucgugaauauuau

SEQ ID NO: 89964 - RNA, 19 nt, Homo sapiens
  misc_RNA (1)...(19): siRNA sense strand
ugagcguguucgugaauau

SEQ ID NO: 89965 - RNA, 19 nt, Homo sapiens
  misc_RNA (1)...(19): siRNA sense strand
gaagaaggaguuggagcau

SEQ ID NO: 89966 - RNA, 19 nt, Homo sapiens
  misc_RNA (1)...(19): siRNA sense strand
gaaaagcagcucagcaaca

SEQ ID NO: 89967 - RNA, 19 nt, Homo sapiens
  misc_RNA (1)...(19): siRNA sense strand
gaugagcguguucgugaau

SEQ ID NO: 89968 - RNA, 19 nt, Homo sapiens
  misc_RNA (1)...(19): siRNA sense strand
auccaagucugccaacuau

SEQ ID NO: 89969 - RNA, 19 nt, Homo sapiens
  misc_RNA (1)...(19): siRNA sense strand
gggagugggaugacuggaa

SEQ ID NO: 89970 - RNA, 19 nt, Homo sapiens
  misc_RNA (1)...(19): siRNA sense strand
gaagauuuggaagagauug

SEQ ID NO: 89971 - RNA, 19 nt, Homo sapiens
  misc_RNA (1)...(19): siRNA sense strand
cuccauggcuuauccuagu

SEQ ID NO: 89972 - RNA, 19 nt, Homo sapiens
  misc_RNA (1)...(19): siRNA sense strand
caacaggaagaacaagaag

SEQ ID NO: 89973 - RNA, 19 nt, Homo sapiens
  misc_RNA (1)...(19): siRNA sense strand
acaagcagaagaaggaguu

SEQ ID NO: 89974 - RNA, 19 nt, Homo sapiens
  misc_RNA (1)...(19): siRNA sense strand
ugacugguaugagcaacau

SEQ ID NO: 89975 - RNA, 19 nt, Homo sapiens
  misc_RNA (1)...(19): siRNA sense strand
ugacggugagugacuggua

SEQ ID NO: 89976 - RNA, 19 nt, Homo sapiens
  misc_RNA (1)...(19): siRNA sense strand
gagcguguucgugaauauu

SEQ ID NO: 89977 - RNA, 19 nt, Homo sapiens
  misc_RNA (1)...(19): siRNA sense strand
aaaguggucaagcagauga

SEQ ID NO: 89978 - RNA, 19 nt, Homo sapiens
  misc_RNA (1)...(19): siRNA sense strand
ucagugccauugcuaucau

SEQ ID NO: 89979 - RNA, 19 nt, Homo sapiens
  misc_RNA (1)...(19): siRNA sense strand
cagcucagcaacaggaaga

SEQ ID NO: 89980 - RNA, 19 nt, Homo sapiens
  misc_RNA (1)...(19): siRNA sense strand
gcaucaacuucuaacucau

SEQ ID NO: 89981 - RNA, 19 nt, Homo sapiens
  misc_RNA (1)...(19): siRNA sense strand
agaagagauugagagcauu

SEQ ID NO: 89982 - RNA, 19 nt, Homo sapiens
  misc_RNA (1)...(19): siRNA sense strand
ggcucgagaacacuuuaua

SEQ ID NO: 89983 - RNA, 19 nt, Homo sapiens
  misc_RNA (1)...(19): siRNA sense strand
uaugggaaccgacagaaca

SEQ ID NO: 89984 - RNA, 19 nt, Homo sapiens
  misc_RNA (1)...(19): siRNA sense strand
ggaagaacaagaagaaaag

SEQ ID NO: 89985 - RNA, 19 nt, Homo sapiens
  misc_RNA (1)...(19): siRNA sense strand
ccagaggaauucagaaaag

SEQ ID NO: 89986 - RNA, 19 nt, Homo sapiens
  misc_RNA (1)...(19): siRNA sense strand
gcaccagaggaauucagaa

SEQ ID NO: 89987 - RNA, 19 nt, Homo sapiens
  misc_RNA (1)...(19): siRNA sense strand
caucaacuucuaacucauc

SEQ ID NO: 89988 - RNA, 19 nt, Homo sapiens
  misc_RNA (1)...(19): siRNA sense strand
uaucagcuuagaagagauu

SEQ ID NO: 89989 - RNA, 19 nt, Homo sapiens
  misc_RNA (1)...(19): siRNA sense strand
ugaugagcguguucgugaa

SEQ ID NO: 89990 - RNA, 19 nt, Homo sapiens
  misc_RNA (1)...(19): siRNA sense strand
uguggaaaguggucaagca

SEQ ID NO: 89991 - RNA, 19 nt, Homo sapiens
  misc_RNA (1)...(19): siRNA sense strand
gcauagguugucugcaaug

SEQ ID NO: 89992 - RNA, 19 nt, Homo sapiens
  misc_RNA (1)...(19): siRNA sense strand
cucgagaacacuuuauaaa

SEQ ID NO: 89993 - RNA, 19 nt, Homo sapiens
  misc_RNA (1)...(19): siRNA sense strand
ucaagagaggcaucaacuu

SEQ ID NO: 89994 - RNA, 19 nt, Homo sapiens
  misc_RNA (1)...(19): siRNA sense strand
cagaaucccuggaaaucaa

SEQ ID NO: 89995 - RNA, 19 nt, Homo sapiens
  misc_RNA (1)...(19): siRNA sense strand
cagcaggccuuccuuuguu

SEQ ID NO: 89996 - RNA, 19 nt, Homo sapiens
  misc_RNA (1)...(19): siRNA sense strand
gaaggaccgucuacucauc

SEQ ID NO: 89997 - RNA, 19 nt, Homo sapiens
  misc_RNA (1)...(19): siRNA sense strand
gcaucaguguggaccguua

SEQ ID NO: 89998 - RNA, 19 nt, Homo sapiens
  misc_RNA (1)...(19): siRNA sense strand
caaggugaauggcuggauu

SEQ ID NO: 89999 - RNA, 19 nt, Homo sapiens
  misc_RNA (1)...(19): siRNA sense strand
ugacagcuuugaagauuuc

SEQ ID NO: 90000 - RNA, 19 nt, Homo sapiens
  misc_RNA (1)...(19): siRNA sense strand
ccucaagauucuagcuaua

SEQ ID NO: 90001 - RNA, 19 nt, Homo sapiens
  misc_RNA (1)...(19): siRNA sense strand
gaaacucccucgugaugcu

SEQ ID NO: 90002 - RNA, 19 nt, Homo sapiens
  misc_RNA (1)...(19): siRNA sense strand
gaggacaugggcaacaaua

SEQ ID NO: 90003 - RNA, 19 nt, Homo sapiens
  misc_RNA (1)...(19): siRNA sense strand
cauuaucuaugcccuggua

SEQ ID NO: 90004 - RNA, 19 nt, Homo sapiens
  misc_RNA (1)...(19): siRNA sense strand
ggacaugggcaacaauaca

SEQ ID NO: 90005 - RNA, 19 nt, Homo sapiens
  misc_RNA (1)...(19): siRNA sense strand
gccauggacuccucaagau

SEQ ID NO: 90006 - RNA, 19 nt, Homo sapiens
  misc_RNA (1)...(19): siRNA sense strand
ggugaagaucuuaguaauu

SEQ ID NO: 90007 - RNA, 19 nt, Homo sapiens
  misc_RNA (1)...(19): siRNA sense strand
cauggagagugacagcuuu

SEQ ID NO: 90008 - RNA, 19 nt, Homo sapiens
  misc_RNA (1)...(19): siRNA sense strand
gaaaggugaagaucuuagu

SEQ ID NO: 90009 - RNA, 19 nt, Homo sapiens
  misc_RNA (1)...(19): siRNA sense strand
agugacagcuuugaagauu

SEQ ID NO: 90010 - RNA, 19 nt, Homo sapiens
  misc_RNA (1)...(19): siRNA sense strand
gcccugaccuugcccaucu

SEQ ID NO: 90011 - RNA, 19 nt, Homo sapiens
  misc_RNA (1)...(19): siRNA sense strand
gugacagcuuugaagauuu

SEQ ID NO: 90012 - RNA, 19 nt, Homo sapiens
  misc_RNA (1)...(19): siRNA sense strand
cuacuuggucaaauucaua

SEQ ID NO: 90013 - RNA, 19 nt, Homo sapiens
  misc_RNA (1)...(19): siRNA sense strand
cuggaaaggugaagaucuu

SEQ ID NO: 90014 - RNA, 19 nt, Homo sapiens
  misc_RNA (1)...(19): siRNA sense strand
cccuggaaaucaacaagua

SEQ ID NO: 90015 - RNA, 19 nt, Homo sapiens
  misc_RNA (1)...(19): siRNA sense strand
ggagagugacagcuuugaa

SEQ ID NO: 90016 - RNA, 19 nt, Homo sapiens
  misc_RNA (1)...(19): siRNA sense strand
gcaacaauacagcaaacug

SEQ ID NO: 90017 - RNA, 19 nt, Homo sapiens
  misc_RNA (1)...(19): siRNA sense strand
ucaagauucuagcuauaca

SEQ ID NO: 90018 - RNA, 19 nt, Homo sapiens
  misc_RNA (1)...(19): siRNA sense strand
ccagaaguuucgccaugga

SEQ ID NO: 90019 - RNA, 19 nt, Homo sapiens
  misc_RNA (1)...(19): siRNA sense strand
ggcccugccugucuuacuu

SEQ ID NO: 90020 - RNA, 19 nt, Homo sapiens
  misc_RNA (1)...(19): siRNA sense strand
caaacuggcggaugcuguu

SEQ ID NO: 90021 - RNA, 19 nt, Homo sapiens
  misc_RNA (1)...(19): siRNA sense strand
ugaucaugcuguucugcua

SEQ ID NO: 90022 - RNA, 19 nt, Homo sapiens
  misc_RNA (1)...(19): siRNA sense strand
gaagcgcuacuuggucaaa

SEQ ID NO: 90023 - RNA, 19 nt, Homo sapiens
  misc_RNA (1)...(19): siRNA sense strand
gacagcaggccuuccuuug

SEQ ID NO: 90024 - RNA, 19 nt, Homo sapiens
  misc_RNA (1)...(19): siRNA sense strand
gagagugacagcuuugaag

SEQ ID NO: 90025 - RNA, 19 nt, Homo sapiens
  misc_RNA (1)...(19): siRNA sense strand
gggcaacaauacagcaaac

SEQ ID NO: 90026 - RNA, 19 nt, Homo sapiens
  misc_RNA (1)...(19): siRNA sense strand
ggaaaggugaagaucuuag

SEQ ID NO: 90027 - RNA, 19 nt, Homo sapiens
  misc_RNA (1)...(19): siRNA sense strand
ccucaucuacgccuucauu

SEQ ID NO: 90028 - RNA, 19 nt, Homo sapiens
  misc_RNA (1)...(19): siRNA sense strand
aaaggugaagaucuuagua

SEQ ID NO: 90029 - RNA, 19 nt, Homo sapiens
  misc_RNA (1)...(19): siRNA sense strand
gggcacacuuccacuacuc

SEQ ID NO: 90030 - RNA, 19 nt, Homo sapiens
  misc_RNA (1)...(19): siRNA sense strand
ccgaaggaccgucuacuca

SEQ ID NO: 90031 - RNA, 19 nt, Homo sapiens
  misc_RNA (1)...(19): siRNA sense strand
ggacuccucaagauucuag

SEQ ID NO: 90032 - RNA, 19 nt, Homo sapiens
  misc_RNA (1)...(19): siRNA sense strand
ggccaugcgggucaucuuu

SEQ ID NO: 90033 - RNA, 19 nt, Homo sapiens
  misc_RNA (1)...(19): siRNA sense strand
gucuacucauccaauguua

SEQ ID NO: 90034 - RNA, 19 nt, Homo sapiens
  misc_RNA (1)...(19): siRNA sense strand
cauggacuccucaagauuc

SEQ ID NO: 90035 - RNA, 19 nt, Homo sapiens
  misc_RNA (1)...(19): siRNA sense strand
aaggugaagaucuuaguaa

SEQ ID NO: 90036 - RNA, 19 nt, Homo sapiens
  misc_RNA (1)...(19): siRNA sense strand
caaggacucccugcccaaa

SEQ ID NO: 90037 - RNA, 19 nt, Homo sapiens
  misc_RNA (1)...(19): siRNA sense strand
gcuacuuggucaaauucau

SEQ ID NO: 90038 - RNA, 19 nt, Homo sapiens
  misc_RNA (1)...(19): siRNA sense strand
agacagcaggccuuccuuu

SEQ ID NO: 90039 - RNA, 19 nt, Homo sapiens
  misc_RNA (1)...(19): siRNA sense strand
aggacucccugcccaaaga

SEQ ID NO: 90040 - RNA, 19 nt, Homo sapiens
  misc_RNA (1)...(19): siRNA sense strand
ccauggacuccucaagauu

SEQ ID NO: 90041 - RNA, 19 nt, Homo sapiens
  misc_RNA (1)...(19): siRNA sense strand
cacuuccacuacucucuaa

SEQ ID NO: 90042 - RNA, 19 nt, Homo sapiens
  misc_RNA (1)...(19): siRNA sense strand
ucauaugucucagcaucug

SEQ ID NO: 90043 - RNA, 19 nt, Homo sapiens
  misc_RNA (1)...(19): siRNA sense strand
ucagggcacacuuccacua

SEQ ID NO: 90044 - RNA, 19 nt, Homo sapiens
  misc_RNA (1)...(19): siRNA sense strand
cacgcacacugacccagaa

SEQ ID NO: 90045 - RNA, 19 nt, Homo sapiens
  misc_RNA (1)...(19): siRNA sense strand
acacuuccacuacucucua

SEQ ID NO: 90046 - RNA, 19 nt, Homo sapiens
  misc_RNA (1)...(19): siRNA sense strand
gcuuugaagauuucuggaa

SEQ ID NO: 90047 - RNA, 19 nt, Homo sapiens
  misc_RNA (1)...(19): siRNA sense strand
aaacuggcggaugcuguua

SEQ ID NO: 90048 - RNA, 19 nt, Homo sapiens
  misc_RNA (1)...(19): siRNA sense strand
aggugaagaucuuaguaau

SEQ ID NO: 90049 - RNA, 19 nt, Homo sapiens
  misc_RNA (1)...(19): siRNA sense strand
gcgcuacuuggucaaauuc

SEQ ID NO: 90050 - RNA, 19 nt, Homo sapiens
  misc_RNA (1)...(19): siRNA sense strand
gagugacagcuuugaagau

SEQ ID NO: 90051 - RNA, 19 nt, Homo sapiens
  misc_RNA (1)...(19): siRNA sense strand
gcuguucugcuacggauuc

SEQ ID NO: 90052 - RNA, 19 nt, Homo sapiens
  misc_RNA (1)...(19): siRNA sense strand
cgucuacucauccaauguu

SEQ ID NO: 90053 - RNA, 19 nt, Homo sapiens
  misc_RNA (1)...(19): siRNA sense strand
cgaaggaccgucuacucau

SEQ ID NO: 90054 - RNA, 19 nt, Homo sapiens
  misc_RNA (1)...(19): siRNA sense strand
uaucuaugcccugguauuc

SEQ ID NO: 90055 - RNA, 19 nt, Homo sapiens
  misc_RNA (1)...(19): siRNA sense strand
gaccgucuacucauccaau

SEQ ID NO: 90056 - RNA, 19 nt, Homo sapiens
  misc_RNA (1)...(19): siRNA sense strand
agagugacagcuuugaaga

SEQ ID NO: 90057 - RNA, 19 nt, Homo sapiens
  misc_RNA (1)...(19): siRNA sense strand
accguuaccuggccauugu

SEQ ID NO: 90058 - RNA, 19 nt, Homo sapiens
  misc_RNA (1)...(19): siRNA sense strand
cgccauggacuccucaaga

SEQ ID NO: 90059 - RNA, 19 nt, Homo sapiens
  misc_RNA (1)...(19): siRNA sense strand
ucacguggcuguugauuaa

SEQ ID NO: 90060 - RNA, 19 nt, Homo sapiens
  misc_RNA (1)...(19): siRNA sense strand
aaacuggccuguaucaaua

SEQ ID NO: 90061 - RNA, 19 nt, Homo sapiens
  misc_RNA (1)...(19): siRNA sense strand
ccucuaagcuacaucuuua

SEQ ID NO: 90062 - RNA, 19 nt, Homo sapiens
  misc_RNA (1)...(19): siRNA sense strand
ggaaagccaugacacagaa

SEQ ID NO: 90063 - RNA, 19 nt, Homo sapiens
  misc_RNA (1)...(19): siRNA sense strand
gcacuugcgcuaagaaaua

SEQ ID NO: 90064 - RNA, 19 nt, Homo sapiens
  misc_RNA (1)...(19): siRNA sense strand
gagcagauguacccuuuau

SEQ ID NO: 90065 - RNA, 19 nt, Homo sapiens
  misc_RNA (1)...(19): siRNA sense strand
gcuaagaaauaucccauug

SEQ ID NO: 90066 - RNA, 19 nt, Homo sapiens
  misc_RNA (1)...(19): siRNA sense strand
gaaauucccuacagagucu

SEQ ID NO: 90067 - RNA, 19 nt, Homo sapiens
  misc_RNA (1)...(19): siRNA sense strand
gcaccaagcauuugcauug

SEQ ID NO: 90068 - RNA, 19 nt, Homo sapiens
  misc_RNA (1)...(19): siRNA sense strand
gcagauguacccuuuauug

SEQ ID NO: 90069 - RNA, 19 nt, Homo sapiens
  misc_RNA (1)...(19): siRNA sense strand
gcacaaagcaccacugagu

SEQ ID NO: 90070 - RNA, 19 nt, Homo sapiens
  misc_RNA (1)...(19): siRNA sense strand
gcagacaacugguggaucu

SEQ ID NO: 90071 - RNA, 19 nt, Homo sapiens
  misc_RNA (1)...(19): siRNA sense strand
cuacuuacccuccaacaua

SEQ ID NO: 90072 - RNA, 19 nt, Homo sapiens
  misc_RNA (1)...(19): siRNA sense strand
guacaaguuugacagaaga

SEQ ID NO: 90073 - RNA, 19 nt, Homo sapiens
  misc_RNA (1)...(19): siRNA sense strand
caaugugucugcucugauu

SEQ ID NO: 90074 - RNA, 19 nt, Homo sapiens
  misc_RNA (1)...(19): siRNA sense strand
gcacaucucccuuucuguu

SEQ ID NO: 90075 - RNA, 19 nt, Homo sapiens
  misc_RNA (1)...(19): siRNA sense strand
cuacaucuguuaugaaauc

SEQ ID NO: 90076 - RNA, 19 nt, Homo sapiens
  misc_RNA (1)...(19): siRNA sense strand
uaagaaauaucccauugca

SEQ ID NO: 90077 - RNA, 19 nt, Homo sapiens
  misc_RNA (1)...(19): siRNA sense strand
ccaauuggauggcguuugu

SEQ ID NO: 90078 - RNA, 19 nt, Homo sapiens
  misc_RNA (1)...(19): siRNA sense strand
ggaauaugguuaauguuac

SEQ ID NO: 90079 - RNA, 19 nt, Homo sapiens
  misc_RNA (1)...(19): siRNA sense strand
acacacaggucccucuaaa

SEQ ID NO: 90080 - RNA, 19 nt, Homo sapiens
  misc_RNA (1)...(19): siRNA sense strand
agacacagcugcccuugga

SEQ ID NO: 90081 - RNA, 19 nt, Homo sapiens
  misc_RNA (1)...(19): siRNA sense strand
gacgagacacccacuuaua

SEQ ID NO: 90082 - RNA, 19 nt, Homo sapiens
  misc_RNA (1)...(19): siRNA sense strand
gugagcagauguacccuuu

SEQ ID NO: 90083 - RNA, 19 nt, Homo sapiens
  misc_RNA (1)...(19): siRNA sense strand
ucagauaucggcccaguaa

SEQ ID NO: 90084 - RNA, 19 nt, Homo sapiens
  misc_RNA (1)...(19): siRNA sense strand
caaggcugcuuucacuauu

SEQ ID NO: 90085 - RNA, 19 nt, Homo sapiens
  misc_RNA (1)...(19): siRNA sense strand
ugaaucaccugaauccaau

SEQ ID NO: 90086 - RNA, 19 nt, Homo sapiens
  misc_RNA (1)...(19): siRNA sense strand
ccaggucucugcaaacuca

SEQ ID NO: 90087 - RNA, 19 nt, Homo sapiens
  misc_RNA (1)...(19): siRNA sense strand
gcagcuccauccuggguaa

SEQ ID NO: 90088 - RNA, 19 nt, Homo sapiens
  misc_RNA (1)...(19): siRNA sense strand
caaacuggccuguaucaau

SEQ ID NO: 90089 - RNA, 19 nt, Homo sapiens
  misc_RNA (1)...(19): siRNA sense strand
ggucaucagugaaguccuu

SEQ ID NO: 90090 - RNA, 19 nt, Homo sapiens
  misc_RNA (1)...(19): siRNA sense strand
cuacugggauguuagaugu

SEQ ID NO: 90091 - RNA, 19 nt, Homo sapiens
  misc_RNA (1)...(19): siRNA sense strand
caagguuacugcugucaau

SEQ ID NO: 90092 - RNA, 19 nt, Homo sapiens
  misc_RNA (1)...(19): siRNA sense strand
gacaacagauuucucuuuu

SEQ ID NO: 90093 - RNA, 19 nt, Homo sapiens
  misc_RNA (1)...(19): siRNA sense strand
ggaaggaacgggacuccaa

SEQ ID NO: 90094 - RNA, 19 nt, Homo sapiens
  misc_RNA (1)...(19): siRNA sense strand
agacaaggcugcuuucacu

SEQ ID NO: 90095 - RNA, 19 nt, Homo sapiens
  misc_RNA (1)...(19): siRNA sense strand
gaaagaucccucugcuguu

SEQ ID NO: 90096 - RNA, 19 nt, Homo sapiens
  misc_RNA (1)...(19): siRNA sense strand
cagaagcaauguaaagaca

SEQ ID NO: 90097 - RNA, 19 nt, Homo sapiens
  misc_RNA (1)...(19): siRNA sense strand
ggacugguacugcuuaauc

SEQ ID NO: 90098 - RNA, 19 nt, Homo sapiens
  misc_RNA (1)...(19): siRNA sense strand
cagaacagccucaaaauuu

SEQ ID NO: 90099 - RNA, 19 nt, Homo sapiens
  misc_RNA (1)...(19): siRNA sense strand
gacaacugguggaucugua

SEQ ID NO: 90100 - RNA, 19 nt, Homo sapiens
  misc_RNA (1)...(19): siRNA sense strand
ucacuuccauccacauuca

SEQ ID NO: 90101 - RNA, 19 nt, Homo sapiens
  misc_RNA (1)...(19): siRNA sense strand
uuacuuggauccacuguca

SEQ ID NO: 90102 - RNA, 19 nt, Homo sapiens
  misc_RNA (1)...(19): siRNA sense strand
ccucagcucugugaaauuc

SEQ ID NO: 90103 - RNA, 19 nt, Homo sapiens
  misc_RNA (1)...(19): siRNA sense strand
aaagaucccucugcuguuc

SEQ ID NO: 90104 - RNA, 19 nt, Homo sapiens
  misc_RNA (1)...(19): siRNA sense strand
cagcacaucucccuuucug

SEQ ID NO: 90105 - RNA, 19 nt, Homo sapiens
  misc_RNA (1)...(19): siRNA sense strand
guuaugaaauccgugugua

SEQ ID NO: 90106 - RNA, 19 nt, Homo sapiens
  misc_RNA (1)...(19): siRNA sense strand
ggacgagacacccacuuau

SEQ ID NO: 90107 - RNA, 19 nt, Homo sapiens
  misc_RNA (1)...(19): siRNA sense strand
ccacauuaaugccaucaca

SEQ ID NO: 90108 - RNA, 19 nt, Homo sapiens
  misc_RNA (1)...(19): siRNA sense strand
gcacauacuuuuagaggau

SEQ ID NO: 90109 - RNA, 19 nt, Homo sapiens
  misc_RNA (1)...(19): siRNA sense strand
gauccacugucaauauuac

SEQ ID NO: 90110 - RNA, 19 nt, Homo sapiens
  misc_RNA (1)...(19): siRNA sense strand
ccucugcuguucaggagua

SEQ ID NO: 90111 - RNA, 19 nt, Homo sapiens
  misc_RNA (1)...(19): siRNA sense strand
ugaaacggcacauugacua

SEQ ID NO: 90112 - RNA, 19 nt, Homo sapiens
  misc_RNA (1)...(19): siRNA sense strand
gcacaaacaccagaagaag

SEQ ID NO: 90113 - RNA, 19 nt, Homo sapiens
  misc_RNA (1)...(19): siRNA sense strand
ccaaaggaagacaugauuu

SEQ ID NO: 90114 - RNA, 19 nt, Homo sapiens
  misc_RNA (1)...(19): siRNA sense strand
agaacagccucaaaauuua

SEQ ID NO: 90115 - RNA, 19 nt, Homo sapiens
  misc_RNA (1)...(19): siRNA sense strand
ucuggaauaugguuaaugu

SEQ ID NO: 90116 - RNA, 19 nt, Homo sapiens
  misc_RNA (1)...(19): siRNA sense strand
ggagucgacccuacaaugu

SEQ ID NO: 90117 - RNA, 19 nt, Homo sapiens
  misc_RNA (1)...(19): siRNA sense strand
agacaacagauuucucuuu

SEQ ID NO: 90118 - RNA, 19 nt, Homo sapiens
  misc_RNA (1)...(19): siRNA sense strand
aagggaaguuggagugauu

SEQ ID NO: 90119 - RNA, 19 nt, Homo sapiens
  misc_RNA (1)...(19): siRNA sense strand
gaggcgaugugacugugaa

SEQ ID NO: 90120 - RNA, 19 nt, Homo sapiens
  misc_RNA (1)...(19): siRNA sense strand
aaagguguuuguucuccua

SEQ ID NO: 90121 - RNA, 19 nt, Homo sapiens
  misc_RNA (1)...(19): siRNA sense strand
ucucugcccacucguauua

SEQ ID NO: 90122 - RNA, 19 nt, Homo sapiens
  misc_RNA (1)...(19): siRNA sense strand
ggauccacugucaauauua

SEQ ID NO: 90123 - RNA, 19 nt, Homo sapiens
  misc_RNA (1)...(19): siRNA sense strand
gacaugauuugcuggaucu

SEQ ID NO: 90124 - RNA, 19 nt, Homo sapiens
  misc_RNA (1)...(19): siRNA sense strand
uggauccacugucaauauu

SEQ ID NO: 90125 - RNA, 19 nt, Homo sapiens
  misc_RNA (1)...(19): siRNA sense strand
cauggccacucccucaauu

SEQ ID NO: 90126 - RNA, 19 nt, Homo sapiens
  misc_RNA (1)...(19): siRNA sense strand
caagagaggcgaugugacu

SEQ ID NO: 90127 - RNA, 19 nt, Homo sapiens
  misc_RNA (1)...(19): siRNA sense strand
ugggcugccuccuccauua

SEQ ID NO: 90128 - RNA, 19 nt, Homo sapiens
  misc_RNA (1)...(19): siRNA sense strand
aauccuacaucuguuauga

SEQ ID NO: 90129 - RNA, 19 nt, Homo sapiens
  misc_RNA (1)...(19): siRNA sense strand
acaacauucuggugacuug

SEQ ID NO: 90130 - RNA, 19 nt, Homo sapiens
  misc_RNA (1)...(19): siRNA sense strand
gggaaagccaugacacaga

SEQ ID NO: 90131 - RNA, 19 nt, Homo sapiens
  misc_RNA (1)...(19): siRNA sense strand
gagggacugguacugcuua

SEQ ID NO: 90132 - RNA, 19 nt, Homo sapiens
  misc_RNA (1)...(19): siRNA sense strand
cuggaucaguuaaagauga

SEQ ID NO: 90133 - RNA, 19 nt, Homo sapiens
  misc_RNA (1)...(19): siRNA sense strand
gcauuugcauugcuaucau

SEQ ID NO: 90134 - RNA, 19 nt, Homo sapiens
  misc_RNA (1)...(19): siRNA sense strand
gaacauaaaauccuacauc

SEQ ID NO: 90135 - RNA, 19 nt, Homo sapiens
  misc_RNA (1)...(19): siRNA sense strand
uacaguagacaacagauuu

SEQ ID NO: 90136 - RNA, 19 nt, Homo sapiens
  misc_RNA (1)...(19): siRNA sense strand
gagcacaaacaccagaaga

SEQ ID NO: 90137 - RNA, 19 nt, Homo sapiens
  misc_RNA (1)...(19): siRNA sense strand
gaucugaaaccauuuacag

SEQ ID NO: 90138 - RNA, 19 nt, Homo sapiens
  misc_RNA (1)...(19): siRNA sense strand
gccaaaggaagacaugauu

SEQ ID NO: 90139 - RNA, 19 nt, Homo sapiens
  misc_RNA (1)...(19): siRNA sense strand
gccacucccucaauucuca

SEQ ID NO: 90140 - RNA, 19 nt, Homo sapiens
  misc_RNA (1)...(19): siRNA sense strand
acaaguuaauccuguacaa

SEQ ID NO: 90141 - RNA, 19 nt, Homo sapiens
  misc_RNA (1)...(19): siRNA sense strand
ggguaacucuaagcacaaa

SEQ ID NO: 90142 - RNA, 19 nt, Homo sapiens
  misc_RNA (1)...(19): siRNA sense strand
cugaaaccauuuacagaau

SEQ ID NO: 90143 - RNA, 19 nt, Homo sapiens
  misc_RNA (1)...(19): siRNA sense strand
acagcaggcucuggaauau

SEQ ID NO: 90144 - RNA, 19 nt, Homo sapiens
  misc_RNA (1)...(19): siRNA sense strand
ccucaauucucaagucaca

SEQ ID NO: 90145 - RNA, 19 nt, Homo sapiens
  misc_RNA (1)...(19): siRNA sense strand
caaccuuguuugucugcaa

SEQ ID NO: 90146 - RNA, 19 nt, Homo sapiens
  misc_RNA (1)...(19): siRNA sense strand
gaaauuccagauccagcaa

SEQ ID NO: 90147 - RNA, 19 nt, Homo sapiens
  misc_RNA (1)...(19): siRNA sense strand
gcauugcuaucaucauggu

SEQ ID NO: 90148 - RNA, 19 nt, Homo sapiens
  misc_RNA (1)...(19): siRNA sense strand
gcccacucguauuaacaua

SEQ ID NO: 90149 - RNA, 19 nt, Homo sapiens
  misc_RNA (1)...(19): siRNA sense strand
caacagauuucucuuuucu

SEQ ID NO: 90150 - RNA, 19 nt, Homo sapiens
  misc_RNA (1)...(19): siRNA sense strand
ucagauuuccucuaagcua

SEQ ID NO: 90151 - RNA, 19 nt, Homo sapiens
  misc_RNA (1)...(19): siRNA sense strand
gaauuucagauuuccucua

SEQ ID NO: 90152 - RNA, 19 nt, Homo sapiens
  misc_RNA (1)...(19): siRNA sense strand
gagagaugagggacuggua

SEQ ID NO: 90153 - RNA, 19 nt, Homo sapiens
  misc_RNA (1)...(19): siRNA sense strand
uaaccuggcagaagcaaug

SEQ ID NO: 90154 - RNA, 19 nt, Homo sapiens
  misc_RNA (1)...(19): siRNA sense strand
uccuacaucuguuaugaaa

SEQ ID NO: 90155 - RNA, 19 nt, Homo sapiens
  misc_RNA (1)...(19): siRNA sense strand
ucugcaaacuggccuguau

SEQ ID NO: 90156 - RNA, 19 nt, Homo sapiens
  misc_RNA (1)...(19): siRNA sense strand
ggacaacauucuggugacu

SEQ ID NO: 90157 - RNA, 19 nt, Homo sapiens
  misc_RNA (1)...(19): siRNA sense strand
guagacaacagauuucucu

SEQ ID NO: 90158 - RNA, 19 nt, Homo sapiens
  misc_RNA (1)...(19): siRNA sense strand
auaaucacguggcuguuga

SEQ ID NO: 90159 - RNA, 19 nt, Homo sapiens
  misc_RNA (1)...(19): siRNA sense strand
gaagaaagccucucaguga

SEQ ID NO: 90160 - RNA, 19 nt, Homo sapiens
  misc_RNA (1)...(19): siRNA sense strand
gaauacaucuuguuucaug

SEQ ID NO: 90161 - RNA, 19 nt, Homo sapiens
  misc_RNA (1)...(19): siRNA sense strand
gagaauacaucuuguuuca

SEQ ID NO: 90162 - RNA, 19 nt, Homo sapiens
  misc_RNA (1)...(19): siRNA sense strand
ggaaacucgucguucaaua

SEQ ID NO: 90163 - RNA, 19 nt, Homo sapiens
  misc_RNA (1)...(19): siRNA sense strand
ccacaaugaugaccuauau

SEQ ID NO: 90164 - RNA, 19 nt, Homo sapiens
  misc_RNA (1)...(19): siRNA sense strand
gaaaaccucugcacaguaa

SEQ ID NO: 90165 - RNA, 19 nt, Homo sapiens
  misc_RNA (1)...(19): siRNA sense strand
gaacacagucagaauaaga

SEQ ID NO: 90166 - RNA, 19 nt, Homo sapiens
  misc_RNA (1)...(19): siRNA sense strand
gaagaaguacgacaucuau

SEQ ID NO: 90167 - RNA, 19 nt, Homo sapiens
  misc_RNA (1)...(19): siRNA sense strand
gaaaacaucuuuagagaag

SEQ ID NO: 90168 - RNA, 19 nt, Homo sapiens
  misc_RNA (1)...(19): siRNA sense strand
gggagaauccacagaauuu

SEQ ID NO: 90169 - RNA, 19 nt, Homo sapiens
  misc_RNA (1)...(19): siRNA sense strand
caaauaauggucaaggaua

SEQ ID NO: 90170 - RNA, 19 nt, Homo sapiens
  misc_RNA (1)...(19): siRNA sense strand
caagaaaugaguauaggua

SEQ ID NO: 90171 - RNA, 19 nt, Homo sapiens
  misc_RNA (1)...(19): siRNA sense strand
ggaggaaaccgacucugua

SEQ ID NO: 90172 - RNA, 19 nt, Homo sapiens
  misc_RNA (1)...(19): siRNA sense strand
ugacugagcuucaaugcau

SEQ ID NO: 90173 - RNA, 19 nt, Homo sapiens
  misc_RNA (1)...(19): siRNA sense strand
gaaaauagcuccggaaacu

SEQ ID NO: 90174 - RNA, 19 nt, Homo sapiens
  misc_RNA (1)...(19): siRNA sense strand
gaaaugaguauagguaaga

SEQ ID NO: 90175 - RNA, 19 nt, Homo sapiens
  misc_RNA (1)...(19): siRNA sense strand
cgacaaacaagauaagaaa

SEQ ID NO: 90176 - RNA, 19 nt, Homo sapiens
  misc_RNA (1)...(19): siRNA sense strand
gcagaugccuauuuuauga

SEQ ID NO: 90177 - RNA, 19 nt, Homo sapiens
  misc_RNA (1)...(19): siRNA sense strand
cgucgcaggugcaaucaua

SEQ ID NO: 90178 - RNA, 19 nt, Homo sapiens
  misc_RNA (1)...(19): siRNA sense strand
ucauaguacuccugcuuua

SEQ ID NO: 90179 - RNA, 19 nt, Homo sapiens
  misc_RNA (1)...(19): siRNA sense strand
ggaagaaguacgacaucua

SEQ ID NO: 90180 - RNA, 19 nt, Homo sapiens
  misc_RNA (1)...(19): siRNA sense strand
acuauacucucuacuauug

SEQ ID NO: 90181 - RNA, 19 nt, Homo sapiens
  misc_RNA (1)...(19): siRNA sense strand
uagagaaggccaauacuuu

SEQ ID NO: 90182 - RNA, 19 nt, Homo sapiens
  misc_RNA (1)...(19): siRNA sense strand
caaauuguagucuauggua

SEQ ID NO: 90183 - RNA, 19 nt, Homo sapiens
  misc_RNA (1)...(19): siRNA sense strand
gaaacucgucguucaauag

SEQ ID NO: 90184 - RNA, 19 nt, Homo sapiens
  misc_RNA (1)...(19): siRNA sense strand
ggaaaccgacucuguagug

SEQ ID NO: 90185 - RNA, 19 nt, Homo sapiens
  misc_RNA (1)...(19): siRNA sense strand
agagaaauguggagaauac

SEQ ID NO: 90186 - RNA, 19 nt, Homo sapiens
  misc_RNA (1)...(19): siRNA sense strand
gaaacucagccaccuguga

SEQ ID NO: 90187 - RNA, 19 nt, Homo sapiens
  misc_RNA (1)...(19): siRNA sense strand
ugaccaaagugaaggauuc

SEQ ID NO: 90188 - RNA, 19 nt, Homo sapiens
  misc_RNA (1)...(19): siRNA sense strand
aaaccauccuucaauauag

SEQ ID NO: 90189 - RNA, 19 nt, Homo sapiens
  misc_RNA (1)...(19): siRNA sense strand
gaaguagaagucaauaaca

SEQ ID NO: 90190 - RNA, 19 nt, Homo sapiens
  misc_RNA (1)...(19): siRNA sense strand
cagcucaaauuguagucua

SEQ ID NO: 90191 - RNA, 19 nt, Homo sapiens
  misc_RNA (1)...(19): siRNA sense strand
gugagaauccagaauuuga

SEQ ID NO: 90192 - RNA, 19 nt, Homo sapiens
  misc_RNA (1)...(19): siRNA sense strand
cgacaucuaugagaagcaa

SEQ ID NO: 90193 - RNA, 19 nt, Homo sapiens
  misc_RNA (1)...(19): siRNA sense strand
ugagagaaauguggagaau

SEQ ID NO: 90194 - RNA, 19 nt, Homo sapiens
  misc_RNA (1)...(19): siRNA sense strand
gacacuaacuauacucucu

SEQ ID NO: 90195 - RNA, 19 nt, Homo sapiens
  misc_RNA (1)...(19): siRNA sense strand
gcacaguaauauggacaug

SEQ ID NO: 90196 - RNA, 19 nt, Homo sapiens
  misc_RNA (1)...(19): siRNA sense strand
ucaauaacagccaaacuga

SEQ ID NO: 90197 - RNA, 19 nt, Homo sapiens
  misc_RNA (1)...(19): siRNA sense strand
cuaacuauacucucuacua

SEQ ID NO: 90198 - RNA, 19 nt, Homo sapiens
  misc_RNA (1)...(19): siRNA sense strand
agaaguacgacaucuauga

SEQ ID NO: 90199 - RNA, 19 nt, Homo sapiens
  misc_RNA (1)...(19): siRNA sense strand
acaguaauauggacaugga

SEQ ID NO: 90200 - RNA, 19 nt, Homo sapiens
  misc_RNA (1)...(19): siRNA sense strand
auacuuugguuguuccuuu

SEQ ID NO: 90201 - RNA, 19 nt, Homo sapiens
  misc_RNA (1)...(19): siRNA sense strand
ugagcuacaugaaguguuc

SEQ ID NO: 90202 - RNA, 19 nt, Homo sapiens
  misc_RNA (1)...(19): siRNA sense strand
gagagaaauguggagaaua

SEQ ID NO: 90203 - RNA, 19 nt, Homo sapiens
  misc_RNA (1)...(19): siRNA sense strand
ccugauccuccacauauua

SEQ ID NO: 90204 - RNA, 19 nt, Homo sapiens
  misc_RNA (1)...(19): siRNA sense strand
gauccugagucugcuguga

SEQ ID NO: 90205 - RNA, 19 nt, Homo sapiens
  misc_RNA (1)...(19): siRNA sense strand
guacuccugcuuuaccuaa

SEQ ID NO: 90206 - RNA, 19 nt, Homo sapiens
  misc_RNA (1)...(19): siRNA sense strand
caauuccacacucuacaua

SEQ ID NO: 90207 - RNA, 19 nt, Homo sapiens
  misc_RNA (1)...(19): siRNA sense strand
gagaauccacagaauuuua

SEQ ID NO: 90208 - RNA, 19 nt, Homo sapiens
  misc_RNA (1)...(19): siRNA sense strand
ggagaauacaucuuguuuc

SEQ ID NO: 90209 - RNA, 19 nt, Homo sapiens
  misc_RNA (1)...(19): siRNA sense strand
aaaccucugcacaguaaua

SEQ ID NO: 90210 - RNA, 19 nt, Homo sapiens
  misc_RNA (1)...(19): siRNA sense strand
gugaaaacaucuuuagaga

SEQ ID NO: 90211 - RNA, 19 nt, Homo sapiens
  misc_RNA (1)...(19): siRNA sense strand
gaagcaaaccaaggaggaa

SEQ ID NO: 90212 - RNA, 19 nt, Homo sapiens
  misc_RNA (1)...(19): siRNA sense strand
uccaagaggcuaaauguga

SEQ ID NO: 90213 - RNA, 19 nt, Homo sapiens
  misc_RNA (1)...(19): siRNA sense strand
gccaaacugagacacauaa

SEQ ID NO: 90214 - RNA, 19 nt, Homo sapiens
  misc_RNA (1)...(19): siRNA sense strand
gaaaccugauccuccacau

SEQ ID NO: 90215 - RNA, 19 nt, Homo sapiens
  misc_RNA (1)...(19): siRNA sense strand
gaggaaaccgacucuguag

SEQ ID NO: 90216 - RNA, 19 nt, Homo sapiens
  misc_RNA (1)...(19): siRNA sense strand
gcgacaaacaagauaagaa

SEQ ID NO: 90217 - RNA, 19 nt, Homo sapiens
  misc_RNA (1)...(19): siRNA sense strand
uaaguuaugcuaugaggau

SEQ ID NO: 90218 - RNA, 19 nt, Homo sapiens
  misc_RNA (1)...(19): siRNA sense strand
gaauccagaauuugagaga

SEQ ID NO: 90219 - RNA, 19 nt, Homo sapiens
  misc_RNA (1)...(19): siRNA sense strand
gagaauccagaauuugaga

SEQ ID NO: 90220 - RNA, 19 nt, Homo sapiens
  misc_RNA (1)...(19): siRNA sense strand
aauaacagccaaacugaga

SEQ ID NO: 90221 - RNA, 19 nt, Homo sapiens
  misc_RNA (1)...(19): siRNA sense strand
ucaaggauaaugcaggaaa

SEQ ID NO: 90222 - RNA, 19 nt, Homo sapiens
  misc_RNA (1)...(19): siRNA sense strand
cauggucccugguguucuu

SEQ ID NO: 90223 - RNA, 19 nt, Homo sapiens
  misc_RNA (1)...(19): siRNA sense strand
caaacugagacacauaaug

SEQ ID NO: 90224 - RNA, 19 nt, Homo sapiens
  misc_RNA (1)...(19): siRNA sense strand
ugagaggauuugucugcaa

SEQ ID NO: 90225 - RNA, 19 nt, Homo sapiens
  misc_RNA (1)...(19): siRNA sense strand
gaaguacgacaucuaugag

SEQ ID NO: 90226 - RNA, 19 nt, Homo sapiens
  misc_RNA (1)...(19): siRNA sense strand
caaauuugagugucucugu

SEQ ID NO: 90227 - RNA, 19 nt, Homo sapiens
  misc_RNA (1)...(19): siRNA sense strand
acaaugaugaccuauaugu

SEQ ID NO: 90228 - RNA, 19 nt, Homo sapiens
  misc_RNA (1)...(19): siRNA sense strand
agagaaggccaauacuuug

SEQ ID NO: 90229 - RNA, 19 nt, Homo sapiens
  misc_RNA (1)...(19): siRNA sense strand
gaauaccagucccgacacu

SEQ ID NO: 90230 - RNA, 19 nt, Homo sapiens
  misc_RNA (1)...(19): siRNA sense strand
aaccugagcuacaugaagu

SEQ ID NO: 90231 - RNA, 19 nt, Homo sapiens
  misc_RNA (1)...(19): siRNA sense strand
ccacagaauuuuauuagca

SEQ ID NO: 90232 - RNA, 19 nt, Homo sapiens
  misc_RNA (1)...(19): siRNA sense strand
ugaaugagaggauuugucu

SEQ ID NO: 90233 - RNA, 19 nt, Homo sapiens
  misc_RNA (1)...(19): siRNA sense strand
agccaccugugacaaauuu

SEQ ID NO: 90234 - RNA, 19 nt, Homo sapiens
  misc_RNA (1)...(19): siRNA sense strand
gaggcuaaaugugagaauc

SEQ ID NO: 90235 - RNA, 19 nt, Homo sapiens
  misc_RNA (1)...(19): siRNA sense strand
ugaccuauaugugcaaugg

SEQ ID NO: 90236 - RNA, 19 nt, Homo sapiens
  misc_RNA (1)...(19): siRNA sense strand
aaauuugagugucucuguu

SEQ ID NO: 90237 - RNA, 19 nt, Homo sapiens
  misc_RNA (1)...(19): siRNA sense strand
gaggauuugucugcaagug

SEQ ID NO: 90238 - RNA, 19 nt, Homo sapiens
  misc_RNA (1)...(19): siRNA sense strand
gaaguaccccugaaugaga

SEQ ID NO: 90239 - RNA, 19 nt, Homo sapiens
  misc_RNA (1)...(19): siRNA sense strand
gcaauuccacacucuacau

SEQ ID NO: 90240 - RNA, 19 nt, Homo sapiens
  misc_RNA (1)...(19): siRNA sense strand
gagccaagaaaugaguaua

SEQ ID NO: 90241 - RNA, 19 nt, Homo sapiens
  misc_RNA (1)...(19): siRNA sense strand
gcuaugaggaugacaaacu

SEQ ID NO: 90242 - RNA, 19 nt, Homo sapiens
  misc_RNA (1)...(19): siRNA sense strand
uggagaauacaucuuguuu

SEQ ID NO: 90243 - RNA, 19 nt, Homo sapiens
  misc_RNA (1)...(19): siRNA sense strand
ccaaauaauggucaaggau

SEQ ID NO: 90244 - RNA, 19 nt, Homo sapiens
  misc_RNA (1)...(19): siRNA sense strand
caauauagugccuuuaacu

SEQ ID NO: 90245 - RNA, 19 nt, Homo sapiens
  misc_RNA (1)...(19): siRNA sense strand
agaaaugaguauagguaag

SEQ ID NO: 90246 - RNA, 19 nt, Homo sapiens
  misc_RNA (1)...(19): siRNA sense strand
gccaagaaaugaguauagg

SEQ ID NO: 90247 - RNA, 19 nt, Homo sapiens
  misc_RNA (1)...(19): siRNA sense strand
aaaccugauccuccacaua

SEQ ID NO: 90248 - RNA, 19 nt, Homo sapiens
  misc_RNA (1)...(19): siRNA sense strand
agugagaagccuagcauuu

SEQ ID NO: 90249 - RNA, 19 nt, Homo sapiens
  misc_RNA (1)...(19): siRNA sense strand
aguacgacaucuaugagaa

SEQ ID NO: 90250 - RNA, 19 nt, Homo sapiens
  misc_RNA (1)...(19): siRNA sense strand
aaaccucuccuuccacaau

SEQ ID NO: 90251 - RNA, 19 nt, Homo sapiens
  misc_RNA (1)...(19): siRNA sense strand
gguuguuccuuugaucuga

SEQ ID NO: 90252 - RNA, 19 nt, Homo sapiens
  misc_RNA (1)...(19): siRNA sense strand
aaugugagaauccagaauu

SEQ ID NO: 90253 - RNA, 19 nt, Homo sapiens
  misc_RNA (1)...(19): siRNA sense strand
gaagucaauaacagccaaa

SEQ ID NO: 90254 - RNA, 19 nt, Homo sapiens
  misc_RNA (1)...(19): siRNA sense strand
ugaaguagaagucaauaac

SEQ ID NO: 90255 - RNA, 19 nt, Homo sapiens
  misc_RNA (1)...(19): siRNA sense strand
caguguagcaccaaugaga

SEQ ID NO: 90256 - RNA, 19 nt, Homo sapiens
  misc_RNA (1)...(19): siRNA sense strand
aaacucgucguucaauaga

SEQ ID NO: 90257 - RNA, 19 nt, Homo sapiens
  misc_RNA (1)...(19): siRNA sense strand
aaccugauccuccacauau

SEQ ID NO: 90258 - RNA, 19 nt, Homo sapiens
  misc_RNA (1)...(19): siRNA sense strand
uugagugucucuguugaaa

SEQ ID NO: 90259 - RNA, 19 nt, Homo sapiens
  misc_RNA (1)...(19): siRNA sense strand
gaaaugaauccuccugaua

SEQ ID NO: 90260 - RNA, 19 nt, Homo sapiens
  misc_RNA (1)...(19): siRNA sense strand
gacaauacgcuuuacuuua

SEQ ID NO: 90261 - RNA, 19 nt, Homo sapiens
  misc_RNA (1)...(19): siRNA sense strand
gaaggauacuuucuagcuu

SEQ ID NO: 90262 - RNA, 19 nt, Homo sapiens
  misc_RNA (1)...(19): siRNA sense strand
gauucugacuguagagaua

SEQ ID NO: 90263 - RNA, 19 nt, Homo sapiens
  misc_RNA (1)...(19): siRNA sense strand
ggaaaugaauccuccugau

SEQ ID NO: 90264 - RNA, 19 nt, Homo sapiens
  misc_RNA (1)...(19): siRNA sense strand
ugaccaaguucucuucauu

SEQ ID NO: 90265 - RNA, 19 nt, Homo sapiens
  misc_RNA (1)...(19): siRNA sense strand
gacaucauauucuuucaga

SEQ ID NO: 90266 - RNA, 19 nt, Homo sapiens
  misc_RNA (1)...(19): siRNA sense strand
aaaugaauccuccugauaa

SEQ ID NO: 90267 - RNA, 19 nt, Homo sapiens
  misc_RNA (1)...(19): siRNA sense strand
gaagacaauugcaucaacu

SEQ ID NO: 90268 - RNA, 19 nt, Homo sapiens
  misc_RNA (1)...(19): siRNA sense strand
gaucuauaauguucacugu

SEQ ID NO: 90269 - RNA, 19 nt, Homo sapiens
  misc_RNA (1)...(19): siRNA sense strand
gauacuuucuagcuuguga

SEQ ID NO: 90270 - RNA, 19 nt, Homo sapiens
  misc_RNA (1)...(19): siRNA sense strand
guaacuaucucugugaagu

SEQ ID NO: 90271 - RNA, 19 nt, Homo sapiens
  misc_RNA (1)...(19): siRNA sense strand
uuggcaagcuugaaucuaa

SEQ ID NO: 90272 - RNA, 19 nt, Homo sapiens
  misc_RNA (1)...(19): siRNA sense strand
ugacaauacgcuuuacuuu

SEQ ID NO: 90273 - RNA, 19 nt, Homo sapiens
  misc_RNA (1)...(19): siRNA sense strand
uuucaacucucuccuguga

SEQ ID NO: 90274 - RNA, 19 nt, Homo sapiens
  misc_RNA (1)...(19): siRNA sense strand
ucuauaauguucacuguuc

SEQ ID NO: 90275 - RNA, 19 nt, Homo sapiens
  misc_RNA (1)...(19): siRNA sense strand
gaaauuugaaugaccaagu

SEQ ID NO: 90276 - RNA, 19 nt, Homo sapiens
  misc_RNA (1)...(19): siRNA sense strand
uugaagauaugacugauuc

SEQ ID NO: 90277 - RNA, 19 nt, Homo sapiens
  misc_RNA (1)...(19): siRNA sense strand
ccaaggaaaucggccucua

SEQ ID NO: 90278 - RNA, 19 nt, Homo sapiens
  misc_RNA (1)...(19): siRNA sense strand
caucauauucuuucagaga

SEQ ID NO: 90279 - RNA, 19 nt, Homo sapiens
  misc_RNA (1)...(19): siRNA sense strand
cuuuauagcugaagaugau

SEQ ID NO: 90280 - RNA, 19 nt, Homo sapiens
  misc_RNA (1)...(19): siRNA sense strand
gacaauugcaucaacuuug

SEQ ID NO: 90281 - RNA, 19 nt, Homo sapiens
  misc_RNA (1)...(19): siRNA sense strand
aaagauagccagccuagag

SEQ ID NO: 90282 - RNA, 19 nt, Homo sapiens
  misc_RNA (1)...(19): siRNA sense strand
gaccaaguucucuucauug

SEQ ID NO: 90283 - RNA, 19 nt, Homo sapiens
  misc_RNA (1)...(19): siRNA sense strand
caaggaaaucggccucuau

SEQ ID NO: 90284 - RNA, 19 nt, Homo sapiens
  misc_RNA (1)...(19): siRNA sense strand
gauagccagccuagaggua

SEQ ID NO: 90285 - RNA, 19 nt, Homo sapiens
  misc_RNA (1)...(19): siRNA sense strand
gaagauaugacugauucug

SEQ ID NO: 90286 - RNA, 19 nt, Homo sapiens
  misc_RNA (1)...(19): siRNA sense strand
guagaagacaauugcauca

SEQ ID NO: 90287 - RNA, 19 nt, Homo sapiens
  misc_RNA (1)...(19): siRNA sense strand
ucccaggacaugauaauaa

SEQ ID NO: 90288 - RNA, 19 nt, Homo sapiens
  misc_RNA (1)...(19): siRNA sense strand
caacuuuguggcaaugaaa

SEQ ID NO: 90289 - RNA, 19 nt, Homo sapiens
  misc_RNA (1)...(19): siRNA sense strand
gagguauggcuguaacuau

SEQ ID NO: 90290 - RNA, 19 nt, Homo sapiens
  misc_RNA (1)...(19): siRNA sense strand
gcaucaacuuuguggcaau

SEQ ID NO: 90291 - RNA, 19 nt, Homo sapiens
  misc_RNA (1)...(19): siRNA sense strand
gauaacaucaaggauacaa

SEQ ID NO: 90292 - RNA, 19 nt, Homo sapiens
  misc_RNA (1)...(19): siRNA sense strand
uggcaagcuugaaucuaaa

SEQ ID NO: 90293 - RNA, 19 nt, Homo sapiens
  misc_RNA (1)...(19): siRNA sense strand
gaauccuccugauaacauc

SEQ ID NO: 90294 - RNA, 19 nt, Homo sapiens
  misc_RNA (1)...(19): siRNA sense strand
gaaugaccaaguucucuuc

SEQ ID NO: 90295 - RNA, 19 nt, Homo sapiens
  misc_RNA (1)...(19): siRNA sense strand
accaaguucucuucauuga

SEQ ID NO: 90296 - RNA, 19 nt, Homo sapiens
  misc_RNA (1)...(19): siRNA sense strand
auacgaaggauacuuucua

SEQ ID NO: 90297 - RNA, 19 nt, Homo sapiens
  misc_RNA (1)...(19): siRNA sense strand
caucaacuuuguggcaaug

SEQ ID NO: 90298 - RNA, 19 nt, Homo sapiens
  misc_RNA (1)...(19): siRNA sense strand
cggccucuauuugaagaua

SEQ ID NO: 90299 - RNA, 19 nt, Homo sapiens
  misc_RNA (1)...(19): siRNA sense strand
ucaacuuuguggcaaugaa

SEQ ID NO: 90300 - RNA, 19 nt, Homo sapiens
  misc_RNA (1)...(19): siRNA sense strand
gcaagcuugaaucuaaauu

SEQ ID NO: 90301 - RNA, 19 nt, Homo sapiens
  misc_RNA (1)...(19): siRNA sense strand
agaagacaauugcaucaac

SEQ ID NO: 90302 - RNA, 19 nt, Homo sapiens
  misc_RNA (1)...(19): siRNA sense strand
agacaauugcaucaacuuu

SEQ ID NO: 90303 - RNA, 19 nt, Homo sapiens
  misc_RNA (1)...(19): siRNA sense strand
ugacugauucugacuguag

SEQ ID NO: 90304 - RNA, 19 nt, Homo sapiens
  misc_RNA (1)...(19): siRNA sense strand
cgaaggauacuuucuagcu

SEQ ID NO: 90305 - RNA, 19 nt, Homo sapiens
  misc_RNA (1)...(19): siRNA sense strand
uacgaaggauacuuucuag

SEQ ID NO: 90306 - RNA, 19 nt, Homo sapiens
  misc_RNA (1)...(19): siRNA sense strand
gaaccaguagaagacaauu

SEQ ID NO: 90307 - RNA, 19 nt, Homo sapiens
  misc_RNA (1)...(19): siRNA sense strand
cccaggacaugauaauaag

SEQ ID NO: 90308 - RNA, 19 nt, Homo sapiens
  misc_RNA (1)...(19): siRNA sense strand
aaggaaaucggccucuauu

SEQ ID NO: 90309 - RNA, 19 nt, Homo sapiens
  misc_RNA (1)...(19): siRNA sense strand
gcuguaacuaucucuguga

SEQ ID NO: 90310 - RNA, 19 nt, Homo sapiens
  misc_RNA (1)...(19): siRNA sense strand
gccuagagguauggcugua

SEQ ID NO: 90311 - RNA, 19 nt, Homo sapiens
  misc_RNA (1)...(19): siRNA sense strand
gacugauucugacuguaga

SEQ ID NO: 90312 - RNA, 19 nt, Homo sapiens
  misc_RNA (1)...(19): siRNA sense strand
uaugacugauucugacugu

SEQ ID NO: 90313 - RNA, 19 nt, Homo sapiens
  misc_RNA (1)...(19): siRNA sense strand
aagauaugacugauucuga

SEQ ID NO: 90314 - RNA, 19 nt, Homo sapiens
  misc_RNA (1)...(19): siRNA sense strand
cuaucucugugaaguguga

SEQ ID NO: 90315 - RNA, 19 nt, Homo sapiens
  misc_RNA (1)...(19): siRNA sense strand
gacaugauaauaagaugca

SEQ ID NO: 90316 - RNA, 19 nt, Homo sapiens
  misc_RNA (1)...(19): siRNA sense strand
ucucuucauugaccaagga

SEQ ID NO: 90317 - RNA, 19 nt, Homo sapiens
  misc_RNA (1)...(19): siRNA sense strand
ugaauccuccugauaacau

SEQ ID NO: 90318 - RNA, 19 nt, Homo sapiens
  misc_RNA (1)...(19): siRNA sense strand
ugaaugaccaaguucucuu

SEQ ID NO: 90319 - RNA, 19 nt, Homo sapiens
  misc_RNA (1)...(19): siRNA sense strand
cuauaauguucacuguuca

SEQ ID NO: 90320 - RNA, 19 nt, Homo sapiens
  misc_RNA (1)...(19): siRNA sense strand
agguauggcuguaacuauc

SEQ ID NO: 90321 - RNA, 19 nt, Homo sapiens
  misc_RNA (1)...(19): siRNA sense strand
ccccggaccauauuuauua

SEQ ID NO: 90322 - RNA, 19 nt, Homo sapiens
  misc_RNA (1)...(19): siRNA sense strand
uaacuaucucugugaagug

SEQ ID NO: 90323 - RNA, 19 nt, Homo sapiens
  misc_RNA (1)...(19): siRNA sense strand
caggacaugauaauaagau

SEQ ID NO: 90324 - RNA, 19 nt, Homo sapiens
  misc_RNA (1)...(19): siRNA sense strand
gcaccccggaccauauuua

SEQ ID NO: 90325 - RNA, 19 nt, Homo sapiens
  misc_RNA (1)...(19): siRNA sense strand
ggccucuauuugaagauau

SEQ ID NO: 90326 - RNA, 19 nt, Homo sapiens
  misc_RNA (1)...(19): siRNA sense strand
cuagagguauggcuguaac

SEQ ID NO: 90327 - RNA, 19 nt, Homo sapiens
  misc_RNA (1)...(19): siRNA sense strand
gccucuauuugaagauaug

SEQ ID NO: 90328 - RNA, 19 nt, Homo sapiens
  misc_RNA (1)...(19): siRNA sense strand
uagccagccuagagguaug

SEQ ID NO: 90329 - RNA, 19 nt, Homo sapiens
  misc_RNA (1)...(19): siRNA sense strand
cugcugaaccaguagaaga

SEQ ID NO: 90330 - RNA, 19 nt, Homo sapiens
  misc_RNA (1)...(19): siRNA sense strand
aaugaauccuccugauaac

SEQ ID NO: 90331 - RNA, 19 nt, Homo sapiens
  misc_RNA (1)...(19): siRNA sense strand
augaaaaccuggaaucaga

SEQ ID NO: 90332 - RNA, 19 nt, Homo sapiens
  misc_RNA (1)...(19): siRNA sense strand
caagaaacguuaaaggaaa

SEQ ID NO: 90333 - RNA, 19 nt, Homo sapiens
  misc_RNA (1)...(19): siRNA sense strand
gauaggaugugacaaugaa

SEQ ID NO: 90334 - RNA, 19 nt, Homo sapiens
  misc_RNA (1)...(19): siRNA sense strand
caacaaauaucaagaaacg

SEQ ID NO: 90335 - RNA, 19 nt, Homo sapiens
  misc_RNA (1)...(19): siRNA sense strand
gaaaugguauugcccaaag

SEQ ID NO: 90336 - RNA, 19 nt, Homo sapiens
  misc_RNA (1)...(19): siRNA sense strand
gaacgagccucagauaaag

SEQ ID NO: 90337 - RNA, 19 nt, Homo sapiens
  misc_RNA (1)...(19): siRNA sense strand
ggaaauugaugaugucuac

SEQ ID NO: 90338 - RNA, 19 nt, Homo sapiens
  misc_RNA (1)...(19): siRNA sense strand
gaaccuacauacugcuuau

SEQ ID NO: 90339 - RNA, 19 nt, Homo sapiens
  misc_RNA (1)...(19): siRNA sense strand
ggacaacaaauaucaagaa

SEQ ID NO: 90340 - RNA, 19 nt, Homo sapiens
  misc_RNA (1)...(19): siRNA sense strand
ugaaagccgugauuuaugu

SEQ ID NO: 90341 - RNA, 19 nt, Homo sapiens
  misc_RNA (1)...(19): siRNA sense strand
guguuucacuuaccuauaa

SEQ ID NO: 90342 - RNA, 19 nt, Homo sapiens
  misc_RNA (1)...(19): siRNA sense strand
ucacuuaccuauaaaccaa

SEQ ID NO: 90343 - RNA, 19 nt, Homo sapiens
  misc_RNA (1)...(19): siRNA sense strand
uuacacaaaugcucgaauu

SEQ ID NO: 90344 - RNA, 19 nt, Homo sapiens
  misc_RNA (1)...(19): siRNA sense strand
caagacaaauggaguuaca

SEQ ID NO: 90345 - RNA, 19 nt, Homo sapiens
  misc_RNA (1)...(19): siRNA sense strand
gaucagccaccuaaagaaa

SEQ ID NO: 90346 - RNA, 19 nt, Homo sapiens
  misc_RNA (1)...(19): siRNA sense strand
ccagagagcacuaauuaau

SEQ ID NO: 90347 - RNA, 19 nt, Homo sapiens
  misc_RNA (1)...(19): siRNA sense strand
ugaacgagccucagauaaa

SEQ ID NO: 90348 - RNA, 19 nt, Homo sapiens
  misc_RNA (1)...(19): siRNA sense strand
cagagagcacuaauuaaua

SEQ ID NO: 90349 - RNA, 19 nt, Homo sapiens
  misc_RNA (1)...(19): siRNA sense strand
gcaaccaagugucuuaugg

SEQ ID NO: 90350 - RNA, 19 nt, Homo sapiens
  misc_RNA (1)...(19): siRNA sense strand
gaacaguguccaauugaau

SEQ ID NO: 90351 - RNA, 19 nt, Homo sapiens
  misc_RNA (1)...(19): siRNA sense strand
ugcaauagauccuaaugaa

SEQ ID NO: 90352 - RNA, 19 nt, Homo sapiens
  misc_RNA (1)...(19): siRNA sense strand
agagagcacuaauuaauag

SEQ ID NO: 90353 - RNA, 19 nt, Homo sapiens
  misc_RNA (1)...(19): siRNA sense strand
gaugauaggaugugacaau

SEQ ID NO: 90354 - RNA, 19 nt, Homo sapiens
  misc_RNA (1)...(19): siRNA sense strand
ucaagaaacguuaaaggaa

SEQ ID NO: 90355 - RNA, 19 nt, Homo sapiens
  misc_RNA (1)...(19): siRNA sense strand
aaugaacaguguccaauug

SEQ ID NO: 90356 - RNA, 19 nt, Homo sapiens
  misc_RNA (1)...(19): siRNA sense strand
ccaagauccugcugaaagu

SEQ ID NO: 90357 - RNA, 19 nt, Homo sapiens
  misc_RNA (1)...(19): siRNA sense strand
ggacaaaaguacugaaaag

SEQ ID NO: 90358 - RNA, 19 nt, Homo sapiens
  misc_RNA (1)...(19): siRNA sense strand
cuccagagagcacuaauua

SEQ ID NO: 90359 - RNA, 19 nt, Homo sapiens
  misc_RNA (1)...(19): siRNA sense strand
gaaaaucgggcaagacaaa

SEQ ID NO: 90360 - RNA, 19 nt, Homo sapiens
  misc_RNA (1)...(19): siRNA sense strand
ugcgagagcuggacaacaa

SEQ ID NO: 90361 - RNA, 19 nt, Homo sapiens
  misc_RNA (1)...(19): siRNA sense strand
aagggaagcuucaccuguu

SEQ ID NO: 90362 - RNA, 19 nt, Homo sapiens
  misc_RNA (1)...(19): siRNA sense strand
cuaaugaaccuacauacug

SEQ ID NO: 90363 - RNA, 19 nt, Homo sapiens
  misc_RNA (1)...(19): siRNA sense strand
gagagcuggacaacaaaua

SEQ ID NO: 90364 - RNA, 19 nt, Homo sapiens
  misc_RNA (1)...(19): siRNA sense strand
cagugaaagccgugauuua

SEQ ID NO: 90365 - RNA, 19 nt, Homo sapiens
  misc_RNA (1)...(19): siRNA sense strand
ugaacaguguccaauugaa

SEQ ID NO: 90366 - RNA, 19 nt, Homo sapiens
  misc_RNA (1)...(19): siRNA sense strand
ucacauggcaaaugggauu

SEQ ID NO: 90367 - RNA, 19 nt, Homo sapiens
  misc_RNA (1)...(19): siRNA sense strand
caaaaguacugaaaagaca

SEQ ID NO: 90368 - RNA, 19 nt, Homo sapiens
  misc_RNA (1)...(19): siRNA sense strand
ucacaguguuuccaagauc

SEQ ID NO: 90369 - RNA, 19 nt, Homo sapiens
  misc_RNA (1)...(19): siRNA sense strand
ggaaaugguauugcccaaa

SEQ ID NO: 90370 - RNA, 19 nt, Homo sapiens
  misc_RNA (1)...(19): siRNA sense strand
caaugaacaguguccaauu

SEQ ID NO: 90371 - RNA, 19 nt, Homo sapiens
  misc_RNA (1)...(19): siRNA sense strand
gauaaagcaaagauggauu

SEQ ID NO: 90372 - RNA, 19 nt, Homo sapiens
  misc_RNA (1)...(19): siRNA sense strand
aaaggaaauugaugauguc

SEQ ID NO: 90373 - RNA, 19 nt, Homo sapiens
  misc_RNA (1)...(19): siRNA sense strand
gagaugauaggaugugaca

SEQ ID NO: 90374 - RNA, 19 nt, Homo sapiens
  misc_RNA (1)...(19): siRNA sense strand
gucaagaauugggagauga

SEQ ID NO: 90375 - RNA, 19 nt, Homo sapiens
  misc_RNA (1)...(19): siRNA sense strand
gugcaggacuaccuugagu

SEQ ID NO: 90376 - RNA, 19 nt, Homo sapiens
  misc_RNA (1)...(19): siRNA sense strand
gaugaucagccaccuaaag

SEQ ID NO: 90377 - RNA, 19 nt, Homo sapiens
  misc_RNA (1)...(19): siRNA sense strand
gauugaagacugugaugau

SEQ ID NO: 90378 - RNA, 19 nt, Homo sapiens
  misc_RNA (1)...(19): siRNA sense strand
cacaaaugcucgaauuggu

SEQ ID NO: 90379 - RNA, 19 nt, Homo sapiens
  misc_RNA (1)...(19): siRNA sense strand
ggcaagacaaauggaguua

SEQ ID NO: 90380 - RNA, 19 nt, Homo sapiens
  misc_RNA (1)...(19): siRNA sense strand
gugaaagccgugauuuaug

SEQ ID NO: 90381 - RNA, 19 nt, Homo sapiens
  misc_RNA (1)...(19): siRNA sense strand
gugaacgagccucagauaa

SEQ ID NO: 90382 - RNA, 19 nt, Homo sapiens
  misc_RNA (1)...(19): siRNA sense strand
gcaggaaagggaagcuuca

SEQ ID NO: 90383 - RNA, 19 nt, Homo sapiens
  misc_RNA (1)...(19): siRNA sense strand
gaaauccaagucagcaaag

SEQ ID NO: 90384 - RNA, 19 nt, Homo sapiens
  misc_RNA (1)...(19): siRNA sense strand
gggcaagacaaauggaguu

SEQ ID NO: 90385 - RNA, 19 nt, Homo sapiens
  misc_RNA (1)...(19): siRNA sense strand
gggagaugauaggauguga

SEQ ID NO: 90386 - RNA, 19 nt, Homo sapiens
  misc_RNA (1)...(19): siRNA sense strand
uaugcaaccaagugucuua

SEQ ID NO: 90387 - RNA, 19 nt, Homo sapiens
  misc_RNA (1)...(19): siRNA sense strand
ggauugaagacugugauga

SEQ ID NO: 90388 - RNA, 19 nt, Homo sapiens
  misc_RNA (1)...(19): siRNA sense strand
gcaauagauccuaaugaac

SEQ ID NO: 90389 - RNA, 19 nt, Homo sapiens
  misc_RNA (1)...(19): siRNA sense strand
gauuccagccaaccagaaa

SEQ ID NO: 90390 - RNA, 19 nt, Homo sapiens
  misc_RNA (1)...(19): siRNA sense strand
ccagugaaagccgugauuu

SEQ ID NO: 90391 - RNA, 19 nt, Homo sapiens
  misc_RNA (1)...(19): siRNA sense strand
agaaauccaagucagcaaa

SEQ ID NO: 90392 - RNA, 19 nt, Homo sapiens
  misc_RNA (1)...(19): siRNA sense strand
gcaaaugggauugaagacu

SEQ ID NO: 90393 - RNA, 19 nt, Homo sapiens
  misc_RNA (1)...(19): siRNA sense strand
agugaaagccgugauuuau

SEQ ID NO: 90394 - RNA, 19 nt, Homo sapiens
  misc_RNA (1)...(19): siRNA sense strand
ucaagaauugggagaugaa

SEQ ID NO: 90395 - RNA, 19 nt, Homo sapiens
  misc_RNA (1)...(19): siRNA sense strand
gagcuggacaacaaauauc

SEQ ID NO: 90396 - RNA, 19 nt, Homo sapiens
  misc_RNA (1)...(19): siRNA sense strand
aaagugaacgagccucaga

SEQ ID NO: 90397 - RNA, 19 nt, Homo sapiens
  misc_RNA (1)...(19): siRNA sense strand
aagcuucaccuguugaguu

SEQ ID NO: 90398 - RNA, 19 nt, Homo sapiens
  misc_RNA (1)...(19): siRNA sense strand
gagccucagauaaagcaaa

SEQ ID NO: 90399 - RNA, 19 nt, Homo sapiens
  misc_RNA (1)...(19): siRNA sense strand
caggggagauaaugagaaa

SEQ ID NO: 90400 - RNA, 19 nt, Homo sapiens
  misc_RNA (1)...(19): siRNA sense strand
gaaacguuaaaggaaauug

SEQ ID NO: 90401 - RNA, 19 nt, Homo sapiens
  misc_RNA (1)...(19): siRNA sense strand
gauuuaaaccagaagaaac

SEQ ID NO: 90402 - RNA, 19 nt, Homo sapiens
  misc_RNA (1)...(19): siRNA sense strand
aaaugggauugaagacugu

SEQ ID NO: 90403 - RNA, 19 nt, Homo sapiens
  misc_RNA (1)...(19): siRNA sense strand
cauggcaaaugggauugaa

SEQ ID NO: 90404 - RNA, 19 nt, Homo sapiens
  misc_RNA (1)...(19): siRNA sense strand
cagauaaagcaaagaugga

SEQ ID NO: 90405 - RNA, 19 nt, Homo sapiens
  misc_RNA (1)...(19): siRNA sense strand
cguuaaaggaaauugauga

SEQ ID NO: 90406 - RNA, 19 nt, Homo sapiens
  misc_RNA (1)...(19): siRNA sense strand
gaaaacaauggacaaaagu

SEQ ID NO: 90407 - RNA, 19 nt, Homo sapiens
  misc_RNA (1)...(19): siRNA sense strand
agaaaacaauggacaaaag

SEQ ID NO: 90408 - RNA, 19 nt, Homo sapiens
  misc_RNA (1)...(19): siRNA sense strand
uggcaaaugggauugaaga

SEQ ID NO: 90409 - RNA, 19 nt, Homo sapiens
  misc_RNA (1)...(19): siRNA sense strand
uuuccaagauccugcugaa

SEQ ID NO: 90410 - RNA, 19 nt, Homo sapiens
  misc_RNA (1)...(19): siRNA sense strand
caaccagaaagaucuucaa

SEQ ID NO: 90411 - RNA, 19 nt, Homo sapiens
  misc_RNA (1)...(19): siRNA sense strand
cuguugaguuugcaauaga

SEQ ID NO: 90412 - RNA, 19 nt, Homo sapiens
  misc_RNA (1)...(19): siRNA sense strand
agugaacgagccucagaua

SEQ ID NO: 90413 - RNA, 19 nt, Homo sapiens
  misc_RNA (1)...(19): siRNA sense strand
ugaaccuacauacugcuua

SEQ ID NO: 90414 - RNA, 19 nt, Homo sapiens
  misc_RNA (1)...(19): siRNA sense strand
agcuucaccuguugaguuu

SEQ ID NO: 90415 - RNA, 19 nt, Homo sapiens
  misc_RNA (1)...(19): siRNA sense strand
caagaauugggagaugaaa

SEQ ID NO: 90416 - RNA, 19 nt, Homo sapiens
  misc_RNA (1)...(19): siRNA sense strand
cccacgacaugcagaggaa

SEQ ID NO: 90417 - RNA, 19 nt, Homo sapiens
  misc_RNA (1)...(19): siRNA sense strand
gagaaaacaauggacaaaa

SEQ ID NO: 90418 - RNA, 19 nt, Homo sapiens
  misc_RNA (1)...(19): siRNA sense strand
ugauaggaugugacaauga

SEQ ID NO: 90419 - RNA, 19 nt, Homo sapiens
  misc_RNA (1)...(19): siRNA sense strand
agucaagaauugggagaug

SEQ ID NO: 90420 - RNA, 19 nt, Homo sapiens
  misc_RNA (1)...(19): siRNA sense strand
ccuguugaguuugcaauag

SEQ ID NO: 90421 - RNA, 19 nt, Homo sapiens
  misc_RNA (1)...(19): siRNA sense strand
aaauccaagucagcaaaga

SEQ ID NO: 90422 - RNA, 19 nt, Homo sapiens
  misc_RNA (1)...(19): siRNA sense strand
aauugaugaugucuacgaa

SEQ ID NO: 90423 - RNA, 19 nt, Homo sapiens
  misc_RNA (1)...(19): siRNA sense strand
ggauuccagccaaccagaa

SEQ ID NO: 90424 - RNA, 19 nt, Homo sapiens
  misc_RNA (1)...(19): siRNA sense strand
uccaagauccugcugaaag

SEQ ID NO: 90425 - RNA, 19 nt, Homo sapiens
  misc_RNA (1)...(19): siRNA sense strand
acacaaaugcucgaauugg

SEQ ID NO: 90426 - RNA, 19 nt, Homo sapiens
  misc_RNA (1)...(19): siRNA sense strand
gaugauuuaaaccagaaga

SEQ ID NO: 90427 - RNA, 19 nt, Homo sapiens
  misc_RNA (1)...(19): siRNA sense strand
gcgagagcuggacaacaaa

SEQ ID NO: 90428 - RNA, 19 nt, Homo sapiens
  misc_RNA (1)...(19): siRNA sense strand
gggaagcuucaccuguuga

SEQ ID NO: 90429 - RNA, 19 nt, Homo sapiens
  misc_RNA (1)...(19): siRNA sense strand
gaaagccgugauuuauguc

SEQ ID NO: 90430 - RNA, 19 nt, Homo sapiens
  misc_RNA (1)...(19): siRNA sense strand
auaaagcaaagauggauuc

SEQ ID NO: 90431 - RNA, 19 nt, Homo sapiens
  misc_RNA (1)...(19): siRNA sense strand
agagcuggacaacaaauau

SEQ ID NO: 90432 - RNA, 19 nt, Homo sapiens
  misc_RNA (1)...(19): siRNA sense strand
gagaagagaugucugaauc

SEQ ID NO: 90433 - RNA, 19 nt, Homo sapiens
  misc_RNA (1)...(19): siRNA sense strand
cgaaggccaucaagaauuu

SEQ ID NO: 90434 - RNA, 19 nt, Homo sapiens
  misc_RNA (1)...(19): siRNA sense strand
gaaagcaguuagcaaggaa

SEQ ID NO: 90435 - RNA, 19 nt, Homo sapiens
  misc_RNA (1)...(19): siRNA sense strand
aauccaaggucuuuagaaa

SEQ ID NO: 90436 - RNA, 19 nt, Homo sapiens
  misc_RNA (1)...(19): siRNA sense strand
gaagagaugucugaaucca

SEQ ID NO: 90437 - RNA, 19 nt, Homo sapiens
  misc_RNA (1)...(19): siRNA sense strand
aaagaagggugagaagaga

SEQ ID NO: 90438 - RNA, 19 nt, Homo sapiens
  misc_RNA (1)...(19): siRNA sense strand
ugaaagcaguuagcaagga

SEQ ID NO: 90439 - RNA, 19 nt, Homo sapiens
  misc_RNA (1)...(19): siRNA sense strand
gauuugcugccuuaucuuu

SEQ ID NO: 90440 - RNA, 19 nt, Homo sapiens
  misc_RNA (1)...(19): siRNA sense strand
aaucgaaggccaucaagaa

SEQ ID NO: 90441 - RNA, 19 nt, Homo sapiens
  misc_RNA (1)...(19): siRNA sense strand
ggugagaagagaugucuga

SEQ ID NO: 90442 - RNA, 19 nt, Homo sapiens
  misc_RNA (1)...(19): siRNA sense strand
ggaguaccucucucuagaa

SEQ ID NO: 90443 - RNA, 19 nt, Homo sapiens
  misc_RNA (1)...(19): siRNA sense strand
aggaguaccucucucuaga

SEQ ID NO: 90444 - RNA, 19 nt, Homo sapiens
  misc_RNA (1)...(19): siRNA sense strand
guaaucaaccuguuaaucc

SEQ ID NO: 90445 - RNA, 19 nt, Homo sapiens
  misc_RNA (1)...(19): siRNA sense strand
auucugauuugcugccuua

SEQ ID NO: 90446 - RNA, 19 nt, Homo sapiens
  misc_RNA (1)...(19): siRNA sense strand
gaaggccaucaagaauuua

SEQ ID NO: 90447 - RNA, 19 nt, Homo sapiens
  misc_RNA (1)...(19): siRNA sense strand
uaaucaaccuguuaaucca

SEQ ID NO: 90448 - RNA, 19 nt, Homo sapiens
  misc_RNA (1)...(19): siRNA sense strand
gaguaccucucucuagaac

SEQ ID NO: 90449 - RNA, 19 nt, Homo sapiens
  misc_RNA (1)...(19): siRNA sense strand
gaaucgaaggccaucaaga

SEQ ID NO: 90450 - RNA, 19 nt, Homo sapiens
  misc_RNA (1)...(19): siRNA sense strand
caaggaguaccucucucua

SEQ ID NO: 90451 - RNA, 19 nt, Homo sapiens
  misc_RNA (1)...(19): siRNA sense strand
guaccugcaucagcauuag

SEQ ID NO: 90452 - RNA, 19 nt, Homo sapiens
  misc_RNA (1)...(19): siRNA sense strand
ucaagaauuuacugaaagc

SEQ ID NO: 90453 - RNA, 19 nt, Homo sapiens
  misc_RNA (1)...(19): siRNA sense strand
cugauuugcugccuuaucu

SEQ ID NO: 90454 - RNA, 19 nt, Homo sapiens
  misc_RNA (1)...(19): siRNA sense strand
ucgaaggccaucaagaauu

SEQ ID NO: 90455 - RNA, 19 nt, Homo sapiens
  misc_RNA (1)...(19): siRNA sense strand
ucuagaaccguacgcugua

SEQ ID NO: 90456 - RNA, 19 nt, Homo sapiens
  misc_RNA (1)...(19): siRNA sense strand
gacucuaaguggcauucaa

SEQ ID NO: 90457 - RNA, 19 nt, Homo sapiens
  misc_RNA (1)...(19): siRNA sense strand
cagaaucgaaggccaucaa

SEQ ID NO: 90458 - RNA, 19 nt, Homo sapiens
  misc_RNA (1)...(19): siRNA sense strand
guugagaucauugcuacaa

SEQ ID NO: 90459 - RNA, 19 nt, Homo sapiens
  misc_RNA (1)...(19): siRNA sense strand
guuaauccaaggucuuuag

SEQ ID NO: 90460 - RNA, 19 nt, Homo sapiens
  misc_RNA (1)...(19): siRNA sense strand
ugagaagagaugucugaau

SEQ ID NO: 90461 - RNA, 19 nt, Homo sapiens
  misc_RNA (1)...(19): siRNA sense strand
ccaucaagaauuuacugaa

SEQ ID NO: 90462 - RNA, 19 nt, Homo sapiens
  misc_RNA (1)...(19): siRNA sense strand
aaguggcauucaaggagua

SEQ ID NO: 90463 - RNA, 19 nt, Homo sapiens
  misc_RNA (1)...(19): siRNA sense strand
caucauagguugcauuuaa

SEQ ID NO: 90464 - RNA, 19 nt, Homo sapiens
  misc_RNA (1)...(19): siRNA sense strand
gaacguucauugucaaaga

SEQ ID NO: 90465 - RNA, 19 nt, Homo sapiens
  misc_RNA (1)...(19): siRNA sense strand
gaagagaccaagaaacauu

SEQ ID NO: 90466 - RNA, 19 nt, Homo sapiens
  misc_RNA (1)...(19): siRNA sense strand
gcgguuaaauuccuacuuu

SEQ ID NO: 90467 - RNA, 19 nt, Homo sapiens
  misc_RNA (1)...(19): siRNA sense strand
ugaccgaccuccaucagua

SEQ ID NO: 90468 - RNA, 19 nt, Homo sapiens
  misc_RNA (1)...(19): siRNA sense strand
gaaccaacaauccuauauu

SEQ ID NO: 90469 - RNA, 19 nt, Homo sapiens
  misc_RNA (1)...(19): siRNA sense strand
gaucgaaagccaaauaguu

SEQ ID NO: 90470 - RNA, 19 nt, Homo sapiens
  misc_RNA (1)...(19): siRNA sense strand
gaacgugaccuucaaaguc

SEQ ID NO: 90471 - RNA, 19 nt, Homo sapiens
  misc_RNA (1)...(19): siRNA sense strand
gaugagaguucaagacgau

SEQ ID NO: 90472 - RNA, 19 nt, Homo sapiens
  misc_RNA (1)...(19): siRNA sense strand
ggaaaucgcgacggguuua

SEQ ID NO: 90473 - RNA, 19 nt, Homo sapiens
  misc_RNA (1)...(19): siRNA sense strand
gaauaagaacgucgacauu

SEQ ID NO: 90474 - RNA, 19 nt, Homo sapiens
  misc_RNA (1)...(19): siRNA sense strand
ccacaaacuugcacauaca

SEQ ID NO: 90475 - RNA, 19 nt, Homo sapiens
  misc_RNA (1)...(19): siRNA sense strand
ucaagacgauggaggauca

SEQ ID NO: 90476 - RNA, 19 nt, Homo sapiens
  misc_RNA (1)...(19): siRNA sense strand
gcacagacggagaucauug

SEQ ID NO: 90477 - RNA, 19 nt, Homo sapiens
  misc_RNA (1)...(19): siRNA sense strand
gugcaugcccggaagaaua

SEQ ID NO: 90478 - RNA, 19 nt, Homo sapiens
  misc_RNA (1)...(19): siRNA sense strand
ccaagaaggccaugguauu

SEQ ID NO: 90479 - RNA, 19 nt, Homo sapiens
  misc_RNA (1)...(19): siRNA sense strand
ucaaucagaugacacaagu

SEQ ID NO: 90480 - RNA, 19 nt, Homo sapiens
  misc_RNA (1)...(19): siRNA sense strand
gccgagagguuuggcgaua

SEQ ID NO: 90481 - RNA, 19 nt, Homo sapiens
  misc_RNA (1)...(19): siRNA sense strand
gccaaauugucacccagua

SEQ ID NO: 90482 - RNA, 19 nt, Homo sapiens
  misc_RNA (1)...(19): siRNA sense strand
ggaaccaacaauccuauau

SEQ ID NO: 90483 - RNA, 19 nt, Homo sapiens
  misc_RNA (1)...(19): siRNA sense strand
gagccuagagugcaucauu

SEQ ID NO: 90484 - RNA, 19 nt, Homo sapiens
  misc_RNA (1)...(19): siRNA sense strand
gcuggcagauggaggagaa

SEQ ID NO: 90485 - RNA, 19 nt, Homo sapiens
  misc_RNA (1)...(19): siRNA sense strand
acacuaaggucugcagaga

SEQ ID NO: 90486 - RNA, 19 nt, Homo sapiens
  misc_RNA (1)...(19): siRNA sense strand
gggaggagcuggcaaugcu

SEQ ID NO: 90487 - RNA, 19 nt, Homo sapiens
  misc_RNA (1)...(19): siRNA sense strand
uguaugaugucaaagauag

SEQ ID NO: 90488 - RNA, 19 nt, Homo sapiens
  misc_RNA (1)...(19): siRNA sense strand
ucaucaacguggagaguuu

SEQ ID NO: 90489 - RNA, 19 nt, Homo sapiens
  misc_RNA (1)...(19): siRNA sense strand
caagaaggccaugguauuc

SEQ ID NO: 90490 - RNA, 19 nt, Homo sapiens
  misc_RNA (1)...(19): siRNA sense strand
gagagugaccguguaggua

SEQ ID NO: 90491 - RNA, 19 nt, Homo sapiens
  misc_RNA (1)...(19): siRNA sense strand
gaucucagggaacaaugua

SEQ ID NO: 90492 - RNA, 19 nt, Homo sapiens
  misc_RNA (1)...(19): siRNA sense strand
gaagaugcagccagagugu

SEQ ID NO: 90493 - RNA, 19 nt, Homo sapiens
  misc_RNA (1)...(19): siRNA sense strand
cuagaucgaaagccaaaua

SEQ ID NO: 90494 - RNA, 19 nt, Homo sapiens
  misc_RNA (1)...(19): siRNA sense strand
ccaacaauccuauauuucu

SEQ ID NO: 90495 - RNA, 19 nt, Homo sapiens
  misc_RNA (1)...(19): siRNA sense strand
ugaggaacgugaccuucaa

SEQ ID NO: 90496 - RNA, 19 nt, Homo sapiens
  misc_RNA (1)...(19): siRNA sense strand
gacaugagccuugggauca

SEQ ID NO: 90497 - RNA, 19 nt, Homo sapiens
  misc_RNA (1)...(19): siRNA sense strand
uaaagcaagcaguuugaaa

SEQ ID NO: 90498 - RNA, 19 nt, Homo sapiens
  misc_RNA (1)...(19): siRNA sense strand
ggaauccgauccaaauacg

SEQ ID NO: 90499 - RNA, 19 nt, Homo sapiens
  misc_RNA (1)...(19): siRNA sense strand
uagguugcauuuaacacua

SEQ ID NO: 90500 - RNA, 19 nt, Homo sapiens
  misc_RNA (1)...(19): siRNA sense strand
gagcuugacggaggcguua

SEQ ID NO: 90501 - RNA, 19 nt, Homo sapiens
  misc_RNA (1)...(19): siRNA sense strand
ggcgauacgucuuuacaag

SEQ ID NO: 90502 - RNA, 19 nt, Homo sapiens
  misc_RNA (1)...(19): siRNA sense strand
ucauuaagcugaggaacug

SEQ ID NO: 90503 - RNA, 19 nt, Homo sapiens
  misc_RNA (1)...(19): siRNA sense strand
aaacccaagugaguuacua

SEQ ID NO: 90504 - RNA, 19 nt, Homo sapiens
  misc_RNA (1)...(19): siRNA sense strand
ugaggaguguuguacauca

SEQ ID NO: 90505 - RNA, 19 nt, Homo sapiens
  misc_RNA (1)...(19): siRNA sense strand
ucagggaacaauguauuua

SEQ ID NO: 90506 - RNA, 19 nt, Homo sapiens
  misc_RNA (1)...(19): siRNA sense strand
caucugcggcuucaucauu

SEQ ID NO: 90507 - RNA, 19 nt, Homo sapiens
  misc_RNA (1)...(19): siRNA sense strand
gcaguuugaaagcagauaa

SEQ ID NO: 90508 - RNA, 19 nt, Homo sapiens
  misc_RNA (1)...(19): siRNA sense strand
agaccaucauccucacaua

SEQ ID NO: 90509 - RNA, 19 nt, Homo sapiens
  misc_RNA (1)...(19): siRNA sense strand
gguuaaauuccuacuuuga

SEQ ID NO: 90510 - RNA, 19 nt, Homo sapiens
  misc_RNA (1)...(19): siRNA sense strand
gcacauacaaaggaugaga

SEQ ID NO: 90511 - RNA, 19 nt, Homo sapiens
  misc_RNA (1)...(19): siRNA sense strand
gagggaaccaacaauccua

SEQ ID NO: 90512 - RNA, 19 nt, Homo sapiens
  misc_RNA (1)...(19): siRNA sense strand
gaaaucgcgacggguuuaa

SEQ ID NO: 90513 - RNA, 19 nt, Homo sapiens
  misc_RNA (1)...(19): siRNA sense strand
gcaccagcaagaaagauug

SEQ ID NO: 90514 - RNA, 19 nt, Homo sapiens
  misc_RNA (1)...(19): siRNA sense strand
gggagaaaguguggcugaa

SEQ ID NO: 90515 - RNA, 19 nt, Homo sapiens
  misc_RNA (1)...(19): siRNA sense strand
aagcaguauugccuucuuu

SEQ ID NO: 90516 - RNA, 19 nt, Homo sapiens
  misc_RNA (1)...(19): siRNA sense strand
gaaccugaccgaccuccau

SEQ ID NO: 90517 - RNA, 19 nt, Homo sapiens
  misc_RNA (1)...(19): siRNA sense strand
caggugaugcuuagaaaug

SEQ ID NO: 90518 - RNA, 19 nt, Homo sapiens
  misc_RNA (1)...(19): siRNA sense strand
uaagcaguauugccuucuu

SEQ ID NO: 90519 - RNA, 19 nt, Homo sapiens
  misc_RNA (1)...(19): siRNA sense strand
gcguggccaugaugaguga

SEQ ID NO: 90520 - RNA, 19 nt, Homo sapiens
  misc_RNA (1)...(19): siRNA sense strand
ggagaaacagccgaucuuc

SEQ ID NO: 90521 - RNA, 19 nt, Homo sapiens
  misc_RNA (1)...(19): siRNA sense strand
gcaagcuccuggccaacuc

SEQ ID NO: 90522 - RNA, 19 nt, Homo sapiens
  misc_RNA (1)...(19): siRNA sense strand
auacaaaggaugagaguuc

SEQ ID NO: 90523 - RNA, 19 nt, Homo sapiens
  misc_RNA (1)...(19): siRNA sense strand
ucgugaagcuccuacuaga

SEQ ID NO: 90524 - RNA, 19 nt, Homo sapiens
  misc_RNA (1)...(19): siRNA sense strand
agagugaccguguagguaa

SEQ ID NO: 90525 - RNA, 19 nt, Homo sapiens
  misc_RNA (1)...(19): siRNA sense strand
cuccaucgcuagaucgaaa

SEQ ID NO: 90526 - RNA, 19 nt, Homo sapiens
  misc_RNA (1)...(19): siRNA sense strand
uacaagaagucaucaacgu

SEQ ID NO: 90527 - RNA, 19 nt, Homo sapiens
  misc_RNA (1)...(19): siRNA sense strand
gauccaaauacgcuucauu

SEQ ID NO: 90528 - RNA, 19 nt, Homo sapiens
  misc_RNA (1)...(19): siRNA sense strand
ugacggaggcguuaggaau

SEQ ID NO: 90529 - RNA, 19 nt, Homo sapiens
  misc_RNA (1)...(19): siRNA sense strand
gggaaccaacaauccuaua

SEQ ID NO: 90530 - RNA, 19 nt, Homo sapiens
  misc_RNA (1)...(19): siRNA sense strand
ggaacgugaccuucaaagu

SEQ ID NO: 90531 - RNA, 19 nt, Homo sapiens
  misc_RNA (1)...(19): siRNA sense strand
gggagaaacagccgaucuu

SEQ ID NO: 90532 - RNA, 19 nt, Homo sapiens
  misc_RNA (1)...(19): siRNA sense strand
agaggacacucgccaucuu

SEQ ID NO: 90533 - RNA, 19 nt, Homo sapiens
  misc_RNA (1)...(19): siRNA sense strand
gcagauggaggagaaguca

SEQ ID NO: 90534 - RNA, 19 nt, Homo sapiens
  misc_RNA (1)...(19): siRNA sense strand
gcagagagugaccguguag

SEQ ID NO: 90535 - RNA, 19 nt, Homo sapiens
  misc_RNA (1)...(19): siRNA sense strand
ucuggaacguucauuguca

SEQ ID NO: 90536 - RNA, 19 nt, Homo sapiens
  misc_RNA (1)...(19): siRNA sense strand
acuaaggucugcagagagu

SEQ ID NO: 90537 - RNA, 19 nt, Homo sapiens
  misc_RNA (1)...(19): siRNA sense strand
gaggacacucgccaucuug

SEQ ID NO: 90538 - RNA, 19 nt, Homo sapiens
  misc_RNA (1)...(19): siRNA sense strand
ccagaucaacacccugaaa

SEQ ID NO: 90539 - RNA, 19 nt, Homo sapiens
  misc_RNA (1)...(19): siRNA sense strand
gaggaguguuguacaucau

SEQ ID NO: 90540 - RNA, 19 nt, Homo sapiens
  misc_RNA (1)...(19): siRNA sense strand
ggugccaucugccgcaugu

SEQ ID NO: 90541 - RNA, 19 nt, Homo sapiens
  misc_RNA (1)...(19): siRNA sense strand
uuaggaauccgauccaaau

SEQ ID NO: 90542 - RNA, 19 nt, Homo sapiens
  misc_RNA (1)...(19): siRNA sense strand
gcaguauugccuucuuuca

SEQ ID NO: 90543 - RNA, 19 nt, Homo sapiens
  misc_RNA (1)...(19): siRNA sense strand
aagucaaacucuccgugua

SEQ ID NO: 90544 - RNA, 19 nt, Homo sapiens
  misc_RNA (1)...(19): siRNA sense strand
aguauugccuucuuucaag

SEQ ID NO: 90545 - RNA, 19 nt, Homo sapiens
  misc_RNA (1)...(19): siRNA sense strand
ucaaugagcagcagacacu

SEQ ID NO: 90546 - RNA, 19 nt, Homo sapiens
  misc_RNA (1)...(19): siRNA sense strand
ggaguguuguacaucaucu

SEQ ID NO: 90547 - RNA, 19 nt, Homo sapiens
  misc_RNA (1)...(19): siRNA sense strand
uugaagagaccaagaaaca

SEQ ID NO: 90548 - RNA, 19 nt, Homo sapiens
  misc_RNA (1)...(19): siRNA sense strand
ggcaucauagguugcauuu

SEQ ID NO: 90549 - RNA, 19 nt, Homo sapiens
  misc_RNA (1)...(19): siRNA sense strand
ucucuuaucaaucagauga

SEQ ID NO: 90550 - RNA, 19 nt, Homo sapiens
  misc_RNA (1)...(19): siRNA sense strand
gaggaacgugaccuucaaa

SEQ ID NO: 90551 - RNA, 19 nt, Homo sapiens
  misc_RNA (1)...(19): siRNA sense strand
gaggaggagugggagaaag

SEQ ID NO: 90552 - RNA, 19 nt, Homo sapiens
  misc_RNA (1)...(19): siRNA sense strand
aaagcaagcaguuugaaag

SEQ ID NO: 90553 - RNA, 19 nt, Homo sapiens
  misc_RNA (1)...(19): siRNA sense strand
gcucuggaacguucauugu

SEQ ID NO: 90554 - RNA, 19 nt, Homo sapiens
  misc_RNA (1)...(19): siRNA sense strand
gagcccauuuuagaauuua

SEQ ID NO: 90555 - RNA, 19 nt, Homo sapiens
  misc_RNA (1)...(19): siRNA sense strand
ugagugacaaggccaagaa

SEQ ID NO: 90556 - RNA, 19 nt, Homo sapiens
  misc_RNA (1)...(19): siRNA sense strand
ugaaaacccaagugaguua

SEQ ID NO: 90557 - RNA, 19 nt, Homo sapiens
  misc_RNA (1)...(19): siRNA sense strand
uacaaaggaugagaguuca

SEQ ID NO: 90558 - RNA, 19 nt, Homo sapiens
  misc_RNA (1)...(19): siRNA sense strand
caaacuugcacauacaaag

SEQ ID NO: 90559 - RNA, 19 nt, Homo sapiens
  misc_RNA (1)...(19): siRNA sense strand
guuuaaagcaagcaguuug

SEQ ID NO: 90560 - RNA, 19 nt, Homo sapiens
  misc_RNA (1)...(19): siRNA sense strand
cgaccuccaucaguacaga

SEQ ID NO: 90561 - RNA, 19 nt, Homo sapiens
  misc_RNA (1)...(19): siRNA sense strand
uaggaauccgauccaaaua

SEQ ID NO: 90562 - RNA, 19 nt, Homo sapiens
  misc_RNA (1)...(19): siRNA sense strand
cagaugagcccauuuuaga

SEQ ID NO: 90563 - RNA, 19 nt, Homo sapiens
  misc_RNA (1)...(19): siRNA sense strand
caucauagguugcauuuaa

SEQ ID NO: 90564 - RNA, 19 nt, Homo sapiens
  misc_RNA (1)...(19): siRNA sense strand
gaacguucauugucaaaga

SEQ ID NO: 90565 - RNA, 19 nt, Homo sapiens
  misc_RNA (1)...(19): siRNA sense strand
gaagagaccaagaaacauu

SEQ ID NO: 90566 - RNA, 19 nt, Homo sapiens
  misc_RNA (1)...(19): siRNA sense strand
gcgguuaaauuccuacuuu

SEQ ID NO: 90567 - RNA, 19 nt, Homo sapiens
  misc_RNA (1)...(19): siRNA sense strand
ugaccgaccuccaucagua

SEQ ID NO: 90568 - RNA, 19 nt, Homo sapiens
  misc_RNA (1)...(19): siRNA sense strand
gaaccaacaauccuauauu

SEQ ID NO: 90569 - RNA, 19 nt, Homo sapiens
  misc_RNA (1)...(19): siRNA sense strand
gaucgaaagccaaauaguu

SEQ ID NO: 90570 - RNA, 19 nt, Homo sapiens
  misc_RNA (1)...(19): siRNA sense strand
gaacgugaccuucaaaguc

SEQ ID NO: 90571 - RNA, 19 nt, Homo sapiens
  misc_RNA (1)...(19): siRNA sense strand
gaugagaguucaagacgau

SEQ ID NO: 90572 - RNA, 19 nt, Homo sapiens
  misc_RNA (1)...(19): siRNA sense strand
ggaaaucgcgacggguuua

SEQ ID NO: 90573 - RNA, 19 nt, Homo sapiens
  misc_RNA (1)...(19): siRNA sense strand
gaauaagaacgucgacauu

SEQ ID NO: 90574 - RNA, 19 nt, Homo sapiens
  misc_RNA (1)...(19): siRNA sense strand
ccacaaacuugcacauaca

SEQ ID NO: 90575 - RNA, 19 nt, Homo sapiens
  misc_RNA (1)...(19): siRNA sense strand
ucaagacgauggaggauca

SEQ ID NO: 90576 - RNA, 19 nt, Homo sapiens
  misc_RNA (1)...(19): siRNA sense strand
gcacagacggagaucauug

SEQ ID NO: 90577 - RNA, 19 nt, Homo sapiens
  misc_RNA (1)...(19): siRNA sense strand
gugcaugcccggaagaaua

SEQ ID NO: 90578 - RNA, 19 nt, Homo sapiens
  misc_RNA (1)...(19): siRNA sense strand
ccaagaaggccaugguauu

SEQ ID NO: 90579 - RNA, 19 nt, Homo sapiens
  misc_RNA (1)...(19): siRNA sense strand
ucaaucagaugacacaagu

SEQ ID NO: 90580 - RNA, 19 nt, Homo sapiens
  misc_RNA (1)...(19): siRNA sense strand
gccgagagguuuggcgaua

SEQ ID NO: 90581 - RNA, 19 nt, Homo sapiens
  misc_RNA (1)...(19): siRNA sense strand
gccaaauugucacccagua

SEQ ID NO: 90582 - RNA, 19 nt, Homo sapiens
  misc_RNA (1)...(19): siRNA sense strand
ggaaccaacaauccuauau

SEQ ID NO: 90583 - RNA, 19 nt, Homo sapiens
  misc_RNA (1)...(19): siRNA sense strand
gagccuagagugcaucauu

SEQ ID NO: 90584 - RNA, 19 nt, Homo sapiens
  misc_RNA (1)...(19): siRNA sense strand
gcuggcagauggaggagaa

SEQ ID NO: 90585 - RNA, 19 nt, Homo sapiens
  misc_RNA (1)...(19): siRNA sense strand
acacuaaggucugcagaga

SEQ ID NO: 90586 - RNA, 19 nt, Homo sapiens
  misc_RNA (1)...(19): siRNA sense strand
gggaggagcuggcaaugcu

SEQ ID NO: 90587 - RNA, 19 nt, Homo sapiens
  misc_RNA (1)...(19): siRNA sense strand
uguaugaugucaaagauag

SEQ ID NO: 90588 - RNA, 19 nt, Homo sapiens
  misc_RNA (1)...(19): siRNA sense strand
ucaucaacguggagaguuu

SEQ ID NO: 90589 - RNA, 19 nt, Homo sapiens
  misc_RNA (1)...(19): siRNA sense strand
caagaaggccaugguauuc

SEQ ID NO: 90590 - RNA, 19 nt, Homo sapiens
  misc_RNA (1)...(19): siRNA sense strand
gagagugaccguguaggua

SEQ ID NO: 90591 - RNA, 19 nt, Homo sapiens
  misc_RNA (1)...(19): siRNA sense strand
gaucucagggaacaaugua

SEQ ID NO: 90592 - RNA, 19 nt, Homo sapiens
  misc_RNA (1)...(19): siRNA sense strand
gaagaugcagccagagugu

SEQ ID NO: 90593 - RNA, 19 nt, Homo sapiens
  misc_RNA (1)...(19): siRNA sense strand
cuagaucgaaagccaaaua

SEQ ID NO: 90594 - RNA, 19 nt, Homo sapiens
  misc_RNA (1)...(19): siRNA sense strand
ccaacaauccuauauuucu

SEQ ID NO: 90595 - RNA, 19 nt, Homo sapiens
  misc_RNA (1)...(19): siRNA sense strand
ugaggaacgugaccuucaa

SEQ ID NO: 90596 - RNA, 19 nt, Homo sapiens
  misc_RNA (1)...(19): siRNA sense strand
gacaugagccuugggauca

SEQ ID NO: 90597 - RNA, 19 nt, Homo sapiens
  misc_RNA (1)...(19): siRNA sense strand
uaaagcaagcaguuugaaa

SEQ ID NO: 90598 - RNA, 19 nt, Homo sapiens
  misc_RNA (1)...(19): siRNA sense strand
ggaauccgauccaaauacg

SEQ ID NO: 90599 - RNA, 19 nt, Homo sapiens
  misc_RNA (1)...(19): siRNA sense strand
uagguugcauuuaacacua

SEQ ID NO: 90600 - RNA, 19 nt, Homo sapiens
  misc_RNA (1)...(19): siRNA sense strand
gagcuugacggaggcguua

SEQ ID NO: 90601 - RNA, 19 nt, Homo sapiens
  misc_RNA (1)...(19): siRNA sense strand
ggcgauacgucuuuacaag

SEQ ID NO: 90602 - RNA, 19 nt, Homo sapiens
  misc_RNA (1)...(19): siRNA sense strand
ucauuaagcugaggaacug

SEQ ID NO: 90603 - RNA, 19 nt, Homo sapiens
  misc_RNA (1)...(19): siRNA sense strand
aaacccaagugaguuacua

SEQ ID NO: 90604 - RNA, 19 nt, Homo sapiens
  misc_RNA (1)...(19): siRNA sense strand
ugaggaguguuguacauca

SEQ ID NO: 90605 - RNA, 19 nt, Homo sapiens
  misc_RNA (1)...(19): siRNA sense strand
ucagggaacaauguauuua

SEQ ID NO: 90606 - RNA, 19 nt, Homo sapiens
  misc_RNA (1)...(19): siRNA sense strand
caucugcggcuucaucauu

SEQ ID NO: 90607 - RNA, 19 nt, Homo sapiens
  misc_RNA (1)...(19): siRNA sense strand
gcaguuugaaagcagauaa

SEQ ID NO: 90608 - RNA, 19 nt, Homo sapiens
  misc_RNA (1)...(19): siRNA sense strand
agaccaucauccucacaua

SEQ ID NO: 90609 - RNA, 19 nt, Homo sapiens
  misc_RNA (1)...(19): siRNA sense strand
gguuaaauuccuacuuuga

SEQ ID NO: 90610 - RNA, 19 nt, Homo sapiens
  misc_RNA (1)...(19): siRNA sense strand
gcacauacaaaggaugaga

SEQ ID NO: 90611 - RNA, 19 nt, Homo sapiens
  misc_RNA (1)...(19): siRNA sense strand
gagggaaccaacaauccua

SEQ ID NO: 90612 - RNA, 19 nt, Homo sapiens
  misc_RNA (1)...(19): siRNA sense strand
gaaaucgcgacggguuuaa

SEQ ID NO: 90613 - RNA, 19 nt, Homo sapiens
  misc_RNA (1)...(19): siRNA sense strand
gcaccagcaagaaagauug

SEQ ID NO: 90614 - RNA, 19 nt, Homo sapiens
  misc_RNA (1)...(19): siRNA sense strand
gggagaaaguguggcugaa

SEQ ID NO: 90615 - RNA, 19 nt, Homo sapiens
  misc_RNA (1)...(19): siRNA sense strand
aagcaguauugccuucuuu

SEQ ID NO: 90616 - RNA, 19 nt, Homo sapiens
  misc_RNA (1)...(19): siRNA sense strand
gaaccugaccgaccuccau

SEQ ID NO: 90617 - RNA, 19 nt, Homo sapiens
  misc_RNA (1)...(19): siRNA sense strand
caggugaugcuuagaaaug

SEQ ID NO: 90618 - RNA, 19 nt, Homo sapiens
  misc_RNA (1)...(19): siRNA sense strand
uaagcaguauugccuucuu

SEQ ID NO: 90619 - RNA, 19 nt, Homo sapiens
  misc_RNA (1)...(19): siRNA sense strand
gcguggccaugaugaguga

SEQ ID NO: 90620 - RNA, 19 nt, Homo sapiens
  misc_RNA (1)...(19): siRNA sense strand
ggagaaacagccgaucuuc

SEQ ID NO: 90621 - RNA, 19 nt, Homo sapiens
  misc_RNA (1)...(19): siRNA sense strand
gcaagcuccuggccaacuc

SEQ ID NO: 90622 - RNA, 19 nt, Homo sapiens
  misc_RNA (1)...(19): siRNA sense strand
auacaaaggaugagaguuc

SEQ ID NO: 90623 - RNA, 19 nt, Homo sapiens
  misc_RNA (1)...(19): siRNA sense strand
ucgugaagcuccuacuaga

SEQ ID NO: 90624 - RNA, 19 nt, Homo sapiens
  misc_RNA (1)...(19): siRNA sense strand
agagugaccguguagguaa

SEQ ID NO: 90625 - RNA, 19 nt, Homo sapiens
  misc_RNA (1)...(19): siRNA sense strand
cuccaucgcuagaucgaaa

SEQ ID NO: 90626 - RNA, 19 nt, Homo sapiens
  misc_RNA (1)...(19): siRNA sense strand
uacaagaagucaucaacgu

SEQ ID NO: 90627 - RNA, 19 nt, Homo sapiens
  misc_RNA (1)...(19): siRNA sense strand
gauccaaauacgcuucauu

SEQ ID NO: 90628 - RNA, 19 nt, Homo sapiens
  misc_RNA (1)...(19): siRNA sense strand
ugacggaggcguuaggaau

SEQ ID NO: 90629 - RNA, 19 nt, Homo sapiens
  misc_RNA (1)...(19): siRNA sense strand
gggaaccaacaauccuaua

SEQ ID NO: 90630 - RNA, 19 nt, Homo sapiens
  misc_RNA (1)...(19): siRNA sense strand
ggaacgugaccuucaaagu

SEQ ID NO: 90631 - RNA, 19 nt, Homo sapiens
  misc_RNA (1)...(19): siRNA sense strand
gggagaaacagccgaucuu

SEQ ID NO: 90632 - RNA, 19 nt, Homo sapiens
  misc_RNA (1)...(19): siRNA sense strand
agaggacacucgccaucuu

SEQ ID NO: 90633 - RNA, 19 nt, Homo sapiens
  misc_RNA (1)...(19): siRNA sense strand
gcagauggaggagaaguca

SEQ ID NO: 90634 - RNA, 19 nt, Homo sapiens
  misc_RNA (1)...(19): siRNA sense strand
gcagagagugaccguguag

SEQ ID NO: 90635 - RNA, 19 nt, Homo sapiens
  misc_RNA (1)...(19): siRNA sense strand
ucuggaacguucauuguca

SEQ ID NO: 90636 - RNA, 19 nt, Homo sapiens
  misc_RNA (1)...(19): siRNA sense strand
acuaaggucugcagagagu

SEQ ID NO: 90637 - RNA, 19 nt, Homo sapiens
  misc_RNA (1)...(19): siRNA sense strand
gaggacacucgccaucuug

SEQ ID NO: 90638 - RNA, 19 nt, Homo sapiens
  misc_RNA (1)...(19): siRNA sense strand
ccagaucaacacccugaaa

SEQ ID NO: 90639 - RNA, 19 nt, Homo sapiens
  misc_RNA (1)...(19): siRNA sense strand
gaggaguguuguacaucau

SEQ ID NO: 90640 - RNA, 19 nt, Homo sapiens
  misc_RNA (1)...(19): siRNA sense strand
ggugccaucugccgcaugu

SEQ ID NO: 90641 - RNA, 19 nt, Homo sapiens
  misc_RNA (1)...(19): siRNA sense strand
uuaggaauccgauccaaau

SEQ ID NO: 90642 - RNA, 19 nt, Homo sapiens
  misc_RNA (1)...(19): siRNA sense strand
gcaguauugccuucuuuca

SEQ ID NO: 90643 - RNA, 19 nt, Homo sapiens
  misc_RNA (1)...(19): siRNA sense strand
aagucaaacucuccgugua

SEQ ID NO: 90644 - RNA, 19 nt, Homo sapiens
  misc_RNA (1)...(19): siRNA sense strand
aguauugccuucuuucaag

SEQ ID NO: 90645 - RNA, 19 nt, Homo sapiens
  misc_RNA (1)...(19): siRNA sense strand
ucaaugagcagcagacacu

SEQ ID NO: 90646 - RNA, 19 nt, Homo sapiens
  misc_RNA (1)...(19): siRNA sense strand
ggaguguuguacaucaucu

SEQ ID NO: 90647 - RNA, 19 nt, Homo sapiens
  misc_RNA (1)...(19): siRNA sense strand
uugaagagaccaagaaaca

SEQ ID NO: 90648 - RNA, 19 nt, Homo sapiens
  misc_RNA (1)...(19): siRNA sense strand
ggcaucauagguugcauuu

SEQ ID NO: 90649 - RNA, 19 nt, Homo sapiens
  misc_RNA (1)...(19): siRNA sense strand
ucucuuaucaaucagauga

SEQ ID NO: 90650 - RNA, 19 nt, Homo sapiens
  misc_RNA (1)...(19): siRNA sense strand
gaggaacgugaccuucaaa

SEQ ID NO: 90651 - RNA, 19 nt, Homo sapiens
  misc_RNA (1)...(19): siRNA sense strand
gaggaggagugggagaaag

SEQ ID NO: 90652 - RNA, 19 nt, Homo sapiens
  misc_RNA (1)...(19): siRNA sense strand
aaagcaagcaguuugaaag

SEQ ID NO: 90653 - RNA, 19 nt, Homo sapiens
  misc_RNA (1)...(19): siRNA sense strand
gcucuggaacguucauugu

SEQ ID NO: 90654 - RNA, 19 nt, Homo sapiens
  misc_RNA (1)...(19): siRNA sense strand
gagcccauuuuagaauuua

SEQ ID NO: 90655 - RNA, 19 nt, Homo sapiens
  misc_RNA (1)...(19): siRNA sense strand
ugagugacaaggccaagaa

SEQ ID NO: 90656 - RNA, 19 nt, Homo sapiens
  misc_RNA (1)...(19): siRNA sense strand
ugaaaacccaagugaguua

SEQ ID NO: 90657 - RNA, 19 nt, Homo sapiens
  misc_RNA (1)...(19): siRNA sense strand
uacaaaggaugagaguuca

SEQ ID NO: 90658 - RNA, 19 nt, Homo sapiens
  misc_RNA (1)...(19): siRNA sense strand
caaacuugcacauacaaag

SEQ ID NO: 90659 - RNA, 19 nt, Homo sapiens
  misc_RNA (1)...(19): siRNA sense strand
guuuaaagcaagcaguuug

SEQ ID NO: 90660 - RNA, 19 nt, Homo sapiens
  misc_RNA (1)...(19): siRNA sense strand
cgaccuccaucaguacaga

SEQ ID NO: 90661 - RNA, 19 nt, Homo sapiens
  misc_RNA (1)...(19): siRNA sense strand
uaggaauccgauccaaaua

SEQ ID NO: 90662 - RNA, 19 nt, Homo sapiens
  misc_RNA (1)...(19): siRNA sense strand
cagaugagcccauuuuaga

SEQ ID NO: 90663 - RNA, 19 nt, Homo sapiens
  misc_RNA (1)...(19): siRNA sense strand
cgaagaaagugaugaauuu

SEQ ID NO: 90664 - RNA, 19 nt, Homo sapiens
  misc_RNA (1)...(19): siRNA sense strand
ugaaagaccugguggaaga

SEQ ID NO: 90665 - RNA, 19 nt, Homo sapiens
  misc_RNA (1)...(19): siRNA sense strand
ggacuuugcuggcuacugu

SEQ ID NO: 90666 - RNA, 19 nt, Homo sapiens
  misc_RNA (1)...(19): siRNA sense strand
gacagaagaugguccagaa

SEQ ID NO: 90667 - RNA, 19 nt, Homo sapiens
  misc_RNA (1)...(19): siRNA sense strand
ugaagaggcugaaggagaa

SEQ ID NO: 90668 - RNA, 19 nt, Homo sapiens
  misc_RNA (1)...(19): siRNA sense strand
gcaauucaguuucuacauc

SEQ ID NO: 90669 - RNA, 19 nt, Homo sapiens
  misc_RNA (1)...(19): siRNA sense strand
ggaguggacugcagugaag

SEQ ID NO: 90670 - RNA, 19 nt, Homo sapiens
  misc_RNA (1)...(19): siRNA sense strand
ccaugcagaucuacaagaa

SEQ ID NO: 90671 - RNA, 19 nt, Homo sapiens
  misc_RNA (1)...(19): siRNA sense strand
gagcagcuguccagguuuc

SEQ ID NO: 90672 - RNA, 19 nt, Homo sapiens
  misc_RNA (1)...(19): siRNA sense strand
caauucaguuucuacauca

SEQ ID NO: 90673 - RNA, 19 nt, Homo sapiens
  misc_RNA (1)...(19): siRNA sense strand
ggaccaaguaucugaaaga

SEQ ID NO: 90674 - RNA, 19 nt, Homo sapiens
  misc_RNA (1)...(19): siRNA sense strand
ucagagccaccgcagauua

SEQ ID NO: 90675 - RNA, 19 nt, Homo sapiens
  misc_RNA (1)...(19): siRNA sense strand
ccaacguccuucuggauga

SEQ ID NO: 90676 - RNA, 19 nt, Homo sapiens
  misc_RNA (1)...(19): siRNA sense strand
caccgcagauuaucaucaa

SEQ ID NO: 90677 - RNA, 19 nt, Homo sapiens
  misc_RNA (1)...(19): siRNA sense strand
ccgaagaaagugaugaauu

SEQ ID NO: 90678 - RNA, 19 nt, Homo sapiens
  misc_RNA (1)...(19): siRNA sense strand
ggacacggcaggagaaucg

SEQ ID NO: 90679 - RNA, 19 nt, Homo sapiens
  misc_RNA (1)...(19): siRNA sense strand
gcgcccagcacuucuugua

SEQ ID NO: 90680 - RNA, 19 nt, Homo sapiens
  misc_RNA (1)...(19): siRNA sense strand
ggacauccuucuggguaca

SEQ ID NO: 90681 - RNA, 19 nt, Homo sapiens
  misc_RNA (1)...(19): siRNA sense strand
ccucauccauggagacauc

SEQ ID NO: 90682 - RNA, 19 nt, Homo sapiens
  misc_RNA (1)...(19): siRNA sense strand
ggucagagggcugugaaga

SEQ ID NO: 90683 - RNA, 19 nt, Homo sapiens
  misc_RNA (1)...(19): siRNA sense strand
acggacaccuucagcuuug

SEQ ID NO: 90684 - RNA, 19 nt, Homo sapiens
  misc_RNA (1)...(19): siRNA sense strand
gccaggaccaaguaucuga

SEQ ID NO: 90685 - RNA, 19 nt, Homo sapiens
  misc_RNA (1)...(19): siRNA sense strand
gaccaaguaucugaaagac

SEQ ID NO: 90686 - RNA, 19 nt, Homo sapiens
  misc_RNA (1)...(19): siRNA sense strand
acccaaacauuguggacuu

SEQ ID NO: 90687 - RNA, 19 nt, Homo sapiens
  misc_RNA (1)...(19): siRNA sense strand
cccaaacauuguggacuuu

SEQ ID NO: 90688 - RNA, 19 nt, Homo sapiens
  misc_RNA (1)...(19): siRNA sense strand
ccaucgccaugcagaucua

SEQ ID NO: 90689 - RNA, 19 nt, Homo sapiens
  misc_RNA (1)...(19): siRNA sense strand
cgucagagccaccgcagau

SEQ ID NO: 90690 - RNA, 19 nt, Homo sapiens
  misc_RNA (1)...(19): siRNA sense strand
auggagacaucaagaguuc

SEQ ID NO: 90691 - RNA, 19 nt, Homo sapiens
  misc_RNA (1)...(19): siRNA sense strand
cagagccaccgcagauuau

SEQ ID NO: 90692 - RNA, 19 nt, Homo sapiens
  misc_RNA (1)...(19): siRNA sense strand
caagaguuccaacguccuu

SEQ ID NO: 90693 - RNA, 19 nt, Homo sapiens
  misc_RNA (1)...(19): siRNA sense strand
ggucaugugccgcuucuac

SEQ ID NO: 90694 - RNA, 19 nt, Homo sapiens
  misc_RNA (1)...(19): siRNA sense strand
caugugccgcuucuacaaa

SEQ ID NO: 90695 - RNA, 19 nt, Homo sapiens
  misc_RNA (1)...(19): siRNA sense strand
cauggagacaucaagaguu

SEQ ID NO: 90696 - RNA, 19 nt, Homo sapiens
  misc_RNA (1)...(19): siRNA sense strand
gcccgaagaaagugaugaa

SEQ ID NO: 90697 - RNA, 19 nt, Homo sapiens
  misc_RNA (1)...(19): siRNA sense strand
gagccaccgcagauuauca

SEQ ID NO: 90698 - RNA, 19 nt, Homo sapiens
  misc_RNA (1)...(19): siRNA sense strand
cacggacaccuucagcuuu

SEQ ID NO: 90699 - RNA, 19 nt, Homo sapiens
  misc_RNA (1)...(19): siRNA sense strand
acacggacaccuucagcuu

SEQ ID NO: 90700 - RNA, 19 nt, Homo sapiens
  misc_RNA (1)...(19): siRNA sense strand
gagcucggccugguuccaa

SEQ ID NO: 90701 - RNA, 19 nt, Homo sapiens
  misc_RNA (1)...(19): siRNA sense strand
uuucgucacccaaacauug

SEQ ID NO: 90702 - RNA, 19 nt, Homo sapiens
  misc_RNA (1)...(19): siRNA sense strand
ggagacaucaagaguucca

SEQ ID NO: 90703 - RNA, 19 nt, Homo sapiens
  misc_RNA (1)...(19): siRNA sense strand
caacguccuucuggaugag

SEQ ID NO: 90704 - RNA, 19 nt, Homo sapiens
  misc_RNA (1)...(19): siRNA sense strand
agaagaugguccagaagcu

SEQ ID NO: 90705 - RNA, 19 nt, Homo sapiens
  misc_RNA (1)...(19): siRNA sense strand
gggcaauucaguuucuaca

SEQ ID NO: 90706 - RNA, 19 nt, Homo sapiens
  misc_RNA (1)...(19): siRNA sense strand
guacgagaggcuagagaag

SEQ ID NO: 90707 - RNA, 19 nt, Homo sapiens
  misc_RNA (1)...(19): siRNA sense strand
gaaaucaggugucccauuc

SEQ ID NO: 90708 - RNA, 19 nt, Homo sapiens
  misc_RNA (1)...(19): siRNA sense strand
gaaaccggcuccugaaauc

SEQ ID NO: 90709 - RNA, 19 nt, Homo sapiens
  misc_RNA (1)...(19): siRNA sense strand
uaagaaaggcugaggauga

SEQ ID NO: 90710 - RNA, 19 nt, Homo sapiens
  misc_RNA (1)...(19): siRNA sense strand
caaacuugcucacccaaug

SEQ ID NO: 90711 - RNA, 19 nt, Homo sapiens
  misc_RNA (1)...(19): siRNA sense strand
gucaagagcucuaaugucu

SEQ ID NO: 90712 - RNA, 19 nt, Homo sapiens
  misc_RNA (1)...(19): siRNA sense strand
caagacaguuucacagcuu

SEQ ID NO: 90713 - RNA, 19 nt, Homo sapiens
  misc_RNA (1)...(19): siRNA sense strand
gcucaucuguguccuguca

SEQ ID NO: 90714 - RNA, 19 nt, Homo sapiens
  misc_RNA (1)...(19): siRNA sense strand
ggaaaccggcuccugaaau

SEQ ID NO: 90715 - RNA, 19 nt, Homo sapiens
  misc_RNA (1)...(19): siRNA sense strand
cagacgacguugacaauuc

SEQ ID NO: 90716 - RNA, 19 nt, Homo sapiens
  misc_RNA (1)...(19): siRNA sense strand
gaagcccgguuuaccugaa

SEQ ID NO: 90717 - RNA, 19 nt, Homo sapiens
  misc_RNA (1)...(19): siRNA sense strand
aagaaaggcugaggaugaa

SEQ ID NO: 90718 - RNA, 19 nt, Homo sapiens
  misc_RNA (1)...(19): siRNA sense strand
cccaauggcucaucugugu

SEQ ID NO: 90719 - RNA, 19 nt, Homo sapiens
  misc_RNA (1)...(19): siRNA sense strand
gcaccuccauuccuaagca

SEQ ID NO: 90720 - RNA, 19 nt, Homo sapiens
  misc_RNA (1)...(19): siRNA sense strand
aggcagaguugcagauuug

SEQ ID NO: 90721 - RNA, 19 nt, Homo sapiens
  misc_RNA (1)...(19): siRNA sense strand
gggcuucugugcugcaaga

SEQ ID NO: 90722 - RNA, 19 nt, Homo sapiens
  misc_RNA (1)...(19): siRNA sense strand
ccacuucgucugauucaaa

SEQ ID NO: 90723 - RNA, 19 nt, Homo sapiens
  misc_RNA (1)...(19): siRNA sense strand
caucuucagcuguggaaua

SEQ ID NO: 90724 - RNA, 19 nt, Homo sapiens
  misc_RNA (1)...(19): siRNA sense strand
ggcaaccgaugacuucaau

SEQ ID NO: 90725 - RNA, 19 nt, Homo sapiens
  misc_RNA (1)...(19): siRNA sense strand
caaagcgaguggacaucuu

SEQ ID NO: 90726 - RNA, 19 nt, Homo sapiens
  misc_RNA (1)...(19): siRNA sense strand
gaccuuugcugacgucuac

SEQ ID NO: 90727 - RNA, 19 nt, Homo sapiens
  misc_RNA (1)...(19): siRNA sense strand
gaguugcagauuugucuua

SEQ ID NO: 90728 - RNA, 19 nt, Homo sapiens
  misc_RNA (1)...(19): siRNA sense strand
ggaagacgggcguggagaa

SEQ ID NO: 90729 - RNA, 19 nt, Homo sapiens
  misc_RNA (1)...(19): siRNA sense strand
gacuuacuccucagugaua

SEQ ID NO: 90730 - RNA, 19 nt, Homo sapiens
  misc_RNA (1)...(19): siRNA sense strand
caaccgaugacuucaauca

SEQ ID NO: 90731 - RNA, 19 nt, Homo sapiens
  misc_RNA (1)...(19): siRNA sense strand
gaaaggcugaggaugaaca

SEQ ID NO: 90732 - RNA, 19 nt, Homo sapiens
  misc_RNA (1)...(19): siRNA sense strand
uuuggcagcuucuguaaga

SEQ ID NO: 90733 - RNA, 19 nt, Homo sapiens
  misc_RNA (1)...(19): siRNA sense strand
ggaaacagacgacguugac

SEQ ID NO: 90734 - RNA, 19 nt, Homo sapiens
  misc_RNA (1)...(19): siRNA sense strand
uggagaacgugauggcaaa

SEQ ID NO: 90735 - RNA, 19 nt, Homo sapiens
  misc_RNA (1)...(19): siRNA sense strand
caaaauacaccaugaugaa

SEQ ID NO: 90736 - RNA, 19 nt, Homo sapiens
  misc_RNA (1)...(19): siRNA sense strand
caggcagaguugcagauuu

SEQ ID NO: 90737 - RNA, 19 nt, Homo sapiens
  misc_RNA (1)...(19): siRNA sense strand
ggacuucagcaccuccauu

SEQ ID NO: 90738 - RNA, 19 nt, Homo sapiens
  misc_RNA (1)...(19): siRNA sense strand
accgaugacuucaaucaaa

SEQ ID NO: 90739 - RNA, 19 nt, Homo sapiens
  misc_RNA (1)...(19): siRNA sense strand
gguacaggcucuucuucca

SEQ ID NO: 90740 - RNA, 19 nt, Homo sapiens
  misc_RNA (1)...(19): siRNA sense strand
aaacagacgacguugacaa

SEQ ID NO: 90741 - RNA, 19 nt, Homo sapiens
  misc_RNA (1)...(19): siRNA sense strand
ggacgucagccgcguaucu

SEQ ID NO: 90742 - RNA, 19 nt, Homo sapiens
  misc_RNA (1)...(19): siRNA sense strand
ucuccagccuccugaagaa

SEQ ID NO: 90743 - RNA, 19 nt, Homo sapiens
  misc_RNA (1)...(19): siRNA sense strand
ggacuuacuccucagugau

SEQ ID NO: 90744 - RNA, 19 nt, Homo sapiens
  misc_RNA (1)...(19): siRNA sense strand
ccuccuacgugaucacaga

SEQ ID NO: 90745 - RNA, 19 nt, Homo sapiens
  misc_RNA (1)...(19): siRNA sense strand
ugacccagcugcggaagau

SEQ ID NO: 90746 - RNA, 19 nt, Homo sapiens
  misc_RNA (1)...(19): siRNA sense strand
cuucagcuguggaauagug

SEQ ID NO: 90747 - RNA, 19 nt, Homo sapiens
  misc_RNA (1)...(19): siRNA sense strand
ccaggcaaccgaugacuuc

SEQ ID NO: 90748 - RNA, 19 nt, Homo sapiens
  misc_RNA (1)...(19): siRNA sense strand
gaugccuccuccuccauga

SEQ ID NO: 90749 - RNA, 19 nt, Homo sapiens
  misc_RNA (1)...(19): siRNA sense strand
guacaggcucuucuuccaa

SEQ ID NO: 90750 - RNA, 19 nt, Homo sapiens
  misc_RNA (1)...(19): siRNA sense strand
cgguuuaccugaaggacuu

SEQ ID NO: 90751 - RNA, 19 nt, Homo sapiens
  misc_RNA (1)...(19): siRNA sense strand
aaauacaccaugaugaaga

SEQ ID NO: 90752 - RNA, 19 nt, Homo sapiens
  misc_RNA (1)...(19): siRNA sense strand
uugcagauuugucuuagau

SEQ ID NO: 90753 - RNA, 19 nt, Homo sapiens
  misc_RNA (1)...(19): siRNA sense strand
ugacaaagcgaguggacau

SEQ ID NO: 90754 - RNA, 19 nt, Homo sapiens
  misc_RNA (1)...(19): siRNA sense strand
ugaaaucaggugucccauu

SEQ ID NO: 90755 - RNA, 19 nt, Homo sapiens
  misc_RNA (1)...(19): siRNA sense strand
ucacgggcaucccugcaau

SEQ ID NO: 90756 - RNA, 19 nt, Homo sapiens
  misc_RNA (1)...(19): siRNA sense strand
ggcugaggaugaacaggaa

SEQ ID NO: 90757 - RNA, 19 nt, Homo sapiens
  misc_RNA (1)...(19): siRNA sense strand
acaccaugaugaagacuca

SEQ ID NO: 90758 - RNA, 19 nt, Homo sapiens
  misc_RNA (1)...(19): siRNA sense strand
ucuguguccugucaacaaa

SEQ ID NO: 90759 - RNA, 19 nt, Homo sapiens
  misc_RNA (1)...(19): siRNA sense strand
agaacgugauggcaaagga

SEQ ID NO: 90760 - RNA, 19 nt, Homo sapiens
  misc_RNA (1)...(19): siRNA sense strand
caacaaaaggucaaaauac

SEQ ID NO: 90761 - RNA, 19 nt, Homo sapiens
  misc_RNA (1)...(19): siRNA sense strand
gacaauuccagccuugaug

SEQ ID NO: 90762 - RNA, 19 nt, Homo sapiens
  misc_RNA (1)...(19): siRNA sense strand
gaagaggggcagccuguga

SEQ ID NO: 90763 - RNA, 19 nt, Homo sapiens
  misc_RNA (1)...(19): siRNA sense strand
agaggaaacagacgacguu

SEQ ID NO: 90764 - RNA, 19 nt, Homo sapiens
  misc_RNA (1)...(19): siRNA sense strand
ggcaaaugguucccuacag

SEQ ID NO: 90765 - RNA, 19 nt, Homo sapiens
  misc_RNA (1)...(19): siRNA sense strand
aguccaggaucaaucgaaa

SEQ ID NO: 90766 - RNA, 19 nt, Homo sapiens
  misc_RNA (1)...(19): siRNA sense strand
aaucaaaaccgcaaaauca

SEQ ID NO: 90767 - RNA, 19 nt, Homo sapiens
  misc_RNA (1)...(19): siRNA sense strand
gaucauccugaacuggaaa

SEQ ID NO: 90768 - RNA, 19 nt, Homo sapiens
  misc_RNA (1)...(19): siRNA sense strand
uucagcaccuccauuccua

SEQ ID NO: 90769 - RNA, 19 nt, Homo sapiens
  misc_RNA (1)...(19): siRNA sense strand
gaggguacaggcucuucuu

SEQ ID NO: 90770 - RNA, 19 nt, Homo sapiens
  misc_RNA (1)...(19): siRNA sense strand
ggaagaucaaguccaugga

SEQ ID NO: 90771 - RNA, 19 nt, Homo sapiens
  misc_RNA (1)...(19): siRNA sense strand
gaggauggccaccuuucca

SEQ ID NO: 90772 - RNA, 19 nt, Homo sapiens
  misc_RNA (1)...(19): siRNA sense strand
ucgcucugcuccaggaaga

SEQ ID NO: 90773 - RNA, 19 nt, Homo sapiens
  misc_RNA (1)...(19): siRNA sense strand
gacgaccugugccgcaaca

SEQ ID NO: 90774 - RNA, 19 nt, Homo sapiens
  misc_RNA (1)...(19): siRNA sense strand
ucccugcaauggauaacaa

SEQ ID NO: 90775 - RNA, 19 nt, Homo sapiens
  misc_RNA (1)...(19): siRNA sense strand
ggaccuuugcugacgucua

SEQ ID NO: 90776 - RNA, 19 nt, Homo sapiens
  misc_RNA (1)...(19): siRNA sense strand
gcucugugccgucgaguac

SEQ ID NO: 90777 - RNA, 19 nt, Homo sapiens
  misc_RNA (1)...(19): siRNA sense strand
gacuucagcaccuccauuc

SEQ ID NO: 90778 - RNA, 19 nt, Homo sapiens
  misc_RNA (1)...(19): siRNA sense strand
ccgaugacuucaaucaaaa

SEQ ID NO: 90779 - RNA, 19 nt, Homo sapiens
  misc_RNA (1)...(19): siRNA sense strand
gcccagaucauccugaacu

SEQ ID NO: 90780 - RNA, 19 nt, Homo sapiens
  misc_RNA (1)...(19): siRNA sense strand
guugcagauuugucuuaga

SEQ ID NO: 90781 - RNA, 19 nt, Homo sapiens
  misc_RNA (1)...(19): siRNA sense strand
gaaacagacgacguugaca

SEQ ID NO: 90782 - RNA, 19 nt, Homo sapiens
  misc_RNA (1)...(19): siRNA sense strand
gcaacgucaagagcucuaa

SEQ ID NO: 90783 - RNA, 19 nt, Homo sapiens
  misc_RNA (1)...(19): siRNA sense strand
ccagccuccugaagaagau

SEQ ID NO: 90784 - RNA, 19 nt, Homo sapiens
  misc_RNA (1)...(19): siRNA sense strand
caaagaaggguugcguuua

SEQ ID NO: 90785 - RNA, 19 nt, Homo sapiens
  misc_RNA (1)...(19): siRNA sense strand
aaagaaggguugcguuuag

SEQ ID NO: 90786 - RNA, 19 nt, Homo sapiens
  misc_RNA (1)...(19): siRNA sense strand
caaggaaggaggcguguuu

SEQ ID NO: 90787 - RNA, 19 nt, Homo sapiens
  misc_RNA (1)...(19): siRNA sense strand
aggaagacauucuggauga

SEQ ID NO: 90788 - RNA, 19 nt, Homo sapiens
  misc_RNA (1)...(19): siRNA sense strand
cgaggccacuggugcauau

SEQ ID NO: 90789 - RNA, 19 nt, Homo sapiens
  misc_RNA (1)...(19): siRNA sense strand
caaccuggaagaggaauuu

SEQ ID NO: 90790 - RNA, 19 nt, Homo sapiens
  misc_RNA (1)...(19): siRNA sense strand
ggccacuggugcauauguu

SEQ ID NO: 90791 - RNA, 19 nt, Homo sapiens
  misc_RNA (1)...(19): siRNA sense strand
agacauucuggaugaguua

SEQ ID NO: 90792 - RNA, 19 nt, Homo sapiens
  misc_RNA (1)...(19): siRNA sense strand
uuguagaucugauuaccuu

SEQ ID NO: 90793 - RNA, 19 nt, Homo sapiens
  misc_RNA (1)...(19): siRNA sense strand
ggaagacauucuggaugag

SEQ ID NO: 90794 - RNA, 19 nt, Homo sapiens
  misc_RNA (1)...(19): siRNA sense strand
cauaaaaucuacgaguuug

SEQ ID NO: 90795 - RNA, 19 nt, Homo sapiens
  misc_RNA (1)...(19): siRNA sense strand
gcuaugcccucugguucug

SEQ ID NO: 90796 - RNA, 19 nt, Homo sapiens
  misc_RNA (1)...(19): siRNA sense strand
guagaucugauuaccuuca

SEQ ID NO: 90797 - RNA, 19 nt, Homo sapiens
  misc_RNA (1)...(19): siRNA sense strand
gaagacauucuggaugagu

SEQ ID NO: 90798 - RNA, 19 nt, Homo sapiens
  misc_RNA (1)...(19): siRNA sense strand
aagacauucuggaugaguu

SEQ ID NO: 90799 - RNA, 19 nt, Homo sapiens
  misc_RNA (1)...(19): siRNA sense strand
ggaaggaggcguguuugac

SEQ ID NO: 90800 - RNA, 19 nt, Homo sapiens
  misc_RNA (1)...(19): siRNA sense strand
augcacagcaggaggauuu

SEQ ID NO: 90801 - RNA, 19 nt, Homo sapiens
  misc_RNA (1)...(19): siRNA sense strand
gacccucacgacccacaua

SEQ ID NO: 90802 - RNA, 19 nt, Homo sapiens
  misc_RNA (1)...(19): siRNA sense strand
gaccugcacauuuccaaca

SEQ ID NO: 90803 - RNA, 19 nt, Homo sapiens
  misc_RNA (1)...(19): siRNA sense strand
cacauaaaaucuacgaguu

SEQ ID NO: 90804 - RNA, 19 nt, Homo sapiens
  misc_RNA (1)...(19): siRNA sense strand
gggaagagugggaguucga

SEQ ID NO: 90805 - RNA, 19 nt, Homo sapiens
  misc_RNA (1)...(19): siRNA sense strand
aggccuaccugcaggacuu

SEQ ID NO: 90806 - RNA, 19 nt, Homo sapiens
  misc_RNA (1)...(19): siRNA sense strand
ugagcuacgugaggcaugu

SEQ ID NO: 90807 - RNA, 19 nt, Homo sapiens
  misc_RNA (1)...(19): siRNA sense strand
ccucugagaacccacugaa

SEQ ID NO: 90808 - RNA, 19 nt, Homo sapiens
  misc_RNA (1)...(19): siRNA sense strand
gcccuucauuguagaucug

SEQ ID NO: 90809 - RNA, 19 nt, Homo sapiens
  misc_RNA (1)...(19): siRNA sense strand
ugacuggugugccuucugu

SEQ ID NO: 90810 - RNA, 19 nt, Homo sapiens
  misc_RNA (1)...(19): siRNA sense strand
caauugaagaccaggauga

SEQ ID NO: 90811 - RNA, 19 nt, Homo sapiens
  misc_RNA (1)...(19): siRNA sense strand
gaucggaggcucagagaac

SEQ ID NO: 90812 - RNA, 19 nt, Homo sapiens
  misc_RNA (1)...(19): siRNA sense strand
gcuacugugucuucagcaa

SEQ ID NO: 90813 - RNA, 19 nt, Homo sapiens
  misc_RNA (1)...(19): siRNA sense strand
uggcagaugugcucaaggu

SEQ ID NO: 90814 - RNA, 19 nt, Homo sapiens
  misc_RNA (1)...(19): siRNA sense strand
gguggagagugucuucaag

SEQ ID NO: 90815 - RNA, 19 nt, Homo sapiens
  misc_RNA (1)...(19): siRNA sense strand
cgagaacaacugugagauc

SEQ ID NO: 90816 - RNA, 19 nt, Homo sapiens
  misc_RNA (1)...(19): siRNA sense strand
ugucagugguggagagugu

SEQ ID NO: 90817 - RNA, 19 nt, Homo sapiens
  misc_RNA (1)...(19): siRNA sense strand
cugggaugguggugaauga

SEQ ID NO: 90818 - RNA, 19 nt, Homo sapiens
  misc_RNA (1)...(19): siRNA sense strand
gagggcgagcucuccgaua

SEQ ID NO: 90819 - RNA, 19 nt, Homo sapiens
  misc_RNA (1)...(19): siRNA sense strand
gaccaggugcuaguaggaa

SEQ ID NO: 90820 - RNA, 19 nt, Homo sapiens
  misc_RNA (1)...(19): siRNA sense strand
cugcugggaugguggugaa

SEQ ID NO: 90821 - RNA, 19 nt, Homo sapiens
  misc_RNA (1)...(19): siRNA sense strand
ccgaggcagugaggugauu

SEQ ID NO: 90822 - RNA, 19 nt, Homo sapiens
  misc_RNA (1)...(19): siRNA sense strand
caucccaagacuucaauug

SEQ ID NO: 90823 - RNA, 19 nt, Homo sapiens
  misc_RNA (1)...(19): siRNA sense strand
ccaccagcaugcgggauuc

SEQ ID NO: 90824 - RNA, 19 nt, Homo sapiens
  misc_RNA (1)...(19): siRNA sense strand
ugugagaucggcugcuuug

SEQ ID NO: 90825 - RNA, 19 nt, Homo sapiens
  misc_RNA (1)...(19): siRNA sense strand
gcuggugcaucccaagacu

SEQ ID NO: 90826 - RNA, 19 nt, Homo sapiens
  misc_RNA (1)...(19): siRNA sense strand
ugacuggugugccuucugu

SEQ ID NO: 90827 - RNA, 19 nt, Homo sapiens
  misc_RNA (1)...(19): siRNA sense strand
caauugaagaccaggauga

SEQ ID NO: 90828 - RNA, 19 nt, Homo sapiens
  misc_RNA (1)...(19): siRNA sense strand
gaucggaggcucagagaac

SEQ ID NO: 90829 - RNA, 19 nt, Homo sapiens
  misc_RNA (1)...(19): siRNA sense strand
gcuacugugucuucagcaa

SEQ ID NO: 90830 - RNA, 19 nt, Homo sapiens
  misc_RNA (1)...(19): siRNA sense strand
uggcagaugugcucaaggu

SEQ ID NO: 90831 - RNA, 19 nt, Homo sapiens
  misc_RNA (1)...(19): siRNA sense strand
gguggagagugucuucaag

SEQ ID NO: 90832 - RNA, 19 nt, Homo sapiens
  misc_RNA (1)...(19): siRNA sense strand
cgagaacaacugugagauc

SEQ ID NO: 90833 - RNA, 19 nt, Homo sapiens
  misc_RNA (1)...(19): siRNA sense strand
ugucagugguggagagugu

SEQ ID NO: 90834 - RNA, 19 nt, Homo sapiens
  misc_RNA (1)...(19): siRNA sense strand
cugggaugguggugaauga

SEQ ID NO: 90835 - RNA, 19 nt, Homo sapiens
  misc_RNA (1)...(19): siRNA sense strand
gagggcgagcucuccgaua

SEQ ID NO: 90836 - RNA, 19 nt, Homo sapiens
  misc_RNA (1)...(19): siRNA sense strand
gaccaggugcuaguaggaa

SEQ ID NO: 90837 - RNA, 19 nt, Homo sapiens
  misc_RNA (1)...(19): siRNA sense strand
cugcugggaugguggugaa

SEQ ID NO: 90838 - RNA, 19 nt, Homo sapiens
  misc_RNA (1)...(19): siRNA sense strand
ccgaggcagugaggugauu

SEQ ID NO: 90839 - RNA, 19 nt, Homo sapiens
  misc_RNA (1)...(19): siRNA sense strand
caucccaagacuucaauug

SEQ ID NO: 90840 - RNA, 19 nt, Homo sapiens
  misc_RNA (1)...(19): siRNA sense strand
ccaccagcaugcgggauuc

SEQ ID NO: 90841 - RNA, 19 nt, Homo sapiens
  misc_RNA (1)...(19): siRNA sense strand
ugugagaucggcugcuuug

SEQ ID NO: 90842 - RNA, 19 nt, Homo sapiens
  misc_RNA (1)...(19): siRNA sense strand
gcuggugcaucccaagacu

SEQ ID NO: 90843 - RNA, 19 nt, Homo sapiens
  misc_RNA (1)...(19): siRNA sense strand
gaucggaggcucagagaac

SEQ ID NO: 90844 - RNA, 19 nt, Homo sapiens
  misc_RNA (1)...(19): siRNA sense strand
gcuacugugucuucagcaa

SEQ ID NO: 90845 - RNA, 19 nt, Homo sapiens
  misc_RNA (1)...(19): siRNA sense strand
uggcagaugugcucaaggu

SEQ ID NO: 90846 - RNA, 19 nt, Homo sapiens
  misc_RNA (1)...(19): siRNA sense strand
cgagaacaacugugagauc

SEQ ID NO: 90847 - RNA, 19 nt, Homo sapiens
  misc_RNA (1)...(19): siRNA sense strand
gagggcgagcucuccgaua

SEQ ID NO: 90848 - RNA, 19 nt, Homo sapiens
  misc_RNA (1)...(19): siRNA sense strand
gaccaggugcuaguaggaa

SEQ ID NO: 90849 - RNA, 19 nt, Homo sapiens
  misc_RNA (1)...(19): siRNA sense strand
caucccaagacuucaauug

SEQ ID NO: 90850 - RNA, 19 nt, Homo sapiens
  misc_RNA (1)...(19): siRNA sense strand
ugugagaucggcugcuuug

SEQ ID NO: 90851 - RNA, 19 nt, Homo sapiens
  misc_RNA (1)...(19): siRNA sense strand
gcuggugcaucccaagacu

SEQ ID NO: 90852 - RNA, 19 nt, Homo sapiens
  misc_RNA (1)...(19): siRNA sense strand
ugacuggugugccuucugu

SEQ ID NO: 90853 - RNA, 19 nt, Homo sapiens
  misc_RNA (1)...(19): siRNA sense strand
caauugaagaccaggauga

SEQ ID NO: 90854 - RNA, 19 nt, Homo sapiens
  misc_RNA (1)...(19): siRNA sense strand
gaucggaggcucagagaac

SEQ ID NO: 90855 - RNA, 19 nt, Homo sapiens
  misc_RNA (1)...(19): siRNA sense strand
gcuacugugucuucagcaa

SEQ ID NO: 90856 - RNA, 19 nt, Homo sapiens
  misc_RNA (1)...(19): siRNA sense strand
uggcagaugugcucaaggu

SEQ ID NO: 90857 - RNA, 19 nt, Homo sapiens
  misc_RNA (1)...(19): siRNA sense strand
gguggagagugucuucaag

SEQ ID NO: 90858 - RNA, 19 nt, Homo sapiens
  misc_RNA (1)...(19): siRNA sense strand
cgagaacaacugugagauc

SEQ ID NO: 90859 - RNA, 19 nt, Homo sapiens
  misc_RNA (1)...(19): siRNA sense strand
ugucagugguggagagugu

SEQ ID NO: 90860 - RNA, 19 nt, Homo sapiens
  misc_RNA (1)...(19): siRNA sense strand
cugggaugguggugaauga

SEQ ID NO: 90861 - RNA, 19 nt, Homo sapiens
  misc_RNA (1)...(19): siRNA sense strand
gagggcgagcucuccgaua

SEQ ID NO: 90862 - RNA, 19 nt, Homo sapiens
  misc_RNA (1)...(19): siRNA sense strand
gaccaggugcuaguaggaa

SEQ ID NO: 90863 - RNA, 19 nt, Homo sapiens
  misc_RNA (1)...(19): siRNA sense strand
cugcugggaugguggugaa

SEQ ID NO: 90864 - RNA, 19 nt, Homo sapiens
  misc_RNA (1)...(19): siRNA sense strand
ccgaggcagugaggugauu

SEQ ID NO: 90865 - RNA, 19 nt, Homo sapiens
  misc_RNA (1)...(19): siRNA sense strand
caucccaagacuucaauug

SEQ ID NO: 90866 - RNA, 19 nt, Homo sapiens
  misc_RNA (1)...(19): siRNA sense strand
ccaccagcaugcgggauuc

SEQ ID NO: 90867 - RNA, 19 nt, Homo sapiens
  misc_RNA (1)...(19): siRNA sense strand
ugugagaucggcugcuuug

SEQ ID NO: 90868 - RNA, 19 nt, Homo sapiens
  misc_RNA (1)...(19): siRNA sense strand
gcuggugcaucccaagacu

SEQ ID NO: 90869 - RNA, 19 nt, Homo sapiens
  misc_RNA (1)...(19): siRNA sense strand
gaucggaggcucagagaac

SEQ ID NO: 90870 - RNA, 19 nt, Homo sapiens
  misc_RNA (1)...(19): siRNA sense strand
gcuacugugucuucagcaa

SEQ ID NO: 90871 - RNA, 19 nt, Homo sapiens
  misc_RNA (1)...(19): siRNA sense strand
uggcagaugugcucaaggu

SEQ ID NO: 90872 - RNA, 19 nt, Homo sapiens
  misc_RNA (1)...(19): siRNA sense strand
cgagaacaacugugagauc

SEQ ID NO: 90873 - RNA, 19 nt, Homo sapiens
  misc_RNA (1)...(19): siRNA sense strand
gagggcgagcucuccgaua

SEQ ID NO: 90874 - RNA, 19 nt, Homo sapiens
  misc_RNA (1)...(19): siRNA sense strand
gaccaggugcuaguaggaa

SEQ ID NO: 90875 - RNA, 19 nt, Homo sapiens
  misc_RNA (1)...(19): siRNA sense strand
caucccaagacuucaauug

SEQ ID NO: 90876 - RNA, 19 nt, Homo sapiens
  misc_RNA (1)...(19): siRNA sense strand
ugugagaucggcugcuuug

SEQ ID NO: 90877 - RNA, 19 nt, Homo sapiens
  misc_RNA (1)...(19): siRNA sense strand
gcuggugcaucccaagacu

SEQ ID NO: 90878 - RNA, 19 nt, Homo sapiens
  misc_RNA (1)...(19): siRNA sense strand
guacagcaaugauggauuu

SEQ ID NO: 90879 - RNA, 19 nt, Homo sapiens
  misc_RNA (1)...(19): siRNA sense strand
gagaugaauuccuuugaaa

SEQ ID NO: 90880 - RNA, 19 nt, Homo sapiens
  misc_RNA (1)...(19): siRNA sense strand
gaagaacgcaugaaacgaa

SEQ ID NO: 90881 - RNA, 19 nt, Homo sapiens
  misc_RNA (1)...(19): siRNA sense strand
ccacagacauugagaagau

SEQ ID NO: 90882 - RNA, 19 nt, Homo sapiens
  misc_RNA (1)...(19): siRNA sense strand
gauaaagacacgauugaaa

SEQ ID NO: 90883 - RNA, 19 nt, Homo sapiens
  misc_RNA (1)...(19): siRNA sense strand
ugacauaacagcuuucaaa

SEQ ID NO: 90884 - RNA, 19 nt, Homo sapiens
  misc_RNA (1)...(19): siRNA sense strand
gagauacucaggauauuaa

SEQ ID NO: 90885 - RNA, 19 nt, Homo sapiens
  misc_RNA (1)...(19): siRNA sense strand
caacagauaccaugagaug

SEQ ID NO: 90886 - RNA, 19 nt, Homo sapiens
  misc_RNA (1)...(19): siRNA sense strand
guucggcgguccaaugaua

SEQ ID NO: 90887 - RNA, 19 nt, Homo sapiens
  misc_RNA (1)...(19): siRNA sense strand
gaaacgaacaggauaaagu

SEQ ID NO: 90888 - RNA, 19 nt, Homo sapiens
  misc_RNA (1)...(19): siRNA sense strand
cauaacagcuuucaaacag

SEQ ID NO: 90889 - RNA, 19 nt, Homo sapiens
  misc_RNA (1)...(19): siRNA sense strand
ggaccuggaugaccuagau

SEQ ID NO: 90890 - RNA, 19 nt, Homo sapiens
  misc_RNA (1)...(19): siRNA sense strand
caagaauucugucuacauc

SEQ ID NO: 90891 - RNA, 19 nt, Homo sapiens
  misc_RNA (1)...(19): siRNA sense strand
gaaauucugauguacaaga

SEQ ID NO: 90892 - RNA, 19 nt, Homo sapiens
  misc_RNA (1)...(19): siRNA sense strand
ggacuggccuauuguguac

SEQ ID NO: 90893 - RNA, 19 nt, Homo sapiens
  misc_RNA (1)...(19): siRNA sense strand
ggaaccugauucugacgua

SEQ ID NO: 90894 - RNA, 19 nt, Homo sapiens
  misc_RNA (1)...(19): siRNA sense strand
ugagaugaauuccuuugaa

SEQ ID NO: 90895 - RNA, 19 nt, Homo sapiens
  misc_RNA (1)...(19): siRNA sense strand
gcaugaaacgaaagaauga

SEQ ID NO: 90896 - RNA, 19 nt, Homo sapiens
  misc_RNA (1)...(19): siRNA sense strand
ugaccaauauugagaaaca

SEQ ID NO: 90897 - RNA, 19 nt, Homo sapiens
  misc_RNA (1)...(19): siRNA sense strand
ccucaggaguuguuugaaa

SEQ ID NO: 90898 - RNA, 19 nt, Homo sapiens
  misc_RNA (1)...(19): siRNA sense strand
gggaaugugacgacuauuu

SEQ ID NO: 90899 - RNA, 19 nt, Homo sapiens
  misc_RNA (1)...(19): siRNA sense strand
uggcagaggucaagcauuc

SEQ ID NO: 90900 - RNA, 19 nt, Homo sapiens
  misc_RNA (1)...(19): siRNA sense strand
ucagugacauaacagcuuu

SEQ ID NO: 90901 - RNA, 19 nt, Homo sapiens
  misc_RNA (1)...(19): siRNA sense strand
gggaugcccugcagaaagu

SEQ ID NO: 90902 - RNA, 19 nt, Homo sapiens
  misc_RNA (1)...(19): siRNA sense strand
ccagaggcauugacacaga

SEQ ID NO: 90903 - RNA, 19 nt, Homo sapiens
  misc_RNA (1)...(19): siRNA sense strand
gaaguuugcucggcugaca

SEQ ID NO: 90904 - RNA, 19 nt, Homo sapiens
  misc_RNA (1)...(19): siRNA sense strand
cugaagacgugguuuguga

SEQ ID NO: 90905 - RNA, 19 nt, Homo sapiens
  misc_RNA (1)...(19): siRNA sense strand
gguccaaugauacuaauuu

SEQ ID NO: 90906 - RNA, 19 nt, Homo sapiens
  misc_RNA (1)...(19): siRNA sense strand
caacagauguaugccaaca

SEQ ID NO: 90907 - RNA, 19 nt, Homo sapiens
  misc_RNA (1)...(19): siRNA sense strand
agacgugguuugugauuga

SEQ ID NO: 90908 - RNA, 19 nt, Homo sapiens
  misc_RNA (1)...(19): siRNA sense strand
gcgagaauguccacaagca

SEQ ID NO: 90909 - RNA, 19 nt, Homo sapiens
  misc_RNA (1)...(19): siRNA sense strand
cagagaagguccugcagau

SEQ ID NO: 90910 - RNA, 19 nt, Homo sapiens
  misc_RNA (1)...(19): siRNA sense strand
gaagacgugguuugugauu

SEQ ID NO: 90911 - RNA, 19 nt, Homo sapiens
  misc_RNA (1)...(19): siRNA sense strand
gaacgcaugaaacgaaaga

SEQ ID NO: 90912 - RNA, 19 nt, Homo sapiens
  misc_RNA (1)...(19): siRNA sense strand
gaucuugaccuucuauaca

SEQ ID NO: 90913 - RNA, 19 nt, Homo sapiens
  misc_RNA (1)...(19): siRNA sense strand
gaagaggaagaacgcauga

SEQ ID NO: 90914 - RNA, 19 nt, Homo sapiens
  misc_RNA (1)...(19): siRNA sense strand
ccuuugaaauucugaugua

SEQ ID NO: 90915 - RNA, 19 nt, Homo sapiens
  misc_RNA (1)...(19): siRNA sense strand
gggcagaagugaugcaaaa

SEQ ID NO: 90916 - RNA, 19 nt, Homo sapiens
  misc_RNA (1)...(19): siRNA sense strand
ggaguuguuugaaauaucg

SEQ ID NO: 90917 - RNA, 19 nt, Homo sapiens
  misc_RNA (1)...(19): siRNA sense strand
gcaagaauucugucuacau

SEQ ID NO: 90918 - RNA, 19 nt, Homo sapiens
  misc_RNA (1)...(19): siRNA sense strand
cccguaagcuggaccacua

SEQ ID NO: 90919 - RNA, 19 nt, Homo sapiens
  misc_RNA (1)...(19): siRNA sense strand
ccaucuuggucccuuauaa

SEQ ID NO: 90920 - RNA, 19 nt, Homo sapiens
  misc_RNA (1)...(19): siRNA sense strand
cgaacaggauaaagugguu

SEQ ID NO: 90921 - RNA, 19 nt, Homo sapiens
  misc_RNA (1)...(19): siRNA sense strand
ggagcugacugauaaagac

SEQ ID NO: 90922 - RNA, 19 nt, Homo sapiens
  misc_RNA (1)...(19): siRNA sense strand
cagcaagaauucugucuac

SEQ ID NO: 90923 - RNA, 19 nt, Homo sapiens
  misc_RNA (1)...(19): siRNA sense strand
gaagguggucccagcaaga

SEQ ID NO: 90924 - RNA, 19 nt, Homo sapiens
  misc_RNA (1)...(19): siRNA sense strand
ccacuacauugaauaugga

SEQ ID NO: 90925 - RNA, 19 nt, Homo sapiens
  misc_RNA (1)...(19): siRNA sense strand
ggaccacuacauugaauau

SEQ ID NO: 90926 - RNA, 19 nt, Homo sapiens
  misc_RNA (1)...(19): siRNA sense strand
acuaugagaugaauuccuu

SEQ ID NO: 90927 - RNA, 19 nt, Homo sapiens
  misc_RNA (1)...(19): siRNA sense strand
gcagaaagugcuggaauuc

SEQ ID NO: 90928 - RNA, 19 nt, Homo sapiens
  misc_RNA (1)...(19): siRNA sense strand
gagaagguccugcagaucu

SEQ ID NO: 90929 - RNA, 19 nt, Homo sapiens
  misc_RNA (1)...(19): siRNA sense strand
ggagacguguuuggagaug

SEQ ID NO: 90930 - RNA, 19 nt, Homo sapiens
  misc_RNA (1)...(19): siRNA sense strand
cagaagauccucucagucu

SEQ ID NO: 90931 - RNA, 19 nt, Homo sapiens
  misc_RNA (1)...(19): siRNA sense strand
guucagcucucuaaaaguu

SEQ ID NO: 90932 - RNA, 19 nt, Homo sapiens
  misc_RNA (1)...(19): siRNA sense strand
aaaccaggcagaauaaugu

SEQ ID NO: 90933 - RNA, 19 nt, Homo sapiens
  misc_RNA (1)...(19): siRNA sense strand
ccaagacaauccgcaacaa

SEQ ID NO: 90934 - RNA, 19 nt, Homo sapiens
  misc_RNA (1)...(19): siRNA sense strand
gcaagaggcaccaaagacu

SEQ ID NO: 90935 - RNA, 19 nt, Homo sapiens
  misc_RNA (1)...(19): siRNA sense strand
ggacaucaaggccuuaaac

SEQ ID NO: 90936 - RNA, 19 nt, Homo sapiens
  misc_RNA (1)...(19): siRNA sense strand
gacaguggcaucaccaaga

SEQ ID NO: 90937 - RNA, 19 nt, Homo sapiens
  misc_RNA (1)...(19): siRNA sense strand
ggaagagugaggacuggaa

SEQ ID NO: 90938 - RNA, 19 nt, Homo sapiens
  misc_RNA (1)...(19): siRNA sense strand
ugaccagccucaccagugu

SEQ ID NO: 90939 - RNA, 19 nt, Homo sapiens
  misc_RNA (1)...(19): siRNA sense strand
ccucacaucaucuuacauu

SEQ ID NO: 90940 - RNA, 19 nt, Homo sapiens
  misc_RNA (1)...(19): siRNA sense strand
ugagaacuaugagaugaau

SEQ ID NO: 90941 - RNA, 19 nt, Homo sapiens
  misc_RNA (1)...(19): siRNA sense strand
ugcagaaagugcuggaauu

SEQ ID NO: 90942 - RNA, 19 nt, Homo sapiens
  misc_RNA (1)...(19): siRNA sense strand
guugacagccucugcuuug

SEQ ID NO: 90943 - RNA, 19 nt, Homo sapiens
  misc_RNA (1)...(19): siRNA sense strand
ggauugagugagcgaguaa

SEQ ID NO: 90944 - RNA, 19 nt, Homo sapiens
  misc_RNA (1)...(19): siRNA sense strand
cgcaugaacuaccugaaga

SEQ ID NO: 90945 - RNA, 19 nt, Homo sapiens
  misc_RNA (1)...(19): siRNA sense strand
aaacuuauccgcaugaacu

SEQ ID NO: 90946 - RNA, 19 nt, Homo sapiens
  misc_RNA (1)...(19): siRNA sense strand
aaacgaacaggauaaagug

SEQ ID NO: 90947 - RNA, 19 nt, Homo sapiens
  misc_RNA (1)...(19): siRNA sense strand
gaacaggauaaagugguuu

SEQ ID NO: 90948 - RNA, 19 nt, Homo sapiens
  misc_RNA (1)...(19): siRNA sense strand
cuuauaaugucuccuucaa

SEQ ID NO: 90949 - RNA, 19 nt, Homo sapiens
  misc_RNA (1)...(19): siRNA sense strand
uaagcuggaccacuacauu

SEQ ID NO: 90950 - RNA, 19 nt, Homo sapiens
  misc_RNA (1)...(19): siRNA sense strand
caggaguuguuugaaauau

SEQ ID NO: 90951 - RNA, 19 nt, Homo sapiens
  misc_RNA (1)...(19): siRNA sense strand
aagaacgcaugaaacgaaa

SEQ ID NO: 90952 - RNA, 19 nt, Homo sapiens
  misc_RNA (1)...(19): siRNA sense strand
ggacaugagagccgacauc

SEQ ID NO: 90953 - RNA, 19 nt, Homo sapiens
  misc_RNA (1)...(19): siRNA sense strand
ggaaugugacgacuauuuu

SEQ ID NO: 90954 - RNA, 19 nt, Homo sapiens
  misc_RNA (1)...(19): siRNA sense strand
ucaggaguuguuugaaaua

SEQ ID NO: 90955 - RNA, 19 nt, Homo sapiens
  misc_RNA (1)...(19): siRNA sense strand
ggucaagcauucguucuac

SEQ ID NO: 90956 - RNA, 19 nt, Homo sapiens
  misc_RNA (1)...(19): siRNA sense strand
uggccuggcugguuguuga

SEQ ID NO: 90957 - RNA, 19 nt, Homo sapiens
  misc_RNA (1)...(19): siRNA sense strand
agaggaagaacgcaugaaa

SEQ ID NO: 90958 - RNA, 19 nt, Homo sapiens
  misc_RNA (1)...(19): siRNA sense strand
gaaagugcuggaauucuac

SEQ ID NO: 90959 - RNA, 19 nt, Homo sapiens
  misc_RNA (1)...(19): siRNA sense strand
gagauguguucuggaagga

SEQ ID NO: 90960 - RNA, 19 nt, Homo sapiens
  misc_RNA (1)...(19): siRNA sense strand
ucgggaaugugacgacuau

SEQ ID NO: 90961 - RNA, 19 nt, Homo sapiens
  misc_RNA (1)...(19): siRNA sense strand
ccugugugguucuuuguga

SEQ ID NO: 90962 - RNA, 19 nt, Homo sapiens
  misc_RNA (1)...(19): siRNA sense strand
ugacguacaacuugaggaa

SEQ ID NO: 90963 - RNA, 19 nt, Homo sapiens
  misc_RNA (1)...(19): siRNA sense strand
gggacuaugagaucuuuga

SEQ ID NO: 90964 - RNA, 19 nt, Homo sapiens
  misc_RNA (1)...(19): siRNA sense strand
uuucauaccaccuuuguug

SEQ ID NO: 90965 - RNA, 19 nt, Homo sapiens
  misc_RNA (1)...(19): siRNA sense strand
ugaccuagauguggagaag

SEQ ID NO: 90966 - RNA, 19 nt, Homo sapiens
  misc_RNA (1)...(19): siRNA sense strand
gaaacgugaagaggaagaa

SEQ ID NO: 90967 - RNA, 19 nt, Homo sapiens
  misc_RNA (1)...(19): siRNA sense strand
gaccuacugugaucugcau

SEQ ID NO: 90968 - RNA, 19 nt, Homo sapiens
  misc_RNA (1)...(19): siRNA sense strand
ccaguccugugccaauguu

SEQ ID NO: 90969 - RNA, 19 nt, Homo sapiens
  misc_RNA (1)...(19): siRNA sense strand
uuggagauguguucuggaa

SEQ ID NO: 90970 - RNA, 19 nt, Homo sapiens
  misc_RNA (1)...(19): siRNA sense strand
uuugagaacuaugagauga

SEQ ID NO: 90971 - RNA, 19 nt, Homo sapiens
  misc_RNA (1)...(19): siRNA sense strand
caugaugauuggcucacuu

SEQ ID NO: 90972 - RNA, 19 nt, Homo sapiens
  misc_RNA (1)...(19): siRNA sense strand
caggggaggugauuucuga

SEQ ID NO: 90973 - RNA, 19 nt, Homo sapiens
  misc_RNA (1)...(19): siRNA sense strand
ggaagaacgcaugaaacga

SEQ ID NO: 90974 - RNA, 19 nt, Homo sapiens
  misc_RNA (1)...(19): siRNA sense strand
gauuggcucacuucucuau

SEQ ID NO: 90975 - RNA, 19 nt, Homo sapiens
  misc_RNA (1)...(19): siRNA sense strand
gguggucccagcaagaauu

SEQ ID NO: 90976 - RNA, 19 nt, Homo sapiens
  misc_RNA (1)...(19): siRNA sense strand
ggugguggccauucuagga

SEQ ID NO: 90977 - RNA, 19 nt, Homo sapiens
  misc_RNA (1)...(19): siRNA sense strand
gaggugauccaagaugaug

SEQ ID NO: 90978 - RNA, 19 nt, Homo sapiens
  misc_RNA (1)...(19): siRNA sense strand
guacagcaaugauggauuu

SEQ ID NO: 90979 - RNA, 19 nt, Homo sapiens
  misc_RNA (1)...(19): siRNA sense strand
gagaugaauuccuuugaaa

SEQ ID NO: 90980 - RNA, 19 nt, Homo sapiens
  misc_RNA (1)...(19): siRNA sense strand
gaagaacgcaugaaacgaa

SEQ ID NO: 90981 - RNA, 19 nt, Homo sapiens
  misc_RNA (1)...(19): siRNA sense strand
ccacagacauugagaagau

SEQ ID NO: 90982 - RNA, 19 nt, Homo sapiens
  misc_RNA (1)...(19): siRNA sense strand
gauaaagacacgauugaaa

SEQ ID NO: 90983 - RNA, 19 nt, Homo sapiens
  misc_RNA (1)...(19): siRNA sense strand
ugacauaacagcuuucaaa

SEQ ID NO: 90984 - RNA, 19 nt, Homo sapiens
  misc_RNA (1)...(19): siRNA sense strand
gagauacucaggauauuaa

SEQ ID NO: 90985 - RNA, 19 nt, Homo sapiens
  misc_RNA (1)...(19): siRNA sense strand
caacagauaccaugagaug

SEQ ID NO: 90986 - RNA, 19 nt, Homo sapiens
  misc_RNA (1)...(19): siRNA sense strand
guucggcgguccaaugaua

SEQ ID NO: 90987 - RNA, 19 nt, Homo sapiens
  misc_RNA (1)...(19): siRNA sense strand
gaaacgaacaggauaaagu

SEQ ID NO: 90988 - RNA, 19 nt, Homo sapiens
  misc_RNA (1)...(19): siRNA sense strand
cauaacagcuuucaaacag

SEQ ID NO: 90989 - RNA, 19 nt, Homo sapiens
  misc_RNA (1)...(19): siRNA sense strand
ggaccuggaugaccuagau

SEQ ID NO: 90990 - RNA, 19 nt, Homo sapiens
  misc_RNA (1)...(19): siRNA sense strand
caagaauucugucuacauc

SEQ ID NO: 90991 - RNA, 19 nt, Homo sapiens
  misc_RNA (1)...(19): siRNA sense strand
gaaauucugauguacaaga

SEQ ID NO: 90992 - RNA, 19 nt, Homo sapiens
  misc_RNA (1)...(19): siRNA sense strand
ggacuggccuauuguguac

SEQ ID NO: 90993 - RNA, 19 nt, Homo sapiens
  misc_RNA (1)...(19): siRNA sense strand
ggaaccugauucugacgua

SEQ ID NO: 90994 - RNA, 19 nt, Homo sapiens
  misc_RNA (1)...(19): siRNA sense strand
ugagaugaauuccuuugaa

SEQ ID NO: 90995 - RNA, 19 nt, Homo sapiens
  misc_RNA (1)...(19): siRNA sense strand
gcaugaaacgaaagaauga

SEQ ID NO: 90996 - RNA, 19 nt, Homo sapiens
  misc_RNA (1)...(19): siRNA sense strand
ugaccaauauugagaaaca

SEQ ID NO: 90997 - RNA, 19 nt, Homo sapiens
  misc_RNA (1)...(19): siRNA sense strand
ccucaggaguuguuugaaa

SEQ ID NO: 90998 - RNA, 19 nt, Homo sapiens
  misc_RNA (1)...(19): siRNA sense strand
gggaaugugacgacuauuu

SEQ ID NO: 90999 - RNA, 19 nt, Homo sapiens
  misc_RNA (1)...(19): siRNA sense strand
uggcagaggucaagcauuc

SEQ ID NO: 91000 - RNA, 19 nt, Homo sapiens
  misc_RNA (1)...(19): siRNA sense strand
ucagugacauaacagcuuu

SEQ ID NO: 91001 - RNA, 19 nt, Homo sapiens
  misc_RNA (1)...(19): siRNA sense strand
gggaugcccugcagaaagu

SEQ ID NO: 91002 - RNA, 19 nt, Homo sapiens
  misc_RNA (1)...(19): siRNA sense strand
ccagaggcauugacacaga

SEQ ID NO: 91003 - RNA, 19 nt, Homo sapiens
  misc_RNA (1)...(19): siRNA sense strand
gaaguuugcucggcugaca

SEQ ID NO: 91004 - RNA, 19 nt, Homo sapiens
  misc_RNA (1)...(19): siRNA sense strand
cugaagacgugguuuguga

SEQ ID NO: 91005 - RNA, 19 nt, Homo sapiens
  misc_RNA (1)...(19): siRNA sense strand
gguccaaugauacuaauuu

SEQ ID NO: 91006 - RNA, 19 nt, Homo sapiens
  misc_RNA (1)...(19): siRNA sense strand
caacagauguaugccaaca

SEQ ID NO: 91007 - RNA, 19 nt, Homo sapiens
  misc_RNA (1)...(19): siRNA sense strand
agacgugguuugugauuga

SEQ ID NO: 91008 - RNA, 19 nt, Homo sapiens
  misc_RNA (1)...(19): siRNA sense strand
gcgagaauguccacaagca

SEQ ID NO: 91009 - RNA, 19 nt, Homo sapiens
  misc_RNA (1)...(19): siRNA sense strand
cagagaagguccugcagau

SEQ ID NO: 91010 - RNA, 19 nt, Homo sapiens
  misc_RNA (1)...(19): siRNA sense strand
gaagacgugguuugugauu

SEQ ID NO: 91011 - RNA, 19 nt, Homo sapiens
  misc_RNA (1)...(19): siRNA sense strand
gaacgcaugaaacgaaaga

SEQ ID NO: 91012 - RNA, 19 nt, Homo sapiens
  misc_RNA (1)...(19): siRNA sense strand
gaucuugaccuucuauaca

SEQ ID NO: 91013 - RNA, 19 nt, Homo sapiens
  misc_RNA (1)...(19): siRNA sense strand
gaagaggaagaacgcauga

SEQ ID NO: 91014 - RNA, 19 nt, Homo sapiens
  misc_RNA (1)...(19): siRNA sense strand
ccuuugaaauucugaugua

SEQ ID NO: 91015 - RNA, 19 nt, Homo sapiens
  misc_RNA (1)...(19): siRNA sense strand
gggcagaagugaugcaaaa

SEQ ID NO: 91016 - RNA, 19 nt, Homo sapiens
  misc_RNA (1)...(19): siRNA sense strand
ggaguuguuugaaauaucg

SEQ ID NO: 91017 - RNA, 19 nt, Homo sapiens
  misc_RNA (1)...(19): siRNA sense strand
gcaagaauucugucuacau

SEQ ID NO: 91018 - RNA, 19 nt, Homo sapiens
  misc_RNA (1)...(19): siRNA sense strand
cccguaagcuggaccacua

SEQ ID NO: 91019 - RNA, 19 nt, Homo sapiens
  misc_RNA (1)...(19): siRNA sense strand
ccaucuuggucccuuauaa

SEQ ID NO: 91020 - RNA, 19 nt, Homo sapiens
  misc_RNA (1)...(19): siRNA sense strand
cgaacaggauaaagugguu

SEQ ID NO: 91021 - RNA, 19 nt, Homo sapiens
  misc_RNA (1)...(19): siRNA sense strand
ggagcugacugauaaagac

SEQ ID NO: 91022 - RNA, 19 nt, Homo sapiens
  misc_RNA (1)...(19): siRNA sense strand
cagcaagaauucugucuac

SEQ ID NO: 91023 - RNA, 19 nt, Homo sapiens
  misc_RNA (1)...(19): siRNA sense strand
gaagguggucccagcaaga

SEQ ID NO: 91024 - RNA, 19 nt, Homo sapiens
  misc_RNA (1)...(19): siRNA sense strand
ccacuacauugaauaugga

SEQ ID NO: 91025 - RNA, 19 nt, Homo sapiens
  misc_RNA (1)...(19): siRNA sense strand
ggaccacuacauugaauau

SEQ ID NO: 91026 - RNA, 19 nt, Homo sapiens
  misc_RNA (1)...(19): siRNA sense strand
acuaugagaugaauuccuu

SEQ ID NO: 91027 - RNA, 19 nt, Homo sapiens
  misc_RNA (1)...(19): siRNA sense strand
gcagaaagugcuggaauuc

SEQ ID NO: 91028 - RNA, 19 nt, Homo sapiens
  misc_RNA (1)...(19): siRNA sense strand
gagaagguccugcagaucu

SEQ ID NO: 91029 - RNA, 19 nt, Homo sapiens
  misc_RNA (1)...(19): siRNA sense strand
ggagacguguuuggagaug

SEQ ID NO: 91030 - RNA, 19 nt, Homo sapiens
  misc_RNA (1)...(19): siRNA sense strand
cagaagauccucucagucu

SEQ ID NO: 91031 - RNA, 19 nt, Homo sapiens
  misc_RNA (1)...(19): siRNA sense strand
guucagcucucuaaaaguu

SEQ ID NO: 91032 - RNA, 19 nt, Homo sapiens
  misc_RNA (1)...(19): siRNA sense strand
aaaccaggcagaauaaugu

SEQ ID NO: 91033 - RNA, 19 nt, Homo sapiens
  misc_RNA (1)...(19): siRNA sense strand
ccaagacaauccgcaacaa

SEQ ID NO: 91034 - RNA, 19 nt, Homo sapiens
  misc_RNA (1)...(19): siRNA sense strand
gcaagaggcaccaaagacu

SEQ ID NO: 91035 - RNA, 19 nt, Homo sapiens
  misc_RNA (1)...(19): siRNA sense strand
ggacaucaaggccuuaaac

SEQ ID NO: 91036 - RNA, 19 nt, Homo sapiens
  misc_RNA (1)...(19): siRNA sense strand
gacaguggcaucaccaaga

SEQ ID NO: 91037 - RNA, 19 nt, Homo sapiens
  misc_RNA (1)...(19): siRNA sense strand
ggaagagugaggacuggaa

SEQ ID NO: 91038 - RNA, 19 nt, Homo sapiens
  misc_RNA (1)...(19): siRNA sense strand
ugaccagccucaccagugu

SEQ ID NO: 91039 - RNA, 19 nt, Homo sapiens
  misc_RNA (1)...(19): siRNA sense strand
ccucacaucaucuuacauu

SEQ ID NO: 91040 - RNA, 19 nt, Homo sapiens
  misc_RNA (1)...(19): siRNA sense strand
ugagaacuaugagaugaau

SEQ ID NO: 91041 - RNA, 19 nt, Homo sapiens
  misc_RNA (1)...(19): siRNA sense strand
ugcagaaagugcuggaauu

SEQ ID NO: 91042 - RNA, 19 nt, Homo sapiens
  misc_RNA (1)...(19): siRNA sense strand
guugacagccucugcuuug

SEQ ID NO: 91043 - RNA, 19 nt, Homo sapiens
  misc_RNA (1)...(19): siRNA sense strand
ggauugagugagcgaguaa

SEQ ID NO: 91044 - RNA, 19 nt, Homo sapiens
  misc_RNA (1)...(19): siRNA sense strand
cgcaugaacuaccugaaga

SEQ ID NO: 91045 - RNA, 19 nt, Homo sapiens
  misc_RNA (1)...(19): siRNA sense strand
aaacuuauccgcaugaacu

SEQ ID NO: 91046 - RNA, 19 nt, Homo sapiens
  misc_RNA (1)...(19): siRNA sense strand
aaacgaacaggauaaagug

SEQ ID NO: 91047 - RNA, 19 nt, Homo sapiens
  misc_RNA (1)...(19): siRNA sense strand
gaacaggauaaagugguuu

SEQ ID NO: 91048 - RNA, 19 nt, Homo sapiens
  misc_RNA (1)...(19): siRNA sense strand
cuuauaaugucuccuucaa

SEQ ID NO: 91049 - RNA, 19 nt, Homo sapiens
  misc_RNA (1)...(19): siRNA sense strand
uaagcuggaccacuacauu

SEQ ID NO: 91050 - RNA, 19 nt, Homo sapiens
  misc_RNA (1)...(19): siRNA sense strand
caggaguuguuugaaauau

SEQ ID NO: 91051 - RNA, 19 nt, Homo sapiens
  misc_RNA (1)...(19): siRNA sense strand
aagaacgcaugaaacgaaa

SEQ ID NO: 91052 - RNA, 19 nt, Homo sapiens
  misc_RNA (1)...(19): siRNA sense strand
ggacaugagagccgacauc

SEQ ID NO: 91053 - RNA, 19 nt, Homo sapiens
  misc_RNA (1)...(19): siRNA sense strand
ggaaugugacgacuauuuu

SEQ ID NO: 91054 - RNA, 19 nt, Homo sapiens
  misc_RNA (1)...(19): siRNA sense strand
ucaggaguuguuugaaaua

SEQ ID NO: 91055 - RNA, 19 nt, Homo sapiens
  misc_RNA (1)...(19): siRNA sense strand
ggucaagcauucguucuac

SEQ ID NO: 91056 - RNA, 19 nt, Homo sapiens
  misc_RNA (1)...(19): siRNA sense strand
uggccuggcugguuguuga

SEQ ID NO: 91057 - RNA, 19 nt, Homo sapiens
  misc_RNA (1)...(19): siRNA sense strand
agaggaagaacgcaugaaa

SEQ ID NO: 91058 - RNA, 19 nt, Homo sapiens
  misc_RNA (1)...(19): siRNA sense strand
gaaagugcuggaauucuac

SEQ ID NO: 91059 - RNA, 19 nt, Homo sapiens
  misc_RNA (1)...(19): siRNA sense strand
gagauguguucuggaagga

SEQ ID NO: 91060 - RNA, 19 nt, Homo sapiens
  misc_RNA (1)...(19): siRNA sense strand
ucgggaaugugacgacuau

SEQ ID NO: 91061 - RNA, 19 nt, Homo sapiens
  misc_RNA (1)...(19): siRNA sense strand
ccugugugguucuuuguga

SEQ ID NO: 91062 - RNA, 19 nt, Homo sapiens
  misc_RNA (1)...(19): siRNA sense strand
ugacguacaacuugaggaa

SEQ ID NO: 91063 - RNA, 19 nt, Homo sapiens
  misc_RNA (1)...(19): siRNA sense strand
gggacuaugagaucuuuga

SEQ ID NO: 91064 - RNA, 19 nt, Homo sapiens
  misc_RNA (1)...(19): siRNA sense strand
uuucauaccaccuuuguug

SEQ ID NO: 91065 - RNA, 19 nt, Homo sapiens
  misc_RNA (1)...(19): siRNA sense strand
ugaccuagauguggagaag

SEQ ID NO: 91066 - RNA, 19 nt, Homo sapiens
  misc_RNA (1)...(19): siRNA sense strand
gaaacgugaagaggaagaa

SEQ ID NO: 91067 - RNA, 19 nt, Homo sapiens
  misc_RNA (1)...(19): siRNA sense strand
gaccuacugugaucugcau

SEQ ID NO: 91068 - RNA, 19 nt, Homo sapiens
  misc_RNA (1)...(19): siRNA sense strand
ccaguccugugccaauguu

SEQ ID NO: 91069 - RNA, 19 nt, Homo sapiens
  misc_RNA (1)...(19): siRNA sense strand
uuggagauguguucuggaa

SEQ ID NO: 91070 - RNA, 19 nt, Homo sapiens
  misc_RNA (1)...(19): siRNA sense strand
uuugagaacuaugagauga

SEQ ID NO: 91071 - RNA, 19 nt, Homo sapiens
  misc_RNA (1)...(19): siRNA sense strand
caugaugauuggcucacuu

SEQ ID NO: 91072 - RNA, 19 nt, Homo sapiens
  misc_RNA (1)...(19): siRNA sense strand
caggggaggugauuucuga

SEQ ID NO: 91073 - RNA, 19 nt, Homo sapiens
  misc_RNA (1)...(19): siRNA sense strand
ggaagaacgcaugaaacga

SEQ ID NO: 91074 - RNA, 19 nt, Homo sapiens
  misc_RNA (1)...(19): siRNA sense strand
gauuggcucacuucucuau

SEQ ID NO: 91075 - RNA, 19 nt, Homo sapiens
  misc_RNA (1)...(19): siRNA sense strand
gguggucccagcaagaauu

SEQ ID NO: 91076 - RNA, 19 nt, Homo sapiens
  misc_RNA (1)...(19): siRNA sense strand
ggugguggccauucuagga

SEQ ID NO: 91077 - RNA, 19 nt, Homo sapiens
  misc_RNA (1)...(19): siRNA sense strand
gaggugauccaagaugaug

SEQ ID NO: 91078 - RNA, 19 nt, Homo sapiens
  misc_RNA (1)...(19): siRNA sense strand
gaaccuuccagccaaauua

SEQ ID NO: 91079 - RNA, 19 nt, Homo sapiens
  misc_RNA (1)...(19): siRNA sense strand
gcaaagaaagacauaauuc

SEQ ID NO: 91080 - RNA, 19 nt, Homo sapiens
  misc_RNA (1)...(19): siRNA sense strand
gaaaauuacuggaagagaa

SEQ ID NO: 91081 - RNA, 19 nt, Homo sapiens
  misc_RNA (1)...(19): siRNA sense strand
gagggauucuuuaaaguug

SEQ ID NO: 91082 - RNA, 19 nt, Homo sapiens
  misc_RNA (1)...(19): siRNA sense strand
ccaguuccaugcaacauuu

SEQ ID NO: 91083 - RNA, 19 nt, Homo sapiens
  misc_RNA (1)...(19): siRNA sense strand
gcugcaagcugcucaaauc

SEQ ID NO: 91084 - RNA, 19 nt, Homo sapiens
  misc_RNA (1)...(19): siRNA sense strand
gaacaucauauacugaaga

SEQ ID NO: 91085 - RNA, 19 nt, Homo sapiens
  misc_RNA (1)...(19): siRNA sense strand
gcucgaacaucauauacug

SEQ ID NO: 91086 - RNA, 19 nt, Homo sapiens
  misc_RNA (1)...(19): siRNA sense strand
gcuggaaccucuucaucuu

SEQ ID NO: 91087 - RNA, 19 nt, Homo sapiens
  misc_RNA (1)...(19): siRNA sense strand
gaacucugaucgcuucaca

SEQ ID NO: 91088 - RNA, 19 nt, Homo sapiens
  misc_RNA (1)...(19): siRNA sense strand
ugaaagagcaggaggaaau

SEQ ID NO: 91089 - RNA, 19 nt, Homo sapiens
  misc_RNA (1)...(19): siRNA sense strand
gcucaaaucucggcagaca

SEQ ID NO: 91090 - RNA, 19 nt, Homo sapiens
  misc_RNA (1)...(19): siRNA sense strand
cuacaaaacuaccaucuaa

SEQ ID NO: 91091 - RNA, 19 nt, Homo sapiens
  misc_RNA (1)...(19): siRNA sense strand
ggaaacaacugggaugacu

SEQ ID NO: 91092 - RNA, 19 nt, Homo sapiens
  misc_RNA (1)...(19): siRNA sense strand
caucuaagcugcagaaaau

SEQ ID NO: 91093 - RNA, 19 nt, Homo sapiens
  misc_RNA (1)...(19): siRNA sense strand
gaggaaaugcuucucaugu

SEQ ID NO: 91094 - RNA, 19 nt, Homo sapiens
  misc_RNA (1)...(19): siRNA sense strand
caacgaauaaguucaguuc

SEQ ID NO: 91095 - RNA, 19 nt, Homo sapiens
  misc_RNA (1)...(19): siRNA sense strand
uagauggacuagaugauau

SEQ ID NO: 91096 - RNA, 19 nt, Homo sapiens
  misc_RNA (1)...(19): siRNA sense strand
caagcucgaacaucauaua

SEQ ID NO: 91097 - RNA, 19 nt, Homo sapiens
  misc_RNA (1)...(19): siRNA sense strand
gcacuccgaaggaaauuug

SEQ ID NO: 91098 - RNA, 19 nt, Homo sapiens
  misc_RNA (1)...(19): siRNA sense strand
uuuaauagcaccagccaua

SEQ ID NO: 91099 - RNA, 19 nt, Homo sapiens
  misc_RNA (1)...(19): siRNA sense strand
caccaaagcuucaaaagau

SEQ ID NO: 91100 - RNA, 19 nt, Homo sapiens
  misc_RNA (1)...(19): siRNA sense strand
ggacgauuaucagguagug

SEQ ID NO: 91101 - RNA, 19 nt, Homo sapiens
  misc_RNA (1)...(19): siRNA sense strand
gaaagagcaggaggaaaug

SEQ ID NO: 91102 - RNA, 19 nt, Homo sapiens
  misc_RNA (1)...(19): siRNA sense strand
ggacuagaugauauuacua

SEQ ID NO: 91103 - RNA, 19 nt, Homo sapiens
  misc_RNA (1)...(19): siRNA sense strand
gaaccucuucaucuucauu

SEQ ID NO: 91104 - RNA, 19 nt, Homo sapiens
  misc_RNA (1)...(19): siRNA sense strand
aaacaacugggaugacuug

SEQ ID NO: 91105 - RNA, 19 nt, Homo sapiens
  misc_RNA (1)...(19): siRNA sense strand
gcaccagccauaacuaaca

SEQ ID NO: 91106 - RNA, 19 nt, Homo sapiens
  misc_RNA (1)...(19): siRNA sense strand
agccauaacuaacagcaaa

SEQ ID NO: 91107 - RNA, 19 nt, Homo sapiens
  misc_RNA (1)...(19): siRNA sense strand
gauggacuagaugauauua

SEQ ID NO: 91108 - RNA, 19 nt, Homo sapiens
  misc_RNA (1)...(19): siRNA sense strand
ggaaugcuuagauggacua

SEQ ID NO: 91109 - RNA, 19 nt, Homo sapiens
  misc_RNA (1)...(19): siRNA sense strand
uuagauggacuagaugaua

SEQ ID NO: 91110 - RNA, 19 nt, Homo sapiens
  misc_RNA (1)...(19): siRNA sense strand
aagagaagacuuucccaaa

SEQ ID NO: 91111 - RNA, 19 nt, Homo sapiens
  misc_RNA (1)...(19): siRNA sense strand
acaaagcccacgucgguaa

SEQ ID NO: 91112 - RNA, 19 nt, Homo sapiens
  misc_RNA (1)...(19): siRNA sense strand
acucugaucgcuucacaua

SEQ ID NO: 91113 - RNA, 19 nt, Homo sapiens
  misc_RNA (1)...(19): siRNA sense strand
gcagaaaauuacuggaaga

SEQ ID NO: 91114 - RNA, 19 nt, Homo sapiens
  misc_RNA (1)...(19): siRNA sense strand
cagcaaagaaagacauaau

SEQ ID NO: 91115 - RNA, 19 nt, Homo sapiens
  misc_RNA (1)...(19): siRNA sense strand
uaacuaacagcaaagaaag

SEQ ID NO: 91116 - RNA, 19 nt, Homo sapiens
  misc_RNA (1)...(19): siRNA sense strand
gaaacaacugggaugacuu

SEQ ID NO: 91117 - RNA, 19 nt, Homo sapiens
  misc_RNA (1)...(19): siRNA sense strand
ggaaaacucacgcuuaugu

SEQ ID NO: 91118 - RNA, 19 nt, Homo sapiens
  misc_RNA (1)...(19): siRNA sense strand
cagcgaagcaugcaaacug

SEQ ID NO: 91119 - RNA, 19 nt, Homo sapiens
  misc_RNA (1)...(19): siRNA sense strand
ggaggaaaugcuucucaug

SEQ ID NO: 91120 - RNA, 19 nt, Homo sapiens
  misc_RNA (1)...(19): siRNA sense strand
ggaaauuuggggacgauua

SEQ ID NO: 91121 - RNA, 19 nt, Homo sapiens
  misc_RNA (1)...(19): siRNA sense strand
agagaagacuuucccaaaa

SEQ ID NO: 91122 - RNA, 19 nt, Homo sapiens
  misc_RNA (1)...(19): siRNA sense strand
uggccaaugucuauaacuu

SEQ ID NO: 91123 - RNA, 19 nt, Homo sapiens
  misc_RNA (1)...(19): siRNA sense strand
uggaaccucuucaucuuca

SEQ ID NO: 91124 - RNA, 19 nt, Homo sapiens
  misc_RNA (1)...(19): siRNA sense strand
augcuuagauggacuagau

SEQ ID NO: 91125 - RNA, 19 nt, Homo sapiens
  misc_RNA (1)...(19): siRNA sense strand
uagcaccagccauaacuaa

SEQ ID NO: 91126 - RNA, 19 nt, Homo sapiens
  misc_RNA (1)...(19): siRNA sense strand
gucaagcucgaacaucaua

SEQ ID NO: 91127 - RNA, 19 nt, Homo sapiens
  misc_RNA (1)...(19): siRNA sense strand
gcgccgagacccucauguu

SEQ ID NO: 91128 - RNA, 19 nt, Homo sapiens
  misc_RNA (1)...(19): siRNA sense strand
uagaaggcauuguggaaac

SEQ ID NO: 91129 - RNA, 19 nt, Homo sapiens
  misc_RNA (1)...(19): siRNA sense strand
ugaccaacuugaacuggau

SEQ ID NO: 91130 - RNA, 19 nt, Homo sapiens
  misc_RNA (1)...(19): siRNA sense strand
gucuauaacuucccuucug

SEQ ID NO: 91131 - RNA, 19 nt, Homo sapiens
  misc_RNA (1)...(19): siRNA sense strand
gggauucuuuaaaguugau

SEQ ID NO: 91132 - RNA, 19 nt, Homo sapiens
  misc_RNA (1)...(19): siRNA sense strand
agagggauucuuuaaaguu

SEQ ID NO: 91133 - RNA, 19 nt, Homo sapiens
  misc_RNA (1)...(19): siRNA sense strand
ggcuauggcuaccgauaca

SEQ ID NO: 91134 - RNA, 19 nt, Homo sapiens
  misc_RNA (1)...(19): siRNA sense strand
ccgggcaacucagaagaaa

SEQ ID NO: 91135 - RNA, 19 nt, Homo sapiens
  misc_RNA (1)...(19): siRNA sense strand
caacuugaacuggauguag

SEQ ID NO: 91136 - RNA, 19 nt, Homo sapiens
  misc_RNA (1)...(19): siRNA sense strand
gccgagacccucauguuca

SEQ ID NO: 91137 - RNA, 19 nt, Homo sapiens
  misc_RNA (1)...(19): siRNA sense strand
ccucaucggcugcauguuc

SEQ ID NO: 91138 - RNA, 19 nt, Homo sapiens
  misc_RNA (1)...(19): siRNA sense strand
aggaaaugcuucucauguc

SEQ ID NO: 91139 - RNA, 19 nt, Homo sapiens
  misc_RNA (1)...(19): siRNA sense strand
ugaacuggauguagguuuu

SEQ ID NO: 91140 - RNA, 19 nt, Homo sapiens
  misc_RNA (1)...(19): siRNA sense strand
cgagauugucgucauccua

SEQ ID NO: 91141 - RNA, 19 nt, Homo sapiens
  misc_RNA (1)...(19): siRNA sense strand
uggacuagaugauauuacu

SEQ ID NO: 91142 - RNA, 19 nt, Homo sapiens
  misc_RNA (1)...(19): siRNA sense strand
uaacagcaaagaaagacau

SEQ ID NO: 91143 - RNA, 19 nt, Homo sapiens
  misc_RNA (1)...(19): siRNA sense strand
caccuuacagugugaaaga

SEQ ID NO: 91144 - RNA, 19 nt, Homo sapiens
  misc_RNA (1)...(19): siRNA sense strand
ccuagaaggcauuguggaa

SEQ ID NO: 91145 - RNA, 19 nt, Homo sapiens
  misc_RNA (1)...(19): siRNA sense strand
gcaucauccucuuccucuu

SEQ ID NO: 91146 - RNA, 19 nt, Homo sapiens
  misc_RNA (1)...(19): siRNA sense strand
gaacuggauguagguuuua

SEQ ID NO: 91147 - RNA, 19 nt, Homo sapiens
  misc_RNA (1)...(19): siRNA sense strand
gcguggccaaugucuauaa

SEQ ID NO: 91148 - RNA, 19 nt, Homo sapiens
  misc_RNA (1)...(19): siRNA sense strand
gagacuugcccaugaaacu

SEQ ID NO: 91149 - RNA, 19 nt, Homo sapiens
  misc_RNA (1)...(19): siRNA sense strand
gcuuagauggacuagauga

SEQ ID NO: 91150 - RNA, 19 nt, Homo sapiens
  misc_RNA (1)...(19): siRNA sense strand
gaaauuuggggacgauuau

SEQ ID NO: 91151 - RNA, 19 nt, Homo sapiens
  misc_RNA (1)...(19): siRNA sense strand
ccuguaauuuccuuagaag

SEQ ID NO: 91152 - RNA, 19 nt, Homo sapiens
  misc_RNA (1)...(19): siRNA sense strand
cuagaaggcauuguggaaa

SEQ ID NO: 91153 - RNA, 19 nt, Homo sapiens
  misc_RNA (1)...(19): siRNA sense strand
caucauccucuuccucuuc

SEQ ID NO: 91154 - RNA, 19 nt, Homo sapiens
  misc_RNA (1)...(19): siRNA sense strand
uaaaaccaccaagauguua

SEQ ID NO: 91155 - RNA, 19 nt, Homo sapiens
  misc_RNA (1)...(19): siRNA sense strand
ucuguggaaugcuuagaug

SEQ ID NO: 91156 - RNA, 19 nt, Homo sapiens
  misc_RNA (1)...(19): siRNA sense strand
guucgagauugucgucauc

SEQ ID NO: 91157 - RNA, 19 nt, Homo sapiens
  misc_RNA (1)...(19): siRNA sense strand
gaagcaugcaaacugaaca

SEQ ID NO: 91158 - RNA, 19 nt, Homo sapiens
  misc_RNA (1)...(19): siRNA sense strand
ccacgugaucgaugccaaa

SEQ ID NO: 91159 - RNA, 19 nt, Homo sapiens
  misc_RNA (1)...(19): siRNA sense strand
ggcugcauguucaucaaga

SEQ ID NO: 91160 - RNA, 19 nt, Homo sapiens
  misc_RNA (1)...(19): siRNA sense strand
ucgaacaucauauacugaa

SEQ ID NO: 91161 - RNA, 19 nt, Homo sapiens
  misc_RNA (1)...(19): siRNA sense strand
uuaauagcaccagccauaa

SEQ ID NO: 91162 - RNA, 19 nt, Homo sapiens
  misc_RNA (1)...(19): siRNA sense strand
gauugucgucauccuagaa

SEQ ID NO: 91163 - RNA, 19 nt, Homo sapiens
  misc_RNA (1)...(19): siRNA sense strand
uugucaagcucgaacauca

SEQ ID NO: 91164 - RNA, 19 nt, Homo sapiens
  misc_RNA (1)...(19): siRNA sense strand
ggccaaugucuauaacuuc

SEQ ID NO: 91165 - RNA, 19 nt, Homo sapiens
  misc_RNA (1)...(19): siRNA sense strand
agcgaagcaugcaaacuga

SEQ ID NO: 91166 - RNA, 19 nt, Homo sapiens
  misc_RNA (1)...(19): siRNA sense strand
ggaggccaccaucggcuau

SEQ ID NO: 91167 - RNA, 19 nt, Homo sapiens
  misc_RNA (1)...(19): siRNA sense strand
accgauacaucacagacaa

SEQ ID NO: 91168 - RNA, 19 nt, Homo sapiens
  misc_RNA (1)...(19): siRNA sense strand
gacuagaugauauuacuac

SEQ ID NO: 91169 - RNA, 19 nt, Homo sapiens
  misc_RNA (1)...(19): siRNA sense strand
cgccuugcguggccaaugu

SEQ ID NO: 91170 - RNA, 19 nt, Homo sapiens
  misc_RNA (1)...(19): siRNA sense strand
gacggaaaacucacgcuua

SEQ ID NO: 91171 - RNA, 19 nt, Homo sapiens
  misc_RNA (1)...(19): siRNA sense strand
gcugcauguucaucaagau

SEQ ID NO: 91172 - RNA, 19 nt, Homo sapiens
  misc_RNA (1)...(19): siRNA sense strand
gaaaacucacgcuuauguu

SEQ ID NO: 91173 - RNA, 19 nt, Homo sapiens
  misc_RNA (1)...(19): siRNA sense strand
gggagacuugcccaugaaa

SEQ ID NO: 91174 - RNA, 19 nt, Homo sapiens
  misc_RNA (1)...(19): siRNA sense strand
cuacagcuugggagacuug

SEQ ID NO: 91175 - RNA, 19 nt, Homo sapiens
  misc_RNA (1)...(19): siRNA sense strand
aagacauaauucuguggaa

SEQ ID NO: 91176 - RNA, 19 nt, Homo sapiens
  misc_RNA (1)...(19): siRNA sense strand
gcgcuggaaccucuucauc

SEQ ID NO: 91177 - RNA, 19 nt, Homo sapiens
  misc_RNA (1)...(19): siRNA sense strand
agaaggcauuguggaaaca

SEQ ID NO: 91178 - RNA, 19 nt, Homo sapiens
  misc_RNA (1)...(19): siRNA sense strand
guaaauacauagcugacuu

SEQ ID NO: 91179 - RNA, 19 nt, Homo sapiens
  misc_RNA (1)...(19): siRNA sense strand
gcacaugguuccucuuugg

SEQ ID NO: 91180 - RNA, 19 nt, Homo sapiens
  misc_RNA (1)...(19): siRNA sense strand
gaagcgggcugagaccauu

SEQ ID NO: 91181 - RNA, 19 nt, Homo sapiens
  misc_RNA (1)...(19): siRNA sense strand
gauccgaguugccaauaug

SEQ ID NO: 91182 - RNA, 19 nt, Homo sapiens
  misc_RNA (1)...(19): siRNA sense strand
gaaaguggccucuccuagu

SEQ ID NO: 91183 - RNA, 19 nt, Homo sapiens
  misc_RNA (1)...(19): siRNA sense strand
gcuacaagcuucugcucuu

SEQ ID NO: 91184 - RNA, 19 nt, Homo sapiens
  misc_RNA (1)...(19): siRNA sense strand
gaaaucuucaucacaggua

SEQ ID NO: 91185 - RNA, 19 nt, Homo sapiens
  misc_RNA (1)...(19): siRNA sense strand
guucacaccugccaucuca

SEQ ID NO: 91186 - RNA, 19 nt, Homo sapiens
  misc_RNA (1)...(19): siRNA sense strand
gggcugagaccauucguuu

SEQ ID NO: 91187 - RNA, 19 nt, Homo sapiens
  misc_RNA (1)...(19): siRNA sense strand
ggacaaccuucauugacau

SEQ ID NO: 91188 - RNA, 19 nt, Homo sapiens
  misc_RNA (1)...(19): siRNA sense strand
gcucuucucugcgaccuuu

SEQ ID NO: 91189 - RNA, 19 nt, Homo sapiens
  misc_RNA (1)...(19): siRNA sense strand
gaugagaccagucccuuga

SEQ ID NO: 91190 - RNA, 19 nt, Homo sapiens
  misc_RNA (1)...(19): siRNA sense strand
auacauagcugacuuuagc

SEQ ID NO: 91191 - RNA, 19 nt, Homo sapiens
  misc_RNA (1)...(19): siRNA sense strand
aaaguggccucuccuagug

SEQ ID NO: 91192 - RNA, 19 nt, Homo sapiens
  misc_RNA (1)...(19): siRNA sense strand
caaguuggaggagucauua

SEQ ID NO: 91193 - RNA, 19 nt, Homo sapiens
  misc_RNA (1)...(19): siRNA sense strand
ggagaguccugacaaaaga

SEQ ID NO: 91194 - RNA, 19 nt, Homo sapiens
  misc_RNA (1)...(19): siRNA sense strand
gagcuggugcugauccuaa

SEQ ID NO: 91195 - RNA, 19 nt, Homo sapiens
  misc_RNA (1)...(19): siRNA sense strand
gcaaaagccuccucauugg

SEQ ID NO: 91196 - RNA, 19 nt, Homo sapiens
  misc_RNA (1)...(19): siRNA sense strand
ugagaccagucccuugaaa

SEQ ID NO: 91197 - RNA, 19 nt, Homo sapiens
  misc_RNA (1)...(19): siRNA sense strand
gcugagaccauucguuuca

SEQ ID NO: 91198 - RNA, 19 nt, Homo sapiens
  misc_RNA (1)...(19): siRNA sense strand
uaagggagcaagcugagaa

SEQ ID NO: 91199 - RNA, 19 nt, Homo sapiens
  misc_RNA (1)...(19): siRNA sense strand
ccuaaugggcccagggaua

SEQ ID NO: 91200 - RNA, 19 nt, Homo sapiens
  misc_RNA (1)...(19): siRNA sense strand
gcagcaacgugagaaugga

SEQ ID NO: 91201 - RNA, 19 nt, Homo sapiens
  misc_RNA (1)...(19): siRNA sense strand
gccauugugcuucuuauug

SEQ ID NO: 91202 - RNA, 19 nt, Homo sapiens
  misc_RNA (1)...(19): siRNA sense strand
gcugccaggugacaggaaa

SEQ ID NO: 91203 - RNA, 19 nt, Homo sapiens
  misc_RNA (1)...(19): siRNA sense strand
auagcugacuuuagccuuu

SEQ ID NO: 91204 - RNA, 19 nt, Homo sapiens
  misc_RNA (1)...(19): siRNA sense strand
ugaccaaguugugaaagug

SEQ ID NO: 91205 - RNA, 19 nt, Homo sapiens
  misc_RNA (1)...(19): siRNA sense strand
uggacaaccuucauugaca

SEQ ID NO: 91206 - RNA, 19 nt, Homo sapiens
  misc_RNA (1)...(19): siRNA sense strand
ccaccauccuggaaaucuu

SEQ ID NO: 91207 - RNA, 19 nt, Homo sapiens
  misc_RNA (1)...(19): siRNA sense strand
ucagaccacucagacagaa

SEQ ID NO: 91208 - RNA, 19 nt, Homo sapiens
  misc_RNA (1)...(19): siRNA sense strand
ucaaggaccuguggacaac

SEQ ID NO: 91209 - RNA, 19 nt, Homo sapiens
  misc_RNA (1)...(19): siRNA sense strand
ggcggagaguccugacaaa

SEQ ID NO: 91210 - RNA, 19 nt, Homo sapiens
  misc_RNA (1)...(19): siRNA sense strand
guacaggugcacacacuca

SEQ ID NO: 91211 - RNA, 19 nt, Homo sapiens
  misc_RNA (1)...(19): siRNA sense strand
ucaccaccauccuggaaau

SEQ ID NO: 91212 - RNA, 19 nt, Homo sapiens
  misc_RNA (1)...(19): siRNA sense strand
agccagugguaaauacaua

SEQ ID NO: 91213 - RNA, 19 nt, Homo sapiens
  misc_RNA (1)...(19): siRNA sense strand
caguugccaagguguauua

SEQ ID NO: 91214 - RNA, 19 nt, Homo sapiens
  misc_RNA (1)...(19): siRNA sense strand
ggcuauggcuuccgcuaca

SEQ ID NO: 91215 - RNA, 19 nt, Homo sapiens
  misc_RNA (1)...(19): siRNA sense strand
cugaaaagcucaaguugga

SEQ ID NO: 91216 - RNA, 19 nt, Homo sapiens
  misc_RNA (1)...(19): siRNA sense strand
agaccagucccuugaaaga

SEQ ID NO: 91217 - RNA, 19 nt, Homo sapiens
  misc_RNA (1)...(19): siRNA sense strand
ccauugugcuucuuauugc

SEQ ID NO: 91218 - RNA, 19 nt, Homo sapiens
  misc_RNA (1)...(19): siRNA sense strand
gcaguggcgcuacaagcuu

SEQ ID NO: 91219 - RNA, 19 nt, Homo sapiens
  misc_RNA (1)...(19): siRNA sense strand
caaccuucauugacaugca

SEQ ID NO: 91220 - RNA, 19 nt, Homo sapiens
  misc_RNA (1)...(19): siRNA sense strand
guggugagggugacuuuga

SEQ ID NO: 91221 - RNA, 19 nt, Homo sapiens
  misc_RNA (1)...(19): siRNA sense strand
gggagaacauccggcucaa

SEQ ID NO: 91222 - RNA, 19 nt, Homo sapiens
  misc_RNA (1)...(19): siRNA sense strand
cuacaagcuucugcucuuc

SEQ ID NO: 91223 - RNA, 19 nt, Homo sapiens
  misc_RNA (1)...(19): siRNA sense strand
gacaugcaguggcgcuaca

SEQ ID NO: 91224 - RNA, 19 nt, Homo sapiens
  misc_RNA (1)...(19): siRNA sense strand
gggagcaagcugagaagga

SEQ ID NO: 91225 - RNA, 19 nt, Homo sapiens
  misc_RNA (1)...(19): siRNA sense strand
gcucaccaccauccuggaa

SEQ ID NO: 91226 - RNA, 19 nt, Homo sapiens
  misc_RNA (1)...(19): siRNA sense strand
ggagcacauugccgacaag

SEQ ID NO: 91227 - RNA, 19 nt, Homo sapiens
  misc_RNA (1)...(19): siRNA sense strand
ggcacaugguuccucuuug

SEQ ID NO: 91228 - RNA, 19 nt, Homo sapiens
  misc_RNA (1)...(19): siRNA sense strand
ucaaguuggaggagucauu

SEQ ID NO: 91229 - RNA, 19 nt, Homo sapiens
  misc_RNA (1)...(19): siRNA sense strand
gcgcaaaagccuccucauu

SEQ ID NO: 91230 - RNA, 19 nt, Homo sapiens
  misc_RNA (1)...(19): siRNA sense strand
gacagccccuuccuuauuc

SEQ ID NO: 91231 - RNA, 19 nt, Homo sapiens
  misc_RNA (1)...(19): siRNA sense strand
gcucaaccaggucaaugug

SEQ ID NO: 91232 - RNA, 19 nt, Homo sapiens
  misc_RNA (1)...(19): siRNA sense strand
gugaaaguggccucuccua

SEQ ID NO: 91233 - RNA, 19 nt, Homo sapiens
  misc_RNA (1)...(19): siRNA sense strand
ugucagccagugguaaaua

SEQ ID NO: 91234 - RNA, 19 nt, Homo sapiens
  misc_RNA (1)...(19): siRNA sense strand
ugacagccccuuccuuauu

SEQ ID NO: 91235 - RNA, 19 nt, Homo sapiens
  misc_RNA (1)...(19): siRNA sense strand
cacuggagccuuccucuuc

SEQ ID NO: 91236 - RNA, 19 nt, Homo sapiens
  misc_RNA (1)...(19): siRNA sense strand
ugauccgaguugccaauau

SEQ ID NO: 91237 - RNA, 19 nt, Homo sapiens
  misc_RNA (1)...(19): siRNA sense strand
cagccagcaugcaguugug

SEQ ID NO: 91238 - RNA, 19 nt, Homo sapiens
  misc_RNA (1)...(19): siRNA sense strand
guagacacagccucugaca

SEQ ID NO: 91239 - RNA, 19 nt, Homo sapiens
  misc_RNA (1)...(19): siRNA sense strand
uggagcacauugccgacaa

SEQ ID NO: 91240 - RNA, 19 nt, Homo sapiens
  misc_RNA (1)...(19): siRNA sense strand
ccuaguggccuccgugaca

SEQ ID NO: 91241 - RNA, 19 nt, Homo sapiens
  misc_RNA (1)...(19): siRNA sense strand
ucuuuggcgugguguggua

SEQ ID NO: 91242 - RNA, 19 nt, Homo sapiens
  misc_RNA (1)...(19): siRNA sense strand
gaccagucccuugaaagau

SEQ ID NO: 91243 - RNA, 19 nt, Homo sapiens
  misc_RNA (1)...(19): siRNA sense strand
cgcaaaagccuccucauug

SEQ ID NO: 91244 - RNA, 19 nt, Homo sapiens
  misc_RNA (1)...(19): siRNA sense strand
gaaucccaaaccaccauug

SEQ ID NO: 91245 - RNA, 19 nt, Homo sapiens
  misc_RNA (1)...(19): siRNA sense strand
acuuugagcuggugcugau

SEQ ID NO: 91246 - RNA, 19 nt, Homo sapiens
  misc_RNA (1)...(19): siRNA sense strand
ggccauugugcuucuuauu

SEQ ID NO: 91247 - RNA, 19 nt, Homo sapiens
  misc_RNA (1)...(19): siRNA sense strand
gguaaggccuucugcauca

SEQ ID NO: 91248 - RNA, 19 nt, Homo sapiens
  misc_RNA (1)...(19): siRNA sense strand
gaucacguguuaccugcua

SEQ ID NO: 91249 - RNA, 19 nt, Homo sapiens
  misc_RNA (1)...(19): siRNA sense strand
agauugggaucacguguua

SEQ ID NO: 91250 - RNA, 19 nt, Homo sapiens
  misc_RNA (1)...(19): siRNA sense strand
cgguggagcugcccuauga

SEQ ID NO: 91251 - RNA, 19 nt, Homo sapiens
  misc_RNA (1)...(19): siRNA sense strand
gcaggccgguccucuacuu

SEQ ID NO: 91252 - RNA, 19 nt, Homo sapiens
  misc_RNA (1)...(19): siRNA sense strand
gaaagaggaccagaagcaa

SEQ ID NO: 91253 - RNA, 19 nt, Homo sapiens
  misc_RNA (1)...(19): siRNA sense strand
caucaucuacuccgucauu

SEQ ID NO: 91254 - RNA, 19 nt, Homo sapiens
  misc_RNA (1)...(19): siRNA sense strand
ggggaaggcuacaaucaaa

SEQ ID NO: 91255 - RNA, 19 nt, Homo sapiens
  misc_RNA (1)...(19): siRNA sense strand
ugaaagaggaccagaagca

SEQ ID NO: 91256 - RNA, 19 nt, Homo sapiens
  misc_RNA (1)...(19): siRNA sense strand
cauagagcaugaccaacug

SEQ ID NO: 91257 - RNA, 19 nt, Homo sapiens
  misc_RNA (1)...(19): siRNA sense strand
gaucaggugcacaucauag

SEQ ID NO: 91258 - RNA, 19 nt, Homo sapiens
  misc_RNA (1)...(19): siRNA sense strand
aaagaggaccagaagcaaa

SEQ ID NO: 91259 - RNA, 19 nt, Homo sapiens
  misc_RNA (1)...(19): siRNA sense strand
gcaugaaagaggaccagaa

SEQ ID NO: 91260 - RNA, 19 nt, Homo sapiens
  misc_RNA (1)...(19): siRNA sense strand
ugaacuccaugagcugaaa

SEQ ID NO: 91261 - RNA, 19 nt, Homo sapiens
  misc_RNA (1)...(19): siRNA sense strand
gagguaaggccuucugcau

SEQ ID NO: 91262 - RNA, 19 nt, Homo sapiens
  misc_RNA (1)...(19): siRNA sense strand
ggaucaggugcacaucaua

SEQ ID NO: 91263 - RNA, 19 nt, Homo sapiens
  misc_RNA (1)...(19): siRNA sense strand
cuggaaaccuucugugaac

SEQ ID NO: 91264 - RNA, 19 nt, Homo sapiens
  misc_RNA (1)...(19): siRNA sense strand
gaaggacaaggacgaggau

SEQ ID NO: 91265 - RNA, 19 nt, Homo sapiens
  misc_RNA (1)...(19): siRNA sense strand
gaggaucaggugcacauca

SEQ ID NO: 91266 - RNA, 19 nt, Homo sapiens
  misc_RNA (1)...(19): siRNA sense strand
caacuggaacugggacuuc

SEQ ID NO: 91267 - RNA, 19 nt, Homo sapiens
  misc_RNA (1)...(19): siRNA sense strand
caugaaagaggaccagaag

SEQ ID NO: 91268 - RNA, 19 nt, Homo sapiens
  misc_RNA (1)...(19): siRNA sense strand
ggaaaccuucugugaacuc

SEQ ID NO: 91269 - RNA, 19 nt, Homo sapiens
  misc_RNA (1)...(19): siRNA sense strand
ccugcuacuuggccuuauu

SEQ ID NO: 91270 - RNA, 19 nt, Homo sapiens
  misc_RNA (1)...(19): siRNA sense strand
ggacaaggacgaggaucag

SEQ ID NO: 91271 - RNA, 19 nt, Homo sapiens
  misc_RNA (1)...(19): siRNA sense strand
ggaggaugacuggaacuuc

SEQ ID NO: 91272 - RNA, 19 nt, Homo sapiens
  misc_RNA (1)...(19): siRNA sense strand
ccuggaauccuuuuauuuu

SEQ ID NO: 91273 - RNA, 19 nt, Homo sapiens
  misc_RNA (1)...(19): siRNA sense strand
ucuggaaaccuucugugaa

SEQ ID NO: 91274 - RNA, 19 nt, Homo sapiens
  misc_RNA (1)...(19): siRNA sense strand
gcgagaagcugcaguacuc

SEQ ID NO: 91275 - RNA, 19 nt, Homo sapiens
  misc_RNA (1)...(19): siRNA sense strand
ggcaagguguucugcaugu

SEQ ID NO: 91276 - RNA, 19 nt, Homo sapiens
  misc_RNA (1)...(19): siRNA sense strand
gcaagguguucugcauguu

SEQ ID NO: 91277 - RNA, 19 nt, Homo sapiens
  misc_RNA (1)...(19): siRNA sense strand
gcucgugccugugguacaa

SEQ ID NO: 91278 - RNA, 19 nt, Homo sapiens
  misc_RNA (1)...(19): siRNA sense strand
guacaagagccgcgagaag

SEQ ID NO: 91279 - RNA, 19 nt, Homo sapiens
  misc_RNA (1)...(19): siRNA sense strand
gaacgccgaggacgagaag

SEQ ID NO: 91280 - RNA, 19 nt, Homo sapiens
  misc_RNA (1)...(19): siRNA sense strand
gcggcaagguguucugcau

SEQ ID NO: 91281 - RNA, 19 nt, Homo sapiens
  misc_RNA (1)...(19): siRNA sense strand
gcgagcgcaucaacaccuu

SEQ ID NO: 91282 - RNA, 19 nt, Homo sapiens
  misc_RNA (1)...(19): siRNA sense strand
caagguguucugcauguuc

SEQ ID NO: 91283 - RNA, 19 nt, Homo sapiens
  misc_RNA (1)...(19): siRNA sense strand
cuacuacuacugcuucauc

SEQ ID NO: 91284 - RNA, 19 nt, Homo sapiens
  misc_RNA (1)...(19): siRNA sense strand
cagcuucgucuacauccuu

SEQ ID NO: 91285 - RNA, 19 nt, Homo sapiens
  misc_RNA (1)...(19): siRNA sense strand
cuacggacaccgccucauc

SEQ ID NO: 91286 - RNA, 19 nt, Homo sapiens
  misc_RNA (1)...(19): siRNA sense strand
gcacucaaaugccucauca

SEQ ID NO: 91287 - RNA, 19 nt, Homo sapiens
  misc_RNA (1)...(19): siRNA sense strand
agacguggcucaucuacaa

SEQ ID NO: 91288 - RNA, 19 nt, Homo sapiens
  misc_RNA (1)...(19): siRNA sense strand
ugacgaggaugaugaggaa

SEQ ID NO: 91289 - RNA, 19 nt, Homo sapiens
  misc_RNA (1)...(19): siRNA sense strand
ucaacaagaucaccuucaa

SEQ ID NO: 91290 - RNA, 19 nt, Homo sapiens
  misc_RNA (1)...(19): siRNA sense strand
uggcucaucuacaaacaua

SEQ ID NO: 91291 - RNA, 19 nt, Homo sapiens
  misc_RNA (1)...(19): siRNA sense strand
gaacagccacagcuacaau

SEQ ID NO: 91292 - RNA, 19 nt, Homo sapiens
  misc_RNA (1)...(19): siRNA sense strand
ggaaacaccagcguaaguu

SEQ ID NO: 91293 - RNA, 19 nt, Homo sapiens
  misc_RNA (1)...(19): siRNA sense strand
ggaagcgccucagcgacua

SEQ ID NO: 91294 - RNA, 19 nt, Homo sapiens
  misc_RNA (1)...(19): siRNA sense strand
ccucaucgcccaagccaua

SEQ ID NO: 91295 - RNA, 19 nt, Homo sapiens
  misc_RNA (1)...(19): siRNA sense strand
cagcgacuaugcccucauu

SEQ ID NO: 91296 - RNA, 19 nt, Homo sapiens
  misc_RNA (1)...(19): siRNA sense strand
cagaagcuccggaguguga

SEQ ID NO: 91297 - RNA, 19 nt, Homo sapiens
  misc_RNA (1)...(19): siRNA sense strand
ugaagacacucaugaccau

SEQ ID NO: 91298 - RNA, 19 nt, Homo sapiens
  misc_RNA (1)...(19): siRNA sense strand
guacucauucgcacucaaa

SEQ ID NO: 91299 - RNA, 19 nt, Homo sapiens
  misc_RNA (1)...(19): siRNA sense strand
gaaacaccagcguaaguuc

SEQ ID NO: 91300 - RNA, 19 nt, Homo sapiens
  misc_RNA (1)...(19): siRNA sense strand
agaagcacgugcacaacuu

SEQ ID NO: 91301 - RNA, 19 nt, Homo sapiens
  misc_RNA (1)...(19): siRNA sense strand
ccaggacgaugacgaggau

SEQ ID NO: 91302 - RNA, 19 nt, Homo sapiens
  misc_RNA (1)...(19): siRNA sense strand
ccauguggcugauuuccau

SEQ ID NO: 91303 - RNA, 19 nt, Homo sapiens
  misc_RNA (1)...(19): siRNA sense strand
uaacacgcuuaccgaccua

SEQ ID NO: 91304 - RNA, 19 nt, Homo sapiens
  misc_RNA (1)...(19): siRNA sense strand
gcacgugcacaacuucaug

SEQ ID NO: 91305 - RNA, 19 nt, Homo sapiens
  misc_RNA (1)...(19): siRNA sense strand
caacacgcgcuucgucaug

SEQ ID NO: 91306 - RNA, 19 nt, Homo sapiens
  misc_RNA (1)...(19): siRNA sense strand
cgucauguacgaccuugua

SEQ ID NO: 91307 - RNA, 19 nt, Homo sapiens
  misc_RNA (1)...(19): siRNA sense strand
gagcgcguguuccucaucu

SEQ ID NO: 91308 - RNA, 19 nt, Homo sapiens
  misc_RNA (1)...(19): siRNA sense strand
gagaagcacgugcacaacu

SEQ ID NO: 91309 - RNA, 19 nt, Homo sapiens
  misc_RNA (1)...(19): siRNA sense strand
gcagagagccucggggaaa

SEQ ID NO: 91310 - RNA, 19 nt, Homo sapiens
  misc_RNA (1)...(19): siRNA sense strand
agacccagaccgucaugua

SEQ ID NO: 91311 - RNA, 19 nt, Homo sapiens
  misc_RNA (1)...(19): siRNA sense strand
acaccaaggagucucugua

SEQ ID NO: 91312 - RNA, 19 nt, Homo sapiens
  misc_RNA (1)...(19): siRNA sense strand
ucaccaaggcugagaagca

SEQ ID NO: 91313 - RNA, 19 nt, Homo sapiens
  misc_RNA (1)...(19): siRNA sense strand
ggagauccagcuguucaug

SEQ ID NO: 91314 - RNA, 19 nt, Homo sapiens
  misc_RNA (1)...(19): siRNA sense strand
cgaggaugaugaggaagau

SEQ ID NO: 91315 - RNA, 19 nt, Homo sapiens
  misc_RNA (1)...(19): siRNA sense strand
gaccaggcuaacacgcuua

SEQ ID NO: 91316 - RNA, 19 nt, Homo sapiens
  misc_RNA (1)...(19): siRNA sense strand
ucaccuuccucuccauugg

SEQ ID NO: 91317 - RNA, 19 nt, Homo sapiens
  misc_RNA (1)...(19): siRNA sense strand
ccugcucacuggcaucaug

SEQ ID NO: 91318 - RNA, 19 nt, Homo sapiens
  misc_RNA (1)...(19): siRNA sense strand
aacacgcgcuucgucauga

SEQ ID NO: 91319 - RNA, 19 nt, Homo sapiens
  misc_RNA (1)...(19): siRNA sense strand
cucagaagcuccggagugu

SEQ ID NO: 91320 - RNA, 19 nt, Homo sapiens
  misc_RNA (1)...(19): siRNA sense strand
cccgggagauccagcuguu

SEQ ID NO: 91321 - RNA, 19 nt, Homo sapiens
  misc_RNA (1)...(19): siRNA sense strand
gggagacguggcucaucua

SEQ ID NO: 91322 - RNA, 19 nt, Homo sapiens
  misc_RNA (1)...(19): siRNA sense strand
aacaagaucaccuucaaca

SEQ ID NO: 91323 - RNA, 19 nt, Homo sapiens
  misc_RNA (1)...(19): siRNA sense strand
acacgcgcuucgucaugaa

SEQ ID NO: 91324 - RNA, 19 nt, Homo sapiens
  misc_RNA (1)...(19): siRNA sense strand
cggaaacaccagcguaagu

SEQ ID NO: 91325 - RNA, 19 nt, Homo sapiens
  misc_RNA (1)...(19): siRNA sense strand
cagcucaccaagcggguaa

SEQ ID NO: 91326 - RNA, 19 nt, Homo sapiens
  misc_RNA (1)...(19): siRNA sense strand
cgagagguaccacgacaag

SEQ ID NO: 91327 - RNA, 19 nt, Homo sapiens
  misc_RNA (1)...(19): siRNA sense strand
ggacgaugacgaggaugau

SEQ ID NO: 91328 - RNA, 19 nt, Homo sapiens
  misc_RNA (1)...(19): siRNA sense strand
caacaagaucaccuucaac

SEQ ID NO: 91329 - RNA, 19 nt, Homo sapiens
  misc_RNA (1)...(19): siRNA sense strand
cugagaagcacgugcacaa

SEQ ID NO: 91330 - RNA, 19 nt, Homo sapiens
  misc_RNA (1)...(19): siRNA sense strand
cccaggaccaggacgauga

SEQ ID NO: 91331 - RNA, 19 nt, Homo sapiens
  misc_RNA (1)...(19): siRNA sense strand
gaagcgccucagcgacuau

SEQ ID NO: 91332 - RNA, 19 nt, Homo sapiens
  misc_RNA (1)...(19): siRNA sense strand
ccaaagagguccagcuguu

SEQ ID NO: 91333 - RNA, 19 nt, Homo sapiens
  misc_RNA (1)...(19): siRNA sense strand
cccggaagcuggaguuuaa

SEQ ID NO: 91334 - RNA, 19 nt, Homo sapiens
  misc_RNA (1)...(19): siRNA sense strand
caucggcgcucucaaucaa

SEQ ID NO: 91335 - RNA, 19 nt, Homo sapiens
  misc_RNA (1)...(19): siRNA sense strand
uggccaagcuuuacaugaa

SEQ ID NO: 91336 - RNA, 19 nt, Homo sapiens
  misc_RNA (1)...(19): siRNA sense strand
ggcaggaacuggcauugga

SEQ ID NO: 91337 - RNA, 19 nt, Homo sapiens
  misc_RNA (1)...(19): siRNA sense strand
cagcauuuccaccuucuua

SEQ ID NO: 91338 - RNA, 19 nt, Homo sapiens
  misc_RNA (1)...(19): siRNA sense strand
gaagcuggaugcccugacu

SEQ ID NO: 91339 - RNA, 19 nt, Homo sapiens
  misc_RNA (1)...(19): siRNA sense strand
gggaacaagugaacuccau

SEQ ID NO: 91340 - RNA, 19 nt, Homo sapiens
  misc_RNA (1)...(19): siRNA sense strand
ccacugggcaccuuucaga

SEQ ID NO: 91341 - RNA, 19 nt, Homo sapiens
  misc_RNA (1)...(19): siRNA sense strand
agaagcacgugcacaacuu

SEQ ID NO: 91342 - RNA, 19 nt, Homo sapiens
  misc_RNA (1)...(19): siRNA sense strand
gaacuggcauuggacucau

SEQ ID NO: 91343 - RNA, 19 nt, Homo sapiens
  misc_RNA (1)...(19): siRNA sense strand
ccagccagcaguccaagua

SEQ ID NO: 91344 - RNA, 19 nt, Homo sapiens
  misc_RNA (1)...(19): siRNA sense strand
ggauauccaguauaccaaa

SEQ ID NO: 91345 - RNA, 19 nt, Homo sapiens
  misc_RNA (1)...(19): siRNA sense strand
augcagagaugcugugguu

SEQ ID NO: 91346 - RNA, 19 nt, Homo sapiens
  misc_RNA (1)...(19): siRNA sense strand
acaagaagccuggauguuc

SEQ ID NO: 91347 - RNA, 19 nt, Homo sapiens
  misc_RNA (1)...(19): siRNA sense strand
cagagaagcacgugcacaa

SEQ ID NO: 91348 - RNA, 19 nt, Homo sapiens
  misc_RNA (1)...(19): siRNA sense strand
gcacgugcacaacuucaug

SEQ ID NO: 91349 - RNA, 19 nt, Homo sapiens
  misc_RNA (1)...(19): siRNA sense strand
gauauccaguauaccaaag

SEQ ID NO: 91350 - RNA, 19 nt, Homo sapiens
  misc_RNA (1)...(19): siRNA sense strand
gaagcuggaguuuaacaag

SEQ ID NO: 91351 - RNA, 19 nt, Homo sapiens
  misc_RNA (1)...(19): siRNA sense strand
ccugugcacuggagucaug

SEQ ID NO: 91352 - RNA, 19 nt, Homo sapiens
  misc_RNA (1)...(19): siRNA sense strand
aagccuggauguucuacaa

SEQ ID NO: 91353 - RNA, 19 nt, Homo sapiens
  misc_RNA (1)...(19): siRNA sense strand
ggaacuggcauuggacuca

SEQ ID NO: 91354 - RNA, 19 nt, Homo sapiens
  misc_RNA (1)...(19): siRNA sense strand
cagcaucggcgcucucaau

SEQ ID NO: 91355 - RNA, 19 nt, Homo sapiens
  misc_RNA (1)...(19): siRNA sense strand
cgugggcgcucuaccuguu

SEQ ID NO: 91356 - RNA, 19 nt, Homo sapiens
  misc_RNA (1)...(19): siRNA sense strand
gccgagaggcaggcuguua

SEQ ID NO: 91357 - RNA, 19 nt, Homo sapiens
  misc_RNA (1)...(19): siRNA sense strand
ggaagcuggaguuuaacaa

SEQ ID NO: 91358 - RNA, 19 nt, Homo sapiens
  misc_RNA (1)...(19): siRNA sense strand
acaacuucaugauggauau

SEQ ID NO: 91359 - RNA, 19 nt, Homo sapiens
  misc_RNA (1)...(19): siRNA sense strand
cgccgugcgugcaggauuu

SEQ ID NO: 91360 - RNA, 19 nt, Homo sapiens
  misc_RNA (1)...(19): siRNA sense strand
agaugcacaugauccugua

SEQ ID NO: 91361 - RNA, 19 nt, Homo sapiens
  misc_RNA (1)...(19): siRNA sense strand
ucuccaagaugcacaugau

SEQ ID NO: 91362 - RNA, 19 nt, Homo sapiens
  misc_RNA (1)...(19): siRNA sense strand
cugguuaaaugcacgauca

SEQ ID NO: 91363 - RNA, 19 nt, Homo sapiens
  misc_RNA (1)...(19): siRNA sense strand
gagaagcacgugcacaacu

SEQ ID NO: 91364 - RNA, 19 nt, Homo sapiens
  misc_RNA (1)...(19): siRNA sense strand
gcccggaagcuggaguuua

SEQ ID NO: 91365 - RNA, 19 nt, Homo sapiens
  misc_RNA (1)...(19): siRNA sense strand
ccgagaggcaggcuguuaa

SEQ ID NO: 91366 - RNA, 19 nt, Homo sapiens
  misc_RNA (1)...(19): siRNA sense strand
gagguccagcuguucauga

SEQ ID NO: 91367 - RNA, 19 nt, Homo sapiens
  misc_RNA (1)...(19): siRNA sense strand
caaagagguccagcuguuc

SEQ ID NO: 91368 - RNA, 19 nt, Homo sapiens
  misc_RNA (1)...(19): siRNA sense strand
gaagcuccgggaacaagug

SEQ ID NO: 91369 - RNA, 19 nt, Homo sapiens
  misc_RNA (1)...(19): siRNA sense strand
gccaagcuuuacaugaaca

SEQ ID NO: 91370 - RNA, 19 nt, Homo sapiens
  misc_RNA (1)...(19): siRNA sense strand
aaagagguccagcuguuca

SEQ ID NO: 91371 - RNA, 19 nt, Homo sapiens
  misc_RNA (1)...(19): siRNA sense strand
ugcacaugauccuguauga

SEQ ID NO: 91372 - RNA, 19 nt, Homo sapiens
  misc_RNA (1)...(19): siRNA sense strand
gcaccuuucagacacacuu

SEQ ID NO: 91373 - RNA, 19 nt, Homo sapiens
  misc_RNA (1)...(19): siRNA sense strand
ggccaagcuuuacaugaac

SEQ ID NO: 91374 - RNA, 19 nt, Homo sapiens
  misc_RNA (1)...(19): siRNA sense strand
gcaucggcgcucucaauca

SEQ ID NO: 91375 - RNA, 19 nt, Homo sapiens
  misc_RNA (1)...(19): siRNA sense strand
cuacaagaagccuggaugu

SEQ ID NO: 91376 - RNA, 19 nt, Homo sapiens
  misc_RNA (1)...(19): siRNA sense strand
gagaggcaggcuguuaaug

SEQ ID NO: 91377 - RNA, 19 nt, Homo sapiens
  misc_RNA (1)...(19): siRNA sense strand
cacaacuucaugauggaua

SEQ ID NO: 91378 - RNA, 19 nt, Homo sapiens
  misc_RNA (1)...(19): siRNA sense strand
acaaacauacucgcaggaa

SEQ ID NO: 91379 - RNA, 19 nt, Homo sapiens
  misc_RNA (1)...(19): siRNA sense strand
cgaucagcauuuccaccuu

SEQ ID NO: 91380 - RNA, 19 nt, Homo sapiens
  misc_RNA (1)...(19): siRNA sense strand
ccaguauaccaaagagaug

SEQ ID NO: 91381 - RNA, 19 nt, Homo sapiens
  misc_RNA (1)...(19): siRNA sense strand
agacacacuuuggcugauc

SEQ ID NO: 91382 - RNA, 19 nt, Homo sapiens
  misc_RNA (1)...(19): siRNA sense strand
cgagaggcaggcuguuaau

SEQ ID NO: 91383 - RNA, 19 nt, Homo sapiens
  misc_RNA (1)...(19): siRNA sense strand
gcacaacuucaugauggau

SEQ ID NO: 91384 - RNA, 19 nt, Homo sapiens
  misc_RNA (1)...(19): siRNA sense strand
gaggagcacugaaaccuuu

SEQ ID NO: 91385 - RNA, 19 nt, Homo sapiens
  misc_RNA (1)...(19): siRNA sense strand
ggagggaggagcacugaaa

SEQ ID NO: 91386 - RNA, 19 nt, Homo sapiens
  misc_RNA (1)...(19): siRNA sense strand
gcaagguggugcagguguu

SEQ ID NO: 91387 - RNA, 19 nt, Homo sapiens
  misc_RNA (1)...(19): siRNA sense strand
gggacagucugcagaucua

SEQ ID NO: 91388 - RNA, 19 nt, Homo sapiens
  misc_RNA (1)...(19): siRNA sense strand
gugcugcccuucuaucuca

SEQ ID NO: 91389 - RNA, 19 nt, Homo sapiens
  misc_RNA (1)...(19): siRNA sense strand
cagcaaccaccaagaguuu

SEQ ID NO: 91390 - RNA, 19 nt, Homo sapiens
  misc_RNA (1)...(19): siRNA sense strand
gagaaccuccggucuaaag

SEQ ID NO: 91391 - RNA, 19 nt, Homo sapiens
  misc_RNA (1)...(19): siRNA sense strand
gaggaggacgugggcuuua

SEQ ID NO: 91392 - RNA, 19 nt, Homo sapiens
  misc_RNA (1)...(19): siRNA sense strand
gcaaccaccaagaguuuga

SEQ ID NO: 91393 - RNA, 19 nt, Homo sapiens
  misc_RNA (1)...(19): siRNA sense strand
cuggagacaucccgagaaa

SEQ ID NO: 91394 - RNA, 19 nt, Homo sapiens
  misc_RNA (1)...(19): siRNA sense strand
caacagcaaccaccaagag

SEQ ID NO: 91395 - RNA, 19 nt, Homo sapiens
  misc_RNA (1)...(19): siRNA sense strand
gaaccuccggucuaaagug

SEQ ID NO: 91396 - RNA, 19 nt, Homo sapiens
  misc_RNA (1)...(19): siRNA sense strand
ugucugugcugcccuucua

SEQ ID NO: 91397 - RNA, 19 nt, Homo sapiens
  misc_RNA (1)...(19): siRNA sense strand
uaugagaaccuccggucua

SEQ ID NO: 91398 - RNA, 19 nt, Homo sapiens
  misc_RNA (1)...(19): siRNA sense strand
ggaggaggacgugggcuuu

SEQ ID NO: 91399 - RNA, 19 nt, Homo sapiens
  misc_RNA (1)...(19): siRNA sense strand
augagaaccuccggucuaa

SEQ ID NO: 91400 - RNA, 19 nt, Homo sapiens
  misc_RNA (1)...(19): siRNA sense strand
ggaggagcacugaaaccuu

SEQ ID NO: 91401 - RNA, 19 nt, Homo sapiens
  misc_RNA (1)...(19): siRNA sense strand
ucaccaucaucuucaacaa

SEQ ID NO: 91402 - RNA, 19 nt, Homo sapiens
  misc_RNA (1)...(19): siRNA sense strand
cacacccucagauguauua

SEQ ID NO: 91403 - RNA, 19 nt, Homo sapiens
  misc_RNA (1)...(19): siRNA sense strand
aggaggacgugggcuuuaa

SEQ ID NO: 91404 - RNA, 19 nt, Homo sapiens
  misc_RNA (1)...(19): siRNA sense strand
ggagacaucccgagaaacc

SEQ ID NO: 91405 - RNA, 19 nt, Homo sapiens
  misc_RNA (1)...(19): siRNA sense strand
gcaacagcaaccaccaaga

SEQ ID NO: 91406 - RNA, 19 nt, Homo sapiens
  misc_RNA (1)...(19): siRNA sense strand
ccaguacgcgcaacuucuu

SEQ ID NO: 91407 - RNA, 19 nt, Homo sapiens
  misc_RNA (1)...(19): siRNA sense strand
ggagggacagucugcagau

SEQ ID NO: 91408 - RNA, 19 nt, Homo sapiens
  misc_RNA (1)...(19): siRNA sense strand
ugagccugcugcacuucua

SEQ ID NO: 91409 - RNA, 19 nt, Homo sapiens
  misc_RNA (1)...(19): siRNA sense strand
accaagaguuugaggacuu

SEQ ID NO: 91410 - RNA, 19 nt, Homo sapiens
  misc_RNA (1)...(19): siRNA sense strand
gcucaaccucaucgacauu

SEQ ID NO: 91411 - RNA, 19 nt, Homo sapiens
  misc_RNA (1)...(19): siRNA sense strand
gcugugcgucuucgccuuu

SEQ ID NO: 91412 - RNA, 19 nt, Homo sapiens
  misc_RNA (1)...(19): siRNA sense strand
gaacacacuaugagaaccu

SEQ ID NO: 91413 - RNA, 19 nt, Homo sapiens
  misc_RNA (1)...(19): siRNA sense strand
gcagguguuccgccucaug

SEQ ID NO: 91414 - RNA, 19 nt, Homo sapiens
  misc_RNA (1)...(19): siRNA sense strand
gagggacagucugcagauc

SEQ ID NO: 91415 - RNA, 19 nt, Homo sapiens
  misc_RNA (1)...(19): siRNA sense strand
gggaacacacuaugagaac

SEQ ID NO: 91416 - RNA, 19 nt, Homo sapiens
  misc_RNA (1)...(19): siRNA sense strand
uccacagccugcccgagua

SEQ ID NO: 91417 - RNA, 19 nt, Homo sapiens
  misc_RNA (1)...(19): siRNA sense strand
cuccacacccucagaugua

SEQ ID NO: 91418 - RNA, 19 nt, Homo sapiens
  misc_RNA (1)...(19): siRNA sense strand
ccaucaccaucaucuucaa

SEQ ID NO: 91419 - RNA, 19 nt, Homo sapiens
  misc_RNA (1)...(19): siRNA sense strand
gcaucuugcugcuguaccu

SEQ ID NO: 91420 - RNA, 19 nt, Homo sapiens
  misc_RNA (1)...(19): siRNA sense strand
caucaucuucaacaaguuc

SEQ ID NO: 91421 - RNA, 19 nt, Homo sapiens
  misc_RNA (1)...(19): siRNA sense strand
accaucaucuucaacaagu

SEQ ID NO: 91422 - RNA, 19 nt, Homo sapiens
  misc_RNA (1)...(19): siRNA sense strand
gccucuggcugaccaugga

SEQ ID NO: 91423 - RNA, 19 nt, Homo sapiens
  misc_RNA (1)...(19): siRNA sense strand
gcgcaacagcaaccaccaa

SEQ ID NO: 91424 - RNA, 19 nt, Homo sapiens
  misc_RNA (1)...(19): siRNA sense strand
agaaggaccugccgaacua

SEQ ID NO: 91425 - RNA, 19 nt, Homo sapiens
  misc_RNA (1)...(19): siRNA sense strand
gagaggaagccagcugcua

SEQ ID NO: 91426 - RNA, 19 nt, Homo sapiens
  misc_RNA (1)...(19): siRNA sense strand
gagaaggaccugccgaacu

SEQ ID NO: 91427 - RNA, 19 nt, Homo sapiens
  misc_RNA (1)...(19): siRNA sense strand
uagaaaagguggccucugu

SEQ ID NO: 91428 - RNA, 19 nt, Homo sapiens
  misc_RNA (1)...(19): siRNA sense strand
ccacaggccagcagcuaga

SEQ ID NO: 91429 - RNA, 19 nt, Homo sapiens
  misc_RNA (1)...(19): siRNA sense strand
ccucugugccacccacuuu

SEQ ID NO: 91430 - RNA, 19 nt, Homo sapiens
  misc_RNA (1)...(19): siRNA sense strand
ugacaaagcaauucuguuu

SEQ ID NO: 91431 - RNA, 19 nt, Homo sapiens
  misc_RNA (1)...(19): siRNA sense strand
uaacaccugugagaaauaa

SEQ ID NO: 91432 - RNA, 19 nt, Homo sapiens
  misc_RNA (1)...(19): siRNA sense strand
caauuugcccugaaacuua

SEQ ID NO: 91433 - RNA, 19 nt, Homo sapiens
  misc_RNA (1)...(19): siRNA sense strand
cgagagaaaugcuuguuau

SEQ ID NO: 91434 - RNA, 19 nt, Homo sapiens
  misc_RNA (1)...(19): siRNA sense strand
gaaauuagaggugaugcua

SEQ ID NO: 91435 - RNA, 19 nt, Homo sapiens
  misc_RNA (1)...(19): siRNA sense strand
agacaucuguguauucuga

SEQ ID NO: 91436 - RNA, 19 nt, Homo sapiens
  misc_RNA (1)...(19): siRNA sense strand
caacagagcaggaauaaaa

SEQ ID NO: 91437 - RNA, 19 nt, Homo sapiens
  misc_RNA (1)...(19): siRNA sense strand
guacagaaaucagauggau

SEQ ID NO: 91438 - RNA, 19 nt, Homo sapiens
  misc_RNA (1)...(19): siRNA sense strand
gaacuaacaccugugagaa

SEQ ID NO: 91439 - RNA, 19 nt, Homo sapiens
  misc_RNA (1)...(19): siRNA sense strand
gaauaacagucuagcugau

SEQ ID NO: 91440 - RNA, 19 nt, Homo sapiens
  misc_RNA (1)...(19): siRNA sense strand
ggaccaacaagcaauauau

SEQ ID NO: 91441 - RNA, 19 nt, Homo sapiens
  misc_RNA (1)...(19): siRNA sense strand
guuacuggguugaguguuu

SEQ ID NO: 91442 - RNA, 19 nt, Homo sapiens
  misc_RNA (1)...(19): siRNA sense strand
gcaucaauuugcccugaaa

SEQ ID NO: 91443 - RNA, 19 nt, Homo sapiens
  misc_RNA (1)...(19): siRNA sense strand
ucagugacauccuuaauac

SEQ ID NO: 91444 - RNA, 19 nt, Homo sapiens
  misc_RNA (1)...(19): siRNA sense strand
uaaaguguauccugacucu

SEQ ID NO: 91445 - RNA, 19 nt, Homo sapiens
  misc_RNA (1)...(19): siRNA sense strand
gagauaaggaugaauugau

SEQ ID NO: 91446 - RNA, 19 nt, Homo sapiens
  misc_RNA (1)...(19): siRNA sense strand
gagagaaaugcuuguuauu

SEQ ID NO: 91447 - RNA, 19 nt, Homo sapiens
  misc_RNA (1)...(19): siRNA sense strand
uagaggugaugcuaaagaa

SEQ ID NO: 91448 - RNA, 19 nt, Homo sapiens
  misc_RNA (1)...(19): siRNA sense strand
gaauugauacacacacaga

SEQ ID NO: 91449 - RNA, 19 nt, Homo sapiens
  misc_RNA (1)...(19): siRNA sense strand
ugacauccuuaauacagaa

SEQ ID NO: 91450 - RNA, 19 nt, Homo sapiens
  misc_RNA (1)...(19): siRNA sense strand
gaaaguucuucaccuucau

SEQ ID NO: 91451 - RNA, 19 nt, Homo sapiens
  misc_RNA (1)...(19): siRNA sense strand
ucucuuaaacugcccaaua

SEQ ID NO: 91452 - RNA, 19 nt, Homo sapiens
  misc_RNA (1)...(19): siRNA sense strand
aaacuuacccacagacuca

SEQ ID NO: 91453 - RNA, 19 nt, Homo sapiens
  misc_RNA (1)...(19): siRNA sense strand
ggauuauucuccuugucuu

SEQ ID NO: 91454 - RNA, 19 nt, Homo sapiens
  misc_RNA (1)...(19): siRNA sense strand
gaaccugauacgugacaaa

SEQ ID NO: 91455 - RNA, 19 nt, Homo sapiens
  misc_RNA (1)...(19): siRNA sense strand
uagcugugcugggauuauu

SEQ ID NO: 91456 - RNA, 19 nt, Homo sapiens
  misc_RNA (1)...(19): siRNA sense strand
cuccuugucuugguuguua

SEQ ID NO: 91457 - RNA, 19 nt, Homo sapiens
  misc_RNA (1)...(19): siRNA sense strand
ccugauacgugacaaagca

SEQ ID NO: 91458 - RNA, 19 nt, Homo sapiens
  misc_RNA (1)...(19): siRNA sense strand
gcagcaacuccgagagaaa

SEQ ID NO: 91459 - RNA, 19 nt, Homo sapiens
  misc_RNA (1)...(19): siRNA sense strand
gugacauccuuaauacaga

SEQ ID NO: 91460 - RNA, 19 nt, Homo sapiens
  misc_RNA (1)...(19): siRNA sense strand
ccgagagaaaugcuuguua

SEQ ID NO: 91461 - RNA, 19 nt, Homo sapiens
  misc_RNA (1)...(19): siRNA sense strand
gaccaacaagcaauauaug

SEQ ID NO: 91462 - RNA, 19 nt, Homo sapiens
  misc_RNA (1)...(19): siRNA sense strand
aaagaacuaacaccuguga

SEQ ID NO: 91463 - RNA, 19 nt, Homo sapiens
  misc_RNA (1)...(19): siRNA sense strand
auaacagucuagcugauug

SEQ ID NO: 91464 - RNA, 19 nt, Homo sapiens
  misc_RNA (1)...(19): siRNA sense strand
cucuuaaacugcccaauau

SEQ ID NO: 91465 - RNA, 19 nt, Homo sapiens
  misc_RNA (1)...(19): siRNA sense strand
ggcagcaacuccgagagaa

SEQ ID NO: 91466 - RNA, 19 nt, Homo sapiens
  misc_RNA (1)...(19): siRNA sense strand
cuuaaacugcccaauauau

SEQ ID NO: 91467 - RNA, 19 nt, Homo sapiens
  misc_RNA (1)...(19): siRNA sense strand
acacacacagaaccugaua

SEQ ID NO: 91468 - RNA, 19 nt, Homo sapiens
  misc_RNA (1)...(19): siRNA sense strand
aaggaugaauugauacaca

SEQ ID NO: 91469 - RNA, 19 nt, Homo sapiens
  misc_RNA (1)...(19): siRNA sense strand
gaauaaaacaacagagaga

SEQ ID NO: 91470 - RNA, 19 nt, Homo sapiens
  misc_RNA (1)...(19): siRNA sense strand
acuaacaccugugagaaau

SEQ ID NO: 91471 - RNA, 19 nt, Homo sapiens
  misc_RNA (1)...(19): siRNA sense strand
gcugauuguuccaccaaag

SEQ ID NO: 91472 - RNA, 19 nt, Homo sapiens
  misc_RNA (1)...(19): siRNA sense strand
gauacgugacaaagcaauu

SEQ ID NO: 91473 - RNA, 19 nt, Homo sapiens
  misc_RNA (1)...(19): siRNA sense strand
agaacuaacaccugugaga

SEQ ID NO: 91474 - RNA, 19 nt, Homo sapiens
  misc_RNA (1)...(19): siRNA sense strand
acugucaacccuuggaaua

SEQ ID NO: 91475 - RNA, 19 nt, Homo sapiens
  misc_RNA (1)...(19): siRNA sense strand
ucaauuugcccugaaacuu

SEQ ID NO: 91476 - RNA, 19 nt, Homo sapiens
  misc_RNA (1)...(19): siRNA sense strand
cagcaacuccgagagaaau

SEQ ID NO: 91477 - RNA, 19 nt, Homo sapiens
  misc_RNA (1)...(19): siRNA sense strand
cuaacaccugugagaaaua

SEQ ID NO: 91478 - RNA, 19 nt, Homo sapiens
  misc_RNA (1)...(19): siRNA sense strand
ggaugucugucaggguuca

SEQ ID NO: 91479 - RNA, 19 nt, Homo sapiens
  misc_RNA (1)...(19): siRNA sense strand
cgagauaaggaugaauuga

SEQ ID NO: 91480 - RNA, 19 nt, Homo sapiens
  misc_RNA (1)...(19): siRNA sense strand
gagcaggaauaaaacaaca

SEQ ID NO: 91481 - RNA, 19 nt, Homo sapiens
  misc_RNA (1)...(19): siRNA sense strand
aaguguauccugacucuug

SEQ ID NO: 91482 - RNA, 19 nt, Homo sapiens
  misc_RNA (1)...(19): siRNA sense strand
cagcuguauuuccaucuca

SEQ ID NO: 91483 - RNA, 19 nt, Homo sapiens
  misc_RNA (1)...(19): siRNA sense strand
gaggugaugcuaaagaaaa

SEQ ID NO: 91484 - RNA, 19 nt, Homo sapiens
  misc_RNA (1)...(19): siRNA sense strand
ggguugaguguuucaguga

SEQ ID NO: 91485 - RNA, 19 nt, Homo sapiens
  misc_RNA (1)...(19): siRNA sense strand
gggauuauucuccuugucu

SEQ ID NO: 91486 - RNA, 19 nt, Homo sapiens
  misc_RNA (1)...(19): siRNA sense strand
agacucaggcccagaaagu

SEQ ID NO: 91487 - RNA, 19 nt, Homo sapiens
  misc_RNA (1)...(19): siRNA sense strand
guugaguguuucagugaca

SEQ ID NO: 91488 - RNA, 19 nt, Homo sapiens
  misc_RNA (1)...(19): siRNA sense strand
guucuucaccuucaucucu

SEQ ID NO: 91489 - RNA, 19 nt, Homo sapiens
  misc_RNA (1)...(19): siRNA sense strand
gcaauauaugcugaguuaa

SEQ ID NO: 91490 - RNA, 19 nt, Homo sapiens
  misc_RNA (1)...(19): siRNA sense strand
uucagugacauccuuaaua

SEQ ID NO: 91491 - RNA, 19 nt, Homo sapiens
  misc_RNA (1)...(19): siRNA sense strand
gcaguguggacauucaaca

SEQ ID NO: 91492 - RNA, 19 nt, Homo sapiens
  misc_RNA (1)...(19): siRNA sense strand
gauuauucuccuugucuug

SEQ ID NO: 91493 - RNA, 19 nt, Homo sapiens
  misc_RNA (1)...(19): siRNA sense strand
aauaacagucuagcugauu

SEQ ID NO: 91494 - RNA, 19 nt, Homo sapiens
  misc_RNA (1)...(19): siRNA sense strand
caucuguguauucugagua

SEQ ID NO: 91495 - RNA, 19 nt, Homo sapiens
  misc_RNA (1)...(19): siRNA sense strand
cauccuuaauacagaaauc

SEQ ID NO: 91496 - RNA, 19 nt, Homo sapiens
  misc_RNA (1)...(19): siRNA sense strand
aauuugcccugaaacuuag

SEQ ID NO: 91497 - RNA, 19 nt, Homo sapiens
  misc_RNA (1)...(19): siRNA sense strand
gauaaggaugaauugauac

SEQ ID NO: 91498 - RNA, 19 nt, Homo sapiens
  misc_RNA (1)...(19): siRNA sense strand
gucaacccuuggaauaaca

SEQ ID NO: 91499 - RNA, 19 nt, Homo sapiens
  misc_RNA (1)...(19): siRNA sense strand
ggguucaccuuggcaucaa

SEQ ID NO: 91500 - RNA, 19 nt, Homo sapiens
  misc_RNA (1)...(19): siRNA sense strand
ugucaacccuuggaauaac

SEQ ID NO: 91501 - RNA, 19 nt, Homo sapiens
  misc_RNA (1)...(19): siRNA sense strand
aauaaaguguauccugacu

SEQ ID NO: 91502 - RNA, 19 nt, Homo sapiens
  misc_RNA (1)...(19): siRNA sense strand
guguuucagugacauccuu

SEQ ID NO: 91503 - RNA, 19 nt, Homo sapiens
  misc_RNA (1)...(19): siRNA sense strand
aguguauccugacucuuga

SEQ ID NO: 91504 - RNA, 19 nt, Homo sapiens
  misc_RNA (1)...(19): siRNA sense strand
guaguacagaaaucagaug

SEQ ID NO: 91505 - RNA, 19 nt, Homo sapiens
  misc_RNA (1)...(19): siRNA sense strand
ucuuaaacugcccaauaua

SEQ ID NO: 91506 - RNA, 19 nt, Homo sapiens
  misc_RNA (1)...(19): siRNA sense strand
uuacuggguugaguguuuc

SEQ ID NO: 91507 - RNA, 19 nt, Homo sapiens
  misc_RNA (1)...(19): siRNA sense strand
gaaccgaacaggaaauauu

SEQ ID NO: 91508 - RNA, 19 nt, Homo sapiens
  misc_RNA (1)...(19): siRNA sense strand
gcagaaagcacgucauugu

SEQ ID NO: 91509 - RNA, 19 nt, Homo sapiens
  misc_RNA (1)...(19): siRNA sense strand
guguggaucuucaaugaua

SEQ ID NO: 91510 - RNA, 19 nt, Homo sapiens
  misc_RNA (1)...(19): siRNA sense strand
ggauugguguguuucguaa

SEQ ID NO: 91511 - RNA, 19 nt, Homo sapiens
  misc_RNA (1)...(19): siRNA sense strand
gaagaacuccagucugcuu

SEQ ID NO: 91512 - RNA, 19 nt, Homo sapiens
  misc_RNA (1)...(19): siRNA sense strand
caguguggaucuucaauga

SEQ ID NO: 91513 - RNA, 19 nt, Homo sapiens
  misc_RNA (1)...(19): siRNA sense strand
caauaaaugguuuggcuuu

SEQ ID NO: 91514 - RNA, 19 nt, Homo sapiens
  misc_RNA (1)...(19): siRNA sense strand
cagauaaugcugaacuuaa

SEQ ID NO: 91515 - RNA, 19 nt, Homo sapiens
  misc_RNA (1)...(19): siRNA sense strand
gugcagugcuacaaguaaa

SEQ ID NO: 91516 - RNA, 19 nt, Homo sapiens
  misc_RNA (1)...(19): siRNA sense strand
ccugauggccacuguguua

SEQ ID NO: 91517 - RNA, 19 nt, Homo sapiens
  misc_RNA (1)...(19): siRNA sense strand
uaaaugguuuggcuuucaa

SEQ ID NO: 91518 - RNA, 19 nt, Homo sapiens
  misc_RNA (1)...(19): siRNA sense strand
gauuacauauuccaacagu

SEQ ID NO: 91519 - RNA, 19 nt, Homo sapiens
  misc_RNA (1)...(19): siRNA sense strand
ccagucugcuuucuauaga

SEQ ID NO: 91520 - RNA, 19 nt, Homo sapiens
  misc_RNA (1)...(19): siRNA sense strand
aggaguggauuacauauuc

SEQ ID NO: 91521 - RNA, 19 nt, Homo sapiens
  misc_RNA (1)...(19): siRNA sense strand
uaacagcagucaucaucca

SEQ ID NO: 91522 - RNA, 19 nt, Homo sapiens
  misc_RNA (1)...(19): siRNA sense strand
gcacgucauuguggccauu

SEQ ID NO: 91523 - RNA, 19 nt, Homo sapiens
  misc_RNA (1)...(19): siRNA sense strand
caaagcggcagcaaaggaa

SEQ ID NO: 91524 - RNA, 19 nt, Homo sapiens
  misc_RNA (1)...(19): siRNA sense strand
ggaaaccuaaaggcaauaa

SEQ ID NO: 91525 - RNA, 19 nt, Homo sapiens
  misc_RNA (1)...(19): siRNA sense strand
guaaaucgacuuaaaucag

SEQ ID NO: 91526 - RNA, 19 nt, Homo sapiens
  misc_RNA (1)...(19): siRNA sense strand
cuaggaaucauuugcauug

SEQ ID NO: 91527 - RNA, 19 nt, Homo sapiens
  misc_RNA (1)...(19): siRNA sense strand
gaacuccagucugcuuucu

SEQ ID NO: 91528 - RNA, 19 nt, Homo sapiens
  misc_RNA (1)...(19): siRNA sense strand
agucugcuuucuauagaua

SEQ ID NO: 91529 - RNA, 19 nt, Homo sapiens
  misc_RNA (1)...(19): siRNA sense strand
gaggaguggauuacauauu

SEQ ID NO: 91530 - RNA, 19 nt, Homo sapiens
  misc_RNA (1)...(19): siRNA sense strand
aagaagaacuugggaagag

SEQ ID NO: 91531 - RNA, 19 nt, Homo sapiens
  misc_RNA (1)...(19): siRNA sense strand
aaggaaaccuaaaggcaau

SEQ ID NO: 91532 - RNA, 19 nt, Homo sapiens
  misc_RNA (1)...(19): siRNA sense strand
auauaugacugccaagguu

SEQ ID NO: 91533 - RNA, 19 nt, Homo sapiens
  misc_RNA (1)...(19): siRNA sense strand
ccaaagcggcagcaaagga

SEQ ID NO: 91534 - RNA, 19 nt, Homo sapiens
  misc_RNA (1)...(19): siRNA sense strand
gguaaggaaagaagaacuu

SEQ ID NO: 91535 - RNA, 19 nt, Homo sapiens
  misc_RNA (1)...(19): siRNA sense strand
aaacaaagaggaaccuucu

SEQ ID NO: 91536 - RNA, 19 nt, Homo sapiens
  misc_RNA (1)...(19): siRNA sense strand
gggugacaauaaaugguuu

SEQ ID NO: 91537 - RNA, 19 nt, Homo sapiens
  misc_RNA (1)...(19): siRNA sense strand
uuaccuuccucauggauug

SEQ ID NO: 91538 - RNA, 19 nt, Homo sapiens
  misc_RNA (1)...(19): siRNA sense strand
aaagaggaaccuucucaga

SEQ ID NO: 91539 - RNA, 19 nt, Homo sapiens
  misc_RNA (1)...(19): siRNA sense strand
cagcaaaggaaaccuaaag

SEQ ID NO: 91540 - RNA, 19 nt, Homo sapiens
  misc_RNA (1)...(19): siRNA sense strand
acaaagaggaaccuucuca

SEQ ID NO: 91541 - RNA, 19 nt, Homo sapiens
  misc_RNA (1)...(19): siRNA sense strand
caucauccaugggugacaa

SEQ ID NO: 91542 - RNA, 19 nt, Homo sapiens
  misc_RNA (1)...(19): siRNA sense strand
ccucauggauugguguguu

SEQ ID NO: 91543 - RNA, 19 nt, Homo sapiens
  misc_RNA (1)...(19): siRNA sense strand
gaaaccuaaaggcaauaaa

SEQ ID NO: 91544 - RNA, 19 nt, Homo sapiens
  misc_RNA (1)...(19): siRNA sense strand
agaagaacuugggaagaga

SEQ ID NO: 91545 - RNA, 19 nt, Homo sapiens
  misc_RNA (1)...(19): siRNA sense strand
auccaugggugacaauaaa

SEQ ID NO: 91546 - RNA, 19 nt, Homo sapiens
  misc_RNA (1)...(19): siRNA sense strand
auaaaugguuuggcuuuca

SEQ ID NO: 91547 - RNA, 19 nt, Homo sapiens
  misc_RNA (1)...(19): siRNA sense strand
gagguccuaggaaucauuu

SEQ ID NO: 91548 - RNA, 19 nt, Homo sapiens
  misc_RNA (1)...(19): siRNA sense strand
agauaaugcugaacuuaac

SEQ ID NO: 91549 - RNA, 19 nt, Homo sapiens
  misc_RNA (1)...(19): siRNA sense strand
acuccagucugcuuucuau

SEQ ID NO: 91550 - RNA, 19 nt, Homo sapiens
  misc_RNA (1)...(19): siRNA sense strand
guaaggaaagaagaacuug

SEQ ID NO: 91551 - RNA, 19 nt, Homo sapiens
  misc_RNA (1)...(19): siRNA sense strand
cguaacagcagucaucauc

SEQ ID NO: 91552 - RNA, 19 nt, Homo sapiens
  misc_RNA (1)...(19): siRNA sense strand
gaauacaagaacgcagaaa

SEQ ID NO: 91553 - RNA, 19 nt, Homo sapiens
  misc_RNA (1)...(19): siRNA sense strand
agaguuugcuggccuguac

SEQ ID NO: 91554 - RNA, 19 nt, Homo sapiens
  misc_RNA (1)...(19): siRNA sense strand
cugaggaguggauuacaua

SEQ ID NO: 91555 - RNA, 19 nt, Homo sapiens
  misc_RNA (1)...(19): siRNA sense strand
gcagcaaaggaaaccuaaa

SEQ ID NO: 91556 - RNA, 19 nt, Homo sapiens
  misc_RNA (1)...(19): siRNA sense strand
guggaucuucaaugauaua

SEQ ID NO: 91557 - RNA, 19 nt, Homo sapiens
  misc_RNA (1)...(19): siRNA sense strand
cauccaugggugacaauaa

SEQ ID NO: 91558 - RNA, 19 nt, Homo sapiens
  misc_RNA (1)...(19): siRNA sense strand
gcaauaaaagcuccauuuc

SEQ ID NO: 91559 - RNA, 19 nt, Homo sapiens
  misc_RNA (1)...(19): siRNA sense strand
caaaauccuucccugaauc

SEQ ID NO: 91560 - RNA, 19 nt, Homo sapiens
  misc_RNA (1)...(19): siRNA sense strand
cagaaagcacgucauugug

SEQ ID NO: 91561 - RNA, 19 nt, Homo sapiens
  misc_RNA (1)...(19): siRNA sense strand
ucaaaauccuucccugaau

SEQ ID NO: 91562 - RNA, 19 nt, Homo sapiens
  misc_RNA (1)...(19): siRNA sense strand
ccugaggaguggauuacau

SEQ ID NO: 91563 - RNA, 19 nt, Homo sapiens
  misc_RNA (1)...(19): siRNA sense strand
gacccaaagcggcagcaaa

SEQ ID NO: 91564 - RNA, 19 nt, Homo sapiens
  misc_RNA (1)...(19): siRNA sense strand
gauggccacuguguuaaaa

SEQ ID NO: 91565 - RNA, 19 nt, Homo sapiens
  misc_RNA (1)...(19): siRNA sense strand
ucaggaaccgaacaggaaa

SEQ ID NO: 91566 - RNA, 19 nt, Homo sapiens
  misc_RNA (1)...(19): siRNA sense strand
aauaaaugguuuggcuuuc

SEQ ID NO: 91567 - RNA, 19 nt, Homo sapiens
  misc_RNA (1)...(19): siRNA sense strand
aauaaaagcuccauuucag

SEQ ID NO: 91568 - RNA, 19 nt, Homo sapiens
  misc_RNA (1)...(19): siRNA sense strand
uauaugacugccaagguuu

SEQ ID NO: 91569 - RNA, 19 nt, Homo sapiens
  misc_RNA (1)...(19): siRNA sense strand
aaagaagaacuugggaaga

SEQ ID NO: 91570 - RNA, 19 nt, Homo sapiens
  misc_RNA (1)...(19): siRNA sense strand
cucauggauugguguguuu

SEQ ID NO: 91571 - RNA, 19 nt, Homo sapiens
  misc_RNA (1)...(19): siRNA sense strand
ggcagcaaaggaaaccuaa

SEQ ID NO: 91572 - RNA, 19 nt, Homo sapiens
  misc_RNA (1)...(19): siRNA sense strand
cgaauacaagaacgcagaa

SEQ ID NO: 91573 - RNA, 19 nt, Homo sapiens
  misc_RNA (1)...(19): siRNA sense strand
ggcuuucaaacauaagaua

SEQ ID NO: 91574 - RNA, 19 nt, Homo sapiens
  misc_RNA (1)...(19): siRNA sense strand
cauuugcauuguccugaug

SEQ ID NO: 91575 - RNA, 19 nt, Homo sapiens
  misc_RNA (1)...(19): siRNA sense strand
caauaaaagcuccauuuca

SEQ ID NO: 91576 - RNA, 19 nt, Homo sapiens
  misc_RNA (1)...(19): siRNA sense strand
gcagugcuacaaguaaauc

SEQ ID NO: 91577 - RNA, 19 nt, Homo sapiens
  misc_RNA (1)...(19): siRNA sense strand
ggcaauaaaagcuccauuu

SEQ ID NO: 91578 - RNA, 19 nt, Homo sapiens
  misc_RNA (1)...(19): siRNA sense strand
acgcagaaagcacgucauu

SEQ ID NO: 91579 - RNA, 19 nt, Homo sapiens
  misc_RNA (1)...(19): siRNA sense strand
ugauggccacuguguuaaa

SEQ ID NO: 91580 - RNA, 19 nt, Homo sapiens
  misc_RNA (1)...(19): siRNA sense strand
gcucacugccgagguccua

SEQ ID NO: 91581 - RNA, 19 nt, Homo sapiens
  misc_RNA (1)...(19): siRNA sense strand
ggaguggauuacauauucc

SEQ ID NO: 91582 - RNA, 19 nt, Homo sapiens
  misc_RNA (1)...(19): siRNA sense strand
ucauuugcauuguccugau

SEQ ID NO: 91583 - RNA, 19 nt, Homo sapiens
  misc_RNA (1)...(19): siRNA sense strand
cugccgagguccuaggaau

SEQ ID NO: 91584 - RNA, 19 nt, Homo sapiens
  misc_RNA (1)...(19): siRNA sense strand
gccgagguccuaggaauca

SEQ ID NO: 91585 - RNA, 19 nt, Homo sapiens
  misc_RNA (1)...(19): siRNA sense strand
ggaaccgaacaggaaauau

SEQ ID NO: 91586 - RNA, 19 nt, Homo sapiens
  misc_RNA (1)...(19): siRNA sense strand
gaacguaacugugcaaugc

SEQ ID NO: 91587 - RNA, 19 nt, Homo sapiens
  misc_RNA (1)...(19): siRNA sense strand
gaaccgaacaggaaauauu

SEQ ID NO: 91588 - RNA, 19 nt, Homo sapiens
  misc_RNA (1)...(19): siRNA sense strand
ggauugguguguuucguaa

SEQ ID NO: 91589 - RNA, 19 nt, Homo sapiens
  misc_RNA (1)...(19): siRNA sense strand
gcagaaagcacguccuugu

SEQ ID NO: 91590 - RNA, 19 nt, Homo sapiens
  misc_RNA (1)...(19): siRNA sense strand
acauguacguggacuuaua

SEQ ID NO: 91591 - RNA, 19 nt, Homo sapiens
  misc_RNA (1)...(19): siRNA sense strand
gaacucuucuagucugcuu

SEQ ID NO: 91592 - RNA, 19 nt, Homo sapiens
  misc_RNA (1)...(19): siRNA sense strand
caauaaaugguuuggcuuu

SEQ ID NO: 91593 - RNA, 19 nt, Homo sapiens
  misc_RNA (1)...(19): siRNA sense strand
ccugauggccacuguguua

SEQ ID NO: 91594 - RNA, 19 nt, Homo sapiens
  misc_RNA (1)...(19): siRNA sense strand
uaaaugguuuggcuuucaa

SEQ ID NO: 91595 - RNA, 19 nt, Homo sapiens
  misc_RNA (1)...(19): siRNA sense strand
gauuacauauuccaacagu

SEQ ID NO: 91596 - RNA, 19 nt, Homo sapiens
  misc_RNA (1)...(19): siRNA sense strand
ccaaguagaauuaaaccuu

SEQ ID NO: 91597 - RNA, 19 nt, Homo sapiens
  misc_RNA (1)...(19): siRNA sense strand
cuucuagucugcuuucuau

SEQ ID NO: 91598 - RNA, 19 nt, Homo sapiens
  misc_RNA (1)...(19): siRNA sense strand
cuacauguacguggacuua

SEQ ID NO: 91599 - RNA, 19 nt, Homo sapiens
  misc_RNA (1)...(19): siRNA sense strand
aggaguggauuacauauuc

SEQ ID NO: 91600 - RNA, 19 nt, Homo sapiens
  misc_RNA (1)...(19): siRNA sense strand
uaacagcagucaucaucca

SEQ ID NO: 91601 - RNA, 19 nt, Homo sapiens
  misc_RNA (1)...(19): siRNA sense strand
caaagccgcagcaaaggaa

SEQ ID NO: 91602 - RNA, 19 nt, Homo sapiens
  misc_RNA (1)...(19): siRNA sense strand
ggaaaccuaaaggcaauaa

SEQ ID NO: 91603 - RNA, 19 nt, Homo sapiens
  misc_RNA (1)...(19): siRNA sense strand
cuaggaaucauuugcauug

SEQ ID NO: 91604 - RNA, 19 nt, Homo sapiens
  misc_RNA (1)...(19): siRNA sense strand
gcacguccuuguggccauu

SEQ ID NO: 91605 - RNA, 19 nt, Homo sapiens
  misc_RNA (1)...(19): siRNA sense strand
agucugcuuucuauagaua

SEQ ID NO: 91606 - RNA, 19 nt, Homo sapiens
  misc_RNA (1)...(19): siRNA sense strand
gaggaguggauuacauauu

SEQ ID NO: 91607 - RNA, 19 nt, Homo sapiens
  misc_RNA (1)...(19): siRNA sense strand
cuagucugcuuucuauaga

SEQ ID NO: 91608 - RNA, 19 nt, Homo sapiens
  misc_RNA (1)...(19): siRNA sense strand
ucaaaaugcuucucugaau

SEQ ID NO: 91609 - RNA, 19 nt, Homo sapiens
  misc_RNA (1)...(19): siRNA sense strand
aaggaaaccuaaaggcaau

SEQ ID NO: 91610 - RNA, 19 nt, Homo sapiens
  misc_RNA (1)...(19): siRNA sense strand
auauaugacugccaagguu

SEQ ID NO: 91611 - RNA, 19 nt, Homo sapiens
  misc_RNA (1)...(19): siRNA sense strand
uacguggacuuauaucaga

SEQ ID NO: 91612 - RNA, 19 nt, Homo sapiens
  misc_RNA (1)...(19): siRNA sense strand
aaacaaagaggaaccuucu

SEQ ID NO: 91613 - RNA, 19 nt, Homo sapiens
  misc_RNA (1)...(19): siRNA sense strand
cagaucaugcugaacguaa

SEQ ID NO: 91614 - RNA, 19 nt, Homo sapiens
  misc_RNA (1)...(19): siRNA sense strand
gggugacaauaaaugguuu

SEQ ID NO: 91615 - RNA, 19 nt, Homo sapiens
  misc_RNA (1)...(19): siRNA sense strand
gcaggccugugcuucaaag

SEQ ID NO: 91616 - RNA, 19 nt, Homo sapiens
  misc_RNA (1)...(19): siRNA sense strand
uuaccuuccucauggauug

SEQ ID NO: 91617 - RNA, 19 nt, Homo sapiens
  misc_RNA (1)...(19): siRNA sense strand
aaagaggaaccuucucaga

SEQ ID NO: 91618 - RNA, 19 nt, Homo sapiens
  misc_RNA (1)...(19): siRNA sense strand
cagcaaaggaaaccuaaag

SEQ ID NO: 91619 - RNA, 19 nt, Homo sapiens
  misc_RNA (1)...(19): siRNA sense strand
gaaaccuaaaggcaauaaa

SEQ ID NO: 91620 - RNA, 19 nt, Homo sapiens
  misc_RNA (1)...(19): siRNA sense strand
acaaagaggaaccuucuca

SEQ ID NO: 91621 - RNA, 19 nt, Homo sapiens
  misc_RNA (1)...(19): siRNA sense strand
caucauccaugggugacaa

SEQ ID NO: 91622 - RNA, 19 nt, Homo sapiens
  misc_RNA (1)...(19): siRNA sense strand
ccucauggauugguguguu

SEQ ID NO: 91623 - RNA, 19 nt, Homo sapiens
  misc_RNA (1)...(19): siRNA sense strand
auccaugggugacaauaaa

SEQ ID NO: 91624 - RNA, 19 nt, Homo sapiens
  misc_RNA (1)...(19): siRNA sense strand
auaaaugguuuggcuuuca

SEQ ID NO: 91625 - RNA, 19 nt, Homo sapiens
  misc_RNA (1)...(19): siRNA sense strand
caaaaugcuucucugaauc

SEQ ID NO: 91626 - RNA, 19 nt, Homo sapiens
  misc_RNA (1)...(19): siRNA sense strand
gagguccuaggaaucauuu

SEQ ID NO: 91627 - RNA, 19 nt, Homo sapiens
  misc_RNA (1)...(19): siRNA sense strand
ggccugugcuucaaagaac

SEQ ID NO: 91628 - RNA, 19 nt, Homo sapiens
  misc_RNA (1)...(19): siRNA sense strand
cguaacagcagucaucauc

SEQ ID NO: 91629 - RNA, 19 nt, Homo sapiens
  misc_RNA (1)...(19): siRNA sense strand
ccaaagccgcagcaaagga

SEQ ID NO: 91630 - RNA, 19 nt, Homo sapiens
  misc_RNA (1)...(19): siRNA sense strand
gauaaaagacucagaucau

SEQ ID NO: 91631 - RNA, 19 nt, Homo sapiens
  misc_RNA (1)...(19): siRNA sense strand
cugaggaguggauuacaua

SEQ ID NO: 91632 - RNA, 19 nt, Homo sapiens
  misc_RNA (1)...(19): siRNA sense strand
gaauacaagaacgcagaaa

SEQ ID NO: 91633 - RNA, 19 nt, Homo sapiens
  misc_RNA (1)...(19): siRNA sense strand
augcuucucugaaucauca

SEQ ID NO: 91634 - RNA, 19 nt, Homo sapiens
  misc_RNA (1)...(19): siRNA sense strand
gcaauaaaagcuccauuuc

SEQ ID NO: 91635 - RNA, 19 nt, Homo sapiens
  misc_RNA (1)...(19): siRNA sense strand
guacguggacuuauaucag

SEQ ID NO: 91636 - RNA, 19 nt, Homo sapiens
  misc_RNA (1)...(19): siRNA sense strand
cauccaugggugacaauaa

SEQ ID NO: 91637 - RNA, 19 nt, Homo sapiens
  misc_RNA (1)...(19): siRNA sense strand
gcagcaaaggaaaccuaaa

SEQ ID NO: 91638 - RNA, 19 nt, Homo sapiens
  misc_RNA (1)...(19): siRNA sense strand
ccugaggaguggauuacau

SEQ ID NO: 91639 - RNA, 19 nt, Homo sapiens
  misc_RNA (1)...(19): siRNA sense strand
gacccaaagccgcagcaaa

SEQ ID NO: 91640 - RNA, 19 nt, Homo sapiens
  misc_RNA (1)...(19): siRNA sense strand
uauaugacugccaagguuu

SEQ ID NO: 91641 - RNA, 19 nt, Homo sapiens
  misc_RNA (1)...(19): siRNA sense strand
cauguacguggacuuauau

SEQ ID NO: 91642 - RNA, 19 nt, Homo sapiens
  misc_RNA (1)...(19): siRNA sense strand
aauaaaagcuccauuucag

SEQ ID NO: 91643 - RNA, 19 nt, Homo sapiens
  misc_RNA (1)...(19): siRNA sense strand
aauaaaugguuuggcuuuc

SEQ ID NO: 91644 - RNA, 19 nt, Homo sapiens
  misc_RNA (1)...(19): siRNA sense strand
ucaggaaccgaacaggaaa

SEQ ID NO: 91645 - RNA, 19 nt, Homo sapiens
  misc_RNA (1)...(19): siRNA sense strand
gauggccacuguguuaaaa

SEQ ID NO: 91646 - RNA, 19 nt, Homo sapiens
  misc_RNA (1)...(19): siRNA sense strand
cagaaagcacguccuugug

SEQ ID NO: 91647 - RNA, 19 nt, Homo sapiens
  misc_RNA (1)...(19): siRNA sense strand
agaccaguguggaucuuca

SEQ ID NO: 91648 - RNA, 19 nt, Homo sapiens
  misc_RNA (1)...(19): siRNA sense strand
cucauggauugguguguuu

SEQ ID NO: 91649 - RNA, 19 nt, Homo sapiens
  misc_RNA (1)...(19): siRNA sense strand
cgaauacaagaacgcagaa

SEQ ID NO: 91650 - RNA, 19 nt, Homo sapiens
  misc_RNA (1)...(19): siRNA sense strand
cauuugcauuguccugaug

SEQ ID NO: 91651 - RNA, 19 nt, Homo sapiens
  misc_RNA (1)...(19): siRNA sense strand
caauaaaagcuccauuuca

SEQ ID NO: 91652 - RNA, 19 nt, Homo sapiens
  misc_RNA (1)...(19): siRNA sense strand
acguaacugugcaaugcua

SEQ ID NO: 91653 - RNA, 19 nt, Homo sapiens
  misc_RNA (1)...(19): siRNA sense strand
ggcaauaaaagcuccauuu

SEQ ID NO: 91654 - RNA, 19 nt, Homo sapiens
  misc_RNA (1)...(19): siRNA sense strand
gcucacugccgagguccua

SEQ ID NO: 91655 - RNA, 19 nt, Homo sapiens
  misc_RNA (1)...(19): siRNA sense strand
ucuagucugcuuucuauag

SEQ ID NO: 91656 - RNA, 19 nt, Homo sapiens
  misc_RNA (1)...(19): siRNA sense strand
ggaguggauuacauauucc

SEQ ID NO: 91657 - RNA, 19 nt, Homo sapiens
  misc_RNA (1)...(19): siRNA sense strand
ugauggccacuguguuaaa

SEQ ID NO: 91658 - RNA, 19 nt, Homo sapiens
  misc_RNA (1)...(19): siRNA sense strand
cugccgagguccuaggaau

SEQ ID NO: 91659 - RNA, 19 nt, Homo sapiens
  misc_RNA (1)...(19): siRNA sense strand
ggcuuucaaacaugagaua

SEQ ID NO: 91660 - RNA, 19 nt, Homo sapiens
  misc_RNA (1)...(19): siRNA sense strand
ggaaccgaacaggaaauau

SEQ ID NO: 91661 - RNA, 19 nt, Homo sapiens
  misc_RNA (1)...(19): siRNA sense strand
ucauuugcauuguccugau

SEQ ID NO: 91662 - RNA, 19 nt, Homo sapiens
  misc_RNA (1)...(19): siRNA sense strand
gccgagguccuaggaauca

SEQ ID NO: 91663 - RNA, 19 nt, Homo sapiens
  misc_RNA (1)...(19): siRNA sense strand
gaacguaacugugcaaugc

SEQ ID NO: 91664 - RNA, 19 nt, Homo sapiens
  misc_RNA (1)...(19): siRNA sense strand
gaaccgaacaggaaauauu

SEQ ID NO: 91665 - RNA, 19 nt, Homo sapiens
  misc_RNA (1)...(19): siRNA sense strand
ggauugguguguuucguaa

SEQ ID NO: 91666 - RNA, 19 nt, Homo sapiens
  misc_RNA (1)...(19): siRNA sense strand
gcagaaagcacguccuugu

SEQ ID NO: 91667 - RNA, 19 nt, Homo sapiens
  misc_RNA (1)...(19): siRNA sense strand
acauguacguggacuuaua

SEQ ID NO: 91668 - RNA, 19 nt, Homo sapiens
  misc_RNA (1)...(19): siRNA sense strand
gaacucuucuagucugcuu

SEQ ID NO: 91669 - RNA, 19 nt, Homo sapiens
  misc_RNA (1)...(19): siRNA sense strand
caauaaaugguuuggcuuu

SEQ ID NO: 91670 - RNA, 19 nt, Homo sapiens
  misc_RNA (1)...(19): siRNA sense strand
ccugauggccacuguguua

SEQ ID NO: 91671 - RNA, 19 nt, Homo sapiens
  misc_RNA (1)...(19): siRNA sense strand
uaaaugguuuggcuuucaa

SEQ ID NO: 91672 - RNA, 19 nt, Homo sapiens
  misc_RNA (1)...(19): siRNA sense strand
gauuacauauuccaacagu

SEQ ID NO: 91673 - RNA, 19 nt, Homo sapiens
  misc_RNA (1)...(19): siRNA sense strand
ccaaguagaauuaaaccuu

SEQ ID NO: 91674 - RNA, 19 nt, Homo sapiens
  misc_RNA (1)...(19): siRNA sense strand
cuucuagucugcuuucuau

SEQ ID NO: 91675 - RNA, 19 nt, Homo sapiens
  misc_RNA (1)...(19): siRNA sense strand
cuacauguacguggacuua

SEQ ID NO: 91676 - RNA, 19 nt, Homo sapiens
  misc_RNA (1)...(19): siRNA sense strand
aggaguggauuacauauuc

SEQ ID NO: 91677 - RNA, 19 nt, Homo sapiens
  misc_RNA (1)...(19): siRNA sense strand
uaacagcagucaucaucca

SEQ ID NO: 91678 - RNA, 19 nt, Homo sapiens
  misc_RNA (1)...(19): siRNA sense strand
caaagccgcagcaaaggaa

SEQ ID NO: 91679 - RNA, 19 nt, Homo sapiens
  misc_RNA (1)...(19): siRNA sense strand
ggaaaccuaaaggcaauaa

SEQ ID NO: 91680 - RNA, 19 nt, Homo sapiens
  misc_RNA (1)...(19): siRNA sense strand
cuaggaaucauuugcauug

SEQ ID NO: 91681 - RNA, 19 nt, Homo sapiens
  misc_RNA (1)...(19): siRNA sense strand
gcacguccuuguggccauu

SEQ ID NO: 91682 - RNA, 19 nt, Homo sapiens
  misc_RNA (1)...(19): siRNA sense strand
agucugcuuucuauagaua

SEQ ID NO: 91683 - RNA, 19 nt, Homo sapiens
  misc_RNA (1)...(19): siRNA sense strand
gaggaguggauuacauauu

SEQ ID NO: 91684 - RNA, 19 nt, Homo sapiens
  misc_RNA (1)...(19): siRNA sense strand
cuagucugcuuucuauaga

SEQ ID NO: 91685 - RNA, 19 nt, Homo sapiens
  misc_RNA (1)...(19): siRNA sense strand
ucaaaaugcuucucugaau

SEQ ID NO: 91686 - RNA, 19 nt, Homo sapiens
  misc_RNA (1)...(19): siRNA sense strand
aaggaaaccuaaaggcaau

SEQ ID NO: 91687 - RNA, 19 nt, Homo sapiens
  misc_RNA (1)...(19): siRNA sense strand
auauaugacugccaagguu

SEQ ID NO: 91688 - RNA, 19 nt, Homo sapiens
  misc_RNA (1)...(19): siRNA sense strand
uacguggacuuauaucaga

SEQ ID NO: 91689 - RNA, 19 nt, Homo sapiens
  misc_RNA (1)...(19): siRNA sense strand
aaacaaagaggaaccuucu

SEQ ID NO: 91690 - RNA, 19 nt, Homo sapiens
  misc_RNA (1)...(19): siRNA sense strand
cagaucaugcugaacguaa

SEQ ID NO: 91691 - RNA, 19 nt, Homo sapiens
  misc_RNA (1)...(19): siRNA sense strand
gggugacaauaaaugguuu

SEQ ID NO: 91692 - RNA, 19 nt, Homo sapiens
  misc_RNA (1)...(19): siRNA sense strand
gcaggccugugcuucaaag

SEQ ID NO: 91693 - RNA, 19 nt, Homo sapiens
  misc_RNA (1)...(19): siRNA sense strand
uuaccuuccucauggauug

SEQ ID NO: 91694 - RNA, 19 nt, Homo sapiens
  misc_RNA (1)...(19): siRNA sense strand
aaagaggaaccuucucaga

SEQ ID NO: 91695 - RNA, 19 nt, Homo sapiens
  misc_RNA (1)...(19): siRNA sense strand
cagcaaaggaaaccuaaag

SEQ ID NO: 91696 - RNA, 19 nt, Homo sapiens
  misc_RNA (1)...(19): siRNA sense strand
gaaaccuaaaggcaauaaa

SEQ ID NO: 91697 - RNA, 19 nt, Homo sapiens
  misc_RNA (1)...(19): siRNA sense strand
acaaagaggaaccuucuca

SEQ ID NO: 91698 - RNA, 19 nt, Homo sapiens
  misc_RNA (1)...(19): siRNA sense strand
caucauccaugggugacaa

SEQ ID NO: 91699 - RNA, 19 nt, Homo sapiens
  misc_RNA (1)...(19): siRNA sense strand
ccucauggauugguguguu

SEQ ID NO: 91700 - RNA, 19 nt, Homo sapiens
  misc_RNA (1)...(19): siRNA sense strand
auccaugggugacaauaaa

SEQ ID NO: 91701 - RNA, 19 nt, Homo sapiens
  misc_RNA (1)...(19): siRNA sense strand
auaaaugguuuggcuuuca

SEQ ID NO: 91702 - RNA, 19 nt, Homo sapiens
  misc_RNA (1)...(19): siRNA sense strand
caaaaugcuucucugaauc

SEQ ID NO: 91703 - RNA, 19 nt, Homo sapiens
  misc_RNA (1)...(19): siRNA sense strand
gagguccuaggaaucauuu

SEQ ID NO: 91704 - RNA, 19 nt, Homo sapiens
  misc_RNA (1)...(19): siRNA sense strand
ggccugugcuucaaagaac

SEQ ID NO: 91705 - RNA, 19 nt, Homo sapiens
  misc_RNA (1)...(19): siRNA sense strand
cguaacagcagucaucauc

SEQ ID NO: 91706 - RNA, 19 nt, Homo sapiens
  misc_RNA (1)...(19): siRNA sense strand
ccaaagccgcagcaaagga

SEQ ID NO: 91707 - RNA, 19 nt, Homo sapiens
  misc_RNA (1)...(19): siRNA sense strand
gauaaaagacucagaucau

SEQ ID NO: 91708 - RNA, 19 nt, Homo sapiens
  misc_RNA (1)...(19): siRNA sense strand
cugaggaguggauuacaua

SEQ ID NO: 91709 - RNA, 19 nt, Homo sapiens
  misc_RNA (1)...(19): siRNA sense strand
gaauacaagaacgcagaaa

SEQ ID NO: 91710 - RNA, 19 nt, Homo sapiens
  misc_RNA (1)...(19): siRNA sense strand
augcuucucugaaucauca

SEQ ID NO: 91711 - RNA, 19 nt, Homo sapiens
  misc_RNA (1)...(19): siRNA sense strand
gcaauaaaagcuccauuuc

SEQ ID NO: 91712 - RNA, 19 nt, Homo sapiens
  misc_RNA (1)...(19): siRNA sense strand
guacguggacuuauaucag

SEQ ID NO: 91713 - RNA, 19 nt, Homo sapiens
  misc_RNA (1)...(19): siRNA sense strand
cauccaugggugacaauaa

SEQ ID NO: 91714 - RNA, 19 nt, Homo sapiens
  misc_RNA (1)...(19): siRNA sense strand
gcagcaaaggaaaccuaaa

SEQ ID NO: 91715 - RNA, 19 nt, Homo sapiens
  misc_RNA (1)...(19): siRNA sense strand
ccugaggaguggauuacau

SEQ ID NO: 91716 - RNA, 19 nt, Homo sapiens
  misc_RNA (1)...(19): siRNA sense strand
gacccaaagccgcagcaaa

SEQ ID NO: 91717 - RNA, 19 nt, Homo sapiens
  misc_RNA (1)...(19): siRNA sense strand
uauaugacugccaagguuu

SEQ ID NO: 91718 - RNA, 19 nt, Homo sapiens
  misc_RNA (1)...(19): siRNA sense strand
cauguacguggacuuauau

SEQ ID NO: 91719 - RNA, 19 nt, Homo sapiens
  misc_RNA (1)...(19): siRNA sense strand
aauaaaagcuccauuucag

SEQ ID NO: 91720 - RNA, 19 nt, Homo sapiens
  misc_RNA (1)...(19): siRNA sense strand
aauaaaugguuuggcuuuc

SEQ ID NO: 91721 - RNA, 19 nt, Homo sapiens
  misc_RNA (1)...(19): siRNA sense strand
ucaggaaccgaacaggaaa

SEQ ID NO: 91722 - RNA, 19 nt, Homo sapiens
  misc_RNA (1)...(19): siRNA sense strand
gauggccacuguguuaaaa

SEQ ID NO: 91723 - RNA, 19 nt, Homo sapiens
  misc_RNA (1)...(19): siRNA sense strand
cagaaagcacguccuugug

SEQ ID NO: 91724 - RNA, 19 nt, Homo sapiens
  misc_RNA (1)...(19): siRNA sense strand
agaccaguguggaucuuca

SEQ ID NO: 91725 - RNA, 19 nt, Homo sapiens
  misc_RNA (1)...(19): siRNA sense strand
cucauggauugguguguuu

SEQ ID NO: 91726 - RNA, 19 nt, Homo sapiens
  misc_RNA (1)...(19): siRNA sense strand
cgaauacaagaacgcagaa

SEQ ID NO: 91727 - RNA, 19 nt, Homo sapiens
  misc_RNA (1)...(19): siRNA sense strand
cauuugcauuguccugaug

SEQ ID NO: 91728 - RNA, 19 nt, Homo sapiens
  misc_RNA (1)...(19): siRNA sense strand
caauaaaagcuccauuuca

SEQ ID NO: 91729 - RNA, 19 nt, Homo sapiens
  misc_RNA (1)...(19): siRNA sense strand
acguaacugugcaaugcua

SEQ ID NO: 91730 - RNA, 19 nt, Homo sapiens
  misc_RNA (1)...(19): siRNA sense strand
ggcaauaaaagcuccauuu

SEQ ID NO: 91731 - RNA, 19 nt, Homo sapiens
  misc_RNA (1)...(19): siRNA sense strand
gcucacugccgagguccua

SEQ ID NO: 91732 - RNA, 19 nt, Homo sapiens
  misc_RNA (1)...(19): siRNA sense strand
ucuagucugcuuucuauag

SEQ ID NO: 91733 - RNA, 19 nt, Homo sapiens
  misc_RNA (1)...(19): siRNA sense strand
ggaguggauuacauauucc

SEQ ID NO: 91734 - RNA, 19 nt, Homo sapiens
  misc_RNA (1)...(19): siRNA sense strand
ugauggccacuguguuaaa

SEQ ID NO: 91735 - RNA, 19 nt, Homo sapiens
  misc_RNA (1)...(19): siRNA sense strand
cugccgagguccuaggaau

SEQ ID NO: 91736 - RNA, 19 nt, Homo sapiens
  misc_RNA (1)...(19): siRNA sense strand
ggcuuucaaacaugagaua

SEQ ID NO: 91737 - RNA, 19 nt, Homo sapiens
  misc_RNA (1)...(19): siRNA sense strand
ggaaccgaacaggaaauau

SEQ ID NO: 91738 - RNA, 19 nt, Homo sapiens
  misc_RNA (1)...(19): siRNA sense strand
ucauuugcauuguccugau

SEQ ID NO: 91739 - RNA, 19 nt, Homo sapiens
  misc_RNA (1)...(19): siRNA sense strand
gccgagguccuaggaauca

SEQ ID NO: 91740 - RNA, 19 nt, Homo sapiens
  misc_RNA (1)...(19): siRNA sense strand
caacauagaacuccagaaa

SEQ ID NO: 91741 - RNA, 19 nt, Homo sapiens
  misc_RNA (1)...(19): siRNA sense strand
gagcuccagucaacaauuu

SEQ ID NO: 91742 - RNA, 19 nt, Homo sapiens
  misc_RNA (1)...(19): siRNA sense strand
guaagcaacagcucauuua

SEQ ID NO: 91743 - RNA, 19 nt, Homo sapiens
  misc_RNA (1)...(19): siRNA sense strand
gcucugcacucucccagua

SEQ ID NO: 91744 - RNA, 19 nt, Homo sapiens
  misc_RNA (1)...(19): siRNA sense strand
gaugaauccugugaagaua

SEQ ID NO: 91745 - RNA, 19 nt, Homo sapiens
  misc_RNA (1)...(19): siRNA sense strand
acauagaacuccagaaaga

SEQ ID NO: 91746 - RNA, 19 nt, Homo sapiens
  misc_RNA (1)...(19): siRNA sense strand
aaacacagaugaacuggau

SEQ ID NO: 91747 - RNA, 19 nt, Homo sapiens
  misc_RNA (1)...(19): siRNA sense strand
gugcaacuguuacuucauu

SEQ ID NO: 91748 - RNA, 19 nt, Homo sapiens
  misc_RNA (1)...(19): siRNA sense strand
gaaaugcuuuagaugaauc

SEQ ID NO: 91749 - RNA, 19 nt, Homo sapiens
  misc_RNA (1)...(19): siRNA sense strand
ggaaaugcuuuagaugaau

SEQ ID NO: 91750 - RNA, 19 nt, Homo sapiens
  misc_RNA (1)...(19): siRNA sense strand
gagaauggcucugcacucu

SEQ ID NO: 91751 - RNA, 19 nt, Homo sapiens
  misc_RNA (1)...(19): siRNA sense strand
uggaaaugcuuuagaugaa

SEQ ID NO: 91752 - RNA, 19 nt, Homo sapiens
  misc_RNA (1)...(19): siRNA sense strand
ugaauccugugaagauaaa

SEQ ID NO: 91753 - RNA, 19 nt, Homo sapiens
  misc_RNA (1)...(19): siRNA sense strand
gaacgaaagucggcaucuc

SEQ ID NO: 91754 - RNA, 19 nt, Homo sapiens
  misc_RNA (1)...(19): siRNA sense strand
agaacugcauagcguauaa

SEQ ID NO: 91755 - RNA, 19 nt, Homo sapiens
  misc_RNA (1)...(19): siRNA sense strand
cagaugaacuggauuuuau

SEQ ID NO: 91756 - RNA, 19 nt, Homo sapiens
  misc_RNA (1)...(19): siRNA sense strand
ggauuggacucucuuacag

SEQ ID NO: 91757 - RNA, 19 nt, Homo sapiens
  misc_RNA (1)...(19): siRNA sense strand
caaauggaaaugcuuuaga

SEQ ID NO: 91758 - RNA, 19 nt, Homo sapiens
  misc_RNA (1)...(19): siRNA sense strand
uaagcaacagcucauuuaa

SEQ ID NO: 91759 - RNA, 19 nt, Homo sapiens
  misc_RNA (1)...(19): siRNA sense strand
acacagaugaacuggauuu

SEQ ID NO: 91760 - RNA, 19 nt, Homo sapiens
  misc_RNA (1)...(19): siRNA sense strand
gcauagcguauaauccaaa

SEQ ID NO: 91761 - RNA, 19 nt, Homo sapiens
  misc_RNA (1)...(19): siRNA sense strand
gaguauugagccagcauuu

SEQ ID NO: 91762 - RNA, 19 nt, Homo sapiens
  misc_RNA (1)...(19): siRNA sense strand
uuuaugagcuccagucaac

SEQ ID NO: 91763 - RNA, 19 nt, Homo sapiens
  misc_RNA (1)...(19): siRNA sense strand
guauugagccagcauuuac

SEQ ID NO: 91764 - RNA, 19 nt, Homo sapiens
  misc_RNA (1)...(19): siRNA sense strand
guuacuucauuuccaguga

SEQ ID NO: 91765 - RNA, 19 nt, Homo sapiens
  misc_RNA (1)...(19): siRNA sense strand
uuagaugaauccugugaag

SEQ ID NO: 91766 - RNA, 19 nt, Homo sapiens
  misc_RNA (1)...(19): siRNA sense strand
gcacucucccaguaucuau

SEQ ID NO: 91767 - RNA, 19 nt, Homo sapiens
  misc_RNA (1)...(19): siRNA sense strand
gagcacaccgccugguugu

SEQ ID NO: 91768 - RNA, 19 nt, Homo sapiens
  misc_RNA (1)...(19): siRNA sense strand
ucagaaauccagccugcuu

SEQ ID NO: 91769 - RNA, 19 nt, Homo sapiens
  misc_RNA (1)...(19): siRNA sense strand
cagaaaacuuggaacgaaa

SEQ ID NO: 91770 - RNA, 19 nt, Homo sapiens
  misc_RNA (1)...(19): siRNA sense strand
cauagcguauaauccaaau

SEQ ID NO: 91771 - RNA, 19 nt, Homo sapiens
  misc_RNA (1)...(19): siRNA sense strand
gcaacuguuacuucauuuc

SEQ ID NO: 91772 - RNA, 19 nt, Homo sapiens
  misc_RNA (1)...(19): siRNA sense strand
uguaagcaacagcucauuu

SEQ ID NO: 91773 - RNA, 19 nt, Homo sapiens
  misc_RNA (1)...(19): siRNA sense strand
ggguaccggugcaacuguu

SEQ ID NO: 91774 - RNA, 19 nt, Homo sapiens
  misc_RNA (1)...(19): siRNA sense strand
agaugaauccugugaagau

SEQ ID NO: 91775 - RNA, 19 nt, Homo sapiens
  misc_RNA (1)...(19): siRNA sense strand
gaacugcauagcguauaau

SEQ ID NO: 91776 - RNA, 19 nt, Homo sapiens
  misc_RNA (1)...(19): siRNA sense strand
acagaaaacuuggaacgaa

SEQ ID NO: 91777 - RNA, 19 nt, Homo sapiens
  misc_RNA (1)...(19): siRNA sense strand
gguaccggugcaacuguua

SEQ ID NO: 91778 - RNA, 19 nt, Homo sapiens
  misc_RNA (1)...(19): siRNA sense strand
caguaucuauuuccaucau

SEQ ID NO: 91779 - RNA, 19 nt, Homo sapiens
  misc_RNA (1)...(19): siRNA sense strand
gacucugacugcuguucuu

SEQ ID NO: 91780 - RNA, 19 nt, Homo sapiens
  misc_RNA (1)...(19): siRNA sense strand
aaagaacugcauagcguau

SEQ ID NO: 91781 - RNA, 19 nt, Homo sapiens
  misc_RNA (1)...(19): siRNA sense strand
uaugagcuccagucaacaa

SEQ ID NO: 91782 - RNA, 19 nt, Homo sapiens
  misc_RNA (1)...(19): siRNA sense strand
uagcguauaauccaaaugg

SEQ ID NO: 91783 - RNA, 19 nt, Homo sapiens
  misc_RNA (1)...(19): siRNA sense strand
cggugcaacuguuacuuca

SEQ ID NO: 91784 - RNA, 19 nt, Homo sapiens
  misc_RNA (1)...(19): siRNA sense strand
ccaaauggaaaugcuuuag

SEQ ID NO: 91785 - RNA, 19 nt, Homo sapiens
  misc_RNA (1)...(19): siRNA sense strand
ccagccugcuucagcuuca

SEQ ID NO: 91786 - RNA, 19 nt, Homo sapiens
  misc_RNA (1)...(19): siRNA sense strand
auggaaaugcuuuagauga

SEQ ID NO: 91787 - RNA, 19 nt, Homo sapiens
  misc_RNA (1)...(19): siRNA sense strand
ccagugaacagaaaacuug

SEQ ID NO: 91788 - RNA, 19 nt, Homo sapiens
  misc_RNA (1)...(19): siRNA sense strand
aguauugagccagcauuua

SEQ ID NO: 91789 - RNA, 19 nt, Homo sapiens
  misc_RNA (1)...(19): siRNA sense strand
uuacuggauuggacucucu

SEQ ID NO: 91790 - RNA, 19 nt, Homo sapiens
  misc_RNA (1)...(19): siRNA sense strand
uccaggacccaacauagaa

SEQ ID NO: 91791 - RNA, 19 nt, Homo sapiens
  misc_RNA (1)...(19): siRNA sense strand
caacauagaacuccagaaa

SEQ ID NO: 91792 - RNA, 19 nt, Homo sapiens
  misc_RNA (1)...(19): siRNA sense strand
gagcuccagucaacaauuu

SEQ ID NO: 91793 - RNA, 19 nt, Homo sapiens
  misc_RNA (1)...(19): siRNA sense strand
guaagcaacagcucauuua

SEQ ID NO: 91794 - RNA, 19 nt, Homo sapiens
  misc_RNA (1)...(19): siRNA sense strand
gcucugcacucucccagua

SEQ ID NO: 91795 - RNA, 19 nt, Homo sapiens
  misc_RNA (1)...(19): siRNA sense strand
gaugaauccugugaagaua

SEQ ID NO: 91796 - RNA, 19 nt, Homo sapiens
  misc_RNA (1)...(19): siRNA sense strand
acauagaacuccagaaaga

SEQ ID NO: 91797 - RNA, 19 nt, Homo sapiens
  misc_RNA (1)...(19): siRNA sense strand
aaacacagaugaacuggau

SEQ ID NO: 91798 - RNA, 19 nt, Homo sapiens
  misc_RNA (1)...(19): siRNA sense strand
gugcaacuguuacuucauu

SEQ ID NO: 91799 - RNA, 19 nt, Homo sapiens
  misc_RNA (1)...(19): siRNA sense strand
gaaaugcuuuagaugaauc

SEQ ID NO: 91800 - RNA, 19 nt, Homo sapiens
  misc_RNA (1)...(19): siRNA sense strand
ggaaaugcuuuagaugaau

SEQ ID NO: 91801 - RNA, 19 nt, Homo sapiens
  misc_RNA (1)...(19): siRNA sense strand
gagaauggcucugcacucu

SEQ ID NO: 91802 - RNA, 19 nt, Homo sapiens
  misc_RNA (1)...(19): siRNA sense strand
uggaaaugcuuuagaugaa

SEQ ID NO: 91803 - RNA, 19 nt, Homo sapiens
  misc_RNA (1)...(19): siRNA sense strand
ugaauccugugaagauaaa

SEQ ID NO: 91804 - RNA, 19 nt, Homo sapiens
  misc_RNA (1)...(19): siRNA sense strand
gaacgaaagucggcaucuc

SEQ ID NO: 91805 - RNA, 19 nt, Homo sapiens
  misc_RNA (1)...(19): siRNA sense strand
agaacugcauagcguauaa

SEQ ID NO: 91806 - RNA, 19 nt, Homo sapiens
  misc_RNA (1)...(19): siRNA sense strand
cagaugaacuggauuuuau

SEQ ID NO: 91807 - RNA, 19 nt, Homo sapiens
  misc_RNA (1)...(19): siRNA sense strand
ggauuggacucucuuacag

SEQ ID NO: 91808 - RNA, 19 nt, Homo sapiens
  misc_RNA (1)...(19): siRNA sense strand
caaauggaaaugcuuuaga

SEQ ID NO: 91809 - RNA, 19 nt, Homo sapiens
  misc_RNA (1)...(19): siRNA sense strand
uaagcaacagcucauuuaa

SEQ ID NO: 91810 - RNA, 19 nt, Homo sapiens
  misc_RNA (1)...(19): siRNA sense strand
acacagaugaacuggauuu

SEQ ID NO: 91811 - RNA, 19 nt, Homo sapiens
  misc_RNA (1)...(19): siRNA sense strand
gcauagcguauaauccaaa

SEQ ID NO: 91812 - RNA, 19 nt, Homo sapiens
  misc_RNA (1)...(19): siRNA sense strand
gaguauugagccagcauuu

SEQ ID NO: 91813 - RNA, 19 nt, Homo sapiens
  misc_RNA (1)...(19): siRNA sense strand
uuuaugagcuccagucaac

SEQ ID NO: 91814 - RNA, 19 nt, Homo sapiens
  misc_RNA (1)...(19): siRNA sense strand
guauugagccagcauuuac

SEQ ID NO: 91815 - RNA, 19 nt, Homo sapiens
  misc_RNA (1)...(19): siRNA sense strand
guuacuucauuuccaguga

SEQ ID NO: 91816 - RNA, 19 nt, Homo sapiens
  misc_RNA (1)...(19): siRNA sense strand
uuagaugaauccugugaag

SEQ ID NO: 91817 - RNA, 19 nt, Homo sapiens
  misc_RNA (1)...(19): siRNA sense strand
gcacucucccaguaucuau

SEQ ID NO: 91818 - RNA, 19 nt, Homo sapiens
  misc_RNA (1)...(19): siRNA sense strand
gagcacaccgccugguugu

SEQ ID NO: 91819 - RNA, 19 nt, Homo sapiens
  misc_RNA (1)...(19): siRNA sense strand
ucagaaauccagccugcuu

SEQ ID NO: 91820 - RNA, 19 nt, Homo sapiens
  misc_RNA (1)...(19): siRNA sense strand
cagaaaacuuggaacgaaa

SEQ ID NO: 91821 - RNA, 19 nt, Homo sapiens
  misc_RNA (1)...(19): siRNA sense strand
cauagcguauaauccaaau

SEQ ID NO: 91822 - RNA, 19 nt, Homo sapiens
  misc_RNA (1)...(19): siRNA sense strand
gcaacuguuacuucauuuc

SEQ ID NO: 91823 - RNA, 19 nt, Homo sapiens
  misc_RNA (1)...(19): siRNA sense strand
uguaagcaacagcucauuu

SEQ ID NO: 91824 - RNA, 19 nt, Homo sapiens
  misc_RNA (1)...(19): siRNA sense strand
ggguaccggugcaacuguu

SEQ ID NO: 91825 - RNA, 19 nt, Homo sapiens
  misc_RNA (1)...(19): siRNA sense strand
agaugaauccugugaagau

SEQ ID NO: 91826 - RNA, 19 nt, Homo sapiens
  misc_RNA (1)...(19): siRNA sense strand
gaacugcauagcguauaau

SEQ ID NO: 91827 - RNA, 19 nt, Homo sapiens
  misc_RNA (1)...(19): siRNA sense strand
acagaaaacuuggaacgaa

SEQ ID NO: 91828 - RNA, 19 nt, Homo sapiens
  misc_RNA (1)...(19): siRNA sense strand
gguaccggugcaacuguua

SEQ ID NO: 91829 - RNA, 19 nt, Homo sapiens
  misc_RNA (1)...(19): siRNA sense strand
caguaucuauuuccaucau

SEQ ID NO: 91830 - RNA, 19 nt, Homo sapiens
  misc_RNA (1)...(19): siRNA sense strand
gacucugacugcuguucuu

SEQ ID NO: 91831 - RNA, 19 nt, Homo sapiens
  misc_RNA (1)...(19): siRNA sense strand
aaagaacugcauagcguau

SEQ ID NO: 91832 - RNA, 19 nt, Homo sapiens
  misc_RNA (1)...(19): siRNA sense strand
uaugagcuccagucaacaa

SEQ ID NO: 91833 - RNA, 19 nt, Homo sapiens
  misc_RNA (1)...(19): siRNA sense strand
uagcguauaauccaaaugg

SEQ ID NO: 91834 - RNA, 19 nt, Homo sapiens
  misc_RNA (1)...(19): siRNA sense strand
cggugcaacuguuacuuca

SEQ ID NO: 91835 - RNA, 19 nt, Homo sapiens
  misc_RNA (1)...(19): siRNA sense strand
ccaaauggaaaugcuuuag

SEQ ID NO: 91836 - RNA, 19 nt, Homo sapiens
  misc_RNA (1)...(19): siRNA sense strand
ccagccugcuucagcuuca

SEQ ID NO: 91837 - RNA, 19 nt, Homo sapiens
  misc_RNA (1)...(19): siRNA sense strand
auggaaaugcuuuagauga

SEQ ID NO: 91838 - RNA, 19 nt, Homo sapiens
  misc_RNA (1)...(19): siRNA sense strand
ccagugaacagaaaacuug

SEQ ID NO: 91839 - RNA, 19 nt, Homo sapiens
  misc_RNA (1)...(19): siRNA sense strand
aguauugagccagcauuua

SEQ ID NO: 91840 - RNA, 19 nt, Homo sapiens
  misc_RNA (1)...(19): siRNA sense strand
uuacuggauuggacucucu

SEQ ID NO: 91841 - RNA, 19 nt, Homo sapiens
  misc_RNA (1)...(19): siRNA sense strand
uccaggacccaacauagaa

SEQ ID NO: 91842 - RNA, 19 nt, Homo sapiens
  misc_RNA (1)...(19): siRNA sense strand
ggaaacagauggaguccuu

SEQ ID NO: 91843 - RNA, 19 nt, Homo sapiens
  misc_RNA (1)...(19): siRNA sense strand
ggacaucuaugcagguuca

SEQ ID NO: 91844 - RNA, 19 nt, Homo sapiens
  misc_RNA (1)...(19): siRNA sense strand
caagcucacucgccuauug

SEQ ID NO: 91845 - RNA, 19 nt, Homo sapiens
  misc_RNA (1)...(19): siRNA sense strand
gcuggucgcugucggcuaa

SEQ ID NO: 91846 - RNA, 19 nt, Homo sapiens
  misc_RNA (1)...(19): siRNA sense strand
agaaggaccuagagauuga

SEQ ID NO: 91847 - RNA, 19 nt, Homo sapiens
  misc_RNA (1)...(19): siRNA sense strand
gaacagcgggagcaaguga

SEQ ID NO: 91848 - RNA, 19 nt, Homo sapiens
  misc_RNA (1)...(19): siRNA sense strand
ggaaaacucuaccugauug

SEQ ID NO: 91849 - RNA, 19 nt, Homo sapiens
  misc_RNA (1)...(19): siRNA sense strand
ccaaggaggugaucaaucg

SEQ ID NO: 91850 - RNA, 19 nt, Homo sapiens
  misc_RNA (1)...(19): siRNA sense strand
gaauaaaggccggaagaga

SEQ ID NO: 91851 - RNA, 19 nt, Homo sapiens
  misc_RNA (1)...(19): siRNA sense strand
guacucagcaggacaucua

SEQ ID NO: 91852 - RNA, 19 nt, Homo sapiens
  misc_RNA (1)...(19): siRNA sense strand
gagcggauggugcuaauga

SEQ ID NO: 91853 - RNA, 19 nt, Homo sapiens
  misc_RNA (1)...(19): siRNA sense strand
gagaaggaccuagagauug

SEQ ID NO: 91854 - RNA, 19 nt, Homo sapiens
  misc_RNA (1)...(19): siRNA sense strand
gaagagaaggaccuagaga

SEQ ID NO: 91855 - RNA, 19 nt, Homo sapiens
  misc_RNA (1)...(19): siRNA sense strand
ccaguuugaugccuucuau

SEQ ID NO: 91856 - RNA, 19 nt, Homo sapiens
  misc_RNA (1)...(19): siRNA sense strand
uaagcugucucagaaagaa

SEQ ID NO: 91857 - RNA, 19 nt, Homo sapiens
  misc_RNA (1)...(19): siRNA sense strand
ccagugugcuugccuaugg

SEQ ID NO: 91858 - RNA, 19 nt, Homo sapiens
  misc_RNA (1)...(19): siRNA sense strand
gagagcggauggugcuaau

SEQ ID NO: 91859 - RNA, 19 nt, Homo sapiens
  misc_RNA (1)...(19): siRNA sense strand
aauaaaggccggaagagaa

SEQ ID NO: 91860 - RNA, 19 nt, Homo sapiens
  misc_RNA (1)...(19): siRNA sense strand
gaacuggaggccaagaugu

SEQ ID NO: 91861 - RNA, 19 nt, Homo sapiens
  misc_RNA (1)...(19): siRNA sense strand
ugaagacaguagaagagaa

SEQ ID NO: 91862 - RNA, 19 nt, Homo sapiens
  misc_RNA (1)...(19): siRNA sense strand
caccaugucuuaccuagag

SEQ ID NO: 91863 - RNA, 19 nt, Homo sapiens
  misc_RNA (1)...(19): siRNA sense strand
ugagagacgcuucuaccua

SEQ ID NO: 91864 - RNA, 19 nt, Homo sapiens
  misc_RNA (1)...(19): siRNA sense strand
uugagaggcuuaagacgaa

SEQ ID NO: 91865 - RNA, 19 nt, Homo sapiens
  misc_RNA (1)...(19): siRNA sense strand
gaagacaguagaagagaag

SEQ ID NO: 91866 - RNA, 19 nt, Homo sapiens
  misc_RNA (1)...(19): siRNA sense strand
cuguuaagcugucucagaa

SEQ ID NO: 91867 - RNA, 19 nt, Homo sapiens
  misc_RNA (1)...(19): siRNA sense strand
gagauugagaggcuuaaga

SEQ ID NO: 91868 - RNA, 19 nt, Homo sapiens
  misc_RNA (1)...(19): siRNA sense strand
guuaagcugucucagaaag

SEQ ID NO: 91869 - RNA, 19 nt, Homo sapiens
  misc_RNA (1)...(19): siRNA sense strand
agagaaggaccuagagauu

SEQ ID NO: 91870 - RNA, 19 nt, Homo sapiens
  misc_RNA (1)...(19): siRNA sense strand
cgagaucuccgcagucuuc

SEQ ID NO: 91871 - RNA, 19 nt, Homo sapiens
  misc_RNA (1)...(19): siRNA sense strand
gcagaaugccagugugcuu

SEQ ID NO: 91872 - RNA, 19 nt, Homo sapiens
  misc_RNA (1)...(19): siRNA sense strand
uaaugaagacaguagaaga

SEQ ID NO: 91873 - RNA, 19 nt, Homo sapiens
  misc_RNA (1)...(19): siRNA sense strand
gcuaaugaagacaguagaa

SEQ ID NO: 91874 - RNA, 19 nt, Homo sapiens
  misc_RNA (1)...(19): siRNA sense strand
gcccacaguauccuuauug

SEQ ID NO: 91875 - RNA, 19 nt, Homo sapiens
  misc_RNA (1)...(19): siRNA sense strand
uccacauccugaagaauaa

SEQ ID NO: 91876 - RNA, 19 nt, Homo sapiens
  misc_RNA (1)...(19): siRNA sense strand
uagaagagaaggaccuaga

SEQ ID NO: 91877 - RNA, 19 nt, Homo sapiens
  misc_RNA (1)...(19): siRNA sense strand
gcugggagcuacagaucag

SEQ ID NO: 91878 - RNA, 19 nt, Homo sapiens
  misc_RNA (1)...(19): siRNA sense strand
gagauccacauccugaaga

SEQ ID NO: 91879 - RNA, 19 nt, Homo sapiens
  misc_RNA (1)...(19): siRNA sense strand
ggaagacgcacacaaugcu

SEQ ID NO: 91880 - RNA, 19 nt, Homo sapiens
  misc_RNA (1)...(19): siRNA sense strand
auaaaggccggaagagaaa

SEQ ID NO: 91881 - RNA, 19 nt, Homo sapiens
  misc_RNA (1)...(19): siRNA sense strand
ggauggugcuaaugaagac

SEQ ID NO: 91882 - RNA, 19 nt, Homo sapiens
  misc_RNA (1)...(19): siRNA sense strand
caggacaucuaugcagguu

SEQ ID NO: 91883 - RNA, 19 nt, Homo sapiens
  misc_RNA (1)...(19): siRNA sense strand
cgagauggcggcagcuuca

SEQ ID NO: 91884 - RNA, 19 nt, Homo sapiens
  misc_RNA (1)...(19): siRNA sense strand
gagaguggagccaucaaca

SEQ ID NO: 91885 - RNA, 19 nt, Homo sapiens
  misc_RNA (1)...(19): siRNA sense strand
gacacagucuccgcacuca

SEQ ID NO: 91886 - RNA, 19 nt, Homo sapiens
  misc_RNA (1)...(19): siRNA sense strand
cccagaagcccaucaguag

SEQ ID NO: 91887 - RNA, 19 nt, Homo sapiens
  misc_RNA (1)...(19): siRNA sense strand
cuagagauugagaggcuua

SEQ ID NO: 91888 - RNA, 19 nt, Homo sapiens
  misc_RNA (1)...(19): siRNA sense strand
caacauugccccugagaga

SEQ ID NO: 91889 - RNA, 19 nt, Homo sapiens
  misc_RNA (1)...(19): siRNA sense strand
ucccagaagcccaucagua

SEQ ID NO: 91890 - RNA, 19 nt, Homo sapiens
  misc_RNA (1)...(19): siRNA sense strand
auggacagcugcucucuag

SEQ ID NO: 91891 - RNA, 19 nt, Homo sapiens
  misc_RNA (1)...(19): siRNA sense strand
aagaauaaaggccggaaga

SEQ ID NO: 91892 - RNA, 19 nt, Homo sapiens
  misc_RNA (1)...(19): siRNA sense strand
ucagugcagcccauccuaa

SEQ ID NO: 91893 - RNA, 19 nt, Homo sapiens
  misc_RNA (1)...(19): siRNA sense strand
auccacauccugaagaaua

SEQ ID NO: 91894 - RNA, 19 nt, Homo sapiens
  misc_RNA (1)...(19): siRNA sense strand
ggaaccaccaggagacucu

SEQ ID NO: 91895 - RNA, 19 nt, Homo sapiens
  misc_RNA (1)...(19): siRNA sense strand
gaacgcguggagggcauaa

SEQ ID NO: 91896 - RNA, 19 nt, Homo sapiens
  misc_RNA (1)...(19): siRNA sense strand
uacuggaucugcugaacga

SEQ ID NO: 91897 - RNA, 19 nt, Homo sapiens
  misc_RNA (1)...(19): siRNA sense strand
ggaguacucagcaggacau

SEQ ID NO: 91898 - RNA, 19 nt, Homo sapiens
  misc_RNA (1)...(19): siRNA sense strand
gggaagacgcacacaaugc

SEQ ID NO: 91899 - RNA, 19 nt, Homo sapiens
  misc_RNA (1)...(19): siRNA sense strand
ggaccagcgggaacguuug

SEQ ID NO: 91900 - RNA, 19 nt, Homo sapiens
  misc_RNA (1)...(19): siRNA sense strand
agauccacauccugaagaa

SEQ ID NO: 91901 - RNA, 19 nt, Homo sapiens
  misc_RNA (1)...(19): siRNA sense strand
ccagaaggcugaggaaaag

SEQ ID NO: 91902 - RNA, 19 nt, Homo sapiens
  misc_RNA (1)...(19): siRNA sense strand
cgagagcggauggugcuaa

SEQ ID NO: 91903 - RNA, 19 nt, Homo sapiens
  misc_RNA (1)...(19): siRNA sense strand
gguccaaggaggugaucaa

SEQ ID NO: 91904 - RNA, 19 nt, Homo sapiens
  misc_RNA (1)...(19): siRNA sense strand
cccuagagccugaggagaa

SEQ ID NO: 91905 - RNA, 19 nt, Homo sapiens
  misc_RNA (1)...(19): siRNA sense strand
gcugucggcuaagcaagau

SEQ ID NO: 91906 - RNA, 19 nt, Homo sapiens
  misc_RNA (1)...(19): siRNA sense strand
ccaugggcccuuucuguca

SEQ ID NO: 91907 - RNA, 19 nt, Homo sapiens
  misc_RNA (1)...(19): siRNA sense strand
gaucagcccggagcuacug

SEQ ID NO: 91908 - RNA, 19 nt, Homo sapiens
  misc_RNA (1)...(19): siRNA sense strand
cagcuuggaccgucugcuu

SEQ ID NO: 91909 - RNA, 19 nt, Homo sapiens
  misc_RNA (1)...(19): siRNA sense strand
uauccuuauugccaacauu

SEQ ID NO: 91910 - RNA, 19 nt, Homo sapiens
  misc_RNA (1)...(19): siRNA sense strand
gggaaaacucuaccugauu

SEQ ID NO: 91911 - RNA, 19 nt, Homo sapiens
  misc_RNA (1)...(19): siRNA sense strand
ggaacgcguggagggcaua

SEQ ID NO: 91912 - RNA, 19 nt, Homo sapiens
  misc_RNA (1)...(19): siRNA sense strand
cucuagagauugcuaacug

SEQ ID NO: 91913 - RNA, 19 nt, Homo sapiens
  misc_RNA (1)...(19): siRNA sense strand
ccuguuaagcugucucaga

SEQ ID NO: 91914 - RNA, 19 nt, Homo sapiens
  misc_RNA (1)...(19): siRNA sense strand
ucagcccacaguauccuua

SEQ ID NO: 91915 - RNA, 19 nt, Homo sapiens
  misc_RNA (1)...(19): siRNA sense strand
uacagaagcuaagcagcau

SEQ ID NO: 91916 - RNA, 19 nt, Homo sapiens
  misc_RNA (1)...(19): siRNA sense strand
agucuccgcacucaacuuu

SEQ ID NO: 91917 - RNA, 19 nt, Homo sapiens
  misc_RNA (1)...(19): siRNA sense strand
ggaaaaggagaaccauugu

SEQ ID NO: 91918 - RNA, 19 nt, Homo sapiens
  misc_RNA (1)...(19): siRNA sense strand
gugcgacugcggccauuug

SEQ ID NO: 91919 - RNA, 19 nt, Homo sapiens
  misc_RNA (1)...(19): siRNA sense strand
cggauggugcuaaugaaga

SEQ ID NO: 91920 - RNA, 19 nt, Homo sapiens
  misc_RNA (1)...(19): siRNA sense strand
gcacuggcauuaacccuua

SEQ ID NO: 91921 - RNA, 19 nt, Homo sapiens
  misc_RNA (1)...(19): siRNA sense strand
gaaccuaacccuccuauug

SEQ ID NO: 91922 - RNA, 19 nt, Homo sapiens
  misc_RNA (1)...(19): siRNA sense strand
ggaagaaggacugcaguua

SEQ ID NO: 91923 - RNA, 19 nt, Homo sapiens
  misc_RNA (1)...(19): siRNA sense strand
caacauugcuggagauagu

SEQ ID NO: 91924 - RNA, 19 nt, Homo sapiens
  misc_RNA (1)...(19): siRNA sense strand
gcucagaguuugaagaugu

SEQ ID NO: 91925 - RNA, 19 nt, Homo sapiens
  misc_RNA (1)...(19): siRNA sense strand
gagaagagcaguuauucaa

SEQ ID NO: 91926 - RNA, 19 nt, Homo sapiens
  misc_RNA (1)...(19): siRNA sense strand
gaacggcacuggcauuaac

SEQ ID NO: 91927 - RNA, 19 nt, Homo sapiens
  misc_RNA (1)...(19): siRNA sense strand
ggaagcauguuggacgaua

SEQ ID NO: 91928 - RNA, 19 nt, Homo sapiens
  misc_RNA (1)...(19): siRNA sense strand
gaaaagagaagagcaguua

SEQ ID NO: 91929 - RNA, 19 nt, Homo sapiens
  misc_RNA (1)...(19): siRNA sense strand
gugcagggacuaugucuua

SEQ ID NO: 91930 - RNA, 19 nt, Homo sapiens
  misc_RNA (1)...(19): siRNA sense strand
gaucaaguaccuaguagaa

SEQ ID NO: 91931 - RNA, 19 nt, Homo sapiens
  misc_RNA (1)...(19): siRNA sense strand
ugugauagaugccaacauu

SEQ ID NO: 91932 - RNA, 19 nt, Homo sapiens
  misc_RNA (1)...(19): siRNA sense strand
aagaagaaguuaugucaga

SEQ ID NO: 91933 - RNA, 19 nt, Homo sapiens
  misc_RNA (1)...(19): siRNA sense strand
cuaaauggcuuggaaaaua

SEQ ID NO: 91934 - RNA, 19 nt, Homo sapiens
  misc_RNA (1)...(19): siRNA sense strand
ggucaucgaugcgggagua

SEQ ID NO: 91935 - RNA, 19 nt, Homo sapiens
  misc_RNA (1)...(19): siRNA sense strand
ugacaugauugagaugaua

SEQ ID NO: 91936 - RNA, 19 nt, Homo sapiens
  misc_RNA (1)...(19): siRNA sense strand
ggucauggacucuaagauu

SEQ ID NO: 91937 - RNA, 19 nt, Homo sapiens
  misc_RNA (1)...(19): siRNA sense strand
gaacugcugaugcauaaug

SEQ ID NO: 91938 - RNA, 19 nt, Homo sapiens
  misc_RNA (1)...(19): siRNA sense strand
ugaaugugcuuuccugguu

SEQ ID NO: 91939 - RNA, 19 nt, Homo sapiens
  misc_RNA (1)...(19): siRNA sense strand
ucagauggacccaaugaua

SEQ ID NO: 91940 - RNA, 19 nt, Homo sapiens
  misc_RNA (1)...(19): siRNA sense strand
cagcugaacagaucaagua

SEQ ID NO: 91941 - RNA, 19 nt, Homo sapiens
  misc_RNA (1)...(19): siRNA sense strand
gggaugauauucagacaca

SEQ ID NO: 91942 - RNA, 19 nt, Homo sapiens
  misc_RNA (1)...(19): siRNA sense strand
gcaaagguuucuccauguc

SEQ ID NO: 91943 - RNA, 19 nt, Homo sapiens
  misc_RNA (1)...(19): siRNA sense strand
cagauggacccaaugauaa

SEQ ID NO: 91944 - RNA, 19 nt, Homo sapiens
  misc_RNA (1)...(19): siRNA sense strand
gaagcauguuggacgauau

SEQ ID NO: 91945 - RNA, 19 nt, Homo sapiens
  misc_RNA (1)...(19): siRNA sense strand
ggaaugcaguaugggcuuu

SEQ ID NO: 91946 - RNA, 19 nt, Homo sapiens
  misc_RNA (1)...(19): siRNA sense strand
uggaacugcugaugcauaa

SEQ ID NO: 91947 - RNA, 19 nt, Homo sapiens
  misc_RNA (1)...(19): siRNA sense strand
gucauggacucuaagauug

SEQ ID NO: 91948 - RNA, 19 nt, Homo sapiens
  misc_RNA (1)...(19): siRNA sense strand
gaagaaggacugcaguuac

SEQ ID NO: 91949 - RNA, 19 nt, Homo sapiens
  misc_RNA (1)...(19): siRNA sense strand
cagcuuggguacugacaaa

SEQ ID NO: 91950 - RNA, 19 nt, Homo sapiens
  misc_RNA (1)...(19): siRNA sense strand
agaagaaacagaagaagaa

SEQ ID NO: 91951 - RNA, 19 nt, Homo sapiens
  misc_RNA (1)...(19): siRNA sense strand
ggacugcaguuacgaaagc

SEQ ID NO: 91952 - RNA, 19 nt, Homo sapiens
  misc_RNA (1)...(19): siRNA sense strand
gaugaagacagcagcauug

SEQ ID NO: 91953 - RNA, 19 nt, Homo sapiens
  misc_RNA (1)...(19): siRNA sense strand
ucacggucauggacucuaa

SEQ ID NO: 91954 - RNA, 19 nt, Homo sapiens
  misc_RNA (1)...(19): siRNA sense strand
gaaacagaagaagaaguua

SEQ ID NO: 91955 - RNA, 19 nt, Homo sapiens
  misc_RNA (1)...(19): siRNA sense strand
uaugucagauggaggcuuu

SEQ ID NO: 91956 - RNA, 19 nt, Homo sapiens
  misc_RNA (1)...(19): siRNA sense strand
ccaaaggaaucuaucaaaa

SEQ ID NO: 91957 - RNA, 19 nt, Homo sapiens
  misc_RNA (1)...(19): siRNA sense strand
agacacagguaauucugaa

SEQ ID NO: 91958 - RNA, 19 nt, Homo sapiens
  misc_RNA (1)...(19): siRNA sense strand
caacacagaaauucaggaa

SEQ ID NO: 91959 - RNA, 19 nt, Homo sapiens
  misc_RNA (1)...(19): siRNA sense strand
ucaggaaauucucuucaga

SEQ ID NO: 91960 - RNA, 19 nt, Homo sapiens
  misc_RNA (1)...(19): siRNA sense strand
gcggagaaauguugcuaca

SEQ ID NO: 91961 - RNA, 19 nt, Homo sapiens
  misc_RNA (1)...(19): siRNA sense strand
guaucaagccgcucuguga

SEQ ID NO: 91962 - RNA, 19 nt, Homo sapiens
  misc_RNA (1)...(19): siRNA sense strand
cauguuggacgauaucuaa

SEQ ID NO: 91963 - RNA, 19 nt, Homo sapiens
  misc_RNA (1)...(19): siRNA sense strand
ugaaucagcuuggguacug

SEQ ID NO: 91964 - RNA, 19 nt, Homo sapiens
  misc_RNA (1)...(19): siRNA sense strand
gaagaaguuaugucagaug

SEQ ID NO: 91965 - RNA, 19 nt, Homo sapiens
  misc_RNA (1)...(19): siRNA sense strand
aaagagaagagcaguuauu

SEQ ID NO: 91966 - RNA, 19 nt, Homo sapiens
  misc_RNA (1)...(19): siRNA sense strand
ucaaguaccuaguagaacu

SEQ ID NO: 91967 - RNA, 19 nt, Homo sapiens
  misc_RNA (1)...(19): siRNA sense strand
gauccagacugugauagau

SEQ ID NO: 91968 - RNA, 19 nt, Homo sapiens
  misc_RNA (1)...(19): siRNA sense strand
gauauucagacacagguaa

SEQ ID NO: 91969 - RNA, 19 nt, Homo sapiens
  misc_RNA (1)...(19): siRNA sense strand
guuugaagauguccaggaa

SEQ ID NO: 91970 - RNA, 19 nt, Homo sapiens
  misc_RNA (1)...(19): siRNA sense strand
agaaacagaagaagaaguu

SEQ ID NO: 91971 - RNA, 19 nt, Homo sapiens
  misc_RNA (1)...(19): siRNA sense strand
cuucagacccgaauuguga

SEQ ID NO: 91972 - RNA, 19 nt, Homo sapiens
  misc_RNA (1)...(19): siRNA sense strand
uaguagaacuggguuguau

SEQ ID NO: 91973 - RNA, 19 nt, Homo sapiens
  misc_RNA (1)...(19): siRNA sense strand
gagcaacagcuuucagcaa

SEQ ID NO: 91974 - RNA, 19 nt, Homo sapiens
  misc_RNA (1)...(19): siRNA sense strand
guaggagacuuguggaacu

SEQ ID NO: 91975 - RNA, 19 nt, Homo sapiens
  misc_RNA (1)...(19): siRNA sense strand
gcugggcccucucauaucu

SEQ ID NO: 91976 - RNA, 19 nt, Homo sapiens
  misc_RNA (1)...(19): siRNA sense strand
gcaacagcuuucagcaaca

SEQ ID NO: 91977 - RNA, 19 nt, Homo sapiens
  misc_RNA (1)...(19): siRNA sense strand
gaaggacugcaguuacgaa

SEQ ID NO: 91978 - RNA, 19 nt, Homo sapiens
  misc_RNA (1)...(19): siRNA sense strand
ucccagcccucauuaguau

SEQ ID NO: 91979 - RNA, 19 nt, Homo sapiens
  misc_RNA (1)...(19): siRNA sense strand
caguaugggcuuugucuaa

SEQ ID NO: 91980 - RNA, 19 nt, Homo sapiens
  misc_RNA (1)...(19): siRNA sense strand
caaauauugcuucaggaaa

SEQ ID NO: 91981 - RNA, 19 nt, Homo sapiens
  misc_RNA (1)...(19): siRNA sense strand
aagaacaaaucucugaauc

SEQ ID NO: 91982 - RNA, 19 nt, Homo sapiens
  misc_RNA (1)...(19): siRNA sense strand
agaagaagaaguuauguca

SEQ ID NO: 91983 - RNA, 19 nt, Homo sapiens
  misc_RNA (1)...(19): siRNA sense strand
gcuuggguacugacaaaua

SEQ ID NO: 91984 - RNA, 19 nt, Homo sapiens
  misc_RNA (1)...(19): siRNA sense strand
uaucagcacaccaggagua

SEQ ID NO: 91985 - RNA, 19 nt, Homo sapiens
  misc_RNA (1)...(19): siRNA sense strand
uuacugugcuuugauugaa

SEQ ID NO: 91986 - RNA, 19 nt, Homo sapiens
  misc_RNA (1)...(19): siRNA sense strand
cauggacucuaagauugua

SEQ ID NO: 91987 - RNA, 19 nt, Homo sapiens
  misc_RNA (1)...(19): siRNA sense strand
guagaacuggguuguauca

SEQ ID NO: 91988 - RNA, 19 nt, Homo sapiens
  misc_RNA (1)...(19): siRNA sense strand
caucacaaaugcaacuucu

SEQ ID NO: 91989 - RNA, 19 nt, Homo sapiens
  misc_RNA (1)...(19): siRNA sense strand
caagaacaaaucucugaau

SEQ ID NO: 91990 - RNA, 19 nt, Homo sapiens
  misc_RNA (1)...(19): siRNA sense strand
agaagaagaaacagaagaa

SEQ ID NO: 91991 - RNA, 19 nt, Homo sapiens
  misc_RNA (1)...(19): siRNA sense strand
guacaucuuccaacagugu

SEQ ID NO: 91992 - RNA, 19 nt, Homo sapiens
  misc_RNA (1)...(19): siRNA sense strand
caguacaucuuccaacagu

SEQ ID NO: 91993 - RNA, 19 nt, Homo sapiens
  misc_RNA (1)...(19): siRNA sense strand
cagcuugggccaucacaaa

SEQ ID NO: 91994 - RNA, 19 nt, Homo sapiens
  misc_RNA (1)...(19): siRNA sense strand
acagaucaaguaccuagua

SEQ ID NO: 91995 - RNA, 19 nt, Homo sapiens
  misc_RNA (1)...(19): siRNA sense strand
caaaaccgccugaccauga

SEQ ID NO: 91996 - RNA, 19 nt, Homo sapiens
  misc_RNA (1)...(19): siRNA sense strand
ggaacggcacuggcauuaa

SEQ ID NO: 91997 - RNA, 19 nt, Homo sapiens
  misc_RNA (1)...(19): siRNA sense strand
guacagguugcccuaaaug

SEQ ID NO: 91998 - RNA, 19 nt, Homo sapiens
  misc_RNA (1)...(19): siRNA sense strand
gaggagggaggaagaagga

SEQ ID NO: 91999 - RNA, 19 nt, Homo sapiens
  misc_RNA (1)...(19): siRNA sense strand
aaguccaccuccagaauuu

SEQ ID NO: 92000 - RNA, 19 nt, Homo sapiens
  misc_RNA (1)...(19): siRNA sense strand
gaauuguucacugcaguuu

SEQ ID NO: 92001 - RNA, 19 nt, Homo sapiens
  misc_RNA (1)...(19): siRNA sense strand
uacaagaacaaaucucuga

SEQ ID NO: 92002 - RNA, 19 nt, Homo sapiens
  misc_RNA (1)...(19): siRNA sense strand
gaaauagggcacagaucca

SEQ ID NO: 92003 - RNA, 19 nt, Homo sapiens
  misc_RNA (1)...(19): siRNA sense strand
gcaggaggagggaggaaga

SEQ ID NO: 92004 - RNA, 19 nt, Homo sapiens
  misc_RNA (1)...(19): siRNA sense strand
uaucagauggacccaauga

SEQ ID NO: 92005 - RNA, 19 nt, Homo sapiens
  misc_RNA (1)...(19): siRNA sense strand
gcaguuauuuucaaagcaa

SEQ ID NO: 92006 - RNA, 19 nt, Homo sapiens
  misc_RNA (1)...(19): siRNA sense strand
gcagggacuaugucuuaga

SEQ ID NO: 92007 - RNA, 19 nt, Homo sapiens
  misc_RNA (1)...(19): siRNA sense strand
cagaucaaguaccuaguag

SEQ ID NO: 92008 - RNA, 19 nt, Homo sapiens
  misc_RNA (1)...(19): siRNA sense strand
cagguggugucaucacuuc

SEQ ID NO: 92009 - RNA, 19 nt, Homo sapiens
  misc_RNA (1)...(19): siRNA sense strand
agaacuggguuguaucaag

SEQ ID NO: 92010 - RNA, 19 nt, Homo sapiens
  misc_RNA (1)...(19): siRNA sense strand
guaugggcuuugucuaauc

SEQ ID NO: 92011 - RNA, 19 nt, Homo sapiens
  misc_RNA (1)...(19): siRNA sense strand
acaaauauugcuucaggaa

SEQ ID NO: 92012 - RNA, 19 nt, Homo sapiens
  misc_RNA (1)...(19): siRNA sense strand
aaccuaacccuccuauuga

SEQ ID NO: 92013 - RNA, 19 nt, Homo sapiens
  misc_RNA (1)...(19): siRNA sense strand
ucacuucugacaugauuga

SEQ ID NO: 92014 - RNA, 19 nt, Homo sapiens
  misc_RNA (1)...(19): siRNA sense strand
gaagaaacagaagaagaag

SEQ ID NO: 92015 - RNA, 19 nt, Homo sapiens
  misc_RNA (1)...(19): siRNA sense strand
guggaacugcugaugcaua

SEQ ID NO: 92016 - RNA, 19 nt, Homo sapiens
  misc_RNA (1)...(19): siRNA sense strand
aaaguccaccuccagaauu

SEQ ID NO: 92017 - RNA, 19 nt, Homo sapiens
  misc_RNA (1)...(19): siRNA sense strand
uagaguugcucagcucaga

SEQ ID NO: 92018 - RNA, 19 nt, Homo sapiens
  misc_RNA (1)...(19): siRNA sense strand
guacugacaaauauugcuu

SEQ ID NO: 92019 - RNA, 19 nt, Homo sapiens
  misc_RNA (1)...(19): siRNA sense strand
uggaguuccucaaacgaaa

SEQ ID NO: 92020 - RNA, 19 nt, Homo sapiens
  misc_RNA (1)...(19): siRNA sense strand
gaaaugaggcgucgcagaa

SEQ ID NO: 92021 - RNA, 19 nt, Homo sapiens
  misc_RNA (1)...(19): siRNA sense strand
ucuaggagcuucugaauug

SEQ ID NO: 92022 - RNA, 19 nt, Homo sapiens
  misc_RNA (1)...(19): siRNA sense strand
gcauguggcuacuuacgua

SEQ ID NO: 92023 - RNA, 19 nt, Homo sapiens
  misc_RNA (1)...(19): siRNA sense strand
gaagcuacguggacaaugu

SEQ ID NO: 92024 - RNA, 19 nt, Homo sapiens
  misc_RNA (1)...(19): siRNA sense strand
aaucuuaccuggacacuuu

SEQ ID NO: 92025 - RNA, 19 nt, Homo sapiens
  misc_RNA (1)...(19): siRNA sense strand
gcagauucuuccuaccuua

SEQ ID NO: 92026 - RNA, 19 nt, Homo sapiens
  misc_RNA (1)...(19): siRNA sense strand
aaacuaacauucagaagga

SEQ ID NO: 92027 - RNA, 19 nt, Homo sapiens
  misc_RNA (1)...(19): siRNA sense strand
uaagaaggaugaccagaug

SEQ ID NO: 92028 - RNA, 19 nt, Homo sapiens
  misc_RNA (1)...(19): siRNA sense strand
gggcagaacugauuguagu

SEQ ID NO: 92029 - RNA, 19 nt, Homo sapiens
  misc_RNA (1)...(19): siRNA sense strand
ggaaagcuaagaaggauga

SEQ ID NO: 92030 - RNA, 19 nt, Homo sapiens
  misc_RNA (1)...(19): siRNA sense strand
agacucagguugugauuga

SEQ ID NO: 92031 - RNA, 19 nt, Homo sapiens
  misc_RNA (1)...(19): siRNA sense strand
ccagaaguguuagcagaua

SEQ ID NO: 92032 - RNA, 19 nt, Homo sapiens
  misc_RNA (1)...(19): siRNA sense strand
caacgagaaugcuaauaca

SEQ ID NO: 92033 - RNA, 19 nt, Homo sapiens
  misc_RNA (1)...(19): siRNA sense strand
gaggaaagcuaagaaggau

SEQ ID NO: 92034 - RNA, 19 nt, Homo sapiens
  misc_RNA (1)...(19): siRNA sense strand
uaauagaaccguugaugaa

SEQ ID NO: 92035 - RNA, 19 nt, Homo sapiens
  misc_RNA (1)...(19): siRNA sense strand
guaaauuggucuguugaug

SEQ ID NO: 92036 - RNA, 19 nt, Homo sapiens
  misc_RNA (1)...(19): siRNA sense strand
gaaacugagaaacuuagua

SEQ ID NO: 92037 - RNA, 19 nt, Homo sapiens
  misc_RNA (1)...(19): siRNA sense strand
uaaauuggucuguugauga

SEQ ID NO: 92038 - RNA, 19 nt, Homo sapiens
  misc_RNA (1)...(19): siRNA sense strand
gaauuggcaugguggugaa

SEQ ID NO: 92039 - RNA, 19 nt, Homo sapiens
  misc_RNA (1)...(19): siRNA sense strand
gauaccugcugggcuauuu

SEQ ID NO: 92040 - RNA, 19 nt, Homo sapiens
  misc_RNA (1)...(19): siRNA sense strand
gaaauuuguguccuucuug

SEQ ID NO: 92041 - RNA, 19 nt, Homo sapiens
  misc_RNA (1)...(19): siRNA sense strand
gaacagacucagguuguga

SEQ ID NO: 92042 - RNA, 19 nt, Homo sapiens
  misc_RNA (1)...(19): siRNA sense strand
guagucccauucaguuuga

SEQ ID NO: 92043 - RNA, 19 nt, Homo sapiens
  misc_RNA (1)...(19): siRNA sense strand
uggaacaguugaacagauu

SEQ ID NO: 92044 - RNA, 19 nt, Homo sapiens
  misc_RNA (1)...(19): siRNA sense strand
aaugaggcgucgcagaaua

SEQ ID NO: 92045 - RNA, 19 nt, Homo sapiens
  misc_RNA (1)...(19): siRNA sense strand
ccugauaugucaucuuuag

SEQ ID NO: 92046 - RNA, 19 nt, Homo sapiens
  misc_RNA (1)...(19): siRNA sense strand
cgaaauuuguguccuucuu

SEQ ID NO: 92047 - RNA, 19 nt, Homo sapiens
  misc_RNA (1)...(19): siRNA sense strand
gggaauauugucacuggua

SEQ ID NO: 92048 - RNA, 19 nt, Homo sapiens
  misc_RNA (1)...(19): siRNA sense strand
ccaagauuauucugguuau

SEQ ID NO: 92049 - RNA, 19 nt, Homo sapiens
  misc_RNA (1)...(19): siRNA sense strand
uaugucaucuuuagcaugu

SEQ ID NO: 92050 - RNA, 19 nt, Homo sapiens
  misc_RNA (1)...(19): siRNA sense strand
uaagagccauagggaauau

SEQ ID NO: 92051 - RNA, 19 nt, Homo sapiens
  misc_RNA (1)...(19): siRNA sense strand
gaccagauacagcaaguug

SEQ ID NO: 92052 - RNA, 19 nt, Homo sapiens
  misc_RNA (1)...(19): siRNA sense strand
ggugaaacugagaaacuua

SEQ ID NO: 92053 - RNA, 19 nt, Homo sapiens
  misc_RNA (1)...(19): siRNA sense strand
cugaagaggagaaauguaa

SEQ ID NO: 92054 - RNA, 19 nt, Homo sapiens
  misc_RNA (1)...(19): siRNA sense strand
ccagggcacuguaaauugg

SEQ ID NO: 92055 - RNA, 19 nt, Homo sapiens
  misc_RNA (1)...(19): siRNA sense strand
caacaaccagggcacugua

SEQ ID NO: 92056 - RNA, 19 nt, Homo sapiens
  misc_RNA (1)...(19): siRNA sense strand
gaaaagacaguacagaaau

SEQ ID NO: 92057 - RNA, 19 nt, Homo sapiens
  misc_RNA (1)...(19): siRNA sense strand
gcaaaagauaccaagauua

SEQ ID NO: 92058 - RNA, 19 nt, Homo sapiens
  misc_RNA (1)...(19): siRNA sense strand
ggaaaagacaguacagaaa

SEQ ID NO: 92059 - RNA, 19 nt, Homo sapiens
  misc_RNA (1)...(19): siRNA sense strand
uuccgagacuugguuauua

SEQ ID NO: 92060 - RNA, 19 nt, Homo sapiens
  misc_RNA (1)...(19): siRNA sense strand
cagaauagaggucaaugug

SEQ ID NO: 92061 - RNA, 19 nt, Homo sapiens
  misc_RNA (1)...(19): siRNA sense strand
cuucacagauucaagaaca

SEQ ID NO: 92062 - RNA, 19 nt, Homo sapiens
  misc_RNA (1)...(19): siRNA sense strand
guacagaugaacagacuca

SEQ ID NO: 92063 - RNA, 19 nt, Homo sapiens
  misc_RNA (1)...(19): siRNA sense strand
uuccugauaugucaucuuu

SEQ ID NO: 92064 - RNA, 19 nt, Homo sapiens
  misc_RNA (1)...(19): siRNA sense strand
guaagcucauuuccugaug

SEQ ID NO: 92065 - RNA, 19 nt, Homo sapiens
  misc_RNA (1)...(19): siRNA sense strand
uuacugaugguccaaauga

SEQ ID NO: 92066 - RNA, 19 nt, Homo sapiens
  misc_RNA (1)...(19): siRNA sense strand
gauaugucaucuuuagcau

SEQ ID NO: 92067 - RNA, 19 nt, Homo sapiens
  misc_RNA (1)...(19): siRNA sense strand
uccgagacuugguuauuaa

SEQ ID NO: 92068 - RNA, 19 nt, Homo sapiens
  misc_RNA (1)...(19): siRNA sense strand
gcagcaauguggaaaauca

SEQ ID NO: 92069 - RNA, 19 nt, Homo sapiens
  misc_RNA (1)...(19): siRNA sense strand
uacagcaaguugugaauca

SEQ ID NO: 92070 - RNA, 19 nt, Homo sapiens
  misc_RNA (1)...(19): siRNA sense strand
gcugagaaacuaggugaaa

SEQ ID NO: 92071 - RNA, 19 nt, Homo sapiens
  misc_RNA (1)...(19): siRNA sense strand
gcauaaauagcagcaaugu

SEQ ID NO: 92072 - RNA, 19 nt, Homo sapiens
  misc_RNA (1)...(19): siRNA sense strand
cagauuguguaccuuguuc

SEQ ID NO: 92073 - RNA, 19 nt, Homo sapiens
  misc_RNA (1)...(19): siRNA sense strand
gaacaguugaacagauugu

SEQ ID NO: 92074 - RNA, 19 nt, Homo sapiens
  misc_RNA (1)...(19): siRNA sense strand
ggacaucagaacaaaccaa

SEQ ID NO: 92075 - RNA, 19 nt, Homo sapiens
  misc_RNA (1)...(19): siRNA sense strand
gcuauuuccuaccuuacug

SEQ ID NO: 92076 - RNA, 19 nt, Homo sapiens
  misc_RNA (1)...(19): siRNA sense strand
ccuggacacuuucuaaucu

SEQ ID NO: 92077 - RNA, 19 nt, Homo sapiens
  misc_RNA (1)...(19): siRNA sense strand
gcagaauagaggucaaugu

SEQ ID NO: 92078 - RNA, 19 nt, Homo sapiens
  misc_RNA (1)...(19): siRNA sense strand
cauaauagaaccguugaug

SEQ ID NO: 92079 - RNA, 19 nt, Homo sapiens
  misc_RNA (1)...(19): siRNA sense strand
caaccagggcacuguaaau

SEQ ID NO: 92080 - RNA, 19 nt, Homo sapiens
  misc_RNA (1)...(19): siRNA sense strand
ugaggaaagcuaagaagga

SEQ ID NO: 92081 - RNA, 19 nt, Homo sapiens
  misc_RNA (1)...(19): siRNA sense strand
ccaccaacgagaaugcuaa

SEQ ID NO: 92082 - RNA, 19 nt, Homo sapiens
  misc_RNA (1)...(19): siRNA sense strand
ccaacgagaaugcuaauac

SEQ ID NO: 92083 - RNA, 19 nt, Homo sapiens
  misc_RNA (1)...(19): siRNA sense strand
ggacacuuucuaaucuuug

SEQ ID NO: 92084 - RNA, 19 nt, Homo sapiens
  misc_RNA (1)...(19): siRNA sense strand
guggaacaguugaacagau

SEQ ID NO: 92085 - RNA, 19 nt, Homo sapiens
  misc_RNA (1)...(19): siRNA sense strand
ugggcuauuuccuaccuua

SEQ ID NO: 92086 - RNA, 19 nt, Homo sapiens
  misc_RNA (1)...(19): siRNA sense strand
cugguuugauuccgaaauu

SEQ ID NO: 92087 - RNA, 19 nt, Homo sapiens
  misc_RNA (1)...(19): siRNA sense strand
ccucugaaggcuacacuuu

SEQ ID NO: 92088 - RNA, 19 nt, Homo sapiens
  misc_RNA (1)...(19): siRNA sense strand
caggagcacucgccgucuu

SEQ ID NO: 92089 - RNA, 19 nt, Homo sapiens
  misc_RNA (1)...(19): siRNA sense strand
cuaagagccauagggaaua

SEQ ID NO: 92090 - RNA, 19 nt, Homo sapiens
  misc_RNA (1)...(19): siRNA sense strand
gauucuuccuaccuuaguu

SEQ ID NO: 92091 - RNA, 19 nt, Homo sapiens
  misc_RNA (1)...(19): siRNA sense strand
uggacacuuucuaaucuuu

SEQ ID NO: 92092 - RNA, 19 nt, Homo sapiens
  misc_RNA (1)...(19): siRNA sense strand
uaaguacggugcaguugac

SEQ ID NO: 92093 - RNA, 19 nt, Homo sapiens
  misc_RNA (1)...(19): siRNA sense strand
caagcugucugggcucuag

SEQ ID NO: 92094 - RNA, 19 nt, Homo sapiens
  misc_RNA (1)...(19): siRNA sense strand
cuuguucacuguggcauaa

SEQ ID NO: 92095 - RNA, 19 nt, Homo sapiens
  misc_RNA (1)...(19): siRNA sense strand
uacucaagcugccaggaaa

SEQ ID NO: 92096 - RNA, 19 nt, Homo sapiens
  misc_RNA (1)...(19): siRNA sense strand
uguucacuguggcauaaua

SEQ ID NO: 92097 - RNA, 19 nt, Homo sapiens
  misc_RNA (1)...(19): siRNA sense strand
ccagauacagcaaguugug

SEQ ID NO: 92098 - RNA, 19 nt, Homo sapiens
  misc_RNA (1)...(19): siRNA sense strand
ugaugauccagaaguguua

SEQ ID NO: 92099 - RNA, 19 nt, Homo sapiens
  misc_RNA (1)...(19): siRNA sense strand
aaagacaguacagaaauga

SEQ ID NO: 92100 - RNA, 19 nt, Homo sapiens
  misc_RNA (1)...(19): siRNA sense strand
gcaacaaccagggcacugu

SEQ ID NO: 92101 - RNA, 19 nt, Homo sapiens
  misc_RNA (1)...(19): siRNA sense strand
caguugaacagauugugua

SEQ ID NO: 92102 - RNA, 19 nt, Homo sapiens
  misc_RNA (1)...(19): siRNA sense strand
gauucaagaacaagggaaa

SEQ ID NO: 92103 - RNA, 19 nt, Homo sapiens
  misc_RNA (1)...(19): siRNA sense strand
ugucugggcucuaggaaac

SEQ ID NO: 92104 - RNA, 19 nt, Homo sapiens
  misc_RNA (1)...(19): siRNA sense strand
acuguaaauuggucuguug

SEQ ID NO: 92105 - RNA, 19 nt, Homo sapiens
  misc_RNA (1)...(19): siRNA sense strand
gucaaaggcauaaauagca

SEQ ID NO: 92106 - RNA, 19 nt, Homo sapiens
  misc_RNA (1)...(19): siRNA sense strand
caagauuauucugguuauc

SEQ ID NO: 92107 - RNA, 19 nt, Homo sapiens
  misc_RNA (1)...(19): siRNA sense strand
auaauagaaccguugauga

SEQ ID NO: 92108 - RNA, 19 nt, Homo sapiens
  misc_RNA (1)...(19): siRNA sense strand
ucacuguggcauaauagaa

SEQ ID NO: 92109 - RNA, 19 nt, Homo sapiens
  misc_RNA (1)...(19): siRNA sense strand
aggcauaaauagcagcaau

SEQ ID NO: 92110 - RNA, 19 nt, Homo sapiens
  misc_RNA (1)...(19): siRNA sense strand
cuaagaaggaugaccagau

SEQ ID NO: 92111 - RNA, 19 nt, Homo sapiens
  misc_RNA (1)...(19): siRNA sense strand
ugaacagacucagguugug

SEQ ID NO: 92112 - RNA, 19 nt, Homo sapiens
  misc_RNA (1)...(19): siRNA sense strand
ggaaacauugcaggugaug

SEQ ID NO: 92113 - RNA, 19 nt, Homo sapiens
  misc_RNA (1)...(19): siRNA sense strand
gguuugauuccgaaauuug

SEQ ID NO: 92114 - RNA, 19 nt, Homo sapiens
  misc_RNA (1)...(19): siRNA sense strand
gcugaagaggagaaaugua

SEQ ID NO: 92115 - RNA, 19 nt, Homo sapiens
  misc_RNA (1)...(19): siRNA sense strand
uuaccuggacacuuucuaa

SEQ ID NO: 92116 - RNA, 19 nt, Homo sapiens
  misc_RNA (1)...(19): siRNA sense strand
agacaaaauugaagcucua

SEQ ID NO: 92117 - RNA, 19 nt, Homo sapiens
  misc_RNA (1)...(19): siRNA sense strand
ucaccaaccccaaaacuaa

SEQ ID NO: 92118 - RNA, 19 nt, Homo sapiens
  misc_RNA (1)...(19): siRNA sense strand
uauugucacugguacagau

SEQ ID NO: 92119 - RNA, 19 nt, Homo sapiens
  misc_RNA (1)...(19): siRNA sense strand
guucggcuccugcaucaug

SEQ ID NO: 92120 - RNA, 19 nt, Homo sapiens
  misc_RNA (1)...(19): siRNA sense strand
caaaagagaugaacacuua

SEQ ID NO: 92121 - RNA, 19 nt, Homo sapiens
  misc_RNA (1)...(19): siRNA sense strand
gaacagauacagaugguua

SEQ ID NO: 92122 - RNA, 19 nt, Homo sapiens
  misc_RNA (1)...(19): siRNA sense strand
gaagaucccugccucauuc

SEQ ID NO: 92123 - RNA, 19 nt, Homo sapiens
  misc_RNA (1)...(19): siRNA sense strand
gaaagauucucaagugguu

SEQ ID NO: 92124 - RNA, 19 nt, Homo sapiens
  misc_RNA (1)...(19): siRNA sense strand
gaaacaaugcgaagacaua

SEQ ID NO: 92125 - RNA, 19 nt, Homo sapiens
  misc_RNA (1)...(19): siRNA sense strand
gcaacaaguucaagcugua

SEQ ID NO: 92126 - RNA, 19 nt, Homo sapiens
  misc_RNA (1)...(19): siRNA sense strand
gaagcuauauugcagaaug

SEQ ID NO: 92127 - RNA, 19 nt, Homo sapiens
  misc_RNA (1)...(19): siRNA sense strand
gaagaaagucuagaagauu

SEQ ID NO: 92128 - RNA, 19 nt, Homo sapiens
  misc_RNA (1)...(19): siRNA sense strand
gucaaucucugcaggaaua

SEQ ID NO: 92129 - RNA, 19 nt, Homo sapiens
  misc_RNA (1)...(19): siRNA sense strand
gauaauggccggugaugaa

SEQ ID NO: 92130 - RNA, 19 nt, Homo sapiens
  misc_RNA (1)...(19): siRNA sense strand
gaagcagugugguuccuuu

SEQ ID NO: 92131 - RNA, 19 nt, Homo sapiens
  misc_RNA (1)...(19): siRNA sense strand
gcgaagacauagaaaugaa

SEQ ID NO: 92132 - RNA, 19 nt, Homo sapiens
  misc_RNA (1)...(19): siRNA sense strand
cagccaaccuucaaacaaa

SEQ ID NO: 92133 - RNA, 19 nt, Homo sapiens
  misc_RNA (1)...(19): siRNA sense strand
gaaaagaucagguugagua

SEQ ID NO: 92134 - RNA, 19 nt, Homo sapiens
  misc_RNA (1)...(19): siRNA sense strand
gaagauaaauaaggaagca

SEQ ID NO: 92135 - RNA, 19 nt, Homo sapiens
  misc_RNA (1)...(19): siRNA sense strand
gagaugaacacuuauugaa

SEQ ID NO: 92136 - RNA, 19 nt, Homo sapiens
  misc_RNA (1)...(19): siRNA sense strand
ggagacaguucaggagauu

SEQ ID NO: 92137 - RNA, 19 nt, Homo sapiens
  misc_RNA (1)...(19): siRNA sense strand
gaugcuggauuaauuccua

SEQ ID NO: 92138 - RNA, 19 nt, Homo sapiens
  misc_RNA (1)...(19): siRNA sense strand
gugaugauauugaugaaga

SEQ ID NO: 92139 - RNA, 19 nt, Homo sapiens
  misc_RNA (1)...(19): siRNA sense strand
gcaaucagcaacuuaacaa

SEQ ID NO: 92140 - RNA, 19 nt, Homo sapiens
  misc_RNA (1)...(19): siRNA sense strand
agaagaaagucuagaagau

SEQ ID NO: 92141 - RNA, 19 nt, Homo sapiens
  misc_RNA (1)...(19): siRNA sense strand
agauacagaugguuauuga

SEQ ID NO: 92142 - RNA, 19 nt, Homo sapiens
  misc_RNA (1)...(19): siRNA sense strand
ucuagaagauucagauguu

SEQ ID NO: 92143 - RNA, 19 nt, Homo sapiens
  misc_RNA (1)...(19): siRNA sense strand
cagaaugccacaagugaua

SEQ ID NO: 92144 - RNA, 19 nt, Homo sapiens
  misc_RNA (1)...(19): siRNA sense strand
ucacaugggucauugucaa

SEQ ID NO: 92145 - RNA, 19 nt, Homo sapiens
  misc_RNA (1)...(19): siRNA sense strand
uaacauagcaucaggaacu

SEQ ID NO: 92146 - RNA, 19 nt, Homo sapiens
  misc_RNA (1)...(19): siRNA sense strand
gaacgucacaugggucauu

SEQ ID NO: 92147 - RNA, 19 nt, Homo sapiens
  misc_RNA (1)...(19): siRNA sense strand
ucaaaccucuucuguccuu

SEQ ID NO: 92148 - RNA, 19 nt, Homo sapiens
  misc_RNA (1)...(19): siRNA sense strand
ggagguaccuacaauuuug

SEQ ID NO: 92149 - RNA, 19 nt, Homo sapiens
  misc_RNA (1)...(19): siRNA sense strand
ggcauuaacuaacauagca

SEQ ID NO: 92150 - RNA, 19 nt, Homo sapiens
  misc_RNA (1)...(19): siRNA sense strand
gcacaauagcugaaauaau

SEQ ID NO: 92151 - RNA, 19 nt, Homo sapiens
  misc_RNA (1)...(19): siRNA sense strand
guaaugaacagauacagau

SEQ ID NO: 92152 - RNA, 19 nt, Homo sapiens
  misc_RNA (1)...(19): siRNA sense strand
gguccucaauguagagauu

SEQ ID NO: 92153 - RNA, 19 nt, Homo sapiens
  misc_RNA (1)...(19): siRNA sense strand
aagaaagucuagaagauuc

SEQ ID NO: 92154 - RNA, 19 nt, Homo sapiens
  misc_RNA (1)...(19): siRNA sense strand
acaaggagguaccuacaau

SEQ ID NO: 92155 - RNA, 19 nt, Homo sapiens
  misc_RNA (1)...(19): siRNA sense strand
ccaagaagaaagucuagaa

SEQ ID NO: 92156 - RNA, 19 nt, Homo sapiens
  misc_RNA (1)...(19): siRNA sense strand
agugaaagauucucaagug

SEQ ID NO: 92157 - RNA, 19 nt, Homo sapiens
  misc_RNA (1)...(19): siRNA sense strand
gagaaccaccgcaucaaga

SEQ ID NO: 92158 - RNA, 19 nt, Homo sapiens
  misc_RNA (1)...(19): siRNA sense strand
uaauaccaccguucuguaa

SEQ ID NO: 92159 - RNA, 19 nt, Homo sapiens
  misc_RNA (1)...(19): siRNA sense strand
ggaguugugcccuuucuug

SEQ ID NO: 92160 - RNA, 19 nt, Homo sapiens
  misc_RNA (1)...(19): siRNA sense strand
guauuucucuggugaugau

SEQ ID NO: 92161 - RNA, 19 nt, Homo sapiens
  misc_RNA (1)...(19): siRNA sense strand
guaauaccaccguucugua

SEQ ID NO: 92162 - RNA, 19 nt, Homo sapiens
  misc_RNA (1)...(19): siRNA sense strand
ucccaaaucucuuaucaca

SEQ ID NO: 92163 - RNA, 19 nt, Homo sapiens
  misc_RNA (1)...(19): siRNA sense strand
uagaagcuauauugcagaa

SEQ ID NO: 92164 - RNA, 19 nt, Homo sapiens
  misc_RNA (1)...(19): siRNA sense strand
ucaaacagcagcccucaga

SEQ ID NO: 92165 - RNA, 19 nt, Homo sapiens
  misc_RNA (1)...(19): siRNA sense strand
ggaagucaaaguucaaaca

SEQ ID NO: 92166 - RNA, 19 nt, Homo sapiens
  misc_RNA (1)...(19): siRNA sense strand
gguuauugauucaggaguu

SEQ ID NO: 92167 - RNA, 19 nt, Homo sapiens
  misc_RNA (1)...(19): siRNA sense strand
ucaagagcuucaagaacaa

SEQ ID NO: 92168 - RNA, 19 nt, Homo sapiens
  misc_RNA (1)...(19): siRNA sense strand
ugaugaagcaagcacaaua

SEQ ID NO: 92169 - RNA, 19 nt, Homo sapiens
  misc_RNA (1)...(19): siRNA sense strand
acacuucccaaaucucuua

SEQ ID NO: 92170 - RNA, 19 nt, Homo sapiens
  misc_RNA (1)...(19): siRNA sense strand
caauugugauguccuguca

SEQ ID NO: 92171 - RNA, 19 nt, Homo sapiens
  misc_RNA (1)...(19): siRNA sense strand
agaggaauguggagguuug

SEQ ID NO: 92172 - RNA, 19 nt, Homo sapiens
  misc_RNA (1)...(19): siRNA sense strand
gugguuccuuuccaacaua

SEQ ID NO: 92173 - RNA, 19 nt, Homo sapiens
  misc_RNA (1)...(19): siRNA sense strand
gcaucaagagcuucaagaa

SEQ ID NO: 92174 - RNA, 19 nt, Homo sapiens
  misc_RNA (1)...(19): siRNA sense strand
accgauugaugacuuaaua

SEQ ID NO: 92175 - RNA, 19 nt, Homo sapiens
  misc_RNA (1)...(19): siRNA sense strand
acauagaaaugaagugaca

SEQ ID NO: 92176 - RNA, 19 nt, Homo sapiens
  misc_RNA (1)...(19): siRNA sense strand
ggugaugguccucaaugua

SEQ ID NO: 92177 - RNA, 19 nt, Homo sapiens
  misc_RNA (1)...(19): siRNA sense strand
uggagguaaugaacagaua

SEQ ID NO: 92178 - RNA, 19 nt, Homo sapiens
  misc_RNA (1)...(19): siRNA sense strand
gaagacauagaaaugaagu

SEQ ID NO: 92179 - RNA, 19 nt, Homo sapiens
  misc_RNA (1)...(19): siRNA sense strand
gagcagacccagguuguuc

SEQ ID NO: 92180 - RNA, 19 nt, Homo sapiens
  misc_RNA (1)...(19): siRNA sense strand
uaccaauucuagucaaaug

SEQ ID NO: 92181 - RNA, 19 nt, Homo sapiens
  misc_RNA (1)...(19): siRNA sense strand
aucaagagcuucaagaaca

SEQ ID NO: 92182 - RNA, 19 nt, Homo sapiens
  misc_RNA (1)...(19): siRNA sense strand
gaaauaauagaggaaugug

SEQ ID NO: 92183 - RNA, 19 nt, Homo sapiens
  misc_RNA (1)...(19): siRNA sense strand
auaccaccguucuguaauu

SEQ ID NO: 92184 - RNA, 19 nt, Homo sapiens
  misc_RNA (1)...(19): siRNA sense strand
caacaaguucaagcuguaa

SEQ ID NO: 92185 - RNA, 19 nt, Homo sapiens
  misc_RNA (1)...(19): siRNA sense strand
acagaugguuauugauuca

SEQ ID NO: 92186 - RNA, 19 nt, Homo sapiens
  misc_RNA (1)...(19): siRNA sense strand
agucaaaugucuagaaagg

SEQ ID NO: 92187 - RNA, 19 nt, Homo sapiens
  misc_RNA (1)...(19): siRNA sense strand
aaggagguaccuacaauuu

SEQ ID NO: 92188 - RNA, 19 nt, Homo sapiens
  misc_RNA (1)...(19): siRNA sense strand
gaagcaacacaaggaggua

SEQ ID NO: 92189 - RNA, 19 nt, Homo sapiens
  misc_RNA (1)...(19): siRNA sense strand
gcaagcacaauagcugaaa

SEQ ID NO: 92190 - RNA, 19 nt, Homo sapiens
  misc_RNA (1)...(19): siRNA sense strand
gaugaagcaagcacaauag

SEQ ID NO: 92191 - RNA, 19 nt, Homo sapiens
  misc_RNA (1)...(19): siRNA sense strand
uaauucaucagcuugcuaa

SEQ ID NO: 92192 - RNA, 19 nt, Homo sapiens
  misc_RNA (1)...(19): siRNA sense strand
gguaaugaacagauacaga

SEQ ID NO: 92193 - RNA, 19 nt, Homo sapiens
  misc_RNA (1)...(19): siRNA sense strand
aagcuguugugcagucuaa

SEQ ID NO: 92194 - RNA, 19 nt, Homo sapiens
  misc_RNA (1)...(19): siRNA sense strand
caagcacaauagcugaaau

SEQ ID NO: 92195 - RNA, 19 nt, Homo sapiens
  misc_RNA (1)...(19): siRNA sense strand
uaccaccguucuguaauuu

SEQ ID NO: 92196 - RNA, 19 nt, Homo sapiens
  misc_RNA (1)...(19): siRNA sense strand
ccucuucuguccuucauca

SEQ ID NO: 92197 - RNA, 19 nt, Homo sapiens
  misc_RNA (1)...(19): siRNA sense strand
gagaaauguuccccaagaa

SEQ ID NO: 92198 - RNA, 19 nt, Homo sapiens
  misc_RNA (1)...(19): siRNA sense strand
caaggagguaccuacaauu

SEQ ID NO: 92199 - RNA, 19 nt, Homo sapiens
  misc_RNA (1)...(19): siRNA sense strand
ccucauuccugaagcaaca

SEQ ID NO: 92200 - RNA, 19 nt, Homo sapiens
  misc_RNA (1)...(19): siRNA sense strand
acaaugcgaagacauagaa

SEQ ID NO: 92201 - RNA, 19 nt, Homo sapiens
  misc_RNA (1)...(19): siRNA sense strand
gacccagguuguucucaau

SEQ ID NO: 92202 - RNA, 19 nt, Homo sapiens
  misc_RNA (1)...(19): siRNA sense strand
ggagaaccaccgcaucaag

SEQ ID NO: 92203 - RNA, 19 nt, Homo sapiens
  misc_RNA (1)...(19): siRNA sense strand
aagcacaauagcugaaaua

SEQ ID NO: 92204 - RNA, 19 nt, Homo sapiens
  misc_RNA (1)...(19): siRNA sense strand
ggaguugucaaaccucuuc

SEQ ID NO: 92205 - RNA, 19 nt, Homo sapiens
  misc_RNA (1)...(19): siRNA sense strand
caauguagagauuauguca

SEQ ID NO: 92206 - RNA, 19 nt, Homo sapiens
  misc_RNA (1)...(19): siRNA sense strand
gcuugggcauuaacuaaca

SEQ ID NO: 92207 - RNA, 19 nt, Homo sapiens
  misc_RNA (1)...(19): siRNA sense strand
agacauagaaaugaaguga

SEQ ID NO: 92208 - RNA, 19 nt, Homo sapiens
  misc_RNA (1)...(19): siRNA sense strand
ugaagaucccugccucauu

SEQ ID NO: 92209 - RNA, 19 nt, Homo sapiens
  misc_RNA (1)...(19): siRNA sense strand
ucaagugguucaggugguu

SEQ ID NO: 92210 - RNA, 19 nt, Homo sapiens
  misc_RNA (1)...(19): siRNA sense strand
acaaguucaagcuguaaua

SEQ ID NO: 92211 - RNA, 19 nt, Homo sapiens
  misc_RNA (1)...(19): siRNA sense strand
gcaaccagcaacaaguuca

SEQ ID NO: 92212 - RNA, 19 nt, Homo sapiens
  misc_RNA (1)...(19): siRNA sense strand
gcagugugguuccuuucca

SEQ ID NO: 92213 - RNA, 19 nt, Homo sapiens
  misc_RNA (1)...(19): siRNA sense strand
cuagaagauucagauguug

SEQ ID NO: 92214 - RNA, 19 nt, Homo sapiens
  misc_RNA (1)...(19): siRNA sense strand
ccagguuguucucaauugu

SEQ ID NO: 92215 - RNA, 19 nt, Homo sapiens
  misc_RNA (1)...(19): siRNA sense strand
uacagaugguuauugauuc

SEQ ID NO: 92216 - RNA, 19 nt, Homo sapiens
  misc_RNA (1)...(19): siRNA sense strand
guuauccagugacagaaau

SEQ ID NO: 92217 - RNA, 19 nt, Homo sapiens
  misc_RNA (1)...(19): siRNA sense strand
aagaagaaagucuagaaga

SEQ ID NO: 92218 - RNA, 19 nt, Homo sapiens
  misc_RNA (1)...(19): siRNA sense strand
ggaaacauuauaggugaug

SEQ ID NO: 92219 - RNA, 19 nt, Homo sapiens
  misc_RNA (1)...(19): siRNA sense strand
gaaauguuccccaagaaga

SEQ ID NO: 92220 - RNA, 19 nt, Homo sapiens
  misc_RNA (1)...(19): siRNA sense strand
gaauaggcauuaauccaua

SEQ ID NO: 92221 - RNA, 19 nt, Homo sapiens
  misc_RNA (1)...(19): siRNA sense strand
gaagaaggaauacagcuua

SEQ ID NO: 92222 - RNA, 19 nt, Homo sapiens
  misc_RNA (1)...(19): siRNA sense strand
gcaugggcauuaacaaaua

SEQ ID NO: 92223 - RNA, 19 nt, Homo sapiens
  misc_RNA (1)...(19): siRNA sense strand
uaacaucacugcuggaaau

SEQ ID NO: 92224 - RNA, 19 nt, Homo sapiens
  misc_RNA (1)...(19): siRNA sense strand
ccaaaggagucaauuagaa

SEQ ID NO: 92225 - RNA, 19 nt, Homo sapiens
  misc_RNA (1)...(19): siRNA sense strand
ggauggauuucaacuuuaa

SEQ ID NO: 92226 - RNA, 19 nt, Homo sapiens
  misc_RNA (1)...(19): siRNA sense strand
gaacauuacuuugguguag

SEQ ID NO: 92227 - RNA, 19 nt, Homo sapiens
  misc_RNA (1)...(19): siRNA sense strand
ggaaauagagcucagauuc

SEQ ID NO: 92228 - RNA, 19 nt, Homo sapiens
  misc_RNA (1)...(19): siRNA sense strand
gaaggcauuugaucugauu

SEQ ID NO: 92229 - RNA, 19 nt, Homo sapiens
  misc_RNA (1)...(19): siRNA sense strand
ccaaguggcuuuaaaugga

SEQ ID NO: 92230 - RNA, 19 nt, Homo sapiens
  misc_RNA (1)...(19): siRNA sense strand
ggaagaaguuguuacuaca

SEQ ID NO: 92231 - RNA, 19 nt, Homo sapiens
  misc_RNA (1)...(19): siRNA sense strand
gaaauacuuccaccucuuu

SEQ ID NO: 92232 - RNA, 19 nt, Homo sapiens
  misc_RNA (1)...(19): siRNA sense strand
gaagccugcuggacuguuu

SEQ ID NO: 92233 - RNA, 19 nt, Homo sapiens
  misc_RNA (1)...(19): siRNA sense strand
gauauuaguuccacuguac

SEQ ID NO: 92234 - RNA, 19 nt, Homo sapiens
  misc_RNA (1)...(19): siRNA sense strand
uaagguauuugguagcuuu

SEQ ID NO: 92235 - RNA, 19 nt, Homo sapiens
  misc_RNA (1)...(19): siRNA sense strand
gaaggaauacagcuuagaa

SEQ ID NO: 92236 - RNA, 19 nt, Homo sapiens
  misc_RNA (1)...(19): siRNA sense strand
gaaauagagcucagauuca

SEQ ID NO: 92237 - RNA, 19 nt, Homo sapiens
  misc_RNA (1)...(19): siRNA sense strand
caaaggagucaauuagaaa

SEQ ID NO: 92238 - RNA, 19 nt, Homo sapiens
  misc_RNA (1)...(19): siRNA sense strand
gaaguuguuacuacagaua

SEQ ID NO: 92239 - RNA, 19 nt, Homo sapiens
  misc_RNA (1)...(19): siRNA sense strand
gaagcugcaugggcauuaa

SEQ ID NO: 92240 - RNA, 19 nt, Homo sapiens
  misc_RNA (1)...(19): siRNA sense strand
cuacagauaugguucagau

SEQ ID NO: 92241 - RNA, 19 nt, Homo sapiens
  misc_RNA (1)...(19): siRNA sense strand
gcauuaaaccacuuuguga

SEQ ID NO: 92242 - RNA, 19 nt, Homo sapiens
  misc_RNA (1)...(19): siRNA sense strand
gcccagaaaugaugaaucu

SEQ ID NO: 92243 - RNA, 19 nt, Homo sapiens
  misc_RNA (1)...(19): siRNA sense strand
gaagauugguggaacuuuu

SEQ ID NO: 92244 - RNA, 19 nt, Homo sapiens
  misc_RNA (1)...(19): siRNA sense strand
uaacagcaacacagaaauu

SEQ ID NO: 92245 - RNA, 19 nt, Homo sapiens
  misc_RNA (1)...(19): siRNA sense strand
gaaccuaauccaccaauag

SEQ ID NO: 92246 - RNA, 19 nt, Homo sapiens
  misc_RNA (1)...(19): siRNA sense strand
caagagaugcguagacgaa

SEQ ID NO: 92247 - RNA, 19 nt, Homo sapiens
  misc_RNA (1)...(19): siRNA sense strand
caucacugcuggaaauaga

SEQ ID NO: 92248 - RNA, 19 nt, Homo sapiens
  misc_RNA (1)...(19): siRNA sense strand
gauucaggcuguuauagau

SEQ ID NO: 92249 - RNA, 19 nt, Homo sapiens
  misc_RNA (1)...(19): siRNA sense strand
gguuucaccuugcuuaaau

SEQ ID NO: 92250 - RNA, 19 nt, Homo sapiens
  misc_RNA (1)...(19): siRNA sense strand
cagaaaugaugaaucuaug

SEQ ID NO: 92251 - RNA, 19 nt, Homo sapiens
  misc_RNA (1)...(19): siRNA sense strand
cagcuugggcuauaacuaa

SEQ ID NO: 92252 - RNA, 19 nt, Homo sapiens
  misc_RNA (1)...(19): siRNA sense strand
gaauaaagcccuaaauccu

SEQ ID NO: 92253 - RNA, 19 nt, Homo sapiens
  misc_RNA (1)...(19): siRNA sense strand
gugaugauauucaaacaca

SEQ ID NO: 92254 - RNA, 19 nt, Homo sapiens
  misc_RNA (1)...(19): siRNA sense strand
ugugggcccucucaaauuu

SEQ ID NO: 92255 - RNA, 19 nt, Homo sapiens
  misc_RNA (1)...(19): siRNA sense strand
ucaaacagacucacaacaa

SEQ ID NO: 92256 - RNA, 19 nt, Homo sapiens
  misc_RNA (1)...(19): siRNA sense strand
acacagaaauuuagaaagc

SEQ ID NO: 92257 - RNA, 19 nt, Homo sapiens
  misc_RNA (1)...(19): siRNA sense strand
gcuaacagcaacacagaaa

SEQ ID NO: 92258 - RNA, 19 nt, Homo sapiens
  misc_RNA (1)...(19): siRNA sense strand
gaauacagcuuagaaaaca

SEQ ID NO: 92259 - RNA, 19 nt, Homo sapiens
  misc_RNA (1)...(19): siRNA sense strand
gcaggaagcaccaauggau

SEQ ID NO: 92260 - RNA, 19 nt, Homo sapiens
  misc_RNA (1)...(19): siRNA sense strand
ggaauaggcauuaauccau

SEQ ID NO: 92261 - RNA, 19 nt, Homo sapiens
  misc_RNA (1)...(19): siRNA sense strand
uauacaggauccagauauu

SEQ ID NO: 92262 - RNA, 19 nt, Homo sapiens
  misc_RNA (1)...(19): siRNA sense strand
gcagagauuuuguuuugaa

SEQ ID NO: 92263 - RNA, 19 nt, Homo sapiens
  misc_RNA (1)...(19): siRNA sense strand
uuacuuugguguagaagaa

SEQ ID NO: 92264 - RNA, 19 nt, Homo sapiens
  misc_RNA (1)...(19): siRNA sense strand
caaacagacucacaacaac

SEQ ID NO: 92265 - RNA, 19 nt, Homo sapiens
  misc_RNA (1)...(19): siRNA sense strand
aagagaagaagaaggaaua

SEQ ID NO: 92266 - RNA, 19 nt, Homo sapiens
  misc_RNA (1)...(19): siRNA sense strand
cauuugaucugauugaaca

SEQ ID NO: 92267 - RNA, 19 nt, Homo sapiens
  misc_RNA (1)...(19): siRNA sense strand
ugcauuacccugucucuua

SEQ ID NO: 92268 - RNA, 19 nt, Homo sapiens
  misc_RNA (1)...(19): siRNA sense strand
gauauucaaacacagguaa

SEQ ID NO: 92269 - RNA, 19 nt, Homo sapiens
  misc_RNA (1)...(19): siRNA sense strand
uaagggcaguugguaauau

SEQ ID NO: 92270 - RNA, 19 nt, Homo sapiens
  misc_RNA (1)...(19): siRNA sense strand
ugaaauacuuccaccucuu

SEQ ID NO: 92271 - RNA, 19 nt, Homo sapiens
  misc_RNA (1)...(19): siRNA sense strand
ccagaaaugaugaaucuau

SEQ ID NO: 92272 - RNA, 19 nt, Homo sapiens
  misc_RNA (1)...(19): siRNA sense strand
ccaccaauagaucaaguua

SEQ ID NO: 92273 - RNA, 19 nt, Homo sapiens
  misc_RNA (1)...(19): siRNA sense strand
uacccugucucuuacauuu

SEQ ID NO: 92274 - RNA, 19 nt, Homo sapiens
  misc_RNA (1)...(19): siRNA sense strand
acagaaaccaggaguugua

SEQ ID NO: 92275 - RNA, 19 nt, Homo sapiens
  misc_RNA (1)...(19): siRNA sense strand
ccuaaauccucaagagaug

SEQ ID NO: 92276 - RNA, 19 nt, Homo sapiens
  misc_RNA (1)...(19): siRNA sense strand
uggauggauuucaacuuua

SEQ ID NO: 92277 - RNA, 19 nt, Homo sapiens
  misc_RNA (1)...(19): siRNA sense strand
gaacuuuucugcauaccaa

SEQ ID NO: 92278 - RNA, 19 nt, Homo sapiens
  misc_RNA (1)...(19): siRNA sense strand
gaagagaagaagaaggaau

SEQ ID NO: 92279 - RNA, 19 nt, Homo sapiens
  misc_RNA (1)...(19): siRNA sense strand
gcauuacccugucucuuac

SEQ ID NO: 92280 - RNA, 19 nt, Homo sapiens
  misc_RNA (1)...(19): siRNA sense strand
gaucaacagcuaacagcaa

SEQ ID NO: 92281 - RNA, 19 nt, Homo sapiens
  misc_RNA (1)...(19): siRNA sense strand
uaauaaugcugaucaacag

SEQ ID NO: 92282 - RNA, 19 nt, Homo sapiens
  misc_RNA (1)...(19): siRNA sense strand
aaacccuccuccaaacuuu

SEQ ID NO: 92283 - RNA, 19 nt, Homo sapiens
  misc_RNA (1)...(19): siRNA sense strand
auacugugcucucauugaa

SEQ ID NO: 92284 - RNA, 19 nt, Homo sapiens
  misc_RNA (1)...(19): siRNA sense strand
gauaugguucagaugauuu

SEQ ID NO: 92285 - RNA, 19 nt, Homo sapiens
  misc_RNA (1)...(19): siRNA sense strand
auggauggauuucaacuuu

SEQ ID NO: 92286 - RNA, 19 nt, Homo sapiens
  misc_RNA (1)...(19): siRNA sense strand
gaagaugaccccagcauug

SEQ ID NO: 92287 - RNA, 19 nt, Homo sapiens
  misc_RNA (1)...(19): siRNA sense strand
gauugaacauuacuuuggu

SEQ ID NO: 92288 - RNA, 19 nt, Homo sapiens
  misc_RNA (1)...(19): siRNA sense strand
acaagaaucuaagcagaau

SEQ ID NO: 92289 - RNA, 19 nt, Homo sapiens
  misc_RNA (1)...(19): siRNA sense strand
gcagugacccagauguguu

SEQ ID NO: 92290 - RNA, 19 nt, Homo sapiens
  misc_RNA (1)...(19): siRNA sense strand
acaaauauagcaucuggaa

SEQ ID NO: 92291 - RNA, 19 nt, Homo sapiens
  misc_RNA (1)...(19): siRNA sense strand
aagcauauggucuggauaa

SEQ ID NO: 92292 - RNA, 19 nt, Homo sapiens
  misc_RNA (1)...(19): siRNA sense strand
ccgauggacccaaugauaa

SEQ ID NO: 92293 - RNA, 19 nt, Homo sapiens
  misc_RNA (1)...(19): siRNA sense strand
ucacgacuguuguuuagca

SEQ ID NO: 92294 - RNA, 19 nt, Homo sapiens
  misc_RNA (1)...(19): siRNA sense strand
ggaguuguacagagauuug

SEQ ID NO: 92295 - RNA, 19 nt, Homo sapiens
  misc_RNA (1)...(19): siRNA sense strand
gcucagauucaggcuguua

SEQ ID NO: 92296 - RNA, 19 nt, Homo sapiens
  misc_RNA (1)...(19): siRNA sense strand
agggaaagauaacuauaga

SEQ ID NO: 92297 - RNA, 19 nt, Homo sapiens
  misc_RNA (1)...(19): siRNA sense strand
gcuaguccagggaaagaua

SEQ ID NO: 92298 - RNA, 19 nt, Homo sapiens
  misc_RNA (1)...(19): siRNA sense strand
ccuccaaacuuuaguaagg

SEQ ID NO: 92299 - RNA, 19 nt, Homo sapiens
  misc_RNA (1)...(19): siRNA sense strand
ggcuauaacuaaugcaaca

SEQ ID NO: 92300 - RNA, 19 nt, Homo sapiens
  misc_RNA (1)...(19): siRNA sense strand
gcauuaagggcaguuggua

SEQ ID NO: 92301 - RNA, 19 nt, Homo sapiens
  misc_RNA (1)...(19): siRNA sense strand
ccucucaaauuuauguaga

SEQ ID NO: 92302 - RNA, 19 nt, Homo sapiens
  misc_RNA (1)...(19): siRNA sense strand
ggcuuuaaauggacuugaa

SEQ ID NO: 92303 - RNA, 19 nt, Homo sapiens
  misc_RNA (1)...(19): siRNA sense strand
acagauaugguucagauga

SEQ ID NO: 92304 - RNA, 19 nt, Homo sapiens
  misc_RNA (1)...(19): siRNA sense strand
aaaccacuuugugaucuuu

SEQ ID NO: 92305 - RNA, 19 nt, Homo sapiens
  misc_RNA (1)...(19): siRNA sense strand
aggaagaaguuguuacuac

SEQ ID NO: 92306 - RNA, 19 nt, Homo sapiens
  misc_RNA (1)...(19): siRNA sense strand
gaaucuaagcagaauggaa

SEQ ID NO: 92307 - RNA, 19 nt, Homo sapiens
  misc_RNA (1)...(19): siRNA sense strand
uaaaccacuuugugaucuu

SEQ ID NO: 92308 - RNA, 19 nt, Homo sapiens
  misc_RNA (1)...(19): siRNA sense strand
aaauagagcucagauucag

SEQ ID NO: 92309 - RNA, 19 nt, Homo sapiens
  misc_RNA (1)...(19): siRNA sense strand
gcaguugguaauauuguga

SEQ ID NO: 92310 - RNA, 19 nt, Homo sapiens
  misc_RNA (1)...(19): siRNA sense strand
cgauggacccaaugauaaa

SEQ ID NO: 92311 - RNA, 19 nt, Homo sapiens
  misc_RNA (1)...(19): siRNA sense strand
guugggcccuuucuuaucu

SEQ ID NO: 92312 - RNA, 19 nt, Homo sapiens
  misc_RNA (1)...(19): siRNA sense strand
ugucacgacuguuguuuag

SEQ ID NO: 92313 - RNA, 19 nt, Homo sapiens
  misc_RNA (1)...(19): siRNA sense strand
gcaacacagaaauuuagaa

SEQ ID NO: 92314 - RNA, 19 nt, Homo sapiens
  misc_RNA (1)...(19): siRNA sense strand
cagcaacacagaaauuuag

SEQ ID NO: 92315 - RNA, 19 nt, Homo sapiens
  misc_RNA (1)...(19): siRNA sense strand
aagaaguuguuacuacaga

SEQ ID NO: 92316 - RNA, 19 nt, Homo sapiens
  misc_RNA (1)...(19): siRNA sense strand
uggagucugucgaagauug

SEQ ID NO: 92317 - RNA, 19 nt, Homo sapiens
  misc_RNA (1)...(19): siRNA sense strand
ucaggaaauuuaccagaag

SEQ ID NO: 92318 - RNA, 19 nt, Homo sapiens
  misc_RNA (1)...(19): siRNA sense strand
cauauggucuggauaaaau

SEQ ID NO: 92319 - RNA, 19 nt, Homo sapiens
  misc_RNA (1)...(19): siRNA sense strand
gcccaaaggagucaauuag

SEQ ID NO: 92320 - RNA, 19 nt, Homo sapiens
  misc_RNA (1)...(19): siRNA sense strand
gauaguggcucuugauuua

SEQ ID NO: 92321 - RNA, 19 nt, Homo sapiens
  misc_RNA (1)...(19): siRNA sense strand
gaauuggccugaccucuua

SEQ ID NO: 92322 - RNA, 19 nt, Homo sapiens
  misc_RNA (1)...(19): siRNA sense strand
guauagagaugcagccuua

SEQ ID NO: 92323 - RNA, 19 nt, Homo sapiens
  misc_RNA (1)...(19): siRNA sense strand
gaacugcugccacauauuu

SEQ ID NO: 92324 - RNA, 19 nt, Homo sapiens
  misc_RNA (1)...(19): siRNA sense strand
ccaaagacguuguuagaga

SEQ ID NO: 92325 - RNA, 19 nt, Homo sapiens
  misc_RNA (1)...(19): siRNA sense strand
guaaauaccagcauaagaa

SEQ ID NO: 92326 - RNA, 19 nt, Homo sapiens
  misc_RNA (1)...(19): siRNA sense strand
caaccuaaauccagaauuc

SEQ ID NO: 92327 - RNA, 19 nt, Homo sapiens
  misc_RNA (1)...(19): siRNA sense strand
caucaugauucccaaauuu

SEQ ID NO: 92328 - RNA, 19 nt, Homo sapiens
  misc_RNA (1)...(19): siRNA sense strand
uaaguugauuccuguguua

SEQ ID NO: 92329 - RNA, 19 nt, Homo sapiens
  misc_RNA (1)...(19): siRNA sense strand
uaaggcaucuuccuaaguu

SEQ ID NO: 92330 - RNA, 19 nt, Homo sapiens
  misc_RNA (1)...(19): siRNA sense strand
gcaaauguguaucgugaug

SEQ ID NO: 92331 - RNA, 19 nt, Homo sapiens
  misc_RNA (1)...(19): siRNA sense strand
caaagacguuguuagagaa

SEQ ID NO: 92332 - RNA, 19 nt, Homo sapiens
  misc_RNA (1)...(19): siRNA sense strand
uggaacaacuuaaucagua

SEQ ID NO: 92333 - RNA, 19 nt, Homo sapiens
  misc_RNA (1)...(19): siRNA sense strand
caucauggauuaacccaaa

SEQ ID NO: 92334 - RNA, 19 nt, Homo sapiens
  misc_RNA (1)...(19): siRNA sense strand
caucaugaauggguuguua

SEQ ID NO: 92335 - RNA, 19 nt, Homo sapiens
  misc_RNA (1)...(19): siRNA sense strand
uuacaguucuucaagcaua

SEQ ID NO: 92336 - RNA, 19 nt, Homo sapiens
  misc_RNA (1)...(19): siRNA sense strand
ccaguuuccucuucccuua

SEQ ID NO: 92337 - RNA, 19 nt, Homo sapiens
  misc_RNA (1)...(19): siRNA sense strand
gaaguaacauccugacacu

SEQ ID NO: 92338 - RNA, 19 nt, Homo sapiens
  misc_RNA (1)...(19): siRNA sense strand
ugaauggguuguuaaagaa

SEQ ID NO: 92339 - RNA, 19 nt, Homo sapiens
  misc_RNA (1)...(19): siRNA sense strand
gcaaagauguacucguaag

SEQ ID NO: 92340 - RNA, 19 nt, Homo sapiens
  misc_RNA (1)...(19): siRNA sense strand
ggaacaacuuaaucaguau

SEQ ID NO: 92341 - RNA, 19 nt, Homo sapiens
  misc_RNA (1)...(19): siRNA sense strand
acacguaccugaagccauu

SEQ ID NO: 92342 - RNA, 19 nt, Homo sapiens
  misc_RNA (1)...(19): siRNA sense strand
gagcuuauuccucaccuua

SEQ ID NO: 92343 - RNA, 19 nt, Homo sapiens
  misc_RNA (1)...(19): siRNA sense strand
gaagauuugugaagauucu

SEQ ID NO: 92344 - RNA, 19 nt, Homo sapiens
  misc_RNA (1)...(19): siRNA sense strand
aaacaaugcucaaccagau

SEQ ID NO: 92345 - RNA, 19 nt, Homo sapiens
  misc_RNA (1)...(19): siRNA sense strand
gacucaagcucuaauguug

SEQ ID NO: 92346 - RNA, 19 nt, Homo sapiens
  misc_RNA (1)...(19): siRNA sense strand
ggccugaccucuuaccaaa

SEQ ID NO: 92347 - RNA, 19 nt, Homo sapiens
  misc_RNA (1)...(19): siRNA sense strand
ucaaauggguauagagaug

SEQ ID NO: 92348 - RNA, 19 nt, Homo sapiens
  misc_RNA (1)...(19): siRNA sense strand
gcuaaugccuccacugauc

SEQ ID NO: 92349 - RNA, 19 nt, Homo sapiens
  misc_RNA (1)...(19): siRNA sense strand
ggacaucauuuaaacaaac

SEQ ID NO: 92350 - RNA, 19 nt, Homo sapiens
  misc_RNA (1)...(19): siRNA sense strand
uuucagaacuucccaaaug

SEQ ID NO: 92351 - RNA, 19 nt, Homo sapiens
  misc_RNA (1)...(19): siRNA sense strand
ggaaaaggauucagcauuc

SEQ ID NO: 92352 - RNA, 19 nt, Homo sapiens
  misc_RNA (1)...(19): siRNA sense strand
gagaauacagcaauaacaa

SEQ ID NO: 92353 - RNA, 19 nt, Homo sapiens
  misc_RNA (1)...(19): siRNA sense strand
ugaagauucugcugagauu

SEQ ID NO: 92354 - RNA, 19 nt, Homo sapiens
  misc_RNA (1)...(19): siRNA sense strand
gcacaagccaugcuaaaca

SEQ ID NO: 92355 - RNA, 19 nt, Homo sapiens
  misc_RNA (1)...(19): siRNA sense strand
auaacaugcuggacucuua

SEQ ID NO: 92356 - RNA, 19 nt, Homo sapiens
  misc_RNA (1)...(19): siRNA sense strand
gaagaugaacccacaagau

SEQ ID NO: 92357 - RNA, 19 nt, Homo sapiens
  misc_RNA (1)...(19): siRNA sense strand
gccguugcaucauggauua

SEQ ID NO: 92358 - RNA, 19 nt, Homo sapiens
  misc_RNA (1)...(19): siRNA sense strand
auaugaagcuccagauaaa

SEQ ID NO: 92359 - RNA, 19 nt, Homo sapiens
  misc_RNA (1)...(19): siRNA sense strand
ccagaaauggaacauguua

SEQ ID NO: 92360 - RNA, 19 nt, Homo sapiens
  misc_RNA (1)...(19): siRNA sense strand
cauaagaaccugcucauuc

SEQ ID NO: 92361 - RNA, 19 nt, Homo sapiens
  misc_RNA (1)...(19): siRNA sense strand
gggcaugauuccauacuug

SEQ ID NO: 92362 - RNA, 19 nt, Homo sapiens
  misc_RNA (1)...(19): siRNA sense strand
gaugaacugcugccacaua

SEQ ID NO: 92363 - RNA, 19 nt, Homo sapiens
  misc_RNA (1)...(19): siRNA sense strand
ugaugaagauggaauugaa

SEQ ID NO: 92364 - RNA, 19 nt, Homo sapiens
  misc_RNA (1)...(19): siRNA sense strand
uaagggugauguugaagaa

SEQ ID NO: 92365 - RNA, 19 nt, Homo sapiens
  misc_RNA (1)...(19): siRNA sense strand
uuuagaagccugugaauuu

SEQ ID NO: 92366 - RNA, 19 nt, Homo sapiens
  misc_RNA (1)...(19): siRNA sense strand
gaacuucccaaauggugua

SEQ ID NO: 92367 - RNA, 19 nt, Homo sapiens
  misc_RNA (1)...(19): siRNA sense strand
ugaguggucuuaucuugaa

SEQ ID NO: 92368 - RNA, 19 nt, Homo sapiens
  misc_RNA (1)...(19): siRNA sense strand
guuagagaauacagcaaua

SEQ ID NO: 92369 - RNA, 19 nt, Homo sapiens
  misc_RNA (1)...(19): siRNA sense strand
guuaaagaaucaggcauuu

SEQ ID NO: 92370 - RNA, 19 nt, Homo sapiens
  misc_RNA (1)...(19): siRNA sense strand
augcaaagauguacucgua

SEQ ID NO: 92371 - RNA, 19 nt, Homo sapiens
  misc_RNA (1)...(19): siRNA sense strand
gguguaacagacuuuauua

SEQ ID NO: 92372 - RNA, 19 nt, Homo sapiens
  misc_RNA (1)...(19): siRNA sense strand
ggacuuggaggcaacauug

SEQ ID NO: 92373 - RNA, 19 nt, Homo sapiens
  misc_RNA (1)...(19): siRNA sense strand
ucaaccagaucaauaugaa

SEQ ID NO: 92374 - RNA, 19 nt, Homo sapiens
  misc_RNA (1)...(19): siRNA sense strand
gagcaagggcuucagcaaa

SEQ ID NO: 92375 - RNA, 19 nt, Homo sapiens
  misc_RNA (1)...(19): siRNA sense strand
caacaagagaguacaagaa

SEQ ID NO: 92376 - RNA, 19 nt, Homo sapiens
  misc_RNA (1)...(19): siRNA sense strand
ugacuccucuccucugauu

SEQ ID NO: 92377 - RNA, 19 nt, Homo sapiens
  misc_RNA (1)...(19): siRNA sense strand
agagacauguucuguaaga

SEQ ID NO: 92378 - RNA, 19 nt, Homo sapiens
  misc_RNA (1)...(19): siRNA sense strand
agaggaggcuuguacagaa

SEQ ID NO: 92379 - RNA, 19 nt, Homo sapiens
  misc_RNA (1)...(19): siRNA sense strand
gaagaagacgaaacgauuc

SEQ ID NO: 92380 - RNA, 19 nt, Homo sapiens
  misc_RNA (1)...(19): siRNA sense strand
gaaguacucagacauagau

SEQ ID NO: 92381 - RNA, 19 nt, Homo sapiens
  misc_RNA (1)...(19): siRNA sense strand
cagaagauuugugaagauu

SEQ ID NO: 92382 - RNA, 19 nt, Homo sapiens
  misc_RNA (1)...(19): siRNA sense strand
ugaagaagacgaaacgauu

SEQ ID NO: 92383 - RNA, 19 nt, Homo sapiens
  misc_RNA (1)...(19): siRNA sense strand
guggaaaccugacgagcaa

SEQ ID NO: 92384 - RNA, 19 nt, Homo sapiens
  misc_RNA (1)...(19): siRNA sense strand
guacucagacauagauauu

SEQ ID NO: 92385 - RNA, 19 nt, Homo sapiens
  misc_RNA (1)...(19): siRNA sense strand
ggacucaagaucaagauga

SEQ ID NO: 92386 - RNA, 19 nt, Homo sapiens
  misc_RNA (1)...(19): siRNA sense strand
ugcauuagcuggugaugaa

SEQ ID NO: 92387 - RNA, 19 nt, Homo sapiens
  misc_RNA (1)...(19): siRNA sense strand
gaagaauaaugugaaagca

SEQ ID NO: 92388 - RNA, 19 nt, Homo sapiens
  misc_RNA (1)...(19): siRNA sense strand
ggacucaagcucuaauguu

SEQ ID NO: 92389 - RNA, 19 nt, Homo sapiens
  misc_RNA (1)...(19): siRNA sense strand
caaaugguguaacagacuu

SEQ ID NO: 92390 - RNA, 19 nt, Homo sapiens
  misc_RNA (1)...(19): siRNA sense strand
ggaacauguuaaaggauga

SEQ ID NO: 92391 - RNA, 19 nt, Homo sapiens
  misc_RNA (1)...(19): siRNA sense strand
gcuuauuccucaccuuauu

SEQ ID NO: 92392 - RNA, 19 nt, Homo sapiens
  misc_RNA (1)...(19): siRNA sense strand
gacgaaacgauuccugaua

SEQ ID NO: 92393 - RNA, 19 nt, Homo sapiens
  misc_RNA (1)...(19): siRNA sense strand
gaacagccaauaugcaaag

SEQ ID NO: 92394 - RNA, 19 nt, Homo sapiens
  misc_RNA (1)...(19): siRNA sense strand
gaacccacaagaucauuga

SEQ ID NO: 92395 - RNA, 19 nt, Homo sapiens
  misc_RNA (1)...(19): siRNA sense strand
cauaagagacaaugaggaa

SEQ ID NO: 92396 - RNA, 19 nt, Homo sapiens
  misc_RNA (1)...(19): siRNA sense strand
caauuggucgucuugguua

SEQ ID NO: 92397 - RNA, 19 nt, Homo sapiens
  misc_RNA (1)...(19): siRNA sense strand
uaaucaguauccagacuuu

SEQ ID NO: 92398 - RNA, 19 nt, Homo sapiens
  misc_RNA (1)...(19): siRNA sense strand
gcaccagcuuguagaaauc

SEQ ID NO: 92399 - RNA, 19 nt, Homo sapiens
  misc_RNA (1)...(19): siRNA sense strand
gagaugcagccuuauauuc

SEQ ID NO: 92400 - RNA, 19 nt, Homo sapiens
  misc_RNA (1)...(19): siRNA sense strand
gccgagcacuugugauguu

SEQ ID NO: 92401 - RNA, 19 nt, Homo sapiens
  misc_RNA (1)...(19): siRNA sense strand
caauaugaagcuccagaua

SEQ ID NO: 92402 - RNA, 19 nt, Homo sapiens
  misc_RNA (1)...(19): siRNA sense strand
caugaaguacucagacaua

SEQ ID NO: 92403 - RNA, 19 nt, Homo sapiens
  misc_RNA (1)...(19): siRNA sense strand
acagaggacucaagaucaa

SEQ ID NO: 92404 - RNA, 19 nt, Homo sapiens
  misc_RNA (1)...(19): siRNA sense strand
gcaugugucaaucaguuua

SEQ ID NO: 92405 - RNA, 19 nt, Homo sapiens
  misc_RNA (1)...(19): siRNA sense strand
uuguauagcugauuucaug

SEQ ID NO: 92406 - RNA, 19 nt, Homo sapiens
  misc_RNA (1)...(19): siRNA sense strand
gcuaaacaaugcucaacca

SEQ ID NO: 92407 - RNA, 19 nt, Homo sapiens
  misc_RNA (1)...(19): siRNA sense strand
uuccuuaccuugcuuauau

SEQ ID NO: 92408 - RNA, 19 nt, Homo sapiens
  misc_RNA (1)...(19): siRNA sense strand
cagccaauaugcaaagaug

SEQ ID NO: 92409 - RNA, 19 nt, Homo sapiens
  misc_RNA (1)...(19): siRNA sense strand
aauaaggucucacgcuguu

SEQ ID NO: 92410 - RNA, 19 nt, Homo sapiens
  misc_RNA (1)...(19): siRNA sense strand
gcucuugugcguuccauaa

SEQ ID NO: 92411 - RNA, 19 nt, Homo sapiens
  misc_RNA (1)...(19): siRNA sense strand
gccaauaugcaaagaugua

SEQ ID NO: 92412 - RNA, 19 nt, Homo sapiens
  misc_RNA (1)...(19): siRNA sense strand
gacucaagaucaagaugaa

SEQ ID NO: 92413 - RNA, 19 nt, Homo sapiens
  misc_RNA (1)...(19): siRNA sense strand
gucaaucaguuuaucauca

SEQ ID NO: 92414 - RNA, 19 nt, Homo sapiens
  misc_RNA (1)...(19): siRNA sense strand
cagagaaccgugcaacaaa

SEQ ID NO: 92415 - RNA, 19 nt, Homo sapiens
  misc_RNA (1)...(19): siRNA sense strand
caccaaagacguuguuaga

SEQ ID NO: 92416 - RNA, 19 nt, Homo sapiens
  misc_RNA (1)...(19): siRNA sense strand
aauaugaagcuccagauaa

SEQ ID NO: 92417 - RNA, 19 nt, Homo sapiens
  misc_RNA (1)...(19): siRNA sense strand
cacaagccaugcuaaacaa

SEQ ID NO: 92418 - RNA, 19 nt, Homo sapiens
  misc_RNA (1)...(19): siRNA sense strand
gcaacaagagaguacaaga

SEQ ID NO: 92419 - RNA, 19 nt, Homo sapiens
  misc_RNA (1)...(19): siRNA sense strand
augaauggguuguuaaaga

SEQ ID NO: 92420 - RNA, 19 nt, Homo sapiens
  misc_RNA (1)...(19): siRNA sense strand
gauaguggcucuugauuua

SEQ ID NO: 92421 - RNA, 19 nt, Homo sapiens
  misc_RNA (1)...(19): siRNA sense strand
gaauuggccugaccucuua

SEQ ID NO: 92422 - RNA, 19 nt, Homo sapiens
  misc_RNA (1)...(19): siRNA sense strand
guauagagaugcagccuua

SEQ ID NO: 92423 - RNA, 19 nt, Homo sapiens
  misc_RNA (1)...(19): siRNA sense strand
gaacugcugccacauauuu

SEQ ID NO: 92424 - RNA, 19 nt, Homo sapiens
  misc_RNA (1)...(19): siRNA sense strand
ccaaagacguuguuagaga

SEQ ID NO: 92425 - RNA, 19 nt, Homo sapiens
  misc_RNA (1)...(19): siRNA sense strand
guaaauaccagcauaagaa

SEQ ID NO: 92426 - RNA, 19 nt, Homo sapiens
  misc_RNA (1)...(19): siRNA sense strand
caaccuaaauccagaauuc

SEQ ID NO: 92427 - RNA, 19 nt, Homo sapiens
  misc_RNA (1)...(19): siRNA sense strand
caucaugauucccaaauuu

SEQ ID NO: 92428 - RNA, 19 nt, Homo sapiens
  misc_RNA (1)...(19): siRNA sense strand
uaaguugauuccuguguua

SEQ ID NO: 92429 - RNA, 19 nt, Homo sapiens
  misc_RNA (1)...(19): siRNA sense strand
uaaggcaucuuccuaaguu

SEQ ID NO: 92430 - RNA, 19 nt, Homo sapiens
  misc_RNA (1)...(19): siRNA sense strand
gcaaauguguaucgugaug

SEQ ID NO: 92431 - RNA, 19 nt, Homo sapiens
  misc_RNA (1)...(19): siRNA sense strand
caaagacguuguuagagaa

SEQ ID NO: 92432 - RNA, 19 nt, Homo sapiens
  misc_RNA (1)...(19): siRNA sense strand
uggaacaacuuaaucagua

SEQ ID NO: 92433 - RNA, 19 nt, Homo sapiens
  misc_RNA (1)...(19): siRNA sense strand
caucauggauuaacccaaa

SEQ ID NO: 92434 - RNA, 19 nt, Homo sapiens
  misc_RNA (1)...(19): siRNA sense strand
caucaugaauggguuguua

SEQ ID NO: 92435 - RNA, 19 nt, Homo sapiens
  misc_RNA (1)...(19): siRNA sense strand
uuacaguucuucaagcaua

SEQ ID NO: 92436 - RNA, 19 nt, Homo sapiens
  misc_RNA (1)...(19): siRNA sense strand
ccaguuuccucuucccuua

SEQ ID NO: 92437 - RNA, 19 nt, Homo sapiens
  misc_RNA (1)...(19): siRNA sense strand
gaaguaacauccugacacu

SEQ ID NO: 92438 - RNA, 19 nt, Homo sapiens
  misc_RNA (1)...(19): siRNA sense strand
ugaauggguuguuaaagaa

SEQ ID NO: 92439 - RNA, 19 nt, Homo sapiens
  misc_RNA (1)...(19): siRNA sense strand
gcaaagauguacucguaag

SEQ ID NO: 92440 - RNA, 19 nt, Homo sapiens
  misc_RNA (1)...(19): siRNA sense strand
ggaacaacuuaaucaguau

SEQ ID NO: 92441 - RNA, 19 nt, Homo sapiens
  misc_RNA (1)...(19): siRNA sense strand
acacguaccugaagccauu

SEQ ID NO: 92442 - RNA, 19 nt, Homo sapiens
  misc_RNA (1)...(19): siRNA sense strand
gagcuuauuccucaccuua

SEQ ID NO: 92443 - RNA, 19 nt, Homo sapiens
  misc_RNA (1)...(19): siRNA sense strand
gaagauuugugaagauucu

SEQ ID NO: 92444 - RNA, 19 nt, Homo sapiens
  misc_RNA (1)...(19): siRNA sense strand
aaacaaugcucaaccagau

SEQ ID NO: 92445 - RNA, 19 nt, Homo sapiens
  misc_RNA (1)...(19): siRNA sense strand
gacucaagcucuaauguug

SEQ ID NO: 92446 - RNA, 19 nt, Homo sapiens
  misc_RNA (1)...(19): siRNA sense strand
ggccugaccucuuaccaaa

SEQ ID NO: 92447 - RNA, 19 nt, Homo sapiens
  misc_RNA (1)...(19): siRNA sense strand
ucaaauggguauagagaug

SEQ ID NO: 92448 - RNA, 19 nt, Homo sapiens
  misc_RNA (1)...(19): siRNA sense strand
gcuaaugccuccacugauc

SEQ ID NO: 92449 - RNA, 19 nt, Homo sapiens
  misc_RNA (1)...(19): siRNA sense strand
ggacaucauuuaaacaaac

SEQ ID NO: 92450 - RNA, 19 nt, Homo sapiens
  misc_RNA (1)...(19): siRNA sense strand
uuucagaacuucccaaaug

SEQ ID NO: 92451 - RNA, 19 nt, Homo sapiens
  misc_RNA (1)...(19): siRNA sense strand
ggaaaaggauucagcauuc

SEQ ID NO: 92452 - RNA, 19 nt, Homo sapiens
  misc_RNA (1)...(19): siRNA sense strand
gagaauacagcaauaacaa

SEQ ID NO: 92453 - RNA, 19 nt, Homo sapiens
  misc_RNA (1)...(19): siRNA sense strand
ugaagauucugcugagauu

SEQ ID NO: 92454 - RNA, 19 nt, Homo sapiens
  misc_RNA (1)...(19): siRNA sense strand
gcacaagccaugcuaaaca

SEQ ID NO: 92455 - RNA, 19 nt, Homo sapiens
  misc_RNA (1)...(19): siRNA sense strand
auaacaugcuggacucuua

SEQ ID NO: 92456 - RNA, 19 nt, Homo sapiens
  misc_RNA (1)...(19): siRNA sense strand
gaagaugaacccacaagau

SEQ ID NO: 92457 - RNA, 19 nt, Homo sapiens
  misc_RNA (1)...(19): siRNA sense strand
gccguugcaucauggauua

SEQ ID NO: 92458 - RNA, 19 nt, Homo sapiens
  misc_RNA (1)...(19): siRNA sense strand
auaugaagcuccagauaaa

SEQ ID NO: 92459 - RNA, 19 nt, Homo sapiens
  misc_RNA (1)...(19): siRNA sense strand
ccagaaauggaacauguua

SEQ ID NO: 92460 - RNA, 19 nt, Homo sapiens
  misc_RNA (1)...(19): siRNA sense strand
cauaagaaccugcucauuc

SEQ ID NO: 92461 - RNA, 19 nt, Homo sapiens
  misc_RNA (1)...(19): siRNA sense strand
gggcaugauuccauacuug

SEQ ID NO: 92462 - RNA, 19 nt, Homo sapiens
  misc_RNA (1)...(19): siRNA sense strand
gaugaacugcugccacaua

SEQ ID NO: 92463 - RNA, 19 nt, Homo sapiens
  misc_RNA (1)...(19): siRNA sense strand
ugaugaagauggaauugaa

SEQ ID NO: 92464 - RNA, 19 nt, Homo sapiens
  misc_RNA (1)...(19): siRNA sense strand
uaagggugauguugaagaa

SEQ ID NO: 92465 - RNA, 19 nt, Homo sapiens
  misc_RNA (1)...(19): siRNA sense strand
uuuagaagccugugaauuu

SEQ ID NO: 92466 - RNA, 19 nt, Homo sapiens
  misc_RNA (1)...(19): siRNA sense strand
gaacuucccaaauggugua

SEQ ID NO: 92467 - RNA, 19 nt, Homo sapiens
  misc_RNA (1)...(19): siRNA sense strand
ugaguggucuuaucuugaa

SEQ ID NO: 92468 - RNA, 19 nt, Homo sapiens
  misc_RNA (1)...(19): siRNA sense strand
guuagagaauacagcaaua

SEQ ID NO: 92469 - RNA, 19 nt, Homo sapiens
  misc_RNA (1)...(19): siRNA sense strand
guuaaagaaucaggcauuu

SEQ ID NO: 92470 - RNA, 19 nt, Homo sapiens
  misc_RNA (1)...(19): siRNA sense strand
augcaaagauguacucgua

SEQ ID NO: 92471 - RNA, 19 nt, Homo sapiens
  misc_RNA (1)...(19): siRNA sense strand
gguguaacagacuuuauua

SEQ ID NO: 92472 - RNA, 19 nt, Homo sapiens
  misc_RNA (1)...(19): siRNA sense strand
ggacuuggaggcaacauug

SEQ ID NO: 92473 - RNA, 19 nt, Homo sapiens
  misc_RNA (1)...(19): siRNA sense strand
ucaaccagaucaauaugaa

SEQ ID NO: 92474 - RNA, 19 nt, Homo sapiens
  misc_RNA (1)...(19): siRNA sense strand
gagcaagggcuucagcaaa

SEQ ID NO: 92475 - RNA, 19 nt, Homo sapiens
  misc_RNA (1)...(19): siRNA sense strand
caacaagagaguacaagaa

SEQ ID NO: 92476 - RNA, 19 nt, Homo sapiens
  misc_RNA (1)...(19): siRNA sense strand
ugacuccucuccucugauu

SEQ ID NO: 92477 - RNA, 19 nt, Homo sapiens
  misc_RNA (1)...(19): siRNA sense strand
agagacauguucuguaaga

SEQ ID NO: 92478 - RNA, 19 nt, Homo sapiens
  misc_RNA (1)...(19): siRNA sense strand
agaggaggcuuguacagaa

SEQ ID NO: 92479 - RNA, 19 nt, Homo sapiens
  misc_RNA (1)...(19): siRNA sense strand
gaagaagacgaaacgauuc

SEQ ID NO: 92480 - RNA, 19 nt, Homo sapiens
  misc_RNA (1)...(19): siRNA sense strand
gaaguacucagacauagau

SEQ ID NO: 92481 - RNA, 19 nt, Homo sapiens
  misc_RNA (1)...(19): siRNA sense strand
cagaagauuugugaagauu

SEQ ID NO: 92482 - RNA, 19 nt, Homo sapiens
  misc_RNA (1)...(19): siRNA sense strand
ugaagaagacgaaacgauu

SEQ ID NO: 92483 - RNA, 19 nt, Homo sapiens
  misc_RNA (1)...(19): siRNA sense strand
guggaaaccugacgagcaa

SEQ ID NO: 92484 - RNA, 19 nt, Homo sapiens
  misc_RNA (1)...(19): siRNA sense strand
guacucagacauagauauu

SEQ ID NO: 92485 - RNA, 19 nt, Homo sapiens
  misc_RNA (1)...(19): siRNA sense strand
ggacucaagaucaagauga

SEQ ID NO: 92486 - RNA, 19 nt, Homo sapiens
  misc_RNA (1)...(19): siRNA sense strand
ugcauuagcuggugaugaa

SEQ ID NO: 92487 - RNA, 19 nt, Homo sapiens
  misc_RNA (1)...(19): siRNA sense strand
gaagaauaaugugaaagca

SEQ ID NO: 92488 - RNA, 19 nt, Homo sapiens
  misc_RNA (1)...(19): siRNA sense strand
ggacucaagcucuaauguu

SEQ ID NO: 92489 - RNA, 19 nt, Homo sapiens
  misc_RNA (1)...(19): siRNA sense strand
caaaugguguaacagacuu

SEQ ID NO: 92490 - RNA, 19 nt, Homo sapiens
  misc_RNA (1)...(19): siRNA sense strand
ggaacauguuaaaggauga

SEQ ID NO: 92491 - RNA, 19 nt, Homo sapiens
  misc_RNA (1)...(19): siRNA sense strand
gcuuauuccucaccuuauu

SEQ ID NO: 92492 - RNA, 19 nt, Homo sapiens
  misc_RNA (1)...(19): siRNA sense strand
gacgaaacgauuccugaua

SEQ ID NO: 92493 - RNA, 19 nt, Homo sapiens
  misc_RNA (1)...(19): siRNA sense strand
gaacagccaauaugcaaag

SEQ ID NO: 92494 - RNA, 19 nt, Homo sapiens
  misc_RNA (1)...(19): siRNA sense strand
gaacccacaagaucauuga

SEQ ID NO: 92495 - RNA, 19 nt, Homo sapiens
  misc_RNA (1)...(19): siRNA sense strand
cauaagagacaaugaggaa

SEQ ID NO: 92496 - RNA, 19 nt, Homo sapiens
  misc_RNA (1)...(19): siRNA sense strand
caauuggucgucuugguua

SEQ ID NO: 92497 - RNA, 19 nt, Homo sapiens
  misc_RNA (1)...(19): siRNA sense strand
uaaucaguauccagacuuu

SEQ ID NO: 92498 - RNA, 19 nt, Homo sapiens
  misc_RNA (1)...(19): siRNA sense strand
gcaccagcuuguagaaauc

SEQ ID NO: 92499 - RNA, 19 nt, Homo sapiens
  misc_RNA (1)...(19): siRNA sense strand
gagaugcagccuuauauuc

SEQ ID NO: 92500 - RNA, 19 nt, Homo sapiens
  misc_RNA (1)...(19): siRNA sense strand
gccgagcacuugugauguu

SEQ ID NO: 92501 - RNA, 19 nt, Homo sapiens
  misc_RNA (1)...(19): siRNA sense strand
caauaugaagcuccagaua

SEQ ID NO: 92502 - RNA, 19 nt, Homo sapiens
  misc_RNA (1)...(19): siRNA sense strand
caugaaguacucagacaua

SEQ ID NO: 92503 - RNA, 19 nt, Homo sapiens
  misc_RNA (1)...(19): siRNA sense strand
acagaggacucaagaucaa

SEQ ID NO: 92504 - RNA, 19 nt, Homo sapiens
  misc_RNA (1)...(19): siRNA sense strand
gcaugugucaaucaguuua

SEQ ID NO: 92505 - RNA, 19 nt, Homo sapiens
  misc_RNA (1)...(19): siRNA sense strand
uuguauagcugauuucaug

SEQ ID NO: 92506 - RNA, 19 nt, Homo sapiens
  misc_RNA (1)...(19): siRNA sense strand
gcuaaacaaugcucaacca

SEQ ID NO: 92507 - RNA, 19 nt, Homo sapiens
  misc_RNA (1)...(19): siRNA sense strand
uuccuuaccuugcuuauau

SEQ ID NO: 92508 - RNA, 19 nt, Homo sapiens
  misc_RNA (1)...(19): siRNA sense strand
cagccaauaugcaaagaug

SEQ ID NO: 92509 - RNA, 19 nt, Homo sapiens
  misc_RNA (1)...(19): siRNA sense strand
aauaaggucucacgcuguu

SEQ ID NO: 92510 - RNA, 19 nt, Homo sapiens
  misc_RNA (1)...(19): siRNA sense strand
gcucuugugcguuccauaa

SEQ ID NO: 92511 - RNA, 19 nt, Homo sapiens
  misc_RNA (1)...(19): siRNA sense strand
gccaauaugcaaagaugua

SEQ ID NO: 92512 - RNA, 19 nt, Homo sapiens
  misc_RNA (1)...(19): siRNA sense strand
gacucaagaucaagaugaa

SEQ ID NO: 92513 - RNA, 19 nt, Homo sapiens
  misc_RNA (1)...(19): siRNA sense strand
gucaaucaguuuaucauca

SEQ ID NO: 92514 - RNA, 19 nt, Homo sapiens
  misc_RNA (1)...(19): siRNA sense strand
cagagaaccgugcaacaaa

SEQ ID NO: 92515 - RNA, 19 nt, Homo sapiens
  misc_RNA (1)...(19): siRNA sense strand
caccaaagacguuguuaga

SEQ ID NO: 92516 - RNA, 19 nt, Homo sapiens
  misc_RNA (1)...(19): siRNA sense strand
aauaugaagcuccagauaa

SEQ ID NO: 92517 - RNA, 19 nt, Homo sapiens
  misc_RNA (1)...(19): siRNA sense strand
cacaagccaugcuaaacaa

SEQ ID NO: 92518 - RNA, 19 nt, Homo sapiens
  misc_RNA (1)...(19): siRNA sense strand
gcaacaagagaguacaaga

SEQ ID NO: 92519 - RNA, 19 nt, Homo sapiens
  misc_RNA (1)...(19): siRNA sense strand
augaauggguuguuaaaga

SEQ ID NO: 92520 - RNA, 19 nt, Homo sapiens
  misc_RNA (1)...(19): siRNA sense strand
gcagggaaguggagcaaug

SEQ ID NO: 92521 - RNA, 19 nt, Homo sapiens
  misc_RNA (1)...(19): siRNA sense strand
cagagcagcugcaguccua

SEQ ID NO: 92522 - RNA, 19 nt, Homo sapiens
  misc_RNA (1)...(19): siRNA sense strand
ccaguuaccaguccuauuu

SEQ ID NO: 92523 - RNA, 19 nt, Homo sapiens
  misc_RNA (1)...(19): siRNA sense strand
gaaggagacuaugcaguuc

SEQ ID NO: 92524 - RNA, 19 nt, Homo sapiens
  misc_RNA (1)...(19): siRNA sense strand
ccgaggagcugaacaagca

SEQ ID NO: 92525 - RNA, 19 nt, Homo sapiens
  misc_RNA (1)...(19): siRNA sense strand
gagcugagacgcacaguca

SEQ ID NO: 92526 - RNA, 19 nt, Homo sapiens
  misc_RNA (1)...(19): siRNA sense strand
gagggcuccuucaauggua

SEQ ID NO: 92527 - RNA, 19 nt, Homo sapiens
  misc_RNA (1)...(19): siRNA sense strand
uugaggagcuccagcagaa

SEQ ID NO: 92528 - RNA, 19 nt, Homo sapiens
  misc_RNA (1)...(19): siRNA sense strand
gagcugacccugugcaagu

SEQ ID NO: 92529 - RNA, 19 nt, Homo sapiens
  misc_RNA (1)...(19): siRNA sense strand
agaaggagacuaugcaguu

SEQ ID NO: 92530 - RNA, 19 nt, Homo sapiens
  misc_RNA (1)...(19): siRNA sense strand
cagaagauccuguguacca

SEQ ID NO: 92531 - RNA, 19 nt, Homo sapiens
  misc_RNA (1)...(19): siRNA sense strand
cagcagaagauccugugua

SEQ ID NO: 92532 - RNA, 19 nt, Homo sapiens
  misc_RNA (1)...(19): siRNA sense strand
ugaaucgggugcugaacga

SEQ ID NO: 92533 - RNA, 19 nt, Homo sapiens
  misc_RNA (1)...(19): siRNA sense strand
gaaaacacgcugacagaga

SEQ ID NO: 92534 - RNA, 19 nt, Homo sapiens
  misc_RNA (1)...(19): siRNA sense strand
gaggagcuccagcagaaga

SEQ ID NO: 92535 - RNA, 19 nt, Homo sapiens
  misc_RNA (1)...(19): siRNA sense strand
ggagagcgaggacugcaau

SEQ ID NO: 92536 - RNA, 19 nt, Homo sapiens
  misc_RNA (1)...(19): siRNA sense strand
guagcgagaaggagacuau

SEQ ID NO: 92537 - RNA, 19 nt, Homo sapiens
  misc_RNA (1)...(19): siRNA sense strand
caagcuggcugcggaugau

SEQ ID NO: 92538 - RNA, 19 nt, Homo sapiens
  misc_RNA (1)...(19): siRNA sense strand
ugcgagggcuccuucaaug

SEQ ID NO: 92539 - RNA, 19 nt, Homo sapiens
  misc_RNA (1)...(19): siRNA sense strand
gaaguggagcaaugguuca

SEQ ID NO: 92540 - RNA, 19 nt, Homo sapiens
  misc_RNA (1)...(19): siRNA sense strand
guaccaagucugagaaugc

SEQ ID NO: 92541 - RNA, 19 nt, Homo sapiens
  misc_RNA (1)...(19): siRNA sense strand
gagcgaggacugcaaucug

SEQ ID NO: 92542 - RNA, 19 nt, Homo sapiens
  misc_RNA (1)...(19): siRNA sense strand
ucaacgcccuggagaucga

SEQ ID NO: 92543 - RNA, 19 nt, Homo sapiens
  misc_RNA (1)...(19): siRNA sense strand
gauccuguguaccaagucu

SEQ ID NO: 92544 - RNA, 19 nt, Homo sapiens
  misc_RNA (1)...(19): siRNA sense strand
gcugugggcccugcaauuc

SEQ ID NO: 92545 - RNA, 19 nt, Homo sapiens
  misc_RNA (1)...(19): siRNA sense strand
agaccaggagucaguauga

SEQ ID NO: 92546 - RNA, 19 nt, Homo sapiens
  misc_RNA (1)...(19): siRNA sense strand
gcggaugauuucagaacca

SEQ ID NO: 92547 - RNA, 19 nt, Homo sapiens
  misc_RNA (1)...(19): siRNA sense strand
gaugauuucagaaccaagu

SEQ ID NO: 92548 - RNA, 19 nt, Homo sapiens
  misc_RNA (1)...(19): siRNA sense strand
gggaaguggagcaaugguu

SEQ ID NO: 92549 - RNA, 19 nt, Homo sapiens
  misc_RNA (1)...(19): siRNA sense strand
gacccugucucuccaaucc

SEQ ID NO: 92550 - RNA, 19 nt, Homo sapiens
  misc_RNA (1)...(19): siRNA sense strand
ggagaucaucgagcugaga

SEQ ID NO: 92551 - RNA, 19 nt, Homo sapiens
  misc_RNA (1)...(19): siRNA sense strand
ugaacaagcaggugguauc

SEQ ID NO: 92552 - RNA, 19 nt, Homo sapiens
  misc_RNA (1)...(19): siRNA sense strand
uccaaucccuguaccucuu

SEQ ID NO: 92553 - RNA, 19 nt, Homo sapiens
  misc_RNA (1)...(19): siRNA sense strand
gcgagaaggagacuaugca

SEQ ID NO: 92554 - RNA, 19 nt, Homo sapiens
  misc_RNA (1)...(19): siRNA sense strand
agaagauccuguguaccaa

SEQ ID NO: 92555 - RNA, 19 nt, Homo sapiens
  misc_RNA (1)...(19): siRNA sense strand
gcacaaccugcgagacucu

SEQ ID NO: 92556 - RNA, 19 nt, Homo sapiens
  misc_RNA (1)...(19): siRNA sense strand
gaccaggagucaguaugag

SEQ ID NO: 92557 - RNA, 19 nt, Homo sapiens
  misc_RNA (1)...(19): siRNA sense strand
gcuuggagaccgccucaau

SEQ ID NO: 92558 - RNA, 19 nt, Homo sapiens
  misc_RNA (1)...(19): siRNA sense strand
agcagaagauccuguguac

SEQ ID NO: 92559 - RNA, 19 nt, Homo sapiens
  misc_RNA (1)...(19): siRNA sense strand
gaacaagcaggugguaucc

SEQ ID NO: 92560 - RNA, 19 nt, Homo sapiens
  misc_RNA (1)...(19): siRNA sense strand
guaugaggcccugguggaa

SEQ ID NO: 92561 - RNA, 19 nt, Homo sapiens
  misc_RNA (1)...(19): siRNA sense strand
ccaagcuggcugcggauga

SEQ ID NO: 92562 - RNA, 19 nt, Homo sapiens
  misc_RNA (1)...(19): siRNA sense strand
ugcagagccugaucaccaa

SEQ ID NO: 92563 - RNA, 19 nt, Homo sapiens
  misc_RNA (1)...(19): siRNA sense strand
ucaaugguagcgagaagga

SEQ ID NO: 92564 - RNA, 19 nt, Homo sapiens
  misc_RNA (1)...(19): siRNA sense strand
ggcugcggaugauuucaga

SEQ ID NO: 92565 - RNA, 19 nt, Homo sapiens
  misc_RNA (1)...(19): siRNA sense strand
gagaccaggagucaguaug

SEQ ID NO: 92566 - RNA, 19 nt, Homo sapiens
  misc_RNA (1)...(19): siRNA sense strand
cggaugauuucagaaccaa

SEQ ID NO: 92567 - RNA, 19 nt, Homo sapiens
  misc_RNA (1)...(19): siRNA sense strand
ugaacgagaccaggaguca

SEQ ID NO: 92568 - RNA, 19 nt, Homo sapiens
  misc_RNA (1)...(19): siRNA sense strand
cagcacaaccugcgagacu

SEQ ID NO: 92569 - RNA, 19 nt, Homo sapiens
  misc_RNA (1)...(19): siRNA sense strand
agaccgaggagcugaacaa

SEQ ID NO: 92570 - RNA, 19 nt, Homo sapiens
  misc_RNA (1)...(19): siRNA sense strand
agacuaugcaguuccugaa

SEQ ID NO: 92571 - RNA, 19 nt, Homo sapiens
  misc_RNA (1)...(19): siRNA sense strand
acgcggagcuggagaaccu

SEQ ID NO: 92572 - RNA, 19 nt, Homo sapiens
  misc_RNA (1)...(19): siRNA sense strand
gcugaacaagcagguggua

SEQ ID NO: 92573 - RNA, 19 nt, Homo sapiens
  misc_RNA (1)...(19): siRNA sense strand
ccaaugugagcaacugcaa

SEQ ID NO: 92574 - RNA, 19 nt, Homo sapiens
  misc_RNA (1)...(19): siRNA sense strand
ucaacggucugcgcaggau

SEQ ID NO: 92575 - RNA, 19 nt, Homo sapiens
  misc_RNA (1)...(19): siRNA sense strand
gcagggacguggaggaaug

SEQ ID NO: 92576 - RNA, 19 nt, Homo sapiens
  misc_RNA (1)...(19): siRNA sense strand
guggaggaaugguucaaua

SEQ ID NO: 92577 - RNA, 19 nt, Homo sapiens
  misc_RNA (1)...(19): siRNA sense strand
gaaaccaugcaguuccuua

SEQ ID NO: 92578 - RNA, 19 nt, Homo sapiens
  misc_RNA (1)...(19): siRNA sense strand
aaaccuaucuauccaguuc

SEQ ID NO: 92579 - RNA, 19 nt, Homo sapiens
  misc_RNA (1)...(19): siRNA sense strand
uggaggagcuuaaccaaca

SEQ ID NO: 92580 - RNA, 19 nt, Homo sapiens
  misc_RNA (1)...(19): siRNA sense strand
ggaugguugugaacauuga

SEQ ID NO: 92581 - RNA, 19 nt, Homo sapiens
  misc_RNA (1)...(19): siRNA sense strand
gaggaaugguucaauaugc

SEQ ID NO: 92582 - RNA, 19 nt, Homo sapiens
  misc_RNA (1)...(19): siRNA sense strand
gaaggaaaccaugcaguuc

SEQ ID NO: 92583 - RNA, 19 nt, Homo sapiens
  misc_RNA (1)...(19): siRNA sense strand
gcaaugagaaggaaaccau

SEQ ID NO: 92584 - RNA, 19 nt, Homo sapiens
  misc_RNA (1)...(19): siRNA sense strand
acugcaagcugcccuguaa

SEQ ID NO: 92585 - RNA, 19 nt, Homo sapiens
  misc_RNA (1)...(19): siRNA sense strand
ggaggaaugguucaauaug

SEQ ID NO: 92586 - RNA, 19 nt, Homo sapiens
  misc_RNA (1)...(19): siRNA sense strand
gagcugaugugccucaaaa

SEQ ID NO: 92587 - RNA, 19 nt, Homo sapiens
  misc_RNA (1)...(19): siRNA sense strand
uugaggagcuccagcagaa

SEQ ID NO: 92588 - RNA, 19 nt, Homo sapiens
  misc_RNA (1)...(19): siRNA sense strand
agacaucauugaccugaga

SEQ ID NO: 92589 - RNA, 19 nt, Homo sapiens
  misc_RNA (1)...(19): siRNA sense strand
gaacuaccagucagacauc

SEQ ID NO: 92590 - RNA, 19 nt, Homo sapiens
  misc_RNA (1)...(19): siRNA sense strand
caaacuggcugccgaugac

SEQ ID NO: 92591 - RNA, 19 nt, Homo sapiens
  misc_RNA (1)...(19): siRNA sense strand
ucaacacgcuggagaucga

SEQ ID NO: 92592 - RNA, 19 nt, Homo sapiens
  misc_RNA (1)...(19): siRNA sense strand
caccaugacuccugacuac

SEQ ID NO: 92593 - RNA, 19 nt, Homo sapiens
  misc_RNA (1)...(19): siRNA sense strand
caggaugguugugaacauu

SEQ ID NO: 92594 - RNA, 19 nt, Homo sapiens
  misc_RNA (1)...(19): siRNA sense strand
aaagaaccaugaggaggaa

SEQ ID NO: 92595 - RNA, 19 nt, Homo sapiens
  misc_RNA (1)...(19): siRNA sense strand
uugcaagccucucucaaga

SEQ ID NO: 92596 - RNA, 19 nt, Homo sapiens
  misc_RNA (1)...(19): siRNA sense strand
gaggagcuccagcagaaga

SEQ ID NO: 92597 - RNA, 19 nt, Homo sapiens
  misc_RNA (1)...(19): siRNA sense strand
agaaggaaaccaugcaguu

SEQ ID NO: 92598 - RNA, 19 nt, Homo sapiens
  misc_RNA (1)...(19): siRNA sense strand
caauggcaaugagaaggaa

SEQ ID NO: 92599 - RNA, 19 nt, Homo sapiens
  misc_RNA (1)...(19): siRNA sense strand
gaggagaugcggugucagu

SEQ ID NO: 92600 - RNA, 19 nt, Homo sapiens
  misc_RNA (1)...(19): siRNA sense strand
gguggaggccgacaucaau

SEQ ID NO: 92601 - RNA, 19 nt, Homo sapiens
  misc_RNA (1)...(19): siRNA sense strand
aaaccaugcaguuccuuaa

SEQ ID NO: 92602 - RNA, 19 nt, Homo sapiens
  misc_RNA (1)...(19): siRNA sense strand
agggcgagaucaacacgua

SEQ ID NO: 92603 - RNA, 19 nt, Homo sapiens
  misc_RNA (1)...(19): siRNA sense strand
ccaaacuggcugccgauga

SEQ ID NO: 92604 - RNA, 19 nt, Homo sapiens
  misc_RNA (1)...(19): siRNA sense strand
ccaggaugguugugaacau

SEQ ID NO: 92605 - RNA, 19 nt, Homo sapiens
  misc_RNA (1)...(19): siRNA sense strand
ccaugcaguuccuuaacga

SEQ ID NO: 92606 - RNA, 19 nt, Homo sapiens
  misc_RNA (1)...(19): siRNA sense strand
gguucaauaugcagaugga

SEQ ID NO: 92607 - RNA, 19 nt, Homo sapiens
  misc_RNA (1)...(19): siRNA sense strand
ugaaggaggagcugaugug

SEQ ID NO: 92608 - RNA, 19 nt, Homo sapiens
  misc_RNA (1)...(19): siRNA sense strand
uggaggagaugcgguguca

SEQ ID NO: 92609 - RNA, 19 nt, Homo sapiens
  misc_RNA (1)...(19): siRNA sense strand
gauggaggagcuuaaccaa

SEQ ID NO: 92610 - RNA, 19 nt, Homo sapiens
  misc_RNA (1)...(19): siRNA sense strand
ggagaugcggugucaguac

SEQ ID NO: 92611 - RNA, 19 nt, Homo sapiens
  misc_RNA (1)...(19): siRNA sense strand
guaccaaggcagagaaugc

SEQ ID NO: 92612 - RNA, 19 nt, Homo sapiens
  misc_RNA (1)...(19): siRNA sense strand
cuaccagucagacaucauu

SEQ ID NO: 92613 - RNA, 19 nt, Homo sapiens
  misc_RNA (1)...(19): siRNA sense strand
ucaauggcaaugagaagga

SEQ ID NO: 92614 - RNA, 19 nt, Homo sapiens
  misc_RNA (1)...(19): siRNA sense strand
gggaccgccuuaacaucga

SEQ ID NO: 92615 - RNA, 19 nt, Homo sapiens
  misc_RNA (1)...(19): siRNA sense strand
aggaaugguucaauaugca

SEQ ID NO: 92616 - RNA, 19 nt, Homo sapiens
  misc_RNA (1)...(19): siRNA sense strand
ggaggagcuuaaccaacag

SEQ ID NO: 92617 - RNA, 19 nt, Homo sapiens
  misc_RNA (1)...(19): siRNA sense strand
ggccuucaauggcaaugag

SEQ ID NO: 92618 - RNA, 19 nt, Homo sapiens
  misc_RNA (1)...(19): siRNA sense strand
gcaugaucaccaacguuga

SEQ ID NO: 92619 - RNA, 19 nt, Homo sapiens
  misc_RNA (1)...(19): siRNA sense strand
ucaccaugacuccugacua

SEQ ID NO: 92620 - RNA, 19 nt, Homo sapiens
  misc_RNA (1)...(19): siRNA sense strand
ggagcugaugugccucaaa

SEQ ID NO: 92621 - RNA, 19 nt, Homo sapiens
  misc_RNA (1)...(19): siRNA sense strand
gagcugugccugggcuaug

SEQ ID NO: 92622 - RNA, 19 nt, Homo sapiens
  misc_RNA (1)...(19): siRNA sense strand
caacagguggccacaagcu

SEQ ID NO: 92623 - RNA, 19 nt, Homo sapiens
  misc_RNA (1)...(19): siRNA sense strand
uggaggaaugguucaauau

SEQ ID NO: 92624 - RNA, 19 nt, Homo sapiens
  misc_RNA (1)...(19): siRNA sense strand
ucucauuucaggaccauug

SEQ ID NO: 92625 - RNA, 19 nt, Homo sapiens
  misc_RNA (1)...(19): siRNA sense strand
gcagaugacuucagaacca

SEQ ID NO: 92626 - RNA, 19 nt, Homo sapiens
  misc_RNA (1)...(19): siRNA sense strand
gcagggaaguggagcaaug

SEQ ID NO: 92627 - RNA, 19 nt, Homo sapiens
  misc_RNA (1)...(19): siRNA sense strand
gaaggagacuaugcaguuc

SEQ ID NO: 92628 - RNA, 19 nt, Homo sapiens
  misc_RNA (1)...(19): siRNA sense strand
gcagaaccaugagcaggaa

SEQ ID NO: 92629 - RNA, 19 nt, Homo sapiens
  misc_RNA (1)...(19): siRNA sense strand
ccgaggagcugaacaagca

SEQ ID NO: 92630 - RNA, 19 nt, Homo sapiens
  misc_RNA (1)...(19): siRNA sense strand
gagcugagacgcacaguca

SEQ ID NO: 92631 - RNA, 19 nt, Homo sapiens
  misc_RNA (1)...(19): siRNA sense strand
cggagcagcugcaguccua

SEQ ID NO: 92632 - RNA, 19 nt, Homo sapiens
  misc_RNA (1)...(19): siRNA sense strand
uugaggagcuccagcagaa

SEQ ID NO: 92633 - RNA, 19 nt, Homo sapiens
  misc_RNA (1)...(19): siRNA sense strand
gcaacaccuuuggguacua

SEQ ID NO: 92634 - RNA, 19 nt, Homo sapiens
  misc_RNA (1)...(19): siRNA sense strand
agaaggagacuaugcaguu

SEQ ID NO: 92635 - RNA, 19 nt, Homo sapiens
  misc_RNA (1)...(19): siRNA sense strand
gcagcgagaaggagacuau

SEQ ID NO: 92636 - RNA, 19 nt, Homo sapiens
  misc_RNA (1)...(19): siRNA sense strand
ucaaugcccuggagaucga

SEQ ID NO: 92637 - RNA, 19 nt, Homo sapiens
  misc_RNA (1)...(19): siRNA sense strand
gaaaacacgcugacagaga

SEQ ID NO: 92638 - RNA, 19 nt, Homo sapiens
  misc_RNA (1)...(19): siRNA sense strand
gaggagcuccagcagaaga

SEQ ID NO: 92639 - RNA, 19 nt, Homo sapiens
  misc_RNA (1)...(19): siRNA sense strand
ggcagaaccaggaguauca

SEQ ID NO: 92640 - RNA, 19 nt, Homo sapiens
  misc_RNA (1)...(19): siRNA sense strand
caagcuggcugcagaugac

SEQ ID NO: 92641 - RNA, 19 nt, Homo sapiens
  misc_RNA (1)...(19): siRNA sense strand
caacaccuuuggguacuag

SEQ ID NO: 92642 - RNA, 19 nt, Homo sapiens
  misc_RNA (1)...(19): siRNA sense strand
ugcgagggcuccuucaaug

SEQ ID NO: 92643 - RNA, 19 nt, Homo sapiens
  misc_RNA (1)...(19): siRNA sense strand
cccauuggauccuguguca

SEQ ID NO: 92644 - RNA, 19 nt, Homo sapiens
  misc_RNA (1)...(19): siRNA sense strand
ggcugcagaugacuucaga

SEQ ID NO: 92645 - RNA, 19 nt, Homo sapiens
  misc_RNA (1)...(19): siRNA sense strand
gcagcaagucugagaaugc

SEQ ID NO: 92646 - RNA, 19 nt, Homo sapiens
  misc_RNA (1)...(19): siRNA sense strand
agaccaggaaucaguauga

SEQ ID NO: 92647 - RNA, 19 nt, Homo sapiens
  misc_RNA (1)...(19): siRNA sense strand
uaccaguccuacuucaaga

SEQ ID NO: 92648 - RNA, 19 nt, Homo sapiens
  misc_RNA (1)...(19): siRNA sense strand
ugaacgagaccaggaauca

SEQ ID NO: 92649 - RNA, 19 nt, Homo sapiens
  misc_RNA (1)...(19): siRNA sense strand
cagaugacuucagaaccaa

SEQ ID NO: 92650 - RNA, 19 nt, Homo sapiens
  misc_RNA (1)...(19): siRNA sense strand
gauccugugucaccaaucc

SEQ ID NO: 92651 - RNA, 19 nt, Homo sapiens
  misc_RNA (1)...(19): siRNA sense strand
gaccaggaaucaguaugag

SEQ ID NO: 92652 - RNA, 19 nt, Homo sapiens
  misc_RNA (1)...(19): siRNA sense strand
caccaccaaugcaugugaa

SEQ ID NO: 92653 - RNA, 19 nt, Homo sapiens
  misc_RNA (1)...(19): siRNA sense strand
gcacaaccugcgauacucu

SEQ ID NO: 92654 - RNA, 19 nt, Homo sapiens
  misc_RNA (1)...(19): siRNA sense strand
ccagcuaccaguccuacuu

SEQ ID NO: 92655 - RNA, 19 nt, Homo sapiens
  misc_RNA (1)...(19): siRNA sense strand
cugcgauacucucuggaaa

SEQ ID NO: 92656 - RNA, 19 nt, Homo sapiens
  misc_RNA (1)...(19): siRNA sense strand
gcugagacgcacagucaau

SEQ ID NO: 92657 - RNA, 19 nt, Homo sapiens
  misc_RNA (1)...(19): siRNA sense strand
ggagaucaucgagcugaga

SEQ ID NO: 92658 - RNA, 19 nt, Homo sapiens
  misc_RNA (1)...(19): siRNA sense strand
ugaacaagcaggugguauc

SEQ ID NO: 92659 - RNA, 19 nt, Homo sapiens
  misc_RNA (1)...(19): siRNA sense strand
gggaaguggagcaaugguu

SEQ ID NO: 92660 - RNA, 19 nt, Homo sapiens
  misc_RNA (1)...(19): siRNA sense strand
gcgagaaggagacuaugca

SEQ ID NO: 92661 - RNA, 19 nt, Homo sapiens
  misc_RNA (1)...(19): siRNA sense strand
ccaagcuggcugcagauga

SEQ ID NO: 92662 - RNA, 19 nt, Homo sapiens
  misc_RNA (1)...(19): siRNA sense strand
acugcaagcugcccuccaa

SEQ ID NO: 92663 - RNA, 19 nt, Homo sapiens
  misc_RNA (1)...(19): siRNA sense strand
guaugaggcccugguggaa

SEQ ID NO: 92664 - RNA, 19 nt, Homo sapiens
  misc_RNA (1)...(19): siRNA sense strand
gaacaagcaggugguaucc

SEQ ID NO: 92665 - RNA, 19 nt, Homo sapiens
  misc_RNA (1)...(19): siRNA sense strand
cagcacaaccugcgauacu

SEQ ID NO: 92666 - RNA, 19 nt, Homo sapiens
  misc_RNA (1)...(19): siRNA sense strand
ccaccaccaaugcauguga

SEQ ID NO: 92667 - RNA, 19 nt, Homo sapiens
  misc_RNA (1)...(19): siRNA sense strand
ugcagagccugaucaccaa

SEQ ID NO: 92668 - RNA, 19 nt, Homo sapiens
  misc_RNA (1)...(19): siRNA sense strand
agaagauccugugcagcaa

SEQ ID NO: 92669 - RNA, 19 nt, Homo sapiens
  misc_RNA (1)...(19): siRNA sense strand
ccagauggagucccugaag

SEQ ID NO: 92670 - RNA, 19 nt, Homo sapiens
  misc_RNA (1)...(19): siRNA sense strand
agaccgaggagcugaacaa

SEQ ID NO: 92671 - RNA, 19 nt, Homo sapiens
  misc_RNA (1)...(19): siRNA sense strand
gaacgagaccaggaaucag

SEQ ID NO: 92672 - RNA, 19 nt, Homo sapiens
  misc_RNA (1)...(19): siRNA sense strand
ucaauggcagcgagaagga

SEQ ID NO: 92673 - RNA, 19 nt, Homo sapiens
  misc_RNA (1)...(19): siRNA sense strand
agacuaugcaguuccugaa

SEQ ID NO: 92674 - RNA, 19 nt, Homo sapiens
  misc_RNA (1)...(19): siRNA sense strand
acgcggagcuggagaaccu

SEQ ID NO: 92675 - RNA, 19 nt, Homo sapiens
  misc_RNA (1)...(19): siRNA sense strand
gcugaacaagcagguggua

SEQ ID NO: 92676 - RNA, 19 nt, Homo sapiens
  misc_RNA (1)...(19): siRNA sense strand
ccaaugugagcaacugcaa

SEQ ID NO: 92677 - RNA, 19 nt, Homo sapiens
  misc_RNA (1)...(19): siRNA sense strand
ucacugcgcugccaacuug

SEQ ID NO: 92678 - RNA, 19 nt, Homo sapiens
  misc_RNA (1)...(19): siRNA sense strand
gagaugaggugccaguaug

SEQ ID NO: 92679 - RNA, 19 nt, Homo sapiens
  misc_RNA (1)...(19): siRNA sense strand
caugagagaugcuuuggaa

SEQ ID NO: 92680 - RNA, 19 nt, Homo sapiens
  misc_RNA (1)...(19): siRNA sense strand
gaagaaccaugaggaggaa

SEQ ID NO: 92681 - RNA, 19 nt, Homo sapiens
  misc_RNA (1)...(19): siRNA sense strand
ucgaggagcuccagaagaa

SEQ ID NO: 92682 - RNA, 19 nt, Homo sapiens
  misc_RNA (1)...(19): siRNA sense strand
caaauuggcugcagaugac

SEQ ID NO: 92683 - RNA, 19 nt, Homo sapiens
  misc_RNA (1)...(19): siRNA sense strand
aaacccugguggagaauaa

SEQ ID NO: 92684 - RNA, 19 nt, Homo sapiens
  misc_RNA (1)...(19): siRNA sense strand
ggucaacgcccuggagauu

SEQ ID NO: 92685 - RNA, 19 nt, Homo sapiens
  misc_RNA (1)...(19): siRNA sense strand
gcaaugagaaggagaccau

SEQ ID NO: 92686 - RNA, 19 nt, Homo sapiens
  misc_RNA (1)...(19): siRNA sense strand
ggugaccgccucaauguug

SEQ ID NO: 92687 - RNA, 19 nt, Homo sapiens
  misc_RNA (1)...(19): siRNA sense strand
ggagaugaggugccaguau

SEQ ID NO: 92688 - RNA, 19 nt, Homo sapiens
  misc_RNA (1)...(19): siRNA sense strand
cagcacagcaugagagaug

SEQ ID NO: 92689 - RNA, 19 nt, Homo sapiens
  misc_RNA (1)...(19): siRNA sense strand
gaggagcuccagaagaaga

SEQ ID NO: 92690 - RNA, 19 nt, Homo sapiens
  misc_RNA (1)...(19): siRNA sense strand
gaccugacccugugcaagu

SEQ ID NO: 92691 - RNA, 19 nt, Homo sapiens
  misc_RNA (1)...(19): siRNA sense strand
agaaggagaccaugcaauc

SEQ ID NO: 92692 - RNA, 19 nt, Homo sapiens
  misc_RNA (1)...(19): siRNA sense strand
gagagaugcuuuggaaucc

SEQ ID NO: 92693 - RNA, 19 nt, Homo sapiens
  misc_RNA (1)...(19): siRNA sense strand
ugagagaugcuuuggaauc

SEQ ID NO: 92694 - RNA, 19 nt, Homo sapiens
  misc_RNA (1)...(19): siRNA sense strand
gaaacccugguggagaaua

SEQ ID NO: 92695 - RNA, 19 nt, Homo sapiens
  misc_RNA (1)...(19): siRNA sense strand
augaaacccugguggagaa

SEQ ID NO: 92696 - RNA, 19 nt, Homo sapiens
  misc_RNA (1)...(19): siRNA sense strand
cuacucacccuccaaguca

SEQ ID NO: 92697 - RNA, 19 nt, Homo sapiens
  misc_RNA (1)...(19): siRNA sense strand
gagaaggagaccaugcaau

SEQ ID NO: 92698 - RNA, 19 nt, Homo sapiens
  misc_RNA (1)...(19): siRNA sense strand
agucaugccuucccugucu

SEQ ID NO: 92699 - RNA, 19 nt, Homo sapiens
  misc_RNA (1)...(19): siRNA sense strand
gaugaggugccaguaugaa

SEQ ID NO: 92700 - RNA, 19 nt, Homo sapiens
  misc_RNA (1)...(19): siRNA sense strand
gguuggacacccagaguga

SEQ ID NO: 92701 - RNA, 19 nt, Homo sapiens
  misc_RNA (1)...(19): siRNA sense strand
agaagacucuaugcagcaa

SEQ ID NO: 92702 - RNA, 19 nt, Homo sapiens
  misc_RNA (1)...(19): siRNA sense strand
gcuggaggcuucgcuacca

SEQ ID NO: 92703 - RNA, 19 nt, Homo sapiens
  misc_RNA (1)...(19): siRNA sense strand
cagaugacuucaggaccaa

SEQ ID NO: 92704 - RNA, 19 nt, Homo sapiens
  misc_RNA (1)...(19): siRNA sense strand
gagagccgcauccgugagu

SEQ ID NO: 92705 - RNA, 19 nt, Homo sapiens
  misc_RNA (1)...(19): siRNA sense strand
gaauccacccuggcagaga

SEQ ID NO: 92706 - RNA, 19 nt, Homo sapiens
  misc_RNA (1)...(19): siRNA sense strand
gccugaagaagaaccauga

SEQ ID NO: 92707 - RNA, 19 nt, Homo sapiens
  misc_RNA (1)...(19): siRNA sense strand
cagaagaagacucuaugca

SEQ ID NO: 92708 - RNA, 19 nt, Homo sapiens
  misc_RNA (1)...(19): siRNA sense strand
ggcuggugguggagauuga

SEQ ID NO: 92709 - RNA, 19 nt, Homo sapiens
  misc_RNA (1)...(19): siRNA sense strand
ggcagcugguggagucaga

SEQ ID NO: 92710 - RNA, 19 nt, Homo sapiens
  misc_RNA (1)...(19): siRNA sense strand
ucacuggcaaugagaagga

SEQ ID NO: 92711 - RNA, 19 nt, Homo sapiens
  misc_RNA (1)...(19): siRNA sense strand
gaaccaugaggaggaagug

SEQ ID NO: 92712 - RNA, 19 nt, Homo sapiens
  misc_RNA (1)...(19): siRNA sense strand
cuacaugugcccugacuac

SEQ ID NO: 92713 - RNA, 19 nt, Homo sapiens
  misc_RNA (1)...(19): siRNA sense strand
agacaaagcugcaguucua

SEQ ID NO: 92714 - RNA, 19 nt, Homo sapiens
  misc_RNA (1)...(19): siRNA sense strand
gaacauggacugcaucauu

SEQ ID NO: 92715 - RNA, 19 nt, Homo sapiens
  misc_RNA (1)...(19): siRNA sense strand
ggacauggccugccugauc

SEQ ID NO: 92716 - RNA, 19 nt, Homo sapiens
  misc_RNA (1)...(19): siRNA sense strand
acaaacugcuggagacaaa

SEQ ID NO: 92717 - RNA, 19 nt, Homo sapiens
  misc_RNA (1)...(19): siRNA sense strand
gcagcugccggaaauguua

SEQ ID NO: 92718 - RNA, 19 nt, Homo sapiens
  misc_RNA (1)...(19): siRNA sense strand
gagcagaggcuaugugaag

SEQ ID NO: 92719 - RNA, 19 nt, Homo sapiens
  misc_RNA (1)...(19): siRNA sense strand
gacauggccugccugauca

SEQ ID NO: 92720 - RNA, 19 nt, Homo sapiens
  misc_RNA (1)...(19): siRNA sense strand
gcuacaagaagaaguauga

SEQ ID NO: 92721 - RNA, 19 nt, Homo sapiens
  misc_RNA (1)...(19): siRNA sense strand
gaggcuaugugaaggcauu

SEQ ID NO: 92722 - RNA, 19 nt, Homo sapiens
  misc_RNA (1)...(19): siRNA sense strand
caacagcugagaacgaguu

SEQ ID NO: 92723 - RNA, 19 nt, Homo sapiens
  misc_RNA (1)...(19): siRNA sense strand
aacauggacugcaucauug

SEQ ID NO: 92724 - RNA, 19 nt, Homo sapiens
  misc_RNA (1)...(19): siRNA sense strand
gcaagugugaggagaugaa

SEQ ID NO: 92725 - RNA, 19 nt, Homo sapiens
  misc_RNA (1)...(19): siRNA sense strand
gcaccaaggaggagaucaa

SEQ ID NO: 92726 - RNA, 19 nt, Homo sapiens
  misc_RNA (1)...(19): siRNA sense strand
gagcaacagcugagaacga

SEQ ID NO: 92727 - RNA, 19 nt, Homo sapiens
  misc_RNA (1)...(19): siRNA sense strand
gccgggaccugaacaugga

SEQ ID NO: 92728 - RNA, 19 nt, Homo sapiens
  misc_RNA (1)...(19): siRNA sense strand
gagauuaaggcacaguaug

SEQ ID NO: 92729 - RNA, 19 nt, Homo sapiens
  misc_RNA (1)...(19): siRNA sense strand
gaacaaacugcuggagaca

SEQ ID NO: 92730 - RNA, 19 nt, Homo sapiens
  misc_RNA (1)...(19): siRNA sense strand
ggcacaguaugacgacauu

SEQ ID NO: 92731 - RNA, 19 nt, Homo sapiens
  misc_RNA (1)...(19): siRNA sense strand
gaggaggagguuucucuga

SEQ ID NO: 92732 - RNA, 19 nt, Homo sapiens
  misc_RNA (1)...(19): siRNA sense strand
agaaggagcagaucaaguc

SEQ ID NO: 92733 - RNA, 19 nt, Homo sapiens
  misc_RNA (1)...(19): siRNA sense strand
cagaucaagucccucaaca

SEQ ID NO: 92734 - RNA, 19 nt, Homo sapiens
  misc_RNA (1)...(19): siRNA sense strand
cagcaagugugaggagaug

SEQ ID NO: 92735 - RNA, 19 nt, Homo sapiens
  misc_RNA (1)...(19): siRNA sense strand
cuggagggcuacaagaaga

SEQ ID NO: 92736 - RNA, 19 nt, Homo sapiens
  misc_RNA (1)...(19): siRNA sense strand
acaucgagaucgccaccua

SEQ ID NO: 92737 - RNA, 19 nt, Homo sapiens
  misc_RNA (1)...(19): siRNA sense strand
agauuaaggcacaguauga

SEQ ID NO: 92738 - RNA, 19 nt, Homo sapiens
  misc_RNA (1)...(19): siRNA sense strand
cagcugagaacgaguuugu

SEQ ID NO: 92739 - RNA, 19 nt, Homo sapiens
  misc_RNA (1)...(19): siRNA sense strand
gcgugaagcaggaggagaa

SEQ ID NO: 92740 - RNA, 19 nt, Homo sapiens
  misc_RNA (1)...(19): siRNA sense strand
cugcaucauugccgagauu

SEQ ID NO: 92741 - RNA, 19 nt, Homo sapiens
  misc_RNA (1)...(19): siRNA sense strand
gagaaggagcagaucaagu

SEQ ID NO: 92742 - RNA, 19 nt, Homo sapiens
  misc_RNA (1)...(19): siRNA sense strand
ccaagugccagaacuccaa

SEQ ID NO: 92743 - RNA, 19 nt, Homo sapiens
  misc_RNA (1)...(19): siRNA sense strand
gaggagaaggagcagauca

SEQ ID NO: 92744 - RNA, 19 nt, Homo sapiens
  misc_RNA (1)...(19): siRNA sense strand
caacguggaggcccugauc

SEQ ID NO: 92745 - RNA, 19 nt, Homo sapiens
  misc_RNA (1)...(19): siRNA sense strand
gcaucauugccgagauuaa

SEQ ID NO: 92746 - RNA, 19 nt, Homo sapiens
  misc_RNA (1)...(19): siRNA sense strand
ugaagcaggaggagaagga

SEQ ID NO: 92747 - RNA, 19 nt, Homo sapiens
  misc_RNA (1)...(19): siRNA sense strand
ggagacaaagcugcaguuc

SEQ ID NO: 92748 - RNA, 19 nt, Homo sapiens
  misc_RNA (1)...(19): siRNA sense strand
gaggaggagauccgcauuc

SEQ ID NO: 92749 - RNA, 19 nt, Homo sapiens
  misc_RNA (1)...(19): siRNA sense strand
gaaguaugaggaggagguu

SEQ ID NO: 92750 - RNA, 19 nt, Homo sapiens
  misc_RNA (1)...(19): siRNA sense strand
ggagaaggagcagaucaag

SEQ ID NO: 92751 - RNA, 19 nt, Homo sapiens
  misc_RNA (1)...(19): siRNA sense strand
gaugaaggccacggugauc

SEQ ID NO: 92752 - RNA, 19 nt, Homo sapiens
  misc_RNA (1)...(19): siRNA sense strand
cagcgugugcggaggcuuu

SEQ ID NO: 92753 - RNA, 19 nt, Homo sapiens
  misc_RNA (1)...(19): siRNA sense strand
gcgaggagcagaggcuaug

SEQ ID NO: 92754 - RNA, 19 nt, Homo sapiens
  misc_RNA (1)...(19): siRNA sense strand
gagagcaacagcugagaac

SEQ ID NO: 92755 - RNA, 19 nt, Homo sapiens
  misc_RNA (1)...(19): siRNA sense strand
gcagaucaagucccucaac

SEQ ID NO: 92756 - RNA, 19 nt, Homo sapiens
  misc_RNA (1)...(19): siRNA sense strand
gagacaaagcugcaguucu

SEQ ID NO: 92757 - RNA, 19 nt, Homo sapiens
  misc_RNA (1)...(19): siRNA sense strand
gggaguaccaggaggugau

SEQ ID NO: 92758 - RNA, 19 nt, Homo sapiens
  misc_RNA (1)...(19): siRNA sense strand
gcagcaagugugaggagau

SEQ ID NO: 92759 - RNA, 19 nt, Homo sapiens
  misc_RNA (1)...(19): siRNA sense strand
cgagauuaaggcacaguau

SEQ ID NO: 92760 - RNA, 19 nt, Homo sapiens
  misc_RNA (1)...(19): siRNA sense strand
ugagagcaacagcugagaa

SEQ ID NO: 92761 - RNA, 19 nt, Homo sapiens
  misc_RNA (1)...(19): siRNA sense strand
caucauugccgagauuaag

SEQ ID NO: 92762 - RNA, 19 nt, Homo sapiens
  misc_RNA (1)...(19): siRNA sense strand
guuuguggcucugaagaag

SEQ ID NO: 92763 - RNA, 19 nt, Homo sapiens
  misc_RNA (1)...(19): siRNA sense strand
gaggagcagaggcuaugug

SEQ ID NO: 92764 - RNA, 19 nt, Homo sapiens
  misc_RNA (1)...(19): siRNA sense strand
gaagaaguaugaagaagaa

SEQ ID NO: 92765 - RNA, 19 nt, Homo sapiens
  misc_RNA (1)...(19): siRNA sense strand
agacaaagcugcaguucua

SEQ ID NO: 92766 - RNA, 19 nt, Homo sapiens
  misc_RNA (1)...(19): siRNA sense strand
gaacauggacugcaucguu

SEQ ID NO: 92767 - RNA, 19 nt, Homo sapiens
  misc_RNA (1)...(19): siRNA sense strand
gaaguaugaagaagaagua

SEQ ID NO: 92768 - RNA, 19 nt, Homo sapiens
  misc_RNA (1)...(19): siRNA sense strand
ccaagccgcugcugcauca

SEQ ID NO: 92769 - RNA, 19 nt, Homo sapiens
  misc_RNA (1)...(19): siRNA sense strand
gacauggccugccugauca

SEQ ID NO: 92770 - RNA, 19 nt, Homo sapiens
  misc_RNA (1)...(19): siRNA sense strand
gcuacaagaagaaguauga

SEQ ID NO: 92771 - RNA, 19 nt, Homo sapiens
  misc_RNA (1)...(19): siRNA sense strand
caagaagaaguaugaagaa

SEQ ID NO: 92772 - RNA, 19 nt, Homo sapiens
  misc_RNA (1)...(19): siRNA sense strand
gagcagaggcugugugaag

SEQ ID NO: 92773 - RNA, 19 nt, Homo sapiens
  misc_RNA (1)...(19): siRNA sense strand
gaacgaguuuguggcucua

SEQ ID NO: 92774 - RNA, 19 nt, Homo sapiens
  misc_RNA (1)...(19): siRNA sense strand
gagaugaaggccacaguga

SEQ ID NO: 92775 - RNA, 19 nt, Homo sapiens
  misc_RNA (1)...(19): siRNA sense strand
acaagcugcuggagacaaa

SEQ ID NO: 92776 - RNA, 19 nt, Homo sapiens
  misc_RNA (1)...(19): siRNA sense strand
aaagaaggauguggacugu

SEQ ID NO: 92777 - RNA, 19 nt, Homo sapiens
  misc_RNA (1)...(19): siRNA sense strand
acaagaagaaguaugaaga

SEQ ID NO: 92778 - RNA, 19 nt, Homo sapiens
  misc_RNA (1)...(19): siRNA sense strand
ucaaggcacaguaugauga

SEQ ID NO: 92779 - RNA, 19 nt, Homo sapiens
  misc_RNA (1)...(19): siRNA sense strand
gcaagugugaggagaugaa

SEQ ID NO: 92780 - RNA, 19 nt, Homo sapiens
  misc_RNA (1)...(19): siRNA sense strand
ggcacaguaugaugacauu

SEQ ID NO: 92781 - RNA, 19 nt, Homo sapiens
  misc_RNA (1)...(19): siRNA sense strand
gcaccaaggaggagaucaa

SEQ ID NO: 92782 - RNA, 19 nt, Homo sapiens
  misc_RNA (1)...(19): siRNA sense strand
gaugaaggccacagugauc

SEQ ID NO: 92783 - RNA, 19 nt, Homo sapiens
  misc_RNA (1)...(19): siRNA sense strand
cagcagagaacgaguuugu

SEQ ID NO: 92784 - RNA, 19 nt, Homo sapiens
  misc_RNA (1)...(19): siRNA sense strand
gccgggaccugaacaugga

SEQ ID NO: 92785 - RNA, 19 nt, Homo sapiens
  misc_RNA (1)...(19): siRNA sense strand
agacauggccugccugauc

SEQ ID NO: 92786 - RNA, 19 nt, Homo sapiens
  misc_RNA (1)...(19): siRNA sense strand
agaaggagcagaucaaguc

SEQ ID NO: 92787 - RNA, 19 nt, Homo sapiens
  misc_RNA (1)...(19): siRNA sense strand
ggugaugaacuccaagcua

SEQ ID NO: 92788 - RNA, 19 nt, Homo sapiens
  misc_RNA (1)...(19): siRNA sense strand
cagaucaagucccucaaca

SEQ ID NO: 92789 - RNA, 19 nt, Homo sapiens
  misc_RNA (1)...(19): siRNA sense strand
aagcugcaguucuaccaaa

SEQ ID NO: 92790 - RNA, 19 nt, Homo sapiens
  misc_RNA (1)...(19): siRNA sense strand
cagcaagugugaggagaug

SEQ ID NO: 92791 - RNA, 19 nt, Homo sapiens
  misc_RNA (1)...(19): siRNA sense strand
guuuguggcucuaaagaag

SEQ ID NO: 92792 - RNA, 19 nt, Homo sapiens
  misc_RNA (1)...(19): siRNA sense strand
cagccgagguggagaaugc

SEQ ID NO: 92793 - RNA, 19 nt, Homo sapiens
  misc_RNA (1)...(19): siRNA sense strand
cuggagggcuacaagaaga

SEQ ID NO: 92794 - RNA, 19 nt, Homo sapiens
  misc_RNA (1)...(19): siRNA sense strand
agaagaaguaugaagaaga

SEQ ID NO: 92795 - RNA, 19 nt, Homo sapiens
  misc_RNA (1)...(19): siRNA sense strand
ugcgagugcugccagagua

SEQ ID NO: 92796 - RNA, 19 nt, Homo sapiens
  misc_RNA (1)...(19): siRNA sense strand
ccacagcagagaacgaguu

SEQ ID NO: 92797 - RNA, 19 nt, Homo sapiens
  misc_RNA (1)...(19): siRNA sense strand
gaggcugugugaagguguu

SEQ ID NO: 92798 - RNA, 19 nt, Homo sapiens
  misc_RNA (1)...(19): siRNA sense strand
cgagaucaaggcacaguau

SEQ ID NO: 92799 - RNA, 19 nt, Homo sapiens
  misc_RNA (1)...(19): siRNA sense strand
gcgugaagcaggaggagaa

SEQ ID NO: 92800 - RNA, 19 nt, Homo sapiens
  misc_RNA (1)...(19): siRNA sense strand
guaugaagaagaaguagca

SEQ ID NO: 92801 - RNA, 19 nt, Homo sapiens
  misc_RNA (1)...(19): siRNA sense strand
gaaggccaagcaagacaug

SEQ ID NO: 92802 - RNA, 19 nt, Homo sapiens
  misc_RNA (1)...(19): siRNA sense strand
caacguggaggcccugauc

SEQ ID NO: 92803 - RNA, 19 nt, Homo sapiens
  misc_RNA (1)...(19): siRNA sense strand
gaggagaaggagcagauca

SEQ ID NO: 92804 - RNA, 19 nt, Homo sapiens
  misc_RNA (1)...(19): siRNA sense strand
ccaagugccagaacuccaa

SEQ ID NO: 92805 - RNA, 19 nt, Homo sapiens
  misc_RNA (1)...(19): siRNA sense strand
gagaaggagcagaucaagu

SEQ ID NO: 92806 - RNA, 19 nt, Homo sapiens
  misc_RNA (1)...(19): siRNA sense strand
ccuguuugcuggcuacauc

SEQ ID NO: 92807 - RNA, 19 nt, Homo sapiens
  misc_RNA (1)...(19): siRNA sense strand
ugaagcaggaggagaagga

SEQ ID NO: 92808 - RNA, 19 nt, Homo sapiens
  misc_RNA (1)...(19): siRNA sense strand
ggaaacuucagcugugucu

SEQ ID NO: 92809 - RNA, 19 nt, Homo sapiens
  misc_RNA (1)...(19): siRNA sense strand
ggagacaaagcugcaguuc

SEQ ID NO: 92810 - RNA, 19 nt, Homo sapiens
  misc_RNA (1)...(19): siRNA sense strand
auaucgagaucgccaccua

SEQ ID NO: 92811 - RNA, 19 nt, Homo sapiens
  misc_RNA (1)...(19): siRNA sense strand
gagaucaaggcacaguaug

SEQ ID NO: 92812 - RNA, 19 nt, Homo sapiens
  misc_RNA (1)...(19): siRNA sense strand
gaggaggagauccgcauuc

SEQ ID NO: 92813 - RNA, 19 nt, Homo sapiens
  misc_RNA (1)...(19): siRNA sense strand
aagaagaaguaugaagaag

SEQ ID NO: 92814 - RNA, 19 nt, Homo sapiens
  misc_RNA (1)...(19): siRNA sense strand
ggagaaggagcagaucaag

SEQ ID NO: 92815 - RNA, 19 nt, Homo sapiens
  misc_RNA (1)...(19): siRNA sense strand
gaacaagcugcuggagaca

SEQ ID NO: 92816 - RNA, 19 nt, Homo sapiens
  misc_RNA (1)...(19): siRNA sense strand
gaguuuguggcucuaaaga

SEQ ID NO: 92817 - RNA, 19 nt, Homo sapiens
  misc_RNA (1)...(19): siRNA sense strand
gcgagugcugccagaguaa

SEQ ID NO: 92818 - RNA, 19 nt, Homo sapiens
  misc_RNA (1)...(19): siRNA sense strand
gcagaaggccaagcaagac

SEQ ID NO: 92819 - RNA, 19 nt, Homo sapiens
  misc_RNA (1)...(19): siRNA sense strand
ugacagccgagguggagaa

SEQ ID NO: 92820 - RNA, 19 nt, Homo sapiens
  misc_RNA (1)...(19): siRNA sense strand
gugugaagguguugaagcu

SEQ ID NO: 92821 - RNA, 19 nt, Homo sapiens
  misc_RNA (1)...(19): siRNA sense strand
gcagaucaagucccucaac

SEQ ID NO: 92822 - RNA, 19 nt, Homo sapiens
  misc_RNA (1)...(19): siRNA sense strand
gugccuaccuccgcaaguc

SEQ ID NO: 92823 - RNA, 19 nt, Homo sapiens
  misc_RNA (1)...(19): siRNA sense strand
aaacuucagcugugucucu

SEQ ID NO: 92824 - RNA, 19 nt, Homo sapiens
  misc_RNA (1)...(19): siRNA sense strand
gggaguaccaggaggugau

SEQ ID NO: 92825 - RNA, 19 nt, Homo sapiens
  misc_RNA (1)...(19): siRNA sense strand
gcagcaagugugaggagau

SEQ ID NO: 92826 - RNA, 19 nt, Homo sapiens
  misc_RNA (1)...(19): siRNA sense strand
gagacaaagcugcaguucu

SEQ ID NO: 92827 - RNA, 19 nt, Homo sapiens
  misc_RNA (1)...(19): siRNA sense strand
gauccaggagauugacuuc

SEQ ID NO: 92828 - RNA, 19 nt, Homo sapiens
  misc_RNA (1)...(19): siRNA sense strand
ucuccaaucccacaucuca

SEQ ID NO: 92829 - RNA, 19 nt, Homo sapiens
  misc_RNA (1)...(19): siRNA sense strand
agaucaaggcacaguauga

SEQ ID NO: 92830 - RNA, 19 nt, Homo sapiens
  misc_RNA (1)...(19): siRNA sense strand
cugcaucguugccgagauc

SEQ ID NO: 92831 - RNA, 19 nt, Homo sapiens
  misc_RNA (1)...(19): siRNA sense strand
cacagcagagaacgaguuu

SEQ ID NO: 92832 - RNA, 19 nt, Homo sapiens
  misc_RNA (1)...(19): siRNA sense strand
guguugaagcugugaaugu

SEQ ID NO: 92833 - RNA, 19 nt, Homo sapiens
  misc_RNA (1)...(19): siRNA sense strand
caagcuaggccuggauauc

SEQ ID NO: 92834 - RNA, 19 nt, Homo sapiens
  misc_RNA (1)...(19): siRNA sense strand
gguaucgcagcaaguguga

SEQ ID NO: 92835 - RNA, 19 nt, Homo sapiens
  misc_RNA (1)...(19): siRNA sense strand
gauccgcauucuccaaucc

SEQ ID NO: 92836 - RNA, 19 nt, Homo sapiens
  misc_RNA (1)...(19): siRNA sense strand
ccucagagcucaaccaugu

SEQ ID NO: 92837 - RNA, 19 nt, Homo sapiens
  misc_RNA (1)...(19): siRNA sense strand
gaacauggacugcaucauc

SEQ ID NO: 92838 - RNA, 19 nt, Homo sapiens
  misc_RNA (1)...(19): siRNA sense strand
gaaugaguuugucguucua

SEQ ID NO: 92839 - RNA, 19 nt, Homo sapiens
  misc_RNA (1)...(19): siRNA sense strand
gcuacaagaagaaguauga

SEQ ID NO: 92840 - RNA, 19 nt, Homo sapiens
  misc_RNA (1)...(19): siRNA sense strand
gccgagaccugaacaugga

SEQ ID NO: 92841 - RNA, 19 nt, Homo sapiens
  misc_RNA (1)...(19): siRNA sense strand
ggcaaccgcugcugcauca

SEQ ID NO: 92842 - RNA, 19 nt, Homo sapiens
  misc_RNA (1)...(19): siRNA sense strand
gaucaaggcucaguaugac

SEQ ID NO: 92843 - RNA, 19 nt, Homo sapiens
  misc_RNA (1)...(19): siRNA sense strand
caucaucgcugagaucaag

SEQ ID NO: 92844 - RNA, 19 nt, Homo sapiens
  misc_RNA (1)...(19): siRNA sense strand
gaaggugugggcucuguga

SEQ ID NO: 92845 - RNA, 19 nt, Homo sapiens
  misc_RNA (1)...(19): siRNA sense strand
ggugugggcucugugaaug

SEQ ID NO: 92846 - RNA, 19 nt, Homo sapiens
  misc_RNA (1)...(19): siRNA sense strand
acaagaagaaguaugaaga

SEQ ID NO: 92847 - RNA, 19 nt, Homo sapiens
  misc_RNA (1)...(19): siRNA sense strand
cagcagagaaugaguuugu

SEQ ID NO: 92848 - RNA, 19 nt, Homo sapiens
  misc_RNA (1)...(19): siRNA sense strand
gcaagugugaggagaugaa

SEQ ID NO: 92849 - RNA, 19 nt, Homo sapiens
  misc_RNA (1)...(19): siRNA sense strand
gcaccaaggaggagaucaa

SEQ ID NO: 92850 - RNA, 19 nt, Homo sapiens
  misc_RNA (1)...(19): siRNA sense strand
gaguuugucguucuaaaga

SEQ ID NO: 92851 - RNA, 19 nt, Homo sapiens
  misc_RNA (1)...(19): siRNA sense strand
ucagacaccucggucauag

SEQ ID NO: 92852 - RNA, 19 nt, Homo sapiens
  misc_RNA (1)...(19): siRNA sense strand
agaaggagcagaucaaguc

SEQ ID NO: 92853 - RNA, 19 nt, Homo sapiens
  misc_RNA (1)...(19): siRNA sense strand
cagaucaagucccucaaca

SEQ ID NO: 92854 - RNA, 19 nt, Homo sapiens
  misc_RNA (1)...(19): siRNA sense strand
ccacagcagagaaugaguu

SEQ ID NO: 92855 - RNA, 19 nt, Homo sapiens
  misc_RNA (1)...(19): siRNA sense strand
cuggagggcuacaagaaga

SEQ ID NO: 92856 - RNA, 19 nt, Homo sapiens
  misc_RNA (1)...(19): siRNA sense strand
acaucgagaucgccaccua

SEQ ID NO: 92857 - RNA, 19 nt, Homo sapiens
  misc_RNA (1)...(19): siRNA sense strand
caagaagaaguaugaagag

SEQ ID NO: 92858 - RNA, 19 nt, Homo sapiens
  misc_RNA (1)...(19): siRNA sense strand
uagcaagugugaggagaug

SEQ ID NO: 92859 - RNA, 19 nt, Homo sapiens
  misc_RNA (1)...(19): siRNA sense strand
gagccacagcagagaauga

SEQ ID NO: 92860 - RNA, 19 nt, Homo sapiens
  misc_RNA (1)...(19): siRNA sense strand
gcgugaagcaggaggagaa

SEQ ID NO: 92861 - RNA, 19 nt, Homo sapiens
  misc_RNA (1)...(19): siRNA sense strand
agaucaaggcucaguauga

SEQ ID NO: 92862 - RNA, 19 nt, Homo sapiens
  misc_RNA (1)...(19): siRNA sense strand
gugccuaccugcggaaauc

SEQ ID NO: 92863 - RNA, 19 nt, Homo sapiens
  misc_RNA (1)...(19): siRNA sense strand
acaagcugcuggagaccaa

SEQ ID NO: 92864 - RNA, 19 nt, Homo sapiens
  misc_RNA (1)...(19): siRNA sense strand
cggccgagauugagaaugc

SEQ ID NO: 92865 - RNA, 19 nt, Homo sapiens
  misc_RNA (1)...(19): siRNA sense strand
ccaaguggcaguucuacca

SEQ ID NO: 92866 - RNA, 19 nt, Homo sapiens
  misc_RNA (1)...(19): siRNA sense strand
gaggagaaggagcagauca

SEQ ID NO: 92867 - RNA, 19 nt, Homo sapiens
  misc_RNA (1)...(19): siRNA sense strand
gagaaggagcagaucaagu

SEQ ID NO: 92868 - RNA, 19 nt, Homo sapiens
  misc_RNA (1)...(19): siRNA sense strand
caaccuggagccacuguuc

SEQ ID NO: 92869 - RNA, 19 nt, Homo sapiens
  misc_RNA (1)...(19): siRNA sense strand
gagaccaaguggcaguucu

SEQ ID NO: 92870 - RNA, 19 nt, Homo sapiens
  misc_RNA (1)...(19): siRNA sense strand
acaccucggucauagucaa

SEQ ID NO: 92871 - RNA, 19 nt, Homo sapiens
  misc_RNA (1)...(19): siRNA sense strand
ugaagcaggaggagaagga

SEQ ID NO: 92872 - RNA, 19 nt, Homo sapiens
  misc_RNA (1)...(19): siRNA sense strand
ucuccaagcccacaucuca

SEQ ID NO: 92873 - RNA, 19 nt, Homo sapiens
  misc_RNA (1)...(19): siRNA sense strand
gagagccacagcagagaau

SEQ ID NO: 92874 - RNA, 19 nt, Homo sapiens
  misc_RNA (1)...(19): siRNA sense strand
gugaaggugugggcucugu

SEQ ID NO: 92875 - RNA, 19 nt, Homo sapiens
  misc_RNA (1)...(19): siRNA sense strand
gagaucaaggcucaguaug

SEQ ID NO: 92876 - RNA, 19 nt, Homo sapiens
  misc_RNA (1)...(19): siRNA sense strand
ggagaaggagcagaucaag

SEQ ID NO: 92877 - RNA, 19 nt, Homo sapiens
  misc_RNA (1)...(19): siRNA sense strand
gccauaggcggcagcauca

SEQ ID NO: 92878 - RNA, 19 nt, Homo sapiens
  misc_RNA (1)...(19): siRNA sense strand
gaugaaggccacggugauc

SEQ ID NO: 92879 - RNA, 19 nt, Homo sapiens
  misc_RNA (1)...(19): siRNA sense strand
cacagcagagaaugaguuu

SEQ ID NO: 92880 - RNA, 19 nt, Homo sapiens
  misc_RNA (1)...(19): siRNA sense strand
uggccugccugcucaagga

SEQ ID NO: 92881 - RNA, 19 nt, Homo sapiens
  misc_RNA (1)...(19): siRNA sense strand
gcagaucaagucccucaac

SEQ ID NO: 92882 - RNA, 19 nt, Homo sapiens
  misc_RNA (1)...(19): siRNA sense strand
gaggcugacggccgagauu

SEQ ID NO: 92883 - RNA, 19 nt, Homo sapiens
  misc_RNA (1)...(19): siRNA sense strand
aaagaaggacguggacugu

SEQ ID NO: 92884 - RNA, 19 nt, Homo sapiens
  misc_RNA (1)...(19): siRNA sense strand
ccugccugcucaaggagua

SEQ ID NO: 92885 - RNA, 19 nt, Homo sapiens
  misc_RNA (1)...(19): siRNA sense strand
ccucguuccuccagcuuca

SEQ ID NO: 92886 - RNA, 19 nt, Homo sapiens
  misc_RNA (1)...(19): siRNA sense strand
caacagccgagaccugaac

SEQ ID NO: 92887 - RNA, 19 nt, Homo sapiens
  misc_RNA (1)...(19): siRNA sense strand
agacaaagcugcaguucua

SEQ ID NO: 92888 - RNA, 19 nt, Homo sapiens
  misc_RNA (1)...(19): siRNA sense strand
gaacauggacugcaucauu

SEQ ID NO: 92889 - RNA, 19 nt, Homo sapiens
  misc_RNA (1)...(19): siRNA sense strand
ggacauggccugccugauc

SEQ ID NO: 92890 - RNA, 19 nt, Homo sapiens
  misc_RNA (1)...(19): siRNA sense strand
acaaacugcuggagacaaa

SEQ ID NO: 92891 - RNA, 19 nt, Homo sapiens
  misc_RNA (1)...(19): siRNA sense strand
gacauggccugccugauca

SEQ ID NO: 92892 - RNA, 19 nt, Homo sapiens
  misc_RNA (1)...(19): siRNA sense strand
gcuacaagaagaaguauga

SEQ ID NO: 92893 - RNA, 19 nt, Homo sapiens
  misc_RNA (1)...(19): siRNA sense strand
caacagcugagaacgaguu

SEQ ID NO: 92894 - RNA, 19 nt, Homo sapiens
  misc_RNA (1)...(19): siRNA sense strand
aacauggacugcaucauug

SEQ ID NO: 92895 - RNA, 19 nt, Homo sapiens
  misc_RNA (1)...(19): siRNA sense strand
gcaagugugaggagaugaa

SEQ ID NO: 92896 - RNA, 19 nt, Homo sapiens
  misc_RNA (1)...(19): siRNA sense strand
gcaccaaggaggagaucaa

SEQ ID NO: 92897 - RNA, 19 nt, Homo sapiens
  misc_RNA (1)...(19): siRNA sense strand
gagcaacagcugagaacga

SEQ ID NO: 92898 - RNA, 19 nt, Homo sapiens
  misc_RNA (1)...(19): siRNA sense strand
gccgggaccugaacaugga

SEQ ID NO: 92899 - RNA, 19 nt, Homo sapiens
  misc_RNA (1)...(19): siRNA sense strand
gcgccuaccuccgcaaauc

SEQ ID NO: 92900 - RNA, 19 nt, Homo sapiens
  misc_RNA (1)...(19): siRNA sense strand
ucaaggcacaguacgauga

SEQ ID NO: 92901 - RNA, 19 nt, Homo sapiens
  misc_RNA (1)...(19): siRNA sense strand
gaacaaacugcuggagaca

SEQ ID NO: 92902 - RNA, 19 nt, Homo sapiens
  misc_RNA (1)...(19): siRNA sense strand
gaggaggagguuucucuga

SEQ ID NO: 92903 - RNA, 19 nt, Homo sapiens
  misc_RNA (1)...(19): siRNA sense strand
agaaggagcagaucaaguc

SEQ ID NO: 92904 - RNA, 19 nt, Homo sapiens
  misc_RNA (1)...(19): siRNA sense strand
cggcugagguggagaaugc

SEQ ID NO: 92905 - RNA, 19 nt, Homo sapiens
  misc_RNA (1)...(19): siRNA sense strand
cagaucaagucccucaaca

SEQ ID NO: 92906 - RNA, 19 nt, Homo sapiens
  misc_RNA (1)...(19): siRNA sense strand
gaucaaggcacaguacgau

SEQ ID NO: 92907 - RNA, 19 nt, Homo sapiens
  misc_RNA (1)...(19): siRNA sense strand
cagcaagugugaggagaug

SEQ ID NO: 92908 - RNA, 19 nt, Homo sapiens
  misc_RNA (1)...(19): siRNA sense strand
cuggagggcuacaagaaga

SEQ ID NO: 92909 - RNA, 19 nt, Homo sapiens
  misc_RNA (1)...(19): siRNA sense strand
acaucgagaucgccaccua

SEQ ID NO: 92910 - RNA, 19 nt, Homo sapiens
  misc_RNA (1)...(19): siRNA sense strand
gcacaguacgaugacauug

SEQ ID NO: 92911 - RNA, 19 nt, Homo sapiens
  misc_RNA (1)...(19): siRNA sense strand
cagcugagaacgaguuugu

SEQ ID NO: 92912 - RNA, 19 nt, Homo sapiens
  misc_RNA (1)...(19): siRNA sense strand
ccaagugccagaauuccaa

SEQ ID NO: 92913 - RNA, 19 nt, Homo sapiens
  misc_RNA (1)...(19): siRNA sense strand
gcgugaagcaggaggagaa

SEQ ID NO: 92914 - RNA, 19 nt, Homo sapiens
  misc_RNA (1)...(19): siRNA sense strand
gaggagaaggagcagauca

SEQ ID NO: 92915 - RNA, 19 nt, Homo sapiens
  misc_RNA (1)...(19): siRNA sense strand
gaucucugcgccuccacua

SEQ ID NO: 92916 - RNA, 19 nt, Homo sapiens
  misc_RNA (1)...(19): siRNA sense strand
gagaaggagcagaucaagu

SEQ ID NO: 92917 - RNA, 19 nt, Homo sapiens
  misc_RNA (1)...(19): siRNA sense strand
ugaagcaggaggagaagga

SEQ ID NO: 92918 - RNA, 19 nt, Homo sapiens
  misc_RNA (1)...(19): siRNA sense strand
ggagacaaagcugcaguuc

SEQ ID NO: 92919 - RNA, 19 nt, Homo sapiens
  misc_RNA (1)...(19): siRNA sense strand
gaaguaugaggaggagguu

SEQ ID NO: 92920 - RNA, 19 nt, Homo sapiens
  misc_RNA (1)...(19): siRNA sense strand
ggagaaggagcagaucaag

SEQ ID NO: 92921 - RNA, 19 nt, Homo sapiens
  misc_RNA (1)...(19): siRNA sense strand
gaugaaggccacggugauc

SEQ ID NO: 92922 - RNA, 19 nt, Homo sapiens
  misc_RNA (1)...(19): siRNA sense strand
cagcgugugcggaggcuuu

SEQ ID NO: 92923 - RNA, 19 nt, Homo sapiens
  misc_RNA (1)...(19): siRNA sense strand
gagagcaacagcugagaac

SEQ ID NO: 92924 - RNA, 19 nt, Homo sapiens
  misc_RNA (1)...(19): siRNA sense strand
gcagaucaagucccucaac

SEQ ID NO: 92925 - RNA, 19 nt, Homo sapiens
  misc_RNA (1)...(19): siRNA sense strand
aaugccaagugccagaauu

SEQ ID NO: 92926 - RNA, 19 nt, Homo sapiens
  misc_RNA (1)...(19): siRNA sense strand
gagacaaagcugcaguucu

SEQ ID NO: 92927 - RNA, 19 nt, Homo sapiens
  misc_RNA (1)...(19): siRNA sense strand
gggaguaccaggaggugau

SEQ ID NO: 92928 - RNA, 19 nt, Homo sapiens
  misc_RNA (1)...(19): siRNA sense strand
gcagcaagugugaggagau

SEQ ID NO: 92929 - RNA, 19 nt, Homo sapiens
  misc_RNA (1)...(19): siRNA sense strand
ugagagcaacagcugagaa

SEQ ID NO: 92930 - RNA, 19 nt, Homo sapiens
  misc_RNA (1)...(19): siRNA sense strand
guuuguggcucugaagaag

SEQ ID NO: 92931 - RNA, 19 nt, Homo sapiens
  misc_RNA (1)...(19): siRNA sense strand
gcgaugcccgcugcaaguu

SEQ ID NO: 92932 - RNA, 19 nt, Homo sapiens
  misc_RNA (1)...(19): siRNA sense strand
gaaugccaagugccagaau

SEQ ID NO: 92933 - RNA, 19 nt, Homo sapiens
  misc_RNA (1)...(19): siRNA sense strand
ggcacaguacgaugacauu

SEQ ID NO: 92934 - RNA, 19 nt, Homo sapiens
  misc_RNA (1)...(19): siRNA sense strand
gaaagcagcucacaacaau

SEQ ID NO: 92935 - RNA, 19 nt, Homo sapiens
  misc_RNA (1)...(19): siRNA sense strand
gcaagaagcuaaacgaaug

SEQ ID NO: 92936 - RNA, 19 nt, Homo sapiens
  misc_RNA (1)...(19): siRNA sense strand
gcaaaccacugcaacauga

SEQ ID NO: 92937 - RNA, 19 nt, Homo sapiens
  misc_RNA (1)...(19): siRNA sense strand
gaagaugaccuuaagcuaa

SEQ ID NO: 92938 - RNA, 19 nt, Homo sapiens
  misc_RNA (1)...(19): siRNA sense strand
ggaccacgcuguaaaguau

SEQ ID NO: 92939 - RNA, 19 nt, Homo sapiens
  misc_RNA (1)...(19): siRNA sense strand
gaagcagcauugucguuua

SEQ ID NO: 92940 - RNA, 19 nt, Homo sapiens
  misc_RNA (1)...(19): siRNA sense strand
gaaauaauccgggagauga

SEQ ID NO: 92941 - RNA, 19 nt, Homo sapiens
  misc_RNA (1)...(19): siRNA sense strand
caguagagcucaucaggua

SEQ ID NO: 92942 - RNA, 19 nt, Homo sapiens
  misc_RNA (1)...(19): siRNA sense strand
gagaguagaucuggagaaa

SEQ ID NO: 92943 - RNA, 19 nt, Homo sapiens
  misc_RNA (1)...(19): siRNA sense strand
gaacuucucuccccucuaa

SEQ ID NO: 92944 - RNA, 19 nt, Homo sapiens
  misc_RNA (1)...(19): siRNA sense strand
aaacuugucuucgaugaua

SEQ ID NO: 92945 - RNA, 19 nt, Homo sapiens
  misc_RNA (1)...(19): siRNA sense strand
gaugauggcacguuuaauu

SEQ ID NO: 92946 - RNA, 19 nt, Homo sapiens
  misc_RNA (1)...(19): siRNA sense strand
gacaauggcacaucgaaua

SEQ ID NO: 92947 - RNA, 19 nt, Homo sapiens
  misc_RNA (1)...(19): siRNA sense strand
gaagaaaucaagaaacuca

SEQ ID NO: 92948 - RNA, 19 nt, Homo sapiens
  misc_RNA (1)...(19): siRNA sense strand
guaaaggcgugaagcagaa

SEQ ID NO: 92949 - RNA, 19 nt, Homo sapiens
  misc_RNA (1)...(19): siRNA sense strand
gaaagaacgagaaagaaga

SEQ ID NO: 92950 - RNA, 19 nt, Homo sapiens
  misc_RNA (1)...(19): siRNA sense strand
ucaagaaacucaacaggau

SEQ ID NO: 92951 - RNA, 19 nt, Homo sapiens
  misc_RNA (1)...(19): siRNA sense strand
cuaaacgaaugaagcauaa

SEQ ID NO: 92952 - RNA, 19 nt, Homo sapiens
  misc_RNA (1)...(19): siRNA sense strand
gcagaaacuugucuucgau

SEQ ID NO: 92953 - RNA, 19 nt, Homo sapiens
  misc_RNA (1)...(19): siRNA sense strand
acaaacaacuggcugcauu

SEQ ID NO: 92954 - RNA, 19 nt, Homo sapiens
  misc_RNA (1)...(19): siRNA sense strand
gaauccaaaucuccuuauu

SEQ ID NO: 92955 - RNA, 19 nt, Homo sapiens
  misc_RNA (1)...(19): siRNA sense strand
gcacguuuaauucuaguua

SEQ ID NO: 92956 - RNA, 19 nt, Homo sapiens
  misc_RNA (1)...(19): siRNA sense strand
gaaccggcauccucuaaca

SEQ ID NO: 92957 - RNA, 19 nt, Homo sapiens
  misc_RNA (1)...(19): siRNA sense strand
caagaucgaugaacauuuu

SEQ ID NO: 92958 - RNA, 19 nt, Homo sapiens
  misc_RNA (1)...(19): siRNA sense strand
cagcuguguugaagaaaua

SEQ ID NO: 92959 - RNA, 19 nt, Homo sapiens
  misc_RNA (1)...(19): siRNA sense strand
cuuauuaccugauguauuc

SEQ ID NO: 92960 - RNA, 19 nt, Homo sapiens
  misc_RNA (1)...(19): siRNA sense strand
gaggaaagaacgagaaaga

SEQ ID NO: 92961 - RNA, 19 nt, Homo sapiens
  misc_RNA (1)...(19): siRNA sense strand
gcacaucgaauacaucaau

SEQ ID NO: 92962 - RNA, 19 nt, Homo sapiens
  misc_RNA (1)...(19): siRNA sense strand
gauggcacguuuaauucua

SEQ ID NO: 92963 - RNA, 19 nt, Homo sapiens
  misc_RNA (1)...(19): siRNA sense strand
ccagaacacuuuaggcaau

SEQ ID NO: 92964 - RNA, 19 nt, Homo sapiens
  misc_RNA (1)...(19): siRNA sense strand
caucaacaguguggcaaua

SEQ ID NO: 92965 - RNA, 19 nt, Homo sapiens
  misc_RNA (1)...(19): siRNA sense strand
ggauaaauggcuaaacaaa

SEQ ID NO: 92966 - RNA, 19 nt, Homo sapiens
  misc_RNA (1)...(19): siRNA sense strand
uaaggacucucagcuugua

SEQ ID NO: 92967 - RNA, 19 nt, Homo sapiens
  misc_RNA (1)...(19): siRNA sense strand
gcacuaaucgacuauuuca

SEQ ID NO: 92968 - RNA, 19 nt, Homo sapiens
  misc_RNA (1)...(19): siRNA sense strand
acaacuggcugcauuaugu

SEQ ID NO: 92969 - RNA, 19 nt, Homo sapiens
  misc_RNA (1)...(19): siRNA sense strand
gcuaaacgaaugaagcaua

SEQ ID NO: 92970 - RNA, 19 nt, Homo sapiens
  misc_RNA (1)...(19): siRNA sense strand
ccacaagccuccuauucug

SEQ ID NO: 92971 - RNA, 19 nt, Homo sapiens
  misc_RNA (1)...(19): siRNA sense strand
caucagguaugcuaugaga

SEQ ID NO: 92972 - RNA, 19 nt, Homo sapiens
  misc_RNA (1)...(19): siRNA sense strand
ggaguacccucuguccaaa

SEQ ID NO: 92973 - RNA, 19 nt, Homo sapiens
  misc_RNA (1)...(19): siRNA sense strand
ucaagcaccuggcaaagug

SEQ ID NO: 92974 - RNA, 19 nt, Homo sapiens
  misc_RNA (1)...(19): siRNA sense strand
ugaacaagaucgaugaaca

SEQ ID NO: 92975 - RNA, 19 nt, Homo sapiens
  misc_RNA (1)...(19): siRNA sense strand
ggaagaugaccuuaagcua

SEQ ID NO: 92976 - RNA, 19 nt, Homo sapiens
  misc_RNA (1)...(19): siRNA sense strand
gaacgagaaagaagaaauc

SEQ ID NO: 92977 - RNA, 19 nt, Homo sapiens
  misc_RNA (1)...(19): siRNA sense strand
ggaaagaacgagaaagaag

SEQ ID NO: 92978 - RNA, 19 nt, Homo sapiens
  misc_RNA (1)...(19): siRNA sense strand
ccaaacaagugugcaaugu

SEQ ID NO: 92979 - RNA, 19 nt, Homo sapiens
  misc_RNA (1)...(19): siRNA sense strand
caaacaacuggcugcauua

SEQ ID NO: 92980 - RNA, 19 nt, Homo sapiens
  misc_RNA (1)...(19): siRNA sense strand
guuacucucucuucaguga

SEQ ID NO: 92981 - RNA, 19 nt, Homo sapiens
  misc_RNA (1)...(19): siRNA sense strand
ggaaugggaccucgaguca

SEQ ID NO: 92982 - RNA, 19 nt, Homo sapiens
  misc_RNA (1)...(19): siRNA sense strand
gaacaagaucgaugaacau

SEQ ID NO: 92983 - RNA, 19 nt, Homo sapiens
  misc_RNA (1)...(19): siRNA sense strand
gcuggaagaugaccuuaag

SEQ ID NO: 92984 - RNA, 19 nt, Homo sapiens
  misc_RNA (1)...(19): siRNA sense strand
caaaagcacuaaucgacua

SEQ ID NO: 92985 - RNA, 19 nt, Homo sapiens
  misc_RNA (1)...(19): siRNA sense strand
ggacacaccugcagaaaag

SEQ ID NO: 92986 - RNA, 19 nt, Homo sapiens
  misc_RNA (1)...(19): siRNA sense strand
ccagugacaucgccaagga

SEQ ID NO: 92987 - RNA, 19 nt, Homo sapiens
  misc_RNA (1)...(19): siRNA sense strand
gccaagcucuccaaguuca

SEQ ID NO: 92988 - RNA, 19 nt, Homo sapiens
  misc_RNA (1)...(19): siRNA sense strand
gcggauguuucgacucaaa

SEQ ID NO: 92989 - RNA, 19 nt, Homo sapiens
  misc_RNA (1)...(19): siRNA sense strand
ggcagaaacuugucuucga

SEQ ID NO: 92990 - RNA, 19 nt, Homo sapiens
  misc_RNA (1)...(19): siRNA sense strand
gcuaagcagugaugaagag

SEQ ID NO: 92991 - RNA, 19 nt, Homo sapiens
  misc_RNA (1)...(19): siRNA sense strand
gaaaugcauuacggaggaa

SEQ ID NO: 92992 - RNA, 19 nt, Homo sapiens
  misc_RNA (1)...(19): siRNA sense strand
gaccuaauggcaacaguuu

SEQ ID NO: 92993 - RNA, 19 nt, Homo sapiens
  misc_RNA (1)...(19): siRNA sense strand
caaaguggaaccaaccaaa

SEQ ID NO: 92994 - RNA, 19 nt, Homo sapiens
  misc_RNA (1)...(19): siRNA sense strand
acaaguggcagcuggauaa

SEQ ID NO: 92995 - RNA, 19 nt, Homo sapiens
  misc_RNA (1)...(19): siRNA sense strand
aggccaagcucuccaaguu

SEQ ID NO: 92996 - RNA, 19 nt, Homo sapiens
  misc_RNA (1)...(19): siRNA sense strand
gagcucaucagguaugcua

SEQ ID NO: 92997 - RNA, 19 nt, Homo sapiens
  misc_RNA (1)...(19): siRNA sense strand
gcggagaccucacgaaagc

SEQ ID NO: 92998 - RNA, 19 nt, Homo sapiens
  misc_RNA (1)...(19): siRNA sense strand
ugaugcaucuaaacacaaa

SEQ ID NO: 92999 - RNA, 19 nt, Homo sapiens
  misc_RNA (1)...(19): siRNA sense strand
gaaagccacgggucagaga

SEQ ID NO: 93000 - RNA, 19 nt, Homo sapiens
  misc_RNA (1)...(19): siRNA sense strand
caacagagagcaacacaac

SEQ ID NO: 93001 - RNA, 19 nt, Homo sapiens
  misc_RNA (1)...(19): siRNA sense strand
aagcacuaaucgacuauuu

SEQ ID NO: 93002 - RNA, 19 nt, Homo sapiens
  misc_RNA (1)...(19): siRNA sense strand
gcucacaacaauucugaaa

SEQ ID NO: 93003 - RNA, 19 nt, Homo sapiens
  misc_RNA (1)...(19): siRNA sense strand
guggcaauaccaauaaaua

SEQ ID NO: 93004 - RNA, 19 nt, Homo sapiens
  misc_RNA (1)...(19): siRNA sense strand
acagggagaucaagaaguc

SEQ ID NO: 93005 - RNA, 19 nt, Homo sapiens
  misc_RNA (1)...(19): siRNA sense strand
auacaucaaugcuggaaga

SEQ ID NO: 93006 - RNA, 19 nt, Homo sapiens
  misc_RNA (1)...(19): siRNA sense strand
gcagaaaccgaccgcguau

SEQ ID NO: 93007 - RNA, 19 nt, Homo sapiens
  misc_RNA (1)...(19): siRNA sense strand
cuaaucgacuauuucaaga

SEQ ID NO: 93008 - RNA, 19 nt, Homo sapiens
  misc_RNA (1)...(19): siRNA sense strand
gauaaauggcuaaacaaag

SEQ ID NO: 93009 - RNA, 19 nt, Homo sapiens
  misc_RNA (1)...(19): siRNA sense strand
gaguagaucuggagaaacc

SEQ ID NO: 93010 - RNA, 19 nt, Homo sapiens
  misc_RNA (1)...(19): siRNA sense strand
ggacacaauaauccaaaga

SEQ ID NO: 93011 - RNA, 19 nt, Homo sapiens
  misc_RNA (1)...(19): siRNA sense strand
gguaugcuaugagacuaaa

SEQ ID NO: 93012 - RNA, 19 nt, Homo sapiens
  misc_RNA (1)...(19): siRNA sense strand
gaacaaggccccauggaau

SEQ ID NO: 93013 - RNA, 19 nt, Homo sapiens
  misc_RNA (1)...(19): siRNA sense strand
cgaaagcagcucacaacaa

SEQ ID NO: 93014 - RNA, 19 nt, Homo sapiens
  misc_RNA (1)...(19): siRNA sense strand
gcaagugugacaacgaaga

SEQ ID NO: 93015 - RNA, 19 nt, Homo sapiens
  misc_RNA (1)...(19): siRNA sense strand
uucaagaacucaucuaaag

SEQ ID NO: 93016 - RNA, 19 nt, Homo sapiens
  misc_RNA (1)...(19): siRNA sense strand
gauguauucagaaacagua

SEQ ID NO: 93017 - RNA, 19 nt, Homo sapiens
  misc_RNA (1)...(19): siRNA sense strand
gcgaggacuuaacuucuuc

SEQ ID NO: 93018 - RNA, 19 nt, Homo sapiens
  misc_RNA (1)...(19): siRNA sense strand
cagaacacuuuaggcaauu

SEQ ID NO: 93019 - RNA, 19 nt, Homo sapiens
  misc_RNA (1)...(19): siRNA sense strand
agaaacuugucuucgauga

SEQ ID NO: 93020 - RNA, 19 nt, Homo sapiens
  misc_RNA (1)...(19): siRNA sense strand
gagacagagucgucaucuu

SEQ ID NO: 93021 - RNA, 19 nt, Homo sapiens
  misc_RNA (1)...(19): siRNA sense strand
aguggcagcuggauaaaug

SEQ ID NO: 93022 - RNA, 19 nt, Homo sapiens
  misc_RNA (1)...(19): siRNA sense strand
cgagaaagaagaaaucaag

SEQ ID NO: 93023 - RNA, 19 nt, Homo sapiens
  misc_RNA (1)...(19): siRNA sense strand
gagaaagaagaaaucaaga

SEQ ID NO: 93024 - RNA, 19 nt, Homo sapiens
  misc_RNA (1)...(19): siRNA sense strand
agacagagucgucaucuuc

SEQ ID NO: 93025 - RNA, 19 nt, Homo sapiens
  misc_RNA (1)...(19): siRNA sense strand
gagagaaggagaucaagag

SEQ ID NO: 93026 - RNA, 19 nt, Homo sapiens
  misc_RNA (1)...(19): siRNA sense strand
gaaaucaagaaacucaaca

SEQ ID NO: 93027 - RNA, 19 nt, Homo sapiens
  misc_RNA (1)...(19): siRNA sense strand
gaaccaaccaaauuuccau

SEQ ID NO: 93028 - RNA, 19 nt, Homo sapiens
  misc_RNA (1)...(19): siRNA sense strand
ccgacaaccuggccaagga

SEQ ID NO: 93029 - RNA, 19 nt, Homo sapiens
  misc_RNA (1)...(19): siRNA sense strand
cuggauaaauggcuaaaca

SEQ ID NO: 93030 - RNA, 19 nt, Homo sapiens
  misc_RNA (1)...(19): siRNA sense strand
gaacagcaggcagcucaga

SEQ ID NO: 93031 - RNA, 19 nt, Homo sapiens
  misc_RNA (1)...(19): siRNA sense strand
gugaugaagaggagaauga

SEQ ID NO: 93032 - RNA, 19 nt, Homo sapiens
  misc_RNA (1)...(19): siRNA sense strand
aaaccgaccgcguauguga

SEQ ID NO: 93033 - RNA, 19 nt, Homo sapiens
  misc_RNA (1)...(19): siRNA sense strand
aagcagcauugucguuuau

SEQ ID NO: 93034 - RNA, 19 nt, Homo sapiens
  misc_RNA (1)...(19): siRNA sense strand
gaagaugugucucaagcua

SEQ ID NO: 93035 - RNA, 19 nt, Homo sapiens
  misc_RNA (1)...(19): siRNA sense strand
gagcaucuguauauucuca

SEQ ID NO: 93036 - RNA, 19 nt, Homo sapiens
  misc_RNA (1)...(19): siRNA sense strand
ucaauggacuuccugagaa

SEQ ID NO: 93037 - RNA, 19 nt, Homo sapiens
  misc_RNA (1)...(19): siRNA sense strand
ggacaacagucacaaugag

SEQ ID NO: 93038 - RNA, 19 nt, Homo sapiens
  misc_RNA (1)...(19): siRNA sense strand
ccacauacaaugauacuga

SEQ ID NO: 93039 - RNA, 19 nt, Homo sapiens
  misc_RNA (1)...(19): siRNA sense strand
ugaccuggcuguugauguu

SEQ ID NO: 93040 - RNA, 19 nt, Homo sapiens
  misc_RNA (1)...(19): siRNA sense strand
ggccugaccuggcuguuga

SEQ ID NO: 93041 - RNA, 19 nt, Homo sapiens
  misc_RNA (1)...(19): siRNA sense strand
gaggccagauuccgcauug

SEQ ID NO: 93042 - RNA, 19 nt, Homo sapiens
  misc_RNA (1)...(19): siRNA sense strand
guagauccacauacaauga

SEQ ID NO: 93043 - RNA, 19 nt, Homo sapiens
  misc_RNA (1)...(19): siRNA sense strand
ccuuaucgcugcaucuauu

SEQ ID NO: 93044 - RNA, 19 nt, Homo sapiens
  misc_RNA (1)...(19): siRNA sense strand
aagcugagcaucuguauau

SEQ ID NO: 93045 - RNA, 19 nt, Homo sapiens
  misc_RNA (1)...(19): siRNA sense strand
gcaaggacgaggagcagaa

SEQ ID NO: 93046 - RNA, 19 nt, Homo sapiens
  misc_RNA (1)...(19): siRNA sense strand
gaaagcugagcaucuguau

SEQ ID NO: 93047 - RNA, 19 nt, Homo sapiens
  misc_RNA (1)...(19): siRNA sense strand
caaugauacugaagaugug

SEQ ID NO: 93048 - RNA, 19 nt, Homo sapiens
  misc_RNA (1)...(19): siRNA sense strand
acaaugauacugaagaugu

SEQ ID NO: 93049 - RNA, 19 nt, Homo sapiens
  misc_RNA (1)...(19): siRNA sense strand
cacauacaaugauacugaa

SEQ ID NO: 93050 - RNA, 19 nt, Homo sapiens
  misc_RNA (1)...(19): siRNA sense strand
agacaaggccacagucaau

SEQ ID NO: 93051 - RNA, 19 nt, Homo sapiens
  misc_RNA (1)...(19): siRNA sense strand
ccugaaagcugagcaucug

SEQ ID NO: 93052 - RNA, 19 nt, Homo sapiens
  misc_RNA (1)...(19): siRNA sense strand
gcagacaaggccacaguca

SEQ ID NO: 93053 - RNA, 19 nt, Homo sapiens
  misc_RNA (1)...(19): siRNA sense strand
gcauugacucaguaaguga

SEQ ID NO: 93054 - RNA, 19 nt, Homo sapiens
  misc_RNA (1)...(19): siRNA sense strand
ugaaagcugagcaucugua

SEQ ID NO: 93055 - RNA, 19 nt, Homo sapiens
  misc_RNA (1)...(19): siRNA sense strand
uaucgcugcaucuauuaua

SEQ ID NO: 93056 - RNA, 19 nt, Homo sapiens
  misc_RNA (1)...(19): siRNA sense strand
gcugagcaucuguauauuc

SEQ ID NO: 93057 - RNA, 19 nt, Homo sapiens
  misc_RNA (1)...(19): siRNA sense strand
ucaguggucuuccucuucu

SEQ ID NO: 93058 - RNA, 19 nt, Homo sapiens
  misc_RNA (1)...(19): siRNA sense strand
gcaucuguauauucucauc

SEQ ID NO: 93059 - RNA, 19 nt, Homo sapiens
  misc_RNA (1)...(19): siRNA sense strand
cugagcaucuguauauucu

SEQ ID NO: 93060 - RNA, 19 nt, Homo sapiens
  misc_RNA (1)...(19): siRNA sense strand
gucaauggacuuccugaga

SEQ ID NO: 93061 - RNA, 19 nt, Homo sapiens
  misc_RNA (1)...(19): siRNA sense strand
agauccacauacaaugaua

SEQ ID NO: 93062 - RNA, 19 nt, Homo sapiens
  misc_RNA (1)...(19): siRNA sense strand
gccagaaucagauaaagca

SEQ ID NO: 93063 - RNA, 19 nt, Homo sapiens
  misc_RNA (1)...(19): siRNA sense strand
cucaguaagugaaggaaau

SEQ ID NO: 93064 - RNA, 19 nt, Homo sapiens
  misc_RNA (1)...(19): siRNA sense strand
cauacaaugauacugaaga

SEQ ID NO: 93065 - RNA, 19 nt, Homo sapiens
  misc_RNA (1)...(19): siRNA sense strand
cccaggaggugacguaugc

SEQ ID NO: 93066 - RNA, 19 nt, Homo sapiens
  misc_RNA (1)...(19): siRNA sense strand
caagcuaguccaucugagu

SEQ ID NO: 93067 - RNA, 19 nt, Homo sapiens
  misc_RNA (1)...(19): siRNA sense strand
ggagccaugugacuuucgu

SEQ ID NO: 93068 - RNA, 19 nt, Homo sapiens
  misc_RNA (1)...(19): siRNA sense strand
cgcauugacucaguaagug

SEQ ID NO: 93069 - RNA, 19 nt, Homo sapiens
  misc_RNA (1)...(19): siRNA sense strand
gacaaggccacagucaaug

SEQ ID NO: 93070 - RNA, 19 nt, Homo sapiens
  misc_RNA (1)...(19): siRNA sense strand
cggacaacagucacaauga

SEQ ID NO: 93071 - RNA, 19 nt, Homo sapiens
  misc_RNA (1)...(19): siRNA sense strand
ggccuuaucgcugcaucua

SEQ ID NO: 93072 - RNA, 19 nt, Homo sapiens
  misc_RNA (1)...(19): siRNA sense strand
agaugugucucaagcuagu

SEQ ID NO: 93073 - RNA, 19 nt, Homo sapiens
  misc_RNA (1)...(19): siRNA sense strand
ccgaguccaucacguaugc

SEQ ID NO: 93074 - RNA, 19 nt, Homo sapiens
  misc_RNA (1)...(19): siRNA sense strand
ucucaguggucuuccucuu

SEQ ID NO: 93075 - RNA, 19 nt, Homo sapiens
  misc_RNA (1)...(19): siRNA sense strand
ugagucagaggccagauuc

SEQ ID NO: 93076 - RNA, 19 nt, Homo sapiens
  misc_RNA (1)...(19): siRNA sense strand
caaggccacagucaaugga

SEQ ID NO: 93077 - RNA, 19 nt, Homo sapiens
  misc_RNA (1)...(19): siRNA sense strand
cagacaaggccacagucaa

SEQ ID NO: 93078 - RNA, 19 nt, Homo sapiens
  misc_RNA (1)...(19): siRNA sense strand
cagcagacaaggccacagu

SEQ ID NO: 93079 - RNA, 19 nt, Homo sapiens
  misc_RNA (1)...(19): siRNA sense strand
aaagcugagcaucuguaua

SEQ ID NO: 93080 - RNA, 19 nt, Homo sapiens
  misc_RNA (1)...(19): siRNA sense strand
ccgcauugacucaguaagu

SEQ ID NO: 93081 - RNA, 19 nt, Homo sapiens
  misc_RNA (1)...(19): siRNA sense strand
gaagaugugucucaagcua

SEQ ID NO: 93082 - RNA, 19 nt, Homo sapiens
  misc_RNA (1)...(19): siRNA sense strand
gagcaucuguauauucuca

SEQ ID NO: 93083 - RNA, 19 nt, Homo sapiens
  misc_RNA (1)...(19): siRNA sense strand
ucaauggacuuccugagaa

SEQ ID NO: 93084 - RNA, 19 nt, Homo sapiens
  misc_RNA (1)...(19): siRNA sense strand
ggacaacagucacaaugag

SEQ ID NO: 93085 - RNA, 19 nt, Homo sapiens
  misc_RNA (1)...(19): siRNA sense strand
ccacauacaaugauacuga

SEQ ID NO: 93086 - RNA, 19 nt, Homo sapiens
  misc_RNA (1)...(19): siRNA sense strand
ugaccuggcuguugauguu

SEQ ID NO: 93087 - RNA, 19 nt, Homo sapiens
  misc_RNA (1)...(19): siRNA sense strand
ggccugaccuggcuguuga

SEQ ID NO: 93088 - RNA, 19 nt, Homo sapiens
  misc_RNA (1)...(19): siRNA sense strand
gaggccagauuccgcauug

SEQ ID NO: 93089 - RNA, 19 nt, Homo sapiens
  misc_RNA (1)...(19): siRNA sense strand
guagauccacauacaauga

SEQ ID NO: 93090 - RNA, 19 nt, Homo sapiens
  misc_RNA (1)...(19): siRNA sense strand
ccuuaucgcugcaucuauu

SEQ ID NO: 93091 - RNA, 19 nt, Homo sapiens
  misc_RNA (1)...(19): siRNA sense strand
aagcugagcaucuguauau

SEQ ID NO: 93092 - RNA, 19 nt, Homo sapiens
  misc_RNA (1)...(19): siRNA sense strand
gcaaggacgaggagcagaa

SEQ ID NO: 93093 - RNA, 19 nt, Homo sapiens
  misc_RNA (1)...(19): siRNA sense strand
gaaagcugagcaucuguau

SEQ ID NO: 93094 - RNA, 19 nt, Homo sapiens
  misc_RNA (1)...(19): siRNA sense strand
caaugauacugaagaugug

SEQ ID NO: 93095 - RNA, 19 nt, Homo sapiens
  misc_RNA (1)...(19): siRNA sense strand
acaaugauacugaagaugu

SEQ ID NO: 93096 - RNA, 19 nt, Homo sapiens
  misc_RNA (1)...(19): siRNA sense strand
cacauacaaugauacugaa

SEQ ID NO: 93097 - RNA, 19 nt, Homo sapiens
  misc_RNA (1)...(19): siRNA sense strand
agacaaggccacagucaau

SEQ ID NO: 93098 - RNA, 19 nt, Homo sapiens
  misc_RNA (1)...(19): siRNA sense strand
ccugaaagcugagcaucug

SEQ ID NO: 93099 - RNA, 19 nt, Homo sapiens
  misc_RNA (1)...(19): siRNA sense strand
gcagacaaggccacaguca

SEQ ID NO: 93100 - RNA, 19 nt, Homo sapiens
  misc_RNA (1)...(19): siRNA sense strand
gcauugacucaguaaguga

SEQ ID NO: 93101 - RNA, 19 nt, Homo sapiens
  misc_RNA (1)...(19): siRNA sense strand
ugaaagcugagcaucugua

SEQ ID NO: 93102 - RNA, 19 nt, Homo sapiens
  misc_RNA (1)...(19): siRNA sense strand
uaucgcugcaucuauuaua

SEQ ID NO: 93103 - RNA, 19 nt, Homo sapiens
  misc_RNA (1)...(19): siRNA sense strand
gcugagcaucuguauauuc

SEQ ID NO: 93104 - RNA, 19 nt, Homo sapiens
  misc_RNA (1)...(19): siRNA sense strand
ucaguggucuuccucuucu

SEQ ID NO: 93105 - RNA, 19 nt, Homo sapiens
  misc_RNA (1)...(19): siRNA sense strand
gcaucuguauauucucauc

SEQ ID NO: 93106 - RNA, 19 nt, Homo sapiens
  misc_RNA (1)...(19): siRNA sense strand
cugagcaucuguauauucu

SEQ ID NO: 93107 - RNA, 19 nt, Homo sapiens
  misc_RNA (1)...(19): siRNA sense strand
gucaauggacuuccugaga

SEQ ID NO: 93108 - RNA, 19 nt, Homo sapiens
  misc_RNA (1)...(19): siRNA sense strand
agauccacauacaaugaua

SEQ ID NO: 93109 - RNA, 19 nt, Homo sapiens
  misc_RNA (1)...(19): siRNA sense strand
gccagaaucagauaaagca

SEQ ID NO: 93110 - RNA, 19 nt, Homo sapiens
  misc_RNA (1)...(19): siRNA sense strand
cucaguaagugaaggaaau

SEQ ID NO: 93111 - RNA, 19 nt, Homo sapiens
  misc_RNA (1)...(19): siRNA sense strand
cauacaaugauacugaaga

SEQ ID NO: 93112 - RNA, 19 nt, Homo sapiens
  misc_RNA (1)...(19): siRNA sense strand
cccaggaggugacguaugc

SEQ ID NO: 93113 - RNA, 19 nt, Homo sapiens
  misc_RNA (1)...(19): siRNA sense strand
caagcuaguccaucugagu

SEQ ID NO: 93114 - RNA, 19 nt, Homo sapiens
  misc_RNA (1)...(19): siRNA sense strand
ggagccaugugacuuucgu

SEQ ID NO: 93115 - RNA, 19 nt, Homo sapiens
  misc_RNA (1)...(19): siRNA sense strand
cgcauugacucaguaagug

SEQ ID NO: 93116 - RNA, 19 nt, Homo sapiens
  misc_RNA (1)...(19): siRNA sense strand
gacaaggccacagucaaug

SEQ ID NO: 93117 - RNA, 19 nt, Homo sapiens
  misc_RNA (1)...(19): siRNA sense strand
cggacaacagucacaauga

SEQ ID NO: 93118 - RNA, 19 nt, Homo sapiens
  misc_RNA (1)...(19): siRNA sense strand
ggccuuaucgcugcaucua

SEQ ID NO: 93119 - RNA, 19 nt, Homo sapiens
  misc_RNA (1)...(19): siRNA sense strand
agaugugucucaagcuagu

SEQ ID NO: 93120 - RNA, 19 nt, Homo sapiens
  misc_RNA (1)...(19): siRNA sense strand
ccgaguccaucacguaugc

SEQ ID NO: 93121 - RNA, 19 nt, Homo sapiens
  misc_RNA (1)...(19): siRNA sense strand
ucucaguggucuuccucuu

SEQ ID NO: 93122 - RNA, 19 nt, Homo sapiens
  misc_RNA (1)...(19): siRNA sense strand
ugagucagaggccagauuc

SEQ ID NO: 93123 - RNA, 19 nt, Homo sapiens
  misc_RNA (1)...(19): siRNA sense strand
caaggccacagucaaugga

SEQ ID NO: 93124 - RNA, 19 nt, Homo sapiens
  misc_RNA (1)...(19): siRNA sense strand
cagacaaggccacagucaa

SEQ ID NO: 93125 - RNA, 19 nt, Homo sapiens
  misc_RNA (1)...(19): siRNA sense strand
cagcagacaaggccacagu

SEQ ID NO: 93126 - RNA, 19 nt, Homo sapiens
  misc_RNA (1)...(19): siRNA sense strand
aaagcugagcaucuguaua

SEQ ID NO: 93127 - RNA, 19 nt, Homo sapiens
  misc_RNA (1)...(19): siRNA sense strand
ccgcauugacucaguaagu

SEQ ID NO: 93128 - RNA, 19 nt, Homo sapiens
  misc_RNA (1)...(19): siRNA sense strand
gaagaugugucucaagcua

SEQ ID NO: 93129 - RNA, 19 nt, Homo sapiens
  misc_RNA (1)...(19): siRNA sense strand
gagcaucuguauauucuca

SEQ ID NO: 93130 - RNA, 19 nt, Homo sapiens
  misc_RNA (1)...(19): siRNA sense strand
ggacaacagucacaaugag

SEQ ID NO: 93131 - RNA, 19 nt, Homo sapiens
  misc_RNA (1)...(19): siRNA sense strand
ccacauacaaugauacuga

SEQ ID NO: 93132 - RNA, 19 nt, Homo sapiens
  misc_RNA (1)...(19): siRNA sense strand
gaggccagauuccgcauug

SEQ ID NO: 93133 - RNA, 19 nt, Homo sapiens
  misc_RNA (1)...(19): siRNA sense strand
guagauccacauacaauga

SEQ ID NO: 93134 - RNA, 19 nt, Homo sapiens
  misc_RNA (1)...(19): siRNA sense strand
ccuuaucgcugcaucuauu

SEQ ID NO: 93135 - RNA, 19 nt, Homo sapiens
  misc_RNA (1)...(19): siRNA sense strand
aagcugagcaucuguauau

SEQ ID NO: 93136 - RNA, 19 nt, Homo sapiens
  misc_RNA (1)...(19): siRNA sense strand
gcaaggacgaggagcagaa

SEQ ID NO: 93137 - RNA, 19 nt, Homo sapiens
  misc_RNA (1)...(19): siRNA sense strand
gaaagcugagcaucuguau

SEQ ID NO: 93138 - RNA, 19 nt, Homo sapiens
  misc_RNA (1)...(19): siRNA sense strand
caaugauacugaagaugug

SEQ ID NO: 93139 - RNA, 19 nt, Homo sapiens
  misc_RNA (1)...(19): siRNA sense strand
acaaugauacugaagaugu

SEQ ID NO: 93140 - RNA, 19 nt, Homo sapiens
  misc_RNA (1)...(19): siRNA sense strand
cacauacaaugauacugaa

SEQ ID NO: 93141 - RNA, 19 nt, Homo sapiens
  misc_RNA (1)...(19): siRNA sense strand
ccugaaagcugagcaucug

SEQ ID NO: 93142 - RNA, 19 nt, Homo sapiens
  misc_RNA (1)...(19): siRNA sense strand
gcauugacucaguaaguga

SEQ ID NO: 93143 - RNA, 19 nt, Homo sapiens
  misc_RNA (1)...(19): siRNA sense strand
ugaaagcugagcaucugua

SEQ ID NO: 93144 - RNA, 19 nt, Homo sapiens
  misc_RNA (1)...(19): siRNA sense strand
uaucgcugcaucuauuaua

SEQ ID NO: 93145 - RNA, 19 nt, Homo sapiens
  misc_RNA (1)...(19): siRNA sense strand
gcugagcaucuguauauuc

SEQ ID NO: 93146 - RNA, 19 nt, Homo sapiens
  misc_RNA (1)...(19): siRNA sense strand
ucaguggucuuccucuucu

SEQ ID NO: 93147 - RNA, 19 nt, Homo sapiens
  misc_RNA (1)...(19): siRNA sense strand
gcaucuguauauucucauc

SEQ ID NO: 93148 - RNA, 19 nt, Homo sapiens
  misc_RNA (1)...(19): siRNA sense strand
agauccacauacaaugaua

SEQ ID NO: 93149 - RNA, 19 nt, Homo sapiens
  misc_RNA (1)...(19): siRNA sense strand
gccagaaucagauaaagca

SEQ ID NO: 93150 - RNA, 19 nt, Homo sapiens
  misc_RNA (1)...(19): siRNA sense strand
cugagcaucuguauauucu

SEQ ID NO: 93151 - RNA, 19 nt, Homo sapiens
  misc_RNA (1)...(19): siRNA sense strand
cucaguaagugaaggaaau

SEQ ID NO: 93152 - RNA, 19 nt, Homo sapiens
  misc_RNA (1)...(19): siRNA sense strand
cauacaaugauacugaaga

SEQ ID NO: 93153 - RNA, 19 nt, Homo sapiens
  misc_RNA (1)...(19): siRNA sense strand
caagcuaguccaucugagu

SEQ ID NO: 93154 - RNA, 19 nt, Homo sapiens
  misc_RNA (1)...(19): siRNA sense strand
ggagccaugugacuuucgu

SEQ ID NO: 93155 - RNA, 19 nt, Homo sapiens
  misc_RNA (1)...(19): siRNA sense strand
cgcauugacucaguaagug

SEQ ID NO: 93156 - RNA, 19 nt, Homo sapiens
  misc_RNA (1)...(19): siRNA sense strand
cggacaacagucacaauga

SEQ ID NO: 93157 - RNA, 19 nt, Homo sapiens
  misc_RNA (1)...(19): siRNA sense strand
ggccuuaucgcugcaucua

SEQ ID NO: 93158 - RNA, 19 nt, Homo sapiens
  misc_RNA (1)...(19): siRNA sense strand
agaugugucucaagcuagu

SEQ ID NO: 93159 - RNA, 19 nt, Homo sapiens
  misc_RNA (1)...(19): siRNA sense strand
ucucaguggucuuccucuu

SEQ ID NO: 93160 - RNA, 19 nt, Homo sapiens
  misc_RNA (1)...(19): siRNA sense strand
ugagucagaggccagauuc

SEQ ID NO: 93161 - RNA, 19 nt, Homo sapiens
  misc_RNA (1)...(19): siRNA sense strand
aaagcugagcaucuguaua

SEQ ID NO: 93162 - RNA, 19 nt, Homo sapiens
  misc_RNA (1)...(19): siRNA sense strand
ccgcauugacucaguaagu

SEQ ID NO: 93163 - RNA, 19 nt, Homo sapiens
  misc_RNA (1)...(19): siRNA sense strand
uauaauguguuucgacuug

SEQ ID NO: 93164 - RNA, 19 nt, Homo sapiens
  misc_RNA (1)...(19): siRNA sense strand
ccaaguacaaagauaguua

SEQ ID NO: 93165 - RNA, 19 nt, Homo sapiens
  misc_RNA (1)...(19): siRNA sense strand
ggauagagccaaguacaaa

SEQ ID NO: 93166 - RNA, 19 nt, Homo sapiens
  misc_RNA (1)...(19): siRNA sense strand
gaggccagauuccacauug

SEQ ID NO: 93167 - RNA, 19 nt, Homo sapiens
  misc_RNA (1)...(19): siRNA sense strand
gcacugaagccuccggauu

SEQ ID NO: 93168 - RNA, 19 nt, Homo sapiens
  misc_RNA (1)...(19): siRNA sense strand
cggauuugaugcaccauga

SEQ ID NO: 93169 - RNA, 19 nt, Homo sapiens
  misc_RNA (1)...(19): siRNA sense strand
ccacauugacucaguaagu

SEQ ID NO: 93170 - RNA, 19 nt, Homo sapiens
  misc_RNA (1)...(19): siRNA sense strand
gggaggauagagccaagua

SEQ ID NO: 93171 - RNA, 19 nt, Homo sapiens
  misc_RNA (1)...(19): siRNA sense strand
uaucgcugccucuauuaua

SEQ ID NO: 93172 - RNA, 19 nt, Homo sapiens
  misc_RNA (1)...(19): siRNA sense strand
cuuuaucgcugccucuauu

SEQ ID NO: 93173 - RNA, 19 nt, Homo sapiens
  misc_RNA (1)...(19): siRNA sense strand
cacugaagccuccggauuu

SEQ ID NO: 93174 - RNA, 19 nt, Homo sapiens
  misc_RNA (1)...(19): siRNA sense strand
gaggauagagccaaguaca

SEQ ID NO: 93175 - RNA, 19 nt, Homo sapiens
  misc_RNA (1)...(19): siRNA sense strand
agagccaaguacaaagaua

SEQ ID NO: 93176 - RNA, 19 nt, Homo sapiens
  misc_RNA (1)...(19): siRNA sense strand
cacauugacucaguaagug

SEQ ID NO: 93177 - RNA, 19 nt, Homo sapiens
  misc_RNA (1)...(19): siRNA sense strand
ggagccaugugacuuucau

SEQ ID NO: 93178 - RNA, 19 nt, Homo sapiens
  misc_RNA (1)...(19): siRNA sense strand
gagccaaguacaaagauag

SEQ ID NO: 93179 - RNA, 19 nt, Homo sapiens
  misc_RNA (1)...(19): siRNA sense strand
ggucugagcacagugacuu

SEQ ID NO: 93180 - RNA, 19 nt, Homo sapiens
  misc_RNA (1)...(19): siRNA sense strand
gauggucugagcacaguga

SEQ ID NO: 93181 - RNA, 19 nt, Homo sapiens
  misc_RNA (1)...(19): siRNA sense strand
cucaguaagugaaggaaau

SEQ ID NO: 93182 - RNA, 19 nt, Homo sapiens
  misc_RNA (1)...(19): siRNA sense strand
gauagagccaaguacaaag

SEQ ID NO: 93183 - RNA, 19 nt, Homo sapiens
  misc_RNA (1)...(19): siRNA sense strand
gauuccacauugacucagu

SEQ ID NO: 93184 - RNA, 19 nt, Homo sapiens
  misc_RNA (1)...(19): siRNA sense strand
acugaagccuccggauuug

SEQ ID NO: 93185 - RNA, 19 nt, Homo sapiens
  misc_RNA (1)...(19): siRNA sense strand
gcugagccaggcacuguga

SEQ ID NO: 93186 - RNA, 19 nt, Homo sapiens
  misc_RNA (1)...(19): siRNA sense strand
cgacuugguccaucugagu

SEQ ID NO: 93187 - RNA, 19 nt, Homo sapiens
  misc_RNA (1)...(19): siRNA sense strand
aucgcugccucuauuauaa

SEQ ID NO: 93188 - RNA, 19 nt, Homo sapiens
  misc_RNA (1)...(19): siRNA sense strand
uccuggagcugcuggugaa

SEQ ID NO: 93189 - RNA, 19 nt, Homo sapiens
  misc_RNA (1)...(19): siRNA sense strand
ugagucagaggccagauuc

SEQ ID NO: 93190 - RNA, 19 nt, Homo sapiens
  misc_RNA (1)...(19): siRNA sense strand
gaagccuccggauuugaug

SEQ ID NO: 93191 - RNA, 19 nt, Homo sapiens
  misc_RNA (1)...(19): siRNA sense strand
ugaagccuccggauuugau

SEQ ID NO: 93192 - RNA, 19 nt, Homo sapiens
  misc_RNA (1)...(19): siRNA sense strand
uauaauguguuucgacuug

SEQ ID NO: 93193 - RNA, 19 nt, Homo sapiens
  misc_RNA (1)...(19): siRNA sense strand
ccaaguacaaagauaguua

SEQ ID NO: 93194 - RNA, 19 nt, Homo sapiens
  misc_RNA (1)...(19): siRNA sense strand
ggauagagccaaguacaaa

SEQ ID NO: 93195 - RNA, 19 nt, Homo sapiens
  misc_RNA (1)...(19): siRNA sense strand
gaggccagauuccacauug

SEQ ID NO: 93196 - RNA, 19 nt, Homo sapiens
  misc_RNA (1)...(19): siRNA sense strand
gcacugaagccuccggauu

SEQ ID NO: 93197 - RNA, 19 nt, Homo sapiens
  misc_RNA (1)...(19): siRNA sense strand
cggauuugaugcaccauga

SEQ ID NO: 93198 - RNA, 19 nt, Homo sapiens
  misc_RNA (1)...(19): siRNA sense strand
ccacauugacucaguaagu

SEQ ID NO: 93199 - RNA, 19 nt, Homo sapiens
  misc_RNA (1)...(19): siRNA sense strand
gggaggauagagccaagua

SEQ ID NO: 93200 - RNA, 19 nt, Homo sapiens
  misc_RNA (1)...(19): siRNA sense strand
uaucgcugccucuauuaua

SEQ ID NO: 93201 - RNA, 19 nt, Homo sapiens
  misc_RNA (1)...(19): siRNA sense strand
cuuuaucgcugccucuauu

SEQ ID NO: 93202 - RNA, 19 nt, Homo sapiens
  misc_RNA (1)...(19): siRNA sense strand
cacugaagccuccggauuu

SEQ ID NO: 93203 - RNA, 19 nt, Homo sapiens
  misc_RNA (1)...(19): siRNA sense strand
gaggauagagccaaguaca

SEQ ID NO: 93204 - RNA, 19 nt, Homo sapiens
  misc_RNA (1)...(19): siRNA sense strand
agagccaaguacaaagaua

SEQ ID NO: 93205 - RNA, 19 nt, Homo sapiens
  misc_RNA (1)...(19): siRNA sense strand
cacauugacucaguaagug

SEQ ID NO: 93206 - RNA, 19 nt, Homo sapiens
  misc_RNA (1)...(19): siRNA sense strand
ggagccaugugacuuucau

SEQ ID NO: 93207 - RNA, 19 nt, Homo sapiens
  misc_RNA (1)...(19): siRNA sense strand
gagccaaguacaaagauag

SEQ ID NO: 93208 - RNA, 19 nt, Homo sapiens
  misc_RNA (1)...(19): siRNA sense strand
ggucugagcacagugacuu

SEQ ID NO: 93209 - RNA, 19 nt, Homo sapiens
  misc_RNA (1)...(19): siRNA sense strand
gauggucugagcacaguga

SEQ ID NO: 93210 - RNA, 19 nt, Homo sapiens
  misc_RNA (1)...(19): siRNA sense strand
cucaguaagugaaggaaau

SEQ ID NO: 93211 - RNA, 19 nt, Homo sapiens
  misc_RNA (1)...(19): siRNA sense strand
gauagagccaaguacaaag

SEQ ID NO: 93212 - RNA, 19 nt, Homo sapiens
  misc_RNA (1)...(19): siRNA sense strand
gauuccacauugacucagu

SEQ ID NO: 93213 - RNA, 19 nt, Homo sapiens
  misc_RNA (1)...(19): siRNA sense strand
acugaagccuccggauuug

SEQ ID NO: 93214 - RNA, 19 nt, Homo sapiens
  misc_RNA (1)...(19): siRNA sense strand
gcugagccaggcacuguga

SEQ ID NO: 93215 - RNA, 19 nt, Homo sapiens
  misc_RNA (1)...(19): siRNA sense strand
cgacuugguccaucugagu

SEQ ID NO: 93216 - RNA, 19 nt, Homo sapiens
  misc_RNA (1)...(19): siRNA sense strand
aucgcugccucuauuauaa

SEQ ID NO: 93217 - RNA, 19 nt, Homo sapiens
  misc_RNA (1)...(19): siRNA sense strand
uccuggagcugcuggugaa

SEQ ID NO: 93218 - RNA, 19 nt, Homo sapiens
  misc_RNA (1)...(19): siRNA sense strand
ugagucagaggccagauuc

SEQ ID NO: 93219 - RNA, 19 nt, Homo sapiens
  misc_RNA (1)...(19): siRNA sense strand
gaagccuccggauuugaug

SEQ ID NO: 93220 - RNA, 19 nt, Homo sapiens
  misc_RNA (1)...(19): siRNA sense strand
ugaagccuccggauuugau

SEQ ID NO: 93221 - RNA, 19 nt, Homo sapiens
  misc_RNA (1)...(19): siRNA sense strand
gcucagagguuccacauca

SEQ ID NO: 93222 - RNA, 19 nt, Homo sapiens
  misc_RNA (1)...(19): siRNA sense strand
ggacagauguucucuacuc

SEQ ID NO: 93223 - RNA, 19 nt, Homo sapiens
  misc_RNA (1)...(19): siRNA sense strand
ggccagagcuucucagugu

SEQ ID NO: 93224 - RNA, 19 nt, Homo sapiens
  misc_RNA (1)...(19): siRNA sense strand
gugcagagcucagauuuca

SEQ ID NO: 93225 - RNA, 19 nt, Homo sapiens
  misc_RNA (1)...(19): siRNA sense strand
gucagcaccuguuugaaua

SEQ ID NO: 93226 - RNA, 19 nt, Homo sapiens
  misc_RNA (1)...(19): siRNA sense strand
gacauugccuuccacuuca

SEQ ID NO: 93227 - RNA, 19 nt, Homo sapiens
  misc_RNA (1)...(19): siRNA sense strand
acacaugccuuuccagaag

SEQ ID NO: 93228 - RNA, 19 nt, Homo sapiens
  misc_RNA (1)...(19): siRNA sense strand
gaggguacguggugugcaa

SEQ ID NO: 93229 - RNA, 19 nt, Homo sapiens
  misc_RNA (1)...(19): siRNA sense strand
ggucagcaccuguuugaau

SEQ ID NO: 93230 - RNA, 19 nt, Homo sapiens
  misc_RNA (1)...(19): siRNA sense strand
cagguuugcugugaacuuu

SEQ ID NO: 93231 - RNA, 19 nt, Homo sapiens
  misc_RNA (1)...(19): siRNA sense strand
gcucagauuucaaggugau

SEQ ID NO: 93232 - RNA, 19 nt, Homo sapiens
  misc_RNA (1)...(19): siRNA sense strand
ugacauugccuuccacuuc

SEQ ID NO: 93233 - RNA, 19 nt, Homo sapiens
  misc_RNA (1)...(19): siRNA sense strand
gugcagcuguccuacauca

SEQ ID NO: 93234 - RNA, 19 nt, Homo sapiens
  misc_RNA (1)...(19): siRNA sense strand
gcaccuguuugaauacuac

SEQ ID NO: 93235 - RNA, 19 nt, Homo sapiens
  misc_RNA (1)...(19): siRNA sense strand
gcagagcucagauuucaag

SEQ ID NO: 93236 - RNA, 19 nt, Homo sapiens
  misc_RNA (1)...(19): siRNA sense strand
ggacuucagaucacuguca

SEQ ID NO: 93237 - RNA, 19 nt, Homo sapiens
  misc_RNA (1)...(19): siRNA sense strand
ugaggaaccugcccaccau

SEQ ID NO: 93238 - RNA, 19 nt, Homo sapiens
  misc_RNA (1)...(19): siRNA sense strand
ggacggacuucagaucacu

SEQ ID NO: 93239 - RNA, 19 nt, Homo sapiens
  misc_RNA (1)...(19): siRNA sense strand
gcaacacccagaucgacaa

SEQ ID NO: 93240 - RNA, 19 nt, Homo sapiens
  misc_RNA (1)...(19): siRNA sense strand
gacuucagaucacugucaa

SEQ ID NO: 93241 - RNA, 19 nt, Homo sapiens
  misc_RNA (1)...(19): siRNA sense strand
gcucugugcagcuguccua

SEQ ID NO: 93242 - RNA, 19 nt, Homo sapiens
  misc_RNA (1)...(19): siRNA sense strand
ccgccuauccgaugccuuu

SEQ ID NO: 93243 - RNA, 19 nt, Homo sapiens
  misc_RNA (1)...(19): siRNA sense strand
gccaacccggcucccauua

SEQ ID NO: 93244 - RNA, 19 nt, Homo sapiens
  misc_RNA (1)...(19): siRNA sense strand
agacagucauccacacagu

SEQ ID NO: 93245 - RNA, 19 nt, Homo sapiens
  misc_RNA (1)...(19): siRNA sense strand
gaaccugcccaccaucaac

SEQ ID NO: 93246 - RNA, 19 nt, Homo sapiens
  misc_RNA (1)...(19): siRNA sense strand
ggaaccugcccaccaucaa

SEQ ID NO: 93247 - RNA, 19 nt, Homo sapiens
  misc_RNA (1)...(19): siRNA sense strand
cuggacagauguucucuac

SEQ ID NO: 93248 - RNA, 19 nt, Homo sapiens
  misc_RNA (1)...(19): siRNA sense strand
acacccagaucgacaacuc

SEQ ID NO: 93249 - RNA, 19 nt, Homo sapiens
  misc_RNA (1)...(19): siRNA sense strand
gaguccagcuguccccuuu

SEQ ID NO: 93250 - RNA, 19 nt, Homo sapiens
  misc_RNA (1)...(19): siRNA sense strand
ggauggucagcaccuguuu

SEQ ID NO: 93251 - RNA, 19 nt, Homo sapiens
  misc_RNA (1)...(19): siRNA sense strand
caacccggcucccauuacc

SEQ ID NO: 93252 - RNA, 19 nt, Homo sapiens
  misc_RNA (1)...(19): siRNA sense strand
caggacggacuucagauca

SEQ ID NO: 93253 - RNA, 19 nt, Homo sapiens
  misc_RNA (1)...(19): siRNA sense strand
ggagggcuguacccaucca

SEQ ID NO: 93254 - RNA, 19 nt, Homo sapiens
  misc_RNA (1)...(19): siRNA sense strand
ugaacgggauccucuucgu

SEQ ID NO: 93255 - RNA, 19 nt, Homo sapiens
  misc_RNA (1)...(19): siRNA sense strand
gauggucagcaccuguuug

SEQ ID NO: 93256 - RNA, 19 nt, Homo sapiens
  misc_RNA (1)...(19): siRNA sense strand
ggauccucuucgugcagua

SEQ ID NO: 93257 - RNA, 19 nt, Homo sapiens
  misc_RNA (1)...(19): siRNA sense strand
gcucagagguuccacauca

SEQ ID NO: 93258 - RNA, 19 nt, Homo sapiens
  misc_RNA (1)...(19): siRNA sense strand
ggacagauguucucuacuc

SEQ ID NO: 93259 - RNA, 19 nt, Homo sapiens
  misc_RNA (1)...(19): siRNA sense strand
ggccagagcuucucagugu

SEQ ID NO: 93260 - RNA, 19 nt, Homo sapiens
  misc_RNA (1)...(19): siRNA sense strand
gugcagagcucagauuuca

SEQ ID NO: 93261 - RNA, 19 nt, Homo sapiens
  misc_RNA (1)...(19): siRNA sense strand
gucagcaccuguuugaaua

SEQ ID NO: 93262 - RNA, 19 nt, Homo sapiens
  misc_RNA (1)...(19): siRNA sense strand
gacauugccuuccacuuca

SEQ ID NO: 93263 - RNA, 19 nt, Homo sapiens
  misc_RNA (1)...(19): siRNA sense strand
acacaugccuuuccagaag

SEQ ID NO: 93264 - RNA, 19 nt, Homo sapiens
  misc_RNA (1)...(19): siRNA sense strand
gaggguacguggugugcaa

SEQ ID NO: 93265 - RNA, 19 nt, Homo sapiens
  misc_RNA (1)...(19): siRNA sense strand
ggucagcaccuguuugaau

SEQ ID NO: 93266 - RNA, 19 nt, Homo sapiens
  misc_RNA (1)...(19): siRNA sense strand
cagguuugcugugaacuuu

SEQ ID NO: 93267 - RNA, 19 nt, Homo sapiens
  misc_RNA (1)...(19): siRNA sense strand
gcucagauuucaaggugau

SEQ ID NO: 93268 - RNA, 19 nt, Homo sapiens
  misc_RNA (1)...(19): siRNA sense strand
ugacauugccuuccacuuc

SEQ ID NO: 93269 - RNA, 19 nt, Homo sapiens
  misc_RNA (1)...(19): siRNA sense strand
gugcagcuguccuacauca

SEQ ID NO: 93270 - RNA, 19 nt, Homo sapiens
  misc_RNA (1)...(19): siRNA sense strand
gcaccuguuugaauacuac

SEQ ID NO: 93271 - RNA, 19 nt, Homo sapiens
  misc_RNA (1)...(19): siRNA sense strand
gcagagcucagauuucaag

SEQ ID NO: 93272 - RNA, 19 nt, Homo sapiens
  misc_RNA (1)...(19): siRNA sense strand
ggacuucagaucacuguca

SEQ ID NO: 93273 - RNA, 19 nt, Homo sapiens
  misc_RNA (1)...(19): siRNA sense strand
ugaggaaccugcccaccau

SEQ ID NO: 93274 - RNA, 19 nt, Homo sapiens
  misc_RNA (1)...(19): siRNA sense strand
ggacggacuucagaucacu

SEQ ID NO: 93275 - RNA, 19 nt, Homo sapiens
  misc_RNA (1)...(19): siRNA sense strand
gcaacacccagaucgacaa

SEQ ID NO: 93276 - RNA, 19 nt, Homo sapiens
  misc_RNA (1)...(19): siRNA sense strand
gacuucagaucacugucaa

SEQ ID NO: 93277 - RNA, 19 nt, Homo sapiens
  misc_RNA (1)...(19): siRNA sense strand
gcucugugcagcuguccua

SEQ ID NO: 93278 - RNA, 19 nt, Homo sapiens
  misc_RNA (1)...(19): siRNA sense strand
ccgccuauccgaugccuuu

SEQ ID NO: 93279 - RNA, 19 nt, Homo sapiens
  misc_RNA (1)...(19): siRNA sense strand
gccaacccggcucccauua

SEQ ID NO: 93280 - RNA, 19 nt, Homo sapiens
  misc_RNA (1)...(19): siRNA sense strand
agacagucauccacacagu

SEQ ID NO: 93281 - RNA, 19 nt, Homo sapiens
  misc_RNA (1)...(19): siRNA sense strand
gaaccugcccaccaucaac

SEQ ID NO: 93282 - RNA, 19 nt, Homo sapiens
  misc_RNA (1)...(19): siRNA sense strand
ggaaccugcccaccaucaa

SEQ ID NO: 93283 - RNA, 19 nt, Homo sapiens
  misc_RNA (1)...(19): siRNA sense strand
cuggacagauguucucuac

SEQ ID NO: 93284 - RNA, 19 nt, Homo sapiens
  misc_RNA (1)...(19): siRNA sense strand
acacccagaucgacaacuc

SEQ ID NO: 93285 - RNA, 19 nt, Homo sapiens
  misc_RNA (1)...(19): siRNA sense strand
gaguccagcuguccccuuu

SEQ ID NO: 93286 - RNA, 19 nt, Homo sapiens
  misc_RNA (1)...(19): siRNA sense strand
ggauggucagcaccuguuu

SEQ ID NO: 93287 - RNA, 19 nt, Homo sapiens
  misc_RNA (1)...(19): siRNA sense strand
caacccggcucccauuacc

SEQ ID NO: 93288 - RNA, 19 nt, Homo sapiens
  misc_RNA (1)...(19): siRNA sense strand
caggacggacuucagauca

SEQ ID NO: 93289 - RNA, 19 nt, Homo sapiens
  misc_RNA (1)...(19): siRNA sense strand
ggagggcuguacccaucca

SEQ ID NO: 93290 - RNA, 19 nt, Homo sapiens
  misc_RNA (1)...(19): siRNA sense strand
ugaacgggauccucuucgu

SEQ ID NO: 93291 - RNA, 19 nt, Homo sapiens
  misc_RNA (1)...(19): siRNA sense strand
gauggucagcaccuguuug

SEQ ID NO: 93292 - RNA, 19 nt, Homo sapiens
  misc_RNA (1)...(19): siRNA sense strand
ggauccucuucgugcagua

SEQ ID NO: 93293 - RNA, 19 nt, Homo sapiens
  misc_RNA (1)...(19): siRNA sense strand
caacucagcuucacauauu

SEQ ID NO: 93294 - RNA, 19 nt, Homo sapiens
  misc_RNA (1)...(19): siRNA sense strand
ggaaaggucaucucuguua

SEQ ID NO: 93295 - RNA, 19 nt, Homo sapiens
  misc_RNA (1)...(19): siRNA sense strand
cagaagauaucaucaaguu

SEQ ID NO: 93296 - RNA, 19 nt, Homo sapiens
  misc_RNA (1)...(19): siRNA sense strand
gaacguccagaucuuauua

SEQ ID NO: 93297 - RNA, 19 nt, Homo sapiens
  misc_RNA (1)...(19): siRNA sense strand
cauaggaccugacaugaaa

SEQ ID NO: 93298 - RNA, 19 nt, Homo sapiens
  misc_RNA (1)...(19): siRNA sense strand
aagaagagauggagaaaga

SEQ ID NO: 93299 - RNA, 19 nt, Homo sapiens
  misc_RNA (1)...(19): siRNA sense strand
ccacaugccugcaaugaga

SEQ ID NO: 93300 - RNA, 19 nt, Homo sapiens
  misc_RNA (1)...(19): siRNA sense strand
gaucaaggaaucaacauuu

SEQ ID NO: 93301 - RNA, 19 nt, Homo sapiens
  misc_RNA (1)...(19): siRNA sense strand
gcaaccagauguucacaga

SEQ ID NO: 93302 - RNA, 19 nt, Homo sapiens
  misc_RNA (1)...(19): siRNA sense strand
caacagagggcgaaacaaa

SEQ ID NO: 93303 - RNA, 19 nt, Homo sapiens
  misc_RNA (1)...(19): siRNA sense strand
gaaucaacauuuaccgaaa

SEQ ID NO: 93304 - RNA, 19 nt, Homo sapiens
  misc_RNA (1)...(19): siRNA sense strand
guccagaucuuauuaccua

SEQ ID NO: 93305 - RNA, 19 nt, Homo sapiens
  misc_RNA (1)...(19): siRNA sense strand
gagaggaaauguaucuuca

SEQ ID NO: 93306 - RNA, 19 nt, Homo sapiens
  misc_RNA (1)...(19): siRNA sense strand
caaggcaauuuaugacauu

SEQ ID NO: 93307 - RNA, 19 nt, Homo sapiens
  misc_RNA (1)...(19): siRNA sense strand
ccacagaccuggcaaugag

SEQ ID NO: 93308 - RNA, 19 nt, Homo sapiens
  misc_RNA (1)...(19): siRNA sense strand
gaaagccacccaucuacaa

SEQ ID NO: 93309 - RNA, 19 nt, Homo sapiens
  misc_RNA (1)...(19): siRNA sense strand
gcagagaggaagaugauga

SEQ ID NO: 93310 - RNA, 19 nt, Homo sapiens
  misc_RNA (1)...(19): siRNA sense strand
gaaaggucaucucuguuag

SEQ ID NO: 93311 - RNA, 19 nt, Homo sapiens
  misc_RNA (1)...(19): siRNA sense strand
gaaagaagagauggagaaa

SEQ ID NO: 93312 - RNA, 19 nt, Homo sapiens
  misc_RNA (1)...(19): siRNA sense strand
cuucaaggcuccaccguuu

SEQ ID NO: 93313 - RNA, 19 nt, Homo sapiens
  misc_RNA (1)...(19): siRNA sense strand
agaggaagaugaugaggaa

SEQ ID NO: 93314 - RNA, 19 nt, Homo sapiens
  misc_RNA (1)...(19): siRNA sense strand
caagaagagcaauuaauga

SEQ ID NO: 93315 - RNA, 19 nt, Homo sapiens
  misc_RNA (1)...(19): siRNA sense strand
gaggaaauguaucuucaag

SEQ ID NO: 93316 - RNA, 19 nt, Homo sapiens
  misc_RNA (1)...(19): siRNA sense strand
gagcaaguccucagaagau

SEQ ID NO: 93317 - RNA, 19 nt, Homo sapiens
  misc_RNA (1)...(19): siRNA sense strand
ggaagaugaugaggaacuu

SEQ ID NO: 93318 - RNA, 19 nt, Homo sapiens
  misc_RNA (1)...(19): siRNA sense strand
gaaacaaaauccucagaga

SEQ ID NO: 93319 - RNA, 19 nt, Homo sapiens
  misc_RNA (1)...(19): siRNA sense strand
gaagagauggagaaagaga

SEQ ID NO: 93320 - RNA, 19 nt, Homo sapiens
  misc_RNA (1)...(19): siRNA sense strand
gagcaauuaaugaagcuua

SEQ ID NO: 93321 - RNA, 19 nt, Homo sapiens
  misc_RNA (1)...(19): siRNA sense strand
ucaagaagagcaauuaaug

SEQ ID NO: 93322 - RNA, 19 nt, Homo sapiens
  misc_RNA (1)...(19): siRNA sense strand
ggacauccucggaaaguau

SEQ ID NO: 93323 - RNA, 19 nt, Homo sapiens
  misc_RNA (1)...(19): siRNA sense strand
gaauguccauacaggaguu

SEQ ID NO: 93324 - RNA, 19 nt, Homo sapiens
  misc_RNA (1)...(19): siRNA sense strand
cggaaaguauuuauucuag

SEQ ID NO: 93325 - RNA, 19 nt, Homo sapiens
  misc_RNA (1)...(19): siRNA sense strand
gaaggucaaggcaauuuau

SEQ ID NO: 93326 - RNA, 19 nt, Homo sapiens
  misc_RNA (1)...(19): siRNA sense strand
cgggaaaggucaucucugu

SEQ ID NO: 93327 - RNA, 19 nt, Homo sapiens
  misc_RNA (1)...(19): siRNA sense strand
cgggaaaucuuuggaaugu

SEQ ID NO: 93328 - RNA, 19 nt, Homo sapiens
  misc_RNA (1)...(19): siRNA sense strand
ucacauauuccaucaucua

SEQ ID NO: 93329 - RNA, 19 nt, Homo sapiens
  misc_RNA (1)...(19): siRNA sense strand
gggcuucaccggccuguuu

SEQ ID NO: 93330 - RNA, 19 nt, Homo sapiens
  misc_RNA (1)...(19): siRNA sense strand
gacaugaaacgcagaucua

SEQ ID NO: 93331 - RNA, 19 nt, Homo sapiens
  misc_RNA (1)...(19): siRNA sense strand
ucagagagguggacagaac

SEQ ID NO: 93332 - RNA, 19 nt, Homo sapiens
  misc_RNA (1)...(19): siRNA sense strand
cagaucuuauuaccuauga

SEQ ID NO: 93333 - RNA, 19 nt, Homo sapiens
  misc_RNA (1)...(19): siRNA sense strand
acaggaguuugacagguua

SEQ ID NO: 93334 - RNA, 19 nt, Homo sapiens
  misc_RNA (1)...(19): siRNA sense strand
uguaagcaaucuacgaaga

SEQ ID NO: 93335 - RNA, 19 nt, Homo sapiens
  misc_RNA (1)...(19): siRNA sense strand
ugaaagaagagauggagaa

SEQ ID NO: 93336 - RNA, 19 nt, Homo sapiens
  misc_RNA (1)...(19): siRNA sense strand
ggagaggaaauguaucuuc

SEQ ID NO: 93337 - RNA, 19 nt, Homo sapiens
  misc_RNA (1)...(19): siRNA sense strand
cuaccgacuucgcucagua

SEQ ID NO: 93338 - RNA, 19 nt, Homo sapiens
  misc_RNA (1)...(19): siRNA sense strand
agaaggagaggaaauguau

SEQ ID NO: 93339 - RNA, 19 nt, Homo sapiens
  misc_RNA (1)...(19): siRNA sense strand
cgacuucgcucaguauaac

SEQ ID NO: 93340 - RNA, 19 nt, Homo sapiens
  misc_RNA (1)...(19): siRNA sense strand
gaaccaaagauauuuccau

SEQ ID NO: 93341 - RNA, 19 nt, Homo sapiens
  misc_RNA (1)...(19): siRNA sense strand
cgaaggucaaggcaauuua

SEQ ID NO: 93342 - RNA, 19 nt, Homo sapiens
  misc_RNA (1)...(19): siRNA sense strand
uacaggaguuugacagguu

SEQ ID NO: 93343 - RNA, 19 nt, Homo sapiens
  misc_RNA (1)...(19): siRNA sense strand
gcagaugcaaccagauguu

SEQ ID NO: 93344 - RNA, 19 nt, Homo sapiens
  misc_RNA (1)...(19): siRNA sense strand
ucaaggcaauuuaugacau

SEQ ID NO: 93345 - RNA, 19 nt, Homo sapiens
  misc_RNA (1)...(19): siRNA sense strand
cagaaggagaggaaaugua

SEQ ID NO: 93346 - RNA, 19 nt, Homo sapiens
  misc_RNA (1)...(19): siRNA sense strand
gagaaagagagccgggaaa

SEQ ID NO: 93347 - RNA, 19 nt, Homo sapiens
  misc_RNA (1)...(19): siRNA sense strand
gcgagacaccagagauuga

SEQ ID NO: 93348 - RNA, 19 nt, Homo sapiens
  misc_RNA (1)...(19): siRNA sense strand
gcaaguccucagaagauau

SEQ ID NO: 93349 - RNA, 19 nt, Homo sapiens
  misc_RNA (1)...(19): siRNA sense strand
aggccaggcuccaguauuc

SEQ ID NO: 93350 - RNA, 19 nt, Homo sapiens
  misc_RNA (1)...(19): siRNA sense strand
aaagagagccgggaaaggu

SEQ ID NO: 93351 - RNA, 19 nt, Homo sapiens
  misc_RNA (1)...(19): siRNA sense strand
gaugaugaggaacuucuga

SEQ ID NO: 93352 - RNA, 19 nt, Homo sapiens
  misc_RNA (1)...(19): siRNA sense strand
ggaacuccccucucccuua

SEQ ID NO: 93353 - RNA, 19 nt, Homo sapiens
  misc_RNA (1)...(19): siRNA sense strand
agacagagccuuggagagu

SEQ ID NO: 93354 - RNA, 19 nt, Homo sapiens
  misc_RNA (1)...(19): siRNA sense strand
uagcagccauuccgaaggu

SEQ ID NO: 93355 - RNA, 19 nt, Homo sapiens
  misc_RNA (1)...(19): siRNA sense strand
cuucacauauuccaucauc

SEQ ID NO: 93356 - RNA, 19 nt, Homo sapiens
  misc_RNA (1)...(19): siRNA sense strand
aaccagauguucacagaag

SEQ ID NO: 93357 - RNA, 19 nt, Homo sapiens
  misc_RNA (1)...(19): siRNA sense strand
ugggacaguugaucuugaa

SEQ ID NO: 93358 - RNA, 19 nt, Homo sapiens
  misc_RNA (1)...(19): siRNA sense strand
cgccacagcuacacuccaa

SEQ ID NO: 93359 - RNA, 19 nt, Homo sapiens
  misc_RNA (1)...(19): siRNA sense strand
caccaggucauacuaucua

SEQ ID NO: 93360 - RNA, 19 nt, Homo sapiens
  misc_RNA (1)...(19): siRNA sense strand
cagagcaaguccucagaag

SEQ ID NO: 93361 - RNA, 19 nt, Homo sapiens
  misc_RNA (1)...(19): siRNA sense strand
ccucggaaaguauuuauuc

SEQ ID NO: 93362 - RNA, 19 nt, Homo sapiens
  misc_RNA (1)...(19): siRNA sense strand
gggcuaugaugacaaacag

SEQ ID NO: 93363 - RNA, 19 nt, Homo sapiens
  misc_RNA (1)...(19): siRNA sense strand
acacuucgggcuaugauga

SEQ ID NO: 93364 - RNA, 19 nt, Homo sapiens
  misc_RNA (1)...(19): siRNA sense strand
cauugaacguccagaucuu

SEQ ID NO: 93365 - RNA, 19 nt, Homo sapiens
  misc_RNA (1)...(19): siRNA sense strand
ggagagacagagccuugga

SEQ ID NO: 93366 - RNA, 19 nt, Homo sapiens
  misc_RNA (1)...(19): siRNA sense strand
gagugucuaugcccaacau

SEQ ID NO: 93367 - RNA, 19 nt, Homo sapiens
  misc_RNA (1)...(19): siRNA sense strand
aggcaggugacaaacauua

SEQ ID NO: 93368 - RNA, 19 nt, Homo sapiens
  misc_RNA (1)...(19): siRNA sense strand
ggacaguugaucuugaaag

SEQ ID NO: 93369 - RNA, 19 nt, Homo sapiens
  misc_RNA (1)...(19): siRNA sense strand
guucacagaaggagaggaa

SEQ ID NO: 93370 - RNA, 19 nt, Homo sapiens
  misc_RNA (1)...(19): siRNA sense strand
cagcgagacaccagagauu

SEQ ID NO: 93371 - RNA, 19 nt, Homo sapiens
  misc_RNA (1)...(19): siRNA sense strand
cagcagaugcaaccagaug

SEQ ID NO: 93372 - RNA, 19 nt, Homo sapiens
  misc_RNA (1)...(19): siRNA sense strand
aaucaacauuuaccgaaag

SEQ ID NO: 93373 - RNA, 19 nt, Homo sapiens
  misc_RNA (1)...(19): siRNA sense strand
gauguucgggaucggauga

SEQ ID NO: 93374 - RNA, 19 nt, Homo sapiens
  misc_RNA (1)...(19): siRNA sense strand
ggagacgcaacgacaugaa

SEQ ID NO: 93375 - RNA, 19 nt, Homo sapiens
  misc_RNA (1)...(19): siRNA sense strand
gaaagagagccgggaaagg

SEQ ID NO: 93376 - RNA, 19 nt, Homo sapiens
  misc_RNA (1)...(19): siRNA sense strand
uaugagccuuucuacacuu

SEQ ID NO: 93377 - RNA, 19 nt, Homo sapiens
  misc_RNA (1)...(19): siRNA sense strand
cacauauuccaucaucuaa

SEQ ID NO: 93378 - RNA, 19 nt, Homo sapiens
  misc_RNA (1)...(19): siRNA sense strand
ucaacucagcuucacauau

SEQ ID NO: 93379 - RNA, 19 nt, Homo sapiens
  misc_RNA (1)...(19): siRNA sense strand
ucacagaaggagaggaaau

SEQ ID NO: 93380 - RNA, 19 nt, Homo sapiens
  misc_RNA (1)...(19): siRNA sense strand
cucauuugcugucauagga

SEQ ID NO: 93381 - RNA, 19 nt, Homo sapiens
  misc_RNA (1)...(19): siRNA sense strand
agcaaguccucagaagaua

SEQ ID NO: 93382 - RNA, 19 nt, Homo sapiens
  misc_RNA (1)...(19): siRNA sense strand
gcagaucuaguggcagaga

SEQ ID NO: 93383 - RNA, 19 nt, Homo sapiens
  misc_RNA (1)...(19): siRNA sense strand
gaacuccccucucccuuac

SEQ ID NO: 93384 - RNA, 19 nt, Homo sapiens
  misc_RNA (1)...(19): siRNA sense strand
gacauccucggaaaguauu

SEQ ID NO: 93385 - RNA, 19 nt, Homo sapiens
  misc_RNA (1)...(19): siRNA sense strand
cuacgauucucccaucaac

SEQ ID NO: 93386 - RNA, 19 nt, Homo sapiens
  misc_RNA (1)...(19): siRNA sense strand
caucccgacuguaagcaau

SEQ ID NO: 93387 - RNA, 19 nt, Homo sapiens
  misc_RNA (1)...(19): siRNA sense strand
ccucagaagauaucaucaa

SEQ ID NO: 93388 - RNA, 19 nt, Homo sapiens
  misc_RNA (1)...(19): siRNA sense strand
ccagagcaaguccucagaa

SEQ ID NO: 93389 - RNA, 19 nt, Homo sapiens
  misc_RNA (1)...(19): siRNA sense strand
cgaaagccacccaucuaca

SEQ ID NO: 93390 - RNA, 19 nt, Homo sapiens
  misc_RNA (1)...(19): siRNA sense strand
gcucaccaggucauacuau

SEQ ID NO: 93391 - RNA, 19 nt, Homo sapiens
  misc_RNA (1)...(19): siRNA sense strand
gcucaggccccuaaacauu

SEQ ID NO: 93392 - RNA, 19 nt, Homo sapiens
  misc_RNA (1)...(19): siRNA sense strand
ggccacaugccugcaauga

SEQ ID NO: 93393 - RNA, 19 nt, Homo sapiens
  misc_RNA (1)...(19): siRNA sense strand
caacucagcuucacauauu

SEQ ID NO: 93394 - RNA, 19 nt, Homo sapiens
  misc_RNA (1)...(19): siRNA sense strand
ggaaaggucaucucuguua

SEQ ID NO: 93395 - RNA, 19 nt, Homo sapiens
  misc_RNA (1)...(19): siRNA sense strand
cagaagauaucaucaaguu

SEQ ID NO: 93396 - RNA, 19 nt, Homo sapiens
  misc_RNA (1)...(19): siRNA sense strand
gaacguccagaucuuauua

SEQ ID NO: 93397 - RNA, 19 nt, Homo sapiens
  misc_RNA (1)...(19): siRNA sense strand
cauaggaccugacaugaaa

SEQ ID NO: 93398 - RNA, 19 nt, Homo sapiens
  misc_RNA (1)...(19): siRNA sense strand
aagaagagauggagaaaga

SEQ ID NO: 93399 - RNA, 19 nt, Homo sapiens
  misc_RNA (1)...(19): siRNA sense strand
ccacaugccugcaaugaga

SEQ ID NO: 93400 - RNA, 19 nt, Homo sapiens
  misc_RNA (1)...(19): siRNA sense strand
gaucaaggaaucaacauuu

SEQ ID NO: 93401 - RNA, 19 nt, Homo sapiens
  misc_RNA (1)...(19): siRNA sense strand
gcaaccagauguucacaga

SEQ ID NO: 93402 - RNA, 19 nt, Homo sapiens
  misc_RNA (1)...(19): siRNA sense strand
caacagagggcgaaacaaa

SEQ ID NO: 93403 - RNA, 19 nt, Homo sapiens
  misc_RNA (1)...(19): siRNA sense strand
gaaucaacauuuaccgaaa

SEQ ID NO: 93404 - RNA, 19 nt, Homo sapiens
  misc_RNA (1)...(19): siRNA sense strand
guccagaucuuauuaccua

SEQ ID NO: 93405 - RNA, 19 nt, Homo sapiens
  misc_RNA (1)...(19): siRNA sense strand
gagaggaaauguaucuuca

SEQ ID NO: 93406 - RNA, 19 nt, Homo sapiens
  misc_RNA (1)...(19): siRNA sense strand
caaggcaauuuaugacauu

SEQ ID NO: 93407 - RNA, 19 nt, Homo sapiens
  misc_RNA (1)...(19): siRNA sense strand
ccacagaccuggcaaugag

SEQ ID NO: 93408 - RNA, 19 nt, Homo sapiens
  misc_RNA (1)...(19): siRNA sense strand
gaaagccacccaucuacaa

SEQ ID NO: 93409 - RNA, 19 nt, Homo sapiens
  misc_RNA (1)...(19): siRNA sense strand
gcagagaggaagaugauga

SEQ ID NO: 93410 - RNA, 19 nt, Homo sapiens
  misc_RNA (1)...(19): siRNA sense strand
gaaaggucaucucuguuag

SEQ ID NO: 93411 - RNA, 19 nt, Homo sapiens
  misc_RNA (1)...(19): siRNA sense strand
gaaagaagagauggagaaa

SEQ ID NO: 93412 - RNA, 19 nt, Homo sapiens
  misc_RNA (1)...(19): siRNA sense strand
cuucaaggcuccaccguuu

SEQ ID NO: 93413 - RNA, 19 nt, Homo sapiens
  misc_RNA (1)...(19): siRNA sense strand
agaggaagaugaugaggaa

SEQ ID NO: 93414 - RNA, 19 nt, Homo sapiens
  misc_RNA (1)...(19): siRNA sense strand
caagaagagcaauuaauga

SEQ ID NO: 93415 - RNA, 19 nt, Homo sapiens
  misc_RNA (1)...(19): siRNA sense strand
gaggaaauguaucuucaag

SEQ ID NO: 93416 - RNA, 19 nt, Homo sapiens
  misc_RNA (1)...(19): siRNA sense strand
gagcaaguccucagaagau

SEQ ID NO: 93417 - RNA, 19 nt, Homo sapiens
  misc_RNA (1)...(19): siRNA sense strand
ggaagaugaugaggaacuu

SEQ ID NO: 93418 - RNA, 19 nt, Homo sapiens
  misc_RNA (1)...(19): siRNA sense strand
gaaacaaaauccucagaga

SEQ ID NO: 93419 - RNA, 19 nt, Homo sapiens
  misc_RNA (1)...(19): siRNA sense strand
gaagagauggagaaagaga

SEQ ID NO: 93420 - RNA, 19 nt, Homo sapiens
  misc_RNA (1)...(19): siRNA sense strand
gagcaauuaaugaagcuua

SEQ ID NO: 93421 - RNA, 19 nt, Homo sapiens
  misc_RNA (1)...(19): siRNA sense strand
ucaagaagagcaauuaaug

SEQ ID NO: 93422 - RNA, 19 nt, Homo sapiens
  misc_RNA (1)...(19): siRNA sense strand
ggacauccucggaaaguau

SEQ ID NO: 93423 - RNA, 19 nt, Homo sapiens
  misc_RNA (1)...(19): siRNA sense strand
gaauguccauacaggaguu

SEQ ID NO: 93424 - RNA, 19 nt, Homo sapiens
  misc_RNA (1)...(19): siRNA sense strand
cggaaaguauuuauucuag

SEQ ID NO: 93425 - RNA, 19 nt, Homo sapiens
  misc_RNA (1)...(19): siRNA sense strand
gaaggucaaggcaauuuau

SEQ ID NO: 93426 - RNA, 19 nt, Homo sapiens
  misc_RNA (1)...(19): siRNA sense strand
cgggaaaggucaucucugu

SEQ ID NO: 93427 - RNA, 19 nt, Homo sapiens
  misc_RNA (1)...(19): siRNA sense strand
cgggaaaucuuuggaaugu

SEQ ID NO: 93428 - RNA, 19 nt, Homo sapiens
  misc_RNA (1)...(19): siRNA sense strand
ucacauauuccaucaucua

SEQ ID NO: 93429 - RNA, 19 nt, Homo sapiens
  misc_RNA (1)...(19): siRNA sense strand
gggcuucaccggccuguuu

SEQ ID NO: 93430 - RNA, 19 nt, Homo sapiens
  misc_RNA (1)...(19): siRNA sense strand
gacaugaaacgcagaucua

SEQ ID NO: 93431 - RNA, 19 nt, Homo sapiens
  misc_RNA (1)...(19): siRNA sense strand
ucagagagguggacagaac

SEQ ID NO: 93432 - RNA, 19 nt, Homo sapiens
  misc_RNA (1)...(19): siRNA sense strand
cagaucuuauuaccuauga

SEQ ID NO: 93433 - RNA, 19 nt, Homo sapiens
  misc_RNA (1)...(19): siRNA sense strand
acaggaguuugacagguua

SEQ ID NO: 93434 - RNA, 19 nt, Homo sapiens
  misc_RNA (1)...(19): siRNA sense strand
uguaagcaaucuacgaaga

SEQ ID NO: 93435 - RNA, 19 nt, Homo sapiens
  misc_RNA (1)...(19): siRNA sense strand
ugaaagaagagauggagaa

SEQ ID NO: 93436 - RNA, 19 nt, Homo sapiens
  misc_RNA (1)...(19): siRNA sense strand
ggagaggaaauguaucuuc

SEQ ID NO: 93437 - RNA, 19 nt, Homo sapiens
  misc_RNA (1)...(19): siRNA sense strand
cuaccgacuucgcucagua

SEQ ID NO: 93438 - RNA, 19 nt, Homo sapiens
  misc_RNA (1)...(19): siRNA sense strand
agaaggagaggaaauguau

SEQ ID NO: 93439 - RNA, 19 nt, Homo sapiens
  misc_RNA (1)...(19): siRNA sense strand
cgacuucgcucaguauaac

SEQ ID NO: 93440 - RNA, 19 nt, Homo sapiens
  misc_RNA (1)...(19): siRNA sense strand
gaaccaaagauauuuccau

SEQ ID NO: 93441 - RNA, 19 nt, Homo sapiens
  misc_RNA (1)...(19): siRNA sense strand
cgaaggucaaggcaauuua

SEQ ID NO: 93442 - RNA, 19 nt, Homo sapiens
  misc_RNA (1)...(19): siRNA sense strand
uacaggaguuugacagguu

SEQ ID NO: 93443 - RNA, 19 nt, Homo sapiens
  misc_RNA (1)...(19): siRNA sense strand
gcagaugcaaccagauguu

SEQ ID NO: 93444 - RNA, 19 nt, Homo sapiens
  misc_RNA (1)...(19): siRNA sense strand
ucaaggcaauuuaugacau

SEQ ID NO: 93445 - RNA, 19 nt, Homo sapiens
  misc_RNA (1)...(19): siRNA sense strand
cagaaggagaggaaaugua

SEQ ID NO: 93446 - RNA, 19 nt, Homo sapiens
  misc_RNA (1)...(19): siRNA sense strand
gagaaagagagccgggaaa

SEQ ID NO: 93447 - RNA, 19 nt, Homo sapiens
  misc_RNA (1)...(19): siRNA sense strand
gcgagacaccagagauuga

SEQ ID NO: 93448 - RNA, 19 nt, Homo sapiens
  misc_RNA (1)...(19): siRNA sense strand
gcaaguccucagaagauau

SEQ ID NO: 93449 - RNA, 19 nt, Homo sapiens
  misc_RNA (1)...(19): siRNA sense strand
aggccaggcuccaguauuc

SEQ ID NO: 93450 - RNA, 19 nt, Homo sapiens
  misc_RNA (1)...(19): siRNA sense strand
aaagagagccgggaaaggu

SEQ ID NO: 93451 - RNA, 19 nt, Homo sapiens
  misc_RNA (1)...(19): siRNA sense strand
gaugaugaggaacuucuga

SEQ ID NO: 93452 - RNA, 19 nt, Homo sapiens
  misc_RNA (1)...(19): siRNA sense strand
ggaacuccccucucccuua

SEQ ID NO: 93453 - RNA, 19 nt, Homo sapiens
  misc_RNA (1)...(19): siRNA sense strand
agacagagccuuggagagu

SEQ ID NO: 93454 - RNA, 19 nt, Homo sapiens
  misc_RNA (1)...(19): siRNA sense strand
uagcagccauuccgaaggu

SEQ ID NO: 93455 - RNA, 19 nt, Homo sapiens
  misc_RNA (1)...(19): siRNA sense strand
cuucacauauuccaucauc

SEQ ID NO: 93456 - RNA, 19 nt, Homo sapiens
  misc_RNA (1)...(19): siRNA sense strand
aaccagauguucacagaag

SEQ ID NO: 93457 - RNA, 19 nt, Homo sapiens
  misc_RNA (1)...(19): siRNA sense strand
ugggacaguugaucuugaa

SEQ ID NO: 93458 - RNA, 19 nt, Homo sapiens
  misc_RNA (1)...(19): siRNA sense strand
cgccacagcuacacuccaa

SEQ ID NO: 93459 - RNA, 19 nt, Homo sapiens
  misc_RNA (1)...(19): siRNA sense strand
caccaggucauacuaucua

SEQ ID NO: 93460 - RNA, 19 nt, Homo sapiens
  misc_RNA (1)...(19): siRNA sense strand
cagagcaaguccucagaag

SEQ ID NO: 93461 - RNA, 19 nt, Homo sapiens
  misc_RNA (1)...(19): siRNA sense strand
ccucggaaaguauuuauuc

SEQ ID NO: 93462 - RNA, 19 nt, Homo sapiens
  misc_RNA (1)...(19): siRNA sense strand
gggcuaugaugacaaacag

SEQ ID NO: 93463 - RNA, 19 nt, Homo sapiens
  misc_RNA (1)...(19): siRNA sense strand
acacuucgggcuaugauga

SEQ ID NO: 93464 - RNA, 19 nt, Homo sapiens
  misc_RNA (1)...(19): siRNA sense strand
cauugaacguccagaucuu

SEQ ID NO: 93465 - RNA, 19 nt, Homo sapiens
  misc_RNA (1)...(19): siRNA sense strand
ggagagacagagccuugga

SEQ ID NO: 93466 - RNA, 19 nt, Homo sapiens
  misc_RNA (1)...(19): siRNA sense strand
gagugucuaugcccaacau

SEQ ID NO: 93467 - RNA, 19 nt, Homo sapiens
  misc_RNA (1)...(19): siRNA sense strand
aggcaggugacaaacauua

SEQ ID NO: 93468 - RNA, 19 nt, Homo sapiens
  misc_RNA (1)...(19): siRNA sense strand
ggacaguugaucuugaaag

SEQ ID NO: 93469 - RNA, 19 nt, Homo sapiens
  misc_RNA (1)...(19): siRNA sense strand
guucacagaaggagaggaa

SEQ ID NO: 93470 - RNA, 19 nt, Homo sapiens
  misc_RNA (1)...(19): siRNA sense strand
cagcgagacaccagagauu

SEQ ID NO: 93471 - RNA, 19 nt, Homo sapiens
  misc_RNA (1)...(19): siRNA sense strand
cagcagaugcaaccagaug

SEQ ID NO: 93472 - RNA, 19 nt, Homo sapiens
  misc_RNA (1)...(19): siRNA sense strand
aaucaacauuuaccgaaag

SEQ ID NO: 93473 - RNA, 19 nt, Homo sapiens
  misc_RNA (1)...(19): siRNA sense strand
gauguucgggaucggauga

SEQ ID NO: 93474 - RNA, 19 nt, Homo sapiens
  misc_RNA (1)...(19): siRNA sense strand
ggagacgcaacgacaugaa

SEQ ID NO: 93475 - RNA, 19 nt, Homo sapiens
  misc_RNA (1)...(19): siRNA sense strand
gaaagagagccgggaaagg

SEQ ID NO: 93476 - RNA, 19 nt, Homo sapiens
  misc_RNA (1)...(19): siRNA sense strand
uaugagccuuucuacacuu

SEQ ID NO: 93477 - RNA, 19 nt, Homo sapiens
  misc_RNA (1)...(19): siRNA sense strand
cacauauuccaucaucuaa

SEQ ID NO: 93478 - RNA, 19 nt, Homo sapiens
  misc_RNA (1)...(19): siRNA sense strand
ucaacucagcuucacauau

SEQ ID NO: 93479 - RNA, 19 nt, Homo sapiens
  misc_RNA (1)...(19): siRNA sense strand
ucacagaaggagaggaaau

SEQ ID NO: 93480 - RNA, 19 nt, Homo sapiens
  misc_RNA (1)...(19): siRNA sense strand
cucauuugcugucauagga

SEQ ID NO: 93481 - RNA, 19 nt, Homo sapiens
  misc_RNA (1)...(19): siRNA sense strand
agcaaguccucagaagaua

SEQ ID NO: 93482 - RNA, 19 nt, Homo sapiens
  misc_RNA (1)...(19): siRNA sense strand
gcagaucuaguggcagaga

SEQ ID NO: 93483 - RNA, 19 nt, Homo sapiens
  misc_RNA (1)...(19): siRNA sense strand
gaacuccccucucccuuac

SEQ ID NO: 93484 - RNA, 19 nt, Homo sapiens
  misc_RNA (1)...(19): siRNA sense strand
gacauccucggaaaguauu

SEQ ID NO: 93485 - RNA, 19 nt, Homo sapiens
  misc_RNA (1)...(19): siRNA sense strand
cuacgauucucccaucaac

SEQ ID NO: 93486 - RNA, 19 nt, Homo sapiens
  misc_RNA (1)...(19): siRNA sense strand
caucccgacuguaagcaau

SEQ ID NO: 93487 - RNA, 19 nt, Homo sapiens
  misc_RNA (1)...(19): siRNA sense strand
ccucagaagauaucaucaa

SEQ ID NO: 93488 - RNA, 19 nt, Homo sapiens
  misc_RNA (1)...(19): siRNA sense strand
ccagagcaaguccucagaa

SEQ ID NO: 93489 - RNA, 19 nt, Homo sapiens
  misc_RNA (1)...(19): siRNA sense strand
cgaaagccacccaucuaca

SEQ ID NO: 93490 - RNA, 19 nt, Homo sapiens
  misc_RNA (1)...(19): siRNA sense strand
gcucaccaggucauacuau

SEQ ID NO: 93491 - RNA, 19 nt, Homo sapiens
  misc_RNA (1)...(19): siRNA sense strand
gcucaggccccuaaacauu

SEQ ID NO: 93492 - RNA, 19 nt, Homo sapiens
  misc_RNA (1)...(19): siRNA sense strand
ggccacaugccugcaauga

SEQ ID NO: 93493 - RNA, 19 nt, Homo sapiens
  misc_RNA (1)...(19): siRNA sense strand
caacucagcuucacauauu

SEQ ID NO: 93494 - RNA, 19 nt, Homo sapiens
  misc_RNA (1)...(19): siRNA sense strand
ggaaaggucaucucuguua

SEQ ID NO: 93495 - RNA, 19 nt, Homo sapiens
  misc_RNA (1)...(19): siRNA sense strand
cagaagauaucaucaaguu

SEQ ID NO: 93496 - RNA, 19 nt, Homo sapiens
  misc_RNA (1)...(19): siRNA sense strand
gaacguccagaucuuauua

SEQ ID NO: 93497 - RNA, 19 nt, Homo sapiens
  misc_RNA (1)...(19): siRNA sense strand
cauaggaccugacaugaaa

SEQ ID NO: 93498 - RNA, 19 nt, Homo sapiens
  misc_RNA (1)...(19): siRNA sense strand
aagaagagauggagaaaga

SEQ ID NO: 93499 - RNA, 19 nt, Homo sapiens
  misc_RNA (1)...(19): siRNA sense strand
ccacaugccugcaaugaga

SEQ ID NO: 93500 - RNA, 19 nt, Homo sapiens
  misc_RNA (1)...(19): siRNA sense strand
gaucaaggaaucaacauuu

SEQ ID NO: 93501 - RNA, 19 nt, Homo sapiens
  misc_RNA (1)...(19): siRNA sense strand
guccagaucuuauuaccua

SEQ ID NO: 93502 - RNA, 19 nt, Homo sapiens
  misc_RNA (1)...(19): siRNA sense strand
caacagagggcgaaacaaa

SEQ ID NO: 93503 - RNA, 19 nt, Homo sapiens
  misc_RNA (1)...(19): siRNA sense strand
gaaucaacauuuaccgaaa

SEQ ID NO: 93504 - RNA, 19 nt, Homo sapiens
  misc_RNA (1)...(19): siRNA sense strand
gagaggaaauguaucuuca

SEQ ID NO: 93505 - RNA, 19 nt, Homo sapiens
  misc_RNA (1)...(19): siRNA sense strand
caaggcaauuuaugacauu

SEQ ID NO: 93506 - RNA, 19 nt, Homo sapiens
  misc_RNA (1)...(19): siRNA sense strand
ccacagaccuggcaaugag

SEQ ID NO: 93507 - RNA, 19 nt, Homo sapiens
  misc_RNA (1)...(19): siRNA sense strand
gaaagccacccaucuacaa

SEQ ID NO: 93508 - RNA, 19 nt, Homo sapiens
  misc_RNA (1)...(19): siRNA sense strand
gcagagaggaagaugauga

SEQ ID NO: 93509 - RNA, 19 nt, Homo sapiens
  misc_RNA (1)...(19): siRNA sense strand
gaaaggucaucucuguuag

SEQ ID NO: 93510 - RNA, 19 nt, Homo sapiens
  misc_RNA (1)...(19): siRNA sense strand
gaaagaagagauggagaaa

SEQ ID NO: 93511 - RNA, 19 nt, Homo sapiens
  misc_RNA (1)...(19): siRNA sense strand
cuucaaggcuccaccguuu

SEQ ID NO: 93512 - RNA, 19 nt, Homo sapiens
  misc_RNA (1)...(19): siRNA sense strand
agaggaagaugaugaggaa

SEQ ID NO: 93513 - RNA, 19 nt, Homo sapiens
  misc_RNA (1)...(19): siRNA sense strand
caagaagagcaauuaauga

SEQ ID NO: 93514 - RNA, 19 nt, Homo sapiens
  misc_RNA (1)...(19): siRNA sense strand
gaggaaauguaucuucaag

SEQ ID NO: 93515 - RNA, 19 nt, Homo sapiens
  misc_RNA (1)...(19): siRNA sense strand
gagcaaguccucagaagau

SEQ ID NO: 93516 - RNA, 19 nt, Homo sapiens
  misc_RNA (1)...(19): siRNA sense strand
ggaagaugaugaggaacuu

SEQ ID NO: 93517 - RNA, 19 nt, Homo sapiens
  misc_RNA (1)...(19): siRNA sense strand
gaaacaaaauccucagaga

SEQ ID NO: 93518 - RNA, 19 nt, Homo sapiens
  misc_RNA (1)...(19): siRNA sense strand
gaagagauggagaaagaga

SEQ ID NO: 93519 - RNA, 19 nt, Homo sapiens
  misc_RNA (1)...(19): siRNA sense strand
gagcaauuaaugaagcuua

SEQ ID NO: 93520 - RNA, 19 nt, Homo sapiens
  misc_RNA (1)...(19): siRNA sense strand
ucaagaagagcaauuaaug

SEQ ID NO: 93521 - RNA, 19 nt, Homo sapiens
  misc_RNA (1)...(19): siRNA sense strand
ggacauccucggaaaguau

SEQ ID NO: 93522 - RNA, 19 nt, Homo sapiens
  misc_RNA (1)...(19): siRNA sense strand
gaauguccauacaggaguu

SEQ ID NO: 93523 - RNA, 19 nt, Homo sapiens
  misc_RNA (1)...(19): siRNA sense strand
cggaaaguauuuauucuag

SEQ ID NO: 93524 - RNA, 19 nt, Homo sapiens
  misc_RNA (1)...(19): siRNA sense strand
gaaggucaaggcaauuuau

SEQ ID NO: 93525 - RNA, 19 nt, Homo sapiens
  misc_RNA (1)...(19): siRNA sense strand
cgggaaaggucaucucugu

SEQ ID NO: 93526 - RNA, 19 nt, Homo sapiens
  misc_RNA (1)...(19): siRNA sense strand
cgggaaaucuuuggaaugu

SEQ ID NO: 93527 - RNA, 19 nt, Homo sapiens
  misc_RNA (1)...(19): siRNA sense strand
ucacauauuccaucaucua

SEQ ID NO: 93528 - RNA, 19 nt, Homo sapiens
  misc_RNA (1)...(19): siRNA sense strand
gggcuucaccggccuguuu

SEQ ID NO: 93529 - RNA, 19 nt, Homo sapiens
  misc_RNA (1)...(19): siRNA sense strand
gacaugaaacgcagaucua

SEQ ID NO: 93530 - RNA, 19 nt, Homo sapiens
  misc_RNA (1)...(19): siRNA sense strand
ucagagagguggacagaac

SEQ ID NO: 93531 - RNA, 19 nt, Homo sapiens
  misc_RNA (1)...(19): siRNA sense strand
cagaucuuauuaccuauga

SEQ ID NO: 93532 - RNA, 19 nt, Homo sapiens
  misc_RNA (1)...(19): siRNA sense strand
acaggaguuugacagguua

SEQ ID NO: 93533 - RNA, 19 nt, Homo sapiens
  misc_RNA (1)...(19): siRNA sense strand
uguaagcaaucuacgaaga

SEQ ID NO: 93534 - RNA, 19 nt, Homo sapiens
  misc_RNA (1)...(19): siRNA sense strand
ugaaagaagagauggagaa

SEQ ID NO: 93535 - RNA, 19 nt, Homo sapiens
  misc_RNA (1)...(19): siRNA sense strand
ggagaggaaauguaucuuc

SEQ ID NO: 93536 - RNA, 19 nt, Homo sapiens
  misc_RNA (1)...(19): siRNA sense strand
agaaggagaggaaauguau

SEQ ID NO: 93537 - RNA, 19 nt, Homo sapiens
  misc_RNA (1)...(19): siRNA sense strand
cgacuucgcucaguauaac

SEQ ID NO: 93538 - RNA, 19 nt, Homo sapiens
  misc_RNA (1)...(19): siRNA sense strand
cuaccgacuucgcucagua

SEQ ID NO: 93539 - RNA, 19 nt, Homo sapiens
  misc_RNA (1)...(19): siRNA sense strand
gaaccaaagauauuuccau

SEQ ID NO: 93540 - RNA, 19 nt, Homo sapiens
  misc_RNA (1)...(19): siRNA sense strand
cgaaggucaaggcaauuua

SEQ ID NO: 93541 - RNA, 19 nt, Homo sapiens
  misc_RNA (1)...(19): siRNA sense strand
uacaggaguuugacagguu

SEQ ID NO: 93542 - RNA, 19 nt, Homo sapiens
  misc_RNA (1)...(19): siRNA sense strand
ucaaggcaauuuaugacau

SEQ ID NO: 93543 - RNA, 19 nt, Homo sapiens
  misc_RNA (1)...(19): siRNA sense strand
gcaaguccucagaagauau

SEQ ID NO: 93544 - RNA, 19 nt, Homo sapiens
  misc_RNA (1)...(19): siRNA sense strand
cagaaggagaggaaaugua

SEQ ID NO: 93545 - RNA, 19 nt, Homo sapiens
  misc_RNA (1)...(19): siRNA sense strand
gagaaagagagccgggaaa

SEQ ID NO: 93546 - RNA, 19 nt, Homo sapiens
  misc_RNA (1)...(19): siRNA sense strand
gcgagacaccagagauuga

SEQ ID NO: 93547 - RNA, 19 nt, Homo sapiens
  misc_RNA (1)...(19): siRNA sense strand
agacagagccuuggagagu

SEQ ID NO: 93548 - RNA, 19 nt, Homo sapiens
  misc_RNA (1)...(19): siRNA sense strand
aaagagagccgggaaaggu

SEQ ID NO: 93549 - RNA, 19 nt, Homo sapiens
  misc_RNA (1)...(19): siRNA sense strand
aggccaggcuccaguauuc

SEQ ID NO: 93550 - RNA, 19 nt, Homo sapiens
  misc_RNA (1)...(19): siRNA sense strand
gaugaugaggaacuucuga

SEQ ID NO: 93551 - RNA, 19 nt, Homo sapiens
  misc_RNA (1)...(19): siRNA sense strand
ggaacuccccucucccuua

SEQ ID NO: 93552 - RNA, 19 nt, Homo sapiens
  misc_RNA (1)...(19): siRNA sense strand
uagcagccauuccgaaggu

SEQ ID NO: 93553 - RNA, 19 nt, Homo sapiens
  misc_RNA (1)...(19): siRNA sense strand
cuucacauauuccaucauc

SEQ ID NO: 93554 - RNA, 19 nt, Homo sapiens
  misc_RNA (1)...(19): siRNA sense strand
ugggacaguugaucuugaa

SEQ ID NO: 93555 - RNA, 19 nt, Homo sapiens
  misc_RNA (1)...(19): siRNA sense strand
cgccacagcuacacuccaa

SEQ ID NO: 93556 - RNA, 19 nt, Homo sapiens
  misc_RNA (1)...(19): siRNA sense strand
caccaggucauacuaucua

SEQ ID NO: 93557 - RNA, 19 nt, Homo sapiens
  misc_RNA (1)...(19): siRNA sense strand
cagagcaaguccucagaag

SEQ ID NO: 93558 - RNA, 19 nt, Homo sapiens
  misc_RNA (1)...(19): siRNA sense strand
gggcuaugaugacaaacag

SEQ ID NO: 93559 - RNA, 19 nt, Homo sapiens
  misc_RNA (1)...(19): siRNA sense strand
acacuucgggcuaugauga

SEQ ID NO: 93560 - RNA, 19 nt, Homo sapiens
  misc_RNA (1)...(19): siRNA sense strand
cauugaacguccagaucuu

SEQ ID NO: 93561 - RNA, 19 nt, Homo sapiens
  misc_RNA (1)...(19): siRNA sense strand
ccucggaaaguauuuauuc

SEQ ID NO: 93562 - RNA, 19 nt, Homo sapiens
  misc_RNA (1)...(19): siRNA sense strand
ggagagacagagccuugga

SEQ ID NO: 93563 - RNA, 19 nt, Homo sapiens
  misc_RNA (1)...(19): siRNA sense strand
gagugucuaugcccaacau

SEQ ID NO: 93564 - RNA, 19 nt, Homo sapiens
  misc_RNA (1)...(19): siRNA sense strand
guucacagaaggagaggaa

SEQ ID NO: 93565 - RNA, 19 nt, Homo sapiens
  misc_RNA (1)...(19): siRNA sense strand
ggacaguugaucuugaaag

SEQ ID NO: 93566 - RNA, 19 nt, Homo sapiens
  misc_RNA (1)...(19): siRNA sense strand
cagcgagacaccagagauu

SEQ ID NO: 93567 - RNA, 19 nt, Homo sapiens
  misc_RNA (1)...(19): siRNA sense strand
aaucaacauuuaccgaaag

SEQ ID NO: 93568 - RNA, 19 nt, Homo sapiens
  misc_RNA (1)...(19): siRNA sense strand
gauguucgggaucggauga

SEQ ID NO: 93569 - RNA, 19 nt, Homo sapiens
  misc_RNA (1)...(19): siRNA sense strand
ggagacgcaacgacaugaa

SEQ ID NO: 93570 - RNA, 19 nt, Homo sapiens
  misc_RNA (1)...(19): siRNA sense strand
gaaagagagccgggaaagg

SEQ ID NO: 93571 - RNA, 19 nt, Homo sapiens
  misc_RNA (1)...(19): siRNA sense strand
uaugagccuuucuacacuu

SEQ ID NO: 93572 - RNA, 19 nt, Homo sapiens
  misc_RNA (1)...(19): siRNA sense strand
cacauauuccaucaucuaa

SEQ ID NO: 93573 - RNA, 19 nt, Homo sapiens
  misc_RNA (1)...(19): siRNA sense strand
ucaacucagcuucacauau

SEQ ID NO: 93574 - RNA, 19 nt, Homo sapiens
  misc_RNA (1)...(19): siRNA sense strand
cucauuugcugucauagga

SEQ ID NO: 93575 - RNA, 19 nt, Homo sapiens
  misc_RNA (1)...(19): siRNA sense strand
ucacagaaggagaggaaau

SEQ ID NO: 93576 - RNA, 19 nt, Homo sapiens
  misc_RNA (1)...(19): siRNA sense strand
agcaaguccucagaagaua

SEQ ID NO: 93577 - RNA, 19 nt, Homo sapiens
  misc_RNA (1)...(19): siRNA sense strand
gcagaucuaguggcagaga

SEQ ID NO: 93578 - RNA, 19 nt, Homo sapiens
  misc_RNA (1)...(19): siRNA sense strand
gaacuccccucucccuuac

SEQ ID NO: 93579 - RNA, 19 nt, Homo sapiens
  misc_RNA (1)...(19): siRNA sense strand
gacauccucggaaaguauu

SEQ ID NO: 93580 - RNA, 19 nt, Homo sapiens
  misc_RNA (1)...(19): siRNA sense strand
gcucaccaggucauacuau

SEQ ID NO: 93581 - RNA, 19 nt, Homo sapiens
  misc_RNA (1)...(19): siRNA sense strand
cuacgauucucccaucaac

SEQ ID NO: 93582 - RNA, 19 nt, Homo sapiens
  misc_RNA (1)...(19): siRNA sense strand
caucccgacuguaagcaau

SEQ ID NO: 93583 - RNA, 19 nt, Homo sapiens
  misc_RNA (1)...(19): siRNA sense strand
ccucagaagauaucaucaa

SEQ ID NO: 93584 - RNA, 19 nt, Homo sapiens
  misc_RNA (1)...(19): siRNA sense strand
ccagagcaaguccucagaa

SEQ ID NO: 93585 - RNA, 19 nt, Homo sapiens
  misc_RNA (1)...(19): siRNA sense strand
cgaaagccacccaucuaca

SEQ ID NO: 93586 - RNA, 19 nt, Homo sapiens
  misc_RNA (1)...(19): siRNA sense strand
gcccucuaacuccaacuua

SEQ ID NO: 93587 - RNA, 19 nt, Homo sapiens
  misc_RNA (1)...(19): siRNA sense strand
ggccacaugccugcaauga

SEQ ID NO: 93588 - RNA, 19 nt, Homo sapiens
  misc_RNA (1)...(19): siRNA sense strand
gcucaggccccuaaacauu

SEQ ID NO: 93589 - RNA, 19 nt, Homo sapiens
  misc_RNA (1)...(19): siRNA sense strand
uaccagacacucccagaug

SEQ ID NO: 93590 - RNA, 19 nt, Homo sapiens
  misc_RNA (1)...(19): siRNA sense strand
caggcuggagcgccacuua

SEQ ID NO: 93591 - RNA, 19 nt, Homo sapiens
  misc_RNA (1)...(19): siRNA sense strand
ggaccgaggagugucuaug

SEQ ID NO: 93592 - RNA, 19 nt, Homo sapiens
  misc_RNA (1)...(19): siRNA sense strand
gacauugaacguccagauc

SEQ ID NO: 93593 - RNA, 19 nt, Homo sapiens
  misc_RNA (1)...(19): siRNA sense strand
ggaagaauguggagaguuu

SEQ ID NO: 93594 - RNA, 19 nt, Homo sapiens
  misc_RNA (1)...(19): siRNA sense strand
ggaaaugagucaacagaug

SEQ ID NO: 93595 - RNA, 19 nt, Homo sapiens
  misc_RNA (1)...(19): siRNA sense strand
gaaaugagucaacagauga

SEQ ID NO: 93596 - RNA, 19 nt, Homo sapiens
  misc_RNA (1)...(19): siRNA sense strand
ccacuuggcuccauucaga

SEQ ID NO: 93597 - RNA, 19 nt, Homo sapiens
  misc_RNA (1)...(19): siRNA sense strand
gcagcgaccacccgaauua

SEQ ID NO: 93598 - RNA, 19 nt, Homo sapiens
  misc_RNA (1)...(19): siRNA sense strand
ucaaguauuuguccacaga

SEQ ID NO: 93599 - RNA, 19 nt, Homo sapiens
  misc_RNA (1)...(19): siRNA sense strand
ucaguacgcugcccgaaga

SEQ ID NO: 93600 - RNA, 19 nt, Homo sapiens
  misc_RNA (1)...(19): siRNA sense strand
cuucacaucuucaaguauu

SEQ ID NO: 93601 - RNA, 19 nt, Homo sapiens
  misc_RNA (1)...(19): siRNA sense strand
gaugagaaggacuuaauga

SEQ ID NO: 93602 - RNA, 19 nt, Homo sapiens
  misc_RNA (1)...(19): siRNA sense strand
ggaaggauagccucuugaa

SEQ ID NO: 93603 - RNA, 19 nt, Homo sapiens
  misc_RNA (1)...(19): siRNA sense strand
ugagucaacagaugaauuu

SEQ ID NO: 93604 - RNA, 19 nt, Homo sapiens
  misc_RNA (1)...(19): siRNA sense strand
gagacccugugcagauuga

SEQ ID NO: 93605 - RNA, 19 nt, Homo sapiens
  misc_RNA (1)...(19): siRNA sense strand
ccucaaggcucggaagaau

SEQ ID NO: 93606 - RNA, 19 nt, Homo sapiens
  misc_RNA (1)...(19): siRNA sense strand
gagguggucuggaaaugag

SEQ ID NO: 93607 - RNA, 19 nt, Homo sapiens
  misc_RNA (1)...(19): siRNA sense strand
cacaacggcucgccuaagu

SEQ ID NO: 93608 - RNA, 19 nt, Homo sapiens
  misc_RNA (1)...(19): siRNA sense strand
ggaacuguguggccucucu

SEQ ID NO: 93609 - RNA, 19 nt, Homo sapiens
  misc_RNA (1)...(19): siRNA sense strand
gcaagagguggucuggaaa

SEQ ID NO: 93610 - RNA, 19 nt, Homo sapiens
  misc_RNA (1)...(19): siRNA sense strand
ggaggaaccagcucaguac

SEQ ID NO: 93611 - RNA, 19 nt, Homo sapiens
  misc_RNA (1)...(19): siRNA sense strand
gagcagcgaccacccgaau

SEQ ID NO: 93612 - RNA, 19 nt, Homo sapiens
  misc_RNA (1)...(19): siRNA sense strand
agcaagagguggucuggaa

SEQ ID NO: 93613 - RNA, 19 nt, Homo sapiens
  misc_RNA (1)...(19): siRNA sense strand
gccuggauuucuccuguaa

SEQ ID NO: 93614 - RNA, 19 nt, Homo sapiens
  misc_RNA (1)...(19): siRNA sense strand
ggaaacuucacaucuucaa

SEQ ID NO: 93615 - RNA, 19 nt, Homo sapiens
  misc_RNA (1)...(19): siRNA sense strand
agaaggacuuaaugacuca

SEQ ID NO: 93616 - RNA, 19 nt, Homo sapiens
  misc_RNA (1)...(19): siRNA sense strand
cagaugagaaggacuuaau

SEQ ID NO: 93617 - RNA, 19 nt, Homo sapiens
  misc_RNA (1)...(19): siRNA sense strand
ucacagcccucaccuaccu

SEQ ID NO: 93618 - RNA, 19 nt, Homo sapiens
  misc_RNA (1)...(19): siRNA sense strand
ucaaggcucggaagaaugu

SEQ ID NO: 93619 - RNA, 19 nt, Homo sapiens
  misc_RNA (1)...(19): siRNA sense strand
cuaccacaauugccugaga

SEQ ID NO: 93620 - RNA, 19 nt, Homo sapiens
  misc_RNA (1)...(19): siRNA sense strand
cggaggaaccagcucagua

SEQ ID NO: 93621 - RNA, 19 nt, Homo sapiens
  misc_RNA (1)...(19): siRNA sense strand
cggagacccugugcagauu

SEQ ID NO: 93622 - RNA, 19 nt, Homo sapiens
  misc_RNA (1)...(19): siRNA sense strand
gagcugucauuccggaucu

SEQ ID NO: 93623 - RNA, 19 nt, Homo sapiens
  misc_RNA (1)...(19): siRNA sense strand
caagagguggucuggaaau

SEQ ID NO: 93624 - RNA, 19 nt, Homo sapiens
  misc_RNA (1)...(19): siRNA sense strand
ucaugcugcugcucuaugu

SEQ ID NO: 93625 - RNA, 19 nt, Homo sapiens
  misc_RNA (1)...(19): siRNA sense strand
ggacccugaaccugucuaa

SEQ ID NO: 93626 - RNA, 19 nt, Homo sapiens
  misc_RNA (1)...(19): siRNA sense strand
gaaggauagccucuugaag

SEQ ID NO: 93627 - RNA, 19 nt, Homo sapiens
  misc_RNA (1)...(19): siRNA sense strand
gcacaacggcucgccuaag

SEQ ID NO: 93628 - RNA, 19 nt, Homo sapiens
  misc_RNA (1)...(19): siRNA sense strand
ccacucaagccaugcacaa

SEQ ID NO: 93629 - RNA, 19 nt, Homo sapiens
  misc_RNA (1)...(19): siRNA sense strand
gaccaaacagcuuccucuu

SEQ ID NO: 93630 - RNA, 19 nt, Homo sapiens
  misc_RNA (1)...(19): siRNA sense strand
guugauaguggcagcaaga

SEQ ID NO: 93631 - RNA, 19 nt, Homo sapiens
  misc_RNA (1)...(19): siRNA sense strand
ugagaaggacuuaaugacu

SEQ ID NO: 93632 - RNA, 19 nt, Homo sapiens
  misc_RNA (1)...(19): siRNA sense strand
ggagacccugugcagauug

SEQ ID NO: 93633 - RNA, 19 nt, Homo sapiens
  misc_RNA (1)...(19): siRNA sense strand
guaaccgcgucucccgaau

SEQ ID NO: 93634 - RNA, 19 nt, Homo sapiens
  misc_RNA (1)...(19): siRNA sense strand
gccugagccucuaccacaa

SEQ ID NO: 93635 - RNA, 19 nt, Homo sapiens
  misc_RNA (1)...(19): siRNA sense strand
cugagccucuaccacaauu

SEQ ID NO: 93636 - RNA, 19 nt, Homo sapiens
  misc_RNA (1)...(19): siRNA sense strand
gaaacuucacaucuucaag

SEQ ID NO: 93637 - RNA, 19 nt, Homo sapiens
  misc_RNA (1)...(19): siRNA sense strand
ggggaaacuucacaucuuc

SEQ ID NO: 93638 - RNA, 19 nt, Homo sapiens
  misc_RNA (1)...(19): siRNA sense strand
gaaucccagucuccuucug

SEQ ID NO: 93639 - RNA, 19 nt, Homo sapiens
  misc_RNA (1)...(19): siRNA sense strand
gaacuguguggccucucuu

SEQ ID NO: 93640 - RNA, 19 nt, Homo sapiens
  misc_RNA (1)...(19): siRNA sense strand
ccaagagccccuucccaua

SEQ ID NO: 93641 - RNA, 19 nt, Homo sapiens
  misc_RNA (1)...(19): siRNA sense strand
cagcgaccacccgaauuaa

SEQ ID NO: 93642 - RNA, 19 nt, Homo sapiens
  misc_RNA (1)...(19): siRNA sense strand
gcagcaacgagcuccaauc

SEQ ID NO: 93643 - RNA, 19 nt, Homo sapiens
  misc_RNA (1)...(19): siRNA sense strand
ucuagaagccugucgaaaa

SEQ ID NO: 93644 - RNA, 19 nt, Homo sapiens
  misc_RNA (1)...(19): siRNA sense strand
aagagguggucuggaaaug

SEQ ID NO: 93645 - RNA, 19 nt, Homo sapiens
  misc_RNA (1)...(19): siRNA sense strand
guagcuacgaccugucaga

SEQ ID NO: 93646 - RNA, 19 nt, Homo sapiens
  misc_RNA (1)...(19): siRNA sense strand
ccucugguccgccuggauu

SEQ ID NO: 93647 - RNA, 19 nt, Homo sapiens
  misc_RNA (1)...(19): siRNA sense strand
uaccacaauugccugagau

SEQ ID NO: 93648 - RNA, 19 nt, Homo sapiens
  misc_RNA (1)...(19): siRNA sense strand
cgccuggauuucuccugua

SEQ ID NO: 93649 - RNA, 19 nt, Homo sapiens
  misc_RNA (1)...(19): siRNA sense strand
gcggcuucgucgucuucua

SEQ ID NO: 93650 - RNA, 19 nt, Homo sapiens
  misc_RNA (1)...(19): siRNA sense strand
ucacaucuucaaguauuug

SEQ ID NO: 93651 - RNA, 19 nt, Homo sapiens
  misc_RNA (1)...(19): siRNA sense strand
ccaauggccuugagauuaa

SEQ ID NO: 93652 - RNA, 19 nt, Homo sapiens
  misc_RNA (1)...(19): siRNA sense strand
caccaaagaucuccaauau

SEQ ID NO: 93653 - RNA, 19 nt, Homo sapiens
  misc_RNA (1)...(19): siRNA sense strand
gaagguggaugucuaugau

SEQ ID NO: 93654 - RNA, 19 nt, Homo sapiens
  misc_RNA (1)...(19): siRNA sense strand
gaaacgccauucucuggaa

SEQ ID NO: 93655 - RNA, 19 nt, Homo sapiens
  misc_RNA (1)...(19): siRNA sense strand
cccaagaccucccaaguuu

SEQ ID NO: 93656 - RNA, 19 nt, Homo sapiens
  misc_RNA (1)...(19): siRNA sense strand
guacaagucccaccaaaga

SEQ ID NO: 93657 - RNA, 19 nt, Homo sapiens
  misc_RNA (1)...(19): siRNA sense strand
gaacuauccucccacuauc

SEQ ID NO: 93658 - RNA, 19 nt, Homo sapiens
  misc_RNA (1)...(19): siRNA sense strand
ugaaggagaagaagaauau

SEQ ID NO: 93659 - RNA, 19 nt, Homo sapiens
  misc_RNA (1)...(19): siRNA sense strand
gaugacacuaggauaaaua

SEQ ID NO: 93660 - RNA, 19 nt, Homo sapiens
  misc_RNA (1)...(19): siRNA sense strand
acgacaagcuucacucaaa

SEQ ID NO: 93661 - RNA, 19 nt, Homo sapiens
  misc_RNA (1)...(19): siRNA sense strand
gaugaggguuccuacacuu

SEQ ID NO: 93662 - RNA, 19 nt, Homo sapiens
  misc_RNA (1)...(19): siRNA sense strand
cgacaagcuucacucaaau

SEQ ID NO: 93663 - RNA, 19 nt, Homo sapiens
  misc_RNA (1)...(19): siRNA sense strand
ggaauuugaaggagaagaa

SEQ ID NO: 93664 - RNA, 19 nt, Homo sapiens
  misc_RNA (1)...(19): siRNA sense strand
acucaaagguggccugguu

SEQ ID NO: 93665 - RNA, 19 nt, Homo sapiens
  misc_RNA (1)...(19): siRNA sense strand
gaauacagccuccgaaucc

SEQ ID NO: 93666 - RNA, 19 nt, Homo sapiens
  misc_RNA (1)...(19): siRNA sense strand
ggaugacacuaggauaaau

SEQ ID NO: 93667 - RNA, 19 nt, Homo sapiens
  misc_RNA (1)...(19): siRNA sense strand
caccugacuuugaguggua

SEQ ID NO: 93668 - RNA, 19 nt, Homo sapiens
  misc_RNA (1)...(19): siRNA sense strand
ccaccaaagaucuccaaua

SEQ ID NO: 93669 - RNA, 19 nt, Homo sapiens
  misc_RNA (1)...(19): siRNA sense strand
caacuggaagggaauuuga

SEQ ID NO: 93670 - RNA, 19 nt, Homo sapiens
  misc_RNA (1)...(19): siRNA sense strand
ugaacuauccucccacuau

SEQ ID NO: 93671 - RNA, 19 nt, Homo sapiens
  misc_RNA (1)...(19): siRNA sense strand
uagaagacaagaacucaaa

SEQ ID NO: 93672 - RNA, 19 nt, Homo sapiens
  misc_RNA (1)...(19): siRNA sense strand
ggagcagucaggcaaauau

SEQ ID NO: 93673 - RNA, 19 nt, Homo sapiens
  misc_RNA (1)...(19): siRNA sense strand
ccaagaccucccaaguuua

SEQ ID NO: 93674 - RNA, 19 nt, Homo sapiens
  misc_RNA (1)...(19): siRNA sense strand
ggauaaauagugccaaugg

SEQ ID NO: 93675 - RNA, 19 nt, Homo sapiens
  misc_RNA (1)...(19): siRNA sense strand
gcccaagaccucccaaguu

SEQ ID NO: 93676 - RNA, 19 nt, Homo sapiens
  misc_RNA (1)...(19): siRNA sense strand
ucaggugcguucuagaaga

SEQ ID NO: 93677 - RNA, 19 nt, Homo sapiens
  misc_RNA (1)...(19): siRNA sense strand
gcucugccuucucagcaaa

SEQ ID NO: 93678 - RNA, 19 nt, Homo sapiens
  misc_RNA (1)...(19): siRNA sense strand
ggaauacagccuccgaauc

SEQ ID NO: 93679 - RNA, 19 nt, Homo sapiens
  misc_RNA (1)...(19): siRNA sense strand
ggguugagcuggagaaacg

SEQ ID NO: 93680 - RNA, 19 nt, Homo sapiens
  misc_RNA (1)...(19): siRNA sense strand
ggacgacaagcuucacuca

SEQ ID NO: 93681 - RNA, 19 nt, Homo sapiens
  misc_RNA (1)...(19): siRNA sense strand
gggaugacacuaggauaaa

SEQ ID NO: 93682 - RNA, 19 nt, Homo sapiens
  misc_RNA (1)...(19): siRNA sense strand
uaggauaaauagugccaau

SEQ ID NO: 93683 - RNA, 19 nt, Homo sapiens
  misc_RNA (1)...(19): siRNA sense strand
ucucugcucugccuucuca

SEQ ID NO: 93684 - RNA, 19 nt, Homo sapiens
  misc_RNA (1)...(19): siRNA sense strand
aggcaaauaugagugcaaa

SEQ ID NO: 93685 - RNA, 19 nt, Homo sapiens
  misc_RNA (1)...(19): siRNA sense strand
ucacagaauccaagagcaa

SEQ ID NO: 93686 - RNA, 19 nt, Homo sapiens
  misc_RNA (1)...(19): siRNA sense strand
agauugcucugccuucuuc

SEQ ID NO: 93687 - RNA, 19 nt, Homo sapiens
  misc_RNA (1)...(19): siRNA sense strand
ccacugguccuacugagau

SEQ ID NO: 93688 - RNA, 19 nt, Homo sapiens
  misc_RNA (1)...(19): siRNA sense strand
cgggaugacacuaggauaa

SEQ ID NO: 93689 - RNA, 19 nt, Homo sapiens
  misc_RNA (1)...(19): siRNA sense strand
cggcggaugucaaacaagu

SEQ ID NO: 93690 - RNA, 19 nt, Homo sapiens
  misc_RNA (1)...(19): siRNA sense strand
caagaccucccaaguuuac

SEQ ID NO: 93691 - RNA, 19 nt, Homo sapiens
  misc_RNA (1)...(19): siRNA sense strand
gaagacaagaacucaaagg

SEQ ID NO: 93692 - RNA, 19 nt, Homo sapiens
  misc_RNA (1)...(19): siRNA sense strand
aagggaauuugaaggagaa

SEQ ID NO: 93693 - RNA, 19 nt, Homo sapiens
  misc_RNA (1)...(19): siRNA sense strand
gcaaauaugagugcaaagc

SEQ ID NO: 93694 - RNA, 19 nt, Homo sapiens
  misc_RNA (1)...(19): siRNA sense strand
ccagaagguggaugucuau

SEQ ID NO: 93695 - RNA, 19 nt, Homo sapiens
  misc_RNA (1)...(19): siRNA sense strand
ccucaggugcguucuagaa

SEQ ID NO: 93696 - RNA, 19 nt, Homo sapiens
  misc_RNA (1)...(19): siRNA sense strand
ggugagaggaauaaaugga

SEQ ID NO: 93697 - RNA, 19 nt, Homo sapiens
  misc_RNA (1)...(19): siRNA sense strand
gggagcagucaggcaaaua

SEQ ID NO: 93698 - RNA, 19 nt, Homo sapiens
  misc_RNA (1)...(19): siRNA sense strand
gacaagcuucacucaaaug

SEQ ID NO: 93699 - RNA, 19 nt, Homo sapiens
  misc_RNA (1)...(19): siRNA sense strand
agaagguggaugucuauga

SEQ ID NO: 93700 - RNA, 19 nt, Homo sapiens
  misc_RNA (1)...(19): siRNA sense strand
cagaauccaagagcaauga

SEQ ID NO: 93701 - RNA, 19 nt, Homo sapiens
  misc_RNA (1)...(19): siRNA sense strand
gagcagucaggcaaauaug

SEQ ID NO: 93702 - RNA, 19 nt, Homo sapiens
  misc_RNA (1)...(19): siRNA sense strand
agguggaugucuaugauga

SEQ ID NO: 93703 - RNA, 19 nt, Homo sapiens
  misc_RNA (1)...(19): siRNA sense strand
caccuuacaccaacuggaa

SEQ ID NO: 93704 - RNA, 19 nt, Homo sapiens
  misc_RNA (1)...(19): siRNA sense strand
gcagucaggcaaauaugag

SEQ ID NO: 93705 - RNA, 19 nt, Homo sapiens
  misc_RNA (1)...(19): siRNA sense strand
gagauugcucugccuucuu

SEQ ID NO: 93706 - RNA, 19 nt, Homo sapiens
  misc_RNA (1)...(19): siRNA sense strand
gcggaugucaaacaaguca

SEQ ID NO: 93707 - RNA, 19 nt, Homo sapiens
  misc_RNA (1)...(19): siRNA sense strand
caaagguggccugguugaa

SEQ ID NO: 93708 - RNA, 19 nt, Homo sapiens
  misc_RNA (1)...(19): siRNA sense strand
uuccuacacuugcucaguu

SEQ ID NO: 93709 - RNA, 19 nt, Homo sapiens
  misc_RNA (1)...(19): siRNA sense strand
ucggugagaggaauaaaug

SEQ ID NO: 93710 - RNA, 19 nt, Homo sapiens
  misc_RNA (1)...(19): siRNA sense strand
uggaagggaauuugaagga

SEQ ID NO: 93711 - RNA, 19 nt, Homo sapiens
  misc_RNA (1)...(19): siRNA sense strand
ugagauugcucugccuucu

SEQ ID NO: 93712 - RNA, 19 nt, Homo sapiens
  misc_RNA (1)...(19): siRNA sense strand
gaggagcacuacggcaacu

SEQ ID NO: 93713 - RNA, 19 nt, Homo sapiens
  misc_RNA (1)...(19): siRNA sense strand
ucguacaagucccaccaaa

SEQ ID NO: 93714 - RNA, 19 nt, Homo sapiens
  misc_RNA (1)...(19): siRNA sense strand
ugaugaggguuccuacacu

SEQ ID NO: 93715 - RNA, 19 nt, Homo sapiens
  misc_RNA (1)...(19): siRNA sense strand
caaauaugagugcaaagcu

SEQ ID NO: 93716 - RNA, 19 nt, Homo sapiens
  misc_RNA (1)...(19): siRNA sense strand
gagcuggagaaacgccauu

SEQ ID NO: 93717 - RNA, 19 nt, Homo sapiens
  misc_RNA (1)...(19): siRNA sense strand
ccacuucucuggugaccuu

SEQ ID NO: 93718 - RNA, 19 nt, Homo sapiens
  misc_RNA (1)...(19): siRNA sense strand
ucuauuaccucuacugucu

SEQ ID NO: 93719 - RNA, 19 nt, Homo sapiens
  misc_RNA (1)...(19): siRNA sense strand
gguacgggccucucuggua

SEQ ID NO: 93720 - RNA, 19 nt, Homo sapiens
  misc_RNA (1)...(19): siRNA sense strand
gcgagaggguguacgucaa

SEQ ID NO: 93721 - RNA, 19 nt, Homo sapiens
  misc_RNA (1)...(19): siRNA sense strand
gcugggagacgacgaagga

SEQ ID NO: 93722 - RNA, 19 nt, Homo sapiens
  misc_RNA (1)...(19): siRNA sense strand
gcaggacggccucuauuac

SEQ ID NO: 93723 - RNA, 19 nt, Homo sapiens
  misc_RNA (1)...(19): siRNA sense strand
cgcaggacggccucuauua

SEQ ID NO: 93724 - RNA, 19 nt, Homo sapiens
  misc_RNA (1)...(19): siRNA sense strand
ggaggagccagaaacagau

SEQ ID NO: 93725 - RNA, 19 nt, Homo sapiens
  misc_RNA (1)...(19): siRNA sense strand
cgaaggaacaggcguuucu

SEQ ID NO: 93726 - RNA, 19 nt, Homo sapiens
  misc_RNA (1)...(19): siRNA sense strand
cauaggcgcuccgcugaag

SEQ ID NO: 93727 - RNA, 19 nt, Homo sapiens
  misc_RNA (1)...(19): siRNA sense strand
gggagacgacgaaggaaca

SEQ ID NO: 93728 - RNA, 19 nt, Homo sapiens
  misc_RNA (1)...(19): siRNA sense strand
gagaggguguacgucaaca

SEQ ID NO: 93729 - RNA, 19 nt, Homo sapiens
  misc_RNA (1)...(19): siRNA sense strand
aggaggagccagaaacaga

SEQ ID NO: 93730 - RNA, 19 nt, Homo sapiens
  misc_RNA (1)...(19): siRNA sense strand
gaggguguacgucaacauc

SEQ ID NO: 93731 - RNA, 19 nt, Homo sapiens
  misc_RNA (1)...(19): siRNA sense strand
gaaggaacaggcguuucug

SEQ ID NO: 93732 - RNA, 19 nt, Homo sapiens
  misc_RNA (1)...(19): siRNA sense strand
gacgaaggaacaggcguuu

SEQ ID NO: 93733 - RNA, 19 nt, Homo sapiens
  misc_RNA (1)...(19): siRNA sense strand
uggcugugcuggccuuagu

SEQ ID NO: 93734 - RNA, 19 nt, Homo sapiens
  misc_RNA (1)...(19): siRNA sense strand
ccagaggaggagccagaaa

SEQ ID NO: 93735 - RNA, 19 nt, Homo sapiens
  misc_RNA (1)...(19): siRNA sense strand
ccgcaggacggccucuauu

SEQ ID NO: 93736 - RNA, 19 nt, Homo sapiens
  misc_RNA (1)...(19): siRNA sense strand
ccacuucucuggugaccuu

SEQ ID NO: 93737 - RNA, 19 nt, Homo sapiens
  misc_RNA (1)...(19): siRNA sense strand
ggaggagccagaaacagau

SEQ ID NO: 93738 - RNA, 19 nt, Homo sapiens
  misc_RNA (1)...(19): siRNA sense strand
aggaggagccagaaacaga

SEQ ID NO: 93739 - RNA, 19 nt, Homo sapiens
  misc_RNA (1)...(19): siRNA sense strand
uggcugugcuggccuuagu

SEQ ID NO: 93740 - RNA, 19 nt, Homo sapiens
  misc_RNA (1)...(19): siRNA sense strand
ccagaggaggagccagaaa

SEQ ID NO: 93741 - RNA, 19 nt, Homo sapiens
  misc_RNA (1)...(19): siRNA sense strand
gcagggcacuuccagaaua

SEQ ID NO: 93742 - RNA, 19 nt, Homo sapiens
  misc_RNA (1)...(19): siRNA sense strand
gcaccuaugucucagcuaa

SEQ ID NO: 93743 - RNA, 19 nt, Homo sapiens
  misc_RNA (1)...(19): siRNA sense strand
aagccgagcucaaagauga

SEQ ID NO: 93744 - RNA, 19 nt, Homo sapiens
  misc_RNA (1)...(19): siRNA sense strand
caucuacaauggaccagua

SEQ ID NO: 93745 - RNA, 19 nt, Homo sapiens
  misc_RNA (1)...(19): siRNA sense strand
ccaaggaaccaauuuauca

SEQ ID NO: 93746 - RNA, 19 nt, Homo sapiens
  misc_RNA (1)...(19): siRNA sense strand
auacuucccugacuuggua

SEQ ID NO: 93747 - RNA, 19 nt, Homo sapiens
  misc_RNA (1)...(19): siRNA sense strand
ccacaugugccgagaauuc

SEQ ID NO: 93748 - RNA, 19 nt, Homo sapiens
  misc_RNA (1)...(19): siRNA sense strand
caacaucuacaucuacaau

SEQ ID NO: 93749 - RNA, 19 nt, Homo sapiens
  misc_RNA (1)...(19): siRNA sense strand
gacuaucacuggcaacauc

SEQ ID NO: 93750 - RNA, 19 nt, Homo sapiens
  misc_RNA (1)...(19): siRNA sense strand
gcacugaagccgagcucaa

SEQ ID NO: 93751 - RNA, 19 nt, Homo sapiens
  misc_RNA (1)...(19): siRNA sense strand
ggcaacaucuacaucuaca

SEQ ID NO: 93752 - RNA, 19 nt, Homo sapiens
  misc_RNA (1)...(19): siRNA sense strand
ggcccaaggaaccaauuua

SEQ ID NO: 93753 - RNA, 19 nt, Homo sapiens
  misc_RNA (1)...(19): siRNA sense strand
gcccaaggaaccaauuuau

SEQ ID NO: 93754 - RNA, 19 nt, Homo sapiens
  misc_RNA (1)...(19): siRNA sense strand
gcagggagagggacccaau

SEQ ID NO: 93755 - RNA, 19 nt, Homo sapiens
  misc_RNA (1)...(19): siRNA sense strand
acugcgagcuacuuucuga

SEQ ID NO: 93756 - RNA, 19 nt, Homo sapiens
  misc_RNA (1)...(19): siRNA sense strand
ggagauguuuccccaguau

SEQ ID NO: 93757 - RNA, 19 nt, Homo sapiens
  misc_RNA (1)...(19): siRNA sense strand
cgaaggcccauccauacuu

SEQ ID NO: 93758 - RNA, 19 nt, Homo sapiens
  misc_RNA (1)...(19): siRNA sense strand
ugggaucgcugcucaagag

SEQ ID NO: 93759 - RNA, 19 nt, Homo sapiens
  misc_RNA (1)...(19): siRNA sense strand
ccagagaugucaggaacca

SEQ ID NO: 93760 - RNA, 19 nt, Homo sapiens
  misc_RNA (1)...(19): siRNA sense strand
gaagccgagcucaaagaug

SEQ ID NO: 93761 - RNA, 19 nt, Homo sapiens
  misc_RNA (1)...(19): siRNA sense strand
gccaggcaccuaugucuca

SEQ ID NO: 93762 - RNA, 19 nt, Homo sapiens
  misc_RNA (1)...(19): siRNA sense strand
acaucuacaucuacaaugg

SEQ ID NO: 93763 - RNA, 19 nt, Homo sapiens
  misc_RNA (1)...(19): siRNA sense strand
agagggacccaauccugua

SEQ ID NO: 93764 - RNA, 19 nt, Homo sapiens
  misc_RNA (1)...(19): siRNA sense strand
cagccacugcuacccauuu

SEQ ID NO: 93765 - RNA, 19 nt, Homo sapiens
  misc_RNA (1)...(19): siRNA sense strand
ugaugggccucgaggagau

SEQ ID NO: 93766 - RNA, 19 nt, Homo sapiens
  misc_RNA (1)...(19): siRNA sense strand
caauuuaucacccaugacu

SEQ ID NO: 93767 - RNA, 19 nt, Homo sapiens
  misc_RNA (1)...(19): siRNA sense strand
gaaccuccauaccccauuc

SEQ ID NO: 93768 - RNA, 19 nt, Homo sapiens
  misc_RNA (1)...(19): siRNA sense strand
gaaguugggaaggguaaca

SEQ ID NO: 93769 - RNA, 19 nt, Homo sapiens
  misc_RNA (1)...(19): siRNA sense strand
acacacugcgagcuacuuu

SEQ ID NO: 93770 - RNA, 19 nt, Homo sapiens
  misc_RNA (1)...(19): siRNA sense strand
accaauuuaucacccauga

SEQ ID NO: 93771 - RNA, 19 nt, Homo sapiens
  misc_RNA (1)...(19): siRNA sense strand
cuggcaacaucuacaucua

SEQ ID NO: 93772 - RNA, 19 nt, Homo sapiens
  misc_RNA (1)...(19): siRNA sense strand
acccauuucuggagauguu

SEQ ID NO: 93773 - RNA, 19 nt, Homo sapiens
  misc_RNA (1)...(19): siRNA sense strand
gugccgagaauuccuacaa

SEQ ID NO: 93774 - RNA, 19 nt, Homo sapiens
  misc_RNA (1)...(19): siRNA sense strand
cagggcacuuccagaauac

SEQ ID NO: 93775 - RNA, 19 nt, Homo sapiens
  misc_RNA (1)...(19): siRNA sense strand
gggcccaaggaaccaauuu

SEQ ID NO: 93776 - RNA, 19 nt, Homo sapiens
  misc_RNA (1)...(19): siRNA sense strand
cuccgaaggcccauccaua

SEQ ID NO: 93777 - RNA, 19 nt, Homo sapiens
  misc_RNA (1)...(19): siRNA sense strand
ugccacaugugccgagaau

SEQ ID NO: 93778 - RNA, 19 nt, Homo sapiens
  misc_RNA (1)...(19): siRNA sense strand
gcagggaccaggaaaagga

SEQ ID NO: 93779 - RNA, 19 nt, Homo sapiens
  misc_RNA (1)...(19): siRNA sense strand
gagcucaaagaugaaguug

SEQ ID NO: 93780 - RNA, 19 nt, Homo sapiens
  misc_RNA (1)...(19): siRNA sense strand
ccacugcuacccauuucug

SEQ ID NO: 93781 - RNA, 19 nt, Homo sapiens
  misc_RNA (1)...(19): siRNA sense strand
aggcagggcacuuccagaa

SEQ ID NO: 93782 - RNA, 19 nt, Homo sapiens
  misc_RNA (1)...(19): siRNA sense strand
gaaaggaaccgagcuugua

SEQ ID NO: 93783 - RNA, 19 nt, Homo sapiens
  misc_RNA (1)...(19): siRNA sense strand
ggacaacgauggccucuac

SEQ ID NO: 93784 - RNA, 19 nt, Homo sapiens
  misc_RNA (1)...(19): siRNA sense strand
acaagaagguggagaucaa

SEQ ID NO: 93785 - RNA, 19 nt, Homo sapiens
  misc_RNA (1)...(19): siRNA sense strand
gcacgugucccaccaacaa

SEQ ID NO: 93786 - RNA, 19 nt, Homo sapiens
  misc_RNA (1)...(19): siRNA sense strand
ccaagugucugcugcucaa

SEQ ID NO: 93787 - RNA, 19 nt, Homo sapiens
  misc_RNA (1)...(19): siRNA sense strand
gcuccacgcugaccuccaa

SEQ ID NO: 93788 - RNA, 19 nt, Homo sapiens
  misc_RNA (1)...(19): siRNA sense strand
ucuauuaccuggacgagau

SEQ ID NO: 93789 - RNA, 19 nt, Homo sapiens
  misc_RNA (1)...(19): siRNA sense strand
gaagguggagaucaaggaa

SEQ ID NO: 93790 - RNA, 19 nt, Homo sapiens
  misc_RNA (1)...(19): siRNA sense strand
gcagaacacgucucagaag

SEQ ID NO: 93791 - RNA, 19 nt, Homo sapiens
  misc_RNA (1)...(19): siRNA sense strand
caagggcgagucucuauuc

SEQ ID NO: 93792 - RNA, 19 nt, Homo sapiens
  misc_RNA (1)...(19): siRNA sense strand
cggcagaacacgucucaga

SEQ ID NO: 93793 - RNA, 19 nt, Homo sapiens
  misc_RNA (1)...(19): siRNA sense strand
ggacaucaagggcgagucu

SEQ ID NO: 93794 - RNA, 19 nt, Homo sapiens
  misc_RNA (1)...(19): siRNA sense strand
ggcagaacacgucucagaa

SEQ ID NO: 93795 - RNA, 19 nt, Homo sapiens
  misc_RNA (1)...(19): siRNA sense strand
ggagaaagucggggaagua

SEQ ID NO: 93796 - RNA, 19 nt, Homo sapiens
  misc_RNA (1)...(19): siRNA sense strand
gaaagucggggaaguacaa

SEQ ID NO: 93797 - RNA, 19 nt, Homo sapiens
  misc_RNA (1)...(19): siRNA sense strand
gcgaugccgccuacuacuu

SEQ ID NO: 93798 - RNA, 19 nt, Homo sapiens
  misc_RNA (1)...(19): siRNA sense strand
gcauggccguccuggugau

SEQ ID NO: 93799 - RNA, 19 nt, Homo sapiens
  misc_RNA (1)...(19): siRNA sense strand
caucaagggcgagucucua

SEQ ID NO: 93800 - RNA, 19 nt, Homo sapiens
  misc_RNA (1)...(19): siRNA sense strand
aaaggaaccgagcuuguag

SEQ ID NO: 93801 - RNA, 19 nt, Homo sapiens
  misc_RNA (1)...(19): siRNA sense strand
cgaugccgccuacuacuuc

SEQ ID NO: 93802 - RNA, 19 nt, Homo sapiens
  misc_RNA (1)...(19): siRNA sense strand
ugagaaaggaaccgagcuu

SEQ ID NO: 93803 - RNA, 19 nt, Homo sapiens
  misc_RNA (1)...(19): siRNA sense strand
gcacgcucaucuauuaccu

SEQ ID NO: 93804 - RNA, 19 nt, Homo sapiens
  misc_RNA (1)...(19): siRNA sense strand
cccaccacauccucauuga

SEQ ID NO: 93805 - RNA, 19 nt, Homo sapiens
  misc_RNA (1)...(19): siRNA sense strand
agaaaggaaccgagcuugu

SEQ ID NO: 93806 - RNA, 19 nt, Homo sapiens
  misc_RNA (1)...(19): siRNA sense strand
ucaagggcgagucucuauu

SEQ ID NO: 93807 - RNA, 19 nt, Homo sapiens
  misc_RNA (1)...(19): siRNA sense strand
guacaagaagguggagauc

SEQ ID NO: 93808 - RNA, 19 nt, Homo sapiens
  misc_RNA (1)...(19): siRNA sense strand
uagcugauguggcuuauua

SEQ ID NO: 93809 - RNA, 19 nt, Homo sapiens
  misc_RNA (1)...(19): siRNA sense strand
ggaagaaugugucugugaa

SEQ ID NO: 93810 - RNA, 19 nt, Homo sapiens
  misc_RNA (1)...(19): siRNA sense strand
gaacaaugaugggcuuuau

SEQ ID NO: 93811 - RNA, 19 nt, Homo sapiens
  misc_RNA (1)...(19): siRNA sense strand
guaaacugcuuugugaaua

SEQ ID NO: 93812 - RNA, 19 nt, Homo sapiens
  misc_RNA (1)...(19): siRNA sense strand
gaacagacaaggacacuga

SEQ ID NO: 93813 - RNA, 19 nt, Homo sapiens
  misc_RNA (1)...(19): siRNA sense strand
gaaagaagagaauggcaaa

SEQ ID NO: 93814 - RNA, 19 nt, Homo sapiens
  misc_RNA (1)...(19): siRNA sense strand
agaagagaauggcaaagua

SEQ ID NO: 93815 - RNA, 19 nt, Homo sapiens
  misc_RNA (1)...(19): siRNA sense strand
gccguaaacugcuuuguga

SEQ ID NO: 93816 - RNA, 19 nt, Homo sapiens
  misc_RNA (1)...(19): siRNA sense strand
gaagagaauggcaaaguau

SEQ ID NO: 93817 - RNA, 19 nt, Homo sapiens
  misc_RNA (1)...(19): siRNA sense strand
auagggaacucaaugcaua

SEQ ID NO: 93818 - RNA, 19 nt, Homo sapiens
  misc_RNA (1)...(19): siRNA sense strand
agacaaggacacugaaaua

SEQ ID NO: 93819 - RNA, 19 nt, Homo sapiens
  misc_RNA (1)...(19): siRNA sense strand
aaauggaccugacaguaaa

SEQ ID NO: 93820 - RNA, 19 nt, Homo sapiens
  misc_RNA (1)...(19): siRNA sense strand
guuaucaacuggauccaaa

SEQ ID NO: 93821 - RNA, 19 nt, Homo sapiens
  misc_RNA (1)...(19): siRNA sense strand
gaauaauaaucgucaaugc

SEQ ID NO: 93822 - RNA, 19 nt, Homo sapiens
  misc_RNA (1)...(19): siRNA sense strand
ggaauuguugugcugguua

SEQ ID NO: 93823 - RNA, 19 nt, Homo sapiens
  misc_RNA (1)...(19): siRNA sense strand
gaugaaggcagaaaugaau

SEQ ID NO: 93824 - RNA, 19 nt, Homo sapiens
  misc_RNA (1)...(19): siRNA sense strand
uaaaggagaugggugagau

SEQ ID NO: 93825 - RNA, 19 nt, Homo sapiens
  misc_RNA (1)...(19): siRNA sense strand
gacaaggacacugaaauaa

SEQ ID NO: 93826 - RNA, 19 nt, Homo sapiens
  misc_RNA (1)...(19): siRNA sense strand
ugagaaggcugagauaaag

SEQ ID NO: 93827 - RNA, 19 nt, Homo sapiens
  misc_RNA (1)...(19): siRNA sense strand
gaagaaugugucugugaaa

SEQ ID NO: 93828 - RNA, 19 nt, Homo sapiens
  misc_RNA (1)...(19): siRNA sense strand
ucuaaaagcugguguuauu

SEQ ID NO: 93829 - RNA, 19 nt, Homo sapiens
  misc_RNA (1)...(19): siRNA sense strand
gugagaaccuacuggauca

SEQ ID NO: 93830 - RNA, 19 nt, Homo sapiens
  misc_RNA (1)...(19): siRNA sense strand
gcaccugaauucucaaugc

SEQ ID NO: 93831 - RNA, 19 nt, Homo sapiens
  misc_RNA (1)...(19): siRNA sense strand
gaauuguugugcugguuau

SEQ ID NO: 93832 - RNA, 19 nt, Homo sapiens
  misc_RNA (1)...(19): siRNA sense strand
gaucacaacgcguuaucaa

SEQ ID NO: 93833 - RNA, 19 nt, Homo sapiens
  misc_RNA (1)...(19): siRNA sense strand
aaacacaaagcaagagaaa

SEQ ID NO: 93834 - RNA, 19 nt, Homo sapiens
  misc_RNA (1)...(19): siRNA sense strand
ccuacuggaucaucauuga

SEQ ID NO: 93835 - RNA, 19 nt, Homo sapiens
  misc_RNA (1)...(19): siRNA sense strand
gaaaauggaccugacagua

SEQ ID NO: 93836 - RNA, 19 nt, Homo sapiens
  misc_RNA (1)...(19): siRNA sense strand
acaaugaugggcuuuauga

SEQ ID NO: 93837 - RNA, 19 nt, Homo sapiens
  misc_RNA (1)...(19): siRNA sense strand
ggagaugggugagaugcau

SEQ ID NO: 93838 - RNA, 19 nt, Homo sapiens
  misc_RNA (1)...(19): siRNA sense strand
ucaacuggauccaaaauuu

SEQ ID NO: 93839 - RNA, 19 nt, Homo sapiens
  misc_RNA (1)...(19): siRNA sense strand
gauccugacugcgaugaga

SEQ ID NO: 93840 - RNA, 19 nt, Homo sapiens
  misc_RNA (1)...(19): siRNA sense strand
acuacaagcuggccguaaa

SEQ ID NO: 93841 - RNA, 19 nt, Homo sapiens
  misc_RNA (1)...(19): siRNA sense strand
caaggacacugaaauaacc

SEQ ID NO: 93842 - RNA, 19 nt, Homo sapiens
  misc_RNA (1)...(19): siRNA sense strand
ucacgaguauuuuguauga

SEQ ID NO: 93843 - RNA, 19 nt, Homo sapiens
  misc_RNA (1)...(19): siRNA sense strand
aaucgucaaugccagugua

SEQ ID NO: 93844 - RNA, 19 nt, Homo sapiens
  misc_RNA (1)...(19): siRNA sense strand
gaauggcaaaguaugagaa

SEQ ID NO: 93845 - RNA, 19 nt, Homo sapiens
  misc_RNA (1)...(19): siRNA sense strand
ggaucaucauugaacuaaa

SEQ ID NO: 93846 - RNA, 19 nt, Homo sapiens
  misc_RNA (1)...(19): siRNA sense strand
caacuggauccaaaauuua

SEQ ID NO: 93847 - RNA, 19 nt, Homo sapiens
  misc_RNA (1)...(19): siRNA sense strand
agaaaugaauggcucaaaa

SEQ ID NO: 93848 - RNA, 19 nt, Homo sapiens
  misc_RNA (1)...(19): siRNA sense strand
aaaagcaccugaauucuca

SEQ ID NO: 93849 - RNA, 19 nt, Homo sapiens
  misc_RNA (1)...(19): siRNA sense strand
gcugauguggcuuauuauu

SEQ ID NO: 93850 - RNA, 19 nt, Homo sapiens
  misc_RNA (1)...(19): siRNA sense strand
gaacacugcuggggucaga

SEQ ID NO: 93851 - RNA, 19 nt, Homo sapiens
  misc_RNA (1)...(19): siRNA sense strand
guaugagaaggcugagaua

SEQ ID NO: 93852 - RNA, 19 nt, Homo sapiens
  misc_RNA (1)...(19): siRNA sense strand
gagaugggugagaugcaua

SEQ ID NO: 93853 - RNA, 19 nt, Homo sapiens
  misc_RNA (1)...(19): siRNA sense strand
ucacaacgcguuaucaacu

SEQ ID NO: 93854 - RNA, 19 nt, Homo sapiens
  misc_RNA (1)...(19): siRNA sense strand
gaacuaaaacacaaagcaa

SEQ ID NO: 93855 - RNA, 19 nt, Homo sapiens
  misc_RNA (1)...(19): siRNA sense strand
aaaauggaccugacaguaa

SEQ ID NO: 93856 - RNA, 19 nt, Homo sapiens
  misc_RNA (1)...(19): siRNA sense strand
cugauguggcuuauuauuu

SEQ ID NO: 93857 - RNA, 19 nt, Homo sapiens
  misc_RNA (1)...(19): siRNA sense strand
ggugaugaaggcagaaaug

SEQ ID NO: 93858 - RNA, 19 nt, Homo sapiens
  misc_RNA (1)...(19): siRNA sense strand
ucaggaagaaugugucugu

SEQ ID NO: 93859 - RNA, 19 nt, Homo sapiens
  misc_RNA (1)...(19): siRNA sense strand
uguuauugcuguuauugug

SEQ ID NO: 93860 - RNA, 19 nt, Homo sapiens
  misc_RNA (1)...(19): siRNA sense strand
agagaauggcaaaguauga

SEQ ID NO: 93861 - RNA, 19 nt, Homo sapiens
  misc_RNA (1)...(19): siRNA sense strand
uauugugguuguggugaua

SEQ ID NO: 93862 - RNA, 19 nt, Homo sapiens
  misc_RNA (1)...(19): siRNA sense strand
ccaguguacuucaguuggu

SEQ ID NO: 93863 - RNA, 19 nt, Homo sapiens
  misc_RNA (1)...(19): siRNA sense strand
aaacuugggagaagagcaa

SEQ ID NO: 93864 - RNA, 19 nt, Homo sapiens
  misc_RNA (1)...(19): siRNA sense strand
cguaaacugcuuugugaau

SEQ ID NO: 93865 - RNA, 19 nt, Homo sapiens
  misc_RNA (1)...(19): siRNA sense strand
gugaugaaggcagaaauga

SEQ ID NO: 93866 - RNA, 19 nt, Homo sapiens
  misc_RNA (1)...(19): siRNA sense strand
uaugagaaggcugagauaa

SEQ ID NO: 93867 - RNA, 19 nt, Homo sapiens
  misc_RNA (1)...(19): siRNA sense strand
gaaccuacuggaucaucau

SEQ ID NO: 93868 - RNA, 19 nt, Homo sapiens
  misc_RNA (1)...(19): siRNA sense strand
ugccgcagcucaggaagaa

SEQ ID NO: 93869 - RNA, 19 nt, Homo sapiens
  misc_RNA (1)...(19): siRNA sense strand
gagaagagcaaaaccugaa

SEQ ID NO: 93870 - RNA, 19 nt, Homo sapiens
  misc_RNA (1)...(19): siRNA sense strand
gcucaaaacuugggagaag

SEQ ID NO: 93871 - RNA, 19 nt, Homo sapiens
  misc_RNA (1)...(19): siRNA sense strand
ugaugaaggcagaaaugaa

SEQ ID NO: 93872 - RNA, 19 nt, Homo sapiens
  misc_RNA (1)...(19): siRNA sense strand
aggcugagauaaaggagau

SEQ ID NO: 93873 - RNA, 19 nt, Homo sapiens
  misc_RNA (1)...(19): siRNA sense strand
cacaacgcguuaucaacug

SEQ ID NO: 93874 - RNA, 19 nt, Homo sapiens
  misc_RNA (1)...(19): siRNA sense strand
cagacaaggacacugaaau

SEQ ID NO: 93875 - RNA, 19 nt, Homo sapiens
  misc_RNA (1)...(19): siRNA sense strand
augagaaggcugagauaaa

SEQ ID NO: 93876 - RNA, 19 nt, Homo sapiens
  misc_RNA (1)...(19): siRNA sense strand
gcaguuguugcuggaauug

SEQ ID NO: 93877 - RNA, 19 nt, Homo sapiens
  misc_RNA (1)...(19): siRNA sense strand
ggagaucacaacgcguuau

SEQ ID NO: 93878 - RNA, 19 nt, Homo sapiens
  misc_RNA (1)...(19): siRNA sense strand
augaauggcucaaaacuug

SEQ ID NO: 93879 - RNA, 19 nt, Homo sapiens
  misc_RNA (1)...(19): siRNA sense strand
caccugaauucucaaugca

SEQ ID NO: 93880 - RNA, 19 nt, Homo sapiens
  misc_RNA (1)...(19): siRNA sense strand
ggaacaacuggaucuggau

SEQ ID NO: 93881 - RNA, 19 nt, Homo sapiens
  misc_RNA (1)...(19): siRNA sense strand
gagaucacaacgcguuauc

SEQ ID NO: 93882 - RNA, 19 nt, Homo sapiens
  misc_RNA (1)...(19): siRNA sense strand
agaacaaugaugggcuuua

SEQ ID NO: 93883 - RNA, 19 nt, Homo sapiens
  misc_RNA (1)...(19): siRNA sense strand
cgucaaugccaguguacuu

SEQ ID NO: 93884 - RNA, 19 nt, Homo sapiens
  misc_RNA (1)...(19): siRNA sense strand
gguguuauugcuguuauug

SEQ ID NO: 93885 - RNA, 19 nt, Homo sapiens
  misc_RNA (1)...(19): siRNA sense strand
agaaccuacuggaucauca

SEQ ID NO: 93886 - RNA, 19 nt, Homo sapiens
  misc_RNA (1)...(19): siRNA sense strand
ggccguaaacugcuuugug

SEQ ID NO: 93887 - RNA, 19 nt, Homo sapiens
  misc_RNA (1)...(19): siRNA sense strand
ucagaagaacagacaagga

SEQ ID NO: 93888 - RNA, 19 nt, Homo sapiens
  misc_RNA (1)...(19): siRNA sense strand
ggucagaagaacagacaag

SEQ ID NO: 93889 - RNA, 19 nt, Homo sapiens
  misc_RNA (1)...(19): siRNA sense strand
uagggaacucaaugcauaa

SEQ ID NO: 93890 - RNA, 19 nt, Homo sapiens
  misc_RNA (1)...(19): siRNA sense strand
gagaauggcaaaguaugag

SEQ ID NO: 93891 - RNA, 19 nt, Homo sapiens
  misc_RNA (1)...(19): siRNA sense strand
ccgcagcucaggaagaaug

SEQ ID NO: 93892 - RNA, 19 nt, Homo sapiens
  misc_RNA (1)...(19): siRNA sense strand
uggaucaucauugaacuaa

SEQ ID NO: 93893 - RNA, 19 nt, Homo sapiens
  misc_RNA (1)...(19): siRNA sense strand
aaugaugggcuuuaugauc

SEQ ID NO: 93894 - RNA, 19 nt, Homo sapiens
  misc_RNA (1)...(19): siRNA sense strand
cagaaaugaauggcucaaa

SEQ ID NO: 93895 - RNA, 19 nt, Homo sapiens
  misc_RNA (1)...(19): siRNA sense strand
acaaggacacugaaauaac

SEQ ID NO: 93896 - RNA, 19 nt, Homo sapiens
  misc_RNA (1)...(19): siRNA sense strand
gcugguguuauugcuguua

SEQ ID NO: 93897 - RNA, 19 nt, Homo sapiens
  misc_RNA (1)...(19): siRNA sense strand
gaaugugucugugaaaacu

SEQ ID NO: 93898 - RNA, 19 nt, Homo sapiens
  misc_RNA (1)...(19): siRNA sense strand
gacaguaaauggggaacaa

SEQ ID NO: 93899 - RNA, 19 nt, Homo sapiens
  misc_RNA (1)...(19): siRNA sense strand
aagaagagaauggcaaagu

SEQ ID NO: 93900 - RNA, 19 nt, Homo sapiens
  misc_RNA (1)...(19): siRNA sense strand
aguuguugcuggaauuguu

SEQ ID NO: 93901 - RNA, 19 nt, Homo sapiens
  misc_RNA (1)...(19): siRNA sense strand
gaagagaucuggaaauuca

SEQ ID NO: 93902 - RNA, 19 nt, Homo sapiens
  misc_RNA (1)...(19): siRNA sense strand
caaguccgauccaguguua

SEQ ID NO: 93903 - RNA, 19 nt, Homo sapiens
  misc_RNA (1)...(19): siRNA sense strand
gaagaggcuuugagagaug

SEQ ID NO: 93904 - RNA, 19 nt, Homo sapiens
  misc_RNA (1)...(19): siRNA sense strand
gagaggagcacuuaaucua

SEQ ID NO: 93905 - RNA, 19 nt, Homo sapiens
  misc_RNA (1)...(19): siRNA sense strand
gaggagcacuuaaucuaug

SEQ ID NO: 93906 - RNA, 19 nt, Homo sapiens
  misc_RNA (1)...(19): siRNA sense strand
gaugaaaguccucgaguuu

SEQ ID NO: 93907 - RNA, 19 nt, Homo sapiens
  misc_RNA (1)...(19): siRNA sense strand
ugagagagcccauuaugaa

SEQ ID NO: 93908 - RNA, 19 nt, Homo sapiens
  misc_RNA (1)...(19): siRNA sense strand
gcacuacugccacgacuuu

SEQ ID NO: 93909 - RNA, 19 nt, Homo sapiens
  misc_RNA (1)...(19): siRNA sense strand
guacaaggaucacuucacu

SEQ ID NO: 93910 - RNA, 19 nt, Homo sapiens
  misc_RNA (1)...(19): siRNA sense strand
ggugugaucuucuuaaagg

SEQ ID NO: 93911 - RNA, 19 nt, Homo sapiens
  misc_RNA (1)...(19): siRNA sense strand
gcugaagguuguugaugaa

SEQ ID NO: 93912 - RNA, 19 nt, Homo sapiens
  misc_RNA (1)...(19): siRNA sense strand
aggaagagaucuggaaauu

SEQ ID NO: 93913 - RNA, 19 nt, Homo sapiens
  misc_RNA (1)...(19): siRNA sense strand
ugacgaaggugccaaaugc

SEQ ID NO: 93914 - RNA, 19 nt, Homo sapiens
  misc_RNA (1)...(19): siRNA sense strand
gauggaaaccugagcaaug

SEQ ID NO: 93915 - RNA, 19 nt, Homo sapiens
  misc_RNA (1)...(19): siRNA sense strand
gcugaaaccaccaagauga

SEQ ID NO: 93916 - RNA, 19 nt, Homo sapiens
  misc_RNA (1)...(19): siRNA sense strand
gcuccgugcucgugagaaa

SEQ ID NO: 93917 - RNA, 19 nt, Homo sapiens
  misc_RNA (1)...(19): siRNA sense strand
guaaguucaucacccaaga

SEQ ID NO: 93918 - RNA, 19 nt, Homo sapiens
  misc_RNA (1)...(19): siRNA sense strand
ccuacacccucgucaguaa

SEQ ID NO: 93919 - RNA, 19 nt, Homo sapiens
  misc_RNA (1)...(19): siRNA sense strand
ggaaaccugagcaaugauu

SEQ ID NO: 93920 - RNA, 19 nt, Homo sapiens
  misc_RNA (1)...(19): siRNA sense strand
gcuuggagcucgucuuugg

SEQ ID NO: 93921 - RNA, 19 nt, Homo sapiens
  misc_RNA (1)...(19): siRNA sense strand
gcacuucauucuacguaag

SEQ ID NO: 93922 - RNA, 19 nt, Homo sapiens
  misc_RNA (1)...(19): siRNA sense strand
ugaagaggcuuugagagau

SEQ ID NO: 93923 - RNA, 19 nt, Homo sapiens
  misc_RNA (1)...(19): siRNA sense strand
aaggaucacuucacugaga

SEQ ID NO: 93924 - RNA, 19 nt, Homo sapiens
  misc_RNA (1)...(19): siRNA sense strand
caggaaugcugaugcacuu

SEQ ID NO: 93925 - RNA, 19 nt, Homo sapiens
  misc_RNA (1)...(19): siRNA sense strand
acaaggaucacuucacuga

SEQ ID NO: 93926 - RNA, 19 nt, Homo sapiens
  misc_RNA (1)...(19): siRNA sense strand
cagauaugcugaagguugu

SEQ ID NO: 93927 - RNA, 19 nt, Homo sapiens
  misc_RNA (1)...(19): siRNA sense strand
gaaggcagauaugcugaag

SEQ ID NO: 93928 - RNA, 19 nt, Homo sapiens
  misc_RNA (1)...(19): siRNA sense strand
gaaggaagacaacccuagu

SEQ ID NO: 93929 - RNA, 19 nt, Homo sapiens
  misc_RNA (1)...(19): siRNA sense strand
agcuaaaccucaccaauga

SEQ ID NO: 93930 - RNA, 19 nt, Homo sapiens
  misc_RNA (1)...(19): siRNA sense strand
gccacaacauccacugaga

SEQ ID NO: 93931 - RNA, 19 nt, Homo sapiens
  misc_RNA (1)...(19): siRNA sense strand
uaccgaaucugacgaaggu

SEQ ID NO: 93932 - RNA, 19 nt, Homo sapiens
  misc_RNA (1)...(19): siRNA sense strand
gcugaugcacuucauucua

SEQ ID NO: 93933 - RNA, 19 nt, Homo sapiens
  misc_RNA (1)...(19): siRNA sense strand
aagcuaaaccucaccaaug

SEQ ID NO: 93934 - RNA, 19 nt, Homo sapiens
  misc_RNA (1)...(19): siRNA sense strand
agaugaaaguccucgaguu

SEQ ID NO: 93935 - RNA, 19 nt, Homo sapiens
  misc_RNA (1)...(19): siRNA sense strand
caagaucuggugcaggaaa

SEQ ID NO: 93936 - RNA, 19 nt, Homo sapiens
  misc_RNA (1)...(19): siRNA sense strand
ggaagagaucuggaaauuc

SEQ ID NO: 93937 - RNA, 19 nt, Homo sapiens
  misc_RNA (1)...(19): siRNA sense strand
auggaaaccugagcaauga

SEQ ID NO: 93938 - RNA, 19 nt, Homo sapiens
  misc_RNA (1)...(19): siRNA sense strand
caaaugccaaggugaggaa

SEQ ID NO: 93939 - RNA, 19 nt, Homo sapiens
  misc_RNA (1)...(19): siRNA sense strand
ugacuucccaucccauuau

SEQ ID NO: 93940 - RNA, 19 nt, Homo sapiens
  misc_RNA (1)...(19): siRNA sense strand
guugggagccuaugaugga

SEQ ID NO: 93941 - RNA, 19 nt, Homo sapiens
  misc_RNA (1)...(19): siRNA sense strand
ggagaggagcacuuaaucu

SEQ ID NO: 93942 - RNA, 19 nt, Homo sapiens
  misc_RNA (1)...(19): siRNA sense strand
ggaaugcugaugcacuuca

SEQ ID NO: 93943 - RNA, 19 nt, Homo sapiens
  misc_RNA (1)...(19): siRNA sense strand
gaaaccaccaagaugaaag

SEQ ID NO: 93944 - RNA, 19 nt, Homo sapiens
  misc_RNA (1)...(19): siRNA sense strand
gaaugcugaugcacuucau

SEQ ID NO: 93945 - RNA, 19 nt, Homo sapiens
  misc_RNA (1)...(19): siRNA sense strand
ugauggagaggagcacuua

SEQ ID NO: 93946 - RNA, 19 nt, Homo sapiens
  misc_RNA (1)...(19): siRNA sense strand
ugcugaagguuguugauga

SEQ ID NO: 93947 - RNA, 19 nt, Homo sapiens
  misc_RNA (1)...(19): siRNA sense strand
aggcagauaugcugaaggu

SEQ ID NO: 93948 - RNA, 19 nt, Homo sapiens
  misc_RNA (1)...(19): siRNA sense strand
gagagagcccauuaugaag

SEQ ID NO: 93949 - RNA, 19 nt, Homo sapiens
  misc_RNA (1)...(19): siRNA sense strand
ugggugugaucuucuuaaa

SEQ ID NO: 93950 - RNA, 19 nt, Homo sapiens
  misc_RNA (1)...(19): siRNA sense strand
gagagaugaggaagagaga

SEQ ID NO: 93951 - RNA, 19 nt, Homo sapiens
  misc_RNA (1)...(19): siRNA sense strand
gaggaagagaucuggaaau

SEQ ID NO: 93952 - RNA, 19 nt, Homo sapiens
  misc_RNA (1)...(19): siRNA sense strand
ugucauguaccgaaucuga

SEQ ID NO: 93953 - RNA, 19 nt, Homo sapiens
  misc_RNA (1)...(19): siRNA sense strand
cgaggaagagaucuggaaa

SEQ ID NO: 93954 - RNA, 19 nt, Homo sapiens
  misc_RNA (1)...(19): siRNA sense strand
gaagguuguugaugaaaag

SEQ ID NO: 93955 - RNA, 19 nt, Homo sapiens
  misc_RNA (1)...(19): siRNA sense strand
cugaugcacuucauucuac

SEQ ID NO: 93956 - RNA, 19 nt, Homo sapiens
  misc_RNA (1)...(19): siRNA sense strand
gcucgucuuuggccuugau

SEQ ID NO: 93957 - RNA, 19 nt, Homo sapiens
  misc_RNA (1)...(19): siRNA sense strand
ggaagagagagcccaaguc

SEQ ID NO: 93958 - RNA, 19 nt, Homo sapiens
  misc_RNA (1)...(19): siRNA sense strand
ucuuuggccuugauuugaa

SEQ ID NO: 93959 - RNA, 19 nt, Homo sapiens
  misc_RNA (1)...(19): siRNA sense strand
cuaaaccucaccaaugaug

SEQ ID NO: 93960 - RNA, 19 nt, Homo sapiens
  misc_RNA (1)...(19): siRNA sense strand
ccgagagccuaugcugaaa

SEQ ID NO: 93961 - RNA, 19 nt, Homo sapiens
  misc_RNA (1)...(19): siRNA sense strand
caacucugccaccgaggaa

SEQ ID NO: 93962 - RNA, 19 nt, Homo sapiens
  misc_RNA (1)...(19): siRNA sense strand
ugaaaccaccaagaugaaa

SEQ ID NO: 93963 - RNA, 19 nt, Homo sapiens
  misc_RNA (1)...(19): siRNA sense strand
guucaucacccaagaucug

SEQ ID NO: 93964 - RNA, 19 nt, Homo sapiens
  misc_RNA (1)...(19): siRNA sense strand
ccgcuuggagcucgucuuu

SEQ ID NO: 93965 - RNA, 19 nt, Homo sapiens
  misc_RNA (1)...(19): siRNA sense strand
uaagcuaaaccucaccaau

SEQ ID NO: 93966 - RNA, 19 nt, Homo sapiens
  misc_RNA (1)...(19): siRNA sense strand
augaagaggcuuugagaga

SEQ ID NO: 93967 - RNA, 19 nt, Homo sapiens
  misc_RNA (1)...(19): siRNA sense strand
gugacuucccaucccauua

SEQ ID NO: 93968 - RNA, 19 nt, Homo sapiens
  misc_RNA (1)...(19): siRNA sense strand
agaggagcacuuaaucuau

SEQ ID NO: 93969 - RNA, 19 nt, Homo sapiens
  misc_RNA (1)...(19): siRNA sense strand
gagaucuggaaauucauga

SEQ ID NO: 93970 - RNA, 19 nt, Homo sapiens
  misc_RNA (1)...(19): siRNA sense strand
gcugugucauguaccgaau

SEQ ID NO: 93971 - RNA, 19 nt, Homo sapiens
  misc_RNA (1)...(19): siRNA sense strand
uccgagagccuaugcugaa

SEQ ID NO: 93972 - RNA, 19 nt, Homo sapiens
  misc_RNA (1)...(19): siRNA sense strand
gauggagaggagcacuuaa

SEQ ID NO: 93973 - RNA, 19 nt, Homo sapiens
  misc_RNA (1)...(19): siRNA sense strand
ugaagguuguugaugaaaa

SEQ ID NO: 93974 - RNA, 19 nt, Homo sapiens
  misc_RNA (1)...(19): siRNA sense strand
cgucuuuggccuugauuug

SEQ ID NO: 93975 - RNA, 19 nt, Homo sapiens
  misc_RNA (1)...(19): siRNA sense strand
cugcagcugugucauguac

SEQ ID NO: 93976 - RNA, 19 nt, Homo sapiens
  misc_RNA (1)...(19): siRNA sense strand
gacuucccaucccauuaug

SEQ ID NO: 93977 - RNA, 19 nt, Homo sapiens
  misc_RNA (1)...(19): siRNA sense strand
gagagccuaugcugaaacc

SEQ ID NO: 93978 - RNA, 19 nt, Homo sapiens
  misc_RNA (1)...(19): siRNA sense strand
gcaggugcccaacagugau

SEQ ID NO: 93979 - RNA, 19 nt, Homo sapiens
  misc_RNA (1)...(19): siRNA sense strand
gaauguguugggagccuau

SEQ ID NO: 93980 - RNA, 19 nt, Homo sapiens
  misc_RNA (1)...(19): siRNA sense strand
aagaggcuuugagagauga

SEQ ID NO: 93981 - RNA, 19 nt, Homo sapiens
  misc_RNA (1)...(19): siRNA sense strand
aaaccucaccaaugaugga

SEQ ID NO: 93982 - RNA, 19 nt, Homo sapiens
  misc_RNA (1)...(19): siRNA sense strand
gaagagaucuggaaauuca

SEQ ID NO: 93983 - RNA, 19 nt, Homo sapiens
  misc_RNA (1)...(19): siRNA sense strand
caaguccgauccaguguua

SEQ ID NO: 93984 - RNA, 19 nt, Homo sapiens
  misc_RNA (1)...(19): siRNA sense strand
gaagaggcuuugagagaug

SEQ ID NO: 93985 - RNA, 19 nt, Homo sapiens
  misc_RNA (1)...(19): siRNA sense strand
gagaggagcacuuaaucua

SEQ ID NO: 93986 - RNA, 19 nt, Homo sapiens
  misc_RNA (1)...(19): siRNA sense strand
gaggagcacuuaaucuaug

SEQ ID NO: 93987 - RNA, 19 nt, Homo sapiens
  misc_RNA (1)...(19): siRNA sense strand
gaugaaaguccucgaguuu

SEQ ID NO: 93988 - RNA, 19 nt, Homo sapiens
  misc_RNA (1)...(19): siRNA sense strand
ugagagagcccauuaugaa

SEQ ID NO: 93989 - RNA, 19 nt, Homo sapiens
  misc_RNA (1)...(19): siRNA sense strand
gcacuacugccacgacuuu

SEQ ID NO: 93990 - RNA, 19 nt, Homo sapiens
  misc_RNA (1)...(19): siRNA sense strand
guacaaggaucacuucacu

SEQ ID NO: 93991 - RNA, 19 nt, Homo sapiens
  misc_RNA (1)...(19): siRNA sense strand
ggugugaucuucuuaaagg

SEQ ID NO: 93992 - RNA, 19 nt, Homo sapiens
  misc_RNA (1)...(19): siRNA sense strand
gcugaagguuguugaugaa

SEQ ID NO: 93993 - RNA, 19 nt, Homo sapiens
  misc_RNA (1)...(19): siRNA sense strand
aggaagagaucuggaaauu

SEQ ID NO: 93994 - RNA, 19 nt, Homo sapiens
  misc_RNA (1)...(19): siRNA sense strand
ugacgaaggugccaaaugc

SEQ ID NO: 93995 - RNA, 19 nt, Homo sapiens
  misc_RNA (1)...(19): siRNA sense strand
gauggaaaccugagcaaug

SEQ ID NO: 93996 - RNA, 19 nt, Homo sapiens
  misc_RNA (1)...(19): siRNA sense strand
gcugaaaccaccaagauga

SEQ ID NO: 93997 - RNA, 19 nt, Homo sapiens
  misc_RNA (1)...(19): siRNA sense strand
gcuccgugcucgugagaaa

SEQ ID NO: 93998 - RNA, 19 nt, Homo sapiens
  misc_RNA (1)...(19): siRNA sense strand
guaaguucaucacccaaga

SEQ ID NO: 93999 - RNA, 19 nt, Homo sapiens
  misc_RNA (1)...(19): siRNA sense strand
ccuacacccucgucaguaa

SEQ ID NO: 94000 - RNA, 19 nt, Homo sapiens
  misc_RNA (1)...(19): siRNA sense strand
ggaaaccugagcaaugauu

SEQ ID NO: 94001 - RNA, 19 nt, Homo sapiens
  misc_RNA (1)...(19): siRNA sense strand
gcuuggagcucgucuuugg

SEQ ID NO: 94002 - RNA, 19 nt, Homo sapiens
  misc_RNA (1)...(19): siRNA sense strand
gcacuucauucuacguaag

SEQ ID NO: 94003 - RNA, 19 nt, Homo sapiens
  misc_RNA (1)...(19): siRNA sense strand
ugaagaggcuuugagagau

SEQ ID NO: 94004 - RNA, 19 nt, Homo sapiens
  misc_RNA (1)...(19): siRNA sense strand
aaggaucacuucacugaga

SEQ ID NO: 94005 - RNA, 19 nt, Homo sapiens
  misc_RNA (1)...(19): siRNA sense strand
caggaaugcugaugcacuu

SEQ ID NO: 94006 - RNA, 19 nt, Homo sapiens
  misc_RNA (1)...(19): siRNA sense strand
acaaggaucacuucacuga

SEQ ID NO: 94007 - RNA, 19 nt, Homo sapiens
  misc_RNA (1)...(19): siRNA sense strand
cagauaugcugaagguugu

SEQ ID NO: 94008 - RNA, 19 nt, Homo sapiens
  misc_RNA (1)...(19): siRNA sense strand
gaaggcagauaugcugaag

SEQ ID NO: 94009 - RNA, 19 nt, Homo sapiens
  misc_RNA (1)...(19): siRNA sense strand
gaaggaagacaacccuagu

SEQ ID NO: 94010 - RNA, 19 nt, Homo sapiens
  misc_RNA (1)...(19): siRNA sense strand
agcuaaaccucaccaauga

SEQ ID NO: 94011 - RNA, 19 nt, Homo sapiens
  misc_RNA (1)...(19): siRNA sense strand
gccacaacauccacugaga

SEQ ID NO: 94012 - RNA, 19 nt, Homo sapiens
  misc_RNA (1)...(19): siRNA sense strand
uaccgaaucugacgaaggu

SEQ ID NO: 94013 - RNA, 19 nt, Homo sapiens
  misc_RNA (1)...(19): siRNA sense strand
gcugaugcacuucauucua

SEQ ID NO: 94014 - RNA, 19 nt, Homo sapiens
  misc_RNA (1)...(19): siRNA sense strand
aagcuaaaccucaccaaug

SEQ ID NO: 94015 - RNA, 19 nt, Homo sapiens
  misc_RNA (1)...(19): siRNA sense strand
agaugaaaguccucgaguu

SEQ ID NO: 94016 - RNA, 19 nt, Homo sapiens
  misc_RNA (1)...(19): siRNA sense strand
caagaucuggugcaggaaa

SEQ ID NO: 94017 - RNA, 19 nt, Homo sapiens
  misc_RNA (1)...(19): siRNA sense strand
ggaagagaucuggaaauuc

SEQ ID NO: 94018 - RNA, 19 nt, Homo sapiens
  misc_RNA (1)...(19): siRNA sense strand
auggaaaccugagcaauga

SEQ ID NO: 94019 - RNA, 19 nt, Homo sapiens
  misc_RNA (1)...(19): siRNA sense strand
caaaugccaaggugaggaa

SEQ ID NO: 94020 - RNA, 19 nt, Homo sapiens
  misc_RNA (1)...(19): siRNA sense strand
ugacuucccaucccauuau

SEQ ID NO: 94021 - RNA, 19 nt, Homo sapiens
  misc_RNA (1)...(19): siRNA sense strand
guugggagccuaugaugga

SEQ ID NO: 94022 - RNA, 19 nt, Homo sapiens
  misc_RNA (1)...(19): siRNA sense strand
ggagaggagcacuuaaucu

SEQ ID NO: 94023 - RNA, 19 nt, Homo sapiens
  misc_RNA (1)...(19): siRNA sense strand
ggaaugcugaugcacuuca

SEQ ID NO: 94024 - RNA, 19 nt, Homo sapiens
  misc_RNA (1)...(19): siRNA sense strand
gaaaccaccaagaugaaag

SEQ ID NO: 94025 - RNA, 19 nt, Homo sapiens
  misc_RNA (1)...(19): siRNA sense strand
gaaugcugaugcacuucau

SEQ ID NO: 94026 - RNA, 19 nt, Homo sapiens
  misc_RNA (1)...(19): siRNA sense strand
ugauggagaggagcacuua

SEQ ID NO: 94027 - RNA, 19 nt, Homo sapiens
  misc_RNA (1)...(19): siRNA sense strand
ugcugaagguuguugauga

SEQ ID NO: 94028 - RNA, 19 nt, Homo sapiens
  misc_RNA (1)...(19): siRNA sense strand
aggcagauaugcugaaggu

SEQ ID NO: 94029 - RNA, 19 nt, Homo sapiens
  misc_RNA (1)...(19): siRNA sense strand
gagagagcccauuaugaag

SEQ ID NO: 94030 - RNA, 19 nt, Homo sapiens
  misc_RNA (1)...(19): siRNA sense strand
ugggugugaucuucuuaaa

SEQ ID NO: 94031 - RNA, 19 nt, Homo sapiens
  misc_RNA (1)...(19): siRNA sense strand
gagagaugaggaagagaga

SEQ ID NO: 94032 - RNA, 19 nt, Homo sapiens
  misc_RNA (1)...(19): siRNA sense strand
gaggaagagaucuggaaau

SEQ ID NO: 94033 - RNA, 19 nt, Homo sapiens
  misc_RNA (1)...(19): siRNA sense strand
ugucauguaccgaaucuga

SEQ ID NO: 94034 - RNA, 19 nt, Homo sapiens
  misc_RNA (1)...(19): siRNA sense strand
cgaggaagagaucuggaaa

SEQ ID NO: 94035 - RNA, 19 nt, Homo sapiens
  misc_RNA (1)...(19): siRNA sense strand
gaagguuguugaugaaaag

SEQ ID NO: 94036 - RNA, 19 nt, Homo sapiens
  misc_RNA (1)...(19): siRNA sense strand
cugaugcacuucauucuac

SEQ ID NO: 94037 - RNA, 19 nt, Homo sapiens
  misc_RNA (1)...(19): siRNA sense strand
gcucgucuuuggccuugau

SEQ ID NO: 94038 - RNA, 19 nt, Homo sapiens
  misc_RNA (1)...(19): siRNA sense strand
ggaagagagagcccaaguc

SEQ ID NO: 94039 - RNA, 19 nt, Homo sapiens
  misc_RNA (1)...(19): siRNA sense strand
ucuuuggccuugauuugaa

SEQ ID NO: 94040 - RNA, 19 nt, Homo sapiens
  misc_RNA (1)...(19): siRNA sense strand
cuaaaccucaccaaugaug

SEQ ID NO: 94041 - RNA, 19 nt, Homo sapiens
  misc_RNA (1)...(19): siRNA sense strand
ccgagagccuaugcugaaa

SEQ ID NO: 94042 - RNA, 19 nt, Homo sapiens
  misc_RNA (1)...(19): siRNA sense strand
caacucugccaccgaggaa

SEQ ID NO: 94043 - RNA, 19 nt, Homo sapiens
  misc_RNA (1)...(19): siRNA sense strand
ugaaaccaccaagaugaaa

SEQ ID NO: 94044 - RNA, 19 nt, Homo sapiens
  misc_RNA (1)...(19): siRNA sense strand
guucaucacccaagaucug

SEQ ID NO: 94045 - RNA, 19 nt, Homo sapiens
  misc_RNA (1)...(19): siRNA sense strand
ccgcuuggagcucgucuuu

SEQ ID NO: 94046 - RNA, 19 nt, Homo sapiens
  misc_RNA (1)...(19): siRNA sense strand
uaagcuaaaccucaccaau

SEQ ID NO: 94047 - RNA, 19 nt, Homo sapiens
  misc_RNA (1)...(19): siRNA sense strand
augaagaggcuuugagaga

SEQ ID NO: 94048 - RNA, 19 nt, Homo sapiens
  misc_RNA (1)...(19): siRNA sense strand
gugacuucccaucccauua

SEQ ID NO: 94049 - RNA, 19 nt, Homo sapiens
  misc_RNA (1)...(19): siRNA sense strand
agaggagcacuuaaucuau

SEQ ID NO: 94050 - RNA, 19 nt, Homo sapiens
  misc_RNA (1)...(19): siRNA sense strand
gagaucuggaaauucauga

SEQ ID NO: 94051 - RNA, 19 nt, Homo sapiens
  misc_RNA (1)...(19): siRNA sense strand
gcugugucauguaccgaau

SEQ ID NO: 94052 - RNA, 19 nt, Homo sapiens
  misc_RNA (1)...(19): siRNA sense strand
uccgagagccuaugcugaa

SEQ ID NO: 94053 - RNA, 19 nt, Homo sapiens
  misc_RNA (1)...(19): siRNA sense strand
gauggagaggagcacuuaa

SEQ ID NO: 94054 - RNA, 19 nt, Homo sapiens
  misc_RNA (1)...(19): siRNA sense strand
ugaagguuguugaugaaaa

SEQ ID NO: 94055 - RNA, 19 nt, Homo sapiens
  misc_RNA (1)...(19): siRNA sense strand
cgucuuuggccuugauuug

SEQ ID NO: 94056 - RNA, 19 nt, Homo sapiens
  misc_RNA (1)...(19): siRNA sense strand
cugcagcugugucauguac

SEQ ID NO: 94057 - RNA, 19 nt, Homo sapiens
  misc_RNA (1)...(19): siRNA sense strand
gacuucccaucccauuaug

SEQ ID NO: 94058 - RNA, 19 nt, Homo sapiens
  misc_RNA (1)...(19): siRNA sense strand
gagagccuaugcugaaacc

SEQ ID NO: 94059 - RNA, 19 nt, Homo sapiens
  misc_RNA (1)...(19): siRNA sense strand
gcaggugcccaacagugau

SEQ ID NO: 94060 - RNA, 19 nt, Homo sapiens
  misc_RNA (1)...(19): siRNA sense strand
gaauguguugggagccuau

SEQ ID NO: 94061 - RNA, 19 nt, Homo sapiens
  misc_RNA (1)...(19): siRNA sense strand
aagaggcuuugagagauga

SEQ ID NO: 94062 - RNA, 19 nt, Homo sapiens
  misc_RNA (1)...(19): siRNA sense strand
aaaccucaccaaugaugga

SEQ ID NO: 94063 - RNA, 19 nt, Homo sapiens
  misc_RNA (1)...(19): siRNA sense strand
gaagagaucuggaaauuca

SEQ ID NO: 94064 - RNA, 19 nt, Homo sapiens
  misc_RNA (1)...(19): siRNA sense strand
caaguccgauccaguguua

SEQ ID NO: 94065 - RNA, 19 nt, Homo sapiens
  misc_RNA (1)...(19): siRNA sense strand
gaagaggcuuugagagaug

SEQ ID NO: 94066 - RNA, 19 nt, Homo sapiens
  misc_RNA (1)...(19): siRNA sense strand
gagaggagcacuuaaucua

SEQ ID NO: 94067 - RNA, 19 nt, Homo sapiens
  misc_RNA (1)...(19): siRNA sense strand
gaggagcacuuaaucuaug

SEQ ID NO: 94068 - RNA, 19 nt, Homo sapiens
  misc_RNA (1)...(19): siRNA sense strand
gaugaaaguccucgaguuu

SEQ ID NO: 94069 - RNA, 19 nt, Homo sapiens
  misc_RNA (1)...(19): siRNA sense strand
ugagagagcccauuaugaa

SEQ ID NO: 94070 - RNA, 19 nt, Homo sapiens
  misc_RNA (1)...(19): siRNA sense strand
gcacuacugccacgacuuu

SEQ ID NO: 94071 - RNA, 19 nt, Homo sapiens
  misc_RNA (1)...(19): siRNA sense strand
guacaaggaucacuucacu

SEQ ID NO: 94072 - RNA, 19 nt, Homo sapiens
  misc_RNA (1)...(19): siRNA sense strand
ggugugaucuucuuaaagg

SEQ ID NO: 94073 - RNA, 19 nt, Homo sapiens
  misc_RNA (1)...(19): siRNA sense strand
gcugaagguuguugaugaa

SEQ ID NO: 94074 - RNA, 19 nt, Homo sapiens
  misc_RNA (1)...(19): siRNA sense strand
aggaagagaucuggaaauu

SEQ ID NO: 94075 - RNA, 19 nt, Homo sapiens
  misc_RNA (1)...(19): siRNA sense strand
ugacgaaggugccaaaugc

SEQ ID NO: 94076 - RNA, 19 nt, Homo sapiens
  misc_RNA (1)...(19): siRNA sense strand
gauggaaaccugagcaaug

SEQ ID NO: 94077 - RNA, 19 nt, Homo sapiens
  misc_RNA (1)...(19): siRNA sense strand
gcugaaaccaccaagauga

SEQ ID NO: 94078 - RNA, 19 nt, Homo sapiens
  misc_RNA (1)...(19): siRNA sense strand
gcuccgugcucgugagaaa

SEQ ID NO: 94079 - RNA, 19 nt, Homo sapiens
  misc_RNA (1)...(19): siRNA sense strand
guaaguucaucacccaaga

SEQ ID NO: 94080 - RNA, 19 nt, Homo sapiens
  misc_RNA (1)...(19): siRNA sense strand
ccuacacccucgucaguaa

SEQ ID NO: 94081 - RNA, 19 nt, Homo sapiens
  misc_RNA (1)...(19): siRNA sense strand
ggaaaccugagcaaugauu

SEQ ID NO: 94082 - RNA, 19 nt, Homo sapiens
  misc_RNA (1)...(19): siRNA sense strand
gcuuggagcucgucuuugg

SEQ ID NO: 94083 - RNA, 19 nt, Homo sapiens
  misc_RNA (1)...(19): siRNA sense strand
gcacuucauucuacguaag

SEQ ID NO: 94084 - RNA, 19 nt, Homo sapiens
  misc_RNA (1)...(19): siRNA sense strand
ugaagaggcuuugagagau

SEQ ID NO: 94085 - RNA, 19 nt, Homo sapiens
  misc_RNA (1)...(19): siRNA sense strand
aaggaucacuucacugaga

SEQ ID NO: 94086 - RNA, 19 nt, Homo sapiens
  misc_RNA (1)...(19): siRNA sense strand
caggaaugcugaugcacuu

SEQ ID NO: 94087 - RNA, 19 nt, Homo sapiens
  misc_RNA (1)...(19): siRNA sense strand
acaaggaucacuucacuga

SEQ ID NO: 94088 - RNA, 19 nt, Homo sapiens
  misc_RNA (1)...(19): siRNA sense strand
cagauaugcugaagguugu

SEQ ID NO: 94089 - RNA, 19 nt, Homo sapiens
  misc_RNA (1)...(19): siRNA sense strand
gaaggcagauaugcugaag

SEQ ID NO: 94090 - RNA, 19 nt, Homo sapiens
  misc_RNA (1)...(19): siRNA sense strand
gaaggaagacaacccuagu

SEQ ID NO: 94091 - RNA, 19 nt, Homo sapiens
  misc_RNA (1)...(19): siRNA sense strand
agcuaaaccucaccaauga

SEQ ID NO: 94092 - RNA, 19 nt, Homo sapiens
  misc_RNA (1)...(19): siRNA sense strand
gccacaacauccacugaga

SEQ ID NO: 94093 - RNA, 19 nt, Homo sapiens
  misc_RNA (1)...(19): siRNA sense strand
uaccgaaucugacgaaggu

SEQ ID NO: 94094 - RNA, 19 nt, Homo sapiens
  misc_RNA (1)...(19): siRNA sense strand
gcugaugcacuucauucua

SEQ ID NO: 94095 - RNA, 19 nt, Homo sapiens
  misc_RNA (1)...(19): siRNA sense strand
aagcuaaaccucaccaaug

SEQ ID NO: 94096 - RNA, 19 nt, Homo sapiens
  misc_RNA (1)...(19): siRNA sense strand
agaugaaaguccucgaguu

SEQ ID NO: 94097 - RNA, 19 nt, Homo sapiens
  misc_RNA (1)...(19): siRNA sense strand
caagaucuggugcaggaaa

SEQ ID NO: 94098 - RNA, 19 nt, Homo sapiens
  misc_RNA (1)...(19): siRNA sense strand
ggaagagaucuggaaauuc

SEQ ID NO: 94099 - RNA, 19 nt, Homo sapiens
  misc_RNA (1)...(19): siRNA sense strand
auggaaaccugagcaauga

SEQ ID NO: 94100 - RNA, 19 nt, Homo sapiens
  misc_RNA (1)...(19): siRNA sense strand
caaaugccaaggugaggaa

SEQ ID NO: 94101 - RNA, 19 nt, Homo sapiens
  misc_RNA (1)...(19): siRNA sense strand
ugacuucccaucccauuau

SEQ ID NO: 94102 - RNA, 19 nt, Homo sapiens
  misc_RNA (1)...(19): siRNA sense strand
guugggagccuaugaugga

SEQ ID NO: 94103 - RNA, 19 nt, Homo sapiens
  misc_RNA (1)...(19): siRNA sense strand
ggagaggagcacuuaaucu

SEQ ID NO: 94104 - RNA, 19 nt, Homo sapiens
  misc_RNA (1)...(19): siRNA sense strand
ggaaugcugaugcacuuca

SEQ ID NO: 94105 - RNA, 19 nt, Homo sapiens
  misc_RNA (1)...(19): siRNA sense strand
gaaaccaccaagaugaaag

SEQ ID NO: 94106 - RNA, 19 nt, Homo sapiens
  misc_RNA (1)...(19): siRNA sense strand
gaaugcugaugcacuucau

SEQ ID NO: 94107 - RNA, 19 nt, Homo sapiens
  misc_RNA (1)...(19): siRNA sense strand
ugauggagaggagcacuua

SEQ ID NO: 94108 - RNA, 19 nt, Homo sapiens
  misc_RNA (1)...(19): siRNA sense strand
ugcugaagguuguugauga

SEQ ID NO: 94109 - RNA, 19 nt, Homo sapiens
  misc_RNA (1)...(19): siRNA sense strand
aggcagauaugcugaaggu

SEQ ID NO: 94110 - RNA, 19 nt, Homo sapiens
  misc_RNA (1)...(19): siRNA sense strand
gagagagcccauuaugaag

SEQ ID NO: 94111 - RNA, 19 nt, Homo sapiens
  misc_RNA (1)...(19): siRNA sense strand
ugggugugaucuucuuaaa

SEQ ID NO: 94112 - RNA, 19 nt, Homo sapiens
  misc_RNA (1)...(19): siRNA sense strand
gagagaugaggaagagaga

SEQ ID NO: 94113 - RNA, 19 nt, Homo sapiens
  misc_RNA (1)...(19): siRNA sense strand
gaggaagagaucuggaaau

SEQ ID NO: 94114 - RNA, 19 nt, Homo sapiens
  misc_RNA (1)...(19): siRNA sense strand
ugucauguaccgaaucuga

SEQ ID NO: 94115 - RNA, 19 nt, Homo sapiens
  misc_RNA (1)...(19): siRNA sense strand
cgaggaagagaucuggaaa

SEQ ID NO: 94116 - RNA, 19 nt, Homo sapiens
  misc_RNA (1)...(19): siRNA sense strand
gaagguuguugaugaaaag

SEQ ID NO: 94117 - RNA, 19 nt, Homo sapiens
  misc_RNA (1)...(19): siRNA sense strand
cugaugcacuucauucuac

SEQ ID NO: 94118 - RNA, 19 nt, Homo sapiens
  misc_RNA (1)...(19): siRNA sense strand
gcucgucuuuggccuugau

SEQ ID NO: 94119 - RNA, 19 nt, Homo sapiens
  misc_RNA (1)...(19): siRNA sense strand
ggaagagagagcccaaguc

SEQ ID NO: 94120 - RNA, 19 nt, Homo sapiens
  misc_RNA (1)...(19): siRNA sense strand
ucuuuggccuugauuugaa

SEQ ID NO: 94121 - RNA, 19 nt, Homo sapiens
  misc_RNA (1)...(19): siRNA sense strand
cuaaaccucaccaaugaug

SEQ ID NO: 94122 - RNA, 19 nt, Homo sapiens
  misc_RNA (1)...(19): siRNA sense strand
ccgagagccuaugcugaaa

SEQ ID NO: 94123 - RNA, 19 nt, Homo sapiens
  misc_RNA (1)...(19): siRNA sense strand
caacucugccaccgaggaa

SEQ ID NO: 94124 - RNA, 19 nt, Homo sapiens
  misc_RNA (1)...(19): siRNA sense strand
ugaaaccaccaagaugaaa

SEQ ID NO: 94125 - RNA, 19 nt, Homo sapiens
  misc_RNA (1)...(19): siRNA sense strand
guucaucacccaagaucug

SEQ ID NO: 94126 - RNA, 19 nt, Homo sapiens
  misc_RNA (1)...(19): siRNA sense strand
ccgcuuggagcucgucuuu

SEQ ID NO: 94127 - RNA, 19 nt, Homo sapiens
  misc_RNA (1)...(19): siRNA sense strand
uaagcuaaaccucaccaau

SEQ ID NO: 94128 - RNA, 19 nt, Homo sapiens
  misc_RNA (1)...(19): siRNA sense strand
augaagaggcuuugagaga

SEQ ID NO: 94129 - RNA, 19 nt, Homo sapiens
  misc_RNA (1)...(19): siRNA sense strand
gugacuucccaucccauua

SEQ ID NO: 94130 - RNA, 19 nt, Homo sapiens
  misc_RNA (1)...(19): siRNA sense strand
agaggagcacuuaaucuau

SEQ ID NO: 94131 - RNA, 19 nt, Homo sapiens
  misc_RNA (1)...(19): siRNA sense strand
gagaucuggaaauucauga

SEQ ID NO: 94132 - RNA, 19 nt, Homo sapiens
  misc_RNA (1)...(19): siRNA sense strand
gcugugucauguaccgaau

SEQ ID NO: 94133 - RNA, 19 nt, Homo sapiens
  misc_RNA (1)...(19): siRNA sense strand
uccgagagccuaugcugaa

SEQ ID NO: 94134 - RNA, 19 nt, Homo sapiens
  misc_RNA (1)...(19): siRNA sense strand
gauggagaggagcacuuaa

SEQ ID NO: 94135 - RNA, 19 nt, Homo sapiens
  misc_RNA (1)...(19): siRNA sense strand
ugaagguuguugaugaaaa

SEQ ID NO: 94136 - RNA, 19 nt, Homo sapiens
  misc_RNA (1)...(19): siRNA sense strand
cgucuuuggccuugauuug

SEQ ID NO: 94137 - RNA, 19 nt, Homo sapiens
  misc_RNA (1)...(19): siRNA sense strand
cugcagcugugucauguac

SEQ ID NO: 94138 - RNA, 19 nt, Homo sapiens
  misc_RNA (1)...(19): siRNA sense strand
gacuucccaucccauuaug

SEQ ID NO: 94139 - RNA, 19 nt, Homo sapiens
  misc_RNA (1)...(19): siRNA sense strand
gagagccuaugcugaaacc

SEQ ID NO: 94140 - RNA, 19 nt, Homo sapiens
  misc_RNA (1)...(19): siRNA sense strand
gcaggugcccaacagugau

SEQ ID NO: 94141 - RNA, 19 nt, Homo sapiens
  misc_RNA (1)...(19): siRNA sense strand
gaauguguugggagccuau

SEQ ID NO: 94142 - RNA, 19 nt, Homo sapiens
  misc_RNA (1)...(19): siRNA sense strand
aagaggcuuugagagauga

SEQ ID NO: 94143 - RNA, 19 nt, Homo sapiens
  misc_RNA (1)...(19): siRNA sense strand
aaaccucaccaaugaugga

SEQ ID NO: 94144 - RNA, 19 nt, Homo sapiens
  misc_RNA (1)...(19): siRNA sense strand
gaagaggcuuugagagaug

SEQ ID NO: 94145 - RNA, 19 nt, Homo sapiens
  misc_RNA (1)...(19): siRNA sense strand
gacaagugcccaacaguaa

SEQ ID NO: 94146 - RNA, 19 nt, Homo sapiens
  misc_RNA (1)...(19): siRNA sense strand
gcucaucacccaagauuug

SEQ ID NO: 94147 - RNA, 19 nt, Homo sapiens
  misc_RNA (1)...(19): siRNA sense strand
gcugguaggucacguagug

SEQ ID NO: 94148 - RNA, 19 nt, Homo sapiens
  misc_RNA (1)...(19): siRNA sense strand
gaaagcucaucacccaaga

SEQ ID NO: 94149 - RNA, 19 nt, Homo sapiens
  misc_RNA (1)...(19): siRNA sense strand
caaauauguuggugcaguu

SEQ ID NO: 94150 - RNA, 19 nt, Homo sapiens
  misc_RNA (1)...(19): siRNA sense strand
caagggagccaacagcaaa

SEQ ID NO: 94151 - RNA, 19 nt, Homo sapiens
  misc_RNA (1)...(19): siRNA sense strand
aagaauugcuucccugaga

SEQ ID NO: 94152 - RNA, 19 nt, Homo sapiens
  misc_RNA (1)...(19): siRNA sense strand
cgacaagugcccaacagua

SEQ ID NO: 94153 - RNA, 19 nt, Homo sapiens
  misc_RNA (1)...(19): siRNA sense strand
gaauauaugaugggaagaa

SEQ ID NO: 94154 - RNA, 19 nt, Homo sapiens
  misc_RNA (1)...(19): siRNA sense strand
ggaaauguacaagaugaaa

SEQ ID NO: 94155 - RNA, 19 nt, Homo sapiens
  misc_RNA (1)...(19): siRNA sense strand
gcucagaucacugcaacua

SEQ ID NO: 94156 - RNA, 19 nt, Homo sapiens
  misc_RNA (1)...(19): siRNA sense strand
gagaagaucugggaauucc

SEQ ID NO: 94157 - RNA, 19 nt, Homo sapiens
  misc_RNA (1)...(19): siRNA sense strand
caagauuuggugaagcuua

SEQ ID NO: 94158 - RNA, 19 nt, Homo sapiens
  misc_RNA (1)...(19): siRNA sense strand
cugcagcuaugcucaauga

SEQ ID NO: 94159 - RNA, 19 nt, Homo sapiens
  misc_RNA (1)...(19): siRNA sense strand
ugaagaggcuuugagagau

SEQ ID NO: 94160 - RNA, 19 nt, Homo sapiens
  misc_RNA (1)...(19): siRNA sense strand
ugauggaaauguacaagau

SEQ ID NO: 94161 - RNA, 19 nt, Homo sapiens
  misc_RNA (1)...(19): siRNA sense strand
aagauuuggugaagcuuaa

SEQ ID NO: 94162 - RNA, 19 nt, Homo sapiens
  misc_RNA (1)...(19): siRNA sense strand
agaugaagguccuggaguu

SEQ ID NO: 94163 - RNA, 19 nt, Homo sapiens
  misc_RNA (1)...(19): siRNA sense strand
gcagcuaugcucaaugaug

SEQ ID NO: 94164 - RNA, 19 nt, Homo sapiens
  misc_RNA (1)...(19): siRNA sense strand
ucacugcaacuaacaagaa

SEQ ID NO: 94165 - RNA, 19 nt, Homo sapiens
  misc_RNA (1)...(19): siRNA sense strand
agaaacacuucauauuugg

SEQ ID NO: 94166 - RNA, 19 nt, Homo sapiens
  misc_RNA (1)...(19): siRNA sense strand
gcucaaugauggcaguagu

SEQ ID NO: 94167 - RNA, 19 nt, Homo sapiens
  misc_RNA (1)...(19): siRNA sense strand
gagagaugaggaagaaaga

SEQ ID NO: 94168 - RNA, 19 nt, Homo sapiens
  misc_RNA (1)...(19): siRNA sense strand
gaugaagguccuggaguuu

SEQ ID NO: 94169 - RNA, 19 nt, Homo sapiens
  misc_RNA (1)...(19): siRNA sense strand
aggagaagaucugggaauu

SEQ ID NO: 94170 - RNA, 19 nt, Homo sapiens
  misc_RNA (1)...(19): siRNA sense strand
ucagaucacugcaacuaac

SEQ ID NO: 94171 - RNA, 19 nt, Homo sapiens
  misc_RNA (1)...(19): siRNA sense strand
guaugaagaggcuuugaga

SEQ ID NO: 94172 - RNA, 19 nt, Homo sapiens
  misc_RNA (1)...(19): siRNA sense strand
uuugagagaugaggaagaa

SEQ ID NO: 94173 - RNA, 19 nt, Homo sapiens
  misc_RNA (1)...(19): siRNA sense strand
caugaagacaaauauguug

SEQ ID NO: 94174 - RNA, 19 nt, Homo sapiens
  misc_RNA (1)...(19): siRNA sense strand
gagaugaggaagaaagagu

SEQ ID NO: 94175 - RNA, 19 nt, Homo sapiens
  misc_RNA (1)...(19): siRNA sense strand
ggagaagaucugggaauuc

SEQ ID NO: 94176 - RNA, 19 nt, Homo sapiens
  misc_RNA (1)...(19): siRNA sense strand
gguguugauuuaaagaaag

SEQ ID NO: 94177 - RNA, 19 nt, Homo sapiens
  misc_RNA (1)...(19): siRNA sense strand
ggaagaaagaguccaagcu

SEQ ID NO: 94178 - RNA, 19 nt, Homo sapiens
  misc_RNA (1)...(19): siRNA sense strand
ucacguagugcucucaaga

SEQ ID NO: 94179 - RNA, 19 nt, Homo sapiens
  misc_RNA (1)...(19): siRNA sense strand
gaggagaagaucugggaau

SEQ ID NO: 94180 - RNA, 19 nt, Homo sapiens
  misc_RNA (1)...(19): siRNA sense strand
gauggaaauguacaagaug

SEQ ID NO: 94181 - RNA, 19 nt, Homo sapiens
  misc_RNA (1)...(19): siRNA sense strand
gaagaguacgcuccaugca

SEQ ID NO: 94182 - RNA, 19 nt, Homo sapiens
  misc_RNA (1)...(19): siRNA sense strand
caguaauccugcacgcuau

SEQ ID NO: 94183 - RNA, 19 nt, Homo sapiens
  misc_RNA (1)...(19): siRNA sense strand
cacugcaacuaacaagaaa

SEQ ID NO: 94184 - RNA, 19 nt, Homo sapiens
  misc_RNA (1)...(19): siRNA sense strand
gcacuauccaccacuacau

SEQ ID NO: 94185 - RNA, 19 nt, Homo sapiens
  misc_RNA (1)...(19): siRNA sense strand
uccaagagcccaugcugaa

SEQ ID NO: 94186 - RNA, 19 nt, Homo sapiens
  misc_RNA (1)...(19): siRNA sense strand
ccuauguccuugucagcaa

SEQ ID NO: 94187 - RNA, 19 nt, Homo sapiens
  misc_RNA (1)...(19): siRNA sense strand
auggaaauguacaagauga

SEQ ID NO: 94188 - RNA, 19 nt, Homo sapiens
  misc_RNA (1)...(19): siRNA sense strand
ccacugaggagaagaucug

SEQ ID NO: 94189 - RNA, 19 nt, Homo sapiens
  misc_RNA (1)...(19): siRNA sense strand
agagcacuauccaccacua

SEQ ID NO: 94190 - RNA, 19 nt, Homo sapiens
  misc_RNA (1)...(19): siRNA sense strand
uauaugaugggaagaaaca

SEQ ID NO: 94191 - RNA, 19 nt, Homo sapiens
  misc_RNA (1)...(19): siRNA sense strand
caagugcccaacaguaauc

SEQ ID NO: 94192 - RNA, 19 nt, Homo sapiens
  misc_RNA (1)...(19): siRNA sense strand
ccagugcguuccaguucug

SEQ ID NO: 94193 - RNA, 19 nt, Homo sapiens
  misc_RNA (1)...(19): siRNA sense strand
ccaagagcccaugcugaaa

SEQ ID NO: 94194 - RNA, 19 nt, Homo sapiens
  misc_RNA (1)...(19): siRNA sense strand
aagcuucucucagggucua

SEQ ID NO: 94195 - RNA, 19 nt, Homo sapiens
  misc_RNA (1)...(19): siRNA sense strand
caagagcccaugcugaaac

SEQ ID NO: 94196 - RNA, 19 nt, Homo sapiens
  misc_RNA (1)...(19): siRNA sense strand
gcuccaugcacgugagaaa

SEQ ID NO: 94197 - RNA, 19 nt, Homo sapiens
  misc_RNA (1)...(19): siRNA sense strand
aaauggaucuccccaacaa

SEQ ID NO: 94198 - RNA, 19 nt, Homo sapiens
  misc_RNA (1)...(19): siRNA sense strand
agaauugcuucccugagau

SEQ ID NO: 94199 - RNA, 19 nt, Homo sapiens
  misc_RNA (1)...(19): siRNA sense strand
gaauugcuucccugagauc

SEQ ID NO: 94200 - RNA, 19 nt, Homo sapiens
  misc_RNA (1)...(19): siRNA sense strand
augaagaggcuuugagaga

SEQ ID NO: 94201 - RNA, 19 nt, Homo sapiens
  misc_RNA (1)...(19): siRNA sense strand
aagcucaucacccaagauu

SEQ ID NO: 94202 - RNA, 19 nt, Homo sapiens
  misc_RNA (1)...(19): siRNA sense strand
gccaugggcagaaaguguu

SEQ ID NO: 94203 - RNA, 19 nt, Homo sapiens
  misc_RNA (1)...(19): siRNA sense strand
aagcuucuuucaacaugga

SEQ ID NO: 94204 - RNA, 19 nt, Homo sapiens
  misc_RNA (1)...(19): siRNA sense strand
ugagagaugaggaagaaag

SEQ ID NO: 94205 - RNA, 19 nt, Homo sapiens
  misc_RNA (1)...(19): siRNA sense strand
ugaagguccuggaguuuug

SEQ ID NO: 94206 - RNA, 19 nt, Homo sapiens
  misc_RNA (1)...(19): siRNA sense strand
uggugaagcuuaaauaccu

SEQ ID NO: 94207 - RNA, 19 nt, Homo sapiens
  misc_RNA (1)...(19): siRNA sense strand
cuauguccuugucagcaaa

SEQ ID NO: 94208 - RNA, 19 nt, Homo sapiens
  misc_RNA (1)...(19): siRNA sense strand
gaucacugcaacuaacaag

SEQ ID NO: 94209 - RNA, 19 nt, Homo sapiens
  misc_RNA (1)...(19): siRNA sense strand
guaauccugcacgcuauga

SEQ ID NO: 94210 - RNA, 19 nt, Homo sapiens
  misc_RNA (1)...(19): siRNA sense strand
aagaggcuuugagagauga

SEQ ID NO: 94211 - RNA, 19 nt, Homo sapiens
  misc_RNA (1)...(19): siRNA sense strand
gggccaaggucaauaaaac

SEQ ID NO: 94212 - RNA, 19 nt, Homo sapiens
  misc_RNA (1)...(19): siRNA sense strand
caacagcaaaauugagaaa

SEQ ID NO: 94213 - RNA, 19 nt, Homo sapiens
  misc_RNA (1)...(19): siRNA sense strand
ggauuacacuucaagauua

SEQ ID NO: 94214 - RNA, 19 nt, Homo sapiens
  misc_RNA (1)...(19): siRNA sense strand
gaacugaagagaauaauug

SEQ ID NO: 94215 - RNA, 19 nt, Homo sapiens
  misc_RNA (1)...(19): siRNA sense strand
caaagaggaugaugcauug

SEQ ID NO: 94216 - RNA, 19 nt, Homo sapiens
  misc_RNA (1)...(19): siRNA sense strand
ccagaaggcuuacgaguau

SEQ ID NO: 94217 - RNA, 19 nt, Homo sapiens
  misc_RNA (1)...(19): siRNA sense strand
caacagcaauuacaagaau

SEQ ID NO: 94218 - RNA, 19 nt, Homo sapiens
  misc_RNA (1)...(19): siRNA sense strand
gagaugaacacauuucuuu

SEQ ID NO: 94219 - RNA, 19 nt, Homo sapiens
  misc_RNA (1)...(19): siRNA sense strand
gagaauaauugacgacagu

SEQ ID NO: 94220 - RNA, 19 nt, Homo sapiens
  misc_RNA (1)...(19): siRNA sense strand
acagugaaauuaccaaaga

SEQ ID NO: 94221 - RNA, 19 nt, Homo sapiens
  misc_RNA (1)...(19): siRNA sense strand
gcaauuacaagaaugaugu

SEQ ID NO: 94222 - RNA, 19 nt, Homo sapiens
  misc_RNA (1)...(19): siRNA sense strand
cauuggagaugaacacauu

SEQ ID NO: 94223 - RNA, 19 nt, Homo sapiens
  misc_RNA (1)...(19): siRNA sense strand
ccaaagaggaugaugcauu

SEQ ID NO: 94224 - RNA, 19 nt, Homo sapiens
  misc_RNA (1)...(19): siRNA sense strand
gacgggaaguuaagauaug

SEQ ID NO: 94225 - RNA, 19 nt, Homo sapiens
  misc_RNA (1)...(19): siRNA sense strand
uguuuggucuucagucuua

SEQ ID NO: 94226 - RNA, 19 nt, Homo sapiens
  misc_RNA (1)...(19): siRNA sense strand
uggaggaacugaagagaau

SEQ ID NO: 94227 - RNA, 19 nt, Homo sapiens
  misc_RNA (1)...(19): siRNA sense strand
ggacgggaaguuaagauau

SEQ ID NO: 94228 - RNA, 19 nt, Homo sapiens
  misc_RNA (1)...(19): siRNA sense strand
ggucuucagucuuauugga

SEQ ID NO: 94229 - RNA, 19 nt, Homo sapiens
  misc_RNA (1)...(19): siRNA sense strand
guuaagauaugccaacaac

SEQ ID NO: 94230 - RNA, 19 nt, Homo sapiens
  misc_RNA (1)...(19): siRNA sense strand
gaggaacugaagagaauaa

SEQ ID NO: 94231 - RNA, 19 nt, Homo sapiens
  misc_RNA (1)...(19): siRNA sense strand
gaaaagaggcuuauguaca

SEQ ID NO: 94232 - RNA, 19 nt, Homo sapiens
  misc_RNA (1)...(19): siRNA sense strand
ggcaggagcuugaaaucgu

SEQ ID NO: 94233 - RNA, 19 nt, Homo sapiens
  misc_RNA (1)...(19): siRNA sense strand
ggaacugaagagaauaauu

SEQ ID NO: 94234 - RNA, 19 nt, Homo sapiens
  misc_RNA (1)...(19): siRNA sense strand
caaggauccagaaggcuua

SEQ ID NO: 94235 - RNA, 19 nt, Homo sapiens
  misc_RNA (1)...(19): siRNA sense strand
gaauaauugacgacaguga

SEQ ID NO: 94236 - RNA, 19 nt, Homo sapiens
  misc_RNA (1)...(19): siRNA sense strand
aaaauugguucccuuauug

SEQ ID NO: 94237 - RNA, 19 nt, Homo sapiens
  misc_RNA (1)...(19): siRNA sense strand
gaaaucgucauuggagaug

SEQ ID NO: 94238 - RNA, 19 nt, Homo sapiens
  misc_RNA (1)...(19): siRNA sense strand
caaguucggccacgaguuc

SEQ ID NO: 94239 - RNA, 19 nt, Homo sapiens
  misc_RNA (1)...(19): siRNA sense strand
ggagaugaacacauuucuu

SEQ ID NO: 94240 - RNA, 19 nt, Homo sapiens
  misc_RNA (1)...(19): siRNA sense strand
caacaacagcaauuacaag

SEQ ID NO: 94241 - RNA, 19 nt, Homo sapiens
  misc_RNA (1)...(19): siRNA sense strand
aaaagaggcuuauguacau

SEQ ID NO: 94242 - RNA, 19 nt, Homo sapiens
  misc_RNA (1)...(19): siRNA sense strand
gccacgaguuccuggaguu

SEQ ID NO: 94243 - RNA, 19 nt, Homo sapiens
  misc_RNA (1)...(19): siRNA sense strand
uggauuacacuucaagauu

SEQ ID NO: 94244 - RNA, 19 nt, Homo sapiens
  misc_RNA (1)...(19): siRNA sense strand
cuuauuggauuacacuuca

SEQ ID NO: 94245 - RNA, 19 nt, Homo sapiens
  misc_RNA (1)...(19): siRNA sense strand
cuucagucuuauuggauua

SEQ ID NO: 94246 - RNA, 19 nt, Homo sapiens
  misc_RNA (1)...(19): siRNA sense strand
uaagauaugccaacaacag

SEQ ID NO: 94247 - RNA, 19 nt, Homo sapiens
  misc_RNA (1)...(19): siRNA sense strand
ccaacaacagcaauuacaa

SEQ ID NO: 94248 - RNA, 19 nt, Homo sapiens
  misc_RNA (1)...(19): siRNA sense strand
ggaggaacugaagagaaua

SEQ ID NO: 94249 - RNA, 19 nt, Homo sapiens
  misc_RNA (1)...(19): siRNA sense strand
cagaaaagaggcuuaugua

SEQ ID NO: 94250 - RNA, 19 nt, Homo sapiens
  misc_RNA (1)...(19): siRNA sense strand
uccagaaggcuuacgagua

SEQ ID NO: 94251 - RNA, 19 nt, Homo sapiens
  misc_RNA (1)...(19): siRNA sense strand
acgaguuccuggaguuuga

SEQ ID NO: 94252 - RNA, 19 nt, Homo sapiens
  misc_RNA (1)...(19): siRNA sense strand
cgaccggacgggaaguuaa

SEQ ID NO: 94253 - RNA, 19 nt, Homo sapiens
  misc_RNA (1)...(19): siRNA sense strand
agaaggcuuacgaguauuu

SEQ ID NO: 94254 - RNA, 19 nt, Homo sapiens
  misc_RNA (1)...(19): siRNA sense strand
gauaugccaacaacagcaa

SEQ ID NO: 94255 - RNA, 19 nt, Homo sapiens
  misc_RNA (1)...(19): siRNA sense strand
guuccuggaguuugaguuu

SEQ ID NO: 94256 - RNA, 19 nt, Homo sapiens
  misc_RNA (1)...(19): siRNA sense strand
cgacagugaaauuaccaaa

SEQ ID NO: 94257 - RNA, 19 nt, Homo sapiens
  misc_RNA (1)...(19): siRNA sense strand
gagcuugaaaucgucauug

SEQ ID NO: 94258 - RNA, 19 nt, Homo sapiens
  misc_RNA (1)...(19): siRNA sense strand
gccaacaacagcaauuaca

SEQ ID NO: 94259 - RNA, 19 nt, Homo sapiens
  misc_RNA (1)...(19): siRNA sense strand
cggacgggaaguuaagaua

SEQ ID NO: 94260 - RNA, 19 nt, Homo sapiens
  misc_RNA (1)...(19): siRNA sense strand
gcaaguucggccacgaguu

SEQ ID NO: 94261 - RNA, 19 nt, Homo sapiens
  misc_RNA (1)...(19): siRNA sense strand
uugguucccuuauugaugu

SEQ ID NO: 94262 - RNA, 19 nt, Homo sapiens
  misc_RNA (1)...(19): siRNA sense strand
ugaaauuaccaaagaggau

SEQ ID NO: 94263 - RNA, 19 nt, Homo sapiens
  misc_RNA (1)...(19): siRNA sense strand
ccacgaguuccuggaguuu

SEQ ID NO: 94264 - RNA, 19 nt, Homo sapiens
  misc_RNA (1)...(19): siRNA sense strand
ugaaaucgucauuggagau

SEQ ID NO: 94265 - RNA, 19 nt, Homo sapiens
  misc_RNA (1)...(19): siRNA sense strand
aacaacagcaauuacaaga

SEQ ID NO: 94266 - RNA, 19 nt, Homo sapiens
  misc_RNA (1)...(19): siRNA sense strand
ucuucagucuuauuggauu

SEQ ID NO: 94267 - RNA, 19 nt, Homo sapiens
  misc_RNA (1)...(19): siRNA sense strand
cagaaggcuuacgaguauu

SEQ ID NO: 94268 - RNA, 19 nt, Homo sapiens
  misc_RNA (1)...(19): siRNA sense strand
aauaauugacgacagugaa

SEQ ID NO: 94269 - RNA, 19 nt, Homo sapiens
  misc_RNA (1)...(19): siRNA sense strand
auaauugacgacagugaaa

SEQ ID NO: 94270 - RNA, 19 nt, Homo sapiens
  misc_RNA (1)...(19): siRNA sense strand
gauggaggaacugaagaga

SEQ ID NO: 94271 - RNA, 19 nt, Homo sapiens
  misc_RNA (1)...(19): siRNA sense strand
aaauugguucccuuauuga

SEQ ID NO: 94272 - RNA, 19 nt, Homo sapiens
  misc_RNA (1)...(19): siRNA sense strand
acagcaauuacaagaauga

SEQ ID NO: 94273 - RNA, 19 nt, Homo sapiens
  misc_RNA (1)...(19): siRNA sense strand
ggagcuugaaaucgucauu

SEQ ID NO: 94274 - RNA, 19 nt, Homo sapiens
  misc_RNA (1)...(19): siRNA sense strand
acaacagcaauuacaagaa

SEQ ID NO: 94275 - RNA, 19 nt, Homo sapiens
  misc_RNA (1)...(19): siRNA sense strand
ccacagaccugguguuugu

SEQ ID NO: 94276 - RNA, 19 nt, Homo sapiens
  misc_RNA (1)...(19): siRNA sense strand
gcaaugccguggaggauga

SEQ ID NO: 94277 - RNA, 19 nt, Homo sapiens
  misc_RNA (1)...(19): siRNA sense strand
gcgagucccuggugaaauu

SEQ ID NO: 94278 - RNA, 19 nt, Homo sapiens
  misc_RNA (1)...(19): siRNA sense strand
ggagaacacaguugucuaa

SEQ ID NO: 94279 - RNA, 19 nt, Homo sapiens
  misc_RNA (1)...(19): siRNA sense strand
gaagaucuguguggaggaa

SEQ ID NO: 94280 - RNA, 19 nt, Homo sapiens
  misc_RNA (1)...(19): siRNA sense strand
ccaguucgcuaucaccaaa

SEQ ID NO: 94281 - RNA, 19 nt, Homo sapiens
  misc_RNA (1)...(19): siRNA sense strand
ucgagaagcuguccaggaa

SEQ ID NO: 94282 - RNA, 19 nt, Homo sapiens
  misc_RNA (1)...(19): siRNA sense strand
cacgagggcuucacucuga

SEQ ID NO: 94283 - RNA, 19 nt, Homo sapiens
  misc_RNA (1)...(19): siRNA sense strand
gaccucggcuuuaagaugu

SEQ ID NO: 94284 - RNA, 19 nt, Homo sapiens
  misc_RNA (1)...(19): siRNA sense strand
gacaauuccuucacugugu

SEQ ID NO: 94285 - RNA, 19 nt, Homo sapiens
  misc_RNA (1)...(19): siRNA sense strand
gcagagcacuacuucuaca

SEQ ID NO: 94286 - RNA, 19 nt, Homo sapiens
  misc_RNA (1)...(19): siRNA sense strand
gagaagcuguccaggaagu

SEQ ID NO: 94287 - RNA, 19 nt, Homo sapiens
  misc_RNA (1)...(19): siRNA sense strand
ggcauugucuucacugaug

SEQ ID NO: 94288 - RNA, 19 nt, Homo sapiens
  misc_RNA (1)...(19): siRNA sense strand
gaaauuccaagccaaagug

SEQ ID NO: 94289 - RNA, 19 nt, Homo sapiens
  misc_RNA (1)...(19): siRNA sense strand
gcucucaaguaccucauug

SEQ ID NO: 94290 - RNA, 19 nt, Homo sapiens
  misc_RNA (1)...(19): siRNA sense strand
cuacacggcugacuucaag

SEQ ID NO: 94291 - RNA, 19 nt, Homo sapiens
  misc_RNA (1)...(19): siRNA sense strand
acuuugagcuggugaagaa

SEQ ID NO: 94292 - RNA, 19 nt, Homo sapiens
  misc_RNA (1)...(19): siRNA sense strand
ggagccaggacuacauuaa

SEQ ID NO: 94293 - RNA, 19 nt, Homo sapiens
  misc_RNA (1)...(19): siRNA sense strand
ucgauuacguggagagcua

SEQ ID NO: 94294 - RNA, 19 nt, Homo sapiens
  misc_RNA (1)...(19): siRNA sense strand
uggcagagcacuacuucua

SEQ ID NO: 94295 - RNA, 19 nt, Homo sapiens
  misc_RNA (1)...(19): siRNA sense strand
uuaaugaugcugccaagaa

SEQ ID NO: 94296 - RNA, 19 nt, Homo sapiens
  misc_RNA (1)...(19): siRNA sense strand
ucaagaccaucaaccagau

SEQ ID NO: 94297 - RNA, 19 nt, Homo sapiens
  misc_RNA (1)...(19): siRNA sense strand
gcuacagcgucaucgagaa

SEQ ID NO: 94298 - RNA, 19 nt, Homo sapiens
  misc_RNA (1)...(19): siRNA sense strand
ucagucagaucguggauac

SEQ ID NO: 94299 - RNA, 19 nt, Homo sapiens
  misc_RNA (1)...(19): siRNA sense strand
gaaacuggaagcugugagu

SEQ ID NO: 94300 - RNA, 19 nt, Homo sapiens
  misc_RNA (1)...(19): siRNA sense strand
cguucggccuguugaauuu

SEQ ID NO: 94301 - RNA, 19 nt, Homo sapiens
  misc_RNA (1)...(19): siRNA sense strand
gaggaugagcugagggaaa

SEQ ID NO: 94302 - RNA, 19 nt, Homo sapiens
  misc_RNA (1)...(19): siRNA sense strand
uaaugaugcugccaagaag

SEQ ID NO: 94303 - RNA, 19 nt, Homo sapiens
  misc_RNA (1)...(19): siRNA sense strand
gggugggcauggucaacua

SEQ ID NO: 94304 - RNA, 19 nt, Homo sapiens
  misc_RNA (1)...(19): siRNA sense strand
ggugaaauuccaagccaaa

SEQ ID NO: 94305 - RNA, 19 nt, Homo sapiens
  misc_RNA (1)...(19): siRNA sense strand
ccagauaggcaagaaguug

SEQ ID NO: 94306 - RNA, 19 nt, Homo sapiens
  misc_RNA (1)...(19): siRNA sense strand
gagccaggacuacauuaau

SEQ ID NO: 94307 - RNA, 19 nt, Homo sapiens
  misc_RNA (1)...(19): siRNA sense strand
uugagaaagugaagguauu

SEQ ID NO: 94308 - RNA, 19 nt, Homo sapiens
  misc_RNA (1)...(19): siRNA sense strand
aggaugagcugagggaaau

SEQ ID NO: 94309 - RNA, 19 nt, Homo sapiens
  misc_RNA (1)...(19): siRNA sense strand
caagaccaucaaccagaua

SEQ ID NO: 94310 - RNA, 19 nt, Homo sapiens
  misc_RNA (1)...(19): siRNA sense strand
gcccacagaccugguguuu

SEQ ID NO: 94311 - RNA, 19 nt, Homo sapiens
  misc_RNA (1)...(19): siRNA sense strand
ucaaccagauaggcaagaa

SEQ ID NO: 94312 - RNA, 19 nt, Homo sapiens
  misc_RNA (1)...(19): siRNA sense strand
caaggcggcugugcggaau

SEQ ID NO: 94313 - RNA, 19 nt, Homo sapiens
  misc_RNA (1)...(19): siRNA sense strand
gccaggacuacauuaauga

SEQ ID NO: 94314 - RNA, 19 nt, Homo sapiens
  misc_RNA (1)...(19): siRNA sense strand
agccaggacuacauuaaug

SEQ ID NO: 94315 - RNA, 19 nt, Homo sapiens
  misc_RNA (1)...(19): siRNA sense strand
gggcugcucucaaguaccu

SEQ ID NO: 94316 - RNA, 19 nt, Homo sapiens
  misc_RNA (1)...(19): siRNA sense strand
ggacuacauuaaugaugcu

SEQ ID NO: 94317 - RNA, 19 nt, Homo sapiens
  misc_RNA (1)...(19): siRNA sense strand
ggagagcuacagcgucauc

SEQ ID NO: 94318 - RNA, 19 nt, Homo sapiens
  misc_RNA (1)...(19): siRNA sense strand
gcguucggccuguugaauu

SEQ ID NO: 94319 - RNA, 19 nt, Homo sapiens
  misc_RNA (1)...(19): siRNA sense strand
gaaguucaucagucagauc

SEQ ID NO: 94320 - RNA, 19 nt, Homo sapiens
  misc_RNA (1)...(19): siRNA sense strand
guaagcggcuggccauccu

SEQ ID NO: 94321 - RNA, 19 nt, Homo sapiens
  misc_RNA (1)...(19): siRNA sense strand
gaagcuguccaggaaguuc

SEQ ID NO: 94322 - RNA, 19 nt, Homo sapiens
  misc_RNA (1)...(19): siRNA sense strand
gaacuuugagcuggugaag

SEQ ID NO: 94323 - RNA, 19 nt, Homo sapiens
  misc_RNA (1)...(19): siRNA sense strand
agaaguugcagaagaagau

SEQ ID NO: 94324 - RNA, 19 nt, Homo sapiens
  misc_RNA (1)...(19): siRNA sense strand
gcucugugcgccaggaguu

SEQ ID NO: 94325 - RNA, 19 nt, Homo sapiens
  misc_RNA (1)...(19): siRNA sense strand
gcaccgugaagcaggaguu

SEQ ID NO: 94326 - RNA, 19 nt, Homo sapiens
  misc_RNA (1)...(19): siRNA sense strand
aaacuggaagcugugagua

SEQ ID NO: 94327 - RNA, 19 nt, Homo sapiens
  misc_RNA (1)...(19): siRNA sense strand
ucagcaagguggucaucgu

SEQ ID NO: 94328 - RNA, 19 nt, Homo sapiens
  misc_RNA (1)...(19): siRNA sense strand
agaccucggcuuuaagaug

SEQ ID NO: 94329 - RNA, 19 nt, Homo sapiens
  misc_RNA (1)...(19): siRNA sense strand
gaugagcugagggaaauag

SEQ ID NO: 94330 - RNA, 19 nt, Homo sapiens
  misc_RNA (1)...(19): siRNA sense strand
gccauccaguucgcuauca

SEQ ID NO: 94331 - RNA, 19 nt, Homo sapiens
  misc_RNA (1)...(19): siRNA sense strand
ccucggcuuuaagauguuu

SEQ ID NO: 94332 - RNA, 19 nt, Homo sapiens
  misc_RNA (1)...(19): siRNA sense strand
acaccaagaaggacaucaa

SEQ ID NO: 94333 - RNA, 19 nt, Homo sapiens
  misc_RNA (1)...(19): siRNA sense strand
ugaaauuccaagccaaagu

SEQ ID NO: 94334 - RNA, 19 nt, Homo sapiens
  misc_RNA (1)...(19): siRNA sense strand
ugagaaagugaagguauuc

SEQ ID NO: 94335 - RNA, 19 nt, Homo sapiens
  misc_RNA (1)...(19): siRNA sense strand
gaacaugaguguguaaaug

SEQ ID NO: 94336 - RNA, 19 nt, Homo sapiens
  misc_RNA (1)...(19): siRNA sense strand
gcacaaagauagacuacug

SEQ ID NO: 94337 - RNA, 19 nt, Homo sapiens
  misc_RNA (1)...(19): siRNA sense strand
uaacacagaugauuccuau

SEQ ID NO: 94338 - RNA, 19 nt, Homo sapiens
  misc_RNA (1)...(19): siRNA sense strand
gcugauggcuccuaccuuu

SEQ ID NO: 94339 - RNA, 19 nt, Homo sapiens
  misc_RNA (1)...(19): siRNA sense strand
ggaagacggugcaagaaau

SEQ ID NO: 94340 - RNA, 19 nt, Homo sapiens
  misc_RNA (1)...(19): siRNA sense strand
aaacaaggcuacauucuca

SEQ ID NO: 94341 - RNA, 19 nt, Homo sapiens
  misc_RNA (1)...(19): siRNA sense strand
gcagaaggaucaacuacug

SEQ ID NO: 94342 - RNA, 19 nt, Homo sapiens
  misc_RNA (1)...(19): siRNA sense strand
gggaaacgcugccgaagga

SEQ ID NO: 94343 - RNA, 19 nt, Homo sapiens
  misc_RNA (1)...(19): siRNA sense strand
gcagcacccuggagcauaa

SEQ ID NO: 94344 - RNA, 19 nt, Homo sapiens
  misc_RNA (1)...(19): siRNA sense strand
ccaaugguaucacuaugua

SEQ ID NO: 94345 - RNA, 19 nt, Homo sapiens
  misc_RNA (1)...(19): siRNA sense strand
caugaaggauuugcucuua

SEQ ID NO: 94346 - RNA, 19 nt, Homo sapiens
  misc_RNA (1)...(19): siRNA sense strand
aaacaagcaucucuucuau

SEQ ID NO: 94347 - RNA, 19 nt, Homo sapiens
  misc_RNA (1)...(19): siRNA sense strand
caacaucccuggcucauac

SEQ ID NO: 94348 - RNA, 19 nt, Homo sapiens
  misc_RNA (1)...(19): siRNA sense strand
ggacuacugugccucagaa

SEQ ID NO: 94349 - RNA, 19 nt, Homo sapiens
  misc_RNA (1)...(19): siRNA sense strand
aaagaugucugccaagcua

SEQ ID NO: 94350 - RNA, 19 nt, Homo sapiens
  misc_RNA (1)...(19): siRNA sense strand
ccacacagguccacacaga

SEQ ID NO: 94351 - RNA, 19 nt, Homo sapiens
  misc_RNA (1)...(19): siRNA sense strand
gaagaaaugacacagagaa

SEQ ID NO: 94352 - RNA, 19 nt, Homo sapiens
  misc_RNA (1)...(19): siRNA sense strand
gcagcacugucaagaauga

SEQ ID NO: 94353 - RNA, 19 nt, Homo sapiens
  misc_RNA (1)...(19): siRNA sense strand
acacagcgcuuagaagaaa

SEQ ID NO: 94354 - RNA, 19 nt, Homo sapiens
  misc_RNA (1)...(19): siRNA sense strand
ggaaggaugucugcaaauc

SEQ ID NO: 94355 - RNA, 19 nt, Homo sapiens
  misc_RNA (1)...(19): siRNA sense strand
gagugggccugcuccaaua

SEQ ID NO: 94356 - RNA, 19 nt, Homo sapiens
  misc_RNA (1)...(19): siRNA sense strand
caaacaagcaucucuucua

SEQ ID NO: 94357 - RNA, 19 nt, Homo sapiens
  misc_RNA (1)...(19): siRNA sense strand
caacauggacagauccuuu

SEQ ID NO: 94358 - RNA, 19 nt, Homo sapiens
  misc_RNA (1)...(19): siRNA sense strand
uaacacagcgcuuagaaga

SEQ ID NO: 94359 - RNA, 19 nt, Homo sapiens
  misc_RNA (1)...(19): siRNA sense strand
ccagugccaugaaggauuu

SEQ ID NO: 94360 - RNA, 19 nt, Homo sapiens
  misc_RNA (1)...(19): siRNA sense strand
guuugucacuggaauuaua

SEQ ID NO: 94361 - RNA, 19 nt, Homo sapiens
  misc_RNA (1)...(19): siRNA sense strand
gaaaugacacagagaaugg

SEQ ID NO: 94362 - RNA, 19 nt, Homo sapiens
  misc_RNA (1)...(19): siRNA sense strand
gcauaacugugcccacuuc

SEQ ID NO: 94363 - RNA, 19 nt, Homo sapiens
  misc_RNA (1)...(19): siRNA sense strand
gcacugaaggcccaauuga

SEQ ID NO: 94364 - RNA, 19 nt, Homo sapiens
  misc_RNA (1)...(19): siRNA sense strand
gagcagcugugucugaaca

SEQ ID NO: 94365 - RNA, 19 nt, Homo sapiens
  misc_RNA (1)...(19): siRNA sense strand
ggaccacgguugugaacau

SEQ ID NO: 94366 - RNA, 19 nt, Homo sapiens
  misc_RNA (1)...(19): siRNA sense strand
gaaggaaggaugucugcaa

SEQ ID NO: 94367 - RNA, 19 nt, Homo sapiens
  misc_RNA (1)...(19): siRNA sense strand
gaacauucguguguaagca

SEQ ID NO: 94368 - RNA, 19 nt, Homo sapiens
  misc_RNA (1)...(19): siRNA sense strand
gaagacgugugcaaaauug

SEQ ID NO: 94369 - RNA, 19 nt, Homo sapiens
  misc_RNA (1)...(19): siRNA sense strand
gaucaaugcaaaugugaaa

SEQ ID NO: 94370 - RNA, 19 nt, Homo sapiens
  misc_RNA (1)...(19): siRNA sense strand
caacucagccaaagacaug

SEQ ID NO: 94371 - RNA, 19 nt, Homo sapiens
  misc_RNA (1)...(19): siRNA sense strand
ggacaucuugcaauucuug

SEQ ID NO: 94372 - RNA, 19 nt, Homo sapiens
  misc_RNA (1)...(19): siRNA sense strand
gaucagacgacuugcagaa

SEQ ID NO: 94373 - RNA, 19 nt, Homo sapiens
  misc_RNA (1)...(19): siRNA sense strand
gaaaaucgccugagauaca

SEQ ID NO: 94374 - RNA, 19 nt, Homo sapiens
  misc_RNA (1)...(19): siRNA sense strand
gccagugcuuugaagguua

SEQ ID NO: 94375 - RNA, 19 nt, Homo sapiens
  misc_RNA (1)...(19): siRNA sense strand
gcucuuaacccagaugaaa

SEQ ID NO: 94376 - RNA, 19 nt, Homo sapiens
  misc_RNA (1)...(19): siRNA sense strand
caagaaaggcaucugugaa

SEQ ID NO: 94377 - RNA, 19 nt, Homo sapiens
  misc_RNA (1)...(19): siRNA sense strand
gauaucuguuugaagaaga

SEQ ID NO: 94378 - RNA, 19 nt, Homo sapiens
  misc_RNA (1)...(19): siRNA sense strand
gaaccuugcaaacgaagaa

SEQ ID NO: 94379 - RNA, 19 nt, Homo sapiens
  misc_RNA (1)...(19): siRNA sense strand
gaaggaugucugcaaauca

SEQ ID NO: 94380 - RNA, 19 nt, Homo sapiens
  misc_RNA (1)...(19): siRNA sense strand
gagaauggaagcccuggaa

SEQ ID NO: 94381 - RNA, 19 nt, Homo sapiens
  misc_RNA (1)...(19): siRNA sense strand
ccagaaccuugcaaacgaa

SEQ ID NO: 94382 - RNA, 19 nt, Homo sapiens
  misc_RNA (1)...(19): siRNA sense strand
gaagacggugcaagaaaug

SEQ ID NO: 94383 - RNA, 19 nt, Homo sapiens
  misc_RNA (1)...(19): siRNA sense strand
caacuacugugcacugaac

SEQ ID NO: 94384 - RNA, 19 nt, Homo sapiens
  misc_RNA (1)...(19): siRNA sense strand
cacaaaagcuuucccauuc

SEQ ID NO: 94385 - RNA, 19 nt, Homo sapiens
  misc_RNA (1)...(19): siRNA sense strand
caacacccaugacuaugca

SEQ ID NO: 94386 - RNA, 19 nt, Homo sapiens
  misc_RNA (1)...(19): siRNA sense strand
uggcagcacugucaagaau

SEQ ID NO: 94387 - RNA, 19 nt, Homo sapiens
  misc_RNA (1)...(19): siRNA sense strand
ccucugagcccacaaacaa

SEQ ID NO: 94388 - RNA, 19 nt, Homo sapiens
  misc_RNA (1)...(19): siRNA sense strand
aaggaaggaugucugcaaa

SEQ ID NO: 94389 - RNA, 19 nt, Homo sapiens
  misc_RNA (1)...(19): siRNA sense strand
caauauggcagcacuguca

SEQ ID NO: 94390 - RNA, 19 nt, Homo sapiens
  misc_RNA (1)...(19): siRNA sense strand
ggaagcccuuuggaagaaa

SEQ ID NO: 94391 - RNA, 19 nt, Homo sapiens
  misc_RNA (1)...(19): siRNA sense strand
ggaggaacuacaagagauu

SEQ ID NO: 94392 - RNA, 19 nt, Homo sapiens
  misc_RNA (1)...(19): siRNA sense strand
acacagaugauuccuauuc

SEQ ID NO: 94393 - RNA, 19 nt, Homo sapiens
  misc_RNA (1)...(19): siRNA sense strand
ucaagaccuucaagaggaa

SEQ ID NO: 94394 - RNA, 19 nt, Homo sapiens
  misc_RNA (1)...(19): siRNA sense strand
augcaaaggucaaggaguu

SEQ ID NO: 94395 - RNA, 19 nt, Homo sapiens
  misc_RNA (1)...(19): siRNA sense strand
ucagagggauuuguucuag

SEQ ID NO: 94396 - RNA, 19 nt, Homo sapiens
  misc_RNA (1)...(19): siRNA sense strand
gcagugaagauucguuugu

SEQ ID NO: 94397 - RNA, 19 nt, Homo sapiens
  misc_RNA (1)...(19): siRNA sense strand
gagcaugagugcgucaaca

SEQ ID NO: 94398 - RNA, 19 nt, Homo sapiens
  misc_RNA (1)...(19): siRNA sense strand
gaaugugccacgggucaua

SEQ ID NO: 94399 - RNA, 19 nt, Homo sapiens
  misc_RNA (1)...(19): siRNA sense strand
ugaaguccauugggaguga

SEQ ID NO: 94400 - RNA, 19 nt, Homo sapiens
  misc_RNA (1)...(19): siRNA sense strand
cuagaagacuccgauggaa

SEQ ID NO: 94401 - RNA, 19 nt, Homo sapiens
  misc_RNA (1)...(19): siRNA sense strand
ucaagaaaggcaucuguga

SEQ ID NO: 94402 - RNA, 19 nt, Homo sapiens
  misc_RNA (1)...(19): siRNA sense strand
gaggaggaacuacaagaga

SEQ ID NO: 94403 - RNA, 19 nt, Homo sapiens
  misc_RNA (1)...(19): siRNA sense strand
aaggaugucugcaaaucaa

SEQ ID NO: 94404 - RNA, 19 nt, Homo sapiens
  misc_RNA (1)...(19): siRNA sense strand
guggacaucuugcaauucu

SEQ ID NO: 94405 - RNA, 19 nt, Homo sapiens
  misc_RNA (1)...(19): siRNA sense strand
ucagacgacuugcagaauc

SEQ ID NO: 94406 - RNA, 19 nt, Homo sapiens
  misc_RNA (1)...(19): siRNA sense strand
gcaaacaaggcuacauucu

SEQ ID NO: 94407 - RNA, 19 nt, Homo sapiens
  misc_RNA (1)...(19): siRNA sense strand
caaacgaagaaguaagaaa

SEQ ID NO: 94408 - RNA, 19 nt, Homo sapiens
  misc_RNA (1)...(19): siRNA sense strand
caauggaugagauaaguga

SEQ ID NO: 94409 - RNA, 19 nt, Homo sapiens
  misc_RNA (1)...(19): siRNA sense strand
ugugaacauucguguguaa

SEQ ID NO: 94410 - RNA, 19 nt, Homo sapiens
  misc_RNA (1)...(19): siRNA sense strand
gugcaaacaaggcuacauu

SEQ ID NO: 94411 - RNA, 19 nt, Homo sapiens
  misc_RNA (1)...(19): siRNA sense strand
cacaauggaugagauaagu

SEQ ID NO: 94412 - RNA, 19 nt, Homo sapiens
  misc_RNA (1)...(19): siRNA sense strand
gcaaaugcucagagggauu

SEQ ID NO: 94413 - RNA, 19 nt, Homo sapiens
  misc_RNA (1)...(19): siRNA sense strand
gaccacgguugugaacauu

SEQ ID NO: 94414 - RNA, 19 nt, Homo sapiens
  misc_RNA (1)...(19): siRNA sense strand
cgugggagguccaucucua

SEQ ID NO: 94415 - RNA, 19 nt, Homo sapiens
  misc_RNA (1)...(19): siRNA sense strand
gcacaauggaugagauaag

SEQ ID NO: 94416 - RNA, 19 nt, Homo sapiens
  misc_RNA (1)...(19): siRNA sense strand
uggccgagguggcugcuaa

SEQ ID NO: 94417 - RNA, 19 nt, Homo sapiens
  misc_RNA (1)...(19): siRNA sense strand
gcgcuuagaagaaaugaca

SEQ ID NO: 94418 - RNA, 19 nt, Homo sapiens
  misc_RNA (1)...(19): siRNA sense strand
aaacuucaacucagccaaa

SEQ ID NO: 94419 - RNA, 19 nt, Homo sapiens
  misc_RNA (1)...(19): siRNA sense strand
acauuugugugaacaguga

SEQ ID NO: 94420 - RNA, 19 nt, Homo sapiens
  misc_RNA (1)...(19): siRNA sense strand
gaauacuccugugucaaca

SEQ ID NO: 94421 - RNA, 19 nt, Homo sapiens
  misc_RNA (1)...(19): siRNA sense strand
gugagcagcugugucugaa

SEQ ID NO: 94422 - RNA, 19 nt, Homo sapiens
  misc_RNA (1)...(19): siRNA sense strand
gaugucagcacgagugugu

SEQ ID NO: 94423 - RNA, 19 nt, Homo sapiens
  misc_RNA (1)...(19): siRNA sense strand
ugaaggauuugcucuuaac

SEQ ID NO: 94424 - RNA, 19 nt, Homo sapiens
  misc_RNA (1)...(19): siRNA sense strand
cagcacaauggaugagaua

SEQ ID NO: 94425 - RNA, 19 nt, Homo sapiens
  misc_RNA (1)...(19): siRNA sense strand
uagauuccuugacaauuuc

SEQ ID NO: 94426 - RNA, 19 nt, Homo sapiens
  misc_RNA (1)...(19): siRNA sense strand
gacggaagacggugcaaga

SEQ ID NO: 94427 - RNA, 19 nt, Homo sapiens
  misc_RNA (1)...(19): siRNA sense strand
uaaugggaauuccuacauc

SEQ ID NO: 94428 - RNA, 19 nt, Homo sapiens
  misc_RNA (1)...(19): siRNA sense strand
gcgagugcuuggagggauu

SEQ ID NO: 94429 - RNA, 19 nt, Homo sapiens
  misc_RNA (1)...(19): siRNA sense strand
ccagugcuuugaagguuau

SEQ ID NO: 94430 - RNA, 19 nt, Homo sapiens
  misc_RNA (1)...(19): siRNA sense strand
ugaccuccguguuccagaa

SEQ ID NO: 94431 - RNA, 19 nt, Homo sapiens
  misc_RNA (1)...(19): siRNA sense strand
aggaagcccuuuggaagaa

SEQ ID NO: 94432 - RNA, 19 nt, Homo sapiens
  misc_RNA (1)...(19): siRNA sense strand
gcccagagcagccauugug

SEQ ID NO: 94433 - RNA, 19 nt, Homo sapiens
  misc_RNA (1)...(19): siRNA sense strand
gagugaccaugguugugaa

SEQ ID NO: 94434 - RNA, 19 nt, Homo sapiens
  misc_RNA (1)...(19): siRNA sense strand
ugucagcacgaguguguua

SEQ ID NO: 94435 - RNA, 19 nt, Homo sapiens
  misc_RNA (1)...(19): siRNA sense strand
gaacaugaguguguaaaug

SEQ ID NO: 94436 - RNA, 19 nt, Homo sapiens
  misc_RNA (1)...(19): siRNA sense strand
gcacaaagauagacuacug

SEQ ID NO: 94437 - RNA, 19 nt, Homo sapiens
  misc_RNA (1)...(19): siRNA sense strand
uaacacagaugauuccuau

SEQ ID NO: 94438 - RNA, 19 nt, Homo sapiens
  misc_RNA (1)...(19): siRNA sense strand
gcugauggcuccuaccuuu

SEQ ID NO: 94439 - RNA, 19 nt, Homo sapiens
  misc_RNA (1)...(19): siRNA sense strand
ggaagacggugcaagaaau

SEQ ID NO: 94440 - RNA, 19 nt, Homo sapiens
  misc_RNA (1)...(19): siRNA sense strand
aaacaaggcuacauucuca

SEQ ID NO: 94441 - RNA, 19 nt, Homo sapiens
  misc_RNA (1)...(19): siRNA sense strand
gcagaaggaucaacuacug

SEQ ID NO: 94442 - RNA, 19 nt, Homo sapiens
  misc_RNA (1)...(19): siRNA sense strand
gggaaacgcugccgaagga

SEQ ID NO: 94443 - RNA, 19 nt, Homo sapiens
  misc_RNA (1)...(19): siRNA sense strand
gcagcacccuggagcauaa

SEQ ID NO: 94444 - RNA, 19 nt, Homo sapiens
  misc_RNA (1)...(19): siRNA sense strand
ccaaugguaucacuaugua

SEQ ID NO: 94445 - RNA, 19 nt, Homo sapiens
  misc_RNA (1)...(19): siRNA sense strand
caugaaggauuugcucuua

SEQ ID NO: 94446 - RNA, 19 nt, Homo sapiens
  misc_RNA (1)...(19): siRNA sense strand
aaacaagcaucucuucuau

SEQ ID NO: 94447 - RNA, 19 nt, Homo sapiens
  misc_RNA (1)...(19): siRNA sense strand
caacaucccuggcucauac

SEQ ID NO: 94448 - RNA, 19 nt, Homo sapiens
  misc_RNA (1)...(19): siRNA sense strand
ggacuacugugccucagaa

SEQ ID NO: 94449 - RNA, 19 nt, Homo sapiens
  misc_RNA (1)...(19): siRNA sense strand
aaagaugucugccaagcua

SEQ ID NO: 94450 - RNA, 19 nt, Homo sapiens
  misc_RNA (1)...(19): siRNA sense strand
ccacacagguccacacaga

SEQ ID NO: 94451 - RNA, 19 nt, Homo sapiens
  misc_RNA (1)...(19): siRNA sense strand
gaagaaaugacacagagaa

SEQ ID NO: 94452 - RNA, 19 nt, Homo sapiens
  misc_RNA (1)...(19): siRNA sense strand
gcagcacugucaagaauga

SEQ ID NO: 94453 - RNA, 19 nt, Homo sapiens
  misc_RNA (1)...(19): siRNA sense strand
acacagcgcuuagaagaaa

SEQ ID NO: 94454 - RNA, 19 nt, Homo sapiens
  misc_RNA (1)...(19): siRNA sense strand
ggaaggaugucugcaaauc

SEQ ID NO: 94455 - RNA, 19 nt, Homo sapiens
  misc_RNA (1)...(19): siRNA sense strand
gagugggccugcuccaaua

SEQ ID NO: 94456 - RNA, 19 nt, Homo sapiens
  misc_RNA (1)...(19): siRNA sense strand
caaacaagcaucucuucua

SEQ ID NO: 94457 - RNA, 19 nt, Homo sapiens
  misc_RNA (1)...(19): siRNA sense strand
caacauggacagauccuuu

SEQ ID NO: 94458 - RNA, 19 nt, Homo sapiens
  misc_RNA (1)...(19): siRNA sense strand
uaacacagcgcuuagaaga

SEQ ID NO: 94459 - RNA, 19 nt, Homo sapiens
  misc_RNA (1)...(19): siRNA sense strand
ccagugccaugaaggauuu

SEQ ID NO: 94460 - RNA, 19 nt, Homo sapiens
  misc_RNA (1)...(19): siRNA sense strand
guuugucacuggaauuaua

SEQ ID NO: 94461 - RNA, 19 nt, Homo sapiens
  misc_RNA (1)...(19): siRNA sense strand
gaaaugacacagagaaugg

SEQ ID NO: 94462 - RNA, 19 nt, Homo sapiens
  misc_RNA (1)...(19): siRNA sense strand
gcauaacugugcccacuuc

SEQ ID NO: 94463 - RNA, 19 nt, Homo sapiens
  misc_RNA (1)...(19): siRNA sense strand
gcacugaaggcccaauuga

SEQ ID NO: 94464 - RNA, 19 nt, Homo sapiens
  misc_RNA (1)...(19): siRNA sense strand
gagcagcugugucugaaca

SEQ ID NO: 94465 - RNA, 19 nt, Homo sapiens
  misc_RNA (1)...(19): siRNA sense strand
ggaccacgguugugaacau

SEQ ID NO: 94466 - RNA, 19 nt, Homo sapiens
  misc_RNA (1)...(19): siRNA sense strand
gaaggaaggaugucugcaa

SEQ ID NO: 94467 - RNA, 19 nt, Homo sapiens
  misc_RNA (1)...(19): siRNA sense strand
gaacauucguguguaagca

SEQ ID NO: 94468 - RNA, 19 nt, Homo sapiens
  misc_RNA (1)...(19): siRNA sense strand
gaagacgugugcaaaauug

SEQ ID NO: 94469 - RNA, 19 nt, Homo sapiens
  misc_RNA (1)...(19): siRNA sense strand
gaucaaugcaaaugugaaa

SEQ ID NO: 94470 - RNA, 19 nt, Homo sapiens
  misc_RNA (1)...(19): siRNA sense strand
caacucagccaaagacaug

SEQ ID NO: 94471 - RNA, 19 nt, Homo sapiens
  misc_RNA (1)...(19): siRNA sense strand
ggacaucuugcaauucuug

SEQ ID NO: 94472 - RNA, 19 nt, Homo sapiens
  misc_RNA (1)...(19): siRNA sense strand
gaucagacgacuugcagaa

SEQ ID NO: 94473 - RNA, 19 nt, Homo sapiens
  misc_RNA (1)...(19): siRNA sense strand
gaaaaucgccugagauaca

SEQ ID NO: 94474 - RNA, 19 nt, Homo sapiens
  misc_RNA (1)...(19): siRNA sense strand
gccagugcuuugaagguua

SEQ ID NO: 94475 - RNA, 19 nt, Homo sapiens
  misc_RNA (1)...(19): siRNA sense strand
gcucuuaacccagaugaaa

SEQ ID NO: 94476 - RNA, 19 nt, Homo sapiens
  misc_RNA (1)...(19): siRNA sense strand
caagaaaggcaucugugaa

SEQ ID NO: 94477 - RNA, 19 nt, Homo sapiens
  misc_RNA (1)...(19): siRNA sense strand
gauaucuguuugaagaaga

SEQ ID NO: 94478 - RNA, 19 nt, Homo sapiens
  misc_RNA (1)...(19): siRNA sense strand
gaaccuugcaaacgaagaa

SEQ ID NO: 94479 - RNA, 19 nt, Homo sapiens
  misc_RNA (1)...(19): siRNA sense strand
gaaggaugucugcaaauca

SEQ ID NO: 94480 - RNA, 19 nt, Homo sapiens
  misc_RNA (1)...(19): siRNA sense strand
gagaauggaagcccuggaa

SEQ ID NO: 94481 - RNA, 19 nt, Homo sapiens
  misc_RNA (1)...(19): siRNA sense strand
ccagaaccuugcaaacgaa

SEQ ID NO: 94482 - RNA, 19 nt, Homo sapiens
  misc_RNA (1)...(19): siRNA sense strand
gaagacggugcaagaaaug

SEQ ID NO: 94483 - RNA, 19 nt, Homo sapiens
  misc_RNA (1)...(19): siRNA sense strand
caacuacugugcacugaac

SEQ ID NO: 94484 - RNA, 19 nt, Homo sapiens
  misc_RNA (1)...(19): siRNA sense strand
cacaaaagcuuucccauuc

SEQ ID NO: 94485 - RNA, 19 nt, Homo sapiens
  misc_RNA (1)...(19): siRNA sense strand
caacacccaugacuaugca

SEQ ID NO: 94486 - RNA, 19 nt, Homo sapiens
  misc_RNA (1)...(19): siRNA sense strand
uggcagcacugucaagaau

SEQ ID NO: 94487 - RNA, 19 nt, Homo sapiens
  misc_RNA (1)...(19): siRNA sense strand
ccucugagcccacaaacaa

SEQ ID NO: 94488 - RNA, 19 nt, Homo sapiens
  misc_RNA (1)...(19): siRNA sense strand
aaggaaggaugucugcaaa

SEQ ID NO: 94489 - RNA, 19 nt, Homo sapiens
  misc_RNA (1)...(19): siRNA sense strand
caauauggcagcacuguca

SEQ ID NO: 94490 - RNA, 19 nt, Homo sapiens
  misc_RNA (1)...(19): siRNA sense strand
ggaagcccuuuggaagaaa

SEQ ID NO: 94491 - RNA, 19 nt, Homo sapiens
  misc_RNA (1)...(19): siRNA sense strand
ggaggaacuacaagagauu

SEQ ID NO: 94492 - RNA, 19 nt, Homo sapiens
  misc_RNA (1)...(19): siRNA sense strand
acacagaugauuccuauuc

SEQ ID NO: 94493 - RNA, 19 nt, Homo sapiens
  misc_RNA (1)...(19): siRNA sense strand
ucaagaccuucaagaggaa

SEQ ID NO: 94494 - RNA, 19 nt, Homo sapiens
  misc_RNA (1)...(19): siRNA sense strand
augcaaaggucaaggaguu

SEQ ID NO: 94495 - RNA, 19 nt, Homo sapiens
  misc_RNA (1)...(19): siRNA sense strand
ucagagggauuuguucuag

SEQ ID NO: 94496 - RNA, 19 nt, Homo sapiens
  misc_RNA (1)...(19): siRNA sense strand
gcagugaagauucguuugu

SEQ ID NO: 94497 - RNA, 19 nt, Homo sapiens
  misc_RNA (1)...(19): siRNA sense strand
gagcaugagugcgucaaca

SEQ ID NO: 94498 - RNA, 19 nt, Homo sapiens
  misc_RNA (1)...(19): siRNA sense strand
gaaugugccacgggucaua

SEQ ID NO: 94499 - RNA, 19 nt, Homo sapiens
  misc_RNA (1)...(19): siRNA sense strand
ugaaguccauugggaguga

SEQ ID NO: 94500 - RNA, 19 nt, Homo sapiens
  misc_RNA (1)...(19): siRNA sense strand
cuagaagacuccgauggaa

SEQ ID NO: 94501 - RNA, 19 nt, Homo sapiens
  misc_RNA (1)...(19): siRNA sense strand
ucaagaaaggcaucuguga

SEQ ID NO: 94502 - RNA, 19 nt, Homo sapiens
  misc_RNA (1)...(19): siRNA sense strand
gaggaggaacuacaagaga

SEQ ID NO: 94503 - RNA, 19 nt, Homo sapiens
  misc_RNA (1)...(19): siRNA sense strand
aaggaugucugcaaaucaa

SEQ ID NO: 94504 - RNA, 19 nt, Homo sapiens
  misc_RNA (1)...(19): siRNA sense strand
guggacaucuugcaauucu

SEQ ID NO: 94505 - RNA, 19 nt, Homo sapiens
  misc_RNA (1)...(19): siRNA sense strand
ucagacgacuugcagaauc

SEQ ID NO: 94506 - RNA, 19 nt, Homo sapiens
  misc_RNA (1)...(19): siRNA sense strand
gcaaacaaggcuacauucu

SEQ ID NO: 94507 - RNA, 19 nt, Homo sapiens
  misc_RNA (1)...(19): siRNA sense strand
caaacgaagaaguaagaaa

SEQ ID NO: 94508 - RNA, 19 nt, Homo sapiens
  misc_RNA (1)...(19): siRNA sense strand
caauggaugagauaaguga

SEQ ID NO: 94509 - RNA, 19 nt, Homo sapiens
  misc_RNA (1)...(19): siRNA sense strand
ugugaacauucguguguaa

SEQ ID NO: 94510 - RNA, 19 nt, Homo sapiens
  misc_RNA (1)...(19): siRNA sense strand
gugcaaacaaggcuacauu

SEQ ID NO: 94511 - RNA, 19 nt, Homo sapiens
  misc_RNA (1)...(19): siRNA sense strand
cacaauggaugagauaagu

SEQ ID NO: 94512 - RNA, 19 nt, Homo sapiens
  misc_RNA (1)...(19): siRNA sense strand
gcaaaugcucagagggauu

SEQ ID NO: 94513 - RNA, 19 nt, Homo sapiens
  misc_RNA (1)...(19): siRNA sense strand
gaccacgguugugaacauu

SEQ ID NO: 94514 - RNA, 19 nt, Homo sapiens
  misc_RNA (1)...(19): siRNA sense strand
cgugggagguccaucucua

SEQ ID NO: 94515 - RNA, 19 nt, Homo sapiens
  misc_RNA (1)...(19): siRNA sense strand
gcacaauggaugagauaag

SEQ ID NO: 94516 - RNA, 19 nt, Homo sapiens
  misc_RNA (1)...(19): siRNA sense strand
uggccgagguggcugcuaa

SEQ ID NO: 94517 - RNA, 19 nt, Homo sapiens
  misc_RNA (1)...(19): siRNA sense strand
gcgcuuagaagaaaugaca

SEQ ID NO: 94518 - RNA, 19 nt, Homo sapiens
  misc_RNA (1)...(19): siRNA sense strand
aaacuucaacucagccaaa

SEQ ID NO: 94519 - RNA, 19 nt, Homo sapiens
  misc_RNA (1)...(19): siRNA sense strand
acauuugugugaacaguga

SEQ ID NO: 94520 - RNA, 19 nt, Homo sapiens
  misc_RNA (1)...(19): siRNA sense strand
gaauacuccugugucaaca

SEQ ID NO: 94521 - RNA, 19 nt, Homo sapiens
  misc_RNA (1)...(19): siRNA sense strand
gugagcagcugugucugaa

SEQ ID NO: 94522 - RNA, 19 nt, Homo sapiens
  misc_RNA (1)...(19): siRNA sense strand
gaugucagcacgagugugu

SEQ ID NO: 94523 - RNA, 19 nt, Homo sapiens
  misc_RNA (1)...(19): siRNA sense strand
ugaaggauuugcucuuaac

SEQ ID NO: 94524 - RNA, 19 nt, Homo sapiens
  misc_RNA (1)...(19): siRNA sense strand
cagcacaauggaugagaua

SEQ ID NO: 94525 - RNA, 19 nt, Homo sapiens
  misc_RNA (1)...(19): siRNA sense strand
uagauuccuugacaauuuc

SEQ ID NO: 94526 - RNA, 19 nt, Homo sapiens
  misc_RNA (1)...(19): siRNA sense strand
gacggaagacggugcaaga

SEQ ID NO: 94527 - RNA, 19 nt, Homo sapiens
  misc_RNA (1)...(19): siRNA sense strand
uaaugggaauuccuacauc

SEQ ID NO: 94528 - RNA, 19 nt, Homo sapiens
  misc_RNA (1)...(19): siRNA sense strand
gcgagugcuuggagggauu

SEQ ID NO: 94529 - RNA, 19 nt, Homo sapiens
  misc_RNA (1)...(19): siRNA sense strand
ccagugcuuugaagguuau

SEQ ID NO: 94530 - RNA, 19 nt, Homo sapiens
  misc_RNA (1)...(19): siRNA sense strand
ugaccuccguguuccagaa

SEQ ID NO: 94531 - RNA, 19 nt, Homo sapiens
  misc_RNA (1)...(19): siRNA sense strand
aggaagcccuuuggaagaa

SEQ ID NO: 94532 - RNA, 19 nt, Homo sapiens
  misc_RNA (1)...(19): siRNA sense strand
gcccagagcagccauugug

SEQ ID NO: 94533 - RNA, 19 nt, Homo sapiens
  misc_RNA (1)...(19): siRNA sense strand
gagugaccaugguugugaa

SEQ ID NO: 94534 - RNA, 19 nt, Homo sapiens
  misc_RNA (1)...(19): siRNA sense strand
ugucagcacgaguguguua

SEQ ID NO: 94535 - RNA, 19 nt, Homo sapiens
  misc_RNA (1)...(19): siRNA sense strand
agaaguggcucuuaucauu

SEQ ID NO: 94536 - RNA, 19 nt, Homo sapiens
  misc_RNA (1)...(19): siRNA sense strand
gaacagggucccaucauug

SEQ ID NO: 94537 - RNA, 19 nt, Homo sapiens
  misc_RNA (1)...(19): siRNA sense strand
gaagacuuguuuccacuga

SEQ ID NO: 94538 - RNA, 19 nt, Homo sapiens
  misc_RNA (1)...(19): siRNA sense strand
ugacagaaguggcucuuau

SEQ ID NO: 94539 - RNA, 19 nt, Homo sapiens
  misc_RNA (1)...(19): siRNA sense strand
gaccugguguuuaucauug

SEQ ID NO: 94540 - RNA, 19 nt, Homo sapiens
  misc_RNA (1)...(19): siRNA sense strand
gguuauaccuugaaugaag

SEQ ID NO: 94541 - RNA, 19 nt, Homo sapiens
  misc_RNA (1)...(19): siRNA sense strand
cuugauaggugugcucuua

SEQ ID NO: 94542 - RNA, 19 nt, Homo sapiens
  misc_RNA (1)...(19): siRNA sense strand
gaagcacgaagacuuguuu

SEQ ID NO: 94543 - RNA, 19 nt, Homo sapiens
  misc_RNA (1)...(19): siRNA sense strand
uaugagggcuacacucuga

SEQ ID NO: 94544 - RNA, 19 nt, Homo sapiens
  misc_RNA (1)...(19): siRNA sense strand
ugaagaugcuuguggaugu

SEQ ID NO: 94545 - RNA, 19 nt, Homo sapiens
  misc_RNA (1)...(19): siRNA sense strand
gcccuaggcucucaugguu

SEQ ID NO: 94546 - RNA, 19 nt, Homo sapiens
  misc_RNA (1)...(19): siRNA sense strand
caagauaaaugugcuuugg

SEQ ID NO: 94547 - RNA, 19 nt, Homo sapiens
  misc_RNA (1)...(19): siRNA sense strand
acacuaaacuugaugacau

SEQ ID NO: 94548 - RNA, 19 nt, Homo sapiens
  misc_RNA (1)...(19): siRNA sense strand
ucaagaugauggccaguga

SEQ ID NO: 94549 - RNA, 19 nt, Homo sapiens
  misc_RNA (1)...(19): siRNA sense strand
gaaguggcucuuaucauug

SEQ ID NO: 94550 - RNA, 19 nt, Homo sapiens
  misc_RNA (1)...(19): siRNA sense strand
gaauauggacaaauacauc

SEQ ID NO: 94551 - RNA, 19 nt, Homo sapiens
  misc_RNA (1)...(19): siRNA sense strand
ccaagcaucugguauugag

SEQ ID NO: 94552 - RNA, 19 nt, Homo sapiens
  misc_RNA (1)...(19): siRNA sense strand
uauccuggcuacaccuuaa

SEQ ID NO: 94553 - RNA, 19 nt, Homo sapiens
  misc_RNA (1)...(19): siRNA sense strand
agacugaacacuaaacuug

SEQ ID NO: 94554 - RNA, 19 nt, Homo sapiens
  misc_RNA (1)...(19): siRNA sense strand
gaagaugcuuguggaugug

SEQ ID NO: 94555 - RNA, 19 nt, Homo sapiens
  misc_RNA (1)...(19): siRNA sense strand
agaacagggucccaucauu

SEQ ID NO: 94556 - RNA, 19 nt, Homo sapiens
  misc_RNA (1)...(19): siRNA sense strand
gcccaagcaucugguauug

SEQ ID NO: 94557 - RNA, 19 nt, Homo sapiens
  misc_RNA (1)...(19): siRNA sense strand
caucugguauugagcucua

SEQ ID NO: 94558 - RNA, 19 nt, Homo sapiens
  misc_RNA (1)...(19): siRNA sense strand
gaggaagcacgaagacuug

SEQ ID NO: 94559 - RNA, 19 nt, Homo sapiens
  misc_RNA (1)...(19): siRNA sense strand
gacauggcgucccucaaga

SEQ ID NO: 94560 - RNA, 19 nt, Homo sapiens
  misc_RNA (1)...(19): siRNA sense strand
aaggucagcucguaucuuc

SEQ ID NO: 94561 - RNA, 19 nt, Homo sapiens
  misc_RNA (1)...(19): siRNA sense strand
ggacaaggucagcucguau

SEQ ID NO: 94562 - RNA, 19 nt, Homo sapiens
  misc_RNA (1)...(19): siRNA sense strand
ccuuggaccugguguuuau

SEQ ID NO: 94563 - RNA, 19 nt, Homo sapiens
  misc_RNA (1)...(19): siRNA sense strand
ggaccugguguuuaucauu

SEQ ID NO: 94564 - RNA, 19 nt, Homo sapiens
  misc_RNA (1)...(19): siRNA sense strand
guuauaccuugaaugaaga

SEQ ID NO: 94565 - RNA, 19 nt, Homo sapiens
  misc_RNA (1)...(19): siRNA sense strand
ugagugcuaugaagguuau

SEQ ID NO: 94566 - RNA, 19 nt, Homo sapiens
  misc_RNA (1)...(19): siRNA sense strand
cagauaagcagucccugaa

SEQ ID NO: 94567 - RNA, 19 nt, Homo sapiens
  misc_RNA (1)...(19): siRNA sense strand
cacuaaacuugaugacauu

SEQ ID NO: 94568 - RNA, 19 nt, Homo sapiens
  misc_RNA (1)...(19): siRNA sense strand
uaagguggccaucauuguu

SEQ ID NO: 94569 - RNA, 19 nt, Homo sapiens
  misc_RNA (1)...(19): siRNA sense strand
gcacugugaagaucgaguu

SEQ ID NO: 94570 - RNA, 19 nt, Homo sapiens
  misc_RNA (1)...(19): siRNA sense strand
cuccaggccuacacagaua

SEQ ID NO: 94571 - RNA, 19 nt, Homo sapiens
  misc_RNA (1)...(19): siRNA sense strand
aaucgacacucuggacauu

SEQ ID NO: 94572 - RNA, 19 nt, Homo sapiens
  misc_RNA (1)...(19): siRNA sense strand
ggguggcaguggugaacua

SEQ ID NO: 94573 - RNA, 19 nt, Homo sapiens
  misc_RNA (1)...(19): siRNA sense strand
ggucagcucguaucuucaa

SEQ ID NO: 94574 - RNA, 19 nt, Homo sapiens
  misc_RNA (1)...(19): siRNA sense strand
uuguucagcucaagauaaa

SEQ ID NO: 94575 - RNA, 19 nt, Homo sapiens
  misc_RNA (1)...(19): siRNA sense strand
gaaaacguguucagcucuu

SEQ ID NO: 94576 - RNA, 19 nt, Homo sapiens
  misc_RNA (1)...(19): siRNA sense strand
ugaggaagcacgaagacuu

SEQ ID NO: 94577 - RNA, 19 nt, Homo sapiens
  misc_RNA (1)...(19): siRNA sense strand
aagguggccaucauuguua

SEQ ID NO: 94578 - RNA, 19 nt, Homo sapiens
  misc_RNA (1)...(19): siRNA sense strand
gcacgaagacuuguuucca

SEQ ID NO: 94579 - RNA, 19 nt, Homo sapiens
  misc_RNA (1)...(19): siRNA sense strand
cuaccacugugauugcuau

SEQ ID NO: 94580 - RNA, 19 nt, Homo sapiens
  misc_RNA (1)...(19): siRNA sense strand
guucagcucaagauaaaug

SEQ ID NO: 94581 - RNA, 19 nt, Homo sapiens
  misc_RNA (1)...(19): siRNA sense strand
ggaaggcaagcaccacugu

SEQ ID NO: 94582 - RNA, 19 nt, Homo sapiens
  misc_RNA (1)...(19): siRNA sense strand
ggccaucauuguuacagau

SEQ ID NO: 94583 - RNA, 19 nt, Homo sapiens
  misc_RNA (1)...(19): siRNA sense strand
ggucgaaucacacccuugu

SEQ ID NO: 94584 - RNA, 19 nt, Homo sapiens
  misc_RNA (1)...(19): siRNA sense strand
gggcuacacucugaaugca

SEQ ID NO: 94585 - RNA, 19 nt, Homo sapiens
  misc_RNA (1)...(19): siRNA sense strand
ggaagcacgaagacuuguu

SEQ ID NO: 94586 - RNA, 19 nt, Homo sapiens
  misc_RNA (1)...(19): siRNA sense strand
ggcccaagcaucugguauu

SEQ ID NO: 94587 - RNA, 19 nt, Homo sapiens
  misc_RNA (1)...(19): siRNA sense strand
auggacaaauacaucguua

SEQ ID NO: 94588 - RNA, 19 nt, Homo sapiens
  misc_RNA (1)...(19): siRNA sense strand
gacugaacacuaaacuuga

SEQ ID NO: 94589 - RNA, 19 nt, Homo sapiens
  misc_RNA (1)...(19): siRNA sense strand
cuucuaacaucccuaaggu

SEQ ID NO: 94590 - RNA, 19 nt, Homo sapiens
  misc_RNA (1)...(19): siRNA sense strand
ucaaagacugaacacuaaa

SEQ ID NO: 94591 - RNA, 19 nt, Homo sapiens
  misc_RNA (1)...(19): siRNA sense strand
caugguugccagcacauuu

SEQ ID NO: 94592 - RNA, 19 nt, Homo sapiens
  misc_RNA (1)...(19): siRNA sense strand
gcuaugagggcuacacucu

SEQ ID NO: 94593 - RNA, 19 nt, Homo sapiens
  misc_RNA (1)...(19): siRNA sense strand
aaacuuuccucuagauucc

SEQ ID NO: 94594 - RNA, 19 nt, Homo sapiens
  misc_RNA (1)...(19): siRNA sense strand
cccaggaccaggugaauga

SEQ ID NO: 94595 - RNA, 19 nt, Homo sapiens
  misc_RNA (1)...(19): siRNA sense strand
gcaguggugaacuaugcua

SEQ ID NO: 94596 - RNA, 19 nt, Homo sapiens
  misc_RNA (1)...(19): siRNA sense strand
agacauggcgucccucaag

SEQ ID NO: 94597 - RNA, 19 nt, Homo sapiens
  misc_RNA (1)...(19): siRNA sense strand
aggacaaggucagcucgua

SEQ ID NO: 94598 - RNA, 19 nt, Homo sapiens
  misc_RNA (1)...(19): siRNA sense strand
gaaaacuuguucagcucaa

SEQ ID NO: 94599 - RNA, 19 nt, Homo sapiens
  misc_RNA (1)...(19): siRNA sense strand
aaguggcucuuaucauugu

SEQ ID NO: 94600 - RNA, 19 nt, Homo sapiens
  misc_RNA (1)...(19): siRNA sense strand
uggcgucccucaagaugau

SEQ ID NO: 94601 - RNA, 19 nt, Homo sapiens
  misc_RNA (1)...(19): siRNA sense strand
guguucagcucuugauagg

SEQ ID NO: 94602 - RNA, 19 nt, Homo sapiens
  misc_RNA (1)...(19): siRNA sense strand
agacuuguuuccacugaag

SEQ ID NO: 94603 - RNA, 19 nt, Homo sapiens
  misc_RNA (1)...(19): siRNA sense strand
ccaugggugucagcacauu

SEQ ID NO: 94604 - RNA, 19 nt, Homo sapiens
  misc_RNA (1)...(19): siRNA sense strand
gugaguguagccaaggaua

SEQ ID NO: 94605 - RNA, 19 nt, Homo sapiens
  misc_RNA (1)...(19): siRNA sense strand
cagggucccaucauuguga

SEQ ID NO: 94606 - RNA, 19 nt, Homo sapiens
  misc_RNA (1)...(19): siRNA sense strand
gaaucacacccuugucaac

SEQ ID NO: 94607 - RNA, 19 nt, Homo sapiens
  misc_RNA (1)...(19): siRNA sense strand
gugagugcuaugaagguua

SEQ ID NO: 94608 - RNA, 19 nt, Homo sapiens
  misc_RNA (1)...(19): siRNA sense strand
gacagaaguggcucuuauc

SEQ ID NO: 94609 - RNA, 19 nt, Homo sapiens
  misc_RNA (1)...(19): siRNA sense strand
gaagacaggaaaacuuguu

SEQ ID NO: 94610 - RNA, 19 nt, Homo sapiens
  misc_RNA (1)...(19): siRNA sense strand
gacaaggucagcucguauc

SEQ ID NO: 94611 - RNA, 19 nt, Homo sapiens
  misc_RNA (1)...(19): siRNA sense strand
caccuuaaaugaggacaag

SEQ ID NO: 94612 - RNA, 19 nt, Homo sapiens
  misc_RNA (1)...(19): siRNA sense strand
cgaaucacacccuugucaa

SEQ ID NO: 94613 - RNA, 19 nt, Homo sapiens
  misc_RNA (1)...(19): siRNA sense strand
acugaacacuaaacuugau

SEQ ID NO: 94614 - RNA, 19 nt, Homo sapiens
  misc_RNA (1)...(19): siRNA sense strand
acagaaguggcucuuauca

SEQ ID NO: 94615 - RNA, 19 nt, Homo sapiens
  misc_RNA (1)...(19): siRNA sense strand
ugauaggugugcucuuaac

SEQ ID NO: 94616 - RNA, 19 nt, Homo sapiens
  misc_RNA (1)...(19): siRNA sense strand
ccuaagguggccaucauug

SEQ ID NO: 94617 - RNA, 19 nt, Homo sapiens
  misc_RNA (1)...(19): siRNA sense strand
uggcaguggugaacuaugc

SEQ ID NO: 94618 - RNA, 19 nt, Homo sapiens
  misc_RNA (1)...(19): siRNA sense strand
guggugaacuaugcuagca

SEQ ID NO: 94619 - RNA, 19 nt, Homo sapiens
  misc_RNA (1)...(19): siRNA sense strand
ccuuaaaugaggacaagaa

SEQ ID NO: 94620 - RNA, 19 nt, Homo sapiens
  misc_RNA (1)...(19): siRNA sense strand
ggccgcauccuaccacugu

SEQ ID NO: 94621 - RNA, 19 nt, Homo sapiens
  misc_RNA (1)...(19): siRNA sense strand
gauaggugugcucuuaaca

SEQ ID NO: 94622 - RNA, 19 nt, Homo sapiens
  misc_RNA (1)...(19): siRNA sense strand
aaggcaagcaccacuguga

SEQ ID NO: 94623 - RNA, 19 nt, Homo sapiens
  misc_RNA (1)...(19): siRNA sense strand
ccagacagcaauggacgaa

SEQ ID NO: 94624 - RNA, 19 nt, Homo sapiens
  misc_RNA (1)...(19): siRNA sense strand
aagcuacacuggcauucca

SEQ ID NO: 94625 - RNA, 19 nt, Homo sapiens
  misc_RNA (1)...(19): siRNA sense strand
cauccuaccacugugauug

SEQ ID NO: 94626 - RNA, 19 nt, Homo sapiens
  misc_RNA (1)...(19): siRNA sense strand
ggaccaggugaaugaagug

SEQ ID NO: 94627 - RNA, 19 nt, Homo sapiens
  misc_RNA (1)...(19): siRNA sense strand
ccucuucuaacaucccuaa

SEQ ID NO: 94628 - RNA, 19 nt, Homo sapiens
  misc_RNA (1)...(19): siRNA sense strand
caaagacugaacacuaaac

SEQ ID NO: 94629 - RNA, 19 nt, Homo sapiens
  misc_RNA (1)...(19): siRNA sense strand
gugaagcuacacuggcauu

SEQ ID NO: 94630 - RNA, 19 nt, Homo sapiens
  misc_RNA (1)...(19): siRNA sense strand
cuuaaaugaggacaagaaa

SEQ ID NO: 94631 - RNA, 19 nt, Homo sapiens
  misc_RNA (1)...(19): siRNA sense strand
ucgaaucacacccuuguca

SEQ ID NO: 94632 - RNA, 19 nt, Homo sapiens
  misc_RNA (1)...(19): siRNA sense strand
cauugugagugcuaugaag

SEQ ID NO: 94633 - RNA, 19 nt, Homo sapiens
  misc_RNA (1)...(19): siRNA sense strand
ccacugugauugcuauccu

SEQ ID NO: 94634 - RNA, 19 nt, Homo sapiens
  misc_RNA (1)...(19): siRNA sense strand
aaguugagcugacucgaua

SEQ ID NO: 94635 - RNA, 19 nt, Homo sapiens
  misc_RNA (1)...(19): siRNA sense strand
ggaugauucugccuccaaa

SEQ ID NO: 94636 - RNA, 19 nt, Homo sapiens
  misc_RNA (1)...(19): siRNA sense strand
gcacagagaauugccuuca

SEQ ID NO: 94637 - RNA, 19 nt, Homo sapiens
  misc_RNA (1)...(19): siRNA sense strand
ugugagaacuguggaauca

SEQ ID NO: 94638 - RNA, 19 nt, Homo sapiens
  misc_RNA (1)...(19): siRNA sense strand
gagccgaggguguggagua

SEQ ID NO: 94639 - RNA, 19 nt, Homo sapiens
  misc_RNA (1)...(19): siRNA sense strand
caucuuggcccuaccuuga

SEQ ID NO: 94640 - RNA, 19 nt, Homo sapiens
  misc_RNA (1)...(19): siRNA sense strand
gcuccugggugcugugaga

SEQ ID NO: 94641 - RNA, 19 nt, Homo sapiens
  misc_RNA (1)...(19): siRNA sense strand
caagaggauuguggccauu

SEQ ID NO: 94642 - RNA, 19 nt, Homo sapiens
  misc_RNA (1)...(19): siRNA sense strand
gacaggauccgaagcaaag

SEQ ID NO: 94643 - RNA, 19 nt, Homo sapiens
  misc_RNA (1)...(19): siRNA sense strand
gaggagaacaaggaugauu

SEQ ID NO: 94644 - RNA, 19 nt, Homo sapiens
  misc_RNA (1)...(19): siRNA sense strand
ggagacaggauccgaagca

SEQ ID NO: 94645 - RNA, 19 nt, Homo sapiens
  misc_RNA (1)...(19): siRNA sense strand
agaccaaggcugacacuga

SEQ ID NO: 94646 - RNA, 19 nt, Homo sapiens
  misc_RNA (1)...(19): siRNA sense strand
gagacaggauccgaagcaa

SEQ ID NO: 94647 - RNA, 19 nt, Homo sapiens
  misc_RNA (1)...(19): siRNA sense strand
gcucagacaccuauuacca

SEQ ID NO: 94648 - RNA, 19 nt, Homo sapiens
  misc_RNA (1)...(19): siRNA sense strand
gacgcucagacaccuauua

SEQ ID NO: 94649 - RNA, 19 nt, Homo sapiens
  misc_RNA (1)...(19): siRNA sense strand
acaaggaggagaacaagga

SEQ ID NO: 94650 - RNA, 19 nt, Homo sapiens
  misc_RNA (1)...(19): siRNA sense strand
guggugaggucaggaagga

SEQ ID NO: 94651 - RNA, 19 nt, Homo sapiens
  misc_RNA (1)...(19): siRNA sense strand
ggacaaggaggagaacaag

SEQ ID NO: 94652 - RNA, 19 nt, Homo sapiens
  misc_RNA (1)...(19): siRNA sense strand
uguugcagcuuccacagaa

SEQ ID NO: 94653 - RNA, 19 nt, Homo sapiens
  misc_RNA (1)...(19): siRNA sense strand
caaauuggccccagaggaa

SEQ ID NO: 94654 - RNA, 19 nt, Homo sapiens
  misc_RNA (1)...(19): siRNA sense strand
cacagagaauugccuucaa

SEQ ID NO: 94655 - RNA, 19 nt, Homo sapiens
  misc_RNA (1)...(19): siRNA sense strand
gagauacagcagucugguu

SEQ ID NO: 94656 - RNA, 19 nt, Homo sapiens
  misc_RNA (1)...(19): siRNA sense strand
ccucuucgacuucaaacaa

SEQ ID NO: 94657 - RNA, 19 nt, Homo sapiens
  misc_RNA (1)...(19): siRNA sense strand
acagagaauugccuucaac

SEQ ID NO: 94658 - RNA, 19 nt, Homo sapiens
  misc_RNA (1)...(19): siRNA sense strand
ucaaaacguugugcaaaga

SEQ ID NO: 94659 - RNA, 19 nt, Homo sapiens
  misc_RNA (1)...(19): siRNA sense strand
ugauucugccuccaaauug

SEQ ID NO: 94660 - RNA, 19 nt, Homo sapiens
  misc_RNA (1)...(19): siRNA sense strand
gaccauacccaggcuccaa

SEQ ID NO: 94661 - RNA, 19 nt, Homo sapiens
  misc_RNA (1)...(19): siRNA sense strand
ccaaaggcagcggcucaaa

SEQ ID NO: 94662 - RNA, 19 nt, Homo sapiens
  misc_RNA (1)...(19): siRNA sense strand
aggaggagaacaaggauga

SEQ ID NO: 94663 - RNA, 19 nt, Homo sapiens
  misc_RNA (1)...(19): siRNA sense strand
agacaggauccgaagcaaa

SEQ ID NO: 94664 - RNA, 19 nt, Homo sapiens
  misc_RNA (1)...(19): siRNA sense strand
ccagcaagaagcgaaagaa

SEQ ID NO: 94665 - RNA, 19 nt, Homo sapiens
  misc_RNA (1)...(19): siRNA sense strand
aagcaaaguugagcugacu

SEQ ID NO: 94666 - RNA, 19 nt, Homo sapiens
  misc_RNA (1)...(19): siRNA sense strand
gccuggcacugaccuugug

SEQ ID NO: 94667 - RNA, 19 nt, Homo sapiens
  misc_RNA (1)...(19): siRNA sense strand
gaacccgcuuccgagauac

SEQ ID NO: 94668 - RNA, 19 nt, Homo sapiens
  misc_RNA (1)...(19): siRNA sense strand
uggcacugaccuuguguuu

SEQ ID NO: 94669 - RNA, 19 nt, Homo sapiens
  misc_RNA (1)...(19): siRNA sense strand
aaguugagcugacucgaua

SEQ ID NO: 94670 - RNA, 19 nt, Homo sapiens
  misc_RNA (1)...(19): siRNA sense strand
ggaugauucugccuccaaa

SEQ ID NO: 94671 - RNA, 19 nt, Homo sapiens
  misc_RNA (1)...(19): siRNA sense strand
gcacagagaauugccuuca

SEQ ID NO: 94672 - RNA, 19 nt, Homo sapiens
  misc_RNA (1)...(19): siRNA sense strand
ugugagaacuguggaauca

SEQ ID NO: 94673 - RNA, 19 nt, Homo sapiens
  misc_RNA (1)...(19): siRNA sense strand
gagccgaggguguggagua

SEQ ID NO: 94674 - RNA, 19 nt, Homo sapiens
  misc_RNA (1)...(19): siRNA sense strand
caucuuggcccuaccuuga

SEQ ID NO: 94675 - RNA, 19 nt, Homo sapiens
  misc_RNA (1)...(19): siRNA sense strand
gcuccugggugcugugaga

SEQ ID NO: 94676 - RNA, 19 nt, Homo sapiens
  misc_RNA (1)...(19): siRNA sense strand
caagaggauuguggccauu

SEQ ID NO: 94677 - RNA, 19 nt, Homo sapiens
  misc_RNA (1)...(19): siRNA sense strand
gacaggauccgaagcaaag

SEQ ID NO: 94678 - RNA, 19 nt, Homo sapiens
  misc_RNA (1)...(19): siRNA sense strand
gaggagaacaaggaugauu

SEQ ID NO: 94679 - RNA, 19 nt, Homo sapiens
  misc_RNA (1)...(19): siRNA sense strand
ggagacaggauccgaagca

SEQ ID NO: 94680 - RNA, 19 nt, Homo sapiens
  misc_RNA (1)...(19): siRNA sense strand
agaccaaggcugacacuga

SEQ ID NO: 94681 - RNA, 19 nt, Homo sapiens
  misc_RNA (1)...(19): siRNA sense strand
gagacaggauccgaagcaa

SEQ ID NO: 94682 - RNA, 19 nt, Homo sapiens
  misc_RNA (1)...(19): siRNA sense strand
gcucagacaccuauuacca

SEQ ID NO: 94683 - RNA, 19 nt, Homo sapiens
  misc_RNA (1)...(19): siRNA sense strand
gacgcucagacaccuauua

SEQ ID NO: 94684 - RNA, 19 nt, Homo sapiens
  misc_RNA (1)...(19): siRNA sense strand
acaaggaggagaacaagga

SEQ ID NO: 94685 - RNA, 19 nt, Homo sapiens
  misc_RNA (1)...(19): siRNA sense strand
guggugaggucaggaagga

SEQ ID NO: 94686 - RNA, 19 nt, Homo sapiens
  misc_RNA (1)...(19): siRNA sense strand
ggacaaggaggagaacaag

SEQ ID NO: 94687 - RNA, 19 nt, Homo sapiens
  misc_RNA (1)...(19): siRNA sense strand
uguugcagcuuccacagaa

SEQ ID NO: 94688 - RNA, 19 nt, Homo sapiens
  misc_RNA (1)...(19): siRNA sense strand
caaauuggccccagaggaa

SEQ ID NO: 94689 - RNA, 19 nt, Homo sapiens
  misc_RNA (1)...(19): siRNA sense strand
cacagagaauugccuucaa

SEQ ID NO: 94690 - RNA, 19 nt, Homo sapiens
  misc_RNA (1)...(19): siRNA sense strand
gagauacagcagucugguu

SEQ ID NO: 94691 - RNA, 19 nt, Homo sapiens
  misc_RNA (1)...(19): siRNA sense strand
ccucuucgacuucaaacaa

SEQ ID NO: 94692 - RNA, 19 nt, Homo sapiens
  misc_RNA (1)...(19): siRNA sense strand
acagagaauugccuucaac

SEQ ID NO: 94693 - RNA, 19 nt, Homo sapiens
  misc_RNA (1)...(19): siRNA sense strand
ucaaaacguugugcaaaga

SEQ ID NO: 94694 - RNA, 19 nt, Homo sapiens
  misc_RNA (1)...(19): siRNA sense strand
ugauucugccuccaaauug

SEQ ID NO: 94695 - RNA, 19 nt, Homo sapiens
  misc_RNA (1)...(19): siRNA sense strand
gaccauacccaggcuccaa

SEQ ID NO: 94696 - RNA, 19 nt, Homo sapiens
  misc_RNA (1)...(19): siRNA sense strand
ccaaaggcagcggcucaaa

SEQ ID NO: 94697 - RNA, 19 nt, Homo sapiens
  misc_RNA (1)...(19): siRNA sense strand
aggaggagaacaaggauga

SEQ ID NO: 94698 - RNA, 19 nt, Homo sapiens
  misc_RNA (1)...(19): siRNA sense strand
agacaggauccgaagcaaa

SEQ ID NO: 94699 - RNA, 19 nt, Homo sapiens
  misc_RNA (1)...(19): siRNA sense strand
ccagcaagaagcgaaagaa

SEQ ID NO: 94700 - RNA, 19 nt, Homo sapiens
  misc_RNA (1)...(19): siRNA sense strand
aagcaaaguugagcugacu

SEQ ID NO: 94701 - RNA, 19 nt, Homo sapiens
  misc_RNA (1)...(19): siRNA sense strand
gccuggcacugaccuugug

SEQ ID NO: 94702 - RNA, 19 nt, Homo sapiens
  misc_RNA (1)...(19): siRNA sense strand
gaacccgcuuccgagauac

SEQ ID NO: 94703 - RNA, 19 nt, Homo sapiens
  misc_RNA (1)...(19): siRNA sense strand
uggcacugaccuuguguuu

SEQ ID NO: 94704 - RNA, 19 nt, Homo sapiens
  misc_RNA (1)...(19): siRNA sense strand
gaagauggauguaaagugu

SEQ ID NO: 94705 - RNA, 19 nt, Homo sapiens
  misc_RNA (1)...(19): siRNA sense strand
aaguugagcugacucgaua

SEQ ID NO: 94706 - RNA, 19 nt, Homo sapiens
  misc_RNA (1)...(19): siRNA sense strand
ccacgaggauggccuggaa

SEQ ID NO: 94707 - RNA, 19 nt, Homo sapiens
  misc_RNA (1)...(19): siRNA sense strand
gaagggaagauggauguaa

SEQ ID NO: 94708 - RNA, 19 nt, Homo sapiens
  misc_RNA (1)...(19): siRNA sense strand
ggaugauucugccuccaaa

SEQ ID NO: 94709 - RNA, 19 nt, Homo sapiens
  misc_RNA (1)...(19): siRNA sense strand
aagggaagauggauguaaa

SEQ ID NO: 94710 - RNA, 19 nt, Homo sapiens
  misc_RNA (1)...(19): siRNA sense strand
gcacagagaauugccuuca

SEQ ID NO: 94711 - RNA, 19 nt, Homo sapiens
  misc_RNA (1)...(19): siRNA sense strand
ugugagaacuguggaauca

SEQ ID NO: 94712 - RNA, 19 nt, Homo sapiens
  misc_RNA (1)...(19): siRNA sense strand
gagccgaggguguggagua

SEQ ID NO: 94713 - RNA, 19 nt, Homo sapiens
  misc_RNA (1)...(19): siRNA sense strand
caucuuggcccuaccuuga

SEQ ID NO: 94714 - RNA, 19 nt, Homo sapiens
  misc_RNA (1)...(19): siRNA sense strand
gcuccugggugcugugaga

SEQ ID NO: 94715 - RNA, 19 nt, Homo sapiens
  misc_RNA (1)...(19): siRNA sense strand
ggaagauggauguaaagug

SEQ ID NO: 94716 - RNA, 19 nt, Homo sapiens
  misc_RNA (1)...(19): siRNA sense strand
caagaggauuguggccauu

SEQ ID NO: 94717 - RNA, 19 nt, Homo sapiens
  misc_RNA (1)...(19): siRNA sense strand
gacaggauccgaagcaaag

SEQ ID NO: 94718 - RNA, 19 nt, Homo sapiens
  misc_RNA (1)...(19): siRNA sense strand
gaggagaacaaggaugauu

SEQ ID NO: 94719 - RNA, 19 nt, Homo sapiens
  misc_RNA (1)...(19): siRNA sense strand
agaccaaggcugacacuga

SEQ ID NO: 94720 - RNA, 19 nt, Homo sapiens
  misc_RNA (1)...(19): siRNA sense strand
ggagacaggauccgaagca

SEQ ID NO: 94721 - RNA, 19 nt, Homo sapiens
  misc_RNA (1)...(19): siRNA sense strand
gcucagacaccuauuacca

SEQ ID NO: 94722 - RNA, 19 nt, Homo sapiens
  misc_RNA (1)...(19): siRNA sense strand
gagacaggauccgaagcaa

SEQ ID NO: 94723 - RNA, 19 nt, Homo sapiens
  misc_RNA (1)...(19): siRNA sense strand
gggaagggaagauggaugu

SEQ ID NO: 94724 - RNA, 19 nt, Homo sapiens
  misc_RNA (1)...(19): siRNA sense strand
acaaggaggagaacaagga

SEQ ID NO: 94725 - RNA, 19 nt, Homo sapiens
  misc_RNA (1)...(19): siRNA sense strand
gacgcucagacaccuauua

SEQ ID NO: 94726 - RNA, 19 nt, Homo sapiens
  misc_RNA (1)...(19): siRNA sense strand
guggugaggucaggaagga

SEQ ID NO: 94727 - RNA, 19 nt, Homo sapiens
  misc_RNA (1)...(19): siRNA sense strand
ggacaaggaggagaacaag

SEQ ID NO: 94728 - RNA, 19 nt, Homo sapiens
  misc_RNA (1)...(19): siRNA sense strand
uguugcagcuuccacagaa

SEQ ID NO: 94729 - RNA, 19 nt, Homo sapiens
  misc_RNA (1)...(19): siRNA sense strand
caaauuggccccagaggaa

SEQ ID NO: 94730 - RNA, 19 nt, Homo sapiens
  misc_RNA (1)...(19): siRNA sense strand
cacagagaauugccuucaa

SEQ ID NO: 94731 - RNA, 19 nt, Homo sapiens
  misc_RNA (1)...(19): siRNA sense strand
gagauacagcagucugguu

SEQ ID NO: 94732 - RNA, 19 nt, Homo sapiens
  misc_RNA (1)...(19): siRNA sense strand
ccucuucgacuucaaacaa

SEQ ID NO: 94733 - RNA, 19 nt, Homo sapiens
  misc_RNA (1)...(19): siRNA sense strand
acagagaauugccuucaac

SEQ ID NO: 94734 - RNA, 19 nt, Homo sapiens
  misc_RNA (1)...(19): siRNA sense strand
ggaagggaagauggaugua

SEQ ID NO: 94735 - RNA, 19 nt, Homo sapiens
  misc_RNA (1)...(19): siRNA sense strand
ucaaaacguugugcaaaga

SEQ ID NO: 94736 - RNA, 19 nt, Homo sapiens
  misc_RNA (1)...(19): siRNA sense strand
gcccuuccucacagaguua

SEQ ID NO: 94737 - RNA, 19 nt, Homo sapiens
  misc_RNA (1)...(19): siRNA sense strand
uggguguccugcagaagaa

SEQ ID NO: 94738 - RNA, 19 nt, Homo sapiens
  misc_RNA (1)...(19): siRNA sense strand
ugauucugccuccaaauug

SEQ ID NO: 94739 - RNA, 19 nt, Homo sapiens
  misc_RNA (1)...(19): siRNA sense strand
gaccauacccaggcuccaa

SEQ ID NO: 94740 - RNA, 19 nt, Homo sapiens
  misc_RNA (1)...(19): siRNA sense strand
ccaaaggcagcggcucaaa

SEQ ID NO: 94741 - RNA, 19 nt, Homo sapiens
  misc_RNA (1)...(19): siRNA sense strand
aggaggagaacaaggauga

SEQ ID NO: 94742 - RNA, 19 nt, Homo sapiens
  misc_RNA (1)...(19): siRNA sense strand
agacaggauccgaagcaaa

SEQ ID NO: 94743 - RNA, 19 nt, Homo sapiens
  misc_RNA (1)...(19): siRNA sense strand
ccagcaagaagcgaaagaa

SEQ ID NO: 94744 - RNA, 19 nt, Homo sapiens
  misc_RNA (1)...(19): siRNA sense strand
aagcaaaguugagcugacu

SEQ ID NO: 94745 - RNA, 19 nt, Homo sapiens
  misc_RNA (1)...(19): siRNA sense strand
guggguguccugcagaaga

SEQ ID NO: 94746 - RNA, 19 nt, Homo sapiens
  misc_RNA (1)...(19): siRNA sense strand
ccaccuccagcuucgauga

SEQ ID NO: 94747 - RNA, 19 nt, Homo sapiens
  misc_RNA (1)...(19): siRNA sense strand
gccuggcacugaccuugug

SEQ ID NO: 94748 - RNA, 19 nt, Homo sapiens
  misc_RNA (1)...(19): siRNA sense strand
gcuggugcccuuccucaca

SEQ ID NO: 94749 - RNA, 19 nt, Homo sapiens
  misc_RNA (1)...(19): siRNA sense strand
gaacccgcuuccgagauac

SEQ ID NO: 94750 - RNA, 19 nt, Homo sapiens
  misc_RNA (1)...(19): siRNA sense strand
uggcacugaccuuguguuu

SEQ ID NO: 94751 - RNA, 19 nt, Homo sapiens
  misc_RNA (1)...(19): siRNA sense strand
aaguugagcugacucgaua

SEQ ID NO: 94752 - RNA, 19 nt, Homo sapiens
  misc_RNA (1)...(19): siRNA sense strand
ggaugauucugccuccaaa

SEQ ID NO: 94753 - RNA, 19 nt, Homo sapiens
  misc_RNA (1)...(19): siRNA sense strand
gcacagagaauugccuuca

SEQ ID NO: 94754 - RNA, 19 nt, Homo sapiens
  misc_RNA (1)...(19): siRNA sense strand
ugugagaacuguggaauca

SEQ ID NO: 94755 - RNA, 19 nt, Homo sapiens
  misc_RNA (1)...(19): siRNA sense strand
gagccgaggguguggagua

SEQ ID NO: 94756 - RNA, 19 nt, Homo sapiens
  misc_RNA (1)...(19): siRNA sense strand
caucuuggcccuaccuuga

SEQ ID NO: 94757 - RNA, 19 nt, Homo sapiens
  misc_RNA (1)...(19): siRNA sense strand
gcuccugggugcugugaga

SEQ ID NO: 94758 - RNA, 19 nt, Homo sapiens
  misc_RNA (1)...(19): siRNA sense strand
caagaggauuguggccauu

SEQ ID NO: 94759 - RNA, 19 nt, Homo sapiens
  misc_RNA (1)...(19): siRNA sense strand
gacaggauccgaagcaaag

SEQ ID NO: 94760 - RNA, 19 nt, Homo sapiens
  misc_RNA (1)...(19): siRNA sense strand
gaggagaacaaggaugauu

SEQ ID NO: 94761 - RNA, 19 nt, Homo sapiens
  misc_RNA (1)...(19): siRNA sense strand
ggagacaggauccgaagca

SEQ ID NO: 94762 - RNA, 19 nt, Homo sapiens
  misc_RNA (1)...(19): siRNA sense strand
agaccaaggcugacacuga

SEQ ID NO: 94763 - RNA, 19 nt, Homo sapiens
  misc_RNA (1)...(19): siRNA sense strand
gagacaggauccgaagcaa

SEQ ID NO: 94764 - RNA, 19 nt, Homo sapiens
  misc_RNA (1)...(19): siRNA sense strand
gcucagacaccuauuacca

SEQ ID NO: 94765 - RNA, 19 nt, Homo sapiens
  misc_RNA (1)...(19): siRNA sense strand
gacgcucagacaccuauua

SEQ ID NO: 94766 - RNA, 19 nt, Homo sapiens
  misc_RNA (1)...(19): siRNA sense strand
acaaggaggagaacaagga

SEQ ID NO: 94767 - RNA, 19 nt, Homo sapiens
  misc_RNA (1)...(19): siRNA sense strand
guggugaggucaggaagga

SEQ ID NO: 94768 - RNA, 19 nt, Homo sapiens
  misc_RNA (1)...(19): siRNA sense strand
ggacaaggaggagaacaag

SEQ ID NO: 94769 - RNA, 19 nt, Homo sapiens
  misc_RNA (1)...(19): siRNA sense strand
uguugcagcuuccacagaa

SEQ ID NO: 94770 - RNA, 19 nt, Homo sapiens
  misc_RNA (1)...(19): siRNA sense strand
caaauuggccccagaggaa

SEQ ID NO: 94771 - RNA, 19 nt, Homo sapiens
  misc_RNA (1)...(19): siRNA sense strand
cacagagaauugccuucaa

SEQ ID NO: 94772 - RNA, 19 nt, Homo sapiens
  misc_RNA (1)...(19): siRNA sense strand
gagauacagcagucugguu

SEQ ID NO: 94773 - RNA, 19 nt, Homo sapiens
  misc_RNA (1)...(19): siRNA sense strand
ccucuucgacuucaaacaa

SEQ ID NO: 94774 - RNA, 19 nt, Homo sapiens
  misc_RNA (1)...(19): siRNA sense strand
acagagaauugccuucaac

SEQ ID NO: 94775 - RNA, 19 nt, Homo sapiens
  misc_RNA (1)...(19): siRNA sense strand
ucaaaacguugugcaaaga

SEQ ID NO: 94776 - RNA, 19 nt, Homo sapiens
  misc_RNA (1)...(19): siRNA sense strand
ugauucugccuccaaauug

SEQ ID NO: 94777 - RNA, 19 nt, Homo sapiens
  misc_RNA (1)...(19): siRNA sense strand
gaccauacccaggcuccaa

SEQ ID NO: 94778 - RNA, 19 nt, Homo sapiens
  misc_RNA (1)...(19): siRNA sense strand
ccaaaggcagcggcucaaa

SEQ ID NO: 94779 - RNA, 19 nt, Homo sapiens
  misc_RNA (1)...(19): siRNA sense strand
aggaggagaacaaggauga

SEQ ID NO: 94780 - RNA, 19 nt, Homo sapiens
  misc_RNA (1)...(19): siRNA sense strand
agacaggauccgaagcaaa

SEQ ID NO: 94781 - RNA, 19 nt, Homo sapiens
  misc_RNA (1)...(19): siRNA sense strand
ccagcaagaagcgaaagaa

SEQ ID NO: 94782 - RNA, 19 nt, Homo sapiens
  misc_RNA (1)...(19): siRNA sense strand
aagcaaaguugagcugacu

SEQ ID NO: 94783 - RNA, 19 nt, Homo sapiens
  misc_RNA (1)...(19): siRNA sense strand
gccuggcacugaccuugug

SEQ ID NO: 94784 - RNA, 19 nt, Homo sapiens
  misc_RNA (1)...(19): siRNA sense strand
gaacccgcuuccgagauac

SEQ ID NO: 94785 - RNA, 19 nt, Homo sapiens
  misc_RNA (1)...(19): siRNA sense strand
uggcacugaccuuguguuu

SEQ ID NO: 94786 - RNA, 19 nt, Homo sapiens
  misc_RNA (1)...(19): siRNA sense strand
aaguugagcugacucgaua

SEQ ID NO: 94787 - RNA, 19 nt, Homo sapiens
  misc_RNA (1)...(19): siRNA sense strand
ggaugauucugccuccaaa

SEQ ID NO: 94788 - RNA, 19 nt, Homo sapiens
  misc_RNA (1)...(19): siRNA sense strand
gcacagagaauugccuuca

SEQ ID NO: 94789 - RNA, 19 nt, Homo sapiens
  misc_RNA (1)...(19): siRNA sense strand
ugugagaacuguggaauca

SEQ ID NO: 94790 - RNA, 19 nt, Homo sapiens
  misc_RNA (1)...(19): siRNA sense strand
gagccgaggguguggagua

SEQ ID NO: 94791 - RNA, 19 nt, Homo sapiens
  misc_RNA (1)...(19): siRNA sense strand
caucuuggcccuaccuuga

SEQ ID NO: 94792 - RNA, 19 nt, Homo sapiens
  misc_RNA (1)...(19): siRNA sense strand
gcuccugggugcugugaga

SEQ ID NO: 94793 - RNA, 19 nt, Homo sapiens
  misc_RNA (1)...(19): siRNA sense strand
caagaggauuguggccauu

SEQ ID NO: 94794 - RNA, 19 nt, Homo sapiens
  misc_RNA (1)...(19): siRNA sense strand
gacaggauccgaagcaaag

SEQ ID NO: 94795 - RNA, 19 nt, Homo sapiens
  misc_RNA (1)...(19): siRNA sense strand
gaggagaacaaggaugauu

SEQ ID NO: 94796 - RNA, 19 nt, Homo sapiens
  misc_RNA (1)...(19): siRNA sense strand
ggagacaggauccgaagca

SEQ ID NO: 94797 - RNA, 19 nt, Homo sapiens
  misc_RNA (1)...(19): siRNA sense strand
agaccaaggcugacacuga

SEQ ID NO: 94798 - RNA, 19 nt, Homo sapiens
  misc_RNA (1)...(19): siRNA sense strand
gagacaggauccgaagcaa

SEQ ID NO: 94799 - RNA, 19 nt, Homo sapiens
  misc_RNA (1)...(19): siRNA sense strand
gcucagacaccuauuacca

SEQ ID NO: 94800 - RNA, 19 nt, Homo sapiens
  misc_RNA (1)...(19): siRNA sense strand
gacgcucagacaccuauua

SEQ ID NO: 94801 - RNA, 19 nt, Homo sapiens
  misc_RNA (1)...(19): siRNA sense strand
acaaggaggagaacaagga

SEQ ID NO: 94802 - RNA, 19 nt, Homo sapiens
  misc_RNA (1)...(19): siRNA sense strand
guggugaggucaggaagga

SEQ ID NO: 94803 - RNA, 19 nt, Homo sapiens
  misc_RNA (1)...(19): siRNA sense strand
ggacaaggaggagaacaag

SEQ ID NO: 94804 - RNA, 19 nt, Homo sapiens
  misc_RNA (1)...(19): siRNA sense strand
uguugcagcuuccacagaa

SEQ ID NO: 94805 - RNA, 19 nt, Homo sapiens
  misc_RNA (1)...(19): siRNA sense strand
caaauuggccccagaggaa

SEQ ID NO: 94806 - RNA, 19 nt, Homo sapiens
  misc_RNA (1)...(19): siRNA sense strand
cacagagaauugccuucaa

SEQ ID NO: 94807 - RNA, 19 nt, Homo sapiens
  misc_RNA (1)...(19): siRNA sense strand
gagauacagcagucugguu

SEQ ID NO: 94808 - RNA, 19 nt, Homo sapiens
  misc_RNA (1)...(19): siRNA sense strand
ccucuucgacuucaaacaa

SEQ ID NO: 94809 - RNA, 19 nt, Homo sapiens
  misc_RNA (1)...(19): siRNA sense strand
acagagaauugccuucaac

SEQ ID NO: 94810 - RNA, 19 nt, Homo sapiens
  misc_RNA (1)...(19): siRNA sense strand
ucaaaacguugugcaaaga

SEQ ID NO: 94811 - RNA, 19 nt, Homo sapiens
  misc_RNA (1)...(19): siRNA sense strand
ugauucugccuccaaauug

SEQ ID NO: 94812 - RNA, 19 nt, Homo sapiens
  misc_RNA (1)...(19): siRNA sense strand
gaccauacccaggcuccaa

SEQ ID NO: 94813 - RNA, 19 nt, Homo sapiens
  misc_RNA (1)...(19): siRNA sense strand
ccaaaggcagcggcucaaa

SEQ ID NO: 94814 - RNA, 19 nt, Homo sapiens
  misc_RNA (1)...(19): siRNA sense strand
aggaggagaacaaggauga

SEQ ID NO: 94815 - RNA, 19 nt, Homo sapiens
  misc_RNA (1)...(19): siRNA sense strand
agacaggauccgaagcaaa

SEQ ID NO: 94816 - RNA, 19 nt, Homo sapiens
  misc_RNA (1)...(19): siRNA sense strand
ccagcaagaagcgaaagaa

SEQ ID NO: 94817 - RNA, 19 nt, Homo sapiens
  misc_RNA (1)...(19): siRNA sense strand
aagcaaaguugagcugacu

SEQ ID NO: 94818 - RNA, 19 nt, Homo sapiens
  misc_RNA (1)...(19): siRNA sense strand
gccuggcacugaccuugug

SEQ ID NO: 94819 - RNA, 19 nt, Homo sapiens
  misc_RNA (1)...(19): siRNA sense strand
gaacccgcuuccgagauac

SEQ ID NO: 94820 - RNA, 19 nt, Homo sapiens
  misc_RNA (1)...(19): siRNA sense strand
uggcacugaccuuguguuu

SEQ ID NO: 94821 - RNA, 19 nt, Homo sapiens
  misc_RNA (1)...(19): siRNA sense strand
gcaguuagguguuggaaua

SEQ ID NO: 94822 - RNA, 19 nt, Homo sapiens
  misc_RNA (1)...(19): siRNA sense strand
gaaaugaugucccugauug

SEQ ID NO: 94823 - RNA, 19 nt, Homo sapiens
  misc_RNA (1)...(19): siRNA sense strand
uagagaagaugaagacuua

SEQ ID NO: 94824 - RNA, 19 nt, Homo sapiens
  misc_RNA (1)...(19): siRNA sense strand
cgucagagcuucuccguaa

SEQ ID NO: 94825 - RNA, 19 nt, Homo sapiens
  misc_RNA (1)...(19): siRNA sense strand
acaaacaagugaagaagua

SEQ ID NO: 94826 - RNA, 19 nt, Homo sapiens
  misc_RNA (1)...(19): siRNA sense strand
uuaaagaggucaugcacua

SEQ ID NO: 94827 - RNA, 19 nt, Homo sapiens
  misc_RNA (1)...(19): siRNA sense strand
gaagcaaagugcagaggaa

SEQ ID NO: 94828 - RNA, 19 nt, Homo sapiens
  misc_RNA (1)...(19): siRNA sense strand
ccauguagcuuaugugaga

SEQ ID NO: 94829 - RNA, 19 nt, Homo sapiens
  misc_RNA (1)...(19): siRNA sense strand
gaagaaguagggaaaguaa

SEQ ID NO: 94830 - RNA, 19 nt, Homo sapiens
  misc_RNA (1)...(19): siRNA sense strand
caacugauuuacagacaaa

SEQ ID NO: 94831 - RNA, 19 nt, Homo sapiens
  misc_RNA (1)...(19): siRNA sense strand
ugaagcaacuuuaugauca

SEQ ID NO: 94832 - RNA, 19 nt, Homo sapiens
  misc_RNA (1)...(19): siRNA sense strand
agauucagcugguuauuaa

SEQ ID NO: 94833 - RNA, 19 nt, Homo sapiens
  misc_RNA (1)...(19): siRNA sense strand
gaaguaauggcucaacuga

SEQ ID NO: 94834 - RNA, 19 nt, Homo sapiens
  misc_RNA (1)...(19): siRNA sense strand
aguaauggcucaacugauu

SEQ ID NO: 94835 - RNA, 19 nt, Homo sapiens
  misc_RNA (1)...(19): siRNA sense strand
gaagaugaagacuuaauug

SEQ ID NO: 94836 - RNA, 19 nt, Homo sapiens
  misc_RNA (1)...(19): siRNA sense strand
gagauucagcugguuauua

SEQ ID NO: 94837 - RNA, 19 nt, Homo sapiens
  misc_RNA (1)...(19): siRNA sense strand
guacugccauuguuucaga

SEQ ID NO: 94838 - RNA, 19 nt, Homo sapiens
  misc_RNA (1)...(19): siRNA sense strand
gaggaugaguggcagugua

SEQ ID NO: 94839 - RNA, 19 nt, Homo sapiens
  misc_RNA (1)...(19): siRNA sense strand
uagauaaccuuucugaaca

SEQ ID NO: 94840 - RNA, 19 nt, Homo sapiens
  misc_RNA (1)...(19): siRNA sense strand
ccacgagacgggaacauua

SEQ ID NO: 94841 - RNA, 19 nt, Homo sapiens
  misc_RNA (1)...(19): siRNA sense strand
gaaagagauucagcugguu

SEQ ID NO: 94842 - RNA, 19 nt, Homo sapiens
  misc_RNA (1)...(19): siRNA sense strand
cuauuuaggucaguacaua

SEQ ID NO: 94843 - RNA, 19 nt, Homo sapiens
  misc_RNA (1)...(19): siRNA sense strand
gaggaaggauugguauuca

SEQ ID NO: 94844 - RNA, 19 nt, Homo sapiens
  misc_RNA (1)...(19): siRNA sense strand
guucaaaguuaacccauuc

SEQ ID NO: 94845 - RNA, 19 nt, Homo sapiens
  misc_RNA (1)...(19): siRNA sense strand
gcaacucaguggaauucuu

SEQ ID NO: 94846 - RNA, 19 nt, Homo sapiens
  misc_RNA (1)...(19): siRNA sense strand
guacugaaugcaagaaauu

SEQ ID NO: 94847 - RNA, 19 nt, Homo sapiens
  misc_RNA (1)...(19): siRNA sense strand
ggauugguauucagauugu

SEQ ID NO: 94848 - RNA, 19 nt, Homo sapiens
  misc_RNA (1)...(19): siRNA sense strand
aaauuuaacucuccaagca

SEQ ID NO: 94849 - RNA, 19 nt, Homo sapiens
  misc_RNA (1)...(19): siRNA sense strand
agaagcaacuauacaccua

SEQ ID NO: 94850 - RNA, 19 nt, Homo sapiens
  misc_RNA (1)...(19): siRNA sense strand
ggauuuggcucacaguucu

SEQ ID NO: 94851 - RNA, 19 nt, Homo sapiens
  misc_RNA (1)...(19): siRNA sense strand
caagcaagagguacuguuu

SEQ ID NO: 94852 - RNA, 19 nt, Homo sapiens
  misc_RNA (1)...(19): siRNA sense strand
caagcccucucuaugauau

SEQ ID NO: 94853 - RNA, 19 nt, Homo sapiens
  misc_RNA (1)...(19): siRNA sense strand
aaauuuagcccaagaugaa

SEQ ID NO: 94854 - RNA, 19 nt, Homo sapiens
  misc_RNA (1)...(19): siRNA sense strand
ggaaaugaugucccugauu

SEQ ID NO: 94855 - RNA, 19 nt, Homo sapiens
  misc_RNA (1)...(19): siRNA sense strand
ggaaggacgggccaucuug

SEQ ID NO: 94856 - RNA, 19 nt, Homo sapiens
  misc_RNA (1)...(19): siRNA sense strand
gaacaaacaagugaagaag

SEQ ID NO: 94857 - RNA, 19 nt, Homo sapiens
  misc_RNA (1)...(19): siRNA sense strand
gaacuacugggacgucaga

SEQ ID NO: 94858 - RNA, 19 nt, Homo sapiens
  misc_RNA (1)...(19): siRNA sense strand
gaacagagaacagauacag

SEQ ID NO: 94859 - RNA, 19 nt, Homo sapiens
  misc_RNA (1)...(19): siRNA sense strand
guauucagauuguucaaag

SEQ ID NO: 94860 - RNA, 19 nt, Homo sapiens
  misc_RNA (1)...(19): siRNA sense strand
gaacuacagaagacgauau

SEQ ID NO: 94861 - RNA, 19 nt, Homo sapiens
  misc_RNA (1)...(19): siRNA sense strand
gaacccaagcccucucuau

SEQ ID NO: 94862 - RNA, 19 nt, Homo sapiens
  misc_RNA (1)...(19): siRNA sense strand
uuaggaaacuugagaagca

SEQ ID NO: 94863 - RNA, 19 nt, Homo sapiens
  misc_RNA (1)...(19): siRNA sense strand
gaucucuccuggacaaauc

SEQ ID NO: 94864 - RNA, 19 nt, Homo sapiens
  misc_RNA (1)...(19): siRNA sense strand
aagcaugggagaacaguua

SEQ ID NO: 94865 - RNA, 19 nt, Homo sapiens
  misc_RNA (1)...(19): siRNA sense strand
ggaaggauugguauucaga

SEQ ID NO: 94866 - RNA, 19 nt, Homo sapiens
  misc_RNA (1)...(19): siRNA sense strand
ggauguggguacugccauu

SEQ ID NO: 94867 - RNA, 19 nt, Homo sapiens
  misc_RNA (1)...(19): siRNA sense strand
gaccuaaagaugcguauau

SEQ ID NO: 94868 - RNA, 19 nt, Homo sapiens
  misc_RNA (1)...(19): siRNA sense strand
caguggaauucuuggauuu

SEQ ID NO: 94869 - RNA, 19 nt, Homo sapiens
  misc_RNA (1)...(19): siRNA sense strand
gaaagaaaacuccaaacuu

SEQ ID NO: 94870 - RNA, 19 nt, Homo sapiens
  misc_RNA (1)...(19): siRNA sense strand
caacucaguggaauucuug

SEQ ID NO: 94871 - RNA, 19 nt, Homo sapiens
  misc_RNA (1)...(19): siRNA sense strand
aaagagauucagcugguua

SEQ ID NO: 94872 - RNA, 19 nt, Homo sapiens
  misc_RNA (1)...(19): siRNA sense strand
ucaguggaauucuuggauu

SEQ ID NO: 94873 - RNA, 19 nt, Homo sapiens
  misc_RNA (1)...(19): siRNA sense strand
aagaggucaugcacuauuu

SEQ ID NO: 94874 - RNA, 19 nt, Homo sapiens
  misc_RNA (1)...(19): siRNA sense strand
gagaagaugaagacuuaau

SEQ ID NO: 94875 - RNA, 19 nt, Homo sapiens
  misc_RNA (1)...(19): siRNA sense strand
gaagcaacuuuaugaucag

SEQ ID NO: 94876 - RNA, 19 nt, Homo sapiens
  misc_RNA (1)...(19): siRNA sense strand
cagaaaacauggaggauug

SEQ ID NO: 94877 - RNA, 19 nt, Homo sapiens
  misc_RNA (1)...(19): siRNA sense strand
ugggagaacaguuagauaa

SEQ ID NO: 94878 - RNA, 19 nt, Homo sapiens
  misc_RNA (1)...(19): siRNA sense strand
ugaagcugcugauacugaa

SEQ ID NO: 94879 - RNA, 19 nt, Homo sapiens
  misc_RNA (1)...(19): siRNA sense strand
uaauggcucaacugauuua

SEQ ID NO: 94880 - RNA, 19 nt, Homo sapiens
  misc_RNA (1)...(19): siRNA sense strand
gcaggagcagcauauggua

SEQ ID NO: 94881 - RNA, 19 nt, Homo sapiens
  misc_RNA (1)...(19): siRNA sense strand
caggaucacaguauggaua

SEQ ID NO: 94882 - RNA, 19 nt, Homo sapiens
  misc_RNA (1)...(19): siRNA sense strand
cauggaggauugccagaau

SEQ ID NO: 94883 - RNA, 19 nt, Homo sapiens
  misc_RNA (1)...(19): siRNA sense strand
acagagaacagauacagaa

SEQ ID NO: 94884 - RNA, 19 nt, Homo sapiens
  misc_RNA (1)...(19): siRNA sense strand
gauugucgaagaaccauuu

SEQ ID NO: 94885 - RNA, 19 nt, Homo sapiens
  misc_RNA (1)...(19): siRNA sense strand
ucagagcaguuagguguug

SEQ ID NO: 94886 - RNA, 19 nt, Homo sapiens
  misc_RNA (1)...(19): siRNA sense strand
gcaaagugcagaggaaagu

SEQ ID NO: 94887 - RNA, 19 nt, Homo sapiens
  misc_RNA (1)...(19): siRNA sense strand
gaaauguucacuguuaaag

SEQ ID NO: 94888 - RNA, 19 nt, Homo sapiens
  misc_RNA (1)...(19): siRNA sense strand
ugauaccgauguagagguu

SEQ ID NO: 94889 - RNA, 19 nt, Homo sapiens
  misc_RNA (1)...(19): siRNA sense strand
guaauggcucaacugauuu

SEQ ID NO: 94890 - RNA, 19 nt, Homo sapiens
  misc_RNA (1)...(19): siRNA sense strand
gaucagcaggagcagcaua

SEQ ID NO: 94891 - RNA, 19 nt, Homo sapiens
  misc_RNA (1)...(19): siRNA sense strand
ugaagaaguagggaaagua

SEQ ID NO: 94892 - RNA, 19 nt, Homo sapiens
  misc_RNA (1)...(19): siRNA sense strand
gaucacaguauggauauuc

SEQ ID NO: 94893 - RNA, 19 nt, Homo sapiens
  misc_RNA (1)...(19): siRNA sense strand
gacgggaacauuauucaug

SEQ ID NO: 94894 - RNA, 19 nt, Homo sapiens
  misc_RNA (1)...(19): siRNA sense strand
aaagaggucaugcacuauu

SEQ ID NO: 94895 - RNA, 19 nt, Homo sapiens
  misc_RNA (1)...(19): siRNA sense strand
ccuaaagaugcguauauaa

SEQ ID NO: 94896 - RNA, 19 nt, Homo sapiens
  misc_RNA (1)...(19): siRNA sense strand
gaaaaugaaggaaaugaug

SEQ ID NO: 94897 - RNA, 19 nt, Homo sapiens
  misc_RNA (1)...(19): siRNA sense strand
caagaccaacugaagcaaa

SEQ ID NO: 94898 - RNA, 19 nt, Homo sapiens
  misc_RNA (1)...(19): siRNA sense strand
ccacacugccuaccucaga

SEQ ID NO: 94899 - RNA, 19 nt, Homo sapiens
  misc_RNA (1)...(19): siRNA sense strand
ucaaucagguacgaccaaa

SEQ ID NO: 94900 - RNA, 19 nt, Homo sapiens
  misc_RNA (1)...(19): siRNA sense strand
ugaacaaacaagugaagaa

SEQ ID NO: 94901 - RNA, 19 nt, Homo sapiens
  misc_RNA (1)...(19): siRNA sense strand
gucaguaucagagcaguua

SEQ ID NO: 94902 - RNA, 19 nt, Homo sapiens
  misc_RNA (1)...(19): siRNA sense strand
cuacagaugacuugugguu

SEQ ID NO: 94903 - RNA, 19 nt, Homo sapiens
  misc_RNA (1)...(19): siRNA sense strand
ugaaugagucaguaucaga

SEQ ID NO: 94904 - RNA, 19 nt, Homo sapiens
  misc_RNA (1)...(19): siRNA sense strand
gccaucuugucacuuguuu

SEQ ID NO: 94905 - RNA, 19 nt, Homo sapiens
  misc_RNA (1)...(19): siRNA sense strand
gaaggacgggccaucuugu

SEQ ID NO: 94906 - RNA, 19 nt, Homo sapiens
  misc_RNA (1)...(19): siRNA sense strand
acaaaucaaucagguacga

SEQ ID NO: 94907 - RNA, 19 nt, Homo sapiens
  misc_RNA (1)...(19): siRNA sense strand
ggcuggaccuuggauuuga

SEQ ID NO: 94908 - RNA, 19 nt, Homo sapiens
  misc_RNA (1)...(19): siRNA sense strand
gaacagauacagaaaacau

SEQ ID NO: 94909 - RNA, 19 nt, Homo sapiens
  misc_RNA (1)...(19): siRNA sense strand
acagaugacuugugguuuu

SEQ ID NO: 94910 - RNA, 19 nt, Homo sapiens
  misc_RNA (1)...(19): siRNA sense strand
uuucagauacuacagauga

SEQ ID NO: 94911 - RNA, 19 nt, Homo sapiens
  misc_RNA (1)...(19): siRNA sense strand
gccauuguuucagauacua

SEQ ID NO: 94912 - RNA, 19 nt, Homo sapiens
  misc_RNA (1)...(19): siRNA sense strand
gauaugcuaagaaagaauc

SEQ ID NO: 94913 - RNA, 19 nt, Homo sapiens
  misc_RNA (1)...(19): siRNA sense strand
aauguucacuguuaaagag

SEQ ID NO: 94914 - RNA, 19 nt, Homo sapiens
  misc_RNA (1)...(19): siRNA sense strand
ggucaugcacuauuuaggu

SEQ ID NO: 94915 - RNA, 19 nt, Homo sapiens
  misc_RNA (1)...(19): siRNA sense strand
accuaaagaugcguauaua

SEQ ID NO: 94916 - RNA, 19 nt, Homo sapiens
  misc_RNA (1)...(19): siRNA sense strand
cauuucggcuccugucguu

SEQ ID NO: 94917 - RNA, 19 nt, Homo sapiens
  misc_RNA (1)...(19): siRNA sense strand
aaggauugguauucagauu

SEQ ID NO: 94918 - RNA, 19 nt, Homo sapiens
  misc_RNA (1)...(19): siRNA sense strand
gugaagaaguagggaaagu

SEQ ID NO: 94919 - RNA, 19 nt, Homo sapiens
  misc_RNA (1)...(19): siRNA sense strand
gcaacuauacaccuagaag

SEQ ID NO: 94920 - RNA, 19 nt, Homo sapiens
  misc_RNA (1)...(19): siRNA sense strand
gcacaggaucacaguaugg

SEQ ID NO: 94921 - RNA, 19 nt, Homo sapiens
  misc_RNA (1)...(19): siRNA sense strand
guacuaagguuucaucuuu

SEQ ID NO: 94922 - RNA, 19 nt, Homo sapiens
  misc_RNA (1)...(19): siRNA sense strand
caagucagaucaugaagaa

SEQ ID NO: 94923 - RNA, 19 nt, Homo sapiens
  misc_RNA (1)...(19): siRNA sense strand
gauacaagcaauacaagua

SEQ ID NO: 94924 - RNA, 19 nt, Homo sapiens
  misc_RNA (1)...(19): siRNA sense strand
caaaguagcaacaaauauc

SEQ ID NO: 94925 - RNA, 19 nt, Homo sapiens
  misc_RNA (1)...(19): siRNA sense strand
gaccauaacccuucuucuu

SEQ ID NO: 94926 - RNA, 19 nt, Homo sapiens
  misc_RNA (1)...(19): siRNA sense strand
ggacaaggacgcgaucuau

SEQ ID NO: 94927 - RNA, 19 nt, Homo sapiens
  misc_RNA (1)...(19): siRNA sense strand
gcuggacaauuugaugaua

SEQ ID NO: 94928 - RNA, 19 nt, Homo sapiens
  misc_RNA (1)...(19): siRNA sense strand
caauacaaguacuaagguu

SEQ ID NO: 94929 - RNA, 19 nt, Homo sapiens
  misc_RNA (1)...(19): siRNA sense strand
ccaucgaccucgucauuga

SEQ ID NO: 94930 - RNA, 19 nt, Homo sapiens
  misc_RNA (1)...(19): siRNA sense strand
gaugauacaagcaauacaa

SEQ ID NO: 94931 - RNA, 19 nt, Homo sapiens
  misc_RNA (1)...(19): siRNA sense strand
guacaggugacgaugauga

SEQ ID NO: 94932 - RNA, 19 nt, Homo sapiens
  misc_RNA (1)...(19): siRNA sense strand
ccaaggagcagcauauagu

SEQ ID NO: 94933 - RNA, 19 nt, Homo sapiens
  misc_RNA (1)...(19): siRNA sense strand
agacaacaguguagcuuca

SEQ ID NO: 94934 - RNA, 19 nt, Homo sapiens
  misc_RNA (1)...(19): siRNA sense strand
gagcuggacaauuugauga

SEQ ID NO: 94935 - RNA, 19 nt, Homo sapiens
  misc_RNA (1)...(19): siRNA sense strand
gagccaaggagcagcauau

SEQ ID NO: 94936 - RNA, 19 nt, Homo sapiens
  misc_RNA (1)...(19): siRNA sense strand
gcccaucgaccucgucauu

SEQ ID NO: 94937 - RNA, 19 nt, Homo sapiens
  misc_RNA (1)...(19): siRNA sense strand
ccaaaguagcaacaaauau

SEQ ID NO: 94938 - RNA, 19 nt, Homo sapiens
  misc_RNA (1)...(19): siRNA sense strand
gcucuggucuuugagaagu

SEQ ID NO: 94939 - RNA, 19 nt, Homo sapiens
  misc_RNA (1)...(19): siRNA sense strand
uaguacagcccaugauuga

SEQ ID NO: 94940 - RNA, 19 nt, Homo sapiens
  misc_RNA (1)...(19): siRNA sense strand
caaaucucgcugaccauaa

SEQ ID NO: 94941 - RNA, 19 nt, Homo sapiens
  misc_RNA (1)...(19): siRNA sense strand
gcaauacaaguacuaaggu

SEQ ID NO: 94942 - RNA, 19 nt, Homo sapiens
  misc_RNA (1)...(19): siRNA sense strand
cccaaaguagcaacaaaua

SEQ ID NO: 94943 - RNA, 19 nt, Homo sapiens
  misc_RNA (1)...(19): siRNA sense strand
caagcaauacaaguacuaa

SEQ ID NO: 94944 - RNA, 19 nt, Homo sapiens
  misc_RNA (1)...(19): siRNA sense strand
acaaauaucaugagagcau

SEQ ID NO: 94945 - RNA, 19 nt, Homo sapiens
  misc_RNA (1)...(19): siRNA sense strand
acaaaucucgcugaccaua

SEQ ID NO: 94946 - RNA, 19 nt, Homo sapiens
  misc_RNA (1)...(19): siRNA sense strand
gaacugugcgauaacuucu

SEQ ID NO: 94947 - RNA, 19 nt, Homo sapiens
  misc_RNA (1)...(19): siRNA sense strand
gacaaggacgcgaucuaug

SEQ ID NO: 94948 - RNA, 19 nt, Homo sapiens
  misc_RNA (1)...(19): siRNA sense strand
uccacgaacugugcgauaa

SEQ ID NO: 94949 - RNA, 19 nt, Homo sapiens
  misc_RNA (1)...(19): siRNA sense strand
gaauaguacagcccaugau

SEQ ID NO: 94950 - RNA, 19 nt, Homo sapiens
  misc_RNA (1)...(19): siRNA sense strand
ccaagucagaucaugaaga

SEQ ID NO: 94951 - RNA, 19 nt, Homo sapiens
  misc_RNA (1)...(19): siRNA sense strand
gcuccaagucagaucauga

SEQ ID NO: 94952 - RNA, 19 nt, Homo sapiens
  misc_RNA (1)...(19): siRNA sense strand
gggacaaggacgcgaucua

SEQ ID NO: 94953 - RNA, 19 nt, Homo sapiens
  misc_RNA (1)...(19): siRNA sense strand
guagcaacaaauaucauga

SEQ ID NO: 94954 - RNA, 19 nt, Homo sapiens
  misc_RNA (1)...(19): siRNA sense strand
accgauacauuagcuguuu

SEQ ID NO: 94955 - RNA, 19 nt, Homo sapiens
  misc_RNA (1)...(19): siRNA sense strand
guuuauuaaugccagaaga

SEQ ID NO: 94956 - RNA, 19 nt, Homo sapiens
  misc_RNA (1)...(19): siRNA sense strand
gcaaggggaugguuuagac

SEQ ID NO: 94957 - RNA, 19 nt, Homo sapiens
  misc_RNA (1)...(19): siRNA sense strand
uaacuucugccaccgauac

SEQ ID NO: 94958 - RNA, 19 nt, Homo sapiens
  misc_RNA (1)...(19): siRNA sense strand
aauaguacagcccaugauu

SEQ ID NO: 94959 - RNA, 19 nt, Homo sapiens
  misc_RNA (1)...(19): siRNA sense strand
aaaucucgcugaccauaac

SEQ ID NO: 94960 - RNA, 19 nt, Homo sapiens
  misc_RNA (1)...(19): siRNA sense strand
acaaggacgcgaucuaugg

SEQ ID NO: 94961 - RNA, 19 nt, Homo sapiens
  misc_RNA (1)...(19): siRNA sense strand
caaguacuaagguuucauc

SEQ ID NO: 94962 - RNA, 19 nt, Homo sapiens
  misc_RNA (1)...(19): siRNA sense strand
gccagaagaagaauaguac

SEQ ID NO: 94963 - RNA, 19 nt, Homo sapiens
  misc_RNA (1)...(19): siRNA sense strand
accauaacccuucuucuug

SEQ ID NO: 94964 - RNA, 19 nt, Homo sapiens
  misc_RNA (1)...(19): siRNA sense strand
cgaacugugcgauaacuuc

SEQ ID NO: 94965 - RNA, 19 nt, Homo sapiens
  misc_RNA (1)...(19): siRNA sense strand
ucaggcuccuccacaaauc

SEQ ID NO: 94966 - RNA, 19 nt, Homo sapiens
  misc_RNA (1)...(19): siRNA sense strand
uguguuggauggucagcaa

SEQ ID NO: 94967 - RNA, 19 nt, Homo sapiens
  misc_RNA (1)...(19): siRNA sense strand
acaagcaauacaaguacua

SEQ ID NO: 94968 - RNA, 19 nt, Homo sapiens
  misc_RNA (1)...(19): siRNA sense strand
agaauaguacagcccauga

SEQ ID NO: 94969 - RNA, 19 nt, Homo sapiens
  misc_RNA (1)...(19): siRNA sense strand
gucagaucaugaagaacuu

SEQ ID NO: 94970 - RNA, 19 nt, Homo sapiens
  misc_RNA (1)...(19): siRNA sense strand
ggucuucgccaagcagguu

SEQ ID NO: 94971 - RNA, 19 nt, Homo sapiens
  misc_RNA (1)...(19): siRNA sense strand
ugccagaagaagaauagua

SEQ ID NO: 94972 - RNA, 19 nt, Homo sapiens
  misc_RNA (1)...(19): siRNA sense strand
acgaugaugauccggauaa

SEQ ID NO: 94973 - RNA, 19 nt, Homo sapiens
  misc_RNA (1)...(19): siRNA sense strand
auacaaguacuaagguuuc

SEQ ID NO: 94974 - RNA, 19 nt, Homo sapiens
  misc_RNA (1)...(19): siRNA sense strand
agcaacaaauaucaugaga

SEQ ID NO: 94975 - RNA, 19 nt, Homo sapiens
  misc_RNA (1)...(19): siRNA sense strand
gcggagacaacagcaguga

SEQ ID NO: 94976 - RNA, 19 nt, Homo sapiens
  misc_RNA (1)...(19): siRNA sense strand
gguuucaucuuuuggaguu

SEQ ID NO: 94977 - RNA, 19 nt, Homo sapiens
  misc_RNA (1)...(19): siRNA sense strand
caaggagcagcauauaguc

SEQ ID NO: 94978 - RNA, 19 nt, Homo sapiens
  misc_RNA (1)...(19): siRNA sense strand
gccaaggagcagcauauag

SEQ ID NO: 94979 - RNA, 19 nt, Homo sapiens
  misc_RNA (1)...(19): siRNA sense strand
uggacaauuugaugauaca

SEQ ID NO: 94980 - RNA, 19 nt, Homo sapiens
  misc_RNA (1)...(19): siRNA sense strand
cgauacauuagcuguuuga

SEQ ID NO: 94981 - RNA, 19 nt, Homo sapiens
  misc_RNA (1)...(19): siRNA sense strand
ccgauacauuagcuguuug

SEQ ID NO: 94982 - RNA, 19 nt, Homo sapiens
  misc_RNA (1)...(19): siRNA sense strand
gaaaagguccacgaacugu

SEQ ID NO: 94983 - RNA, 19 nt, Homo sapiens
  misc_RNA (1)...(19): siRNA sense strand
gcagcuccaagucagauca

SEQ ID NO: 94984 - RNA, 19 nt, Homo sapiens
  misc_RNA (1)...(19): siRNA sense strand
auuaaugccagaagaagaa

SEQ ID NO: 94985 - RNA, 19 nt, Homo sapiens
  misc_RNA (1)...(19): siRNA sense strand
uagaaaagguccacgaacu

SEQ ID NO: 94986 - RNA, 19 nt, Homo sapiens
  misc_RNA (1)...(19): siRNA sense strand
augaugauccggauaagga

SEQ ID NO: 94987 - RNA, 19 nt, Homo sapiens
  misc_RNA (1)...(19): siRNA sense strand
guacuaagguuucaucuuu

SEQ ID NO: 94988 - RNA, 19 nt, Homo sapiens
  misc_RNA (1)...(19): siRNA sense strand
caagucagaucaugaagaa

SEQ ID NO: 94989 - RNA, 19 nt, Homo sapiens
  misc_RNA (1)...(19): siRNA sense strand
gauacaagcaauacaagua

SEQ ID NO: 94990 - RNA, 19 nt, Homo sapiens
  misc_RNA (1)...(19): siRNA sense strand
caaaguagcaacaaauauc

SEQ ID NO: 94991 - RNA, 19 nt, Homo sapiens
  misc_RNA (1)...(19): siRNA sense strand
gaccauaacccuucuucuu

SEQ ID NO: 94992 - RNA, 19 nt, Homo sapiens
  misc_RNA (1)...(19): siRNA sense strand
ggacaaggacgcgaucuau

SEQ ID NO: 94993 - RNA, 19 nt, Homo sapiens
  misc_RNA (1)...(19): siRNA sense strand
gcuggacaauuugaugaua

SEQ ID NO: 94994 - RNA, 19 nt, Homo sapiens
  misc_RNA (1)...(19): siRNA sense strand
caauacaaguacuaagguu

SEQ ID NO: 94995 - RNA, 19 nt, Homo sapiens
  misc_RNA (1)...(19): siRNA sense strand
ccaucgaccucgucauuga

SEQ ID NO: 94996 - RNA, 19 nt, Homo sapiens
  misc_RNA (1)...(19): siRNA sense strand
gaugauacaagcaauacaa

SEQ ID NO: 94997 - RNA, 19 nt, Homo sapiens
  misc_RNA (1)...(19): siRNA sense strand
guacaggugacgaugauga

SEQ ID NO: 94998 - RNA, 19 nt, Homo sapiens
  misc_RNA (1)...(19): siRNA sense strand
acgaugagcugccccauua

SEQ ID NO: 94999 - RNA, 19 nt, Homo sapiens
  misc_RNA (1)...(19): siRNA sense strand
agacaacaguguagcuuca

SEQ ID NO: 95000 - RNA, 19 nt, Homo sapiens
  misc_RNA (1)...(19): siRNA sense strand
gagcuggacaauuugauga

SEQ ID NO: 95001 - RNA, 19 nt, Homo sapiens
  misc_RNA (1)...(19): siRNA sense strand
gcccaucgaccucgucauu

SEQ ID NO: 95002 - RNA, 19 nt, Homo sapiens
  misc_RNA (1)...(19): siRNA sense strand
ccaaaguagcaacaaauau

SEQ ID NO: 95003 - RNA, 19 nt, Homo sapiens
  misc_RNA (1)...(19): siRNA sense strand
gcucuggucuuugagaagu

SEQ ID NO: 95004 - RNA, 19 nt, Homo sapiens
  misc_RNA (1)...(19): siRNA sense strand
caaaucucgcugaccauaa

SEQ ID NO: 95005 - RNA, 19 nt, Homo sapiens
  misc_RNA (1)...(19): siRNA sense strand
gcaauacaaguacuaaggu

SEQ ID NO: 95006 - RNA, 19 nt, Homo sapiens
  misc_RNA (1)...(19): siRNA sense strand
cccaaaguagcaacaaaua

SEQ ID NO: 95007 - RNA, 19 nt, Homo sapiens
  misc_RNA (1)...(19): siRNA sense strand
caagcaauacaaguacuaa

SEQ ID NO: 95008 - RNA, 19 nt, Homo sapiens
  misc_RNA (1)...(19): siRNA sense strand
acaaauaucaugagagcau

SEQ ID NO: 95009 - RNA, 19 nt, Homo sapiens
  misc_RNA (1)...(19): siRNA sense strand
acaaaucucgcugaccaua

SEQ ID NO: 95010 - RNA, 19 nt, Homo sapiens
  misc_RNA (1)...(19): siRNA sense strand
gaacugugcgauaacuucu

SEQ ID NO: 95011 - RNA, 19 nt, Homo sapiens
  misc_RNA (1)...(19): siRNA sense strand
gacaaggacgcgaucuaug

SEQ ID NO: 95012 - RNA, 19 nt, Homo sapiens
  misc_RNA (1)...(19): siRNA sense strand
uccacgaacugugcgauaa

SEQ ID NO: 95013 - RNA, 19 nt, Homo sapiens
  misc_RNA (1)...(19): siRNA sense strand
ccaagucagaucaugaaga

SEQ ID NO: 95014 - RNA, 19 nt, Homo sapiens
  misc_RNA (1)...(19): siRNA sense strand
gcuccaagucagaucauga

SEQ ID NO: 95015 - RNA, 19 nt, Homo sapiens
  misc_RNA (1)...(19): siRNA sense strand
gggacaaggacgcgaucua

SEQ ID NO: 95016 - RNA, 19 nt, Homo sapiens
  misc_RNA (1)...(19): siRNA sense strand
guagcaacaaauaucauga

SEQ ID NO: 95017 - RNA, 19 nt, Homo sapiens
  misc_RNA (1)...(19): siRNA sense strand
accgauacauuagcuguuu

SEQ ID NO: 95018 - RNA, 19 nt, Homo sapiens
  misc_RNA (1)...(19): siRNA sense strand
gcaaggggaugguuuagac

SEQ ID NO: 95019 - RNA, 19 nt, Homo sapiens
  misc_RNA (1)...(19): siRNA sense strand
uaacuucugccaccgauac

SEQ ID NO: 95020 - RNA, 19 nt, Homo sapiens
  misc_RNA (1)...(19): siRNA sense strand
aaaucucgcugaccauaac

SEQ ID NO: 95021 - RNA, 19 nt, Homo sapiens
  misc_RNA (1)...(19): siRNA sense strand
acaaggacgcgaucuaugg

SEQ ID NO: 95022 - RNA, 19 nt, Homo sapiens
  misc_RNA (1)...(19): siRNA sense strand
caaguacuaagguuucauc

SEQ ID NO: 95023 - RNA, 19 nt, Homo sapiens
  misc_RNA (1)...(19): siRNA sense strand
accauaacccuucuucuug

SEQ ID NO: 95024 - RNA, 19 nt, Homo sapiens
  misc_RNA (1)...(19): siRNA sense strand
cgaacugugcgauaacuuc

SEQ ID NO: 95025 - RNA, 19 nt, Homo sapiens
  misc_RNA (1)...(19): siRNA sense strand
ucaggcuccuccacaaauc

SEQ ID NO: 95026 - RNA, 19 nt, Homo sapiens
  misc_RNA (1)...(19): siRNA sense strand
acaagcaauacaaguacua

SEQ ID NO: 95027 - RNA, 19 nt, Homo sapiens
  misc_RNA (1)...(19): siRNA sense strand
gucagaucaugaagaacuu

SEQ ID NO: 95028 - RNA, 19 nt, Homo sapiens
  misc_RNA (1)...(19): siRNA sense strand
ggucuucgccaagcagguu

SEQ ID NO: 95029 - RNA, 19 nt, Homo sapiens
  misc_RNA (1)...(19): siRNA sense strand
acgaugaugauccggauaa

SEQ ID NO: 95030 - RNA, 19 nt, Homo sapiens
  misc_RNA (1)...(19): siRNA sense strand
auacaaguacuaagguuuc

SEQ ID NO: 95031 - RNA, 19 nt, Homo sapiens
  misc_RNA (1)...(19): siRNA sense strand
agcaacaaauaucaugaga

SEQ ID NO: 95032 - RNA, 19 nt, Homo sapiens
  misc_RNA (1)...(19): siRNA sense strand
gcggagacaacagcaguga

SEQ ID NO: 95033 - RNA, 19 nt, Homo sapiens
  misc_RNA (1)...(19): siRNA sense strand
uggacaauuugaugauaca

SEQ ID NO: 95034 - RNA, 19 nt, Homo sapiens
  misc_RNA (1)...(19): siRNA sense strand
cgauacauuagcuguuuga

SEQ ID NO: 95035 - RNA, 19 nt, Homo sapiens
  misc_RNA (1)...(19): siRNA sense strand
ccgauacauuagcuguuug

SEQ ID NO: 95036 - RNA, 19 nt, Homo sapiens
  misc_RNA (1)...(19): siRNA sense strand
gaaaagguccacgaacugu

SEQ ID NO: 95037 - RNA, 19 nt, Homo sapiens
  misc_RNA (1)...(19): siRNA sense strand
gguuucaucuuuuggaguu

SEQ ID NO: 95038 - RNA, 19 nt, Homo sapiens
  misc_RNA (1)...(19): siRNA sense strand
gcagcuccaagucagauca

SEQ ID NO: 95039 - RNA, 19 nt, Homo sapiens
  misc_RNA (1)...(19): siRNA sense strand
uagaaaagguccacgaacu

SEQ ID NO: 95040 - RNA, 19 nt, Homo sapiens
  misc_RNA (1)...(19): siRNA sense strand
augaugauccggauaagga

SEQ ID NO: 95041 - RNA, 19 nt, Homo sapiens
  misc_RNA (1)...(19): siRNA sense strand
guacuaagguuucaucuuu

SEQ ID NO: 95042 - RNA, 19 nt, Homo sapiens
  misc_RNA (1)...(19): siRNA sense strand
caagucagaucaugaagaa

SEQ ID NO: 95043 - RNA, 19 nt, Homo sapiens
  misc_RNA (1)...(19): siRNA sense strand
gauacaagcaauacaagua

SEQ ID NO: 95044 - RNA, 19 nt, Homo sapiens
  misc_RNA (1)...(19): siRNA sense strand
caaaguagcaacaaauauc

SEQ ID NO: 95045 - RNA, 19 nt, Homo sapiens
  misc_RNA (1)...(19): siRNA sense strand
gaccauaacccuucuucuu

SEQ ID NO: 95046 - RNA, 19 nt, Homo sapiens
  misc_RNA (1)...(19): siRNA sense strand
ggacaaggacgcgaucuau

SEQ ID NO: 95047 - RNA, 19 nt, Homo sapiens
  misc_RNA (1)...(19): siRNA sense strand
gcuggacaauuugaugaua

SEQ ID NO: 95048 - RNA, 19 nt, Homo sapiens
  misc_RNA (1)...(19): siRNA sense strand
caauacaaguacuaagguu

SEQ ID NO: 95049 - RNA, 19 nt, Homo sapiens
  misc_RNA (1)...(19): siRNA sense strand
ccaucgaccucgucauuga

SEQ ID NO: 95050 - RNA, 19 nt, Homo sapiens
  misc_RNA (1)...(19): siRNA sense strand
gaugauacaagcaauacaa

SEQ ID NO: 95051 - RNA, 19 nt, Homo sapiens
  misc_RNA (1)...(19): siRNA sense strand
guacaggugacgaugauga

SEQ ID NO: 95052 - RNA, 19 nt, Homo sapiens
  misc_RNA (1)...(19): siRNA sense strand
ccaaggagcagcauauagu

SEQ ID NO: 95053 - RNA, 19 nt, Homo sapiens
  misc_RNA (1)...(19): siRNA sense strand
acgaugagcugccccauua

SEQ ID NO: 95054 - RNA, 19 nt, Homo sapiens
  misc_RNA (1)...(19): siRNA sense strand
agacaacaguguagcuuca

SEQ ID NO: 95055 - RNA, 19 nt, Homo sapiens
  misc_RNA (1)...(19): siRNA sense strand
gagcuggacaauuugauga

SEQ ID NO: 95056 - RNA, 19 nt, Homo sapiens
  misc_RNA (1)...(19): siRNA sense strand
gagccaaggagcagcauau

SEQ ID NO: 95057 - RNA, 19 nt, Homo sapiens
  misc_RNA (1)...(19): siRNA sense strand
gcccaucgaccucgucauu

SEQ ID NO: 95058 - RNA, 19 nt, Homo sapiens
  misc_RNA (1)...(19): siRNA sense strand
ccaaaguagcaacaaauau

SEQ ID NO: 95059 - RNA, 19 nt, Homo sapiens
  misc_RNA (1)...(19): siRNA sense strand
gcucuggucuuugagaagu

SEQ ID NO: 95060 - RNA, 19 nt, Homo sapiens
  misc_RNA (1)...(19): siRNA sense strand
uaguacagcccaugauuga

SEQ ID NO: 95061 - RNA, 19 nt, Homo sapiens
  misc_RNA (1)...(19): siRNA sense strand
caaaucucgcugaccauaa

SEQ ID NO: 95062 - RNA, 19 nt, Homo sapiens
  misc_RNA (1)...(19): siRNA sense strand
gcaauacaaguacuaaggu

SEQ ID NO: 95063 - RNA, 19 nt, Homo sapiens
  misc_RNA (1)...(19): siRNA sense strand
cccaaaguagcaacaaaua

SEQ ID NO: 95064 - RNA, 19 nt, Homo sapiens
  misc_RNA (1)...(19): siRNA sense strand
caagcaauacaaguacuaa

SEQ ID NO: 95065 - RNA, 19 nt, Homo sapiens
  misc_RNA (1)...(19): siRNA sense strand
acaaauaucaugagagcau

SEQ ID NO: 95066 - RNA, 19 nt, Homo sapiens
  misc_RNA (1)...(19): siRNA sense strand
acaaaucucgcugaccaua

SEQ ID NO: 95067 - RNA, 19 nt, Homo sapiens
  misc_RNA (1)...(19): siRNA sense strand
gaacugugcgauaacuucu

SEQ ID NO: 95068 - RNA, 19 nt, Homo sapiens
  misc_RNA (1)...(19): siRNA sense strand
gacaaggacgcgaucuaug

SEQ ID NO: 95069 - RNA, 19 nt, Homo sapiens
  misc_RNA (1)...(19): siRNA sense strand
uccacgaacugugcgauaa

SEQ ID NO: 95070 - RNA, 19 nt, Homo sapiens
  misc_RNA (1)...(19): siRNA sense strand
gaauaguacagcccaugau

SEQ ID NO: 95071 - RNA, 19 nt, Homo sapiens
  misc_RNA (1)...(19): siRNA sense strand
ccaagucagaucaugaaga

SEQ ID NO: 95072 - RNA, 19 nt, Homo sapiens
  misc_RNA (1)...(19): siRNA sense strand
gcuccaagucagaucauga

SEQ ID NO: 95073 - RNA, 19 nt, Homo sapiens
  misc_RNA (1)...(19): siRNA sense strand
gggacaaggacgcgaucua

SEQ ID NO: 95074 - RNA, 19 nt, Homo sapiens
  misc_RNA (1)...(19): siRNA sense strand
guagcaacaaauaucauga

SEQ ID NO: 95075 - RNA, 19 nt, Homo sapiens
  misc_RNA (1)...(19): siRNA sense strand
accgauacauuagcuguuu

SEQ ID NO: 95076 - RNA, 19 nt, Homo sapiens
  misc_RNA (1)...(19): siRNA sense strand
guuuauuaaugccagaaga

SEQ ID NO: 95077 - RNA, 19 nt, Homo sapiens
  misc_RNA (1)...(19): siRNA sense strand
gcaaggggaugguuuagac

SEQ ID NO: 95078 - RNA, 19 nt, Homo sapiens
  misc_RNA (1)...(19): siRNA sense strand
uaacuucugccaccgauac

SEQ ID NO: 95079 - RNA, 19 nt, Homo sapiens
  misc_RNA (1)...(19): siRNA sense strand
aauaguacagcccaugauu

SEQ ID NO: 95080 - RNA, 19 nt, Homo sapiens
  misc_RNA (1)...(19): siRNA sense strand
acaaggacgcgaucuaugg

SEQ ID NO: 95081 - RNA, 19 nt, Homo sapiens
  misc_RNA (1)...(19): siRNA sense strand
aaaucucgcugaccauaac

SEQ ID NO: 95082 - RNA, 19 nt, Homo sapiens
  misc_RNA (1)...(19): siRNA sense strand
caaguacuaagguuucauc

SEQ ID NO: 95083 - RNA, 19 nt, Homo sapiens
  misc_RNA (1)...(19): siRNA sense strand
gccagaagaagaauaguac

SEQ ID NO: 95084 - RNA, 19 nt, Homo sapiens
  misc_RNA (1)...(19): siRNA sense strand
accauaacccuucuucuug

SEQ ID NO: 95085 - RNA, 19 nt, Homo sapiens
  misc_RNA (1)...(19): siRNA sense strand
cgaacugugcgauaacuuc

SEQ ID NO: 95086 - RNA, 19 nt, Homo sapiens
  misc_RNA (1)...(19): siRNA sense strand
ucaggcuccuccacaaauc

SEQ ID NO: 95087 - RNA, 19 nt, Homo sapiens
  misc_RNA (1)...(19): siRNA sense strand
uguguuggauggucagcaa

SEQ ID NO: 95088 - RNA, 19 nt, Homo sapiens
  misc_RNA (1)...(19): siRNA sense strand
acaagcaauacaaguacua

SEQ ID NO: 95089 - RNA, 19 nt, Homo sapiens
  misc_RNA (1)...(19): siRNA sense strand
agaauaguacagcccauga

SEQ ID NO: 95090 - RNA, 19 nt, Homo sapiens
  misc_RNA (1)...(19): siRNA sense strand
gucagaucaugaagaacuu

SEQ ID NO: 95091 - RNA, 19 nt, Homo sapiens
  misc_RNA (1)...(19): siRNA sense strand
ggucuucgccaagcagguu

SEQ ID NO: 95092 - RNA, 19 nt, Homo sapiens
  misc_RNA (1)...(19): siRNA sense strand
ugccagaagaagaauagua

SEQ ID NO: 95093 - RNA, 19 nt, Homo sapiens
  misc_RNA (1)...(19): siRNA sense strand
acgaugaugauccggauaa

SEQ ID NO: 95094 - RNA, 19 nt, Homo sapiens
  misc_RNA (1)...(19): siRNA sense strand
auacaaguacuaagguuuc

SEQ ID NO: 95095 - RNA, 19 nt, Homo sapiens
  misc_RNA (1)...(19): siRNA sense strand
agcaacaaauaucaugaga

SEQ ID NO: 95096 - RNA, 19 nt, Homo sapiens
  misc_RNA (1)...(19): siRNA sense strand
gcggagacaacagcaguga

SEQ ID NO: 95097 - RNA, 19 nt, Homo sapiens
  misc_RNA (1)...(19): siRNA sense strand
gguuucaucuuuuggaguu

SEQ ID NO: 95098 - RNA, 19 nt, Homo sapiens
  misc_RNA (1)...(19): siRNA sense strand
caaggagcagcauauaguc

SEQ ID NO: 95099 - RNA, 19 nt, Homo sapiens
  misc_RNA (1)...(19): siRNA sense strand
gccaaggagcagcauauag

SEQ ID NO: 95100 - RNA, 19 nt, Homo sapiens
  misc_RNA (1)...(19): siRNA sense strand
cgauacauuagcuguuuga

SEQ ID NO: 95101 - RNA, 19 nt, Homo sapiens
  misc_RNA (1)...(19): siRNA sense strand
ccgauacauuagcuguuug

SEQ ID NO: 95102 - RNA, 19 nt, Homo sapiens
  misc_RNA (1)...(19): siRNA sense strand
uggacaauuugaugauaca

SEQ ID NO: 95103 - RNA, 19 nt, Homo sapiens
  misc_RNA (1)...(19): siRNA sense strand
gaaaagguccacgaacugu

SEQ ID NO: 95104 - RNA, 19 nt, Homo sapiens
  misc_RNA (1)...(19): siRNA sense strand
gcagcuccaagucagauca

SEQ ID NO: 95105 - RNA, 19 nt, Homo sapiens
  misc_RNA (1)...(19): siRNA sense strand
auuaaugccagaagaagaa

SEQ ID NO: 95106 - RNA, 19 nt, Homo sapiens
  misc_RNA (1)...(19): siRNA sense strand
uagaaaagguccacgaacu

SEQ ID NO: 95107 - RNA, 19 nt, Homo sapiens
  misc_RNA (1)...(19): siRNA sense strand
augaugauccggauaagga

SEQ ID NO: 95108 - RNA, 19 nt, Homo sapiens
  misc_RNA (1)...(19): siRNA sense strand
guacuaagguuucaucuuu

SEQ ID NO: 95109 - RNA, 19 nt, Homo sapiens
  misc_RNA (1)...(19): siRNA sense strand
caagucagaucaugaagaa

SEQ ID NO: 95110 - RNA, 19 nt, Homo sapiens
  misc_RNA (1)...(19): siRNA sense strand
ggacauucaugcccaauag

SEQ ID NO: 95111 - RNA, 19 nt, Homo sapiens
  misc_RNA (1)...(19): siRNA sense strand
gauacaagcaauacaagua

SEQ ID NO: 95112 - RNA, 19 nt, Homo sapiens
  misc_RNA (1)...(19): siRNA sense strand
caaaguagcaacaaauauc

SEQ ID NO: 95113 - RNA, 19 nt, Homo sapiens
  misc_RNA (1)...(19): siRNA sense strand
gcacagagccccacaaugu

SEQ ID NO: 95114 - RNA, 19 nt, Homo sapiens
  misc_RNA (1)...(19): siRNA sense strand
gaccauaacccuucuucuu

SEQ ID NO: 95115 - RNA, 19 nt, Homo sapiens
  misc_RNA (1)...(19): siRNA sense strand
ggacaaggacgcgaucuau

SEQ ID NO: 95116 - RNA, 19 nt, Homo sapiens
  misc_RNA (1)...(19): siRNA sense strand
gcuggacaauuugaugaua

SEQ ID NO: 95117 - RNA, 19 nt, Homo sapiens
  misc_RNA (1)...(19): siRNA sense strand
caauacaaguacuaagguu

SEQ ID NO: 95118 - RNA, 19 nt, Homo sapiens
  misc_RNA (1)...(19): siRNA sense strand
ccaucgaccucgucauuga

SEQ ID NO: 95119 - RNA, 19 nt, Homo sapiens
  misc_RNA (1)...(19): siRNA sense strand
gaugauacaagcaauacaa

SEQ ID NO: 95120 - RNA, 19 nt, Homo sapiens
  misc_RNA (1)...(19): siRNA sense strand
cccacacccuacucaauua

SEQ ID NO: 95121 - RNA, 19 nt, Homo sapiens
  misc_RNA (1)...(19): siRNA sense strand
guacaggugacgaugauga

SEQ ID NO: 95122 - RNA, 19 nt, Homo sapiens
  misc_RNA (1)...(19): siRNA sense strand
ccacaauguuaaauucugu

SEQ ID NO: 95123 - RNA, 19 nt, Homo sapiens
  misc_RNA (1)...(19): siRNA sense strand
cccaaugcauucauauuug

SEQ ID NO: 95124 - RNA, 19 nt, Homo sapiens
  misc_RNA (1)...(19): siRNA sense strand
ccaaggagcagcauauagu

SEQ ID NO: 95125 - RNA, 19 nt, Homo sapiens
  misc_RNA (1)...(19): siRNA sense strand
acgaugagcugccccauua

SEQ ID NO: 95126 - RNA, 19 nt, Homo sapiens
  misc_RNA (1)...(19): siRNA sense strand
agacaacaguguagcuuca

SEQ ID NO: 95127 - RNA, 19 nt, Homo sapiens
  misc_RNA (1)...(19): siRNA sense strand
gagcuggacaauuugauga

SEQ ID NO: 95128 - RNA, 19 nt, Homo sapiens
  misc_RNA (1)...(19): siRNA sense strand
gagccaaggagcagcauau

SEQ ID NO: 95129 - RNA, 19 nt, Homo sapiens
  misc_RNA (1)...(19): siRNA sense strand
gcggacagguuauggacau

SEQ ID NO: 95130 - RNA, 19 nt, Homo sapiens
  misc_RNA (1)...(19): siRNA sense strand
gcccaucgaccucgucauu

SEQ ID NO: 95131 - RNA, 19 nt, Homo sapiens
  misc_RNA (1)...(19): siRNA sense strand
ccaaaguagcaacaaauau

SEQ ID NO: 95132 - RNA, 19 nt, Homo sapiens
  misc_RNA (1)...(19): siRNA sense strand
gcaauacaaguacuaaggu

SEQ ID NO: 95133 - RNA, 19 nt, Homo sapiens
  misc_RNA (1)...(19): siRNA sense strand
gacagguuauggacauuca

SEQ ID NO: 95134 - RNA, 19 nt, Homo sapiens
  misc_RNA (1)...(19): siRNA sense strand
uaguacagcccaugauuga

SEQ ID NO: 95135 - RNA, 19 nt, Homo sapiens
  misc_RNA (1)...(19): siRNA sense strand
caaaucucgcugaccauaa

SEQ ID NO: 95136 - RNA, 19 nt, Homo sapiens
  misc_RNA (1)...(19): siRNA sense strand
gcucuggucuuugagaagu

SEQ ID NO: 95137 - RNA, 19 nt, Homo sapiens
  misc_RNA (1)...(19): siRNA sense strand
cccaaaguagcaacaaaua

SEQ ID NO: 95138 - RNA, 19 nt, Homo sapiens
  misc_RNA (1)...(19): siRNA sense strand
gguccuaugggaaugagua

SEQ ID NO: 95139 - RNA, 19 nt, Homo sapiens
  misc_RNA (1)...(19): siRNA sense strand
caagcaauacaaguacuaa

SEQ ID NO: 95140 - RNA, 19 nt, Homo sapiens
  misc_RNA (1)...(19): siRNA sense strand
aauguuggcggacagguua

SEQ ID NO: 95141 - RNA, 19 nt, Homo sapiens
  misc_RNA (1)...(19): siRNA sense strand
ccaaugcauucauauuugc

SEQ ID NO: 95142 - RNA, 19 nt, Homo sapiens
  misc_RNA (1)...(19): siRNA sense strand
acaaauaucaugagagcau

SEQ ID NO: 95143 - RNA, 19 nt, Homo sapiens
  misc_RNA (1)...(19): siRNA sense strand
acaaaucucgcugaccaua

SEQ ID NO: 95144 - RNA, 19 nt, Homo sapiens
  misc_RNA (1)...(19): siRNA sense strand
acacccuacucaauuaaga

SEQ ID NO: 95145 - RNA, 19 nt, Homo sapiens
  misc_RNA (1)...(19): siRNA sense strand
gaacugugcgauaacuucu

SEQ ID NO: 95146 - RNA, 19 nt, Homo sapiens
  misc_RNA (1)...(19): siRNA sense strand
ccuacucaauuaagacaug

SEQ ID NO: 95147 - RNA, 19 nt, Homo sapiens
  misc_RNA (1)...(19): siRNA sense strand
gacaaggacgcgaucuaug

SEQ ID NO: 95148 - RNA, 19 nt, Homo sapiens
  misc_RNA (1)...(19): siRNA sense strand
ccacacccuacucaauuaa

SEQ ID NO: 95149 - RNA, 19 nt, Homo sapiens
  misc_RNA (1)...(19): siRNA sense strand
uccacgaacugugcgauaa

SEQ ID NO: 95150 - RNA, 19 nt, Homo sapiens
  misc_RNA (1)...(19): siRNA sense strand
gaauaguacagcccaugau

SEQ ID NO: 95151 - RNA, 19 nt, Homo sapiens
  misc_RNA (1)...(19): siRNA sense strand
ccaagucagaucaugaaga

SEQ ID NO: 95152 - RNA, 19 nt, Homo sapiens
  misc_RNA (1)...(19): siRNA sense strand
gcuccaagucagaucauga

SEQ ID NO: 95153 - RNA, 19 nt, Homo sapiens
  misc_RNA (1)...(19): siRNA sense strand
gggacaaggacgcgaucua

SEQ ID NO: 95154 - RNA, 19 nt, Homo sapiens
  misc_RNA (1)...(19): siRNA sense strand
guagcaacaaauaucauga

SEQ ID NO: 95155 - RNA, 19 nt, Homo sapiens
  misc_RNA (1)...(19): siRNA sense strand
accgauacauuagcuguuu

SEQ ID NO: 95156 - RNA, 19 nt, Homo sapiens
  misc_RNA (1)...(19): siRNA sense strand
guuuauuaaugccagaaga

SEQ ID NO: 95157 - RNA, 19 nt, Homo sapiens
  misc_RNA (1)...(19): siRNA sense strand
gcaaggggaugguuuagac

SEQ ID NO: 95158 - RNA, 19 nt, Homo sapiens
  misc_RNA (1)...(19): siRNA sense strand
uaacuucugccaccgauac

SEQ ID NO: 95159 - RNA, 19 nt, Homo sapiens
  misc_RNA (1)...(19): siRNA sense strand
ggacagguuauggacauuc

SEQ ID NO: 95160 - RNA, 19 nt, Homo sapiens
  misc_RNA (1)...(19): siRNA sense strand
aauaguacagcccaugauu

SEQ ID NO: 95161 - RNA, 19 nt, Homo sapiens
  misc_RNA (1)...(19): siRNA sense strand
acaaggacgcgaucuaugg

SEQ ID NO: 95162 - RNA, 19 nt, Homo sapiens
  misc_RNA (1)...(19): siRNA sense strand
aaaucucgcugaccauaac

SEQ ID NO: 95163 - RNA, 19 nt, Homo sapiens
  misc_RNA (1)...(19): siRNA sense strand
caaguacuaagguuucauc

SEQ ID NO: 95164 - RNA, 19 nt, Homo sapiens
  misc_RNA (1)...(19): siRNA sense strand
gccagaagaagaauaguac

SEQ ID NO: 95165 - RNA, 19 nt, Homo sapiens
  misc_RNA (1)...(19): siRNA sense strand
accauaacccuucuucuug

SEQ ID NO: 95166 - RNA, 19 nt, Homo sapiens
  misc_RNA (1)...(19): siRNA sense strand
cgaacugugcgauaacuuc

SEQ ID NO: 95167 - RNA, 19 nt, Homo sapiens
  misc_RNA (1)...(19): siRNA sense strand
ucaggcuccuccacaaauc

SEQ ID NO: 95168 - RNA, 19 nt, Homo sapiens
  misc_RNA (1)...(19): siRNA sense strand
uguguuggauggucagcaa

SEQ ID NO: 95169 - RNA, 19 nt, Homo sapiens
  misc_RNA (1)...(19): siRNA sense strand
gucagaucaugaagaacuu

SEQ ID NO: 95170 - RNA, 19 nt, Homo sapiens
  misc_RNA (1)...(19): siRNA sense strand
agaauaguacagcccauga

SEQ ID NO: 95171 - RNA, 19 nt, Homo sapiens
  misc_RNA (1)...(19): siRNA sense strand
acaagcaauacaaguacua

SEQ ID NO: 95172 - RNA, 19 nt, Homo sapiens
  misc_RNA (1)...(19): siRNA sense strand
acgaugaugauccggauaa

SEQ ID NO: 95173 - RNA, 19 nt, Homo sapiens
  misc_RNA (1)...(19): siRNA sense strand
ugccagaagaagaauagua

SEQ ID NO: 95174 - RNA, 19 nt, Homo sapiens
  misc_RNA (1)...(19): siRNA sense strand
ggucuucgccaagcagguu

SEQ ID NO: 95175 - RNA, 19 nt, Homo sapiens
  misc_RNA (1)...(19): siRNA sense strand
gcggagacaacagcaguga

SEQ ID NO: 95176 - RNA, 19 nt, Homo sapiens
  misc_RNA (1)...(19): siRNA sense strand
auacaaguacuaagguuuc

SEQ ID NO: 95177 - RNA, 19 nt, Homo sapiens
  misc_RNA (1)...(19): siRNA sense strand
agcaacaaauaucaugaga

SEQ ID NO: 95178 - RNA, 19 nt, Homo sapiens
  misc_RNA (1)...(19): siRNA sense strand
gaaaagguccacgaacugu

SEQ ID NO: 95179 - RNA, 19 nt, Homo sapiens
  misc_RNA (1)...(19): siRNA sense strand
caaggagcagcauauaguc

SEQ ID NO: 95180 - RNA, 19 nt, Homo sapiens
  misc_RNA (1)...(19): siRNA sense strand
gccaaggagcagcauauag

SEQ ID NO: 95181 - RNA, 19 nt, Homo sapiens
  misc_RNA (1)...(19): siRNA sense strand
uggacaauuugaugauaca

SEQ ID NO: 95182 - RNA, 19 nt, Homo sapiens
  misc_RNA (1)...(19): siRNA sense strand
gguuucaucuuuuggaguu

SEQ ID NO: 95183 - RNA, 19 nt, Homo sapiens
  misc_RNA (1)...(19): siRNA sense strand
cgauacauuagcuguuuga

SEQ ID NO: 95184 - RNA, 19 nt, Homo sapiens
  misc_RNA (1)...(19): siRNA sense strand
ccgauacauuagcuguuug

SEQ ID NO: 95185 - RNA, 19 nt, Homo sapiens
  misc_RNA (1)...(19): siRNA sense strand
gcagcuccaagucagauca

SEQ ID NO: 95186 - RNA, 19 nt, Homo sapiens
  misc_RNA (1)...(19): siRNA sense strand
caauguuggcggacagguu

SEQ ID NO: 95187 - RNA, 19 nt, Homo sapiens
  misc_RNA (1)...(19): siRNA sense strand
auuaaugccagaagaagaa

SEQ ID NO: 95188 - RNA, 19 nt, Homo sapiens
  misc_RNA (1)...(19): siRNA sense strand
uagaaaagguccacgaacu

SEQ ID NO: 95189 - RNA, 19 nt, Homo sapiens
  misc_RNA (1)...(19): siRNA sense strand
cccacaauguuaaauucug

SEQ ID NO: 95190 - RNA, 19 nt, Homo sapiens
  misc_RNA (1)...(19): siRNA sense strand
ccaccacccagccaugaug

SEQ ID NO: 95191 - RNA, 19 nt, Homo sapiens
  misc_RNA (1)...(19): siRNA sense strand
augaugauccggauaagga

SEQ ID NO: 95192 - RNA, 19 nt, Homo sapiens
  misc_RNA (1)...(19): siRNA sense strand
guacuaagguuucaucuuu

SEQ ID NO: 95193 - RNA, 19 nt, Homo sapiens
  misc_RNA (1)...(19): siRNA sense strand
caagucagaucaugaagaa

SEQ ID NO: 95194 - RNA, 19 nt, Homo sapiens
  misc_RNA (1)...(19): siRNA sense strand
ggacauucaugcccaauag

SEQ ID NO: 95195 - RNA, 19 nt, Homo sapiens
  misc_RNA (1)...(19): siRNA sense strand
gauacaagcaauacaagua

SEQ ID NO: 95196 - RNA, 19 nt, Homo sapiens
  misc_RNA (1)...(19): siRNA sense strand
caaaguagcaacaaauauc

SEQ ID NO: 95197 - RNA, 19 nt, Homo sapiens
  misc_RNA (1)...(19): siRNA sense strand
gcacagagccccacaaugu

SEQ ID NO: 95198 - RNA, 19 nt, Homo sapiens
  misc_RNA (1)...(19): siRNA sense strand
gaccauaacccuucuucuu

SEQ ID NO: 95199 - RNA, 19 nt, Homo sapiens
  misc_RNA (1)...(19): siRNA sense strand
ggacaaggacgcgaucuau

SEQ ID NO: 95200 - RNA, 19 nt, Homo sapiens
  misc_RNA (1)...(19): siRNA sense strand
gcuggacaauuugaugaua

SEQ ID NO: 95201 - RNA, 19 nt, Homo sapiens
  misc_RNA (1)...(19): siRNA sense strand
caauacaaguacuaagguu

SEQ ID NO: 95202 - RNA, 19 nt, Homo sapiens
  misc_RNA (1)...(19): siRNA sense strand
ccaucgaccucgucauuga

SEQ ID NO: 95203 - RNA, 19 nt, Homo sapiens
  misc_RNA (1)...(19): siRNA sense strand
gaugauacaagcaauacaa

SEQ ID NO: 95204 - RNA, 19 nt, Homo sapiens
  misc_RNA (1)...(19): siRNA sense strand
cccacacccuacucaauua

SEQ ID NO: 95205 - RNA, 19 nt, Homo sapiens
  misc_RNA (1)...(19): siRNA sense strand
guacaggugacgaugauga

SEQ ID NO: 95206 - RNA, 19 nt, Homo sapiens
  misc_RNA (1)...(19): siRNA sense strand
ccacaauguuaaauucugu

SEQ ID NO: 95207 - RNA, 19 nt, Homo sapiens
  misc_RNA (1)...(19): siRNA sense strand
cccaaugcauucauauuug

SEQ ID NO: 95208 - RNA, 19 nt, Homo sapiens
  misc_RNA (1)...(19): siRNA sense strand
ccaaggagcagcauauagu

SEQ ID NO: 95209 - RNA, 19 nt, Homo sapiens
  misc_RNA (1)...(19): siRNA sense strand
acgaugagcugccccauua

SEQ ID NO: 95210 - RNA, 19 nt, Homo sapiens
  misc_RNA (1)...(19): siRNA sense strand
agacaacaguguagcuuca

SEQ ID NO: 95211 - RNA, 19 nt, Homo sapiens
  misc_RNA (1)...(19): siRNA sense strand
gagcuggacaauuugauga

SEQ ID NO: 95212 - RNA, 19 nt, Homo sapiens
  misc_RNA (1)...(19): siRNA sense strand
gagccaaggagcagcauau

SEQ ID NO: 95213 - RNA, 19 nt, Homo sapiens
  misc_RNA (1)...(19): siRNA sense strand
gcggacagguuauggacau

SEQ ID NO: 95214 - RNA, 19 nt, Homo sapiens
  misc_RNA (1)...(19): siRNA sense strand
gcccaucgaccucgucauu

SEQ ID NO: 95215 - RNA, 19 nt, Homo sapiens
  misc_RNA (1)...(19): siRNA sense strand
ccaaaguagcaacaaauau

SEQ ID NO: 95216 - RNA, 19 nt, Homo sapiens
  misc_RNA (1)...(19): siRNA sense strand
gcaauacaaguacuaaggu

SEQ ID NO: 95217 - RNA, 19 nt, Homo sapiens
  misc_RNA (1)...(19): siRNA sense strand
gacagguuauggacauuca

SEQ ID NO: 95218 - RNA, 19 nt, Homo sapiens
  misc_RNA (1)...(19): siRNA sense strand
uaguacagcccaugauuga

SEQ ID NO: 95219 - RNA, 19 nt, Homo sapiens
  misc_RNA (1)...(19): siRNA sense strand
caaaucucgcugaccauaa

SEQ ID NO: 95220 - RNA, 19 nt, Homo sapiens
  misc_RNA (1)...(19): siRNA sense strand
gcucuggucuuugagaagu

SEQ ID NO: 95221 - RNA, 19 nt, Homo sapiens
  misc_RNA (1)...(19): siRNA sense strand
cccaaaguagcaacaaaua

SEQ ID NO: 95222 - RNA, 19 nt, Homo sapiens
  misc_RNA (1)...(19): siRNA sense strand
gguccuaugggaaugagua

SEQ ID NO: 95223 - RNA, 19 nt, Homo sapiens
  misc_RNA (1)...(19): siRNA sense strand
caagcaauacaaguacuaa

SEQ ID NO: 95224 - RNA, 19 nt, Homo sapiens
  misc_RNA (1)...(19): siRNA sense strand
aauguuggcggacagguua

SEQ ID NO: 95225 - RNA, 19 nt, Homo sapiens
  misc_RNA (1)...(19): siRNA sense strand
ccaaugcauucauauuugc

SEQ ID NO: 95226 - RNA, 19 nt, Homo sapiens
  misc_RNA (1)...(19): siRNA sense strand
acaaauaucaugagagcau

SEQ ID NO: 95227 - RNA, 19 nt, Homo sapiens
  misc_RNA (1)...(19): siRNA sense strand
acaaaucucgcugaccaua

SEQ ID NO: 95228 - RNA, 19 nt, Homo sapiens
  misc_RNA (1)...(19): siRNA sense strand
acacccuacucaauuaaga

SEQ ID NO: 95229 - RNA, 19 nt, Homo sapiens
  misc_RNA (1)...(19): siRNA sense strand
gaacugugcgauaacuucu

SEQ ID NO: 95230 - RNA, 19 nt, Homo sapiens
  misc_RNA (1)...(19): siRNA sense strand
ccuacucaauuaagacaug

SEQ ID NO: 95231 - RNA, 19 nt, Homo sapiens
  misc_RNA (1)...(19): siRNA sense strand
gacaaggacgcgaucuaug

SEQ ID NO: 95232 - RNA, 19 nt, Homo sapiens
  misc_RNA (1)...(19): siRNA sense strand
ccacacccuacucaauuaa

SEQ ID NO: 95233 - RNA, 19 nt, Homo sapiens
  misc_RNA (1)...(19): siRNA sense strand
uccacgaacugugcgauaa

SEQ ID NO: 95234 - RNA, 19 nt, Homo sapiens
  misc_RNA (1)...(19): siRNA sense strand
gaauaguacagcccaugau

SEQ ID NO: 95235 - RNA, 19 nt, Homo sapiens
  misc_RNA (1)...(19): siRNA sense strand
ccaagucagaucaugaaga

SEQ ID NO: 95236 - RNA, 19 nt, Homo sapiens
  misc_RNA (1)...(19): siRNA sense strand
gcuccaagucagaucauga

SEQ ID NO: 95237 - RNA, 19 nt, Homo sapiens
  misc_RNA (1)...(19): siRNA sense strand
gggacaaggacgcgaucua

SEQ ID NO: 95238 - RNA, 19 nt, Homo sapiens
  misc_RNA (1)...(19): siRNA sense strand
guagcaacaaauaucauga

SEQ ID NO: 95239 - RNA, 19 nt, Homo sapiens
  misc_RNA (1)...(19): siRNA sense strand
accgauacauuagcuguuu

SEQ ID NO: 95240 - RNA, 19 nt, Homo sapiens
  misc_RNA (1)...(19): siRNA sense strand
guuuauuaaugccagaaga

SEQ ID NO: 95241 - RNA, 19 nt, Homo sapiens
  misc_RNA (1)...(19): siRNA sense strand
gcaaggggaugguuuagac

SEQ ID NO: 95242 - RNA, 19 nt, Homo sapiens
  misc_RNA (1)...(19): siRNA sense strand
uaacuucugccaccgauac

SEQ ID NO: 95243 - RNA, 19 nt, Homo sapiens
  misc_RNA (1)...(19): siRNA sense strand
ggacagguuauggacauuc

SEQ ID NO: 95244 - RNA, 19 nt, Homo sapiens
  misc_RNA (1)...(19): siRNA sense strand
aauaguacagcccaugauu

SEQ ID NO: 95245 - RNA, 19 nt, Homo sapiens
  misc_RNA (1)...(19): siRNA sense strand
acaaggacgcgaucuaugg

SEQ ID NO: 95246 - RNA, 19 nt, Homo sapiens
  misc_RNA (1)...(19): siRNA sense strand
aaaucucgcugaccauaac

SEQ ID NO: 95247 - RNA, 19 nt, Homo sapiens
  misc_RNA (1)...(19): siRNA sense strand
caaguacuaagguuucauc

SEQ ID NO: 95248 - RNA, 19 nt, Homo sapiens
  misc_RNA (1)...(19): siRNA sense strand
gccagaagaagaauaguac

SEQ ID NO: 95249 - RNA, 19 nt, Homo sapiens
  misc_RNA (1)...(19): siRNA sense strand
accauaacccuucuucuug

SEQ ID NO: 95250 - RNA, 19 nt, Homo sapiens
  misc_RNA (1)...(19): siRNA sense strand
cgaacugugcgauaacuuc

SEQ ID NO: 95251 - RNA, 19 nt, Homo sapiens
  misc_RNA (1)...(19): siRNA sense strand
ucaggcuccuccacaaauc

SEQ ID NO: 95252 - RNA, 19 nt, Homo sapiens
  misc_RNA (1)...(19): siRNA sense strand
uguguuggauggucagcaa

SEQ ID NO: 95253 - RNA, 19 nt, Homo sapiens
  misc_RNA (1)...(19): siRNA sense strand
gucagaucaugaagaacuu

SEQ ID NO: 95254 - RNA, 19 nt, Homo sapiens
  misc_RNA (1)...(19): siRNA sense strand
agaauaguacagcccauga

SEQ ID NO: 95255 - RNA, 19 nt, Homo sapiens
  misc_RNA (1)...(19): siRNA sense strand
acaagcaauacaaguacua

SEQ ID NO: 95256 - RNA, 19 nt, Homo sapiens
  misc_RNA (1)...(19): siRNA sense strand
acgaugaugauccggauaa

SEQ ID NO: 95257 - RNA, 19 nt, Homo sapiens
  misc_RNA (1)...(19): siRNA sense strand
ugccagaagaagaauagua

SEQ ID NO: 95258 - RNA, 19 nt, Homo sapiens
  misc_RNA (1)...(19): siRNA sense strand
ggucuucgccaagcagguu

SEQ ID NO: 95259 - RNA, 19 nt, Homo sapiens
  misc_RNA (1)...(19): siRNA sense strand
gcggagacaacagcaguga

SEQ ID NO: 95260 - RNA, 19 nt, Homo sapiens
  misc_RNA (1)...(19): siRNA sense strand
auacaaguacuaagguuuc

SEQ ID NO: 95261 - RNA, 19 nt, Homo sapiens
  misc_RNA (1)...(19): siRNA sense strand
agcaacaaauaucaugaga

SEQ ID NO: 95262 - RNA, 19 nt, Homo sapiens
  misc_RNA (1)...(19): siRNA sense strand
gaaaagguccacgaacugu

SEQ ID NO: 95263 - RNA, 19 nt, Homo sapiens
  misc_RNA (1)...(19): siRNA sense strand
caaggagcagcauauaguc

SEQ ID NO: 95264 - RNA, 19 nt, Homo sapiens
  misc_RNA (1)...(19): siRNA sense strand
gccaaggagcagcauauag

SEQ ID NO: 95265 - RNA, 19 nt, Homo sapiens
  misc_RNA (1)...(19): siRNA sense strand
uggacaauuugaugauaca

SEQ ID NO: 95266 - RNA, 19 nt, Homo sapiens
  misc_RNA (1)...(19): siRNA sense strand
gguuucaucuuuuggaguu

SEQ ID NO: 95267 - RNA, 19 nt, Homo sapiens
  misc_RNA (1)...(19): siRNA sense strand
cgauacauuagcuguuuga

SEQ ID NO: 95268 - RNA, 19 nt, Homo sapiens
  misc_RNA (1)...(19): siRNA sense strand
ccgauacauuagcuguuug

SEQ ID NO: 95269 - RNA, 19 nt, Homo sapiens
  misc_RNA (1)...(19): siRNA sense strand
gcagcuccaagucagauca

SEQ ID NO: 95270 - RNA, 19 nt, Homo sapiens
  misc_RNA (1)...(19): siRNA sense strand
caauguuggcggacagguu

SEQ ID NO: 95271 - RNA, 19 nt, Homo sapiens
  misc_RNA (1)...(19): siRNA sense strand
auuaaugccagaagaagaa

SEQ ID NO: 95272 - RNA, 19 nt, Homo sapiens
  misc_RNA (1)...(19): siRNA sense strand
uagaaaagguccacgaacu

SEQ ID NO: 95273 - RNA, 19 nt, Homo sapiens
  misc_RNA (1)...(19): siRNA sense strand
cccacaauguuaaauucug

SEQ ID NO: 95274 - RNA, 19 nt, Homo sapiens
  misc_RNA (1)...(19): siRNA sense strand
ccaccacccagccaugaug

SEQ ID NO: 95275 - RNA, 19 nt, Homo sapiens
  misc_RNA (1)...(19): siRNA sense strand
augaugauccggauaagga

SEQ ID NO: 95276 - RNA, 19 nt, Homo sapiens
  misc_RNA (1)...(19): siRNA sense strand
guacuaagguuucaucuuu

SEQ ID NO: 95277 - RNA, 19 nt, Homo sapiens
  misc_RNA (1)...(19): siRNA sense strand
caagucagaucaugaagaa

SEQ ID NO: 95278 - RNA, 19 nt, Homo sapiens
  misc_RNA (1)...(19): siRNA sense strand
gauacaagcaauacaagua

SEQ ID NO: 95279 - RNA, 19 nt, Homo sapiens
  misc_RNA (1)...(19): siRNA sense strand
caaaguagcaacaaauauc

SEQ ID NO: 95280 - RNA, 19 nt, Homo sapiens
  misc_RNA (1)...(19): siRNA sense strand
gaccauaacccuucuucuu

SEQ ID NO: 95281 - RNA, 19 nt, Homo sapiens
  misc_RNA (1)...(19): siRNA sense strand
ggacaaggacgcgaucuau

SEQ ID NO: 95282 - RNA, 19 nt, Homo sapiens
  misc_RNA (1)...(19): siRNA sense strand
gcuggacaauuugaugaua

SEQ ID NO: 95283 - RNA, 19 nt, Homo sapiens
  misc_RNA (1)...(19): siRNA sense strand
caauacaaguacuaagguu

SEQ ID NO: 95284 - RNA, 19 nt, Homo sapiens
  misc_RNA (1)...(19): siRNA sense strand
ccaucgaccucgucauuga

SEQ ID NO: 95285 - RNA, 19 nt, Homo sapiens
  misc_RNA (1)...(19): siRNA sense strand
gaugauacaagcaauacaa

SEQ ID NO: 95286 - RNA, 19 nt, Homo sapiens
  misc_RNA (1)...(19): siRNA sense strand
guacaggugacgaugauga

SEQ ID NO: 95287 - RNA, 19 nt, Homo sapiens
  misc_RNA (1)...(19): siRNA sense strand
ccaaggagcagcauauagu

SEQ ID NO: 95288 - RNA, 19 nt, Homo sapiens
  misc_RNA (1)...(19): siRNA sense strand
acgaugagcugccccauua

SEQ ID NO: 95289 - RNA, 19 nt, Homo sapiens
  misc_RNA (1)...(19): siRNA sense strand
agacaacaguguagcuuca

SEQ ID NO: 95290 - RNA, 19 nt, Homo sapiens
  misc_RNA (1)...(19): siRNA sense strand
gagcuggacaauuugauga

SEQ ID NO: 95291 - RNA, 19 nt, Homo sapiens
  misc_RNA (1)...(19): siRNA sense strand
gagccaaggagcagcauau

SEQ ID NO: 95292 - RNA, 19 nt, Homo sapiens
  misc_RNA (1)...(19): siRNA sense strand
gcccaucgaccucgucauu

SEQ ID NO: 95293 - RNA, 19 nt, Homo sapiens
  misc_RNA (1)...(19): siRNA sense strand
ccaaaguagcaacaaauau

SEQ ID NO: 95294 - RNA, 19 nt, Homo sapiens
  misc_RNA (1)...(19): siRNA sense strand
gcucuggucuuugagaagu

SEQ ID NO: 95295 - RNA, 19 nt, Homo sapiens
  misc_RNA (1)...(19): siRNA sense strand
uaguacagcccaugauuga

SEQ ID NO: 95296 - RNA, 19 nt, Homo sapiens
  misc_RNA (1)...(19): siRNA sense strand
caaaucucgcugaccauaa

SEQ ID NO: 95297 - RNA, 19 nt, Homo sapiens
  misc_RNA (1)...(19): siRNA sense strand
gcaauacaaguacuaaggu

SEQ ID NO: 95298 - RNA, 19 nt, Homo sapiens
  misc_RNA (1)...(19): siRNA sense strand
cccaaaguagcaacaaaua

SEQ ID NO: 95299 - RNA, 19 nt, Homo sapiens
  misc_RNA (1)...(19): siRNA sense strand
caagcaauacaaguacuaa

SEQ ID NO: 95300 - RNA, 19 nt, Homo sapiens
  misc_RNA (1)...(19): siRNA sense strand
acaaauaucaugagagcau

SEQ ID NO: 95301 - RNA, 19 nt, Homo sapiens
  misc_RNA (1)...(19): siRNA sense strand
acaaaucucgcugaccaua

SEQ ID NO: 95302 - RNA, 19 nt, Homo sapiens
  misc_RNA (1)...(19): siRNA sense strand
gaacugugcgauaacuucu

SEQ ID NO: 95303 - RNA, 19 nt, Homo sapiens
  misc_RNA (1)...(19): siRNA sense strand
gacaaggacgcgaucuaug

SEQ ID NO: 95304 - RNA, 19 nt, Homo sapiens
  misc_RNA (1)...(19): siRNA sense strand
uccacgaacugugcgauaa

SEQ ID NO: 95305 - RNA, 19 nt, Homo sapiens
  misc_RNA (1)...(19): siRNA sense strand
gaauaguacagcccaugau

SEQ ID NO: 95306 - RNA, 19 nt, Homo sapiens
  misc_RNA (1)...(19): siRNA sense strand
ccaagucagaucaugaaga

SEQ ID NO: 95307 - RNA, 19 nt, Homo sapiens
  misc_RNA (1)...(19): siRNA sense strand
gcuccaagucagaucauga

SEQ ID NO: 95308 - RNA, 19 nt, Homo sapiens
  misc_RNA (1)...(19): siRNA sense strand
gggacaaggacgcgaucua

SEQ ID NO: 95309 - RNA, 19 nt, Homo sapiens
  misc_RNA (1)...(19): siRNA sense strand
guagcaacaaauaucauga

SEQ ID NO: 95310 - RNA, 19 nt, Homo sapiens
  misc_RNA (1)...(19): siRNA sense strand
accgauacauuagcuguuu

SEQ ID NO: 95311 - RNA, 19 nt, Homo sapiens
  misc_RNA (1)...(19): siRNA sense strand
guuuauuaaugccagaaga

SEQ ID NO: 95312 - RNA, 19 nt, Homo sapiens
  misc_RNA (1)...(19): siRNA sense strand
gcaaggggaugguuuagac

SEQ ID NO: 95313 - RNA, 19 nt, Homo sapiens
  misc_RNA (1)...(19): siRNA sense strand
uaacuucugccaccgauac

SEQ ID NO: 95314 - RNA, 19 nt, Homo sapiens
  misc_RNA (1)...(19): siRNA sense strand
aauaguacagcccaugauu

SEQ ID NO: 95315 - RNA, 19 nt, Homo sapiens
  misc_RNA (1)...(19): siRNA sense strand
acaaggacgcgaucuaugg

SEQ ID NO: 95316 - RNA, 19 nt, Homo sapiens
  misc_RNA (1)...(19): siRNA sense strand
aaaucucgcugaccauaac

SEQ ID NO: 95317 - RNA, 19 nt, Homo sapiens
  misc_RNA (1)...(19): siRNA sense strand
caaguacuaagguuucauc

SEQ ID NO: 95318 - RNA, 19 nt, Homo sapiens
  misc_RNA (1)...(19): siRNA sense strand
gccagaagaagaauaguac

SEQ ID NO: 95319 - RNA, 19 nt, Homo sapiens
  misc_RNA (1)...(19): siRNA sense strand
accauaacccuucuucuug

SEQ ID NO: 95320 - RNA, 19 nt, Homo sapiens
  misc_RNA (1)...(19): siRNA sense strand
cgaacugugcgauaacuuc

SEQ ID NO: 95321 - RNA, 19 nt, Homo sapiens
  misc_RNA (1)...(19): siRNA sense strand
ucaggcuccuccacaaauc

SEQ ID NO: 95322 - RNA, 19 nt, Homo sapiens
  misc_RNA (1)...(19): siRNA sense strand
uguguuggauggucagcaa

SEQ ID NO: 95323 - RNA, 19 nt, Homo sapiens
  misc_RNA (1)...(19): siRNA sense strand
acaagcaauacaaguacua

SEQ ID NO: 95324 - RNA, 19 nt, Homo sapiens
  misc_RNA (1)...(19): siRNA sense strand
agaauaguacagcccauga

SEQ ID NO: 95325 - RNA, 19 nt, Homo sapiens
  misc_RNA (1)...(19): siRNA sense strand
gucagaucaugaagaacuu

SEQ ID NO: 95326 - RNA, 19 nt, Homo sapiens
  misc_RNA (1)...(19): siRNA sense strand
ggucuucgccaagcagguu

SEQ ID NO: 95327 - RNA, 19 nt, Homo sapiens
  misc_RNA (1)...(19): siRNA sense strand
ugccagaagaagaauagua

SEQ ID NO: 95328 - RNA, 19 nt, Homo sapiens
  misc_RNA (1)...(19): siRNA sense strand
acgaugaugauccggauaa

SEQ ID NO: 95329 - RNA, 19 nt, Homo sapiens
  misc_RNA (1)...(19): siRNA sense strand
auacaaguacuaagguuuc

SEQ ID NO: 95330 - RNA, 19 nt, Homo sapiens
  misc_RNA (1)...(19): siRNA sense strand
agcaacaaauaucaugaga

SEQ ID NO: 95331 - RNA, 19 nt, Homo sapiens
  misc_RNA (1)...(19): siRNA sense strand
gcggagacaacagcaguga

SEQ ID NO: 95332 - RNA, 19 nt, Homo sapiens
  misc_RNA (1)...(19): siRNA sense strand
gguuucaucuuuuggaguu

SEQ ID NO: 95333 - RNA, 19 nt, Homo sapiens
  misc_RNA (1)...(19): siRNA sense strand
caaggagcagcauauaguc

SEQ ID NO: 95334 - RNA, 19 nt, Homo sapiens
  misc_RNA (1)...(19): siRNA sense strand
gccaaggagcagcauauag

SEQ ID NO: 95335 - RNA, 19 nt, Homo sapiens
  misc_RNA (1)...(19): siRNA sense strand
cgauacauuagcuguuuga

SEQ ID NO: 95336 - RNA, 19 nt, Homo sapiens
  misc_RNA (1)...(19): siRNA sense strand
ccgauacauuagcuguuug

SEQ ID NO: 95337 - RNA, 19 nt, Homo sapiens
  misc_RNA (1)...(19): siRNA sense strand
uggacaauuugaugauaca

SEQ ID NO: 95338 - RNA, 19 nt, Homo sapiens
  misc_RNA (1)...(19): siRNA sense strand
gaaaagguccacgaacugu

SEQ ID NO: 95339 - RNA, 19 nt, Homo sapiens
  misc_RNA (1)...(19): siRNA sense strand
gcagcuccaagucagauca

SEQ ID NO: 95340 - RNA, 19 nt, Homo sapiens
  misc_RNA (1)...(19): siRNA sense strand
auuaaugccagaagaagaa

SEQ ID NO: 95341 - RNA, 19 nt, Homo sapiens
  misc_RNA (1)...(19): siRNA sense strand
uagaaaagguccacgaacu

SEQ ID NO: 95342 - RNA, 19 nt, Homo sapiens
  misc_RNA (1)...(19): siRNA sense strand
augaugauccggauaagga

SEQ ID NO: 95343 - RNA, 19 nt, Homo sapiens
  misc_RNA (1)...(19): siRNA sense strand
guacuaagguuucaucuuu

SEQ ID NO: 95344 - RNA, 19 nt, Homo sapiens
  misc_RNA (1)...(19): siRNA sense strand
caagucagaucaugaagaa

SEQ ID NO: 95345 - RNA, 19 nt, Homo sapiens
  misc_RNA (1)...(19): siRNA sense strand
gauacaagcaauacaagua

SEQ ID NO: 95346 - RNA, 19 nt, Homo sapiens
  misc_RNA (1)...(19): siRNA sense strand
caaaguagcaacaaauauc

SEQ ID NO: 95347 - RNA, 19 nt, Homo sapiens
  misc_RNA (1)...(19): siRNA sense strand
gaccauaacccuucuucuu

SEQ ID NO: 95348 - RNA, 19 nt, Homo sapiens
  misc_RNA (1)...(19): siRNA sense strand
ggacaaggacgcgaucuau

SEQ ID NO: 95349 - RNA, 19 nt, Homo sapiens
  misc_RNA (1)...(19): siRNA sense strand
gcuggacaauuugaugaua

SEQ ID NO: 95350 - RNA, 19 nt, Homo sapiens
  misc_RNA (1)...(19): siRNA sense strand
caauacaaguacuaagguu

SEQ ID NO: 95351 - RNA, 19 nt, Homo sapiens
  misc_RNA (1)...(19): siRNA sense strand
ccaucgaccucgucauuga

SEQ ID NO: 95352 - RNA, 19 nt, Homo sapiens
  misc_RNA (1)...(19): siRNA sense strand
gaugauacaagcaauacaa

SEQ ID NO: 95353 - RNA, 19 nt, Homo sapiens
  misc_RNA (1)...(19): siRNA sense strand
guacaggugacgaugauga

SEQ ID NO: 95354 - RNA, 19 nt, Homo sapiens
  misc_RNA (1)...(19): siRNA sense strand
ccaaggagcagcauauagu

SEQ ID NO: 95355 - RNA, 19 nt, Homo sapiens
  misc_RNA (1)...(19): siRNA sense strand
agacaacaguguagcuuca

SEQ ID NO: 95356 - RNA, 19 nt, Homo sapiens
  misc_RNA (1)...(19): siRNA sense strand
gagcuggacaauuugauga

SEQ ID NO: 95357 - RNA, 19 nt, Homo sapiens
  misc_RNA (1)...(19): siRNA sense strand
gagccaaggagcagcauau

SEQ ID NO: 95358 - RNA, 19 nt, Homo sapiens
  misc_RNA (1)...(19): siRNA sense strand
gcccaucgaccucgucauu

SEQ ID NO: 95359 - RNA, 19 nt, Homo sapiens
  misc_RNA (1)...(19): siRNA sense strand
ccaaaguagcaacaaauau

SEQ ID NO: 95360 - RNA, 19 nt, Homo sapiens
  misc_RNA (1)...(19): siRNA sense strand
gcucuggucuuugagaagu

SEQ ID NO: 95361 - RNA, 19 nt, Homo sapiens
  misc_RNA (1)...(19): siRNA sense strand
uaguacagcccaugauuga

SEQ ID NO: 95362 - RNA, 19 nt, Homo sapiens
  misc_RNA (1)...(19): siRNA sense strand
caaaucucgcugaccauaa

SEQ ID NO: 95363 - RNA, 19 nt, Homo sapiens
  misc_RNA (1)...(19): siRNA sense strand
gcaauacaaguacuaaggu

SEQ ID NO: 95364 - RNA, 19 nt, Homo sapiens
  misc_RNA (1)...(19): siRNA sense strand
cccaaaguagcaacaaaua

SEQ ID NO: 95365 - RNA, 19 nt, Homo sapiens
  misc_RNA (1)...(19): siRNA sense strand
caagcaauacaaguacuaa

SEQ ID NO: 95366 - RNA, 19 nt, Homo sapiens
  misc_RNA (1)...(19): siRNA sense strand
acaaauaucaugagagcau

SEQ ID NO: 95367 - RNA, 19 nt, Homo sapiens
  misc_RNA (1)...(19): siRNA sense strand
acaaaucucgcugaccaua

SEQ ID NO: 95368 - RNA, 19 nt, Homo sapiens
  misc_RNA (1)...(19): siRNA sense strand
gaacugugcgauaacuucu

SEQ ID NO: 95369 - RNA, 19 nt, Homo sapiens
  misc_RNA (1)...(19): siRNA sense strand
gacaaggacgcgaucuaug

SEQ ID NO: 95370 - RNA, 19 nt, Homo sapiens
  misc_RNA (1)...(19): siRNA sense strand
uccacgaacugugcgauaa

SEQ ID NO: 95371 - RNA, 19 nt, Homo sapiens
  misc_RNA (1)...(19): siRNA sense strand
gaauaguacagcccaugau

SEQ ID NO: 95372 - RNA, 19 nt, Homo sapiens
  misc_RNA (1)...(19): siRNA sense strand
ccaagucagaucaugaaga

SEQ ID NO: 95373 - RNA, 19 nt, Homo sapiens
  misc_RNA (1)...(19): siRNA sense strand
gcuccaagucagaucauga

SEQ ID NO: 95374 - RNA, 19 nt, Homo sapiens
  misc_RNA (1)...(19): siRNA sense strand
gggacaaggacgcgaucua

SEQ ID NO: 95375 - RNA, 19 nt, Homo sapiens
  misc_RNA (1)...(19): siRNA sense strand
guagcaacaaauaucauga

SEQ ID NO: 95376 - RNA, 19 nt, Homo sapiens
  misc_RNA (1)...(19): siRNA sense strand
accgauacauuagcuguuu

SEQ ID NO: 95377 - RNA, 19 nt, Homo sapiens
  misc_RNA (1)...(19): siRNA sense strand
guuuauuaaugccagaaga

SEQ ID NO: 95378 - RNA, 19 nt, Homo sapiens
  misc_RNA (1)...(19): siRNA sense strand
gcaaggggaugguuuagac

SEQ ID NO: 95379 - RNA, 19 nt, Homo sapiens
  misc_RNA (1)...(19): siRNA sense strand
uaacuucugccaccgauac

SEQ ID NO: 95380 - RNA, 19 nt, Homo sapiens
  misc_RNA (1)...(19): siRNA sense strand
aauaguacagcccaugauu

SEQ ID NO: 95381 - RNA, 19 nt, Homo sapiens
  misc_RNA (1)...(19): siRNA sense strand
aaaucucgcugaccauaac

SEQ ID NO: 95382 - RNA, 19 nt, Homo sapiens
  misc_RNA (1)...(19): siRNA sense strand
acaaggacgcgaucuaugg

SEQ ID NO: 95383 - RNA, 19 nt, Homo sapiens
  misc_RNA (1)...(19): siRNA sense strand
caaguacuaagguuucauc

SEQ ID NO: 95384 - RNA, 19 nt, Homo sapiens
  misc_RNA (1)...(19): siRNA sense strand
gccagaagaagaauaguac

SEQ ID NO: 95385 - RNA, 19 nt, Homo sapiens
  misc_RNA (1)...(19): siRNA sense strand
accauaacccuucuucuug

SEQ ID NO: 95386 - RNA, 19 nt, Homo sapiens
  misc_RNA (1)...(19): siRNA sense strand
cgaacugugcgauaacuuc

SEQ ID NO: 95387 - RNA, 19 nt, Homo sapiens
  misc_RNA (1)...(19): siRNA sense strand
ucaggcuccuccacaaauc

SEQ ID NO: 95388 - RNA, 19 nt, Homo sapiens
  misc_RNA (1)...(19): siRNA sense strand
uguguuggauggucagcaa

SEQ ID NO: 95389 - RNA, 19 nt, Homo sapiens
  misc_RNA (1)...(19): siRNA sense strand
acaagcaauacaaguacua

SEQ ID NO: 95390 - RNA, 19 nt, Homo sapiens
  misc_RNA (1)...(19): siRNA sense strand
agaauaguacagcccauga

SEQ ID NO: 95391 - RNA, 19 nt, Homo sapiens
  misc_RNA (1)...(19): siRNA sense strand
gucagaucaugaagaacuu

SEQ ID NO: 95392 - RNA, 19 nt, Homo sapiens
  misc_RNA (1)...(19): siRNA sense strand
ggucuucgccaagcagguu

SEQ ID NO: 95393 - RNA, 19 nt, Homo sapiens
  misc_RNA (1)...(19): siRNA sense strand
ugccagaagaagaauagua

SEQ ID NO: 95394 - RNA, 19 nt, Homo sapiens
  misc_RNA (1)...(19): siRNA sense strand
acgaugaugauccggauaa

SEQ ID NO: 95395 - RNA, 19 nt, Homo sapiens
  misc_RNA (1)...(19): siRNA sense strand
auacaaguacuaagguuuc

SEQ ID NO: 95396 - RNA, 19 nt, Homo sapiens
  misc_RNA (1)...(19): siRNA sense strand
agcaacaaauaucaugaga

SEQ ID NO: 95397 - RNA, 19 nt, Homo sapiens
  misc_RNA (1)...(19): siRNA sense strand
gcggagacaacagcaguga

SEQ ID NO: 95398 - RNA, 19 nt, Homo sapiens
  misc_RNA (1)...(19): siRNA sense strand
gguuucaucuuuuggaguu

SEQ ID NO: 95399 - RNA, 19 nt, Homo sapiens
  misc_RNA (1)...(19): siRNA sense strand
caaggagcagcauauaguc

SEQ ID NO: 95400 - RNA, 19 nt, Homo sapiens
  misc_RNA (1)...(19): siRNA sense strand
gccaaggagcagcauauag

SEQ ID NO: 95401 - RNA, 19 nt, Homo sapiens
  misc_RNA (1)...(19): siRNA sense strand
uggacaauuugaugauaca

SEQ ID NO: 95402 - RNA, 19 nt, Homo sapiens
  misc_RNA (1)...(19): siRNA sense strand
cgauacauuagcuguuuga

SEQ ID NO: 95403 - RNA, 19 nt, Homo sapiens
  misc_RNA (1)...(19): siRNA sense strand
ccgauacauuagcuguuug

SEQ ID NO: 95404 - RNA, 19 nt, Homo sapiens
  misc_RNA (1)...(19): siRNA sense strand
gaaaagguccacgaacugu

SEQ ID NO: 95405 - RNA, 19 nt, Homo sapiens
  misc_RNA (1)...(19): siRNA sense strand
gcagcuccaagucagauca

SEQ ID NO: 95406 - RNA, 19 nt, Homo sapiens
  misc_RNA (1)...(19): siRNA sense strand
auuaaugccagaagaagaa

SEQ ID NO: 95407 - RNA, 19 nt, Homo sapiens
  misc_RNA (1)...(19): siRNA sense strand
uagaaaagguccacgaacu

SEQ ID NO: 95408 - RNA, 19 nt, Homo sapiens
  misc_RNA (1)...(19): siRNA sense strand
augaugauccggauaagga

SEQ ID NO: 95409 - RNA, 19 nt, Homo sapiens
  misc_RNA (1)...(19): siRNA sense strand
guacuaagguuucaucuuu

SEQ ID NO: 95410 - RNA, 19 nt, Homo sapiens
  misc_RNA (1)...(19): siRNA sense strand
caagucagaucaugaagaa

SEQ ID NO: 95411 - RNA, 19 nt, Homo sapiens
  misc_RNA (1)...(19): siRNA sense strand
gauacaagcaauacaagua

SEQ ID NO: 95412 - RNA, 19 nt, Homo sapiens
  misc_RNA (1)...(19): siRNA sense strand
caaaguagcaacaaauauc

SEQ ID NO: 95413 - RNA, 19 nt, Homo sapiens
  misc_RNA (1)...(19): siRNA sense strand
gaccauaacccuucuucuu

SEQ ID NO: 95414 - RNA, 19 nt, Homo sapiens
  misc_RNA (1)...(19): siRNA sense strand
gcuggacaauuugaugaua

SEQ ID NO: 95415 - RNA, 19 nt, Homo sapiens
  misc_RNA (1)...(19): siRNA sense strand
caauacaaguacuaagguu

SEQ ID NO: 95416 - RNA, 19 nt, Homo sapiens
  misc_RNA (1)...(19): siRNA sense strand
ccaucgaccucgucauuga

SEQ ID NO: 95417 - RNA, 19 nt, Homo sapiens
  misc_RNA (1)...(19): siRNA sense strand
gaugauacaagcaauacaa

SEQ ID NO: 95418 - RNA, 19 nt, Homo sapiens
  misc_RNA (1)...(19): siRNA sense strand
guacaggugacgaugauga

SEQ ID NO: 95419 - RNA, 19 nt, Homo sapiens
  misc_RNA (1)...(19): siRNA sense strand
ccaaggagcagcauauagu

SEQ ID NO: 95420 - RNA, 19 nt, Homo sapiens
  misc_RNA (1)...(19): siRNA sense strand
agacaacaguguagcuuca

SEQ ID NO: 95421 - RNA, 19 nt, Homo sapiens
  misc_RNA (1)...(19): siRNA sense strand
gagcuggacaauuugauga

SEQ ID NO: 95422 - RNA, 19 nt, Homo sapiens
  misc_RNA (1)...(19): siRNA sense strand
gagccaaggagcagcauau

SEQ ID NO: 95423 - RNA, 19 nt, Homo sapiens
  misc_RNA (1)...(19): siRNA sense strand
gcccaucgaccucgucauu

SEQ ID NO: 95424 - RNA, 19 nt, Homo sapiens
  misc_RNA (1)...(19): siRNA sense strand
ccaaaguagcaacaaauau

SEQ ID NO: 95425 - RNA, 19 nt, Homo sapiens
  misc_RNA (1)...(19): siRNA sense strand
gcaauacaaguacuaaggu

SEQ ID NO: 95426 - RNA, 19 nt, Homo sapiens
  misc_RNA (1)...(19): siRNA sense strand
uaguacagcccaugauuga

SEQ ID NO: 95427 - RNA, 19 nt, Homo sapiens
  misc_RNA (1)...(19): siRNA sense strand
caaaucucgcugaccauaa

SEQ ID NO: 95428 - RNA, 19 nt, Homo sapiens
  misc_RNA (1)...(19): siRNA sense strand
gcucuggucuuugagaagu

SEQ ID NO: 95429 - RNA, 19 nt, Homo sapiens
  misc_RNA (1)...(19): siRNA sense strand
cccaaaguagcaacaaaua

SEQ ID NO: 95430 - RNA, 19 nt, Homo sapiens
  misc_RNA (1)...(19): siRNA sense strand
caagcaauacaaguacuaa

SEQ ID NO: 95431 - RNA, 19 nt, Homo sapiens
  misc_RNA (1)...(19): siRNA sense strand
acaaauaucaugagagcau

SEQ ID NO: 95432 - RNA, 19 nt, Homo sapiens
  misc_RNA (1)...(19): siRNA sense strand
acaaaucucgcugaccaua

SEQ ID NO: 95433 - RNA, 19 nt, Homo sapiens
  misc_RNA (1)...(19): siRNA sense strand
gaacugugcgauaacuucu

SEQ ID NO: 95434 - RNA, 19 nt, Homo sapiens
  misc_RNA (1)...(19): siRNA sense strand
uccacgaacugugcgauaa

SEQ ID NO: 95435 - RNA, 19 nt, Homo sapiens
  misc_RNA (1)...(19): siRNA sense strand
gaauaguacagcccaugau

SEQ ID NO: 95436 - RNA, 19 nt, Homo sapiens
  misc_RNA (1)...(19): siRNA sense strand
ccaagucagaucaugaaga

SEQ ID NO: 95437 - RNA, 19 nt, Homo sapiens
  misc_RNA (1)...(19): siRNA sense strand
gcuccaagucagaucauga

SEQ ID NO: 95438 - RNA, 19 nt, Homo sapiens
  misc_RNA (1)...(19): siRNA sense strand
guagcaacaaauaucauga

SEQ ID NO: 95439 - RNA, 19 nt, Homo sapiens
  misc_RNA (1)...(19): siRNA sense strand
accgauacauuagcuguuu

SEQ ID NO: 95440 - RNA, 19 nt, Homo sapiens
  misc_RNA (1)...(19): siRNA sense strand
guuuauuaaugccagaaga

SEQ ID NO: 95441 - RNA, 19 nt, Homo sapiens
  misc_RNA (1)...(19): siRNA sense strand
gcaaggggaugguuuagac

SEQ ID NO: 95442 - RNA, 19 nt, Homo sapiens
  misc_RNA (1)...(19): siRNA sense strand
uaacuucugccaccgauac

SEQ ID NO: 95443 - RNA, 19 nt, Homo sapiens
  misc_RNA (1)...(19): siRNA sense strand
aauaguacagcccaugauu

SEQ ID NO: 95444 - RNA, 19 nt, Homo sapiens
  misc_RNA (1)...(19): siRNA sense strand
aaaucucgcugaccauaac

SEQ ID NO: 95445 - RNA, 19 nt, Homo sapiens
  misc_RNA (1)...(19): siRNA sense strand
caaguacuaagguuucauc

SEQ ID NO: 95446 - RNA, 19 nt, Homo sapiens
  misc_RNA (1)...(19): siRNA sense strand
gccagaagaagaauaguac

SEQ ID NO: 95447 - RNA, 19 nt, Homo sapiens
  misc_RNA (1)...(19): siRNA sense strand
accauaacccuucuucuug

SEQ ID NO: 95448 - RNA, 19 nt, Homo sapiens
  misc_RNA (1)...(19): siRNA sense strand
cgaacugugcgauaacuuc

SEQ ID NO: 95449 - RNA, 19 nt, Homo sapiens
  misc_RNA (1)...(19): siRNA sense strand
ucaggcuccuccacaaauc

SEQ ID NO: 95450 - RNA, 19 nt, Homo sapiens
  misc_RNA (1)...(19): siRNA sense strand
uguguuggauggucagcaa

SEQ ID NO: 95451 - RNA, 19 nt, Homo sapiens
  misc_RNA (1)...(19): siRNA sense strand
gucagaucaugaagaacuu

SEQ ID NO: 95452 - RNA, 19 nt, Homo sapiens
  misc_RNA (1)...(19): siRNA sense strand
agaauaguacagcccauga

SEQ ID NO: 95453 - RNA, 19 nt, Homo sapiens
  misc_RNA (1)...(19): siRNA sense strand
acaagcaauacaaguacua

SEQ ID NO: 95454 - RNA, 19 nt, Homo sapiens
  misc_RNA (1)...(19): siRNA sense strand
acgaugaugauccggauaa

SEQ ID NO: 95455 - RNA, 19 nt, Homo sapiens
  misc_RNA (1)...(19): siRNA sense strand
ggucuucgccaagcagguu

SEQ ID NO: 95456 - RNA, 19 nt, Homo sapiens
  misc_RNA (1)...(19): siRNA sense strand
ugccagaagaagaauagua

SEQ ID NO: 95457 - RNA, 19 nt, Homo sapiens
  misc_RNA (1)...(19): siRNA sense strand
auacaaguacuaagguuuc

SEQ ID NO: 95458 - RNA, 19 nt, Homo sapiens
  misc_RNA (1)...(19): siRNA sense strand
agcaacaaauaucaugaga

SEQ ID NO: 95459 - RNA, 19 nt, Homo sapiens
  misc_RNA (1)...(19): siRNA sense strand
gcggagacaacagcaguga

SEQ ID NO: 95460 - RNA, 19 nt, Homo sapiens
  misc_RNA (1)...(19): siRNA sense strand
ccgauacauuagcuguuug

SEQ ID NO: 95461 - RNA, 19 nt, Homo sapiens
  misc_RNA (1)...(19): siRNA sense strand
caaggagcagcauauaguc

SEQ ID NO: 95462 - RNA, 19 nt, Homo sapiens
  misc_RNA (1)...(19): siRNA sense strand
gguuucaucuuuuggaguu

SEQ ID NO: 95463 - RNA, 19 nt, Homo sapiens
  misc_RNA (1)...(19): siRNA sense strand
gccaaggagcagcauauag

SEQ ID NO: 95464 - RNA, 19 nt, Homo sapiens
  misc_RNA (1)...(19): siRNA sense strand
uggacaauuugaugauaca

SEQ ID NO: 95465 - RNA, 19 nt, Homo sapiens
  misc_RNA (1)...(19): siRNA sense strand
gaaaagguccacgaacugu

SEQ ID NO: 95466 - RNA, 19 nt, Homo sapiens
  misc_RNA (1)...(19): siRNA sense strand
cgauacauuagcuguuuga

SEQ ID NO: 95467 - RNA, 19 nt, Homo sapiens
  misc_RNA (1)...(19): siRNA sense strand
gcagcuccaagucagauca

SEQ ID NO: 95468 - RNA, 19 nt, Homo sapiens
  misc_RNA (1)...(19): siRNA sense strand
auuaaugccagaagaagaa

SEQ ID NO: 95469 - RNA, 19 nt, Homo sapiens
  misc_RNA (1)...(19): siRNA sense strand
augaugauccggauaagga

SEQ ID NO: 95470 - RNA, 19 nt, Homo sapiens
  misc_RNA (1)...(19): siRNA sense strand
uagaaaagguccacgaacu

SEQ ID NO: 95471 - RNA, 19 nt, Homo sapiens
  misc_RNA (1)...(19): siRNA sense strand
gauagaagcucaagcauga

SEQ ID NO: 95472 - RNA, 19 nt, Homo sapiens
  misc_RNA (1)...(19): siRNA sense strand
gauaugagaccaugaagaa

SEQ ID NO: 95473 - RNA, 19 nt, Homo sapiens
  misc_RNA (1)...(19): siRNA sense strand
aaacucagcuuuaugacaa

SEQ ID NO: 95474 - RNA, 19 nt, Homo sapiens
  misc_RNA (1)...(19): siRNA sense strand
ccaagcagguccaauuuga

SEQ ID NO: 95475 - RNA, 19 nt, Homo sapiens
  misc_RNA (1)...(19): siRNA sense strand
uaaagaacuugcagcauga

SEQ ID NO: 95476 - RNA, 19 nt, Homo sapiens
  misc_RNA (1)...(19): siRNA sense strand
gagcuucccugacaacaga

SEQ ID NO: 95477 - RNA, 19 nt, Homo sapiens
  misc_RNA (1)...(19): siRNA sense strand
gcccagagcuucccugaca

SEQ ID NO: 95478 - RNA, 19 nt, Homo sapiens
  misc_RNA (1)...(19): siRNA sense strand
gcaaacgccugcagacgau

SEQ ID NO: 95479 - RNA, 19 nt, Homo sapiens
  misc_RNA (1)...(19): siRNA sense strand
ggacagaaaccauaacagu

SEQ ID NO: 95480 - RNA, 19 nt, Homo sapiens
  misc_RNA (1)...(19): siRNA sense strand
gggaaacucagcuuuauga

SEQ ID NO: 95481 - RNA, 19 nt, Homo sapiens
  misc_RNA (1)...(19): siRNA sense strand
gagauccaguugcuaaaga

SEQ ID NO: 95482 - RNA, 19 nt, Homo sapiens
  misc_RNA (1)...(19): siRNA sense strand
agacacaggucacucaaau

SEQ ID NO: 95483 - RNA, 19 nt, Homo sapiens
  misc_RNA (1)...(19): siRNA sense strand
gaaucaaguucgagcacaa

SEQ ID NO: 95484 - RNA, 19 nt, Homo sapiens
  misc_RNA (1)...(19): siRNA sense strand
gacgugaacuugcuuccaa

SEQ ID NO: 95485 - RNA, 19 nt, Homo sapiens
  misc_RNA (1)...(19): siRNA sense strand
caacagacaggaauacuca

SEQ ID NO: 95486 - RNA, 19 nt, Homo sapiens
  misc_RNA (1)...(19): siRNA sense strand
gagaagacccugaccaucu

SEQ ID NO: 95487 - RNA, 19 nt, Homo sapiens
  misc_RNA (1)...(19): siRNA sense strand
caaggugacaacaguauuu

SEQ ID NO: 95488 - RNA, 19 nt, Homo sapiens
  misc_RNA (1)...(19): siRNA sense strand
gcacaaggugacaacagua

SEQ ID NO: 95489 - RNA, 19 nt, Homo sapiens
  misc_RNA (1)...(19): siRNA sense strand
cuacagugauggcagaaga

SEQ ID NO: 95490 - RNA, 19 nt, Homo sapiens
  misc_RNA (1)...(19): siRNA sense strand
gcacaaauggcgagaacau

SEQ ID NO: 95491 - RNA, 19 nt, Homo sapiens
  misc_RNA (1)...(19): siRNA sense strand
gacagaaaccauaacaguu

SEQ ID NO: 95492 - RNA, 19 nt, Homo sapiens
  misc_RNA (1)...(19): siRNA sense strand
gagcacaaauggcgagaac

SEQ ID NO: 95493 - RNA, 19 nt, Homo sapiens
  misc_RNA (1)...(19): siRNA sense strand
uggacaaccucuugaucua

SEQ ID NO: 95494 - RNA, 19 nt, Homo sapiens
  misc_RNA (1)...(19): siRNA sense strand
gaaacucagcuuuaugaca

SEQ ID NO: 95495 - RNA, 19 nt, Homo sapiens
  misc_RNA (1)...(19): siRNA sense strand
gacaaccucuugaucuaca

SEQ ID NO: 95496 - RNA, 19 nt, Homo sapiens
  misc_RNA (1)...(19): siRNA sense strand
caaagacacaggucacuca

SEQ ID NO: 95497 - RNA, 19 nt, Homo sapiens
  misc_RNA (1)...(19): siRNA sense strand
cgagggcuauggaaggaaa

SEQ ID NO: 95498 - RNA, 19 nt, Homo sapiens
  misc_RNA (1)...(19): siRNA sense strand
ccaauuugauccagacagu

SEQ ID NO: 95499 - RNA, 19 nt, Homo sapiens
  misc_RNA (1)...(19): siRNA sense strand
cacaaggacuacagugaug

SEQ ID NO: 95500 - RNA, 19 nt, Homo sapiens
  misc_RNA (1)...(19): siRNA sense strand
gaugagcccugaggugauc

SEQ ID NO: 95501 - RNA, 19 nt, Homo sapiens
  misc_RNA (1)...(19): siRNA sense strand
gaagcaggcaccucucugu

SEQ ID NO: 95502 - RNA, 19 nt, Homo sapiens
  misc_RNA (1)...(19): siRNA sense strand
aagaccaguugaaggcuua

SEQ ID NO: 95503 - RNA, 19 nt, Homo sapiens
  misc_RNA (1)...(19): siRNA sense strand
ugugaaauaugaagaugug

SEQ ID NO: 95504 - RNA, 19 nt, Homo sapiens
  misc_RNA (1)...(19): siRNA sense strand
gaaaguacacgcggcagau

SEQ ID NO: 95505 - RNA, 19 nt, Homo sapiens
  misc_RNA (1)...(19): siRNA sense strand
gaaaagccuuaggauauug

SEQ ID NO: 95506 - RNA, 19 nt, Homo sapiens
  misc_RNA (1)...(19): siRNA sense strand
gaucuacauuacaugaaca

SEQ ID NO: 95507 - RNA, 19 nt, Homo sapiens
  misc_RNA (1)...(19): siRNA sense strand
acagaaaccauaacaguuc

SEQ ID NO: 95508 - RNA, 19 nt, Homo sapiens
  misc_RNA (1)...(19): siRNA sense strand
ggacgaacaggaggcauug

SEQ ID NO: 95509 - RNA, 19 nt, Homo sapiens
  misc_RNA (1)...(19): siRNA sense strand
uugcacagcucauguacug

SEQ ID NO: 95510 - RNA, 19 nt, Homo sapiens
  misc_RNA (1)...(19): siRNA sense strand
cagagagcgugacccgaaa

SEQ ID NO: 95511 - RNA, 19 nt, Homo sapiens
  misc_RNA (1)...(19): siRNA sense strand
gaacaggaggcauugaacu

SEQ ID NO: 95512 - RNA, 19 nt, Homo sapiens
  misc_RNA (1)...(19): siRNA sense strand
acaccagcaucaacaguga

SEQ ID NO: 95513 - RNA, 19 nt, Homo sapiens
  misc_RNA (1)...(19): siRNA sense strand
acaaugagcucuccauccu

SEQ ID NO: 95514 - RNA, 19 nt, Homo sapiens
  misc_RNA (1)...(19): siRNA sense strand
gggcagaguaugaagcuau

SEQ ID NO: 95515 - RNA, 19 nt, Homo sapiens
  misc_RNA (1)...(19): siRNA sense strand
uggagaugcugacagagaa

SEQ ID NO: 95516 - RNA, 19 nt, Homo sapiens
  misc_RNA (1)...(19): siRNA sense strand
ggaaugugccaaccaaguc

SEQ ID NO: 95517 - RNA, 19 nt, Homo sapiens
  misc_RNA (1)...(19): siRNA sense strand
gaucgggaaacucagcuuu

SEQ ID NO: 95518 - RNA, 19 nt, Homo sapiens
  misc_RNA (1)...(19): siRNA sense strand
acacaggucacucaaauag

SEQ ID NO: 95519 - RNA, 19 nt, Homo sapiens
  misc_RNA (1)...(19): siRNA sense strand
gcagagugacgucagaauc

SEQ ID NO: 95520 - RNA, 19 nt, Homo sapiens
  misc_RNA (1)...(19): siRNA sense strand
agaggaaugugccaaccaa

SEQ ID NO: 95521 - RNA, 19 nt, Homo sapiens
  misc_RNA (1)...(19): siRNA sense strand
ugaacucaaucaugaacga

SEQ ID NO: 95522 - RNA, 19 nt, Homo sapiens
  misc_RNA (1)...(19): siRNA sense strand
ugaaaagccuuaggauauu

SEQ ID NO: 95523 - RNA, 19 nt, Homo sapiens
  misc_RNA (1)...(19): siRNA sense strand
gacacaggucacucaaaua

SEQ ID NO: 95524 - RNA, 19 nt, Homo sapiens
  misc_RNA (1)...(19): siRNA sense strand
ccagacaggugcggaucaa

SEQ ID NO: 95525 - RNA, 19 nt, Homo sapiens
  misc_RNA (1)...(19): siRNA sense strand
ggauaugagaccaugaaga

SEQ ID NO: 95526 - RNA, 19 nt, Homo sapiens
  misc_RNA (1)...(19): siRNA sense strand
agacucugcugggaaugua

SEQ ID NO: 95527 - RNA, 19 nt, Homo sapiens
  misc_RNA (1)...(19): siRNA sense strand
gagcgugacccgaaaguac

SEQ ID NO: 95528 - RNA, 19 nt, Homo sapiens
  misc_RNA (1)...(19): siRNA sense strand
ccacaaggacuacagugau

SEQ ID NO: 95529 - RNA, 19 nt, Homo sapiens
  misc_RNA (1)...(19): siRNA sense strand
agacaggaauacucagauc

SEQ ID NO: 95530 - RNA, 19 nt, Homo sapiens
  misc_RNA (1)...(19): siRNA sense strand
gauggcagaagaacauuuc

SEQ ID NO: 95531 - RNA, 19 nt, Homo sapiens
  misc_RNA (1)...(19): siRNA sense strand
cagcugcccucccacaucu

SEQ ID NO: 95532 - RNA, 19 nt, Homo sapiens
  misc_RNA (1)...(19): siRNA sense strand
ggcagaguaugaagcuaug

SEQ ID NO: 95533 - RNA, 19 nt, Homo sapiens
  misc_RNA (1)...(19): siRNA sense strand
gcacugugguggagaugcu

SEQ ID NO: 95534 - RNA, 19 nt, Homo sapiens
  misc_RNA (1)...(19): siRNA sense strand
ggcacacccuacuggauga

SEQ ID NO: 95535 - RNA, 19 nt, Homo sapiens
  misc_RNA (1)...(19): siRNA sense strand
ggagugcgagauccaguug

SEQ ID NO: 95536 - RNA, 19 nt, Homo sapiens
  misc_RNA (1)...(19): siRNA sense strand
cagagugacgucagaauca

SEQ ID NO: 95537 - RNA, 19 nt, Homo sapiens
  misc_RNA (1)...(19): siRNA sense strand
uguggaggcucgccagaga

SEQ ID NO: 95538 - RNA, 19 nt, Homo sapiens
  misc_RNA (1)...(19): siRNA sense strand
ucgggaaacucagcuuuau

SEQ ID NO: 95539 - RNA, 19 nt, Homo sapiens
  misc_RNA (1)...(19): siRNA sense strand
ggugacaacaguauuugga

SEQ ID NO: 95540 - RNA, 19 nt, Homo sapiens
  misc_RNA (1)...(19): siRNA sense strand
gaucagcggcgagggcuau

SEQ ID NO: 95541 - RNA, 19 nt, Homo sapiens
  misc_RNA (1)...(19): siRNA sense strand
ccgagacucugcugggaau

SEQ ID NO: 95542 - RNA, 19 nt, Homo sapiens
  misc_RNA (1)...(19): siRNA sense strand
uguccuaccugcacagcaa

SEQ ID NO: 95543 - RNA, 19 nt, Homo sapiens
  misc_RNA (1)...(19): siRNA sense strand
cgaauacggcgucaucaag

SEQ ID NO: 95544 - RNA, 19 nt, Homo sapiens
  misc_RNA (1)...(19): siRNA sense strand
gaagaacauuuccccgaau

SEQ ID NO: 95545 - RNA, 19 nt, Homo sapiens
  misc_RNA (1)...(19): siRNA sense strand
cuuaggauauugcuguugu

SEQ ID NO: 95546 - RNA, 19 nt, Homo sapiens
  misc_RNA (1)...(19): siRNA sense strand
uagaagcucaagcaugaaa

SEQ ID NO: 95547 - RNA, 19 nt, Homo sapiens
  misc_RNA (1)...(19): siRNA sense strand
guauuuggacaaccucuug

SEQ ID NO: 95548 - RNA, 19 nt, Homo sapiens
  misc_RNA (1)...(19): siRNA sense strand
ggagaugcugacagagaaa

SEQ ID NO: 95549 - RNA, 19 nt, Homo sapiens
  misc_RNA (1)...(19): siRNA sense strand
gauccagacaguccugaga

SEQ ID NO: 95550 - RNA, 19 nt, Homo sapiens
  misc_RNA (1)...(19): siRNA sense strand
gacaacaguauuuggacaa

SEQ ID NO: 95551 - RNA, 19 nt, Homo sapiens
  misc_RNA (1)...(19): siRNA sense strand
guggagaugcugacagaga

SEQ ID NO: 95552 - RNA, 19 nt, Homo sapiens
  misc_RNA (1)...(19): siRNA sense strand
ggcgagggcuauggaagga

SEQ ID NO: 95553 - RNA, 19 nt, Homo sapiens
  misc_RNA (1)...(19): siRNA sense strand
uaugagaccaugaagaaca

SEQ ID NO: 95554 - RNA, 19 nt, Homo sapiens
  misc_RNA (1)...(19): siRNA sense strand
ugguggagaugcugacaga

SEQ ID NO: 95555 - RNA, 19 nt, Homo sapiens
  misc_RNA (1)...(19): siRNA sense strand
gagcggcagcagcacauug

SEQ ID NO: 95556 - RNA, 19 nt, Homo sapiens
  misc_RNA (1)...(19): siRNA sense strand
gggucuauuugugcuauga

SEQ ID NO: 95557 - RNA, 19 nt, Homo sapiens
  misc_RNA (1)...(19): siRNA sense strand
caacauccuccgagacucu

SEQ ID NO: 95558 - RNA, 19 nt, Homo sapiens
  misc_RNA (1)...(19): siRNA sense strand
ggugaaagaccaguugaag

SEQ ID NO: 95559 - RNA, 19 nt, Homo sapiens
  misc_RNA (1)...(19): siRNA sense strand
agauccaguugcuaaagaa

SEQ ID NO: 95560 - RNA, 19 nt, Homo sapiens
  misc_RNA (1)...(19): siRNA sense strand
gcugcucacacaccacuuu

SEQ ID NO: 95561 - RNA, 19 nt, Homo sapiens
  misc_RNA (1)...(19): siRNA sense strand
ggacaaccucuugaucuac

SEQ ID NO: 95562 - RNA, 19 nt, Homo sapiens
  misc_RNA (1)...(19): siRNA sense strand
agagugacgucagaaucaa

SEQ ID NO: 95563 - RNA, 19 nt, Homo sapiens
  misc_RNA (1)...(19): siRNA sense strand
uuagauagaagcucaagca

SEQ ID NO: 95564 - RNA, 19 nt, Homo sapiens
  misc_RNA (1)...(19): siRNA sense strand
uuccggaaaucacgaaugu

SEQ ID NO: 95565 - RNA, 19 nt, Homo sapiens
  misc_RNA (1)...(19): siRNA sense strand
ucccacaucucugaacaug

SEQ ID NO: 95566 - RNA, 19 nt, Homo sapiens
  misc_RNA (1)...(19): siRNA sense strand
ccggaugccuggauaugag

SEQ ID NO: 95567 - RNA, 19 nt, Homo sapiens
  misc_RNA (1)...(19): siRNA sense strand
acucagaucgggaaacuca

SEQ ID NO: 95568 - RNA, 19 nt, Homo sapiens
  misc_RNA (1)...(19): siRNA sense strand
gucaccggaugccuggaua

SEQ ID NO: 95569 - RNA, 19 nt, Homo sapiens
  misc_RNA (1)...(19): siRNA sense strand
aagaacauuuccccgaaua

SEQ ID NO: 95570 - RNA, 19 nt, Homo sapiens
  misc_RNA (1)...(19): siRNA sense strand
cuuccaagcagguccaauu

SEQ ID NO: 95571 - RNA, 19 nt, Homo sapiens
  misc_RNA (1)...(19): siRNA sense strand
gagauucaauggcucagua

SEQ ID NO: 95572 - RNA, 19 nt, Homo sapiens
  misc_RNA (1)...(19): siRNA sense strand
caaacgcacugagaugaaa

SEQ ID NO: 95573 - RNA, 19 nt, Homo sapiens
  misc_RNA (1)...(19): siRNA sense strand
gaacaugcaccuccugaca

SEQ ID NO: 95574 - RNA, 19 nt, Homo sapiens
  misc_RNA (1)...(19): siRNA sense strand
ggacugugacgacaucuau

SEQ ID NO: 95575 - RNA, 19 nt, Homo sapiens
  misc_RNA (1)...(19): siRNA sense strand
ccaccucucuuaugccaau

SEQ ID NO: 95576 - RNA, 19 nt, Homo sapiens
  misc_RNA (1)...(19): siRNA sense strand
caaccucaauggcuucuac

SEQ ID NO: 95577 - RNA, 19 nt, Homo sapiens
  misc_RNA (1)...(19): siRNA sense strand
ggcgggaaguggacgguuu

SEQ ID NO: 95578 - RNA, 19 nt, Homo sapiens
  misc_RNA (1)...(19): siRNA sense strand
ggaccaggaccucuuugug

SEQ ID NO: 95579 - RNA, 19 nt, Homo sapiens
  misc_RNA (1)...(19): siRNA sense strand
gcucccaccucucuuaugc

SEQ ID NO: 95580 - RNA, 19 nt, Homo sapiens
  misc_RNA (1)...(19): siRNA sense strand
cacugaagcagaaguauga

SEQ ID NO: 95581 - RNA, 19 nt, Homo sapiens
  misc_RNA (1)...(19): siRNA sense strand
uucaauggcucaguaaguu

SEQ ID NO: 95582 - RNA, 19 nt, Homo sapiens
  misc_RNA (1)...(19): siRNA sense strand
ugacacugaagcagaagua

SEQ ID NO: 95583 - RNA, 19 nt, Homo sapiens
  misc_RNA (1)...(19): siRNA sense strand
uggaggacuuugagaacaa

SEQ ID NO: 95584 - RNA, 19 nt, Homo sapiens
  misc_RNA (1)...(19): siRNA sense strand
gaguggacuuggaggacuu

SEQ ID NO: 95585 - RNA, 19 nt, Homo sapiens
  misc_RNA (1)...(19): siRNA sense strand
ggauggcuacacccucuuu

SEQ ID NO: 95586 - RNA, 19 nt, Homo sapiens
  misc_RNA (1)...(19): siRNA sense strand
ggacuuggaggacuuugag

SEQ ID NO: 95587 - RNA, 19 nt, Homo sapiens
  misc_RNA (1)...(19): siRNA sense strand
ccacuuugccaaccucaau

SEQ ID NO: 95588 - RNA, 19 nt, Homo sapiens
  misc_RNA (1)...(19): siRNA sense strand
ucaaacgcacugagaugaa

SEQ ID NO: 95589 - RNA, 19 nt, Homo sapiens
  misc_RNA (1)...(19): siRNA sense strand
ucaauggcucaguaaguuu

SEQ ID NO: 95590 - RNA, 19 nt, Homo sapiens
  misc_RNA (1)...(19): siRNA sense strand
gagaacaacacggccuaug

SEQ ID NO: 95591 - RNA, 19 nt, Homo sapiens
  misc_RNA (1)...(19): siRNA sense strand
ccucaauggcuucuaccua

SEQ ID NO: 95592 - RNA, 19 nt, Homo sapiens
  misc_RNA (1)...(19): siRNA sense strand
caauggcucaguaaguuuc

SEQ ID NO: 95593 - RNA, 19 nt, Homo sapiens
  misc_RNA (1)...(19): siRNA sense strand
cggcuggaaugacuacaag

SEQ ID NO: 95594 - RNA, 19 nt, Homo sapiens
  misc_RNA (1)...(19): siRNA sense strand
uuccgcagcugccacuuug

SEQ ID NO: 95595 - RNA, 19 nt, Homo sapiens
  misc_RNA (1)...(19): siRNA sense strand
ggaggacuuugagaacaac

SEQ ID NO: 95596 - RNA, 19 nt, Homo sapiens
  misc_RNA (1)...(19): siRNA sense strand
gugacucccuguccuacca

SEQ ID NO: 95597 - RNA, 19 nt, Homo sapiens
  misc_RNA (1)...(19): siRNA sense strand
ccucaggagccuucugguu

SEQ ID NO: 95598 - RNA, 19 nt, Homo sapiens
  misc_RNA (1)...(19): siRNA sense strand
acacugaagcagaaguaug

SEQ ID NO: 95599 - RNA, 19 nt, Homo sapiens
  misc_RNA (1)...(19): siRNA sense strand
guuccgcagcugccacuuu

SEQ ID NO: 95600 - RNA, 19 nt, Homo sapiens
  misc_RNA (1)...(19): siRNA sense strand
ggucagcgcagaggaggau

SEQ ID NO: 95601 - RNA, 19 nt, Homo sapiens
  misc_RNA (1)...(19): siRNA sense strand
acacggccuaugccaagua

SEQ ID NO: 95602 - RNA, 19 nt, Homo sapiens
  misc_RNA (1)...(19): siRNA sense strand
gcacgaggcugguacaguu

SEQ ID NO: 95603 - RNA, 19 nt, Homo sapiens
  misc_RNA (1)...(19): siRNA sense strand
caagauggcugcugaguuc

SEQ ID NO: 95604 - RNA, 19 nt, Homo sapiens
  misc_RNA (1)...(19): siRNA sense strand
ggacacaucugcucucauc

SEQ ID NO: 95605 - RNA, 19 nt, Homo sapiens
  misc_RNA (1)...(19): siRNA sense strand
gcuacacgaugucuucauu

SEQ ID NO: 95606 - RNA, 19 nt, Homo sapiens
  misc_RNA (1)...(19): siRNA sense strand
ccagugggcuuaggugguu

SEQ ID NO: 95607 - RNA, 19 nt, Homo sapiens
  misc_RNA (1)...(19): siRNA sense strand
ggaaacucaacgucauuaa

SEQ ID NO: 95608 - RNA, 19 nt, Homo sapiens
  misc_RNA (1)...(19): siRNA sense strand
ggugcuggcuucugcauca

SEQ ID NO: 95609 - RNA, 19 nt, Homo sapiens
  misc_RNA (1)...(19): siRNA sense strand
gccuggagcugcugcuuga

SEQ ID NO: 95610 - RNA, 19 nt, Homo sapiens
  misc_RNA (1)...(19): siRNA sense strand
gggaaacucaacgucauua

SEQ ID NO: 95611 - RNA, 19 nt, Homo sapiens
  misc_RNA (1)...(19): siRNA sense strand
gcaagauggcugcugaguu

SEQ ID NO: 95612 - RNA, 19 nt, Homo sapiens
  misc_RNA (1)...(19): siRNA sense strand
gaaacucaacgucauuaag

SEQ ID NO: 95613 - RNA, 19 nt, Homo sapiens
  misc_RNA (1)...(19): siRNA sense strand
agauuucgcucccuccauu

SEQ ID NO: 95614 - RNA, 19 nt, Homo sapiens
  misc_RNA (1)...(19): siRNA sense strand
caccaugggcuauaucauu

SEQ ID NO: 95615 - RNA, 19 nt, Homo sapiens
  misc_RNA (1)...(19): siRNA sense strand
gcuauaucauugagugcaa

SEQ ID NO: 95616 - RNA, 19 nt, Homo sapiens
  misc_RNA (1)...(19): siRNA sense strand
cugcacagcucccagaaca

SEQ ID NO: 95617 - RNA, 19 nt, Homo sapiens
  misc_RNA (1)...(19): siRNA sense strand
gaccagggaacagacauuu

SEQ ID NO: 95618 - RNA, 19 nt, Homo sapiens
  misc_RNA (1)...(19): siRNA sense strand
uguggacgaugacaacuau

SEQ ID NO: 95619 - RNA, 19 nt, Homo sapiens
  misc_RNA (1)...(19): siRNA sense strand
ccagggaacagacauuugu

SEQ ID NO: 95620 - RNA, 19 nt, Homo sapiens
  misc_RNA (1)...(19): siRNA sense strand
ccucagcuacggugucuuu

SEQ ID NO: 95621 - RNA, 19 nt, Homo sapiens
  misc_RNA (1)...(19): siRNA sense strand
ggaccagggaacagacauu

SEQ ID NO: 95622 - RNA, 19 nt, Homo sapiens
  misc_RNA (1)...(19): siRNA sense strand
cagcuacggugucuuugag

SEQ ID NO: 95623 - RNA, 19 nt, Homo sapiens
  misc_RNA (1)...(19): siRNA sense strand
accaugggcuauaucauug

SEQ ID NO: 95624 - RNA, 19 nt, Homo sapiens
  misc_RNA (1)...(19): siRNA sense strand
gcugguacaguucugguuu

SEQ ID NO: 95625 - RNA, 19 nt, Homo sapiens
  misc_RNA (1)...(19): siRNA sense strand
gacgaugacaacuauguga

SEQ ID NO: 95626 - RNA, 19 nt, Homo sapiens
  misc_RNA (1)...(19): siRNA sense strand
ccagcucuguccugcaaga

SEQ ID NO: 95627 - RNA, 19 nt, Homo sapiens
  misc_RNA (1)...(19): siRNA sense strand
ggacgaugacaacuaugug

SEQ ID NO: 95628 - RNA, 19 nt, Homo sapiens
  misc_RNA (1)...(19): siRNA sense strand
ugaguucgacaccuucuug

SEQ ID NO: 95629 - RNA, 19 nt, Homo sapiens
  misc_RNA (1)...(19): siRNA sense strand
cugcaucaaucgcaaacug

SEQ ID NO: 95630 - RNA, 19 nt, Homo sapiens
  misc_RNA (1)...(19): siRNA sense strand
ugucugcgguaccacuuga

SEQ ID NO: 95631 - RNA, 19 nt, Homo sapiens
  misc_RNA (1)...(19): siRNA sense strand
cugcugaguucgacaccuu

SEQ ID NO: 95632 - RNA, 19 nt, Homo sapiens
  misc_RNA (1)...(19): siRNA sense strand
gcuggcuucugcaucaauc

SEQ ID NO: 95633 - RNA, 19 nt, Homo sapiens
  misc_RNA (1)...(19): siRNA sense strand
aaacucaacgucauuaagc

SEQ ID NO: 95634 - RNA, 19 nt, Homo sapiens
  misc_RNA (1)...(19): siRNA sense strand
acccagcucuguccugcaa

SEQ ID NO: 95635 - RNA, 19 nt, Homo sapiens
  misc_RNA (1)...(19): siRNA sense strand
gcauggggcuccugugucu

SEQ ID NO: 95636 - RNA, 19 nt, Homo sapiens
  misc_RNA (1)...(19): siRNA sense strand
ucagcuacggugucuuuga

SEQ ID NO: 95637 - RNA, 19 nt, Homo sapiens
  misc_RNA (1)...(19): siRNA sense strand
uggacaagcugcugcauua

SEQ ID NO: 95638 - RNA, 19 nt, Homo sapiens
  misc_RNA (1)...(19): siRNA sense strand
gaccagcaccucaaguuua

SEQ ID NO: 95639 - RNA, 19 nt, Homo sapiens
  misc_RNA (1)...(19): siRNA sense strand
caagaacgaugaccuuugg

SEQ ID NO: 95640 - RNA, 19 nt, Homo sapiens
  misc_RNA (1)...(19): siRNA sense strand
ggacuucuucgaguacuuu

SEQ ID NO: 95641 - RNA, 19 nt, Homo sapiens
  misc_RNA (1)...(19): siRNA sense strand
gagaaagugaggaccaaug

SEQ ID NO: 95642 - RNA, 19 nt, Homo sapiens
  misc_RNA (1)...(19): siRNA sense strand
ucaaguuuaucaagcugaa

SEQ ID NO: 95643 - RNA, 19 nt, Homo sapiens
  misc_RNA (1)...(19): siRNA sense strand
agaaagugaggaccaauga

SEQ ID NO: 95644 - RNA, 19 nt, Homo sapiens
  misc_RNA (1)...(19): siRNA sense strand
gggacagcuucaaggcuuu

SEQ ID NO: 95645 - RNA, 19 nt, Homo sapiens
  misc_RNA (1)...(19): siRNA sense strand
ggaaugacaacggcaagga

SEQ ID NO: 95646 - RNA, 19 nt, Homo sapiens
  misc_RNA (1)...(19): siRNA sense strand
ggaggccuaugaccgagau

SEQ ID NO: 95647 - RNA, 19 nt, Homo sapiens
  misc_RNA (1)...(19): siRNA sense strand
ccaccuauccgcugcugaa

SEQ ID NO: 95648 - RNA, 19 nt, Homo sapiens
  misc_RNA (1)...(19): siRNA sense strand
gcaaguuccagggcuacua

SEQ ID NO: 95649 - RNA, 19 nt, Homo sapiens
  misc_RNA (1)...(19): siRNA sense strand
ucaagaacgaugaccuuug

SEQ ID NO: 95650 - RNA, 19 nt, Homo sapiens
  misc_RNA (1)...(19): siRNA sense strand
ugaccagcaccucaaguuu

SEQ ID NO: 95651 - RNA, 19 nt, Homo sapiens
  misc_RNA (1)...(19): siRNA sense strand
gacaagcugcugcauuauc

SEQ ID NO: 95652 - RNA, 19 nt, Homo sapiens
  misc_RNA (1)...(19): siRNA sense strand
gagcccaaguggccaaagg

SEQ ID NO: 95653 - RNA, 19 nt, Homo sapiens
  misc_RNA (1)...(19): siRNA sense strand
ggacaagcugcugcauuau

SEQ ID NO: 95654 - RNA, 19 nt, Homo sapiens
  misc_RNA (1)...(19): siRNA sense strand
accagcaccucaaguuuau

SEQ ID NO: 95655 - RNA, 19 nt, Homo sapiens
  misc_RNA (1)...(19): siRNA sense strand
gcucuaccgcaccgacuuu

SEQ ID NO: 95656 - RNA, 19 nt, Homo sapiens
  misc_RNA (1)...(19): siRNA sense strand
acaagcugcugcauuaucg

SEQ ID NO: 95657 - RNA, 19 nt, Homo sapiens
  misc_RNA (1)...(19): siRNA sense strand
uuccagggcuacuacaaga

SEQ ID NO: 95658 - RNA, 19 nt, Homo sapiens
  misc_RNA (1)...(19): siRNA sense strand
cgacgugggagggcuauga

SEQ ID NO: 95659 - RNA, 19 nt, Homo sapiens
  misc_RNA (1)...(19): siRNA sense strand
ugggagggcuaugauccua

SEQ ID NO: 95660 - RNA, 19 nt, Homo sapiens
  misc_RNA (1)...(19): siRNA sense strand
gcugagcucuuccccauca

SEQ ID NO: 95661 - RNA, 19 nt, Homo sapiens
  misc_RNA (1)...(19): siRNA sense strand
gcaccucaaguuuaucaag

SEQ ID NO: 95662 - RNA, 19 nt, Homo sapiens
  misc_RNA (1)...(19): siRNA sense strand
ugauucgccuggcccaaga

SEQ ID NO: 95663 - RNA, 19 nt, Homo sapiens
  misc_RNA (1)...(19): siRNA sense strand
gagccacgggcaguucuuu

SEQ ID NO: 95664 - RNA, 19 nt, Homo sapiens
  misc_RNA (1)...(19): siRNA sense strand
gccacgggcaguucuuuga

SEQ ID NO: 95665 - RNA, 19 nt, Homo sapiens
  misc_RNA (1)...(19): siRNA sense strand
cagcaccucaaguuuauca

SEQ ID NO: 95666 - RNA, 19 nt, Homo sapiens
  misc_RNA (1)...(19): siRNA sense strand
ggaccaaugaccggaagga

SEQ ID NO: 95667 - RNA, 19 nt, Homo sapiens
  misc_RNA (1)...(19): siRNA sense strand
ccaaggcucugggugucau

SEQ ID NO: 95668 - RNA, 19 nt, Homo sapiens
  misc_RNA (1)...(19): siRNA sense strand
gagaucucaagaacgauga

SEQ ID NO: 95669 - RNA, 19 nt, Homo sapiens
  misc_RNA (1)...(19): siRNA sense strand
gggcagggacagcuucaag

SEQ ID NO: 95670 - RNA, 19 nt, Homo sapiens
  misc_RNA (1)...(19): siRNA sense strand
uggagaaagugaggaccaa

SEQ ID NO: 95671 - RNA, 19 nt, Homo sapiens
  misc_RNA (1)...(19): siRNA sense strand
ggagaaagugaggaccaau

SEQ ID NO: 95672 - RNA, 19 nt, Homo sapiens
  misc_RNA (1)...(19): siRNA sense strand
agaagaggaucacuacuua

SEQ ID NO: 95673 - RNA, 19 nt, Homo sapiens
  misc_RNA (1)...(19): siRNA sense strand
ccagagaccugccgaagaa

SEQ ID NO: 95674 - RNA, 19 nt, Homo sapiens
  misc_RNA (1)...(19): siRNA sense strand
ggacuggacucuucaauac

SEQ ID NO: 95675 - RNA, 19 nt, Homo sapiens
  misc_RNA (1)...(19): siRNA sense strand
gaagaaugccgcuuugaaa

SEQ ID NO: 95676 - RNA, 19 nt, Homo sapiens
  misc_RNA (1)...(19): siRNA sense strand
gaaugccgcuuugaaauug

SEQ ID NO: 95677 - RNA, 19 nt, Homo sapiens
  misc_RNA (1)...(19): siRNA sense strand
uggcauggcugacaaggua

SEQ ID NO: 95678 - RNA, 19 nt, Homo sapiens
  misc_RNA (1)...(19): siRNA sense strand
gcauucaguuguacccuaa

SEQ ID NO: 95679 - RNA, 19 nt, Homo sapiens
  misc_RNA (1)...(19): siRNA sense strand
agauuaugcuggccuuaua

SEQ ID NO: 95680 - RNA, 19 nt, Homo sapiens
  misc_RNA (1)...(19): siRNA sense strand
ucaaauuccuaggaucuuu

SEQ ID NO: 95681 - RNA, 19 nt, Homo sapiens
  misc_RNA (1)...(19): siRNA sense strand
gcaaugggcgacaaaggaa

SEQ ID NO: 95682 - RNA, 19 nt, Homo sapiens
  misc_RNA (1)...(19): siRNA sense strand
gcaagagugcccugaaugu

SEQ ID NO: 95683 - RNA, 19 nt, Homo sapiens
  misc_RNA (1)...(19): siRNA sense strand
uguaccagcugaacuuuga

SEQ ID NO: 95684 - RNA, 19 nt, Homo sapiens
  misc_RNA (1)...(19): siRNA sense strand
gguagugacccuagagauu

SEQ ID NO: 95685 - RNA, 19 nt, Homo sapiens
  misc_RNA (1)...(19): siRNA sense strand
guuguacccuaacgaguuu

SEQ ID NO: 95686 - RNA, 19 nt, Homo sapiens
  misc_RNA (1)...(19): siRNA sense strand
gggacuggacucuucaaua

SEQ ID NO: 95687 - RNA, 19 nt, Homo sapiens
  misc_RNA (1)...(19): siRNA sense strand
caacguccucgucaucuuu

SEQ ID NO: 95688 - RNA, 19 nt, Homo sapiens
  misc_RNA (1)...(19): siRNA sense strand
ccagaaacucuaacuauca

SEQ ID NO: 95689 - RNA, 19 nt, Homo sapiens
  misc_RNA (1)...(19): siRNA sense strand
guucuuuccuuucagcauu

SEQ ID NO: 95690 - RNA, 19 nt, Homo sapiens
  misc_RNA (1)...(19): siRNA sense strand
cagcaagagugcccugaau

SEQ ID NO: 95691 - RNA, 19 nt, Homo sapiens
  misc_RNA (1)...(19): siRNA sense strand
cgaagaaugccgcuuugaa

SEQ ID NO: 95692 - RNA, 19 nt, Homo sapiens
  misc_RNA (1)...(19): siRNA sense strand
guagugacccuagagauug

SEQ ID NO: 95693 - RNA, 19 nt, Homo sapiens
  misc_RNA (1)...(19): siRNA sense strand
ccuaacgaguuuccaggua

SEQ ID NO: 95694 - RNA, 19 nt, Homo sapiens
  misc_RNA (1)...(19): siRNA sense strand
caaauucucccagaccaaa

SEQ ID NO: 95695 - RNA, 19 nt, Homo sapiens
  misc_RNA (1)...(19): siRNA sense strand
gacacuuucuguacuuaug

SEQ ID NO: 95696 - RNA, 19 nt, Homo sapiens
  misc_RNA (1)...(19): siRNA sense strand
ggaaauccacagagcacaa

SEQ ID NO: 95697 - RNA, 19 nt, Homo sapiens
  misc_RNA (1)...(19): siRNA sense strand
uagaagaggaucacuacuu

SEQ ID NO: 95698 - RNA, 19 nt, Homo sapiens
  misc_RNA (1)...(19): siRNA sense strand
gagcagcaaugggcgacaa

SEQ ID NO: 95699 - RNA, 19 nt, Homo sapiens
  misc_RNA (1)...(19): siRNA sense strand
agaaugccgcuuugaaauu

SEQ ID NO: 95700 - RNA, 19 nt, Homo sapiens
  misc_RNA (1)...(19): siRNA sense strand
ugacaagguagaugugaaa

SEQ ID NO: 95701 - RNA, 19 nt, Homo sapiens
  misc_RNA (1)...(19): siRNA sense strand
gguggaagcugcauuuugu

SEQ ID NO: 95702 - RNA, 19 nt, Homo sapiens
  misc_RNA (1)...(19): siRNA sense strand
uaugcuggccuuauacuuu

SEQ ID NO: 95703 - RNA, 19 nt, Homo sapiens
  misc_RNA (1)...(19): siRNA sense strand
cuacuuagccccagacuuu

SEQ ID NO: 95704 - RNA, 19 nt, Homo sapiens
  misc_RNA (1)...(19): siRNA sense strand
ggaaacugaagcagcaaga

SEQ ID NO: 95705 - RNA, 19 nt, Homo sapiens
  misc_RNA (1)...(19): siRNA sense strand
cagguguucuuuccuuuca

SEQ ID NO: 95706 - RNA, 19 nt, Homo sapiens
  misc_RNA (1)...(19): siRNA sense strand
gccgaagaaugccgcuuug

SEQ ID NO: 95707 - RNA, 19 nt, Homo sapiens
  misc_RNA (1)...(19): siRNA sense strand
cagaaacucuaacuaucag

SEQ ID NO: 95708 - RNA, 19 nt, Homo sapiens
  misc_RNA (1)...(19): siRNA sense strand
gaaauccacagagcacaau

SEQ ID NO: 95709 - RNA, 19 nt, Homo sapiens
  misc_RNA (1)...(19): siRNA sense strand
gagauuaugcuggccuuau

SEQ ID NO: 95710 - RNA, 19 nt, Homo sapiens
  misc_RNA (1)...(19): siRNA sense strand
cugcuggacucacuucgaa

SEQ ID NO: 95711 - RNA, 19 nt, Homo sapiens
  misc_RNA (1)...(19): siRNA sense strand
ggugguggaagcugcauuu

SEQ ID NO: 95712 - RNA, 19 nt, Homo sapiens
  misc_RNA (1)...(19): siRNA sense strand
gacuguaucuugucuucca

SEQ ID NO: 95713 - RNA, 19 nt, Homo sapiens
  misc_RNA (1)...(19): siRNA sense strand
uaacgaguuuccagguagu

SEQ ID NO: 95714 - RNA, 19 nt, Homo sapiens
  misc_RNA (1)...(19): siRNA sense strand
uccagaaacucuaacuauc

SEQ ID NO: 95715 - RNA, 19 nt, Homo sapiens
  misc_RNA (1)...(19): siRNA sense strand
ugguaugcaucacaagaaa

SEQ ID NO: 95716 - RNA, 19 nt, Homo sapiens
  misc_RNA (1)...(19): siRNA sense strand
gaagaggaucacuacuuag

SEQ ID NO: 95717 - RNA, 19 nt, Homo sapiens
  misc_RNA (1)...(19): siRNA sense strand
gaaaagcccagggaauuga

SEQ ID NO: 95718 - RNA, 19 nt, Homo sapiens
  misc_RNA (1)...(19): siRNA sense strand
acuggacucuucaauacuu

SEQ ID NO: 95719 - RNA, 19 nt, Homo sapiens
  misc_RNA (1)...(19): siRNA sense strand
aagagugcccugaauguga

SEQ ID NO: 95720 - RNA, 19 nt, Homo sapiens
  misc_RNA (1)...(19): siRNA sense strand
gcagcaagagugcccugaa

SEQ ID NO: 95721 - RNA, 19 nt, Homo sapiens
  misc_RNA (1)...(19): siRNA sense strand
gaauuucuguccgguucug

SEQ ID NO: 95722 - RNA, 19 nt, Homo sapiens
  misc_RNA (1)...(19): siRNA sense strand
uuauagagaggccaaauuc

SEQ ID NO: 95723 - RNA, 19 nt, Homo sapiens
  misc_RNA (1)...(19): siRNA sense strand
uguagaccauccacucaga

SEQ ID NO: 95724 - RNA, 19 nt, Homo sapiens
  misc_RNA (1)...(19): siRNA sense strand
gagguuccgcaucuacaaa

SEQ ID NO: 95725 - RNA, 19 nt, Homo sapiens
  misc_RNA (1)...(19): siRNA sense strand
ccugaggaauguagauaag

SEQ ID NO: 95726 - RNA, 19 nt, Homo sapiens
  misc_RNA (1)...(19): siRNA sense strand
gaaagugcugguuccucaa

SEQ ID NO: 95727 - RNA, 19 nt, Homo sapiens
  misc_RNA (1)...(19): siRNA sense strand
caagagugcccugaaugug

SEQ ID NO: 95728 - RNA, 19 nt, Homo sapiens
  misc_RNA (1)...(19): siRNA sense strand
agagugcccugaaugugau

SEQ ID NO: 95729 - RNA, 19 nt, Homo sapiens
  misc_RNA (1)...(19): siRNA sense strand
cugcagguguucuuuccuu

SEQ ID NO: 95730 - RNA, 19 nt, Homo sapiens
  misc_RNA (1)...(19): siRNA sense strand
ugaaaaguuuacuguggua

SEQ ID NO: 95731 - RNA, 19 nt, Homo sapiens
  misc_RNA (1)...(19): siRNA sense strand
gcagguguucuuuccuuuc

SEQ ID NO: 95732 - RNA, 19 nt, Homo sapiens
  misc_RNA (1)...(19): siRNA sense strand
ggucgaccgagaucaauca

SEQ ID NO: 95733 - RNA, 19 nt, Homo sapiens
  misc_RNA (1)...(19): siRNA sense strand
uuacugugguagccauuuc

SEQ ID NO: 95734 - RNA, 19 nt, Homo sapiens
  misc_RNA (1)...(19): siRNA sense strand
aaacucuaacuaucaguga

SEQ ID NO: 95735 - RNA, 19 nt, Homo sapiens
  misc_RNA (1)...(19): siRNA sense strand
aagaaugccgcuuugaaau

SEQ ID NO: 95736 - RNA, 19 nt, Homo sapiens
  misc_RNA (1)...(19): siRNA sense strand
aaagugcugguuccucaaa

SEQ ID NO: 95737 - RNA, 19 nt, Homo sapiens
  misc_RNA (1)...(19): siRNA sense strand
gcuggagacugugguaugc

SEQ ID NO: 95738 - RNA, 19 nt, Homo sapiens
  misc_RNA (1)...(19): siRNA sense strand
caaauuccuaggaucuuuc

SEQ ID NO: 95739 - RNA, 19 nt, Homo sapiens
  misc_RNA (1)...(19): siRNA sense strand
aaacugaagcagcaagagu

SEQ ID NO: 95740 - RNA, 19 nt, Homo sapiens
  misc_RNA (1)...(19): siRNA sense strand
ucuauggcauggcugacaa

SEQ ID NO: 95741 - RNA, 19 nt, Homo sapiens
  misc_RNA (1)...(19): siRNA sense strand
gccagucgcaguuucuaug

SEQ ID NO: 95742 - RNA, 19 nt, Homo sapiens
  misc_RNA (1)...(19): siRNA sense strand
gggaaagagugaaaauucu

SEQ ID NO: 95743 - RNA, 19 nt, Homo sapiens
  misc_RNA (1)...(19): siRNA sense strand
gugguaugcaucacaagaa

SEQ ID NO: 95744 - RNA, 19 nt, Homo sapiens
  misc_RNA (1)...(19): siRNA sense strand
acaacguccucgucaucuu

SEQ ID NO: 95745 - RNA, 19 nt, Homo sapiens
  misc_RNA (1)...(19): siRNA sense strand
caagguagaugugaaaacu

SEQ ID NO: 95746 - RNA, 19 nt, Homo sapiens
  misc_RNA (1)...(19): siRNA sense strand
cugacaagguagaugugaa

SEQ ID NO: 95747 - RNA, 19 nt, Homo sapiens
  misc_RNA (1)...(19): siRNA sense strand
gagacugugguaugcauca

SEQ ID NO: 95748 - RNA, 19 nt, Homo sapiens
  misc_RNA (1)...(19): siRNA sense strand
uauagugccagucgcaguu

SEQ ID NO: 95749 - RNA, 19 nt, Homo sapiens
  misc_RNA (1)...(19): siRNA sense strand
agugcugguuccucaaauu

SEQ ID NO: 95750 - RNA, 19 nt, Homo sapiens
  misc_RNA (1)...(19): siRNA sense strand
uagugacccuagagauugu

SEQ ID NO: 95751 - RNA, 19 nt, Homo sapiens
  misc_RNA (1)...(19): siRNA sense strand
uuccagaaacucuaacuau

SEQ ID NO: 95752 - RNA, 19 nt, Homo sapiens
  misc_RNA (1)...(19): siRNA sense strand
ucagagugcccaaauugag

SEQ ID NO: 95753 - RNA, 19 nt, Homo sapiens
  misc_RNA (1)...(19): siRNA sense strand
aagaaaaccuguagaccau

SEQ ID NO: 95754 - RNA, 19 nt, Homo sapiens
  misc_RNA (1)...(19): siRNA sense strand
cuagagauugucccagaga

SEQ ID NO: 95755 - RNA, 19 nt, Homo sapiens
  misc_RNA (1)...(19): siRNA sense strand
gugcugguuccucaaauuc

SEQ ID NO: 95756 - RNA, 19 nt, Homo sapiens
  misc_RNA (1)...(19): siRNA sense strand
gcugacaagguagauguga

SEQ ID NO: 95757 - RNA, 19 nt, Homo sapiens
  misc_RNA (1)...(19): siRNA sense strand
ccuagaagaggaucacuac

SEQ ID NO: 95758 - RNA, 19 nt, Homo sapiens
  misc_RNA (1)...(19): siRNA sense strand
ccaaguaccugcugaagaa

SEQ ID NO: 95759 - RNA, 19 nt, Homo sapiens
  misc_RNA (1)...(19): siRNA sense strand
ucaagacccuguccuaugu

SEQ ID NO: 95760 - RNA, 19 nt, Homo sapiens
  misc_RNA (1)...(19): siRNA sense strand
gcuacaagcucuuucucau

SEQ ID NO: 95761 - RNA, 19 nt, Homo sapiens
  misc_RNA (1)...(19): siRNA sense strand
ggacgaggcggaagucuag

SEQ ID NO: 95762 - RNA, 19 nt, Homo sapiens
  misc_RNA (1)...(19): siRNA sense strand
gccacaaggugcucuaugu

SEQ ID NO: 95763 - RNA, 19 nt, Homo sapiens
  misc_RNA (1)...(19): siRNA sense strand
gggagaugcugaccaaugg

SEQ ID NO: 95764 - RNA, 19 nt, Homo sapiens
  misc_RNA (1)...(19): siRNA sense strand
uacaagcucuuucucaugu

SEQ ID NO: 95765 - RNA, 19 nt, Homo sapiens
  misc_RNA (1)...(19): siRNA sense strand
ccaauggcaccuucgagua

SEQ ID NO: 95766 - RNA, 19 nt, Homo sapiens
  misc_RNA (1)...(19): siRNA sense strand
ggacaccaccgaguauuuc

SEQ ID NO: 95767 - RNA, 19 nt, Homo sapiens
  misc_RNA (1)...(19): siRNA sense strand
caacgucaaccacgaguuc

SEQ ID NO: 95768 - RNA, 19 nt, Homo sapiens
  misc_RNA (1)...(19): siRNA sense strand
caagcucuuucucauguuc

SEQ ID NO: 95769 - RNA, 19 nt, Homo sapiens
  misc_RNA (1)...(19): siRNA sense strand
acaaggugcucuaugucuu

SEQ ID NO: 95770 - RNA, 19 nt, Homo sapiens
  misc_RNA (1)...(19): siRNA sense strand
gcccuucgccuuccacaug

SEQ ID NO: 95771 - RNA, 19 nt, Homo sapiens
  misc_RNA (1)...(19): siRNA sense strand
acauguaugcgcccaagua

SEQ ID NO: 95772 - RNA, 19 nt, Homo sapiens
  misc_RNA (1)...(19): siRNA sense strand
gcucguguccgcccagaau

SEQ ID NO: 95773 - RNA, 19 nt, Homo sapiens
  misc_RNA (1)...(19): siRNA sense strand
ccgaggacaccaccgagua

SEQ ID NO: 95774 - RNA, 19 nt, Homo sapiens
  misc_RNA (1)...(19): siRNA sense strand
cuacaagcucuuucucaug

SEQ ID NO: 95775 - RNA, 19 nt, Homo sapiens
  misc_RNA (1)...(19): siRNA sense strand
ccgagggcaucuacuucaa

SEQ ID NO: 95776 - RNA, 19 nt, Homo sapiens
  misc_RNA (1)...(19): siRNA sense strand
caaggugcucuaugucuuc

SEQ ID NO: 95777 - RNA, 19 nt, Homo sapiens
  misc_RNA (1)...(19): siRNA sense strand
cgaggacaccaccgaguau

SEQ ID NO: 95778 - RNA, 19 nt, Homo sapiens
  misc_RNA (1)...(19): siRNA sense strand
cgacgugguggacgccuuu

SEQ ID NO: 95779 - RNA, 19 nt, Homo sapiens
  misc_RNA (1)...(19): siRNA sense strand
gaggacaccaccgaguauu

SEQ ID NO: 95780 - RNA, 19 nt, Homo sapiens
  misc_RNA (1)...(19): siRNA sense strand
aguaccugcugaagaacua

SEQ ID NO: 95781 - RNA, 19 nt, Homo sapiens
  misc_RNA (1)...(19): siRNA sense strand
ggacaagcgggaccugaac

SEQ ID NO: 95782 - RNA, 19 nt, Homo sapiens
  misc_RNA (1)...(19): siRNA sense strand
ucaacgccaucaacgucaa

SEQ ID NO: 95783 - RNA, 19 nt, Homo sapiens
  misc_RNA (1)...(19): siRNA sense strand
caauggcaccuucgaguac

SEQ ID NO: 95784 - RNA, 19 nt, Homo sapiens
  misc_RNA (1)...(19): siRNA sense strand
acuccaaccugcccaccaa

SEQ ID NO: 95785 - RNA, 19 nt, Homo sapiens
  misc_RNA (1)...(19): siRNA sense strand
ccagcgagcacauguaugc

SEQ ID NO: 95786 - RNA, 19 nt, Homo sapiens
  misc_RNA (1)...(19): siRNA sense strand
caccaugcccaacuucaga

SEQ ID NO: 95787 - RNA, 19 nt, Homo sapiens
  misc_RNA (1)...(19): siRNA sense strand
cgggagaugcugaccaaug

SEQ ID NO: 95788 - RNA, 19 nt, Homo sapiens
  misc_RNA (1)...(19): siRNA sense strand
uuucucauguucuguaugg

SEQ ID NO: 95789 - RNA, 19 nt, Homo sapiens
  misc_RNA (1)...(19): siRNA sense strand
gccugugccucaucuccuu

SEQ ID NO: 95790 - RNA, 19 nt, Homo sapiens
  misc_RNA (1)...(19): siRNA sense strand
acaagcgggaccugaacua

SEQ ID NO: 95791 - RNA, 19 nt, Homo sapiens
  misc_RNA (1)...(19): siRNA sense strand
gagacgcuacaagcucuuu

SEQ ID NO: 95792 - RNA, 19 nt, Homo sapiens
  misc_RNA (1)...(19): siRNA sense strand
uccgggagaugcugaccaa

SEQ ID NO: 95793 - RNA, 19 nt, Homo sapiens
  misc_RNA (1)...(19): siRNA sense strand
ccacaaggugcucuauguc

SEQ ID NO: 95794 - RNA, 19 nt, Homo sapiens
  misc_RNA (1)...(19): siRNA sense strand
caaagaauauucccaguua

SEQ ID NO: 95795 - RNA, 19 nt, Homo sapiens
  misc_RNA (1)...(19): siRNA sense strand
cgaagaagcugaucauaau

SEQ ID NO: 95796 - RNA, 19 nt, Homo sapiens
  misc_RNA (1)...(19): siRNA sense strand
guacugaacccgaauuuaa

SEQ ID NO: 95797 - RNA, 19 nt, Homo sapiens
  misc_RNA (1)...(19): siRNA sense strand
ucaaggaaaucaugaagaa

SEQ ID NO: 95798 - RNA, 19 nt, Homo sapiens
  misc_RNA (1)...(19): siRNA sense strand
ugaagaagguuguaggaaa

SEQ ID NO: 95799 - RNA, 19 nt, Homo sapiens
  misc_RNA (1)...(19): siRNA sense strand
caccugaacuccagugaua

SEQ ID NO: 95800 - RNA, 19 nt, Homo sapiens
  misc_RNA (1)...(19): siRNA sense strand
ggaaagaucaaguggauga

SEQ ID NO: 95801 - RNA, 19 nt, Homo sapiens
  misc_RNA (1)...(19): siRNA sense strand
acaaggacaugcugaagua

SEQ ID NO: 95802 - RNA, 19 nt, Homo sapiens
  misc_RNA (1)...(19): siRNA sense strand
ggaagaaaguccucguuca

SEQ ID NO: 95803 - RNA, 19 nt, Homo sapiens
  misc_RNA (1)...(19): siRNA sense strand
gaauaagcacuguguguuu

SEQ ID NO: 95804 - RNA, 19 nt, Homo sapiens
  misc_RNA (1)...(19): siRNA sense strand
gagcucauuuacauugaua

SEQ ID NO: 95805 - RNA, 19 nt, Homo sapiens
  misc_RNA (1)...(19): siRNA sense strand
gaagaauuccgguggauga

SEQ ID NO: 95806 - RNA, 19 nt, Homo sapiens
  misc_RNA (1)...(19): siRNA sense strand
ggaacaaacucaaccaacu

SEQ ID NO: 95807 - RNA, 19 nt, Homo sapiens
  misc_RNA (1)...(19): siRNA sense strand
gaaaauugguguccucauu

SEQ ID NO: 95808 - RNA, 19 nt, Homo sapiens
  misc_RNA (1)...(19): siRNA sense strand
gaaaacccuugcuguguua

SEQ ID NO: 95809 - RNA, 19 nt, Homo sapiens
  misc_RNA (1)...(19): siRNA sense strand
ggaagaauaagaagaucua

SEQ ID NO: 95810 - RNA, 19 nt, Homo sapiens
  misc_RNA (1)...(19): siRNA sense strand
gaacccgaauuuaaucaug

SEQ ID NO: 95811 - RNA, 19 nt, Homo sapiens
  misc_RNA (1)...(19): siRNA sense strand
gaagaagguuguaggaaac

SEQ ID NO: 95812 - RNA, 19 nt, Homo sapiens
  misc_RNA (1)...(19): siRNA sense strand
gaaccagucccuuguguau

SEQ ID NO: 95813 - RNA, 19 nt, Homo sapiens
  misc_RNA (1)...(19): siRNA sense strand
ggaagugcaugcaacuguu

SEQ ID NO: 95814 - RNA, 19 nt, Homo sapiens
  misc_RNA (1)...(19): siRNA sense strand
ccagguggcucucugcaaa

SEQ ID NO: 95815 - RNA, 19 nt, Homo sapiens
  misc_RNA (1)...(19): siRNA sense strand
caaauuaugcccaaucgaa

SEQ ID NO: 95816 - RNA, 19 nt, Homo sapiens
  misc_RNA (1)...(19): siRNA sense strand
ucaaggcacuggcagaaga

SEQ ID NO: 95817 - RNA, 19 nt, Homo sapiens
  misc_RNA (1)...(19): siRNA sense strand
ugacaucccagcauccuua

SEQ ID NO: 95818 - RNA, 19 nt, Homo sapiens
  misc_RNA (1)...(19): siRNA sense strand
gaagaucuacuuggacauu

SEQ ID NO: 95819 - RNA, 19 nt, Homo sapiens
  misc_RNA (1)...(19): siRNA sense strand
gccauacgcuggagucaug

SEQ ID NO: 95820 - RNA, 19 nt, Homo sapiens
  misc_RNA (1)...(19): siRNA sense strand
uggcugagcucaaggaaau

SEQ ID NO: 95821 - RNA, 19 nt, Homo sapiens
  misc_RNA (1)...(19): siRNA sense strand
ggagugauuuaauuacauc

SEQ ID NO: 95822 - RNA, 19 nt, Homo sapiens
  misc_RNA (1)...(19): siRNA sense strand
caugacagcuuaugaucug

SEQ ID NO: 95823 - RNA, 19 nt, Homo sapiens
  misc_RNA (1)...(19): siRNA sense strand
gaagaagcugaucauaauu

SEQ ID NO: 95824 - RNA, 19 nt, Homo sapiens
  misc_RNA (1)...(19): siRNA sense strand
ggacauuauucacacauac

SEQ ID NO: 95825 - RNA, 19 nt, Homo sapiens
  misc_RNA (1)...(19): siRNA sense strand
auaagaagaucuacuugga

SEQ ID NO: 95826 - RNA, 19 nt, Homo sapiens
  misc_RNA (1)...(19): siRNA sense strand
gaauuguugagcucauuua

SEQ ID NO: 95827 - RNA, 19 nt, Homo sapiens
  misc_RNA (1)...(19): siRNA sense strand
gaaguuguccucucagaag

SEQ ID NO: 95828 - RNA, 19 nt, Homo sapiens
  misc_RNA (1)...(19): siRNA sense strand
uauaccauguucccucaua

SEQ ID NO: 95829 - RNA, 19 nt, Homo sapiens
  misc_RNA (1)...(19): siRNA sense strand
gaagauugagccauacaug

SEQ ID NO: 95830 - RNA, 19 nt, Homo sapiens
  misc_RNA (1)...(19): siRNA sense strand
gaagugcaugcaacuguuu

SEQ ID NO: 95831 - RNA, 19 nt, Homo sapiens
  misc_RNA (1)...(19): siRNA sense strand
ggccaugacauuaggauuu

SEQ ID NO: 95832 - RNA, 19 nt, Homo sapiens
  misc_RNA (1)...(19): siRNA sense strand
ucagugagguugaaaauug

SEQ ID NO: 95833 - RNA, 19 nt, Homo sapiens
  misc_RNA (1)...(19): siRNA sense strand
ggaccauccuggguucauu

SEQ ID NO: 95834 - RNA, 19 nt, Homo sapiens
  misc_RNA (1)...(19): siRNA sense strand
gaacaaacucaaccaacuc

SEQ ID NO: 95835 - RNA, 19 nt, Homo sapiens
  misc_RNA (1)...(19): siRNA sense strand
ccuuugacccuaagaauaa

SEQ ID NO: 95836 - RNA, 19 nt, Homo sapiens
  misc_RNA (1)...(19): siRNA sense strand
gaagcuaucgcaaauggau

SEQ ID NO: 95837 - RNA, 19 nt, Homo sapiens
  misc_RNA (1)...(19): siRNA sense strand
ggacuuggguucccuuacg

SEQ ID NO: 95838 - RNA, 19 nt, Homo sapiens
  misc_RNA (1)...(19): siRNA sense strand
gaccugcaguuccuucuuc

SEQ ID NO: 95839 - RNA, 19 nt, Homo sapiens
  misc_RNA (1)...(19): siRNA sense strand
gaauaagaagaucuacuug

SEQ ID NO: 95840 - RNA, 19 nt, Homo sapiens
  misc_RNA (1)...(19): siRNA sense strand
caacuccacuacagcuguu

SEQ ID NO: 95841 - RNA, 19 nt, Homo sapiens
  misc_RNA (1)...(19): siRNA sense strand
ucaaguggaugaaagacau

SEQ ID NO: 95842 - RNA, 19 nt, Homo sapiens
  misc_RNA (1)...(19): siRNA sense strand
agugauauccaccacauua

SEQ ID NO: 95843 - RNA, 19 nt, Homo sapiens
  misc_RNA (1)...(19): siRNA sense strand
gaccauccuggguucauua

SEQ ID NO: 95844 - RNA, 19 nt, Homo sapiens
  misc_RNA (1)...(19): siRNA sense strand
guuuauggcuccagcacaa

SEQ ID NO: 95845 - RNA, 19 nt, Homo sapiens
  misc_RNA (1)...(19): siRNA sense strand
guaugaugcuucugcacuu

SEQ ID NO: 95846 - RNA, 19 nt, Homo sapiens
  misc_RNA (1)...(19): siRNA sense strand
gcaaauggaugugcuuuuc

SEQ ID NO: 95847 - RNA, 19 nt, Homo sapiens
  misc_RNA (1)...(19): siRNA sense strand
ccuggaagcuaucgcaaau

SEQ ID NO: 95848 - RNA, 19 nt, Homo sapiens
  misc_RNA (1)...(19): siRNA sense strand
gcagcgcauuggcaaguug

SEQ ID NO: 95849 - RNA, 19 nt, Homo sapiens
  misc_RNA (1)...(19): siRNA sense strand
uacagagaaucaaugcuuu

SEQ ID NO: 95850 - RNA, 19 nt, Homo sapiens
  misc_RNA (1)...(19): siRNA sense strand
gauauccaccacauuaaug

SEQ ID NO: 95851 - RNA, 19 nt, Homo sapiens
  misc_RNA (1)...(19): siRNA sense strand
ccgaguccuugauucauuu

SEQ ID NO: 95852 - RNA, 19 nt, Homo sapiens
  misc_RNA (1)...(19): siRNA sense strand
guaggagacagaauuguug

SEQ ID NO: 95853 - RNA, 19 nt, Homo sapiens
  misc_RNA (1)...(19): siRNA sense strand
uuaguucaauggagugauu

SEQ ID NO: 95854 - RNA, 19 nt, Homo sapiens
  misc_RNA (1)...(19): siRNA sense strand
agagaaagcggaagaaagu

SEQ ID NO: 95855 - RNA, 19 nt, Homo sapiens
  misc_RNA (1)...(19): siRNA sense strand
acgaagaagcugaucauaa

SEQ ID NO: 95856 - RNA, 19 nt, Homo sapiens
  misc_RNA (1)...(19): siRNA sense strand
aguagaggaugcagugaaa

SEQ ID NO: 95857 - RNA, 19 nt, Homo sapiens
  misc_RNA (1)...(19): siRNA sense strand
gcggaaauucguacagauu

SEQ ID NO: 95858 - RNA, 19 nt, Homo sapiens
  misc_RNA (1)...(19): siRNA sense strand
aacccuugcuguguuauua

SEQ ID NO: 95859 - RNA, 19 nt, Homo sapiens
  misc_RNA (1)...(19): siRNA sense strand
cuacagagaaucaaugcuu

SEQ ID NO: 95860 - RNA, 19 nt, Homo sapiens
  misc_RNA (1)...(19): siRNA sense strand
aaauguguauugccuccua

SEQ ID NO: 95861 - RNA, 19 nt, Homo sapiens
  misc_RNA (1)...(19): siRNA sense strand
gaaaagagaaagcggaaga

SEQ ID NO: 95862 - RNA, 19 nt, Homo sapiens
  misc_RNA (1)...(19): siRNA sense strand
uuacugggccaugacauua

SEQ ID NO: 95863 - RNA, 19 nt, Homo sapiens
  misc_RNA (1)...(19): siRNA sense strand
gccaugacauuaggauuuc

SEQ ID NO: 95864 - RNA, 19 nt, Homo sapiens
  misc_RNA (1)...(19): siRNA sense strand
aagaucuacuuggacauua

SEQ ID NO: 95865 - RNA, 19 nt, Homo sapiens
  misc_RNA (1)...(19): siRNA sense strand
ccagugauauccaccacau

SEQ ID NO: 95866 - RNA, 19 nt, Homo sapiens
  misc_RNA (1)...(19): siRNA sense strand
cagcuuaugaucugaagaa

SEQ ID NO: 95867 - RNA, 19 nt, Homo sapiens
  misc_RNA (1)...(19): siRNA sense strand
ggaaguuguccucucagaa

SEQ ID NO: 95868 - RNA, 19 nt, Homo sapiens
  misc_RNA (1)...(19): siRNA sense strand
uguaggacuugcucaauuc

SEQ ID NO: 95869 - RNA, 19 nt, Homo sapiens
  misc_RNA (1)...(19): siRNA sense strand
gacauuaggauuucagcuu

SEQ ID NO: 95870 - RNA, 19 nt, Homo sapiens
  misc_RNA (1)...(19): siRNA sense strand
ggacggcuacccucacugu

SEQ ID NO: 95871 - RNA, 19 nt, Homo sapiens
  misc_RNA (1)...(19): siRNA sense strand
aucagaagauugagccaua

SEQ ID NO: 95872 - RNA, 19 nt, Homo sapiens
  misc_RNA (1)...(19): siRNA sense strand
guccuugauucauuuggua

SEQ ID NO: 95873 - RNA, 19 nt, Homo sapiens
  misc_RNA (1)...(19): siRNA sense strand
cagaauuguugagcucauu

SEQ ID NO: 95874 - RNA, 19 nt, Homo sapiens
  misc_RNA (1)...(19): siRNA sense strand
gaagaaaguccucguucac

SEQ ID NO: 95875 - RNA, 19 nt, Homo sapiens
  misc_RNA (1)...(19): siRNA sense strand
caacaaucaggaggaagua

SEQ ID NO: 95876 - RNA, 19 nt, Homo sapiens
  misc_RNA (1)...(19): siRNA sense strand
gaucuacuuggacauuauu

SEQ ID NO: 95877 - RNA, 19 nt, Homo sapiens
  misc_RNA (1)...(19): siRNA sense strand
gauccuggaccucagcaaa

SEQ ID NO: 95878 - RNA, 19 nt, Homo sapiens
  misc_RNA (1)...(19): siRNA sense strand
agucgaagguggacaaucu

SEQ ID NO: 95879 - RNA, 19 nt, Homo sapiens
  misc_RNA (1)...(19): siRNA sense strand
cugcaaagacugccuauag

SEQ ID NO: 95880 - RNA, 19 nt, Homo sapiens
  misc_RNA (1)...(19): siRNA sense strand
caacaaggacaaggacaug

SEQ ID NO: 95881 - RNA, 19 nt, Homo sapiens
  misc_RNA (1)...(19): siRNA sense strand
gcagugaaagcaauuuuaa

SEQ ID NO: 95882 - RNA, 19 nt, Homo sapiens
  misc_RNA (1)...(19): siRNA sense strand
caaguucaacccacccaaa

SEQ ID NO: 95883 - RNA, 19 nt, Homo sapiens
  misc_RNA (1)...(19): siRNA sense strand
cagaaccagucccuugugu

SEQ ID NO: 95884 - RNA, 19 nt, Homo sapiens
  misc_RNA (1)...(19): siRNA sense strand
aaacaggaaugugguggau

SEQ ID NO: 95885 - RNA, 19 nt, Homo sapiens
  misc_RNA (1)...(19): siRNA sense strand
guugagcucauuuacauug

SEQ ID NO: 95886 - RNA, 19 nt, Homo sapiens
  misc_RNA (1)...(19): siRNA sense strand
agggaaagaucaaguggau

SEQ ID NO: 95887 - RNA, 19 nt, Homo sapiens
  misc_RNA (1)...(19): siRNA sense strand
aauaagcacuguguguuuc

SEQ ID NO: 95888 - RNA, 19 nt, Homo sapiens
  misc_RNA (1)...(19): siRNA sense strand
ucaagucccuggcagaaaa

SEQ ID NO: 95889 - RNA, 19 nt, Homo sapiens
  misc_RNA (1)...(19): siRNA sense strand
agaagcugaucauaauuca

SEQ ID NO: 95890 - RNA, 19 nt, Homo sapiens
  misc_RNA (1)...(19): siRNA sense strand
gcagaaccuugaaaagaga

SEQ ID NO: 95891 - RNA, 19 nt, Homo sapiens
  misc_RNA (1)...(19): siRNA sense strand
uggaagcuaucgcaaaugg

SEQ ID NO: 95892 - RNA, 19 nt, Homo sapiens
  misc_RNA (1)...(19): siRNA sense strand
gguacugaacccgaauuua

SEQ ID NO: 95893 - RNA, 19 nt, Homo sapiens
  misc_RNA (1)...(19): siRNA sense strand
cguggaaguuguccucuca

SEQ ID NO: 95894 - RNA, 19 nt, Homo sapiens
  misc_RNA (1)...(19): siRNA sense strand
gggucuacaucaacuauua

SEQ ID NO: 95895 - RNA, 19 nt, Homo sapiens
  misc_RNA (1)...(19): siRNA sense strand
caucaacuauuacgacaug

SEQ ID NO: 95896 - RNA, 19 nt, Homo sapiens
  misc_RNA (1)...(19): siRNA sense strand
caacuccaccuucgccuaa

SEQ ID NO: 95897 - RNA, 19 nt, Homo sapiens
  misc_RNA (1)...(19): siRNA sense strand
ggacagggucuacaucaac

SEQ ID NO: 95898 - RNA, 19 nt, Homo sapiens
  misc_RNA (1)...(19): siRNA sense strand
gcgcagaaccgcuccuaca

SEQ ID NO: 95899 - RNA, 19 nt, Homo sapiens
  misc_RNA (1)...(19): siRNA sense strand
gcacagcaucggcaagauc

SEQ ID NO: 95900 - RNA, 19 nt, Homo sapiens
  misc_RNA (1)...(19): siRNA sense strand
gacagggucuacaucaacu

SEQ ID NO: 95901 - RNA, 19 nt, Homo sapiens
  misc_RNA (1)...(19): siRNA sense strand
cggacagggucuacaucaa

SEQ ID NO: 95902 - RNA, 19 nt, Homo sapiens
  misc_RNA (1)...(19): siRNA sense strand
caacuauuacgacaugaac

SEQ ID NO: 95903 - RNA, 19 nt, Homo sapiens
  misc_RNA (1)...(19): siRNA sense strand
ucaacuauuacgacaugaa

SEQ ID NO: 95904 - RNA, 19 nt, Homo sapiens
  misc_RNA (1)...(19): siRNA sense strand
gaauggaguucaaacaugu

SEQ ID NO: 95905 - RNA, 19 nt, Homo sapiens
  misc_RNA (1)...(19): siRNA sense strand
ccaagggacuauccaccua

SEQ ID NO: 95906 - RNA, 19 nt, Homo sapiens
  misc_RNA (1)...(19): siRNA sense strand
gaaaucauugcuacacuga

SEQ ID NO: 95907 - RNA, 19 nt, Homo sapiens
  misc_RNA (1)...(19): siRNA sense strand
gaugugaaggaacugauua

SEQ ID NO: 95908 - RNA, 19 nt, Homo sapiens
  misc_RNA (1)...(19): siRNA sense strand
ggaguucaaacaugucuaa

SEQ ID NO: 95909 - RNA, 19 nt, Homo sapiens
  misc_RNA (1)...(19): siRNA sense strand
gaagaauggaguucaaaca

SEQ ID NO: 95910 - RNA, 19 nt, Homo sapiens
  misc_RNA (1)...(19): siRNA sense strand
agaauggaguucaaacaug

SEQ ID NO: 95911 - RNA, 19 nt, Homo sapiens
  misc_RNA (1)...(19): siRNA sense strand
ucucaacguucucgucaaa

SEQ ID NO: 95912 - RNA, 19 nt, Homo sapiens
  misc_RNA (1)...(19): siRNA sense strand
cagcagaugugaaggaacu

SEQ ID NO: 95913 - RNA, 19 nt, Homo sapiens
  misc_RNA (1)...(19): siRNA sense strand
aaacccagauucagcagau

SEQ ID NO: 95914 - RNA, 19 nt, Homo sapiens
  misc_RNA (1)...(19): siRNA sense strand
gagaaacaggucagccaaa

SEQ ID NO: 95915 - RNA, 19 nt, Homo sapiens
  misc_RNA (1)...(19): siRNA sense strand
guucaaacaugucuaaacc

SEQ ID NO: 95916 - RNA, 19 nt, Homo sapiens
  misc_RNA (1)...(19): siRNA sense strand
ccaccuacaauccuugaaa

SEQ ID NO: 95917 - RNA, 19 nt, Homo sapiens
  misc_RNA (1)...(19): siRNA sense strand
gcaaggaaccccaguagug

SEQ ID NO: 95918 - RNA, 19 nt, Homo sapiens
  misc_RNA (1)...(19): siRNA sense strand
cuugaaagaccuuaaacaa

SEQ ID NO: 95919 - RNA, 19 nt, Homo sapiens
  misc_RNA (1)...(19): siRNA sense strand
ggacuauccaccuacaauc

SEQ ID NO: 95920 - RNA, 19 nt, Homo sapiens
  misc_RNA (1)...(19): siRNA sense strand
aaucauugcuacacugaag

SEQ ID NO: 95921 - RNA, 19 nt, Homo sapiens
  misc_RNA (1)...(19): siRNA sense strand
gggacuauccaccuacaau

SEQ ID NO: 95922 - RNA, 19 nt, Homo sapiens
  misc_RNA (1)...(19): siRNA sense strand
uugcuacacugaagaaugg

SEQ ID NO: 95923 - RNA, 19 nt, Homo sapiens
  misc_RNA (1)...(19): siRNA sense strand
gcaccaaccaagggacuau

SEQ ID NO: 95924 - RNA, 19 nt, Homo sapiens
  misc_RNA (1)...(19): siRNA sense strand
caccuacaauccuugaaag

SEQ ID NO: 95925 - RNA, 19 nt, Homo sapiens
  misc_RNA (1)...(19): siRNA sense strand
guucgaaaaucucaacguu

SEQ ID NO: 95926 - RNA, 19 nt, Homo sapiens
  misc_RNA (1)...(19): siRNA sense strand
gcagaugugaaggaacuga

SEQ ID NO: 95927 - RNA, 19 nt, Homo sapiens
  misc_RNA (1)...(19): siRNA sense strand
gucaaaagaagacuacaua

SEQ ID NO: 95928 - RNA, 19 nt, Homo sapiens
  misc_RNA (1)...(19): siRNA sense strand
gaaccccaguagugagaaa

SEQ ID NO: 95929 - RNA, 19 nt, Homo sapiens
  misc_RNA (1)...(19): siRNA sense strand
agaaacaggucagccaaaa

SEQ ID NO: 95930 - RNA, 19 nt, Homo sapiens
  misc_RNA (1)...(19): siRNA sense strand
ugagaaagggucgcuguuc

SEQ ID NO: 95931 - RNA, 19 nt, Homo sapiens
  misc_RNA (1)...(19): siRNA sense strand
gcgagaaaauugaaaucau

SEQ ID NO: 95932 - RNA, 19 nt, Homo sapiens
  misc_RNA (1)...(19): siRNA sense strand
ggucgcuguuccugcauca

SEQ ID NO: 95933 - RNA, 19 nt, Homo sapiens
  misc_RNA (1)...(19): siRNA sense strand
gugaaggaacugauuaaaa

SEQ ID NO: 95934 - RNA, 19 nt, Homo sapiens
  misc_RNA (1)...(19): siRNA sense strand
ccucuugggcaucaucuug

SEQ ID NO: 95935 - RNA, 19 nt, Homo sapiens
  misc_RNA (1)...(19): siRNA sense strand
aaacaggucagccaaaaga

SEQ ID NO: 95936 - RNA, 19 nt, Homo sapiens
  misc_RNA (1)...(19): siRNA sense strand
aagaauggaguucaaacau

SEQ ID NO: 95937 - RNA, 19 nt, Homo sapiens
  misc_RNA (1)...(19): siRNA sense strand
gaacaaagaucugugaauu

SEQ ID NO: 95938 - RNA, 19 nt, Homo sapiens
  misc_RNA (1)...(19): siRNA sense strand
gaagaaggcggaauaauaa

SEQ ID NO: 95939 - RNA, 19 nt, Homo sapiens
  misc_RNA (1)...(19): siRNA sense strand
gcuagaugcuuuagucuua

SEQ ID NO: 95940 - RNA, 19 nt, Homo sapiens
  misc_RNA (1)...(19): siRNA sense strand
ggagaagaguuauuauuug

SEQ ID NO: 95941 - RNA, 19 nt, Homo sapiens
  misc_RNA (1)...(19): siRNA sense strand
gcacagauauuccuuacau

SEQ ID NO: 95942 - RNA, 19 nt, Homo sapiens
  misc_RNA (1)...(19): siRNA sense strand
uaaagaggcugcaugaguu

SEQ ID NO: 95943 - RNA, 19 nt, Homo sapiens
  misc_RNA (1)...(19): siRNA sense strand
ugaagaaggcggaauaaua

SEQ ID NO: 95944 - RNA, 19 nt, Homo sapiens
  misc_RNA (1)...(19): siRNA sense strand
aaaggaagaugaugaaaga

SEQ ID NO: 95945 - RNA, 19 nt, Homo sapiens
  misc_RNA (1)...(19): siRNA sense strand
agagaaagcuuccacagaa

SEQ ID NO: 95946 - RNA, 19 nt, Homo sapiens
  misc_RNA (1)...(19): siRNA sense strand
caucagcuguuugcaauua

SEQ ID NO: 95947 - RNA, 19 nt, Homo sapiens
  misc_RNA (1)...(19): siRNA sense strand
ggacaugccaguaguguaa

SEQ ID NO: 95948 - RNA, 19 nt, Homo sapiens
  misc_RNA (1)...(19): siRNA sense strand
gaaaggauguaacaagagu

SEQ ID NO: 95949 - RNA, 19 nt, Homo sapiens
  misc_RNA (1)...(19): siRNA sense strand
gaagaaagggaaagugaaa

SEQ ID NO: 95950 - RNA, 19 nt, Homo sapiens
  misc_RNA (1)...(19): siRNA sense strand
aaagaacgcugaagaguca

SEQ ID NO: 95951 - RNA, 19 nt, Homo sapiens
  misc_RNA (1)...(19): siRNA sense strand
agaaagaacucgucacugu

SEQ ID NO: 95952 - RNA, 19 nt, Homo sapiens
  misc_RNA (1)...(19): siRNA sense strand
gcucaugaguuucggagua

SEQ ID NO: 95953 - RNA, 19 nt, Homo sapiens
  misc_RNA (1)...(19): siRNA sense strand
ggaacgggaucguggauug

SEQ ID NO: 95954 - RNA, 19 nt, Homo sapiens
  misc_RNA (1)...(19): siRNA sense strand
ggacaaaucagauguucaa

SEQ ID NO: 95955 - RNA, 19 nt, Homo sapiens
  misc_RNA (1)...(19): siRNA sense strand
aaacgaggauggcaaagaa

SEQ ID NO: 95956 - RNA, 19 nt, Homo sapiens
  misc_RNA (1)...(19): siRNA sense strand
gagaaagcuuccacagaaa

SEQ ID NO: 95957 - RNA, 19 nt, Homo sapiens
  misc_RNA (1)...(19): siRNA sense strand
gcacgaagccagaucuuug

SEQ ID NO: 95958 - RNA, 19 nt, Homo sapiens
  misc_RNA (1)...(19): siRNA sense strand
gccuaaagcucuuaaacuu

SEQ ID NO: 95959 - RNA, 19 nt, Homo sapiens
  misc_RNA (1)...(19): siRNA sense strand
gaaacaagucuuugggaaa

SEQ ID NO: 95960 - RNA, 19 nt, Homo sapiens
  misc_RNA (1)...(19): siRNA sense strand
gaacagucuucaccuuuca

SEQ ID NO: 95961 - RNA, 19 nt, Homo sapiens
  misc_RNA (1)...(19): siRNA sense strand
ucaaugagguuggaagaaa

SEQ ID NO: 95962 - RNA, 19 nt, Homo sapiens
  misc_RNA (1)...(19): siRNA sense strand
gugagaaccuauaugauga

SEQ ID NO: 95963 - RNA, 19 nt, Homo sapiens
  misc_RNA (1)...(19): siRNA sense strand
uaucaaacauccaaggaaa

SEQ ID NO: 95964 - RNA, 19 nt, Homo sapiens
  misc_RNA (1)...(19): siRNA sense strand
gaagagaucgacauugaug

SEQ ID NO: 95965 - RNA, 19 nt, Homo sapiens
  misc_RNA (1)...(19): siRNA sense strand
guaauugugucuggaauga

SEQ ID NO: 95966 - RNA, 19 nt, Homo sapiens
  misc_RNA (1)...(19): siRNA sense strand
gaaagaugaugaucgacau

SEQ ID NO: 95967 - RNA, 19 nt, Homo sapiens
  misc_RNA (1)...(19): siRNA sense strand
gcagucaccuugcaguaga

SEQ ID NO: 95968 - RNA, 19 nt, Homo sapiens
  misc_RNA (1)...(19): siRNA sense strand
cggcaaagcagcaucaaua

SEQ ID NO: 95969 - RNA, 19 nt, Homo sapiens
  misc_RNA (1)...(19): siRNA sense strand
uggaauaccugcaagaaga

SEQ ID NO: 95970 - RNA, 19 nt, Homo sapiens
  misc_RNA (1)...(19): siRNA sense strand
ccaugucgcugaagcaauu

SEQ ID NO: 95971 - RNA, 19 nt, Homo sapiens
  misc_RNA (1)...(19): siRNA sense strand
agagugaucugguggauga

SEQ ID NO: 95972 - RNA, 19 nt, Homo sapiens
  misc_RNA (1)...(19): siRNA sense strand
gauaucaucuucugguaca

SEQ ID NO: 95973 - RNA, 19 nt, Homo sapiens
  misc_RNA (1)...(19): siRNA sense strand
gaaaugggauggaaaacuu

SEQ ID NO: 95974 - RNA, 19 nt, Homo sapiens
  misc_RNA (1)...(19): siRNA sense strand
ggaaauuaauccuccuugu

SEQ ID NO: 95975 - RNA, 19 nt, Homo sapiens
  misc_RNA (1)...(19): siRNA sense strand
gaaaggaacaaacguaucu

SEQ ID NO: 95976 - RNA, 19 nt, Homo sapiens
  misc_RNA (1)...(19): siRNA sense strand
ccacagaaacugaaugcua

SEQ ID NO: 95977 - RNA, 19 nt, Homo sapiens
  misc_RNA (1)...(19): siRNA sense strand
guucaacaauaccuucuuu

SEQ ID NO: 95978 - RNA, 19 nt, Homo sapiens
  misc_RNA (1)...(19): siRNA sense strand
aggaagagaucgacauuga

SEQ ID NO: 95979 - RNA, 19 nt, Homo sapiens
  misc_RNA (1)...(19): siRNA sense strand
gagagauccucaugucaga

SEQ ID NO: 95980 - RNA, 19 nt, Homo sapiens
  misc_RNA (1)...(19): siRNA sense strand
caacaauaccuucuuugaa

SEQ ID NO: 95981 - RNA, 19 nt, Homo sapiens
  misc_RNA (1)...(19): siRNA sense strand
ggagaagcccucuuggaaa

SEQ ID NO: 95982 - RNA, 19 nt, Homo sapiens
  misc_RNA (1)...(19): siRNA sense strand
gagaagcccucuuggaaac

SEQ ID NO: 95983 - RNA, 19 nt, Homo sapiens
  misc_RNA (1)...(19): siRNA sense strand
aaagagcaguuugcagaua

SEQ ID NO: 95984 - RNA, 19 nt, Homo sapiens
  misc_RNA (1)...(19): siRNA sense strand
gaaauuaauccuccuugug

SEQ ID NO: 95985 - RNA, 19 nt, Homo sapiens
  misc_RNA (1)...(19): siRNA sense strand
gaaacuggcccgaaacauc

SEQ ID NO: 95986 - RNA, 19 nt, Homo sapiens
  misc_RNA (1)...(19): siRNA sense strand
gaagccagaucuuugucuu

SEQ ID NO: 95987 - RNA, 19 nt, Homo sapiens
  misc_RNA (1)...(19): siRNA sense strand
aaacuucccugcagacugu

SEQ ID NO: 95988 - RNA, 19 nt, Homo sapiens
  misc_RNA (1)...(19): siRNA sense strand
ggaagaaaucaaugaaaga

SEQ ID NO: 95989 - RNA, 19 nt, Homo sapiens
  misc_RNA (1)...(19): siRNA sense strand
gaauuucgcacauaugaug

SEQ ID NO: 95990 - RNA, 19 nt, Homo sapiens
  misc_RNA (1)...(19): siRNA sense strand
ugaacugggugaaugcuuu

SEQ ID NO: 95991 - RNA, 19 nt, Homo sapiens
  misc_RNA (1)...(19): siRNA sense strand
ggaaacgacaaauauagaa

SEQ ID NO: 95992 - RNA, 19 nt, Homo sapiens
  misc_RNA (1)...(19): siRNA sense strand
cggagaagaguuauuauuu

SEQ ID NO: 95993 - RNA, 19 nt, Homo sapiens
  misc_RNA (1)...(19): siRNA sense strand
ggugagaaccuauaugaug

SEQ ID NO: 95994 - RNA, 19 nt, Homo sapiens
  misc_RNA (1)...(19): siRNA sense strand
gaugaugauuggaaagaug

SEQ ID NO: 95995 - RNA, 19 nt, Homo sapiens
  misc_RNA (1)...(19): siRNA sense strand
gaugcuagaugcuuuaguc

SEQ ID NO: 95996 - RNA, 19 nt, Homo sapiens
  misc_RNA (1)...(19): siRNA sense strand
ugacagaaaugggauggaa

SEQ ID NO: 95997 - RNA, 19 nt, Homo sapiens
  misc_RNA (1)...(19): siRNA sense strand
agauagagcugcugaacug

SEQ ID NO: 95998 - RNA, 19 nt, Homo sapiens
  misc_RNA (1)...(19): siRNA sense strand
ccagcuugcuuuggaguua

SEQ ID NO: 95999 - RNA, 19 nt, Homo sapiens
  misc_RNA (1)...(19): siRNA sense strand
aggaagaccugguuggaaa

SEQ ID NO: 96000 - RNA, 19 nt, Homo sapiens
  misc_RNA (1)...(19): siRNA sense strand
cuaugaaacuccugaccua

SEQ ID NO: 96001 - RNA, 19 nt, Homo sapiens
  misc_RNA (1)...(19): siRNA sense strand
gcaaagccacggagaagga

SEQ ID NO: 96002 - RNA, 19 nt, Homo sapiens
  misc_RNA (1)...(19): siRNA sense strand
uaacugcccugcugaaagg

SEQ ID NO: 96003 - RNA, 19 nt, Homo sapiens
  misc_RNA (1)...(19): siRNA sense strand
gcacaucucccuccagaag

SEQ ID NO: 96004 - RNA, 19 nt, Homo sapiens
  misc_RNA (1)...(19): siRNA sense strand
uggaaaggauguaacaaga

SEQ ID NO: 96005 - RNA, 19 nt, Homo sapiens
  misc_RNA (1)...(19): siRNA sense strand
gaaggcggaauaauaaaug

SEQ ID NO: 96006 - RNA, 19 nt, Homo sapiens
  misc_RNA (1)...(19): siRNA sense strand
gaucaaugcuuguaaaaca

SEQ ID NO: 96007 - RNA, 19 nt, Homo sapiens
  misc_RNA (1)...(19): siRNA sense strand
gaaacgaucaaugcuugua

SEQ ID NO: 96008 - RNA, 19 nt, Homo sapiens
  misc_RNA (1)...(19): siRNA sense strand
gcuaccugcugcuguuuaa

SEQ ID NO: 96009 - RNA, 19 nt, Homo sapiens
  misc_RNA (1)...(19): siRNA sense strand
acaaagaucugugaauucu

SEQ ID NO: 96010 - RNA, 19 nt, Homo sapiens
  misc_RNA (1)...(19): siRNA sense strand
cuaaagcucuuaaacuucu

SEQ ID NO: 96011 - RNA, 19 nt, Homo sapiens
  misc_RNA (1)...(19): siRNA sense strand
gaagaaagaacucgucacu

SEQ ID NO: 96012 - RNA, 19 nt, Homo sapiens
  misc_RNA (1)...(19): siRNA sense strand
gaauaaggaagaccugguu

SEQ ID NO: 96013 - RNA, 19 nt, Homo sapiens
  misc_RNA (1)...(19): siRNA sense strand
ccagaagcuucgucuauuc

SEQ ID NO: 96014 - RNA, 19 nt, Homo sapiens
  misc_RNA (1)...(19): siRNA sense strand
ggucacuucugaaagaguu

SEQ ID NO: 96015 - RNA, 19 nt, Homo sapiens
  misc_RNA (1)...(19): siRNA sense strand
guauauccguguauccuau

SEQ ID NO: 96016 - RNA, 19 nt, Homo sapiens
  misc_RNA (1)...(19): siRNA sense strand
gcagaucgcuaugaaacuc

SEQ ID NO: 96017 - RNA, 19 nt, Homo sapiens
  misc_RNA (1)...(19): siRNA sense strand
gggagcagcuucuaguuac

SEQ ID NO: 96018 - RNA, 19 nt, Homo sapiens
  misc_RNA (1)...(19): siRNA sense strand
gugaagcuccugauugaaa

SEQ ID NO: 96019 - RNA, 19 nt, Homo sapiens
  misc_RNA (1)...(19): siRNA sense strand
ggacaggacaaaucagaug

SEQ ID NO: 96020 - RNA, 19 nt, Homo sapiens
  misc_RNA (1)...(19): siRNA sense strand
gcaccuagucccagaaugu

SEQ ID NO: 96021 - RNA, 19 nt, Homo sapiens
  misc_RNA (1)...(19): siRNA sense strand
gcaaccuuccgccugauua

SEQ ID NO: 96022 - RNA, 19 nt, Homo sapiens
  misc_RNA (1)...(19): siRNA sense strand
ccacggagaaggagaagaa

SEQ ID NO: 96023 - RNA, 19 nt, Homo sapiens
  misc_RNA (1)...(19): siRNA sense strand
aaagacagacagacucuaa

SEQ ID NO: 96024 - RNA, 19 nt, Homo sapiens
  misc_RNA (1)...(19): siRNA sense strand
ggaagagaaggacgugaaa

SEQ ID NO: 96025 - RNA, 19 nt, Homo sapiens
  misc_RNA (1)...(19): siRNA sense strand
uauuagaccaguccuauaa

SEQ ID NO: 96026 - RNA, 19 nt, Homo sapiens
  misc_RNA (1)...(19): siRNA sense strand
ggaggaagagaucgacauu

SEQ ID NO: 96027 - RNA, 19 nt, Homo sapiens
  misc_RNA (1)...(19): siRNA sense strand
ggauaacaauuccaaagac

SEQ ID NO: 96028 - RNA, 19 nt, Homo sapiens
  misc_RNA (1)...(19): siRNA sense strand
ggaaugacagcagaagaaa

SEQ ID NO: 96029 - RNA, 19 nt, Homo sapiens
  misc_RNA (1)...(19): siRNA sense strand
ggccauacgugaugaugau

SEQ ID NO: 96030 - RNA, 19 nt, Homo sapiens
  misc_RNA (1)...(19): siRNA sense strand
gaugcuggcucaagaaagg

SEQ ID NO: 96031 - RNA, 19 nt, Homo sapiens
  misc_RNA (1)...(19): siRNA sense strand
caacucgaccugccucaaa

SEQ ID NO: 96032 - RNA, 19 nt, Homo sapiens
  misc_RNA (1)...(19): siRNA sense strand
gauaacaauuccaaagacu

SEQ ID NO: 96033 - RNA, 19 nt, Homo sapiens
  misc_RNA (1)...(19): siRNA sense strand
cacaucagcuguuugcaau

SEQ ID NO: 96034 - RNA, 19 nt, Homo sapiens
  misc_RNA (1)...(19): siRNA sense strand
uaaccaggauguagaguac

SEQ ID NO: 96035 - RNA, 19 nt, Homo sapiens
  misc_RNA (1)...(19): siRNA sense strand
aaguuuggcuucaggagua

SEQ ID NO: 96036 - RNA, 19 nt, Homo sapiens
  misc_RNA (1)...(19): siRNA sense strand
ggaggagcuuuauaacaca

SEQ ID NO: 96037 - RNA, 19 nt, Homo sapiens
  misc_RNA (1)...(19): siRNA sense strand
gcacugaccugcauggaaa

SEQ ID NO: 96038 - RNA, 19 nt, Homo sapiens
  misc_RNA (1)...(19): siRNA sense strand
gaaggaggccgacaucaug

SEQ ID NO: 96039 - RNA, 19 nt, Homo sapiens
  misc_RNA (1)...(19): siRNA sense strand
agaacuggcugcggcuuua

SEQ ID NO: 96040 - RNA, 19 nt, Homo sapiens
  misc_RNA (1)...(19): siRNA sense strand
uccaggaggugcccuauga

SEQ ID NO: 96041 - RNA, 19 nt, Homo sapiens
  misc_RNA (1)...(19): siRNA sense strand
caaccaccaucugaccuuu

SEQ ID NO: 96042 - RNA, 19 nt, Homo sapiens
  misc_RNA (1)...(19): siRNA sense strand
gaugagcccuggaccuucu

SEQ ID NO: 96043 - RNA, 19 nt, Homo sapiens
  misc_RNA (1)...(19): siRNA sense strand
cgacaucaugguacucuuu

SEQ ID NO: 96044 - RNA, 19 nt, Homo sapiens
  misc_RNA (1)...(19): siRNA sense strand
cggagaaguugggcuggua

SEQ ID NO: 96045 - RNA, 19 nt, Homo sapiens
  misc_RNA (1)...(19): siRNA sense strand
ucuacaagggcaccaaaua

SEQ ID NO: 96046 - RNA, 19 nt, Homo sapiens
  misc_RNA (1)...(19): siRNA sense strand
ggaggccgacaucauggua

SEQ ID NO: 96047 - RNA, 19 nt, Homo sapiens
  misc_RNA (1)...(19): siRNA sense strand
acuggaaauucgacaauga

SEQ ID NO: 96048 - RNA, 19 nt, Homo sapiens
  misc_RNA (1)...(19): siRNA sense strand
gcaccaaauacuggaaauu

SEQ ID NO: 96049 - RNA, 19 nt, Homo sapiens
  misc_RNA (1)...(19): siRNA sense strand
gagaacuggcugcggcuuu

SEQ ID NO: 96050 - RNA, 19 nt, Homo sapiens
  misc_RNA (1)...(19): siRNA sense strand
ggagguccaugccgagaac

SEQ ID NO: 96051 - RNA, 19 nt, Homo sapiens
  misc_RNA (1)...(19): siRNA sense strand
cgccacguguccugcuuua

SEQ ID NO: 96052 - RNA, 19 nt, Homo sapiens
  misc_RNA (1)...(19): siRNA sense strand
gacagguacuggcgcuuca

SEQ ID NO: 96053 - RNA, 19 nt, Homo sapiens
  misc_RNA (1)...(19): siRNA sense strand
gggccuuccugagcaauga

SEQ ID NO: 96054 - RNA, 19 nt, Homo sapiens
  misc_RNA (1)...(19): siRNA sense strand
gcauggaaacaaccucuuc

SEQ ID NO: 96055 - RNA, 19 nt, Homo sapiens
  misc_RNA (1)...(19): siRNA sense strand
gggagauguucguguucaa

SEQ ID NO: 96056 - RNA, 19 nt, Homo sapiens
  misc_RNA (1)...(19): siRNA sense strand
ccuuuagcauccagaacua

SEQ ID NO: 96057 - RNA, 19 nt, Homo sapiens
  misc_RNA (1)...(19): siRNA sense strand
caccaaauacuggaaauuc

SEQ ID NO: 96058 - RNA, 19 nt, Homo sapiens
  misc_RNA (1)...(19): siRNA sense strand
ccacaggccacaccuucuu

SEQ ID NO: 96059 - RNA, 19 nt, Homo sapiens
  misc_RNA (1)...(19): siRNA sense strand
cagcccagccgccauaugu

SEQ ID NO: 96060 - RNA, 19 nt, Homo sapiens
  misc_RNA (1)...(19): siRNA sense strand
ccaaauacuggaaauucga

SEQ ID NO: 96061 - RNA, 19 nt, Homo sapiens
  misc_RNA (1)...(19): siRNA sense strand
ccggugugcucgacgaaga

SEQ ID NO: 96062 - RNA, 19 nt, Homo sapiens
  misc_RNA (1)...(19): siRNA sense strand
cagccuacaccuacuucua

SEQ ID NO: 96063 - RNA, 19 nt, Homo sapiens
  misc_RNA (1)...(19): siRNA sense strand
ccucggcccuugcagagau

SEQ ID NO: 96064 - RNA, 19 nt, Homo sapiens
  misc_RNA (1)...(19): siRNA sense strand
cagaugagcccuggaccuu

SEQ ID NO: 96065 - RNA, 19 nt, Homo sapiens
  misc_RNA (1)...(19): siRNA sense strand
uggaacaaccaccaucuga

SEQ ID NO: 96066 - RNA, 19 nt, Homo sapiens
  misc_RNA (1)...(19): siRNA sense strand
ccuacgcgcuggugcagau

SEQ ID NO: 96067 - RNA, 19 nt, Homo sapiens
  misc_RNA (1)...(19): siRNA sense strand
cuacaagggcaccaaauac

SEQ ID NO: 96068 - RNA, 19 nt, Homo sapiens
  misc_RNA (1)...(19): siRNA sense strand
ggaggaaguggaacaacca

SEQ ID NO: 96069 - RNA, 19 nt, Homo sapiens
  misc_RNA (1)...(19): siRNA sense strand
gaacuggcugcggcuuuau

SEQ ID NO: 96070 - RNA, 19 nt, Homo sapiens
  misc_RNA (1)...(19): siRNA sense strand
gacaucaugguacucuuug

SEQ ID NO: 96071 - RNA, 19 nt, Homo sapiens
  misc_RNA (1)...(19): siRNA sense strand
gcagagaugcagcgcuucu

SEQ ID NO: 96072 - RNA, 19 nt, Homo sapiens
  misc_RNA (1)...(19): siRNA sense strand
gaccgcuacuggcucuuuc

SEQ ID NO: 96073 - RNA, 19 nt, Homo sapiens
  misc_RNA (1)...(19): siRNA sense strand
gcugguaccacucgaugga

SEQ ID NO: 96074 - RNA, 19 nt, Homo sapiens
  misc_RNA (1)...(19): siRNA sense strand
ggauggggauggggacuuu

SEQ ID NO: 96075 - RNA, 19 nt, Homo sapiens
  misc_RNA (1)...(19): siRNA sense strand
ccacguguccugcuuuacu

SEQ ID NO: 96076 - RNA, 19 nt, Homo sapiens
  misc_RNA (1)...(19): siRNA sense strand
ugauggcaccgguggcuuu

SEQ ID NO: 96077 - RNA, 19 nt, Homo sapiens
  misc_RNA (1)...(19): siRNA sense strand
gggcaccaaauacuggaaa

SEQ ID NO: 96078 - RNA, 19 nt, Homo sapiens
  misc_RNA (1)...(19): siRNA sense strand
gguacuggcgcuucaacga

SEQ ID NO: 96079 - RNA, 19 nt, Homo sapiens
  misc_RNA (1)...(19): siRNA sense strand
gcauugacacggccaucug

SEQ ID NO: 96080 - RNA, 19 nt, Homo sapiens
  misc_RNA (1)...(19): siRNA sense strand
agaaggaggccgacaucau

SEQ ID NO: 96081 - RNA, 19 nt, Homo sapiens
  misc_RNA (1)...(19): siRNA sense strand
ggcaccaaauacuggaaau

SEQ ID NO: 96082 - RNA, 19 nt, Homo sapiens
  misc_RNA (1)...(19): siRNA sense strand
gcaaugacgcagccuacac

SEQ ID NO: 96083 - RNA, 19 nt, Homo sapiens
  misc_RNA (1)...(19): siRNA sense strand
ugaccugcauggaaacaac

SEQ ID NO: 96084 - RNA, 19 nt, Homo sapiens
  misc_RNA (1)...(19): siRNA sense strand
gcggggagauguucguguu

SEQ ID NO: 96085 - RNA, 19 nt, Homo sapiens
  misc_RNA (1)...(19): siRNA sense strand
ugacacaguggccaugcuu

SEQ ID NO: 96086 - RNA, 19 nt, Homo sapiens
  misc_RNA (1)...(19): siRNA sense strand
ccacaccuucuucuuccaa

SEQ ID NO: 96087 - RNA, 19 nt, Homo sapiens
  misc_RNA (1)...(19): siRNA sense strand
caagaagaguccagugaua

SEQ ID NO: 96088 - RNA, 19 nt, Homo sapiens
  misc_RNA (1)...(19): siRNA sense strand
gagaaaggcuaucccagaa

SEQ ID NO: 96089 - RNA, 19 nt, Homo sapiens
  misc_RNA (1)...(19): siRNA sense strand
gaaaggcuaucccagaaau

SEQ ID NO: 96090 - RNA, 19 nt, Homo sapiens
  misc_RNA (1)...(19): siRNA sense strand
gauaagggaugaggaagaa

SEQ ID NO: 96091 - RNA, 19 nt, Homo sapiens
  misc_RNA (1)...(19): siRNA sense strand
gcuaugaguuggcaagaug

SEQ ID NO: 96092 - RNA, 19 nt, Homo sapiens
  misc_RNA (1)...(19): siRNA sense strand
gaagaccuaugcuuucaag

SEQ ID NO: 96093 - RNA, 19 nt, Homo sapiens
  misc_RNA (1)...(19): siRNA sense strand
ggaugcagcucucuauugg

SEQ ID NO: 96094 - RNA, 19 nt, Homo sapiens
  misc_RNA (1)...(19): siRNA sense strand
gggaagaccuaugcuuuca

SEQ ID NO: 96095 - RNA, 19 nt, Homo sapiens
  misc_RNA (1)...(19): siRNA sense strand
acaauggauucacuucuuu

SEQ ID NO: 96096 - RNA, 19 nt, Homo sapiens
  misc_RNA (1)...(19): siRNA sense strand
gguagaaccuaaccuggau

SEQ ID NO: 96097 - RNA, 19 nt, Homo sapiens
  misc_RNA (1)...(19): siRNA sense strand
ccaaucaaggguuuguuua

SEQ ID NO: 96098 - RNA, 19 nt, Homo sapiens
  misc_RNA (1)...(19): siRNA sense strand
cacaauggauucacuucuu

SEQ ID NO: 96099 - RNA, 19 nt, Homo sapiens
  misc_RNA (1)...(19): siRNA sense strand
gaacacaauggauucacuu

SEQ ID NO: 96100 - RNA, 19 nt, Homo sapiens
  misc_RNA (1)...(19): siRNA sense strand
guguggcgcuacauuaauu

SEQ ID NO: 96101 - RNA, 19 nt, Homo sapiens
  misc_RNA (1)...(19): siRNA sense strand
ugaacuggaugccaugaug

SEQ ID NO: 96102 - RNA, 19 nt, Homo sapiens
  misc_RNA (1)...(19): siRNA sense strand
gacuauguguggacuguau

SEQ ID NO: 96103 - RNA, 19 nt, Homo sapiens
  misc_RNA (1)...(19): siRNA sense strand
gaagcugaauaggguagaa

SEQ ID NO: 96104 - RNA, 19 nt, Homo sapiens
  misc_RNA (1)...(19): siRNA sense strand
gcaagaagaguccagugau

SEQ ID NO: 96105 - RNA, 19 nt, Homo sapiens
  misc_RNA (1)...(19): siRNA sense strand
caauggauucacuucuuua

SEQ ID NO: 96106 - RNA, 19 nt, Homo sapiens
  misc_RNA (1)...(19): siRNA sense strand
gugggaagaccuaugcuuu

SEQ ID NO: 96107 - RNA, 19 nt, Homo sapiens
  misc_RNA (1)...(19): siRNA sense strand
guacgggcauaaccuugga

SEQ ID NO: 96108 - RNA, 19 nt, Homo sapiens
  misc_RNA (1)...(19): siRNA sense strand
ggcuaucccagaaauauuu

SEQ ID NO: 96109 - RNA, 19 nt, Homo sapiens
  misc_RNA (1)...(19): siRNA sense strand
ggcaagaagaguccaguga

SEQ ID NO: 96110 - RNA, 19 nt, Homo sapiens
  misc_RNA (1)...(19): siRNA sense strand
gacaagguguggcgcuaca

SEQ ID NO: 96111 - RNA, 19 nt, Homo sapiens
  misc_RNA (1)...(19): siRNA sense strand
uggauucacuucuuuaagg

SEQ ID NO: 96112 - RNA, 19 nt, Homo sapiens
  misc_RNA (1)...(19): siRNA sense strand
aagaagaguccagugauaa

SEQ ID NO: 96113 - RNA, 19 nt, Homo sapiens
  misc_RNA (1)...(19): siRNA sense strand
cuacucgccucgaacacaa

SEQ ID NO: 96114 - RNA, 19 nt, Homo sapiens
  misc_RNA (1)...(19): siRNA sense strand
uaagggaugaggaagaaga

SEQ ID NO: 96115 - RNA, 19 nt, Homo sapiens
  misc_RNA (1)...(19): siRNA sense strand
ggcauaaccuuggauacca

SEQ ID NO: 96116 - RNA, 19 nt, Homo sapiens
  misc_RNA (1)...(19): siRNA sense strand
caaccagcagcuucgagua

SEQ ID NO: 96117 - RNA, 19 nt, Homo sapiens
  misc_RNA (1)...(19): siRNA sense strand
gggaugaggaagaagaaga

SEQ ID NO: 96118 - RNA, 19 nt, Homo sapiens
  misc_RNA (1)...(19): siRNA sense strand
ggcgcuacauuaauuucaa

SEQ ID NO: 96119 - RNA, 19 nt, Homo sapiens
  misc_RNA (1)...(19): siRNA sense strand
gcccucggcugcuaugagu

SEQ ID NO: 96120 - RNA, 19 nt, Homo sapiens
  misc_RNA (1)...(19): siRNA sense strand
gggacuauguguggacugu

SEQ ID NO: 96121 - RNA, 19 nt, Homo sapiens
  misc_RNA (1)...(19): siRNA sense strand
ggccgagucuacuucuuca

SEQ ID NO: 96122 - RNA, 19 nt, Homo sapiens
  misc_RNA (1)...(19): siRNA sense strand
gcaagauggccgagucuac

SEQ ID NO: 96123 - RNA, 19 nt, Homo sapiens
  misc_RNA (1)...(19): siRNA sense strand
cuugggcacucccgauauu

SEQ ID NO: 96124 - RNA, 19 nt, Homo sapiens
  misc_RNA (1)...(19): siRNA sense strand
caagguguggcgcuacauu

SEQ ID NO: 96125 - RNA, 19 nt, Homo sapiens
  misc_RNA (1)...(19): siRNA sense strand
gccagacccuugcaguagu

SEQ ID NO: 96126 - RNA, 19 nt, Homo sapiens
  misc_RNA (1)...(19): siRNA sense strand
ccagacccuugcaguagug

SEQ ID NO: 96127 - RNA, 19 nt, Homo sapiens
  misc_RNA (1)...(19): siRNA sense strand
ggaagaccuaugcuuucaa

SEQ ID NO: 96128 - RNA, 19 nt, Homo sapiens
  misc_RNA (1)...(19): siRNA sense strand
gcgcuacauuaauuucaag

SEQ ID NO: 96129 - RNA, 19 nt, Homo sapiens
  misc_RNA (1)...(19): siRNA sense strand
cgaacacaauggauucacu

SEQ ID NO: 96130 - RNA, 19 nt, Homo sapiens
  misc_RNA (1)...(19): siRNA sense strand
ccgagugucugcccuuugg

SEQ ID NO: 96131 - RNA, 19 nt, Homo sapiens
  misc_RNA (1)...(19): siRNA sense strand
gcugucuacucgccucgaa

SEQ ID NO: 96132 - RNA, 19 nt, Homo sapiens
  misc_RNA (1)...(19): siRNA sense strand
gagcuagcccgaacugacu

SEQ ID NO: 96133 - RNA, 19 nt, Homo sapiens
  misc_RNA (1)...(19): siRNA sense strand
ugaggaagaagaagagaca

SEQ ID NO: 96134 - RNA, 19 nt, Homo sapiens
  misc_RNA (1)...(19): siRNA sense strand
aagacgaguucuggacuga

SEQ ID NO: 96135 - RNA, 19 nt, Homo sapiens
  misc_RNA (1)...(19): siRNA sense strand
aagguguggcgcuacauua

SEQ ID NO: 96136 - RNA, 19 nt, Homo sapiens
  misc_RNA (1)...(19): siRNA sense strand
uguguggacuguaucagau

SEQ ID NO: 96137 - RNA, 19 nt, Homo sapiens
  misc_RNA (1)...(19): siRNA sense strand
gaagaguccagugauaagg

SEQ ID NO: 96138 - RNA, 19 nt, Homo sapiens
  misc_RNA (1)...(19): siRNA sense strand
aaccacguuugaauacuga

SEQ ID NO: 96139 - RNA, 19 nt, Homo sapiens
  misc_RNA (1)...(19): siRNA sense strand
cauugcagcccaugaagug

SEQ ID NO: 96140 - RNA, 19 nt, Homo sapiens
  misc_RNA (1)...(19): siRNA sense strand
uggaugcagcucucuauug

SEQ ID NO: 96141 - RNA, 19 nt, Homo sapiens
  misc_RNA (1)...(19): siRNA sense strand
gugaaccugcgcaucauug

SEQ ID NO: 96142 - RNA, 19 nt, Homo sapiens
  misc_RNA (1)...(19): siRNA sense strand
ugauaagggaugaggaaga

SEQ ID NO: 96143 - RNA, 19 nt, Homo sapiens
  misc_RNA (1)...(19): siRNA sense strand
agaaaggcuaucccagaaa

SEQ ID NO: 96144 - RNA, 19 nt, Homo sapiens
  misc_RNA (1)...(19): siRNA sense strand
ggauccaggcucucuaugg

SEQ ID NO: 96145 - RNA, 19 nt, Homo sapiens
  misc_RNA (1)...(19): siRNA sense strand
ggaugaggaagaagaagag

SEQ ID NO: 96146 - RNA, 19 nt, Homo sapiens
  misc_RNA (1)...(19): siRNA sense strand
caaucaaggguuuguuuac

SEQ ID NO: 96147 - RNA, 19 nt, Homo sapiens
  misc_RNA (1)...(19): siRNA sense strand
ggacuauguguggacugua

SEQ ID NO: 96148 - RNA, 19 nt, Homo sapiens
  misc_RNA (1)...(19): siRNA sense strand
aaaggcuaucccagaaaua

SEQ ID NO: 96149 - RNA, 19 nt, Homo sapiens
  misc_RNA (1)...(19): siRNA sense strand
caagauggccgagucuacu

SEQ ID NO: 96150 - RNA, 19 nt, Homo sapiens
  misc_RNA (1)...(19): siRNA sense strand
gaaccugcgcaucauugca

SEQ ID NO: 96151 - RNA, 19 nt, Homo sapiens
  misc_RNA (1)...(19): siRNA sense strand
ccuggaugcugcugucuac

SEQ ID NO: 96152 - RNA, 19 nt, Homo sapiens
  misc_RNA (1)...(19): siRNA sense strand
guccagugauaagggauga

SEQ ID NO: 96153 - RNA, 19 nt, Homo sapiens
  misc_RNA (1)...(19): siRNA sense strand
gguguggcgcuacauuaau

SEQ ID NO: 96154 - RNA, 19 nt, Homo sapiens
  misc_RNA (1)...(19): siRNA sense strand
ggugaaccugcgcaucauu

SEQ ID NO: 96155 - RNA, 19 nt, Homo sapiens
  misc_RNA (1)...(19): siRNA sense strand
gcagcuucgaguagagaaa

SEQ ID NO: 96156 - RNA, 19 nt, Homo sapiens
  misc_RNA (1)...(19): siRNA sense strand
ccucggcugcuaugaguug

SEQ ID NO: 96157 - RNA, 19 nt, Homo sapiens
  misc_RNA (1)...(19): siRNA sense strand
uuacgggagugccaaacca

SEQ ID NO: 96158 - RNA, 19 nt, Homo sapiens
  misc_RNA (1)...(19): siRNA sense strand
gcagggauccaggcucucu

SEQ ID NO: 96159 - RNA, 19 nt, Homo sapiens
  misc_RNA (1)...(19): siRNA sense strand
caagaagaguccagugaua

SEQ ID NO: 96160 - RNA, 19 nt, Homo sapiens
  misc_RNA (1)...(19): siRNA sense strand
gauaagggaugaggaagaa

SEQ ID NO: 96161 - RNA, 19 nt, Homo sapiens
  misc_RNA (1)...(19): siRNA sense strand
gaagaccuaugcuuucaag

SEQ ID NO: 96162 - RNA, 19 nt, Homo sapiens
  misc_RNA (1)...(19): siRNA sense strand
gggaagaccuaugcuuuca

SEQ ID NO: 96163 - RNA, 19 nt, Homo sapiens
  misc_RNA (1)...(19): siRNA sense strand
acaauggauucacuucuuu

SEQ ID NO: 96164 - RNA, 19 nt, Homo sapiens
  misc_RNA (1)...(19): siRNA sense strand
cacaauggauucacuucuu

SEQ ID NO: 96165 - RNA, 19 nt, Homo sapiens
  misc_RNA (1)...(19): siRNA sense strand
gaacacaauggauucacuu

SEQ ID NO: 96166 - RNA, 19 nt, Homo sapiens
  misc_RNA (1)...(19): siRNA sense strand
ugaacuggaugccaugaug

SEQ ID NO: 96167 - RNA, 19 nt, Homo sapiens
  misc_RNA (1)...(19): siRNA sense strand
gacuauguguggacuguau

SEQ ID NO: 96168 - RNA, 19 nt, Homo sapiens
  misc_RNA (1)...(19): siRNA sense strand
gcaagaagaguccagugau

SEQ ID NO: 96169 - RNA, 19 nt, Homo sapiens
  misc_RNA (1)...(19): siRNA sense strand
caauggauucacuucuuua

SEQ ID NO: 96170 - RNA, 19 nt, Homo sapiens
  misc_RNA (1)...(19): siRNA sense strand
gugggaagaccuaugcuuu

SEQ ID NO: 96171 - RNA, 19 nt, Homo sapiens
  misc_RNA (1)...(19): siRNA sense strand
ggcaagaagaguccaguga

SEQ ID NO: 96172 - RNA, 19 nt, Homo sapiens
  misc_RNA (1)...(19): siRNA sense strand
aagaagaguccagugauaa

SEQ ID NO: 96173 - RNA, 19 nt, Homo sapiens
  misc_RNA (1)...(19): siRNA sense strand
cuacucgccucgaacacaa

SEQ ID NO: 96174 - RNA, 19 nt, Homo sapiens
  misc_RNA (1)...(19): siRNA sense strand
uaagggaugaggaagaaga

SEQ ID NO: 96175 - RNA, 19 nt, Homo sapiens
  misc_RNA (1)...(19): siRNA sense strand
gggaugaggaagaagaaga

SEQ ID NO: 96176 - RNA, 19 nt, Homo sapiens
  misc_RNA (1)...(19): siRNA sense strand
gggacuauguguggacugu

SEQ ID NO: 96177 - RNA, 19 nt, Homo sapiens
  misc_RNA (1)...(19): siRNA sense strand
cuugggcacucccgauauu

SEQ ID NO: 96178 - RNA, 19 nt, Homo sapiens
  misc_RNA (1)...(19): siRNA sense strand
gccagacccuugcaguagu

SEQ ID NO: 96179 - RNA, 19 nt, Homo sapiens
  misc_RNA (1)...(19): siRNA sense strand
ccagacccuugcaguagug

SEQ ID NO: 96180 - RNA, 19 nt, Homo sapiens
  misc_RNA (1)...(19): siRNA sense strand
ggaagaccuaugcuuucaa

SEQ ID NO: 96181 - RNA, 19 nt, Homo sapiens
  misc_RNA (1)...(19): siRNA sense strand
cgaacacaauggauucacu

SEQ ID NO: 96182 - RNA, 19 nt, Homo sapiens
  misc_RNA (1)...(19): siRNA sense strand
ccgagugucugcccuuugg

SEQ ID NO: 96183 - RNA, 19 nt, Homo sapiens
  misc_RNA (1)...(19): siRNA sense strand
gcugucuacucgccucgaa

SEQ ID NO: 96184 - RNA, 19 nt, Homo sapiens
  misc_RNA (1)...(19): siRNA sense strand
ugaggaagaagaagagaca

SEQ ID NO: 96185 - RNA, 19 nt, Homo sapiens
  misc_RNA (1)...(19): siRNA sense strand
uguguggacuguaucagau

SEQ ID NO: 96186 - RNA, 19 nt, Homo sapiens
  misc_RNA (1)...(19): siRNA sense strand
aagacgaguucuggacuga

SEQ ID NO: 96187 - RNA, 19 nt, Homo sapiens
  misc_RNA (1)...(19): siRNA sense strand
cauugcagcccaugaagug

SEQ ID NO: 96188 - RNA, 19 nt, Homo sapiens
  misc_RNA (1)...(19): siRNA sense strand
gaagaguccagugauaagg

SEQ ID NO: 96189 - RNA, 19 nt, Homo sapiens
  misc_RNA (1)...(19): siRNA sense strand
gugaaccugcgcaucauug

SEQ ID NO: 96190 - RNA, 19 nt, Homo sapiens
  misc_RNA (1)...(19): siRNA sense strand
ggauccaggcucucuaugg

SEQ ID NO: 96191 - RNA, 19 nt, Homo sapiens
  misc_RNA (1)...(19): siRNA sense strand
ggaugaggaagaagaagag

SEQ ID NO: 96192 - RNA, 19 nt, Homo sapiens
  misc_RNA (1)...(19): siRNA sense strand
ugauaagggaugaggaaga

SEQ ID NO: 96193 - RNA, 19 nt, Homo sapiens
  misc_RNA (1)...(19): siRNA sense strand
gaaccugcgcaucauugca

SEQ ID NO: 96194 - RNA, 19 nt, Homo sapiens
  misc_RNA (1)...(19): siRNA sense strand
ccuggaugcugcugucuac

SEQ ID NO: 96195 - RNA, 19 nt, Homo sapiens
  misc_RNA (1)...(19): siRNA sense strand
ggacuauguguggacugua

SEQ ID NO: 96196 - RNA, 19 nt, Homo sapiens
  misc_RNA (1)...(19): siRNA sense strand
guccagugauaagggauga

SEQ ID NO: 96197 - RNA, 19 nt, Homo sapiens
  misc_RNA (1)...(19): siRNA sense strand
gcagggauccaggcucucu

SEQ ID NO: 96198 - RNA, 19 nt, Homo sapiens
  misc_RNA (1)...(19): siRNA sense strand
ggugaaccugcgcaucauu

SEQ ID NO: 96199 - RNA, 19 nt, Homo sapiens
  misc_RNA (1)...(19): siRNA sense strand
gagaaaggcuaucccagaa

SEQ ID NO: 96200 - RNA, 19 nt, Homo sapiens
  misc_RNA (1)...(19): siRNA sense strand
gaaaggcuaucccagaaau

SEQ ID NO: 96201 - RNA, 19 nt, Homo sapiens
  misc_RNA (1)...(19): siRNA sense strand
gcuaugaguuggcaagaug

SEQ ID NO: 96202 - RNA, 19 nt, Homo sapiens
  misc_RNA (1)...(19): siRNA sense strand
gaagaccuaugcuuucaag

SEQ ID NO: 96203 - RNA, 19 nt, Homo sapiens
  misc_RNA (1)...(19): siRNA sense strand
ggaugcagcucucuauugg

SEQ ID NO: 96204 - RNA, 19 nt, Homo sapiens
  misc_RNA (1)...(19): siRNA sense strand
gggaagaccuaugcuuuca

SEQ ID NO: 96205 - RNA, 19 nt, Homo sapiens
  misc_RNA (1)...(19): siRNA sense strand
acaauggauucacuucuuu

SEQ ID NO: 96206 - RNA, 19 nt, Homo sapiens
  misc_RNA (1)...(19): siRNA sense strand
gguagaaccuaaccuggau

SEQ ID NO: 96207 - RNA, 19 nt, Homo sapiens
  misc_RNA (1)...(19): siRNA sense strand
ccaaucaaggguuuguuua

SEQ ID NO: 96208 - RNA, 19 nt, Homo sapiens
  misc_RNA (1)...(19): siRNA sense strand
cacaauggauucacuucuu

SEQ ID NO: 96209 - RNA, 19 nt, Homo sapiens
  misc_RNA (1)...(19): siRNA sense strand
gaacacaauggauucacuu

SEQ ID NO: 96210 - RNA, 19 nt, Homo sapiens
  misc_RNA (1)...(19): siRNA sense strand
guguggcgcuacauuaauu

SEQ ID NO: 96211 - RNA, 19 nt, Homo sapiens
  misc_RNA (1)...(19): siRNA sense strand
gacuauguguggacuguau

SEQ ID NO: 96212 - RNA, 19 nt, Homo sapiens
  misc_RNA (1)...(19): siRNA sense strand
gaagcugaauaggguagaa

SEQ ID NO: 96213 - RNA, 19 nt, Homo sapiens
  misc_RNA (1)...(19): siRNA sense strand
caauggauucacuucuuua

SEQ ID NO: 96214 - RNA, 19 nt, Homo sapiens
  misc_RNA (1)...(19): siRNA sense strand
gugggaagaccuaugcuuu

SEQ ID NO: 96215 - RNA, 19 nt, Homo sapiens
  misc_RNA (1)...(19): siRNA sense strand
guacgggcauaaccuugga

SEQ ID NO: 96216 - RNA, 19 nt, Homo sapiens
  misc_RNA (1)...(19): siRNA sense strand
ggcuaucccagaaauauuu

SEQ ID NO: 96217 - RNA, 19 nt, Homo sapiens
  misc_RNA (1)...(19): siRNA sense strand
uggauucacuucuuuaagg

SEQ ID NO: 96218 - RNA, 19 nt, Homo sapiens
  misc_RNA (1)...(19): siRNA sense strand
gacaagguguggcgcuaca

SEQ ID NO: 96219 - RNA, 19 nt, Homo sapiens
  misc_RNA (1)...(19): siRNA sense strand
cuacucgccucgaacacaa

SEQ ID NO: 96220 - RNA, 19 nt, Homo sapiens
  misc_RNA (1)...(19): siRNA sense strand
caaccagcagcuucgagua

SEQ ID NO: 96221 - RNA, 19 nt, Homo sapiens
  misc_RNA (1)...(19): siRNA sense strand
ggcauaaccuuggauacca

SEQ ID NO: 96222 - RNA, 19 nt, Homo sapiens
  misc_RNA (1)...(19): siRNA sense strand
ggcgcuacauuaauuucaa

SEQ ID NO: 96223 - RNA, 19 nt, Homo sapiens
  misc_RNA (1)...(19): siRNA sense strand
gcccucggcugcuaugagu

SEQ ID NO: 96224 - RNA, 19 nt, Homo sapiens
  misc_RNA (1)...(19): siRNA sense strand
gggacuauguguggacugu

SEQ ID NO: 96225 - RNA, 19 nt, Homo sapiens
  misc_RNA (1)...(19): siRNA sense strand
ggccgagucuacuucuuca

SEQ ID NO: 96226 - RNA, 19 nt, Homo sapiens
  misc_RNA (1)...(19): siRNA sense strand
gcaagauggccgagucuac

SEQ ID NO: 96227 - RNA, 19 nt, Homo sapiens
  misc_RNA (1)...(19): siRNA sense strand
caagguguggcgcuacauu

SEQ ID NO: 96228 - RNA, 19 nt, Homo sapiens
  misc_RNA (1)...(19): siRNA sense strand
cgaacacaauggauucacu

SEQ ID NO: 96229 - RNA, 19 nt, Homo sapiens
  misc_RNA (1)...(19): siRNA sense strand
ccgagugucugcccuuugg

SEQ ID NO: 96230 - RNA, 19 nt, Homo sapiens
  misc_RNA (1)...(19): siRNA sense strand
ggaagaccuaugcuuucaa

SEQ ID NO: 96231 - RNA, 19 nt, Homo sapiens
  misc_RNA (1)...(19): siRNA sense strand
gcgcuacauuaauuucaag

SEQ ID NO: 96232 - RNA, 19 nt, Homo sapiens
  misc_RNA (1)...(19): siRNA sense strand
gcugucuacucgccucgaa

SEQ ID NO: 96233 - RNA, 19 nt, Homo sapiens
  misc_RNA (1)...(19): siRNA sense strand
gagcuagcccgaacugacu

SEQ ID NO: 96234 - RNA, 19 nt, Homo sapiens
  misc_RNA (1)...(19): siRNA sense strand
uguguggacuguaucagau

SEQ ID NO: 96235 - RNA, 19 nt, Homo sapiens
  misc_RNA (1)...(19): siRNA sense strand
aagguguggcgcuacauua

SEQ ID NO: 96236 - RNA, 19 nt, Homo sapiens
  misc_RNA (1)...(19): siRNA sense strand
aaccacguuugaauacuga

SEQ ID NO: 96237 - RNA, 19 nt, Homo sapiens
  misc_RNA (1)...(19): siRNA sense strand
uggaugcagcucucuauug

SEQ ID NO: 96238 - RNA, 19 nt, Homo sapiens
  misc_RNA (1)...(19): siRNA sense strand
agaaaggcuaucccagaaa

SEQ ID NO: 96239 - RNA, 19 nt, Homo sapiens
  misc_RNA (1)...(19): siRNA sense strand
caaucaaggguuuguuuac

SEQ ID NO: 96240 - RNA, 19 nt, Homo sapiens
  misc_RNA (1)...(19): siRNA sense strand
ggacuauguguggacugua

SEQ ID NO: 96241 - RNA, 19 nt, Homo sapiens
  misc_RNA (1)...(19): siRNA sense strand
aaaggcuaucccagaaaua

SEQ ID NO: 96242 - RNA, 19 nt, Homo sapiens
  misc_RNA (1)...(19): siRNA sense strand
caagauggccgagucuacu

SEQ ID NO: 96243 - RNA, 19 nt, Homo sapiens
  misc_RNA (1)...(19): siRNA sense strand
ccuggaugcugcugucuac

SEQ ID NO: 96244 - RNA, 19 nt, Homo sapiens
  misc_RNA (1)...(19): siRNA sense strand
gguguggcgcuacauuaau

SEQ ID NO: 96245 - RNA, 19 nt, Homo sapiens
  misc_RNA (1)...(19): siRNA sense strand
uuacgggagugccaaacca

SEQ ID NO: 96246 - RNA, 19 nt, Homo sapiens
  misc_RNA (1)...(19): siRNA sense strand
gcagcuucgaguagagaaa

SEQ ID NO: 96247 - RNA, 19 nt, Homo sapiens
  misc_RNA (1)...(19): siRNA sense strand
ccucggcugcuaugaguug

SEQ ID NO: 96248 - RNA, 19 nt, Homo sapiens
  misc_RNA (1)...(19): siRNA sense strand
caacggcgcucuggauaau

SEQ ID NO: 96249 - RNA, 19 nt, Homo sapiens
  misc_RNA (1)...(19): siRNA sense strand
caacagauuugggacauuc

SEQ ID NO: 96250 - RNA, 19 nt, Homo sapiens
  misc_RNA (1)...(19): siRNA sense strand
gcaugaacacccacuuuaa

SEQ ID NO: 96251 - RNA, 19 nt, Homo sapiens
  misc_RNA (1)...(19): siRNA sense strand
gcaccuucuuugacaagua

SEQ ID NO: 96252 - RNA, 19 nt, Homo sapiens
  misc_RNA (1)...(19): siRNA sense strand
gagcaugaacacccacuuu

SEQ ID NO: 96253 - RNA, 19 nt, Homo sapiens
  misc_RNA (1)...(19): siRNA sense strand
gcacaacggcgcucuggau

SEQ ID NO: 96254 - RNA, 19 nt, Homo sapiens
  misc_RNA (1)...(19): siRNA sense strand
gcagcaugguguguucuuu

SEQ ID NO: 96255 - RNA, 19 nt, Homo sapiens
  misc_RNA (1)...(19): siRNA sense strand
gcgcagauccagcuacaga

SEQ ID NO: 96256 - RNA, 19 nt, Homo sapiens
  misc_RNA (1)...(19): siRNA sense strand
gcagcagcaugguguguuc

SEQ ID NO: 96257 - RNA, 19 nt, Homo sapiens
  misc_RNA (1)...(19): siRNA sense strand
gcagcugccucauuaugca

SEQ ID NO: 96258 - RNA, 19 nt, Homo sapiens
  misc_RNA (1)...(19): siRNA sense strand
gcugaaggguggcaagaag

SEQ ID NO: 96259 - RNA, 19 nt, Homo sapiens
  misc_RNA (1)...(19): siRNA sense strand
caacgugaccuucaacaag

SEQ ID NO: 96260 - RNA, 19 nt, Homo sapiens
  misc_RNA (1)...(19): siRNA sense strand
gcaccucggccaguaaauu

SEQ ID NO: 96261 - RNA, 19 nt, Homo sapiens
  misc_RNA (1)...(19): siRNA sense strand
ggcggucccugcauucuga

SEQ ID NO: 96262 - RNA, 19 nt, Homo sapiens
  misc_RNA (1)...(19): siRNA sense strand
guacaugcccgcugacaag

SEQ ID NO: 96263 - RNA, 19 nt, Homo sapiens
  misc_RNA (1)...(19): siRNA sense strand
agaggaaacugagccagaa

SEQ ID NO: 96264 - RNA, 19 nt, Homo sapiens
  misc_RNA (1)...(19): siRNA sense strand
ggcaucaugucuaacucua

SEQ ID NO: 96265 - RNA, 19 nt, Homo sapiens
  misc_RNA (1)...(19): siRNA sense strand
caugguguguucuuugaga

SEQ ID NO: 96266 - RNA, 19 nt, Homo sapiens
  misc_RNA (1)...(19): siRNA sense strand
gcacgagcuacgccaauga

SEQ ID NO: 96267 - RNA, 19 nt, Homo sapiens
  misc_RNA (1)...(19): siRNA sense strand
caagagagcgcgugguucu

SEQ ID NO: 96268 - RNA, 19 nt, Homo sapiens
  misc_RNA (1)...(19): siRNA sense strand
ucgacucgcuggaauacaa

SEQ ID NO: 96269 - RNA, 19 nt, Homo sapiens
  misc_RNA (1)...(19): siRNA sense strand
cgaccucccugcaaacaag

SEQ ID NO: 96270 - RNA, 19 nt, Homo sapiens
  misc_RNA (1)...(19): siRNA sense strand
aacgugaccuucaacaaga

SEQ ID NO: 96271 - RNA, 19 nt, Homo sapiens
  misc_RNA (1)...(19): siRNA sense strand
gacaguaguucgccaaacg

SEQ ID NO: 96272 - RNA, 19 nt, Homo sapiens
  misc_RNA (1)...(19): siRNA sense strand
ucgcugggcuccuucaaca

SEQ ID NO: 96273 - RNA, 19 nt, Homo sapiens
  misc_RNA (1)...(19): siRNA sense strand
ggagcaugcacccuuauuc

SEQ ID NO: 96274 - RNA, 19 nt, Homo sapiens
  misc_RNA (1)...(19): siRNA sense strand
gccugggcaucaugucuaa

SEQ ID NO: 96275 - RNA, 19 nt, Homo sapiens
  misc_RNA (1)...(19): siRNA sense strand
gcacgcgcaauucgaguau

SEQ ID NO: 96276 - RNA, 19 nt, Homo sapiens
  misc_RNA (1)...(19): siRNA sense strand
gagaccggacugagcauga

SEQ ID NO: 96277 - RNA, 19 nt, Homo sapiens
  misc_RNA (1)...(19): siRNA sense strand
ggacaguaguucgccaaac

SEQ ID NO: 96278 - RNA, 19 nt, Homo sapiens
  misc_RNA (1)...(19): siRNA sense strand
gaucagccggaccucauug

SEQ ID NO: 96279 - RNA, 19 nt, Homo sapiens
  misc_RNA (1)...(19): siRNA sense strand
cacaacggcgcucuggaua

SEQ ID NO: 96280 - RNA, 19 nt, Homo sapiens
  misc_RNA (1)...(19): siRNA sense strand
gcaaacaaggccucagcau

SEQ ID NO: 96281 - RNA, 19 nt, Homo sapiens
  misc_RNA (1)...(19): siRNA sense strand
cuacagaggcagcaguuca

SEQ ID NO: 96282 - RNA, 19 nt, Homo sapiens
  misc_RNA (1)...(19): siRNA sense strand
gcagauggcgucgcggaau

SEQ ID NO: 96283 - RNA, 19 nt, Homo sapiens
  misc_RNA (1)...(19): siRNA sense strand
cccacgaccucccugcaaa

SEQ ID NO: 96284 - RNA, 19 nt, Homo sapiens
  misc_RNA (1)...(19): siRNA sense strand
gggcuucuaguccgacaaa

SEQ ID NO: 96285 - RNA, 19 nt, Homo sapiens
  misc_RNA (1)...(19): siRNA sense strand
caugaacacccacuuuaag

SEQ ID NO: 96286 - RNA, 19 nt, Homo sapiens
  misc_RNA (1)...(19): siRNA sense strand
ccuggcaccuucuuugaca

SEQ ID NO: 96287 - RNA, 19 nt, Homo sapiens
  misc_RNA (1)...(19): siRNA sense strand
ggaaacugagccagaacga

SEQ ID NO: 96288 - RNA, 19 nt, Homo sapiens
  misc_RNA (1)...(19): siRNA sense strand
gagggcaagaggaaacuga

SEQ ID NO: 96289 - RNA, 19 nt, Homo sapiens
  misc_RNA (1)...(19): siRNA sense strand
cagauggcgucgcggaauc

SEQ ID NO: 96290 - RNA, 19 nt, Homo sapiens
  misc_RNA (1)...(19): siRNA sense strand
cgagggcuaugagcacaug

SEQ ID NO: 96291 - RNA, 19 nt, Homo sapiens
  misc_RNA (1)...(19): siRNA sense strand
gcgagaggaacuuuaacga

SEQ ID NO: 96292 - RNA, 19 nt, Homo sapiens
  misc_RNA (1)...(19): siRNA sense strand
agcaugaacacccacuuua

SEQ ID NO: 96293 - RNA, 19 nt, Homo sapiens
  misc_RNA (1)...(19): siRNA sense strand
cagcaugguguguucuuug

SEQ ID NO: 96294 - RNA, 19 nt, Homo sapiens
  misc_RNA (1)...(19): siRNA sense strand
agaccggacugagcaugaa

SEQ ID NO: 96295 - RNA, 19 nt, Homo sapiens
  misc_RNA (1)...(19): siRNA sense strand
ggaucagccggaccucauu

SEQ ID NO: 96296 - RNA, 19 nt, Homo sapiens
  misc_RNA (1)...(19): siRNA sense strand
ccaacuacacccuggaauc

SEQ ID NO: 96297 - RNA, 19 nt, Homo sapiens
  misc_RNA (1)...(19): siRNA sense strand
ucaacaagcccagcuccaa

SEQ ID NO: 96298 - RNA, 19 nt, Homo sapiens
  misc_RNA (1)...(19): siRNA sense strand
caccucggccaguaaauug

SEQ ID NO: 96299 - RNA, 19 nt, Homo sapiens
  misc_RNA (1)...(19): siRNA sense strand
gcagcaacagcaacagcaa

SEQ ID NO: 96300 - RNA, 19 nt, Homo sapiens
  misc_RNA (1)...(19): siRNA sense strand
ccagccagcacgcgcaauu

SEQ ID NO: 96301 - RNA, 19 nt, Homo sapiens
  misc_RNA (1)...(19): siRNA sense strand
gcgcaccucggccaguaaa

SEQ ID NO: 96302 - RNA, 19 nt, Homo sapiens
  misc_RNA (1)...(19): siRNA sense strand
ggccugggcaucaugucua

SEQ ID NO: 96303 - RNA, 19 nt, Homo sapiens
  misc_RNA (1)...(19): siRNA sense strand
cgccaaacgugggugaguu

SEQ ID NO: 96304 - RNA, 19 nt, Homo sapiens
  misc_RNA (1)...(19): siRNA sense strand
agcaugguguguucuuuga

SEQ ID NO: 96305 - RNA, 19 nt, Homo sapiens
  misc_RNA (1)...(19): siRNA sense strand
gcccuggcaccuucuuuga

SEQ ID NO: 96306 - RNA, 19 nt, Homo sapiens
  misc_RNA (1)...(19): siRNA sense strand
acaacggcgcucuggauaa

SEQ ID NO: 96307 - RNA, 19 nt, Homo sapiens
  misc_RNA (1)...(19): siRNA sense strand
gcuccaggcacccguuaau

SEQ ID NO: 96308 - RNA, 19 nt, Homo sapiens
  misc_RNA (1)...(19): siRNA sense strand
gagcacgagcuacgccaau

SEQ ID NO: 96309 - RNA, 19 nt, Homo sapiens
  misc_RNA (1)...(19): siRNA sense strand
gcuccaaggacaaccuguu

SEQ ID NO: 96310 - RNA, 19 nt, Homo sapiens
  misc_RNA (1)...(19): siRNA sense strand
uggcccagccgaacuuuga

SEQ ID NO: 96311 - RNA, 19 nt, Homo sapiens
  misc_RNA (1)...(19): siRNA sense strand
acaugaacguggccaagag

SEQ ID NO: 96312 - RNA, 19 nt, Homo sapiens
  misc_RNA (1)...(19): siRNA sense strand
gagggugacgaaccaagga

SEQ ID NO: 96313 - RNA, 19 nt, Homo sapiens
  misc_RNA (1)...(19): siRNA sense strand
gggccaagucggacaguag

SEQ ID NO: 96314 - RNA, 19 nt, Homo sapiens
  misc_RNA (1)...(19): siRNA sense strand
ggaacggcagcaugcacaa

SEQ ID NO: 96315 - RNA, 19 nt, Homo sapiens
  misc_RNA (1)...(19): siRNA sense strand
gagcaugcacccuuauucc

SEQ ID NO: 96316 - RNA, 19 nt, Homo sapiens
  misc_RNA (1)...(19): siRNA sense strand
gggaucagccggaccucau

SEQ ID NO: 96317 - RNA, 19 nt, Homo sapiens
  misc_RNA (1)...(19): siRNA sense strand
gcugggcuccuucaacaag

SEQ ID NO: 96318 - RNA, 19 nt, Homo sapiens
  misc_RNA (1)...(19): siRNA sense strand
acggcgcucuggauaauca

SEQ ID NO: 96319 - RNA, 19 nt, Homo sapiens
  misc_RNA (1)...(19): siRNA sense strand
gguacaugcccgcugacaa

SEQ ID NO: 96320 - RNA, 19 nt, Homo sapiens
  misc_RNA (1)...(19): siRNA sense strand
ccaagucggacaguaguuc

SEQ ID NO: 96321 - RNA, 19 nt, Homo sapiens
  misc_RNA (1)...(19): siRNA sense strand
caccuucuuugacaaguac

SEQ ID NO: 96322 - RNA, 19 nt, Homo sapiens
  misc_RNA (1)...(19): siRNA sense strand
gggacggggucgcagaaaa

SEQ ID NO: 96323 - RNA, 19 nt, Homo sapiens
  misc_RNA (1)...(19): siRNA sense strand
caacuacacccuggaaucc

SEQ ID NO: 96324 - RNA, 19 nt, Homo sapiens
  misc_RNA (1)...(19): siRNA sense strand
cgccagagggcaagaggaa

SEQ ID NO: 96325 - RNA, 19 nt, Homo sapiens
  misc_RNA (1)...(19): siRNA sense strand
ucaacgugaccuucaacaa

SEQ ID NO: 96326 - RNA, 19 nt, Homo sapiens
  misc_RNA (1)...(19): siRNA sense strand
caacauagauccugaaauu

SEQ ID NO: 96327 - RNA, 19 nt, Homo sapiens
  misc_RNA (1)...(19): siRNA sense strand
gaacauagaucaagacacu

SEQ ID NO: 96328 - RNA, 19 nt, Homo sapiens
  misc_RNA (1)...(19): siRNA sense strand
gcaaggagcuggagaaucu

SEQ ID NO: 96329 - RNA, 19 nt, Homo sapiens
  misc_RNA (1)...(19): siRNA sense strand
ccaaggagcuggaugcauu

SEQ ID NO: 96330 - RNA, 19 nt, Homo sapiens
  misc_RNA (1)...(19): siRNA sense strand
gcaacgaucuugucuucuu

SEQ ID NO: 96331 - RNA, 19 nt, Homo sapiens
  misc_RNA (1)...(19): siRNA sense strand
ggacuggacuucauguuuc

SEQ ID NO: 96332 - RNA, 19 nt, Homo sapiens
  misc_RNA (1)...(19): siRNA sense strand
gaauaugacucgauuucug

SEQ ID NO: 96333 - RNA, 19 nt, Homo sapiens
  misc_RNA (1)...(19): siRNA sense strand
ggacuucccaguuuccuua

SEQ ID NO: 96334 - RNA, 19 nt, Homo sapiens
  misc_RNA (1)...(19): siRNA sense strand
ccagugacuuugagauuaa

SEQ ID NO: 96335 - RNA, 19 nt, Homo sapiens
  misc_RNA (1)...(19): siRNA sense strand
gccagugacuuugagauua

SEQ ID NO: 96336 - RNA, 19 nt, Homo sapiens
  misc_RNA (1)...(19): siRNA sense strand
ucaaggauuugcuaaagaa

SEQ ID NO: 96337 - RNA, 19 nt, Homo sapiens
  misc_RNA (1)...(19): siRNA sense strand
gaaacuggauuuggaagau

SEQ ID NO: 96338 - RNA, 19 nt, Homo sapiens
  misc_RNA (1)...(19): siRNA sense strand
ggacauugcccaagaguuc

SEQ ID NO: 96339 - RNA, 19 nt, Homo sapiens
  misc_RNA (1)...(19): siRNA sense strand
gaucuugucuucuucuauc

SEQ ID NO: 96340 - RNA, 19 nt, Homo sapiens
  misc_RNA (1)...(19): siRNA sense strand
cugauuggcuuccuucuuu

SEQ ID NO: 96341 - RNA, 19 nt, Homo sapiens
  misc_RNA (1)...(19): siRNA sense strand
ccaaacaggaugagaauau

SEQ ID NO: 96342 - RNA, 19 nt, Homo sapiens
  misc_RNA (1)...(19): siRNA sense strand
ggguugaacuggaagacua

SEQ ID NO: 96343 - RNA, 19 nt, Homo sapiens
  misc_RNA (1)...(19): siRNA sense strand
gagaauaugacucgauuuc

SEQ ID NO: 96344 - RNA, 19 nt, Homo sapiens
  misc_RNA (1)...(19): siRNA sense strand
gacauuaguggauaaguuu

SEQ ID NO: 96345 - RNA, 19 nt, Homo sapiens
  misc_RNA (1)...(19): siRNA sense strand
gaagagcauauaccucaaa

SEQ ID NO: 96346 - RNA, 19 nt, Homo sapiens
  misc_RNA (1)...(19): siRNA sense strand
caaacaggaugagaauaug

SEQ ID NO: 96347 - RNA, 19 nt, Homo sapiens
  misc_RNA (1)...(19): siRNA sense strand
agacauuaguggauaaguu

SEQ ID NO: 96348 - RNA, 19 nt, Homo sapiens
  misc_RNA (1)...(19): siRNA sense strand
cgaaagcagugaacaaugc

SEQ ID NO: 96349 - RNA, 19 nt, Homo sapiens
  misc_RNA (1)...(19): siRNA sense strand
gguagaggccagugacuuu

SEQ ID NO: 96350 - RNA, 19 nt, Homo sapiens
  misc_RNA (1)...(19): siRNA sense strand
gaacuggaagacuauaaug

SEQ ID NO: 96351 - RNA, 19 nt, Homo sapiens
  misc_RNA (1)...(19): siRNA sense strand
gcaaacaacgccuccuuuc

SEQ ID NO: 96352 - RNA, 19 nt, Homo sapiens
  misc_RNA (1)...(19): siRNA sense strand
ggcacgagcagcugucuua

SEQ ID NO: 96353 - RNA, 19 nt, Homo sapiens
  misc_RNA (1)...(19): siRNA sense strand
ugacucaucuggugaacau

SEQ ID NO: 96354 - RNA, 19 nt, Homo sapiens
  misc_RNA (1)...(19): siRNA sense strand
aggagacgcugcugaugua

SEQ ID NO: 96355 - RNA, 19 nt, Homo sapiens
  misc_RNA (1)...(19): siRNA sense strand
cugaugaccugcaccauau

SEQ ID NO: 96356 - RNA, 19 nt, Homo sapiens
  misc_RNA (1)...(19): siRNA sense strand
uaaagaagaaccaaaugga

SEQ ID NO: 96357 - RNA, 19 nt, Homo sapiens
  misc_RNA (1)...(19): siRNA sense strand
ggaagagcauauaccucaa

SEQ ID NO: 96358 - RNA, 19 nt, Homo sapiens
  misc_RNA (1)...(19): siRNA sense strand
ggacaaagggagggucaaa

SEQ ID NO: 96359 - RNA, 19 nt, Homo sapiens
  misc_RNA (1)...(19): siRNA sense strand
gagaagcugcacuaucgua

SEQ ID NO: 96360 - RNA, 19 nt, Homo sapiens
  misc_RNA (1)...(19): siRNA sense strand
acauagauccugaaauuga

SEQ ID NO: 96361 - RNA, 19 nt, Homo sapiens
  misc_RNA (1)...(19): siRNA sense strand
aaucuggacucccguauuc

SEQ ID NO: 96362 - RNA, 19 nt, Homo sapiens
  misc_RNA (1)...(19): siRNA sense strand
gguccuuauugaugaauuu

SEQ ID NO: 96363 - RNA, 19 nt, Homo sapiens
  misc_RNA (1)...(19): siRNA sense strand
acauagaucaagacacuua

SEQ ID NO: 96364 - RNA, 19 nt, Homo sapiens
  misc_RNA (1)...(19): siRNA sense strand
cacagucgcugguccuuau

SEQ ID NO: 96365 - RNA, 19 nt, Homo sapiens
  misc_RNA (1)...(19): siRNA sense strand
ugucuuaacccgaguauug

SEQ ID NO: 96366 - RNA, 19 nt, Homo sapiens
  misc_RNA (1)...(19): siRNA sense strand
uuacaguguucuacagauu

SEQ ID NO: 96367 - RNA, 19 nt, Homo sapiens
  misc_RNA (1)...(19): siRNA sense strand
gcacagagagccuaaaaga

SEQ ID NO: 96368 - RNA, 19 nt, Homo sapiens
  misc_RNA (1)...(19): siRNA sense strand
uggcaacgaucuugucuuc

SEQ ID NO: 96369 - RNA, 19 nt, Homo sapiens
  misc_RNA (1)...(19): siRNA sense strand
aaacaacgccuccuuucug

SEQ ID NO: 96370 - RNA, 19 nt, Homo sapiens
  misc_RNA (1)...(19): siRNA sense strand
caacgaucuugucuucuuc

SEQ ID NO: 96371 - RNA, 19 nt, Homo sapiens
  misc_RNA (1)...(19): siRNA sense strand
gcacagucgcugguccuua

SEQ ID NO: 96372 - RNA, 19 nt, Homo sapiens
  misc_RNA (1)...(19): siRNA sense strand
gagcauauaccucaaacag

SEQ ID NO: 96373 - RNA, 19 nt, Homo sapiens
  misc_RNA (1)...(19): siRNA sense strand
caacgccuccuuucuggaa

SEQ ID NO: 96374 - RNA, 19 nt, Homo sapiens
  misc_RNA (1)...(19): siRNA sense strand
aaccuggacuugaacguuu

SEQ ID NO: 96375 - RNA, 19 nt, Homo sapiens
  misc_RNA (1)...(19): siRNA sense strand
uuaugaaacuggauuugga

SEQ ID NO: 96376 - RNA, 19 nt, Homo sapiens
  misc_RNA (1)...(19): siRNA sense strand
gucaaggauuugcuaaaga

SEQ ID NO: 96377 - RNA, 19 nt, Homo sapiens
  misc_RNA (1)...(19): siRNA sense strand
ucacacguccgacucauga

SEQ ID NO: 96378 - RNA, 19 nt, Homo sapiens
  misc_RNA (1)...(19): siRNA sense strand
gagaagcugcucaggcuau

SEQ ID NO: 96379 - RNA, 19 nt, Homo sapiens
  misc_RNA (1)...(19): siRNA sense strand
uuggagggcugcugaaguu

SEQ ID NO: 96380 - RNA, 19 nt, Homo sapiens
  misc_RNA (1)...(19): siRNA sense strand
aagaagaaccaaauggaaa

SEQ ID NO: 96381 - RNA, 19 nt, Homo sapiens
  misc_RNA (1)...(19): siRNA sense strand
cauagauccugaaauugau

SEQ ID NO: 96382 - RNA, 19 nt, Homo sapiens
  misc_RNA (1)...(19): siRNA sense strand
gacgccaucuucacacgaa

SEQ ID NO: 96383 - RNA, 19 nt, Homo sapiens
  misc_RNA (1)...(19): siRNA sense strand
aaagaagaaccaaauggaa

SEQ ID NO: 96384 - RNA, 19 nt, Homo sapiens
  misc_RNA (1)...(19): siRNA sense strand
ccgccugccuuccauggua

SEQ ID NO: 96385 - RNA, 19 nt, Homo sapiens
  misc_RNA (1)...(19): siRNA sense strand
gccagacauuaguggauaa

SEQ ID NO: 96386 - RNA, 19 nt, Homo sapiens
  misc_RNA (1)...(19): siRNA sense strand
cagguaggcuugaucacau

SEQ ID NO: 96387 - RNA, 19 nt, Homo sapiens
  misc_RNA (1)...(19): siRNA sense strand
ccauaucgccagccucauu

SEQ ID NO: 96388 - RNA, 19 nt, Homo sapiens
  misc_RNA (1)...(19): siRNA sense strand
gauccuaaccuggacuuga

SEQ ID NO: 96389 - RNA, 19 nt, Homo sapiens
  misc_RNA (1)...(19): siRNA sense strand
caucagggaagagcauaua

SEQ ID NO: 96390 - RNA, 19 nt, Homo sapiens
  misc_RNA (1)...(19): siRNA sense strand
gaaccuuugugcccaacuc

SEQ ID NO: 96391 - RNA, 19 nt, Homo sapiens
  misc_RNA (1)...(19): siRNA sense strand
ugacuccacuauccacuuc

SEQ ID NO: 96392 - RNA, 19 nt, Homo sapiens
  misc_RNA (1)...(19): siRNA sense strand
aggagaagcugcacuaucg

SEQ ID NO: 96393 - RNA, 19 nt, Homo sapiens
  misc_RNA (1)...(19): siRNA sense strand
ggacucccguauuccuuca

SEQ ID NO: 96394 - RNA, 19 nt, Homo sapiens
  misc_RNA (1)...(19): siRNA sense strand
gaaucuggacucccguauu

SEQ ID NO: 96395 - RNA, 19 nt, Homo sapiens
  misc_RNA (1)...(19): siRNA sense strand
cuuccucucuuccauuauu

SEQ ID NO: 96396 - RNA, 19 nt, Homo sapiens
  misc_RNA (1)...(19): siRNA sense strand
ugccagacauuaguggaua

SEQ ID NO: 96397 - RNA, 19 nt, Homo sapiens
  misc_RNA (1)...(19): siRNA sense strand
aggauuugcuaaagaagaa

SEQ ID NO: 96398 - RNA, 19 nt, Homo sapiens
  misc_RNA (1)...(19): siRNA sense strand
guuccugggucgaagaaga

SEQ ID NO: 96399 - RNA, 19 nt, Homo sapiens
  misc_RNA (1)...(19): siRNA sense strand
cagaggagaagcugcacua

SEQ ID NO: 96400 - RNA, 19 nt, Homo sapiens
  misc_RNA (1)...(19): siRNA sense strand
gaaaauugccagacauuag

SEQ ID NO: 96401 - RNA, 19 nt, Homo sapiens
  misc_RNA (1)...(19): siRNA sense strand
uuaauggacuggacuucau

SEQ ID NO: 96402 - RNA, 19 nt, Homo sapiens
  misc_RNA (1)...(19): siRNA sense strand
ggcaguagacgccaucuuc

SEQ ID NO: 96403 - RNA, 19 nt, Homo sapiens
  misc_RNA (1)...(19): siRNA sense strand
gcagaggaggccgaaauug

SEQ ID NO: 96404 - RNA, 19 nt, Homo sapiens
  misc_RNA (1)...(19): siRNA sense strand
ggacuucauguuucucuca

SEQ ID NO: 96405 - RNA, 19 nt, Homo sapiens
  misc_RNA (1)...(19): siRNA sense strand
gaagaagaaucgggguuga

SEQ ID NO: 96406 - RNA, 19 nt, Homo sapiens
  misc_RNA (1)...(19): siRNA sense strand
gcuaaagaagaaccaaaug

SEQ ID NO: 96407 - RNA, 19 nt, Homo sapiens
  misc_RNA (1)...(19): siRNA sense strand
ugucaaggauuugcuaaag

SEQ ID NO: 96408 - RNA, 19 nt, Homo sapiens
  misc_RNA (1)...(19): siRNA sense strand
gcaguagacgccaucuuca

SEQ ID NO: 96409 - RNA, 19 nt, Homo sapiens
  misc_RNA (1)...(19): siRNA sense strand
gugcccaacuccacagaau

SEQ ID NO: 96410 - RNA, 19 nt, Homo sapiens
  misc_RNA (1)...(19): siRNA sense strand
aaacaggaugagaauauga

SEQ ID NO: 96411 - RNA, 19 nt, Homo sapiens
  misc_RNA (1)...(19): siRNA sense strand
aggaggagcuggccgagau

SEQ ID NO: 96412 - RNA, 19 nt, Homo sapiens
  misc_RNA (1)...(19): siRNA sense strand
ugaaacgcaugaaguuguc

SEQ ID NO: 96413 - RNA, 19 nt, Homo sapiens
  misc_RNA (1)...(19): siRNA sense strand
gcuccugggucacaucaag

SEQ ID NO: 96414 - RNA, 19 nt, Homo sapiens
  misc_RNA (1)...(19): siRNA sense strand
cauccugggcuuuaagaaa

SEQ ID NO: 96415 - RNA, 19 nt, Homo sapiens
  misc_RNA (1)...(19): siRNA sense strand
agagaguucuggaugagau

SEQ ID NO: 96416 - RNA, 19 nt, Homo sapiens
  misc_RNA (1)...(19): siRNA sense strand
gcuguggaauucaggauac

SEQ ID NO: 96417 - RNA, 19 nt, Homo sapiens
  misc_RNA (1)...(19): siRNA sense strand
cagcagaggaggccgaaau

SEQ ID NO: 96418 - RNA, 19 nt, Homo sapiens
  misc_RNA (1)...(19): siRNA sense strand
gaggagaagcugcacuauc

SEQ ID NO: 96419 - RNA, 19 nt, Homo sapiens
  misc_RNA (1)...(19): siRNA sense strand
ggccagugacuuugagauu

SEQ ID NO: 96420 - RNA, 19 nt, Homo sapiens
  misc_RNA (1)...(19): siRNA sense strand
ucugaugaccugcaccaua

SEQ ID NO: 96421 - RNA, 19 nt, Homo sapiens
  misc_RNA (1)...(19): siRNA sense strand
ggaaaauugccagacauua

SEQ ID NO: 96422 - RNA, 19 nt, Homo sapiens
  misc_RNA (1)...(19): siRNA sense strand
gcgaaagcagugaacaaug

SEQ ID NO: 96423 - RNA, 19 nt, Homo sapiens
  misc_RNA (1)...(19): siRNA sense strand
aaacagguaggcuugauca

SEQ ID NO: 96424 - RNA, 19 nt, Homo sapiens
  misc_RNA (1)...(19): siRNA sense strand
aaagggagggucaaaguca

SEQ ID NO: 96425 - RNA, 19 nt, Homo sapiens
  misc_RNA (1)...(19): siRNA sense strand
gcacgagcagcugucuuaa

SEQ ID NO: 96426 - RNA, 19 nt, Homo sapiens
  misc_RNA (1)...(19): siRNA sense strand
caacauagauccugaaauu

SEQ ID NO: 96427 - RNA, 19 nt, Homo sapiens
  misc_RNA (1)...(19): siRNA sense strand
gaacauagaucaagacacu

SEQ ID NO: 96428 - RNA, 19 nt, Homo sapiens
  misc_RNA (1)...(19): siRNA sense strand
gcaaggagcuggagaaucu

SEQ ID NO: 96429 - RNA, 19 nt, Homo sapiens
  misc_RNA (1)...(19): siRNA sense strand
ccaaggagcuggaugcauu

SEQ ID NO: 96430 - RNA, 19 nt, Homo sapiens
  misc_RNA (1)...(19): siRNA sense strand
gcaacgaucuugucuucuu

SEQ ID NO: 96431 - RNA, 19 nt, Homo sapiens
  misc_RNA (1)...(19): siRNA sense strand
ggacuggacuucauguuuc

SEQ ID NO: 96432 - RNA, 19 nt, Homo sapiens
  misc_RNA (1)...(19): siRNA sense strand
gaauaugacucgauuucug

SEQ ID NO: 96433 - RNA, 19 nt, Homo sapiens
  misc_RNA (1)...(19): siRNA sense strand
ggacuucccaguuuccuua

SEQ ID NO: 96434 - RNA, 19 nt, Homo sapiens
  misc_RNA (1)...(19): siRNA sense strand
ccagugacuuugagauuaa

SEQ ID NO: 96435 - RNA, 19 nt, Homo sapiens
  misc_RNA (1)...(19): siRNA sense strand
gccagugacuuugagauua

SEQ ID NO: 96436 - RNA, 19 nt, Homo sapiens
  misc_RNA (1)...(19): siRNA sense strand
ucaaggauuugcuaaagaa

SEQ ID NO: 96437 - RNA, 19 nt, Homo sapiens
  misc_RNA (1)...(19): siRNA sense strand
gaaacuggauuuggaagau

SEQ ID NO: 96438 - RNA, 19 nt, Homo sapiens
  misc_RNA (1)...(19): siRNA sense strand
ggacauugcccaagaguuc

SEQ ID NO: 96439 - RNA, 19 nt, Homo sapiens
  misc_RNA (1)...(19): siRNA sense strand
gaucuugucuucuucuauc

SEQ ID NO: 96440 - RNA, 19 nt, Homo sapiens
  misc_RNA (1)...(19): siRNA sense strand
cugauuggcuuccuucuuu

SEQ ID NO: 96441 - RNA, 19 nt, Homo sapiens
  misc_RNA (1)...(19): siRNA sense strand
ccaaacaggaugagaauau

SEQ ID NO: 96442 - RNA, 19 nt, Homo sapiens
  misc_RNA (1)...(19): siRNA sense strand
ggguugaacuggaagacua

SEQ ID NO: 96443 - RNA, 19 nt, Homo sapiens
  misc_RNA (1)...(19): siRNA sense strand
gagaauaugacucgauuuc

SEQ ID NO: 96444 - RNA, 19 nt, Homo sapiens
  misc_RNA (1)...(19): siRNA sense strand
gacauuaguggauaaguuu

SEQ ID NO: 96445 - RNA, 19 nt, Homo sapiens
  misc_RNA (1)...(19): siRNA sense strand
gaagagcauauaccucaaa

SEQ ID NO: 96446 - RNA, 19 nt, Homo sapiens
  misc_RNA (1)...(19): siRNA sense strand
caaacaggaugagaauaug

SEQ ID NO: 96447 - RNA, 19 nt, Homo sapiens
  misc_RNA (1)...(19): siRNA sense strand
agacauuaguggauaaguu

SEQ ID NO: 96448 - RNA, 19 nt, Homo sapiens
  misc_RNA (1)...(19): siRNA sense strand
cgaaagcagugaacaaugc

SEQ ID NO: 96449 - RNA, 19 nt, Homo sapiens
  misc_RNA (1)...(19): siRNA sense strand
gguagaggccagugacuuu

SEQ ID NO: 96450 - RNA, 19 nt, Homo sapiens
  misc_RNA (1)...(19): siRNA sense strand
gaacuggaagacuauaaug

SEQ ID NO: 96451 - RNA, 19 nt, Homo sapiens
  misc_RNA (1)...(19): siRNA sense strand
gcaaacaacgccuccuuuc

SEQ ID NO: 96452 - RNA, 19 nt, Homo sapiens
  misc_RNA (1)...(19): siRNA sense strand
ggcacgagcagcugucuua

SEQ ID NO: 96453 - RNA, 19 nt, Homo sapiens
  misc_RNA (1)...(19): siRNA sense strand
ugacucaucuggugaacau

SEQ ID NO: 96454 - RNA, 19 nt, Homo sapiens
  misc_RNA (1)...(19): siRNA sense strand
aggagacgcugcugaugua

SEQ ID NO: 96455 - RNA, 19 nt, Homo sapiens
  misc_RNA (1)...(19): siRNA sense strand
cugaugaccugcaccauau

SEQ ID NO: 96456 - RNA, 19 nt, Homo sapiens
  misc_RNA (1)...(19): siRNA sense strand
uaaagaagaaccaaaugga

SEQ ID NO: 96457 - RNA, 19 nt, Homo sapiens
  misc_RNA (1)...(19): siRNA sense strand
ggaagagcauauaccucaa

SEQ ID NO: 96458 - RNA, 19 nt, Homo sapiens
  misc_RNA (1)...(19): siRNA sense strand
ggacaaagggagggucaaa

SEQ ID NO: 96459 - RNA, 19 nt, Homo sapiens
  misc_RNA (1)...(19): siRNA sense strand
gagaagcugcacuaucgua

SEQ ID NO: 96460 - RNA, 19 nt, Homo sapiens
  misc_RNA (1)...(19): siRNA sense strand
acauagauccugaaauuga

SEQ ID NO: 96461 - RNA, 19 nt, Homo sapiens
  misc_RNA (1)...(19): siRNA sense strand
aaucuggacucccguauuc

SEQ ID NO: 96462 - RNA, 19 nt, Homo sapiens
  misc_RNA (1)...(19): siRNA sense strand
gguccuuauugaugaauuu

SEQ ID NO: 96463 - RNA, 19 nt, Homo sapiens
  misc_RNA (1)...(19): siRNA sense strand
acauagaucaagacacuua

SEQ ID NO: 96464 - RNA, 19 nt, Homo sapiens
  misc_RNA (1)...(19): siRNA sense strand
cacagucgcugguccuuau

SEQ ID NO: 96465 - RNA, 19 nt, Homo sapiens
  misc_RNA (1)...(19): siRNA sense strand
ugucuuaacccgaguauug

SEQ ID NO: 96466 - RNA, 19 nt, Homo sapiens
  misc_RNA (1)...(19): siRNA sense strand
uuacaguguucuacagauu

SEQ ID NO: 96467 - RNA, 19 nt, Homo sapiens
  misc_RNA (1)...(19): siRNA sense strand
gcacagagagccuaaaaga

SEQ ID NO: 96468 - RNA, 19 nt, Homo sapiens
  misc_RNA (1)...(19): siRNA sense strand
uggcaacgaucuugucuuc

SEQ ID NO: 96469 - RNA, 19 nt, Homo sapiens
  misc_RNA (1)...(19): siRNA sense strand
aaacaacgccuccuuucug

SEQ ID NO: 96470 - RNA, 19 nt, Homo sapiens
  misc_RNA (1)...(19): siRNA sense strand
caacgaucuugucuucuuc

SEQ ID NO: 96471 - RNA, 19 nt, Homo sapiens
  misc_RNA (1)...(19): siRNA sense strand
gcacagucgcugguccuua

SEQ ID NO: 96472 - RNA, 19 nt, Homo sapiens
  misc_RNA (1)...(19): siRNA sense strand
gagcauauaccucaaacag

SEQ ID NO: 96473 - RNA, 19 nt, Homo sapiens
  misc_RNA (1)...(19): siRNA sense strand
caacgccuccuuucuggaa

SEQ ID NO: 96474 - RNA, 19 nt, Homo sapiens
  misc_RNA (1)...(19): siRNA sense strand
aaccuggacuugaacguuu

SEQ ID NO: 96475 - RNA, 19 nt, Homo sapiens
  misc_RNA (1)...(19): siRNA sense strand
uuaugaaacuggauuugga

SEQ ID NO: 96476 - RNA, 19 nt, Homo sapiens
  misc_RNA (1)...(19): siRNA sense strand
gucaaggauuugcuaaaga

SEQ ID NO: 96477 - RNA, 19 nt, Homo sapiens
  misc_RNA (1)...(19): siRNA sense strand
ucacacguccgacucauga

SEQ ID NO: 96478 - RNA, 19 nt, Homo sapiens
  misc_RNA (1)...(19): siRNA sense strand
gagaagcugcucaggcuau

SEQ ID NO: 96479 - RNA, 19 nt, Homo sapiens
  misc_RNA (1)...(19): siRNA sense strand
uuggagggcugcugaaguu

SEQ ID NO: 96480 - RNA, 19 nt, Homo sapiens
  misc_RNA (1)...(19): siRNA sense strand
aagaagaaccaaauggaaa

SEQ ID NO: 96481 - RNA, 19 nt, Homo sapiens
  misc_RNA (1)...(19): siRNA sense strand
cauagauccugaaauugau

SEQ ID NO: 96482 - RNA, 19 nt, Homo sapiens
  misc_RNA (1)...(19): siRNA sense strand
gacgccaucuucacacgaa

SEQ ID NO: 96483 - RNA, 19 nt, Homo sapiens
  misc_RNA (1)...(19): siRNA sense strand
aaagaagaaccaaauggaa

SEQ ID NO: 96484 - RNA, 19 nt, Homo sapiens
  misc_RNA (1)...(19): siRNA sense strand
ccgccugccuuccauggua

SEQ ID NO: 96485 - RNA, 19 nt, Homo sapiens
  misc_RNA (1)...(19): siRNA sense strand
gccagacauuaguggauaa

SEQ ID NO: 96486 - RNA, 19 nt, Homo sapiens
  misc_RNA (1)...(19): siRNA sense strand
cagguaggcuugaucacau

SEQ ID NO: 96487 - RNA, 19 nt, Homo sapiens
  misc_RNA (1)...(19): siRNA sense strand
ccauaucgccagccucauu

SEQ ID NO: 96488 - RNA, 19 nt, Homo sapiens
  misc_RNA (1)...(19): siRNA sense strand
gauccuaaccuggacuuga

SEQ ID NO: 96489 - RNA, 19 nt, Homo sapiens
  misc_RNA (1)...(19): siRNA sense strand
caucagggaagagcauaua

SEQ ID NO: 96490 - RNA, 19 nt, Homo sapiens
  misc_RNA (1)...(19): siRNA sense strand
gaaccuuugugcccaacuc

SEQ ID NO: 96491 - RNA, 19 nt, Homo sapiens
  misc_RNA (1)...(19): siRNA sense strand
ugacuccacuauccacuuc

SEQ ID NO: 96492 - RNA, 19 nt, Homo sapiens
  misc_RNA (1)...(19): siRNA sense strand
aggagaagcugcacuaucg

SEQ ID NO: 96493 - RNA, 19 nt, Homo sapiens
  misc_RNA (1)...(19): siRNA sense strand
ggacucccguauuccuuca

SEQ ID NO: 96494 - RNA, 19 nt, Homo sapiens
  misc_RNA (1)...(19): siRNA sense strand
gaaucuggacucccguauu

SEQ ID NO: 96495 - RNA, 19 nt, Homo sapiens
  misc_RNA (1)...(19): siRNA sense strand
cuuccucucuuccauuauu

SEQ ID NO: 96496 - RNA, 19 nt, Homo sapiens
  misc_RNA (1)...(19): siRNA sense strand
ugccagacauuaguggaua

SEQ ID NO: 96497 - RNA, 19 nt, Homo sapiens
  misc_RNA (1)...(19): siRNA sense strand
aggauuugcuaaagaagaa

SEQ ID NO: 96498 - RNA, 19 nt, Homo sapiens
  misc_RNA (1)...(19): siRNA sense strand
guuccugggucgaagaaga

SEQ ID NO: 96499 - RNA, 19 nt, Homo sapiens
  misc_RNA (1)...(19): siRNA sense strand
cagaggagaagcugcacua

SEQ ID NO: 96500 - RNA, 19 nt, Homo sapiens
  misc_RNA (1)...(19): siRNA sense strand
gaaaauugccagacauuag

SEQ ID NO: 96501 - RNA, 19 nt, Homo sapiens
  misc_RNA (1)...(19): siRNA sense strand
uuaauggacuggacuucau

SEQ ID NO: 96502 - RNA, 19 nt, Homo sapiens
  misc_RNA (1)...(19): siRNA sense strand
ggcaguagacgccaucuuc

SEQ ID NO: 96503 - RNA, 19 nt, Homo sapiens
  misc_RNA (1)...(19): siRNA sense strand
gcagaggaggccgaaauug

SEQ ID NO: 96504 - RNA, 19 nt, Homo sapiens
  misc_RNA (1)...(19): siRNA sense strand
ggacuucauguuucucuca

SEQ ID NO: 96505 - RNA, 19 nt, Homo sapiens
  misc_RNA (1)...(19): siRNA sense strand
gaagaagaaucgggguuga

SEQ ID NO: 96506 - RNA, 19 nt, Homo sapiens
  misc_RNA (1)...(19): siRNA sense strand
gcuaaagaagaaccaaaug

SEQ ID NO: 96507 - RNA, 19 nt, Homo sapiens
  misc_RNA (1)...(19): siRNA sense strand
ugucaaggauuugcuaaag

SEQ ID NO: 96508 - RNA, 19 nt, Homo sapiens
  misc_RNA (1)...(19): siRNA sense strand
gcaguagacgccaucuuca

SEQ ID NO: 96509 - RNA, 19 nt, Homo sapiens
  misc_RNA (1)...(19): siRNA sense strand
gugcccaacuccacagaau

SEQ ID NO: 96510 - RNA, 19 nt, Homo sapiens
  misc_RNA (1)...(19): siRNA sense strand
aaacaggaugagaauauga

SEQ ID NO: 96511 - RNA, 19 nt, Homo sapiens
  misc_RNA (1)...(19): siRNA sense strand
aggaggagcuggccgagau

SEQ ID NO: 96512 - RNA, 19 nt, Homo sapiens
  misc_RNA (1)...(19): siRNA sense strand
ugaaacgcaugaaguuguc

SEQ ID NO: 96513 - RNA, 19 nt, Homo sapiens
  misc_RNA (1)...(19): siRNA sense strand
gcuccugggucacaucaag

SEQ ID NO: 96514 - RNA, 19 nt, Homo sapiens
  misc_RNA (1)...(19): siRNA sense strand
cauccugggcuuuaagaaa

SEQ ID NO: 96515 - RNA, 19 nt, Homo sapiens
  misc_RNA (1)...(19): siRNA sense strand
agagaguucuggaugagau

SEQ ID NO: 96516 - RNA, 19 nt, Homo sapiens
  misc_RNA (1)...(19): siRNA sense strand
gcuguggaauucaggauac

SEQ ID NO: 96517 - RNA, 19 nt, Homo sapiens
  misc_RNA (1)...(19): siRNA sense strand
cagcagaggaggccgaaau

SEQ ID NO: 96518 - RNA, 19 nt, Homo sapiens
  misc_RNA (1)...(19): siRNA sense strand
gaggagaagcugcacuauc

SEQ ID NO: 96519 - RNA, 19 nt, Homo sapiens
  misc_RNA (1)...(19): siRNA sense strand
ggccagugacuuugagauu

SEQ ID NO: 96520 - RNA, 19 nt, Homo sapiens
  misc_RNA (1)...(19): siRNA sense strand
ucugaugaccugcaccaua

SEQ ID NO: 96521 - RNA, 19 nt, Homo sapiens
  misc_RNA (1)...(19): siRNA sense strand
ggaaaauugccagacauua

SEQ ID NO: 96522 - RNA, 19 nt, Homo sapiens
  misc_RNA (1)...(19): siRNA sense strand
gcgaaagcagugaacaaug

SEQ ID NO: 96523 - RNA, 19 nt, Homo sapiens
  misc_RNA (1)...(19): siRNA sense strand
aaacagguaggcuugauca

SEQ ID NO: 96524 - RNA, 19 nt, Homo sapiens
  misc_RNA (1)...(19): siRNA sense strand
aaagggagggucaaaguca

SEQ ID NO: 96525 - RNA, 19 nt, Homo sapiens
  misc_RNA (1)...(19): siRNA sense strand
gcacgagcagcugucuuaa

SEQ ID NO: 96526 - RNA, 19 nt, Homo sapiens
  misc_RNA (1)...(19): siRNA sense strand
caacauagauccugaaauu

SEQ ID NO: 96527 - RNA, 19 nt, Homo sapiens
  misc_RNA (1)...(19): siRNA sense strand
gaacauagaucaagacacu

SEQ ID NO: 96528 - RNA, 19 nt, Homo sapiens
  misc_RNA (1)...(19): siRNA sense strand
gcaaggagcuggagaaucu

SEQ ID NO: 96529 - RNA, 19 nt, Homo sapiens
  misc_RNA (1)...(19): siRNA sense strand
ccaaggagcuggaugcauu

SEQ ID NO: 96530 - RNA, 19 nt, Homo sapiens
  misc_RNA (1)...(19): siRNA sense strand
gcaacgaucuugucuucuu

SEQ ID NO: 96531 - RNA, 19 nt, Homo sapiens
  misc_RNA (1)...(19): siRNA sense strand
ggacuggacuucauguuuc

SEQ ID NO: 96532 - RNA, 19 nt, Homo sapiens
  misc_RNA (1)...(19): siRNA sense strand
gaauaugacucgauuucug

SEQ ID NO: 96533 - RNA, 19 nt, Homo sapiens
  misc_RNA (1)...(19): siRNA sense strand
ggacuucccaguuuccuua

SEQ ID NO: 96534 - RNA, 19 nt, Homo sapiens
  misc_RNA (1)...(19): siRNA sense strand
ccagugacuuugagauuaa

SEQ ID NO: 96535 - RNA, 19 nt, Homo sapiens
  misc_RNA (1)...(19): siRNA sense strand
gccagugacuuugagauua

SEQ ID NO: 96536 - RNA, 19 nt, Homo sapiens
  misc_RNA (1)...(19): siRNA sense strand
ucaaggauuugcuaaagaa

SEQ ID NO: 96537 - RNA, 19 nt, Homo sapiens
  misc_RNA (1)...(19): siRNA sense strand
gaaacuggauuuggaagau

SEQ ID NO: 96538 - RNA, 19 nt, Homo sapiens
  misc_RNA (1)...(19): siRNA sense strand
ggacauugcccaagaguuc

SEQ ID NO: 96539 - RNA, 19 nt, Homo sapiens
  misc_RNA (1)...(19): siRNA sense strand
gaucuugucuucuucuauc

SEQ ID NO: 96540 - RNA, 19 nt, Homo sapiens
  misc_RNA (1)...(19): siRNA sense strand
cugauuggcuuccuucuuu

SEQ ID NO: 96541 - RNA, 19 nt, Homo sapiens
  misc_RNA (1)...(19): siRNA sense strand
ccaaacaggaugagaauau

SEQ ID NO: 96542 - RNA, 19 nt, Homo sapiens
  misc_RNA (1)...(19): siRNA sense strand
ggguugaacuggaagacua

SEQ ID NO: 96543 - RNA, 19 nt, Homo sapiens
  misc_RNA (1)...(19): siRNA sense strand
gagaauaugacucgauuuc

SEQ ID NO: 96544 - RNA, 19 nt, Homo sapiens
  misc_RNA (1)...(19): siRNA sense strand
gacauuaguggauaaguuu

SEQ ID NO: 96545 - RNA, 19 nt, Homo sapiens
  misc_RNA (1)...(19): siRNA sense strand
gaagagcauauaccucaaa

SEQ ID NO: 96546 - RNA, 19 nt, Homo sapiens
  misc_RNA (1)...(19): siRNA sense strand
caaacaggaugagaauaug

SEQ ID NO: 96547 - RNA, 19 nt, Homo sapiens
  misc_RNA (1)...(19): siRNA sense strand
agacauuaguggauaaguu

SEQ ID NO: 96548 - RNA, 19 nt, Homo sapiens
  misc_RNA (1)...(19): siRNA sense strand
cgaaagcagugaacaaugc

SEQ ID NO: 96549 - RNA, 19 nt, Homo sapiens
  misc_RNA (1)...(19): siRNA sense strand
gguagaggccagugacuuu

SEQ ID NO: 96550 - RNA, 19 nt, Homo sapiens
  misc_RNA (1)...(19): siRNA sense strand
gaacuggaagacuauaaug

SEQ ID NO: 96551 - RNA, 19 nt, Homo sapiens
  misc_RNA (1)...(19): siRNA sense strand
gcaaacaacgccuccuuuc

SEQ ID NO: 96552 - RNA, 19 nt, Homo sapiens
  misc_RNA (1)...(19): siRNA sense strand
ggcacgagcagcugucuua

SEQ ID NO: 96553 - RNA, 19 nt, Homo sapiens
  misc_RNA (1)...(19): siRNA sense strand
ugacucaucuggugaacau

SEQ ID NO: 96554 - RNA, 19 nt, Homo sapiens
  misc_RNA (1)...(19): siRNA sense strand
aggagacgcugcugaugua

SEQ ID NO: 96555 - RNA, 19 nt, Homo sapiens
  misc_RNA (1)...(19): siRNA sense strand
cugaugaccugcaccauau

SEQ ID NO: 96556 - RNA, 19 nt, Homo sapiens
  misc_RNA (1)...(19): siRNA sense strand
uaaagaagaaccaaaugga

SEQ ID NO: 96557 - RNA, 19 nt, Homo sapiens
  misc_RNA (1)...(19): siRNA sense strand
ggaagagcauauaccucaa

SEQ ID NO: 96558 - RNA, 19 nt, Homo sapiens
  misc_RNA (1)...(19): siRNA sense strand
ggacaaagggagggucaaa

SEQ ID NO: 96559 - RNA, 19 nt, Homo sapiens
  misc_RNA (1)...(19): siRNA sense strand
gagaagcugcacuaucgua

SEQ ID NO: 96560 - RNA, 19 nt, Homo sapiens
  misc_RNA (1)...(19): siRNA sense strand
acauagauccugaaauuga

SEQ ID NO: 96561 - RNA, 19 nt, Homo sapiens
  misc_RNA (1)...(19): siRNA sense strand
aaucuggacucccguauuc

SEQ ID NO: 96562 - RNA, 19 nt, Homo sapiens
  misc_RNA (1)...(19): siRNA sense strand
gguccuuauugaugaauuu

SEQ ID NO: 96563 - RNA, 19 nt, Homo sapiens
  misc_RNA (1)...(19): siRNA sense strand
acauagaucaagacacuua

SEQ ID NO: 96564 - RNA, 19 nt, Homo sapiens
  misc_RNA (1)...(19): siRNA sense strand
cacagucgcugguccuuau

SEQ ID NO: 96565 - RNA, 19 nt, Homo sapiens
  misc_RNA (1)...(19): siRNA sense strand
ugucuuaacccgaguauug

SEQ ID NO: 96566 - RNA, 19 nt, Homo sapiens
  misc_RNA (1)...(19): siRNA sense strand
uuacaguguucuacagauu

SEQ ID NO: 96567 - RNA, 19 nt, Homo sapiens
  misc_RNA (1)...(19): siRNA sense strand
gcacagagagccuaaaaga

SEQ ID NO: 96568 - RNA, 19 nt, Homo sapiens
  misc_RNA (1)...(19): siRNA sense strand
uggcaacgaucuugucuuc

SEQ ID NO: 96569 - RNA, 19 nt, Homo sapiens
  misc_RNA (1)...(19): siRNA sense strand
aaacaacgccuccuuucug

SEQ ID NO: 96570 - RNA, 19 nt, Homo sapiens
  misc_RNA (1)...(19): siRNA sense strand
caacgaucuugucuucuuc

SEQ ID NO: 96571 - RNA, 19 nt, Homo sapiens
  misc_RNA (1)...(19): siRNA sense strand
gcacagucgcugguccuua

SEQ ID NO: 96572 - RNA, 19 nt, Homo sapiens
  misc_RNA (1)...(19): siRNA sense strand
gagcauauaccucaaacag

SEQ ID NO: 96573 - RNA, 19 nt, Homo sapiens
  misc_RNA (1)...(19): siRNA sense strand
caacgccuccuuucuggaa

SEQ ID NO: 96574 - RNA, 19 nt, Homo sapiens
  misc_RNA (1)...(19): siRNA sense strand
aaccuggacuugaacguuu

SEQ ID NO: 96575 - RNA, 19 nt, Homo sapiens
  misc_RNA (1)...(19): siRNA sense strand
uuaugaaacuggauuugga

SEQ ID NO: 96576 - RNA, 19 nt, Homo sapiens
  misc_RNA (1)...(19): siRNA sense strand
gucaaggauuugcuaaaga

SEQ ID NO: 96577 - RNA, 19 nt, Homo sapiens
  misc_RNA (1)...(19): siRNA sense strand
ucacacguccgacucauga

SEQ ID NO: 96578 - RNA, 19 nt, Homo sapiens
  misc_RNA (1)...(19): siRNA sense strand
gagaagcugcucaggcuau

SEQ ID NO: 96579 - RNA, 19 nt, Homo sapiens
  misc_RNA (1)...(19): siRNA sense strand
uuggagggcugcugaaguu

SEQ ID NO: 96580 - RNA, 19 nt, Homo sapiens
  misc_RNA (1)...(19): siRNA sense strand
aagaagaaccaaauggaaa

SEQ ID NO: 96581 - RNA, 19 nt, Homo sapiens
  misc_RNA (1)...(19): siRNA sense strand
cauagauccugaaauugau

SEQ ID NO: 96582 - RNA, 19 nt, Homo sapiens
  misc_RNA (1)...(19): siRNA sense strand
gacgccaucuucacacgaa

SEQ ID NO: 96583 - RNA, 19 nt, Homo sapiens
  misc_RNA (1)...(19): siRNA sense strand
aaagaagaaccaaauggaa

SEQ ID NO: 96584 - RNA, 19 nt, Homo sapiens
  misc_RNA (1)...(19): siRNA sense strand
ccgccugccuuccauggua

SEQ ID NO: 96585 - RNA, 19 nt, Homo sapiens
  misc_RNA (1)...(19): siRNA sense strand
gccagacauuaguggauaa

SEQ ID NO: 96586 - RNA, 19 nt, Homo sapiens
  misc_RNA (1)...(19): siRNA sense strand
cagguaggcuugaucacau

SEQ ID NO: 96587 - RNA, 19 nt, Homo sapiens
  misc_RNA (1)...(19): siRNA sense strand
ccauaucgccagccucauu

SEQ ID NO: 96588 - RNA, 19 nt, Homo sapiens
  misc_RNA (1)...(19): siRNA sense strand
gauccuaaccuggacuuga

SEQ ID NO: 96589 - RNA, 19 nt, Homo sapiens
  misc_RNA (1)...(19): siRNA sense strand
caucagggaagagcauaua

SEQ ID NO: 96590 - RNA, 19 nt, Homo sapiens
  misc_RNA (1)...(19): siRNA sense strand
gaaccuuugugcccaacuc

SEQ ID NO: 96591 - RNA, 19 nt, Homo sapiens
  misc_RNA (1)...(19): siRNA sense strand
ugacuccacuauccacuuc

SEQ ID NO: 96592 - RNA, 19 nt, Homo sapiens
  misc_RNA (1)...(19): siRNA sense strand
aggagaagcugcacuaucg

SEQ ID NO: 96593 - RNA, 19 nt, Homo sapiens
  misc_RNA (1)...(19): siRNA sense strand
ggacucccguauuccuuca

SEQ ID NO: 96594 - RNA, 19 nt, Homo sapiens
  misc_RNA (1)...(19): siRNA sense strand
gaaucuggacucccguauu

SEQ ID NO: 96595 - RNA, 19 nt, Homo sapiens
  misc_RNA (1)...(19): siRNA sense strand
cuuccucucuuccauuauu

SEQ ID NO: 96596 - RNA, 19 nt, Homo sapiens
  misc_RNA (1)...(19): siRNA sense strand
ugccagacauuaguggaua

SEQ ID NO: 96597 - RNA, 19 nt, Homo sapiens
  misc_RNA (1)...(19): siRNA sense strand
aggauuugcuaaagaagaa

SEQ ID NO: 96598 - RNA, 19 nt, Homo sapiens
  misc_RNA (1)...(19): siRNA sense strand
guuccugggucgaagaaga

SEQ ID NO: 96599 - RNA, 19 nt, Homo sapiens
  misc_RNA (1)...(19): siRNA sense strand
cagaggagaagcugcacua

SEQ ID NO: 96600 - RNA, 19 nt, Homo sapiens
  misc_RNA (1)...(19): siRNA sense strand
gaaaauugccagacauuag

SEQ ID NO: 96601 - RNA, 19 nt, Homo sapiens
  misc_RNA (1)...(19): siRNA sense strand
uuaauggacuggacuucau

SEQ ID NO: 96602 - RNA, 19 nt, Homo sapiens
  misc_RNA (1)...(19): siRNA sense strand
ggcaguagacgccaucuuc

SEQ ID NO: 96603 - RNA, 19 nt, Homo sapiens
  misc_RNA (1)...(19): siRNA sense strand
gcagaggaggccgaaauug

SEQ ID NO: 96604 - RNA, 19 nt, Homo sapiens
  misc_RNA (1)...(19): siRNA sense strand
ggacuucauguuucucuca

SEQ ID NO: 96605 - RNA, 19 nt, Homo sapiens
  misc_RNA (1)...(19): siRNA sense strand
gaagaagaaucgggguuga

SEQ ID NO: 96606 - RNA, 19 nt, Homo sapiens
  misc_RNA (1)...(19): siRNA sense strand
gcuaaagaagaaccaaaug

SEQ ID NO: 96607 - RNA, 19 nt, Homo sapiens
  misc_RNA (1)...(19): siRNA sense strand
ugucaaggauuugcuaaag

SEQ ID NO: 96608 - RNA, 19 nt, Homo sapiens
  misc_RNA (1)...(19): siRNA sense strand
gcaguagacgccaucuuca

SEQ ID NO: 96609 - RNA, 19 nt, Homo sapiens
  misc_RNA (1)...(19): siRNA sense strand
gugcccaacuccacagaau

SEQ ID NO: 96610 - RNA, 19 nt, Homo sapiens
  misc_RNA (1)...(19): siRNA sense strand
aaacaggaugagaauauga

SEQ ID NO: 96611 - RNA, 19 nt, Homo sapiens
  misc_RNA (1)...(19): siRNA sense strand
aggaggagcuggccgagau

SEQ ID NO: 96612 - RNA, 19 nt, Homo sapiens
  misc_RNA (1)...(19): siRNA sense strand
ugaaacgcaugaaguuguc

SEQ ID NO: 96613 - RNA, 19 nt, Homo sapiens
  misc_RNA (1)...(19): siRNA sense strand
gcuccugggucacaucaag

SEQ ID NO: 96614 - RNA, 19 nt, Homo sapiens
  misc_RNA (1)...(19): siRNA sense strand
cauccugggcuuuaagaaa

SEQ ID NO: 96615 - RNA, 19 nt, Homo sapiens
  misc_RNA (1)...(19): siRNA sense strand
agagaguucuggaugagau

SEQ ID NO: 96616 - RNA, 19 nt, Homo sapiens
  misc_RNA (1)...(19): siRNA sense strand
gcuguggaauucaggauac

SEQ ID NO: 96617 - RNA, 19 nt, Homo sapiens
  misc_RNA (1)...(19): siRNA sense strand
cagcagaggaggccgaaau

SEQ ID NO: 96618 - RNA, 19 nt, Homo sapiens
  misc_RNA (1)...(19): siRNA sense strand
gaggagaagcugcacuauc

SEQ ID NO: 96619 - RNA, 19 nt, Homo sapiens
  misc_RNA (1)...(19): siRNA sense strand
ggccagugacuuugagauu

SEQ ID NO: 96620 - RNA, 19 nt, Homo sapiens
  misc_RNA (1)...(19): siRNA sense strand
ucugaugaccugcaccaua

SEQ ID NO: 96621 - RNA, 19 nt, Homo sapiens
  misc_RNA (1)...(19): siRNA sense strand
ggaaaauugccagacauua

SEQ ID NO: 96622 - RNA, 19 nt, Homo sapiens
  misc_RNA (1)...(19): siRNA sense strand
gcgaaagcagugaacaaug

SEQ ID NO: 96623 - RNA, 19 nt, Homo sapiens
  misc_RNA (1)...(19): siRNA sense strand
aaacagguaggcuugauca

SEQ ID NO: 96624 - RNA, 19 nt, Homo sapiens
  misc_RNA (1)...(19): siRNA sense strand
aaagggagggucaaaguca

SEQ ID NO: 96625 - RNA, 19 nt, Homo sapiens
  misc_RNA (1)...(19): siRNA sense strand
gcacgagcagcugucuuaa

SEQ ID NO: 96626 - RNA, 19 nt, Homo sapiens
  misc_RNA (1)...(19): siRNA sense strand
caacauagauccugaaauu

SEQ ID NO: 96627 - RNA, 19 nt, Homo sapiens
  misc_RNA (1)...(19): siRNA sense strand
gaacauagaucaagacacu

SEQ ID NO: 96628 - RNA, 19 nt, Homo sapiens
  misc_RNA (1)...(19): siRNA sense strand
gcaaggagcuggagaaucu

SEQ ID NO: 96629 - RNA, 19 nt, Homo sapiens
  misc_RNA (1)...(19): siRNA sense strand
ccaaggagcuggaugcauu

SEQ ID NO: 96630 - RNA, 19 nt, Homo sapiens
  misc_RNA (1)...(19): siRNA sense strand
gcaacgaucuugucuucuu

SEQ ID NO: 96631 - RNA, 19 nt, Homo sapiens
  misc_RNA (1)...(19): siRNA sense strand
ggacuggacuucauguuuc

SEQ ID NO: 96632 - RNA, 19 nt, Homo sapiens
  misc_RNA (1)...(19): siRNA sense strand
gaauaugacucgauuucug

SEQ ID NO: 96633 - RNA, 19 nt, Homo sapiens
  misc_RNA (1)...(19): siRNA sense strand
ggacuucccaguuuccuua

SEQ ID NO: 96634 - RNA, 19 nt, Homo sapiens
  misc_RNA (1)...(19): siRNA sense strand
ccagugacuuugagauuaa

SEQ ID NO: 96635 - RNA, 19 nt, Homo sapiens
  misc_RNA (1)...(19): siRNA sense strand
gccagugacuuugagauua

SEQ ID NO: 96636 - RNA, 19 nt, Homo sapiens
  misc_RNA (1)...(19): siRNA sense strand
ucaaggauuugcuaaagaa

SEQ ID NO: 96637 - RNA, 19 nt, Homo sapiens
  misc_RNA (1)...(19): siRNA sense strand
gaaacuggauuuggaagau

SEQ ID NO: 96638 - RNA, 19 nt, Homo sapiens
  misc_RNA (1)...(19): siRNA sense strand
ggacauugcccaagaguuc

SEQ ID NO: 96639 - RNA, 19 nt, Homo sapiens
  misc_RNA (1)...(19): siRNA sense strand
gaucuugucuucuucuauc

SEQ ID NO: 96640 - RNA, 19 nt, Homo sapiens
  misc_RNA (1)...(19): siRNA sense strand
cugauuggcuuccuucuuu

SEQ ID NO: 96641 - RNA, 19 nt, Homo sapiens
  misc_RNA (1)...(19): siRNA sense strand
ccaaacaggaugagaauau

SEQ ID NO: 96642 - RNA, 19 nt, Homo sapiens
  misc_RNA (1)...(19): siRNA sense strand
ggguugaacuggaagacua

SEQ ID NO: 96643 - RNA, 19 nt, Homo sapiens
  misc_RNA (1)...(19): siRNA sense strand
gagaauaugacucgauuuc

SEQ ID NO: 96644 - RNA, 19 nt, Homo sapiens
  misc_RNA (1)...(19): siRNA sense strand
gacauuaguggauaaguuu

SEQ ID NO: 96645 - RNA, 19 nt, Homo sapiens
  misc_RNA (1)...(19): siRNA sense strand
gaagagcauauaccucaaa

SEQ ID NO: 96646 - RNA, 19 nt, Homo sapiens
  misc_RNA (1)...(19): siRNA sense strand
caaacaggaugagaauaug

SEQ ID NO: 96647 - RNA, 19 nt, Homo sapiens
  misc_RNA (1)...(19): siRNA sense strand
agacauuaguggauaaguu

SEQ ID NO: 96648 - RNA, 19 nt, Homo sapiens
  misc_RNA (1)...(19): siRNA sense strand
cgaaagcagugaacaaugc

SEQ ID NO: 96649 - RNA, 19 nt, Homo sapiens
  misc_RNA (1)...(19): siRNA sense strand
gguagaggccagugacuuu

SEQ ID NO: 96650 - RNA, 19 nt, Homo sapiens
  misc_RNA (1)...(19): siRNA sense strand
gaacuggaagacuauaaug

SEQ ID NO: 96651 - RNA, 19 nt, Homo sapiens
  misc_RNA (1)...(19): siRNA sense strand
gcaaacaacgccuccuuuc

SEQ ID NO: 96652 - RNA, 19 nt, Homo sapiens
  misc_RNA (1)...(19): siRNA sense strand
ggcacgagcagcugucuua

SEQ ID NO: 96653 - RNA, 19 nt, Homo sapiens
  misc_RNA (1)...(19): siRNA sense strand
ugacucaucuggugaacau

SEQ ID NO: 96654 - RNA, 19 nt, Homo sapiens
  misc_RNA (1)...(19): siRNA sense strand
aggagacgcugcugaugua

SEQ ID NO: 96655 - RNA, 19 nt, Homo sapiens
  misc_RNA (1)...(19): siRNA sense strand
cugaugaccugcaccauau

SEQ ID NO: 96656 - RNA, 19 nt, Homo sapiens
  misc_RNA (1)...(19): siRNA sense strand
uaaagaagaaccaaaugga

SEQ ID NO: 96657 - RNA, 19 nt, Homo sapiens
  misc_RNA (1)...(19): siRNA sense strand
ggaagagcauauaccucaa

SEQ ID NO: 96658 - RNA, 19 nt, Homo sapiens
  misc_RNA (1)...(19): siRNA sense strand
ggacaaagggagggucaaa

SEQ ID NO: 96659 - RNA, 19 nt, Homo sapiens
  misc_RNA (1)...(19): siRNA sense strand
gagaagcugcacuaucgua

SEQ ID NO: 96660 - RNA, 19 nt, Homo sapiens
  misc_RNA (1)...(19): siRNA sense strand
acauagauccugaaauuga

SEQ ID NO: 96661 - RNA, 19 nt, Homo sapiens
  misc_RNA (1)...(19): siRNA sense strand
aaucuggacucccguauuc

SEQ ID NO: 96662 - RNA, 19 nt, Homo sapiens
  misc_RNA (1)...(19): siRNA sense strand
gguccuuauugaugaauuu

SEQ ID NO: 96663 - RNA, 19 nt, Homo sapiens
  misc_RNA (1)...(19): siRNA sense strand
acauagaucaagacacuua

SEQ ID NO: 96664 - RNA, 19 nt, Homo sapiens
  misc_RNA (1)...(19): siRNA sense strand
cacagucgcugguccuuau

SEQ ID NO: 96665 - RNA, 19 nt, Homo sapiens
  misc_RNA (1)...(19): siRNA sense strand
ugucuuaacccgaguauug

SEQ ID NO: 96666 - RNA, 19 nt, Homo sapiens
  misc_RNA (1)...(19): siRNA sense strand
uuacaguguucuacagauu

SEQ ID NO: 96667 - RNA, 19 nt, Homo sapiens
  misc_RNA (1)...(19): siRNA sense strand
gcacagagagccuaaaaga

SEQ ID NO: 96668 - RNA, 19 nt, Homo sapiens
  misc_RNA (1)...(19): siRNA sense strand
uggcaacgaucuugucuuc

SEQ ID NO: 96669 - RNA, 19 nt, Homo sapiens
  misc_RNA (1)...(19): siRNA sense strand
aaacaacgccuccuuucug

SEQ ID NO: 96670 - RNA, 19 nt, Homo sapiens
  misc_RNA (1)...(19): siRNA sense strand
caacgaucuugucuucuuc

SEQ ID NO: 96671 - RNA, 19 nt, Homo sapiens
  misc_RNA (1)...(19): siRNA sense strand
gcacagucgcugguccuua

SEQ ID NO: 96672 - RNA, 19 nt, Homo sapiens
  misc_RNA (1)...(19): siRNA sense strand
gagcauauaccucaaacag

SEQ ID NO: 96673 - RNA, 19 nt, Homo sapiens
  misc_RNA (1)...(19): siRNA sense strand
caacgccuccuuucuggaa

SEQ ID NO: 96674 - RNA, 19 nt, Homo sapiens
  misc_RNA (1)...(19): siRNA sense strand
aaccuggacuugaacguuu

SEQ ID NO: 96675 - RNA, 19 nt, Homo sapiens
  misc_RNA (1)...(19): siRNA sense strand
uuaugaaacuggauuugga

SEQ ID NO: 96676 - RNA, 19 nt, Homo sapiens
  misc_RNA (1)...(19): siRNA sense strand
gucaaggauuugcuaaaga

SEQ ID NO: 96677 - RNA, 19 nt, Homo sapiens
  misc_RNA (1)...(19): siRNA sense strand
ucacacguccgacucauga

SEQ ID NO: 96678 - RNA, 19 nt, Homo sapiens
  misc_RNA (1)...(19): siRNA sense strand
gagaagcugcucaggcuau

SEQ ID NO: 96679 - RNA, 19 nt, Homo sapiens
  misc_RNA (1)...(19): siRNA sense strand
uuggagggcugcugaaguu

SEQ ID NO: 96680 - RNA, 19 nt, Homo sapiens
  misc_RNA (1)...(19): siRNA sense strand
aagaagaaccaaauggaaa

SEQ ID NO: 96681 - RNA, 19 nt, Homo sapiens
  misc_RNA (1)...(19): siRNA sense strand
cauagauccugaaauugau

SEQ ID NO: 96682 - RNA, 19 nt, Homo sapiens
  misc_RNA (1)...(19): siRNA sense strand
gacgccaucuucacacgaa

SEQ ID NO: 96683 - RNA, 19 nt, Homo sapiens
  misc_RNA (1)...(19): siRNA sense strand
aaagaagaaccaaauggaa

SEQ ID NO: 96684 - RNA, 19 nt, Homo sapiens
  misc_RNA (1)...(19): siRNA sense strand
ccgccugccuuccauggua

SEQ ID NO: 96685 - RNA, 19 nt, Homo sapiens
  misc_RNA (1)...(19): siRNA sense strand
gccagacauuaguggauaa

SEQ ID NO: 96686 - RNA, 19 nt, Homo sapiens
  misc_RNA (1)...(19): siRNA sense strand
cagguaggcuugaucacau

SEQ ID NO: 96687 - RNA, 19 nt, Homo sapiens
  misc_RNA (1)...(19): siRNA sense strand
ccauaucgccagccucauu

SEQ ID NO: 96688 - RNA, 19 nt, Homo sapiens
  misc_RNA (1)...(19): siRNA sense strand
gauccuaaccuggacuuga

SEQ ID NO: 96689 - RNA, 19 nt, Homo sapiens
  misc_RNA (1)...(19): siRNA sense strand
caucagggaagagcauaua

SEQ ID NO: 96690 - RNA, 19 nt, Homo sapiens
  misc_RNA (1)...(19): siRNA sense strand
gaaccuuugugcccaacuc

SEQ ID NO: 96691 - RNA, 19 nt, Homo sapiens
  misc_RNA (1)...(19): siRNA sense strand
ugacuccacuauccacuuc

SEQ ID NO: 96692 - RNA, 19 nt, Homo sapiens
  misc_RNA (1)...(19): siRNA sense strand
aggagaagcugcacuaucg

SEQ ID NO: 96693 - RNA, 19 nt, Homo sapiens
  misc_RNA (1)...(19): siRNA sense strand
ggacucccguauuccuuca

SEQ ID NO: 96694 - RNA, 19 nt, Homo sapiens
  misc_RNA (1)...(19): siRNA sense strand
gaaucuggacucccguauu

SEQ ID NO: 96695 - RNA, 19 nt, Homo sapiens
  misc_RNA (1)...(19): siRNA sense strand
cuuccucucuuccauuauu

SEQ ID NO: 96696 - RNA, 19 nt, Homo sapiens
  misc_RNA (1)...(19): siRNA sense strand
ugccagacauuaguggaua

SEQ ID NO: 96697 - RNA, 19 nt, Homo sapiens
  misc_RNA (1)...(19): siRNA sense strand
aggauuugcuaaagaagaa

SEQ ID NO: 96698 - RNA, 19 nt, Homo sapiens
  misc_RNA (1)...(19): siRNA sense strand
guuccugggucgaagaaga

SEQ ID NO: 96699 - RNA, 19 nt, Homo sapiens
  misc_RNA (1)...(19): siRNA sense strand
cagaggagaagcugcacua

SEQ ID NO: 96700 - RNA, 19 nt, Homo sapiens
  misc_RNA (1)...(19): siRNA sense strand
gaaaauugccagacauuag

SEQ ID NO: 96701 - RNA, 19 nt, Homo sapiens
  misc_RNA (1)...(19): siRNA sense strand
uuaauggacuggacuucau

SEQ ID NO: 96702 - RNA, 19 nt, Homo sapiens
  misc_RNA (1)...(19): siRNA sense strand
ggcaguagacgccaucuuc

SEQ ID NO: 96703 - RNA, 19 nt, Homo sapiens
  misc_RNA (1)...(19): siRNA sense strand
gcagaggaggccgaaauug

SEQ ID NO: 96704 - RNA, 19 nt, Homo sapiens
  misc_RNA (1)...(19): siRNA sense strand
ggacuucauguuucucuca

SEQ ID NO: 96705 - RNA, 19 nt, Homo sapiens
  misc_RNA (1)...(19): siRNA sense strand
gaagaagaaucgggguuga

SEQ ID NO: 96706 - RNA, 19 nt, Homo sapiens
  misc_RNA (1)...(19): siRNA sense strand
gcuaaagaagaaccaaaug

SEQ ID NO: 96707 - RNA, 19 nt, Homo sapiens
  misc_RNA (1)...(19): siRNA sense strand
ugucaaggauuugcuaaag

SEQ ID NO: 96708 - RNA, 19 nt, Homo sapiens
  misc_RNA (1)...(19): siRNA sense strand
gcaguagacgccaucuuca

SEQ ID NO: 96709 - RNA, 19 nt, Homo sapiens
  misc_RNA (1)...(19): siRNA sense strand
gugcccaacuccacagaau

SEQ ID NO: 96710 - RNA, 19 nt, Homo sapiens
  misc_RNA (1)...(19): siRNA sense strand
aaacaggaugagaauauga

SEQ ID NO: 96711 - RNA, 19 nt, Homo sapiens
  misc_RNA (1)...(19): siRNA sense strand
aggaggagcuggccgagau

SEQ ID NO: 96712 - RNA, 19 nt, Homo sapiens
  misc_RNA (1)...(19): siRNA sense strand
ugaaacgcaugaaguuguc

SEQ ID NO: 96713 - RNA, 19 nt, Homo sapiens
  misc_RNA (1)...(19): siRNA sense strand
gcuccugggucacaucaag

SEQ ID NO: 96714 - RNA, 19 nt, Homo sapiens
  misc_RNA (1)...(19): siRNA sense strand
cauccugggcuuuaagaaa

SEQ ID NO: 96715 - RNA, 19 nt, Homo sapiens
  misc_RNA (1)...(19): siRNA sense strand
agagaguucuggaugagau

SEQ ID NO: 96716 - RNA, 19 nt, Homo sapiens
  misc_RNA (1)...(19): siRNA sense strand
gcuguggaauucaggauac

SEQ ID NO: 96717 - RNA, 19 nt, Homo sapiens
  misc_RNA (1)...(19): siRNA sense strand
cagcagaggaggccgaaau

SEQ ID NO: 96718 - RNA, 19 nt, Homo sapiens
  misc_RNA (1)...(19): siRNA sense strand
gaggagaagcugcacuauc

SEQ ID NO: 96719 - RNA, 19 nt, Homo sapiens
  misc_RNA (1)...(19): siRNA sense strand
ggccagugacuuugagauu

SEQ ID NO: 96720 - RNA, 19 nt, Homo sapiens
  misc_RNA (1)...(19): siRNA sense strand
ucugaugaccugcaccaua

SEQ ID NO: 96721 - RNA, 19 nt, Homo sapiens
  misc_RNA (1)...(19): siRNA sense strand
ggaaaauugccagacauua

SEQ ID NO: 96722 - RNA, 19 nt, Homo sapiens
  misc_RNA (1)...(19): siRNA sense strand
gcgaaagcagugaacaaug

SEQ ID NO: 96723 - RNA, 19 nt, Homo sapiens
  misc_RNA (1)...(19): siRNA sense strand
aaacagguaggcuugauca

SEQ ID NO: 96724 - RNA, 19 nt, Homo sapiens
  misc_RNA (1)...(19): siRNA sense strand
aaagggagggucaaaguca

SEQ ID NO: 96725 - RNA, 19 nt, Homo sapiens
  misc_RNA (1)...(19): siRNA sense strand
gcacgagcagcugucuuaa

SEQ ID NO: 96726 - RNA, 19 nt, Homo sapiens
  misc_RNA (1)...(19): siRNA sense strand
ggacucaguuggcagacua

SEQ ID NO: 96727 - RNA, 19 nt, Homo sapiens
  misc_RNA (1)...(19): siRNA sense strand
ggagaaagugugugaaauu

SEQ ID NO: 96728 - RNA, 19 nt, Homo sapiens
  misc_RNA (1)...(19): siRNA sense strand
gagaaagugugugaaauuc

SEQ ID NO: 96729 - RNA, 19 nt, Homo sapiens
  misc_RNA (1)...(19): siRNA sense strand
uaagaaagcucagccaaag

SEQ ID NO: 96730 - RNA, 19 nt, Homo sapiens
  misc_RNA (1)...(19): siRNA sense strand
uggaggacgugaagcaaua

SEQ ID NO: 96731 - RNA, 19 nt, Homo sapiens
  misc_RNA (1)...(19): siRNA sense strand
guaagaaagcucagccaaa

SEQ ID NO: 96732 - RNA, 19 nt, Homo sapiens
  misc_RNA (1)...(19): siRNA sense strand
gaaggagugucuggugaug

SEQ ID NO: 96733 - RNA, 19 nt, Homo sapiens
  misc_RNA (1)...(19): siRNA sense strand
aggaagggcugcgcgaaua

SEQ ID NO: 96734 - RNA, 19 nt, Homo sapiens
  misc_RNA (1)...(19): siRNA sense strand
gugaggacaucguggagaa

SEQ ID NO: 96735 - RNA, 19 nt, Homo sapiens
  misc_RNA (1)...(19): siRNA sense strand
ggcacgagcucgacuccaa

SEQ ID NO: 96736 - RNA, 19 nt, Homo sapiens
  misc_RNA (1)...(19): siRNA sense strand
ccaaaacaauugacccuaa

SEQ ID NO: 96737 - RNA, 19 nt, Homo sapiens
  misc_RNA (1)...(19): siRNA sense strand
gagcacagcccaagauggu

SEQ ID NO: 96738 - RNA, 19 nt, Homo sapiens
  misc_RNA (1)...(19): siRNA sense strand
ccacagccuucaccaaugg

SEQ ID NO: 96739 - RNA, 19 nt, Homo sapiens
  misc_RNA (1)...(19): siRNA sense strand
auaaagugcuggcgcaauc

SEQ ID NO: 96740 - RNA, 19 nt, Homo sapiens
  misc_RNA (1)...(19): siRNA sense strand
acaaaaugguggaauguaa

SEQ ID NO: 96741 - RNA, 19 nt, Homo sapiens
  misc_RNA (1)...(19): siRNA sense strand
guucggguuugucacguuu

SEQ ID NO: 96742 - RNA, 19 nt, Homo sapiens
  misc_RNA (1)...(19): siRNA sense strand
ggacgacgccaugcugaug

SEQ ID NO: 96743 - RNA, 19 nt, Homo sapiens
  misc_RNA (1)...(19): siRNA sense strand
gcacgagcucgacuccaaa

SEQ ID NO: 96744 - RNA, 19 nt, Homo sapiens
  misc_RNA (1)...(19): siRNA sense strand
gccacagccuucaccaaug

SEQ ID NO: 96745 - RNA, 19 nt, Homo sapiens
  misc_RNA (1)...(19): siRNA sense strand
ggacaucguggagaaagug

SEQ ID NO: 96746 - RNA, 19 nt, Homo sapiens
  misc_RNA (1)...(19): siRNA sense strand
agaaagcucagccaaagga

SEQ ID NO: 96747 - RNA, 19 nt, Homo sapiens
  misc_RNA (1)...(19): siRNA sense strand
guggagaaagugugugaaa

SEQ ID NO: 96748 - RNA, 19 nt, Homo sapiens
  misc_RNA (1)...(19): siRNA sense strand
gagcucgacuccaaaacaa

SEQ ID NO: 96749 - RNA, 19 nt, Homo sapiens
  misc_RNA (1)...(19): siRNA sense strand
ggacgugaagcaauauuuu

SEQ ID NO: 96750 - RNA, 19 nt, Homo sapiens
  misc_RNA (1)...(19): siRNA sense strand
acgccaugcugauguuuga

SEQ ID NO: 96751 - RNA, 19 nt, Homo sapiens
  misc_RNA (1)...(19): siRNA sense strand
cggaauggacgccuucaug

SEQ ID NO: 96752 - RNA, 19 nt, Homo sapiens
  misc_RNA (1)...(19): siRNA sense strand
uggagaaagugugugaaau

SEQ ID NO: 96753 - RNA, 19 nt, Homo sapiens
  misc_RNA (1)...(19): siRNA sense strand
gcaauauuuugagcaguuu

SEQ ID NO: 96754 - RNA, 19 nt, Homo sapiens
  misc_RNA (1)...(19): siRNA sense strand
gaaaucaacaacaaaaugg

SEQ ID NO: 96755 - RNA, 19 nt, Homo sapiens
  misc_RNA (1)...(19): siRNA sense strand
gauaaagugcuggcgcaau

SEQ ID NO: 96756 - RNA, 19 nt, Homo sapiens
  misc_RNA (1)...(19): siRNA sense strand
ggggaggucucgagucaug

SEQ ID NO: 96757 - RNA, 19 nt, Homo sapiens
  misc_RNA (1)...(19): siRNA sense strand
uacgccagccggaguuaua

SEQ ID NO: 96758 - RNA, 19 nt, Homo sapiens
  misc_RNA (1)...(19): siRNA sense strand
gcacgaccccugcaagaug

SEQ ID NO: 96759 - RNA, 19 nt, Homo sapiens
  misc_RNA (1)...(19): siRNA sense strand
gaauggacgccuucaugcu

SEQ ID NO: 96760 - RNA, 19 nt, Homo sapiens
  misc_RNA (1)...(19): siRNA sense strand
caaaacaauugacccuaag

SEQ ID NO: 96761 - RNA, 19 nt, Homo sapiens
  misc_RNA (1)...(19): siRNA sense strand
agucaugcccuacggaaug

SEQ ID NO: 96762 - RNA, 19 nt, Homo sapiens
  misc_RNA (1)...(19): siRNA sense strand
aaugguggaauguaagaaa

SEQ ID NO: 96763 - RNA, 19 nt, Homo sapiens
  misc_RNA (1)...(19): siRNA sense strand
ggaagggcugcgcgaauac

SEQ ID NO: 96764 - RNA, 19 nt, Homo sapiens
  misc_RNA (1)...(19): siRNA sense strand
gguucggguuugucacguu

SEQ ID NO: 96765 - RNA, 19 nt, Homo sapiens
  misc_RNA (1)...(19): siRNA sense strand
ccaugcugauguuugacaa

SEQ ID NO: 96766 - RNA, 19 nt, Homo sapiens
  misc_RNA (1)...(19): siRNA sense strand
ggaggacgugaagcaauau

SEQ ID NO: 96767 - RNA, 19 nt, Homo sapiens
  misc_RNA (1)...(19): siRNA sense strand
gguuucggcuucgucacuu

SEQ ID NO: 96768 - RNA, 19 nt, Homo sapiens
  misc_RNA (1)...(19): siRNA sense strand
gaggacgugaagcaauauu

SEQ ID NO: 96769 - RNA, 19 nt, Homo sapiens
  misc_RNA (1)...(19): siRNA sense strand
uggcuacaccuaccaguuc

SEQ ID NO: 96770 - RNA, 19 nt, Homo sapiens
  misc_RNA (1)...(19): siRNA sense strand
ggaaagagauucaaaugua

SEQ ID NO: 96771 - RNA, 19 nt, Homo sapiens
  misc_RNA (1)...(19): siRNA sense strand
gaaacaaacuguagaaucu

SEQ ID NO: 96772 - RNA, 19 nt, Homo sapiens
  misc_RNA (1)...(19): siRNA sense strand
gaacacugauauugacaua

SEQ ID NO: 96773 - RNA, 19 nt, Homo sapiens
  misc_RNA (1)...(19): siRNA sense strand
ggaagcagacucacauuua

SEQ ID NO: 96774 - RNA, 19 nt, Homo sapiens
  misc_RNA (1)...(19): siRNA sense strand
gaggaaauaugaacaagaa

SEQ ID NO: 96775 - RNA, 19 nt, Homo sapiens
  misc_RNA (1)...(19): siRNA sense strand
gaacaguaauagagucuuu

SEQ ID NO: 96776 - RNA, 19 nt, Homo sapiens
  misc_RNA (1)...(19): siRNA sense strand
cgacauuacuugacaaauu

SEQ ID NO: 96777 - RNA, 19 nt, Homo sapiens
  misc_RNA (1)...(19): siRNA sense strand
gagacagaauuguuuguua

SEQ ID NO: 96778 - RNA, 19 nt, Homo sapiens
  misc_RNA (1)...(19): siRNA sense strand
gcgauaaucugauggcuuu

SEQ ID NO: 96779 - RNA, 19 nt, Homo sapiens
  misc_RNA (1)...(19): siRNA sense strand
ugacauagauucacuggaa

SEQ ID NO: 96780 - RNA, 19 nt, Homo sapiens
  misc_RNA (1)...(19): siRNA sense strand
gcagaaauguuagaauuga

SEQ ID NO: 96781 - RNA, 19 nt, Homo sapiens
  misc_RNA (1)...(19): siRNA sense strand
caaagaagcacaucagaaa

SEQ ID NO: 96782 - RNA, 19 nt, Homo sapiens
  misc_RNA (1)...(19): siRNA sense strand
ucaaagaagugauaacgaa

SEQ ID NO: 96783 - RNA, 19 nt, Homo sapiens
  misc_RNA (1)...(19): siRNA sense strand
uaaccuugcugaaacauuu

SEQ ID NO: 96784 - RNA, 19 nt, Homo sapiens
  misc_RNA (1)...(19): siRNA sense strand
aaaguacgcuuaauguuug

SEQ ID NO: 96785 - RNA, 19 nt, Homo sapiens
  misc_RNA (1)...(19): siRNA sense strand
ccauaaagaugacauuuca

SEQ ID NO: 96786 - RNA, 19 nt, Homo sapiens
  misc_RNA (1)...(19): siRNA sense strand
gaagcagacucacauuuag

SEQ ID NO: 96787 - RNA, 19 nt, Homo sapiens
  misc_RNA (1)...(19): siRNA sense strand
gaaagcagaucccaauggu

SEQ ID NO: 96788 - RNA, 19 nt, Homo sapiens
  misc_RNA (1)...(19): siRNA sense strand
gaacugagcagcagauuac

SEQ ID NO: 96789 - RNA, 19 nt, Homo sapiens
  misc_RNA (1)...(19): siRNA sense strand
ggauuguggucucaguuua

SEQ ID NO: 96790 - RNA, 19 nt, Homo sapiens
  misc_RNA (1)...(19): siRNA sense strand
gaaagagauucaaauguac

SEQ ID NO: 96791 - RNA, 19 nt, Homo sapiens
  misc_RNA (1)...(19): siRNA sense strand
gaagaaggaccauggaaau

SEQ ID NO: 96792 - RNA, 19 nt, Homo sapiens
  misc_RNA (1)...(19): siRNA sense strand
ggaaaucucaguuaucuuc

SEQ ID NO: 96793 - RNA, 19 nt, Homo sapiens
  misc_RNA (1)...(19): siRNA sense strand
guagaaguauggauuggaa

SEQ ID NO: 96794 - RNA, 19 nt, Homo sapiens
  misc_RNA (1)...(19): siRNA sense strand
gaacaaauacccuuaaagc

SEQ ID NO: 96795 - RNA, 19 nt, Homo sapiens
  misc_RNA (1)...(19): siRNA sense strand
ggauuggaaugacuauuga

SEQ ID NO: 96796 - RNA, 19 nt, Homo sapiens
  misc_RNA (1)...(19): siRNA sense strand
gaugaagucuggaucaaag

SEQ ID NO: 96797 - RNA, 19 nt, Homo sapiens
  misc_RNA (1)...(19): siRNA sense strand
cuagcuaccuucucuguaa

SEQ ID NO: 96798 - RNA, 19 nt, Homo sapiens
  misc_RNA (1)...(19): siRNA sense strand
gagaucaauucuacgguuu

SEQ ID NO: 96799 - RNA, 19 nt, Homo sapiens
  misc_RNA (1)...(19): siRNA sense strand
ggaagaaggaccauggaaa

SEQ ID NO: 96800 - RNA, 19 nt, Homo sapiens
  misc_RNA (1)...(19): siRNA sense strand
ggagaaaggucaggaggau

SEQ ID NO: 96801 - RNA, 19 nt, Homo sapiens
  misc_RNA (1)...(19): siRNA sense strand
acacugauauugacauaga

SEQ ID NO: 96802 - RNA, 19 nt, Homo sapiens
  misc_RNA (1)...(19): siRNA sense strand
gaaagcccgugagaaguau

SEQ ID NO: 96803 - RNA, 19 nt, Homo sapiens
  misc_RNA (1)...(19): siRNA sense strand
guaauggacauguaauuug

SEQ ID NO: 96804 - RNA, 19 nt, Homo sapiens
  misc_RNA (1)...(19): siRNA sense strand
ggaaggaacaguaauagag

SEQ ID NO: 96805 - RNA, 19 nt, Homo sapiens
  misc_RNA (1)...(19): siRNA sense strand
ugaaacaccauaaagauga

SEQ ID NO: 96806 - RNA, 19 nt, Homo sapiens
  misc_RNA (1)...(19): siRNA sense strand
gguguuauauauggcuuua

SEQ ID NO: 96807 - RNA, 19 nt, Homo sapiens
  misc_RNA (1)...(19): siRNA sense strand
ugacaaagcugaggcugau

SEQ ID NO: 96808 - RNA, 19 nt, Homo sapiens
  misc_RNA (1)...(19): siRNA sense strand
ggaacugagcagcagauua

SEQ ID NO: 96809 - RNA, 19 nt, Homo sapiens
  misc_RNA (1)...(19): siRNA sense strand
ugagaaguauggccaucua

SEQ ID NO: 96810 - RNA, 19 nt, Homo sapiens
  misc_RNA (1)...(19): siRNA sense strand
caaauguacuuucugugau

SEQ ID NO: 96811 - RNA, 19 nt, Homo sapiens
  misc_RNA (1)...(19): siRNA sense strand
ucaaauguacuuucuguga

SEQ ID NO: 96812 - RNA, 19 nt, Homo sapiens
  misc_RNA (1)...(19): siRNA sense strand
ucaaagaagagcauuaaga

SEQ ID NO: 96813 - RNA, 19 nt, Homo sapiens
  misc_RNA (1)...(19): siRNA sense strand
gguuguagcugcagaugau

SEQ ID NO: 96814 - RNA, 19 nt, Homo sapiens
  misc_RNA (1)...(19): siRNA sense strand
gauguuaaccuugcugaaa

SEQ ID NO: 96815 - RNA, 19 nt, Homo sapiens
  misc_RNA (1)...(19): siRNA sense strand
gaaggcagggaugaaguua

SEQ ID NO: 96816 - RNA, 19 nt, Homo sapiens
  misc_RNA (1)...(19): siRNA sense strand
cgagugugaacuagaauua

SEQ ID NO: 96817 - RNA, 19 nt, Homo sapiens
  misc_RNA (1)...(19): siRNA sense strand
agacucacauuuagaugaa

SEQ ID NO: 96818 - RNA, 19 nt, Homo sapiens
  misc_RNA (1)...(19): siRNA sense strand
caguuuagaugaagacaau

SEQ ID NO: 96819 - RNA, 19 nt, Homo sapiens
  misc_RNA (1)...(19): siRNA sense strand
agaaagcccgugagaagua

SEQ ID NO: 96820 - RNA, 19 nt, Homo sapiens
  misc_RNA (1)...(19): siRNA sense strand
gcgaaaggaacacaaagaa

SEQ ID NO: 96821 - RNA, 19 nt, Homo sapiens
  misc_RNA (1)...(19): siRNA sense strand
ggaaauaugaacaagaaca

SEQ ID NO: 96822 - RNA, 19 nt, Homo sapiens
  misc_RNA (1)...(19): siRNA sense strand
ggagaacuugcuacgauuu

SEQ ID NO: 96823 - RNA, 19 nt, Homo sapiens
  misc_RNA (1)...(19): siRNA sense strand
gaugugguaugugaagauu

SEQ ID NO: 96824 - RNA, 19 nt, Homo sapiens
  misc_RNA (1)...(19): siRNA sense strand
aggcagggaugaaguuaaa

SEQ ID NO: 96825 - RNA, 19 nt, Homo sapiens
  misc_RNA (1)...(19): siRNA sense strand
gaaggaccauggaaaucuc

SEQ ID NO: 96826 - RNA, 19 nt, Homo sapiens
  misc_RNA (1)...(19): siRNA sense strand
ggugaggcaucuauacuag

SEQ ID NO: 96827 - RNA, 19 nt, Homo sapiens
  misc_RNA (1)...(19): siRNA sense strand
gugaaugcaggcaauguua

SEQ ID NO: 96828 - RNA, 19 nt, Homo sapiens
  misc_RNA (1)...(19): siRNA sense strand
caucuacuguggaagaaga

SEQ ID NO: 96829 - RNA, 19 nt, Homo sapiens
  misc_RNA (1)...(19): siRNA sense strand
gaaggaacaguaauagagu

SEQ ID NO: 96830 - RNA, 19 nt, Homo sapiens
  misc_RNA (1)...(19): siRNA sense strand
ccauggaaaucucaguuau

SEQ ID NO: 96831 - RNA, 19 nt, Homo sapiens
  misc_RNA (1)...(19): siRNA sense strand
gaaguuaaaguggaguaaa

SEQ ID NO: 96832 - RNA, 19 nt, Homo sapiens
  misc_RNA (1)...(19): siRNA sense strand
gcuacgauuucacacuauu

SEQ ID NO: 96833 - RNA, 19 nt, Homo sapiens
  misc_RNA (1)...(19): siRNA sense strand
uaaacuaacccguaaugga

SEQ ID NO: 96834 - RNA, 19 nt, Homo sapiens
  misc_RNA (1)...(19): siRNA sense strand
gaugcacagguuccuauua

SEQ ID NO: 96835 - RNA, 19 nt, Homo sapiens
  misc_RNA (1)...(19): siRNA sense strand
gaugaaacaaacuguagaa

SEQ ID NO: 96836 - RNA, 19 nt, Homo sapiens
  misc_RNA (1)...(19): siRNA sense strand
gaaugacuauugaggaacu

SEQ ID NO: 96837 - RNA, 19 nt, Homo sapiens
  misc_RNA (1)...(19): siRNA sense strand
uaauggacauguaauuugg

SEQ ID NO: 96838 - RNA, 19 nt, Homo sapiens
  misc_RNA (1)...(19): siRNA sense strand
uaauagagucuuucacaga

SEQ ID NO: 96839 - RNA, 19 nt, Homo sapiens
  misc_RNA (1)...(19): siRNA sense strand
ugccaaagaugcacagguu

SEQ ID NO: 96840 - RNA, 19 nt, Homo sapiens
  misc_RNA (1)...(19): siRNA sense strand
uggaaugacuauugaggaa

SEQ ID NO: 96841 - RNA, 19 nt, Homo sapiens
  misc_RNA (1)...(19): siRNA sense strand
ggaauggauuguggucuca

SEQ ID NO: 96842 - RNA, 19 nt, Homo sapiens
  misc_RNA (1)...(19): siRNA sense strand
ucagaaagcccgugagaag

SEQ ID NO: 96843 - RNA, 19 nt, Homo sapiens
  misc_RNA (1)...(19): siRNA sense strand
gaaguauggauuggaauga

SEQ ID NO: 96844 - RNA, 19 nt, Homo sapiens
  misc_RNA (1)...(19): siRNA sense strand
caaagaagagcauuaagac

SEQ ID NO: 96845 - RNA, 19 nt, Homo sapiens
  misc_RNA (1)...(19): siRNA sense strand
gggcugcuuuaucucagua

SEQ ID NO: 96846 - RNA, 19 nt, Homo sapiens
  misc_RNA (1)...(19): siRNA sense strand
accagaagcuacugaaguu

SEQ ID NO: 96847 - RNA, 19 nt, Homo sapiens
  misc_RNA (1)...(19): siRNA sense strand
caauauggaauuucaagug

SEQ ID NO: 96848 - RNA, 19 nt, Homo sapiens
  misc_RNA (1)...(19): siRNA sense strand
ucauuaaccucauugaaac

SEQ ID NO: 96849 - RNA, 19 nt, Homo sapiens
  misc_RNA (1)...(19): siRNA sense strand
guuguugacuggaggaaau

SEQ ID NO: 96850 - RNA, 19 nt, Homo sapiens
  misc_RNA (1)...(19): siRNA sense strand
ugugguaugugaagauuau

SEQ ID NO: 96851 - RNA, 19 nt, Homo sapiens
  misc_RNA (1)...(19): siRNA sense strand
gccaagggcacgugaaguu

SEQ ID NO: 96852 - RNA, 19 nt, Homo sapiens
  misc_RNA (1)...(19): siRNA sense strand
ggagacagaauuguuuguu

SEQ ID NO: 96853 - RNA, 19 nt, Homo sapiens
  misc_RNA (1)...(19): siRNA sense strand
uauacuagcuaccuucucu

SEQ ID NO: 96854 - RNA, 19 nt, Homo sapiens
  misc_RNA (1)...(19): siRNA sense strand
uaauuuaccgucuuguuga

SEQ ID NO: 96855 - RNA, 19 nt, Homo sapiens
  misc_RNA (1)...(19): siRNA sense strand
uaaaggugauguugauggu

SEQ ID NO: 96856 - RNA, 19 nt, Homo sapiens
  misc_RNA (1)...(19): siRNA sense strand
ggaggaaauaugaacaaga

SEQ ID NO: 96857 - RNA, 19 nt, Homo sapiens
  misc_RNA (1)...(19): siRNA sense strand
gcugcuggcuuacgaugug

SEQ ID NO: 96858 - RNA, 19 nt, Homo sapiens
  misc_RNA (1)...(19): siRNA sense strand
gggaaagagauucaaaugu

SEQ ID NO: 96859 - RNA, 19 nt, Homo sapiens
  misc_RNA (1)...(19): siRNA sense strand
cuacagcuauaauucaaag

SEQ ID NO: 96860 - RNA, 19 nt, Homo sapiens
  misc_RNA (1)...(19): siRNA sense strand
gaaacaccauaaagaugac

SEQ ID NO: 96861 - RNA, 19 nt, Homo sapiens
  misc_RNA (1)...(19): siRNA sense strand
caagugggagacagaauug

SEQ ID NO: 96862 - RNA, 19 nt, Homo sapiens
  misc_RNA (1)...(19): siRNA sense strand
ugaaacaaacuguagaauc

SEQ ID NO: 96863 - RNA, 19 nt, Homo sapiens
  misc_RNA (1)...(19): siRNA sense strand
cguaauggacauguaauuu

SEQ ID NO: 96864 - RNA, 19 nt, Homo sapiens
  misc_RNA (1)...(19): siRNA sense strand
gaaauaugaacaagaacag

SEQ ID NO: 96865 - RNA, 19 nt, Homo sapiens
  misc_RNA (1)...(19): siRNA sense strand
ggugguagaaguauggauu

SEQ ID NO: 96866 - RNA, 19 nt, Homo sapiens
  misc_RNA (1)...(19): siRNA sense strand
ucaagugggagacagaauu

SEQ ID NO: 96867 - RNA, 19 nt, Homo sapiens
  misc_RNA (1)...(19): siRNA sense strand
agaagagcauuaagacagu

SEQ ID NO: 96868 - RNA, 19 nt, Homo sapiens
  misc_RNA (1)...(19): siRNA sense strand
acaaagaagcacaucagaa

SEQ ID NO: 96869 - RNA, 19 nt, Homo sapiens
  misc_RNA (1)...(19): siRNA sense strand
gcugcuuuaucucaguaua

SEQ ID NO: 96870 - RNA, 19 nt, Homo sapiens
  misc_RNA (1)...(19): siRNA sense strand
ucacaagccucucugaaua

SEQ ID NO: 96871 - RNA, 19 nt, Homo sapiens
  misc_RNA (1)...(19): siRNA sense strand
gaucuuaacucaucuaaag

SEQ ID NO: 96872 - RNA, 19 nt, Homo sapiens
  misc_RNA (1)...(19): siRNA sense strand
gcaaagagguuggaguuga

SEQ ID NO: 96873 - RNA, 19 nt, Homo sapiens
  misc_RNA (1)...(19): siRNA sense strand
guacaaagccuacuccaaa

SEQ ID NO: 96874 - RNA, 19 nt, Homo sapiens
  misc_RNA (1)...(19): siRNA sense strand
gggauuaucuauucagaaa

SEQ ID NO: 96875 - RNA, 19 nt, Homo sapiens
  misc_RNA (1)...(19): siRNA sense strand
uaacagugauucugaggua

SEQ ID NO: 96876 - RNA, 19 nt, Homo sapiens
  misc_RNA (1)...(19): siRNA sense strand
caaagaauauggccaagga

SEQ ID NO: 96877 - RNA, 19 nt, Homo sapiens
  misc_RNA (1)...(19): siRNA sense strand
ggagguuucuguuacuaua

SEQ ID NO: 96878 - RNA, 19 nt, Homo sapiens
  misc_RNA (1)...(19): siRNA sense strand
gagagaaacuccaagaaca

SEQ ID NO: 96879 - RNA, 19 nt, Homo sapiens
  misc_RNA (1)...(19): siRNA sense strand
cgacacagcccgcaaguuu

SEQ ID NO: 96880 - RNA, 19 nt, Homo sapiens
  misc_RNA (1)...(19): siRNA sense strand
gacugcagcuugaagauaa

SEQ ID NO: 96881 - RNA, 19 nt, Homo sapiens
  misc_RNA (1)...(19): siRNA sense strand
gcagaucuucacuguauua

SEQ ID NO: 96882 - RNA, 19 nt, Homo sapiens
  misc_RNA (1)...(19): siRNA sense strand
gcagaugacuguguagguu

SEQ ID NO: 96883 - RNA, 19 nt, Homo sapiens
  misc_RNA (1)...(19): siRNA sense strand
ccaauccaauguuguaauu

SEQ ID NO: 96884 - RNA, 19 nt, Homo sapiens
  misc_RNA (1)...(19): siRNA sense strand
caaagagguuggaguugaa

SEQ ID NO: 96885 - RNA, 19 nt, Homo sapiens
  misc_RNA (1)...(19): siRNA sense strand
caaaguauguacaagacaa

SEQ ID NO: 96886 - RNA, 19 nt, Homo sapiens
  misc_RNA (1)...(19): siRNA sense strand
gcucgaacaucuuccuaaa

SEQ ID NO: 96887 - RNA, 19 nt, Homo sapiens
  misc_RNA (1)...(19): siRNA sense strand
ggagaacggccauauuuau

SEQ ID NO: 96888 - RNA, 19 nt, Homo sapiens
  misc_RNA (1)...(19): siRNA sense strand
gaacaacacccagauggaa

SEQ ID NO: 96889 - RNA, 19 nt, Homo sapiens
  misc_RNA (1)...(19): siRNA sense strand
gaacaucuuccuaaacuuc

SEQ ID NO: 96890 - RNA, 19 nt, Homo sapiens
  misc_RNA (1)...(19): siRNA sense strand
gcaaguuuguuaaggaaau

SEQ ID NO: 96891 - RNA, 19 nt, Homo sapiens
  misc_RNA (1)...(19): siRNA sense strand
cugcagaucuucacuguau

SEQ ID NO: 96892 - RNA, 19 nt, Homo sapiens
  misc_RNA (1)...(19): siRNA sense strand
gcauauaccugcgggaugu

SEQ ID NO: 96893 - RNA, 19 nt, Homo sapiens
  misc_RNA (1)...(19): siRNA sense strand
caaaggccaucgcagaaga

SEQ ID NO: 96894 - RNA, 19 nt, Homo sapiens
  misc_RNA (1)...(19): siRNA sense strand
gaacagcaaccaauccaau

SEQ ID NO: 96895 - RNA, 19 nt, Homo sapiens
  misc_RNA (1)...(19): siRNA sense strand
guuuagaacuugugguuga

SEQ ID NO: 96896 - RNA, 19 nt, Homo sapiens
  misc_RNA (1)...(19): siRNA sense strand
uaacucaucuaaagguuuc

SEQ ID NO: 96897 - RNA, 19 nt, Homo sapiens
  misc_RNA (1)...(19): siRNA sense strand
ccacucugcugguagaauu

SEQ ID NO: 96898 - RNA, 19 nt, Homo sapiens
  misc_RNA (1)...(19): siRNA sense strand
caggagaacggccauauuu

SEQ ID NO: 96899 - RNA, 19 nt, Homo sapiens
  misc_RNA (1)...(19): siRNA sense strand
gaauauggccaaggaugua

SEQ ID NO: 96900 - RNA, 19 nt, Homo sapiens
  misc_RNA (1)...(19): siRNA sense strand
gaaauccgagcaauuccua

SEQ ID NO: 96901 - RNA, 19 nt, Homo sapiens
  misc_RNA (1)...(19): siRNA sense strand
ggaaauacagaaccaaaca

SEQ ID NO: 96902 - RNA, 19 nt, Homo sapiens
  misc_RNA (1)...(19): siRNA sense strand
caacaaauucuuuccacuu

SEQ ID NO: 96903 - RNA, 19 nt, Homo sapiens
  misc_RNA (1)...(19): siRNA sense strand
cccagaauauuuacaggua

SEQ ID NO: 96904 - RNA, 19 nt, Homo sapiens
  misc_RNA (1)...(19): siRNA sense strand
caugggaucuuaacucauc

SEQ ID NO: 96905 - RNA, 19 nt, Homo sapiens
  misc_RNA (1)...(19): siRNA sense strand
aaacacugccgguugauuu

SEQ ID NO: 96906 - RNA, 19 nt, Homo sapiens
  misc_RNA (1)...(19): siRNA sense strand
gaaagccaaguaucuguga

SEQ ID NO: 96907 - RNA, 19 nt, Homo sapiens
  misc_RNA (1)...(19): siRNA sense strand
gaggagguuucuguuacua

SEQ ID NO: 96908 - RNA, 19 nt, Homo sapiens
  misc_RNA (1)...(19): siRNA sense strand
ugaaaacccuggccacuuu

SEQ ID NO: 96909 - RNA, 19 nt, Homo sapiens
  misc_RNA (1)...(19): siRNA sense strand
ugugcaagcucaaguuuau

SEQ ID NO: 96910 - RNA, 19 nt, Homo sapiens
  misc_RNA (1)...(19): siRNA sense strand
ggaagauaauugauaaacg

SEQ ID NO: 96911 - RNA, 19 nt, Homo sapiens
  misc_RNA (1)...(19): siRNA sense strand
ggccaaggauguacaugau

SEQ ID NO: 96912 - RNA, 19 nt, Homo sapiens
  misc_RNA (1)...(19): siRNA sense strand
gauguucucuccaguucau

SEQ ID NO: 96913 - RNA, 19 nt, Homo sapiens
  misc_RNA (1)...(19): siRNA sense strand
gggauguucucuccaguuc

SEQ ID NO: 96914 - RNA, 19 nt, Homo sapiens
  misc_RNA (1)...(19): siRNA sense strand
agaugacuguguagguuua

SEQ ID NO: 96915 - RNA, 19 nt, Homo sapiens
  misc_RNA (1)...(19): siRNA sense strand
ggaggaaagccaaguaucu

SEQ ID NO: 96916 - RNA, 19 nt, Homo sapiens
  misc_RNA (1)...(19): siRNA sense strand
uaaacgacuucaagagcuu

SEQ ID NO: 96917 - RNA, 19 nt, Homo sapiens
  misc_RNA (1)...(19): siRNA sense strand
ggcauaaggauagggauua

SEQ ID NO: 96918 - RNA, 19 nt, Homo sapiens
  misc_RNA (1)...(19): siRNA sense strand
agucagagcugcuacacau

SEQ ID NO: 96919 - RNA, 19 nt, Homo sapiens
  misc_RNA (1)...(19): siRNA sense strand
gaacaacaaauucuuucca

SEQ ID NO: 96920 - RNA, 19 nt, Homo sapiens
  misc_RNA (1)...(19): siRNA sense strand
ggccaucgcagaagaaaug

SEQ ID NO: 96921 - RNA, 19 nt, Homo sapiens
  misc_RNA (1)...(19): siRNA sense strand
gcagugaacagcaaccaau

SEQ ID NO: 96922 - RNA, 19 nt, Homo sapiens
  misc_RNA (1)...(19): siRNA sense strand
gaucugcccuaacagugau

SEQ ID NO: 96923 - RNA, 19 nt, Homo sapiens
  misc_RNA (1)...(19): siRNA sense strand
caggaaagcuccauuuugu

SEQ ID NO: 96924 - RNA, 19 nt, Homo sapiens
  misc_RNA (1)...(19): siRNA sense strand
aagucgagcuucugagauu

SEQ ID NO: 96925 - RNA, 19 nt, Homo sapiens
  misc_RNA (1)...(19): siRNA sense strand
agagagcacugcguccuuu

SEQ ID NO: 96926 - RNA, 19 nt, Homo sapiens
  misc_RNA (1)...(19): siRNA sense strand
cuucugagauucgaugauu

SEQ ID NO: 96927 - RNA, 19 nt, Homo sapiens
  misc_RNA (1)...(19): siRNA sense strand
gaaaggauucugagguuuu

SEQ ID NO: 96928 - RNA, 19 nt, Homo sapiens
  misc_RNA (1)...(19): siRNA sense strand
cagcaaaguauguacaaga

SEQ ID NO: 96929 - RNA, 19 nt, Homo sapiens
  misc_RNA (1)...(19): siRNA sense strand
ucgaacaucuuccuaaacu

SEQ ID NO: 96930 - RNA, 19 nt, Homo sapiens
  misc_RNA (1)...(19): siRNA sense strand
caacuuacuacgaaugaug

SEQ ID NO: 96931 - RNA, 19 nt, Homo sapiens
  misc_RNA (1)...(19): siRNA sense strand
ggacaagaggagauaagug

SEQ ID NO: 96932 - RNA, 19 nt, Homo sapiens
  misc_RNA (1)...(19): siRNA sense strand
guguggagaugcaaagaau

SEQ ID NO: 96933 - RNA, 19 nt, Homo sapiens
  misc_RNA (1)...(19): siRNA sense strand
ggagcaaugugguuguuuu

SEQ ID NO: 96934 - RNA, 19 nt, Homo sapiens
  misc_RNA (1)...(19): siRNA sense strand
gugaauccgauaaguauga

SEQ ID NO: 96935 - RNA, 19 nt, Homo sapiens
  misc_RNA (1)...(19): siRNA sense strand
ccgcaaguuuguuaaggaa

SEQ ID NO: 96936 - RNA, 19 nt, Homo sapiens
  misc_RNA (1)...(19): siRNA sense strand
gcaaauaauaagcaaagag

SEQ ID NO: 96937 - RNA, 19 nt, Homo sapiens
  misc_RNA (1)...(19): siRNA sense strand
gacaacauccagcuucaug

SEQ ID NO: 96938 - RNA, 19 nt, Homo sapiens
  misc_RNA (1)...(19): siRNA sense strand
ccuacaacauagagagaaa

SEQ ID NO: 96939 - RNA, 19 nt, Homo sapiens
  misc_RNA (1)...(19): siRNA sense strand
uccaaagacugcagcuuga

SEQ ID NO: 96940 - RNA, 19 nt, Homo sapiens
  misc_RNA (1)...(19): siRNA sense strand
acaagccucucugaauauu

SEQ ID NO: 96941 - RNA, 19 nt, Homo sapiens
  misc_RNA (1)...(19): siRNA sense strand
cagagcugcuacacauuga

SEQ ID NO: 96942 - RNA, 19 nt, Homo sapiens
  misc_RNA (1)...(19): siRNA sense strand
acaugcagaugacugugua

SEQ ID NO: 96943 - RNA, 19 nt, Homo sapiens
  misc_RNA (1)...(19): siRNA sense strand
cuucaacauuguggaauuu

SEQ ID NO: 96944 - RNA, 19 nt, Homo sapiens
  misc_RNA (1)...(19): siRNA sense strand
gcccuugugcaaauaauaa

SEQ ID NO: 96945 - RNA, 19 nt, Homo sapiens
  misc_RNA (1)...(19): siRNA sense strand
cagaauauuuacagguaca

SEQ ID NO: 96946 - RNA, 19 nt, Homo sapiens
  misc_RNA (1)...(19): siRNA sense strand
cuacgaaugaugccauaaa

SEQ ID NO: 96947 - RNA, 19 nt, Homo sapiens
  misc_RNA (1)...(19): siRNA sense strand
gaaaauaaaggcagacaca

SEQ ID NO: 96948 - RNA, 19 nt, Homo sapiens
  misc_RNA (1)...(19): siRNA sense strand
cgauaaguaugaccuaaaa

SEQ ID NO: 96949 - RNA, 19 nt, Homo sapiens
  misc_RNA (1)...(19): siRNA sense strand
guggagaugcaaagaauau

SEQ ID NO: 96950 - RNA, 19 nt, Homo sapiens
  misc_RNA (1)...(19): siRNA sense strand
uuagugaauccgauaagua

SEQ ID NO: 96951 - RNA, 19 nt, Homo sapiens
  misc_RNA (1)...(19): siRNA sense strand
cuucaguucuucagccaaa

SEQ ID NO: 96952 - RNA, 19 nt, Homo sapiens
  misc_RNA (1)...(19): siRNA sense strand
ucagagcugcuacacauug

SEQ ID NO: 96953 - RNA, 19 nt, Homo sapiens
  misc_RNA (1)...(19): siRNA sense strand
ggcaaaggccaucgcagaa

SEQ ID NO: 96954 - RNA, 19 nt, Homo sapiens
  misc_RNA (1)...(19): siRNA sense strand
cucaagagaugcuccuguu

SEQ ID NO: 96955 - RNA, 19 nt, Homo sapiens
  misc_RNA (1)...(19): siRNA sense strand
guugguugcuucaguucuu

SEQ ID NO: 96956 - RNA, 19 nt, Homo sapiens
  misc_RNA (1)...(19): siRNA sense strand
cagcuccucuuguuguugu

SEQ ID NO: 96957 - RNA, 19 nt, Homo sapiens
  misc_RNA (1)...(19): siRNA sense strand
ucugaauauuccugguuua

SEQ ID NO: 96958 - RNA, 19 nt, Homo sapiens
  misc_RNA (1)...(19): siRNA sense strand
aagcaaagagguuggaguu

SEQ ID NO: 96959 - RNA, 19 nt, Homo sapiens
  misc_RNA (1)...(19): siRNA sense strand
ugagcaagcugugguacau

SEQ ID NO: 96960 - RNA, 19 nt, Homo sapiens
  misc_RNA (1)...(19): siRNA sense strand
uagugaauccgauaaguau

SEQ ID NO: 96961 - RNA, 19 nt, Homo sapiens
  misc_RNA (1)...(19): siRNA sense strand
aaacgcuaccuucaggaua

SEQ ID NO: 96962 - RNA, 19 nt, Homo sapiens
  misc_RNA (1)...(19): siRNA sense strand
caagaacaacacccagaug

SEQ ID NO: 96963 - RNA, 19 nt, Homo sapiens
  misc_RNA (1)...(19): siRNA sense strand
acacuggacaugcagauga

SEQ ID NO: 96964 - RNA, 19 nt, Homo sapiens
  misc_RNA (1)...(19): siRNA sense strand
aggagaacggccauauuua

SEQ ID NO: 96965 - RNA, 19 nt, Homo sapiens
  misc_RNA (1)...(19): siRNA sense strand
gcccuaacagugauucuga

SEQ ID NO: 96966 - RNA, 19 nt, Homo sapiens
  misc_RNA (1)...(19): siRNA sense strand
gaggaaagccaaguaucug

SEQ ID NO: 96967 - RNA, 19 nt, Homo sapiens
  misc_RNA (1)...(19): siRNA sense strand
cuguguagguuuagaacuu

SEQ ID NO: 96968 - RNA, 19 nt, Homo sapiens
  misc_RNA (1)...(19): siRNA sense strand
ggagaugcaaagaauaugg

SEQ ID NO: 96969 - RNA, 19 nt, Homo sapiens
  misc_RNA (1)...(19): siRNA sense strand
ccaggaggaaagccaagua

SEQ ID NO: 96970 - RNA, 19 nt, Homo sapiens
  misc_RNA (1)...(19): siRNA sense strand
ucacaagccucucugaaua

SEQ ID NO: 96971 - RNA, 19 nt, Homo sapiens
  misc_RNA (1)...(19): siRNA sense strand
gaucuuaacucaucuaaag

SEQ ID NO: 96972 - RNA, 19 nt, Homo sapiens
  misc_RNA (1)...(19): siRNA sense strand
gcaaagagguuggaguuga

SEQ ID NO: 96973 - RNA, 19 nt, Homo sapiens
  misc_RNA (1)...(19): siRNA sense strand
guacaaagccuacuccaaa

SEQ ID NO: 96974 - RNA, 19 nt, Homo sapiens
  misc_RNA (1)...(19): siRNA sense strand
gggauuaucuauucagaaa

SEQ ID NO: 96975 - RNA, 19 nt, Homo sapiens
  misc_RNA (1)...(19): siRNA sense strand
uaacagugauucugaggua

SEQ ID NO: 96976 - RNA, 19 nt, Homo sapiens
  misc_RNA (1)...(19): siRNA sense strand
ggagguuucuguuacuaua

SEQ ID NO: 96977 - RNA, 19 nt, Homo sapiens
  misc_RNA (1)...(19): siRNA sense strand
caaagaauauggccaagga

SEQ ID NO: 96978 - RNA, 19 nt, Homo sapiens
  misc_RNA (1)...(19): siRNA sense strand
gagagaaacuccaagaaca

SEQ ID NO: 96979 - RNA, 19 nt, Homo sapiens
  misc_RNA (1)...(19): siRNA sense strand
cgacacagcccgcaaguuu

SEQ ID NO: 96980 - RNA, 19 nt, Homo sapiens
  misc_RNA (1)...(19): siRNA sense strand
gacugcagcuugaagauaa

SEQ ID NO: 96981 - RNA, 19 nt, Homo sapiens
  misc_RNA (1)...(19): siRNA sense strand
gcagaucuucacuguauua

SEQ ID NO: 96982 - RNA, 19 nt, Homo sapiens
  misc_RNA (1)...(19): siRNA sense strand
gcagaugacuguguagguu

SEQ ID NO: 96983 - RNA, 19 nt, Homo sapiens
  misc_RNA (1)...(19): siRNA sense strand
ccaauccaauguuguaauu

SEQ ID NO: 96984 - RNA, 19 nt, Homo sapiens
  misc_RNA (1)...(19): siRNA sense strand
caaagagguuggaguugaa

SEQ ID NO: 96985 - RNA, 19 nt, Homo sapiens
  misc_RNA (1)...(19): siRNA sense strand
caaaguauguacaagacaa

SEQ ID NO: 96986 - RNA, 19 nt, Homo sapiens
  misc_RNA (1)...(19): siRNA sense strand
gcucgaacaucuuccuaaa

SEQ ID NO: 96987 - RNA, 19 nt, Homo sapiens
  misc_RNA (1)...(19): siRNA sense strand
ggagaacggccauauuuau

SEQ ID NO: 96988 - RNA, 19 nt, Homo sapiens
  misc_RNA (1)...(19): siRNA sense strand
gaacaacacccagauggaa

SEQ ID NO: 96989 - RNA, 19 nt, Homo sapiens
  misc_RNA (1)...(19): siRNA sense strand
gaacaucuuccuaaacuuc

SEQ ID NO: 96990 - RNA, 19 nt, Homo sapiens
  misc_RNA (1)...(19): siRNA sense strand
gcaaguuuguuaaggaaau

SEQ ID NO: 96991 - RNA, 19 nt, Homo sapiens
  misc_RNA (1)...(19): siRNA sense strand
caaaggccaucgcagaaga

SEQ ID NO: 96992 - RNA, 19 nt, Homo sapiens
  misc_RNA (1)...(19): siRNA sense strand
gcauauaccugcgggaugu

SEQ ID NO: 96993 - RNA, 19 nt, Homo sapiens
  misc_RNA (1)...(19): siRNA sense strand
cugcagaucuucacuguau

SEQ ID NO: 96994 - RNA, 19 nt, Homo sapiens
  misc_RNA (1)...(19): siRNA sense strand
gaacagcaaccaauccaau

SEQ ID NO: 96995 - RNA, 19 nt, Homo sapiens
  misc_RNA (1)...(19): siRNA sense strand
gaugaggagguuucuguua

SEQ ID NO: 96996 - RNA, 19 nt, Homo sapiens
  misc_RNA (1)...(19): siRNA sense strand
guuuagaacuugugguuga

SEQ ID NO: 96997 - RNA, 19 nt, Homo sapiens
  misc_RNA (1)...(19): siRNA sense strand
uaacucaucuaaagguuuc

SEQ ID NO: 96998 - RNA, 19 nt, Homo sapiens
  misc_RNA (1)...(19): siRNA sense strand
ccacucugcugguagaauu

SEQ ID NO: 96999 - RNA, 19 nt, Homo sapiens
  misc_RNA (1)...(19): siRNA sense strand
caggagaacggccauauuu

SEQ ID NO: 97000 - RNA, 19 nt, Homo sapiens
  misc_RNA (1)...(19): siRNA sense strand
gaauauggccaaggaugua

SEQ ID NO: 97001 - RNA, 19 nt, Homo sapiens
  misc_RNA (1)...(19): siRNA sense strand
gaaauccgagcaauuccua

SEQ ID NO: 97002 - RNA, 19 nt, Homo sapiens
  misc_RNA (1)...(19): siRNA sense strand
ggaaauacagaaccaaaca

SEQ ID NO: 97003 - RNA, 19 nt, Homo sapiens
  misc_RNA (1)...(19): siRNA sense strand
caacaaauucuuuccacuu

SEQ ID NO: 97004 - RNA, 19 nt, Homo sapiens
  misc_RNA (1)...(19): siRNA sense strand
cccagaauauuuacaggua

SEQ ID NO: 97005 - RNA, 19 nt, Homo sapiens
  misc_RNA (1)...(19): siRNA sense strand
caugggaucuuaacucauc

SEQ ID NO: 97006 - RNA, 19 nt, Homo sapiens
  misc_RNA (1)...(19): siRNA sense strand
aaacacugccgguugauuu

SEQ ID NO: 97007 - RNA, 19 nt, Homo sapiens
  misc_RNA (1)...(19): siRNA sense strand
gaaagccaaguaucuguga

SEQ ID NO: 97008 - RNA, 19 nt, Homo sapiens
  misc_RNA (1)...(19): siRNA sense strand
gaggagguuucuguuacua

SEQ ID NO: 97009 - RNA, 19 nt, Homo sapiens
  misc_RNA (1)...(19): siRNA sense strand
ugaaaacccuggccacuuu

SEQ ID NO: 97010 - RNA, 19 nt, Homo sapiens
  misc_RNA (1)...(19): siRNA sense strand
ugugcaagcucaaguuuau

SEQ ID NO: 97011 - RNA, 19 nt, Homo sapiens
  misc_RNA (1)...(19): siRNA sense strand
ggaagauaauugauaaacg

SEQ ID NO: 97012 - RNA, 19 nt, Homo sapiens
  misc_RNA (1)...(19): siRNA sense strand
ggccaaggauguacaugau

SEQ ID NO: 97013 - RNA, 19 nt, Homo sapiens
  misc_RNA (1)...(19): siRNA sense strand
gauguucucuccaguucau

SEQ ID NO: 97014 - RNA, 19 nt, Homo sapiens
  misc_RNA (1)...(19): siRNA sense strand
gggauguucucuccaguuc

SEQ ID NO: 97015 - RNA, 19 nt, Homo sapiens
  misc_RNA (1)...(19): siRNA sense strand
agaugacuguguagguuua

SEQ ID NO: 97016 - RNA, 19 nt, Homo sapiens
  misc_RNA (1)...(19): siRNA sense strand
ggaggaaagccaaguaucu

SEQ ID NO: 97017 - RNA, 19 nt, Homo sapiens
  misc_RNA (1)...(19): siRNA sense strand
uaaacgacuucaagagcuu

SEQ ID NO: 97018 - RNA, 19 nt, Homo sapiens
  misc_RNA (1)...(19): siRNA sense strand
ggcauaaggauagggauua

SEQ ID NO: 97019 - RNA, 19 nt, Homo sapiens
  misc_RNA (1)...(19): siRNA sense strand
agucagagcugcuacacau

SEQ ID NO: 97020 - RNA, 19 nt, Homo sapiens
  misc_RNA (1)...(19): siRNA sense strand
ggccaucgcagaagaaaug

SEQ ID NO: 97021 - RNA, 19 nt, Homo sapiens
  misc_RNA (1)...(19): siRNA sense strand
gaagugaugaggagguuuc

SEQ ID NO: 97022 - RNA, 19 nt, Homo sapiens
  misc_RNA (1)...(19): siRNA sense strand
uuacaugccuugaagugau

SEQ ID NO: 97023 - RNA, 19 nt, Homo sapiens
  misc_RNA (1)...(19): siRNA sense strand
gaacaacaaauucuuucca

SEQ ID NO: 97024 - RNA, 19 nt, Homo sapiens
  misc_RNA (1)...(19): siRNA sense strand
gcagugaacagcaaccaau

SEQ ID NO: 97025 - RNA, 19 nt, Homo sapiens
  misc_RNA (1)...(19): siRNA sense strand
gaucugcccuaacagugau

SEQ ID NO: 97026 - RNA, 19 nt, Homo sapiens
  misc_RNA (1)...(19): siRNA sense strand
caggaaagcuccauuuugu

SEQ ID NO: 97027 - RNA, 19 nt, Homo sapiens
  misc_RNA (1)...(19): siRNA sense strand
aagucgagcuucugagauu

SEQ ID NO: 97028 - RNA, 19 nt, Homo sapiens
  misc_RNA (1)...(19): siRNA sense strand
agagagcacugcguccuuu

SEQ ID NO: 97029 - RNA, 19 nt, Homo sapiens
  misc_RNA (1)...(19): siRNA sense strand
cuucugagauucgaugauu

SEQ ID NO: 97030 - RNA, 19 nt, Homo sapiens
  misc_RNA (1)...(19): siRNA sense strand
gaaaggauucugagguuuu

SEQ ID NO: 97031 - RNA, 19 nt, Homo sapiens
  misc_RNA (1)...(19): siRNA sense strand
cagcaaaguauguacaaga

SEQ ID NO: 97032 - RNA, 19 nt, Homo sapiens
  misc_RNA (1)...(19): siRNA sense strand
ucgaacaucuuccuaaacu

SEQ ID NO: 97033 - RNA, 19 nt, Homo sapiens
  misc_RNA (1)...(19): siRNA sense strand
caacuuacuacgaaugaug

SEQ ID NO: 97034 - RNA, 19 nt, Homo sapiens
  misc_RNA (1)...(19): siRNA sense strand
gugaauccgauaaguauga

SEQ ID NO: 97035 - RNA, 19 nt, Homo sapiens
  misc_RNA (1)...(19): siRNA sense strand
guguggagaugcaaagaau

SEQ ID NO: 97036 - RNA, 19 nt, Homo sapiens
  misc_RNA (1)...(19): siRNA sense strand
ggagcaaugugguuguuuu

SEQ ID NO: 97037 - RNA, 19 nt, Homo sapiens
  misc_RNA (1)...(19): siRNA sense strand
ggacaagaggagauaagug

SEQ ID NO: 97038 - RNA, 19 nt, Homo sapiens
  misc_RNA (1)...(19): siRNA sense strand
ccgcaaguuuguuaaggaa

SEQ ID NO: 97039 - RNA, 19 nt, Homo sapiens
  misc_RNA (1)...(19): siRNA sense strand
gcaaauaauaagcaaagag

SEQ ID NO: 97040 - RNA, 19 nt, Homo sapiens
  misc_RNA (1)...(19): siRNA sense strand
gacaacauccagcuucaug

SEQ ID NO: 97041 - RNA, 19 nt, Homo sapiens
  misc_RNA (1)...(19): siRNA sense strand
ccuacaacauagagagaaa

SEQ ID NO: 97042 - RNA, 19 nt, Homo sapiens
  misc_RNA (1)...(19): siRNA sense strand
uccaaagacugcagcuuga

SEQ ID NO: 97043 - RNA, 19 nt, Homo sapiens
  misc_RNA (1)...(19): siRNA sense strand
acaagccucucugaauauu

SEQ ID NO: 97044 - RNA, 19 nt, Homo sapiens
  misc_RNA (1)...(19): siRNA sense strand
cagagcugcuacacauuga

SEQ ID NO: 97045 - RNA, 19 nt, Homo sapiens
  misc_RNA (1)...(19): siRNA sense strand
acaugcagaugacugugua

SEQ ID NO: 97046 - RNA, 19 nt, Homo sapiens
  misc_RNA (1)...(19): siRNA sense strand
cuucaacauuguggaauuu

SEQ ID NO: 97047 - RNA, 19 nt, Homo sapiens
  misc_RNA (1)...(19): siRNA sense strand
gcccuugugcaaauaauaa

SEQ ID NO: 97048 - RNA, 19 nt, Homo sapiens
  misc_RNA (1)...(19): siRNA sense strand
cagaauauuuacagguaca

SEQ ID NO: 97049 - RNA, 19 nt, Homo sapiens
  misc_RNA (1)...(19): siRNA sense strand
cuacgaaugaugccauaaa

SEQ ID NO: 97050 - RNA, 19 nt, Homo sapiens
  misc_RNA (1)...(19): siRNA sense strand
cgauaaguaugaccuaaaa

SEQ ID NO: 97051 - RNA, 19 nt, Homo sapiens
  misc_RNA (1)...(19): siRNA sense strand
guggagaugcaaagaauau

SEQ ID NO: 97052 - RNA, 19 nt, Homo sapiens
  misc_RNA (1)...(19): siRNA sense strand
cuucaguucuucagccaaa

SEQ ID NO: 97053 - RNA, 19 nt, Homo sapiens
  misc_RNA (1)...(19): siRNA sense strand
gaaaauaaaggcagacaca

SEQ ID NO: 97054 - RNA, 19 nt, Homo sapiens
  misc_RNA (1)...(19): siRNA sense strand
uuagugaauccgauaagua

SEQ ID NO: 97055 - RNA, 19 nt, Homo sapiens
  misc_RNA (1)...(19): siRNA sense strand
cagcuccucuuguuguugu

SEQ ID NO: 97056 - RNA, 19 nt, Homo sapiens
  misc_RNA (1)...(19): siRNA sense strand
cucaagagaugcuccuguu

SEQ ID NO: 97057 - RNA, 19 nt, Homo sapiens
  misc_RNA (1)...(19): siRNA sense strand
guugguugcuucaguucuu

SEQ ID NO: 97058 - RNA, 19 nt, Homo sapiens
  misc_RNA (1)...(19): siRNA sense strand
ggcaaaggccaucgcagaa

SEQ ID NO: 97059 - RNA, 19 nt, Homo sapiens
  misc_RNA (1)...(19): siRNA sense strand
ucagagcugcuacacauug

SEQ ID NO: 97060 - RNA, 19 nt, Homo sapiens
  misc_RNA (1)...(19): siRNA sense strand
ucugaauauuccugguuua

SEQ ID NO: 97061 - RNA, 19 nt, Homo sapiens
  misc_RNA (1)...(19): siRNA sense strand
aagcaaagagguuggaguu

SEQ ID NO: 97062 - RNA, 19 nt, Homo sapiens
  misc_RNA (1)...(19): siRNA sense strand
ugagcaagcugugguacau

SEQ ID NO: 97063 - RNA, 19 nt, Homo sapiens
  misc_RNA (1)...(19): siRNA sense strand
caagaacaacacccagaug

SEQ ID NO: 97064 - RNA, 19 nt, Homo sapiens
  misc_RNA (1)...(19): siRNA sense strand
aaacgcuaccuucaggaua

SEQ ID NO: 97065 - RNA, 19 nt, Homo sapiens
  misc_RNA (1)...(19): siRNA sense strand
uagugaauccgauaaguau

SEQ ID NO: 97066 - RNA, 19 nt, Homo sapiens
  misc_RNA (1)...(19): siRNA sense strand
acacuggacaugcagauga

SEQ ID NO: 97067 - RNA, 19 nt, Homo sapiens
  misc_RNA (1)...(19): siRNA sense strand
aggagaacggccauauuua

SEQ ID NO: 97068 - RNA, 19 nt, Homo sapiens
  misc_RNA (1)...(19): siRNA sense strand
gcccuaacagugauucuga

SEQ ID NO: 97069 - RNA, 19 nt, Homo sapiens
  misc_RNA (1)...(19): siRNA sense strand
gaggaaagccaaguaucug

SEQ ID NO: 97070 - RNA, 19 nt, Homo sapiens
  misc_RNA (1)...(19): siRNA sense strand
caagaaaucuccacuaauu

SEQ ID NO: 97071 - RNA, 19 nt, Homo sapiens
  misc_RNA (1)...(19): siRNA sense strand
gaacuaggcuugcauaugu

SEQ ID NO: 97072 - RNA, 19 nt, Homo sapiens
  misc_RNA (1)...(19): siRNA sense strand
gaagaagcaugucgaauuu

SEQ ID NO: 97073 - RNA, 19 nt, Homo sapiens
  misc_RNA (1)...(19): siRNA sense strand
gaagauaaaucacaaccua

SEQ ID NO: 97074 - RNA, 19 nt, Homo sapiens
  misc_RNA (1)...(19): siRNA sense strand
gaagagggauccaauaaga

SEQ ID NO: 97075 - RNA, 19 nt, Homo sapiens
  misc_RNA (1)...(19): siRNA sense strand
caagaaagauuugcugaua

SEQ ID NO: 97076 - RNA, 19 nt, Homo sapiens
  misc_RNA (1)...(19): siRNA sense strand
cagcaaauauggacaauaa

SEQ ID NO: 97077 - RNA, 19 nt, Homo sapiens
  misc_RNA (1)...(19): siRNA sense strand
gaacguaugaugagacuua

SEQ ID NO: 97078 - RNA, 19 nt, Homo sapiens
  misc_RNA (1)...(19): siRNA sense strand
gacaagaaaucuccacuaa

SEQ ID NO: 97079 - RNA, 19 nt, Homo sapiens
  misc_RNA (1)...(19): siRNA sense strand
ggagaaagauaguaaagga

SEQ ID NO: 97080 - RNA, 19 nt, Homo sapiens
  misc_RNA (1)...(19): siRNA sense strand
caacuaaacaggccaaaua

SEQ ID NO: 97081 - RNA, 19 nt, Homo sapiens
  misc_RNA (1)...(19): siRNA sense strand
ggagauacaccuuuagaua

SEQ ID NO: 97082 - RNA, 19 nt, Homo sapiens
  misc_RNA (1)...(19): siRNA sense strand
gaaagaaggagaagauaaa

SEQ ID NO: 97083 - RNA, 19 nt, Homo sapiens
  misc_RNA (1)...(19): siRNA sense strand
aaagagacguugauuauug

SEQ ID NO: 97084 - RNA, 19 nt, Homo sapiens
  misc_RNA (1)...(19): siRNA sense strand
gaagaacggaucaugcuua

SEQ ID NO: 97085 - RNA, 19 nt, Homo sapiens
  misc_RNA (1)...(19): siRNA sense strand
gaacgaagagcucuagaaa

SEQ ID NO: 97086 - RNA, 19 nt, Homo sapiens
  misc_RNA (1)...(19): siRNA sense strand
acaccuacaucaccuauua

SEQ ID NO: 97087 - RNA, 19 nt, Homo sapiens
  misc_RNA (1)...(19): siRNA sense strand
gaucagaguuauaagcaaa

SEQ ID NO: 97088 - RNA, 19 nt, Homo sapiens
  misc_RNA (1)...(19): siRNA sense strand
aaacagagauucuucaagu

SEQ ID NO: 97089 - RNA, 19 nt, Homo sapiens
  misc_RNA (1)...(19): siRNA sense strand
ugacucaacugacuuuaaa

SEQ ID NO: 97090 - RNA, 19 nt, Homo sapiens
  misc_RNA (1)...(19): siRNA sense strand
gcuaaauaguggucauaua

SEQ ID NO: 97091 - RNA, 19 nt, Homo sapiens
  misc_RNA (1)...(19): siRNA sense strand
gacauuaacugaucuucaa

SEQ ID NO: 97092 - RNA, 19 nt, Homo sapiens
  misc_RNA (1)...(19): siRNA sense strand
acgaagagcucuagaaaga

SEQ ID NO: 97093 - RNA, 19 nt, Homo sapiens
  misc_RNA (1)...(19): siRNA sense strand
gaagagcucuagaaagaag

SEQ ID NO: 97094 - RNA, 19 nt, Homo sapiens
  misc_RNA (1)...(19): siRNA sense strand
gaacaaauucuagcugaaa

SEQ ID NO: 97095 - RNA, 19 nt, Homo sapiens
  misc_RNA (1)...(19): siRNA sense strand
gaaagaaggaugagucuag

SEQ ID NO: 97096 - RNA, 19 nt, Homo sapiens
  misc_RNA (1)...(19): siRNA sense strand
gcacaagcacuacuacaaa

SEQ ID NO: 97097 - RNA, 19 nt, Homo sapiens
  misc_RNA (1)...(19): siRNA sense strand
ggagugacauuaacugauc

SEQ ID NO: 97098 - RNA, 19 nt, Homo sapiens
  misc_RNA (1)...(19): siRNA sense strand
ggaacuaacagaucuuaaa

SEQ ID NO: 97099 - RNA, 19 nt, Homo sapiens
  misc_RNA (1)...(19): siRNA sense strand
gcaccaggcuugcauugau

SEQ ID NO: 97100 - RNA, 19 nt, Homo sapiens
  misc_RNA (1)...(19): siRNA sense strand
gagauacaccuuuagauau

SEQ ID NO: 97101 - RNA, 19 nt, Homo sapiens
  misc_RNA (1)...(19): siRNA sense strand
uaaagagggucagaaagaa

SEQ ID NO: 97102 - RNA, 19 nt, Homo sapiens
  misc_RNA (1)...(19): siRNA sense strand
agaagcagcucgaaaggaa

SEQ ID NO: 97103 - RNA, 19 nt, Homo sapiens
  misc_RNA (1)...(19): siRNA sense strand
caucugacauugaagagaa

SEQ ID NO: 97104 - RNA, 19 nt, Homo sapiens
  misc_RNA (1)...(19): siRNA sense strand
gaacggaucaugcuuagag

SEQ ID NO: 97105 - RNA, 19 nt, Homo sapiens
  misc_RNA (1)...(19): siRNA sense strand
acaaagagacguugauuau

SEQ ID NO: 97106 - RNA, 19 nt, Homo sapiens
  misc_RNA (1)...(19): siRNA sense strand
ggagaaagaaggagaagau

SEQ ID NO: 97107 - RNA, 19 nt, Homo sapiens
  misc_RNA (1)...(19): siRNA sense strand
agaaagauuugcugauaga

SEQ ID NO: 97108 - RNA, 19 nt, Homo sapiens
  misc_RNA (1)...(19): siRNA sense strand
gaucauacaguuacuuaga

SEQ ID NO: 97109 - RNA, 19 nt, Homo sapiens
  misc_RNA (1)...(19): siRNA sense strand
cggauuccauuucuagaua

SEQ ID NO: 97110 - RNA, 19 nt, Homo sapiens
  misc_RNA (1)...(19): siRNA sense strand
gcaaauauggacaauaauc

SEQ ID NO: 97111 - RNA, 19 nt, Homo sapiens
  misc_RNA (1)...(19): siRNA sense strand
gcagugaccauuccuguug

SEQ ID NO: 97112 - RNA, 19 nt, Homo sapiens
  misc_RNA (1)...(19): siRNA sense strand
ggauaguacugagaaagaa

SEQ ID NO: 97113 - RNA, 19 nt, Homo sapiens
  misc_RNA (1)...(19): siRNA sense strand
uaucugaaauggaagaaga

SEQ ID NO: 97114 - RNA, 19 nt, Homo sapiens
  misc_RNA (1)...(19): siRNA sense strand
cagaagagggauccaauaa

SEQ ID NO: 97115 - RNA, 19 nt, Homo sapiens
  misc_RNA (1)...(19): siRNA sense strand
ggacaagaaaucuccacua

SEQ ID NO: 97116 - RNA, 19 nt, Homo sapiens
  misc_RNA (1)...(19): siRNA sense strand
gcagacaaccagaggcuaa

SEQ ID NO: 97117 - RNA, 19 nt, Homo sapiens
  misc_RNA (1)...(19): siRNA sense strand
aagaagaucuacaggaguu

SEQ ID NO: 97118 - RNA, 19 nt, Homo sapiens
  misc_RNA (1)...(19): siRNA sense strand
ccucuucacuuucuacuau

SEQ ID NO: 97119 - RNA, 19 nt, Homo sapiens
  misc_RNA (1)...(19): siRNA sense strand
agaagaagcaugucgaauu

SEQ ID NO: 97120 - RNA, 19 nt, Homo sapiens
  misc_RNA (1)...(19): siRNA sense strand
cgacaucaauuacgccaau

SEQ ID NO: 97121 - RNA, 19 nt, Homo sapiens
  misc_RNA (1)...(19): siRNA sense strand
ccagagacaagaaagauuu

SEQ ID NO: 97122 - RNA, 19 nt, Homo sapiens
  misc_RNA (1)...(19): siRNA sense strand
aaagguugaugaagaagaa

SEQ ID NO: 97123 - RNA, 19 nt, Homo sapiens
  misc_RNA (1)...(19): siRNA sense strand
gacacaagauagugaugaa

SEQ ID NO: 97124 - RNA, 19 nt, Homo sapiens
  misc_RNA (1)...(19): siRNA sense strand
ugaagaagaugaggaagau

SEQ ID NO: 97125 - RNA, 19 nt, Homo sapiens
  misc_RNA (1)...(19): siRNA sense strand
cuaaagagggucagaaaga

SEQ ID NO: 97126 - RNA, 19 nt, Homo sapiens
  misc_RNA (1)...(19): siRNA sense strand
ucagaaacaucuagagaag

SEQ ID NO: 97127 - RNA, 19 nt, Homo sapiens
  misc_RNA (1)...(19): siRNA sense strand
ccacaacccugacuacaac

SEQ ID NO: 97128 - RNA, 19 nt, Homo sapiens
  misc_RNA (1)...(19): siRNA sense strand
guagaagacaagaugauuu

SEQ ID NO: 97129 - RNA, 19 nt, Homo sapiens
  misc_RNA (1)...(19): siRNA sense strand
uaacuaaugccaacacuuc

SEQ ID NO: 97130 - RNA, 19 nt, Homo sapiens
  misc_RNA (1)...(19): siRNA sense strand
gaaggaucaacguaucaua

SEQ ID NO: 97131 - RNA, 19 nt, Homo sapiens
  misc_RNA (1)...(19): siRNA sense strand
gaaaucacagcaucuaaag

SEQ ID NO: 97132 - RNA, 19 nt, Homo sapiens
  misc_RNA (1)...(19): siRNA sense strand
caacaaagugggccaaaca

SEQ ID NO: 97133 - RNA, 19 nt, Homo sapiens
  misc_RNA (1)...(19): siRNA sense strand
gaacgacgacgaccaagag

SEQ ID NO: 97134 - RNA, 19 nt, Homo sapiens
  misc_RNA (1)...(19): siRNA sense strand
caguacaucugacauugaa

SEQ ID NO: 97135 - RNA, 19 nt, Homo sapiens
  misc_RNA (1)...(19): siRNA sense strand
uguagcagaugaagacauu

SEQ ID NO: 97136 - RNA, 19 nt, Homo sapiens
  misc_RNA (1)...(19): siRNA sense strand
ugaaaccaguucuacauca

SEQ ID NO: 97137 - RNA, 19 nt, Homo sapiens
  misc_RNA (1)...(19): siRNA sense strand
gaagaugacucggaaucag

SEQ ID NO: 97138 - RNA, 19 nt, Homo sapiens
  misc_RNA (1)...(19): siRNA sense strand
gcaagggguugauauagaa

SEQ ID NO: 97139 - RNA, 19 nt, Homo sapiens
  misc_RNA (1)...(19): siRNA sense strand
gagaaagaaggagaagaua

SEQ ID NO: 97140 - RNA, 19 nt, Homo sapiens
  misc_RNA (1)...(19): siRNA sense strand
cagagauucuucaaguuug

SEQ ID NO: 97141 - RNA, 19 nt, Homo sapiens
  misc_RNA (1)...(19): siRNA sense strand
caacacuucuaguacacaa

SEQ ID NO: 97142 - RNA, 19 nt, Homo sapiens
  misc_RNA (1)...(19): siRNA sense strand
aauaaucagucacagaaga

SEQ ID NO: 97143 - RNA, 19 nt, Homo sapiens
  misc_RNA (1)...(19): siRNA sense strand
gauacaccuuuagauauug

SEQ ID NO: 97144 - RNA, 19 nt, Homo sapiens
  misc_RNA (1)...(19): siRNA sense strand
ggaacgaagagcucuagaa

SEQ ID NO: 97145 - RNA, 19 nt, Homo sapiens
  misc_RNA (1)...(19): siRNA sense strand
caacacagggagugacauu

SEQ ID NO: 97146 - RNA, 19 nt, Homo sapiens
  misc_RNA (1)...(19): siRNA sense strand
uagcugcucuagugaagaa

SEQ ID NO: 97147 - RNA, 19 nt, Homo sapiens
  misc_RNA (1)...(19): siRNA sense strand
agaaaucuccacuaauuga

SEQ ID NO: 97148 - RNA, 19 nt, Homo sapiens
  misc_RNA (1)...(19): siRNA sense strand
aagaagagcucaaaauguu

SEQ ID NO: 97149 - RNA, 19 nt, Homo sapiens
  misc_RNA (1)...(19): siRNA sense strand
acacagggagugacauuaa

SEQ ID NO: 97150 - RNA, 19 nt, Homo sapiens
  misc_RNA (1)...(19): siRNA sense strand
caagcaagacaaucuagaa

SEQ ID NO: 97151 - RNA, 19 nt, Homo sapiens
  misc_RNA (1)...(19): siRNA sense strand
gaagacaagaugauuugau

SEQ ID NO: 97152 - RNA, 19 nt, Homo sapiens
  misc_RNA (1)...(19): siRNA sense strand
ugaaaucacagcaucuaaa

SEQ ID NO: 97153 - RNA, 19 nt, Homo sapiens
  misc_RNA (1)...(19): siRNA sense strand
ccaaagaagaagagagaaa

SEQ ID NO: 97154 - RNA, 19 nt, Homo sapiens
  misc_RNA (1)...(19): siRNA sense strand
aagagacguugauuauuga

SEQ ID NO: 97155 - RNA, 19 nt, Homo sapiens
  misc_RNA (1)...(19): siRNA sense strand
gaaaucuccacuaauugaa

SEQ ID NO: 97156 - RNA, 19 nt, Homo sapiens
  misc_RNA (1)...(19): siRNA sense strand
ggaagaagaacggaucaug

SEQ ID NO: 97157 - RNA, 19 nt, Homo sapiens
  misc_RNA (1)...(19): siRNA sense strand
auagaucacuguuggaaau

SEQ ID NO: 97158 - RNA, 19 nt, Homo sapiens
  misc_RNA (1)...(19): siRNA sense strand
gaaaccaguucuacaucag

SEQ ID NO: 97159 - RNA, 19 nt, Homo sapiens
  misc_RNA (1)...(19): siRNA sense strand
ggacacaagauagugauga

SEQ ID NO: 97160 - RNA, 19 nt, Homo sapiens
  misc_RNA (1)...(19): siRNA sense strand
agaaggagaagauaaauca

SEQ ID NO: 97161 - RNA, 19 nt, Homo sapiens
  misc_RNA (1)...(19): siRNA sense strand
aaagcaagaucuagacaag

SEQ ID NO: 97162 - RNA, 19 nt, Homo sapiens
  misc_RNA (1)...(19): siRNA sense strand
gggcagcuauggugcacuu

SEQ ID NO: 97163 - RNA, 19 nt, Homo sapiens
  misc_RNA (1)...(19): siRNA sense strand
aaagaugagucuccugcaa

SEQ ID NO: 97164 - RNA, 19 nt, Homo sapiens
  misc_RNA (1)...(19): siRNA sense strand
caaagagacguugauuauu

SEQ ID NO: 97165 - RNA, 19 nt, Homo sapiens
  misc_RNA (1)...(19): siRNA sense strand
caggcaggcuaugauguua

SEQ ID NO: 97166 - RNA, 19 nt, Homo sapiens
  misc_RNA (1)...(19): siRNA sense strand
gaaagauaguaaaggaacu

SEQ ID NO: 97167 - RNA, 19 nt, Homo sapiens
  misc_RNA (1)...(19): siRNA sense strand
agaaagaaggagaagauaa

SEQ ID NO: 97168 - RNA, 19 nt, Homo sapiens
  misc_RNA (1)...(19): siRNA sense strand
acagagauucuucaaguuu

SEQ ID NO: 97169 - RNA, 19 nt, Homo sapiens
  misc_RNA (1)...(19): siRNA sense strand
guacaucugacauugaaga

SEQ ID NO: 97170 - RNA, 19 nt, Homo sapiens
  misc_RNA (1)...(19): siRNA sense strand
cauagaagaugaaguauug

SEQ ID NO: 97171 - RNA, 19 nt, Homo sapiens
  misc_RNA (1)...(19): siRNA sense strand
gaagcagccuccacaaauu

SEQ ID NO: 97172 - RNA, 19 nt, Homo sapiens
  misc_RNA (1)...(19): siRNA sense strand
ggaggaagaugucaauguu

SEQ ID NO: 97173 - RNA, 19 nt, Homo sapiens
  misc_RNA (1)...(19): siRNA sense strand
gaaauugaguuccgcaguu

SEQ ID NO: 97174 - RNA, 19 nt, Homo sapiens
  misc_RNA (1)...(19): siRNA sense strand
gaagaaacgugaacucaag

SEQ ID NO: 97175 - RNA, 19 nt, Homo sapiens
  misc_RNA (1)...(19): siRNA sense strand
gaaauggauucagucaaua

SEQ ID NO: 97176 - RNA, 19 nt, Homo sapiens
  misc_RNA (1)...(19): siRNA sense strand
ccaacuaaauugccaagua

SEQ ID NO: 97177 - RNA, 19 nt, Homo sapiens
  misc_RNA (1)...(19): siRNA sense strand
ccaaacagcauaagaaauu

SEQ ID NO: 97178 - RNA, 19 nt, Homo sapiens
  misc_RNA (1)...(19): siRNA sense strand
caacuaaauugccaaguau

SEQ ID NO: 97179 - RNA, 19 nt, Homo sapiens
  misc_RNA (1)...(19): siRNA sense strand
gcagauacaugggauuuga

SEQ ID NO: 97180 - RNA, 19 nt, Homo sapiens
  misc_RNA (1)...(19): siRNA sense strand
ggagaaccauacagacuuu

SEQ ID NO: 97181 - RNA, 19 nt, Homo sapiens
  misc_RNA (1)...(19): siRNA sense strand
gaacaaacacaaccugcua

SEQ ID NO: 97182 - RNA, 19 nt, Homo sapiens
  misc_RNA (1)...(19): siRNA sense strand
gaacguguguuguugauac

SEQ ID NO: 97183 - RNA, 19 nt, Homo sapiens
  misc_RNA (1)...(19): siRNA sense strand
agaaaugucuucaugcaaa

SEQ ID NO: 97184 - RNA, 19 nt, Homo sapiens
  misc_RNA (1)...(19): siRNA sense strand
gacacaaacucagacaaua

SEQ ID NO: 97185 - RNA, 19 nt, Homo sapiens
  misc_RNA (1)...(19): siRNA sense strand
ggauggauauagaaacaaa

SEQ ID NO: 97186 - RNA, 19 nt, Homo sapiens
  misc_RNA (1)...(19): siRNA sense strand
gaaacgucuuguucucuuu

SEQ ID NO: 97187 - RNA, 19 nt, Homo sapiens
  misc_RNA (1)...(19): siRNA sense strand
ugaaaucccuguauugaca

SEQ ID NO: 97188 - RNA, 19 nt, Homo sapiens
  misc_RNA (1)...(19): siRNA sense strand
gaauagaaacgucuuguuc

SEQ ID NO: 97189 - RNA, 19 nt, Homo sapiens
  misc_RNA (1)...(19): siRNA sense strand
ggaaagggaugaagaaaau

SEQ ID NO: 97190 - RNA, 19 nt, Homo sapiens
  misc_RNA (1)...(19): siRNA sense strand
auacguagcugacacagaa

SEQ ID NO: 97191 - RNA, 19 nt, Homo sapiens
  misc_RNA (1)...(19): siRNA sense strand
gaagcuagguugauaacag

SEQ ID NO: 97192 - RNA, 19 nt, Homo sapiens
  misc_RNA (1)...(19): siRNA sense strand
agaaauggauucagucaau

SEQ ID NO: 97193 - RNA, 19 nt, Homo sapiens
  misc_RNA (1)...(19): siRNA sense strand
gaauagaguaugagccuuu

SEQ ID NO: 97194 - RNA, 19 nt, Homo sapiens
  misc_RNA (1)...(19): siRNA sense strand
ucagaaugcuuucacaaga

SEQ ID NO: 97195 - RNA, 19 nt, Homo sapiens
  misc_RNA (1)...(19): siRNA sense strand
gaaaugucuucaugcaaau

SEQ ID NO: 97196 - RNA, 19 nt, Homo sapiens
  misc_RNA (1)...(19): siRNA sense strand
gaaagaauacagaacuaga

SEQ ID NO: 97197 - RNA, 19 nt, Homo sapiens
  misc_RNA (1)...(19): siRNA sense strand
gaugaaaucccuguauuga

SEQ ID NO: 97198 - RNA, 19 nt, Homo sapiens
  misc_RNA (1)...(19): siRNA sense strand
ggccauagaagaugaagua

SEQ ID NO: 97199 - RNA, 19 nt, Homo sapiens
  misc_RNA (1)...(19): siRNA sense strand
caaaucagcaagaauagaa

SEQ ID NO: 97200 - RNA, 19 nt, Homo sapiens
  misc_RNA (1)...(19): siRNA sense strand
gcacucaccuugucauggu

SEQ ID NO: 97201 - RNA, 19 nt, Homo sapiens
  misc_RNA (1)...(19): siRNA sense strand
ccgaaaucaugcuguguua

SEQ ID NO: 97202 - RNA, 19 nt, Homo sapiens
  misc_RNA (1)...(19): siRNA sense strand
cuacaaagaauuacuguga

SEQ ID NO: 97203 - RNA, 19 nt, Homo sapiens
  misc_RNA (1)...(19): siRNA sense strand
cagaugaaaucccuguauu

SEQ ID NO: 97204 - RNA, 19 nt, Homo sapiens
  misc_RNA (1)...(19): siRNA sense strand
cagugaaaguuaccauuaa

SEQ ID NO: 97205 - RNA, 19 nt, Homo sapiens
  misc_RNA (1)...(19): siRNA sense strand
ggccaaggauggauauaga

SEQ ID NO: 97206 - RNA, 19 nt, Homo sapiens
  misc_RNA (1)...(19): siRNA sense strand
cagaagaaauggauucagu

SEQ ID NO: 97207 - RNA, 19 nt, Homo sapiens
  misc_RNA (1)...(19): siRNA sense strand
agaagagaaugaagaagaa

SEQ ID NO: 97208 - RNA, 19 nt, Homo sapiens
  misc_RNA (1)...(19): siRNA sense strand
ggacacaaacucagacaau

SEQ ID NO: 97209 - RNA, 19 nt, Homo sapiens
  misc_RNA (1)...(19): siRNA sense strand
caagaugcacccacuguaa

SEQ ID NO: 97210 - RNA, 19 nt, Homo sapiens
  misc_RNA (1)...(19): siRNA sense strand
ggaccaagccuuucacaag

SEQ ID NO: 97211 - RNA, 19 nt, Homo sapiens
  misc_RNA (1)...(19): siRNA sense strand
ucagugaaaguuaccauua

SEQ ID NO: 97212 - RNA, 19 nt, Homo sapiens
  misc_RNA (1)...(19): siRNA sense strand
agaaauccaucuggcauaa

SEQ ID NO: 97213 - RNA, 19 nt, Homo sapiens
  misc_RNA (1)...(19): siRNA sense strand
gaagaaauggauucaguca

SEQ ID NO: 97214 - RNA, 19 nt, Homo sapiens
  misc_RNA (1)...(19): siRNA sense strand
uaacagaagagaaugaaga

SEQ ID NO: 97215 - RNA, 19 nt, Homo sapiens
  misc_RNA (1)...(19): siRNA sense strand
aacaauaugugcacucauu

SEQ ID NO: 97216 - RNA, 19 nt, Homo sapiens
  misc_RNA (1)...(19): siRNA sense strand
ugaaguauuggaacaguua

SEQ ID NO: 97217 - RNA, 19 nt, Homo sapiens
  misc_RNA (1)...(19): siRNA sense strand
aaagggaaauggaugaugu

SEQ ID NO: 97218 - RNA, 19 nt, Homo sapiens
  misc_RNA (1)...(19): siRNA sense strand
gaaaacaaaucuucaaagg

SEQ ID NO: 97219 - RNA, 19 nt, Homo sapiens
  misc_RNA (1)...(19): siRNA sense strand
ugcaugcucuucuuguuua

SEQ ID NO: 97220 - RNA, 19 nt, Homo sapiens
  misc_RNA (1)...(19): siRNA sense strand
ggaagaaacgugaacucaa

SEQ ID NO: 97221 - RNA, 19 nt, Homo sapiens
  misc_RNA (1)...(19): siRNA sense strand
gaggaagaugucaauguua

SEQ ID NO: 97222 - RNA, 19 nt, Homo sapiens
  misc_RNA (1)...(19): siRNA sense strand
gaacacuacaacauacgua

SEQ ID NO: 97223 - RNA, 19 nt, Homo sapiens
  misc_RNA (1)...(19): siRNA sense strand
guaaacaauuggacagaag

SEQ ID NO: 97224 - RNA, 19 nt, Homo sapiens
  misc_RNA (1)...(19): siRNA sense strand
ugaaagcaguugaguccaa

SEQ ID NO: 97225 - RNA, 19 nt, Homo sapiens
  misc_RNA (1)...(19): siRNA sense strand
gaagaugucaauguuagaa

SEQ ID NO: 97226 - RNA, 19 nt, Homo sapiens
  misc_RNA (1)...(19): siRNA sense strand
uaucagcuuucaccaacua

SEQ ID NO: 97227 - RNA, 19 nt, Homo sapiens
  misc_RNA (1)...(19): siRNA sense strand
ucacaaggcgugucaguug

SEQ ID NO: 97228 - RNA, 19 nt, Homo sapiens
  misc_RNA (1)...(19): siRNA sense strand
uaugguaccuuuguuaaug

SEQ ID NO: 97229 - RNA, 19 nt, Homo sapiens
  misc_RNA (1)...(19): siRNA sense strand
gaacuagaagaguggcuaa

SEQ ID NO: 97230 - RNA, 19 nt, Homo sapiens
  misc_RNA (1)...(19): siRNA sense strand
caaggaagacucacuaugg

SEQ ID NO: 97231 - RNA, 19 nt, Homo sapiens
  misc_RNA (1)...(19): siRNA sense strand
guaaagauagggcuucuca

SEQ ID NO: 97232 - RNA, 19 nt, Homo sapiens
  misc_RNA (1)...(19): siRNA sense strand
caaacagcauaagaaauug

SEQ ID NO: 97233 - RNA, 19 nt, Homo sapiens
  misc_RNA (1)...(19): siRNA sense strand
gaaauugaugugaaaguuc

SEQ ID NO: 97234 - RNA, 19 nt, Homo sapiens
  misc_RNA (1)...(19): siRNA sense strand
acacaaacucagacaauaa

SEQ ID NO: 97235 - RNA, 19 nt, Homo sapiens
  misc_RNA (1)...(19): siRNA sense strand
guacguuguuggaaggaaa

SEQ ID NO: 97236 - RNA, 19 nt, Homo sapiens
  misc_RNA (1)...(19): siRNA sense strand
gaugagaaucccaaacuau

SEQ ID NO: 97237 - RNA, 19 nt, Homo sapiens
  misc_RNA (1)...(19): siRNA sense strand
gaccuuaauuccugacugu

SEQ ID NO: 97238 - RNA, 19 nt, Homo sapiens
  misc_RNA (1)...(19): siRNA sense strand
cagaagagaaugaagaaga

SEQ ID NO: 97239 - RNA, 19 nt, Homo sapiens
  misc_RNA (1)...(19): siRNA sense strand
guaaccaaccugagucaaa

SEQ ID NO: 97240 - RNA, 19 nt, Homo sapiens
  misc_RNA (1)...(19): siRNA sense strand
gcaaaacaagcucuaauaa

SEQ ID NO: 97241 - RNA, 19 nt, Homo sapiens
  misc_RNA (1)...(19): siRNA sense strand
ggaauaacaaacucacaga

SEQ ID NO: 97242 - RNA, 19 nt, Homo sapiens
  misc_RNA (1)...(19): siRNA sense strand
gaucuaauagcucaucaug

SEQ ID NO: 97243 - RNA, 19 nt, Homo sapiens
  misc_RNA (1)...(19): siRNA sense strand
auagugagaugcuuccaaa

SEQ ID NO: 97244 - RNA, 19 nt, Homo sapiens
  misc_RNA (1)...(19): siRNA sense strand
aaaccagaguuagaaauug

SEQ ID NO: 97245 - RNA, 19 nt, Homo sapiens
  misc_RNA (1)...(19): siRNA sense strand
caucaugcucgaaagaaua

SEQ ID NO: 97246 - RNA, 19 nt, Homo sapiens
  misc_RNA (1)...(19): siRNA sense strand
ucuaauagcucaucaugcu

SEQ ID NO: 97247 - RNA, 19 nt, Homo sapiens
  misc_RNA (1)...(19): siRNA sense strand
cagaccaacuccaucagaa

SEQ ID NO: 97248 - RNA, 19 nt, Homo sapiens
  misc_RNA (1)...(19): siRNA sense strand
ucgaaagaauacagaacua

SEQ ID NO: 97249 - RNA, 19 nt, Homo sapiens
  misc_RNA (1)...(19): siRNA sense strand
auggucagcuaaagaaaua

SEQ ID NO: 97250 - RNA, 19 nt, Homo sapiens
  misc_RNA (1)...(19): siRNA sense strand
gaagcaguaccagaaagua

SEQ ID NO: 97251 - RNA, 19 nt, Homo sapiens
  misc_RNA (1)...(19): siRNA sense strand
gaaaucaugcuguguuaac

SEQ ID NO: 97252 - RNA, 19 nt, Homo sapiens
  misc_RNA (1)...(19): siRNA sense strand
ggacacaaaaccagaguua

SEQ ID NO: 97253 - RNA, 19 nt, Homo sapiens
  misc_RNA (1)...(19): siRNA sense strand
cuccacaaauugaaaguuu

SEQ ID NO: 97254 - RNA, 19 nt, Homo sapiens
  misc_RNA (1)...(19): siRNA sense strand
caaccugagucaaacagau

SEQ ID NO: 97255 - RNA, 19 nt, Homo sapiens
  misc_RNA (1)...(19): siRNA sense strand
aaccagaguuagaaauuga

SEQ ID NO: 97256 - RNA, 19 nt, Homo sapiens
  misc_RNA (1)...(19): siRNA sense strand
cagaaugcuuucacaagau

SEQ ID NO: 97257 - RNA, 19 nt, Homo sapiens
  misc_RNA (1)...(19): siRNA sense strand
cagaaaagcuaagaucaaa

SEQ ID NO: 97258 - RNA, 19 nt, Homo sapiens
  misc_RNA (1)...(19): siRNA sense strand
gaauacagaacuagaagag

SEQ ID NO: 97259 - RNA, 19 nt, Homo sapiens
  misc_RNA (1)...(19): siRNA sense strand
gauaacagaagagaaugaa

SEQ ID NO: 97260 - RNA, 19 nt, Homo sapiens
  misc_RNA (1)...(19): siRNA sense strand
aaauccaucuggcauaaau

SEQ ID NO: 97261 - RNA, 19 nt, Homo sapiens
  misc_RNA (1)...(19): siRNA sense strand
aaacucuacuuccagaaau

SEQ ID NO: 97262 - RNA, 19 nt, Homo sapiens
  misc_RNA (1)...(19): siRNA sense strand
ccaacuccaucagaaacua

SEQ ID NO: 97263 - RNA, 19 nt, Homo sapiens
  misc_RNA (1)...(19): siRNA sense strand
uaaguaugguaccuuuguu

SEQ ID NO: 97264 - RNA, 19 nt, Homo sapiens
  misc_RNA (1)...(19): siRNA sense strand
acacaucauuggaggauca

SEQ ID NO: 97265 - RNA, 19 nt, Homo sapiens
  misc_RNA (1)...(19): siRNA sense strand
gaugaagcaguaccagaaa

SEQ ID NO: 97266 - RNA, 19 nt, Homo sapiens
  misc_RNA (1)...(19): siRNA sense strand
acaaagaauuacugugauc

SEQ ID NO: 97267 - RNA, 19 nt, Homo sapiens
  misc_RNA (1)...(19): siRNA sense strand
gagaaugaagaagaacaua

SEQ ID NO: 97268 - RNA, 19 nt, Homo sapiens
  misc_RNA (1)...(19): siRNA sense strand
ggaaaacugcuuuaaauca

SEQ ID NO: 97269 - RNA, 19 nt, Homo sapiens
  misc_RNA (1)...(19): siRNA sense strand
gaugaaguauuggaacagu

SEQ ID NO: 97270 - RNA, 19 nt, Homo sapiens
  misc_RNA (1)...(19): siRNA sense strand
gaaggacacuuguauauug

SEQ ID NO: 97271 - RNA, 19 nt, Homo sapiens
  misc_RNA (1)...(19): siRNA sense strand
gaaggaggcuguucuuuua

SEQ ID NO: 97272 - RNA, 19 nt, Homo sapiens
  misc_RNA (1)...(19): siRNA sense strand
gauaucaaguccaagaaua

SEQ ID NO: 97273 - RNA, 19 nt, Homo sapiens
  misc_RNA (1)...(19): siRNA sense strand
gggaaaaccugccuuauaa

SEQ ID NO: 97274 - RNA, 19 nt, Homo sapiens
  misc_RNA (1)...(19): siRNA sense strand
uaugaacucuguacccuua

SEQ ID NO: 97275 - RNA, 19 nt, Homo sapiens
  misc_RNA (1)...(19): siRNA sense strand
ggaauauggugaggaagua

SEQ ID NO: 97276 - RNA, 19 nt, Homo sapiens
  misc_RNA (1)...(19): siRNA sense strand
gaaauaaggcuucccaagu

SEQ ID NO: 97277 - RNA, 19 nt, Homo sapiens
  misc_RNA (1)...(19): siRNA sense strand
gaaagugcauugagaagag

SEQ ID NO: 97278 - RNA, 19 nt, Homo sapiens
  misc_RNA (1)...(19): siRNA sense strand
cgauagaggugguucugua

SEQ ID NO: 97279 - RNA, 19 nt, Homo sapiens
  misc_RNA (1)...(19): siRNA sense strand
gaaagccaguucaccaaau

SEQ ID NO: 97280 - RNA, 19 nt, Homo sapiens
  misc_RNA (1)...(19): siRNA sense strand
gcagaaaggaaaguuauuu

SEQ ID NO: 97281 - RNA, 19 nt, Homo sapiens
  misc_RNA (1)...(19): siRNA sense strand
uagaggugguucuguaaua

SEQ ID NO: 97282 - RNA, 19 nt, Homo sapiens
  misc_RNA (1)...(19): siRNA sense strand
gaggaaguauuagaagaaa

SEQ ID NO: 97283 - RNA, 19 nt, Homo sapiens
  misc_RNA (1)...(19): siRNA sense strand
gaaaaugcauccauacuca

SEQ ID NO: 97284 - RNA, 19 nt, Homo sapiens
  misc_RNA (1)...(19): siRNA sense strand
auacucaccuccaguuuaa

SEQ ID NO: 97285 - RNA, 19 nt, Homo sapiens
  misc_RNA (1)...(19): siRNA sense strand
ggacacuuguauauuguga

SEQ ID NO: 97286 - RNA, 19 nt, Homo sapiens
  misc_RNA (1)...(19): siRNA sense strand
caggauagcuuugggaaau

SEQ ID NO: 97287 - RNA, 19 nt, Homo sapiens
  misc_RNA (1)...(19): siRNA sense strand
guaaaucacauucacaaga

SEQ ID NO: 97288 - RNA, 19 nt, Homo sapiens
  misc_RNA (1)...(19): siRNA sense strand
cugaagacaugauacuuaa

SEQ ID NO: 97289 - RNA, 19 nt, Homo sapiens
  misc_RNA (1)...(19): siRNA sense strand
gaaaggguagccauacuga

SEQ ID NO: 97290 - RNA, 19 nt, Homo sapiens
  misc_RNA (1)...(19): siRNA sense strand
gauagaaaggguagccaua

SEQ ID NO: 97291 - RNA, 19 nt, Homo sapiens
  misc_RNA (1)...(19): siRNA sense strand
aaauaaggcuucccaaguc

SEQ ID NO: 97292 - RNA, 19 nt, Homo sapiens
  misc_RNA (1)...(19): siRNA sense strand
aaaccugccuuauaacaau

SEQ ID NO: 97293 - RNA, 19 nt, Homo sapiens
  misc_RNA (1)...(19): siRNA sense strand
gaaauugggagacuuugga

SEQ ID NO: 97294 - RNA, 19 nt, Homo sapiens
  misc_RNA (1)...(19): siRNA sense strand
caaaugugccuuggaguaa

SEQ ID NO: 97295 - RNA, 19 nt, Homo sapiens
  misc_RNA (1)...(19): siRNA sense strand
caugaaagcaguaaucaga

SEQ ID NO: 97296 - RNA, 19 nt, Homo sapiens
  misc_RNA (1)...(19): siRNA sense strand
ggauagcuuugggaaauga

SEQ ID NO: 97297 - RNA, 19 nt, Homo sapiens
  misc_RNA (1)...(19): siRNA sense strand
ugaaacacccuaauauugu

SEQ ID NO: 97298 - RNA, 19 nt, Homo sapiens
  misc_RNA (1)...(19): siRNA sense strand
ucagauguuugccaugaaa

SEQ ID NO: 97299 - RNA, 19 nt, Homo sapiens
  misc_RNA (1)...(19): siRNA sense strand
ggaaagccaguucaccaaa

SEQ ID NO: 97300 - RNA, 19 nt, Homo sapiens
  misc_RNA (1)...(19): siRNA sense strand
acagagauaucaaguccaa

SEQ ID NO: 97301 - RNA, 19 nt, Homo sapiens
  misc_RNA (1)...(19): siRNA sense strand
ugaaagcaguaaucagaug

SEQ ID NO: 97302 - RNA, 19 nt, Homo sapiens
  misc_RNA (1)...(19): siRNA sense strand
ugugggaacuccuuauuau

SEQ ID NO: 97303 - RNA, 19 nt, Homo sapiens
  misc_RNA (1)...(19): siRNA sense strand
cauggaauauggugaggaa

SEQ ID NO: 97304 - RNA, 19 nt, Homo sapiens
  misc_RNA (1)...(19): siRNA sense strand
ccugaagacaugauacuua

SEQ ID NO: 97305 - RNA, 19 nt, Homo sapiens
  misc_RNA (1)...(19): siRNA sense strand
gauagaggugguucuguaa

SEQ ID NO: 97306 - RNA, 19 nt, Homo sapiens
  misc_RNA (1)...(19): siRNA sense strand
gcaagaggaagaacaagau

SEQ ID NO: 97307 - RNA, 19 nt, Homo sapiens
  misc_RNA (1)...(19): siRNA sense strand
aaucagauguuugccauga

SEQ ID NO: 97308 - RNA, 19 nt, Homo sapiens
  misc_RNA (1)...(19): siRNA sense strand
ggcauuugcuuguaccuau

SEQ ID NO: 97309 - RNA, 19 nt, Homo sapiens
  misc_RNA (1)...(19): siRNA sense strand
caagaggaagaacaagaua

SEQ ID NO: 97310 - RNA, 19 nt, Homo sapiens
  misc_RNA (1)...(19): siRNA sense strand
gugguucuguaauaaagua

SEQ ID NO: 97311 - RNA, 19 nt, Homo sapiens
  misc_RNA (1)...(19): siRNA sense strand
ccaagucuuucucuaauac

SEQ ID NO: 97312 - RNA, 19 nt, Homo sapiens
  misc_RNA (1)...(19): siRNA sense strand
ggaagaacaagauagaaag

SEQ ID NO: 97313 - RNA, 19 nt, Homo sapiens
  misc_RNA (1)...(19): siRNA sense strand
gugaggaaguauuagaaga

SEQ ID NO: 97314 - RNA, 19 nt, Homo sapiens
  misc_RNA (1)...(19): siRNA sense strand
uuaugugccuccagaaauu

SEQ ID NO: 97315 - RNA, 19 nt, Homo sapiens
  misc_RNA (1)...(19): siRNA sense strand
uuaaacagcagaaaggaaa

SEQ ID NO: 97316 - RNA, 19 nt, Homo sapiens
  misc_RNA (1)...(19): siRNA sense strand
cauacucaccuccaguuua

SEQ ID NO: 97317 - RNA, 19 nt, Homo sapiens
  misc_RNA (1)...(19): siRNA sense strand
gagaagaguaaacagagaa

SEQ ID NO: 97318 - RNA, 19 nt, Homo sapiens
  misc_RNA (1)...(19): siRNA sense strand
ggaaggaggcuguucuuuu

SEQ ID NO: 97319 - RNA, 19 nt, Homo sapiens
  misc_RNA (1)...(19): siRNA sense strand
agaggugguucuguaauaa

SEQ ID NO: 97320 - RNA, 19 nt, Homo sapiens
  misc_RNA (1)...(19): siRNA sense strand
aagcauaacacaccaagaa

SEQ ID NO: 97321 - RNA, 19 nt, Homo sapiens
  misc_RNA (1)...(19): siRNA sense strand
uagcucggcuuguccagaa

SEQ ID NO: 97322 - RNA, 19 nt, Homo sapiens
  misc_RNA (1)...(19): siRNA sense strand
gaguaaaucacauucacaa

SEQ ID NO: 97323 - RNA, 19 nt, Homo sapiens
  misc_RNA (1)...(19): siRNA sense strand
guuauuuccugaagacaug

SEQ ID NO: 97324 - RNA, 19 nt, Homo sapiens
  misc_RNA (1)...(19): siRNA sense strand
gcugaaggacacuuguaua

SEQ ID NO: 97325 - RNA, 19 nt, Homo sapiens
  misc_RNA (1)...(19): siRNA sense strand
ugagaagaguaaacagaga

SEQ ID NO: 97326 - RNA, 19 nt, Homo sapiens
  misc_RNA (1)...(19): siRNA sense strand
ccgagaucaucauggaaua

SEQ ID NO: 97327 - RNA, 19 nt, Homo sapiens
  misc_RNA (1)...(19): siRNA sense strand
gggaacuccuuauuaugug

SEQ ID NO: 97328 - RNA, 19 nt, Homo sapiens
  misc_RNA (1)...(19): siRNA sense strand
gaaagcaguaaucagaugu

SEQ ID NO: 97329 - RNA, 19 nt, Homo sapiens
  misc_RNA (1)...(19): siRNA sense strand
ggucacgauucugucauuu

SEQ ID NO: 97330 - RNA, 19 nt, Homo sapiens
  misc_RNA (1)...(19): siRNA sense strand
cccaagucuuucucuaaua

SEQ ID NO: 97331 - RNA, 19 nt, Homo sapiens
  misc_RNA (1)...(19): siRNA sense strand
gcagagcucuuuugguuca

SEQ ID NO: 97332 - RNA, 19 nt, Homo sapiens
  misc_RNA (1)...(19): siRNA sense strand
gaggggaucuaaugcaaaa

SEQ ID NO: 97333 - RNA, 19 nt, Homo sapiens
  misc_RNA (1)...(19): siRNA sense strand
cggcagagcucuuuugguu

SEQ ID NO: 97334 - RNA, 19 nt, Homo sapiens
  misc_RNA (1)...(19): siRNA sense strand
acacuuguauauugugaug

SEQ ID NO: 97335 - RNA, 19 nt, Homo sapiens
  misc_RNA (1)...(19): siRNA sense strand
gcaguaaucagauguuugc

SEQ ID NO: 97336 - RNA, 19 nt, Homo sapiens
  misc_RNA (1)...(19): siRNA sense strand
gcagaaucaggauagcuuu

SEQ ID NO: 97337 - RNA, 19 nt, Homo sapiens
  misc_RNA (1)...(19): siRNA sense strand
caucguagcucggcuuguc

SEQ ID NO: 97338 - RNA, 19 nt, Homo sapiens
  misc_RNA (1)...(19): siRNA sense strand
gauggaauacugugaugga

SEQ ID NO: 97339 - RNA, 19 nt, Homo sapiens
  misc_RNA (1)...(19): siRNA sense strand
ugaaggacacuuguauauu

SEQ ID NO: 97340 - RNA, 19 nt, Homo sapiens
  misc_RNA (1)...(19): siRNA sense strand
guaagcaguggcucaaaga

SEQ ID NO: 97341 - RNA, 19 nt, Homo sapiens
  misc_RNA (1)...(19): siRNA sense strand
gcucuuacagcuuuggaaa

SEQ ID NO: 97342 - RNA, 19 nt, Homo sapiens
  misc_RNA (1)...(19): siRNA sense strand
guccacugccgucucauua

SEQ ID NO: 97343 - RNA, 19 nt, Homo sapiens
  misc_RNA (1)...(19): siRNA sense strand
gcauuugcuuguaccuaug

SEQ ID NO: 97344 - RNA, 19 nt, Homo sapiens
  misc_RNA (1)...(19): siRNA sense strand
cagcagaaaggaaaguuau

SEQ ID NO: 97345 - RNA, 19 nt, Homo sapiens
  misc_RNA (1)...(19): siRNA sense strand
ggguagccauacugauuug

SEQ ID NO: 97346 - RNA, 19 nt, Homo sapiens
  misc_RNA (1)...(19): siRNA sense strand
gaaaugaagcaagcacagu

SEQ ID NO: 97347 - RNA, 19 nt, Homo sapiens
  misc_RNA (1)...(19): siRNA sense strand
ugaggaaguauuagaagaa

SEQ ID NO: 97348 - RNA, 19 nt, Homo sapiens
  misc_RNA (1)...(19): siRNA sense strand
ucaggcaaauaguuggaaa

SEQ ID NO: 97349 - RNA, 19 nt, Homo sapiens
  misc_RNA (1)...(19): siRNA sense strand
gaagaacaagauagaaagg

SEQ ID NO: 97350 - RNA, 19 nt, Homo sapiens
  misc_RNA (1)...(19): siRNA sense strand
uacaugguccugagaauga

SEQ ID NO: 97351 - RNA, 19 nt, Homo sapiens
  misc_RNA (1)...(19): siRNA sense strand
agaaucauuugaagcugaa

SEQ ID NO: 97352 - RNA, 19 nt, Homo sapiens
  misc_RNA (1)...(19): siRNA sense strand
ugauggaggucacgauucu

SEQ ID NO: 97353 - RNA, 19 nt, Homo sapiens
  misc_RNA (1)...(19): siRNA sense strand
cagcuuggcuuuucaaaca

SEQ ID NO: 97354 - RNA, 19 nt, Homo sapiens
  misc_RNA (1)...(19): siRNA sense strand
gaggugguucuguaauaaa

SEQ ID NO: 97355 - RNA, 19 nt, Homo sapiens
  misc_RNA (1)...(19): siRNA sense strand
uggguugcauccuguauga

SEQ ID NO: 97356 - RNA, 19 nt, Homo sapiens
  misc_RNA (1)...(19): siRNA sense strand
aagcaguaaucagauguuu

SEQ ID NO: 97357 - RNA, 19 nt, Homo sapiens
  misc_RNA (1)...(19): siRNA sense strand
aaaguuauuuccugaagac

SEQ ID NO: 97358 - RNA, 19 nt, Homo sapiens
  misc_RNA (1)...(19): siRNA sense strand
gaucucagcuuggcuuuuc

SEQ ID NO: 97359 - RNA, 19 nt, Homo sapiens
  misc_RNA (1)...(19): siRNA sense strand
augaaacacccuaauauug

SEQ ID NO: 97360 - RNA, 19 nt, Homo sapiens
  misc_RNA (1)...(19): siRNA sense strand
cauccuguaugaacucugu

SEQ ID NO: 97361 - RNA, 19 nt, Homo sapiens
  misc_RNA (1)...(19): siRNA sense strand
aaaugugccuuggaguaaa

SEQ ID NO: 97362 - RNA, 19 nt, Homo sapiens
  misc_RNA (1)...(19): siRNA sense strand
uagucaagcagauguuuaa

SEQ ID NO: 97363 - RNA, 19 nt, Homo sapiens
  misc_RNA (1)...(19): siRNA sense strand
cuaauauuguugccuucaa

SEQ ID NO: 97364 - RNA, 19 nt, Homo sapiens
  misc_RNA (1)...(19): siRNA sense strand
aaagccaguucaccaaauc

SEQ ID NO: 97365 - RNA, 19 nt, Homo sapiens
  misc_RNA (1)...(19): siRNA sense strand
guaauaagucaguccaucu

SEQ ID NO: 97366 - RNA, 19 nt, Homo sapiens
  misc_RNA (1)...(19): siRNA sense strand
ucccaagucuuucucuaau

SEQ ID NO: 97367 - RNA, 19 nt, Homo sapiens
  misc_RNA (1)...(19): siRNA sense strand
uagccauacugauuuggaa

SEQ ID NO: 97368 - RNA, 19 nt, Homo sapiens
  misc_RNA (1)...(19): siRNA sense strand
aaggguagccauacugauu

SEQ ID NO: 97369 - RNA, 19 nt, Homo sapiens
  misc_RNA (1)...(19): siRNA sense strand
gagaucaucauggaauaug

SEQ ID NO: 97370 - RNA, 19 nt, Homo sapiens
  misc_RNA (1)...(19): siRNA sense strand
gaaggacacuuguauauug

SEQ ID NO: 97371 - RNA, 19 nt, Homo sapiens
  misc_RNA (1)...(19): siRNA sense strand
gaaggaggcuguucuuuua

SEQ ID NO: 97372 - RNA, 19 nt, Homo sapiens
  misc_RNA (1)...(19): siRNA sense strand
gauaucaaguccaagaaua

SEQ ID NO: 97373 - RNA, 19 nt, Homo sapiens
  misc_RNA (1)...(19): siRNA sense strand
gggaaaaccugccuuauaa

SEQ ID NO: 97374 - RNA, 19 nt, Homo sapiens
  misc_RNA (1)...(19): siRNA sense strand
uaugaacucuguacccuua

SEQ ID NO: 97375 - RNA, 19 nt, Homo sapiens
  misc_RNA (1)...(19): siRNA sense strand
ggaauauggugaggaagua

SEQ ID NO: 97376 - RNA, 19 nt, Homo sapiens
  misc_RNA (1)...(19): siRNA sense strand
gaaauaaggcuucccaagu

SEQ ID NO: 97377 - RNA, 19 nt, Homo sapiens
  misc_RNA (1)...(19): siRNA sense strand
gaaagugcauugagaagag

SEQ ID NO: 97378 - RNA, 19 nt, Homo sapiens
  misc_RNA (1)...(19): siRNA sense strand
cgauagaggugguucugua

SEQ ID NO: 97379 - RNA, 19 nt, Homo sapiens
  misc_RNA (1)...(19): siRNA sense strand
gaaagccaguucaccaaau

SEQ ID NO: 97380 - RNA, 19 nt, Homo sapiens
  misc_RNA (1)...(19): siRNA sense strand
gcagaaaggaaaguuauuu

SEQ ID NO: 97381 - RNA, 19 nt, Homo sapiens
  misc_RNA (1)...(19): siRNA sense strand
uagaggugguucuguaaua

SEQ ID NO: 97382 - RNA, 19 nt, Homo sapiens
  misc_RNA (1)...(19): siRNA sense strand
gaggaaguauuagaagaaa

SEQ ID NO: 97383 - RNA, 19 nt, Homo sapiens
  misc_RNA (1)...(19): siRNA sense strand
gaaaaugcauccauacuca

SEQ ID NO: 97384 - RNA, 19 nt, Homo sapiens
  misc_RNA (1)...(19): siRNA sense strand
auacucaccuccaguuuaa

SEQ ID NO: 97385 - RNA, 19 nt, Homo sapiens
  misc_RNA (1)...(19): siRNA sense strand
ggacacuuguauauuguga

SEQ ID NO: 97386 - RNA, 19 nt, Homo sapiens
  misc_RNA (1)...(19): siRNA sense strand
caggauagcuuugggaaau

SEQ ID NO: 97387 - RNA, 19 nt, Homo sapiens
  misc_RNA (1)...(19): siRNA sense strand
guaaaucacauucacaaga

SEQ ID NO: 97388 - RNA, 19 nt, Homo sapiens
  misc_RNA (1)...(19): siRNA sense strand
cugaagacaugauacuuaa

SEQ ID NO: 97389 - RNA, 19 nt, Homo sapiens
  misc_RNA (1)...(19): siRNA sense strand
gaaaggguagccauacuga

SEQ ID NO: 97390 - RNA, 19 nt, Homo sapiens
  misc_RNA (1)...(19): siRNA sense strand
gauagaaaggguagccaua

SEQ ID NO: 97391 - RNA, 19 nt, Homo sapiens
  misc_RNA (1)...(19): siRNA sense strand
aaauaaggcuucccaaguc

SEQ ID NO: 97392 - RNA, 19 nt, Homo sapiens
  misc_RNA (1)...(19): siRNA sense strand
aaaccugccuuauaacaau

SEQ ID NO: 97393 - RNA, 19 nt, Homo sapiens
  misc_RNA (1)...(19): siRNA sense strand
gaaauugggagacuuugga

SEQ ID NO: 97394 - RNA, 19 nt, Homo sapiens
  misc_RNA (1)...(19): siRNA sense strand
caaaugugccuuggaguaa

SEQ ID NO: 97395 - RNA, 19 nt, Homo sapiens
  misc_RNA (1)...(19): siRNA sense strand
caugaaagcaguaaucaga

SEQ ID NO: 97396 - RNA, 19 nt, Homo sapiens
  misc_RNA (1)...(19): siRNA sense strand
ggauagcuuugggaaauga

SEQ ID NO: 97397 - RNA, 19 nt, Homo sapiens
  misc_RNA (1)...(19): siRNA sense strand
ugaaacacccuaauauugu

SEQ ID NO: 97398 - RNA, 19 nt, Homo sapiens
  misc_RNA (1)...(19): siRNA sense strand
ucagauguuugccaugaaa

SEQ ID NO: 97399 - RNA, 19 nt, Homo sapiens
  misc_RNA (1)...(19): siRNA sense strand
ggaaagccaguucaccaaa

SEQ ID NO: 97400 - RNA, 19 nt, Homo sapiens
  misc_RNA (1)...(19): siRNA sense strand
acagagauaucaaguccaa

SEQ ID NO: 97401 - RNA, 19 nt, Homo sapiens
  misc_RNA (1)...(19): siRNA sense strand
ugaaagcaguaaucagaug

SEQ ID NO: 97402 - RNA, 19 nt, Homo sapiens
  misc_RNA (1)...(19): siRNA sense strand
ugugggaacuccuuauuau

SEQ ID NO: 97403 - RNA, 19 nt, Homo sapiens
  misc_RNA (1)...(19): siRNA sense strand
cauggaauauggugaggaa

SEQ ID NO: 97404 - RNA, 19 nt, Homo sapiens
  misc_RNA (1)...(19): siRNA sense strand
ccugaagacaugauacuua

SEQ ID NO: 97405 - RNA, 19 nt, Homo sapiens
  misc_RNA (1)...(19): siRNA sense strand
gauagaggugguucuguaa

SEQ ID NO: 97406 - RNA, 19 nt, Homo sapiens
  misc_RNA (1)...(19): siRNA sense strand
gcaagaggaagaacaagau

SEQ ID NO: 97407 - RNA, 19 nt, Homo sapiens
  misc_RNA (1)...(19): siRNA sense strand
aaucagauguuugccauga

SEQ ID NO: 97408 - RNA, 19 nt, Homo sapiens
  misc_RNA (1)...(19): siRNA sense strand
ggcauuugcuuguaccuau

SEQ ID NO: 97409 - RNA, 19 nt, Homo sapiens
  misc_RNA (1)...(19): siRNA sense strand
caagaggaagaacaagaua

SEQ ID NO: 97410 - RNA, 19 nt, Homo sapiens
  misc_RNA (1)...(19): siRNA sense strand
gugguucuguaauaaagua

SEQ ID NO: 97411 - RNA, 19 nt, Homo sapiens
  misc_RNA (1)...(19): siRNA sense strand
ccaagucuuucucuaauac

SEQ ID NO: 97412 - RNA, 19 nt, Homo sapiens
  misc_RNA (1)...(19): siRNA sense strand
ggaagaacaagauagaaag

SEQ ID NO: 97413 - RNA, 19 nt, Homo sapiens
  misc_RNA (1)...(19): siRNA sense strand
gugaggaaguauuagaaga

SEQ ID NO: 97414 - RNA, 19 nt, Homo sapiens
  misc_RNA (1)...(19): siRNA sense strand
uuaugugccuccagaaauu

SEQ ID NO: 97415 - RNA, 19 nt, Homo sapiens
  misc_RNA (1)...(19): siRNA sense strand
uuaaacagcagaaaggaaa

SEQ ID NO: 97416 - RNA, 19 nt, Homo sapiens
  misc_RNA (1)...(19): siRNA sense strand
cauacucaccuccaguuua

SEQ ID NO: 97417 - RNA, 19 nt, Homo sapiens
  misc_RNA (1)...(19): siRNA sense strand
gagaagaguaaacagagaa

SEQ ID NO: 97418 - RNA, 19 nt, Homo sapiens
  misc_RNA (1)...(19): siRNA sense strand
ggaaggaggcuguucuuuu

SEQ ID NO: 97419 - RNA, 19 nt, Homo sapiens
  misc_RNA (1)...(19): siRNA sense strand
agaggugguucuguaauaa

SEQ ID NO: 97420 - RNA, 19 nt, Homo sapiens
  misc_RNA (1)...(19): siRNA sense strand
aagcauaacacaccaagaa

SEQ ID NO: 97421 - RNA, 19 nt, Homo sapiens
  misc_RNA (1)...(19): siRNA sense strand
uagcucggcuuguccagaa

SEQ ID NO: 97422 - RNA, 19 nt, Homo sapiens
  misc_RNA (1)...(19): siRNA sense strand
gaguaaaucacauucacaa

SEQ ID NO: 97423 - RNA, 19 nt, Homo sapiens
  misc_RNA (1)...(19): siRNA sense strand
guuauuuccugaagacaug

SEQ ID NO: 97424 - RNA, 19 nt, Homo sapiens
  misc_RNA (1)...(19): siRNA sense strand
gcugaaggacacuuguaua

SEQ ID NO: 97425 - RNA, 19 nt, Homo sapiens
  misc_RNA (1)...(19): siRNA sense strand
ugagaagaguaaacagaga

SEQ ID NO: 97426 - RNA, 19 nt, Homo sapiens
  misc_RNA (1)...(19): siRNA sense strand
ccgagaucaucauggaaua

SEQ ID NO: 97427 - RNA, 19 nt, Homo sapiens
  misc_RNA (1)...(19): siRNA sense strand
gggaacuccuuauuaugug

SEQ ID NO: 97428 - RNA, 19 nt, Homo sapiens
  misc_RNA (1)...(19): siRNA sense strand
gaaagcaguaaucagaugu

SEQ ID NO: 97429 - RNA, 19 nt, Homo sapiens
  misc_RNA (1)...(19): siRNA sense strand
ggucacgauucugucauuu

SEQ ID NO: 97430 - RNA, 19 nt, Homo sapiens
  misc_RNA (1)...(19): siRNA sense strand
cccaagucuuucucuaaua

SEQ ID NO: 97431 - RNA, 19 nt, Homo sapiens
  misc_RNA (1)...(19): siRNA sense strand
gcagagcucuuuugguuca

SEQ ID NO: 97432 - RNA, 19 nt, Homo sapiens
  misc_RNA (1)...(19): siRNA sense strand
gaggggaucuaaugcaaaa

SEQ ID NO: 97433 - RNA, 19 nt, Homo sapiens
  misc_RNA (1)...(19): siRNA sense strand
cggcagagcucuuuugguu

SEQ ID NO: 97434 - RNA, 19 nt, Homo sapiens
  misc_RNA (1)...(19): siRNA sense strand
acacuuguauauugugaug

SEQ ID NO: 97435 - RNA, 19 nt, Homo sapiens
  misc_RNA (1)...(19): siRNA sense strand
gcaguaaucagauguuugc

SEQ ID NO: 97436 - RNA, 19 nt, Homo sapiens
  misc_RNA (1)...(19): siRNA sense strand
gcagaaucaggauagcuuu

SEQ ID NO: 97437 - RNA, 19 nt, Homo sapiens
  misc_RNA (1)...(19): siRNA sense strand
caucguagcucggcuuguc

SEQ ID NO: 97438 - RNA, 19 nt, Homo sapiens
  misc_RNA (1)...(19): siRNA sense strand
gauggaauacugugaugga

SEQ ID NO: 97439 - RNA, 19 nt, Homo sapiens
  misc_RNA (1)...(19): siRNA sense strand
ugaaggacacuuguauauu

SEQ ID NO: 97440 - RNA, 19 nt, Homo sapiens
  misc_RNA (1)...(19): siRNA sense strand
guaagcaguggcucaaaga

SEQ ID NO: 97441 - RNA, 19 nt, Homo sapiens
  misc_RNA (1)...(19): siRNA sense strand
gcucuuacagcuuuggaaa

SEQ ID NO: 97442 - RNA, 19 nt, Homo sapiens
  misc_RNA (1)...(19): siRNA sense strand
guccacugccgucucauua

SEQ ID NO: 97443 - RNA, 19 nt, Homo sapiens
  misc_RNA (1)...(19): siRNA sense strand
gcauuugcuuguaccuaug

SEQ ID NO: 97444 - RNA, 19 nt, Homo sapiens
  misc_RNA (1)...(19): siRNA sense strand
cagcagaaaggaaaguuau

SEQ ID NO: 97445 - RNA, 19 nt, Homo sapiens
  misc_RNA (1)...(19): siRNA sense strand
ggguagccauacugauuug

SEQ ID NO: 97446 - RNA, 19 nt, Homo sapiens
  misc_RNA (1)...(19): siRNA sense strand
gaaaugaagcaagcacagu

SEQ ID NO: 97447 - RNA, 19 nt, Homo sapiens
  misc_RNA (1)...(19): siRNA sense strand
ugaggaaguauuagaagaa

SEQ ID NO: 97448 - RNA, 19 nt, Homo sapiens
  misc_RNA (1)...(19): siRNA sense strand
ucaggcaaauaguuggaaa

SEQ ID NO: 97449 - RNA, 19 nt, Homo sapiens
  misc_RNA (1)...(19): siRNA sense strand
gaagaacaagauagaaagg

SEQ ID NO: 97450 - RNA, 19 nt, Homo sapiens
  misc_RNA (1)...(19): siRNA sense strand
uacaugguccugagaauga

SEQ ID NO: 97451 - RNA, 19 nt, Homo sapiens
  misc_RNA (1)...(19): siRNA sense strand
agaaucauuugaagcugaa

SEQ ID NO: 97452 - RNA, 19 nt, Homo sapiens
  misc_RNA (1)...(19): siRNA sense strand
ugauggaggucacgauucu

SEQ ID NO: 97453 - RNA, 19 nt, Homo sapiens
  misc_RNA (1)...(19): siRNA sense strand
cagcuuggcuuuucaaaca

SEQ ID NO: 97454 - RNA, 19 nt, Homo sapiens
  misc_RNA (1)...(19): siRNA sense strand
gaggugguucuguaauaaa

SEQ ID NO: 97455 - RNA, 19 nt, Homo sapiens
  misc_RNA (1)...(19): siRNA sense strand
uggguugcauccuguauga

SEQ ID NO: 97456 - RNA, 19 nt, Homo sapiens
  misc_RNA (1)...(19): siRNA sense strand
aagcaguaaucagauguuu

SEQ ID NO: 97457 - RNA, 19 nt, Homo sapiens
  misc_RNA (1)...(19): siRNA sense strand
aaaguuauuuccugaagac

SEQ ID NO: 97458 - RNA, 19 nt, Homo sapiens
  misc_RNA (1)...(19): siRNA sense strand
gaucucagcuuggcuuuuc

SEQ ID NO: 97459 - RNA, 19 nt, Homo sapiens
  misc_RNA (1)...(19): siRNA sense strand
augaaacacccuaauauug

SEQ ID NO: 97460 - RNA, 19 nt, Homo sapiens
  misc_RNA (1)...(19): siRNA sense strand
cauccuguaugaacucugu

SEQ ID NO: 97461 - RNA, 19 nt, Homo sapiens
  misc_RNA (1)...(19): siRNA sense strand
aaaugugccuuggaguaaa

SEQ ID NO: 97462 - RNA, 19 nt, Homo sapiens
  misc_RNA (1)...(19): siRNA sense strand
uagucaagcagauguuuaa

SEQ ID NO: 97463 - RNA, 19 nt, Homo sapiens
  misc_RNA (1)...(19): siRNA sense strand
cuaauauuguugccuucaa

SEQ ID NO: 97464 - RNA, 19 nt, Homo sapiens
  misc_RNA (1)...(19): siRNA sense strand
aaagccaguucaccaaauc

SEQ ID NO: 97465 - RNA, 19 nt, Homo sapiens
  misc_RNA (1)...(19): siRNA sense strand
guaauaagucaguccaucu

SEQ ID NO: 97466 - RNA, 19 nt, Homo sapiens
  misc_RNA (1)...(19): siRNA sense strand
ucccaagucuuucucuaau

SEQ ID NO: 97467 - RNA, 19 nt, Homo sapiens
  misc_RNA (1)...(19): siRNA sense strand
uagccauacugauuuggaa

SEQ ID NO: 97468 - RNA, 19 nt, Homo sapiens
  misc_RNA (1)...(19): siRNA sense strand
aaggguagccauacugauu

SEQ ID NO: 97469 - RNA, 19 nt, Homo sapiens
  misc_RNA (1)...(19): siRNA sense strand
gagaucaucauggaauaug

SEQ ID NO: 97470 - RNA, 19 nt, Homo sapiens
  misc_RNA (1)...(19): siRNA sense strand
gagcacauagacuccuuua

SEQ ID NO: 97471 - RNA, 19 nt, Homo sapiens
  misc_RNA (1)...(19): siRNA sense strand
cauccuggcugcugugguu

SEQ ID NO: 97472 - RNA, 19 nt, Homo sapiens
  misc_RNA (1)...(19): siRNA sense strand
gagagucugugcagugagu

SEQ ID NO: 97473 - RNA, 19 nt, Homo sapiens
  misc_RNA (1)...(19): siRNA sense strand
gcacauagacuccuuuacc

SEQ ID NO: 97474 - RNA, 19 nt, Homo sapiens
  misc_RNA (1)...(19): siRNA sense strand
gggaggagguggagaagcu

SEQ ID NO: 97475 - RNA, 19 nt, Homo sapiens
  misc_RNA (1)...(19): siRNA sense strand
ccaaccagaccguguguga

SEQ ID NO: 97476 - RNA, 19 nt, Homo sapiens
  misc_RNA (1)...(19): siRNA sense strand
ccucaucccugucuauugc

SEQ ID NO: 97477 - RNA, 19 nt, Homo sapiens
  misc_RNA (1)...(19): siRNA sense strand
uggagagucugugcaguga

SEQ ID NO: 97478 - RNA, 19 nt, Homo sapiens
  misc_RNA (1)...(19): siRNA sense strand
uagacuccuuuacccauga

SEQ ID NO: 97479 - RNA, 19 nt, Homo sapiens
  misc_RNA (1)...(19): siRNA sense strand
caaccucaucccugucuau

SEQ ID NO: 97480 - RNA, 19 nt, Homo sapiens
  misc_RNA (1)...(19): siRNA sense strand
cuaccagcccgagcacaua

SEQ ID NO: 97481 - RNA, 19 nt, Homo sapiens
  misc_RNA (1)...(19): siRNA sense strand
uccagaacaagaccucaua

SEQ ID NO: 97482 - RNA, 19 nt, Homo sapiens
  misc_RNA (1)...(19): siRNA sense strand
gcaccgagggccuucagua

SEQ ID NO: 97483 - RNA, 19 nt, Homo sapiens
  misc_RNA (1)...(19): siRNA sense strand
gaaccaccgcuacaagaug

SEQ ID NO: 97484 - RNA, 19 nt, Homo sapiens
  misc_RNA (1)...(19): siRNA sense strand
ccacgcaggucaagaucug

SEQ ID NO: 97485 - RNA, 19 nt, Homo sapiens
  misc_RNA (1)...(19): siRNA sense strand
aaccaccgcuacaagauga

SEQ ID NO: 97486 - RNA, 19 nt, Homo sapiens
  misc_RNA (1)...(19): siRNA sense strand
cagaaccaccgcuacaaga

SEQ ID NO: 97487 - RNA, 19 nt, Homo sapiens
  misc_RNA (1)...(19): siRNA sense strand
ccaaggcgcagaccuacga

SEQ ID NO: 97488 - RNA, 19 nt, Homo sapiens
  misc_RNA (1)...(19): siRNA sense strand
ccgaagguccggaggaaga

SEQ ID NO: 97489 - RNA, 19 nt, Homo sapiens
  misc_RNA (1)...(19): siRNA sense strand
acgagucaccggacaauga

SEQ ID NO: 97490 - RNA, 19 nt, Homo sapiens
  misc_RNA (1)...(19): siRNA sense strand
ggucagggacggcaaacca

SEQ ID NO: 97491 - RNA, 19 nt, Homo sapiens
  misc_RNA (1)...(19): siRNA sense strand
ccgagggccuucaguacuc

SEQ ID NO: 97492 - RNA, 19 nt, Homo sapiens
  misc_RNA (1)...(19): siRNA sense strand
gcccagcaguggacuuggu

SEQ ID NO: 97493 - RNA, 19 nt, Homo sapiens
  misc_RNA (1)...(19): siRNA sense strand
ggucaaggacaucuuagac

SEQ ID NO: 97494 - RNA, 19 nt, Homo sapiens
  misc_RNA (1)...(19): siRNA sense strand
ccagaaccaccgcuacaag

SEQ ID NO: 97495 - RNA, 19 nt, Homo sapiens
  misc_RNA (1)...(19): siRNA sense strand
ucgcugaccaacacaaaga

SEQ ID NO: 97496 - RNA, 19 nt, Homo sapiens
  misc_RNA (1)...(19): siRNA sense strand
gcgaagacggccaguauuu

SEQ ID NO: 97497 - RNA, 19 nt, Homo sapiens
  misc_RNA (1)...(19): siRNA sense strand
gcugcuggaucuauaauug

SEQ ID NO: 97498 - RNA, 19 nt, Homo sapiens
  misc_RNA (1)...(19): siRNA sense strand
gacagacaauuguucaguu

SEQ ID NO: 97499 - RNA, 19 nt, Homo sapiens
  misc_RNA (1)...(19): siRNA sense strand
gaagggaggacagacaauu

SEQ ID NO: 97500 - RNA, 19 nt, Homo sapiens
  misc_RNA (1)...(19): siRNA sense strand
uaauccagaucgcaucaaa

SEQ ID NO: 97501 - RNA, 19 nt, Homo sapiens
  misc_RNA (1)...(19): siRNA sense strand
gggcgaagacggccaguau

SEQ ID NO: 97502 - RNA, 19 nt, Homo sapiens
  misc_RNA (1)...(19): siRNA sense strand
gaaacuggagccaccauca

SEQ ID NO: 97503 - RNA, 19 nt, Homo sapiens
  misc_RNA (1)...(19): siRNA sense strand
acagacaauuguucaguug

SEQ ID NO: 97504 - RNA, 19 nt, Homo sapiens
  misc_RNA (1)...(19): siRNA sense strand
gcaccaagaggaccaauac

SEQ ID NO: 97505 - RNA, 19 nt, Homo sapiens
  misc_RNA (1)...(19): siRNA sense strand
ugucuaaguccaaagauuu

SEQ ID NO: 97506 - RNA, 19 nt, Homo sapiens
  misc_RNA (1)...(19): siRNA sense strand
gacagaaccagucagcauu

SEQ ID NO: 97507 - RNA, 19 nt, Homo sapiens
  misc_RNA (1)...(19): siRNA sense strand
gaaccagucagcauucuac

SEQ ID NO: 97508 - RNA, 19 nt, Homo sapiens
  misc_RNA (1)...(19): siRNA sense strand
ggacagacaauuguucagu

SEQ ID NO: 97509 - RNA, 19 nt, Homo sapiens
  misc_RNA (1)...(19): siRNA sense strand
gcaguucauggauucauug

SEQ ID NO: 97510 - RNA, 19 nt, Homo sapiens
  misc_RNA (1)...(19): siRNA sense strand
gaggacagacaauuguuca

SEQ ID NO: 97511 - RNA, 19 nt, Homo sapiens
  misc_RNA (1)...(19): siRNA sense strand
ggaggacagacaauuguuc

SEQ ID NO: 97512 - RNA, 19 nt, Homo sapiens
  misc_RNA (1)...(19): siRNA sense strand
gaagccggcagcaccaaga

SEQ ID NO: 97513 - RNA, 19 nt, Homo sapiens
  misc_RNA (1)...(19): siRNA sense strand
uuaugcugcuggaucuaua

SEQ ID NO: 97514 - RNA, 19 nt, Homo sapiens
  misc_RNA (1)...(19): siRNA sense strand
gagaaaugccccaaaaugu

SEQ ID NO: 97515 - RNA, 19 nt, Homo sapiens
  misc_RNA (1)...(19): siRNA sense strand
gacaauuguucaguugcaa

SEQ ID NO: 97516 - RNA, 19 nt, Homo sapiens
  misc_RNA (1)...(19): siRNA sense strand
ggaccaauacgggcgaaga

SEQ ID NO: 97517 - RNA, 19 nt, Homo sapiens
  misc_RNA (1)...(19): siRNA sense strand
cagcucccauccagcagaa

SEQ ID NO: 97518 - RNA, 19 nt, Homo sapiens
  misc_RNA (1)...(19): siRNA sense strand
gggaagggaggacagacaa

SEQ ID NO: 97519 - RNA, 19 nt, Homo sapiens
  misc_RNA (1)...(19): siRNA sense strand
agacaauuguucaguugca

SEQ ID NO: 97520 - RNA, 19 nt, Homo sapiens
  misc_RNA (1)...(19): siRNA sense strand
gaagacggccaguauuuuc

SEQ ID NO: 97521 - RNA, 19 nt, Homo sapiens
  misc_RNA (1)...(19): siRNA sense strand
gaccaccguuaauccagau

SEQ ID NO: 97522 - RNA, 19 nt, Homo sapiens
  misc_RNA (1)...(19): siRNA sense strand
cuacugagcgagugugcuu

SEQ ID NO: 97523 - RNA, 19 nt, Homo sapiens
  misc_RNA (1)...(19): siRNA sense strand
ccagggaacgguugaagca

SEQ ID NO: 97524 - RNA, 19 nt, Homo sapiens
  misc_RNA (1)...(19): siRNA sense strand
ggaagggaggacagacaau

SEQ ID NO: 97525 - RNA, 19 nt, Homo sapiens
  misc_RNA (1)...(19): siRNA sense strand
agacagaaccagucagcau

SEQ ID NO: 97526 - RNA, 19 nt, Homo sapiens
  misc_RNA (1)...(19): siRNA sense strand
gggaggacagacaauuguu

SEQ ID NO: 97527 - RNA, 19 nt, Homo sapiens
  misc_RNA (1)...(19): siRNA sense strand
aaacuggagccaccaucaa

SEQ ID NO: 97528 - RNA, 19 nt, Homo sapiens
  misc_RNA (1)...(19): siRNA sense strand
gaacgguugaagcacugaa

SEQ ID NO: 97529 - RNA, 19 nt, Homo sapiens
  misc_RNA (1)...(19): siRNA sense strand
ccagucagcauucuacaac

SEQ ID NO: 97530 - RNA, 19 nt, Homo sapiens
  misc_RNA (1)...(19): siRNA sense strand
cgagaaaugccccaaaaug

SEQ ID NO: 97531 - RNA, 19 nt, Homo sapiens
  misc_RNA (1)...(19): siRNA sense strand
cugucuaaguccaaagauu

SEQ ID NO: 97532 - RNA, 19 nt, Homo sapiens
  misc_RNA (1)...(19): siRNA sense strand
ugcaguucauggauucauu

SEQ ID NO: 97533 - RNA, 19 nt, Homo sapiens
  misc_RNA (1)...(19): siRNA sense strand
uaguuaugcugcuggaucu

SEQ ID NO: 97534 - RNA, 19 nt, Homo sapiens
  misc_RNA (1)...(19): siRNA sense strand
gccaagacagaaccaguca

SEQ ID NO: 97535 - RNA, 19 nt, Homo sapiens
  misc_RNA (1)...(19): siRNA sense strand
ccaccaucaagcugucuaa

SEQ ID NO: 97536 - RNA, 19 nt, Homo sapiens
  misc_RNA (1)...(19): siRNA sense strand
ggcgaagacggccaguauu

SEQ ID NO: 97537 - RNA, 19 nt, Homo sapiens
  misc_RNA (1)...(19): siRNA sense strand
gcgaagacggccaguauuu

SEQ ID NO: 97538 - RNA, 19 nt, Homo sapiens
  misc_RNA (1)...(19): siRNA sense strand
gcugcuggaucuauaauug

SEQ ID NO: 97539 - RNA, 19 nt, Homo sapiens
  misc_RNA (1)...(19): siRNA sense strand
gacagacaauuguucaguu

SEQ ID NO: 97540 - RNA, 19 nt, Homo sapiens
  misc_RNA (1)...(19): siRNA sense strand
gaagggaggacagacaauu

SEQ ID NO: 97541 - RNA, 19 nt, Homo sapiens
  misc_RNA (1)...(19): siRNA sense strand
uaauccagaucgcaucaaa

SEQ ID NO: 97542 - RNA, 19 nt, Homo sapiens
  misc_RNA (1)...(19): siRNA sense strand
gggcgaagacggccaguau

SEQ ID NO: 97543 - RNA, 19 nt, Homo sapiens
  misc_RNA (1)...(19): siRNA sense strand
gaaacuggagccaccauca

SEQ ID NO: 97544 - RNA, 19 nt, Homo sapiens
  misc_RNA (1)...(19): siRNA sense strand
acagacaauuguucaguug

SEQ ID NO: 97545 - RNA, 19 nt, Homo sapiens
  misc_RNA (1)...(19): siRNA sense strand
gcaccaagaggaccaauac

SEQ ID NO: 97546 - RNA, 19 nt, Homo sapiens
  misc_RNA (1)...(19): siRNA sense strand
ugucuaaguccaaagauuu

SEQ ID NO: 97547 - RNA, 19 nt, Homo sapiens
  misc_RNA (1)...(19): siRNA sense strand
gacagaaccagucagcauu

SEQ ID NO: 97548 - RNA, 19 nt, Homo sapiens
  misc_RNA (1)...(19): siRNA sense strand
gaaccagucagcauucuac

SEQ ID NO: 97549 - RNA, 19 nt, Homo sapiens
  misc_RNA (1)...(19): siRNA sense strand
ggacagacaauuguucagu

SEQ ID NO: 97550 - RNA, 19 nt, Homo sapiens
  misc_RNA (1)...(19): siRNA sense strand
gcaguucauggauucauug

SEQ ID NO: 97551 - RNA, 19 nt, Homo sapiens
  misc_RNA (1)...(19): siRNA sense strand
gaggacagacaauuguuca

SEQ ID NO: 97552 - RNA, 19 nt, Homo sapiens
  misc_RNA (1)...(19): siRNA sense strand
ggaggacagacaauuguuc

SEQ ID NO: 97553 - RNA, 19 nt, Homo sapiens
  misc_RNA (1)...(19): siRNA sense strand
gaagccggcagcaccaaga

SEQ ID NO: 97554 - RNA, 19 nt, Homo sapiens
  misc_RNA (1)...(19): siRNA sense strand
uuaugcugcuggaucuaua

SEQ ID NO: 97555 - RNA, 19 nt, Homo sapiens
  misc_RNA (1)...(19): siRNA sense strand
gagaaaugccccaaaaugu

SEQ ID NO: 97556 - RNA, 19 nt, Homo sapiens
  misc_RNA (1)...(19): siRNA sense strand
gacaauuguucaguugcaa

SEQ ID NO: 97557 - RNA, 19 nt, Homo sapiens
  misc_RNA (1)...(19): siRNA sense strand
ggaccaauacgggcgaaga

SEQ ID NO: 97558 - RNA, 19 nt, Homo sapiens
  misc_RNA (1)...(19): siRNA sense strand
cagcucccauccagcagaa

SEQ ID NO: 97559 - RNA, 19 nt, Homo sapiens
  misc_RNA (1)...(19): siRNA sense strand
gggaagggaggacagacaa

SEQ ID NO: 97560 - RNA, 19 nt, Homo sapiens
  misc_RNA (1)...(19): siRNA sense strand
agacaauuguucaguugca

SEQ ID NO: 97561 - RNA, 19 nt, Homo sapiens
  misc_RNA (1)...(19): siRNA sense strand
gaagacggccaguauuuuc

SEQ ID NO: 97562 - RNA, 19 nt, Homo sapiens
  misc_RNA (1)...(19): siRNA sense strand
gaccaccguuaauccagau

SEQ ID NO: 97563 - RNA, 19 nt, Homo sapiens
  misc_RNA (1)...(19): siRNA sense strand
cuacugagcgagugugcuu

SEQ ID NO: 97564 - RNA, 19 nt, Homo sapiens
  misc_RNA (1)...(19): siRNA sense strand
ccagggaacgguugaagca

SEQ ID NO: 97565 - RNA, 19 nt, Homo sapiens
  misc_RNA (1)...(19): siRNA sense strand
ggaagggaggacagacaau

SEQ ID NO: 97566 - RNA, 19 nt, Homo sapiens
  misc_RNA (1)...(19): siRNA sense strand
agacagaaccagucagcau

SEQ ID NO: 97567 - RNA, 19 nt, Homo sapiens
  misc_RNA (1)...(19): siRNA sense strand
gggaggacagacaauuguu

SEQ ID NO: 97568 - RNA, 19 nt, Homo sapiens
  misc_RNA (1)...(19): siRNA sense strand
aaacuggagccaccaucaa

SEQ ID NO: 97569 - RNA, 19 nt, Homo sapiens
  misc_RNA (1)...(19): siRNA sense strand
gaacgguugaagcacugaa

SEQ ID NO: 97570 - RNA, 19 nt, Homo sapiens
  misc_RNA (1)...(19): siRNA sense strand
ccagucagcauucuacaac

SEQ ID NO: 97571 - RNA, 19 nt, Homo sapiens
  misc_RNA (1)...(19): siRNA sense strand
cgagaaaugccccaaaaug

SEQ ID NO: 97572 - RNA, 19 nt, Homo sapiens
  misc_RNA (1)...(19): siRNA sense strand
cugucuaaguccaaagauu

SEQ ID NO: 97573 - RNA, 19 nt, Homo sapiens
  misc_RNA (1)...(19): siRNA sense strand
ugcaguucauggauucauu

SEQ ID NO: 97574 - RNA, 19 nt, Homo sapiens
  misc_RNA (1)...(19): siRNA sense strand
uaguuaugcugcuggaucu

SEQ ID NO: 97575 - RNA, 19 nt, Homo sapiens
  misc_RNA (1)...(19): siRNA sense strand
gccaagacagaaccaguca

SEQ ID NO: 97576 - RNA, 19 nt, Homo sapiens
  misc_RNA (1)...(19): siRNA sense strand
ccaccaucaagcugucuaa

SEQ ID NO: 97577 - RNA, 19 nt, Homo sapiens
  misc_RNA (1)...(19): siRNA sense strand
ggcgaagacggccaguauu

SEQ ID NO: 97578 - RNA, 19 nt, Homo sapiens
  misc_RNA (1)...(19): siRNA sense strand
gcgaagacggccaguauuu

SEQ ID NO: 97579 - RNA, 19 nt, Homo sapiens
  misc_RNA (1)...(19): siRNA sense strand
gcugcuggaucuauaauug

SEQ ID NO: 97580 - RNA, 19 nt, Homo sapiens
  misc_RNA (1)...(19): siRNA sense strand
gacagacaauuguucaguu

SEQ ID NO: 97581 - RNA, 19 nt, Homo sapiens
  misc_RNA (1)...(19): siRNA sense strand
gaagggaggacagacaauu

SEQ ID NO: 97582 - RNA, 19 nt, Homo sapiens
  misc_RNA (1)...(19): siRNA sense strand
uaauccagaucgcaucaaa

SEQ ID NO: 97583 - RNA, 19 nt, Homo sapiens
  misc_RNA (1)...(19): siRNA sense strand
gggcgaagacggccaguau

SEQ ID NO: 97584 - RNA, 19 nt, Homo sapiens
  misc_RNA (1)...(19): siRNA sense strand
gaaacuggagccaccauca

SEQ ID NO: 97585 - RNA, 19 nt, Homo sapiens
  misc_RNA (1)...(19): siRNA sense strand
acagacaauuguucaguug

SEQ ID NO: 97586 - RNA, 19 nt, Homo sapiens
  misc_RNA (1)...(19): siRNA sense strand
gcaccaagaggaccaauac

SEQ ID NO: 97587 - RNA, 19 nt, Homo sapiens
  misc_RNA (1)...(19): siRNA sense strand
ugucuaaguccaaagauuu

SEQ ID NO: 97588 - RNA, 19 nt, Homo sapiens
  misc_RNA (1)...(19): siRNA sense strand
gacagaaccagucagcauu

SEQ ID NO: 97589 - RNA, 19 nt, Homo sapiens
  misc_RNA (1)...(19): siRNA sense strand
gaaccagucagcauucuac

SEQ ID NO: 97590 - RNA, 19 nt, Homo sapiens
  misc_RNA (1)...(19): siRNA sense strand
ggacagacaauuguucagu

SEQ ID NO: 97591 - RNA, 19 nt, Homo sapiens
  misc_RNA (1)...(19): siRNA sense strand
gcaguucauggauucauug

SEQ ID NO: 97592 - RNA, 19 nt, Homo sapiens
  misc_RNA (1)...(19): siRNA sense strand
gaggacagacaauuguuca

SEQ ID NO: 97593 - RNA, 19 nt, Homo sapiens
  misc_RNA (1)...(19): siRNA sense strand
ggaggacagacaauuguuc

SEQ ID NO: 97594 - RNA, 19 nt, Homo sapiens
  misc_RNA (1)...(19): siRNA sense strand
gaagccggcagcaccaaga

SEQ ID NO: 97595 - RNA, 19 nt, Homo sapiens
  misc_RNA (1)...(19): siRNA sense strand
uuaugcugcuggaucuaua

SEQ ID NO: 97596 - RNA, 19 nt, Homo sapiens
  misc_RNA (1)...(19): siRNA sense strand
gagaaaugccccaaaaugu

SEQ ID NO: 97597 - RNA, 19 nt, Homo sapiens
  misc_RNA (1)...(19): siRNA sense strand
gacaauuguucaguugcaa

SEQ ID NO: 97598 - RNA, 19 nt, Homo sapiens
  misc_RNA (1)...(19): siRNA sense strand
ggaccaauacgggcgaaga

SEQ ID NO: 97599 - RNA, 19 nt, Homo sapiens
  misc_RNA (1)...(19): siRNA sense strand
cagcucccauccagcagaa

SEQ ID NO: 97600 - RNA, 19 nt, Homo sapiens
  misc_RNA (1)...(19): siRNA sense strand
gggaagggaggacagacaa

SEQ ID NO: 97601 - RNA, 19 nt, Homo sapiens
  misc_RNA (1)...(19): siRNA sense strand
agacaauuguucaguugca

SEQ ID NO: 97602 - RNA, 19 nt, Homo sapiens
  misc_RNA (1)...(19): siRNA sense strand
gaagacggccaguauuuuc

SEQ ID NO: 97603 - RNA, 19 nt, Homo sapiens
  misc_RNA (1)...(19): siRNA sense strand
gaccaccguuaauccagau

SEQ ID NO: 97604 - RNA, 19 nt, Homo sapiens
  misc_RNA (1)...(19): siRNA sense strand
cuacugagcgagugugcuu

SEQ ID NO: 97605 - RNA, 19 nt, Homo sapiens
  misc_RNA (1)...(19): siRNA sense strand
ccagggaacgguugaagca

SEQ ID NO: 97606 - RNA, 19 nt, Homo sapiens
  misc_RNA (1)...(19): siRNA sense strand
ggaagggaggacagacaau

SEQ ID NO: 97607 - RNA, 19 nt, Homo sapiens
  misc_RNA (1)...(19): siRNA sense strand
agacagaaccagucagcau

SEQ ID NO: 97608 - RNA, 19 nt, Homo sapiens
  misc_RNA (1)...(19): siRNA sense strand
gggaggacagacaauuguu

SEQ ID NO: 97609 - RNA, 19 nt, Homo sapiens
  misc_RNA (1)...(19): siRNA sense strand
aaacuggagccaccaucaa

SEQ ID NO: 97610 - RNA, 19 nt, Homo sapiens
  misc_RNA (1)...(19): siRNA sense strand
gaacgguugaagcacugaa

SEQ ID NO: 97611 - RNA, 19 nt, Homo sapiens
  misc_RNA (1)...(19): siRNA sense strand
ccagucagcauucuacaac

SEQ ID NO: 97612 - RNA, 19 nt, Homo sapiens
  misc_RNA (1)...(19): siRNA sense strand
cgagaaaugccccaaaaug

SEQ ID NO: 97613 - RNA, 19 nt, Homo sapiens
  misc_RNA (1)...(19): siRNA sense strand
cugucuaaguccaaagauu

SEQ ID NO: 97614 - RNA, 19 nt, Homo sapiens
  misc_RNA (1)...(19): siRNA sense strand
ugcaguucauggauucauu

SEQ ID NO: 97615 - RNA, 19 nt, Homo sapiens
  misc_RNA (1)...(19): siRNA sense strand
uaguuaugcugcuggaucu

SEQ ID NO: 97616 - RNA, 19 nt, Homo sapiens
  misc_RNA (1)...(19): siRNA sense strand
gccaagacagaaccaguca

SEQ ID NO: 97617 - RNA, 19 nt, Homo sapiens
  misc_RNA (1)...(19): siRNA sense strand
ccaccaucaagcugucuaa

SEQ ID NO: 97618 - RNA, 19 nt, Homo sapiens
  misc_RNA (1)...(19): siRNA sense strand
ggcgaagacggccaguauu

SEQ ID NO: 97619 - RNA, 19 nt, Homo sapiens
  misc_RNA (1)...(19): siRNA sense strand
ugacagcgauuuagaguuu

SEQ ID NO: 97620 - RNA, 19 nt, Homo sapiens
  misc_RNA (1)...(19): siRNA sense strand
gaaacacaaugaagucuca

SEQ ID NO: 97621 - RNA, 19 nt, Homo sapiens
  misc_RNA (1)...(19): siRNA sense strand
cagagcaccuccaaucaua

SEQ ID NO: 97622 - RNA, 19 nt, Homo sapiens
  misc_RNA (1)...(19): siRNA sense strand
ugacgaaccuuuagaggaa

SEQ ID NO: 97623 - RNA, 19 nt, Homo sapiens
  misc_RNA (1)...(19): siRNA sense strand
gaaacaagucugagaagaa

SEQ ID NO: 97624 - RNA, 19 nt, Homo sapiens
  misc_RNA (1)...(19): siRNA sense strand
ccacaauucuuaaaggaaa

SEQ ID NO: 97625 - RNA, 19 nt, Homo sapiens
  misc_RNA (1)...(19): siRNA sense strand
ggcauuagauggcuucauu

SEQ ID NO: 97626 - RNA, 19 nt, Homo sapiens
  misc_RNA (1)...(19): siRNA sense strand
gaaaggagguuugcuucau

SEQ ID NO: 97627 - RNA, 19 nt, Homo sapiens
  misc_RNA (1)...(19): siRNA sense strand
gaauucacuucaaggcaua

SEQ ID NO: 97628 - RNA, 19 nt, Homo sapiens
  misc_RNA (1)...(19): siRNA sense strand
acaagaacauucagaaguu

SEQ ID NO: 97629 - RNA, 19 nt, Homo sapiens
  misc_RNA (1)...(19): siRNA sense strand
ucaauguucucaucaaaga

SEQ ID NO: 97630 - RNA, 19 nt, Homo sapiens
  misc_RNA (1)...(19): siRNA sense strand
gcaaagggaagucguguug

SEQ ID NO: 97631 - RNA, 19 nt, Homo sapiens
  misc_RNA (1)...(19): siRNA sense strand
caagaacauucagaaguuu

SEQ ID NO: 97632 - RNA, 19 nt, Homo sapiens
  misc_RNA (1)...(19): siRNA sense strand
gaaccucggcagcacuuua

SEQ ID NO: 97633 - RNA, 19 nt, Homo sapiens
  misc_RNA (1)...(19): siRNA sense strand
ggcaacaccacaauucuua

SEQ ID NO: 97634 - RNA, 19 nt, Homo sapiens
  misc_RNA (1)...(19): siRNA sense strand
ucaagaaguucccacaaau

SEQ ID NO: 97635 - RNA, 19 nt, Homo sapiens
  misc_RNA (1)...(19): siRNA sense strand
ucaaagagcucaguuccau

SEQ ID NO: 97636 - RNA, 19 nt, Homo sapiens
  misc_RNA (1)...(19): siRNA sense strand
cagcaggacucgcuacuuc

SEQ ID NO: 97637 - RNA, 19 nt, Homo sapiens
  misc_RNA (1)...(19): siRNA sense strand
aggaagagcuccacaagau

SEQ ID NO: 97638 - RNA, 19 nt, Homo sapiens
  misc_RNA (1)...(19): siRNA sense strand
ggaaaucugugacauucag

SEQ ID NO: 97639 - RNA, 19 nt, Homo sapiens
  misc_RNA (1)...(19): siRNA sense strand
aaggaaaugugcauaguug

SEQ ID NO: 97640 - RNA, 19 nt, Homo sapiens
  misc_RNA (1)...(19): siRNA sense strand
cacacucgguggucaguua

SEQ ID NO: 97641 - RNA, 19 nt, Homo sapiens
  misc_RNA (1)...(19): siRNA sense strand
aaaggagguuugcuucauu

SEQ ID NO: 97642 - RNA, 19 nt, Homo sapiens
  misc_RNA (1)...(19): siRNA sense strand
guucaauguucucaucaaa

SEQ ID NO: 97643 - RNA, 19 nt, Homo sapiens
  misc_RNA (1)...(19): siRNA sense strand
gcacacagccaugucagaa

SEQ ID NO: 97644 - RNA, 19 nt, Homo sapiens
  misc_RNA (1)...(19): siRNA sense strand
cgaaacaagucugagaaga

SEQ ID NO: 97645 - RNA, 19 nt, Homo sapiens
  misc_RNA (1)...(19): siRNA sense strand
gaacaagaacauucagaag

SEQ ID NO: 97646 - RNA, 19 nt, Homo sapiens
  misc_RNA (1)...(19): siRNA sense strand
uaaauuuccucccagaaca

SEQ ID NO: 97647 - RNA, 19 nt, Homo sapiens
  misc_RNA (1)...(19): siRNA sense strand
ugacaacacccuuucaaga

SEQ ID NO: 97648 - RNA, 19 nt, Homo sapiens
  misc_RNA (1)...(19): siRNA sense strand
caaccucuuugcacaguga

SEQ ID NO: 97649 - RNA, 19 nt, Homo sapiens
  misc_RNA (1)...(19): siRNA sense strand
uuagauggcuucauuaucg

SEQ ID NO: 97650 - RNA, 19 nt, Homo sapiens
  misc_RNA (1)...(19): siRNA sense strand
aaacaagucugagaagaag

SEQ ID NO: 97651 - RNA, 19 nt, Homo sapiens
  misc_RNA (1)...(19): siRNA sense strand
gaaagacagagccaagaga

SEQ ID NO: 97652 - RNA, 19 nt, Homo sapiens
  misc_RNA (1)...(19): siRNA sense strand
uaaaggaaaugugcauagu

SEQ ID NO: 97653 - RNA, 19 nt, Homo sapiens
  misc_RNA (1)...(19): siRNA sense strand
ucacccagcugauguugga

SEQ ID NO: 97654 - RNA, 19 nt, Homo sapiens
  misc_RNA (1)...(19): siRNA sense strand
caacaccacaauucuuaaa

SEQ ID NO: 97655 - RNA, 19 nt, Homo sapiens
  misc_RNA (1)...(19): siRNA sense strand
ucacagagcaccuccaauc

SEQ ID NO: 97656 - RNA, 19 nt, Homo sapiens
  misc_RNA (1)...(19): siRNA sense strand
gcagaaacacaaugaaguc

SEQ ID NO: 97657 - RNA, 19 nt, Homo sapiens
  misc_RNA (1)...(19): siRNA sense strand
gcauuagauggcuucauua

SEQ ID NO: 97658 - RNA, 19 nt, Homo sapiens
  misc_RNA (1)...(19): siRNA sense strand
cauaguugacgaaccuuua

SEQ ID NO: 97659 - RNA, 19 nt, Homo sapiens
  misc_RNA (1)...(19): siRNA sense strand
ccucaguaaugaagaauuc

SEQ ID NO: 97660 - RNA, 19 nt, Homo sapiens
  misc_RNA (1)...(19): siRNA sense strand
gaaccucaggcuaugacua

SEQ ID NO: 97661 - RNA, 19 nt, Homo sapiens
  misc_RNA (1)...(19): siRNA sense strand
ugucauggaucagaauuug

SEQ ID NO: 97662 - RNA, 19 nt, Homo sapiens
  misc_RNA (1)...(19): siRNA sense strand
ggacaaaaccaccguguug

SEQ ID NO: 97663 - RNA, 19 nt, Homo sapiens
  misc_RNA (1)...(19): siRNA sense strand
cucaagaaguucccacaaa

SEQ ID NO: 97664 - RNA, 19 nt, Homo sapiens
  misc_RNA (1)...(19): siRNA sense strand
gcaacaccacaauucuuaa

SEQ ID NO: 97665 - RNA, 19 nt, Homo sapiens
  misc_RNA (1)...(19): siRNA sense strand
cgucggaugucauggauca

SEQ ID NO: 97666 - RNA, 19 nt, Homo sapiens
  misc_RNA (1)...(19): siRNA sense strand
ccaguucaauguucucauc

SEQ ID NO: 97667 - RNA, 19 nt, Homo sapiens
  misc_RNA (1)...(19): siRNA sense strand
gcagauguccggguggaaa

SEQ ID NO: 97668 - RNA, 19 nt, Homo sapiens
  misc_RNA (1)...(19): siRNA sense strand
ggaaaggagguuugcuuca

SEQ ID NO: 97669 - RNA, 19 nt, Homo sapiens
  misc_RNA (1)...(19): siRNA sense strand
ggaugaagaugagaaagac

SEQ ID NO: 97670 - RNA, 19 nt, Homo sapiens
  misc_RNA (1)...(19): siRNA sense strand
aggcauagcuuggaaugga

SEQ ID NO: 97671 - RNA, 19 nt, Homo sapiens
  misc_RNA (1)...(19): siRNA sense strand
caccacaauucuuaaagga

SEQ ID NO: 97672 - RNA, 19 nt, Homo sapiens
  misc_RNA (1)...(19): siRNA sense strand
gaucacagagcaccuccaa

SEQ ID NO: 97673 - RNA, 19 nt, Homo sapiens
  misc_RNA (1)...(19): siRNA sense strand
ccucagcacuaaaggacaa

SEQ ID NO: 97674 - RNA, 19 nt, Homo sapiens
  misc_RNA (1)...(19): siRNA sense strand
ccacaaauccucgcacaca

SEQ ID NO: 97675 - RNA, 19 nt, Homo sapiens
  misc_RNA (1)...(19): siRNA sense strand
gaauucacccagcugaugu

SEQ ID NO: 97676 - RNA, 19 nt, Homo sapiens
  misc_RNA (1)...(19): siRNA sense strand
gcccagacuucagccauga

SEQ ID NO: 97677 - RNA, 19 nt, Homo sapiens
  misc_RNA (1)...(19): siRNA sense strand
uaggauaccugccuuuuga

SEQ ID NO: 97678 - RNA, 19 nt, Homo sapiens
  misc_RNA (1)...(19): siRNA sense strand
caccuccaaucauaggaua

SEQ ID NO: 97679 - RNA, 19 nt, Homo sapiens
  misc_RNA (1)...(19): siRNA sense strand
uuagaggaauucacuucaa

SEQ ID NO: 97680 - RNA, 19 nt, Homo sapiens
  misc_RNA (1)...(19): siRNA sense strand
gagaaagacagagccaaga

SEQ ID NO: 97681 - RNA, 19 nt, Homo sapiens
  misc_RNA (1)...(19): siRNA sense strand
cagacucacuacuacauca

SEQ ID NO: 97682 - RNA, 19 nt, Homo sapiens
  misc_RNA (1)...(19): siRNA sense strand
gcugggaaccucaggcuau

SEQ ID NO: 97683 - RNA, 19 nt, Homo sapiens
  misc_RNA (1)...(19): siRNA sense strand
caaggcagcccucggaagu

SEQ ID NO: 97684 - RNA, 19 nt, Homo sapiens
  misc_RNA (1)...(19): siRNA sense strand
caagaaguucccacaaauc

SEQ ID NO: 97685 - RNA, 19 nt, Homo sapiens
  misc_RNA (1)...(19): siRNA sense strand
ucugugacauucagcaaga

SEQ ID NO: 97686 - RNA, 19 nt, Homo sapiens
  misc_RNA (1)...(19): siRNA sense strand
ggaaaaggucaucggauuu

SEQ ID NO: 97687 - RNA, 19 nt, Homo sapiens
  misc_RNA (1)...(19): siRNA sense strand
uagaggaauucacuucaag

SEQ ID NO: 97688 - RNA, 19 nt, Homo sapiens
  misc_RNA (1)...(19): siRNA sense strand
gcuugaacccaaaggaauu

SEQ ID NO: 97689 - RNA, 19 nt, Homo sapiens
  misc_RNA (1)...(19): siRNA sense strand
aaacggaaaucugugacau

SEQ ID NO: 97690 - RNA, 19 nt, Homo sapiens
  misc_RNA (1)...(19): siRNA sense strand
acggaaaucugugacauuc

SEQ ID NO: 97691 - RNA, 19 nt, Homo sapiens
  misc_RNA (1)...(19): siRNA sense strand
gguccaaagccaaugagaa

SEQ ID NO: 97692 - RNA, 19 nt, Homo sapiens
  misc_RNA (1)...(19): siRNA sense strand
gaccaucaaagaccagcua

SEQ ID NO: 97693 - RNA, 19 nt, Homo sapiens
  misc_RNA (1)...(19): siRNA sense strand
ggcauagcuuggaauggaa

SEQ ID NO: 97694 - RNA, 19 nt, Homo sapiens
  misc_RNA (1)...(19): siRNA sense strand
gauguuggaggcauuagau

SEQ ID NO: 97695 - RNA, 19 nt, Homo sapiens
  misc_RNA (1)...(19): siRNA sense strand
ccaaaggucagcaguggau

SEQ ID NO: 97696 - RNA, 19 nt, Homo sapiens
  misc_RNA (1)...(19): siRNA sense strand
uagcuuggaauggaaauuu

SEQ ID NO: 97697 - RNA, 19 nt, Homo sapiens
  misc_RNA (1)...(19): siRNA sense strand
gugcauaguugacgaaccu

SEQ ID NO: 97698 - RNA, 19 nt, Homo sapiens
  misc_RNA (1)...(19): siRNA sense strand
aaugaagucucagcgcaaa

SEQ ID NO: 97699 - RNA, 19 nt, Homo sapiens
  misc_RNA (1)...(19): siRNA sense strand
aaggagguuugcuucauug

SEQ ID NO: 97700 - RNA, 19 nt, Homo sapiens
  misc_RNA (1)...(19): siRNA sense strand
gacaacacccuuucaagac

SEQ ID NO: 97701 - RNA, 19 nt, Homo sapiens
  misc_RNA (1)...(19): siRNA sense strand
agaacaagaacauucagaa

SEQ ID NO: 97702 - RNA, 19 nt, Homo sapiens
  misc_RNA (1)...(19): siRNA sense strand
gcugcagacucacuacuac

SEQ ID NO: 97703 - RNA, 19 nt, Homo sapiens
  misc_RNA (1)...(19): siRNA sense strand
ggacgggacggcaagucaa

SEQ ID NO: 97704 - RNA, 19 nt, Homo sapiens
  misc_RNA (1)...(19): siRNA sense strand
cagcagcagcuacagcaaa

SEQ ID NO: 97705 - RNA, 19 nt, Homo sapiens
  misc_RNA (1)...(19): siRNA sense strand
ggaagagcuccacaagauc

SEQ ID NO: 97706 - RNA, 19 nt, Homo sapiens
  misc_RNA (1)...(19): siRNA sense strand
ucaccuaccaucaguggaa

SEQ ID NO: 97707 - RNA, 19 nt, Homo sapiens
  misc_RNA (1)...(19): siRNA sense strand
ucauggaucagaauuuguu

SEQ ID NO: 97708 - RNA, 19 nt, Homo sapiens
  misc_RNA (1)...(19): siRNA sense strand
guacaggcaccaaccucuu

SEQ ID NO: 97709 - RNA, 19 nt, Homo sapiens
  misc_RNA (1)...(19): siRNA sense strand
gguggucaguuacgcagau

SEQ ID NO: 97710 - RNA, 19 nt, Homo sapiens
  misc_RNA (1)...(19): siRNA sense strand
aaaggaaaugugcauaguu

SEQ ID NO: 97711 - RNA, 19 nt, Homo sapiens
  misc_RNA (1)...(19): siRNA sense strand
gaggcagcuugaacccaaa

SEQ ID NO: 97712 - RNA, 19 nt, Homo sapiens
  misc_RNA (1)...(19): siRNA sense strand
uggaaaaggucaucggauu

SEQ ID NO: 97713 - RNA, 19 nt, Homo sapiens
  misc_RNA (1)...(19): siRNA sense strand
guccaaagccaaugagaag

SEQ ID NO: 97714 - RNA, 19 nt, Homo sapiens
  misc_RNA (1)...(19): siRNA sense strand
uaugacuacuaccacauug

SEQ ID NO: 97715 - RNA, 19 nt, Homo sapiens
  misc_RNA (1)...(19): siRNA sense strand
gcauaguugacgaaccuuu

SEQ ID NO: 97716 - RNA, 19 nt, Homo sapiens
  misc_RNA (1)...(19): siRNA sense strand
caucaaagaccagcuagag

SEQ ID NO: 97717 - RNA, 19 nt, Homo sapiens
  misc_RNA (1)...(19): siRNA sense strand
cgaagggucagcagucugu

SEQ ID NO: 97718 - RNA, 19 nt, Homo sapiens
  misc_RNA (1)...(19): siRNA sense strand
cuacuucucuccaccuacu

SEQ ID NO: 97719 - RNA, 19 nt, Homo sapiens
  misc_RNA (1)...(19): siRNA sense strand
uggagaaccucgagcagua

SEQ ID NO: 97720 - RNA, 19 nt, Homo sapiens
  misc_RNA (1)...(19): siRNA sense strand
gaucagcgagcucgagaaa

SEQ ID NO: 97721 - RNA, 19 nt, Homo sapiens
  misc_RNA (1)...(19): siRNA sense strand
aagaagagccugccagaga

SEQ ID NO: 97722 - RNA, 19 nt, Homo sapiens
  misc_RNA (1)...(19): siRNA sense strand
ccauggagauccucaucaa

SEQ ID NO: 97723 - RNA, 19 nt, Homo sapiens
  misc_RNA (1)...(19): siRNA sense strand
caaccgcccuggagacaag

SEQ ID NO: 97724 - RNA, 19 nt, Homo sapiens
  misc_RNA (1)...(19): siRNA sense strand
ccaacgagcugguccucau

SEQ ID NO: 97725 - RNA, 19 nt, Homo sapiens
  misc_RNA (1)...(19): siRNA sense strand
ucagcgagcucgagaaagg

SEQ ID NO: 97726 - RNA, 19 nt, Homo sapiens
  misc_RNA (1)...(19): siRNA sense strand
cgagaaaggucagaaagac

SEQ ID NO: 97727 - RNA, 19 nt, Homo sapiens
  misc_RNA (1)...(19): siRNA sense strand
ccacugcggaccaacuaua

SEQ ID NO: 97728 - RNA, 19 nt, Homo sapiens
  misc_RNA (1)...(19): siRNA sense strand
ccaacagccucaaggaucu

SEQ ID NO: 97729 - RNA, 19 nt, Homo sapiens
  misc_RNA (1)...(19): siRNA sense strand
agaagagccugccagagau

SEQ ID NO: 97730 - RNA, 19 nt, Homo sapiens
  misc_RNA (1)...(19): siRNA sense strand
caguacagccgccucaauu

SEQ ID NO: 97731 - RNA, 19 nt, Homo sapiens
  misc_RNA (1)...(19): siRNA sense strand
gaagagccugccagagaug

SEQ ID NO: 97732 - RNA, 19 nt, Homo sapiens
  misc_RNA (1)...(19): siRNA sense strand
gagaaaggucagaaagaca

SEQ ID NO: 97733 - RNA, 19 nt, Homo sapiens
  misc_RNA (1)...(19): siRNA sense strand
gcaguacagccgccucaau

SEQ ID NO: 97734 - RNA, 19 nt, Homo sapiens
  misc_RNA (1)...(19): siRNA sense strand
gguggacgccgacaugugu

SEQ ID NO: 97735 - RNA, 19 nt, Homo sapiens
  misc_RNA (1)...(19): siRNA sense strand
agaaaggucagaaagacaa

SEQ ID NO: 97736 - RNA, 19 nt, Homo sapiens
  misc_RNA (1)...(19): siRNA sense strand
gcucgagaaaggucagaaa

SEQ ID NO: 97737 - RNA, 19 nt, Homo sapiens
  misc_RNA (1)...(19): siRNA sense strand
ccagagauguacgccuuca

SEQ ID NO: 97738 - RNA, 19 nt, Homo sapiens
  misc_RNA (1)...(19): siRNA sense strand
caacgagcugguccucauu

SEQ ID NO: 97739 - RNA, 19 nt, Homo sapiens
  misc_RNA (1)...(19): siRNA sense strand
gcggaccaacuauauguau

SEQ ID NO: 97740 - RNA, 19 nt, Homo sapiens
  misc_RNA (1)...(19): siRNA sense strand
caaguuccagcucacauuc

SEQ ID NO: 97741 - RNA, 19 nt, Homo sapiens
  misc_RNA (1)...(19): siRNA sense strand
aaucccacaucgagaucua

SEQ ID NO: 97742 - RNA, 19 nt, Homo sapiens
  misc_RNA (1)...(19): siRNA sense strand
gagcuggcccacuucaaca

SEQ ID NO: 97743 - RNA, 19 nt, Homo sapiens
  misc_RNA (1)...(19): siRNA sense strand
gaccaacagccucaaggau

SEQ ID NO: 97744 - RNA, 19 nt, Homo sapiens
  misc_RNA (1)...(19): siRNA sense strand
ggaccaacuauauguaugc

SEQ ID NO: 97745 - RNA, 19 nt, Homo sapiens
  misc_RNA (1)...(19): siRNA sense strand
cggaccaacuauauguaug

SEQ ID NO: 97746 - RNA, 19 nt, Homo sapiens
  misc_RNA (1)...(19): siRNA sense strand
ucgagaaaggucagaaaga

SEQ ID NO: 97747 - RNA, 19 nt, Homo sapiens
  misc_RNA (1)...(19): siRNA sense strand
gccaggagcaggacacucu

SEQ ID NO: 97748 - RNA, 19 nt, Homo sapiens
  misc_RNA (1)...(19): siRNA sense strand
acaaguuccagcucacauu

SEQ ID NO: 97749 - RNA, 19 nt, Homo sapiens
  misc_RNA (1)...(19): siRNA sense strand
ccgaggagagggucaagau

SEQ ID NO: 97750 - RNA, 19 nt, Homo sapiens
  misc_RNA (1)...(19): siRNA sense strand
gcaacaaccccauggagau

SEQ ID NO: 97751 - RNA, 19 nt, Homo sapiens
  misc_RNA (1)...(19): siRNA sense strand
ggacuccguuccucuauga

SEQ ID NO: 97752 - RNA, 19 nt, Homo sapiens
  misc_RNA (1)...(19): siRNA sense strand
ccguggagcuguacaacuu

SEQ ID NO: 97753 - RNA, 19 nt, Homo sapiens
  misc_RNA (1)...(19): siRNA sense strand
cgacaucuacuccaaagug

SEQ ID NO: 97754 - RNA, 19 nt, Homo sapiens
  misc_RNA (1)...(19): siRNA sense strand
ccucgucucugccaacuuc

SEQ ID NO: 97755 - RNA, 19 nt, Homo sapiens
  misc_RNA (1)...(19): siRNA sense strand
ucuaugacuucuaccacua

SEQ ID NO: 97756 - RNA, 19 nt, Homo sapiens
  misc_RNA (1)...(19): siRNA sense strand
caacuuccgccacaucuuc

SEQ ID NO: 97757 - RNA, 19 nt, Homo sapiens
  misc_RNA (1)...(19): siRNA sense strand
cuucauguccuucauauuc

SEQ ID NO: 97758 - RNA, 19 nt, Homo sapiens
  misc_RNA (1)...(19): siRNA sense strand
gaccaacgcacucuucuac

SEQ ID NO: 97759 - RNA, 19 nt, Homo sapiens
  misc_RNA (1)...(19): siRNA sense strand
acaccgacaucuacuccaa

SEQ ID NO: 97760 - RNA, 19 nt, Homo sapiens
  misc_RNA (1)...(19): siRNA sense strand
uacgucagcuccaccauca

SEQ ID NO: 97761 - RNA, 19 nt, Homo sapiens
  misc_RNA (1)...(19): siRNA sense strand
ccaacgcacucuucuacgu

SEQ ID NO: 97762 - RNA, 19 nt, Homo sapiens
  misc_RNA (1)...(19): siRNA sense strand
caacguggccagccugagu

SEQ ID NO: 97763 - RNA, 19 nt, Homo sapiens
  misc_RNA (1)...(19): siRNA sense strand
gaagccgcaccaagaaguu

SEQ ID NO: 97764 - RNA, 19 nt, Homo sapiens
  misc_RNA (1)...(19): siRNA sense strand
ggccagccuucucgaggaa

SEQ ID NO: 97765 - RNA, 19 nt, Homo sapiens
  misc_RNA (1)...(19): siRNA sense strand
ugacuucuaccacuacuuc

SEQ ID NO: 97766 - RNA, 19 nt, Homo sapiens
  misc_RNA (1)...(19): siRNA sense strand
ggacgugaacaccgacauc

SEQ ID NO: 97767 - RNA, 19 nt, Homo sapiens
  misc_RNA (1)...(19): siRNA sense strand
gcaccaagaaguucaucag

SEQ ID NO: 97768 - RNA, 19 nt, Homo sapiens
  misc_RNA (1)...(19): siRNA sense strand
ugacggugccuaugcuguu

SEQ ID NO: 97769 - RNA, 19 nt, Homo sapiens
  misc_RNA (1)...(19): siRNA sense strand
ucaacaccuucauguccuu

SEQ ID NO: 97770 - RNA, 19 nt, Homo sapiens
  misc_RNA (1)...(19): siRNA sense strand
gcaguggucaucgccuuug

SEQ ID NO: 97771 - RNA, 19 nt, Homo sapiens
  misc_RNA (1)...(19): siRNA sense strand
guuccucuaugacuucuac

SEQ ID NO: 97772 - RNA, 19 nt, Homo sapiens
  misc_RNA (1)...(19): siRNA sense strand
guggagcuguacaacuuca

SEQ ID NO: 97773 - RNA, 19 nt, Homo sapiens
  misc_RNA (1)...(19): siRNA sense strand
gacggugccuaugcuguuc

SEQ ID NO: 97774 - RNA, 19 nt, Homo sapiens
  misc_RNA (1)...(19): siRNA sense strand
ucccgaagccgcaccaaga

SEQ ID NO: 97775 - RNA, 19 nt, Homo sapiens
  misc_RNA (1)...(19): siRNA sense strand
caccgucaaggucgucaua

SEQ ID NO: 97776 - RNA, 19 nt, Homo sapiens
  misc_RNA (1)...(19): siRNA sense strand
ugaccaacgcacucuucua

SEQ ID NO: 97777 - RNA, 19 nt, Homo sapiens
  misc_RNA (1)...(19): siRNA sense strand
ccaugcccguggagcugua

SEQ ID NO: 97778 - RNA, 19 nt, Homo sapiens
  misc_RNA (1)...(19): siRNA sense strand
cgaagccgcaccaagaagu

SEQ ID NO: 97779 - RNA, 19 nt, Homo sapiens
  misc_RNA (1)...(19): siRNA sense strand
ggucaucucgguccugaac

SEQ ID NO: 97780 - RNA, 19 nt, Homo sapiens
  misc_RNA (1)...(19): siRNA sense strand
acaccaucaucgccaacaa

SEQ ID NO: 97781 - RNA, 19 nt, Homo sapiens
  misc_RNA (1)...(19): siRNA sense strand
cacacccucuccagcaaug

SEQ ID NO: 97782 - RNA, 19 nt, Homo sapiens
  misc_RNA (1)...(19): siRNA sense strand
caccuucauguccuucaua

SEQ ID NO: 97783 - RNA, 19 nt, Homo sapiens
  misc_RNA (1)...(19): siRNA sense strand
gaaaggugcuuccgaggua

SEQ ID NO: 97784 - RNA, 19 nt, Homo sapiens
  misc_RNA (1)...(19): siRNA sense strand
ccaaaucucuggacaaguu

SEQ ID NO: 97785 - RNA, 19 nt, Homo sapiens
  misc_RNA (1)...(19): siRNA sense strand
gcaccgaccugcagaaaga

SEQ ID NO: 97786 - RNA, 19 nt, Homo sapiens
  misc_RNA (1)...(19): siRNA sense strand
ggaggcagcuggcacaaga

SEQ ID NO: 97787 - RNA, 19 nt, Homo sapiens
  misc_RNA (1)...(19): siRNA sense strand
ucacagaacuacagagaga

SEQ ID NO: 97788 - RNA, 19 nt, Homo sapiens
  misc_RNA (1)...(19): siRNA sense strand
gcugaggccuggcugaauu

SEQ ID NO: 97789 - RNA, 19 nt, Homo sapiens
  misc_RNA (1)...(19): siRNA sense strand
gcuggaagccugucaaaga

SEQ ID NO: 97790 - RNA, 19 nt, Homo sapiens
  misc_RNA (1)...(19): siRNA sense strand
gaaggcagcucacgaaacc

SEQ ID NO: 97791 - RNA, 19 nt, Homo sapiens
  misc_RNA (1)...(19): siRNA sense strand
gcagaaagagggcgaguuc

SEQ ID NO: 97792 - RNA, 19 nt, Homo sapiens
  misc_RNA (1)...(19): siRNA sense strand
ggucuuggaauuagucaua

SEQ ID NO: 97793 - RNA, 19 nt, Homo sapiens
  misc_RNA (1)...(19): siRNA sense strand
ucaguccucucaccacuuu

SEQ ID NO: 97794 - RNA, 19 nt, Homo sapiens
  misc_RNA (1)...(19): siRNA sense strand
gucaagcacugguaccaaa

SEQ ID NO: 97795 - RNA, 19 nt, Homo sapiens
  misc_RNA (1)...(19): siRNA sense strand
gagaguucauccaggaaau

SEQ ID NO: 97796 - RNA, 19 nt, Homo sapiens
  misc_RNA (1)...(19): siRNA sense strand
gaguucauccaggaaauua

SEQ ID NO: 97797 - RNA, 19 nt, Homo sapiens
  misc_RNA (1)...(19): siRNA sense strand
ggaagcugccaccucagua

SEQ ID NO: 97798 - RNA, 19 nt, Homo sapiens
  misc_RNA (1)...(19): siRNA sense strand
gacuaucucuugccagaca

SEQ ID NO: 97799 - RNA, 19 nt, Homo sapiens
  misc_RNA (1)...(19): siRNA sense strand
gaagcugccaccucaguau

SEQ ID NO: 97800 - RNA, 19 nt, Homo sapiens
  misc_RNA (1)...(19): siRNA sense strand
ggagaguucauccaggaaa

SEQ ID NO: 97801 - RNA, 19 nt, Homo sapiens
  misc_RNA (1)...(19): siRNA sense strand
gagaaggcagcucacgaaa

SEQ ID NO: 97802 - RNA, 19 nt, Homo sapiens
  misc_RNA (1)...(19): siRNA sense strand
ggacggucuuggaauuagu

SEQ ID NO: 97803 - RNA, 19 nt, Homo sapiens
  misc_RNA (1)...(19): siRNA sense strand
cagcaacucugcaucuacu

SEQ ID NO: 97804 - RNA, 19 nt, Homo sapiens
  misc_RNA (1)...(19): siRNA sense strand
gcuccuacccugugugugu

SEQ ID NO: 97805 - RNA, 19 nt, Homo sapiens
  misc_RNA (1)...(19): siRNA sense strand
ggagcgagggagcaugaaa

SEQ ID NO: 97806 - RNA, 19 nt, Homo sapiens
  misc_RNA (1)...(19): siRNA sense strand
cggcggacccuacaggaaa

SEQ ID NO: 97807 - RNA, 19 nt, Homo sapiens
  misc_RNA (1)...(19): siRNA sense strand
gaaauaccccagccaaauc

SEQ ID NO: 97808 - RNA, 19 nt, Homo sapiens
  misc_RNA (1)...(19): siRNA sense strand
acgcugaccugguugucuu

SEQ ID NO: 97809 - RNA, 19 nt, Homo sapiens
  misc_RNA (1)...(19): siRNA sense strand
guaccaaaauuguaagaag

SEQ ID NO: 97810 - RNA, 19 nt, Homo sapiens
  misc_RNA (1)...(19): siRNA sense strand
ggacccuacaggaaacuug

SEQ ID NO: 97811 - RNA, 19 nt, Homo sapiens
  misc_RNA (1)...(19): siRNA sense strand
cuggaagccugucaaagag

SEQ ID NO: 97812 - RNA, 19 nt, Homo sapiens
  misc_RNA (1)...(19): siRNA sense strand
agucauaaacuaccagcaa

SEQ ID NO: 97813 - RNA, 19 nt, Homo sapiens
  misc_RNA (1)...(19): siRNA sense strand
cagcuggaagccugucaaa

SEQ ID NO: 97814 - RNA, 19 nt, Homo sapiens
  misc_RNA (1)...(19): siRNA sense strand
gucuuggaauuagucauaa

SEQ ID NO: 97815 - RNA, 19 nt, Homo sapiens
  misc_RNA (1)...(19): siRNA sense strand
gggaagcugccaccucagu

SEQ ID NO: 97816 - RNA, 19 nt, Homo sapiens
  misc_RNA (1)...(19): siRNA sense strand
gcacugguaccaaaauugu

SEQ ID NO: 97817 - RNA, 19 nt, Homo sapiens
  misc_RNA (1)...(19): siRNA sense strand
cuucacagaacuacagaga

SEQ ID NO: 97818 - RNA, 19 nt, Homo sapiens
  misc_RNA (1)...(19): siRNA sense strand
agccaaaucucuggacaag

SEQ ID NO: 97819 - RNA, 19 nt, Homo sapiens
  misc_RNA (1)...(19): siRNA sense strand
gaaaggugcuuccgaggua

SEQ ID NO: 97820 - RNA, 19 nt, Homo sapiens
  misc_RNA (1)...(19): siRNA sense strand
ccaaaucucuggacaaguu

SEQ ID NO: 97821 - RNA, 19 nt, Homo sapiens
  misc_RNA (1)...(19): siRNA sense strand
gcaccgaccugcagaaaga

SEQ ID NO: 97822 - RNA, 19 nt, Homo sapiens
  misc_RNA (1)...(19): siRNA sense strand
ggaggcagcuggcacaaga

SEQ ID NO: 97823 - RNA, 19 nt, Homo sapiens
  misc_RNA (1)...(19): siRNA sense strand
ucacagaacuacagagaga

SEQ ID NO: 97824 - RNA, 19 nt, Homo sapiens
  misc_RNA (1)...(19): siRNA sense strand
gcugaggccuggcugaauu

SEQ ID NO: 97825 - RNA, 19 nt, Homo sapiens
  misc_RNA (1)...(19): siRNA sense strand
gcuggaagccugucaaaga

SEQ ID NO: 97826 - RNA, 19 nt, Homo sapiens
  misc_RNA (1)...(19): siRNA sense strand
gaaggcagcucacgaaacc

SEQ ID NO: 97827 - RNA, 19 nt, Homo sapiens
  misc_RNA (1)...(19): siRNA sense strand
gcagaaagagggcgaguuc

SEQ ID NO: 97828 - RNA, 19 nt, Homo sapiens
  misc_RNA (1)...(19): siRNA sense strand
ggucuuggaauuagucaua

SEQ ID NO: 97829 - RNA, 19 nt, Homo sapiens
  misc_RNA (1)...(19): siRNA sense strand
ucaguccucucaccacuuu

SEQ ID NO: 97830 - RNA, 19 nt, Homo sapiens
  misc_RNA (1)...(19): siRNA sense strand
gucaagcacugguaccaaa

SEQ ID NO: 97831 - RNA, 19 nt, Homo sapiens
  misc_RNA (1)...(19): siRNA sense strand
gagaguucauccaggaaau

SEQ ID NO: 97832 - RNA, 19 nt, Homo sapiens
  misc_RNA (1)...(19): siRNA sense strand
gaguucauccaggaaauua

SEQ ID NO: 97833 - RNA, 19 nt, Homo sapiens
  misc_RNA (1)...(19): siRNA sense strand
ggaagcugccaccucagua

SEQ ID NO: 97834 - RNA, 19 nt, Homo sapiens
  misc_RNA (1)...(19): siRNA sense strand
gacuaucucuugccagaca

SEQ ID NO: 97835 - RNA, 19 nt, Homo sapiens
  misc_RNA (1)...(19): siRNA sense strand
gaagcugccaccucaguau

SEQ ID NO: 97836 - RNA, 19 nt, Homo sapiens
  misc_RNA (1)...(19): siRNA sense strand
ggagaguucauccaggaaa

SEQ ID NO: 97837 - RNA, 19 nt, Homo sapiens
  misc_RNA (1)...(19): siRNA sense strand
gagaaggcagcucacgaaa

SEQ ID NO: 97838 - RNA, 19 nt, Homo sapiens
  misc_RNA (1)...(19): siRNA sense strand
ggacggucuuggaauuagu

SEQ ID NO: 97839 - RNA, 19 nt, Homo sapiens
  misc_RNA (1)...(19): siRNA sense strand
cagcaacucugcaucuacu

SEQ ID NO: 97840 - RNA, 19 nt, Homo sapiens
  misc_RNA (1)...(19): siRNA sense strand
gcuccuacccugugugugu

SEQ ID NO: 97841 - RNA, 19 nt, Homo sapiens
  misc_RNA (1)...(19): siRNA sense strand
ggagcgagggagcaugaaa

SEQ ID NO: 97842 - RNA, 19 nt, Homo sapiens
  misc_RNA (1)...(19): siRNA sense strand
cggcggacccuacaggaaa

SEQ ID NO: 97843 - RNA, 19 nt, Homo sapiens
  misc_RNA (1)...(19): siRNA sense strand
gaaauaccccagccaaauc

SEQ ID NO: 97844 - RNA, 19 nt, Homo sapiens
  misc_RNA (1)...(19): siRNA sense strand
acgcugaccugguugucuu

SEQ ID NO: 97845 - RNA, 19 nt, Homo sapiens
  misc_RNA (1)...(19): siRNA sense strand
guaccaaaauuguaagaag

SEQ ID NO: 97846 - RNA, 19 nt, Homo sapiens
  misc_RNA (1)...(19): siRNA sense strand
ggacccuacaggaaacuug

SEQ ID NO: 97847 - RNA, 19 nt, Homo sapiens
  misc_RNA (1)...(19): siRNA sense strand
cuggaagccugucaaagag

SEQ ID NO: 97848 - RNA, 19 nt, Homo sapiens
  misc_RNA (1)...(19): siRNA sense strand
agucauaaacuaccagcaa

SEQ ID NO: 97849 - RNA, 19 nt, Homo sapiens
  misc_RNA (1)...(19): siRNA sense strand
cagcuggaagccugucaaa

SEQ ID NO: 97850 - RNA, 19 nt, Homo sapiens
  misc_RNA (1)...(19): siRNA sense strand
gucuuggaauuagucauaa

SEQ ID NO: 97851 - RNA, 19 nt, Homo sapiens
  misc_RNA (1)...(19): siRNA sense strand
gggaagcugccaccucagu

SEQ ID NO: 97852 - RNA, 19 nt, Homo sapiens
  misc_RNA (1)...(19): siRNA sense strand
gcacugguaccaaaauugu

SEQ ID NO: 97853 - RNA, 19 nt, Homo sapiens
  misc_RNA (1)...(19): siRNA sense strand
cuucacagaacuacagaga

SEQ ID NO: 97854 - RNA, 19 nt, Homo sapiens
  misc_RNA (1)...(19): siRNA sense strand
agccaaaucucuggacaag

SEQ ID NO: 97855 - RNA, 19 nt, Homo sapiens
  misc_RNA (1)...(19): siRNA sense strand
gaaggucaauuacaacuuu

SEQ ID NO: 97856 - RNA, 19 nt, Homo sapiens
  misc_RNA (1)...(19): siRNA sense strand
caaccuggauaaugaguua

SEQ ID NO: 97857 - RNA, 19 nt, Homo sapiens
  misc_RNA (1)...(19): siRNA sense strand
gugcugagcuucucucuga

SEQ ID NO: 97858 - RNA, 19 nt, Homo sapiens
  misc_RNA (1)...(19): siRNA sense strand
ccaccaaacuaaaggauuu

SEQ ID NO: 97859 - RNA, 19 nt, Homo sapiens
  misc_RNA (1)...(19): siRNA sense strand
gagaagcuguguaucuauu

SEQ ID NO: 97860 - RNA, 19 nt, Homo sapiens
  misc_RNA (1)...(19): siRNA sense strand
ggacaaagaagcaaagguu

SEQ ID NO: 97861 - RNA, 19 nt, Homo sapiens
  misc_RNA (1)...(19): siRNA sense strand
ucacugaacuccagcagaa

SEQ ID NO: 97862 - RNA, 19 nt, Homo sapiens
  misc_RNA (1)...(19): siRNA sense strand
aaaggaaacugaagccaaa

SEQ ID NO: 97863 - RNA, 19 nt, Homo sapiens
  misc_RNA (1)...(19): siRNA sense strand
caaagagugugaaaggaaa

SEQ ID NO: 97864 - RNA, 19 nt, Homo sapiens
  misc_RNA (1)...(19): siRNA sense strand
ggaguggagugccggauuu

SEQ ID NO: 97865 - RNA, 19 nt, Homo sapiens
  misc_RNA (1)...(19): siRNA sense strand
gggauaagcugaaguucug

SEQ ID NO: 97866 - RNA, 19 nt, Homo sapiens
  misc_RNA (1)...(19): siRNA sense strand
gauuugauccucuugauaa

SEQ ID NO: 97867 - RNA, 19 nt, Homo sapiens
  misc_RNA (1)...(19): siRNA sense strand
gugaggaaguuucuacuga

SEQ ID NO: 97868 - RNA, 19 nt, Homo sapiens
  misc_RNA (1)...(19): siRNA sense strand
gaacaggggugcagaaaag

SEQ ID NO: 97869 - RNA, 19 nt, Homo sapiens
  misc_RNA (1)...(19): siRNA sense strand
gcucauugaucuguauaaa

SEQ ID NO: 97870 - RNA, 19 nt, Homo sapiens
  misc_RNA (1)...(19): siRNA sense strand
caacgugacauccucgaua

SEQ ID NO: 97871 - RNA, 19 nt, Homo sapiens
  misc_RNA (1)...(19): siRNA sense strand
ucaaggaaauccaugaaca

SEQ ID NO: 97872 - RNA, 19 nt, Homo sapiens
  misc_RNA (1)...(19): siRNA sense strand
ucuauuggauggucaacua

SEQ ID NO: 97873 - RNA, 19 nt, Homo sapiens
  misc_RNA (1)...(19): siRNA sense strand
gacaaagaagcaaagguua

SEQ ID NO: 97874 - RNA, 19 nt, Homo sapiens
  misc_RNA (1)...(19): siRNA sense strand
caacaaaugcuuccuagag

SEQ ID NO: 97875 - RNA, 19 nt, Homo sapiens
  misc_RNA (1)...(19): siRNA sense strand
uaaugugaguggagauaaa

SEQ ID NO: 97876 - RNA, 19 nt, Homo sapiens
  misc_RNA (1)...(19): siRNA sense strand
ucacaguccugcagcgaaa

SEQ ID NO: 97877 - RNA, 19 nt, Homo sapiens
  misc_RNA (1)...(19): siRNA sense strand
gaaaacugcuuccgacaau

SEQ ID NO: 97878 - RNA, 19 nt, Homo sapiens
  misc_RNA (1)...(19): siRNA sense strand
gauggucaacuacaacuuu

SEQ ID NO: 97879 - RNA, 19 nt, Homo sapiens
  misc_RNA (1)...(19): siRNA sense strand
guacaaagagugugaaagg

SEQ ID NO: 97880 - RNA, 19 nt, Homo sapiens
  misc_RNA (1)...(19): siRNA sense strand
ccaaaguccucaacgaaag

SEQ ID NO: 97881 - RNA, 19 nt, Homo sapiens
  misc_RNA (1)...(19): siRNA sense strand
cagccaagauccagauugu

SEQ ID NO: 97882 - RNA, 19 nt, Homo sapiens
  misc_RNA (1)...(19): siRNA sense strand
gugaagcacugguacaaag

SEQ ID NO: 97883 - RNA, 19 nt, Homo sapiens
  misc_RNA (1)...(19): siRNA sense strand
caacuacaacuuugaagau

SEQ ID NO: 97884 - RNA, 19 nt, Homo sapiens
  misc_RNA (1)...(19): siRNA sense strand
caggccaccuucuggauaa

SEQ ID NO: 97885 - RNA, 19 nt, Homo sapiens
  misc_RNA (1)...(19): siRNA sense strand
ugaguuaccugcaccaucu

SEQ ID NO: 97886 - RNA, 19 nt, Homo sapiens
  misc_RNA (1)...(19): siRNA sense strand
gaugguacccuuguccuuu

SEQ ID NO: 97887 - RNA, 19 nt, Homo sapiens
  misc_RNA (1)...(19): siRNA sense strand
ucuggaaggucaauuacaa

SEQ ID NO: 97888 - RNA, 19 nt, Homo sapiens
  misc_RNA (1)...(19): siRNA sense strand
gaagcuggguugguuuauc

SEQ ID NO: 97889 - RNA, 19 nt, Homo sapiens
  misc_RNA (1)...(19): siRNA sense strand
uggauaaguucaucaagga

SEQ ID NO: 97890 - RNA, 19 nt, Homo sapiens
  misc_RNA (1)...(19): siRNA sense strand
gauaaaauaugcuggcaau

SEQ ID NO: 97891 - RNA, 19 nt, Homo sapiens
  misc_RNA (1)...(19): siRNA sense strand
aggagaagcuguguaucua

SEQ ID NO: 97892 - RNA, 19 nt, Homo sapiens
  misc_RNA (1)...(19): siRNA sense strand
gaucucgucguguuccaua

SEQ ID NO: 97893 - RNA, 19 nt, Homo sapiens
  misc_RNA (1)...(19): siRNA sense strand
gaagcaaagguuagguuau

SEQ ID NO: 97894 - RNA, 19 nt, Homo sapiens
  misc_RNA (1)...(19): siRNA sense strand
guugguuuauccaggaaua

SEQ ID NO: 97895 - RNA, 19 nt, Homo sapiens
  misc_RNA (1)...(19): siRNA sense strand
ccauccagguguucacaaa

SEQ ID NO: 97896 - RNA, 19 nt, Homo sapiens
  misc_RNA (1)...(19): siRNA sense strand
aagcaaagguuagguuauc

SEQ ID NO: 97897 - RNA, 19 nt, Homo sapiens
  misc_RNA (1)...(19): siRNA sense strand
cagaagcuggguugguuua

SEQ ID NO: 97898 - RNA, 19 nt, Homo sapiens
  misc_RNA (1)...(19): siRNA sense strand
gaagcuguguaucuauugg

SEQ ID NO: 97899 - RNA, 19 nt, Homo sapiens
  misc_RNA (1)...(19): siRNA sense strand
aagcugaaguucugucugu

SEQ ID NO: 97900 - RNA, 19 nt, Homo sapiens
  misc_RNA (1)...(19): siRNA sense strand
uaacaucauccguacauuc

SEQ ID NO: 97901 - RNA, 19 nt, Homo sapiens
  misc_RNA (1)...(19): siRNA sense strand
aacgugacauccucgauaa

SEQ ID NO: 97902 - RNA, 19 nt, Homo sapiens
  misc_RNA (1)...(19): siRNA sense strand
gaugagaccgugaggaagu

SEQ ID NO: 97903 - RNA, 19 nt, Homo sapiens
  misc_RNA (1)...(19): siRNA sense strand
cucccaaccuggauaauga

SEQ ID NO: 97904 - RNA, 19 nt, Homo sapiens
  misc_RNA (1)...(19): siRNA sense strand
ggagaagcuguguaucuau

SEQ ID NO: 97905 - RNA, 19 nt, Homo sapiens
  misc_RNA (1)...(19): siRNA sense strand
acaaagagugugaaaggaa

SEQ ID NO: 97906 - RNA, 19 nt, Homo sapiens
  misc_RNA (1)...(19): siRNA sense strand
agaggcaacuccgauggua

SEQ ID NO: 97907 - RNA, 19 nt, Homo sapiens
  misc_RNA (1)...(19): siRNA sense strand
agaagcaaagguuagguua

SEQ ID NO: 97908 - RNA, 19 nt, Homo sapiens
  misc_RNA (1)...(19): siRNA sense strand
gcuuugagccucccaagug

SEQ ID NO: 97909 - RNA, 19 nt, Homo sapiens
  misc_RNA (1)...(19): siRNA sense strand
caucauccguacauuccuu

SEQ ID NO: 97910 - RNA, 19 nt, Homo sapiens
  misc_RNA (1)...(19): siRNA sense strand
gagcuucucucugaaaucc

SEQ ID NO: 97911 - RNA, 19 nt, Homo sapiens
  misc_RNA (1)...(19): siRNA sense strand
guuggcaucuucuggacaa

SEQ ID NO: 97912 - RNA, 19 nt, Homo sapiens
  misc_RNA (1)...(19): siRNA sense strand
auaaagcacuggcaucaac

SEQ ID NO: 97913 - RNA, 19 nt, Homo sapiens
  misc_RNA (1)...(19): siRNA sense strand
gaucaaaugccaggagaag

SEQ ID NO: 97914 - RNA, 19 nt, Homo sapiens
  misc_RNA (1)...(19): siRNA sense strand
ggaaggucaauuacaacuu

SEQ ID NO: 97915 - RNA, 19 nt, Homo sapiens
  misc_RNA (1)...(19): siRNA sense strand
gagcuggucacacaauauc

SEQ ID NO: 97916 - RNA, 19 nt, Homo sapiens
  misc_RNA (1)...(19): siRNA sense strand
gcacugggucagcugaguu

SEQ ID NO: 97917 - RNA, 19 nt, Homo sapiens
  misc_RNA (1)...(19): siRNA sense strand
gaaggaggaggagcuugaa

SEQ ID NO: 97918 - RNA, 19 nt, Homo sapiens
  misc_RNA (1)...(19): siRNA sense strand
gacccaaccaauaauguga

SEQ ID NO: 97919 - RNA, 19 nt, Homo sapiens
  misc_RNA (1)...(19): siRNA sense strand
uggagcuggucacacaaua

SEQ ID NO: 97920 - RNA, 19 nt, Homo sapiens
  misc_RNA (1)...(19): siRNA sense strand
gaagcccuacgaagaaugu

SEQ ID NO: 97921 - RNA, 19 nt, Homo sapiens
  misc_RNA (1)...(19): siRNA sense strand
gcacaaaaucgucaaggaa

SEQ ID NO: 97922 - RNA, 19 nt, Homo sapiens
  misc_RNA (1)...(19): siRNA sense strand
uaaaacaauuccaggauca

SEQ ID NO: 97923 - RNA, 19 nt, Homo sapiens
  misc_RNA (1)...(19): siRNA sense strand
ggaaacccaauaccaccuu

SEQ ID NO: 97924 - RNA, 19 nt, Homo sapiens
  misc_RNA (1)...(19): siRNA sense strand
aaaccaggccugugaucuu

SEQ ID NO: 97925 - RNA, 19 nt, Homo sapiens
  misc_RNA (1)...(19): siRNA sense strand
aagaugagaccgugaggaa

SEQ ID NO: 97926 - RNA, 19 nt, Homo sapiens
  misc_RNA (1)...(19): siRNA sense strand
caaaggcacagcucugaag

SEQ ID NO: 97927 - RNA, 19 nt, Homo sapiens
  misc_RNA (1)...(19): siRNA sense strand
caacagccaagauccagau

SEQ ID NO: 97928 - RNA, 19 nt, Homo sapiens
  misc_RNA (1)...(19): siRNA sense strand
ccugaagcccuacgaagaa

SEQ ID NO: 97929 - RNA, 19 nt, Homo sapiens
  misc_RNA (1)...(19): siRNA sense strand
gccaggagaagcuguguau

SEQ ID NO: 97930 - RNA, 19 nt, Homo sapiens
  misc_RNA (1)...(19): siRNA sense strand
caucaacagugccagaaaa

SEQ ID NO: 97931 - RNA, 19 nt, Homo sapiens
  misc_RNA (1)...(19): siRNA sense strand
ugacaaccguccuggaaaa

SEQ ID NO: 97932 - RNA, 19 nt, Homo sapiens
  misc_RNA (1)...(19): siRNA sense strand
caaccguccuggaaaacua

SEQ ID NO: 97933 - RNA, 19 nt, Homo sapiens
  misc_RNA (1)...(19): siRNA sense strand
ucaaggaugggacuggaaa

SEQ ID NO: 97934 - RNA, 19 nt, Homo sapiens
  misc_RNA (1)...(19): siRNA sense strand
ggagcuggucacacaauau

SEQ ID NO: 97935 - RNA, 19 nt, Homo sapiens
  misc_RNA (1)...(19): siRNA sense strand
gcuucucucugaaauccaa

SEQ ID NO: 97936 - RNA, 19 nt, Homo sapiens
  misc_RNA (1)...(19): siRNA sense strand
cuacaacuuugaagaugag

SEQ ID NO: 97937 - RNA, 19 nt, Homo sapiens
  misc_RNA (1)...(19): siRNA sense strand
acuacaacuuugaagauga

SEQ ID NO: 97938 - RNA, 19 nt, Homo sapiens
  misc_RNA (1)...(19): siRNA sense strand
gcaucaacagugccagaaa

SEQ ID NO: 97939 - RNA, 19 nt, Homo sapiens
  misc_RNA (1)...(19): siRNA sense strand
gauaaagcacuggcaucaa

SEQ ID NO: 97940 - RNA, 19 nt, Homo sapiens
  misc_RNA (1)...(19): siRNA sense strand
aaccaggccugugaucuug

SEQ ID NO: 97941 - RNA, 19 nt, Homo sapiens
  misc_RNA (1)...(19): siRNA sense strand
uaauucgccuggugaagca

SEQ ID NO: 97942 - RNA, 19 nt, Homo sapiens
  misc_RNA (1)...(19): siRNA sense strand
gcugagcuucucucugaaa

SEQ ID NO: 97943 - RNA, 19 nt, Homo sapiens
  misc_RNA (1)...(19): siRNA sense strand
ggaggaggagcuugaaguc

SEQ ID NO: 97944 - RNA, 19 nt, Homo sapiens
  misc_RNA (1)...(19): siRNA sense strand
agaaggaggaggagcuuga

SEQ ID NO: 97945 - RNA, 19 nt, Homo sapiens
  misc_RNA (1)...(19): siRNA sense strand
caacuuugacauugcugaa

SEQ ID NO: 97946 - RNA, 19 nt, Homo sapiens
  misc_RNA (1)...(19): siRNA sense strand
gagaagccaacgugacauc

SEQ ID NO: 97947 - RNA, 19 nt, Homo sapiens
  misc_RNA (1)...(19): siRNA sense strand
gccaaaggcacagcucuga

SEQ ID NO: 97948 - RNA, 19 nt, Homo sapiens
  misc_RNA (1)...(19): siRNA sense strand
gggaggaucaaccgccaaa

SEQ ID NO: 97949 - RNA, 19 nt, Homo sapiens
  misc_RNA (1)...(19): siRNA sense strand
aaacugcuuccgacaauca

SEQ ID NO: 97950 - RNA, 19 nt, Homo sapiens
  misc_RNA (1)...(19): siRNA sense strand
caggagaagcuguguaucu

SEQ ID NO: 97951 - RNA, 19 nt, Homo sapiens
  misc_RNA (1)...(19): siRNA sense strand
uucuggagcugaucaaaug

SEQ ID NO: 97952 - RNA, 19 nt, Homo sapiens
  misc_RNA (1)...(19): siRNA sense strand
augcagggcucauugaucu

SEQ ID NO: 97953 - RNA, 19 nt, Homo sapiens
  misc_RNA (1)...(19): siRNA sense strand
cucagaagcuggguugguu

SEQ ID NO: 97954 - RNA, 19 nt, Homo sapiens
  misc_RNA (1)...(19): siRNA sense strand
uacaaagagugugaaagga

SEQ ID NO: 97955 - RNA, 19 nt, Homo sapiens
  misc_RNA (1)...(19): siRNA sense strand
gaaggucaauuacaacuuu

SEQ ID NO: 97956 - RNA, 19 nt, Homo sapiens
  misc_RNA (1)...(19): siRNA sense strand
caaccuggauaaugaguua

SEQ ID NO: 97957 - RNA, 19 nt, Homo sapiens
  misc_RNA (1)...(19): siRNA sense strand
gugcugagcuucucucuga

SEQ ID NO: 97958 - RNA, 19 nt, Homo sapiens
  misc_RNA (1)...(19): siRNA sense strand
ccaccaaacuaaaggauuu

SEQ ID NO: 97959 - RNA, 19 nt, Homo sapiens
  misc_RNA (1)...(19): siRNA sense strand
gagaagcuguguaucuauu

SEQ ID NO: 97960 - RNA, 19 nt, Homo sapiens
  misc_RNA (1)...(19): siRNA sense strand
ggacaaagaagcaaagguu

SEQ ID NO: 97961 - RNA, 19 nt, Homo sapiens
  misc_RNA (1)...(19): siRNA sense strand
ucacugaacuccagcagaa

SEQ ID NO: 97962 - RNA, 19 nt, Homo sapiens
  misc_RNA (1)...(19): siRNA sense strand
aaaggaaacugaagccaaa

SEQ ID NO: 97963 - RNA, 19 nt, Homo sapiens
  misc_RNA (1)...(19): siRNA sense strand
caaagagugugaaaggaaa

SEQ ID NO: 97964 - RNA, 19 nt, Homo sapiens
  misc_RNA (1)...(19): siRNA sense strand
ggaguggagugccggauuu

SEQ ID NO: 97965 - RNA, 19 nt, Homo sapiens
  misc_RNA (1)...(19): siRNA sense strand
gggauaagcugaaguucug

SEQ ID NO: 97966 - RNA, 19 nt, Homo sapiens
  misc_RNA (1)...(19): siRNA sense strand
gauuugauccucuugauaa

SEQ ID NO: 97967 - RNA, 19 nt, Homo sapiens
  misc_RNA (1)...(19): siRNA sense strand
gugaggaaguuucuacuga

SEQ ID NO: 97968 - RNA, 19 nt, Homo sapiens
  misc_RNA (1)...(19): siRNA sense strand
gaacaggggugcagaaaag

SEQ ID NO: 97969 - RNA, 19 nt, Homo sapiens
  misc_RNA (1)...(19): siRNA sense strand
gcucauugaucuguauaaa

SEQ ID NO: 97970 - RNA, 19 nt, Homo sapiens
  misc_RNA (1)...(19): siRNA sense strand
caacgugacauccucgaua

SEQ ID NO: 97971 - RNA, 19 nt, Homo sapiens
  misc_RNA (1)...(19): siRNA sense strand
ucaaggaaauccaugaaca

SEQ ID NO: 97972 - RNA, 19 nt, Homo sapiens
  misc_RNA (1)...(19): siRNA sense strand
ucuauuggauggucaacua

SEQ ID NO: 97973 - RNA, 19 nt, Homo sapiens
  misc_RNA (1)...(19): siRNA sense strand
gacaaagaagcaaagguua

SEQ ID NO: 97974 - RNA, 19 nt, Homo sapiens
  misc_RNA (1)...(19): siRNA sense strand
caacaaaugcuuccuagag

SEQ ID NO: 97975 - RNA, 19 nt, Homo sapiens
  misc_RNA (1)...(19): siRNA sense strand
uaaugugaguggagauaaa

SEQ ID NO: 97976 - RNA, 19 nt, Homo sapiens
  misc_RNA (1)...(19): siRNA sense strand
ucacaguccugcagcgaaa

SEQ ID NO: 97977 - RNA, 19 nt, Homo sapiens
  misc_RNA (1)...(19): siRNA sense strand
gaaaacugcuuccgacaau

SEQ ID NO: 97978 - RNA, 19 nt, Homo sapiens
  misc_RNA (1)...(19): siRNA sense strand
gauggucaacuacaacuuu

SEQ ID NO: 97979 - RNA, 19 nt, Homo sapiens
  misc_RNA (1)...(19): siRNA sense strand
guacaaagagugugaaagg

SEQ ID NO: 97980 - RNA, 19 nt, Homo sapiens
  misc_RNA (1)...(19): siRNA sense strand
ccaaaguccucaacgaaag

SEQ ID NO: 97981 - RNA, 19 nt, Homo sapiens
  misc_RNA (1)...(19): siRNA sense strand
cagccaagauccagauugu

SEQ ID NO: 97982 - RNA, 19 nt, Homo sapiens
  misc_RNA (1)...(19): siRNA sense strand
gugaagcacugguacaaag

SEQ ID NO: 97983 - RNA, 19 nt, Homo sapiens
  misc_RNA (1)...(19): siRNA sense strand
caacuacaacuuugaagau

SEQ ID NO: 97984 - RNA, 19 nt, Homo sapiens
  misc_RNA (1)...(19): siRNA sense strand
caggccaccuucuggauaa

SEQ ID NO: 97985 - RNA, 19 nt, Homo sapiens
  misc_RNA (1)...(19): siRNA sense strand
ugaguuaccugcaccaucu

SEQ ID NO: 97986 - RNA, 19 nt, Homo sapiens
  misc_RNA (1)...(19): siRNA sense strand
gaugguacccuuguccuuu

SEQ ID NO: 97987 - RNA, 19 nt, Homo sapiens
  misc_RNA (1)...(19): siRNA sense strand
ucuggaaggucaauuacaa

SEQ ID NO: 97988 - RNA, 19 nt, Homo sapiens
  misc_RNA (1)...(19): siRNA sense strand
gaagcuggguugguuuauc

SEQ ID NO: 97989 - RNA, 19 nt, Homo sapiens
  misc_RNA (1)...(19): siRNA sense strand
uggauaaguucaucaagga

SEQ ID NO: 97990 - RNA, 19 nt, Homo sapiens
  misc_RNA (1)...(19): siRNA sense strand
gauaaaauaugcuggcaau

SEQ ID NO: 97991 - RNA, 19 nt, Homo sapiens
  misc_RNA (1)...(19): siRNA sense strand
aggagaagcuguguaucua

SEQ ID NO: 97992 - RNA, 19 nt, Homo sapiens
  misc_RNA (1)...(19): siRNA sense strand
gaucucgucguguuccaua

SEQ ID NO: 97993 - RNA, 19 nt, Homo sapiens
  misc_RNA (1)...(19): siRNA sense strand
gaagcaaagguuagguuau

SEQ ID NO: 97994 - RNA, 19 nt, Homo sapiens
  misc_RNA (1)...(19): siRNA sense strand
guugguuuauccaggaaua

SEQ ID NO: 97995 - RNA, 19 nt, Homo sapiens
  misc_RNA (1)...(19): siRNA sense strand
ccauccagguguucacaaa

SEQ ID NO: 97996 - RNA, 19 nt, Homo sapiens
  misc_RNA (1)...(19): siRNA sense strand
aagcaaagguuagguuauc

SEQ ID NO: 97997 - RNA, 19 nt, Homo sapiens
  misc_RNA (1)...(19): siRNA sense strand
cagaagcuggguugguuua

SEQ ID NO: 97998 - RNA, 19 nt, Homo sapiens
  misc_RNA (1)...(19): siRNA sense strand
gaagcuguguaucuauugg

SEQ ID NO: 97999 - RNA, 19 nt, Homo sapiens
  misc_RNA (1)...(19): siRNA sense strand
aagcugaaguucugucugu

SEQ ID NO: 98000 - RNA, 19 nt, Homo sapiens
  misc_RNA (1)...(19): siRNA sense strand
uaacaucauccguacauuc

SEQ ID NO: 98001 - RNA, 19 nt, Homo sapiens
  misc_RNA (1)...(19): siRNA sense strand
aacgugacauccucgauaa

SEQ ID NO: 98002 - RNA, 19 nt, Homo sapiens
  misc_RNA (1)...(19): siRNA sense strand
gaugagaccgugaggaagu

SEQ ID NO: 98003 - RNA, 19 nt, Homo sapiens
  misc_RNA (1)...(19): siRNA sense strand
cucccaaccuggauaauga

SEQ ID NO: 98004 - RNA, 19 nt, Homo sapiens
  misc_RNA (1)...(19): siRNA sense strand
ggagaagcuguguaucuau

SEQ ID NO: 98005 - RNA, 19 nt, Homo sapiens
  misc_RNA (1)...(19): siRNA sense strand
acaaagagugugaaaggaa

SEQ ID NO: 98006 - RNA, 19 nt, Homo sapiens
  misc_RNA (1)...(19): siRNA sense strand
agaggcaacuccgauggua

SEQ ID NO: 98007 - RNA, 19 nt, Homo sapiens
  misc_RNA (1)...(19): siRNA sense strand
agaagcaaagguuagguua

SEQ ID NO: 98008 - RNA, 19 nt, Homo sapiens
  misc_RNA (1)...(19): siRNA sense strand
gcuuugagccucccaagug

SEQ ID NO: 98009 - RNA, 19 nt, Homo sapiens
  misc_RNA (1)...(19): siRNA sense strand
caucauccguacauuccuu

SEQ ID NO: 98010 - RNA, 19 nt, Homo sapiens
  misc_RNA (1)...(19): siRNA sense strand
gagcuucucucugaaaucc

SEQ ID NO: 98011 - RNA, 19 nt, Homo sapiens
  misc_RNA (1)...(19): siRNA sense strand
guuggcaucuucuggacaa

SEQ ID NO: 98012 - RNA, 19 nt, Homo sapiens
  misc_RNA (1)...(19): siRNA sense strand
auaaagcacuggcaucaac

SEQ ID NO: 98013 - RNA, 19 nt, Homo sapiens
  misc_RNA (1)...(19): siRNA sense strand
gaucaaaugccaggagaag

SEQ ID NO: 98014 - RNA, 19 nt, Homo sapiens
  misc_RNA (1)...(19): siRNA sense strand
ggaaggucaauuacaacuu

SEQ ID NO: 98015 - RNA, 19 nt, Homo sapiens
  misc_RNA (1)...(19): siRNA sense strand
gagcuggucacacaauauc

SEQ ID NO: 98016 - RNA, 19 nt, Homo sapiens
  misc_RNA (1)...(19): siRNA sense strand
gcacugggucagcugaguu

SEQ ID NO: 98017 - RNA, 19 nt, Homo sapiens
  misc_RNA (1)...(19): siRNA sense strand
gaaggaggaggagcuugaa

SEQ ID NO: 98018 - RNA, 19 nt, Homo sapiens
  misc_RNA (1)...(19): siRNA sense strand
gacccaaccaauaauguga

SEQ ID NO: 98019 - RNA, 19 nt, Homo sapiens
  misc_RNA (1)...(19): siRNA sense strand
uggagcuggucacacaaua

SEQ ID NO: 98020 - RNA, 19 nt, Homo sapiens
  misc_RNA (1)...(19): siRNA sense strand
gaagcccuacgaagaaugu

SEQ ID NO: 98021 - RNA, 19 nt, Homo sapiens
  misc_RNA (1)...(19): siRNA sense strand
gcacaaaaucgucaaggaa

SEQ ID NO: 98022 - RNA, 19 nt, Homo sapiens
  misc_RNA (1)...(19): siRNA sense strand
uaaaacaauuccaggauca

SEQ ID NO: 98023 - RNA, 19 nt, Homo sapiens
  misc_RNA (1)...(19): siRNA sense strand
ggaaacccaauaccaccuu

SEQ ID NO: 98024 - RNA, 19 nt, Homo sapiens
  misc_RNA (1)...(19): siRNA sense strand
aaaccaggccugugaucuu

SEQ ID NO: 98025 - RNA, 19 nt, Homo sapiens
  misc_RNA (1)...(19): siRNA sense strand
aagaugagaccgugaggaa

SEQ ID NO: 98026 - RNA, 19 nt, Homo sapiens
  misc_RNA (1)...(19): siRNA sense strand
caaaggcacagcucugaag

SEQ ID NO: 98027 - RNA, 19 nt, Homo sapiens
  misc_RNA (1)...(19): siRNA sense strand
caacagccaagauccagau

SEQ ID NO: 98028 - RNA, 19 nt, Homo sapiens
  misc_RNA (1)...(19): siRNA sense strand
ccugaagcccuacgaagaa

SEQ ID NO: 98029 - RNA, 19 nt, Homo sapiens
  misc_RNA (1)...(19): siRNA sense strand
gccaggagaagcuguguau

SEQ ID NO: 98030 - RNA, 19 nt, Homo sapiens
  misc_RNA (1)...(19): siRNA sense strand
caucaacagugccagaaaa

SEQ ID NO: 98031 - RNA, 19 nt, Homo sapiens
  misc_RNA (1)...(19): siRNA sense strand
ugacaaccguccuggaaaa

SEQ ID NO: 98032 - RNA, 19 nt, Homo sapiens
  misc_RNA (1)...(19): siRNA sense strand
caaccguccuggaaaacua

SEQ ID NO: 98033 - RNA, 19 nt, Homo sapiens
  misc_RNA (1)...(19): siRNA sense strand
ucaaggaugggacuggaaa

SEQ ID NO: 98034 - RNA, 19 nt, Homo sapiens
  misc_RNA (1)...(19): siRNA sense strand
ggagcuggucacacaauau

SEQ ID NO: 98035 - RNA, 19 nt, Homo sapiens
  misc_RNA (1)...(19): siRNA sense strand
gcuucucucugaaauccaa

SEQ ID NO: 98036 - RNA, 19 nt, Homo sapiens
  misc_RNA (1)...(19): siRNA sense strand
cuacaacuuugaagaugag

SEQ ID NO: 98037 - RNA, 19 nt, Homo sapiens
  misc_RNA (1)...(19): siRNA sense strand
acuacaacuuugaagauga

SEQ ID NO: 98038 - RNA, 19 nt, Homo sapiens
  misc_RNA (1)...(19): siRNA sense strand
gcaucaacagugccagaaa

SEQ ID NO: 98039 - RNA, 19 nt, Homo sapiens
  misc_RNA (1)...(19): siRNA sense strand
gauaaagcacuggcaucaa

SEQ ID NO: 98040 - RNA, 19 nt, Homo sapiens
  misc_RNA (1)...(19): siRNA sense strand
aaccaggccugugaucuug

SEQ ID NO: 98041 - RNA, 19 nt, Homo sapiens
  misc_RNA (1)...(19): siRNA sense strand
uaauucgccuggugaagca

SEQ ID NO: 98042 - RNA, 19 nt, Homo sapiens
  misc_RNA (1)...(19): siRNA sense strand
gcugagcuucucucugaaa

SEQ ID NO: 98043 - RNA, 19 nt, Homo sapiens
  misc_RNA (1)...(19): siRNA sense strand
ggaggaggagcuugaaguc

SEQ ID NO: 98044 - RNA, 19 nt, Homo sapiens
  misc_RNA (1)...(19): siRNA sense strand
agaaggaggaggagcuuga

SEQ ID NO: 98045 - RNA, 19 nt, Homo sapiens
  misc_RNA (1)...(19): siRNA sense strand
caacuuugacauugcugaa

SEQ ID NO: 98046 - RNA, 19 nt, Homo sapiens
  misc_RNA (1)...(19): siRNA sense strand
gagaagccaacgugacauc

SEQ ID NO: 98047 - RNA, 19 nt, Homo sapiens
  misc_RNA (1)...(19): siRNA sense strand
gccaaaggcacagcucuga

SEQ ID NO: 98048 - RNA, 19 nt, Homo sapiens
  misc_RNA (1)...(19): siRNA sense strand
gggaggaucaaccgccaaa

SEQ ID NO: 98049 - RNA, 19 nt, Homo sapiens
  misc_RNA (1)...(19): siRNA sense strand
aaacugcuuccgacaauca

SEQ ID NO: 98050 - RNA, 19 nt, Homo sapiens
  misc_RNA (1)...(19): siRNA sense strand
caggagaagcuguguaucu

SEQ ID NO: 98051 - RNA, 19 nt, Homo sapiens
  misc_RNA (1)...(19): siRNA sense strand
uucuggagcugaucaaaug

SEQ ID NO: 98052 - RNA, 19 nt, Homo sapiens
  misc_RNA (1)...(19): siRNA sense strand
augcagggcucauugaucu

SEQ ID NO: 98053 - RNA, 19 nt, Homo sapiens
  misc_RNA (1)...(19): siRNA sense strand
cucagaagcuggguugguu

SEQ ID NO: 98054 - RNA, 19 nt, Homo sapiens
  misc_RNA (1)...(19): siRNA sense strand
uacaaagagugugaaagga

SEQ ID NO: 98055 - RNA, 19 nt, Homo sapiens
  misc_RNA (1)...(19): siRNA sense strand
gaagaaagauggacaggua

SEQ ID NO: 98056 - RNA, 19 nt, Homo sapiens
  misc_RNA (1)...(19): siRNA sense strand
gaacagagcaagaucacua

SEQ ID NO: 98057 - RNA, 19 nt, Homo sapiens
  misc_RNA (1)...(19): siRNA sense strand
gaagaugguuggagacuau

SEQ ID NO: 98058 - RNA, 19 nt, Homo sapiens
  misc_RNA (1)...(19): siRNA sense strand
gcaggaaggucaaagagaa

SEQ ID NO: 98059 - RNA, 19 nt, Homo sapiens
  misc_RNA (1)...(19): siRNA sense strand
auaaagaacucucccguuu

SEQ ID NO: 98060 - RNA, 19 nt, Homo sapiens
  misc_RNA (1)...(19): siRNA sense strand
cagcagcggugguaacuuu

SEQ ID NO: 98061 - RNA, 19 nt, Homo sapiens
  misc_RNA (1)...(19): siRNA sense strand
gagaagaaagugaagagua

SEQ ID NO: 98062 - RNA, 19 nt, Homo sapiens
  misc_RNA (1)...(19): siRNA sense strand
ggacaaggaacacauuuau

SEQ ID NO: 98063 - RNA, 19 nt, Homo sapiens
  misc_RNA (1)...(19): siRNA sense strand
guacauggcugcugcugau

SEQ ID NO: 98064 - RNA, 19 nt, Homo sapiens
  misc_RNA (1)...(19): siRNA sense strand
uuacaggccugaugaauuc

SEQ ID NO: 98065 - RNA, 19 nt, Homo sapiens
  misc_RNA (1)...(19): siRNA sense strand
uaacuucgccuguggauga

SEQ ID NO: 98066 - RNA, 19 nt, Homo sapiens
  misc_RNA (1)...(19): siRNA sense strand
guacugggguucaugauua

SEQ ID NO: 98067 - RNA, 19 nt, Homo sapiens
  misc_RNA (1)...(19): siRNA sense strand
gaaauguccagaacaagaa

SEQ ID NO: 98068 - RNA, 19 nt, Homo sapiens
  misc_RNA (1)...(19): siRNA sense strand
acacuggccuacaggaaua

SEQ ID NO: 98069 - RNA, 19 nt, Homo sapiens
  misc_RNA (1)...(19): siRNA sense strand
agaauuggaugacuauaga

SEQ ID NO: 98070 - RNA, 19 nt, Homo sapiens
  misc_RNA (1)...(19): siRNA sense strand
gaacucucccguuuggaua

SEQ ID NO: 98071 - RNA, 19 nt, Homo sapiens
  misc_RNA (1)...(19): siRNA sense strand
acaaggaacacauuuauga

SEQ ID NO: 98072 - RNA, 19 nt, Homo sapiens
  misc_RNA (1)...(19): siRNA sense strand
gaacaagaagauacuacuu

SEQ ID NO: 98073 - RNA, 19 nt, Homo sapiens
  misc_RNA (1)...(19): siRNA sense strand
gcaagcaguuaaagagcaa

SEQ ID NO: 98074 - RNA, 19 nt, Homo sapiens
  misc_RNA (1)...(19): siRNA sense strand
aaagacaacuguacaagag

SEQ ID NO: 98075 - RNA, 19 nt, Homo sapiens
  misc_RNA (1)...(19): siRNA sense strand
gaagauacuacuuaagugu

SEQ ID NO: 98076 - RNA, 19 nt, Homo sapiens
  misc_RNA (1)...(19): siRNA sense strand
ggacagaggcuauggaacu

SEQ ID NO: 98077 - RNA, 19 nt, Homo sapiens
  misc_RNA (1)...(19): siRNA sense strand
ggaaguggcuauggcuaug

SEQ ID NO: 98078 - RNA, 19 nt, Homo sapiens
  misc_RNA (1)...(19): siRNA sense strand
ggaugacuauagagaagaa

SEQ ID NO: 98079 - RNA, 19 nt, Homo sapiens
  misc_RNA (1)...(19): siRNA sense strand
ggaaguggcuuugguagcu

SEQ ID NO: 98080 - RNA, 19 nt, Homo sapiens
  misc_RNA (1)...(19): siRNA sense strand
gcaguuaaagagcaaauug

SEQ ID NO: 98081 - RNA, 19 nt, Homo sapiens
  misc_RNA (1)...(19): siRNA sense strand
ggaggaaguggcuuuggua

SEQ ID NO: 98082 - RNA, 19 nt, Homo sapiens
  misc_RNA (1)...(19): siRNA sense strand
guaagaagaaucauugcaa

SEQ ID NO: 98083 - RNA, 19 nt, Homo sapiens
  misc_RNA (1)...(19): siRNA sense strand
caacaaagacaacuguaca

SEQ ID NO: 98084 - RNA, 19 nt, Homo sapiens
  misc_RNA (1)...(19): siRNA sense strand
gaaguggcuuugguagcua

SEQ ID NO: 98085 - RNA, 19 nt, Homo sapiens
  misc_RNA (1)...(19): siRNA sense strand
aaagaacucucccguuugg

SEQ ID NO: 98086 - RNA, 19 nt, Homo sapiens
  misc_RNA (1)...(19): siRNA sense strand
caaagacaacuguacaaga

SEQ ID NO: 98087 - RNA, 19 nt, Homo sapiens
  misc_RNA (1)...(19): siRNA sense strand
ggaggccauugccauugua

SEQ ID NO: 98088 - RNA, 19 nt, Homo sapiens
  misc_RNA (1)...(19): siRNA sense strand
gaaaguccaccuccuuaca

SEQ ID NO: 98089 - RNA, 19 nt, Homo sapiens
  misc_RNA (1)...(19): siRNA sense strand
gaaagauggacagguauga

SEQ ID NO: 98090 - RNA, 19 nt, Homo sapiens
  misc_RNA (1)...(19): siRNA sense strand
gguaugacaaguccaauau

SEQ ID NO: 98091 - RNA, 19 nt, Homo sapiens
  misc_RNA (1)...(19): siRNA sense strand
acaauagacugaagcaagu

SEQ ID NO: 98092 - RNA, 19 nt, Homo sapiens
  misc_RNA (1)...(19): siRNA sense strand
aggaacacauuuaugauga

SEQ ID NO: 98093 - RNA, 19 nt, Homo sapiens
  misc_RNA (1)...(19): siRNA sense strand
gggacaaggaacacauuua

SEQ ID NO: 98094 - RNA, 19 nt, Homo sapiens
  misc_RNA (1)...(19): siRNA sense strand
cuacguggaucaguauuug

SEQ ID NO: 98095 - RNA, 19 nt, Homo sapiens
  misc_RNA (1)...(19): siRNA sense strand
agaagaaagugaagaguac

SEQ ID NO: 98096 - RNA, 19 nt, Homo sapiens
  misc_RNA (1)...(19): siRNA sense strand
uacaagagcuuacaaucag

SEQ ID NO: 98097 - RNA, 19 nt, Homo sapiens
  misc_RNA (1)...(19): siRNA sense strand
gaauauccaccuaucacuu

SEQ ID NO: 98098 - RNA, 19 nt, Homo sapiens
  misc_RNA (1)...(19): siRNA sense strand
guauuuguaucacuacugu

SEQ ID NO: 98099 - RNA, 19 nt, Homo sapiens
  misc_RNA (1)...(19): siRNA sense strand
gagcuuacaaucagaacuu

SEQ ID NO: 98100 - RNA, 19 nt, Homo sapiens
  misc_RNA (1)...(19): siRNA sense strand
gauccugucuaugcucauu

SEQ ID NO: 98101 - RNA, 19 nt, Homo sapiens
  misc_RNA (1)...(19): siRNA sense strand
guucaggagcuuccauuaa

SEQ ID NO: 98102 - RNA, 19 nt, Homo sapiens
  misc_RNA (1)...(19): siRNA sense strand
gacagaggcuauggaacuu

SEQ ID NO: 98103 - RNA, 19 nt, Homo sapiens
  misc_RNA (1)...(19): siRNA sense strand
gaauacaagagcuuacaau

SEQ ID NO: 98104 - RNA, 19 nt, Homo sapiens
  misc_RNA (1)...(19): siRNA sense strand
cauauaugguggagagaug

SEQ ID NO: 98105 - RNA, 19 nt, Homo sapiens
  misc_RNA (1)...(19): siRNA sense strand
ugaaauguccagaacaaga

SEQ ID NO: 98106 - RNA, 19 nt, Homo sapiens
  misc_RNA (1)...(19): siRNA sense strand
cagcaaagggcuucauguu

SEQ ID NO: 98107 - RNA, 19 nt, Homo sapiens
  misc_RNA (1)...(19): siRNA sense strand
gauaaagaauuggaugacu

SEQ ID NO: 98108 - RNA, 19 nt, Homo sapiens
  misc_RNA (1)...(19): siRNA sense strand
gagacagacuacacaacug

SEQ ID NO: 98109 - RNA, 19 nt, Homo sapiens
  misc_RNA (1)...(19): siRNA sense strand
uauccagagucuuccuaua

SEQ ID NO: 98110 - RNA, 19 nt, Homo sapiens
  misc_RNA (1)...(19): siRNA sense strand
gcaccaagcaaugacauau

SEQ ID NO: 98111 - RNA, 19 nt, Homo sapiens
  misc_RNA (1)...(19): siRNA sense strand
ugccacaauugucuauaua

SEQ ID NO: 98112 - RNA, 19 nt, Homo sapiens
  misc_RNA (1)...(19): siRNA sense strand
ugucuaugcucauuauugu

SEQ ID NO: 98113 - RNA, 19 nt, Homo sapiens
  misc_RNA (1)...(19): siRNA sense strand
gaucaacaaagacaacugu

SEQ ID NO: 98114 - RNA, 19 nt, Homo sapiens
  misc_RNA (1)...(19): siRNA sense strand
gcaaagggaagagcaggaa

SEQ ID NO: 98115 - RNA, 19 nt, Homo sapiens
  misc_RNA (1)...(19): siRNA sense strand
uccagagucuuccuauaaa

SEQ ID NO: 98116 - RNA, 19 nt, Homo sapiens
  misc_RNA (1)...(19): siRNA sense strand
gacucuacguggaucagua

SEQ ID NO: 98117 - RNA, 19 nt, Homo sapiens
  misc_RNA (1)...(19): siRNA sense strand
ccagagucuuccuauaaau

SEQ ID NO: 98118 - RNA, 19 nt, Homo sapiens
  misc_RNA (1)...(19): siRNA sense strand
caaauugucacacaucaag

SEQ ID NO: 98119 - RNA, 19 nt, Homo sapiens
  misc_RNA (1)...(19): siRNA sense strand
ucacuacuguguuguggau

SEQ ID NO: 98120 - RNA, 19 nt, Homo sapiens
  misc_RNA (1)...(19): siRNA sense strand
uaaagaacucucccguuug

SEQ ID NO: 98121 - RNA, 19 nt, Homo sapiens
  misc_RNA (1)...(19): siRNA sense strand
agaagauacuacuuaagug

SEQ ID NO: 98122 - RNA, 19 nt, Homo sapiens
  misc_RNA (1)...(19): siRNA sense strand
ugucacacaucaagaagau

SEQ ID NO: 98123 - RNA, 19 nt, Homo sapiens
  misc_RNA (1)...(19): siRNA sense strand
ggaacacauuuaugaugag

SEQ ID NO: 98124 - RNA, 19 nt, Homo sapiens
  misc_RNA (1)...(19): siRNA sense strand
accaagcaaugacauauau

SEQ ID NO: 98125 - RNA, 19 nt, Homo sapiens
  misc_RNA (1)...(19): siRNA sense strand
cacuucagaucaacaaaga

SEQ ID NO: 98126 - RNA, 19 nt, Homo sapiens
  misc_RNA (1)...(19): siRNA sense strand
ggaauacaagagcuuacaa

SEQ ID NO: 98127 - RNA, 19 nt, Homo sapiens
  misc_RNA (1)...(19): siRNA sense strand
agauacuacuuaaguguga

SEQ ID NO: 98128 - RNA, 19 nt, Homo sapiens
  misc_RNA (1)...(19): siRNA sense strand
gagcaaauugucacacauc

SEQ ID NO: 98129 - RNA, 19 nt, Homo sapiens
  misc_RNA (1)...(19): siRNA sense strand
gaugaauacaauagacuga

SEQ ID NO: 98130 - RNA, 19 nt, Homo sapiens
  misc_RNA (1)...(19): siRNA sense strand
caaagagaacagagcaaga

SEQ ID NO: 98131 - RNA, 19 nt, Homo sapiens
  misc_RNA (1)...(19): siRNA sense strand
gaucuuuguuaccaguguu

SEQ ID NO: 98132 - RNA, 19 nt, Homo sapiens
  misc_RNA (1)...(19): siRNA sense strand
caccaagcaaugacauaua

SEQ ID NO: 98133 - RNA, 19 nt, Homo sapiens
  misc_RNA (1)...(19): siRNA sense strand
ugaauacaauagacugaag

SEQ ID NO: 98134 - RNA, 19 nt, Homo sapiens
  misc_RNA (1)...(19): siRNA sense strand
ccguuuggauaaagaauug

SEQ ID NO: 98135 - RNA, 19 nt, Homo sapiens
  misc_RNA (1)...(19): siRNA sense strand
gaucaguauuuguaucacu

SEQ ID NO: 98136 - RNA, 19 nt, Homo sapiens
  misc_RNA (1)...(19): siRNA sense strand
uauuguggcuuuugcuuua

SEQ ID NO: 98137 - RNA, 19 nt, Homo sapiens
  misc_RNA (1)...(19): siRNA sense strand
gcaaauugucacacaucaa

SEQ ID NO: 98138 - RNA, 19 nt, Homo sapiens
  misc_RNA (1)...(19): siRNA sense strand
caacuguacaagaggaauu

SEQ ID NO: 98139 - RNA, 19 nt, Homo sapiens
  misc_RNA (1)...(19): siRNA sense strand
gccacaauugucuauauaa

SEQ ID NO: 98140 - RNA, 19 nt, Homo sapiens
  misc_RNA (1)...(19): siRNA sense strand
gaugagaucaauaaagaac

SEQ ID NO: 98141 - RNA, 19 nt, Homo sapiens
  misc_RNA (1)...(19): siRNA sense strand
ugauucggauccugucuau

SEQ ID NO: 98142 - RNA, 19 nt, Homo sapiens
  misc_RNA (1)...(19): siRNA sense strand
ccacgccgguuccugaagu

SEQ ID NO: 98143 - RNA, 19 nt, Homo sapiens
  misc_RNA (1)...(19): siRNA sense strand
gugauaauagugagugcua

SEQ ID NO: 98144 - RNA, 19 nt, Homo sapiens
  misc_RNA (1)...(19): siRNA sense strand
caaaccgaaucauuaugca

SEQ ID NO: 98145 - RNA, 19 nt, Homo sapiens
  misc_RNA (1)...(19): siRNA sense strand
gaaauucuucacuucuaca

SEQ ID NO: 98146 - RNA, 19 nt, Homo sapiens
  misc_RNA (1)...(19): siRNA sense strand
auacaagagcuuacaauca

SEQ ID NO: 98147 - RNA, 19 nt, Homo sapiens
  misc_RNA (1)...(19): siRNA sense strand
gcaagaucacuaugagaca

SEQ ID NO: 98148 - RNA, 19 nt, Homo sapiens
  misc_RNA (1)...(19): siRNA sense strand
gagcaagaucacuaugaga

SEQ ID NO: 98149 - RNA, 19 nt, Homo sapiens
  misc_RNA (1)...(19): siRNA sense strand
cagagcaagaucacuauga

SEQ ID NO: 98150 - RNA, 19 nt, Homo sapiens
  misc_RNA (1)...(19): siRNA sense strand
gaagagcaggaaggucaaa

SEQ ID NO: 98151 - RNA, 19 nt, Homo sapiens
  misc_RNA (1)...(19): siRNA sense strand
ccaauggcaaagugaauga

SEQ ID NO: 98152 - RNA, 19 nt, Homo sapiens
  misc_RNA (1)...(19): siRNA sense strand
caaggaacacauuuaugau

SEQ ID NO: 98153 - RNA, 19 nt, Homo sapiens
  misc_RNA (1)...(19): siRNA sense strand
gacaaggaacacauuuaug

SEQ ID NO: 98154 - RNA, 19 nt, Homo sapiens
  misc_RNA (1)...(19): siRNA sense strand
ucaugauuauuguggcuuu

SEQ ID NO: 98155 - RNA, 19 nt, Homo sapiens
  misc_RNA (1)...(19): siRNA sense strand
uaaagaagguggacagaga

SEQ ID NO: 98156 - RNA, 19 nt, Homo sapiens
  misc_RNA (1)...(19): siRNA sense strand
gaccaucucucagaaguuu

SEQ ID NO: 98157 - RNA, 19 nt, Homo sapiens
  misc_RNA (1)...(19): siRNA sense strand
gaagggacauaaagaaggu

SEQ ID NO: 98158 - RNA, 19 nt, Homo sapiens
  misc_RNA (1)...(19): siRNA sense strand
gaacuaaggcaacugagau

SEQ ID NO: 98159 - RNA, 19 nt, Homo sapiens
  misc_RNA (1)...(19): siRNA sense strand
cauguugccugugugauua

SEQ ID NO: 98160 - RNA, 19 nt, Homo sapiens
  misc_RNA (1)...(19): siRNA sense strand
gaagguggacagagaacua

SEQ ID NO: 98161 - RNA, 19 nt, Homo sapiens
  misc_RNA (1)...(19): siRNA sense strand
gagaagaacaacaaauaga

SEQ ID NO: 98162 - RNA, 19 nt, Homo sapiens
  misc_RNA (1)...(19): siRNA sense strand
guaggaagaugauuuugua

SEQ ID NO: 98163 - RNA, 19 nt, Homo sapiens
  misc_RNA (1)...(19): siRNA sense strand
ugagaugcaucgacgaauu

SEQ ID NO: 98164 - RNA, 19 nt, Homo sapiens
  misc_RNA (1)...(19): siRNA sense strand
gagaugcaucgacgaauuu

SEQ ID NO: 98165 - RNA, 19 nt, Homo sapiens
  misc_RNA (1)...(19): siRNA sense strand
gcugugacuugcacccaua

SEQ ID NO: 98166 - RNA, 19 nt, Homo sapiens
  misc_RNA (1)...(19): siRNA sense strand
caucagagccauagaagau

SEQ ID NO: 98167 - RNA, 19 nt, Homo sapiens
  misc_RNA (1)...(19): siRNA sense strand
aaacugagaagaacaacaa

SEQ ID NO: 98168 - RNA, 19 nt, Homo sapiens
  misc_RNA (1)...(19): siRNA sense strand
ucagagccauagaagauga

SEQ ID NO: 98169 - RNA, 19 nt, Homo sapiens
  misc_RNA (1)...(19): siRNA sense strand
cugagaagaacaacaaaua

SEQ ID NO: 98170 - RNA, 19 nt, Homo sapiens
  misc_RNA (1)...(19): siRNA sense strand
ugaacccgaucaagucaaa

SEQ ID NO: 98171 - RNA, 19 nt, Homo sapiens
  misc_RNA (1)...(19): siRNA sense strand
agugaaggauggaaaggua

SEQ ID NO: 98172 - RNA, 19 nt, Homo sapiens
  misc_RNA (1)...(19): siRNA sense strand
cgacugccuuggaucgaaa

SEQ ID NO: 98173 - RNA, 19 nt, Homo sapiens
  misc_RNA (1)...(19): siRNA sense strand
ucagaaguuuggagaggaa

SEQ ID NO: 98174 - RNA, 19 nt, Homo sapiens
  misc_RNA (1)...(19): siRNA sense strand
uaggaucggugaauguaug

SEQ ID NO: 98175 - RNA, 19 nt, Homo sapiens
  misc_RNA (1)...(19): siRNA sense strand
ucagaagggacauaaagaa

SEQ ID NO: 98176 - RNA, 19 nt, Homo sapiens
  misc_RNA (1)...(19): siRNA sense strand
gaaagccaucagagccaua

SEQ ID NO: 98177 - RNA, 19 nt, Homo sapiens
  misc_RNA (1)...(19): siRNA sense strand
gcgaccaucucucagaagu

SEQ ID NO: 98178 - RNA, 19 nt, Homo sapiens
  misc_RNA (1)...(19): siRNA sense strand
ggagaggaaagccaucaga

SEQ ID NO: 98179 - RNA, 19 nt, Homo sapiens
  misc_RNA (1)...(19): siRNA sense strand
caagucaaaguucgaguga

SEQ ID NO: 98180 - RNA, 19 nt, Homo sapiens
  misc_RNA (1)...(19): siRNA sense strand
gcagcugugucaagaucga

SEQ ID NO: 98181 - RNA, 19 nt, Homo sapiens
  misc_RNA (1)...(19): siRNA sense strand
agucaaaguucgagugaag

SEQ ID NO: 98182 - RNA, 19 nt, Homo sapiens
  misc_RNA (1)...(19): siRNA sense strand
gauggaaagguaugugugu

SEQ ID NO: 98183 - RNA, 19 nt, Homo sapiens
  misc_RNA (1)...(19): siRNA sense strand
gagcuugccaaacugagaa

SEQ ID NO: 98184 - RNA, 19 nt, Homo sapiens
  misc_RNA (1)...(19): siRNA sense strand
ugugaucucuacccauguu

SEQ ID NO: 98185 - RNA, 19 nt, Homo sapiens
  misc_RNA (1)...(19): siRNA sense strand
acaugaacaucugcaaaga

SEQ ID NO: 98186 - RNA, 19 nt, Homo sapiens
  misc_RNA (1)...(19): siRNA sense strand
ccauguugccugugugauu

SEQ ID NO: 98187 - RNA, 19 nt, Homo sapiens
  misc_RNA (1)...(19): siRNA sense strand
cggcagcugugucaagauc

SEQ ID NO: 98188 - RNA, 19 nt, Homo sapiens
  misc_RNA (1)...(19): siRNA sense strand
ugagaagaacaacaaauag

SEQ ID NO: 98189 - RNA, 19 nt, Homo sapiens
  misc_RNA (1)...(19): siRNA sense strand
uaaggcaacugagaugcau

SEQ ID NO: 98190 - RNA, 19 nt, Homo sapiens
  misc_RNA (1)...(19): siRNA sense strand
gcgagagcuugccaaacug

SEQ ID NO: 98191 - RNA, 19 nt, Homo sapiens
  misc_RNA (1)...(19): siRNA sense strand
cuacaugaacaucugcaaa

SEQ ID NO: 98192 - RNA, 19 nt, Homo sapiens
  misc_RNA (1)...(19): siRNA sense strand
aaguacagcuacaugaaca

SEQ ID NO: 98193 - RNA, 19 nt, Homo sapiens
  misc_RNA (1)...(19): siRNA sense strand
cuacccauguugccugugu

SEQ ID NO: 98194 - RNA, 19 nt, Homo sapiens
  misc_RNA (1)...(19): siRNA sense strand
augaacaucugcaaagagu

SEQ ID NO: 98195 - RNA, 19 nt, Homo sapiens
  misc_RNA (1)...(19): siRNA sense strand
agcgagagcuugccaaacu

SEQ ID NO: 98196 - RNA, 19 nt, Homo sapiens
  misc_RNA (1)...(19): siRNA sense strand
aaagaagguggacagagaa

SEQ ID NO: 98197 - RNA, 19 nt, Homo sapiens
  misc_RNA (1)...(19): siRNA sense strand
gaauguaugcgguuuugaa

SEQ ID NO: 98198 - RNA, 19 nt, Homo sapiens
  misc_RNA (1)...(19): siRNA sense strand
cagaagggacauaaagaag

SEQ ID NO: 98199 - RNA, 19 nt, Homo sapiens
  misc_RNA (1)...(19): siRNA sense strand
gcccauaugauccuugcaa

SEQ ID NO: 98200 - RNA, 19 nt, Homo sapiens
  misc_RNA (1)...(19): siRNA sense strand
ggaugagaaggauguaaca

SEQ ID NO: 98201 - RNA, 19 nt, Homo sapiens
  misc_RNA (1)...(19): siRNA sense strand
ccauauccguacugcuugu

SEQ ID NO: 98202 - RNA, 19 nt, Homo sapiens
  misc_RNA (1)...(19): siRNA sense strand
gccaaacugagaagaacaa

SEQ ID NO: 98203 - RNA, 19 nt, Homo sapiens
  misc_RNA (1)...(19): siRNA sense strand
agagaacuaaggcaacuga

SEQ ID NO: 98204 - RNA, 19 nt, Homo sapiens
  misc_RNA (1)...(19): siRNA sense strand
gugauuauaagcuuuacug

SEQ ID NO: 98205 - RNA, 19 nt, Homo sapiens
  misc_RNA (1)...(19): siRNA sense strand
ccugugugauuauaagcuu

SEQ ID NO: 98206 - RNA, 19 nt, Homo sapiens
  misc_RNA (1)...(19): siRNA sense strand
ccguacugcuugugcuauu

SEQ ID NO: 98207 - RNA, 19 nt, Homo sapiens
  misc_RNA (1)...(19): siRNA sense strand
cgagagcuugccaaacuga

SEQ ID NO: 98208 - RNA, 19 nt, Homo sapiens
  misc_RNA (1)...(19): siRNA sense strand
cugcgaccaucucucagaa

SEQ ID NO: 98209 - RNA, 19 nt, Homo sapiens
  misc_RNA (1)...(19): siRNA sense strand
gcucuugcggccuguguga

SEQ ID NO: 98210 - RNA, 19 nt, Homo sapiens
  misc_RNA (1)...(19): siRNA sense strand
gucagaagggacauaaaga

SEQ ID NO: 98211 - RNA, 19 nt, Homo sapiens
  misc_RNA (1)...(19): siRNA sense strand
acagcuacaugaacaucug

SEQ ID NO: 98212 - RNA, 19 nt, Homo sapiens
  misc_RNA (1)...(19): siRNA sense strand
acagagaacuaaggcaacu

SEQ ID NO: 98213 - RNA, 19 nt, Homo sapiens
  misc_RNA (1)...(19): siRNA sense strand
ucaaaguucgagugaagga

SEQ ID NO: 98214 - RNA, 19 nt, Homo sapiens
  misc_RNA (1)...(19): siRNA sense strand
gaaggauggaaagguaugu

SEQ ID NO: 98215 - RNA, 19 nt, Homo sapiens
  misc_RNA (1)...(19): siRNA sense strand
guacagcuacaugaacauc

SEQ ID NO: 98216 - RNA, 19 nt, Homo sapiens
  misc_RNA (1)...(19): siRNA sense strand
agaacuaaggcaacugaga

SEQ ID NO: 98217 - RNA, 19 nt, Homo sapiens
  misc_RNA (1)...(19): siRNA sense strand
gaaaugggcuuuaggaaua

SEQ ID NO: 98218 - RNA, 19 nt, Homo sapiens
  misc_RNA (1)...(19): siRNA sense strand
gaaagaaucucaguuacaa

SEQ ID NO: 98219 - RNA, 19 nt, Homo sapiens
  misc_RNA (1)...(19): siRNA sense strand
gcgagaggcucaaguguua

SEQ ID NO: 98220 - RNA, 19 nt, Homo sapiens
  misc_RNA (1)...(19): siRNA sense strand
gaacauagugguggaaaua

SEQ ID NO: 98221 - RNA, 19 nt, Homo sapiens
  misc_RNA (1)...(19): siRNA sense strand
ggaagugcaucaauauuau

SEQ ID NO: 98222 - RNA, 19 nt, Homo sapiens
  misc_RNA (1)...(19): siRNA sense strand
gcuagugauuugcugauua

SEQ ID NO: 98223 - RNA, 19 nt, Homo sapiens
  misc_RNA (1)...(19): siRNA sense strand
ccaaagggaucaagacaga

SEQ ID NO: 98224 - RNA, 19 nt, Homo sapiens
  misc_RNA (1)...(19): siRNA sense strand
ucaaagacguaaucaaaga

SEQ ID NO: 98225 - RNA, 19 nt, Homo sapiens
  misc_RNA (1)...(19): siRNA sense strand
caacaugggaguaaucuuu

SEQ ID NO: 98226 - RNA, 19 nt, Homo sapiens
  misc_RNA (1)...(19): siRNA sense strand
ccaagaaguucaauauugu

SEQ ID NO: 98227 - RNA, 19 nt, Homo sapiens
  misc_RNA (1)...(19): siRNA sense strand
caucaaagacguaaucaaa

SEQ ID NO: 98228 - RNA, 19 nt, Homo sapiens
  misc_RNA (1)...(19): siRNA sense strand
gagacacucugacugauga

SEQ ID NO: 98229 - RNA, 19 nt, Homo sapiens
  misc_RNA (1)...(19): siRNA sense strand
ggaaagaaccuaucuacca

SEQ ID NO: 98230 - RNA, 19 nt, Homo sapiens
  misc_RNA (1)...(19): siRNA sense strand
gaagagauggaagaacuua

SEQ ID NO: 98231 - RNA, 19 nt, Homo sapiens
  misc_RNA (1)...(19): siRNA sense strand
gaaagaagcuccccagaca

SEQ ID NO: 98232 - RNA, 19 nt, Homo sapiens
  misc_RNA (1)...(19): siRNA sense strand
gaaccugucaugaccuaua

SEQ ID NO: 98233 - RNA, 19 nt, Homo sapiens
  misc_RNA (1)...(19): siRNA sense strand
ccaacaaauucaucaaaga

SEQ ID NO: 98234 - RNA, 19 nt, Homo sapiens
  misc_RNA (1)...(19): siRNA sense strand
gaaauuaacaucgcugaau

SEQ ID NO: 98235 - RNA, 19 nt, Homo sapiens
  misc_RNA (1)...(19): siRNA sense strand
gaauauccugggugaaaua

SEQ ID NO: 98236 - RNA, 19 nt, Homo sapiens
  misc_RNA (1)...(19): siRNA sense strand
gaaccaaagccagauauug

SEQ ID NO: 98237 - RNA, 19 nt, Homo sapiens
  misc_RNA (1)...(19): siRNA sense strand
ccuauagacuucacaaaga

SEQ ID NO: 98238 - RNA, 19 nt, Homo sapiens
  misc_RNA (1)...(19): siRNA sense strand
gucaggaagugcaucaaua

SEQ ID NO: 98239 - RNA, 19 nt, Homo sapiens
  misc_RNA (1)...(19): siRNA sense strand
acacaaugcuagugauuug

SEQ ID NO: 98240 - RNA, 19 nt, Homo sapiens
  misc_RNA (1)...(19): siRNA sense strand
gcuauucacucccugguau

SEQ ID NO: 98241 - RNA, 19 nt, Homo sapiens
  misc_RNA (1)...(19): siRNA sense strand
gggaagagauggaagaacu

SEQ ID NO: 98242 - RNA, 19 nt, Homo sapiens
  misc_RNA (1)...(19): siRNA sense strand
uccaagaaguucaauauug

SEQ ID NO: 98243 - RNA, 19 nt, Homo sapiens
  misc_RNA (1)...(19): siRNA sense strand
cuagugauuugcugauuaa

SEQ ID NO: 98244 - RNA, 19 nt, Homo sapiens
  misc_RNA (1)...(19): siRNA sense strand
aauagugacugggacauua

SEQ ID NO: 98245 - RNA, 19 nt, Homo sapiens
  misc_RNA (1)...(19): siRNA sense strand
gauggaagaacuuaagaaa

SEQ ID NO: 98246 - RNA, 19 nt, Homo sapiens
  misc_RNA (1)...(19): siRNA sense strand
ggagaggaccaacaaauuc

SEQ ID NO: 98247 - RNA, 19 nt, Homo sapiens
  misc_RNA (1)...(19): siRNA sense strand
caucaaacaccgaauggua

SEQ ID NO: 98248 - RNA, 19 nt, Homo sapiens
  misc_RNA (1)...(19): siRNA sense strand
caagagaaaugggcuuuag

SEQ ID NO: 98249 - RNA, 19 nt, Homo sapiens
  misc_RNA (1)...(19): siRNA sense strand
cauagucuguucauuucua

SEQ ID NO: 98250 - RNA, 19 nt, Homo sapiens
  misc_RNA (1)...(19): siRNA sense strand
gcagcaauauucagguuca

SEQ ID NO: 98251 - RNA, 19 nt, Homo sapiens
  misc_RNA (1)...(19): siRNA sense strand
acaaggagaggcacaauuu

SEQ ID NO: 98252 - RNA, 19 nt, Homo sapiens
  misc_RNA (1)...(19): siRNA sense strand
uaagacacuuggucaaugu

SEQ ID NO: 98253 - RNA, 19 nt, Homo sapiens
  misc_RNA (1)...(19): siRNA sense strand
guauauaagcuaccagaaa

SEQ ID NO: 98254 - RNA, 19 nt, Homo sapiens
  misc_RNA (1)...(19): siRNA sense strand
gacaagagguucuguuuug

SEQ ID NO: 98255 - RNA, 19 nt, Homo sapiens
  misc_RNA (1)...(19): siRNA sense strand
cauagaaacuaaugaaagg

SEQ ID NO: 98256 - RNA, 19 nt, Homo sapiens
  misc_RNA (1)...(19): siRNA sense strand
gaaauggagcuaaaugaag

SEQ ID NO: 98257 - RNA, 19 nt, Homo sapiens
  misc_RNA (1)...(19): siRNA sense strand
ggaauauccugggugaaau

SEQ ID NO: 98258 - RNA, 19 nt, Homo sapiens
  misc_RNA (1)...(19): siRNA sense strand
gcaagaaggcacaaaccaa

SEQ ID NO: 98259 - RNA, 19 nt, Homo sapiens
  misc_RNA (1)...(19): siRNA sense strand
cgaguccucucuugauuau

SEQ ID NO: 98260 - RNA, 19 nt, Homo sapiens
  misc_RNA (1)...(19): siRNA sense strand
gaagcuaacagaaggcuau

SEQ ID NO: 98261 - RNA, 19 nt, Homo sapiens
  misc_RNA (1)...(19): siRNA sense strand
uauccugggugaaauacua

SEQ ID NO: 98262 - RNA, 19 nt, Homo sapiens
  misc_RNA (1)...(19): siRNA sense strand
ucagcgcuaugagaaauua

SEQ ID NO: 98263 - RNA, 19 nt, Homo sapiens
  misc_RNA (1)...(19): siRNA sense strand
gaugaaagcgaagaugaaa

SEQ ID NO: 98264 - RNA, 19 nt, Homo sapiens
  misc_RNA (1)...(19): siRNA sense strand
aaauggagcuaaaugaagu

SEQ ID NO: 98265 - RNA, 19 nt, Homo sapiens
  misc_RNA (1)...(19): siRNA sense strand
aagcgaagaugaaauccaa

SEQ ID NO: 98266 - RNA, 19 nt, Homo sapiens
  misc_RNA (1)...(19): siRNA sense strand
aggaagugcaucaauauua

SEQ ID NO: 98267 - RNA, 19 nt, Homo sapiens
  misc_RNA (1)...(19): siRNA sense strand
gggcagcaauauucagguu

SEQ ID NO: 98268 - RNA, 19 nt, Homo sapiens
  misc_RNA (1)...(19): siRNA sense strand
gagagaugcuggaacuucu

SEQ ID NO: 98269 - RNA, 19 nt, Homo sapiens
  misc_RNA (1)...(19): siRNA sense strand
caagaaauggagcuaaaug

SEQ ID NO: 98270 - RNA, 19 nt, Homo sapiens
  misc_RNA (1)...(19): siRNA sense strand
caagaaggcacaaaccaau

SEQ ID NO: 98271 - RNA, 19 nt, Homo sapiens
  misc_RNA (1)...(19): siRNA sense strand
gcaauauucagguucagaa

SEQ ID NO: 98272 - RNA, 19 nt, Homo sapiens
  misc_RNA (1)...(19): siRNA sense strand
cccagacgcugcagucauu

SEQ ID NO: 98273 - RNA, 19 nt, Homo sapiens
  misc_RNA (1)...(19): siRNA sense strand
ggaccaagaucaccccaaa

SEQ ID NO: 98274 - RNA, 19 nt, Homo sapiens
  misc_RNA (1)...(19): siRNA sense strand
caucaaauuccagaacaua

SEQ ID NO: 98275 - RNA, 19 nt, Homo sapiens
  misc_RNA (1)...(19): siRNA sense strand
gaacaucaaauuccagaac

SEQ ID NO: 98276 - RNA, 19 nt, Homo sapiens
  misc_RNA (1)...(19): siRNA sense strand
gauaagacacuuggucaau

SEQ ID NO: 98277 - RNA, 19 nt, Homo sapiens
  misc_RNA (1)...(19): siRNA sense strand
gaaaggccaggaaccauca

SEQ ID NO: 98278 - RNA, 19 nt, Homo sapiens
  misc_RNA (1)...(19): siRNA sense strand
cuucauagucuguucauuu

SEQ ID NO: 98279 - RNA, 19 nt, Homo sapiens
  misc_RNA (1)...(19): siRNA sense strand
ggaugaugaugguacacaa

SEQ ID NO: 98280 - RNA, 19 nt, Homo sapiens
  misc_RNA (1)...(19): siRNA sense strand
caacaucaaacaccgaaug

SEQ ID NO: 98281 - RNA, 19 nt, Homo sapiens
  misc_RNA (1)...(19): siRNA sense strand
ggaugaaagcgaagaugaa

SEQ ID NO: 98282 - RNA, 19 nt, Homo sapiens
  misc_RNA (1)...(19): siRNA sense strand
gaccaacaaauucaucaaa

SEQ ID NO: 98283 - RNA, 19 nt, Homo sapiens
  misc_RNA (1)...(19): siRNA sense strand
ugaaggcuaucucuauaca

SEQ ID NO: 98284 - RNA, 19 nt, Homo sapiens
  misc_RNA (1)...(19): siRNA sense strand
caaauucaucaaagacgua

SEQ ID NO: 98285 - RNA, 19 nt, Homo sapiens
  misc_RNA (1)...(19): siRNA sense strand
gucaugaccuauagacuuc

SEQ ID NO: 98286 - RNA, 19 nt, Homo sapiens
  misc_RNA (1)...(19): siRNA sense strand
gagguucuguuuugacaua

SEQ ID NO: 98287 - RNA, 19 nt, Homo sapiens
  misc_RNA (1)...(19): siRNA sense strand
aaauuaacaucgcugaauc

SEQ ID NO: 98288 - RNA, 19 nt, Homo sapiens
  misc_RNA (1)...(19): siRNA sense strand
uaucagcgcuaugagaaau

SEQ ID NO: 98289 - RNA, 19 nt, Homo sapiens
  misc_RNA (1)...(19): siRNA sense strand
gagaggaccaacaaauuca

SEQ ID NO: 98290 - RNA, 19 nt, Homo sapiens
  misc_RNA (1)...(19): siRNA sense strand
ccacagcccuauaacaaaa

SEQ ID NO: 98291 - RNA, 19 nt, Homo sapiens
  misc_RNA (1)...(19): siRNA sense strand
gucuuggccuuucuucaua

SEQ ID NO: 98292 - RNA, 19 nt, Homo sapiens
  misc_RNA (1)...(19): siRNA sense strand
guacacaaugcuagugauu

SEQ ID NO: 98293 - RNA, 19 nt, Homo sapiens
  misc_RNA (1)...(19): siRNA sense strand
gaugcuggaacuucugaua

SEQ ID NO: 98294 - RNA, 19 nt, Homo sapiens
  misc_RNA (1)...(19): siRNA sense strand
caggacagccaacuauuga

SEQ ID NO: 98295 - RNA, 19 nt, Homo sapiens
  misc_RNA (1)...(19): siRNA sense strand
gaaaaugagaggaugauga

SEQ ID NO: 98296 - RNA, 19 nt, Homo sapiens
  misc_RNA (1)...(19): siRNA sense strand
ugaaagcgaagaugaaauc

SEQ ID NO: 98297 - RNA, 19 nt, Homo sapiens
  misc_RNA (1)...(19): siRNA sense strand
gagaaaugggcuuuaggaa

SEQ ID NO: 98298 - RNA, 19 nt, Homo sapiens
  misc_RNA (1)...(19): siRNA sense strand
auugaaggcuaucucuaua

SEQ ID NO: 98299 - RNA, 19 nt, Homo sapiens
  misc_RNA (1)...(19): siRNA sense strand
aaacaacagcuccaacuca

SEQ ID NO: 98300 - RNA, 19 nt, Homo sapiens
  misc_RNA (1)...(19): siRNA sense strand
gcuggaacuucugauaaga

SEQ ID NO: 98301 - RNA, 19 nt, Homo sapiens
  misc_RNA (1)...(19): siRNA sense strand
uaaaugcccaggagauguu

SEQ ID NO: 98302 - RNA, 19 nt, Homo sapiens
  misc_RNA (1)...(19): siRNA sense strand
agaaauggagcuaaaugaa

SEQ ID NO: 98303 - RNA, 19 nt, Homo sapiens
  misc_RNA (1)...(19): siRNA sense strand
ucaguuugauuucauugga

SEQ ID NO: 98304 - RNA, 19 nt, Homo sapiens
  misc_RNA (1)...(19): siRNA sense strand
uaccacagcccuauaacaa

SEQ ID NO: 98305 - RNA, 19 nt, Homo sapiens
  misc_RNA (1)...(19): siRNA sense strand
ggacagccaacuauugaag

SEQ ID NO: 98306 - RNA, 19 nt, Homo sapiens
  misc_RNA (1)...(19): siRNA sense strand
ggugagagguuuuauucuu

SEQ ID NO: 98307 - RNA, 19 nt, Homo sapiens
  misc_RNA (1)...(19): siRNA sense strand
gaacuggagaggaccaaca

SEQ ID NO: 98308 - RNA, 19 nt, Homo sapiens
  misc_RNA (1)...(19): siRNA sense strand
ggagacacucugacugaug

SEQ ID NO: 98309 - RNA, 19 nt, Homo sapiens
  misc_RNA (1)...(19): siRNA sense strand
guucaggaguccaagaagu

SEQ ID NO: 98310 - RNA, 19 nt, Homo sapiens
  misc_RNA (1)...(19): siRNA sense strand
gcacuuacaccugucuuca

SEQ ID NO: 98311 - RNA, 19 nt, Homo sapiens
  misc_RNA (1)...(19): siRNA sense strand
acuuacaccugucuucaaa

SEQ ID NO: 98312 - RNA, 19 nt, Homo sapiens
  misc_RNA (1)...(19): siRNA sense strand
ucaggaagugcaucaauau

SEQ ID NO: 98313 - RNA, 19 nt, Homo sapiens
  misc_RNA (1)...(19): siRNA sense strand
gcuucaaguuugucaggaa

SEQ ID NO: 98314 - RNA, 19 nt, Homo sapiens
  misc_RNA (1)...(19): siRNA sense strand
gcaagaaauggagcuaaau

SEQ ID NO: 98315 - RNA, 19 nt, Homo sapiens
  misc_RNA (1)...(19): siRNA sense strand
agcaagaaauggagcuaaa

SEQ ID NO: 98316 - RNA, 19 nt, Homo sapiens
  misc_RNA (1)...(19): siRNA sense strand
ccaggacagccaacuauug

SEQ ID NO: 98317 - RNA, 19 nt, Homo sapiens
  misc_RNA (1)...(19): siRNA sense strand
ggaaagaacuucaggaaau

SEQ ID NO: 98318 - RNA, 19 nt, Homo sapiens
  misc_RNA (1)...(19): siRNA sense strand
ugaaugcucugcagaaaua

SEQ ID NO: 98319 - RNA, 19 nt, Homo sapiens
  misc_RNA (1)...(19): siRNA sense strand
gaaagcacauuccguuuau

SEQ ID NO: 98320 - RNA, 19 nt, Homo sapiens
  misc_RNA (1)...(19): siRNA sense strand
gaaagaacuucaggaaauu

SEQ ID NO: 98321 - RNA, 19 nt, Homo sapiens
  misc_RNA (1)...(19): siRNA sense strand
ugaaagaacucauggaaau

SEQ ID NO: 98322 - RNA, 19 nt, Homo sapiens
  misc_RNA (1)...(19): siRNA sense strand
gcagaaauaucccaacugu

SEQ ID NO: 98323 - RNA, 19 nt, Homo sapiens
  misc_RNA (1)...(19): siRNA sense strand
gcugagaaguggaaugaaa

SEQ ID NO: 98324 - RNA, 19 nt, Homo sapiens
  misc_RNA (1)...(19): siRNA sense strand
gcacauuccguuuauaauu

SEQ ID NO: 98325 - RNA, 19 nt, Homo sapiens
  misc_RNA (1)...(19): siRNA sense strand
ccagugaucuucauauuag

SEQ ID NO: 98326 - RNA, 19 nt, Homo sapiens
  misc_RNA (1)...(19): siRNA sense strand
gaaagaacucauggaaaua

SEQ ID NO: 98327 - RNA, 19 nt, Homo sapiens
  misc_RNA (1)...(19): siRNA sense strand
gcagauacacuuaaugaau

SEQ ID NO: 98328 - RNA, 19 nt, Homo sapiens
  misc_RNA (1)...(19): siRNA sense strand
ggaaauagaagaagugagu

SEQ ID NO: 98329 - RNA, 19 nt, Homo sapiens
  misc_RNA (1)...(19): siRNA sense strand
gaagcaagccaacugugua

SEQ ID NO: 98330 - RNA, 19 nt, Homo sapiens
  misc_RNA (1)...(19): siRNA sense strand
ggaaaucacaaggcaguua

SEQ ID NO: 98331 - RNA, 19 nt, Homo sapiens
  misc_RNA (1)...(19): siRNA sense strand
gaaauucacagagagagua

SEQ ID NO: 98332 - RNA, 19 nt, Homo sapiens
  misc_RNA (1)...(19): siRNA sense strand
gaaaucacaaggcaguuaa

SEQ ID NO: 98333 - RNA, 19 nt, Homo sapiens
  misc_RNA (1)...(19): siRNA sense strand
caaauggucuauaaugagu

SEQ ID NO: 98334 - RNA, 19 nt, Homo sapiens
  misc_RNA (1)...(19): siRNA sense strand
accaaacacuucucuauaa

SEQ ID NO: 98335 - RNA, 19 nt, Homo sapiens
  misc_RNA (1)...(19): siRNA sense strand
aggaagagccauuuaauuu

SEQ ID NO: 98336 - RNA, 19 nt, Homo sapiens
  misc_RNA (1)...(19): siRNA sense strand
guaacucuguccuuauuau

SEQ ID NO: 98337 - RNA, 19 nt, Homo sapiens
  misc_RNA (1)...(19): siRNA sense strand
cuacagaagcauuucaaua

SEQ ID NO: 98338 - RNA, 19 nt, Homo sapiens
  misc_RNA (1)...(19): siRNA sense strand
gaggaagagccauuuaauu

SEQ ID NO: 98339 - RNA, 19 nt, Homo sapiens
  misc_RNA (1)...(19): siRNA sense strand
ccaaacacuucucuauaau

SEQ ID NO: 98340 - RNA, 19 nt, Homo sapiens
  misc_RNA (1)...(19): siRNA sense strand
cagaagcauuucaauauca

SEQ ID NO: 98341 - RNA, 19 nt, Homo sapiens
  misc_RNA (1)...(19): siRNA sense strand
gaagagccauuuaauuuuc

SEQ ID NO: 98342 - RNA, 19 nt, Homo sapiens
  misc_RNA (1)...(19): siRNA sense strand
ucacagguacaaagaauuu

SEQ ID NO: 98343 - RNA, 19 nt, Homo sapiens
  misc_RNA (1)...(19): siRNA sense strand
ggucuuacauguagauugg

SEQ ID NO: 98344 - RNA, 19 nt, Homo sapiens
  misc_RNA (1)...(19): siRNA sense strand
gcccagugaucuucauauu

SEQ ID NO: 98345 - RNA, 19 nt, Homo sapiens
  misc_RNA (1)...(19): siRNA sense strand
agucguaaaucaaagagua

SEQ ID NO: 98346 - RNA, 19 nt, Homo sapiens
  misc_RNA (1)...(19): siRNA sense strand
cgucagaguccacauagua

SEQ ID NO: 98347 - RNA, 19 nt, Homo sapiens
  misc_RNA (1)...(19): siRNA sense strand
gagaguaccagcugaugaa

SEQ ID NO: 98348 - RNA, 19 nt, Homo sapiens
  misc_RNA (1)...(19): siRNA sense strand
uaauaaagcccauggaaag

SEQ ID NO: 98349 - RNA, 19 nt, Homo sapiens
  misc_RNA (1)...(19): siRNA sense strand
aguaacagcuuaauucaca

SEQ ID NO: 98350 - RNA, 19 nt, Homo sapiens
  misc_RNA (1)...(19): siRNA sense strand
gcauuucaauaucagcaaa

SEQ ID NO: 98351 - RNA, 19 nt, Homo sapiens
  misc_RNA (1)...(19): siRNA sense strand
aaagaacaguuaucucuac

SEQ ID NO: 98352 - RNA, 19 nt, Homo sapiens
  misc_RNA (1)...(19): siRNA sense strand
ucacaaggcaguuaaaucu

SEQ ID NO: 98353 - RNA, 19 nt, Homo sapiens
  misc_RNA (1)...(19): siRNA sense strand
gcaucgcacccauuuauga

SEQ ID NO: 98354 - RNA, 19 nt, Homo sapiens
  misc_RNA (1)...(19): siRNA sense strand
gaaguggaaugaaaauguu

SEQ ID NO: 98355 - RNA, 19 nt, Homo sapiens
  misc_RNA (1)...(19): siRNA sense strand
uaaccuauuuggagugcaa

SEQ ID NO: 98356 - RNA, 19 nt, Homo sapiens
  misc_RNA (1)...(19): siRNA sense strand
ugaaacugcuuuuggauaa

SEQ ID NO: 98357 - RNA, 19 nt, Homo sapiens
  misc_RNA (1)...(19): siRNA sense strand
cagcaucgcacccauuuau

SEQ ID NO: 98358 - RNA, 19 nt, Homo sapiens
  misc_RNA (1)...(19): siRNA sense strand
gaaguacuacagaagcauu

SEQ ID NO: 98359 - RNA, 19 nt, Homo sapiens
  misc_RNA (1)...(19): siRNA sense strand
uaagugagcugcugaaaag

SEQ ID NO: 98360 - RNA, 19 nt, Homo sapiens
  misc_RNA (1)...(19): siRNA sense strand
caaaaucgcccuaaaggaa

SEQ ID NO: 98361 - RNA, 19 nt, Homo sapiens
  misc_RNA (1)...(19): siRNA sense strand
gcagaucaaugacaaaauc

SEQ ID NO: 98362 - RNA, 19 nt, Homo sapiens
  misc_RNA (1)...(19): siRNA sense strand
uaugaaugcucugcagaaa

SEQ ID NO: 98363 - RNA, 19 nt, Homo sapiens
  misc_RNA (1)...(19): siRNA sense strand
ggaagcaagccaacugugu

SEQ ID NO: 98364 - RNA, 19 nt, Homo sapiens
  misc_RNA (1)...(19): siRNA sense strand
gcaagaaguacuacagaag

SEQ ID NO: 98365 - RNA, 19 nt, Homo sapiens
  misc_RNA (1)...(19): siRNA sense strand
aaaccaaacacuucucuau

SEQ ID NO: 98366 - RNA, 19 nt, Homo sapiens
  misc_RNA (1)...(19): siRNA sense strand
guaguuggagauaaaguuu

SEQ ID NO: 98367 - RNA, 19 nt, Homo sapiens
  misc_RNA (1)...(19): siRNA sense strand
ucaaagaguaacagcuuaa

SEQ ID NO: 98368 - RNA, 19 nt, Homo sapiens
  misc_RNA (1)...(19): siRNA sense strand
ggaagagccauuuaauuuu

SEQ ID NO: 98369 - RNA, 19 nt, Homo sapiens
  misc_RNA (1)...(19): siRNA sense strand
uauuguacauggucuauca

SEQ ID NO: 98370 - RNA, 19 nt, Homo sapiens
  misc_RNA (1)...(19): siRNA sense strand
cggcagauacacuuaauga

SEQ ID NO: 98371 - RNA, 19 nt, Homo sapiens
  misc_RNA (1)...(19): siRNA sense strand
ggacucgaaagcaaauauu

SEQ ID NO: 98372 - RNA, 19 nt, Homo sapiens
  misc_RNA (1)...(19): siRNA sense strand
ugccguagaucuaauggaa

SEQ ID NO: 98373 - RNA, 19 nt, Homo sapiens
  misc_RNA (1)...(19): siRNA sense strand
gaugcuugcuuuaaaucga

SEQ ID NO: 98374 - RNA, 19 nt, Homo sapiens
  misc_RNA (1)...(19): siRNA sense strand
acagaagcauuucaauauc

SEQ ID NO: 98375 - RNA, 19 nt, Homo sapiens
  misc_RNA (1)...(19): siRNA sense strand
gaaaauguaguuggagaua

SEQ ID NO: 98376 - RNA, 19 nt, Homo sapiens
  misc_RNA (1)...(19): siRNA sense strand
aagcacauuccguuuauaa

SEQ ID NO: 98377 - RNA, 19 nt, Homo sapiens
  misc_RNA (1)...(19): siRNA sense strand
agauagaagugugcaagaa

SEQ ID NO: 98378 - RNA, 19 nt, Homo sapiens
  misc_RNA (1)...(19): siRNA sense strand
guuauuggucuuacaugua

SEQ ID NO: 98379 - RNA, 19 nt, Homo sapiens
  misc_RNA (1)...(19): siRNA sense strand
uuuggaagcuuugcugaaa

SEQ ID NO: 98380 - RNA, 19 nt, Homo sapiens
  misc_RNA (1)...(19): siRNA sense strand
gcaacauccucacuaagcu

SEQ ID NO: 98381 - RNA, 19 nt, Homo sapiens
  misc_RNA (1)...(19): siRNA sense strand
aagaguaacagcuuaauuc

SEQ ID NO: 98382 - RNA, 19 nt, Homo sapiens
  misc_RNA (1)...(19): siRNA sense strand
aaccaaacacuucucuaua

SEQ ID NO: 98383 - RNA, 19 nt, Homo sapiens
  misc_RNA (1)...(19): siRNA sense strand
gcaguuaaaucuggaaaau

SEQ ID NO: 98384 - RNA, 19 nt, Homo sapiens
  misc_RNA (1)...(19): siRNA sense strand
gaacuucaggaaauucaca

SEQ ID NO: 98385 - RNA, 19 nt, Homo sapiens
  misc_RNA (1)...(19): siRNA sense strand
gagcagucguaaaucaaag

SEQ ID NO: 98386 - RNA, 19 nt, Homo sapiens
  misc_RNA (1)...(19): siRNA sense strand
guacauggucuaucagucu

SEQ ID NO: 98387 - RNA, 19 nt, Homo sapiens
  misc_RNA (1)...(19): siRNA sense strand
gcuauugaugcuugcuuua

SEQ ID NO: 98388 - RNA, 19 nt, Homo sapiens
  misc_RNA (1)...(19): siRNA sense strand
cugcagaguuuccagacaa

SEQ ID NO: 98389 - RNA, 19 nt, Homo sapiens
  misc_RNA (1)...(19): siRNA sense strand
uuaauaaagcccauggaaa

SEQ ID NO: 98390 - RNA, 19 nt, Homo sapiens
  misc_RNA (1)...(19): siRNA sense strand
gagugcaaguacaauacaa

SEQ ID NO: 98391 - RNA, 19 nt, Homo sapiens
  misc_RNA (1)...(19): siRNA sense strand
gaacucauggaaauagaag

SEQ ID NO: 98392 - RNA, 19 nt, Homo sapiens
  misc_RNA (1)...(19): siRNA sense strand
uucaguaucucucagaaga

SEQ ID NO: 98393 - RNA, 19 nt, Homo sapiens
  misc_RNA (1)...(19): siRNA sense strand
uuauuggucuuacauguag

SEQ ID NO: 98394 - RNA, 19 nt, Homo sapiens
  misc_RNA (1)...(19): siRNA sense strand
ugggcaacauccucacuaa

SEQ ID NO: 98395 - RNA, 19 nt, Homo sapiens
  misc_RNA (1)...(19): siRNA sense strand
uaacagcaucgcacccauu

SEQ ID NO: 98396 - RNA, 19 nt, Homo sapiens
  misc_RNA (1)...(19): siRNA sense strand
ggucauuacacaugcuauu

SEQ ID NO: 98397 - RNA, 19 nt, Homo sapiens
  misc_RNA (1)...(19): siRNA sense strand
ucacacagagugccuuuca

SEQ ID NO: 98398 - RNA, 19 nt, Homo sapiens
  misc_RNA (1)...(19): siRNA sense strand
gauagaagugugcaagaag

SEQ ID NO: 98399 - RNA, 19 nt, Homo sapiens
  misc_RNA (1)...(19): siRNA sense strand
agagugccuuucacaggua

SEQ ID NO: 98400 - RNA, 19 nt, Homo sapiens
  misc_RNA (1)...(19): siRNA sense strand
cccagugaucuucauauua

SEQ ID NO: 98401 - RNA, 19 nt, Homo sapiens
  misc_RNA (1)...(19): siRNA sense strand
ugacaucuaugaggaagag

SEQ ID NO: 98402 - RNA, 19 nt, Homo sapiens
  misc_RNA (1)...(19): siRNA sense strand
gcauggacucgaaagcaaa

SEQ ID NO: 98403 - RNA, 19 nt, Homo sapiens
  misc_RNA (1)...(19): siRNA sense strand
ugcaagaaguacuacagaa

SEQ ID NO: 98404 - RNA, 19 nt, Homo sapiens
  misc_RNA (1)...(19): siRNA sense strand
agagugaagucaagauuuu

SEQ ID NO: 98405 - RNA, 19 nt, Homo sapiens
  misc_RNA (1)...(19): siRNA sense strand
caaguacaauacaaacacu

SEQ ID NO: 98406 - RNA, 19 nt, Homo sapiens
  misc_RNA (1)...(19): siRNA sense strand
gaaagauuuugucgucaga

SEQ ID NO: 98407 - RNA, 19 nt, Homo sapiens
  misc_RNA (1)...(19): siRNA sense strand
gcaaguacaauacaaacac

SEQ ID NO: 98408 - RNA, 19 nt, Homo sapiens
  misc_RNA (1)...(19): siRNA sense strand
aaagcacauuccguuuaua

SEQ ID NO: 98409 - RNA, 19 nt, Homo sapiens
  misc_RNA (1)...(19): siRNA sense strand
aaucaaagaguaacagcuu

SEQ ID NO: 98410 - RNA, 19 nt, Homo sapiens
  misc_RNA (1)...(19): siRNA sense strand
aaagagugaagucaagauu

SEQ ID NO: 98411 - RNA, 19 nt, Homo sapiens
  misc_RNA (1)...(19): siRNA sense strand
gcaguugcccagugaucuu

SEQ ID NO: 98412 - RNA, 19 nt, Homo sapiens
  misc_RNA (1)...(19): siRNA sense strand
ugaggaagagccauuuaau

SEQ ID NO: 98413 - RNA, 19 nt, Homo sapiens
  misc_RNA (1)...(19): siRNA sense strand
cauuacacaugcuauugau

SEQ ID NO: 98414 - RNA, 19 nt, Homo sapiens
  misc_RNA (1)...(19): siRNA sense strand
caaacacuucucuauaauc

SEQ ID NO: 98415 - RNA, 19 nt, Homo sapiens
  misc_RNA (1)...(19): siRNA sense strand
uaaagcccauggaaagaac

SEQ ID NO: 98416 - RNA, 19 nt, Homo sapiens
  misc_RNA (1)...(19): siRNA sense strand
uuucacagguacaaagaau

SEQ ID NO: 98417 - RNA, 19 nt, Homo sapiens
  misc_RNA (1)...(19): siRNA sense strand
ggaaagaacuucaggaaau

SEQ ID NO: 98418 - RNA, 19 nt, Homo sapiens
  misc_RNA (1)...(19): siRNA sense strand
ugaaugcucugcagaaaua

SEQ ID NO: 98419 - RNA, 19 nt, Homo sapiens
  misc_RNA (1)...(19): siRNA sense strand
gaaagcacauuccguuuau

SEQ ID NO: 98420 - RNA, 19 nt, Homo sapiens
  misc_RNA (1)...(19): siRNA sense strand
gaaagaacuucaggaaauu

SEQ ID NO: 98421 - RNA, 19 nt, Homo sapiens
  misc_RNA (1)...(19): siRNA sense strand
ugaaagaacucauggaaau

SEQ ID NO: 98422 - RNA, 19 nt, Homo sapiens
  misc_RNA (1)...(19): siRNA sense strand
gcagaaauaucccaacugu

SEQ ID NO: 98423 - RNA, 19 nt, Homo sapiens
  misc_RNA (1)...(19): siRNA sense strand
gcugagaaguggaaugaaa

SEQ ID NO: 98424 - RNA, 19 nt, Homo sapiens
  misc_RNA (1)...(19): siRNA sense strand
gcacauuccguuuauaauu

SEQ ID NO: 98425 - RNA, 19 nt, Homo sapiens
  misc_RNA (1)...(19): siRNA sense strand
ccagugaucuucauauuag

SEQ ID NO: 98426 - RNA, 19 nt, Homo sapiens
  misc_RNA (1)...(19): siRNA sense strand
gaaagaacucauggaaaua

SEQ ID NO: 98427 - RNA, 19 nt, Homo sapiens
  misc_RNA (1)...(19): siRNA sense strand
gcagauacacuuaaugaau

SEQ ID NO: 98428 - RNA, 19 nt, Homo sapiens
  misc_RNA (1)...(19): siRNA sense strand
ggaaauagaagaagugagu

SEQ ID NO: 98429 - RNA, 19 nt, Homo sapiens
  misc_RNA (1)...(19): siRNA sense strand
gaagcaagccaacugugua

SEQ ID NO: 98430 - RNA, 19 nt, Homo sapiens
  misc_RNA (1)...(19): siRNA sense strand
ggaaaucacaaggcaguua

SEQ ID NO: 98431 - RNA, 19 nt, Homo sapiens
  misc_RNA (1)...(19): siRNA sense strand
gaaauucacagagagagua

SEQ ID NO: 98432 - RNA, 19 nt, Homo sapiens
  misc_RNA (1)...(19): siRNA sense strand
gaaaucacaaggcaguuaa

SEQ ID NO: 98433 - RNA, 19 nt, Homo sapiens
  misc_RNA (1)...(19): siRNA sense strand
caaauggucuauaaugagu

SEQ ID NO: 98434 - RNA, 19 nt, Homo sapiens
  misc_RNA (1)...(19): siRNA sense strand
accaaacacuucucuauaa

SEQ ID NO: 98435 - RNA, 19 nt, Homo sapiens
  misc_RNA (1)...(19): siRNA sense strand
aggaagagccauuuaauuu

SEQ ID NO: 98436 - RNA, 19 nt, Homo sapiens
  misc_RNA (1)...(19): siRNA sense strand
guaacucuguccuuauuau

SEQ ID NO: 98437 - RNA, 19 nt, Homo sapiens
  misc_RNA (1)...(19): siRNA sense strand
cuacagaagcauuucaaua

SEQ ID NO: 98438 - RNA, 19 nt, Homo sapiens
  misc_RNA (1)...(19): siRNA sense strand
gaggaagagccauuuaauu

SEQ ID NO: 98439 - RNA, 19 nt, Homo sapiens
  misc_RNA (1)...(19): siRNA sense strand
ccaaacacuucucuauaau

SEQ ID NO: 98440 - RNA, 19 nt, Homo sapiens
  misc_RNA (1)...(19): siRNA sense strand
cagaagcauuucaauauca

SEQ ID NO: 98441 - RNA, 19 nt, Homo sapiens
  misc_RNA (1)...(19): siRNA sense strand
gaagagccauuuaauuuuc

SEQ ID NO: 98442 - RNA, 19 nt, Homo sapiens
  misc_RNA (1)...(19): siRNA sense strand
ucacagguacaaagaauuu

SEQ ID NO: 98443 - RNA, 19 nt, Homo sapiens
  misc_RNA (1)...(19): siRNA sense strand
ggucuuacauguagauugg

SEQ ID NO: 98444 - RNA, 19 nt, Homo sapiens
  misc_RNA (1)...(19): siRNA sense strand
gcccagugaucuucauauu

SEQ ID NO: 98445 - RNA, 19 nt, Homo sapiens
  misc_RNA (1)...(19): siRNA sense strand
agucguaaaucaaagagua

SEQ ID NO: 98446 - RNA, 19 nt, Homo sapiens
  misc_RNA (1)...(19): siRNA sense strand
cgucagaguccacauagua

SEQ ID NO: 98447 - RNA, 19 nt, Homo sapiens
  misc_RNA (1)...(19): siRNA sense strand
gagaguaccagcugaugaa

SEQ ID NO: 98448 - RNA, 19 nt, Homo sapiens
  misc_RNA (1)...(19): siRNA sense strand
uaauaaagcccauggaaag

SEQ ID NO: 98449 - RNA, 19 nt, Homo sapiens
  misc_RNA (1)...(19): siRNA sense strand
aguaacagcuuaauucaca

SEQ ID NO: 98450 - RNA, 19 nt, Homo sapiens
  misc_RNA (1)...(19): siRNA sense strand
gcauuucaauaucagcaaa

SEQ ID NO: 98451 - RNA, 19 nt, Homo sapiens
  misc_RNA (1)...(19): siRNA sense strand
aaagaacaguuaucucuac

SEQ ID NO: 98452 - RNA, 19 nt, Homo sapiens
  misc_RNA (1)...(19): siRNA sense strand
ucacaaggcaguuaaaucu

SEQ ID NO: 98453 - RNA, 19 nt, Homo sapiens
  misc_RNA (1)...(19): siRNA sense strand
gcaucgcacccauuuauga

SEQ ID NO: 98454 - RNA, 19 nt, Homo sapiens
  misc_RNA (1)...(19): siRNA sense strand
gaaguggaaugaaaauguu

SEQ ID NO: 98455 - RNA, 19 nt, Homo sapiens
  misc_RNA (1)...(19): siRNA sense strand
uaaccuauuuggagugcaa

SEQ ID NO: 98456 - RNA, 19 nt, Homo sapiens
  misc_RNA (1)...(19): siRNA sense strand
ugaaacugcuuuuggauaa

SEQ ID NO: 98457 - RNA, 19 nt, Homo sapiens
  misc_RNA (1)...(19): siRNA sense strand
cagcaucgcacccauuuau

SEQ ID NO: 98458 - RNA, 19 nt, Homo sapiens
  misc_RNA (1)...(19): siRNA sense strand
gaaguacuacagaagcauu

SEQ ID NO: 98459 - RNA, 19 nt, Homo sapiens
  misc_RNA (1)...(19): siRNA sense strand
uaagugagcugcugaaaag

SEQ ID NO: 98460 - RNA, 19 nt, Homo sapiens
  misc_RNA (1)...(19): siRNA sense strand
caaaaucgcccuaaaggaa

SEQ ID NO: 98461 - RNA, 19 nt, Homo sapiens
  misc_RNA (1)...(19): siRNA sense strand
gcagaucaaugacaaaauc

SEQ ID NO: 98462 - RNA, 19 nt, Homo sapiens
  misc_RNA (1)...(19): siRNA sense strand
uaugaaugcucugcagaaa

SEQ ID NO: 98463 - RNA, 19 nt, Homo sapiens
  misc_RNA (1)...(19): siRNA sense strand
ggaagcaagccaacugugu

SEQ ID NO: 98464 - RNA, 19 nt, Homo sapiens
  misc_RNA (1)...(19): siRNA sense strand
gcaagaaguacuacagaag

SEQ ID NO: 98465 - RNA, 19 nt, Homo sapiens
  misc_RNA (1)...(19): siRNA sense strand
aaaccaaacacuucucuau

SEQ ID NO: 98466 - RNA, 19 nt, Homo sapiens
  misc_RNA (1)...(19): siRNA sense strand
guaguuggagauaaaguuu

SEQ ID NO: 98467 - RNA, 19 nt, Homo sapiens
  misc_RNA (1)...(19): siRNA sense strand
ucaaagaguaacagcuuaa

SEQ ID NO: 98468 - RNA, 19 nt, Homo sapiens
  misc_RNA (1)...(19): siRNA sense strand
ggaagagccauuuaauuuu

SEQ ID NO: 98469 - RNA, 19 nt, Homo sapiens
  misc_RNA (1)...(19): siRNA sense strand
uauuguacauggucuauca

SEQ ID NO: 98470 - RNA, 19 nt, Homo sapiens
  misc_RNA (1)...(19): siRNA sense strand
cggcagauacacuuaauga

SEQ ID NO: 98471 - RNA, 19 nt, Homo sapiens
  misc_RNA (1)...(19): siRNA sense strand
ggacucgaaagcaaauauu

SEQ ID NO: 98472 - RNA, 19 nt, Homo sapiens
  misc_RNA (1)...(19): siRNA sense strand
ugccguagaucuaauggaa

SEQ ID NO: 98473 - RNA, 19 nt, Homo sapiens
  misc_RNA (1)...(19): siRNA sense strand
gaugcuugcuuuaaaucga

SEQ ID NO: 98474 - RNA, 19 nt, Homo sapiens
  misc_RNA (1)...(19): siRNA sense strand
acagaagcauuucaauauc

SEQ ID NO: 98475 - RNA, 19 nt, Homo sapiens
  misc_RNA (1)...(19): siRNA sense strand
gaaaauguaguuggagaua

SEQ ID NO: 98476 - RNA, 19 nt, Homo sapiens
  misc_RNA (1)...(19): siRNA sense strand
aagcacauuccguuuauaa

SEQ ID NO: 98477 - RNA, 19 nt, Homo sapiens
  misc_RNA (1)...(19): siRNA sense strand
agauagaagugugcaagaa

SEQ ID NO: 98478 - RNA, 19 nt, Homo sapiens
  misc_RNA (1)...(19): siRNA sense strand
guuauuggucuuacaugua

SEQ ID NO: 98479 - RNA, 19 nt, Homo sapiens
  misc_RNA (1)...(19): siRNA sense strand
uuuggaagcuuugcugaaa

SEQ ID NO: 98480 - RNA, 19 nt, Homo sapiens
  misc_RNA (1)...(19): siRNA sense strand
gcaacauccucacuaagcu

SEQ ID NO: 98481 - RNA, 19 nt, Homo sapiens
  misc_RNA (1)...(19): siRNA sense strand
aagaguaacagcuuaauuc

SEQ ID NO: 98482 - RNA, 19 nt, Homo sapiens
  misc_RNA (1)...(19): siRNA sense strand
aaccaaacacuucucuaua

SEQ ID NO: 98483 - RNA, 19 nt, Homo sapiens
  misc_RNA (1)...(19): siRNA sense strand
gcaguuaaaucuggaaaau

SEQ ID NO: 98484 - RNA, 19 nt, Homo sapiens
  misc_RNA (1)...(19): siRNA sense strand
gaacuucaggaaauucaca

SEQ ID NO: 98485 - RNA, 19 nt, Homo sapiens
  misc_RNA (1)...(19): siRNA sense strand
gagcagucguaaaucaaag

SEQ ID NO: 98486 - RNA, 19 nt, Homo sapiens
  misc_RNA (1)...(19): siRNA sense strand
guacauggucuaucagucu

SEQ ID NO: 98487 - RNA, 19 nt, Homo sapiens
  misc_RNA (1)...(19): siRNA sense strand
gcuauugaugcuugcuuua

SEQ ID NO: 98488 - RNA, 19 nt, Homo sapiens
  misc_RNA (1)...(19): siRNA sense strand
cugcagaguuuccagacaa

SEQ ID NO: 98489 - RNA, 19 nt, Homo sapiens
  misc_RNA (1)...(19): siRNA sense strand
uuaauaaagcccauggaaa

SEQ ID NO: 98490 - RNA, 19 nt, Homo sapiens
  misc_RNA (1)...(19): siRNA sense strand
gagugcaaguacaauacaa

SEQ ID NO: 98491 - RNA, 19 nt, Homo sapiens
  misc_RNA (1)...(19): siRNA sense strand
gaacucauggaaauagaag

SEQ ID NO: 98492 - RNA, 19 nt, Homo sapiens
  misc_RNA (1)...(19): siRNA sense strand
uucaguaucucucagaaga

SEQ ID NO: 98493 - RNA, 19 nt, Homo sapiens
  misc_RNA (1)...(19): siRNA sense strand
uuauuggucuuacauguag

SEQ ID NO: 98494 - RNA, 19 nt, Homo sapiens
  misc_RNA (1)...(19): siRNA sense strand
ugggcaacauccucacuaa

SEQ ID NO: 98495 - RNA, 19 nt, Homo sapiens
  misc_RNA (1)...(19): siRNA sense strand
uaacagcaucgcacccauu

SEQ ID NO: 98496 - RNA, 19 nt, Homo sapiens
  misc_RNA (1)...(19): siRNA sense strand
ggucauuacacaugcuauu

SEQ ID NO: 98497 - RNA, 19 nt, Homo sapiens
  misc_RNA (1)...(19): siRNA sense strand
ucacacagagugccuuuca

SEQ ID NO: 98498 - RNA, 19 nt, Homo sapiens
  misc_RNA (1)...(19): siRNA sense strand
gauagaagugugcaagaag

SEQ ID NO: 98499 - RNA, 19 nt, Homo sapiens
  misc_RNA (1)...(19): siRNA sense strand
agagugccuuucacaggua

SEQ ID NO: 98500 - RNA, 19 nt, Homo sapiens
  misc_RNA (1)...(19): siRNA sense strand
cccagugaucuucauauua

SEQ ID NO: 98501 - RNA, 19 nt, Homo sapiens
  misc_RNA (1)...(19): siRNA sense strand
ugacaucuaugaggaagag

SEQ ID NO: 98502 - RNA, 19 nt, Homo sapiens
  misc_RNA (1)...(19): siRNA sense strand
gcauggacucgaaagcaaa

SEQ ID NO: 98503 - RNA, 19 nt, Homo sapiens
  misc_RNA (1)...(19): siRNA sense strand
ugcaagaaguacuacagaa

SEQ ID NO: 98504 - RNA, 19 nt, Homo sapiens
  misc_RNA (1)...(19): siRNA sense strand
agagugaagucaagauuuu

SEQ ID NO: 98505 - RNA, 19 nt, Homo sapiens
  misc_RNA (1)...(19): siRNA sense strand
caaguacaauacaaacacu

SEQ ID NO: 98506 - RNA, 19 nt, Homo sapiens
  misc_RNA (1)...(19): siRNA sense strand
gaaagauuuugucgucaga

SEQ ID NO: 98507 - RNA, 19 nt, Homo sapiens
  misc_RNA (1)...(19): siRNA sense strand
gcaaguacaauacaaacac

SEQ ID NO: 98508 - RNA, 19 nt, Homo sapiens
  misc_RNA (1)...(19): siRNA sense strand
aaagcacauuccguuuaua

SEQ ID NO: 98509 - RNA, 19 nt, Homo sapiens
  misc_RNA (1)...(19): siRNA sense strand
aaucaaagaguaacagcuu

SEQ ID NO: 98510 - RNA, 19 nt, Homo sapiens
  misc_RNA (1)...(19): siRNA sense strand
aaagagugaagucaagauu

SEQ ID NO: 98511 - RNA, 19 nt, Homo sapiens
  misc_RNA (1)...(19): siRNA sense strand
gcaguugcccagugaucuu

SEQ ID NO: 98512 - RNA, 19 nt, Homo sapiens
  misc_RNA (1)...(19): siRNA sense strand
ugaggaagagccauuuaau

SEQ ID NO: 98513 - RNA, 19 nt, Homo sapiens
  misc_RNA (1)...(19): siRNA sense strand
cauuacacaugcuauugau

SEQ ID NO: 98514 - RNA, 19 nt, Homo sapiens
  misc_RNA (1)...(19): siRNA sense strand
caaacacuucucuauaauc

SEQ ID NO: 98515 - RNA, 19 nt, Homo sapiens
  misc_RNA (1)...(19): siRNA sense strand
uaaagcccauggaaagaac

SEQ ID NO: 98516 - RNA, 19 nt, Homo sapiens
  misc_RNA (1)...(19): siRNA sense strand
uuucacagguacaaagaau

SEQ ID NO: 98517 - RNA, 19 nt, Homo sapiens
  misc_RNA (1)...(19): siRNA sense strand
ggaaagaacuucaggaaau

SEQ ID NO: 98518 - RNA, 19 nt, Homo sapiens
  misc_RNA (1)...(19): siRNA sense strand
ugaaugcucugcagaaaua

SEQ ID NO: 98519 - RNA, 19 nt, Homo sapiens
  misc_RNA (1)...(19): siRNA sense strand
gaaagcacauuccguuuau

SEQ ID NO: 98520 - RNA, 19 nt, Homo sapiens
  misc_RNA (1)...(19): siRNA sense strand
gaaagaacuucaggaaauu

SEQ ID NO: 98521 - RNA, 19 nt, Homo sapiens
  misc_RNA (1)...(19): siRNA sense strand
ugaaagaacucauggaaau

SEQ ID NO: 98522 - RNA, 19 nt, Homo sapiens
  misc_RNA (1)...(19): siRNA sense strand
gcagaaauaucccaacugu

SEQ ID NO: 98523 - RNA, 19 nt, Homo sapiens
  misc_RNA (1)...(19): siRNA sense strand
gcugagaaguggaaugaaa

SEQ ID NO: 98524 - RNA, 19 nt, Homo sapiens
  misc_RNA (1)...(19): siRNA sense strand
gcacauuccguuuauaauu

SEQ ID NO: 98525 - RNA, 19 nt, Homo sapiens
  misc_RNA (1)...(19): siRNA sense strand
ccagugaucuucauauuag

SEQ ID NO: 98526 - RNA, 19 nt, Homo sapiens
  misc_RNA (1)...(19): siRNA sense strand
gaaagaacucauggaaaua

SEQ ID NO: 98527 - RNA, 19 nt, Homo sapiens
  misc_RNA (1)...(19): siRNA sense strand
gcagauacacuuaaugaau

SEQ ID NO: 98528 - RNA, 19 nt, Homo sapiens
  misc_RNA (1)...(19): siRNA sense strand
ggaaauagaagaagugagu

SEQ ID NO: 98529 - RNA, 19 nt, Homo sapiens
  misc_RNA (1)...(19): siRNA sense strand
gaagcaagccaacugugua

SEQ ID NO: 98530 - RNA, 19 nt, Homo sapiens
  misc_RNA (1)...(19): siRNA sense strand
ggaaaucacaaggcaguua

SEQ ID NO: 98531 - RNA, 19 nt, Homo sapiens
  misc_RNA (1)...(19): siRNA sense strand
gaaauucacagagagagua

SEQ ID NO: 98532 - RNA, 19 nt, Homo sapiens
  misc_RNA (1)...(19): siRNA sense strand
gaaaucacaaggcaguuaa

SEQ ID NO: 98533 - RNA, 19 nt, Homo sapiens
  misc_RNA (1)...(19): siRNA sense strand
caaauggucuauaaugagu

SEQ ID NO: 98534 - RNA, 19 nt, Homo sapiens
  misc_RNA (1)...(19): siRNA sense strand
accaaacacuucucuauaa

SEQ ID NO: 98535 - RNA, 19 nt, Homo sapiens
  misc_RNA (1)...(19): siRNA sense strand
aggaagagccauuuaauuu

SEQ ID NO: 98536 - RNA, 19 nt, Homo sapiens
  misc_RNA (1)...(19): siRNA sense strand
guaacucuguccuuauuau

SEQ ID NO: 98537 - RNA, 19 nt, Homo sapiens
  misc_RNA (1)...(19): siRNA sense strand
cuacagaagcauuucaaua

SEQ ID NO: 98538 - RNA, 19 nt, Homo sapiens
  misc_RNA (1)...(19): siRNA sense strand
gaggaagagccauuuaauu

SEQ ID NO: 98539 - RNA, 19 nt, Homo sapiens
  misc_RNA (1)...(19): siRNA sense strand
ccaaacacuucucuauaau

SEQ ID NO: 98540 - RNA, 19 nt, Homo sapiens
  misc_RNA (1)...(19): siRNA sense strand
cagaagcauuucaauauca

SEQ ID NO: 98541 - RNA, 19 nt, Homo sapiens
  misc_RNA (1)...(19): siRNA sense strand
gaagagccauuuaauuuuc

SEQ ID NO: 98542 - RNA, 19 nt, Homo sapiens
  misc_RNA (1)...(19): siRNA sense strand
ucacagguacaaagaauuu

SEQ ID NO: 98543 - RNA, 19 nt, Homo sapiens
  misc_RNA (1)...(19): siRNA sense strand
ggucuuacauguagauugg

SEQ ID NO: 98544 - RNA, 19 nt, Homo sapiens
  misc_RNA (1)...(19): siRNA sense strand
gcccagugaucuucauauu

SEQ ID NO: 98545 - RNA, 19 nt, Homo sapiens
  misc_RNA (1)...(19): siRNA sense strand
agucguaaaucaaagagua

SEQ ID NO: 98546 - RNA, 19 nt, Homo sapiens
  misc_RNA (1)...(19): siRNA sense strand
cgucagaguccacauagua

SEQ ID NO: 98547 - RNA, 19 nt, Homo sapiens
  misc_RNA (1)...(19): siRNA sense strand
gagaguaccagcugaugaa

SEQ ID NO: 98548 - RNA, 19 nt, Homo sapiens
  misc_RNA (1)...(19): siRNA sense strand
uaauaaagcccauggaaag

SEQ ID NO: 98549 - RNA, 19 nt, Homo sapiens
  misc_RNA (1)...(19): siRNA sense strand
aguaacagcuuaauucaca

SEQ ID NO: 98550 - RNA, 19 nt, Homo sapiens
  misc_RNA (1)...(19): siRNA sense strand
gcauuucaauaucagcaaa

SEQ ID NO: 98551 - RNA, 19 nt, Homo sapiens
  misc_RNA (1)...(19): siRNA sense strand
aaagaacaguuaucucuac

SEQ ID NO: 98552 - RNA, 19 nt, Homo sapiens
  misc_RNA (1)...(19): siRNA sense strand
ucacaaggcaguuaaaucu

SEQ ID NO: 98553 - RNA, 19 nt, Homo sapiens
  misc_RNA (1)...(19): siRNA sense strand
gcaucgcacccauuuauga

SEQ ID NO: 98554 - RNA, 19 nt, Homo sapiens
  misc_RNA (1)...(19): siRNA sense strand
gaaguggaaugaaaauguu

SEQ ID NO: 98555 - RNA, 19 nt, Homo sapiens
  misc_RNA (1)...(19): siRNA sense strand
uaaccuauuuggagugcaa

SEQ ID NO: 98556 - RNA, 19 nt, Homo sapiens
  misc_RNA (1)...(19): siRNA sense strand
ugaaacugcuuuuggauaa

SEQ ID NO: 98557 - RNA, 19 nt, Homo sapiens
  misc_RNA (1)...(19): siRNA sense strand
cagcaucgcacccauuuau

SEQ ID NO: 98558 - RNA, 19 nt, Homo sapiens
  misc_RNA (1)...(19): siRNA sense strand
gaaguacuacagaagcauu

SEQ ID NO: 98559 - RNA, 19 nt, Homo sapiens
  misc_RNA (1)...(19): siRNA sense strand
uaagugagcugcugaaaag

SEQ ID NO: 98560 - RNA, 19 nt, Homo sapiens
  misc_RNA (1)...(19): siRNA sense strand
caaaaucgcccuaaaggaa

SEQ ID NO: 98561 - RNA, 19 nt, Homo sapiens
  misc_RNA (1)...(19): siRNA sense strand
gcagaucaaugacaaaauc

SEQ ID NO: 98562 - RNA, 19 nt, Homo sapiens
  misc_RNA (1)...(19): siRNA sense strand
uaugaaugcucugcagaaa

SEQ ID NO: 98563 - RNA, 19 nt, Homo sapiens
  misc_RNA (1)...(19): siRNA sense strand
ggaagcaagccaacugugu

SEQ ID NO: 98564 - RNA, 19 nt, Homo sapiens
  misc_RNA (1)...(19): siRNA sense strand
gcaagaaguacuacagaag

SEQ ID NO: 98565 - RNA, 19 nt, Homo sapiens
  misc_RNA (1)...(19): siRNA sense strand
aaaccaaacacuucucuau

SEQ ID NO: 98566 - RNA, 19 nt, Homo sapiens
  misc_RNA (1)...(19): siRNA sense strand
guaguuggagauaaaguuu

SEQ ID NO: 98567 - RNA, 19 nt, Homo sapiens
  misc_RNA (1)...(19): siRNA sense strand
ucaaagaguaacagcuuaa

SEQ ID NO: 98568 - RNA, 19 nt, Homo sapiens
  misc_RNA (1)...(19): siRNA sense strand
ggaagagccauuuaauuuu

SEQ ID NO: 98569 - RNA, 19 nt, Homo sapiens
  misc_RNA (1)...(19): siRNA sense strand
uauuguacauggucuauca

SEQ ID NO: 98570 - RNA, 19 nt, Homo sapiens
  misc_RNA (1)...(19): siRNA sense strand
cggcagauacacuuaauga

SEQ ID NO: 98571 - RNA, 19 nt, Homo sapiens
  misc_RNA (1)...(19): siRNA sense strand
ggacucgaaagcaaauauu

SEQ ID NO: 98572 - RNA, 19 nt, Homo sapiens
  misc_RNA (1)...(19): siRNA sense strand
ugccguagaucuaauggaa

SEQ ID NO: 98573 - RNA, 19 nt, Homo sapiens
  misc_RNA (1)...(19): siRNA sense strand
gaugcuugcuuuaaaucga

SEQ ID NO: 98574 - RNA, 19 nt, Homo sapiens
  misc_RNA (1)...(19): siRNA sense strand
acagaagcauuucaauauc

SEQ ID NO: 98575 - RNA, 19 nt, Homo sapiens
  misc_RNA (1)...(19): siRNA sense strand
gaaaauguaguuggagaua

SEQ ID NO: 98576 - RNA, 19 nt, Homo sapiens
  misc_RNA (1)...(19): siRNA sense strand
aagcacauuccguuuauaa

SEQ ID NO: 98577 - RNA, 19 nt, Homo sapiens
  misc_RNA (1)...(19): siRNA sense strand
agauagaagugugcaagaa

SEQ ID NO: 98578 - RNA, 19 nt, Homo sapiens
  misc_RNA (1)...(19): siRNA sense strand
guuauuggucuuacaugua

SEQ ID NO: 98579 - RNA, 19 nt, Homo sapiens
  misc_RNA (1)...(19): siRNA sense strand
uuuggaagcuuugcugaaa

SEQ ID NO: 98580 - RNA, 19 nt, Homo sapiens
  misc_RNA (1)...(19): siRNA sense strand
gcaacauccucacuaagcu

SEQ ID NO: 98581 - RNA, 19 nt, Homo sapiens
  misc_RNA (1)...(19): siRNA sense strand
aagaguaacagcuuaauuc

SEQ ID NO: 98582 - RNA, 19 nt, Homo sapiens
  misc_RNA (1)...(19): siRNA sense strand
aaccaaacacuucucuaua

SEQ ID NO: 98583 - RNA, 19 nt, Homo sapiens
  misc_RNA (1)...(19): siRNA sense strand
gcaguuaaaucuggaaaau

SEQ ID NO: 98584 - RNA, 19 nt, Homo sapiens
  misc_RNA (1)...(19): siRNA sense strand
gaacuucaggaaauucaca

SEQ ID NO: 98585 - RNA, 19 nt, Homo sapiens
  misc_RNA (1)...(19): siRNA sense strand
gagcagucguaaaucaaag

SEQ ID NO: 98586 - RNA, 19 nt, Homo sapiens
  misc_RNA (1)...(19): siRNA sense strand
guacauggucuaucagucu

SEQ ID NO: 98587 - RNA, 19 nt, Homo sapiens
  misc_RNA (1)...(19): siRNA sense strand
gcuauugaugcuugcuuua

SEQ ID NO: 98588 - RNA, 19 nt, Homo sapiens
  misc_RNA (1)...(19): siRNA sense strand
cugcagaguuuccagacaa

SEQ ID NO: 98589 - RNA, 19 nt, Homo sapiens
  misc_RNA (1)...(19): siRNA sense strand
uuaauaaagcccauggaaa

SEQ ID NO: 98590 - RNA, 19 nt, Homo sapiens
  misc_RNA (1)...(19): siRNA sense strand
gagugcaaguacaauacaa

SEQ ID NO: 98591 - RNA, 19 nt, Homo sapiens
  misc_RNA (1)...(19): siRNA sense strand
gaacucauggaaauagaag

SEQ ID NO: 98592 - RNA, 19 nt, Homo sapiens
  misc_RNA (1)...(19): siRNA sense strand
uucaguaucucucagaaga

SEQ ID NO: 98593 - RNA, 19 nt, Homo sapiens
  misc_RNA (1)...(19): siRNA sense strand
uuauuggucuuacauguag

SEQ ID NO: 98594 - RNA, 19 nt, Homo sapiens
  misc_RNA (1)...(19): siRNA sense strand
ugggcaacauccucacuaa

SEQ ID NO: 98595 - RNA, 19 nt, Homo sapiens
  misc_RNA (1)...(19): siRNA sense strand
uaacagcaucgcacccauu

SEQ ID NO: 98596 - RNA, 19 nt, Homo sapiens
  misc_RNA (1)...(19): siRNA sense strand
ggucauuacacaugcuauu

SEQ ID NO: 98597 - RNA, 19 nt, Homo sapiens
  misc_RNA (1)...(19): siRNA sense strand
ucacacagagugccuuuca

SEQ ID NO: 98598 - RNA, 19 nt, Homo sapiens
  misc_RNA (1)...(19): siRNA sense strand
gauagaagugugcaagaag

SEQ ID NO: 98599 - RNA, 19 nt, Homo sapiens
  misc_RNA (1)...(19): siRNA sense strand
agagugccuuucacaggua

SEQ ID NO: 98600 - RNA, 19 nt, Homo sapiens
  misc_RNA (1)...(19): siRNA sense strand
cccagugaucuucauauua

SEQ ID NO: 98601 - RNA, 19 nt, Homo sapiens
  misc_RNA (1)...(19): siRNA sense strand
ugacaucuaugaggaagag

SEQ ID NO: 98602 - RNA, 19 nt, Homo sapiens
  misc_RNA (1)...(19): siRNA sense strand
gcauggacucgaaagcaaa

SEQ ID NO: 98603 - RNA, 19 nt, Homo sapiens
  misc_RNA (1)...(19): siRNA sense strand
ugcaagaaguacuacagaa

SEQ ID NO: 98604 - RNA, 19 nt, Homo sapiens
  misc_RNA (1)...(19): siRNA sense strand
agagugaagucaagauuuu

SEQ ID NO: 98605 - RNA, 19 nt, Homo sapiens
  misc_RNA (1)...(19): siRNA sense strand
caaguacaauacaaacacu

SEQ ID NO: 98606 - RNA, 19 nt, Homo sapiens
  misc_RNA (1)...(19): siRNA sense strand
gaaagauuuugucgucaga

SEQ ID NO: 98607 - RNA, 19 nt, Homo sapiens
  misc_RNA (1)...(19): siRNA sense strand
gcaaguacaauacaaacac

SEQ ID NO: 98608 - RNA, 19 nt, Homo sapiens
  misc_RNA (1)...(19): siRNA sense strand
aaagcacauuccguuuaua

SEQ ID NO: 98609 - RNA, 19 nt, Homo sapiens
  misc_RNA (1)...(19): siRNA sense strand
aaucaaagaguaacagcuu

SEQ ID NO: 98610 - RNA, 19 nt, Homo sapiens
  misc_RNA (1)...(19): siRNA sense strand
aaagagugaagucaagauu

SEQ ID NO: 98611 - RNA, 19 nt, Homo sapiens
  misc_RNA (1)...(19): siRNA sense strand
gcaguugcccagugaucuu

SEQ ID NO: 98612 - RNA, 19 nt, Homo sapiens
  misc_RNA (1)...(19): siRNA sense strand
ugaggaagagccauuuaau

SEQ ID NO: 98613 - RNA, 19 nt, Homo sapiens
  misc_RNA (1)...(19): siRNA sense strand
cauuacacaugcuauugau

SEQ ID NO: 98614 - RNA, 19 nt, Homo sapiens
  misc_RNA (1)...(19): siRNA sense strand
caaacacuucucuauaauc

SEQ ID NO: 98615 - RNA, 19 nt, Homo sapiens
  misc_RNA (1)...(19): siRNA sense strand
uaaagcccauggaaagaac

SEQ ID NO: 98616 - RNA, 19 nt, Homo sapiens
  misc_RNA (1)...(19): siRNA sense strand
uuucacagguacaaagaau

SEQ ID NO: 98617 - RNA, 19 nt, Homo sapiens
  misc_RNA (1)...(19): siRNA sense strand
gaacuuaccugccucuuca

SEQ ID NO: 98618 - RNA, 19 nt, Homo sapiens
  misc_RNA (1)...(19): siRNA sense strand
ccacagggcucuucauggu

SEQ ID NO: 98619 - RNA, 19 nt, Homo sapiens
  misc_RNA (1)...(19): siRNA sense strand
gugcagguugcuaucaaua

SEQ ID NO: 98620 - RNA, 19 nt, Homo sapiens
  misc_RNA (1)...(19): siRNA sense strand
ggaaacugggccuggauuc

SEQ ID NO: 98621 - RNA, 19 nt, Homo sapiens
  misc_RNA (1)...(19): siRNA sense strand
ccucugcgccucuguacaa

SEQ ID NO: 98622 - RNA, 19 nt, Homo sapiens
  misc_RNA (1)...(19): siRNA sense strand
ccaaaggggccaaaacuga

SEQ ID NO: 98623 - RNA, 19 nt, Homo sapiens
  misc_RNA (1)...(19): siRNA sense strand
gcagguugcuaucaauacc

SEQ ID NO: 98624 - RNA, 19 nt, Homo sapiens
  misc_RNA (1)...(19): siRNA sense strand
ggucuccgcguacgggauu

SEQ ID NO: 98625 - RNA, 19 nt, Homo sapiens
  misc_RNA (1)...(19): siRNA sense strand
ggucauguucuccaucauc

SEQ ID NO: 98626 - RNA, 19 nt, Homo sapiens
  misc_RNA (1)...(19): siRNA sense strand
uuaccugccucuucaugca

SEQ ID NO: 98627 - RNA, 19 nt, Homo sapiens
  misc_RNA (1)...(19): siRNA sense strand
gucauguucuccaucaucu

SEQ ID NO: 98628 - RNA, 19 nt, Homo sapiens
  misc_RNA (1)...(19): siRNA sense strand
caucaucuccauggacuuc

SEQ ID NO: 98629 - RNA, 19 nt, Homo sapiens
  misc_RNA (1)...(19): siRNA sense strand
gccuucggcuaccugcaaa

SEQ ID NO: 98630 - RNA, 19 nt, Homo sapiens
  misc_RNA (1)...(19): siRNA sense strand
cuggcuaccucauguccuu

SEQ ID NO: 98631 - RNA, 19 nt, Homo sapiens
  misc_RNA (1)...(19): siRNA sense strand
uggugaagguggccuccaa

SEQ ID NO: 98632 - RNA, 19 nt, Homo sapiens
  misc_RNA (1)...(19): siRNA sense strand
ugccagacgucccgaggau

SEQ ID NO: 98633 - RNA, 19 nt, Homo sapiens
  misc_RNA (1)...(19): siRNA sense strand
gguccucggucaucuugcu

SEQ ID NO: 98634 - RNA, 19 nt, Homo sapiens
  misc_RNA (1)...(19): siRNA sense strand
gaacuuaccugccucuuca

SEQ ID NO: 98635 - RNA, 19 nt, Homo sapiens
  misc_RNA (1)...(19): siRNA sense strand
ccacagggcucuucauggu

SEQ ID NO: 98636 - RNA, 19 nt, Homo sapiens
  misc_RNA (1)...(19): siRNA sense strand
gugcagguugcuaucaaua

SEQ ID NO: 98637 - RNA, 19 nt, Homo sapiens
  misc_RNA (1)...(19): siRNA sense strand
ggaaacugggccuggauuc

SEQ ID NO: 98638 - RNA, 19 nt, Homo sapiens
  misc_RNA (1)...(19): siRNA sense strand
ccucugcgccucuguacaa

SEQ ID NO: 98639 - RNA, 19 nt, Homo sapiens
  misc_RNA (1)...(19): siRNA sense strand
ccaaaggggccaaaacuga

SEQ ID NO: 98640 - RNA, 19 nt, Homo sapiens
  misc_RNA (1)...(19): siRNA sense strand
gcagguugcuaucaauacc

SEQ ID NO: 98641 - RNA, 19 nt, Homo sapiens
  misc_RNA (1)...(19): siRNA sense strand
ggucuccgcguacgggauu

SEQ ID NO: 98642 - RNA, 19 nt, Homo sapiens
  misc_RNA (1)...(19): siRNA sense strand
ggucauguucuccaucauc

SEQ ID NO: 98643 - RNA, 19 nt, Homo sapiens
  misc_RNA (1)...(19): siRNA sense strand
uuaccugccucuucaugca

SEQ ID NO: 98644 - RNA, 19 nt, Homo sapiens
  misc_RNA (1)...(19): siRNA sense strand
gucauguucuccaucaucu

SEQ ID NO: 98645 - RNA, 19 nt, Homo sapiens
  misc_RNA (1)...(19): siRNA sense strand
caucaucuccauggacuuc

SEQ ID NO: 98646 - RNA, 19 nt, Homo sapiens
  misc_RNA (1)...(19): siRNA sense strand
gccuucggcuaccugcaaa

SEQ ID NO: 98647 - RNA, 19 nt, Homo sapiens
  misc_RNA (1)...(19): siRNA sense strand
cuggcuaccucauguccuu

SEQ ID NO: 98648 - RNA, 19 nt, Homo sapiens
  misc_RNA (1)...(19): siRNA sense strand
uggugaagguggccuccaa

SEQ ID NO: 98649 - RNA, 19 nt, Homo sapiens
  misc_RNA (1)...(19): siRNA sense strand
ugccagacgucccgaggau

SEQ ID NO: 98650 - RNA, 19 nt, Homo sapiens
  misc_RNA (1)...(19): siRNA sense strand
gguccucggucaucuugcu

SEQ ID NO: 98651 - RNA, 19 nt, Homo sapiens
  misc_RNA (1)...(19): siRNA sense strand
gccgagaacuucacucuuu

SEQ ID NO: 98652 - RNA, 19 nt, Homo sapiens
  misc_RNA (1)...(19): siRNA sense strand
caaauacgcugaggacaug

SEQ ID NO: 98653 - RNA, 19 nt, Homo sapiens
  misc_RNA (1)...(19): siRNA sense strand
gcauggugcuggugcguaa

SEQ ID NO: 98654 - RNA, 19 nt, Homo sapiens
  misc_RNA (1)...(19): siRNA sense strand
ggcguuaucuuccgacuga

SEQ ID NO: 98655 - RNA, 19 nt, Homo sapiens
  misc_RNA (1)...(19): siRNA sense strand
caacuaccgucaccucuuc

SEQ ID NO: 98656 - RNA, 19 nt, Homo sapiens
  misc_RNA (1)...(19): siRNA sense strand
gcagacccaucuaugaguu

SEQ ID NO: 98657 - RNA, 19 nt, Homo sapiens
  misc_RNA (1)...(19): siRNA sense strand
gcaaguguguggccuucaa

SEQ ID NO: 98658 - RNA, 19 nt, Homo sapiens
  misc_RNA (1)...(19): siRNA sense strand
gaacuucacucuuuucauc

SEQ ID NO: 98659 - RNA, 19 nt, Homo sapiens
  misc_RNA (1)...(19): siRNA sense strand
ggugaaugcugcccacaug

SEQ ID NO: 98660 - RNA, 19 nt, Homo sapiens
  misc_RNA (1)...(19): siRNA sense strand
ugagaaggguggagugguu

SEQ ID NO: 98661 - RNA, 19 nt, Homo sapiens
  misc_RNA (1)...(19): siRNA sense strand
gguggguguuucucuauga

SEQ ID NO: 98662 - RNA, 19 nt, Homo sapiens
  misc_RNA (1)...(19): siRNA sense strand
gcagaagaaguucaaauac

SEQ ID NO: 98663 - RNA, 19 nt, Homo sapiens
  misc_RNA (1)...(19): siRNA sense strand
caagaacagcaucagcuuu

SEQ ID NO: 98664 - RNA, 19 nt, Homo sapiens
  misc_RNA (1)...(19): siRNA sense strand
cagaagaaguucaaauacg

SEQ ID NO: 98665 - RNA, 19 nt, Homo sapiens
  misc_RNA (1)...(19): siRNA sense strand
gcacugcagacccaucuau

SEQ ID NO: 98666 - RNA, 19 nt, Homo sapiens
  misc_RNA (1)...(19): siRNA sense strand
cuaagaggcacuacuacaa

SEQ ID NO: 98667 - RNA, 19 nt, Homo sapiens
  misc_RNA (1)...(19): siRNA sense strand
uccaugggcuguacgaaga

SEQ ID NO: 98668 - RNA, 19 nt, Homo sapiens
  misc_RNA (1)...(19): siRNA sense strand
agaccugccucuuucacaa

SEQ ID NO: 98669 - RNA, 19 nt, Homo sapiens
  misc_RNA (1)...(19): siRNA sense strand
agcagaagaaguucaaaua

SEQ ID NO: 98670 - RNA, 19 nt, Homo sapiens
  misc_RNA (1)...(19): siRNA sense strand
ccaggcacuuuguggagaa

SEQ ID NO: 98671 - RNA, 19 nt, Homo sapiens
  misc_RNA (1)...(19): siRNA sense strand
caccaucggcucuggaauu

SEQ ID NO: 98672 - RNA, 19 nt, Homo sapiens
  misc_RNA (1)...(19): siRNA sense strand
ggcuucaacuucagguuug

SEQ ID NO: 98673 - RNA, 19 nt, Homo sapiens
  misc_RNA (1)...(19): siRNA sense strand
ucugggauguggcugacua

SEQ ID NO: 98674 - RNA, 19 nt, Homo sapiens
  misc_RNA (1)...(19): siRNA sense strand
gagcgugaccucgcagcua

SEQ ID NO: 98675 - RNA, 19 nt, Homo sapiens
  misc_RNA (1)...(19): siRNA sense strand
ucaaauacgcugaggacau

SEQ ID NO: 98676 - RNA, 19 nt, Homo sapiens
  misc_RNA (1)...(19): siRNA sense strand
cuucacauccugccuaaga

SEQ ID NO: 98677 - RNA, 19 nt, Homo sapiens
  misc_RNA (1)...(19): siRNA sense strand
gugaagacgugugagaucu

SEQ ID NO: 98678 - RNA, 19 nt, Homo sapiens
  misc_RNA (1)...(19): siRNA sense strand
ccgccuuccucuucgagua

SEQ ID NO: 98679 - RNA, 19 nt, Homo sapiens
  misc_RNA (1)...(19): siRNA sense strand
ugacaucaucccuacaaug

SEQ ID NO: 98680 - RNA, 19 nt, Homo sapiens
  misc_RNA (1)...(19): siRNA sense strand
gcaagagucaggccagaac

SEQ ID NO: 98681 - RNA, 19 nt, Homo sapiens
  misc_RNA (1)...(19): siRNA sense strand
uaagaggcacuacuacaag

SEQ ID NO: 98682 - RNA, 19 nt, Homo sapiens
  misc_RNA (1)...(19): siRNA sense strand
aauaagaaggugggcguua

SEQ ID NO: 98683 - RNA, 19 nt, Homo sapiens
  misc_RNA (1)...(19): siRNA sense strand
gcucuggaauuggcaucuu

SEQ ID NO: 98684 - RNA, 19 nt, Homo sapiens
  misc_RNA (1)...(19): siRNA sense strand
cagcagugucucugugaaa

SEQ ID NO: 98685 - RNA, 19 nt, Homo sapiens
  misc_RNA (1)...(19): siRNA sense strand
gugcuggugcguaauaaga

SEQ ID NO: 98686 - RNA, 19 nt, Homo sapiens
  misc_RNA (1)...(19): siRNA sense strand
ugaaugcugcccacaugaa

SEQ ID NO: 98687 - RNA, 19 nt, Homo sapiens
  misc_RNA (1)...(19): siRNA sense strand
aagaacagcaucagcuuuc

SEQ ID NO: 98688 - RNA, 19 nt, Homo sapiens
  misc_RNA (1)...(19): siRNA sense strand
acuacaagcagaagaaguu

SEQ ID NO: 98689 - RNA, 19 nt, Homo sapiens
  misc_RNA (1)...(19): siRNA sense strand
ucaagaacagcaucagcuu

SEQ ID NO: 98690 - RNA, 19 nt, Homo sapiens
  misc_RNA (1)...(19): siRNA sense strand
gaacagcaucagcuuucca

SEQ ID NO: 98691 - RNA, 19 nt, Homo sapiens
  misc_RNA (1)...(19): siRNA sense strand
gccgggaaguuugacauca

SEQ ID NO: 98692 - RNA, 19 nt, Homo sapiens
  misc_RNA (1)...(19): siRNA sense strand
ggagaacgggaccaacuac

SEQ ID NO: 98693 - RNA, 19 nt, Homo sapiens
  misc_RNA (1)...(19): siRNA sense strand
gaaugcugcccacaugaag

SEQ ID NO: 98694 - RNA, 19 nt, Homo sapiens
  misc_RNA (1)...(19): siRNA sense strand
ucggguggguguuucucua

SEQ ID NO: 98695 - RNA, 19 nt, Homo sapiens
  misc_RNA (1)...(19): siRNA sense strand
ucagcagugucucugugaa

SEQ ID NO: 98696 - RNA, 19 nt, Homo sapiens
  misc_RNA (1)...(19): siRNA sense strand
gcuggugcguaauaagaag

SEQ ID NO: 98697 - RNA, 19 nt, Homo sapiens
  misc_RNA (1)...(19): siRNA sense strand
ggguggguguuucucuaug

SEQ ID NO: 98698 - RNA, 19 nt, Homo sapiens
  misc_RNA (1)...(19): siRNA sense strand
ccaacuaccgucaccucuu

SEQ ID NO: 98699 - RNA, 19 nt, Homo sapiens
  misc_RNA (1)...(19): siRNA sense strand
acaagcagaagaaguucaa

SEQ ID NO: 98700 - RNA, 19 nt, Homo sapiens
  misc_RNA (1)...(19): siRNA sense strand
uaagaaggugggcguuauc

SEQ ID NO: 98701 - RNA, 19 nt, Homo sapiens
  misc_RNA (1)...(19): siRNA sense strand
caggagaacaugaggacau

SEQ ID NO: 98702 - RNA, 19 nt, Homo sapiens
  misc_RNA (1)...(19): siRNA sense strand
cgggaaguuugacaucauc

SEQ ID NO: 98703 - RNA, 19 nt, Homo sapiens
  misc_RNA (1)...(19): siRNA sense strand
ccgggaaguuugacaucau

SEQ ID NO: 98704 - RNA, 19 nt, Homo sapiens
  misc_RNA (1)...(19): siRNA sense strand
uggagaacgggaccaacua

SEQ ID NO: 98705 - RNA, 19 nt, Homo sapiens
  misc_RNA (1)...(19): siRNA sense strand
cgucaucggguggguguuu

SEQ ID NO: 98706 - RNA, 19 nt, Homo sapiens
  misc_RNA (1)...(19): siRNA sense strand
ccuaagaggcacuacuaca

SEQ ID NO: 98707 - RNA, 19 nt, Homo sapiens
  misc_RNA (1)...(19): siRNA sense strand
accaucggcucuggaauug

SEQ ID NO: 98708 - RNA, 19 nt, Homo sapiens
  misc_RNA (1)...(19): siRNA sense strand
ugaccuggacuggcacgua

SEQ ID NO: 98709 - RNA, 19 nt, Homo sapiens
  misc_RNA (1)...(19): siRNA sense strand
gaacugacaugcagaggau

SEQ ID NO: 98710 - RNA, 19 nt, Homo sapiens
  misc_RNA (1)...(19): siRNA sense strand
caacauggccuacaagguu

SEQ ID NO: 98711 - RNA, 19 nt, Homo sapiens
  misc_RNA (1)...(19): siRNA sense strand
ggaaugcguccaccacaua

SEQ ID NO: 98712 - RNA, 19 nt, Homo sapiens
  misc_RNA (1)...(19): siRNA sense strand
gaggauagaagauguguug

SEQ ID NO: 98713 - RNA, 19 nt, Homo sapiens
  misc_RNA (1)...(19): siRNA sense strand
cgagaacacuaaggacauu

SEQ ID NO: 98714 - RNA, 19 nt, Homo sapiens
  misc_RNA (1)...(19): siRNA sense strand
ugccgcugcuggucuauua

SEQ ID NO: 98715 - RNA, 19 nt, Homo sapiens
  misc_RNA (1)...(19): siRNA sense strand
aacauggccuacaagguua

SEQ ID NO: 98716 - RNA, 19 nt, Homo sapiens
  misc_RNA (1)...(19): siRNA sense strand
cuaaggacauucggcugua

SEQ ID NO: 98717 - RNA, 19 nt, Homo sapiens
  misc_RNA (1)...(19): siRNA sense strand
gggaugagcugggcuacag

SEQ ID NO: 98718 - RNA, 19 nt, Homo sapiens
  misc_RNA (1)...(19): siRNA sense strand
gcugguagcgagaacacua

SEQ ID NO: 98719 - RNA, 19 nt, Homo sapiens
  misc_RNA (1)...(19): siRNA sense strand
gcgcagauccgacagaacu

SEQ ID NO: 98720 - RNA, 19 nt, Homo sapiens
  misc_RNA (1)...(19): siRNA sense strand
gaaugcguccaccacauau

SEQ ID NO: 98721 - RNA, 19 nt, Homo sapiens
  misc_RNA (1)...(19): siRNA sense strand
ccucaacgccaucaacaug

SEQ ID NO: 98722 - RNA, 19 nt, Homo sapiens
  misc_RNA (1)...(19): siRNA sense strand
guagcgagaacacuaagga

SEQ ID NO: 98723 - RNA, 19 nt, Homo sapiens
  misc_RNA (1)...(19): siRNA sense strand
gcagauccgacagaacuga

SEQ ID NO: 98724 - RNA, 19 nt, Homo sapiens
  misc_RNA (1)...(19): siRNA sense strand
ccgucauccuugucuguua

SEQ ID NO: 98725 - RNA, 19 nt, Homo sapiens
  misc_RNA (1)...(19): siRNA sense strand
gcaaguccgugcgcaccau

SEQ ID NO: 98726 - RNA, 19 nt, Homo sapiens
  misc_RNA (1)...(19): siRNA sense strand
gcucuucgcggugcccuuu

SEQ ID NO: 98727 - RNA, 19 nt, Homo sapiens
  misc_RNA (1)...(19): siRNA sense strand
ccaccuggcugugucugau

SEQ ID NO: 98728 - RNA, 19 nt, Homo sapiens
  misc_RNA (1)...(19): siRNA sense strand
gcagaggauagaagaugug

SEQ ID NO: 98729 - RNA, 19 nt, Homo sapiens
  misc_RNA (1)...(19): siRNA sense strand
gcgagaacacuaaggacau

SEQ ID NO: 98730 - RNA, 19 nt, Homo sapiens
  misc_RNA (1)...(19): siRNA sense strand
ccguggcgcucuacaucuu

SEQ ID NO: 98731 - RNA, 19 nt, Homo sapiens
  misc_RNA (1)...(19): siRNA sense strand
gggcagcagugaggacucu

SEQ ID NO: 98732 - RNA, 19 nt, Homo sapiens
  misc_RNA (1)...(19): siRNA sense strand
ggcuacaggugccgcuuca

SEQ ID NO: 98733 - RNA, 19 nt, Homo sapiens
  misc_RNA (1)...(19): siRNA sense strand
uggaaugacaccaucaaug

SEQ ID NO: 98734 - RNA, 19 nt, Homo sapiens
  misc_RNA (1)...(19): siRNA sense strand
uaaggacauucggcuguag

SEQ ID NO: 98735 - RNA, 19 nt, Homo sapiens
  misc_RNA (1)...(19): siRNA sense strand
cgucauccuugucuguuac

SEQ ID NO: 98736 - RNA, 19 nt, Homo sapiens
  misc_RNA (1)...(19): siRNA sense strand
ugcagaggauagaagaugu

SEQ ID NO: 98737 - RNA, 19 nt, Homo sapiens
  misc_RNA (1)...(19): siRNA sense strand
gaacugacaugcagaggau

SEQ ID NO: 98738 - RNA, 19 nt, Homo sapiens
  misc_RNA (1)...(19): siRNA sense strand
caacauggccuacaagguu

SEQ ID NO: 98739 - RNA, 19 nt, Homo sapiens
  misc_RNA (1)...(19): siRNA sense strand
ggaaugcguccaccacaua

SEQ ID NO: 98740 - RNA, 19 nt, Homo sapiens
  misc_RNA (1)...(19): siRNA sense strand
gaggauagaagauguguug

SEQ ID NO: 98741 - RNA, 19 nt, Homo sapiens
  misc_RNA (1)...(19): siRNA sense strand
cgagaacacuaaggacauu

SEQ ID NO: 98742 - RNA, 19 nt, Homo sapiens
  misc_RNA (1)...(19): siRNA sense strand
ugccgcugcuggucuauua

SEQ ID NO: 98743 - RNA, 19 nt, Homo sapiens
  misc_RNA (1)...(19): siRNA sense strand
aacauggccuacaagguua

SEQ ID NO: 98744 - RNA, 19 nt, Homo sapiens
  misc_RNA (1)...(19): siRNA sense strand
cuaaggacauucggcugua

SEQ ID NO: 98745 - RNA, 19 nt, Homo sapiens
  misc_RNA (1)...(19): siRNA sense strand
gggaugagcugggcuacag

SEQ ID NO: 98746 - RNA, 19 nt, Homo sapiens
  misc_RNA (1)...(19): siRNA sense strand
gcugguagcgagaacacua

SEQ ID NO: 98747 - RNA, 19 nt, Homo sapiens
  misc_RNA (1)...(19): siRNA sense strand
gcgcagauccgacagaacu

SEQ ID NO: 98748 - RNA, 19 nt, Homo sapiens
  misc_RNA (1)...(19): siRNA sense strand
gaaugcguccaccacauau

SEQ ID NO: 98749 - RNA, 19 nt, Homo sapiens
  misc_RNA (1)...(19): siRNA sense strand
ccucaacgccaucaacaug

SEQ ID NO: 98750 - RNA, 19 nt, Homo sapiens
  misc_RNA (1)...(19): siRNA sense strand
guagcgagaacacuaagga

SEQ ID NO: 98751 - RNA, 19 nt, Homo sapiens
  misc_RNA (1)...(19): siRNA sense strand
gcagauccgacagaacuga

SEQ ID NO: 98752 - RNA, 19 nt, Homo sapiens
  misc_RNA (1)...(19): siRNA sense strand
ccgucauccuugucuguua

SEQ ID NO: 98753 - RNA, 19 nt, Homo sapiens
  misc_RNA (1)...(19): siRNA sense strand
gcaaguccgugcgcaccau

SEQ ID NO: 98754 - RNA, 19 nt, Homo sapiens
  misc_RNA (1)...(19): siRNA sense strand
gcucuucgcggugcccuuu

SEQ ID NO: 98755 - RNA, 19 nt, Homo sapiens
  misc_RNA (1)...(19): siRNA sense strand
ccaccuggcugugucugau

SEQ ID NO: 98756 - RNA, 19 nt, Homo sapiens
  misc_RNA (1)...(19): siRNA sense strand
gcagaggauagaagaugug

SEQ ID NO: 98757 - RNA, 19 nt, Homo sapiens
  misc_RNA (1)...(19): siRNA sense strand
gcgagaacacuaaggacau

SEQ ID NO: 98758 - RNA, 19 nt, Homo sapiens
  misc_RNA (1)...(19): siRNA sense strand
ccguggcgcucuacaucuu

SEQ ID NO: 98759 - RNA, 19 nt, Homo sapiens
  misc_RNA (1)...(19): siRNA sense strand
gggcagcagugaggacucu

SEQ ID NO: 98760 - RNA, 19 nt, Homo sapiens
  misc_RNA (1)...(19): siRNA sense strand
ggcuacaggugccgcuuca

SEQ ID NO: 98761 - RNA, 19 nt, Homo sapiens
  misc_RNA (1)...(19): siRNA sense strand
uggaaugacaccaucaaug

SEQ ID NO: 98762 - RNA, 19 nt, Homo sapiens
  misc_RNA (1)...(19): siRNA sense strand
uaaggacauucggcuguag

SEQ ID NO: 98763 - RNA, 19 nt, Homo sapiens
  misc_RNA (1)...(19): siRNA sense strand
cgucauccuugucuguuac

SEQ ID NO: 98764 - RNA, 19 nt, Homo sapiens
  misc_RNA (1)...(19): siRNA sense strand
ugcagaggauagaagaugu

SEQ ID NO: 98765 - RNA, 19 nt, Homo sapiens
  misc_RNA (1)...(19): siRNA sense strand
gaacugacaugcagaggau

SEQ ID NO: 98766 - RNA, 19 nt, Homo sapiens
  misc_RNA (1)...(19): siRNA sense strand
caacauggccuacaagguu

SEQ ID NO: 98767 - RNA, 19 nt, Homo sapiens
  misc_RNA (1)...(19): siRNA sense strand
ggaaugcguccaccacaua

SEQ ID NO: 98768 - RNA, 19 nt, Homo sapiens
  misc_RNA (1)...(19): siRNA sense strand
gaggauagaagauguguug

SEQ ID NO: 98769 - RNA, 19 nt, Homo sapiens
  misc_RNA (1)...(19): siRNA sense strand
cgagaacacuaaggacauu

SEQ ID NO: 98770 - RNA, 19 nt, Homo sapiens
  misc_RNA (1)...(19): siRNA sense strand
ugccgcugcuggucuauua

SEQ ID NO: 98771 - RNA, 19 nt, Homo sapiens
  misc_RNA (1)...(19): siRNA sense strand
aacauggccuacaagguua

SEQ ID NO: 98772 - RNA, 19 nt, Homo sapiens
  misc_RNA (1)...(19): siRNA sense strand
cuaaggacauucggcugua

SEQ ID NO: 98773 - RNA, 19 nt, Homo sapiens
  misc_RNA (1)...(19): siRNA sense strand
gggaugagcugggcuacag

SEQ ID NO: 98774 - RNA, 19 nt, Homo sapiens
  misc_RNA (1)...(19): siRNA sense strand
gcugguagcgagaacacua

SEQ ID NO: 98775 - RNA, 19 nt, Homo sapiens
  misc_RNA (1)...(19): siRNA sense strand
gcgcagauccgacagaacu

SEQ ID NO: 98776 - RNA, 19 nt, Homo sapiens
  misc_RNA (1)...(19): siRNA sense strand
gaaugcguccaccacauau

SEQ ID NO: 98777 - RNA, 19 nt, Homo sapiens
  misc_RNA (1)...(19): siRNA sense strand
ccucaacgccaucaacaug

SEQ ID NO: 98778 - RNA, 19 nt, Homo sapiens
  misc_RNA (1)...(19): siRNA sense strand
guagcgagaacacuaagga

SEQ ID NO: 98779 - RNA, 19 nt, Homo sapiens
  misc_RNA (1)...(19): siRNA sense strand
gcagauccgacagaacuga

SEQ ID NO: 98780 - RNA, 19 nt, Homo sapiens
  misc_RNA (1)...(19): siRNA sense strand
ccgucauccuugucuguua

SEQ ID NO: 98781 - RNA, 19 nt, Homo sapiens
  misc_RNA (1)...(19): siRNA sense strand
gcaaguccgugcgcaccau

SEQ ID NO: 98782 - RNA, 19 nt, Homo sapiens
  misc_RNA (1)...(19): siRNA sense strand
gcucuucgcggugcccuuu

SEQ ID NO: 98783 - RNA, 19 nt, Homo sapiens
  misc_RNA (1)...(19): siRNA sense strand
ccaccuggcugugucugau

SEQ ID NO: 98784 - RNA, 19 nt, Homo sapiens
  misc_RNA (1)...(19): siRNA sense strand
gcagaggauagaagaugug

SEQ ID NO: 98785 - RNA, 19 nt, Homo sapiens
  misc_RNA (1)...(19): siRNA sense strand
gcgagaacacuaaggacau

SEQ ID NO: 98786 - RNA, 19 nt, Homo sapiens
  misc_RNA (1)...(19): siRNA sense strand
ccguggcgcucuacaucuu

SEQ ID NO: 98787 - RNA, 19 nt, Homo sapiens
  misc_RNA (1)...(19): siRNA sense strand
gggcagcagugaggacucu

SEQ ID NO: 98788 - RNA, 19 nt, Homo sapiens
  misc_RNA (1)...(19): siRNA sense strand
ggcuacaggugccgcuuca

SEQ ID NO: 98789 - RNA, 19 nt, Homo sapiens
  misc_RNA (1)...(19): siRNA sense strand
uggaaugacaccaucaaug

SEQ ID NO: 98790 - RNA, 19 nt, Homo sapiens
  misc_RNA (1)...(19): siRNA sense strand
uaaggacauucggcuguag

SEQ ID NO: 98791 - RNA, 19 nt, Homo sapiens
  misc_RNA (1)...(19): siRNA sense strand
cgucauccuugucuguuac

SEQ ID NO: 98792 - RNA, 19 nt, Homo sapiens
  misc_RNA (1)...(19): siRNA sense strand
ugcagaggauagaagaugu

SEQ ID NO: 98793 - RNA, 19 nt, Homo sapiens
  misc_RNA (1)...(19): siRNA sense strand
gcacugagaucugcaaguu

SEQ ID NO: 98794 - RNA, 19 nt, Homo sapiens
  misc_RNA (1)...(19): siRNA sense strand
gagcuggacuguugguuug

SEQ ID NO: 98795 - RNA, 19 nt, Homo sapiens
  misc_RNA (1)...(19): siRNA sense strand
gagcuaugcaguugucuuu

SEQ ID NO: 98796 - RNA, 19 nt, Homo sapiens
  misc_RNA (1)...(19): siRNA sense strand
ccacccucaucuacuauua

SEQ ID NO: 98797 - RNA, 19 nt, Homo sapiens
  misc_RNA (1)...(19): siRNA sense strand
gugcugggcuugggccuua

SEQ ID NO: 98798 - RNA, 19 nt, Homo sapiens
  misc_RNA (1)...(19): siRNA sense strand
gaagcugacugccgaguac

SEQ ID NO: 98799 - RNA, 19 nt, Homo sapiens
  misc_RNA (1)...(19): siRNA sense strand
gcuaugcaguugucuuugu

SEQ ID NO: 98800 - RNA, 19 nt, Homo sapiens
  misc_RNA (1)...(19): siRNA sense strand
cugaagaguuugaccacua

SEQ ID NO: 98801 - RNA, 19 nt, Homo sapiens
  misc_RNA (1)...(19): siRNA sense strand
gaugaggauuucaaguuca

SEQ ID NO: 98802 - RNA, 19 nt, Homo sapiens
  misc_RNA (1)...(19): siRNA sense strand
uagggcagauagauuguaa

SEQ ID NO: 98803 - RNA, 19 nt, Homo sapiens
  misc_RNA (1)...(19): siRNA sense strand
ccacaucacccgcaccauu

SEQ ID NO: 98804 - RNA, 19 nt, Homo sapiens
  misc_RNA (1)...(19): siRNA sense strand
ugaagaguuugaccacuau

SEQ ID NO: 98805 - RNA, 19 nt, Homo sapiens
  misc_RNA (1)...(19): siRNA sense strand
caacguggucuauaaagug

SEQ ID NO: 98806 - RNA, 19 nt, Homo sapiens
  misc_RNA (1)...(19): siRNA sense strand
ggagcuggacuguugguuu

SEQ ID NO: 98807 - RNA, 19 nt, Homo sapiens
  misc_RNA (1)...(19): siRNA sense strand
ugaugaggauuucaaguuc

SEQ ID NO: 98808 - RNA, 19 nt, Homo sapiens
  misc_RNA (1)...(19): siRNA sense strand
ggaagcugacugccgagua

SEQ ID NO: 98809 - RNA, 19 nt, Homo sapiens
  misc_RNA (1)...(19): siRNA sense strand
caacggccaccuacauguu

SEQ ID NO: 98810 - RNA, 19 nt, Homo sapiens
  misc_RNA (1)...(19): siRNA sense strand
ccugugagcuaugcaguug

SEQ ID NO: 98811 - RNA, 19 nt, Homo sapiens
  misc_RNA (1)...(19): siRNA sense strand
cacaaccacuggcccuuug

SEQ ID NO: 98812 - RNA, 19 nt, Homo sapiens
  misc_RNA (1)...(19): siRNA sense strand
agguggagcuggacuguug

SEQ ID NO: 98813 - RNA, 19 nt, Homo sapiens
  misc_RNA (1)...(19): siRNA sense strand
ucaacguggucuauaaagu

SEQ ID NO: 98814 - RNA, 19 nt, Homo sapiens
  misc_RNA (1)...(19): siRNA sense strand
gccgaguacugaacauugu

SEQ ID NO: 98815 - RNA, 19 nt, Homo sapiens
  misc_RNA (1)...(19): siRNA sense strand
cacaucacccgcaccauuu

SEQ ID NO: 98816 - RNA, 19 nt, Homo sapiens
  misc_RNA (1)...(19): siRNA sense strand
gcaacggccaccuacaugu

SEQ ID NO: 98817 - RNA, 19 nt, Homo sapiens
  misc_RNA (1)...(19): siRNA sense strand
ccacaaccacuggcccuuu

SEQ ID NO: 98818 - RNA, 19 nt, Homo sapiens
  misc_RNA (1)...(19): siRNA sense strand
ugacaccacucggccugaa

SEQ ID NO: 98819 - RNA, 19 nt, Homo sapiens
  misc_RNA (1)...(19): siRNA sense strand
ugucacaaccagcaacaaa

SEQ ID NO: 98820 - RNA, 19 nt, Homo sapiens
  misc_RNA (1)...(19): siRNA sense strand
cccuauggcucuucaucuu

SEQ ID NO: 98821 - RNA, 19 nt, Homo sapiens
  misc_RNA (1)...(19): siRNA sense strand
aacguggucuauaaaguga

SEQ ID NO: 98822 - RNA, 19 nt, Homo sapiens
  misc_RNA (1)...(19): siRNA sense strand
uagcuguggugcugacugu

SEQ ID NO: 98823 - RNA, 19 nt, Homo sapiens
  misc_RNA (1)...(19): siRNA sense strand
gcucugcacagucgucuuc

SEQ ID NO: 98824 - RNA, 19 nt, Homo sapiens
  misc_RNA (1)...(19): siRNA sense strand
ggucacucuuguuugcuau

SEQ ID NO: 98825 - RNA, 19 nt, Homo sapiens
  misc_RNA (1)...(19): siRNA sense strand
ccaccguccugugccauga

SEQ ID NO: 98826 - RNA, 19 nt, Homo sapiens
  misc_RNA (1)...(19): siRNA sense strand
gggaugcaacggccaccua

SEQ ID NO: 98827 - RNA, 19 nt, Homo sapiens
  misc_RNA (1)...(19): siRNA sense strand
caaguucguccgcuuucuu

SEQ ID NO: 98828 - RNA, 19 nt, Homo sapiens
  misc_RNA (1)...(19): siRNA sense strand
gcaaguucguccgcuuucu

SEQ ID NO: 98829 - RNA, 19 nt, Homo sapiens
  misc_RNA (1)...(19): siRNA sense strand
ugcccacccucaucuacua

SEQ ID NO: 98830 - RNA, 19 nt, Homo sapiens
  misc_RNA (1)...(19): siRNA sense strand
ugcccaaccuguucuuugu

SEQ ID NO: 98831 - RNA, 19 nt, Homo sapiens
  misc_RNA (1)...(19): siRNA sense strand
uugucaacguggucuauaa

SEQ ID NO: 98832 - RNA, 19 nt, Homo sapiens
  misc_RNA (1)...(19): siRNA sense strand
cuucgugccuuuccacauc

SEQ ID NO: 98833 - RNA, 19 nt, Homo sapiens
  misc_RNA (1)...(19): siRNA sense strand
ccucuucccuggcacuagu

SEQ ID NO: 98834 - RNA, 19 nt, Homo sapiens
  misc_RNA (1)...(19): siRNA sense strand
ccaacccuauggcucuuca

SEQ ID NO: 98835 - RNA, 19 nt, Homo sapiens
  misc_RNA (1)...(19): siRNA sense strand
ugaccacuaugugcacuuc

SEQ ID NO: 98836 - RNA, 19 nt, Homo sapiens
  misc_RNA (1)...(19): siRNA sense strand
cccaaccuguucuuuguca

SEQ ID NO: 98837 - RNA, 19 nt, Homo sapiens
  misc_RNA (1)...(19): siRNA sense strand
ugucaacguggucuauaaa

SEQ ID NO: 98838 - RNA, 19 nt, Homo sapiens
  misc_RNA (1)...(19): siRNA sense strand
cuaugcaguugucuuugug

SEQ ID NO: 98839 - RNA, 19 nt, Homo sapiens
  misc_RNA (1)...(19): siRNA sense strand
acaucacccgcaccauuua

SEQ ID NO: 98840 - RNA, 19 nt, Homo sapiens
  misc_RNA (1)...(19): siRNA sense strand
acccucaucuacuauuaug

SEQ ID NO: 98841 - RNA, 19 nt, Homo sapiens
  misc_RNA (1)...(19): siRNA sense strand
uggucacucuuguuugcua

SEQ ID NO: 98842 - RNA, 19 nt, Homo sapiens
  misc_RNA (1)...(19): siRNA sense strand
ccuggucacucuuguuugc

SEQ ID NO: 98843 - RNA, 19 nt, Homo sapiens
  misc_RNA (1)...(19): siRNA sense strand
caaccuguucuuugucaca

SEQ ID NO: 98844 - RNA, 19 nt, Homo sapiens
  misc_RNA (1)...(19): siRNA sense strand
ucacaaccagcaacaaagg

SEQ ID NO: 98845 - RNA, 19 nt, Homo sapiens
  misc_RNA (1)...(19): siRNA sense strand
uggauccugugcucuacuu

SEQ ID NO: 98846 - RNA, 19 nt, Homo sapiens
  misc_RNA (1)...(19): siRNA sense strand
gcuggacuguugguuugau

SEQ ID NO: 98847 - RNA, 19 nt, Homo sapiens
  misc_RNA (1)...(19): siRNA sense strand
gcugacugccgaguacuga

SEQ ID NO: 98848 - RNA, 19 nt, Homo sapiens
  misc_RNA (1)...(19): siRNA sense strand
ucacccgcaccauuuacua

SEQ ID NO: 98849 - RNA, 19 nt, Homo sapiens
  misc_RNA (1)...(19): siRNA sense strand
gguaggagaugaauuguuu

SEQ ID NO: 98850 - RNA, 19 nt, Homo sapiens
  misc_RNA (1)...(19): siRNA sense strand
agaaggaacugaucauuaa

SEQ ID NO: 98851 - RNA, 19 nt, Homo sapiens
  misc_RNA (1)...(19): siRNA sense strand
cuacagaccuccaauauca

SEQ ID NO: 98852 - RNA, 19 nt, Homo sapiens
  misc_RNA (1)...(19): siRNA sense strand
gaugacagaugaagagauu

SEQ ID NO: 98853 - RNA, 19 nt, Homo sapiens
  misc_RNA (1)...(19): siRNA sense strand
gaaacuggccaaaccguua

SEQ ID NO: 98854 - RNA, 19 nt, Homo sapiens
  misc_RNA (1)...(19): siRNA sense strand
agacuaagaugacagauga

SEQ ID NO: 98855 - RNA, 19 nt, Homo sapiens
  misc_RNA (1)...(19): siRNA sense strand
ggaggaggaugaugaugaa

SEQ ID NO: 98856 - RNA, 19 nt, Homo sapiens
  misc_RNA (1)...(19): siRNA sense strand
ggaauggaaggaucuguua

SEQ ID NO: 98857 - RNA, 19 nt, Homo sapiens
  misc_RNA (1)...(19): siRNA sense strand
gaucauggcagcuaaagaa

SEQ ID NO: 98858 - RNA, 19 nt, Homo sapiens
  misc_RNA (1)...(19): siRNA sense strand
gagcagagcaaacgcagua

SEQ ID NO: 98859 - RNA, 19 nt, Homo sapiens
  misc_RNA (1)...(19): siRNA sense strand
acagugggcucgauuacua

SEQ ID NO: 98860 - RNA, 19 nt, Homo sapiens
  misc_RNA (1)...(19): siRNA sense strand
ggagguugcuaucaaacaa

SEQ ID NO: 98861 - RNA, 19 nt, Homo sapiens
  misc_RNA (1)...(19): siRNA sense strand
aagaagcaaugaagaguaa

SEQ ID NO: 98862 - RNA, 19 nt, Homo sapiens
  misc_RNA (1)...(19): siRNA sense strand
gcacagagaaaggaaguaa

SEQ ID NO: 98863 - RNA, 19 nt, Homo sapiens
  misc_RNA (1)...(19): siRNA sense strand
uaucauggcuauugagaug

SEQ ID NO: 98864 - RNA, 19 nt, Homo sapiens
  misc_RNA (1)...(19): siRNA sense strand
ucacugaugugguaacaga

SEQ ID NO: 98865 - RNA, 19 nt, Homo sapiens
  misc_RNA (1)...(19): siRNA sense strand
gacaggagguugcuaucaa

SEQ ID NO: 98866 - RNA, 19 nt, Homo sapiens
  misc_RNA (1)...(19): siRNA sense strand
acggagaacuggaagauaa

SEQ ID NO: 98867 - RNA, 19 nt, Homo sapiens
  misc_RNA (1)...(19): siRNA sense strand
ggguucagccaaagaauua

SEQ ID NO: 98868 - RNA, 19 nt, Homo sapiens
  misc_RNA (1)...(19): siRNA sense strand
gagcacaccauccauguug

SEQ ID NO: 98869 - RNA, 19 nt, Homo sapiens
  misc_RNA (1)...(19): siRNA sense strand
agaaauaucugagcuuuac

SEQ ID NO: 98870 - RNA, 19 nt, Homo sapiens
  misc_RNA (1)...(19): siRNA sense strand
aagaaggaacugaucauua

SEQ ID NO: 98871 - RNA, 19 nt, Homo sapiens
  misc_RNA (1)...(19): siRNA sense strand
ugacagaggaggaggauga

SEQ ID NO: 98872 - RNA, 19 nt, Homo sapiens
  misc_RNA (1)...(19): siRNA sense strand
caucaaaagugacaaugua

SEQ ID NO: 98873 - RNA, 19 nt, Homo sapiens
  misc_RNA (1)...(19): siRNA sense strand
caccauccauguuggcuuu

SEQ ID NO: 98874 - RNA, 19 nt, Homo sapiens
  misc_RNA (1)...(19): siRNA sense strand
augaagagauuauggagaa

SEQ ID NO: 98875 - RNA, 19 nt, Homo sapiens
  misc_RNA (1)...(19): siRNA sense strand
ggaggaugaugaugaagag

SEQ ID NO: 98876 - RNA, 19 nt, Homo sapiens
  misc_RNA (1)...(19): siRNA sense strand
acacagugaagcagaaaua

SEQ ID NO: 98877 - RNA, 19 nt, Homo sapiens
  misc_RNA (1)...(19): siRNA sense strand
ccaacacagugaagcagaa

SEQ ID NO: 98878 - RNA, 19 nt, Homo sapiens
  misc_RNA (1)...(19): siRNA sense strand
gaauggaaggaucuguuaa

SEQ ID NO: 98879 - RNA, 19 nt, Homo sapiens
  misc_RNA (1)...(19): siRNA sense strand
uaagaacuaucgugagcau

SEQ ID NO: 98880 - RNA, 19 nt, Homo sapiens
  misc_RNA (1)...(19): siRNA sense strand
agaaacagccaaagaagga

SEQ ID NO: 98881 - RNA, 19 nt, Homo sapiens
  misc_RNA (1)...(19): siRNA sense strand
gaaaaggaacggccagaaa

SEQ ID NO: 98882 - RNA, 19 nt, Homo sapiens
  misc_RNA (1)...(19): siRNA sense strand
gaacuucagaauccagaga

SEQ ID NO: 98883 - RNA, 19 nt, Homo sapiens
  misc_RNA (1)...(19): siRNA sense strand
gagaguguuuacaggcauu

SEQ ID NO: 98884 - RNA, 19 nt, Homo sapiens
  misc_RNA (1)...(19): siRNA sense strand
acaggagguugcuaucaaa

SEQ ID NO: 98885 - RNA, 19 nt, Homo sapiens
  misc_RNA (1)...(19): siRNA sense strand
gucacucacugauguggua

SEQ ID NO: 98886 - RNA, 19 nt, Homo sapiens
  misc_RNA (1)...(19): siRNA sense strand
gaacagugggcucgauuac

SEQ ID NO: 98887 - RNA, 19 nt, Homo sapiens
  misc_RNA (1)...(19): siRNA sense strand
aaagaagcaaugaagagua

SEQ ID NO: 98888 - RNA, 19 nt, Homo sapiens
  misc_RNA (1)...(19): siRNA sense strand
gaagagauuauggagaaau

SEQ ID NO: 98889 - RNA, 19 nt, Homo sapiens
  misc_RNA (1)...(19): siRNA sense strand
gaccggaucauacgaaauc

SEQ ID NO: 98890 - RNA, 19 nt, Homo sapiens
  misc_RNA (1)...(19): siRNA sense strand
cgaaugagcagcaccaucu

SEQ ID NO: 98891 - RNA, 19 nt, Homo sapiens
  misc_RNA (1)...(19): siRNA sense strand
cagaggaggaggaugauga

SEQ ID NO: 98892 - RNA, 19 nt, Homo sapiens
  misc_RNA (1)...(19): siRNA sense strand
aaaggaacggccagaaauu

SEQ ID NO: 98893 - RNA, 19 nt, Homo sapiens
  misc_RNA (1)...(19): siRNA sense strand
gcuaaagaagcaaugaaga

SEQ ID NO: 98894 - RNA, 19 nt, Homo sapiens
  misc_RNA (1)...(19): siRNA sense strand
ggugaugaaagaauugaaa

SEQ ID NO: 98895 - RNA, 19 nt, Homo sapiens
  misc_RNA (1)...(19): siRNA sense strand
gcgaccggaucauacgaaa

SEQ ID NO: 98896 - RNA, 19 nt, Homo sapiens
  misc_RNA (1)...(19): siRNA sense strand
cauggcagcuaaagaagca

SEQ ID NO: 98897 - RNA, 19 nt, Homo sapiens
  misc_RNA (1)...(19): siRNA sense strand
ccaaaccguuaucuagcuu

SEQ ID NO: 98898 - RNA, 19 nt, Homo sapiens
  misc_RNA (1)...(19): siRNA sense strand
caagugauccacagagaca

SEQ ID NO: 98899 - RNA, 19 nt, Homo sapiens
  misc_RNA (1)...(19): siRNA sense strand
uuacagaaacagccaaaga

SEQ ID NO: 98900 - RNA, 19 nt, Homo sapiens
  misc_RNA (1)...(19): siRNA sense strand
ggacaggagguugcuauca

SEQ ID NO: 98901 - RNA, 19 nt, Homo sapiens
  misc_RNA (1)...(19): siRNA sense strand
ugacagaugaagagauuau

SEQ ID NO: 98902 - RNA, 19 nt, Homo sapiens
  misc_RNA (1)...(19): siRNA sense strand
aaauuucuccuccaucuga

SEQ ID NO: 98903 - RNA, 19 nt, Homo sapiens
  misc_RNA (1)...(19): siRNA sense strand
uugagggccuuguaccuaa

SEQ ID NO: 98904 - RNA, 19 nt, Homo sapiens
  misc_RNA (1)...(19): siRNA sense strand
uaacagaaacgugcaugga

SEQ ID NO: 98905 - RNA, 19 nt, Homo sapiens
  misc_RNA (1)...(19): siRNA sense strand
ccaaagaaggaacugauca

SEQ ID NO: 98906 - RNA, 19 nt, Homo sapiens
  misc_RNA (1)...(19): siRNA sense strand
aaagaagacuaagaugaca

SEQ ID NO: 98907 - RNA, 19 nt, Homo sapiens
  misc_RNA (1)...(19): siRNA sense strand
gagccuccauaccucaaug

SEQ ID NO: 98908 - RNA, 19 nt, Homo sapiens
  misc_RNA (1)...(19): siRNA sense strand
ccuaauagcaacuaaugga

SEQ ID NO: 98909 - RNA, 19 nt, Homo sapiens
  misc_RNA (1)...(19): siRNA sense strand
uaacgagauucuggugaug

SEQ ID NO: 98910 - RNA, 19 nt, Homo sapiens
  misc_RNA (1)...(19): siRNA sense strand
acagagacaucaaaaguga

SEQ ID NO: 98911 - RNA, 19 nt, Homo sapiens
  misc_RNA (1)...(19): siRNA sense strand
uaagaugacagaugaagag

SEQ ID NO: 98912 - RNA, 19 nt, Homo sapiens
  misc_RNA (1)...(19): siRNA sense strand
ccacugaucauggcagcua

SEQ ID NO: 98913 - RNA, 19 nt, Homo sapiens
  misc_RNA (1)...(19): siRNA sense strand
aaaccguuaucuagcuuga

SEQ ID NO: 98914 - RNA, 19 nt, Homo sapiens
  misc_RNA (1)...(19): siRNA sense strand
cagaauccagagaaacuuu

SEQ ID NO: 98915 - RNA, 19 nt, Homo sapiens
  misc_RNA (1)...(19): siRNA sense strand
uaagcucacugacuuuggu

SEQ ID NO: 98916 - RNA, 19 nt, Homo sapiens
  misc_RNA (1)...(19): siRNA sense strand
uuaacgagauucuggugau

SEQ ID NO: 98917 - RNA, 19 nt, Homo sapiens
  misc_RNA (1)...(19): siRNA sense strand
ggacaaggggcuucuggua

SEQ ID NO: 98918 - RNA, 19 nt, Homo sapiens
  misc_RNA (1)...(19): siRNA sense strand
gaccuccaauaucaccaaa

SEQ ID NO: 98919 - RNA, 19 nt, Homo sapiens
  misc_RNA (1)...(19): siRNA sense strand
cuguuaagcucacugacuu

SEQ ID NO: 98920 - RNA, 19 nt, Homo sapiens
  misc_RNA (1)...(19): siRNA sense strand
gggaauggaaggaucuguu

SEQ ID NO: 98921 - RNA, 19 nt, Homo sapiens
  misc_RNA (1)...(19): siRNA sense strand
ugaaaccuuugcccucugu

SEQ ID NO: 98922 - RNA, 19 nt, Homo sapiens
  misc_RNA (1)...(19): siRNA sense strand
cagaaacgugcauggauga

SEQ ID NO: 98923 - RNA, 19 nt, Homo sapiens
  misc_RNA (1)...(19): siRNA sense strand
uacagaaacagccaaagaa

SEQ ID NO: 98924 - RNA, 19 nt, Homo sapiens
  misc_RNA (1)...(19): siRNA sense strand
gagacugcuccucccguua

SEQ ID NO: 98925 - RNA, 19 nt, Homo sapiens
  misc_RNA (1)...(19): siRNA sense strand
ggaugaugaugaagagacu

SEQ ID NO: 98926 - RNA, 19 nt, Homo sapiens
  misc_RNA (1)...(19): siRNA sense strand
uaaagaagcaaugaagagu

SEQ ID NO: 98927 - RNA, 19 nt, Homo sapiens
  misc_RNA (1)...(19): siRNA sense strand
aaaucgauguuuggaaaug

SEQ ID NO: 98928 - RNA, 19 nt, Homo sapiens
  misc_RNA (1)...(19): siRNA sense strand
ccugguaggagaugaauug

SEQ ID NO: 98929 - RNA, 19 nt, Homo sapiens
  misc_RNA (1)...(19): siRNA sense strand
uuacuacagaccuccaaua

SEQ ID NO: 98930 - RNA, 19 nt, Homo sapiens
  misc_RNA (1)...(19): siRNA sense strand
gauccacagagacaucaaa

SEQ ID NO: 98931 - RNA, 19 nt, Homo sapiens
  misc_RNA (1)...(19): siRNA sense strand
uguuuguggucauggaaua

SEQ ID NO: 98932 - RNA, 19 nt, Homo sapiens
  misc_RNA (1)...(19): siRNA sense strand
aaagaaggaacugaucauu

SEQ ID NO: 98933 - RNA, 19 nt, Homo sapiens
  misc_RNA (1)...(19): siRNA sense strand
caaagaaggaacugaucau

SEQ ID NO: 98934 - RNA, 19 nt, Homo sapiens
  misc_RNA (1)...(19): siRNA sense strand
gaagcacccgcaguaguga

SEQ ID NO: 98935 - RNA, 19 nt, Homo sapiens
  misc_RNA (1)...(19): siRNA sense strand
aacagaagcacccgcagua

SEQ ID NO: 98936 - RNA, 19 nt, Homo sapiens
  misc_RNA (1)...(19): siRNA sense strand
ucaccaaacuagagcaaaa

SEQ ID NO: 98937 - RNA, 19 nt, Homo sapiens
  misc_RNA (1)...(19): siRNA sense strand
uaacggagaacuggaagau

SEQ ID NO: 98938 - RNA, 19 nt, Homo sapiens
  misc_RNA (1)...(19): siRNA sense strand
caauaucaccaaacuagag

SEQ ID NO: 98939 - RNA, 19 nt, Homo sapiens
  misc_RNA (1)...(19): siRNA sense strand
gccaaaccguuaucuagcu

SEQ ID NO: 98940 - RNA, 19 nt, Homo sapiens
  misc_RNA (1)...(19): siRNA sense strand
gaucuguuaagcucacuga

SEQ ID NO: 98941 - RNA, 19 nt, Homo sapiens
  misc_RNA (1)...(19): siRNA sense strand
ugaauuguuuguggucaug

SEQ ID NO: 98942 - RNA, 19 nt, Homo sapiens
  misc_RNA (1)...(19): siRNA sense strand
gaaacagccaaagaaggaa

SEQ ID NO: 98943 - RNA, 19 nt, Homo sapiens
  misc_RNA (1)...(19): siRNA sense strand
ugaagagauuauggagaaa

SEQ ID NO: 98944 - RNA, 19 nt, Homo sapiens
  misc_RNA (1)...(19): siRNA sense strand
acacacggucuguaauuga

SEQ ID NO: 98945 - RNA, 19 nt, Homo sapiens
  misc_RNA (1)...(19): siRNA sense strand
caacacagugaagcagaaa

SEQ ID NO: 98946 - RNA, 19 nt, Homo sapiens
  misc_RNA (1)...(19): siRNA sense strand
aaucaucuccauauucuca

SEQ ID NO: 98947 - RNA, 19 nt, Homo sapiens
  misc_RNA (1)...(19): siRNA sense strand
aaggaacggccagaaauuu

SEQ ID NO: 98948 - RNA, 19 nt, Homo sapiens
  misc_RNA (1)...(19): siRNA sense strand
cuaaagaagcaaugaagag

SEQ ID NO: 98949 - RNA, 19 nt, Homo sapiens
  misc_RNA (1)...(19): siRNA sense strand
gaacacagaucggcaaaga

SEQ ID NO: 98950 - RNA, 19 nt, Homo sapiens
  misc_RNA (1)...(19): siRNA sense strand
gacaagagguggccauaaa

SEQ ID NO: 98951 - RNA, 19 nt, Homo sapiens
  misc_RNA (1)...(19): siRNA sense strand
ggauggcucuguuaaauug

SEQ ID NO: 98952 - RNA, 19 nt, Homo sapiens
  misc_RNA (1)...(19): siRNA sense strand
gagagugccugcaagcuuu

SEQ ID NO: 98953 - RNA, 19 nt, Homo sapiens
  misc_RNA (1)...(19): siRNA sense strand
gauuaucgcugcaaaggaa

SEQ ID NO: 98954 - RNA, 19 nt, Homo sapiens
  misc_RNA (1)...(19): siRNA sense strand
guugauaucuggucucuug

SEQ ID NO: 98955 - RNA, 19 nt, Homo sapiens
  misc_RNA (1)...(19): siRNA sense strand
uuaaaucgcugucuugaga

SEQ ID NO: 98956 - RNA, 19 nt, Homo sapiens
  misc_RNA (1)...(19): siRNA sense strand
agaagaagaugaagaggaa

SEQ ID NO: 98957 - RNA, 19 nt, Homo sapiens
  misc_RNA (1)...(19): siRNA sense strand
ccacugaggaugaauagua

SEQ ID NO: 98958 - RNA, 19 nt, Homo sapiens
  misc_RNA (1)...(19): siRNA sense strand
ggugauccauagagauaua

SEQ ID NO: 98959 - RNA, 19 nt, Homo sapiens
  misc_RNA (1)...(19): siRNA sense strand
gcaaaggaagcaauuaaga

SEQ ID NO: 98960 - RNA, 19 nt, Homo sapiens
  misc_RNA (1)...(19): siRNA sense strand
caaaguaaacgaagcacua

SEQ ID NO: 98961 - RNA, 19 nt, Homo sapiens
  misc_RNA (1)...(19): siRNA sense strand
ggaagaagaagaagaagau

SEQ ID NO: 98962 - RNA, 19 nt, Homo sapiens
  misc_RNA (1)...(19): siRNA sense strand
uaucuggucucuuggaauu

SEQ ID NO: 98963 - RNA, 19 nt, Homo sapiens
  misc_RNA (1)...(19): siRNA sense strand
caaaggaagcaauuaagaa

SEQ ID NO: 98964 - RNA, 19 nt, Homo sapiens
  misc_RNA (1)...(19): siRNA sense strand
uaagaagcauugugagugu

SEQ ID NO: 98965 - RNA, 19 nt, Homo sapiens
  misc_RNA (1)...(19): siRNA sense strand
caaaccaggugauccauag

SEQ ID NO: 98966 - RNA, 19 nt, Homo sapiens
  misc_RNA (1)...(19): siRNA sense strand
acuccaaacuuccaacaua

SEQ ID NO: 98967 - RNA, 19 nt, Homo sapiens
  misc_RNA (1)...(19): siRNA sense strand
ccagaucacuccugagcaa

SEQ ID NO: 98968 - RNA, 19 nt, Homo sapiens
  misc_RNA (1)...(19): siRNA sense strand
caccagcaguaccaaauaa

SEQ ID NO: 98969 - RNA, 19 nt, Homo sapiens
  misc_RNA (1)...(19): siRNA sense strand
aauccaagaugacagauga

SEQ ID NO: 98970 - RNA, 19 nt, Homo sapiens
  misc_RNA (1)...(19): siRNA sense strand
gaagaacccacaagcuguu

SEQ ID NO: 98971 - RNA, 19 nt, Homo sapiens
  misc_RNA (1)...(19): siRNA sense strand
acacagaucggcaaagaaa

SEQ ID NO: 98972 - RNA, 19 nt, Homo sapiens
  misc_RNA (1)...(19): siRNA sense strand
gcaccaagaccagagcaua

SEQ ID NO: 98973 - RNA, 19 nt, Homo sapiens
  misc_RNA (1)...(19): siRNA sense strand
ccaauaagaagaaggagaa

SEQ ID NO: 98974 - RNA, 19 nt, Homo sapiens
  misc_RNA (1)...(19): siRNA sense strand
ccauagagauauaaagagu

SEQ ID NO: 98975 - RNA, 19 nt, Homo sapiens
  misc_RNA (1)...(19): siRNA sense strand
gauaucuggucucuuggaa

SEQ ID NO: 98976 - RNA, 19 nt, Homo sapiens
  misc_RNA (1)...(19): siRNA sense strand
ccaaagaaacagucaacaa

SEQ ID NO: 98977 - RNA, 19 nt, Homo sapiens
  misc_RNA (1)...(19): siRNA sense strand
gggcaucagguacuguuua

SEQ ID NO: 98978 - RNA, 19 nt, Homo sapiens
  misc_RNA (1)...(19): siRNA sense strand
gagaagcuaagaagcauug

SEQ ID NO: 98979 - RNA, 19 nt, Homo sapiens
  misc_RNA (1)...(19): siRNA sense strand
cagaaauacaugagcuuua

SEQ ID NO: 98980 - RNA, 19 nt, Homo sapiens
  misc_RNA (1)...(19): siRNA sense strand
gaagagaagaauaagaaag

SEQ ID NO: 98981 - RNA, 19 nt, Homo sapiens
  misc_RNA (1)...(19): siRNA sense strand
cagccugacuccucugauu

SEQ ID NO: 98982 - RNA, 19 nt, Homo sapiens
  misc_RNA (1)...(19): siRNA sense strand
gagagacugucagcuguau

SEQ ID NO: 98983 - RNA, 19 nt, Homo sapiens
  misc_RNA (1)...(19): siRNA sense strand
caggugauccauagagaua

SEQ ID NO: 98984 - RNA, 19 nt, Homo sapiens
  misc_RNA (1)...(19): siRNA sense strand
gaugacagaugaggagauc

SEQ ID NO: 98985 - RNA, 19 nt, Homo sapiens
  misc_RNA (1)...(19): siRNA sense strand
ggacaagagguggccauaa

SEQ ID NO: 98986 - RNA, 19 nt, Homo sapiens
  misc_RNA (1)...(19): siRNA sense strand
cccaagaaggaauuaauua

SEQ ID NO: 98987 - RNA, 19 nt, Homo sapiens
  misc_RNA (1)...(19): siRNA sense strand
gaaagagcgcccagagauc

SEQ ID NO: 98988 - RNA, 19 nt, Homo sapiens
  misc_RNA (1)...(19): siRNA sense strand
cacugaggaugaauaguaa

SEQ ID NO: 98989 - RNA, 19 nt, Homo sapiens
  misc_RNA (1)...(19): siRNA sense strand
ggcaucagguacuguuuau

SEQ ID NO: 98990 - RNA, 19 nt, Homo sapiens
  misc_RNA (1)...(19): siRNA sense strand
gaaaaugccaauuccagua

SEQ ID NO: 98991 - RNA, 19 nt, Homo sapiens
  misc_RNA (1)...(19): siRNA sense strand
gcaaugggcacgauuacuc

SEQ ID NO: 98992 - RNA, 19 nt, Homo sapiens
  misc_RNA (1)...(19): siRNA sense strand
caaagaaacagucaacaac

SEQ ID NO: 98993 - RNA, 19 nt, Homo sapiens
  misc_RNA (1)...(19): siRNA sense strand
cuccaaacuuccaacauaa

SEQ ID NO: 98994 - RNA, 19 nt, Homo sapiens
  misc_RNA (1)...(19): siRNA sense strand
gagaaagagcgcccagaga

SEQ ID NO: 98995 - RNA, 19 nt, Homo sapiens
  misc_RNA (1)...(19): siRNA sense strand
ccaauuccaguacuuugua

SEQ ID NO: 98996 - RNA, 19 nt, Homo sapiens
  misc_RNA (1)...(19): siRNA sense strand
agaaauacaugagcuuuac

SEQ ID NO: 98997 - RNA, 19 nt, Homo sapiens
  misc_RNA (1)...(19): siRNA sense strand
cccacaagcuguucuagau

SEQ ID NO: 98998 - RNA, 19 nt, Homo sapiens
  misc_RNA (1)...(19): siRNA sense strand
guaacaaccgggauucuuc

SEQ ID NO: 98999 - RNA, 19 nt, Homo sapiens
  misc_RNA (1)...(19): siRNA sense strand
gaagaagaagaagaugaaa

SEQ ID NO: 99000 - RNA, 19 nt, Homo sapiens
  misc_RNA (1)...(19): siRNA sense strand
cacaagcuguucuagaugu

SEQ ID NO: 99001 - RNA, 19 nt, Homo sapiens
  misc_RNA (1)...(19): siRNA sense strand
ugaagaggaagaagaagaa

SEQ ID NO: 99002 - RNA, 19 nt, Homo sapiens
  misc_RNA (1)...(19): siRNA sense strand
ggauggauggcucuguuaa

SEQ ID NO: 99003 - RNA, 19 nt, Homo sapiens
  misc_RNA (1)...(19): siRNA sense strand
agaagaagaagaagaugaa

SEQ ID NO: 99004 - RNA, 19 nt, Homo sapiens
  misc_RNA (1)...(19): siRNA sense strand
cugaagagaagaauaagaa

SEQ ID NO: 99005 - RNA, 19 nt, Homo sapiens
  misc_RNA (1)...(19): siRNA sense strand
cugacggucuggauaauga

SEQ ID NO: 99006 - RNA, 19 nt, Homo sapiens
  misc_RNA (1)...(19): siRNA sense strand
uauggguagucauggaaua

SEQ ID NO: 99007 - RNA, 19 nt, Homo sapiens
  misc_RNA (1)...(19): siRNA sense strand
gcacgauuacuccaaacuu

SEQ ID NO: 99008 - RNA, 19 nt, Homo sapiens
  misc_RNA (1)...(19): siRNA sense strand
agaaagagcgcccagagau

SEQ ID NO: 99009 - RNA, 19 nt, Homo sapiens
  misc_RNA (1)...(19): siRNA sense strand
gcuccagaauccugagaga

SEQ ID NO: 99010 - RNA, 19 nt, Homo sapiens
  misc_RNA (1)...(19): siRNA sense strand
uacaugagcuuuacaucag

SEQ ID NO: 99011 - RNA, 19 nt, Homo sapiens
  misc_RNA (1)...(19): siRNA sense strand
caacaaccagaaauacaug

SEQ ID NO: 99012 - RNA, 19 nt, Homo sapiens
  misc_RNA (1)...(19): siRNA sense strand
gaagaagaacccacaagcu

SEQ ID NO: 99013 - RNA, 19 nt, Homo sapiens
  misc_RNA (1)...(19): siRNA sense strand
gaggaugaauaguaacaac

SEQ ID NO: 99014 - RNA, 19 nt, Homo sapiens
  misc_RNA (1)...(19): siRNA sense strand
gagacugucagcuguauuc

SEQ ID NO: 99015 - RNA, 19 nt, Homo sapiens
  misc_RNA (1)...(19): siRNA sense strand
gaucacuccugagcaaagu

SEQ ID NO: 99016 - RNA, 19 nt, Homo sapiens
  misc_RNA (1)...(19): siRNA sense strand
gauggauggcucuguuaaa

SEQ ID NO: 99017 - RNA, 19 nt, Homo sapiens
  misc_RNA (1)...(19): siRNA sense strand
uggauuuccugcacucaaa

SEQ ID NO: 99018 - RNA, 19 nt, Homo sapiens
  misc_RNA (1)...(19): siRNA sense strand
augaggagaucuuagagaa

SEQ ID NO: 99019 - RNA, 19 nt, Homo sapiens
  misc_RNA (1)...(19): siRNA sense strand
gcccauccuucgaguacaa

SEQ ID NO: 99020 - RNA, 19 nt, Homo sapiens
  misc_RNA (1)...(19): siRNA sense strand
gaacuccagagcuccagaa

SEQ ID NO: 99021 - RNA, 19 nt, Homo sapiens
  misc_RNA (1)...(19): siRNA sense strand
auaagaagaaggagaaaga

SEQ ID NO: 99022 - RNA, 19 nt, Homo sapiens
  misc_RNA (1)...(19): siRNA sense strand
agaggaagaagaagaagaa

SEQ ID NO: 99023 - RNA, 19 nt, Homo sapiens
  misc_RNA (1)...(19): siRNA sense strand
cacgauuacuccaaacuuc

SEQ ID NO: 99024 - RNA, 19 nt, Homo sapiens
  misc_RNA (1)...(19): siRNA sense strand
gggauggauggcucuguua

SEQ ID NO: 99025 - RNA, 19 nt, Homo sapiens
  misc_RNA (1)...(19): siRNA sense strand
cuuggugggugaugaacua

SEQ ID NO: 99026 - RNA, 19 nt, Homo sapiens
  misc_RNA (1)...(19): siRNA sense strand
aagcuaagaagcauuguga

SEQ ID NO: 99027 - RNA, 19 nt, Homo sapiens
  misc_RNA (1)...(19): siRNA sense strand
ucaccagcaguaccaaaua

SEQ ID NO: 99028 - RNA, 19 nt, Homo sapiens
  misc_RNA (1)...(19): siRNA sense strand
aaugagccaccaccaguua

SEQ ID NO: 99029 - RNA, 19 nt, Homo sapiens
  misc_RNA (1)...(19): siRNA sense strand
aagugcacauggauacaua

SEQ ID NO: 99030 - RNA, 19 nt, Homo sapiens
  misc_RNA (1)...(19): siRNA sense strand
uguucuagauguucucaaa

SEQ ID NO: 99031 - RNA, 19 nt, Homo sapiens
  misc_RNA (1)...(19): siRNA sense strand
cagcaguaccaaauaaaga

SEQ ID NO: 99032 - RNA, 19 nt, Homo sapiens
  misc_RNA (1)...(19): siRNA sense strand
caucagguacuguuuauac

SEQ ID NO: 99033 - RNA, 19 nt, Homo sapiens
  misc_RNA (1)...(19): siRNA sense strand
gaugaggagaucuuagaga

SEQ ID NO: 99034 - RNA, 19 nt, Homo sapiens
  misc_RNA (1)...(19): siRNA sense strand
ccagaaauacaugagcuuu

SEQ ID NO: 99035 - RNA, 19 nt, Homo sapiens
  misc_RNA (1)...(19): siRNA sense strand
uaagaacagcagccgcuaa

SEQ ID NO: 99036 - RNA, 19 nt, Homo sapiens
  misc_RNA (1)...(19): siRNA sense strand
gauagccacuaauggaacu

SEQ ID NO: 99037 - RNA, 19 nt, Homo sapiens
  misc_RNA (1)...(19): siRNA sense strand
gagcaaaguaaacgaagca

SEQ ID NO: 99038 - RNA, 19 nt, Homo sapiens
  misc_RNA (1)...(19): siRNA sense strand
ggugggugaugaacuaugg

SEQ ID NO: 99039 - RNA, 19 nt, Homo sapiens
  misc_RNA (1)...(19): siRNA sense strand
caagaccagagcauacaaa

SEQ ID NO: 99040 - RNA, 19 nt, Homo sapiens
  misc_RNA (1)...(19): siRNA sense strand
ugaagaagaagaugaagag

SEQ ID NO: 99041 - RNA, 19 nt, Homo sapiens
  misc_RNA (1)...(19): siRNA sense strand
gcuaagaagcauugugagu

SEQ ID NO: 99042 - RNA, 19 nt, Homo sapiens
  misc_RNA (1)...(19): siRNA sense strand
cugcaaaggaagcaauuaa

SEQ ID NO: 99043 - RNA, 19 nt, Homo sapiens
  misc_RNA (1)...(19): siRNA sense strand
ccugcaagcuuuggauuuc

SEQ ID NO: 99044 - RNA, 19 nt, Homo sapiens
  misc_RNA (1)...(19): siRNA sense strand
uuauacagcacuagacauu

SEQ ID NO: 99045 - RNA, 19 nt, Homo sapiens
  misc_RNA (1)...(19): siRNA sense strand
acaccacccucugcugaaa

SEQ ID NO: 99046 - RNA, 19 nt, Homo sapiens
  misc_RNA (1)...(19): siRNA sense strand
cgggauggauggcucuguu

SEQ ID NO: 99047 - RNA, 19 nt, Homo sapiens
  misc_RNA (1)...(19): siRNA sense strand
ucaaaccaggugauccaua

SEQ ID NO: 99048 - RNA, 19 nt, Homo sapiens
  misc_RNA (1)...(19): siRNA sense strand
uagagaagcuaagaagcau

SEQ ID NO: 99049 - RNA, 19 nt, Homo sapiens
  misc_RNA (1)...(19): siRNA sense strand
caaaguagaugaagaagaa

SEQ ID NO: 99050 - RNA, 19 nt, Homo sapiens
  misc_RNA (1)...(19): siRNA sense strand
gcagaaacaugccaaagaa

SEQ ID NO: 99051 - RNA, 19 nt, Homo sapiens
  misc_RNA (1)...(19): siRNA sense strand
ggaagaagaaagacaguua

SEQ ID NO: 99052 - RNA, 19 nt, Homo sapiens
  misc_RNA (1)...(19): siRNA sense strand
gaagagagcagcagaaaca

SEQ ID NO: 99053 - RNA, 19 nt, Homo sapiens
  misc_RNA (1)...(19): siRNA sense strand
gcacacaguucaucaguuc

SEQ ID NO: 99054 - RNA, 19 nt, Homo sapiens
  misc_RNA (1)...(19): siRNA sense strand
cuacacagauucaaaguau

SEQ ID NO: 99055 - RNA, 19 nt, Homo sapiens
  misc_RNA (1)...(19): siRNA sense strand
ggaagcaucucgaagaaca

SEQ ID NO: 99056 - RNA, 19 nt, Homo sapiens
  misc_RNA (1)...(19): siRNA sense strand
uuaaagagaugacaacaug

SEQ ID NO: 99057 - RNA, 19 nt, Homo sapiens
  misc_RNA (1)...(19): siRNA sense strand
ugucagagcuccagcauug

SEQ ID NO: 99058 - RNA, 19 nt, Homo sapiens
  misc_RNA (1)...(19): siRNA sense strand
gaaaagcgguuaaaagaga

SEQ ID NO: 99059 - RNA, 19 nt, Homo sapiens
  misc_RNA (1)...(19): siRNA sense strand
uaagagagcaguaugauga

SEQ ID NO: 99060 - RNA, 19 nt, Homo sapiens
  misc_RNA (1)...(19): siRNA sense strand
gcauucauguugagacuuu

SEQ ID NO: 99061 - RNA, 19 nt, Homo sapiens
  misc_RNA (1)...(19): siRNA sense strand
ccaauuaccuagguucuuu

SEQ ID NO: 99062 - RNA, 19 nt, Homo sapiens
  misc_RNA (1)...(19): siRNA sense strand
gaaugaugcugugggauuu

SEQ ID NO: 99063 - RNA, 19 nt, Homo sapiens
  misc_RNA (1)...(19): siRNA sense strand
gcaaauaugcagaaagcua

SEQ ID NO: 99064 - RNA, 19 nt, Homo sapiens
  misc_RNA (1)...(19): siRNA sense strand
ccaaaccuaugcugaauau

SEQ ID NO: 99065 - RNA, 19 nt, Homo sapiens
  misc_RNA (1)...(19): siRNA sense strand
gaaaguggacugaagauag

SEQ ID NO: 99066 - RNA, 19 nt, Homo sapiens
  misc_RNA (1)...(19): siRNA sense strand
cgaaaggcauucauguuga

SEQ ID NO: 99067 - RNA, 19 nt, Homo sapiens
  misc_RNA (1)...(19): siRNA sense strand
acacaucccuugcggaauu

SEQ ID NO: 99068 - RNA, 19 nt, Homo sapiens
  misc_RNA (1)...(19): siRNA sense strand
gaagaagaaagacaguuaa

SEQ ID NO: 99069 - RNA, 19 nt, Homo sapiens
  misc_RNA (1)...(19): siRNA sense strand
caaaguauauaacgaaguc

SEQ ID NO: 99070 - RNA, 19 nt, Homo sapiens
  misc_RNA (1)...(19): siRNA sense strand
gagauaaucaggagcaauu

SEQ ID NO: 99071 - RNA, 19 nt, Homo sapiens
  misc_RNA (1)...(19): siRNA sense strand
gaagaaagacaguuaagag

SEQ ID NO: 99072 - RNA, 19 nt, Homo sapiens
  misc_RNA (1)...(19): siRNA sense strand
gaccagacuugcagccuaa

SEQ ID NO: 99073 - RNA, 19 nt, Homo sapiens
  misc_RNA (1)...(19): siRNA sense strand
aaggagcgauauauaguua

SEQ ID NO: 99074 - RNA, 19 nt, Homo sapiens
  misc_RNA (1)...(19): siRNA sense strand
gcaggaagcaucucgaaga

SEQ ID NO: 99075 - RNA, 19 nt, Homo sapiens
  misc_RNA (1)...(19): siRNA sense strand
agaguaaucuucacaaagu

SEQ ID NO: 99076 - RNA, 19 nt, Homo sapiens
  misc_RNA (1)...(19): siRNA sense strand
gaggauuuauuacaaagug

SEQ ID NO: 99077 - RNA, 19 nt, Homo sapiens
  misc_RNA (1)...(19): siRNA sense strand
ugacacagccucugaacaa

SEQ ID NO: 99078 - RNA, 19 nt, Homo sapiens
  misc_RNA (1)...(19): siRNA sense strand
aaagaaggagcgauauaua

SEQ ID NO: 99079 - RNA, 19 nt, Homo sapiens
  misc_RNA (1)...(19): siRNA sense strand
guaccggguuccaaagaaa

SEQ ID NO: 99080 - RNA, 19 nt, Homo sapiens
  misc_RNA (1)...(19): siRNA sense strand
ccgaaacccuucaauagau

SEQ ID NO: 99081 - RNA, 19 nt, Homo sapiens
  misc_RNA (1)...(19): siRNA sense strand
gcuaucggauccaaaccua

SEQ ID NO: 99082 - RNA, 19 nt, Homo sapiens
  misc_RNA (1)...(19): siRNA sense strand
gaaaggcauucauguugag

SEQ ID NO: 99083 - RNA, 19 nt, Homo sapiens
  misc_RNA (1)...(19): siRNA sense strand
gaaguuuauugaccaagug

SEQ ID NO: 99084 - RNA, 19 nt, Homo sapiens
  misc_RNA (1)...(19): siRNA sense strand
ggagcucuguccuauguau

SEQ ID NO: 99085 - RNA, 19 nt, Homo sapiens
  misc_RNA (1)...(19): siRNA sense strand
caccagaugucaaauuugu

SEQ ID NO: 99086 - RNA, 19 nt, Homo sapiens
  misc_RNA (1)...(19): siRNA sense strand
gaaggagcgauauauaguu

SEQ ID NO: 99087 - RNA, 19 nt, Homo sapiens
  misc_RNA (1)...(19): siRNA sense strand
ucaucuccauggccaauua

SEQ ID NO: 99088 - RNA, 19 nt, Homo sapiens
  misc_RNA (1)...(19): siRNA sense strand
gaaauuugaguccuaguca

SEQ ID NO: 99089 - RNA, 19 nt, Homo sapiens
  misc_RNA (1)...(19): siRNA sense strand
caggaagcaucucgaagaa

SEQ ID NO: 99090 - RNA, 19 nt, Homo sapiens
  misc_RNA (1)...(19): siRNA sense strand
gaaaagaaggagcgauaua

SEQ ID NO: 99091 - RNA, 19 nt, Homo sapiens
  misc_RNA (1)...(19): siRNA sense strand
ccagaugucaaauuuguuu

SEQ ID NO: 99092 - RNA, 19 nt, Homo sapiens
  misc_RNA (1)...(19): siRNA sense strand
gaccuucagucucugcauu

SEQ ID NO: 99093 - RNA, 19 nt, Homo sapiens
  misc_RNA (1)...(19): siRNA sense strand
uuucaacccuccuaaaguu

SEQ ID NO: 99094 - RNA, 19 nt, Homo sapiens
  misc_RNA (1)...(19): siRNA sense strand
cagaagagagguaucagaa

SEQ ID NO: 99095 - RNA, 19 nt, Homo sapiens
  misc_RNA (1)...(19): siRNA sense strand
guaggaaagagaaauuuga

SEQ ID NO: 99096 - RNA, 19 nt, Homo sapiens
  misc_RNA (1)...(19): siRNA sense strand
gauccaaaccuaugcugaa

SEQ ID NO: 99097 - RNA, 19 nt, Homo sapiens
  misc_RNA (1)...(19): siRNA sense strand
caaauaugcagaaagcuau

SEQ ID NO: 99098 - RNA, 19 nt, Homo sapiens
  misc_RNA (1)...(19): siRNA sense strand
cagcaaauaugcagaaagc

SEQ ID NO: 99099 - RNA, 19 nt, Homo sapiens
  misc_RNA (1)...(19): siRNA sense strand
caauagauccucaccagau

SEQ ID NO: 99100 - RNA, 19 nt, Homo sapiens
  misc_RNA (1)...(19): siRNA sense strand
cagcaaaguagaugaagaa

SEQ ID NO: 99101 - RNA, 19 nt, Homo sapiens
  misc_RNA (1)...(19): siRNA sense strand
gacacaauaugcucuugga

SEQ ID NO: 99102 - RNA, 19 nt, Homo sapiens
  misc_RNA (1)...(19): siRNA sense strand
gaaugaagaaggagcuuuc

SEQ ID NO: 99103 - RNA, 19 nt, Homo sapiens
  misc_RNA (1)...(19): siRNA sense strand
ggagcaauuuuaagaguaa

SEQ ID NO: 99104 - RNA, 19 nt, Homo sapiens
  misc_RNA (1)...(19): siRNA sense strand
aagagaaauuugaguccua

SEQ ID NO: 99105 - RNA, 19 nt, Homo sapiens
  misc_RNA (1)...(19): siRNA sense strand
gaacaggaggagcugaaug

SEQ ID NO: 99106 - RNA, 19 nt, Homo sapiens
  misc_RNA (1)...(19): siRNA sense strand
gcaaaguagaugaagaaga

SEQ ID NO: 99107 - RNA, 19 nt, Homo sapiens
  misc_RNA (1)...(19): siRNA sense strand
acucuuggauacuaaauug

SEQ ID NO: 99108 - RNA, 19 nt, Homo sapiens
  misc_RNA (1)...(19): siRNA sense strand
ccgaaaggcauucauguug

SEQ ID NO: 99109 - RNA, 19 nt, Homo sapiens
  misc_RNA (1)...(19): siRNA sense strand
ugacacaucagcauuuguu

SEQ ID NO: 99110 - RNA, 19 nt, Homo sapiens
  misc_RNA (1)...(19): siRNA sense strand
gccuaaacgugaucauguu

SEQ ID NO: 99111 - RNA, 19 nt, Homo sapiens
  misc_RNA (1)...(19): siRNA sense strand
gaagaagaacgcaaaagaa

SEQ ID NO: 99112 - RNA, 19 nt, Homo sapiens
  misc_RNA (1)...(19): siRNA sense strand
gaagagaagcagaucaaaa

SEQ ID NO: 99113 - RNA, 19 nt, Homo sapiens
  misc_RNA (1)...(19): siRNA sense strand
ggauaucauuaacaacaca

SEQ ID NO: 99114 - RNA, 19 nt, Homo sapiens
  misc_RNA (1)...(19): siRNA sense strand
ugaaugaugcugugggauu

SEQ ID NO: 99115 - RNA, 19 nt, Homo sapiens
  misc_RNA (1)...(19): siRNA sense strand
ccagacucuuggauacuaa

SEQ ID NO: 99116 - RNA, 19 nt, Homo sapiens
  misc_RNA (1)...(19): siRNA sense strand
caaaguguaccaggccaua

SEQ ID NO: 99117 - RNA, 19 nt, Homo sapiens
  misc_RNA (1)...(19): siRNA sense strand
cgaaacccuucaauagauc

SEQ ID NO: 99118 - RNA, 19 nt, Homo sapiens
  misc_RNA (1)...(19): siRNA sense strand
ccuacacccugcagaauca

SEQ ID NO: 99119 - RNA, 19 nt, Homo sapiens
  misc_RNA (1)...(19): siRNA sense strand
aaagaaaguggacugaaga

SEQ ID NO: 99120 - RNA, 19 nt, Homo sapiens
  misc_RNA (1)...(19): siRNA sense strand
agagguaucagaagcuuaa

SEQ ID NO: 99121 - RNA, 19 nt, Homo sapiens
  misc_RNA (1)...(19): siRNA sense strand
cucaccagaugucaaauuu

SEQ ID NO: 99122 - RNA, 19 nt, Homo sapiens
  misc_RNA (1)...(19): siRNA sense strand
gcaagccagggauuugauu

SEQ ID NO: 99123 - RNA, 19 nt, Homo sapiens
  misc_RNA (1)...(19): siRNA sense strand
ugauggaccuucagucucu

SEQ ID NO: 99124 - RNA, 19 nt, Homo sapiens
  misc_RNA (1)...(19): siRNA sense strand
gcacaguaggaaagagaaa

SEQ ID NO: 99125 - RNA, 19 nt, Homo sapiens
  misc_RNA (1)...(19): siRNA sense strand
ggacugaagauagcuggaa

SEQ ID NO: 99126 - RNA, 19 nt, Homo sapiens
  misc_RNA (1)...(19): siRNA sense strand
ggaagagaagcagaucaaa

SEQ ID NO: 99127 - RNA, 19 nt, Homo sapiens
  misc_RNA (1)...(19): siRNA sense strand
aaguaugacuacacagauu

SEQ ID NO: 99128 - RNA, 19 nt, Homo sapiens
  misc_RNA (1)...(19): siRNA sense strand
aaccuaugcugaauauaug

SEQ ID NO: 99129 - RNA, 19 nt, Homo sapiens
  misc_RNA (1)...(19): siRNA sense strand
ggaaaaccagcgaccuuua

SEQ ID NO: 99130 - RNA, 19 nt, Homo sapiens
  misc_RNA (1)...(19): siRNA sense strand
ucagcaaaguagaugaaga

SEQ ID NO: 99131 - RNA, 19 nt, Homo sapiens
  misc_RNA (1)...(19): siRNA sense strand
agaagcagaucaaaagaaa

SEQ ID NO: 99132 - RNA, 19 nt, Homo sapiens
  misc_RNA (1)...(19): siRNA sense strand
ggagaaaacaggaagagaa

SEQ ID NO: 99133 - RNA, 19 nt, Homo sapiens
  misc_RNA (1)...(19): siRNA sense strand
gucaauaccagcaaauaug

SEQ ID NO: 99134 - RNA, 19 nt, Homo sapiens
  misc_RNA (1)...(19): siRNA sense strand
aaguaaagauugcugucaa

SEQ ID NO: 99135 - RNA, 19 nt, Homo sapiens
  misc_RNA (1)...(19): siRNA sense strand
gaaguauccgaaaggcauu

SEQ ID NO: 99136 - RNA, 19 nt, Homo sapiens
  misc_RNA (1)...(19): siRNA sense strand
caaaacucauugaaccuuu

SEQ ID NO: 99137 - RNA, 19 nt, Homo sapiens
  misc_RNA (1)...(19): siRNA sense strand
gaguaaucuucacaaagug

SEQ ID NO: 99138 - RNA, 19 nt, Homo sapiens
  misc_RNA (1)...(19): siRNA sense strand
aauagauccucaccagaug

SEQ ID NO: 99139 - RNA, 19 nt, Homo sapiens
  misc_RNA (1)...(19): siRNA sense strand
cagcauuuguuucccuuag

SEQ ID NO: 99140 - RNA, 19 nt, Homo sapiens
  misc_RNA (1)...(19): siRNA sense strand
cccagacucuuggauacua

SEQ ID NO: 99141 - RNA, 19 nt, Homo sapiens
  misc_RNA (1)...(19): siRNA sense strand
gagcuggaaguauccgaaa

SEQ ID NO: 99142 - RNA, 19 nt, Homo sapiens
  misc_RNA (1)...(19): siRNA sense strand
cuauguaucuccuaacacu

SEQ ID NO: 99143 - RNA, 19 nt, Homo sapiens
  misc_RNA (1)...(19): siRNA sense strand
uguccuauguaucuccuaa

SEQ ID NO: 99144 - RNA, 19 nt, Homo sapiens
  misc_RNA (1)...(19): siRNA sense strand
gagcuccagcauugacuuu

SEQ ID NO: 99145 - RNA, 19 nt, Homo sapiens
  misc_RNA (1)...(19): siRNA sense strand
gaaacaugccaaagaacag

SEQ ID NO: 99146 - RNA, 19 nt, Homo sapiens
  misc_RNA (1)...(19): siRNA sense strand
agaaagcuaucggauccaa

SEQ ID NO: 99147 - RNA, 19 nt, Homo sapiens
  misc_RNA (1)...(19): siRNA sense strand
ccgaagguuuuccaaguua

SEQ ID NO: 99148 - RNA, 19 nt, Homo sapiens
  misc_RNA (1)...(19): siRNA sense strand
guaaucuucacaaagugua

SEQ ID NO: 99149 - RNA, 19 nt, Homo sapiens
  misc_RNA (1)...(19): siRNA sense strand
gaaugaagcuguaaacuua

SEQ ID NO: 99150 - RNA, 19 nt, Homo sapiens
  misc_RNA (1)...(19): siRNA sense strand
gaagaugucucaaguagau

SEQ ID NO: 99151 - RNA, 19 nt, Homo sapiens
  misc_RNA (1)...(19): siRNA sense strand
gaaguggguucccuagaua

SEQ ID NO: 99152 - RNA, 19 nt, Homo sapiens
  misc_RNA (1)...(19): siRNA sense strand
ccaacgagcucaacaacaa

SEQ ID NO: 99153 - RNA, 19 nt, Homo sapiens
  misc_RNA (1)...(19): siRNA sense strand
guacgaagaugaugaagca

SEQ ID NO: 99154 - RNA, 19 nt, Homo sapiens
  misc_RNA (1)...(19): siRNA sense strand
gaaacgagaagaugcaauu

SEQ ID NO: 99155 - RNA, 19 nt, Homo sapiens
  misc_RNA (1)...(19): siRNA sense strand
caacagaacacuauucaga

SEQ ID NO: 99156 - RNA, 19 nt, Homo sapiens
  misc_RNA (1)...(19): siRNA sense strand
ucaaguagauauucucgaa

SEQ ID NO: 99157 - RNA, 19 nt, Homo sapiens
  misc_RNA (1)...(19): siRNA sense strand
gaagaagaugucucaagua

SEQ ID NO: 99158 - RNA, 19 nt, Homo sapiens
  misc_RNA (1)...(19): siRNA sense strand
agaccuagaugacauagaa

SEQ ID NO: 99159 - RNA, 19 nt, Homo sapiens
  misc_RNA (1)...(19): siRNA sense strand
ugaagaagaugucucaagu

SEQ ID NO: 99160 - RNA, 19 nt, Homo sapiens
  misc_RNA (1)...(19): siRNA sense strand
gaugcaagauaaagaggaa

SEQ ID NO: 99161 - RNA, 19 nt, Homo sapiens
  misc_RNA (1)...(19): siRNA sense strand
gcacaaccagugucucuga

SEQ ID NO: 99162 - RNA, 19 nt, Homo sapiens
  misc_RNA (1)...(19): siRNA sense strand
ugagacugaugcaagauaa

SEQ ID NO: 99163 - RNA, 19 nt, Homo sapiens
  misc_RNA (1)...(19): siRNA sense strand
uagaugacauagaagauga

SEQ ID NO: 99164 - RNA, 19 nt, Homo sapiens
  misc_RNA (1)...(19): siRNA sense strand
gcagagugcuuagaugagu

SEQ ID NO: 99165 - RNA, 19 nt, Homo sapiens
  misc_RNA (1)...(19): siRNA sense strand
ucaaguagcacacuggaaa

SEQ ID NO: 99166 - RNA, 19 nt, Homo sapiens
  misc_RNA (1)...(19): siRNA sense strand
caaccagugucucugaaga

SEQ ID NO: 99167 - RNA, 19 nt, Homo sapiens
  misc_RNA (1)...(19): siRNA sense strand
aagaagaugucucaaguag

SEQ ID NO: 99168 - RNA, 19 nt, Homo sapiens
  misc_RNA (1)...(19): siRNA sense strand
aagaggaaaugauuggaaa

SEQ ID NO: 99169 - RNA, 19 nt, Homo sapiens
  misc_RNA (1)...(19): siRNA sense strand
gaacagcuaaagcaggaaa

SEQ ID NO: 99170 - RNA, 19 nt, Homo sapiens
  misc_RNA (1)...(19): siRNA sense strand
gugcuuagaugaguacgaa

SEQ ID NO: 99171 - RNA, 19 nt, Homo sapiens
  misc_RNA (1)...(19): siRNA sense strand
gauauaacagggaugcaaa

SEQ ID NO: 99172 - RNA, 19 nt, Homo sapiens
  misc_RNA (1)...(19): siRNA sense strand
ggagccaccuagaacaguu

SEQ ID NO: 99173 - RNA, 19 nt, Homo sapiens
  misc_RNA (1)...(19): siRNA sense strand
gcaauuacacaacagaaca

SEQ ID NO: 99174 - RNA, 19 nt, Homo sapiens
  misc_RNA (1)...(19): siRNA sense strand
gagaagaugcaauuacaca

SEQ ID NO: 99175 - RNA, 19 nt, Homo sapiens
  misc_RNA (1)...(19): siRNA sense strand
gauaaagaggaaaugauug

SEQ ID NO: 99176 - RNA, 19 nt, Homo sapiens
  misc_RNA (1)...(19): siRNA sense strand
agaaguggguucccuagau

SEQ ID NO: 99177 - RNA, 19 nt, Homo sapiens
  misc_RNA (1)...(19): siRNA sense strand
agaggaagcugcgggagaa

SEQ ID NO: 99178 - RNA, 19 nt, Homo sapiens
  misc_RNA (1)...(19): siRNA sense strand
uaaauagagaccuagauga

SEQ ID NO: 99179 - RNA, 19 nt, Homo sapiens
  misc_RNA (1)...(19): siRNA sense strand
caagauaaagaggaaauga

SEQ ID NO: 99180 - RNA, 19 nt, Homo sapiens
  misc_RNA (1)...(19): siRNA sense strand
gcaaauguuucagguacuc

SEQ ID NO: 99181 - RNA, 19 nt, Homo sapiens
  misc_RNA (1)...(19): siRNA sense strand
gaaagagcggaaacgagaa

SEQ ID NO: 99182 - RNA, 19 nt, Homo sapiens
  misc_RNA (1)...(19): siRNA sense strand
gaacaguuucaggcagaua

SEQ ID NO: 99183 - RNA, 19 nt, Homo sapiens
  misc_RNA (1)...(19): siRNA sense strand
agaaugaagcuguaaacuu

SEQ ID NO: 99184 - RNA, 19 nt, Homo sapiens
  misc_RNA (1)...(19): siRNA sense strand
cagagugcuuagaugagua

SEQ ID NO: 99185 - RNA, 19 nt, Homo sapiens
  misc_RNA (1)...(19): siRNA sense strand
uuacacaacagaacacuau

SEQ ID NO: 99186 - RNA, 19 nt, Homo sapiens
  misc_RNA (1)...(19): siRNA sense strand
acgagaagaugcaauuaca

SEQ ID NO: 99187 - RNA, 19 nt, Homo sapiens
  misc_RNA (1)...(19): siRNA sense strand
gcagaaagagcggaaacga

SEQ ID NO: 99188 - RNA, 19 nt, Homo sapiens
  misc_RNA (1)...(19): siRNA sense strand
gaagaugcaauuacacaac

SEQ ID NO: 99189 - RNA, 19 nt, Homo sapiens
  misc_RNA (1)...(19): siRNA sense strand
aaacgagaagaugcaauua

SEQ ID NO: 99190 - RNA, 19 nt, Homo sapiens
  misc_RNA (1)...(19): siRNA sense strand
cagguacucugguuucaag

SEQ ID NO: 99191 - RNA, 19 nt, Homo sapiens
  misc_RNA (1)...(19): siRNA sense strand
cuacaggagccaccuagaa

SEQ ID NO: 99192 - RNA, 19 nt, Homo sapiens
  misc_RNA (1)...(19): siRNA sense strand
gauauucucgaacagauag

SEQ ID NO: 99193 - RNA, 19 nt, Homo sapiens
  misc_RNA (1)...(19): siRNA sense strand
cagugucucugaagaagau

SEQ ID NO: 99194 - RNA, 19 nt, Homo sapiens
  misc_RNA (1)...(19): siRNA sense strand
uagauauucucgaacagau

SEQ ID NO: 99195 - RNA, 19 nt, Homo sapiens
  misc_RNA (1)...(19): siRNA sense strand
uuaaauagagaccuagaug

SEQ ID NO: 99196 - RNA, 19 nt, Homo sapiens
  misc_RNA (1)...(19): siRNA sense strand
gagcggaaacgagaagaug

SEQ ID NO: 99197 - RNA, 19 nt, Homo sapiens
  misc_RNA (1)...(19): siRNA sense strand
uagaugaguacgaagauga

SEQ ID NO: 99198 - RNA, 19 nt, Homo sapiens
  misc_RNA (1)...(19): siRNA sense strand
guagauauucucgaacaga

SEQ ID NO: 99199 - RNA, 19 nt, Homo sapiens
  misc_RNA (1)...(19): siRNA sense strand
ccgcagagugcuuagauga

SEQ ID NO: 99200 - RNA, 19 nt, Homo sapiens
  misc_RNA (1)...(19): siRNA sense strand
gugagacugaugcaagaua

SEQ ID NO: 99201 - RNA, 19 nt, Homo sapiens
  misc_RNA (1)...(19): siRNA sense strand
gaugcaaauguuucaggua

SEQ ID NO: 99202 - RNA, 19 nt, Homo sapiens
  misc_RNA (1)...(19): siRNA sense strand
aaguagauauucucgaaca

SEQ ID NO: 99203 - RNA, 19 nt, Homo sapiens
  misc_RNA (1)...(19): siRNA sense strand
aagaugcaauuacacaaca

SEQ ID NO: 99204 - RNA, 19 nt, Homo sapiens
  misc_RNA (1)...(19): siRNA sense strand
guagcacacuggaaaagaa

SEQ ID NO: 99205 - RNA, 19 nt, Homo sapiens
  misc_RNA (1)...(19): siRNA sense strand
aaagaggaaaugauuggaa

SEQ ID NO: 99206 - RNA, 19 nt, Homo sapiens
  misc_RNA (1)...(19): siRNA sense strand
gaaaaccuaagacuuguga

SEQ ID NO: 99207 - RNA, 19 nt, Homo sapiens
  misc_RNA (1)...(19): siRNA sense strand
ggaaaugauuggaaaacuc

SEQ ID NO: 99208 - RNA, 19 nt, Homo sapiens
  misc_RNA (1)...(19): siRNA sense strand
auagagaccuagaugacau

SEQ ID NO: 99209 - RNA, 19 nt, Homo sapiens
  misc_RNA (1)...(19): siRNA sense strand
gaaaugauuggaaaacuca

SEQ ID NO: 99210 - RNA, 19 nt, Homo sapiens
  misc_RNA (1)...(19): siRNA sense strand
aaaccuaagacuugugaga

SEQ ID NO: 99211 - RNA, 19 nt, Homo sapiens
  misc_RNA (1)...(19): siRNA sense strand
cacaacagaacacuauuca

SEQ ID NO: 99212 - RNA, 19 nt, Homo sapiens
  misc_RNA (1)...(19): siRNA sense strand
gcaagauaaagaggaaaug

SEQ ID NO: 99213 - RNA, 19 nt, Homo sapiens
  misc_RNA (1)...(19): siRNA sense strand
gaaagacaagaaaaccuaa

SEQ ID NO: 99214 - RNA, 19 nt, Homo sapiens
  misc_RNA (1)...(19): siRNA sense strand
uugaagaucuugaaaagga

SEQ ID NO: 99215 - RNA, 19 nt, Homo sapiens
  misc_RNA (1)...(19): siRNA sense strand
gcuuagaugaguacgaaga

SEQ ID NO: 99216 - RNA, 19 nt, Homo sapiens
  misc_RNA (1)...(19): siRNA sense strand
cacaaccagugucucugaa

SEQ ID NO: 99217 - RNA, 19 nt, Homo sapiens
  misc_RNA (1)...(19): siRNA sense strand
gcaggaaaauaaaacucuu

SEQ ID NO: 99218 - RNA, 19 nt, Homo sapiens
  misc_RNA (1)...(19): siRNA sense strand
gcaaggggcagaucgagaa

SEQ ID NO: 99219 - RNA, 19 nt, Homo sapiens
  misc_RNA (1)...(19): siRNA sense strand
ugaguacgaagaugaugaa

SEQ ID NO: 99220 - RNA, 19 nt, Homo sapiens
  misc_RNA (1)...(19): siRNA sense strand
gagccaccuagaacaguuu

SEQ ID NO: 99221 - RNA, 19 nt, Homo sapiens
  misc_RNA (1)...(19): siRNA sense strand
gagacugaugcaagauaaa

SEQ ID NO: 99222 - RNA, 19 nt, Homo sapiens
  misc_RNA (1)...(19): siRNA sense strand
gauccaggcaguuccuauc

SEQ ID NO: 99223 - RNA, 19 nt, Homo sapiens
  misc_RNA (1)...(19): siRNA sense strand
gaugacauagaagaugaaa

SEQ ID NO: 99224 - RNA, 19 nt, Homo sapiens
  misc_RNA (1)...(19): siRNA sense strand
ugaugaagcagggcagaaa

SEQ ID NO: 99225 - RNA, 19 nt, Homo sapiens
  misc_RNA (1)...(19): siRNA sense strand
acacaacagaacacuauuc

SEQ ID NO: 99226 - RNA, 19 nt, Homo sapiens
  misc_RNA (1)...(19): siRNA sense strand
uagagaccuagaugacaua

SEQ ID NO: 99227 - RNA, 19 nt, Homo sapiens
  misc_RNA (1)...(19): siRNA sense strand
aacagaacacuauucagaa

SEQ ID NO: 99228 - RNA, 19 nt, Homo sapiens
  misc_RNA (1)...(19): siRNA sense strand
ggaaaacucaaagaagaaa

SEQ ID NO: 99229 - RNA, 19 nt, Homo sapiens
  misc_RNA (1)...(19): siRNA sense strand
ggaaacgagaagaugcaau

SEQ ID NO: 99230 - RNA, 19 nt, Homo sapiens
  misc_RNA (1)...(19): siRNA sense strand
gaugcaauuacacaacaga

SEQ ID NO: 99231 - RNA, 19 nt, Homo sapiens
  misc_RNA (1)...(19): siRNA sense strand
aaauagagaccuagaugac

SEQ ID NO: 99232 - RNA, 19 nt, Homo sapiens
  misc_RNA (1)...(19): siRNA sense strand
guggguucccuagauauaa

SEQ ID NO: 99233 - RNA, 19 nt, Homo sapiens
  misc_RNA (1)...(19): siRNA sense strand
ggaaggcgaaacgcgagaa

SEQ ID NO: 99234 - RNA, 19 nt, Homo sapiens
  misc_RNA (1)...(19): siRNA sense strand
gaugaagcagggcagaaag

SEQ ID NO: 99235 - RNA, 19 nt, Homo sapiens
  misc_RNA (1)...(19): siRNA sense strand
uuggaaaacucaaagaaga

SEQ ID NO: 99236 - RNA, 19 nt, Homo sapiens
  misc_RNA (1)...(19): siRNA sense strand
cuaagacuugugagacuga

SEQ ID NO: 99237 - RNA, 19 nt, Homo sapiens
  misc_RNA (1)...(19): siRNA sense strand
cuagaugacauagaagaug

SEQ ID NO: 99238 - RNA, 19 nt, Homo sapiens
  misc_RNA (1)...(19): siRNA sense strand
uuagaugaguacgaagaug

SEQ ID NO: 99239 - RNA, 19 nt, Homo sapiens
  misc_RNA (1)...(19): siRNA sense strand
auaaagaggaaaugauugg

SEQ ID NO: 99240 - RNA, 19 nt, Homo sapiens
  misc_RNA (1)...(19): siRNA sense strand
caacaagccuggugaagug

SEQ ID NO: 99241 - RNA, 19 nt, Homo sapiens
  misc_RNA (1)...(19): siRNA sense strand
ucacagaccucgugcagaa

SEQ ID NO: 99242 - RNA, 19 nt, Homo sapiens
  misc_RNA (1)...(19): siRNA sense strand
gcaccugucuucacucaga

SEQ ID NO: 99243 - RNA, 19 nt, Homo sapiens
  misc_RNA (1)...(19): siRNA sense strand
gcauagggcuagugacuca

SEQ ID NO: 99244 - RNA, 19 nt, Homo sapiens
  misc_RNA (1)...(19): siRNA sense strand
ggucaaagacuacaccauu

SEQ ID NO: 99245 - RNA, 19 nt, Homo sapiens
  misc_RNA (1)...(19): siRNA sense strand
gcuagugacucaucaagau

SEQ ID NO: 99246 - RNA, 19 nt, Homo sapiens
  misc_RNA (1)...(19): siRNA sense strand
gcagaagucccucaaguuc

SEQ ID NO: 99247 - RNA, 19 nt, Homo sapiens
  misc_RNA (1)...(19): siRNA sense strand
caacaucggcucacucuuc

SEQ ID NO: 99248 - RNA, 19 nt, Homo sapiens
  misc_RNA (1)...(19): siRNA sense strand
ugaaggacaugaaugacaa

SEQ ID NO: 99249 - RNA, 19 nt, Homo sapiens
  misc_RNA (1)...(19): siRNA sense strand
gcaggugucugaccgagau

SEQ ID NO: 99250 - RNA, 19 nt, Homo sapiens
  misc_RNA (1)...(19): siRNA sense strand
ucaaugugcuggacgagaa

SEQ ID NO: 99251 - RNA, 19 nt, Homo sapiens
  misc_RNA (1)...(19): siRNA sense strand
ccacuguccuugucaaugu

SEQ ID NO: 99252 - RNA, 19 nt, Homo sapiens
  misc_RNA (1)...(19): siRNA sense strand
gaacaugccagcacugagu

SEQ ID NO: 99253 - RNA, 19 nt, Homo sapiens
  misc_RNA (1)...(19): siRNA sense strand
acacgccgcuggauauuga

SEQ ID NO: 99254 - RNA, 19 nt, Homo sapiens
  misc_RNA (1)...(19): siRNA sense strand
gacaggaacacuggacuua

SEQ ID NO: 99255 - RNA, 19 nt, Homo sapiens
  misc_RNA (1)...(19): siRNA sense strand
gcaggacaacggugacuuu

SEQ ID NO: 99256 - RNA, 19 nt, Homo sapiens
  misc_RNA (1)...(19): siRNA sense strand
acacuggacuuaucacugu

SEQ ID NO: 99257 - RNA, 19 nt, Homo sapiens
  misc_RNA (1)...(19): siRNA sense strand
gcagugacagcaagaagaa

SEQ ID NO: 99258 - RNA, 19 nt, Homo sapiens
  misc_RNA (1)...(19): siRNA sense strand
caacgcaccugucuucacu

SEQ ID NO: 99259 - RNA, 19 nt, Homo sapiens
  misc_RNA (1)...(19): siRNA sense strand
ccuaugaccucaccaucaa

SEQ ID NO: 99260 - RNA, 19 nt, Homo sapiens
  misc_RNA (1)...(19): siRNA sense strand
guaagaaggagaccaagga

SEQ ID NO: 99261 - RNA, 19 nt, Homo sapiens
  misc_RNA (1)...(19): siRNA sense strand
gcacagccuugguccaucu

SEQ ID NO: 99262 - RNA, 19 nt, Homo sapiens
  misc_RNA (1)...(19): siRNA sense strand
gagcuuugaucgagagcaa

SEQ ID NO: 99263 - RNA, 19 nt, Homo sapiens
  misc_RNA (1)...(19): siRNA sense strand
ggcuacaacuucucaguga

SEQ ID NO: 99264 - RNA, 19 nt, Homo sapiens
  misc_RNA (1)...(19): siRNA sense strand
acgagaaggucaaagacua

SEQ ID NO: 99265 - RNA, 19 nt, Homo sapiens
  misc_RNA (1)...(19): siRNA sense strand
ucaaugugcuggacugcaa

SEQ ID NO: 99266 - RNA, 19 nt, Homo sapiens
  misc_RNA (1)...(19): siRNA sense strand
gucaaagacuacaccauug

SEQ ID NO: 99267 - RNA, 19 nt, Homo sapiens
  misc_RNA (1)...(19): siRNA sense strand
uacaagacaucaaugacaa

SEQ ID NO: 99268 - RNA, 19 nt, Homo sapiens
  misc_RNA (1)...(19): siRNA sense strand
agaagucccucaaguucaa

SEQ ID NO: 99269 - RNA, 19 nt, Homo sapiens
  misc_RNA (1)...(19): siRNA sense strand
cagccuugguccaucuuua

SEQ ID NO: 99270 - RNA, 19 nt, Homo sapiens
  misc_RNA (1)...(19): siRNA sense strand
gacaaugaccccaaauuua

SEQ ID NO: 99271 - RNA, 19 nt, Homo sapiens
  misc_RNA (1)...(19): siRNA sense strand
guacaagacaucaaugaca

SEQ ID NO: 99272 - RNA, 19 nt, Homo sapiens
  misc_RNA (1)...(19): siRNA sense strand
caagcagcguggcaacauu

SEQ ID NO: 99273 - RNA, 19 nt, Homo sapiens
  misc_RNA (1)...(19): siRNA sense strand
gggaacagcgggagagcua

SEQ ID NO: 99274 - RNA, 19 nt, Homo sapiens
  misc_RNA (1)...(19): siRNA sense strand
caggaacacuggacuuauc

SEQ ID NO: 99275 - RNA, 19 nt, Homo sapiens
  misc_RNA (1)...(19): siRNA sense strand
gccgaacuaucugagaaua

SEQ ID NO: 99276 - RNA, 19 nt, Homo sapiens
  misc_RNA (1)...(19): siRNA sense strand
agacaucaaugacaacaca

SEQ ID NO: 99277 - RNA, 19 nt, Homo sapiens
  misc_RNA (1)...(19): siRNA sense strand
ucucagugcuugcuaagga

SEQ ID NO: 99278 - RNA, 19 nt, Homo sapiens
  misc_RNA (1)...(19): siRNA sense strand
ggagagauccaggugaaga

SEQ ID NO: 99279 - RNA, 19 nt, Homo sapiens
  misc_RNA (1)...(19): siRNA sense strand
ggacugcaaugacaaugac

SEQ ID NO: 99280 - RNA, 19 nt, Homo sapiens
  misc_RNA (1)...(19): siRNA sense strand
ggagagcuaugaguugaag

SEQ ID NO: 99281 - RNA, 19 nt, Homo sapiens
  misc_RNA (1)...(19): siRNA sense strand
gaagcaaccacagcucauu

SEQ ID NO: 99282 - RNA, 19 nt, Homo sapiens
  misc_RNA (1)...(19): siRNA sense strand
gaacagcgggagagcuaug

SEQ ID NO: 99283 - RNA, 19 nt, Homo sapiens
  misc_RNA (1)...(19): siRNA sense strand
caagacaggugacauuuuc

SEQ ID NO: 99284 - RNA, 19 nt, Homo sapiens
  misc_RNA (1)...(19): siRNA sense strand
gcaaaggcaagaagagcaa

SEQ ID NO: 99285 - RNA, 19 nt, Homo sapiens
  misc_RNA (1)...(19): siRNA sense strand
ccaacgguguggcauccua

SEQ ID NO: 99286 - RNA, 19 nt, Homo sapiens
  misc_RNA (1)...(19): siRNA sense strand
acagcaagaagaaguauuu

SEQ ID NO: 99287 - RNA, 19 nt, Homo sapiens
  misc_RNA (1)...(19): siRNA sense strand
gcagaaaucgaauacacau

SEQ ID NO: 99288 - RNA, 19 nt, Homo sapiens
  misc_RNA (1)...(19): siRNA sense strand
gauagaaguacaagacauc

SEQ ID NO: 99289 - RNA, 19 nt, Homo sapiens
  misc_RNA (1)...(19): siRNA sense strand
gugcuggacugcaaugaca

SEQ ID NO: 99290 - RNA, 19 nt, Homo sapiens
  misc_RNA (1)...(19): siRNA sense strand
cgggagagcuaugaguuga

SEQ ID NO: 99291 - RNA, 19 nt, Homo sapiens
  misc_RNA (1)...(19): siRNA sense strand
ccaaugcagaaaucgaaua

SEQ ID NO: 99292 - RNA, 19 nt, Homo sapiens
  misc_RNA (1)...(19): siRNA sense strand
ugacaacgcacccuauauc

SEQ ID NO: 99293 - RNA, 19 nt, Homo sapiens
  misc_RNA (1)...(19): siRNA sense strand
gagaacaugccagcacuga

SEQ ID NO: 99294 - RNA, 19 nt, Homo sapiens
  misc_RNA (1)...(19): siRNA sense strand
gaaguacaagacaucaaug

SEQ ID NO: 99295 - RNA, 19 nt, Homo sapiens
  misc_RNA (1)...(19): siRNA sense strand
gcacaggcaccauccuauc

SEQ ID NO: 99296 - RNA, 19 nt, Homo sapiens
  misc_RNA (1)...(19): siRNA sense strand
gugaagugauugcugagau

SEQ ID NO: 99297 - RNA, 19 nt, Homo sapiens
  misc_RNA (1)...(19): siRNA sense strand
gcacuaacucccucaaggu

SEQ ID NO: 99298 - RNA, 19 nt, Homo sapiens
  misc_RNA (1)...(19): siRNA sense strand
ggacaggaacacuggacuu

SEQ ID NO: 99299 - RNA, 19 nt, Homo sapiens
  misc_RNA (1)...(19): siRNA sense strand
ggugaaggccaaugacuca

SEQ ID NO: 99300 - RNA, 19 nt, Homo sapiens
  misc_RNA (1)...(19): siRNA sense strand
ugacaacacacccaacuuc

SEQ ID NO: 99301 - RNA, 19 nt, Homo sapiens
  misc_RNA (1)...(19): siRNA sense strand
caagccuggugaagugauu

SEQ ID NO: 99302 - RNA, 19 nt, Homo sapiens
  misc_RNA (1)...(19): siRNA sense strand
gaaugacaacgcacccuau

SEQ ID NO: 99303 - RNA, 19 nt, Homo sapiens
  misc_RNA (1)...(19): siRNA sense strand
gcugcuagagggccagaua

SEQ ID NO: 99304 - RNA, 19 nt, Homo sapiens
  misc_RNA (1)...(19): siRNA sense strand
gcaaggccuccaagggaaa

SEQ ID NO: 99305 - RNA, 19 nt, Homo sapiens
  misc_RNA (1)...(19): siRNA sense strand
ggacacgccgcuggauauu

SEQ ID NO: 99306 - RNA, 19 nt, Homo sapiens
  misc_RNA (1)...(19): siRNA sense strand
gcagguggcaacccuuaug

SEQ ID NO: 99307 - RNA, 19 nt, Homo sapiens
  misc_RNA (1)...(19): siRNA sense strand
ucaccgugcuugacaccaa

SEQ ID NO: 99308 - RNA, 19 nt, Homo sapiens
  misc_RNA (1)...(19): siRNA sense strand
agacuacaccauugagauu

SEQ ID NO: 99309 - RNA, 19 nt, Homo sapiens
  misc_RNA (1)...(19): siRNA sense strand
caacgcacccuauaucacu

SEQ ID NO: 99310 - RNA, 19 nt, Homo sapiens
  misc_RNA (1)...(19): siRNA sense strand
caacggugacuuuguuauc

SEQ ID NO: 99311 - RNA, 19 nt, Homo sapiens
  misc_RNA (1)...(19): siRNA sense strand
gagccucgcagccgacuau

SEQ ID NO: 99312 - RNA, 19 nt, Homo sapiens
  misc_RNA (1)...(19): siRNA sense strand
cuaaugcugagcugguuua

SEQ ID NO: 99313 - RNA, 19 nt, Homo sapiens
  misc_RNA (1)...(19): siRNA sense strand
ugaagugauugcugagauc

SEQ ID NO: 99314 - RNA, 19 nt, Homo sapiens
  misc_RNA (1)...(19): siRNA sense strand
gagcaguacuccgacuaca

SEQ ID NO: 99315 - RNA, 19 nt, Homo sapiens
  misc_RNA (1)...(19): siRNA sense strand
gguggcagccgaggacuuu

SEQ ID NO: 99316 - RNA, 19 nt, Homo sapiens
  misc_RNA (1)...(19): siRNA sense strand
cuaagggccucuucaccau

SEQ ID NO: 99317 - RNA, 19 nt, Homo sapiens
  misc_RNA (1)...(19): siRNA sense strand
gcaagaagaaguauuuccu

SEQ ID NO: 99318 - RNA, 19 nt, Homo sapiens
  misc_RNA (1)...(19): siRNA sense strand
gacaacgcacccuauauca

SEQ ID NO: 99319 - RNA, 19 nt, Homo sapiens
  misc_RNA (1)...(19): siRNA sense strand
cagaggaccaggaggagaa

SEQ ID NO: 99320 - RNA, 19 nt, Homo sapiens
  misc_RNA (1)...(19): siRNA sense strand
ggagaccaaggaccuguau

SEQ ID NO: 99321 - RNA, 19 nt, Homo sapiens
  misc_RNA (1)...(19): siRNA sense strand
ccaucacccuggagaagga

SEQ ID NO: 99322 - RNA, 19 nt, Homo sapiens
  misc_RNA (1)...(19): siRNA sense strand
gaugcugacucuggcucua

SEQ ID NO: 99323 - RNA, 19 nt, Homo sapiens
  misc_RNA (1)...(19): siRNA sense strand
gauuguggcuguggacucu

SEQ ID NO: 99324 - RNA, 19 nt, Homo sapiens
  misc_RNA (1)...(19): siRNA sense strand
aagaugggauggcuaacau

SEQ ID NO: 99325 - RNA, 19 nt, Homo sapiens
  misc_RNA (1)...(19): siRNA sense strand
agaccaaggugccaaugca

SEQ ID NO: 99326 - RNA, 19 nt, Homo sapiens
  misc_RNA (1)...(19): siRNA sense strand
ggcaagacaggugacauuu

SEQ ID NO: 99327 - RNA, 19 nt, Homo sapiens
  misc_RNA (1)...(19): siRNA sense strand
gcuagagggccagauagaa

SEQ ID NO: 99328 - RNA, 19 nt, Homo sapiens
  misc_RNA (1)...(19): siRNA sense strand
uauccagccugagcuuuga

SEQ ID NO: 99329 - RNA, 19 nt, Homo sapiens
  misc_RNA (1)...(19): siRNA sense strand
gcuucucagugcuugcuaa

SEQ ID NO: 99330 - RNA, 19 nt, Homo sapiens
  misc_RNA (1)...(19): siRNA sense strand
ccaaggugccaaugcagaa

SEQ ID NO: 99331 - RNA, 19 nt, Homo sapiens
  misc_RNA (1)...(19): siRNA sense strand
ccagauagaaguacaagac

SEQ ID NO: 99332 - RNA, 19 nt, Homo sapiens
  misc_RNA (1)...(19): siRNA sense strand
ugacuuuguuauccagaau

SEQ ID NO: 99333 - RNA, 19 nt, Homo sapiens
  misc_RNA (1)...(19): siRNA sense strand
cugcagaagucccucaagu

SEQ ID NO: 99334 - RNA, 19 nt, Homo sapiens
  misc_RNA (1)...(19): siRNA sense strand
caacccuuauggacucuuc

SEQ ID NO: 99335 - RNA, 19 nt, Homo sapiens
  misc_RNA (1)...(19): siRNA sense strand
guugugaggcgucuucuuc

SEQ ID NO: 99336 - RNA, 19 nt, Homo sapiens
  misc_RNA (1)...(19): siRNA sense strand
cagauugggucacauucag

SEQ ID NO: 99337 - RNA, 19 nt, Homo sapiens
  misc_RNA (1)...(19): siRNA sense strand
ucgcucagcuuacguuggu

SEQ ID NO: 99338 - RNA, 19 nt, Homo sapiens
  misc_RNA (1)...(19): siRNA sense strand
ccacccaacacccucauug

SEQ ID NO: 99339 - RNA, 19 nt, Homo sapiens
  misc_RNA (1)...(19): siRNA sense strand
gccgcuggauauugacauu

SEQ ID NO: 99340 - RNA, 19 nt, Homo sapiens
  misc_RNA (1)...(19): siRNA sense strand
caacaagccuggugaagug

SEQ ID NO: 99341 - RNA, 19 nt, Homo sapiens
  misc_RNA (1)...(19): siRNA sense strand
ucacagaccucgugcagaa

SEQ ID NO: 99342 - RNA, 19 nt, Homo sapiens
  misc_RNA (1)...(19): siRNA sense strand
gcaccugucuucacucaga

SEQ ID NO: 99343 - RNA, 19 nt, Homo sapiens
  misc_RNA (1)...(19): siRNA sense strand
gcauagggcuagugacuca

SEQ ID NO: 99344 - RNA, 19 nt, Homo sapiens
  misc_RNA (1)...(19): siRNA sense strand
ggucaaagacuacaccauu

SEQ ID NO: 99345 - RNA, 19 nt, Homo sapiens
  misc_RNA (1)...(19): siRNA sense strand
gcuagugacucaucaagau

SEQ ID NO: 99346 - RNA, 19 nt, Homo sapiens
  misc_RNA (1)...(19): siRNA sense strand
gcagaagucccucaaguuc

SEQ ID NO: 99347 - RNA, 19 nt, Homo sapiens
  misc_RNA (1)...(19): siRNA sense strand
caacaucggcucacucuuc

SEQ ID NO: 99348 - RNA, 19 nt, Homo sapiens
  misc_RNA (1)...(19): siRNA sense strand
ugaaggacaugaaugacaa

SEQ ID NO: 99349 - RNA, 19 nt, Homo sapiens
  misc_RNA (1)...(19): siRNA sense strand
gcaggugucugaccgagau

SEQ ID NO: 99350 - RNA, 19 nt, Homo sapiens
  misc_RNA (1)...(19): siRNA sense strand
ucaaugugcuggacgagaa

SEQ ID NO: 99351 - RNA, 19 nt, Homo sapiens
  misc_RNA (1)...(19): siRNA sense strand
ccacuguccuugucaaugu

SEQ ID NO: 99352 - RNA, 19 nt, Homo sapiens
  misc_RNA (1)...(19): siRNA sense strand
gaacaugccagcacugagu

SEQ ID NO: 99353 - RNA, 19 nt, Homo sapiens
  misc_RNA (1)...(19): siRNA sense strand
acacgccgcuggauauuga

SEQ ID NO: 99354 - RNA, 19 nt, Homo sapiens
  misc_RNA (1)...(19): siRNA sense strand
gacaggaacacuggacuua

SEQ ID NO: 99355 - RNA, 19 nt, Homo sapiens
  misc_RNA (1)...(19): siRNA sense strand
gcaggacaacggugacuuu

SEQ ID NO: 99356 - RNA, 19 nt, Homo sapiens
  misc_RNA (1)...(19): siRNA sense strand
acacuggacuuaucacugu

SEQ ID NO: 99357 - RNA, 19 nt, Homo sapiens
  misc_RNA (1)...(19): siRNA sense strand
gcagugacagcaagaagaa

SEQ ID NO: 99358 - RNA, 19 nt, Homo sapiens
  misc_RNA (1)...(19): siRNA sense strand
caacgcaccugucuucacu

SEQ ID NO: 99359 - RNA, 19 nt, Homo sapiens
  misc_RNA (1)...(19): siRNA sense strand
ccuaugaccucaccaucaa

SEQ ID NO: 99360 - RNA, 19 nt, Homo sapiens
  misc_RNA (1)...(19): siRNA sense strand
guaagaaggagaccaagga

SEQ ID NO: 99361 - RNA, 19 nt, Homo sapiens
  misc_RNA (1)...(19): siRNA sense strand
gcacagccuugguccaucu

SEQ ID NO: 99362 - RNA, 19 nt, Homo sapiens
  misc_RNA (1)...(19): siRNA sense strand
gagcuuugaucgagagcaa

SEQ ID NO: 99363 - RNA, 19 nt, Homo sapiens
  misc_RNA (1)...(19): siRNA sense strand
ggcuacaacuucucaguga

SEQ ID NO: 99364 - RNA, 19 nt, Homo sapiens
  misc_RNA (1)...(19): siRNA sense strand
acgagaaggucaaagacua

SEQ ID NO: 99365 - RNA, 19 nt, Homo sapiens
  misc_RNA (1)...(19): siRNA sense strand
ucaaugugcuggacugcaa

SEQ ID NO: 99366 - RNA, 19 nt, Homo sapiens
  misc_RNA (1)...(19): siRNA sense strand
gucaaagacuacaccauug

SEQ ID NO: 99367 - RNA, 19 nt, Homo sapiens
  misc_RNA (1)...(19): siRNA sense strand
uacaagacaucaaugacaa

SEQ ID NO: 99368 - RNA, 19 nt, Homo sapiens
  misc_RNA (1)...(19): siRNA sense strand
agaagucccucaaguucaa

SEQ ID NO: 99369 - RNA, 19 nt, Homo sapiens
  misc_RNA (1)...(19): siRNA sense strand
cagccuugguccaucuuua

SEQ ID NO: 99370 - RNA, 19 nt, Homo sapiens
  misc_RNA (1)...(19): siRNA sense strand
gacaaugaccccaaauuua

SEQ ID NO: 99371 - RNA, 19 nt, Homo sapiens
  misc_RNA (1)...(19): siRNA sense strand
guacaagacaucaaugaca

SEQ ID NO: 99372 - RNA, 19 nt, Homo sapiens
  misc_RNA (1)...(19): siRNA sense strand
caagcagcguggcaacauu

SEQ ID NO: 99373 - RNA, 19 nt, Homo sapiens
  misc_RNA (1)...(19): siRNA sense strand
gggaacagcgggagagcua

SEQ ID NO: 99374 - RNA, 19 nt, Homo sapiens
  misc_RNA (1)...(19): siRNA sense strand
caggaacacuggacuuauc

SEQ ID NO: 99375 - RNA, 19 nt, Homo sapiens
  misc_RNA (1)...(19): siRNA sense strand
gccgaacuaucugagaaua

SEQ ID NO: 99376 - RNA, 19 nt, Homo sapiens
  misc_RNA (1)...(19): siRNA sense strand
agacaucaaugacaacaca

SEQ ID NO: 99377 - RNA, 19 nt, Homo sapiens
  misc_RNA (1)...(19): siRNA sense strand
ucucagugcuugcuaagga

SEQ ID NO: 99378 - RNA, 19 nt, Homo sapiens
  misc_RNA (1)...(19): siRNA sense strand
ggagagauccaggugaaga

SEQ ID NO: 99379 - RNA, 19 nt, Homo sapiens
  misc_RNA (1)...(19): siRNA sense strand
ggacugcaaugacaaugac

SEQ ID NO: 99380 - RNA, 19 nt, Homo sapiens
  misc_RNA (1)...(19): siRNA sense strand
ggagagcuaugaguugaag

SEQ ID NO: 99381 - RNA, 19 nt, Homo sapiens
  misc_RNA (1)...(19): siRNA sense strand
gaagcaaccacagcucauu

SEQ ID NO: 99382 - RNA, 19 nt, Homo sapiens
  misc_RNA (1)...(19): siRNA sense strand
gaacagcgggagagcuaug

SEQ ID NO: 99383 - RNA, 19 nt, Homo sapiens
  misc_RNA (1)...(19): siRNA sense strand
caagacaggugacauuuuc

SEQ ID NO: 99384 - RNA, 19 nt, Homo sapiens
  misc_RNA (1)...(19): siRNA sense strand
gcaaaggcaagaagagcaa

SEQ ID NO: 99385 - RNA, 19 nt, Homo sapiens
  misc_RNA (1)...(19): siRNA sense strand
ccaacgguguggcauccua

SEQ ID NO: 99386 - RNA, 19 nt, Homo sapiens
  misc_RNA (1)...(19): siRNA sense strand
acagcaagaagaaguauuu

SEQ ID NO: 99387 - RNA, 19 nt, Homo sapiens
  misc_RNA (1)...(19): siRNA sense strand
gcagaaaucgaauacacau

SEQ ID NO: 99388 - RNA, 19 nt, Homo sapiens
  misc_RNA (1)...(19): siRNA sense strand
gauagaaguacaagacauc

SEQ ID NO: 99389 - RNA, 19 nt, Homo sapiens
  misc_RNA (1)...(19): siRNA sense strand
gugcuggacugcaaugaca

SEQ ID NO: 99390 - RNA, 19 nt, Homo sapiens
  misc_RNA (1)...(19): siRNA sense strand
cgggagagcuaugaguuga

SEQ ID NO: 99391 - RNA, 19 nt, Homo sapiens
  misc_RNA (1)...(19): siRNA sense strand
ccaaugcagaaaucgaaua

SEQ ID NO: 99392 - RNA, 19 nt, Homo sapiens
  misc_RNA (1)...(19): siRNA sense strand
ugacaacgcacccuauauc

SEQ ID NO: 99393 - RNA, 19 nt, Homo sapiens
  misc_RNA (1)...(19): siRNA sense strand
gagaacaugccagcacuga

SEQ ID NO: 99394 - RNA, 19 nt, Homo sapiens
  misc_RNA (1)...(19): siRNA sense strand
gaaguacaagacaucaaug

SEQ ID NO: 99395 - RNA, 19 nt, Homo sapiens
  misc_RNA (1)...(19): siRNA sense strand
gcacaggcaccauccuauc

SEQ ID NO: 99396 - RNA, 19 nt, Homo sapiens
  misc_RNA (1)...(19): siRNA sense strand
gugaagugauugcugagau

SEQ ID NO: 99397 - RNA, 19 nt, Homo sapiens
  misc_RNA (1)...(19): siRNA sense strand
gcacuaacucccucaaggu

SEQ ID NO: 99398 - RNA, 19 nt, Homo sapiens
  misc_RNA (1)...(19): siRNA sense strand
ggacaggaacacuggacuu

SEQ ID NO: 99399 - RNA, 19 nt, Homo sapiens
  misc_RNA (1)...(19): siRNA sense strand
ggugaaggccaaugacuca

SEQ ID NO: 99400 - RNA, 19 nt, Homo sapiens
  misc_RNA (1)...(19): siRNA sense strand
ugacaacacacccaacuuc

SEQ ID NO: 99401 - RNA, 19 nt, Homo sapiens
  misc_RNA (1)...(19): siRNA sense strand
caagccuggugaagugauu

SEQ ID NO: 99402 - RNA, 19 nt, Homo sapiens
  misc_RNA (1)...(19): siRNA sense strand
gaaugacaacgcacccuau

SEQ ID NO: 99403 - RNA, 19 nt, Homo sapiens
  misc_RNA (1)...(19): siRNA sense strand
gcugcuagagggccagaua

SEQ ID NO: 99404 - RNA, 19 nt, Homo sapiens
  misc_RNA (1)...(19): siRNA sense strand
gcaaggccuccaagggaaa

SEQ ID NO: 99405 - RNA, 19 nt, Homo sapiens
  misc_RNA (1)...(19): siRNA sense strand
ggacacgccgcuggauauu

SEQ ID NO: 99406 - RNA, 19 nt, Homo sapiens
  misc_RNA (1)...(19): siRNA sense strand
gcagguggcaacccuuaug

SEQ ID NO: 99407 - RNA, 19 nt, Homo sapiens
  misc_RNA (1)...(19): siRNA sense strand
ucaccgugcuugacaccaa

SEQ ID NO: 99408 - RNA, 19 nt, Homo sapiens
  misc_RNA (1)...(19): siRNA sense strand
agacuacaccauugagauu

SEQ ID NO: 99409 - RNA, 19 nt, Homo sapiens
  misc_RNA (1)...(19): siRNA sense strand
caacgcacccuauaucacu

SEQ ID NO: 99410 - RNA, 19 nt, Homo sapiens
  misc_RNA (1)...(19): siRNA sense strand
caacggugacuuuguuauc

SEQ ID NO: 99411 - RNA, 19 nt, Homo sapiens
  misc_RNA (1)...(19): siRNA sense strand
gagccucgcagccgacuau

SEQ ID NO: 99412 - RNA, 19 nt, Homo sapiens
  misc_RNA (1)...(19): siRNA sense strand
cuaaugcugagcugguuua

SEQ ID NO: 99413 - RNA, 19 nt, Homo sapiens
  misc_RNA (1)...(19): siRNA sense strand
ugaagugauugcugagauc

SEQ ID NO: 99414 - RNA, 19 nt, Homo sapiens
  misc_RNA (1)...(19): siRNA sense strand
gagcaguacuccgacuaca

SEQ ID NO: 99415 - RNA, 19 nt, Homo sapiens
  misc_RNA (1)...(19): siRNA sense strand
gguggcagccgaggacuuu

SEQ ID NO: 99416 - RNA, 19 nt, Homo sapiens
  misc_RNA (1)...(19): siRNA sense strand
cuaagggccucuucaccau

SEQ ID NO: 99417 - RNA, 19 nt, Homo sapiens
  misc_RNA (1)...(19): siRNA sense strand
gcaagaagaaguauuuccu

SEQ ID NO: 99418 - RNA, 19 nt, Homo sapiens
  misc_RNA (1)...(19): siRNA sense strand
gacaacgcacccuauauca

SEQ ID NO: 99419 - RNA, 19 nt, Homo sapiens
  misc_RNA (1)...(19): siRNA sense strand
cagaggaccaggaggagaa

SEQ ID NO: 99420 - RNA, 19 nt, Homo sapiens
  misc_RNA (1)...(19): siRNA sense strand
ggagaccaaggaccuguau

SEQ ID NO: 99421 - RNA, 19 nt, Homo sapiens
  misc_RNA (1)...(19): siRNA sense strand
ccaucacccuggagaagga

SEQ ID NO: 99422 - RNA, 19 nt, Homo sapiens
  misc_RNA (1)...(19): siRNA sense strand
gaugcugacucuggcucua

SEQ ID NO: 99423 - RNA, 19 nt, Homo sapiens
  misc_RNA (1)...(19): siRNA sense strand
gauuguggcuguggacucu

SEQ ID NO: 99424 - RNA, 19 nt, Homo sapiens
  misc_RNA (1)...(19): siRNA sense strand
aagaugggauggcuaacau

SEQ ID NO: 99425 - RNA, 19 nt, Homo sapiens
  misc_RNA (1)...(19): siRNA sense strand
agaccaaggugccaaugca

SEQ ID NO: 99426 - RNA, 19 nt, Homo sapiens
  misc_RNA (1)...(19): siRNA sense strand
ggcaagacaggugacauuu

SEQ ID NO: 99427 - RNA, 19 nt, Homo sapiens
  misc_RNA (1)...(19): siRNA sense strand
gcuagagggccagauagaa

SEQ ID NO: 99428 - RNA, 19 nt, Homo sapiens
  misc_RNA (1)...(19): siRNA sense strand
uauccagccugagcuuuga

SEQ ID NO: 99429 - RNA, 19 nt, Homo sapiens
  misc_RNA (1)...(19): siRNA sense strand
gcuucucagugcuugcuaa

SEQ ID NO: 99430 - RNA, 19 nt, Homo sapiens
  misc_RNA (1)...(19): siRNA sense strand
ccaaggugccaaugcagaa

SEQ ID NO: 99431 - RNA, 19 nt, Homo sapiens
  misc_RNA (1)...(19): siRNA sense strand
ccagauagaaguacaagac

SEQ ID NO: 99432 - RNA, 19 nt, Homo sapiens
  misc_RNA (1)...(19): siRNA sense strand
ugacuuuguuauccagaau

SEQ ID NO: 99433 - RNA, 19 nt, Homo sapiens
  misc_RNA (1)...(19): siRNA sense strand
cugcagaagucccucaagu

SEQ ID NO: 99434 - RNA, 19 nt, Homo sapiens
  misc_RNA (1)...(19): siRNA sense strand
caacccuuauggacucuuc

SEQ ID NO: 99435 - RNA, 19 nt, Homo sapiens
  misc_RNA (1)...(19): siRNA sense strand
guugugaggcgucuucuuc

SEQ ID NO: 99436 - RNA, 19 nt, Homo sapiens
  misc_RNA (1)...(19): siRNA sense strand
cagauugggucacauucag

SEQ ID NO: 99437 - RNA, 19 nt, Homo sapiens
  misc_RNA (1)...(19): siRNA sense strand
ucgcucagcuuacguuggu

SEQ ID NO: 99438 - RNA, 19 nt, Homo sapiens
  misc_RNA (1)...(19): siRNA sense strand
ccacccaacacccucauug

SEQ ID NO: 99439 - RNA, 19 nt, Homo sapiens
  misc_RNA (1)...(19): siRNA sense strand
gccgcuggauauugacauu

SEQ ID NO: 99440 - RNA, 19 nt, Homo sapiens
  misc_RNA (1)...(19): siRNA sense strand
gacccaagcuaugaaauua

SEQ ID NO: 99441 - RNA, 19 nt, Homo sapiens
  misc_RNA (1)...(19): siRNA sense strand
ccagauagcuagaaguuug

SEQ ID NO: 99442 - RNA, 19 nt, Homo sapiens
  misc_RNA (1)...(19): siRNA sense strand
aaacagagacucaguauug

SEQ ID NO: 99443 - RNA, 19 nt, Homo sapiens
  misc_RNA (1)...(19): siRNA sense strand
gacaaugacccuaaguuua

SEQ ID NO: 99444 - RNA, 19 nt, Homo sapiens
  misc_RNA (1)...(19): siRNA sense strand
ggacagagguaugauagug

SEQ ID NO: 99445 - RNA, 19 nt, Homo sapiens
  misc_RNA (1)...(19): siRNA sense strand
ggagacaacauuucaauug

SEQ ID NO: 99446 - RNA, 19 nt, Homo sapiens
  misc_RNA (1)...(19): siRNA sense strand
gagaugagccuguacauag

SEQ ID NO: 99447 - RNA, 19 nt, Homo sapiens
  misc_RNA (1)...(19): siRNA sense strand
gaccugaacuacagcauug

SEQ ID NO: 99448 - RNA, 19 nt, Homo sapiens
  misc_RNA (1)...(19): siRNA sense strand
gaggagaacaauaacauuu

SEQ ID NO: 99449 - RNA, 19 nt, Homo sapiens
  misc_RNA (1)...(19): siRNA sense strand
ugacaaugcucccacaguu

SEQ ID NO: 99450 - RNA, 19 nt, Homo sapiens
  misc_RNA (1)...(19): siRNA sense strand
gcacguguuugucaaugaa

SEQ ID NO: 99451 - RNA, 19 nt, Homo sapiens
  misc_RNA (1)...(19): siRNA sense strand
gggaacaucagaccacaua

SEQ ID NO: 99452 - RNA, 19 nt, Homo sapiens
  misc_RNA (1)...(19): siRNA sense strand
guacagcugucaaaccaau

SEQ ID NO: 99453 - RNA, 19 nt, Homo sapiens
  misc_RNA (1)...(19): siRNA sense strand
gcaaggcauuacaaaucua

SEQ ID NO: 99454 - RNA, 19 nt, Homo sapiens
  misc_RNA (1)...(19): siRNA sense strand
ugacagguaugaguuuaaa

SEQ ID NO: 99455 - RNA, 19 nt, Homo sapiens
  misc_RNA (1)...(19): siRNA sense strand
gcgauugacucccagauag

SEQ ID NO: 99456 - RNA, 19 nt, Homo sapiens
  misc_RNA (1)...(19): siRNA sense strand
gcaaacagagacucaguau

SEQ ID NO: 99457 - RNA, 19 nt, Homo sapiens
  misc_RNA (1)...(19): siRNA sense strand
gagacaacauuucaauugg

SEQ ID NO: 99458 - RNA, 19 nt, Homo sapiens
  misc_RNA (1)...(19): siRNA sense strand
gagcaacaacucccugauu

SEQ ID NO: 99459 - RNA, 19 nt, Homo sapiens
  misc_RNA (1)...(19): siRNA sense strand
gaguacagcugucaaacca

SEQ ID NO: 99460 - RNA, 19 nt, Homo sapiens
  misc_RNA (1)...(19): siRNA sense strand
gguaugauagugucaauga

SEQ ID NO: 99461 - RNA, 19 nt, Homo sapiens
  misc_RNA (1)...(19): siRNA sense strand
gaaaucccuucaagcuguu

SEQ ID NO: 99462 - RNA, 19 nt, Homo sapiens
  misc_RNA (1)...(19): siRNA sense strand
acaaugacccuaaguuuau

SEQ ID NO: 99463 - RNA, 19 nt, Homo sapiens
  misc_RNA (1)...(19): siRNA sense strand
gacaaugcucccacaguua

SEQ ID NO: 99464 - RNA, 19 nt, Homo sapiens
  misc_RNA (1)...(19): siRNA sense strand
ugacaaugacccuaaguuu

SEQ ID NO: 99465 - RNA, 19 nt, Homo sapiens
  misc_RNA (1)...(19): siRNA sense strand
gaaauugaucccacuagug

SEQ ID NO: 99466 - RNA, 19 nt, Homo sapiens
  misc_RNA (1)...(19): siRNA sense strand
gagguuuacuucccugaga

SEQ ID NO: 99467 - RNA, 19 nt, Homo sapiens
  misc_RNA (1)...(19): siRNA sense strand
gagacucaguauugucauu

SEQ ID NO: 99468 - RNA, 19 nt, Homo sapiens
  misc_RNA (1)...(19): siRNA sense strand
gaacaucagaccacauaca

SEQ ID NO: 99469 - RNA, 19 nt, Homo sapiens
  misc_RNA (1)...(19): siRNA sense strand
acauagaggagaacaauaa

SEQ ID NO: 99470 - RNA, 19 nt, Homo sapiens
  misc_RNA (1)...(19): siRNA sense strand
gcagaucgaauacguguuc

SEQ ID NO: 99471 - RNA, 19 nt, Homo sapiens
  misc_RNA (1)...(19): siRNA sense strand
caaauggacagagguauga

SEQ ID NO: 99472 - RNA, 19 nt, Homo sapiens
  misc_RNA (1)...(19): siRNA sense strand
gacaacauuucaauuggau

SEQ ID NO: 99473 - RNA, 19 nt, Homo sapiens
  misc_RNA (1)...(19): siRNA sense strand
ucaacgggcagaucgaaua

SEQ ID NO: 99474 - RNA, 19 nt, Homo sapiens
  misc_RNA (1)...(19): siRNA sense strand
ggcaaggcauuacaaaucu

SEQ ID NO: 99475 - RNA, 19 nt, Homo sapiens
  misc_RNA (1)...(19): siRNA sense strand
ccacauacacuuucagagu

SEQ ID NO: 99476 - RNA, 19 nt, Homo sapiens
  misc_RNA (1)...(19): siRNA sense strand
guacauagaggagaacaau

SEQ ID NO: 99477 - RNA, 19 nt, Homo sapiens
  misc_RNA (1)...(19): siRNA sense strand
gcaggacgucuucaccuuu

SEQ ID NO: 99478 - RNA, 19 nt, Homo sapiens
  misc_RNA (1)...(19): siRNA sense strand
gggcagcacuacggugauu

SEQ ID NO: 99479 - RNA, 19 nt, Homo sapiens
  misc_RNA (1)...(19): siRNA sense strand
gcgagcagacugacaggua

SEQ ID NO: 99480 - RNA, 19 nt, Homo sapiens
  misc_RNA (1)...(19): siRNA sense strand
caacgugccguccauugaa

SEQ ID NO: 99481 - RNA, 19 nt, Homo sapiens
  misc_RNA (1)...(19): siRNA sense strand
agacaacauuucaauugga

SEQ ID NO: 99482 - RNA, 19 nt, Homo sapiens
  misc_RNA (1)...(19): siRNA sense strand
ucgcuggacuccucuguga

SEQ ID NO: 99483 - RNA, 19 nt, Homo sapiens
  misc_RNA (1)...(19): siRNA sense strand
ucaaugagaagcugucaga

SEQ ID NO: 99484 - RNA, 19 nt, Homo sapiens
  misc_RNA (1)...(19): siRNA sense strand
gaggaaaucccuucaagcu

SEQ ID NO: 99485 - RNA, 19 nt, Homo sapiens
  misc_RNA (1)...(19): siRNA sense strand
cgagcagacugacagguau

SEQ ID NO: 99486 - RNA, 19 nt, Homo sapiens
  misc_RNA (1)...(19): siRNA sense strand
ggaguccgguuccgaguac

SEQ ID NO: 99487 - RNA, 19 nt, Homo sapiens
  misc_RNA (1)...(19): siRNA sense strand
ccgaguaccugaagaucga

SEQ ID NO: 99488 - RNA, 19 nt, Homo sapiens
  misc_RNA (1)...(19): siRNA sense strand
ccaacagcaugacaaaucu

SEQ ID NO: 99489 - RNA, 19 nt, Homo sapiens
  misc_RNA (1)...(19): siRNA sense strand
ugaaauugaucccacuagu

SEQ ID NO: 99490 - RNA, 19 nt, Homo sapiens
  misc_RNA (1)...(19): siRNA sense strand
gaucgggugaggugacuuu

SEQ ID NO: 99491 - RNA, 19 nt, Homo sapiens
  misc_RNA (1)...(19): siRNA sense strand
caucagaccacauacacuu

SEQ ID NO: 99492 - RNA, 19 nt, Homo sapiens
  misc_RNA (1)...(19): siRNA sense strand
gagguaugauagugucaau

SEQ ID NO: 99493 - RNA, 19 nt, Homo sapiens
  misc_RNA (1)...(19): siRNA sense strand
agcaacaacucccugauug

SEQ ID NO: 99494 - RNA, 19 nt, Homo sapiens
  misc_RNA (1)...(19): siRNA sense strand
caacauuucaauuggauca

SEQ ID NO: 99495 - RNA, 19 nt, Homo sapiens
  misc_RNA (1)...(19): siRNA sense strand
gagcuggguggaccuguuu

SEQ ID NO: 99496 - RNA, 19 nt, Homo sapiens
  misc_RNA (1)...(19): siRNA sense strand
gaagaucgacaaccucacu

SEQ ID NO: 99497 - RNA, 19 nt, Homo sapiens
  misc_RNA (1)...(19): siRNA sense strand
gagcaggagacaacauuuc

SEQ ID NO: 99498 - RNA, 19 nt, Homo sapiens
  misc_RNA (1)...(19): siRNA sense strand
agaugagccuguacauaga

SEQ ID NO: 99499 - RNA, 19 nt, Homo sapiens
  misc_RNA (1)...(19): siRNA sense strand
caaugacccuaaguuuaug

SEQ ID NO: 99500 - RNA, 19 nt, Homo sapiens
  misc_RNA (1)...(19): siRNA sense strand
ccaauaacaaguacagcaa

SEQ ID NO: 99501 - RNA, 19 nt, Homo sapiens
  misc_RNA (1)...(19): siRNA sense strand
gucaaaccaauaacaagua

SEQ ID NO: 99502 - RNA, 19 nt, Homo sapiens
  misc_RNA (1)...(19): siRNA sense strand
gaucacugcucugaguaca

SEQ ID NO: 99503 - RNA, 19 nt, Homo sapiens
  misc_RNA (1)...(19): siRNA sense strand
ggagcaggagacaacauuu

SEQ ID NO: 99504 - RNA, 19 nt, Homo sapiens
  misc_RNA (1)...(19): siRNA sense strand
ugacccaagcuaugaaauu

SEQ ID NO: 99505 - RNA, 19 nt, Homo sapiens
  misc_RNA (1)...(19): siRNA sense strand
ccaaauggacagagguaug

SEQ ID NO: 99506 - RNA, 19 nt, Homo sapiens
  misc_RNA (1)...(19): siRNA sense strand
caauaacaaguacagcaaa

SEQ ID NO: 99507 - RNA, 19 nt, Homo sapiens
  misc_RNA (1)...(19): siRNA sense strand
gggagcaggagacaacauu

SEQ ID NO: 99508 - RNA, 19 nt, Homo sapiens
  misc_RNA (1)...(19): siRNA sense strand
ucaaagacgagaacgacaa

SEQ ID NO: 99509 - RNA, 19 nt, Homo sapiens
  misc_RNA (1)...(19): siRNA sense strand
ucaaaccaauaacaaguac

SEQ ID NO: 99510 - RNA, 19 nt, Homo sapiens
  misc_RNA (1)...(19): siRNA sense strand
cuaaugcaacugcgauuga

SEQ ID NO: 99511 - RNA, 19 nt, Homo sapiens
  misc_RNA (1)...(19): siRNA sense strand
agucggugguggagguuua

SEQ ID NO: 99512 - RNA, 19 nt, Homo sapiens
  misc_RNA (1)...(19): siRNA sense strand
gggacauccuggucaauac

SEQ ID NO: 99513 - RNA, 19 nt, Homo sapiens
  misc_RNA (1)...(19): siRNA sense strand
aaucuaagcagccucucua

SEQ ID NO: 99514 - RNA, 19 nt, Homo sapiens
  misc_RNA (1)...(19): siRNA sense strand
caacagcaugacaaaucua

SEQ ID NO: 99515 - RNA, 19 nt, Homo sapiens
  misc_RNA (1)...(19): siRNA sense strand
caagcuguuugaaauugau

SEQ ID NO: 99516 - RNA, 19 nt, Homo sapiens
  misc_RNA (1)...(19): siRNA sense strand
gcagagaugagccuguaca

SEQ ID NO: 99517 - RNA, 19 nt, Homo sapiens
  misc_RNA (1)...(19): siRNA sense strand
aaaguuaacgccaaagaca

SEQ ID NO: 99518 - RNA, 19 nt, Homo sapiens
  misc_RNA (1)...(19): siRNA sense strand
cgugauggaugcugacaag

SEQ ID NO: 99519 - RNA, 19 nt, Homo sapiens
  misc_RNA (1)...(19): siRNA sense strand
ucaaugcagaccugaacua

SEQ ID NO: 99520 - RNA, 19 nt, Homo sapiens
  misc_RNA (1)...(19): siRNA sense strand
gaccacauacacuuucaga

SEQ ID NO: 99521 - RNA, 19 nt, Homo sapiens
  misc_RNA (1)...(19): siRNA sense strand
ccauugaaauccgcaagau

SEQ ID NO: 99522 - RNA, 19 nt, Homo sapiens
  misc_RNA (1)...(19): siRNA sense strand
uggcaaggcauuacaaauc

SEQ ID NO: 99523 - RNA, 19 nt, Homo sapiens
  misc_RNA (1)...(19): siRNA sense strand
acugacagguaugaguuua

SEQ ID NO: 99524 - RNA, 19 nt, Homo sapiens
  misc_RNA (1)...(19): siRNA sense strand
ucacuguggaggcuucuaa

SEQ ID NO: 99525 - RNA, 19 nt, Homo sapiens
  misc_RNA (1)...(19): siRNA sense strand
gcugucaaaccaauaacaa

SEQ ID NO: 99526 - RNA, 19 nt, Homo sapiens
  misc_RNA (1)...(19): siRNA sense strand
gcaggagacaacauuucaa

SEQ ID NO: 99527 - RNA, 19 nt, Homo sapiens
  misc_RNA (1)...(19): siRNA sense strand
uaugauagugucaaugaga

SEQ ID NO: 99528 - RNA, 19 nt, Homo sapiens
  misc_RNA (1)...(19): siRNA sense strand
gacaacgugccguccauug

SEQ ID NO: 99529 - RNA, 19 nt, Homo sapiens
  misc_RNA (1)...(19): siRNA sense strand
cagagacucaguauuguca

SEQ ID NO: 99530 - RNA, 19 nt, Homo sapiens
  misc_RNA (1)...(19): siRNA sense strand
caaacagagacucaguauu

SEQ ID NO: 99531 - RNA, 19 nt, Homo sapiens
  misc_RNA (1)...(19): siRNA sense strand
augcagagaugagccugua

SEQ ID NO: 99532 - RNA, 19 nt, Homo sapiens
  misc_RNA (1)...(19): siRNA sense strand
gcuggacuccucugugaug

SEQ ID NO: 99533 - RNA, 19 nt, Homo sapiens
  misc_RNA (1)...(19): siRNA sense strand
agagaugagccuguacaua

SEQ ID NO: 99534 - RNA, 19 nt, Homo sapiens
  misc_RNA (1)...(19): siRNA sense strand
caggagacaacauuucaau

SEQ ID NO: 99535 - RNA, 19 nt, Homo sapiens
  misc_RNA (1)...(19): siRNA sense strand
cuaguggugugguuuccuu

SEQ ID NO: 99536 - RNA, 19 nt, Homo sapiens
  misc_RNA (1)...(19): siRNA sense strand
gcaacagacagugaugaug

SEQ ID NO: 99537 - RNA, 19 nt, Homo sapiens
  misc_RNA (1)...(19): siRNA sense strand
agacugacagguaugaguu

SEQ ID NO: 99538 - RNA, 19 nt, Homo sapiens
  misc_RNA (1)...(19): siRNA sense strand
acauacacuuucagaguca

SEQ ID NO: 99539 - RNA, 19 nt, Homo sapiens
  misc_RNA (1)...(19): siRNA sense strand
uagaggagaacaauaacau

SEQ ID NO: 99540 - RNA, 19 nt, Homo sapiens
  misc_RNA (1)...(19): siRNA sense strand
gacccaagcuaugaaauua

SEQ ID NO: 99541 - RNA, 19 nt, Homo sapiens
  misc_RNA (1)...(19): siRNA sense strand
ccagauagcuagaaguuug

SEQ ID NO: 99542 - RNA, 19 nt, Homo sapiens
  misc_RNA (1)...(19): siRNA sense strand
aaacagagacucaguauug

SEQ ID NO: 99543 - RNA, 19 nt, Homo sapiens
  misc_RNA (1)...(19): siRNA sense strand
gacaaugacccuaaguuua

SEQ ID NO: 99544 - RNA, 19 nt, Homo sapiens
  misc_RNA (1)...(19): siRNA sense strand
ggacagagguaugauagug

SEQ ID NO: 99545 - RNA, 19 nt, Homo sapiens
  misc_RNA (1)...(19): siRNA sense strand
ggagacaacauuucaauug

SEQ ID NO: 99546 - RNA, 19 nt, Homo sapiens
  misc_RNA (1)...(19): siRNA sense strand
gagaugagccuguacauag

SEQ ID NO: 99547 - RNA, 19 nt, Homo sapiens
  misc_RNA (1)...(19): siRNA sense strand
gaccugaacuacagcauug

SEQ ID NO: 99548 - RNA, 19 nt, Homo sapiens
  misc_RNA (1)...(19): siRNA sense strand
gaggagaacaauaacauuu

SEQ ID NO: 99549 - RNA, 19 nt, Homo sapiens
  misc_RNA (1)...(19): siRNA sense strand
ugacaaugcucccacaguu

SEQ ID NO: 99550 - RNA, 19 nt, Homo sapiens
  misc_RNA (1)...(19): siRNA sense strand
gcacguguuugucaaugaa

SEQ ID NO: 99551 - RNA, 19 nt, Homo sapiens
  misc_RNA (1)...(19): siRNA sense strand
gggaacaucagaccacaua

SEQ ID NO: 99552 - RNA, 19 nt, Homo sapiens
  misc_RNA (1)...(19): siRNA sense strand
guacagcugucaaaccaau

SEQ ID NO: 99553 - RNA, 19 nt, Homo sapiens
  misc_RNA (1)...(19): siRNA sense strand
gcaaggcauuacaaaucua

SEQ ID NO: 99554 - RNA, 19 nt, Homo sapiens
  misc_RNA (1)...(19): siRNA sense strand
ugacagguaugaguuuaaa

SEQ ID NO: 99555 - RNA, 19 nt, Homo sapiens
  misc_RNA (1)...(19): siRNA sense strand
gcgauugacucccagauag

SEQ ID NO: 99556 - RNA, 19 nt, Homo sapiens
  misc_RNA (1)...(19): siRNA sense strand
gcaaacagagacucaguau

SEQ ID NO: 99557 - RNA, 19 nt, Homo sapiens
  misc_RNA (1)...(19): siRNA sense strand
gagacaacauuucaauugg

SEQ ID NO: 99558 - RNA, 19 nt, Homo sapiens
  misc_RNA (1)...(19): siRNA sense strand
gagcaacaacucccugauu

SEQ ID NO: 99559 - RNA, 19 nt, Homo sapiens
  misc_RNA (1)...(19): siRNA sense strand
gaguacagcugucaaacca

SEQ ID NO: 99560 - RNA, 19 nt, Homo sapiens
  misc_RNA (1)...(19): siRNA sense strand
gguaugauagugucaauga

SEQ ID NO: 99561 - RNA, 19 nt, Homo sapiens
  misc_RNA (1)...(19): siRNA sense strand
gaaaucccuucaagcuguu

SEQ ID NO: 99562 - RNA, 19 nt, Homo sapiens
  misc_RNA (1)...(19): siRNA sense strand
acaaugacccuaaguuuau

SEQ ID NO: 99563 - RNA, 19 nt, Homo sapiens
  misc_RNA (1)...(19): siRNA sense strand
gacaaugcucccacaguua

SEQ ID NO: 99564 - RNA, 19 nt, Homo sapiens
  misc_RNA (1)...(19): siRNA sense strand
ugacaaugacccuaaguuu

SEQ ID NO: 99565 - RNA, 19 nt, Homo sapiens
  misc_RNA (1)...(19): siRNA sense strand
gaaauugaucccacuagug

SEQ ID NO: 99566 - RNA, 19 nt, Homo sapiens
  misc_RNA (1)...(19): siRNA sense strand
gagguuuacuucccugaga

SEQ ID NO: 99567 - RNA, 19 nt, Homo sapiens
  misc_RNA (1)...(19): siRNA sense strand
gagacucaguauugucauu

SEQ ID NO: 99568 - RNA, 19 nt, Homo sapiens
  misc_RNA (1)...(19): siRNA sense strand
gaacaucagaccacauaca

SEQ ID NO: 99569 - RNA, 19 nt, Homo sapiens
  misc_RNA (1)...(19): siRNA sense strand
acauagaggagaacaauaa

SEQ ID NO: 99570 - RNA, 19 nt, Homo sapiens
  misc_RNA (1)...(19): siRNA sense strand
gcagaucgaauacguguuc

SEQ ID NO: 99571 - RNA, 19 nt, Homo sapiens
  misc_RNA (1)...(19): siRNA sense strand
caaauggacagagguauga

SEQ ID NO: 99572 - RNA, 19 nt, Homo sapiens
  misc_RNA (1)...(19): siRNA sense strand
gacaacauuucaauuggau

SEQ ID NO: 99573 - RNA, 19 nt, Homo sapiens
  misc_RNA (1)...(19): siRNA sense strand
ucaacgggcagaucgaaua

SEQ ID NO: 99574 - RNA, 19 nt, Homo sapiens
  misc_RNA (1)...(19): siRNA sense strand
ggcaaggcauuacaaaucu

SEQ ID NO: 99575 - RNA, 19 nt, Homo sapiens
  misc_RNA (1)...(19): siRNA sense strand
ccacauacacuuucagagu

SEQ ID NO: 99576 - RNA, 19 nt, Homo sapiens
  misc_RNA (1)...(19): siRNA sense strand
guacauagaggagaacaau

SEQ ID NO: 99577 - RNA, 19 nt, Homo sapiens
  misc_RNA (1)...(19): siRNA sense strand
gcaggacgucuucaccuuu

SEQ ID NO: 99578 - RNA, 19 nt, Homo sapiens
  misc_RNA (1)...(19): siRNA sense strand
gggcagcacuacggugauu

SEQ ID NO: 99579 - RNA, 19 nt, Homo sapiens
  misc_RNA (1)...(19): siRNA sense strand
gcgagcagacugacaggua

SEQ ID NO: 99580 - RNA, 19 nt, Homo sapiens
  misc_RNA (1)...(19): siRNA sense strand
caacgugccguccauugaa

SEQ ID NO: 99581 - RNA, 19 nt, Homo sapiens
  misc_RNA (1)...(19): siRNA sense strand
agacaacauuucaauugga

SEQ ID NO: 99582 - RNA, 19 nt, Homo sapiens
  misc_RNA (1)...(19): siRNA sense strand
ucgcuggacuccucuguga

SEQ ID NO: 99583 - RNA, 19 nt, Homo sapiens
  misc_RNA (1)...(19): siRNA sense strand
ucaaugagaagcugucaga

SEQ ID NO: 99584 - RNA, 19 nt, Homo sapiens
  misc_RNA (1)...(19): siRNA sense strand
gaggaaaucccuucaagcu

SEQ ID NO: 99585 - RNA, 19 nt, Homo sapiens
  misc_RNA (1)...(19): siRNA sense strand
cgagcagacugacagguau

SEQ ID NO: 99586 - RNA, 19 nt, Homo sapiens
  misc_RNA (1)...(19): siRNA sense strand
ggaguccgguuccgaguac

SEQ ID NO: 99587 - RNA, 19 nt, Homo sapiens
  misc_RNA (1)...(19): siRNA sense strand
ccgaguaccugaagaucga

SEQ ID NO: 99588 - RNA, 19 nt, Homo sapiens
  misc_RNA (1)...(19): siRNA sense strand
ccaacagcaugacaaaucu

SEQ ID NO: 99589 - RNA, 19 nt, Homo sapiens
  misc_RNA (1)...(19): siRNA sense strand
ugaaauugaucccacuagu

SEQ ID NO: 99590 - RNA, 19 nt, Homo sapiens
  misc_RNA (1)...(19): siRNA sense strand
gaucgggugaggugacuuu

SEQ ID NO: 99591 - RNA, 19 nt, Homo sapiens
  misc_RNA (1)...(19): siRNA sense strand
caucagaccacauacacuu

SEQ ID NO: 99592 - RNA, 19 nt, Homo sapiens
  misc_RNA (1)...(19): siRNA sense strand
gagguaugauagugucaau

SEQ ID NO: 99593 - RNA, 19 nt, Homo sapiens
  misc_RNA (1)...(19): siRNA sense strand
agcaacaacucccugauug

SEQ ID NO: 99594 - RNA, 19 nt, Homo sapiens
  misc_RNA (1)...(19): siRNA sense strand
caacauuucaauuggauca

SEQ ID NO: 99595 - RNA, 19 nt, Homo sapiens
  misc_RNA (1)...(19): siRNA sense strand
gagcuggguggaccuguuu

SEQ ID NO: 99596 - RNA, 19 nt, Homo sapiens
  misc_RNA (1)...(19): siRNA sense strand
gaagaucgacaaccucacu

SEQ ID NO: 99597 - RNA, 19 nt, Homo sapiens
  misc_RNA (1)...(19): siRNA sense strand
gagcaggagacaacauuuc

SEQ ID NO: 99598 - RNA, 19 nt, Homo sapiens
  misc_RNA (1)...(19): siRNA sense strand
agaugagccuguacauaga

SEQ ID NO: 99599 - RNA, 19 nt, Homo sapiens
  misc_RNA (1)...(19): siRNA sense strand
caaugacccuaaguuuaug

SEQ ID NO: 99600 - RNA, 19 nt, Homo sapiens
  misc_RNA (1)...(19): siRNA sense strand
ccaauaacaaguacagcaa

SEQ ID NO: 99601 - RNA, 19 nt, Homo sapiens
  misc_RNA (1)...(19): siRNA sense strand
gucaaaccaauaacaagua

SEQ ID NO: 99602 - RNA, 19 nt, Homo sapiens
  misc_RNA (1)...(19): siRNA sense strand
gaucacugcucugaguaca

SEQ ID NO: 99603 - RNA, 19 nt, Homo sapiens
  misc_RNA (1)...(19): siRNA sense strand
ggagcaggagacaacauuu

SEQ ID NO: 99604 - RNA, 19 nt, Homo sapiens
  misc_RNA (1)...(19): siRNA sense strand
ugacccaagcuaugaaauu

SEQ ID NO: 99605 - RNA, 19 nt, Homo sapiens
  misc_RNA (1)...(19): siRNA sense strand
ccaaauggacagagguaug

SEQ ID NO: 99606 - RNA, 19 nt, Homo sapiens
  misc_RNA (1)...(19): siRNA sense strand
caauaacaaguacagcaaa

SEQ ID NO: 99607 - RNA, 19 nt, Homo sapiens
  misc_RNA (1)...(19): siRNA sense strand
gggagcaggagacaacauu

SEQ ID NO: 99608 - RNA, 19 nt, Homo sapiens
  misc_RNA (1)...(19): siRNA sense strand
ucaaagacgagaacgacaa

SEQ ID NO: 99609 - RNA, 19 nt, Homo sapiens
  misc_RNA (1)...(19): siRNA sense strand
ucaaaccaauaacaaguac

SEQ ID NO: 99610 - RNA, 19 nt, Homo sapiens
  misc_RNA (1)...(19): siRNA sense strand
cuaaugcaacugcgauuga

SEQ ID NO: 99611 - RNA, 19 nt, Homo sapiens
  misc_RNA (1)...(19): siRNA sense strand
agucggugguggagguuua

SEQ ID NO: 99612 - RNA, 19 nt, Homo sapiens
  misc_RNA (1)...(19): siRNA sense strand
gggacauccuggucaauac

SEQ ID NO: 99613 - RNA, 19 nt, Homo sapiens
  misc_RNA (1)...(19): siRNA sense strand
aaucuaagcagccucucua

SEQ ID NO: 99614 - RNA, 19 nt, Homo sapiens
  misc_RNA (1)...(19): siRNA sense strand
caacagcaugacaaaucua

SEQ ID NO: 99615 - RNA, 19 nt, Homo sapiens
  misc_RNA (1)...(19): siRNA sense strand
caagcuguuugaaauugau

SEQ ID NO: 99616 - RNA, 19 nt, Homo sapiens
  misc_RNA (1)...(19): siRNA sense strand
gcagagaugagccuguaca

SEQ ID NO: 99617 - RNA, 19 nt, Homo sapiens
  misc_RNA (1)...(19): siRNA sense strand
aaaguuaacgccaaagaca

SEQ ID NO: 99618 - RNA, 19 nt, Homo sapiens
  misc_RNA (1)...(19): siRNA sense strand
cgugauggaugcugacaag

SEQ ID NO: 99619 - RNA, 19 nt, Homo sapiens
  misc_RNA (1)...(19): siRNA sense strand
ucaaugcagaccugaacua

SEQ ID NO: 99620 - RNA, 19 nt, Homo sapiens
  misc_RNA (1)...(19): siRNA sense strand
gaccacauacacuuucaga

SEQ ID NO: 99621 - RNA, 19 nt, Homo sapiens
  misc_RNA (1)...(19): siRNA sense strand
ccauugaaauccgcaagau

SEQ ID NO: 99622 - RNA, 19 nt, Homo sapiens
  misc_RNA (1)...(19): siRNA sense strand
uggcaaggcauuacaaauc

SEQ ID NO: 99623 - RNA, 19 nt, Homo sapiens
  misc_RNA (1)...(19): siRNA sense strand
acugacagguaugaguuua

SEQ ID NO: 99624 - RNA, 19 nt, Homo sapiens
  misc_RNA (1)...(19): siRNA sense strand
ucacuguggaggcuucuaa

SEQ ID NO: 99625 - RNA, 19 nt, Homo sapiens
  misc_RNA (1)...(19): siRNA sense strand
gcugucaaaccaauaacaa

SEQ ID NO: 99626 - RNA, 19 nt, Homo sapiens
  misc_RNA (1)...(19): siRNA sense strand
gcaggagacaacauuucaa

SEQ ID NO: 99627 - RNA, 19 nt, Homo sapiens
  misc_RNA (1)...(19): siRNA sense strand
uaugauagugucaaugaga

SEQ ID NO: 99628 - RNA, 19 nt, Homo sapiens
  misc_RNA (1)...(19): siRNA sense strand
gacaacgugccguccauug

SEQ ID NO: 99629 - RNA, 19 nt, Homo sapiens
  misc_RNA (1)...(19): siRNA sense strand
cagagacucaguauuguca

SEQ ID NO: 99630 - RNA, 19 nt, Homo sapiens
  misc_RNA (1)...(19): siRNA sense strand
caaacagagacucaguauu

SEQ ID NO: 99631 - RNA, 19 nt, Homo sapiens
  misc_RNA (1)...(19): siRNA sense strand
augcagagaugagccugua

SEQ ID NO: 99632 - RNA, 19 nt, Homo sapiens
  misc_RNA (1)...(19): siRNA sense strand
gcuggacuccucugugaug

SEQ ID NO: 99633 - RNA, 19 nt, Homo sapiens
  misc_RNA (1)...(19): siRNA sense strand
agagaugagccuguacaua

SEQ ID NO: 99634 - RNA, 19 nt, Homo sapiens
  misc_RNA (1)...(19): siRNA sense strand
caggagacaacauuucaau

SEQ ID NO: 99635 - RNA, 19 nt, Homo sapiens
  misc_RNA (1)...(19): siRNA sense strand
cuaguggugugguuuccuu

SEQ ID NO: 99636 - RNA, 19 nt, Homo sapiens
  misc_RNA (1)...(19): siRNA sense strand
gcaacagacagugaugaug

SEQ ID NO: 99637 - RNA, 19 nt, Homo sapiens
  misc_RNA (1)...(19): siRNA sense strand
agacugacagguaugaguu

SEQ ID NO: 99638 - RNA, 19 nt, Homo sapiens
  misc_RNA (1)...(19): siRNA sense strand
acauacacuuucagaguca

SEQ ID NO: 99639 - RNA, 19 nt, Homo sapiens
  misc_RNA (1)...(19): siRNA sense strand
uagaggagaacaauaacau

SEQ ID NO: 99640 - RNA, 19 nt, Homo sapiens
  misc_RNA (1)...(19): siRNA sense strand
gacccaagcuaugaaauua

SEQ ID NO: 99641 - RNA, 19 nt, Homo sapiens
  misc_RNA (1)...(19): siRNA sense strand
ccagauagcuagaaguuug

SEQ ID NO: 99642 - RNA, 19 nt, Homo sapiens
  misc_RNA (1)...(19): siRNA sense strand
aaacagagacucaguauug

SEQ ID NO: 99643 - RNA, 19 nt, Homo sapiens
  misc_RNA (1)...(19): siRNA sense strand
gacaaugacccuaaguuua

SEQ ID NO: 99644 - RNA, 19 nt, Homo sapiens
  misc_RNA (1)...(19): siRNA sense strand
ggacagagguaugauagug

SEQ ID NO: 99645 - RNA, 19 nt, Homo sapiens
  misc_RNA (1)...(19): siRNA sense strand
ggagacaacauuucaauug

SEQ ID NO: 99646 - RNA, 19 nt, Homo sapiens
  misc_RNA (1)...(19): siRNA sense strand
gagaugagccuguacauag

SEQ ID NO: 99647 - RNA, 19 nt, Homo sapiens
  misc_RNA (1)...(19): siRNA sense strand
gaccugaacuacagcauug

SEQ ID NO: 99648 - RNA, 19 nt, Homo sapiens
  misc_RNA (1)...(19): siRNA sense strand
gaggagaacaauaacauuu

SEQ ID NO: 99649 - RNA, 19 nt, Homo sapiens
  misc_RNA (1)...(19): siRNA sense strand
ugacaaugcucccacaguu

SEQ ID NO: 99650 - RNA, 19 nt, Homo sapiens
  misc_RNA (1)...(19): siRNA sense strand
gcacguguuugucaaugaa

SEQ ID NO: 99651 - RNA, 19 nt, Homo sapiens
  misc_RNA (1)...(19): siRNA sense strand
gggaacaucagaccacaua

SEQ ID NO: 99652 - RNA, 19 nt, Homo sapiens
  misc_RNA (1)...(19): siRNA sense strand
guacagcugucaaaccaau

SEQ ID NO: 99653 - RNA, 19 nt, Homo sapiens
  misc_RNA (1)...(19): siRNA sense strand
gcaaggcauuacaaaucua

SEQ ID NO: 99654 - RNA, 19 nt, Homo sapiens
  misc_RNA (1)...(19): siRNA sense strand
ugacagguaugaguuuaaa

SEQ ID NO: 99655 - RNA, 19 nt, Homo sapiens
  misc_RNA (1)...(19): siRNA sense strand
gcgauugacucccagauag

SEQ ID NO: 99656 - RNA, 19 nt, Homo sapiens
  misc_RNA (1)...(19): siRNA sense strand
gcaaacagagacucaguau

SEQ ID NO: 99657 - RNA, 19 nt, Homo sapiens
  misc_RNA (1)...(19): siRNA sense strand
gagacaacauuucaauugg

SEQ ID NO: 99658 - RNA, 19 nt, Homo sapiens
  misc_RNA (1)...(19): siRNA sense strand
gagcaacaacucccugauu

SEQ ID NO: 99659 - RNA, 19 nt, Homo sapiens
  misc_RNA (1)...(19): siRNA sense strand
gaguacagcugucaaacca

SEQ ID NO: 99660 - RNA, 19 nt, Homo sapiens
  misc_RNA (1)...(19): siRNA sense strand
gguaugauagugucaauga

SEQ ID NO: 99661 - RNA, 19 nt, Homo sapiens
  misc_RNA (1)...(19): siRNA sense strand
gaaaucccuucaagcuguu

SEQ ID NO: 99662 - RNA, 19 nt, Homo sapiens
  misc_RNA (1)...(19): siRNA sense strand
acaaugacccuaaguuuau

SEQ ID NO: 99663 - RNA, 19 nt, Homo sapiens
  misc_RNA (1)...(19): siRNA sense strand
gacaaugcucccacaguua

SEQ ID NO: 99664 - RNA, 19 nt, Homo sapiens
  misc_RNA (1)...(19): siRNA sense strand
ugacaaugacccuaaguuu

SEQ ID NO: 99665 - RNA, 19 nt, Homo sapiens
  misc_RNA (1)...(19): siRNA sense strand
gaaauugaucccacuagug

SEQ ID NO: 99666 - RNA, 19 nt, Homo sapiens
  misc_RNA (1)...(19): siRNA sense strand
gagguuuacuucccugaga

SEQ ID NO: 99667 - RNA, 19 nt, Homo sapiens
  misc_RNA (1)...(19): siRNA sense strand
gagacucaguauugucauu

SEQ ID NO: 99668 - RNA, 19 nt, Homo sapiens
  misc_RNA (1)...(19): siRNA sense strand
gaacaucagaccacauaca

SEQ ID NO: 99669 - RNA, 19 nt, Homo sapiens
  misc_RNA (1)...(19): siRNA sense strand
acauagaggagaacaauaa

SEQ ID NO: 99670 - RNA, 19 nt, Homo sapiens
  misc_RNA (1)...(19): siRNA sense strand
gcagaucgaauacguguuc

SEQ ID NO: 99671 - RNA, 19 nt, Homo sapiens
  misc_RNA (1)...(19): siRNA sense strand
caaauggacagagguauga

SEQ ID NO: 99672 - RNA, 19 nt, Homo sapiens
  misc_RNA (1)...(19): siRNA sense strand
gacaacauuucaauuggau

SEQ ID NO: 99673 - RNA, 19 nt, Homo sapiens
  misc_RNA (1)...(19): siRNA sense strand
ucaacgggcagaucgaaua

SEQ ID NO: 99674 - RNA, 19 nt, Homo sapiens
  misc_RNA (1)...(19): siRNA sense strand
ggcaaggcauuacaaaucu

SEQ ID NO: 99675 - RNA, 19 nt, Homo sapiens
  misc_RNA (1)...(19): siRNA sense strand
ccacauacacuuucagagu

SEQ ID NO: 99676 - RNA, 19 nt, Homo sapiens
  misc_RNA (1)...(19): siRNA sense strand
guacauagaggagaacaau

SEQ ID NO: 99677 - RNA, 19 nt, Homo sapiens
  misc_RNA (1)...(19): siRNA sense strand
gcaggacgucuucaccuuu

SEQ ID NO: 99678 - RNA, 19 nt, Homo sapiens
  misc_RNA (1)...(19): siRNA sense strand
gggcagcacuacggugauu

SEQ ID NO: 99679 - RNA, 19 nt, Homo sapiens
  misc_RNA (1)...(19): siRNA sense strand
gcgagcagacugacaggua

SEQ ID NO: 99680 - RNA, 19 nt, Homo sapiens
  misc_RNA (1)...(19): siRNA sense strand
caacgugccguccauugaa

SEQ ID NO: 99681 - RNA, 19 nt, Homo sapiens
  misc_RNA (1)...(19): siRNA sense strand
agacaacauuucaauugga

SEQ ID NO: 99682 - RNA, 19 nt, Homo sapiens
  misc_RNA (1)...(19): siRNA sense strand
ucgcuggacuccucuguga

SEQ ID NO: 99683 - RNA, 19 nt, Homo sapiens
  misc_RNA (1)...(19): siRNA sense strand
ucaaugagaagcugucaga

SEQ ID NO: 99684 - RNA, 19 nt, Homo sapiens
  misc_RNA (1)...(19): siRNA sense strand
gaggaaaucccuucaagcu

SEQ ID NO: 99685 - RNA, 19 nt, Homo sapiens
  misc_RNA (1)...(19): siRNA sense strand
cgagcagacugacagguau

SEQ ID NO: 99686 - RNA, 19 nt, Homo sapiens
  misc_RNA (1)...(19): siRNA sense strand
ggaguccgguuccgaguac

SEQ ID NO: 99687 - RNA, 19 nt, Homo sapiens
  misc_RNA (1)...(19): siRNA sense strand
ccgaguaccugaagaucga

SEQ ID NO: 99688 - RNA, 19 nt, Homo sapiens
  misc_RNA (1)...(19): siRNA sense strand
ccaacagcaugacaaaucu

SEQ ID NO: 99689 - RNA, 19 nt, Homo sapiens
  misc_RNA (1)...(19): siRNA sense strand
ugaaauugaucccacuagu

SEQ ID NO: 99690 - RNA, 19 nt, Homo sapiens
  misc_RNA (1)...(19): siRNA sense strand
gaucgggugaggugacuuu

SEQ ID NO: 99691 - RNA, 19 nt, Homo sapiens
  misc_RNA (1)...(19): siRNA sense strand
caucagaccacauacacuu

SEQ ID NO: 99692 - RNA, 19 nt, Homo sapiens
  misc_RNA (1)...(19): siRNA sense strand
gagguaugauagugucaau

SEQ ID NO: 99693 - RNA, 19 nt, Homo sapiens
  misc_RNA (1)...(19): siRNA sense strand
agcaacaacucccugauug

SEQ ID NO: 99694 - RNA, 19 nt, Homo sapiens
  misc_RNA (1)...(19): siRNA sense strand
caacauuucaauuggauca

SEQ ID NO: 99695 - RNA, 19 nt, Homo sapiens
  misc_RNA (1)...(19): siRNA sense strand
gagcuggguggaccuguuu

SEQ ID NO: 99696 - RNA, 19 nt, Homo sapiens
  misc_RNA (1)...(19): siRNA sense strand
gaagaucgacaaccucacu

SEQ ID NO: 99697 - RNA, 19 nt, Homo sapiens
  misc_RNA (1)...(19): siRNA sense strand
gagcaggagacaacauuuc

SEQ ID NO: 99698 - RNA, 19 nt, Homo sapiens
  misc_RNA (1)...(19): siRNA sense strand
agaugagccuguacauaga

SEQ ID NO: 99699 - RNA, 19 nt, Homo sapiens
  misc_RNA (1)...(19): siRNA sense strand
caaugacccuaaguuuaug

SEQ ID NO: 99700 - RNA, 19 nt, Homo sapiens
  misc_RNA (1)...(19): siRNA sense strand
ccaauaacaaguacagcaa

SEQ ID NO: 99701 - RNA, 19 nt, Homo sapiens
  misc_RNA (1)...(19): siRNA sense strand
gucaaaccaauaacaagua

SEQ ID NO: 99702 - RNA, 19 nt, Homo sapiens
  misc_RNA (1)...(19): siRNA sense strand
gaucacugcucugaguaca

SEQ ID NO: 99703 - RNA, 19 nt, Homo sapiens
  misc_RNA (1)...(19): siRNA sense strand
ggagcaggagacaacauuu

SEQ ID NO: 99704 - RNA, 19 nt, Homo sapiens
  misc_RNA (1)...(19): siRNA sense strand
ugacccaagcuaugaaauu

SEQ ID NO: 99705 - RNA, 19 nt, Homo sapiens
  misc_RNA (1)...(19): siRNA sense strand
ccaaauggacagagguaug

SEQ ID NO: 99706 - RNA, 19 nt, Homo sapiens
  misc_RNA (1)...(19): siRNA sense strand
caauaacaaguacagcaaa

SEQ ID NO: 99707 - RNA, 19 nt, Homo sapiens
  misc_RNA (1)...(19): siRNA sense strand
gggagcaggagacaacauu

SEQ ID NO: 99708 - RNA, 19 nt, Homo sapiens
  misc_RNA (1)...(19): siRNA sense strand
ucaaagacgagaacgacaa

SEQ ID NO: 99709 - RNA, 19 nt, Homo sapiens
  misc_RNA (1)...(19): siRNA sense strand
ucaaaccaauaacaaguac

SEQ ID NO: 99710 - RNA, 19 nt, Homo sapiens
  misc_RNA (1)...(19): siRNA sense strand
cuaaugcaacugcgauuga

SEQ ID NO: 99711 - RNA, 19 nt, Homo sapiens
  misc_RNA (1)...(19): siRNA sense strand
agucggugguggagguuua

SEQ ID NO: 99712 - RNA, 19 nt, Homo sapiens
  misc_RNA (1)...(19): siRNA sense strand
gggacauccuggucaauac

SEQ ID NO: 99713 - RNA, 19 nt, Homo sapiens
  misc_RNA (1)...(19): siRNA sense strand
aaucuaagcagccucucua

SEQ ID NO: 99714 - RNA, 19 nt, Homo sapiens
  misc_RNA (1)...(19): siRNA sense strand
caacagcaugacaaaucua

SEQ ID NO: 99715 - RNA, 19 nt, Homo sapiens
  misc_RNA (1)...(19): siRNA sense strand
caagcuguuugaaauugau

SEQ ID NO: 99716 - RNA, 19 nt, Homo sapiens
  misc_RNA (1)...(19): siRNA sense strand
gcagagaugagccuguaca

SEQ ID NO: 99717 - RNA, 19 nt, Homo sapiens
  misc_RNA (1)...(19): siRNA sense strand
aaaguuaacgccaaagaca

SEQ ID NO: 99718 - RNA, 19 nt, Homo sapiens
  misc_RNA (1)...(19): siRNA sense strand
cgugauggaugcugacaag

SEQ ID NO: 99719 - RNA, 19 nt, Homo sapiens
  misc_RNA (1)...(19): siRNA sense strand
ucaaugcagaccugaacua

SEQ ID NO: 99720 - RNA, 19 nt, Homo sapiens
  misc_RNA (1)...(19): siRNA sense strand
gaccacauacacuuucaga

SEQ ID NO: 99721 - RNA, 19 nt, Homo sapiens
  misc_RNA (1)...(19): siRNA sense strand
ccauugaaauccgcaagau

SEQ ID NO: 99722 - RNA, 19 nt, Homo sapiens
  misc_RNA (1)...(19): siRNA sense strand
uggcaaggcauuacaaauc

SEQ ID NO: 99723 - RNA, 19 nt, Homo sapiens
  misc_RNA (1)...(19): siRNA sense strand
acugacagguaugaguuua

SEQ ID NO: 99724 - RNA, 19 nt, Homo sapiens
  misc_RNA (1)...(19): siRNA sense strand
ucacuguggaggcuucuaa

SEQ ID NO: 99725 - RNA, 19 nt, Homo sapiens
  misc_RNA (1)...(19): siRNA sense strand
gcugucaaaccaauaacaa

SEQ ID NO: 99726 - RNA, 19 nt, Homo sapiens
  misc_RNA (1)...(19): siRNA sense strand
gcaggagacaacauuucaa

SEQ ID NO: 99727 - RNA, 19 nt, Homo sapiens
  misc_RNA (1)...(19): siRNA sense strand
uaugauagugucaaugaga

SEQ ID NO: 99728 - RNA, 19 nt, Homo sapiens
  misc_RNA (1)...(19): siRNA sense strand
gacaacgugccguccauug

SEQ ID NO: 99729 - RNA, 19 nt, Homo sapiens
  misc_RNA (1)...(19): siRNA sense strand
cagagacucaguauuguca

SEQ ID NO: 99730 - RNA, 19 nt, Homo sapiens
  misc_RNA (1)...(19): siRNA sense strand
caaacagagacucaguauu

SEQ ID NO: 99731 - RNA, 19 nt, Homo sapiens
  misc_RNA (1)...(19): siRNA sense strand
augcagagaugagccugua

SEQ ID NO: 99732 - RNA, 19 nt, Homo sapiens
  misc_RNA (1)...(19): siRNA sense strand
gcuggacuccucugugaug

SEQ ID NO: 99733 - RNA, 19 nt, Homo sapiens
  misc_RNA (1)...(19): siRNA sense strand
agagaugagccuguacaua

SEQ ID NO: 99734 - RNA, 19 nt, Homo sapiens
  misc_RNA (1)...(19): siRNA sense strand
caggagacaacauuucaau

SEQ ID NO: 99735 - RNA, 19 nt, Homo sapiens
  misc_RNA (1)...(19): siRNA sense strand
cuaguggugugguuuccuu

SEQ ID NO: 99736 - RNA, 19 nt, Homo sapiens
  misc_RNA (1)...(19): siRNA sense strand
gcaacagacagugaugaug

SEQ ID NO: 99737 - RNA, 19 nt, Homo sapiens
  misc_RNA (1)...(19): siRNA sense strand
agacugacagguaugaguu

SEQ ID NO: 99738 - RNA, 19 nt, Homo sapiens
  misc_RNA (1)...(19): siRNA sense strand
acauacacuuucagaguca

SEQ ID NO: 99739 - RNA, 19 nt, Homo sapiens
  misc_RNA (1)...(19): siRNA sense strand
uagaggagaacaauaacau

SEQ ID NO: 99740 - RNA, 19 nt, Homo sapiens
  misc_RNA (1)...(19): siRNA sense strand
gagcgucuaugagaaagua

SEQ ID NO: 99741 - RNA, 19 nt, Homo sapiens
  misc_RNA (1)...(19): siRNA sense strand
gaaaguaucgggugacaca

SEQ ID NO: 99742 - RNA, 19 nt, Homo sapiens
  misc_RNA (1)...(19): siRNA sense strand
cgacagcgauuccgacauc

SEQ ID NO: 99743 - RNA, 19 nt, Homo sapiens
  misc_RNA (1)...(19): siRNA sense strand
gaagaagggagccaaugaa

SEQ ID NO: 99744 - RNA, 19 nt, Homo sapiens
  misc_RNA (1)...(19): siRNA sense strand
gcagagcgucuaugagaaa

SEQ ID NO: 99745 - RNA, 19 nt, Homo sapiens
  misc_RNA (1)...(19): siRNA sense strand
gcagagaagcagagaaguu

SEQ ID NO: 99746 - RNA, 19 nt, Homo sapiens
  misc_RNA (1)...(19): siRNA sense strand
ggaccugcauaugaaagua

SEQ ID NO: 99747 - RNA, 19 nt, Homo sapiens
  misc_RNA (1)...(19): siRNA sense strand
ccgaggaccugcauaugaa

SEQ ID NO: 99748 - RNA, 19 nt, Homo sapiens
  misc_RNA (1)...(19): siRNA sense strand
agaaaguacugcacagaga

SEQ ID NO: 99749 - RNA, 19 nt, Homo sapiens
  misc_RNA (1)...(19): siRNA sense strand
cgaagaagggagccaauga

SEQ ID NO: 99750 - RNA, 19 nt, Homo sapiens
  misc_RNA (1)...(19): siRNA sense strand
gaagggagccaaugaaaau

SEQ ID NO: 99751 - RNA, 19 nt, Homo sapiens
  misc_RNA (1)...(19): siRNA sense strand
gccgaggaccugcauauga

SEQ ID NO: 99752 - RNA, 19 nt, Homo sapiens
  misc_RNA (1)...(19): siRNA sense strand
aaguggagcuggcggaaga

SEQ ID NO: 99753 - RNA, 19 nt, Homo sapiens
  misc_RNA (1)...(19): siRNA sense strand
cagcagcgcccuagugcaa

SEQ ID NO: 99754 - RNA, 19 nt, Homo sapiens
  misc_RNA (1)...(19): siRNA sense strand
cgacgugguguucgcauuu

SEQ ID NO: 99755 - RNA, 19 nt, Homo sapiens
  misc_RNA (1)...(19): siRNA sense strand
gcccagaugucaaccuucu

SEQ ID NO: 99756 - RNA, 19 nt, Homo sapiens
  misc_RNA (1)...(19): siRNA sense strand
ugacaacgcacccgacauc

SEQ ID NO: 99757 - RNA, 19 nt, Homo sapiens
  misc_RNA (1)...(19): siRNA sense strand
cugcagagcgucuaugaga

SEQ ID NO: 99758 - RNA, 19 nt, Homo sapiens
  misc_RNA (1)...(19): siRNA sense strand
gacguucgcauccaagcua

SEQ ID NO: 99759 - RNA, 19 nt, Homo sapiens
  misc_RNA (1)...(19): siRNA sense strand
gcagcgcccuagugcaagu

SEQ ID NO: 99760 - RNA, 19 nt, Homo sapiens
  misc_RNA (1)...(19): siRNA sense strand
cagcccagaugucaaccuu

SEQ ID NO: 99761 - RNA, 19 nt, Homo sapiens
  misc_RNA (1)...(19): siRNA sense strand
gcaaagacagcgguaaagg

SEQ ID NO: 99762 - RNA, 19 nt, Homo sapiens
  misc_RNA (1)...(19): siRNA sense strand
caauggcucccuagaagug

SEQ ID NO: 99763 - RNA, 19 nt, Homo sapiens
  misc_RNA (1)...(19): siRNA sense strand
cagagaagcagagaaguuc

SEQ ID NO: 99764 - RNA, 19 nt, Homo sapiens
  misc_RNA (1)...(19): siRNA sense strand
ucccagaccugcaggagau

SEQ ID NO: 99765 - RNA, 19 nt, Homo sapiens
  misc_RNA (1)...(19): siRNA sense strand
cggcaaagacagcgguaaa

SEQ ID NO: 99766 - RNA, 19 nt, Homo sapiens
  misc_RNA (1)...(19): siRNA sense strand
aagaagggagccaaugaaa

SEQ ID NO: 99767 - RNA, 19 nt, Homo sapiens
  misc_RNA (1)...(19): siRNA sense strand
aaaaggaucucaucaacca

SEQ ID NO: 99768 - RNA, 19 nt, Homo sapiens
  misc_RNA (1)...(19): siRNA sense strand
gacgugguguucgcauuug

SEQ ID NO: 99769 - RNA, 19 nt, Homo sapiens
  misc_RNA (1)...(19): siRNA sense strand
gaaguucagcggcaaagac

SEQ ID NO: 99770 - RNA, 19 nt, Homo sapiens
  misc_RNA (1)...(19): siRNA sense strand
acugucagcuucgugguaa

SEQ ID NO: 99771 - RNA, 19 nt, Homo sapiens
  misc_RNA (1)...(19): siRNA sense strand
gaugucaaccuucuguaag

SEQ ID NO: 99772 - RNA, 19 nt, Homo sapiens
  misc_RNA (1)...(19): siRNA sense strand
gcagggacaauuacuacca

SEQ ID NO: 99773 - RNA, 19 nt, Homo sapiens
  misc_RNA (1)...(19): siRNA sense strand
gaacgcaucgccgaguaca

SEQ ID NO: 99774 - RNA, 19 nt, Homo sapiens
  misc_RNA (1)...(19): siRNA sense strand
gcgcagggacaauuacuac

SEQ ID NO: 99775 - RNA, 19 nt, Homo sapiens
  misc_RNA (1)...(19): siRNA sense strand
uaacggcgacgugguguuc

SEQ ID NO: 99776 - RNA, 19 nt, Homo sapiens
  misc_RNA (1)...(19): siRNA sense strand
agaugucaaccuucuguaa

SEQ ID NO: 99777 - RNA, 19 nt, Homo sapiens
  misc_RNA (1)...(19): siRNA sense strand
gggcgcuccuggucauauc

SEQ ID NO: 99778 - RNA, 19 nt, Homo sapiens
  misc_RNA (1)...(19): siRNA sense strand
gaccugcauaugaaaguau

SEQ ID NO: 99779 - RNA, 19 nt, Homo sapiens
  misc_RNA (1)...(19): siRNA sense strand
gugcaccgcugaguguaag

SEQ ID NO: 99780 - RNA, 19 nt, Homo sapiens
  misc_RNA (1)...(19): siRNA sense strand
acacgccgcugaucgucau

SEQ ID NO: 99781 - RNA, 19 nt, Homo sapiens
  misc_RNA (1)...(19): siRNA sense strand
gcgcauccgagacgucaau

SEQ ID NO: 99782 - RNA, 19 nt, Homo sapiens
  misc_RNA (1)...(19): siRNA sense strand
gagcaaaacaguccgauac

SEQ ID NO: 99783 - RNA, 19 nt, Homo sapiens
  misc_RNA (1)...(19): siRNA sense strand
guacugcacagagacuaug

SEQ ID NO: 99784 - RNA, 19 nt, Homo sapiens
  misc_RNA (1)...(19): siRNA sense strand
ugcagagcgucuaugagaa

SEQ ID NO: 99785 - RNA, 19 nt, Homo sapiens
  misc_RNA (1)...(19): siRNA sense strand
caucgccgaguacaacuug

SEQ ID NO: 99786 - RNA, 19 nt, Homo sapiens
  misc_RNA (1)...(19): siRNA sense strand
ccgcaaaggacacgguugu

SEQ ID NO: 99787 - RNA, 19 nt, Homo sapiens
  misc_RNA (1)...(19): siRNA sense strand
ugagaaaguacugcacaga

SEQ ID NO: 99788 - RNA, 19 nt, Homo sapiens
  misc_RNA (1)...(19): siRNA sense strand
guaaaggggacagugauuu

SEQ ID NO: 99789 - RNA, 19 nt, Homo sapiens
  misc_RNA (1)...(19): siRNA sense strand
cugcgcagcuucgacuaug

SEQ ID NO: 99790 - RNA, 19 nt, Homo sapiens
  misc_RNA (1)...(19): siRNA sense strand
augucaaccuucuguaaga

SEQ ID NO: 99791 - RNA, 19 nt, Homo sapiens
  misc_RNA (1)...(19): siRNA sense strand
gauuucaacgacagcgauu

SEQ ID NO: 99792 - RNA, 19 nt, Homo sapiens
  misc_RNA (1)...(19): siRNA sense strand
gagcgucuaugagaaagua

SEQ ID NO: 99793 - RNA, 19 nt, Homo sapiens
  misc_RNA (1)...(19): siRNA sense strand
gaaaguaucgggugacaca

SEQ ID NO: 99794 - RNA, 19 nt, Homo sapiens
  misc_RNA (1)...(19): siRNA sense strand
cgacagcgauuccgacauc

SEQ ID NO: 99795 - RNA, 19 nt, Homo sapiens
  misc_RNA (1)...(19): siRNA sense strand
gaagaagggagccaaugaa

SEQ ID NO: 99796 - RNA, 19 nt, Homo sapiens
  misc_RNA (1)...(19): siRNA sense strand
gcagagcgucuaugagaaa

SEQ ID NO: 99797 - RNA, 19 nt, Homo sapiens
  misc_RNA (1)...(19): siRNA sense strand
gcagagaagcagagaaguu

SEQ ID NO: 99798 - RNA, 19 nt, Homo sapiens
  misc_RNA (1)...(19): siRNA sense strand
ggaccugcauaugaaagua

SEQ ID NO: 99799 - RNA, 19 nt, Homo sapiens
  misc_RNA (1)...(19): siRNA sense strand
ccgaggaccugcauaugaa

SEQ ID NO: 99800 - RNA, 19 nt, Homo sapiens
  misc_RNA (1)...(19): siRNA sense strand
agaaaguacugcacagaga

SEQ ID NO: 99801 - RNA, 19 nt, Homo sapiens
  misc_RNA (1)...(19): siRNA sense strand
cgaagaagggagccaauga

SEQ ID NO: 99802 - RNA, 19 nt, Homo sapiens
  misc_RNA (1)...(19): siRNA sense strand
gaagggagccaaugaaaau

SEQ ID NO: 99803 - RNA, 19 nt, Homo sapiens
  misc_RNA (1)...(19): siRNA sense strand
gccgaggaccugcauauga

SEQ ID NO: 99804 - RNA, 19 nt, Homo sapiens
  misc_RNA (1)...(19): siRNA sense strand
aaguggagcuggcggaaga

SEQ ID NO: 99805 - RNA, 19 nt, Homo sapiens
  misc_RNA (1)...(19): siRNA sense strand
cagcagcgcccuagugcaa

SEQ ID NO: 99806 - RNA, 19 nt, Homo sapiens
  misc_RNA (1)...(19): siRNA sense strand
cgacgugguguucgcauuu

SEQ ID NO: 99807 - RNA, 19 nt, Homo sapiens
  misc_RNA (1)...(19): siRNA sense strand
gcccagaugucaaccuucu

SEQ ID NO: 99808 - RNA, 19 nt, Homo sapiens
  misc_RNA (1)...(19): siRNA sense strand
ugacaacgcacccgacauc

SEQ ID NO: 99809 - RNA, 19 nt, Homo sapiens
  misc_RNA (1)...(19): siRNA sense strand
cugcagagcgucuaugaga

SEQ ID NO: 99810 - RNA, 19 nt, Homo sapiens
  misc_RNA (1)...(19): siRNA sense strand
gacguucgcauccaagcua

SEQ ID NO: 99811 - RNA, 19 nt, Homo sapiens
  misc_RNA (1)...(19): siRNA sense strand
gcagcgcccuagugcaagu

SEQ ID NO: 99812 - RNA, 19 nt, Homo sapiens
  misc_RNA (1)...(19): siRNA sense strand
cagcccagaugucaaccuu

SEQ ID NO: 99813 - RNA, 19 nt, Homo sapiens
  misc_RNA (1)...(19): siRNA sense strand
gcaaagacagcgguaaagg

SEQ ID NO: 99814 - RNA, 19 nt, Homo sapiens
  misc_RNA (1)...(19): siRNA sense strand
caauggcucccuagaagug

SEQ ID NO: 99815 - RNA, 19 nt, Homo sapiens
  misc_RNA (1)...(19): siRNA sense strand
cagagaagcagagaaguuc

SEQ ID NO: 99816 - RNA, 19 nt, Homo sapiens
  misc_RNA (1)...(19): siRNA sense strand
ucccagaccugcaggagau

SEQ ID NO: 99817 - RNA, 19 nt, Homo sapiens
  misc_RNA (1)...(19): siRNA sense strand
cggcaaagacagcgguaaa

SEQ ID NO: 99818 - RNA, 19 nt, Homo sapiens
  misc_RNA (1)...(19): siRNA sense strand
aagaagggagccaaugaaa

SEQ ID NO: 99819 - RNA, 19 nt, Homo sapiens
  misc_RNA (1)...(19): siRNA sense strand
aaaaggaucucaucaacca

SEQ ID NO: 99820 - RNA, 19 nt, Homo sapiens
  misc_RNA (1)...(19): siRNA sense strand
gacgugguguucgcauuug

SEQ ID NO: 99821 - RNA, 19 nt, Homo sapiens
  misc_RNA (1)...(19): siRNA sense strand
gaaguucagcggcaaagac

SEQ ID NO: 99822 - RNA, 19 nt, Homo sapiens
  misc_RNA (1)...(19): siRNA sense strand
acugucagcuucgugguaa

SEQ ID NO: 99823 - RNA, 19 nt, Homo sapiens
  misc_RNA (1)...(19): siRNA sense strand
gaugucaaccuucuguaag

SEQ ID NO: 99824 - RNA, 19 nt, Homo sapiens
  misc_RNA (1)...(19): siRNA sense strand
gcagggacaauuacuacca

SEQ ID NO: 99825 - RNA, 19 nt, Homo sapiens
  misc_RNA (1)...(19): siRNA sense strand
gaacgcaucgccgaguaca

SEQ ID NO: 99826 - RNA, 19 nt, Homo sapiens
  misc_RNA (1)...(19): siRNA sense strand
gcgcagggacaauuacuac

SEQ ID NO: 99827 - RNA, 19 nt, Homo sapiens
  misc_RNA (1)...(19): siRNA sense strand
uaacggcgacgugguguuc

SEQ ID NO: 99828 - RNA, 19 nt, Homo sapiens
  misc_RNA (1)...(19): siRNA sense strand
agaugucaaccuucuguaa

SEQ ID NO: 99829 - RNA, 19 nt, Homo sapiens
  misc_RNA (1)...(19): siRNA sense strand
gggcgcuccuggucauauc

SEQ ID NO: 99830 - RNA, 19 nt, Homo sapiens
  misc_RNA (1)...(19): siRNA sense strand
gaccugcauaugaaaguau

SEQ ID NO: 99831 - RNA, 19 nt, Homo sapiens
  misc_RNA (1)...(19): siRNA sense strand
gugcaccgcugaguguaag

SEQ ID NO: 99832 - RNA, 19 nt, Homo sapiens
  misc_RNA (1)...(19): siRNA sense strand
acacgccgcugaucgucau

SEQ ID NO: 99833 - RNA, 19 nt, Homo sapiens
  misc_RNA (1)...(19): siRNA sense strand
gcgcauccgagacgucaau

SEQ ID NO: 99834 - RNA, 19 nt, Homo sapiens
  misc_RNA (1)...(19): siRNA sense strand
gagcaaaacaguccgauac

SEQ ID NO: 99835 - RNA, 19 nt, Homo sapiens
  misc_RNA (1)...(19): siRNA sense strand
guacugcacagagacuaug

SEQ ID NO: 99836 - RNA, 19 nt, Homo sapiens
  misc_RNA (1)...(19): siRNA sense strand
ugcagagcgucuaugagaa

SEQ ID NO: 99837 - RNA, 19 nt, Homo sapiens
  misc_RNA (1)...(19): siRNA sense strand
caucgccgaguacaacuug

SEQ ID NO: 99838 - RNA, 19 nt, Homo sapiens
  misc_RNA (1)...(19): siRNA sense strand
ccgcaaaggacacgguugu

SEQ ID NO: 99839 - RNA, 19 nt, Homo sapiens
  misc_RNA (1)...(19): siRNA sense strand
ugagaaaguacugcacaga

SEQ ID NO: 99840 - RNA, 19 nt, Homo sapiens
  misc_RNA (1)...(19): siRNA sense strand
guaaaggggacagugauuu

SEQ ID NO: 99841 - RNA, 19 nt, Homo sapiens
  misc_RNA (1)...(19): siRNA sense strand
cugcgcagcuucgacuaug

SEQ ID NO: 99842 - RNA, 19 nt, Homo sapiens
  misc_RNA (1)...(19): siRNA sense strand
augucaaccuucuguaaga

SEQ ID NO: 99843 - RNA, 19 nt, Homo sapiens
  misc_RNA (1)...(19): siRNA sense strand
gauuucaacgacagcgauu

SEQ ID NO: 99844 - RNA, 19 nt, Homo sapiens
  misc_RNA (1)...(19): siRNA sense strand
gggaccaggugauuaagua

SEQ ID NO: 99845 - RNA, 19 nt, Homo sapiens
  misc_RNA (1)...(19): siRNA sense strand
gaaccaggauaccuucuca

SEQ ID NO: 99846 - RNA, 19 nt, Homo sapiens
  misc_RNA (1)...(19): siRNA sense strand
caacagcaaugguucaagu

SEQ ID NO: 99847 - RNA, 19 nt, Homo sapiens
  misc_RNA (1)...(19): siRNA sense strand
gggaguaugucaccaugga

SEQ ID NO: 99848 - RNA, 19 nt, Homo sapiens
  misc_RNA (1)...(19): siRNA sense strand
ccacacaagcaaauacuuu

SEQ ID NO: 99849 - RNA, 19 nt, Homo sapiens
  misc_RNA (1)...(19): siRNA sense strand
gaagcgcccugcuaugucu

SEQ ID NO: 99850 - RNA, 19 nt, Homo sapiens
  misc_RNA (1)...(19): siRNA sense strand
gcacaucacgucugaguac

SEQ ID NO: 99851 - RNA, 19 nt, Homo sapiens
  misc_RNA (1)...(19): siRNA sense strand
ccaauaaggcggagagugu

SEQ ID NO: 99852 - RNA, 19 nt, Homo sapiens
  misc_RNA (1)...(19): siRNA sense strand
ccagugacuuuccaacaga

SEQ ID NO: 99853 - RNA, 19 nt, Homo sapiens
  misc_RNA (1)...(19): siRNA sense strand
ggccgaaucgucuacauuu

SEQ ID NO: 99854 - RNA, 19 nt, Homo sapiens
  misc_RNA (1)...(19): siRNA sense strand
ccagggacaugaccucugu

SEQ ID NO: 99855 - RNA, 19 nt, Homo sapiens
  misc_RNA (1)...(19): siRNA sense strand
gggcaaggacucagaagga

SEQ ID NO: 99856 - RNA, 19 nt, Homo sapiens
  misc_RNA (1)...(19): siRNA sense strand
uuacgaagcuccccggaua

SEQ ID NO: 99857 - RNA, 19 nt, Homo sapiens
  misc_RNA (1)...(19): siRNA sense strand
ggcaaggacucagaaggaa

SEQ ID NO: 99858 - RNA, 19 nt, Homo sapiens
  misc_RNA (1)...(19): siRNA sense strand
gugggagucuucuaugguu

SEQ ID NO: 99859 - RNA, 19 nt, Homo sapiens
  misc_RNA (1)...(19): siRNA sense strand
ucacugaguccuccaauca

SEQ ID NO: 99860 - RNA, 19 nt, Homo sapiens
  misc_RNA (1)...(19): siRNA sense strand
ccagugaccugcucgaacu

SEQ ID NO: 99861 - RNA, 19 nt, Homo sapiens
  misc_RNA (1)...(19): siRNA sense strand
gaagaaggcaggagcucau

SEQ ID NO: 99862 - RNA, 19 nt, Homo sapiens
  misc_RNA (1)...(19): siRNA sense strand
gcaguuccauugccuacag

SEQ ID NO: 99863 - RNA, 19 nt, Homo sapiens
  misc_RNA (1)...(19): siRNA sense strand
uaccagccauuccgccuaa

SEQ ID NO: 99864 - RNA, 19 nt, Homo sapiens
  misc_RNA (1)...(19): siRNA sense strand
caacgggcaugagucuaga

SEQ ID NO: 99865 - RNA, 19 nt, Homo sapiens
  misc_RNA (1)...(19): siRNA sense strand
ccacccagcaguuccauug

SEQ ID NO: 99866 - RNA, 19 nt, Homo sapiens
  misc_RNA (1)...(19): siRNA sense strand
gagcacaucacgucugagu

SEQ ID NO: 99867 - RNA, 19 nt, Homo sapiens
  misc_RNA (1)...(19): siRNA sense strand
uggaggagcuggagcacau

SEQ ID NO: 99868 - RNA, 19 nt, Homo sapiens
  misc_RNA (1)...(19): siRNA sense strand
gagcagccacacaagcaaa

SEQ ID NO: 99869 - RNA, 19 nt, Homo sapiens
  misc_RNA (1)...(19): siRNA sense strand
ccagaacccucgggcugaa

SEQ ID NO: 99870 - RNA, 19 nt, Homo sapiens
  misc_RNA (1)...(19): siRNA sense strand
gaacucaugacagcacuuc

SEQ ID NO: 99871 - RNA, 19 nt, Homo sapiens
  misc_RNA (1)...(19): siRNA sense strand
ccauccagcuauccuuaug

SEQ ID NO: 99872 - RNA, 19 nt, Homo sapiens
  misc_RNA (1)...(19): siRNA sense strand
ggaugugggagucuucuau

SEQ ID NO: 99873 - RNA, 19 nt, Homo sapiens
  misc_RNA (1)...(19): siRNA sense strand
uggagcacaucacgucuga

SEQ ID NO: 99874 - RNA, 19 nt, Homo sapiens
  misc_RNA (1)...(19): siRNA sense strand
gcuccaggaucccauuugg

SEQ ID NO: 99875 - RNA, 19 nt, Homo sapiens
  misc_RNA (1)...(19): siRNA sense strand
ccuuggugcucccuaacua

SEQ ID NO: 99876 - RNA, 19 nt, Homo sapiens
  misc_RNA (1)...(19): siRNA sense strand
gaagcagcagccucgguuu

SEQ ID NO: 99877 - RNA, 19 nt, Homo sapiens
  misc_RNA (1)...(19): siRNA sense strand
gcucuccacuccagcucaa

SEQ ID NO: 99878 - RNA, 19 nt, Homo sapiens
  misc_RNA (1)...(19): siRNA sense strand
gagagcagcaagagcacaa

SEQ ID NO: 99879 - RNA, 19 nt, Homo sapiens
  misc_RNA (1)...(19): siRNA sense strand
cgacaccacugccgaucca

SEQ ID NO: 99880 - RNA, 19 nt, Homo sapiens
  misc_RNA (1)...(19): siRNA sense strand
gcuccaccaucguccaugu

SEQ ID NO: 99881 - RNA, 19 nt, Homo sapiens
  misc_RNA (1)...(19): siRNA sense strand
gccagugacuuuccaacag

SEQ ID NO: 99882 - RNA, 19 nt, Homo sapiens
  misc_RNA (1)...(19): siRNA sense strand
guucaggccucagggacuu

SEQ ID NO: 99883 - RNA, 19 nt, Homo sapiens
  misc_RNA (1)...(19): siRNA sense strand
caucacgucugaguacaca

SEQ ID NO: 99884 - RNA, 19 nt, Homo sapiens
  misc_RNA (1)...(19): siRNA sense strand
gcagccacacaagcaaaua

SEQ ID NO: 99885 - RNA, 19 nt, Homo sapiens
  misc_RNA (1)...(19): siRNA sense strand
caccagggccagcagcuuu

SEQ ID NO: 99886 - RNA, 19 nt, Homo sapiens
  misc_RNA (1)...(19): siRNA sense strand
cagcaccacuaagcguaaa

SEQ ID NO: 99887 - RNA, 19 nt, Homo sapiens
  misc_RNA (1)...(19): siRNA sense strand
gcucgaacuucugcugcaa

SEQ ID NO: 99888 - RNA, 19 nt, Homo sapiens
  misc_RNA (1)...(19): siRNA sense strand
gccgaaucgucuacauuuc

SEQ ID NO: 99889 - RNA, 19 nt, Homo sapiens
  misc_RNA (1)...(19): siRNA sense strand
ucucaggacuuggcuaugg

SEQ ID NO: 99890 - RNA, 19 nt, Homo sapiens
  misc_RNA (1)...(19): siRNA sense strand
ggagucggacaucaucaug

SEQ ID NO: 99891 - RNA, 19 nt, Homo sapiens
  misc_RNA (1)...(19): siRNA sense strand
ucaacugccuggacagcau

SEQ ID NO: 99892 - RNA, 19 nt, Homo sapiens
  misc_RNA (1)...(19): siRNA sense strand
gacaagaggauuuucacua

SEQ ID NO: 99893 - RNA, 19 nt, Homo sapiens
  misc_RNA (1)...(19): siRNA sense strand
ccaacgggcaugagucuag

SEQ ID NO: 99894 - RNA, 19 nt, Homo sapiens
  misc_RNA (1)...(19): siRNA sense strand
gggagcagcacccaagauc

SEQ ID NO: 99895 - RNA, 19 nt, Homo sapiens
  misc_RNA (1)...(19): siRNA sense strand
ucgaacuucugcugcaaga

SEQ ID NO: 99896 - RNA, 19 nt, Homo sapiens
  misc_RNA (1)...(19): siRNA sense strand
uggacagcauccucaggua

SEQ ID NO: 99897 - RNA, 19 nt, Homo sapiens
  misc_RNA (1)...(19): siRNA sense strand
ggacucagaaggaacucau

SEQ ID NO: 99898 - RNA, 19 nt, Homo sapiens
  misc_RNA (1)...(19): siRNA sense strand
gcucucaggacuuggcuau

SEQ ID NO: 99899 - RNA, 19 nt, Homo sapiens
  misc_RNA (1)...(19): siRNA sense strand
uugcagagcgcauccauuc

SEQ ID NO: 99900 - RNA, 19 nt, Homo sapiens
  misc_RNA (1)...(19): siRNA sense strand
gaugugggagucuucuaug

SEQ ID NO: 99901 - RNA, 19 nt, Homo sapiens
  misc_RNA (1)...(19): siRNA sense strand
gggccgaaucgucuacauu

SEQ ID NO: 99902 - RNA, 19 nt, Homo sapiens
  misc_RNA (1)...(19): siRNA sense strand
gcagcaagagcacaaacuc

SEQ ID NO: 99903 - RNA, 19 nt, Homo sapiens
  misc_RNA (1)...(19): siRNA sense strand
ccaaucaggacgcacuuuc

SEQ ID NO: 99904 - RNA, 19 nt, Homo sapiens
  misc_RNA (1)...(19): siRNA sense strand
gaugccaacagcaaugguu

SEQ ID NO: 99905 - RNA, 19 nt, Homo sapiens
  misc_RNA (1)...(19): siRNA sense strand
gcucacgccaccaccagaa

SEQ ID NO: 99906 - RNA, 19 nt, Homo sapiens
  misc_RNA (1)...(19): siRNA sense strand
caugcuggcuauccacaag

SEQ ID NO: 99907 - RNA, 19 nt, Homo sapiens
  misc_RNA (1)...(19): siRNA sense strand
gcaccacuaagcguaaaug

SEQ ID NO: 99908 - RNA, 19 nt, Homo sapiens
  misc_RNA (1)...(19): siRNA sense strand
ucagaaggaacucaugaca

SEQ ID NO: 99909 - RNA, 19 nt, Homo sapiens
  misc_RNA (1)...(19): siRNA sense strand
ggacuuuacccaggagaag

SEQ ID NO: 99910 - RNA, 19 nt, Homo sapiens
  misc_RNA (1)...(19): siRNA sense strand
gaaggcaggagcucaucca

SEQ ID NO: 99911 - RNA, 19 nt, Homo sapiens
  misc_RNA (1)...(19): siRNA sense strand
ccagcaccacuaagcguaa

SEQ ID NO: 99912 - RNA, 19 nt, Homo sapiens
  misc_RNA (1)...(19): siRNA sense strand
gcgcauccauucggguuac

SEQ ID NO: 99913 - RNA, 19 nt, Homo sapiens
  misc_RNA (1)...(19): siRNA sense strand
caagauccgggucucagau

SEQ ID NO: 99914 - RNA, 19 nt, Homo sapiens
  misc_RNA (1)...(19): siRNA sense strand
ccaagauccgggucucaga

SEQ ID NO: 99915 - RNA, 19 nt, Homo sapiens
  misc_RNA (1)...(19): siRNA sense strand
cagagcagccacacaagca

SEQ ID NO: 99916 - RNA, 19 nt, Homo sapiens
  misc_RNA (1)...(19): siRNA sense strand
ugaggaggccgagaggaaa

SEQ ID NO: 99917 - RNA, 19 nt, Homo sapiens
  misc_RNA (1)...(19): siRNA sense strand
cccggacucuccacuguuc

SEQ ID NO: 99918 - RNA, 19 nt, Homo sapiens
  misc_RNA (1)...(19): siRNA sense strand
cucauccaguccagccuua

SEQ ID NO: 99919 - RNA, 19 nt, Homo sapiens
  misc_RNA (1)...(19): siRNA sense strand
caaguggcaaugaguccaa

SEQ ID NO: 99920 - RNA, 19 nt, Homo sapiens
  misc_RNA (1)...(19): siRNA sense strand
gagcagcacccaagauccu

SEQ ID NO: 99921 - RNA, 19 nt, Homo sapiens
  misc_RNA (1)...(19): siRNA sense strand
caggaaacugcaccagcua

SEQ ID NO: 99922 - RNA, 19 nt, Homo sapiens
  misc_RNA (1)...(19): siRNA sense strand
caaggacucagaaggaacu

SEQ ID NO: 99923 - RNA, 19 nt, Homo sapiens
  misc_RNA (1)...(19): siRNA sense strand
gauggccuguguggacugu

SEQ ID NO: 99924 - RNA, 19 nt, Homo sapiens
  misc_RNA (1)...(19): siRNA sense strand
caacugccucgggcucuug

SEQ ID NO: 99925 - RNA, 19 nt, Homo sapiens
  misc_RNA (1)...(19): siRNA sense strand
ccaacugccucgggcucuu

SEQ ID NO: 99926 - RNA, 19 nt, Homo sapiens
  misc_RNA (1)...(19): siRNA sense strand
caugaccucugugcugaag

SEQ ID NO: 99927 - RNA, 19 nt, Homo sapiens
  misc_RNA (1)...(19): siRNA sense strand
uggccuuggugcucccuaa

SEQ ID NO: 99928 - RNA, 19 nt, Homo sapiens
  misc_RNA (1)...(19): siRNA sense strand
auacagagaucaugacuuu

SEQ ID NO: 99929 - RNA, 19 nt, Homo sapiens
  misc_RNA (1)...(19): siRNA sense strand
uaacauguaugaaggugua

SEQ ID NO: 99930 - RNA, 19 nt, Homo sapiens
  misc_RNA (1)...(19): siRNA sense strand
gaucaugacuuugguagau

SEQ ID NO: 99931 - RNA, 19 nt, Homo sapiens
  misc_RNA (1)...(19): siRNA sense strand
guaugaagguguaggaaga

SEQ ID NO: 99932 - RNA, 19 nt, Homo sapiens
  misc_RNA (1)...(19): siRNA sense strand
uagaugagacuaacaugua

SEQ ID NO: 99933 - RNA, 19 nt, Homo sapiens
  misc_RNA (1)...(19): siRNA sense strand
ccaaaguuauugacacuca

SEQ ID NO: 99934 - RNA, 19 nt, Homo sapiens
  misc_RNA (1)...(19): siRNA sense strand
ucgcagacauacagauuga

SEQ ID NO: 99935 - RNA, 19 nt, Homo sapiens
  misc_RNA (1)...(19): siRNA sense strand
uaaggaagcugaggacaac

SEQ ID NO: 99936 - RNA, 19 nt, Homo sapiens
  misc_RNA (1)...(19): siRNA sense strand
gaacagcuaaacagaacga

SEQ ID NO: 99937 - RNA, 19 nt, Homo sapiens
  misc_RNA (1)...(19): siRNA sense strand
caaggaagcaauucacagu

SEQ ID NO: 99938 - RNA, 19 nt, Homo sapiens
  misc_RNA (1)...(19): siRNA sense strand
gagacuaacauguaugaag

SEQ ID NO: 99939 - RNA, 19 nt, Homo sapiens
  misc_RNA (1)...(19): siRNA sense strand
ggugaagcucgcagacaua

SEQ ID NO: 99940 - RNA, 19 nt, Homo sapiens
  misc_RNA (1)...(19): siRNA sense strand
gcucgcagacauacagauu

SEQ ID NO: 99941 - RNA, 19 nt, Homo sapiens
  misc_RNA (1)...(19): siRNA sense strand
agaugagacuaacauguau

SEQ ID NO: 99942 - RNA, 19 nt, Homo sapiens
  misc_RNA (1)...(19): siRNA sense strand
cauacagauugaacagcua

SEQ ID NO: 99943 - RNA, 19 nt, Homo sapiens
  misc_RNA (1)...(19): siRNA sense strand
guagaugagacuaacaugu

SEQ ID NO: 99944 - RNA, 19 nt, Homo sapiens
  misc_RNA (1)...(19): siRNA sense strand
aggaagcaauucacaguca

SEQ ID NO: 99945 - RNA, 19 nt, Homo sapiens
  misc_RNA (1)...(19): siRNA sense strand
gaagcucgcagacauacag

SEQ ID NO: 99946 - RNA, 19 nt, Homo sapiens
  misc_RNA (1)...(19): siRNA sense strand
gauugaacagcuaaacaga

SEQ ID NO: 99947 - RNA, 19 nt, Homo sapiens
  misc_RNA (1)...(19): siRNA sense strand
acagauacagagaucauga

SEQ ID NO: 99948 - RNA, 19 nt, Homo sapiens
  misc_RNA (1)...(19): siRNA sense strand
acagagaucaugacuuugg

SEQ ID NO: 99949 - RNA, 19 nt, Homo sapiens
  misc_RNA (1)...(19): siRNA sense strand
gcagacauacagauugaac

SEQ ID NO: 99950 - RNA, 19 nt, Homo sapiens
  misc_RNA (1)...(19): siRNA sense strand
uugaacagcuaaacagaac

SEQ ID NO: 99951 - RNA, 19 nt, Homo sapiens
  misc_RNA (1)...(19): siRNA sense strand
gcagaaaauagcagaagaa

SEQ ID NO: 99952 - RNA, 19 nt, Homo sapiens
  misc_RNA (1)...(19): siRNA sense strand
uuaaggaagcugaggacaa

SEQ ID NO: 99953 - RNA, 19 nt, Homo sapiens
  misc_RNA (1)...(19): siRNA sense strand
acacucaacagaaggugaa

SEQ ID NO: 99954 - RNA, 19 nt, Homo sapiens
  misc_RNA (1)...(19): siRNA sense strand
gcuguuagagaagcagaaa

SEQ ID NO: 99955 - RNA, 19 nt, Homo sapiens
  misc_RNA (1)...(19): siRNA sense strand
gaugagacuaacauguaug

SEQ ID NO: 99956 - RNA, 19 nt, Homo sapiens
  misc_RNA (1)...(19): siRNA sense strand
cagcuaaacagaacgaaaa

SEQ ID NO: 99957 - RNA, 19 nt, Homo sapiens
  misc_RNA (1)...(19): siRNA sense strand
ccguggaucuagagcugaa

SEQ ID NO: 99958 - RNA, 19 nt, Homo sapiens
  misc_RNA (1)...(19): siRNA sense strand
gauacagagaucaugacuu

SEQ ID NO: 99959 - RNA, 19 nt, Homo sapiens
  misc_RNA (1)...(19): siRNA sense strand
cagauugaacagcuaaaca

SEQ ID NO: 99960 - RNA, 19 nt, Homo sapiens
  misc_RNA (1)...(19): siRNA sense strand
ggaagcugaggacaacauc

SEQ ID NO: 99961 - RNA, 19 nt, Homo sapiens
  misc_RNA (1)...(19): siRNA sense strand
auacagauugaacagcuaa

SEQ ID NO: 99962 - RNA, 19 nt, Homo sapiens
  misc_RNA (1)...(19): siRNA sense strand
cagagaucaugacuuuggu

SEQ ID NO: 99963 - RNA, 19 nt, Homo sapiens
  misc_RNA (1)...(19): siRNA sense strand
gaaacaggccgucauggaa

SEQ ID NO: 99964 - RNA, 19 nt, Homo sapiens
  misc_RNA (1)...(19): siRNA sense strand
gaaaugaugagucagaaga

SEQ ID NO: 99965 - RNA, 19 nt, Homo sapiens
  misc_RNA (1)...(19): siRNA sense strand
gaagcugcaugauguggaa

SEQ ID NO: 99966 - RNA, 19 nt, Homo sapiens
  misc_RNA (1)...(19): siRNA sense strand
ggaacuggguacuauguag

SEQ ID NO: 99967 - RNA, 19 nt, Homo sapiens
  misc_RNA (1)...(19): siRNA sense strand
ggagaagcacgccaugaaa

SEQ ID NO: 99968 - RNA, 19 nt, Homo sapiens
  misc_RNA (1)...(19): siRNA sense strand
uaaccaagcagauggagaa

SEQ ID NO: 99969 - RNA, 19 nt, Homo sapiens
  misc_RNA (1)...(19): siRNA sense strand
ucaagaggaagauagauuu

SEQ ID NO: 99970 - RNA, 19 nt, Homo sapiens
  misc_RNA (1)...(19): siRNA sense strand
gaacuggguacuauguaga

SEQ ID NO: 99971 - RNA, 19 nt, Homo sapiens
  misc_RNA (1)...(19): siRNA sense strand
uagaaaugcucaagaacca

SEQ ID NO: 99972 - RNA, 19 nt, Homo sapiens
  misc_RNA (1)...(19): siRNA sense strand
aaacaggccgucauggaaa

SEQ ID NO: 99973 - RNA, 19 nt, Homo sapiens
  misc_RNA (1)...(19): siRNA sense strand
cugggaagcugcaugaugu

SEQ ID NO: 99974 - RNA, 19 nt, Homo sapiens
  misc_RNA (1)...(19): siRNA sense strand
aaccagcucuucaggagaa

SEQ ID NO: 99975 - RNA, 19 nt, Homo sapiens
  misc_RNA (1)...(19): siRNA sense strand
cagcucaggcuacugcuaa

SEQ ID NO: 99976 - RNA, 19 nt, Homo sapiens
  misc_RNA (1)...(19): siRNA sense strand
ccaagcagauggagaaaau

SEQ ID NO: 99977 - RNA, 19 nt, Homo sapiens
  misc_RNA (1)...(19): siRNA sense strand
ugaaacaggccgucaugga

SEQ ID NO: 99978 - RNA, 19 nt, Homo sapiens
  misc_RNA (1)...(19): siRNA sense strand
gcucaucgaugugggaacu

SEQ ID NO: 99979 - RNA, 19 nt, Homo sapiens
  misc_RNA (1)...(19): siRNA sense strand
aaugaugagucagaagauu

SEQ ID NO: 99980 - RNA, 19 nt, Homo sapiens
  misc_RNA (1)...(19): siRNA sense strand
uaacaucacggagcugaau

SEQ ID NO: 99981 - RNA, 19 nt, Homo sapiens
  misc_RNA (1)...(19): siRNA sense strand
ugugggaacuggguacuau

SEQ ID NO: 99982 - RNA, 19 nt, Homo sapiens
  misc_RNA (1)...(19): siRNA sense strand
gagaagcacgccaugaaac

SEQ ID NO: 99983 - RNA, 19 nt, Homo sapiens
  misc_RNA (1)...(19): siRNA sense strand
cagcugaggaugccaagga

SEQ ID NO: 99984 - RNA, 19 nt, Homo sapiens
  misc_RNA (1)...(19): siRNA sense strand
gggaacuggguacuaugua

SEQ ID NO: 99985 - RNA, 19 nt, Homo sapiens
  misc_RNA (1)...(19): siRNA sense strand
gguacuauguagagaagac

SEQ ID NO: 99986 - RNA, 19 nt, Homo sapiens
  misc_RNA (1)...(19): siRNA sense strand
uggaaaugaugagucagaa

SEQ ID NO: 99987 - RNA, 19 nt, Homo sapiens
  misc_RNA (1)...(19): siRNA sense strand
agcuagaaaugcucaagaa

SEQ ID NO: 99988 - RNA, 19 nt, Homo sapiens
  misc_RNA (1)...(19): siRNA sense strand
ggaaaugaugagucagaag

SEQ ID NO: 99989 - RNA, 19 nt, Homo sapiens
  misc_RNA (1)...(19): siRNA sense strand
aggagaagcacgccaugaa

SEQ ID NO: 99990 - RNA, 19 nt, Homo sapiens
  misc_RNA (1)...(19): siRNA sense strand
uggaacacgugcucaucga

SEQ ID NO: 99991 - RNA, 19 nt, Homo sapiens
  misc_RNA (1)...(19): siRNA sense strand
cagcuagaaaugcucaaga

SEQ ID NO: 99992 - RNA, 19 nt, Homo sapiens
  misc_RNA (1)...(19): siRNA sense strand
agaagcacgccaugaaaca

SEQ ID NO: 99993 - RNA, 19 nt, Homo sapiens
  misc_RNA (1)...(19): siRNA sense strand
ggaacacgugcucaucgau

SEQ ID NO: 99994 - RNA, 19 nt, Homo sapiens
  misc_RNA (1)...(19): siRNA sense strand
uagaaaugcucaagaacca

SEQ ID NO: 99995 - RNA, 19 nt, Homo sapiens
  misc_RNA (1)...(19): siRNA sense strand
uaacaucacggagcugaau

SEQ ID NO: 99996 - RNA, 19 nt, Homo sapiens
  misc_RNA (1)...(19): siRNA sense strand
agcuagaaaugcucaagaa

SEQ ID NO: 99997 - RNA, 19 nt, Homo sapiens
  misc_RNA (1)...(19): siRNA sense strand
cagcuagaaaugcucaaga

SEQ ID NO: 99998 - RNA, 19 nt, Homo sapiens
  misc_RNA (1)...(19): siRNA sense strand
gaaacaggccgucauggaa

SEQ ID NO: 99999 - RNA, 19 nt, Homo sapiens
  misc_RNA (1)...(19): siRNA sense strand
gaaaugaugagucagaaga

SEQ ID NO: 100000 - RNA, 19 nt, Homo sapiens
  misc_RNA (1)...(19): siRNA sense strand
gaagcugcaugauguggaa

SEQ ID NO: 100001 - RNA, 19 nt, Homo sapiens
  misc_RNA (1)...(19): siRNA sense strand
ggaacuggguacuauguag

SEQ ID NO: 100002 - RNA, 19 nt, Homo sapiens
  misc_RNA (1)...(19): siRNA sense strand
ggagaagcacgccaugaaa

SEQ ID NO: 100003 - RNA, 19 nt, Homo sapiens
  misc_RNA (1)...(19): siRNA sense strand
uaaccaagcagauggagaa

SEQ ID NO: 100004 - RNA, 19 nt, Homo sapiens
  misc_RNA (1)...(19): siRNA sense strand
ucaagaggaagauagauuu

SEQ ID NO: 100005 - RNA, 19 nt, Homo sapiens
  misc_RNA (1)...(19): siRNA sense strand
gaacuggguacuauguaga

SEQ ID NO: 100006 - RNA, 19 nt, Homo sapiens
  misc_RNA (1)...(19): siRNA sense strand
uagaaaugcucaagaacca

SEQ ID NO: 100007 - RNA, 19 nt, Homo sapiens
  misc_RNA (1)...(19): siRNA sense strand
aaacaggccgucauggaaa

SEQ ID NO: 100008 - RNA, 19 nt, Homo sapiens
  misc_RNA (1)...(19): siRNA sense strand
cugggaagcugcaugaugu

SEQ ID NO: 100009 - RNA, 19 nt, Homo sapiens
  misc_RNA (1)...(19): siRNA sense strand
aaccagcucuucaggagaa

SEQ ID NO: 100010 - RNA, 19 nt, Homo sapiens
  misc_RNA (1)...(19): siRNA sense strand
cagcucaggcuacugcuaa

SEQ ID NO: 100011 - RNA, 19 nt, Homo sapiens
  misc_RNA (1)...(19): siRNA sense strand
ccaagcagauggagaaaau

SEQ ID NO: 100012 - RNA, 19 nt, Homo sapiens
  misc_RNA (1)...(19): siRNA sense strand
ugaaacaggccgucaugga

SEQ ID NO: 100013 - RNA, 19 nt, Homo sapiens
  misc_RNA (1)...(19): siRNA sense strand
gcucaucgaugugggaacu

SEQ ID NO: 100014 - RNA, 19 nt, Homo sapiens
  misc_RNA (1)...(19): siRNA sense strand
aaugaugagucagaagauu

SEQ ID NO: 100015 - RNA, 19 nt, Homo sapiens
  misc_RNA (1)...(19): siRNA sense strand
uaacaucacggagcugaau

SEQ ID NO: 100016 - RNA, 19 nt, Homo sapiens
  misc_RNA (1)...(19): siRNA sense strand
ugugggaacuggguacuau

SEQ ID NO: 100017 - RNA, 19 nt, Homo sapiens
  misc_RNA (1)...(19): siRNA sense strand
gagaagcacgccaugaaac

SEQ ID NO: 100018 - RNA, 19 nt, Homo sapiens
  misc_RNA (1)...(19): siRNA sense strand
cagcugaggaugccaagga

SEQ ID NO: 100019 - RNA, 19 nt, Homo sapiens
  misc_RNA (1)...(19): siRNA sense strand
gggaacuggguacuaugua

SEQ ID NO: 100020 - RNA, 19 nt, Homo sapiens
  misc_RNA (1)...(19): siRNA sense strand
gguacuauguagagaagac

SEQ ID NO: 100021 - RNA, 19 nt, Homo sapiens
  misc_RNA (1)...(19): siRNA sense strand
uggaaaugaugagucagaa

SEQ ID NO: 100022 - RNA, 19 nt, Homo sapiens
  misc_RNA (1)...(19): siRNA sense strand
agcuagaaaugcucaagaa

SEQ ID NO: 100023 - RNA, 19 nt, Homo sapiens
  misc_RNA (1)...(19): siRNA sense strand
ggaaaugaugagucagaag

SEQ ID NO: 100024 - RNA, 19 nt, Homo sapiens
  misc_RNA (1)...(19): siRNA sense strand
aggagaagcacgccaugaa

SEQ ID NO: 100025 - RNA, 19 nt, Homo sapiens
  misc_RNA (1)...(19): siRNA sense strand
uggaacacgugcucaucga

SEQ ID NO: 100026 - RNA, 19 nt, Homo sapiens
  misc_RNA (1)...(19): siRNA sense strand
cagcuagaaaugcucaaga

SEQ ID NO: 100027 - RNA, 19 nt, Homo sapiens
  misc_RNA (1)...(19): siRNA sense strand
agaagcacgccaugaaaca

SEQ ID NO: 100028 - RNA, 19 nt, Homo sapiens
  misc_RNA (1)...(19): siRNA sense strand
ggaacacgugcucaucgau

SEQ ID NO: 100029 - RNA, 19 nt, Homo sapiens
  misc_RNA (1)...(19): siRNA sense strand
ggagagagauuaagaagag

SEQ ID NO: 100030 - RNA, 19 nt, Homo sapiens
  misc_RNA (1)...(19): siRNA sense strand
ggacagguucuaugaauuu

SEQ ID NO: 100031 - RNA, 19 nt, Homo sapiens
  misc_RNA (1)...(19): siRNA sense strand
gaagaggaaauguuuguuu

SEQ ID NO: 100032 - RNA, 19 nt, Homo sapiens
  misc_RNA (1)...(19): siRNA sense strand
gaacuccucuguugugucu

SEQ ID NO: 100033 - RNA, 19 nt, Homo sapiens
  misc_RNA (1)...(19): siRNA sense strand
gaauuugaaugcugugugu

SEQ ID NO: 100034 - RNA, 19 nt, Homo sapiens
  misc_RNA (1)...(19): siRNA sense strand
ggacugaugggcugcuaua

SEQ ID NO: 100035 - RNA, 19 nt, Homo sapiens
  misc_RNA (1)...(19): siRNA sense strand
ccacaaggaccguuucauu

SEQ ID NO: 100036 - RNA, 19 nt, Homo sapiens
  misc_RNA (1)...(19): siRNA sense strand
ggacugggaugcuggacau

SEQ ID NO: 100037 - RNA, 19 nt, Homo sapiens
  misc_RNA (1)...(19): siRNA sense strand
caaggaccguuucauuuca

SEQ ID NO: 100038 - RNA, 19 nt, Homo sapiens
  misc_RNA (1)...(19): siRNA sense strand
gcaaccgacagcagaguua

SEQ ID NO: 100039 - RNA, 19 nt, Homo sapiens
  misc_RNA (1)...(19): siRNA sense strand
gaagcuuucucugccauau

SEQ ID NO: 100040 - RNA, 19 nt, Homo sapiens
  misc_RNA (1)...(19): siRNA sense strand
aagaggaaauguuuguuug

SEQ ID NO: 100041 - RNA, 19 nt, Homo sapiens
  misc_RNA (1)...(19): siRNA sense strand
cacaaggaccguuucauuu

SEQ ID NO: 100042 - RNA, 19 nt, Homo sapiens
  misc_RNA (1)...(19): siRNA sense strand
gggacagguucuaugaauu

SEQ ID NO: 100043 - RNA, 19 nt, Homo sapiens
  misc_RNA (1)...(19): siRNA sense strand
caccaggacugccauguuc

SEQ ID NO: 100044 - RNA, 19 nt, Homo sapiens
  misc_RNA (1)...(19): siRNA sense strand
cagguucuaugaauuugaa

SEQ ID NO: 100045 - RNA, 19 nt, Homo sapiens
  misc_RNA (1)...(19): siRNA sense strand
cugaugggcugcuauacuu

SEQ ID NO: 100046 - RNA, 19 nt, Homo sapiens
  misc_RNA (1)...(19): siRNA sense strand
gaggaaauguuuguuuggu

SEQ ID NO: 100047 - RNA, 19 nt, Homo sapiens
  misc_RNA (1)...(19): siRNA sense strand
gaggaugauucgcaguuuc

SEQ ID NO: 100048 - RNA, 19 nt, Homo sapiens
  misc_RNA (1)...(19): siRNA sense strand
agaagugucgccaugcuua

SEQ ID NO: 100049 - RNA, 19 nt, Homo sapiens
  misc_RNA (1)...(19): siRNA sense strand
auacuuggguaccaucaaa

SEQ ID NO: 100050 - RNA, 19 nt, Homo sapiens
  misc_RNA (1)...(19): siRNA sense strand
ucuggugccuccucacuuu

SEQ ID NO: 100051 - RNA, 19 nt, Homo sapiens
  misc_RNA (1)...(19): siRNA sense strand
aagcuccucucugcucuua

SEQ ID NO: 100052 - RNA, 19 nt, Homo sapiens
  misc_RNA (1)...(19): siRNA sense strand
gcuguaagaagaaauacuu

SEQ ID NO: 100053 - RNA, 19 nt, Homo sapiens
  misc_RNA (1)...(19): siRNA sense strand
gagggcacauccuggguau

SEQ ID NO: 100054 - RNA, 19 nt, Homo sapiens
  misc_RNA (1)...(19): siRNA sense strand
ggucagcugugagaagugu

SEQ ID NO: 100055 - RNA, 19 nt, Homo sapiens
  misc_RNA (1)...(19): siRNA sense strand
ugaggaugauucgcaguuu

SEQ ID NO: 100056 - RNA, 19 nt, Homo sapiens
  misc_RNA (1)...(19): siRNA sense strand
ccacagacaucccuaaaag

SEQ ID NO: 100057 - RNA, 19 nt, Homo sapiens
  misc_RNA (1)...(19): siRNA sense strand
gcagaguuacuguuacugu

SEQ ID NO: 100058 - RNA, 19 nt, Homo sapiens
  misc_RNA (1)...(19): siRNA sense strand
acaaggaccguuucauuuc

SEQ ID NO: 100059 - RNA, 19 nt, Homo sapiens
  misc_RNA (1)...(19): siRNA sense strand
aagaugugcuggccagaug

SEQ ID NO: 100060 - RNA, 19 nt, Homo sapiens
  misc_RNA (1)...(19): siRNA sense strand
gagauuaagaagaggaaau

SEQ ID NO: 100061 - RNA, 19 nt, Homo sapiens
  misc_RNA (1)...(19): siRNA sense strand
gacagguucuaugaauuug

SEQ ID NO: 100062 - RNA, 19 nt, Homo sapiens
  misc_RNA (1)...(19): siRNA sense strand
cagcagaguuacuguuacu

SEQ ID NO: 100063 - RNA, 19 nt, Homo sapiens
  misc_RNA (1)...(19): siRNA sense strand
gaagugucgccaugcuuau

SEQ ID NO: 100064 - RNA, 19 nt, Homo sapiens
  misc_RNA (1)...(19): siRNA sense strand
uggcccaucuuguccugua

SEQ ID NO: 100065 - RNA, 19 nt, Homo sapiens
  misc_RNA (1)...(19): siRNA sense strand
ucagggagagagauuaaga

SEQ ID NO: 100066 - RNA, 19 nt, Homo sapiens
  misc_RNA (1)...(19): siRNA sense strand
gcuccucucugcucuuaac

SEQ ID NO: 100067 - RNA, 19 nt, Homo sapiens
  misc_RNA (1)...(19): siRNA sense strand
aguguuugcuguaagaaga

SEQ ID NO: 100068 - RNA, 19 nt, Homo sapiens
  misc_RNA (1)...(19): siRNA sense strand
gggccaugcuggguaugaa

SEQ ID NO: 100069 - RNA, 19 nt, Homo sapiens
  misc_RNA (1)...(19): siRNA sense strand
ccucagcagugcgcaauca

SEQ ID NO: 100070 - RNA, 19 nt, Homo sapiens
  misc_RNA (1)...(19): siRNA sense strand
uguaucaccucaguguuug

SEQ ID NO: 100071 - RNA, 19 nt, Homo sapiens
  misc_RNA (1)...(19): siRNA sense strand
gcaagccccuccucuaugg

SEQ ID NO: 100072 - RNA, 19 nt, Homo sapiens
  misc_RNA (1)...(19): siRNA sense strand
gggagagagauuaagaaga

SEQ ID NO: 100073 - RNA, 19 nt, Homo sapiens
  misc_RNA (1)...(19): siRNA sense strand
uaagaagaggaaauguuug

SEQ ID NO: 100074 - RNA, 19 nt, Homo sapiens
  misc_RNA (1)...(19): siRNA sense strand
gagaagugucgccaugcuu

SEQ ID NO: 100075 - RNA, 19 nt, Homo sapiens
  misc_RNA (1)...(19): siRNA sense strand
gagagauuaagaagaggaa

SEQ ID NO: 100076 - RNA, 19 nt, Homo sapiens
  misc_RNA (1)...(19): siRNA sense strand
ggggacagguucuaugaau

SEQ ID NO: 100077 - RNA, 19 nt, Homo sapiens
  misc_RNA (1)...(19): siRNA sense strand
gagcaagccccuccucuau

SEQ ID NO: 100078 - RNA, 19 nt, Homo sapiens
  misc_RNA (1)...(19): siRNA sense strand
aagaagaggaaauguuugu

SEQ ID NO: 100079 - RNA, 19 nt, Homo sapiens
  misc_RNA (1)...(19): siRNA sense strand
ucaccaggacugccauguu

SEQ ID NO: 100080 - RNA, 19 nt, Homo sapiens
  misc_RNA (1)...(19): siRNA sense strand
gaacuucacauugguuucc

SEQ ID NO: 100081 - RNA, 19 nt, Homo sapiens
  misc_RNA (1)...(19): siRNA sense strand
cuguaucaccucaguguuu

SEQ ID NO: 100082 - RNA, 19 nt, Homo sapiens
  misc_RNA (1)...(19): siRNA sense strand
gcacccagugucugagcaa

SEQ ID NO: 100083 - RNA, 19 nt, Homo sapiens
  misc_RNA (1)...(19): siRNA sense strand
ucugagaauugggacaguu

SEQ ID NO: 100084 - RNA, 19 nt, Homo sapiens
  misc_RNA (1)...(19): siRNA sense strand
ugagaagugucgccaugcu

SEQ ID NO: 100085 - RNA, 19 nt, Homo sapiens
  misc_RNA (1)...(19): siRNA sense strand
cagggagagagauuaagaa

SEQ ID NO: 100086 - RNA, 19 nt, Homo sapiens
  misc_RNA (1)...(19): siRNA sense strand
cgcaguuucugguucuaug

SEQ ID NO: 100087 - RNA, 19 nt, Homo sapiens
  misc_RNA (1)...(19): siRNA sense strand
guucuauggaaagacauua

SEQ ID NO: 100088 - RNA, 19 nt, Homo sapiens
  misc_RNA (1)...(19): siRNA sense strand
gggcacauccuggguaugc

SEQ ID NO: 100089 - RNA, 19 nt, Homo sapiens
  misc_RNA (1)...(19): siRNA sense strand
ggagagagauuaagaagag

SEQ ID NO: 100090 - RNA, 19 nt, Homo sapiens
  misc_RNA (1)...(19): siRNA sense strand
ggacagguucuaugaauuu

SEQ ID NO: 100091 - RNA, 19 nt, Homo sapiens
  misc_RNA (1)...(19): siRNA sense strand
gaagaggaaauguuuguuu

SEQ ID NO: 100092 - RNA, 19 nt, Homo sapiens
  misc_RNA (1)...(19): siRNA sense strand
gaacuccucuguugugucu

SEQ ID NO: 100093 - RNA, 19 nt, Homo sapiens
  misc_RNA (1)...(19): siRNA sense strand
gaauuugaaugcugugugu

SEQ ID NO: 100094 - RNA, 19 nt, Homo sapiens
  misc_RNA (1)...(19): siRNA sense strand
ggacugaugggcugcuaua

SEQ ID NO: 100095 - RNA, 19 nt, Homo sapiens
  misc_RNA (1)...(19): siRNA sense strand
ccacaaggaccguuucauu

SEQ ID NO: 100096 - RNA, 19 nt, Homo sapiens
  misc_RNA (1)...(19): siRNA sense strand
ggacugggaugcuggacau

SEQ ID NO: 100097 - RNA, 19 nt, Homo sapiens
  misc_RNA (1)...(19): siRNA sense strand
caaggaccguuucauuuca

SEQ ID NO: 100098 - RNA, 19 nt, Homo sapiens
  misc_RNA (1)...(19): siRNA sense strand
gcaaccgacagcagaguua

SEQ ID NO: 100099 - RNA, 19 nt, Homo sapiens
  misc_RNA (1)...(19): siRNA sense strand
gaagcuuucucugccauau

SEQ ID NO: 100100 - RNA, 19 nt, Homo sapiens
  misc_RNA (1)...(19): siRNA sense strand
aagaggaaauguuuguuug

SEQ ID NO: 100101 - RNA, 19 nt, Homo sapiens
  misc_RNA (1)...(19): siRNA sense strand
cacaaggaccguuucauuu

SEQ ID NO: 100102 - RNA, 19 nt, Homo sapiens
  misc_RNA (1)...(19): siRNA sense strand
gggacagguucuaugaauu

SEQ ID NO: 100103 - RNA, 19 nt, Homo sapiens
  misc_RNA (1)...(19): siRNA sense strand
caccaggacugccauguuc

SEQ ID NO: 100104 - RNA, 19 nt, Homo sapiens
  misc_RNA (1)...(19): siRNA sense strand
cagguucuaugaauuugaa

SEQ ID NO: 100105 - RNA, 19 nt, Homo sapiens
  misc_RNA (1)...(19): siRNA sense strand
cugaugggcugcuauacuu

SEQ ID NO: 100106 - RNA, 19 nt, Homo sapiens
  misc_RNA (1)...(19): siRNA sense strand
gaggaaauguuuguuuggu

SEQ ID NO: 100107 - RNA, 19 nt, Homo sapiens
  misc_RNA (1)...(19): siRNA sense strand
gaggaugauucgcaguuuc

SEQ ID NO: 100108 - RNA, 19 nt, Homo sapiens
  misc_RNA (1)...(19): siRNA sense strand
agaagugucgccaugcuua

SEQ ID NO: 100109 - RNA, 19 nt, Homo sapiens
  misc_RNA (1)...(19): siRNA sense strand
auacuuggguaccaucaaa

SEQ ID NO: 100110 - RNA, 19 nt, Homo sapiens
  misc_RNA (1)...(19): siRNA sense strand
ucuggugccuccucacuuu

SEQ ID NO: 100111 - RNA, 19 nt, Homo sapiens
  misc_RNA (1)...(19): siRNA sense strand
aagcuccucucugcucuua

SEQ ID NO: 100112 - RNA, 19 nt, Homo sapiens
  misc_RNA (1)...(19): siRNA sense strand
gcuguaagaagaaauacuu

SEQ ID NO: 100113 - RNA, 19 nt, Homo sapiens
  misc_RNA (1)...(19): siRNA sense strand
gagggcacauccuggguau

SEQ ID NO: 100114 - RNA, 19 nt, Homo sapiens
  misc_RNA (1)...(19): siRNA sense strand
gguccuugcucggagagua

SEQ ID NO: 100115 - RNA, 19 nt, Homo sapiens
  misc_RNA (1)...(19): siRNA sense strand
ggucagcugugagaagugu

SEQ ID NO: 100116 - RNA, 19 nt, Homo sapiens
  misc_RNA (1)...(19): siRNA sense strand
ugaggaugauucgcaguuu

SEQ ID NO: 100117 - RNA, 19 nt, Homo sapiens
  misc_RNA (1)...(19): siRNA sense strand
ccacagacaucccuaaaag

SEQ ID NO: 100118 - RNA, 19 nt, Homo sapiens
  misc_RNA (1)...(19): siRNA sense strand
gcagaguuacuguuacugu

SEQ ID NO: 100119 - RNA, 19 nt, Homo sapiens
  misc_RNA (1)...(19): siRNA sense strand
acaaggaccguuucauuuc

SEQ ID NO: 100120 - RNA, 19 nt, Homo sapiens
  misc_RNA (1)...(19): siRNA sense strand
aagaugugcuggccagaug

SEQ ID NO: 100121 - RNA, 19 nt, Homo sapiens
  misc_RNA (1)...(19): siRNA sense strand
gagauuaagaagaggaaau

SEQ ID NO: 100122 - RNA, 19 nt, Homo sapiens
  misc_RNA (1)...(19): siRNA sense strand
gacagguucuaugaauuug

SEQ ID NO: 100123 - RNA, 19 nt, Homo sapiens
  misc_RNA (1)...(19): siRNA sense strand
cagcagaguuacuguuacu

SEQ ID NO: 100124 - RNA, 19 nt, Homo sapiens
  misc_RNA (1)...(19): siRNA sense strand
gaagugucgccaugcuuau

SEQ ID NO: 100125 - RNA, 19 nt, Homo sapiens
  misc_RNA (1)...(19): siRNA sense strand
uggcccaucuuguccugua

SEQ ID NO: 100126 - RNA, 19 nt, Homo sapiens
  misc_RNA (1)...(19): siRNA sense strand
ucagggagagagauuaaga

SEQ ID NO: 100127 - RNA, 19 nt, Homo sapiens
  misc_RNA (1)...(19): siRNA sense strand
gcuccucucugcucuuaac

SEQ ID NO: 100128 - RNA, 19 nt, Homo sapiens
  misc_RNA (1)...(19): siRNA sense strand
aguguuugcuguaagaaga

SEQ ID NO: 100129 - RNA, 19 nt, Homo sapiens
  misc_RNA (1)...(19): siRNA sense strand
ugccucaucuuccucaguu

SEQ ID NO: 100130 - RNA, 19 nt, Homo sapiens
  misc_RNA (1)...(19): siRNA sense strand
gggccaugcuggguaugaa

SEQ ID NO: 100131 - RNA, 19 nt, Homo sapiens
  misc_RNA (1)...(19): siRNA sense strand
ccucagcagugcgcaauca

SEQ ID NO: 100132 - RNA, 19 nt, Homo sapiens
  misc_RNA (1)...(19): siRNA sense strand
uguaucaccucaguguuug

SEQ ID NO: 100133 - RNA, 19 nt, Homo sapiens
  misc_RNA (1)...(19): siRNA sense strand
gcaagccccuccucuaugg

SEQ ID NO: 100134 - RNA, 19 nt, Homo sapiens
  misc_RNA (1)...(19): siRNA sense strand
gggagagagauuaagaaga

SEQ ID NO: 100135 - RNA, 19 nt, Homo sapiens
  misc_RNA (1)...(19): siRNA sense strand
uaagaagaggaaauguuug

SEQ ID NO: 100136 - RNA, 19 nt, Homo sapiens
  misc_RNA (1)...(19): siRNA sense strand
gagaagugucgccaugcuu

SEQ ID NO: 100137 - RNA, 19 nt, Homo sapiens
  misc_RNA (1)...(19): siRNA sense strand
gagagauuaagaagaggaa

SEQ ID NO: 100138 - RNA, 19 nt, Homo sapiens
  misc_RNA (1)...(19): siRNA sense strand
ggggacagguucuaugaau

SEQ ID NO: 100139 - RNA, 19 nt, Homo sapiens
  misc_RNA (1)...(19): siRNA sense strand
gagcaagccccuccucuau

SEQ ID NO: 100140 - RNA, 19 nt, Homo sapiens
  misc_RNA (1)...(19): siRNA sense strand
aagaagaggaaauguuugu

SEQ ID NO: 100141 - RNA, 19 nt, Homo sapiens
  misc_RNA (1)...(19): siRNA sense strand
ucaccaggacugccauguu

SEQ ID NO: 100142 - RNA, 19 nt, Homo sapiens
  misc_RNA (1)...(19): siRNA sense strand
gaacuucacauugguuucc

SEQ ID NO: 100143 - RNA, 19 nt, Homo sapiens
  misc_RNA (1)...(19): siRNA sense strand
cuguaucaccucaguguuu

SEQ ID NO: 100144 - RNA, 19 nt, Homo sapiens
  misc_RNA (1)...(19): siRNA sense strand
gcacccagugucugagcaa

SEQ ID NO: 100145 - RNA, 19 nt, Homo sapiens
  misc_RNA (1)...(19): siRNA sense strand
ucugagaauugggacaguu

SEQ ID NO: 100146 - RNA, 19 nt, Homo sapiens
  misc_RNA (1)...(19): siRNA sense strand
ugagaagugucgccaugcu

SEQ ID NO: 100147 - RNA, 19 nt, Homo sapiens
  misc_RNA (1)...(19): siRNA sense strand
cgcaguuucugguucuaug

SEQ ID NO: 100148 - RNA, 19 nt, Homo sapiens
  misc_RNA (1)...(19): siRNA sense strand
cagggagagagauuaagaa

SEQ ID NO: 100149 - RNA, 19 nt, Homo sapiens
  misc_RNA (1)...(19): siRNA sense strand
guucuauggaaagacauua

SEQ ID NO: 100150 - RNA, 19 nt, Homo sapiens
  misc_RNA (1)...(19): siRNA sense strand
gggcacauccuggguaugc

SEQ ID NO: 100151 - RNA, 19 nt, Homo sapiens
  misc_RNA (1)...(19): siRNA sense strand
ggacaaagaagaagcauua

SEQ ID NO: 100152 - RNA, 19 nt, Homo sapiens
  misc_RNA (1)...(19): siRNA sense strand
caaagaagguuggcacuua

SEQ ID NO: 100153 - RNA, 19 nt, Homo sapiens
  misc_RNA (1)...(19): siRNA sense strand
ucaaagaucuuguuacuga

SEQ ID NO: 100154 - RNA, 19 nt, Homo sapiens
  misc_RNA (1)...(19): siRNA sense strand
ugagaaagcugaagggaua

SEQ ID NO: 100155 - RNA, 19 nt, Homo sapiens
  misc_RNA (1)...(19): siRNA sense strand
gaagagagaucgacagcaa

SEQ ID NO: 100156 - RNA, 19 nt, Homo sapiens
  misc_RNA (1)...(19): siRNA sense strand
gcaaagagacgguuaaaug

SEQ ID NO: 100157 - RNA, 19 nt, Homo sapiens
  misc_RNA (1)...(19): siRNA sense strand
ccagauagcacacaauuua

SEQ ID NO: 100158 - RNA, 19 nt, Homo sapiens
  misc_RNA (1)...(19): siRNA sense strand
caaggaagcuuaccuaucu

SEQ ID NO: 100159 - RNA, 19 nt, Homo sapiens
  misc_RNA (1)...(19): siRNA sense strand
gaugauuccuucaggguua

SEQ ID NO: 100160 - RNA, 19 nt, Homo sapiens
  misc_RNA (1)...(19): siRNA sense strand
aaagaaaggugaauggaaa

SEQ ID NO: 100161 - RNA, 19 nt, Homo sapiens
  misc_RNA (1)...(19): siRNA sense strand
gaaauacaaucccucugaa

SEQ ID NO: 100162 - RNA, 19 nt, Homo sapiens
  misc_RNA (1)...(19): siRNA sense strand
cauaaagacucaucacuug

SEQ ID NO: 100163 - RNA, 19 nt, Homo sapiens
  misc_RNA (1)...(19): siRNA sense strand
uuaccaggcuuuccuaaua

SEQ ID NO: 100164 - RNA, 19 nt, Homo sapiens
  misc_RNA (1)...(19): siRNA sense strand
gcacaaacccaggcuauuu

SEQ ID NO: 100165 - RNA, 19 nt, Homo sapiens
  misc_RNA (1)...(19): siRNA sense strand
gaaauuagacuacaacucu

SEQ ID NO: 100166 - RNA, 19 nt, Homo sapiens
  misc_RNA (1)...(19): siRNA sense strand
uauauuggcuucucaaaga

SEQ ID NO: 100167 - RNA, 19 nt, Homo sapiens
  misc_RNA (1)...(19): siRNA sense strand
gaaauacaacccagauaaa

SEQ ID NO: 100168 - RNA, 19 nt, Homo sapiens
  misc_RNA (1)...(19): siRNA sense strand
gaacaacucagcuugcaaa

SEQ ID NO: 100169 - RNA, 19 nt, Homo sapiens
  misc_RNA (1)...(19): siRNA sense strand
aggaggagcugugaaauua

SEQ ID NO: 100170 - RNA, 19 nt, Homo sapiens
  misc_RNA (1)...(19): siRNA sense strand
ggcaagauauguuagcuuu

SEQ ID NO: 100171 - RNA, 19 nt, Homo sapiens
  misc_RNA (1)...(19): siRNA sense strand
uaaaugggaugaacuaauc

SEQ ID NO: 100172 - RNA, 19 nt, Homo sapiens
  misc_RNA (1)...(19): siRNA sense strand
ggaaauacaaucccucuga

SEQ ID NO: 100173 - RNA, 19 nt, Homo sapiens
  misc_RNA (1)...(19): siRNA sense strand
agaacuggcucuucaaauu

SEQ ID NO: 100174 - RNA, 19 nt, Homo sapiens
  misc_RNA (1)...(19): siRNA sense strand
uagaaacacuagagaauga

SEQ ID NO: 100175 - RNA, 19 nt, Homo sapiens
  misc_RNA (1)...(19): siRNA sense strand
gaauagugcuacagguuga

SEQ ID NO: 100176 - RNA, 19 nt, Homo sapiens
  misc_RNA (1)...(19): siRNA sense strand
caaaauagcuaguacauca

SEQ ID NO: 100177 - RNA, 19 nt, Homo sapiens
  misc_RNA (1)...(19): siRNA sense strand
uauguuagcuuuacagaug

SEQ ID NO: 100178 - RNA, 19 nt, Homo sapiens
  misc_RNA (1)...(19): siRNA sense strand
ggagaaacguuauuauugc

SEQ ID NO: 100179 - RNA, 19 nt, Homo sapiens
  misc_RNA (1)...(19): siRNA sense strand
gcucagauauuuagcaaca

SEQ ID NO: 100180 - RNA, 19 nt, Homo sapiens
  misc_RNA (1)...(19): siRNA sense strand
ggaguaacccugccuuuga

SEQ ID NO: 100181 - RNA, 19 nt, Homo sapiens
  misc_RNA (1)...(19): siRNA sense strand
caaguugacagaagcauua

SEQ ID NO: 100182 - RNA, 19 nt, Homo sapiens
  misc_RNA (1)...(19): siRNA sense strand
gagacacccuguugaagaa

SEQ ID NO: 100183 - RNA, 19 nt, Homo sapiens
  misc_RNA (1)...(19): siRNA sense strand
gaaagaaaggugaauggaa

SEQ ID NO: 100184 - RNA, 19 nt, Homo sapiens
  misc_RNA (1)...(19): siRNA sense strand
gaggauaucaguaaauuug

SEQ ID NO: 100185 - RNA, 19 nt, Homo sapiens
  misc_RNA (1)...(19): siRNA sense strand
ggaaagcaaggacugauuu

SEQ ID NO: 100186 - RNA, 19 nt, Homo sapiens
  misc_RNA (1)...(19): siRNA sense strand
cagaguggcuaaggaaaua

SEQ ID NO: 100187 - RNA, 19 nt, Homo sapiens
  misc_RNA (1)...(19): siRNA sense strand
acaaacaccuguaucaaau

SEQ ID NO: 100188 - RNA, 19 nt, Homo sapiens
  misc_RNA (1)...(19): siRNA sense strand
guacaagcuuugaaauaug

SEQ ID NO: 100189 - RNA, 19 nt, Homo sapiens
  misc_RNA (1)...(19): siRNA sense strand
gaacuggcucuucaaauug

SEQ ID NO: 100190 - RNA, 19 nt, Homo sapiens
  misc_RNA (1)...(19): siRNA sense strand
gggacaaucuccauauuuc

SEQ ID NO: 100191 - RNA, 19 nt, Homo sapiens
  misc_RNA (1)...(19): siRNA sense strand
gggagaaacguuauuauug

SEQ ID NO: 100192 - RNA, 19 nt, Homo sapiens
  misc_RNA (1)...(19): siRNA sense strand
caacagcggauuuaaagaa

SEQ ID NO: 100193 - RNA, 19 nt, Homo sapiens
  misc_RNA (1)...(19): siRNA sense strand
agaagccagucuuuaaaua

SEQ ID NO: 100194 - RNA, 19 nt, Homo sapiens
  misc_RNA (1)...(19): siRNA sense strand
gcaaagaaacccuaagaca

SEQ ID NO: 100195 - RNA, 19 nt, Homo sapiens
  misc_RNA (1)...(19): siRNA sense strand
uuacagaguuugaugaaug

SEQ ID NO: 100196 - RNA, 19 nt, Homo sapiens
  misc_RNA (1)...(19): siRNA sense strand
caaaagauguggacaaaga

SEQ ID NO: 100197 - RNA, 19 nt, Homo sapiens
  misc_RNA (1)...(19): siRNA sense strand
gcucauggaauuucaagua

SEQ ID NO: 100198 - RNA, 19 nt, Homo sapiens
  misc_RNA (1)...(19): siRNA sense strand
uaaacaggcugcauuccaa

SEQ ID NO: 100199 - RNA, 19 nt, Homo sapiens
  misc_RNA (1)...(19): siRNA sense strand
gagcugacccaaauccaua

SEQ ID NO: 100200 - RNA, 19 nt, Homo sapiens
  misc_RNA (1)...(19): siRNA sense strand
ggaaacuucuugauauucu

SEQ ID NO: 100201 - RNA, 19 nt, Homo sapiens
  misc_RNA (1)...(19): siRNA sense strand
caacauaacuuagaaacac

SEQ ID NO: 100202 - RNA, 19 nt, Homo sapiens
  misc_RNA (1)...(19): siRNA sense strand
ugaugugacuucuuuguuu

SEQ ID NO: 100203 - RNA, 19 nt, Homo sapiens
  misc_RNA (1)...(19): siRNA sense strand
aggaagugcugcagaauaa

SEQ ID NO: 100204 - RNA, 19 nt, Homo sapiens
  misc_RNA (1)...(19): siRNA sense strand
acaccuguauuaccaguua

SEQ ID NO: 100205 - RNA, 19 nt, Homo sapiens
  misc_RNA (1)...(19): siRNA sense strand
gaaauuauccaucucuuac

SEQ ID NO: 100206 - RNA, 19 nt, Homo sapiens
  misc_RNA (1)...(19): siRNA sense strand
gcagguuccuucaguccua

SEQ ID NO: 100207 - RNA, 19 nt, Homo sapiens
  misc_RNA (1)...(19): siRNA sense strand
gaucugaggaugguaauuu

SEQ ID NO: 100208 - RNA, 19 nt, Homo sapiens
  misc_RNA (1)...(19): siRNA sense strand
caaaauggcuucaauccaa

SEQ ID NO: 100209 - RNA, 19 nt, Homo sapiens
  misc_RNA (1)...(19): siRNA sense strand
gaguaacccugccuuugaa

SEQ ID NO: 100210 - RNA, 19 nt, Homo sapiens
  misc_RNA (1)...(19): siRNA sense strand
cagagaacuuuaucuauuc

SEQ ID NO: 100211 - RNA, 19 nt, Homo sapiens
  misc_RNA (1)...(19): siRNA sense strand
gaaggucuccauugacauu

SEQ ID NO: 100212 - RNA, 19 nt, Homo sapiens
  misc_RNA (1)...(19): siRNA sense strand
aaacccaggcuauuuguua

SEQ ID NO: 100213 - RNA, 19 nt, Homo sapiens
  misc_RNA (1)...(19): siRNA sense strand
ggauugaggccauuaguga

SEQ ID NO: 100214 - RNA, 19 nt, Homo sapiens
  misc_RNA (1)...(19): siRNA sense strand
cagcuccaguuuacuauuu

SEQ ID NO: 100215 - RNA, 19 nt, Homo sapiens
  misc_RNA (1)...(19): siRNA sense strand
aaacacccguggauuuaaa

SEQ ID NO: 100216 - RNA, 19 nt, Homo sapiens
  misc_RNA (1)...(19): siRNA sense strand
ugaaacacccguggauuua

SEQ ID NO: 100217 - RNA, 19 nt, Homo sapiens
  misc_RNA (1)...(19): siRNA sense strand
ggauuucagcuaccaguua

SEQ ID NO: 100218 - RNA, 19 nt, Homo sapiens
  misc_RNA (1)...(19): siRNA sense strand
gaagccagucuuuaaauau

SEQ ID NO: 100219 - RNA, 19 nt, Homo sapiens
  misc_RNA (1)...(19): siRNA sense strand
uucaggaacuucacaauaa

SEQ ID NO: 100220 - RNA, 19 nt, Homo sapiens
  misc_RNA (1)...(19): siRNA sense strand
uuacuaggcuuauugaauc

SEQ ID NO: 100221 - RNA, 19 nt, Homo sapiens
  misc_RNA (1)...(19): siRNA sense strand
gaaauacguuagagaugca

SEQ ID NO: 100222 - RNA, 19 nt, Homo sapiens
  misc_RNA (1)...(19): siRNA sense strand
caggauccuuuaaagauaa

SEQ ID NO: 100223 - RNA, 19 nt, Homo sapiens
  misc_RNA (1)...(19): siRNA sense strand
acaggauccuuuaaagaua

SEQ ID NO: 100224 - RNA, 19 nt, Homo sapiens
  misc_RNA (1)...(19): siRNA sense strand
aaagggaaacuucuugaua

SEQ ID NO: 100225 - RNA, 19 nt, Homo sapiens
  misc_RNA (1)...(19): siRNA sense strand
gaugugacuucuuuguuug

SEQ ID NO: 100226 - RNA, 19 nt, Homo sapiens
  misc_RNA (1)...(19): siRNA sense strand
gaacagcagaagaugauga

SEQ ID NO: 100227 - RNA, 19 nt, Homo sapiens
  misc_RNA (1)...(19): siRNA sense strand
ggacacagaaauuagacua

SEQ ID NO: 100228 - RNA, 19 nt, Homo sapiens
  misc_RNA (1)...(19): siRNA sense strand
aagcacagguuuauaacaa

SEQ ID NO: 100229 - RNA, 19 nt, Homo sapiens
  misc_RNA (1)...(19): siRNA sense strand
aagagacgguuaaauggua

SEQ ID NO: 100230 - RNA, 19 nt, Homo sapiens
  misc_RNA (1)...(19): siRNA sense strand
cuacaacucuugaccuuca

SEQ ID NO: 100231 - RNA, 19 nt, Homo sapiens
  misc_RNA (1)...(19): siRNA sense strand
gaggaagugcugcagaaua

SEQ ID NO: 100232 - RNA, 19 nt, Homo sapiens
  misc_RNA (1)...(19): siRNA sense strand
caaaguagcaagaguguca

SEQ ID NO: 100233 - RNA, 19 nt, Homo sapiens
  misc_RNA (1)...(19): siRNA sense strand
caagauauguuagcuuuac

SEQ ID NO: 100234 - RNA, 19 nt, Homo sapiens
  misc_RNA (1)...(19): siRNA sense strand
aagggaaacuucuugauau

SEQ ID NO: 100235 - RNA, 19 nt, Homo sapiens
  misc_RNA (1)...(19): siRNA sense strand
gaaacacuagagaaugaua

SEQ ID NO: 100236 - RNA, 19 nt, Homo sapiens
  misc_RNA (1)...(19): siRNA sense strand
ggacugauuuggagauaac

SEQ ID NO: 100237 - RNA, 19 nt, Homo sapiens
  misc_RNA (1)...(19): siRNA sense strand
gccuacaacuugauaagaa

SEQ ID NO: 100238 - RNA, 19 nt, Homo sapiens
  misc_RNA (1)...(19): siRNA sense strand
caaguaagcauaaaccaau

SEQ ID NO: 100239 - RNA, 19 nt, Homo sapiens
  misc_RNA (1)...(19): siRNA sense strand
gaauaaucauugccuugga

SEQ ID NO: 100240 - RNA, 19 nt, Homo sapiens
  misc_RNA (1)...(19): siRNA sense strand
gguauuagaccaugaggaa

SEQ ID NO: 100241 - RNA, 19 nt, Homo sapiens
  misc_RNA (1)...(19): siRNA sense strand
caaaugggaccaguaguuu

SEQ ID NO: 100242 - RNA, 19 nt, Homo sapiens
  misc_RNA (1)...(19): siRNA sense strand
gaggagcugugaaauuauc

SEQ ID NO: 100243 - RNA, 19 nt, Homo sapiens
  misc_RNA (1)...(19): siRNA sense strand
agaaauacaacccagauaa

SEQ ID NO: 100244 - RNA, 19 nt, Homo sapiens
  misc_RNA (1)...(19): siRNA sense strand
ucagagaggcuuugaguug

SEQ ID NO: 100245 - RNA, 19 nt, Homo sapiens
  misc_RNA (1)...(19): siRNA sense strand
gaaacacccguggauuuaa

SEQ ID NO: 100246 - RNA, 19 nt, Homo sapiens
  misc_RNA (1)...(19): siRNA sense strand
gacaggauccuuuaaagau

SEQ ID NO: 100247 - RNA, 19 nt, Homo sapiens
  misc_RNA (1)...(19): siRNA sense strand
cauuggaacuucuugauuc

SEQ ID NO: 100248 - RNA, 19 nt, Homo sapiens
  misc_RNA (1)...(19): siRNA sense strand
agcaguagaucaaguaauu

SEQ ID NO: 100249 - RNA, 19 nt, Homo sapiens
  misc_RNA (1)...(19): siRNA sense strand
uaaacaaacaccuguauca

SEQ ID NO: 100250 - RNA, 19 nt, Homo sapiens
  misc_RNA (1)...(19): siRNA sense strand
gauaugucauggaaagaau

SEQ ID NO: 100251 - RNA, 19 nt, Homo sapiens
  misc_RNA (1)...(19): siRNA sense strand
gggaggagcuaaacgguua

SEQ ID NO: 100252 - RNA, 19 nt, Homo sapiens
  misc_RNA (1)...(19): siRNA sense strand
gaacauccgugucaucuuc

SEQ ID NO: 100253 - RNA, 19 nt, Homo sapiens
  misc_RNA (1)...(19): siRNA sense strand
acaaugagauguugguaua

SEQ ID NO: 100254 - RNA, 19 nt, Homo sapiens
  misc_RNA (1)...(19): siRNA sense strand
ggaagucccuggagucugu

SEQ ID NO: 100255 - RNA, 19 nt, Homo sapiens
  misc_RNA (1)...(19): siRNA sense strand
caucaacacuuucucuuug

SEQ ID NO: 100256 - RNA, 19 nt, Homo sapiens
  misc_RNA (1)...(19): siRNA sense strand
gcaaagacaccucuggaaa

SEQ ID NO: 100257 - RNA, 19 nt, Homo sapiens
  misc_RNA (1)...(19): siRNA sense strand
ggaccgaccucaagcuguu

SEQ ID NO: 100258 - RNA, 19 nt, Homo sapiens
  misc_RNA (1)...(19): siRNA sense strand
gauggagacuucccacuga

SEQ ID NO: 100259 - RNA, 19 nt, Homo sapiens
  misc_RNA (1)...(19): siRNA sense strand
ggaauuacacaauaaguug

SEQ ID NO: 100260 - RNA, 19 nt, Homo sapiens
  misc_RNA (1)...(19): siRNA sense strand
gcucugacauccaagacua

SEQ ID NO: 100261 - RNA, 19 nt, Homo sapiens
  misc_RNA (1)...(19): siRNA sense strand
ggacgugggugacuuugug

SEQ ID NO: 100262 - RNA, 19 nt, Homo sapiens
  misc_RNA (1)...(19): siRNA sense strand
gccggaagcuucuggguuu

SEQ ID NO: 100263 - RNA, 19 nt, Homo sapiens
  misc_RNA (1)...(19): siRNA sense strand
uuaaagacaucaugcagaa

SEQ ID NO: 100264 - RNA, 19 nt, Homo sapiens
  misc_RNA (1)...(19): siRNA sense strand
gaaggugacuguguugugu

SEQ ID NO: 100265 - RNA, 19 nt, Homo sapiens
  misc_RNA (1)...(19): siRNA sense strand
gaagaccagcgcaagcuua

SEQ ID NO: 100266 - RNA, 19 nt, Homo sapiens
  misc_RNA (1)...(19): siRNA sense strand
gcagagggaugguggagau

SEQ ID NO: 100267 - RNA, 19 nt, Homo sapiens
  misc_RNA (1)...(19): siRNA sense strand
gcucugauccuacccuuaa

SEQ ID NO: 100268 - RNA, 19 nt, Homo sapiens
  misc_RNA (1)...(19): siRNA sense strand
caagagcucuggccgaauc

SEQ ID NO: 100269 - RNA, 19 nt, Homo sapiens
  misc_RNA (1)...(19): siRNA sense strand
gcaauccuaccuacaauga

SEQ ID NO: 100270 - RNA, 19 nt, Homo sapiens
  misc_RNA (1)...(19): siRNA sense strand
gcugagacccugcguaaga

SEQ ID NO: 100271 - RNA, 19 nt, Homo sapiens
  misc_RNA (1)...(19): siRNA sense strand
caaaggcuauauauaugug

SEQ ID NO: 100272 - RNA, 19 nt, Homo sapiens
  misc_RNA (1)...(19): siRNA sense strand
gguuacaucuggcacuuga

SEQ ID NO: 100273 - RNA, 19 nt, Homo sapiens
  misc_RNA (1)...(19): siRNA sense strand
gaacagagccaagcagaac

SEQ ID NO: 100274 - RNA, 19 nt, Homo sapiens
  misc_RNA (1)...(19): siRNA sense strand
ccaacaaaggcuauauaua

SEQ ID NO: 100275 - RNA, 19 nt, Homo sapiens
  misc_RNA (1)...(19): siRNA sense strand
ugaggagguugcugcauuu

SEQ ID NO: 100276 - RNA, 19 nt, Homo sapiens
  misc_RNA (1)...(19): siRNA sense strand
gcagaaagaguccuuguac

SEQ ID NO: 100277 - RNA, 19 nt, Homo sapiens
  misc_RNA (1)...(19): siRNA sense strand
guucgacacuuaccacaau

SEQ ID NO: 100278 - RNA, 19 nt, Homo sapiens
  misc_RNA (1)...(19): siRNA sense strand
cagacuggcugcagaaaca

SEQ ID NO: 100279 - RNA, 19 nt, Homo sapiens
  misc_RNA (1)...(19): siRNA sense strand
ccaauacugccgcaaguuu

SEQ ID NO: 100280 - RNA, 19 nt, Homo sapiens
  misc_RNA (1)...(19): siRNA sense strand
gcuccuaaguccucagaug

SEQ ID NO: 100281 - RNA, 19 nt, Homo sapiens
  misc_RNA (1)...(19): siRNA sense strand
gcaguucuuugcccucaau

SEQ ID NO: 100282 - RNA, 19 nt, Homo sapiens
  misc_RNA (1)...(19): siRNA sense strand
ucacugaugcugacaagaa

SEQ ID NO: 100283 - RNA, 19 nt, Homo sapiens
  misc_RNA (1)...(19): siRNA sense strand
caauggccaugaguuguuu

SEQ ID NO: 100284 - RNA, 19 nt, Homo sapiens
  misc_RNA (1)...(19): siRNA sense strand
gccacuaccuacuucacua

SEQ ID NO: 100285 - RNA, 19 nt, Homo sapiens
  misc_RNA (1)...(19): siRNA sense strand
augcugagcugcuagacua

SEQ ID NO: 100286 - RNA, 19 nt, Homo sapiens
  misc_RNA (1)...(19): siRNA sense strand
gcuaccagcuaugaagauu

SEQ ID NO: 100287 - RNA, 19 nt, Homo sapiens
  misc_RNA (1)...(19): siRNA sense strand
ugaacuaccucguccaucu

SEQ ID NO: 100288 - RNA, 19 nt, Homo sapiens
  misc_RNA (1)...(19): siRNA sense strand
caacuguuccuccacugua

SEQ ID NO: 100289 - RNA, 19 nt, Homo sapiens
  misc_RNA (1)...(19): siRNA sense strand
agagagagaugaggagguu

SEQ ID NO: 100290 - RNA, 19 nt, Homo sapiens
  misc_RNA (1)...(19): siRNA sense strand
uggaggaggugaagcaguu

SEQ ID NO: 100291 - RNA, 19 nt, Homo sapiens
  misc_RNA (1)...(19): siRNA sense strand
ccugaccgcugccaucuug

SEQ ID NO: 100292 - RNA, 19 nt, Homo sapiens
  misc_RNA (1)...(19): siRNA sense strand
gagcuaaacgguuacaucu

SEQ ID NO: 100293 - RNA, 19 nt, Homo sapiens
  misc_RNA (1)...(19): siRNA sense strand
gacaacaucaugcugaaga

SEQ ID NO: 100294 - RNA, 19 nt, Homo sapiens
  misc_RNA (1)...(19): siRNA sense strand
gaaggaucccagugucuug

SEQ ID NO: 100295 - RNA, 19 nt, Homo sapiens
  misc_RNA (1)...(19): siRNA sense strand
caauaaacucuucaucaug

SEQ ID NO: 100296 - RNA, 19 nt, Homo sapiens
  misc_RNA (1)...(19): siRNA sense strand
ucacuacuucuucugguua

SEQ ID NO: 100297 - RNA, 19 nt, Homo sapiens
  misc_RNA (1)...(19): siRNA sense strand
ucagaucccuggcccaaag

SEQ ID NO: 100298 - RNA, 19 nt, Homo sapiens
  misc_RNA (1)...(19): siRNA sense strand
uaaaggugaugcgagagaa

SEQ ID NO: 100299 - RNA, 19 nt, Homo sapiens
  misc_RNA (1)...(19): siRNA sense strand
cuacuucacuagguugauu

SEQ ID NO: 100300 - RNA, 19 nt, Homo sapiens
  misc_RNA (1)...(19): siRNA sense strand
ucaaugcccuggccaaacu

SEQ ID NO: 100301 - RNA, 19 nt, Homo sapiens
  misc_RNA (1)...(19): siRNA sense strand
caagaggcacucacuuuca

SEQ ID NO: 100302 - RNA, 19 nt, Homo sapiens
  misc_RNA (1)...(19): siRNA sense strand
gggcaucagccgcaaagaa

SEQ ID NO: 100303 - RNA, 19 nt, Homo sapiens
  misc_RNA (1)...(19): siRNA sense strand
guggagaacuuuaucuacu

SEQ ID NO: 100304 - RNA, 19 nt, Homo sapiens
  misc_RNA (1)...(19): siRNA sense strand
gagcuguacugcaacacau

SEQ ID NO: 100305 - RNA, 19 nt, Homo sapiens
  misc_RNA (1)...(19): siRNA sense strand
gccgcaaguuugacauuga

SEQ ID NO: 100306 - RNA, 19 nt, Homo sapiens
  misc_RNA (1)...(19): siRNA sense strand
gcaccagcccagcuccuaa

SEQ ID NO: 100307 - RNA, 19 nt, Homo sapiens
  misc_RNA (1)...(19): siRNA sense strand
ccgaagcccugcagaugga

SEQ ID NO: 100308 - RNA, 19 nt, Homo sapiens
  misc_RNA (1)...(19): siRNA sense strand
gaaguucacgggcucagau

SEQ ID NO: 100309 - RNA, 19 nt, Homo sapiens
  misc_RNA (1)...(19): siRNA sense strand
agaaggcuguggagaacuu

SEQ ID NO: 100310 - RNA, 19 nt, Homo sapiens
  misc_RNA (1)...(19): siRNA sense strand
ggugagaacauccguguca

SEQ ID NO: 100311 - RNA, 19 nt, Homo sapiens
  misc_RNA (1)...(19): siRNA sense strand
gcaaggggcugagagaaga

SEQ ID NO: 100312 - RNA, 19 nt, Homo sapiens
  misc_RNA (1)...(19): siRNA sense strand
uaccagcuaugaagauuuc

SEQ ID NO: 100313 - RNA, 19 nt, Homo sapiens
  misc_RNA (1)...(19): siRNA sense strand
gauccuacccuuaacuaca

SEQ ID NO: 100314 - RNA, 19 nt, Homo sapiens
  misc_RNA (1)...(19): siRNA sense strand
aauccuaccuacaaugaga

SEQ ID NO: 100315 - RNA, 19 nt, Homo sapiens
  misc_RNA (1)...(19): siRNA sense strand
cggaaaaccugcaauccua

SEQ ID NO: 100316 - RNA, 19 nt, Homo sapiens
  misc_RNA (1)...(19): siRNA sense strand
gaaaaccacuaagaggaaa

SEQ ID NO: 100317 - RNA, 19 nt, Homo sapiens
  misc_RNA (1)...(19): siRNA sense strand
uccaggaauuacacaauaa

SEQ ID NO: 100318 - RNA, 19 nt, Homo sapiens
  misc_RNA (1)...(19): siRNA sense strand
guaaaggugaugcgagaga

SEQ ID NO: 100319 - RNA, 19 nt, Homo sapiens
  misc_RNA (1)...(19): siRNA sense strand
ucucuuuggucgaacaauu

SEQ ID NO: 100320 - RNA, 19 nt, Homo sapiens
  misc_RNA (1)...(19): siRNA sense strand
ugguggagaugaucccuaa

SEQ ID NO: 100321 - RNA, 19 nt, Homo sapiens
  misc_RNA (1)...(19): siRNA sense strand
cucaaacucuccuuccaaa

SEQ ID NO: 100322 - RNA, 19 nt, Homo sapiens
  misc_RNA (1)...(19): siRNA sense strand
gcuagagcaucggauccua

SEQ ID NO: 100323 - RNA, 19 nt, Homo sapiens
  misc_RNA (1)...(19): siRNA sense strand
gugggugacuuugugcuaa

SEQ ID NO: 100324 - RNA, 19 nt, Homo sapiens
  misc_RNA (1)...(19): siRNA sense strand
gggagaagcgauauuacug

SEQ ID NO: 100325 - RNA, 19 nt, Homo sapiens
  misc_RNA (1)...(19): siRNA sense strand
gaucaccagugcucucaac

SEQ ID NO: 100326 - RNA, 19 nt, Homo sapiens
  misc_RNA (1)...(19): siRNA sense strand
caaguuugacauugacauu

SEQ ID NO: 100327 - RNA, 19 nt, Homo sapiens
  misc_RNA (1)...(19): siRNA sense strand
ccaauggccaugaguuguu

SEQ ID NO: 100328 - RNA, 19 nt, Homo sapiens
  misc_RNA (1)...(19): siRNA sense strand
ugggaucccugaacucuca

SEQ ID NO: 100329 - RNA, 19 nt, Homo sapiens
  misc_RNA (1)...(19): siRNA sense strand
gggcaucugugaccgacau

SEQ ID NO: 100330 - RNA, 19 nt, Homo sapiens
  misc_RNA (1)...(19): siRNA sense strand
gggcugagagaagaguuua

SEQ ID NO: 100331 - RNA, 19 nt, Homo sapiens
  misc_RNA (1)...(19): siRNA sense strand
gggcuugccugccugacau

SEQ ID NO: 100332 - RNA, 19 nt, Homo sapiens
  misc_RNA (1)...(19): siRNA sense strand
agaaagaguccuuguacug

SEQ ID NO: 100333 - RNA, 19 nt, Homo sapiens
  misc_RNA (1)...(19): siRNA sense strand
caugaugaccugaggaaug

SEQ ID NO: 100334 - RNA, 19 nt, Homo sapiens
  misc_RNA (1)...(19): siRNA sense strand
gagcaucggauccuagaag

SEQ ID NO: 100335 - RNA, 19 nt, Homo sapiens
  misc_RNA (1)...(19): siRNA sense strand
aaugagauguugguauaug

SEQ ID NO: 100336 - RNA, 19 nt, Homo sapiens
  misc_RNA (1)...(19): siRNA sense strand
ggagcuaaacgguuacauc

SEQ ID NO: 100337 - RNA, 19 nt, Homo sapiens
  misc_RNA (1)...(19): siRNA sense strand
caaugccacuaccuacuuc

SEQ ID NO: 100338 - RNA, 19 nt, Homo sapiens
  misc_RNA (1)...(19): siRNA sense strand
gucaugaguacauccaaua

SEQ ID NO: 100339 - RNA, 19 nt, Homo sapiens
  misc_RNA (1)...(19): siRNA sense strand
ucaaugaugcaauuacuag

SEQ ID NO: 100340 - RNA, 19 nt, Homo sapiens
  misc_RNA (1)...(19): siRNA sense strand
gcccugggaucucgaaguc

SEQ ID NO: 100341 - RNA, 19 nt, Homo sapiens
  misc_RNA (1)...(19): siRNA sense strand
ggcuauauauaugugguaa

SEQ ID NO: 100342 - RNA, 19 nt, Homo sapiens
  misc_RNA (1)...(19): siRNA sense strand
ccaaugccacuaccuacuu

SEQ ID NO: 100343 - RNA, 19 nt, Homo sapiens
  misc_RNA (1)...(19): siRNA sense strand
gagggaugguggagaugau

SEQ ID NO: 100344 - RNA, 19 nt, Homo sapiens
  misc_RNA (1)...(19): siRNA sense strand
ugaaacgagcugugucuga

SEQ ID NO: 100345 - RNA, 19 nt, Homo sapiens
  misc_RNA (1)...(19): siRNA sense strand
ggaagcuucuggguuugug

SEQ ID NO: 100346 - RNA, 19 nt, Homo sapiens
  misc_RNA (1)...(19): siRNA sense strand
caaagacaccucuggaaaa

SEQ ID NO: 100347 - RNA, 19 nt, Homo sapiens
  misc_RNA (1)...(19): siRNA sense strand
gagaacauccgugucaucu

SEQ ID NO: 100348 - RNA, 19 nt, Homo sapiens
  misc_RNA (1)...(19): siRNA sense strand
cggcugcucuucccuucuu

SEQ ID NO: 100349 - RNA, 19 nt, Homo sapiens
  misc_RNA (1)...(19): siRNA sense strand
caucagccgcaaagaacua

SEQ ID NO: 100350 - RNA, 19 nt, Homo sapiens
  misc_RNA (1)...(19): siRNA sense strand
ugagaaggcuguggagaac

SEQ ID NO: 100351 - RNA, 19 nt, Homo sapiens
  misc_RNA (1)...(19): siRNA sense strand
gcagaaauuuggccuguuu

SEQ ID NO: 100352 - RNA, 19 nt, Homo sapiens
  misc_RNA (1)...(19): siRNA sense strand
gacauaagcaucaugauua

SEQ ID NO: 100353 - RNA, 19 nt, Homo sapiens
  misc_RNA (1)...(19): siRNA sense strand
gcucccagcugcacaaaua

SEQ ID NO: 100354 - RNA, 19 nt, Homo sapiens
  misc_RNA (1)...(19): siRNA sense strand
gagcaucucucccuaccua

SEQ ID NO: 100355 - RNA, 19 nt, Homo sapiens
  misc_RNA (1)...(19): siRNA sense strand
ggaagcaagucaacccaaa

SEQ ID NO: 100356 - RNA, 19 nt, Homo sapiens
  misc_RNA (1)...(19): siRNA sense strand
gguuugagaucgccaagua

SEQ ID NO: 100357 - RNA, 19 nt, Homo sapiens
  misc_RNA (1)...(19): siRNA sense strand
gugaagcgauguggaguua

SEQ ID NO: 100358 - RNA, 19 nt, Homo sapiens
  misc_RNA (1)...(19): siRNA sense strand
ccacaggccucuccuacuu

SEQ ID NO: 100359 - RNA, 19 nt, Homo sapiens
  misc_RNA (1)...(19): siRNA sense strand
gcacaaauacuacaugaag

SEQ ID NO: 100360 - RNA, 19 nt, Homo sapiens
  misc_RNA (1)...(19): siRNA sense strand
gcgcgaggcugcaaauuuc

SEQ ID NO: 100361 - RNA, 19 nt, Homo sapiens
  misc_RNA (1)...(19): siRNA sense strand
gaagacauaagcaucauga

SEQ ID NO: 100362 - RNA, 19 nt, Homo sapiens
  misc_RNA (1)...(19): siRNA sense strand
gaacaugaagacuaacauu

SEQ ID NO: 100363 - RNA, 19 nt, Homo sapiens
  misc_RNA (1)...(19): siRNA sense strand
gcaaugugcuucgcgagaa

SEQ ID NO: 100364 - RNA, 19 nt, Homo sapiens
  misc_RNA (1)...(19): siRNA sense strand
agacacaacggcaacauua

SEQ ID NO: 100365 - RNA, 19 nt, Homo sapiens
  misc_RNA (1)...(19): siRNA sense strand
gaagcgauguggaguuagu

SEQ ID NO: 100366 - RNA, 19 nt, Homo sapiens
  misc_RNA (1)...(19): siRNA sense strand
ggaccgccauguucucaga

SEQ ID NO: 100367 - RNA, 19 nt, Homo sapiens
  misc_RNA (1)...(19): siRNA sense strand
aaucaggcaugucuaagaa

SEQ ID NO: 100368 - RNA, 19 nt, Homo sapiens
  misc_RNA (1)...(19): siRNA sense strand
gaagagggccaccagaaag

SEQ ID NO: 100369 - RNA, 19 nt, Homo sapiens
  misc_RNA (1)...(19): siRNA sense strand
ggagcaaccuggacauaac

SEQ ID NO: 100370 - RNA, 19 nt, Homo sapiens
  misc_RNA (1)...(19): siRNA sense strand
ucuggaacaugaagacuaa

SEQ ID NO: 100371 - RNA, 19 nt, Homo sapiens
  misc_RNA (1)...(19): siRNA sense strand
gcgggaguuugauuucuuu

SEQ ID NO: 100372 - RNA, 19 nt, Homo sapiens
  misc_RNA (1)...(19): siRNA sense strand
ggaguuugauuucuuuaac

SEQ ID NO: 100373 - RNA, 19 nt, Homo sapiens
  misc_RNA (1)...(19): siRNA sense strand
gaucuacuccacugccuuu

SEQ ID NO: 100374 - RNA, 19 nt, Homo sapiens
  misc_RNA (1)...(19): siRNA sense strand
gaucgagcgucucaucaca

SEQ ID NO: 100375 - RNA, 19 nt, Homo sapiens
  misc_RNA (1)...(19): siRNA sense strand
gaucaucgaccucuucaag

SEQ ID NO: 100376 - RNA, 19 nt, Homo sapiens
  misc_RNA (1)...(19): siRNA sense strand
ccuacgacaugauccagua

SEQ ID NO: 100377 - RNA, 19 nt, Homo sapiens
  misc_RNA (1)...(19): siRNA sense strand
caagaaaucaggcaugucu

SEQ ID NO: 100378 - RNA, 19 nt, Homo sapiens
  misc_RNA (1)...(19): siRNA sense strand
agacagacuucggcaugua

SEQ ID NO: 100379 - RNA, 19 nt, Homo sapiens
  misc_RNA (1)...(19): siRNA sense strand
agacauaagcaucaugauu

SEQ ID NO: 100380 - RNA, 19 nt, Homo sapiens
  misc_RNA (1)...(19): siRNA sense strand
ccacugccuuugacuacuu

SEQ ID NO: 100381 - RNA, 19 nt, Homo sapiens
  misc_RNA (1)...(19): siRNA sense strand
cggaugagauggugaugau

SEQ ID NO: 100382 - RNA, 19 nt, Homo sapiens
  misc_RNA (1)...(19): siRNA sense strand
acauuaugcuggacaagaa

SEQ ID NO: 100383 - RNA, 19 nt, Homo sapiens
  misc_RNA (1)...(19): siRNA sense strand
gcaacauuaugcuggacaa

SEQ ID NO: 100384 - RNA, 19 nt, Homo sapiens
  misc_RNA (1)...(19): siRNA sense strand
caucaagcccuacccuaaa

SEQ ID NO: 100385 - RNA, 19 nt, Homo sapiens
  misc_RNA (1)...(19): siRNA sense strand
ccagaaagacccugacauc

SEQ ID NO: 100386 - RNA, 19 nt, Homo sapiens
  misc_RNA (1)...(19): siRNA sense strand
uaagaacacagaagccauu

SEQ ID NO: 100387 - RNA, 19 nt, Homo sapiens
  misc_RNA (1)...(19): siRNA sense strand
gcggcugcgugaagacaua

SEQ ID NO: 100388 - RNA, 19 nt, Homo sapiens
  misc_RNA (1)...(19): siRNA sense strand
cagcaacccugaggccauu

SEQ ID NO: 100389 - RNA, 19 nt, Homo sapiens
  misc_RNA (1)...(19): siRNA sense strand
ccuggucacucucauguug

SEQ ID NO: 100390 - RNA, 19 nt, Homo sapiens
  misc_RNA (1)...(19): siRNA sense strand
ggccuggaccucuuuguuu

SEQ ID NO: 100391 - RNA, 19 nt, Homo sapiens
  misc_RNA (1)...(19): siRNA sense strand
aaggcuggaucaacacaua

SEQ ID NO: 100392 - RNA, 19 nt, Homo sapiens
  misc_RNA (1)...(19): siRNA sense strand
agaaaucaggcaugucuaa

SEQ ID NO: 100393 - RNA, 19 nt, Homo sapiens
  misc_RNA (1)...(19): siRNA sense strand
gcuaugugcgggaguauau

SEQ ID NO: 100394 - RNA, 19 nt, Homo sapiens
  misc_RNA (1)...(19): siRNA sense strand
ucaccaacgugucggcuau

SEQ ID NO: 100395 - RNA, 19 nt, Homo sapiens
  misc_RNA (1)...(19): siRNA sense strand
ugaagagggccaccagaaa

SEQ ID NO: 100396 - RNA, 19 nt, Homo sapiens
  misc_RNA (1)...(19): siRNA sense strand
cgaagugacccgucucguu

SEQ ID NO: 100397 - RNA, 19 nt, Homo sapiens
  misc_RNA (1)...(19): siRNA sense strand
ucaagugguucauggagau

SEQ ID NO: 100398 - RNA, 19 nt, Homo sapiens
  misc_RNA (1)...(19): siRNA sense strand
gagaagcggcugcgugaag

SEQ ID NO: 100399 - RNA, 19 nt, Homo sapiens
  misc_RNA (1)...(19): siRNA sense strand
gcagaucaucgaccucuuc

SEQ ID NO: 100400 - RNA, 19 nt, Homo sapiens
  misc_RNA (1)...(19): siRNA sense strand
ucaucaagcccuacccuaa

SEQ ID NO: 100401 - RNA, 19 nt, Homo sapiens
  misc_RNA (1)...(19): siRNA sense strand
cugcagcucugaccaagug

SEQ ID NO: 100402 - RNA, 19 nt, Homo sapiens
  misc_RNA (1)...(19): siRNA sense strand
cugcacaaauacuacauga

SEQ ID NO: 100403 - RNA, 19 nt, Homo sapiens
  misc_RNA (1)...(19): siRNA sense strand
gccauguucucagauaaga

SEQ ID NO: 100404 - RNA, 19 nt, Homo sapiens
  misc_RNA (1)...(19): siRNA sense strand
gcaggcagccaucuucaag

SEQ ID NO: 100405 - RNA, 19 nt, Homo sapiens
  misc_RNA (1)...(19): siRNA sense strand
caacgugucggcuaucauc

SEQ ID NO: 100406 - RNA, 19 nt, Homo sapiens
  misc_RNA (1)...(19): siRNA sense strand
ccaacuggagaucuaagua

SEQ ID NO: 100407 - RNA, 19 nt, Homo sapiens
  misc_RNA (1)...(19): siRNA sense strand
uaucauccacaucgacuuu

SEQ ID NO: 100408 - RNA, 19 nt, Homo sapiens
  misc_RNA (1)...(19): siRNA sense strand
uuaacaagaucaccaacgu

SEQ ID NO: 100409 - RNA, 19 nt, Homo sapiens
  misc_RNA (1)...(19): siRNA sense strand
guggccaacuggagaucua

SEQ ID NO: 100410 - RNA, 19 nt, Homo sapiens
  misc_RNA (1)...(19): siRNA sense strand
gggaguuugauuucuuuaa

SEQ ID NO: 100411 - RNA, 19 nt, Homo sapiens
  misc_RNA (1)...(19): siRNA sense strand
ugaugugccugaagcaauc

SEQ ID NO: 100412 - RNA, 19 nt, Homo sapiens
  misc_RNA (1)...(19): siRNA sense strand
agaagcggcugcgugaaga

SEQ ID NO: 100413 - RNA, 19 nt, Homo sapiens
  misc_RNA (1)...(19): siRNA sense strand
gagccggaccuacgacaug

SEQ ID NO: 100414 - RNA, 19 nt, Homo sapiens
  misc_RNA (1)...(19): siRNA sense strand
gcugggaacccgacaucaa

SEQ ID NO: 100415 - RNA, 19 nt, Homo sapiens
  misc_RNA (1)...(19): siRNA sense strand
agaaagaaggcuugucugu

SEQ ID NO: 100416 - RNA, 19 nt, Homo sapiens
  misc_RNA (1)...(19): siRNA sense strand
ugagugagaagcaguggaa

SEQ ID NO: 100417 - RNA, 19 nt, Homo sapiens
  misc_RNA (1)...(19): siRNA sense strand
acacaacggcaacauuaug

SEQ ID NO: 100418 - RNA, 19 nt, Homo sapiens
  misc_RNA (1)...(19): siRNA sense strand
acccaaggcuggaucaaca

SEQ ID NO: 100419 - RNA, 19 nt, Homo sapiens
  misc_RNA (1)...(19): siRNA sense strand
gacaugauccaguacuauc

SEQ ID NO: 100420 - RNA, 19 nt, Homo sapiens
  misc_RNA (1)...(19): siRNA sense strand
acaugacgguggagcagaa

SEQ ID NO: 100421 - RNA, 19 nt, Homo sapiens
  misc_RNA (1)...(19): siRNA sense strand
gaucaaggacagacacaac

SEQ ID NO: 100422 - RNA, 19 nt, Homo sapiens
  misc_RNA (1)...(19): siRNA sense strand
cuaaaggcgacgagagaaa

SEQ ID NO: 100423 - RNA, 19 nt, Homo sapiens
  misc_RNA (1)...(19): siRNA sense strand
ugaaaguccugcgguccuu

SEQ ID NO: 100424 - RNA, 19 nt, Homo sapiens
  misc_RNA (1)...(19): siRNA sense strand
cuccagagcucagccaugu

SEQ ID NO: 100425 - RNA, 19 nt, Homo sapiens
  misc_RNA (1)...(19): siRNA sense strand
guacugcagcucugaccaa

SEQ ID NO: 100426 - RNA, 19 nt, Homo sapiens
  misc_RNA (1)...(19): siRNA sense strand
gaaaucaggcaugucuaag

SEQ ID NO: 100427 - RNA, 19 nt, Homo sapiens
  misc_RNA (1)...(19): siRNA sense strand
ccuccuggaucaguuggua

SEQ ID NO: 100428 - RNA, 19 nt, Homo sapiens
  misc_RNA (1)...(19): siRNA sense strand
cagaagccauugggaacga

SEQ ID NO: 100429 - RNA, 19 nt, Homo sapiens
  misc_RNA (1)...(19): siRNA sense strand
ccgccauguucucagauaa

SEQ ID NO: 100430 - RNA, 19 nt, Homo sapiens
  misc_RNA (1)...(19): siRNA sense strand
gacgguggagcagaaauuu

SEQ ID NO: 100431 - RNA, 19 nt, Homo sapiens
  misc_RNA (1)...(19): siRNA sense strand
ccccauaucuggccaaguu

SEQ ID NO: 100432 - RNA, 19 nt, Homo sapiens
  misc_RNA (1)...(19): siRNA sense strand
ccauugugcuggacaucga

SEQ ID NO: 100433 - RNA, 19 nt, Homo sapiens
  misc_RNA (1)...(19): siRNA sense strand
ugacgguggagcagaaauu

SEQ ID NO: 100434 - RNA, 19 nt, Homo sapiens
  misc_RNA (1)...(19): siRNA sense strand
ucgagcgucucaucacaug

SEQ ID NO: 100435 - RNA, 19 nt, Homo sapiens
  misc_RNA (1)...(19): siRNA sense strand
gacacaacggcaacauuau

SEQ ID NO: 100436 - RNA, 19 nt, Homo sapiens
  misc_RNA (1)...(19): siRNA sense strand
gugcgggaguauauucugu

SEQ ID NO: 100437 - RNA, 19 nt, Homo sapiens
  misc_RNA (1)...(19): siRNA sense strand
caacuggagaucuaaguac

SEQ ID NO: 100438 - RNA, 19 nt, Homo sapiens
  misc_RNA (1)...(19): siRNA sense strand
uguccaccaucuccaagaa

SEQ ID NO: 100439 - RNA, 19 nt, Homo sapiens
  misc_RNA (1)...(19): siRNA sense strand
cgacaugauccaguacuau

SEQ ID NO: 100440 - RNA, 19 nt, Homo sapiens
  misc_RNA (1)...(19): siRNA sense strand
ggcugcaaauuucaucaug

SEQ ID NO: 100441 - RNA, 19 nt, Homo sapiens
  misc_RNA (1)...(19): siRNA sense strand
ggcccugucugaagugaag

SEQ ID NO: 100442 - RNA, 19 nt, Homo sapiens
  misc_RNA (1)...(19): siRNA sense strand
gugagaagcaguggaagga

SEQ ID NO: 100443 - RNA, 19 nt, Homo sapiens
  misc_RNA (1)...(19): siRNA sense strand
aaaucaggcaugucuaaga

SEQ ID NO: 100444 - RNA, 19 nt, Homo sapiens
  misc_RNA (1)...(19): siRNA sense strand
cggagcaaccuggacauaa

SEQ ID NO: 100445 - RNA, 19 nt, Homo sapiens
  misc_RNA (1)...(19): siRNA sense strand
caagcugacggaugagaug

SEQ ID NO: 100446 - RNA, 19 nt, Homo sapiens
  misc_RNA (1)...(19): siRNA sense strand
cagacagacuucggcaugu

SEQ ID NO: 100447 - RNA, 19 nt, Homo sapiens
  misc_RNA (1)...(19): siRNA sense strand
gcgaccuccuggaucaguu

SEQ ID NO: 100448 - RNA, 19 nt, Homo sapiens
  misc_RNA (1)...(19): siRNA sense strand
ugucggcccugucugaagu

SEQ ID NO: 100449 - RNA, 19 nt, Homo sapiens
  misc_RNA (1)...(19): siRNA sense strand
agagaaagaaggcuugucu

SEQ ID NO: 100450 - RNA, 19 nt, Homo sapiens
  misc_RNA (1)...(19): siRNA sense strand
acgacaugauccaguacua

SEQ ID NO: 100451 - RNA, 19 nt, Homo sapiens
  misc_RNA (1)...(19): siRNA sense strand
gcagaaauuuggccuguuu

SEQ ID NO: 100452 - RNA, 19 nt, Homo sapiens
  misc_RNA (1)...(19): siRNA sense strand
gacauaagcaucaugauua

SEQ ID NO: 100453 - RNA, 19 nt, Homo sapiens
  misc_RNA (1)...(19): siRNA sense strand
gcucccagcugcacaaaua

SEQ ID NO: 100454 - RNA, 19 nt, Homo sapiens
  misc_RNA (1)...(19): siRNA sense strand
gagcaucucucccuaccua

SEQ ID NO: 100455 - RNA, 19 nt, Homo sapiens
  misc_RNA (1)...(19): siRNA sense strand
ggaagcaagucaacccaaa

SEQ ID NO: 100456 - RNA, 19 nt, Homo sapiens
  misc_RNA (1)...(19): siRNA sense strand
gguuugagaucgccaagua

SEQ ID NO: 100457 - RNA, 19 nt, Homo sapiens
  misc_RNA (1)...(19): siRNA sense strand
gugaagcgauguggaguua

SEQ ID NO: 100458 - RNA, 19 nt, Homo sapiens
  misc_RNA (1)...(19): siRNA sense strand
ccacaggccucuccuacuu

SEQ ID NO: 100459 - RNA, 19 nt, Homo sapiens
  misc_RNA (1)...(19): siRNA sense strand
gcacaaauacuacaugaag

SEQ ID NO: 100460 - RNA, 19 nt, Homo sapiens
  misc_RNA (1)...(19): siRNA sense strand
gcgcgaggcugcaaauuuc

SEQ ID NO: 100461 - RNA, 19 nt, Homo sapiens
  misc_RNA (1)...(19): siRNA sense strand
gaagacauaagcaucauga

SEQ ID NO: 100462 - RNA, 19 nt, Homo sapiens
  misc_RNA (1)...(19): siRNA sense strand
gaacaugaagacuaacauu

SEQ ID NO: 100463 - RNA, 19 nt, Homo sapiens
  misc_RNA (1)...(19): siRNA sense strand
gcaaugugcuucgcgagaa

SEQ ID NO: 100464 - RNA, 19 nt, Homo sapiens
  misc_RNA (1)...(19): siRNA sense strand
agacacaacggcaacauua

SEQ ID NO: 100465 - RNA, 19 nt, Homo sapiens
  misc_RNA (1)...(19): siRNA sense strand
gaagcgauguggaguuagu

SEQ ID NO: 100466 - RNA, 19 nt, Homo sapiens
  misc_RNA (1)...(19): siRNA sense strand
ggaccgccauguucucaga

SEQ ID NO: 100467 - RNA, 19 nt, Homo sapiens
  misc_RNA (1)...(19): siRNA sense strand
aaucaggcaugucuaagaa

SEQ ID NO: 100468 - RNA, 19 nt, Homo sapiens
  misc_RNA (1)...(19): siRNA sense strand
gaagagggccaccagaaag

SEQ ID NO: 100469 - RNA, 19 nt, Homo sapiens
  misc_RNA (1)...(19): siRNA sense strand
ggagcaaccuggacauaac

SEQ ID NO: 100470 - RNA, 19 nt, Homo sapiens
  misc_RNA (1)...(19): siRNA sense strand
ucuggaacaugaagacuaa

SEQ ID NO: 100471 - RNA, 19 nt, Homo sapiens
  misc_RNA (1)...(19): siRNA sense strand
gcgggaguuugauuucuuu

SEQ ID NO: 100472 - RNA, 19 nt, Homo sapiens
  misc_RNA (1)...(19): siRNA sense strand
ggaguuugauuucuuuaac

SEQ ID NO: 100473 - RNA, 19 nt, Homo sapiens
  misc_RNA (1)...(19): siRNA sense strand
gaucuacuccacugccuuu

SEQ ID NO: 100474 - RNA, 19 nt, Homo sapiens
  misc_RNA (1)...(19): siRNA sense strand
gaucgagcgucucaucaca

SEQ ID NO: 100475 - RNA, 19 nt, Homo sapiens
  misc_RNA (1)...(19): siRNA sense strand
gaucaucgaccucuucaag

SEQ ID NO: 100476 - RNA, 19 nt, Homo sapiens
  misc_RNA (1)...(19): siRNA sense strand
ccuacgacaugauccagua

SEQ ID NO: 100477 - RNA, 19 nt, Homo sapiens
  misc_RNA (1)...(19): siRNA sense strand
caagaaaucaggcaugucu

SEQ ID NO: 100478 - RNA, 19 nt, Homo sapiens
  misc_RNA (1)...(19): siRNA sense strand
agacagacuucggcaugua

SEQ ID NO: 100479 - RNA, 19 nt, Homo sapiens
  misc_RNA (1)...(19): siRNA sense strand
agacauaagcaucaugauu

SEQ ID NO: 100480 - RNA, 19 nt, Homo sapiens
  misc_RNA (1)...(19): siRNA sense strand
ccacugccuuugacuacuu

SEQ ID NO: 100481 - RNA, 19 nt, Homo sapiens
  misc_RNA (1)...(19): siRNA sense strand
cggaugagauggugaugau

SEQ ID NO: 100482 - RNA, 19 nt, Homo sapiens
  misc_RNA (1)...(19): siRNA sense strand
acauuaugcuggacaagaa

SEQ ID NO: 100483 - RNA, 19 nt, Homo sapiens
  misc_RNA (1)...(19): siRNA sense strand
gcaacauuaugcuggacaa

SEQ ID NO: 100484 - RNA, 19 nt, Homo sapiens
  misc_RNA (1)...(19): siRNA sense strand
caucaagcccuacccuaaa

SEQ ID NO: 100485 - RNA, 19 nt, Homo sapiens
  misc_RNA (1)...(19): siRNA sense strand
ccagaaagacccugacauc

SEQ ID NO: 100486 - RNA, 19 nt, Homo sapiens
  misc_RNA (1)...(19): siRNA sense strand
uaagaacacagaagccauu

SEQ ID NO: 100487 - RNA, 19 nt, Homo sapiens
  misc_RNA (1)...(19): siRNA sense strand
gcggcugcgugaagacaua

SEQ ID NO: 100488 - RNA, 19 nt, Homo sapiens
  misc_RNA (1)...(19): siRNA sense strand
cagcaacccugaggccauu

SEQ ID NO: 100489 - RNA, 19 nt, Homo sapiens
  misc_RNA (1)...(19): siRNA sense strand
ccuggucacucucauguug

SEQ ID NO: 100490 - RNA, 19 nt, Homo sapiens
  misc_RNA (1)...(19): siRNA sense strand
ggccuggaccucuuuguuu

SEQ ID NO: 100491 - RNA, 19 nt, Homo sapiens
  misc_RNA (1)...(19): siRNA sense strand
aaggcuggaucaacacaua

SEQ ID NO: 100492 - RNA, 19 nt, Homo sapiens
  misc_RNA (1)...(19): siRNA sense strand
agaaaucaggcaugucuaa

SEQ ID NO: 100493 - RNA, 19 nt, Homo sapiens
  misc_RNA (1)...(19): siRNA sense strand
gcuaugugcgggaguauau

SEQ ID NO: 100494 - RNA, 19 nt, Homo sapiens
  misc_RNA (1)...(19): siRNA sense strand
ucaccaacgugucggcuau

SEQ ID NO: 100495 - RNA, 19 nt, Homo sapiens
  misc_RNA (1)...(19): siRNA sense strand
ugaagagggccaccagaaa

SEQ ID NO: 100496 - RNA, 19 nt, Homo sapiens
  misc_RNA (1)...(19): siRNA sense strand
cgaagugacccgucucguu

SEQ ID NO: 100497 - RNA, 19 nt, Homo sapiens
  misc_RNA (1)...(19): siRNA sense strand
ucaagugguucauggagau

SEQ ID NO: 100498 - RNA, 19 nt, Homo sapiens
  misc_RNA (1)...(19): siRNA sense strand
gagaagcggcugcgugaag

SEQ ID NO: 100499 - RNA, 19 nt, Homo sapiens
  misc_RNA (1)...(19): siRNA sense strand
gcagaucaucgaccucuuc

SEQ ID NO: 100500 - RNA, 19 nt, Homo sapiens
  misc_RNA (1)...(19): siRNA sense strand
ucaucaagcccuacccuaa

SEQ ID NO: 100501 - RNA, 19 nt, Homo sapiens
  misc_RNA (1)...(19): siRNA sense strand
cugcagcucugaccaagug

SEQ ID NO: 100502 - RNA, 19 nt, Homo sapiens
  misc_RNA (1)...(19): siRNA sense strand
cugcacaaauacuacauga

SEQ ID NO: 100503 - RNA, 19 nt, Homo sapiens
  misc_RNA (1)...(19): siRNA sense strand
gccauguucucagauaaga

SEQ ID NO: 100504 - RNA, 19 nt, Homo sapiens
  misc_RNA (1)...(19): siRNA sense strand
gcaggcagccaucuucaag

SEQ ID NO: 100505 - RNA, 19 nt, Homo sapiens
  misc_RNA (1)...(19): siRNA sense strand
caacgugucggcuaucauc

SEQ ID NO: 100506 - RNA, 19 nt, Homo sapiens
  misc_RNA (1)...(19): siRNA sense strand
ccaacuggagaucuaagua

SEQ ID NO: 100507 - RNA, 19 nt, Homo sapiens
  misc_RNA (1)...(19): siRNA sense strand
uaucauccacaucgacuuu

SEQ ID NO: 100508 - RNA, 19 nt, Homo sapiens
  misc_RNA (1)...(19): siRNA sense strand
uuaacaagaucaccaacgu

SEQ ID NO: 100509 - RNA, 19 nt, Homo sapiens
  misc_RNA (1)...(19): siRNA sense strand
guggccaacuggagaucua

SEQ ID NO: 100510 - RNA, 19 nt, Homo sapiens
  misc_RNA (1)...(19): siRNA sense strand
gggaguuugauuucuuuaa

SEQ ID NO: 100511 - RNA, 19 nt, Homo sapiens
  misc_RNA (1)...(19): siRNA sense strand
ugaugugccugaagcaauc

SEQ ID NO: 100512 - RNA, 19 nt, Homo sapiens
  misc_RNA (1)...(19): siRNA sense strand
agaagcggcugcgugaaga

SEQ ID NO: 100513 - RNA, 19 nt, Homo sapiens
  misc_RNA (1)...(19): siRNA sense strand
gagccggaccuacgacaug

SEQ ID NO: 100514 - RNA, 19 nt, Homo sapiens
  misc_RNA (1)...(19): siRNA sense strand
gcugggaacccgacaucaa

SEQ ID NO: 100515 - RNA, 19 nt, Homo sapiens
  misc_RNA (1)...(19): siRNA sense strand
agaaagaaggcuugucugu

SEQ ID NO: 100516 - RNA, 19 nt, Homo sapiens
  misc_RNA (1)...(19): siRNA sense strand
ugagugagaagcaguggaa

SEQ ID NO: 100517 - RNA, 19 nt, Homo sapiens
  misc_RNA (1)...(19): siRNA sense strand
acacaacggcaacauuaug

SEQ ID NO: 100518 - RNA, 19 nt, Homo sapiens
  misc_RNA (1)...(19): siRNA sense strand
acccaaggcuggaucaaca

SEQ ID NO: 100519 - RNA, 19 nt, Homo sapiens
  misc_RNA (1)...(19): siRNA sense strand
gacaugauccaguacuauc

SEQ ID NO: 100520 - RNA, 19 nt, Homo sapiens
  misc_RNA (1)...(19): siRNA sense strand
acaugacgguggagcagaa

SEQ ID NO: 100521 - RNA, 19 nt, Homo sapiens
  misc_RNA (1)...(19): siRNA sense strand
gaucaaggacagacacaac

SEQ ID NO: 100522 - RNA, 19 nt, Homo sapiens
  misc_RNA (1)...(19): siRNA sense strand
cuaaaggcgacgagagaaa

SEQ ID NO: 100523 - RNA, 19 nt, Homo sapiens
  misc_RNA (1)...(19): siRNA sense strand
ugaaaguccugcgguccuu

SEQ ID NO: 100524 - RNA, 19 nt, Homo sapiens
  misc_RNA (1)...(19): siRNA sense strand
cuccagagcucagccaugu

SEQ ID NO: 100525 - RNA, 19 nt, Homo sapiens
  misc_RNA (1)...(19): siRNA sense strand
guacugcagcucugaccaa

SEQ ID NO: 100526 - RNA, 19 nt, Homo sapiens
  misc_RNA (1)...(19): siRNA sense strand
gaaaucaggcaugucuaag

SEQ ID NO: 100527 - RNA, 19 nt, Homo sapiens
  misc_RNA (1)...(19): siRNA sense strand
ccuccuggaucaguuggua

SEQ ID NO: 100528 - RNA, 19 nt, Homo sapiens
  misc_RNA (1)...(19): siRNA sense strand
cagaagccauugggaacga

SEQ ID NO: 100529 - RNA, 19 nt, Homo sapiens
  misc_RNA (1)...(19): siRNA sense strand
ccgccauguucucagauaa

SEQ ID NO: 100530 - RNA, 19 nt, Homo sapiens
  misc_RNA (1)...(19): siRNA sense strand
gacgguggagcagaaauuu

SEQ ID NO: 100531 - RNA, 19 nt, Homo sapiens
  misc_RNA (1)...(19): siRNA sense strand
ccccauaucuggccaaguu

SEQ ID NO: 100532 - RNA, 19 nt, Homo sapiens
  misc_RNA (1)...(19): siRNA sense strand
ccauugugcuggacaucga

SEQ ID NO: 100533 - RNA, 19 nt, Homo sapiens
  misc_RNA (1)...(19): siRNA sense strand
ugacgguggagcagaaauu

SEQ ID NO: 100534 - RNA, 19 nt, Homo sapiens
  misc_RNA (1)...(19): siRNA sense strand
ucgagcgucucaucacaug

SEQ ID NO: 100535 - RNA, 19 nt, Homo sapiens
  misc_RNA (1)...(19): siRNA sense strand
gacacaacggcaacauuau

SEQ ID NO: 100536 - RNA, 19 nt, Homo sapiens
  misc_RNA (1)...(19): siRNA sense strand
gugcgggaguauauucugu

SEQ ID NO: 100537 - RNA, 19 nt, Homo sapiens
  misc_RNA (1)...(19): siRNA sense strand
caacuggagaucuaaguac

SEQ ID NO: 100538 - RNA, 19 nt, Homo sapiens
  misc_RNA (1)...(19): siRNA sense strand
uguccaccaucuccaagaa

SEQ ID NO: 100539 - RNA, 19 nt, Homo sapiens
  misc_RNA (1)...(19): siRNA sense strand
cgacaugauccaguacuau

SEQ ID NO: 100540 - RNA, 19 nt, Homo sapiens
  misc_RNA (1)...(19): siRNA sense strand
ggcugcaaauuucaucaug

SEQ ID NO: 100541 - RNA, 19 nt, Homo sapiens
  misc_RNA (1)...(19): siRNA sense strand
ggcccugucugaagugaag

SEQ ID NO: 100542 - RNA, 19 nt, Homo sapiens
  misc_RNA (1)...(19): siRNA sense strand
gugagaagcaguggaagga

SEQ ID NO: 100543 - RNA, 19 nt, Homo sapiens
  misc_RNA (1)...(19): siRNA sense strand
aaaucaggcaugucuaaga

SEQ ID NO: 100544 - RNA, 19 nt, Homo sapiens
  misc_RNA (1)...(19): siRNA sense strand
cggagcaaccuggacauaa

SEQ ID NO: 100545 - RNA, 19 nt, Homo sapiens
  misc_RNA (1)...(19): siRNA sense strand
caagcugacggaugagaug

SEQ ID NO: 100546 - RNA, 19 nt, Homo sapiens
  misc_RNA (1)...(19): siRNA sense strand
cagacagacuucggcaugu

SEQ ID NO: 100547 - RNA, 19 nt, Homo sapiens
  misc_RNA (1)...(19): siRNA sense strand
gcgaccuccuggaucaguu

SEQ ID NO: 100548 - RNA, 19 nt, Homo sapiens
  misc_RNA (1)...(19): siRNA sense strand
ugucggcccugucugaagu

SEQ ID NO: 100549 - RNA, 19 nt, Homo sapiens
  misc_RNA (1)...(19): siRNA sense strand
agagaaagaaggcuugucu

SEQ ID NO: 100550 - RNA, 19 nt, Homo sapiens
  misc_RNA (1)...(19): siRNA sense strand
acgacaugauccaguacua

SEQ ID NO: 100551 - RNA, 19 nt, Homo sapiens
  misc_RNA (1)...(19): siRNA sense strand
gaucacaacuuuaccuuug

SEQ ID NO: 100552 - RNA, 19 nt, Homo sapiens
  misc_RNA (1)...(19): siRNA sense strand
ggaaugacaugcccaauag

SEQ ID NO: 100553 - RNA, 19 nt, Homo sapiens
  misc_RNA (1)...(19): siRNA sense strand
gaagaagagucacaaucaa

SEQ ID NO: 100554 - RNA, 19 nt, Homo sapiens
  misc_RNA (1)...(19): siRNA sense strand
gcacauggcuacucauucu

SEQ ID NO: 100555 - RNA, 19 nt, Homo sapiens
  misc_RNA (1)...(19): siRNA sense strand
uaaaugguccucccuauaa

SEQ ID NO: 100556 - RNA, 19 nt, Homo sapiens
  misc_RNA (1)...(19): siRNA sense strand
aaacagaaccaguggauuu

SEQ ID NO: 100557 - RNA, 19 nt, Homo sapiens
  misc_RNA (1)...(19): siRNA sense strand
gaacuacaauaccaagcuu

SEQ ID NO: 100558 - RNA, 19 nt, Homo sapiens
  misc_RNA (1)...(19): siRNA sense strand
caauagauauggacacugu

SEQ ID NO: 100559 - RNA, 19 nt, Homo sapiens
  misc_RNA (1)...(19): siRNA sense strand
ucaaauauccguucaguuc

SEQ ID NO: 100560 - RNA, 19 nt, Homo sapiens
  misc_RNA (1)...(19): siRNA sense strand
ccaaggccuuuguuucuaa

SEQ ID NO: 100561 - RNA, 19 nt, Homo sapiens
  misc_RNA (1)...(19): siRNA sense strand
uaucaaagccauucacaaa

SEQ ID NO: 100562 - RNA, 19 nt, Homo sapiens
  misc_RNA (1)...(19): siRNA sense strand
ccaccuuucuuucaaauau

SEQ ID NO: 100563 - RNA, 19 nt, Homo sapiens
  misc_RNA (1)...(19): siRNA sense strand
guaccacccucccacguuu

SEQ ID NO: 100564 - RNA, 19 nt, Homo sapiens
  misc_RNA (1)...(19): siRNA sense strand
ucaaagccauucacaaaca

SEQ ID NO: 100565 - RNA, 19 nt, Homo sapiens
  misc_RNA (1)...(19): siRNA sense strand
gggaaugacaugcccaaua

SEQ ID NO: 100566 - RNA, 19 nt, Homo sapiens
  misc_RNA (1)...(19): siRNA sense strand
ggauuuccuugacccauuu

SEQ ID NO: 100567 - RNA, 19 nt, Homo sapiens
  misc_RNA (1)...(19): siRNA sense strand
agaguuaccugauggaguu

SEQ ID NO: 100568 - RNA, 19 nt, Homo sapiens
  misc_RNA (1)...(19): siRNA sense strand
acaaagagacguuuaagug

SEQ ID NO: 100569 - RNA, 19 nt, Homo sapiens
  misc_RNA (1)...(19): siRNA sense strand
gagagaggcccuacaagug

SEQ ID NO: 100570 - RNA, 19 nt, Homo sapiens
  misc_RNA (1)...(19): siRNA sense strand
caaugugucugugccuaua

SEQ ID NO: 100571 - RNA, 19 nt, Homo sapiens
  misc_RNA (1)...(19): siRNA sense strand
aguaagagauacccagaaa

SEQ ID NO: 100572 - RNA, 19 nt, Homo sapiens
  misc_RNA (1)...(19): siRNA sense strand
caaaugaucacaacuuuac

SEQ ID NO: 100573 - RNA, 19 nt, Homo sapiens
  misc_RNA (1)...(19): siRNA sense strand
ggagagaggcccuacaagu

SEQ ID NO: 100574 - RNA, 19 nt, Homo sapiens
  misc_RNA (1)...(19): siRNA sense strand
aauuaaagguucacuccua

SEQ ID NO: 100575 - RNA, 19 nt, Homo sapiens
  misc_RNA (1)...(19): siRNA sense strand
aaauauccguucaguucua

SEQ ID NO: 100576 - RNA, 19 nt, Homo sapiens
  misc_RNA (1)...(19): siRNA sense strand
ugaagaagagucacaauca

SEQ ID NO: 100577 - RNA, 19 nt, Homo sapiens
  misc_RNA (1)...(19): siRNA sense strand
cagauugggucccuagaug

SEQ ID NO: 100578 - RNA, 19 nt, Homo sapiens
  misc_RNA (1)...(19): siRNA sense strand
ccaaaugaucacaacuuua

SEQ ID NO: 100579 - RNA, 19 nt, Homo sapiens
  misc_RNA (1)...(19): siRNA sense strand
ugacaaggccuuuaacagu

SEQ ID NO: 100580 - RNA, 19 nt, Homo sapiens
  misc_RNA (1)...(19): siRNA sense strand
gcaccaaggccuuuguuuc

SEQ ID NO: 100581 - RNA, 19 nt, Homo sapiens
  misc_RNA (1)...(19): siRNA sense strand
ggcaagaacuacaauacca

SEQ ID NO: 100582 - RNA, 19 nt, Homo sapiens
  misc_RNA (1)...(19): siRNA sense strand
uaagagauacccagaaagu

SEQ ID NO: 100583 - RNA, 19 nt, Homo sapiens
  misc_RNA (1)...(19): siRNA sense strand
agaaucaccuccauacaca

SEQ ID NO: 100584 - RNA, 19 nt, Homo sapiens
  misc_RNA (1)...(19): siRNA sense strand
ucaccugacucgacauaug

SEQ ID NO: 100585 - RNA, 19 nt, Homo sapiens
  misc_RNA (1)...(19): siRNA sense strand
uguaagguauguuugcaaa

SEQ ID NO: 100586 - RNA, 19 nt, Homo sapiens
  misc_RNA (1)...(19): siRNA sense strand
cgaagaauguggcaagaac

SEQ ID NO: 100587 - RNA, 19 nt, Homo sapiens
  misc_RNA (1)...(19): siRNA sense strand
gcgaaaggaucaccugacu

SEQ ID NO: 100588 - RNA, 19 nt, Homo sapiens
  misc_RNA (1)...(19): siRNA sense strand
guucaguucuaccucauau

SEQ ID NO: 100589 - RNA, 19 nt, Homo sapiens
  misc_RNA (1)...(19): siRNA sense strand
ugacaugcccaauagauau

SEQ ID NO: 100590 - RNA, 19 nt, Homo sapiens
  misc_RNA (1)...(19): siRNA sense strand
gaucaccugacucgacaua

SEQ ID NO: 100591 - RNA, 19 nt, Homo sapiens
  misc_RNA (1)...(19): siRNA sense strand
ugucauuccuggugauuug

SEQ ID NO: 100592 - RNA, 19 nt, Homo sapiens
  misc_RNA (1)...(19): siRNA sense strand
ggugauuugucagaaguaa

SEQ ID NO: 100593 - RNA, 19 nt, Homo sapiens
  misc_RNA (1)...(19): siRNA sense strand
guccuuaccuuccagugaa

SEQ ID NO: 100594 - RNA, 19 nt, Homo sapiens
  misc_RNA (1)...(19): siRNA sense strand
ggugaaaccaaaccaagaa

SEQ ID NO: 100595 - RNA, 19 nt, Homo sapiens
  misc_RNA (1)...(19): siRNA sense strand
caucuaagcuaggguugga

SEQ ID NO: 100596 - RNA, 19 nt, Homo sapiens
  misc_RNA (1)...(19): siRNA sense strand
aaacuuuccuugccaacug

SEQ ID NO: 100597 - RNA, 19 nt, Homo sapiens
  misc_RNA (1)...(19): siRNA sense strand
ggacuuccucugucaguau

SEQ ID NO: 100598 - RNA, 19 nt, Homo sapiens
  misc_RNA (1)...(19): siRNA sense strand
gcaagaacuacaauaccaa

SEQ ID NO: 100599 - RNA, 19 nt, Homo sapiens
  misc_RNA (1)...(19): siRNA sense strand
uggagcaccuuaaaucuca

SEQ ID NO: 100600 - RNA, 19 nt, Homo sapiens
  misc_RNA (1)...(19): siRNA sense strand
cuacaacacuccauuucag

SEQ ID NO: 100601 - RNA, 19 nt, Homo sapiens
  misc_RNA (1)...(19): siRNA sense strand
uuaaaugguccucccuaua

SEQ ID NO: 100602 - RNA, 19 nt, Homo sapiens
  misc_RNA (1)...(19): siRNA sense strand
ucaccaccuuucuuucaaa

SEQ ID NO: 100603 - RNA, 19 nt, Homo sapiens
  misc_RNA (1)...(19): siRNA sense strand
aaaggcacauggcuacuca

SEQ ID NO: 100604 - RNA, 19 nt, Homo sapiens
  misc_RNA (1)...(19): siRNA sense strand
accaaaugaucacaacuuu

SEQ ID NO: 100605 - RNA, 19 nt, Homo sapiens
  misc_RNA (1)...(19): siRNA sense strand
gaagaaucaccuccauaca

SEQ ID NO: 100606 - RNA, 19 nt, Homo sapiens
  misc_RNA (1)...(19): siRNA sense strand
acaagugcauacaacaaga

SEQ ID NO: 100607 - RNA, 19 nt, Homo sapiens
  misc_RNA (1)...(19): siRNA sense strand
caagcaucgucaucaucua

SEQ ID NO: 100608 - RNA, 19 nt, Homo sapiens
  misc_RNA (1)...(19): siRNA sense strand
caacuuuaccuuugggaau

SEQ ID NO: 100609 - RNA, 19 nt, Homo sapiens
  misc_RNA (1)...(19): siRNA sense strand
gcaguuaaaccucuacaac

SEQ ID NO: 100610 - RNA, 19 nt, Homo sapiens
  misc_RNA (1)...(19): siRNA sense strand
cuaacaaagagacguuuaa

SEQ ID NO: 100611 - RNA, 19 nt, Homo sapiens
  misc_RNA (1)...(19): siRNA sense strand
ccucauaugcaauuucuau

SEQ ID NO: 100612 - RNA, 19 nt, Homo sapiens
  misc_RNA (1)...(19): siRNA sense strand
gagaaaacccacaagugua

SEQ ID NO: 100613 - RNA, 19 nt, Homo sapiens
  misc_RNA (1)...(19): siRNA sense strand
aaacguaagcguggugaaa

SEQ ID NO: 100614 - RNA, 19 nt, Homo sapiens
  misc_RNA (1)...(19): siRNA sense strand
aaacccacaaguguaauua

SEQ ID NO: 100615 - RNA, 19 nt, Homo sapiens
  misc_RNA (1)...(19): siRNA sense strand
acccacaaguguaauuauu

SEQ ID NO: 100616 - RNA, 19 nt, Homo sapiens
  misc_RNA (1)...(19): siRNA sense strand
gcaaugugucugugccuau

SEQ ID NO: 100617 - RNA, 19 nt, Homo sapiens
  misc_RNA (1)...(19): siRNA sense strand
gacuuccucugucaguauu

SEQ ID NO: 100618 - RNA, 19 nt, Homo sapiens
  misc_RNA (1)...(19): siRNA sense strand
ccuauaauccucuaucagu

SEQ ID NO: 100619 - RNA, 19 nt, Homo sapiens
  misc_RNA (1)...(19): siRNA sense strand
ccuaaacacaccagcauug

SEQ ID NO: 100620 - RNA, 19 nt, Homo sapiens
  misc_RNA (1)...(19): siRNA sense strand
ggaucugcccaccaaauga

SEQ ID NO: 100621 - RNA, 19 nt, Homo sapiens
  misc_RNA (1)...(19): siRNA sense strand
ugaagaaucaccuccauac

SEQ ID NO: 100622 - RNA, 19 nt, Homo sapiens
  misc_RNA (1)...(19): siRNA sense strand
aaacacaccagcauuggau

SEQ ID NO: 100623 - RNA, 19 nt, Homo sapiens
  misc_RNA (1)...(19): siRNA sense strand
ugacucgacauaugaagaa

SEQ ID NO: 100624 - RNA, 19 nt, Homo sapiens
  misc_RNA (1)...(19): siRNA sense strand
cacacgacccuaacaaaga

SEQ ID NO: 100625 - RNA, 19 nt, Homo sapiens
  misc_RNA (1)...(19): siRNA sense strand
acacgacccuaacaaagag

SEQ ID NO: 100626 - RNA, 19 nt, Homo sapiens
  misc_RNA (1)...(19): siRNA sense strand
gcuuucaccagcaguuuaa

SEQ ID NO: 100627 - RNA, 19 nt, Homo sapiens
  misc_RNA (1)...(19): siRNA sense strand
ccucucaccaccuuucuuu

SEQ ID NO: 100628 - RNA, 19 nt, Homo sapiens
  misc_RNA (1)...(19): siRNA sense strand
acaaggccuuuaacagugu

SEQ ID NO: 100629 - RNA, 19 nt, Homo sapiens
  misc_RNA (1)...(19): siRNA sense strand
ggugcacacuggaagaaag

SEQ ID NO: 100630 - RNA, 19 nt, Homo sapiens
  misc_RNA (1)...(19): siRNA sense strand
aaaugguccucccuauaau

SEQ ID NO: 100631 - RNA, 19 nt, Homo sapiens
  misc_RNA (1)...(19): siRNA sense strand
gaucugcccaccaaaugau

SEQ ID NO: 100632 - RNA, 19 nt, Homo sapiens
  misc_RNA (1)...(19): siRNA sense strand
uggauuuccuugacccauu

SEQ ID NO: 100633 - RNA, 19 nt, Homo sapiens
  misc_RNA (1)...(19): siRNA sense strand
agaagagucacaaucaaga

SEQ ID NO: 100634 - RNA, 19 nt, Homo sapiens
  misc_RNA (1)...(19): siRNA sense strand
ucaguauugugcacagaga

SEQ ID NO: 100635 - RNA, 19 nt, Homo sapiens
  misc_RNA (1)...(19): siRNA sense strand
caggagagaggcccuacaa

SEQ ID NO: 100636 - RNA, 19 nt, Homo sapiens
  misc_RNA (1)...(19): siRNA sense strand
aggguuggauccucagauu

SEQ ID NO: 100637 - RNA, 19 nt, Homo sapiens
  misc_RNA (1)...(19): siRNA sense strand
aagcaucgucaucaucuaa

SEQ ID NO: 100638 - RNA, 19 nt, Homo sapiens
  misc_RNA (1)...(19): siRNA sense strand
gggaucugcccaccaaaug

SEQ ID NO: 100639 - RNA, 19 nt, Homo sapiens
  misc_RNA (1)...(19): siRNA sense strand
caccugacucgacauauga

SEQ ID NO: 100640 - RNA, 19 nt, Homo sapiens
  misc_RNA (1)...(19): siRNA sense strand
ccuaacaaagagacguuua

SEQ ID NO: 100641 - RNA, 19 nt, Homo sapiens
  misc_RNA (1)...(19): siRNA sense strand
caccaaggccuuuguuucu

SEQ ID NO: 100642 - RNA, 19 nt, Homo sapiens
  misc_RNA (1)...(19): siRNA sense strand
uaacaaagagacguuuaag

SEQ ID NO: 100643 - RNA, 19 nt, Homo sapiens
  misc_RNA (1)...(19): siRNA sense strand
caccaaaugaucacaacuu

SEQ ID NO: 100644 - RNA, 19 nt, Homo sapiens
  misc_RNA (1)...(19): siRNA sense strand
gaagagucacaaucaagag

SEQ ID NO: 100645 - RNA, 19 nt, Homo sapiens
  misc_RNA (1)...(19): siRNA sense strand
gaauguggcaagaacuaca

SEQ ID NO: 100646 - RNA, 19 nt, Homo sapiens
  misc_RNA (1)...(19): siRNA sense strand
aagaauguggcaagaacua

SEQ ID NO: 100647 - RNA, 19 nt, Homo sapiens
  misc_RNA (1)...(19): siRNA sense strand
cuacaagugcauacaacaa

SEQ ID NO: 100648 - RNA, 19 nt, Homo sapiens
  misc_RNA (1)...(19): siRNA sense strand
ugauuugucagaaguaaga

SEQ ID NO: 100649 - RNA, 19 nt, Homo sapiens
  misc_RNA (1)...(19): siRNA sense strand
ccggugauguccuuaccuu

SEQ ID NO: 100650 - RNA, 19 nt, Homo sapiens
  misc_RNA (1)...(19): siRNA sense strand
cauaugcaauuucuauucc

SEQ ID NO: 100651 - RNA, 19 nt, Homo sapiens
  misc_RNA (1)...(19): siRNA sense strand
gaagugggcuggaaacuag

SEQ ID NO: 100652 - RNA, 19 nt, Homo sapiens
  misc_RNA (1)...(19): siRNA sense strand
gggaacaccuuucucaaau

SEQ ID NO: 100653 - RNA, 19 nt, Homo sapiens
  misc_RNA (1)...(19): siRNA sense strand
gcaccacccugccucguuu

SEQ ID NO: 100654 - RNA, 19 nt, Homo sapiens
  misc_RNA (1)...(19): siRNA sense strand
gaacaccuuucucaaaugg

SEQ ID NO: 100655 - RNA, 19 nt, Homo sapiens
  misc_RNA (1)...(19): siRNA sense strand
gaagugccaaugugaaauu

SEQ ID NO: 100656 - RNA, 19 nt, Homo sapiens
  misc_RNA (1)...(19): siRNA sense strand
ggaacaccuuucucaaaug

SEQ ID NO: 100657 - RNA, 19 nt, Homo sapiens
  misc_RNA (1)...(19): siRNA sense strand
gcacauggccacccacuca

SEQ ID NO: 100658 - RNA, 19 nt, Homo sapiens
  misc_RNA (1)...(19): siRNA sense strand
caagugaagugccaaugug

SEQ ID NO: 100659 - RNA, 19 nt, Homo sapiens
  misc_RNA (1)...(19): siRNA sense strand
guacugugauaagauguuu

SEQ ID NO: 100660 - RNA, 19 nt, Homo sapiens
  misc_RNA (1)...(19): siRNA sense strand
ggaagugggcuggaaacua

SEQ ID NO: 100661 - RNA, 19 nt, Homo sapiens
  misc_RNA (1)...(19): siRNA sense strand
cugcagaccuuugagagua

SEQ ID NO: 100662 - RNA, 19 nt, Homo sapiens
  misc_RNA (1)...(19): siRNA sense strand
ggccuucccuggcauguug

SEQ ID NO: 100663 - RNA, 19 nt, Homo sapiens
  misc_RNA (1)...(19): siRNA sense strand
gagcagagaccauauagcu

SEQ ID NO: 100664 - RNA, 19 nt, Homo sapiens
  misc_RNA (1)...(19): siRNA sense strand
ggacuucucccaccuacug

SEQ ID NO: 100665 - RNA, 19 nt, Homo sapiens
  misc_RNA (1)...(19): siRNA sense strand
aaguggagguggauaguuu

SEQ ID NO: 100666 - RNA, 19 nt, Homo sapiens
  misc_RNA (1)...(19): siRNA sense strand
gacccaugauccuaacaaa

SEQ ID NO: 100667 - RNA, 19 nt, Homo sapiens
  misc_RNA (1)...(19): siRNA sense strand
ccucugcgcugcuaaugug

SEQ ID NO: 100668 - RNA, 19 nt, Homo sapiens
  misc_RNA (1)...(19): siRNA sense strand
ccagagcagagaccauaua

SEQ ID NO: 100669 - RNA, 19 nt, Homo sapiens
  misc_RNA (1)...(19): siRNA sense strand
ggaggaagugggcuggaaa

SEQ ID NO: 100670 - RNA, 19 nt, Homo sapiens
  misc_RNA (1)...(19): siRNA sense strand
uauguacugugauaagaug

SEQ ID NO: 100671 - RNA, 19 nt, Homo sapiens
  misc_RNA (1)...(19): siRNA sense strand
auacuugcccgacaaauug

SEQ ID NO: 100672 - RNA, 19 nt, Homo sapiens
  misc_RNA (1)...(19): siRNA sense strand
cauacuugcccgacaaauu

SEQ ID NO: 100673 - RNA, 19 nt, Homo sapiens
  misc_RNA (1)...(19): siRNA sense strand
cccaugauccuaacaaaga

SEQ ID NO: 100674 - RNA, 19 nt, Homo sapiens
  misc_RNA (1)...(19): siRNA sense strand
gugaagugccaaugugaaa

SEQ ID NO: 100675 - RNA, 19 nt, Homo sapiens
  misc_RNA (1)...(19): siRNA sense strand
ccucuggaauccucaccua

SEQ ID NO: 100676 - RNA, 19 nt, Homo sapiens
  misc_RNA (1)...(19): siRNA sense strand
agacagagcccguggacau

SEQ ID NO: 100677 - RNA, 19 nt, Homo sapiens
  misc_RNA (1)...(19): siRNA sense strand
ccucauacuugcccgacaa

SEQ ID NO: 100678 - RNA, 19 nt, Homo sapiens
  misc_RNA (1)...(19): siRNA sense strand
cgacaaauugcccaaagug

SEQ ID NO: 100679 - RNA, 19 nt, Homo sapiens
  misc_RNA (1)...(19): siRNA sense strand
cgggaacaccuuucucaaa

SEQ ID NO: 100680 - RNA, 19 nt, Homo sapiens
  misc_RNA (1)...(19): siRNA sense strand
guucuauacucguaaggau

SEQ ID NO: 100681 - RNA, 19 nt, Homo sapiens
  misc_RNA (1)...(19): siRNA sense strand
gcggugaccucagcugcaa

SEQ ID NO: 100682 - RNA, 19 nt, Homo sapiens
  misc_RNA (1)...(19): siRNA sense strand
gaaauuucgggaacaccuu

SEQ ID NO: 100683 - RNA, 19 nt, Homo sapiens
  misc_RNA (1)...(19): siRNA sense strand
gcuuggaucuaccucauac

SEQ ID NO: 100684 - RNA, 19 nt, Homo sapiens
  misc_RNA (1)...(19): siRNA sense strand
guacugugcccagcgguuu

SEQ ID NO: 100685 - RNA, 19 nt, Homo sapiens
  misc_RNA (1)...(19): siRNA sense strand
cggcgguucuauacucgua

SEQ ID NO: 100686 - RNA, 19 nt, Homo sapiens
  misc_RNA (1)...(19): siRNA sense strand
gcagacccaugauccuaac

SEQ ID NO: 100687 - RNA, 19 nt, Homo sapiens
  misc_RNA (1)...(19): siRNA sense strand
aagcucagccucaagauuc

SEQ ID NO: 100688 - RNA, 19 nt, Homo sapiens
  misc_RNA (1)...(19): siRNA sense strand
ggaagccugucucucucau

SEQ ID NO: 100689 - RNA, 19 nt, Homo sapiens
  misc_RNA (1)...(19): siRNA sense strand
cugagugcgguaagaauua

SEQ ID NO: 100690 - RNA, 19 nt, Homo sapiens
  misc_RNA (1)...(19): siRNA sense strand
caagcucagccucaagauu

SEQ ID NO: 100691 - RNA, 19 nt, Homo sapiens
  misc_RNA (1)...(19): siRNA sense strand
gagcuacccucuggaaucc

SEQ ID NO: 100692 - RNA, 19 nt, Homo sapiens
  misc_RNA (1)...(19): siRNA sense strand
uguauguacugugauaaga

SEQ ID NO: 100693 - RNA, 19 nt, Homo sapiens
  misc_RNA (1)...(19): siRNA sense strand
ggaauccucaccuaucucu

SEQ ID NO: 100694 - RNA, 19 nt, Homo sapiens
  misc_RNA (1)...(19): siRNA sense strand
caaagcaggaggaggaagu

SEQ ID NO: 100695 - RNA, 19 nt, Homo sapiens
  misc_RNA (1)...(19): siRNA sense strand
cagcuuggaucuaccucau

SEQ ID NO: 100696 - RNA, 19 nt, Homo sapiens
  misc_RNA (1)...(19): siRNA sense strand
aaccagagcagagaccaua

SEQ ID NO: 100697 - RNA, 19 nt, Homo sapiens
  misc_RNA (1)...(19): siRNA sense strand
cagagcccguggacauguu

SEQ ID NO: 100698 - RNA, 19 nt, Homo sapiens
  misc_RNA (1)...(19): siRNA sense strand
ucaagugaagugccaaugu

SEQ ID NO: 100699 - RNA, 19 nt, Homo sapiens
  misc_RNA (1)...(19): siRNA sense strand
cauggccucucgggacgua

SEQ ID NO: 100700 - RNA, 19 nt, Homo sapiens
  misc_RNA (1)...(19): siRNA sense strand
ccaucaagcauuccaguag

SEQ ID NO: 100701 - RNA, 19 nt, Homo sapiens
  misc_RNA (1)...(19): siRNA sense strand
ccaaaguggagguggauag

SEQ ID NO: 100702 - RNA, 19 nt, Homo sapiens
  misc_RNA (1)...(19): siRNA sense strand
gcucugagugcgguaagaa

SEQ ID NO: 100703 - RNA, 19 nt, Homo sapiens
  misc_RNA (1)...(19): siRNA sense strand
gugccaaugugaaauuucg

SEQ ID NO: 100704 - RNA, 19 nt, Homo sapiens
  misc_RNA (1)...(19): siRNA sense strand
gcccuccacugcucugagu

SEQ ID NO: 100705 - RNA, 19 nt, Homo sapiens
  misc_RNA (1)...(19): siRNA sense strand
ccgacaaauugcccaaagu

SEQ ID NO: 100706 - RNA, 19 nt, Homo sapiens
  misc_RNA (1)...(19): siRNA sense strand
cacacucccuggugcacaa

SEQ ID NO: 100707 - RNA, 19 nt, Homo sapiens
  misc_RNA (1)...(19): siRNA sense strand
ggacauguuaggccuacuc

SEQ ID NO: 100708 - RNA, 19 nt, Homo sapiens
  misc_RNA (1)...(19): siRNA sense strand
acacaggccguaaggacuu

SEQ ID NO: 100709 - RNA, 19 nt, Homo sapiens
  misc_RNA (1)...(19): siRNA sense strand
gcaccugaaggcccacuca

SEQ ID NO: 100710 - RNA, 19 nt, Homo sapiens
  misc_RNA (1)...(19): siRNA sense strand
ugagcuacccucuggaauc

SEQ ID NO: 100711 - RNA, 19 nt, Homo sapiens
  misc_RNA (1)...(19): siRNA sense strand
ccuggaagccugucucucu

SEQ ID NO: 100712 - RNA, 19 nt, Homo sapiens
  misc_RNA (1)...(19): siRNA sense strand
gcucagcucccuccaaaau

SEQ ID NO: 100713 - RNA, 19 nt, Homo sapiens
  misc_RNA (1)...(19): siRNA sense strand
cuccuugccuccugucuuc

SEQ ID NO: 100714 - RNA, 19 nt, Homo sapiens
  misc_RNA (1)...(19): siRNA sense strand
aauaccagcuuggaucuac

SEQ ID NO: 100715 - RNA, 19 nt, Homo sapiens
  misc_RNA (1)...(19): siRNA sense strand
caagcuguauaggcacaug

SEQ ID NO: 100716 - RNA, 19 nt, Homo sapiens
  misc_RNA (1)...(19): siRNA sense strand
guauguacugugauaagau

SEQ ID NO: 100717 - RNA, 19 nt, Homo sapiens
  misc_RNA (1)...(19): siRNA sense strand
caaaguggagguggauagu

SEQ ID NO: 100718 - RNA, 19 nt, Homo sapiens
  misc_RNA (1)...(19): siRNA sense strand
uaugagcuacccucuggaa

SEQ ID NO: 100719 - RNA, 19 nt, Homo sapiens
  misc_RNA (1)...(19): siRNA sense strand
cagagcagagaccauauag

SEQ ID NO: 100720 - RNA, 19 nt, Homo sapiens
  misc_RNA (1)...(19): siRNA sense strand
ucugagugcgguaagaauu

SEQ ID NO: 100721 - RNA, 19 nt, Homo sapiens
  misc_RNA (1)...(19): siRNA sense strand
ccaugauccuaacaaagag

SEQ ID NO: 100722 - RNA, 19 nt, Homo sapiens
  misc_RNA (1)...(19): siRNA sense strand
cuucacgucuggccugagu

SEQ ID NO: 100723 - RNA, 19 nt, Homo sapiens
  misc_RNA (1)...(19): siRNA sense strand
cuggaauccucaccuaucu

SEQ ID NO: 100724 - RNA, 19 nt, Homo sapiens
  misc_RNA (1)...(19): siRNA sense strand
ggauucaagaugcaaagca

SEQ ID NO: 100725 - RNA, 19 nt, Homo sapiens
  misc_RNA (1)...(19): siRNA sense strand
gacagagcccguggacaug

SEQ ID NO: 100726 - RNA, 19 nt, Homo sapiens
  misc_RNA (1)...(19): siRNA sense strand
agaagaagcaccccuguga

SEQ ID NO: 100727 - RNA, 19 nt, Homo sapiens
  misc_RNA (1)...(19): siRNA sense strand
gaaaggaauucaacacuua

SEQ ID NO: 100728 - RNA, 19 nt, Homo sapiens
  misc_RNA (1)...(19): siRNA sense strand
ggaggaacuucaacuauuu

SEQ ID NO: 100729 - RNA, 19 nt, Homo sapiens
  misc_RNA (1)...(19): siRNA sense strand
gaaaugaucaggagagaaa

SEQ ID NO: 100730 - RNA, 19 nt, Homo sapiens
  misc_RNA (1)...(19): siRNA sense strand
ggagucaacccauacauua

SEQ ID NO: 100731 - RNA, 19 nt, Homo sapiens
  misc_RNA (1)...(19): siRNA sense strand
gcacacagcauucuuauuc

SEQ ID NO: 100732 - RNA, 19 nt, Homo sapiens
  misc_RNA (1)...(19): siRNA sense strand
acaaagcccuggagaauga

SEQ ID NO: 100733 - RNA, 19 nt, Homo sapiens
  misc_RNA (1)...(19): siRNA sense strand
gaaagagccaucaauaaga

SEQ ID NO: 100734 - RNA, 19 nt, Homo sapiens
  misc_RNA (1)...(19): siRNA sense strand
gaaaaggacugaacagaau

SEQ ID NO: 100735 - RNA, 19 nt, Homo sapiens
  misc_RNA (1)...(19): siRNA sense strand
ggaagaacaaggccaaauu

SEQ ID NO: 100736 - RNA, 19 nt, Homo sapiens
  misc_RNA (1)...(19): siRNA sense strand
aaagaucggugcccggaua

SEQ ID NO: 100737 - RNA, 19 nt, Homo sapiens
  misc_RNA (1)...(19): siRNA sense strand
gggaagggauuacugcuau

SEQ ID NO: 100738 - RNA, 19 nt, Homo sapiens
  misc_RNA (1)...(19): siRNA sense strand
ggaccuaaaugaaaggaau

SEQ ID NO: 100739 - RNA, 19 nt, Homo sapiens
  misc_RNA (1)...(19): siRNA sense strand
aaagagccaucaauaagaa

SEQ ID NO: 100740 - RNA, 19 nt, Homo sapiens
  misc_RNA (1)...(19): siRNA sense strand
caacaaagauggcaaaauc

SEQ ID NO: 100741 - RNA, 19 nt, Homo sapiens
  misc_RNA (1)...(19): siRNA sense strand
gaacuucaagaccuguuua

SEQ ID NO: 100742 - RNA, 19 nt, Homo sapiens
  misc_RNA (1)...(19): siRNA sense strand
gaaugaagcucugauugca

SEQ ID NO: 100743 - RNA, 19 nt, Homo sapiens
  misc_RNA (1)...(19): siRNA sense strand
ggaggagcuugaagaacua

SEQ ID NO: 100744 - RNA, 19 nt, Homo sapiens
  misc_RNA (1)...(19): siRNA sense strand
gaagcgugcuggacucaug

SEQ ID NO: 100745 - RNA, 19 nt, Homo sapiens
  misc_RNA (1)...(19): siRNA sense strand
caacaaaccuccuuauccu

SEQ ID NO: 100746 - RNA, 19 nt, Homo sapiens
  misc_RNA (1)...(19): siRNA sense strand
agaaugacccugacuguaa

SEQ ID NO: 100747 - RNA, 19 nt, Homo sapiens
  misc_RNA (1)...(19): siRNA sense strand
gagggaacaugaagaagau

SEQ ID NO: 100748 - RNA, 19 nt, Homo sapiens
  misc_RNA (1)...(19): siRNA sense strand
caacauuggugcaucagau

SEQ ID NO: 100749 - RNA, 19 nt, Homo sapiens
  misc_RNA (1)...(19): siRNA sense strand
gaagaacaaggccaaauuc

SEQ ID NO: 100750 - RNA, 19 nt, Homo sapiens
  misc_RNA (1)...(19): siRNA sense strand
gggaggagcuugaagaacu

SEQ ID NO: 100751 - RNA, 19 nt, Homo sapiens
  misc_RNA (1)...(19): siRNA sense strand
aagcaaagauaucagcaaa

SEQ ID NO: 100752 - RNA, 19 nt, Homo sapiens
  misc_RNA (1)...(19): siRNA sense strand
gggcaggaccuaaaugaaa

SEQ ID NO: 100753 - RNA, 19 nt, Homo sapiens
  misc_RNA (1)...(19): siRNA sense strand
gaagcuuucucccgaggaa

SEQ ID NO: 100754 - RNA, 19 nt, Homo sapiens
  misc_RNA (1)...(19): siRNA sense strand
cuacaagaggcauuuaaua

SEQ ID NO: 100755 - RNA, 19 nt, Homo sapiens
  misc_RNA (1)...(19): siRNA sense strand
gaacuaccaucugaccaau

SEQ ID NO: 100756 - RNA, 19 nt, Homo sapiens
  misc_RNA (1)...(19): siRNA sense strand
uggaggaacuucaacuauu

SEQ ID NO: 100757 - RNA, 19 nt, Homo sapiens
  misc_RNA (1)...(19): siRNA sense strand
ggagggaacaugaagaaga

SEQ ID NO: 100758 - RNA, 19 nt, Homo sapiens
  misc_RNA (1)...(19): siRNA sense strand
caaggaagagagaacauuu

SEQ ID NO: 100759 - RNA, 19 nt, Homo sapiens
  misc_RNA (1)...(19): siRNA sense strand
gaacuacaagaggcauuua

SEQ ID NO: 100760 - RNA, 19 nt, Homo sapiens
  misc_RNA (1)...(19): siRNA sense strand
cgauaugaauuuacuggaa

SEQ ID NO: 100761 - RNA, 19 nt, Homo sapiens
  misc_RNA (1)...(19): siRNA sense strand
aaacaaagcccuggagaau

SEQ ID NO: 100762 - RNA, 19 nt, Homo sapiens
  misc_RNA (1)...(19): siRNA sense strand
gcugaacaaugcuaaauac

SEQ ID NO: 100763 - RNA, 19 nt, Homo sapiens
  misc_RNA (1)...(19): siRNA sense strand
gagagaacauuucggaacu

SEQ ID NO: 100764 - RNA, 19 nt, Homo sapiens
  misc_RNA (1)...(19): siRNA sense strand
gaccugccauugccauuga

SEQ ID NO: 100765 - RNA, 19 nt, Homo sapiens
  misc_RNA (1)...(19): siRNA sense strand
guacaguggucaacauugg

SEQ ID NO: 100766 - RNA, 19 nt, Homo sapiens
  misc_RNA (1)...(19): siRNA sense strand
gaaugacccugacuguaag

SEQ ID NO: 100767 - RNA, 19 nt, Homo sapiens
  misc_RNA (1)...(19): siRNA sense strand
ggaagggauuacugcuauu

SEQ ID NO: 100768 - RNA, 19 nt, Homo sapiens
  misc_RNA (1)...(19): siRNA sense strand
caaaugcaguucgucaaga

SEQ ID NO: 100769 - RNA, 19 nt, Homo sapiens
  misc_RNA (1)...(19): siRNA sense strand
gaugagaagguacacauug

SEQ ID NO: 100770 - RNA, 19 nt, Homo sapiens
  misc_RNA (1)...(19): siRNA sense strand
gcacaagccgaauaauaau

SEQ ID NO: 100771 - RNA, 19 nt, Homo sapiens
  misc_RNA (1)...(19): siRNA sense strand
caacuucagccaagacauu

SEQ ID NO: 100772 - RNA, 19 nt, Homo sapiens
  misc_RNA (1)...(19): siRNA sense strand
aaaugaaggugaggaacua

SEQ ID NO: 100773 - RNA, 19 nt, Homo sapiens
  misc_RNA (1)...(19): siRNA sense strand
ugaaagagccaucaauaag

SEQ ID NO: 100774 - RNA, 19 nt, Homo sapiens
  misc_RNA (1)...(19): siRNA sense strand
uuucggaacuggaugaauu

SEQ ID NO: 100775 - RNA, 19 nt, Homo sapiens
  misc_RNA (1)...(19): siRNA sense strand
ccauugaccuuucaggaau

SEQ ID NO: 100776 - RNA, 19 nt, Homo sapiens
  misc_RNA (1)...(19): siRNA sense strand
gacgguguuugcaugcuua

SEQ ID NO: 100777 - RNA, 19 nt, Homo sapiens
  misc_RNA (1)...(19): siRNA sense strand
gaacauuucggaacuggau

SEQ ID NO: 100778 - RNA, 19 nt, Homo sapiens
  misc_RNA (1)...(19): siRNA sense strand
gaagaguuugugucacuaa

SEQ ID NO: 100779 - RNA, 19 nt, Homo sapiens
  misc_RNA (1)...(19): siRNA sense strand
ggaaggagagagcaaggaa

SEQ ID NO: 100780 - RNA, 19 nt, Homo sapiens
  misc_RNA (1)...(19): siRNA sense strand
ggucaacauuggugcauca

SEQ ID NO: 100781 - RNA, 19 nt, Homo sapiens
  misc_RNA (1)...(19): siRNA sense strand
ccaugaaucccaaugauga

SEQ ID NO: 100782 - RNA, 19 nt, Homo sapiens
  misc_RNA (1)...(19): siRNA sense strand
gagaaugacccugacugua

SEQ ID NO: 100783 - RNA, 19 nt, Homo sapiens
  misc_RNA (1)...(19): siRNA sense strand
aaaccuagcucugaauucu

SEQ ID NO: 100784 - RNA, 19 nt, Homo sapiens
  misc_RNA (1)...(19): siRNA sense strand
ucaagaagcagauaaacug

SEQ ID NO: 100785 - RNA, 19 nt, Homo sapiens
  misc_RNA (1)...(19): siRNA sense strand
ggaauuaaugagacaaaug

SEQ ID NO: 100786 - RNA, 19 nt, Homo sapiens
  misc_RNA (1)...(19): siRNA sense strand
gaacuagaggagcugauga

SEQ ID NO: 100787 - RNA, 19 nt, Homo sapiens
  misc_RNA (1)...(19): siRNA sense strand
cuucaacuauuuccaguga

SEQ ID NO: 100788 - RNA, 19 nt, Homo sapiens
  misc_RNA (1)...(19): siRNA sense strand
ugcacaagccgaauaauaa

SEQ ID NO: 100789 - RNA, 19 nt, Homo sapiens
  misc_RNA (1)...(19): siRNA sense strand
gcaaggaagagagaacauu

SEQ ID NO: 100790 - RNA, 19 nt, Homo sapiens
  misc_RNA (1)...(19): siRNA sense strand
gcaaaaugaucaacuuauc

SEQ ID NO: 100791 - RNA, 19 nt, Homo sapiens
  misc_RNA (1)...(19): siRNA sense strand
gagaaaacuuaucugauga

SEQ ID NO: 100792 - RNA, 19 nt, Homo sapiens
  misc_RNA (1)...(19): siRNA sense strand
ggagagagcaaggaagaga

SEQ ID NO: 100793 - RNA, 19 nt, Homo sapiens
  misc_RNA (1)...(19): siRNA sense strand
cagauaaacugggcugcaa

SEQ ID NO: 100794 - RNA, 19 nt, Homo sapiens
  misc_RNA (1)...(19): siRNA sense strand
uucaagaccuguuuaagga

SEQ ID NO: 100795 - RNA, 19 nt, Homo sapiens
  misc_RNA (1)...(19): siRNA sense strand
aaaugcaguucgucaagaa

SEQ ID NO: 100796 - RNA, 19 nt, Homo sapiens
  misc_RNA (1)...(19): siRNA sense strand
gaagaagauugaaaacugu

SEQ ID NO: 100797 - RNA, 19 nt, Homo sapiens
  misc_RNA (1)...(19): siRNA sense strand
gaagggauuacugcuauug

SEQ ID NO: 100798 - RNA, 19 nt, Homo sapiens
  misc_RNA (1)...(19): siRNA sense strand
cagauacaauugaugaaag

SEQ ID NO: 100799 - RNA, 19 nt, Homo sapiens
  misc_RNA (1)...(19): siRNA sense strand
ggacugaacagaauaaaau

SEQ ID NO: 100800 - RNA, 19 nt, Homo sapiens
  misc_RNA (1)...(19): siRNA sense strand
gaacaugaagaagauugaa

SEQ ID NO: 100801 - RNA, 19 nt, Homo sapiens
  misc_RNA (1)...(19): siRNA sense strand
ggaaugaagcucugauugc

SEQ ID NO: 100802 - RNA, 19 nt, Homo sapiens
  misc_RNA (1)...(19): siRNA sense strand
gagucaacccauacauuaa

SEQ ID NO: 100803 - RNA, 19 nt, Homo sapiens
  misc_RNA (1)...(19): siRNA sense strand
ggcaggaccuaaaugaaag

SEQ ID NO: 100804 - RNA, 19 nt, Homo sapiens
  misc_RNA (1)...(19): siRNA sense strand
ggagaaugacccugacugu

SEQ ID NO: 100805 - RNA, 19 nt, Homo sapiens
  misc_RNA (1)...(19): siRNA sense strand
ggaaaaggacugaacagaa

SEQ ID NO: 100806 - RNA, 19 nt, Homo sapiens
  misc_RNA (1)...(19): siRNA sense strand
agagaaaacuuaucugaug

SEQ ID NO: 100807 - RNA, 19 nt, Homo sapiens
  misc_RNA (1)...(19): siRNA sense strand
ggaacaugaagaagauuga

SEQ ID NO: 100808 - RNA, 19 nt, Homo sapiens
  misc_RNA (1)...(19): siRNA sense strand
caggcaauccuaaacuuaa

SEQ ID NO: 100809 - RNA, 19 nt, Homo sapiens
  misc_RNA (1)...(19): siRNA sense strand
ucaggcaauccuaaacuua

SEQ ID NO: 100810 - RNA, 19 nt, Homo sapiens
  misc_RNA (1)...(19): siRNA sense strand
ugcaucagaucucaaagaa

SEQ ID NO: 100811 - RNA, 19 nt, Homo sapiens
  misc_RNA (1)...(19): siRNA sense strand
uaaacaaagcccuggagaa

SEQ ID NO: 100812 - RNA, 19 nt, Homo sapiens
  misc_RNA (1)...(19): siRNA sense strand
gaucggugcccggauauau

SEQ ID NO: 100813 - RNA, 19 nt, Homo sapiens
  misc_RNA (1)...(19): siRNA sense strand
gaggacaagcugaacaaug

SEQ ID NO: 100814 - RNA, 19 nt, Homo sapiens
  misc_RNA (1)...(19): siRNA sense strand
agacuucuauuuccagcuu

SEQ ID NO: 100815 - RNA, 19 nt, Homo sapiens
  misc_RNA (1)...(19): siRNA sense strand
gagaagguacacauugaau

SEQ ID NO: 100816 - RNA, 19 nt, Homo sapiens
  misc_RNA (1)...(19): siRNA sense strand
caguggaacuugggaagaa

SEQ ID NO: 100817 - RNA, 19 nt, Homo sapiens
  misc_RNA (1)...(19): siRNA sense strand
cugcacaagccgaauaaua

SEQ ID NO: 100818 - RNA, 19 nt, Homo sapiens
  misc_RNA (1)...(19): siRNA sense strand
gugcuggacucaugcuuca

SEQ ID NO: 100819 - RNA, 19 nt, Homo sapiens
  misc_RNA (1)...(19): siRNA sense strand
ugagacaaaugaccugaag

SEQ ID NO: 100820 - RNA, 19 nt, Homo sapiens
  misc_RNA (1)...(19): siRNA sense strand
ugggugaacuaccaucuga

SEQ ID NO: 100821 - RNA, 19 nt, Homo sapiens
  misc_RNA (1)...(19): siRNA sense strand
uggcagaucaucaaaguug

SEQ ID NO: 100822 - RNA, 19 nt, Homo sapiens
  misc_RNA (1)...(19): siRNA sense strand
uaacaagagggaagggauu

SEQ ID NO: 100823 - RNA, 19 nt, Homo sapiens
  misc_RNA (1)...(19): siRNA sense strand
gaucaggagagaaaacuua

SEQ ID NO: 100824 - RNA, 19 nt, Homo sapiens
  misc_RNA (1)...(19): siRNA sense strand
guuuaccuguccuagauuu

SEQ ID NO: 100825 - RNA, 19 nt, Homo sapiens
  misc_RNA (1)...(19): siRNA sense strand
uauggcagcugaugagaag

SEQ ID NO: 100826 - RNA, 19 nt, Homo sapiens
  misc_RNA (1)...(19): siRNA sense strand
ugaagaagauugaaaacug

SEQ ID NO: 100827 - RNA, 19 nt, Homo sapiens
  misc_RNA (1)...(19): siRNA sense strand
gauauaagcuccgagagaa

SEQ ID NO: 100828 - RNA, 19 nt, Homo sapiens
  misc_RNA (1)...(19): siRNA sense strand
ggaguucaaagcccaauuu

SEQ ID NO: 100829 - RNA, 19 nt, Homo sapiens
  misc_RNA (1)...(19): siRNA sense strand
ucaagaccaucaaggugua

SEQ ID NO: 100830 - RNA, 19 nt, Homo sapiens
  misc_RNA (1)...(19): siRNA sense strand
ccagauguuuguguucuuu

SEQ ID NO: 100831 - RNA, 19 nt, Homo sapiens
  misc_RNA (1)...(19): siRNA sense strand
cagagcugcuggcccgaua

SEQ ID NO: 100832 - RNA, 19 nt, Homo sapiens
  misc_RNA (1)...(19): siRNA sense strand
gagcugcuggcccgauaua

SEQ ID NO: 100833 - RNA, 19 nt, Homo sapiens
  misc_RNA (1)...(19): siRNA sense strand
ccaaggaggaggugacaga

SEQ ID NO: 100834 - RNA, 19 nt, Homo sapiens
  misc_RNA (1)...(19): siRNA sense strand
ccuaccggcuggugcagua

SEQ ID NO: 100835 - RNA, 19 nt, Homo sapiens
  misc_RNA (1)...(19): siRNA sense strand
gaccagauguuuguguucu

SEQ ID NO: 100836 - RNA, 19 nt, Homo sapiens
  misc_RNA (1)...(19): siRNA sense strand
gcgcgcuacuuugggauaa

SEQ ID NO: 100837 - RNA, 19 nt, Homo sapiens
  misc_RNA (1)...(19): siRNA sense strand
cgauauaagcuccgagaga

SEQ ID NO: 100838 - RNA, 19 nt, Homo sapiens
  misc_RNA (1)...(19): siRNA sense strand
agaaccagcugcccaggau

SEQ ID NO: 100839 - RNA, 19 nt, Homo sapiens
  misc_RNA (1)...(19): siRNA sense strand
gcaucaagaccaucaaggu

SEQ ID NO: 100840 - RNA, 19 nt, Homo sapiens
  misc_RNA (1)...(19): siRNA sense strand
gugggcagguggugaagau

SEQ ID NO: 100841 - RNA, 19 nt, Homo sapiens
  misc_RNA (1)...(19): siRNA sense strand
agacguaccggcucuggaa

SEQ ID NO: 100842 - RNA, 19 nt, Homo sapiens
  misc_RNA (1)...(19): siRNA sense strand
ccaccgaccagauguuugu

SEQ ID NO: 100843 - RNA, 19 nt, Homo sapiens
  misc_RNA (1)...(19): siRNA sense strand
guacauccuggagcaguuu

SEQ ID NO: 100844 - RNA, 19 nt, Homo sapiens
  misc_RNA (1)...(19): siRNA sense strand
ccgaccagauguuuguguu

SEQ ID NO: 100845 - RNA, 19 nt, Homo sapiens
  misc_RNA (1)...(19): siRNA sense strand
ucacggagcacgagcuagu

SEQ ID NO: 100846 - RNA, 19 nt, Homo sapiens
  misc_RNA (1)...(19): siRNA sense strand
gggcagguggugaagauca

SEQ ID NO: 100847 - RNA, 19 nt, Homo sapiens
  misc_RNA (1)...(19): siRNA sense strand
gcaggaggagaacaucaca

SEQ ID NO: 100848 - RNA, 19 nt, Homo sapiens
  misc_RNA (1)...(19): siRNA sense strand
caucacggagcacgagcua

SEQ ID NO: 100849 - RNA, 19 nt, Homo sapiens
  misc_RNA (1)...(19): siRNA sense strand
gcaugcaggaggagaacau

SEQ ID NO: 100850 - RNA, 19 nt, Homo sapiens
  misc_RNA (1)...(19): siRNA sense strand
gugagacggcuggcaggua

SEQ ID NO: 100851 - RNA, 19 nt, Homo sapiens
  misc_RNA (1)...(19): siRNA sense strand
gagauccgcuuaaagauug

SEQ ID NO: 100852 - RNA, 19 nt, Homo sapiens
  misc_RNA (1)...(19): siRNA sense strand
gaugagauccgcuuaaaga

SEQ ID NO: 100853 - RNA, 19 nt, Homo sapiens
  misc_RNA (1)...(19): siRNA sense strand
gaaguauggcuuuguaauu

SEQ ID NO: 100854 - RNA, 19 nt, Homo sapiens
  misc_RNA (1)...(19): siRNA sense strand
gacaauggaugaggauauu

SEQ ID NO: 100855 - RNA, 19 nt, Homo sapiens
  misc_RNA (1)...(19): siRNA sense strand
cuucagagauggaguuuga

SEQ ID NO: 100856 - RNA, 19 nt, Homo sapiens
  misc_RNA (1)...(19): siRNA sense strand
ggaugaggauauugugauu

SEQ ID NO: 100857 - RNA, 19 nt, Homo sapiens
  misc_RNA (1)...(19): siRNA sense strand
guuggacucuucacagaaa

SEQ ID NO: 100858 - RNA, 19 nt, Homo sapiens
  misc_RNA (1)...(19): siRNA sense strand
gaaauugggcccaugucuu

SEQ ID NO: 100859 - RNA, 19 nt, Homo sapiens
  misc_RNA (1)...(19): siRNA sense strand
gagauggaguuugauccua

SEQ ID NO: 100860 - RNA, 19 nt, Homo sapiens
  misc_RNA (1)...(19): siRNA sense strand
gcccaugucuugcuucauc

SEQ ID NO: 100861 - RNA, 19 nt, Homo sapiens
  misc_RNA (1)...(19): siRNA sense strand
ggacccguguggacaagaa

SEQ ID NO: 100862 - RNA, 19 nt, Homo sapiens
  misc_RNA (1)...(19): siRNA sense strand
gacauuccaucccuucaga

SEQ ID NO: 100863 - RNA, 19 nt, Homo sapiens
  misc_RNA (1)...(19): siRNA sense strand
aaguauggcuuuguaauug

SEQ ID NO: 100864 - RNA, 19 nt, Homo sapiens
  misc_RNA (1)...(19): siRNA sense strand
gcucccugauggacgauua

SEQ ID NO: 100865 - RNA, 19 nt, Homo sapiens
  misc_RNA (1)...(19): siRNA sense strand
ggccgaggcuuuguccuuu

SEQ ID NO: 100866 - RNA, 19 nt, Homo sapiens
  misc_RNA (1)...(19): siRNA sense strand
ggaaguauggcuuuguaau

SEQ ID NO: 100867 - RNA, 19 nt, Homo sapiens
  misc_RNA (1)...(19): siRNA sense strand
agauggaguuugauccuaa

SEQ ID NO: 100868 - RNA, 19 nt, Homo sapiens
  misc_RNA (1)...(19): siRNA sense strand
ucaacacggugaagcagaa

SEQ ID NO: 100869 - RNA, 19 nt, Homo sapiens
  misc_RNA (1)...(19): siRNA sense strand
gccgaggcuuuguccuuua

SEQ ID NO: 100870 - RNA, 19 nt, Homo sapiens
  misc_RNA (1)...(19): siRNA sense strand
ucacucaggucaacaaggu

SEQ ID NO: 100871 - RNA, 19 nt, Homo sapiens
  misc_RNA (1)...(19): siRNA sense strand
ggacgaugagauccgcuua

SEQ ID NO: 100872 - RNA, 19 nt, Homo sapiens
  misc_RNA (1)...(19): siRNA sense strand
ggucguggaugcuguuguc

SEQ ID NO: 100873 - RNA, 19 nt, Homo sapiens
  misc_RNA (1)...(19): siRNA sense strand
ugagauccgcuuaaagauu

SEQ ID NO: 100874 - RNA, 19 nt, Homo sapiens
  misc_RNA (1)...(19): siRNA sense strand
aaauugggcccaugucuug

SEQ ID NO: 100875 - RNA, 19 nt, Homo sapiens
  misc_RNA (1)...(19): siRNA sense strand
acgaugagauccgcuuaaa

SEQ ID NO: 100876 - RNA, 19 nt, Homo sapiens
  misc_RNA (1)...(19): siRNA sense strand
agggaaguauggcuuugua

SEQ ID NO: 100877 - RNA, 19 nt, Homo sapiens
  misc_RNA (1)...(19): siRNA sense strand
guuacaagacaauggauga

SEQ ID NO: 100878 - RNA, 19 nt, Homo sapiens
  misc_RNA (1)...(19): siRNA sense strand
ccugauggacgauuacuug

SEQ ID NO: 100879 - RNA, 19 nt, Homo sapiens
  misc_RNA (1)...(19): siRNA sense strand
ggacucuucacagaaauug

SEQ ID NO: 100880 - RNA, 19 nt, Homo sapiens
  misc_RNA (1)...(19): siRNA sense strand
ccgaggcuuuguccuuuau

SEQ ID NO: 100881 - RNA, 19 nt, Homo sapiens
  misc_RNA (1)...(19): siRNA sense strand
ugauucagcaggacgauga

SEQ ID NO: 100882 - RNA, 19 nt, Homo sapiens
  misc_RNA (1)...(19): siRNA sense strand
augaggauauugugauuca

SEQ ID NO: 100883 - RNA, 19 nt, Homo sapiens
  misc_RNA (1)...(19): siRNA sense strand
acuccaacccaccauguua

SEQ ID NO: 100884 - RNA, 19 nt, Homo sapiens
  misc_RNA (1)...(19): siRNA sense strand
gggaaguauggcuuuguaa

SEQ ID NO: 100885 - RNA, 19 nt, Homo sapiens
  misc_RNA (1)...(19): siRNA sense strand
gacgaugagauccgcuuaa

SEQ ID NO: 100886 - RNA, 19 nt, Homo sapiens
  misc_RNA (1)...(19): siRNA sense strand
uggaugcuguugucacuca

SEQ ID NO: 100887 - RNA, 19 nt, Homo sapiens
  misc_RNA (1)...(19): siRNA sense strand
gggcccaugucuugcuuca

SEQ ID NO: 100888 - RNA, 19 nt, Homo sapiens
  misc_RNA (1)...(19): siRNA sense strand
agacaauggaugaggauau

SEQ ID NO: 100889 - RNA, 19 nt, Homo sapiens
  misc_RNA (1)...(19): siRNA sense strand
caacccaccauguuacaag

SEQ ID NO: 100890 - RNA, 19 nt, Homo sapiens
  misc_RNA (1)...(19): siRNA sense strand
uaacuccaacccaccaugu

SEQ ID NO: 100891 - RNA, 19 nt, Homo sapiens
  misc_RNA (1)...(19): siRNA sense strand
uaauugcugucaccaccau

SEQ ID NO: 100892 - RNA, 19 nt, Homo sapiens
  misc_RNA (1)...(19): siRNA sense strand
ggaggucguggaugcuguu

SEQ ID NO: 100893 - RNA, 19 nt, Homo sapiens
  misc_RNA (1)...(19): siRNA sense strand
gauggaguuugauccuaac

SEQ ID NO: 100894 - RNA, 19 nt, Homo sapiens
  misc_RNA (1)...(19): siRNA sense strand
ugcuucaucucucgacauu

SEQ ID NO: 100895 - RNA, 19 nt, Homo sapiens
  misc_RNA (1)...(19): siRNA sense strand
uauuggugcuggugugauc

SEQ ID NO: 100896 - RNA, 19 nt, Homo sapiens
  misc_RNA (1)...(19): siRNA sense strand
acagggaaguauggcuuug

SEQ ID NO: 100897 - RNA, 19 nt, Homo sapiens
  misc_RNA (1)...(19): siRNA sense strand
caagacaauggaugaggau

SEQ ID NO: 100898 - RNA, 19 nt, Homo sapiens
  misc_RNA (1)...(19): siRNA sense strand
ccaccauguuacaagacaa

SEQ ID NO: 100899 - RNA, 19 nt, Homo sapiens
  misc_RNA (1)...(19): siRNA sense strand
uccuuuauccaguuaagua

SEQ ID NO: 100900 - RNA, 19 nt, Homo sapiens
  misc_RNA (1)...(19): siRNA sense strand
cuucaucucucgacauucc

SEQ ID NO: 100901 - RNA, 19 nt, Homo sapiens
  misc_RNA (1)...(19): siRNA sense strand
cauguuacaagacaaugga

SEQ ID NO: 100902 - RNA, 19 nt, Homo sapiens
  misc_RNA (1)...(19): siRNA sense strand
uaaaugaacccaagaagaa

SEQ ID NO: 100903 - RNA, 19 nt, Homo sapiens
  misc_RNA (1)...(19): siRNA sense strand
ggacuugacuccuguugug

SEQ ID NO: 100904 - RNA, 19 nt, Homo sapiens
  misc_RNA (1)...(19): siRNA sense strand
gaagaaauaugcaaaagag

SEQ ID NO: 100905 - RNA, 19 nt, Homo sapiens
  misc_RNA (1)...(19): siRNA sense strand
guaaaugaacccaagaaga

SEQ ID NO: 100906 - RNA, 19 nt, Homo sapiens
  misc_RNA (1)...(19): siRNA sense strand
cuauaacccugaagcugua

SEQ ID NO: 100907 - RNA, 19 nt, Homo sapiens
  misc_RNA (1)...(19): siRNA sense strand
acaccuuccuugcugauuu

SEQ ID NO: 100908 - RNA, 19 nt, Homo sapiens
  misc_RNA (1)...(19): siRNA sense strand
gcaggcgcaugcagaacuu

SEQ ID NO: 100909 - RNA, 19 nt, Homo sapiens
  misc_RNA (1)...(19): siRNA sense strand
cgucagcagugaacaugaa

SEQ ID NO: 100910 - RNA, 19 nt, Homo sapiens
  misc_RNA (1)...(19): siRNA sense strand
cccugaagcuguaaaugaa

SEQ ID NO: 100911 - RNA, 19 nt, Homo sapiens
  misc_RNA (1)...(19): siRNA sense strand
ccaagaagaagaaauaugc

SEQ ID NO: 100912 - RNA, 19 nt, Homo sapiens
  misc_RNA (1)...(19): siRNA sense strand
caccaaacccugcagucua

SEQ ID NO: 100913 - RNA, 19 nt, Homo sapiens
  misc_RNA (1)...(19): siRNA sense strand
ggagcaggcgcaugcagaa

SEQ ID NO: 100914 - RNA, 19 nt, Homo sapiens
  misc_RNA (1)...(19): siRNA sense strand
caaacccugcagucuauaa

SEQ ID NO: 100915 - RNA, 19 nt, Homo sapiens
  misc_RNA (1)...(19): siRNA sense strand
caugaacccugcaccaaac

SEQ ID NO: 100916 - RNA, 19 nt, Homo sapiens
  misc_RNA (1)...(19): siRNA sense strand
accaaacccugcagucuau

SEQ ID NO: 100917 - RNA, 19 nt, Homo sapiens
  misc_RNA (1)...(19): siRNA sense strand
aacccaagaagaagaaaua

SEQ ID NO: 100918 - RNA, 19 nt, Homo sapiens
  misc_RNA (1)...(19): siRNA sense strand
gcaguggucccagucaaga

SEQ ID NO: 100919 - RNA, 19 nt, Homo sapiens
  misc_RNA (1)...(19): siRNA sense strand
gaacccaagaagaagaaau

SEQ ID NO: 100920 - RNA, 19 nt, Homo sapiens
  misc_RNA (1)...(19): siRNA sense strand
caccuuccuugcugauuug

SEQ ID NO: 100921 - RNA, 19 nt, Homo sapiens
  misc_RNA (1)...(19): siRNA sense strand
gcaccaaacccugcagucu

SEQ ID NO: 100922 - RNA, 19 nt, Homo sapiens
  misc_RNA (1)...(19): siRNA sense strand
ggcaagaagcccacaccuu

SEQ ID NO: 100923 - RNA, 19 nt, Homo sapiens
  misc_RNA (1)...(19): siRNA sense strand
acaugaacccugcaccaaa

SEQ ID NO: 100924 - RNA, 19 nt, Homo sapiens
  misc_RNA (1)...(19): siRNA sense strand
augcagaacuuugccuuca

SEQ ID NO: 100925 - RNA, 19 nt, Homo sapiens
  misc_RNA (1)...(19): siRNA sense strand
acccugaagcuguaaauga

SEQ ID NO: 100926 - RNA, 19 nt, Homo sapiens
  misc_RNA (1)...(19): siRNA sense strand
guugugccgucagcaguga

SEQ ID NO: 100927 - RNA, 19 nt, Homo sapiens
  misc_RNA (1)...(19): siRNA sense strand
caagaagaagaaauaugca

SEQ ID NO: 100928 - RNA, 19 nt, Homo sapiens
  misc_RNA (1)...(19): siRNA sense strand
gaagagaguuuuccugaua

SEQ ID NO: 100929 - RNA, 19 nt, Homo sapiens
  misc_RNA (1)...(19): siRNA sense strand
gagaaacccugauuugugu

SEQ ID NO: 100930 - RNA, 19 nt, Homo sapiens
  misc_RNA (1)...(19): siRNA sense strand
caaaggagacaaacuaauu

SEQ ID NO: 100931 - RNA, 19 nt, Homo sapiens
  misc_RNA (1)...(19): siRNA sense strand
uaaaugaacccaagaagaa

SEQ ID NO: 100932 - RNA, 19 nt, Homo sapiens
  misc_RNA (1)...(19): siRNA sense strand
gagacaaacuaauugagaa

SEQ ID NO: 100933 - RNA, 19 nt, Homo sapiens
  misc_RNA (1)...(19): siRNA sense strand
ggacuugacuccuguugug

SEQ ID NO: 100934 - RNA, 19 nt, Homo sapiens
  misc_RNA (1)...(19): siRNA sense strand
ggagaaacccugauuugug

SEQ ID NO: 100935 - RNA, 19 nt, Homo sapiens
  misc_RNA (1)...(19): siRNA sense strand
ggagggaaaucuggacauu

SEQ ID NO: 100936 - RNA, 19 nt, Homo sapiens
  misc_RNA (1)...(19): siRNA sense strand
ggagacaaacuaauugaga

SEQ ID NO: 100937 - RNA, 19 nt, Homo sapiens
  misc_RNA (1)...(19): siRNA sense strand
gaagaaauaugcaaaagag

SEQ ID NO: 100938 - RNA, 19 nt, Homo sapiens
  misc_RNA (1)...(19): siRNA sense strand
guaaaugaacccaagaaga

SEQ ID NO: 100939 - RNA, 19 nt, Homo sapiens
  misc_RNA (1)...(19): siRNA sense strand
aagcggauuucuacccuua

SEQ ID NO: 100940 - RNA, 19 nt, Homo sapiens
  misc_RNA (1)...(19): siRNA sense strand
ggaaaucuggacauucaaa

SEQ ID NO: 100941 - RNA, 19 nt, Homo sapiens
  misc_RNA (1)...(19): siRNA sense strand
cuauaacccugaagcugua

SEQ ID NO: 100942 - RNA, 19 nt, Homo sapiens
  misc_RNA (1)...(19): siRNA sense strand
gaccaaagaggaagaggaa

SEQ ID NO: 100943 - RNA, 19 nt, Homo sapiens
  misc_RNA (1)...(19): siRNA sense strand
ccacaagcaucugaagaga

SEQ ID NO: 100944 - RNA, 19 nt, Homo sapiens
  misc_RNA (1)...(19): siRNA sense strand
gagaaacugauuauugaug

SEQ ID NO: 100945 - RNA, 19 nt, Homo sapiens
  misc_RNA (1)...(19): siRNA sense strand
ccugauagaucucaacagu

SEQ ID NO: 100946 - RNA, 19 nt, Homo sapiens
  misc_RNA (1)...(19): siRNA sense strand
gcucuagccucccgcuguu

SEQ ID NO: 100947 - RNA, 19 nt, Homo sapiens
  misc_RNA (1)...(19): siRNA sense strand
acaccuuccuugcugauuu

SEQ ID NO: 100948 - RNA, 19 nt, Homo sapiens
  misc_RNA (1)...(19): siRNA sense strand
acaagcaucugaagagagu

SEQ ID NO: 100949 - RNA, 19 nt, Homo sapiens
  misc_RNA (1)...(19): siRNA sense strand
agggaaaucuggacauuca

SEQ ID NO: 100950 - RNA, 19 nt, Homo sapiens
  misc_RNA (1)...(19): siRNA sense strand
ccaaagaggaagaggaaga

SEQ ID NO: 100951 - RNA, 19 nt, Homo sapiens
  misc_RNA (1)...(19): siRNA sense strand
cgucagcagugaacaugaa

SEQ ID NO: 100952 - RNA, 19 nt, Homo sapiens
  misc_RNA (1)...(19): siRNA sense strand
gcaggcgcaugcagaacuu

SEQ ID NO: 100953 - RNA, 19 nt, Homo sapiens
  misc_RNA (1)...(19): siRNA sense strand
uuucuacccuuaccauuga

SEQ ID NO: 100954 - RNA, 19 nt, Homo sapiens
  misc_RNA (1)...(19): siRNA sense strand
caaacuaauugagaaacug

SEQ ID NO: 100955 - RNA, 19 nt, Homo sapiens
  misc_RNA (1)...(19): siRNA sense strand
ccaagaagaagaaauaugc

SEQ ID NO: 100956 - RNA, 19 nt, Homo sapiens
  misc_RNA (1)...(19): siRNA sense strand
cccugaagcuguaaaugaa

SEQ ID NO: 100957 - RNA, 19 nt, Homo sapiens
  misc_RNA (1)...(19): siRNA sense strand
gaaacccugauuuguguga

SEQ ID NO: 100958 - RNA, 19 nt, Homo sapiens
  misc_RNA (1)...(19): siRNA sense strand
gaaacugauuauugaugag

SEQ ID NO: 100959 - RNA, 19 nt, Homo sapiens
  misc_RNA (1)...(19): siRNA sense strand
guucaacacugcccacaac

SEQ ID NO: 100960 - RNA, 19 nt, Homo sapiens
  misc_RNA (1)...(19): siRNA sense strand
caaagaggaagaggaagaa

SEQ ID NO: 100961 - RNA, 19 nt, Homo sapiens
  misc_RNA (1)...(19): siRNA sense strand
agucaaaggagacaaacua

SEQ ID NO: 100962 - RNA, 19 nt, Homo sapiens
  misc_RNA (1)...(19): siRNA sense strand
caccaaacccugcagucua

SEQ ID NO: 100963 - RNA, 19 nt, Homo sapiens
  misc_RNA (1)...(19): siRNA sense strand
gaucaucaacccagaggau

SEQ ID NO: 100964 - RNA, 19 nt, Homo sapiens
  misc_RNA (1)...(19): siRNA sense strand
caacacugcccacaacaag

SEQ ID NO: 100965 - RNA, 19 nt, Homo sapiens
  misc_RNA (1)...(19): siRNA sense strand
aaaggagacaaacuaauug

SEQ ID NO: 100966 - RNA, 19 nt, Homo sapiens
  misc_RNA (1)...(19): siRNA sense strand
caaacccugcagucuauaa

SEQ ID NO: 100967 - RNA, 19 nt, Homo sapiens
  misc_RNA (1)...(19): siRNA sense strand
ggagcaggcgcaugcagaa

SEQ ID NO: 100968 - RNA, 19 nt, Homo sapiens
  misc_RNA (1)...(19): siRNA sense strand
ugugugacuuuaccauuga

SEQ ID NO: 100969 - RNA, 19 nt, Homo sapiens
  misc_RNA (1)...(19): siRNA sense strand
gggagaaacccugauuugu

SEQ ID NO: 100970 - RNA, 19 nt, Homo sapiens
  misc_RNA (1)...(19): siRNA sense strand
accaaacccugcagucuau

SEQ ID NO: 100971 - RNA, 19 nt, Homo sapiens
  misc_RNA (1)...(19): siRNA sense strand
caugaacccugcaccaaac

SEQ ID NO: 100972 - RNA, 19 nt, Homo sapiens
  misc_RNA (1)...(19): siRNA sense strand
gacauucaaagaccaaaga

SEQ ID NO: 100973 - RNA, 19 nt, Homo sapiens
  misc_RNA (1)...(19): siRNA sense strand
aacccaagaagaagaaaua

SEQ ID NO: 100974 - RNA, 19 nt, Homo sapiens
  misc_RNA (1)...(19): siRNA sense strand
gcaguggucccagucaaga

SEQ ID NO: 100975 - RNA, 19 nt, Homo sapiens
  misc_RNA (1)...(19): siRNA sense strand
ccauugaccaccagucuug

SEQ ID NO: 100976 - RNA, 19 nt, Homo sapiens
  misc_RNA (1)...(19): siRNA sense strand
ccugauuugugugacuuua

SEQ ID NO: 100977 - RNA, 19 nt, Homo sapiens
  misc_RNA (1)...(19): siRNA sense strand
guuggucgauucaggaaca

SEQ ID NO: 100978 - RNA, 19 nt, Homo sapiens
  misc_RNA (1)...(19): siRNA sense strand
gcccacaacaagcggauuu

SEQ ID NO: 100979 - RNA, 19 nt, Homo sapiens
  misc_RNA (1)...(19): siRNA sense strand
ucaggaacauggugcaaac

SEQ ID NO: 100980 - RNA, 19 nt, Homo sapiens
  misc_RNA (1)...(19): siRNA sense strand
gaaaucuggacauucaaag

SEQ ID NO: 100981 - RNA, 19 nt, Homo sapiens
  misc_RNA (1)...(19): siRNA sense strand
gaacccaagaagaagaaau

SEQ ID NO: 100982 - RNA, 19 nt, Homo sapiens
  misc_RNA (1)...(19): siRNA sense strand
caccuuccuugcugauuug

SEQ ID NO: 100983 - RNA, 19 nt, Homo sapiens
  misc_RNA (1)...(19): siRNA sense strand
gauuauugaugagaagaag

SEQ ID NO: 100984 - RNA, 19 nt, Homo sapiens
  misc_RNA (1)...(19): siRNA sense strand
gucaaaggagacaaacuaa

SEQ ID NO: 100985 - RNA, 19 nt, Homo sapiens
  misc_RNA (1)...(19): siRNA sense strand
gguccaugcugcacuuguc

SEQ ID NO: 100986 - RNA, 19 nt, Homo sapiens
  misc_RNA (1)...(19): siRNA sense strand
gcaccaaacccugcagucu

SEQ ID NO: 100987 - RNA, 19 nt, Homo sapiens
  misc_RNA (1)...(19): siRNA sense strand
cacaacaagcggauuucua

SEQ ID NO: 100988 - RNA, 19 nt, Homo sapiens
  misc_RNA (1)...(19): siRNA sense strand
caaagaccaaagaggaaga

SEQ ID NO: 100989 - RNA, 19 nt, Homo sapiens
  misc_RNA (1)...(19): siRNA sense strand
cagugaggaugaugagauc

SEQ ID NO: 100990 - RNA, 19 nt, Homo sapiens
  misc_RNA (1)...(19): siRNA sense strand
acaacaagcggauuucuac

SEQ ID NO: 100991 - RNA, 19 nt, Homo sapiens
  misc_RNA (1)...(19): siRNA sense strand
ggcaagaagcccacaccuu

SEQ ID NO: 100992 - RNA, 19 nt, Homo sapiens
  misc_RNA (1)...(19): siRNA sense strand
gauguggaucccucaguug

SEQ ID NO: 100993 - RNA, 19 nt, Homo sapiens
  misc_RNA (1)...(19): siRNA sense strand
gacauucagugaggaugau

SEQ ID NO: 100994 - RNA, 19 nt, Homo sapiens
  misc_RNA (1)...(19): siRNA sense strand
ugacauucagugaggauga

SEQ ID NO: 100995 - RNA, 19 nt, Homo sapiens
  misc_RNA (1)...(19): siRNA sense strand
acaugaacccugcaccaaa

SEQ ID NO: 100996 - RNA, 19 nt, Homo sapiens
  misc_RNA (1)...(19): siRNA sense strand
ugggagaaacccugauuug

SEQ ID NO: 100997 - RNA, 19 nt, Homo sapiens
  misc_RNA (1)...(19): siRNA sense strand
ucaaaggagacaaacuaau

SEQ ID NO: 100998 - RNA, 19 nt, Homo sapiens
  misc_RNA (1)...(19): siRNA sense strand
uugugugacuuuaccauug

SEQ ID NO: 100999 - RNA, 19 nt, Homo sapiens
  misc_RNA (1)...(19): siRNA sense strand
ucagugaggaugaugagau

SEQ ID NO: 101000 - RNA, 19 nt, Homo sapiens
  misc_RNA (1)...(19): siRNA sense strand
augcagaacuuugccuuca

SEQ ID NO: 101001 - RNA, 19 nt, Homo sapiens
  misc_RNA (1)...(19): siRNA sense strand
caacccagaggauguggau

SEQ ID NO: 101002 - RNA, 19 nt, Homo sapiens
  misc_RNA (1)...(19): siRNA sense strand
acccugaagcuguaaauga

SEQ ID NO: 101003 - RNA, 19 nt, Homo sapiens
  misc_RNA (1)...(19): siRNA sense strand
aagcaucugaagagaguuu

SEQ ID NO: 101004 - RNA, 19 nt, Homo sapiens
  misc_RNA (1)...(19): siRNA sense strand
guugugccgucagcaguga

SEQ ID NO: 101005 - RNA, 19 nt, Homo sapiens
  misc_RNA (1)...(19): siRNA sense strand
ggacauucaaagaccaaag

SEQ ID NO: 101006 - RNA, 19 nt, Homo sapiens
  misc_RNA (1)...(19): siRNA sense strand
aaggagacaaacuaauuga

SEQ ID NO: 101007 - RNA, 19 nt, Homo sapiens
  misc_RNA (1)...(19): siRNA sense strand
caagaagaagaaauaugca

SEQ ID NO: 101008 - RNA, 19 nt, Homo sapiens
  misc_RNA (1)...(19): siRNA sense strand
gagggaaaucuggacauuc

SEQ ID NO: 101009 - RNA, 19 nt, Homo sapiens
  misc_RNA (1)...(19): siRNA sense strand
ucaacacugcccacaacaa

SEQ ID NO: 101010 - RNA, 19 nt, Homo sapiens
  misc_RNA (1)...(19): siRNA sense strand
ggauuucuacccuuaccau

SEQ ID NO: 101011 - RNA, 19 nt, Homo sapiens
  misc_RNA (1)...(19): siRNA sense strand
uaaaugaacccaagaagaa

SEQ ID NO: 101012 - RNA, 19 nt, Homo sapiens
  misc_RNA (1)...(19): siRNA sense strand
ggacuugacuccuguugug

SEQ ID NO: 101013 - RNA, 19 nt, Homo sapiens
  misc_RNA (1)...(19): siRNA sense strand
ggagggaaaucuggacauu

SEQ ID NO: 101014 - RNA, 19 nt, Homo sapiens
  misc_RNA (1)...(19): siRNA sense strand
gaagaaauaugcaaaagag

SEQ ID NO: 101015 - RNA, 19 nt, Homo sapiens
  misc_RNA (1)...(19): siRNA sense strand
guaaaugaacccaagaaga

SEQ ID NO: 101016 - RNA, 19 nt, Homo sapiens
  misc_RNA (1)...(19): siRNA sense strand
aagcggauuucuacccuua

SEQ ID NO: 101017 - RNA, 19 nt, Homo sapiens
  misc_RNA (1)...(19): siRNA sense strand
ggaaaucuggacauucaaa

SEQ ID NO: 101018 - RNA, 19 nt, Homo sapiens
  misc_RNA (1)...(19): siRNA sense strand
cuauaacccugaagcugua

SEQ ID NO: 101019 - RNA, 19 nt, Homo sapiens
  misc_RNA (1)...(19): siRNA sense strand
gaccaaagaggaagaggaa

SEQ ID NO: 101020 - RNA, 19 nt, Homo sapiens
  misc_RNA (1)...(19): siRNA sense strand
acaccuuccuugcugauuu

SEQ ID NO: 101021 - RNA, 19 nt, Homo sapiens
  misc_RNA (1)...(19): siRNA sense strand
agggaaaucuggacauuca

SEQ ID NO: 101022 - RNA, 19 nt, Homo sapiens
  misc_RNA (1)...(19): siRNA sense strand
ccaaagaggaagaggaaga

SEQ ID NO: 101023 - RNA, 19 nt, Homo sapiens
  misc_RNA (1)...(19): siRNA sense strand
cgucagcagugaacaugaa

SEQ ID NO: 101024 - RNA, 19 nt, Homo sapiens
  misc_RNA (1)...(19): siRNA sense strand
gcaggcgcaugcagaacuu

SEQ ID NO: 101025 - RNA, 19 nt, Homo sapiens
  misc_RNA (1)...(19): siRNA sense strand
uuucuacccuuaccauuga

SEQ ID NO: 101026 - RNA, 19 nt, Homo sapiens
  misc_RNA (1)...(19): siRNA sense strand
cccugaagcuguaaaugaa

SEQ ID NO: 101027 - RNA, 19 nt, Homo sapiens
  misc_RNA (1)...(19): siRNA sense strand
ccaagaagaagaaauaugc

SEQ ID NO: 101028 - RNA, 19 nt, Homo sapiens
  misc_RNA (1)...(19): siRNA sense strand
caaagaggaagaggaagaa

SEQ ID NO: 101029 - RNA, 19 nt, Homo sapiens
  misc_RNA (1)...(19): siRNA sense strand
guucaacacugcccacaac

SEQ ID NO: 101030 - RNA, 19 nt, Homo sapiens
  misc_RNA (1)...(19): siRNA sense strand
gaucaucaacccagaggau

SEQ ID NO: 101031 - RNA, 19 nt, Homo sapiens
  misc_RNA (1)...(19): siRNA sense strand
caccaaacccugcagucua

SEQ ID NO: 101032 - RNA, 19 nt, Homo sapiens
  misc_RNA (1)...(19): siRNA sense strand
ggagcaggcgcaugcagaa

SEQ ID NO: 101033 - RNA, 19 nt, Homo sapiens
  misc_RNA (1)...(19): siRNA sense strand
caacacugcccacaacaag

SEQ ID NO: 101034 - RNA, 19 nt, Homo sapiens
  misc_RNA (1)...(19): siRNA sense strand
caaacccugcagucuauaa

SEQ ID NO: 101035 - RNA, 19 nt, Homo sapiens
  misc_RNA (1)...(19): siRNA sense strand
caugaacccugcaccaaac

SEQ ID NO: 101036 - RNA, 19 nt, Homo sapiens
  misc_RNA (1)...(19): siRNA sense strand
accaaacccugcagucuau

SEQ ID NO: 101037 - RNA, 19 nt, Homo sapiens
  misc_RNA (1)...(19): siRNA sense strand
gacauucaaagaccaaaga

SEQ ID NO: 101038 - RNA, 19 nt, Homo sapiens
  misc_RNA (1)...(19): siRNA sense strand
aacccaagaagaagaaaua

SEQ ID NO: 101039 - RNA, 19 nt, Homo sapiens
  misc_RNA (1)...(19): siRNA sense strand
gcaguggucccagucaaga

SEQ ID NO: 101040 - RNA, 19 nt, Homo sapiens
  misc_RNA (1)...(19): siRNA sense strand
guuggucgauucaggaaca

SEQ ID NO: 101041 - RNA, 19 nt, Homo sapiens
  misc_RNA (1)...(19): siRNA sense strand
gaaaucuggacauucaaag

SEQ ID NO: 101042 - RNA, 19 nt, Homo sapiens
  misc_RNA (1)...(19): siRNA sense strand
gcccacaacaagcggauuu

SEQ ID NO: 101043 - RNA, 19 nt, Homo sapiens
  misc_RNA (1)...(19): siRNA sense strand
ucaggaacauggugcaaac

SEQ ID NO: 101044 - RNA, 19 nt, Homo sapiens
  misc_RNA (1)...(19): siRNA sense strand
gaacccaagaagaagaaau

SEQ ID NO: 101045 - RNA, 19 nt, Homo sapiens
  misc_RNA (1)...(19): siRNA sense strand
caccuuccuugcugauuug

SEQ ID NO: 101046 - RNA, 19 nt, Homo sapiens
  misc_RNA (1)...(19): siRNA sense strand
cacaacaagcggauuucua

SEQ ID NO: 101047 - RNA, 19 nt, Homo sapiens
  misc_RNA (1)...(19): siRNA sense strand
gcaccaaacccugcagucu

SEQ ID NO: 101048 - RNA, 19 nt, Homo sapiens
  misc_RNA (1)...(19): siRNA sense strand
caaagaccaaagaggaaga

SEQ ID NO: 101049 - RNA, 19 nt, Homo sapiens
  misc_RNA (1)...(19): siRNA sense strand
cagugaggaugaugagauc

SEQ ID NO: 101050 - RNA, 19 nt, Homo sapiens
  misc_RNA (1)...(19): siRNA sense strand
acaacaagcggauuucuac

SEQ ID NO: 101051 - RNA, 19 nt, Homo sapiens
  misc_RNA (1)...(19): siRNA sense strand
ggcaagaagcccacaccuu

SEQ ID NO: 101052 - RNA, 19 nt, Homo sapiens
  misc_RNA (1)...(19): siRNA sense strand
gauguggaucccucaguug

SEQ ID NO: 101053 - RNA, 19 nt, Homo sapiens
  misc_RNA (1)...(19): siRNA sense strand
gacauucagugaggaugau

SEQ ID NO: 101054 - RNA, 19 nt, Homo sapiens
  misc_RNA (1)...(19): siRNA sense strand
ugacauucagugaggauga

SEQ ID NO: 101055 - RNA, 19 nt, Homo sapiens
  misc_RNA (1)...(19): siRNA sense strand
acaugaacccugcaccaaa

SEQ ID NO: 101056 - RNA, 19 nt, Homo sapiens
  misc_RNA (1)...(19): siRNA sense strand
ucagugaggaugaugagau

SEQ ID NO: 101057 - RNA, 19 nt, Homo sapiens
  misc_RNA (1)...(19): siRNA sense strand
augcagaacuuugccuuca

SEQ ID NO: 101058 - RNA, 19 nt, Homo sapiens
  misc_RNA (1)...(19): siRNA sense strand
caacccagaggauguggau

SEQ ID NO: 101059 - RNA, 19 nt, Homo sapiens
  misc_RNA (1)...(19): siRNA sense strand
acccugaagcuguaaauga

SEQ ID NO: 101060 - RNA, 19 nt, Homo sapiens
  misc_RNA (1)...(19): siRNA sense strand
guugugccgucagcaguga

SEQ ID NO: 101061 - RNA, 19 nt, Homo sapiens
  misc_RNA (1)...(19): siRNA sense strand
ggacauucaaagaccaaag

SEQ ID NO: 101062 - RNA, 19 nt, Homo sapiens
  misc_RNA (1)...(19): siRNA sense strand
caagaagaagaaauaugca

SEQ ID NO: 101063 - RNA, 19 nt, Homo sapiens
  misc_RNA (1)...(19): siRNA sense strand
gagggaaaucuggacauuc

SEQ ID NO: 101064 - RNA, 19 nt, Homo sapiens
  misc_RNA (1)...(19): siRNA sense strand
ucaacacugcccacaacaa

SEQ ID NO: 101065 - RNA, 19 nt, Homo sapiens
  misc_RNA (1)...(19): siRNA sense strand
ggauuucuacccuuaccau

SEQ ID NO: 101066 - RNA, 19 nt, Homo sapiens
  misc_RNA (1)...(19): siRNA sense strand
gaagaaacguaaagaugaa

SEQ ID NO: 101067 - RNA, 19 nt, Homo sapiens
  misc_RNA (1)...(19): siRNA sense strand
ggaugaaacugaacgagua

SEQ ID NO: 101068 - RNA, 19 nt, Homo sapiens
  misc_RNA (1)...(19): siRNA sense strand
ccaaagagaucaaagugaa

SEQ ID NO: 101069 - RNA, 19 nt, Homo sapiens
  misc_RNA (1)...(19): siRNA sense strand
gcacaguggugguuucuga

SEQ ID NO: 101070 - RNA, 19 nt, Homo sapiens
  misc_RNA (1)...(19): siRNA sense strand
gaacaacugugccuucuac

SEQ ID NO: 101071 - RNA, 19 nt, Homo sapiens
  misc_RNA (1)...(19): siRNA sense strand
gaaggaagcacgaaagaug

SEQ ID NO: 101072 - RNA, 19 nt, Homo sapiens
  misc_RNA (1)...(19): siRNA sense strand
gaaauuggccucaguccuu

SEQ ID NO: 101073 - RNA, 19 nt, Homo sapiens
  misc_RNA (1)...(19): siRNA sense strand
gcuacaaacuucuuaacaa

SEQ ID NO: 101074 - RNA, 19 nt, Homo sapiens
  misc_RNA (1)...(19): siRNA sense strand
acaauuggcugacguauuc

SEQ ID NO: 101075 - RNA, 19 nt, Homo sapiens
  misc_RNA (1)...(19): siRNA sense strand
ugaauaagaucaaggacuu

SEQ ID NO: 101076 - RNA, 19 nt, Homo sapiens
  misc_RNA (1)...(19): siRNA sense strand
gaacaacacagcuaaacug

SEQ ID NO: 101077 - RNA, 19 nt, Homo sapiens
  misc_RNA (1)...(19): siRNA sense strand
gcacuuacuugaacauucu

SEQ ID NO: 101078 - RNA, 19 nt, Homo sapiens
  misc_RNA (1)...(19): siRNA sense strand
gcaauagucaggagcgaua

SEQ ID NO: 101079 - RNA, 19 nt, Homo sapiens
  misc_RNA (1)...(19): siRNA sense strand
uccaagaucuucaguuuga

SEQ ID NO: 101080 - RNA, 19 nt, Homo sapiens
  misc_RNA (1)...(19): siRNA sense strand
ugaauuggaugaaacugaa

SEQ ID NO: 101081 - RNA, 19 nt, Homo sapiens
  misc_RNA (1)...(19): siRNA sense strand
cagcuaaacuggugaagca

SEQ ID NO: 101082 - RNA, 19 nt, Homo sapiens
  misc_RNA (1)...(19): siRNA sense strand
gcauuaauguccaagagau

SEQ ID NO: 101083 - RNA, 19 nt, Homo sapiens
  misc_RNA (1)...(19): siRNA sense strand
gaagagcuccggaaauugg

SEQ ID NO: 101084 - RNA, 19 nt, Homo sapiens
  misc_RNA (1)...(19): siRNA sense strand
cagaggaacuacugaaaca

SEQ ID NO: 101085 - RNA, 19 nt, Homo sapiens
  misc_RNA (1)...(19): siRNA sense strand
ccagaaauauuggucaaau

SEQ ID NO: 101086 - RNA, 19 nt, Homo sapiens
  misc_RNA (1)...(19): siRNA sense strand
gcaaacugagagaauauuu

SEQ ID NO: 101087 - RNA, 19 nt, Homo sapiens
  misc_RNA (1)...(19): siRNA sense strand
gcagacccguucaccagaa

SEQ ID NO: 101088 - RNA, 19 nt, Homo sapiens
  misc_RNA (1)...(19): siRNA sense strand
agaagaaacguaaagauga

SEQ ID NO: 101089 - RNA, 19 nt, Homo sapiens
  misc_RNA (1)...(19): siRNA sense strand
guucugcccucaccucuug

SEQ ID NO: 101090 - RNA, 19 nt, Homo sapiens
  misc_RNA (1)...(19): siRNA sense strand
augaagagcuccggaaauu

SEQ ID NO: 101091 - RNA, 19 nt, Homo sapiens
  misc_RNA (1)...(19): siRNA sense strand
gaacgaguaaaugugaaua

SEQ ID NO: 101092 - RNA, 19 nt, Homo sapiens
  misc_RNA (1)...(19): siRNA sense strand
gcaagucaagugaggauga

SEQ ID NO: 101093 - RNA, 19 nt, Homo sapiens
  misc_RNA (1)...(19): siRNA sense strand
uuuccaagaucuucaguuu

SEQ ID NO: 101094 - RNA, 19 nt, Homo sapiens
  misc_RNA (1)...(19): siRNA sense strand
ugaaacaaccagacuauuc

SEQ ID NO: 101095 - RNA, 19 nt, Homo sapiens
  misc_RNA (1)...(19): siRNA sense strand
gaaggcaaacugagagaau

SEQ ID NO: 101096 - RNA, 19 nt, Homo sapiens
  misc_RNA (1)...(19): siRNA sense strand
ggaaaggcaggaagaggaa

SEQ ID NO: 101097 - RNA, 19 nt, Homo sapiens
  misc_RNA (1)...(19): siRNA sense strand
caaguugccuccaguucug

SEQ ID NO: 101098 - RNA, 19 nt, Homo sapiens
  misc_RNA (1)...(19): siRNA sense strand
gaugagacuccguauguug

SEQ ID NO: 101099 - RNA, 19 nt, Homo sapiens
  misc_RNA (1)...(19): siRNA sense strand
ggaugagacuccguauguu

SEQ ID NO: 101100 - RNA, 19 nt, Homo sapiens
  misc_RNA (1)...(19): siRNA sense strand
aaagacaaccaacaacauu

SEQ ID NO: 101101 - RNA, 19 nt, Homo sapiens
  misc_RNA (1)...(19): siRNA sense strand
ggaggaggaggcauuaaug

SEQ ID NO: 101102 - RNA, 19 nt, Homo sapiens
  misc_RNA (1)...(19): siRNA sense strand
gaaacugaacgaguaaaug

SEQ ID NO: 101103 - RNA, 19 nt, Homo sapiens
  misc_RNA (1)...(19): siRNA sense strand
ucaagggccuggacagcuu

SEQ ID NO: 101104 - RNA, 19 nt, Homo sapiens
  misc_RNA (1)...(19): siRNA sense strand
aaacugaacgaguaaaugu

SEQ ID NO: 101105 - RNA, 19 nt, Homo sapiens
  misc_RNA (1)...(19): siRNA sense strand
gauaagaagaaacguaaag

SEQ ID NO: 101106 - RNA, 19 nt, Homo sapiens
  misc_RNA (1)...(19): siRNA sense strand
gaaacaaccagacuauucg

SEQ ID NO: 101107 - RNA, 19 nt, Homo sapiens
  misc_RNA (1)...(19): siRNA sense strand
gcagaacaacacagcuaaa

SEQ ID NO: 101108 - RNA, 19 nt, Homo sapiens
  misc_RNA (1)...(19): siRNA sense strand
caacagcaguggacaucgu

SEQ ID NO: 101109 - RNA, 19 nt, Homo sapiens
  misc_RNA (1)...(19): siRNA sense strand
gaugaaacugaacgaguaa

SEQ ID NO: 101110 - RNA, 19 nt, Homo sapiens
  misc_RNA (1)...(19): siRNA sense strand
aaggcaaacugagagaaua

SEQ ID NO: 101111 - RNA, 19 nt, Homo sapiens
  misc_RNA (1)...(19): siRNA sense strand
gaugggauuuccaagaucu

SEQ ID NO: 101112 - RNA, 19 nt, Homo sapiens
  misc_RNA (1)...(19): siRNA sense strand
ucugacaaguacaaccuua

SEQ ID NO: 101113 - RNA, 19 nt, Homo sapiens
  misc_RNA (1)...(19): siRNA sense strand
caagucaagugaggaugaa

SEQ ID NO: 101114 - RNA, 19 nt, Homo sapiens
  misc_RNA (1)...(19): siRNA sense strand
ugaagcagcugagcaaguc

SEQ ID NO: 101115 - RNA, 19 nt, Homo sapiens
  misc_RNA (1)...(19): siRNA sense strand
uagaccaucucaagcagaa

SEQ ID NO: 101116 - RNA, 19 nt, Homo sapiens
  misc_RNA (1)...(19): siRNA sense strand
ggaugaagagcuccggaaa

SEQ ID NO: 101117 - RNA, 19 nt, Homo sapiens
  misc_RNA (1)...(19): siRNA sense strand
gcaacugccgcuaugagaa

SEQ ID NO: 101118 - RNA, 19 nt, Homo sapiens
  misc_RNA (1)...(19): siRNA sense strand
ccaagggcaugcagcacuu

SEQ ID NO: 101119 - RNA, 19 nt, Homo sapiens
  misc_RNA (1)...(19): siRNA sense strand
ccacucaacacaacaccua

SEQ ID NO: 101120 - RNA, 19 nt, Homo sapiens
  misc_RNA (1)...(19): siRNA sense strand
ugacaaguacaaccuuaaa

SEQ ID NO: 101121 - RNA, 19 nt, Homo sapiens
  misc_RNA (1)...(19): siRNA sense strand
uggcugacguauucaaaga

SEQ ID NO: 101122 - RNA, 19 nt, Homo sapiens
  misc_RNA (1)...(19): siRNA sense strand
caaacagucauccuucaga

SEQ ID NO: 101123 - RNA, 19 nt, Homo sapiens
  misc_RNA (1)...(19): siRNA sense strand
aagaagaaacguaaagaug

SEQ ID NO: 101124 - RNA, 19 nt, Homo sapiens
  misc_RNA (1)...(19): siRNA sense strand
caaagacaaccaacaacau

SEQ ID NO: 101125 - RNA, 19 nt, Homo sapiens
  misc_RNA (1)...(19): siRNA sense strand
gauccucaccuccaucaug

SEQ ID NO: 101126 - RNA, 19 nt, Homo sapiens
  misc_RNA (1)...(19): siRNA sense strand
gaauaagaucaaggacuuu

SEQ ID NO: 101127 - RNA, 19 nt, Homo sapiens
  misc_RNA (1)...(19): siRNA sense strand
gcugacguauucaaagaca

SEQ ID NO: 101128 - RNA, 19 nt, Homo sapiens
  misc_RNA (1)...(19): siRNA sense strand
caugaaggcccugguggua

SEQ ID NO: 101129 - RNA, 19 nt, Homo sapiens
  misc_RNA (1)...(19): siRNA sense strand
cgaguaaaugugaauaaga

SEQ ID NO: 101130 - RNA, 19 nt, Homo sapiens
  misc_RNA (1)...(19): siRNA sense strand
gcacagccaaaccuucuuc

SEQ ID NO: 101131 - RNA, 19 nt, Homo sapiens
  misc_RNA (1)...(19): siRNA sense strand
gaaauacaagccacucaac

SEQ ID NO: 101132 - RNA, 19 nt, Homo sapiens
  misc_RNA (1)...(19): siRNA sense strand
gaugaagagcuccggaaau

SEQ ID NO: 101133 - RNA, 19 nt, Homo sapiens
  misc_RNA (1)...(19): siRNA sense strand
ggccuggacagcuuccuua

SEQ ID NO: 101134 - RNA, 19 nt, Homo sapiens
  misc_RNA (1)...(19): siRNA sense strand
gcaucuaccgcucacugua

SEQ ID NO: 101135 - RNA, 19 nt, Homo sapiens
  misc_RNA (1)...(19): siRNA sense strand
ucaaagacaaccaacaaca

SEQ ID NO: 101136 - RNA, 19 nt, Homo sapiens
  misc_RNA (1)...(19): siRNA sense strand
cggacaagaucaagcagau

SEQ ID NO: 101137 - RNA, 19 nt, Homo sapiens
  misc_RNA (1)...(19): siRNA sense strand
gaggaggaggcauuaaugu

SEQ ID NO: 101138 - RNA, 19 nt, Homo sapiens
  misc_RNA (1)...(19): siRNA sense strand
ggaugggauuuccaagauc

SEQ ID NO: 101139 - RNA, 19 nt, Homo sapiens
  misc_RNA (1)...(19): siRNA sense strand
gaaccaagcacagccaaac

SEQ ID NO: 101140 - RNA, 19 nt, Homo sapiens
  misc_RNA (1)...(19): siRNA sense strand
cgaaagauggugagucgau

SEQ ID NO: 101141 - RNA, 19 nt, Homo sapiens
  misc_RNA (1)...(19): siRNA sense strand
gaaacguaaagaugaagga

SEQ ID NO: 101142 - RNA, 19 nt, Homo sapiens
  misc_RNA (1)...(19): siRNA sense strand
cagcugagcaagucaagug

SEQ ID NO: 101143 - RNA, 19 nt, Homo sapiens
  misc_RNA (1)...(19): siRNA sense strand
ucccggagcucauggauac

SEQ ID NO: 101144 - RNA, 19 nt, Homo sapiens
  misc_RNA (1)...(19): siRNA sense strand
gacccguucaccagaaaua

SEQ ID NO: 101145 - RNA, 19 nt, Homo sapiens
  misc_RNA (1)...(19): siRNA sense strand
ucuggaugcucuuaauuca

SEQ ID NO: 101146 - RNA, 19 nt, Homo sapiens
  misc_RNA (1)...(19): siRNA sense strand
ggugguuucugacaaguac

SEQ ID NO: 101147 - RNA, 19 nt, Homo sapiens
  misc_RNA (1)...(19): siRNA sense strand
ccaccggccucaugauguc

SEQ ID NO: 101148 - RNA, 19 nt, Homo sapiens
  misc_RNA (1)...(19): siRNA sense strand
uggaugagacuccguaugu

SEQ ID NO: 101149 - RNA, 19 nt, Homo sapiens
  misc_RNA (1)...(19): siRNA sense strand
caaacugagagaauauuuc

SEQ ID NO: 101150 - RNA, 19 nt, Homo sapiens
  misc_RNA (1)...(19): siRNA sense strand
caccuaaugccaccaaaga

SEQ ID NO: 101151 - RNA, 19 nt, Homo sapiens
  misc_RNA (1)...(19): siRNA sense strand
gcugagaaagauaagaaga

SEQ ID NO: 101152 - RNA, 19 nt, Homo sapiens
  misc_RNA (1)...(19): siRNA sense strand
ggugccacauggacuccua

SEQ ID NO: 101153 - RNA, 19 nt, Homo sapiens
  misc_RNA (1)...(19): siRNA sense strand
gaugaaggaagcacgaaag

SEQ ID NO: 101154 - RNA, 19 nt, Homo sapiens
  misc_RNA (1)...(19): siRNA sense strand
caagaucuucaguuugaug

SEQ ID NO: 101155 - RNA, 19 nt, Homo sapiens
  misc_RNA (1)...(19): siRNA sense strand
ugaggaaggcaaacugaga

SEQ ID NO: 101156 - RNA, 19 nt, Homo sapiens
  misc_RNA (1)...(19): siRNA sense strand
ggagauccuaaccaacuga

SEQ ID NO: 101157 - RNA, 19 nt, Homo sapiens
  misc_RNA (1)...(19): siRNA sense strand
cugcagagaagaaauacaa

SEQ ID NO: 101158 - RNA, 19 nt, Homo sapiens
  misc_RNA (1)...(19): siRNA sense strand
gcugucauccgcucucaga

SEQ ID NO: 101159 - RNA, 19 nt, Homo sapiens
  misc_RNA (1)...(19): siRNA sense strand
gagcaagucaagugaggau

SEQ ID NO: 101160 - RNA, 19 nt, Homo sapiens
  misc_RNA (1)...(19): siRNA sense strand
aagcagaacaacacagcua

SEQ ID NO: 101161 - RNA, 19 nt, Homo sapiens
  misc_RNA (1)...(19): siRNA sense strand
ugaggaguguuccauggau

SEQ ID NO: 101162 - RNA, 19 nt, Homo sapiens
  misc_RNA (1)...(19): siRNA sense strand
augauaacauggaggagaa

SEQ ID NO: 101163 - RNA, 19 nt, Homo sapiens
  misc_RNA (1)...(19): siRNA sense strand
guuggcggcuacaaacuuc

SEQ ID NO: 101164 - RNA, 19 nt, Homo sapiens
  misc_RNA (1)...(19): siRNA sense strand
ggagaguccuggagauccu

SEQ ID NO: 101165 - RNA, 19 nt, Homo sapiens
  misc_RNA (1)...(19): siRNA sense strand
ugacguuggcggcuacaaa

SEQ ID NO: 101166 - RNA, 19 nt, Homo sapiens
  misc_RNA (1)...(19): siRNA sense strand
guacagggcuccagaaauu

SEQ ID NO: 101167 - RNA, 19 nt, Homo sapiens
  misc_RNA (1)...(19): siRNA sense strand
ggaaacagaucuuuacaag

SEQ ID NO: 101168 - RNA, 19 nt, Homo sapiens
  misc_RNA (1)...(19): siRNA sense strand
ccaaagcucuggacuuauu

SEQ ID NO: 101169 - RNA, 19 nt, Homo sapiens
  misc_RNA (1)...(19): siRNA sense strand
gcuaggaacuauuugcuuu

SEQ ID NO: 101170 - RNA, 19 nt, Homo sapiens
  misc_RNA (1)...(19): siRNA sense strand
aagaagaccugaauuguau

SEQ ID NO: 101171 - RNA, 19 nt, Homo sapiens
  misc_RNA (1)...(19): siRNA sense strand
caagaagaccugaauugua

SEQ ID NO: 101172 - RNA, 19 nt, Homo sapiens
  misc_RNA (1)...(19): siRNA sense strand
gcaaugaccauaucugcua

SEQ ID NO: 101173 - RNA, 19 nt, Homo sapiens
  misc_RNA (1)...(19): siRNA sense strand
aaacagaucuuuacaagcu

SEQ ID NO: 101174 - RNA, 19 nt, Homo sapiens
  misc_RNA (1)...(19): siRNA sense strand
ccaaguccauugauauuug

SEQ ID NO: 101175 - RNA, 19 nt, Homo sapiens
  misc_RNA (1)...(19): siRNA sense strand
caagaggauugaaguagaa

SEQ ID NO: 101176 - RNA, 19 nt, Homo sapiens
  misc_RNA (1)...(19): siRNA sense strand
caacaaaguucgaguagcu

SEQ ID NO: 101177 - RNA, 19 nt, Homo sapiens
  misc_RNA (1)...(19): siRNA sense strand
ucgaguagcuaucaagaaa

SEQ ID NO: 101178 - RNA, 19 nt, Homo sapiens
  misc_RNA (1)...(19): siRNA sense strand
ugaagagacugcuagauuc

SEQ ID NO: 101179 - RNA, 19 nt, Homo sapiens
  misc_RNA (1)...(19): siRNA sense strand
guacaggaccucauggaaa

SEQ ID NO: 101180 - RNA, 19 nt, Homo sapiens
  misc_RNA (1)...(19): siRNA sense strand
gaagaccugaauuguauaa

SEQ ID NO: 101181 - RNA, 19 nt, Homo sapiens
  misc_RNA (1)...(19): siRNA sense strand
uuacugcgcuucagacaug

SEQ ID NO: 101182 - RNA, 19 nt, Homo sapiens
  misc_RNA (1)...(19): siRNA sense strand
ggaacuauuugcuuucucu

SEQ ID NO: 101183 - RNA, 19 nt, Homo sapiens
  misc_RNA (1)...(19): siRNA sense strand
cacaacaccucagcaauga

SEQ ID NO: 101184 - RNA, 19 nt, Homo sapiens
  misc_RNA (1)...(19): siRNA sense strand
acccauaucuggagcagua

SEQ ID NO: 101185 - RNA, 19 nt, Homo sapiens
  misc_RNA (1)...(19): siRNA sense strand
gaccauaucugcuauuuuc

SEQ ID NO: 101186 - RNA, 19 nt, Homo sapiens
  misc_RNA (1)...(19): siRNA sense strand
acaagaggauugaaguaga

SEQ ID NO: 101187 - RNA, 19 nt, Homo sapiens
  misc_RNA (1)...(19): siRNA sense strand
gauaaugucaacaaaguuc

SEQ ID NO: 101188 - RNA, 19 nt, Homo sapiens
  misc_RNA (1)...(19): siRNA sense strand
gagaacaucauuggaauca

SEQ ID NO: 101189 - RNA, 19 nt, Homo sapiens
  misc_RNA (1)...(19): siRNA sense strand
aaaauaaggugccauggaa

SEQ ID NO: 101190 - RNA, 19 nt, Homo sapiens
  misc_RNA (1)...(19): siRNA sense strand
ggugugcucugcuuaugau

SEQ ID NO: 101191 - RNA, 19 nt, Homo sapiens
  misc_RNA (1)...(19): siRNA sense strand
cccaaaugcugacuccaaa

SEQ ID NO: 101192 - RNA, 19 nt, Homo sapiens
  misc_RNA (1)...(19): siRNA sense strand
cuccagaaauuauguugaa

SEQ ID NO: 101193 - RNA, 19 nt, Homo sapiens
  misc_RNA (1)...(19): siRNA sense strand
cagggaagcauuaucuuga

SEQ ID NO: 101194 - RNA, 19 nt, Homo sapiens
  misc_RNA (1)...(19): siRNA sense strand
acacaacaccucagcaaug

SEQ ID NO: 101195 - RNA, 19 nt, Homo sapiens
  misc_RNA (1)...(19): siRNA sense strand
acaccaaccucucguacau

SEQ ID NO: 101196 - RNA, 19 nt, Homo sapiens
  misc_RNA (1)...(19): siRNA sense strand
uacaccaaguccauugaua

SEQ ID NO: 101197 - RNA, 19 nt, Homo sapiens
  misc_RNA (1)...(19): siRNA sense strand
cacaagaagaccugaauug

SEQ ID NO: 101198 - RNA, 19 nt, Homo sapiens
  misc_RNA (1)...(19): siRNA sense strand
cauaucuggagcaguauua

SEQ ID NO: 101199 - RNA, 19 nt, Homo sapiens
  misc_RNA (1)...(19): siRNA sense strand
caccaaccaucgagcaaau

SEQ ID NO: 101200 - RNA, 19 nt, Homo sapiens
  misc_RNA (1)...(19): siRNA sense strand
uugaagagacugcuagauu

SEQ ID NO: 101201 - RNA, 19 nt, Homo sapiens
  misc_RNA (1)...(19): siRNA sense strand
gagcaaaugaaagauguau

SEQ ID NO: 101202 - RNA, 19 nt, Homo sapiens
  misc_RNA (1)...(19): siRNA sense strand
gaaaagcucaaagaacuaa

SEQ ID NO: 101203 - RNA, 19 nt, Homo sapiens
  misc_RNA (1)...(19): siRNA sense strand
cgaagcaccauucaaguuc

SEQ ID NO: 101204 - RNA, 19 nt, Homo sapiens
  misc_RNA (1)...(19): siRNA sense strand
caaugaccauaucugcuau

SEQ ID NO: 101205 - RNA, 19 nt, Homo sapiens
  misc_RNA (1)...(19): siRNA sense strand
gcaccaaccaucgagcaaa

SEQ ID NO: 101206 - RNA, 19 nt, Homo sapiens
  misc_RNA (1)...(19): siRNA sense strand
caaguucgacauggaauug

SEQ ID NO: 101207 - RNA, 19 nt, Homo sapiens
  misc_RNA (1)...(19): siRNA sense strand
ccucagcaaugaccauauc

SEQ ID NO: 101208 - RNA, 19 nt, Homo sapiens
  misc_RNA (1)...(19): siRNA sense strand
ucauggaaacagaucuuua

SEQ ID NO: 101209 - RNA, 19 nt, Homo sapiens
  misc_RNA (1)...(19): siRNA sense strand
caccaaguccauugauauu

SEQ ID NO: 101210 - RNA, 19 nt, Homo sapiens
  misc_RNA (1)...(19): siRNA sense strand
acacaagaggauugaagua

SEQ ID NO: 101211 - RNA, 19 nt, Homo sapiens
  misc_RNA (1)...(19): siRNA sense strand
ccauugauauuuggucugu

SEQ ID NO: 101212 - RNA, 19 nt, Homo sapiens
  misc_RNA (1)...(19): siRNA sense strand
ccagggaagcauuaucuug

SEQ ID NO: 101213 - RNA, 19 nt, Homo sapiens
  misc_RNA (1)...(19): siRNA sense strand
cucaagaucugugacuuug

SEQ ID NO: 101214 - RNA, 19 nt, Homo sapiens
  misc_RNA (1)...(19): siRNA sense strand
ccaaccaucgagcaaauga

SEQ ID NO: 101215 - RNA, 19 nt, Homo sapiens
  misc_RNA (1)...(19): siRNA sense strand
gccaggauacagaucuuaa

SEQ ID NO: 101216 - RNA, 19 nt, Homo sapiens
  misc_RNA (1)...(19): siRNA sense strand
ccgaagcaccauucaaguu

SEQ ID NO: 101217 - RNA, 19 nt, Homo sapiens
  misc_RNA (1)...(19): siRNA sense strand
ccauucagcuaacguucug

SEQ ID NO: 101218 - RNA, 19 nt, Homo sapiens
  misc_RNA (1)...(19): siRNA sense strand
ucgagcaaaugaaagaugu

SEQ ID NO: 101219 - RNA, 19 nt, Homo sapiens
  misc_RNA (1)...(19): siRNA sense strand
uacaggaccucauggaaac

SEQ ID NO: 101220 - RNA, 19 nt, Homo sapiens
  misc_RNA (1)...(19): siRNA sense strand
uggaugacuugccuaagga

SEQ ID NO: 101221 - RNA, 19 nt, Homo sapiens
  misc_RNA (1)...(19): siRNA sense strand
caaguccauugauauuugg

SEQ ID NO: 101222 - RNA, 19 nt, Homo sapiens
  misc_RNA (1)...(19): siRNA sense strand
acaccaaguccauugauau

SEQ ID NO: 101223 - RNA, 19 nt, Homo sapiens
  misc_RNA (1)...(19): siRNA sense strand
gaguagcuaucaagaaaau

SEQ ID NO: 101224 - RNA, 19 nt, Homo sapiens
  misc_RNA (1)...(19): siRNA sense strand
ucacaagaagaccugaauu

SEQ ID NO: 101225 - RNA, 19 nt, Homo sapiens
  misc_RNA (1)...(19): siRNA sense strand
ccaucgagcaaaugaaaga

SEQ ID NO: 101226 - RNA, 19 nt, Homo sapiens
  misc_RNA (1)...(19): siRNA sense strand
ggcauggugugcucugcuu

SEQ ID NO: 101227 - RNA, 19 nt, Homo sapiens
  misc_RNA (1)...(19): siRNA sense strand
ucucaagaucugugacuuu

SEQ ID NO: 101228 - RNA, 19 nt, Homo sapiens
  misc_RNA (1)...(19): siRNA sense strand
caacaccaccugugaucuc

SEQ ID NO: 101229 - RNA, 19 nt, Homo sapiens
  misc_RNA (1)...(19): siRNA sense strand
gcauggugugcucugcuua

SEQ ID NO: 101230 - RNA, 19 nt, Homo sapiens
  misc_RNA (1)...(19): siRNA sense strand
ugucaacaaaguucgagua

SEQ ID NO: 101231 - RNA, 19 nt, Homo sapiens
  misc_RNA (1)...(19): siRNA sense strand
uugcagauccagaccauga

SEQ ID NO: 101232 - RNA, 19 nt, Homo sapiens
  misc_RNA (1)...(19): siRNA sense strand
agacacaacaccucagcaa

SEQ ID NO: 101233 - RNA, 19 nt, Homo sapiens
  misc_RNA (1)...(19): siRNA sense strand
ggacuuauuggacaaaaug

SEQ ID NO: 101234 - RNA, 19 nt, Homo sapiens
  misc_RNA (1)...(19): siRNA sense strand
cagccaggauacagaucuu

SEQ ID NO: 101235 - RNA, 19 nt, Homo sapiens
  misc_RNA (1)...(19): siRNA sense strand
cuagauuccagccaggaua

SEQ ID NO: 101236 - RNA, 19 nt, Homo sapiens
  misc_RNA (1)...(19): siRNA sense strand
gaagagacugcuagauucc

SEQ ID NO: 101237 - RNA, 19 nt, Homo sapiens
  misc_RNA (1)...(19): siRNA sense strand
ggaaaagcucaaagaacua

SEQ ID NO: 101238 - RNA, 19 nt, Homo sapiens
  misc_RNA (1)...(19): siRNA sense strand
cuucagacaugagaacauc

SEQ ID NO: 101239 - RNA, 19 nt, Homo sapiens
  misc_RNA (1)...(19): siRNA sense strand
cauggaaacagaucuuuac

SEQ ID NO: 101240 - RNA, 19 nt, Homo sapiens
  misc_RNA (1)...(19): siRNA sense strand
aaccaucgagcaaaugaaa

SEQ ID NO: 101241 - RNA, 19 nt, Homo sapiens
  misc_RNA (1)...(19): siRNA sense strand
ccacacaagaggauugaag

SEQ ID NO: 101242 - RNA, 19 nt, Homo sapiens
  misc_RNA (1)...(19): siRNA sense strand
gaacuauuugcuuucucuu

SEQ ID NO: 101243 - RNA, 19 nt, Homo sapiens
  misc_RNA (1)...(19): siRNA sense strand
uccaagggcuacaccaagu

SEQ ID NO: 101244 - RNA, 19 nt, Homo sapiens
  misc_RNA (1)...(19): siRNA sense strand
gguacagggcuccagaaau

SEQ ID NO: 101245 - RNA, 19 nt, Homo sapiens
  misc_RNA (1)...(19): siRNA sense strand
uauaguacaggaccucaug

SEQ ID NO: 101246 - RNA, 19 nt, Homo sapiens
  misc_RNA (1)...(19): siRNA sense strand
acauggaauuggaugacuu

SEQ ID NO: 101247 - RNA, 19 nt, Homo sapiens
  misc_RNA (1)...(19): siRNA sense strand
cauucaaguucgacaugga

SEQ ID NO: 101248 - RNA, 19 nt, Homo sapiens
  misc_RNA (1)...(19): siRNA sense strand
gaugacuugccuaaggaaa

SEQ ID NO: 101249 - RNA, 19 nt, Homo sapiens
  misc_RNA (1)...(19): siRNA sense strand
gcucaacaccaccugugau

SEQ ID NO: 101250 - RNA, 19 nt, Homo sapiens
  misc_RNA (1)...(19): siRNA sense strand
cagaccuacugccagagaa

SEQ ID NO: 101251 - RNA, 19 nt, Homo sapiens
  misc_RNA (1)...(19): siRNA sense strand
ccuuugagcaccagaccua

SEQ ID NO: 101252 - RNA, 19 nt, Homo sapiens
  misc_RNA (1)...(19): siRNA sense strand
gcuacaccaaccucucgua

SEQ ID NO: 101253 - RNA, 19 nt, Homo sapiens
  misc_RNA (1)...(19): siRNA sense strand
gacacaacaccucagcaau

SEQ ID NO: 101254 - RNA, 19 nt, Homo sapiens
  misc_RNA (1)...(19): siRNA sense strand
cauggaauuggaugacuug

SEQ ID NO: 101255 - RNA, 19 nt, Homo sapiens
  misc_RNA (1)...(19): siRNA sense strand
gacauucaacccacacaag

SEQ ID NO: 101256 - RNA, 19 nt, Homo sapiens
  misc_RNA (1)...(19): siRNA sense strand
caaagcucuggacuuauug

SEQ ID NO: 101257 - RNA, 19 nt, Homo sapiens
  misc_RNA (1)...(19): siRNA sense strand
gcuacaccaaguccauuga

SEQ ID NO: 101258 - RNA, 19 nt, Homo sapiens
  misc_RNA (1)...(19): siRNA sense strand
gcuccagaaauuauguuga

SEQ ID NO: 101259 - RNA, 19 nt, Homo sapiens
  misc_RNA (1)...(19): siRNA sense strand
acagggcuccagaaauuau

SEQ ID NO: 101260 - RNA, 19 nt, Homo sapiens
  misc_RNA (1)...(19): siRNA sense strand
cuuccaaccugcugcucaa

SEQ ID NO: 101261 - RNA, 19 nt, Homo sapiens
  misc_RNA (1)...(19): siRNA sense strand
ccagaccuacugccagaga

SEQ ID NO: 101262 - RNA, 19 nt, Homo sapiens
  misc_RNA (1)...(19): siRNA sense strand
aaaguucgaguagcuauca

SEQ ID NO: 101263 - RNA, 19 nt, Homo sapiens
  misc_RNA (1)...(19): siRNA sense strand
gacauggaauuggaugacu

SEQ ID NO: 101264 - RNA, 19 nt, Homo sapiens
  misc_RNA (1)...(19): siRNA sense strand
gaaaaucagccccuuugag

SEQ ID NO: 101265 - RNA, 19 nt, Homo sapiens
  misc_RNA (1)...(19): siRNA sense strand
uuggaugacuugccuaagg

SEQ ID NO: 101266 - RNA, 19 nt, Homo sapiens
  misc_RNA (1)...(19): siRNA sense strand
guacagggcuccagaaauu

SEQ ID NO: 101267 - RNA, 19 nt, Homo sapiens
  misc_RNA (1)...(19): siRNA sense strand
ggaaacagaucuuuacaag

SEQ ID NO: 101268 - RNA, 19 nt, Homo sapiens
  misc_RNA (1)...(19): siRNA sense strand
ccaaagcucuggacuuauu

SEQ ID NO: 101269 - RNA, 19 nt, Homo sapiens
  misc_RNA (1)...(19): siRNA sense strand
gcuaggaacuauuugcuuu

SEQ ID NO: 101270 - RNA, 19 nt, Homo sapiens
  misc_RNA (1)...(19): siRNA sense strand
aagaagaccugaauuguau

SEQ ID NO: 101271 - RNA, 19 nt, Homo sapiens
  misc_RNA (1)...(19): siRNA sense strand
caagaagaccugaauugua

SEQ ID NO: 101272 - RNA, 19 nt, Homo sapiens
  misc_RNA (1)...(19): siRNA sense strand
gcaaugaccauaucugcua

SEQ ID NO: 101273 - RNA, 19 nt, Homo sapiens
  misc_RNA (1)...(19): siRNA sense strand
aaacagaucuuuacaagcu

SEQ ID NO: 101274 - RNA, 19 nt, Homo sapiens
  misc_RNA (1)...(19): siRNA sense strand
ccaaguccauugauauuug

SEQ ID NO: 101275 - RNA, 19 nt, Homo sapiens
  misc_RNA (1)...(19): siRNA sense strand
caagaggauugaaguagaa

SEQ ID NO: 101276 - RNA, 19 nt, Homo sapiens
  misc_RNA (1)...(19): siRNA sense strand
caacaaaguucgaguagcu

SEQ ID NO: 101277 - RNA, 19 nt, Homo sapiens
  misc_RNA (1)...(19): siRNA sense strand
ucgaguagcuaucaagaaa

SEQ ID NO: 101278 - RNA, 19 nt, Homo sapiens
  misc_RNA (1)...(19): siRNA sense strand
ugaagagacugcuagauuc

SEQ ID NO: 101279 - RNA, 19 nt, Homo sapiens
  misc_RNA (1)...(19): siRNA sense strand
guacaggaccucauggaaa

SEQ ID NO: 101280 - RNA, 19 nt, Homo sapiens
  misc_RNA (1)...(19): siRNA sense strand
gaagaccugaauuguauaa

SEQ ID NO: 101281 - RNA, 19 nt, Homo sapiens
  misc_RNA (1)...(19): siRNA sense strand
uuacugcgcuucagacaug

SEQ ID NO: 101282 - RNA, 19 nt, Homo sapiens
  misc_RNA (1)...(19): siRNA sense strand
ggaacuauuugcuuucucu

SEQ ID NO: 101283 - RNA, 19 nt, Homo sapiens
  misc_RNA (1)...(19): siRNA sense strand
cacaacaccucagcaauga

SEQ ID NO: 101284 - RNA, 19 nt, Homo sapiens
  misc_RNA (1)...(19): siRNA sense strand
acccauaucuggagcagua

SEQ ID NO: 101285 - RNA, 19 nt, Homo sapiens
  misc_RNA (1)...(19): siRNA sense strand
gaccauaucugcuauuuuc

SEQ ID NO: 101286 - RNA, 19 nt, Homo sapiens
  misc_RNA (1)...(19): siRNA sense strand
acaagaggauugaaguaga

SEQ ID NO: 101287 - RNA, 19 nt, Homo sapiens
  misc_RNA (1)...(19): siRNA sense strand
gauaaugucaacaaaguuc

SEQ ID NO: 101288 - RNA, 19 nt, Homo sapiens
  misc_RNA (1)...(19): siRNA sense strand
gagaacaucauuggaauca

SEQ ID NO: 101289 - RNA, 19 nt, Homo sapiens
  misc_RNA (1)...(19): siRNA sense strand
aaaauaaggugccauggaa

SEQ ID NO: 101290 - RNA, 19 nt, Homo sapiens
  misc_RNA (1)...(19): siRNA sense strand
ggugugcucugcuuaugau

SEQ ID NO: 101291 - RNA, 19 nt, Homo sapiens
  misc_RNA (1)...(19): siRNA sense strand
cccaaaugcugacuccaaa

SEQ ID NO: 101292 - RNA, 19 nt, Homo sapiens
  misc_RNA (1)...(19): siRNA sense strand
cuccagaaauuauguugaa

SEQ ID NO: 101293 - RNA, 19 nt, Homo sapiens
  misc_RNA (1)...(19): siRNA sense strand
cagggaagcauuaucuuga

SEQ ID NO: 101294 - RNA, 19 nt, Homo sapiens
  misc_RNA (1)...(19): siRNA sense strand
acacaacaccucagcaaug

SEQ ID NO: 101295 - RNA, 19 nt, Homo sapiens
  misc_RNA (1)...(19): siRNA sense strand
acaccaaccucucguacau

SEQ ID NO: 101296 - RNA, 19 nt, Homo sapiens
  misc_RNA (1)...(19): siRNA sense strand
uacaccaaguccauugaua

SEQ ID NO: 101297 - RNA, 19 nt, Homo sapiens
  misc_RNA (1)...(19): siRNA sense strand
cacaagaagaccugaauug

SEQ ID NO: 101298 - RNA, 19 nt, Homo sapiens
  misc_RNA (1)...(19): siRNA sense strand
cauaucuggagcaguauua

SEQ ID NO: 101299 - RNA, 19 nt, Homo sapiens
  misc_RNA (1)...(19): siRNA sense strand
caccaaccaucgagcaaau

SEQ ID NO: 101300 - RNA, 19 nt, Homo sapiens
  misc_RNA (1)...(19): siRNA sense strand
uugaagagacugcuagauu

SEQ ID NO: 101301 - RNA, 19 nt, Homo sapiens
  misc_RNA (1)...(19): siRNA sense strand
gagcaaaugaaagauguau

SEQ ID NO: 101302 - RNA, 19 nt, Homo sapiens
  misc_RNA (1)...(19): siRNA sense strand
gaaaagcucaaagaacuaa

SEQ ID NO: 101303 - RNA, 19 nt, Homo sapiens
  misc_RNA (1)...(19): siRNA sense strand
cgaagcaccauucaaguuc

SEQ ID NO: 101304 - RNA, 19 nt, Homo sapiens
  misc_RNA (1)...(19): siRNA sense strand
caaugaccauaucugcuau

SEQ ID NO: 101305 - RNA, 19 nt, Homo sapiens
  misc_RNA (1)...(19): siRNA sense strand
gcaccaaccaucgagcaaa

SEQ ID NO: 101306 - RNA, 19 nt, Homo sapiens
  misc_RNA (1)...(19): siRNA sense strand
caaguucgacauggaauug

SEQ ID NO: 101307 - RNA, 19 nt, Homo sapiens
  misc_RNA (1)...(19): siRNA sense strand
ccucagcaaugaccauauc

SEQ ID NO: 101308 - RNA, 19 nt, Homo sapiens
  misc_RNA (1)...(19): siRNA sense strand
ucauggaaacagaucuuua

SEQ ID NO: 101309 - RNA, 19 nt, Homo sapiens
  misc_RNA (1)...(19): siRNA sense strand
caccaaguccauugauauu

SEQ ID NO: 101310 - RNA, 19 nt, Homo sapiens
  misc_RNA (1)...(19): siRNA sense strand
acacaagaggauugaagua

SEQ ID NO: 101311 - RNA, 19 nt, Homo sapiens
  misc_RNA (1)...(19): siRNA sense strand
ccauugauauuuggucugu

SEQ ID NO: 101312 - RNA, 19 nt, Homo sapiens
  misc_RNA (1)...(19): siRNA sense strand
ccagggaagcauuaucuug

SEQ ID NO: 101313 - RNA, 19 nt, Homo sapiens
  misc_RNA (1)...(19): siRNA sense strand
cucaagaucugugacuuug

SEQ ID NO: 101314 - RNA, 19 nt, Homo sapiens
  misc_RNA (1)...(19): siRNA sense strand
ccaaccaucgagcaaauga

SEQ ID NO: 101315 - RNA, 19 nt, Homo sapiens
  misc_RNA (1)...(19): siRNA sense strand
gccaggauacagaucuuaa

SEQ ID NO: 101316 - RNA, 19 nt, Homo sapiens
  misc_RNA (1)...(19): siRNA sense strand
ccgaagcaccauucaaguu

SEQ ID NO: 101317 - RNA, 19 nt, Homo sapiens
  misc_RNA (1)...(19): siRNA sense strand
ccauucagcuaacguucug

SEQ ID NO: 101318 - RNA, 19 nt, Homo sapiens
  misc_RNA (1)...(19): siRNA sense strand
ucgagcaaaugaaagaugu

SEQ ID NO: 101319 - RNA, 19 nt, Homo sapiens
  misc_RNA (1)...(19): siRNA sense strand
uacaggaccucauggaaac

SEQ ID NO: 101320 - RNA, 19 nt, Homo sapiens
  misc_RNA (1)...(19): siRNA sense strand
uggaugacuugccuaagga

SEQ ID NO: 101321 - RNA, 19 nt, Homo sapiens
  misc_RNA (1)...(19): siRNA sense strand
caaguccauugauauuugg

SEQ ID NO: 101322 - RNA, 19 nt, Homo sapiens
  misc_RNA (1)...(19): siRNA sense strand
acaccaaguccauugauau

SEQ ID NO: 101323 - RNA, 19 nt, Homo sapiens
  misc_RNA (1)...(19): siRNA sense strand
gaguagcuaucaagaaaau

SEQ ID NO: 101324 - RNA, 19 nt, Homo sapiens
  misc_RNA (1)...(19): siRNA sense strand
ucacaagaagaccugaauu

SEQ ID NO: 101325 - RNA, 19 nt, Homo sapiens
  misc_RNA (1)...(19): siRNA sense strand
ccaucgagcaaaugaaaga

SEQ ID NO: 101326 - RNA, 19 nt, Homo sapiens
  misc_RNA (1)...(19): siRNA sense strand
ggcauggugugcucugcuu

SEQ ID NO: 101327 - RNA, 19 nt, Homo sapiens
  misc_RNA (1)...(19): siRNA sense strand
ucucaagaucugugacuuu

SEQ ID NO: 101328 - RNA, 19 nt, Homo sapiens
  misc_RNA (1)...(19): siRNA sense strand
caacaccaccugugaucuc

SEQ ID NO: 101329 - RNA, 19 nt, Homo sapiens
  misc_RNA (1)...(19): siRNA sense strand
gcauggugugcucugcuua

SEQ ID NO: 101330 - RNA, 19 nt, Homo sapiens
  misc_RNA (1)...(19): siRNA sense strand
ugucaacaaaguucgagua

SEQ ID NO: 101331 - RNA, 19 nt, Homo sapiens
  misc_RNA (1)...(19): siRNA sense strand
uugcagauccagaccauga

SEQ ID NO: 101332 - RNA, 19 nt, Homo sapiens
  misc_RNA (1)...(19): siRNA sense strand
agacacaacaccucagcaa

SEQ ID NO: 101333 - RNA, 19 nt, Homo sapiens
  misc_RNA (1)...(19): siRNA sense strand
ggacuuauuggacaaaaug

SEQ ID NO: 101334 - RNA, 19 nt, Homo sapiens
  misc_RNA (1)...(19): siRNA sense strand
cagccaggauacagaucuu

SEQ ID NO: 101335 - RNA, 19 nt, Homo sapiens
  misc_RNA (1)...(19): siRNA sense strand
cuagauuccagccaggaua

SEQ ID NO: 101336 - RNA, 19 nt, Homo sapiens
  misc_RNA (1)...(19): siRNA sense strand
gaagagacugcuagauucc

SEQ ID NO: 101337 - RNA, 19 nt, Homo sapiens
  misc_RNA (1)...(19): siRNA sense strand
ggaaaagcucaaagaacua

SEQ ID NO: 101338 - RNA, 19 nt, Homo sapiens
  misc_RNA (1)...(19): siRNA sense strand
cuucagacaugagaacauc

SEQ ID NO: 101339 - RNA, 19 nt, Homo sapiens
  misc_RNA (1)...(19): siRNA sense strand
cauggaaacagaucuuuac

SEQ ID NO: 101340 - RNA, 19 nt, Homo sapiens
  misc_RNA (1)...(19): siRNA sense strand
aaccaucgagcaaaugaaa

SEQ ID NO: 101341 - RNA, 19 nt, Homo sapiens
  misc_RNA (1)...(19): siRNA sense strand
ccacacaagaggauugaag

SEQ ID NO: 101342 - RNA, 19 nt, Homo sapiens
  misc_RNA (1)...(19): siRNA sense strand
gaacuauuugcuuucucuu

SEQ ID NO: 101343 - RNA, 19 nt, Homo sapiens
  misc_RNA (1)...(19): siRNA sense strand
uccaagggcuacaccaagu

SEQ ID NO: 101344 - RNA, 19 nt, Homo sapiens
  misc_RNA (1)...(19): siRNA sense strand
gguacagggcuccagaaau

SEQ ID NO: 101345 - RNA, 19 nt, Homo sapiens
  misc_RNA (1)...(19): siRNA sense strand
uauaguacaggaccucaug

SEQ ID NO: 101346 - RNA, 19 nt, Homo sapiens
  misc_RNA (1)...(19): siRNA sense strand
acauggaauuggaugacuu

SEQ ID NO: 101347 - RNA, 19 nt, Homo sapiens
  misc_RNA (1)...(19): siRNA sense strand
cauucaaguucgacaugga

SEQ ID NO: 101348 - RNA, 19 nt, Homo sapiens
  misc_RNA (1)...(19): siRNA sense strand
gaugacuugccuaaggaaa

SEQ ID NO: 101349 - RNA, 19 nt, Homo sapiens
  misc_RNA (1)...(19): siRNA sense strand
gcucaacaccaccugugau

SEQ ID NO: 101350 - RNA, 19 nt, Homo sapiens
  misc_RNA (1)...(19): siRNA sense strand
cagaccuacugccagagaa

SEQ ID NO: 101351 - RNA, 19 nt, Homo sapiens
  misc_RNA (1)...(19): siRNA sense strand
ccuuugagcaccagaccua

SEQ ID NO: 101352 - RNA, 19 nt, Homo sapiens
  misc_RNA (1)...(19): siRNA sense strand
gcuacaccaaccucucgua

SEQ ID NO: 101353 - RNA, 19 nt, Homo sapiens
  misc_RNA (1)...(19): siRNA sense strand
gacacaacaccucagcaau

SEQ ID NO: 101354 - RNA, 19 nt, Homo sapiens
  misc_RNA (1)...(19): siRNA sense strand
cauggaauuggaugacuug

SEQ ID NO: 101355 - RNA, 19 nt, Homo sapiens
  misc_RNA (1)...(19): siRNA sense strand
gacauucaacccacacaag

SEQ ID NO: 101356 - RNA, 19 nt, Homo sapiens
  misc_RNA (1)...(19): siRNA sense strand
caaagcucuggacuuauug

SEQ ID NO: 101357 - RNA, 19 nt, Homo sapiens
  misc_RNA (1)...(19): siRNA sense strand
gcuacaccaaguccauuga

SEQ ID NO: 101358 - RNA, 19 nt, Homo sapiens
  misc_RNA (1)...(19): siRNA sense strand
gcuccagaaauuauguuga

SEQ ID NO: 101359 - RNA, 19 nt, Homo sapiens
  misc_RNA (1)...(19): siRNA sense strand
acagggcuccagaaauuau

SEQ ID NO: 101360 - RNA, 19 nt, Homo sapiens
  misc_RNA (1)...(19): siRNA sense strand
cuuccaaccugcugcucaa

SEQ ID NO: 101361 - RNA, 19 nt, Homo sapiens
  misc_RNA (1)...(19): siRNA sense strand
ccagaccuacugccagaga

SEQ ID NO: 101362 - RNA, 19 nt, Homo sapiens
  misc_RNA (1)...(19): siRNA sense strand
aaaguucgaguagcuauca

SEQ ID NO: 101363 - RNA, 19 nt, Homo sapiens
  misc_RNA (1)...(19): siRNA sense strand
gacauggaauuggaugacu

SEQ ID NO: 101364 - RNA, 19 nt, Homo sapiens
  misc_RNA (1)...(19): siRNA sense strand
gaaaaucagccccuuugag

SEQ ID NO: 101365 - RNA, 19 nt, Homo sapiens
  misc_RNA (1)...(19): siRNA sense strand
uuggaugacuugccuaagg

SEQ ID NO: 101366 - RNA, 19 nt, Homo sapiens
  misc_RNA (1)...(19): siRNA sense strand
gagaagauccugaccuuua

SEQ ID NO: 101367 - RNA, 19 nt, Homo sapiens
  misc_RNA (1)...(19): siRNA sense strand
ccacaaggguuaucuguca

SEQ ID NO: 101368 - RNA, 19 nt, Homo sapiens
  misc_RNA (1)...(19): siRNA sense strand
gaaggucgcugugaagaag

SEQ ID NO: 101369 - RNA, 19 nt, Homo sapiens
  misc_RNA (1)...(19): siRNA sense strand
cagaaggguugguaacaaa

SEQ ID NO: 101370 - RNA, 19 nt, Homo sapiens
  misc_RNA (1)...(19): siRNA sense strand
agaagauccugaccuuuaa

SEQ ID NO: 101371 - RNA, 19 nt, Homo sapiens
  misc_RNA (1)...(19): siRNA sense strand
ccaaagccaucgacaugug

SEQ ID NO: 101372 - RNA, 19 nt, Homo sapiens
  misc_RNA (1)...(19): siRNA sense strand
agggugagcuguucaaguu

SEQ ID NO: 101373 - RNA, 19 nt, Homo sapiens
  misc_RNA (1)...(19): siRNA sense strand
gcaagcugcucccugaagu

SEQ ID NO: 101374 - RNA, 19 nt, Homo sapiens
  misc_RNA (1)...(19): siRNA sense strand
augccaagcuguucaugua

SEQ ID NO: 101375 - RNA, 19 nt, Homo sapiens
  misc_RNA (1)...(19): siRNA sense strand
ggugaugccuuccuuuguc

SEQ ID NO: 101376 - RNA, 19 nt, Homo sapiens
  misc_RNA (1)...(19): siRNA sense strand
ucagaaggguugguaacaa

SEQ ID NO: 101377 - RNA, 19 nt, Homo sapiens
  misc_RNA (1)...(19): siRNA sense strand
ggugagcuguucaaguuca

SEQ ID NO: 101378 - RNA, 19 nt, Homo sapiens
  misc_RNA (1)...(19): siRNA sense strand
acaacaagccgcaccacua

SEQ ID NO: 101379 - RNA, 19 nt, Homo sapiens
  misc_RNA (1)...(19): siRNA sense strand
ggaaggucgcugugaagaa

SEQ ID NO: 101380 - RNA, 19 nt, Homo sapiens
  misc_RNA (1)...(19): siRNA sense strand
caacaccccuuccgcauug

SEQ ID NO: 101381 - RNA, 19 nt, Homo sapiens
  misc_RNA (1)...(19): siRNA sense strand
gacaacaucgucaaagugu

SEQ ID NO: 101382 - RNA, 19 nt, Homo sapiens
  misc_RNA (1)...(19): siRNA sense strand
uggagaagauccugaccuu

SEQ ID NO: 101383 - RNA, 19 nt, Homo sapiens
  misc_RNA (1)...(19): siRNA sense strand
caccaaagccaucgacaug

SEQ ID NO: 101384 - RNA, 19 nt, Homo sapiens
  misc_RNA (1)...(19): siRNA sense strand
cagugaagccaucgacuuu

SEQ ID NO: 101385 - RNA, 19 nt, Homo sapiens
  misc_RNA (1)...(19): siRNA sense strand
cccaugagcuggagcagau

SEQ ID NO: 101386 - RNA, 19 nt, Homo sapiens
  misc_RNA (1)...(19): siRNA sense strand
cccaauaacuacaccaaag

SEQ ID NO: 101387 - RNA, 19 nt, Homo sapiens
  misc_RNA (1)...(19): siRNA sense strand
caacaagccgcaccacuac

SEQ ID NO: 101388 - RNA, 19 nt, Homo sapiens
  misc_RNA (1)...(19): siRNA sense strand
ucccugaagugaacaguga

SEQ ID NO: 101389 - RNA, 19 nt, Homo sapiens
  misc_RNA (1)...(19): siRNA sense strand
gccggaaggucgcugugaa

SEQ ID NO: 101390 - RNA, 19 nt, Homo sapiens
  misc_RNA (1)...(19): siRNA sense strand
ggacgagcccaccucacaa

SEQ ID NO: 101391 - RNA, 19 nt, Homo sapiens
  misc_RNA (1)...(19): siRNA sense strand
ggaccucgugcucaagauu

SEQ ID NO: 101392 - RNA, 19 nt, Homo sapiens
  misc_RNA (1)...(19): siRNA sense strand
gugaagccaucgacuuucu

SEQ ID NO: 101393 - RNA, 19 nt, Homo sapiens
  misc_RNA (1)...(19): siRNA sense strand
cgacaacaucgucaaagug

SEQ ID NO: 101394 - RNA, 19 nt, Homo sapiens
  misc_RNA (1)...(19): siRNA sense strand
ggagaagauccugaccuuu

SEQ ID NO: 101395 - RNA, 19 nt, Homo sapiens
  misc_RNA (1)...(19): siRNA sense strand
caacaucgucaaaguguac

SEQ ID NO: 101396 - RNA, 19 nt, Homo sapiens
  misc_RNA (1)...(19): siRNA sense strand
gcgcuuuguugacuuccaa

SEQ ID NO: 101397 - RNA, 19 nt, Homo sapiens
  misc_RNA (1)...(19): siRNA sense strand
cagaagagcaugccaagcu

SEQ ID NO: 101398 - RNA, 19 nt, Homo sapiens
  misc_RNA (1)...(19): siRNA sense strand
ugaccucggugggcgcuuu

SEQ ID NO: 101399 - RNA, 19 nt, Homo sapiens
  misc_RNA (1)...(19): siRNA sense strand
agagccagcuguccaacug

SEQ ID NO: 101400 - RNA, 19 nt, Homo sapiens
  misc_RNA (1)...(19): siRNA sense strand
gugaugccuuccuuuguca

SEQ ID NO: 101401 - RNA, 19 nt, Homo sapiens
  misc_RNA (1)...(19): siRNA sense strand
acaacaucgucaaagugua

SEQ ID NO: 101402 - RNA, 19 nt, Homo sapiens
  misc_RNA (1)...(19): siRNA sense strand
gcauugaggaugagaucga

SEQ ID NO: 101403 - RNA, 19 nt, Homo sapiens
  misc_RNA (1)...(19): siRNA sense strand
cuggagaccaucccuguaa

SEQ ID NO: 101404 - RNA, 19 nt, Homo sapiens
  misc_RNA (1)...(19): siRNA sense strand
gaaggguugguaacaaagu

SEQ ID NO: 101405 - RNA, 19 nt, Homo sapiens
  misc_RNA (1)...(19): siRNA sense strand
gagcaugccaagcuguuca

SEQ ID NO: 101406 - RNA, 19 nt, Homo sapiens
  misc_RNA (1)...(19): siRNA sense strand
ggagaccaucccuguaauc

SEQ ID NO: 101407 - RNA, 19 nt, Homo sapiens
  misc_RNA (1)...(19): siRNA sense strand
gaggaccugccggacaaua

SEQ ID NO: 101408 - RNA, 19 nt, Homo sapiens
  misc_RNA (1)...(19): siRNA sense strand
ucagggugaugccuuccuu

SEQ ID NO: 101409 - RNA, 19 nt, Homo sapiens
  misc_RNA (1)...(19): siRNA sense strand
aggaugagaucgacgacau

SEQ ID NO: 101410 - RNA, 19 nt, Homo sapiens
  misc_RNA (1)...(19): siRNA sense strand
gaccucgugcucaagauug

SEQ ID NO: 101411 - RNA, 19 nt, Homo sapiens
  misc_RNA (1)...(19): siRNA sense strand
ggugggcgcuuuguugacu

SEQ ID NO: 101412 - RNA, 19 nt, Homo sapiens
  misc_RNA (1)...(19): siRNA sense strand
cugcaucgccagugucuau

SEQ ID NO: 101413 - RNA, 19 nt, Homo sapiens
  misc_RNA (1)...(19): siRNA sense strand
gauuucggguuggcaagga

SEQ ID NO: 101414 - RNA, 19 nt, Homo sapiens
  misc_RNA (1)...(19): siRNA sense strand
cguacaucguccaggagua

SEQ ID NO: 101415 - RNA, 19 nt, Homo sapiens
  misc_RNA (1)...(19): siRNA sense strand
acacgugcaguuccaggua

SEQ ID NO: 101416 - RNA, 19 nt, Homo sapiens
  misc_RNA (1)...(19): siRNA sense strand
gcugcucccugaagugaac

SEQ ID NO: 101417 - RNA, 19 nt, Homo sapiens
  misc_RNA (1)...(19): siRNA sense strand
gccagugucuauggguaug

SEQ ID NO: 101418 - RNA, 19 nt, Homo sapiens
  misc_RNA (1)...(19): siRNA sense strand
gaccuggacguguucaucu

SEQ ID NO: 101419 - RNA, 19 nt, Homo sapiens
  misc_RNA (1)...(19): siRNA sense strand
uggagaccaucccuguaau

SEQ ID NO: 101420 - RNA, 19 nt, Homo sapiens
  misc_RNA (1)...(19): siRNA sense strand
gaaagaagauacugaaaug

SEQ ID NO: 101421 - RNA, 19 nt, Homo sapiens
  misc_RNA (1)...(19): siRNA sense strand
gaagauaggugacuuuggu

SEQ ID NO: 101422 - RNA, 19 nt, Homo sapiens
  misc_RNA (1)...(19): siRNA sense strand
gaacagaugcagcugauuu

SEQ ID NO: 101423 - RNA, 19 nt, Homo sapiens
  misc_RNA (1)...(19): siRNA sense strand
gcacagagaucucaaacca

SEQ ID NO: 101424 - RNA, 19 nt, Homo sapiens
  misc_RNA (1)...(19): siRNA sense strand
ggaaagguaucaugauugu

SEQ ID NO: 101425 - RNA, 19 nt, Homo sapiens
  misc_RNA (1)...(19): siRNA sense strand
agagugaaguuaaccauua

SEQ ID NO: 101426 - RNA, 19 nt, Homo sapiens
  misc_RNA (1)...(19): siRNA sense strand
ccaguugggucaccacuua

SEQ ID NO: 101427 - RNA, 19 nt, Homo sapiens
  misc_RNA (1)...(19): siRNA sense strand
cuacugauguuguugauaa

SEQ ID NO: 101428 - RNA, 19 nt, Homo sapiens
  misc_RNA (1)...(19): siRNA sense strand
gaaaggaauggauugguua

SEQ ID NO: 101429 - RNA, 19 nt, Homo sapiens
  misc_RNA (1)...(19): siRNA sense strand
guacagaucuccacgucuu

SEQ ID NO: 101430 - RNA, 19 nt, Homo sapiens
  misc_RNA (1)...(19): siRNA sense strand
gaucuggguucuagguaua

SEQ ID NO: 101431 - RNA, 19 nt, Homo sapiens
  misc_RNA (1)...(19): siRNA sense strand
ggagagagagugaaguuaa

SEQ ID NO: 101432 - RNA, 19 nt, Homo sapiens
  misc_RNA (1)...(19): siRNA sense strand
gaucuggaguguagccaua

SEQ ID NO: 101433 - RNA, 19 nt, Homo sapiens
  misc_RNA (1)...(19): siRNA sense strand
gaaacucacagucacauuu

SEQ ID NO: 101434 - RNA, 19 nt, Homo sapiens
  misc_RNA (1)...(19): siRNA sense strand
gcagggcccuuuacuggaa

SEQ ID NO: 101435 - RNA, 19 nt, Homo sapiens
  misc_RNA (1)...(19): siRNA sense strand
uggcaaaucuggcucaauu

SEQ ID NO: 101436 - RNA, 19 nt, Homo sapiens
  misc_RNA (1)...(19): siRNA sense strand
caagagcucuguccgaugu

SEQ ID NO: 101437 - RNA, 19 nt, Homo sapiens
  misc_RNA (1)...(19): siRNA sense strand
gaggucaucaucauauuua

SEQ ID NO: 101438 - RNA, 19 nt, Homo sapiens
  misc_RNA (1)...(19): siRNA sense strand
gaaagucucaugaacauuc

SEQ ID NO: 101439 - RNA, 19 nt, Homo sapiens
  misc_RNA (1)...(19): siRNA sense strand
caaauguacugcacagaga

SEQ ID NO: 101440 - RNA, 19 nt, Homo sapiens
  misc_RNA (1)...(19): siRNA sense strand
gaaagaacaaagcaaagaa

SEQ ID NO: 101441 - RNA, 19 nt, Homo sapiens
  misc_RNA (1)...(19): siRNA sense strand
gcagagaaauuugaaaguc

SEQ ID NO: 101442 - RNA, 19 nt, Homo sapiens
  misc_RNA (1)...(19): siRNA sense strand
ggaaagaagauacugaaau

SEQ ID NO: 101443 - RNA, 19 nt, Homo sapiens
  misc_RNA (1)...(19): siRNA sense strand
gaagaagaaguacaaguug

SEQ ID NO: 101444 - RNA, 19 nt, Homo sapiens
  misc_RNA (1)...(19): siRNA sense strand
gaggaaggauuucugaaca

SEQ ID NO: 101445 - RNA, 19 nt, Homo sapiens
  misc_RNA (1)...(19): siRNA sense strand
gaaguuaaccauuacuaug

SEQ ID NO: 101446 - RNA, 19 nt, Homo sapiens
  misc_RNA (1)...(19): siRNA sense strand
gaagaugaaguugaugaua

SEQ ID NO: 101447 - RNA, 19 nt, Homo sapiens
  misc_RNA (1)...(19): siRNA sense strand
uuagaagacuugaccauga

SEQ ID NO: 101448 - RNA, 19 nt, Homo sapiens
  misc_RNA (1)...(19): siRNA sense strand
ucaaauuccucaucaaaca

SEQ ID NO: 101449 - RNA, 19 nt, Homo sapiens
  misc_RNA (1)...(19): siRNA sense strand
ugaaaggaauggauugguu

SEQ ID NO: 101450 - RNA, 19 nt, Homo sapiens
  misc_RNA (1)...(19): siRNA sense strand
gaagcacucucccauccuu

SEQ ID NO: 101451 - RNA, 19 nt, Homo sapiens
  misc_RNA (1)...(19): siRNA sense strand
cuagguauauggacuuaaa

SEQ ID NO: 101452 - RNA, 19 nt, Homo sapiens
  misc_RNA (1)...(19): siRNA sense strand
ggaaagaacaaagcaaaga

SEQ ID NO: 101453 - RNA, 19 nt, Homo sapiens
  misc_RNA (1)...(19): siRNA sense strand
ggucaccacuuaagucaau

SEQ ID NO: 101454 - RNA, 19 nt, Homo sapiens
  misc_RNA (1)...(19): siRNA sense strand
ggagagaggacaugaggaa

SEQ ID NO: 101455 - RNA, 19 nt, Homo sapiens
  misc_RNA (1)...(19): siRNA sense strand
caaacaugcucuacgugaa

SEQ ID NO: 101456 - RNA, 19 nt, Homo sapiens
  misc_RNA (1)...(19): siRNA sense strand
aaaucuggcucaauuagaa

SEQ ID NO: 101457 - RNA, 19 nt, Homo sapiens
  misc_RNA (1)...(19): siRNA sense strand
gaacccaagcuuauuauag

SEQ ID NO: 101458 - RNA, 19 nt, Homo sapiens
  misc_RNA (1)...(19): siRNA sense strand
cgaugucacugaugaagaa

SEQ ID NO: 101459 - RNA, 19 nt, Homo sapiens
  misc_RNA (1)...(19): siRNA sense strand
agacagacuuggcuaaugu

SEQ ID NO: 101460 - RNA, 19 nt, Homo sapiens
  misc_RNA (1)...(19): siRNA sense strand
gcaacuggcuggaaaagaa

SEQ ID NO: 101461 - RNA, 19 nt, Homo sapiens
  misc_RNA (1)...(19): siRNA sense strand
gaaaguguuugagauucuu

SEQ ID NO: 101462 - RNA, 19 nt, Homo sapiens
  misc_RNA (1)...(19): siRNA sense strand
gcaggaacuauucagcuua

SEQ ID NO: 101463 - RNA, 19 nt, Homo sapiens
  misc_RNA (1)...(19): siRNA sense strand
ccagauagcgcuagaggaa

SEQ ID NO: 101464 - RNA, 19 nt, Homo sapiens
  misc_RNA (1)...(19): siRNA sense strand
gaguguagccauacuugua

SEQ ID NO: 101465 - RNA, 19 nt, Homo sapiens
  misc_RNA (1)...(19): siRNA sense strand
aaacucacagucacauuua

SEQ ID NO: 101466 - RNA, 19 nt, Homo sapiens
  misc_RNA (1)...(19): siRNA sense strand
gaaaagaaagggaaaagaa

SEQ ID NO: 101467 - RNA, 19 nt, Homo sapiens
  misc_RNA (1)...(19): siRNA sense strand
gcugaaaugcugacuggua

SEQ ID NO: 101468 - RNA, 19 nt, Homo sapiens
  misc_RNA (1)...(19): siRNA sense strand
gggaguuccucuuuaacaa

SEQ ID NO: 101469 - RNA, 19 nt, Homo sapiens
  misc_RNA (1)...(19): siRNA sense strand
gagaggacaugaggaagga

SEQ ID NO: 101470 - RNA, 19 nt, Homo sapiens
  misc_RNA (1)...(19): siRNA sense strand
agaagauacugaaaugcua

SEQ ID NO: 101471 - RNA, 19 nt, Homo sapiens
  misc_RNA (1)...(19): siRNA sense strand
ugaagaagaaguacaaguu

SEQ ID NO: 101472 - RNA, 19 nt, Homo sapiens
  misc_RNA (1)...(19): siRNA sense strand
gagacagacuuggcuaaug

SEQ ID NO: 101473 - RNA, 19 nt, Homo sapiens
  misc_RNA (1)...(19): siRNA sense strand
aaggaaggaugaacaaguu

SEQ ID NO: 101474 - RNA, 19 nt, Homo sapiens
  misc_RNA (1)...(19): siRNA sense strand
gauaagaaaggcaaaucaa

SEQ ID NO: 101475 - RNA, 19 nt, Homo sapiens
  misc_RNA (1)...(19): siRNA sense strand
cugaaaugcugacugguaa

SEQ ID NO: 101476 - RNA, 19 nt, Homo sapiens
  misc_RNA (1)...(19): siRNA sense strand
cacaugaacuugaacagau

SEQ ID NO: 101477 - RNA, 19 nt, Homo sapiens
  misc_RNA (1)...(19): siRNA sense strand
gaaaacacuuacacuaguu

SEQ ID NO: 101478 - RNA, 19 nt, Homo sapiens
  misc_RNA (1)...(19): siRNA sense strand
gcaugagccuacugauguu

SEQ ID NO: 101479 - RNA, 19 nt, Homo sapiens
  misc_RNA (1)...(19): siRNA sense strand
ugggaaagguaucaugauu

SEQ ID NO: 101480 - RNA, 19 nt, Homo sapiens
  misc_RNA (1)...(19): siRNA sense strand
aacccaagcuuauuauaga

SEQ ID NO: 101481 - RNA, 19 nt, Homo sapiens
  misc_RNA (1)...(19): siRNA sense strand
uauauucacucugcaaaug

SEQ ID NO: 101482 - RNA, 19 nt, Homo sapiens
  misc_RNA (1)...(19): siRNA sense strand
gcaaaucuggcucaauuag

SEQ ID NO: 101483 - RNA, 19 nt, Homo sapiens
  misc_RNA (1)...(19): siRNA sense strand
uaugaacccaagcuuauua

SEQ ID NO: 101484 - RNA, 19 nt, Homo sapiens
  misc_RNA (1)...(19): siRNA sense strand
aagaagaaguacaaguuga

SEQ ID NO: 101485 - RNA, 19 nt, Homo sapiens
  misc_RNA (1)...(19): siRNA sense strand
guaucaugauugucaguuu

SEQ ID NO: 101486 - RNA, 19 nt, Homo sapiens
  misc_RNA (1)...(19): siRNA sense strand
gcacaugaacuugaacaga

SEQ ID NO: 101487 - RNA, 19 nt, Homo sapiens
  misc_RNA (1)...(19): siRNA sense strand
ucugaaacaucugaacuaa

SEQ ID NO: 101488 - RNA, 19 nt, Homo sapiens
  misc_RNA (1)...(19): siRNA sense strand
gucaauacaggccacauua

SEQ ID NO: 101489 - RNA, 19 nt, Homo sapiens
  misc_RNA (1)...(19): siRNA sense strand
gaagacuugaccaugauaa

SEQ ID NO: 101490 - RNA, 19 nt, Homo sapiens
  misc_RNA (1)...(19): siRNA sense strand
ggaaaacacuuacacuagu

SEQ ID NO: 101491 - RNA, 19 nt, Homo sapiens
  misc_RNA (1)...(19): siRNA sense strand
cuaaagccauugacaugug

SEQ ID NO: 101492 - RNA, 19 nt, Homo sapiens
  misc_RNA (1)...(19): siRNA sense strand
gauccucauuauucccaua

SEQ ID NO: 101493 - RNA, 19 nt, Homo sapiens
  misc_RNA (1)...(19): siRNA sense strand
ggaauggauugguuaaagc

SEQ ID NO: 101494 - RNA, 19 nt, Homo sapiens
  misc_RNA (1)...(19): siRNA sense strand
gaacaaguugagaaggaaa

SEQ ID NO: 101495 - RNA, 19 nt, Homo sapiens
  misc_RNA (1)...(19): siRNA sense strand
guacauggagacagacuug

SEQ ID NO: 101496 - RNA, 19 nt, Homo sapiens
  misc_RNA (1)...(19): siRNA sense strand
cugaaaugcuagaaacuga

SEQ ID NO: 101497 - RNA, 19 nt, Homo sapiens
  misc_RNA (1)...(19): siRNA sense strand
ggaaggaugaacaaguuga

SEQ ID NO: 101498 - RNA, 19 nt, Homo sapiens
  misc_RNA (1)...(19): siRNA sense strand
gagcaugauuggccuguac

SEQ ID NO: 101499 - RNA, 19 nt, Homo sapiens
  misc_RNA (1)...(19): siRNA sense strand
gagaagcacuggauuuccu

SEQ ID NO: 101500 - RNA, 19 nt, Homo sapiens
  misc_RNA (1)...(19): siRNA sense strand
aagaguagccaucaagaaa

SEQ ID NO: 101501 - RNA, 19 nt, Homo sapiens
  misc_RNA (1)...(19): siRNA sense strand
gaaauuugaaagucucaug

SEQ ID NO: 101502 - RNA, 19 nt, Homo sapiens
  misc_RNA (1)...(19): siRNA sense strand
gaagagcaugccaggcuuu

SEQ ID NO: 101503 - RNA, 19 nt, Homo sapiens
  misc_RNA (1)...(19): siRNA sense strand
cugaaggauugguuacuaa

SEQ ID NO: 101504 - RNA, 19 nt, Homo sapiens
  misc_RNA (1)...(19): siRNA sense strand
gcaggaaagaagauacuga

SEQ ID NO: 101505 - RNA, 19 nt, Homo sapiens
  misc_RNA (1)...(19): siRNA sense strand
gagagagagugaaguuaac

SEQ ID NO: 101506 - RNA, 19 nt, Homo sapiens
  misc_RNA (1)...(19): siRNA sense strand
ccaauuaacagacgaugug

SEQ ID NO: 101507 - RNA, 19 nt, Homo sapiens
  misc_RNA (1)...(19): siRNA sense strand
aaacgaggucaucaucaua

SEQ ID NO: 101508 - RNA, 19 nt, Homo sapiens
  misc_RNA (1)...(19): siRNA sense strand
aaggauugguuacuaaaug

SEQ ID NO: 101509 - RNA, 19 nt, Homo sapiens
  misc_RNA (1)...(19): siRNA sense strand
ccauaagggucaucuuucu

SEQ ID NO: 101510 - RNA, 19 nt, Homo sapiens
  misc_RNA (1)...(19): siRNA sense strand
ucauggauccucauuauuc

SEQ ID NO: 101511 - RNA, 19 nt, Homo sapiens
  misc_RNA (1)...(19): siRNA sense strand
gcucaaguauauucacucu

SEQ ID NO: 101512 - RNA, 19 nt, Homo sapiens
  misc_RNA (1)...(19): siRNA sense strand
gacgaugugggcucucuua

SEQ ID NO: 101513 - RNA, 19 nt, Homo sapiens
  misc_RNA (1)...(19): siRNA sense strand
cagagaaauuugaaagucu

SEQ ID NO: 101514 - RNA, 19 nt, Homo sapiens
  misc_RNA (1)...(19): siRNA sense strand
ggaaggauuucugaacaac

SEQ ID NO: 101515 - RNA, 19 nt, Homo sapiens
  misc_RNA (1)...(19): siRNA sense strand
caaguucuuuagcaggaaa

SEQ ID NO: 101516 - RNA, 19 nt, Homo sapiens
  misc_RNA (1)...(19): siRNA sense strand
caaagucaguaagccaaga

SEQ ID NO: 101517 - RNA, 19 nt, Homo sapiens
  misc_RNA (1)...(19): siRNA sense strand
aaacaugcucuacgugaaa

SEQ ID NO: 101518 - RNA, 19 nt, Homo sapiens
  misc_RNA (1)...(19): siRNA sense strand
gccuguacauaacaacuuu

SEQ ID NO: 101519 - RNA, 19 nt, Homo sapiens
  misc_RNA (1)...(19): siRNA sense strand
aaagguaucaugauuguca

SEQ ID NO: 101520 - RNA, 19 nt, Homo sapiens
  misc_RNA (1)...(19): siRNA sense strand
ggagcuagaucaugaaaga

SEQ ID NO: 101521 - RNA, 19 nt, Homo sapiens
  misc_RNA (1)...(19): siRNA sense strand
gagaaacucuucccugaug

SEQ ID NO: 101522 - RNA, 19 nt, Homo sapiens
  misc_RNA (1)...(19): siRNA sense strand
ucacaguccugaaacgaua

SEQ ID NO: 101523 - RNA, 19 nt, Homo sapiens
  misc_RNA (1)...(19): siRNA sense strand
ugaaagaaauguugcaauc

SEQ ID NO: 101524 - RNA, 19 nt, Homo sapiens
  misc_RNA (1)...(19): siRNA sense strand
gauuggagauucuacauuc

SEQ ID NO: 101525 - RNA, 19 nt, Homo sapiens
  misc_RNA (1)...(19): siRNA sense strand
agaaaucccuagaagaauu

SEQ ID NO: 101526 - RNA, 19 nt, Homo sapiens
  misc_RNA (1)...(19): siRNA sense strand
ggauauagcuuugagaaac

SEQ ID NO: 101527 - RNA, 19 nt, Homo sapiens
  misc_RNA (1)...(19): siRNA sense strand
gaagcuaagccgaccauuu

SEQ ID NO: 101528 - RNA, 19 nt, Homo sapiens
  misc_RNA (1)...(19): siRNA sense strand
gaacacaacaaacuuaaag

SEQ ID NO: 101529 - RNA, 19 nt, Homo sapiens
  misc_RNA (1)...(19): siRNA sense strand
gcucauggaugcaaaucuu

SEQ ID NO: 101530 - RNA, 19 nt, Homo sapiens
  misc_RNA (1)...(19): siRNA sense strand
acagagagcuaguucuuau

SEQ ID NO: 101531 - RNA, 19 nt, Homo sapiens
  misc_RNA (1)...(19): siRNA sense strand
gaagcaagcgugacaacaa

SEQ ID NO: 101532 - RNA, 19 nt, Homo sapiens
  misc_RNA (1)...(19): siRNA sense strand
ccacagaaaucccuagaag

SEQ ID NO: 101533 - RNA, 19 nt, Homo sapiens
  misc_RNA (1)...(19): siRNA sense strand
cucaggagcucaaggaaua

SEQ ID NO: 101534 - RNA, 19 nt, Homo sapiens
  misc_RNA (1)...(19): siRNA sense strand
gaugacgccuuauguagug

SEQ ID NO: 101535 - RNA, 19 nt, Homo sapiens
  misc_RNA (1)...(19): siRNA sense strand
gaucaguggaauaaaguua

SEQ ID NO: 101536 - RNA, 19 nt, Homo sapiens
  misc_RNA (1)...(19): siRNA sense strand
ugaaagggaacacacaaua

SEQ ID NO: 101537 - RNA, 19 nt, Homo sapiens
  misc_RNA (1)...(19): siRNA sense strand
acagaaaucccuagaagaa

SEQ ID NO: 101538 - RNA, 19 nt, Homo sapiens
  misc_RNA (1)...(19): siRNA sense strand
gacaagcaguuagaugaaa

SEQ ID NO: 101539 - RNA, 19 nt, Homo sapiens
  misc_RNA (1)...(19): siRNA sense strand
ggaacaccauguccugaau

SEQ ID NO: 101540 - RNA, 19 nt, Homo sapiens
  misc_RNA (1)...(19): siRNA sense strand
caccaaagaucccugacaa

SEQ ID NO: 101541 - RNA, 19 nt, Homo sapiens
  misc_RNA (1)...(19): siRNA sense strand
agauggagcuagaucauga

SEQ ID NO: 101542 - RNA, 19 nt, Homo sapiens
  misc_RNA (1)...(19): siRNA sense strand
aaccaagaauggaguuaua

SEQ ID NO: 101543 - RNA, 19 nt, Homo sapiens
  misc_RNA (1)...(19): siRNA sense strand
gaaagggaacacacaauag

SEQ ID NO: 101544 - RNA, 19 nt, Homo sapiens
  misc_RNA (1)...(19): siRNA sense strand
ggaacgaguuuuaugauga

SEQ ID NO: 101545 - RNA, 19 nt, Homo sapiens
  misc_RNA (1)...(19): siRNA sense strand
gcaagcgugacaacaauuu

SEQ ID NO: 101546 - RNA, 19 nt, Homo sapiens
  misc_RNA (1)...(19): siRNA sense strand
ucagaacacaacaaacuua

SEQ ID NO: 101547 - RNA, 19 nt, Homo sapiens
  misc_RNA (1)...(19): siRNA sense strand
gaaaacagaccuaaauaug

SEQ ID NO: 101548 - RNA, 19 nt, Homo sapiens
  misc_RNA (1)...(19): siRNA sense strand
gaaauguugcaaucaagaa

SEQ ID NO: 101549 - RNA, 19 nt, Homo sapiens
  misc_RNA (1)...(19): siRNA sense strand
cuagaagaauuucaagaug

SEQ ID NO: 101550 - RNA, 19 nt, Homo sapiens
  misc_RNA (1)...(19): siRNA sense strand
gaaagaaauguugcaauca

SEQ ID NO: 101551 - RNA, 19 nt, Homo sapiens
  misc_RNA (1)...(19): siRNA sense strand
aaacagaccuaaauaugcu

SEQ ID NO: 101552 - RNA, 19 nt, Homo sapiens
  misc_RNA (1)...(19): siRNA sense strand
gacuuaaagcccaguaaua

SEQ ID NO: 101553 - RNA, 19 nt, Homo sapiens
  misc_RNA (1)...(19): siRNA sense strand
gcccaguaauauaguagua

SEQ ID NO: 101554 - RNA, 19 nt, Homo sapiens
  misc_RNA (1)...(19): siRNA sense strand
gaggagagaaccaagaaug

SEQ ID NO: 101555 - RNA, 19 nt, Homo sapiens
  misc_RNA (1)...(19): siRNA sense strand
caacacccguacaucaaug

SEQ ID NO: 101556 - RNA, 19 nt, Homo sapiens
  misc_RNA (1)...(19): siRNA sense strand
agagcuaguucuuaugaaa

SEQ ID NO: 101557 - RNA, 19 nt, Homo sapiens
  misc_RNA (1)...(19): siRNA sense strand
ggcaugggcuacaaggaaa

SEQ ID NO: 101558 - RNA, 19 nt, Homo sapiens
  misc_RNA (1)...(19): siRNA sense strand
ggaaucaagcaccuucauu

SEQ ID NO: 101559 - RNA, 19 nt, Homo sapiens
  misc_RNA (1)...(19): siRNA sense strand
uguccuaccuucucuauca

SEQ ID NO: 101560 - RNA, 19 nt, Homo sapiens
  misc_RNA (1)...(19): siRNA sense strand
ggaauaguaugcgcagcuu

SEQ ID NO: 101561 - RNA, 19 nt, Homo sapiens
  misc_RNA (1)...(19): siRNA sense strand
gaacaccauguccugaauu

SEQ ID NO: 101562 - RNA, 19 nt, Homo sapiens
  misc_RNA (1)...(19): siRNA sense strand
gaagaaacugcaaccaaca

SEQ ID NO: 101563 - RNA, 19 nt, Homo sapiens
  misc_RNA (1)...(19): siRNA sense strand
gaaccaagaauggaguuau

SEQ ID NO: 101564 - RNA, 19 nt, Homo sapiens
  misc_RNA (1)...(19): siRNA sense strand
ccaaaaugcugguaauaga

SEQ ID NO: 101565 - RNA, 19 nt, Homo sapiens
  misc_RNA (1)...(19): siRNA sense strand
gauauagcuuugagaaacu

SEQ ID NO: 101566 - RNA, 19 nt, Homo sapiens
  misc_RNA (1)...(19): siRNA sense strand
gcuagaucaugaaagaaug

SEQ ID NO: 101567 - RNA, 19 nt, Homo sapiens
  misc_RNA (1)...(19): siRNA sense strand
ggacuuaaagcccaguaau

SEQ ID NO: 101568 - RNA, 19 nt, Homo sapiens
  misc_RNA (1)...(19): siRNA sense strand
gaagcuccaccaccaaaga

SEQ ID NO: 101569 - RNA, 19 nt, Homo sapiens
  misc_RNA (1)...(19): siRNA sense strand
guccugaauucaugaagaa

SEQ ID NO: 101570 - RNA, 19 nt, Homo sapiens
  misc_RNA (1)...(19): siRNA sense strand
gagagcuaguucuuaugaa

SEQ ID NO: 101571 - RNA, 19 nt, Homo sapiens
  misc_RNA (1)...(19): siRNA sense strand
uagaagaguggaaagaauu

SEQ ID NO: 101572 - RNA, 19 nt, Homo sapiens
  misc_RNA (1)...(19): siRNA sense strand
ggacugcaggaacgaguuu

SEQ ID NO: 101573 - RNA, 19 nt, Homo sapiens
  misc_RNA (1)...(19): siRNA sense strand
aagcuaagccgaccauuuc

SEQ ID NO: 101574 - RNA, 19 nt, Homo sapiens
  misc_RNA (1)...(19): siRNA sense strand
ggagagaaccaagaaugga

SEQ ID NO: 101575 - RNA, 19 nt, Homo sapiens
  misc_RNA (1)...(19): siRNA sense strand
ugacucagaacacaacaaa

SEQ ID NO: 101576 - RNA, 19 nt, Homo sapiens
  misc_RNA (1)...(19): siRNA sense strand
ugauugcacuuugaagauu

SEQ ID NO: 101577 - RNA, 19 nt, Homo sapiens
  misc_RNA (1)...(19): siRNA sense strand
gccaagugauucagaugga

SEQ ID NO: 101578 - RNA, 19 nt, Homo sapiens
  misc_RNA (1)...(19): siRNA sense strand
aaagggaacacacaauaga

SEQ ID NO: 101579 - RNA, 19 nt, Homo sapiens
  misc_RNA (1)...(19): siRNA sense strand
cagaacacaacaaacuuaa

SEQ ID NO: 101580 - RNA, 19 nt, Homo sapiens
  misc_RNA (1)...(19): siRNA sense strand
gaauaguaugcgcagcuua

SEQ ID NO: 101581 - RNA, 19 nt, Homo sapiens
  misc_RNA (1)...(19): siRNA sense strand
cuuaaagcccaguaauaua

SEQ ID NO: 101582 - RNA, 19 nt, Homo sapiens
  misc_RNA (1)...(19): siRNA sense strand
uaucagaugcuguguggaa

SEQ ID NO: 101583 - RNA, 19 nt, Homo sapiens
  misc_RNA (1)...(19): siRNA sense strand
uuaaagcccaguaauauag

SEQ ID NO: 101584 - RNA, 19 nt, Homo sapiens
  misc_RNA (1)...(19): siRNA sense strand
gaacacacaauagaagagu

SEQ ID NO: 101585 - RNA, 19 nt, Homo sapiens
  misc_RNA (1)...(19): siRNA sense strand
ucaggcaagggauuuguua

SEQ ID NO: 101586 - RNA, 19 nt, Homo sapiens
  misc_RNA (1)...(19): siRNA sense strand
gaccuaaauaugcuggaua

SEQ ID NO: 101587 - RNA, 19 nt, Homo sapiens
  misc_RNA (1)...(19): siRNA sense strand
cuacagagagcuaguucuu

SEQ ID NO: 101588 - RNA, 19 nt, Homo sapiens
  misc_RNA (1)...(19): siRNA sense strand
gaugaaagggaacacacaa

SEQ ID NO: 101589 - RNA, 19 nt, Homo sapiens
  misc_RNA (1)...(19): siRNA sense strand
gauugcacuuugaagauuc

SEQ ID NO: 101590 - RNA, 19 nt, Homo sapiens
  misc_RNA (1)...(19): siRNA sense strand
aagcaagcgugacaacaau

SEQ ID NO: 101591 - RNA, 19 nt, Homo sapiens
  misc_RNA (1)...(19): siRNA sense strand
guguagagauuggagauuc

SEQ ID NO: 101592 - RNA, 19 nt, Homo sapiens
  misc_RNA (1)...(19): siRNA sense strand
aaagcccaguaauauagua

SEQ ID NO: 101593 - RNA, 19 nt, Homo sapiens
  misc_RNA (1)...(19): siRNA sense strand
uaugaugacgccuuaugua

SEQ ID NO: 101594 - RNA, 19 nt, Homo sapiens
  misc_RNA (1)...(19): siRNA sense strand
gagcuaguucuuaugaaau

SEQ ID NO: 101595 - RNA, 19 nt, Homo sapiens
  misc_RNA (1)...(19): siRNA sense strand
uaugaugccauucuugaaa

SEQ ID NO: 101596 - RNA, 19 nt, Homo sapiens
  misc_RNA (1)...(19): siRNA sense strand
ugauucagauggagcuaga

SEQ ID NO: 101597 - RNA, 19 nt, Homo sapiens
  misc_RNA (1)...(19): siRNA sense strand
gaagaguggaaagaauuga

SEQ ID NO: 101598 - RNA, 19 nt, Homo sapiens
  misc_RNA (1)...(19): siRNA sense strand
auagaagaguggaaagaau

SEQ ID NO: 101599 - RNA, 19 nt, Homo sapiens
  misc_RNA (1)...(19): siRNA sense strand
ggacuuacguugaaaacag

SEQ ID NO: 101600 - RNA, 19 nt, Homo sapiens
  misc_RNA (1)...(19): siRNA sense strand
cagaugcuguguggaauca

SEQ ID NO: 101601 - RNA, 19 nt, Homo sapiens
  misc_RNA (1)...(19): siRNA sense strand
agagagcuaguucuuauga

SEQ ID NO: 101602 - RNA, 19 nt, Homo sapiens
  misc_RNA (1)...(19): siRNA sense strand
gggaacacacaauagaaga

SEQ ID NO: 101603 - RNA, 19 nt, Homo sapiens
  misc_RNA (1)...(19): siRNA sense strand
ugacaagcaguuagaugaa

SEQ ID NO: 101604 - RNA, 19 nt, Homo sapiens
  misc_RNA (1)...(19): siRNA sense strand
caaagaucccugacaagca

SEQ ID NO: 101605 - RNA, 19 nt, Homo sapiens
  misc_RNA (1)...(19): siRNA sense strand
caauagaagaguggaaaga

SEQ ID NO: 101606 - RNA, 19 nt, Homo sapiens
  misc_RNA (1)...(19): siRNA sense strand
ccuagaagaauuucaagau

SEQ ID NO: 101607 - RNA, 19 nt, Homo sapiens
  misc_RNA (1)...(19): siRNA sense strand
cagaagcuccaccaccaaa

SEQ ID NO: 101608 - RNA, 19 nt, Homo sapiens
  misc_RNA (1)...(19): siRNA sense strand
gaacagcuuggaacaccau

SEQ ID NO: 101609 - RNA, 19 nt, Homo sapiens
  misc_RNA (1)...(19): siRNA sense strand
gaugcuguguggaaucaag

SEQ ID NO: 101610 - RNA, 19 nt, Homo sapiens
  misc_RNA (1)...(19): siRNA sense strand
agaguggaaagaauugaua

SEQ ID NO: 101611 - RNA, 19 nt, Homo sapiens
  misc_RNA (1)...(19): siRNA sense strand
caaccaacaguaaggacuu

SEQ ID NO: 101612 - RNA, 19 nt, Homo sapiens
  misc_RNA (1)...(19): siRNA sense strand
uaauuggccuuuugaaugu

SEQ ID NO: 101613 - RNA, 19 nt, Homo sapiens
  misc_RNA (1)...(19): siRNA sense strand
cuaaaaggaucucuguaga

SEQ ID NO: 101614 - RNA, 19 nt, Homo sapiens
  misc_RNA (1)...(19): siRNA sense strand
gcaggaacgaguuuuauga

SEQ ID NO: 101615 - RNA, 19 nt, Homo sapiens
  misc_RNA (1)...(19): siRNA sense strand
ggagcucaaggaauaguau

SEQ ID NO: 101616 - RNA, 19 nt, Homo sapiens
  misc_RNA (1)...(19): siRNA sense strand
agaugaagcucuccaacac

SEQ ID NO: 101617 - RNA, 19 nt, Homo sapiens
  misc_RNA (1)...(19): siRNA sense strand
gcagaagcuccaccaccaa

SEQ ID NO: 101618 - RNA, 19 nt, Homo sapiens
  misc_RNA (1)...(19): siRNA sense strand
acuuaaagcccaguaauau

SEQ ID NO: 101619 - RNA, 19 nt, Homo sapiens
  misc_RNA (1)...(19): siRNA sense strand
cugacaagcaguuagauga

SEQ ID NO: 101620 - RNA, 19 nt, Homo sapiens
  misc_RNA (1)...(19): siRNA sense strand
ggagcuagaucaugaaaga

SEQ ID NO: 101621 - RNA, 19 nt, Homo sapiens
  misc_RNA (1)...(19): siRNA sense strand
gagaaacucuucccugaug

SEQ ID NO: 101622 - RNA, 19 nt, Homo sapiens
  misc_RNA (1)...(19): siRNA sense strand
ucacaguccugaaacgaua

SEQ ID NO: 101623 - RNA, 19 nt, Homo sapiens
  misc_RNA (1)...(19): siRNA sense strand
ugaaagaaauguugcaauc

SEQ ID NO: 101624 - RNA, 19 nt, Homo sapiens
  misc_RNA (1)...(19): siRNA sense strand
gauuggagauucuacauuc

SEQ ID NO: 101625 - RNA, 19 nt, Homo sapiens
  misc_RNA (1)...(19): siRNA sense strand
agaaaucccuagaagaauu

SEQ ID NO: 101626 - RNA, 19 nt, Homo sapiens
  misc_RNA (1)...(19): siRNA sense strand
ggauauagcuuugagaaac

SEQ ID NO: 101627 - RNA, 19 nt, Homo sapiens
  misc_RNA (1)...(19): siRNA sense strand
gaagcuaagccgaccauuu

SEQ ID NO: 101628 - RNA, 19 nt, Homo sapiens
  misc_RNA (1)...(19): siRNA sense strand
gaacacaacaaacuuaaag

SEQ ID NO: 101629 - RNA, 19 nt, Homo sapiens
  misc_RNA (1)...(19): siRNA sense strand
gcucauggaugcaaaucuu

SEQ ID NO: 101630 - RNA, 19 nt, Homo sapiens
  misc_RNA (1)...(19): siRNA sense strand
acagagagcuaguucuuau

SEQ ID NO: 101631 - RNA, 19 nt, Homo sapiens
  misc_RNA (1)...(19): siRNA sense strand
gaagcaagcgugacaacaa

SEQ ID NO: 101632 - RNA, 19 nt, Homo sapiens
  misc_RNA (1)...(19): siRNA sense strand
ccacagaaaucccuagaag

SEQ ID NO: 101633 - RNA, 19 nt, Homo sapiens
  misc_RNA (1)...(19): siRNA sense strand
cucaggagcucaaggaaua

SEQ ID NO: 101634 - RNA, 19 nt, Homo sapiens
  misc_RNA (1)...(19): siRNA sense strand
gaugacgccuuauguagug

SEQ ID NO: 101635 - RNA, 19 nt, Homo sapiens
  misc_RNA (1)...(19): siRNA sense strand
gaucaguggaauaaaguua

SEQ ID NO: 101636 - RNA, 19 nt, Homo sapiens
  misc_RNA (1)...(19): siRNA sense strand
ugaaagggaacacacaaua

SEQ ID NO: 101637 - RNA, 19 nt, Homo sapiens
  misc_RNA (1)...(19): siRNA sense strand
acagaaaucccuagaagaa

SEQ ID NO: 101638 - RNA, 19 nt, Homo sapiens
  misc_RNA (1)...(19): siRNA sense strand
gacaagcaguuagaugaaa

SEQ ID NO: 101639 - RNA, 19 nt, Homo sapiens
  misc_RNA (1)...(19): siRNA sense strand
ggaacaccauguccugaau

SEQ ID NO: 101640 - RNA, 19 nt, Homo sapiens
  misc_RNA (1)...(19): siRNA sense strand
caccaaagaucccugacaa

SEQ ID NO: 101641 - RNA, 19 nt, Homo sapiens
  misc_RNA (1)...(19): siRNA sense strand
agauggagcuagaucauga

SEQ ID NO: 101642 - RNA, 19 nt, Homo sapiens
  misc_RNA (1)...(19): siRNA sense strand
aaccaagaauggaguuaua

SEQ ID NO: 101643 - RNA, 19 nt, Homo sapiens
  misc_RNA (1)...(19): siRNA sense strand
gaaagggaacacacaauag

SEQ ID NO: 101644 - RNA, 19 nt, Homo sapiens
  misc_RNA (1)...(19): siRNA sense strand
ggaacgaguuuuaugauga

SEQ ID NO: 101645 - RNA, 19 nt, Homo sapiens
  misc_RNA (1)...(19): siRNA sense strand
gcaagcgugacaacaauuu

SEQ ID NO: 101646 - RNA, 19 nt, Homo sapiens
  misc_RNA (1)...(19): siRNA sense strand
ucagaacacaacaaacuua

SEQ ID NO: 101647 - RNA, 19 nt, Homo sapiens
  misc_RNA (1)...(19): siRNA sense strand
gaaaacagaccuaaauaug

SEQ ID NO: 101648 - RNA, 19 nt, Homo sapiens
  misc_RNA (1)...(19): siRNA sense strand
gaaauguugcaaucaagaa

SEQ ID NO: 101649 - RNA, 19 nt, Homo sapiens
  misc_RNA (1)...(19): siRNA sense strand
cuagaagaauuucaagaug

SEQ ID NO: 101650 - RNA, 19 nt, Homo sapiens
  misc_RNA (1)...(19): siRNA sense strand
gaaagaaauguugcaauca

SEQ ID NO: 101651 - RNA, 19 nt, Homo sapiens
  misc_RNA (1)...(19): siRNA sense strand
aaacagaccuaaauaugcu

SEQ ID NO: 101652 - RNA, 19 nt, Homo sapiens
  misc_RNA (1)...(19): siRNA sense strand
gacuuaaagcccaguaaua

SEQ ID NO: 101653 - RNA, 19 nt, Homo sapiens
  misc_RNA (1)...(19): siRNA sense strand
gcccaguaauauaguagua

SEQ ID NO: 101654 - RNA, 19 nt, Homo sapiens
  misc_RNA (1)...(19): siRNA sense strand
gaggagagaaccaagaaug

SEQ ID NO: 101655 - RNA, 19 nt, Homo sapiens
  misc_RNA (1)...(19): siRNA sense strand
caacacccguacaucaaug

SEQ ID NO: 101656 - RNA, 19 nt, Homo sapiens
  misc_RNA (1)...(19): siRNA sense strand
agagcuaguucuuaugaaa

SEQ ID NO: 101657 - RNA, 19 nt, Homo sapiens
  misc_RNA (1)...(19): siRNA sense strand
ggcaugggcuacaaggaaa

SEQ ID NO: 101658 - RNA, 19 nt, Homo sapiens
  misc_RNA (1)...(19): siRNA sense strand
ggaaucaagcaccuucauu

SEQ ID NO: 101659 - RNA, 19 nt, Homo sapiens
  misc_RNA (1)...(19): siRNA sense strand
uguccuaccuucucuauca

SEQ ID NO: 101660 - RNA, 19 nt, Homo sapiens
  misc_RNA (1)...(19): siRNA sense strand
ggaauaguaugcgcagcuu

SEQ ID NO: 101661 - RNA, 19 nt, Homo sapiens
  misc_RNA (1)...(19): siRNA sense strand
gaacaccauguccugaauu

SEQ ID NO: 101662 - RNA, 19 nt, Homo sapiens
  misc_RNA (1)...(19): siRNA sense strand
gaagaaacugcaaccaaca

SEQ ID NO: 101663 - RNA, 19 nt, Homo sapiens
  misc_RNA (1)...(19): siRNA sense strand
gaaccaagaauggaguuau

SEQ ID NO: 101664 - RNA, 19 nt, Homo sapiens
  misc_RNA (1)...(19): siRNA sense strand
ccaaaaugcugguaauaga

SEQ ID NO: 101665 - RNA, 19 nt, Homo sapiens
  misc_RNA (1)...(19): siRNA sense strand
gauauagcuuugagaaacu

SEQ ID NO: 101666 - RNA, 19 nt, Homo sapiens
  misc_RNA (1)...(19): siRNA sense strand
gcuagaucaugaaagaaug

SEQ ID NO: 101667 - RNA, 19 nt, Homo sapiens
  misc_RNA (1)...(19): siRNA sense strand
ggacuuaaagcccaguaau

SEQ ID NO: 101668 - RNA, 19 nt, Homo sapiens
  misc_RNA (1)...(19): siRNA sense strand
gaagcuccaccaccaaaga

SEQ ID NO: 101669 - RNA, 19 nt, Homo sapiens
  misc_RNA (1)...(19): siRNA sense strand
guccugaauucaugaagaa

SEQ ID NO: 101670 - RNA, 19 nt, Homo sapiens
  misc_RNA (1)...(19): siRNA sense strand
gagagcuaguucuuaugaa

SEQ ID NO: 101671 - RNA, 19 nt, Homo sapiens
  misc_RNA (1)...(19): siRNA sense strand
uagaagaguggaaagaauu

SEQ ID NO: 101672 - RNA, 19 nt, Homo sapiens
  misc_RNA (1)...(19): siRNA sense strand
ggacugcaggaacgaguuu

SEQ ID NO: 101673 - RNA, 19 nt, Homo sapiens
  misc_RNA (1)...(19): siRNA sense strand
aagcuaagccgaccauuuc

SEQ ID NO: 101674 - RNA, 19 nt, Homo sapiens
  misc_RNA (1)...(19): siRNA sense strand
ggagagaaccaagaaugga

SEQ ID NO: 101675 - RNA, 19 nt, Homo sapiens
  misc_RNA (1)...(19): siRNA sense strand
ugacucagaacacaacaaa

SEQ ID NO: 101676 - RNA, 19 nt, Homo sapiens
  misc_RNA (1)...(19): siRNA sense strand
ugauugcacuuugaagauu

SEQ ID NO: 101677 - RNA, 19 nt, Homo sapiens
  misc_RNA (1)...(19): siRNA sense strand
gccaagugauucagaugga

SEQ ID NO: 101678 - RNA, 19 nt, Homo sapiens
  misc_RNA (1)...(19): siRNA sense strand
aaagggaacacacaauaga

SEQ ID NO: 101679 - RNA, 19 nt, Homo sapiens
  misc_RNA (1)...(19): siRNA sense strand
cagaacacaacaaacuuaa

SEQ ID NO: 101680 - RNA, 19 nt, Homo sapiens
  misc_RNA (1)...(19): siRNA sense strand
gaauaguaugcgcagcuua

SEQ ID NO: 101681 - RNA, 19 nt, Homo sapiens
  misc_RNA (1)...(19): siRNA sense strand
cuuaaagcccaguaauaua

SEQ ID NO: 101682 - RNA, 19 nt, Homo sapiens
  misc_RNA (1)...(19): siRNA sense strand
uaucagaugcuguguggaa

SEQ ID NO: 101683 - RNA, 19 nt, Homo sapiens
  misc_RNA (1)...(19): siRNA sense strand
uuaaagcccaguaauauag

SEQ ID NO: 101684 - RNA, 19 nt, Homo sapiens
  misc_RNA (1)...(19): siRNA sense strand
gaacacacaauagaagagu

SEQ ID NO: 101685 - RNA, 19 nt, Homo sapiens
  misc_RNA (1)...(19): siRNA sense strand
ucaggcaagggauuuguua

SEQ ID NO: 101686 - RNA, 19 nt, Homo sapiens
  misc_RNA (1)...(19): siRNA sense strand
gaccuaaauaugcuggaua

SEQ ID NO: 101687 - RNA, 19 nt, Homo sapiens
  misc_RNA (1)...(19): siRNA sense strand
cuacagagagcuaguucuu

SEQ ID NO: 101688 - RNA, 19 nt, Homo sapiens
  misc_RNA (1)...(19): siRNA sense strand
gaugaaagggaacacacaa

SEQ ID NO: 101689 - RNA, 19 nt, Homo sapiens
  misc_RNA (1)...(19): siRNA sense strand
gauugcacuuugaagauuc

SEQ ID NO: 101690 - RNA, 19 nt, Homo sapiens
  misc_RNA (1)...(19): siRNA sense strand
aagcaagcgugacaacaau

SEQ ID NO: 101691 - RNA, 19 nt, Homo sapiens
  misc_RNA (1)...(19): siRNA sense strand
guguagagauuggagauuc

SEQ ID NO: 101692 - RNA, 19 nt, Homo sapiens
  misc_RNA (1)...(19): siRNA sense strand
aaagcccaguaauauagua

SEQ ID NO: 101693 - RNA, 19 nt, Homo sapiens
  misc_RNA (1)...(19): siRNA sense strand
uaugaugacgccuuaugua

SEQ ID NO: 101694 - RNA, 19 nt, Homo sapiens
  misc_RNA (1)...(19): siRNA sense strand
gagcuaguucuuaugaaau

SEQ ID NO: 101695 - RNA, 19 nt, Homo sapiens
  misc_RNA (1)...(19): siRNA sense strand
uaugaugccauucuugaaa

SEQ ID NO: 101696 - RNA, 19 nt, Homo sapiens
  misc_RNA (1)...(19): siRNA sense strand
ugauucagauggagcuaga

SEQ ID NO: 101697 - RNA, 19 nt, Homo sapiens
  misc_RNA (1)...(19): siRNA sense strand
gaagaguggaaagaauuga

SEQ ID NO: 101698 - RNA, 19 nt, Homo sapiens
  misc_RNA (1)...(19): siRNA sense strand
auagaagaguggaaagaau

SEQ ID NO: 101699 - RNA, 19 nt, Homo sapiens
  misc_RNA (1)...(19): siRNA sense strand
ggacuuacguugaaaacag

SEQ ID NO: 101700 - RNA, 19 nt, Homo sapiens
  misc_RNA (1)...(19): siRNA sense strand
cagaugcuguguggaauca

SEQ ID NO: 101701 - RNA, 19 nt, Homo sapiens
  misc_RNA (1)...(19): siRNA sense strand
agagagcuaguucuuauga

SEQ ID NO: 101702 - RNA, 19 nt, Homo sapiens
  misc_RNA (1)...(19): siRNA sense strand
gggaacacacaauagaaga

SEQ ID NO: 101703 - RNA, 19 nt, Homo sapiens
  misc_RNA (1)...(19): siRNA sense strand
ugacaagcaguuagaugaa

SEQ ID NO: 101704 - RNA, 19 nt, Homo sapiens
  misc_RNA (1)...(19): siRNA sense strand
caaagaucccugacaagca

SEQ ID NO: 101705 - RNA, 19 nt, Homo sapiens
  misc_RNA (1)...(19): siRNA sense strand
caauagaagaguggaaaga

SEQ ID NO: 101706 - RNA, 19 nt, Homo sapiens
  misc_RNA (1)...(19): siRNA sense strand
ccuagaagaauuucaagau

SEQ ID NO: 101707 - RNA, 19 nt, Homo sapiens
  misc_RNA (1)...(19): siRNA sense strand
cagaagcuccaccaccaaa

SEQ ID NO: 101708 - RNA, 19 nt, Homo sapiens
  misc_RNA (1)...(19): siRNA sense strand
gaacagcuuggaacaccau

SEQ ID NO: 101709 - RNA, 19 nt, Homo sapiens
  misc_RNA (1)...(19): siRNA sense strand
gaugcuguguggaaucaag

SEQ ID NO: 101710 - RNA, 19 nt, Homo sapiens
  misc_RNA (1)...(19): siRNA sense strand
agaguggaaagaauugaua

SEQ ID NO: 101711 - RNA, 19 nt, Homo sapiens
  misc_RNA (1)...(19): siRNA sense strand
caaccaacaguaaggacuu

SEQ ID NO: 101712 - RNA, 19 nt, Homo sapiens
  misc_RNA (1)...(19): siRNA sense strand
uaauuggccuuuugaaugu

SEQ ID NO: 101713 - RNA, 19 nt, Homo sapiens
  misc_RNA (1)...(19): siRNA sense strand
cuaaaaggaucucuguaga

SEQ ID NO: 101714 - RNA, 19 nt, Homo sapiens
  misc_RNA (1)...(19): siRNA sense strand
gcaggaacgaguuuuauga

SEQ ID NO: 101715 - RNA, 19 nt, Homo sapiens
  misc_RNA (1)...(19): siRNA sense strand
ggagcucaaggaauaguau

SEQ ID NO: 101716 - RNA, 19 nt, Homo sapiens
  misc_RNA (1)...(19): siRNA sense strand
agaugaagcucuccaacac

SEQ ID NO: 101717 - RNA, 19 nt, Homo sapiens
  misc_RNA (1)...(19): siRNA sense strand
gcagaagcuccaccaccaa

SEQ ID NO: 101718 - RNA, 19 nt, Homo sapiens
  misc_RNA (1)...(19): siRNA sense strand
acuuaaagcccaguaauau

SEQ ID NO: 101719 - RNA, 19 nt, Homo sapiens
  misc_RNA (1)...(19): siRNA sense strand
cugacaagcaguuagauga

SEQ ID NO: 101720 - RNA, 19 nt, Homo sapiens
  misc_RNA (1)...(19): siRNA sense strand
ggagcuagaucaugaaaga

SEQ ID NO: 101721 - RNA, 19 nt, Homo sapiens
  misc_RNA (1)...(19): siRNA sense strand
gagaaacucuucccugaug

SEQ ID NO: 101722 - RNA, 19 nt, Homo sapiens
  misc_RNA (1)...(19): siRNA sense strand
ucacaguccugaaacgaua

SEQ ID NO: 101723 - RNA, 19 nt, Homo sapiens
  misc_RNA (1)...(19): siRNA sense strand
ugaaagaaauguugcaauc

SEQ ID NO: 101724 - RNA, 19 nt, Homo sapiens
  misc_RNA (1)...(19): siRNA sense strand
gauuggagauucuacauuc

SEQ ID NO: 101725 - RNA, 19 nt, Homo sapiens
  misc_RNA (1)...(19): siRNA sense strand
agaaaucccuagaagaauu

SEQ ID NO: 101726 - RNA, 19 nt, Homo sapiens
  misc_RNA (1)...(19): siRNA sense strand
ggauauagcuuugagaaac

SEQ ID NO: 101727 - RNA, 19 nt, Homo sapiens
  misc_RNA (1)...(19): siRNA sense strand
gaagcuaagccgaccauuu

SEQ ID NO: 101728 - RNA, 19 nt, Homo sapiens
  misc_RNA (1)...(19): siRNA sense strand
gaacacaacaaacuuaaag

SEQ ID NO: 101729 - RNA, 19 nt, Homo sapiens
  misc_RNA (1)...(19): siRNA sense strand
gcucauggaugcaaaucuu

SEQ ID NO: 101730 - RNA, 19 nt, Homo sapiens
  misc_RNA (1)...(19): siRNA sense strand
acagagagcuaguucuuau

SEQ ID NO: 101731 - RNA, 19 nt, Homo sapiens
  misc_RNA (1)...(19): siRNA sense strand
gaagcaagcgugacaacaa

SEQ ID NO: 101732 - RNA, 19 nt, Homo sapiens
  misc_RNA (1)...(19): siRNA sense strand
ucaaugaugugucuucaau

SEQ ID NO: 101733 - RNA, 19 nt, Homo sapiens
  misc_RNA (1)...(19): siRNA sense strand
ccacagaaaucccuagaag

SEQ ID NO: 101734 - RNA, 19 nt, Homo sapiens
  misc_RNA (1)...(19): siRNA sense strand
cucaggagcucaaggaaua

SEQ ID NO: 101735 - RNA, 19 nt, Homo sapiens
  misc_RNA (1)...(19): siRNA sense strand
gaugacgccuuauguagug

SEQ ID NO: 101736 - RNA, 19 nt, Homo sapiens
  misc_RNA (1)...(19): siRNA sense strand
gaucaguggaauaaaguua

SEQ ID NO: 101737 - RNA, 19 nt, Homo sapiens
  misc_RNA (1)...(19): siRNA sense strand
ugaaagggaacacacaaua

SEQ ID NO: 101738 - RNA, 19 nt, Homo sapiens
  misc_RNA (1)...(19): siRNA sense strand
acagaaaucccuagaagaa

SEQ ID NO: 101739 - RNA, 19 nt, Homo sapiens
  misc_RNA (1)...(19): siRNA sense strand
gacaagcaguuagaugaaa

SEQ ID NO: 101740 - RNA, 19 nt, Homo sapiens
  misc_RNA (1)...(19): siRNA sense strand
ggaacaccauguccugaau

SEQ ID NO: 101741 - RNA, 19 nt, Homo sapiens
  misc_RNA (1)...(19): siRNA sense strand
caccaaagaucccugacaa

SEQ ID NO: 101742 - RNA, 19 nt, Homo sapiens
  misc_RNA (1)...(19): siRNA sense strand
agauggagcuagaucauga

SEQ ID NO: 101743 - RNA, 19 nt, Homo sapiens
  misc_RNA (1)...(19): siRNA sense strand
aaccaagaauggaguuaua

SEQ ID NO: 101744 - RNA, 19 nt, Homo sapiens
  misc_RNA (1)...(19): siRNA sense strand
gaaagggaacacacaauag

SEQ ID NO: 101745 - RNA, 19 nt, Homo sapiens
  misc_RNA (1)...(19): siRNA sense strand
ggaacgaguuuuaugauga

SEQ ID NO: 101746 - RNA, 19 nt, Homo sapiens
  misc_RNA (1)...(19): siRNA sense strand
gcaagcgugacaacaauuu

SEQ ID NO: 101747 - RNA, 19 nt, Homo sapiens
  misc_RNA (1)...(19): siRNA sense strand
ucagaacacaacaaacuua

SEQ ID NO: 101748 - RNA, 19 nt, Homo sapiens
  misc_RNA (1)...(19): siRNA sense strand
gaaaacagaccuaaauaug

SEQ ID NO: 101749 - RNA, 19 nt, Homo sapiens
  misc_RNA (1)...(19): siRNA sense strand
gaaauguugcaaucaagaa

SEQ ID NO: 101750 - RNA, 19 nt, Homo sapiens
  misc_RNA (1)...(19): siRNA sense strand
cuagaagaauuucaagaug

SEQ ID NO: 101751 - RNA, 19 nt, Homo sapiens
  misc_RNA (1)...(19): siRNA sense strand
gaaagaaauguugcaauca

SEQ ID NO: 101752 - RNA, 19 nt, Homo sapiens
  misc_RNA (1)...(19): siRNA sense strand
aaacagaccuaaauaugcu

SEQ ID NO: 101753 - RNA, 19 nt, Homo sapiens
  misc_RNA (1)...(19): siRNA sense strand
gacuuaaagcccaguaaua

SEQ ID NO: 101754 - RNA, 19 nt, Homo sapiens
  misc_RNA (1)...(19): siRNA sense strand
gcccaguaauauaguagua

SEQ ID NO: 101755 - RNA, 19 nt, Homo sapiens
  misc_RNA (1)...(19): siRNA sense strand
gaggagagaaccaagaaug

SEQ ID NO: 101756 - RNA, 19 nt, Homo sapiens
  misc_RNA (1)...(19): siRNA sense strand
caacacccguacaucaaug

SEQ ID NO: 101757 - RNA, 19 nt, Homo sapiens
  misc_RNA (1)...(19): siRNA sense strand
agagcuaguucuuaugaaa

SEQ ID NO: 101758 - RNA, 19 nt, Homo sapiens
  misc_RNA (1)...(19): siRNA sense strand
ggcaugggcuacaaggaaa

SEQ ID NO: 101759 - RNA, 19 nt, Homo sapiens
  misc_RNA (1)...(19): siRNA sense strand
ggaaucaagcaccuucauu

SEQ ID NO: 101760 - RNA, 19 nt, Homo sapiens
  misc_RNA (1)...(19): siRNA sense strand
uguccuaccuucucuauca

SEQ ID NO: 101761 - RNA, 19 nt, Homo sapiens
  misc_RNA (1)...(19): siRNA sense strand
ggaauaguaugcgcagcuu

SEQ ID NO: 101762 - RNA, 19 nt, Homo sapiens
  misc_RNA (1)...(19): siRNA sense strand
gaacaccauguccugaauu

SEQ ID NO: 101763 - RNA, 19 nt, Homo sapiens
  misc_RNA (1)...(19): siRNA sense strand
gaagaaacugcaaccaaca

SEQ ID NO: 101764 - RNA, 19 nt, Homo sapiens
  misc_RNA (1)...(19): siRNA sense strand
ccucugggcugcuguagau

SEQ ID NO: 101765 - RNA, 19 nt, Homo sapiens
  misc_RNA (1)...(19): siRNA sense strand
gaaccaagaauggaguuau

SEQ ID NO: 101766 - RNA, 19 nt, Homo sapiens
  misc_RNA (1)...(19): siRNA sense strand
ccaaaaugcugguaauaga

SEQ ID NO: 101767 - RNA, 19 nt, Homo sapiens
  misc_RNA (1)...(19): siRNA sense strand
gauauagcuuugagaaacu

SEQ ID NO: 101768 - RNA, 19 nt, Homo sapiens
  misc_RNA (1)...(19): siRNA sense strand
gcuagaucaugaaagaaug

SEQ ID NO: 101769 - RNA, 19 nt, Homo sapiens
  misc_RNA (1)...(19): siRNA sense strand
ugaugugucuucaauguca

SEQ ID NO: 101770 - RNA, 19 nt, Homo sapiens
  misc_RNA (1)...(19): siRNA sense strand
ggacuuaaagcccaguaau

SEQ ID NO: 101771 - RNA, 19 nt, Homo sapiens
  misc_RNA (1)...(19): siRNA sense strand
gaagcuccaccaccaaaga

SEQ ID NO: 101772 - RNA, 19 nt, Homo sapiens
  misc_RNA (1)...(19): siRNA sense strand
guccugaauucaugaagaa

SEQ ID NO: 101773 - RNA, 19 nt, Homo sapiens
  misc_RNA (1)...(19): siRNA sense strand
gagagcuaguucuuaugaa

SEQ ID NO: 101774 - RNA, 19 nt, Homo sapiens
  misc_RNA (1)...(19): siRNA sense strand
aaugaugugucuucaaugu

SEQ ID NO: 101775 - RNA, 19 nt, Homo sapiens
  misc_RNA (1)...(19): siRNA sense strand
uagaagaguggaaagaauu

SEQ ID NO: 101776 - RNA, 19 nt, Homo sapiens
  misc_RNA (1)...(19): siRNA sense strand
ggacugcaggaacgaguuu

SEQ ID NO: 101777 - RNA, 19 nt, Homo sapiens
  misc_RNA (1)...(19): siRNA sense strand
gugcagcagugaucaaugg

SEQ ID NO: 101778 - RNA, 19 nt, Homo sapiens
  misc_RNA (1)...(19): siRNA sense strand
aagcuaagccgaccauuuc

SEQ ID NO: 101779 - RNA, 19 nt, Homo sapiens
  misc_RNA (1)...(19): siRNA sense strand
ggagagaaccaagaaugga

SEQ ID NO: 101780 - RNA, 19 nt, Homo sapiens
  misc_RNA (1)...(19): siRNA sense strand
ugacucagaacacaacaaa

SEQ ID NO: 101781 - RNA, 19 nt, Homo sapiens
  misc_RNA (1)...(19): siRNA sense strand
ugauugcacuuugaagauu

SEQ ID NO: 101782 - RNA, 19 nt, Homo sapiens
  misc_RNA (1)...(19): siRNA sense strand
gccaagugauucagaugga

SEQ ID NO: 101783 - RNA, 19 nt, Homo sapiens
  misc_RNA (1)...(19): siRNA sense strand
aaagggaacacacaauaga

SEQ ID NO: 101784 - RNA, 19 nt, Homo sapiens
  misc_RNA (1)...(19): siRNA sense strand
gaauaguaugcgcagcuua

SEQ ID NO: 101785 - RNA, 19 nt, Homo sapiens
  misc_RNA (1)...(19): siRNA sense strand
cagaacacaacaaacuuaa

SEQ ID NO: 101786 - RNA, 19 nt, Homo sapiens
  misc_RNA (1)...(19): siRNA sense strand
cuuaaagcccaguaauaua

SEQ ID NO: 101787 - RNA, 19 nt, Homo sapiens
  misc_RNA (1)...(19): siRNA sense strand
uaucagaugcuguguggaa

SEQ ID NO: 101788 - RNA, 19 nt, Homo sapiens
  misc_RNA (1)...(19): siRNA sense strand
uuaaagcccaguaauauag

SEQ ID NO: 101789 - RNA, 19 nt, Homo sapiens
  misc_RNA (1)...(19): siRNA sense strand
caucgucgucugucaauga

SEQ ID NO: 101790 - RNA, 19 nt, Homo sapiens
  misc_RNA (1)...(19): siRNA sense strand
gaacacacaauagaagagu

SEQ ID NO: 101791 - RNA, 19 nt, Homo sapiens
  misc_RNA (1)...(19): siRNA sense strand
ucaggcaagggauuuguua

SEQ ID NO: 101792 - RNA, 19 nt, Homo sapiens
  misc_RNA (1)...(19): siRNA sense strand
gaccuaaauaugcuggaua

SEQ ID NO: 101793 - RNA, 19 nt, Homo sapiens
  misc_RNA (1)...(19): siRNA sense strand
cuacagagagcuaguucuu

SEQ ID NO: 101794 - RNA, 19 nt, Homo sapiens
  misc_RNA (1)...(19): siRNA sense strand
gaugaaagggaacacacaa

SEQ ID NO: 101795 - RNA, 19 nt, Homo sapiens
  misc_RNA (1)...(19): siRNA sense strand
guguagagauuggagauuc

SEQ ID NO: 101796 - RNA, 19 nt, Homo sapiens
  misc_RNA (1)...(19): siRNA sense strand
gauugcacuuugaagauuc

SEQ ID NO: 101797 - RNA, 19 nt, Homo sapiens
  misc_RNA (1)...(19): siRNA sense strand
aagcaagcgugacaacaau

SEQ ID NO: 101798 - RNA, 19 nt, Homo sapiens
  misc_RNA (1)...(19): siRNA sense strand
aaagcccaguaauauagua

SEQ ID NO: 101799 - RNA, 19 nt, Homo sapiens
  misc_RNA (1)...(19): siRNA sense strand
uaugaugacgccuuaugua

SEQ ID NO: 101800 - RNA, 19 nt, Homo sapiens
  misc_RNA (1)...(19): siRNA sense strand
gagcuaguucuuaugaaau

SEQ ID NO: 101801 - RNA, 19 nt, Homo sapiens
  misc_RNA (1)...(19): siRNA sense strand
ugucuucaaugucaacaga

SEQ ID NO: 101802 - RNA, 19 nt, Homo sapiens
  misc_RNA (1)...(19): siRNA sense strand
uaugaugccauucuugaaa

SEQ ID NO: 101803 - RNA, 19 nt, Homo sapiens
  misc_RNA (1)...(19): siRNA sense strand
ugauucagauggagcuaga

SEQ ID NO: 101804 - RNA, 19 nt, Homo sapiens
  misc_RNA (1)...(19): siRNA sense strand
gaagaguggaaagaauuga

SEQ ID NO: 101805 - RNA, 19 nt, Homo sapiens
  misc_RNA (1)...(19): siRNA sense strand
auagaagaguggaaagaau

SEQ ID NO: 101806 - RNA, 19 nt, Homo sapiens
  misc_RNA (1)...(19): siRNA sense strand
ggacuuacguugaaaacag

SEQ ID NO: 101807 - RNA, 19 nt, Homo sapiens
  misc_RNA (1)...(19): siRNA sense strand
cagaugcuguguggaauca

SEQ ID NO: 101808 - RNA, 19 nt, Homo sapiens
  misc_RNA (1)...(19): siRNA sense strand
agagagcuaguucuuauga

SEQ ID NO: 101809 - RNA, 19 nt, Homo sapiens
  misc_RNA (1)...(19): siRNA sense strand
gggaacacacaauagaaga

SEQ ID NO: 101810 - RNA, 19 nt, Homo sapiens
  misc_RNA (1)...(19): siRNA sense strand
ugacaagcaguuagaugaa

SEQ ID NO: 101811 - RNA, 19 nt, Homo sapiens
  misc_RNA (1)...(19): siRNA sense strand
caaagaucccugacaagca

SEQ ID NO: 101812 - RNA, 19 nt, Homo sapiens
  misc_RNA (1)...(19): siRNA sense strand
caauagaagaguggaaaga

SEQ ID NO: 101813 - RNA, 19 nt, Homo sapiens
  misc_RNA (1)...(19): siRNA sense strand
gucaacagauccgacuuug

SEQ ID NO: 101814 - RNA, 19 nt, Homo sapiens
  misc_RNA (1)...(19): siRNA sense strand
cgucgucugucaaugaugu

SEQ ID NO: 101815 - RNA, 19 nt, Homo sapiens
  misc_RNA (1)...(19): siRNA sense strand
gcucucagcauccaucauc

SEQ ID NO: 101816 - RNA, 19 nt, Homo sapiens
  misc_RNA (1)...(19): siRNA sense strand
ccuagaagaauuucaagau

SEQ ID NO: 101817 - RNA, 19 nt, Homo sapiens
  misc_RNA (1)...(19): siRNA sense strand
cagaagcuccaccaccaaa

SEQ ID NO: 101818 - RNA, 19 nt, Homo sapiens
  misc_RNA (1)...(19): siRNA sense strand
gaacagcuuggaacaccau

SEQ ID NO: 101819 - RNA, 19 nt, Homo sapiens
  misc_RNA (1)...(19): siRNA sense strand
agaguggaaagaauugaua

SEQ ID NO: 101820 - RNA, 19 nt, Homo sapiens
  misc_RNA (1)...(19): siRNA sense strand
ggagcuagaucaugaaaga

SEQ ID NO: 101821 - RNA, 19 nt, Homo sapiens
  misc_RNA (1)...(19): siRNA sense strand
gagaaacucuucccugaug

SEQ ID NO: 101822 - RNA, 19 nt, Homo sapiens
  misc_RNA (1)...(19): siRNA sense strand
ucacaguccugaaacgaua

SEQ ID NO: 101823 - RNA, 19 nt, Homo sapiens
  misc_RNA (1)...(19): siRNA sense strand
ugaaagaaauguugcaauc

SEQ ID NO: 101824 - RNA, 19 nt, Homo sapiens
  misc_RNA (1)...(19): siRNA sense strand
gauuggagauucuacauuc

SEQ ID NO: 101825 - RNA, 19 nt, Homo sapiens
  misc_RNA (1)...(19): siRNA sense strand
agaaaucccuagaagaauu

SEQ ID NO: 101826 - RNA, 19 nt, Homo sapiens
  misc_RNA (1)...(19): siRNA sense strand
ggauauagcuuugagaaac

SEQ ID NO: 101827 - RNA, 19 nt, Homo sapiens
  misc_RNA (1)...(19): siRNA sense strand
gaagcuaagccgaccauuu

SEQ ID NO: 101828 - RNA, 19 nt, Homo sapiens
  misc_RNA (1)...(19): siRNA sense strand
gaacacaacaaacuuaaag

SEQ ID NO: 101829 - RNA, 19 nt, Homo sapiens
  misc_RNA (1)...(19): siRNA sense strand
gcucauggaugcaaaucuu

SEQ ID NO: 101830 - RNA, 19 nt, Homo sapiens
  misc_RNA (1)...(19): siRNA sense strand
acagagagcuaguucuuau

SEQ ID NO: 101831 - RNA, 19 nt, Homo sapiens
  misc_RNA (1)...(19): siRNA sense strand
gaagcaagcgugacaacaa

SEQ ID NO: 101832 - RNA, 19 nt, Homo sapiens
  misc_RNA (1)...(19): siRNA sense strand
ucaaugaugugucuucaau

SEQ ID NO: 101833 - RNA, 19 nt, Homo sapiens
  misc_RNA (1)...(19): siRNA sense strand
ccacagaaaucccuagaag

SEQ ID NO: 101834 - RNA, 19 nt, Homo sapiens
  misc_RNA (1)...(19): siRNA sense strand
cucaggagcucaaggaaua

SEQ ID NO: 101835 - RNA, 19 nt, Homo sapiens
  misc_RNA (1)...(19): siRNA sense strand
gaugacgccuuauguagug

SEQ ID NO: 101836 - RNA, 19 nt, Homo sapiens
  misc_RNA (1)...(19): siRNA sense strand
gaucaguggaauaaaguua

SEQ ID NO: 101837 - RNA, 19 nt, Homo sapiens
  misc_RNA (1)...(19): siRNA sense strand
ugaaagggaacacacaaua

SEQ ID NO: 101838 - RNA, 19 nt, Homo sapiens
  misc_RNA (1)...(19): siRNA sense strand
acagaaaucccuagaagaa

SEQ ID NO: 101839 - RNA, 19 nt, Homo sapiens
  misc_RNA (1)...(19): siRNA sense strand
gacaagcaguuagaugaaa

SEQ ID NO: 101840 - RNA, 19 nt, Homo sapiens
  misc_RNA (1)...(19): siRNA sense strand
ggaacaccauguccugaau

SEQ ID NO: 101841 - RNA, 19 nt, Homo sapiens
  misc_RNA (1)...(19): siRNA sense strand
caccaaagaucccugacaa

SEQ ID NO: 101842 - RNA, 19 nt, Homo sapiens
  misc_RNA (1)...(19): siRNA sense strand
agauggagcuagaucauga

SEQ ID NO: 101843 - RNA, 19 nt, Homo sapiens
  misc_RNA (1)...(19): siRNA sense strand
aaccaagaauggaguuaua

SEQ ID NO: 101844 - RNA, 19 nt, Homo sapiens
  misc_RNA (1)...(19): siRNA sense strand
gaaagggaacacacaauag

SEQ ID NO: 101845 - RNA, 19 nt, Homo sapiens
  misc_RNA (1)...(19): siRNA sense strand
ggaacgaguuuuaugauga

SEQ ID NO: 101846 - RNA, 19 nt, Homo sapiens
  misc_RNA (1)...(19): siRNA sense strand
gcaagcgugacaacaauuu

SEQ ID NO: 101847 - RNA, 19 nt, Homo sapiens
  misc_RNA (1)...(19): siRNA sense strand
ucagaacacaacaaacuua

SEQ ID NO: 101848 - RNA, 19 nt, Homo sapiens
  misc_RNA (1)...(19): siRNA sense strand
gaaaacagaccuaaauaug

SEQ ID NO: 101849 - RNA, 19 nt, Homo sapiens
  misc_RNA (1)...(19): siRNA sense strand
gaaauguugcaaucaagaa

SEQ ID NO: 101850 - RNA, 19 nt, Homo sapiens
  misc_RNA (1)...(19): siRNA sense strand
cuagaagaauuucaagaug

SEQ ID NO: 101851 - RNA, 19 nt, Homo sapiens
  misc_RNA (1)...(19): siRNA sense strand
gaaagaaauguugcaauca

SEQ ID NO: 101852 - RNA, 19 nt, Homo sapiens
  misc_RNA (1)...(19): siRNA sense strand
aaacagaccuaaauaugcu

SEQ ID NO: 101853 - RNA, 19 nt, Homo sapiens
  misc_RNA (1)...(19): siRNA sense strand
gacuuaaagcccaguaaua

SEQ ID NO: 101854 - RNA, 19 nt, Homo sapiens
  misc_RNA (1)...(19): siRNA sense strand
gcccaguaauauaguagua

SEQ ID NO: 101855 - RNA, 19 nt, Homo sapiens
  misc_RNA (1)...(19): siRNA sense strand
gaggagagaaccaagaaug

SEQ ID NO: 101856 - RNA, 19 nt, Homo sapiens
  misc_RNA (1)...(19): siRNA sense strand
caacacccguacaucaaug

SEQ ID NO: 101857 - RNA, 19 nt, Homo sapiens
  misc_RNA (1)...(19): siRNA sense strand
agagcuaguucuuaugaaa

SEQ ID NO: 101858 - RNA, 19 nt, Homo sapiens
  misc_RNA (1)...(19): siRNA sense strand
ggcaugggcuacaaggaaa

SEQ ID NO: 101859 - RNA, 19 nt, Homo sapiens
  misc_RNA (1)...(19): siRNA sense strand
ggaaucaagcaccuucauu

SEQ ID NO: 101860 - RNA, 19 nt, Homo sapiens
  misc_RNA (1)...(19): siRNA sense strand
uguccuaccuucucuauca

SEQ ID NO: 101861 - RNA, 19 nt, Homo sapiens
  misc_RNA (1)...(19): siRNA sense strand
ggaauaguaugcgcagcuu

SEQ ID NO: 101862 - RNA, 19 nt, Homo sapiens
  misc_RNA (1)...(19): siRNA sense strand
gaacaccauguccugaauu

SEQ ID NO: 101863 - RNA, 19 nt, Homo sapiens
  misc_RNA (1)...(19): siRNA sense strand
gaagaaacugcaaccaaca

SEQ ID NO: 101864 - RNA, 19 nt, Homo sapiens
  misc_RNA (1)...(19): siRNA sense strand
ccucugggcugcuguagau

SEQ ID NO: 101865 - RNA, 19 nt, Homo sapiens
  misc_RNA (1)...(19): siRNA sense strand
gaaccaagaauggaguuau

SEQ ID NO: 101866 - RNA, 19 nt, Homo sapiens
  misc_RNA (1)...(19): siRNA sense strand
ccaaaaugcugguaauaga

SEQ ID NO: 101867 - RNA, 19 nt, Homo sapiens
  misc_RNA (1)...(19): siRNA sense strand
gauauagcuuugagaaacu

SEQ ID NO: 101868 - RNA, 19 nt, Homo sapiens
  misc_RNA (1)...(19): siRNA sense strand
gcuagaucaugaaagaaug

SEQ ID NO: 101869 - RNA, 19 nt, Homo sapiens
  misc_RNA (1)...(19): siRNA sense strand
ugaugugucuucaauguca

SEQ ID NO: 101870 - RNA, 19 nt, Homo sapiens
  misc_RNA (1)...(19): siRNA sense strand
ggacuuaaagcccaguaau

SEQ ID NO: 101871 - RNA, 19 nt, Homo sapiens
  misc_RNA (1)...(19): siRNA sense strand
gaagcuccaccaccaaaga

SEQ ID NO: 101872 - RNA, 19 nt, Homo sapiens
  misc_RNA (1)...(19): siRNA sense strand
guccugaauucaugaagaa

SEQ ID NO: 101873 - RNA, 19 nt, Homo sapiens
  misc_RNA (1)...(19): siRNA sense strand
gagagcuaguucuuaugaa

SEQ ID NO: 101874 - RNA, 19 nt, Homo sapiens
  misc_RNA (1)...(19): siRNA sense strand
aaugaugugucuucaaugu

SEQ ID NO: 101875 - RNA, 19 nt, Homo sapiens
  misc_RNA (1)...(19): siRNA sense strand
uagaagaguggaaagaauu

SEQ ID NO: 101876 - RNA, 19 nt, Homo sapiens
  misc_RNA (1)...(19): siRNA sense strand
ggacugcaggaacgaguuu

SEQ ID NO: 101877 - RNA, 19 nt, Homo sapiens
  misc_RNA (1)...(19): siRNA sense strand
gugcagcagugaucaaugg

SEQ ID NO: 101878 - RNA, 19 nt, Homo sapiens
  misc_RNA (1)...(19): siRNA sense strand
aagcuaagccgaccauuuc

SEQ ID NO: 101879 - RNA, 19 nt, Homo sapiens
  misc_RNA (1)...(19): siRNA sense strand
ggagagaaccaagaaugga

SEQ ID NO: 101880 - RNA, 19 nt, Homo sapiens
  misc_RNA (1)...(19): siRNA sense strand
ugacucagaacacaacaaa

SEQ ID NO: 101881 - RNA, 19 nt, Homo sapiens
  misc_RNA (1)...(19): siRNA sense strand
ugauugcacuuugaagauu

SEQ ID NO: 101882 - RNA, 19 nt, Homo sapiens
  misc_RNA (1)...(19): siRNA sense strand
gccaagugauucagaugga

SEQ ID NO: 101883 - RNA, 19 nt, Homo sapiens
  misc_RNA (1)...(19): siRNA sense strand
aaagggaacacacaauaga

SEQ ID NO: 101884 - RNA, 19 nt, Homo sapiens
  misc_RNA (1)...(19): siRNA sense strand
gaauaguaugcgcagcuua

SEQ ID NO: 101885 - RNA, 19 nt, Homo sapiens
  misc_RNA (1)...(19): siRNA sense strand
cagaacacaacaaacuuaa

SEQ ID NO: 101886 - RNA, 19 nt, Homo sapiens
  misc_RNA (1)...(19): siRNA sense strand
cuuaaagcccaguaauaua

SEQ ID NO: 101887 - RNA, 19 nt, Homo sapiens
  misc_RNA (1)...(19): siRNA sense strand
uaucagaugcuguguggaa

SEQ ID NO: 101888 - RNA, 19 nt, Homo sapiens
  misc_RNA (1)...(19): siRNA sense strand
uuaaagcccaguaauauag

SEQ ID NO: 101889 - RNA, 19 nt, Homo sapiens
  misc_RNA (1)...(19): siRNA sense strand
caucgucgucugucaauga

SEQ ID NO: 101890 - RNA, 19 nt, Homo sapiens
  misc_RNA (1)...(19): siRNA sense strand
gaacacacaauagaagagu

SEQ ID NO: 101891 - RNA, 19 nt, Homo sapiens
  misc_RNA (1)...(19): siRNA sense strand
ucaggcaagggauuuguua

SEQ ID NO: 101892 - RNA, 19 nt, Homo sapiens
  misc_RNA (1)...(19): siRNA sense strand
gaccuaaauaugcuggaua

SEQ ID NO: 101893 - RNA, 19 nt, Homo sapiens
  misc_RNA (1)...(19): siRNA sense strand
cuacagagagcuaguucuu

SEQ ID NO: 101894 - RNA, 19 nt, Homo sapiens
  misc_RNA (1)...(19): siRNA sense strand
gaugaaagggaacacacaa

SEQ ID NO: 101895 - RNA, 19 nt, Homo sapiens
  misc_RNA (1)...(19): siRNA sense strand
guguagagauuggagauuc

SEQ ID NO: 101896 - RNA, 19 nt, Homo sapiens
  misc_RNA (1)...(19): siRNA sense strand
gauugcacuuugaagauuc

SEQ ID NO: 101897 - RNA, 19 nt, Homo sapiens
  misc_RNA (1)...(19): siRNA sense strand
aagcaagcgugacaacaau

SEQ ID NO: 101898 - RNA, 19 nt, Homo sapiens
  misc_RNA (1)...(19): siRNA sense strand
aaagcccaguaauauagua

SEQ ID NO: 101899 - RNA, 19 nt, Homo sapiens
  misc_RNA (1)...(19): siRNA sense strand
uaugaugacgccuuaugua

SEQ ID NO: 101900 - RNA, 19 nt, Homo sapiens
  misc_RNA (1)...(19): siRNA sense strand
gagcuaguucuuaugaaau

SEQ ID NO: 101901 - RNA, 19 nt, Homo sapiens
  misc_RNA (1)...(19): siRNA sense strand
ugucuucaaugucaacaga

SEQ ID NO: 101902 - RNA, 19 nt, Homo sapiens
  misc_RNA (1)...(19): siRNA sense strand
uaugaugccauucuugaaa

SEQ ID NO: 101903 - RNA, 19 nt, Homo sapiens
  misc_RNA (1)...(19): siRNA sense strand
ugauucagauggagcuaga

SEQ ID NO: 101904 - RNA, 19 nt, Homo sapiens
  misc_RNA (1)...(19): siRNA sense strand
gaagaguggaaagaauuga

SEQ ID NO: 101905 - RNA, 19 nt, Homo sapiens
  misc_RNA (1)...(19): siRNA sense strand
auagaagaguggaaagaau

SEQ ID NO: 101906 - RNA, 19 nt, Homo sapiens
  misc_RNA (1)...(19): siRNA sense strand
ggacuuacguugaaaacag

SEQ ID NO: 101907 - RNA, 19 nt, Homo sapiens
  misc_RNA (1)...(19): siRNA sense strand
cagaugcuguguggaauca

SEQ ID NO: 101908 - RNA, 19 nt, Homo sapiens
  misc_RNA (1)...(19): siRNA sense strand
agagagcuaguucuuauga

SEQ ID NO: 101909 - RNA, 19 nt, Homo sapiens
  misc_RNA (1)...(19): siRNA sense strand
gggaacacacaauagaaga

SEQ ID NO: 101910 - RNA, 19 nt, Homo sapiens
  misc_RNA (1)...(19): siRNA sense strand
ugacaagcaguuagaugaa

SEQ ID NO: 101911 - RNA, 19 nt, Homo sapiens
  misc_RNA (1)...(19): siRNA sense strand
caaagaucccugacaagca

SEQ ID NO: 101912 - RNA, 19 nt, Homo sapiens
  misc_RNA (1)...(19): siRNA sense strand
caauagaagaguggaaaga

SEQ ID NO: 101913 - RNA, 19 nt, Homo sapiens
  misc_RNA (1)...(19): siRNA sense strand
gucaacagauccgacuuug

SEQ ID NO: 101914 - RNA, 19 nt, Homo sapiens
  misc_RNA (1)...(19): siRNA sense strand
cgucgucugucaaugaugu

SEQ ID NO: 101915 - RNA, 19 nt, Homo sapiens
  misc_RNA (1)...(19): siRNA sense strand
gcucucagcauccaucauc

SEQ ID NO: 101916 - RNA, 19 nt, Homo sapiens
  misc_RNA (1)...(19): siRNA sense strand
ccuagaagaauuucaagau

SEQ ID NO: 101917 - RNA, 19 nt, Homo sapiens
  misc_RNA (1)...(19): siRNA sense strand
cagaagcuccaccaccaaa

SEQ ID NO: 101918 - RNA, 19 nt, Homo sapiens
  misc_RNA (1)...(19): siRNA sense strand
gaacagcuuggaacaccau

SEQ ID NO: 101919 - RNA, 19 nt, Homo sapiens
  misc_RNA (1)...(19): siRNA sense strand
agaguggaaagaauugaua

SEQ ID NO: 101920 - RNA, 19 nt, Homo sapiens
  misc_RNA (1)...(19): siRNA sense strand
ggaaagaacuuaucuacaa

SEQ ID NO: 101921 - RNA, 19 nt, Homo sapiens
  misc_RNA (1)...(19): siRNA sense strand
ggaauaagguaauugaaca

SEQ ID NO: 101922 - RNA, 19 nt, Homo sapiens
  misc_RNA (1)...(19): siRNA sense strand
gcaguuggaugaaagagaa

SEQ ID NO: 101923 - RNA, 19 nt, Homo sapiens
  misc_RNA (1)...(19): siRNA sense strand
caaagaugcuagugauuga

SEQ ID NO: 101924 - RNA, 19 nt, Homo sapiens
  misc_RNA (1)...(19): siRNA sense strand
gaaacuauguggagaaucg

SEQ ID NO: 101925 - RNA, 19 nt, Homo sapiens
  misc_RNA (1)...(19): siRNA sense strand
ugaagugugugaaccauaa

SEQ ID NO: 101926 - RNA, 19 nt, Homo sapiens
  misc_RNA (1)...(19): siRNA sense strand
gaaagaacuuaucuacaag

SEQ ID NO: 101927 - RNA, 19 nt, Homo sapiens
  misc_RNA (1)...(19): siRNA sense strand
gaaagagaacacacaauug

SEQ ID NO: 101928 - RNA, 19 nt, Homo sapiens
  misc_RNA (1)...(19): siRNA sense strand
ccaaacacaugccaagaga

SEQ ID NO: 101929 - RNA, 19 nt, Homo sapiens
  misc_RNA (1)...(19): siRNA sense strand
gaaauugcaacccacagua

SEQ ID NO: 101930 - RNA, 19 nt, Homo sapiens
  misc_RNA (1)...(19): siRNA sense strand
cauauguggugacacguua

SEQ ID NO: 101931 - RNA, 19 nt, Homo sapiens
  misc_RNA (1)...(19): siRNA sense strand
ugaaagagaacacacaauu

SEQ ID NO: 101932 - RNA, 19 nt, Homo sapiens
  misc_RNA (1)...(19): siRNA sense strand
caaguaacauuguagucaa

SEQ ID NO: 101933 - RNA, 19 nt, Homo sapiens
  misc_RNA (1)...(19): siRNA sense strand
acugauggaugccaacuua

SEQ ID NO: 101934 - RNA, 19 nt, Homo sapiens
  misc_RNA (1)...(19): siRNA sense strand
agaaaugguucgccacaaa

SEQ ID NO: 101935 - RNA, 19 nt, Homo sapiens
  misc_RNA (1)...(19): siRNA sense strand
aaagagaacacacaauuga

SEQ ID NO: 101936 - RNA, 19 nt, Homo sapiens
  misc_RNA (1)...(19): siRNA sense strand
acaaggaaguaaugaauuc

SEQ ID NO: 101937 - RNA, 19 nt, Homo sapiens
  misc_RNA (1)...(19): siRNA sense strand
ggugacacguuauuacaga

SEQ ID NO: 101938 - RNA, 19 nt, Homo sapiens
  misc_RNA (1)...(19): siRNA sense strand
gaagaauggaaagaacuua

SEQ ID NO: 101939 - RNA, 19 nt, Homo sapiens
  misc_RNA (1)...(19): siRNA sense strand
ggaacaccauguccagaau

SEQ ID NO: 101940 - RNA, 19 nt, Homo sapiens
  misc_RNA (1)...(19): siRNA sense strand
ccagggacuuguugucaaa

SEQ ID NO: 101941 - RNA, 19 nt, Homo sapiens
  misc_RNA (1)...(19): siRNA sense strand
gcauuaagcaccuccauuc

SEQ ID NO: 101942 - RNA, 19 nt, Homo sapiens
  misc_RNA (1)...(19): siRNA sense strand
gacaagcaguuggaugaaa

SEQ ID NO: 101943 - RNA, 19 nt, Homo sapiens
  misc_RNA (1)...(19): siRNA sense strand
guccagaauucaugaagaa

SEQ ID NO: 101944 - RNA, 19 nt, Homo sapiens
  misc_RNA (1)...(19): siRNA sense strand
caagucugauugcacauug

SEQ ID NO: 101945 - RNA, 19 nt, Homo sapiens
  misc_RNA (1)...(19): siRNA sense strand
cccaaacucuucccagauu

SEQ ID NO: 101946 - RNA, 19 nt, Homo sapiens
  misc_RNA (1)...(19): siRNA sense strand
caugaugacuccauaugug

SEQ ID NO: 101947 - RNA, 19 nt, Homo sapiens
  misc_RNA (1)...(19): siRNA sense strand
gaacaccauguccagaauu

SEQ ID NO: 101948 - RNA, 19 nt, Homo sapiens
  misc_RNA (1)...(19): siRNA sense strand
gaacacacaauugaagaau

SEQ ID NO: 101949 - RNA, 19 nt, Homo sapiens
  misc_RNA (1)...(19): siRNA sense strand
gagaaucggcccaaguaug

SEQ ID NO: 101950 - RNA, 19 nt, Homo sapiens
  misc_RNA (1)...(19): siRNA sense strand
ggacgacgccuuacagcau

SEQ ID NO: 101951 - RNA, 19 nt, Homo sapiens
  misc_RNA (1)...(19): siRNA sense strand
ggacuccgagcacaauaaa

SEQ ID NO: 101952 - RNA, 19 nt, Homo sapiens
  misc_RNA (1)...(19): siRNA sense strand
gaugccaacuuaugucaag

SEQ ID NO: 101953 - RNA, 19 nt, Homo sapiens
  misc_RNA (1)...(19): siRNA sense strand
gagaacacacaauugaaga

SEQ ID NO: 101954 - RNA, 19 nt, Homo sapiens
  misc_RNA (1)...(19): siRNA sense strand
ucaaagaugcuagugauug

SEQ ID NO: 101955 - RNA, 19 nt, Homo sapiens
  misc_RNA (1)...(19): siRNA sense strand
ugucaaagaugcuagugau

SEQ ID NO: 101956 - RNA, 19 nt, Homo sapiens
  misc_RNA (1)...(19): siRNA sense strand
gagaaaugguucgccacaa

SEQ ID NO: 101957 - RNA, 19 nt, Homo sapiens
  misc_RNA (1)...(19): siRNA sense strand
gaacaacuaggaacaccau

SEQ ID NO: 101958 - RNA, 19 nt, Homo sapiens
  misc_RNA (1)...(19): siRNA sense strand
acacacaauugaagaaugg

SEQ ID NO: 101959 - RNA, 19 nt, Homo sapiens
  misc_RNA (1)...(19): siRNA sense strand
ggaaguaaugaauucagaa

SEQ ID NO: 101960 - RNA, 19 nt, Homo sapiens
  misc_RNA (1)...(19): siRNA sense strand
ccaggaagggacuauauug

SEQ ID NO: 101961 - RNA, 19 nt, Homo sapiens
  misc_RNA (1)...(19): siRNA sense strand
gaugaaagagaacacacaa

SEQ ID NO: 101962 - RNA, 19 nt, Homo sapiens
  misc_RNA (1)...(19): siRNA sense strand
caaggagaacguggauaua

SEQ ID NO: 101963 - RNA, 19 nt, Homo sapiens
  misc_RNA (1)...(19): siRNA sense strand
gaaguaaugaauucagaag

SEQ ID NO: 101964 - RNA, 19 nt, Homo sapiens
  misc_RNA (1)...(19): siRNA sense strand
ccaguggaauaagguaauu

SEQ ID NO: 101965 - RNA, 19 nt, Homo sapiens
  misc_RNA (1)...(19): siRNA sense strand
ggagaacguggauauaugg

SEQ ID NO: 101966 - RNA, 19 nt, Homo sapiens
  misc_RNA (1)...(19): siRNA sense strand
cgagcacaauaaacucaaa

SEQ ID NO: 101967 - RNA, 19 nt, Homo sapiens
  misc_RNA (1)...(19): siRNA sense strand
guaauugaacaacuaggaa

SEQ ID NO: 101968 - RNA, 19 nt, Homo sapiens
  misc_RNA (1)...(19): siRNA sense strand
ccaaguaacauuguaguca

SEQ ID NO: 101969 - RNA, 19 nt, Homo sapiens
  misc_RNA (1)...(19): siRNA sense strand
ggacagccuucuccuucag

SEQ ID NO: 101970 - RNA, 19 nt, Homo sapiens
  misc_RNA (1)...(19): siRNA sense strand
gagcugguccucaugaagu

SEQ ID NO: 101971 - RNA, 19 nt, Homo sapiens
  misc_RNA (1)...(19): siRNA sense strand
uaagaaacuauguggagaa

SEQ ID NO: 101972 - RNA, 19 nt, Homo sapiens
  misc_RNA (1)...(19): siRNA sense strand
acaaggagaacguggauau

SEQ ID NO: 101973 - RNA, 19 nt, Homo sapiens
  misc_RNA (1)...(19): siRNA sense strand
gcaggcacaagcuucauga

SEQ ID NO: 101974 - RNA, 19 nt, Homo sapiens
  misc_RNA (1)...(19): siRNA sense strand
ggacagcaggcacaagcuu

SEQ ID NO: 101975 - RNA, 19 nt, Homo sapiens
  misc_RNA (1)...(19): siRNA sense strand
cuacaaggaaguaaugaau

SEQ ID NO: 101976 - RNA, 19 nt, Homo sapiens
  misc_RNA (1)...(19): siRNA sense strand
uggagaaucggcccaagua

SEQ ID NO: 101977 - RNA, 19 nt, Homo sapiens
  misc_RNA (1)...(19): siRNA sense strand
gccagggacuuguugucaa

SEQ ID NO: 101978 - RNA, 19 nt, Homo sapiens
  misc_RNA (1)...(19): siRNA sense strand
gauggaugccaacuuaugu

SEQ ID NO: 101979 - RNA, 19 nt, Homo sapiens
  misc_RNA (1)...(19): siRNA sense strand
ggacuuguugucaaagaug

SEQ ID NO: 101980 - RNA, 19 nt, Homo sapiens
  misc_RNA (1)...(19): siRNA sense strand
ugucuuaccugcuguacca

SEQ ID NO: 101981 - RNA, 19 nt, Homo sapiens
  misc_RNA (1)...(19): siRNA sense strand
gaauggaaagaacuuaucu

SEQ ID NO: 101982 - RNA, 19 nt, Homo sapiens
  misc_RNA (1)...(19): siRNA sense strand
gguaauugaacaacuagga

SEQ ID NO: 101983 - RNA, 19 nt, Homo sapiens
  misc_RNA (1)...(19): siRNA sense strand
caggaagggacuauauuga

SEQ ID NO: 101984 - RNA, 19 nt, Homo sapiens
  misc_RNA (1)...(19): siRNA sense strand
aggagaacguggauauaug

SEQ ID NO: 101985 - RNA, 19 nt, Homo sapiens
  misc_RNA (1)...(19): siRNA sense strand
cagcagacccuuucagaac

SEQ ID NO: 101986 - RNA, 19 nt, Homo sapiens
  misc_RNA (1)...(19): siRNA sense strand
acaagcaguuggaugaaag

SEQ ID NO: 101987 - RNA, 19 nt, Homo sapiens
  misc_RNA (1)...(19): siRNA sense strand
gaagcucagcagacccuuu

SEQ ID NO: 101988 - RNA, 19 nt, Homo sapiens
  misc_RNA (1)...(19): siRNA sense strand
caccucagauauaugacaa

SEQ ID NO: 101989 - RNA, 19 nt, Homo sapiens
  misc_RNA (1)...(19): siRNA sense strand
accaugagcgaaugucuua

SEQ ID NO: 101990 - RNA, 19 nt, Homo sapiens
  misc_RNA (1)...(19): siRNA sense strand
gggagcugguccucaugaa

SEQ ID NO: 101991 - RNA, 19 nt, Homo sapiens
  misc_RNA (1)...(19): siRNA sense strand
gaagugugugaaccauaaa

SEQ ID NO: 101992 - RNA, 19 nt, Homo sapiens
  misc_RNA (1)...(19): siRNA sense strand
gcagacccuuucagaacca

SEQ ID NO: 101993 - RNA, 19 nt, Homo sapiens
  misc_RNA (1)...(19): siRNA sense strand
cuacaucaacgucugguau

SEQ ID NO: 101994 - RNA, 19 nt, Homo sapiens
  misc_RNA (1)...(19): siRNA sense strand
gucaagugauucagaugga

SEQ ID NO: 101995 - RNA, 19 nt, Homo sapiens
  misc_RNA (1)...(19): siRNA sense strand
aaauugcaacccacaguaa

SEQ ID NO: 101996 - RNA, 19 nt, Homo sapiens
  misc_RNA (1)...(19): siRNA sense strand
ccaaacucuucccagauuc

SEQ ID NO: 101997 - RNA, 19 nt, Homo sapiens
  misc_RNA (1)...(19): siRNA sense strand
ucaagugauucagauggaa

SEQ ID NO: 101998 - RNA, 19 nt, Homo sapiens
  misc_RNA (1)...(19): siRNA sense strand
ccagaauucaugaagaaau

SEQ ID NO: 101999 - RNA, 19 nt, Homo sapiens
  misc_RNA (1)...(19): siRNA sense strand
ggagaaucggcccaaguau

SEQ ID NO: 102000 - RNA, 19 nt, Homo sapiens
  misc_RNA (1)...(19): siRNA sense strand
aagaaacuauguggagaau

SEQ ID NO: 102001 - RNA, 19 nt, Homo sapiens
  misc_RNA (1)...(19): siRNA sense strand
gaaaugguucgccacaaaa

SEQ ID NO: 102002 - RNA, 19 nt, Homo sapiens
  misc_RNA (1)...(19): siRNA sense strand
aggaaguaaugaauucaga

SEQ ID NO: 102003 - RNA, 19 nt, Homo sapiens
  misc_RNA (1)...(19): siRNA sense strand
gaaugucuuaccugcugua

SEQ ID NO: 102004 - RNA, 19 nt, Homo sapiens
  misc_RNA (1)...(19): siRNA sense strand
caacuaggaacaccauguc

SEQ ID NO: 102005 - RNA, 19 nt, Homo sapiens
  misc_RNA (1)...(19): siRNA sense strand
uaugucaagugauucagau

SEQ ID NO: 102006 - RNA, 19 nt, Homo sapiens
  misc_RNA (1)...(19): siRNA sense strand
ugaagaauggaaagaacuu

SEQ ID NO: 102007 - RNA, 19 nt, Homo sapiens
  misc_RNA (1)...(19): siRNA sense strand
ggaugaaagagaacacaca

SEQ ID NO: 102008 - RNA, 19 nt, Homo sapiens
  misc_RNA (1)...(19): siRNA sense strand
gggacuuguugucaaagau

SEQ ID NO: 102009 - RNA, 19 nt, Homo sapiens
  misc_RNA (1)...(19): siRNA sense strand
cguaugaugcuguccuuga

SEQ ID NO: 102010 - RNA, 19 nt, Homo sapiens
  misc_RNA (1)...(19): siRNA sense strand
ucugugggaugcauuaugg

SEQ ID NO: 102011 - RNA, 19 nt, Homo sapiens
  misc_RNA (1)...(19): siRNA sense strand
aagaacuuaucuacaagga

SEQ ID NO: 102012 - RNA, 19 nt, Homo sapiens
  misc_RNA (1)...(19): siRNA sense strand
gguaugacccagccgaagu

SEQ ID NO: 102013 - RNA, 19 nt, Homo sapiens
  misc_RNA (1)...(19): siRNA sense strand
ggacucaccuuccccaaac

SEQ ID NO: 102014 - RNA, 19 nt, Homo sapiens
  misc_RNA (1)...(19): siRNA sense strand
gaccaguggaauaagguaa

SEQ ID NO: 102015 - RNA, 19 nt, Homo sapiens
  misc_RNA (1)...(19): siRNA sense strand
aaggagaacguggauauau

SEQ ID NO: 102016 - RNA, 19 nt, Homo sapiens
  misc_RNA (1)...(19): siRNA sense strand
gauauaugacaagcaguug

SEQ ID NO: 102017 - RNA, 19 nt, Homo sapiens
  misc_RNA (1)...(19): siRNA sense strand
acaucaacgucugguauga

SEQ ID NO: 102018 - RNA, 19 nt, Homo sapiens
  misc_RNA (1)...(19): siRNA sense strand
uguccagaauucaugaaga

SEQ ID NO: 102019 - RNA, 19 nt, Homo sapiens
  misc_RNA (1)...(19): siRNA sense strand
uaucuacaaggaaguaaug

SEQ ID NO: 102020 - RNA, 19 nt, Homo sapiens
  misc_RNA (1)...(19): siRNA sense strand
ggaaagaacuuaucuacaa

SEQ ID NO: 102021 - RNA, 19 nt, Homo sapiens
  misc_RNA (1)...(19): siRNA sense strand
ggaauaagguaauugaaca

SEQ ID NO: 102022 - RNA, 19 nt, Homo sapiens
  misc_RNA (1)...(19): siRNA sense strand
gcaguuggaugaaagagaa

SEQ ID NO: 102023 - RNA, 19 nt, Homo sapiens
  misc_RNA (1)...(19): siRNA sense strand
caaagaugcuagugauuga

SEQ ID NO: 102024 - RNA, 19 nt, Homo sapiens
  misc_RNA (1)...(19): siRNA sense strand
gaaacuauguggagaaucg

SEQ ID NO: 102025 - RNA, 19 nt, Homo sapiens
  misc_RNA (1)...(19): siRNA sense strand
ugaagugugugaaccauaa

SEQ ID NO: 102026 - RNA, 19 nt, Homo sapiens
  misc_RNA (1)...(19): siRNA sense strand
gaaagaacuuaucuacaag

SEQ ID NO: 102027 - RNA, 19 nt, Homo sapiens
  misc_RNA (1)...(19): siRNA sense strand
gaaagagaacacacaauug

SEQ ID NO: 102028 - RNA, 19 nt, Homo sapiens
  misc_RNA (1)...(19): siRNA sense strand
ccaaacacaugccaagaga

SEQ ID NO: 102029 - RNA, 19 nt, Homo sapiens
  misc_RNA (1)...(19): siRNA sense strand
gaaauugcaacccacagua

SEQ ID NO: 102030 - RNA, 19 nt, Homo sapiens
  misc_RNA (1)...(19): siRNA sense strand
cauauguggugacacguua

SEQ ID NO: 102031 - RNA, 19 nt, Homo sapiens
  misc_RNA (1)...(19): siRNA sense strand
ugaaagagaacacacaauu

SEQ ID NO: 102032 - RNA, 19 nt, Homo sapiens
  misc_RNA (1)...(19): siRNA sense strand
caaguaacauuguagucaa

SEQ ID NO: 102033 - RNA, 19 nt, Homo sapiens
  misc_RNA (1)...(19): siRNA sense strand
acugauggaugccaacuua

SEQ ID NO: 102034 - RNA, 19 nt, Homo sapiens
  misc_RNA (1)...(19): siRNA sense strand
agaaaugguucgccacaaa

SEQ ID NO: 102035 - RNA, 19 nt, Homo sapiens
  misc_RNA (1)...(19): siRNA sense strand
aaagagaacacacaauuga

SEQ ID NO: 102036 - RNA, 19 nt, Homo sapiens
  misc_RNA (1)...(19): siRNA sense strand
acaaggaaguaaugaauuc

SEQ ID NO: 102037 - RNA, 19 nt, Homo sapiens
  misc_RNA (1)...(19): siRNA sense strand
ggugacacguuauuacaga

SEQ ID NO: 102038 - RNA, 19 nt, Homo sapiens
  misc_RNA (1)...(19): siRNA sense strand
gaagaauggaaagaacuua

SEQ ID NO: 102039 - RNA, 19 nt, Homo sapiens
  misc_RNA (1)...(19): siRNA sense strand
ggaacaccauguccagaau

SEQ ID NO: 102040 - RNA, 19 nt, Homo sapiens
  misc_RNA (1)...(19): siRNA sense strand
ccagggacuuguugucaaa

SEQ ID NO: 102041 - RNA, 19 nt, Homo sapiens
  misc_RNA (1)...(19): siRNA sense strand
gcauuaagcaccuccauuc

SEQ ID NO: 102042 - RNA, 19 nt, Homo sapiens
  misc_RNA (1)...(19): siRNA sense strand
gacaagcaguuggaugaaa

SEQ ID NO: 102043 - RNA, 19 nt, Homo sapiens
  misc_RNA (1)...(19): siRNA sense strand
guccagaauucaugaagaa

SEQ ID NO: 102044 - RNA, 19 nt, Homo sapiens
  misc_RNA (1)...(19): siRNA sense strand
gcagugaacagcagugaga

SEQ ID NO: 102045 - RNA, 19 nt, Homo sapiens
  misc_RNA (1)...(19): siRNA sense strand
caagucugauugcacauug

SEQ ID NO: 102046 - RNA, 19 nt, Homo sapiens
  misc_RNA (1)...(19): siRNA sense strand
cccaaacucuucccagauu

SEQ ID NO: 102047 - RNA, 19 nt, Homo sapiens
  misc_RNA (1)...(19): siRNA sense strand
caugaugacuccauaugug

SEQ ID NO: 102048 - RNA, 19 nt, Homo sapiens
  misc_RNA (1)...(19): siRNA sense strand
gaacaccauguccagaauu

SEQ ID NO: 102049 - RNA, 19 nt, Homo sapiens
  misc_RNA (1)...(19): siRNA sense strand
gaacacacaauugaagaau

SEQ ID NO: 102050 - RNA, 19 nt, Homo sapiens
  misc_RNA (1)...(19): siRNA sense strand
gagaaucggcccaaguaug

SEQ ID NO: 102051 - RNA, 19 nt, Homo sapiens
  misc_RNA (1)...(19): siRNA sense strand
ggacgacgccuuacagcau

SEQ ID NO: 102052 - RNA, 19 nt, Homo sapiens
  misc_RNA (1)...(19): siRNA sense strand
ggacuccgagcacaauaaa

SEQ ID NO: 102053 - RNA, 19 nt, Homo sapiens
  misc_RNA (1)...(19): siRNA sense strand
gaugccaacuuaugucaag

SEQ ID NO: 102054 - RNA, 19 nt, Homo sapiens
  misc_RNA (1)...(19): siRNA sense strand
gagaacacacaauugaaga

SEQ ID NO: 102055 - RNA, 19 nt, Homo sapiens
  misc_RNA (1)...(19): siRNA sense strand
ucaaagaugcuagugauug

SEQ ID NO: 102056 - RNA, 19 nt, Homo sapiens
  misc_RNA (1)...(19): siRNA sense strand
ugucaaagaugcuagugau

SEQ ID NO: 102057 - RNA, 19 nt, Homo sapiens
  misc_RNA (1)...(19): siRNA sense strand
gagaaaugguucgccacaa

SEQ ID NO: 102058 - RNA, 19 nt, Homo sapiens
  misc_RNA (1)...(19): siRNA sense strand
gaacaacuaggaacaccau

SEQ ID NO: 102059 - RNA, 19 nt, Homo sapiens
  misc_RNA (1)...(19): siRNA sense strand
acacacaauugaagaaugg

SEQ ID NO: 102060 - RNA, 19 nt, Homo sapiens
  misc_RNA (1)...(19): siRNA sense strand
ucaaugacaucuccuccau

SEQ ID NO: 102061 - RNA, 19 nt, Homo sapiens
  misc_RNA (1)...(19): siRNA sense strand
ggaaguaaugaauucagaa

SEQ ID NO: 102062 - RNA, 19 nt, Homo sapiens
  misc_RNA (1)...(19): siRNA sense strand
ccaggaagggacuauauug

SEQ ID NO: 102063 - RNA, 19 nt, Homo sapiens
  misc_RNA (1)...(19): siRNA sense strand
gaugaaagagaacacacaa

SEQ ID NO: 102064 - RNA, 19 nt, Homo sapiens
  misc_RNA (1)...(19): siRNA sense strand
caaggagaacguggauaua

SEQ ID NO: 102065 - RNA, 19 nt, Homo sapiens
  misc_RNA (1)...(19): siRNA sense strand
gaaguaaugaauucagaag

SEQ ID NO: 102066 - RNA, 19 nt, Homo sapiens
  misc_RNA (1)...(19): siRNA sense strand
ccaguggaauaagguaauu

SEQ ID NO: 102067 - RNA, 19 nt, Homo sapiens
  misc_RNA (1)...(19): siRNA sense strand
ggagaacguggauauaugg

SEQ ID NO: 102068 - RNA, 19 nt, Homo sapiens
  misc_RNA (1)...(19): siRNA sense strand
cgagcacaauaaacucaaa

SEQ ID NO: 102069 - RNA, 19 nt, Homo sapiens
  misc_RNA (1)...(19): siRNA sense strand
guaauugaacaacuaggaa

SEQ ID NO: 102070 - RNA, 19 nt, Homo sapiens
  misc_RNA (1)...(19): siRNA sense strand
ccaaguaacauuguaguca

SEQ ID NO: 102071 - RNA, 19 nt, Homo sapiens
  misc_RNA (1)...(19): siRNA sense strand
ggacagccuucuccuucag

SEQ ID NO: 102072 - RNA, 19 nt, Homo sapiens
  misc_RNA (1)...(19): siRNA sense strand
uaagaaacuauguggagaa

SEQ ID NO: 102073 - RNA, 19 nt, Homo sapiens
  misc_RNA (1)...(19): siRNA sense strand
acaaggagaacguggauau

SEQ ID NO: 102074 - RNA, 19 nt, Homo sapiens
  misc_RNA (1)...(19): siRNA sense strand
gcaggcacaagcuucauga

SEQ ID NO: 102075 - RNA, 19 nt, Homo sapiens
  misc_RNA (1)...(19): siRNA sense strand
gagcugguccucaugaagu

SEQ ID NO: 102076 - RNA, 19 nt, Homo sapiens
  misc_RNA (1)...(19): siRNA sense strand
ggacagcaggcacaagcuu

SEQ ID NO: 102077 - RNA, 19 nt, Homo sapiens
  misc_RNA (1)...(19): siRNA sense strand
cuacaaggaaguaaugaau

SEQ ID NO: 102078 - RNA, 19 nt, Homo sapiens
  misc_RNA (1)...(19): siRNA sense strand
uggagaaucggcccaagua

SEQ ID NO: 102079 - RNA, 19 nt, Homo sapiens
  misc_RNA (1)...(19): siRNA sense strand
gauggaugccaacuuaugu

SEQ ID NO: 102080 - RNA, 19 nt, Homo sapiens
  misc_RNA (1)...(19): siRNA sense strand
ggacuuguugucaaagaug

SEQ ID NO: 102081 - RNA, 19 nt, Homo sapiens
  misc_RNA (1)...(19): siRNA sense strand
gccagggacuuguugucaa

SEQ ID NO: 102082 - RNA, 19 nt, Homo sapiens
  misc_RNA (1)...(19): siRNA sense strand
ugucuuaccugcuguacca

SEQ ID NO: 102083 - RNA, 19 nt, Homo sapiens
  misc_RNA (1)...(19): siRNA sense strand
gaauggaaagaacuuaucu

SEQ ID NO: 102084 - RNA, 19 nt, Homo sapiens
  misc_RNA (1)...(19): siRNA sense strand
gguaauugaacaacuagga

SEQ ID NO: 102085 - RNA, 19 nt, Homo sapiens
  misc_RNA (1)...(19): siRNA sense strand
caggaagggacuauauuga

SEQ ID NO: 102086 - RNA, 19 nt, Homo sapiens
  misc_RNA (1)...(19): siRNA sense strand
aggagaacguggauauaug

SEQ ID NO: 102087 - RNA, 19 nt, Homo sapiens
  misc_RNA (1)...(19): siRNA sense strand
cagcagacccuuucagaac

SEQ ID NO: 102088 - RNA, 19 nt, Homo sapiens
  misc_RNA (1)...(19): siRNA sense strand
acaagcaguuggaugaaag

SEQ ID NO: 102089 - RNA, 19 nt, Homo sapiens
  misc_RNA (1)...(19): siRNA sense strand
gaagcucagcagacccuuu

SEQ ID NO: 102090 - RNA, 19 nt, Homo sapiens
  misc_RNA (1)...(19): siRNA sense strand
accaugagcgaaugucuua

SEQ ID NO: 102091 - RNA, 19 nt, Homo sapiens
  misc_RNA (1)...(19): siRNA sense strand
caccucagauauaugacaa

SEQ ID NO: 102092 - RNA, 19 nt, Homo sapiens
  misc_RNA (1)...(19): siRNA sense strand
gucaagugauucagaugga

SEQ ID NO: 102093 - RNA, 19 nt, Homo sapiens
  misc_RNA (1)...(19): siRNA sense strand
gcagacccuuucagaacca

SEQ ID NO: 102094 - RNA, 19 nt, Homo sapiens
  misc_RNA (1)...(19): siRNA sense strand
cuacaucaacgucugguau

SEQ ID NO: 102095 - RNA, 19 nt, Homo sapiens
  misc_RNA (1)...(19): siRNA sense strand
gggagcugguccucaugaa

SEQ ID NO: 102096 - RNA, 19 nt, Homo sapiens
  misc_RNA (1)...(19): siRNA sense strand
aaauugcaacccacaguaa

SEQ ID NO: 102097 - RNA, 19 nt, Homo sapiens
  misc_RNA (1)...(19): siRNA sense strand
gaagugugugaaccauaaa

SEQ ID NO: 102098 - RNA, 19 nt, Homo sapiens
  misc_RNA (1)...(19): siRNA sense strand
ccaaacucuucccagauuc

SEQ ID NO: 102099 - RNA, 19 nt, Homo sapiens
  misc_RNA (1)...(19): siRNA sense strand
ucaagugauucagauggaa

SEQ ID NO: 102100 - RNA, 19 nt, Homo sapiens
  misc_RNA (1)...(19): siRNA sense strand
ccagaauucaugaagaaau

SEQ ID NO: 102101 - RNA, 19 nt, Homo sapiens
  misc_RNA (1)...(19): siRNA sense strand
ggagaaucggcccaaguau

SEQ ID NO: 102102 - RNA, 19 nt, Homo sapiens
  misc_RNA (1)...(19): siRNA sense strand
aagaaacuauguggagaau

SEQ ID NO: 102103 - RNA, 19 nt, Homo sapiens
  misc_RNA (1)...(19): siRNA sense strand
gaaugucuuaccugcugua

SEQ ID NO: 102104 - RNA, 19 nt, Homo sapiens
  misc_RNA (1)...(19): siRNA sense strand
cauccucgucugucaauga

SEQ ID NO: 102105 - RNA, 19 nt, Homo sapiens
  misc_RNA (1)...(19): siRNA sense strand
aggaaguaaugaauucaga

SEQ ID NO: 102106 - RNA, 19 nt, Homo sapiens
  misc_RNA (1)...(19): siRNA sense strand
caacuaggaacaccauguc

SEQ ID NO: 102107 - RNA, 19 nt, Homo sapiens
  misc_RNA (1)...(19): siRNA sense strand
gaaaugguucgccacaaaa

SEQ ID NO: 102108 - RNA, 19 nt, Homo sapiens
  misc_RNA (1)...(19): siRNA sense strand
cguaugaugcuguccuuga

SEQ ID NO: 102109 - RNA, 19 nt, Homo sapiens
  misc_RNA (1)...(19): siRNA sense strand
uaugucaagugauucagau

SEQ ID NO: 102110 - RNA, 19 nt, Homo sapiens
  misc_RNA (1)...(19): siRNA sense strand
ugaagaauggaaagaacuu

SEQ ID NO: 102111 - RNA, 19 nt, Homo sapiens
  misc_RNA (1)...(19): siRNA sense strand
ggaugaaagagaacacaca

SEQ ID NO: 102112 - RNA, 19 nt, Homo sapiens
  misc_RNA (1)...(19): siRNA sense strand
gggacuuguugucaaagau

SEQ ID NO: 102113 - RNA, 19 nt, Homo sapiens
  misc_RNA (1)...(19): siRNA sense strand
ucugugggaugcauuaugg

SEQ ID NO: 102114 - RNA, 19 nt, Homo sapiens
  misc_RNA (1)...(19): siRNA sense strand
aagaacuuaucuacaagga

SEQ ID NO: 102115 - RNA, 19 nt, Homo sapiens
  misc_RNA (1)...(19): siRNA sense strand
gguaugacccagccgaagu

SEQ ID NO: 102116 - RNA, 19 nt, Homo sapiens
  misc_RNA (1)...(19): siRNA sense strand
ggacucaccuuccccaaac

SEQ ID NO: 102117 - RNA, 19 nt, Homo sapiens
  misc_RNA (1)...(19): siRNA sense strand
gaccaguggaauaagguaa

SEQ ID NO: 102118 - RNA, 19 nt, Homo sapiens
  misc_RNA (1)...(19): siRNA sense strand
acaucaacgucugguauga

SEQ ID NO: 102119 - RNA, 19 nt, Homo sapiens
  misc_RNA (1)...(19): siRNA sense strand
gauauaugacaagcaguug

SEQ ID NO: 102120 - RNA, 19 nt, Homo sapiens
  misc_RNA (1)...(19): siRNA sense strand
ggaaagaacuuaucuacaa

SEQ ID NO: 102121 - RNA, 19 nt, Homo sapiens
  misc_RNA (1)...(19): siRNA sense strand
ggaauaagguaauugaaca

SEQ ID NO: 102122 - RNA, 19 nt, Homo sapiens
  misc_RNA (1)...(19): siRNA sense strand
gcaguuggaugaaagagaa

SEQ ID NO: 102123 - RNA, 19 nt, Homo sapiens
  misc_RNA (1)...(19): siRNA sense strand
caaagaugcuagugauuga

SEQ ID NO: 102124 - RNA, 19 nt, Homo sapiens
  misc_RNA (1)...(19): siRNA sense strand
gaaacuauguggagaaucg

SEQ ID NO: 102125 - RNA, 19 nt, Homo sapiens
  misc_RNA (1)...(19): siRNA sense strand
gaaagagaacacacaauug

SEQ ID NO: 102126 - RNA, 19 nt, Homo sapiens
  misc_RNA (1)...(19): siRNA sense strand
gaaagaacuuaucuacaag

SEQ ID NO: 102127 - RNA, 19 nt, Homo sapiens
  misc_RNA (1)...(19): siRNA sense strand
gaaauugcaacccacagua

SEQ ID NO: 102128 - RNA, 19 nt, Homo sapiens
  misc_RNA (1)...(19): siRNA sense strand
cauauguggugacacguua

SEQ ID NO: 102129 - RNA, 19 nt, Homo sapiens
  misc_RNA (1)...(19): siRNA sense strand
ugaaagagaacacacaauu

SEQ ID NO: 102130 - RNA, 19 nt, Homo sapiens
  misc_RNA (1)...(19): siRNA sense strand
caaguaacauuguagucaa

SEQ ID NO: 102131 - RNA, 19 nt, Homo sapiens
  misc_RNA (1)...(19): siRNA sense strand
agaaaugguucgccacaaa

SEQ ID NO: 102132 - RNA, 19 nt, Homo sapiens
  misc_RNA (1)...(19): siRNA sense strand
acugauggaugccaacuua

SEQ ID NO: 102133 - RNA, 19 nt, Homo sapiens
  misc_RNA (1)...(19): siRNA sense strand
aaagagaacacacaauuga

SEQ ID NO: 102134 - RNA, 19 nt, Homo sapiens
  misc_RNA (1)...(19): siRNA sense strand
acaaggaaguaaugaauuc

SEQ ID NO: 102135 - RNA, 19 nt, Homo sapiens
  misc_RNA (1)...(19): siRNA sense strand
ggugacacguuauuacaga

SEQ ID NO: 102136 - RNA, 19 nt, Homo sapiens
  misc_RNA (1)...(19): siRNA sense strand
gaagaauggaaagaacuua

SEQ ID NO: 102137 - RNA, 19 nt, Homo sapiens
  misc_RNA (1)...(19): siRNA sense strand
ggaacaccauguccagaau

SEQ ID NO: 102138 - RNA, 19 nt, Homo sapiens
  misc_RNA (1)...(19): siRNA sense strand
ccagggacuuguugucaaa

SEQ ID NO: 102139 - RNA, 19 nt, Homo sapiens
  misc_RNA (1)...(19): siRNA sense strand
gcauuaagcaccuccauuc

SEQ ID NO: 102140 - RNA, 19 nt, Homo sapiens
  misc_RNA (1)...(19): siRNA sense strand
gacaagcaguuggaugaaa

SEQ ID NO: 102141 - RNA, 19 nt, Homo sapiens
  misc_RNA (1)...(19): siRNA sense strand
guccagaauucaugaagaa

SEQ ID NO: 102142 - RNA, 19 nt, Homo sapiens
  misc_RNA (1)...(19): siRNA sense strand
caagucugauugcacauug

SEQ ID NO: 102143 - RNA, 19 nt, Homo sapiens
  misc_RNA (1)...(19): siRNA sense strand
cccaaacucuucccagauu

SEQ ID NO: 102144 - RNA, 19 nt, Homo sapiens
  misc_RNA (1)...(19): siRNA sense strand
caugaugacuccauaugug

SEQ ID NO: 102145 - RNA, 19 nt, Homo sapiens
  misc_RNA (1)...(19): siRNA sense strand
gaacaccauguccagaauu

SEQ ID NO: 102146 - RNA, 19 nt, Homo sapiens
  misc_RNA (1)...(19): siRNA sense strand
gaacacacaauugaagaau

SEQ ID NO: 102147 - RNA, 19 nt, Homo sapiens
  misc_RNA (1)...(19): siRNA sense strand
gagaaucggcccaaguaug

SEQ ID NO: 102148 - RNA, 19 nt, Homo sapiens
  misc_RNA (1)...(19): siRNA sense strand
ggacgacgccuuacagcau

SEQ ID NO: 102149 - RNA, 19 nt, Homo sapiens
  misc_RNA (1)...(19): siRNA sense strand
ggacuccgagcacaauaaa

SEQ ID NO: 102150 - RNA, 19 nt, Homo sapiens
  misc_RNA (1)...(19): siRNA sense strand
ugucaaagaugcuagugau

SEQ ID NO: 102151 - RNA, 19 nt, Homo sapiens
  misc_RNA (1)...(19): siRNA sense strand
gagaacacacaauugaaga

SEQ ID NO: 102152 - RNA, 19 nt, Homo sapiens
  misc_RNA (1)...(19): siRNA sense strand
gaugccaacuuaugucaag

SEQ ID NO: 102153 - RNA, 19 nt, Homo sapiens
  misc_RNA (1)...(19): siRNA sense strand
ucaaagaugcuagugauug

SEQ ID NO: 102154 - RNA, 19 nt, Homo sapiens
  misc_RNA (1)...(19): siRNA sense strand
gagaaaugguucgccacaa

SEQ ID NO: 102155 - RNA, 19 nt, Homo sapiens
  misc_RNA (1)...(19): siRNA sense strand
gaacaacuaggaacaccau

SEQ ID NO: 102156 - RNA, 19 nt, Homo sapiens
  misc_RNA (1)...(19): siRNA sense strand
acacacaauugaagaaugg

SEQ ID NO: 102157 - RNA, 19 nt, Homo sapiens
  misc_RNA (1)...(19): siRNA sense strand
ggaaguaaugaauucagaa

SEQ ID NO: 102158 - RNA, 19 nt, Homo sapiens
  misc_RNA (1)...(19): siRNA sense strand
ccaggaagggacuauauug

SEQ ID NO: 102159 - RNA, 19 nt, Homo sapiens
  misc_RNA (1)...(19): siRNA sense strand
gaugaaagagaacacacaa

SEQ ID NO: 102160 - RNA, 19 nt, Homo sapiens
  misc_RNA (1)...(19): siRNA sense strand
caaggagaacguggauaua

SEQ ID NO: 102161 - RNA, 19 nt, Homo sapiens
  misc_RNA (1)...(19): siRNA sense strand
gaaguaaugaauucagaag

SEQ ID NO: 102162 - RNA, 19 nt, Homo sapiens
  misc_RNA (1)...(19): siRNA sense strand
ccaguggaauaagguaauu

SEQ ID NO: 102163 - RNA, 19 nt, Homo sapiens
  misc_RNA (1)...(19): siRNA sense strand
ggagaacguggauauaugg

SEQ ID NO: 102164 - RNA, 19 nt, Homo sapiens
  misc_RNA (1)...(19): siRNA sense strand
cgagcacaauaaacucaaa

SEQ ID NO: 102165 - RNA, 19 nt, Homo sapiens
  misc_RNA (1)...(19): siRNA sense strand
guaauugaacaacuaggaa

SEQ ID NO: 102166 - RNA, 19 nt, Homo sapiens
  misc_RNA (1)...(19): siRNA sense strand
ccaaguaacauuguaguca

SEQ ID NO: 102167 - RNA, 19 nt, Homo sapiens
  misc_RNA (1)...(19): siRNA sense strand
ggacagccuucuccuucag

SEQ ID NO: 102168 - RNA, 19 nt, Homo sapiens
  misc_RNA (1)...(19): siRNA sense strand
uaagaaacuauguggagaa

SEQ ID NO: 102169 - RNA, 19 nt, Homo sapiens
  misc_RNA (1)...(19): siRNA sense strand
acaaggagaacguggauau

SEQ ID NO: 102170 - RNA, 19 nt, Homo sapiens
  misc_RNA (1)...(19): siRNA sense strand
gcaggcacaagcuucauga

SEQ ID NO: 102171 - RNA, 19 nt, Homo sapiens
  misc_RNA (1)...(19): siRNA sense strand
ggacagcaggcacaagcuu

SEQ ID NO: 102172 - RNA, 19 nt, Homo sapiens
  misc_RNA (1)...(19): siRNA sense strand
cuacaaggaaguaaugaau

SEQ ID NO: 102173 - RNA, 19 nt, Homo sapiens
  misc_RNA (1)...(19): siRNA sense strand
uggagaaucggcccaagua

SEQ ID NO: 102174 - RNA, 19 nt, Homo sapiens
  misc_RNA (1)...(19): siRNA sense strand
gccagggacuuguugucaa

SEQ ID NO: 102175 - RNA, 19 nt, Homo sapiens
  misc_RNA (1)...(19): siRNA sense strand
gauggaugccaacuuaugu

SEQ ID NO: 102176 - RNA, 19 nt, Homo sapiens
  misc_RNA (1)...(19): siRNA sense strand
ggacuuguugucaaagaug

SEQ ID NO: 102177 - RNA, 19 nt, Homo sapiens
  misc_RNA (1)...(19): siRNA sense strand
aggagaacguggauauaug

SEQ ID NO: 102178 - RNA, 19 nt, Homo sapiens
  misc_RNA (1)...(19): siRNA sense strand
gaauggaaagaacuuaucu

SEQ ID NO: 102179 - RNA, 19 nt, Homo sapiens
  misc_RNA (1)...(19): siRNA sense strand
ugucuuaccugcuguacca

SEQ ID NO: 102180 - RNA, 19 nt, Homo sapiens
  misc_RNA (1)...(19): siRNA sense strand
gguaauugaacaacuagga

SEQ ID NO: 102181 - RNA, 19 nt, Homo sapiens
  misc_RNA (1)...(19): siRNA sense strand
caggaagggacuauauuga

SEQ ID NO: 102182 - RNA, 19 nt, Homo sapiens
  misc_RNA (1)...(19): siRNA sense strand
acaagcaguuggaugaaag

SEQ ID NO: 102183 - RNA, 19 nt, Homo sapiens
  misc_RNA (1)...(19): siRNA sense strand
accaugagcgaaugucuua

SEQ ID NO: 102184 - RNA, 19 nt, Homo sapiens
  misc_RNA (1)...(19): siRNA sense strand
caccucagauauaugacaa

SEQ ID NO: 102185 - RNA, 19 nt, Homo sapiens
  misc_RNA (1)...(19): siRNA sense strand
aaauugcaacccacaguaa

SEQ ID NO: 102186 - RNA, 19 nt, Homo sapiens
  misc_RNA (1)...(19): siRNA sense strand
gucaagugauucagaugga

SEQ ID NO: 102187 - RNA, 19 nt, Homo sapiens
  misc_RNA (1)...(19): siRNA sense strand
cuacaucaacgucugguau

SEQ ID NO: 102188 - RNA, 19 nt, Homo sapiens
  misc_RNA (1)...(19): siRNA sense strand
ccaaacucuucccagauuc

SEQ ID NO: 102189 - RNA, 19 nt, Homo sapiens
  misc_RNA (1)...(19): siRNA sense strand
ucaagugauucagauggaa

SEQ ID NO: 102190 - RNA, 19 nt, Homo sapiens
  misc_RNA (1)...(19): siRNA sense strand
ccagaauucaugaagaaau

SEQ ID NO: 102191 - RNA, 19 nt, Homo sapiens
  misc_RNA (1)...(19): siRNA sense strand
ggagaaucggcccaaguau

SEQ ID NO: 102192 - RNA, 19 nt, Homo sapiens
  misc_RNA (1)...(19): siRNA sense strand
aagaaacuauguggagaau

SEQ ID NO: 102193 - RNA, 19 nt, Homo sapiens
  misc_RNA (1)...(19): siRNA sense strand
gaaaugguucgccacaaaa

SEQ ID NO: 102194 - RNA, 19 nt, Homo sapiens
  misc_RNA (1)...(19): siRNA sense strand
aggaaguaaugaauucaga

SEQ ID NO: 102195 - RNA, 19 nt, Homo sapiens
  misc_RNA (1)...(19): siRNA sense strand
gaaugucuuaccugcugua

SEQ ID NO: 102196 - RNA, 19 nt, Homo sapiens
  misc_RNA (1)...(19): siRNA sense strand
caacuaggaacaccauguc

SEQ ID NO: 102197 - RNA, 19 nt, Homo sapiens
  misc_RNA (1)...(19): siRNA sense strand
uaugucaagugauucagau

SEQ ID NO: 102198 - RNA, 19 nt, Homo sapiens
  misc_RNA (1)...(19): siRNA sense strand
ugaagaauggaaagaacuu

SEQ ID NO: 102199 - RNA, 19 nt, Homo sapiens
  misc_RNA (1)...(19): siRNA sense strand
ggaugaaagagaacacaca

SEQ ID NO: 102200 - RNA, 19 nt, Homo sapiens
  misc_RNA (1)...(19): siRNA sense strand
gggacuuguugucaaagau

SEQ ID NO: 102201 - RNA, 19 nt, Homo sapiens
  misc_RNA (1)...(19): siRNA sense strand
ucugugggaugcauuaugg

SEQ ID NO: 102202 - RNA, 19 nt, Homo sapiens
  misc_RNA (1)...(19): siRNA sense strand
aagaacuuaucuacaagga

SEQ ID NO: 102203 - RNA, 19 nt, Homo sapiens
  misc_RNA (1)...(19): siRNA sense strand
gguaugacccagccgaagu

SEQ ID NO: 102204 - RNA, 19 nt, Homo sapiens
  misc_RNA (1)...(19): siRNA sense strand
ggacucaccuuccccaaac

SEQ ID NO: 102205 - RNA, 19 nt, Homo sapiens
  misc_RNA (1)...(19): siRNA sense strand
gaccaguggaauaagguaa

SEQ ID NO: 102206 - RNA, 19 nt, Homo sapiens
  misc_RNA (1)...(19): siRNA sense strand
aaggagaacguggauauau

SEQ ID NO: 102207 - RNA, 19 nt, Homo sapiens
  misc_RNA (1)...(19): siRNA sense strand
gauauaugacaagcaguug

SEQ ID NO: 102208 - RNA, 19 nt, Homo sapiens
  misc_RNA (1)...(19): siRNA sense strand
acaucaacgucugguauga

SEQ ID NO: 102209 - RNA, 19 nt, Homo sapiens
  misc_RNA (1)...(19): siRNA sense strand
uguccagaauucaugaaga

SEQ ID NO: 102210 - RNA, 19 nt, Homo sapiens
  misc_RNA (1)...(19): siRNA sense strand
guaacauuguagucaaguc

SEQ ID NO: 102211 - RNA, 19 nt, Homo sapiens
  misc_RNA (1)...(19): siRNA sense strand
uaucuacaaggaaguaaug

SEQ ID NO: 102212 - RNA, 19 nt, Homo sapiens
  misc_RNA (1)...(19): siRNA sense strand
acauuguagucaagucuga

SEQ ID NO: 102213 - RNA, 19 nt, Homo sapiens
  misc_RNA (1)...(19): siRNA sense strand
ucacagggauuuaaaacca

SEQ ID NO: 102214 - RNA, 19 nt, Homo sapiens
  misc_RNA (1)...(19): siRNA sense strand
gaccaugagcgaaugucuu

SEQ ID NO: 102215 - RNA, 19 nt, Homo sapiens
  misc_RNA (1)...(19): siRNA sense strand
guagucaagucugauugca

SEQ ID NO: 102216 - RNA, 19 nt, Homo sapiens
  misc_RNA (1)...(19): siRNA sense strand
uaccugcuguaccaaaugu

SEQ ID NO: 102217 - RNA, 19 nt, Homo sapiens
  misc_RNA (1)...(19): siRNA sense strand
ccacaguaagaaacuaugu

SEQ ID NO: 102218 - RNA, 19 nt, Homo sapiens
  misc_RNA (1)...(19): siRNA sense strand
agauauaugacaagcaguu

SEQ ID NO: 102219 - RNA, 19 nt, Homo sapiens
  misc_RNA (1)...(19): siRNA sense strand
ugauggaugccaacuuaug

SEQ ID NO: 102220 - RNA, 19 nt, Homo sapiens
  misc_RNA (1)...(19): siRNA sense strand
ggaaagaacuuaucuacaa

SEQ ID NO: 102221 - RNA, 19 nt, Homo sapiens
  misc_RNA (1)...(19): siRNA sense strand
ggaauaagguaauugaaca

SEQ ID NO: 102222 - RNA, 19 nt, Homo sapiens
  misc_RNA (1)...(19): siRNA sense strand
gcaguuggaugaaagagaa

SEQ ID NO: 102223 - RNA, 19 nt, Homo sapiens
  misc_RNA (1)...(19): siRNA sense strand
caaagaugcuagugauuga

SEQ ID NO: 102224 - RNA, 19 nt, Homo sapiens
  misc_RNA (1)...(19): siRNA sense strand
gaaacuauguggagaaucg

SEQ ID NO: 102225 - RNA, 19 nt, Homo sapiens
  misc_RNA (1)...(19): siRNA sense strand
ugaagugugugaaccauaa

SEQ ID NO: 102226 - RNA, 19 nt, Homo sapiens
  misc_RNA (1)...(19): siRNA sense strand
gaaagaacuuaucuacaag

SEQ ID NO: 102227 - RNA, 19 nt, Homo sapiens
  misc_RNA (1)...(19): siRNA sense strand
gaaagagaacacacaauug

SEQ ID NO: 102228 - RNA, 19 nt, Homo sapiens
  misc_RNA (1)...(19): siRNA sense strand
ccaaacacaugccaagaga

SEQ ID NO: 102229 - RNA, 19 nt, Homo sapiens
  misc_RNA (1)...(19): siRNA sense strand
gaaauugcaacccacagua

SEQ ID NO: 102230 - RNA, 19 nt, Homo sapiens
  misc_RNA (1)...(19): siRNA sense strand
cauauguggugacacguua

SEQ ID NO: 102231 - RNA, 19 nt, Homo sapiens
  misc_RNA (1)...(19): siRNA sense strand
ugaaagagaacacacaauu

SEQ ID NO: 102232 - RNA, 19 nt, Homo sapiens
  misc_RNA (1)...(19): siRNA sense strand
caaguaacauuguagucaa

SEQ ID NO: 102233 - RNA, 19 nt, Homo sapiens
  misc_RNA (1)...(19): siRNA sense strand
acugauggaugccaacuua

SEQ ID NO: 102234 - RNA, 19 nt, Homo sapiens
  misc_RNA (1)...(19): siRNA sense strand
agaaaugguucgccacaaa

SEQ ID NO: 102235 - RNA, 19 nt, Homo sapiens
  misc_RNA (1)...(19): siRNA sense strand
aaagagaacacacaauuga

SEQ ID NO: 102236 - RNA, 19 nt, Homo sapiens
  misc_RNA (1)...(19): siRNA sense strand
acaaggaaguaaugaauuc

SEQ ID NO: 102237 - RNA, 19 nt, Homo sapiens
  misc_RNA (1)...(19): siRNA sense strand
ggugacacguuauuacaga

SEQ ID NO: 102238 - RNA, 19 nt, Homo sapiens
  misc_RNA (1)...(19): siRNA sense strand
gaagaauggaaagaacuua

SEQ ID NO: 102239 - RNA, 19 nt, Homo sapiens
  misc_RNA (1)...(19): siRNA sense strand
ggaacaccauguccagaau

SEQ ID NO: 102240 - RNA, 19 nt, Homo sapiens
  misc_RNA (1)...(19): siRNA sense strand
ccagggacuuguugucaaa

SEQ ID NO: 102241 - RNA, 19 nt, Homo sapiens
  misc_RNA (1)...(19): siRNA sense strand
gcauuaagcaccuccauuc

SEQ ID NO: 102242 - RNA, 19 nt, Homo sapiens
  misc_RNA (1)...(19): siRNA sense strand
gacaagcaguuggaugaaa

SEQ ID NO: 102243 - RNA, 19 nt, Homo sapiens
  misc_RNA (1)...(19): siRNA sense strand
guccagaauucaugaagaa

SEQ ID NO: 102244 - RNA, 19 nt, Homo sapiens
  misc_RNA (1)...(19): siRNA sense strand
gcagugaacagcagugaga

SEQ ID NO: 102245 - RNA, 19 nt, Homo sapiens
  misc_RNA (1)...(19): siRNA sense strand
caagucugauugcacauug

SEQ ID NO: 102246 - RNA, 19 nt, Homo sapiens
  misc_RNA (1)...(19): siRNA sense strand
cccaaacucuucccagauu

SEQ ID NO: 102247 - RNA, 19 nt, Homo sapiens
  misc_RNA (1)...(19): siRNA sense strand
caugaugacuccauaugug

SEQ ID NO: 102248 - RNA, 19 nt, Homo sapiens
  misc_RNA (1)...(19): siRNA sense strand
gaacaccauguccagaauu

SEQ ID NO: 102249 - RNA, 19 nt, Homo sapiens
  misc_RNA (1)...(19): siRNA sense strand
gaacacacaauugaagaau

SEQ ID NO: 102250 - RNA, 19 nt, Homo sapiens
  misc_RNA (1)...(19): siRNA sense strand
gagaaucggcccaaguaug

SEQ ID NO: 102251 - RNA, 19 nt, Homo sapiens
  misc_RNA (1)...(19): siRNA sense strand
ggacgacgccuuacagcau

SEQ ID NO: 102252 - RNA, 19 nt, Homo sapiens
  misc_RNA (1)...(19): siRNA sense strand
ggacuccgagcacaauaaa

SEQ ID NO: 102253 - RNA, 19 nt, Homo sapiens
  misc_RNA (1)...(19): siRNA sense strand
gaugccaacuuaugucaag

SEQ ID NO: 102254 - RNA, 19 nt, Homo sapiens
  misc_RNA (1)...(19): siRNA sense strand
gagaacacacaauugaaga

SEQ ID NO: 102255 - RNA, 19 nt, Homo sapiens
  misc_RNA (1)...(19): siRNA sense strand
ucaaagaugcuagugauug

SEQ ID NO: 102256 - RNA, 19 nt, Homo sapiens
  misc_RNA (1)...(19): siRNA sense strand
ugucaaagaugcuagugau

SEQ ID NO: 102257 - RNA, 19 nt, Homo sapiens
  misc_RNA (1)...(19): siRNA sense strand
gagaaaugguucgccacaa

SEQ ID NO: 102258 - RNA, 19 nt, Homo sapiens
  misc_RNA (1)...(19): siRNA sense strand
gaacaacuaggaacaccau

SEQ ID NO: 102259 - RNA, 19 nt, Homo sapiens
  misc_RNA (1)...(19): siRNA sense strand
acacacaauugaagaaugg

SEQ ID NO: 102260 - RNA, 19 nt, Homo sapiens
  misc_RNA (1)...(19): siRNA sense strand
ucaaugacaucuccuccau

SEQ ID NO: 102261 - RNA, 19 nt, Homo sapiens
  misc_RNA (1)...(19): siRNA sense strand
ggaaguaaugaauucagaa

SEQ ID NO: 102262 - RNA, 19 nt, Homo sapiens
  misc_RNA (1)...(19): siRNA sense strand
ccaggaagggacuauauug

SEQ ID NO: 102263 - RNA, 19 nt, Homo sapiens
  misc_RNA (1)...(19): siRNA sense strand
gaugaaagagaacacacaa

SEQ ID NO: 102264 - RNA, 19 nt, Homo sapiens
  misc_RNA (1)...(19): siRNA sense strand
caaggagaacguggauaua

SEQ ID NO: 102265 - RNA, 19 nt, Homo sapiens
  misc_RNA (1)...(19): siRNA sense strand
gaaguaaugaauucagaag

SEQ ID NO: 102266 - RNA, 19 nt, Homo sapiens
  misc_RNA (1)...(19): siRNA sense strand
ccaguggaauaagguaauu

SEQ ID NO: 102267 - RNA, 19 nt, Homo sapiens
  misc_RNA (1)...(19): siRNA sense strand
ggagaacguggauauaugg

SEQ ID NO: 102268 - RNA, 19 nt, Homo sapiens
  misc_RNA (1)...(19): siRNA sense strand
cgagcacaauaaacucaaa

SEQ ID NO: 102269 - RNA, 19 nt, Homo sapiens
  misc_RNA (1)...(19): siRNA sense strand
guaauugaacaacuaggaa

SEQ ID NO: 102270 - RNA, 19 nt, Homo sapiens
  misc_RNA (1)...(19): siRNA sense strand
ccaaguaacauuguaguca

SEQ ID NO: 102271 - RNA, 19 nt, Homo sapiens
  misc_RNA (1)...(19): siRNA sense strand
ggacagccuucuccuucag

SEQ ID NO: 102272 - RNA, 19 nt, Homo sapiens
  misc_RNA (1)...(19): siRNA sense strand
uaagaaacuauguggagaa

SEQ ID NO: 102273 - RNA, 19 nt, Homo sapiens
  misc_RNA (1)...(19): siRNA sense strand
acaaggagaacguggauau

SEQ ID NO: 102274 - RNA, 19 nt, Homo sapiens
  misc_RNA (1)...(19): siRNA sense strand
gcaggcacaagcuucauga

SEQ ID NO: 102275 - RNA, 19 nt, Homo sapiens
  misc_RNA (1)...(19): siRNA sense strand
gagcugguccucaugaagu

SEQ ID NO: 102276 - RNA, 19 nt, Homo sapiens
  misc_RNA (1)...(19): siRNA sense strand
ggacagcaggcacaagcuu

SEQ ID NO: 102277 - RNA, 19 nt, Homo sapiens
  misc_RNA (1)...(19): siRNA sense strand
cuacaaggaaguaaugaau

SEQ ID NO: 102278 - RNA, 19 nt, Homo sapiens
  misc_RNA (1)...(19): siRNA sense strand
uggagaaucggcccaagua

SEQ ID NO: 102279 - RNA, 19 nt, Homo sapiens
  misc_RNA (1)...(19): siRNA sense strand
gauggaugccaacuuaugu

SEQ ID NO: 102280 - RNA, 19 nt, Homo sapiens
  misc_RNA (1)...(19): siRNA sense strand
ggacuuguugucaaagaug

SEQ ID NO: 102281 - RNA, 19 nt, Homo sapiens
  misc_RNA (1)...(19): siRNA sense strand
gccagggacuuguugucaa

SEQ ID NO: 102282 - RNA, 19 nt, Homo sapiens
  misc_RNA (1)...(19): siRNA sense strand
ugucuuaccugcuguacca

SEQ ID NO: 102283 - RNA, 19 nt, Homo sapiens
  misc_RNA (1)...(19): siRNA sense strand
gaauggaaagaacuuaucu

SEQ ID NO: 102284 - RNA, 19 nt, Homo sapiens
  misc_RNA (1)...(19): siRNA sense strand
gguaauugaacaacuagga

SEQ ID NO: 102285 - RNA, 19 nt, Homo sapiens
  misc_RNA (1)...(19): siRNA sense strand
caggaagggacuauauuga

SEQ ID NO: 102286 - RNA, 19 nt, Homo sapiens
  misc_RNA (1)...(19): siRNA sense strand
aggagaacguggauauaug

SEQ ID NO: 102287 - RNA, 19 nt, Homo sapiens
  misc_RNA (1)...(19): siRNA sense strand
cagcagacccuuucagaac

SEQ ID NO: 102288 - RNA, 19 nt, Homo sapiens
  misc_RNA (1)...(19): siRNA sense strand
acaagcaguuggaugaaag

SEQ ID NO: 102289 - RNA, 19 nt, Homo sapiens
  misc_RNA (1)...(19): siRNA sense strand
gaagcucagcagacccuuu

SEQ ID NO: 102290 - RNA, 19 nt, Homo sapiens
  misc_RNA (1)...(19): siRNA sense strand
accaugagcgaaugucuua

SEQ ID NO: 102291 - RNA, 19 nt, Homo sapiens
  misc_RNA (1)...(19): siRNA sense strand
caccucagauauaugacaa

SEQ ID NO: 102292 - RNA, 19 nt, Homo sapiens
  misc_RNA (1)...(19): siRNA sense strand
gucaagugauucagaugga

SEQ ID NO: 102293 - RNA, 19 nt, Homo sapiens
  misc_RNA (1)...(19): siRNA sense strand
gcagacccuuucagaacca

SEQ ID NO: 102294 - RNA, 19 nt, Homo sapiens
  misc_RNA (1)...(19): siRNA sense strand
cuacaucaacgucugguau

SEQ ID NO: 102295 - RNA, 19 nt, Homo sapiens
  misc_RNA (1)...(19): siRNA sense strand
gggagcugguccucaugaa

SEQ ID NO: 102296 - RNA, 19 nt, Homo sapiens
  misc_RNA (1)...(19): siRNA sense strand
aaauugcaacccacaguaa

SEQ ID NO: 102297 - RNA, 19 nt, Homo sapiens
  misc_RNA (1)...(19): siRNA sense strand
gaagugugugaaccauaaa

SEQ ID NO: 102298 - RNA, 19 nt, Homo sapiens
  misc_RNA (1)...(19): siRNA sense strand
ccaaacucuucccagauuc

SEQ ID NO: 102299 - RNA, 19 nt, Homo sapiens
  misc_RNA (1)...(19): siRNA sense strand
ucaagugauucagauggaa

SEQ ID NO: 102300 - RNA, 19 nt, Homo sapiens
  misc_RNA (1)...(19): siRNA sense strand
ccagaauucaugaagaaau

SEQ ID NO: 102301 - RNA, 19 nt, Homo sapiens
  misc_RNA (1)...(19): siRNA sense strand
ggagaaucggcccaaguau

SEQ ID NO: 102302 - RNA, 19 nt, Homo sapiens
  misc_RNA (1)...(19): siRNA sense strand
aagaaacuauguggagaau

SEQ ID NO: 102303 - RNA, 19 nt, Homo sapiens
  misc_RNA (1)...(19): siRNA sense strand
gaaugucuuaccugcugua

SEQ ID NO: 102304 - RNA, 19 nt, Homo sapiens
  misc_RNA (1)...(19): siRNA sense strand
cauccucgucugucaauga

SEQ ID NO: 102305 - RNA, 19 nt, Homo sapiens
  misc_RNA (1)...(19): siRNA sense strand
aggaaguaaugaauucaga

SEQ ID NO: 102306 - RNA, 19 nt, Homo sapiens
  misc_RNA (1)...(19): siRNA sense strand
caacuaggaacaccauguc

SEQ ID NO: 102307 - RNA, 19 nt, Homo sapiens
  misc_RNA (1)...(19): siRNA sense strand
gaaaugguucgccacaaaa

SEQ ID NO: 102308 - RNA, 19 nt, Homo sapiens
  misc_RNA (1)...(19): siRNA sense strand
cguaugaugcuguccuuga

SEQ ID NO: 102309 - RNA, 19 nt, Homo sapiens
  misc_RNA (1)...(19): siRNA sense strand
uaugucaagugauucagau

SEQ ID NO: 102310 - RNA, 19 nt, Homo sapiens
  misc_RNA (1)...(19): siRNA sense strand
ugaagaauggaaagaacuu

SEQ ID NO: 102311 - RNA, 19 nt, Homo sapiens
  misc_RNA (1)...(19): siRNA sense strand
ggaugaaagagaacacaca

SEQ ID NO: 102312 - RNA, 19 nt, Homo sapiens
  misc_RNA (1)...(19): siRNA sense strand
gggacuuguugucaaagau

SEQ ID NO: 102313 - RNA, 19 nt, Homo sapiens
  misc_RNA (1)...(19): siRNA sense strand
ucugugggaugcauuaugg

SEQ ID NO: 102314 - RNA, 19 nt, Homo sapiens
  misc_RNA (1)...(19): siRNA sense strand
aagaacuuaucuacaagga

SEQ ID NO: 102315 - RNA, 19 nt, Homo sapiens
  misc_RNA (1)...(19): siRNA sense strand
gguaugacccagccgaagu

SEQ ID NO: 102316 - RNA, 19 nt, Homo sapiens
  misc_RNA (1)...(19): siRNA sense strand
ggacucaccuuccccaaac

SEQ ID NO: 102317 - RNA, 19 nt, Homo sapiens
  misc_RNA (1)...(19): siRNA sense strand
gaccaguggaauaagguaa

SEQ ID NO: 102318 - RNA, 19 nt, Homo sapiens
  misc_RNA (1)...(19): siRNA sense strand
acaucaacgucugguauga

SEQ ID NO: 102319 - RNA, 19 nt, Homo sapiens
  misc_RNA (1)...(19): siRNA sense strand
gauauaugacaagcaguug

SEQ ID NO: 102320 - RNA, 19 nt, Homo sapiens
  misc_RNA (1)...(19): siRNA sense strand
gaagaaagcuggaagaauu

SEQ ID NO: 102321 - RNA, 19 nt, Homo sapiens
  misc_RNA (1)...(19): siRNA sense strand
ccagaaagcuaauucaucu

SEQ ID NO: 102322 - RNA, 19 nt, Homo sapiens
  misc_RNA (1)...(19): siRNA sense strand
ugacauaucugagggagaa

SEQ ID NO: 102323 - RNA, 19 nt, Homo sapiens
  misc_RNA (1)...(19): siRNA sense strand
gcacauggauggagguucu

SEQ ID NO: 102324 - RNA, 19 nt, Homo sapiens
  misc_RNA (1)...(19): siRNA sense strand
gaagaauuccugaacaaau

SEQ ID NO: 102325 - RNA, 19 nt, Homo sapiens
  misc_RNA (1)...(19): siRNA sense strand
ugggagaacugaaggauga

SEQ ID NO: 102326 - RNA, 19 nt, Homo sapiens
  misc_RNA (1)...(19): siRNA sense strand
ggauggagguucucuggau

SEQ ID NO: 102327 - RNA, 19 nt, Homo sapiens
  misc_RNA (1)...(19): siRNA sense strand
uaagggagcugcagguucu

SEQ ID NO: 102328 - RNA, 19 nt, Homo sapiens
  misc_RNA (1)...(19): siRNA sense strand
gaucaagcucugugacuuu

SEQ ID NO: 102329 - RNA, 19 nt, Homo sapiens
  misc_RNA (1)...(19): siRNA sense strand
gcagagagagcagauuuga

SEQ ID NO: 102330 - RNA, 19 nt, Homo sapiens
  misc_RNA (1)...(19): siRNA sense strand
gagguucucuggaucaagu

SEQ ID NO: 102331 - RNA, 19 nt, Homo sapiens
  misc_RNA (1)...(19): siRNA sense strand
gagcagauuugaagcaacu

SEQ ID NO: 102332 - RNA, 19 nt, Homo sapiens
  misc_RNA (1)...(19): siRNA sense strand
gaucaaguccugaagaaag

SEQ ID NO: 102333 - RNA, 19 nt, Homo sapiens
  misc_RNA (1)...(19): siRNA sense strand
ggucauggccagaaagcua

SEQ ID NO: 102334 - RNA, 19 nt, Homo sapiens
  misc_RNA (1)...(19): siRNA sense strand
gagagcagauuugaagcaa

SEQ ID NO: 102335 - RNA, 19 nt, Homo sapiens
  misc_RNA (1)...(19): siRNA sense strand
gaugacgacuuugagaaga

SEQ ID NO: 102336 - RNA, 19 nt, Homo sapiens
  misc_RNA (1)...(19): siRNA sense strand
acugaaggaugacgacuuu

SEQ ID NO: 102337 - RNA, 19 nt, Homo sapiens
  misc_RNA (1)...(19): siRNA sense strand
cuacagcgauggcgagauc

SEQ ID NO: 102338 - RNA, 19 nt, Homo sapiens
  misc_RNA (1)...(19): siRNA sense strand
gagaucugaugcugaggaa

SEQ ID NO: 102339 - RNA, 19 nt, Homo sapiens
  misc_RNA (1)...(19): siRNA sense strand
caacgagccuccuccaaaa

SEQ ID NO: 102340 - RNA, 19 nt, Homo sapiens
  misc_RNA (1)...(19): siRNA sense strand
ucaacgagccuccuccaaa

SEQ ID NO: 102341 - RNA, 19 nt, Homo sapiens
  misc_RNA (1)...(19): siRNA sense strand
uaaaaggccugacauaucu

SEQ ID NO: 102342 - RNA, 19 nt, Homo sapiens
  misc_RNA (1)...(19): siRNA sense strand
ggcacaagguccuacaugu

SEQ ID NO: 102343 - RNA, 19 nt, Homo sapiens
  misc_RNA (1)...(19): siRNA sense strand
guacaucgugggcuucuau

SEQ ID NO: 102344 - RNA, 19 nt, Homo sapiens
  misc_RNA (1)...(19): siRNA sense strand
ccaugcugcuggcgucuaa

SEQ ID NO: 102345 - RNA, 19 nt, Homo sapiens
  misc_RNA (1)...(19): siRNA sense strand
cuacaugucgccagaaaga

SEQ ID NO: 102346 - RNA, 19 nt, Homo sapiens
  misc_RNA (1)...(19): siRNA sense strand
cgacggcucugcaguuaac

SEQ ID NO: 102347 - RNA, 19 nt, Homo sapiens
  misc_RNA (1)...(19): siRNA sense strand
gcacaagguccuacauguc

SEQ ID NO: 102348 - RNA, 19 nt, Homo sapiens
  misc_RNA (1)...(19): siRNA sense strand
guuguuggauuacauaguc

SEQ ID NO: 102349 - RNA, 19 nt, Homo sapiens
  misc_RNA (1)...(19): siRNA sense strand
gaucugaugcugaggaagu

SEQ ID NO: 102350 - RNA, 19 nt, Homo sapiens
  misc_RNA (1)...(19): siRNA sense strand
ugaaggaugacgacuuuga

SEQ ID NO: 102351 - RNA, 19 nt, Homo sapiens
  misc_RNA (1)...(19): siRNA sense strand
uggaucaaguccugaagaa

SEQ ID NO: 102352 - RNA, 19 nt, Homo sapiens
  misc_RNA (1)...(19): siRNA sense strand
agucuggaauuucaagauu

SEQ ID NO: 102353 - RNA, 19 nt, Homo sapiens
  misc_RNA (1)...(19): siRNA sense strand
gaaggugggagaacugaag

SEQ ID NO: 102354 - RNA, 19 nt, Homo sapiens
  misc_RNA (1)...(19): siRNA sense strand
cccgacggcucugcaguua

SEQ ID NO: 102355 - RNA, 19 nt, Homo sapiens
  misc_RNA (1)...(19): siRNA sense strand
ccgcagagagagcagauuu

SEQ ID NO: 102356 - RNA, 19 nt, Homo sapiens
  misc_RNA (1)...(19): siRNA sense strand
agagagagcagauuugaag

SEQ ID NO: 102357 - RNA, 19 nt, Homo sapiens
  misc_RNA (1)...(19): siRNA sense strand
gugcaacucuccguacauc

SEQ ID NO: 102358 - RNA, 19 nt, Homo sapiens
  misc_RNA (1)...(19): siRNA sense strand
gucuggaauuucaagauuu

SEQ ID NO: 102359 - RNA, 19 nt, Homo sapiens
  misc_RNA (1)...(19): siRNA sense strand
gggagaagcacaagaucau

SEQ ID NO: 102360 - RNA, 19 nt, Homo sapiens
  misc_RNA (1)...(19): siRNA sense strand
caauggcggugugguguuc

SEQ ID NO: 102361 - RNA, 19 nt, Homo sapiens
  misc_RNA (1)...(19): siRNA sense strand
acaagaucaugcacagaga

SEQ ID NO: 102362 - RNA, 19 nt, Homo sapiens
  misc_RNA (1)...(19): siRNA sense strand
ggaugacgacuuugagaag

SEQ ID NO: 102363 - RNA, 19 nt, Homo sapiens
  misc_RNA (1)...(19): siRNA sense strand
ccaguggaguguucagucu

SEQ ID NO: 102364 - RNA, 19 nt, Homo sapiens
  misc_RNA (1)...(19): siRNA sense strand
ggagaucaaacccgcaauc

SEQ ID NO: 102365 - RNA, 19 nt, Homo sapiens
  misc_RNA (1)...(19): siRNA sense strand
gaaggaugacgacuuugag

SEQ ID NO: 102366 - RNA, 19 nt, Homo sapiens
  misc_RNA (1)...(19): siRNA sense strand
gcaauggcggugugguguu

SEQ ID NO: 102367 - RNA, 19 nt, Homo sapiens
  misc_RNA (1)...(19): siRNA sense strand
gcagaaggugggagaacug

SEQ ID NO: 102368 - RNA, 19 nt, Homo sapiens
  misc_RNA (1)...(19): siRNA sense strand
uggauuacauagucaacga

SEQ ID NO: 102369 - RNA, 19 nt, Homo sapiens
  misc_RNA (1)...(19): siRNA sense strand
ugaguuguuggauuacaua

SEQ ID NO: 102370 - RNA, 19 nt, Homo sapiens
  misc_RNA (1)...(19): siRNA sense strand
cgaccucccauggcaauuu

SEQ ID NO: 102371 - RNA, 19 nt, Homo sapiens
  misc_RNA (1)...(19): siRNA sense strand
ggaggccccuuagcucaua

SEQ ID NO: 102372 - RNA, 19 nt, Homo sapiens
  misc_RNA (1)...(19): siRNA sense strand
cgacgcccauccagcugaa

SEQ ID NO: 102373 - RNA, 19 nt, Homo sapiens
  misc_RNA (1)...(19): siRNA sense strand
gccagaaagcuaauucauc

SEQ ID NO: 102374 - RNA, 19 nt, Homo sapiens
  misc_RNA (1)...(19): siRNA sense strand
gcuccaccaucggccuuaa

SEQ ID NO: 102375 - RNA, 19 nt, Homo sapiens
  misc_RNA (1)...(19): siRNA sense strand
ucauuacucugugcaguca

SEQ ID NO: 102376 - RNA, 19 nt, Homo sapiens
  misc_RNA (1)...(19): siRNA sense strand
ggaucaaguccugaagaaa

SEQ ID NO: 102377 - RNA, 19 nt, Homo sapiens
  misc_RNA (1)...(19): siRNA sense strand
uuggaggccuugcagaaga

SEQ ID NO: 102378 - RNA, 19 nt, Homo sapiens
  misc_RNA (1)...(19): siRNA sense strand
gcaauccggaaccagauca

SEQ ID NO: 102379 - RNA, 19 nt, Homo sapiens
  misc_RNA (1)...(19): siRNA sense strand
aguguucagucuggaauuu

SEQ ID NO: 102380 - RNA, 19 nt, Homo sapiens
  misc_RNA (1)...(19): siRNA sense strand
gggcacaagguccuacaug

SEQ ID NO: 102381 - RNA, 19 nt, Homo sapiens
  misc_RNA (1)...(19): siRNA sense strand
gcacaagaucaugcacaga

SEQ ID NO: 102382 - RNA, 19 nt, Homo sapiens
  misc_RNA (1)...(19): siRNA sense strand
ggagaagcacaagaucaug

SEQ ID NO: 102383 - RNA, 19 nt, Homo sapiens
  misc_RNA (1)...(19): siRNA sense strand
ugagggagaagcacaagau

SEQ ID NO: 102384 - RNA, 19 nt, Homo sapiens
  misc_RNA (1)...(19): siRNA sense strand
ugaagaaagcuggaagaau

SEQ ID NO: 102385 - RNA, 19 nt, Homo sapiens
  misc_RNA (1)...(19): siRNA sense strand
agaucaagcucugugacuu

SEQ ID NO: 102386 - RNA, 19 nt, Homo sapiens
  misc_RNA (1)...(19): siRNA sense strand
gcucugcggagaccaacuu

SEQ ID NO: 102387 - RNA, 19 nt, Homo sapiens
  misc_RNA (1)...(19): siRNA sense strand
gcggugugguguucaaggu

SEQ ID NO: 102388 - RNA, 19 nt, Homo sapiens
  misc_RNA (1)...(19): siRNA sense strand
gaucaugcacagagauguc

SEQ ID NO: 102389 - RNA, 19 nt, Homo sapiens
  misc_RNA (1)...(19): siRNA sense strand
uaauaaaaggccugacaua

SEQ ID NO: 102390 - RNA, 19 nt, Homo sapiens
  misc_RNA (1)...(19): siRNA sense strand
gcaacucuccguacaucgu

SEQ ID NO: 102391 - RNA, 19 nt, Homo sapiens
  misc_RNA (1)...(19): siRNA sense strand
uggaggccuugcagaagaa

SEQ ID NO: 102392 - RNA, 19 nt, Homo sapiens
  misc_RNA (1)...(19): siRNA sense strand
gcgauggcgagaucaguau

SEQ ID NO: 102393 - RNA, 19 nt, Homo sapiens
  misc_RNA (1)...(19): siRNA sense strand
agauggcgguugggaggua

SEQ ID NO: 102394 - RNA, 19 nt, Homo sapiens
  misc_RNA (1)...(19): siRNA sense strand
ccuccaacauccuagucaa

SEQ ID NO: 102395 - RNA, 19 nt, Homo sapiens
  misc_RNA (1)...(19): siRNA sense strand
ucccaucccuccuccagau

SEQ ID NO: 102396 - RNA, 19 nt, Homo sapiens
  misc_RNA (1)...(19): siRNA sense strand
ggaguguucagucuggaau

SEQ ID NO: 102397 - RNA, 19 nt, Homo sapiens
  misc_RNA (1)...(19): siRNA sense strand
gaugucaagcccuccaaca

SEQ ID NO: 102398 - RNA, 19 nt, Homo sapiens
  misc_RNA (1)...(19): siRNA sense strand
uugaugagcagcagcgaaa

SEQ ID NO: 102399 - RNA, 19 nt, Homo sapiens
  misc_RNA (1)...(19): siRNA sense strand
gcagauuugaagcaacuca

SEQ ID NO: 102400 - RNA, 19 nt, Homo sapiens
  misc_RNA (1)...(19): siRNA sense strand
gucauggccagaaagcuaa

SEQ ID NO: 102401 - RNA, 19 nt, Homo sapiens
  misc_RNA (1)...(19): siRNA sense strand
gaccucccauggcaauuuu

SEQ ID NO: 102402 - RNA, 19 nt, Homo sapiens
  misc_RNA (1)...(19): siRNA sense strand
gagaucaagcucugugacu

SEQ ID NO: 102403 - RNA, 19 nt, Homo sapiens
  misc_RNA (1)...(19): siRNA sense strand
ugacgacuuugagaagauc

SEQ ID NO: 102404 - RNA, 19 nt, Homo sapiens
  misc_RNA (1)...(19): siRNA sense strand
caagaucaugcacagagau

SEQ ID NO: 102405 - RNA, 19 nt, Homo sapiens
  misc_RNA (1)...(19): siRNA sense strand
gaaguggauuuugcagguu

SEQ ID NO: 102406 - RNA, 19 nt, Homo sapiens
  misc_RNA (1)...(19): siRNA sense strand
guucaugcuuuuaucaaga

SEQ ID NO: 102407 - RNA, 19 nt, Homo sapiens
  misc_RNA (1)...(19): siRNA sense strand
ccaacauccuagucaacuc

SEQ ID NO: 102408 - RNA, 19 nt, Homo sapiens
  misc_RNA (1)...(19): siRNA sense strand
ugucaagcccuccaacauc

SEQ ID NO: 102409 - RNA, 19 nt, Homo sapiens
  misc_RNA (1)...(19): siRNA sense strand
caugggacugucucuggua

SEQ ID NO: 102410 - RNA, 19 nt, Homo sapiens
  misc_RNA (1)...(19): siRNA sense strand
cagagagagcagauuugaa

SEQ ID NO: 102411 - RNA, 19 nt, Homo sapiens
  misc_RNA (1)...(19): siRNA sense strand
gauggcgguugggagguau

SEQ ID NO: 102412 - RNA, 19 nt, Homo sapiens
  misc_RNA (1)...(19): siRNA sense strand
caaagacgaugacuucgaa

SEQ ID NO: 102413 - RNA, 19 nt, Homo sapiens
  misc_RNA (1)...(19): siRNA sense strand
auaaaugccucaucaagaa

SEQ ID NO: 102414 - RNA, 19 nt, Homo sapiens
  misc_RNA (1)...(19): siRNA sense strand
gaucagcauuugcauggaa

SEQ ID NO: 102415 - RNA, 19 nt, Homo sapiens
  misc_RNA (1)...(19): siRNA sense strand
uggaggagcuggaacuuga

SEQ ID NO: 102416 - RNA, 19 nt, Homo sapiens
  misc_RNA (1)...(19): siRNA sense strand
uccaggaguuugucaauaa

SEQ ID NO: 102417 - RNA, 19 nt, Homo sapiens
  misc_RNA (1)...(19): siRNA sense strand
ggaagcugauccaccuuga

SEQ ID NO: 102418 - RNA, 19 nt, Homo sapiens
  misc_RNA (1)...(19): siRNA sense strand
gaaagaggccaagaggauu

SEQ ID NO: 102419 - RNA, 19 nt, Homo sapiens
  misc_RNA (1)...(19): siRNA sense strand
gucaauaaaugccucauca

SEQ ID NO: 102420 - RNA, 19 nt, Homo sapiens
  misc_RNA (1)...(19): siRNA sense strand
gaaugcaacucgccguaca

SEQ ID NO: 102421 - RNA, 19 nt, Homo sapiens
  misc_RNA (1)...(19): siRNA sense strand
ccaggaguuugucaauaaa

SEQ ID NO: 102422 - RNA, 19 nt, Homo sapiens
  misc_RNA (1)...(19): siRNA sense strand
gacgaugacuucgaaagga

SEQ ID NO: 102423 - RNA, 19 nt, Homo sapiens
  misc_RNA (1)...(19): siRNA sense strand
gaacuccuggacuauauug

SEQ ID NO: 102424 - RNA, 19 nt, Homo sapiens
  misc_RNA (1)...(19): siRNA sense strand
ugaaagaggccaagaggau

SEQ ID NO: 102425 - RNA, 19 nt, Homo sapiens
  misc_RNA (1)...(19): siRNA sense strand
gguccgagguggaagaagu

SEQ ID NO: 102426 - RNA, 19 nt, Homo sapiens
  misc_RNA (1)...(19): siRNA sense strand
gagagaagcaccagaucau

SEQ ID NO: 102427 - RNA, 19 nt, Homo sapiens
  misc_RNA (1)...(19): siRNA sense strand
ugaagaugcucacaaacca

SEQ ID NO: 102428 - RNA, 19 nt, Homo sapiens
  misc_RNA (1)...(19): siRNA sense strand
ugaacgagccaccuccuaa

SEQ ID NO: 102429 - RNA, 19 nt, Homo sapiens
  misc_RNA (1)...(19): siRNA sense strand
ucuuugaacuccuggacua

SEQ ID NO: 102430 - RNA, 19 nt, Homo sapiens
  misc_RNA (1)...(19): siRNA sense strand
caauaaaugccucaucaag

SEQ ID NO: 102431 - RNA, 19 nt, Homo sapiens
  misc_RNA (1)...(19): siRNA sense strand
gaucaugcaccgagaugug

SEQ ID NO: 102432 - RNA, 19 nt, Homo sapiens
  misc_RNA (1)...(19): siRNA sense strand
aauaaaugccucaucaaga

SEQ ID NO: 102433 - RNA, 19 nt, Homo sapiens
  misc_RNA (1)...(19): siRNA sense strand
gaagaaggagagccucaca

SEQ ID NO: 102434 - RNA, 19 nt, Homo sapiens
  misc_RNA (1)...(19): siRNA sense strand
gcauuugcauggaacacau

SEQ ID NO: 102435 - RNA, 19 nt, Homo sapiens
  misc_RNA (1)...(19): siRNA sense strand
gggcggaccugaagaugcu

SEQ ID NO: 102436 - RNA, 19 nt, Homo sapiens
  misc_RNA (1)...(19): siRNA sense strand
gaacgagccaccuccuaag

SEQ ID NO: 102437 - RNA, 19 nt, Homo sapiens
  misc_RNA (1)...(19): siRNA sense strand
ugguggaccugcagaagaa

SEQ ID NO: 102438 - RNA, 19 nt, Homo sapiens
  misc_RNA (1)...(19): siRNA sense strand
gguugcagggcacacauua

SEQ ID NO: 102439 - RNA, 19 nt, Homo sapiens
  misc_RNA (1)...(19): siRNA sense strand
acucaaagacgaugacuuc

SEQ ID NO: 102440 - RNA, 19 nt, Homo sapiens
  misc_RNA (1)...(19): siRNA sense strand
ucacaaaccacaccuucau

SEQ ID NO: 102441 - RNA, 19 nt, Homo sapiens
  misc_RNA (1)...(19): siRNA sense strand
uggaccaggugcugaaaga

SEQ ID NO: 102442 - RNA, 19 nt, Homo sapiens
  misc_RNA (1)...(19): siRNA sense strand
uggcguaccuccgagagaa

SEQ ID NO: 102443 - RNA, 19 nt, Homo sapiens
  misc_RNA (1)...(19): siRNA sense strand
gaucaagcugugugacuuc

SEQ ID NO: 102444 - RNA, 19 nt, Homo sapiens
  misc_RNA (1)...(19): siRNA sense strand
gaugugaagcccuccaaca

SEQ ID NO: 102445 - RNA, 19 nt, Homo sapiens
  misc_RNA (1)...(19): siRNA sense strand
cgagagaagcaccagauca

SEQ ID NO: 102446 - RNA, 19 nt, Homo sapiens
  misc_RNA (1)...(19): siRNA sense strand
gcaacucgccguacaucgu

SEQ ID NO: 102447 - RNA, 19 nt, Homo sapiens
  misc_RNA (1)...(19): siRNA sense strand
uugaacuccuggacuauau

SEQ ID NO: 102448 - RNA, 19 nt, Homo sapiens
  misc_RNA (1)...(19): siRNA sense strand
uggacuauauugugaacga

SEQ ID NO: 102449 - RNA, 19 nt, Homo sapiens
  misc_RNA (1)...(19): siRNA sense strand
caaaccacaccuucaucaa

SEQ ID NO: 102450 - RNA, 19 nt, Homo sapiens
  misc_RNA (1)...(19): siRNA sense strand
ucaaagacgaugacuucga

SEQ ID NO: 102451 - RNA, 19 nt, Homo sapiens
  misc_RNA (1)...(19): siRNA sense strand
cuccuggacuauauuguga

SEQ ID NO: 102452 - RNA, 19 nt, Homo sapiens
  misc_RNA (1)...(19): siRNA sense strand
ccuccaacauccucgugaa

SEQ ID NO: 102453 - RNA, 19 nt, Homo sapiens
  misc_RNA (1)...(19): siRNA sense strand
guacaucgugggcuucuac

SEQ ID NO: 102454 - RNA, 19 nt, Homo sapiens
  misc_RNA (1)...(19): siRNA sense strand
aggaguuugucaauaaaug

SEQ ID NO: 102455 - RNA, 19 nt, Homo sapiens
  misc_RNA (1)...(19): siRNA sense strand
gagcuggaggccaucuuug

SEQ ID NO: 102456 - RNA, 19 nt, Homo sapiens
  misc_RNA (1)...(19): siRNA sense strand
ccaacauccucgugaacuc

SEQ ID NO: 102457 - RNA, 19 nt, Homo sapiens
  misc_RNA (1)...(19): siRNA sense strand
agaucaagcugugugacuu

SEQ ID NO: 102458 - RNA, 19 nt, Homo sapiens
  misc_RNA (1)...(19): siRNA sense strand
gaccugaagaugcucacaa

SEQ ID NO: 102459 - RNA, 19 nt, Homo sapiens
  misc_RNA (1)...(19): siRNA sense strand
uuccaggaguuugucaaua

SEQ ID NO: 102460 - RNA, 19 nt, Homo sapiens
  misc_RNA (1)...(19): siRNA sense strand
accugaagaugcucacaaa

SEQ ID NO: 102461 - RNA, 19 nt, Homo sapiens
  misc_RNA (1)...(19): siRNA sense strand
guaaaacccugcggcugaa

SEQ ID NO: 102462 - RNA, 19 nt, Homo sapiens
  misc_RNA (1)...(19): siRNA sense strand
aagcugauccaccuugaga

SEQ ID NO: 102463 - RNA, 19 nt, Homo sapiens
  misc_RNA (1)...(19): siRNA sense strand
aaaccacaccuucaucaag

SEQ ID NO: 102464 - RNA, 19 nt, Homo sapiens
  misc_RNA (1)...(19): siRNA sense strand
acaaaccacaccuucauca

SEQ ID NO: 102465 - RNA, 19 nt, Homo sapiens
  misc_RNA (1)...(19): siRNA sense strand
ucaauaaaugccucaucaa

SEQ ID NO: 102466 - RNA, 19 nt, Homo sapiens
  misc_RNA (1)...(19): siRNA sense strand
gcagaagaagcggcuggaa

SEQ ID NO: 102467 - RNA, 19 nt, Homo sapiens
  misc_RNA (1)...(19): siRNA sense strand
aaagaggccaagaggauuc

SEQ ID NO: 102468 - RNA, 19 nt, Homo sapiens
  misc_RNA (1)...(19): siRNA sense strand
aaggagagccucacagcau

SEQ ID NO: 102469 - RNA, 19 nt, Homo sapiens
  misc_RNA (1)...(19): siRNA sense strand
gagaucaagcugugugacu

SEQ ID NO: 102470 - RNA, 19 nt, Homo sapiens
  misc_RNA (1)...(19): siRNA sense strand
gagaugugaagcccuccaa

SEQ ID NO: 102471 - RNA, 19 nt, Homo sapiens
  misc_RNA (1)...(19): siRNA sense strand
ugccauggccaucuuugaa

SEQ ID NO: 102472 - RNA, 19 nt, Homo sapiens
  misc_RNA (1)...(19): siRNA sense strand
gguggaggcugaugacuug

SEQ ID NO: 102473 - RNA, 19 nt, Homo sapiens
  misc_RNA (1)...(19): siRNA sense strand
cagaagggcuacaauguca

SEQ ID NO: 102474 - RNA, 19 nt, Homo sapiens
  misc_RNA (1)...(19): siRNA sense strand
ccaauguccuuaucaacaa

SEQ ID NO: 102475 - RNA, 19 nt, Homo sapiens
  misc_RNA (1)...(19): siRNA sense strand
ggagauugcugugucuauc

SEQ ID NO: 102476 - RNA, 19 nt, Homo sapiens
  misc_RNA (1)...(19): siRNA sense strand
acccagagcugaaccagaa

SEQ ID NO: 102477 - RNA, 19 nt, Homo sapiens
  misc_RNA (1)...(19): siRNA sense strand
gugaagaugugugacuuug

SEQ ID NO: 102478 - RNA, 19 nt, Homo sapiens
  misc_RNA (1)...(19): siRNA sense strand
ccgcagagcguaugagcua

SEQ ID NO: 102479 - RNA, 19 nt, Homo sapiens
  misc_RNA (1)...(19): siRNA sense strand
ucauggaccuggacaucaa

SEQ ID NO: 102480 - RNA, 19 nt, Homo sapiens
  misc_RNA (1)...(19): siRNA sense strand
ggagggccaugugaagaug

SEQ ID NO: 102481 - RNA, 19 nt, Homo sapiens
  misc_RNA (1)...(19): siRNA sense strand
uggcaucaguggcuacuug

SEQ ID NO: 102482 - RNA, 19 nt, Homo sapiens
  misc_RNA (1)...(19): siRNA sense strand
agaagcggcugcucaugga

SEQ ID NO: 102483 - RNA, 19 nt, Homo sapiens
  misc_RNA (1)...(19): siRNA sense strand
caacaaggagggccaugug

SEQ ID NO: 102484 - RNA, 19 nt, Homo sapiens
  misc_RNA (1)...(19): siRNA sense strand
gaugugaagcccuccaaug

SEQ ID NO: 102485 - RNA, 19 nt, Homo sapiens
  misc_RNA (1)...(19): siRNA sense strand
ggaccuggacaucaacaug

SEQ ID NO: 102486 - RNA, 19 nt, Homo sapiens
  misc_RNA (1)...(19): siRNA sense strand
gaaccagaagggcuacaau

SEQ ID NO: 102487 - RNA, 19 nt, Homo sapiens
  misc_RNA (1)...(19): siRNA sense strand
cauuggagacagaaacuuu

SEQ ID NO: 102488 - RNA, 19 nt, Homo sapiens
  misc_RNA (1)...(19): siRNA sense strand
accggaaggugcuggauaa

SEQ ID NO: 102489 - RNA, 19 nt, Homo sapiens
  misc_RNA (1)...(19): siRNA sense strand
caucaccauuggagacaga

SEQ ID NO: 102490 - RNA, 19 nt, Homo sapiens
  misc_RNA (1)...(19): siRNA sense strand
ccaagaagacggacauugc

SEQ ID NO: 102491 - RNA, 19 nt, Homo sapiens
  misc_RNA (1)...(19): siRNA sense strand
ggaccuucaucaccauugg

SEQ ID NO: 102492 - RNA, 19 nt, Homo sapiens
  misc_RNA (1)...(19): siRNA sense strand
ccuccaauguccuuaucaa

SEQ ID NO: 102493 - RNA, 19 nt, Homo sapiens
  misc_RNA (1)...(19): siRNA sense strand
gcuacuugguggacucugu

SEQ ID NO: 102494 - RNA, 19 nt, Homo sapiens
  misc_RNA (1)...(19): siRNA sense strand
uggagcaucugcacagcaa

SEQ ID NO: 102495 - RNA, 19 nt, Homo sapiens
  misc_RNA (1)...(19): siRNA sense strand
gaagggcuacaaugucaag

SEQ ID NO: 102496 - RNA, 19 nt, Homo sapiens
  misc_RNA (1)...(19): siRNA sense strand
caaggagggccaugugaag

SEQ ID NO: 102497 - RNA, 19 nt, Homo sapiens
  misc_RNA (1)...(19): siRNA sense strand
ggacauccuuggggagauu

SEQ ID NO: 102498 - RNA, 19 nt, Homo sapiens
  misc_RNA (1)...(19): siRNA sense strand
ccagaagggcuacaauguc

SEQ ID NO: 102499 - RNA, 19 nt, Homo sapiens
  misc_RNA (1)...(19): siRNA sense strand
gauccugggagaagacuca

SEQ ID NO: 102500 - RNA, 19 nt, Homo sapiens
  misc_RNA (1)...(19): siRNA sense strand
ccagagcggcaccaucaug

SEQ ID NO: 102501 - RNA, 19 nt, Homo sapiens
  misc_RNA (1)...(19): siRNA sense strand
ucuacacugucaccuucua

SEQ ID NO: 102502 - RNA, 19 nt, Homo sapiens
  misc_RNA (1)...(19): siRNA sense strand
ugucggugauccacagaga

SEQ ID NO: 102503 - RNA, 19 nt, Homo sapiens
  misc_RNA (1)...(19): siRNA sense strand
ggaucaacccagagcugaa

SEQ ID NO: 102504 - RNA, 19 nt, Homo sapiens
  misc_RNA (1)...(19): siRNA sense strand
acaaggagggccaugugaa

SEQ ID NO: 102505 - RNA, 19 nt, Homo sapiens
  misc_RNA (1)...(19): siRNA sense strand
gaacucacaggagcagaag

SEQ ID NO: 102506 - RNA, 19 nt, Homo sapiens
  misc_RNA (1)...(19): siRNA sense strand
gggagauugcugugucuau

SEQ ID NO: 102507 - RNA, 19 nt, Homo sapiens
  misc_RNA (1)...(19): siRNA sense strand
gcucauggaccuggacauc

SEQ ID NO: 102508 - RNA, 19 nt, Homo sapiens
  misc_RNA (1)...(19): siRNA sense strand
ugaacucacaggagcagaa

SEQ ID NO: 102509 - RNA, 19 nt, Homo sapiens
  misc_RNA (1)...(19): siRNA sense strand
caauguccuuaucaacaag

SEQ ID NO: 102510 - RNA, 19 nt, Homo sapiens
  misc_RNA (1)...(19): siRNA sense strand
gaagcccuccaauguccuu

SEQ ID NO: 102511 - RNA, 19 nt, Homo sapiens
  misc_RNA (1)...(19): siRNA sense strand
gcccuccaauguccuuauc

SEQ ID NO: 102512 - RNA, 19 nt, Homo sapiens
  misc_RNA (1)...(19): siRNA sense strand
caagaagacggacauugcu

SEQ ID NO: 102513 - RNA, 19 nt, Homo sapiens
  misc_RNA (1)...(19): siRNA sense strand
gagaugugaagcccuccaa

SEQ ID NO: 102514 - RNA, 19 nt, Homo sapiens
  misc_RNA (1)...(19): siRNA sense strand
uaccggaaggugcuggaua

SEQ ID NO: 102515 - RNA, 19 nt, Homo sapiens
  misc_RNA (1)...(19): siRNA sense strand
gccaugugaagauguguga

SEQ ID NO: 102516 - RNA, 19 nt, Homo sapiens
  misc_RNA (1)...(19): siRNA sense strand
gaagaaggaucuacggaua

SEQ ID NO: 102517 - RNA, 19 nt, Homo sapiens
  misc_RNA (1)...(19): siRNA sense strand
gguggaggcugaugacuug

SEQ ID NO: 102518 - RNA, 19 nt, Homo sapiens
  misc_RNA (1)...(19): siRNA sense strand
cagaagggcuacaauguca

SEQ ID NO: 102519 - RNA, 19 nt, Homo sapiens
  misc_RNA (1)...(19): siRNA sense strand
ccaauguccuuaucaacaa

SEQ ID NO: 102520 - RNA, 19 nt, Homo sapiens
  misc_RNA (1)...(19): siRNA sense strand
cuacggauauccugcaugu

SEQ ID NO: 102521 - RNA, 19 nt, Homo sapiens
  misc_RNA (1)...(19): siRNA sense strand
ggagauugcugugucuauc

SEQ ID NO: 102522 - RNA, 19 nt, Homo sapiens
  misc_RNA (1)...(19): siRNA sense strand
acccagagcugaaccagaa

SEQ ID NO: 102523 - RNA, 19 nt, Homo sapiens
  misc_RNA (1)...(19): siRNA sense strand
gugaagaugugugacuuug

SEQ ID NO: 102524 - RNA, 19 nt, Homo sapiens
  misc_RNA (1)...(19): siRNA sense strand
ccgcagagcguaugagcua

SEQ ID NO: 102525 - RNA, 19 nt, Homo sapiens
  misc_RNA (1)...(19): siRNA sense strand
ucauggaccuggacaucaa

SEQ ID NO: 102526 - RNA, 19 nt, Homo sapiens
  misc_RNA (1)...(19): siRNA sense strand
ggagggccaugugaagaug

SEQ ID NO: 102527 - RNA, 19 nt, Homo sapiens
  misc_RNA (1)...(19): siRNA sense strand
uggcaucaguggcuacuug

SEQ ID NO: 102528 - RNA, 19 nt, Homo sapiens
  misc_RNA (1)...(19): siRNA sense strand
agaagcggcugcucaugga

SEQ ID NO: 102529 - RNA, 19 nt, Homo sapiens
  misc_RNA (1)...(19): siRNA sense strand
caacaaggagggccaugug

SEQ ID NO: 102530 - RNA, 19 nt, Homo sapiens
  misc_RNA (1)...(19): siRNA sense strand
gaugugaagcccuccaaug

SEQ ID NO: 102531 - RNA, 19 nt, Homo sapiens
  misc_RNA (1)...(19): siRNA sense strand
ggaccuggacaucaacaug

SEQ ID NO: 102532 - RNA, 19 nt, Homo sapiens
  misc_RNA (1)...(19): siRNA sense strand
gaaccagaagggcuacaau

SEQ ID NO: 102533 - RNA, 19 nt, Homo sapiens
  misc_RNA (1)...(19): siRNA sense strand
cauuggagacagaaacuuu

SEQ ID NO: 102534 - RNA, 19 nt, Homo sapiens
  misc_RNA (1)...(19): siRNA sense strand
accggaaggugcuggauaa

SEQ ID NO: 102535 - RNA, 19 nt, Homo sapiens
  misc_RNA (1)...(19): siRNA sense strand
ggaccuucaucaccauugg

SEQ ID NO: 102536 - RNA, 19 nt, Homo sapiens
  misc_RNA (1)...(19): siRNA sense strand
ccaagaagacggacauugc

SEQ ID NO: 102537 - RNA, 19 nt, Homo sapiens
  misc_RNA (1)...(19): siRNA sense strand
caucaccauuggagacaga

SEQ ID NO: 102538 - RNA, 19 nt, Homo sapiens
  misc_RNA (1)...(19): siRNA sense strand
agaaggaucuacggauauc

SEQ ID NO: 102539 - RNA, 19 nt, Homo sapiens
  misc_RNA (1)...(19): siRNA sense strand
ccuccaauguccuuaucaa

SEQ ID NO: 102540 - RNA, 19 nt, Homo sapiens
  misc_RNA (1)...(19): siRNA sense strand
gcuacuugguggacucugu

SEQ ID NO: 102541 - RNA, 19 nt, Homo sapiens
  misc_RNA (1)...(19): siRNA sense strand
uggagcaucugcacagcaa

SEQ ID NO: 102542 - RNA, 19 nt, Homo sapiens
  misc_RNA (1)...(19): siRNA sense strand
gaagggcuacaaugucaag

SEQ ID NO: 102543 - RNA, 19 nt, Homo sapiens
  misc_RNA (1)...(19): siRNA sense strand
caaggagggccaugugaag

SEQ ID NO: 102544 - RNA, 19 nt, Homo sapiens
  misc_RNA (1)...(19): siRNA sense strand
ggacauccuuggggagauu

SEQ ID NO: 102545 - RNA, 19 nt, Homo sapiens
  misc_RNA (1)...(19): siRNA sense strand
ccagaagggcuacaauguc

SEQ ID NO: 102546 - RNA, 19 nt, Homo sapiens
  misc_RNA (1)...(19): siRNA sense strand
gaaaauccaagaggaagaa

SEQ ID NO: 102547 - RNA, 19 nt, Homo sapiens
  misc_RNA (1)...(19): siRNA sense strand
gauccugggagaagacuca

SEQ ID NO: 102548 - RNA, 19 nt, Homo sapiens
  misc_RNA (1)...(19): siRNA sense strand
ccagagcggcaccaucaug

SEQ ID NO: 102549 - RNA, 19 nt, Homo sapiens
  misc_RNA (1)...(19): siRNA sense strand
ucuacacugucaccuucua

SEQ ID NO: 102550 - RNA, 19 nt, Homo sapiens
  misc_RNA (1)...(19): siRNA sense strand
ugucggugauccacagaga

SEQ ID NO: 102551 - RNA, 19 nt, Homo sapiens
  misc_RNA (1)...(19): siRNA sense strand
ggaucaacccagagcugaa

SEQ ID NO: 102552 - RNA, 19 nt, Homo sapiens
  misc_RNA (1)...(19): siRNA sense strand
acaaggagggccaugugaa

SEQ ID NO: 102553 - RNA, 19 nt, Homo sapiens
  misc_RNA (1)...(19): siRNA sense strand
gaacucacaggagcagaag

SEQ ID NO: 102554 - RNA, 19 nt, Homo sapiens
  misc_RNA (1)...(19): siRNA sense strand
ccaagaggaagaaggaucu

SEQ ID NO: 102555 - RNA, 19 nt, Homo sapiens
  misc_RNA (1)...(19): siRNA sense strand
gggagauugcugugucuau

SEQ ID NO: 102556 - RNA, 19 nt, Homo sapiens
  misc_RNA (1)...(19): siRNA sense strand
gcucauggaccuggacauc

SEQ ID NO: 102557 - RNA, 19 nt, Homo sapiens
  misc_RNA (1)...(19): siRNA sense strand
ugaacucacaggagcagaa

SEQ ID NO: 102558 - RNA, 19 nt, Homo sapiens
  misc_RNA (1)...(19): siRNA sense strand
caauguccuuaucaacaag

SEQ ID NO: 102559 - RNA, 19 nt, Homo sapiens
  misc_RNA (1)...(19): siRNA sense strand
gaagcccuccaauguccuu

SEQ ID NO: 102560 - RNA, 19 nt, Homo sapiens
  misc_RNA (1)...(19): siRNA sense strand
gcccuccaauguccuuauc

SEQ ID NO: 102561 - RNA, 19 nt, Homo sapiens
  misc_RNA (1)...(19): siRNA sense strand
caagaagacggacauugcu

SEQ ID NO: 102562 - RNA, 19 nt, Homo sapiens
  misc_RNA (1)...(19): siRNA sense strand
aagaaggaucuacggauau

SEQ ID NO: 102563 - RNA, 19 nt, Homo sapiens
  misc_RNA (1)...(19): siRNA sense strand
gagaugugaagcccuccaa

SEQ ID NO: 102564 - RNA, 19 nt, Homo sapiens
  misc_RNA (1)...(19): siRNA sense strand
uaccggaaggugcuggaua

SEQ ID NO: 102565 - RNA, 19 nt, Homo sapiens
  misc_RNA (1)...(19): siRNA sense strand
gccaugugaagauguguga

SEQ ID NO: 102566 - RNA, 19 nt, Homo sapiens
  misc_RNA (1)...(19): siRNA sense strand
gaagaaggaucuacggaua

SEQ ID NO: 102567 - RNA, 19 nt, Homo sapiens
  misc_RNA (1)...(19): siRNA sense strand
gguggaggcugaugacuug

SEQ ID NO: 102568 - RNA, 19 nt, Homo sapiens
  misc_RNA (1)...(19): siRNA sense strand
cagaagggcuacaauguca

SEQ ID NO: 102569 - RNA, 19 nt, Homo sapiens
  misc_RNA (1)...(19): siRNA sense strand
ccaauguccuuaucaacaa

SEQ ID NO: 102570 - RNA, 19 nt, Homo sapiens
  misc_RNA (1)...(19): siRNA sense strand
cuacggauauccugcaugu

SEQ ID NO: 102571 - RNA, 19 nt, Homo sapiens
  misc_RNA (1)...(19): siRNA sense strand
ggagauugcugugucuauc

SEQ ID NO: 102572 - RNA, 19 nt, Homo sapiens
  misc_RNA (1)...(19): siRNA sense strand
acccagagcugaaccagaa

SEQ ID NO: 102573 - RNA, 19 nt, Homo sapiens
  misc_RNA (1)...(19): siRNA sense strand
gugaagaugugugacuuug

SEQ ID NO: 102574 - RNA, 19 nt, Homo sapiens
  misc_RNA (1)...(19): siRNA sense strand
ccgcagagcguaugagcua

SEQ ID NO: 102575 - RNA, 19 nt, Homo sapiens
  misc_RNA (1)...(19): siRNA sense strand
ucauggaccuggacaucaa

SEQ ID NO: 102576 - RNA, 19 nt, Homo sapiens
  misc_RNA (1)...(19): siRNA sense strand
ggagggccaugugaagaug

SEQ ID NO: 102577 - RNA, 19 nt, Homo sapiens
  misc_RNA (1)...(19): siRNA sense strand
uggcaucaguggcuacuug

SEQ ID NO: 102578 - RNA, 19 nt, Homo sapiens
  misc_RNA (1)...(19): siRNA sense strand
agaagcggcugcucaugga

SEQ ID NO: 102579 - RNA, 19 nt, Homo sapiens
  misc_RNA (1)...(19): siRNA sense strand
caacaaggagggccaugug

SEQ ID NO: 102580 - RNA, 19 nt, Homo sapiens
  misc_RNA (1)...(19): siRNA sense strand
gaugugaagcccuccaaug

SEQ ID NO: 102581 - RNA, 19 nt, Homo sapiens
  misc_RNA (1)...(19): siRNA sense strand
ggaccuggacaucaacaug

SEQ ID NO: 102582 - RNA, 19 nt, Homo sapiens
  misc_RNA (1)...(19): siRNA sense strand
gaaccagaagggcuacaau

SEQ ID NO: 102583 - RNA, 19 nt, Homo sapiens
  misc_RNA (1)...(19): siRNA sense strand
cauuggagacagaaacuuu

SEQ ID NO: 102584 - RNA, 19 nt, Homo sapiens
  misc_RNA (1)...(19): siRNA sense strand
accggaaggugcuggauaa

SEQ ID NO: 102585 - RNA, 19 nt, Homo sapiens
  misc_RNA (1)...(19): siRNA sense strand
ggaccuucaucaccauugg

SEQ ID NO: 102586 - RNA, 19 nt, Homo sapiens
  misc_RNA (1)...(19): siRNA sense strand
ccaagaagacggacauugc

SEQ ID NO: 102587 - RNA, 19 nt, Homo sapiens
  misc_RNA (1)...(19): siRNA sense strand
caucaccauuggagacaga

SEQ ID NO: 102588 - RNA, 19 nt, Homo sapiens
  misc_RNA (1)...(19): siRNA sense strand
agaaggaucuacggauauc

SEQ ID NO: 102589 - RNA, 19 nt, Homo sapiens
  misc_RNA (1)...(19): siRNA sense strand
ccuccaauguccuuaucaa

SEQ ID NO: 102590 - RNA, 19 nt, Homo sapiens
  misc_RNA (1)...(19): siRNA sense strand
gcuacuugguggacucugu

SEQ ID NO: 102591 - RNA, 19 nt, Homo sapiens
  misc_RNA (1)...(19): siRNA sense strand
uggagcaucugcacagcaa

SEQ ID NO: 102592 - RNA, 19 nt, Homo sapiens
  misc_RNA (1)...(19): siRNA sense strand
gaagggcuacaaugucaag

SEQ ID NO: 102593 - RNA, 19 nt, Homo sapiens
  misc_RNA (1)...(19): siRNA sense strand
caaggagggccaugugaag

SEQ ID NO: 102594 - RNA, 19 nt, Homo sapiens
  misc_RNA (1)...(19): siRNA sense strand
ggacauccuuggggagauu

SEQ ID NO: 102595 - RNA, 19 nt, Homo sapiens
  misc_RNA (1)...(19): siRNA sense strand
ccagaagggcuacaauguc

SEQ ID NO: 102596 - RNA, 19 nt, Homo sapiens
  misc_RNA (1)...(19): siRNA sense strand
gaaaauccaagaggaagaa

SEQ ID NO: 102597 - RNA, 19 nt, Homo sapiens
  misc_RNA (1)...(19): siRNA sense strand
gauccugggagaagacuca

SEQ ID NO: 102598 - RNA, 19 nt, Homo sapiens
  misc_RNA (1)...(19): siRNA sense strand
ccagagcggcaccaucaug

SEQ ID NO: 102599 - RNA, 19 nt, Homo sapiens
  misc_RNA (1)...(19): siRNA sense strand
ucuacacugucaccuucua

SEQ ID NO: 102600 - RNA, 19 nt, Homo sapiens
  misc_RNA (1)...(19): siRNA sense strand
ugucggugauccacagaga

SEQ ID NO: 102601 - RNA, 19 nt, Homo sapiens
  misc_RNA (1)...(19): siRNA sense strand
ggaucaacccagagcugaa

SEQ ID NO: 102602 - RNA, 19 nt, Homo sapiens
  misc_RNA (1)...(19): siRNA sense strand
acaaggagggccaugugaa

SEQ ID NO: 102603 - RNA, 19 nt, Homo sapiens
  misc_RNA (1)...(19): siRNA sense strand
gaacucacaggagcagaag

SEQ ID NO: 102604 - RNA, 19 nt, Homo sapiens
  misc_RNA (1)...(19): siRNA sense strand
ccaagaggaagaaggaucu

SEQ ID NO: 102605 - RNA, 19 nt, Homo sapiens
  misc_RNA (1)...(19): siRNA sense strand
gggagauugcugugucuau

SEQ ID NO: 102606 - RNA, 19 nt, Homo sapiens
  misc_RNA (1)...(19): siRNA sense strand
gcucauggaccuggacauc

SEQ ID NO: 102607 - RNA, 19 nt, Homo sapiens
  misc_RNA (1)...(19): siRNA sense strand
ugaacucacaggagcagaa

SEQ ID NO: 102608 - RNA, 19 nt, Homo sapiens
  misc_RNA (1)...(19): siRNA sense strand
caauguccuuaucaacaag

SEQ ID NO: 102609 - RNA, 19 nt, Homo sapiens
  misc_RNA (1)...(19): siRNA sense strand
gaagcccuccaauguccuu

SEQ ID NO: 102610 - RNA, 19 nt, Homo sapiens
  misc_RNA (1)...(19): siRNA sense strand
gcccuccaauguccuuauc

SEQ ID NO: 102611 - RNA, 19 nt, Homo sapiens
  misc_RNA (1)...(19): siRNA sense strand
caagaagacggacauugcu

SEQ ID NO: 102612 - RNA, 19 nt, Homo sapiens
  misc_RNA (1)...(19): siRNA sense strand
aagaaggaucuacggauau

SEQ ID NO: 102613 - RNA, 19 nt, Homo sapiens
  misc_RNA (1)...(19): siRNA sense strand
gagaugugaagcccuccaa

SEQ ID NO: 102614 - RNA, 19 nt, Homo sapiens
  misc_RNA (1)...(19): siRNA sense strand
uaccggaaggugcuggaua

SEQ ID NO: 102615 - RNA, 19 nt, Homo sapiens
  misc_RNA (1)...(19): siRNA sense strand
gccaugugaagauguguga

SEQ ID NO: 102616 - RNA, 19 nt, Homo sapiens
  misc_RNA (1)...(19): siRNA sense strand
gcacucagcuggugaauuc

SEQ ID NO: 102617 - RNA, 19 nt, Homo sapiens
  misc_RNA (1)...(19): siRNA sense strand
gaacauguccuuggaagaa

SEQ ID NO: 102618 - RNA, 19 nt, Homo sapiens
  misc_RNA (1)...(19): siRNA sense strand
uaagugcgauucaucauau

SEQ ID NO: 102619 - RNA, 19 nt, Homo sapiens
  misc_RNA (1)...(19): siRNA sense strand
guuaaaggccuuacuuauu

SEQ ID NO: 102620 - RNA, 19 nt, Homo sapiens
  misc_RNA (1)...(19): siRNA sense strand
gcaguucaaugauggaaau

SEQ ID NO: 102621 - RNA, 19 nt, Homo sapiens
  misc_RNA (1)...(19): siRNA sense strand
gccagcaccugaagaauug

SEQ ID NO: 102622 - RNA, 19 nt, Homo sapiens
  misc_RNA (1)...(19): siRNA sense strand
agaagcaaauuaugucuga

SEQ ID NO: 102623 - RNA, 19 nt, Homo sapiens
  misc_RNA (1)...(19): siRNA sense strand
uaaaggccuuacuuauuug

SEQ ID NO: 102624 - RNA, 19 nt, Homo sapiens
  misc_RNA (1)...(19): siRNA sense strand
ggucauacuacuagauauu

SEQ ID NO: 102625 - RNA, 19 nt, Homo sapiens
  misc_RNA (1)...(19): siRNA sense strand
gugaagcccuccaauaugc

SEQ ID NO: 102626 - RNA, 19 nt, Homo sapiens
  misc_RNA (1)...(19): siRNA sense strand
gacgugaagcccuccaaua

SEQ ID NO: 102627 - RNA, 19 nt, Homo sapiens
  misc_RNA (1)...(19): siRNA sense strand
uggaacaaaugcuuauaug

SEQ ID NO: 102628 - RNA, 19 nt, Homo sapiens
  misc_RNA (1)...(19): siRNA sense strand
ggagccauuuguacauuuc

SEQ ID NO: 102629 - RNA, 19 nt, Homo sapiens
  misc_RNA (1)...(19): siRNA sense strand
ggccagcaccugaagaauu

SEQ ID NO: 102630 - RNA, 19 nt, Homo sapiens
  misc_RNA (1)...(19): siRNA sense strand
gccagaacauguccuugga

SEQ ID NO: 102631 - RNA, 19 nt, Homo sapiens
  misc_RNA (1)...(19): siRNA sense strand
gauauuacacuggaacuuc

SEQ ID NO: 102632 - RNA, 19 nt, Homo sapiens
  misc_RNA (1)...(19): siRNA sense strand
gaaaacagccaaaagaaag

SEQ ID NO: 102633 - RNA, 19 nt, Homo sapiens
  misc_RNA (1)...(19): siRNA sense strand
ccuccaauaugcuaguaaa

SEQ ID NO: 102634 - RNA, 19 nt, Homo sapiens
  misc_RNA (1)...(19): siRNA sense strand
gaauugcaguagcaguugu

SEQ ID NO: 102635 - RNA, 19 nt, Homo sapiens
  misc_RNA (1)...(19): siRNA sense strand
gaucuuuggauguauauag

SEQ ID NO: 102636 - RNA, 19 nt, Homo sapiens
  misc_RNA (1)...(19): siRNA sense strand
agguuaagcugugugauuu

SEQ ID NO: 102637 - RNA, 19 nt, Homo sapiens
  misc_RNA (1)...(19): siRNA sense strand
gaagcaaauuaugucugaa

SEQ ID NO: 102638 - RNA, 19 nt, Homo sapiens
  misc_RNA (1)...(19): siRNA sense strand
ggauuucaauauguacaga

SEQ ID NO: 102639 - RNA, 19 nt, Homo sapiens
  misc_RNA (1)...(19): siRNA sense strand
cagguuaagcugugugauu

SEQ ID NO: 102640 - RNA, 19 nt, Homo sapiens
  misc_RNA (1)...(19): siRNA sense strand
ggagcaguauggaauucau

SEQ ID NO: 102641 - RNA, 19 nt, Homo sapiens
  misc_RNA (1)...(19): siRNA sense strand
ggaacaaaugcuuauaugg

SEQ ID NO: 102642 - RNA, 19 nt, Homo sapiens
  misc_RNA (1)...(19): siRNA sense strand
gaagcccuccaauaugcua

SEQ ID NO: 102643 - RNA, 19 nt, Homo sapiens
  misc_RNA (1)...(19): siRNA sense strand
gcagugcauuguugaugag

SEQ ID NO: 102644 - RNA, 19 nt, Homo sapiens
  misc_RNA (1)...(19): siRNA sense strand
ccaauaugcuaguaaacac

SEQ ID NO: 102645 - RNA, 19 nt, Homo sapiens
  misc_RNA (1)...(19): siRNA sense strand
gaaaggccagcaccugaag

SEQ ID NO: 102646 - RNA, 19 nt, Homo sapiens
  misc_RNA (1)...(19): siRNA sense strand
uggaagaauugcaguagca

SEQ ID NO: 102647 - RNA, 19 nt, Homo sapiens
  misc_RNA (1)...(19): siRNA sense strand
guacauuucaucacucagu

SEQ ID NO: 102648 - RNA, 19 nt, Homo sapiens
  misc_RNA (1)...(19): siRNA sense strand
cggagccauuuguacauuu

SEQ ID NO: 102649 - RNA, 19 nt, Homo sapiens
  misc_RNA (1)...(19): siRNA sense strand
uuuaaugccucuccagcuu

SEQ ID NO: 102650 - RNA, 19 nt, Homo sapiens
  misc_RNA (1)...(19): siRNA sense strand
ugcaguagcaguuguuaaa

SEQ ID NO: 102651 - RNA, 19 nt, Homo sapiens
  misc_RNA (1)...(19): siRNA sense strand
aaacacaagaggacagguu

SEQ ID NO: 102652 - RNA, 19 nt, Homo sapiens
  misc_RNA (1)...(19): siRNA sense strand
aaaccagggaucuuuaaug

SEQ ID NO: 102653 - RNA, 19 nt, Homo sapiens
  misc_RNA (1)...(19): siRNA sense strand
gcuuauauggcgccugaaa

SEQ ID NO: 102654 - RNA, 19 nt, Homo sapiens
  misc_RNA (1)...(19): siRNA sense strand
aaccagggaucuuuaaugc

SEQ ID NO: 102655 - RNA, 19 nt, Homo sapiens
  misc_RNA (1)...(19): siRNA sense strand
gagcaguauggaauucauu

SEQ ID NO: 102656 - RNA, 19 nt, Homo sapiens
  misc_RNA (1)...(19): siRNA sense strand
uauggcgccugaaaggauu

SEQ ID NO: 102657 - RNA, 19 nt, Homo sapiens
  misc_RNA (1)...(19): siRNA sense strand
ucugaugucuggagcuuag

SEQ ID NO: 102658 - RNA, 19 nt, Homo sapiens
  misc_RNA (1)...(19): siRNA sense strand
gugcauuguugaugaggau

SEQ ID NO: 102659 - RNA, 19 nt, Homo sapiens
  misc_RNA (1)...(19): siRNA sense strand
auaagugcgauucaucaua

SEQ ID NO: 102660 - RNA, 19 nt, Homo sapiens
  misc_RNA (1)...(19): siRNA sense strand
gaaaaugccagaacauguc

SEQ ID NO: 102661 - RNA, 19 nt, Homo sapiens
  misc_RNA (1)...(19): siRNA sense strand
caguagcaguuguuaaagg

SEQ ID NO: 102662 - RNA, 19 nt, Homo sapiens
  misc_RNA (1)...(19): siRNA sense strand
ggaaaaugccagaacaugu

SEQ ID NO: 102663 - RNA, 19 nt, Homo sapiens
  misc_RNA (1)...(19): siRNA sense strand
cgaaaacagccaaaagaaa

SEQ ID NO: 102664 - RNA, 19 nt, Homo sapiens
  misc_RNA (1)...(19): siRNA sense strand
ugaauucuauagccaagac

SEQ ID NO: 102665 - RNA, 19 nt, Homo sapiens
  misc_RNA (1)...(19): siRNA sense strand
caagaggacagguuaagcu

SEQ ID NO: 102666 - RNA, 19 nt, Homo sapiens
  misc_RNA (1)...(19): siRNA sense strand
acauguccuuggaagaauu

SEQ ID NO: 102667 - RNA, 19 nt, Homo sapiens
  misc_RNA (1)...(19): siRNA sense strand
aagaauugcaguagcaguu

SEQ ID NO: 102668 - RNA, 19 nt, Homo sapiens
  misc_RNA (1)...(19): siRNA sense strand
ggggaucuuuggauguaua

SEQ ID NO: 102669 - RNA, 19 nt, Homo sapiens
  misc_RNA (1)...(19): siRNA sense strand
uuaggaaucucuuuuaugg

SEQ ID NO: 102670 - RNA, 19 nt, Homo sapiens
  misc_RNA (1)...(19): siRNA sense strand
acgugaagcccuccaauau

SEQ ID NO: 102671 - RNA, 19 nt, Homo sapiens
  misc_RNA (1)...(19): siRNA sense strand
uguuaaaggccuuacuuau

SEQ ID NO: 102672 - RNA, 19 nt, Homo sapiens
  misc_RNA (1)...(19): siRNA sense strand
auauuacacuggaacuuca

SEQ ID NO: 102673 - RNA, 19 nt, Homo sapiens
  misc_RNA (1)...(19): siRNA sense strand
ucggagccauuuguacauu

SEQ ID NO: 102674 - RNA, 19 nt, Homo sapiens
  misc_RNA (1)...(19): siRNA sense strand
aacacaagaggacagguua

SEQ ID NO: 102675 - RNA, 19 nt, Homo sapiens
  misc_RNA (1)...(19): siRNA sense strand
gcccuccaauaugcuagua

SEQ ID NO: 102676 - RNA, 19 nt, Homo sapiens
  misc_RNA (1)...(19): siRNA sense strand
cgugaagcccuccaauaug

SEQ ID NO: 102677 - RNA, 19 nt, Homo sapiens
  misc_RNA (1)...(19): siRNA sense strand
agaaaggccagcaccugaa

SEQ ID NO: 102678 - RNA, 19 nt, Homo sapiens
  misc_RNA (1)...(19): siRNA sense strand
ggauguauauaggaaaaug

SEQ ID NO: 102679 - RNA, 19 nt, Homo sapiens
  misc_RNA (1)...(19): siRNA sense strand
gcgaaaacagccaaaagaa

SEQ ID NO: 102680 - RNA, 19 nt, Homo sapiens
  misc_RNA (1)...(19): siRNA sense strand
guucucggagccauuugua

SEQ ID NO: 102681 - RNA, 19 nt, Homo sapiens
  misc_RNA (1)...(19): siRNA sense strand
gcuuaggaaucucuuuuau

SEQ ID NO: 102682 - RNA, 19 nt, Homo sapiens
  misc_RNA (1)...(19): siRNA sense strand
gagcuuaggaaucucuuuu

SEQ ID NO: 102683 - RNA, 19 nt, Homo sapiens
  misc_RNA (1)...(19): siRNA sense strand
gucuggagcuuaggaaucu

SEQ ID NO: 102684 - RNA, 19 nt, Homo sapiens
  misc_RNA (1)...(19): siRNA sense strand
acacaagaggacagguuaa

SEQ ID NO: 102685 - RNA, 19 nt, Homo sapiens
  misc_RNA (1)...(19): siRNA sense strand
gcaguuguuaaaggccuua

SEQ ID NO: 102686 - RNA, 19 nt, Homo sapiens
  misc_RNA (1)...(19): siRNA sense strand
ugcgauucaucauauauca

SEQ ID NO: 102687 - RNA, 19 nt, Homo sapiens
  misc_RNA (1)...(19): siRNA sense strand
guuguuaaaggccuuacuu

SEQ ID NO: 102688 - RNA, 19 nt, Homo sapiens
  misc_RNA (1)...(19): siRNA sense strand
aagugcgauucaucauaua

SEQ ID NO: 102689 - RNA, 19 nt, Homo sapiens
  misc_RNA (1)...(19): siRNA sense strand
ccagaacauguccuuggaa

SEQ ID NO: 102690 - RNA, 19 nt, Homo sapiens
  misc_RNA (1)...(19): siRNA sense strand
uaaugccucuccagcuucu

SEQ ID NO: 102691 - RNA, 19 nt, Homo sapiens
  misc_RNA (1)...(19): siRNA sense strand
gcaguagcaguuguuaaag

SEQ ID NO: 102692 - RNA, 19 nt, Homo sapiens
  misc_RNA (1)...(19): siRNA sense strand
ggagcuuaggaaucucuuu

SEQ ID NO: 102693 - RNA, 19 nt, Homo sapiens
  misc_RNA (1)...(19): siRNA sense strand
gcacucagcuggugaauuc

SEQ ID NO: 102694 - RNA, 19 nt, Homo sapiens
  misc_RNA (1)...(19): siRNA sense strand
gaacauguccuuggaagaa

SEQ ID NO: 102695 - RNA, 19 nt, Homo sapiens
  misc_RNA (1)...(19): siRNA sense strand
uaagugcgauucaucauau

SEQ ID NO: 102696 - RNA, 19 nt, Homo sapiens
  misc_RNA (1)...(19): siRNA sense strand
guuaaaggccuuacuuauu

SEQ ID NO: 102697 - RNA, 19 nt, Homo sapiens
  misc_RNA (1)...(19): siRNA sense strand
gcaguucaaugauggaaau

SEQ ID NO: 102698 - RNA, 19 nt, Homo sapiens
  misc_RNA (1)...(19): siRNA sense strand
gccagcaccugaagaauug

SEQ ID NO: 102699 - RNA, 19 nt, Homo sapiens
  misc_RNA (1)...(19): siRNA sense strand
agaagcaaauuaugucuga

SEQ ID NO: 102700 - RNA, 19 nt, Homo sapiens
  misc_RNA (1)...(19): siRNA sense strand
uaaaggccuuacuuauuug

SEQ ID NO: 102701 - RNA, 19 nt, Homo sapiens
  misc_RNA (1)...(19): siRNA sense strand
ggucauacuacuagauauu

SEQ ID NO: 102702 - RNA, 19 nt, Homo sapiens
  misc_RNA (1)...(19): siRNA sense strand
gugaagcccuccaauaugc

SEQ ID NO: 102703 - RNA, 19 nt, Homo sapiens
  misc_RNA (1)...(19): siRNA sense strand
gacgugaagcccuccaaua

SEQ ID NO: 102704 - RNA, 19 nt, Homo sapiens
  misc_RNA (1)...(19): siRNA sense strand
uggaacaaaugcuuauaug

SEQ ID NO: 102705 - RNA, 19 nt, Homo sapiens
  misc_RNA (1)...(19): siRNA sense strand
ggagccauuuguacauuuc

SEQ ID NO: 102706 - RNA, 19 nt, Homo sapiens
  misc_RNA (1)...(19): siRNA sense strand
ggccagcaccugaagaauu

SEQ ID NO: 102707 - RNA, 19 nt, Homo sapiens
  misc_RNA (1)...(19): siRNA sense strand
gccagaacauguccuugga

SEQ ID NO: 102708 - RNA, 19 nt, Homo sapiens
  misc_RNA (1)...(19): siRNA sense strand
gauauuacacuggaacuuc

SEQ ID NO: 102709 - RNA, 19 nt, Homo sapiens
  misc_RNA (1)...(19): siRNA sense strand
gaaaacagccaaaagaaag

SEQ ID NO: 102710 - RNA, 19 nt, Homo sapiens
  misc_RNA (1)...(19): siRNA sense strand
ccuccaauaugcuaguaaa

SEQ ID NO: 102711 - RNA, 19 nt, Homo sapiens
  misc_RNA (1)...(19): siRNA sense strand
gaauugcaguagcaguugu

SEQ ID NO: 102712 - RNA, 19 nt, Homo sapiens
  misc_RNA (1)...(19): siRNA sense strand
gaucuuuggauguauauag

SEQ ID NO: 102713 - RNA, 19 nt, Homo sapiens
  misc_RNA (1)...(19): siRNA sense strand
agguuaagcugugugauuu

SEQ ID NO: 102714 - RNA, 19 nt, Homo sapiens
  misc_RNA (1)...(19): siRNA sense strand
gaagcaaauuaugucugaa

SEQ ID NO: 102715 - RNA, 19 nt, Homo sapiens
  misc_RNA (1)...(19): siRNA sense strand
ggauuucaauauguacaga

SEQ ID NO: 102716 - RNA, 19 nt, Homo sapiens
  misc_RNA (1)...(19): siRNA sense strand
cagguuaagcugugugauu

SEQ ID NO: 102717 - RNA, 19 nt, Homo sapiens
  misc_RNA (1)...(19): siRNA sense strand
ggagcaguauggaauucau

SEQ ID NO: 102718 - RNA, 19 nt, Homo sapiens
  misc_RNA (1)...(19): siRNA sense strand
ggaacaaaugcuuauaugg

SEQ ID NO: 102719 - RNA, 19 nt, Homo sapiens
  misc_RNA (1)...(19): siRNA sense strand
gaagcccuccaauaugcua

SEQ ID NO: 102720 - RNA, 19 nt, Homo sapiens
  misc_RNA (1)...(19): siRNA sense strand
gcagugcauuguugaugag

SEQ ID NO: 102721 - RNA, 19 nt, Homo sapiens
  misc_RNA (1)...(19): siRNA sense strand
ccaauaugcuaguaaacac

SEQ ID NO: 102722 - RNA, 19 nt, Homo sapiens
  misc_RNA (1)...(19): siRNA sense strand
gaaaggccagcaccugaag

SEQ ID NO: 102723 - RNA, 19 nt, Homo sapiens
  misc_RNA (1)...(19): siRNA sense strand
uggaagaauugcaguagca

SEQ ID NO: 102724 - RNA, 19 nt, Homo sapiens
  misc_RNA (1)...(19): siRNA sense strand
guacauuucaucacucagu

SEQ ID NO: 102725 - RNA, 19 nt, Homo sapiens
  misc_RNA (1)...(19): siRNA sense strand
cggagccauuuguacauuu

SEQ ID NO: 102726 - RNA, 19 nt, Homo sapiens
  misc_RNA (1)...(19): siRNA sense strand
uuuaaugccucuccagcuu

SEQ ID NO: 102727 - RNA, 19 nt, Homo sapiens
  misc_RNA (1)...(19): siRNA sense strand
ugcaguagcaguuguuaaa

SEQ ID NO: 102728 - RNA, 19 nt, Homo sapiens
  misc_RNA (1)...(19): siRNA sense strand
aaacacaagaggacagguu

SEQ ID NO: 102729 - RNA, 19 nt, Homo sapiens
  misc_RNA (1)...(19): siRNA sense strand
aaaccagggaucuuuaaug

SEQ ID NO: 102730 - RNA, 19 nt, Homo sapiens
  misc_RNA (1)...(19): siRNA sense strand
gcuuauauggcgccugaaa

SEQ ID NO: 102731 - RNA, 19 nt, Homo sapiens
  misc_RNA (1)...(19): siRNA sense strand
aaccagggaucuuuaaugc

SEQ ID NO: 102732 - RNA, 19 nt, Homo sapiens
  misc_RNA (1)...(19): siRNA sense strand
gagcaguauggaauucauu

SEQ ID NO: 102733 - RNA, 19 nt, Homo sapiens
  misc_RNA (1)...(19): siRNA sense strand
uauggcgccugaaaggauu

SEQ ID NO: 102734 - RNA, 19 nt, Homo sapiens
  misc_RNA (1)...(19): siRNA sense strand
ucugaugucuggagcuuag

SEQ ID NO: 102735 - RNA, 19 nt, Homo sapiens
  misc_RNA (1)...(19): siRNA sense strand
gugcauuguugaugaggau

SEQ ID NO: 102736 - RNA, 19 nt, Homo sapiens
  misc_RNA (1)...(19): siRNA sense strand
auaagugcgauucaucaua

SEQ ID NO: 102737 - RNA, 19 nt, Homo sapiens
  misc_RNA (1)...(19): siRNA sense strand
gaaaaugccagaacauguc

SEQ ID NO: 102738 - RNA, 19 nt, Homo sapiens
  misc_RNA (1)...(19): siRNA sense strand
caguagcaguuguuaaagg

SEQ ID NO: 102739 - RNA, 19 nt, Homo sapiens
  misc_RNA (1)...(19): siRNA sense strand
ggaaaaugccagaacaugu

SEQ ID NO: 102740 - RNA, 19 nt, Homo sapiens
  misc_RNA (1)...(19): siRNA sense strand
cgaaaacagccaaaagaaa

SEQ ID NO: 102741 - RNA, 19 nt, Homo sapiens
  misc_RNA (1)...(19): siRNA sense strand
ugaauucuauagccaagac

SEQ ID NO: 102742 - RNA, 19 nt, Homo sapiens
  misc_RNA (1)...(19): siRNA sense strand
caagaggacagguuaagcu

SEQ ID NO: 102743 - RNA, 19 nt, Homo sapiens
  misc_RNA (1)...(19): siRNA sense strand
acauguccuuggaagaauu

SEQ ID NO: 102744 - RNA, 19 nt, Homo sapiens
  misc_RNA (1)...(19): siRNA sense strand
aagaauugcaguagcaguu

SEQ ID NO: 102745 - RNA, 19 nt, Homo sapiens
  misc_RNA (1)...(19): siRNA sense strand
ggggaucuuuggauguaua

SEQ ID NO: 102746 - RNA, 19 nt, Homo sapiens
  misc_RNA (1)...(19): siRNA sense strand
uuaggaaucucuuuuaugg

SEQ ID NO: 102747 - RNA, 19 nt, Homo sapiens
  misc_RNA (1)...(19): siRNA sense strand
acgugaagcccuccaauau

SEQ ID NO: 102748 - RNA, 19 nt, Homo sapiens
  misc_RNA (1)...(19): siRNA sense strand
uguuaaaggccuuacuuau

SEQ ID NO: 102749 - RNA, 19 nt, Homo sapiens
  misc_RNA (1)...(19): siRNA sense strand
auauuacacuggaacuuca

SEQ ID NO: 102750 - RNA, 19 nt, Homo sapiens
  misc_RNA (1)...(19): siRNA sense strand
ucggagccauuuguacauu

SEQ ID NO: 102751 - RNA, 19 nt, Homo sapiens
  misc_RNA (1)...(19): siRNA sense strand
aacacaagaggacagguua

SEQ ID NO: 102752 - RNA, 19 nt, Homo sapiens
  misc_RNA (1)...(19): siRNA sense strand
gcccuccaauaugcuagua

SEQ ID NO: 102753 - RNA, 19 nt, Homo sapiens
  misc_RNA (1)...(19): siRNA sense strand
cgugaagcccuccaauaug

SEQ ID NO: 102754 - RNA, 19 nt, Homo sapiens
  misc_RNA (1)...(19): siRNA sense strand
agaaaggccagcaccugaa

SEQ ID NO: 102755 - RNA, 19 nt, Homo sapiens
  misc_RNA (1)...(19): siRNA sense strand
ggauguauauaggaaaaug

SEQ ID NO: 102756 - RNA, 19 nt, Homo sapiens
  misc_RNA (1)...(19): siRNA sense strand
gcgaaaacagccaaaagaa

SEQ ID NO: 102757 - RNA, 19 nt, Homo sapiens
  misc_RNA (1)...(19): siRNA sense strand
guucucggagccauuugua

SEQ ID NO: 102758 - RNA, 19 nt, Homo sapiens
  misc_RNA (1)...(19): siRNA sense strand
gcuuaggaaucucuuuuau

SEQ ID NO: 102759 - RNA, 19 nt, Homo sapiens
  misc_RNA (1)...(19): siRNA sense strand
gagcuuaggaaucucuuuu

SEQ ID NO: 102760 - RNA, 19 nt, Homo sapiens
  misc_RNA (1)...(19): siRNA sense strand
gucuggagcuuaggaaucu

SEQ ID NO: 102761 - RNA, 19 nt, Homo sapiens
  misc_RNA (1)...(19): siRNA sense strand
acacaagaggacagguuaa

SEQ ID NO: 102762 - RNA, 19 nt, Homo sapiens
  misc_RNA (1)...(19): siRNA sense strand
gcaguuguuaaaggccuua

SEQ ID NO: 102763 - RNA, 19 nt, Homo sapiens
  misc_RNA (1)...(19): siRNA sense strand
ugcgauucaucauauauca

SEQ ID NO: 102764 - RNA, 19 nt, Homo sapiens
  misc_RNA (1)...(19): siRNA sense strand
guuguuaaaggccuuacuu

SEQ ID NO: 102765 - RNA, 19 nt, Homo sapiens
  misc_RNA (1)...(19): siRNA sense strand
aagugcgauucaucauaua

SEQ ID NO: 102766 - RNA, 19 nt, Homo sapiens
  misc_RNA (1)...(19): siRNA sense strand
ccagaacauguccuuggaa

SEQ ID NO: 102767 - RNA, 19 nt, Homo sapiens
  misc_RNA (1)...(19): siRNA sense strand
uaaugccucuccagcuucu

SEQ ID NO: 102768 - RNA, 19 nt, Homo sapiens
  misc_RNA (1)...(19): siRNA sense strand
gcaguagcaguuguuaaag

SEQ ID NO: 102769 - RNA, 19 nt, Homo sapiens
  misc_RNA (1)...(19): siRNA sense strand
ggagcuuaggaaucucuuu

SEQ ID NO: 102770 - RNA, 19 nt, Homo sapiens
  misc_RNA (1)...(19): siRNA sense strand
gcacucagcuggugaauuc

SEQ ID NO: 102771 - RNA, 19 nt, Homo sapiens
  misc_RNA (1)...(19): siRNA sense strand
gaacauguccuuggaagaa

SEQ ID NO: 102772 - RNA, 19 nt, Homo sapiens
  misc_RNA (1)...(19): siRNA sense strand
uaagugcgauucaucauau

SEQ ID NO: 102773 - RNA, 19 nt, Homo sapiens
  misc_RNA (1)...(19): siRNA sense strand
guuaaaggccuuacuuauu

SEQ ID NO: 102774 - RNA, 19 nt, Homo sapiens
  misc_RNA (1)...(19): siRNA sense strand
gcaguucaaugauggaaau

SEQ ID NO: 102775 - RNA, 19 nt, Homo sapiens
  misc_RNA (1)...(19): siRNA sense strand
gccagcaccugaagaauug

SEQ ID NO: 102776 - RNA, 19 nt, Homo sapiens
  misc_RNA (1)...(19): siRNA sense strand
agaagcaaauuaugucuga

SEQ ID NO: 102777 - RNA, 19 nt, Homo sapiens
  misc_RNA (1)...(19): siRNA sense strand
uaaaggccuuacuuauuug

SEQ ID NO: 102778 - RNA, 19 nt, Homo sapiens
  misc_RNA (1)...(19): siRNA sense strand
ggucauacuacuagauauu

SEQ ID NO: 102779 - RNA, 19 nt, Homo sapiens
  misc_RNA (1)...(19): siRNA sense strand
gugaagcccuccaauaugc

SEQ ID NO: 102780 - RNA, 19 nt, Homo sapiens
  misc_RNA (1)...(19): siRNA sense strand
gacgugaagcccuccaaua

SEQ ID NO: 102781 - RNA, 19 nt, Homo sapiens
  misc_RNA (1)...(19): siRNA sense strand
uggaacaaaugcuuauaug

SEQ ID NO: 102782 - RNA, 19 nt, Homo sapiens
  misc_RNA (1)...(19): siRNA sense strand
ggagccauuuguacauuuc

SEQ ID NO: 102783 - RNA, 19 nt, Homo sapiens
  misc_RNA (1)...(19): siRNA sense strand
ggccagcaccugaagaauu

SEQ ID NO: 102784 - RNA, 19 nt, Homo sapiens
  misc_RNA (1)...(19): siRNA sense strand
gccagaacauguccuugga

SEQ ID NO: 102785 - RNA, 19 nt, Homo sapiens
  misc_RNA (1)...(19): siRNA sense strand
gauauuacacuggaacuuc

SEQ ID NO: 102786 - RNA, 19 nt, Homo sapiens
  misc_RNA (1)...(19): siRNA sense strand
gaaaacagccaaaagaaag

SEQ ID NO: 102787 - RNA, 19 nt, Homo sapiens
  misc_RNA (1)...(19): siRNA sense strand
ccuccaauaugcuaguaaa

SEQ ID NO: 102788 - RNA, 19 nt, Homo sapiens
  misc_RNA (1)...(19): siRNA sense strand
gaauugcaguagcaguugu

SEQ ID NO: 102789 - RNA, 19 nt, Homo sapiens
  misc_RNA (1)...(19): siRNA sense strand
gaucuuuggauguauauag

SEQ ID NO: 102790 - RNA, 19 nt, Homo sapiens
  misc_RNA (1)...(19): siRNA sense strand
agguuaagcugugugauuu

SEQ ID NO: 102791 - RNA, 19 nt, Homo sapiens
  misc_RNA (1)...(19): siRNA sense strand
gaagcaaauuaugucugaa

SEQ ID NO: 102792 - RNA, 19 nt, Homo sapiens
  misc_RNA (1)...(19): siRNA sense strand
ggauuucaauauguacaga

SEQ ID NO: 102793 - RNA, 19 nt, Homo sapiens
  misc_RNA (1)...(19): siRNA sense strand
cagguuaagcugugugauu

SEQ ID NO: 102794 - RNA, 19 nt, Homo sapiens
  misc_RNA (1)...(19): siRNA sense strand
ggagcaguauggaauucau

SEQ ID NO: 102795 - RNA, 19 nt, Homo sapiens
  misc_RNA (1)...(19): siRNA sense strand
ggaacaaaugcuuauaugg

SEQ ID NO: 102796 - RNA, 19 nt, Homo sapiens
  misc_RNA (1)...(19): siRNA sense strand
gaagcccuccaauaugcua

SEQ ID NO: 102797 - RNA, 19 nt, Homo sapiens
  misc_RNA (1)...(19): siRNA sense strand
gcagugcauuguugaugag

SEQ ID NO: 102798 - RNA, 19 nt, Homo sapiens
  misc_RNA (1)...(19): siRNA sense strand
ccaauaugcuaguaaacac

SEQ ID NO: 102799 - RNA, 19 nt, Homo sapiens
  misc_RNA (1)...(19): siRNA sense strand
gaaaggccagcaccugaag

SEQ ID NO: 102800 - RNA, 19 nt, Homo sapiens
  misc_RNA (1)...(19): siRNA sense strand
uggaagaauugcaguagca

SEQ ID NO: 102801 - RNA, 19 nt, Homo sapiens
  misc_RNA (1)...(19): siRNA sense strand
guacauuucaucacucagu

SEQ ID NO: 102802 - RNA, 19 nt, Homo sapiens
  misc_RNA (1)...(19): siRNA sense strand
cggagccauuuguacauuu

SEQ ID NO: 102803 - RNA, 19 nt, Homo sapiens
  misc_RNA (1)...(19): siRNA sense strand
uuuaaugccucuccagcuu

SEQ ID NO: 102804 - RNA, 19 nt, Homo sapiens
  misc_RNA (1)...(19): siRNA sense strand
ugcaguagcaguuguuaaa

SEQ ID NO: 102805 - RNA, 19 nt, Homo sapiens
  misc_RNA (1)...(19): siRNA sense strand
aaacacaagaggacagguu

SEQ ID NO: 102806 - RNA, 19 nt, Homo sapiens
  misc_RNA (1)...(19): siRNA sense strand
aaaccagggaucuuuaaug

SEQ ID NO: 102807 - RNA, 19 nt, Homo sapiens
  misc_RNA (1)...(19): siRNA sense strand
gcuuauauggcgccugaaa

SEQ ID NO: 102808 - RNA, 19 nt, Homo sapiens
  misc_RNA (1)...(19): siRNA sense strand
aaccagggaucuuuaaugc

SEQ ID NO: 102809 - RNA, 19 nt, Homo sapiens
  misc_RNA (1)...(19): siRNA sense strand
gagcaguauggaauucauu

SEQ ID NO: 102810 - RNA, 19 nt, Homo sapiens
  misc_RNA (1)...(19): siRNA sense strand
uauggcgccugaaaggauu

SEQ ID NO: 102811 - RNA, 19 nt, Homo sapiens
  misc_RNA (1)...(19): siRNA sense strand
ucugaugucuggagcuuag

SEQ ID NO: 102812 - RNA, 19 nt, Homo sapiens
  misc_RNA (1)...(19): siRNA sense strand
gugcauuguugaugaggau

SEQ ID NO: 102813 - RNA, 19 nt, Homo sapiens
  misc_RNA (1)...(19): siRNA sense strand
auaagugcgauucaucaua

SEQ ID NO: 102814 - RNA, 19 nt, Homo sapiens
  misc_RNA (1)...(19): siRNA sense strand
gaaaaugccagaacauguc

SEQ ID NO: 102815 - RNA, 19 nt, Homo sapiens
  misc_RNA (1)...(19): siRNA sense strand
caguagcaguuguuaaagg

SEQ ID NO: 102816 - RNA, 19 nt, Homo sapiens
  misc_RNA (1)...(19): siRNA sense strand
ggaaaaugccagaacaugu

SEQ ID NO: 102817 - RNA, 19 nt, Homo sapiens
  misc_RNA (1)...(19): siRNA sense strand
cgaaaacagccaaaagaaa

SEQ ID NO: 102818 - RNA, 19 nt, Homo sapiens
  misc_RNA (1)...(19): siRNA sense strand
ugaauucuauagccaagac

SEQ ID NO: 102819 - RNA, 19 nt, Homo sapiens
  misc_RNA (1)...(19): siRNA sense strand
caagaggacagguuaagcu

SEQ ID NO: 102820 - RNA, 19 nt, Homo sapiens
  misc_RNA (1)...(19): siRNA sense strand
acauguccuuggaagaauu

SEQ ID NO: 102821 - RNA, 19 nt, Homo sapiens
  misc_RNA (1)...(19): siRNA sense strand
aagaauugcaguagcaguu

SEQ ID NO: 102822 - RNA, 19 nt, Homo sapiens
  misc_RNA (1)...(19): siRNA sense strand
ggggaucuuuggauguaua

SEQ ID NO: 102823 - RNA, 19 nt, Homo sapiens
  misc_RNA (1)...(19): siRNA sense strand
uuaggaaucucuuuuaugg

SEQ ID NO: 102824 - RNA, 19 nt, Homo sapiens
  misc_RNA (1)...(19): siRNA sense strand
acgugaagcccuccaauau

SEQ ID NO: 102825 - RNA, 19 nt, Homo sapiens
  misc_RNA (1)...(19): siRNA sense strand
uguuaaaggccuuacuuau

SEQ ID NO: 102826 - RNA, 19 nt, Homo sapiens
  misc_RNA (1)...(19): siRNA sense strand
auauuacacuggaacuuca

SEQ ID NO: 102827 - RNA, 19 nt, Homo sapiens
  misc_RNA (1)...(19): siRNA sense strand
ucggagccauuuguacauu

SEQ ID NO: 102828 - RNA, 19 nt, Homo sapiens
  misc_RNA (1)...(19): siRNA sense strand
aacacaagaggacagguua

SEQ ID NO: 102829 - RNA, 19 nt, Homo sapiens
  misc_RNA (1)...(19): siRNA sense strand
gcccuccaauaugcuagua

SEQ ID NO: 102830 - RNA, 19 nt, Homo sapiens
  misc_RNA (1)...(19): siRNA sense strand
cgugaagcccuccaauaug

SEQ ID NO: 102831 - RNA, 19 nt, Homo sapiens
  misc_RNA (1)...(19): siRNA sense strand
agaaaggccagcaccugaa

SEQ ID NO: 102832 - RNA, 19 nt, Homo sapiens
  misc_RNA (1)...(19): siRNA sense strand
ggauguauauaggaaaaug

SEQ ID NO: 102833 - RNA, 19 nt, Homo sapiens
  misc_RNA (1)...(19): siRNA sense strand
ccccauaccuucugguuug

SEQ ID NO: 102834 - RNA, 19 nt, Homo sapiens
  misc_RNA (1)...(19): siRNA sense strand
gcgaaaacagccaaaagaa

SEQ ID NO: 102835 - RNA, 19 nt, Homo sapiens
  misc_RNA (1)...(19): siRNA sense strand
guucucggagccauuugua

SEQ ID NO: 102836 - RNA, 19 nt, Homo sapiens
  misc_RNA (1)...(19): siRNA sense strand
gcuuaggaaucucuuuuau

SEQ ID NO: 102837 - RNA, 19 nt, Homo sapiens
  misc_RNA (1)...(19): siRNA sense strand
gagcuuaggaaucucuuuu

SEQ ID NO: 102838 - RNA, 19 nt, Homo sapiens
  misc_RNA (1)...(19): siRNA sense strand
gucuggagcuuaggaaucu

SEQ ID NO: 102839 - RNA, 19 nt, Homo sapiens
  misc_RNA (1)...(19): siRNA sense strand
acacaagaggacagguuaa

SEQ ID NO: 102840 - RNA, 19 nt, Homo sapiens
  misc_RNA (1)...(19): siRNA sense strand
gcaguuguuaaaggccuua

SEQ ID NO: 102841 - RNA, 19 nt, Homo sapiens
  misc_RNA (1)...(19): siRNA sense strand
ugcgauucaucauauauca

SEQ ID NO: 102842 - RNA, 19 nt, Homo sapiens
  misc_RNA (1)...(19): siRNA sense strand
guuguuaaaggccuuacuu

SEQ ID NO: 102843 - RNA, 19 nt, Homo sapiens
  misc_RNA (1)...(19): siRNA sense strand
aagugcgauucaucauaua

SEQ ID NO: 102844 - RNA, 19 nt, Homo sapiens
  misc_RNA (1)...(19): siRNA sense strand
ccagaacauguccuuggaa

SEQ ID NO: 102845 - RNA, 19 nt, Homo sapiens
  misc_RNA (1)...(19): siRNA sense strand
gcaguagcaguuguuaaag

SEQ ID NO: 102846 - RNA, 19 nt, Homo sapiens
  misc_RNA (1)...(19): siRNA sense strand
uaaugccucuccagcuucu

SEQ ID NO: 102847 - RNA, 19 nt, Homo sapiens
  misc_RNA (1)...(19): siRNA sense strand
ggagcuuaggaaucucuuu

SEQ ID NO: 102848 - RNA, 19 nt, Homo sapiens
  misc_RNA (1)...(19): siRNA sense strand
gcacucagcuggugaauuc

SEQ ID NO: 102849 - RNA, 19 nt, Homo sapiens
  misc_RNA (1)...(19): siRNA sense strand
gaacauguccuuggaagaa

SEQ ID NO: 102850 - RNA, 19 nt, Homo sapiens
  misc_RNA (1)...(19): siRNA sense strand
uaagugcgauucaucauau

SEQ ID NO: 102851 - RNA, 19 nt, Homo sapiens
  misc_RNA (1)...(19): siRNA sense strand
guuaaaggccuuacuuauu

SEQ ID NO: 102852 - RNA, 19 nt, Homo sapiens
  misc_RNA (1)...(19): siRNA sense strand
gcaguucaaugauggaaau

SEQ ID NO: 102853 - RNA, 19 nt, Homo sapiens
  misc_RNA (1)...(19): siRNA sense strand
gccagcaccugaagaauug

SEQ ID NO: 102854 - RNA, 19 nt, Homo sapiens
  misc_RNA (1)...(19): siRNA sense strand
agaagcaaauuaugucuga

SEQ ID NO: 102855 - RNA, 19 nt, Homo sapiens
  misc_RNA (1)...(19): siRNA sense strand
uaaaggccuuacuuauuug

SEQ ID NO: 102856 - RNA, 19 nt, Homo sapiens
  misc_RNA (1)...(19): siRNA sense strand
ggucauacuacuagauauu

SEQ ID NO: 102857 - RNA, 19 nt, Homo sapiens
  misc_RNA (1)...(19): siRNA sense strand
gugaagcccuccaauaugc

SEQ ID NO: 102858 - RNA, 19 nt, Homo sapiens
  misc_RNA (1)...(19): siRNA sense strand
gacgugaagcccuccaaua

SEQ ID NO: 102859 - RNA, 19 nt, Homo sapiens
  misc_RNA (1)...(19): siRNA sense strand
uggaacaaaugcuuauaug

SEQ ID NO: 102860 - RNA, 19 nt, Homo sapiens
  misc_RNA (1)...(19): siRNA sense strand
ggagccauuuguacauuuc

SEQ ID NO: 102861 - RNA, 19 nt, Homo sapiens
  misc_RNA (1)...(19): siRNA sense strand
ggccagcaccugaagaauu

SEQ ID NO: 102862 - RNA, 19 nt, Homo sapiens
  misc_RNA (1)...(19): siRNA sense strand
gccagaacauguccuugga

SEQ ID NO: 102863 - RNA, 19 nt, Homo sapiens
  misc_RNA (1)...(19): siRNA sense strand
gauauuacacuggaacuuc

SEQ ID NO: 102864 - RNA, 19 nt, Homo sapiens
  misc_RNA (1)...(19): siRNA sense strand
gaaaacagccaaaagaaag

SEQ ID NO: 102865 - RNA, 19 nt, Homo sapiens
  misc_RNA (1)...(19): siRNA sense strand
ccuccaauaugcuaguaaa

SEQ ID NO: 102866 - RNA, 19 nt, Homo sapiens
  misc_RNA (1)...(19): siRNA sense strand
gaauugcaguagcaguugu

SEQ ID NO: 102867 - RNA, 19 nt, Homo sapiens
  misc_RNA (1)...(19): siRNA sense strand
gaucuuuggauguauauag

SEQ ID NO: 102868 - RNA, 19 nt, Homo sapiens
  misc_RNA (1)...(19): siRNA sense strand
agguuaagcugugugauuu

SEQ ID NO: 102869 - RNA, 19 nt, Homo sapiens
  misc_RNA (1)...(19): siRNA sense strand
gaagcaaauuaugucugaa

SEQ ID NO: 102870 - RNA, 19 nt, Homo sapiens
  misc_RNA (1)...(19): siRNA sense strand
ggauuucaauauguacaga

SEQ ID NO: 102871 - RNA, 19 nt, Homo sapiens
  misc_RNA (1)...(19): siRNA sense strand
cagguuaagcugugugauu

SEQ ID NO: 102872 - RNA, 19 nt, Homo sapiens
  misc_RNA (1)...(19): siRNA sense strand
ggagcaguauggaauucau

SEQ ID NO: 102873 - RNA, 19 nt, Homo sapiens
  misc_RNA (1)...(19): siRNA sense strand
ggaacaaaugcuuauaugg

SEQ ID NO: 102874 - RNA, 19 nt, Homo sapiens
  misc_RNA (1)...(19): siRNA sense strand
gaagcccuccaauaugcua

SEQ ID NO: 102875 - RNA, 19 nt, Homo sapiens
  misc_RNA (1)...(19): siRNA sense strand
gcagugcauuguugaugag

SEQ ID NO: 102876 - RNA, 19 nt, Homo sapiens
  misc_RNA (1)...(19): siRNA sense strand
ccaauaugcuaguaaacac

SEQ ID NO: 102877 - RNA, 19 nt, Homo sapiens
  misc_RNA (1)...(19): siRNA sense strand
gaaaggccagcaccugaag

SEQ ID NO: 102878 - RNA, 19 nt, Homo sapiens
  misc_RNA (1)...(19): siRNA sense strand
uggaagaauugcaguagca

SEQ ID NO: 102879 - RNA, 19 nt, Homo sapiens
  misc_RNA (1)...(19): siRNA sense strand
guacauuucaucacucagu

SEQ ID NO: 102880 - RNA, 19 nt, Homo sapiens
  misc_RNA (1)...(19): siRNA sense strand
cggagccauuuguacauuu

SEQ ID NO: 102881 - RNA, 19 nt, Homo sapiens
  misc_RNA (1)...(19): siRNA sense strand
uuuaaugccucuccagcuu

SEQ ID NO: 102882 - RNA, 19 nt, Homo sapiens
  misc_RNA (1)...(19): siRNA sense strand
ugcaguagcaguuguuaaa

SEQ ID NO: 102883 - RNA, 19 nt, Homo sapiens
  misc_RNA (1)...(19): siRNA sense strand
aaacacaagaggacagguu

SEQ ID NO: 102884 - RNA, 19 nt, Homo sapiens
  misc_RNA (1)...(19): siRNA sense strand
aaaccagggaucuuuaaug

SEQ ID NO: 102885 - RNA, 19 nt, Homo sapiens
  misc_RNA (1)...(19): siRNA sense strand
gcuuauauggcgccugaaa

SEQ ID NO: 102886 - RNA, 19 nt, Homo sapiens
  misc_RNA (1)...(19): siRNA sense strand
aaccagggaucuuuaaugc

SEQ ID NO: 102887 - RNA, 19 nt, Homo sapiens
  misc_RNA (1)...(19): siRNA sense strand
gagcaguauggaauucauu

SEQ ID NO: 102888 - RNA, 19 nt, Homo sapiens
  misc_RNA (1)...(19): siRNA sense strand
uauggcgccugaaaggauu

SEQ ID NO: 102889 - RNA, 19 nt, Homo sapiens
  misc_RNA (1)...(19): siRNA sense strand
ucugaugucuggagcuuag

SEQ ID NO: 102890 - RNA, 19 nt, Homo sapiens
  misc_RNA (1)...(19): siRNA sense strand
gugcauuguugaugaggau

SEQ ID NO: 102891 - RNA, 19 nt, Homo sapiens
  misc_RNA (1)...(19): siRNA sense strand
auaagugcgauucaucaua

SEQ ID NO: 102892 - RNA, 19 nt, Homo sapiens
  misc_RNA (1)...(19): siRNA sense strand
gaaaaugccagaacauguc

SEQ ID NO: 102893 - RNA, 19 nt, Homo sapiens
  misc_RNA (1)...(19): siRNA sense strand
caguagcaguuguuaaagg

SEQ ID NO: 102894 - RNA, 19 nt, Homo sapiens
  misc_RNA (1)...(19): siRNA sense strand
ggaaaaugccagaacaugu

SEQ ID NO: 102895 - RNA, 19 nt, Homo sapiens
  misc_RNA (1)...(19): siRNA sense strand
cgaaaacagccaaaagaaa

SEQ ID NO: 102896 - RNA, 19 nt, Homo sapiens
  misc_RNA (1)...(19): siRNA sense strand
ugaauucuauagccaagac

SEQ ID NO: 102897 - RNA, 19 nt, Homo sapiens
  misc_RNA (1)...(19): siRNA sense strand
caagaggacagguuaagcu

SEQ ID NO: 102898 - RNA, 19 nt, Homo sapiens
  misc_RNA (1)...(19): siRNA sense strand
acauguccuuggaagaauu

SEQ ID NO: 102899 - RNA, 19 nt, Homo sapiens
  misc_RNA (1)...(19): siRNA sense strand
aagaauugcaguagcaguu

SEQ ID NO: 102900 - RNA, 19 nt, Homo sapiens
  misc_RNA (1)...(19): siRNA sense strand
ggggaucuuuggauguaua

SEQ ID NO: 102901 - RNA, 19 nt, Homo sapiens
  misc_RNA (1)...(19): siRNA sense strand
uuaggaaucucuuuuaugg

SEQ ID NO: 102902 - RNA, 19 nt, Homo sapiens
  misc_RNA (1)...(19): siRNA sense strand
acgugaagcccuccaauau

SEQ ID NO: 102903 - RNA, 19 nt, Homo sapiens
  misc_RNA (1)...(19): siRNA sense strand
uguuaaaggccuuacuuau

SEQ ID NO: 102904 - RNA, 19 nt, Homo sapiens
  misc_RNA (1)...(19): siRNA sense strand
auauuacacuggaacuuca

SEQ ID NO: 102905 - RNA, 19 nt, Homo sapiens
  misc_RNA (1)...(19): siRNA sense strand
ucggagccauuuguacauu

SEQ ID NO: 102906 - RNA, 19 nt, Homo sapiens
  misc_RNA (1)...(19): siRNA sense strand
aacacaagaggacagguua

SEQ ID NO: 102907 - RNA, 19 nt, Homo sapiens
  misc_RNA (1)...(19): siRNA sense strand
gcccuccaauaugcuagua

SEQ ID NO: 102908 - RNA, 19 nt, Homo sapiens
  misc_RNA (1)...(19): siRNA sense strand
cgugaagcccuccaauaug

SEQ ID NO: 102909 - RNA, 19 nt, Homo sapiens
  misc_RNA (1)...(19): siRNA sense strand
agaaaggccagcaccugaa

SEQ ID NO: 102910 - RNA, 19 nt, Homo sapiens
  misc_RNA (1)...(19): siRNA sense strand
ggauguauauaggaaaaug

SEQ ID NO: 102911 - RNA, 19 nt, Homo sapiens
  misc_RNA (1)...(19): siRNA sense strand
gcgaaaacagccaaaagaa

SEQ ID NO: 102912 - RNA, 19 nt, Homo sapiens
  misc_RNA (1)...(19): siRNA sense strand
guucucggagccauuugua

SEQ ID NO: 102913 - RNA, 19 nt, Homo sapiens
  misc_RNA (1)...(19): siRNA sense strand
gcuuaggaaucucuuuuau

SEQ ID NO: 102914 - RNA, 19 nt, Homo sapiens
  misc_RNA (1)...(19): siRNA sense strand
gagcuuaggaaucucuuuu

SEQ ID NO: 102915 - RNA, 19 nt, Homo sapiens
  misc_RNA (1)...(19): siRNA sense strand
gucuggagcuuaggaaucu

SEQ ID NO: 102916 - RNA, 19 nt, Homo sapiens
  misc_RNA (1)...(19): siRNA sense strand
acacaagaggacagguuaa

SEQ ID NO: 102917 - RNA, 19 nt, Homo sapiens
  misc_RNA (1)...(19): siRNA sense strand
gcaguuguuaaaggccuua

SEQ ID NO: 102918 - RNA, 19 nt, Homo sapiens
  misc_RNA (1)...(19): siRNA sense strand
ugcgauucaucauauauca

SEQ ID NO: 102919 - RNA, 19 nt, Homo sapiens
  misc_RNA (1)...(19): siRNA sense strand
guuguuaaaggccuuacuu

SEQ ID NO: 102920 - RNA, 19 nt, Homo sapiens
  misc_RNA (1)...(19): siRNA sense strand
aagugcgauucaucauaua

SEQ ID NO: 102921 - RNA, 19 nt, Homo sapiens
  misc_RNA (1)...(19): siRNA sense strand
ccagaacauguccuuggaa

SEQ ID NO: 102922 - RNA, 19 nt, Homo sapiens
  misc_RNA (1)...(19): siRNA sense strand
uaaugccucuccagcuucu

SEQ ID NO: 102923 - RNA, 19 nt, Homo sapiens
  misc_RNA (1)...(19): siRNA sense strand
gcaguagcaguuguuaaag

SEQ ID NO: 102924 - RNA, 19 nt, Homo sapiens
  misc_RNA (1)...(19): siRNA sense strand
ggagcuuaggaaucucuuu

SEQ ID NO: 102925 - RNA, 19 nt, Homo sapiens
  misc_RNA (1)...(19): siRNA sense strand
gaacagaaacggcuacuga

SEQ ID NO: 102926 - RNA, 19 nt, Homo sapiens
  misc_RNA (1)...(19): siRNA sense strand
gcgaaacccuggccuuaaa

SEQ ID NO: 102927 - RNA, 19 nt, Homo sapiens
  misc_RNA (1)...(19): siRNA sense strand
ccaaagaacggccuacaua

SEQ ID NO: 102928 - RNA, 19 nt, Homo sapiens
  misc_RNA (1)...(19): siRNA sense strand
ucacagugcuuaaagaaga

SEQ ID NO: 102929 - RNA, 19 nt, Homo sapiens
  misc_RNA (1)...(19): siRNA sense strand
cgucaagccuucuaaugua

SEQ ID NO: 102930 - RNA, 19 nt, Homo sapiens
  misc_RNA (1)...(19): siRNA sense strand
gauaaaggccagacaauuc

SEQ ID NO: 102931 - RNA, 19 nt, Homo sapiens
  misc_RNA (1)...(19): siRNA sense strand
gcucauggauacaucacua

SEQ ID NO: 102932 - RNA, 19 nt, Homo sapiens
  misc_RNA (1)...(19): siRNA sense strand
gauacagugugaagucuga

SEQ ID NO: 102933 - RNA, 19 nt, Homo sapiens
  misc_RNA (1)...(19): siRNA sense strand
cagaugaccuggagccuau

SEQ ID NO: 102934 - RNA, 19 nt, Homo sapiens
  misc_RNA (1)...(19): siRNA sense strand
cagaagggauacaguguga

SEQ ID NO: 102935 - RNA, 19 nt, Homo sapiens
  misc_RNA (1)...(19): siRNA sense strand
cuacaugaauccaaaggaa

SEQ ID NO: 102936 - RNA, 19 nt, Homo sapiens
  misc_RNA (1)...(19): siRNA sense strand
guaaauagccaggaacaga

SEQ ID NO: 102937 - RNA, 19 nt, Homo sapiens
  misc_RNA (1)...(19): siRNA sense strand
ggauacaucacuagauaaa

SEQ ID NO: 102938 - RNA, 19 nt, Homo sapiens
  misc_RNA (1)...(19): siRNA sense strand
gguggacucuguugcuaaa

SEQ ID NO: 102939 - RNA, 19 nt, Homo sapiens
  misc_RNA (1)...(19): siRNA sense strand
gauccgagccacaguaaau

SEQ ID NO: 102940 - RNA, 19 nt, Homo sapiens
  misc_RNA (1)...(19): siRNA sense strand
gaauaaacccagagcucaa

SEQ ID NO: 102941 - RNA, 19 nt, Homo sapiens
  misc_RNA (1)...(19): siRNA sense strand
acccagagcucaaccagaa

SEQ ID NO: 102942 - RNA, 19 nt, Homo sapiens
  misc_RNA (1)...(19): siRNA sense strand
auggauacaucacuagaua

SEQ ID NO: 102943 - RNA, 19 nt, Homo sapiens
  misc_RNA (1)...(19): siRNA sense strand
gaacaaccucagaccaguu

SEQ ID NO: 102944 - RNA, 19 nt, Homo sapiens
  misc_RNA (1)...(19): siRNA sense strand
caucaaugcucucggucaa

SEQ ID NO: 102945 - RNA, 19 nt, Homo sapiens
  misc_RNA (1)...(19): siRNA sense strand
uaaauagccaggaacagaa

SEQ ID NO: 102946 - RNA, 19 nt, Homo sapiens
  misc_RNA (1)...(19): siRNA sense strand
uggaaucaguggcuacuug

SEQ ID NO: 102947 - RNA, 19 nt, Homo sapiens
  misc_RNA (1)...(19): siRNA sense strand
agaaacggcuacugaugga

SEQ ID NO: 102948 - RNA, 19 nt, Homo sapiens
  misc_RNA (1)...(19): siRNA sense strand
gggcagaucauggcaguga

SEQ ID NO: 102949 - RNA, 19 nt, Homo sapiens
  misc_RNA (1)...(19): siRNA sense strand
gaagggauacagugugaag

SEQ ID NO: 102950 - RNA, 19 nt, Homo sapiens
  misc_RNA (1)...(19): siRNA sense strand
uccauucacugucaccuuu

SEQ ID NO: 102951 - RNA, 19 nt, Homo sapiens
  misc_RNA (1)...(19): siRNA sense strand
caagugaagaugugcgauu

SEQ ID NO: 102952 - RNA, 19 nt, Homo sapiens
  misc_RNA (1)...(19): siRNA sense strand
cugcagaguuuguugacuu

SEQ ID NO: 102953 - RNA, 19 nt, Homo sapiens
  misc_RNA (1)...(19): siRNA sense strand
cacaguaaauagccaggaa

SEQ ID NO: 102954 - RNA, 19 nt, Homo sapiens
  misc_RNA (1)...(19): siRNA sense strand
cacccuacaugaauccaaa

SEQ ID NO: 102955 - RNA, 19 nt, Homo sapiens
  misc_RNA (1)...(19): siRNA sense strand
cuaauguacucaucaaugc

SEQ ID NO: 102956 - RNA, 19 nt, Homo sapiens
  misc_RNA (1)...(19): siRNA sense strand
ugauggauuuggauauuuc

SEQ ID NO: 102957 - RNA, 19 nt, Homo sapiens
  misc_RNA (1)...(19): siRNA sense strand
cauaguaagcugucuguca

SEQ ID NO: 102958 - RNA, 19 nt, Homo sapiens
  misc_RNA (1)...(19): siRNA sense strand
aagugaagaugugcgauuu

SEQ ID NO: 102959 - RNA, 19 nt, Homo sapiens
  misc_RNA (1)...(19): siRNA sense strand
gaggacaucuuagggaaaa

SEQ ID NO: 102960 - RNA, 19 nt, Homo sapiens
  misc_RNA (1)...(19): siRNA sense strand
ugauaaaggccagacaauu

SEQ ID NO: 102961 - RNA, 19 nt, Homo sapiens
  misc_RNA (1)...(19): siRNA sense strand
cuacauacccagagcuaau

SEQ ID NO: 102962 - RNA, 19 nt, Homo sapiens
  misc_RNA (1)...(19): siRNA sense strand
caaagaacggccuacauac

SEQ ID NO: 102963 - RNA, 19 nt, Homo sapiens
  misc_RNA (1)...(19): siRNA sense strand
gcuuaaagaagaauuccaa

SEQ ID NO: 102964 - RNA, 19 nt, Homo sapiens
  misc_RNA (1)...(19): siRNA sense strand
aagcgaaacccuggccuua

SEQ ID NO: 102965 - RNA, 19 nt, Homo sapiens
  misc_RNA (1)...(19): siRNA sense strand
ucaaugcucucggucaagu

SEQ ID NO: 102966 - RNA, 19 nt, Homo sapiens
  misc_RNA (1)...(19): siRNA sense strand
auaguaagcugucugucau

SEQ ID NO: 102967 - RNA, 19 nt, Homo sapiens
  misc_RNA (1)...(19): siRNA sense strand
aaacggcuacugauggauu

SEQ ID NO: 102968 - RNA, 19 nt, Homo sapiens
  misc_RNA (1)...(19): siRNA sense strand
acccagagcuaaugcaaca

SEQ ID NO: 102969 - RNA, 19 nt, Homo sapiens
  misc_RNA (1)...(19): siRNA sense strand
gaggagccaucgccacaac

SEQ ID NO: 102970 - RNA, 19 nt, Homo sapiens
  misc_RNA (1)...(19): siRNA sense strand
ugugaagucugacauuugg

SEQ ID NO: 102971 - RNA, 19 nt, Homo sapiens
  misc_RNA (1)...(19): siRNA sense strand
cuacugauggauuuggaua

SEQ ID NO: 102972 - RNA, 19 nt, Homo sapiens
  misc_RNA (1)...(19): siRNA sense strand
acugauggauuuggauauu

SEQ ID NO: 102973 - RNA, 19 nt, Homo sapiens
  misc_RNA (1)...(19): siRNA sense strand
aagaagaauuccaaagaac

SEQ ID NO: 102974 - RNA, 19 nt, Homo sapiens
  misc_RNA (1)...(19): siRNA sense strand
gaugaccuggagccuauaa

SEQ ID NO: 102975 - RNA, 19 nt, Homo sapiens
  misc_RNA (1)...(19): siRNA sense strand
gcuacuugguggacucugu

SEQ ID NO: 102976 - RNA, 19 nt, Homo sapiens
  misc_RNA (1)...(19): siRNA sense strand
gcuugcauuucuauuggaa

SEQ ID NO: 102977 - RNA, 19 nt, Homo sapiens
  misc_RNA (1)...(19): siRNA sense strand
cugauggauuuggauauuu

SEQ ID NO: 102978 - RNA, 19 nt, Homo sapiens
  misc_RNA (1)...(19): siRNA sense strand
ccuggagccuauaauggaa

SEQ ID NO: 102979 - RNA, 19 nt, Homo sapiens
  misc_RNA (1)...(19): siRNA sense strand
gcagaguuuguugacuuua

SEQ ID NO: 102980 - RNA, 19 nt, Homo sapiens
  misc_RNA (1)...(19): siRNA sense strand
agugugaagucugacauuu

SEQ ID NO: 102981 - RNA, 19 nt, Homo sapiens
  misc_RNA (1)...(19): siRNA sense strand
gacuguccauucacuguca

SEQ ID NO: 102982 - RNA, 19 nt, Homo sapiens
  misc_RNA (1)...(19): siRNA sense strand
ugcagaguuuguugacuuu

SEQ ID NO: 102983 - RNA, 19 nt, Homo sapiens
  misc_RNA (1)...(19): siRNA sense strand
gacgucaagccuucuaaug

SEQ ID NO: 102984 - RNA, 19 nt, Homo sapiens
  misc_RNA (1)...(19): siRNA sense strand
cacagugcuuaaagaagaa

SEQ ID NO: 102985 - RNA, 19 nt, Homo sapiens
  misc_RNA (1)...(19): siRNA sense strand
cuucuaauguacucaucaa

SEQ ID NO: 102986 - RNA, 19 nt, Homo sapiens
  misc_RNA (1)...(19): siRNA sense strand
ccucacagugcuuaaagaa

SEQ ID NO: 102987 - RNA, 19 nt, Homo sapiens
  misc_RNA (1)...(19): siRNA sense strand
cagaguuuguugacuuuac

SEQ ID NO: 102988 - RNA, 19 nt, Homo sapiens
  misc_RNA (1)...(19): siRNA sense strand
aaagaagcauuugaacaac

SEQ ID NO: 102989 - RNA, 19 nt, Homo sapiens
  misc_RNA (1)...(19): siRNA sense strand
uuggaaaucagaacuuuga

SEQ ID NO: 102990 - RNA, 19 nt, Homo sapiens
  misc_RNA (1)...(19): siRNA sense strand
ucuaauguacucaucaaug

SEQ ID NO: 102991 - RNA, 19 nt, Homo sapiens
  misc_RNA (1)...(19): siRNA sense strand
gcauuugaacaaccucaga

SEQ ID NO: 102992 - RNA, 19 nt, Homo sapiens
  misc_RNA (1)...(19): siRNA sense strand
gagcuaaugcaacauccau

SEQ ID NO: 102993 - RNA, 19 nt, Homo sapiens
  misc_RNA (1)...(19): siRNA sense strand
ccacaacucccagcagaca

SEQ ID NO: 102994 - RNA, 19 nt, Homo sapiens
  misc_RNA (1)...(19): siRNA sense strand
ggacaucuuagggaaaaua

SEQ ID NO: 102995 - RNA, 19 nt, Homo sapiens
  misc_RNA (1)...(19): siRNA sense strand
gaauccaaaggaacagaug

SEQ ID NO: 102996 - RNA, 19 nt, Homo sapiens
  misc_RNA (1)...(19): siRNA sense strand
aaauagccaggaacagaaa

SEQ ID NO: 102997 - RNA, 19 nt, Homo sapiens
  misc_RNA (1)...(19): siRNA sense strand
gcggauccgagccacagua

SEQ ID NO: 102998 - RNA, 19 nt, Homo sapiens
  misc_RNA (1)...(19): siRNA sense strand
gggauacagugugaagucu

SEQ ID NO: 102999 - RNA, 19 nt, Homo sapiens
  misc_RNA (1)...(19): siRNA sense strand
gaagaugugcgauuuugga

SEQ ID NO: 103000 - RNA, 19 nt, Homo sapiens
  misc_RNA (1)...(19): siRNA sense strand
ugaccuggagccuauaaug

SEQ ID NO: 103001 - RNA, 19 nt, Homo sapiens
  misc_RNA (1)...(19): siRNA sense strand
gaccuggagccuauaaugg

SEQ ID NO: 103002 - RNA, 19 nt, Homo sapiens
  misc_RNA (1)...(19): siRNA sense strand
cauggccccugaaagaaua

SEQ ID NO: 103003 - RNA, 19 nt, Homo sapiens
  misc_RNA (1)...(19): siRNA sense strand
acagaaacggcuacugaug

SEQ ID NO: 103004 - RNA, 19 nt, Homo sapiens
  misc_RNA (1)...(19): siRNA sense strand
gagacgucaagccuucuaa

SEQ ID NO: 103005 - RNA, 19 nt, Homo sapiens
  misc_RNA (1)...(19): siRNA sense strand
gugaagaugugcgauuuug

SEQ ID NO: 103006 - RNA, 19 nt, Homo sapiens
  misc_RNA (1)...(19): siRNA sense strand
gucaagccuucuaauguac

SEQ ID NO: 103007 - RNA, 19 nt, Homo sapiens
  misc_RNA (1)...(19): siRNA sense strand
acugauucuuggagacuaa

SEQ ID NO: 103008 - RNA, 19 nt, Homo sapiens
  misc_RNA (1)...(19): siRNA sense strand
gugugaagucugacauuug

SEQ ID NO: 103009 - RNA, 19 nt, Homo sapiens
  misc_RNA (1)...(19): siRNA sense strand
aguaagcugucugucauuc

SEQ ID NO: 103010 - RNA, 19 nt, Homo sapiens
  misc_RNA (1)...(19): siRNA sense strand
gcagaucauggcagugaag

SEQ ID NO: 103011 - RNA, 19 nt, Homo sapiens
  misc_RNA (1)...(19): siRNA sense strand
ggcagaucauggcagugaa

SEQ ID NO: 103012 - RNA, 19 nt, Homo sapiens
  misc_RNA (1)...(19): siRNA sense strand
uaagcugucugucauucac

SEQ ID NO: 103013 - RNA, 19 nt, Homo sapiens
  misc_RNA (1)...(19): siRNA sense strand
gccuuaaaauuccaaaaga

SEQ ID NO: 103014 - RNA, 19 nt, Homo sapiens
  misc_RNA (1)...(19): siRNA sense strand
ccagagcuaaugcaacauc

SEQ ID NO: 103015 - RNA, 19 nt, Homo sapiens
  misc_RNA (1)...(19): siRNA sense strand
cauuucagcagcucaaaca

SEQ ID NO: 103016 - RNA, 19 nt, Homo sapiens
  misc_RNA (1)...(19): siRNA sense strand
guaagcugucugucauuca

SEQ ID NO: 103017 - RNA, 19 nt, Homo sapiens
  misc_RNA (1)...(19): siRNA sense strand
aacggcuacugauggauuu

SEQ ID NO: 103018 - RNA, 19 nt, Homo sapiens
  misc_RNA (1)...(19): siRNA sense strand
gaacagaaacggcuacuga

SEQ ID NO: 103019 - RNA, 19 nt, Homo sapiens
  misc_RNA (1)...(19): siRNA sense strand
ccaaagaacggccuacaua

SEQ ID NO: 103020 - RNA, 19 nt, Homo sapiens
  misc_RNA (1)...(19): siRNA sense strand
ucacagugcuuaaagaaga

SEQ ID NO: 103021 - RNA, 19 nt, Homo sapiens
  misc_RNA (1)...(19): siRNA sense strand
cgucaagccuucuaaugua

SEQ ID NO: 103022 - RNA, 19 nt, Homo sapiens
  misc_RNA (1)...(19): siRNA sense strand
gauaaaggccagacaauuc

SEQ ID NO: 103023 - RNA, 19 nt, Homo sapiens
  misc_RNA (1)...(19): siRNA sense strand
gcucauggauacaucacua

SEQ ID NO: 103024 - RNA, 19 nt, Homo sapiens
  misc_RNA (1)...(19): siRNA sense strand
gauacagugugaagucuga

SEQ ID NO: 103025 - RNA, 19 nt, Homo sapiens
  misc_RNA (1)...(19): siRNA sense strand
cagaagggauacaguguga

SEQ ID NO: 103026 - RNA, 19 nt, Homo sapiens
  misc_RNA (1)...(19): siRNA sense strand
cuacaugaauccaaaggaa

SEQ ID NO: 103027 - RNA, 19 nt, Homo sapiens
  misc_RNA (1)...(19): siRNA sense strand
guaaauagccaggaacaga

SEQ ID NO: 103028 - RNA, 19 nt, Homo sapiens
  misc_RNA (1)...(19): siRNA sense strand
ggauacaucacuagauaaa

SEQ ID NO: 103029 - RNA, 19 nt, Homo sapiens
  misc_RNA (1)...(19): siRNA sense strand
gguggacucuguugcuaaa

SEQ ID NO: 103030 - RNA, 19 nt, Homo sapiens
  misc_RNA (1)...(19): siRNA sense strand
gauccgagccacaguaaau

SEQ ID NO: 103031 - RNA, 19 nt, Homo sapiens
  misc_RNA (1)...(19): siRNA sense strand
gaauaaacccagagcucaa

SEQ ID NO: 103032 - RNA, 19 nt, Homo sapiens
  misc_RNA (1)...(19): siRNA sense strand
acccagagcucaaccagaa

SEQ ID NO: 103033 - RNA, 19 nt, Homo sapiens
  misc_RNA (1)...(19): siRNA sense strand
auggauacaucacuagaua

SEQ ID NO: 103034 - RNA, 19 nt, Homo sapiens
  misc_RNA (1)...(19): siRNA sense strand
caucaaugcucucggucaa

SEQ ID NO: 103035 - RNA, 19 nt, Homo sapiens
  misc_RNA (1)...(19): siRNA sense strand
uaaauagccaggaacagaa

SEQ ID NO: 103036 - RNA, 19 nt, Homo sapiens
  misc_RNA (1)...(19): siRNA sense strand
uggaaucaguggcuacuug

SEQ ID NO: 103037 - RNA, 19 nt, Homo sapiens
  misc_RNA (1)...(19): siRNA sense strand
agaaacggcuacugaugga

SEQ ID NO: 103038 - RNA, 19 nt, Homo sapiens
  misc_RNA (1)...(19): siRNA sense strand
uccauucacugucaccuuu

SEQ ID NO: 103039 - RNA, 19 nt, Homo sapiens
  misc_RNA (1)...(19): siRNA sense strand
gaagggauacagugugaag

SEQ ID NO: 103040 - RNA, 19 nt, Homo sapiens
  misc_RNA (1)...(19): siRNA sense strand
gggcagaucauggcaguga

SEQ ID NO: 103041 - RNA, 19 nt, Homo sapiens
  misc_RNA (1)...(19): siRNA sense strand
caagugaagaugugcgauu

SEQ ID NO: 103042 - RNA, 19 nt, Homo sapiens
  misc_RNA (1)...(19): siRNA sense strand
cugcagaguuuguugacuu

SEQ ID NO: 103043 - RNA, 19 nt, Homo sapiens
  misc_RNA (1)...(19): siRNA sense strand
ugauggauuuggauauuuc

SEQ ID NO: 103044 - RNA, 19 nt, Homo sapiens
  misc_RNA (1)...(19): siRNA sense strand
cacccuacaugaauccaaa

SEQ ID NO: 103045 - RNA, 19 nt, Homo sapiens
  misc_RNA (1)...(19): siRNA sense strand
cacaguaaauagccaggaa

SEQ ID NO: 103046 - RNA, 19 nt, Homo sapiens
  misc_RNA (1)...(19): siRNA sense strand
cuaauguacucaucaaugc

SEQ ID NO: 103047 - RNA, 19 nt, Homo sapiens
  misc_RNA (1)...(19): siRNA sense strand
cauaguaagcugucuguca

SEQ ID NO: 103048 - RNA, 19 nt, Homo sapiens
  misc_RNA (1)...(19): siRNA sense strand
aagugaagaugugcgauuu

SEQ ID NO: 103049 - RNA, 19 nt, Homo sapiens
  misc_RNA (1)...(19): siRNA sense strand
gaggacaucuuagggaaaa

SEQ ID NO: 103050 - RNA, 19 nt, Homo sapiens
  misc_RNA (1)...(19): siRNA sense strand
ugauaaaggccagacaauu

SEQ ID NO: 103051 - RNA, 19 nt, Homo sapiens
  misc_RNA (1)...(19): siRNA sense strand
cuacauacccagagcuaau

SEQ ID NO: 103052 - RNA, 19 nt, Homo sapiens
  misc_RNA (1)...(19): siRNA sense strand
caaagaacggccuacauac

SEQ ID NO: 103053 - RNA, 19 nt, Homo sapiens
  misc_RNA (1)...(19): siRNA sense strand
gcuuaaagaagaauuccaa

SEQ ID NO: 103054 - RNA, 19 nt, Homo sapiens
  misc_RNA (1)...(19): siRNA sense strand
auaguaagcugucugucau

SEQ ID NO: 103055 - RNA, 19 nt, Homo sapiens
  misc_RNA (1)...(19): siRNA sense strand
ucaaugcucucggucaagu

SEQ ID NO: 103056 - RNA, 19 nt, Homo sapiens
  misc_RNA (1)...(19): siRNA sense strand
aaacggcuacugauggauu

SEQ ID NO: 103057 - RNA, 19 nt, Homo sapiens
  misc_RNA (1)...(19): siRNA sense strand
acccagagcuaaugcaaca

SEQ ID NO: 103058 - RNA, 19 nt, Homo sapiens
  misc_RNA (1)...(19): siRNA sense strand
gaggagccaucgccacaac

SEQ ID NO: 103059 - RNA, 19 nt, Homo sapiens
  misc_RNA (1)...(19): siRNA sense strand
ugugaagucugacauuugg

SEQ ID NO: 103060 - RNA, 19 nt, Homo sapiens
  misc_RNA (1)...(19): siRNA sense strand
cuacugauggauuuggaua

SEQ ID NO: 103061 - RNA, 19 nt, Homo sapiens
  misc_RNA (1)...(19): siRNA sense strand
gcuacuugguggacucugu

SEQ ID NO: 103062 - RNA, 19 nt, Homo sapiens
  misc_RNA (1)...(19): siRNA sense strand
aagaagaauuccaaagaac

SEQ ID NO: 103063 - RNA, 19 nt, Homo sapiens
  misc_RNA (1)...(19): siRNA sense strand
acugauggauuuggauauu

SEQ ID NO: 103064 - RNA, 19 nt, Homo sapiens
  misc_RNA (1)...(19): siRNA sense strand
agugugaagucugacauuu

SEQ ID NO: 103065 - RNA, 19 nt, Homo sapiens
  misc_RNA (1)...(19): siRNA sense strand
gcagaguuuguugacuuua

SEQ ID NO: 103066 - RNA, 19 nt, Homo sapiens
  misc_RNA (1)...(19): siRNA sense strand
gacuguccauucacuguca

SEQ ID NO: 103067 - RNA, 19 nt, Homo sapiens
  misc_RNA (1)...(19): siRNA sense strand
cugauggauuuggauauuu

SEQ ID NO: 103068 - RNA, 19 nt, Homo sapiens
  misc_RNA (1)...(19): siRNA sense strand
ugcagaguuuguugacuuu

SEQ ID NO: 103069 - RNA, 19 nt, Homo sapiens
  misc_RNA (1)...(19): siRNA sense strand
gacgucaagccuucuaaug

SEQ ID NO: 103070 - RNA, 19 nt, Homo sapiens
  misc_RNA (1)...(19): siRNA sense strand
cacagugcuuaaagaagaa

SEQ ID NO: 103071 - RNA, 19 nt, Homo sapiens
  misc_RNA (1)...(19): siRNA sense strand
cuucuaauguacucaucaa

SEQ ID NO: 103072 - RNA, 19 nt, Homo sapiens
  misc_RNA (1)...(19): siRNA sense strand
ccucacagugcuuaaagaa

SEQ ID NO: 103073 - RNA, 19 nt, Homo sapiens
  misc_RNA (1)...(19): siRNA sense strand
cagaguuuguugacuuuac

SEQ ID NO: 103074 - RNA, 19 nt, Homo sapiens
  misc_RNA (1)...(19): siRNA sense strand
ucuaauguacucaucaaug

SEQ ID NO: 103075 - RNA, 19 nt, Homo sapiens
  misc_RNA (1)...(19): siRNA sense strand
ccacaacucccagcagaca

SEQ ID NO: 103076 - RNA, 19 nt, Homo sapiens
  misc_RNA (1)...(19): siRNA sense strand
gagcuaaugcaacauccau

SEQ ID NO: 103077 - RNA, 19 nt, Homo sapiens
  misc_RNA (1)...(19): siRNA sense strand
aaauagccaggaacagaaa

SEQ ID NO: 103078 - RNA, 19 nt, Homo sapiens
  misc_RNA (1)...(19): siRNA sense strand
gaauccaaaggaacagaug

SEQ ID NO: 103079 - RNA, 19 nt, Homo sapiens
  misc_RNA (1)...(19): siRNA sense strand
gggauacagugugaagucu

SEQ ID NO: 103080 - RNA, 19 nt, Homo sapiens
  misc_RNA (1)...(19): siRNA sense strand
gaagaugugcgauuuugga

SEQ ID NO: 103081 - RNA, 19 nt, Homo sapiens
  misc_RNA (1)...(19): siRNA sense strand
ggacaucuuagggaaaaua

SEQ ID NO: 103082 - RNA, 19 nt, Homo sapiens
  misc_RNA (1)...(19): siRNA sense strand
gcggauccgagccacagua

SEQ ID NO: 103083 - RNA, 19 nt, Homo sapiens
  misc_RNA (1)...(19): siRNA sense strand
acagaaacggcuacugaug

SEQ ID NO: 103084 - RNA, 19 nt, Homo sapiens
  misc_RNA (1)...(19): siRNA sense strand
cauggccccugaaagaaua

SEQ ID NO: 103085 - RNA, 19 nt, Homo sapiens
  misc_RNA (1)...(19): siRNA sense strand
gagacgucaagccuucuaa

SEQ ID NO: 103086 - RNA, 19 nt, Homo sapiens
  misc_RNA (1)...(19): siRNA sense strand
gugaagaugugcgauuuug

SEQ ID NO: 103087 - RNA, 19 nt, Homo sapiens
  misc_RNA (1)...(19): siRNA sense strand
gucaagccuucuaauguac

SEQ ID NO: 103088 - RNA, 19 nt, Homo sapiens
  misc_RNA (1)...(19): siRNA sense strand
acugauucuuggagacuaa

SEQ ID NO: 103089 - RNA, 19 nt, Homo sapiens
  misc_RNA (1)...(19): siRNA sense strand
gugugaagucugacauuug

SEQ ID NO: 103090 - RNA, 19 nt, Homo sapiens
  misc_RNA (1)...(19): siRNA sense strand
aguaagcugucugucauuc

SEQ ID NO: 103091 - RNA, 19 nt, Homo sapiens
  misc_RNA (1)...(19): siRNA sense strand
ggcagaucauggcagugaa

SEQ ID NO: 103092 - RNA, 19 nt, Homo sapiens
  misc_RNA (1)...(19): siRNA sense strand
gcagaucauggcagugaag

SEQ ID NO: 103093 - RNA, 19 nt, Homo sapiens
  misc_RNA (1)...(19): siRNA sense strand
uaagcugucugucauucac

SEQ ID NO: 103094 - RNA, 19 nt, Homo sapiens
  misc_RNA (1)...(19): siRNA sense strand
cauuucagcagcucaaaca

SEQ ID NO: 103095 - RNA, 19 nt, Homo sapiens
  misc_RNA (1)...(19): siRNA sense strand
ccagagcuaaugcaacauc

SEQ ID NO: 103096 - RNA, 19 nt, Homo sapiens
  misc_RNA (1)...(19): siRNA sense strand
guaagcugucugucauuca

SEQ ID NO: 103097 - RNA, 19 nt, Homo sapiens
  misc_RNA (1)...(19): siRNA sense strand
aacggcuacugauggauuu

SEQ ID NO: 103098 - RNA, 19 nt, Homo sapiens
  misc_RNA (1)...(19): siRNA sense strand
aagaagagaucccagauua

SEQ ID NO: 103099 - RNA, 19 nt, Homo sapiens
  misc_RNA (1)...(19): siRNA sense strand
ggaaagaggugcauauaag

SEQ ID NO: 103100 - RNA, 19 nt, Homo sapiens
  misc_RNA (1)...(19): siRNA sense strand
gaaacaagaguacaaauuc

SEQ ID NO: 103101 - RNA, 19 nt, Homo sapiens
  misc_RNA (1)...(19): siRNA sense strand
guauggagcuaucaaagaa

SEQ ID NO: 103102 - RNA, 19 nt, Homo sapiens
  misc_RNA (1)...(19): siRNA sense strand
gcagagacccugaaggaaa

SEQ ID NO: 103103 - RNA, 19 nt, Homo sapiens
  misc_RNA (1)...(19): siRNA sense strand
ccaauacaauuccacauga

SEQ ID NO: 103104 - RNA, 19 nt, Homo sapiens
  misc_RNA (1)...(19): siRNA sense strand
gagcaucucccuucuuauu

SEQ ID NO: 103105 - RNA, 19 nt, Homo sapiens
  misc_RNA (1)...(19): siRNA sense strand
gugcaaagcuggucuaacu

SEQ ID NO: 103106 - RNA, 19 nt, Homo sapiens
  misc_RNA (1)...(19): siRNA sense strand
uaacagagaaacaagagua

SEQ ID NO: 103107 - RNA, 19 nt, Homo sapiens
  misc_RNA (1)...(19): siRNA sense strand
auucagggcuucuucaaua

SEQ ID NO: 103108 - RNA, 19 nt, Homo sapiens
  misc_RNA (1)...(19): siRNA sense strand
gaaagaggugcauauaaga

SEQ ID NO: 103109 - RNA, 19 nt, Homo sapiens
  misc_RNA (1)...(19): siRNA sense strand
gaaaccaagaugaacauaa

SEQ ID NO: 103110 - RNA, 19 nt, Homo sapiens
  misc_RNA (1)...(19): siRNA sense strand
ggucuaacucaucuuauua

SEQ ID NO: 103111 - RNA, 19 nt, Homo sapiens
  misc_RNA (1)...(19): siRNA sense strand
gaagagaucccagauuaca

SEQ ID NO: 103112 - RNA, 19 nt, Homo sapiens
  misc_RNA (1)...(19): siRNA sense strand
ccaggaaccuaacagagaa

SEQ ID NO: 103113 - RNA, 19 nt, Homo sapiens
  misc_RNA (1)...(19): siRNA sense strand
gcauauaagaucuuuguga

SEQ ID NO: 103114 - RNA, 19 nt, Homo sapiens
  misc_RNA (1)...(19): siRNA sense strand
gaaggaaagaggugcauau

SEQ ID NO: 103115 - RNA, 19 nt, Homo sapiens
  misc_RNA (1)...(19): siRNA sense strand
caauauuccuguugacaau

SEQ ID NO: 103116 - RNA, 19 nt, Homo sapiens
  misc_RNA (1)...(19): siRNA sense strand
gaggcuccauugucucuaa

SEQ ID NO: 103117 - RNA, 19 nt, Homo sapiens
  misc_RNA (1)...(19): siRNA sense strand
gaaccuaacagagaaacaa

SEQ ID NO: 103118 - RNA, 19 nt, Homo sapiens
  misc_RNA (1)...(19): siRNA sense strand
caauacaauuccacaugaa

SEQ ID NO: 103119 - RNA, 19 nt, Homo sapiens
  misc_RNA (1)...(19): siRNA sense strand
gaucccagauuacaggaau

SEQ ID NO: 103120 - RNA, 19 nt, Homo sapiens
  misc_RNA (1)...(19): siRNA sense strand
gaggaaggauugccaucau

SEQ ID NO: 103121 - RNA, 19 nt, Homo sapiens
  misc_RNA (1)...(19): siRNA sense strand
ugaagagucugccauugau

SEQ ID NO: 103122 - RNA, 19 nt, Homo sapiens
  misc_RNA (1)...(19): siRNA sense strand
caaagguggucugguguug

SEQ ID NO: 103123 - RNA, 19 nt, Homo sapiens
  misc_RNA (1)...(19): siRNA sense strand
aaaccaagaugaacauaac

SEQ ID NO: 103124 - RNA, 19 nt, Homo sapiens
  misc_RNA (1)...(19): siRNA sense strand
gacgccaccugaauuagaa

SEQ ID NO: 103125 - RNA, 19 nt, Homo sapiens
  misc_RNA (1)...(19): siRNA sense strand
gcaaagcuggucuaacuca

SEQ ID NO: 103126 - RNA, 19 nt, Homo sapiens
  misc_RNA (1)...(19): siRNA sense strand
gaauuagaaaccaagauga

SEQ ID NO: 103127 - RNA, 19 nt, Homo sapiens
  misc_RNA (1)...(19): siRNA sense strand
gcuccauugucucuaaauu

SEQ ID NO: 103128 - RNA, 19 nt, Homo sapiens
  misc_RNA (1)...(19): siRNA sense strand
cagcagagacccugaagga

SEQ ID NO: 103129 - RNA, 19 nt, Homo sapiens
  misc_RNA (1)...(19): siRNA sense strand
aaacucgaauucaucaugu

SEQ ID NO: 103130 - RNA, 19 nt, Homo sapiens
  misc_RNA (1)...(19): siRNA sense strand
gaaauucagggcuucuuca

SEQ ID NO: 103131 - RNA, 19 nt, Homo sapiens
  misc_RNA (1)...(19): siRNA sense strand
cuaaauugcuggcuuccau

SEQ ID NO: 103132 - RNA, 19 nt, Homo sapiens
  misc_RNA (1)...(19): siRNA sense strand
gcaucucccuucuuauuac

SEQ ID NO: 103133 - RNA, 19 nt, Homo sapiens
  misc_RNA (1)...(19): siRNA sense strand
gauguugacagcuuucuug

SEQ ID NO: 103134 - RNA, 19 nt, Homo sapiens
  misc_RNA (1)...(19): siRNA sense strand
caagaugaacauaaccaaa

SEQ ID NO: 103135 - RNA, 19 nt, Homo sapiens
  misc_RNA (1)...(19): siRNA sense strand
caagaagagaucccagauu

SEQ ID NO: 103136 - RNA, 19 nt, Homo sapiens
  misc_RNA (1)...(19): siRNA sense strand
gcaaagugcagguuuacca

SEQ ID NO: 103137 - RNA, 19 nt, Homo sapiens
  misc_RNA (1)...(19): siRNA sense strand
gaaacauaggcuuagauga

SEQ ID NO: 103138 - RNA, 19 nt, Homo sapiens
  misc_RNA (1)...(19): siRNA sense strand
cagagacccugaaggaaag

SEQ ID NO: 103139 - RNA, 19 nt, Homo sapiens
  misc_RNA (1)...(19): siRNA sense strand
gcuggucuaacucaucuua

SEQ ID NO: 103140 - RNA, 19 nt, Homo sapiens
  misc_RNA (1)...(19): siRNA sense strand
caucauguauggagcuauc

SEQ ID NO: 103141 - RNA, 19 nt, Homo sapiens
  misc_RNA (1)...(19): siRNA sense strand
ucauggagcuccugaucau

SEQ ID NO: 103142 - RNA, 19 nt, Homo sapiens
  misc_RNA (1)...(19): siRNA sense strand
gauguuggaggaaggauug

SEQ ID NO: 103143 - RNA, 19 nt, Homo sapiens
  misc_RNA (1)...(19): siRNA sense strand
acucauggcuuguugucuu

SEQ ID NO: 103144 - RNA, 19 nt, Homo sapiens
  misc_RNA (1)...(19): siRNA sense strand
caaauucaagagucuguga

SEQ ID NO: 103145 - RNA, 19 nt, Homo sapiens
  misc_RNA (1)...(19): siRNA sense strand
aaacauaggcuuagaugac

SEQ ID NO: 103146 - RNA, 19 nt, Homo sapiens
  misc_RNA (1)...(19): siRNA sense strand
ucagaaacauaggcuuaga

SEQ ID NO: 103147 - RNA, 19 nt, Homo sapiens
  misc_RNA (1)...(19): siRNA sense strand
caaacucgaauucaucaug

SEQ ID NO: 103148 - RNA, 19 nt, Homo sapiens
  misc_RNA (1)...(19): siRNA sense strand
ucagcaaacucgaauucau

SEQ ID NO: 103149 - RNA, 19 nt, Homo sapiens
  misc_RNA (1)...(19): siRNA sense strand
gaguccauguccuaccuuu

SEQ ID NO: 103150 - RNA, 19 nt, Homo sapiens
  misc_RNA (1)...(19): siRNA sense strand
ggaaauucagggcuucuuc

SEQ ID NO: 103151 - RNA, 19 nt, Homo sapiens
  misc_RNA (1)...(19): siRNA sense strand
ugggcaaagugcagguuua

SEQ ID NO: 103152 - RNA, 19 nt, Homo sapiens
  misc_RNA (1)...(19): siRNA sense strand
gugauacccuacuuuccuu

SEQ ID NO: 103153 - RNA, 19 nt, Homo sapiens
  misc_RNA (1)...(19): siRNA sense strand
ugaauuagaaaccaagaug

SEQ ID NO: 103154 - RNA, 19 nt, Homo sapiens
  misc_RNA (1)...(19): siRNA sense strand
uggucuaacucaucuuauu

SEQ ID NO: 103155 - RNA, 19 nt, Homo sapiens
  misc_RNA (1)...(19): siRNA sense strand
gauugaagagucugccauu

SEQ ID NO: 103156 - RNA, 19 nt, Homo sapiens
  misc_RNA (1)...(19): siRNA sense strand
gagaaacaagaguacaaau

SEQ ID NO: 103157 - RNA, 19 nt, Homo sapiens
  misc_RNA (1)...(19): siRNA sense strand
gugcauauaagaucuuugu

SEQ ID NO: 103158 - RNA, 19 nt, Homo sapiens
  misc_RNA (1)...(19): siRNA sense strand
ccugggaauugcagugauu

SEQ ID NO: 103159 - RNA, 19 nt, Homo sapiens
  misc_RNA (1)...(19): siRNA sense strand
cagggcuucuucaauauuc

SEQ ID NO: 103160 - RNA, 19 nt, Homo sapiens
  misc_RNA (1)...(19): siRNA sense strand
ggaggaaggauugccauca

SEQ ID NO: 103161 - RNA, 19 nt, Homo sapiens
  misc_RNA (1)...(19): siRNA sense strand
cagagaaacaagaguacaa

SEQ ID NO: 103162 - RNA, 19 nt, Homo sapiens
  misc_RNA (1)...(19): siRNA sense strand
gguugugggugauguugga

SEQ ID NO: 103163 - RNA, 19 nt, Homo sapiens
  misc_RNA (1)...(19): siRNA sense strand
ccaugcugauuccuaaaga

SEQ ID NO: 103164 - RNA, 19 nt, Homo sapiens
  misc_RNA (1)...(19): siRNA sense strand
aagguggucugguguuguu

SEQ ID NO: 103165 - RNA, 19 nt, Homo sapiens
  misc_RNA (1)...(19): siRNA sense strand
caagaguacaaauucaaga

SEQ ID NO: 103166 - RNA, 19 nt, Homo sapiens
  misc_RNA (1)...(19): siRNA sense strand
ggauuuacaccagaaggaa

SEQ ID NO: 103167 - RNA, 19 nt, Homo sapiens
  misc_RNA (1)...(19): siRNA sense strand
ugugacgccaccugaauua

SEQ ID NO: 103168 - RNA, 19 nt, Homo sapiens
  misc_RNA (1)...(19): siRNA sense strand
aaggaaagaggugcauaua

SEQ ID NO: 103169 - RNA, 19 nt, Homo sapiens
  misc_RNA (1)...(19): siRNA sense strand
gacgugaacaccaccauca

SEQ ID NO: 103170 - RNA, 19 nt, Homo sapiens
  misc_RNA (1)...(19): siRNA sense strand
ucagcaugauccuuucaga

SEQ ID NO: 103171 - RNA, 19 nt, Homo sapiens
  misc_RNA (1)...(19): siRNA sense strand
cagcaaacucgaauucauc

SEQ ID NO: 103172 - RNA, 19 nt, Homo sapiens
  misc_RNA (1)...(19): siRNA sense strand
aggaaagaggugcauauaa

SEQ ID NO: 103173 - RNA, 19 nt, Homo sapiens
  misc_RNA (1)...(19): siRNA sense strand
ugaugauguugacagcuuu

SEQ ID NO: 103174 - RNA, 19 nt, Homo sapiens
  misc_RNA (1)...(19): siRNA sense strand
caugcugauuccuaaagaa

SEQ ID NO: 103175 - RNA, 19 nt, Homo sapiens
  misc_RNA (1)...(19): siRNA sense strand
gauuuacaccagaaggaaa

SEQ ID NO: 103176 - RNA, 19 nt, Homo sapiens
  misc_RNA (1)...(19): siRNA sense strand
aaaagaggcuccauugucu

SEQ ID NO: 103177 - RNA, 19 nt, Homo sapiens
  misc_RNA (1)...(19): siRNA sense strand
agcaagcagugcaagauga

SEQ ID NO: 103178 - RNA, 19 nt, Homo sapiens
  misc_RNA (1)...(19): siRNA sense strand
ugacgccaccugaauuaga

SEQ ID NO: 103179 - RNA, 19 nt, Homo sapiens
  misc_RNA (1)...(19): siRNA sense strand
gaagagucugccauugaug

SEQ ID NO: 103180 - RNA, 19 nt, Homo sapiens
  misc_RNA (1)...(19): siRNA sense strand
ucgaauucaucauguaugg

SEQ ID NO: 103181 - RNA, 19 nt, Homo sapiens
  misc_RNA (1)...(19): siRNA sense strand
agaaacauaggcuuagaug

SEQ ID NO: 103182 - RNA, 19 nt, Homo sapiens
  misc_RNA (1)...(19): siRNA sense strand
ggguggagaugggcaaagu

SEQ ID NO: 103183 - RNA, 19 nt, Homo sapiens
  misc_RNA (1)...(19): siRNA sense strand
gcaguaaucguggccaagu

SEQ ID NO: 103184 - RNA, 19 nt, Homo sapiens
  misc_RNA (1)...(19): siRNA sense strand
caaagcuggucuaacucau

SEQ ID NO: 103185 - RNA, 19 nt, Homo sapiens
  misc_RNA (1)...(19): siRNA sense strand
uugaugauguugacagcuu

SEQ ID NO: 103186 - RNA, 19 nt, Homo sapiens
  misc_RNA (1)...(19): siRNA sense strand
gauuaaaacuguggauauc

SEQ ID NO: 103187 - RNA, 19 nt, Homo sapiens
  misc_RNA (1)...(19): siRNA sense strand
uugaagagucugccauuga

SEQ ID NO: 103188 - RNA, 19 nt, Homo sapiens
  misc_RNA (1)...(19): siRNA sense strand
agagaaacaagaguacaaa

SEQ ID NO: 103189 - RNA, 19 nt, Homo sapiens
  misc_RNA (1)...(19): siRNA sense strand
cacaugaaguccagaagcu

SEQ ID NO: 103190 - RNA, 19 nt, Homo sapiens
  misc_RNA (1)...(19): siRNA sense strand
aaagaggugcauauaagau

SEQ ID NO: 103191 - RNA, 19 nt, Homo sapiens
  misc_RNA (1)...(19): siRNA sense strand
ccaaagguggucugguguu

SEQ ID NO: 103192 - RNA, 19 nt, Homo sapiens
  misc_RNA (1)...(19): siRNA sense strand
caccugaauuagaaaccaa

SEQ ID NO: 103193 - RNA, 19 nt, Homo sapiens
  misc_RNA (1)...(19): siRNA sense strand
cuauggauuuacaccagaa

SEQ ID NO: 103194 - RNA, 19 nt, Homo sapiens
  misc_RNA (1)...(19): siRNA sense strand
aagagucugccauugauga

SEQ ID NO: 103195 - RNA, 19 nt, Homo sapiens
  misc_RNA (1)...(19): siRNA sense strand
uguauggagcuaucaaaga

SEQ ID NO: 103196 - RNA, 19 nt, Homo sapiens
  misc_RNA (1)...(19): siRNA sense strand
ccaagaugaacauaaccaa

SEQ ID NO: 103197 - RNA, 19 nt, Homo sapiens
  misc_RNA (1)...(19): siRNA sense strand
guugacaauuuaagagcau

SEQ ID NO: 103198 - RNA, 19 nt, Homo sapiens
  misc_RNA (1)...(19): siRNA sense strand
caacaggccugguguguac

SEQ ID NO: 103199 - RNA, 19 nt, Homo sapiens
  misc_RNA (1)...(19): siRNA sense strand
guaacugccuguacaacau

SEQ ID NO: 103200 - RNA, 19 nt, Homo sapiens
  misc_RNA (1)...(19): siRNA sense strand
caacucagcagacccauca

SEQ ID NO: 103201 - RNA, 19 nt, Homo sapiens
  misc_RNA (1)...(19): siRNA sense strand
gcaacaggccuggugugua

SEQ ID NO: 103202 - RNA, 19 nt, Homo sapiens
  misc_RNA (1)...(19): siRNA sense strand
ucugcucuaucuuggauua

SEQ ID NO: 103203 - RNA, 19 nt, Homo sapiens
  misc_RNA (1)...(19): siRNA sense strand
ggugugugcuggcuaugug

SEQ ID NO: 103204 - RNA, 19 nt, Homo sapiens
  misc_RNA (1)...(19): siRNA sense strand
guggcucucucgugucuga

SEQ ID NO: 103205 - RNA, 19 nt, Homo sapiens
  misc_RNA (1)...(19): siRNA sense strand
aaagcaaggugacagaacu

SEQ ID NO: 103206 - RNA, 19 nt, Homo sapiens
  misc_RNA (1)...(19): siRNA sense strand
cgacauugcacuccuccaa

SEQ ID NO: 103207 - RNA, 19 nt, Homo sapiens
  misc_RNA (1)...(19): siRNA sense strand
ggaagccuaugaggucaag

SEQ ID NO: 103208 - RNA, 19 nt, Homo sapiens
  misc_RNA (1)...(19): siRNA sense strand
ggccuccacugcacuguca

SEQ ID NO: 103209 - RNA, 19 nt, Homo sapiens
  misc_RNA (1)...(19): siRNA sense strand
gcagacccaucaccuucuc

SEQ ID NO: 103210 - RNA, 19 nt, Homo sapiens
  misc_RNA (1)...(19): siRNA sense strand
ccagcgagcaccacaagga

SEQ ID NO: 103211 - RNA, 19 nt, Homo sapiens
  misc_RNA (1)...(19): siRNA sense strand
cauggugugugcuggcuau

SEQ ID NO: 103212 - RNA, 19 nt, Homo sapiens
  misc_RNA (1)...(19): siRNA sense strand
ccaagccacugcagcaacu

SEQ ID NO: 103213 - RNA, 19 nt, Homo sapiens
  misc_RNA (1)...(19): siRNA sense strand
gccauucugcucuaucuug

SEQ ID NO: 103214 - RNA, 19 nt, Homo sapiens
  misc_RNA (1)...(19): siRNA sense strand
uaugaaggcguccaugugu

SEQ ID NO: 103215 - RNA, 19 nt, Homo sapiens
  misc_RNA (1)...(19): siRNA sense strand
ccucugaucagucgugaga

SEQ ID NO: 103216 - RNA, 19 nt, Homo sapiens
  misc_RNA (1)...(19): siRNA sense strand
gcaccacaaggaagccuau

SEQ ID NO: 103217 - RNA, 19 nt, Homo sapiens
  misc_RNA (1)...(19): siRNA sense strand
ccuccuggauccaaagcaa

SEQ ID NO: 103218 - RNA, 19 nt, Homo sapiens
  misc_RNA (1)...(19): siRNA sense strand
cugaggagccgcacuuugu

SEQ ID NO: 103219 - RNA, 19 nt, Homo sapiens
  misc_RNA (1)...(19): siRNA sense strand
cccaccagcuagacuccua

SEQ ID NO: 103220 - RNA, 19 nt, Homo sapiens
  misc_RNA (1)...(19): siRNA sense strand
ccacaaggaagccuaugag

SEQ ID NO: 103221 - RNA, 19 nt, Homo sapiens
  misc_RNA (1)...(19): siRNA sense strand
ugaaggcguccaugugugu

SEQ ID NO: 103222 - RNA, 19 nt, Homo sapiens
  misc_RNA (1)...(19): siRNA sense strand
uugcugaggcccauccuuu

SEQ ID NO: 103223 - RNA, 19 nt, Homo sapiens
  misc_RNA (1)...(19): siRNA sense strand
ccaaagcaaggugacagaa

SEQ ID NO: 103224 - RNA, 19 nt, Homo sapiens
  misc_RNA (1)...(19): siRNA sense strand
ggucagcaucaccuaugaa

SEQ ID NO: 103225 - RNA, 19 nt, Homo sapiens
  misc_RNA (1)...(19): siRNA sense strand
cagcgagcaccacaaggaa

SEQ ID NO: 103226 - RNA, 19 nt, Homo sapiens
  misc_RNA (1)...(19): siRNA sense strand
gcucuaucuuggauuacuc

SEQ ID NO: 103227 - RNA, 19 nt, Homo sapiens
  misc_RNA (1)...(19): siRNA sense strand
guaccugacgggcauugug

SEQ ID NO: 103228 - RNA, 19 nt, Homo sapiens
  misc_RNA (1)...(19): siRNA sense strand
caaagcaaggugacagaac

SEQ ID NO: 103229 - RNA, 19 nt, Homo sapiens
  misc_RNA (1)...(19): siRNA sense strand
gggcagaggagcagaauaa

SEQ ID NO: 103230 - RNA, 19 nt, Homo sapiens
  misc_RNA (1)...(19): siRNA sense strand
caaacucucugaacucauc

SEQ ID NO: 103231 - RNA, 19 nt, Homo sapiens
  misc_RNA (1)...(19): siRNA sense strand
gacagcagauggugauuuc

SEQ ID NO: 103232 - RNA, 19 nt, Homo sapiens
  misc_RNA (1)...(19): siRNA sense strand
cagaggagcagaauaaguu

SEQ ID NO: 103233 - RNA, 19 nt, Homo sapiens
  misc_RNA (1)...(19): siRNA sense strand
gcagauacacgaacuggau

SEQ ID NO: 103234 - RNA, 19 nt, Homo sapiens
  misc_RNA (1)...(19): siRNA sense strand
gauccacccugacuaugau

SEQ ID NO: 103235 - RNA, 19 nt, Homo sapiens
  misc_RNA (1)...(19): siRNA sense strand
cuaccaagcugcccucuac

SEQ ID NO: 103236 - RNA, 19 nt, Homo sapiens
  misc_RNA (1)...(19): siRNA sense strand
aagcauaaccuucggcaaa

SEQ ID NO: 103237 - RNA, 19 nt, Homo sapiens
  misc_RNA (1)...(19): siRNA sense strand
gccaaacucucugaacuca

SEQ ID NO: 103238 - RNA, 19 nt, Homo sapiens
  misc_RNA (1)...(19): siRNA sense strand
acaccaacgucugcagaua

SEQ ID NO: 103239 - RNA, 19 nt, Homo sapiens
  misc_RNA (1)...(19): siRNA sense strand
uacacgaacuggauccaaa

SEQ ID NO: 103240 - RNA, 19 nt, Homo sapiens
  misc_RNA (1)...(19): siRNA sense strand
gagaaguacgggaaggauu

SEQ ID NO: 103241 - RNA, 19 nt, Homo sapiens
  misc_RNA (1)...(19): siRNA sense strand
caagacagcagauggugau

SEQ ID NO: 103242 - RNA, 19 nt, Homo sapiens
  misc_RNA (1)...(19): siRNA sense strand
cagccaaacucucugaacu

SEQ ID NO: 103243 - RNA, 19 nt, Homo sapiens
  misc_RNA (1)...(19): siRNA sense strand
ggagaagccaggagucuac

SEQ ID NO: 103244 - RNA, 19 nt, Homo sapiens
  misc_RNA (1)...(19): siRNA sense strand
gcagaggagcagaauaagu

SEQ ID NO: 103245 - RNA, 19 nt, Homo sapiens
  misc_RNA (1)...(19): siRNA sense strand
gauggugauuucccugaca

SEQ ID NO: 103246 - RNA, 19 nt, Homo sapiens
  misc_RNA (1)...(19): siRNA sense strand
aaccgaaucuucaggucuu

SEQ ID NO: 103247 - RNA, 19 nt, Homo sapiens
  misc_RNA (1)...(19): siRNA sense strand
ccagaucacccagaacaug

SEQ ID NO: 103248 - RNA, 19 nt, Homo sapiens
  misc_RNA (1)...(19): siRNA sense strand
ggccagaucacccagaaca

SEQ ID NO: 103249 - RNA, 19 nt, Homo sapiens
  misc_RNA (1)...(19): siRNA sense strand
cauccagugugcauacauc

SEQ ID NO: 103250 - RNA, 19 nt, Homo sapiens
  misc_RNA (1)...(19): siRNA sense strand
gaucacccagaacauguug

SEQ ID NO: 103251 - RNA, 19 nt, Homo sapiens
  misc_RNA (1)...(19): siRNA sense strand
ugauccacccugacuauga

SEQ ID NO: 103252 - RNA, 19 nt, Homo sapiens
  misc_RNA (1)...(19): siRNA sense strand
ucacagcugcccacugcaa

SEQ ID NO: 103253 - RNA, 19 nt, Homo sapiens
  misc_RNA (1)...(19): siRNA sense strand
uccgaggccuugugucaug

SEQ ID NO: 103254 - RNA, 19 nt, Homo sapiens
  misc_RNA (1)...(19): siRNA sense strand
agaaguacgggaaggauuc

SEQ ID NO: 103255 - RNA, 19 nt, Homo sapiens
  misc_RNA (1)...(19): siRNA sense strand
cuacaccucgggccacuug

SEQ ID NO: 103256 - RNA, 19 nt, Homo sapiens
  misc_RNA (1)...(19): siRNA sense strand
cagaucacccagaacaugu

SEQ ID NO: 103257 - RNA, 19 nt, Homo sapiens
  misc_RNA (1)...(19): siRNA sense strand
agacagcagauggugauuu

SEQ ID NO: 103258 - RNA, 19 nt, Homo sapiens
  misc_RNA (1)...(19): siRNA sense strand
guccuuauccauccacugu

SEQ ID NO: 103259 - RNA, 19 nt, Homo sapiens
  misc_RNA (1)...(19): siRNA sense strand
gggcaagacagcagauggu

SEQ ID NO: 103260 - RNA, 19 nt, Homo sapiens
  misc_RNA (1)...(19): siRNA sense strand
ggacugaucgugacaaaug

SEQ ID NO: 103261 - RNA, 19 nt, Homo sapiens
  misc_RNA (1)...(19): siRNA sense strand
ccgaagaaauugacccaua

SEQ ID NO: 103262 - RNA, 19 nt, Homo sapiens
  misc_RNA (1)...(19): siRNA sense strand
gcaggaagaucccaacagu

SEQ ID NO: 103263 - RNA, 19 nt, Homo sapiens
  misc_RNA (1)...(19): siRNA sense strand
gaagaacggugccacuuac

SEQ ID NO: 103264 - RNA, 19 nt, Homo sapiens
  misc_RNA (1)...(19): siRNA sense strand
gaaaagccaucaccaagaa

SEQ ID NO: 103265 - RNA, 19 nt, Homo sapiens
  misc_RNA (1)...(19): siRNA sense strand
ucaaggauguggaugagaa

SEQ ID NO: 103266 - RNA, 19 nt, Homo sapiens
  misc_RNA (1)...(19): siRNA sense strand
gcuagugggucuggguuua

SEQ ID NO: 103267 - RNA, 19 nt, Homo sapiens
  misc_RNA (1)...(19): siRNA sense strand
gcuggaaucuccuuugcaa

SEQ ID NO: 103268 - RNA, 19 nt, Homo sapiens
  misc_RNA (1)...(19): siRNA sense strand
gagcguauauaauugaagu

SEQ ID NO: 103269 - RNA, 19 nt, Homo sapiens
  misc_RNA (1)...(19): siRNA sense strand
gcaaucccaucugauaaga

SEQ ID NO: 103270 - RNA, 19 nt, Homo sapiens
  misc_RNA (1)...(19): siRNA sense strand
cgaagaaauugacccauag

SEQ ID NO: 103271 - RNA, 19 nt, Homo sapiens
  misc_RNA (1)...(19): siRNA sense strand
ugaagaacggugccacuua

SEQ ID NO: 103272 - RNA, 19 nt, Homo sapiens
  misc_RNA (1)...(19): siRNA sense strand
gaacggugccacuuacgaa

SEQ ID NO: 103273 - RNA, 19 nt, Homo sapiens
  misc_RNA (1)...(19): siRNA sense strand
gugaagugauuggaauuaa

SEQ ID NO: 103274 - RNA, 19 nt, Homo sapiens
  misc_RNA (1)...(19): siRNA sense strand
gaaagugacagcuggaauc

SEQ ID NO: 103275 - RNA, 19 nt, Homo sapiens
  misc_RNA (1)...(19): siRNA sense strand
ggaaagcacccugaacaug

SEQ ID NO: 103276 - RNA, 19 nt, Homo sapiens
  misc_RNA (1)...(19): siRNA sense strand
agacaucgcacucaucaaa

SEQ ID NO: 103277 - RNA, 19 nt, Homo sapiens
  misc_RNA (1)...(19): siRNA sense strand
gaagugauuggaauuaaca

SEQ ID NO: 103278 - RNA, 19 nt, Homo sapiens
  misc_RNA (1)...(19): siRNA sense strand
gcagacaucgcacucauca

SEQ ID NO: 103279 - RNA, 19 nt, Homo sapiens
  misc_RNA (1)...(19): siRNA sense strand
aggaagaucccaacaguuu

SEQ ID NO: 103280 - RNA, 19 nt, Homo sapiens
  misc_RNA (1)...(19): siRNA sense strand
ucaggagcguauauaauug

SEQ ID NO: 103281 - RNA, 19 nt, Homo sapiens
  misc_RNA (1)...(19): siRNA sense strand
ucaccaagaagaaguauau

SEQ ID NO: 103282 - RNA, 19 nt, Homo sapiens
  misc_RNA (1)...(19): siRNA sense strand
ggugaagugauuggaauua

SEQ ID NO: 103283 - RNA, 19 nt, Homo sapiens
  misc_RNA (1)...(19): siRNA sense strand
gaucucaggagcguauaua

SEQ ID NO: 103284 - RNA, 19 nt, Homo sapiens
  misc_RNA (1)...(19): siRNA sense strand
gaugucagcgacgucauua

SEQ ID NO: 103285 - RNA, 19 nt, Homo sapiens
  misc_RNA (1)...(19): siRNA sense strand
acaguuugcgccauaaaua

SEQ ID NO: 103286 - RNA, 19 nt, Homo sapiens
  misc_RNA (1)...(19): siRNA sense strand
cccaacaguuugcgccaua

SEQ ID NO: 103287 - RNA, 19 nt, Homo sapiens
  misc_RNA (1)...(19): siRNA sense strand
caacaagcaccgggucaaa

SEQ ID NO: 103288 - RNA, 19 nt, Homo sapiens
  misc_RNA (1)...(19): siRNA sense strand
gauuggaauuaacacuuug

SEQ ID NO: 103289 - RNA, 19 nt, Homo sapiens
  misc_RNA (1)...(19): siRNA sense strand
ccuggacggugaagugauu

SEQ ID NO: 103290 - RNA, 19 nt, Homo sapiens
  misc_RNA (1)...(19): siRNA sense strand
gaaaacgacgucauaauca

SEQ ID NO: 103291 - RNA, 19 nt, Homo sapiens
  misc_RNA (1)...(19): siRNA sense strand
ggacuucccagacgugauc

SEQ ID NO: 103292 - RNA, 19 nt, Homo sapiens
  misc_RNA (1)...(19): siRNA sense strand
ggaagaucccaacaguuug

SEQ ID NO: 103293 - RNA, 19 nt, Homo sapiens
  misc_RNA (1)...(19): siRNA sense strand
ggaaaacgacgucauaauc

SEQ ID NO: 103294 - RNA, 19 nt, Homo sapiens
  misc_RNA (1)...(19): siRNA sense strand
ggauguggaugagaaagca

SEQ ID NO: 103295 - RNA, 19 nt, Homo sapiens
  misc_RNA (1)...(19): siRNA sense strand
gcagcgacgccaacaccua

SEQ ID NO: 103296 - RNA, 19 nt, Homo sapiens
  misc_RNA (1)...(19): siRNA sense strand
cucaggagcguauauaauu

SEQ ID NO: 103297 - RNA, 19 nt, Homo sapiens
  misc_RNA (1)...(19): siRNA sense strand
ugucagcgacgucauuaaa

SEQ ID NO: 103298 - RNA, 19 nt, Homo sapiens
  misc_RNA (1)...(19): siRNA sense strand
ccaacaguuugcgccauaa

SEQ ID NO: 103299 - RNA, 19 nt, Homo sapiens
  misc_RNA (1)...(19): siRNA sense strand
caaggaaaacgacgucaua

SEQ ID NO: 103300 - RNA, 19 nt, Homo sapiens
  misc_RNA (1)...(19): siRNA sense strand
gcaacucagacauggacua

SEQ ID NO: 103301 - RNA, 19 nt, Homo sapiens
  misc_RNA (1)...(19): siRNA sense strand
guucauaucgaauuguuuc

SEQ ID NO: 103302 - RNA, 19 nt, Homo sapiens
  misc_RNA (1)...(19): siRNA sense strand
ucacucacguccagcaaag

SEQ ID NO: 103303 - RNA, 19 nt, Homo sapiens
  misc_RNA (1)...(19): siRNA sense strand
acucagacauggacuacau

SEQ ID NO: 103304 - RNA, 19 nt, Homo sapiens
  misc_RNA (1)...(19): siRNA sense strand
gcaaagccaaagagcugaa

SEQ ID NO: 103305 - RNA, 19 nt, Homo sapiens
  misc_RNA (1)...(19): siRNA sense strand
gaagaucccaacaguuugc

SEQ ID NO: 103306 - RNA, 19 nt, Homo sapiens
  misc_RNA (1)...(19): siRNA sense strand
ccgacgccaucaucaacua

SEQ ID NO: 103307 - RNA, 19 nt, Homo sapiens
  misc_RNA (1)...(19): siRNA sense strand
cacagugauucccgaagaa

SEQ ID NO: 103308 - RNA, 19 nt, Homo sapiens
  misc_RNA (1)...(19): siRNA sense strand
gucggaagauggacugauc

SEQ ID NO: 103309 - RNA, 19 nt, Homo sapiens
  misc_RNA (1)...(19): siRNA sense strand
ggaaaagccaucaccaaga

SEQ ID NO: 103310 - RNA, 19 nt, Homo sapiens
  misc_RNA (1)...(19): siRNA sense strand
caacaguuugcgccauaaa

SEQ ID NO: 103311 - RNA, 19 nt, Homo sapiens
  misc_RNA (1)...(19): siRNA sense strand
ucgcggacgugguggagaa

SEQ ID NO: 103312 - RNA, 19 nt, Homo sapiens
  misc_RNA (1)...(19): siRNA sense strand
gggucuggguuuauugugu

SEQ ID NO: 103313 - RNA, 19 nt, Homo sapiens
  misc_RNA (1)...(19): siRNA sense strand
gucauaaucagcaucaaug

SEQ ID NO: 103314 - RNA, 19 nt, Homo sapiens
  misc_RNA (1)...(19): siRNA sense strand
caggagcguauauaauuga

SEQ ID NO: 103315 - RNA, 19 nt, Homo sapiens
  misc_RNA (1)...(19): siRNA sense strand
ugaagugauuggaauuaac

SEQ ID NO: 103316 - RNA, 19 nt, Homo sapiens
  misc_RNA (1)...(19): siRNA sense strand
aaaucaaggauguggauga

SEQ ID NO: 103317 - RNA, 19 nt, Homo sapiens
  misc_RNA (1)...(19): siRNA sense strand
gggaaagcacccugaacau

SEQ ID NO: 103318 - RNA, 19 nt, Homo sapiens
  misc_RNA (1)...(19): siRNA sense strand
ccuuugcaaucccaucuga

SEQ ID NO: 103319 - RNA, 19 nt, Homo sapiens
  misc_RNA (1)...(19): siRNA sense strand
aaaccuggacggugaagug

SEQ ID NO: 103320 - RNA, 19 nt, Homo sapiens
  misc_RNA (1)...(19): siRNA sense strand
gcaagcuuccguuuucuaa

SEQ ID NO: 103321 - RNA, 19 nt, Homo sapiens
  misc_RNA (1)...(19): siRNA sense strand
caaggauguggaugagaaa

SEQ ID NO: 103322 - RNA, 19 nt, Homo sapiens
  misc_RNA (1)...(19): siRNA sense strand
aaagcacccugaacauggu

SEQ ID NO: 103323 - RNA, 19 nt, Homo sapiens
  misc_RNA (1)...(19): siRNA sense strand
gguuuauugugucggaaga

SEQ ID NO: 103324 - RNA, 19 nt, Homo sapiens
  misc_RNA (1)...(19): siRNA sense strand
uuugcaaucccaucugaua

SEQ ID NO: 103325 - RNA, 19 nt, Homo sapiens
  misc_RNA (1)...(19): siRNA sense strand
ggaaucuccuuugcaaucc

SEQ ID NO: 103326 - RNA, 19 nt, Homo sapiens
  misc_RNA (1)...(19): siRNA sense strand
uggaaucuccuuugcaauc

SEQ ID NO: 103327 - RNA, 19 nt, Homo sapiens
  misc_RNA (1)...(19): siRNA sense strand
aagcagacaucgcacucau

SEQ ID NO: 103328 - RNA, 19 nt, Homo sapiens
  misc_RNA (1)...(19): siRNA sense strand
cagcuggaaucuccuuugc

SEQ ID NO: 103329 - RNA, 19 nt, Homo sapiens
  misc_RNA (1)...(19): siRNA sense strand
uagugggucuggguuuauu

SEQ ID NO: 103330 - RNA, 19 nt, Homo sapiens
  misc_RNA (1)...(19): siRNA sense strand
guuugcgccauaaauauaa

SEQ ID NO: 103331 - RNA, 19 nt, Homo sapiens
  misc_RNA (1)...(19): siRNA sense strand
gugauuggaauuaacacuu

SEQ ID NO: 103332 - RNA, 19 nt, Homo sapiens
  misc_RNA (1)...(19): siRNA sense strand
cauaaucagcaucaaugga

SEQ ID NO: 103333 - RNA, 19 nt, Homo sapiens
  misc_RNA (1)...(19): siRNA sense strand
gcgccauaaauauaacuuu

SEQ ID NO: 103334 - RNA, 19 nt, Homo sapiens
  misc_RNA (1)...(19): siRNA sense strand
caguuugcgccauaaauau

SEQ ID NO: 103335 - RNA, 19 nt, Homo sapiens
  misc_RNA (1)...(19): siRNA sense strand
cgugguucauaucgaauug

SEQ ID NO: 103336 - RNA, 19 nt, Homo sapiens
  misc_RNA (1)...(19): siRNA sense strand
gcugguggucucaaggaaa

SEQ ID NO: 103337 - RNA, 19 nt, Homo sapiens
  misc_RNA (1)...(19): siRNA sense strand
caucaucaacuauggaaac

SEQ ID NO: 103338 - RNA, 19 nt, Homo sapiens
  misc_RNA (1)...(19): siRNA sense strand
aguuugcgccauaaauaua

SEQ ID NO: 103339 - RNA, 19 nt, Homo sapiens
  misc_RNA (1)...(19): siRNA sense strand
agugauucccgaagaaauu

SEQ ID NO: 103340 - RNA, 19 nt, Homo sapiens
  misc_RNA (1)...(19): siRNA sense strand
ugaaguaauuccugauacc

SEQ ID NO: 103341 - RNA, 19 nt, Homo sapiens
  misc_RNA (1)...(19): siRNA sense strand
aaucaaggauguggaugag

SEQ ID NO: 103342 - RNA, 19 nt, Homo sapiens
  misc_RNA (1)...(19): siRNA sense strand
caagcaccgggucaaaguu

SEQ ID NO: 103343 - RNA, 19 nt, Homo sapiens
  misc_RNA (1)...(19): siRNA sense strand
ugccgugguucauaucgaa

SEQ ID NO: 103344 - RNA, 19 nt, Homo sapiens
  misc_RNA (1)...(19): siRNA sense strand
ucucaggagcguauauaau

SEQ ID NO: 103345 - RNA, 19 nt, Homo sapiens
  misc_RNA (1)...(19): siRNA sense strand
ugguucauaucgaauuguu

SEQ ID NO: 103346 - RNA, 19 nt, Homo sapiens
  misc_RNA (1)...(19): siRNA sense strand
caacucagacauggacuac

SEQ ID NO: 103347 - RNA, 19 nt, Homo sapiens
  misc_RNA (1)...(19): siRNA sense strand
aagauaucaugaucacagu

SEQ ID NO: 103348 - RNA, 19 nt, Homo sapiens
  misc_RNA (1)...(19): siRNA sense strand
cgucauaaucagcaucaau

SEQ ID NO: 103349 - RNA, 19 nt, Homo sapiens
  misc_RNA (1)...(19): siRNA sense strand
ccaucaccaagaagaagua

SEQ ID NO: 103350 - RNA, 19 nt, Homo sapiens
  misc_RNA (1)...(19): siRNA sense strand
aaagccaucaccaagaaga

SEQ ID NO: 103351 - RNA, 19 nt, Homo sapiens
  misc_RNA (1)...(19): siRNA sense strand
acaagcaccgggucaaagu

SEQ ID NO: 103352 - RNA, 19 nt, Homo sapiens
  misc_RNA (1)...(19): siRNA sense strand
acggugaagugauuggaau

SEQ ID NO: 103353 - RNA, 19 nt, Homo sapiens
  misc_RNA (1)...(19): siRNA sense strand
gggaggcccguuaguaaac

SEQ ID NO: 103354 - RNA, 19 nt, Homo sapiens
  misc_RNA (1)...(19): siRNA sense strand
ccagaccgacgccaucauc

SEQ ID NO: 103355 - RNA, 19 nt, Homo sapiens
  misc_RNA (1)...(19): siRNA sense strand
gaagaaagaccacagagaa

SEQ ID NO: 103356 - RNA, 19 nt, Homo sapiens
  misc_RNA (1)...(19): siRNA sense strand
gauaugggcccucacauuu

SEQ ID NO: 103357 - RNA, 19 nt, Homo sapiens
  misc_RNA (1)...(19): siRNA sense strand
gaaaucaguaugacaauga

SEQ ID NO: 103358 - RNA, 19 nt, Homo sapiens
  misc_RNA (1)...(19): siRNA sense strand
gcuagacuguuauguaauu

SEQ ID NO: 103359 - RNA, 19 nt, Homo sapiens
  misc_RNA (1)...(19): siRNA sense strand
gggcaggauucaucaaauu

SEQ ID NO: 103360 - RNA, 19 nt, Homo sapiens
  misc_RNA (1)...(19): siRNA sense strand
gcuugcagcucaucagaaa

SEQ ID NO: 103361 - RNA, 19 nt, Homo sapiens
  misc_RNA (1)...(19): siRNA sense strand
ggaccugacuacaaagaau

SEQ ID NO: 103362 - RNA, 19 nt, Homo sapiens
  misc_RNA (1)...(19): siRNA sense strand
gaugcuagacuguuaugua

SEQ ID NO: 103363 - RNA, 19 nt, Homo sapiens
  misc_RNA (1)...(19): siRNA sense strand
acaaugaugucacuguuug

SEQ ID NO: 103364 - RNA, 19 nt, Homo sapiens
  misc_RNA (1)...(19): siRNA sense strand
ccaaucagcucguacuuac

SEQ ID NO: 103365 - RNA, 19 nt, Homo sapiens
  misc_RNA (1)...(19): siRNA sense strand
cgucuuguaucucuaauug

SEQ ID NO: 103366 - RNA, 19 nt, Homo sapiens
  misc_RNA (1)...(19): siRNA sense strand
guacuuacuuggagagaca

SEQ ID NO: 103367 - RNA, 19 nt, Homo sapiens
  misc_RNA (1)...(19): siRNA sense strand
gcagagccauguccauugg

SEQ ID NO: 103368 - RNA, 19 nt, Homo sapiens
  misc_RNA (1)...(19): siRNA sense strand
caguuggucugaaaucaaa

SEQ ID NO: 103369 - RNA, 19 nt, Homo sapiens
  misc_RNA (1)...(19): siRNA sense strand
ccauuggaauuguugguaa

SEQ ID NO: 103370 - RNA, 19 nt, Homo sapiens
  misc_RNA (1)...(19): siRNA sense strand
augcuagacuguuauguaa

SEQ ID NO: 103371 - RNA, 19 nt, Homo sapiens
  misc_RNA (1)...(19): siRNA sense strand
cgaaaucaguaugacaaug

SEQ ID NO: 103372 - RNA, 19 nt, Homo sapiens
  misc_RNA (1)...(19): siRNA sense strand
cugaauuuauggaguguaa

SEQ ID NO: 103373 - RNA, 19 nt, Homo sapiens
  misc_RNA (1)...(19): siRNA sense strand
guccaucugcuaacuauuu

SEQ ID NO: 103374 - RNA, 19 nt, Homo sapiens
  misc_RNA (1)...(19): siRNA sense strand
cgucaggaguguuuggauu

SEQ ID NO: 103375 - RNA, 19 nt, Homo sapiens
  misc_RNA (1)...(19): siRNA sense strand
gccugugucucgucuugua

SEQ ID NO: 103376 - RNA, 19 nt, Homo sapiens
  misc_RNA (1)...(19): siRNA sense strand
gauaccaacacaacgauau

SEQ ID NO: 103377 - RNA, 19 nt, Homo sapiens
  misc_RNA (1)...(19): siRNA sense strand
gaaagaccacagagaaagg

SEQ ID NO: 103378 - RNA, 19 nt, Homo sapiens
  misc_RNA (1)...(19): siRNA sense strand
gguguuggucuccuuauug

SEQ ID NO: 103379 - RNA, 19 nt, Homo sapiens
  misc_RNA (1)...(19): siRNA sense strand
cauuggaauuguugguaaa

SEQ ID NO: 103380 - RNA, 19 nt, Homo sapiens
  misc_RNA (1)...(19): siRNA sense strand
ccagauuuguauucgauag

SEQ ID NO: 103381 - RNA, 19 nt, Homo sapiens
  misc_RNA (1)...(19): siRNA sense strand
ucuuguaucucuaauugga

SEQ ID NO: 103382 - RNA, 19 nt, Homo sapiens
  misc_RNA (1)...(19): siRNA sense strand
gauagaccacugccugugu

SEQ ID NO: 103383 - RNA, 19 nt, Homo sapiens
  misc_RNA (1)...(19): siRNA sense strand
aagaaagaccacagagaaa

SEQ ID NO: 103384 - RNA, 19 nt, Homo sapiens
  misc_RNA (1)...(19): siRNA sense strand
cuacaaagaauguuuccau

SEQ ID NO: 103385 - RNA, 19 nt, Homo sapiens
  misc_RNA (1)...(19): siRNA sense strand
cugcgugccuuaagagaga

SEQ ID NO: 103386 - RNA, 19 nt, Homo sapiens
  misc_RNA (1)...(19): siRNA sense strand
gcuuacugcugaugcuaga

SEQ ID NO: 103387 - RNA, 19 nt, Homo sapiens
  misc_RNA (1)...(19): siRNA sense strand
ugaagaaagaccacagaga

SEQ ID NO: 103388 - RNA, 19 nt, Homo sapiens
  misc_RNA (1)...(19): siRNA sense strand
gaugaugugucuccauucc

SEQ ID NO: 103389 - RNA, 19 nt, Homo sapiens
  misc_RNA (1)...(19): siRNA sense strand
caaucuaugaugaugauga

SEQ ID NO: 103390 - RNA, 19 nt, Homo sapiens
  misc_RNA (1)...(19): siRNA sense strand
ugauaugggcccucacauu

SEQ ID NO: 103391 - RNA, 19 nt, Homo sapiens
  misc_RNA (1)...(19): siRNA sense strand
aaaccuguccaucugcuaa

SEQ ID NO: 103392 - RNA, 19 nt, Homo sapiens
  misc_RNA (1)...(19): siRNA sense strand
gaguuuacaaucuaugaug

SEQ ID NO: 103393 - RNA, 19 nt, Homo sapiens
  misc_RNA (1)...(19): siRNA sense strand
ccagauaccaacacaacga

SEQ ID NO: 103394 - RNA, 19 nt, Homo sapiens
  misc_RNA (1)...(19): siRNA sense strand
aaaggcugaugaaccaaug

SEQ ID NO: 103395 - RNA, 19 nt, Homo sapiens
  misc_RNA (1)...(19): siRNA sense strand
gacuuggaguuuacaaucu

SEQ ID NO: 103396 - RNA, 19 nt, Homo sapiens
  misc_RNA (1)...(19): siRNA sense strand
gaugauaugggcccucaca

SEQ ID NO: 103397 - RNA, 19 nt, Homo sapiens
  misc_RNA (1)...(19): siRNA sense strand
ggcaggauucaucaaauug

SEQ ID NO: 103398 - RNA, 19 nt, Homo sapiens
  misc_RNA (1)...(19): siRNA sense strand
ugaacuaguuaaacauggu

SEQ ID NO: 103399 - RNA, 19 nt, Homo sapiens
  misc_RNA (1)...(19): siRNA sense strand
ccuuauugcugguuaugau

SEQ ID NO: 103400 - RNA, 19 nt, Homo sapiens
  misc_RNA (1)...(19): siRNA sense strand
ggaagcaagacccagauac

SEQ ID NO: 103401 - RNA, 19 nt, Homo sapiens
  misc_RNA (1)...(19): siRNA sense strand
agccacaguuggucugaaa

SEQ ID NO: 103402 - RNA, 19 nt, Homo sapiens
  misc_RNA (1)...(19): siRNA sense strand
augaugaugugucuccauu

SEQ ID NO: 103403 - RNA, 19 nt, Homo sapiens
  misc_RNA (1)...(19): siRNA sense strand
aaucagcucguacuuacuu

SEQ ID NO: 103404 - RNA, 19 nt, Homo sapiens
  misc_RNA (1)...(19): siRNA sense strand
acuuggaguuuacaaucua

SEQ ID NO: 103405 - RNA, 19 nt, Homo sapiens
  misc_RNA (1)...(19): siRNA sense strand
agaaaaggcugaugaacca

SEQ ID NO: 103406 - RNA, 19 nt, Homo sapiens
  misc_RNA (1)...(19): siRNA sense strand
ugcugaugcuagacuguua

SEQ ID NO: 103407 - RNA, 19 nt, Homo sapiens
  misc_RNA (1)...(19): siRNA sense strand
ggauuccagauuuguauuc

SEQ ID NO: 103408 - RNA, 19 nt, Homo sapiens
  misc_RNA (1)...(19): siRNA sense strand
gcugaugaaccugcagaaa

SEQ ID NO: 103409 - RNA, 19 nt, Homo sapiens
  misc_RNA (1)...(19): siRNA sense strand
gaccugacuacaaagaaug

SEQ ID NO: 103410 - RNA, 19 nt, Homo sapiens
  misc_RNA (1)...(19): siRNA sense strand
cccaaucagcucguacuua

SEQ ID NO: 103411 - RNA, 19 nt, Homo sapiens
  misc_RNA (1)...(19): siRNA sense strand
cacaguuggucugaaauca

SEQ ID NO: 103412 - RNA, 19 nt, Homo sapiens
  misc_RNA (1)...(19): siRNA sense strand
cagggcaggauucaucaaa

SEQ ID NO: 103413 - RNA, 19 nt, Homo sapiens
  misc_RNA (1)...(19): siRNA sense strand
ugguaaagacuuggaguuu

SEQ ID NO: 103414 - RNA, 19 nt, Homo sapiens
  misc_RNA (1)...(19): siRNA sense strand
gaagcaagacccagauacc

SEQ ID NO: 103415 - RNA, 19 nt, Homo sapiens
  misc_RNA (1)...(19): siRNA sense strand
uuccaaaccuguccaucug

SEQ ID NO: 103416 - RNA, 19 nt, Homo sapiens
  misc_RNA (1)...(19): siRNA sense strand
agacccagauaccaacaca

SEQ ID NO: 103417 - RNA, 19 nt, Homo sapiens
  misc_RNA (1)...(19): siRNA sense strand
cugcucaaccugcugauga

SEQ ID NO: 103418 - RNA, 19 nt, Homo sapiens
  misc_RNA (1)...(19): siRNA sense strand
agacuuggaguuuacaauc

SEQ ID NO: 103419 - RNA, 19 nt, Homo sapiens
  misc_RNA (1)...(19): siRNA sense strand
gaauuguugguaaagacuu

SEQ ID NO: 103420 - RNA, 19 nt, Homo sapiens
  misc_RNA (1)...(19): siRNA sense strand
ccacaguuggucugaaauc

SEQ ID NO: 103421 - RNA, 19 nt, Homo sapiens
  misc_RNA (1)...(19): siRNA sense strand
ugucucgucuuguaucucu

SEQ ID NO: 103422 - RNA, 19 nt, Homo sapiens
  misc_RNA (1)...(19): siRNA sense strand
agaaagaccacagagaaag

SEQ ID NO: 103423 - RNA, 19 nt, Homo sapiens
  misc_RNA (1)...(19): siRNA sense strand
cuaugaugaugaugaugug

SEQ ID NO: 103424 - RNA, 19 nt, Homo sapiens
  misc_RNA (1)...(19): siRNA sense strand
ugacuacaaagaauguuuc

SEQ ID NO: 103425 - RNA, 19 nt, Homo sapiens
  misc_RNA (1)...(19): siRNA sense strand
gcaauggaagcuguuaaac

SEQ ID NO: 103426 - RNA, 19 nt, Homo sapiens
  misc_RNA (1)...(19): siRNA sense strand
ugaugaugaugaugugucu

SEQ ID NO: 103427 - RNA, 19 nt, Homo sapiens
  misc_RNA (1)...(19): siRNA sense strand
ggaguuuacaaucuaugau

SEQ ID NO: 103428 - RNA, 19 nt, Homo sapiens
  misc_RNA (1)...(19): siRNA sense strand
ggaauuguugguaaagacu

SEQ ID NO: 103429 - RNA, 19 nt, Homo sapiens
  misc_RNA (1)...(19): siRNA sense strand
agagacgcuuccugcagaa

SEQ ID NO: 103430 - RNA, 19 nt, Homo sapiens
  misc_RNA (1)...(19): siRNA sense strand
ugcaauggaagcuguuaaa

SEQ ID NO: 103431 - RNA, 19 nt, Homo sapiens
  misc_RNA (1)...(19): siRNA sense strand
caagguucagccacaguug

SEQ ID NO: 103432 - RNA, 19 nt, Homo sapiens
  misc_RNA (1)...(19): siRNA sense strand
ugaugaaccugcagaaaag

SEQ ID NO: 103433 - RNA, 19 nt, Homo sapiens
  misc_RNA (1)...(19): siRNA sense strand
uggagcccguucccaauca

SEQ ID NO: 103434 - RNA, 19 nt, Homo sapiens
  misc_RNA (1)...(19): siRNA sense strand
gaagaaagaccacagagaa

SEQ ID NO: 103435 - RNA, 19 nt, Homo sapiens
  misc_RNA (1)...(19): siRNA sense strand
gauaugggcccucacauuu

SEQ ID NO: 103436 - RNA, 19 nt, Homo sapiens
  misc_RNA (1)...(19): siRNA sense strand
gaaaucaguaugacaauga

SEQ ID NO: 103437 - RNA, 19 nt, Homo sapiens
  misc_RNA (1)...(19): siRNA sense strand
gcuagacuguuauguaauu

SEQ ID NO: 103438 - RNA, 19 nt, Homo sapiens
  misc_RNA (1)...(19): siRNA sense strand
gggcaggauucaucaaauu

SEQ ID NO: 103439 - RNA, 19 nt, Homo sapiens
  misc_RNA (1)...(19): siRNA sense strand
gcuugcagcucaucagaaa

SEQ ID NO: 103440 - RNA, 19 nt, Homo sapiens
  misc_RNA (1)...(19): siRNA sense strand
ggaccugacuacaaagaau

SEQ ID NO: 103441 - RNA, 19 nt, Homo sapiens
  misc_RNA (1)...(19): siRNA sense strand
gaugcuagacuguuaugua

SEQ ID NO: 103442 - RNA, 19 nt, Homo sapiens
  misc_RNA (1)...(19): siRNA sense strand
acaaugaugucacuguuug

SEQ ID NO: 103443 - RNA, 19 nt, Homo sapiens
  misc_RNA (1)...(19): siRNA sense strand
ccaaucagcucguacuuac

SEQ ID NO: 103444 - RNA, 19 nt, Homo sapiens
  misc_RNA (1)...(19): siRNA sense strand
cgucuuguaucucuaauug

SEQ ID NO: 103445 - RNA, 19 nt, Homo sapiens
  misc_RNA (1)...(19): siRNA sense strand
guacuuacuuggagagaca

SEQ ID NO: 103446 - RNA, 19 nt, Homo sapiens
  misc_RNA (1)...(19): siRNA sense strand
gcagagccauguccauugg

SEQ ID NO: 103447 - RNA, 19 nt, Homo sapiens
  misc_RNA (1)...(19): siRNA sense strand
caguuggucugaaaucaaa

SEQ ID NO: 103448 - RNA, 19 nt, Homo sapiens
  misc_RNA (1)...(19): siRNA sense strand
ccauuggaauuguugguaa

SEQ ID NO: 103449 - RNA, 19 nt, Homo sapiens
  misc_RNA (1)...(19): siRNA sense strand
augcuagacuguuauguaa

SEQ ID NO: 103450 - RNA, 19 nt, Homo sapiens
  misc_RNA (1)...(19): siRNA sense strand
cgaaaucaguaugacaaug

SEQ ID NO: 103451 - RNA, 19 nt, Homo sapiens
  misc_RNA (1)...(19): siRNA sense strand
cugaauuuauggaguguaa

SEQ ID NO: 103452 - RNA, 19 nt, Homo sapiens
  misc_RNA (1)...(19): siRNA sense strand
guccaucugcuaacuauuu

SEQ ID NO: 103453 - RNA, 19 nt, Homo sapiens
  misc_RNA (1)...(19): siRNA sense strand
cgucaggaguguuuggauu

SEQ ID NO: 103454 - RNA, 19 nt, Homo sapiens
  misc_RNA (1)...(19): siRNA sense strand
gccugugucucgucuugua

SEQ ID NO: 103455 - RNA, 19 nt, Homo sapiens
  misc_RNA (1)...(19): siRNA sense strand
gauaccaacacaacgauau

SEQ ID NO: 103456 - RNA, 19 nt, Homo sapiens
  misc_RNA (1)...(19): siRNA sense strand
gaaagaccacagagaaagg

SEQ ID NO: 103457 - RNA, 19 nt, Homo sapiens
  misc_RNA (1)...(19): siRNA sense strand
gguguuggucuccuuauug

SEQ ID NO: 103458 - RNA, 19 nt, Homo sapiens
  misc_RNA (1)...(19): siRNA sense strand
cauuggaauuguugguaaa

SEQ ID NO: 103459 - RNA, 19 nt, Homo sapiens
  misc_RNA (1)...(19): siRNA sense strand
ccagauuuguauucgauag

SEQ ID NO: 103460 - RNA, 19 nt, Homo sapiens
  misc_RNA (1)...(19): siRNA sense strand
ucuuguaucucuaauugga

SEQ ID NO: 103461 - RNA, 19 nt, Homo sapiens
  misc_RNA (1)...(19): siRNA sense strand
gauagaccacugccugugu

SEQ ID NO: 103462 - RNA, 19 nt, Homo sapiens
  misc_RNA (1)...(19): siRNA sense strand
aagaaagaccacagagaaa

SEQ ID NO: 103463 - RNA, 19 nt, Homo sapiens
  misc_RNA (1)...(19): siRNA sense strand
cuacaaagaauguuuccau

SEQ ID NO: 103464 - RNA, 19 nt, Homo sapiens
  misc_RNA (1)...(19): siRNA sense strand
cugcgugccuuaagagaga

SEQ ID NO: 103465 - RNA, 19 nt, Homo sapiens
  misc_RNA (1)...(19): siRNA sense strand
gcuuacugcugaugcuaga

SEQ ID NO: 103466 - RNA, 19 nt, Homo sapiens
  misc_RNA (1)...(19): siRNA sense strand
ugaagaaagaccacagaga

SEQ ID NO: 103467 - RNA, 19 nt, Homo sapiens
  misc_RNA (1)...(19): siRNA sense strand
gaugaugugucuccauucc

SEQ ID NO: 103468 - RNA, 19 nt, Homo sapiens
  misc_RNA (1)...(19): siRNA sense strand
caaucuaugaugaugauga

SEQ ID NO: 103469 - RNA, 19 nt, Homo sapiens
  misc_RNA (1)...(19): siRNA sense strand
ugauaugggcccucacauu

SEQ ID NO: 103470 - RNA, 19 nt, Homo sapiens
  misc_RNA (1)...(19): siRNA sense strand
aaaccuguccaucugcuaa

SEQ ID NO: 103471 - RNA, 19 nt, Homo sapiens
  misc_RNA (1)...(19): siRNA sense strand
gaguuuacaaucuaugaug

SEQ ID NO: 103472 - RNA, 19 nt, Homo sapiens
  misc_RNA (1)...(19): siRNA sense strand
ccagauaccaacacaacga

SEQ ID NO: 103473 - RNA, 19 nt, Homo sapiens
  misc_RNA (1)...(19): siRNA sense strand
aaaggcugaugaaccaaug

SEQ ID NO: 103474 - RNA, 19 nt, Homo sapiens
  misc_RNA (1)...(19): siRNA sense strand
gacuuggaguuuacaaucu

SEQ ID NO: 103475 - RNA, 19 nt, Homo sapiens
  misc_RNA (1)...(19): siRNA sense strand
gaugauaugggcccucaca

SEQ ID NO: 103476 - RNA, 19 nt, Homo sapiens
  misc_RNA (1)...(19): siRNA sense strand
ggcaggauucaucaaauug

SEQ ID NO: 103477 - RNA, 19 nt, Homo sapiens
  misc_RNA (1)...(19): siRNA sense strand
ugaacuaguuaaacauggu

SEQ ID NO: 103478 - RNA, 19 nt, Homo sapiens
  misc_RNA (1)...(19): siRNA sense strand
ccuuauugcugguuaugau

SEQ ID NO: 103479 - RNA, 19 nt, Homo sapiens
  misc_RNA (1)...(19): siRNA sense strand
ggaagcaagacccagauac

SEQ ID NO: 103480 - RNA, 19 nt, Homo sapiens
  misc_RNA (1)...(19): siRNA sense strand
agccacaguuggucugaaa

SEQ ID NO: 103481 - RNA, 19 nt, Homo sapiens
  misc_RNA (1)...(19): siRNA sense strand
augaugaugugucuccauu

SEQ ID NO: 103482 - RNA, 19 nt, Homo sapiens
  misc_RNA (1)...(19): siRNA sense strand
aaucagcucguacuuacuu

SEQ ID NO: 103483 - RNA, 19 nt, Homo sapiens
  misc_RNA (1)...(19): siRNA sense strand
acuuggaguuuacaaucua

SEQ ID NO: 103484 - RNA, 19 nt, Homo sapiens
  misc_RNA (1)...(19): siRNA sense strand
agaaaaggcugaugaacca

SEQ ID NO: 103485 - RNA, 19 nt, Homo sapiens
  misc_RNA (1)...(19): siRNA sense strand
ugcugaugcuagacuguua

SEQ ID NO: 103486 - RNA, 19 nt, Homo sapiens
  misc_RNA (1)...(19): siRNA sense strand
ggauuccagauuuguauuc

SEQ ID NO: 103487 - RNA, 19 nt, Homo sapiens
  misc_RNA (1)...(19): siRNA sense strand
gcugaugaaccugcagaaa

SEQ ID NO: 103488 - RNA, 19 nt, Homo sapiens
  misc_RNA (1)...(19): siRNA sense strand
gaccugacuacaaagaaug

SEQ ID NO: 103489 - RNA, 19 nt, Homo sapiens
  misc_RNA (1)...(19): siRNA sense strand
cccaaucagcucguacuua

SEQ ID NO: 103490 - RNA, 19 nt, Homo sapiens
  misc_RNA (1)...(19): siRNA sense strand
cacaguuggucugaaauca

SEQ ID NO: 103491 - RNA, 19 nt, Homo sapiens
  misc_RNA (1)...(19): siRNA sense strand
cagggcaggauucaucaaa

SEQ ID NO: 103492 - RNA, 19 nt, Homo sapiens
  misc_RNA (1)...(19): siRNA sense strand
ugguaaagacuuggaguuu

SEQ ID NO: 103493 - RNA, 19 nt, Homo sapiens
  misc_RNA (1)...(19): siRNA sense strand
gaagcaagacccagauacc

SEQ ID NO: 103494 - RNA, 19 nt, Homo sapiens
  misc_RNA (1)...(19): siRNA sense strand
uuccaaaccuguccaucug

SEQ ID NO: 103495 - RNA, 19 nt, Homo sapiens
  misc_RNA (1)...(19): siRNA sense strand
agacccagauaccaacaca

SEQ ID NO: 103496 - RNA, 19 nt, Homo sapiens
  misc_RNA (1)...(19): siRNA sense strand
cugcucaaccugcugauga

SEQ ID NO: 103497 - RNA, 19 nt, Homo sapiens
  misc_RNA (1)...(19): siRNA sense strand
agacuuggaguuuacaauc

SEQ ID NO: 103498 - RNA, 19 nt, Homo sapiens
  misc_RNA (1)...(19): siRNA sense strand
gaauuguugguaaagacuu

SEQ ID NO: 103499 - RNA, 19 nt, Homo sapiens
  misc_RNA (1)...(19): siRNA sense strand
ccacaguuggucugaaauc

SEQ ID NO: 103500 - RNA, 19 nt, Homo sapiens
  misc_RNA (1)...(19): siRNA sense strand
ugucucgucuuguaucucu

SEQ ID NO: 103501 - RNA, 19 nt, Homo sapiens
  misc_RNA (1)...(19): siRNA sense strand
agaaagaccacagagaaag

SEQ ID NO: 103502 - RNA, 19 nt, Homo sapiens
  misc_RNA (1)...(19): siRNA sense strand
cuaugaugaugaugaugug

SEQ ID NO: 103503 - RNA, 19 nt, Homo sapiens
  misc_RNA (1)...(19): siRNA sense strand
ugacuacaaagaauguuuc

SEQ ID NO: 103504 - RNA, 19 nt, Homo sapiens
  misc_RNA (1)...(19): siRNA sense strand
gcaauggaagcuguuaaac

SEQ ID NO: 103505 - RNA, 19 nt, Homo sapiens
  misc_RNA (1)...(19): siRNA sense strand
ugaugaugaugaugugucu

SEQ ID NO: 103506 - RNA, 19 nt, Homo sapiens
  misc_RNA (1)...(19): siRNA sense strand
ggaguuuacaaucuaugau

SEQ ID NO: 103507 - RNA, 19 nt, Homo sapiens
  misc_RNA (1)...(19): siRNA sense strand
ggaauuguugguaaagacu

SEQ ID NO: 103508 - RNA, 19 nt, Homo sapiens
  misc_RNA (1)...(19): siRNA sense strand
agagacgcuuccugcagaa

SEQ ID NO: 103509 - RNA, 19 nt, Homo sapiens
  misc_RNA (1)...(19): siRNA sense strand
ugcaauggaagcuguuaaa

SEQ ID NO: 103510 - RNA, 19 nt, Homo sapiens
  misc_RNA (1)...(19): siRNA sense strand
caagguucagccacaguug

SEQ ID NO: 103511 - RNA, 19 nt, Homo sapiens
  misc_RNA (1)...(19): siRNA sense strand
ugaugaaccugcagaaaag

SEQ ID NO: 103512 - RNA, 19 nt, Homo sapiens
  misc_RNA (1)...(19): siRNA sense strand
uggagcccguucccaauca

SEQ ID NO: 103513 - RNA, 19 nt, Homo sapiens
  misc_RNA (1)...(19): siRNA sense strand
gaaggaagauuauuucaag

SEQ ID NO: 103514 - RNA, 19 nt, Homo sapiens
  misc_RNA (1)...(19): siRNA sense strand
ggaguagcauuauuauuug

SEQ ID NO: 103515 - RNA, 19 nt, Homo sapiens
  misc_RNA (1)...(19): siRNA sense strand
ggaagaacuugaagagguu

SEQ ID NO: 103516 - RNA, 19 nt, Homo sapiens
  misc_RNA (1)...(19): siRNA sense strand
gcaagaaguuuaccacaag

SEQ ID NO: 103517 - RNA, 19 nt, Homo sapiens
  misc_RNA (1)...(19): siRNA sense strand
gaaagaagccaucaagucu

SEQ ID NO: 103518 - RNA, 19 nt, Homo sapiens
  misc_RNA (1)...(19): siRNA sense strand
agagauugaugcucacaua

SEQ ID NO: 103519 - RNA, 19 nt, Homo sapiens
  misc_RNA (1)...(19): siRNA sense strand
caucaagucuucacucauc

SEQ ID NO: 103520 - RNA, 19 nt, Homo sapiens
  misc_RNA (1)...(19): siRNA sense strand
caaucuggcuuugcaguuu

SEQ ID NO: 103521 - RNA, 19 nt, Homo sapiens
  misc_RNA (1)...(19): siRNA sense strand
gcuaauugcugaugcuaag

SEQ ID NO: 103522 - RNA, 19 nt, Homo sapiens
  misc_RNA (1)...(19): siRNA sense strand
uggaggaguugaugagaaa

SEQ ID NO: 103523 - RNA, 19 nt, Homo sapiens
  misc_RNA (1)...(19): siRNA sense strand
gcaauuggcucugcuucag

SEQ ID NO: 103524 - RNA, 19 nt, Homo sapiens
  misc_RNA (1)...(19): siRNA sense strand
ggccagaauuuccacaugu

SEQ ID NO: 103525 - RNA, 19 nt, Homo sapiens
  misc_RNA (1)...(19): siRNA sense strand
gaugcuaagacuuuaauug

SEQ ID NO: 103526 - RNA, 19 nt, Homo sapiens
  misc_RNA (1)...(19): siRNA sense strand
gaagcugaaugcaacaaac

SEQ ID NO: 103527 - RNA, 19 nt, Homo sapiens
  misc_RNA (1)...(19): siRNA sense strand
ggaccuuuguacaguguga

SEQ ID NO: 103528 - RNA, 19 nt, Homo sapiens
  misc_RNA (1)...(19): siRNA sense strand
gaaaggaccccagcuguuu

SEQ ID NO: 103529 - RNA, 19 nt, Homo sapiens
  misc_RNA (1)...(19): siRNA sense strand
gaggagaagcugaaugcaa

SEQ ID NO: 103530 - RNA, 19 nt, Homo sapiens
  misc_RNA (1)...(19): siRNA sense strand
gccagaauuuccacauguu

SEQ ID NO: 103531 - RNA, 19 nt, Homo sapiens
  misc_RNA (1)...(19): siRNA sense strand
ucacaaaggaagaacuuga

SEQ ID NO: 103532 - RNA, 19 nt, Homo sapiens
  misc_RNA (1)...(19): siRNA sense strand
gauugaugcucacauaggu

SEQ ID NO: 103533 - RNA, 19 nt, Homo sapiens
  misc_RNA (1)...(19): siRNA sense strand
ugaaagaagccaucaaguc

SEQ ID NO: 103534 - RNA, 19 nt, Homo sapiens
  misc_RNA (1)...(19): siRNA sense strand
gaaguuuaccacaagucua

SEQ ID NO: 103535 - RNA, 19 nt, Homo sapiens
  misc_RNA (1)...(19): siRNA sense strand
ugccaugucucgucccuuu

SEQ ID NO: 103536 - RNA, 19 nt, Homo sapiens
  misc_RNA (1)...(19): siRNA sense strand
gacccaagcuguguccaau

SEQ ID NO: 103537 - RNA, 19 nt, Homo sapiens
  misc_RNA (1)...(19): siRNA sense strand
caaugacaguggagagugu

SEQ ID NO: 103538 - RNA, 19 nt, Homo sapiens
  misc_RNA (1)...(19): siRNA sense strand
gaagaacuugaagagguua

SEQ ID NO: 103539 - RNA, 19 nt, Homo sapiens
  misc_RNA (1)...(19): siRNA sense strand
caaaggaagaacuugaaga

SEQ ID NO: 103540 - RNA, 19 nt, Homo sapiens
  misc_RNA (1)...(19): siRNA sense strand
agaagaagaugcagaucca

SEQ ID NO: 103541 - RNA, 19 nt, Homo sapiens
  misc_RNA (1)...(19): siRNA sense strand
gccaucaagucuucacuca

SEQ ID NO: 103542 - RNA, 19 nt, Homo sapiens
  misc_RNA (1)...(19): siRNA sense strand
caaguggaauaugccauug

SEQ ID NO: 103543 - RNA, 19 nt, Homo sapiens
  misc_RNA (1)...(19): siRNA sense strand
caagaaguuuaccacaagu

SEQ ID NO: 103544 - RNA, 19 nt, Homo sapiens
  misc_RNA (1)...(19): siRNA sense strand
gagguuaucaaggacauuu

SEQ ID NO: 103545 - RNA, 19 nt, Homo sapiens
  misc_RNA (1)...(19): siRNA sense strand
gcuguggagaagagaauua

SEQ ID NO: 103546 - RNA, 19 nt, Homo sapiens
  misc_RNA (1)...(19): siRNA sense strand
cgaaggaagauuauuucaa

SEQ ID NO: 103547 - RNA, 19 nt, Homo sapiens
  misc_RNA (1)...(19): siRNA sense strand
ugcaagaaguuuaccacaa

SEQ ID NO: 103548 - RNA, 19 nt, Homo sapiens
  misc_RNA (1)...(19): siRNA sense strand
gaacuugaagagguuauca

SEQ ID NO: 103549 - RNA, 19 nt, Homo sapiens
  misc_RNA (1)...(19): siRNA sense strand
caucauccucaaacaagua

SEQ ID NO: 103550 - RNA, 19 nt, Homo sapiens
  misc_RNA (1)...(19): siRNA sense strand
gagcccagcagcauugaga

SEQ ID NO: 103551 - RNA, 19 nt, Homo sapiens
  misc_RNA (1)...(19): siRNA sense strand
gguuaucaaggacauuuaa

SEQ ID NO: 103552 - RNA, 19 nt, Homo sapiens
  misc_RNA (1)...(19): siRNA sense strand
ccagagcuccuugcaagaa

SEQ ID NO: 103553 - RNA, 19 nt, Homo sapiens
  misc_RNA (1)...(19): siRNA sense strand
ccauugggauccagacauc

SEQ ID NO: 103554 - RNA, 19 nt, Homo sapiens
  misc_RNA (1)...(19): siRNA sense strand
ucaaguggaauaugccauu

SEQ ID NO: 103555 - RNA, 19 nt, Homo sapiens
  misc_RNA (1)...(19): siRNA sense strand
aauaugccauugaggcuau

SEQ ID NO: 103556 - RNA, 19 nt, Homo sapiens
  misc_RNA (1)...(19): siRNA sense strand
gccaugagugggcuaauug

SEQ ID NO: 103557 - RNA, 19 nt, Homo sapiens
  misc_RNA (1)...(19): siRNA sense strand
acauugagcuagccacagu

SEQ ID NO: 103558 - RNA, 19 nt, Homo sapiens
  misc_RNA (1)...(19): siRNA sense strand
gaccccagcuguuucauau

SEQ ID NO: 103559 - RNA, 19 nt, Homo sapiens
  misc_RNA (1)...(19): siRNA sense strand
gcuccuugcaagaaguuua

SEQ ID NO: 103560 - RNA, 19 nt, Homo sapiens
  misc_RNA (1)...(19): siRNA sense strand
gugccuagcuguggagaag

SEQ ID NO: 103561 - RNA, 19 nt, Homo sapiens
  misc_RNA (1)...(19): siRNA sense strand
gcaguuuggagaagaagau

SEQ ID NO: 103562 - RNA, 19 nt, Homo sapiens
  misc_RNA (1)...(19): siRNA sense strand
cacaaaggaagaacuugaa

SEQ ID NO: 103563 - RNA, 19 nt, Homo sapiens
  misc_RNA (1)...(19): siRNA sense strand
gaguagcauuauuauuugg

SEQ ID NO: 103564 - RNA, 19 nt, Homo sapiens
  misc_RNA (1)...(19): siRNA sense strand
uugcugaugcuaagacuuu

SEQ ID NO: 103565 - RNA, 19 nt, Homo sapiens
  misc_RNA (1)...(19): siRNA sense strand
aaaggaagaacuugaagag

SEQ ID NO: 103566 - RNA, 19 nt, Homo sapiens
  misc_RNA (1)...(19): siRNA sense strand
ccacauguucacaaaggaa

SEQ ID NO: 103567 - RNA, 19 nt, Homo sapiens
  misc_RNA (1)...(19): siRNA sense strand
cuuuggaguagcauuauua

SEQ ID NO: 103568 - RNA, 19 nt, Homo sapiens
  misc_RNA (1)...(19): siRNA sense strand
guggagaagagaauuacuu

SEQ ID NO: 103569 - RNA, 19 nt, Homo sapiens
  misc_RNA (1)...(19): siRNA sense strand
uaucaagcuugguucuaca

SEQ ID NO: 103570 - RNA, 19 nt, Homo sapiens
  misc_RNA (1)...(19): siRNA sense strand
acaaugagacaaugacagu

SEQ ID NO: 103571 - RNA, 19 nt, Homo sapiens
  misc_RNA (1)...(19): siRNA sense strand
gauggagcccagcagcauu

SEQ ID NO: 103572 - RNA, 19 nt, Homo sapiens
  misc_RNA (1)...(19): siRNA sense strand
ugccaugagugggcuaauu

SEQ ID NO: 103573 - RNA, 19 nt, Homo sapiens
  misc_RNA (1)...(19): siRNA sense strand
ucccgaaggaagauuauuu

SEQ ID NO: 103574 - RNA, 19 nt, Homo sapiens
  misc_RNA (1)...(19): siRNA sense strand
uaauggaggagaagcugaa

SEQ ID NO: 103575 - RNA, 19 nt, Homo sapiens
  misc_RNA (1)...(19): siRNA sense strand
aaucuggcuuugcaguuug

SEQ ID NO: 103576 - RNA, 19 nt, Homo sapiens
  misc_RNA (1)...(19): siRNA sense strand
uguccaaucuggcuuugca

SEQ ID NO: 103577 - RNA, 19 nt, Homo sapiens
  misc_RNA (1)...(19): siRNA sense strand
cccaagcuguguccaaucu

SEQ ID NO: 103578 - RNA, 19 nt, Homo sapiens
  misc_RNA (1)...(19): siRNA sense strand
gcccagcagcauugagaaa

SEQ ID NO: 103579 - RNA, 19 nt, Homo sapiens
  misc_RNA (1)...(19): siRNA sense strand
cuaucaagcuugguucuac

SEQ ID NO: 103580 - RNA, 19 nt, Homo sapiens
  misc_RNA (1)...(19): siRNA sense strand
aacaaguaauggaggagaa

SEQ ID NO: 103581 - RNA, 19 nt, Homo sapiens
  misc_RNA (1)...(19): siRNA sense strand
gcuaucaagcuugguucua

SEQ ID NO: 103582 - RNA, 19 nt, Homo sapiens
  misc_RNA (1)...(19): siRNA sense strand
gaggcuaucaagcuugguu

SEQ ID NO: 103583 - RNA, 19 nt, Homo sapiens
  misc_RNA (1)...(19): siRNA sense strand
gagauugaugcucacauag

SEQ ID NO: 103584 - RNA, 19 nt, Homo sapiens
  misc_RNA (1)...(19): siRNA sense strand
agaauuacuuccccacuga

SEQ ID NO: 103585 - RNA, 19 nt, Homo sapiens
  misc_RNA (1)...(19): siRNA sense strand
caccuacaaugagacaaug

SEQ ID NO: 103586 - RNA, 19 nt, Homo sapiens
  misc_RNA (1)...(19): siRNA sense strand
gcugaugcuaagacuuuaa

SEQ ID NO: 103587 - RNA, 19 nt, Homo sapiens
  misc_RNA (1)...(19): siRNA sense strand
cauagguugugccaugagu

SEQ ID NO: 103588 - RNA, 19 nt, Homo sapiens
  misc_RNA (1)...(19): siRNA sense strand
gcuugguucuacagccauu

SEQ ID NO: 103589 - RNA, 19 nt, Homo sapiens
  misc_RNA (1)...(19): siRNA sense strand
uuggaggaguugaugagaa

SEQ ID NO: 103590 - RNA, 19 nt, Homo sapiens
  misc_RNA (1)...(19): siRNA sense strand
ccaaucuggcuuugcaguu

SEQ ID NO: 103591 - RNA, 19 nt, Homo sapiens
  misc_RNA (1)...(19): siRNA sense strand
ccagaguggagacacagaa

SEQ ID NO: 103592 - RNA, 19 nt, Homo sapiens
  misc_RNA (1)...(19): siRNA sense strand
ucaccuacaaugagacaau

SEQ ID NO: 103593 - RNA, 19 nt, Homo sapiens
  misc_RNA (1)...(19): siRNA sense strand
ucucgucccuuuggaguag

SEQ ID NO: 103594 - RNA, 19 nt, Homo sapiens
  misc_RNA (1)...(19): siRNA sense strand
cagaauuuccacauguuca

SEQ ID NO: 103595 - RNA, 19 nt, Homo sapiens
  misc_RNA (1)...(19): siRNA sense strand
cagagcuccuugcaagaag

SEQ ID NO: 103596 - RNA, 19 nt, Homo sapiens
  misc_RNA (1)...(19): siRNA sense strand
gcagauccaggugccaugu

SEQ ID NO: 103597 - RNA, 19 nt, Homo sapiens
  misc_RNA (1)...(19): siRNA sense strand
uggccagaauuuccacaug

SEQ ID NO: 103598 - RNA, 19 nt, Homo sapiens
  misc_RNA (1)...(19): siRNA sense strand
gagcuccuugcaagaaguu

SEQ ID NO: 103599 - RNA, 19 nt, Homo sapiens
  misc_RNA (1)...(19): siRNA sense strand
caucugggaccuuuguaca

SEQ ID NO: 103600 - RNA, 19 nt, Homo sapiens
  misc_RNA (1)...(19): siRNA sense strand
ccuuuggaguagcauuauu

SEQ ID NO: 103601 - RNA, 19 nt, Homo sapiens
  misc_RNA (1)...(19): siRNA sense strand
ucugggaccuuuguacagu

SEQ ID NO: 103602 - RNA, 19 nt, Homo sapiens
  misc_RNA (1)...(19): siRNA sense strand
gagaagcugaaugcaacaa

SEQ ID NO: 103603 - RNA, 19 nt, Homo sapiens
  misc_RNA (1)...(19): siRNA sense strand
cauccucaaacaaguaaug

SEQ ID NO: 103604 - RNA, 19 nt, Homo sapiens
  misc_RNA (1)...(19): siRNA sense strand
aaguuuaccacaagucuau

SEQ ID NO: 103605 - RNA, 19 nt, Homo sapiens
  misc_RNA (1)...(19): siRNA sense strand
gaaaguaccugacaaauua

SEQ ID NO: 103606 - RNA, 19 nt, Homo sapiens
  misc_RNA (1)...(19): siRNA sense strand
gcaauuacaugccugucua

SEQ ID NO: 103607 - RNA, 19 nt, Homo sapiens
  misc_RNA (1)...(19): siRNA sense strand
gaaaugaggccucuugguu

SEQ ID NO: 103608 - RNA, 19 nt, Homo sapiens
  misc_RNA (1)...(19): siRNA sense strand
gaagaaaguaccugacaaa

SEQ ID NO: 103609 - RNA, 19 nt, Homo sapiens
  misc_RNA (1)...(19): siRNA sense strand
gcaaggcccucagguauau

SEQ ID NO: 103610 - RNA, 19 nt, Homo sapiens
  misc_RNA (1)...(19): siRNA sense strand
gcagcuaacuggaaauaca

SEQ ID NO: 103611 - RNA, 19 nt, Homo sapiens
  misc_RNA (1)...(19): siRNA sense strand
aaacauugguugugugaug

SEQ ID NO: 103612 - RNA, 19 nt, Homo sapiens
  misc_RNA (1)...(19): siRNA sense strand
agaaauagaaguuggagua

SEQ ID NO: 103613 - RNA, 19 nt, Homo sapiens
  misc_RNA (1)...(19): siRNA sense strand
gagcaaggcccucagguau

SEQ ID NO: 103614 - RNA, 19 nt, Homo sapiens
  misc_RNA (1)...(19): siRNA sense strand
uuacaugccugucuacugu

SEQ ID NO: 103615 - RNA, 19 nt, Homo sapiens
  misc_RNA (1)...(19): siRNA sense strand
ccucuugguuguuguauga

SEQ ID NO: 103616 - RNA, 19 nt, Homo sapiens
  misc_RNA (1)...(19): siRNA sense strand
gauugaugcucaccuuguu

SEQ ID NO: 103617 - RNA, 19 nt, Homo sapiens
  misc_RNA (1)...(19): siRNA sense strand
agaaaguaccugacaaauu

SEQ ID NO: 103618 - RNA, 19 nt, Homo sapiens
  misc_RNA (1)...(19): siRNA sense strand
ugaggcagcuaacuggaaa

SEQ ID NO: 103619 - RNA, 19 nt, Homo sapiens
  misc_RNA (1)...(19): siRNA sense strand
guaauugucacacagaaga

SEQ ID NO: 103620 - RNA, 19 nt, Homo sapiens
  misc_RNA (1)...(19): siRNA sense strand
cuacuguucuaucaauuga

SEQ ID NO: 103621 - RNA, 19 nt, Homo sapiens
  misc_RNA (1)...(19): siRNA sense strand
gaagaagaaauuugauugg

SEQ ID NO: 103622 - RNA, 19 nt, Homo sapiens
  misc_RNA (1)...(19): siRNA sense strand
guaaaagaauugccgauau

SEQ ID NO: 103623 - RNA, 19 nt, Homo sapiens
  misc_RNA (1)...(19): siRNA sense strand
aauagaaguuggaguagug

SEQ ID NO: 103624 - RNA, 19 nt, Homo sapiens
  misc_RNA (1)...(19): siRNA sense strand
ccugacaaauuauuggauu

SEQ ID NO: 103625 - RNA, 19 nt, Homo sapiens
  misc_RNA (1)...(19): siRNA sense strand
guacagagggcacgcuaug

SEQ ID NO: 103626 - RNA, 19 nt, Homo sapiens
  misc_RNA (1)...(19): siRNA sense strand
caaguauggcuaugagauu

SEQ ID NO: 103627 - RNA, 19 nt, Homo sapiens
  misc_RNA (1)...(19): siRNA sense strand
uaaccaggguggccuuaca

SEQ ID NO: 103628 - RNA, 19 nt, Homo sapiens
  misc_RNA (1)...(19): siRNA sense strand
agaagaaaguaccugacaa

SEQ ID NO: 103629 - RNA, 19 nt, Homo sapiens
  misc_RNA (1)...(19): siRNA sense strand
gcccucagguauauaagug

SEQ ID NO: 103630 - RNA, 19 nt, Homo sapiens
  misc_RNA (1)...(19): siRNA sense strand
gcagcgggaguuaaacaaa

SEQ ID NO: 103631 - RNA, 19 nt, Homo sapiens
  misc_RNA (1)...(19): siRNA sense strand
gcaguaauugucacacaga

SEQ ID NO: 103632 - RNA, 19 nt, Homo sapiens
  misc_RNA (1)...(19): siRNA sense strand
gaaauagaaguuggaguag

SEQ ID NO: 103633 - RNA, 19 nt, Homo sapiens
  misc_RNA (1)...(19): siRNA sense strand
ucucaggucuacacacaga

SEQ ID NO: 103634 - RNA, 19 nt, Homo sapiens
  misc_RNA (1)...(19): siRNA sense strand
ugguauagaugaagagcaa

SEQ ID NO: 103635 - RNA, 19 nt, Homo sapiens
  misc_RNA (1)...(19): siRNA sense strand
gcugaaaugaggccucuug

SEQ ID NO: 103636 - RNA, 19 nt, Homo sapiens
  misc_RNA (1)...(19): siRNA sense strand
uuacuacuguggguuuaaa

SEQ ID NO: 103637 - RNA, 19 nt, Homo sapiens
  misc_RNA (1)...(19): siRNA sense strand
gaauugccgauauuucuca

SEQ ID NO: 103638 - RNA, 19 nt, Homo sapiens
  misc_RNA (1)...(19): siRNA sense strand
gguuacuacuguggguuua

SEQ ID NO: 103639 - RNA, 19 nt, Homo sapiens
  misc_RNA (1)...(19): siRNA sense strand
ugacagcagaucccaggua

SEQ ID NO: 103640 - RNA, 19 nt, Homo sapiens
  misc_RNA (1)...(19): siRNA sense strand
gaccgccacauuaccauuu

SEQ ID NO: 103641 - RNA, 19 nt, Homo sapiens
  misc_RNA (1)...(19): siRNA sense strand
agugugauccugcagguua

SEQ ID NO: 103642 - RNA, 19 nt, Homo sapiens
  misc_RNA (1)...(19): siRNA sense strand
ugucuacuguucuaucaau

SEQ ID NO: 103643 - RNA, 19 nt, Homo sapiens
  misc_RNA (1)...(19): siRNA sense strand
agagauugaugcucaccuu

SEQ ID NO: 103644 - RNA, 19 nt, Homo sapiens
  misc_RNA (1)...(19): siRNA sense strand
ugacucacuuauucaagau

SEQ ID NO: 103645 - RNA, 19 nt, Homo sapiens
  misc_RNA (1)...(19): siRNA sense strand
aguggaaacugcaauuaca

SEQ ID NO: 103646 - RNA, 19 nt, Homo sapiens
  misc_RNA (1)...(19): siRNA sense strand
cacacagaaugcugaaaug

SEQ ID NO: 103647 - RNA, 19 nt, Homo sapiens
  misc_RNA (1)...(19): siRNA sense strand
gaaaacauugguuguguga

SEQ ID NO: 103648 - RNA, 19 nt, Homo sapiens
  misc_RNA (1)...(19): siRNA sense strand
ugagauuccuguggacaug

SEQ ID NO: 103649 - RNA, 19 nt, Homo sapiens
  misc_RNA (1)...(19): siRNA sense strand
aaugaggccucuugguugu

SEQ ID NO: 103650 - RNA, 19 nt, Homo sapiens
  misc_RNA (1)...(19): siRNA sense strand
acacacagaaugcugaaau

SEQ ID NO: 103651 - RNA, 19 nt, Homo sapiens
  misc_RNA (1)...(19): siRNA sense strand
gacaugcuguguaaaagaa

SEQ ID NO: 103652 - RNA, 19 nt, Homo sapiens
  misc_RNA (1)...(19): siRNA sense strand
gcuaugaggcagcuaacug

SEQ ID NO: 103653 - RNA, 19 nt, Homo sapiens
  misc_RNA (1)...(19): siRNA sense strand
gugcaguaauugucacaca

SEQ ID NO: 103654 - RNA, 19 nt, Homo sapiens
  misc_RNA (1)...(19): siRNA sense strand
cuguggacaugcuguguaa

SEQ ID NO: 103655 - RNA, 19 nt, Homo sapiens
  misc_RNA (1)...(19): siRNA sense strand
cuaacuggaaauacaagua

SEQ ID NO: 103656 - RNA, 19 nt, Homo sapiens
  misc_RNA (1)...(19): siRNA sense strand
ugaggccucuugguuguug

SEQ ID NO: 103657 - RNA, 19 nt, Homo sapiens
  misc_RNA (1)...(19): siRNA sense strand
ccaaguagaauaugcuuuu

SEQ ID NO: 103658 - RNA, 19 nt, Homo sapiens
  misc_RNA (1)...(19): siRNA sense strand
cagaagaaaguaccugaca

SEQ ID NO: 103659 - RNA, 19 nt, Homo sapiens
  misc_RNA (1)...(19): siRNA sense strand
caguaauugucacacagaa

SEQ ID NO: 103660 - RNA, 19 nt, Homo sapiens
  misc_RNA (1)...(19): siRNA sense strand
ggaguagugacaguugaaa

SEQ ID NO: 103661 - RNA, 19 nt, Homo sapiens
  misc_RNA (1)...(19): siRNA sense strand
caaaccuucagaaauagaa

SEQ ID NO: 103662 - RNA, 19 nt, Homo sapiens
  misc_RNA (1)...(19): siRNA sense strand
acacagaaugcugaaauga

SEQ ID NO: 103663 - RNA, 19 nt, Homo sapiens
  misc_RNA (1)...(19): siRNA sense strand
agagcaaggcccucaggua

SEQ ID NO: 103664 - RNA, 19 nt, Homo sapiens
  misc_RNA (1)...(19): siRNA sense strand
cuugguuguuguaugauuu

SEQ ID NO: 103665 - RNA, 19 nt, Homo sapiens
  misc_RNA (1)...(19): siRNA sense strand
aaauagaaguuggaguagu

SEQ ID NO: 103666 - RNA, 19 nt, Homo sapiens
  misc_RNA (1)...(19): siRNA sense strand
cagcgggaguuaaacaaac

SEQ ID NO: 103667 - RNA, 19 nt, Homo sapiens
  misc_RNA (1)...(19): siRNA sense strand
aaagaauugccgauauuuc

SEQ ID NO: 103668 - RNA, 19 nt, Homo sapiens
  misc_RNA (1)...(19): siRNA sense strand
aaacugagucaaccagcuu

SEQ ID NO: 103669 - RNA, 19 nt, Homo sapiens
  misc_RNA (1)...(19): siRNA sense strand
ccugucuacuguucuauca

SEQ ID NO: 103670 - RNA, 19 nt, Homo sapiens
  misc_RNA (1)...(19): siRNA sense strand
cagcuaacuggaaauacaa

SEQ ID NO: 103671 - RNA, 19 nt, Homo sapiens
  misc_RNA (1)...(19): siRNA sense strand
aaguauggcuaugagauuc

SEQ ID NO: 103672 - RNA, 19 nt, Homo sapiens
  misc_RNA (1)...(19): siRNA sense strand
caaccagcuuccuugaaaa

SEQ ID NO: 103673 - RNA, 19 nt, Homo sapiens
  misc_RNA (1)...(19): siRNA sense strand
cgauauuucucaggucuac

SEQ ID NO: 103674 - RNA, 19 nt, Homo sapiens
  misc_RNA (1)...(19): siRNA sense strand
ggguggccuuacaucagua

SEQ ID NO: 103675 - RNA, 19 nt, Homo sapiens
  misc_RNA (1)...(19): siRNA sense strand
ccacugcagcgggaguuaa

SEQ ID NO: 103676 - RNA, 19 nt, Homo sapiens
  misc_RNA (1)...(19): siRNA sense strand
uuucucaggucuacacaca

SEQ ID NO: 103677 - RNA, 19 nt, Homo sapiens
  misc_RNA (1)...(19): siRNA sense strand
ggacaugcuguguaaaaga

SEQ ID NO: 103678 - RNA, 19 nt, Homo sapiens
  misc_RNA (1)...(19): siRNA sense strand
aacauugguugugugauga

SEQ ID NO: 103679 - RNA, 19 nt, Homo sapiens
  misc_RNA (1)...(19): siRNA sense strand
acaaguauggcuaugagau

SEQ ID NO: 103680 - RNA, 19 nt, Homo sapiens
  misc_RNA (1)...(19): siRNA sense strand
agcaaggcccucagguaua

SEQ ID NO: 103681 - RNA, 19 nt, Homo sapiens
  misc_RNA (1)...(19): siRNA sense strand
guugugugaugaccggaau

SEQ ID NO: 103682 - RNA, 19 nt, Homo sapiens
  misc_RNA (1)...(19): siRNA sense strand
gguuuugaccgccacauua

SEQ ID NO: 103683 - RNA, 19 nt, Homo sapiens
  misc_RNA (1)...(19): siRNA sense strand
gaaguauguugcugaaauu

SEQ ID NO: 103684 - RNA, 19 nt, Homo sapiens
  misc_RNA (1)...(19): siRNA sense strand
gaagagacauuguuguucu

SEQ ID NO: 103685 - RNA, 19 nt, Homo sapiens
  misc_RNA (1)...(19): siRNA sense strand
gaagaucugugcuuuggau

SEQ ID NO: 103686 - RNA, 19 nt, Homo sapiens
  misc_RNA (1)...(19): siRNA sense strand
cugaagaaauugagaagua

SEQ ID NO: 103687 - RNA, 19 nt, Homo sapiens
  misc_RNA (1)...(19): siRNA sense strand
gcacauaccaugccuggaa

SEQ ID NO: 103688 - RNA, 19 nt, Homo sapiens
  misc_RNA (1)...(19): siRNA sense strand
caucguggguuucgacuuu

SEQ ID NO: 103689 - RNA, 19 nt, Homo sapiens
  misc_RNA (1)...(19): siRNA sense strand
ccauuaagcuggugaucaa

SEQ ID NO: 103690 - RNA, 19 nt, Homo sapiens
  misc_RNA (1)...(19): siRNA sense strand
gaaagaacagugcggaaga

SEQ ID NO: 103691 - RNA, 19 nt, Homo sapiens
  misc_RNA (1)...(19): siRNA sense strand
gaucaaggcacuccuggaa

SEQ ID NO: 103692 - RNA, 19 nt, Homo sapiens
  misc_RNA (1)...(19): siRNA sense strand
guauguugcugaaauugaa

SEQ ID NO: 103693 - RNA, 19 nt, Homo sapiens
  misc_RNA (1)...(19): siRNA sense strand
agaaguauguugcugaaau

SEQ ID NO: 103694 - RNA, 19 nt, Homo sapiens
  misc_RNA (1)...(19): siRNA sense strand
cgagaucaaucccucaaga

SEQ ID NO: 103695 - RNA, 19 nt, Homo sapiens
  misc_RNA (1)...(19): siRNA sense strand
gaaauugagaaguauguug

SEQ ID NO: 103696 - RNA, 19 nt, Homo sapiens
  misc_RNA (1)...(19): siRNA sense strand
gaacagugcggaagaucug

SEQ ID NO: 103697 - RNA, 19 nt, Homo sapiens
  misc_RNA (1)...(19): siRNA sense strand
guacaucacccgcuacauc

SEQ ID NO: 103698 - RNA, 19 nt, Homo sapiens
  misc_RNA (1)...(19): siRNA sense strand
gaagaagucaguggccaaa

SEQ ID NO: 103699 - RNA, 19 nt, Homo sapiens
  misc_RNA (1)...(19): siRNA sense strand
ugagaaguauguugcugaa

SEQ ID NO: 103700 - RNA, 19 nt, Homo sapiens
  misc_RNA (1)...(19): siRNA sense strand
gcaaggauagucaucaaca

SEQ ID NO: 103701 - RNA, 19 nt, Homo sapiens
  misc_RNA (1)...(19): siRNA sense strand
uggccaaacugcaggauga

SEQ ID NO: 103702 - RNA, 19 nt, Homo sapiens
  misc_RNA (1)...(19): siRNA sense strand
ucaaggcacuccuggaagu

SEQ ID NO: 103703 - RNA, 19 nt, Homo sapiens
  misc_RNA (1)...(19): siRNA sense strand
gcaggaggccgucaagaag

SEQ ID NO: 103704 - RNA, 19 nt, Homo sapiens
  misc_RNA (1)...(19): siRNA sense strand
gaagaaauugagaaguaug

SEQ ID NO: 103705 - RNA, 19 nt, Homo sapiens
  misc_RNA (1)...(19): siRNA sense strand
ggaagagacauuguuguuc

SEQ ID NO: 103706 - RNA, 19 nt, Homo sapiens
  misc_RNA (1)...(19): siRNA sense strand
gaagaaaacgaaaagaaga

SEQ ID NO: 103707 - RNA, 19 nt, Homo sapiens
  misc_RNA (1)...(19): siRNA sense strand
cggaagaucugugcuuugg

SEQ ID NO: 103708 - RNA, 19 nt, Homo sapiens
  misc_RNA (1)...(19): siRNA sense strand
caccgccgaugcaaggaua

SEQ ID NO: 103709 - RNA, 19 nt, Homo sapiens
  misc_RNA (1)...(19): siRNA sense strand
caaacugcaggaugaaaga

SEQ ID NO: 103710 - RNA, 19 nt, Homo sapiens
  misc_RNA (1)...(19): siRNA sense strand
cgaggaagagacauuguug

SEQ ID NO: 103711 - RNA, 19 nt, Homo sapiens
  misc_RNA (1)...(19): siRNA sense strand
aaagaacagugcggaagau

SEQ ID NO: 103712 - RNA, 19 nt, Homo sapiens
  misc_RNA (1)...(19): siRNA sense strand
uggagaagaacuauacuga

SEQ ID NO: 103713 - RNA, 19 nt, Homo sapiens
  misc_RNA (1)...(19): siRNA sense strand
gcacuccuaggcucuauca

SEQ ID NO: 103714 - RNA, 19 nt, Homo sapiens
  misc_RNA (1)...(19): siRNA sense strand
cauugaacuugcugucaug

SEQ ID NO: 103715 - RNA, 19 nt, Homo sapiens
  misc_RNA (1)...(19): siRNA sense strand
gagaucaaucccucaagau

SEQ ID NO: 103716 - RNA, 19 nt, Homo sapiens
  misc_RNA (1)...(19): siRNA sense strand
gaucugugcuuuggaugac

SEQ ID NO: 103717 - RNA, 19 nt, Homo sapiens
  misc_RNA (1)...(19): siRNA sense strand
cuacaucgccagucugaag

SEQ ID NO: 103718 - RNA, 19 nt, Homo sapiens
  misc_RNA (1)...(19): siRNA sense strand
caaggauagucaucaacag

SEQ ID NO: 103719 - RNA, 19 nt, Homo sapiens
  misc_RNA (1)...(19): siRNA sense strand
agaagucaguggccaaacu

SEQ ID NO: 103720 - RNA, 19 nt, Homo sapiens
  misc_RNA (1)...(19): siRNA sense strand
acauugaacuugcugucau

SEQ ID NO: 103721 - RNA, 19 nt, Homo sapiens
  misc_RNA (1)...(19): siRNA sense strand
aggaagagacauuguuguu

SEQ ID NO: 103722 - RNA, 19 nt, Homo sapiens
  misc_RNA (1)...(19): siRNA sense strand
agacauuguuguucuuggu

SEQ ID NO: 103723 - RNA, 19 nt, Homo sapiens
  misc_RNA (1)...(19): siRNA sense strand
cgcaggaggccgucaagaa

SEQ ID NO: 103724 - RNA, 19 nt, Homo sapiens
  misc_RNA (1)...(19): siRNA sense strand
gaggaagagacauuguugu

SEQ ID NO: 103725 - RNA, 19 nt, Homo sapiens
  misc_RNA (1)...(19): siRNA sense strand
ugcggaagaucugugcuuu

SEQ ID NO: 103726 - RNA, 19 nt, Homo sapiens
  misc_RNA (1)...(19): siRNA sense strand
caacgucugcauggccuuu

SEQ ID NO: 103727 - RNA, 19 nt, Homo sapiens
  misc_RNA (1)...(19): siRNA sense strand
ccaaacugcaggaugaaag

SEQ ID NO: 103728 - RNA, 19 nt, Homo sapiens
  misc_RNA (1)...(19): siRNA sense strand
gcggaagaucugugcuuug

SEQ ID NO: 103729 - RNA, 19 nt, Homo sapiens
  misc_RNA (1)...(19): siRNA sense strand
cgacggccaccucuuccaa

SEQ ID NO: 103730 - RNA, 19 nt, Homo sapiens
  misc_RNA (1)...(19): siRNA sense strand
gguugguguucgaggaaga

SEQ ID NO: 103731 - RNA, 19 nt, Homo sapiens
  misc_RNA (1)...(19): siRNA sense strand
augcaaggauagucaucaa

SEQ ID NO: 103732 - RNA, 19 nt, Homo sapiens
  misc_RNA (1)...(19): siRNA sense strand
gaaacaaaagaaagcauca

SEQ ID NO: 103733 - RNA, 19 nt, Homo sapiens
  misc_RNA (1)...(19): siRNA sense strand
gagaaguauguugcugaaa

SEQ ID NO: 103734 - RNA, 19 nt, Homo sapiens
  misc_RNA (1)...(19): siRNA sense strand
gaagagacauuguuguucu

SEQ ID NO: 103735 - RNA, 19 nt, Homo sapiens
  misc_RNA (1)...(19): siRNA sense strand
gaagaucugugcuuuggau

SEQ ID NO: 103736 - RNA, 19 nt, Homo sapiens
  misc_RNA (1)...(19): siRNA sense strand
caucguggguuucgacuuu

SEQ ID NO: 103737 - RNA, 19 nt, Homo sapiens
  misc_RNA (1)...(19): siRNA sense strand
gaaagaacagugcggaaga

SEQ ID NO: 103738 - RNA, 19 nt, Homo sapiens
  misc_RNA (1)...(19): siRNA sense strand
gaacagugcggaagaucug

SEQ ID NO: 103739 - RNA, 19 nt, Homo sapiens
  misc_RNA (1)...(19): siRNA sense strand
guacaucacccgcuacauc

SEQ ID NO: 103740 - RNA, 19 nt, Homo sapiens
  misc_RNA (1)...(19): siRNA sense strand
gaagaagucaguggccaaa

SEQ ID NO: 103741 - RNA, 19 nt, Homo sapiens
  misc_RNA (1)...(19): siRNA sense strand
gcaaggauagucaucaaca

SEQ ID NO: 103742 - RNA, 19 nt, Homo sapiens
  misc_RNA (1)...(19): siRNA sense strand
uggccaaacugcaggauga

SEQ ID NO: 103743 - RNA, 19 nt, Homo sapiens
  misc_RNA (1)...(19): siRNA sense strand
gcaggaggccgucaagaag

SEQ ID NO: 103744 - RNA, 19 nt, Homo sapiens
  misc_RNA (1)...(19): siRNA sense strand
ggaagagacauuguuguuc

SEQ ID NO: 103745 - RNA, 19 nt, Homo sapiens
  misc_RNA (1)...(19): siRNA sense strand
cggaagaucugugcuuugg

SEQ ID NO: 103746 - RNA, 19 nt, Homo sapiens
  misc_RNA (1)...(19): siRNA sense strand
caccgccgaugcaaggaua

SEQ ID NO: 103747 - RNA, 19 nt, Homo sapiens
  misc_RNA (1)...(19): siRNA sense strand
cgaggaagagacauuguug

SEQ ID NO: 103748 - RNA, 19 nt, Homo sapiens
  misc_RNA (1)...(19): siRNA sense strand
caaacugcaggaugaaaga

SEQ ID NO: 103749 - RNA, 19 nt, Homo sapiens
  misc_RNA (1)...(19): siRNA sense strand
aaagaacagugcggaagau

SEQ ID NO: 103750 - RNA, 19 nt, Homo sapiens
  misc_RNA (1)...(19): siRNA sense strand
gaucugugcuuuggaugac

SEQ ID NO: 103751 - RNA, 19 nt, Homo sapiens
  misc_RNA (1)...(19): siRNA sense strand
cuacaucgccagucugaag

SEQ ID NO: 103752 - RNA, 19 nt, Homo sapiens
  misc_RNA (1)...(19): siRNA sense strand
agaagucaguggccaaacu

SEQ ID NO: 103753 - RNA, 19 nt, Homo sapiens
  misc_RNA (1)...(19): siRNA sense strand
caaggauagucaucaacag

SEQ ID NO: 103754 - RNA, 19 nt, Homo sapiens
  misc_RNA (1)...(19): siRNA sense strand
aggaagagacauuguuguu

SEQ ID NO: 103755 - RNA, 19 nt, Homo sapiens
  misc_RNA (1)...(19): siRNA sense strand
agacauuguuguucuuggu

SEQ ID NO: 103756 - RNA, 19 nt, Homo sapiens
  misc_RNA (1)...(19): siRNA sense strand
gaggaagagacauuguugu

SEQ ID NO: 103757 - RNA, 19 nt, Homo sapiens
  misc_RNA (1)...(19): siRNA sense strand
cgcaggaggccgucaagaa

SEQ ID NO: 103758 - RNA, 19 nt, Homo sapiens
  misc_RNA (1)...(19): siRNA sense strand
ugcggaagaucugugcuuu

SEQ ID NO: 103759 - RNA, 19 nt, Homo sapiens
  misc_RNA (1)...(19): siRNA sense strand
caacgucugcauggccuuu

SEQ ID NO: 103760 - RNA, 19 nt, Homo sapiens
  misc_RNA (1)...(19): siRNA sense strand
ccaaacugcaggaugaaag

SEQ ID NO: 103761 - RNA, 19 nt, Homo sapiens
  misc_RNA (1)...(19): siRNA sense strand
gcggaagaucugugcuuug

SEQ ID NO: 103762 - RNA, 19 nt, Homo sapiens
  misc_RNA (1)...(19): siRNA sense strand
cgacggccaccucuuccaa

SEQ ID NO: 103763 - RNA, 19 nt, Homo sapiens
  misc_RNA (1)...(19): siRNA sense strand
gguugguguucgaggaaga

SEQ ID NO: 103764 - RNA, 19 nt, Homo sapiens
  misc_RNA (1)...(19): siRNA sense strand
augcaaggauagucaucaa

SEQ ID NO: 103765 - RNA, 19 nt, Homo sapiens
  misc_RNA (1)...(19): siRNA sense strand
caacggagguacuauacug

SEQ ID NO: 103766 - RNA, 19 nt, Homo sapiens
  misc_RNA (1)...(19): siRNA sense strand
gaagcaagacuaaagaugu

SEQ ID NO: 103767 - RNA, 19 nt, Homo sapiens
  misc_RNA (1)...(19): siRNA sense strand
aagcaagacuaaagaugua

SEQ ID NO: 103768 - RNA, 19 nt, Homo sapiens
  misc_RNA (1)...(19): siRNA sense strand
gacuaaagauguauaagca

SEQ ID NO: 103769 - RNA, 19 nt, Homo sapiens
  misc_RNA (1)...(19): siRNA sense strand
ggcaauugcuggagaagau

SEQ ID NO: 103770 - RNA, 19 nt, Homo sapiens
  misc_RNA (1)...(19): siRNA sense strand
ccccaaauguuacaaauua

SEQ ID NO: 103771 - RNA, 19 nt, Homo sapiens
  misc_RNA (1)...(19): siRNA sense strand
gcaagacuaaagauguaua

SEQ ID NO: 103772 - RNA, 19 nt, Homo sapiens
  misc_RNA (1)...(19): siRNA sense strand
ucaaggcgcuucuuuccau

SEQ ID NO: 103773 - RNA, 19 nt, Homo sapiens
  misc_RNA (1)...(19): siRNA sense strand
gcaaugcugucuacaaucc

SEQ ID NO: 103774 - RNA, 19 nt, Homo sapiens
  misc_RNA (1)...(19): siRNA sense strand
gcgcuucuuuccauacuau

SEQ ID NO: 103775 - RNA, 19 nt, Homo sapiens
  misc_RNA (1)...(19): siRNA sense strand
ccaugcggcuggugaaaga

SEQ ID NO: 103776 - RNA, 19 nt, Homo sapiens
  misc_RNA (1)...(19): siRNA sense strand
caaggcgcuucuuuccaua

SEQ ID NO: 103777 - RNA, 19 nt, Homo sapiens
  misc_RNA (1)...(19): siRNA sense strand
auacagcuuugauccagua

SEQ ID NO: 103778 - RNA, 19 nt, Homo sapiens
  misc_RNA (1)...(19): siRNA sense strand
gaaggguuuucaauucaua

SEQ ID NO: 103779 - RNA, 19 nt, Homo sapiens
  misc_RNA (1)...(19): siRNA sense strand
guacuauacuggcaauugc

SEQ ID NO: 103780 - RNA, 19 nt, Homo sapiens
  misc_RNA (1)...(19): siRNA sense strand
gagaagauuuugcaauugu

SEQ ID NO: 103781 - RNA, 19 nt, Homo sapiens
  misc_RNA (1)...(19): siRNA sense strand
ccagagagacuccuucaag

SEQ ID NO: 103782 - RNA, 19 nt, Homo sapiens
  misc_RNA (1)...(19): siRNA sense strand
cuccggaucugcauaguga

SEQ ID NO: 103783 - RNA, 19 nt, Homo sapiens
  misc_RNA (1)...(19): siRNA sense strand
cugcaaugcugucuacaau

SEQ ID NO: 103784 - RNA, 19 nt, Homo sapiens
  misc_RNA (1)...(19): siRNA sense strand
ucgauugagugaaggguuu

SEQ ID NO: 103785 - RNA, 19 nt, Homo sapiens
  misc_RNA (1)...(19): siRNA sense strand
gacaaagauuauugaagca

SEQ ID NO: 103786 - RNA, 19 nt, Homo sapiens
  misc_RNA (1)...(19): siRNA sense strand
gggauagccccaaauguua

SEQ ID NO: 103787 - RNA, 19 nt, Homo sapiens
  misc_RNA (1)...(19): siRNA sense strand
ugagagagauguguacacu

SEQ ID NO: 103788 - RNA, 19 nt, Homo sapiens
  misc_RNA (1)...(19): siRNA sense strand
ggagaagauuuugcaauug

SEQ ID NO: 103789 - RNA, 19 nt, Homo sapiens
  misc_RNA (1)...(19): siRNA sense strand
aguagggucuuaccagaga

SEQ ID NO: 103790 - RNA, 19 nt, Homo sapiens
  misc_RNA (1)...(19): siRNA sense strand
caacaucaucgguggacuu

SEQ ID NO: 103791 - RNA, 19 nt, Homo sapiens
  misc_RNA (1)...(19): siRNA sense strand
aauaauaaggccaugacua

SEQ ID NO: 103792 - RNA, 19 nt, Homo sapiens
  misc_RNA (1)...(19): siRNA sense strand
gguacuauacuggcaauug

SEQ ID NO: 103793 - RNA, 19 nt, Homo sapiens
  misc_RNA (1)...(19): siRNA sense strand
gagguacuauacuggcaau

SEQ ID NO: 103794 - RNA, 19 nt, Homo sapiens
  misc_RNA (1)...(19): siRNA sense strand
uggagaagauuuugcaauu

SEQ ID NO: 103795 - RNA, 19 nt, Homo sapiens
  misc_RNA (1)...(19): siRNA sense strand
ucgguggacuugaugaaga

SEQ ID NO: 103796 - RNA, 19 nt, Homo sapiens
  misc_RNA (1)...(19): siRNA sense strand
gauuauugaagcaagacua

SEQ ID NO: 103797 - RNA, 19 nt, Homo sapiens
  misc_RNA (1)...(19): siRNA sense strand
gcacuccggaucugcauag

SEQ ID NO: 103798 - RNA, 19 nt, Homo sapiens
  misc_RNA (1)...(19): siRNA sense strand
guauucaaggcgcuucuuu

SEQ ID NO: 103799 - RNA, 19 nt, Homo sapiens
  misc_RNA (1)...(19): siRNA sense strand
gcaauugcuggagaagauu

SEQ ID NO: 103800 - RNA, 19 nt, Homo sapiens
  misc_RNA (1)...(19): siRNA sense strand
uuuaagaacaugcagaaug

SEQ ID NO: 103801 - RNA, 19 nt, Homo sapiens
  misc_RNA (1)...(19): siRNA sense strand
caucagggaggaaacuguu

SEQ ID NO: 103802 - RNA, 19 nt, Homo sapiens
  misc_RNA (1)...(19): siRNA sense strand
auaauaaggccaugacuac

SEQ ID NO: 103803 - RNA, 19 nt, Homo sapiens
  misc_RNA (1)...(19): siRNA sense strand
ugcagaauguggagcaugu

SEQ ID NO: 103804 - RNA, 19 nt, Homo sapiens
  misc_RNA (1)...(19): siRNA sense strand
caauugcuggagaagauuu

SEQ ID NO: 103805 - RNA, 19 nt, Homo sapiens
  misc_RNA (1)...(19): siRNA sense strand
cgguggacuugaugaagaa

SEQ ID NO: 103806 - RNA, 19 nt, Homo sapiens
  misc_RNA (1)...(19): siRNA sense strand
ugaagcaagacuaaagaug

SEQ ID NO: 103807 - RNA, 19 nt, Homo sapiens
  misc_RNA (1)...(19): siRNA sense strand
ggaucugcauagugaccaa

SEQ ID NO: 103808 - RNA, 19 nt, Homo sapiens
  misc_RNA (1)...(19): siRNA sense strand
ucaauucauacgcgggaua

SEQ ID NO: 103809 - RNA, 19 nt, Homo sapiens
  misc_RNA (1)...(19): siRNA sense strand
gcugcaaugcugucuacaa

SEQ ID NO: 103810 - RNA, 19 nt, Homo sapiens
  misc_RNA (1)...(19): siRNA sense strand
uuucaacggagguacuaua

SEQ ID NO: 103811 - RNA, 19 nt, Homo sapiens
  misc_RNA (1)...(19): siRNA sense strand
gcugacaaagauuauugaa

SEQ ID NO: 103812 - RNA, 19 nt, Homo sapiens
  misc_RNA (1)...(19): siRNA sense strand
gauuuucgcccuacguuuu

SEQ ID NO: 103813 - RNA, 19 nt, Homo sapiens
  misc_RNA (1)...(19): siRNA sense strand
uggacuugaugaagaagga

SEQ ID NO: 103814 - RNA, 19 nt, Homo sapiens
  misc_RNA (1)...(19): siRNA sense strand
cggcugagagagaugugua

SEQ ID NO: 103815 - RNA, 19 nt, Homo sapiens
  misc_RNA (1)...(19): siRNA sense strand
caacaucucucgcauuaug

SEQ ID NO: 103816 - RNA, 19 nt, Homo sapiens
  misc_RNA (1)...(19): siRNA sense strand
cgcaacaucucucgcauua

SEQ ID NO: 103817 - RNA, 19 nt, Homo sapiens
  misc_RNA (1)...(19): siRNA sense strand
gagagagcuuccucgguua

SEQ ID NO: 103818 - RNA, 19 nt, Homo sapiens
  misc_RNA (1)...(19): siRNA sense strand
gaucaguggcuuugaauga

SEQ ID NO: 103819 - RNA, 19 nt, Homo sapiens
  misc_RNA (1)...(19): siRNA sense strand
ggagauggacacagcuaua

SEQ ID NO: 103820 - RNA, 19 nt, Homo sapiens
  misc_RNA (1)...(19): siRNA sense strand
gagaccaacugggauauug

SEQ ID NO: 103821 - RNA, 19 nt, Homo sapiens
  misc_RNA (1)...(19): siRNA sense strand
ugaaauagagggaccauug

SEQ ID NO: 103822 - RNA, 19 nt, Homo sapiens
  misc_RNA (1)...(19): siRNA sense strand
acgcugauuuccaguauuu

SEQ ID NO: 103823 - RNA, 19 nt, Homo sapiens
  misc_RNA (1)...(19): siRNA sense strand
gaaauagagggaccauugu

SEQ ID NO: 103824 - RNA, 19 nt, Homo sapiens
  misc_RNA (1)...(19): siRNA sense strand
cuagagcuauucauucaug

SEQ ID NO: 103825 - RNA, 19 nt, Homo sapiens
  misc_RNA (1)...(19): siRNA sense strand
gcaugcgagugcuguacua

SEQ ID NO: 103826 - RNA, 19 nt, Homo sapiens
  misc_RNA (1)...(19): siRNA sense strand
ggaccauugucuacagaga

SEQ ID NO: 103827 - RNA, 19 nt, Homo sapiens
  misc_RNA (1)...(19): siRNA sense strand
caugaucaguggcuuugaa

SEQ ID NO: 103828 - RNA, 19 nt, Homo sapiens
  misc_RNA (1)...(19): siRNA sense strand
gccagauggugauugauga

SEQ ID NO: 103829 - RNA, 19 nt, Homo sapiens
  misc_RNA (1)...(19): siRNA sense strand
gagaugcccguucuuacaa

SEQ ID NO: 103830 - RNA, 19 nt, Homo sapiens
  misc_RNA (1)...(19): siRNA sense strand
gauauugcccacaugauca

SEQ ID NO: 103831 - RNA, 19 nt, Homo sapiens
  misc_RNA (1)...(19): siRNA sense strand
gauccggcgucugcacuuu

SEQ ID NO: 103832 - RNA, 19 nt, Homo sapiens
  misc_RNA (1)...(19): siRNA sense strand
ggauauugcccacaugauc

SEQ ID NO: 103833 - RNA, 19 nt, Homo sapiens
  misc_RNA (1)...(19): siRNA sense strand
cuacgcugauuuccaguau

SEQ ID NO: 103834 - RNA, 19 nt, Homo sapiens
  misc_RNA (1)...(19): siRNA sense strand
acacagcuauaguccuaga

SEQ ID NO: 103835 - RNA, 19 nt, Homo sapiens
  misc_RNA (1)...(19): siRNA sense strand
acagagaccaacugggaua

SEQ ID NO: 103836 - RNA, 19 nt, Homo sapiens
  misc_RNA (1)...(19): siRNA sense strand
ggugauugccgcagacaug

SEQ ID NO: 103837 - RNA, 19 nt, Homo sapiens
  misc_RNA (1)...(19): siRNA sense strand
cgagaugcccguucuuaca

SEQ ID NO: 103838 - RNA, 19 nt, Homo sapiens
  misc_RNA (1)...(19): siRNA sense strand
gcugauuuccaguauuuga

SEQ ID NO: 103839 - RNA, 19 nt, Homo sapiens
  misc_RNA (1)...(19): siRNA sense strand
uccuagagcuauucauuca

SEQ ID NO: 103840 - RNA, 19 nt, Homo sapiens
  misc_RNA (1)...(19): siRNA sense strand
gagauggacacagcuauag

SEQ ID NO: 103841 - RNA, 19 nt, Homo sapiens
  misc_RNA (1)...(19): siRNA sense strand
gagggaccauugucuacag

SEQ ID NO: 103842 - RNA, 19 nt, Homo sapiens
  misc_RNA (1)...(19): siRNA sense strand
ccucaguccucggcguuaa

SEQ ID NO: 103843 - RNA, 19 nt, Homo sapiens
  misc_RNA (1)...(19): siRNA sense strand
cagacaugcugggauccua

SEQ ID NO: 103844 - RNA, 19 nt, Homo sapiens
  misc_RNA (1)...(19): siRNA sense strand
ggccagauggugauugaug

SEQ ID NO: 103845 - RNA, 19 nt, Homo sapiens
  misc_RNA (1)...(19): siRNA sense strand
ggugauugaugaggagcuu

SEQ ID NO: 103846 - RNA, 19 nt, Homo sapiens
  misc_RNA (1)...(19): siRNA sense strand
cuaccgagaugcccguucu

SEQ ID NO: 103847 - RNA, 19 nt, Homo sapiens
  misc_RNA (1)...(19): siRNA sense strand
gauggacacagcuauaguc

SEQ ID NO: 103848 - RNA, 19 nt, Homo sapiens
  misc_RNA (1)...(19): siRNA sense strand
gugcuguacuaccgagaug

SEQ ID NO: 103849 - RNA, 19 nt, Homo sapiens
  misc_RNA (1)...(19): siRNA sense strand
ucggccagauggugauuga

SEQ ID NO: 103850 - RNA, 19 nt, Homo sapiens
  misc_RNA (1)...(19): siRNA sense strand
ucuuacaaccgguuucaaa

SEQ ID NO: 103851 - RNA, 19 nt, Homo sapiens
  misc_RNA (1)...(19): siRNA sense strand
cggaggcuaugcugaugga

SEQ ID NO: 103852 - RNA, 19 nt, Homo sapiens
  misc_RNA (1)...(19): siRNA sense strand
caucggaggcuaugcugau

SEQ ID NO: 103853 - RNA, 19 nt, Homo sapiens
  misc_RNA (1)...(19): siRNA sense strand
gcaaguucucggccagaug

SEQ ID NO: 103854 - RNA, 19 nt, Homo sapiens
  misc_RNA (1)...(19): siRNA sense strand
caaucacgcggacccagaa

SEQ ID NO: 103855 - RNA, 19 nt, Homo sapiens
  misc_RNA (1)...(19): siRNA sense strand
gagcuuccucgguuaugug

SEQ ID NO: 103856 - RNA, 19 nt, Homo sapiens
  misc_RNA (1)...(19): siRNA sense strand
caugcuugguguagccuau

SEQ ID NO: 103857 - RNA, 19 nt, Homo sapiens
  misc_RNA (1)...(19): siRNA sense strand
gcacuuuacagagguccaa

SEQ ID NO: 103858 - RNA, 19 nt, Homo sapiens
  misc_RNA (1)...(19): siRNA sense strand
ucuaugagcuucgaaauaa

SEQ ID NO: 103859 - RNA, 19 nt, Homo sapiens
  misc_RNA (1)...(19): siRNA sense strand
cuacagagaugccuacuca

SEQ ID NO: 103860 - RNA, 19 nt, Homo sapiens
  misc_RNA (1)...(19): siRNA sense strand
ugaagaaggugauagagau

SEQ ID NO: 103861 - RNA, 19 nt, Homo sapiens
  misc_RNA (1)...(19): siRNA sense strand
ccaacaugguguaucagua

SEQ ID NO: 103862 - RNA, 19 nt, Homo sapiens
  misc_RNA (1)...(19): siRNA sense strand
gaucaacccauaccugcua

SEQ ID NO: 103863 - RNA, 19 nt, Homo sapiens
  misc_RNA (1)...(19): siRNA sense strand
gaagagccaggaaucgaaa

SEQ ID NO: 103864 - RNA, 19 nt, Homo sapiens
  misc_RNA (1)...(19): siRNA sense strand
caaccacccuggccuucaa

SEQ ID NO: 103865 - RNA, 19 nt, Homo sapiens
  misc_RNA (1)...(19): siRNA sense strand
ccaaacugcuugccaacau

SEQ ID NO: 103866 - RNA, 19 nt, Homo sapiens
  misc_RNA (1)...(19): siRNA sense strand
cgaaaugcuucauggaaca

SEQ ID NO: 103867 - RNA, 19 nt, Homo sapiens
  misc_RNA (1)...(19): siRNA sense strand
uguagcagcugccuccaaa

SEQ ID NO: 103868 - RNA, 19 nt, Homo sapiens
  misc_RNA (1)...(19): siRNA sense strand
gcuguuggcucggcaaugu

SEQ ID NO: 103869 - RNA, 19 nt, Homo sapiens
  misc_RNA (1)...(19): siRNA sense strand
guuccgccauggagucaua

SEQ ID NO: 103870 - RNA, 19 nt, Homo sapiens
  misc_RNA (1)...(19): siRNA sense strand
uggcugaucuacaugagaa

SEQ ID NO: 103871 - RNA, 19 nt, Homo sapiens
  misc_RNA (1)...(19): siRNA sense strand
gaagggaaccggauuucag

SEQ ID NO: 103872 - RNA, 19 nt, Homo sapiens
  misc_RNA (1)...(19): siRNA sense strand
caaacugcuugccaacaug

SEQ ID NO: 103873 - RNA, 19 nt, Homo sapiens
  misc_RNA (1)...(19): siRNA sense strand
gcucggcaaugucgaaucu

SEQ ID NO: 103874 - RNA, 19 nt, Homo sapiens
  misc_RNA (1)...(19): siRNA sense strand
caagccaccuacagagaug

SEQ ID NO: 103875 - RNA, 19 nt, Homo sapiens
  misc_RNA (1)...(19): siRNA sense strand
ggcaaugucgaaucuauga

SEQ ID NO: 103876 - RNA, 19 nt, Homo sapiens
  misc_RNA (1)...(19): siRNA sense strand
gaaucuaugagcuucgaaa

SEQ ID NO: 103877 - RNA, 19 nt, Homo sapiens
  misc_RNA (1)...(19): siRNA sense strand
ucuacuacguggacaguga

SEQ ID NO: 103878 - RNA, 19 nt, Homo sapiens
  misc_RNA (1)...(19): siRNA sense strand
gaagaaggugauagagauc

SEQ ID NO: 103879 - RNA, 19 nt, Homo sapiens
  misc_RNA (1)...(19): siRNA sense strand
caacaugguguaucaguac

SEQ ID NO: 103880 - RNA, 19 nt, Homo sapiens
  misc_RNA (1)...(19): siRNA sense strand
gugaagaaggugauagaga

SEQ ID NO: 103881 - RNA, 19 nt, Homo sapiens
  misc_RNA (1)...(19): siRNA sense strand
uaaggaacgcaucucugua

SEQ ID NO: 103882 - RNA, 19 nt, Homo sapiens
  misc_RNA (1)...(19): siRNA sense strand
ggaaucgaaaugcuucaug

SEQ ID NO: 103883 - RNA, 19 nt, Homo sapiens
  misc_RNA (1)...(19): siRNA sense strand
ggauccgagucuccaguga

SEQ ID NO: 103884 - RNA, 19 nt, Homo sapiens
  misc_RNA (1)...(19): siRNA sense strand
uacagcgggugcuuacauu

SEQ ID NO: 103885 - RNA, 19 nt, Homo sapiens
  misc_RNA (1)...(19): siRNA sense strand
gaucuacaugagaaguaua

SEQ ID NO: 103886 - RNA, 19 nt, Homo sapiens
  misc_RNA (1)...(19): siRNA sense strand
cuaccaagccaccuacaga

SEQ ID NO: 103887 - RNA, 19 nt, Homo sapiens
  misc_RNA (1)...(19): siRNA sense strand
ggagcaggccuaugaucug

SEQ ID NO: 103888 - RNA, 19 nt, Homo sapiens
  misc_RNA (1)...(19): siRNA sense strand
ccagggagucucagugaug

SEQ ID NO: 103889 - RNA, 19 nt, Homo sapiens
  misc_RNA (1)...(19): siRNA sense strand
gaaaugcuucauggaacaa

SEQ ID NO: 103890 - RNA, 19 nt, Homo sapiens
  misc_RNA (1)...(19): siRNA sense strand
gaucggggcuauuccuaug

SEQ ID NO: 103891 - RNA, 19 nt, Homo sapiens
  misc_RNA (1)...(19): siRNA sense strand
ggaaguggagcaggccuau

SEQ ID NO: 103892 - RNA, 19 nt, Homo sapiens
  misc_RNA (1)...(19): siRNA sense strand
gugacaauguggcugaucu

SEQ ID NO: 103893 - RNA, 19 nt, Homo sapiens
  misc_RNA (1)...(19): siRNA sense strand
gggcuacagcgggugcuua

SEQ ID NO: 103894 - RNA, 19 nt, Homo sapiens
  misc_RNA (1)...(19): siRNA sense strand
ugaucuacaugagaaguau

SEQ ID NO: 103895 - RNA, 19 nt, Homo sapiens
  misc_RNA (1)...(19): siRNA sense strand
ucggcaaugucgaaucuau

SEQ ID NO: 103896 - RNA, 19 nt, Homo sapiens
  misc_RNA (1)...(19): siRNA sense strand
cgaaauaaggaacgcaucu

SEQ ID NO: 103897 - RNA, 19 nt, Homo sapiens
  misc_RNA (1)...(19): siRNA sense strand
aaguggagcaggccuauga

SEQ ID NO: 103898 - RNA, 19 nt, Homo sapiens
  misc_RNA (1)...(19): siRNA sense strand
gcccuggccucuacuacgu

SEQ ID NO: 103899 - RNA, 19 nt, Homo sapiens
  misc_RNA (1)...(19): siRNA sense strand
uugccaacaugguguauca

SEQ ID NO: 103900 - RNA, 19 nt, Homo sapiens
  misc_RNA (1)...(19): siRNA sense strand
gaaauaaggaacgcaucuc

SEQ ID NO: 103901 - RNA, 19 nt, Homo sapiens
  misc_RNA (1)...(19): siRNA sense strand
agaagagccaggaaucgaa

SEQ ID NO: 103902 - RNA, 19 nt, Homo sapiens
  misc_RNA (1)...(19): siRNA sense strand
auaaggaacgcaucucugu

SEQ ID NO: 103903 - RNA, 19 nt, Homo sapiens
  misc_RNA (1)...(19): siRNA sense strand
cagaagagccaggaaucga

SEQ ID NO: 103904 - RNA, 19 nt, Homo sapiens
  misc_RNA (1)...(19): siRNA sense strand
ccaagccaccuacagagau

SEQ ID NO: 103905 - RNA, 19 nt, Homo sapiens
  misc_RNA (1)...(19): siRNA sense strand
guccagggagucucaguga

SEQ ID NO: 103906 - RNA, 19 nt, Homo sapiens
  misc_RNA (1)...(19): siRNA sense strand
ugacaauguggcugaucua

SEQ ID NO: 103907 - RNA, 19 nt, Homo sapiens
  misc_RNA (1)...(19): siRNA sense strand
cgccauggagucauaguug

SEQ ID NO: 103908 - RNA, 19 nt, Homo sapiens
  misc_RNA (1)...(19): siRNA sense strand
ggaacgcaucucuguagca

SEQ ID NO: 103909 - RNA, 19 nt, Homo sapiens
  misc_RNA (1)...(19): siRNA sense strand
aaggaacgcaucucuguag

SEQ ID NO: 103910 - RNA, 19 nt, Homo sapiens
  misc_RNA (1)...(19): siRNA sense strand
cccagacggugaagaaggu

SEQ ID NO: 103911 - RNA, 19 nt, Homo sapiens
  misc_RNA (1)...(19): siRNA sense strand
cuacaugagaaguauagug

SEQ ID NO: 103912 - RNA, 19 nt, Homo sapiens
  misc_RNA (1)...(19): siRNA sense strand
cacccuggccuucaaguuc

SEQ ID NO: 103913 - RNA, 19 nt, Homo sapiens
  misc_RNA (1)...(19): siRNA sense strand
gguucuggcucuguguaug

SEQ ID NO: 103914 - RNA, 19 nt, Homo sapiens
  misc_RNA (1)...(19): siRNA sense strand
cuacagcgggugcuuacau

SEQ ID NO: 103915 - RNA, 19 nt, Homo sapiens
  misc_RNA (1)...(19): siRNA sense strand
cuggcucuguguaugcaua

SEQ ID NO: 103916 - RNA, 19 nt, Homo sapiens
  misc_RNA (1)...(19): siRNA sense strand
gagaccagauacccaaauu

SEQ ID NO: 103917 - RNA, 19 nt, Homo sapiens
  misc_RNA (1)...(19): siRNA sense strand
ggaagagugucugcaauuc

SEQ ID NO: 103918 - RNA, 19 nt, Homo sapiens
  misc_RNA (1)...(19): siRNA sense strand
ggagauguguuaccgauac

SEQ ID NO: 103919 - RNA, 19 nt, Homo sapiens
  misc_RNA (1)...(19): siRNA sense strand
gggaaggcaugaccaagga

SEQ ID NO: 103920 - RNA, 19 nt, Homo sapiens
  misc_RNA (1)...(19): siRNA sense strand
gcaauucacugccaaugcu

SEQ ID NO: 103921 - RNA, 19 nt, Homo sapiens
  misc_RNA (1)...(19): siRNA sense strand
gaacaaccacuggguccua

SEQ ID NO: 103922 - RNA, 19 nt, Homo sapiens
  misc_RNA (1)...(19): siRNA sense strand
ccacagcauugaacugaau

SEQ ID NO: 103923 - RNA, 19 nt, Homo sapiens
  misc_RNA (1)...(19): siRNA sense strand
gaagagugucugcaauuca

SEQ ID NO: 103924 - RNA, 19 nt, Homo sapiens
  misc_RNA (1)...(19): siRNA sense strand
uaucauggccgugcaguuu

SEQ ID NO: 103925 - RNA, 19 nt, Homo sapiens
  misc_RNA (1)...(19): siRNA sense strand
gagggcagguguacucagu

SEQ ID NO: 103926 - RNA, 19 nt, Homo sapiens
  misc_RNA (1)...(19): siRNA sense strand
cugacaagcugacaccuau

SEQ ID NO: 103927 - RNA, 19 nt, Homo sapiens
  misc_RNA (1)...(19): siRNA sense strand
caaggaagagugucugcaa

SEQ ID NO: 103928 - RNA, 19 nt, Homo sapiens
  misc_RNA (1)...(19): siRNA sense strand
ugggaaagccgagaaguuu

SEQ ID NO: 103929 - RNA, 19 nt, Homo sapiens
  misc_RNA (1)...(19): siRNA sense strand
ccaaucgagugacugacaa

SEQ ID NO: 103930 - RNA, 19 nt, Homo sapiens
  misc_RNA (1)...(19): siRNA sense strand
guagagcggcaaguacuuu

SEQ ID NO: 103931 - RNA, 19 nt, Homo sapiens
  misc_RNA (1)...(19): siRNA sense strand
gacaagcugacaccuauuc

SEQ ID NO: 103932 - RNA, 19 nt, Homo sapiens
  misc_RNA (1)...(19): siRNA sense strand
ucuuuaaggagauguguua

SEQ ID NO: 103933 - RNA, 19 nt, Homo sapiens
  misc_RNA (1)...(19): siRNA sense strand
ucaccuaccagcucgguuu

SEQ ID NO: 103934 - RNA, 19 nt, Homo sapiens
  misc_RNA (1)...(19): siRNA sense strand
gguccuacaucgccaaucg

SEQ ID NO: 103935 - RNA, 19 nt, Homo sapiens
  misc_RNA (1)...(19): siRNA sense strand
ucauggccgugcaguuuga

SEQ ID NO: 103936 - RNA, 19 nt, Homo sapiens
  misc_RNA (1)...(19): siRNA sense strand
gcaguccuuugccauugga

SEQ ID NO: 103937 - RNA, 19 nt, Homo sapiens
  misc_RNA (1)...(19): siRNA sense strand
uagcugaugcugucaccua

SEQ ID NO: 103938 - RNA, 19 nt, Homo sapiens
  misc_RNA (1)...(19): siRNA sense strand
ugccaaugcucucgcuuug

SEQ ID NO: 103939 - RNA, 19 nt, Homo sapiens
  misc_RNA (1)...(19): siRNA sense strand
gaccagauacccaaauucg

SEQ ID NO: 103940 - RNA, 19 nt, Homo sapiens
  misc_RNA (1)...(19): siRNA sense strand
cgggagcuccuacaucuau

SEQ ID NO: 103941 - RNA, 19 nt, Homo sapiens
  misc_RNA (1)...(19): siRNA sense strand
ggagaccagauacccaaau

SEQ ID NO: 103942 - RNA, 19 nt, Homo sapiens
  misc_RNA (1)...(19): siRNA sense strand
aaggaagagugucugcaau

SEQ ID NO: 103943 - RNA, 19 nt, Homo sapiens
  misc_RNA (1)...(19): siRNA sense strand
ccuauucacgaccgcauuu

SEQ ID NO: 103944 - RNA, 19 nt, Homo sapiens
  misc_RNA (1)...(19): siRNA sense strand
aggaagagugucugcaauu

SEQ ID NO: 103945 - RNA, 19 nt, Homo sapiens
  misc_RNA (1)...(19): siRNA sense strand
uccgggagcuccuacaucu

SEQ ID NO: 103946 - RNA, 19 nt, Homo sapiens
  misc_RNA (1)...(19): siRNA sense strand
ccacugggaccacuaucau

SEQ ID NO: 103947 - RNA, 19 nt, Homo sapiens
  misc_RNA (1)...(19): siRNA sense strand
cugggacccucaagaagga

SEQ ID NO: 103948 - RNA, 19 nt, Homo sapiens
  misc_RNA (1)...(19): siRNA sense strand
ggaaggcaugaccaaggaa

SEQ ID NO: 103949 - RNA, 19 nt, Homo sapiens
  misc_RNA (1)...(19): siRNA sense strand
gcugauacccaggcaguag

SEQ ID NO: 103950 - RNA, 19 nt, Homo sapiens
  misc_RNA (1)...(19): siRNA sense strand
gguagagcggcaaguacuu

SEQ ID NO: 103951 - RNA, 19 nt, Homo sapiens
  misc_RNA (1)...(19): siRNA sense strand
gggagcuccuacaucuaug

SEQ ID NO: 103952 - RNA, 19 nt, Homo sapiens
  misc_RNA (1)...(19): siRNA sense strand
gccaaucgagugacugaca

SEQ ID NO: 103953 - RNA, 19 nt, Homo sapiens
  misc_RNA (1)...(19): siRNA sense strand
auucgccguugccacuuua

SEQ ID NO: 103954 - RNA, 19 nt, Homo sapiens
  misc_RNA (1)...(19): siRNA sense strand
gcuauguugaugcuaccua

SEQ ID NO: 103955 - RNA, 19 nt, Homo sapiens
  misc_RNA (1)...(19): siRNA sense strand
caacccagcucauuucuuc

SEQ ID NO: 103956 - RNA, 19 nt, Homo sapiens
  misc_RNA (1)...(19): siRNA sense strand
gaagaaacaguccaaacaa

SEQ ID NO: 103957 - RNA, 19 nt, Homo sapiens
  misc_RNA (1)...(19): siRNA sense strand
ggaagaaacaguccaaaca

SEQ ID NO: 103958 - RNA, 19 nt, Homo sapiens
  misc_RNA (1)...(19): siRNA sense strand
caucgcagcuggcaucuuc

SEQ ID NO: 103959 - RNA, 19 nt, Homo sapiens
  misc_RNA (1)...(19): siRNA sense strand
cacuucauaucuccuaaua

SEQ ID NO: 103960 - RNA, 19 nt, Homo sapiens
  misc_RNA (1)...(19): siRNA sense strand
agcaauggcuguauuugaa

SEQ ID NO: 103961 - RNA, 19 nt, Homo sapiens
  misc_RNA (1)...(19): siRNA sense strand
cagcaucuauccucaugga

SEQ ID NO: 103962 - RNA, 19 nt, Homo sapiens
  misc_RNA (1)...(19): siRNA sense strand
acacagugcccaacaagaa

SEQ ID NO: 103963 - RNA, 19 nt, Homo sapiens
  misc_RNA (1)...(19): siRNA sense strand
aagaaacaguccaaacaau

SEQ ID NO: 103964 - RNA, 19 nt, Homo sapiens
  misc_RNA (1)...(19): siRNA sense strand
ggacagcugcagacacaga

SEQ ID NO: 103965 - RNA, 19 nt, Homo sapiens
  misc_RNA (1)...(19): siRNA sense strand
agauugaggugcuggaaga

SEQ ID NO: 103966 - RNA, 19 nt, Homo sapiens
  misc_RNA (1)...(19): siRNA sense strand
ccgcaggaaugccgucuug

SEQ ID NO: 103967 - RNA, 19 nt, Homo sapiens
  misc_RNA (1)...(19): siRNA sense strand
caauggcuguauuugaaga

SEQ ID NO: 103968 - RNA, 19 nt, Homo sapiens
  misc_RNA (1)...(19): siRNA sense strand
ggaggcuucucuuuugaua

SEQ ID NO: 103969 - RNA, 19 nt, Homo sapiens
  misc_RNA (1)...(19): siRNA sense strand
gaccucaccucuacagcau

SEQ ID NO: 103970 - RNA, 19 nt, Homo sapiens
  misc_RNA (1)...(19): siRNA sense strand
gcaggaaugccgucuugga

SEQ ID NO: 103971 - RNA, 19 nt, Homo sapiens
  misc_RNA (1)...(19): siRNA sense strand
guaucaagguuacauuggu

SEQ ID NO: 103972 - RNA, 19 nt, Homo sapiens
  misc_RNA (1)...(19): siRNA sense strand
ugacaacccagcucauuuc

SEQ ID NO: 103973 - RNA, 19 nt, Homo sapiens
  misc_RNA (1)...(19): siRNA sense strand
ugggacagcugcagacaca

SEQ ID NO: 103974 - RNA, 19 nt, Homo sapiens
  misc_RNA (1)...(19): siRNA sense strand
cagcuggcaucuucaacga

SEQ ID NO: 103975 - RNA, 19 nt, Homo sapiens
  misc_RNA (1)...(19): siRNA sense strand
ggaggaggaagccaagaau

SEQ ID NO: 103976 - RNA, 19 nt, Homo sapiens
  misc_RNA (1)...(19): siRNA sense strand
gauacaagagcaacugaag

SEQ ID NO: 103977 - RNA, 19 nt, Homo sapiens
  misc_RNA (1)...(19): siRNA sense strand
cauacacagugcccaacaa

SEQ ID NO: 103978 - RNA, 19 nt, Homo sapiens
  misc_RNA (1)...(19): siRNA sense strand
caggaaugccgucuuggaa

SEQ ID NO: 103979 - RNA, 19 nt, Homo sapiens
  misc_RNA (1)...(19): siRNA sense strand
ggaggaagccaagaaucug

SEQ ID NO: 103980 - RNA, 19 nt, Homo sapiens
  misc_RNA (1)...(19): siRNA sense strand
uggcuguauuugaagauaa

SEQ ID NO: 103981 - RNA, 19 nt, Homo sapiens
  misc_RNA (1)...(19): siRNA sense strand
uacagcaucuauccucaug

SEQ ID NO: 103982 - RNA, 19 nt, Homo sapiens
  misc_RNA (1)...(19): siRNA sense strand
ggauacaagcuuccaaagg

SEQ ID NO: 103983 - RNA, 19 nt, Homo sapiens
  misc_RNA (1)...(19): siRNA sense strand
gcagaugcuuuucagguau

SEQ ID NO: 103984 - RNA, 19 nt, Homo sapiens
  misc_RNA (1)...(19): siRNA sense strand
gcagauacaagagcaacug

SEQ ID NO: 103985 - RNA, 19 nt, Homo sapiens
  misc_RNA (1)...(19): siRNA sense strand
ggaagccgauuuugcaaag

SEQ ID NO: 103986 - RNA, 19 nt, Homo sapiens
  misc_RNA (1)...(19): siRNA sense strand
guuggaggcuucucuuuug

SEQ ID NO: 103987 - RNA, 19 nt, Homo sapiens
  misc_RNA (1)...(19): siRNA sense strand
ggucuauaaggauggcaua

SEQ ID NO: 103988 - RNA, 19 nt, Homo sapiens
  misc_RNA (1)...(19): siRNA sense strand
gcaauggcuguauuugaag

SEQ ID NO: 103989 - RNA, 19 nt, Homo sapiens
  misc_RNA (1)...(19): siRNA sense strand
gcagacacagacaugacaa

SEQ ID NO: 103990 - RNA, 19 nt, Homo sapiens
  misc_RNA (1)...(19): siRNA sense strand
uuacuggaccucaccucua

SEQ ID NO: 103991 - RNA, 19 nt, Homo sapiens
  misc_RNA (1)...(19): siRNA sense strand
ggagauugaggugcuggaa

SEQ ID NO: 103992 - RNA, 19 nt, Homo sapiens
  misc_RNA (1)...(19): siRNA sense strand
gaggaggaagccaagaauc

SEQ ID NO: 103993 - RNA, 19 nt, Homo sapiens
  misc_RNA (1)...(19): siRNA sense strand
ccucaccucuacagcaucu

SEQ ID NO: 103994 - RNA, 19 nt, Homo sapiens
  misc_RNA (1)...(19): siRNA sense strand
aaggauggcauaguucuug

SEQ ID NO: 103995 - RNA, 19 nt, Homo sapiens
  misc_RNA (1)...(19): siRNA sense strand
ggcuguauuugaagauaag

SEQ ID NO: 103996 - RNA, 19 nt, Homo sapiens
  misc_RNA (1)...(19): siRNA sense strand
cagauacaagagcaacuga

SEQ ID NO: 103997 - RNA, 19 nt, Homo sapiens
  misc_RNA (1)...(19): siRNA sense strand
gcuccggaagcaacauuga

SEQ ID NO: 103998 - RNA, 19 nt, Homo sapiens
  misc_RNA (1)...(19): siRNA sense strand
gacaagagcugcgagaaga

SEQ ID NO: 103999 - RNA, 19 nt, Homo sapiens
  misc_RNA (1)...(19): siRNA sense strand
gccagacgcucuucaggua

SEQ ID NO: 104000 - RNA, 19 nt, Homo sapiens
  misc_RNA (1)...(19): siRNA sense strand
ccacagagcccgugaagag

SEQ ID NO: 104001 - RNA, 19 nt, Homo sapiens
  misc_RNA (1)...(19): siRNA sense strand
gagaacugccaaagaaaug

SEQ ID NO: 104002 - RNA, 19 nt, Homo sapiens
  misc_RNA (1)...(19): siRNA sense strand
ggacaagagcugcgagaag

SEQ ID NO: 104003 - RNA, 19 nt, Homo sapiens
  misc_RNA (1)...(19): siRNA sense strand
uucgagaacugccaaagaa

SEQ ID NO: 104004 - RNA, 19 nt, Homo sapiens
  misc_RNA (1)...(19): siRNA sense strand
gaugguggcguccaagaug

SEQ ID NO: 104005 - RNA, 19 nt, Homo sapiens
  misc_RNA (1)...(19): siRNA sense strand
cgagaacugccaaagaaau

SEQ ID NO: 104006 - RNA, 19 nt, Homo sapiens
  misc_RNA (1)...(19): siRNA sense strand
gcaauguggacgcaugugu

SEQ ID NO: 104007 - RNA, 19 nt, Homo sapiens
  misc_RNA (1)...(19): siRNA sense strand
ugacuggaccgcagcucua

SEQ ID NO: 104008 - RNA, 19 nt, Homo sapiens
  misc_RNA (1)...(19): siRNA sense strand
aggaaacugugcaggcuau

SEQ ID NO: 104009 - RNA, 19 nt, Homo sapiens
  misc_RNA (1)...(19): siRNA sense strand
ccgauacgcgagccacuaa

SEQ ID NO: 104010 - RNA, 19 nt, Homo sapiens
  misc_RNA (1)...(19): siRNA sense strand
gaacugccaaagaaaugca

SEQ ID NO: 104011 - RNA, 19 nt, Homo sapiens
  misc_RNA (1)...(19): siRNA sense strand
guccugacccagacaguga

SEQ ID NO: 104012 - RNA, 19 nt, Homo sapiens
  misc_RNA (1)...(19): siRNA sense strand
aaacugugcaggcuaugga

SEQ ID NO: 104013 - RNA, 19 nt, Homo sapiens
  misc_RNA (1)...(19): siRNA sense strand
caagagcugcgagaagauc

SEQ ID NO: 104014 - RNA, 19 nt, Homo sapiens
  misc_RNA (1)...(19): siRNA sense strand
ggucuggccgcuaccacuu

SEQ ID NO: 104015 - RNA, 19 nt, Homo sapiens
  misc_RNA (1)...(19): siRNA sense strand
ggaugguggcguccaagau

SEQ ID NO: 104016 - RNA, 19 nt, Homo sapiens
  misc_RNA (1)...(19): siRNA sense strand
gaaacugugcaggcuaugg

SEQ ID NO: 104017 - RNA, 19 nt, Homo sapiens
  misc_RNA (1)...(19): siRNA sense strand
gaacguagaaugaaaguaa

SEQ ID NO: 104018 - RNA, 19 nt, Homo sapiens
  misc_RNA (1)...(19): siRNA sense strand
gaggaagaauucauuagaa

SEQ ID NO: 104019 - RNA, 19 nt, Homo sapiens
  misc_RNA (1)...(19): siRNA sense strand
ggaugacgcuggcugauga

SEQ ID NO: 104020 - RNA, 19 nt, Homo sapiens
  misc_RNA (1)...(19): siRNA sense strand
ggagaccuaugcagauauu

SEQ ID NO: 104021 - RNA, 19 nt, Homo sapiens
  misc_RNA (1)...(19): siRNA sense strand
gaaauucagcgaacaaugu

SEQ ID NO: 104022 - RNA, 19 nt, Homo sapiens
  misc_RNA (1)...(19): siRNA sense strand
ucacccauccugaauauua

SEQ ID NO: 104023 - RNA, 19 nt, Homo sapiens
  misc_RNA (1)...(19): siRNA sense strand
gugguuggcucugaacuua

SEQ ID NO: 104024 - RNA, 19 nt, Homo sapiens
  misc_RNA (1)...(19): siRNA sense strand
gcaagaaggaugacaagga

SEQ ID NO: 104025 - RNA, 19 nt, Homo sapiens
  misc_RNA (1)...(19): siRNA sense strand
ggaggaagaauucauuaga

SEQ ID NO: 104026 - RNA, 19 nt, Homo sapiens
  misc_RNA (1)...(19): siRNA sense strand
gacgcuggcugaugaugua

SEQ ID NO: 104027 - RNA, 19 nt, Homo sapiens
  misc_RNA (1)...(19): siRNA sense strand
caggagaccuaugcagaua

SEQ ID NO: 104028 - RNA, 19 nt, Homo sapiens
  misc_RNA (1)...(19): siRNA sense strand
guaggaaccuuggaagaga

SEQ ID NO: 104029 - RNA, 19 nt, Homo sapiens
  misc_RNA (1)...(19): siRNA sense strand
gaaaucaggaacaaaugaa

SEQ ID NO: 104030 - RNA, 19 nt, Homo sapiens
  misc_RNA (1)...(19): siRNA sense strand
gaaauaugaaccuccugua

SEQ ID NO: 104031 - RNA, 19 nt, Homo sapiens
  misc_RNA (1)...(19): siRNA sense strand
cgucagcauucuuucauuu

SEQ ID NO: 104032 - RNA, 19 nt, Homo sapiens
  misc_RNA (1)...(19): siRNA sense strand
caaaccgaauagaaacuuu

SEQ ID NO: 104033 - RNA, 19 nt, Homo sapiens
  misc_RNA (1)...(19): siRNA sense strand
gguuggcucugaacuuauu

SEQ ID NO: 104034 - RNA, 19 nt, Homo sapiens
  misc_RNA (1)...(19): siRNA sense strand
gaaaguaacaaaugaagac

SEQ ID NO: 104035 - RNA, 19 nt, Homo sapiens
  misc_RNA (1)...(19): siRNA sense strand
gcaagaggaggaaagauca

SEQ ID NO: 104036 - RNA, 19 nt, Homo sapiens
  misc_RNA (1)...(19): siRNA sense strand
uaaggaaucuguggagcuu

SEQ ID NO: 104037 - RNA, 19 nt, Homo sapiens
  misc_RNA (1)...(19): siRNA sense strand
cagcauucuuucauuugua

SEQ ID NO: 104038 - RNA, 19 nt, Homo sapiens
  misc_RNA (1)...(19): siRNA sense strand
gaacacuacgucagcauuc

SEQ ID NO: 104039 - RNA, 19 nt, Homo sapiens
  misc_RNA (1)...(19): siRNA sense strand
aagagaacguagaaugaaa

SEQ ID NO: 104040 - RNA, 19 nt, Homo sapiens
  misc_RNA (1)...(19): siRNA sense strand
ccaguuggauggauuugau

SEQ ID NO: 104041 - RNA, 19 nt, Homo sapiens
  misc_RNA (1)...(19): siRNA sense strand
gaaccaguuggauggauuu

SEQ ID NO: 104042 - RNA, 19 nt, Homo sapiens
  misc_RNA (1)...(19): siRNA sense strand
guuccgaguugcugaagaa

SEQ ID NO: 104043 - RNA, 19 nt, Homo sapiens
  misc_RNA (1)...(19): siRNA sense strand
gaagagauggguauaaagc

SEQ ID NO: 104044 - RNA, 19 nt, Homo sapiens
  misc_RNA (1)...(19): siRNA sense strand
aaagauaugacuccaauuc

SEQ ID NO: 104045 - RNA, 19 nt, Homo sapiens
  misc_RNA (1)...(19): siRNA sense strand
agacaaggaucugcuggaa

SEQ ID NO: 104046 - RNA, 19 nt, Homo sapiens
  misc_RNA (1)...(19): siRNA sense strand
gcauugacaggaagauuga

SEQ ID NO: 104047 - RNA, 19 nt, Homo sapiens
  misc_RNA (1)...(19): siRNA sense strand
uaagagaacguagaaugaa

SEQ ID NO: 104048 - RNA, 19 nt, Homo sapiens
  misc_RNA (1)...(19): siRNA sense strand
ggacaaccaaauucaggaa

SEQ ID NO: 104049 - RNA, 19 nt, Homo sapiens
  misc_RNA (1)...(19): siRNA sense strand
gccacaaaccgaauagaaa

SEQ ID NO: 104050 - RNA, 19 nt, Homo sapiens
  misc_RNA (1)...(19): siRNA sense strand
uuacugaaguuagagagaa

SEQ ID NO: 104051 - RNA, 19 nt, Homo sapiens
  misc_RNA (1)...(19): siRNA sense strand
gaaccuccuguaccaacua

SEQ ID NO: 104052 - RNA, 19 nt, Homo sapiens
  misc_RNA (1)...(19): siRNA sense strand
gagagaaauucagcgaaca

SEQ ID NO: 104053 - RNA, 19 nt, Homo sapiens
  misc_RNA (1)...(19): siRNA sense strand
augaagagauggguauaaa

SEQ ID NO: 104054 - RNA, 19 nt, Homo sapiens
  misc_RNA (1)...(19): siRNA sense strand
uuaagagaacguagaauga

SEQ ID NO: 104055 - RNA, 19 nt, Homo sapiens
  misc_RNA (1)...(19): siRNA sense strand
gugcugacaucaaggcaau

SEQ ID NO: 104056 - RNA, 19 nt, Homo sapiens
  misc_RNA (1)...(19): siRNA sense strand
ugaaccaguuggauggauu

SEQ ID NO: 104057 - RNA, 19 nt, Homo sapiens
  misc_RNA (1)...(19): siRNA sense strand
cauuagaaaucaggaacaa

SEQ ID NO: 104058 - RNA, 19 nt, Homo sapiens
  misc_RNA (1)...(19): siRNA sense strand
ucucacccauccugaauau

SEQ ID NO: 104059 - RNA, 19 nt, Homo sapiens
  misc_RNA (1)...(19): siRNA sense strand
ggcuaaagaugaccucucu

SEQ ID NO: 104060 - RNA, 19 nt, Homo sapiens
  misc_RNA (1)...(19): siRNA sense strand
ccaaagcaguagcaaacca

SEQ ID NO: 104061 - RNA, 19 nt, Homo sapiens
  misc_RNA (1)...(19): siRNA sense strand
ggccacaaaccgaauagaa

SEQ ID NO: 104062 - RNA, 19 nt, Homo sapiens
  misc_RNA (1)...(19): siRNA sense strand
acaaccaaauucaggaaau

SEQ ID NO: 104063 - RNA, 19 nt, Homo sapiens
  misc_RNA (1)...(19): siRNA sense strand
ugaugaaauugacgccauu

SEQ ID NO: 104064 - RNA, 19 nt, Homo sapiens
  misc_RNA (1)...(19): siRNA sense strand
caccguccaucguguuuau

SEQ ID NO: 104065 - RNA, 19 nt, Homo sapiens
  misc_RNA (1)...(19): siRNA sense strand
agaaaucaggaacaaauga

SEQ ID NO: 104066 - RNA, 19 nt, Homo sapiens
  misc_RNA (1)...(19): siRNA sense strand
uaucagaccaggccgcauu

SEQ ID NO: 104067 - RNA, 19 nt, Homo sapiens
  misc_RNA (1)...(19): siRNA sense strand
ggaugacaaggacaagaaa

SEQ ID NO: 104068 - RNA, 19 nt, Homo sapiens
  misc_RNA (1)...(19): siRNA sense strand
ucugauggccuuaagagaa

SEQ ID NO: 104069 - RNA, 19 nt, Homo sapiens
  misc_RNA (1)...(19): siRNA sense strand
ggauccagcacuuaucaga

SEQ ID NO: 104070 - RNA, 19 nt, Homo sapiens
  misc_RNA (1)...(19): siRNA sense strand
agauaugacuccaauucug

SEQ ID NO: 104071 - RNA, 19 nt, Homo sapiens
  misc_RNA (1)...(19): siRNA sense strand
ucagcauucuuucauuugu

SEQ ID NO: 104072 - RNA, 19 nt, Homo sapiens
  misc_RNA (1)...(19): siRNA sense strand
ccgaguugcugaagaacau

SEQ ID NO: 104073 - RNA, 19 nt, Homo sapiens
  misc_RNA (1)...(19): siRNA sense strand
gguauaaagccuccuaagg

SEQ ID NO: 104074 - RNA, 19 nt, Homo sapiens
  misc_RNA (1)...(19): siRNA sense strand
ccacaaaccgaauagaaac

SEQ ID NO: 104075 - RNA, 19 nt, Homo sapiens
  misc_RNA (1)...(19): siRNA sense strand
caauucugguggugagaga

SEQ ID NO: 104076 - RNA, 19 nt, Homo sapiens
  misc_RNA (1)...(19): siRNA sense strand
cuuguuagccaaagcagua

SEQ ID NO: 104077 - RNA, 19 nt, Homo sapiens
  misc_RNA (1)...(19): siRNA sense strand
cacccauccugaauauuau

SEQ ID NO: 104078 - RNA, 19 nt, Homo sapiens
  misc_RNA (1)...(19): siRNA sense strand
caaagcaguagcaaaccaa

SEQ ID NO: 104079 - RNA, 19 nt, Homo sapiens
  misc_RNA (1)...(19): siRNA sense strand
gcaccguccaucguguuua

SEQ ID NO: 104080 - RNA, 19 nt, Homo sapiens
  misc_RNA (1)...(19): siRNA sense strand
cuuaagagaacguagaaug

SEQ ID NO: 104081 - RNA, 19 nt, Homo sapiens
  misc_RNA (1)...(19): siRNA sense strand
ggggagaugugaaaguuau

SEQ ID NO: 104082 - RNA, 19 nt, Homo sapiens
  misc_RNA (1)...(19): siRNA sense strand
cauggaggaagaauucauu

SEQ ID NO: 104083 - RNA, 19 nt, Homo sapiens
  misc_RNA (1)...(19): siRNA sense strand
gacaucaaggcaaucugua

SEQ ID NO: 104084 - RNA, 19 nt, Homo sapiens
  misc_RNA (1)...(19): siRNA sense strand
aaccaaaccucagccacuu

SEQ ID NO: 104085 - RNA, 19 nt, Homo sapiens
  misc_RNA (1)...(19): siRNA sense strand
ucucauggaggaagaauuc

SEQ ID NO: 104086 - RNA, 19 nt, Homo sapiens
  misc_RNA (1)...(19): siRNA sense strand
ugacaucaaggcaaucugu

SEQ ID NO: 104087 - RNA, 19 nt, Homo sapiens
  misc_RNA (1)...(19): siRNA sense strand
gagguggcaagaaggauga

SEQ ID NO: 104088 - RNA, 19 nt, Homo sapiens
  misc_RNA (1)...(19): siRNA sense strand
ggagaugugaaaguuauca

SEQ ID NO: 104089 - RNA, 19 nt, Homo sapiens
  misc_RNA (1)...(19): siRNA sense strand
ggaaagaucaaaaguggau

SEQ ID NO: 104090 - RNA, 19 nt, Homo sapiens
  misc_RNA (1)...(19): siRNA sense strand
gagaaauucagcgaacaau

SEQ ID NO: 104091 - RNA, 19 nt, Homo sapiens
  misc_RNA (1)...(19): siRNA sense strand
gacaaccaaauucaggaaa

SEQ ID NO: 104092 - RNA, 19 nt, Homo sapiens
  misc_RNA (1)...(19): siRNA sense strand
gcucgguccugcucaacca

SEQ ID NO: 104093 - RNA, 19 nt, Homo sapiens
  misc_RNA (1)...(19): siRNA sense strand
ccaggagaccuaugcagau

SEQ ID NO: 104094 - RNA, 19 nt, Homo sapiens
  misc_RNA (1)...(19): siRNA sense strand
aauagaaacuuuggaucca

SEQ ID NO: 104095 - RNA, 19 nt, Homo sapiens
  misc_RNA (1)...(19): siRNA sense strand
uuggauggauuugauucua

SEQ ID NO: 104096 - RNA, 19 nt, Homo sapiens
  misc_RNA (1)...(19): siRNA sense strand
ccaaaccucagccacuuuc

SEQ ID NO: 104097 - RNA, 19 nt, Homo sapiens
  misc_RNA (1)...(19): siRNA sense strand
uaugaagagauggguauaa

SEQ ID NO: 104098 - RNA, 19 nt, Homo sapiens
  misc_RNA (1)...(19): siRNA sense strand
gaccugaucauggcuaaag

SEQ ID NO: 104099 - RNA, 19 nt, Homo sapiens
  misc_RNA (1)...(19): siRNA sense strand
ucagagugguggucauggu

SEQ ID NO: 104100 - RNA, 19 nt, Homo sapiens
  misc_RNA (1)...(19): siRNA sense strand
cguccaucguguuuauuga

SEQ ID NO: 104101 - RNA, 19 nt, Homo sapiens
  misc_RNA (1)...(19): siRNA sense strand
cauccugaauauuaugaag

SEQ ID NO: 104102 - RNA, 19 nt, Homo sapiens
  misc_RNA (1)...(19): siRNA sense strand
cugaaguuagagagaauua

SEQ ID NO: 104103 - RNA, 19 nt, Homo sapiens
  misc_RNA (1)...(19): siRNA sense strand
uggauggauuugauucuag

SEQ ID NO: 104104 - RNA, 19 nt, Homo sapiens
  misc_RNA (1)...(19): siRNA sense strand
caaacucguacgggaauug

SEQ ID NO: 104105 - RNA, 19 nt, Homo sapiens
  misc_RNA (1)...(19): siRNA sense strand
ccaaacucguacgggaauu

SEQ ID NO: 104106 - RNA, 19 nt, Homo sapiens
  misc_RNA (1)...(19): siRNA sense strand
gagaacguagaaugaaagu

SEQ ID NO: 104107 - RNA, 19 nt, Homo sapiens
  misc_RNA (1)...(19): siRNA sense strand
caucaaggcaaucuguaca

SEQ ID NO: 104108 - RNA, 19 nt, Homo sapiens
  misc_RNA (1)...(19): siRNA sense strand
uaggaaccuuggaagagau

SEQ ID NO: 104109 - RNA, 19 nt, Homo sapiens
  misc_RNA (1)...(19): siRNA sense strand
ggucugauggccuuaagag

SEQ ID NO: 104110 - RNA, 19 nt, Homo sapiens
  misc_RNA (1)...(19): siRNA sense strand
uagaaaucaggaacaaaug

SEQ ID NO: 104111 - RNA, 19 nt, Homo sapiens
  misc_RNA (1)...(19): siRNA sense strand
ugacaggaagauugaguuc

SEQ ID NO: 104112 - RNA, 19 nt, Homo sapiens
  misc_RNA (1)...(19): siRNA sense strand
gaaaacaaagggaccagau

SEQ ID NO: 104113 - RNA, 19 nt, Homo sapiens
  misc_RNA (1)...(19): siRNA sense strand
ccgaauagaaacuuuggau

SEQ ID NO: 104114 - RNA, 19 nt, Homo sapiens
  misc_RNA (1)...(19): siRNA sense strand
aaaccgaauagaaacuuug

SEQ ID NO: 104115 - RNA, 19 nt, Homo sapiens
  misc_RNA (1)...(19): siRNA sense strand
caagaggaggaaagaucaa

SEQ ID NO: 104116 - RNA, 19 nt, Homo sapiens
  misc_RNA (1)...(19): siRNA sense strand
auaugaaccuccuguacca

SEQ ID NO: 104117 - RNA, 19 nt, Homo sapiens
  misc_RNA (1)...(19): siRNA sense strand
gcacgacuguguccaaaua

SEQ ID NO: 104118 - RNA, 19 nt, Homo sapiens
  misc_RNA (1)...(19): siRNA sense strand
uaacagaccugauacuuug

SEQ ID NO: 104119 - RNA, 19 nt, Homo sapiens
  misc_RNA (1)...(19): siRNA sense strand
guacaaagauaaucaaugc

SEQ ID NO: 104120 - RNA, 19 nt, Homo sapiens
  misc_RNA (1)...(19): siRNA sense strand
uuaaugagcucacugguau

SEQ ID NO: 104121 - RNA, 19 nt, Homo sapiens
  misc_RNA (1)...(19): siRNA sense strand
uaaagcaguuugccaaguu

SEQ ID NO: 104122 - RNA, 19 nt, Homo sapiens
  misc_RNA (1)...(19): siRNA sense strand
cacagaggcugguauguuu

SEQ ID NO: 104123 - RNA, 19 nt, Homo sapiens
  misc_RNA (1)...(19): siRNA sense strand
ggauuuggcugcagauaag

SEQ ID NO: 104124 - RNA, 19 nt, Homo sapiens
  misc_RNA (1)...(19): siRNA sense strand
gauaucagauuugaacugu

SEQ ID NO: 104125 - RNA, 19 nt, Homo sapiens
  misc_RNA (1)...(19): siRNA sense strand
gggcguggauagaaauaaa

SEQ ID NO: 104126 - RNA, 19 nt, Homo sapiens
  misc_RNA (1)...(19): siRNA sense strand
gcacagaggcugguauguu

SEQ ID NO: 104127 - RNA, 19 nt, Homo sapiens
  misc_RNA (1)...(19): siRNA sense strand
guaaggaacagauugagaa

SEQ ID NO: 104128 - RNA, 19 nt, Homo sapiens
  misc_RNA (1)...(19): siRNA sense strand
ccagggagauuggauagaa

SEQ ID NO: 104129 - RNA, 19 nt, Homo sapiens
  misc_RNA (1)...(19): siRNA sense strand
agagaaaccugaugucaca

SEQ ID NO: 104130 - RNA, 19 nt, Homo sapiens
  misc_RNA (1)...(19): siRNA sense strand
gauauugccuuguugaaaa

SEQ ID NO: 104131 - RNA, 19 nt, Homo sapiens
  misc_RNA (1)...(19): siRNA sense strand
gaagagaaaccugauguca

SEQ ID NO: 104132 - RNA, 19 nt, Homo sapiens
  misc_RNA (1)...(19): siRNA sense strand
ugaaauugaugcuauugga

SEQ ID NO: 104133 - RNA, 19 nt, Homo sapiens
  misc_RNA (1)...(19): siRNA sense strand
gaaagagauaucagauuug

SEQ ID NO: 104134 - RNA, 19 nt, Homo sapiens
  misc_RNA (1)...(19): siRNA sense strand
ccaaagaggaugagaagga

SEQ ID NO: 104135 - RNA, 19 nt, Homo sapiens
  misc_RNA (1)...(19): siRNA sense strand
aagauugacccaacaguua

SEQ ID NO: 104136 - RNA, 19 nt, Homo sapiens
  misc_RNA (1)...(19): siRNA sense strand
ugagcucacugguauuaaa

SEQ ID NO: 104137 - RNA, 19 nt, Homo sapiens
  misc_RNA (1)...(19): siRNA sense strand
ugaacagccuuuacagguu

SEQ ID NO: 104138 - RNA, 19 nt, Homo sapiens
  misc_RNA (1)...(19): siRNA sense strand
gauucacgcucguucaaug

SEQ ID NO: 104139 - RNA, 19 nt, Homo sapiens
  misc_RNA (1)...(19): siRNA sense strand
ggacccacauauuuaagau

SEQ ID NO: 104140 - RNA, 19 nt, Homo sapiens
  misc_RNA (1)...(19): siRNA sense strand
gcaaguugaagaugacauu

SEQ ID NO: 104141 - RNA, 19 nt, Homo sapiens
  misc_RNA (1)...(19): siRNA sense strand
gcucacugguauuaaagaa

SEQ ID NO: 104142 - RNA, 19 nt, Homo sapiens
  misc_RNA (1)...(19): siRNA sense strand
ucacugguauuaaagaauc

SEQ ID NO: 104143 - RNA, 19 nt, Homo sapiens
  misc_RNA (1)...(19): siRNA sense strand
ggauauugccuuguugaaa

SEQ ID NO: 104144 - RNA, 19 nt, Homo sapiens
  misc_RNA (1)...(19): siRNA sense strand
gaagugcagagaacaaugu

SEQ ID NO: 104145 - RNA, 19 nt, Homo sapiens
  misc_RNA (1)...(19): siRNA sense strand
ugccuuaucuucuuugaug

SEQ ID NO: 104146 - RNA, 19 nt, Homo sapiens
  misc_RNA (1)...(19): siRNA sense strand
guaaagcaguuugccaagu

SEQ ID NO: 104147 - RNA, 19 nt, Homo sapiens
  misc_RNA (1)...(19): siRNA sense strand
gagugggcguggauagaaa

SEQ ID NO: 104148 - RNA, 19 nt, Homo sapiens
  misc_RNA (1)...(19): siRNA sense strand
cuaacagaccugauacuuu

SEQ ID NO: 104149 - RNA, 19 nt, Homo sapiens
  misc_RNA (1)...(19): siRNA sense strand
uuacaugacauacaacuga

SEQ ID NO: 104150 - RNA, 19 nt, Homo sapiens
  misc_RNA (1)...(19): siRNA sense strand
gggauuuggcugcagauaa

SEQ ID NO: 104151 - RNA, 19 nt, Homo sapiens
  misc_RNA (1)...(19): siRNA sense strand
gugcuucauucgaguuauu

SEQ ID NO: 104152 - RNA, 19 nt, Homo sapiens
  misc_RNA (1)...(19): siRNA sense strand
cuuggaagcuguaaauaag

SEQ ID NO: 104153 - RNA, 19 nt, Homo sapiens
  misc_RNA (1)...(19): siRNA sense strand
uauuggaucugagcuugua

SEQ ID NO: 104154 - RNA, 19 nt, Homo sapiens
  misc_RNA (1)...(19): siRNA sense strand
aaagcaguuugccaaguuu

SEQ ID NO: 104155 - RNA, 19 nt, Homo sapiens
  misc_RNA (1)...(19): siRNA sense strand
gccacuaacagaccugaua

SEQ ID NO: 104156 - RNA, 19 nt, Homo sapiens
  misc_RNA (1)...(19): siRNA sense strand
ugagaaacugcgagaagua

SEQ ID NO: 104157 - RNA, 19 nt, Homo sapiens
  misc_RNA (1)...(19): siRNA sense strand
gcugauggccacuaacaga

SEQ ID NO: 104158 - RNA, 19 nt, Homo sapiens
  misc_RNA (1)...(19): siRNA sense strand
uccauugccuccuaagauu

SEQ ID NO: 104159 - RNA, 19 nt, Homo sapiens
  misc_RNA (1)...(19): siRNA sense strand
ggaagaccaaagaggauga

SEQ ID NO: 104160 - RNA, 19 nt, Homo sapiens
  misc_RNA (1)...(19): siRNA sense strand
gaccaaagaggaugagaag

SEQ ID NO: 104161 - RNA, 19 nt, Homo sapiens
  misc_RNA (1)...(19): siRNA sense strand
ugaugcagguggaagagaa

SEQ ID NO: 104162 - RNA, 19 nt, Homo sapiens
  misc_RNA (1)...(19): siRNA sense strand
uaagauugacccaacaguu

SEQ ID NO: 104163 - RNA, 19 nt, Homo sapiens
  misc_RNA (1)...(19): siRNA sense strand
guugccagguguacaaaga

SEQ ID NO: 104164 - RNA, 19 nt, Homo sapiens
  misc_RNA (1)...(19): siRNA sense strand
ucagugcuacuccucguua

SEQ ID NO: 104165 - RNA, 19 nt, Homo sapiens
  misc_RNA (1)...(19): siRNA sense strand
gcugguauguuugccauca

SEQ ID NO: 104166 - RNA, 19 nt, Homo sapiens
  misc_RNA (1)...(19): siRNA sense strand
cacauuccauugccuccua

SEQ ID NO: 104167 - RNA, 19 nt, Homo sapiens
  misc_RNA (1)...(19): siRNA sense strand
gcguggauagaaauaaaua

SEQ ID NO: 104168 - RNA, 19 nt, Homo sapiens
  misc_RNA (1)...(19): siRNA sense strand
ugccagguguacaaagaua

SEQ ID NO: 104169 - RNA, 19 nt, Homo sapiens
  misc_RNA (1)...(19): siRNA sense strand
cagggagauuggauagaaa

SEQ ID NO: 104170 - RNA, 19 nt, Homo sapiens
  misc_RNA (1)...(19): siRNA sense strand
acaaugaagugcagagaac

SEQ ID NO: 104171 - RNA, 19 nt, Homo sapiens
  misc_RNA (1)...(19): siRNA sense strand
aaugagcucacugguauua

SEQ ID NO: 104172 - RNA, 19 nt, Homo sapiens
  misc_RNA (1)...(19): siRNA sense strand
uaaggaacagauugagaaa

SEQ ID NO: 104173 - RNA, 19 nt, Homo sapiens
  misc_RNA (1)...(19): siRNA sense strand
gaacuguuagcacgacugu

SEQ ID NO: 104174 - RNA, 19 nt, Homo sapiens
  misc_RNA (1)...(19): siRNA sense strand
caaauucacauuccauugc

SEQ ID NO: 104175 - RNA, 19 nt, Homo sapiens
  misc_RNA (1)...(19): siRNA sense strand
cuaggcagaucaagcaagu

SEQ ID NO: 104176 - RNA, 19 nt, Homo sapiens
  misc_RNA (1)...(19): siRNA sense strand
gacaaugaagugcagagaa

SEQ ID NO: 104177 - RNA, 19 nt, Homo sapiens
  misc_RNA (1)...(19): siRNA sense strand
caagcaaguugaagaugac

SEQ ID NO: 104178 - RNA, 19 nt, Homo sapiens
  misc_RNA (1)...(19): siRNA sense strand
uagcacgacuguguccaaa

SEQ ID NO: 104179 - RNA, 19 nt, Homo sapiens
  misc_RNA (1)...(19): siRNA sense strand
cgugaacucuuugaaaugg

SEQ ID NO: 104180 - RNA, 19 nt, Homo sapiens
  misc_RNA (1)...(19): siRNA sense strand
aggaacagauugagaaacu

SEQ ID NO: 104181 - RNA, 19 nt, Homo sapiens
  misc_RNA (1)...(19): siRNA sense strand
ggaacagauugagaaacug

SEQ ID NO: 104182 - RNA, 19 nt, Homo sapiens
  misc_RNA (1)...(19): siRNA sense strand
gagaaacugcgagaaguag

SEQ ID NO: 104183 - RNA, 19 nt, Homo sapiens
  misc_RNA (1)...(19): siRNA sense strand
ucuuggaagcuguaaauaa

SEQ ID NO: 104184 - RNA, 19 nt, Homo sapiens
  misc_RNA (1)...(19): siRNA sense strand
gaugaaauugaugcuauug

SEQ ID NO: 104185 - RNA, 19 nt, Homo sapiens
  misc_RNA (1)...(19): siRNA sense strand
ccaagggcgugcugcucuu

SEQ ID NO: 104186 - RNA, 19 nt, Homo sapiens
  misc_RNA (1)...(19): siRNA sense strand
ucaaauucacauuccauug

SEQ ID NO: 104187 - RNA, 19 nt, Homo sapiens
  misc_RNA (1)...(19): siRNA sense strand
acccacauauuuaagauuc

SEQ ID NO: 104188 - RNA, 19 nt, Homo sapiens
  misc_RNA (1)...(19): siRNA sense strand
gacccaacaguuaccauga

SEQ ID NO: 104189 - RNA, 19 nt, Homo sapiens
  misc_RNA (1)...(19): siRNA sense strand
gagagugggcguggauaga

SEQ ID NO: 104190 - RNA, 19 nt, Homo sapiens
  misc_RNA (1)...(19): siRNA sense strand
uaugccaaauucagugcua

SEQ ID NO: 104191 - RNA, 19 nt, Homo sapiens
  misc_RNA (1)...(19): siRNA sense strand
gaugaggccagggagauug

SEQ ID NO: 104192 - RNA, 19 nt, Homo sapiens
  misc_RNA (1)...(19): siRNA sense strand
ugaaauggccagaacaaaa

SEQ ID NO: 104193 - RNA, 19 nt, Homo sapiens
  misc_RNA (1)...(19): siRNA sense strand
aagaugacauucagcaacu

SEQ ID NO: 104194 - RNA, 19 nt, Homo sapiens
  misc_RNA (1)...(19): siRNA sense strand
caacaguuaccaugaugca

SEQ ID NO: 104195 - RNA, 19 nt, Homo sapiens
  misc_RNA (1)...(19): siRNA sense strand
gcacuuacucuaggcagau

SEQ ID NO: 104196 - RNA, 19 nt, Homo sapiens
  misc_RNA (1)...(19): siRNA sense strand
aagccugccuuaucuucuu

SEQ ID NO: 104197 - RNA, 19 nt, Homo sapiens
  misc_RNA (1)...(19): siRNA sense strand
ggaagagaaaccugauguc

SEQ ID NO: 104198 - RNA, 19 nt, Homo sapiens
  misc_RNA (1)...(19): siRNA sense strand
gaugagagugggcguggau

SEQ ID NO: 104199 - RNA, 19 nt, Homo sapiens
  misc_RNA (1)...(19): siRNA sense strand
agagauaucagauuugaac

SEQ ID NO: 104200 - RNA, 19 nt, Homo sapiens
  misc_RNA (1)...(19): siRNA sense strand
ccagagugaacagccuuua

SEQ ID NO: 104201 - RNA, 19 nt, Homo sapiens
  misc_RNA (1)...(19): siRNA sense strand
uucgugaacucuuugaaau

SEQ ID NO: 104202 - RNA, 19 nt, Homo sapiens
  misc_RNA (1)...(19): siRNA sense strand
ggacugaugcgugcuucau

SEQ ID NO: 104203 - RNA, 19 nt, Homo sapiens
  misc_RNA (1)...(19): siRNA sense strand
gcuguaaauaaggucauua

SEQ ID NO: 104204 - RNA, 19 nt, Homo sapiens
  misc_RNA (1)...(19): siRNA sense strand
gaucagcggaagaccaaag

SEQ ID NO: 104205 - RNA, 19 nt, Homo sapiens
  misc_RNA (1)...(19): siRNA sense strand
gguauuaaagaaucugaca

SEQ ID NO: 104206 - RNA, 19 nt, Homo sapiens
  misc_RNA (1)...(19): siRNA sense strand
cccaacaguuaccaugaug

SEQ ID NO: 104207 - RNA, 19 nt, Homo sapiens
  misc_RNA (1)...(19): siRNA sense strand
gaugacauucagcaacuuc

SEQ ID NO: 104208 - RNA, 19 nt, Homo sapiens
  misc_RNA (1)...(19): siRNA sense strand
gugcuggaggugacaauga

SEQ ID NO: 104209 - RNA, 19 nt, Homo sapiens
  misc_RNA (1)...(19): siRNA sense strand
gacccaaaauacauuauca

SEQ ID NO: 104210 - RNA, 19 nt, Homo sapiens
  misc_RNA (1)...(19): siRNA sense strand
cucguuacaugacauacaa

SEQ ID NO: 104211 - RNA, 19 nt, Homo sapiens
  misc_RNA (1)...(19): siRNA sense strand
uggaagcuguaaauaaggu

SEQ ID NO: 104212 - RNA, 19 nt, Homo sapiens
  misc_RNA (1)...(19): siRNA sense strand
acugaugcgugcuucauuc

SEQ ID NO: 104213 - RNA, 19 nt, Homo sapiens
  misc_RNA (1)...(19): siRNA sense strand
gaaaccccauuacuucauc

SEQ ID NO: 104214 - RNA, 19 nt, Homo sapiens
  misc_RNA (1)...(19): siRNA sense strand
gggauauugccuuguugaa

SEQ ID NO: 104215 - RNA, 19 nt, Homo sapiens
  misc_RNA (1)...(19): siRNA sense strand
ggauuucuuggaagcugua

SEQ ID NO: 104216 - RNA, 19 nt, Homo sapiens
  misc_RNA (1)...(19): siRNA sense strand
gagcucacugguauuaaag

SEQ ID NO: 104217 - RNA, 19 nt, Homo sapiens
  misc_RNA (1)...(19): siRNA sense strand
ggaacgaacuaaaugcuaa

SEQ ID NO: 104218 - RNA, 19 nt, Homo sapiens
  misc_RNA (1)...(19): siRNA sense strand
gaagguaaauuuguuguag

SEQ ID NO: 104219 - RNA, 19 nt, Homo sapiens
  misc_RNA (1)...(19): siRNA sense strand
caacaagguagacccauua

SEQ ID NO: 104220 - RNA, 19 nt, Homo sapiens
  misc_RNA (1)...(19): siRNA sense strand
gaagaacuccagcugauug

SEQ ID NO: 104221 - RNA, 19 nt, Homo sapiens
  misc_RNA (1)...(19): siRNA sense strand
ccaagaacaucaagguuau

SEQ ID NO: 104222 - RNA, 19 nt, Homo sapiens
  misc_RNA (1)...(19): siRNA sense strand
cauacggacuguaccuuua

SEQ ID NO: 104223 - RNA, 19 nt, Homo sapiens
  misc_RNA (1)...(19): siRNA sense strand
gaacaugcuccaucuauca

SEQ ID NO: 104224 - RNA, 19 nt, Homo sapiens
  misc_RNA (1)...(19): siRNA sense strand
gaacaucaagguuaucaug

SEQ ID NO: 104225 - RNA, 19 nt, Homo sapiens
  misc_RNA (1)...(19): siRNA sense strand
ucaaggagaucaaagaagu

SEQ ID NO: 104226 - RNA, 19 nt, Homo sapiens
  misc_RNA (1)...(19): siRNA sense strand
gcacagaggaacgaacuaa

SEQ ID NO: 104227 - RNA, 19 nt, Homo sapiens
  misc_RNA (1)...(19): siRNA sense strand
gaaaguaccagauucaacu

SEQ ID NO: 104228 - RNA, 19 nt, Homo sapiens
  misc_RNA (1)...(19): siRNA sense strand
gaacuccagcugauuguga

SEQ ID NO: 104229 - RNA, 19 nt, Homo sapiens
  misc_RNA (1)...(19): siRNA sense strand
gcagaaggacagugagaaa

SEQ ID NO: 104230 - RNA, 19 nt, Homo sapiens
  misc_RNA (1)...(19): siRNA sense strand
ugaucgagcugccuguuaa

SEQ ID NO: 104231 - RNA, 19 nt, Homo sapiens
  misc_RNA (1)...(19): siRNA sense strand
gaaaguguuggucaaggua

SEQ ID NO: 104232 - RNA, 19 nt, Homo sapiens
  misc_RNA (1)...(19): siRNA sense strand
aaacauguccaucaagaaa

SEQ ID NO: 104233 - RNA, 19 nt, Homo sapiens
  misc_RNA (1)...(19): siRNA sense strand
caagguacauccugaaggu

SEQ ID NO: 104234 - RNA, 19 nt, Homo sapiens
  misc_RNA (1)...(19): siRNA sense strand
acaaacagaucaaggagau

SEQ ID NO: 104235 - RNA, 19 nt, Homo sapiens
  misc_RNA (1)...(19): siRNA sense strand
caagguagacccauuagug

SEQ ID NO: 104236 - RNA, 19 nt, Homo sapiens
  misc_RNA (1)...(19): siRNA sense strand
ccaacaagguagacccauu

SEQ ID NO: 104237 - RNA, 19 nt, Homo sapiens
  misc_RNA (1)...(19): siRNA sense strand
ggaacaugcuccaucuauc

SEQ ID NO: 104238 - RNA, 19 nt, Homo sapiens
  misc_RNA (1)...(19): siRNA sense strand
ggagaaaguaccagauuca

SEQ ID NO: 104239 - RNA, 19 nt, Homo sapiens
  misc_RNA (1)...(19): siRNA sense strand
gaacggcgaguccauguca

SEQ ID NO: 104240 - RNA, 19 nt, Homo sapiens
  misc_RNA (1)...(19): siRNA sense strand
gaacugguacagaaauuca

SEQ ID NO: 104241 - RNA, 19 nt, Homo sapiens
  misc_RNA (1)...(19): siRNA sense strand
ccaagggagugcugcugua

SEQ ID NO: 104242 - RNA, 19 nt, Homo sapiens
  misc_RNA (1)...(19): siRNA sense strand
gaacgaacuaaaugcuaaa

SEQ ID NO: 104243 - RNA, 19 nt, Homo sapiens
  misc_RNA (1)...(19): siRNA sense strand
gcuacacucugcacaagau

SEQ ID NO: 104244 - RNA, 19 nt, Homo sapiens
  misc_RNA (1)...(19): siRNA sense strand
uagccaaggucaugcagaa

SEQ ID NO: 104245 - RNA, 19 nt, Homo sapiens
  misc_RNA (1)...(19): siRNA sense strand
ugagggagcuguuugucau

SEQ ID NO: 104246 - RNA, 19 nt, Homo sapiens
  misc_RNA (1)...(19): siRNA sense strand
guuaucauggcuacuaaua

SEQ ID NO: 104247 - RNA, 19 nt, Homo sapiens
  misc_RNA (1)...(19): siRNA sense strand
gcacgaugcuggaguugcu

SEQ ID NO: 104248 - RNA, 19 nt, Homo sapiens
  misc_RNA (1)...(19): siRNA sense strand
ggccauggauaagaagaaa

SEQ ID NO: 104249 - RNA, 19 nt, Homo sapiens
  misc_RNA (1)...(19): siRNA sense strand
acauguccaucaagaaauu

SEQ ID NO: 104250 - RNA, 19 nt, Homo sapiens
  misc_RNA (1)...(19): siRNA sense strand
uaucauggcuacuaauagg

SEQ ID NO: 104251 - RNA, 19 nt, Homo sapiens
  misc_RNA (1)...(19): siRNA sense strand
guaccagauucaacuuaug

SEQ ID NO: 104252 - RNA, 19 nt, Homo sapiens
  misc_RNA (1)...(19): siRNA sense strand
agaagaaaguguuggucaa

SEQ ID NO: 104253 - RNA, 19 nt, Homo sapiens
  misc_RNA (1)...(19): siRNA sense strand
gguacauccugaagguaaa

SEQ ID NO: 104254 - RNA, 19 nt, Homo sapiens
  misc_RNA (1)...(19): siRNA sense strand
gggaacaugcuccaucuau

SEQ ID NO: 104255 - RNA, 19 nt, Homo sapiens
  misc_RNA (1)...(19): siRNA sense strand
agauucaacuuaugagaug

SEQ ID NO: 104256 - RNA, 19 nt, Homo sapiens
  misc_RNA (1)...(19): siRNA sense strand
ggacuccgccaauauuauc

SEQ ID NO: 104257 - RNA, 19 nt, Homo sapiens
  misc_RNA (1)...(19): siRNA sense strand
cagcugauugugaaugaua

SEQ ID NO: 104258 - RNA, 19 nt, Homo sapiens
  misc_RNA (1)...(19): siRNA sense strand
ggacuggacaaacagauca

SEQ ID NO: 104259 - RNA, 19 nt, Homo sapiens
  misc_RNA (1)...(19): siRNA sense strand
ggaaugacagcuacacucu

SEQ ID NO: 104260 - RNA, 19 nt, Homo sapiens
  misc_RNA (1)...(19): siRNA sense strand
ccaaggucaugcagaagga

SEQ ID NO: 104261 - RNA, 19 nt, Homo sapiens
  misc_RNA (1)...(19): siRNA sense strand
gcuacuaauaggauugaua

SEQ ID NO: 104262 - RNA, 19 nt, Homo sapiens
  misc_RNA (1)...(19): siRNA sense strand
gcacugggaagacacuguu

SEQ ID NO: 104263 - RNA, 19 nt, Homo sapiens
  misc_RNA (1)...(19): siRNA sense strand
caacuuaugagaugauugg

SEQ ID NO: 104264 - RNA, 19 nt, Homo sapiens
  misc_RNA (1)...(19): siRNA sense strand
acaagauccugcccaacaa

SEQ ID NO: 104265 - RNA, 19 nt, Homo sapiens
  misc_RNA (1)...(19): siRNA sense strand
gaagaaaguguuggucaag

SEQ ID NO: 104266 - RNA, 19 nt, Homo sapiens
  misc_RNA (1)...(19): siRNA sense strand
gauccugcccaacaaggua

SEQ ID NO: 104267 - RNA, 19 nt, Homo sapiens
  misc_RNA (1)...(19): siRNA sense strand
accaagaacaucaagguua

SEQ ID NO: 104268 - RNA, 19 nt, Homo sapiens
  misc_RNA (1)...(19): siRNA sense strand
caagaaauuauggaaguga

SEQ ID NO: 104269 - RNA, 19 nt, Homo sapiens
  misc_RNA (1)...(19): siRNA sense strand
gcuuugaggccaccaagaa

SEQ ID NO: 104270 - RNA, 19 nt, Homo sapiens
  misc_RNA (1)...(19): siRNA sense strand
cagaggaacgaacuaaaug

SEQ ID NO: 104271 - RNA, 19 nt, Homo sapiens
  misc_RNA (1)...(19): siRNA sense strand
ggauaagaagaaaguguug

SEQ ID NO: 104272 - RNA, 19 nt, Homo sapiens
  misc_RNA (1)...(19): siRNA sense strand
ugcuaaaguucgccuauug

SEQ ID NO: 104273 - RNA, 19 nt, Homo sapiens
  misc_RNA (1)...(19): siRNA sense strand
ucacucaggaggacuuuga

SEQ ID NO: 104274 - RNA, 19 nt, Homo sapiens
  misc_RNA (1)...(19): siRNA sense strand
uugaagaacuccagcugau

SEQ ID NO: 104275 - RNA, 19 nt, Homo sapiens
  misc_RNA (1)...(19): siRNA sense strand
ucaagaaauuauggaagug

SEQ ID NO: 104276 - RNA, 19 nt, Homo sapiens
  misc_RNA (1)...(19): siRNA sense strand
gagaaaguaccagauucaa

SEQ ID NO: 104277 - RNA, 19 nt, Homo sapiens
  misc_RNA (1)...(19): siRNA sense strand
gguagacccauuaguguca

SEQ ID NO: 104278 - RNA, 19 nt, Homo sapiens
  misc_RNA (1)...(19): siRNA sense strand
cacaagauccugcccaaca

SEQ ID NO: 104279 - RNA, 19 nt, Homo sapiens
  misc_RNA (1)...(19): siRNA sense strand
ccggguggcucuaaggaau

SEQ ID NO: 104280 - RNA, 19 nt, Homo sapiens
  misc_RNA (1)...(19): siRNA sense strand
gugaucgagcugccuguua

SEQ ID NO: 104281 - RNA, 19 nt, Homo sapiens
  misc_RNA (1)...(19): siRNA sense strand
uggagaaaguaccagauuc

SEQ ID NO: 104282 - RNA, 19 nt, Homo sapiens
  misc_RNA (1)...(19): siRNA sense strand
guggagaaaguaccagauu

SEQ ID NO: 104283 - RNA, 19 nt, Homo sapiens
  misc_RNA (1)...(19): siRNA sense strand
ggguggcucuaaggaauga

SEQ ID NO: 104284 - RNA, 19 nt, Homo sapiens
  misc_RNA (1)...(19): siRNA sense strand
gagaacggcgaguccaugu

SEQ ID NO: 104285 - RNA, 19 nt, Homo sapiens
  misc_RNA (1)...(19): siRNA sense strand
acagaggaacgaacuaaau

SEQ ID NO: 104286 - RNA, 19 nt, Homo sapiens
  misc_RNA (1)...(19): siRNA sense strand
cagggcgcauugacagaaa

SEQ ID NO: 104287 - RNA, 19 nt, Homo sapiens
  misc_RNA (1)...(19): siRNA sense strand
uaccagauucaacuuauga

SEQ ID NO: 104288 - RNA, 19 nt, Homo sapiens
  misc_RNA (1)...(19): siRNA sense strand
agaaaguguuggucaaggu

SEQ ID NO: 104289 - RNA, 19 nt, Homo sapiens
  misc_RNA (1)...(19): siRNA sense strand
aagauucauucucggaaga

SEQ ID NO: 104290 - RNA, 19 nt, Homo sapiens
  misc_RNA (1)...(19): siRNA sense strand
ucaggaggacuuugagaug

SEQ ID NO: 104291 - RNA, 19 nt, Homo sapiens
  misc_RNA (1)...(19): siRNA sense strand
cagcuacacucugcacaag

SEQ ID NO: 104292 - RNA, 19 nt, Homo sapiens
  misc_RNA (1)...(19): siRNA sense strand
cugaacugguacagaaauu

SEQ ID NO: 104293 - RNA, 19 nt, Homo sapiens
  misc_RNA (1)...(19): siRNA sense strand
ggacuguaccuuuauucgu

SEQ ID NO: 104294 - RNA, 19 nt, Homo sapiens
  misc_RNA (1)...(19): siRNA sense strand
aguaccagauucaacuuau

SEQ ID NO: 104295 - RNA, 19 nt, Homo sapiens
  misc_RNA (1)...(19): siRNA sense strand
ucauacggacuguaccuuu

SEQ ID NO: 104296 - RNA, 19 nt, Homo sapiens
  misc_RNA (1)...(19): siRNA sense strand
cgagcugccuguuaagcau

SEQ ID NO: 104297 - RNA, 19 nt, Homo sapiens
  misc_RNA (1)...(19): siRNA sense strand
ggacuuugagauggcagua

SEQ ID NO: 104298 - RNA, 19 nt, Homo sapiens
  misc_RNA (1)...(19): siRNA sense strand
gauucaacuuaugagauga

SEQ ID NO: 104299 - RNA, 19 nt, Homo sapiens
  misc_RNA (1)...(19): siRNA sense strand
uguccaagauugaagaacu

SEQ ID NO: 104300 - RNA, 19 nt, Homo sapiens
  misc_RNA (1)...(19): siRNA sense strand
ccaccaagaacaucaaggu

SEQ ID NO: 104301 - RNA, 19 nt, Homo sapiens
  misc_RNA (1)...(19): siRNA sense strand
ggucaagguacauccugaa

SEQ ID NO: 104302 - RNA, 19 nt, Homo sapiens
  misc_RNA (1)...(19): siRNA sense strand
cagauucaacuuaugagau

SEQ ID NO: 104303 - RNA, 19 nt, Homo sapiens
  misc_RNA (1)...(19): siRNA sense strand
ugaagaacuccagcugauu

SEQ ID NO: 104304 - RNA, 19 nt, Homo sapiens
  misc_RNA (1)...(19): siRNA sense strand
caagggagugcugcuguau

SEQ ID NO: 104305 - RNA, 19 nt, Homo sapiens
  misc_RNA (1)...(19): siRNA sense strand
uccagcugauugugaauga

SEQ ID NO: 104306 - RNA, 19 nt, Homo sapiens
  misc_RNA (1)...(19): siRNA sense strand
uggauaagaagaaaguguu

SEQ ID NO: 104307 - RNA, 19 nt, Homo sapiens
  misc_RNA (1)...(19): siRNA sense strand
ggcaguagccaaggucaug

SEQ ID NO: 104308 - RNA, 19 nt, Homo sapiens
  misc_RNA (1)...(19): siRNA sense strand
gccaauauuaucuguccaa

SEQ ID NO: 104309 - RNA, 19 nt, Homo sapiens
  misc_RNA (1)...(19): siRNA sense strand
agggagugcugcuguaugg

SEQ ID NO: 104310 - RNA, 19 nt, Homo sapiens
  misc_RNA (1)...(19): siRNA sense strand
uaagcauccugagcucuuc

SEQ ID NO: 104311 - RNA, 19 nt, Homo sapiens
  misc_RNA (1)...(19): siRNA sense strand
caauauuaucuguccaaga

SEQ ID NO: 104312 - RNA, 19 nt, Homo sapiens
  misc_RNA (1)...(19): siRNA sense strand
ccagauucaacuuaugaga

SEQ ID NO: 104313 - RNA, 19 nt, Homo sapiens
  misc_RNA (1)...(19): siRNA sense strand
cauggcuacuaauaggauu

SEQ ID NO: 104314 - RNA, 19 nt, Homo sapiens
  misc_RNA (1)...(19): siRNA sense strand
ccauggauaagaagaaagu

SEQ ID NO: 104315 - RNA, 19 nt, Homo sapiens
  misc_RNA (1)...(19): siRNA sense strand
ugacggaccagagcagaug

SEQ ID NO: 104316 - RNA, 19 nt, Homo sapiens
  misc_RNA (1)...(19): siRNA sense strand
uacggacuguaccuuuauu

SEQ ID NO: 104317 - RNA, 19 nt, Homo sapiens
  misc_RNA (1)...(19): siRNA sense strand
cuaagaagcuggagucuaa

SEQ ID NO: 104318 - RNA, 19 nt, Homo sapiens
  misc_RNA (1)...(19): siRNA sense strand
gaacagauccgggaauuaa

SEQ ID NO: 104319 - RNA, 19 nt, Homo sapiens
  misc_RNA (1)...(19): siRNA sense strand
uaagagaggugauagaauu

SEQ ID NO: 104320 - RNA, 19 nt, Homo sapiens
  misc_RNA (1)...(19): siRNA sense strand
gaacaagaguugcuuugga

SEQ ID NO: 104321 - RNA, 19 nt, Homo sapiens
  misc_RNA (1)...(19): siRNA sense strand
gaucauggcuacaaacaga

SEQ ID NO: 104322 - RNA, 19 nt, Homo sapiens
  misc_RNA (1)...(19): siRNA sense strand
ggaguuaagggaacaauua

SEQ ID NO: 104323 - RNA, 19 nt, Homo sapiens
  misc_RNA (1)...(19): siRNA sense strand
gagcagaucugagaaaugu

SEQ ID NO: 104324 - RNA, 19 nt, Homo sapiens
  misc_RNA (1)...(19): siRNA sense strand
gugauagaauuaccucuua

SEQ ID NO: 104325 - RNA, 19 nt, Homo sapiens
  misc_RNA (1)...(19): siRNA sense strand
ggacugcaauuucuuaaag

SEQ ID NO: 104326 - RNA, 19 nt, Homo sapiens
  misc_RNA (1)...(19): siRNA sense strand
caucaaccaugcaucauuu

SEQ ID NO: 104327 - RNA, 19 nt, Homo sapiens
  misc_RNA (1)...(19): siRNA sense strand
uacaaagcauggugaaaua

SEQ ID NO: 104328 - RNA, 19 nt, Homo sapiens
  misc_RNA (1)...(19): siRNA sense strand
ccaggaagauuagauagaa

SEQ ID NO: 104329 - RNA, 19 nt, Homo sapiens
  misc_RNA (1)...(19): siRNA sense strand
gcagguauguucgcaauuc

SEQ ID NO: 104330 - RNA, 19 nt, Homo sapiens
  misc_RNA (1)...(19): siRNA sense strand
gugaagugcuuaaacaguu

SEQ ID NO: 104331 - RNA, 19 nt, Homo sapiens
  misc_RNA (1)...(19): siRNA sense strand
ugaagugcuuaaacaguua

SEQ ID NO: 104332 - RNA, 19 nt, Homo sapiens
  misc_RNA (1)...(19): siRNA sense strand
ggaauuaagagaggugaua

SEQ ID NO: 104333 - RNA, 19 nt, Homo sapiens
  misc_RNA (1)...(19): siRNA sense strand
ugagaaauguuuguacuga

SEQ ID NO: 104334 - RNA, 19 nt, Homo sapiens
  misc_RNA (1)...(19): siRNA sense strand
gcagaucugagaaauguuu

SEQ ID NO: 104335 - RNA, 19 nt, Homo sapiens
  misc_RNA (1)...(19): siRNA sense strand
caaaugaacaagcaagauu

SEQ ID NO: 104336 - RNA, 19 nt, Homo sapiens
  misc_RNA (1)...(19): siRNA sense strand
ugaaagugcucguuugauc

SEQ ID NO: 104337 - RNA, 19 nt, Homo sapiens
  misc_RNA (1)...(19): siRNA sense strand
gaucgugggugaagugcuu

SEQ ID NO: 104338 - RNA, 19 nt, Homo sapiens
  misc_RNA (1)...(19): siRNA sense strand
gagaaauguuuguacugaa

SEQ ID NO: 104339 - RNA, 19 nt, Homo sapiens
  misc_RNA (1)...(19): siRNA sense strand
gaagcuggagucuaaauug

SEQ ID NO: 104340 - RNA, 19 nt, Homo sapiens
  misc_RNA (1)...(19): siRNA sense strand
gaacuuaccaagcaguaug

SEQ ID NO: 104341 - RNA, 19 nt, Homo sapiens
  misc_RNA (1)...(19): siRNA sense strand
uggauccacugguuuauaa

SEQ ID NO: 104342 - RNA, 19 nt, Homo sapiens
  misc_RNA (1)...(19): siRNA sense strand
uaaaagaacuuaccaagca

SEQ ID NO: 104343 - RNA, 19 nt, Homo sapiens
  misc_RNA (1)...(19): siRNA sense strand
gaacaagcaagauuagaca

SEQ ID NO: 104344 - RNA, 19 nt, Homo sapiens
  misc_RNA (1)...(19): siRNA sense strand
agaauuaccucuuacaaac

SEQ ID NO: 104345 - RNA, 19 nt, Homo sapiens
  misc_RNA (1)...(19): siRNA sense strand
gcuacaaacagaccagaua

SEQ ID NO: 104346 - RNA, 19 nt, Homo sapiens
  misc_RNA (1)...(19): siRNA sense strand
auaaggcgcuucaggacua

SEQ ID NO: 104347 - RNA, 19 nt, Homo sapiens
  misc_RNA (1)...(19): siRNA sense strand
ggauaugacuacacuaacu

SEQ ID NO: 104348 - RNA, 19 nt, Homo sapiens
  misc_RNA (1)...(19): siRNA sense strand
gaaaaguggcugauucuaa

SEQ ID NO: 104349 - RNA, 19 nt, Homo sapiens
  misc_RNA (1)...(19): siRNA sense strand
cagaacagauccgggaauu

SEQ ID NO: 104350 - RNA, 19 nt, Homo sapiens
  misc_RNA (1)...(19): siRNA sense strand
ugagauauuugccgagaga

SEQ ID NO: 104351 - RNA, 19 nt, Homo sapiens
  misc_RNA (1)...(19): siRNA sense strand
gguuguaucuaguucuauu

SEQ ID NO: 104352 - RNA, 19 nt, Homo sapiens
  misc_RNA (1)...(19): siRNA sense strand
gauaugacuacacuaacua

SEQ ID NO: 104353 - RNA, 19 nt, Homo sapiens
  misc_RNA (1)...(19): siRNA sense strand
uaauggaguuacugaauca

SEQ ID NO: 104354 - RNA, 19 nt, Homo sapiens
  misc_RNA (1)...(19): siRNA sense strand
gaacguuaauggaguuacu

SEQ ID NO: 104355 - RNA, 19 nt, Homo sapiens
  misc_RNA (1)...(19): siRNA sense strand
gaaagugcucguuugauca

SEQ ID NO: 104356 - RNA, 19 nt, Homo sapiens
  misc_RNA (1)...(19): siRNA sense strand
uuacaaacccagaguuauu

SEQ ID NO: 104357 - RNA, 19 nt, Homo sapiens
  misc_RNA (1)...(19): siRNA sense strand
gaucaucaaccaugcauca

SEQ ID NO: 104358 - RNA, 19 nt, Homo sapiens
  misc_RNA (1)...(19): siRNA sense strand
agaaguugcuugaacacaa

SEQ ID NO: 104359 - RNA, 19 nt, Homo sapiens
  misc_RNA (1)...(19): siRNA sense strand
caaguacauuggugaaagu

SEQ ID NO: 104360 - RNA, 19 nt, Homo sapiens
  misc_RNA (1)...(19): siRNA sense strand
guaucuaguucuauuguag

SEQ ID NO: 104361 - RNA, 19 nt, Homo sapiens
  misc_RNA (1)...(19): siRNA sense strand
acagagagauucagagaac

SEQ ID NO: 104362 - RNA, 19 nt, Homo sapiens
  misc_RNA (1)...(19): siRNA sense strand
ggagggcuaucagaacaga

SEQ ID NO: 104363 - RNA, 19 nt, Homo sapiens
  misc_RNA (1)...(19): siRNA sense strand
gaucugagaaauguuugua

SEQ ID NO: 104364 - RNA, 19 nt, Homo sapiens
  misc_RNA (1)...(19): siRNA sense strand
caagcaagauuagacauac

SEQ ID NO: 104365 - RNA, 19 nt, Homo sapiens
  misc_RNA (1)...(19): siRNA sense strand
ucuuaaagguuguaucuag

SEQ ID NO: 104366 - RNA, 19 nt, Homo sapiens
  misc_RNA (1)...(19): siRNA sense strand
gagauucagagaacguuaa

SEQ ID NO: 104367 - RNA, 19 nt, Homo sapiens
  misc_RNA (1)...(19): siRNA sense strand
uaauggagcagaucugaga

SEQ ID NO: 104368 - RNA, 19 nt, Homo sapiens
  misc_RNA (1)...(19): siRNA sense strand
cagcuggacugcaauuucu

SEQ ID NO: 104369 - RNA, 19 nt, Homo sapiens
  misc_RNA (1)...(19): siRNA sense strand
ugaaggcccuacagagugu

SEQ ID NO: 104370 - RNA, 19 nt, Homo sapiens
  misc_RNA (1)...(19): siRNA sense strand
uaaagguuguaucuaguuc

SEQ ID NO: 104371 - RNA, 19 nt, Homo sapiens
  misc_RNA (1)...(19): siRNA sense strand
gcuggacugcaauuucuua

SEQ ID NO: 104372 - RNA, 19 nt, Homo sapiens
  misc_RNA (1)...(19): siRNA sense strand
caaagcauggugaaauaga

SEQ ID NO: 104373 - RNA, 19 nt, Homo sapiens
  misc_RNA (1)...(19): siRNA sense strand
caggaagauuagauagaaa

SEQ ID NO: 104374 - RNA, 19 nt, Homo sapiens
  misc_RNA (1)...(19): siRNA sense strand
ugacagagagauucagaga

SEQ ID NO: 104375 - RNA, 19 nt, Homo sapiens
  misc_RNA (1)...(19): siRNA sense strand
ggugaaagugcucguuuga

SEQ ID NO: 104376 - RNA, 19 nt, Homo sapiens
  misc_RNA (1)...(19): siRNA sense strand
caagaguugcuuuggauau

SEQ ID NO: 104377 - RNA, 19 nt, Homo sapiens
  misc_RNA (1)...(19): siRNA sense strand
guacuucagcugacagaga

SEQ ID NO: 104378 - RNA, 19 nt, Homo sapiens
  misc_RNA (1)...(19): siRNA sense strand
uguuaaagcuaccaaugga

SEQ ID NO: 104379 - RNA, 19 nt, Homo sapiens
  misc_RNA (1)...(19): siRNA sense strand
agaaauguuuguacugaag

SEQ ID NO: 104380 - RNA, 19 nt, Homo sapiens
  misc_RNA (1)...(19): siRNA sense strand
gauuaugaagcaauuguga

SEQ ID NO: 104381 - RNA, 19 nt, Homo sapiens
  misc_RNA (1)...(19): siRNA sense strand
acaagcaagauuagacaua

SEQ ID NO: 104382 - RNA, 19 nt, Homo sapiens
  misc_RNA (1)...(19): siRNA sense strand
ugacuacacuaacuaucau

SEQ ID NO: 104383 - RNA, 19 nt, Homo sapiens
  misc_RNA (1)...(19): siRNA sense strand
uacacuaacuaucaugaga

SEQ ID NO: 104384 - RNA, 19 nt, Homo sapiens
  misc_RNA (1)...(19): siRNA sense strand
uuaauggaguuacugaauc

SEQ ID NO: 104385 - RNA, 19 nt, Homo sapiens
  misc_RNA (1)...(19): siRNA sense strand
ccacugguuuauaacaugu

SEQ ID NO: 104386 - RNA, 19 nt, Homo sapiens
  misc_RNA (1)...(19): siRNA sense strand
gcaauuucuuaaagguugu

SEQ ID NO: 104387 - RNA, 19 nt, Homo sapiens
  misc_RNA (1)...(19): siRNA sense strand
uuacaaagcauggugaaau

SEQ ID NO: 104388 - RNA, 19 nt, Homo sapiens
  misc_RNA (1)...(19): siRNA sense strand
ggaguuacugaaucaaaug

SEQ ID NO: 104389 - RNA, 19 nt, Homo sapiens
  misc_RNA (1)...(19): siRNA sense strand
agagaacguuaauggaguu

SEQ ID NO: 104390 - RNA, 19 nt, Homo sapiens
  misc_RNA (1)...(19): siRNA sense strand
gcagaucgugggugaagug

SEQ ID NO: 104391 - RNA, 19 nt, Homo sapiens
  misc_RNA (1)...(19): siRNA sense strand
aacaagaguugcuuuggau

SEQ ID NO: 104392 - RNA, 19 nt, Homo sapiens
  misc_RNA (1)...(19): siRNA sense strand
aaaugaucauggcuacaaa

SEQ ID NO: 104393 - RNA, 19 nt, Homo sapiens
  misc_RNA (1)...(19): siRNA sense strand
gauuugauacucugcauag

SEQ ID NO: 104394 - RNA, 19 nt, Homo sapiens
  misc_RNA (1)...(19): siRNA sense strand
guuaauggaguuacugaau

SEQ ID NO: 104395 - RNA, 19 nt, Homo sapiens
  misc_RNA (1)...(19): siRNA sense strand
aagguuguaucuaguucua

SEQ ID NO: 104396 - RNA, 19 nt, Homo sapiens
  misc_RNA (1)...(19): siRNA sense strand
gauuggagggcuaucagaa

SEQ ID NO: 104397 - RNA, 19 nt, Homo sapiens
  misc_RNA (1)...(19): siRNA sense strand
gcaagauuagacauacuga

SEQ ID NO: 104398 - RNA, 19 nt, Homo sapiens
  misc_RNA (1)...(19): siRNA sense strand
ggugauagaauuaccucuu

SEQ ID NO: 104399 - RNA, 19 nt, Homo sapiens
  misc_RNA (1)...(19): siRNA sense strand
aagagaggugauagaauua

SEQ ID NO: 104400 - RNA, 19 nt, Homo sapiens
  misc_RNA (1)...(19): siRNA sense strand
aaagcauggugaaauagau

SEQ ID NO: 104401 - RNA, 19 nt, Homo sapiens
  misc_RNA (1)...(19): siRNA sense strand
ccaugcaggucccauuaca

SEQ ID NO: 104402 - RNA, 19 nt, Homo sapiens
  misc_RNA (1)...(19): siRNA sense strand
uggaguuacugaaucaaau

SEQ ID NO: 104403 - RNA, 19 nt, Homo sapiens
  misc_RNA (1)...(19): siRNA sense strand
acaaguacauuggugaaag

SEQ ID NO: 104404 - RNA, 19 nt, Homo sapiens
  misc_RNA (1)...(19): siRNA sense strand
cuagccagcuggacugcaa

SEQ ID NO: 104405 - RNA, 19 nt, Homo sapiens
  misc_RNA (1)...(19): siRNA sense strand
ugggugaagugcuuaaaca

SEQ ID NO: 104406 - RNA, 19 nt, Homo sapiens
  misc_RNA (1)...(19): siRNA sense strand
aagcagguauguucgcaau

SEQ ID NO: 104407 - RNA, 19 nt, Homo sapiens
  misc_RNA (1)...(19): siRNA sense strand
cuucaggacuaccgcaaga

SEQ ID NO: 104408 - RNA, 19 nt, Homo sapiens
  misc_RNA (1)...(19): siRNA sense strand
caauggaccaagauauguu

SEQ ID NO: 104409 - RNA, 19 nt, Homo sapiens
  misc_RNA (1)...(19): siRNA sense strand
ggaauaauaccuccaaaag

SEQ ID NO: 104410 - RNA, 19 nt, Homo sapiens
  misc_RNA (1)...(19): siRNA sense strand
guaggaauaauaccuccaa

SEQ ID NO: 104411 - RNA, 19 nt, Homo sapiens
  misc_RNA (1)...(19): siRNA sense strand
uacaaacccagaguuauuu

SEQ ID NO: 104412 - RNA, 19 nt, Homo sapiens
  misc_RNA (1)...(19): siRNA sense strand
gauagaauuaccucuuaca

SEQ ID NO: 104413 - RNA, 19 nt, Homo sapiens
  misc_RNA (1)...(19): siRNA sense strand
ugaggacccugggaauguu

SEQ ID NO: 104414 - RNA, 19 nt, Homo sapiens
  misc_RNA (1)...(19): siRNA sense strand
gcugaagccaggaacaaga

SEQ ID NO: 104415 - RNA, 19 nt, Homo sapiens
  misc_RNA (1)...(19): siRNA sense strand
ggauuugauacucugcaua

SEQ ID NO: 104416 - RNA, 19 nt, Homo sapiens
  misc_RNA (1)...(19): siRNA sense strand
gcauagaguuaaaaugauc

SEQ ID NO: 104417 - RNA, 19 nt, Homo sapiens
  misc_RNA (1)...(19): siRNA sense strand
ugaaauggcuauugaguua

SEQ ID NO: 104418 - RNA, 19 nt, Homo sapiens
  misc_RNA (1)...(19): siRNA sense strand
gaagaugaaccacagcuua

SEQ ID NO: 104419 - RNA, 19 nt, Homo sapiens
  misc_RNA (1)...(19): siRNA sense strand
uggcauagcuuuaguaaug

SEQ ID NO: 104420 - RNA, 19 nt, Homo sapiens
  misc_RNA (1)...(19): siRNA sense strand
gcaaugauaucguuagaca

SEQ ID NO: 104421 - RNA, 19 nt, Homo sapiens
  misc_RNA (1)...(19): siRNA sense strand
caaauugaaugcaguuguu

SEQ ID NO: 104422 - RNA, 19 nt, Homo sapiens
  misc_RNA (1)...(19): siRNA sense strand
ugaaugcaguuguuaauga

SEQ ID NO: 104423 - RNA, 19 nt, Homo sapiens
  misc_RNA (1)...(19): siRNA sense strand
gagauaauuuggaaugguu

SEQ ID NO: 104424 - RNA, 19 nt, Homo sapiens
  misc_RNA (1)...(19): siRNA sense strand
ggaauaaaguacuaagagu

SEQ ID NO: 104425 - RNA, 19 nt, Homo sapiens
  misc_RNA (1)...(19): siRNA sense strand
gaaacaaggaagccauuaa

SEQ ID NO: 104426 - RNA, 19 nt, Homo sapiens
  misc_RNA (1)...(19): siRNA sense strand
caaggaagccauuaauuug

SEQ ID NO: 104427 - RNA, 19 nt, Homo sapiens
  misc_RNA (1)...(19): siRNA sense strand
uagagaaacugguaaagga

SEQ ID NO: 104428 - RNA, 19 nt, Homo sapiens
  misc_RNA (1)...(19): siRNA sense strand
ucacuuggguucauucuau

SEQ ID NO: 104429 - RNA, 19 nt, Homo sapiens
  misc_RNA (1)...(19): siRNA sense strand
ccaggaauguuagcuuaua

SEQ ID NO: 104430 - RNA, 19 nt, Homo sapiens
  misc_RNA (1)...(19): siRNA sense strand
ggacugggcauacucauau

SEQ ID NO: 104431 - RNA, 19 nt, Homo sapiens
  misc_RNA (1)...(19): siRNA sense strand
ucagacagcuguauuccaa

SEQ ID NO: 104432 - RNA, 19 nt, Homo sapiens
  misc_RNA (1)...(19): siRNA sense strand
uggaaggcaucguaaauaa

SEQ ID NO: 104433 - RNA, 19 nt, Homo sapiens
  misc_RNA (1)...(19): siRNA sense strand
gugccuggauccacuaaua

SEQ ID NO: 104434 - RNA, 19 nt, Homo sapiens
  misc_RNA (1)...(19): siRNA sense strand
uaacaaggacuuaaagaug

SEQ ID NO: 104435 - RNA, 19 nt, Homo sapiens
  misc_RNA (1)...(19): siRNA sense strand
ugaaaucacuuguccaaag

SEQ ID NO: 104436 - RNA, 19 nt, Homo sapiens
  misc_RNA (1)...(19): siRNA sense strand
gcccaaguguugucucuuu

SEQ ID NO: 104437 - RNA, 19 nt, Homo sapiens
  misc_RNA (1)...(19): siRNA sense strand
uaaacaggcuauuggcauu

SEQ ID NO: 104438 - RNA, 19 nt, Homo sapiens
  misc_RNA (1)...(19): siRNA sense strand
gaaaucacuuguccaaagg

SEQ ID NO: 104439 - RNA, 19 nt, Homo sapiens
  misc_RNA (1)...(19): siRNA sense strand
aaccacagcuuaaggaauu

SEQ ID NO: 104440 - RNA, 19 nt, Homo sapiens
  misc_RNA (1)...(19): siRNA sense strand
gacagugacucgauggaaa

SEQ ID NO: 104441 - RNA, 19 nt, Homo sapiens
  misc_RNA (1)...(19): siRNA sense strand
gacaaccagugaccaguuu

SEQ ID NO: 104442 - RNA, 19 nt, Homo sapiens
  misc_RNA (1)...(19): siRNA sense strand
guccaaaggugaaucaguu

SEQ ID NO: 104443 - RNA, 19 nt, Homo sapiens
  misc_RNA (1)...(19): siRNA sense strand
acaaggaagccauuaauuu

SEQ ID NO: 104444 - RNA, 19 nt, Homo sapiens
  misc_RNA (1)...(19): siRNA sense strand
ugagugauaucuuagagaa

SEQ ID NO: 104445 - RNA, 19 nt, Homo sapiens
  misc_RNA (1)...(19): siRNA sense strand
gcauagcuuuaguaaugua

SEQ ID NO: 104446 - RNA, 19 nt, Homo sapiens
  misc_RNA (1)...(19): siRNA sense strand
gaucagagaaagacaguga

SEQ ID NO: 104447 - RNA, 19 nt, Homo sapiens
  misc_RNA (1)...(19): siRNA sense strand
gaacugcacgucaagaugu

SEQ ID NO: 104448 - RNA, 19 nt, Homo sapiens
  misc_RNA (1)...(19): siRNA sense strand
ggauaccagugaagacauu

SEQ ID NO: 104449 - RNA, 19 nt, Homo sapiens
  misc_RNA (1)...(19): siRNA sense strand
gguuucuacugcuguauua

SEQ ID NO: 104450 - RNA, 19 nt, Homo sapiens
  misc_RNA (1)...(19): siRNA sense strand
gcagugcauuuguaggaaa

SEQ ID NO: 104451 - RNA, 19 nt, Homo sapiens
  misc_RNA (1)...(19): siRNA sense strand
ccagaaccauuugaguaua

SEQ ID NO: 104452 - RNA, 19 nt, Homo sapiens
  misc_RNA (1)...(19): siRNA sense strand
cugaauauguggaaacuau

SEQ ID NO: 104453 - RNA, 19 nt, Homo sapiens
  misc_RNA (1)...(19): siRNA sense strand
ugccgaaaguucaguauaa

SEQ ID NO: 104454 - RNA, 19 nt, Homo sapiens
  misc_RNA (1)...(19): siRNA sense strand
ggaugcagguggucauaau

SEQ ID NO: 104455 - RNA, 19 nt, Homo sapiens
  misc_RNA (1)...(19): siRNA sense strand
cgaaugaugucccaggaau

SEQ ID NO: 104456 - RNA, 19 nt, Homo sapiens
  misc_RNA (1)...(19): siRNA sense strand
ucgaaggucuggaauguau

SEQ ID NO: 104457 - RNA, 19 nt, Homo sapiens
  misc_RNA (1)...(19): siRNA sense strand
caaaaugcauugaucacua

SEQ ID NO: 104458 - RNA, 19 nt, Homo sapiens
  misc_RNA (1)...(19): siRNA sense strand
ggaaacaaggaagccauua

SEQ ID NO: 104459 - RNA, 19 nt, Homo sapiens
  misc_RNA (1)...(19): siRNA sense strand
gggauaugcugugcuggua

SEQ ID NO: 104460 - RNA, 19 nt, Homo sapiens
  misc_RNA (1)...(19): siRNA sense strand
gcacuaggucuuauucaug

SEQ ID NO: 104461 - RNA, 19 nt, Homo sapiens
  misc_RNA (1)...(19): siRNA sense strand
ggaaggcaucguaaauaaa

SEQ ID NO: 104462 - RNA, 19 nt, Homo sapiens
  misc_RNA (1)...(19): siRNA sense strand
uggcauaucagauuuguuu

SEQ ID NO: 104463 - RNA, 19 nt, Homo sapiens
  misc_RNA (1)...(19): siRNA sense strand
gcacaagaaacucaacaug

SEQ ID NO: 104464 - RNA, 19 nt, Homo sapiens
  misc_RNA (1)...(19): siRNA sense strand
auacagaccucaugauucu

SEQ ID NO: 104465 - RNA, 19 nt, Homo sapiens
  misc_RNA (1)...(19): siRNA sense strand
guggugaaauggcuauuga

SEQ ID NO: 104466 - RNA, 19 nt, Homo sapiens
  misc_RNA (1)...(19): siRNA sense strand
gagauuggaaggcaucgua

SEQ ID NO: 104467 - RNA, 19 nt, Homo sapiens
  misc_RNA (1)...(19): siRNA sense strand
cagaaccauuugaguauau

SEQ ID NO: 104468 - RNA, 19 nt, Homo sapiens
  misc_RNA (1)...(19): siRNA sense strand
ucauaugccuucugugguu

SEQ ID NO: 104469 - RNA, 19 nt, Homo sapiens
  misc_RNA (1)...(19): siRNA sense strand
ggucuggaauguauacugu

SEQ ID NO: 104470 - RNA, 19 nt, Homo sapiens
  misc_RNA (1)...(19): siRNA sense strand
ugauaacucugaauaugug

SEQ ID NO: 104471 - RNA, 19 nt, Homo sapiens
  misc_RNA (1)...(19): siRNA sense strand
ggaagccauuaauuugcua

SEQ ID NO: 104472 - RNA, 19 nt, Homo sapiens
  misc_RNA (1)...(19): siRNA sense strand
uaauacagaccucaugauu

SEQ ID NO: 104473 - RNA, 19 nt, Homo sapiens
  misc_RNA (1)...(19): siRNA sense strand
ggcugugagugauaucuua

SEQ ID NO: 104474 - RNA, 19 nt, Homo sapiens
  misc_RNA (1)...(19): siRNA sense strand
guuugucagugcuuaauuu

SEQ ID NO: 104475 - RNA, 19 nt, Homo sapiens
  misc_RNA (1)...(19): siRNA sense strand
gacaaggacccaauucuuc

SEQ ID NO: 104476 - RNA, 19 nt, Homo sapiens
  misc_RNA (1)...(19): siRNA sense strand
ucaaaccacucucuauugg

SEQ ID NO: 104477 - RNA, 19 nt, Homo sapiens
  misc_RNA (1)...(19): siRNA sense strand
uguaaaccauccacauuug

SEQ ID NO: 104478 - RNA, 19 nt, Homo sapiens
  misc_RNA (1)...(19): siRNA sense strand
gccgaaaguucaguauaaa

SEQ ID NO: 104479 - RNA, 19 nt, Homo sapiens
  misc_RNA (1)...(19): siRNA sense strand
auacgaagaugaagguuuc

SEQ ID NO: 104480 - RNA, 19 nt, Homo sapiens
  misc_RNA (1)...(19): siRNA sense strand
gcacuacacaaauugaaug

SEQ ID NO: 104481 - RNA, 19 nt, Homo sapiens
  misc_RNA (1)...(19): siRNA sense strand
gaccagacuuugaaaauga

SEQ ID NO: 104482 - RNA, 19 nt, Homo sapiens
  misc_RNA (1)...(19): siRNA sense strand
ucccaggaauguuagcuua

SEQ ID NO: 104483 - RNA, 19 nt, Homo sapiens
  misc_RNA (1)...(19): siRNA sense strand
ggaagacaaccuccugaug

SEQ ID NO: 104484 - RNA, 19 nt, Homo sapiens
  misc_RNA (1)...(19): siRNA sense strand
guagauaccagccuuucaa

SEQ ID NO: 104485 - RNA, 19 nt, Homo sapiens
  misc_RNA (1)...(19): siRNA sense strand
caaguguugucucuuuguu

SEQ ID NO: 104486 - RNA, 19 nt, Homo sapiens
  misc_RNA (1)...(19): siRNA sense strand
cacaagaaacucaacauga

SEQ ID NO: 104487 - RNA, 19 nt, Homo sapiens
  misc_RNA (1)...(19): siRNA sense strand
ucaugguggugauauaauu

SEQ ID NO: 104488 - RNA, 19 nt, Homo sapiens
  misc_RNA (1)...(19): siRNA sense strand
ggauacuucuccaggauca

SEQ ID NO: 104489 - RNA, 19 nt, Homo sapiens
  misc_RNA (1)...(19): siRNA sense strand
ggacaaccagugaccaguu

SEQ ID NO: 104490 - RNA, 19 nt, Homo sapiens
  misc_RNA (1)...(19): siRNA sense strand
aaacacaaaggaugcagua

SEQ ID NO: 104491 - RNA, 19 nt, Homo sapiens
  misc_RNA (1)...(19): siRNA sense strand
uuauuucucuucuggauga

SEQ ID NO: 104492 - RNA, 19 nt, Homo sapiens
  misc_RNA (1)...(19): siRNA sense strand
ucaaugauaagcaugauga

SEQ ID NO: 104493 - RNA, 19 nt, Homo sapiens
  misc_RNA (1)...(19): siRNA sense strand
caucugcaguucuuaauac

SEQ ID NO: 104494 - RNA, 19 nt, Homo sapiens
  misc_RNA (1)...(19): siRNA sense strand
uugaggagucucugaauua

SEQ ID NO: 104495 - RNA, 19 nt, Homo sapiens
  misc_RNA (1)...(19): siRNA sense strand
cuacugcuguauuaucuau

SEQ ID NO: 104496 - RNA, 19 nt, Homo sapiens
  misc_RNA (1)...(19): siRNA sense strand
gagggcagcaguagaauca

SEQ ID NO: 104497 - RNA, 19 nt, Homo sapiens
  misc_RNA (1)...(19): siRNA sense strand
cagcaaugauaucguuaga

SEQ ID NO: 104498 - RNA, 19 nt, Homo sapiens
  misc_RNA (1)...(19): siRNA sense strand
guggugauauaauugacua

SEQ ID NO: 104499 - RNA, 19 nt, Homo sapiens
  misc_RNA (1)...(19): siRNA sense strand
gaaggcaucguaaauaaaa

SEQ ID NO: 104500 - RNA, 19 nt, Homo sapiens
  misc_RNA (1)...(19): siRNA sense strand
ugaggagucucugaauuau

SEQ ID NO: 104501 - RNA, 19 nt, Homo sapiens
  misc_RNA (1)...(19): siRNA sense strand
gauaugcugugcugguaca

SEQ ID NO: 104502 - RNA, 19 nt, Homo sapiens
  misc_RNA (1)...(19): siRNA sense strand
aguggcaucuaaaguauuu

SEQ ID NO: 104503 - RNA, 19 nt, Homo sapiens
  misc_RNA (1)...(19): siRNA sense strand
uugacuaucugcuuaauca

SEQ ID NO: 104504 - RNA, 19 nt, Homo sapiens
  misc_RNA (1)...(19): siRNA sense strand
caauguuugucagugcuua

SEQ ID NO: 104505 - RNA, 19 nt, Homo sapiens
  misc_RNA (1)...(19): siRNA sense strand
uaaagaugccgaaaguuca

SEQ ID NO: 104506 - RNA, 19 nt, Homo sapiens
  misc_RNA (1)...(19): siRNA sense strand
aaacaaggaagccauuaau

SEQ ID NO: 104507 - RNA, 19 nt, Homo sapiens
  misc_RNA (1)...(19): siRNA sense strand
ggaggucucuaugcacuag

SEQ ID NO: 104508 - RNA, 19 nt, Homo sapiens
  misc_RNA (1)...(19): siRNA sense strand
caaugucaaugauaacucu

SEQ ID NO: 104509 - RNA, 19 nt, Homo sapiens
  misc_RNA (1)...(19): siRNA sense strand
cgaaaguucaguauaaauc

SEQ ID NO: 104510 - RNA, 19 nt, Homo sapiens
  misc_RNA (1)...(19): siRNA sense strand
uuaaagaugccgaaaguuc

SEQ ID NO: 104511 - RNA, 19 nt, Homo sapiens
  misc_RNA (1)...(19): siRNA sense strand
gaaccacagcuuaaggaau

SEQ ID NO: 104512 - RNA, 19 nt, Homo sapiens
  misc_RNA (1)...(19): siRNA sense strand
caugggaacugcacgucaa

SEQ ID NO: 104513 - RNA, 19 nt, Homo sapiens
  misc_RNA (1)...(19): siRNA sense strand
gaagguggaggucucuaug

SEQ ID NO: 104514 - RNA, 19 nt, Homo sapiens
  misc_RNA (1)...(19): siRNA sense strand
uacaguuaauggcaacaua

SEQ ID NO: 104515 - RNA, 19 nt, Homo sapiens
  misc_RNA (1)...(19): siRNA sense strand
gaaugcaguuguuaaugac

SEQ ID NO: 104516 - RNA, 19 nt, Homo sapiens
  misc_RNA (1)...(19): siRNA sense strand
gcauugaucacuacaccaa

SEQ ID NO: 104517 - RNA, 19 nt, Homo sapiens
  misc_RNA (1)...(19): siRNA sense strand
ggacacagaggcugauuua

SEQ ID NO: 104518 - RNA, 19 nt, Homo sapiens
  misc_RNA (1)...(19): siRNA sense strand
ccaaggagauggcagaaga

SEQ ID NO: 104519 - RNA, 19 nt, Homo sapiens
  misc_RNA (1)...(19): siRNA sense strand
gaugggaccuacacccuaa

SEQ ID NO: 104520 - RNA, 19 nt, Homo sapiens
  misc_RNA (1)...(19): siRNA sense strand
ggaauuaccuacacuacag

SEQ ID NO: 104521 - RNA, 19 nt, Homo sapiens
  misc_RNA (1)...(19): siRNA sense strand
gaacagcaagcgcuacaaa

SEQ ID NO: 104522 - RNA, 19 nt, Homo sapiens
  misc_RNA (1)...(19): siRNA sense strand
ccgcaaaguguuacuauua

SEQ ID NO: 104523 - RNA, 19 nt, Homo sapiens
  misc_RNA (1)...(19): siRNA sense strand
caaccacuauguucuguau

SEQ ID NO: 104524 - RNA, 19 nt, Homo sapiens
  misc_RNA (1)...(19): siRNA sense strand
caggaaaccuagccaaguu

SEQ ID NO: 104525 - RNA, 19 nt, Homo sapiens
  misc_RNA (1)...(19): siRNA sense strand
ccaaggagaugauugacau

SEQ ID NO: 104526 - RNA, 19 nt, Homo sapiens
  misc_RNA (1)...(19): siRNA sense strand
gugcagggcuucuucacuu

SEQ ID NO: 104527 - RNA, 19 nt, Homo sapiens
  misc_RNA (1)...(19): siRNA sense strand
gcaaaguguuacuauuauc

SEQ ID NO: 104528 - RNA, 19 nt, Homo sapiens
  misc_RNA (1)...(19): siRNA sense strand
gcucacucaugcccuauuu

SEQ ID NO: 104529 - RNA, 19 nt, Homo sapiens
  misc_RNA (1)...(19): siRNA sense strand
ggaccuacacccuaauuau

SEQ ID NO: 104530 - RNA, 19 nt, Homo sapiens
  misc_RNA (1)...(19): siRNA sense strand
uaaugccacucgagacuuu

SEQ ID NO: 104531 - RNA, 19 nt, Homo sapiens
  misc_RNA (1)...(19): siRNA sense strand
gaagaucaguacucagaac

SEQ ID NO: 104532 - RNA, 19 nt, Homo sapiens
  misc_RNA (1)...(19): siRNA sense strand
gagaagggcuauguccaau

SEQ ID NO: 104533 - RNA, 19 nt, Homo sapiens
  misc_RNA (1)...(19): siRNA sense strand
ggagaaguuucaagcagau

SEQ ID NO: 104534 - RNA, 19 nt, Homo sapiens
  misc_RNA (1)...(19): siRNA sense strand
cagcuacgcuucggcauga

SEQ ID NO: 104535 - RNA, 19 nt, Homo sapiens
  misc_RNA (1)...(19): siRNA sense strand
ugaaacagcuagagaaagc

SEQ ID NO: 104536 - RNA, 19 nt, Homo sapiens
  misc_RNA (1)...(19): siRNA sense strand
gaugcagaguucauuguug

SEQ ID NO: 104537 - RNA, 19 nt, Homo sapiens
  misc_RNA (1)...(19): siRNA sense strand
gaagaugcagaguucauug

SEQ ID NO: 104538 - RNA, 19 nt, Homo sapiens
  misc_RNA (1)...(19): siRNA sense strand
ggagauggcagaagaugau

SEQ ID NO: 104539 - RNA, 19 nt, Homo sapiens
  misc_RNA (1)...(19): siRNA sense strand
gagaacagcaggacuugga

SEQ ID NO: 104540 - RNA, 19 nt, Homo sapiens
  misc_RNA (1)...(19): siRNA sense strand
cagaagaucaguacucaga

SEQ ID NO: 104541 - RNA, 19 nt, Homo sapiens
  misc_RNA (1)...(19): siRNA sense strand
ucaaggagcacgugaaaca

SEQ ID NO: 104542 - RNA, 19 nt, Homo sapiens
  misc_RNA (1)...(19): siRNA sense strand
gaagggcuauguccaaucc

SEQ ID NO: 104543 - RNA, 19 nt, Homo sapiens
  misc_RNA (1)...(19): siRNA sense strand
cugagaagcugguguccaa

SEQ ID NO: 104544 - RNA, 19 nt, Homo sapiens
  misc_RNA (1)...(19): siRNA sense strand
cagcaggacuuggaguuug

SEQ ID NO: 104545 - RNA, 19 nt, Homo sapiens
  misc_RNA (1)...(19): siRNA sense strand
cgcaaaguguuacuauuau

SEQ ID NO: 104546 - RNA, 19 nt, Homo sapiens
  misc_RNA (1)...(19): siRNA sense strand
cccagaagcugcaguugga

SEQ ID NO: 104547 - RNA, 19 nt, Homo sapiens
  misc_RNA (1)...(19): siRNA sense strand
acacagaggcugauuuaca

SEQ ID NO: 104548 - RNA, 19 nt, Homo sapiens
  misc_RNA (1)...(19): siRNA sense strand
accacuauguucuguauaa

SEQ ID NO: 104549 - RNA, 19 nt, Homo sapiens
  misc_RNA (1)...(19): siRNA sense strand
ggaagccuaucuccaacuc

SEQ ID NO: 104550 - RNA, 19 nt, Homo sapiens
  misc_RNA (1)...(19): siRNA sense strand
caucaaggagcacgugaaa

SEQ ID NO: 104551 - RNA, 19 nt, Homo sapiens
  misc_RNA (1)...(19): siRNA sense strand
ccagguaccucuacuacac

SEQ ID NO: 104552 - RNA, 19 nt, Homo sapiens
  misc_RNA (1)...(19): siRNA sense strand
cuacacagggcgaaucaaa

SEQ ID NO: 104553 - RNA, 19 nt, Homo sapiens
  misc_RNA (1)...(19): siRNA sense strand
ucaaacagacggugcacaa

SEQ ID NO: 104554 - RNA, 19 nt, Homo sapiens
  misc_RNA (1)...(19): siRNA sense strand
acaaagaggcacagaagau

SEQ ID NO: 104555 - RNA, 19 nt, Homo sapiens
  misc_RNA (1)...(19): siRNA sense strand
ccaaaucguacaacaagga

SEQ ID NO: 104556 - RNA, 19 nt, Homo sapiens
  misc_RNA (1)...(19): siRNA sense strand
cuagauauccacaacaugu

SEQ ID NO: 104557 - RNA, 19 nt, Homo sapiens
  misc_RNA (1)...(19): siRNA sense strand
cacagaggcugauuuacag

SEQ ID NO: 104558 - RNA, 19 nt, Homo sapiens
  misc_RNA (1)...(19): siRNA sense strand
ggaacggcgugagcgagaa

SEQ ID NO: 104559 - RNA, 19 nt, Homo sapiens
  misc_RNA (1)...(19): siRNA sense strand
ccuauuuccuucugacuca

SEQ ID NO: 104560 - RNA, 19 nt, Homo sapiens
  misc_RNA (1)...(19): siRNA sense strand
gagcaggccaacaacaaug

SEQ ID NO: 104561 - RNA, 19 nt, Homo sapiens
  misc_RNA (1)...(19): siRNA sense strand
ucuaugaguuccuggacaa

SEQ ID NO: 104562 - RNA, 19 nt, Homo sapiens
  misc_RNA (1)...(19): siRNA sense strand
ggcagaagaugaugaugac

SEQ ID NO: 104563 - RNA, 19 nt, Homo sapiens
  misc_RNA (1)...(19): siRNA sense strand
ugaucagccucuccuauuc

SEQ ID NO: 104564 - RNA, 19 nt, Homo sapiens
  misc_RNA (1)...(19): siRNA sense strand
gaccuacacccuaauuauc

SEQ ID NO: 104565 - RNA, 19 nt, Homo sapiens
  misc_RNA (1)...(19): siRNA sense strand
gcaaggagccgagauucgu

SEQ ID NO: 104566 - RNA, 19 nt, Homo sapiens
  misc_RNA (1)...(19): siRNA sense strand
gccgcaaaguguuacuauu

SEQ ID NO: 104567 - RNA, 19 nt, Homo sapiens
  misc_RNA (1)...(19): siRNA sense strand
cgagaagggcuauguccaa

SEQ ID NO: 104568 - RNA, 19 nt, Homo sapiens
  misc_RNA (1)...(19): siRNA sense strand
gcacaacgugauuaagaca

SEQ ID NO: 104569 - RNA, 19 nt, Homo sapiens
  misc_RNA (1)...(19): siRNA sense strand
cggcacaacgugauuaaga

SEQ ID NO: 104570 - RNA, 19 nt, Homo sapiens
  misc_RNA (1)...(19): siRNA sense strand
uggcugacaucgcccagaa

SEQ ID NO: 104571 - RNA, 19 nt, Homo sapiens
  misc_RNA (1)...(19): siRNA sense strand
cagaagcugcaguuggaua

SEQ ID NO: 104572 - RNA, 19 nt, Homo sapiens
  misc_RNA (1)...(19): siRNA sense strand
acagcaagcgcuacaaaga

SEQ ID NO: 104573 - RNA, 19 nt, Homo sapiens
  misc_RNA (1)...(19): siRNA sense strand
gccuagauauccacaacau

SEQ ID NO: 104574 - RNA, 19 nt, Homo sapiens
  misc_RNA (1)...(19): siRNA sense strand
cccaggauguggagaugaa

SEQ ID NO: 104575 - RNA, 19 nt, Homo sapiens
  misc_RNA (1)...(19): siRNA sense strand
caaagaggcacagaagauc

SEQ ID NO: 104576 - RNA, 19 nt, Homo sapiens
  misc_RNA (1)...(19): siRNA sense strand
cuacaaagaggcacagaag

SEQ ID NO: 104577 - RNA, 19 nt, Homo sapiens
  misc_RNA (1)...(19): siRNA sense strand
ccuccugccugaaguggaa

SEQ ID NO: 104578 - RNA, 19 nt, Homo sapiens
  misc_RNA (1)...(19): siRNA sense strand
gggaccuacacccuaauua

SEQ ID NO: 104579 - RNA, 19 nt, Homo sapiens
  misc_RNA (1)...(19): siRNA sense strand
ggaaaccuagccaaguuca

SEQ ID NO: 104580 - RNA, 19 nt, Homo sapiens
  misc_RNA (1)...(19): siRNA sense strand
acaaugagugggccaggua

SEQ ID NO: 104581 - RNA, 19 nt, Homo sapiens
  misc_RNA (1)...(19): siRNA sense strand
cagagcaggccaacaacaa

SEQ ID NO: 104582 - RNA, 19 nt, Homo sapiens
  misc_RNA (1)...(19): siRNA sense strand
uggcagaagaugaugauga

SEQ ID NO: 104583 - RNA, 19 nt, Homo sapiens
  misc_RNA (1)...(19): siRNA sense strand
cgaagaugcagaguucauu

SEQ ID NO: 104584 - RNA, 19 nt, Homo sapiens
  misc_RNA (1)...(19): siRNA sense strand
cgugaaacagcuagagaaa

SEQ ID NO: 104585 - RNA, 19 nt, Homo sapiens
  misc_RNA (1)...(19): siRNA sense strand
cggcggaggagaacaagaa

SEQ ID NO: 104586 - RNA, 19 nt, Homo sapiens
  misc_RNA (1)...(19): siRNA sense strand
gagaagcugguguccaagu

SEQ ID NO: 104587 - RNA, 19 nt, Homo sapiens
  misc_RNA (1)...(19): siRNA sense strand
agcgagagcuggacacagu

SEQ ID NO: 104588 - RNA, 19 nt, Homo sapiens
  misc_RNA (1)...(19): siRNA sense strand
ugcagaagaucaguacuca

SEQ ID NO: 104589 - RNA, 19 nt, Homo sapiens
  misc_RNA (1)...(19): siRNA sense strand
gguuuccucccaaaucgua

SEQ ID NO: 104590 - RNA, 19 nt, Homo sapiens
  misc_RNA (1)...(19): siRNA sense strand
acacagcugucggcuucaa

SEQ ID NO: 104591 - RNA, 19 nt, Homo sapiens
  misc_RNA (1)...(19): siRNA sense strand
gcuacaaagaggcacagaa

SEQ ID NO: 104592 - RNA, 19 nt, Homo sapiens
  misc_RNA (1)...(19): siRNA sense strand
gauggcagaagaugaugau

SEQ ID NO: 104593 - RNA, 19 nt, Homo sapiens
  misc_RNA (1)...(19): siRNA sense strand
ggcacaacgugauuaagac

SEQ ID NO: 104594 - RNA, 19 nt, Homo sapiens
  misc_RNA (1)...(19): siRNA sense strand
agaggcugauuuacaguuc

SEQ ID NO: 104595 - RNA, 19 nt, Homo sapiens
  misc_RNA (1)...(19): siRNA sense strand
ggaguuugccaaggagaug

SEQ ID NO: 104596 - RNA, 19 nt, Homo sapiens
  misc_RNA (1)...(19): siRNA sense strand
ggaagagcccauggacaca

SEQ ID NO: 104597 - RNA, 19 nt, Homo sapiens
  misc_RNA (1)...(19): siRNA sense strand
ccacuauguucuguauaag

SEQ ID NO: 104598 - RNA, 19 nt, Homo sapiens
  misc_RNA (1)...(19): siRNA sense strand
gaaucuccuuggcugacau

SEQ ID NO: 104599 - RNA, 19 nt, Homo sapiens
  misc_RNA (1)...(19): siRNA sense strand
ucccagagcaggccaacaa

SEQ ID NO: 104600 - RNA, 19 nt, Homo sapiens
  misc_RNA (1)...(19): siRNA sense strand
ccuuguagccgcaaagugu

SEQ ID NO: 104601 - RNA, 19 nt, Homo sapiens
  misc_RNA (1)...(19): siRNA sense strand
gcagggcuucuucacuuca

SEQ ID NO: 104602 - RNA, 19 nt, Homo sapiens
  misc_RNA (1)...(19): siRNA sense strand
caugaucagccucuccuau

SEQ ID NO: 104603 - RNA, 19 nt, Homo sapiens
  misc_RNA (1)...(19): siRNA sense strand
gaaaccuagccaaguucaa

SEQ ID NO: 104604 - RNA, 19 nt, Homo sapiens
  misc_RNA (1)...(19): siRNA sense strand
uaccuacacuacagcuugu

SEQ ID NO: 104605 - RNA, 19 nt, Homo sapiens
  misc_RNA (1)...(19): siRNA sense strand
gcgagaacagcaggacuug

SEQ ID NO: 104606 - RNA, 19 nt, Homo sapiens
  misc_RNA (1)...(19): siRNA sense strand
ugucaaggccaugagguuu

SEQ ID NO: 104607 - RNA, 19 nt, Homo sapiens
  misc_RNA (1)...(19): siRNA sense strand
gcuucuucacuucaaauaa

SEQ ID NO: 104608 - RNA, 19 nt, Homo sapiens
  misc_RNA (1)...(19): siRNA sense strand
cagcaagcgcuacaaagag

SEQ ID NO: 104609 - RNA, 19 nt, Homo sapiens
  misc_RNA (1)...(19): siRNA sense strand
cagcaucaaccacgagaag

SEQ ID NO: 104610 - RNA, 19 nt, Homo sapiens
  misc_RNA (1)...(19): siRNA sense strand
aagagcccauggacacaga

SEQ ID NO: 104611 - RNA, 19 nt, Homo sapiens
  misc_RNA (1)...(19): siRNA sense strand
acucaugcccuauuuccuu

SEQ ID NO: 104612 - RNA, 19 nt, Homo sapiens
  misc_RNA (1)...(19): siRNA sense strand
ccucaagcgcucacucaug

SEQ ID NO: 104613 - RNA, 19 nt, Homo sapiens
  misc_RNA (1)...(19): siRNA sense strand
cagaggcugauuuacaguu

SEQ ID NO: 104614 - RNA, 19 nt, Homo sapiens
  misc_RNA (1)...(19): siRNA sense strand
cagggcuucuucacuucaa

SEQ ID NO: 104615 - RNA, 19 nt, Homo sapiens
  misc_RNA (1)...(19): siRNA sense strand
ccucccaaaucguacaaca

SEQ ID NO: 104616 - RNA, 19 nt, Homo sapiens
  misc_RNA (1)...(19): siRNA sense strand
cgaaucuccuuggcugaca

SEQ ID NO: 104617 - RNA, 19 nt, Homo sapiens
  misc_RNA (1)...(19): siRNA sense strand
caacauaguuugucauuca

SEQ ID NO: 104618 - RNA, 19 nt, Homo sapiens
  misc_RNA (1)...(19): siRNA sense strand
gcaggaugcugucaacaua

SEQ ID NO: 104619 - RNA, 19 nt, Homo sapiens
  misc_RNA (1)...(19): siRNA sense strand
ccaaggaggaggaugauua

SEQ ID NO: 104620 - RNA, 19 nt, Homo sapiens
  misc_RNA (1)...(19): siRNA sense strand
ggacaacagugaguauaug

SEQ ID NO: 104621 - RNA, 19 nt, Homo sapiens
  misc_RNA (1)...(19): siRNA sense strand
ggaaagcacuauggugugu

SEQ ID NO: 104622 - RNA, 19 nt, Homo sapiens
  misc_RNA (1)...(19): siRNA sense strand
cuaaacgccucaagaagga

SEQ ID NO: 104623 - RNA, 19 nt, Homo sapiens
  misc_RNA (1)...(19): siRNA sense strand
gagaacaacgugggccuua

SEQ ID NO: 104624 - RNA, 19 nt, Homo sapiens
  misc_RNA (1)...(19): siRNA sense strand
agaaggaucuggugaaacu

SEQ ID NO: 104625 - RNA, 19 nt, Homo sapiens
  misc_RNA (1)...(19): siRNA sense strand
ugagaaggaucuggugaaa

SEQ ID NO: 104626 - RNA, 19 nt, Homo sapiens
  misc_RNA (1)...(19): siRNA sense strand
aagaggaggugaacacaga

SEQ ID NO: 104627 - RNA, 19 nt, Homo sapiens
  misc_RNA (1)...(19): siRNA sense strand
gcagcaacccugagaacaa

SEQ ID NO: 104628 - RNA, 19 nt, Homo sapiens
  misc_RNA (1)...(19): siRNA sense strand
gaaggagaaaguaaauguu

SEQ ID NO: 104629 - RNA, 19 nt, Homo sapiens
  misc_RNA (1)...(19): siRNA sense strand
gcucagcuauggacacauc

SEQ ID NO: 104630 - RNA, 19 nt, Homo sapiens
  misc_RNA (1)...(19): siRNA sense strand
gaacaacgugggccuuauc

SEQ ID NO: 104631 - RNA, 19 nt, Homo sapiens
  misc_RNA (1)...(19): siRNA sense strand
gccagugacuuugaauuug

SEQ ID NO: 104632 - RNA, 19 nt, Homo sapiens
  misc_RNA (1)...(19): siRNA sense strand
ucaagaaggagaaaguaaa

SEQ ID NO: 104633 - RNA, 19 nt, Homo sapiens
  misc_RNA (1)...(19): siRNA sense strand
caagaaggagaaaguaaau

SEQ ID NO: 104634 - RNA, 19 nt, Homo sapiens
  misc_RNA (1)...(19): siRNA sense strand
gcggaauggagacuucuua

SEQ ID NO: 104635 - RNA, 19 nt, Homo sapiens
  misc_RNA (1)...(19): siRNA sense strand
caacgugggccuuaucaca

SEQ ID NO: 104636 - RNA, 19 nt, Homo sapiens
  misc_RNA (1)...(19): siRNA sense strand
guucucaucuggugacagu

SEQ ID NO: 104637 - RNA, 19 nt, Homo sapiens
  misc_RNA (1)...(19): siRNA sense strand
caagcuacauacuguccaa

SEQ ID NO: 104638 - RNA, 19 nt, Homo sapiens
  misc_RNA (1)...(19): siRNA sense strand
gcgcaucauugccuuugug

SEQ ID NO: 104639 - RNA, 19 nt, Homo sapiens
  misc_RNA (1)...(19): siRNA sense strand
ccagugacuuugaauuugg

SEQ ID NO: 104640 - RNA, 19 nt, Homo sapiens
  misc_RNA (1)...(19): siRNA sense strand
ucucaucaguucuccgauu

SEQ ID NO: 104641 - RNA, 19 nt, Homo sapiens
  misc_RNA (1)...(19): siRNA sense strand
uuaucacacuggcuaauga

SEQ ID NO: 104642 - RNA, 19 nt, Homo sapiens
  misc_RNA (1)...(19): siRNA sense strand
uguccaagcuacauacugu

SEQ ID NO: 104643 - RNA, 19 nt, Homo sapiens
  misc_RNA (1)...(19): siRNA sense strand
gaagcccaguggaggacaa

SEQ ID NO: 104644 - RNA, 19 nt, Homo sapiens
  misc_RNA (1)...(19): siRNA sense strand
ggaggacaaugagaaggau

SEQ ID NO: 104645 - RNA, 19 nt, Homo sapiens
  misc_RNA (1)...(19): siRNA sense strand
cgacaaggcaagaaucaca

SEQ ID NO: 104646 - RNA, 19 nt, Homo sapiens
  misc_RNA (1)...(19): siRNA sense strand
gacgaugcccugcugaaga

SEQ ID NO: 104647 - RNA, 19 nt, Homo sapiens
  misc_RNA (1)...(19): siRNA sense strand
ugacuuugaauuuggagua

SEQ ID NO: 104648 - RNA, 19 nt, Homo sapiens
  misc_RNA (1)...(19): siRNA sense strand
gcaccgacaaggcaagaau

SEQ ID NO: 104649 - RNA, 19 nt, Homo sapiens
  misc_RNA (1)...(19): siRNA sense strand
agaaggagaaaguaaaugu

SEQ ID NO: 104650 - RNA, 19 nt, Homo sapiens
  misc_RNA (1)...(19): siRNA sense strand
aggcaagaaucacaagaug

SEQ ID NO: 104651 - RNA, 19 nt, Homo sapiens
  misc_RNA (1)...(19): siRNA sense strand
gugaguauaugcggaaugg

SEQ ID NO: 104652 - RNA, 19 nt, Homo sapiens
  misc_RNA (1)...(19): siRNA sense strand
aggagaaaguaaauguuga

SEQ ID NO: 104653 - RNA, 19 nt, Homo sapiens
  misc_RNA (1)...(19): siRNA sense strand
gaugcugucaacauaguuu

SEQ ID NO: 104654 - RNA, 19 nt, Homo sapiens
  misc_RNA (1)...(19): siRNA sense strand
ccaaggacggcaagaagga

SEQ ID NO: 104655 - RNA, 19 nt, Homo sapiens
  misc_RNA (1)...(19): siRNA sense strand
cacacuggcuaaugacugu

SEQ ID NO: 104656 - RNA, 19 nt, Homo sapiens
  misc_RNA (1)...(19): siRNA sense strand
cucaucaguucuccgauuu

SEQ ID NO: 104657 - RNA, 19 nt, Homo sapiens
  misc_RNA (1)...(19): siRNA sense strand
aaagcacuauggugugugu

SEQ ID NO: 104658 - RNA, 19 nt, Homo sapiens
  misc_RNA (1)...(19): siRNA sense strand
uggcuaaacgccucaagaa

SEQ ID NO: 104659 - RNA, 19 nt, Homo sapiens
  misc_RNA (1)...(19): siRNA sense strand
ugccagugacuuugaauuu

SEQ ID NO: 104660 - RNA, 19 nt, Homo sapiens
  misc_RNA (1)...(19): siRNA sense strand
aaggagaaaguaaauguug

SEQ ID NO: 104661 - RNA, 19 nt, Homo sapiens
  misc_RNA (1)...(19): siRNA sense strand
cagcaacccugagaacaac

SEQ ID NO: 104662 - RNA, 19 nt, Homo sapiens
  misc_RNA (1)...(19): siRNA sense strand
ggcggaaucagcagacauu

SEQ ID NO: 104663 - RNA, 19 nt, Homo sapiens
  misc_RNA (1)...(19): siRNA sense strand
gaggaggugaacacagaaa

SEQ ID NO: 104664 - RNA, 19 nt, Homo sapiens
  misc_RNA (1)...(19): siRNA sense strand
acgaugcccugcugaagau

SEQ ID NO: 104665 - RNA, 19 nt, Homo sapiens
  misc_RNA (1)...(19): siRNA sense strand
cagccaaggaggaggauga

SEQ ID NO: 104666 - RNA, 19 nt, Homo sapiens
  misc_RNA (1)...(19): siRNA sense strand
gucaacauaguuugucauu

SEQ ID NO: 104667 - RNA, 19 nt, Homo sapiens
  misc_RNA (1)...(19): siRNA sense strand
ggaagaggaggugaacaca

SEQ ID NO: 104668 - RNA, 19 nt, Homo sapiens
  misc_RNA (1)...(19): siRNA sense strand
gcccaguggaggacaauga

SEQ ID NO: 104669 - RNA, 19 nt, Homo sapiens
  misc_RNA (1)...(19): siRNA sense strand
gacaaggcaagaaucacaa

SEQ ID NO: 104670 - RNA, 19 nt, Homo sapiens
  misc_RNA (1)...(19): siRNA sense strand
ugacagccuuuguaaacac

SEQ ID NO: 104671 - RNA, 19 nt, Homo sapiens
  misc_RNA (1)...(19): siRNA sense strand
caaggaggaggaugauuac

SEQ ID NO: 104672 - RNA, 19 nt, Homo sapiens
  misc_RNA (1)...(19): siRNA sense strand
cacguugaauggcaaagau

SEQ ID NO: 104673 - RNA, 19 nt, Homo sapiens
  misc_RNA (1)...(19): siRNA sense strand
agaacaacgugggccuuau

SEQ ID NO: 104674 - RNA, 19 nt, Homo sapiens
  misc_RNA (1)...(19): siRNA sense strand
ggagaaaguaaauguugac

SEQ ID NO: 104675 - RNA, 19 nt, Homo sapiens
  misc_RNA (1)...(19): siRNA sense strand
ccucaagaaggagaaagua

SEQ ID NO: 104676 - RNA, 19 nt, Homo sapiens
  misc_RNA (1)...(19): siRNA sense strand
guggacaacagugaguaua

SEQ ID NO: 104677 - RNA, 19 nt, Homo sapiens
  misc_RNA (1)...(19): siRNA sense strand
ccaccaaggacggcaagaa

SEQ ID NO: 104678 - RNA, 19 nt, Homo sapiens
  misc_RNA (1)...(19): siRNA sense strand
cggaaucagcagacauuga

SEQ ID NO: 104679 - RNA, 19 nt, Homo sapiens
  misc_RNA (1)...(19): siRNA sense strand
caacccaagggcaagauca

SEQ ID NO: 104680 - RNA, 19 nt, Homo sapiens
  misc_RNA (1)...(19): siRNA sense strand
gcuuaugccaugcagaugu

SEQ ID NO: 104681 - RNA, 19 nt, Homo sapiens
  misc_RNA (1)...(19): siRNA sense strand
gauuuuggcuggugaaggu

SEQ ID NO: 104682 - RNA, 19 nt, Homo sapiens
  misc_RNA (1)...(19): siRNA sense strand
caaggcaagaaucacaaga

SEQ ID NO: 104683 - RNA, 19 nt, Homo sapiens
  misc_RNA (1)...(19): siRNA sense strand
ggaugauuacgacgugaug

SEQ ID NO: 104684 - RNA, 19 nt, Homo sapiens
  misc_RNA (1)...(19): siRNA sense strand
gacuuugaauuuggaguag

SEQ ID NO: 104685 - RNA, 19 nt, Homo sapiens
  misc_RNA (1)...(19): siRNA sense strand
ucaacauaguuugucauuc

SEQ ID NO: 104686 - RNA, 19 nt, Homo sapiens
  misc_RNA (1)...(19): siRNA sense strand
gggaagaggaggugaacac

SEQ ID NO: 104687 - RNA, 19 nt, Homo sapiens
  misc_RNA (1)...(19): siRNA sense strand
uaugcggaauggagacuuc

SEQ ID NO: 104688 - RNA, 19 nt, Homo sapiens
  misc_RNA (1)...(19): siRNA sense strand
uggcccaucuggcucugaa

SEQ ID NO: 104689 - RNA, 19 nt, Homo sapiens
  misc_RNA (1)...(19): siRNA sense strand
ugacugaggaagagcagau

SEQ ID NO: 104690 - RNA, 19 nt, Homo sapiens
  misc_RNA (1)...(19): siRNA sense strand
cuuccugaccuaagcagua

SEQ ID NO: 104691 - RNA, 19 nt, Homo sapiens
  misc_RNA (1)...(19): siRNA sense strand
gggcccaguuuggcugaug

SEQ ID NO: 104692 - RNA, 19 nt, Homo sapiens
  misc_RNA (1)...(19): siRNA sense strand
caguggaggacaaugagaa

SEQ ID NO: 104693 - RNA, 19 nt, Homo sapiens
  misc_RNA (1)...(19): siRNA sense strand
caacauaguuugucauuca

SEQ ID NO: 104694 - RNA, 19 nt, Homo sapiens
  misc_RNA (1)...(19): siRNA sense strand
gcaggaugcugucaacaua

SEQ ID NO: 104695 - RNA, 19 nt, Homo sapiens
  misc_RNA (1)...(19): siRNA sense strand
ggacaacagugaguauaug

SEQ ID NO: 104696 - RNA, 19 nt, Homo sapiens
  misc_RNA (1)...(19): siRNA sense strand
ggaaagcacuauggugugu

SEQ ID NO: 104697 - RNA, 19 nt, Homo sapiens
  misc_RNA (1)...(19): siRNA sense strand
cuaaacgccucaagaagga

SEQ ID NO: 104698 - RNA, 19 nt, Homo sapiens
  misc_RNA (1)...(19): siRNA sense strand
gagaacaacgugggccuua

SEQ ID NO: 104699 - RNA, 19 nt, Homo sapiens
  misc_RNA (1)...(19): siRNA sense strand
agaaggaucuggugaaacu

SEQ ID NO: 104700 - RNA, 19 nt, Homo sapiens
  misc_RNA (1)...(19): siRNA sense strand
ugagaaggaucuggugaaa

SEQ ID NO: 104701 - RNA, 19 nt, Homo sapiens
  misc_RNA (1)...(19): siRNA sense strand
aagaggaggugaacacaga

SEQ ID NO: 104702 - RNA, 19 nt, Homo sapiens
  misc_RNA (1)...(19): siRNA sense strand
gcagcaacccugagaacaa

SEQ ID NO: 104703 - RNA, 19 nt, Homo sapiens
  misc_RNA (1)...(19): siRNA sense strand
gaaggagaaaguaaauguu

SEQ ID NO: 104704 - RNA, 19 nt, Homo sapiens
  misc_RNA (1)...(19): siRNA sense strand
gaacaacgugggccuuauc

SEQ ID NO: 104705 - RNA, 19 nt, Homo sapiens
  misc_RNA (1)...(19): siRNA sense strand
gccagugacuuugaauuug

SEQ ID NO: 104706 - RNA, 19 nt, Homo sapiens
  misc_RNA (1)...(19): siRNA sense strand
ucaagaaggagaaaguaaa

SEQ ID NO: 104707 - RNA, 19 nt, Homo sapiens
  misc_RNA (1)...(19): siRNA sense strand
caagaaggagaaaguaaau

SEQ ID NO: 104708 - RNA, 19 nt, Homo sapiens
  misc_RNA (1)...(19): siRNA sense strand
gcggaauggagacuucuua

SEQ ID NO: 104709 - RNA, 19 nt, Homo sapiens
  misc_RNA (1)...(19): siRNA sense strand
caacgugggccuuaucaca

SEQ ID NO: 104710 - RNA, 19 nt, Homo sapiens
  misc_RNA (1)...(19): siRNA sense strand
guucucaucuggugacagu

SEQ ID NO: 104711 - RNA, 19 nt, Homo sapiens
  misc_RNA (1)...(19): siRNA sense strand
caagcuacauacuguccaa

SEQ ID NO: 104712 - RNA, 19 nt, Homo sapiens
  misc_RNA (1)...(19): siRNA sense strand
gcgcaucauugccuuugug

SEQ ID NO: 104713 - RNA, 19 nt, Homo sapiens
  misc_RNA (1)...(19): siRNA sense strand
ccagugacuuugaauuugg

SEQ ID NO: 104714 - RNA, 19 nt, Homo sapiens
  misc_RNA (1)...(19): siRNA sense strand
ucucaucaguucuccgauu

SEQ ID NO: 104715 - RNA, 19 nt, Homo sapiens
  misc_RNA (1)...(19): siRNA sense strand
uuaucacacuggcuaauga

SEQ ID NO: 104716 - RNA, 19 nt, Homo sapiens
  misc_RNA (1)...(19): siRNA sense strand
uguccaagcuacauacugu

SEQ ID NO: 104717 - RNA, 19 nt, Homo sapiens
  misc_RNA (1)...(19): siRNA sense strand
gaagcccaguggaggacaa

SEQ ID NO: 104718 - RNA, 19 nt, Homo sapiens
  misc_RNA (1)...(19): siRNA sense strand
ggaggacaaugagaaggau

SEQ ID NO: 104719 - RNA, 19 nt, Homo sapiens
  misc_RNA (1)...(19): siRNA sense strand
cgacaaggcaagaaucaca

SEQ ID NO: 104720 - RNA, 19 nt, Homo sapiens
  misc_RNA (1)...(19): siRNA sense strand
ugacuuugaauuuggagua

SEQ ID NO: 104721 - RNA, 19 nt, Homo sapiens
  misc_RNA (1)...(19): siRNA sense strand
gcaccgacaaggcaagaau

SEQ ID NO: 104722 - RNA, 19 nt, Homo sapiens
  misc_RNA (1)...(19): siRNA sense strand
agaaggagaaaguaaaugu

SEQ ID NO: 104723 - RNA, 19 nt, Homo sapiens
  misc_RNA (1)...(19): siRNA sense strand
aggcaagaaucacaagaug

SEQ ID NO: 104724 - RNA, 19 nt, Homo sapiens
  misc_RNA (1)...(19): siRNA sense strand
gaugcugucaacauaguuu

SEQ ID NO: 104725 - RNA, 19 nt, Homo sapiens
  misc_RNA (1)...(19): siRNA sense strand
gugaguauaugcggaaugg

SEQ ID NO: 104726 - RNA, 19 nt, Homo sapiens
  misc_RNA (1)...(19): siRNA sense strand
aggagaaaguaaauguuga

SEQ ID NO: 104727 - RNA, 19 nt, Homo sapiens
  misc_RNA (1)...(19): siRNA sense strand
cacacuggcuaaugacugu

SEQ ID NO: 104728 - RNA, 19 nt, Homo sapiens
  misc_RNA (1)...(19): siRNA sense strand
cucaucaguucuccgauuu

SEQ ID NO: 104729 - RNA, 19 nt, Homo sapiens
  misc_RNA (1)...(19): siRNA sense strand
aaagcacuauggugugugu

SEQ ID NO: 104730 - RNA, 19 nt, Homo sapiens
  misc_RNA (1)...(19): siRNA sense strand
uggcuaaacgccucaagaa

SEQ ID NO: 104731 - RNA, 19 nt, Homo sapiens
  misc_RNA (1)...(19): siRNA sense strand
ugccagugacuuugaauuu

SEQ ID NO: 104732 - RNA, 19 nt, Homo sapiens
  misc_RNA (1)...(19): siRNA sense strand
aaggagaaaguaaauguug

SEQ ID NO: 104733 - RNA, 19 nt, Homo sapiens
  misc_RNA (1)...(19): siRNA sense strand
cagcaacccugagaacaac

SEQ ID NO: 104734 - RNA, 19 nt, Homo sapiens
  misc_RNA (1)...(19): siRNA sense strand
gaggaggugaacacagaaa

SEQ ID NO: 104735 - RNA, 19 nt, Homo sapiens
  misc_RNA (1)...(19): siRNA sense strand
gucaacauaguuugucauu

SEQ ID NO: 104736 - RNA, 19 nt, Homo sapiens
  misc_RNA (1)...(19): siRNA sense strand
ggaagaggaggugaacaca

SEQ ID NO: 104737 - RNA, 19 nt, Homo sapiens
  misc_RNA (1)...(19): siRNA sense strand
gcccaguggaggacaauga

SEQ ID NO: 104738 - RNA, 19 nt, Homo sapiens
  misc_RNA (1)...(19): siRNA sense strand
gacaaggcaagaaucacaa

SEQ ID NO: 104739 - RNA, 19 nt, Homo sapiens
  misc_RNA (1)...(19): siRNA sense strand
ugacagccuuuguaaacac

SEQ ID NO: 104740 - RNA, 19 nt, Homo sapiens
  misc_RNA (1)...(19): siRNA sense strand
cacguugaauggcaaagau

SEQ ID NO: 104741 - RNA, 19 nt, Homo sapiens
  misc_RNA (1)...(19): siRNA sense strand
agaacaacgugggccuuau

SEQ ID NO: 104742 - RNA, 19 nt, Homo sapiens
  misc_RNA (1)...(19): siRNA sense strand
ggagaaaguaaauguugac

SEQ ID NO: 104743 - RNA, 19 nt, Homo sapiens
  misc_RNA (1)...(19): siRNA sense strand
ccucaagaaggagaaagua

SEQ ID NO: 104744 - RNA, 19 nt, Homo sapiens
  misc_RNA (1)...(19): siRNA sense strand
guggacaacagugaguaua

SEQ ID NO: 104745 - RNA, 19 nt, Homo sapiens
  misc_RNA (1)...(19): siRNA sense strand
caacccaagggcaagauca

SEQ ID NO: 104746 - RNA, 19 nt, Homo sapiens
  misc_RNA (1)...(19): siRNA sense strand
gauuuuggcuggugaaggu

SEQ ID NO: 104747 - RNA, 19 nt, Homo sapiens
  misc_RNA (1)...(19): siRNA sense strand
caaggcaagaaucacaaga

SEQ ID NO: 104748 - RNA, 19 nt, Homo sapiens
  misc_RNA (1)...(19): siRNA sense strand
gacuuugaauuuggaguag

SEQ ID NO: 104749 - RNA, 19 nt, Homo sapiens
  misc_RNA (1)...(19): siRNA sense strand
ucaacauaguuugucauuc

SEQ ID NO: 104750 - RNA, 19 nt, Homo sapiens
  misc_RNA (1)...(19): siRNA sense strand
gggaagaggaggugaacac

SEQ ID NO: 104751 - RNA, 19 nt, Homo sapiens
  misc_RNA (1)...(19): siRNA sense strand
uaugcggaauggagacuuc

SEQ ID NO: 104752 - RNA, 19 nt, Homo sapiens
  misc_RNA (1)...(19): siRNA sense strand
uggcccaucuggcucugaa

SEQ ID NO: 104753 - RNA, 19 nt, Homo sapiens
  misc_RNA (1)...(19): siRNA sense strand
gggcccaguuuggcugaug

SEQ ID NO: 104754 - RNA, 19 nt, Homo sapiens
  misc_RNA (1)...(19): siRNA sense strand
caguggaggacaaugagaa

SEQ ID NO: 104755 - RNA, 19 nt, Homo sapiens
  misc_RNA (1)...(19): siRNA sense strand
ggagaaagauaaagauaag

SEQ ID NO: 104756 - RNA, 19 nt, Homo sapiens
  misc_RNA (1)...(19): siRNA sense strand
gaaaguacuugauguaucg

SEQ ID NO: 104757 - RNA, 19 nt, Homo sapiens
  misc_RNA (1)...(19): siRNA sense strand
caaagacgauucuguaugg

SEQ ID NO: 104758 - RNA, 19 nt, Homo sapiens
  misc_RNA (1)...(19): siRNA sense strand
ggaaagaggacaaggagaa

SEQ ID NO: 104759 - RNA, 19 nt, Homo sapiens
  misc_RNA (1)...(19): siRNA sense strand
gaagaccaaugaccagaug

SEQ ID NO: 104760 - RNA, 19 nt, Homo sapiens
  misc_RNA (1)...(19): siRNA sense strand
ugacaaagacgauucugua

SEQ ID NO: 104761 - RNA, 19 nt, Homo sapiens
  misc_RNA (1)...(19): siRNA sense strand
gcccuaaacuacacaagaa

SEQ ID NO: 104762 - RNA, 19 nt, Homo sapiens
  misc_RNA (1)...(19): siRNA sense strand
gaaagaagggcaggagaaa

SEQ ID NO: 104763 - RNA, 19 nt, Homo sapiens
  misc_RNA (1)...(19): siRNA sense strand
ggacaaggagaaagauaaa

SEQ ID NO: 104764 - RNA, 19 nt, Homo sapiens
  misc_RNA (1)...(19): siRNA sense strand
ccacacaggcccuaaacua

SEQ ID NO: 104765 - RNA, 19 nt, Homo sapiens
  misc_RNA (1)...(19): siRNA sense strand
agaggaagcugaggaaguu

SEQ ID NO: 104766 - RNA, 19 nt, Homo sapiens
  misc_RNA (1)...(19): siRNA sense strand
gaacacgugaccagugaaa

SEQ ID NO: 104767 - RNA, 19 nt, Homo sapiens
  misc_RNA (1)...(19): siRNA sense strand
agacgauucuguaugguuu

SEQ ID NO: 104768 - RNA, 19 nt, Homo sapiens
  misc_RNA (1)...(19): siRNA sense strand
gaaagaggacaaggagaaa

SEQ ID NO: 104769 - RNA, 19 nt, Homo sapiens
  misc_RNA (1)...(19): siRNA sense strand
ggaagaaguccaugaugau

SEQ ID NO: 104770 - RNA, 19 nt, Homo sapiens
  misc_RNA (1)...(19): siRNA sense strand
ucagugugguggaucauuu

SEQ ID NO: 104771 - RNA, 19 nt, Homo sapiens
  misc_RNA (1)...(19): siRNA sense strand
ugaagggacugaacuccaa

SEQ ID NO: 104772 - RNA, 19 nt, Homo sapiens
  misc_RNA (1)...(19): siRNA sense strand
ugaggaaguuggaguugaa

SEQ ID NO: 104773 - RNA, 19 nt, Homo sapiens
  misc_RNA (1)...(19): siRNA sense strand
gaccaugauuauuuggaaa

SEQ ID NO: 104774 - RNA, 19 nt, Homo sapiens
  misc_RNA (1)...(19): siRNA sense strand
gaagaaguccaugaugaug

SEQ ID NO: 104775 - RNA, 19 nt, Homo sapiens
  misc_RNA (1)...(19): siRNA sense strand
caucaacgaacucaugaaa

SEQ ID NO: 104776 - RNA, 19 nt, Homo sapiens
  misc_RNA (1)...(19): siRNA sense strand
caaccgggaugcagagaag

SEQ ID NO: 104777 - RNA, 19 nt, Homo sapiens
  misc_RNA (1)...(19): siRNA sense strand
gaaaagauacuguccuaau

SEQ ID NO: 104778 - RNA, 19 nt, Homo sapiens
  misc_RNA (1)...(19): siRNA sense strand
cuacagaagcguacauuuc

SEQ ID NO: 104779 - RNA, 19 nt, Homo sapiens
  misc_RNA (1)...(19): siRNA sense strand
agaaaguacuugauguauc

SEQ ID NO: 104780 - RNA, 19 nt, Homo sapiens
  misc_RNA (1)...(19): siRNA sense strand
gaagaugacaaagacgauu

SEQ ID NO: 104781 - RNA, 19 nt, Homo sapiens
  misc_RNA (1)...(19): siRNA sense strand
gaggacaaggagaaagaua

SEQ ID NO: 104782 - RNA, 19 nt, Homo sapiens
  misc_RNA (1)...(19): siRNA sense strand
gacaaagacgauucuguau

SEQ ID NO: 104783 - RNA, 19 nt, Homo sapiens
  misc_RNA (1)...(19): siRNA sense strand
aaagaauaguuggcuggua

SEQ ID NO: 104784 - RNA, 19 nt, Homo sapiens
  misc_RNA (1)...(19): siRNA sense strand
agaccaugauuauuuggaa

SEQ ID NO: 104785 - RNA, 19 nt, Homo sapiens
  misc_RNA (1)...(19): siRNA sense strand
acaaggagaaagauaaaga

SEQ ID NO: 104786 - RNA, 19 nt, Homo sapiens
  misc_RNA (1)...(19): siRNA sense strand
aagaagggcaggagaaaga

SEQ ID NO: 104787 - RNA, 19 nt, Homo sapiens
  misc_RNA (1)...(19): siRNA sense strand
acacgugaccagugaaauu

SEQ ID NO: 104788 - RNA, 19 nt, Homo sapiens
  misc_RNA (1)...(19): siRNA sense strand
aaagauacuguccuaauuc

SEQ ID NO: 104789 - RNA, 19 nt, Homo sapiens
  misc_RNA (1)...(19): siRNA sense strand
ugacauugccaucaacgaa

SEQ ID NO: 104790 - RNA, 19 nt, Homo sapiens
  misc_RNA (1)...(19): siRNA sense strand
ugaugaagaugacaaagac

SEQ ID NO: 104791 - RNA, 19 nt, Homo sapiens
  misc_RNA (1)...(19): siRNA sense strand
guacauuucaguggaagaa

SEQ ID NO: 104792 - RNA, 19 nt, Homo sapiens
  misc_RNA (1)...(19): siRNA sense strand
cuaaacuacacaagaauga

SEQ ID NO: 104793 - RNA, 19 nt, Homo sapiens
  misc_RNA (1)...(19): siRNA sense strand
ccagaagcguguuguuggu

SEQ ID NO: 104794 - RNA, 19 nt, Homo sapiens
  misc_RNA (1)...(19): siRNA sense strand
uugaacacgugaccaguga

SEQ ID NO: 104795 - RNA, 19 nt, Homo sapiens
  misc_RNA (1)...(19): siRNA sense strand
uacagaagcguacauuuca

SEQ ID NO: 104796 - RNA, 19 nt, Homo sapiens
  misc_RNA (1)...(19): siRNA sense strand
ggaaaccagaagcguguug

SEQ ID NO: 104797 - RNA, 19 nt, Homo sapiens
  misc_RNA (1)...(19): siRNA sense strand
agaaagaagggcaggagaa

SEQ ID NO: 104798 - RNA, 19 nt, Homo sapiens
  misc_RNA (1)...(19): siRNA sense strand
ugcacaaccucaucaacaa

SEQ ID NO: 104799 - RNA, 19 nt, Homo sapiens
  misc_RNA (1)...(19): siRNA sense strand
ccagguccaugguuugaag

SEQ ID NO: 104800 - RNA, 19 nt, Homo sapiens
  misc_RNA (1)...(19): siRNA sense strand
ccguauuggucaucauuga

SEQ ID NO: 104801 - RNA, 19 nt, Homo sapiens
  misc_RNA (1)...(19): siRNA sense strand
caaaagaaaguacuugaug

SEQ ID NO: 104802 - RNA, 19 nt, Homo sapiens
  misc_RNA (1)...(19): siRNA sense strand
guacuuggccucgcugauc

SEQ ID NO: 104803 - RNA, 19 nt, Homo sapiens
  misc_RNA (1)...(19): siRNA sense strand
cuugauguaucgaacaguu

SEQ ID NO: 104804 - RNA, 19 nt, Homo sapiens
  misc_RNA (1)...(19): siRNA sense strand
caaggagaaagauaaagau

SEQ ID NO: 104805 - RNA, 19 nt, Homo sapiens
  misc_RNA (1)...(19): siRNA sense strand
acaaagacgauucuguaug

SEQ ID NO: 104806 - RNA, 19 nt, Homo sapiens
  misc_RNA (1)...(19): siRNA sense strand
gggaugcagagaagaaaga

SEQ ID NO: 104807 - RNA, 19 nt, Homo sapiens
  misc_RNA (1)...(19): siRNA sense strand
ucaacgaacucaugaaaag

SEQ ID NO: 104808 - RNA, 19 nt, Homo sapiens
  misc_RNA (1)...(19): siRNA sense strand
ucaaccugcugccagaugu

SEQ ID NO: 104809 - RNA, 19 nt, Homo sapiens
  misc_RNA (1)...(19): siRNA sense strand
guaccacacaggcccuaaa

SEQ ID NO: 104810 - RNA, 19 nt, Homo sapiens
  misc_RNA (1)...(19): siRNA sense strand
guuacgagauaucaaagac

SEQ ID NO: 104811 - RNA, 19 nt, Homo sapiens
  misc_RNA (1)...(19): siRNA sense strand
ugaaauuggagcagaggaa

SEQ ID NO: 104812 - RNA, 19 nt, Homo sapiens
  misc_RNA (1)...(19): siRNA sense strand
caaugccagggaaagaaua

SEQ ID NO: 104813 - RNA, 19 nt, Homo sapiens
  misc_RNA (1)...(19): siRNA sense strand
ccucaucaacaacaagauu

SEQ ID NO: 104814 - RNA, 19 nt, Homo sapiens
  misc_RNA (1)...(19): siRNA sense strand
gcaagcugcccaucaacca

SEQ ID NO: 104815 - RNA, 19 nt, Homo sapiens
  misc_RNA (1)...(19): siRNA sense strand
acacaggcccuaaacuaca

SEQ ID NO: 104816 - RNA, 19 nt, Homo sapiens
  misc_RNA (1)...(19): siRNA sense strand
aguuggaguugaacacuug

SEQ ID NO: 104817 - RNA, 19 nt, Homo sapiens
  misc_RNA (1)...(19): siRNA sense strand
gaaaccagaagcguguugu

SEQ ID NO: 104818 - RNA, 19 nt, Homo sapiens
  misc_RNA (1)...(19): siRNA sense strand
aggacaaggagaaagauaa

SEQ ID NO: 104819 - RNA, 19 nt, Homo sapiens
  misc_RNA (1)...(19): siRNA sense strand
ggcccuaaacuacacaaga

SEQ ID NO: 104820 - RNA, 19 nt, Homo sapiens
  misc_RNA (1)...(19): siRNA sense strand
aagaggacaaggagaaaga

SEQ ID NO: 104821 - RNA, 19 nt, Homo sapiens
  misc_RNA (1)...(19): siRNA sense strand
gccaucaacgaacucauga

SEQ ID NO: 104822 - RNA, 19 nt, Homo sapiens
  misc_RNA (1)...(19): siRNA sense strand
aaacuacacaagaaugaca

SEQ ID NO: 104823 - RNA, 19 nt, Homo sapiens
  misc_RNA (1)...(19): siRNA sense strand
gaaucggcaagguuggaaa

SEQ ID NO: 104824 - RNA, 19 nt, Homo sapiens
  misc_RNA (1)...(19): siRNA sense strand
gcacaaccucaucaacaac

SEQ ID NO: 104825 - RNA, 19 nt, Homo sapiens
  misc_RNA (1)...(19): siRNA sense strand
ggaguucgucaaggccuuu

SEQ ID NO: 104826 - RNA, 19 nt, Homo sapiens
  misc_RNA (1)...(19): siRNA sense strand
cugaggaaguuggaguuga

SEQ ID NO: 104827 - RNA, 19 nt, Homo sapiens
  misc_RNA (1)...(19): siRNA sense strand
cagaggaagcugaggaagu

SEQ ID NO: 104828 - RNA, 19 nt, Homo sapiens
  misc_RNA (1)...(19): siRNA sense strand
ccuaaacuacacaagaaug

SEQ ID NO: 104829 - RNA, 19 nt, Homo sapiens
  misc_RNA (1)...(19): siRNA sense strand
gaaguuggaguugaacacu

SEQ ID NO: 104830 - RNA, 19 nt, Homo sapiens
  misc_RNA (1)...(19): siRNA sense strand
guacuugauguaucgaaca

SEQ ID NO: 104831 - RNA, 19 nt, Homo sapiens
  misc_RNA (1)...(19): siRNA sense strand
ggaagcugaggaaguugga

SEQ ID NO: 104832 - RNA, 19 nt, Homo sapiens
  misc_RNA (1)...(19): siRNA sense strand
cgugaccagugaaauugga

SEQ ID NO: 104833 - RNA, 19 nt, Homo sapiens
  misc_RNA (1)...(19): siRNA sense strand
gccagggaaagaauaguug

SEQ ID NO: 104834 - RNA, 19 nt, Homo sapiens
  misc_RNA (1)...(19): siRNA sense strand
ucaaugccagggaaagaau

SEQ ID NO: 104835 - RNA, 19 nt, Homo sapiens
  misc_RNA (1)...(19): siRNA sense strand
gaagggcaggagaaagaag

SEQ ID NO: 104836 - RNA, 19 nt, Homo sapiens
  misc_RNA (1)...(19): siRNA sense strand
ggaugcagagaagaaagaa

SEQ ID NO: 104837 - RNA, 19 nt, Homo sapiens
  misc_RNA (1)...(19): siRNA sense strand
ccaagcuucuggauaucag

SEQ ID NO: 104838 - RNA, 19 nt, Homo sapiens
  misc_RNA (1)...(19): siRNA sense strand
gaucauuucaaccgaaucg

SEQ ID NO: 104839 - RNA, 19 nt, Homo sapiens
  misc_RNA (1)...(19): siRNA sense strand
acauuucaguggaagaagu

SEQ ID NO: 104840 - RNA, 19 nt, Homo sapiens
  misc_RNA (1)...(19): siRNA sense strand
ggaauguuuaagaaaguca

SEQ ID NO: 104841 - RNA, 19 nt, Homo sapiens
  misc_RNA (1)...(19): siRNA sense strand
cacgugaccagugaaauug

SEQ ID NO: 104842 - RNA, 19 nt, Homo sapiens
  misc_RNA (1)...(19): siRNA sense strand
ugagaucgcugucauguua

SEQ ID NO: 104843 - RNA, 19 nt, Homo sapiens
  misc_RNA (1)...(19): siRNA sense strand
gagcaaguauuuacauuga

SEQ ID NO: 104844 - RNA, 19 nt, Homo sapiens
  misc_RNA (1)...(19): siRNA sense strand
gcaaguauuuacauugaga

SEQ ID NO: 104845 - RNA, 19 nt, Homo sapiens
  misc_RNA (1)...(19): siRNA sense strand
gcgggaagcuggaagaguu

SEQ ID NO: 104846 - RNA, 19 nt, Homo sapiens
  misc_RNA (1)...(19): siRNA sense strand
ggacauacagaaauuguug

SEQ ID NO: 104847 - RNA, 19 nt, Homo sapiens
  misc_RNA (1)...(19): siRNA sense strand
agagaaugguggaagguua

SEQ ID NO: 104848 - RNA, 19 nt, Homo sapiens
  misc_RNA (1)...(19): siRNA sense strand
gcagguuggucuccucuuc

SEQ ID NO: 104849 - RNA, 19 nt, Homo sapiens
  misc_RNA (1)...(19): siRNA sense strand
ggagugccagugaaugaua

SEQ ID NO: 104850 - RNA, 19 nt, Homo sapiens
  misc_RNA (1)...(19): siRNA sense strand
gggcuaauccagaugcuaa

SEQ ID NO: 104851 - RNA, 19 nt, Homo sapiens
  misc_RNA (1)...(19): siRNA sense strand
gagaaugguggaagguuaa

SEQ ID NO: 104852 - RNA, 19 nt, Homo sapiens
  misc_RNA (1)...(19): siRNA sense strand
agaguauucuggccgauaa

SEQ ID NO: 104853 - RNA, 19 nt, Homo sapiens
  misc_RNA (1)...(19): siRNA sense strand
ucaagugaaugcugucaau

SEQ ID NO: 104854 - RNA, 19 nt, Homo sapiens
  misc_RNA (1)...(19): siRNA sense strand
caacuuggagugccaguga

SEQ ID NO: 104855 - RNA, 19 nt, Homo sapiens
  misc_RNA (1)...(19): siRNA sense strand
auaaaucccuggcuacuag

SEQ ID NO: 104856 - RNA, 19 nt, Homo sapiens
  misc_RNA (1)...(19): siRNA sense strand
gagugccagugaaugauaa

SEQ ID NO: 104857 - RNA, 19 nt, Homo sapiens
  misc_RNA (1)...(19): siRNA sense strand
uaaaagcccuucugggaaa

SEQ ID NO: 104858 - RNA, 19 nt, Homo sapiens
  misc_RNA (1)...(19): siRNA sense strand
gauaaaucccuggcuacua

SEQ ID NO: 104859 - RNA, 19 nt, Homo sapiens
  misc_RNA (1)...(19): siRNA sense strand
ggagcaaguauuuacauug

SEQ ID NO: 104860 - RNA, 19 nt, Homo sapiens
  misc_RNA (1)...(19): siRNA sense strand
gggaaaaggugcucaagug

SEQ ID NO: 104861 - RNA, 19 nt, Homo sapiens
  misc_RNA (1)...(19): siRNA sense strand
cagaugcuaaggaccauua

SEQ ID NO: 104862 - RNA, 19 nt, Homo sapiens
  misc_RNA (1)...(19): siRNA sense strand
aaauggcuguacucccuua

SEQ ID NO: 104863 - RNA, 19 nt, Homo sapiens
  misc_RNA (1)...(19): siRNA sense strand
gggugugugucuaaccuaa

SEQ ID NO: 104864 - RNA, 19 nt, Homo sapiens
  misc_RNA (1)...(19): siRNA sense strand
aaagguggccuggguuuaa

SEQ ID NO: 104865 - RNA, 19 nt, Homo sapiens
  misc_RNA (1)...(19): siRNA sense strand
ggagagaguggaagaagca

SEQ ID NO: 104866 - RNA, 19 nt, Homo sapiens
  misc_RNA (1)...(19): siRNA sense strand
caaagguggccuggguuua

SEQ ID NO: 104867 - RNA, 19 nt, Homo sapiens
  misc_RNA (1)...(19): siRNA sense strand
ggccuggguuuaauacuca

SEQ ID NO: 104868 - RNA, 19 nt, Homo sapiens
  misc_RNA (1)...(19): siRNA sense strand
gagaguauucuggccgaua

SEQ ID NO: 104869 - RNA, 19 nt, Homo sapiens
  misc_RNA (1)...(19): siRNA sense strand
ccaaggagcaaguauuuac

SEQ ID NO: 104870 - RNA, 19 nt, Homo sapiens
  misc_RNA (1)...(19): siRNA sense strand
ccaaagguggccuggguuu

SEQ ID NO: 104871 - RNA, 19 nt, Homo sapiens
  misc_RNA (1)...(19): siRNA sense strand
ggucuccucuucauauugc

SEQ ID NO: 104872 - RNA, 19 nt, Homo sapiens
  misc_RNA (1)...(19): siRNA sense strand
acacuuagccugugaugag

SEQ ID NO: 104873 - RNA, 19 nt, Homo sapiens
  misc_RNA (1)...(19): siRNA sense strand
gguuuaauacucaagagaa

SEQ ID NO: 104874 - RNA, 19 nt, Homo sapiens
  misc_RNA (1)...(19): siRNA sense strand
gaaaaggugcucaagugaa

SEQ ID NO: 104875 - RNA, 19 nt, Homo sapiens
  misc_RNA (1)...(19): siRNA sense strand
ugaaugcugucaaucaaaa

SEQ ID NO: 104876 - RNA, 19 nt, Homo sapiens
  misc_RNA (1)...(19): siRNA sense strand
gugugugucuaaccuaaug

SEQ ID NO: 104877 - RNA, 19 nt, Homo sapiens
  misc_RNA (1)...(19): siRNA sense strand
uuaugaggcuacagcaaug

SEQ ID NO: 104878 - RNA, 19 nt, Homo sapiens
  misc_RNA (1)...(19): siRNA sense strand
ucccaaggagcaaguauuu

SEQ ID NO: 104879 - RNA, 19 nt, Homo sapiens
  misc_RNA (1)...(19): siRNA sense strand
gauaaagacgaugcagguu

SEQ ID NO: 104880 - RNA, 19 nt, Homo sapiens
  misc_RNA (1)...(19): siRNA sense strand
agugaaugcugucaaucaa

SEQ ID NO: 104881 - RNA, 19 nt, Homo sapiens
  misc_RNA (1)...(19): siRNA sense strand
guuggucuccucuucauau

SEQ ID NO: 104882 - RNA, 19 nt, Homo sapiens
  misc_RNA (1)...(19): siRNA sense strand
aaaaggugcucaagugaau

SEQ ID NO: 104883 - RNA, 19 nt, Homo sapiens
  misc_RNA (1)...(19): siRNA sense strand
ggaaaaggugcucaaguga

SEQ ID NO: 104884 - RNA, 19 nt, Homo sapiens
  misc_RNA (1)...(19): siRNA sense strand
aggagcaaguauuuacauu

SEQ ID NO: 104885 - RNA, 19 nt, Homo sapiens
  misc_RNA (1)...(19): siRNA sense strand
gaccaggacagcagaacug

SEQ ID NO: 104886 - RNA, 19 nt, Homo sapiens
  misc_RNA (1)...(19): siRNA sense strand
gaagaguugaaggagagua

SEQ ID NO: 104887 - RNA, 19 nt, Homo sapiens
  misc_RNA (1)...(19): siRNA sense strand
gccagugaaugauaaagac

SEQ ID NO: 104888 - RNA, 19 nt, Homo sapiens
  misc_RNA (1)...(19): siRNA sense strand
cagcuggacauacagaaau

SEQ ID NO: 104889 - RNA, 19 nt, Homo sapiens
  misc_RNA (1)...(19): siRNA sense strand
gggaugagauuguaaaagc

SEQ ID NO: 104890 - RNA, 19 nt, Homo sapiens
  misc_RNA (1)...(19): siRNA sense strand
gugaaugcugucaaucaaa

SEQ ID NO: 104891 - RNA, 19 nt, Homo sapiens
  misc_RNA (1)...(19): siRNA sense strand
gaggagagaguggaagaag

SEQ ID NO: 104892 - RNA, 19 nt, Homo sapiens
  misc_RNA (1)...(19): siRNA sense strand
augcuaaggaccauuauga

SEQ ID NO: 104893 - RNA, 19 nt, Homo sapiens
  misc_RNA (1)...(19): siRNA sense strand
gaguugaaggagaguauuc

SEQ ID NO: 104894 - RNA, 19 nt, Homo sapiens
  misc_RNA (1)...(19): siRNA sense strand
augcucagcuggacauaca

SEQ ID NO: 104895 - RNA, 19 nt, Homo sapiens
  misc_RNA (1)...(19): siRNA sense strand
caaggagcaaguauuuaca

SEQ ID NO: 104896 - RNA, 19 nt, Homo sapiens
  misc_RNA (1)...(19): siRNA sense strand
guacucccuuacauuaugc

SEQ ID NO: 104897 - RNA, 19 nt, Homo sapiens
  misc_RNA (1)...(19): siRNA sense strand
gacauacagaaauuguuga

SEQ ID NO: 104898 - RNA, 19 nt, Homo sapiens
  misc_RNA (1)...(19): siRNA sense strand
gagaguggaagaagcaaaa

SEQ ID NO: 104899 - RNA, 19 nt, Homo sapiens
  misc_RNA (1)...(19): siRNA sense strand
gcucagcuggacauacaga

SEQ ID NO: 104900 - RNA, 19 nt, Homo sapiens
  misc_RNA (1)...(19): siRNA sense strand
ucagcuggacauacagaaa

SEQ ID NO: 104901 - RNA, 19 nt, Homo sapiens
  misc_RNA (1)...(19): siRNA sense strand
ggaagcuggaagaguugaa

SEQ ID NO: 104902 - RNA, 19 nt, Homo sapiens
  misc_RNA (1)...(19): siRNA sense strand
ggaccauuaugaggcuaca

SEQ ID NO: 104903 - RNA, 19 nt, Homo sapiens
  misc_RNA (1)...(19): siRNA sense strand
ugagaucgcugucauguua

SEQ ID NO: 104904 - RNA, 19 nt, Homo sapiens
  misc_RNA (1)...(19): siRNA sense strand
gcgggaagcuggaagaguu

SEQ ID NO: 104905 - RNA, 19 nt, Homo sapiens
  misc_RNA (1)...(19): siRNA sense strand
ggacauacagaaauuguug

SEQ ID NO: 104906 - RNA, 19 nt, Homo sapiens
  misc_RNA (1)...(19): siRNA sense strand
gcagguuggucuccucuuc

SEQ ID NO: 104907 - RNA, 19 nt, Homo sapiens
  misc_RNA (1)...(19): siRNA sense strand
ggagugccagugaaugaua

SEQ ID NO: 104908 - RNA, 19 nt, Homo sapiens
  misc_RNA (1)...(19): siRNA sense strand
gggcuaauccagaugcuaa

SEQ ID NO: 104909 - RNA, 19 nt, Homo sapiens
  misc_RNA (1)...(19): siRNA sense strand
agaguauucuggccgauaa

SEQ ID NO: 104910 - RNA, 19 nt, Homo sapiens
  misc_RNA (1)...(19): siRNA sense strand
ucaagugaaugcugucaau

SEQ ID NO: 104911 - RNA, 19 nt, Homo sapiens
  misc_RNA (1)...(19): siRNA sense strand
caacuuggagugccaguga

SEQ ID NO: 104912 - RNA, 19 nt, Homo sapiens
  misc_RNA (1)...(19): siRNA sense strand
auaaaucccuggcuacuag

SEQ ID NO: 104913 - RNA, 19 nt, Homo sapiens
  misc_RNA (1)...(19): siRNA sense strand
gagugccagugaaugauaa

SEQ ID NO: 104914 - RNA, 19 nt, Homo sapiens
  misc_RNA (1)...(19): siRNA sense strand
uaaaagcccuucugggaaa

SEQ ID NO: 104915 - RNA, 19 nt, Homo sapiens
  misc_RNA (1)...(19): siRNA sense strand
gauaaaucccuggcuacua

SEQ ID NO: 104916 - RNA, 19 nt, Homo sapiens
  misc_RNA (1)...(19): siRNA sense strand
gggaaaaggugcucaagug

SEQ ID NO: 104917 - RNA, 19 nt, Homo sapiens
  misc_RNA (1)...(19): siRNA sense strand
cagaugcuaaggaccauua

SEQ ID NO: 104918 - RNA, 19 nt, Homo sapiens
  misc_RNA (1)...(19): siRNA sense strand
aaauggcuguacucccuua

SEQ ID NO: 104919 - RNA, 19 nt, Homo sapiens
  misc_RNA (1)...(19): siRNA sense strand
gggugugugucuaaccuaa

SEQ ID NO: 104920 - RNA, 19 nt, Homo sapiens
  misc_RNA (1)...(19): siRNA sense strand
gagaguauucuggccgaua

SEQ ID NO: 104921 - RNA, 19 nt, Homo sapiens
  misc_RNA (1)...(19): siRNA sense strand
ggucuccucuucauauugc

SEQ ID NO: 104922 - RNA, 19 nt, Homo sapiens
  misc_RNA (1)...(19): siRNA sense strand
gaaaaggugcucaagugaa

SEQ ID NO: 104923 - RNA, 19 nt, Homo sapiens
  misc_RNA (1)...(19): siRNA sense strand
ugaaugcugucaaucaaaa

SEQ ID NO: 104924 - RNA, 19 nt, Homo sapiens
  misc_RNA (1)...(19): siRNA sense strand
gugugugucuaaccuaaug

SEQ ID NO: 104925 - RNA, 19 nt, Homo sapiens
  misc_RNA (1)...(19): siRNA sense strand
uuaugaggcuacagcaaug

SEQ ID NO: 104926 - RNA, 19 nt, Homo sapiens
  misc_RNA (1)...(19): siRNA sense strand
gauaaagacgaugcagguu

SEQ ID NO: 104927 - RNA, 19 nt, Homo sapiens
  misc_RNA (1)...(19): siRNA sense strand
agugaaugcugucaaucaa

SEQ ID NO: 104928 - RNA, 19 nt, Homo sapiens
  misc_RNA (1)...(19): siRNA sense strand
guuggucuccucuucauau

SEQ ID NO: 104929 - RNA, 19 nt, Homo sapiens
  misc_RNA (1)...(19): siRNA sense strand
aaaaggugcucaagugaau

SEQ ID NO: 104930 - RNA, 19 nt, Homo sapiens
  misc_RNA (1)...(19): siRNA sense strand
ggaaaaggugcucaaguga

SEQ ID NO: 104931 - RNA, 19 nt, Homo sapiens
  misc_RNA (1)...(19): siRNA sense strand
gaccaggacagcagaacug

SEQ ID NO: 104932 - RNA, 19 nt, Homo sapiens
  misc_RNA (1)...(19): siRNA sense strand
gaagaguugaaggagagua

SEQ ID NO: 104933 - RNA, 19 nt, Homo sapiens
  misc_RNA (1)...(19): siRNA sense strand
gccagugaaugauaaagac

SEQ ID NO: 104934 - RNA, 19 nt, Homo sapiens
  misc_RNA (1)...(19): siRNA sense strand
cagcuggacauacagaaau

SEQ ID NO: 104935 - RNA, 19 nt, Homo sapiens
  misc_RNA (1)...(19): siRNA sense strand
gggaugagauuguaaaagc

SEQ ID NO: 104936 - RNA, 19 nt, Homo sapiens
  misc_RNA (1)...(19): siRNA sense strand
gugaaugcugucaaucaaa

SEQ ID NO: 104937 - RNA, 19 nt, Homo sapiens
  misc_RNA (1)...(19): siRNA sense strand
augcucagcuggacauaca

SEQ ID NO: 104938 - RNA, 19 nt, Homo sapiens
  misc_RNA (1)...(19): siRNA sense strand
augcuaaggaccauuauga

SEQ ID NO: 104939 - RNA, 19 nt, Homo sapiens
  misc_RNA (1)...(19): siRNA sense strand
gaguugaaggagaguauuc

SEQ ID NO: 104940 - RNA, 19 nt, Homo sapiens
  misc_RNA (1)...(19): siRNA sense strand
guacucccuuacauuaugc

SEQ ID NO: 104941 - RNA, 19 nt, Homo sapiens
  misc_RNA (1)...(19): siRNA sense strand
gacauacagaaauuguuga

SEQ ID NO: 104942 - RNA, 19 nt, Homo sapiens
  misc_RNA (1)...(19): siRNA sense strand
gcucagcuggacauacaga

SEQ ID NO: 104943 - RNA, 19 nt, Homo sapiens
  misc_RNA (1)...(19): siRNA sense strand
ucagcuggacauacagaaa

SEQ ID NO: 104944 - RNA, 19 nt, Homo sapiens
  misc_RNA (1)...(19): siRNA sense strand
ggaagcuggaagaguugaa

SEQ ID NO: 104945 - RNA, 19 nt, Homo sapiens
  misc_RNA (1)...(19): siRNA sense strand
ggaccauuaugaggcuaca

SEQ ID NO: 104946 - RNA, 19 nt, Homo sapiens
  misc_RNA (1)...(19): siRNA sense strand
gaaaggaaauuaucacaga

SEQ ID NO: 104947 - RNA, 19 nt, Homo sapiens
  misc_RNA (1)...(19): siRNA sense strand
gaacacauaucuagucuca

SEQ ID NO: 104948 - RNA, 19 nt, Homo sapiens
  misc_RNA (1)...(19): siRNA sense strand
guacgacccuucuugaauu

SEQ ID NO: 104949 - RNA, 19 nt, Homo sapiens
  misc_RNA (1)...(19): siRNA sense strand
caagaaauuucaugggauu

SEQ ID NO: 104950 - RNA, 19 nt, Homo sapiens
  misc_RNA (1)...(19): siRNA sense strand
cagaagauguccaggcuuu

SEQ ID NO: 104951 - RNA, 19 nt, Homo sapiens
  misc_RNA (1)...(19): siRNA sense strand
acagaucacuggcagauuu

SEQ ID NO: 104952 - RNA, 19 nt, Homo sapiens
  misc_RNA (1)...(19): siRNA sense strand
uuacgaagcugcucuggaa

SEQ ID NO: 104953 - RNA, 19 nt, Homo sapiens
  misc_RNA (1)...(19): siRNA sense strand
gacaugcagucggguauua

SEQ ID NO: 104954 - RNA, 19 nt, Homo sapiens
  misc_RNA (1)...(19): siRNA sense strand
gaggguguccugauuauuu

SEQ ID NO: 104955 - RNA, 19 nt, Homo sapiens
  misc_RNA (1)...(19): siRNA sense strand
ucacaucucugaaguacau

SEQ ID NO: 104956 - RNA, 19 nt, Homo sapiens
  misc_RNA (1)...(19): siRNA sense strand
ggaaacaauucagaacaug

SEQ ID NO: 104957 - RNA, 19 nt, Homo sapiens
  misc_RNA (1)...(19): siRNA sense strand
acacauaucuagucucauc

SEQ ID NO: 104958 - RNA, 19 nt, Homo sapiens
  misc_RNA (1)...(19): siRNA sense strand
gaacaugagcaaaguagug

SEQ ID NO: 104959 - RNA, 19 nt, Homo sapiens
  misc_RNA (1)...(19): siRNA sense strand
gaaacaauucagaacauga

SEQ ID NO: 104960 - RNA, 19 nt, Homo sapiens
  misc_RNA (1)...(19): siRNA sense strand
gaacagaucacuggcagau

SEQ ID NO: 104961 - RNA, 19 nt, Homo sapiens
  misc_RNA (1)...(19): siRNA sense strand
caacaaagccaagaaacug

SEQ ID NO: 104962 - RNA, 19 nt, Homo sapiens
  misc_RNA (1)...(19): siRNA sense strand
gguccgaucucuucuugau

SEQ ID NO: 104963 - RNA, 19 nt, Homo sapiens
  misc_RNA (1)...(19): siRNA sense strand
gaaagcccgagcugccuua

SEQ ID NO: 104964 - RNA, 19 nt, Homo sapiens
  misc_RNA (1)...(19): siRNA sense strand
cuugaucuguuucuugaua

SEQ ID NO: 104965 - RNA, 19 nt, Homo sapiens
  misc_RNA (1)...(19): siRNA sense strand
gggaggguguccugauuau

SEQ ID NO: 104966 - RNA, 19 nt, Homo sapiens
  misc_RNA (1)...(19): siRNA sense strand
uggccaaguuguaugauaa

SEQ ID NO: 104967 - RNA, 19 nt, Homo sapiens
  misc_RNA (1)...(19): siRNA sense strand
ggaaaacugcguacucaua

SEQ ID NO: 104968 - RNA, 19 nt, Homo sapiens
  misc_RNA (1)...(19): siRNA sense strand
gaggcagacagaagcauua

SEQ ID NO: 104969 - RNA, 19 nt, Homo sapiens
  misc_RNA (1)...(19): siRNA sense strand
gaguacagauugaacacau

SEQ ID NO: 104970 - RNA, 19 nt, Homo sapiens
  misc_RNA (1)...(19): siRNA sense strand
gaagaggcagugcaaguca

SEQ ID NO: 104971 - RNA, 19 nt, Homo sapiens
  misc_RNA (1)...(19): siRNA sense strand
cagaagagaaggacuggaa

SEQ ID NO: 104972 - RNA, 19 nt, Homo sapiens
  misc_RNA (1)...(19): siRNA sense strand
cgacguggaaaggaaauua

SEQ ID NO: 104973 - RNA, 19 nt, Homo sapiens
  misc_RNA (1)...(19): siRNA sense strand
uaucuagucucaucaaacu

SEQ ID NO: 104974 - RNA, 19 nt, Homo sapiens
  misc_RNA (1)...(19): siRNA sense strand
ggaggucgagcuguguuua

SEQ ID NO: 104975 - RNA, 19 nt, Homo sapiens
  misc_RNA (1)...(19): siRNA sense strand
uggauucccucuacaacaa

SEQ ID NO: 104976 - RNA, 19 nt, Homo sapiens
  misc_RNA (1)...(19): siRNA sense strand
caucacaucucugaaguac

SEQ ID NO: 104977 - RNA, 19 nt, Homo sapiens
  misc_RNA (1)...(19): siRNA sense strand
guacagauugaacacauau

SEQ ID NO: 104978 - RNA, 19 nt, Homo sapiens
  misc_RNA (1)...(19): siRNA sense strand
gagaaggacuggaaaacug

SEQ ID NO: 104979 - RNA, 19 nt, Homo sapiens
  misc_RNA (1)...(19): siRNA sense strand
aagcugcucuggaaacaau

SEQ ID NO: 104980 - RNA, 19 nt, Homo sapiens
  misc_RNA (1)...(19): siRNA sense strand
ccaggaagcauugcauuug

SEQ ID NO: 104981 - RNA, 19 nt, Homo sapiens
  misc_RNA (1)...(19): siRNA sense strand
ccaaggccaucacaucucu

SEQ ID NO: 104982 - RNA, 19 nt, Homo sapiens
  misc_RNA (1)...(19): siRNA sense strand
gcagacagaagcauuaaaa

SEQ ID NO: 104983 - RNA, 19 nt, Homo sapiens
  misc_RNA (1)...(19): siRNA sense strand
ggcaaagacuggacaagcu

SEQ ID NO: 104984 - RNA, 19 nt, Homo sapiens
  misc_RNA (1)...(19): siRNA sense strand
cauaucuagucucaucaaa

SEQ ID NO: 104985 - RNA, 19 nt, Homo sapiens
  misc_RNA (1)...(19): siRNA sense strand
ggaggcagacagaagcauu

SEQ ID NO: 104986 - RNA, 19 nt, Homo sapiens
  misc_RNA (1)...(19): siRNA sense strand
auacuucuaugaggcauuu

SEQ ID NO: 104987 - RNA, 19 nt, Homo sapiens
  misc_RNA (1)...(19): siRNA sense strand
ugggaucucuccuggcaaa

SEQ ID NO: 104988 - RNA, 19 nt, Homo sapiens
  misc_RNA (1)...(19): siRNA sense strand
ccacagcaaaugccaucua

SEQ ID NO: 104989 - RNA, 19 nt, Homo sapiens
  misc_RNA (1)...(19): siRNA sense strand
gaaguacagcuuuuagaaa

SEQ ID NO: 104990 - RNA, 19 nt, Homo sapiens
  misc_RNA (1)...(19): siRNA sense strand
cuacaacaaagccaagaaa

SEQ ID NO: 104991 - RNA, 19 nt, Homo sapiens
  misc_RNA (1)...(19): siRNA sense strand
aggaaauuaucacagauga

SEQ ID NO: 104992 - RNA, 19 nt, Homo sapiens
  misc_RNA (1)...(19): siRNA sense strand
cagcaaaugccaucuacug

SEQ ID NO: 104993 - RNA, 19 nt, Homo sapiens
  misc_RNA (1)...(19): siRNA sense strand
ggaaguacagcuuuuagaa

SEQ ID NO: 104994 - RNA, 19 nt, Homo sapiens
  misc_RNA (1)...(19): siRNA sense strand
uggaaacaauucagaacau

SEQ ID NO: 104995 - RNA, 19 nt, Homo sapiens
  misc_RNA (1)...(19): siRNA sense strand
ucacagaugauucuugaca

SEQ ID NO: 104996 - RNA, 19 nt, Homo sapiens
  misc_RNA (1)...(19): siRNA sense strand
caggaagcauugcauuugg

SEQ ID NO: 104997 - RNA, 19 nt, Homo sapiens
  misc_RNA (1)...(19): siRNA sense strand
gcuccgggaugacccaauc

SEQ ID NO: 104998 - RNA, 19 nt, Homo sapiens
  misc_RNA (1)...(19): siRNA sense strand
uauuauccaugcagcagaa

SEQ ID NO: 104999 - RNA, 19 nt, Homo sapiens
  misc_RNA (1)...(19): siRNA sense strand
gcucgaaccacagcaaaug

SEQ ID NO: 105000 - RNA, 19 nt, Homo sapiens
  misc_RNA (1)...(19): siRNA sense strand
cgaagcugcucuggaaaca

SEQ ID NO: 105001 - RNA, 19 nt, Homo sapiens
  misc_RNA (1)...(19): siRNA sense strand
gcagucggguauuauccau

SEQ ID NO: 105002 - RNA, 19 nt, Homo sapiens
  misc_RNA (1)...(19): siRNA sense strand
ggacaugcagucggguauu

SEQ ID NO: 105003 - RNA, 19 nt, Homo sapiens
  misc_RNA (1)...(19): siRNA sense strand
ugagcaaaguaguggauuc

SEQ ID NO: 105004 - RNA, 19 nt, Homo sapiens
  misc_RNA (1)...(19): siRNA sense strand
gcagggaggcagacagaag

SEQ ID NO: 105005 - RNA, 19 nt, Homo sapiens
  misc_RNA (1)...(19): siRNA sense strand
gaagauguccaggcuuugg

SEQ ID NO: 105006 - RNA, 19 nt, Homo sapiens
  misc_RNA (1)...(19): siRNA sense strand
acuggugucuuuguacuuu

SEQ ID NO: 105007 - RNA, 19 nt, Homo sapiens
  misc_RNA (1)...(19): siRNA sense strand
cacagaugauucuugacaa

SEQ ID NO: 105008 - RNA, 19 nt, Homo sapiens
  misc_RNA (1)...(19): siRNA sense strand
gccaucacaucucugaagu

SEQ ID NO: 105009 - RNA, 19 nt, Homo sapiens
  misc_RNA (1)...(19): siRNA sense strand
gaaugggccaagucagaga

SEQ ID NO: 105010 - RNA, 19 nt, Homo sapiens
  misc_RNA (1)...(19): siRNA sense strand
aguacagauugaacacaua

SEQ ID NO: 105011 - RNA, 19 nt, Homo sapiens
  misc_RNA (1)...(19): siRNA sense strand
gaaucugauccgagucauu

SEQ ID NO: 105012 - RNA, 19 nt, Homo sapiens
  misc_RNA (1)...(19): siRNA sense strand
gaagagaaggacuggaaaa

SEQ ID NO: 105013 - RNA, 19 nt, Homo sapiens
  misc_RNA (1)...(19): siRNA sense strand
cgagcugccuuaacuucug

SEQ ID NO: 105014 - RNA, 19 nt, Homo sapiens
  misc_RNA (1)...(19): siRNA sense strand
guauguacgacccuucuug

SEQ ID NO: 105015 - RNA, 19 nt, Homo sapiens
  misc_RNA (1)...(19): siRNA sense strand
aaucugauccgagucauug

SEQ ID NO: 105016 - RNA, 19 nt, Homo sapiens
  misc_RNA (1)...(19): siRNA sense strand
gagguaccaggaagcauug

SEQ ID NO: 105017 - RNA, 19 nt, Homo sapiens
  misc_RNA (1)...(19): siRNA sense strand
gaagcgugacauucaggaa

SEQ ID NO: 105018 - RNA, 19 nt, Homo sapiens
  misc_RNA (1)...(19): siRNA sense strand
gaucucuccuggcaaagac

SEQ ID NO: 105019 - RNA, 19 nt, Homo sapiens
  misc_RNA (1)...(19): siRNA sense strand
ugagcaaccugccgaaagc

SEQ ID NO: 105020 - RNA, 19 nt, Homo sapiens
  misc_RNA (1)...(19): siRNA sense strand
agagguaccaggaagcauu

SEQ ID NO: 105021 - RNA, 19 nt, Homo sapiens
  misc_RNA (1)...(19): siRNA sense strand
aaacugcguacucauacuu

SEQ ID NO: 105022 - RNA, 19 nt, Homo sapiens
  misc_RNA (1)...(19): siRNA sense strand
ucgaaugggccaagucaga

SEQ ID NO: 105023 - RNA, 19 nt, Homo sapiens
  misc_RNA (1)...(19): siRNA sense strand
aagccaagaaacugacaua

SEQ ID NO: 105024 - RNA, 19 nt, Homo sapiens
  misc_RNA (1)...(19): siRNA sense strand
caauucagaacaugagcaa

SEQ ID NO: 105025 - RNA, 19 nt, Homo sapiens
  misc_RNA (1)...(19): siRNA sense strand
cacagcaaaugccaucuac

SEQ ID NO: 105026 - RNA, 19 nt, Homo sapiens
  misc_RNA (1)...(19): siRNA sense strand
cagaacaugagcaaaguag

SEQ ID NO: 105027 - RNA, 19 nt, Homo sapiens
  misc_RNA (1)...(19): siRNA sense strand
ucagaacaugagcaaagua

SEQ ID NO: 105028 - RNA, 19 nt, Homo sapiens
  misc_RNA (1)...(19): siRNA sense strand
augaggcauuugaggguua

SEQ ID NO: 105029 - RNA, 19 nt, Homo sapiens
  misc_RNA (1)...(19): siRNA sense strand
cuaaauugcaggccaccuu

SEQ ID NO: 105030 - RNA, 19 nt, Homo sapiens
  misc_RNA (1)...(19): siRNA sense strand
caucgaaugggccaaguca

SEQ ID NO: 105031 - RNA, 19 nt, Homo sapiens
  misc_RNA (1)...(19): siRNA sense strand
ggauucccucuacaacaaa

SEQ ID NO: 105032 - RNA, 19 nt, Homo sapiens
  misc_RNA (1)...(19): siRNA sense strand
uauguacgacccuucuuga

SEQ ID NO: 105033 - RNA, 19 nt, Homo sapiens
  misc_RNA (1)...(19): siRNA sense strand
uuggccaaguuguaugaua

SEQ ID NO: 105034 - RNA, 19 nt, Homo sapiens
  misc_RNA (1)...(19): siRNA sense strand
ggaucucuccuggcaaaga

SEQ ID NO: 105035 - RNA, 19 nt, Homo sapiens
  misc_RNA (1)...(19): siRNA sense strand
caucgugaagcgugacauu

SEQ ID NO: 105036 - RNA, 19 nt, Homo sapiens
  misc_RNA (1)...(19): siRNA sense strand
aaagauggacgacaaagcu

SEQ ID NO: 105037 - RNA, 19 nt, Homo sapiens
  misc_RNA (1)...(19): siRNA sense strand
gauaacuuacuagaacaga

SEQ ID NO: 105038 - RNA, 19 nt, Homo sapiens
  misc_RNA (1)...(19): siRNA sense strand
gacguggaaaggaaauuau

SEQ ID NO: 105039 - RNA, 19 nt, Homo sapiens
  misc_RNA (1)...(19): siRNA sense strand
uucuugaucuguuucuuga

SEQ ID NO: 105040 - RNA, 19 nt, Homo sapiens
  misc_RNA (1)...(19): siRNA sense strand
ggaggguguccugauuauu

SEQ ID NO: 105041 - RNA, 19 nt, Homo sapiens
  misc_RNA (1)...(19): siRNA sense strand
cugguccgaucucuucuug

SEQ ID NO: 105042 - RNA, 19 nt, Homo sapiens
  misc_RNA (1)...(19): siRNA sense strand
aaacaauucagaacaugag

SEQ ID NO: 105043 - RNA, 19 nt, Homo sapiens
  misc_RNA (1)...(19): siRNA sense strand
gucgagcuguguuuagagu

SEQ ID NO: 105044 - RNA, 19 nt, Homo sapiens
  misc_RNA (1)...(19): siRNA sense strand
ccagaguacagauugaaca

SEQ ID NO: 105045 - RNA, 19 nt, Homo sapiens
  misc_RNA (1)...(19): siRNA sense strand
gcaggccaccuuggacaug

SEQ ID NO: 105046 - RNA, 19 nt, Homo sapiens
  misc_RNA (1)...(19): siRNA sense strand
gaacacaaaucaucagcaa

SEQ ID NO: 105047 - RNA, 19 nt, Homo sapiens
  misc_RNA (1)...(19): siRNA sense strand
guacuuauguugaggaaau

SEQ ID NO: 105048 - RNA, 19 nt, Homo sapiens
  misc_RNA (1)...(19): siRNA sense strand
aagaggagaugauacauaa

SEQ ID NO: 105049 - RNA, 19 nt, Homo sapiens
  misc_RNA (1)...(19): siRNA sense strand
ucacagaccuuccuaucaa

SEQ ID NO: 105050 - RNA, 19 nt, Homo sapiens
  misc_RNA (1)...(19): siRNA sense strand
gacaagaaguuagaagaaa

SEQ ID NO: 105051 - RNA, 19 nt, Homo sapiens
  misc_RNA (1)...(19): siRNA sense strand
ucauuaaugucucugguua

SEQ ID NO: 105052 - RNA, 19 nt, Homo sapiens
  misc_RNA (1)...(19): siRNA sense strand
gaaugggauuuacuuaaug

SEQ ID NO: 105053 - RNA, 19 nt, Homo sapiens
  misc_RNA (1)...(19): siRNA sense strand
gauccuauuugucuauuug

SEQ ID NO: 105054 - RNA, 19 nt, Homo sapiens
  misc_RNA (1)...(19): siRNA sense strand
ggaaagacuugaagaacag

SEQ ID NO: 105055 - RNA, 19 nt, Homo sapiens
  misc_RNA (1)...(19): siRNA sense strand
gaaacugaacucauuaaug

SEQ ID NO: 105056 - RNA, 19 nt, Homo sapiens
  misc_RNA (1)...(19): siRNA sense strand
uuaaaugacuggucucaga

SEQ ID NO: 105057 - RNA, 19 nt, Homo sapiens
  misc_RNA (1)...(19): siRNA sense strand
gaagaaauucccaaauaca

SEQ ID NO: 105058 - RNA, 19 nt, Homo sapiens
  misc_RNA (1)...(19): siRNA sense strand
gaaagagcgaguggaauuu

SEQ ID NO: 105059 - RNA, 19 nt, Homo sapiens
  misc_RNA (1)...(19): siRNA sense strand
uaaugucucugguuaacaa

SEQ ID NO: 105060 - RNA, 19 nt, Homo sapiens
  misc_RNA (1)...(19): siRNA sense strand
guagacagauuagcaggaa

SEQ ID NO: 105061 - RNA, 19 nt, Homo sapiens
  misc_RNA (1)...(19): siRNA sense strand
gcacuacagagcaauauau

SEQ ID NO: 105062 - RNA, 19 nt, Homo sapiens
  misc_RNA (1)...(19): siRNA sense strand
acaaugaacagucagauuu

SEQ ID NO: 105063 - RNA, 19 nt, Homo sapiens
  misc_RNA (1)...(19): siRNA sense strand
gccuagcugugaaggauua

SEQ ID NO: 105064 - RNA, 19 nt, Homo sapiens
  misc_RNA (1)...(19): siRNA sense strand
ggaagaaaauacagagaaa

SEQ ID NO: 105065 - RNA, 19 nt, Homo sapiens
  misc_RNA (1)...(19): siRNA sense strand
gcuaugaggcuaaagaaug

SEQ ID NO: 105066 - RNA, 19 nt, Homo sapiens
  misc_RNA (1)...(19): siRNA sense strand
gaaggcaagauuuauguug

SEQ ID NO: 105067 - RNA, 19 nt, Homo sapiens
  misc_RNA (1)...(19): siRNA sense strand
gauacucuacgaaugguua

SEQ ID NO: 105068 - RNA, 19 nt, Homo sapiens
  misc_RNA (1)...(19): siRNA sense strand
uaucuuaguugcaguagug

SEQ ID NO: 105069 - RNA, 19 nt, Homo sapiens
  misc_RNA (1)...(19): siRNA sense strand
gacccaaggauccaaauaa

SEQ ID NO: 105070 - RNA, 19 nt, Homo sapiens
  misc_RNA (1)...(19): siRNA sense strand
uagcaggaauuaucaacuu

SEQ ID NO: 105071 - RNA, 19 nt, Homo sapiens
  misc_RNA (1)...(19): siRNA sense strand
gaauaaguggugacaagaa

SEQ ID NO: 105072 - RNA, 19 nt, Homo sapiens
  misc_RNA (1)...(19): siRNA sense strand
gcaagaaaauuaacaccaa

SEQ ID NO: 105073 - RNA, 19 nt, Homo sapiens
  misc_RNA (1)...(19): siRNA sense strand
caugagggauccuauuugu

SEQ ID NO: 105074 - RNA, 19 nt, Homo sapiens
  misc_RNA (1)...(19): siRNA sense strand
agaaagagcgaguggaauu

SEQ ID NO: 105075 - RNA, 19 nt, Homo sapiens
  misc_RNA (1)...(19): siRNA sense strand
ggacuauggaauggaauua

SEQ ID NO: 105076 - RNA, 19 nt, Homo sapiens
  misc_RNA (1)...(19): siRNA sense strand
uuagaauaauggccaagua

SEQ ID NO: 105077 - RNA, 19 nt, Homo sapiens
  misc_RNA (1)...(19): siRNA sense strand
acacaaaucaucagcaaga

SEQ ID NO: 105078 - RNA, 19 nt, Homo sapiens
  misc_RNA (1)...(19): siRNA sense strand
ggaucuaucuguugaugag

SEQ ID NO: 105079 - RNA, 19 nt, Homo sapiens
  misc_RNA (1)...(19): siRNA sense strand
gaaaucacagaccuuccua

SEQ ID NO: 105080 - RNA, 19 nt, Homo sapiens
  misc_RNA (1)...(19): siRNA sense strand
aaagaggagaugauacaua

SEQ ID NO: 105081 - RNA, 19 nt, Homo sapiens
  misc_RNA (1)...(19): siRNA sense strand
ccaaagaggagaugauaca

SEQ ID NO: 105082 - RNA, 19 nt, Homo sapiens
  misc_RNA (1)...(19): siRNA sense strand
agaagaaauucccaaauac

SEQ ID NO: 105083 - RNA, 19 nt, Homo sapiens
  misc_RNA (1)...(19): siRNA sense strand
gagcgaguggaauuuauuu

SEQ ID NO: 105084 - RNA, 19 nt, Homo sapiens
  misc_RNA (1)...(19): siRNA sense strand
aaagagcgaguggaauuua

SEQ ID NO: 105085 - RNA, 19 nt, Homo sapiens
  misc_RNA (1)...(19): siRNA sense strand
gaggagaugauacauaauc

SEQ ID NO: 105086 - RNA, 19 nt, Homo sapiens
  misc_RNA (1)...(19): siRNA sense strand
uaaaguagacagauuagca

SEQ ID NO: 105087 - RNA, 19 nt, Homo sapiens
  misc_RNA (1)...(19): siRNA sense strand
uggaaagacuugaagaaca

SEQ ID NO: 105088 - RNA, 19 nt, Homo sapiens
  misc_RNA (1)...(19): siRNA sense strand
agauuugguucaccgaaua

SEQ ID NO: 105089 - RNA, 19 nt, Homo sapiens
  misc_RNA (1)...(19): siRNA sense strand
aaagaaagagcgaguggaa

SEQ ID NO: 105090 - RNA, 19 nt, Homo sapiens
  misc_RNA (1)...(19): siRNA sense strand
caacaugagggauccuauu

SEQ ID NO: 105091 - RNA, 19 nt, Homo sapiens
  misc_RNA (1)...(19): siRNA sense strand
ccgaauaaguggugacaag

SEQ ID NO: 105092 - RNA, 19 nt, Homo sapiens
  misc_RNA (1)...(19): siRNA sense strand
cagauuagcaggaauuauc

SEQ ID NO: 105093 - RNA, 19 nt, Homo sapiens
  misc_RNA (1)...(19): siRNA sense strand
ucucucaaaucuaguaguu

SEQ ID NO: 105094 - RNA, 19 nt, Homo sapiens
  misc_RNA (1)...(19): siRNA sense strand
uagugaagaugugcuauga

SEQ ID NO: 105095 - RNA, 19 nt, Homo sapiens
  misc_RNA (1)...(19): siRNA sense strand
ggaauggaauuaagaaaag

SEQ ID NO: 105096 - RNA, 19 nt, Homo sapiens
  misc_RNA (1)...(19): siRNA sense strand
ccacacuuguugaggacua

SEQ ID NO: 105097 - RNA, 19 nt, Homo sapiens
  misc_RNA (1)...(19): siRNA sense strand
ugacaagaaguuagaagaa

SEQ ID NO: 105098 - RNA, 19 nt, Homo sapiens
  misc_RNA (1)...(19): siRNA sense strand
ugaggacuauggaauggaa

SEQ ID NO: 105099 - RNA, 19 nt, Homo sapiens
  misc_RNA (1)...(19): siRNA sense strand
aaggcaagauuuauguuga

SEQ ID NO: 105100 - RNA, 19 nt, Homo sapiens
  misc_RNA (1)...(19): siRNA sense strand
ccgaagccuuucucucaaa

SEQ ID NO: 105101 - RNA, 19 nt, Homo sapiens
  misc_RNA (1)...(19): siRNA sense strand
uggcacagcuucuggaucu

SEQ ID NO: 105102 - RNA, 19 nt, Homo sapiens
  misc_RNA (1)...(19): siRNA sense strand
ggauuacauucgaacacaa

SEQ ID NO: 105103 - RNA, 19 nt, Homo sapiens
  misc_RNA (1)...(19): siRNA sense strand
gcgacugacuaaaacauua

SEQ ID NO: 105104 - RNA, 19 nt, Homo sapiens
  misc_RNA (1)...(19): siRNA sense strand
ggcaagauuuauguugaaa

SEQ ID NO: 105105 - RNA, 19 nt, Homo sapiens
  misc_RNA (1)...(19): siRNA sense strand
cuacagagcaauauaugau

SEQ ID NO: 105106 - RNA, 19 nt, Homo sapiens
  misc_RNA (1)...(19): siRNA sense strand
gagggauccuauuugucua

SEQ ID NO: 105107 - RNA, 19 nt, Homo sapiens
  misc_RNA (1)...(19): siRNA sense strand
gaugugcuaugaggcuaaa

SEQ ID NO: 105108 - RNA, 19 nt, Homo sapiens
  misc_RNA (1)...(19): siRNA sense strand
gacaaugaacagucagauu

SEQ ID NO: 105109 - RNA, 19 nt, Homo sapiens
  misc_RNA (1)...(19): siRNA sense strand
ccuaucaaacuucgauuaa

SEQ ID NO: 105110 - RNA, 19 nt, Homo sapiens
  misc_RNA (1)...(19): siRNA sense strand
caaugaacagucagauuug

SEQ ID NO: 105111 - RNA, 19 nt, Homo sapiens
  misc_RNA (1)...(19): siRNA sense strand
guauacaggcagaaaguga

SEQ ID NO: 105112 - RNA, 19 nt, Homo sapiens
  misc_RNA (1)...(19): siRNA sense strand
uuaccgaaggcaagauuua

SEQ ID NO: 105113 - RNA, 19 nt, Homo sapiens
  misc_RNA (1)...(19): siRNA sense strand
gcacagcuucuggaucuau

SEQ ID NO: 105114 - RNA, 19 nt, Homo sapiens
  misc_RNA (1)...(19): siRNA sense strand
ggauccuauuugucuauuu

SEQ ID NO: 105115 - RNA, 19 nt, Homo sapiens
  misc_RNA (1)...(19): siRNA sense strand
gacaucccguaucuuaguu

SEQ ID NO: 105116 - RNA, 19 nt, Homo sapiens
  misc_RNA (1)...(19): siRNA sense strand
gauuacauucgaacacaaa

SEQ ID NO: 105117 - RNA, 19 nt, Homo sapiens
  misc_RNA (1)...(19): siRNA sense strand
ugacuggucucagaaacug

SEQ ID NO: 105118 - RNA, 19 nt, Homo sapiens
  misc_RNA (1)...(19): siRNA sense strand
guccgaagccuuucucuca

SEQ ID NO: 105119 - RNA, 19 nt, Homo sapiens
  misc_RNA (1)...(19): siRNA sense strand
gugaaggauuacauucgaa

SEQ ID NO: 105120 - RNA, 19 nt, Homo sapiens
  misc_RNA (1)...(19): siRNA sense strand
cagaaacugaacucauuaa

SEQ ID NO: 105121 - RNA, 19 nt, Homo sapiens
  misc_RNA (1)...(19): siRNA sense strand
uaaaugacuggucucagaa

SEQ ID NO: 105122 - RNA, 19 nt, Homo sapiens
  misc_RNA (1)...(19): siRNA sense strand
cacagaccuuccuaucaaa

SEQ ID NO: 105123 - RNA, 19 nt, Homo sapiens
  misc_RNA (1)...(19): siRNA sense strand
cgacaucccguaucuuagu

SEQ ID NO: 105124 - RNA, 19 nt, Homo sapiens
  misc_RNA (1)...(19): siRNA sense strand
gguggaaagacuugaagaa

SEQ ID NO: 105125 - RNA, 19 nt, Homo sapiens
  misc_RNA (1)...(19): siRNA sense strand
cuaugaggcuaaagaaugg

SEQ ID NO: 105126 - RNA, 19 nt, Homo sapiens
  misc_RNA (1)...(19): siRNA sense strand
gagcgugcgcgacugacua

SEQ ID NO: 105127 - RNA, 19 nt, Homo sapiens
  misc_RNA (1)...(19): siRNA sense strand
cagauuugguucaccgaau

SEQ ID NO: 105128 - RNA, 19 nt, Homo sapiens
  misc_RNA (1)...(19): siRNA sense strand
guaucgacaucccguaucu

SEQ ID NO: 105129 - RNA, 19 nt, Homo sapiens
  misc_RNA (1)...(19): siRNA sense strand
agacagauuagcaggaauu

SEQ ID NO: 105130 - RNA, 19 nt, Homo sapiens
  misc_RNA (1)...(19): siRNA sense strand
gccuuucucucaaaucuag

SEQ ID NO: 105131 - RNA, 19 nt, Homo sapiens
  misc_RNA (1)...(19): siRNA sense strand
cgaagccuuucucucaaau

SEQ ID NO: 105132 - RNA, 19 nt, Homo sapiens
  misc_RNA (1)...(19): siRNA sense strand
uugcuaaaguagacagauu

SEQ ID NO: 105133 - RNA, 19 nt, Homo sapiens
  misc_RNA (1)...(19): siRNA sense strand
acaaaauggugaugugaaa

SEQ ID NO: 105134 - RNA, 19 nt, Homo sapiens
  misc_RNA (1)...(19): siRNA sense strand
gacagauuagcaggaauua

SEQ ID NO: 105135 - RNA, 19 nt, Homo sapiens
  misc_RNA (1)...(19): siRNA sense strand
aauaaguggugacaagaag

SEQ ID NO: 105136 - RNA, 19 nt, Homo sapiens
  misc_RNA (1)...(19): siRNA sense strand
gggauccuauuugucuauu

SEQ ID NO: 105137 - RNA, 19 nt, Homo sapiens
  misc_RNA (1)...(19): siRNA sense strand
ugagggauccuauuugucu

SEQ ID NO: 105138 - RNA, 19 nt, Homo sapiens
  misc_RNA (1)...(19): siRNA sense strand
ugugaaggauuacauucga

SEQ ID NO: 105139 - RNA, 19 nt, Homo sapiens
  misc_RNA (1)...(19): siRNA sense strand
acccaaggauccaaauaau

SEQ ID NO: 105140 - RNA, 19 nt, Homo sapiens
  misc_RNA (1)...(19): siRNA sense strand
uauacucggauaacaauga

SEQ ID NO: 105141 - RNA, 19 nt, Homo sapiens
  misc_RNA (1)...(19): siRNA sense strand
uagaauaauggccaaguau

SEQ ID NO: 105142 - RNA, 19 nt, Homo sapiens
  misc_RNA (1)...(19): siRNA sense strand
guuagaagaaauucccaaa

SEQ ID NO: 105143 - RNA, 19 nt, Homo sapiens
  misc_RNA (1)...(19): siRNA sense strand
uaaguggugacaagaaguu

SEQ ID NO: 105144 - RNA, 19 nt, Homo sapiens
  misc_RNA (1)...(19): siRNA sense strand
uaagcacuacagagcaaua

SEQ ID NO: 105145 - RNA, 19 nt, Homo sapiens
  misc_RNA (1)...(19): siRNA sense strand
caaaucaucagcaagaaaa

SEQ ID NO: 105146 - RNA, 19 nt, Homo sapiens
  misc_RNA (1)...(19): siRNA sense strand
gaacacaaaucaucagcaa

SEQ ID NO: 105147 - RNA, 19 nt, Homo sapiens
  misc_RNA (1)...(19): siRNA sense strand
guacuuauguugaggaaau

SEQ ID NO: 105148 - RNA, 19 nt, Homo sapiens
  misc_RNA (1)...(19): siRNA sense strand
aagaggagaugauacauaa

SEQ ID NO: 105149 - RNA, 19 nt, Homo sapiens
  misc_RNA (1)...(19): siRNA sense strand
ucacagaccuuccuaucaa

SEQ ID NO: 105150 - RNA, 19 nt, Homo sapiens
  misc_RNA (1)...(19): siRNA sense strand
gacaagaaguuagaagaaa

SEQ ID NO: 105151 - RNA, 19 nt, Homo sapiens
  misc_RNA (1)...(19): siRNA sense strand
ucauuaaugucucugguua

SEQ ID NO: 105152 - RNA, 19 nt, Homo sapiens
  misc_RNA (1)...(19): siRNA sense strand
gaaugggauuuacuuaaug

SEQ ID NO: 105153 - RNA, 19 nt, Homo sapiens
  misc_RNA (1)...(19): siRNA sense strand
gauccuauuugucuauuug

SEQ ID NO: 105154 - RNA, 19 nt, Homo sapiens
  misc_RNA (1)...(19): siRNA sense strand
ggaaagacuugaagaacag

SEQ ID NO: 105155 - RNA, 19 nt, Homo sapiens
  misc_RNA (1)...(19): siRNA sense strand
gaaacugaacucauuaaug

SEQ ID NO: 105156 - RNA, 19 nt, Homo sapiens
  misc_RNA (1)...(19): siRNA sense strand
uuaaaugacuggucucaga

SEQ ID NO: 105157 - RNA, 19 nt, Homo sapiens
  misc_RNA (1)...(19): siRNA sense strand
gaagaaauucccaaauaca

SEQ ID NO: 105158 - RNA, 19 nt, Homo sapiens
  misc_RNA (1)...(19): siRNA sense strand
gaaagagcgaguggaauuu

SEQ ID NO: 105159 - RNA, 19 nt, Homo sapiens
  misc_RNA (1)...(19): siRNA sense strand
uaaugucucugguuaacaa

SEQ ID NO: 105160 - RNA, 19 nt, Homo sapiens
  misc_RNA (1)...(19): siRNA sense strand
guagacagauuagcaggaa

SEQ ID NO: 105161 - RNA, 19 nt, Homo sapiens
  misc_RNA (1)...(19): siRNA sense strand
gcacuacagagcaauauau

SEQ ID NO: 105162 - RNA, 19 nt, Homo sapiens
  misc_RNA (1)...(19): siRNA sense strand
acaaugaacagucagauuu

SEQ ID NO: 105163 - RNA, 19 nt, Homo sapiens
  misc_RNA (1)...(19): siRNA sense strand
gccuagcugugaaggauua

SEQ ID NO: 105164 - RNA, 19 nt, Homo sapiens
  misc_RNA (1)...(19): siRNA sense strand
ggaagaaaauacagagaaa

SEQ ID NO: 105165 - RNA, 19 nt, Homo sapiens
  misc_RNA (1)...(19): siRNA sense strand
gcuaugaggcuaaagaaug

SEQ ID NO: 105166 - RNA, 19 nt, Homo sapiens
  misc_RNA (1)...(19): siRNA sense strand
gaaggcaagauuuauguug

SEQ ID NO: 105167 - RNA, 19 nt, Homo sapiens
  misc_RNA (1)...(19): siRNA sense strand
gauacucuacgaaugguua

SEQ ID NO: 105168 - RNA, 19 nt, Homo sapiens
  misc_RNA (1)...(19): siRNA sense strand
uaucuuaguugcaguagug

SEQ ID NO: 105169 - RNA, 19 nt, Homo sapiens
  misc_RNA (1)...(19): siRNA sense strand
gacccaaggauccaaauaa

SEQ ID NO: 105170 - RNA, 19 nt, Homo sapiens
  misc_RNA (1)...(19): siRNA sense strand
uagcaggaauuaucaacuu

SEQ ID NO: 105171 - RNA, 19 nt, Homo sapiens
  misc_RNA (1)...(19): siRNA sense strand
gaauaaguggugacaagaa

SEQ ID NO: 105172 - RNA, 19 nt, Homo sapiens
  misc_RNA (1)...(19): siRNA sense strand
gcaagaaaauuaacaccaa

SEQ ID NO: 105173 - RNA, 19 nt, Homo sapiens
  misc_RNA (1)...(19): siRNA sense strand
caugagggauccuauuugu

SEQ ID NO: 105174 - RNA, 19 nt, Homo sapiens
  misc_RNA (1)...(19): siRNA sense strand
agaaagagcgaguggaauu

SEQ ID NO: 105175 - RNA, 19 nt, Homo sapiens
  misc_RNA (1)...(19): siRNA sense strand
ggacuauggaauggaauua

SEQ ID NO: 105176 - RNA, 19 nt, Homo sapiens
  misc_RNA (1)...(19): siRNA sense strand
uuagaauaauggccaagua

SEQ ID NO: 105177 - RNA, 19 nt, Homo sapiens
  misc_RNA (1)...(19): siRNA sense strand
acacaaaucaucagcaaga

SEQ ID NO: 105178 - RNA, 19 nt, Homo sapiens
  misc_RNA (1)...(19): siRNA sense strand
ggaucuaucuguugaugag

SEQ ID NO: 105179 - RNA, 19 nt, Homo sapiens
  misc_RNA (1)...(19): siRNA sense strand
gaaaucacagaccuuccua

SEQ ID NO: 105180 - RNA, 19 nt, Homo sapiens
  misc_RNA (1)...(19): siRNA sense strand
aaagaggagaugauacaua

SEQ ID NO: 105181 - RNA, 19 nt, Homo sapiens
  misc_RNA (1)...(19): siRNA sense strand
ccaaagaggagaugauaca

SEQ ID NO: 105182 - RNA, 19 nt, Homo sapiens
  misc_RNA (1)...(19): siRNA sense strand
agaagaaauucccaaauac

SEQ ID NO: 105183 - RNA, 19 nt, Homo sapiens
  misc_RNA (1)...(19): siRNA sense strand
gagcgaguggaauuuauuu

SEQ ID NO: 105184 - RNA, 19 nt, Homo sapiens
  misc_RNA (1)...(19): siRNA sense strand
aaagagcgaguggaauuua

SEQ ID NO: 105185 - RNA, 19 nt, Homo sapiens
  misc_RNA (1)...(19): siRNA sense strand
gaggagaugauacauaauc

SEQ ID NO: 105186 - RNA, 19 nt, Homo sapiens
  misc_RNA (1)...(19): siRNA sense strand
uaaaguagacagauuagca

SEQ ID NO: 105187 - RNA, 19 nt, Homo sapiens
  misc_RNA (1)...(19): siRNA sense strand
uggaaagacuugaagaaca

SEQ ID NO: 105188 - RNA, 19 nt, Homo sapiens
  misc_RNA (1)...(19): siRNA sense strand
agauuugguucaccgaaua

SEQ ID NO: 105189 - RNA, 19 nt, Homo sapiens
  misc_RNA (1)...(19): siRNA sense strand
aaagaaagagcgaguggaa

SEQ ID NO: 105190 - RNA, 19 nt, Homo sapiens
  misc_RNA (1)...(19): siRNA sense strand
caacaugagggauccuauu

SEQ ID NO: 105191 - RNA, 19 nt, Homo sapiens
  misc_RNA (1)...(19): siRNA sense strand
ccgaauaaguggugacaag

SEQ ID NO: 105192 - RNA, 19 nt, Homo sapiens
  misc_RNA (1)...(19): siRNA sense strand
cagauuagcaggaauuauc

SEQ ID NO: 105193 - RNA, 19 nt, Homo sapiens
  misc_RNA (1)...(19): siRNA sense strand
ucucucaaaucuaguaguu

SEQ ID NO: 105194 - RNA, 19 nt, Homo sapiens
  misc_RNA (1)...(19): siRNA sense strand
uagugaagaugugcuauga

SEQ ID NO: 105195 - RNA, 19 nt, Homo sapiens
  misc_RNA (1)...(19): siRNA sense strand
ggaauggaauuaagaaaag

SEQ ID NO: 105196 - RNA, 19 nt, Homo sapiens
  misc_RNA (1)...(19): siRNA sense strand
ccacacuuguugaggacua

SEQ ID NO: 105197 - RNA, 19 nt, Homo sapiens
  misc_RNA (1)...(19): siRNA sense strand
ugacaagaaguuagaagaa

SEQ ID NO: 105198 - RNA, 19 nt, Homo sapiens
  misc_RNA (1)...(19): siRNA sense strand
ugaggacuauggaauggaa

SEQ ID NO: 105199 - RNA, 19 nt, Homo sapiens
  misc_RNA (1)...(19): siRNA sense strand
aaggcaagauuuauguuga

SEQ ID NO: 105200 - RNA, 19 nt, Homo sapiens
  misc_RNA (1)...(19): siRNA sense strand
ccgaagccuuucucucaaa

SEQ ID NO: 105201 - RNA, 19 nt, Homo sapiens
  misc_RNA (1)...(19): siRNA sense strand
uggcacagcuucuggaucu

SEQ ID NO: 105202 - RNA, 19 nt, Homo sapiens
  misc_RNA (1)...(19): siRNA sense strand
ggauuacauucgaacacaa

SEQ ID NO: 105203 - RNA, 19 nt, Homo sapiens
  misc_RNA (1)...(19): siRNA sense strand
gcgacugacuaaaacauua

SEQ ID NO: 105204 - RNA, 19 nt, Homo sapiens
  misc_RNA (1)...(19): siRNA sense strand
ggcaagauuuauguugaaa

SEQ ID NO: 105205 - RNA, 19 nt, Homo sapiens
  misc_RNA (1)...(19): siRNA sense strand
cuacagagcaauauaugau

SEQ ID NO: 105206 - RNA, 19 nt, Homo sapiens
  misc_RNA (1)...(19): siRNA sense strand
gagggauccuauuugucua

SEQ ID NO: 105207 - RNA, 19 nt, Homo sapiens
  misc_RNA (1)...(19): siRNA sense strand
gaugugcuaugaggcuaaa

SEQ ID NO: 105208 - RNA, 19 nt, Homo sapiens
  misc_RNA (1)...(19): siRNA sense strand
gacaaugaacagucagauu

SEQ ID NO: 105209 - RNA, 19 nt, Homo sapiens
  misc_RNA (1)...(19): siRNA sense strand
ccuaucaaacuucgauuaa

SEQ ID NO: 105210 - RNA, 19 nt, Homo sapiens
  misc_RNA (1)...(19): siRNA sense strand
caaugaacagucagauuug

SEQ ID NO: 105211 - RNA, 19 nt, Homo sapiens
  misc_RNA (1)...(19): siRNA sense strand
guauacaggcagaaaguga

SEQ ID NO: 105212 - RNA, 19 nt, Homo sapiens
  misc_RNA (1)...(19): siRNA sense strand
uuaccgaaggcaagauuua

SEQ ID NO: 105213 - RNA, 19 nt, Homo sapiens
  misc_RNA (1)...(19): siRNA sense strand
gcacagcuucuggaucuau

SEQ ID NO: 105214 - RNA, 19 nt, Homo sapiens
  misc_RNA (1)...(19): siRNA sense strand
ggauccuauuugucuauuu

SEQ ID NO: 105215 - RNA, 19 nt, Homo sapiens
  misc_RNA (1)...(19): siRNA sense strand
gacaucccguaucuuaguu

SEQ ID NO: 105216 - RNA, 19 nt, Homo sapiens
  misc_RNA (1)...(19): siRNA sense strand
gauuacauucgaacacaaa

SEQ ID NO: 105217 - RNA, 19 nt, Homo sapiens
  misc_RNA (1)...(19): siRNA sense strand
ugacuggucucagaaacug

SEQ ID NO: 105218 - RNA, 19 nt, Homo sapiens
  misc_RNA (1)...(19): siRNA sense strand
guccgaagccuuucucuca

SEQ ID NO: 105219 - RNA, 19 nt, Homo sapiens
  misc_RNA (1)...(19): siRNA sense strand
gugaaggauuacauucgaa

SEQ ID NO: 105220 - RNA, 19 nt, Homo sapiens
  misc_RNA (1)...(19): siRNA sense strand
cagaaacugaacucauuaa

SEQ ID NO: 105221 - RNA, 19 nt, Homo sapiens
  misc_RNA (1)...(19): siRNA sense strand
uaaaugacuggucucagaa

SEQ ID NO: 105222 - RNA, 19 nt, Homo sapiens
  misc_RNA (1)...(19): siRNA sense strand
cacagaccuuccuaucaaa

SEQ ID NO: 105223 - RNA, 19 nt, Homo sapiens
  misc_RNA (1)...(19): siRNA sense strand
cgacaucccguaucuuagu

SEQ ID NO: 105224 - RNA, 19 nt, Homo sapiens
  misc_RNA (1)...(19): siRNA sense strand
gguggaaagacuugaagaa

SEQ ID NO: 105225 - RNA, 19 nt, Homo sapiens
  misc_RNA (1)...(19): siRNA sense strand
cuaugaggcuaaagaaugg

SEQ ID NO: 105226 - RNA, 19 nt, Homo sapiens
  misc_RNA (1)...(19): siRNA sense strand
gagcgugcgcgacugacua

SEQ ID NO: 105227 - RNA, 19 nt, Homo sapiens
  misc_RNA (1)...(19): siRNA sense strand
cagauuugguucaccgaau

SEQ ID NO: 105228 - RNA, 19 nt, Homo sapiens
  misc_RNA (1)...(19): siRNA sense strand
guaucgacaucccguaucu

SEQ ID NO: 105229 - RNA, 19 nt, Homo sapiens
  misc_RNA (1)...(19): siRNA sense strand
agacagauuagcaggaauu

SEQ ID NO: 105230 - RNA, 19 nt, Homo sapiens
  misc_RNA (1)...(19): siRNA sense strand
gccuuucucucaaaucuag

SEQ ID NO: 105231 - RNA, 19 nt, Homo sapiens
  misc_RNA (1)...(19): siRNA sense strand
cgaagccuuucucucaaau

SEQ ID NO: 105232 - RNA, 19 nt, Homo sapiens
  misc_RNA (1)...(19): siRNA sense strand
uugcuaaaguagacagauu

SEQ ID NO: 105233 - RNA, 19 nt, Homo sapiens
  misc_RNA (1)...(19): siRNA sense strand
acaaaauggugaugugaaa

SEQ ID NO: 105234 - RNA, 19 nt, Homo sapiens
  misc_RNA (1)...(19): siRNA sense strand
gacagauuagcaggaauua

SEQ ID NO: 105235 - RNA, 19 nt, Homo sapiens
  misc_RNA (1)...(19): siRNA sense strand
aauaaguggugacaagaag

SEQ ID NO: 105236 - RNA, 19 nt, Homo sapiens
  misc_RNA (1)...(19): siRNA sense strand
gggauccuauuugucuauu

SEQ ID NO: 105237 - RNA, 19 nt, Homo sapiens
  misc_RNA (1)...(19): siRNA sense strand
ugagggauccuauuugucu

SEQ ID NO: 105238 - RNA, 19 nt, Homo sapiens
  misc_RNA (1)...(19): siRNA sense strand
ugugaaggauuacauucga

SEQ ID NO: 105239 - RNA, 19 nt, Homo sapiens
  misc_RNA (1)...(19): siRNA sense strand
acccaaggauccaaauaau

SEQ ID NO: 105240 - RNA, 19 nt, Homo sapiens
  misc_RNA (1)...(19): siRNA sense strand
uauacucggauaacaauga

SEQ ID NO: 105241 - RNA, 19 nt, Homo sapiens
  misc_RNA (1)...(19): siRNA sense strand
uagaauaauggccaaguau

SEQ ID NO: 105242 - RNA, 19 nt, Homo sapiens
  misc_RNA (1)...(19): siRNA sense strand
guuagaagaaauucccaaa

SEQ ID NO: 105243 - RNA, 19 nt, Homo sapiens
  misc_RNA (1)...(19): siRNA sense strand
uaaguggugacaagaaguu

SEQ ID NO: 105244 - RNA, 19 nt, Homo sapiens
  misc_RNA (1)...(19): siRNA sense strand
uaagcacuacagagcaaua

SEQ ID NO: 105245 - RNA, 19 nt, Homo sapiens
  misc_RNA (1)...(19): siRNA sense strand
caaaucaucagcaagaaaa

SEQ ID NO: 105246 - RNA, 19 nt, Homo sapiens
  misc_RNA (1)...(19): siRNA sense strand
ggaaaucauucuucacgua

SEQ ID NO: 105247 - RNA, 19 nt, Homo sapiens
  misc_RNA (1)...(19): siRNA sense strand
ucuaugaucucuccaguaa

SEQ ID NO: 105248 - RNA, 19 nt, Homo sapiens
  misc_RNA (1)...(19): siRNA sense strand
caaagaugcucugcgguuu

SEQ ID NO: 105249 - RNA, 19 nt, Homo sapiens
  misc_RNA (1)...(19): siRNA sense strand
uaugaucucuccaguaaau

SEQ ID NO: 105250 - RNA, 19 nt, Homo sapiens
  misc_RNA (1)...(19): siRNA sense strand
gcacggaugugaagagcau

SEQ ID NO: 105251 - RNA, 19 nt, Homo sapiens
  misc_RNA (1)...(19): siRNA sense strand
gaggagcucuacacgaaga

SEQ ID NO: 105252 - RNA, 19 nt, Homo sapiens
  misc_RNA (1)...(19): siRNA sense strand
ggacguaccgggcuuccua

SEQ ID NO: 105253 - RNA, 19 nt, Homo sapiens
  misc_RNA (1)...(19): siRNA sense strand
uggaggagcucuacacgaa

SEQ ID NO: 105254 - RNA, 19 nt, Homo sapiens
  misc_RNA (1)...(19): siRNA sense strand
caacagaucaagggaauga

SEQ ID NO: 105255 - RNA, 19 nt, Homo sapiens
  misc_RNA (1)...(19): siRNA sense strand
gaaaccacgcguccuacua

SEQ ID NO: 105256 - RNA, 19 nt, Homo sapiens
  misc_RNA (1)...(19): siRNA sense strand
caaaggaaacaauugaaga

SEQ ID NO: 105257 - RNA, 19 nt, Homo sapiens
  misc_RNA (1)...(19): siRNA sense strand
ggcaucagcugacacuuca

SEQ ID NO: 105258 - RNA, 19 nt, Homo sapiens
  misc_RNA (1)...(19): siRNA sense strand
ugaagauguugaagaaaug

SEQ ID NO: 105259 - RNA, 19 nt, Homo sapiens
  misc_RNA (1)...(19): siRNA sense strand
ucacguaguuagacagaug

SEQ ID NO: 105260 - RNA, 19 nt, Homo sapiens
  misc_RNA (1)...(19): siRNA sense strand
cgaagaaguuguggcauca

SEQ ID NO: 105261 - RNA, 19 nt, Homo sapiens
  misc_RNA (1)...(19): siRNA sense strand
gcagugauccuguguaaaa

SEQ ID NO: 105262 - RNA, 19 nt, Homo sapiens
  misc_RNA (1)...(19): siRNA sense strand
ggaaaagacucgugagaag

SEQ ID NO: 105263 - RNA, 19 nt, Homo sapiens
  misc_RNA (1)...(19): siRNA sense strand
gauggucucauuaagcuuu

SEQ ID NO: 105264 - RNA, 19 nt, Homo sapiens
  misc_RNA (1)...(19): siRNA sense strand
gacaaacgaguccacauga

SEQ ID NO: 105265 - RNA, 19 nt, Homo sapiens
  misc_RNA (1)...(19): siRNA sense strand
ugaaugagguggagcuucu

SEQ ID NO: 105266 - RNA, 19 nt, Homo sapiens
  misc_RNA (1)...(19): siRNA sense strand
gaccggcaguggcugauug

SEQ ID NO: 105267 - RNA, 19 nt, Homo sapiens
  misc_RNA (1)...(19): siRNA sense strand
acagaugacugauccuaau

SEQ ID NO: 105268 - RNA, 19 nt, Homo sapiens
  misc_RNA (1)...(19): siRNA sense strand
cuucaacaguggcaacgua

SEQ ID NO: 105269 - RNA, 19 nt, Homo sapiens
  misc_RNA (1)...(19): siRNA sense strand
gcaccaggcccaugacauc

SEQ ID NO: 105270 - RNA, 19 nt, Homo sapiens
  misc_RNA (1)...(19): siRNA sense strand
gaugacugauccuaaugug

SEQ ID NO: 105271 - RNA, 19 nt, Homo sapiens
  misc_RNA (1)...(19): siRNA sense strand
aggcagugauccuguguaa

SEQ ID NO: 105272 - RNA, 19 nt, Homo sapiens
  misc_RNA (1)...(19): siRNA sense strand
uaauguggcucuuacuuuu

SEQ ID NO: 105273 - RNA, 19 nt, Homo sapiens
  misc_RNA (1)...(19): siRNA sense strand
cacuucaggugcuugauuu

SEQ ID NO: 105274 - RNA, 19 nt, Homo sapiens
  misc_RNA (1)...(19): siRNA sense strand
cuaauguggcucuuacuuu

SEQ ID NO: 105275 - RNA, 19 nt, Homo sapiens
  misc_RNA (1)...(19): siRNA sense strand
ccacgcguccuacuacaaa

SEQ ID NO: 105276 - RNA, 19 nt, Homo sapiens
  misc_RNA (1)...(19): siRNA sense strand
caaccuuccuggugugaca

SEQ ID NO: 105277 - RNA, 19 nt, Homo sapiens
  misc_RNA (1)...(19): siRNA sense strand
ucacacgaccugccaauca

SEQ ID NO: 105278 - RNA, 19 nt, Homo sapiens
  misc_RNA (1)...(19): siRNA sense strand
caaaagugcuaaaaucaca

SEQ ID NO: 105279 - RNA, 19 nt, Homo sapiens
  misc_RNA (1)...(19): siRNA sense strand
gacagaugacugauccuaa

SEQ ID NO: 105280 - RNA, 19 nt, Homo sapiens
  misc_RNA (1)...(19): siRNA sense strand
ucacagucguuucuaugau

SEQ ID NO: 105281 - RNA, 19 nt, Homo sapiens
  misc_RNA (1)...(19): siRNA sense strand
aggaaacaauugaagaugu

SEQ ID NO: 105282 - RNA, 19 nt, Homo sapiens
  misc_RNA (1)...(19): siRNA sense strand
cccaugacauccucaccua

SEQ ID NO: 105283 - RNA, 19 nt, Homo sapiens
  misc_RNA (1)...(19): siRNA sense strand
gauccuaauguggcucuua

SEQ ID NO: 105284 - RNA, 19 nt, Homo sapiens
  misc_RNA (1)...(19): siRNA sense strand
ccagcagccugauuuagca

SEQ ID NO: 105285 - RNA, 19 nt, Homo sapiens
  misc_RNA (1)...(19): siRNA sense strand
caauugaagauguugaaga

SEQ ID NO: 105286 - RNA, 19 nt, Homo sapiens
  misc_RNA (1)...(19): siRNA sense strand
acagacaacucacuuuuga

SEQ ID NO: 105287 - RNA, 19 nt, Homo sapiens
  misc_RNA (1)...(19): siRNA sense strand
ugaaggaccgccuggaguu

SEQ ID NO: 105288 - RNA, 19 nt, Homo sapiens
  misc_RNA (1)...(19): siRNA sense strand
aaucauucuucacguaguu

SEQ ID NO: 105289 - RNA, 19 nt, Homo sapiens
  misc_RNA (1)...(19): siRNA sense strand
gggccagcagccugauuua

SEQ ID NO: 105290 - RNA, 19 nt, Homo sapiens
  misc_RNA (1)...(19): siRNA sense strand
gccaaucacagacaacuca

SEQ ID NO: 105291 - RNA, 19 nt, Homo sapiens
  misc_RNA (1)...(19): siRNA sense strand
cacagucguuucuaugauc

SEQ ID NO: 105292 - RNA, 19 nt, Homo sapiens
  misc_RNA (1)...(19): siRNA sense strand
gaaauugccaaaagugcua

SEQ ID NO: 105293 - RNA, 19 nt, Homo sapiens
  misc_RNA (1)...(19): siRNA sense strand
gugagaaggugaaaaguag

SEQ ID NO: 105294 - RNA, 19 nt, Homo sapiens
  misc_RNA (1)...(19): siRNA sense strand
ugcaacagaucaagggaau

SEQ ID NO: 105295 - RNA, 19 nt, Homo sapiens
  misc_RNA (1)...(19): siRNA sense strand
gaggaaaauucaguuguug

SEQ ID NO: 105296 - RNA, 19 nt, Homo sapiens
  misc_RNA (1)...(19): siRNA sense strand
gguucacagucguuucuau

SEQ ID NO: 105297 - RNA, 19 nt, Homo sapiens
  misc_RNA (1)...(19): siRNA sense strand
gguuacaaaggaaacaauu

SEQ ID NO: 105298 - RNA, 19 nt, Homo sapiens
  misc_RNA (1)...(19): siRNA sense strand
gcaauuggagcucuaaaau

SEQ ID NO: 105299 - RNA, 19 nt, Homo sapiens
  misc_RNA (1)...(19): siRNA sense strand
acaacucacuuuugaagaa

SEQ ID NO: 105300 - RNA, 19 nt, Homo sapiens
  misc_RNA (1)...(19): siRNA sense strand
aagaaaugcucaacaaccu

SEQ ID NO: 105301 - RNA, 19 nt, Homo sapiens
  misc_RNA (1)...(19): siRNA sense strand
gaaggaccgccuggaguuc

SEQ ID NO: 105302 - RNA, 19 nt, Homo sapiens
  misc_RNA (1)...(19): siRNA sense strand
gaagaaauugccaaaagug

SEQ ID NO: 105303 - RNA, 19 nt, Homo sapiens
  misc_RNA (1)...(19): siRNA sense strand
ugaggaaaauucaguuguu

SEQ ID NO: 105304 - RNA, 19 nt, Homo sapiens
  misc_RNA (1)...(19): siRNA sense strand
guuacaaaggaaacaauug

SEQ ID NO: 105305 - RNA, 19 nt, Homo sapiens
  misc_RNA (1)...(19): siRNA sense strand
gcuggugaaaggcaguaua

SEQ ID NO: 105306 - RNA, 19 nt, Homo sapiens
  misc_RNA (1)...(19): siRNA sense strand
caacucacuuuugaagaaa

SEQ ID NO: 105307 - RNA, 19 nt, Homo sapiens
  misc_RNA (1)...(19): siRNA sense strand
caacaguggcaacguagag

SEQ ID NO: 105308 - RNA, 19 nt, Homo sapiens
  misc_RNA (1)...(19): siRNA sense strand
guucacagucguuucuaug

SEQ ID NO: 105309 - RNA, 19 nt, Homo sapiens
  misc_RNA (1)...(19): siRNA sense strand
agacagaugacugauccua

SEQ ID NO: 105310 - RNA, 19 nt, Homo sapiens
  misc_RNA (1)...(19): siRNA sense strand
uagacgagguggacaaacg

SEQ ID NO: 105311 - RNA, 19 nt, Homo sapiens
  misc_RNA (1)...(19): siRNA sense strand
guauagacgagguggacaa

SEQ ID NO: 105312 - RNA, 19 nt, Homo sapiens
  misc_RNA (1)...(19): siRNA sense strand
ggugaaaggcaguauagac

SEQ ID NO: 105313 - RNA, 19 nt, Homo sapiens
  misc_RNA (1)...(19): siRNA sense strand
acacuucaggugcuugauu

SEQ ID NO: 105314 - RNA, 19 nt, Homo sapiens
  misc_RNA (1)...(19): siRNA sense strand
ugaagaaauugccaaaagu

SEQ ID NO: 105315 - RNA, 19 nt, Homo sapiens
  misc_RNA (1)...(19): siRNA sense strand
gcugauugacacccucuau

SEQ ID NO: 105316 - RNA, 19 nt, Homo sapiens
  misc_RNA (1)...(19): siRNA sense strand
cuacagguuacaaaggaaa

SEQ ID NO: 105317 - RNA, 19 nt, Homo sapiens
  misc_RNA (1)...(19): siRNA sense strand
ccuacagguuacaaaggaa

SEQ ID NO: 105318 - RNA, 19 nt, Homo sapiens
  misc_RNA (1)...(19): siRNA sense strand
ucggaaaccacgcguccua

SEQ ID NO: 105319 - RNA, 19 nt, Homo sapiens
  misc_RNA (1)...(19): siRNA sense strand
acaaaggaaacaauugaag

SEQ ID NO: 105320 - RNA, 19 nt, Homo sapiens
  misc_RNA (1)...(19): siRNA sense strand
ccuaauguggcucuuacuu

SEQ ID NO: 105321 - RNA, 19 nt, Homo sapiens
  misc_RNA (1)...(19): siRNA sense strand
ucguggaaaucauucuuca

SEQ ID NO: 105322 - RNA, 19 nt, Homo sapiens
  misc_RNA (1)...(19): siRNA sense strand
ucacagacaacucacuuuu

SEQ ID NO: 105323 - RNA, 19 nt, Homo sapiens
  misc_RNA (1)...(19): siRNA sense strand
uggagucccugaggaauac

SEQ ID NO: 105324 - RNA, 19 nt, Homo sapiens
  misc_RNA (1)...(19): siRNA sense strand
cuggagucccugaggaaua

SEQ ID NO: 105325 - RNA, 19 nt, Homo sapiens
  misc_RNA (1)...(19): siRNA sense strand
aaaccacgcguccuacuac

SEQ ID NO: 105326 - RNA, 19 nt, Homo sapiens
  misc_RNA (1)...(19): siRNA sense strand
ggaaaccacgcguccuacu

SEQ ID NO: 105327 - RNA, 19 nt, Homo sapiens
  misc_RNA (1)...(19): siRNA sense strand
aaucacagacaacucacuu

SEQ ID NO: 105328 - RNA, 19 nt, Homo sapiens
  misc_RNA (1)...(19): siRNA sense strand
gcucuacacgaagaaguug

SEQ ID NO: 105329 - RNA, 19 nt, Homo sapiens
  misc_RNA (1)...(19): siRNA sense strand
uggagcuucuggugaugaa

SEQ ID NO: 105330 - RNA, 19 nt, Homo sapiens
  misc_RNA (1)...(19): siRNA sense strand
ggaaaucauucuucacgua

SEQ ID NO: 105331 - RNA, 19 nt, Homo sapiens
  misc_RNA (1)...(19): siRNA sense strand
ucuaugaucucuccaguaa

SEQ ID NO: 105332 - RNA, 19 nt, Homo sapiens
  misc_RNA (1)...(19): siRNA sense strand
caaagaugcucugcgguuu

SEQ ID NO: 105333 - RNA, 19 nt, Homo sapiens
  misc_RNA (1)...(19): siRNA sense strand
uaugaucucuccaguaaau

SEQ ID NO: 105334 - RNA, 19 nt, Homo sapiens
  misc_RNA (1)...(19): siRNA sense strand
gcacggaugugaagagcau

SEQ ID NO: 105335 - RNA, 19 nt, Homo sapiens
  misc_RNA (1)...(19): siRNA sense strand
caacagaucaagggaauga

SEQ ID NO: 105336 - RNA, 19 nt, Homo sapiens
  misc_RNA (1)...(19): siRNA sense strand
gaaaccacgcguccuacua

SEQ ID NO: 105337 - RNA, 19 nt, Homo sapiens
  misc_RNA (1)...(19): siRNA sense strand
caaaggaaacaauugaaga

SEQ ID NO: 105338 - RNA, 19 nt, Homo sapiens
  misc_RNA (1)...(19): siRNA sense strand
ucacguaguuagacagaug

SEQ ID NO: 105339 - RNA, 19 nt, Homo sapiens
  misc_RNA (1)...(19): siRNA sense strand
ugaagauguugaagaaaug

SEQ ID NO: 105340 - RNA, 19 nt, Homo sapiens
  misc_RNA (1)...(19): siRNA sense strand
gcagugauccuguguaaaa

SEQ ID NO: 105341 - RNA, 19 nt, Homo sapiens
  misc_RNA (1)...(19): siRNA sense strand
ggaaaagacucgugagaag

SEQ ID NO: 105342 - RNA, 19 nt, Homo sapiens
  misc_RNA (1)...(19): siRNA sense strand
acagaugacugauccuaau

SEQ ID NO: 105343 - RNA, 19 nt, Homo sapiens
  misc_RNA (1)...(19): siRNA sense strand
gacaaacgaguccacauga

SEQ ID NO: 105344 - RNA, 19 nt, Homo sapiens
  misc_RNA (1)...(19): siRNA sense strand
ugaaugagguggagcuucu

SEQ ID NO: 105345 - RNA, 19 nt, Homo sapiens
  misc_RNA (1)...(19): siRNA sense strand
gaccggcaguggcugauug

SEQ ID NO: 105346 - RNA, 19 nt, Homo sapiens
  misc_RNA (1)...(19): siRNA sense strand
cuucaacaguggcaacgua

SEQ ID NO: 105347 - RNA, 19 nt, Homo sapiens
  misc_RNA (1)...(19): siRNA sense strand
gcaccaggcccaugacauc

SEQ ID NO: 105348 - RNA, 19 nt, Homo sapiens
  misc_RNA (1)...(19): siRNA sense strand
gaugacugauccuaaugug

SEQ ID NO: 105349 - RNA, 19 nt, Homo sapiens
  misc_RNA (1)...(19): siRNA sense strand
aggcagugauccuguguaa

SEQ ID NO: 105350 - RNA, 19 nt, Homo sapiens
  misc_RNA (1)...(19): siRNA sense strand
uaauguggcucuuacuuuu

SEQ ID NO: 105351 - RNA, 19 nt, Homo sapiens
  misc_RNA (1)...(19): siRNA sense strand
cuaauguggcucuuacuuu

SEQ ID NO: 105352 - RNA, 19 nt, Homo sapiens
  misc_RNA (1)...(19): siRNA sense strand
ccacgcguccuacuacaaa

SEQ ID NO: 105353 - RNA, 19 nt, Homo sapiens
  misc_RNA (1)...(19): siRNA sense strand
caaccuuccuggugugaca

SEQ ID NO: 105354 - RNA, 19 nt, Homo sapiens
  misc_RNA (1)...(19): siRNA sense strand
ucacacgaccugccaauca

SEQ ID NO: 105355 - RNA, 19 nt, Homo sapiens
  misc_RNA (1)...(19): siRNA sense strand
caaaagugcuaaaaucaca

SEQ ID NO: 105356 - RNA, 19 nt, Homo sapiens
  misc_RNA (1)...(19): siRNA sense strand
gacagaugacugauccuaa

SEQ ID NO: 105357 - RNA, 19 nt, Homo sapiens
  misc_RNA (1)...(19): siRNA sense strand
ucacagucguuucuaugau

SEQ ID NO: 105358 - RNA, 19 nt, Homo sapiens
  misc_RNA (1)...(19): siRNA sense strand
aggaaacaauugaagaugu

SEQ ID NO: 105359 - RNA, 19 nt, Homo sapiens
  misc_RNA (1)...(19): siRNA sense strand
cccaugacauccucaccua

SEQ ID NO: 105360 - RNA, 19 nt, Homo sapiens
  misc_RNA (1)...(19): siRNA sense strand
gauccuaauguggcucuua

SEQ ID NO: 105361 - RNA, 19 nt, Homo sapiens
  misc_RNA (1)...(19): siRNA sense strand
ccagcagccugauuuagca

SEQ ID NO: 105362 - RNA, 19 nt, Homo sapiens
  misc_RNA (1)...(19): siRNA sense strand
caauugaagauguugaaga

SEQ ID NO: 105363 - RNA, 19 nt, Homo sapiens
  misc_RNA (1)...(19): siRNA sense strand
acagacaacucacuuuuga

SEQ ID NO: 105364 - RNA, 19 nt, Homo sapiens
  misc_RNA (1)...(19): siRNA sense strand
ugaaggaccgccuggaguu

SEQ ID NO: 105365 - RNA, 19 nt, Homo sapiens
  misc_RNA (1)...(19): siRNA sense strand
aaucauucuucacguaguu

SEQ ID NO: 105366 - RNA, 19 nt, Homo sapiens
  misc_RNA (1)...(19): siRNA sense strand
gggccagcagccugauuua

SEQ ID NO: 105367 - RNA, 19 nt, Homo sapiens
  misc_RNA (1)...(19): siRNA sense strand
gccaaucacagacaacuca

SEQ ID NO: 105368 - RNA, 19 nt, Homo sapiens
  misc_RNA (1)...(19): siRNA sense strand
cacagucguuucuaugauc

SEQ ID NO: 105369 - RNA, 19 nt, Homo sapiens
  misc_RNA (1)...(19): siRNA sense strand
gaaauugccaaaagugcua

SEQ ID NO: 105370 - RNA, 19 nt, Homo sapiens
  misc_RNA (1)...(19): siRNA sense strand
gugagaaggugaaaaguag

SEQ ID NO: 105371 - RNA, 19 nt, Homo sapiens
  misc_RNA (1)...(19): siRNA sense strand
ugcaacagaucaagggaau

SEQ ID NO: 105372 - RNA, 19 nt, Homo sapiens
  misc_RNA (1)...(19): siRNA sense strand
gaggaaaauucaguuguug

SEQ ID NO: 105373 - RNA, 19 nt, Homo sapiens
  misc_RNA (1)...(19): siRNA sense strand
gguucacagucguuucuau

SEQ ID NO: 105374 - RNA, 19 nt, Homo sapiens
  misc_RNA (1)...(19): siRNA sense strand
gguuacaaaggaaacaauu

SEQ ID NO: 105375 - RNA, 19 nt, Homo sapiens
  misc_RNA (1)...(19): siRNA sense strand
gcaauuggagcucuaaaau

SEQ ID NO: 105376 - RNA, 19 nt, Homo sapiens
  misc_RNA (1)...(19): siRNA sense strand
acaacucacuuuugaagaa

SEQ ID NO: 105377 - RNA, 19 nt, Homo sapiens
  misc_RNA (1)...(19): siRNA sense strand
aagaaaugcucaacaaccu

SEQ ID NO: 105378 - RNA, 19 nt, Homo sapiens
  misc_RNA (1)...(19): siRNA sense strand
gaaggaccgccuggaguuc

SEQ ID NO: 105379 - RNA, 19 nt, Homo sapiens
  misc_RNA (1)...(19): siRNA sense strand
gaagaaauugccaaaagug

SEQ ID NO: 105380 - RNA, 19 nt, Homo sapiens
  misc_RNA (1)...(19): siRNA sense strand
ugaggaaaauucaguuguu

SEQ ID NO: 105381 - RNA, 19 nt, Homo sapiens
  misc_RNA (1)...(19): siRNA sense strand
guuacaaaggaaacaauug

SEQ ID NO: 105382 - RNA, 19 nt, Homo sapiens
  misc_RNA (1)...(19): siRNA sense strand
gcuggugaaaggcaguaua

SEQ ID NO: 105383 - RNA, 19 nt, Homo sapiens
  misc_RNA (1)...(19): siRNA sense strand
caacucacuuuugaagaaa

SEQ ID NO: 105384 - RNA, 19 nt, Homo sapiens
  misc_RNA (1)...(19): siRNA sense strand
caacaguggcaacguagag

SEQ ID NO: 105385 - RNA, 19 nt, Homo sapiens
  misc_RNA (1)...(19): siRNA sense strand
guucacagucguuucuaug

SEQ ID NO: 105386 - RNA, 19 nt, Homo sapiens
  misc_RNA (1)...(19): siRNA sense strand
agacagaugacugauccua

SEQ ID NO: 105387 - RNA, 19 nt, Homo sapiens
  misc_RNA (1)...(19): siRNA sense strand
uagacgagguggacaaacg

SEQ ID NO: 105388 - RNA, 19 nt, Homo sapiens
  misc_RNA (1)...(19): siRNA sense strand
guauagacgagguggacaa

SEQ ID NO: 105389 - RNA, 19 nt, Homo sapiens
  misc_RNA (1)...(19): siRNA sense strand
ggugaaaggcaguauagac

SEQ ID NO: 105390 - RNA, 19 nt, Homo sapiens
  misc_RNA (1)...(19): siRNA sense strand
ugaagaaauugccaaaagu

SEQ ID NO: 105391 - RNA, 19 nt, Homo sapiens
  misc_RNA (1)...(19): siRNA sense strand
gcugauugacacccucuau

SEQ ID NO: 105392 - RNA, 19 nt, Homo sapiens
  misc_RNA (1)...(19): siRNA sense strand
cuacagguuacaaaggaaa

SEQ ID NO: 105393 - RNA, 19 nt, Homo sapiens
  misc_RNA (1)...(19): siRNA sense strand
ccuacagguuacaaaggaa

SEQ ID NO: 105394 - RNA, 19 nt, Homo sapiens
  misc_RNA (1)...(19): siRNA sense strand
ucggaaaccacgcguccua

SEQ ID NO: 105395 - RNA, 19 nt, Homo sapiens
  misc_RNA (1)...(19): siRNA sense strand
acaaaggaaacaauugaag

SEQ ID NO: 105396 - RNA, 19 nt, Homo sapiens
  misc_RNA (1)...(19): siRNA sense strand
ccuaauguggcucuuacuu

SEQ ID NO: 105397 - RNA, 19 nt, Homo sapiens
  misc_RNA (1)...(19): siRNA sense strand
ucacagacaacucacuuuu

SEQ ID NO: 105398 - RNA, 19 nt, Homo sapiens
  misc_RNA (1)...(19): siRNA sense strand
ucguggaaaucauucuuca

SEQ ID NO: 105399 - RNA, 19 nt, Homo sapiens
  misc_RNA (1)...(19): siRNA sense strand
uggagucccugaggaauac

SEQ ID NO: 105400 - RNA, 19 nt, Homo sapiens
  misc_RNA (1)...(19): siRNA sense strand
cuggagucccugaggaaua

SEQ ID NO: 105401 - RNA, 19 nt, Homo sapiens
  misc_RNA (1)...(19): siRNA sense strand
aaaccacgcguccuacuac

SEQ ID NO: 105402 - RNA, 19 nt, Homo sapiens
  misc_RNA (1)...(19): siRNA sense strand
ggaaaccacgcguccuacu

SEQ ID NO: 105403 - RNA, 19 nt, Homo sapiens
  misc_RNA (1)...(19): siRNA sense strand
aaucacagacaacucacuu

SEQ ID NO: 105404 - RNA, 19 nt, Homo sapiens
  misc_RNA (1)...(19): siRNA sense strand
uggagcuucuggugaugaa

SEQ ID NO: 105405 - RNA, 19 nt, Homo sapiens
  misc_RNA (1)...(19): siRNA sense strand
caaggagacucauguaaug

SEQ ID NO: 105406 - RNA, 19 nt, Homo sapiens
  misc_RNA (1)...(19): siRNA sense strand
agacaaccauuuccaagua

SEQ ID NO: 105407 - RNA, 19 nt, Homo sapiens
  misc_RNA (1)...(19): siRNA sense strand
gaaagaaguccauaagugu

SEQ ID NO: 105408 - RNA, 19 nt, Homo sapiens
  misc_RNA (1)...(19): siRNA sense strand
gcaaacagguggaggucuu

SEQ ID NO: 105409 - RNA, 19 nt, Homo sapiens
  misc_RNA (1)...(19): siRNA sense strand
gaaaugcauucuggugauu

SEQ ID NO: 105410 - RNA, 19 nt, Homo sapiens
  misc_RNA (1)...(19): siRNA sense strand
agaaagaaguccauaagug

SEQ ID NO: 105411 - RNA, 19 nt, Homo sapiens
  misc_RNA (1)...(19): siRNA sense strand
gaagaaagaaguccauaag

SEQ ID NO: 105412 - RNA, 19 nt, Homo sapiens
  misc_RNA (1)...(19): siRNA sense strand
gauugaagauggaaaugau

SEQ ID NO: 105413 - RNA, 19 nt, Homo sapiens
  misc_RNA (1)...(19): siRNA sense strand
cagauaagcaggagaagaa

SEQ ID NO: 105414 - RNA, 19 nt, Homo sapiens
  misc_RNA (1)...(19): siRNA sense strand
gaugagauggaaacagaua

SEQ ID NO: 105415 - RNA, 19 nt, Homo sapiens
  misc_RNA (1)...(19): siRNA sense strand
augcugagcuuuaucauau

SEQ ID NO: 105416 - RNA, 19 nt, Homo sapiens
  misc_RNA (1)...(19): siRNA sense strand
ccaggaggcugaggaauuc

SEQ ID NO: 105417 - RNA, 19 nt, Homo sapiens
  misc_RNA (1)...(19): siRNA sense strand
gaagaaaagccaucuaugu

SEQ ID NO: 105418 - RNA, 19 nt, Homo sapiens
  misc_RNA (1)...(19): siRNA sense strand
aaacagauaagcaggagaa

SEQ ID NO: 105419 - RNA, 19 nt, Homo sapiens
  misc_RNA (1)...(19): siRNA sense strand
ccaaggagacucauguaau

SEQ ID NO: 105420 - RNA, 19 nt, Homo sapiens
  misc_RNA (1)...(19): siRNA sense strand
caauguggcugacuugacu

SEQ ID NO: 105421 - RNA, 19 nt, Homo sapiens
  misc_RNA (1)...(19): siRNA sense strand
gcagcaaccuggagaaaau

SEQ ID NO: 105422 - RNA, 19 nt, Homo sapiens
  misc_RNA (1)...(19): siRNA sense strand
gagaagaaagaaguccaua

SEQ ID NO: 105423 - RNA, 19 nt, Homo sapiens
  misc_RNA (1)...(19): siRNA sense strand
gcugagcuuuaucauauca

SEQ ID NO: 105424 - RNA, 19 nt, Homo sapiens
  misc_RNA (1)...(19): siRNA sense strand
caaggaugaugagauggaa

SEQ ID NO: 105425 - RNA, 19 nt, Homo sapiens
  misc_RNA (1)...(19): siRNA sense strand
ugaaugccgucaagaccaa

SEQ ID NO: 105426 - RNA, 19 nt, Homo sapiens
  misc_RNA (1)...(19): siRNA sense strand
gcauucuggugauuacaug

SEQ ID NO: 105427 - RNA, 19 nt, Homo sapiens
  misc_RNA (1)...(19): siRNA sense strand
ggagacucauguaauggau

SEQ ID NO: 105428 - RNA, 19 nt, Homo sapiens
  misc_RNA (1)...(19): siRNA sense strand
ggguagcaauccaggagaa

SEQ ID NO: 105429 - RNA, 19 nt, Homo sapiens
  misc_RNA (1)...(19): siRNA sense strand
augaugagauggaaacaga

SEQ ID NO: 105430 - RNA, 19 nt, Homo sapiens
  misc_RNA (1)...(19): siRNA sense strand
agaagaaagaaguccauaa

SEQ ID NO: 105431 - RNA, 19 nt, Homo sapiens
  misc_RNA (1)...(19): siRNA sense strand
caagauugaagauggaaau

SEQ ID NO: 105432 - RNA, 19 nt, Homo sapiens
  misc_RNA (1)...(19): siRNA sense strand
gagggugaaugccgucaag

SEQ ID NO: 105433 - RNA, 19 nt, Homo sapiens
  misc_RNA (1)...(19): siRNA sense strand
gaaaagccaucuauguacu

SEQ ID NO: 105434 - RNA, 19 nt, Homo sapiens
  misc_RNA (1)...(19): siRNA sense strand
aaagccaucuauguacuga

SEQ ID NO: 105435 - RNA, 19 nt, Homo sapiens
  misc_RNA (1)...(19): siRNA sense strand
gaaaguccugucccugcuu

SEQ ID NO: 105436 - RNA, 19 nt, Homo sapiens
  misc_RNA (1)...(19): siRNA sense strand
gacaaccauuuccaaguac

SEQ ID NO: 105437 - RNA, 19 nt, Homo sapiens
  misc_RNA (1)...(19): siRNA sense strand
ccaaggaugaugagaugga

SEQ ID NO: 105438 - RNA, 19 nt, Homo sapiens
  misc_RNA (1)...(19): siRNA sense strand
uacagauucuugccacaga

SEQ ID NO: 105439 - RNA, 19 nt, Homo sapiens
  misc_RNA (1)...(19): siRNA sense strand
acccaaggaugaugagaug

SEQ ID NO: 105440 - RNA, 19 nt, Homo sapiens
  misc_RNA (1)...(19): siRNA sense strand
aagaaaagccaucuaugua

SEQ ID NO: 105441 - RNA, 19 nt, Homo sapiens
  misc_RNA (1)...(19): siRNA sense strand
ggagaagaaagaaguccau

SEQ ID NO: 105442 - RNA, 19 nt, Homo sapiens
  misc_RNA (1)...(19): siRNA sense strand
cgucaagaccaaaguggaa

SEQ ID NO: 105443 - RNA, 19 nt, Homo sapiens
  misc_RNA (1)...(19): siRNA sense strand
ccauaaguguggauuucuc

SEQ ID NO: 105444 - RNA, 19 nt, Homo sapiens
  misc_RNA (1)...(19): siRNA sense strand
auaagcaggagaagaaaga

SEQ ID NO: 105445 - RNA, 19 nt, Homo sapiens
  misc_RNA (1)...(19): siRNA sense strand
gauaagcaggagaagaaag

SEQ ID NO: 105446 - RNA, 19 nt, Homo sapiens
  misc_RNA (1)...(19): siRNA sense strand
cagcagcaaccuggagaaa

SEQ ID NO: 105447 - RNA, 19 nt, Homo sapiens
  misc_RNA (1)...(19): siRNA sense strand
uccaggaggcugaggaauu

SEQ ID NO: 105448 - RNA, 19 nt, Homo sapiens
  misc_RNA (1)...(19): siRNA sense strand
aaaugcauucuggugauua

SEQ ID NO: 105449 - RNA, 19 nt, Homo sapiens
  misc_RNA (1)...(19): siRNA sense strand
cagacaaccauuuccaagu

SEQ ID NO: 105450 - RNA, 19 nt, Homo sapiens
  misc_RNA (1)...(19): siRNA sense strand
gagacucauguaauggauu

SEQ ID NO: 105451 - RNA, 19 nt, Homo sapiens
  misc_RNA (1)...(19): siRNA sense strand
ugagcuuuaucauaucauc

SEQ ID NO: 105452 - RNA, 19 nt, Homo sapiens
  misc_RNA (1)...(19): siRNA sense strand
ggagauugauggauucuuu

SEQ ID NO: 105453 - RNA, 19 nt, Homo sapiens
  misc_RNA (1)...(19): siRNA sense strand
caagauagcucccacuguu

SEQ ID NO: 105454 - RNA, 19 nt, Homo sapiens
  misc_RNA (1)...(19): siRNA sense strand
gaauccagguccuucuaua

SEQ ID NO: 105455 - RNA, 19 nt, Homo sapiens
  misc_RNA (1)...(19): siRNA sense strand
ggagggaugugcagaaugu

SEQ ID NO: 105456 - RNA, 19 nt, Homo sapiens
  misc_RNA (1)...(19): siRNA sense strand
cuacauggcugaccuggaa

SEQ ID NO: 105457 - RNA, 19 nt, Homo sapiens
  misc_RNA (1)...(19): siRNA sense strand
guaccuggcucugaucuuu

SEQ ID NO: 105458 - RNA, 19 nt, Homo sapiens
  misc_RNA (1)...(19): siRNA sense strand
uggcagagcuucagaggaa

SEQ ID NO: 105459 - RNA, 19 nt, Homo sapiens
  misc_RNA (1)...(19): siRNA sense strand
gcagggugcugaacacaga

SEQ ID NO: 105460 - RNA, 19 nt, Homo sapiens
  misc_RNA (1)...(19): siRNA sense strand
ccaagaaggugaacuggau

SEQ ID NO: 105461 - RNA, 19 nt, Homo sapiens
  misc_RNA (1)...(19): siRNA sense strand
cgagaaauaacgaagagua

SEQ ID NO: 105462 - RNA, 19 nt, Homo sapiens
  misc_RNA (1)...(19): siRNA sense strand
ggaggagauugauggauuc

SEQ ID NO: 105463 - RNA, 19 nt, Homo sapiens
  misc_RNA (1)...(19): siRNA sense strand
gugaaugaauggcucaaga

SEQ ID NO: 105464 - RNA, 19 nt, Homo sapiens
  misc_RNA (1)...(19): siRNA sense strand
ggauagaagugggcagguu

SEQ ID NO: 105465 - RNA, 19 nt, Homo sapiens
  misc_RNA (1)...(19): siRNA sense strand
uggaggagauugauggauu

SEQ ID NO: 105466 - RNA, 19 nt, Homo sapiens
  misc_RNA (1)...(19): siRNA sense strand
ccaagcagcuggucgacau

SEQ ID NO: 105467 - RNA, 19 nt, Homo sapiens
  misc_RNA (1)...(19): siRNA sense strand
ucaagaggcagaagagaaa

SEQ ID NO: 105468 - RNA, 19 nt, Homo sapiens
  misc_RNA (1)...(19): siRNA sense strand
gaaauaaaauucccuacag

SEQ ID NO: 105469 - RNA, 19 nt, Homo sapiens
  misc_RNA (1)...(19): siRNA sense strand
ucaaggccuuuaccaagaa

SEQ ID NO: 105470 - RNA, 19 nt, Homo sapiens
  misc_RNA (1)...(19): siRNA sense strand
ccaauguggugagaaaguu

SEQ ID NO: 105471 - RNA, 19 nt, Homo sapiens
  misc_RNA (1)...(19): siRNA sense strand
ggucaaugcucgccuugca

SEQ ID NO: 105472 - RNA, 19 nt, Homo sapiens
  misc_RNA (1)...(19): siRNA sense strand
agacugcgcuagccacuuc

SEQ ID NO: 105473 - RNA, 19 nt, Homo sapiens
  misc_RNA (1)...(19): siRNA sense strand
ggaaagagggugccguucu

SEQ ID NO: 105474 - RNA, 19 nt, Homo sapiens
  misc_RNA (1)...(19): siRNA sense strand
aaccacugcuaacaagaua

SEQ ID NO: 105475 - RNA, 19 nt, Homo sapiens
  misc_RNA (1)...(19): siRNA sense strand
gcaacaucauccuggacuu

SEQ ID NO: 105476 - RNA, 19 nt, Homo sapiens
  misc_RNA (1)...(19): siRNA sense strand
gugagaaaguuugguguca

SEQ ID NO: 105477 - RNA, 19 nt, Homo sapiens
  misc_RNA (1)...(19): siRNA sense strand
ggaauccagguccuucuau

SEQ ID NO: 105478 - RNA, 19 nt, Homo sapiens
  misc_RNA (1)...(19): siRNA sense strand
ucccuacaguuucuuuaaa

SEQ ID NO: 105479 - RNA, 19 nt, Homo sapiens
  misc_RNA (1)...(19): siRNA sense strand
gagcuggaaagccggaauu

SEQ ID NO: 105480 - RNA, 19 nt, Homo sapiens
  misc_RNA (1)...(19): siRNA sense strand
gcaccaaccacugcuaaca

SEQ ID NO: 105481 - RNA, 19 nt, Homo sapiens
  misc_RNA (1)...(19): siRNA sense strand
cuacuuccaggccaagaua

SEQ ID NO: 105482 - RNA, 19 nt, Homo sapiens
  misc_RNA (1)...(19): siRNA sense strand
gcaggcagcucggcaaaau

SEQ ID NO: 105483 - RNA, 19 nt, Homo sapiens
  misc_RNA (1)...(19): siRNA sense strand
gcccuggagucccaucaug

SEQ ID NO: 105484 - RNA, 19 nt, Homo sapiens
  misc_RNA (1)...(19): siRNA sense strand
caagauaagggcccugaag

SEQ ID NO: 105485 - RNA, 19 nt, Homo sapiens
  misc_RNA (1)...(19): siRNA sense strand
acaaugaacgccuggaugu

SEQ ID NO: 105486 - RNA, 19 nt, Homo sapiens
  misc_RNA (1)...(19): siRNA sense strand
caaccacugcuaacaagau

SEQ ID NO: 105487 - RNA, 19 nt, Homo sapiens
  misc_RNA (1)...(19): siRNA sense strand
ccgcuuaccugcagagacu

SEQ ID NO: 105488 - RNA, 19 nt, Homo sapiens
  misc_RNA (1)...(19): siRNA sense strand
gagaaauaacgaagaguac

SEQ ID NO: 105489 - RNA, 19 nt, Homo sapiens
  misc_RNA (1)...(19): siRNA sense strand
uucaaggccuuuaccaaga

SEQ ID NO: 105490 - RNA, 19 nt, Homo sapiens
  misc_RNA (1)...(19): siRNA sense strand
ggaagccugagaugaugaa

SEQ ID NO: 105491 - RNA, 19 nt, Homo sapiens
  misc_RNA (1)...(19): siRNA sense strand
aggccaauguggugagaaa

SEQ ID NO: 105492 - RNA, 19 nt, Homo sapiens
  misc_RNA (1)...(19): siRNA sense strand
ugagggaccugaggcaagu

SEQ ID NO: 105493 - RNA, 19 nt, Homo sapiens
  misc_RNA (1)...(19): siRNA sense strand
gcagugcuggccaaguauu

SEQ ID NO: 105494 - RNA, 19 nt, Homo sapiens
  misc_RNA (1)...(19): siRNA sense strand
gagauugauggauucuuug

SEQ ID NO: 105495 - RNA, 19 nt, Homo sapiens
  misc_RNA (1)...(19): siRNA sense strand
cuggaaagccggaauucaa

SEQ ID NO: 105496 - RNA, 19 nt, Homo sapiens
  misc_RNA (1)...(19): siRNA sense strand
cugccaagcuggaggagau

SEQ ID NO: 105497 - RNA, 19 nt, Homo sapiens
  misc_RNA (1)...(19): siRNA sense strand
gcucuggucuagccacaac

SEQ ID NO: 105498 - RNA, 19 nt, Homo sapiens
  misc_RNA (1)...(19): siRNA sense strand
gaaauaacgaagaguaccu

SEQ ID NO: 105499 - RNA, 19 nt, Homo sapiens
  misc_RNA (1)...(19): siRNA sense strand
caagaaggugaacuggauu

SEQ ID NO: 105500 - RNA, 19 nt, Homo sapiens
  misc_RNA (1)...(19): siRNA sense strand
gcagagcuucagaggaaug

SEQ ID NO: 105501 - RNA, 19 nt, Homo sapiens
  misc_RNA (1)...(19): siRNA sense strand
caacaucauccuggacuuc

SEQ ID NO: 105502 - RNA, 19 nt, Homo sapiens
  misc_RNA (1)...(19): siRNA sense strand
caauguggugagaaaguuu

SEQ ID NO: 105503 - RNA, 19 nt, Homo sapiens
  misc_RNA (1)...(19): siRNA sense strand
ucucuuaccuggacaucag

SEQ ID NO: 105504 - RNA, 19 nt, Homo sapiens
  misc_RNA (1)...(19): siRNA sense strand
agaggcagaagagaaauaa

SEQ ID NO: 105505 - RNA, 19 nt, Homo sapiens
  misc_RNA (1)...(19): siRNA sense strand
cugcagagacuucaacauc

SEQ ID NO: 105506 - RNA, 19 nt, Homo sapiens
  misc_RNA (1)...(19): siRNA sense strand
agccugagaugaugaaguc

SEQ ID NO: 105507 - RNA, 19 nt, Homo sapiens
  misc_RNA (1)...(19): siRNA sense strand
ucuauucccuguccuucau

SEQ ID NO: 105508 - RNA, 19 nt, Homo sapiens
  misc_RNA (1)...(19): siRNA sense strand
gcacauggcagagcuucag

SEQ ID NO: 105509 - RNA, 19 nt, Homo sapiens
  misc_RNA (1)...(19): siRNA sense strand
uaccugcuguuccggaaug

SEQ ID NO: 105510 - RNA, 19 nt, Homo sapiens
  misc_RNA (1)...(19): siRNA sense strand
gaaagccggaauucaacuc

SEQ ID NO: 105511 - RNA, 19 nt, Homo sapiens
  misc_RNA (1)...(19): siRNA sense strand
uggcagaucgcuccaagau

SEQ ID NO: 105512 - RNA, 19 nt, Homo sapiens
  misc_RNA (1)...(19): siRNA sense strand
caccaaccacugcuaacaa

SEQ ID NO: 105513 - RNA, 19 nt, Homo sapiens
  misc_RNA (1)...(19): siRNA sense strand
ugggaagccugagaugaug

SEQ ID NO: 105514 - RNA, 19 nt, Homo sapiens
  misc_RNA (1)...(19): siRNA sense strand
agauagcucccacuguuug

SEQ ID NO: 105515 - RNA, 19 nt, Homo sapiens
  misc_RNA (1)...(19): siRNA sense strand
aagaggcagaagagaaaua

SEQ ID NO: 105516 - RNA, 19 nt, Homo sapiens
  misc_RNA (1)...(19): siRNA sense strand
ccggagggaugugcagaau

SEQ ID NO: 105517 - RNA, 19 nt, Homo sapiens
  misc_RNA (1)...(19): siRNA sense strand
guccagggcugagaagaac

SEQ ID NO: 105518 - RNA, 19 nt, Homo sapiens
  misc_RNA (1)...(19): siRNA sense strand
ggaaagccggaauucaacu

SEQ ID NO: 105519 - RNA, 19 nt, Homo sapiens
  misc_RNA (1)...(19): siRNA sense strand
aagauagcucccacuguuu

SEQ ID NO: 105520 - RNA, 19 nt, Homo sapiens
  misc_RNA (1)...(19): siRNA sense strand
gccaauguggugagaaagu

SEQ ID NO: 105521 - RNA, 19 nt, Homo sapiens
  misc_RNA (1)...(19): siRNA sense strand
gggaagccugagaugauga

SEQ ID NO: 105522 - RNA, 19 nt, Homo sapiens
  misc_RNA (1)...(19): siRNA sense strand
ccacaaugaacgccuggau

SEQ ID NO: 105523 - RNA, 19 nt, Homo sapiens
  misc_RNA (1)...(19): siRNA sense strand
gaauggagcucgaauuuaa

SEQ ID NO: 105524 - RNA, 19 nt, Homo sapiens
  misc_RNA (1)...(19): siRNA sense strand
gaagaaaucucgcgggaaa

SEQ ID NO: 105525 - RNA, 19 nt, Homo sapiens
  misc_RNA (1)...(19): siRNA sense strand
ggagagaaguugaauuaaa

SEQ ID NO: 105526 - RNA, 19 nt, Homo sapiens
  misc_RNA (1)...(19): siRNA sense strand
ccaaacagcuuauacuauu

SEQ ID NO: 105527 - RNA, 19 nt, Homo sapiens
  misc_RNA (1)...(19): siRNA sense strand
cgucauagaugccauguua

SEQ ID NO: 105528 - RNA, 19 nt, Homo sapiens
  misc_RNA (1)...(19): siRNA sense strand
gaaagcaaaugacaacuug

SEQ ID NO: 105529 - RNA, 19 nt, Homo sapiens
  misc_RNA (1)...(19): siRNA sense strand
gaaagaaagucagcaauca

SEQ ID NO: 105530 - RNA, 19 nt, Homo sapiens
  misc_RNA (1)...(19): siRNA sense strand
gaucaagggugaaguguga

SEQ ID NO: 105531 - RNA, 19 nt, Homo sapiens
  misc_RNA (1)...(19): siRNA sense strand
gaauaugucuucuuugugu

SEQ ID NO: 105532 - RNA, 19 nt, Homo sapiens
  misc_RNA (1)...(19): siRNA sense strand
gaacuggucuacaaagaug

SEQ ID NO: 105533 - RNA, 19 nt, Homo sapiens
  misc_RNA (1)...(19): siRNA sense strand
caacuuggauggcaugauu

SEQ ID NO: 105534 - RNA, 19 nt, Homo sapiens
  misc_RNA (1)...(19): siRNA sense strand
gcagaaauaucagcuagaa

SEQ ID NO: 105535 - RNA, 19 nt, Homo sapiens
  misc_RNA (1)...(19): siRNA sense strand
gaacacaauuccaccauag

SEQ ID NO: 105536 - RNA, 19 nt, Homo sapiens
  misc_RNA (1)...(19): siRNA sense strand
caacaacaauggucguauu

SEQ ID NO: 105537 - RNA, 19 nt, Homo sapiens
  misc_RNA (1)...(19): siRNA sense strand
gaaaugugcuagaacugaa

SEQ ID NO: 105538 - RNA, 19 nt, Homo sapiens
  misc_RNA (1)...(19): siRNA sense strand
gaagaaaugugcuagaacu

SEQ ID NO: 105539 - RNA, 19 nt, Homo sapiens
  misc_RNA (1)...(19): siRNA sense strand
gcagugacuuguggaaaua

SEQ ID NO: 105540 - RNA, 19 nt, Homo sapiens
  misc_RNA (1)...(19): siRNA sense strand
ccaaaguggucaagaauau

SEQ ID NO: 105541 - RNA, 19 nt, Homo sapiens
  misc_RNA (1)...(19): siRNA sense strand
gagagaaguugaauuaaag

SEQ ID NO: 105542 - RNA, 19 nt, Homo sapiens
  misc_RNA (1)...(19): siRNA sense strand
gaaaucacuugguuuaaag

SEQ ID NO: 105543 - RNA, 19 nt, Homo sapiens
  misc_RNA (1)...(19): siRNA sense strand
uagaugagcugcuuaagga

SEQ ID NO: 105544 - RNA, 19 nt, Homo sapiens
  misc_RNA (1)...(19): siRNA sense strand
ccagaaaucacuugguuua

SEQ ID NO: 105545 - RNA, 19 nt, Homo sapiens
  misc_RNA (1)...(19): siRNA sense strand
ggaauuagaugagcugcuu

SEQ ID NO: 105546 - RNA, 19 nt, Homo sapiens
  misc_RNA (1)...(19): siRNA sense strand
ggagaggagcaacgaauua

SEQ ID NO: 105547 - RNA, 19 nt, Homo sapiens
  misc_RNA (1)...(19): siRNA sense strand
gaaguaaacaaaccaaaga

SEQ ID NO: 105548 - RNA, 19 nt, Homo sapiens
  misc_RNA (1)...(19): siRNA sense strand
gugccaaucuuccauguaa

SEQ ID NO: 105549 - RNA, 19 nt, Homo sapiens
  misc_RNA (1)...(19): siRNA sense strand
acacagaaguuaauuguca

SEQ ID NO: 105550 - RNA, 19 nt, Homo sapiens
  misc_RNA (1)...(19): siRNA sense strand
ccauguaacuuuaaugaga

SEQ ID NO: 105551 - RNA, 19 nt, Homo sapiens
  misc_RNA (1)...(19): siRNA sense strand
ucagagauuugagguaaua

SEQ ID NO: 105552 - RNA, 19 nt, Homo sapiens
  misc_RNA (1)...(19): siRNA sense strand
gggaugaggccauuuauga

SEQ ID NO: 105553 - RNA, 19 nt, Homo sapiens
  misc_RNA (1)...(19): siRNA sense strand
ggagaaggauuuauugacu

SEQ ID NO: 105554 - RNA, 19 nt, Homo sapiens
  misc_RNA (1)...(19): siRNA sense strand
ccaaggauauagaguuuau

SEQ ID NO: 105555 - RNA, 19 nt, Homo sapiens
  misc_RNA (1)...(19): siRNA sense strand
uaagacagucagcaaauua

SEQ ID NO: 105556 - RNA, 19 nt, Homo sapiens
  misc_RNA (1)...(19): siRNA sense strand
caaauaaugugggagaaau

SEQ ID NO: 105557 - RNA, 19 nt, Homo sapiens
  misc_RNA (1)...(19): siRNA sense strand
gcaguggucuuuaucaucu

SEQ ID NO: 105558 - RNA, 19 nt, Homo sapiens
  misc_RNA (1)...(19): siRNA sense strand
cagaugaaauggaauuaga

SEQ ID NO: 105559 - RNA, 19 nt, Homo sapiens
  misc_RNA (1)...(19): siRNA sense strand
caacaauggucguauuaag

SEQ ID NO: 105560 - RNA, 19 nt, Homo sapiens
  misc_RNA (1)...(19): siRNA sense strand
gaacuggagucuucauaac

SEQ ID NO: 105561 - RNA, 19 nt, Homo sapiens
  misc_RNA (1)...(19): siRNA sense strand
ggaauggagcucgaauuua

SEQ ID NO: 105562 - RNA, 19 nt, Homo sapiens
  misc_RNA (1)...(19): siRNA sense strand
gagagaaugucacaggaau

SEQ ID NO: 105563 - RNA, 19 nt, Homo sapiens
  misc_RNA (1)...(19): siRNA sense strand
cgaauguaaucgcauauga

SEQ ID NO: 105564 - RNA, 19 nt, Homo sapiens
  misc_RNA (1)...(19): siRNA sense strand
guaagacagucagcaaauu

SEQ ID NO: 105565 - RNA, 19 nt, Homo sapiens
  misc_RNA (1)...(19): siRNA sense strand
gaacugaggcgccuuaacu

SEQ ID NO: 105566 - RNA, 19 nt, Homo sapiens
  misc_RNA (1)...(19): siRNA sense strand
agaaggaucugauuacauc

SEQ ID NO: 105567 - RNA, 19 nt, Homo sapiens
  misc_RNA (1)...(19): siRNA sense strand
ggaguugccucuuucaucu

SEQ ID NO: 105568 - RNA, 19 nt, Homo sapiens
  misc_RNA (1)...(19): siRNA sense strand
gagaaggauuuauugacuu

SEQ ID NO: 105569 - RNA, 19 nt, Homo sapiens
  misc_RNA (1)...(19): siRNA sense strand
gaauagauacgcgaaugua

SEQ ID NO: 105570 - RNA, 19 nt, Homo sapiens
  misc_RNA (1)...(19): siRNA sense strand
gauuugagguaauagaguu

SEQ ID NO: 105571 - RNA, 19 nt, Homo sapiens
  misc_RNA (1)...(19): siRNA sense strand
ggaagugacuaugugaaug

SEQ ID NO: 105572 - RNA, 19 nt, Homo sapiens
  misc_RNA (1)...(19): siRNA sense strand
ugaagagucugaccaagga

SEQ ID NO: 105573 - RNA, 19 nt, Homo sapiens
  misc_RNA (1)...(19): siRNA sense strand
gaauguguggccucaaaua

SEQ ID NO: 105574 - RNA, 19 nt, Homo sapiens
  misc_RNA (1)...(19): siRNA sense strand
gaaagaaugagauaugaag

SEQ ID NO: 105575 - RNA, 19 nt, Homo sapiens
  misc_RNA (1)...(19): siRNA sense strand
gaacaugcagagucuaaga

SEQ ID NO: 105576 - RNA, 19 nt, Homo sapiens
  misc_RNA (1)...(19): siRNA sense strand
gagcaacgaauuaccauug

SEQ ID NO: 105577 - RNA, 19 nt, Homo sapiens
  misc_RNA (1)...(19): siRNA sense strand
gaugauaugccaauaggaa

SEQ ID NO: 105578 - RNA, 19 nt, Homo sapiens
  misc_RNA (1)...(19): siRNA sense strand
caagauaccaguacuuugu

SEQ ID NO: 105579 - RNA, 19 nt, Homo sapiens
  misc_RNA (1)...(19): siRNA sense strand
cagauaccauugccaacua

SEQ ID NO: 105580 - RNA, 19 nt, Homo sapiens
  misc_RNA (1)...(19): siRNA sense strand
gaaccugagucugaaacaa

SEQ ID NO: 105581 - RNA, 19 nt, Homo sapiens
  misc_RNA (1)...(19): siRNA sense strand
gaacacaacgaccagcuau

SEQ ID NO: 105582 - RNA, 19 nt, Homo sapiens
  misc_RNA (1)...(19): siRNA sense strand
gagagaaaugucaccaaua

SEQ ID NO: 105583 - RNA, 19 nt, Homo sapiens
  misc_RNA (1)...(19): siRNA sense strand
ugggagagaaguugaauua

SEQ ID NO: 105584 - RNA, 19 nt, Homo sapiens
  misc_RNA (1)...(19): siRNA sense strand
ggaaagaaagucagcaauc

SEQ ID NO: 105585 - RNA, 19 nt, Homo sapiens
  misc_RNA (1)...(19): siRNA sense strand
uuaaggagauaucuaggaa

SEQ ID NO: 105586 - RNA, 19 nt, Homo sapiens
  misc_RNA (1)...(19): siRNA sense strand
ugaaggaguuguagauauc

SEQ ID NO: 105587 - RNA, 19 nt, Homo sapiens
  misc_RNA (1)...(19): siRNA sense strand
gaagcugacacaaauagaa

SEQ ID NO: 105588 - RNA, 19 nt, Homo sapiens
  misc_RNA (1)...(19): siRNA sense strand
guucgaacauuugcacuuu

SEQ ID NO: 105589 - RNA, 19 nt, Homo sapiens
  misc_RNA (1)...(19): siRNA sense strand
cuacucggauuaugaauuc

SEQ ID NO: 105590 - RNA, 19 nt, Homo sapiens
  misc_RNA (1)...(19): siRNA sense strand
gaaaugggcagagagaaau

SEQ ID NO: 105591 - RNA, 19 nt, Homo sapiens
  misc_RNA (1)...(19): siRNA sense strand
uauccaugaugcacuguua

SEQ ID NO: 105592 - RNA, 19 nt, Homo sapiens
  misc_RNA (1)...(19): siRNA sense strand
ggugaagugugaccaguau

SEQ ID NO: 105593 - RNA, 19 nt, Homo sapiens
  misc_RNA (1)...(19): siRNA sense strand
ccaggaauaugagucaauu

SEQ ID NO: 105594 - RNA, 19 nt, Homo sapiens
  misc_RNA (1)...(19): siRNA sense strand
gcagcauaccgaacaauaa

SEQ ID NO: 105595 - RNA, 19 nt, Homo sapiens
  misc_RNA (1)...(19): siRNA sense strand
ugaaguaccugcaaaugag

SEQ ID NO: 105596 - RNA, 19 nt, Homo sapiens
  misc_RNA (1)...(19): siRNA sense strand
gaagcaaaaugccuauauu

SEQ ID NO: 105597 - RNA, 19 nt, Homo sapiens
  misc_RNA (1)...(19): siRNA sense strand
agagaaaugucaccaauac

SEQ ID NO: 105598 - RNA, 19 nt, Homo sapiens
  misc_RNA (1)...(19): siRNA sense strand
ggaguuggccggacugguu

SEQ ID NO: 105599 - RNA, 19 nt, Homo sapiens
  misc_RNA (1)...(19): siRNA sense strand
cauuugcacuuuacaagaa

SEQ ID NO: 105600 - RNA, 19 nt, Homo sapiens
  misc_RNA (1)...(19): siRNA sense strand
gaacauuugcacuuuacaa

SEQ ID NO: 105601 - RNA, 19 nt, Homo sapiens
  misc_RNA (1)...(19): siRNA sense strand
uaacgcugcuugauacugu

SEQ ID NO: 105602 - RNA, 19 nt, Homo sapiens
  misc_RNA (1)...(19): siRNA sense strand
ggucaccaaugccuuaugu

SEQ ID NO: 105603 - RNA, 19 nt, Homo sapiens
  misc_RNA (1)...(19): siRNA sense strand
gaaagucagcaaucagaga

SEQ ID NO: 105604 - RNA, 19 nt, Homo sapiens
  misc_RNA (1)...(19): siRNA sense strand
gaguagaaggaucugauua

SEQ ID NO: 105605 - RNA, 19 nt, Homo sapiens
  misc_RNA (1)...(19): siRNA sense strand
uaccaagccugccuucauu

SEQ ID NO: 105606 - RNA, 19 nt, Homo sapiens
  misc_RNA (1)...(19): siRNA sense strand
ugucaaagccuuacccaaa

SEQ ID NO: 105607 - RNA, 19 nt, Homo sapiens
  misc_RNA (1)...(19): siRNA sense strand
gcuacaagcaucacacuga

SEQ ID NO: 105608 - RNA, 19 nt, Homo sapiens
  misc_RNA (1)...(19): siRNA sense strand
agacagaggaucaauauca

SEQ ID NO: 105609 - RNA, 19 nt, Homo sapiens
  misc_RNA (1)...(19): siRNA sense strand
cagaacacccuacaccuuu

SEQ ID NO: 105610 - RNA, 19 nt, Homo sapiens
  misc_RNA (1)...(19): siRNA sense strand
gaagagagaagugagacaa

SEQ ID NO: 105611 - RNA, 19 nt, Homo sapiens
  misc_RNA (1)...(19): siRNA sense strand
gaagggaucccaggaagug

SEQ ID NO: 105612 - RNA, 19 nt, Homo sapiens
  misc_RNA (1)...(19): siRNA sense strand
aaucacggaugaagaagaa

SEQ ID NO: 105613 - RNA, 19 nt, Homo sapiens
  misc_RNA (1)...(19): siRNA sense strand
caagcauuaugguggauuu

SEQ ID NO: 105614 - RNA, 19 nt, Homo sapiens
  misc_RNA (1)...(19): siRNA sense strand
cugagccuguuucuuauua

SEQ ID NO: 105615 - RNA, 19 nt, Homo sapiens
  misc_RNA (1)...(19): siRNA sense strand
acuaugaacuggucuacaa

SEQ ID NO: 105616 - RNA, 19 nt, Homo sapiens
  misc_RNA (1)...(19): siRNA sense strand
gggcagcuuugaccacuau

SEQ ID NO: 105617 - RNA, 19 nt, Homo sapiens
  misc_RNA (1)...(19): siRNA sense strand
aaugagauaugaaggaguu

SEQ ID NO: 105618 - RNA, 19 nt, Homo sapiens
  misc_RNA (1)...(19): siRNA sense strand
ggaaagaaugagauaugaa

SEQ ID NO: 105619 - RNA, 19 nt, Homo sapiens
  misc_RNA (1)...(19): siRNA sense strand
guaaggcaguuccaguuca

SEQ ID NO: 105620 - RNA, 19 nt, Homo sapiens
  misc_RNA (1)...(19): siRNA sense strand
guagaaggaucugauuaca

SEQ ID NO: 105621 - RNA, 19 nt, Homo sapiens
  misc_RNA (1)...(19): siRNA sense strand
gccaaucuuccauguaaua

SEQ ID NO: 105622 - RNA, 19 nt, Homo sapiens
  misc_RNA (1)...(19): siRNA sense strand
ccacggacucguucaagua

SEQ ID NO: 105623 - RNA, 19 nt, Homo sapiens
  misc_RNA (1)...(19): siRNA sense strand
gaauggagcucgaauuuaa

SEQ ID NO: 105624 - RNA, 19 nt, Homo sapiens
  misc_RNA (1)...(19): siRNA sense strand
gaagaaaucucgcgggaaa

SEQ ID NO: 105625 - RNA, 19 nt, Homo sapiens
  misc_RNA (1)...(19): siRNA sense strand
ggagagaaguugaauuaaa

SEQ ID NO: 105626 - RNA, 19 nt, Homo sapiens
  misc_RNA (1)...(19): siRNA sense strand
ccaaacagcuuauacuauu

SEQ ID NO: 105627 - RNA, 19 nt, Homo sapiens
  misc_RNA (1)...(19): siRNA sense strand
cgucauagaugccauguua

SEQ ID NO: 105628 - RNA, 19 nt, Homo sapiens
  misc_RNA (1)...(19): siRNA sense strand
gaaagcaaaugacaacuug

SEQ ID NO: 105629 - RNA, 19 nt, Homo sapiens
  misc_RNA (1)...(19): siRNA sense strand
gaaagaaagucagcaauca

SEQ ID NO: 105630 - RNA, 19 nt, Homo sapiens
  misc_RNA (1)...(19): siRNA sense strand
gaucaagggugaaguguga

SEQ ID NO: 105631 - RNA, 19 nt, Homo sapiens
  misc_RNA (1)...(19): siRNA sense strand
gaauaugucuucuuugugu

SEQ ID NO: 105632 - RNA, 19 nt, Homo sapiens
  misc_RNA (1)...(19): siRNA sense strand
gaacuggucuacaaagaug

SEQ ID NO: 105633 - RNA, 19 nt, Homo sapiens
  misc_RNA (1)...(19): siRNA sense strand
caacuuggauggcaugauu

SEQ ID NO: 105634 - RNA, 19 nt, Homo sapiens
  misc_RNA (1)...(19): siRNA sense strand
gcagaaauaucagcuagaa

SEQ ID NO: 105635 - RNA, 19 nt, Homo sapiens
  misc_RNA (1)...(19): siRNA sense strand
gaacacaauuccaccauag

SEQ ID NO: 105636 - RNA, 19 nt, Homo sapiens
  misc_RNA (1)...(19): siRNA sense strand
caacaacaauggucguauu

SEQ ID NO: 105637 - RNA, 19 nt, Homo sapiens
  misc_RNA (1)...(19): siRNA sense strand
gaaaugugcuagaacugaa

SEQ ID NO: 105638 - RNA, 19 nt, Homo sapiens
  misc_RNA (1)...(19): siRNA sense strand
gaagaaaugugcuagaacu

SEQ ID NO: 105639 - RNA, 19 nt, Homo sapiens
  misc_RNA (1)...(19): siRNA sense strand
gcagugacuuguggaaaua

SEQ ID NO: 105640 - RNA, 19 nt, Homo sapiens
  misc_RNA (1)...(19): siRNA sense strand
ccaaaguggucaagaauau

SEQ ID NO: 105641 - RNA, 19 nt, Homo sapiens
  misc_RNA (1)...(19): siRNA sense strand
gagagaaguugaauuaaag

SEQ ID NO: 105642 - RNA, 19 nt, Homo sapiens
  misc_RNA (1)...(19): siRNA sense strand
gaaaucacuugguuuaaag

SEQ ID NO: 105643 - RNA, 19 nt, Homo sapiens
  misc_RNA (1)...(19): siRNA sense strand
uagaugagcugcuuaagga

SEQ ID NO: 105644 - RNA, 19 nt, Homo sapiens
  misc_RNA (1)...(19): siRNA sense strand
ccagaaaucacuugguuua

SEQ ID NO: 105645 - RNA, 19 nt, Homo sapiens
  misc_RNA (1)...(19): siRNA sense strand
ggaauuagaugagcugcuu

SEQ ID NO: 105646 - RNA, 19 nt, Homo sapiens
  misc_RNA (1)...(19): siRNA sense strand
ggagaggagcaacgaauua

SEQ ID NO: 105647 - RNA, 19 nt, Homo sapiens
  misc_RNA (1)...(19): siRNA sense strand
gaaguaaacaaaccaaaga

SEQ ID NO: 105648 - RNA, 19 nt, Homo sapiens
  misc_RNA (1)...(19): siRNA sense strand
gugccaaucuuccauguaa

SEQ ID NO: 105649 - RNA, 19 nt, Homo sapiens
  misc_RNA (1)...(19): siRNA sense strand
acacagaaguuaauuguca

SEQ ID NO: 105650 - RNA, 19 nt, Homo sapiens
  misc_RNA (1)...(19): siRNA sense strand
ccauguaacuuuaaugaga

SEQ ID NO: 105651 - RNA, 19 nt, Homo sapiens
  misc_RNA (1)...(19): siRNA sense strand
ucagagauuugagguaaua

SEQ ID NO: 105652 - RNA, 19 nt, Homo sapiens
  misc_RNA (1)...(19): siRNA sense strand
gggaugaggccauuuauga

SEQ ID NO: 105653 - RNA, 19 nt, Homo sapiens
  misc_RNA (1)...(19): siRNA sense strand
ggagaaggauuuauugacu

SEQ ID NO: 105654 - RNA, 19 nt, Homo sapiens
  misc_RNA (1)...(19): siRNA sense strand
ccaaggauauagaguuuau

SEQ ID NO: 105655 - RNA, 19 nt, Homo sapiens
  misc_RNA (1)...(19): siRNA sense strand
uaagacagucagcaaauua

SEQ ID NO: 105656 - RNA, 19 nt, Homo sapiens
  misc_RNA (1)...(19): siRNA sense strand
caaauaaugugggagaaau

SEQ ID NO: 105657 - RNA, 19 nt, Homo sapiens
  misc_RNA (1)...(19): siRNA sense strand
gcaguggucuuuaucaucu

SEQ ID NO: 105658 - RNA, 19 nt, Homo sapiens
  misc_RNA (1)...(19): siRNA sense strand
cagaugaaauggaauuaga

SEQ ID NO: 105659 - RNA, 19 nt, Homo sapiens
  misc_RNA (1)...(19): siRNA sense strand
caacaauggucguauuaag

SEQ ID NO: 105660 - RNA, 19 nt, Homo sapiens
  misc_RNA (1)...(19): siRNA sense strand
gaacuggagucuucauaac

SEQ ID NO: 105661 - RNA, 19 nt, Homo sapiens
  misc_RNA (1)...(19): siRNA sense strand
ggaauggagcucgaauuua

SEQ ID NO: 105662 - RNA, 19 nt, Homo sapiens
  misc_RNA (1)...(19): siRNA sense strand
gagagaaugucacaggaau

SEQ ID NO: 105663 - RNA, 19 nt, Homo sapiens
  misc_RNA (1)...(19): siRNA sense strand
cgaauguaaucgcauauga

SEQ ID NO: 105664 - RNA, 19 nt, Homo sapiens
  misc_RNA (1)...(19): siRNA sense strand
guaagacagucagcaaauu

SEQ ID NO: 105665 - RNA, 19 nt, Homo sapiens
  misc_RNA (1)...(19): siRNA sense strand
gaacugaggcgccuuaacu

SEQ ID NO: 105666 - RNA, 19 nt, Homo sapiens
  misc_RNA (1)...(19): siRNA sense strand
agaaggaucugauuacauc

SEQ ID NO: 105667 - RNA, 19 nt, Homo sapiens
  misc_RNA (1)...(19): siRNA sense strand
ggaguugccucuuucaucu

SEQ ID NO: 105668 - RNA, 19 nt, Homo sapiens
  misc_RNA (1)...(19): siRNA sense strand
gagaaggauuuauugacuu

SEQ ID NO: 105669 - RNA, 19 nt, Homo sapiens
  misc_RNA (1)...(19): siRNA sense strand
gaauagauacgcgaaugua

SEQ ID NO: 105670 - RNA, 19 nt, Homo sapiens
  misc_RNA (1)...(19): siRNA sense strand
gauuugagguaauagaguu

SEQ ID NO: 105671 - RNA, 19 nt, Homo sapiens
  misc_RNA (1)...(19): siRNA sense strand
ggaagugacuaugugaaug

SEQ ID NO: 105672 - RNA, 19 nt, Homo sapiens
  misc_RNA (1)...(19): siRNA sense strand
ugaagagucugaccaagga

SEQ ID NO: 105673 - RNA, 19 nt, Homo sapiens
  misc_RNA (1)...(19): siRNA sense strand
gaauguguggccucaaaua

SEQ ID NO: 105674 - RNA, 19 nt, Homo sapiens
  misc_RNA (1)...(19): siRNA sense strand
gaaagaaugagauaugaag

SEQ ID NO: 105675 - RNA, 19 nt, Homo sapiens
  misc_RNA (1)...(19): siRNA sense strand
gaacaugcagagucuaaga

SEQ ID NO: 105676 - RNA, 19 nt, Homo sapiens
  misc_RNA (1)...(19): siRNA sense strand
gagcaacgaauuaccauug

SEQ ID NO: 105677 - RNA, 19 nt, Homo sapiens
  misc_RNA (1)...(19): siRNA sense strand
gaugauaugccaauaggaa

SEQ ID NO: 105678 - RNA, 19 nt, Homo sapiens
  misc_RNA (1)...(19): siRNA sense strand
caagauaccaguacuuugu

SEQ ID NO: 105679 - RNA, 19 nt, Homo sapiens
  misc_RNA (1)...(19): siRNA sense strand
cagauaccauugccaacua

SEQ ID NO: 105680 - RNA, 19 nt, Homo sapiens
  misc_RNA (1)...(19): siRNA sense strand
gaaccugagucugaaacaa

SEQ ID NO: 105681 - RNA, 19 nt, Homo sapiens
  misc_RNA (1)...(19): siRNA sense strand
gaacacaacgaccagcuau

SEQ ID NO: 105682 - RNA, 19 nt, Homo sapiens
  misc_RNA (1)...(19): siRNA sense strand
gagagaaaugucaccaaua

SEQ ID NO: 105683 - RNA, 19 nt, Homo sapiens
  misc_RNA (1)...(19): siRNA sense strand
ugggagagaaguugaauua

SEQ ID NO: 105684 - RNA, 19 nt, Homo sapiens
  misc_RNA (1)...(19): siRNA sense strand
ggaaagaaagucagcaauc

SEQ ID NO: 105685 - RNA, 19 nt, Homo sapiens
  misc_RNA (1)...(19): siRNA sense strand
uuaaggagauaucuaggaa

SEQ ID NO: 105686 - RNA, 19 nt, Homo sapiens
  misc_RNA (1)...(19): siRNA sense strand
ugaaggaguuguagauauc

SEQ ID NO: 105687 - RNA, 19 nt, Homo sapiens
  misc_RNA (1)...(19): siRNA sense strand
gaagcugacacaaauagaa

SEQ ID NO: 105688 - RNA, 19 nt, Homo sapiens
  misc_RNA (1)...(19): siRNA sense strand
guucgaacauuugcacuuu

SEQ ID NO: 105689 - RNA, 19 nt, Homo sapiens
  misc_RNA (1)...(19): siRNA sense strand
cuacucggauuaugaauuc

SEQ ID NO: 105690 - RNA, 19 nt, Homo sapiens
  misc_RNA (1)...(19): siRNA sense strand
gaaaugggcagagagaaau

SEQ ID NO: 105691 - RNA, 19 nt, Homo sapiens
  misc_RNA (1)...(19): siRNA sense strand
uauccaugaugcacuguua

SEQ ID NO: 105692 - RNA, 19 nt, Homo sapiens
  misc_RNA (1)...(19): siRNA sense strand
ggugaagugugaccaguau

SEQ ID NO: 105693 - RNA, 19 nt, Homo sapiens
  misc_RNA (1)...(19): siRNA sense strand
ccaggaauaugagucaauu

SEQ ID NO: 105694 - RNA, 19 nt, Homo sapiens
  misc_RNA (1)...(19): siRNA sense strand
gcagcauaccgaacaauaa

SEQ ID NO: 105695 - RNA, 19 nt, Homo sapiens
  misc_RNA (1)...(19): siRNA sense strand
ugaaguaccugcaaaugag

SEQ ID NO: 105696 - RNA, 19 nt, Homo sapiens
  misc_RNA (1)...(19): siRNA sense strand
gaagcaaaaugccuauauu

SEQ ID NO: 105697 - RNA, 19 nt, Homo sapiens
  misc_RNA (1)...(19): siRNA sense strand
agagaaaugucaccaauac

SEQ ID NO: 105698 - RNA, 19 nt, Homo sapiens
  misc_RNA (1)...(19): siRNA sense strand
ggaguuggccggacugguu

SEQ ID NO: 105699 - RNA, 19 nt, Homo sapiens
  misc_RNA (1)...(19): siRNA sense strand
cauuugcacuuuacaagaa

SEQ ID NO: 105700 - RNA, 19 nt, Homo sapiens
  misc_RNA (1)...(19): siRNA sense strand
gaacauuugcacuuuacaa

SEQ ID NO: 105701 - RNA, 19 nt, Homo sapiens
  misc_RNA (1)...(19): siRNA sense strand
uaacgcugcuugauacugu

SEQ ID NO: 105702 - RNA, 19 nt, Homo sapiens
  misc_RNA (1)...(19): siRNA sense strand
ggucaccaaugccuuaugu

SEQ ID NO: 105703 - RNA, 19 nt, Homo sapiens
  misc_RNA (1)...(19): siRNA sense strand
gaaagucagcaaucagaga

SEQ ID NO: 105704 - RNA, 19 nt, Homo sapiens
  misc_RNA (1)...(19): siRNA sense strand
gaguagaaggaucugauua

SEQ ID NO: 105705 - RNA, 19 nt, Homo sapiens
  misc_RNA (1)...(19): siRNA sense strand
uaccaagccugccuucauu

SEQ ID NO: 105706 - RNA, 19 nt, Homo sapiens
  misc_RNA (1)...(19): siRNA sense strand
ugucaaagccuuacccaaa

SEQ ID NO: 105707 - RNA, 19 nt, Homo sapiens
  misc_RNA (1)...(19): siRNA sense strand
gcuacaagcaucacacuga

SEQ ID NO: 105708 - RNA, 19 nt, Homo sapiens
  misc_RNA (1)...(19): siRNA sense strand
agacagaggaucaauauca

SEQ ID NO: 105709 - RNA, 19 nt, Homo sapiens
  misc_RNA (1)...(19): siRNA sense strand
cagaacacccuacaccuuu

SEQ ID NO: 105710 - RNA, 19 nt, Homo sapiens
  misc_RNA (1)...(19): siRNA sense strand
gaagagagaagugagacaa

SEQ ID NO: 105711 - RNA, 19 nt, Homo sapiens
  misc_RNA (1)...(19): siRNA sense strand
gaagggaucccaggaagug

SEQ ID NO: 105712 - RNA, 19 nt, Homo sapiens
  misc_RNA (1)...(19): siRNA sense strand
aaucacggaugaagaagaa

SEQ ID NO: 105713 - RNA, 19 nt, Homo sapiens
  misc_RNA (1)...(19): siRNA sense strand
caagcauuaugguggauuu

SEQ ID NO: 105714 - RNA, 19 nt, Homo sapiens
  misc_RNA (1)...(19): siRNA sense strand
cugagccuguuucuuauua

SEQ ID NO: 105715 - RNA, 19 nt, Homo sapiens
  misc_RNA (1)...(19): siRNA sense strand
acuaugaacuggucuacaa

SEQ ID NO: 105716 - RNA, 19 nt, Homo sapiens
  misc_RNA (1)...(19): siRNA sense strand
gggcagcuuugaccacuau

SEQ ID NO: 105717 - RNA, 19 nt, Homo sapiens
  misc_RNA (1)...(19): siRNA sense strand
aaugagauaugaaggaguu

SEQ ID NO: 105718 - RNA, 19 nt, Homo sapiens
  misc_RNA (1)...(19): siRNA sense strand
ggaaagaaugagauaugaa

SEQ ID NO: 105719 - RNA, 19 nt, Homo sapiens
  misc_RNA (1)...(19): siRNA sense strand
guaaggcaguuccaguuca

SEQ ID NO: 105720 - RNA, 19 nt, Homo sapiens
  misc_RNA (1)...(19): siRNA sense strand
guagaaggaucugauuaca

SEQ ID NO: 105721 - RNA, 19 nt, Homo sapiens
  misc_RNA (1)...(19): siRNA sense strand
gccaaucuuccauguaaua

SEQ ID NO: 105722 - RNA, 19 nt, Homo sapiens
  misc_RNA (1)...(19): siRNA sense strand
ccacggacucguucaagua

SEQ ID NO: 105723 - RNA, 19 nt, Homo sapiens
  misc_RNA (1)...(19): siRNA sense strand
gaauggagcucgaauuuaa

SEQ ID NO: 105724 - RNA, 19 nt, Homo sapiens
  misc_RNA (1)...(19): siRNA sense strand
gaagaaaucucgcgggaaa

SEQ ID NO: 105725 - RNA, 19 nt, Homo sapiens
  misc_RNA (1)...(19): siRNA sense strand
ggagagaaguugaauuaaa

SEQ ID NO: 105726 - RNA, 19 nt, Homo sapiens
  misc_RNA (1)...(19): siRNA sense strand
ccaaacagcuuauacuauu

SEQ ID NO: 105727 - RNA, 19 nt, Homo sapiens
  misc_RNA (1)...(19): siRNA sense strand
cgucauagaugccauguua

SEQ ID NO: 105728 - RNA, 19 nt, Homo sapiens
  misc_RNA (1)...(19): siRNA sense strand
gaaagcaaaugacaacuug

SEQ ID NO: 105729 - RNA, 19 nt, Homo sapiens
  misc_RNA (1)...(19): siRNA sense strand
gaaagaaagucagcaauca

SEQ ID NO: 105730 - RNA, 19 nt, Homo sapiens
  misc_RNA (1)...(19): siRNA sense strand
gaucaagggugaaguguga

SEQ ID NO: 105731 - RNA, 19 nt, Homo sapiens
  misc_RNA (1)...(19): siRNA sense strand
gaauaugucuucuuugugu

SEQ ID NO: 105732 - RNA, 19 nt, Homo sapiens
  misc_RNA (1)...(19): siRNA sense strand
gaacuggucuacaaagaug

SEQ ID NO: 105733 - RNA, 19 nt, Homo sapiens
  misc_RNA (1)...(19): siRNA sense strand
caacuuggauggcaugauu

SEQ ID NO: 105734 - RNA, 19 nt, Homo sapiens
  misc_RNA (1)...(19): siRNA sense strand
gcagaaauaucagcuagaa

SEQ ID NO: 105735 - RNA, 19 nt, Homo sapiens
  misc_RNA (1)...(19): siRNA sense strand
gaacacaauuccaccauag

SEQ ID NO: 105736 - RNA, 19 nt, Homo sapiens
  misc_RNA (1)...(19): siRNA sense strand
caacaacaauggucguauu

SEQ ID NO: 105737 - RNA, 19 nt, Homo sapiens
  misc_RNA (1)...(19): siRNA sense strand
gaaaugugcuagaacugaa

SEQ ID NO: 105738 - RNA, 19 nt, Homo sapiens
  misc_RNA (1)...(19): siRNA sense strand
gaagaaaugugcuagaacu

SEQ ID NO: 105739 - RNA, 19 nt, Homo sapiens
  misc_RNA (1)...(19): siRNA sense strand
gcagugacuuguggaaaua

SEQ ID NO: 105740 - RNA, 19 nt, Homo sapiens
  misc_RNA (1)...(19): siRNA sense strand
ccaaaguggucaagaauau

SEQ ID NO: 105741 - RNA, 19 nt, Homo sapiens
  misc_RNA (1)...(19): siRNA sense strand
gagagaaguugaauuaaag

SEQ ID NO: 105742 - RNA, 19 nt, Homo sapiens
  misc_RNA (1)...(19): siRNA sense strand
gaaaucacuugguuuaaag

SEQ ID NO: 105743 - RNA, 19 nt, Homo sapiens
  misc_RNA (1)...(19): siRNA sense strand
uagaugagcugcuuaagga

SEQ ID NO: 105744 - RNA, 19 nt, Homo sapiens
  misc_RNA (1)...(19): siRNA sense strand
ccagaaaucacuugguuua

SEQ ID NO: 105745 - RNA, 19 nt, Homo sapiens
  misc_RNA (1)...(19): siRNA sense strand
ggaauuagaugagcugcuu

SEQ ID NO: 105746 - RNA, 19 nt, Homo sapiens
  misc_RNA (1)...(19): siRNA sense strand
ggagaggagcaacgaauua

SEQ ID NO: 105747 - RNA, 19 nt, Homo sapiens
  misc_RNA (1)...(19): siRNA sense strand
gaaguaaacaaaccaaaga

SEQ ID NO: 105748 - RNA, 19 nt, Homo sapiens
  misc_RNA (1)...(19): siRNA sense strand
gugccaaucuuccauguaa

SEQ ID NO: 105749 - RNA, 19 nt, Homo sapiens
  misc_RNA (1)...(19): siRNA sense strand
acacagaaguuaauuguca

SEQ ID NO: 105750 - RNA, 19 nt, Homo sapiens
  misc_RNA (1)...(19): siRNA sense strand
ccauguaacuuuaaugaga

SEQ ID NO: 105751 - RNA, 19 nt, Homo sapiens
  misc_RNA (1)...(19): siRNA sense strand
ucagagauuugagguaaua

SEQ ID NO: 105752 - RNA, 19 nt, Homo sapiens
  misc_RNA (1)...(19): siRNA sense strand
gggaugaggccauuuauga

SEQ ID NO: 105753 - RNA, 19 nt, Homo sapiens
  misc_RNA (1)...(19): siRNA sense strand
ggagaaggauuuauugacu

SEQ ID NO: 105754 - RNA, 19 nt, Homo sapiens
  misc_RNA (1)...(19): siRNA sense strand
ccaaggauauagaguuuau

SEQ ID NO: 105755 - RNA, 19 nt, Homo sapiens
  misc_RNA (1)...(19): siRNA sense strand
uaagacagucagcaaauua

SEQ ID NO: 105756 - RNA, 19 nt, Homo sapiens
  misc_RNA (1)...(19): siRNA sense strand
caaauaaugugggagaaau

SEQ ID NO: 105757 - RNA, 19 nt, Homo sapiens
  misc_RNA (1)...(19): siRNA sense strand
gcaguggucuuuaucaucu

SEQ ID NO: 105758 - RNA, 19 nt, Homo sapiens
  misc_RNA (1)...(19): siRNA sense strand
cagaugaaauggaauuaga

SEQ ID NO: 105759 - RNA, 19 nt, Homo sapiens
  misc_RNA (1)...(19): siRNA sense strand
caacaauggucguauuaag

SEQ ID NO: 105760 - RNA, 19 nt, Homo sapiens
  misc_RNA (1)...(19): siRNA sense strand
gaacuggagucuucauaac

SEQ ID NO: 105761 - RNA, 19 nt, Homo sapiens
  misc_RNA (1)...(19): siRNA sense strand
ggaauggagcucgaauuua

SEQ ID NO: 105762 - RNA, 19 nt, Homo sapiens
  misc_RNA (1)...(19): siRNA sense strand
gagagaaugucacaggaau

SEQ ID NO: 105763 - RNA, 19 nt, Homo sapiens
  misc_RNA (1)...(19): siRNA sense strand
cgaauguaaucgcauauga

SEQ ID NO: 105764 - RNA, 19 nt, Homo sapiens
  misc_RNA (1)...(19): siRNA sense strand
guaagacagucagcaaauu

SEQ ID NO: 105765 - RNA, 19 nt, Homo sapiens
  misc_RNA (1)...(19): siRNA sense strand
gaacugaggcgccuuaacu

SEQ ID NO: 105766 - RNA, 19 nt, Homo sapiens
  misc_RNA (1)...(19): siRNA sense strand
agaaggaucugauuacauc

SEQ ID NO: 105767 - RNA, 19 nt, Homo sapiens
  misc_RNA (1)...(19): siRNA sense strand
ggaguugccucuuucaucu

SEQ ID NO: 105768 - RNA, 19 nt, Homo sapiens
  misc_RNA (1)...(19): siRNA sense strand
gagaaggauuuauugacuu

SEQ ID NO: 105769 - RNA, 19 nt, Homo sapiens
  misc_RNA (1)...(19): siRNA sense strand
gaauagauacgcgaaugua

SEQ ID NO: 105770 - RNA, 19 nt, Homo sapiens
  misc_RNA (1)...(19): siRNA sense strand
gauuugagguaauagaguu

SEQ ID NO: 105771 - RNA, 19 nt, Homo sapiens
  misc_RNA (1)...(19): siRNA sense strand
ggaagugacuaugugaaug

SEQ ID NO: 105772 - RNA, 19 nt, Homo sapiens
  misc_RNA (1)...(19): siRNA sense strand
ugaagagucugaccaagga

SEQ ID NO: 105773 - RNA, 19 nt, Homo sapiens
  misc_RNA (1)...(19): siRNA sense strand
gaauguguggccucaaaua

SEQ ID NO: 105774 - RNA, 19 nt, Homo sapiens
  misc_RNA (1)...(19): siRNA sense strand
gaaagaaugagauaugaag

SEQ ID NO: 105775 - RNA, 19 nt, Homo sapiens
  misc_RNA (1)...(19): siRNA sense strand
gaacaugcagagucuaaga

SEQ ID NO: 105776 - RNA, 19 nt, Homo sapiens
  misc_RNA (1)...(19): siRNA sense strand
gagcaacgaauuaccauug

SEQ ID NO: 105777 - RNA, 19 nt, Homo sapiens
  misc_RNA (1)...(19): siRNA sense strand
gaugauaugccaauaggaa

SEQ ID NO: 105778 - RNA, 19 nt, Homo sapiens
  misc_RNA (1)...(19): siRNA sense strand
caagauaccaguacuuugu

SEQ ID NO: 105779 - RNA, 19 nt, Homo sapiens
  misc_RNA (1)...(19): siRNA sense strand
cagauaccauugccaacua

SEQ ID NO: 105780 - RNA, 19 nt, Homo sapiens
  misc_RNA (1)...(19): siRNA sense strand
gaaccugagucugaaacaa

SEQ ID NO: 105781 - RNA, 19 nt, Homo sapiens
  misc_RNA (1)...(19): siRNA sense strand
gaacacaacgaccagcuau

SEQ ID NO: 105782 - RNA, 19 nt, Homo sapiens
  misc_RNA (1)...(19): siRNA sense strand
gagagaaaugucaccaaua

SEQ ID NO: 105783 - RNA, 19 nt, Homo sapiens
  misc_RNA (1)...(19): siRNA sense strand
ugggagagaaguugaauua

SEQ ID NO: 105784 - RNA, 19 nt, Homo sapiens
  misc_RNA (1)...(19): siRNA sense strand
ggaaagaaagucagcaauc

SEQ ID NO: 105785 - RNA, 19 nt, Homo sapiens
  misc_RNA (1)...(19): siRNA sense strand
uuaaggagauaucuaggaa

SEQ ID NO: 105786 - RNA, 19 nt, Homo sapiens
  misc_RNA (1)...(19): siRNA sense strand
ugaaggaguuguagauauc

SEQ ID NO: 105787 - RNA, 19 nt, Homo sapiens
  misc_RNA (1)...(19): siRNA sense strand
gaagcugacacaaauagaa

SEQ ID NO: 105788 - RNA, 19 nt, Homo sapiens
  misc_RNA (1)...(19): siRNA sense strand
guucgaacauuugcacuuu

SEQ ID NO: 105789 - RNA, 19 nt, Homo sapiens
  misc_RNA (1)...(19): siRNA sense strand
cuacucggauuaugaauuc

SEQ ID NO: 105790 - RNA, 19 nt, Homo sapiens
  misc_RNA (1)...(19): siRNA sense strand
gaaaugggcagagagaaau

SEQ ID NO: 105791 - RNA, 19 nt, Homo sapiens
  misc_RNA (1)...(19): siRNA sense strand
uauccaugaugcacuguua

SEQ ID NO: 105792 - RNA, 19 nt, Homo sapiens
  misc_RNA (1)...(19): siRNA sense strand
ggugaagugugaccaguau

SEQ ID NO: 105793 - RNA, 19 nt, Homo sapiens
  misc_RNA (1)...(19): siRNA sense strand
ccaggaauaugagucaauu

SEQ ID NO: 105794 - RNA, 19 nt, Homo sapiens
  misc_RNA (1)...(19): siRNA sense strand
gcagcauaccgaacaauaa

SEQ ID NO: 105795 - RNA, 19 nt, Homo sapiens
  misc_RNA (1)...(19): siRNA sense strand
ugaaguaccugcaaaugag

SEQ ID NO: 105796 - RNA, 19 nt, Homo sapiens
  misc_RNA (1)...(19): siRNA sense strand
gaagcaaaaugccuauauu

SEQ ID NO: 105797 - RNA, 19 nt, Homo sapiens
  misc_RNA (1)...(19): siRNA sense strand
agagaaaugucaccaauac

SEQ ID NO: 105798 - RNA, 19 nt, Homo sapiens
  misc_RNA (1)...(19): siRNA sense strand
ggaguuggccggacugguu

SEQ ID NO: 105799 - RNA, 19 nt, Homo sapiens
  misc_RNA (1)...(19): siRNA sense strand
cauuugcacuuuacaagaa

SEQ ID NO: 105800 - RNA, 19 nt, Homo sapiens
  misc_RNA (1)...(19): siRNA sense strand
gaacauuugcacuuuacaa

SEQ ID NO: 105801 - RNA, 19 nt, Homo sapiens
  misc_RNA (1)...(19): siRNA sense strand
uaacgcugcuugauacugu

SEQ ID NO: 105802 - RNA, 19 nt, Homo sapiens
  misc_RNA (1)...(19): siRNA sense strand
ggucaccaaugccuuaugu

SEQ ID NO: 105803 - RNA, 19 nt, Homo sapiens
  misc_RNA (1)...(19): siRNA sense strand
gaaagucagcaaucagaga

SEQ ID NO: 105804 - RNA, 19 nt, Homo sapiens
  misc_RNA (1)...(19): siRNA sense strand
gaguagaaggaucugauua

SEQ ID NO: 105805 - RNA, 19 nt, Homo sapiens
  misc_RNA (1)...(19): siRNA sense strand
uaccaagccugccuucauu

SEQ ID NO: 105806 - RNA, 19 nt, Homo sapiens
  misc_RNA (1)...(19): siRNA sense strand
ugucaaagccuuacccaaa

SEQ ID NO: 105807 - RNA, 19 nt, Homo sapiens
  misc_RNA (1)...(19): siRNA sense strand
gcuacaagcaucacacuga

SEQ ID NO: 105808 - RNA, 19 nt, Homo sapiens
  misc_RNA (1)...(19): siRNA sense strand
agacagaggaucaauauca

SEQ ID NO: 105809 - RNA, 19 nt, Homo sapiens
  misc_RNA (1)...(19): siRNA sense strand
cagaacacccuacaccuuu

SEQ ID NO: 105810 - RNA, 19 nt, Homo sapiens
  misc_RNA (1)...(19): siRNA sense strand
gaagagagaagugagacaa

SEQ ID NO: 105811 - RNA, 19 nt, Homo sapiens
  misc_RNA (1)...(19): siRNA sense strand
gaagggaucccaggaagug

SEQ ID NO: 105812 - RNA, 19 nt, Homo sapiens
  misc_RNA (1)...(19): siRNA sense strand
aaucacggaugaagaagaa

SEQ ID NO: 105813 - RNA, 19 nt, Homo sapiens
  misc_RNA (1)...(19): siRNA sense strand
caagcauuaugguggauuu

SEQ ID NO: 105814 - RNA, 19 nt, Homo sapiens
  misc_RNA (1)...(19): siRNA sense strand
cugagccuguuucuuauua

SEQ ID NO: 105815 - RNA, 19 nt, Homo sapiens
  misc_RNA (1)...(19): siRNA sense strand
acuaugaacuggucuacaa

SEQ ID NO: 105816 - RNA, 19 nt, Homo sapiens
  misc_RNA (1)...(19): siRNA sense strand
gggcagcuuugaccacuau

SEQ ID NO: 105817 - RNA, 19 nt, Homo sapiens
  misc_RNA (1)...(19): siRNA sense strand
aaugagauaugaaggaguu

SEQ ID NO: 105818 - RNA, 19 nt, Homo sapiens
  misc_RNA (1)...(19): siRNA sense strand
ggaaagaaugagauaugaa

SEQ ID NO: 105819 - RNA, 19 nt, Homo sapiens
  misc_RNA (1)...(19): siRNA sense strand
guaaggcaguuccaguuca

SEQ ID NO: 105820 - RNA, 19 nt, Homo sapiens
  misc_RNA (1)...(19): siRNA sense strand
guagaaggaucugauuaca

SEQ ID NO: 105821 - RNA, 19 nt, Homo sapiens
  misc_RNA (1)...(19): siRNA sense strand
gccaaucuuccauguaaua

SEQ ID NO: 105822 - RNA, 19 nt, Homo sapiens
  misc_RNA (1)...(19): siRNA sense strand
ccacggacucguucaagua

SEQ ID NO: 105823 - RNA, 19 nt, Homo sapiens
  misc_RNA (1)...(19): siRNA sense strand
gaauggagcucgaauuuaa

SEQ ID NO: 105824 - RNA, 19 nt, Homo sapiens
  misc_RNA (1)...(19): siRNA sense strand
gaagaaaucucgcgggaaa

SEQ ID NO: 105825 - RNA, 19 nt, Homo sapiens
  misc_RNA (1)...(19): siRNA sense strand
ggagagaaguugaauuaaa

SEQ ID NO: 105826 - RNA, 19 nt, Homo sapiens
  misc_RNA (1)...(19): siRNA sense strand
ccaaacagcuuauacuauu

SEQ ID NO: 105827 - RNA, 19 nt, Homo sapiens
  misc_RNA (1)...(19): siRNA sense strand
cgucauagaugccauguua

SEQ ID NO: 105828 - RNA, 19 nt, Homo sapiens
  misc_RNA (1)...(19): siRNA sense strand
gaaagcaaaugacaacuug

SEQ ID NO: 105829 - RNA, 19 nt, Homo sapiens
  misc_RNA (1)...(19): siRNA sense strand
gaaagaaagucagcaauca

SEQ ID NO: 105830 - RNA, 19 nt, Homo sapiens
  misc_RNA (1)...(19): siRNA sense strand
gaucaagggugaaguguga

SEQ ID NO: 105831 - RNA, 19 nt, Homo sapiens
  misc_RNA (1)...(19): siRNA sense strand
gaauaugucuucuuugugu

SEQ ID NO: 105832 - RNA, 19 nt, Homo sapiens
  misc_RNA (1)...(19): siRNA sense strand
gaacuggucuacaaagaug

SEQ ID NO: 105833 - RNA, 19 nt, Homo sapiens
  misc_RNA (1)...(19): siRNA sense strand
caacuuggauggcaugauu

SEQ ID NO: 105834 - RNA, 19 nt, Homo sapiens
  misc_RNA (1)...(19): siRNA sense strand
gcagaaauaucagcuagaa

SEQ ID NO: 105835 - RNA, 19 nt, Homo sapiens
  misc_RNA (1)...(19): siRNA sense strand
gaacacaauuccaccauag

SEQ ID NO: 105836 - RNA, 19 nt, Homo sapiens
  misc_RNA (1)...(19): siRNA sense strand
caacaacaauggucguauu

SEQ ID NO: 105837 - RNA, 19 nt, Homo sapiens
  misc_RNA (1)...(19): siRNA sense strand
gaaaugugcuagaacugaa

SEQ ID NO: 105838 - RNA, 19 nt, Homo sapiens
  misc_RNA (1)...(19): siRNA sense strand
gaagaaaugugcuagaacu

SEQ ID NO: 105839 - RNA, 19 nt, Homo sapiens
  misc_RNA (1)...(19): siRNA sense strand
gcagugacuuguggaaaua

SEQ ID NO: 105840 - RNA, 19 nt, Homo sapiens
  misc_RNA (1)...(19): siRNA sense strand
ccaaaguggucaagaauau

SEQ ID NO: 105841 - RNA, 19 nt, Homo sapiens
  misc_RNA (1)...(19): siRNA sense strand
gagagaaguugaauuaaag

SEQ ID NO: 105842 - RNA, 19 nt, Homo sapiens
  misc_RNA (1)...(19): siRNA sense strand
gaaaucacuugguuuaaag

SEQ ID NO: 105843 - RNA, 19 nt, Homo sapiens
  misc_RNA (1)...(19): siRNA sense strand
uagaugagcugcuuaagga

SEQ ID NO: 105844 - RNA, 19 nt, Homo sapiens
  misc_RNA (1)...(19): siRNA sense strand
ccagaaaucacuugguuua

SEQ ID NO: 105845 - RNA, 19 nt, Homo sapiens
  misc_RNA (1)...(19): siRNA sense strand
ggaauuagaugagcugcuu

SEQ ID NO: 105846 - RNA, 19 nt, Homo sapiens
  misc_RNA (1)...(19): siRNA sense strand
ggagaggagcaacgaauua

SEQ ID NO: 105847 - RNA, 19 nt, Homo sapiens
  misc_RNA (1)...(19): siRNA sense strand
gaaguaaacaaaccaaaga

SEQ ID NO: 105848 - RNA, 19 nt, Homo sapiens
  misc_RNA (1)...(19): siRNA sense strand
gugccaaucuuccauguaa

SEQ ID NO: 105849 - RNA, 19 nt, Homo sapiens
  misc_RNA (1)...(19): siRNA sense strand
acacagaaguuaauuguca

SEQ ID NO: 105850 - RNA, 19 nt, Homo sapiens
  misc_RNA (1)...(19): siRNA sense strand
ccauguaacuuuaaugaga

SEQ ID NO: 105851 - RNA, 19 nt, Homo sapiens
  misc_RNA (1)...(19): siRNA sense strand
ucagagauuugagguaaua

SEQ ID NO: 105852 - RNA, 19 nt, Homo sapiens
  misc_RNA (1)...(19): siRNA sense strand
gggaugaggccauuuauga

SEQ ID NO: 105853 - RNA, 19 nt, Homo sapiens
  misc_RNA (1)...(19): siRNA sense strand
ggagaaggauuuauugacu

SEQ ID NO: 105854 - RNA, 19 nt, Homo sapiens
  misc_RNA (1)...(19): siRNA sense strand
ccaaggauauagaguuuau

SEQ ID NO: 105855 - RNA, 19 nt, Homo sapiens
  misc_RNA (1)...(19): siRNA sense strand
uaagacagucagcaaauua

SEQ ID NO: 105856 - RNA, 19 nt, Homo sapiens
  misc_RNA (1)...(19): siRNA sense strand
caaauaaugugggagaaau

SEQ ID NO: 105857 - RNA, 19 nt, Homo sapiens
  misc_RNA (1)...(19): siRNA sense strand
gcaguggucuuuaucaucu

SEQ ID NO: 105858 - RNA, 19 nt, Homo sapiens
  misc_RNA (1)...(19): siRNA sense strand
cagaugaaauggaauuaga

SEQ ID NO: 105859 - RNA, 19 nt, Homo sapiens
  misc_RNA (1)...(19): siRNA sense strand
caacaauggucguauuaag

SEQ ID NO: 105860 - RNA, 19 nt, Homo sapiens
  misc_RNA (1)...(19): siRNA sense strand
gaacuggagucuucauaac

SEQ ID NO: 105861 - RNA, 19 nt, Homo sapiens
  misc_RNA (1)...(19): siRNA sense strand
ggaauggagcucgaauuua

SEQ ID NO: 105862 - RNA, 19 nt, Homo sapiens
  misc_RNA (1)...(19): siRNA sense strand
gagagaaugucacaggaau

SEQ ID NO: 105863 - RNA, 19 nt, Homo sapiens
  misc_RNA (1)...(19): siRNA sense strand
cgaauguaaucgcauauga

SEQ ID NO: 105864 - RNA, 19 nt, Homo sapiens
  misc_RNA (1)...(19): siRNA sense strand
guaagacagucagcaaauu

SEQ ID NO: 105865 - RNA, 19 nt, Homo sapiens
  misc_RNA (1)...(19): siRNA sense strand
gaacugaggcgccuuaacu

SEQ ID NO: 105866 - RNA, 19 nt, Homo sapiens
  misc_RNA (1)...(19): siRNA sense strand
agaaggaucugauuacauc

SEQ ID NO: 105867 - RNA, 19 nt, Homo sapiens
  misc_RNA (1)...(19): siRNA sense strand
ggaguugccucuuucaucu

SEQ ID NO: 105868 - RNA, 19 nt, Homo sapiens
  misc_RNA (1)...(19): siRNA sense strand
gagaaggauuuauugacuu

SEQ ID NO: 105869 - RNA, 19 nt, Homo sapiens
  misc_RNA (1)...(19): siRNA sense strand
gaauagauacgcgaaugua

SEQ ID NO: 105870 - RNA, 19 nt, Homo sapiens
  misc_RNA (1)...(19): siRNA sense strand
gauuugagguaauagaguu

SEQ ID NO: 105871 - RNA, 19 nt, Homo sapiens
  misc_RNA (1)...(19): siRNA sense strand
ggaagugacuaugugaaug

SEQ ID NO: 105872 - RNA, 19 nt, Homo sapiens
  misc_RNA (1)...(19): siRNA sense strand
ugaagagucugaccaagga

SEQ ID NO: 105873 - RNA, 19 nt, Homo sapiens
  misc_RNA (1)...(19): siRNA sense strand
gaauguguggccucaaaua

SEQ ID NO: 105874 - RNA, 19 nt, Homo sapiens
  misc_RNA (1)...(19): siRNA sense strand
gaaagaaugagauaugaag

SEQ ID NO: 105875 - RNA, 19 nt, Homo sapiens
  misc_RNA (1)...(19): siRNA sense strand
gaacaugcagagucuaaga

SEQ ID NO: 105876 - RNA, 19 nt, Homo sapiens
  misc_RNA (1)...(19): siRNA sense strand
gagcaacgaauuaccauug

SEQ ID NO: 105877 - RNA, 19 nt, Homo sapiens
  misc_RNA (1)...(19): siRNA sense strand
gaugauaugccaauaggaa

SEQ ID NO: 105878 - RNA, 19 nt, Homo sapiens
  misc_RNA (1)...(19): siRNA sense strand
caagauaccaguacuuugu

SEQ ID NO: 105879 - RNA, 19 nt, Homo sapiens
  misc_RNA (1)...(19): siRNA sense strand
cagauaccauugccaacua

SEQ ID NO: 105880 - RNA, 19 nt, Homo sapiens
  misc_RNA (1)...(19): siRNA sense strand
gaaccugagucugaaacaa

SEQ ID NO: 105881 - RNA, 19 nt, Homo sapiens
  misc_RNA (1)...(19): siRNA sense strand
gaacacaacgaccagcuau

SEQ ID NO: 105882 - RNA, 19 nt, Homo sapiens
  misc_RNA (1)...(19): siRNA sense strand
gagagaaaugucaccaaua

SEQ ID NO: 105883 - RNA, 19 nt, Homo sapiens
  misc_RNA (1)...(19): siRNA sense strand
ugggagagaaguugaauua

SEQ ID NO: 105884 - RNA, 19 nt, Homo sapiens
  misc_RNA (1)...(19): siRNA sense strand
ggaaagaaagucagcaauc

SEQ ID NO: 105885 - RNA, 19 nt, Homo sapiens
  misc_RNA (1)...(19): siRNA sense strand
uuaaggagauaucuaggaa

SEQ ID NO: 105886 - RNA, 19 nt, Homo sapiens
  misc_RNA (1)...(19): siRNA sense strand
ugaaggaguuguagauauc

SEQ ID NO: 105887 - RNA, 19 nt, Homo sapiens
  misc_RNA (1)...(19): siRNA sense strand
gaagcugacacaaauagaa

SEQ ID NO: 105888 - RNA, 19 nt, Homo sapiens
  misc_RNA (1)...(19): siRNA sense strand
guucgaacauuugcacuuu

SEQ ID NO: 105889 - RNA, 19 nt, Homo sapiens
  misc_RNA (1)...(19): siRNA sense strand
cuacucggauuaugaauuc

SEQ ID NO: 105890 - RNA, 19 nt, Homo sapiens
  misc_RNA (1)...(19): siRNA sense strand
gaaaugggcagagagaaau

SEQ ID NO: 105891 - RNA, 19 nt, Homo sapiens
  misc_RNA (1)...(19): siRNA sense strand
uauccaugaugcacuguua

SEQ ID NO: 105892 - RNA, 19 nt, Homo sapiens
  misc_RNA (1)...(19): siRNA sense strand
ggugaagugugaccaguau

SEQ ID NO: 105893 - RNA, 19 nt, Homo sapiens
  misc_RNA (1)...(19): siRNA sense strand
ccaggaauaugagucaauu

SEQ ID NO: 105894 - RNA, 19 nt, Homo sapiens
  misc_RNA (1)...(19): siRNA sense strand
gcagcauaccgaacaauaa

SEQ ID NO: 105895 - RNA, 19 nt, Homo sapiens
  misc_RNA (1)...(19): siRNA sense strand
ugaaguaccugcaaaugag

SEQ ID NO: 105896 - RNA, 19 nt, Homo sapiens
  misc_RNA (1)...(19): siRNA sense strand
gaagcaaaaugccuauauu

SEQ ID NO: 105897 - RNA, 19 nt, Homo sapiens
  misc_RNA (1)...(19): siRNA sense strand
agagaaaugucaccaauac

SEQ ID NO: 105898 - RNA, 19 nt, Homo sapiens
  misc_RNA (1)...(19): siRNA sense strand
ggaguuggccggacugguu

SEQ ID NO: 105899 - RNA, 19 nt, Homo sapiens
  misc_RNA (1)...(19): siRNA sense strand
cauuugcacuuuacaagaa

SEQ ID NO: 105900 - RNA, 19 nt, Homo sapiens
  misc_RNA (1)...(19): siRNA sense strand
gaacauuugcacuuuacaa

SEQ ID NO: 105901 - RNA, 19 nt, Homo sapiens
  misc_RNA (1)...(19): siRNA sense strand
uaacgcugcuugauacugu

SEQ ID NO: 105902 - RNA, 19 nt, Homo sapiens
  misc_RNA (1)...(19): siRNA sense strand
ggucaccaaugccuuaugu

SEQ ID NO: 105903 - RNA, 19 nt, Homo sapiens
  misc_RNA (1)...(19): siRNA sense strand
gaaagucagcaaucagaga

SEQ ID NO: 105904 - RNA, 19 nt, Homo sapiens
  misc_RNA (1)...(19): siRNA sense strand
gaguagaaggaucugauua

SEQ ID NO: 105905 - RNA, 19 nt, Homo sapiens
  misc_RNA (1)...(19): siRNA sense strand
uaccaagccugccuucauu

SEQ ID NO: 105906 - RNA, 19 nt, Homo sapiens
  misc_RNA (1)...(19): siRNA sense strand
ugucaaagccuuacccaaa

SEQ ID NO: 105907 - RNA, 19 nt, Homo sapiens
  misc_RNA (1)...(19): siRNA sense strand
gcuacaagcaucacacuga

SEQ ID NO: 105908 - RNA, 19 nt, Homo sapiens
  misc_RNA (1)...(19): siRNA sense strand
agacagaggaucaauauca

SEQ ID NO: 105909 - RNA, 19 nt, Homo sapiens
  misc_RNA (1)...(19): siRNA sense strand
cagaacacccuacaccuuu

SEQ ID NO: 105910 - RNA, 19 nt, Homo sapiens
  misc_RNA (1)...(19): siRNA sense strand
gaagagagaagugagacaa

SEQ ID NO: 105911 - RNA, 19 nt, Homo sapiens
  misc_RNA (1)...(19): siRNA sense strand
gaagggaucccaggaagug

SEQ ID NO: 105912 - RNA, 19 nt, Homo sapiens
  misc_RNA (1)...(19): siRNA sense strand
aaucacggaugaagaagaa

SEQ ID NO: 105913 - RNA, 19 nt, Homo sapiens
  misc_RNA (1)...(19): siRNA sense strand
caagcauuaugguggauuu

SEQ ID NO: 105914 - RNA, 19 nt, Homo sapiens
  misc_RNA (1)...(19): siRNA sense strand
cugagccuguuucuuauua

SEQ ID NO: 105915 - RNA, 19 nt, Homo sapiens
  misc_RNA (1)...(19): siRNA sense strand
acuaugaacuggucuacaa

SEQ ID NO: 105916 - RNA, 19 nt, Homo sapiens
  misc_RNA (1)...(19): siRNA sense strand
gggcagcuuugaccacuau

SEQ ID NO: 105917 - RNA, 19 nt, Homo sapiens
  misc_RNA (1)...(19): siRNA sense strand
aaugagauaugaaggaguu

SEQ ID NO: 105918 - RNA, 19 nt, Homo sapiens
  misc_RNA (1)...(19): siRNA sense strand
ggaaagaaugagauaugaa

SEQ ID NO: 105919 - RNA, 19 nt, Homo sapiens
  misc_RNA (1)...(19): siRNA sense strand
guaaggcaguuccaguuca

SEQ ID NO: 105920 - RNA, 19 nt, Homo sapiens
  misc_RNA (1)...(19): siRNA sense strand
guagaaggaucugauuaca

SEQ ID NO: 105921 - RNA, 19 nt, Homo sapiens
  misc_RNA (1)...(19): siRNA sense strand
gccaaucuuccauguaaua

SEQ ID NO: 105922 - RNA, 19 nt, Homo sapiens
  misc_RNA (1)...(19): siRNA sense strand
ccacggacucguucaagua

SEQ ID NO: 105923 - RNA, 19 nt, Homo sapiens
  misc_RNA (1)...(19): siRNA sense strand
gcaaaccugucuucauuaa

SEQ ID NO: 105924 - RNA, 19 nt, Homo sapiens
  misc_RNA (1)...(19): siRNA sense strand
cagcaaaccugucuucauu

SEQ ID NO: 105925 - RNA, 19 nt, Homo sapiens
  misc_RNA (1)...(19): siRNA sense strand
gaggagaagucccggguaa

SEQ ID NO: 105926 - RNA, 19 nt, Homo sapiens
  misc_RNA (1)...(19): siRNA sense strand
gagaccaccuacuccguua

SEQ ID NO: 105927 - RNA, 19 nt, Homo sapiens
  misc_RNA (1)...(19): siRNA sense strand
gaccagcacuucacaguca

SEQ ID NO: 105928 - RNA, 19 nt, Homo sapiens
  misc_RNA (1)...(19): siRNA sense strand
gacacccgcuuuacccuua

SEQ ID NO: 105929 - RNA, 19 nt, Homo sapiens
  misc_RNA (1)...(19): siRNA sense strand
caacacagaguacucguuu

SEQ ID NO: 105930 - RNA, 19 nt, Homo sapiens
  misc_RNA (1)...(19): siRNA sense strand
uaagucagcugugcccuuu

SEQ ID NO: 105931 - RNA, 19 nt, Homo sapiens
  misc_RNA (1)...(19): siRNA sense strand
ugacacggcuggaggagaa

SEQ ID NO: 105932 - RNA, 19 nt, Homo sapiens
  misc_RNA (1)...(19): siRNA sense strand
ggagggcucugacuacauc

SEQ ID NO: 105933 - RNA, 19 nt, Homo sapiens
  misc_RNA (1)...(19): siRNA sense strand
ccgaggagcucaccaagga

SEQ ID NO: 105934 - RNA, 19 nt, Homo sapiens
  misc_RNA (1)...(19): siRNA sense strand
gaacuccacugcugugcau

SEQ ID NO: 105935 - RNA, 19 nt, Homo sapiens
  misc_RNA (1)...(19): siRNA sense strand
caucaugcccuacgaauug

SEQ ID NO: 105936 - RNA, 19 nt, Homo sapiens
  misc_RNA (1)...(19): siRNA sense strand
gagcacaauuccaccauca

SEQ ID NO: 105937 - RNA, 19 nt, Homo sapiens
  misc_RNA (1)...(19): siRNA sense strand
cagaaggccuacauagcua

SEQ ID NO: 105938 - RNA, 19 nt, Homo sapiens
  misc_RNA (1)...(19): siRNA sense strand
caacaucgagcgccucaaa

SEQ ID NO: 105939 - RNA, 19 nt, Homo sapiens
  misc_RNA (1)...(19): siRNA sense strand
ccauggagcucgaguucaa

SEQ ID NO: 105940 - RNA, 19 nt, Homo sapiens
  misc_RNA (1)...(19): siRNA sense strand
aaaccugucuucauuaaag

SEQ ID NO: 105941 - RNA, 19 nt, Homo sapiens
  misc_RNA (1)...(19): siRNA sense strand
gcugugcccuuuaagauuc

SEQ ID NO: 105942 - RNA, 19 nt, Homo sapiens
  misc_RNA (1)...(19): siRNA sense strand
gaagccaucuaugagugua

SEQ ID NO: 105943 - RNA, 19 nt, Homo sapiens
  misc_RNA (1)...(19): siRNA sense strand
agaagacgguggacaucua

SEQ ID NO: 105944 - RNA, 19 nt, Homo sapiens
  misc_RNA (1)...(19): siRNA sense strand
gggagugacuacaucaaug

SEQ ID NO: 105945 - RNA, 19 nt, Homo sapiens
  misc_RNA (1)...(19): siRNA sense strand
gcagacagaggaccaguau

SEQ ID NO: 105946 - RNA, 19 nt, Homo sapiens
  misc_RNA (1)...(19): siRNA sense strand
gaacaucaugcccuacgaa

SEQ ID NO: 105947 - RNA, 19 nt, Homo sapiens
  misc_RNA (1)...(19): siRNA sense strand
aagaguggcuccagugaga

SEQ ID NO: 105948 - RNA, 19 nt, Homo sapiens
  misc_RNA (1)...(19): siRNA sense strand
ccacugcugugcaugucua

SEQ ID NO: 105949 - RNA, 19 nt, Homo sapiens
  misc_RNA (1)...(19): siRNA sense strand
ugaccacuaugcaacguaa

SEQ ID NO: 105950 - RNA, 19 nt, Homo sapiens
  misc_RNA (1)...(19): siRNA sense strand
gcagaaggccuacauagcu

SEQ ID NO: 105951 - RNA, 19 nt, Homo sapiens
  misc_RNA (1)...(19): siRNA sense strand
gugccaagcuacaggagaa

SEQ ID NO: 105952 - RNA, 19 nt, Homo sapiens
  misc_RNA (1)...(19): siRNA sense strand
gugaggaguucgagaagga

SEQ ID NO: 105953 - RNA, 19 nt, Homo sapiens
  misc_RNA (1)...(19): siRNA sense strand
ggagaaaugccaccaguac

SEQ ID NO: 105954 - RNA, 19 nt, Homo sapiens
  misc_RNA (1)...(19): siRNA sense strand
agugaaagcucuuccaaag

SEQ ID NO: 105955 - RNA, 19 nt, Homo sapiens
  misc_RNA (1)...(19): siRNA sense strand
cgagaccuguggccuuauu

SEQ ID NO: 105956 - RNA, 19 nt, Homo sapiens
  misc_RNA (1)...(19): siRNA sense strand
ccuuuaagauucuguacaa

SEQ ID NO: 105957 - RNA, 19 nt, Homo sapiens
  misc_RNA (1)...(19): siRNA sense strand
gaccacgucuaccacagaa

SEQ ID NO: 105958 - RNA, 19 nt, Homo sapiens
  misc_RNA (1)...(19): siRNA sense strand
uguaugaacugguguacug

SEQ ID NO: 105959 - RNA, 19 nt, Homo sapiens
  misc_RNA (1)...(19): siRNA sense strand
gcacagccaccaugcuaug

SEQ ID NO: 105960 - RNA, 19 nt, Homo sapiens
  misc_RNA (1)...(19): siRNA sense strand
agacagaggaccaguauca

SEQ ID NO: 105961 - RNA, 19 nt, Homo sapiens
  misc_RNA (1)...(19): siRNA sense strand
gagcggaucaucauguaug

SEQ ID NO: 105962 - RNA, 19 nt, Homo sapiens
  misc_RNA (1)...(19): siRNA sense strand
ucaggugccuugcagauag

SEQ ID NO: 105963 - RNA, 19 nt, Homo sapiens
  misc_RNA (1)...(19): siRNA sense strand
cuacaucaaugccaacuac

SEQ ID NO: 105964 - RNA, 19 nt, Homo sapiens
  misc_RNA (1)...(19): siRNA sense strand
agucagcugugcccuuuaa

SEQ ID NO: 105965 - RNA, 19 nt, Homo sapiens
  misc_RNA (1)...(19): siRNA sense strand
agacaccacuuacgacauc

SEQ ID NO: 105966 - RNA, 19 nt, Homo sapiens
  misc_RNA (1)...(19): siRNA sense strand
gaagacgguggacaucuau

SEQ ID NO: 105967 - RNA, 19 nt, Homo sapiens
  misc_RNA (1)...(19): siRNA sense strand
ucaccgaccuggcggacaa

SEQ ID NO: 105968 - RNA, 19 nt, Homo sapiens
  misc_RNA (1)...(19): siRNA sense strand
gcuucgaggucauugaguu

SEQ ID NO: 105969 - RNA, 19 nt, Homo sapiens
  misc_RNA (1)...(19): siRNA sense strand
gaugggcagucaaggacaa

SEQ ID NO: 105970 - RNA, 19 nt, Homo sapiens
  misc_RNA (1)...(19): siRNA sense strand
caaccuguaugcccacauc

SEQ ID NO: 105971 - RNA, 19 nt, Homo sapiens
  misc_RNA (1)...(19): siRNA sense strand
gcaaggaugaccagcacuu

SEQ ID NO: 105972 - RNA, 19 nt, Homo sapiens
  misc_RNA (1)...(19): siRNA sense strand
gaucacagaggaacuacau

SEQ ID NO: 105973 - RNA, 19 nt, Homo sapiens
  misc_RNA (1)...(19): siRNA sense strand
ggagaauggugugggaaca

SEQ ID NO: 105974 - RNA, 19 nt, Homo sapiens
  misc_RNA (1)...(19): siRNA sense strand
uuaagauucuguacaaugg

SEQ ID NO: 105975 - RNA, 19 nt, Homo sapiens
  misc_RNA (1)...(19): siRNA sense strand
ggacugaccacgucuacca

SEQ ID NO: 105976 - RNA, 19 nt, Homo sapiens
  misc_RNA (1)...(19): siRNA sense strand
ggacuuccuuccuguagac

SEQ ID NO: 105977 - RNA, 19 nt, Homo sapiens
  misc_RNA (1)...(19): siRNA sense strand
ggacaggaugggccuauca

SEQ ID NO: 105978 - RNA, 19 nt, Homo sapiens
  misc_RNA (1)...(19): siRNA sense strand
gcucugcucgcuaccagua

SEQ ID NO: 105979 - RNA, 19 nt, Homo sapiens
  misc_RNA (1)...(19): siRNA sense strand
ugaccaagcuucgggagau

SEQ ID NO: 105980 - RNA, 19 nt, Homo sapiens
  misc_RNA (1)...(19): siRNA sense strand
gcacaauuccaccaucauc

SEQ ID NO: 105981 - RNA, 19 nt, Homo sapiens
  misc_RNA (1)...(19): siRNA sense strand
ggacuucuggcgcaugcua

SEQ ID NO: 105982 - RNA, 19 nt, Homo sapiens
  misc_RNA (1)...(19): siRNA sense strand
cgaauugacccgugugugu

SEQ ID NO: 105983 - RNA, 19 nt, Homo sapiens
  misc_RNA (1)...(19): siRNA sense strand
cgugauugaugccauguug

SEQ ID NO: 105984 - RNA, 19 nt, Homo sapiens
  misc_RNA (1)...(19): siRNA sense strand
aacaggagcugcagaacau

SEQ ID NO: 105985 - RNA, 19 nt, Homo sapiens
  misc_RNA (1)...(19): siRNA sense strand
caacaggagcugcagaaca

SEQ ID NO: 105986 - RNA, 19 nt, Homo sapiens
  misc_RNA (1)...(19): siRNA sense strand
gacccaaccuccuccuaca

SEQ ID NO: 105987 - RNA, 19 nt, Homo sapiens
  misc_RNA (1)...(19): siRNA sense strand
gggcguggucgacauguuu

SEQ ID NO: 105988 - RNA, 19 nt, Homo sapiens
  misc_RNA (1)...(19): siRNA sense strand
gcaagcagaaugccuacau

SEQ ID NO: 105989 - RNA, 19 nt, Homo sapiens
  misc_RNA (1)...(19): siRNA sense strand
cccagaaggugaugugugu

SEQ ID NO: 105990 - RNA, 19 nt, Homo sapiens
  misc_RNA (1)...(19): siRNA sense strand
ggaaauccagacccugaga

SEQ ID NO: 105991 - RNA, 19 nt, Homo sapiens
  misc_RNA (1)...(19): siRNA sense strand
gggauucauugacuucauc

SEQ ID NO: 105992 - RNA, 19 nt, Homo sapiens
  misc_RNA (1)...(19): siRNA sense strand
ucacgugggagaauucaaa

SEQ ID NO: 105993 - RNA, 19 nt, Homo sapiens
  misc_RNA (1)...(19): siRNA sense strand
gaacgucugaagccauaug

SEQ ID NO: 105994 - RNA, 19 nt, Homo sapiens
  misc_RNA (1)...(19): siRNA sense strand
ucaggugguucuacauugu

SEQ ID NO: 105995 - RNA, 19 nt, Homo sapiens
  misc_RNA (1)...(19): siRNA sense strand
gcacuggugaugcuugguu

SEQ ID NO: 105996 - RNA, 19 nt, Homo sapiens
  misc_RNA (1)...(19): siRNA sense strand
cauccaagacgucaugcua

SEQ ID NO: 105997 - RNA, 19 nt, Homo sapiens
  misc_RNA (1)...(19): siRNA sense strand
ugggugagaucaacacuag

SEQ ID NO: 105998 - RNA, 19 nt, Homo sapiens
  misc_RNA (1)...(19): siRNA sense strand
caaggacaauccggcaguu

SEQ ID NO: 105999 - RNA, 19 nt, Homo sapiens
  misc_RNA (1)...(19): siRNA sense strand
ggagcucgaguucaaguug

SEQ ID NO: 106000 - RNA, 19 nt, Homo sapiens
  misc_RNA (1)...(19): siRNA sense strand
caagcagaaugccuacauc

SEQ ID NO: 106001 - RNA, 19 nt, Homo sapiens
  misc_RNA (1)...(19): siRNA sense strand
caacgauggccucaaguuc

SEQ ID NO: 106002 - RNA, 19 nt, Homo sapiens
  misc_RNA (1)...(19): siRNA sense strand
gaaccgcuaugcgaauguc

SEQ ID NO: 106003 - RNA, 19 nt, Homo sapiens
  misc_RNA (1)...(19): siRNA sense strand
ggagaugggcagggagaaa

SEQ ID NO: 106004 - RNA, 19 nt, Homo sapiens
  misc_RNA (1)...(19): siRNA sense strand
gagucauccuuaccucuau

SEQ ID NO: 106005 - RNA, 19 nt, Homo sapiens
  misc_RNA (1)...(19): siRNA sense strand
acccugagauuucuugguu

SEQ ID NO: 106006 - RNA, 19 nt, Homo sapiens
  misc_RNA (1)...(19): siRNA sense strand
cggcagcuuugaccacuau

SEQ ID NO: 106007 - RNA, 19 nt, Homo sapiens
  misc_RNA (1)...(19): siRNA sense strand
gcgagggauucauugacuu

SEQ ID NO: 106008 - RNA, 19 nt, Homo sapiens
  misc_RNA (1)...(19): siRNA sense strand
gguaaaaugugaucaguac

SEQ ID NO: 106009 - RNA, 19 nt, Homo sapiens
  misc_RNA (1)...(19): siRNA sense strand
cgagucauccuuaccucua

SEQ ID NO: 106010 - RNA, 19 nt, Homo sapiens
  misc_RNA (1)...(19): siRNA sense strand
gccugccucugccuacaua

SEQ ID NO: 106011 - RNA, 19 nt, Homo sapiens
  misc_RNA (1)...(19): siRNA sense strand
ggcccaacaccauagauuu

SEQ ID NO: 106012 - RNA, 19 nt, Homo sapiens
  misc_RNA (1)...(19): siRNA sense strand
gcuaccggcugcaguacug

SEQ ID NO: 106013 - RNA, 19 nt, Homo sapiens
  misc_RNA (1)...(19): siRNA sense strand
acucggagccuguaaccua

SEQ ID NO: 106014 - RNA, 19 nt, Homo sapiens
  misc_RNA (1)...(19): siRNA sense strand
gaggaugagaugccaguug

SEQ ID NO: 106015 - RNA, 19 nt, Homo sapiens
  misc_RNA (1)...(19): siRNA sense strand
uuccaaagccuccgauuga

SEQ ID NO: 106016 - RNA, 19 nt, Homo sapiens
  misc_RNA (1)...(19): siRNA sense strand
ggaguaccucggcagcuuu

SEQ ID NO: 106017 - RNA, 19 nt, Homo sapiens
  misc_RNA (1)...(19): siRNA sense strand
gacaggcgagggauucauu

SEQ ID NO: 106018 - RNA, 19 nt, Homo sapiens
  misc_RNA (1)...(19): siRNA sense strand
ggugagaucaacacuagug

SEQ ID NO: 106019 - RNA, 19 nt, Homo sapiens
  misc_RNA (1)...(19): siRNA sense strand
gucaggugguucuacauug

SEQ ID NO: 106020 - RNA, 19 nt, Homo sapiens
  misc_RNA (1)...(19): siRNA sense strand
gguggcggcugcaaugaag

SEQ ID NO: 106021 - RNA, 19 nt, Homo sapiens
  misc_RNA (1)...(19): siRNA sense strand
uaccaguacuuuguuguug

SEQ ID NO: 106022 - RNA, 19 nt, Homo sapiens
  misc_RNA (1)...(19): siRNA sense strand
ugaagacccugcguacaca

SEQ ID NO: 106023 - RNA, 19 nt, Homo sapiens
  misc_RNA (1)...(19): siRNA sense strand
gcaaaccugucuucauuaa

SEQ ID NO: 106024 - RNA, 19 nt, Homo sapiens
  misc_RNA (1)...(19): siRNA sense strand
cagcaaaccugucuucauu

SEQ ID NO: 106025 - RNA, 19 nt, Homo sapiens
  misc_RNA (1)...(19): siRNA sense strand
gaggagaagucccggguaa

SEQ ID NO: 106026 - RNA, 19 nt, Homo sapiens
  misc_RNA (1)...(19): siRNA sense strand
gagaccaccuacuccguua

SEQ ID NO: 106027 - RNA, 19 nt, Homo sapiens
  misc_RNA (1)...(19): siRNA sense strand
gaccagcacuucacaguca

SEQ ID NO: 106028 - RNA, 19 nt, Homo sapiens
  misc_RNA (1)...(19): siRNA sense strand
gacacccgcuuuacccuua

SEQ ID NO: 106029 - RNA, 19 nt, Homo sapiens
  misc_RNA (1)...(19): siRNA sense strand
caacacagaguacucguuu

SEQ ID NO: 106030 - RNA, 19 nt, Homo sapiens
  misc_RNA (1)...(19): siRNA sense strand
uaagucagcugugcccuuu

SEQ ID NO: 106031 - RNA, 19 nt, Homo sapiens
  misc_RNA (1)...(19): siRNA sense strand
ugacacggcuggaggagaa

SEQ ID NO: 106032 - RNA, 19 nt, Homo sapiens
  misc_RNA (1)...(19): siRNA sense strand
ggagggcucugacuacauc

SEQ ID NO: 106033 - RNA, 19 nt, Homo sapiens
  misc_RNA (1)...(19): siRNA sense strand
ccgaggagcucaccaagga

SEQ ID NO: 106034 - RNA, 19 nt, Homo sapiens
  misc_RNA (1)...(19): siRNA sense strand
gaacuccacugcugugcau

SEQ ID NO: 106035 - RNA, 19 nt, Homo sapiens
  misc_RNA (1)...(19): siRNA sense strand
caucaugcccuacgaauug

SEQ ID NO: 106036 - RNA, 19 nt, Homo sapiens
  misc_RNA (1)...(19): siRNA sense strand
gagcacaauuccaccauca

SEQ ID NO: 106037 - RNA, 19 nt, Homo sapiens
  misc_RNA (1)...(19): siRNA sense strand
cagaaggccuacauagcua

SEQ ID NO: 106038 - RNA, 19 nt, Homo sapiens
  misc_RNA (1)...(19): siRNA sense strand
caacaucgagcgccucaaa

SEQ ID NO: 106039 - RNA, 19 nt, Homo sapiens
  misc_RNA (1)...(19): siRNA sense strand
ccauggagcucgaguucaa

SEQ ID NO: 106040 - RNA, 19 nt, Homo sapiens
  misc_RNA (1)...(19): siRNA sense strand
aaaccugucuucauuaaag

SEQ ID NO: 106041 - RNA, 19 nt, Homo sapiens
  misc_RNA (1)...(19): siRNA sense strand
gcugugcccuuuaagauuc

SEQ ID NO: 106042 - RNA, 19 nt, Homo sapiens
  misc_RNA (1)...(19): siRNA sense strand
gaagccaucuaugagugua

SEQ ID NO: 106043 - RNA, 19 nt, Homo sapiens
  misc_RNA (1)...(19): siRNA sense strand
agaagacgguggacaucua

SEQ ID NO: 106044 - RNA, 19 nt, Homo sapiens
  misc_RNA (1)...(19): siRNA sense strand
gggagugacuacaucaaug

SEQ ID NO: 106045 - RNA, 19 nt, Homo sapiens
  misc_RNA (1)...(19): siRNA sense strand
gcagacagaggaccaguau

SEQ ID NO: 106046 - RNA, 19 nt, Homo sapiens
  misc_RNA (1)...(19): siRNA sense strand
gaacaucaugcccuacgaa

SEQ ID NO: 106047 - RNA, 19 nt, Homo sapiens
  misc_RNA (1)...(19): siRNA sense strand
aagaguggcuccagugaga

SEQ ID NO: 106048 - RNA, 19 nt, Homo sapiens
  misc_RNA (1)...(19): siRNA sense strand
ccacugcugugcaugucua

SEQ ID NO: 106049 - RNA, 19 nt, Homo sapiens
  misc_RNA (1)...(19): siRNA sense strand
ugaccacuaugcaacguaa

SEQ ID NO: 106050 - RNA, 19 nt, Homo sapiens
  misc_RNA (1)...(19): siRNA sense strand
gcagaaggccuacauagcu

SEQ ID NO: 106051 - RNA, 19 nt, Homo sapiens
  misc_RNA (1)...(19): siRNA sense strand
gugccaagcuacaggagaa

SEQ ID NO: 106052 - RNA, 19 nt, Homo sapiens
  misc_RNA (1)...(19): siRNA sense strand
gugaggaguucgagaagga

SEQ ID NO: 106053 - RNA, 19 nt, Homo sapiens
  misc_RNA (1)...(19): siRNA sense strand
ggagaaaugccaccaguac

SEQ ID NO: 106054 - RNA, 19 nt, Homo sapiens
  misc_RNA (1)...(19): siRNA sense strand
agugaaagcucuuccaaag

SEQ ID NO: 106055 - RNA, 19 nt, Homo sapiens
  misc_RNA (1)...(19): siRNA sense strand
cgagaccuguggccuuauu

SEQ ID NO: 106056 - RNA, 19 nt, Homo sapiens
  misc_RNA (1)...(19): siRNA sense strand
ccuuuaagauucuguacaa

SEQ ID NO: 106057 - RNA, 19 nt, Homo sapiens
  misc_RNA (1)...(19): siRNA sense strand
gaccacgucuaccacagaa

SEQ ID NO: 106058 - RNA, 19 nt, Homo sapiens
  misc_RNA (1)...(19): siRNA sense strand
uguaugaacugguguacug

SEQ ID NO: 106059 - RNA, 19 nt, Homo sapiens
  misc_RNA (1)...(19): siRNA sense strand
gcacagccaccaugcuaug

SEQ ID NO: 106060 - RNA, 19 nt, Homo sapiens
  misc_RNA (1)...(19): siRNA sense strand
agacagaggaccaguauca

SEQ ID NO: 106061 - RNA, 19 nt, Homo sapiens
  misc_RNA (1)...(19): siRNA sense strand
gagcggaucaucauguaug

SEQ ID NO: 106062 - RNA, 19 nt, Homo sapiens
  misc_RNA (1)...(19): siRNA sense strand
ucaggugccuugcagauag

SEQ ID NO: 106063 - RNA, 19 nt, Homo sapiens
  misc_RNA (1)...(19): siRNA sense strand
cuacaucaaugccaacuac

SEQ ID NO: 106064 - RNA, 19 nt, Homo sapiens
  misc_RNA (1)...(19): siRNA sense strand
agucagcugugcccuuuaa

SEQ ID NO: 106065 - RNA, 19 nt, Homo sapiens
  misc_RNA (1)...(19): siRNA sense strand
agacaccacuuacgacauc

SEQ ID NO: 106066 - RNA, 19 nt, Homo sapiens
  misc_RNA (1)...(19): siRNA sense strand
gaagacgguggacaucuau

SEQ ID NO: 106067 - RNA, 19 nt, Homo sapiens
  misc_RNA (1)...(19): siRNA sense strand
ucaccgaccuggcggacaa

SEQ ID NO: 106068 - RNA, 19 nt, Homo sapiens
  misc_RNA (1)...(19): siRNA sense strand
gcuucgaggucauugaguu

SEQ ID NO: 106069 - RNA, 19 nt, Homo sapiens
  misc_RNA (1)...(19): siRNA sense strand
gaugggcagucaaggacaa

SEQ ID NO: 106070 - RNA, 19 nt, Homo sapiens
  misc_RNA (1)...(19): siRNA sense strand
caaccuguaugcccacauc

SEQ ID NO: 106071 - RNA, 19 nt, Homo sapiens
  misc_RNA (1)...(19): siRNA sense strand
gcaaggaugaccagcacuu

SEQ ID NO: 106072 - RNA, 19 nt, Homo sapiens
  misc_RNA (1)...(19): siRNA sense strand
gaucacagaggaacuacau

SEQ ID NO: 106073 - RNA, 19 nt, Homo sapiens
  misc_RNA (1)...(19): siRNA sense strand
ggagaauggugugggaaca

SEQ ID NO: 106074 - RNA, 19 nt, Homo sapiens
  misc_RNA (1)...(19): siRNA sense strand
uuaagauucuguacaaugg

SEQ ID NO: 106075 - RNA, 19 nt, Homo sapiens
  misc_RNA (1)...(19): siRNA sense strand
ggacugaccacgucuacca

SEQ ID NO: 106076 - RNA, 19 nt, Homo sapiens
  misc_RNA (1)...(19): siRNA sense strand
ggacuuccuuccuguagac

SEQ ID NO: 106077 - RNA, 19 nt, Homo sapiens
  misc_RNA (1)...(19): siRNA sense strand
ggacaggaugggccuauca

SEQ ID NO: 106078 - RNA, 19 nt, Homo sapiens
  misc_RNA (1)...(19): siRNA sense strand
gcucugcucgcuaccagua

SEQ ID NO: 106079 - RNA, 19 nt, Homo sapiens
  misc_RNA (1)...(19): siRNA sense strand
ugaccaagcuucgggagau

SEQ ID NO: 106080 - RNA, 19 nt, Homo sapiens
  misc_RNA (1)...(19): siRNA sense strand
gcacaauuccaccaucauc

SEQ ID NO: 106081 - RNA, 19 nt, Homo sapiens
  misc_RNA (1)...(19): siRNA sense strand
ggacuucuggcgcaugcua

SEQ ID NO: 106082 - RNA, 19 nt, Homo sapiens
  misc_RNA (1)...(19): siRNA sense strand
cgaauugacccgugugugu

SEQ ID NO: 106083 - RNA, 19 nt, Homo sapiens
  misc_RNA (1)...(19): siRNA sense strand
cgugauugaugccauguug

SEQ ID NO: 106084 - RNA, 19 nt, Homo sapiens
  misc_RNA (1)...(19): siRNA sense strand
aacaggagcugcagaacau

SEQ ID NO: 106085 - RNA, 19 nt, Homo sapiens
  misc_RNA (1)...(19): siRNA sense strand
caacaggagcugcagaaca

SEQ ID NO: 106086 - RNA, 19 nt, Homo sapiens
  misc_RNA (1)...(19): siRNA sense strand
gacccaaccuccuccuaca

SEQ ID NO: 106087 - RNA, 19 nt, Homo sapiens
  misc_RNA (1)...(19): siRNA sense strand
gggcguggucgacauguuu

SEQ ID NO: 106088 - RNA, 19 nt, Homo sapiens
  misc_RNA (1)...(19): siRNA sense strand
gcaagcagaaugccuacau

SEQ ID NO: 106089 - RNA, 19 nt, Homo sapiens
  misc_RNA (1)...(19): siRNA sense strand
cccagaaggugaugugugu

SEQ ID NO: 106090 - RNA, 19 nt, Homo sapiens
  misc_RNA (1)...(19): siRNA sense strand
ggaaauccagacccugaga

SEQ ID NO: 106091 - RNA, 19 nt, Homo sapiens
  misc_RNA (1)...(19): siRNA sense strand
gggauucauugacuucauc

SEQ ID NO: 106092 - RNA, 19 nt, Homo sapiens
  misc_RNA (1)...(19): siRNA sense strand
ucacgugggagaauucaaa

SEQ ID NO: 106093 - RNA, 19 nt, Homo sapiens
  misc_RNA (1)...(19): siRNA sense strand
gaacgucugaagccauaug

SEQ ID NO: 106094 - RNA, 19 nt, Homo sapiens
  misc_RNA (1)...(19): siRNA sense strand
ucaggugguucuacauugu

SEQ ID NO: 106095 - RNA, 19 nt, Homo sapiens
  misc_RNA (1)...(19): siRNA sense strand
gcacuggugaugcuugguu

SEQ ID NO: 106096 - RNA, 19 nt, Homo sapiens
  misc_RNA (1)...(19): siRNA sense strand
cauccaagacgucaugcua

SEQ ID NO: 106097 - RNA, 19 nt, Homo sapiens
  misc_RNA (1)...(19): siRNA sense strand
ugggugagaucaacacuag

SEQ ID NO: 106098 - RNA, 19 nt, Homo sapiens
  misc_RNA (1)...(19): siRNA sense strand
caaggacaauccggcaguu

SEQ ID NO: 106099 - RNA, 19 nt, Homo sapiens
  misc_RNA (1)...(19): siRNA sense strand
ggagcucgaguucaaguug

SEQ ID NO: 106100 - RNA, 19 nt, Homo sapiens
  misc_RNA (1)...(19): siRNA sense strand
caagcagaaugccuacauc

SEQ ID NO: 106101 - RNA, 19 nt, Homo sapiens
  misc_RNA (1)...(19): siRNA sense strand
caacgauggccucaaguuc

SEQ ID NO: 106102 - RNA, 19 nt, Homo sapiens
  misc_RNA (1)...(19): siRNA sense strand
gaaccgcuaugcgaauguc

SEQ ID NO: 106103 - RNA, 19 nt, Homo sapiens
  misc_RNA (1)...(19): siRNA sense strand
ggagaugggcagggagaaa

SEQ ID NO: 106104 - RNA, 19 nt, Homo sapiens
  misc_RNA (1)...(19): siRNA sense strand
gagucauccuuaccucuau

SEQ ID NO: 106105 - RNA, 19 nt, Homo sapiens
  misc_RNA (1)...(19): siRNA sense strand
acccugagauuucuugguu

SEQ ID NO: 106106 - RNA, 19 nt, Homo sapiens
  misc_RNA (1)...(19): siRNA sense strand
cggcagcuuugaccacuau

SEQ ID NO: 106107 - RNA, 19 nt, Homo sapiens
  misc_RNA (1)...(19): siRNA sense strand
gcgagggauucauugacuu

SEQ ID NO: 106108 - RNA, 19 nt, Homo sapiens
  misc_RNA (1)...(19): siRNA sense strand
gguaaaaugugaucaguac

SEQ ID NO: 106109 - RNA, 19 nt, Homo sapiens
  misc_RNA (1)...(19): siRNA sense strand
cgagucauccuuaccucua

SEQ ID NO: 106110 - RNA, 19 nt, Homo sapiens
  misc_RNA (1)...(19): siRNA sense strand
gccugccucugccuacaua

SEQ ID NO: 106111 - RNA, 19 nt, Homo sapiens
  misc_RNA (1)...(19): siRNA sense strand
ggcccaacaccauagauuu

SEQ ID NO: 106112 - RNA, 19 nt, Homo sapiens
  misc_RNA (1)...(19): siRNA sense strand
gcuaccggcugcaguacug

SEQ ID NO: 106113 - RNA, 19 nt, Homo sapiens
  misc_RNA (1)...(19): siRNA sense strand
acucggagccuguaaccua

SEQ ID NO: 106114 - RNA, 19 nt, Homo sapiens
  misc_RNA (1)...(19): siRNA sense strand
gaggaugagaugccaguug

SEQ ID NO: 106115 - RNA, 19 nt, Homo sapiens
  misc_RNA (1)...(19): siRNA sense strand
uuccaaagccuccgauuga

SEQ ID NO: 106116 - RNA, 19 nt, Homo sapiens
  misc_RNA (1)...(19): siRNA sense strand
ggaguaccucggcagcuuu

SEQ ID NO: 106117 - RNA, 19 nt, Homo sapiens
  misc_RNA (1)...(19): siRNA sense strand
gacaggcgagggauucauu

SEQ ID NO: 106118 - RNA, 19 nt, Homo sapiens
  misc_RNA (1)...(19): siRNA sense strand
ggugagaucaacacuagug

SEQ ID NO: 106119 - RNA, 19 nt, Homo sapiens
  misc_RNA (1)...(19): siRNA sense strand
gucaggugguucuacauug

SEQ ID NO: 106120 - RNA, 19 nt, Homo sapiens
  misc_RNA (1)...(19): siRNA sense strand
gguggcggcugcaaugaag

SEQ ID NO: 106121 - RNA, 19 nt, Homo sapiens
  misc_RNA (1)...(19): siRNA sense strand
uaccaguacuuuguuguug

SEQ ID NO: 106122 - RNA, 19 nt, Homo sapiens
  misc_RNA (1)...(19): siRNA sense strand
ugaagacccugcguacaca

SEQ ID NO: 106123 - RNA, 19 nt, Homo sapiens
  misc_RNA (1)...(19): siRNA sense strand
gaacggaagucacguauuu

SEQ ID NO: 106124 - RNA, 19 nt, Homo sapiens
  misc_RNA (1)...(19): siRNA sense strand
ggaaagaaucgcuauaaua

SEQ ID NO: 106125 - RNA, 19 nt, Homo sapiens
  misc_RNA (1)...(19): siRNA sense strand
gaacacaacugcaaugaca

SEQ ID NO: 106126 - RNA, 19 nt, Homo sapiens
  misc_RNA (1)...(19): siRNA sense strand
ggaaagaugcaaagaauaa

SEQ ID NO: 106127 - RNA, 19 nt, Homo sapiens
  misc_RNA (1)...(19): siRNA sense strand
ggagaucuuugcacaagua

SEQ ID NO: 106128 - RNA, 19 nt, Homo sapiens
  misc_RNA (1)...(19): siRNA sense strand
gaggaaagaugcaaagaau

SEQ ID NO: 106129 - RNA, 19 nt, Homo sapiens
  misc_RNA (1)...(19): siRNA sense strand
gaaauaaccaccaaccaaa

SEQ ID NO: 106130 - RNA, 19 nt, Homo sapiens
  misc_RNA (1)...(19): siRNA sense strand
gaagucacguauuugaauu

SEQ ID NO: 106131 - RNA, 19 nt, Homo sapiens
  misc_RNA (1)...(19): siRNA sense strand
ggagggagcuggcaauucu

SEQ ID NO: 106132 - RNA, 19 nt, Homo sapiens
  misc_RNA (1)...(19): siRNA sense strand
ggagacagauucuuccaau

SEQ ID NO: 106133 - RNA, 19 nt, Homo sapiens
  misc_RNA (1)...(19): siRNA sense strand
caacugcaaugacaaucua

SEQ ID NO: 106134 - RNA, 19 nt, Homo sapiens
  misc_RNA (1)...(19): siRNA sense strand
cugcagauguccugaaaua

SEQ ID NO: 106135 - RNA, 19 nt, Homo sapiens
  misc_RNA (1)...(19): siRNA sense strand
gaucuuaucuaccagaaca

SEQ ID NO: 106136 - RNA, 19 nt, Homo sapiens
  misc_RNA (1)...(19): siRNA sense strand
gcacuuucauugccauuga

SEQ ID NO: 106137 - RNA, 19 nt, Homo sapiens
  misc_RNA (1)...(19): siRNA sense strand
gcaaugacaaucuaugaaa

SEQ ID NO: 106138 - RNA, 19 nt, Homo sapiens
  misc_RNA (1)...(19): siRNA sense strand
gagcagccaugaugcagaa

SEQ ID NO: 106139 - RNA, 19 nt, Homo sapiens
  misc_RNA (1)...(19): siRNA sense strand
gaacagggaagaaccaaau

SEQ ID NO: 106140 - RNA, 19 nt, Homo sapiens
  misc_RNA (1)...(19): siRNA sense strand
ugacauaccucauaagaac

SEQ ID NO: 106141 - RNA, 19 nt, Homo sapiens
  misc_RNA (1)...(19): siRNA sense strand
ccaaugugaucuuaacuug

SEQ ID NO: 106142 - RNA, 19 nt, Homo sapiens
  misc_RNA (1)...(19): siRNA sense strand
gcagaauccuuucauaaac

SEQ ID NO: 106143 - RNA, 19 nt, Homo sapiens
  misc_RNA (1)...(19): siRNA sense strand
gagaagacaauuacuguug

SEQ ID NO: 106144 - RNA, 19 nt, Homo sapiens
  misc_RNA (1)...(19): siRNA sense strand
gaggaaagaaucgcuauaa

SEQ ID NO: 106145 - RNA, 19 nt, Homo sapiens
  misc_RNA (1)...(19): siRNA sense strand
ccgaguaugucuaccauuu

SEQ ID NO: 106146 - RNA, 19 nt, Homo sapiens
  misc_RNA (1)...(19): siRNA sense strand
gacaaaugcuauucagguu

SEQ ID NO: 106147 - RNA, 19 nt, Homo sapiens
  misc_RNA (1)...(19): siRNA sense strand
caaagccuaugcugucauu

SEQ ID NO: 106148 - RNA, 19 nt, Homo sapiens
  misc_RNA (1)...(19): siRNA sense strand
gauacaaugccaccguuua

SEQ ID NO: 106149 - RNA, 19 nt, Homo sapiens
  misc_RNA (1)...(19): siRNA sense strand
gaauggcacugaguauaga

SEQ ID NO: 106150 - RNA, 19 nt, Homo sapiens
  misc_RNA (1)...(19): siRNA sense strand
agacauaacuguggcaaug

SEQ ID NO: 106151 - RNA, 19 nt, Homo sapiens
  misc_RNA (1)...(19): siRNA sense strand
gaucagcaguacagcagaa

SEQ ID NO: 106152 - RNA, 19 nt, Homo sapiens
  misc_RNA (1)...(19): siRNA sense strand
uguaugggauuguguauga

SEQ ID NO: 106153 - RNA, 19 nt, Homo sapiens
  misc_RNA (1)...(19): siRNA sense strand
gagaauagaggaaagaauc

SEQ ID NO: 106154 - RNA, 19 nt, Homo sapiens
  misc_RNA (1)...(19): siRNA sense strand
gagaauggcacugaguaua

SEQ ID NO: 106155 - RNA, 19 nt, Homo sapiens
  misc_RNA (1)...(19): siRNA sense strand
ccagauggauccccuaaua

SEQ ID NO: 106156 - RNA, 19 nt, Homo sapiens
  misc_RNA (1)...(19): siRNA sense strand
ggagaaagaagaggaaaga

SEQ ID NO: 106157 - RNA, 19 nt, Homo sapiens
  misc_RNA (1)...(19): siRNA sense strand
ugacggugcuuccgaguau

SEQ ID NO: 106158 - RNA, 19 nt, Homo sapiens
  misc_RNA (1)...(19): siRNA sense strand
gaaccaaaugugaggagua

SEQ ID NO: 106159 - RNA, 19 nt, Homo sapiens
  misc_RNA (1)...(19): siRNA sense strand
uaaucagaguggagaauuu

SEQ ID NO: 106160 - RNA, 19 nt, Homo sapiens
  misc_RNA (1)...(19): siRNA sense strand
gcagauguccugaaauaca

SEQ ID NO: 106161 - RNA, 19 nt, Homo sapiens
  misc_RNA (1)...(19): siRNA sense strand
ggaagucacguauuugaau

SEQ ID NO: 106162 - RNA, 19 nt, Homo sapiens
  misc_RNA (1)...(19): siRNA sense strand
ugucuaccauuuagucaua

SEQ ID NO: 106163 - RNA, 19 nt, Homo sapiens
  misc_RNA (1)...(19): siRNA sense strand
aagaacaccugaacaagga

SEQ ID NO: 106164 - RNA, 19 nt, Homo sapiens
  misc_RNA (1)...(19): siRNA sense strand
cagcagaauccuuucauaa

SEQ ID NO: 106165 - RNA, 19 nt, Homo sapiens
  misc_RNA (1)...(19): siRNA sense strand
caucaaccaugguguaaca

SEQ ID NO: 106166 - RNA, 19 nt, Homo sapiens
  misc_RNA (1)...(19): siRNA sense strand
ggagaucccagagucauaa

SEQ ID NO: 106167 - RNA, 19 nt, Homo sapiens
  misc_RNA (1)...(19): siRNA sense strand
guucugcccuaugauauuu

SEQ ID NO: 106168 - RNA, 19 nt, Homo sapiens
  misc_RNA (1)...(19): siRNA sense strand
ggccggaagucauucugua

SEQ ID NO: 106169 - RNA, 19 nt, Homo sapiens
  misc_RNA (1)...(19): siRNA sense strand
gaguaugucuaccauuuag

SEQ ID NO: 106170 - RNA, 19 nt, Homo sapiens
  misc_RNA (1)...(19): siRNA sense strand
ggaaccaaguauugcuuug

SEQ ID NO: 106171 - RNA, 19 nt, Homo sapiens
  misc_RNA (1)...(19): siRNA sense strand
caacgauaguuuaagaaca

SEQ ID NO: 106172 - RNA, 19 nt, Homo sapiens
  misc_RNA (1)...(19): siRNA sense strand
gcagacagaggaccaguau

SEQ ID NO: 106173 - RNA, 19 nt, Homo sapiens
  misc_RNA (1)...(19): siRNA sense strand
gaaguguccuuuucucaaa

SEQ ID NO: 106174 - RNA, 19 nt, Homo sapiens
  misc_RNA (1)...(19): siRNA sense strand
cagcaacgcaacacaagua

SEQ ID NO: 106175 - RNA, 19 nt, Homo sapiens
  misc_RNA (1)...(19): siRNA sense strand
caccacagcagcaacuuua

SEQ ID NO: 106176 - RNA, 19 nt, Homo sapiens
  misc_RNA (1)...(19): siRNA sense strand
cuccaucacuccaggaaua

SEQ ID NO: 106177 - RNA, 19 nt, Homo sapiens
  misc_RNA (1)...(19): siRNA sense strand
caaccaugguguaacauca

SEQ ID NO: 106178 - RNA, 19 nt, Homo sapiens
  misc_RNA (1)...(19): siRNA sense strand
caaccaaugugaucuuaac

SEQ ID NO: 106179 - RNA, 19 nt, Homo sapiens
  misc_RNA (1)...(19): siRNA sense strand
ggcaaugacaucagaaauu

SEQ ID NO: 106180 - RNA, 19 nt, Homo sapiens
  misc_RNA (1)...(19): siRNA sense strand
caagcaggcucaggacuau

SEQ ID NO: 106181 - RNA, 19 nt, Homo sapiens
  misc_RNA (1)...(19): siRNA sense strand
ccaaaugugaggaguauug

SEQ ID NO: 106182 - RNA, 19 nt, Homo sapiens
  misc_RNA (1)...(19): siRNA sense strand
gaaauugacguugggaaug

SEQ ID NO: 106183 - RNA, 19 nt, Homo sapiens
  misc_RNA (1)...(19): siRNA sense strand
cagaauccuuucauaaaca

SEQ ID NO: 106184 - RNA, 19 nt, Homo sapiens
  misc_RNA (1)...(19): siRNA sense strand
caccaucucuccagaagug

SEQ ID NO: 106185 - RNA, 19 nt, Homo sapiens
  misc_RNA (1)...(19): siRNA sense strand
ccacaagccugacccugau

SEQ ID NO: 106186 - RNA, 19 nt, Homo sapiens
  misc_RNA (1)...(19): siRNA sense strand
ccauagaguucaggacaaa

SEQ ID NO: 106187 - RNA, 19 nt, Homo sapiens
  misc_RNA (1)...(19): siRNA sense strand
caauuacuguugugcauca

SEQ ID NO: 106188 - RNA, 19 nt, Homo sapiens
  misc_RNA (1)...(19): siRNA sense strand
auaauguucugcccuauga

SEQ ID NO: 106189 - RNA, 19 nt, Homo sapiens
  misc_RNA (1)...(19): siRNA sense strand
gaagaucugaagcuuguug

SEQ ID NO: 106190 - RNA, 19 nt, Homo sapiens
  misc_RNA (1)...(19): siRNA sense strand
gagcuugucugaaguuuug

SEQ ID NO: 106191 - RNA, 19 nt, Homo sapiens
  misc_RNA (1)...(19): siRNA sense strand
gaauaggcaaugagacuug

SEQ ID NO: 106192 - RNA, 19 nt, Homo sapiens
  misc_RNA (1)...(19): siRNA sense strand
gaugcagaaucauuucaga

SEQ ID NO: 106193 - RNA, 19 nt, Homo sapiens
  misc_RNA (1)...(19): siRNA sense strand
guacagauccugcguccau

SEQ ID NO: 106194 - RNA, 19 nt, Homo sapiens
  misc_RNA (1)...(19): siRNA sense strand
gaaccaaguauugcuuuga

SEQ ID NO: 106195 - RNA, 19 nt, Homo sapiens
  misc_RNA (1)...(19): siRNA sense strand
aaugugaucuuaacuugga

SEQ ID NO: 106196 - RNA, 19 nt, Homo sapiens
  misc_RNA (1)...(19): siRNA sense strand
ccagaaagacucaaaagua

SEQ ID NO: 106197 - RNA, 19 nt, Homo sapiens
  misc_RNA (1)...(19): siRNA sense strand
gcagaguccucccgaaucg

SEQ ID NO: 106198 - RNA, 19 nt, Homo sapiens
  misc_RNA (1)...(19): siRNA sense strand
aaauugacguugggaauga

SEQ ID NO: 106199 - RNA, 19 nt, Homo sapiens
  misc_RNA (1)...(19): siRNA sense strand
ccuacugccuucuuauuga

SEQ ID NO: 106200 - RNA, 19 nt, Homo sapiens
  misc_RNA (1)...(19): siRNA sense strand
caaaugcuauucagguuuu

SEQ ID NO: 106201 - RNA, 19 nt, Homo sapiens
  misc_RNA (1)...(19): siRNA sense strand
auuaauaccuggcucauca

SEQ ID NO: 106202 - RNA, 19 nt, Homo sapiens
  misc_RNA (1)...(19): siRNA sense strand
acagcagaauccuuucaua

SEQ ID NO: 106203 - RNA, 19 nt, Homo sapiens
  misc_RNA (1)...(19): siRNA sense strand
gaaaagggacguucucaga

SEQ ID NO: 106204 - RNA, 19 nt, Homo sapiens
  misc_RNA (1)...(19): siRNA sense strand
ucauauguauucuccauca

SEQ ID NO: 106205 - RNA, 19 nt, Homo sapiens
  misc_RNA (1)...(19): siRNA sense strand
gaaauuguucuuccggaau

SEQ ID NO: 106206 - RNA, 19 nt, Homo sapiens
  misc_RNA (1)...(19): siRNA sense strand
gaccuuuaccgaacacuuu

SEQ ID NO: 106207 - RNA, 19 nt, Homo sapiens
  misc_RNA (1)...(19): siRNA sense strand
gcagaacuggcugagaaua

SEQ ID NO: 106208 - RNA, 19 nt, Homo sapiens
  misc_RNA (1)...(19): siRNA sense strand
acgaagaucugaagcuugu

SEQ ID NO: 106209 - RNA, 19 nt, Homo sapiens
  misc_RNA (1)...(19): siRNA sense strand
ugaaauaguuccaaaagga

SEQ ID NO: 106210 - RNA, 19 nt, Homo sapiens
  misc_RNA (1)...(19): siRNA sense strand
uaucauugguggcuuguuc

SEQ ID NO: 106211 - RNA, 19 nt, Homo sapiens
  misc_RNA (1)...(19): siRNA sense strand
caacccguaucuucuacaa

SEQ ID NO: 106212 - RNA, 19 nt, Homo sapiens
  misc_RNA (1)...(19): siRNA sense strand
acucaagacucaagacuuc

SEQ ID NO: 106213 - RNA, 19 nt, Homo sapiens
  misc_RNA (1)...(19): siRNA sense strand
cgaguaugucuaccauuua

SEQ ID NO: 106214 - RNA, 19 nt, Homo sapiens
  misc_RNA (1)...(19): siRNA sense strand
ggaaggacgggcacuuuca

SEQ ID NO: 106215 - RNA, 19 nt, Homo sapiens
  misc_RNA (1)...(19): siRNA sense strand
cuacaucaaugccaacuac

SEQ ID NO: 106216 - RNA, 19 nt, Homo sapiens
  misc_RNA (1)...(19): siRNA sense strand
ggauccaggugucaucugu

SEQ ID NO: 106217 - RNA, 19 nt, Homo sapiens
  misc_RNA (1)...(19): siRNA sense strand
ccagcgacuucauauguau

SEQ ID NO: 106218 - RNA, 19 nt, Homo sapiens
  misc_RNA (1)...(19): siRNA sense strand
agacagaggaccaguaugu

SEQ ID NO: 106219 - RNA, 19 nt, Homo sapiens
  misc_RNA (1)...(19): siRNA sense strand
guauaugccaucauuaugu

SEQ ID NO: 106220 - RNA, 19 nt, Homo sapiens
  misc_RNA (1)...(19): siRNA sense strand
uaugauauuucccguguca

SEQ ID NO: 106221 - RNA, 19 nt, Homo sapiens
  misc_RNA (1)...(19): siRNA sense strand
ggaauacgaagaucugaag

SEQ ID NO: 106222 - RNA, 19 nt, Homo sapiens
  misc_RNA (1)...(19): siRNA sense strand
ccaagcaggcucaggacua

SEQ ID NO: 106223 - RNA, 19 nt, Homo sapiens
  misc_RNA (1)...(19): siRNA sense strand
caacauaacuuuaguccaa

SEQ ID NO: 106224 - RNA, 19 nt, Homo sapiens
  misc_RNA (1)...(19): siRNA sense strand
ggagauuaguguaugauua

SEQ ID NO: 106225 - RNA, 19 nt, Homo sapiens
  misc_RNA (1)...(19): siRNA sense strand
gaacgacacucacugcauu

SEQ ID NO: 106226 - RNA, 19 nt, Homo sapiens
  misc_RNA (1)...(19): siRNA sense strand
ccaaagacauuaaagauug

SEQ ID NO: 106227 - RNA, 19 nt, Homo sapiens
  misc_RNA (1)...(19): siRNA sense strand
gagaucagcuauagcagua

SEQ ID NO: 106228 - RNA, 19 nt, Homo sapiens
  misc_RNA (1)...(19): siRNA sense strand
uaucucagcuccaacuuua

SEQ ID NO: 106229 - RNA, 19 nt, Homo sapiens
  misc_RNA (1)...(19): siRNA sense strand
gaaguagaguaccgaauga

SEQ ID NO: 106230 - RNA, 19 nt, Homo sapiens
  misc_RNA (1)...(19): siRNA sense strand
gaaacugccaccacaauaa

SEQ ID NO: 106231 - RNA, 19 nt, Homo sapiens
  misc_RNA (1)...(19): siRNA sense strand
gaauguaugucuuguucaa

SEQ ID NO: 106232 - RNA, 19 nt, Homo sapiens
  misc_RNA (1)...(19): siRNA sense strand
ugaaauccgugaaguuaaa

SEQ ID NO: 106233 - RNA, 19 nt, Homo sapiens
  misc_RNA (1)...(19): siRNA sense strand
uaaaggaccucuugccaau

SEQ ID NO: 106234 - RNA, 19 nt, Homo sapiens
  misc_RNA (1)...(19): siRNA sense strand
gcaauaccguuucugcuau

SEQ ID NO: 106235 - RNA, 19 nt, Homo sapiens
  misc_RNA (1)...(19): siRNA sense strand
gauaugcaaucuaacaaga

SEQ ID NO: 106236 - RNA, 19 nt, Homo sapiens
  misc_RNA (1)...(19): siRNA sense strand
gcaaccagcugcuuucauc

SEQ ID NO: 106237 - RNA, 19 nt, Homo sapiens
  misc_RNA (1)...(19): siRNA sense strand
caaaguaacguguguagaa

SEQ ID NO: 106238 - RNA, 19 nt, Homo sapiens
  misc_RNA (1)...(19): siRNA sense strand
uaucagugcuuaucagauu

SEQ ID NO: 106239 - RNA, 19 nt, Homo sapiens
  misc_RNA (1)...(19): siRNA sense strand
cgaacuggcugcuacauug

SEQ ID NO: 106240 - RNA, 19 nt, Homo sapiens
  misc_RNA (1)...(19): siRNA sense strand
ucuccuaguugucauauua

SEQ ID NO: 106241 - RNA, 19 nt, Homo sapiens
  misc_RNA (1)...(19): siRNA sense strand
ucaagagccucauuaucua

SEQ ID NO: 106242 - RNA, 19 nt, Homo sapiens
  misc_RNA (1)...(19): siRNA sense strand
caaauggaaucaucacuca

SEQ ID NO: 106243 - RNA, 19 nt, Homo sapiens
  misc_RNA (1)...(19): siRNA sense strand
ugaaccaucugccaccuua

SEQ ID NO: 106244 - RNA, 19 nt, Homo sapiens
  misc_RNA (1)...(19): siRNA sense strand
gaauagacucccagacuaa

SEQ ID NO: 106245 - RNA, 19 nt, Homo sapiens
  misc_RNA (1)...(19): siRNA sense strand
gagaggguguuguugauau

SEQ ID NO: 106246 - RNA, 19 nt, Homo sapiens
  misc_RNA (1)...(19): siRNA sense strand
gcugaagacugcaguauag

SEQ ID NO: 106247 - RNA, 19 nt, Homo sapiens
  misc_RNA (1)...(19): siRNA sense strand
aaaccgauauggaaacauu

SEQ ID NO: 106248 - RNA, 19 nt, Homo sapiens
  misc_RNA (1)...(19): siRNA sense strand
gguaauauuugaagcugaa

SEQ ID NO: 106249 - RNA, 19 nt, Homo sapiens
  misc_RNA (1)...(19): siRNA sense strand
caacuuuaccugacuauga

SEQ ID NO: 106250 - RNA, 19 nt, Homo sapiens
  misc_RNA (1)...(19): siRNA sense strand
caucaaugcugcucuuaug

SEQ ID NO: 106251 - RNA, 19 nt, Homo sapiens
  misc_RNA (1)...(19): siRNA sense strand
ggaaccacuugcugaauau

SEQ ID NO: 106252 - RNA, 19 nt, Homo sapiens
  misc_RNA (1)...(19): siRNA sense strand
gaaggagagugaagagaca

SEQ ID NO: 106253 - RNA, 19 nt, Homo sapiens
  misc_RNA (1)...(19): siRNA sense strand
cuacagggcugcuuuccuu

SEQ ID NO: 106254 - RNA, 19 nt, Homo sapiens
  misc_RNA (1)...(19): siRNA sense strand
gagaccaagucauuacauu

SEQ ID NO: 106255 - RNA, 19 nt, Homo sapiens
  misc_RNA (1)...(19): siRNA sense strand
gcacauuaaucucaugaag

SEQ ID NO: 106256 - RNA, 19 nt, Homo sapiens
  misc_RNA (1)...(19): siRNA sense strand
ggaucuguaugaugacuuu

SEQ ID NO: 106257 - RNA, 19 nt, Homo sapiens
  misc_RNA (1)...(19): siRNA sense strand
ggagugcccuaccaugcua

SEQ ID NO: 106258 - RNA, 19 nt, Homo sapiens
  misc_RNA (1)...(19): siRNA sense strand
gaagacaucagacagcuau

SEQ ID NO: 106259 - RNA, 19 nt, Homo sapiens
  misc_RNA (1)...(19): siRNA sense strand
caaaggugcuccuaucagu

SEQ ID NO: 106260 - RNA, 19 nt, Homo sapiens
  misc_RNA (1)...(19): siRNA sense strand
gacacucacugcauugauu

SEQ ID NO: 106261 - RNA, 19 nt, Homo sapiens
  misc_RNA (1)...(19): siRNA sense strand
gaagggaugcuacgauaug

SEQ ID NO: 106262 - RNA, 19 nt, Homo sapiens
  misc_RNA (1)...(19): siRNA sense strand
agaauagacucccagacua

SEQ ID NO: 106263 - RNA, 19 nt, Homo sapiens
  misc_RNA (1)...(19): siRNA sense strand
gaaguuaaacaguuccauu

SEQ ID NO: 106264 - RNA, 19 nt, Homo sapiens
  misc_RNA (1)...(19): siRNA sense strand
gaugauccuuccucagauu

SEQ ID NO: 106265 - RNA, 19 nt, Homo sapiens
  misc_RNA (1)...(19): siRNA sense strand
caggguagcugauuuacug

SEQ ID NO: 106266 - RNA, 19 nt, Homo sapiens
  misc_RNA (1)...(19): siRNA sense strand
cuaagaacaucaaucauag

SEQ ID NO: 106267 - RNA, 19 nt, Homo sapiens
  misc_RNA (1)...(19): siRNA sense strand
gagacgaaauggagaagau

SEQ ID NO: 106268 - RNA, 19 nt, Homo sapiens
  misc_RNA (1)...(19): siRNA sense strand
gaacagcaagccaaacaug

SEQ ID NO: 106269 - RNA, 19 nt, Homo sapiens
  misc_RNA (1)...(19): siRNA sense strand
uggaaccacuugcugaaua

SEQ ID NO: 106270 - RNA, 19 nt, Homo sapiens
  misc_RNA (1)...(19): siRNA sense strand
agaacaaucugcuugcauu

SEQ ID NO: 106271 - RNA, 19 nt, Homo sapiens
  misc_RNA (1)...(19): siRNA sense strand
gagagugaagagacaauua

SEQ ID NO: 106272 - RNA, 19 nt, Homo sapiens
  misc_RNA (1)...(19): siRNA sense strand
gagauccgaguucuacuua

SEQ ID NO: 106273 - RNA, 19 nt, Homo sapiens
  misc_RNA (1)...(19): siRNA sense strand
ggauuuguaucgcugugua

SEQ ID NO: 106274 - RNA, 19 nt, Homo sapiens
  misc_RNA (1)...(19): siRNA sense strand
aaacugaccaggauuugua

SEQ ID NO: 106275 - RNA, 19 nt, Homo sapiens
  misc_RNA (1)...(19): siRNA sense strand
ccaagguuccuauaugaua

SEQ ID NO: 106276 - RNA, 19 nt, Homo sapiens
  misc_RNA (1)...(19): siRNA sense strand
caaggaaccaugacaagaa

SEQ ID NO: 106277 - RNA, 19 nt, Homo sapiens
  misc_RNA (1)...(19): siRNA sense strand
gaucucggcguauuaauau

SEQ ID NO: 106278 - RNA, 19 nt, Homo sapiens
  misc_RNA (1)...(19): siRNA sense strand
guacacaccaugucuuuau

SEQ ID NO: 106279 - RNA, 19 nt, Homo sapiens
  misc_RNA (1)...(19): siRNA sense strand
ggaaucaucacucaauaug

SEQ ID NO: 106280 - RNA, 19 nt, Homo sapiens
  misc_RNA (1)...(19): siRNA sense strand
gagcaaggcagacuguuug

SEQ ID NO: 106281 - RNA, 19 nt, Homo sapiens
  misc_RNA (1)...(19): siRNA sense strand
gauccuuccucagauuaua

SEQ ID NO: 106282 - RNA, 19 nt, Homo sapiens
  misc_RNA (1)...(19): siRNA sense strand
gugguuauauugccauuga

SEQ ID NO: 106283 - RNA, 19 nt, Homo sapiens
  misc_RNA (1)...(19): siRNA sense strand
acaggaagguuaucugaug

SEQ ID NO: 106284 - RNA, 19 nt, Homo sapiens
  misc_RNA (1)...(19): siRNA sense strand
ucaauggacugugauguga

SEQ ID NO: 106285 - RNA, 19 nt, Homo sapiens
  misc_RNA (1)...(19): siRNA sense strand
guuaaacaguuccauuuca

SEQ ID NO: 106286 - RNA, 19 nt, Homo sapiens
  misc_RNA (1)...(19): siRNA sense strand
gaaaauagcaggaauuagu

SEQ ID NO: 106287 - RNA, 19 nt, Homo sapiens
  misc_RNA (1)...(19): siRNA sense strand
caaaggauacaacaucuau

SEQ ID NO: 106288 - RNA, 19 nt, Homo sapiens
  misc_RNA (1)...(19): siRNA sense strand
uggagaagauauaccagua

SEQ ID NO: 106289 - RNA, 19 nt, Homo sapiens
  misc_RNA (1)...(19): siRNA sense strand
guacugaguuauccuugug

SEQ ID NO: 106290 - RNA, 19 nt, Homo sapiens
  misc_RNA (1)...(19): siRNA sense strand
gcagguggcuguacuuuug

SEQ ID NO: 106291 - RNA, 19 nt, Homo sapiens
  misc_RNA (1)...(19): siRNA sense strand
ggaccaacauaacuuuagu

SEQ ID NO: 106292 - RNA, 19 nt, Homo sapiens
  misc_RNA (1)...(19): siRNA sense strand
ugugauaaaucuccucauu

SEQ ID NO: 106293 - RNA, 19 nt, Homo sapiens
  misc_RNA (1)...(19): siRNA sense strand
gauccgaguucuacuuaca

SEQ ID NO: 106294 - RNA, 19 nt, Homo sapiens
  misc_RNA (1)...(19): siRNA sense strand
agaagugccuggauccaaa

SEQ ID NO: 106295 - RNA, 19 nt, Homo sapiens
  misc_RNA (1)...(19): siRNA sense strand
caagaccacaggaagguua

SEQ ID NO: 106296 - RNA, 19 nt, Homo sapiens
  misc_RNA (1)...(19): siRNA sense strand
gcugcuacauugugauuga

SEQ ID NO: 106297 - RNA, 19 nt, Homo sapiens
  misc_RNA (1)...(19): siRNA sense strand
aaaguaacguguguagaaa

SEQ ID NO: 106298 - RNA, 19 nt, Homo sapiens
  misc_RNA (1)...(19): siRNA sense strand
aaugaaauccgugaaguua

SEQ ID NO: 106299 - RNA, 19 nt, Homo sapiens
  misc_RNA (1)...(19): siRNA sense strand
guaaagacacugaggaaca

SEQ ID NO: 106300 - RNA, 19 nt, Homo sapiens
  misc_RNA (1)...(19): siRNA sense strand
ggagagcaguaacuacauc

SEQ ID NO: 106301 - RNA, 19 nt, Homo sapiens
  misc_RNA (1)...(19): siRNA sense strand
cagacuaacucuucacauc

SEQ ID NO: 106302 - RNA, 19 nt, Homo sapiens
  misc_RNA (1)...(19): siRNA sense strand
aggaagggaugcuacgaua

SEQ ID NO: 106303 - RNA, 19 nt, Homo sapiens
  misc_RNA (1)...(19): siRNA sense strand
gggagaagugguuauauug

SEQ ID NO: 106304 - RNA, 19 nt, Homo sapiens
  misc_RNA (1)...(19): siRNA sense strand
gaugugaucaaccggauuu

SEQ ID NO: 106305 - RNA, 19 nt, Homo sapiens
  misc_RNA (1)...(19): siRNA sense strand
guaccuccauugugauguu

SEQ ID NO: 106306 - RNA, 19 nt, Homo sapiens
  misc_RNA (1)...(19): siRNA sense strand
uaugauuucuggaggauga

SEQ ID NO: 106307 - RNA, 19 nt, Homo sapiens
  misc_RNA (1)...(19): siRNA sense strand
ccacuaaucaccagaacaa

SEQ ID NO: 106308 - RNA, 19 nt, Homo sapiens
  misc_RNA (1)...(19): siRNA sense strand
guuccgguguguccaauuu

SEQ ID NO: 106309 - RNA, 19 nt, Homo sapiens
  misc_RNA (1)...(19): siRNA sense strand
ggcuguaccuccauuguga

SEQ ID NO: 106310 - RNA, 19 nt, Homo sapiens
  misc_RNA (1)...(19): siRNA sense strand
auaccugucugugaauuua

SEQ ID NO: 106311 - RNA, 19 nt, Homo sapiens
  misc_RNA (1)...(19): siRNA sense strand
ugaaagagaggguguuguu

SEQ ID NO: 106312 - RNA, 19 nt, Homo sapiens
  misc_RNA (1)...(19): siRNA sense strand
cggguuaaaugcuauaaau

SEQ ID NO: 106313 - RNA, 19 nt, Homo sapiens
  misc_RNA (1)...(19): siRNA sense strand
gcaaaggauacaacaucua

SEQ ID NO: 106314 - RNA, 19 nt, Homo sapiens
  misc_RNA (1)...(19): siRNA sense strand
aaagauugcugaaauacag

SEQ ID NO: 106315 - RNA, 19 nt, Homo sapiens
  misc_RNA (1)...(19): siRNA sense strand
aauaugagaucagcuauag

SEQ ID NO: 106316 - RNA, 19 nt, Homo sapiens
  misc_RNA (1)...(19): siRNA sense strand
gaaggaaggagagugaaga

SEQ ID NO: 106317 - RNA, 19 nt, Homo sapiens
  misc_RNA (1)...(19): siRNA sense strand
gacuucagcugccuacaau

SEQ ID NO: 106318 - RNA, 19 nt, Homo sapiens
  misc_RNA (1)...(19): siRNA sense strand
gaaggacagucagcaucuu

SEQ ID NO: 106319 - RNA, 19 nt, Homo sapiens
  misc_RNA (1)...(19): siRNA sense strand
ggaacauccuuugaaaaua

SEQ ID NO: 106320 - RNA, 19 nt, Homo sapiens
  misc_RNA (1)...(19): siRNA sense strand
caaguggaauguaugucuu

SEQ ID NO: 106321 - RNA, 19 nt, Homo sapiens
  misc_RNA (1)...(19): siRNA sense strand
gaggaugauuuggcaagaa

SEQ ID NO: 106322 - RNA, 19 nt, Homo sapiens
  misc_RNA (1)...(19): siRNA sense strand
gauacaacaucuauuucca

SEQ ID NO: 106323 - RNA, 19 nt, Homo sapiens
  misc_RNA (1)...(19): siRNA sense strand
gcaauuauaucgaugguua

SEQ ID NO: 106324 - RNA, 19 nt, Homo sapiens
  misc_RNA (1)...(19): siRNA sense strand
ggacuugccuggcgacuuu

SEQ ID NO: 106325 - RNA, 19 nt, Homo sapiens
  misc_RNA (1)...(19): siRNA sense strand
ugaaggagguguuggaaua

SEQ ID NO: 106326 - RNA, 19 nt, Homo sapiens
  misc_RNA (1)...(19): siRNA sense strand
ucacuaaccugucaccaua

SEQ ID NO: 106327 - RNA, 19 nt, Homo sapiens
  misc_RNA (1)...(19): siRNA sense strand
ggaaguaccuuugaagaga

SEQ ID NO: 106328 - RNA, 19 nt, Homo sapiens
  misc_RNA (1)...(19): siRNA sense strand
cgacagaaaucuuaaagug

SEQ ID NO: 106329 - RNA, 19 nt, Homo sapiens
  misc_RNA (1)...(19): siRNA sense strand
caaguuaggucucuguauu

SEQ ID NO: 106330 - RNA, 19 nt, Homo sapiens
  misc_RNA (1)...(19): siRNA sense strand
ggaagaacguccucgaaga

SEQ ID NO: 106331 - RNA, 19 nt, Homo sapiens
  misc_RNA (1)...(19): siRNA sense strand
ggagacugguccuggauua

SEQ ID NO: 106332 - RNA, 19 nt, Homo sapiens
  misc_RNA (1)...(19): siRNA sense strand
cuacuuugcugcagaauuu

SEQ ID NO: 106333 - RNA, 19 nt, Homo sapiens
  misc_RNA (1)...(19): siRNA sense strand
aaaggaaacuggccaagaa

SEQ ID NO: 106334 - RNA, 19 nt, Homo sapiens
  misc_RNA (1)...(19): siRNA sense strand
cgacgaggcuuucucauuc

SEQ ID NO: 106335 - RNA, 19 nt, Homo sapiens
  misc_RNA (1)...(19): siRNA sense strand
gggcagaacuggccauuag

SEQ ID NO: 106336 - RNA, 19 nt, Homo sapiens
  misc_RNA (1)...(19): siRNA sense strand
uaagaaagaugagaacaga

SEQ ID NO: 106337 - RNA, 19 nt, Homo sapiens
  misc_RNA (1)...(19): siRNA sense strand
ggaaagccaagaacucaua

SEQ ID NO: 106338 - RNA, 19 nt, Homo sapiens
  misc_RNA (1)...(19): siRNA sense strand
gaaguaagcugggauacag

SEQ ID NO: 106339 - RNA, 19 nt, Homo sapiens
  misc_RNA (1)...(19): siRNA sense strand
gaaguaccuuugaagagaa

SEQ ID NO: 106340 - RNA, 19 nt, Homo sapiens
  misc_RNA (1)...(19): siRNA sense strand
ggucaaaucucggcaaauc

SEQ ID NO: 106341 - RNA, 19 nt, Homo sapiens
  misc_RNA (1)...(19): siRNA sense strand
ccacaguacuggccagaaa

SEQ ID NO: 106342 - RNA, 19 nt, Homo sapiens
  misc_RNA (1)...(19): siRNA sense strand
gaagaacguccucgaagaa

SEQ ID NO: 106343 - RNA, 19 nt, Homo sapiens
  misc_RNA (1)...(19): siRNA sense strand
uauaugagaucaccuacaa

SEQ ID NO: 106344 - RNA, 19 nt, Homo sapiens
  misc_RNA (1)...(19): siRNA sense strand
ggaguuguguugguaauga

SEQ ID NO: 106345 - RNA, 19 nt, Homo sapiens
  misc_RNA (1)...(19): siRNA sense strand
ccacuacuguuaccaaguu

SEQ ID NO: 106346 - RNA, 19 nt, Homo sapiens
  misc_RNA (1)...(19): siRNA sense strand
ucaaacauaugguguaauc

SEQ ID NO: 106347 - RNA, 19 nt, Homo sapiens
  misc_RNA (1)...(19): siRNA sense strand
gaagaaguaagcugggaua

SEQ ID NO: 106348 - RNA, 19 nt, Homo sapiens
  misc_RNA (1)...(19): siRNA sense strand
gaacuggccauuaguacuu

SEQ ID NO: 106349 - RNA, 19 nt, Homo sapiens
  misc_RNA (1)...(19): siRNA sense strand
uuaggucucuguauuauga

SEQ ID NO: 106350 - RNA, 19 nt, Homo sapiens
  misc_RNA (1)...(19): siRNA sense strand
gacacaaacucagacuaua

SEQ ID NO: 106351 - RNA, 19 nt, Homo sapiens
  misc_RNA (1)...(19): siRNA sense strand
ggaaaguaccgcugcauga

SEQ ID NO: 106352 - RNA, 19 nt, Homo sapiens
  misc_RNA (1)...(19): siRNA sense strand
caaacgagaugcuggaaag

SEQ ID NO: 106353 - RNA, 19 nt, Homo sapiens
  misc_RNA (1)...(19): siRNA sense strand
cagaacuacuggcagaaua

SEQ ID NO: 106354 - RNA, 19 nt, Homo sapiens
  misc_RNA (1)...(19): siRNA sense strand
gagaaccaacucaaacaua

SEQ ID NO: 106355 - RNA, 19 nt, Homo sapiens
  misc_RNA (1)...(19): siRNA sense strand
ugacuaaaccgacuucuga

SEQ ID NO: 106356 - RNA, 19 nt, Homo sapiens
  misc_RNA (1)...(19): siRNA sense strand
ggaauccuaucuggaauau

SEQ ID NO: 106357 - RNA, 19 nt, Homo sapiens
  misc_RNA (1)...(19): siRNA sense strand
gcagaacuggccauuagua

SEQ ID NO: 106358 - RNA, 19 nt, Homo sapiens
  misc_RNA (1)...(19): siRNA sense strand
gcaaauacuggccagauga

SEQ ID NO: 106359 - RNA, 19 nt, Homo sapiens
  misc_RNA (1)...(19): siRNA sense strand
gaugagaacagaaugaaga

SEQ ID NO: 106360 - RNA, 19 nt, Homo sapiens
  misc_RNA (1)...(19): siRNA sense strand
gaacguccucgaagaacua

SEQ ID NO: 106361 - RNA, 19 nt, Homo sapiens
  misc_RNA (1)...(19): siRNA sense strand
gaacuugagacaccuuuga

SEQ ID NO: 106362 - RNA, 19 nt, Homo sapiens
  misc_RNA (1)...(19): siRNA sense strand
ucuaagcgcuccuucuuga

SEQ ID NO: 106363 - RNA, 19 nt, Homo sapiens
  misc_RNA (1)...(19): siRNA sense strand
gaacaacaagcccaacaug

SEQ ID NO: 106364 - RNA, 19 nt, Homo sapiens
  misc_RNA (1)...(19): siRNA sense strand
ggaauacgagagcuucuuu

SEQ ID NO: 106365 - RNA, 19 nt, Homo sapiens
  misc_RNA (1)...(19): siRNA sense strand
caucaaugcugcccucaug

SEQ ID NO: 106366 - RNA, 19 nt, Homo sapiens
  misc_RNA (1)...(19): siRNA sense strand
aaagagaggugugcaugaa

SEQ ID NO: 106367 - RNA, 19 nt, Homo sapiens
  misc_RNA (1)...(19): siRNA sense strand
gaauaucauugcauacgau

SEQ ID NO: 106368 - RNA, 19 nt, Homo sapiens
  misc_RNA (1)...(19): siRNA sense strand
ggaauaucauugcauacga

SEQ ID NO: 106369 - RNA, 19 nt, Homo sapiens
  misc_RNA (1)...(19): siRNA sense strand
cauaugguguaaucacuuu

SEQ ID NO: 106370 - RNA, 19 nt, Homo sapiens
  misc_RNA (1)...(19): siRNA sense strand
gauaacuucuggacaucaa

SEQ ID NO: 106371 - RNA, 19 nt, Homo sapiens
  misc_RNA (1)...(19): siRNA sense strand
gaggagcaguauguguuua

SEQ ID NO: 106372 - RNA, 19 nt, Homo sapiens
  misc_RNA (1)...(19): siRNA sense strand
caaauacacugagcacauc

SEQ ID NO: 106373 - RNA, 19 nt, Homo sapiens
  misc_RNA (1)...(19): siRNA sense strand
agacagaccauacaguuaa

SEQ ID NO: 106374 - RNA, 19 nt, Homo sapiens
  misc_RNA (1)...(19): siRNA sense strand
agaaccaacucaaacauau

SEQ ID NO: 106375 - RNA, 19 nt, Homo sapiens
  misc_RNA (1)...(19): siRNA sense strand
aaacagaggagcaguaugu

SEQ ID NO: 106376 - RNA, 19 nt, Homo sapiens
  misc_RNA (1)...(19): siRNA sense strand
cagaauaugugauaagaac

SEQ ID NO: 106377 - RNA, 19 nt, Homo sapiens
  misc_RNA (1)...(19): siRNA sense strand
gagugaggcugcagacaau

SEQ ID NO: 106378 - RNA, 19 nt, Homo sapiens
  misc_RNA (1)...(19): siRNA sense strand
guacuacuuugcugcagaa

SEQ ID NO: 106379 - RNA, 19 nt, Homo sapiens
  misc_RNA (1)...(19): siRNA sense strand
ucagguggcugccucuuug

SEQ ID NO: 106380 - RNA, 19 nt, Homo sapiens
  misc_RNA (1)...(19): siRNA sense strand
caaacuggauccacagaca

SEQ ID NO: 106381 - RNA, 19 nt, Homo sapiens
  misc_RNA (1)...(19): siRNA sense strand
gaucagacaguuucacuuc

SEQ ID NO: 106382 - RNA, 19 nt, Homo sapiens
  misc_RNA (1)...(19): siRNA sense strand
gaggucaaaucucggcaaa

SEQ ID NO: 106383 - RNA, 19 nt, Homo sapiens
  misc_RNA (1)...(19): siRNA sense strand
gcaggauauuccgcauuua

SEQ ID NO: 106384 - RNA, 19 nt, Homo sapiens
  misc_RNA (1)...(19): siRNA sense strand
auaaacagccuucagcuuu

SEQ ID NO: 106385 - RNA, 19 nt, Homo sapiens
  misc_RNA (1)...(19): siRNA sense strand
gcugggagccauuuggaua

SEQ ID NO: 106386 - RNA, 19 nt, Homo sapiens
  misc_RNA (1)...(19): siRNA sense strand
ugacccagauacagaauau

SEQ ID NO: 106387 - RNA, 19 nt, Homo sapiens
  misc_RNA (1)...(19): siRNA sense strand
caaacacagugaaagacuu

SEQ ID NO: 106388 - RNA, 19 nt, Homo sapiens
  misc_RNA (1)...(19): siRNA sense strand
ugaccaaucuuguggaagu

SEQ ID NO: 106389 - RNA, 19 nt, Homo sapiens
  misc_RNA (1)...(19): siRNA sense strand
ggacucggcuaagaaagau

SEQ ID NO: 106390 - RNA, 19 nt, Homo sapiens
  misc_RNA (1)...(19): siRNA sense strand
gacagaccauacaguuaaa

SEQ ID NO: 106391 - RNA, 19 nt, Homo sapiens
  misc_RNA (1)...(19): siRNA sense strand
gugaacaccuugacuaaac

SEQ ID NO: 106392 - RNA, 19 nt, Homo sapiens
  misc_RNA (1)...(19): siRNA sense strand
ggcagaauaugugauaaga

SEQ ID NO: 106393 - RNA, 19 nt, Homo sapiens
  misc_RNA (1)...(19): siRNA sense strand
ggacaucaucagcaggaua

SEQ ID NO: 106394 - RNA, 19 nt, Homo sapiens
  misc_RNA (1)...(19): siRNA sense strand
guaguuaugcuaaaugaug

SEQ ID NO: 106395 - RNA, 19 nt, Homo sapiens
  misc_RNA (1)...(19): siRNA sense strand
ggucaaaugcugcaaauac

SEQ ID NO: 106396 - RNA, 19 nt, Homo sapiens
  misc_RNA (1)...(19): siRNA sense strand
gacauuaaaguuacccuaa

SEQ ID NO: 106397 - RNA, 19 nt, Homo sapiens
  misc_RNA (1)...(19): siRNA sense strand
ugaaacugauccucaugaa

SEQ ID NO: 106398 - RNA, 19 nt, Homo sapiens
  misc_RNA (1)...(19): siRNA sense strand
ggacaaguggcaagaggaa

SEQ ID NO: 106399 - RNA, 19 nt, Homo sapiens
  misc_RNA (1)...(19): siRNA sense strand
gcaaacagaggagcaguau

SEQ ID NO: 106400 - RNA, 19 nt, Homo sapiens
  misc_RNA (1)...(19): siRNA sense strand
gaugaaacccacacaaugg

SEQ ID NO: 106401 - RNA, 19 nt, Homo sapiens
  misc_RNA (1)...(19): siRNA sense strand
gggaccacauacuccuuua

SEQ ID NO: 106402 - RNA, 19 nt, Homo sapiens
  misc_RNA (1)...(19): siRNA sense strand
aagaacagauacgggaaua

SEQ ID NO: 106403 - RNA, 19 nt, Homo sapiens
  misc_RNA (1)...(19): siRNA sense strand
ugaagacacugaggaacaa

SEQ ID NO: 106404 - RNA, 19 nt, Homo sapiens
  misc_RNA (1)...(19): siRNA sense strand
gagcagcaacuacaucaau

SEQ ID NO: 106405 - RNA, 19 nt, Homo sapiens
  misc_RNA (1)...(19): siRNA sense strand
gccaucagguucucucaug

SEQ ID NO: 106406 - RNA, 19 nt, Homo sapiens
  misc_RNA (1)...(19): siRNA sense strand
gaugacacagagauauaua

SEQ ID NO: 106407 - RNA, 19 nt, Homo sapiens
  misc_RNA (1)...(19): siRNA sense strand
cagaugacacagagauaua

SEQ ID NO: 106408 - RNA, 19 nt, Homo sapiens
  misc_RNA (1)...(19): siRNA sense strand
uaucaucgacccaaucauu

SEQ ID NO: 106409 - RNA, 19 nt, Homo sapiens
  misc_RNA (1)...(19): siRNA sense strand
gaaaguaccgcugcaugau

SEQ ID NO: 106410 - RNA, 19 nt, Homo sapiens
  misc_RNA (1)...(19): siRNA sense strand
gagaacagaaugaagaaca

SEQ ID NO: 106411 - RNA, 19 nt, Homo sapiens
  misc_RNA (1)...(19): siRNA sense strand
caaaccaguucaccaccaa

SEQ ID NO: 106412 - RNA, 19 nt, Homo sapiens
  misc_RNA (1)...(19): siRNA sense strand
gaaggaaagccaagaacuc

SEQ ID NO: 106413 - RNA, 19 nt, Homo sapiens
  misc_RNA (1)...(19): siRNA sense strand
ucacuguccacuacuguua

SEQ ID NO: 106414 - RNA, 19 nt, Homo sapiens
  misc_RNA (1)...(19): siRNA sense strand
uauaauggauacuggaaca

SEQ ID NO: 106415 - RNA, 19 nt, Homo sapiens
  misc_RNA (1)...(19): siRNA sense strand
gguguaaucacuuuauaug

SEQ ID NO: 106416 - RNA, 19 nt, Homo sapiens
  misc_RNA (1)...(19): siRNA sense strand
gaggaauuccggacgcuaa

SEQ ID NO: 106417 - RNA, 19 nt, Homo sapiens
  misc_RNA (1)...(19): siRNA sense strand
caaacucaagccagauuaa

SEQ ID NO: 106418 - RNA, 19 nt, Homo sapiens
  misc_RNA (1)...(19): siRNA sense strand
cgucauugauaucauguug

SEQ ID NO: 106419 - RNA, 19 nt, Homo sapiens
  misc_RNA (1)...(19): siRNA sense strand
ccuaauagaaacagaacua

SEQ ID NO: 106420 - RNA, 19 nt, Homo sapiens
  misc_RNA (1)...(19): siRNA sense strand
gcgacgaggcuuucucauu

SEQ ID NO: 106421 - RNA, 19 nt, Homo sapiens
  misc_RNA (1)...(19): siRNA sense strand
gaaacagacagaccauaca

SEQ ID NO: 106422 - RNA, 19 nt, Homo sapiens
  misc_RNA (1)...(19): siRNA sense strand
uaugccagcuuaugaacuu

SEQ ID NO: 106423 - RNA, 19 nt, Homo sapiens
  misc_RNA (1)...(19): siRNA sense strand
gcaggaaggugaacaagug

SEQ ID NO: 106424 - RNA, 19 nt, Homo sapiens
  misc_RNA (1)...(19): siRNA sense strand
ggaggcagcugcaguccuu

SEQ ID NO: 106425 - RNA, 19 nt, Homo sapiens
  misc_RNA (1)...(19): siRNA sense strand
ggugaagucugaacuggaa

SEQ ID NO: 106426 - RNA, 19 nt, Homo sapiens
  misc_RNA (1)...(19): siRNA sense strand
agacagggcuccaaaucuu

SEQ ID NO: 106427 - RNA, 19 nt, Homo sapiens
  misc_RNA (1)...(19): siRNA sense strand
gaaccggcauccugacuuc

SEQ ID NO: 106428 - RNA, 19 nt, Homo sapiens
  misc_RNA (1)...(19): siRNA sense strand
gcccacggcugucuauuug

SEQ ID NO: 106429 - RNA, 19 nt, Homo sapiens
  misc_RNA (1)...(19): siRNA sense strand
gagugaagcugcuggagau

SEQ ID NO: 106430 - RNA, 19 nt, Homo sapiens
  misc_RNA (1)...(19): siRNA sense strand
gcucugcucucaccuggaa

SEQ ID NO: 106431 - RNA, 19 nt, Homo sapiens
  misc_RNA (1)...(19): siRNA sense strand
gagcagaaccugucuuugg

SEQ ID NO: 106432 - RNA, 19 nt, Homo sapiens
  misc_RNA (1)...(19): siRNA sense strand
gcacagacagggcuccaaa

SEQ ID NO: 106433 - RNA, 19 nt, Homo sapiens
  misc_RNA (1)...(19): siRNA sense strand
gcaccuacauccucaucga

SEQ ID NO: 106434 - RNA, 19 nt, Homo sapiens
  misc_RNA (1)...(19): siRNA sense strand
ggaagucuguauucaggau

SEQ ID NO: 106435 - RNA, 19 nt, Homo sapiens
  misc_RNA (1)...(19): siRNA sense strand
acgaugaccucacccagua

SEQ ID NO: 106436 - RNA, 19 nt, Homo sapiens
  misc_RNA (1)...(19): siRNA sense strand
caacucaugucccaaggau

SEQ ID NO: 106437 - RNA, 19 nt, Homo sapiens
  misc_RNA (1)...(19): siRNA sense strand
ucaggcagcuucaucaaca

SEQ ID NO: 106438 - RNA, 19 nt, Homo sapiens
  misc_RNA (1)...(19): siRNA sense strand
gcccaagggugcaggaaga

SEQ ID NO: 106439 - RNA, 19 nt, Homo sapiens
  misc_RNA (1)...(19): siRNA sense strand
gacacaugauucuggcaua

SEQ ID NO: 106440 - RNA, 19 nt, Homo sapiens
  misc_RNA (1)...(19): siRNA sense strand
gcucuaaggaccaguuuga

SEQ ID NO: 106441 - RNA, 19 nt, Homo sapiens
  misc_RNA (1)...(19): siRNA sense strand
cuaaggaccaguuugaauu

SEQ ID NO: 106442 - RNA, 19 nt, Homo sapiens
  misc_RNA (1)...(19): siRNA sense strand
uaaggaccaguuugaauuu

SEQ ID NO: 106443 - RNA, 19 nt, Homo sapiens
  misc_RNA (1)...(19): siRNA sense strand
gaaccugucuuuggcugau

SEQ ID NO: 106444 - RNA, 19 nt, Homo sapiens
  misc_RNA (1)...(19): siRNA sense strand
aagcagggcuggugaaguc

SEQ ID NO: 106445 - RNA, 19 nt, Homo sapiens
  misc_RNA (1)...(19): siRNA sense strand
uggcauacauggaggauca

SEQ ID NO: 106446 - RNA, 19 nt, Homo sapiens
  misc_RNA (1)...(19): siRNA sense strand
caucgucacugaucagaag

SEQ ID NO: 106447 - RNA, 19 nt, Homo sapiens
  misc_RNA (1)...(19): siRNA sense strand
gauccuggcugagcaugug

SEQ ID NO: 106448 - RNA, 19 nt, Homo sapiens
  misc_RNA (1)...(19): siRNA sense strand
ggaaggugaacaagugcua

SEQ ID NO: 106449 - RNA, 19 nt, Homo sapiens
  misc_RNA (1)...(19): siRNA sense strand
caguuuggcucccgugaug

SEQ ID NO: 106450 - RNA, 19 nt, Homo sapiens
  misc_RNA (1)...(19): siRNA sense strand
guaaauguuggagcugaua

SEQ ID NO: 106451 - RNA, 19 nt, Homo sapiens
  misc_RNA (1)...(19): siRNA sense strand
agaggaauauggcuacauc

SEQ ID NO: 106452 - RNA, 19 nt, Homo sapiens
  misc_RNA (1)...(19): siRNA sense strand
ccacgaaguccuuguucaa

SEQ ID NO: 106453 - RNA, 19 nt, Homo sapiens
  misc_RNA (1)...(19): siRNA sense strand
uauucaggauggcuuguuu

SEQ ID NO: 106454 - RNA, 19 nt, Homo sapiens
  misc_RNA (1)...(19): siRNA sense strand
caagcccugucuccucuga

SEQ ID NO: 106455 - RNA, 19 nt, Homo sapiens
  misc_RNA (1)...(19): siRNA sense strand
gguggaggauggugucaag

SEQ ID NO: 106456 - RNA, 19 nt, Homo sapiens
  misc_RNA (1)...(19): siRNA sense strand
cccaguaugugaucucuca

SEQ ID NO: 106457 - RNA, 19 nt, Homo sapiens
  misc_RNA (1)...(19): siRNA sense strand
acucugggcugcucuaucu

SEQ ID NO: 106458 - RNA, 19 nt, Homo sapiens
  misc_RNA (1)...(19): siRNA sense strand
gagcugauaucaagaaaac

SEQ ID NO: 106459 - RNA, 19 nt, Homo sapiens
  misc_RNA (1)...(19): siRNA sense strand
uguuggagcugauaucaag

SEQ ID NO: 106460 - RNA, 19 nt, Homo sapiens
  misc_RNA (1)...(19): siRNA sense strand
ccacguauaugaggugaac

SEQ ID NO: 106461 - RNA, 19 nt, Homo sapiens
  misc_RNA (1)...(19): siRNA sense strand
caaaaggagugaaggagau

SEQ ID NO: 106462 - RNA, 19 nt, Homo sapiens
  misc_RNA (1)...(19): siRNA sense strand
caccuguccugcuagagaa

SEQ ID NO: 106463 - RNA, 19 nt, Homo sapiens
  misc_RNA (1)...(19): siRNA sense strand
gcccagcagcagaggaaua

SEQ ID NO: 106464 - RNA, 19 nt, Homo sapiens
  misc_RNA (1)...(19): siRNA sense strand
acucaugucccaaggauug

SEQ ID NO: 106465 - RNA, 19 nt, Homo sapiens
  misc_RNA (1)...(19): siRNA sense strand
gccacgaaguccuuguuca

SEQ ID NO: 106466 - RNA, 19 nt, Homo sapiens
  misc_RNA (1)...(19): siRNA sense strand
gcagaggaauauggcuaca

SEQ ID NO: 106467 - RNA, 19 nt, Homo sapiens
  misc_RNA (1)...(19): siRNA sense strand
caagggugcaggaagaaau

SEQ ID NO: 106468 - RNA, 19 nt, Homo sapiens
  misc_RNA (1)...(19): siRNA sense strand
caagucaccuccccaguuc

SEQ ID NO: 106469 - RNA, 19 nt, Homo sapiens
  misc_RNA (1)...(19): siRNA sense strand
gaccgcuacuggccagaug

SEQ ID NO: 106470 - RNA, 19 nt, Homo sapiens
  misc_RNA (1)...(19): siRNA sense strand
gcccuucucggagcgauua

SEQ ID NO: 106471 - RNA, 19 nt, Homo sapiens
  misc_RNA (1)...(19): siRNA sense strand
ggugugcuccgacaacuca

SEQ ID NO: 106472 - RNA, 19 nt, Homo sapiens
  misc_RNA (1)...(19): siRNA sense strand
uggcugaugugacccaaca

SEQ ID NO: 106473 - RNA, 19 nt, Homo sapiens
  misc_RNA (1)...(19): siRNA sense strand
gcuacaucgucacugauca

SEQ ID NO: 106474 - RNA, 19 nt, Homo sapiens
  misc_RNA (1)...(19): siRNA sense strand
ccacggcugucuauuugac

SEQ ID NO: 106475 - RNA, 19 nt, Homo sapiens
  misc_RNA (1)...(19): siRNA sense strand
ucggaugccagccuacaua

SEQ ID NO: 106476 - RNA, 19 nt, Homo sapiens
  misc_RNA (1)...(19): siRNA sense strand
ggagugaaggagauugaca

SEQ ID NO: 106477 - RNA, 19 nt, Homo sapiens
  misc_RNA (1)...(19): siRNA sense strand
gcaagucaccuccccaguu

SEQ ID NO: 106478 - RNA, 19 nt, Homo sapiens
  misc_RNA (1)...(19): siRNA sense strand
cugacuuccugcccuauga

SEQ ID NO: 106479 - RNA, 19 nt, Homo sapiens
  misc_RNA (1)...(19): siRNA sense strand
gugacacuaccuuugagua

SEQ ID NO: 106480 - RNA, 19 nt, Homo sapiens
  misc_RNA (1)...(19): siRNA sense strand
gacagggcuccaaaucuug

SEQ ID NO: 106481 - RNA, 19 nt, Homo sapiens
  misc_RNA (1)...(19): siRNA sense strand
cagggcuggugaagucuga

SEQ ID NO: 106482 - RNA, 19 nt, Homo sapiens
  misc_RNA (1)...(19): siRNA sense strand
gcaguguguccucccaguu

SEQ ID NO: 106483 - RNA, 19 nt, Homo sapiens
  misc_RNA (1)...(19): siRNA sense strand
ucaucgacaugguccugaa

SEQ ID NO: 106484 - RNA, 19 nt, Homo sapiens
  misc_RNA (1)...(19): siRNA sense strand
gaugaccucacccaguaug

SEQ ID NO: 106485 - RNA, 19 nt, Homo sapiens
  misc_RNA (1)...(19): siRNA sense strand
ccucugagccucccaaagc

SEQ ID NO: 106486 - RNA, 19 nt, Homo sapiens
  misc_RNA (1)...(19): siRNA sense strand
ucuaaggaccaguuugaau

SEQ ID NO: 106487 - RNA, 19 nt, Homo sapiens
  misc_RNA (1)...(19): siRNA sense strand
caucuggugcgaggacuuu

SEQ ID NO: 106488 - RNA, 19 nt, Homo sapiens
  misc_RNA (1)...(19): siRNA sense strand
ucggagcgauuacaucaac

SEQ ID NO: 106489 - RNA, 19 nt, Homo sapiens
  misc_RNA (1)...(19): siRNA sense strand
ucucggagcgauuacauca

SEQ ID NO: 106490 - RNA, 19 nt, Homo sapiens
  misc_RNA (1)...(19): siRNA sense strand
ccacgggacacaugauucu

SEQ ID NO: 106491 - RNA, 19 nt, Homo sapiens
  misc_RNA (1)...(19): siRNA sense strand
acaccuguccugcuagaga

SEQ ID NO: 106492 - RNA, 19 nt, Homo sapiens
  misc_RNA (1)...(19): siRNA sense strand
agagggcuaugagaaggaa

SEQ ID NO: 106493 - RNA, 19 nt, Homo sapiens
  misc_RNA (1)...(19): siRNA sense strand
ucaccuggaagucuguauu

SEQ ID NO: 106494 - RNA, 19 nt, Homo sapiens
  misc_RNA (1)...(19): siRNA sense strand
acacuaccuuugaguacca

SEQ ID NO: 106495 - RNA, 19 nt, Homo sapiens
  misc_RNA (1)...(19): siRNA sense strand
gggagggguuguaaauguu

SEQ ID NO: 106496 - RNA, 19 nt, Homo sapiens
  misc_RNA (1)...(19): siRNA sense strand
uggagcugauaucaagaaa

SEQ ID NO: 106497 - RNA, 19 nt, Homo sapiens
  misc_RNA (1)...(19): siRNA sense strand
aaggaccaguuugaauuug

SEQ ID NO: 106498 - RNA, 19 nt, Homo sapiens
  misc_RNA (1)...(19): siRNA sense strand
acacaugauucuggcauac

SEQ ID NO: 106499 - RNA, 19 nt, Homo sapiens
  misc_RNA (1)...(19): siRNA sense strand
cagcaucggcuuccacaac

SEQ ID NO: 106500 - RNA, 19 nt, Homo sapiens
  misc_RNA (1)...(19): siRNA sense strand
cauggugacacuaccuuug

SEQ ID NO: 106501 - RNA, 19 nt, Homo sapiens
  misc_RNA (1)...(19): siRNA sense strand
acagacagggcuccaaauc

SEQ ID NO: 106502 - RNA, 19 nt, Homo sapiens
  misc_RNA (1)...(19): siRNA sense strand
cuaccuguuccaccaguuu

SEQ ID NO: 106503 - RNA, 19 nt, Homo sapiens
  misc_RNA (1)...(19): siRNA sense strand
guuugaauuugcccugaca

SEQ ID NO: 106504 - RNA, 19 nt, Homo sapiens
  misc_RNA (1)...(19): siRNA sense strand
gagugaaggagauugacau

SEQ ID NO: 106505 - RNA, 19 nt, Homo sapiens
  misc_RNA (1)...(19): siRNA sense strand
ugacacuaccuuugaguac

SEQ ID NO: 106506 - RNA, 19 nt, Homo sapiens
  misc_RNA (1)...(19): siRNA sense strand
cagcagcagaggaauaugg

SEQ ID NO: 106507 - RNA, 19 nt, Homo sapiens
  misc_RNA (1)...(19): siRNA sense strand
uaaauguuggagcugauau

SEQ ID NO: 106508 - RNA, 19 nt, Homo sapiens
  misc_RNA (1)...(19): siRNA sense strand
gccuucaccugcccagcuu

SEQ ID NO: 106509 - RNA, 19 nt, Homo sapiens
  misc_RNA (1)...(19): siRNA sense strand
gcagugaccuucaaaguga

SEQ ID NO: 106510 - RNA, 19 nt, Homo sapiens
  misc_RNA (1)...(19): siRNA sense strand
ggagacagcuuuccagaug

SEQ ID NO: 106511 - RNA, 19 nt, Homo sapiens
  misc_RNA (1)...(19): siRNA sense strand
ggaaaccucuggacugaaa

SEQ ID NO: 106512 - RNA, 19 nt, Homo sapiens
  misc_RNA (1)...(19): siRNA sense strand
ccacgggucucgacucuua

SEQ ID NO: 106513 - RNA, 19 nt, Homo sapiens
  misc_RNA (1)...(19): siRNA sense strand
gugaggagcuucuaucuga

SEQ ID NO: 106514 - RNA, 19 nt, Homo sapiens
  misc_RNA (1)...(19): siRNA sense strand
caaaggugcuaaagagauu

SEQ ID NO: 106515 - RNA, 19 nt, Homo sapiens
  misc_RNA (1)...(19): siRNA sense strand
ggacgacgaugauagacuu

SEQ ID NO: 106516 - RNA, 19 nt, Homo sapiens
  misc_RNA (1)...(19): siRNA sense strand
gaugaaggcuccaaucucu

SEQ ID NO: 106517 - RNA, 19 nt, Homo sapiens
  misc_RNA (1)...(19): siRNA sense strand
cagaugagcucagcccuaa

SEQ ID NO: 106518 - RNA, 19 nt, Homo sapiens
  misc_RNA (1)...(19): siRNA sense strand
caagaagacuccaccaagu

SEQ ID NO: 106519 - RNA, 19 nt, Homo sapiens
  misc_RNA (1)...(19): siRNA sense strand
gcugauggcuggccugaug

SEQ ID NO: 106520 - RNA, 19 nt, Homo sapiens
  misc_RNA (1)...(19): siRNA sense strand
ugaagaaccugcagaccaa

SEQ ID NO: 106521 - RNA, 19 nt, Homo sapiens
  misc_RNA (1)...(19): siRNA sense strand
cgaaggagcaguuugaguu

SEQ ID NO: 106522 - RNA, 19 nt, Homo sapiens
  misc_RNA (1)...(19): siRNA sense strand
ggacagugguguggacaga

SEQ ID NO: 106523 - RNA, 19 nt, Homo sapiens
  misc_RNA (1)...(19): siRNA sense strand
ggccaaaggugcuaaagag

SEQ ID NO: 106524 - RNA, 19 nt, Homo sapiens
  misc_RNA (1)...(19): siRNA sense strand
gggccguucuuguccaaua

SEQ ID NO: 106525 - RNA, 19 nt, Homo sapiens
  misc_RNA (1)...(19): siRNA sense strand
cgacaugguucucaacaag

SEQ ID NO: 106526 - RNA, 19 nt, Homo sapiens
  misc_RNA (1)...(19): siRNA sense strand
gcaccuacguccugaucga

SEQ ID NO: 106527 - RNA, 19 nt, Homo sapiens
  misc_RNA (1)...(19): siRNA sense strand
gauggagcacggauucaua

SEQ ID NO: 106528 - RNA, 19 nt, Homo sapiens
  misc_RNA (1)...(19): siRNA sense strand
gaacagccacagccacuca

SEQ ID NO: 106529 - RNA, 19 nt, Homo sapiens
  misc_RNA (1)...(19): siRNA sense strand
caagagguccaucgucuga

SEQ ID NO: 106530 - RNA, 19 nt, Homo sapiens
  misc_RNA (1)...(19): siRNA sense strand
gagacagcuuuccagauga

SEQ ID NO: 106531 - RNA, 19 nt, Homo sapiens
  misc_RNA (1)...(19): siRNA sense strand
gaggagaacgugcccaaga

SEQ ID NO: 106532 - RNA, 19 nt, Homo sapiens
  misc_RNA (1)...(19): siRNA sense strand
gcaggacgacgaugauaga

SEQ ID NO: 106533 - RNA, 19 nt, Homo sapiens
  misc_RNA (1)...(19): siRNA sense strand
gaccagcagugaccuucaa

SEQ ID NO: 106534 - RNA, 19 nt, Homo sapiens
  misc_RNA (1)...(19): siRNA sense strand
ucaacaagauggccaaagg

SEQ ID NO: 106535 - RNA, 19 nt, Homo sapiens
  misc_RNA (1)...(19): siRNA sense strand
gcuccaaucucuaccacau

SEQ ID NO: 106536 - RNA, 19 nt, Homo sapiens
  misc_RNA (1)...(19): siRNA sense strand
gcagaaaaguaaacaagug

SEQ ID NO: 106537 - RNA, 19 nt, Homo sapiens
  misc_RNA (1)...(19): siRNA sense strand
gccagaagguuccggcaau

SEQ ID NO: 106538 - RNA, 19 nt, Homo sapiens
  misc_RNA (1)...(19): siRNA sense strand
ccagacguauuccaaagau

SEQ ID NO: 106539 - RNA, 19 nt, Homo sapiens
  misc_RNA (1)...(19): siRNA sense strand
gaaggagcaguuugaguuc

SEQ ID NO: 106540 - RNA, 19 nt, Homo sapiens
  misc_RNA (1)...(19): siRNA sense strand
gagagcauccugaccuaug

SEQ ID NO: 106541 - RNA, 19 nt, Homo sapiens
  misc_RNA (1)...(19): siRNA sense strand
caagaaugcccaggccuuu

SEQ ID NO: 106542 - RNA, 19 nt, Homo sapiens
  misc_RNA (1)...(19): siRNA sense strand
ucacguggcaggaugacua

SEQ ID NO: 106543 - RNA, 19 nt, Homo sapiens
  misc_RNA (1)...(19): siRNA sense strand
ggccguucuuguccaauaa

SEQ ID NO: 106544 - RNA, 19 nt, Homo sapiens
  misc_RNA (1)...(19): siRNA sense strand
gggagagucuggagaacag

SEQ ID NO: 106545 - RNA, 19 nt, Homo sapiens
  misc_RNA (1)...(19): siRNA sense strand
agacgaaggagcaguuuga

SEQ ID NO: 106546 - RNA, 19 nt, Homo sapiens
  misc_RNA (1)...(19): siRNA sense strand
cagcgacccuggagcacuu

SEQ ID NO: 106547 - RNA, 19 nt, Homo sapiens
  misc_RNA (1)...(19): siRNA sense strand
caggaugacuauacucagu

SEQ ID NO: 106548 - RNA, 19 nt, Homo sapiens
  misc_RNA (1)...(19): siRNA sense strand
gucaagagccagacguauu

SEQ ID NO: 106549 - RNA, 19 nt, Homo sapiens
  misc_RNA (1)...(19): siRNA sense strand
gcgacggccugcaauugga

SEQ ID NO: 106550 - RNA, 19 nt, Homo sapiens
  misc_RNA (1)...(19): siRNA sense strand
gcacuugagggaccagaga

SEQ ID NO: 106551 - RNA, 19 nt, Homo sapiens
  misc_RNA (1)...(19): siRNA sense strand
aggagaacgugcccaagaa

SEQ ID NO: 106552 - RNA, 19 nt, Homo sapiens
  misc_RNA (1)...(19): siRNA sense strand
ucaagagccagacguauuc

SEQ ID NO: 106553 - RNA, 19 nt, Homo sapiens
  misc_RNA (1)...(19): siRNA sense strand
ccaaaggugcuaaagagau

SEQ ID NO: 106554 - RNA, 19 nt, Homo sapiens
  misc_RNA (1)...(19): siRNA sense strand
agaaccggcuggagaagga

SEQ ID NO: 106555 - RNA, 19 nt, Homo sapiens
  misc_RNA (1)...(19): siRNA sense strand
agucuucccugucuucaga

SEQ ID NO: 106556 - RNA, 19 nt, Homo sapiens
  misc_RNA (1)...(19): siRNA sense strand
ccgagagcauccugaccua

SEQ ID NO: 106557 - RNA, 19 nt, Homo sapiens
  misc_RNA (1)...(19): siRNA sense strand
gugcuaaagagauugauau

SEQ ID NO: 106558 - RNA, 19 nt, Homo sapiens
  misc_RNA (1)...(19): siRNA sense strand
ccgcacacgucacgcauca

SEQ ID NO: 106559 - RNA, 19 nt, Homo sapiens
  misc_RNA (1)...(19): siRNA sense strand
ccucuggccucaucuacug

SEQ ID NO: 106560 - RNA, 19 nt, Homo sapiens
  misc_RNA (1)...(19): siRNA sense strand
gagccagacguauuccaaa

SEQ ID NO: 106561 - RNA, 19 nt, Homo sapiens
  misc_RNA (1)...(19): siRNA sense strand
ugauagacuuuaccaagag

SEQ ID NO: 106562 - RNA, 19 nt, Homo sapiens
  misc_RNA (1)...(19): siRNA sense strand
ccagaagguuccggcaaug

SEQ ID NO: 106563 - RNA, 19 nt, Homo sapiens
  misc_RNA (1)...(19): siRNA sense strand
cgacgaugauagacuuuac

SEQ ID NO: 106564 - RNA, 19 nt, Homo sapiens
  misc_RNA (1)...(19): siRNA sense strand
acaagaaccggcuggagaa

SEQ ID NO: 106565 - RNA, 19 nt, Homo sapiens
  misc_RNA (1)...(19): siRNA sense strand
augauagacuuuaccaaga

SEQ ID NO: 106566 - RNA, 19 nt, Homo sapiens
  misc_RNA (1)...(19): siRNA sense strand
ccacaucuaugaggugaac

SEQ ID NO: 106567 - RNA, 19 nt, Homo sapiens
  misc_RNA (1)...(19): siRNA sense strand
ggagaaggccacaguugac

SEQ ID NO: 106568 - RNA, 19 nt, Homo sapiens
  misc_RNA (1)...(19): siRNA sense strand
gaggaccaccugaagaaca

SEQ ID NO: 106569 - RNA, 19 nt, Homo sapiens
  misc_RNA (1)...(19): siRNA sense strand
gaagacuccaccaaguuca

SEQ ID NO: 106570 - RNA, 19 nt, Homo sapiens
  misc_RNA (1)...(19): siRNA sense strand
aagaagacuccaccaaguu

SEQ ID NO: 106571 - RNA, 19 nt, Homo sapiens
  misc_RNA (1)...(19): siRNA sense strand
gccacaugauccuguccua

SEQ ID NO: 106572 - RNA, 19 nt, Homo sapiens
  misc_RNA (1)...(19): siRNA sense strand
ggugcuaaagagauugaua

SEQ ID NO: 106573 - RNA, 19 nt, Homo sapiens
  misc_RNA (1)...(19): siRNA sense strand
gcaguuccacuuccugagu

SEQ ID NO: 106574 - RNA, 19 nt, Homo sapiens
  misc_RNA (1)...(19): siRNA sense strand
ucaaagugagcgccaaugu

SEQ ID NO: 106575 - RNA, 19 nt, Homo sapiens
  misc_RNA (1)...(19): siRNA sense strand
gaaaaguaaacaagugcua

SEQ ID NO: 106576 - RNA, 19 nt, Homo sapiens
  misc_RNA (1)...(19): siRNA sense strand
aagacaaacuggaggaaac

SEQ ID NO: 106577 - RNA, 19 nt, Homo sapiens
  misc_RNA (1)...(19): siRNA sense strand
gcaaggcguggaccaugga

SEQ ID NO: 106578 - RNA, 19 nt, Homo sapiens
  misc_RNA (1)...(19): siRNA sense strand
caguuccacuuccugaguu

SEQ ID NO: 106579 - RNA, 19 nt, Homo sapiens
  misc_RNA (1)...(19): siRNA sense strand
ugaggagcuucuaucugaa

SEQ ID NO: 106580 - RNA, 19 nt, Homo sapiens
  misc_RNA (1)...(19): siRNA sense strand
caucuggugugaggacuuc

SEQ ID NO: 106581 - RNA, 19 nt, Homo sapiens
  misc_RNA (1)...(19): siRNA sense strand
ggaugaaggcuccaaucuc

SEQ ID NO: 106582 - RNA, 19 nt, Homo sapiens
  misc_RNA (1)...(19): siRNA sense strand
ccacucagacuacaucaac

SEQ ID NO: 106583 - RNA, 19 nt, Homo sapiens
  misc_RNA (1)...(19): siRNA sense strand
ccacagccacucagacuac

SEQ ID NO: 106584 - RNA, 19 nt, Homo sapiens
  misc_RNA (1)...(19): siRNA sense strand
gauggaguguuuggaaggu

SEQ ID NO: 106585 - RNA, 19 nt, Homo sapiens
  misc_RNA (1)...(19): siRNA sense strand
uggagaaggccacaguuga

SEQ ID NO: 106586 - RNA, 19 nt, Homo sapiens
  misc_RNA (1)...(19): siRNA sense strand
cagcagugaccuucaaagu

SEQ ID NO: 106587 - RNA, 19 nt, Homo sapiens
  misc_RNA (1)...(19): siRNA sense strand
ggugaacgccauccucaag

SEQ ID NO: 106588 - RNA, 19 nt, Homo sapiens
  misc_RNA (1)...(19): siRNA sense strand
uggaggaccaccugaagaa

SEQ ID NO: 106589 - RNA, 19 nt, Homo sapiens
  misc_RNA (1)...(19): siRNA sense strand
ugacaacaaagacaaacug

SEQ ID NO: 106590 - RNA, 19 nt, Homo sapiens
  misc_RNA (1)...(19): siRNA sense strand
caaagugagcgccaauguc

SEQ ID NO: 106591 - RNA, 19 nt, Homo sapiens
  misc_RNA (1)...(19): siRNA sense strand
gaugagcucagcccuaagg

SEQ ID NO: 106592 - RNA, 19 nt, Homo sapiens
  misc_RNA (1)...(19): siRNA sense strand
gagaaggccacaguugaca

SEQ ID NO: 106593 - RNA, 19 nt, Homo sapiens
  misc_RNA (1)...(19): siRNA sense strand
gacaugguucucaacaaga

SEQ ID NO: 106594 - RNA, 19 nt, Homo sapiens
  misc_RNA (1)...(19): siRNA sense strand
agagcauccugaccuaugu

SEQ ID NO: 106595 - RNA, 19 nt, Homo sapiens
  misc_RNA (1)...(19): siRNA sense strand
gagugcaggacgacgauga

SEQ ID NO: 106596 - RNA, 19 nt, Homo sapiens
  misc_RNA (1)...(19): siRNA sense strand
caacaagauggccaaaggu

SEQ ID NO: 106597 - RNA, 19 nt, Homo sapiens
  misc_RNA (1)...(19): siRNA sense strand
acaugguucucaacaagau

SEQ ID NO: 106598 - RNA, 19 nt, Homo sapiens
  misc_RNA (1)...(19): siRNA sense strand
caaucucuaccacaucuau

SEQ ID NO: 106599 - RNA, 19 nt, Homo sapiens
  misc_RNA (1)...(19): siRNA sense strand
aggaccaccugaagaacaa

SEQ ID NO: 106600 - RNA, 19 nt, Homo sapiens
  misc_RNA (1)...(19): siRNA sense strand
caaagacaaacuggaggaa

SEQ ID NO: 106601 - RNA, 19 nt, Homo sapiens
  misc_RNA (1)...(19): siRNA sense strand
cagcgacggccugcaauug

SEQ ID NO: 106602 - RNA, 19 nt, Homo sapiens
  misc_RNA (1)...(19): siRNA sense strand
aaagacaaacuggaggaaa

SEQ ID NO: 106603 - RNA, 19 nt, Homo sapiens
  misc_RNA (1)...(19): siRNA sense strand
gccaaaggugcuaaagaga

SEQ ID NO: 106604 - RNA, 19 nt, Homo sapiens
  misc_RNA (1)...(19): siRNA sense strand
agaagacuccaccaaguuc

SEQ ID NO: 106605 - RNA, 19 nt, Homo sapiens
  misc_RNA (1)...(19): siRNA sense strand
gugcaggacgacgaugaua

SEQ ID NO: 106606 - RNA, 19 nt, Homo sapiens
  misc_RNA (1)...(19): siRNA sense strand
ggcaggaugacuauacuca

SEQ ID NO: 106607 - RNA, 19 nt, Homo sapiens
  misc_RNA (1)...(19): siRNA sense strand
acagugguguggacagaca

SEQ ID NO: 106608 - RNA, 19 nt, Homo sapiens
  misc_RNA (1)...(19): siRNA sense strand
cuccuggacuuccgcagaa

SEQ ID NO: 106609 - RNA, 19 nt, Homo sapiens
  misc_RNA (1)...(19): siRNA sense strand
gcagugaccuucaaaguga

SEQ ID NO: 106610 - RNA, 19 nt, Homo sapiens
  misc_RNA (1)...(19): siRNA sense strand
ggagacagcuuuccagaug

SEQ ID NO: 106611 - RNA, 19 nt, Homo sapiens
  misc_RNA (1)...(19): siRNA sense strand
ggaaaccucuggacugaaa

SEQ ID NO: 106612 - RNA, 19 nt, Homo sapiens
  misc_RNA (1)...(19): siRNA sense strand
ccacgggucucgacucuua

SEQ ID NO: 106613 - RNA, 19 nt, Homo sapiens
  misc_RNA (1)...(19): siRNA sense strand
gugaggagcuucuaucuga

SEQ ID NO: 106614 - RNA, 19 nt, Homo sapiens
  misc_RNA (1)...(19): siRNA sense strand
caaaggugcuaaagagauu

SEQ ID NO: 106615 - RNA, 19 nt, Homo sapiens
  misc_RNA (1)...(19): siRNA sense strand
ggacgacgaugauagacuu

SEQ ID NO: 106616 - RNA, 19 nt, Homo sapiens
  misc_RNA (1)...(19): siRNA sense strand
gaugaaggcuccaaucucu

SEQ ID NO: 106617 - RNA, 19 nt, Homo sapiens
  misc_RNA (1)...(19): siRNA sense strand
cagaugagcucagcccuaa

SEQ ID NO: 106618 - RNA, 19 nt, Homo sapiens
  misc_RNA (1)...(19): siRNA sense strand
caagaagacuccaccaagu

SEQ ID NO: 106619 - RNA, 19 nt, Homo sapiens
  misc_RNA (1)...(19): siRNA sense strand
gcugauggcuggccugaug

SEQ ID NO: 106620 - RNA, 19 nt, Homo sapiens
  misc_RNA (1)...(19): siRNA sense strand
ugaagaaccugcagaccaa

SEQ ID NO: 106621 - RNA, 19 nt, Homo sapiens
  misc_RNA (1)...(19): siRNA sense strand
cgaaggagcaguuugaguu

SEQ ID NO: 106622 - RNA, 19 nt, Homo sapiens
  misc_RNA (1)...(19): siRNA sense strand
ggacagugguguggacaga

SEQ ID NO: 106623 - RNA, 19 nt, Homo sapiens
  misc_RNA (1)...(19): siRNA sense strand
ggccaaaggugcuaaagag

SEQ ID NO: 106624 - RNA, 19 nt, Homo sapiens
  misc_RNA (1)...(19): siRNA sense strand
gggccguucuuguccaaua

SEQ ID NO: 106625 - RNA, 19 nt, Homo sapiens
  misc_RNA (1)...(19): siRNA sense strand
cgacaugguucucaacaag

SEQ ID NO: 106626 - RNA, 19 nt, Homo sapiens
  misc_RNA (1)...(19): siRNA sense strand
gcaccuacguccugaucga

SEQ ID NO: 106627 - RNA, 19 nt, Homo sapiens
  misc_RNA (1)...(19): siRNA sense strand
gauggagcacggauucaua

SEQ ID NO: 106628 - RNA, 19 nt, Homo sapiens
  misc_RNA (1)...(19): siRNA sense strand
gaacagccacagccacuca

SEQ ID NO: 106629 - RNA, 19 nt, Homo sapiens
  misc_RNA (1)...(19): siRNA sense strand
caagagguccaucgucuga

SEQ ID NO: 106630 - RNA, 19 nt, Homo sapiens
  misc_RNA (1)...(19): siRNA sense strand
gagacagcuuuccagauga

SEQ ID NO: 106631 - RNA, 19 nt, Homo sapiens
  misc_RNA (1)...(19): siRNA sense strand
gaggagaacgugcccaaga

SEQ ID NO: 106632 - RNA, 19 nt, Homo sapiens
  misc_RNA (1)...(19): siRNA sense strand
gcaggacgacgaugauaga

SEQ ID NO: 106633 - RNA, 19 nt, Homo sapiens
  misc_RNA (1)...(19): siRNA sense strand
gaccagcagugaccuucaa

SEQ ID NO: 106634 - RNA, 19 nt, Homo sapiens
  misc_RNA (1)...(19): siRNA sense strand
ucaacaagauggccaaagg

SEQ ID NO: 106635 - RNA, 19 nt, Homo sapiens
  misc_RNA (1)...(19): siRNA sense strand
gcuccaaucucuaccacau

SEQ ID NO: 106636 - RNA, 19 nt, Homo sapiens
  misc_RNA (1)...(19): siRNA sense strand
gcagaaaaguaaacaagug

SEQ ID NO: 106637 - RNA, 19 nt, Homo sapiens
  misc_RNA (1)...(19): siRNA sense strand
gccagaagguuccggcaau

SEQ ID NO: 106638 - RNA, 19 nt, Homo sapiens
  misc_RNA (1)...(19): siRNA sense strand
ccagacguauuccaaagau

SEQ ID NO: 106639 - RNA, 19 nt, Homo sapiens
  misc_RNA (1)...(19): siRNA sense strand
gaaggagcaguuugaguuc

SEQ ID NO: 106640 - RNA, 19 nt, Homo sapiens
  misc_RNA (1)...(19): siRNA sense strand
gagagcauccugaccuaug

SEQ ID NO: 106641 - RNA, 19 nt, Homo sapiens
  misc_RNA (1)...(19): siRNA sense strand
caagaaugcccaggccuuu

SEQ ID NO: 106642 - RNA, 19 nt, Homo sapiens
  misc_RNA (1)...(19): siRNA sense strand
ucacguggcaggaugacua

SEQ ID NO: 106643 - RNA, 19 nt, Homo sapiens
  misc_RNA (1)...(19): siRNA sense strand
ggccguucuuguccaauaa

SEQ ID NO: 106644 - RNA, 19 nt, Homo sapiens
  misc_RNA (1)...(19): siRNA sense strand
gggagagucuggagaacag

SEQ ID NO: 106645 - RNA, 19 nt, Homo sapiens
  misc_RNA (1)...(19): siRNA sense strand
agacgaaggagcaguuuga

SEQ ID NO: 106646 - RNA, 19 nt, Homo sapiens
  misc_RNA (1)...(19): siRNA sense strand
cagcgacccuggagcacuu

SEQ ID NO: 106647 - RNA, 19 nt, Homo sapiens
  misc_RNA (1)...(19): siRNA sense strand
caggaugacuauacucagu

SEQ ID NO: 106648 - RNA, 19 nt, Homo sapiens
  misc_RNA (1)...(19): siRNA sense strand
gucaagagccagacguauu

SEQ ID NO: 106649 - RNA, 19 nt, Homo sapiens
  misc_RNA (1)...(19): siRNA sense strand
gcgacggccugcaauugga

SEQ ID NO: 106650 - RNA, 19 nt, Homo sapiens
  misc_RNA (1)...(19): siRNA sense strand
gcacuugagggaccagaga

SEQ ID NO: 106651 - RNA, 19 nt, Homo sapiens
  misc_RNA (1)...(19): siRNA sense strand
aggagaacgugcccaagaa

SEQ ID NO: 106652 - RNA, 19 nt, Homo sapiens
  misc_RNA (1)...(19): siRNA sense strand
ucaagagccagacguauuc

SEQ ID NO: 106653 - RNA, 19 nt, Homo sapiens
  misc_RNA (1)...(19): siRNA sense strand
ccaaaggugcuaaagagau

SEQ ID NO: 106654 - RNA, 19 nt, Homo sapiens
  misc_RNA (1)...(19): siRNA sense strand
agaaccggcuggagaagga

SEQ ID NO: 106655 - RNA, 19 nt, Homo sapiens
  misc_RNA (1)...(19): siRNA sense strand
agucuucccugucuucaga

SEQ ID NO: 106656 - RNA, 19 nt, Homo sapiens
  misc_RNA (1)...(19): siRNA sense strand
ccgagagcauccugaccua

SEQ ID NO: 106657 - RNA, 19 nt, Homo sapiens
  misc_RNA (1)...(19): siRNA sense strand
gugcuaaagagauugauau

SEQ ID NO: 106658 - RNA, 19 nt, Homo sapiens
  misc_RNA (1)...(19): siRNA sense strand
ccgcacacgucacgcauca

SEQ ID NO: 106659 - RNA, 19 nt, Homo sapiens
  misc_RNA (1)...(19): siRNA sense strand
ccucuggccucaucuacug

SEQ ID NO: 106660 - RNA, 19 nt, Homo sapiens
  misc_RNA (1)...(19): siRNA sense strand
gagccagacguauuccaaa

SEQ ID NO: 106661 - RNA, 19 nt, Homo sapiens
  misc_RNA (1)...(19): siRNA sense strand
ugauagacuuuaccaagag

SEQ ID NO: 106662 - RNA, 19 nt, Homo sapiens
  misc_RNA (1)...(19): siRNA sense strand
ccagaagguuccggcaaug

SEQ ID NO: 106663 - RNA, 19 nt, Homo sapiens
  misc_RNA (1)...(19): siRNA sense strand
cgacgaugauagacuuuac

SEQ ID NO: 106664 - RNA, 19 nt, Homo sapiens
  misc_RNA (1)...(19): siRNA sense strand
acaagaaccggcuggagaa

SEQ ID NO: 106665 - RNA, 19 nt, Homo sapiens
  misc_RNA (1)...(19): siRNA sense strand
augauagacuuuaccaaga

SEQ ID NO: 106666 - RNA, 19 nt, Homo sapiens
  misc_RNA (1)...(19): siRNA sense strand
ccacaucuaugaggugaac

SEQ ID NO: 106667 - RNA, 19 nt, Homo sapiens
  misc_RNA (1)...(19): siRNA sense strand
ggagaaggccacaguugac

SEQ ID NO: 106668 - RNA, 19 nt, Homo sapiens
  misc_RNA (1)...(19): siRNA sense strand
gaggaccaccugaagaaca

SEQ ID NO: 106669 - RNA, 19 nt, Homo sapiens
  misc_RNA (1)...(19): siRNA sense strand
gaagacuccaccaaguuca

SEQ ID NO: 106670 - RNA, 19 nt, Homo sapiens
  misc_RNA (1)...(19): siRNA sense strand
aagaagacuccaccaaguu

SEQ ID NO: 106671 - RNA, 19 nt, Homo sapiens
  misc_RNA (1)...(19): siRNA sense strand
gccacaugauccuguccua

SEQ ID NO: 106672 - RNA, 19 nt, Homo sapiens
  misc_RNA (1)...(19): siRNA sense strand
ggugcuaaagagauugaua

SEQ ID NO: 106673 - RNA, 19 nt, Homo sapiens
  misc_RNA (1)...(19): siRNA sense strand
gcaguuccacuuccugagu

SEQ ID NO: 106674 - RNA, 19 nt, Homo sapiens
  misc_RNA (1)...(19): siRNA sense strand
ucaaagugagcgccaaugu

SEQ ID NO: 106675 - RNA, 19 nt, Homo sapiens
  misc_RNA (1)...(19): siRNA sense strand
gaaaaguaaacaagugcua

SEQ ID NO: 106676 - RNA, 19 nt, Homo sapiens
  misc_RNA (1)...(19): siRNA sense strand
aagacaaacuggaggaaac

SEQ ID NO: 106677 - RNA, 19 nt, Homo sapiens
  misc_RNA (1)...(19): siRNA sense strand
gcaaggcguggaccaugga

SEQ ID NO: 106678 - RNA, 19 nt, Homo sapiens
  misc_RNA (1)...(19): siRNA sense strand
caguuccacuuccugaguu

SEQ ID NO: 106679 - RNA, 19 nt, Homo sapiens
  misc_RNA (1)...(19): siRNA sense strand
ugaggagcuucuaucugaa

SEQ ID NO: 106680 - RNA, 19 nt, Homo sapiens
  misc_RNA (1)...(19): siRNA sense strand
caucuggugugaggacuuc

SEQ ID NO: 106681 - RNA, 19 nt, Homo sapiens
  misc_RNA (1)...(19): siRNA sense strand
ggaugaaggcuccaaucuc

SEQ ID NO: 106682 - RNA, 19 nt, Homo sapiens
  misc_RNA (1)...(19): siRNA sense strand
ccacucagacuacaucaac

SEQ ID NO: 106683 - RNA, 19 nt, Homo sapiens
  misc_RNA (1)...(19): siRNA sense strand
ccacagccacucagacuac

SEQ ID NO: 106684 - RNA, 19 nt, Homo sapiens
  misc_RNA (1)...(19): siRNA sense strand
gauggaguguuuggaaggu

SEQ ID NO: 106685 - RNA, 19 nt, Homo sapiens
  misc_RNA (1)...(19): siRNA sense strand
uggagaaggccacaguuga

SEQ ID NO: 106686 - RNA, 19 nt, Homo sapiens
  misc_RNA (1)...(19): siRNA sense strand
cagcagugaccuucaaagu

SEQ ID NO: 106687 - RNA, 19 nt, Homo sapiens
  misc_RNA (1)...(19): siRNA sense strand
ggugaacgccauccucaag

SEQ ID NO: 106688 - RNA, 19 nt, Homo sapiens
  misc_RNA (1)...(19): siRNA sense strand
uggaggaccaccugaagaa

SEQ ID NO: 106689 - RNA, 19 nt, Homo sapiens
  misc_RNA (1)...(19): siRNA sense strand
ugacaacaaagacaaacug

SEQ ID NO: 106690 - RNA, 19 nt, Homo sapiens
  misc_RNA (1)...(19): siRNA sense strand
caaagugagcgccaauguc

SEQ ID NO: 106691 - RNA, 19 nt, Homo sapiens
  misc_RNA (1)...(19): siRNA sense strand
gaugagcucagcccuaagg

SEQ ID NO: 106692 - RNA, 19 nt, Homo sapiens
  misc_RNA (1)...(19): siRNA sense strand
gagaaggccacaguugaca

SEQ ID NO: 106693 - RNA, 19 nt, Homo sapiens
  misc_RNA (1)...(19): siRNA sense strand
gacaugguucucaacaaga

SEQ ID NO: 106694 - RNA, 19 nt, Homo sapiens
  misc_RNA (1)...(19): siRNA sense strand
agagcauccugaccuaugu

SEQ ID NO: 106695 - RNA, 19 nt, Homo sapiens
  misc_RNA (1)...(19): siRNA sense strand
gagugcaggacgacgauga

SEQ ID NO: 106696 - RNA, 19 nt, Homo sapiens
  misc_RNA (1)...(19): siRNA sense strand
caacaagauggccaaaggu

SEQ ID NO: 106697 - RNA, 19 nt, Homo sapiens
  misc_RNA (1)...(19): siRNA sense strand
acaugguucucaacaagau

SEQ ID NO: 106698 - RNA, 19 nt, Homo sapiens
  misc_RNA (1)...(19): siRNA sense strand
caaucucuaccacaucuau

SEQ ID NO: 106699 - RNA, 19 nt, Homo sapiens
  misc_RNA (1)...(19): siRNA sense strand
aggaccaccugaagaacaa

SEQ ID NO: 106700 - RNA, 19 nt, Homo sapiens
  misc_RNA (1)...(19): siRNA sense strand
caaagacaaacuggaggaa

SEQ ID NO: 106701 - RNA, 19 nt, Homo sapiens
  misc_RNA (1)...(19): siRNA sense strand
cagcgacggccugcaauug

SEQ ID NO: 106702 - RNA, 19 nt, Homo sapiens
  misc_RNA (1)...(19): siRNA sense strand
aaagacaaacuggaggaaa

SEQ ID NO: 106703 - RNA, 19 nt, Homo sapiens
  misc_RNA (1)...(19): siRNA sense strand
gccaaaggugcuaaagaga

SEQ ID NO: 106704 - RNA, 19 nt, Homo sapiens
  misc_RNA (1)...(19): siRNA sense strand
agaagacuccaccaaguuc

SEQ ID NO: 106705 - RNA, 19 nt, Homo sapiens
  misc_RNA (1)...(19): siRNA sense strand
gugcaggacgacgaugaua

SEQ ID NO: 106706 - RNA, 19 nt, Homo sapiens
  misc_RNA (1)...(19): siRNA sense strand
ggcaggaugacuauacuca

SEQ ID NO: 106707 - RNA, 19 nt, Homo sapiens
  misc_RNA (1)...(19): siRNA sense strand
acagugguguggacagaca

SEQ ID NO: 106708 - RNA, 19 nt, Homo sapiens
  misc_RNA (1)...(19): siRNA sense strand
cuccuggacuuccgcagaa

SEQ ID NO: 106709 - RNA, 19 nt, Homo sapiens
  misc_RNA (1)...(19): siRNA sense strand
gcagugaccuucaaaguga

SEQ ID NO: 106710 - RNA, 19 nt, Homo sapiens
  misc_RNA (1)...(19): siRNA sense strand
ggagacagcuuuccagaug

SEQ ID NO: 106711 - RNA, 19 nt, Homo sapiens
  misc_RNA (1)...(19): siRNA sense strand
ggaaaccucuggacugaaa

SEQ ID NO: 106712 - RNA, 19 nt, Homo sapiens
  misc_RNA (1)...(19): siRNA sense strand
ccacgggucucgacucuua

SEQ ID NO: 106713 - RNA, 19 nt, Homo sapiens
  misc_RNA (1)...(19): siRNA sense strand
gugaggagcuucuaucuga

SEQ ID NO: 106714 - RNA, 19 nt, Homo sapiens
  misc_RNA (1)...(19): siRNA sense strand
caaaggugcuaaagagauu

SEQ ID NO: 106715 - RNA, 19 nt, Homo sapiens
  misc_RNA (1)...(19): siRNA sense strand
ggacgacgaugauagacuu

SEQ ID NO: 106716 - RNA, 19 nt, Homo sapiens
  misc_RNA (1)...(19): siRNA sense strand
gaugaaggcuccaaucucu

SEQ ID NO: 106717 - RNA, 19 nt, Homo sapiens
  misc_RNA (1)...(19): siRNA sense strand
cagaugagcucagcccuaa

SEQ ID NO: 106718 - RNA, 19 nt, Homo sapiens
  misc_RNA (1)...(19): siRNA sense strand
caagaagacuccaccaagu

SEQ ID NO: 106719 - RNA, 19 nt, Homo sapiens
  misc_RNA (1)...(19): siRNA sense strand
gcugauggcuggccugaug

SEQ ID NO: 106720 - RNA, 19 nt, Homo sapiens
  misc_RNA (1)...(19): siRNA sense strand
ugaagaaccugcagaccaa

SEQ ID NO: 106721 - RNA, 19 nt, Homo sapiens
  misc_RNA (1)...(19): siRNA sense strand
cgaaggagcaguuugaguu

SEQ ID NO: 106722 - RNA, 19 nt, Homo sapiens
  misc_RNA (1)...(19): siRNA sense strand
ggacagugguguggacaga

SEQ ID NO: 106723 - RNA, 19 nt, Homo sapiens
  misc_RNA (1)...(19): siRNA sense strand
ggccaaaggugcuaaagag

SEQ ID NO: 106724 - RNA, 19 nt, Homo sapiens
  misc_RNA (1)...(19): siRNA sense strand
gggccguucuuguccaaua

SEQ ID NO: 106725 - RNA, 19 nt, Homo sapiens
  misc_RNA (1)...(19): siRNA sense strand
cgacaugguucucaacaag

SEQ ID NO: 106726 - RNA, 19 nt, Homo sapiens
  misc_RNA (1)...(19): siRNA sense strand
gcaccuacguccugaucga

SEQ ID NO: 106727 - RNA, 19 nt, Homo sapiens
  misc_RNA (1)...(19): siRNA sense strand
gauggagcacggauucaua

SEQ ID NO: 106728 - RNA, 19 nt, Homo sapiens
  misc_RNA (1)...(19): siRNA sense strand
gaacagccacagccacuca

SEQ ID NO: 106729 - RNA, 19 nt, Homo sapiens
  misc_RNA (1)...(19): siRNA sense strand
caagagguccaucgucuga

SEQ ID NO: 106730 - RNA, 19 nt, Homo sapiens
  misc_RNA (1)...(19): siRNA sense strand
gagacagcuuuccagauga

SEQ ID NO: 106731 - RNA, 19 nt, Homo sapiens
  misc_RNA (1)...(19): siRNA sense strand
gaggagaacgugcccaaga

SEQ ID NO: 106732 - RNA, 19 nt, Homo sapiens
  misc_RNA (1)...(19): siRNA sense strand
gcaggacgacgaugauaga

SEQ ID NO: 106733 - RNA, 19 nt, Homo sapiens
  misc_RNA (1)...(19): siRNA sense strand
gaccagcagugaccuucaa

SEQ ID NO: 106734 - RNA, 19 nt, Homo sapiens
  misc_RNA (1)...(19): siRNA sense strand
ucaacaagauggccaaagg

SEQ ID NO: 106735 - RNA, 19 nt, Homo sapiens
  misc_RNA (1)...(19): siRNA sense strand
gcuccaaucucuaccacau

SEQ ID NO: 106736 - RNA, 19 nt, Homo sapiens
  misc_RNA (1)...(19): siRNA sense strand
gcagaaaaguaaacaagug

SEQ ID NO: 106737 - RNA, 19 nt, Homo sapiens
  misc_RNA (1)...(19): siRNA sense strand
gccagaagguuccggcaau

SEQ ID NO: 106738 - RNA, 19 nt, Homo sapiens
  misc_RNA (1)...(19): siRNA sense strand
ccagacguauuccaaagau

SEQ ID NO: 106739 - RNA, 19 nt, Homo sapiens
  misc_RNA (1)...(19): siRNA sense strand
gaaggagcaguuugaguuc

SEQ ID NO: 106740 - RNA, 19 nt, Homo sapiens
  misc_RNA (1)...(19): siRNA sense strand
gagagcauccugaccuaug

SEQ ID NO: 106741 - RNA, 19 nt, Homo sapiens
  misc_RNA (1)...(19): siRNA sense strand
caagaaugcccaggccuuu

SEQ ID NO: 106742 - RNA, 19 nt, Homo sapiens
  misc_RNA (1)...(19): siRNA sense strand
ucacguggcaggaugacua

SEQ ID NO: 106743 - RNA, 19 nt, Homo sapiens
  misc_RNA (1)...(19): siRNA sense strand
ggccguucuuguccaauaa

SEQ ID NO: 106744 - RNA, 19 nt, Homo sapiens
  misc_RNA (1)...(19): siRNA sense strand
gggagagucuggagaacag

SEQ ID NO: 106745 - RNA, 19 nt, Homo sapiens
  misc_RNA (1)...(19): siRNA sense strand
agacgaaggagcaguuuga

SEQ ID NO: 106746 - RNA, 19 nt, Homo sapiens
  misc_RNA (1)...(19): siRNA sense strand
cagcgacccuggagcacuu

SEQ ID NO: 106747 - RNA, 19 nt, Homo sapiens
  misc_RNA (1)...(19): siRNA sense strand
caggaugacuauacucagu

SEQ ID NO: 106748 - RNA, 19 nt, Homo sapiens
  misc_RNA (1)...(19): siRNA sense strand
gucaagagccagacguauu

SEQ ID NO: 106749 - RNA, 19 nt, Homo sapiens
  misc_RNA (1)...(19): siRNA sense strand
gcgacggccugcaauugga

SEQ ID NO: 106750 - RNA, 19 nt, Homo sapiens
  misc_RNA (1)...(19): siRNA sense strand
gcacuugagggaccagaga

SEQ ID NO: 106751 - RNA, 19 nt, Homo sapiens
  misc_RNA (1)...(19): siRNA sense strand
aggagaacgugcccaagaa

SEQ ID NO: 106752 - RNA, 19 nt, Homo sapiens
  misc_RNA (1)...(19): siRNA sense strand
ucaagagccagacguauuc

SEQ ID NO: 106753 - RNA, 19 nt, Homo sapiens
  misc_RNA (1)...(19): siRNA sense strand
ccaaaggugcuaaagagau

SEQ ID NO: 106754 - RNA, 19 nt, Homo sapiens
  misc_RNA (1)...(19): siRNA sense strand
agaaccggcuggagaagga

SEQ ID NO: 106755 - RNA, 19 nt, Homo sapiens
  misc_RNA (1)...(19): siRNA sense strand
agucuucccugucuucaga

SEQ ID NO: 106756 - RNA, 19 nt, Homo sapiens
  misc_RNA (1)...(19): siRNA sense strand
ccgagagcauccugaccua

SEQ ID NO: 106757 - RNA, 19 nt, Homo sapiens
  misc_RNA (1)...(19): siRNA sense strand
gugcuaaagagauugauau

SEQ ID NO: 106758 - RNA, 19 nt, Homo sapiens
  misc_RNA (1)...(19): siRNA sense strand
ccgcacacgucacgcauca

SEQ ID NO: 106759 - RNA, 19 nt, Homo sapiens
  misc_RNA (1)...(19): siRNA sense strand
ccucuggccucaucuacug

SEQ ID NO: 106760 - RNA, 19 nt, Homo sapiens
  misc_RNA (1)...(19): siRNA sense strand
gagccagacguauuccaaa

SEQ ID NO: 106761 - RNA, 19 nt, Homo sapiens
  misc_RNA (1)...(19): siRNA sense strand
ugauagacuuuaccaagag

SEQ ID NO: 106762 - RNA, 19 nt, Homo sapiens
  misc_RNA (1)...(19): siRNA sense strand
ccagaagguuccggcaaug

SEQ ID NO: 106763 - RNA, 19 nt, Homo sapiens
  misc_RNA (1)...(19): siRNA sense strand
cgacgaugauagacuuuac

SEQ ID NO: 106764 - RNA, 19 nt, Homo sapiens
  misc_RNA (1)...(19): siRNA sense strand
acaagaaccggcuggagaa

SEQ ID NO: 106765 - RNA, 19 nt, Homo sapiens
  misc_RNA (1)...(19): siRNA sense strand
augauagacuuuaccaaga

SEQ ID NO: 106766 - RNA, 19 nt, Homo sapiens
  misc_RNA (1)...(19): siRNA sense strand
ccacaucuaugaggugaac

SEQ ID NO: 106767 - RNA, 19 nt, Homo sapiens
  misc_RNA (1)...(19): siRNA sense strand
ggagaaggccacaguugac

SEQ ID NO: 106768 - RNA, 19 nt, Homo sapiens
  misc_RNA (1)...(19): siRNA sense strand
gaggaccaccugaagaaca

SEQ ID NO: 106769 - RNA, 19 nt, Homo sapiens
  misc_RNA (1)...(19): siRNA sense strand
gaagacuccaccaaguuca

SEQ ID NO: 106770 - RNA, 19 nt, Homo sapiens
  misc_RNA (1)...(19): siRNA sense strand
aagaagacuccaccaaguu

SEQ ID NO: 106771 - RNA, 19 nt, Homo sapiens
  misc_RNA (1)...(19): siRNA sense strand
gccacaugauccuguccua

SEQ ID NO: 106772 - RNA, 19 nt, Homo sapiens
  misc_RNA (1)...(19): siRNA sense strand
ggugcuaaagagauugaua

SEQ ID NO: 106773 - RNA, 19 nt, Homo sapiens
  misc_RNA (1)...(19): siRNA sense strand
gcaguuccacuuccugagu

SEQ ID NO: 106774 - RNA, 19 nt, Homo sapiens
  misc_RNA (1)...(19): siRNA sense strand
ucaaagugagcgccaaugu

SEQ ID NO: 106775 - RNA, 19 nt, Homo sapiens
  misc_RNA (1)...(19): siRNA sense strand
gaaaaguaaacaagugcua

SEQ ID NO: 106776 - RNA, 19 nt, Homo sapiens
  misc_RNA (1)...(19): siRNA sense strand
aagacaaacuggaggaaac

SEQ ID NO: 106777 - RNA, 19 nt, Homo sapiens
  misc_RNA (1)...(19): siRNA sense strand
gcaaggcguggaccaugga

SEQ ID NO: 106778 - RNA, 19 nt, Homo sapiens
  misc_RNA (1)...(19): siRNA sense strand
caguuccacuuccugaguu

SEQ ID NO: 106779 - RNA, 19 nt, Homo sapiens
  misc_RNA (1)...(19): siRNA sense strand
ugaggagcuucuaucugaa

SEQ ID NO: 106780 - RNA, 19 nt, Homo sapiens
  misc_RNA (1)...(19): siRNA sense strand
caucuggugugaggacuuc

SEQ ID NO: 106781 - RNA, 19 nt, Homo sapiens
  misc_RNA (1)...(19): siRNA sense strand
ggaugaaggcuccaaucuc

SEQ ID NO: 106782 - RNA, 19 nt, Homo sapiens
  misc_RNA (1)...(19): siRNA sense strand
ccacucagacuacaucaac

SEQ ID NO: 106783 - RNA, 19 nt, Homo sapiens
  misc_RNA (1)...(19): siRNA sense strand
ccacagccacucagacuac

SEQ ID NO: 106784 - RNA, 19 nt, Homo sapiens
  misc_RNA (1)...(19): siRNA sense strand
gauggaguguuuggaaggu

SEQ ID NO: 106785 - RNA, 19 nt, Homo sapiens
  misc_RNA (1)...(19): siRNA sense strand
uggagaaggccacaguuga

SEQ ID NO: 106786 - RNA, 19 nt, Homo sapiens
  misc_RNA (1)...(19): siRNA sense strand
cagcagugaccuucaaagu

SEQ ID NO: 106787 - RNA, 19 nt, Homo sapiens
  misc_RNA (1)...(19): siRNA sense strand
ggugaacgccauccucaag

SEQ ID NO: 106788 - RNA, 19 nt, Homo sapiens
  misc_RNA (1)...(19): siRNA sense strand
uggaggaccaccugaagaa

SEQ ID NO: 106789 - RNA, 19 nt, Homo sapiens
  misc_RNA (1)...(19): siRNA sense strand
ugacaacaaagacaaacug

SEQ ID NO: 106790 - RNA, 19 nt, Homo sapiens
  misc_RNA (1)...(19): siRNA sense strand
caaagugagcgccaauguc

SEQ ID NO: 106791 - RNA, 19 nt, Homo sapiens
  misc_RNA (1)...(19): siRNA sense strand
gaugagcucagcccuaagg

SEQ ID NO: 106792 - RNA, 19 nt, Homo sapiens
  misc_RNA (1)...(19): siRNA sense strand
gagaaggccacaguugaca

SEQ ID NO: 106793 - RNA, 19 nt, Homo sapiens
  misc_RNA (1)...(19): siRNA sense strand
gacaugguucucaacaaga

SEQ ID NO: 106794 - RNA, 19 nt, Homo sapiens
  misc_RNA (1)...(19): siRNA sense strand
agagcauccugaccuaugu

SEQ ID NO: 106795 - RNA, 19 nt, Homo sapiens
  misc_RNA (1)...(19): siRNA sense strand
gagugcaggacgacgauga

SEQ ID NO: 106796 - RNA, 19 nt, Homo sapiens
  misc_RNA (1)...(19): siRNA sense strand
caacaagauggccaaaggu

SEQ ID NO: 106797 - RNA, 19 nt, Homo sapiens
  misc_RNA (1)...(19): siRNA sense strand
acaugguucucaacaagau

SEQ ID NO: 106798 - RNA, 19 nt, Homo sapiens
  misc_RNA (1)...(19): siRNA sense strand
caaucucuaccacaucuau

SEQ ID NO: 106799 - RNA, 19 nt, Homo sapiens
  misc_RNA (1)...(19): siRNA sense strand
aggaccaccugaagaacaa

SEQ ID NO: 106800 - RNA, 19 nt, Homo sapiens
  misc_RNA (1)...(19): siRNA sense strand
caaagacaaacuggaggaa

SEQ ID NO: 106801 - RNA, 19 nt, Homo sapiens
  misc_RNA (1)...(19): siRNA sense strand
cagcgacggccugcaauug

SEQ ID NO: 106802 - RNA, 19 nt, Homo sapiens
  misc_RNA (1)...(19): siRNA sense strand
aaagacaaacuggaggaaa

SEQ ID NO: 106803 - RNA, 19 nt, Homo sapiens
  misc_RNA (1)...(19): siRNA sense strand
gccaaaggugcuaaagaga

SEQ ID NO: 106804 - RNA, 19 nt, Homo sapiens
  misc_RNA (1)...(19): siRNA sense strand
agaagacuccaccaaguuc

SEQ ID NO: 106805 - RNA, 19 nt, Homo sapiens
  misc_RNA (1)...(19): siRNA sense strand
gugcaggacgacgaugaua

SEQ ID NO: 106806 - RNA, 19 nt, Homo sapiens
  misc_RNA (1)...(19): siRNA sense strand
ggcaggaugacuauacuca

SEQ ID NO: 106807 - RNA, 19 nt, Homo sapiens
  misc_RNA (1)...(19): siRNA sense strand
acagugguguggacagaca

SEQ ID NO: 106808 - RNA, 19 nt, Homo sapiens
  misc_RNA (1)...(19): siRNA sense strand
cuccuggacuuccgcagaa

SEQ ID NO: 106809 - RNA, 19 nt, Homo sapiens
  misc_RNA (1)...(19): siRNA sense strand
gggaguagcugauuucuuu

SEQ ID NO: 106810 - RNA, 19 nt, Homo sapiens
  misc_RNA (1)...(19): siRNA sense strand
caaagacucugacuauaaa

SEQ ID NO: 106811 - RNA, 19 nt, Homo sapiens
  misc_RNA (1)...(19): siRNA sense strand
caacaaaagucucagauua

SEQ ID NO: 106812 - RNA, 19 nt, Homo sapiens
  misc_RNA (1)...(19): siRNA sense strand
gaaaguauccugcaguuug

SEQ ID NO: 106813 - RNA, 19 nt, Homo sapiens
  misc_RNA (1)...(19): siRNA sense strand
acacaaacauccuaccaua

SEQ ID NO: 106814 - RNA, 19 nt, Homo sapiens
  misc_RNA (1)...(19): siRNA sense strand
caacugauguggaugaaga

SEQ ID NO: 106815 - RNA, 19 nt, Homo sapiens
  misc_RNA (1)...(19): siRNA sense strand
gagcaaaggucccaugauc

SEQ ID NO: 106816 - RNA, 19 nt, Homo sapiens
  misc_RNA (1)...(19): siRNA sense strand
caaguuggcuccagucaga

SEQ ID NO: 106817 - RNA, 19 nt, Homo sapiens
  misc_RNA (1)...(19): siRNA sense strand
ccaacuauauuccuggaua

SEQ ID NO: 106818 - RNA, 19 nt, Homo sapiens
  misc_RNA (1)...(19): siRNA sense strand
ccaaagacucugacuauaa

SEQ ID NO: 106819 - RNA, 19 nt, Homo sapiens
  misc_RNA (1)...(19): siRNA sense strand
caacuaugcugacgagaug

SEQ ID NO: 106820 - RNA, 19 nt, Homo sapiens
  misc_RNA (1)...(19): siRNA sense strand
guguggagcugguacauuu

SEQ ID NO: 106821 - RNA, 19 nt, Homo sapiens
  misc_RNA (1)...(19): siRNA sense strand
gaaauugauuggacuggau

SEQ ID NO: 106822 - RNA, 19 nt, Homo sapiens
  misc_RNA (1)...(19): siRNA sense strand
ggagaugauuucagaggaa

SEQ ID NO: 106823 - RNA, 19 nt, Homo sapiens
  misc_RNA (1)...(19): siRNA sense strand
caacaaugguuacagagau

SEQ ID NO: 106824 - RNA, 19 nt, Homo sapiens
  misc_RNA (1)...(19): siRNA sense strand
caaacauccuaccauauga

SEQ ID NO: 106825 - RNA, 19 nt, Homo sapiens
  misc_RNA (1)...(19): siRNA sense strand
aaaggagggugaaauguga

SEQ ID NO: 106826 - RNA, 19 nt, Homo sapiens
  misc_RNA (1)...(19): siRNA sense strand
cuacaucaaugccaacuau

SEQ ID NO: 106827 - RNA, 19 nt, Homo sapiens
  misc_RNA (1)...(19): siRNA sense strand
uuaaggauauggccaaaga

SEQ ID NO: 106828 - RNA, 19 nt, Homo sapiens
  misc_RNA (1)...(19): siRNA sense strand
gccaaagacucugacuaua

SEQ ID NO: 106829 - RNA, 19 nt, Homo sapiens
  misc_RNA (1)...(19): siRNA sense strand
gcugauuucuuugaaguuu

SEQ ID NO: 106830 - RNA, 19 nt, Homo sapiens
  misc_RNA (1)...(19): siRNA sense strand
ugacuuugaugccuauauu

SEQ ID NO: 106831 - RNA, 19 nt, Homo sapiens
  misc_RNA (1)...(19): siRNA sense strand
gcagauggcuagggagugu

SEQ ID NO: 106832 - RNA, 19 nt, Homo sapiens
  misc_RNA (1)...(19): siRNA sense strand
ggucauaccggaugucuau

SEQ ID NO: 106833 - RNA, 19 nt, Homo sapiens
  misc_RNA (1)...(19): siRNA sense strand
ggaagaugguccugcaaca

SEQ ID NO: 106834 - RNA, 19 nt, Homo sapiens
  misc_RNA (1)...(19): siRNA sense strand
cagaaaguauccugcaguu

SEQ ID NO: 106835 - RNA, 19 nt, Homo sapiens
  misc_RNA (1)...(19): siRNA sense strand
gaccauuacuggccauuca

SEQ ID NO: 106836 - RNA, 19 nt, Homo sapiens
  misc_RNA (1)...(19): siRNA sense strand
ggccaaagacucugacuau

SEQ ID NO: 106837 - RNA, 19 nt, Homo sapiens
  misc_RNA (1)...(19): siRNA sense strand
gaagagggaguagcugauu

SEQ ID NO: 106838 - RNA, 19 nt, Homo sapiens
  misc_RNA (1)...(19): siRNA sense strand
ugauguggaugaagaagaa

SEQ ID NO: 106839 - RNA, 19 nt, Homo sapiens
  misc_RNA (1)...(19): siRNA sense strand
gcaaaggucccaugaucau

SEQ ID NO: 106840 - RNA, 19 nt, Homo sapiens
  misc_RNA (1)...(19): siRNA sense strand
gcugguacauuugucaauu

SEQ ID NO: 106841 - RNA, 19 nt, Homo sapiens
  misc_RNA (1)...(19): siRNA sense strand
guucauagccgucucaaca

SEQ ID NO: 106842 - RNA, 19 nt, Homo sapiens
  misc_RNA (1)...(19): siRNA sense strand
agaaccagcuccacccaaa

SEQ ID NO: 106843 - RNA, 19 nt, Homo sapiens
  misc_RNA (1)...(19): siRNA sense strand
ucagugaugucauauacga

SEQ ID NO: 106844 - RNA, 19 nt, Homo sapiens
  misc_RNA (1)...(19): siRNA sense strand
cugcagaucuuccacugaa

SEQ ID NO: 106845 - RNA, 19 nt, Homo sapiens
  misc_RNA (1)...(19): siRNA sense strand
gggcuggugucagaaauga

SEQ ID NO: 106846 - RNA, 19 nt, Homo sapiens
  misc_RNA (1)...(19): siRNA sense strand
gcaaaugcugcagaaagua

SEQ ID NO: 106847 - RNA, 19 nt, Homo sapiens
  misc_RNA (1)...(19): siRNA sense strand
ggacggacaggaacauuca

SEQ ID NO: 106848 - RNA, 19 nt, Homo sapiens
  misc_RNA (1)...(19): siRNA sense strand
ggaaccaguugcuguuucu

SEQ ID NO: 106849 - RNA, 19 nt, Homo sapiens
  misc_RNA (1)...(19): siRNA sense strand
acaaacauccuaccauaug

SEQ ID NO: 106850 - RNA, 19 nt, Homo sapiens
  misc_RNA (1)...(19): siRNA sense strand
caucaaugccaacuauauu

SEQ ID NO: 106851 - RNA, 19 nt, Homo sapiens
  misc_RNA (1)...(19): siRNA sense strand
ucucaacaaugguuacaga

SEQ ID NO: 106852 - RNA, 19 nt, Homo sapiens
  misc_RNA (1)...(19): siRNA sense strand
gaagaugguccugcaacaa

SEQ ID NO: 106853 - RNA, 19 nt, Homo sapiens
  misc_RNA (1)...(19): siRNA sense strand
acacuuugcugcagaucuu

SEQ ID NO: 106854 - RNA, 19 nt, Homo sapiens
  misc_RNA (1)...(19): siRNA sense strand
uaauuggacuguugcuugu

SEQ ID NO: 106855 - RNA, 19 nt, Homo sapiens
  misc_RNA (1)...(19): siRNA sense strand
gaugaaucccaauguggua

SEQ ID NO: 106856 - RNA, 19 nt, Homo sapiens
  misc_RNA (1)...(19): siRNA sense strand
cuucagccgugugagauua

SEQ ID NO: 106857 - RNA, 19 nt, Homo sapiens
  misc_RNA (1)...(19): siRNA sense strand
uuaaagaagaggaaacuga

SEQ ID NO: 106858 - RNA, 19 nt, Homo sapiens
  misc_RNA (1)...(19): siRNA sense strand
agagagggauggaaagcuu

SEQ ID NO: 106859 - RNA, 19 nt, Homo sapiens
  misc_RNA (1)...(19): siRNA sense strand
ggaugacuuugaugccuau

SEQ ID NO: 106860 - RNA, 19 nt, Homo sapiens
  misc_RNA (1)...(19): siRNA sense strand
aaaguauccugcaguuugu

SEQ ID NO: 106861 - RNA, 19 nt, Homo sapiens
  misc_RNA (1)...(19): siRNA sense strand
caaaugcugcagaaaguau

SEQ ID NO: 106862 - RNA, 19 nt, Homo sapiens
  misc_RNA (1)...(19): siRNA sense strand
ugaagaagaagcagcaguu

SEQ ID NO: 106863 - RNA, 19 nt, Homo sapiens
  misc_RNA (1)...(19): siRNA sense strand
agauuagucuccaugaaug

SEQ ID NO: 106864 - RNA, 19 nt, Homo sapiens
  misc_RNA (1)...(19): siRNA sense strand
agaggaaggugcagacuac

SEQ ID NO: 106865 - RNA, 19 nt, Homo sapiens
  misc_RNA (1)...(19): siRNA sense strand
uguagacacuuccggauca

SEQ ID NO: 106866 - RNA, 19 nt, Homo sapiens
  misc_RNA (1)...(19): siRNA sense strand
ggaaggugcagacuacauc

SEQ ID NO: 106867 - RNA, 19 nt, Homo sapiens
  misc_RNA (1)...(19): siRNA sense strand
ggauauggccaaagacucu

SEQ ID NO: 106868 - RNA, 19 nt, Homo sapiens
  misc_RNA (1)...(19): siRNA sense strand
gaacaaaacccagacuuca

SEQ ID NO: 106869 - RNA, 19 nt, Homo sapiens
  misc_RNA (1)...(19): siRNA sense strand
agagaugaaucccaaugug

SEQ ID NO: 106870 - RNA, 19 nt, Homo sapiens
  misc_RNA (1)...(19): siRNA sense strand
ucuuagggcuggugucaga

SEQ ID NO: 106871 - RNA, 19 nt, Homo sapiens
  misc_RNA (1)...(19): siRNA sense strand
aagagggaguagcugauuu

SEQ ID NO: 106872 - RNA, 19 nt, Homo sapiens
  misc_RNA (1)...(19): siRNA sense strand
caacuauauuccuggauac

SEQ ID NO: 106873 - RNA, 19 nt, Homo sapiens
  misc_RNA (1)...(19): siRNA sense strand
uagcugauuucuuugaagu

SEQ ID NO: 106874 - RNA, 19 nt, Homo sapiens
  misc_RNA (1)...(19): siRNA sense strand
ucauagccgucucaacaau

SEQ ID NO: 106875 - RNA, 19 nt, Homo sapiens
  misc_RNA (1)...(19): siRNA sense strand
gaagaagaagcagcaguuc

SEQ ID NO: 106876 - RNA, 19 nt, Homo sapiens
  misc_RNA (1)...(19): siRNA sense strand
cugguacauuugucaauuu

SEQ ID NO: 106877 - RNA, 19 nt, Homo sapiens
  misc_RNA (1)...(19): siRNA sense strand
guuacccucauuauucuua

SEQ ID NO: 106878 - RNA, 19 nt, Homo sapiens
  misc_RNA (1)...(19): siRNA sense strand
auuggacuguugcuuguua

SEQ ID NO: 106879 - RNA, 19 nt, Homo sapiens
  misc_RNA (1)...(19): siRNA sense strand
ggugcagacuacaucaaug

SEQ ID NO: 106880 - RNA, 19 nt, Homo sapiens
  misc_RNA (1)...(19): siRNA sense strand
gcagaucuuccacugaauc

SEQ ID NO: 106881 - RNA, 19 nt, Homo sapiens
  misc_RNA (1)...(19): siRNA sense strand
gacuggauaucccacacuu

SEQ ID NO: 106882 - RNA, 19 nt, Homo sapiens
  misc_RNA (1)...(19): siRNA sense strand
uuugaggaguugaaauuga

SEQ ID NO: 106883 - RNA, 19 nt, Homo sapiens
  misc_RNA (1)...(19): siRNA sense strand
gacuuugaugccuauauua

SEQ ID NO: 106884 - RNA, 19 nt, Homo sapiens
  misc_RNA (1)...(19): siRNA sense strand
gaguagcugauuucuuuga

SEQ ID NO: 106885 - RNA, 19 nt, Homo sapiens
  misc_RNA (1)...(19): siRNA sense strand
gaaguuuucugucaacaag

SEQ ID NO: 106886 - RNA, 19 nt, Homo sapiens
  misc_RNA (1)...(19): siRNA sense strand
ccucauuauucuuaggaaa

SEQ ID NO: 106887 - RNA, 19 nt, Homo sapiens
  misc_RNA (1)...(19): siRNA sense strand
gaugucauauacgagaaug

SEQ ID NO: 106888 - RNA, 19 nt, Homo sapiens
  misc_RNA (1)...(19): siRNA sense strand
cgacagcaagcuaccaaga

SEQ ID NO: 106889 - RNA, 19 nt, Homo sapiens
  misc_RNA (1)...(19): siRNA sense strand
aagaugguccugcaacaaa

SEQ ID NO: 106890 - RNA, 19 nt, Homo sapiens
  misc_RNA (1)...(19): siRNA sense strand
gaucuuccacugaaucgau

SEQ ID NO: 106891 - RNA, 19 nt, Homo sapiens
  misc_RNA (1)...(19): siRNA sense strand
gaaagcuuccauacaacug

SEQ ID NO: 106892 - RNA, 19 nt, Homo sapiens
  misc_RNA (1)...(19): siRNA sense strand
uguagugucaccagcuuua

SEQ ID NO: 106893 - RNA, 19 nt, Homo sapiens
  misc_RNA (1)...(19): siRNA sense strand
gaaccagcuccacccaaau

SEQ ID NO: 106894 - RNA, 19 nt, Homo sapiens
  misc_RNA (1)...(19): siRNA sense strand
cuuguuacccucauuauuc

SEQ ID NO: 106895 - RNA, 19 nt, Homo sapiens
  misc_RNA (1)...(19): siRNA sense strand
cagaggagcaguacauuuu

SEQ ID NO: 106896 - RNA, 19 nt, Homo sapiens
  misc_RNA (1)...(19): siRNA sense strand
ggacaggaacauucauugc

SEQ ID NO: 106897 - RNA, 19 nt, Homo sapiens
  misc_RNA (1)...(19): siRNA sense strand
gaaggugcagacuacauca

SEQ ID NO: 106898 - RNA, 19 nt, Homo sapiens
  misc_RNA (1)...(19): siRNA sense strand
cagugucccuacguucaua

SEQ ID NO: 106899 - RNA, 19 nt, Homo sapiens
  misc_RNA (1)...(19): siRNA sense strand
ggaagagggaguagcugau

SEQ ID NO: 106900 - RNA, 19 nt, Homo sapiens
  misc_RNA (1)...(19): siRNA sense strand
cuguggagaugauuucaga

SEQ ID NO: 106901 - RNA, 19 nt, Homo sapiens
  misc_RNA (1)...(19): siRNA sense strand
cauccuaccauaugacuuc

SEQ ID NO: 106902 - RNA, 19 nt, Homo sapiens
  misc_RNA (1)...(19): siRNA sense strand
gauuagucuccaugaauga

SEQ ID NO: 106903 - RNA, 19 nt, Homo sapiens
  misc_RNA (1)...(19): siRNA sense strand
agacagaggagcaguacau

SEQ ID NO: 106904 - RNA, 19 nt, Homo sapiens
  misc_RNA (1)...(19): siRNA sense strand
gaccaucuccagccuucuu

SEQ ID NO: 106905 - RNA, 19 nt, Homo sapiens
  misc_RNA (1)...(19): siRNA sense strand
gugcaacugauguggauga

SEQ ID NO: 106906 - RNA, 19 nt, Homo sapiens
  misc_RNA (1)...(19): siRNA sense strand
acagaggagcaguacauuu

SEQ ID NO: 106907 - RNA, 19 nt, Homo sapiens
  misc_RNA (1)...(19): siRNA sense strand
cugacgagaugcaggaugu

SEQ ID NO: 106908 - RNA, 19 nt, Homo sapiens
  misc_RNA (1)...(19): siRNA sense strand
guagacacuuccggaucaa

SEQ ID NO: 106909 - RNA, 19 nt, Homo sapiens
  misc_RNA (1)...(19): siRNA sense strand
gggaguagcugauuucuuu

SEQ ID NO: 106910 - RNA, 19 nt, Homo sapiens
  misc_RNA (1)...(19): siRNA sense strand
caaagacucugacuauaaa

SEQ ID NO: 106911 - RNA, 19 nt, Homo sapiens
  misc_RNA (1)...(19): siRNA sense strand
caacaaaagucucagauua

SEQ ID NO: 106912 - RNA, 19 nt, Homo sapiens
  misc_RNA (1)...(19): siRNA sense strand
gaaaguauccugcaguuug

SEQ ID NO: 106913 - RNA, 19 nt, Homo sapiens
  misc_RNA (1)...(19): siRNA sense strand
acacaaacauccuaccaua

SEQ ID NO: 106914 - RNA, 19 nt, Homo sapiens
  misc_RNA (1)...(19): siRNA sense strand
caacugauguggaugaaga

SEQ ID NO: 106915 - RNA, 19 nt, Homo sapiens
  misc_RNA (1)...(19): siRNA sense strand
gagcaaaggucccaugauc

SEQ ID NO: 106916 - RNA, 19 nt, Homo sapiens
  misc_RNA (1)...(19): siRNA sense strand
caaguuggcuccagucaga

SEQ ID NO: 106917 - RNA, 19 nt, Homo sapiens
  misc_RNA (1)...(19): siRNA sense strand
ccaacuauauuccuggaua

SEQ ID NO: 106918 - RNA, 19 nt, Homo sapiens
  misc_RNA (1)...(19): siRNA sense strand
ccaaagacucugacuauaa

SEQ ID NO: 106919 - RNA, 19 nt, Homo sapiens
  misc_RNA (1)...(19): siRNA sense strand
caacuaugcugacgagaug

SEQ ID NO: 106920 - RNA, 19 nt, Homo sapiens
  misc_RNA (1)...(19): siRNA sense strand
guguggagcugguacauuu

SEQ ID NO: 106921 - RNA, 19 nt, Homo sapiens
  misc_RNA (1)...(19): siRNA sense strand
gaaauugauuggacuggau

SEQ ID NO: 106922 - RNA, 19 nt, Homo sapiens
  misc_RNA (1)...(19): siRNA sense strand
ggagaugauuucagaggaa

SEQ ID NO: 106923 - RNA, 19 nt, Homo sapiens
  misc_RNA (1)...(19): siRNA sense strand
caacaaugguuacagagau

SEQ ID NO: 106924 - RNA, 19 nt, Homo sapiens
  misc_RNA (1)...(19): siRNA sense strand
caaacauccuaccauauga

SEQ ID NO: 106925 - RNA, 19 nt, Homo sapiens
  misc_RNA (1)...(19): siRNA sense strand
aaaggagggugaaauguga

SEQ ID NO: 106926 - RNA, 19 nt, Homo sapiens
  misc_RNA (1)...(19): siRNA sense strand
cuacaucaaugccaacuau

SEQ ID NO: 106927 - RNA, 19 nt, Homo sapiens
  misc_RNA (1)...(19): siRNA sense strand
uuaaggauauggccaaaga

SEQ ID NO: 106928 - RNA, 19 nt, Homo sapiens
  misc_RNA (1)...(19): siRNA sense strand
gccaaagacucugacuaua

SEQ ID NO: 106929 - RNA, 19 nt, Homo sapiens
  misc_RNA (1)...(19): siRNA sense strand
gcugauuucuuugaaguuu

SEQ ID NO: 106930 - RNA, 19 nt, Homo sapiens
  misc_RNA (1)...(19): siRNA sense strand
ugacuuugaugccuauauu

SEQ ID NO: 106931 - RNA, 19 nt, Homo sapiens
  misc_RNA (1)...(19): siRNA sense strand
gcagauggcuagggagugu

SEQ ID NO: 106932 - RNA, 19 nt, Homo sapiens
  misc_RNA (1)...(19): siRNA sense strand
ggucauaccggaugucuau

SEQ ID NO: 106933 - RNA, 19 nt, Homo sapiens
  misc_RNA (1)...(19): siRNA sense strand
ggaagaugguccugcaaca

SEQ ID NO: 106934 - RNA, 19 nt, Homo sapiens
  misc_RNA (1)...(19): siRNA sense strand
cagaaaguauccugcaguu

SEQ ID NO: 106935 - RNA, 19 nt, Homo sapiens
  misc_RNA (1)...(19): siRNA sense strand
gaccauuacuggccauuca

SEQ ID NO: 106936 - RNA, 19 nt, Homo sapiens
  misc_RNA (1)...(19): siRNA sense strand
ggccaaagacucugacuau

SEQ ID NO: 106937 - RNA, 19 nt, Homo sapiens
  misc_RNA (1)...(19): siRNA sense strand
gaagagggaguagcugauu

SEQ ID NO: 106938 - RNA, 19 nt, Homo sapiens
  misc_RNA (1)...(19): siRNA sense strand
ugauguggaugaagaagaa

SEQ ID NO: 106939 - RNA, 19 nt, Homo sapiens
  misc_RNA (1)...(19): siRNA sense strand
gcaaaggucccaugaucau

SEQ ID NO: 106940 - RNA, 19 nt, Homo sapiens
  misc_RNA (1)...(19): siRNA sense strand
gcugguacauuugucaauu

SEQ ID NO: 106941 - RNA, 19 nt, Homo sapiens
  misc_RNA (1)...(19): siRNA sense strand
guucauagccgucucaaca

SEQ ID NO: 106942 - RNA, 19 nt, Homo sapiens
  misc_RNA (1)...(19): siRNA sense strand
agaaccagcuccacccaaa

SEQ ID NO: 106943 - RNA, 19 nt, Homo sapiens
  misc_RNA (1)...(19): siRNA sense strand
ucagugaugucauauacga

SEQ ID NO: 106944 - RNA, 19 nt, Homo sapiens
  misc_RNA (1)...(19): siRNA sense strand
cugcagaucuuccacugaa

SEQ ID NO: 106945 - RNA, 19 nt, Homo sapiens
  misc_RNA (1)...(19): siRNA sense strand
gggcuggugucagaaauga

SEQ ID NO: 106946 - RNA, 19 nt, Homo sapiens
  misc_RNA (1)...(19): siRNA sense strand
gcaaaugcugcagaaagua

SEQ ID NO: 106947 - RNA, 19 nt, Homo sapiens
  misc_RNA (1)...(19): siRNA sense strand
ggacggacaggaacauuca

SEQ ID NO: 106948 - RNA, 19 nt, Homo sapiens
  misc_RNA (1)...(19): siRNA sense strand
ggaaccaguugcuguuucu

SEQ ID NO: 106949 - RNA, 19 nt, Homo sapiens
  misc_RNA (1)...(19): siRNA sense strand
acaaacauccuaccauaug

SEQ ID NO: 106950 - RNA, 19 nt, Homo sapiens
  misc_RNA (1)...(19): siRNA sense strand
caucaaugccaacuauauu

SEQ ID NO: 106951 - RNA, 19 nt, Homo sapiens
  misc_RNA (1)...(19): siRNA sense strand
ucucaacaaugguuacaga

SEQ ID NO: 106952 - RNA, 19 nt, Homo sapiens
  misc_RNA (1)...(19): siRNA sense strand
gaagaugguccugcaacaa

SEQ ID NO: 106953 - RNA, 19 nt, Homo sapiens
  misc_RNA (1)...(19): siRNA sense strand
acacuuugcugcagaucuu

SEQ ID NO: 106954 - RNA, 19 nt, Homo sapiens
  misc_RNA (1)...(19): siRNA sense strand
uaauuggacuguugcuugu

SEQ ID NO: 106955 - RNA, 19 nt, Homo sapiens
  misc_RNA (1)...(19): siRNA sense strand
gaugaaucccaauguggua

SEQ ID NO: 106956 - RNA, 19 nt, Homo sapiens
  misc_RNA (1)...(19): siRNA sense strand
cuucagccgugugagauua

SEQ ID NO: 106957 - RNA, 19 nt, Homo sapiens
  misc_RNA (1)...(19): siRNA sense strand
uuaaagaagaggaaacuga

SEQ ID NO: 106958 - RNA, 19 nt, Homo sapiens
  misc_RNA (1)...(19): siRNA sense strand
agagagggauggaaagcuu

SEQ ID NO: 106959 - RNA, 19 nt, Homo sapiens
  misc_RNA (1)...(19): siRNA sense strand
ggaugacuuugaugccuau

SEQ ID NO: 106960 - RNA, 19 nt, Homo sapiens
  misc_RNA (1)...(19): siRNA sense strand
aaaguauccugcaguuugu

SEQ ID NO: 106961 - RNA, 19 nt, Homo sapiens
  misc_RNA (1)...(19): siRNA sense strand
caaaugcugcagaaaguau

SEQ ID NO: 106962 - RNA, 19 nt, Homo sapiens
  misc_RNA (1)...(19): siRNA sense strand
ugaagaagaagcagcaguu

SEQ ID NO: 106963 - RNA, 19 nt, Homo sapiens
  misc_RNA (1)...(19): siRNA sense strand
agauuagucuccaugaaug

SEQ ID NO: 106964 - RNA, 19 nt, Homo sapiens
  misc_RNA (1)...(19): siRNA sense strand
agaggaaggugcagacuac

SEQ ID NO: 106965 - RNA, 19 nt, Homo sapiens
  misc_RNA (1)...(19): siRNA sense strand
uguagacacuuccggauca

SEQ ID NO: 106966 - RNA, 19 nt, Homo sapiens
  misc_RNA (1)...(19): siRNA sense strand
ggaaggugcagacuacauc

SEQ ID NO: 106967 - RNA, 19 nt, Homo sapiens
  misc_RNA (1)...(19): siRNA sense strand
ggauauggccaaagacucu

SEQ ID NO: 106968 - RNA, 19 nt, Homo sapiens
  misc_RNA (1)...(19): siRNA sense strand
gaacaaaacccagacuuca

SEQ ID NO: 106969 - RNA, 19 nt, Homo sapiens
  misc_RNA (1)...(19): siRNA sense strand
agagaugaaucccaaugug

SEQ ID NO: 106970 - RNA, 19 nt, Homo sapiens
  misc_RNA (1)...(19): siRNA sense strand
ucuuagggcuggugucaga

SEQ ID NO: 106971 - RNA, 19 nt, Homo sapiens
  misc_RNA (1)...(19): siRNA sense strand
aagagggaguagcugauuu

SEQ ID NO: 106972 - RNA, 19 nt, Homo sapiens
  misc_RNA (1)...(19): siRNA sense strand
caacuauauuccuggauac

SEQ ID NO: 106973 - RNA, 19 nt, Homo sapiens
  misc_RNA (1)...(19): siRNA sense strand
uagcugauuucuuugaagu

SEQ ID NO: 106974 - RNA, 19 nt, Homo sapiens
  misc_RNA (1)...(19): siRNA sense strand
ucauagccgucucaacaau

SEQ ID NO: 106975 - RNA, 19 nt, Homo sapiens
  misc_RNA (1)...(19): siRNA sense strand
gaagaagaagcagcaguuc

SEQ ID NO: 106976 - RNA, 19 nt, Homo sapiens
  misc_RNA (1)...(19): siRNA sense strand
cugguacauuugucaauuu

SEQ ID NO: 106977 - RNA, 19 nt, Homo sapiens
  misc_RNA (1)...(19): siRNA sense strand
guuacccucauuauucuua

SEQ ID NO: 106978 - RNA, 19 nt, Homo sapiens
  misc_RNA (1)...(19): siRNA sense strand
auuggacuguugcuuguua

SEQ ID NO: 106979 - RNA, 19 nt, Homo sapiens
  misc_RNA (1)...(19): siRNA sense strand
ggugcagacuacaucaaug

SEQ ID NO: 106980 - RNA, 19 nt, Homo sapiens
  misc_RNA (1)...(19): siRNA sense strand
gcagaucuuccacugaauc

SEQ ID NO: 106981 - RNA, 19 nt, Homo sapiens
  misc_RNA (1)...(19): siRNA sense strand
gacuggauaucccacacuu

SEQ ID NO: 106982 - RNA, 19 nt, Homo sapiens
  misc_RNA (1)...(19): siRNA sense strand
uuugaggaguugaaauuga

SEQ ID NO: 106983 - RNA, 19 nt, Homo sapiens
  misc_RNA (1)...(19): siRNA sense strand
gacuuugaugccuauauua

SEQ ID NO: 106984 - RNA, 19 nt, Homo sapiens
  misc_RNA (1)...(19): siRNA sense strand
gaguagcugauuucuuuga

SEQ ID NO: 106985 - RNA, 19 nt, Homo sapiens
  misc_RNA (1)...(19): siRNA sense strand
gaaguuuucugucaacaag

SEQ ID NO: 106986 - RNA, 19 nt, Homo sapiens
  misc_RNA (1)...(19): siRNA sense strand
ccucauuauucuuaggaaa

SEQ ID NO: 106987 - RNA, 19 nt, Homo sapiens
  misc_RNA (1)...(19): siRNA sense strand
gaugucauauacgagaaug

SEQ ID NO: 106988 - RNA, 19 nt, Homo sapiens
  misc_RNA (1)...(19): siRNA sense strand
cgacagcaagcuaccaaga

SEQ ID NO: 106989 - RNA, 19 nt, Homo sapiens
  misc_RNA (1)...(19): siRNA sense strand
aagaugguccugcaacaaa

SEQ ID NO: 106990 - RNA, 19 nt, Homo sapiens
  misc_RNA (1)...(19): siRNA sense strand
gaucuuccacugaaucgau

SEQ ID NO: 106991 - RNA, 19 nt, Homo sapiens
  misc_RNA (1)...(19): siRNA sense strand
gaaagcuuccauacaacug

SEQ ID NO: 106992 - RNA, 19 nt, Homo sapiens
  misc_RNA (1)...(19): siRNA sense strand
uguagugucaccagcuuua

SEQ ID NO: 106993 - RNA, 19 nt, Homo sapiens
  misc_RNA (1)...(19): siRNA sense strand
gaaccagcuccacccaaau

SEQ ID NO: 106994 - RNA, 19 nt, Homo sapiens
  misc_RNA (1)...(19): siRNA sense strand
cuuguuacccucauuauuc

SEQ ID NO: 106995 - RNA, 19 nt, Homo sapiens
  misc_RNA (1)...(19): siRNA sense strand
cagaggagcaguacauuuu

SEQ ID NO: 106996 - RNA, 19 nt, Homo sapiens
  misc_RNA (1)...(19): siRNA sense strand
ggacaggaacauucauugc

SEQ ID NO: 106997 - RNA, 19 nt, Homo sapiens
  misc_RNA (1)...(19): siRNA sense strand
gaaggugcagacuacauca

SEQ ID NO: 106998 - RNA, 19 nt, Homo sapiens
  misc_RNA (1)...(19): siRNA sense strand
cagugucccuacguucaua

SEQ ID NO: 106999 - RNA, 19 nt, Homo sapiens
  misc_RNA (1)...(19): siRNA sense strand
ggaagagggaguagcugau

SEQ ID NO: 107000 - RNA, 19 nt, Homo sapiens
  misc_RNA (1)...(19): siRNA sense strand
cuguggagaugauuucaga

SEQ ID NO: 107001 - RNA, 19 nt, Homo sapiens
  misc_RNA (1)...(19): siRNA sense strand
cauccuaccauaugacuuc

SEQ ID NO: 107002 - RNA, 19 nt, Homo sapiens
  misc_RNA (1)...(19): siRNA sense strand
gauuagucuccaugaauga

SEQ ID NO: 107003 - RNA, 19 nt, Homo sapiens
  misc_RNA (1)...(19): siRNA sense strand
agacagaggagcaguacau

SEQ ID NO: 107004 - RNA, 19 nt, Homo sapiens
  misc_RNA (1)...(19): siRNA sense strand
gaccaucuccagccuucuu

SEQ ID NO: 107005 - RNA, 19 nt, Homo sapiens
  misc_RNA (1)...(19): siRNA sense strand
gugcaacugauguggauga

SEQ ID NO: 107006 - RNA, 19 nt, Homo sapiens
  misc_RNA (1)...(19): siRNA sense strand
acagaggagcaguacauuu

SEQ ID NO: 107007 - RNA, 19 nt, Homo sapiens
  misc_RNA (1)...(19): siRNA sense strand
cugacgagaugcaggaugu

SEQ ID NO: 107008 - RNA, 19 nt, Homo sapiens
  misc_RNA (1)...(19): siRNA sense strand
guagacacuuccggaucaa

SEQ ID NO: 107009 - RNA, 19 nt, Homo sapiens
  misc_RNA (1)...(19): siRNA sense strand
caaagacucugacuauaaa

SEQ ID NO: 107010 - RNA, 19 nt, Homo sapiens
  misc_RNA (1)...(19): siRNA sense strand
caacaaaagucucagauua

SEQ ID NO: 107011 - RNA, 19 nt, Homo sapiens
  misc_RNA (1)...(19): siRNA sense strand
gaaaguauccugcaguuug

SEQ ID NO: 107012 - RNA, 19 nt, Homo sapiens
  misc_RNA (1)...(19): siRNA sense strand
acacaaacauccuaccaua

SEQ ID NO: 107013 - RNA, 19 nt, Homo sapiens
  misc_RNA (1)...(19): siRNA sense strand
caacugauguggaugaaga

SEQ ID NO: 107014 - RNA, 19 nt, Homo sapiens
  misc_RNA (1)...(19): siRNA sense strand
gagcaaaggucccaugauc

SEQ ID NO: 107015 - RNA, 19 nt, Homo sapiens
  misc_RNA (1)...(19): siRNA sense strand
ccaacuauauuccuggaua

SEQ ID NO: 107016 - RNA, 19 nt, Homo sapiens
  misc_RNA (1)...(19): siRNA sense strand
ccaaagacucugacuauaa

SEQ ID NO: 107017 - RNA, 19 nt, Homo sapiens
  misc_RNA (1)...(19): siRNA sense strand
caacuaugcugacgagaug

SEQ ID NO: 107018 - RNA, 19 nt, Homo sapiens
  misc_RNA (1)...(19): siRNA sense strand
guguggagcugguacauuu

SEQ ID NO: 107019 - RNA, 19 nt, Homo sapiens
  misc_RNA (1)...(19): siRNA sense strand
gaaauugauuggacuggau

SEQ ID NO: 107020 - RNA, 19 nt, Homo sapiens
  misc_RNA (1)...(19): siRNA sense strand
ggagaugauuucagaggaa

SEQ ID NO: 107021 - RNA, 19 nt, Homo sapiens
  misc_RNA (1)...(19): siRNA sense strand
caaacauccuaccauauga

SEQ ID NO: 107022 - RNA, 19 nt, Homo sapiens
  misc_RNA (1)...(19): siRNA sense strand
aaaggagggugaaauguga

SEQ ID NO: 107023 - RNA, 19 nt, Homo sapiens
  misc_RNA (1)...(19): siRNA sense strand
cuacaucaaugccaacuau

SEQ ID NO: 107024 - RNA, 19 nt, Homo sapiens
  misc_RNA (1)...(19): siRNA sense strand
uuaaggauauggccaaaga

SEQ ID NO: 107025 - RNA, 19 nt, Homo sapiens
  misc_RNA (1)...(19): siRNA sense strand
gccaaagacucugacuaua

SEQ ID NO: 107026 - RNA, 19 nt, Homo sapiens
  misc_RNA (1)...(19): siRNA sense strand
ugacuuugaugccuauauu

SEQ ID NO: 107027 - RNA, 19 nt, Homo sapiens
  misc_RNA (1)...(19): siRNA sense strand
gcagauggcuagggagugu

SEQ ID NO: 107028 - RNA, 19 nt, Homo sapiens
  misc_RNA (1)...(19): siRNA sense strand
ggucauaccggaugucuau

SEQ ID NO: 107029 - RNA, 19 nt, Homo sapiens
  misc_RNA (1)...(19): siRNA sense strand
ggaagaugguccugcaaca

SEQ ID NO: 107030 - RNA, 19 nt, Homo sapiens
  misc_RNA (1)...(19): siRNA sense strand
cagaaaguauccugcaguu

SEQ ID NO: 107031 - RNA, 19 nt, Homo sapiens
  misc_RNA (1)...(19): siRNA sense strand
gaccauuacuggccauuca

SEQ ID NO: 107032 - RNA, 19 nt, Homo sapiens
  misc_RNA (1)...(19): siRNA sense strand
ggccaaagacucugacuau

SEQ ID NO: 107033 - RNA, 19 nt, Homo sapiens
  misc_RNA (1)...(19): siRNA sense strand
gcugguacauuugucaauu

SEQ ID NO: 107034 - RNA, 19 nt, Homo sapiens
  misc_RNA (1)...(19): siRNA sense strand
ugauguggaugaagaagaa

SEQ ID NO: 107035 - RNA, 19 nt, Homo sapiens
  misc_RNA (1)...(19): siRNA sense strand
gcaaaggucccaugaucau

SEQ ID NO: 107036 - RNA, 19 nt, Homo sapiens
  misc_RNA (1)...(19): siRNA sense strand
ucagugaugucauauacga

SEQ ID NO: 107037 - RNA, 19 nt, Homo sapiens
  misc_RNA (1)...(19): siRNA sense strand
cugcagaucuuccacugaa

SEQ ID NO: 107038 - RNA, 19 nt, Homo sapiens
  misc_RNA (1)...(19): siRNA sense strand
gggcuggugucagaaauga

SEQ ID NO: 107039 - RNA, 19 nt, Homo sapiens
  misc_RNA (1)...(19): siRNA sense strand
gcaaaugcugcagaaagua

SEQ ID NO: 107040 - RNA, 19 nt, Homo sapiens
  misc_RNA (1)...(19): siRNA sense strand
ggacggacaggaacauuca

SEQ ID NO: 107041 - RNA, 19 nt, Homo sapiens
  misc_RNA (1)...(19): siRNA sense strand
acaaacauccuaccauaug

SEQ ID NO: 107042 - RNA, 19 nt, Homo sapiens
  misc_RNA (1)...(19): siRNA sense strand
caucaaugccaacuauauu

SEQ ID NO: 107043 - RNA, 19 nt, Homo sapiens
  misc_RNA (1)...(19): siRNA sense strand
acacuuugcugcagaucuu

SEQ ID NO: 107044 - RNA, 19 nt, Homo sapiens
  misc_RNA (1)...(19): siRNA sense strand
gaagaugguccugcaacaa

SEQ ID NO: 107045 - RNA, 19 nt, Homo sapiens
  misc_RNA (1)...(19): siRNA sense strand
uaauuggacuguugcuugu

SEQ ID NO: 107046 - RNA, 19 nt, Homo sapiens
  misc_RNA (1)...(19): siRNA sense strand
agagagggauggaaagcuu

SEQ ID NO: 107047 - RNA, 19 nt, Homo sapiens
  misc_RNA (1)...(19): siRNA sense strand
gaugaaucccaauguggua

SEQ ID NO: 107048 - RNA, 19 nt, Homo sapiens
  misc_RNA (1)...(19): siRNA sense strand
cuucagccgugugagauua

SEQ ID NO: 107049 - RNA, 19 nt, Homo sapiens
  misc_RNA (1)...(19): siRNA sense strand
uuaaagaagaggaaacuga

SEQ ID NO: 107050 - RNA, 19 nt, Homo sapiens
  misc_RNA (1)...(19): siRNA sense strand
ggaugacuuugaugccuau

SEQ ID NO: 107051 - RNA, 19 nt, Homo sapiens
  misc_RNA (1)...(19): siRNA sense strand
aaaguauccugcaguuugu

SEQ ID NO: 107052 - RNA, 19 nt, Homo sapiens
  misc_RNA (1)...(19): siRNA sense strand
caaaugcugcagaaaguau

SEQ ID NO: 107053 - RNA, 19 nt, Homo sapiens
  misc_RNA (1)...(19): siRNA sense strand
ugaagaagaagcagcaguu

SEQ ID NO: 107054 - RNA, 19 nt, Homo sapiens
  misc_RNA (1)...(19): siRNA sense strand
agauuagucuccaugaaug

SEQ ID NO: 107055 - RNA, 19 nt, Homo sapiens
  misc_RNA (1)...(19): siRNA sense strand
agaggaaggugcagacuac

SEQ ID NO: 107056 - RNA, 19 nt, Homo sapiens
  misc_RNA (1)...(19): siRNA sense strand
uguagacacuuccggauca

SEQ ID NO: 107057 - RNA, 19 nt, Homo sapiens
  misc_RNA (1)...(19): siRNA sense strand
ggaaggugcagacuacauc

SEQ ID NO: 107058 - RNA, 19 nt, Homo sapiens
  misc_RNA (1)...(19): siRNA sense strand
ggauauggccaaagacucu

SEQ ID NO: 107059 - RNA, 19 nt, Homo sapiens
  misc_RNA (1)...(19): siRNA sense strand
caacuauauuccuggauac

SEQ ID NO: 107060 - RNA, 19 nt, Homo sapiens
  misc_RNA (1)...(19): siRNA sense strand
agagaugaaucccaaugug

SEQ ID NO: 107061 - RNA, 19 nt, Homo sapiens
  misc_RNA (1)...(19): siRNA sense strand
ucuuagggcuggugucaga

SEQ ID NO: 107062 - RNA, 19 nt, Homo sapiens
  misc_RNA (1)...(19): siRNA sense strand
cugguacauuugucaauuu

SEQ ID NO: 107063 - RNA, 19 nt, Homo sapiens
  misc_RNA (1)...(19): siRNA sense strand
gaagaagaagcagcaguuc

SEQ ID NO: 107064 - RNA, 19 nt, Homo sapiens
  misc_RNA (1)...(19): siRNA sense strand
guuacccucauuauucuua

SEQ ID NO: 107065 - RNA, 19 nt, Homo sapiens
  misc_RNA (1)...(19): siRNA sense strand
gacuuugaugccuauauua

SEQ ID NO: 107066 - RNA, 19 nt, Homo sapiens
  misc_RNA (1)...(19): siRNA sense strand
auuggacuguugcuuguua

SEQ ID NO: 107067 - RNA, 19 nt, Homo sapiens
  misc_RNA (1)...(19): siRNA sense strand
ggugcagacuacaucaaug

SEQ ID NO: 107068 - RNA, 19 nt, Homo sapiens
  misc_RNA (1)...(19): siRNA sense strand
gcagaucuuccacugaauc

SEQ ID NO: 107069 - RNA, 19 nt, Homo sapiens
  misc_RNA (1)...(19): siRNA sense strand
gacuggauaucccacacuu

SEQ ID NO: 107070 - RNA, 19 nt, Homo sapiens
  misc_RNA (1)...(19): siRNA sense strand
uuugaggaguugaaauuga

SEQ ID NO: 107071 - RNA, 19 nt, Homo sapiens
  misc_RNA (1)...(19): siRNA sense strand
gaaagcuuccauacaacug

SEQ ID NO: 107072 - RNA, 19 nt, Homo sapiens
  misc_RNA (1)...(19): siRNA sense strand
gaugucauauacgagaaug

SEQ ID NO: 107073 - RNA, 19 nt, Homo sapiens
  misc_RNA (1)...(19): siRNA sense strand
ccucauuauucuuaggaaa

SEQ ID NO: 107074 - RNA, 19 nt, Homo sapiens
  misc_RNA (1)...(19): siRNA sense strand
cgacagcaagcuaccaaga

SEQ ID NO: 107075 - RNA, 19 nt, Homo sapiens
  misc_RNA (1)...(19): siRNA sense strand
aagaugguccugcaacaaa

SEQ ID NO: 107076 - RNA, 19 nt, Homo sapiens
  misc_RNA (1)...(19): siRNA sense strand
gaucuuccacugaaucgau

SEQ ID NO: 107077 - RNA, 19 nt, Homo sapiens
  misc_RNA (1)...(19): siRNA sense strand
cuuguuacccucauuauuc

SEQ ID NO: 107078 - RNA, 19 nt, Homo sapiens
  misc_RNA (1)...(19): siRNA sense strand
cagaggagcaguacauuuu

SEQ ID NO: 107079 - RNA, 19 nt, Homo sapiens
  misc_RNA (1)...(19): siRNA sense strand
ggacaggaacauucauugc

SEQ ID NO: 107080 - RNA, 19 nt, Homo sapiens
  misc_RNA (1)...(19): siRNA sense strand
gaaggugcagacuacauca

SEQ ID NO: 107081 - RNA, 19 nt, Homo sapiens
  misc_RNA (1)...(19): siRNA sense strand
cauccuaccauaugacuuc

SEQ ID NO: 107082 - RNA, 19 nt, Homo sapiens
  misc_RNA (1)...(19): siRNA sense strand
cuguggagaugauuucaga

SEQ ID NO: 107083 - RNA, 19 nt, Homo sapiens
  misc_RNA (1)...(19): siRNA sense strand
gauuagucuccaugaauga

SEQ ID NO: 107084 - RNA, 19 nt, Homo sapiens
  misc_RNA (1)...(19): siRNA sense strand
agacagaggagcaguacau

SEQ ID NO: 107085 - RNA, 19 nt, Homo sapiens
  misc_RNA (1)...(19): siRNA sense strand
guagacacuuccggaucaa

SEQ ID NO: 107086 - RNA, 19 nt, Homo sapiens
  misc_RNA (1)...(19): siRNA sense strand
gugcaacugauguggauga

SEQ ID NO: 107087 - RNA, 19 nt, Homo sapiens
  misc_RNA (1)...(19): siRNA sense strand
acagaggagcaguacauuu

SEQ ID NO: 107088 - RNA, 19 nt, Homo sapiens
  misc_RNA (1)...(19): siRNA sense strand
cugacgagaugcaggaugu

SEQ ID NO: 107089 - RNA, 19 nt, Homo sapiens
  misc_RNA (1)...(19): siRNA sense strand
cuggauaucccacacuuug

SEQ ID NO: 107090 - RNA, 19 nt, Homo sapiens
  misc_RNA (1)...(19): siRNA sense strand
aaaggucccaugaucauuc

SEQ ID NO: 107091 - RNA, 19 nt, Homo sapiens
  misc_RNA (1)...(19): siRNA sense strand
caaaggucccaugaucauu

SEQ ID NO: 107092 - RNA, 19 nt, Homo sapiens
  misc_RNA (1)...(19): siRNA sense strand
ggacgacugggccuguaga

SEQ ID NO: 107093 - RNA, 19 nt, Homo sapiens
  misc_RNA (1)...(19): siRNA sense strand
cuccaugaaugaagaggaa

SEQ ID NO: 107094 - RNA, 19 nt, Homo sapiens
  misc_RNA (1)...(19): siRNA sense strand
uugaggaguugaaauugau

SEQ ID NO: 107095 - RNA, 19 nt, Homo sapiens
  misc_RNA (1)...(19): siRNA sense strand
ugacuucagccgugugaga

SEQ ID NO: 107096 - RNA, 19 nt, Homo sapiens
  misc_RNA (1)...(19): siRNA sense strand
aaauugauuggacuggaua

SEQ ID NO: 107097 - RNA, 19 nt, Homo sapiens
  misc_RNA (1)...(19): siRNA sense strand
gucauauacgagaauguua

SEQ ID NO: 107098 - RNA, 19 nt, Homo sapiens
  misc_RNA (1)...(19): siRNA sense strand
gugaugucauauacgagaa

SEQ ID NO: 107099 - RNA, 19 nt, Homo sapiens
  misc_RNA (1)...(19): siRNA sense strand
agaagaggaaacugacaaa

SEQ ID NO: 107100 - RNA, 19 nt, Homo sapiens
  misc_RNA (1)...(19): siRNA sense strand
gaaucccaaugugguagug

SEQ ID NO: 107101 - RNA, 19 nt, Homo sapiens
  misc_RNA (1)...(19): siRNA sense strand
ccacugaaucgauguaaaa

SEQ ID NO: 107102 - RNA, 19 nt, Homo sapiens
  misc_RNA (1)...(19): siRNA sense strand
gcaacaaaagucucagauu

SEQ ID NO: 107103 - RNA, 19 nt, Homo sapiens
  misc_RNA (1)...(19): siRNA sense strand
gcuuguuacccucauuauu

SEQ ID NO: 107104 - RNA, 19 nt, Homo sapiens
  misc_RNA (1)...(19): siRNA sense strand
cgagaugcaggaugugaug

SEQ ID NO: 107105 - RNA, 19 nt, Homo sapiens
  misc_RNA (1)...(19): siRNA sense strand
cacaaacauccuaccauau

SEQ ID NO: 107106 - RNA, 19 nt, Homo sapiens
  misc_RNA (1)...(19): siRNA sense strand
gugugcaacugauguggau

SEQ ID NO: 107107 - RNA, 19 nt, Homo sapiens
  misc_RNA (1)...(19): siRNA sense strand
gacagaggagcaguacauu

SEQ ID NO: 107108 - RNA, 19 nt, Homo sapiens
  misc_RNA (1)...(19): siRNA sense strand
ugucauauacgagaauguu

SEQ ID NO: 107109 - RNA, 19 nt, Homo sapiens
  misc_RNA (1)...(19): siRNA sense strand
caaagacucugacuauaaa

SEQ ID NO: 107110 - RNA, 19 nt, Homo sapiens
  misc_RNA (1)...(19): siRNA sense strand
caacaaaagucucagauua

SEQ ID NO: 107111 - RNA, 19 nt, Homo sapiens
  misc_RNA (1)...(19): siRNA sense strand
gaaaguauccugcaguuug

SEQ ID NO: 107112 - RNA, 19 nt, Homo sapiens
  misc_RNA (1)...(19): siRNA sense strand
acacaaacauccuaccaua

SEQ ID NO: 107113 - RNA, 19 nt, Homo sapiens
  misc_RNA (1)...(19): siRNA sense strand
caacugauguggaugaaga

SEQ ID NO: 107114 - RNA, 19 nt, Homo sapiens
  misc_RNA (1)...(19): siRNA sense strand
gagcaaaggucccaugauc

SEQ ID NO: 107115 - RNA, 19 nt, Homo sapiens
  misc_RNA (1)...(19): siRNA sense strand
ccaacuauauuccuggaua

SEQ ID NO: 107116 - RNA, 19 nt, Homo sapiens
  misc_RNA (1)...(19): siRNA sense strand
ccaaagacucugacuauaa

SEQ ID NO: 107117 - RNA, 19 nt, Homo sapiens
  misc_RNA (1)...(19): siRNA sense strand
caacuaugcugacgagaug

SEQ ID NO: 107118 - RNA, 19 nt, Homo sapiens
  misc_RNA (1)...(19): siRNA sense strand
guguggagcugguacauuu

SEQ ID NO: 107119 - RNA, 19 nt, Homo sapiens
  misc_RNA (1)...(19): siRNA sense strand
gaaauugauuggacuggau

SEQ ID NO: 107120 - RNA, 19 nt, Homo sapiens
  misc_RNA (1)...(19): siRNA sense strand
ggagaugauuucagaggaa

SEQ ID NO: 107121 - RNA, 19 nt, Homo sapiens
  misc_RNA (1)...(19): siRNA sense strand
caaacauccuaccauauga

SEQ ID NO: 107122 - RNA, 19 nt, Homo sapiens
  misc_RNA (1)...(19): siRNA sense strand
aaaggagggugaaauguga

SEQ ID NO: 107123 - RNA, 19 nt, Homo sapiens
  misc_RNA (1)...(19): siRNA sense strand
cuacaucaaugccaacuau

SEQ ID NO: 107124 - RNA, 19 nt, Homo sapiens
  misc_RNA (1)...(19): siRNA sense strand
uuaaggauauggccaaaga

SEQ ID NO: 107125 - RNA, 19 nt, Homo sapiens
  misc_RNA (1)...(19): siRNA sense strand
gccaaagacucugacuaua

SEQ ID NO: 107126 - RNA, 19 nt, Homo sapiens
  misc_RNA (1)...(19): siRNA sense strand
ugacuuugaugccuauauu

SEQ ID NO: 107127 - RNA, 19 nt, Homo sapiens
  misc_RNA (1)...(19): siRNA sense strand
gcagauggcuagggagugu

SEQ ID NO: 107128 - RNA, 19 nt, Homo sapiens
  misc_RNA (1)...(19): siRNA sense strand
ggucauaccggaugucuau

SEQ ID NO: 107129 - RNA, 19 nt, Homo sapiens
  misc_RNA (1)...(19): siRNA sense strand
ggaagaugguccugcaaca

SEQ ID NO: 107130 - RNA, 19 nt, Homo sapiens
  misc_RNA (1)...(19): siRNA sense strand
cagaaaguauccugcaguu

SEQ ID NO: 107131 - RNA, 19 nt, Homo sapiens
  misc_RNA (1)...(19): siRNA sense strand
gaccauuacuggccauuca

SEQ ID NO: 107132 - RNA, 19 nt, Homo sapiens
  misc_RNA (1)...(19): siRNA sense strand
ggccaaagacucugacuau

SEQ ID NO: 107133 - RNA, 19 nt, Homo sapiens
  misc_RNA (1)...(19): siRNA sense strand
gcugguacauuugucaauu

SEQ ID NO: 107134 - RNA, 19 nt, Homo sapiens
  misc_RNA (1)...(19): siRNA sense strand
ugauguggaugaagaagaa

SEQ ID NO: 107135 - RNA, 19 nt, Homo sapiens
  misc_RNA (1)...(19): siRNA sense strand
gcaaaggucccaugaucau

SEQ ID NO: 107136 - RNA, 19 nt, Homo sapiens
  misc_RNA (1)...(19): siRNA sense strand
ucagugaugucauauacga

SEQ ID NO: 107137 - RNA, 19 nt, Homo sapiens
  misc_RNA (1)...(19): siRNA sense strand
cugcagaucuuccacugaa

SEQ ID NO: 107138 - RNA, 19 nt, Homo sapiens
  misc_RNA (1)...(19): siRNA sense strand
gggcuggugucagaaauga

SEQ ID NO: 107139 - RNA, 19 nt, Homo sapiens
  misc_RNA (1)...(19): siRNA sense strand
gcaaaugcugcagaaagua

SEQ ID NO: 107140 - RNA, 19 nt, Homo sapiens
  misc_RNA (1)...(19): siRNA sense strand
ggacggacaggaacauuca

SEQ ID NO: 107141 - RNA, 19 nt, Homo sapiens
  misc_RNA (1)...(19): siRNA sense strand
acaaacauccuaccauaug

SEQ ID NO: 107142 - RNA, 19 nt, Homo sapiens
  misc_RNA (1)...(19): siRNA sense strand
caucaaugccaacuauauu

SEQ ID NO: 107143 - RNA, 19 nt, Homo sapiens
  misc_RNA (1)...(19): siRNA sense strand
acacuuugcugcagaucuu

SEQ ID NO: 107144 - RNA, 19 nt, Homo sapiens
  misc_RNA (1)...(19): siRNA sense strand
gaagaugguccugcaacaa

SEQ ID NO: 107145 - RNA, 19 nt, Homo sapiens
  misc_RNA (1)...(19): siRNA sense strand
uaauuggacuguugcuugu

SEQ ID NO: 107146 - RNA, 19 nt, Homo sapiens
  misc_RNA (1)...(19): siRNA sense strand
agagagggauggaaagcuu

SEQ ID NO: 107147 - RNA, 19 nt, Homo sapiens
  misc_RNA (1)...(19): siRNA sense strand
gaugaaucccaauguggua

SEQ ID NO: 107148 - RNA, 19 nt, Homo sapiens
  misc_RNA (1)...(19): siRNA sense strand
cuucagccgugugagauua

SEQ ID NO: 107149 - RNA, 19 nt, Homo sapiens
  misc_RNA (1)...(19): siRNA sense strand
uuaaagaagaggaaacuga

SEQ ID NO: 107150 - RNA, 19 nt, Homo sapiens
  misc_RNA (1)...(19): siRNA sense strand
ggaugacuuugaugccuau

SEQ ID NO: 107151 - RNA, 19 nt, Homo sapiens
  misc_RNA (1)...(19): siRNA sense strand
aaaguauccugcaguuugu

SEQ ID NO: 107152 - RNA, 19 nt, Homo sapiens
  misc_RNA (1)...(19): siRNA sense strand
caaaugcugcagaaaguau

SEQ ID NO: 107153 - RNA, 19 nt, Homo sapiens
  misc_RNA (1)...(19): siRNA sense strand
ugaagaagaagcagcaguu

SEQ ID NO: 107154 - RNA, 19 nt, Homo sapiens
  misc_RNA (1)...(19): siRNA sense strand
agauuagucuccaugaaug

SEQ ID NO: 107155 - RNA, 19 nt, Homo sapiens
  misc_RNA (1)...(19): siRNA sense strand
agaggaaggugcagacuac

SEQ ID NO: 107156 - RNA, 19 nt, Homo sapiens
  misc_RNA (1)...(19): siRNA sense strand
uguagacacuuccggauca

SEQ ID NO: 107157 - RNA, 19 nt, Homo sapiens
  misc_RNA (1)...(19): siRNA sense strand
ggaaggugcagacuacauc

SEQ ID NO: 107158 - RNA, 19 nt, Homo sapiens
  misc_RNA (1)...(19): siRNA sense strand
ggauauggccaaagacucu

SEQ ID NO: 107159 - RNA, 19 nt, Homo sapiens
  misc_RNA (1)...(19): siRNA sense strand
caacuauauuccuggauac

SEQ ID NO: 107160 - RNA, 19 nt, Homo sapiens
  misc_RNA (1)...(19): siRNA sense strand
agagaugaaucccaaugug

SEQ ID NO: 107161 - RNA, 19 nt, Homo sapiens
  misc_RNA (1)...(19): siRNA sense strand
ucuuagggcuggugucaga

SEQ ID NO: 107162 - RNA, 19 nt, Homo sapiens
  misc_RNA (1)...(19): siRNA sense strand
cugguacauuugucaauuu

SEQ ID NO: 107163 - RNA, 19 nt, Homo sapiens
  misc_RNA (1)...(19): siRNA sense strand
gaagaagaagcagcaguuc

SEQ ID NO: 107164 - RNA, 19 nt, Homo sapiens
  misc_RNA (1)...(19): siRNA sense strand
guuacccucauuauucuua

SEQ ID NO: 107165 - RNA, 19 nt, Homo sapiens
  misc_RNA (1)...(19): siRNA sense strand
gacuuugaugccuauauua

SEQ ID NO: 107166 - RNA, 19 nt, Homo sapiens
  misc_RNA (1)...(19): siRNA sense strand
auuggacuguugcuuguua

SEQ ID NO: 107167 - RNA, 19 nt, Homo sapiens
  misc_RNA (1)...(19): siRNA sense strand
ggugcagacuacaucaaug

SEQ ID NO: 107168 - RNA, 19 nt, Homo sapiens
  misc_RNA (1)...(19): siRNA sense strand
gcagaucuuccacugaauc

SEQ ID NO: 107169 - RNA, 19 nt, Homo sapiens
  misc_RNA (1)...(19): siRNA sense strand
gacuggauaucccacacuu

SEQ ID NO: 107170 - RNA, 19 nt, Homo sapiens
  misc_RNA (1)...(19): siRNA sense strand
uuugaggaguugaaauuga

SEQ ID NO: 107171 - RNA, 19 nt, Homo sapiens
  misc_RNA (1)...(19): siRNA sense strand
gaaagcuuccauacaacug

SEQ ID NO: 107172 - RNA, 19 nt, Homo sapiens
  misc_RNA (1)...(19): siRNA sense strand
gaugucauauacgagaaug

SEQ ID NO: 107173 - RNA, 19 nt, Homo sapiens
  misc_RNA (1)...(19): siRNA sense strand
ccucauuauucuuaggaaa

SEQ ID NO: 107174 - RNA, 19 nt, Homo sapiens
  misc_RNA (1)...(19): siRNA sense strand
cgacagcaagcuaccaaga

SEQ ID NO: 107175 - RNA, 19 nt, Homo sapiens
  misc_RNA (1)...(19): siRNA sense strand
aagaugguccugcaacaaa

SEQ ID NO: 107176 - RNA, 19 nt, Homo sapiens
  misc_RNA (1)...(19): siRNA sense strand
gaucuuccacugaaucgau

SEQ ID NO: 107177 - RNA, 19 nt, Homo sapiens
  misc_RNA (1)...(19): siRNA sense strand
cuuguuacccucauuauuc

SEQ ID NO: 107178 - RNA, 19 nt, Homo sapiens
  misc_RNA (1)...(19): siRNA sense strand
cagaggagcaguacauuuu

SEQ ID NO: 107179 - RNA, 19 nt, Homo sapiens
  misc_RNA (1)...(19): siRNA sense strand
ggacaggaacauucauugc

SEQ ID NO: 107180 - RNA, 19 nt, Homo sapiens
  misc_RNA (1)...(19): siRNA sense strand
gaaggugcagacuacauca

SEQ ID NO: 107181 - RNA, 19 nt, Homo sapiens
  misc_RNA (1)...(19): siRNA sense strand
cauccuaccauaugacuuc

SEQ ID NO: 107182 - RNA, 19 nt, Homo sapiens
  misc_RNA (1)...(19): siRNA sense strand
cuguggagaugauuucaga

SEQ ID NO: 107183 - RNA, 19 nt, Homo sapiens
  misc_RNA (1)...(19): siRNA sense strand
gauuagucuccaugaauga

SEQ ID NO: 107184 - RNA, 19 nt, Homo sapiens
  misc_RNA (1)...(19): siRNA sense strand
agacagaggagcaguacau

SEQ ID NO: 107185 - RNA, 19 nt, Homo sapiens
  misc_RNA (1)...(19): siRNA sense strand
guagacacuuccggaucaa

SEQ ID NO: 107186 - RNA, 19 nt, Homo sapiens
  misc_RNA (1)...(19): siRNA sense strand
gugcaacugauguggauga

SEQ ID NO: 107187 - RNA, 19 nt, Homo sapiens
  misc_RNA (1)...(19): siRNA sense strand
acagaggagcaguacauuu

SEQ ID NO: 107188 - RNA, 19 nt, Homo sapiens
  misc_RNA (1)...(19): siRNA sense strand
cugacgagaugcaggaugu

SEQ ID NO: 107189 - RNA, 19 nt, Homo sapiens
  misc_RNA (1)...(19): siRNA sense strand
cuggauaucccacacuuug

SEQ ID NO: 107190 - RNA, 19 nt, Homo sapiens
  misc_RNA (1)...(19): siRNA sense strand
aaaggucccaugaucauuc

SEQ ID NO: 107191 - RNA, 19 nt, Homo sapiens
  misc_RNA (1)...(19): siRNA sense strand
caaaggucccaugaucauu

SEQ ID NO: 107192 - RNA, 19 nt, Homo sapiens
  misc_RNA (1)...(19): siRNA sense strand
ggacgacugggccuguaga

SEQ ID NO: 107193 - RNA, 19 nt, Homo sapiens
  misc_RNA (1)...(19): siRNA sense strand
cuccaugaaugaagaggaa

SEQ ID NO: 107194 - RNA, 19 nt, Homo sapiens
  misc_RNA (1)...(19): siRNA sense strand
uugaggaguugaaauugau

SEQ ID NO: 107195 - RNA, 19 nt, Homo sapiens
  misc_RNA (1)...(19): siRNA sense strand
ugacuucagccgugugaga

SEQ ID NO: 107196 - RNA, 19 nt, Homo sapiens
  misc_RNA (1)...(19): siRNA sense strand
aaauugauuggacuggaua

SEQ ID NO: 107197 - RNA, 19 nt, Homo sapiens
  misc_RNA (1)...(19): siRNA sense strand
gucauauacgagaauguua

SEQ ID NO: 107198 - RNA, 19 nt, Homo sapiens
  misc_RNA (1)...(19): siRNA sense strand
gugaugucauauacgagaa

SEQ ID NO: 107199 - RNA, 19 nt, Homo sapiens
  misc_RNA (1)...(19): siRNA sense strand
agaagaggaaacugacaaa

SEQ ID NO: 107200 - RNA, 19 nt, Homo sapiens
  misc_RNA (1)...(19): siRNA sense strand
gaaucccaaugugguagug

SEQ ID NO: 107201 - RNA, 19 nt, Homo sapiens
  misc_RNA (1)...(19): siRNA sense strand
ccacugaaucgauguaaaa

SEQ ID NO: 107202 - RNA, 19 nt, Homo sapiens
  misc_RNA (1)...(19): siRNA sense strand
gcaacaaaagucucagauu

SEQ ID NO: 107203 - RNA, 19 nt, Homo sapiens
  misc_RNA (1)...(19): siRNA sense strand
gcuuguuacccucauuauu

SEQ ID NO: 107204 - RNA, 19 nt, Homo sapiens
  misc_RNA (1)...(19): siRNA sense strand
cgagaugcaggaugugaug

SEQ ID NO: 107205 - RNA, 19 nt, Homo sapiens
  misc_RNA (1)...(19): siRNA sense strand
cacaaacauccuaccauau

SEQ ID NO: 107206 - RNA, 19 nt, Homo sapiens
  misc_RNA (1)...(19): siRNA sense strand
gugugcaacugauguggau

SEQ ID NO: 107207 - RNA, 19 nt, Homo sapiens
  misc_RNA (1)...(19): siRNA sense strand
gacagaggagcaguacauu

SEQ ID NO: 107208 - RNA, 19 nt, Homo sapiens
  misc_RNA (1)...(19): siRNA sense strand
ugucauauacgagaauguu

SEQ ID NO: 107209 - RNA, 19 nt, Homo sapiens
  misc_RNA (1)...(19): siRNA sense strand
caaagacucugacuauaaa

SEQ ID NO: 107210 - RNA, 19 nt, Homo sapiens
  misc_RNA (1)...(19): siRNA sense strand
caacaaaagucucagauua

SEQ ID NO: 107211 - RNA, 19 nt, Homo sapiens
  misc_RNA (1)...(19): siRNA sense strand
gaaaguauccugcaguuug

SEQ ID NO: 107212 - RNA, 19 nt, Homo sapiens
  misc_RNA (1)...(19): siRNA sense strand
acacaaacauccuaccaua

SEQ ID NO: 107213 - RNA, 19 nt, Homo sapiens
  misc_RNA (1)...(19): siRNA sense strand
caacugauguggaugaaga

SEQ ID NO: 107214 - RNA, 19 nt, Homo sapiens
  misc_RNA (1)...(19): siRNA sense strand
gagcaaaggucccaugauc

SEQ ID NO: 107215 - RNA, 19 nt, Homo sapiens
  misc_RNA (1)...(19): siRNA sense strand
ccaacuauauuccuggaua

SEQ ID NO: 107216 - RNA, 19 nt, Homo sapiens
  misc_RNA (1)...(19): siRNA sense strand
ccaaagacucugacuauaa

SEQ ID NO: 107217 - RNA, 19 nt, Homo sapiens
  misc_RNA (1)...(19): siRNA sense strand
caacuaugcugacgagaug

SEQ ID NO: 107218 - RNA, 19 nt, Homo sapiens
  misc_RNA (1)...(19): siRNA sense strand
guguggagcugguacauuu

SEQ ID NO: 107219 - RNA, 19 nt, Homo sapiens
  misc_RNA (1)...(19): siRNA sense strand
gaaauugauuggacuggau

SEQ ID NO: 107220 - RNA, 19 nt, Homo sapiens
  misc_RNA (1)...(19): siRNA sense strand
ggagaugauuucagaggaa

SEQ ID NO: 107221 - RNA, 19 nt, Homo sapiens
  misc_RNA (1)...(19): siRNA sense strand
caaacauccuaccauauga

SEQ ID NO: 107222 - RNA, 19 nt, Homo sapiens
  misc_RNA (1)...(19): siRNA sense strand
aaaggagggugaaauguga

SEQ ID NO: 107223 - RNA, 19 nt, Homo sapiens
  misc_RNA (1)...(19): siRNA sense strand
cuacaucaaugccaacuau

SEQ ID NO: 107224 - RNA, 19 nt, Homo sapiens
  misc_RNA (1)...(19): siRNA sense strand
uuaaggauauggccaaaga

SEQ ID NO: 107225 - RNA, 19 nt, Homo sapiens
  misc_RNA (1)...(19): siRNA sense strand
gccaaagacucugacuaua

SEQ ID NO: 107226 - RNA, 19 nt, Homo sapiens
  misc_RNA (1)...(19): siRNA sense strand
ugacuuugaugccuauauu

SEQ ID NO: 107227 - RNA, 19 nt, Homo sapiens
  misc_RNA (1)...(19): siRNA sense strand
gcagauggcuagggagugu

SEQ ID NO: 107228 - RNA, 19 nt, Homo sapiens
  misc_RNA (1)...(19): siRNA sense strand
ggucauaccggaugucuau

SEQ ID NO: 107229 - RNA, 19 nt, Homo sapiens
  misc_RNA (1)...(19): siRNA sense strand
ggaagaugguccugcaaca

SEQ ID NO: 107230 - RNA, 19 nt, Homo sapiens
  misc_RNA (1)...(19): siRNA sense strand
cagaaaguauccugcaguu

SEQ ID NO: 107231 - RNA, 19 nt, Homo sapiens
  misc_RNA (1)...(19): siRNA sense strand
gaccauuacuggccauuca

SEQ ID NO: 107232 - RNA, 19 nt, Homo sapiens
  misc_RNA (1)...(19): siRNA sense strand
ggccaaagacucugacuau

SEQ ID NO: 107233 - RNA, 19 nt, Homo sapiens
  misc_RNA (1)...(19): siRNA sense strand
gcugguacauuugucaauu

SEQ ID NO: 107234 - RNA, 19 nt, Homo sapiens
  misc_RNA (1)...(19): siRNA sense strand
ugauguggaugaagaagaa

SEQ ID NO: 107235 - RNA, 19 nt, Homo sapiens
  misc_RNA (1)...(19): siRNA sense strand
gcaaaggucccaugaucau

SEQ ID NO: 107236 - RNA, 19 nt, Homo sapiens
  misc_RNA (1)...(19): siRNA sense strand
ucagugaugucauauacga

SEQ ID NO: 107237 - RNA, 19 nt, Homo sapiens
  misc_RNA (1)...(19): siRNA sense strand
cugcagaucuuccacugaa

SEQ ID NO: 107238 - RNA, 19 nt, Homo sapiens
  misc_RNA (1)...(19): siRNA sense strand
gggcuggugucagaaauga

SEQ ID NO: 107239 - RNA, 19 nt, Homo sapiens
  misc_RNA (1)...(19): siRNA sense strand
gcaaaugcugcagaaagua

SEQ ID NO: 107240 - RNA, 19 nt, Homo sapiens
  misc_RNA (1)...(19): siRNA sense strand
ggacggacaggaacauuca

SEQ ID NO: 107241 - RNA, 19 nt, Homo sapiens
  misc_RNA (1)...(19): siRNA sense strand
acaaacauccuaccauaug

SEQ ID NO: 107242 - RNA, 19 nt, Homo sapiens
  misc_RNA (1)...(19): siRNA sense strand
caucaaugccaacuauauu

SEQ ID NO: 107243 - RNA, 19 nt, Homo sapiens
  misc_RNA (1)...(19): siRNA sense strand
acacuuugcugcagaucuu

SEQ ID NO: 107244 - RNA, 19 nt, Homo sapiens
  misc_RNA (1)...(19): siRNA sense strand
gaagaugguccugcaacaa

SEQ ID NO: 107245 - RNA, 19 nt, Homo sapiens
  misc_RNA (1)...(19): siRNA sense strand
uaauuggacuguugcuugu

SEQ ID NO: 107246 - RNA, 19 nt, Homo sapiens
  misc_RNA (1)...(19): siRNA sense strand
agagagggauggaaagcuu

SEQ ID NO: 107247 - RNA, 19 nt, Homo sapiens
  misc_RNA (1)...(19): siRNA sense strand
gaugaaucccaauguggua

SEQ ID NO: 107248 - RNA, 19 nt, Homo sapiens
  misc_RNA (1)...(19): siRNA sense strand
cuucagccgugugagauua

SEQ ID NO: 107249 - RNA, 19 nt, Homo sapiens
  misc_RNA (1)...(19): siRNA sense strand
uuaaagaagaggaaacuga

SEQ ID NO: 107250 - RNA, 19 nt, Homo sapiens
  misc_RNA (1)...(19): siRNA sense strand
ggaugacuuugaugccuau

SEQ ID NO: 107251 - RNA, 19 nt, Homo sapiens
  misc_RNA (1)...(19): siRNA sense strand
aaaguauccugcaguuugu

SEQ ID NO: 107252 - RNA, 19 nt, Homo sapiens
  misc_RNA (1)...(19): siRNA sense strand
caaaugcugcagaaaguau

SEQ ID NO: 107253 - RNA, 19 nt, Homo sapiens
  misc_RNA (1)...(19): siRNA sense strand
ugaagaagaagcagcaguu

SEQ ID NO: 107254 - RNA, 19 nt, Homo sapiens
  misc_RNA (1)...(19): siRNA sense strand
agauuagucuccaugaaug

SEQ ID NO: 107255 - RNA, 19 nt, Homo sapiens
  misc_RNA (1)...(19): siRNA sense strand
agaggaaggugcagacuac

SEQ ID NO: 107256 - RNA, 19 nt, Homo sapiens
  misc_RNA (1)...(19): siRNA sense strand
uguagacacuuccggauca

SEQ ID NO: 107257 - RNA, 19 nt, Homo sapiens
  misc_RNA (1)...(19): siRNA sense strand
ggaaggugcagacuacauc

SEQ ID NO: 107258 - RNA, 19 nt, Homo sapiens
  misc_RNA (1)...(19): siRNA sense strand
ggauauggccaaagacucu

SEQ ID NO: 107259 - RNA, 19 nt, Homo sapiens
  misc_RNA (1)...(19): siRNA sense strand
caacuauauuccuggauac

SEQ ID NO: 107260 - RNA, 19 nt, Homo sapiens
  misc_RNA (1)...(19): siRNA sense strand
agagaugaaucccaaugug

SEQ ID NO: 107261 - RNA, 19 nt, Homo sapiens
  misc_RNA (1)...(19): siRNA sense strand
ucuuagggcuggugucaga

SEQ ID NO: 107262 - RNA, 19 nt, Homo sapiens
  misc_RNA (1)...(19): siRNA sense strand
cugguacauuugucaauuu

SEQ ID NO: 107263 - RNA, 19 nt, Homo sapiens
  misc_RNA (1)...(19): siRNA sense strand
gaagaagaagcagcaguuc

SEQ ID NO: 107264 - RNA, 19 nt, Homo sapiens
  misc_RNA (1)...(19): siRNA sense strand
guuacccucauuauucuua

SEQ ID NO: 107265 - RNA, 19 nt, Homo sapiens
  misc_RNA (1)...(19): siRNA sense strand
gacuuugaugccuauauua

SEQ ID NO: 107266 - RNA, 19 nt, Homo sapiens
  misc_RNA (1)...(19): siRNA sense strand
auuggacuguugcuuguua

SEQ ID NO: 107267 - RNA, 19 nt, Homo sapiens
  misc_RNA (1)...(19): siRNA sense strand
ggugcagacuacaucaaug

SEQ ID NO: 107268 - RNA, 19 nt, Homo sapiens
  misc_RNA (1)...(19): siRNA sense strand
gcagaucuuccacugaauc

SEQ ID NO: 107269 - RNA, 19 nt, Homo sapiens
  misc_RNA (1)...(19): siRNA sense strand
gacuggauaucccacacuu

SEQ ID NO: 107270 - RNA, 19 nt, Homo sapiens
  misc_RNA (1)...(19): siRNA sense strand
uuugaggaguugaaauuga

SEQ ID NO: 107271 - RNA, 19 nt, Homo sapiens
  misc_RNA (1)...(19): siRNA sense strand
gaaagcuuccauacaacug

SEQ ID NO: 107272 - RNA, 19 nt, Homo sapiens
  misc_RNA (1)...(19): siRNA sense strand
gaugucauauacgagaaug

SEQ ID NO: 107273 - RNA, 19 nt, Homo sapiens
  misc_RNA (1)...(19): siRNA sense strand
ccucauuauucuuaggaaa

SEQ ID NO: 107274 - RNA, 19 nt, Homo sapiens
  misc_RNA (1)...(19): siRNA sense strand
cgacagcaagcuaccaaga

SEQ ID NO: 107275 - RNA, 19 nt, Homo sapiens
  misc_RNA (1)...(19): siRNA sense strand
aagaugguccugcaacaaa

SEQ ID NO: 107276 - RNA, 19 nt, Homo sapiens
  misc_RNA (1)...(19): siRNA sense strand
gaucuuccacugaaucgau

SEQ ID NO: 107277 - RNA, 19 nt, Homo sapiens
  misc_RNA (1)...(19): siRNA sense strand
cuuguuacccucauuauuc

SEQ ID NO: 107278 - RNA, 19 nt, Homo sapiens
  misc_RNA (1)...(19): siRNA sense strand
cagaggagcaguacauuuu

SEQ ID NO: 107279 - RNA, 19 nt, Homo sapiens
  misc_RNA (1)...(19): siRNA sense strand
ggacaggaacauucauugc

SEQ ID NO: 107280 - RNA, 19 nt, Homo sapiens
  misc_RNA (1)...(19): siRNA sense strand
gaaggugcagacuacauca

SEQ ID NO: 107281 - RNA, 19 nt, Homo sapiens
  misc_RNA (1)...(19): siRNA sense strand
cauccuaccauaugacuuc

SEQ ID NO: 107282 - RNA, 19 nt, Homo sapiens
  misc_RNA (1)...(19): siRNA sense strand
cuguggagaugauuucaga

SEQ ID NO: 107283 - RNA, 19 nt, Homo sapiens
  misc_RNA (1)...(19): siRNA sense strand
gauuagucuccaugaauga

SEQ ID NO: 107284 - RNA, 19 nt, Homo sapiens
  misc_RNA (1)...(19): siRNA sense strand
agacagaggagcaguacau

SEQ ID NO: 107285 - RNA, 19 nt, Homo sapiens
  misc_RNA (1)...(19): siRNA sense strand
guagacacuuccggaucaa

SEQ ID NO: 107286 - RNA, 19 nt, Homo sapiens
  misc_RNA (1)...(19): siRNA sense strand
gugcaacugauguggauga

SEQ ID NO: 107287 - RNA, 19 nt, Homo sapiens
  misc_RNA (1)...(19): siRNA sense strand
acagaggagcaguacauuu

SEQ ID NO: 107288 - RNA, 19 nt, Homo sapiens
  misc_RNA (1)...(19): siRNA sense strand
cugacgagaugcaggaugu

SEQ ID NO: 107289 - RNA, 19 nt, Homo sapiens
  misc_RNA (1)...(19): siRNA sense strand
cuggauaucccacacuuug

SEQ ID NO: 107290 - RNA, 19 nt, Homo sapiens
  misc_RNA (1)...(19): siRNA sense strand
aaaggucccaugaucauuc

SEQ ID NO: 107291 - RNA, 19 nt, Homo sapiens
  misc_RNA (1)...(19): siRNA sense strand
caaaggucccaugaucauu

SEQ ID NO: 107292 - RNA, 19 nt, Homo sapiens
  misc_RNA (1)...(19): siRNA sense strand
ggacgacugggccuguaga

SEQ ID NO: 107293 - RNA, 19 nt, Homo sapiens
  misc_RNA (1)...(19): siRNA sense strand
cuccaugaaugaagaggaa

SEQ ID NO: 107294 - RNA, 19 nt, Homo sapiens
  misc_RNA (1)...(19): siRNA sense strand
uugaggaguugaaauugau

SEQ ID NO: 107295 - RNA, 19 nt, Homo sapiens
  misc_RNA (1)...(19): siRNA sense strand
ugacuucagccgugugaga

SEQ ID NO: 107296 - RNA, 19 nt, Homo sapiens
  misc_RNA (1)...(19): siRNA sense strand
aaauugauuggacuggaua

SEQ ID NO: 107297 - RNA, 19 nt, Homo sapiens
  misc_RNA (1)...(19): siRNA sense strand
gucauauacgagaauguua

SEQ ID NO: 107298 - RNA, 19 nt, Homo sapiens
  misc_RNA (1)...(19): siRNA sense strand
gugaugucauauacgagaa

SEQ ID NO: 107299 - RNA, 19 nt, Homo sapiens
  misc_RNA (1)...(19): siRNA sense strand
agaagaggaaacugacaaa

SEQ ID NO: 107300 - RNA, 19 nt, Homo sapiens
  misc_RNA (1)...(19): siRNA sense strand
gaaucccaaugugguagug

SEQ ID NO: 107301 - RNA, 19 nt, Homo sapiens
  misc_RNA (1)...(19): siRNA sense strand
ccacugaaucgauguaaaa

SEQ ID NO: 107302 - RNA, 19 nt, Homo sapiens
  misc_RNA (1)...(19): siRNA sense strand
gcaacaaaagucucagauu

SEQ ID NO: 107303 - RNA, 19 nt, Homo sapiens
  misc_RNA (1)...(19): siRNA sense strand
gcuuguuacccucauuauu

SEQ ID NO: 107304 - RNA, 19 nt, Homo sapiens
  misc_RNA (1)...(19): siRNA sense strand
cgagaugcaggaugugaug

SEQ ID NO: 107305 - RNA, 19 nt, Homo sapiens
  misc_RNA (1)...(19): siRNA sense strand
cacaaacauccuaccauau

SEQ ID NO: 107306 - RNA, 19 nt, Homo sapiens
  misc_RNA (1)...(19): siRNA sense strand
gugugcaacugauguggau

SEQ ID NO: 107307 - RNA, 19 nt, Homo sapiens
  misc_RNA (1)...(19): siRNA sense strand
gacagaggagcaguacauu

SEQ ID NO: 107308 - RNA, 19 nt, Homo sapiens
  misc_RNA (1)...(19): siRNA sense strand
ugucauauacgagaauguu

SEQ ID NO: 107309 - RNA, 19 nt, Homo sapiens
  misc_RNA (1)...(19): siRNA sense strand
caaagacucugacuauaaa

SEQ ID NO: 107310 - RNA, 19 nt, Homo sapiens
  misc_RNA (1)...(19): siRNA sense strand
caacaaaagucucagauua

SEQ ID NO: 107311 - RNA, 19 nt, Homo sapiens
  misc_RNA (1)...(19): siRNA sense strand
gaaaguauccugcaguuug

SEQ ID NO: 107312 - RNA, 19 nt, Homo sapiens
  misc_RNA (1)...(19): siRNA sense strand
acacaaacauccuaccaua

SEQ ID NO: 107313 - RNA, 19 nt, Homo sapiens
  misc_RNA (1)...(19): siRNA sense strand
caacugauguggaugaaga

SEQ ID NO: 107314 - RNA, 19 nt, Homo sapiens
  misc_RNA (1)...(19): siRNA sense strand
gagcaaaggucccaugauc

SEQ ID NO: 107315 - RNA, 19 nt, Homo sapiens
  misc_RNA (1)...(19): siRNA sense strand
ccaacuauauuccuggaua

SEQ ID NO: 107316 - RNA, 19 nt, Homo sapiens
  misc_RNA (1)...(19): siRNA sense strand
ccaaagacucugacuauaa

SEQ ID NO: 107317 - RNA, 19 nt, Homo sapiens
  misc_RNA (1)...(19): siRNA sense strand
caacuaugcugacgagaug

SEQ ID NO: 107318 - RNA, 19 nt, Homo sapiens
  misc_RNA (1)...(19): siRNA sense strand
guguggagcugguacauuu

SEQ ID NO: 107319 - RNA, 19 nt, Homo sapiens
  misc_RNA (1)...(19): siRNA sense strand
gaaauugauuggacuggau

SEQ ID NO: 107320 - RNA, 19 nt, Homo sapiens
  misc_RNA (1)...(19): siRNA sense strand
ggagaugauuucagaggaa

SEQ ID NO: 107321 - RNA, 19 nt, Homo sapiens
  misc_RNA (1)...(19): siRNA sense strand
caaacauccuaccauauga

SEQ ID NO: 107322 - RNA, 19 nt, Homo sapiens
  misc_RNA (1)...(19): siRNA sense strand
aaaggagggugaaauguga

SEQ ID NO: 107323 - RNA, 19 nt, Homo sapiens
  misc_RNA (1)...(19): siRNA sense strand
cuacaucaaugccaacuau

SEQ ID NO: 107324 - RNA, 19 nt, Homo sapiens
  misc_RNA (1)...(19): siRNA sense strand
uuaaggauauggccaaaga

SEQ ID NO: 107325 - RNA, 19 nt, Homo sapiens
  misc_RNA (1)...(19): siRNA sense strand
gccaaagacucugacuaua

SEQ ID NO: 107326 - RNA, 19 nt, Homo sapiens
  misc_RNA (1)...(19): siRNA sense strand
ugacuuugaugccuauauu

SEQ ID NO: 107327 - RNA, 19 nt, Homo sapiens
  misc_RNA (1)...(19): siRNA sense strand
gcagauggcuagggagugu

SEQ ID NO: 107328 - RNA, 19 nt, Homo sapiens
  misc_RNA (1)...(19): siRNA sense strand
ggucauaccggaugucuau

SEQ ID NO: 107329 - RNA, 19 nt, Homo sapiens
  misc_RNA (1)...(19): siRNA sense strand
ggaagaugguccugcaaca

SEQ ID NO: 107330 - RNA, 19 nt, Homo sapiens
  misc_RNA (1)...(19): siRNA sense strand
cagaaaguauccugcaguu

SEQ ID NO: 107331 - RNA, 19 nt, Homo sapiens
  misc_RNA (1)...(19): siRNA sense strand
gaccauuacuggccauuca

SEQ ID NO: 107332 - RNA, 19 nt, Homo sapiens
  misc_RNA (1)...(19): siRNA sense strand
ggccaaagacucugacuau

SEQ ID NO: 107333 - RNA, 19 nt, Homo sapiens
  misc_RNA (1)...(19): siRNA sense strand
gcugguacauuugucaauu

SEQ ID NO: 107334 - RNA, 19 nt, Homo sapiens
  misc_RNA (1)...(19): siRNA sense strand
ugauguggaugaagaagaa

SEQ ID NO: 107335 - RNA, 19 nt, Homo sapiens
  misc_RNA (1)...(19): siRNA sense strand
gcaaaggucccaugaucau

SEQ ID NO: 107336 - RNA, 19 nt, Homo sapiens
  misc_RNA (1)...(19): siRNA sense strand
ucagugaugucauauacga

SEQ ID NO: 107337 - RNA, 19 nt, Homo sapiens
  misc_RNA (1)...(19): siRNA sense strand
cugcagaucuuccacugaa

SEQ ID NO: 107338 - RNA, 19 nt, Homo sapiens
  misc_RNA (1)...(19): siRNA sense strand
gggcuggugucagaaauga

SEQ ID NO: 107339 - RNA, 19 nt, Homo sapiens
  misc_RNA (1)...(19): siRNA sense strand
gcaaaugcugcagaaagua

SEQ ID NO: 107340 - RNA, 19 nt, Homo sapiens
  misc_RNA (1)...(19): siRNA sense strand
ggacggacaggaacauuca

SEQ ID NO: 107341 - RNA, 19 nt, Homo sapiens
  misc_RNA (1)...(19): siRNA sense strand
acaaacauccuaccauaug

SEQ ID NO: 107342 - RNA, 19 nt, Homo sapiens
  misc_RNA (1)...(19): siRNA sense strand
caucaaugccaacuauauu

SEQ ID NO: 107343 - RNA, 19 nt, Homo sapiens
  misc_RNA (1)...(19): siRNA sense strand
acacuuugcugcagaucuu

SEQ ID NO: 107344 - RNA, 19 nt, Homo sapiens
  misc_RNA (1)...(19): siRNA sense strand
gaagaugguccugcaacaa

SEQ ID NO: 107345 - RNA, 19 nt, Homo sapiens
  misc_RNA (1)...(19): siRNA sense strand
uaauuggacuguugcuugu

SEQ ID NO: 107346 - RNA, 19 nt, Homo sapiens
  misc_RNA (1)...(19): siRNA sense strand
agagagggauggaaagcuu

SEQ ID NO: 107347 - RNA, 19 nt, Homo sapiens
  misc_RNA (1)...(19): siRNA sense strand
gaugaaucccaauguggua

SEQ ID NO: 107348 - RNA, 19 nt, Homo sapiens
  misc_RNA (1)...(19): siRNA sense strand
cuucagccgugugagauua

SEQ ID NO: 107349 - RNA, 19 nt, Homo sapiens
  misc_RNA (1)...(19): siRNA sense strand
uuaaagaagaggaaacuga

SEQ ID NO: 107350 - RNA, 19 nt, Homo sapiens
  misc_RNA (1)...(19): siRNA sense strand
ggaugacuuugaugccuau

SEQ ID NO: 107351 - RNA, 19 nt, Homo sapiens
  misc_RNA (1)...(19): siRNA sense strand
aaaguauccugcaguuugu

SEQ ID NO: 107352 - RNA, 19 nt, Homo sapiens
  misc_RNA (1)...(19): siRNA sense strand
caaaugcugcagaaaguau

SEQ ID NO: 107353 - RNA, 19 nt, Homo sapiens
  misc_RNA (1)...(19): siRNA sense strand
ugaagaagaagcagcaguu

SEQ ID NO: 107354 - RNA, 19 nt, Homo sapiens
  misc_RNA (1)...(19): siRNA sense strand
agauuagucuccaugaaug

SEQ ID NO: 107355 - RNA, 19 nt, Homo sapiens
  misc_RNA (1)...(19): siRNA sense strand
agaggaaggugcagacuac

SEQ ID NO: 107356 - RNA, 19 nt, Homo sapiens
  misc_RNA (1)...(19): siRNA sense strand
uguagacacuuccggauca

SEQ ID NO: 107357 - RNA, 19 nt, Homo sapiens
  misc_RNA (1)...(19): siRNA sense strand
ggaaggugcagacuacauc

SEQ ID NO: 107358 - RNA, 19 nt, Homo sapiens
  misc_RNA (1)...(19): siRNA sense strand
ggauauggccaaagacucu

SEQ ID NO: 107359 - RNA, 19 nt, Homo sapiens
  misc_RNA (1)...(19): siRNA sense strand
caacuauauuccuggauac

SEQ ID NO: 107360 - RNA, 19 nt, Homo sapiens
  misc_RNA (1)...(19): siRNA sense strand
agagaugaaucccaaugug

SEQ ID NO: 107361 - RNA, 19 nt, Homo sapiens
  misc_RNA (1)...(19): siRNA sense strand
ucuuagggcuggugucaga

SEQ ID NO: 107362 - RNA, 19 nt, Homo sapiens
  misc_RNA (1)...(19): siRNA sense strand
cugguacauuugucaauuu

SEQ ID NO: 107363 - RNA, 19 nt, Homo sapiens
  misc_RNA (1)...(19): siRNA sense strand
gaagaagaagcagcaguuc

SEQ ID NO: 107364 - RNA, 19 nt, Homo sapiens
  misc_RNA (1)...(19): siRNA sense strand
guuacccucauuauucuua

SEQ ID NO: 107365 - RNA, 19 nt, Homo sapiens
  misc_RNA (1)...(19): siRNA sense strand
gacuuugaugccuauauua

SEQ ID NO: 107366 - RNA, 19 nt, Homo sapiens
  misc_RNA (1)...(19): siRNA sense strand
auuggacuguugcuuguua

SEQ ID NO: 107367 - RNA, 19 nt, Homo sapiens
  misc_RNA (1)...(19): siRNA sense strand
ggugcagacuacaucaaug

SEQ ID NO: 107368 - RNA, 19 nt, Homo sapiens
  misc_RNA (1)...(19): siRNA sense strand
gcagaucuuccacugaauc

SEQ ID NO: 107369 - RNA, 19 nt, Homo sapiens
  misc_RNA (1)...(19): siRNA sense strand
gacuggauaucccacacuu

SEQ ID NO: 107370 - RNA, 19 nt, Homo sapiens
  misc_RNA (1)...(19): siRNA sense strand
uuugaggaguugaaauuga

SEQ ID NO: 107371 - RNA, 19 nt, Homo sapiens
  misc_RNA (1)...(19): siRNA sense strand
gaaagcuuccauacaacug

SEQ ID NO: 107372 - RNA, 19 nt, Homo sapiens
  misc_RNA (1)...(19): siRNA sense strand
gaugucauauacgagaaug

SEQ ID NO: 107373 - RNA, 19 nt, Homo sapiens
  misc_RNA (1)...(19): siRNA sense strand
ccucauuauucuuaggaaa

SEQ ID NO: 107374 - RNA, 19 nt, Homo sapiens
  misc_RNA (1)...(19): siRNA sense strand
cgacagcaagcuaccaaga

SEQ ID NO: 107375 - RNA, 19 nt, Homo sapiens
  misc_RNA (1)...(19): siRNA sense strand
aagaugguccugcaacaaa

SEQ ID NO: 107376 - RNA, 19 nt, Homo sapiens
  misc_RNA (1)...(19): siRNA sense strand
gaucuuccacugaaucgau

SEQ ID NO: 107377 - RNA, 19 nt, Homo sapiens
  misc_RNA (1)...(19): siRNA sense strand
cuuguuacccucauuauuc

SEQ ID NO: 107378 - RNA, 19 nt, Homo sapiens
  misc_RNA (1)...(19): siRNA sense strand
cagaggagcaguacauuuu

SEQ ID NO: 107379 - RNA, 19 nt, Homo sapiens
  misc_RNA (1)...(19): siRNA sense strand
ggacaggaacauucauugc

SEQ ID NO: 107380 - RNA, 19 nt, Homo sapiens
  misc_RNA (1)...(19): siRNA sense strand
gaaggugcagacuacauca

SEQ ID NO: 107381 - RNA, 19 nt, Homo sapiens
  misc_RNA (1)...(19): siRNA sense strand
cauccuaccauaugacuuc

SEQ ID NO: 107382 - RNA, 19 nt, Homo sapiens
  misc_RNA (1)...(19): siRNA sense strand
cuguggagaugauuucaga

SEQ ID NO: 107383 - RNA, 19 nt, Homo sapiens
  misc_RNA (1)...(19): siRNA sense strand
gauuagucuccaugaauga

SEQ ID NO: 107384 - RNA, 19 nt, Homo sapiens
  misc_RNA (1)...(19): siRNA sense strand
agacagaggagcaguacau

SEQ ID NO: 107385 - RNA, 19 nt, Homo sapiens
  misc_RNA (1)...(19): siRNA sense strand
guagacacuuccggaucaa

SEQ ID NO: 107386 - RNA, 19 nt, Homo sapiens
  misc_RNA (1)...(19): siRNA sense strand
gugcaacugauguggauga

SEQ ID NO: 107387 - RNA, 19 nt, Homo sapiens
  misc_RNA (1)...(19): siRNA sense strand
acagaggagcaguacauuu

SEQ ID NO: 107388 - RNA, 19 nt, Homo sapiens
  misc_RNA (1)...(19): siRNA sense strand
cugacgagaugcaggaugu

SEQ ID NO: 107389 - RNA, 19 nt, Homo sapiens
  misc_RNA (1)...(19): siRNA sense strand
cuggauaucccacacuuug

SEQ ID NO: 107390 - RNA, 19 nt, Homo sapiens
  misc_RNA (1)...(19): siRNA sense strand
aaaggucccaugaucauuc

SEQ ID NO: 107391 - RNA, 19 nt, Homo sapiens
  misc_RNA (1)...(19): siRNA sense strand
caaaggucccaugaucauu

SEQ ID NO: 107392 - RNA, 19 nt, Homo sapiens
  misc_RNA (1)...(19): siRNA sense strand
ggacgacugggccuguaga

SEQ ID NO: 107393 - RNA, 19 nt, Homo sapiens
  misc_RNA (1)...(19): siRNA sense strand
cuccaugaaugaagaggaa

SEQ ID NO: 107394 - RNA, 19 nt, Homo sapiens
  misc_RNA (1)...(19): siRNA sense strand
uugaggaguugaaauugau

SEQ ID NO: 107395 - RNA, 19 nt, Homo sapiens
  misc_RNA (1)...(19): siRNA sense strand
ugacuucagccgugugaga

SEQ ID NO: 107396 - RNA, 19 nt, Homo sapiens
  misc_RNA (1)...(19): siRNA sense strand
aaauugauuggacuggaua

SEQ ID NO: 107397 - RNA, 19 nt, Homo sapiens
  misc_RNA (1)...(19): siRNA sense strand
gucauauacgagaauguua

SEQ ID NO: 107398 - RNA, 19 nt, Homo sapiens
  misc_RNA (1)...(19): siRNA sense strand
gugaugucauauacgagaa

SEQ ID NO: 107399 - RNA, 19 nt, Homo sapiens
  misc_RNA (1)...(19): siRNA sense strand
agaagaggaaacugacaaa

SEQ ID NO: 107400 - RNA, 19 nt, Homo sapiens
  misc_RNA (1)...(19): siRNA sense strand
gaaucccaaugugguagug

SEQ ID NO: 107401 - RNA, 19 nt, Homo sapiens
  misc_RNA (1)...(19): siRNA sense strand
ccacugaaucgauguaaaa

SEQ ID NO: 107402 - RNA, 19 nt, Homo sapiens
  misc_RNA (1)...(19): siRNA sense strand
gcaacaaaagucucagauu

SEQ ID NO: 107403 - RNA, 19 nt, Homo sapiens
  misc_RNA (1)...(19): siRNA sense strand
gcuuguuacccucauuauu

SEQ ID NO: 107404 - RNA, 19 nt, Homo sapiens
  misc_RNA (1)...(19): siRNA sense strand
cgagaugcaggaugugaug

SEQ ID NO: 107405 - RNA, 19 nt, Homo sapiens
  misc_RNA (1)...(19): siRNA sense strand
cacaaacauccuaccauau

SEQ ID NO: 107406 - RNA, 19 nt, Homo sapiens
  misc_RNA (1)...(19): siRNA sense strand
gugugcaacugauguggau

SEQ ID NO: 107407 - RNA, 19 nt, Homo sapiens
  misc_RNA (1)...(19): siRNA sense strand
gacagaggagcaguacauu

SEQ ID NO: 107408 - RNA, 19 nt, Homo sapiens
  misc_RNA (1)...(19): siRNA sense strand
ugucauauacgagaauguu

SEQ ID NO: 107409 - RNA, 19 nt, Homo sapiens
  misc_RNA (1)...(19): siRNA sense strand
gaacaaacccgacaguaaa

SEQ ID NO: 107410 - RNA, 19 nt, Homo sapiens
  misc_RNA (1)...(19): siRNA sense strand
gcaagaaggucaacucuca

SEQ ID NO: 107411 - RNA, 19 nt, Homo sapiens
  misc_RNA (1)...(19): siRNA sense strand
ccaaaugccuccugaacaa

SEQ ID NO: 107412 - RNA, 19 nt, Homo sapiens
  misc_RNA (1)...(19): siRNA sense strand
guccagagcuauuucauug

SEQ ID NO: 107413 - RNA, 19 nt, Homo sapiens
  misc_RNA (1)...(19): siRNA sense strand
cagauccuguguccuauua

SEQ ID NO: 107414 - RNA, 19 nt, Homo sapiens
  misc_RNA (1)...(19): siRNA sense strand
cgagugaccuggaacaaga

SEQ ID NO: 107415 - RNA, 19 nt, Homo sapiens
  misc_RNA (1)...(19): siRNA sense strand
gugccaaucugccuuguaa

SEQ ID NO: 107416 - RNA, 19 nt, Homo sapiens
  misc_RNA (1)...(19): siRNA sense strand
gaggagaagucacggauca

SEQ ID NO: 107417 - RNA, 19 nt, Homo sapiens
  misc_RNA (1)...(19): siRNA sense strand
gaagagcgagccuaccuuu

SEQ ID NO: 107418 - RNA, 19 nt, Homo sapiens
  misc_RNA (1)...(19): siRNA sense strand
caacaugccucaguauauc

SEQ ID NO: 107419 - RNA, 19 nt, Homo sapiens
  misc_RNA (1)...(19): siRNA sense strand
ggacucccauggugacuga

SEQ ID NO: 107420 - RNA, 19 nt, Homo sapiens
  misc_RNA (1)...(19): siRNA sense strand
ggucaacucucagcgcuuu

SEQ ID NO: 107421 - RNA, 19 nt, Homo sapiens
  misc_RNA (1)...(19): siRNA sense strand
aagaauggcuccagugaga

SEQ ID NO: 107422 - RNA, 19 nt, Homo sapiens
  misc_RNA (1)...(19): siRNA sense strand
ggacauggaucuggaagag

SEQ ID NO: 107423 - RNA, 19 nt, Homo sapiens
  misc_RNA (1)...(19): siRNA sense strand
ggagggcucugacuacauc

SEQ ID NO: 107424 - RNA, 19 nt, Homo sapiens
  misc_RNA (1)...(19): siRNA sense strand
ccaucgagcuggccacauu

SEQ ID NO: 107425 - RNA, 19 nt, Homo sapiens
  misc_RNA (1)...(19): siRNA sense strand
uagauccgauggcagaaua

SEQ ID NO: 107426 - RNA, 19 nt, Homo sapiens
  misc_RNA (1)...(19): siRNA sense strand
ggagaagugucaccaguac

SEQ ID NO: 107427 - RNA, 19 nt, Homo sapiens
  misc_RNA (1)...(19): siRNA sense strand
caaggacccuguggaaaug

SEQ ID NO: 107428 - RNA, 19 nt, Homo sapiens
  misc_RNA (1)...(19): siRNA sense strand
gaagugaacaagccgaaga

SEQ ID NO: 107429 - RNA, 19 nt, Homo sapiens
  misc_RNA (1)...(19): siRNA sense strand
caggucacguugcuagaua

SEQ ID NO: 107430 - RNA, 19 nt, Homo sapiens
  misc_RNA (1)...(19): siRNA sense strand
gcaauggacgcaucaaaca

SEQ ID NO: 107431 - RNA, 19 nt, Homo sapiens
  misc_RNA (1)...(19): siRNA sense strand
gaacagggugugccaaagu

SEQ ID NO: 107432 - RNA, 19 nt, Homo sapiens
  misc_RNA (1)...(19): siRNA sense strand
cgacaugggcccacaguug

SEQ ID NO: 107433 - RNA, 19 nt, Homo sapiens
  misc_RNA (1)...(19): siRNA sense strand
acacgucacuggcauggaa

SEQ ID NO: 107434 - RNA, 19 nt, Homo sapiens
  misc_RNA (1)...(19): siRNA sense strand
agaacaaacccgacaguaa

SEQ ID NO: 107435 - RNA, 19 nt, Homo sapiens
  misc_RNA (1)...(19): siRNA sense strand
ccagagcuauuucauugug

SEQ ID NO: 107436 - RNA, 19 nt, Homo sapiens
  misc_RNA (1)...(19): siRNA sense strand
ccaaggacccuguggaaau

SEQ ID NO: 107437 - RNA, 19 nt, Homo sapiens
  misc_RNA (1)...(19): siRNA sense strand
caucaacgccagcuucauu

SEQ ID NO: 107438 - RNA, 19 nt, Homo sapiens
  misc_RNA (1)...(19): siRNA sense strand
ugacgcggcuggaggagaa

SEQ ID NO: 107439 - RNA, 19 nt, Homo sapiens
  misc_RNA (1)...(19): siRNA sense strand
ccuacaagauccaguacaa

SEQ ID NO: 107440 - RNA, 19 nt, Homo sapiens
  misc_RNA (1)...(19): siRNA sense strand
ugaccacuaugcaaccuaa

SEQ ID NO: 107441 - RNA, 19 nt, Homo sapiens
  misc_RNA (1)...(19): siRNA sense strand
aauacaacaugccucagua

SEQ ID NO: 107442 - RNA, 19 nt, Homo sapiens
  misc_RNA (1)...(19): siRNA sense strand
gaauggcuccagugagaaa

SEQ ID NO: 107443 - RNA, 19 nt, Homo sapiens
  misc_RNA (1)...(19): siRNA sense strand
gaacaagaagggcaagaag

SEQ ID NO: 107444 - RNA, 19 nt, Homo sapiens
  misc_RNA (1)...(19): siRNA sense strand
aggagaguaucaucaagua

SEQ ID NO: 107445 - RNA, 19 nt, Homo sapiens
  misc_RNA (1)...(19): siRNA sense strand
gccaagugcauaagacuaa

SEQ ID NO: 107446 - RNA, 19 nt, Homo sapiens
  misc_RNA (1)...(19): siRNA sense strand
gacaugggcccacaguuga

SEQ ID NO: 107447 - RNA, 19 nt, Homo sapiens
  misc_RNA (1)...(19): siRNA sense strand
ggccguaucagauuaaaga

SEQ ID NO: 107448 - RNA, 19 nt, Homo sapiens
  misc_RNA (1)...(19): siRNA sense strand
caacgcccuuccuggcuuu

SEQ ID NO: 107449 - RNA, 19 nt, Homo sapiens
  misc_RNA (1)...(19): siRNA sense strand
ggugaaaucucuccccaaa

SEQ ID NO: 107450 - RNA, 19 nt, Homo sapiens
  misc_RNA (1)...(19): siRNA sense strand
gaauacaacaugccucagu

SEQ ID NO: 107451 - RNA, 19 nt, Homo sapiens
  misc_RNA (1)...(19): siRNA sense strand
ggaacaagaagggcaagaa

SEQ ID NO: 107452 - RNA, 19 nt, Homo sapiens
  misc_RNA (1)...(19): siRNA sense strand
gcaacuggcagaagcacaa

SEQ ID NO: 107453 - RNA, 19 nt, Homo sapiens
  misc_RNA (1)...(19): siRNA sense strand
gggagaagugucaccagua

SEQ ID NO: 107454 - RNA, 19 nt, Homo sapiens
  misc_RNA (1)...(19): siRNA sense strand
cgucagaacgcguacauug

SEQ ID NO: 107455 - RNA, 19 nt, Homo sapiens
  misc_RNA (1)...(19): siRNA sense strand
aaaccgaccagggcaaaua

SEQ ID NO: 107456 - RNA, 19 nt, Homo sapiens
  misc_RNA (1)...(19): siRNA sense strand
gcaggagaguaucaucaag

SEQ ID NO: 107457 - RNA, 19 nt, Homo sapiens
  misc_RNA (1)...(19): siRNA sense strand
uugagacgauugaguuuga

SEQ ID NO: 107458 - RNA, 19 nt, Homo sapiens
  misc_RNA (1)...(19): siRNA sense strand
gagcgagccuaccuuugca

SEQ ID NO: 107459 - RNA, 19 nt, Homo sapiens
  misc_RNA (1)...(19): siRNA sense strand
ggaaaccgaccagggcaaa

SEQ ID NO: 107460 - RNA, 19 nt, Homo sapiens
  misc_RNA (1)...(19): siRNA sense strand
cggaagcuuugaccacuau

SEQ ID NO: 107461 - RNA, 19 nt, Homo sapiens
  misc_RNA (1)...(19): siRNA sense strand
gcagacagaggaugaguac

SEQ ID NO: 107462 - RNA, 19 nt, Homo sapiens
  misc_RNA (1)...(19): siRNA sense strand
ggaacagggugugccaaag

SEQ ID NO: 107463 - RNA, 19 nt, Homo sapiens
  misc_RNA (1)...(19): siRNA sense strand
ucaagugugaucaguauug

SEQ ID NO: 107464 - RNA, 19 nt, Homo sapiens
  misc_RNA (1)...(19): siRNA sense strand
cauaaucugcauugucauu

SEQ ID NO: 107465 - RNA, 19 nt, Homo sapiens
  misc_RNA (1)...(19): siRNA sense strand
gccguggucuucauaaucu

SEQ ID NO: 107466 - RNA, 19 nt, Homo sapiens
  misc_RNA (1)...(19): siRNA sense strand
ccaccgcuauguccucuuc

SEQ ID NO: 107467 - RNA, 19 nt, Homo sapiens
  misc_RNA (1)...(19): siRNA sense strand
uucauaaucugcauuguca

SEQ ID NO: 107468 - RNA, 19 nt, Homo sapiens
  misc_RNA (1)...(19): siRNA sense strand
ggaguaccucggaagcuuu

SEQ ID NO: 107469 - RNA, 19 nt, Homo sapiens
  misc_RNA (1)...(19): siRNA sense strand
gcucugcccgcuaccagua

SEQ ID NO: 107470 - RNA, 19 nt, Homo sapiens
  misc_RNA (1)...(19): siRNA sense strand
ugaccaagcugcgggagau

SEQ ID NO: 107471 - RNA, 19 nt, Homo sapiens
  misc_RNA (1)...(19): siRNA sense strand
ucaagcggcuggcuaacuc

SEQ ID NO: 107472 - RNA, 19 nt, Homo sapiens
  misc_RNA (1)...(19): siRNA sense strand
gagcggaucaagccagaga

SEQ ID NO: 107473 - RNA, 19 nt, Homo sapiens
  misc_RNA (1)...(19): siRNA sense strand
ucaaggacucggccaacua

SEQ ID NO: 107474 - RNA, 19 nt, Homo sapiens
  misc_RNA (1)...(19): siRNA sense strand
gcuuugagacgauugaguu

SEQ ID NO: 107475 - RNA, 19 nt, Homo sapiens
  misc_RNA (1)...(19): siRNA sense strand
gacauucucucugcacaag

SEQ ID NO: 107476 - RNA, 19 nt, Homo sapiens
  misc_RNA (1)...(19): siRNA sense strand
gaucaugaagacaucaguu

SEQ ID NO: 107477 - RNA, 19 nt, Homo sapiens
  misc_RNA (1)...(19): siRNA sense strand
caguauggcggcuucgaua

SEQ ID NO: 107478 - RNA, 19 nt, Homo sapiens
  misc_RNA (1)...(19): siRNA sense strand
augaguaccaguucuguua

SEQ ID NO: 107479 - RNA, 19 nt, Homo sapiens
  misc_RNA (1)...(19): siRNA sense strand
acaacaugccucaguauau

SEQ ID NO: 107480 - RNA, 19 nt, Homo sapiens
  misc_RNA (1)...(19): siRNA sense strand
gauggcagaauacaacaug

SEQ ID NO: 107481 - RNA, 19 nt, Homo sapiens
  misc_RNA (1)...(19): siRNA sense strand
guccgccaguuccaguuua

SEQ ID NO: 107482 - RNA, 19 nt, Homo sapiens
  misc_RNA (1)...(19): siRNA sense strand
gagcggaugcgguaugaag

SEQ ID NO: 107483 - RNA, 19 nt, Homo sapiens
  misc_RNA (1)...(19): siRNA sense strand
caaguacgagcuccucuuc

SEQ ID NO: 107484 - RNA, 19 nt, Homo sapiens
  misc_RNA (1)...(19): siRNA sense strand
uacaagauccaguacaaug

SEQ ID NO: 107485 - RNA, 19 nt, Homo sapiens
  misc_RNA (1)...(19): siRNA sense strand
ggaacucacagaugucaag

SEQ ID NO: 107486 - RNA, 19 nt, Homo sapiens
  misc_RNA (1)...(19): siRNA sense strand
uacaacaugccucaguaua

SEQ ID NO: 107487 - RNA, 19 nt, Homo sapiens
  misc_RNA (1)...(19): siRNA sense strand
ucaagaaccgccuggugaa

SEQ ID NO: 107488 - RNA, 19 nt, Homo sapiens
  misc_RNA (1)...(19): siRNA sense strand
gcccacacgucacgcuuca

SEQ ID NO: 107489 - RNA, 19 nt, Homo sapiens
  misc_RNA (1)...(19): siRNA sense strand
acaagaauggcuccaguga

SEQ ID NO: 107490 - RNA, 19 nt, Homo sapiens
  misc_RNA (1)...(19): siRNA sense strand
ucacguugcuagauaccau

SEQ ID NO: 107491 - RNA, 19 nt, Homo sapiens
  misc_RNA (1)...(19): siRNA sense strand
cagagaagacagucgaugu

SEQ ID NO: 107492 - RNA, 19 nt, Homo sapiens
  misc_RNA (1)...(19): siRNA sense strand
gaccauggcgugcccgaau

SEQ ID NO: 107493 - RNA, 19 nt, Homo sapiens
  misc_RNA (1)...(19): siRNA sense strand
ggacauucucucugcacaa

SEQ ID NO: 107494 - RNA, 19 nt, Homo sapiens
  misc_RNA (1)...(19): siRNA sense strand
ucaccugguucaaggacuu

SEQ ID NO: 107495 - RNA, 19 nt, Homo sapiens
  misc_RNA (1)...(19): siRNA sense strand
gaggaugaguaccaguucu

SEQ ID NO: 107496 - RNA, 19 nt, Homo sapiens
  misc_RNA (1)...(19): siRNA sense strand
caagugugaucaguauugg

SEQ ID NO: 107497 - RNA, 19 nt, Homo sapiens
  misc_RNA (1)...(19): siRNA sense strand
gaacgugcuggaacucaca

SEQ ID NO: 107498 - RNA, 19 nt, Homo sapiens
  misc_RNA (1)...(19): siRNA sense strand
gauccuagugccagcaaug

SEQ ID NO: 107499 - RNA, 19 nt, Homo sapiens
  misc_RNA (1)...(19): siRNA sense strand
gggcuucaucgacuucauu

SEQ ID NO: 107500 - RNA, 19 nt, Homo sapiens
  misc_RNA (1)...(19): siRNA sense strand
gggagggcuucaucgacuu

SEQ ID NO: 107501 - RNA, 19 nt, Homo sapiens
  misc_RNA (1)...(19): siRNA sense strand
gaagucacggaucaagugu

SEQ ID NO: 107502 - RNA, 19 nt, Homo sapiens
  misc_RNA (1)...(19): siRNA sense strand
caugggcagugauuacauc

SEQ ID NO: 107503 - RNA, 19 nt, Homo sapiens
  misc_RNA (1)...(19): siRNA sense strand
guaaacgcaaggacucaga

SEQ ID NO: 107504 - RNA, 19 nt, Homo sapiens
  misc_RNA (1)...(19): siRNA sense strand
gcccuggcauggugucugu

SEQ ID NO: 107505 - RNA, 19 nt, Homo sapiens
  misc_RNA (1)...(19): siRNA sense strand
acccugagaucaccugguu

SEQ ID NO: 107506 - RNA, 19 nt, Homo sapiens
  misc_RNA (1)...(19): siRNA sense strand
ucauugcuauccugcucua

SEQ ID NO: 107507 - RNA, 19 nt, Homo sapiens
  misc_RNA (1)...(19): siRNA sense strand
gacaucaccaccacacguu

SEQ ID NO: 107508 - RNA, 19 nt, Homo sapiens
  misc_RNA (1)...(19): siRNA sense strand
gaccagggcaaauaugagu

SEQ ID NO: 107509 - RNA, 19 nt, Homo sapiens
  misc_RNA (1)...(19): siRNA sense strand
gaacaaacccgacaguaaa

SEQ ID NO: 107510 - RNA, 19 nt, Homo sapiens
  misc_RNA (1)...(19): siRNA sense strand
gcaagaaggucaacucuca

SEQ ID NO: 107511 - RNA, 19 nt, Homo sapiens
  misc_RNA (1)...(19): siRNA sense strand
ccaaaugccuccugaacaa

SEQ ID NO: 107512 - RNA, 19 nt, Homo sapiens
  misc_RNA (1)...(19): siRNA sense strand
guccagagcuauuucauug

SEQ ID NO: 107513 - RNA, 19 nt, Homo sapiens
  misc_RNA (1)...(19): siRNA sense strand
cagauccuguguccuauua

SEQ ID NO: 107514 - RNA, 19 nt, Homo sapiens
  misc_RNA (1)...(19): siRNA sense strand
cgagugaccuggaacaaga

SEQ ID NO: 107515 - RNA, 19 nt, Homo sapiens
  misc_RNA (1)...(19): siRNA sense strand
gugccaaucugccuuguaa

SEQ ID NO: 107516 - RNA, 19 nt, Homo sapiens
  misc_RNA (1)...(19): siRNA sense strand
gaggagaagucacggauca

SEQ ID NO: 107517 - RNA, 19 nt, Homo sapiens
  misc_RNA (1)...(19): siRNA sense strand
gaagagcgagccuaccuuu

SEQ ID NO: 107518 - RNA, 19 nt, Homo sapiens
  misc_RNA (1)...(19): siRNA sense strand
caacaugccucaguauauc

SEQ ID NO: 107519 - RNA, 19 nt, Homo sapiens
  misc_RNA (1)...(19): siRNA sense strand
ggacucccauggugacuga

SEQ ID NO: 107520 - RNA, 19 nt, Homo sapiens
  misc_RNA (1)...(19): siRNA sense strand
ggucaacucucagcgcuuu

SEQ ID NO: 107521 - RNA, 19 nt, Homo sapiens
  misc_RNA (1)...(19): siRNA sense strand
aagaauggcuccagugaga

SEQ ID NO: 107522 - RNA, 19 nt, Homo sapiens
  misc_RNA (1)...(19): siRNA sense strand
ggacauggaucuggaagag

SEQ ID NO: 107523 - RNA, 19 nt, Homo sapiens
  misc_RNA (1)...(19): siRNA sense strand
ggagggcucugacuacauc

SEQ ID NO: 107524 - RNA, 19 nt, Homo sapiens
  misc_RNA (1)...(19): siRNA sense strand
ccaucgagcuggccacauu

SEQ ID NO: 107525 - RNA, 19 nt, Homo sapiens
  misc_RNA (1)...(19): siRNA sense strand
uagauccgauggcagaaua

SEQ ID NO: 107526 - RNA, 19 nt, Homo sapiens
  misc_RNA (1)...(19): siRNA sense strand
ggagaagugucaccaguac

SEQ ID NO: 107527 - RNA, 19 nt, Homo sapiens
  misc_RNA (1)...(19): siRNA sense strand
caaggacccuguggaaaug

SEQ ID NO: 107528 - RNA, 19 nt, Homo sapiens
  misc_RNA (1)...(19): siRNA sense strand
gaagugaacaagccgaaga

SEQ ID NO: 107529 - RNA, 19 nt, Homo sapiens
  misc_RNA (1)...(19): siRNA sense strand
caggucacguugcuagaua

SEQ ID NO: 107530 - RNA, 19 nt, Homo sapiens
  misc_RNA (1)...(19): siRNA sense strand
gcaauggacgcaucaaaca

SEQ ID NO: 107531 - RNA, 19 nt, Homo sapiens
  misc_RNA (1)...(19): siRNA sense strand
gaacagggugugccaaagu

SEQ ID NO: 107532 - RNA, 19 nt, Homo sapiens
  misc_RNA (1)...(19): siRNA sense strand
cgacaugggcccacaguug

SEQ ID NO: 107533 - RNA, 19 nt, Homo sapiens
  misc_RNA (1)...(19): siRNA sense strand
acacgucacuggcauggaa

SEQ ID NO: 107534 - RNA, 19 nt, Homo sapiens
  misc_RNA (1)...(19): siRNA sense strand
agaacaaacccgacaguaa

SEQ ID NO: 107535 - RNA, 19 nt, Homo sapiens
  misc_RNA (1)...(19): siRNA sense strand
ccagagcuauuucauugug

SEQ ID NO: 107536 - RNA, 19 nt, Homo sapiens
  misc_RNA (1)...(19): siRNA sense strand
ccaaggacccuguggaaau

SEQ ID NO: 107537 - RNA, 19 nt, Homo sapiens
  misc_RNA (1)...(19): siRNA sense strand
caucaacgccagcuucauu

SEQ ID NO: 107538 - RNA, 19 nt, Homo sapiens
  misc_RNA (1)...(19): siRNA sense strand
ugacgcggcuggaggagaa

SEQ ID NO: 107539 - RNA, 19 nt, Homo sapiens
  misc_RNA (1)...(19): siRNA sense strand
ccuacaagauccaguacaa

SEQ ID NO: 107540 - RNA, 19 nt, Homo sapiens
  misc_RNA (1)...(19): siRNA sense strand
ugaccacuaugcaaccuaa

SEQ ID NO: 107541 - RNA, 19 nt, Homo sapiens
  misc_RNA (1)...(19): siRNA sense strand
aauacaacaugccucagua

SEQ ID NO: 107542 - RNA, 19 nt, Homo sapiens
  misc_RNA (1)...(19): siRNA sense strand
gaauggcuccagugagaaa

SEQ ID NO: 107543 - RNA, 19 nt, Homo sapiens
  misc_RNA (1)...(19): siRNA sense strand
gaacaagaagggcaagaag

SEQ ID NO: 107544 - RNA, 19 nt, Homo sapiens
  misc_RNA (1)...(19): siRNA sense strand
aggagaguaucaucaagua

SEQ ID NO: 107545 - RNA, 19 nt, Homo sapiens
  misc_RNA (1)...(19): siRNA sense strand
gccaagugcauaagacuaa

SEQ ID NO: 107546 - RNA, 19 nt, Homo sapiens
  misc_RNA (1)...(19): siRNA sense strand
gacaugggcccacaguuga

SEQ ID NO: 107547 - RNA, 19 nt, Homo sapiens
  misc_RNA (1)...(19): siRNA sense strand
ggccguaucagauuaaaga

SEQ ID NO: 107548 - RNA, 19 nt, Homo sapiens
  misc_RNA (1)...(19): siRNA sense strand
caacgcccuuccuggcuuu

SEQ ID NO: 107549 - RNA, 19 nt, Homo sapiens
  misc_RNA (1)...(19): siRNA sense strand
ggugaaaucucuccccaaa

SEQ ID NO: 107550 - RNA, 19 nt, Homo sapiens
  misc_RNA (1)...(19): siRNA sense strand
gaauacaacaugccucagu

SEQ ID NO: 107551 - RNA, 19 nt, Homo sapiens
  misc_RNA (1)...(19): siRNA sense strand
ggaacaagaagggcaagaa

SEQ ID NO: 107552 - RNA, 19 nt, Homo sapiens
  misc_RNA (1)...(19): siRNA sense strand
gcaacuggcagaagcacaa

SEQ ID NO: 107553 - RNA, 19 nt, Homo sapiens
  misc_RNA (1)...(19): siRNA sense strand
gggagaagugucaccagua

SEQ ID NO: 107554 - RNA, 19 nt, Homo sapiens
  misc_RNA (1)...(19): siRNA sense strand
cgucagaacgcguacauug

SEQ ID NO: 107555 - RNA, 19 nt, Homo sapiens
  misc_RNA (1)...(19): siRNA sense strand
aaaccgaccagggcaaaua

SEQ ID NO: 107556 - RNA, 19 nt, Homo sapiens
  misc_RNA (1)...(19): siRNA sense strand
gcaggagaguaucaucaag

SEQ ID NO: 107557 - RNA, 19 nt, Homo sapiens
  misc_RNA (1)...(19): siRNA sense strand
uugagacgauugaguuuga

SEQ ID NO: 107558 - RNA, 19 nt, Homo sapiens
  misc_RNA (1)...(19): siRNA sense strand
gagcgagccuaccuuugca

SEQ ID NO: 107559 - RNA, 19 nt, Homo sapiens
  misc_RNA (1)...(19): siRNA sense strand
ggaaaccgaccagggcaaa

SEQ ID NO: 107560 - RNA, 19 nt, Homo sapiens
  misc_RNA (1)...(19): siRNA sense strand
cggaagcuuugaccacuau

SEQ ID NO: 107561 - RNA, 19 nt, Homo sapiens
  misc_RNA (1)...(19): siRNA sense strand
gcagacagaggaugaguac

SEQ ID NO: 107562 - RNA, 19 nt, Homo sapiens
  misc_RNA (1)...(19): siRNA sense strand
ggaacagggugugccaaag

SEQ ID NO: 107563 - RNA, 19 nt, Homo sapiens
  misc_RNA (1)...(19): siRNA sense strand
ucaagugugaucaguauug

SEQ ID NO: 107564 - RNA, 19 nt, Homo sapiens
  misc_RNA (1)...(19): siRNA sense strand
cauaaucugcauugucauu

SEQ ID NO: 107565 - RNA, 19 nt, Homo sapiens
  misc_RNA (1)...(19): siRNA sense strand
gccguggucuucauaaucu

SEQ ID NO: 107566 - RNA, 19 nt, Homo sapiens
  misc_RNA (1)...(19): siRNA sense strand
ccaccgcuauguccucuuc

SEQ ID NO: 107567 - RNA, 19 nt, Homo sapiens
  misc_RNA (1)...(19): siRNA sense strand
uucauaaucugcauuguca

SEQ ID NO: 107568 - RNA, 19 nt, Homo sapiens
  misc_RNA (1)...(19): siRNA sense strand
ggaguaccucggaagcuuu

SEQ ID NO: 107569 - RNA, 19 nt, Homo sapiens
  misc_RNA (1)...(19): siRNA sense strand
gcucugcccgcuaccagua

SEQ ID NO: 107570 - RNA, 19 nt, Homo sapiens
  misc_RNA (1)...(19): siRNA sense strand
ugaccaagcugcgggagau

SEQ ID NO: 107571 - RNA, 19 nt, Homo sapiens
  misc_RNA (1)...(19): siRNA sense strand
ucaagcggcuggcuaacuc

SEQ ID NO: 107572 - RNA, 19 nt, Homo sapiens
  misc_RNA (1)...(19): siRNA sense strand
gagcggaucaagccagaga

SEQ ID NO: 107573 - RNA, 19 nt, Homo sapiens
  misc_RNA (1)...(19): siRNA sense strand
ucaaggacucggccaacua

SEQ ID NO: 107574 - RNA, 19 nt, Homo sapiens
  misc_RNA (1)...(19): siRNA sense strand
gcuuugagacgauugaguu

SEQ ID NO: 107575 - RNA, 19 nt, Homo sapiens
  misc_RNA (1)...(19): siRNA sense strand
gacauucucucugcacaag

SEQ ID NO: 107576 - RNA, 19 nt, Homo sapiens
  misc_RNA (1)...(19): siRNA sense strand
gaucaugaagacaucaguu

SEQ ID NO: 107577 - RNA, 19 nt, Homo sapiens
  misc_RNA (1)...(19): siRNA sense strand
caguauggcggcuucgaua

SEQ ID NO: 107578 - RNA, 19 nt, Homo sapiens
  misc_RNA (1)...(19): siRNA sense strand
augaguaccaguucuguua

SEQ ID NO: 107579 - RNA, 19 nt, Homo sapiens
  misc_RNA (1)...(19): siRNA sense strand
acaacaugccucaguauau

SEQ ID NO: 107580 - RNA, 19 nt, Homo sapiens
  misc_RNA (1)...(19): siRNA sense strand
gauggcagaauacaacaug

SEQ ID NO: 107581 - RNA, 19 nt, Homo sapiens
  misc_RNA (1)...(19): siRNA sense strand
guccgccaguuccaguuua

SEQ ID NO: 107582 - RNA, 19 nt, Homo sapiens
  misc_RNA (1)...(19): siRNA sense strand
gagcggaugcgguaugaag

SEQ ID NO: 107583 - RNA, 19 nt, Homo sapiens
  misc_RNA (1)...(19): siRNA sense strand
caaguacgagcuccucuuc

SEQ ID NO: 107584 - RNA, 19 nt, Homo sapiens
  misc_RNA (1)...(19): siRNA sense strand
uacaagauccaguacaaug

SEQ ID NO: 107585 - RNA, 19 nt, Homo sapiens
  misc_RNA (1)...(19): siRNA sense strand
ggaacucacagaugucaag

SEQ ID NO: 107586 - RNA, 19 nt, Homo sapiens
  misc_RNA (1)...(19): siRNA sense strand
uacaacaugccucaguaua

SEQ ID NO: 107587 - RNA, 19 nt, Homo sapiens
  misc_RNA (1)...(19): siRNA sense strand
ucaagaaccgccuggugaa

SEQ ID NO: 107588 - RNA, 19 nt, Homo sapiens
  misc_RNA (1)...(19): siRNA sense strand
gcccacacgucacgcuuca

SEQ ID NO: 107589 - RNA, 19 nt, Homo sapiens
  misc_RNA (1)...(19): siRNA sense strand
acaagaauggcuccaguga

SEQ ID NO: 107590 - RNA, 19 nt, Homo sapiens
  misc_RNA (1)...(19): siRNA sense strand
ucacguugcuagauaccau

SEQ ID NO: 107591 - RNA, 19 nt, Homo sapiens
  misc_RNA (1)...(19): siRNA sense strand
cagagaagacagucgaugu

SEQ ID NO: 107592 - RNA, 19 nt, Homo sapiens
  misc_RNA (1)...(19): siRNA sense strand
gaccauggcgugcccgaau

SEQ ID NO: 107593 - RNA, 19 nt, Homo sapiens
  misc_RNA (1)...(19): siRNA sense strand
ggacauucucucugcacaa

SEQ ID NO: 107594 - RNA, 19 nt, Homo sapiens
  misc_RNA (1)...(19): siRNA sense strand
ucaccugguucaaggacuu

SEQ ID NO: 107595 - RNA, 19 nt, Homo sapiens
  misc_RNA (1)...(19): siRNA sense strand
gaggaugaguaccaguucu

SEQ ID NO: 107596 - RNA, 19 nt, Homo sapiens
  misc_RNA (1)...(19): siRNA sense strand
caagugugaucaguauugg

SEQ ID NO: 107597 - RNA, 19 nt, Homo sapiens
  misc_RNA (1)...(19): siRNA sense strand
gaacgugcuggaacucaca

SEQ ID NO: 107598 - RNA, 19 nt, Homo sapiens
  misc_RNA (1)...(19): siRNA sense strand
gauccuagugccagcaaug

SEQ ID NO: 107599 - RNA, 19 nt, Homo sapiens
  misc_RNA (1)...(19): siRNA sense strand
gggcuucaucgacuucauu

SEQ ID NO: 107600 - RNA, 19 nt, Homo sapiens
  misc_RNA (1)...(19): siRNA sense strand
gggagggcuucaucgacuu

SEQ ID NO: 107601 - RNA, 19 nt, Homo sapiens
  misc_RNA (1)...(19): siRNA sense strand
gaagucacggaucaagugu

SEQ ID NO: 107602 - RNA, 19 nt, Homo sapiens
  misc_RNA (1)...(19): siRNA sense strand
caugggcagugauuacauc

SEQ ID NO: 107603 - RNA, 19 nt, Homo sapiens
  misc_RNA (1)...(19): siRNA sense strand
guaaacgcaaggacucaga

SEQ ID NO: 107604 - RNA, 19 nt, Homo sapiens
  misc_RNA (1)...(19): siRNA sense strand
gcccuggcauggugucugu

SEQ ID NO: 107605 - RNA, 19 nt, Homo sapiens
  misc_RNA (1)...(19): siRNA sense strand
acccugagaucaccugguu

SEQ ID NO: 107606 - RNA, 19 nt, Homo sapiens
  misc_RNA (1)...(19): siRNA sense strand
ucauugcuauccugcucua

SEQ ID NO: 107607 - RNA, 19 nt, Homo sapiens
  misc_RNA (1)...(19): siRNA sense strand
gacaucaccaccacacguu

SEQ ID NO: 107608 - RNA, 19 nt, Homo sapiens
  misc_RNA (1)...(19): siRNA sense strand
gaccagggcaaauaugagu

SEQ ID NO: 107609 - RNA, 19 nt, Homo sapiens
  misc_RNA (1)...(19): siRNA sense strand
gaacaaacccgacaguaaa

SEQ ID NO: 107610 - RNA, 19 nt, Homo sapiens
  misc_RNA (1)...(19): siRNA sense strand
gcaagaaggucaacucuca

SEQ ID NO: 107611 - RNA, 19 nt, Homo sapiens
  misc_RNA (1)...(19): siRNA sense strand
ccaaaugccuccugaacaa

SEQ ID NO: 107612 - RNA, 19 nt, Homo sapiens
  misc_RNA (1)...(19): siRNA sense strand
guccagagcuauuucauug

SEQ ID NO: 107613 - RNA, 19 nt, Homo sapiens
  misc_RNA (1)...(19): siRNA sense strand
cagauccuguguccuauua

SEQ ID NO: 107614 - RNA, 19 nt, Homo sapiens
  misc_RNA (1)...(19): siRNA sense strand
cgagugaccuggaacaaga

SEQ ID NO: 107615 - RNA, 19 nt, Homo sapiens
  misc_RNA (1)...(19): siRNA sense strand
gugccaaucugccuuguaa

SEQ ID NO: 107616 - RNA, 19 nt, Homo sapiens
  misc_RNA (1)...(19): siRNA sense strand
gaggagaagucacggauca

SEQ ID NO: 107617 - RNA, 19 nt, Homo sapiens
  misc_RNA (1)...(19): siRNA sense strand
gaagagcgagccuaccuuu

SEQ ID NO: 107618 - RNA, 19 nt, Homo sapiens
  misc_RNA (1)...(19): siRNA sense strand
caacaugccucaguauauc

SEQ ID NO: 107619 - RNA, 19 nt, Homo sapiens
  misc_RNA (1)...(19): siRNA sense strand
ggacucccauggugacuga

SEQ ID NO: 107620 - RNA, 19 nt, Homo sapiens
  misc_RNA (1)...(19): siRNA sense strand
ggucaacucucagcgcuuu

SEQ ID NO: 107621 - RNA, 19 nt, Homo sapiens
  misc_RNA (1)...(19): siRNA sense strand
aagaauggcuccagugaga

SEQ ID NO: 107622 - RNA, 19 nt, Homo sapiens
  misc_RNA (1)...(19): siRNA sense strand
ggacauggaucuggaagag

SEQ ID NO: 107623 - RNA, 19 nt, Homo sapiens
  misc_RNA (1)...(19): siRNA sense strand
ggagggcucugacuacauc

SEQ ID NO: 107624 - RNA, 19 nt, Homo sapiens
  misc_RNA (1)...(19): siRNA sense strand
ccaucgagcuggccacauu

SEQ ID NO: 107625 - RNA, 19 nt, Homo sapiens
  misc_RNA (1)...(19): siRNA sense strand
uagauccgauggcagaaua

SEQ ID NO: 107626 - RNA, 19 nt, Homo sapiens
  misc_RNA (1)...(19): siRNA sense strand
ggagaagugucaccaguac

SEQ ID NO: 107627 - RNA, 19 nt, Homo sapiens
  misc_RNA (1)...(19): siRNA sense strand
caaggacccuguggaaaug

SEQ ID NO: 107628 - RNA, 19 nt, Homo sapiens
  misc_RNA (1)...(19): siRNA sense strand
gaagugaacaagccgaaga

SEQ ID NO: 107629 - RNA, 19 nt, Homo sapiens
  misc_RNA (1)...(19): siRNA sense strand
caggucacguugcuagaua

SEQ ID NO: 107630 - RNA, 19 nt, Homo sapiens
  misc_RNA (1)...(19): siRNA sense strand
gcaauggacgcaucaaaca

SEQ ID NO: 107631 - RNA, 19 nt, Homo sapiens
  misc_RNA (1)...(19): siRNA sense strand
gaacagggugugccaaagu

SEQ ID NO: 107632 - RNA, 19 nt, Homo sapiens
  misc_RNA (1)...(19): siRNA sense strand
cgacaugggcccacaguug

SEQ ID NO: 107633 - RNA, 19 nt, Homo sapiens
  misc_RNA (1)...(19): siRNA sense strand
acacgucacuggcauggaa

SEQ ID NO: 107634 - RNA, 19 nt, Homo sapiens
  misc_RNA (1)...(19): siRNA sense strand
agaacaaacccgacaguaa

SEQ ID NO: 107635 - RNA, 19 nt, Homo sapiens
  misc_RNA (1)...(19): siRNA sense strand
ccagagcuauuucauugug

SEQ ID NO: 107636 - RNA, 19 nt, Homo sapiens
  misc_RNA (1)...(19): siRNA sense strand
ccaaggacccuguggaaau

SEQ ID NO: 107637 - RNA, 19 nt, Homo sapiens
  misc_RNA (1)...(19): siRNA sense strand
caucaacgccagcuucauu

SEQ ID NO: 107638 - RNA, 19 nt, Homo sapiens
  misc_RNA (1)...(19): siRNA sense strand
ugacgcggcuggaggagaa

SEQ ID NO: 107639 - RNA, 19 nt, Homo sapiens
  misc_RNA (1)...(19): siRNA sense strand
ccuacaagauccaguacaa

SEQ ID NO: 107640 - RNA, 19 nt, Homo sapiens
  misc_RNA (1)...(19): siRNA sense strand
ugaccacuaugcaaccuaa

SEQ ID NO: 107641 - RNA, 19 nt, Homo sapiens
  misc_RNA (1)...(19): siRNA sense strand
aauacaacaugccucagua

SEQ ID NO: 107642 - RNA, 19 nt, Homo sapiens
  misc_RNA (1)...(19): siRNA sense strand
gaauggcuccagugagaaa

SEQ ID NO: 107643 - RNA, 19 nt, Homo sapiens
  misc_RNA (1)...(19): siRNA sense strand
gaacaagaagggcaagaag

SEQ ID NO: 107644 - RNA, 19 nt, Homo sapiens
  misc_RNA (1)...(19): siRNA sense strand
aggagaguaucaucaagua

SEQ ID NO: 107645 - RNA, 19 nt, Homo sapiens
  misc_RNA (1)...(19): siRNA sense strand
gccaagugcauaagacuaa

SEQ ID NO: 107646 - RNA, 19 nt, Homo sapiens
  misc_RNA (1)...(19): siRNA sense strand
gacaugggcccacaguuga

SEQ ID NO: 107647 - RNA, 19 nt, Homo sapiens
  misc_RNA (1)...(19): siRNA sense strand
ggccguaucagauuaaaga

SEQ ID NO: 107648 - RNA, 19 nt, Homo sapiens
  misc_RNA (1)...(19): siRNA sense strand
caacgcccuuccuggcuuu

SEQ ID NO: 107649 - RNA, 19 nt, Homo sapiens
  misc_RNA (1)...(19): siRNA sense strand
ggugaaaucucuccccaaa

SEQ ID NO: 107650 - RNA, 19 nt, Homo sapiens
  misc_RNA (1)...(19): siRNA sense strand
gaauacaacaugccucagu

SEQ ID NO: 107651 - RNA, 19 nt, Homo sapiens
  misc_RNA (1)...(19): siRNA sense strand
ggaacaagaagggcaagaa

SEQ ID NO: 107652 - RNA, 19 nt, Homo sapiens
  misc_RNA (1)...(19): siRNA sense strand
gcaacuggcagaagcacaa

SEQ ID NO: 107653 - RNA, 19 nt, Homo sapiens
  misc_RNA (1)...(19): siRNA sense strand
gggagaagugucaccagua

SEQ ID NO: 107654 - RNA, 19 nt, Homo sapiens
  misc_RNA (1)...(19): siRNA sense strand
cgucagaacgcguacauug

SEQ ID NO: 107655 - RNA, 19 nt, Homo sapiens
  misc_RNA (1)...(19): siRNA sense strand
aaaccgaccagggcaaaua

SEQ ID NO: 107656 - RNA, 19 nt, Homo sapiens
  misc_RNA (1)...(19): siRNA sense strand
gcaggagaguaucaucaag

SEQ ID NO: 107657 - RNA, 19 nt, Homo sapiens
  misc_RNA (1)...(19): siRNA sense strand
uugagacgauugaguuuga

SEQ ID NO: 107658 - RNA, 19 nt, Homo sapiens
  misc_RNA (1)...(19): siRNA sense strand
gagcgagccuaccuuugca

SEQ ID NO: 107659 - RNA, 19 nt, Homo sapiens
  misc_RNA (1)...(19): siRNA sense strand
ggaaaccgaccagggcaaa

SEQ ID NO: 107660 - RNA, 19 nt, Homo sapiens
  misc_RNA (1)...(19): siRNA sense strand
cggaagcuuugaccacuau

SEQ ID NO: 107661 - RNA, 19 nt, Homo sapiens
  misc_RNA (1)...(19): siRNA sense strand
gcagacagaggaugaguac

SEQ ID NO: 107662 - RNA, 19 nt, Homo sapiens
  misc_RNA (1)...(19): siRNA sense strand
ggaacagggugugccaaag

SEQ ID NO: 107663 - RNA, 19 nt, Homo sapiens
  misc_RNA (1)...(19): siRNA sense strand
ucaagugugaucaguauug

SEQ ID NO: 107664 - RNA, 19 nt, Homo sapiens
  misc_RNA (1)...(19): siRNA sense strand
cauaaucugcauugucauu

SEQ ID NO: 107665 - RNA, 19 nt, Homo sapiens
  misc_RNA (1)...(19): siRNA sense strand
gccguggucuucauaaucu

SEQ ID NO: 107666 - RNA, 19 nt, Homo sapiens
  misc_RNA (1)...(19): siRNA sense strand
ccaccgcuauguccucuuc

SEQ ID NO: 107667 - RNA, 19 nt, Homo sapiens
  misc_RNA (1)...(19): siRNA sense strand
uucauaaucugcauuguca

SEQ ID NO: 107668 - RNA, 19 nt, Homo sapiens
  misc_RNA (1)...(19): siRNA sense strand
ggaguaccucggaagcuuu

SEQ ID NO: 107669 - RNA, 19 nt, Homo sapiens
  misc_RNA (1)...(19): siRNA sense strand
gcucugcccgcuaccagua

SEQ ID NO: 107670 - RNA, 19 nt, Homo sapiens
  misc_RNA (1)...(19): siRNA sense strand
ugaccaagcugcgggagau

SEQ ID NO: 107671 - RNA, 19 nt, Homo sapiens
  misc_RNA (1)...(19): siRNA sense strand
ucaagcggcuggcuaacuc

SEQ ID NO: 107672 - RNA, 19 nt, Homo sapiens
  misc_RNA (1)...(19): siRNA sense strand
gagcggaucaagccagaga

SEQ ID NO: 107673 - RNA, 19 nt, Homo sapiens
  misc_RNA (1)...(19): siRNA sense strand
ucaaggacucggccaacua

SEQ ID NO: 107674 - RNA, 19 nt, Homo sapiens
  misc_RNA (1)...(19): siRNA sense strand
gcuuugagacgauugaguu

SEQ ID NO: 107675 - RNA, 19 nt, Homo sapiens
  misc_RNA (1)...(19): siRNA sense strand
gacauucucucugcacaag

SEQ ID NO: 107676 - RNA, 19 nt, Homo sapiens
  misc_RNA (1)...(19): siRNA sense strand
gaucaugaagacaucaguu

SEQ ID NO: 107677 - RNA, 19 nt, Homo sapiens
  misc_RNA (1)...(19): siRNA sense strand
caguauggcggcuucgaua

SEQ ID NO: 107678 - RNA, 19 nt, Homo sapiens
  misc_RNA (1)...(19): siRNA sense strand
augaguaccaguucuguua

SEQ ID NO: 107679 - RNA, 19 nt, Homo sapiens
  misc_RNA (1)...(19): siRNA sense strand
acaacaugccucaguauau

SEQ ID NO: 107680 - RNA, 19 nt, Homo sapiens
  misc_RNA (1)...(19): siRNA sense strand
gauggcagaauacaacaug

SEQ ID NO: 107681 - RNA, 19 nt, Homo sapiens
  misc_RNA (1)...(19): siRNA sense strand
guccgccaguuccaguuua

SEQ ID NO: 107682 - RNA, 19 nt, Homo sapiens
  misc_RNA (1)...(19): siRNA sense strand
gagcggaugcgguaugaag

SEQ ID NO: 107683 - RNA, 19 nt, Homo sapiens
  misc_RNA (1)...(19): siRNA sense strand
caaguacgagcuccucuuc

SEQ ID NO: 107684 - RNA, 19 nt, Homo sapiens
  misc_RNA (1)...(19): siRNA sense strand
uacaagauccaguacaaug

SEQ ID NO: 107685 - RNA, 19 nt, Homo sapiens
  misc_RNA (1)...(19): siRNA sense strand
ggaacucacagaugucaag

SEQ ID NO: 107686 - RNA, 19 nt, Homo sapiens
  misc_RNA (1)...(19): siRNA sense strand
uacaacaugccucaguaua

SEQ ID NO: 107687 - RNA, 19 nt, Homo sapiens
  misc_RNA (1)...(19): siRNA sense strand
ucaagaaccgccuggugaa

SEQ ID NO: 107688 - RNA, 19 nt, Homo sapiens
  misc_RNA (1)...(19): siRNA sense strand
gcccacacgucacgcuuca

SEQ ID NO: 107689 - RNA, 19 nt, Homo sapiens
  misc_RNA (1)...(19): siRNA sense strand
acaagaauggcuccaguga

SEQ ID NO: 107690 - RNA, 19 nt, Homo sapiens
  misc_RNA (1)...(19): siRNA sense strand
ucacguugcuagauaccau

SEQ ID NO: 107691 - RNA, 19 nt, Homo sapiens
  misc_RNA (1)...(19): siRNA sense strand
cagagaagacagucgaugu

SEQ ID NO: 107692 - RNA, 19 nt, Homo sapiens
  misc_RNA (1)...(19): siRNA sense strand
gaccauggcgugcccgaau

SEQ ID NO: 107693 - RNA, 19 nt, Homo sapiens
  misc_RNA (1)...(19): siRNA sense strand
ggacauucucucugcacaa

SEQ ID NO: 107694 - RNA, 19 nt, Homo sapiens
  misc_RNA (1)...(19): siRNA sense strand
ucaccugguucaaggacuu

SEQ ID NO: 107695 - RNA, 19 nt, Homo sapiens
  misc_RNA (1)...(19): siRNA sense strand
gaggaugaguaccaguucu

SEQ ID NO: 107696 - RNA, 19 nt, Homo sapiens
  misc_RNA (1)...(19): siRNA sense strand
caagugugaucaguauugg

SEQ ID NO: 107697 - RNA, 19 nt, Homo sapiens
  misc_RNA (1)...(19): siRNA sense strand
gaacgugcuggaacucaca

SEQ ID NO: 107698 - RNA, 19 nt, Homo sapiens
  misc_RNA (1)...(19): siRNA sense strand
gauccuagugccagcaaug

SEQ ID NO: 107699 - RNA, 19 nt, Homo sapiens
  misc_RNA (1)...(19): siRNA sense strand
gggcuucaucgacuucauu

SEQ ID NO: 107700 - RNA, 19 nt, Homo sapiens
  misc_RNA (1)...(19): siRNA sense strand
gggagggcuucaucgacuu

SEQ ID NO: 107701 - RNA, 19 nt, Homo sapiens
  misc_RNA (1)...(19): siRNA sense strand
gaagucacggaucaagugu

SEQ ID NO: 107702 - RNA, 19 nt, Homo sapiens
  misc_RNA (1)...(19): siRNA sense strand
caugggcagugauuacauc

SEQ ID NO: 107703 - RNA, 19 nt, Homo sapiens
  misc_RNA (1)...(19): siRNA sense strand
guaaacgcaaggacucaga

SEQ ID NO: 107704 - RNA, 19 nt, Homo sapiens
  misc_RNA (1)...(19): siRNA sense strand
gcccuggcauggugucugu

SEQ ID NO: 107705 - RNA, 19 nt, Homo sapiens
  misc_RNA (1)...(19): siRNA sense strand
acccugagaucaccugguu

SEQ ID NO: 107706 - RNA, 19 nt, Homo sapiens
  misc_RNA (1)...(19): siRNA sense strand
ucauugcuauccugcucua

SEQ ID NO: 107707 - RNA, 19 nt, Homo sapiens
  misc_RNA (1)...(19): siRNA sense strand
gacaucaccaccacacguu

SEQ ID NO: 107708 - RNA, 19 nt, Homo sapiens
  misc_RNA (1)...(19): siRNA sense strand
gaccagggcaaauaugagu

SEQ ID NO: 107709 - RNA, 19 nt, Homo sapiens
  misc_RNA (1)...(19): siRNA sense strand
gaacaaacccgacaguaaa

SEQ ID NO: 107710 - RNA, 19 nt, Homo sapiens
  misc_RNA (1)...(19): siRNA sense strand
gcaagaaggucaacucuca

SEQ ID NO: 107711 - RNA, 19 nt, Homo sapiens
  misc_RNA (1)...(19): siRNA sense strand
ccaaaugccuccugaacaa

SEQ ID NO: 107712 - RNA, 19 nt, Homo sapiens
  misc_RNA (1)...(19): siRNA sense strand
guccagagcuauuucauug

SEQ ID NO: 107713 - RNA, 19 nt, Homo sapiens
  misc_RNA (1)...(19): siRNA sense strand
cagauccuguguccuauua

SEQ ID NO: 107714 - RNA, 19 nt, Homo sapiens
  misc_RNA (1)...(19): siRNA sense strand
cgagugaccuggaacaaga

SEQ ID NO: 107715 - RNA, 19 nt, Homo sapiens
  misc_RNA (1)...(19): siRNA sense strand
gugccaaucugccuuguaa

SEQ ID NO: 107716 - RNA, 19 nt, Homo sapiens
  misc_RNA (1)...(19): siRNA sense strand
gaggagaagucacggauca

SEQ ID NO: 107717 - RNA, 19 nt, Homo sapiens
  misc_RNA (1)...(19): siRNA sense strand
gaagagcgagccuaccuuu

SEQ ID NO: 107718 - RNA, 19 nt, Homo sapiens
  misc_RNA (1)...(19): siRNA sense strand
caacaugccucaguauauc

SEQ ID NO: 107719 - RNA, 19 nt, Homo sapiens
  misc_RNA (1)...(19): siRNA sense strand
ggacucccauggugacuga

SEQ ID NO: 107720 - RNA, 19 nt, Homo sapiens
  misc_RNA (1)...(19): siRNA sense strand
ggucaacucucagcgcuuu

SEQ ID NO: 107721 - RNA, 19 nt, Homo sapiens
  misc_RNA (1)...(19): siRNA sense strand
aagaauggcuccagugaga

SEQ ID NO: 107722 - RNA, 19 nt, Homo sapiens
  misc_RNA (1)...(19): siRNA sense strand
ggacauggaucuggaagag

SEQ ID NO: 107723 - RNA, 19 nt, Homo sapiens
  misc_RNA (1)...(19): siRNA sense strand
ggagggcucugacuacauc

SEQ ID NO: 107724 - RNA, 19 nt, Homo sapiens
  misc_RNA (1)...(19): siRNA sense strand
ccaucgagcuggccacauu

SEQ ID NO: 107725 - RNA, 19 nt, Homo sapiens
  misc_RNA (1)...(19): siRNA sense strand
uagauccgauggcagaaua

SEQ ID NO: 107726 - RNA, 19 nt, Homo sapiens
  misc_RNA (1)...(19): siRNA sense strand
ggagaagugucaccaguac

SEQ ID NO: 107727 - RNA, 19 nt, Homo sapiens
  misc_RNA (1)...(19): siRNA sense strand
caaggacccuguggaaaug

SEQ ID NO: 107728 - RNA, 19 nt, Homo sapiens
  misc_RNA (1)...(19): siRNA sense strand
gaagugaacaagccgaaga

SEQ ID NO: 107729 - RNA, 19 nt, Homo sapiens
  misc_RNA (1)...(19): siRNA sense strand
caggucacguugcuagaua

SEQ ID NO: 107730 - RNA, 19 nt, Homo sapiens
  misc_RNA (1)...(19): siRNA sense strand
gcaauggacgcaucaaaca

SEQ ID NO: 107731 - RNA, 19 nt, Homo sapiens
  misc_RNA (1)...(19): siRNA sense strand
gaacagggugugccaaagu

SEQ ID NO: 107732 - RNA, 19 nt, Homo sapiens
  misc_RNA (1)...(19): siRNA sense strand
cgacaugggcccacaguug

SEQ ID NO: 107733 - RNA, 19 nt, Homo sapiens
  misc_RNA (1)...(19): siRNA sense strand
acacgucacuggcauggaa

SEQ ID NO: 107734 - RNA, 19 nt, Homo sapiens
  misc_RNA (1)...(19): siRNA sense strand
agaacaaacccgacaguaa

SEQ ID NO: 107735 - RNA, 19 nt, Homo sapiens
  misc_RNA (1)...(19): siRNA sense strand
ccagagcuauuucauugug

SEQ ID NO: 107736 - RNA, 19 nt, Homo sapiens
  misc_RNA (1)...(19): siRNA sense strand
ccaaggacccuguggaaau

SEQ ID NO: 107737 - RNA, 19 nt, Homo sapiens
  misc_RNA (1)...(19): siRNA sense strand
caucaacgccagcuucauu

SEQ ID NO: 107738 - RNA, 19 nt, Homo sapiens
  misc_RNA (1)...(19): siRNA sense strand
ugacgcggcuggaggagaa

SEQ ID NO: 107739 - RNA, 19 nt, Homo sapiens
  misc_RNA (1)...(19): siRNA sense strand
ccuacaagauccaguacaa

SEQ ID NO: 107740 - RNA, 19 nt, Homo sapiens
  misc_RNA (1)...(19): siRNA sense strand
ugaccacuaugcaaccuaa

SEQ ID NO: 107741 - RNA, 19 nt, Homo sapiens
  misc_RNA (1)...(19): siRNA sense strand
aauacaacaugccucagua

SEQ ID NO: 107742 - RNA, 19 nt, Homo sapiens
  misc_RNA (1)...(19): siRNA sense strand
gaauggcuccagugagaaa

SEQ ID NO: 107743 - RNA, 19 nt, Homo sapiens
  misc_RNA (1)...(19): siRNA sense strand
gaacaagaagggcaagaag

SEQ ID NO: 107744 - RNA, 19 nt, Homo sapiens
  misc_RNA (1)...(19): siRNA sense strand
aggagaguaucaucaagua

SEQ ID NO: 107745 - RNA, 19 nt, Homo sapiens
  misc_RNA (1)...(19): siRNA sense strand
gccaagugcauaagacuaa

SEQ ID NO: 107746 - RNA, 19 nt, Homo sapiens
  misc_RNA (1)...(19): siRNA sense strand
gacaugggcccacaguuga

SEQ ID NO: 107747 - RNA, 19 nt, Homo sapiens
  misc_RNA (1)...(19): siRNA sense strand
ggccguaucagauuaaaga

SEQ ID NO: 107748 - RNA, 19 nt, Homo sapiens
  misc_RNA (1)...(19): siRNA sense strand
caacgcccuuccuggcuuu

SEQ ID NO: 107749 - RNA, 19 nt, Homo sapiens
  misc_RNA (1)...(19): siRNA sense strand
ggugaaaucucuccccaaa

SEQ ID NO: 107750 - RNA, 19 nt, Homo sapiens
  misc_RNA (1)...(19): siRNA sense strand
gaauacaacaugccucagu

SEQ ID NO: 107751 - RNA, 19 nt, Homo sapiens
  misc_RNA (1)...(19): siRNA sense strand
ggaacaagaagggcaagaa

SEQ ID NO: 107752 - RNA, 19 nt, Homo sapiens
  misc_RNA (1)...(19): siRNA sense strand
gcaacuggcagaagcacaa

SEQ ID NO: 107753 - RNA, 19 nt, Homo sapiens
  misc_RNA (1)...(19): siRNA sense strand
gggagaagugucaccagua

SEQ ID NO: 107754 - RNA, 19 nt, Homo sapiens
  misc_RNA (1)...(19): siRNA sense strand
cgucagaacgcguacauug

SEQ ID NO: 107755 - RNA, 19 nt, Homo sapiens
  misc_RNA (1)...(19): siRNA sense strand
aaaccgaccagggcaaaua

SEQ ID NO: 107756 - RNA, 19 nt, Homo sapiens
  misc_RNA (1)...(19): siRNA sense strand
gcaggagaguaucaucaag

SEQ ID NO: 107757 - RNA, 19 nt, Homo sapiens
  misc_RNA (1)...(19): siRNA sense strand
uugagacgauugaguuuga

SEQ ID NO: 107758 - RNA, 19 nt, Homo sapiens
  misc_RNA (1)...(19): siRNA sense strand
gagcgagccuaccuuugca

SEQ ID NO: 107759 - RNA, 19 nt, Homo sapiens
  misc_RNA (1)...(19): siRNA sense strand
ggaaaccgaccagggcaaa

SEQ ID NO: 107760 - RNA, 19 nt, Homo sapiens
  misc_RNA (1)...(19): siRNA sense strand
cggaagcuuugaccacuau

SEQ ID NO: 107761 - RNA, 19 nt, Homo sapiens
  misc_RNA (1)...(19): siRNA sense strand
gcagacagaggaugaguac

SEQ ID NO: 107762 - RNA, 19 nt, Homo sapiens
  misc_RNA (1)...(19): siRNA sense strand
ggaacagggugugccaaag

SEQ ID NO: 107763 - RNA, 19 nt, Homo sapiens
  misc_RNA (1)...(19): siRNA sense strand
ucaagugugaucaguauug

SEQ ID NO: 107764 - RNA, 19 nt, Homo sapiens
  misc_RNA (1)...(19): siRNA sense strand
cauaaucugcauugucauu

SEQ ID NO: 107765 - RNA, 19 nt, Homo sapiens
  misc_RNA (1)...(19): siRNA sense strand
gccguggucuucauaaucu

SEQ ID NO: 107766 - RNA, 19 nt, Homo sapiens
  misc_RNA (1)...(19): siRNA sense strand
ccaccgcuauguccucuuc

SEQ ID NO: 107767 - RNA, 19 nt, Homo sapiens
  misc_RNA (1)...(19): siRNA sense strand
uucauaaucugcauuguca

SEQ ID NO: 107768 - RNA, 19 nt, Homo sapiens
  misc_RNA (1)...(19): siRNA sense strand
ggaguaccucggaagcuuu

SEQ ID NO: 107769 - RNA, 19 nt, Homo sapiens
  misc_RNA (1)...(19): siRNA sense strand
gcucugcccgcuaccagua

SEQ ID NO: 107770 - RNA, 19 nt, Homo sapiens
  misc_RNA (1)...(19): siRNA sense strand
ugaccaagcugcgggagau

SEQ ID NO: 107771 - RNA, 19 nt, Homo sapiens
  misc_RNA (1)...(19): siRNA sense strand
ucaagcggcuggcuaacuc

SEQ ID NO: 107772 - RNA, 19 nt, Homo sapiens
  misc_RNA (1)...(19): siRNA sense strand
gagcggaucaagccagaga

SEQ ID NO: 107773 - RNA, 19 nt, Homo sapiens
  misc_RNA (1)...(19): siRNA sense strand
ucaaggacucggccaacua

SEQ ID NO: 107774 - RNA, 19 nt, Homo sapiens
  misc_RNA (1)...(19): siRNA sense strand
gcuuugagacgauugaguu

SEQ ID NO: 107775 - RNA, 19 nt, Homo sapiens
  misc_RNA (1)...(19): siRNA sense strand
gacauucucucugcacaag

SEQ ID NO: 107776 - RNA, 19 nt, Homo sapiens
  misc_RNA (1)...(19): siRNA sense strand
gaucaugaagacaucaguu

SEQ ID NO: 107777 - RNA, 19 nt, Homo sapiens
  misc_RNA (1)...(19): siRNA sense strand
caguauggcggcuucgaua

SEQ ID NO: 107778 - RNA, 19 nt, Homo sapiens
  misc_RNA (1)...(19): siRNA sense strand
augaguaccaguucuguua

SEQ ID NO: 107779 - RNA, 19 nt, Homo sapiens
  misc_RNA (1)...(19): siRNA sense strand
acaacaugccucaguauau

SEQ ID NO: 107780 - RNA, 19 nt, Homo sapiens
  misc_RNA (1)...(19): siRNA sense strand
gauggcagaauacaacaug

SEQ ID NO: 107781 - RNA, 19 nt, Homo sapiens
  misc_RNA (1)...(19): siRNA sense strand
guccgccaguuccaguuua

SEQ ID NO: 107782 - RNA, 19 nt, Homo sapiens
  misc_RNA (1)...(19): siRNA sense strand
gagcggaugcgguaugaag

SEQ ID NO: 107783 - RNA, 19 nt, Homo sapiens
  misc_RNA (1)...(19): siRNA sense strand
caaguacgagcuccucuuc

SEQ ID NO: 107784 - RNA, 19 nt, Homo sapiens
  misc_RNA (1)...(19): siRNA sense strand
uacaagauccaguacaaug

SEQ ID NO: 107785 - RNA, 19 nt, Homo sapiens
  misc_RNA (1)...(19): siRNA sense strand
ggaacucacagaugucaag

SEQ ID NO: 107786 - RNA, 19 nt, Homo sapiens
  misc_RNA (1)...(19): siRNA sense strand
uacaacaugccucaguaua

SEQ ID NO: 107787 - RNA, 19 nt, Homo sapiens
  misc_RNA (1)...(19): siRNA sense strand
ucaagaaccgccuggugaa

SEQ ID NO: 107788 - RNA, 19 nt, Homo sapiens
  misc_RNA (1)...(19): siRNA sense strand
gcccacacgucacgcuuca

SEQ ID NO: 107789 - RNA, 19 nt, Homo sapiens
  misc_RNA (1)...(19): siRNA sense strand
acaagaauggcuccaguga

SEQ ID NO: 107790 - RNA, 19 nt, Homo sapiens
  misc_RNA (1)...(19): siRNA sense strand
ucacguugcuagauaccau

SEQ ID NO: 107791 - RNA, 19 nt, Homo sapiens
  misc_RNA (1)...(19): siRNA sense strand
cagagaagacagucgaugu

SEQ ID NO: 107792 - RNA, 19 nt, Homo sapiens
  misc_RNA (1)...(19): siRNA sense strand
gaccauggcgugcccgaau

SEQ ID NO: 107793 - RNA, 19 nt, Homo sapiens
  misc_RNA (1)...(19): siRNA sense strand
ggacauucucucugcacaa

SEQ ID NO: 107794 - RNA, 19 nt, Homo sapiens
  misc_RNA (1)...(19): siRNA sense strand
ucaccugguucaaggacuu

SEQ ID NO: 107795 - RNA, 19 nt, Homo sapiens
  misc_RNA (1)...(19): siRNA sense strand
gaggaugaguaccaguucu

SEQ ID NO: 107796 - RNA, 19 nt, Homo sapiens
  misc_RNA (1)...(19): siRNA sense strand
caagugugaucaguauugg

SEQ ID NO: 107797 - RNA, 19 nt, Homo sapiens
  misc_RNA (1)...(19): siRNA sense strand
gaacgugcuggaacucaca

SEQ ID NO: 107798 - RNA, 19 nt, Homo sapiens
  misc_RNA (1)...(19): siRNA sense strand
gauccuagugccagcaaug

SEQ ID NO: 107799 - RNA, 19 nt, Homo sapiens
  misc_RNA (1)...(19): siRNA sense strand
gggcuucaucgacuucauu

SEQ ID NO: 107800 - RNA, 19 nt, Homo sapiens
  misc_RNA (1)...(19): siRNA sense strand
gggagggcuucaucgacuu

SEQ ID NO: 107801 - RNA, 19 nt, Homo sapiens
  misc_RNA (1)...(19): siRNA sense strand
gaagucacggaucaagugu

SEQ ID NO: 107802 - RNA, 19 nt, Homo sapiens
  misc_RNA (1)...(19): siRNA sense strand
caugggcagugauuacauc

SEQ ID NO: 107803 - RNA, 19 nt, Homo sapiens
  misc_RNA (1)...(19): siRNA sense strand
guaaacgcaaggacucaga

SEQ ID NO: 107804 - RNA, 19 nt, Homo sapiens
  misc_RNA (1)...(19): siRNA sense strand
gcccuggcauggugucugu

SEQ ID NO: 107805 - RNA, 19 nt, Homo sapiens
  misc_RNA (1)...(19): siRNA sense strand
acccugagaucaccugguu

SEQ ID NO: 107806 - RNA, 19 nt, Homo sapiens
  misc_RNA (1)...(19): siRNA sense strand
ucauugcuauccugcucua

SEQ ID NO: 107807 - RNA, 19 nt, Homo sapiens
  misc_RNA (1)...(19): siRNA sense strand
gacaucaccaccacacguu

SEQ ID NO: 107808 - RNA, 19 nt, Homo sapiens
  misc_RNA (1)...(19): siRNA sense strand
gaccagggcaaauaugagu

SEQ ID NO: 107809 - RNA, 19 nt, Homo sapiens
  misc_RNA (1)...(19): siRNA sense strand
caaagugugugcaagcaaa

SEQ ID NO: 107810 - RNA, 19 nt, Homo sapiens
  misc_RNA (1)...(19): siRNA sense strand
gaagauggacaaauauguu

SEQ ID NO: 107811 - RNA, 19 nt, Homo sapiens
  misc_RNA (1)...(19): siRNA sense strand
uaacagaggcuuccuuuca

SEQ ID NO: 107812 - RNA, 19 nt, Homo sapiens
  misc_RNA (1)...(19): siRNA sense strand
gauuagaaaugaagaugga

SEQ ID NO: 107813 - RNA, 19 nt, Homo sapiens
  misc_RNA (1)...(19): siRNA sense strand
ccacguguuucgcaacuaa

SEQ ID NO: 107814 - RNA, 19 nt, Homo sapiens
  misc_RNA (1)...(19): siRNA sense strand
gauaacagaggcuuccuuu

SEQ ID NO: 107815 - RNA, 19 nt, Homo sapiens
  misc_RNA (1)...(19): siRNA sense strand
gcauuaguccuaucuugua

SEQ ID NO: 107816 - RNA, 19 nt, Homo sapiens
  misc_RNA (1)...(19): siRNA sense strand
gucaacagauacaagauuu

SEQ ID NO: 107817 - RNA, 19 nt, Homo sapiens
  misc_RNA (1)...(19): siRNA sense strand
uuaggaaucucuccacuau

SEQ ID NO: 107818 - RNA, 19 nt, Homo sapiens
  misc_RNA (1)...(19): siRNA sense strand
ggaagcauuucauuguaau

SEQ ID NO: 107819 - RNA, 19 nt, Homo sapiens
  misc_RNA (1)...(19): siRNA sense strand
gauacaagauuuccuuacu

SEQ ID NO: 107820 - RNA, 19 nt, Homo sapiens
  misc_RNA (1)...(19): siRNA sense strand
ugaagaaguuccugaaucu

SEQ ID NO: 107821 - RNA, 19 nt, Homo sapiens
  misc_RNA (1)...(19): siRNA sense strand
gaaguucccaccuugacua

SEQ ID NO: 107822 - RNA, 19 nt, Homo sapiens
  misc_RNA (1)...(19): siRNA sense strand
cgagugaaguccuacaaau

SEQ ID NO: 107823 - RNA, 19 nt, Homo sapiens
  misc_RNA (1)...(19): siRNA sense strand
gauggaagcauuucauugu

SEQ ID NO: 107824 - RNA, 19 nt, Homo sapiens
  misc_RNA (1)...(19): siRNA sense strand
agugaaguccuacaaauua

SEQ ID NO: 107825 - RNA, 19 nt, Homo sapiens
  misc_RNA (1)...(19): siRNA sense strand
uacaagauuuccuuacuga

SEQ ID NO: 107826 - RNA, 19 nt, Homo sapiens
  misc_RNA (1)...(19): siRNA sense strand
gcauuucauuguaaucaga

SEQ ID NO: 107827 - RNA, 19 nt, Homo sapiens
  misc_RNA (1)...(19): siRNA sense strand
uggaagcauuucauuguaa

SEQ ID NO: 107828 - RNA, 19 nt, Homo sapiens
  misc_RNA (1)...(19): siRNA sense strand
aguccuaucuuguaaggua

SEQ ID NO: 107829 - RNA, 19 nt, Homo sapiens
  misc_RNA (1)...(19): siRNA sense strand
agacccaagucaacagaua

SEQ ID NO: 107830 - RNA, 19 nt, Homo sapiens
  misc_RNA (1)...(19): siRNA sense strand
gagugaaguccuacaaauu

SEQ ID NO: 107831 - RNA, 19 nt, Homo sapiens
  misc_RNA (1)...(19): siRNA sense strand
gaaaugaagauggacaaau

SEQ ID NO: 107832 - RNA, 19 nt, Homo sapiens
  misc_RNA (1)...(19): siRNA sense strand
uaacugcacuucgaaugug

SEQ ID NO: 107833 - RNA, 19 nt, Homo sapiens
  misc_RNA (1)...(19): siRNA sense strand
cagcaccaauguuauuaau

SEQ ID NO: 107834 - RNA, 19 nt, Homo sapiens
  misc_RNA (1)...(19): siRNA sense strand
cauuaguccuaucuuguaa

SEQ ID NO: 107835 - RNA, 19 nt, Homo sapiens
  misc_RNA (1)...(19): siRNA sense strand
caagccuuauuucagguua

SEQ ID NO: 107836 - RNA, 19 nt, Homo sapiens
  misc_RNA (1)...(19): siRNA sense strand
caagucaacagauacaaga

SEQ ID NO: 107837 - RNA, 19 nt, Homo sapiens
  misc_RNA (1)...(19): siRNA sense strand
cagaggcuuccuuucauua

SEQ ID NO: 107838 - RNA, 19 nt, Homo sapiens
  misc_RNA (1)...(19): siRNA sense strand
gacuuuaacugcacuucga

SEQ ID NO: 107839 - RNA, 19 nt, Homo sapiens
  misc_RNA (1)...(19): siRNA sense strand
gcagcaccaauguuauuaa

SEQ ID NO: 107840 - RNA, 19 nt, Homo sapiens
  misc_RNA (1)...(19): siRNA sense strand
gaaucucuccacuaucuug

SEQ ID NO: 107841 - RNA, 19 nt, Homo sapiens
  misc_RNA (1)...(19): siRNA sense strand
acagaggcuuccuuucauu

SEQ ID NO: 107842 - RNA, 19 nt, Homo sapiens
  misc_RNA (1)...(19): siRNA sense strand
gaggagacccuggacuuug

SEQ ID NO: 107843 - RNA, 19 nt, Homo sapiens
  misc_RNA (1)...(19): siRNA sense strand
agacgaggaugaucaguac

SEQ ID NO: 107844 - RNA, 19 nt, Homo sapiens
  misc_RNA (1)...(19): siRNA sense strand
cugcugcccugaugaagaa

SEQ ID NO: 107845 - RNA, 19 nt, Homo sapiens
  misc_RNA (1)...(19): siRNA sense strand
caaaaucaauacacaggaa

SEQ ID NO: 107846 - RNA, 19 nt, Homo sapiens
  misc_RNA (1)...(19): siRNA sense strand
aggaaucucuccacuaucu

SEQ ID NO: 107847 - RNA, 19 nt, Homo sapiens
  misc_RNA (1)...(19): siRNA sense strand
aggagacccuggacuuuga

SEQ ID NO: 107848 - RNA, 19 nt, Homo sapiens
  misc_RNA (1)...(19): siRNA sense strand
acaaaggcauuaguccuau

SEQ ID NO: 107849 - RNA, 19 nt, Homo sapiens
  misc_RNA (1)...(19): siRNA sense strand
guaaucagacccaagucaa

SEQ ID NO: 107850 - RNA, 19 nt, Homo sapiens
  misc_RNA (1)...(19): siRNA sense strand
aauuggauaugacgaguga

SEQ ID NO: 107851 - RNA, 19 nt, Homo sapiens
  misc_RNA (1)...(19): siRNA sense strand
uacaaaggcauuaguccua

SEQ ID NO: 107852 - RNA, 19 nt, Homo sapiens
  misc_RNA (1)...(19): siRNA sense strand
uaugacgagugaaguccua

SEQ ID NO: 107853 - RNA, 19 nt, Homo sapiens
  misc_RNA (1)...(19): siRNA sense strand
gaugaagaaguuccugaau

SEQ ID NO: 107854 - RNA, 19 nt, Homo sapiens
  misc_RNA (1)...(19): siRNA sense strand
gaggcuuccuuucauuaca

SEQ ID NO: 107855 - RNA, 19 nt, Homo sapiens
  misc_RNA (1)...(19): siRNA sense strand
cugaaacccucuacaaagg

SEQ ID NO: 107856 - RNA, 19 nt, Homo sapiens
  misc_RNA (1)...(19): siRNA sense strand
cagauacaagauuuccuua

SEQ ID NO: 107857 - RNA, 19 nt, Homo sapiens
  misc_RNA (1)...(19): siRNA sense strand
ggccagccuugacaacguu

SEQ ID NO: 107858 - RNA, 19 nt, Homo sapiens
  misc_RNA (1)...(19): siRNA sense strand
ucucuccacuaucuugaaa

SEQ ID NO: 107859 - RNA, 19 nt, Homo sapiens
  misc_RNA (1)...(19): siRNA sense strand
aagaaguuccugaaucuga

SEQ ID NO: 107860 - RNA, 19 nt, Homo sapiens
  misc_RNA (1)...(19): siRNA sense strand
uuacugaaacccucuacaa

SEQ ID NO: 107861 - RNA, 19 nt, Homo sapiens
  misc_RNA (1)...(19): siRNA sense strand
gcaaagugugugcaagcaa

SEQ ID NO: 107862 - RNA, 19 nt, Homo sapiens
  misc_RNA (1)...(19): siRNA sense strand
caaaggcauuaguccuauc

SEQ ID NO: 107863 - RNA, 19 nt, Homo sapiens
  misc_RNA (1)...(19): siRNA sense strand
gugaaguccuacaaauuac

SEQ ID NO: 107864 - RNA, 19 nt, Homo sapiens
  misc_RNA (1)...(19): siRNA sense strand
auggaagcauuucauugua

SEQ ID NO: 107865 - RNA, 19 nt, Homo sapiens
  misc_RNA (1)...(19): siRNA sense strand
auacaagauuuccuuacug

SEQ ID NO: 107866 - RNA, 19 nt, Homo sapiens
  misc_RNA (1)...(19): siRNA sense strand
ugaagcauuuucugaauug

SEQ ID NO: 107867 - RNA, 19 nt, Homo sapiens
  misc_RNA (1)...(19): siRNA sense strand
aggcauuaguccuaucuug

SEQ ID NO: 107868 - RNA, 19 nt, Homo sapiens
  misc_RNA (1)...(19): siRNA sense strand
augaagaaguuccugaauc

SEQ ID NO: 107869 - RNA, 19 nt, Homo sapiens
  misc_RNA (1)...(19): siRNA sense strand
guuaggaaucucuccacua

SEQ ID NO: 107870 - RNA, 19 nt, Homo sapiens
  misc_RNA (1)...(19): siRNA sense strand
gacccuggacuuugauuuc

SEQ ID NO: 107871 - RNA, 19 nt, Homo sapiens
  misc_RNA (1)...(19): siRNA sense strand
ugaagauggacaaauaugu

SEQ ID NO: 107872 - RNA, 19 nt, Homo sapiens
  misc_RNA (1)...(19): siRNA sense strand
cugauuugauggaagcauu

SEQ ID NO: 107873 - RNA, 19 nt, Homo sapiens
  misc_RNA (1)...(19): siRNA sense strand
ugaggagacccuggacuuu

SEQ ID NO: 107874 - RNA, 19 nt, Homo sapiens
  misc_RNA (1)...(19): siRNA sense strand
uaucaaaguaacaguggaa

SEQ ID NO: 107875 - RNA, 19 nt, Homo sapiens
  misc_RNA (1)...(19): siRNA sense strand
ggauaugacgagugaaguc

SEQ ID NO: 107876 - RNA, 19 nt, Homo sapiens
  misc_RNA (1)...(19): siRNA sense strand
aacagaggcuuccuuucau

SEQ ID NO: 107877 - RNA, 19 nt, Homo sapiens
  misc_RNA (1)...(19): siRNA sense strand
aagacgaggaugaucagua

SEQ ID NO: 107878 - RNA, 19 nt, Homo sapiens
  misc_RNA (1)...(19): siRNA sense strand
caccuugacuaucccaaag

SEQ ID NO: 107879 - RNA, 19 nt, Homo sapiens
  misc_RNA (1)...(19): siRNA sense strand
uauuacugcugcccugaug

SEQ ID NO: 107880 - RNA, 19 nt, Homo sapiens
  misc_RNA (1)...(19): siRNA sense strand
ggcauuaguccuaucuugu

SEQ ID NO: 107881 - RNA, 19 nt, Homo sapiens
  misc_RNA (1)...(19): siRNA sense strand
acagauacaagauuuccuu

SEQ ID NO: 107882 - RNA, 19 nt, Homo sapiens
  misc_RNA (1)...(19): siRNA sense strand
gugaagcauuuucugaauu

SEQ ID NO: 107883 - RNA, 19 nt, Homo sapiens
  misc_RNA (1)...(19): siRNA sense strand
gaagaaguuccugaaucug

SEQ ID NO: 107884 - RNA, 19 nt, Homo sapiens
  misc_RNA (1)...(19): siRNA sense strand
uacugaaacccucuacaaa

SEQ ID NO: 107885 - RNA, 19 nt, Homo sapiens
  misc_RNA (1)...(19): siRNA sense strand
cugcagcaccaauguuauu

SEQ ID NO: 107886 - RNA, 19 nt, Homo sapiens
  misc_RNA (1)...(19): siRNA sense strand
ugauggaagcauuucauug

SEQ ID NO: 107887 - RNA, 19 nt, Homo sapiens
  misc_RNA (1)...(19): siRNA sense strand
ccaccuugacuaucccaaa

SEQ ID NO: 107888 - RNA, 19 nt, Homo sapiens
  misc_RNA (1)...(19): siRNA sense strand
caaaguaacaguggaaaau

SEQ ID NO: 107889 - RNA, 19 nt, Homo sapiens
  misc_RNA (1)...(19): siRNA sense strand
gaaguccuacaaauuacca

SEQ ID NO: 107890 - RNA, 19 nt, Homo sapiens
  misc_RNA (1)...(19): siRNA sense strand
ugacccaacagauccaaga

SEQ ID NO: 107891 - RNA, 19 nt, Homo sapiens
  misc_RNA (1)...(19): siRNA sense strand
ugaugaagaaguuccugaa

SEQ ID NO: 107892 - RNA, 19 nt, Homo sapiens
  misc_RNA (1)...(19): siRNA sense strand
gugacagucugcaaaauca

SEQ ID NO: 107893 - RNA, 19 nt, Homo sapiens
  misc_RNA (1)...(19): siRNA sense strand
guucccaccuugacuaucc

SEQ ID NO: 107894 - RNA, 19 nt, Homo sapiens
  misc_RNA (1)...(19): siRNA sense strand
cuccugacaagccuuauuu

SEQ ID NO: 107895 - RNA, 19 nt, Homo sapiens
  misc_RNA (1)...(19): siRNA sense strand
gacgagugaaguccuacaa

SEQ ID NO: 107896 - RNA, 19 nt, Homo sapiens
  misc_RNA (1)...(19): siRNA sense strand
acugaaacccucuacaaag

SEQ ID NO: 107897 - RNA, 19 nt, Homo sapiens
  misc_RNA (1)...(19): siRNA sense strand
agucaacagauacaagauu

SEQ ID NO: 107898 - RNA, 19 nt, Homo sapiens
  misc_RNA (1)...(19): siRNA sense strand
aaggaggaguggugacagu

SEQ ID NO: 107899 - RNA, 19 nt, Homo sapiens
  misc_RNA (1)...(19): siRNA sense strand
ccaagucaacagauacaag

SEQ ID NO: 107900 - RNA, 19 nt, Homo sapiens
  misc_RNA (1)...(19): siRNA sense strand
ccugacaagccuuauuuca

SEQ ID NO: 107901 - RNA, 19 nt, Homo sapiens
  misc_RNA (1)...(19): siRNA sense strand
gaagauggacaaauauguu

SEQ ID NO: 107902 - RNA, 19 nt, Homo sapiens
  misc_RNA (1)...(19): siRNA sense strand
uaacagaggcuuccuuuca

SEQ ID NO: 107903 - RNA, 19 nt, Homo sapiens
  misc_RNA (1)...(19): siRNA sense strand
gauuagaaaugaagaugga

SEQ ID NO: 107904 - RNA, 19 nt, Homo sapiens
  misc_RNA (1)...(19): siRNA sense strand
gucaacagauacaagauuu

SEQ ID NO: 107905 - RNA, 19 nt, Homo sapiens
  misc_RNA (1)...(19): siRNA sense strand
gauaacagaggcuuccuuu

SEQ ID NO: 107906 - RNA, 19 nt, Homo sapiens
  misc_RNA (1)...(19): siRNA sense strand
gcauuaguccuaucuugua

SEQ ID NO: 107907 - RNA, 19 nt, Homo sapiens
  misc_RNA (1)...(19): siRNA sense strand
ggaagcauuucauuguaau

SEQ ID NO: 107908 - RNA, 19 nt, Homo sapiens
  misc_RNA (1)...(19): siRNA sense strand
gauacaagauuuccuuacu

SEQ ID NO: 107909 - RNA, 19 nt, Homo sapiens
  misc_RNA (1)...(19): siRNA sense strand
ugaagaaguuccugaaucu

SEQ ID NO: 107910 - RNA, 19 nt, Homo sapiens
  misc_RNA (1)...(19): siRNA sense strand
gaaguucccaccuugacua

SEQ ID NO: 107911 - RNA, 19 nt, Homo sapiens
  misc_RNA (1)...(19): siRNA sense strand
cgagugaaguccuacaaau

SEQ ID NO: 107912 - RNA, 19 nt, Homo sapiens
  misc_RNA (1)...(19): siRNA sense strand
gauggaagcauuucauugu

SEQ ID NO: 107913 - RNA, 19 nt, Homo sapiens
  misc_RNA (1)...(19): siRNA sense strand
agugaaguccuacaaauua

SEQ ID NO: 107914 - RNA, 19 nt, Homo sapiens
  misc_RNA (1)...(19): siRNA sense strand
uacaagauuuccuuacuga

SEQ ID NO: 107915 - RNA, 19 nt, Homo sapiens
  misc_RNA (1)...(19): siRNA sense strand
gcauuucauuguaaucaga

SEQ ID NO: 107916 - RNA, 19 nt, Homo sapiens
  misc_RNA (1)...(19): siRNA sense strand
uggaagcauuucauuguaa

SEQ ID NO: 107917 - RNA, 19 nt, Homo sapiens
  misc_RNA (1)...(19): siRNA sense strand
aguccuaucuuguaaggua

SEQ ID NO: 107918 - RNA, 19 nt, Homo sapiens
  misc_RNA (1)...(19): siRNA sense strand
agacccaagucaacagaua

SEQ ID NO: 107919 - RNA, 19 nt, Homo sapiens
  misc_RNA (1)...(19): siRNA sense strand
gagugaaguccuacaaauu

SEQ ID NO: 107920 - RNA, 19 nt, Homo sapiens
  misc_RNA (1)...(19): siRNA sense strand
gaaaugaagauggacaaau

SEQ ID NO: 107921 - RNA, 19 nt, Homo sapiens
  misc_RNA (1)...(19): siRNA sense strand
cagcaccaauguuauuaau

SEQ ID NO: 107922 - RNA, 19 nt, Homo sapiens
  misc_RNA (1)...(19): siRNA sense strand
cauuaguccuaucuuguaa

SEQ ID NO: 107923 - RNA, 19 nt, Homo sapiens
  misc_RNA (1)...(19): siRNA sense strand
caagccuuauuucagguua

SEQ ID NO: 107924 - RNA, 19 nt, Homo sapiens
  misc_RNA (1)...(19): siRNA sense strand
caagucaacagauacaaga

SEQ ID NO: 107925 - RNA, 19 nt, Homo sapiens
  misc_RNA (1)...(19): siRNA sense strand
cagaggcuuccuuucauua

SEQ ID NO: 107926 - RNA, 19 nt, Homo sapiens
  misc_RNA (1)...(19): siRNA sense strand
gcagcaccaauguuauuaa

SEQ ID NO: 107927 - RNA, 19 nt, Homo sapiens
  misc_RNA (1)...(19): siRNA sense strand
gaggagacccuggacuuug

SEQ ID NO: 107928 - RNA, 19 nt, Homo sapiens
  misc_RNA (1)...(19): siRNA sense strand
acagaggcuuccuuucauu

SEQ ID NO: 107929 - RNA, 19 nt, Homo sapiens
  misc_RNA (1)...(19): siRNA sense strand
caaaaucaauacacaggaa

SEQ ID NO: 107930 - RNA, 19 nt, Homo sapiens
  misc_RNA (1)...(19): siRNA sense strand
cugcugcccugaugaagaa

SEQ ID NO: 107931 - RNA, 19 nt, Homo sapiens
  misc_RNA (1)...(19): siRNA sense strand
guaaucagacccaagucaa

SEQ ID NO: 107932 - RNA, 19 nt, Homo sapiens
  misc_RNA (1)...(19): siRNA sense strand
aggagacccuggacuuuga

SEQ ID NO: 107933 - RNA, 19 nt, Homo sapiens
  misc_RNA (1)...(19): siRNA sense strand
acaaaggcauuaguccuau

SEQ ID NO: 107934 - RNA, 19 nt, Homo sapiens
  misc_RNA (1)...(19): siRNA sense strand
aauuggauaugacgaguga

SEQ ID NO: 107935 - RNA, 19 nt, Homo sapiens
  misc_RNA (1)...(19): siRNA sense strand
uacaaaggcauuaguccua

SEQ ID NO: 107936 - RNA, 19 nt, Homo sapiens
  misc_RNA (1)...(19): siRNA sense strand
uaugacgagugaaguccua

SEQ ID NO: 107937 - RNA, 19 nt, Homo sapiens
  misc_RNA (1)...(19): siRNA sense strand
gaugaagaaguuccugaau

SEQ ID NO: 107938 - RNA, 19 nt, Homo sapiens
  misc_RNA (1)...(19): siRNA sense strand
gaggcuuccuuucauuaca

SEQ ID NO: 107939 - RNA, 19 nt, Homo sapiens
  misc_RNA (1)...(19): siRNA sense strand
cugaaacccucuacaaagg

SEQ ID NO: 107940 - RNA, 19 nt, Homo sapiens
  misc_RNA (1)...(19): siRNA sense strand
cagauacaagauuuccuua

SEQ ID NO: 107941 - RNA, 19 nt, Homo sapiens
  misc_RNA (1)...(19): siRNA sense strand
uuacugaaacccucuacaa

SEQ ID NO: 107942 - RNA, 19 nt, Homo sapiens
  misc_RNA (1)...(19): siRNA sense strand
aagaaguuccugaaucuga

SEQ ID NO: 107943 - RNA, 19 nt, Homo sapiens
  misc_RNA (1)...(19): siRNA sense strand
gugaaguccuacaaauuac

SEQ ID NO: 107944 - RNA, 19 nt, Homo sapiens
  misc_RNA (1)...(19): siRNA sense strand
caaaggcauuaguccuauc

SEQ ID NO: 107945 - RNA, 19 nt, Homo sapiens
  misc_RNA (1)...(19): siRNA sense strand
auggaagcauuucauugua

SEQ ID NO: 107946 - RNA, 19 nt, Homo sapiens
  misc_RNA (1)...(19): siRNA sense strand
auacaagauuuccuuacug

SEQ ID NO: 107947 - RNA, 19 nt, Homo sapiens
  misc_RNA (1)...(19): siRNA sense strand
ugaagcauuuucugaauug

SEQ ID NO: 107948 - RNA, 19 nt, Homo sapiens
  misc_RNA (1)...(19): siRNA sense strand
aggcauuaguccuaucuug

SEQ ID NO: 107949 - RNA, 19 nt, Homo sapiens
  misc_RNA (1)...(19): siRNA sense strand
augaagaaguuccugaauc

SEQ ID NO: 107950 - RNA, 19 nt, Homo sapiens
  misc_RNA (1)...(19): siRNA sense strand
cugauuugauggaagcauu

SEQ ID NO: 107951 - RNA, 19 nt, Homo sapiens
  misc_RNA (1)...(19): siRNA sense strand
ugaagauggacaaauaugu

SEQ ID NO: 107952 - RNA, 19 nt, Homo sapiens
  misc_RNA (1)...(19): siRNA sense strand
gacccuggacuuugauuuc

SEQ ID NO: 107953 - RNA, 19 nt, Homo sapiens
  misc_RNA (1)...(19): siRNA sense strand
ugaggagacccuggacuuu

SEQ ID NO: 107954 - RNA, 19 nt, Homo sapiens
  misc_RNA (1)...(19): siRNA sense strand
ggauaugacgagugaaguc

SEQ ID NO: 107955 - RNA, 19 nt, Homo sapiens
  misc_RNA (1)...(19): siRNA sense strand
aacagaggcuuccuuucau

SEQ ID NO: 107956 - RNA, 19 nt, Homo sapiens
  misc_RNA (1)...(19): siRNA sense strand
caccuugacuaucccaaag

SEQ ID NO: 107957 - RNA, 19 nt, Homo sapiens
  misc_RNA (1)...(19): siRNA sense strand
uauuacugcugcccugaug

SEQ ID NO: 107958 - RNA, 19 nt, Homo sapiens
  misc_RNA (1)...(19): siRNA sense strand
ggcauuaguccuaucuugu

SEQ ID NO: 107959 - RNA, 19 nt, Homo sapiens
  misc_RNA (1)...(19): siRNA sense strand
acagauacaagauuuccuu

SEQ ID NO: 107960 - RNA, 19 nt, Homo sapiens
  misc_RNA (1)...(19): siRNA sense strand
gugaagcauuuucugaauu

SEQ ID NO: 107961 - RNA, 19 nt, Homo sapiens
  misc_RNA (1)...(19): siRNA sense strand
gaagaaguuccugaaucug

SEQ ID NO: 107962 - RNA, 19 nt, Homo sapiens
  misc_RNA (1)...(19): siRNA sense strand
uacugaaacccucuacaaa

SEQ ID NO: 107963 - RNA, 19 nt, Homo sapiens
  misc_RNA (1)...(19): siRNA sense strand
ccaccuugacuaucccaaa

SEQ ID NO: 107964 - RNA, 19 nt, Homo sapiens
  misc_RNA (1)...(19): siRNA sense strand
cugcagcaccaauguuauu

SEQ ID NO: 107965 - RNA, 19 nt, Homo sapiens
  misc_RNA (1)...(19): siRNA sense strand
ugauggaagcauuucauug

SEQ ID NO: 107966 - RNA, 19 nt, Homo sapiens
  misc_RNA (1)...(19): siRNA sense strand
gaaguccuacaaauuacca

SEQ ID NO: 107967 - RNA, 19 nt, Homo sapiens
  misc_RNA (1)...(19): siRNA sense strand
ugaugaagaaguuccugaa

SEQ ID NO: 107968 - RNA, 19 nt, Homo sapiens
  misc_RNA (1)...(19): siRNA sense strand
cuccugacaagccuuauuu

SEQ ID NO: 107969 - RNA, 19 nt, Homo sapiens
  misc_RNA (1)...(19): siRNA sense strand
gugacagucugcaaaauca

SEQ ID NO: 107970 - RNA, 19 nt, Homo sapiens
  misc_RNA (1)...(19): siRNA sense strand
guucccaccuugacuaucc

SEQ ID NO: 107971 - RNA, 19 nt, Homo sapiens
  misc_RNA (1)...(19): siRNA sense strand
ccugacaagccuuauuuca

SEQ ID NO: 107972 - RNA, 19 nt, Homo sapiens
  misc_RNA (1)...(19): siRNA sense strand
acugaaacccucuacaaag

SEQ ID NO: 107973 - RNA, 19 nt, Homo sapiens
  misc_RNA (1)...(19): siRNA sense strand
agucaacagauacaagauu

SEQ ID NO: 107974 - RNA, 19 nt, Homo sapiens
  misc_RNA (1)...(19): siRNA sense strand
gacgagugaaguccuacaa

SEQ ID NO: 107975 - RNA, 19 nt, Homo sapiens
  misc_RNA (1)...(19): siRNA sense strand
ccaagucaacagauacaag

SEQ ID NO: 107976 - RNA, 19 nt, Homo sapiens
  misc_RNA (1)...(19): siRNA sense strand
aaggaggaguggugacagu

SEQ ID NO: 107977 - RNA, 19 nt, Homo sapiens
  misc_RNA (1)...(19): siRNA sense strand
caaagugugugcaagcaaa

SEQ ID NO: 107978 - RNA, 19 nt, Homo sapiens
  misc_RNA (1)...(19): siRNA sense strand
gaagauggacaaauauguu

SEQ ID NO: 107979 - RNA, 19 nt, Homo sapiens
  misc_RNA (1)...(19): siRNA sense strand
uaacagaggcuuccuuuca

SEQ ID NO: 107980 - RNA, 19 nt, Homo sapiens
  misc_RNA (1)...(19): siRNA sense strand
gauuagaaaugaagaugga

SEQ ID NO: 107981 - RNA, 19 nt, Homo sapiens
  misc_RNA (1)...(19): siRNA sense strand
ccacguguuucgcaacuaa

SEQ ID NO: 107982 - RNA, 19 nt, Homo sapiens
  misc_RNA (1)...(19): siRNA sense strand
gauaacagaggcuuccuuu

SEQ ID NO: 107983 - RNA, 19 nt, Homo sapiens
  misc_RNA (1)...(19): siRNA sense strand
gcauuaguccuaucuugua

SEQ ID NO: 107984 - RNA, 19 nt, Homo sapiens
  misc_RNA (1)...(19): siRNA sense strand
gucaacagauacaagauuu

SEQ ID NO: 107985 - RNA, 19 nt, Homo sapiens
  misc_RNA (1)...(19): siRNA sense strand
uuaggaaucucuccacuau

SEQ ID NO: 107986 - RNA, 19 nt, Homo sapiens
  misc_RNA (1)...(19): siRNA sense strand
ggaagcauuucauuguaau

SEQ ID NO: 107987 - RNA, 19 nt, Homo sapiens
  misc_RNA (1)...(19): siRNA sense strand
gauacaagauuuccuuacu

SEQ ID NO: 107988 - RNA, 19 nt, Homo sapiens
  misc_RNA (1)...(19): siRNA sense strand
ugaagaaguuccugaaucu

SEQ ID NO: 107989 - RNA, 19 nt, Homo sapiens
  misc_RNA (1)...(19): siRNA sense strand
gaaguucccaccuugacua

SEQ ID NO: 107990 - RNA, 19 nt, Homo sapiens
  misc_RNA (1)...(19): siRNA sense strand
cgagugaaguccuacaaau

SEQ ID NO: 107991 - RNA, 19 nt, Homo sapiens
  misc_RNA (1)...(19): siRNA sense strand
gauggaagcauuucauugu

SEQ ID NO: 107992 - RNA, 19 nt, Homo sapiens
  misc_RNA (1)...(19): siRNA sense strand
agugaaguccuacaaauua

SEQ ID NO: 107993 - RNA, 19 nt, Homo sapiens
  misc_RNA (1)...(19): siRNA sense strand
uacaagauuuccuuacuga

SEQ ID NO: 107994 - RNA, 19 nt, Homo sapiens
  misc_RNA (1)...(19): siRNA sense strand
gcauuucauuguaaucaga

SEQ ID NO: 107995 - RNA, 19 nt, Homo sapiens
  misc_RNA (1)...(19): siRNA sense strand
uggaagcauuucauuguaa

SEQ ID NO: 107996 - RNA, 19 nt, Homo sapiens
  misc_RNA (1)...(19): siRNA sense strand
aguccuaucuuguaaggua

SEQ ID NO: 107997 - RNA, 19 nt, Homo sapiens
  misc_RNA (1)...(19): siRNA sense strand
agacccaagucaacagaua

SEQ ID NO: 107998 - RNA, 19 nt, Homo sapiens
  misc_RNA (1)...(19): siRNA sense strand
gagugaaguccuacaaauu

SEQ ID NO: 107999 - RNA, 19 nt, Homo sapiens
  misc_RNA (1)...(19): siRNA sense strand
gaaaugaagauggacaaau

SEQ ID NO: 108000 - RNA, 19 nt, Homo sapiens
  misc_RNA (1)...(19): siRNA sense strand
uaacugcacuucgaaugug

SEQ ID NO: 108001 - RNA, 19 nt, Homo sapiens
  misc_RNA (1)...(19): siRNA sense strand
cagcaccaauguuauuaau

SEQ ID NO: 108002 - RNA, 19 nt, Homo sapiens
  misc_RNA (1)...(19): siRNA sense strand
cauuaguccuaucuuguaa

SEQ ID NO: 108003 - RNA, 19 nt, Homo sapiens
  misc_RNA (1)...(19): siRNA sense strand
caagccuuauuucagguua

SEQ ID NO: 108004 - RNA, 19 nt, Homo sapiens
  misc_RNA (1)...(19): siRNA sense strand
caagucaacagauacaaga

SEQ ID NO: 108005 - RNA, 19 nt, Homo sapiens
  misc_RNA (1)...(19): siRNA sense strand
cagaggcuuccuuucauua

SEQ ID NO: 108006 - RNA, 19 nt, Homo sapiens
  misc_RNA (1)...(19): siRNA sense strand
gacuuuaacugcacuucga

SEQ ID NO: 108007 - RNA, 19 nt, Homo sapiens
  misc_RNA (1)...(19): siRNA sense strand
gcagcaccaauguuauuaa

SEQ ID NO: 108008 - RNA, 19 nt, Homo sapiens
  misc_RNA (1)...(19): siRNA sense strand
gaaucucuccacuaucuug

SEQ ID NO: 108009 - RNA, 19 nt, Homo sapiens
  misc_RNA (1)...(19): siRNA sense strand
acagaggcuuccuuucauu

SEQ ID NO: 108010 - RNA, 19 nt, Homo sapiens
  misc_RNA (1)...(19): siRNA sense strand
gaggagacccuggacuuug

SEQ ID NO: 108011 - RNA, 19 nt, Homo sapiens
  misc_RNA (1)...(19): siRNA sense strand
agacgaggaugaucaguac

SEQ ID NO: 108012 - RNA, 19 nt, Homo sapiens
  misc_RNA (1)...(19): siRNA sense strand
cugcugcccugaugaagaa

SEQ ID NO: 108013 - RNA, 19 nt, Homo sapiens
  misc_RNA (1)...(19): siRNA sense strand
caaaaucaauacacaggaa

SEQ ID NO: 108014 - RNA, 19 nt, Homo sapiens
  misc_RNA (1)...(19): siRNA sense strand
aggaaucucuccacuaucu

SEQ ID NO: 108015 - RNA, 19 nt, Homo sapiens
  misc_RNA (1)...(19): siRNA sense strand
aggagacccuggacuuuga

SEQ ID NO: 108016 - RNA, 19 nt, Homo sapiens
  misc_RNA (1)...(19): siRNA sense strand
acaaaggcauuaguccuau

SEQ ID NO: 108017 - RNA, 19 nt, Homo sapiens
  misc_RNA (1)...(19): siRNA sense strand
guaaucagacccaagucaa

SEQ ID NO: 108018 - RNA, 19 nt, Homo sapiens
  misc_RNA (1)...(19): siRNA sense strand
aauuggauaugacgaguga

SEQ ID NO: 108019 - RNA, 19 nt, Homo sapiens
  misc_RNA (1)...(19): siRNA sense strand
uacaaaggcauuaguccua

SEQ ID NO: 108020 - RNA, 19 nt, Homo sapiens
  misc_RNA (1)...(19): siRNA sense strand
uaugacgagugaaguccua

SEQ ID NO: 108021 - RNA, 19 nt, Homo sapiens
  misc_RNA (1)...(19): siRNA sense strand
gaugaagaaguuccugaau

SEQ ID NO: 108022 - RNA, 19 nt, Homo sapiens
  misc_RNA (1)...(19): siRNA sense strand
gaggcuuccuuucauuaca

SEQ ID NO: 108023 - RNA, 19 nt, Homo sapiens
  misc_RNA (1)...(19): siRNA sense strand
cugaaacccucuacaaagg

SEQ ID NO: 108024 - RNA, 19 nt, Homo sapiens
  misc_RNA (1)...(19): siRNA sense strand
cagauacaagauuuccuua

SEQ ID NO: 108025 - RNA, 19 nt, Homo sapiens
  misc_RNA (1)...(19): siRNA sense strand
ggccagccuugacaacguu

SEQ ID NO: 108026 - RNA, 19 nt, Homo sapiens
  misc_RNA (1)...(19): siRNA sense strand
ucucuccacuaucuugaaa

SEQ ID NO: 108027 - RNA, 19 nt, Homo sapiens
  misc_RNA (1)...(19): siRNA sense strand
aagaaguuccugaaucuga

SEQ ID NO: 108028 - RNA, 19 nt, Homo sapiens
  misc_RNA (1)...(19): siRNA sense strand
uuacugaaacccucuacaa

SEQ ID NO: 108029 - RNA, 19 nt, Homo sapiens
  misc_RNA (1)...(19): siRNA sense strand
gcaaagugugugcaagcaa

SEQ ID NO: 108030 - RNA, 19 nt, Homo sapiens
  misc_RNA (1)...(19): siRNA sense strand
caaaggcauuaguccuauc

SEQ ID NO: 108031 - RNA, 19 nt, Homo sapiens
  misc_RNA (1)...(19): siRNA sense strand
gugaaguccuacaaauuac

SEQ ID NO: 108032 - RNA, 19 nt, Homo sapiens
  misc_RNA (1)...(19): siRNA sense strand
auggaagcauuucauugua

SEQ ID NO: 108033 - RNA, 19 nt, Homo sapiens
  misc_RNA (1)...(19): siRNA sense strand
auacaagauuuccuuacug

SEQ ID NO: 108034 - RNA, 19 nt, Homo sapiens
  misc_RNA (1)...(19): siRNA sense strand
ugaagcauuuucugaauug

SEQ ID NO: 108035 - RNA, 19 nt, Homo sapiens
  misc_RNA (1)...(19): siRNA sense strand
aggcauuaguccuaucuug

SEQ ID NO: 108036 - RNA, 19 nt, Homo sapiens
  misc_RNA (1)...(19): siRNA sense strand
augaagaaguuccugaauc

SEQ ID NO: 108037 - RNA, 19 nt, Homo sapiens
  misc_RNA (1)...(19): siRNA sense strand
guuaggaaucucuccacua

SEQ ID NO: 108038 - RNA, 19 nt, Homo sapiens
  misc_RNA (1)...(19): siRNA sense strand
gacccuggacuuugauuuc

SEQ ID NO: 108039 - RNA, 19 nt, Homo sapiens
  misc_RNA (1)...(19): siRNA sense strand
ugaagauggacaaauaugu

SEQ ID NO: 108040 - RNA, 19 nt, Homo sapiens
  misc_RNA (1)...(19): siRNA sense strand
cugauuugauggaagcauu

SEQ ID NO: 108041 - RNA, 19 nt, Homo sapiens
  misc_RNA (1)...(19): siRNA sense strand
ugaggagacccuggacuuu

SEQ ID NO: 108042 - RNA, 19 nt, Homo sapiens
  misc_RNA (1)...(19): siRNA sense strand
uaucaaaguaacaguggaa

SEQ ID NO: 108043 - RNA, 19 nt, Homo sapiens
  misc_RNA (1)...(19): siRNA sense strand
ggauaugacgagugaaguc

SEQ ID NO: 108044 - RNA, 19 nt, Homo sapiens
  misc_RNA (1)...(19): siRNA sense strand
aacagaggcuuccuuucau

SEQ ID NO: 108045 - RNA, 19 nt, Homo sapiens
  misc_RNA (1)...(19): siRNA sense strand
aagacgaggaugaucagua

SEQ ID NO: 108046 - RNA, 19 nt, Homo sapiens
  misc_RNA (1)...(19): siRNA sense strand
caccuugacuaucccaaag

SEQ ID NO: 108047 - RNA, 19 nt, Homo sapiens
  misc_RNA (1)...(19): siRNA sense strand
uauuacugcugcccugaug

SEQ ID NO: 108048 - RNA, 19 nt, Homo sapiens
  misc_RNA (1)...(19): siRNA sense strand
ggcauuaguccuaucuugu

SEQ ID NO: 108049 - RNA, 19 nt, Homo sapiens
  misc_RNA (1)...(19): siRNA sense strand
acagauacaagauuuccuu

SEQ ID NO: 108050 - RNA, 19 nt, Homo sapiens
  misc_RNA (1)...(19): siRNA sense strand
gugaagcauuuucugaauu

SEQ ID NO: 108051 - RNA, 19 nt, Homo sapiens
  misc_RNA (1)...(19): siRNA sense strand
gaagaaguuccugaaucug

SEQ ID NO: 108052 - RNA, 19 nt, Homo sapiens
  misc_RNA (1)...(19): siRNA sense strand
uacugaaacccucuacaaa

SEQ ID NO: 108053 - RNA, 19 nt, Homo sapiens
  misc_RNA (1)...(19): siRNA sense strand
cugcagcaccaauguuauu

SEQ ID NO: 108054 - RNA, 19 nt, Homo sapiens
  misc_RNA (1)...(19): siRNA sense strand
ugauggaagcauuucauug

SEQ ID NO: 108055 - RNA, 19 nt, Homo sapiens
  misc_RNA (1)...(19): siRNA sense strand
ccaccuugacuaucccaaa

SEQ ID NO: 108056 - RNA, 19 nt, Homo sapiens
  misc_RNA (1)...(19): siRNA sense strand
caaaguaacaguggaaaau

SEQ ID NO: 108057 - RNA, 19 nt, Homo sapiens
  misc_RNA (1)...(19): siRNA sense strand
gaaguccuacaaauuacca

SEQ ID NO: 108058 - RNA, 19 nt, Homo sapiens
  misc_RNA (1)...(19): siRNA sense strand
ugacccaacagauccaaga

SEQ ID NO: 108059 - RNA, 19 nt, Homo sapiens
  misc_RNA (1)...(19): siRNA sense strand
ugaugaagaaguuccugaa

SEQ ID NO: 108060 - RNA, 19 nt, Homo sapiens
  misc_RNA (1)...(19): siRNA sense strand
gugacagucugcaaaauca

SEQ ID NO: 108061 - RNA, 19 nt, Homo sapiens
  misc_RNA (1)...(19): siRNA sense strand
guucccaccuugacuaucc

SEQ ID NO: 108062 - RNA, 19 nt, Homo sapiens
  misc_RNA (1)...(19): siRNA sense strand
cuccugacaagccuuauuu

SEQ ID NO: 108063 - RNA, 19 nt, Homo sapiens
  misc_RNA (1)...(19): siRNA sense strand
gacgagugaaguccuacaa

SEQ ID NO: 108064 - RNA, 19 nt, Homo sapiens
  misc_RNA (1)...(19): siRNA sense strand
acugaaacccucuacaaag

SEQ ID NO: 108065 - RNA, 19 nt, Homo sapiens
  misc_RNA (1)...(19): siRNA sense strand
agucaacagauacaagauu

SEQ ID NO: 108066 - RNA, 19 nt, Homo sapiens
  misc_RNA (1)...(19): siRNA sense strand
aaggaggaguggugacagu

SEQ ID NO: 108067 - RNA, 19 nt, Homo sapiens
  misc_RNA (1)...(19): siRNA sense strand
ccaagucaacagauacaag

SEQ ID NO: 108068 - RNA, 19 nt, Homo sapiens
  misc_RNA (1)...(19): siRNA sense strand
ccugacaagccuuauuuca

SEQ ID NO: 108069 - RNA, 19 nt, Homo sapiens
  misc_RNA (1)...(19): siRNA sense strand
gaguaaggcucacuaaaua

SEQ ID NO: 108070 - RNA, 19 nt, Homo sapiens
  misc_RNA (1)...(19): siRNA sense strand
ccaaauaccuugccacugu

SEQ ID NO: 108071 - RNA, 19 nt, Homo sapiens
  misc_RNA (1)...(19): siRNA sense strand
ccucuuaucucucugguua

SEQ ID NO: 108072 - RNA, 19 nt, Homo sapiens
  misc_RNA (1)...(19): siRNA sense strand
ggaaaucucuuuggaaaca

SEQ ID NO: 108073 - RNA, 19 nt, Homo sapiens
  misc_RNA (1)...(19): siRNA sense strand
gggaauuucugaccuagua

SEQ ID NO: 108074 - RNA, 19 nt, Homo sapiens
  misc_RNA (1)...(19): siRNA sense strand
gaagggaauuucugaccua

SEQ ID NO: 108075 - RNA, 19 nt, Homo sapiens
  misc_RNA (1)...(19): siRNA sense strand
ggaaacaucaugaguacua

SEQ ID NO: 108076 - RNA, 19 nt, Homo sapiens
  misc_RNA (1)...(19): siRNA sense strand
aaacugugcuuccgaguaa

SEQ ID NO: 108077 - RNA, 19 nt, Homo sapiens
  misc_RNA (1)...(19): siRNA sense strand
gaauggcgauggcaagauu

SEQ ID NO: 108078 - RNA, 19 nt, Homo sapiens
  misc_RNA (1)...(19): siRNA sense strand
gggcuaauguucuaauuug

SEQ ID NO: 108079 - RNA, 19 nt, Homo sapiens
  misc_RNA (1)...(19): siRNA sense strand
ccaaauggcugcggaaaga

SEQ ID NO: 108080 - RNA, 19 nt, Homo sapiens
  misc_RNA (1)...(19): siRNA sense strand
guggaaggcuacauuuaua

SEQ ID NO: 108081 - RNA, 19 nt, Homo sapiens
  misc_RNA (1)...(19): siRNA sense strand
uaggaaaucucuuuggaaa

SEQ ID NO: 108082 - RNA, 19 nt, Homo sapiens
  misc_RNA (1)...(19): siRNA sense strand
uggaacaccuacauaauuu

SEQ ID NO: 108083 - RNA, 19 nt, Homo sapiens
  misc_RNA (1)...(19): siRNA sense strand
gcacaauggucucacaaca

SEQ ID NO: 108084 - RNA, 19 nt, Homo sapiens
  misc_RNA (1)...(19): siRNA sense strand
gaaggaauacuuagacaau

SEQ ID NO: 108085 - RNA, 19 nt, Homo sapiens
  misc_RNA (1)...(19): siRNA sense strand
agagacagguuacuuggua

SEQ ID NO: 108086 - RNA, 19 nt, Homo sapiens
  misc_RNA (1)...(19): siRNA sense strand
ucaaacagauaacagaaga

SEQ ID NO: 108087 - RNA, 19 nt, Homo sapiens
  misc_RNA (1)...(19): siRNA sense strand
cacaaacagugaagaaauu

SEQ ID NO: 108088 - RNA, 19 nt, Homo sapiens
  misc_RNA (1)...(19): siRNA sense strand
gugaagaaauugccuuuua

SEQ ID NO: 108089 - RNA, 19 nt, Homo sapiens
  misc_RNA (1)...(19): siRNA sense strand
caagugauauauccagaug

SEQ ID NO: 108090 - RNA, 19 nt, Homo sapiens
  misc_RNA (1)...(19): siRNA sense strand
ggucguagcaggaaagauu

SEQ ID NO: 108091 - RNA, 19 nt, Homo sapiens
  misc_RNA (1)...(19): siRNA sense strand
gcuggugucucgaacauau

SEQ ID NO: 108092 - RNA, 19 nt, Homo sapiens
  misc_RNA (1)...(19): siRNA sense strand
gauaacagaagauacaguu

SEQ ID NO: 108093 - RNA, 19 nt, Homo sapiens
  misc_RNA (1)...(19): siRNA sense strand
aggaguaucuucaagcuuu

SEQ ID NO: 108094 - RNA, 19 nt, Homo sapiens
  misc_RNA (1)...(19): siRNA sense strand
ggugaauuauggccucuuu

SEQ ID NO: 108095 - RNA, 19 nt, Homo sapiens
  misc_RNA (1)...(19): siRNA sense strand
uaacagaagauacaguuga

SEQ ID NO: 108096 - RNA, 19 nt, Homo sapiens
  misc_RNA (1)...(19): siRNA sense strand
gcaaaaguaugaaggagaa

SEQ ID NO: 108097 - RNA, 19 nt, Homo sapiens
  misc_RNA (1)...(19): siRNA sense strand
cauaggaaaucucuuugga

SEQ ID NO: 108098 - RNA, 19 nt, Homo sapiens
  misc_RNA (1)...(19): siRNA sense strand
cauggucccuagaacauuu

SEQ ID NO: 108099 - RNA, 19 nt, Homo sapiens
  misc_RNA (1)...(19): siRNA sense strand
gaacaccuacauaauuuca

SEQ ID NO: 108100 - RNA, 19 nt, Homo sapiens
  misc_RNA (1)...(19): siRNA sense strand
ugaaguauggguuaaauga

SEQ ID NO: 108101 - RNA, 19 nt, Homo sapiens
  misc_RNA (1)...(19): siRNA sense strand
gaagacccauugguaagau

SEQ ID NO: 108102 - RNA, 19 nt, Homo sapiens
  misc_RNA (1)...(19): siRNA sense strand
gaagauacaguugaguuug

SEQ ID NO: 108103 - RNA, 19 nt, Homo sapiens
  misc_RNA (1)...(19): siRNA sense strand
ccucagagaccuuacauga

SEQ ID NO: 108104 - RNA, 19 nt, Homo sapiens
  misc_RNA (1)...(19): siRNA sense strand
ggcgugaaaugacuagauu

SEQ ID NO: 108105 - RNA, 19 nt, Homo sapiens
  misc_RNA (1)...(19): siRNA sense strand
uaaagagacagguuacuug

SEQ ID NO: 108106 - RNA, 19 nt, Homo sapiens
  misc_RNA (1)...(19): siRNA sense strand
gaagaaugcuuuugcgaau

SEQ ID NO: 108107 - RNA, 19 nt, Homo sapiens
  misc_RNA (1)...(19): siRNA sense strand
gaggauuacuaccaaagug

SEQ ID NO: 108108 - RNA, 19 nt, Homo sapiens
  misc_RNA (1)...(19): siRNA sense strand
cgaguaaggcucacuaaau

SEQ ID NO: 108109 - RNA, 19 nt, Homo sapiens
  misc_RNA (1)...(19): siRNA sense strand
ucucaaggcucauacagau

SEQ ID NO: 108110 - RNA, 19 nt, Homo sapiens
  misc_RNA (1)...(19): siRNA sense strand
gcagaggcaacuaugaauu

SEQ ID NO: 108111 - RNA, 19 nt, Homo sapiens
  misc_RNA (1)...(19): siRNA sense strand
ggaaaaggguauugaagga

SEQ ID NO: 108112 - RNA, 19 nt, Homo sapiens
  misc_RNA (1)...(19): siRNA sense strand
cggaacuucuagaggauua

SEQ ID NO: 108113 - RNA, 19 nt, Homo sapiens
  misc_RNA (1)...(19): siRNA sense strand
guggaacaccuacauaauu

SEQ ID NO: 108114 - RNA, 19 nt, Homo sapiens
  misc_RNA (1)...(19): siRNA sense strand
caaauaccuugccacuguu

SEQ ID NO: 108115 - RNA, 19 nt, Homo sapiens
  misc_RNA (1)...(19): siRNA sense strand
caguugaguuuggcucuua

SEQ ID NO: 108116 - RNA, 19 nt, Homo sapiens
  misc_RNA (1)...(19): siRNA sense strand
gcaucacucucuucacugu

SEQ ID NO: 108117 - RNA, 19 nt, Homo sapiens
  misc_RNA (1)...(19): siRNA sense strand
acagguuacuugguacuua

SEQ ID NO: 108118 - RNA, 19 nt, Homo sapiens
  misc_RNA (1)...(19): siRNA sense strand
ccaguugggucauauccuu

SEQ ID NO: 108119 - RNA, 19 nt, Homo sapiens
  misc_RNA (1)...(19): siRNA sense strand
gcaaguacugaaggauuua

SEQ ID NO: 108120 - RNA, 19 nt, Homo sapiens
  misc_RNA (1)...(19): siRNA sense strand
gggcuucauugauaguauu

SEQ ID NO: 108121 - RNA, 19 nt, Homo sapiens
  misc_RNA (1)...(19): siRNA sense strand
aggcaacuaugaauucaaa

SEQ ID NO: 108122 - RNA, 19 nt, Homo sapiens
  misc_RNA (1)...(19): siRNA sense strand
caugaguacuaccugcaua

SEQ ID NO: 108123 - RNA, 19 nt, Homo sapiens
  misc_RNA (1)...(19): siRNA sense strand
uagucgaucuguauucaaa

SEQ ID NO: 108124 - RNA, 19 nt, Homo sapiens
  misc_RNA (1)...(19): siRNA sense strand
cuaccaaaguggaagaaug

SEQ ID NO: 108125 - RNA, 19 nt, Homo sapiens
  misc_RNA (1)...(19): siRNA sense strand
uaaguuaacgagugcaauu

SEQ ID NO: 108126 - RNA, 19 nt, Homo sapiens
  misc_RNA (1)...(19): siRNA sense strand
caugauggccuacuugguu

SEQ ID NO: 108127 - RNA, 19 nt, Homo sapiens
  misc_RNA (1)...(19): siRNA sense strand
ggcgauggcaagauuauuu

SEQ ID NO: 108128 - RNA, 19 nt, Homo sapiens
  misc_RNA (1)...(19): siRNA sense strand
gggacaguguucaggauug

SEQ ID NO: 108129 - RNA, 19 nt, Homo sapiens
  misc_RNA (1)...(19): siRNA sense strand
ugcaaguacugaaggauuu

SEQ ID NO: 108130 - RNA, 19 nt, Homo sapiens
  misc_RNA (1)...(19): siRNA sense strand
ugacuagauuggccgguuu

SEQ ID NO: 108131 - RNA, 19 nt, Homo sapiens
  misc_RNA (1)...(19): siRNA sense strand
gcucugggucgaauaguuu

SEQ ID NO: 108132 - RNA, 19 nt, Homo sapiens
  misc_RNA (1)...(19): siRNA sense strand
gcaaauaugagcgcacaau

SEQ ID NO: 108133 - RNA, 19 nt, Homo sapiens
  misc_RNA (1)...(19): siRNA sense strand
ucacuaaauaccucuauga

SEQ ID NO: 108134 - RNA, 19 nt, Homo sapiens
  misc_RNA (1)...(19): siRNA sense strand
gaauuaaugcaaguacuga

SEQ ID NO: 108135 - RNA, 19 nt, Homo sapiens
  misc_RNA (1)...(19): siRNA sense strand
guaagaugacaauaacuga

SEQ ID NO: 108136 - RNA, 19 nt, Homo sapiens
  misc_RNA (1)...(19): siRNA sense strand
ucuucaagcuuucacauau

SEQ ID NO: 108137 - RNA, 19 nt, Homo sapiens
  misc_RNA (1)...(19): siRNA sense strand
caagagauacuuacucaac

SEQ ID NO: 108138 - RNA, 19 nt, Homo sapiens
  misc_RNA (1)...(19): siRNA sense strand
uggaggacgucuaacuaaa

SEQ ID NO: 108139 - RNA, 19 nt, Homo sapiens
  misc_RNA (1)...(19): siRNA sense strand
ugaaggaguacaagucauu

SEQ ID NO: 108140 - RNA, 19 nt, Homo sapiens
  misc_RNA (1)...(19): siRNA sense strand
caaaaugggacacuaauug

SEQ ID NO: 108141 - RNA, 19 nt, Homo sapiens
  misc_RNA (1)...(19): siRNA sense strand
ucucauaggaaaucucuuu

SEQ ID NO: 108142 - RNA, 19 nt, Homo sapiens
  misc_RNA (1)...(19): siRNA sense strand
gagcugugguggacaaggu

SEQ ID NO: 108143 - RNA, 19 nt, Homo sapiens
  misc_RNA (1)...(19): siRNA sense strand
guaugaaggagaauauaga

SEQ ID NO: 108144 - RNA, 19 nt, Homo sapiens
  misc_RNA (1)...(19): siRNA sense strand
uaacugagcaaaaguauga

SEQ ID NO: 108145 - RNA, 19 nt, Homo sapiens
  misc_RNA (1)...(19): siRNA sense strand
gguaagaugacaauaacug

SEQ ID NO: 108146 - RNA, 19 nt, Homo sapiens
  misc_RNA (1)...(19): siRNA sense strand
uaaacugugcuuccgagua

SEQ ID NO: 108147 - RNA, 19 nt, Homo sapiens
  misc_RNA (1)...(19): siRNA sense strand
agagauacuuacucaacuu

SEQ ID NO: 108148 - RNA, 19 nt, Homo sapiens
  misc_RNA (1)...(19): siRNA sense strand
gauacuuacucaacuucau

SEQ ID NO: 108149 - RNA, 19 nt, Homo sapiens
  misc_RNA (1)...(19): siRNA sense strand
cagaagauacaguugaguu

SEQ ID NO: 108150 - RNA, 19 nt, Homo sapiens
  misc_RNA (1)...(19): siRNA sense strand
gaucauguuccuuuagcaa

SEQ ID NO: 108151 - RNA, 19 nt, Homo sapiens
  misc_RNA (1)...(19): siRNA sense strand
cagguuacuugguacuuau

SEQ ID NO: 108152 - RNA, 19 nt, Homo sapiens
  misc_RNA (1)...(19): siRNA sense strand
cgacuucgaagacccauug

SEQ ID NO: 108153 - RNA, 19 nt, Homo sapiens
  misc_RNA (1)...(19): siRNA sense strand
cuucaagcuuucacauauu

SEQ ID NO: 108154 - RNA, 19 nt, Homo sapiens
  misc_RNA (1)...(19): siRNA sense strand
gcaacuaugaauucaaaca

SEQ ID NO: 108155 - RNA, 19 nt, Homo sapiens
  misc_RNA (1)...(19): siRNA sense strand
cgacguggaaggcuacauu

SEQ ID NO: 108156 - RNA, 19 nt, Homo sapiens
  misc_RNA (1)...(19): siRNA sense strand
ggacaguguucaggauugg

SEQ ID NO: 108157 - RNA, 19 nt, Homo sapiens
  misc_RNA (1)...(19): siRNA sense strand
ucuagaggauuacuaccaa

SEQ ID NO: 108158 - RNA, 19 nt, Homo sapiens
  misc_RNA (1)...(19): siRNA sense strand
aaaccaccauuacagaaca

SEQ ID NO: 108159 - RNA, 19 nt, Homo sapiens
  misc_RNA (1)...(19): siRNA sense strand
gaaacaucaugaguacuac

SEQ ID NO: 108160 - RNA, 19 nt, Homo sapiens
  misc_RNA (1)...(19): siRNA sense strand
aaaggaagggaauuucuga

SEQ ID NO: 108161 - RNA, 19 nt, Homo sapiens
  misc_RNA (1)...(19): siRNA sense strand
gagaagaucagaaaaggaa

SEQ ID NO: 108162 - RNA, 19 nt, Homo sapiens
  misc_RNA (1)...(19): siRNA sense strand
gauccgagaccuuaauuuu

SEQ ID NO: 108163 - RNA, 19 nt, Homo sapiens
  misc_RNA (1)...(19): siRNA sense strand
aaaggguauugaaggagua

SEQ ID NO: 108164 - RNA, 19 nt, Homo sapiens
  misc_RNA (1)...(19): siRNA sense strand
gaguacacauucggaacuu

SEQ ID NO: 108165 - RNA, 19 nt, Homo sapiens
  misc_RNA (1)...(19): siRNA sense strand
ggaguaucuucaagcuuuc

SEQ ID NO: 108166 - RNA, 19 nt, Homo sapiens
  misc_RNA (1)...(19): siRNA sense strand
guuugaucauguuccuuua

SEQ ID NO: 108167 - RNA, 19 nt, Homo sapiens
  misc_RNA (1)...(19): siRNA sense strand
gacaauaacugagcaaaag

SEQ ID NO: 108168 - RNA, 19 nt, Homo sapiens
  misc_RNA (1)...(19): siRNA sense strand
cuucgaagacccauuggua

SEQ ID NO: 108169 - RNA, 19 nt, Homo sapiens
  misc_RNA (1)...(19): siRNA sense strand
gaaucaagcuuccauaugu

SEQ ID NO: 108170 - RNA, 19 nt, Homo sapiens
  misc_RNA (1)...(19): siRNA sense strand
gcaaagauguuucucuguu

SEQ ID NO: 108171 - RNA, 19 nt, Homo sapiens
  misc_RNA (1)...(19): siRNA sense strand
acacaugccuggagacuua

SEQ ID NO: 108172 - RNA, 19 nt, Homo sapiens
  misc_RNA (1)...(19): siRNA sense strand
caacaaagcccgaggauau

SEQ ID NO: 108173 - RNA, 19 nt, Homo sapiens
  misc_RNA (1)...(19): siRNA sense strand
ccaaagaaauucaggaaga

SEQ ID NO: 108174 - RNA, 19 nt, Homo sapiens
  misc_RNA (1)...(19): siRNA sense strand
cuacauagauuucuucaug

SEQ ID NO: 108175 - RNA, 19 nt, Homo sapiens
  misc_RNA (1)...(19): siRNA sense strand
ggaaauugaugauauugug

SEQ ID NO: 108176 - RNA, 19 nt, Homo sapiens
  misc_RNA (1)...(19): siRNA sense strand
aaacucagcuauugccaua

SEQ ID NO: 108177 - RNA, 19 nt, Homo sapiens
  misc_RNA (1)...(19): siRNA sense strand
gaagauaauucugguugaa

SEQ ID NO: 108178 - RNA, 19 nt, Homo sapiens
  misc_RNA (1)...(19): siRNA sense strand
caaagauguuucucuguuu

SEQ ID NO: 108179 - RNA, 19 nt, Homo sapiens
  misc_RNA (1)...(19): siRNA sense strand
guacaagaguggauuaauc

SEQ ID NO: 108180 - RNA, 19 nt, Homo sapiens
  misc_RNA (1)...(19): siRNA sense strand
ggaagaguguucuaucuca

SEQ ID NO: 108181 - RNA, 19 nt, Homo sapiens
  misc_RNA (1)...(19): siRNA sense strand
gaaagacaacgaccuuaaa

SEQ ID NO: 108182 - RNA, 19 nt, Homo sapiens
  misc_RNA (1)...(19): siRNA sense strand
ggaaagacaacgaccuuaa

SEQ ID NO: 108183 - RNA, 19 nt, Homo sapiens
  misc_RNA (1)...(19): siRNA sense strand
caaagaguuucuacuaaga

SEQ ID NO: 108184 - RNA, 19 nt, Homo sapiens
  misc_RNA (1)...(19): siRNA sense strand
ccucagugguuucuaauaa

SEQ ID NO: 108185 - RNA, 19 nt, Homo sapiens
  misc_RNA (1)...(19): siRNA sense strand
ccagugaauuucugaguuu

SEQ ID NO: 108186 - RNA, 19 nt, Homo sapiens
  misc_RNA (1)...(19): siRNA sense strand
cagggaacauggaaugaua

SEQ ID NO: 108187 - RNA, 19 nt, Homo sapiens
  misc_RNA (1)...(19): siRNA sense strand
uaagagcgacaaaguauaa

SEQ ID NO: 108188 - RNA, 19 nt, Homo sapiens
  misc_RNA (1)...(19): siRNA sense strand
gagcaucuuuaacagaauu

SEQ ID NO: 108189 - RNA, 19 nt, Homo sapiens
  misc_RNA (1)...(19): siRNA sense strand
ccuggagacuuauuuaauu

SEQ ID NO: 108190 - RNA, 19 nt, Homo sapiens
  misc_RNA (1)...(19): siRNA sense strand
cgacaaaguauaacaaguu

SEQ ID NO: 108191 - RNA, 19 nt, Homo sapiens
  misc_RNA (1)...(19): siRNA sense strand
ggagcaugguauucaagua

SEQ ID NO: 108192 - RNA, 19 nt, Homo sapiens
  misc_RNA (1)...(19): siRNA sense strand
gaagaguguucuaucucaa

SEQ ID NO: 108193 - RNA, 19 nt, Homo sapiens
  misc_RNA (1)...(19): siRNA sense strand
ucaaagaguuucuacuaag

SEQ ID NO: 108194 - RNA, 19 nt, Homo sapiens
  misc_RNA (1)...(19): siRNA sense strand
gagaacugauaagaagaua

SEQ ID NO: 108195 - RNA, 19 nt, Homo sapiens
  misc_RNA (1)...(19): siRNA sense strand
gcucuuuacucagggaaua

SEQ ID NO: 108196 - RNA, 19 nt, Homo sapiens
  misc_RNA (1)...(19): siRNA sense strand
cgggauacauuacuuguug

SEQ ID NO: 108197 - RNA, 19 nt, Homo sapiens
  misc_RNA (1)...(19): siRNA sense strand
ucgauguccucuuauauuu

SEQ ID NO: 108198 - RNA, 19 nt, Homo sapiens
  misc_RNA (1)...(19): siRNA sense strand
agauuuaccuaaccaguuu

SEQ ID NO: 108199 - RNA, 19 nt, Homo sapiens
  misc_RNA (1)...(19): siRNA sense strand
ggaaguaugugaggauugg

SEQ ID NO: 108200 - RNA, 19 nt, Homo sapiens
  misc_RNA (1)...(19): siRNA sense strand
gauaucagaagugcaauaa

SEQ ID NO: 108201 - RNA, 19 nt, Homo sapiens
  misc_RNA (1)...(19): siRNA sense strand
gcaccaacaauuaugauga

SEQ ID NO: 108202 - RNA, 19 nt, Homo sapiens
  misc_RNA (1)...(19): siRNA sense strand
aaacaggguggaucuauuu

SEQ ID NO: 108203 - RNA, 19 nt, Homo sapiens
  misc_RNA (1)...(19): siRNA sense strand
gaugaucugagaacugaua

SEQ ID NO: 108204 - RNA, 19 nt, Homo sapiens
  misc_RNA (1)...(19): siRNA sense strand
ggguggaucuauuuuauua

SEQ ID NO: 108205 - RNA, 19 nt, Homo sapiens
  misc_RNA (1)...(19): siRNA sense strand
uaucagaagugcaauaaac

SEQ ID NO: 108206 - RNA, 19 nt, Homo sapiens
  misc_RNA (1)...(19): siRNA sense strand
ugugagagccagugaauuu

SEQ ID NO: 108207 - RNA, 19 nt, Homo sapiens
  misc_RNA (1)...(19): siRNA sense strand
caaaggagcaugguauuca

SEQ ID NO: 108208 - RNA, 19 nt, Homo sapiens
  misc_RNA (1)...(19): siRNA sense strand
ccggaaaccuggucucuuc

SEQ ID NO: 108209 - RNA, 19 nt, Homo sapiens
  misc_RNA (1)...(19): siRNA sense strand
gaagcgacacuuuggaaga

SEQ ID NO: 108210 - RNA, 19 nt, Homo sapiens
  misc_RNA (1)...(19): siRNA sense strand
cgagaggugugaugcauuc

SEQ ID NO: 108211 - RNA, 19 nt, Homo sapiens
  misc_RNA (1)...(19): siRNA sense strand
cagaugcugugcugucaaa

SEQ ID NO: 108212 - RNA, 19 nt, Homo sapiens
  misc_RNA (1)...(19): siRNA sense strand
caccaacaauuaugaugaa

SEQ ID NO: 108213 - RNA, 19 nt, Homo sapiens
  misc_RNA (1)...(19): siRNA sense strand
gaacgggauacauuacuug

SEQ ID NO: 108214 - RNA, 19 nt, Homo sapiens
  misc_RNA (1)...(19): siRNA sense strand
gaucugagaacugauaaga

SEQ ID NO: 108215 - RNA, 19 nt, Homo sapiens
  misc_RNA (1)...(19): siRNA sense strand
uaacaagaauggaggaaaa

SEQ ID NO: 108216 - RNA, 19 nt, Homo sapiens
  misc_RNA (1)...(19): siRNA sense strand
caaguacaagaguggauua

SEQ ID NO: 108217 - RNA, 19 nt, Homo sapiens
  misc_RNA (1)...(19): siRNA sense strand
gaaaccuggucucuuccuu

SEQ ID NO: 108218 - RNA, 19 nt, Homo sapiens
  misc_RNA (1)...(19): siRNA sense strand
guuauuguuucccaaagaa

SEQ ID NO: 108219 - RNA, 19 nt, Homo sapiens
  misc_RNA (1)...(19): siRNA sense strand
uacaugaaguucuaaggaa

SEQ ID NO: 108220 - RNA, 19 nt, Homo sapiens
  misc_RNA (1)...(19): siRNA sense strand
ucugagaacugauaagaag

SEQ ID NO: 108221 - RNA, 19 nt, Homo sapiens
  misc_RNA (1)...(19): siRNA sense strand
ccuccaaacucagcuauug

SEQ ID NO: 108222 - RNA, 19 nt, Homo sapiens
  misc_RNA (1)...(19): siRNA sense strand
aauacacgcucuuuacuca

SEQ ID NO: 108223 - RNA, 19 nt, Homo sapiens
  misc_RNA (1)...(19): siRNA sense strand
caacuuacggccaaggaaa

SEQ ID NO: 108224 - RNA, 19 nt, Homo sapiens
  misc_RNA (1)...(19): siRNA sense strand
caaagaaauucaggaagag

SEQ ID NO: 108225 - RNA, 19 nt, Homo sapiens
  misc_RNA (1)...(19): siRNA sense strand
ggagguaguagaaauguca

SEQ ID NO: 108226 - RNA, 19 nt, Homo sapiens
  misc_RNA (1)...(19): siRNA sense strand
gccagugaauuucugaguu

SEQ ID NO: 108227 - RNA, 19 nt, Homo sapiens
  misc_RNA (1)...(19): siRNA sense strand
uacaaaugcuuggagauga

SEQ ID NO: 108228 - RNA, 19 nt, Homo sapiens
  misc_RNA (1)...(19): siRNA sense strand
ugaacuugcugugcauaaa

SEQ ID NO: 108229 - RNA, 19 nt, Homo sapiens
  misc_RNA (1)...(19): siRNA sense strand
ccucucauuuaucagaaua

SEQ ID NO: 108230 - RNA, 19 nt, Homo sapiens
  misc_RNA (1)...(19): siRNA sense strand
caagagguccaagcuauug

SEQ ID NO: 108231 - RNA, 19 nt, Homo sapiens
  misc_RNA (1)...(19): siRNA sense strand
ucgggauucucauacuuua

SEQ ID NO: 108232 - RNA, 19 nt, Homo sapiens
  misc_RNA (1)...(19): siRNA sense strand
gguuauuguuucccaaaga

SEQ ID NO: 108233 - RNA, 19 nt, Homo sapiens
  misc_RNA (1)...(19): siRNA sense strand
gccauaccuugcucuacua

SEQ ID NO: 108234 - RNA, 19 nt, Homo sapiens
  misc_RNA (1)...(19): siRNA sense strand
caaggaggaggaucaaguu

SEQ ID NO: 108235 - RNA, 19 nt, Homo sapiens
  misc_RNA (1)...(19): siRNA sense strand
ugugaugcauuccaacaaa

SEQ ID NO: 108236 - RNA, 19 nt, Homo sapiens
  misc_RNA (1)...(19): siRNA sense strand
gaggugugaugcauuccaa

SEQ ID NO: 108237 - RNA, 19 nt, Homo sapiens
  misc_RNA (1)...(19): siRNA sense strand
aaagauguuucucuguuuc

SEQ ID NO: 108238 - RNA, 19 nt, Homo sapiens
  misc_RNA (1)...(19): siRNA sense strand
gggauguucuggugauauc

SEQ ID NO: 108239 - RNA, 19 nt, Homo sapiens
  misc_RNA (1)...(19): siRNA sense strand
ugacaaaacuucucuagag

SEQ ID NO: 108240 - RNA, 19 nt, Homo sapiens
  misc_RNA (1)...(19): siRNA sense strand
caggaagaguguucuaucu

SEQ ID NO: 108241 - RNA, 19 nt, Homo sapiens
  misc_RNA (1)...(19): siRNA sense strand
ugaacgggauacauuacuu

SEQ ID NO: 108242 - RNA, 19 nt, Homo sapiens
  misc_RNA (1)...(19): siRNA sense strand
ggugauaucagaagugcaa

SEQ ID NO: 108243 - RNA, 19 nt, Homo sapiens
  misc_RNA (1)...(19): siRNA sense strand
aaaggagcaugguauucaa

SEQ ID NO: 108244 - RNA, 19 nt, Homo sapiens
  misc_RNA (1)...(19): siRNA sense strand
aauaugaacgggauacauu

SEQ ID NO: 108245 - RNA, 19 nt, Homo sapiens
  misc_RNA (1)...(19): siRNA sense strand
cuauagaagcuaacaagaa

SEQ ID NO: 108246 - RNA, 19 nt, Homo sapiens
  misc_RNA (1)...(19): siRNA sense strand
cgauguccucuuauauuua

SEQ ID NO: 108247 - RNA, 19 nt, Homo sapiens
  misc_RNA (1)...(19): siRNA sense strand
auuggucgauguccucuua

SEQ ID NO: 108248 - RNA, 19 nt, Homo sapiens
  misc_RNA (1)...(19): siRNA sense strand
gaaguucuaaggaaguaug

SEQ ID NO: 108249 - RNA, 19 nt, Homo sapiens
  misc_RNA (1)...(19): siRNA sense strand
agauaauucugguugaaga

SEQ ID NO: 108250 - RNA, 19 nt, Homo sapiens
  misc_RNA (1)...(19): siRNA sense strand
ccuguggcaccaacaauua

SEQ ID NO: 108251 - RNA, 19 nt, Homo sapiens
  misc_RNA (1)...(19): siRNA sense strand
gcgacacuuuggaagauug

SEQ ID NO: 108252 - RNA, 19 nt, Homo sapiens
  misc_RNA (1)...(19): siRNA sense strand
ggaggaggaucaaguuuuc

SEQ ID NO: 108253 - RNA, 19 nt, Homo sapiens
  misc_RNA (1)...(19): siRNA sense strand
gggauacauuacuuguuga

SEQ ID NO: 108254 - RNA, 19 nt, Homo sapiens
  misc_RNA (1)...(19): siRNA sense strand
uaucaaaggagcaugguau

SEQ ID NO: 108255 - RNA, 19 nt, Homo sapiens
  misc_RNA (1)...(19): siRNA sense strand
aaucaagcuuccauauguu

SEQ ID NO: 108256 - RNA, 19 nt, Homo sapiens
  misc_RNA (1)...(19): siRNA sense strand
caccaaaacuacauagauu

SEQ ID NO: 108257 - RNA, 19 nt, Homo sapiens
  misc_RNA (1)...(19): siRNA sense strand
caauaaacagccuccaguu

SEQ ID NO: 108258 - RNA, 19 nt, Homo sapiens
  misc_RNA (1)...(19): siRNA sense strand
gagcgacaaaguauaacaa

SEQ ID NO: 108259 - RNA, 19 nt, Homo sapiens
  misc_RNA (1)...(19): siRNA sense strand
ccaaggagacauggaagaa

SEQ ID NO: 108260 - RNA, 19 nt, Homo sapiens
  misc_RNA (1)...(19): siRNA sense strand
gaauacacgcucuuuacuc

SEQ ID NO: 108261 - RNA, 19 nt, Homo sapiens
  misc_RNA (1)...(19): siRNA sense strand
caguggagauaauaaucaa

SEQ ID NO: 108262 - RNA, 19 nt, Homo sapiens
  misc_RNA (1)...(19): siRNA sense strand
gcgacaaaguauaacaagu

SEQ ID NO: 108263 - RNA, 19 nt, Homo sapiens
  misc_RNA (1)...(19): siRNA sense strand
gcaugguauucaaguacaa

SEQ ID NO: 108264 - RNA, 19 nt, Homo sapiens
  misc_RNA (1)...(19): siRNA sense strand
ugacagggaacauggaaug

SEQ ID NO: 108265 - RNA, 19 nt, Homo sapiens
  misc_RNA (1)...(19): siRNA sense strand
ggaauacacgcucuuuacu

SEQ ID NO: 108266 - RNA, 19 nt, Homo sapiens
  misc_RNA (1)...(19): siRNA sense strand
ucgguugcccucucauuua

SEQ ID NO: 108267 - RNA, 19 nt, Homo sapiens
  misc_RNA (1)...(19): siRNA sense strand
gagagccagugaauuucug

SEQ ID NO: 108268 - RNA, 19 nt, Homo sapiens
  misc_RNA (1)...(19): siRNA sense strand
aaaaguaucgggaaaauug

SEQ ID NO: 108269 - RNA, 19 nt, Homo sapiens
  misc_RNA (1)...(19): siRNA sense strand
gaaucaagcuuccauaugu

SEQ ID NO: 108270 - RNA, 19 nt, Homo sapiens
  misc_RNA (1)...(19): siRNA sense strand
gcaaagauguuucucuguu

SEQ ID NO: 108271 - RNA, 19 nt, Homo sapiens
  misc_RNA (1)...(19): siRNA sense strand
acacaugccuggagacuua

SEQ ID NO: 108272 - RNA, 19 nt, Homo sapiens
  misc_RNA (1)...(19): siRNA sense strand
caacaaagcccgaggauau

SEQ ID NO: 108273 - RNA, 19 nt, Homo sapiens
  misc_RNA (1)...(19): siRNA sense strand
ccaaagaaauucaggaaga

SEQ ID NO: 108274 - RNA, 19 nt, Homo sapiens
  misc_RNA (1)...(19): siRNA sense strand
cuacauagauuucuucaug

SEQ ID NO: 108275 - RNA, 19 nt, Homo sapiens
  misc_RNA (1)...(19): siRNA sense strand
ggaaauugaugauauugug

SEQ ID NO: 108276 - RNA, 19 nt, Homo sapiens
  misc_RNA (1)...(19): siRNA sense strand
aaacucagcuauugccaua

SEQ ID NO: 108277 - RNA, 19 nt, Homo sapiens
  misc_RNA (1)...(19): siRNA sense strand
gaagauaauucugguugaa

SEQ ID NO: 108278 - RNA, 19 nt, Homo sapiens
  misc_RNA (1)...(19): siRNA sense strand
caaagauguuucucuguuu

SEQ ID NO: 108279 - RNA, 19 nt, Homo sapiens
  misc_RNA (1)...(19): siRNA sense strand
guacaagaguggauuaauc

SEQ ID NO: 108280 - RNA, 19 nt, Homo sapiens
  misc_RNA (1)...(19): siRNA sense strand
ggaagaguguucuaucuca

SEQ ID NO: 108281 - RNA, 19 nt, Homo sapiens
  misc_RNA (1)...(19): siRNA sense strand
gaaagacaacgaccuuaaa

SEQ ID NO: 108282 - RNA, 19 nt, Homo sapiens
  misc_RNA (1)...(19): siRNA sense strand
ggaaagacaacgaccuuaa

SEQ ID NO: 108283 - RNA, 19 nt, Homo sapiens
  misc_RNA (1)...(19): siRNA sense strand
caaagaguuucuacuaaga

SEQ ID NO: 108284 - RNA, 19 nt, Homo sapiens
  misc_RNA (1)...(19): siRNA sense strand
ccucagugguuucuaauaa

SEQ ID NO: 108285 - RNA, 19 nt, Homo sapiens
  misc_RNA (1)...(19): siRNA sense strand
ccagugaauuucugaguuu

SEQ ID NO: 108286 - RNA, 19 nt, Homo sapiens
  misc_RNA (1)...(19): siRNA sense strand
cagggaacauggaaugaua

SEQ ID NO: 108287 - RNA, 19 nt, Homo sapiens
  misc_RNA (1)...(19): siRNA sense strand
uaagagcgacaaaguauaa

SEQ ID NO: 108288 - RNA, 19 nt, Homo sapiens
  misc_RNA (1)...(19): siRNA sense strand
gagcaucuuuaacagaauu

SEQ ID NO: 108289 - RNA, 19 nt, Homo sapiens
  misc_RNA (1)...(19): siRNA sense strand
ccuggagacuuauuuaauu

SEQ ID NO: 108290 - RNA, 19 nt, Homo sapiens
  misc_RNA (1)...(19): siRNA sense strand
cgacaaaguauaacaaguu

SEQ ID NO: 108291 - RNA, 19 nt, Homo sapiens
  misc_RNA (1)...(19): siRNA sense strand
ggagcaugguauucaagua

SEQ ID NO: 108292 - RNA, 19 nt, Homo sapiens
  misc_RNA (1)...(19): siRNA sense strand
gaagaguguucuaucucaa

SEQ ID NO: 108293 - RNA, 19 nt, Homo sapiens
  misc_RNA (1)...(19): siRNA sense strand
ucaaagaguuucuacuaag

SEQ ID NO: 108294 - RNA, 19 nt, Homo sapiens
  misc_RNA (1)...(19): siRNA sense strand
gagaacugauaagaagaua

SEQ ID NO: 108295 - RNA, 19 nt, Homo sapiens
  misc_RNA (1)...(19): siRNA sense strand
gcucuuuacucagggaaua

SEQ ID NO: 108296 - RNA, 19 nt, Homo sapiens
  misc_RNA (1)...(19): siRNA sense strand
cgggauacauuacuuguug

SEQ ID NO: 108297 - RNA, 19 nt, Homo sapiens
  misc_RNA (1)...(19): siRNA sense strand
ucgauguccucuuauauuu

SEQ ID NO: 108298 - RNA, 19 nt, Homo sapiens
  misc_RNA (1)...(19): siRNA sense strand
agauuuaccuaaccaguuu

SEQ ID NO: 108299 - RNA, 19 nt, Homo sapiens
  misc_RNA (1)...(19): siRNA sense strand
ggaaguaugugaggauugg

SEQ ID NO: 108300 - RNA, 19 nt, Homo sapiens
  misc_RNA (1)...(19): siRNA sense strand
gauaucagaagugcaauaa

SEQ ID NO: 108301 - RNA, 19 nt, Homo sapiens
  misc_RNA (1)...(19): siRNA sense strand
gcaccaacaauuaugauga

SEQ ID NO: 108302 - RNA, 19 nt, Homo sapiens
  misc_RNA (1)...(19): siRNA sense strand
aaacaggguggaucuauuu

SEQ ID NO: 108303 - RNA, 19 nt, Homo sapiens
  misc_RNA (1)...(19): siRNA sense strand
gaugaucugagaacugaua

SEQ ID NO: 108304 - RNA, 19 nt, Homo sapiens
  misc_RNA (1)...(19): siRNA sense strand
ggguggaucuauuuuauua

SEQ ID NO: 108305 - RNA, 19 nt, Homo sapiens
  misc_RNA (1)...(19): siRNA sense strand
uaucagaagugcaauaaac

SEQ ID NO: 108306 - RNA, 19 nt, Homo sapiens
  misc_RNA (1)...(19): siRNA sense strand
ugugagagccagugaauuu

SEQ ID NO: 108307 - RNA, 19 nt, Homo sapiens
  misc_RNA (1)...(19): siRNA sense strand
caaaggagcaugguauuca

SEQ ID NO: 108308 - RNA, 19 nt, Homo sapiens
  misc_RNA (1)...(19): siRNA sense strand
ccggaaaccuggucucuuc

SEQ ID NO: 108309 - RNA, 19 nt, Homo sapiens
  misc_RNA (1)...(19): siRNA sense strand
gaagcgacacuuuggaaga

SEQ ID NO: 108310 - RNA, 19 nt, Homo sapiens
  misc_RNA (1)...(19): siRNA sense strand
cgagaggugugaugcauuc

SEQ ID NO: 108311 - RNA, 19 nt, Homo sapiens
  misc_RNA (1)...(19): siRNA sense strand
cagaugcugugcugucaaa

SEQ ID NO: 108312 - RNA, 19 nt, Homo sapiens
  misc_RNA (1)...(19): siRNA sense strand
caccaacaauuaugaugaa

SEQ ID NO: 108313 - RNA, 19 nt, Homo sapiens
  misc_RNA (1)...(19): siRNA sense strand
gaacgggauacauuacuug

SEQ ID NO: 108314 - RNA, 19 nt, Homo sapiens
  misc_RNA (1)...(19): siRNA sense strand
gaucugagaacugauaaga

SEQ ID NO: 108315 - RNA, 19 nt, Homo sapiens
  misc_RNA (1)...(19): siRNA sense strand
uaacaagaauggaggaaaa

SEQ ID NO: 108316 - RNA, 19 nt, Homo sapiens
  misc_RNA (1)...(19): siRNA sense strand
caaguacaagaguggauua

SEQ ID NO: 108317 - RNA, 19 nt, Homo sapiens
  misc_RNA (1)...(19): siRNA sense strand
gaaaccuggucucuuccuu

SEQ ID NO: 108318 - RNA, 19 nt, Homo sapiens
  misc_RNA (1)...(19): siRNA sense strand
guuauuguuucccaaagaa

SEQ ID NO: 108319 - RNA, 19 nt, Homo sapiens
  misc_RNA (1)...(19): siRNA sense strand
uacaugaaguucuaaggaa

SEQ ID NO: 108320 - RNA, 19 nt, Homo sapiens
  misc_RNA (1)...(19): siRNA sense strand
ucugagaacugauaagaag

SEQ ID NO: 108321 - RNA, 19 nt, Homo sapiens
  misc_RNA (1)...(19): siRNA sense strand
aauacacgcucuuuacuca

SEQ ID NO: 108322 - RNA, 19 nt, Homo sapiens
  misc_RNA (1)...(19): siRNA sense strand
caacuuacggccaaggaaa

SEQ ID NO: 108323 - RNA, 19 nt, Homo sapiens
  misc_RNA (1)...(19): siRNA sense strand
caaagaaauucaggaagag

SEQ ID NO: 108324 - RNA, 19 nt, Homo sapiens
  misc_RNA (1)...(19): siRNA sense strand
ggagguaguagaaauguca

SEQ ID NO: 108325 - RNA, 19 nt, Homo sapiens
  misc_RNA (1)...(19): siRNA sense strand
gccagugaauuucugaguu

SEQ ID NO: 108326 - RNA, 19 nt, Homo sapiens
  misc_RNA (1)...(19): siRNA sense strand
uacaaaugcuuggagauga

SEQ ID NO: 108327 - RNA, 19 nt, Homo sapiens
  misc_RNA (1)...(19): siRNA sense strand
ugaacuugcugugcauaaa

SEQ ID NO: 108328 - RNA, 19 nt, Homo sapiens
  misc_RNA (1)...(19): siRNA sense strand
ccucucauuuaucagaaua

SEQ ID NO: 108329 - RNA, 19 nt, Homo sapiens
  misc_RNA (1)...(19): siRNA sense strand
caagagguccaagcuauug

SEQ ID NO: 108330 - RNA, 19 nt, Homo sapiens
  misc_RNA (1)...(19): siRNA sense strand
ucgggauucucauacuuua

SEQ ID NO: 108331 - RNA, 19 nt, Homo sapiens
  misc_RNA (1)...(19): siRNA sense strand
gguuauuguuucccaaaga

SEQ ID NO: 108332 - RNA, 19 nt, Homo sapiens
  misc_RNA (1)...(19): siRNA sense strand
gccauaccuugcucuacua

SEQ ID NO: 108333 - RNA, 19 nt, Homo sapiens
  misc_RNA (1)...(19): siRNA sense strand
caaggaggaggaucaaguu

SEQ ID NO: 108334 - RNA, 19 nt, Homo sapiens
  misc_RNA (1)...(19): siRNA sense strand
ugugaugcauuccaacaaa

SEQ ID NO: 108335 - RNA, 19 nt, Homo sapiens
  misc_RNA (1)...(19): siRNA sense strand
gaggugugaugcauuccaa

SEQ ID NO: 108336 - RNA, 19 nt, Homo sapiens
  misc_RNA (1)...(19): siRNA sense strand
aaagauguuucucuguuuc

SEQ ID NO: 108337 - RNA, 19 nt, Homo sapiens
  misc_RNA (1)...(19): siRNA sense strand
gggauguucuggugauauc

SEQ ID NO: 108338 - RNA, 19 nt, Homo sapiens
  misc_RNA (1)...(19): siRNA sense strand
ugacaaaacuucucuagag

SEQ ID NO: 108339 - RNA, 19 nt, Homo sapiens
  misc_RNA (1)...(19): siRNA sense strand
caggaagaguguucuaucu

SEQ ID NO: 108340 - RNA, 19 nt, Homo sapiens
  misc_RNA (1)...(19): siRNA sense strand
ugaacgggauacauuacuu

SEQ ID NO: 108341 - RNA, 19 nt, Homo sapiens
  misc_RNA (1)...(19): siRNA sense strand
ggugauaucagaagugcaa

SEQ ID NO: 108342 - RNA, 19 nt, Homo sapiens
  misc_RNA (1)...(19): siRNA sense strand
agauaauucugguugaaga

SEQ ID NO: 108343 - RNA, 19 nt, Homo sapiens
  misc_RNA (1)...(19): siRNA sense strand
aaaggagcaugguauucaa

SEQ ID NO: 108344 - RNA, 19 nt, Homo sapiens
  misc_RNA (1)...(19): siRNA sense strand
aauaugaacgggauacauu

SEQ ID NO: 108345 - RNA, 19 nt, Homo sapiens
  misc_RNA (1)...(19): siRNA sense strand
cuauagaagcuaacaagaa

SEQ ID NO: 108346 - RNA, 19 nt, Homo sapiens
  misc_RNA (1)...(19): siRNA sense strand
cgauguccucuuauauuua

SEQ ID NO: 108347 - RNA, 19 nt, Homo sapiens
  misc_RNA (1)...(19): siRNA sense strand
auuggucgauguccucuua

SEQ ID NO: 108348 - RNA, 19 nt, Homo sapiens
  misc_RNA (1)...(19): siRNA sense strand
gaaguucuaaggaaguaug

SEQ ID NO: 108349 - RNA, 19 nt, Homo sapiens
  misc_RNA (1)...(19): siRNA sense strand
ccuguggcaccaacaauua

SEQ ID NO: 108350 - RNA, 19 nt, Homo sapiens
  misc_RNA (1)...(19): siRNA sense strand
gcgacacuuuggaagauug

SEQ ID NO: 108351 - RNA, 19 nt, Homo sapiens
  misc_RNA (1)...(19): siRNA sense strand
ggaggaggaucaaguuuuc

SEQ ID NO: 108352 - RNA, 19 nt, Homo sapiens
  misc_RNA (1)...(19): siRNA sense strand
gggauacauuacuuguuga

SEQ ID NO: 108353 - RNA, 19 nt, Homo sapiens
  misc_RNA (1)...(19): siRNA sense strand
uaucaaaggagcaugguau

SEQ ID NO: 108354 - RNA, 19 nt, Homo sapiens
  misc_RNA (1)...(19): siRNA sense strand
aaucaagcuuccauauguu

SEQ ID NO: 108355 - RNA, 19 nt, Homo sapiens
  misc_RNA (1)...(19): siRNA sense strand
caccaaaacuacauagauu

SEQ ID NO: 108356 - RNA, 19 nt, Homo sapiens
  misc_RNA (1)...(19): siRNA sense strand
caauaaacagccuccaguu

SEQ ID NO: 108357 - RNA, 19 nt, Homo sapiens
  misc_RNA (1)...(19): siRNA sense strand
gagcgacaaaguauaacaa

SEQ ID NO: 108358 - RNA, 19 nt, Homo sapiens
  misc_RNA (1)...(19): siRNA sense strand
ccaaggagacauggaagaa

SEQ ID NO: 108359 - RNA, 19 nt, Homo sapiens
  misc_RNA (1)...(19): siRNA sense strand
gaauacacgcucuuuacuc

SEQ ID NO: 108360 - RNA, 19 nt, Homo sapiens
  misc_RNA (1)...(19): siRNA sense strand
caguggagauaauaaucaa

SEQ ID NO: 108361 - RNA, 19 nt, Homo sapiens
  misc_RNA (1)...(19): siRNA sense strand
gcgacaaaguauaacaagu

SEQ ID NO: 108362 - RNA, 19 nt, Homo sapiens
  misc_RNA (1)...(19): siRNA sense strand
gcaugguauucaaguacaa

SEQ ID NO: 108363 - RNA, 19 nt, Homo sapiens
  misc_RNA (1)...(19): siRNA sense strand
ugacagggaacauggaaug

SEQ ID NO: 108364 - RNA, 19 nt, Homo sapiens
  misc_RNA (1)...(19): siRNA sense strand
ggaauacacgcucuuuacu

SEQ ID NO: 108365 - RNA, 19 nt, Homo sapiens
  misc_RNA (1)...(19): siRNA sense strand
ucgguugcccucucauuua

SEQ ID NO: 108366 - RNA, 19 nt, Homo sapiens
  misc_RNA (1)...(19): siRNA sense strand
gagagccagugaauuucug

SEQ ID NO: 108367 - RNA, 19 nt, Homo sapiens
  misc_RNA (1)...(19): siRNA sense strand
aaaaguaucgggaaaauug

SEQ ID NO: 108368 - RNA, 19 nt, Homo sapiens
  misc_RNA (1)...(19): siRNA sense strand
gcaugaacuugcugugcau

SEQ ID NO: 108369 - RNA, 19 nt, Homo sapiens
  misc_RNA (1)...(19): siRNA sense strand
gaaucaagcuuccauaugu

SEQ ID NO: 108370 - RNA, 19 nt, Homo sapiens
  misc_RNA (1)...(19): siRNA sense strand
gcaaagauguuucucuguu

SEQ ID NO: 108371 - RNA, 19 nt, Homo sapiens
  misc_RNA (1)...(19): siRNA sense strand
acacaugccuggagacuua

SEQ ID NO: 108372 - RNA, 19 nt, Homo sapiens
  misc_RNA (1)...(19): siRNA sense strand
caacaaagcccgaggauau

SEQ ID NO: 108373 - RNA, 19 nt, Homo sapiens
  misc_RNA (1)...(19): siRNA sense strand
ccaaagaaauucaggaaga

SEQ ID NO: 108374 - RNA, 19 nt, Homo sapiens
  misc_RNA (1)...(19): siRNA sense strand
cuacauagauuucuucaug

SEQ ID NO: 108375 - RNA, 19 nt, Homo sapiens
  misc_RNA (1)...(19): siRNA sense strand
ggaaauugaugauauugug

SEQ ID NO: 108376 - RNA, 19 nt, Homo sapiens
  misc_RNA (1)...(19): siRNA sense strand
aaacucagcuauugccaua

SEQ ID NO: 108377 - RNA, 19 nt, Homo sapiens
  misc_RNA (1)...(19): siRNA sense strand
gaagauaauucugguugaa

SEQ ID NO: 108378 - RNA, 19 nt, Homo sapiens
  misc_RNA (1)...(19): siRNA sense strand
caaagauguuucucuguuu

SEQ ID NO: 108379 - RNA, 19 nt, Homo sapiens
  misc_RNA (1)...(19): siRNA sense strand
guacaagaguggauuaauc

SEQ ID NO: 108380 - RNA, 19 nt, Homo sapiens
  misc_RNA (1)...(19): siRNA sense strand
ggaagaguguucuaucuca

SEQ ID NO: 108381 - RNA, 19 nt, Homo sapiens
  misc_RNA (1)...(19): siRNA sense strand
gaaagacaacgaccuuaaa

SEQ ID NO: 108382 - RNA, 19 nt, Homo sapiens
  misc_RNA (1)...(19): siRNA sense strand
ggaaagacaacgaccuuaa

SEQ ID NO: 108383 - RNA, 19 nt, Homo sapiens
  misc_RNA (1)...(19): siRNA sense strand
caaagaguuucuacuaaga

SEQ ID NO: 108384 - RNA, 19 nt, Homo sapiens
  misc_RNA (1)...(19): siRNA sense strand
ccucagugguuucuaauaa

SEQ ID NO: 108385 - RNA, 19 nt, Homo sapiens
  misc_RNA (1)...(19): siRNA sense strand
ccagugaauuucugaguuu

SEQ ID NO: 108386 - RNA, 19 nt, Homo sapiens
  misc_RNA (1)...(19): siRNA sense strand
cagggaacauggaaugaua

SEQ ID NO: 108387 - RNA, 19 nt, Homo sapiens
  misc_RNA (1)...(19): siRNA sense strand
uaagagcgacaaaguauaa

SEQ ID NO: 108388 - RNA, 19 nt, Homo sapiens
  misc_RNA (1)...(19): siRNA sense strand
gagcaucuuuaacagaauu

SEQ ID NO: 108389 - RNA, 19 nt, Homo sapiens
  misc_RNA (1)...(19): siRNA sense strand
ccuggagacuuauuuaauu

SEQ ID NO: 108390 - RNA, 19 nt, Homo sapiens
  misc_RNA (1)...(19): siRNA sense strand
cgacaaaguauaacaaguu

SEQ ID NO: 108391 - RNA, 19 nt, Homo sapiens
  misc_RNA (1)...(19): siRNA sense strand
ggagcaugguauucaagua

SEQ ID NO: 108392 - RNA, 19 nt, Homo sapiens
  misc_RNA (1)...(19): siRNA sense strand
gaagaguguucuaucucaa

SEQ ID NO: 108393 - RNA, 19 nt, Homo sapiens
  misc_RNA (1)...(19): siRNA sense strand
ucaaagaguuucuacuaag

SEQ ID NO: 108394 - RNA, 19 nt, Homo sapiens
  misc_RNA (1)...(19): siRNA sense strand
gagaacugauaagaagaua

SEQ ID NO: 108395 - RNA, 19 nt, Homo sapiens
  misc_RNA (1)...(19): siRNA sense strand
gcucuuuacucagggaaua

SEQ ID NO: 108396 - RNA, 19 nt, Homo sapiens
  misc_RNA (1)...(19): siRNA sense strand
cgggauacauuacuuguug

SEQ ID NO: 108397 - RNA, 19 nt, Homo sapiens
  misc_RNA (1)...(19): siRNA sense strand
ucgauguccucuuauauuu

SEQ ID NO: 108398 - RNA, 19 nt, Homo sapiens
  misc_RNA (1)...(19): siRNA sense strand
agauuuaccuaaccaguuu

SEQ ID NO: 108399 - RNA, 19 nt, Homo sapiens
  misc_RNA (1)...(19): siRNA sense strand
ggaaguaugugaggauugg

SEQ ID NO: 108400 - RNA, 19 nt, Homo sapiens
  misc_RNA (1)...(19): siRNA sense strand
gauaucagaagugcaauaa

SEQ ID NO: 108401 - RNA, 19 nt, Homo sapiens
  misc_RNA (1)...(19): siRNA sense strand
gcaccaacaauuaugauga

SEQ ID NO: 108402 - RNA, 19 nt, Homo sapiens
  misc_RNA (1)...(19): siRNA sense strand
aaacaggguggaucuauuu

SEQ ID NO: 108403 - RNA, 19 nt, Homo sapiens
  misc_RNA (1)...(19): siRNA sense strand
gaugaucugagaacugaua

SEQ ID NO: 108404 - RNA, 19 nt, Homo sapiens
  misc_RNA (1)...(19): siRNA sense strand
ggguggaucuauuuuauua

SEQ ID NO: 108405 - RNA, 19 nt, Homo sapiens
  misc_RNA (1)...(19): siRNA sense strand
uaucagaagugcaauaaac

SEQ ID NO: 108406 - RNA, 19 nt, Homo sapiens
  misc_RNA (1)...(19): siRNA sense strand
ugugagagccagugaauuu

SEQ ID NO: 108407 - RNA, 19 nt, Homo sapiens
  misc_RNA (1)...(19): siRNA sense strand
caaaggagcaugguauuca

SEQ ID NO: 108408 - RNA, 19 nt, Homo sapiens
  misc_RNA (1)...(19): siRNA sense strand
ccggaaaccuggucucuuc

SEQ ID NO: 108409 - RNA, 19 nt, Homo sapiens
  misc_RNA (1)...(19): siRNA sense strand
gaagcgacacuuuggaaga

SEQ ID NO: 108410 - RNA, 19 nt, Homo sapiens
  misc_RNA (1)...(19): siRNA sense strand
cgagaggugugaugcauuc

SEQ ID NO: 108411 - RNA, 19 nt, Homo sapiens
  misc_RNA (1)...(19): siRNA sense strand
cagaugcugugcugucaaa

SEQ ID NO: 108412 - RNA, 19 nt, Homo sapiens
  misc_RNA (1)...(19): siRNA sense strand
caccaacaauuaugaugaa

SEQ ID NO: 108413 - RNA, 19 nt, Homo sapiens
  misc_RNA (1)...(19): siRNA sense strand
gaacgggauacauuacuug

SEQ ID NO: 108414 - RNA, 19 nt, Homo sapiens
  misc_RNA (1)...(19): siRNA sense strand
gaucugagaacugauaaga

SEQ ID NO: 108415 - RNA, 19 nt, Homo sapiens
  misc_RNA (1)...(19): siRNA sense strand
uaacaagaauggaggaaaa

SEQ ID NO: 108416 - RNA, 19 nt, Homo sapiens
  misc_RNA (1)...(19): siRNA sense strand
caaguacaagaguggauua

SEQ ID NO: 108417 - RNA, 19 nt, Homo sapiens
  misc_RNA (1)...(19): siRNA sense strand
gaaaccuggucucuuccuu

SEQ ID NO: 108418 - RNA, 19 nt, Homo sapiens
  misc_RNA (1)...(19): siRNA sense strand
guuauuguuucccaaagaa

SEQ ID NO: 108419 - RNA, 19 nt, Homo sapiens
  misc_RNA (1)...(19): siRNA sense strand
uacaugaaguucuaaggaa

SEQ ID NO: 108420 - RNA, 19 nt, Homo sapiens
  misc_RNA (1)...(19): siRNA sense strand
ucugagaacugauaagaag

SEQ ID NO: 108421 - RNA, 19 nt, Homo sapiens
  misc_RNA (1)...(19): siRNA sense strand
aauacacgcucuuuacuca

SEQ ID NO: 108422 - RNA, 19 nt, Homo sapiens
  misc_RNA (1)...(19): siRNA sense strand
caacuuacggccaaggaaa

SEQ ID NO: 108423 - RNA, 19 nt, Homo sapiens
  misc_RNA (1)...(19): siRNA sense strand
caaagaaauucaggaagag

SEQ ID NO: 108424 - RNA, 19 nt, Homo sapiens
  misc_RNA (1)...(19): siRNA sense strand
ggagguaguagaaauguca

SEQ ID NO: 108425 - RNA, 19 nt, Homo sapiens
  misc_RNA (1)...(19): siRNA sense strand
gccagugaauuucugaguu

SEQ ID NO: 108426 - RNA, 19 nt, Homo sapiens
  misc_RNA (1)...(19): siRNA sense strand
uacaaaugcuuggagauga

SEQ ID NO: 108427 - RNA, 19 nt, Homo sapiens
  misc_RNA (1)...(19): siRNA sense strand
ugaacuugcugugcauaaa

SEQ ID NO: 108428 - RNA, 19 nt, Homo sapiens
  misc_RNA (1)...(19): siRNA sense strand
ccucucauuuaucagaaua

SEQ ID NO: 108429 - RNA, 19 nt, Homo sapiens
  misc_RNA (1)...(19): siRNA sense strand
caagagguccaagcuauug

SEQ ID NO: 108430 - RNA, 19 nt, Homo sapiens
  misc_RNA (1)...(19): siRNA sense strand
ucgggauucucauacuuua

SEQ ID NO: 108431 - RNA, 19 nt, Homo sapiens
  misc_RNA (1)...(19): siRNA sense strand
gguuauuguuucccaaaga

SEQ ID NO: 108432 - RNA, 19 nt, Homo sapiens
  misc_RNA (1)...(19): siRNA sense strand
gccauaccuugcucuacua

SEQ ID NO: 108433 - RNA, 19 nt, Homo sapiens
  misc_RNA (1)...(19): siRNA sense strand
caaggaggaggaucaaguu

SEQ ID NO: 108434 - RNA, 19 nt, Homo sapiens
  misc_RNA (1)...(19): siRNA sense strand
ugugaugcauuccaacaaa

SEQ ID NO: 108435 - RNA, 19 nt, Homo sapiens
  misc_RNA (1)...(19): siRNA sense strand
gaggugugaugcauuccaa

SEQ ID NO: 108436 - RNA, 19 nt, Homo sapiens
  misc_RNA (1)...(19): siRNA sense strand
aaagauguuucucuguuuc

SEQ ID NO: 108437 - RNA, 19 nt, Homo sapiens
  misc_RNA (1)...(19): siRNA sense strand
gggauguucuggugauauc

SEQ ID NO: 108438 - RNA, 19 nt, Homo sapiens
  misc_RNA (1)...(19): siRNA sense strand
ugacaaaacuucucuagag

SEQ ID NO: 108439 - RNA, 19 nt, Homo sapiens
  misc_RNA (1)...(19): siRNA sense strand
caggaagaguguucuaucu

SEQ ID NO: 108440 - RNA, 19 nt, Homo sapiens
  misc_RNA (1)...(19): siRNA sense strand
ugaacgggauacauuacuu

SEQ ID NO: 108441 - RNA, 19 nt, Homo sapiens
  misc_RNA (1)...(19): siRNA sense strand
ggugauaucagaagugcaa

SEQ ID NO: 108442 - RNA, 19 nt, Homo sapiens
  misc_RNA (1)...(19): siRNA sense strand
agauaauucugguugaaga

SEQ ID NO: 108443 - RNA, 19 nt, Homo sapiens
  misc_RNA (1)...(19): siRNA sense strand
aaaggagcaugguauucaa

SEQ ID NO: 108444 - RNA, 19 nt, Homo sapiens
  misc_RNA (1)...(19): siRNA sense strand
aauaugaacgggauacauu

SEQ ID NO: 108445 - RNA, 19 nt, Homo sapiens
  misc_RNA (1)...(19): siRNA sense strand
cuauagaagcuaacaagaa

SEQ ID NO: 108446 - RNA, 19 nt, Homo sapiens
  misc_RNA (1)...(19): siRNA sense strand
cgauguccucuuauauuua

SEQ ID NO: 108447 - RNA, 19 nt, Homo sapiens
  misc_RNA (1)...(19): siRNA sense strand
auuggucgauguccucuua

SEQ ID NO: 108448 - RNA, 19 nt, Homo sapiens
  misc_RNA (1)...(19): siRNA sense strand
gaaguucuaaggaaguaug

SEQ ID NO: 108449 - RNA, 19 nt, Homo sapiens
  misc_RNA (1)...(19): siRNA sense strand
ccuguggcaccaacaauua

SEQ ID NO: 108450 - RNA, 19 nt, Homo sapiens
  misc_RNA (1)...(19): siRNA sense strand
gcgacacuuuggaagauug

SEQ ID NO: 108451 - RNA, 19 nt, Homo sapiens
  misc_RNA (1)...(19): siRNA sense strand
ggaggaggaucaaguuuuc

SEQ ID NO: 108452 - RNA, 19 nt, Homo sapiens
  misc_RNA (1)...(19): siRNA sense strand
gggauacauuacuuguuga

SEQ ID NO: 108453 - RNA, 19 nt, Homo sapiens
  misc_RNA (1)...(19): siRNA sense strand
uaucaaaggagcaugguau

SEQ ID NO: 108454 - RNA, 19 nt, Homo sapiens
  misc_RNA (1)...(19): siRNA sense strand
aaucaagcuuccauauguu

SEQ ID NO: 108455 - RNA, 19 nt, Homo sapiens
  misc_RNA (1)...(19): siRNA sense strand
caccaaaacuacauagauu

SEQ ID NO: 108456 - RNA, 19 nt, Homo sapiens
  misc_RNA (1)...(19): siRNA sense strand
caauaaacagccuccaguu

SEQ ID NO: 108457 - RNA, 19 nt, Homo sapiens
  misc_RNA (1)...(19): siRNA sense strand
gagcgacaaaguauaacaa

SEQ ID NO: 108458 - RNA, 19 nt, Homo sapiens
  misc_RNA (1)...(19): siRNA sense strand
ccaaggagacauggaagaa

SEQ ID NO: 108459 - RNA, 19 nt, Homo sapiens
  misc_RNA (1)...(19): siRNA sense strand
gaauacacgcucuuuacuc

SEQ ID NO: 108460 - RNA, 19 nt, Homo sapiens
  misc_RNA (1)...(19): siRNA sense strand
caguggagauaauaaucaa

SEQ ID NO: 108461 - RNA, 19 nt, Homo sapiens
  misc_RNA (1)...(19): siRNA sense strand
gcgacaaaguauaacaagu

SEQ ID NO: 108462 - RNA, 19 nt, Homo sapiens
  misc_RNA (1)...(19): siRNA sense strand
gcaugguauucaaguacaa

SEQ ID NO: 108463 - RNA, 19 nt, Homo sapiens
  misc_RNA (1)...(19): siRNA sense strand
ugacagggaacauggaaug

SEQ ID NO: 108464 - RNA, 19 nt, Homo sapiens
  misc_RNA (1)...(19): siRNA sense strand
ggaauacacgcucuuuacu

SEQ ID NO: 108465 - RNA, 19 nt, Homo sapiens
  misc_RNA (1)...(19): siRNA sense strand
ucgguugcccucucauuua

SEQ ID NO: 108466 - RNA, 19 nt, Homo sapiens
  misc_RNA (1)...(19): siRNA sense strand
gagagccagugaauuucug

SEQ ID NO: 108467 - RNA, 19 nt, Homo sapiens
  misc_RNA (1)...(19): siRNA sense strand
aaaaguaucgggaaaauug

SEQ ID NO: 108468 - RNA, 19 nt, Homo sapiens
  misc_RNA (1)...(19): siRNA sense strand
gcaugaacuugcugugcau

SEQ ID NO: 108469 - RNA, 19 nt, Homo sapiens
  misc_RNA (1)...(19): siRNA sense strand
gaaucaagcuuccauaugu

SEQ ID NO: 108470 - RNA, 19 nt, Homo sapiens
  misc_RNA (1)...(19): siRNA sense strand
gcaaagauguuucucuguu

SEQ ID NO: 108471 - RNA, 19 nt, Homo sapiens
  misc_RNA (1)...(19): siRNA sense strand
acacaugccuggagacuua

SEQ ID NO: 108472 - RNA, 19 nt, Homo sapiens
  misc_RNA (1)...(19): siRNA sense strand
caacaaagcccgaggauau

SEQ ID NO: 108473 - RNA, 19 nt, Homo sapiens
  misc_RNA (1)...(19): siRNA sense strand
ccaaagaaauucaggaaga

SEQ ID NO: 108474 - RNA, 19 nt, Homo sapiens
  misc_RNA (1)...(19): siRNA sense strand
cuacauagauuucuucaug

SEQ ID NO: 108475 - RNA, 19 nt, Homo sapiens
  misc_RNA (1)...(19): siRNA sense strand
ggaaauugaugauauugug

SEQ ID NO: 108476 - RNA, 19 nt, Homo sapiens
  misc_RNA (1)...(19): siRNA sense strand
aaacucagcuauugccaua

SEQ ID NO: 108477 - RNA, 19 nt, Homo sapiens
  misc_RNA (1)...(19): siRNA sense strand
gaagauaauucugguugaa

SEQ ID NO: 108478 - RNA, 19 nt, Homo sapiens
  misc_RNA (1)...(19): siRNA sense strand
caaagauguuucucuguuu

SEQ ID NO: 108479 - RNA, 19 nt, Homo sapiens
  misc_RNA (1)...(19): siRNA sense strand
ggaagaguguucuaucuca

SEQ ID NO: 108480 - RNA, 19 nt, Homo sapiens
  misc_RNA (1)...(19): siRNA sense strand
caaagaguuucuacuaaga

SEQ ID NO: 108481 - RNA, 19 nt, Homo sapiens
  misc_RNA (1)...(19): siRNA sense strand
ccucagugguuucuaauaa

SEQ ID NO: 108482 - RNA, 19 nt, Homo sapiens
  misc_RNA (1)...(19): siRNA sense strand
ccagugaauuucugaguuu

SEQ ID NO: 108483 - RNA, 19 nt, Homo sapiens
  misc_RNA (1)...(19): siRNA sense strand
cagggaacauggaaugaua

SEQ ID NO: 108484 - RNA, 19 nt, Homo sapiens
  misc_RNA (1)...(19): siRNA sense strand
uaagagcgacaaaguauaa

SEQ ID NO: 108485 - RNA, 19 nt, Homo sapiens
  misc_RNA (1)...(19): siRNA sense strand
gagcaucuuuaacagaauu

SEQ ID NO: 108486 - RNA, 19 nt, Homo sapiens
  misc_RNA (1)...(19): siRNA sense strand
ccuggagacuuauuuaauu

SEQ ID NO: 108487 - RNA, 19 nt, Homo sapiens
  misc_RNA (1)...(19): siRNA sense strand
cgacaaaguauaacaaguu

SEQ ID NO: 108488 - RNA, 19 nt, Homo sapiens
  misc_RNA (1)...(19): siRNA sense strand
gaagaguguucuaucucaa

SEQ ID NO: 108489 - RNA, 19 nt, Homo sapiens
  misc_RNA (1)...(19): siRNA sense strand
ucaaagaguuucuacuaag

SEQ ID NO: 108490 - RNA, 19 nt, Homo sapiens
  misc_RNA (1)...(19): siRNA sense strand
gagaacugauaagaagaua

SEQ ID NO: 108491 - RNA, 19 nt, Homo sapiens
  misc_RNA (1)...(19): siRNA sense strand
gcucuuuacucagggaaua

SEQ ID NO: 108492 - RNA, 19 nt, Homo sapiens
  misc_RNA (1)...(19): siRNA sense strand
cgggauacauuacuuguug

SEQ ID NO: 108493 - RNA, 19 nt, Homo sapiens
  misc_RNA (1)...(19): siRNA sense strand
ucgauguccucuuauauuu

SEQ ID NO: 108494 - RNA, 19 nt, Homo sapiens
  misc_RNA (1)...(19): siRNA sense strand
agauuuaccuaaccaguuu

SEQ ID NO: 108495 - RNA, 19 nt, Homo sapiens
  misc_RNA (1)...(19): siRNA sense strand
ggaaguaugugaggauugg

SEQ ID NO: 108496 - RNA, 19 nt, Homo sapiens
  misc_RNA (1)...(19): siRNA sense strand
gauaucagaagugcaauaa

SEQ ID NO: 108497 - RNA, 19 nt, Homo sapiens
  misc_RNA (1)...(19): siRNA sense strand
gcaccaacaauuaugauga

SEQ ID NO: 108498 - RNA, 19 nt, Homo sapiens
  misc_RNA (1)...(19): siRNA sense strand
gaugaucugagaacugaua

SEQ ID NO: 108499 - RNA, 19 nt, Homo sapiens
  misc_RNA (1)...(19): siRNA sense strand
uaucagaagugcaauaaac

SEQ ID NO: 108500 - RNA, 19 nt, Homo sapiens
  misc_RNA (1)...(19): siRNA sense strand
ugugagagccagugaauuu

SEQ ID NO: 108501 - RNA, 19 nt, Homo sapiens
  misc_RNA (1)...(19): siRNA sense strand
caccaacaauuaugaugaa

SEQ ID NO: 108502 - RNA, 19 nt, Homo sapiens
  misc_RNA (1)...(19): siRNA sense strand
ccggaaaccuggucucuuc

SEQ ID NO: 108503 - RNA, 19 nt, Homo sapiens
  misc_RNA (1)...(19): siRNA sense strand
gaagcgacacuuuggaaga

SEQ ID NO: 108504 - RNA, 19 nt, Homo sapiens
  misc_RNA (1)...(19): siRNA sense strand
cgagaggugugaugcauuc

SEQ ID NO: 108505 - RNA, 19 nt, Homo sapiens
  misc_RNA (1)...(19): siRNA sense strand
cagaugcugugcugucaaa

SEQ ID NO: 108506 - RNA, 19 nt, Homo sapiens
  misc_RNA (1)...(19): siRNA sense strand
gaacgggauacauuacuug

SEQ ID NO: 108507 - RNA, 19 nt, Homo sapiens
  misc_RNA (1)...(19): siRNA sense strand
gaucugagaacugauaaga

SEQ ID NO: 108508 - RNA, 19 nt, Homo sapiens
  misc_RNA (1)...(19): siRNA sense strand
uaacaagaauggaggaaaa

SEQ ID NO: 108509 - RNA, 19 nt, Homo sapiens
  misc_RNA (1)...(19): siRNA sense strand
uacaugaaguucuaaggaa

SEQ ID NO: 108510 - RNA, 19 nt, Homo sapiens
  misc_RNA (1)...(19): siRNA sense strand
gaaaccuggucucuuccuu

SEQ ID NO: 108511 - RNA, 19 nt, Homo sapiens
  misc_RNA (1)...(19): siRNA sense strand
guuauuguuucccaaagaa

SEQ ID NO: 108512 - RNA, 19 nt, Homo sapiens
  misc_RNA (1)...(19): siRNA sense strand
ucugagaacugauaagaag

SEQ ID NO: 108513 - RNA, 19 nt, Homo sapiens
  misc_RNA (1)...(19): siRNA sense strand
aauacacgcucuuuacuca

SEQ ID NO: 108514 - RNA, 19 nt, Homo sapiens
  misc_RNA (1)...(19): siRNA sense strand
caacuuacggccaaggaaa

SEQ ID NO: 108515 - RNA, 19 nt, Homo sapiens
  misc_RNA (1)...(19): siRNA sense strand
caaagaaauucaggaagag

SEQ ID NO: 108516 - RNA, 19 nt, Homo sapiens
  misc_RNA (1)...(19): siRNA sense strand
ggagguaguagaaauguca

SEQ ID NO: 108517 - RNA, 19 nt, Homo sapiens
  misc_RNA (1)...(19): siRNA sense strand
gccagugaauuucugaguu

SEQ ID NO: 108518 - RNA, 19 nt, Homo sapiens
  misc_RNA (1)...(19): siRNA sense strand
uacaaaugcuuggagauga

SEQ ID NO: 108519 - RNA, 19 nt, Homo sapiens
  misc_RNA (1)...(19): siRNA sense strand
ccucucauuuaucagaaua

SEQ ID NO: 108520 - RNA, 19 nt, Homo sapiens
  misc_RNA (1)...(19): siRNA sense strand
caagagguccaagcuauug

SEQ ID NO: 108521 - RNA, 19 nt, Homo sapiens
  misc_RNA (1)...(19): siRNA sense strand
ucgggauucucauacuuua

SEQ ID NO: 108522 - RNA, 19 nt, Homo sapiens
  misc_RNA (1)...(19): siRNA sense strand
gguuauuguuucccaaaga

SEQ ID NO: 108523 - RNA, 19 nt, Homo sapiens
  misc_RNA (1)...(19): siRNA sense strand
gccauaccuugcucuacua

SEQ ID NO: 108524 - RNA, 19 nt, Homo sapiens
  misc_RNA (1)...(19): siRNA sense strand
caaggaggaggaucaaguu

SEQ ID NO: 108525 - RNA, 19 nt, Homo sapiens
  misc_RNA (1)...(19): siRNA sense strand
ugugaugcauuccaacaaa

SEQ ID NO: 108526 - RNA, 19 nt, Homo sapiens
  misc_RNA (1)...(19): siRNA sense strand
gaggugugaugcauuccaa

SEQ ID NO: 108527 - RNA, 19 nt, Homo sapiens
  misc_RNA (1)...(19): siRNA sense strand
aaagauguuucucuguuuc

SEQ ID NO: 108528 - RNA, 19 nt, Homo sapiens
  misc_RNA (1)...(19): siRNA sense strand
gggauguucuggugauauc

SEQ ID NO: 108529 - RNA, 19 nt, Homo sapiens
  misc_RNA (1)...(19): siRNA sense strand
ugacaaaacuucucuagag

SEQ ID NO: 108530 - RNA, 19 nt, Homo sapiens
  misc_RNA (1)...(19): siRNA sense strand
caggaagaguguucuaucu

SEQ ID NO: 108531 - RNA, 19 nt, Homo sapiens
  misc_RNA (1)...(19): siRNA sense strand
ugaacgggauacauuacuu

SEQ ID NO: 108532 - RNA, 19 nt, Homo sapiens
  misc_RNA (1)...(19): siRNA sense strand
ggugauaucagaagugcaa

SEQ ID NO: 108533 - RNA, 19 nt, Homo sapiens
  misc_RNA (1)...(19): siRNA sense strand
gaaguucuaaggaaguaug

SEQ ID NO: 108534 - RNA, 19 nt, Homo sapiens
  misc_RNA (1)...(19): siRNA sense strand
aauaugaacgggauacauu

SEQ ID NO: 108535 - RNA, 19 nt, Homo sapiens
  misc_RNA (1)...(19): siRNA sense strand
cuauagaagcuaacaagaa

SEQ ID NO: 108536 - RNA, 19 nt, Homo sapiens
  misc_RNA (1)...(19): siRNA sense strand
cgauguccucuuauauuua

SEQ ID NO: 108537 - RNA, 19 nt, Homo sapiens
  misc_RNA (1)...(19): siRNA sense strand
auuggucgauguccucuua

SEQ ID NO: 108538 - RNA, 19 nt, Homo sapiens
  misc_RNA (1)...(19): siRNA sense strand
agauaauucugguugaaga

SEQ ID NO: 108539 - RNA, 19 nt, Homo sapiens
  misc_RNA (1)...(19): siRNA sense strand
ccuguggcaccaacaauua

SEQ ID NO: 108540 - RNA, 19 nt, Homo sapiens
  misc_RNA (1)...(19): siRNA sense strand
gcgacacuuuggaagauug

SEQ ID NO: 108541 - RNA, 19 nt, Homo sapiens
  misc_RNA (1)...(19): siRNA sense strand
ggaggaggaucaaguuuuc

SEQ ID NO: 108542 - RNA, 19 nt, Homo sapiens
  misc_RNA (1)...(19): siRNA sense strand
gggauacauuacuuguuga

SEQ ID NO: 108543 - RNA, 19 nt, Homo sapiens
  misc_RNA (1)...(19): siRNA sense strand
caauaaacagccuccaguu

SEQ ID NO: 108544 - RNA, 19 nt, Homo sapiens
  misc_RNA (1)...(19): siRNA sense strand
aaucaagcuuccauauguu

SEQ ID NO: 108545 - RNA, 19 nt, Homo sapiens
  misc_RNA (1)...(19): siRNA sense strand
caccaaaacuacauagauu

SEQ ID NO: 108546 - RNA, 19 nt, Homo sapiens
  misc_RNA (1)...(19): siRNA sense strand
caguggagauaauaaucaa

SEQ ID NO: 108547 - RNA, 19 nt, Homo sapiens
  misc_RNA (1)...(19): siRNA sense strand
ccaaggagacauggaagaa

SEQ ID NO: 108548 - RNA, 19 nt, Homo sapiens
  misc_RNA (1)...(19): siRNA sense strand
gaauacacgcucuuuacuc

SEQ ID NO: 108549 - RNA, 19 nt, Homo sapiens
  misc_RNA (1)...(19): siRNA sense strand
gcgacaaaguauaacaagu

SEQ ID NO: 108550 - RNA, 19 nt, Homo sapiens
  misc_RNA (1)...(19): siRNA sense strand
gagcgacaaaguauaacaa

SEQ ID NO: 108551 - RNA, 19 nt, Homo sapiens
  misc_RNA (1)...(19): siRNA sense strand
ucgguugcccucucauuua

SEQ ID NO: 108552 - RNA, 19 nt, Homo sapiens
  misc_RNA (1)...(19): siRNA sense strand
ugacagggaacauggaaug

SEQ ID NO: 108553 - RNA, 19 nt, Homo sapiens
  misc_RNA (1)...(19): siRNA sense strand
ggaauacacgcucuuuacu

SEQ ID NO: 108554 - RNA, 19 nt, Homo sapiens
  misc_RNA (1)...(19): siRNA sense strand
guucuaaggaaguauguga

SEQ ID NO: 108555 - RNA, 19 nt, Homo sapiens
  misc_RNA (1)...(19): siRNA sense strand
aaaaguaucgggaaaauug

SEQ ID NO: 108556 - RNA, 19 nt, Homo sapiens
  misc_RNA (1)...(19): siRNA sense strand
acaaaugcuuggagaugau

SEQ ID NO: 108557 - RNA, 19 nt, Homo sapiens
  misc_RNA (1)...(19): siRNA sense strand
gagagccagugaauuucug

SEQ ID NO: 108558 - RNA, 19 nt, Homo sapiens
  misc_RNA (1)...(19): siRNA sense strand
acauagauuucuucaugga

SEQ ID NO: 108559 - RNA, 19 nt, Homo sapiens
  misc_RNA (1)...(19): siRNA sense strand
ucagauagcaguuuucaaa

SEQ ID NO: 108560 - RNA, 19 nt, Homo sapiens
  misc_RNA (1)...(19): siRNA sense strand
cuacuaagagcgacaaagu

SEQ ID NO: 108561 - RNA, 19 nt, Homo sapiens
  misc_RNA (1)...(19): siRNA sense strand
ggaaugauagacccugaca

SEQ ID NO: 108562 - RNA, 19 nt, Homo sapiens
  misc_RNA (1)...(19): siRNA sense strand
gguugaagauuuaccuaac

SEQ ID NO: 108563 - RNA, 19 nt, Homo sapiens
  misc_RNA (1)...(19): siRNA sense strand
acuaagagcgacaaaguau

SEQ ID NO: 108564 - RNA, 19 nt, Homo sapiens
  misc_RNA (1)...(19): siRNA sense strand
caaggagacauggaagaaa

SEQ ID NO: 108565 - RNA, 19 nt, Homo sapiens
  misc_RNA (1)...(19): siRNA sense strand
uaucgggauucucauacuu

SEQ ID NO: 108566 - RNA, 19 nt, Homo sapiens
  misc_RNA (1)...(19): siRNA sense strand
ugaaucaagcuuccauaug

SEQ ID NO: 108567 - RNA, 19 nt, Homo sapiens
  misc_RNA (1)...(19): siRNA sense strand
cugaggagguaguagaaau

SEQ ID NO: 108568 - RNA, 19 nt, Homo sapiens
  misc_RNA (1)...(19): siRNA sense strand
gucgauguccucuuauauu

SEQ ID NO: 108569 - RNA, 19 nt, Homo sapiens
  misc_RNA (1)...(19): siRNA sense strand
gaaucaagcuuccauaugu

SEQ ID NO: 108570 - RNA, 19 nt, Homo sapiens
  misc_RNA (1)...(19): siRNA sense strand
gcaaagauguuucucuguu

SEQ ID NO: 108571 - RNA, 19 nt, Homo sapiens
  misc_RNA (1)...(19): siRNA sense strand
acacaugccuggagacuua

SEQ ID NO: 108572 - RNA, 19 nt, Homo sapiens
  misc_RNA (1)...(19): siRNA sense strand
caacaaagcccgaggauau

SEQ ID NO: 108573 - RNA, 19 nt, Homo sapiens
  misc_RNA (1)...(19): siRNA sense strand
ccaaagaaauucaggaaga

SEQ ID NO: 108574 - RNA, 19 nt, Homo sapiens
  misc_RNA (1)...(19): siRNA sense strand
cuacauagauuucuucaug

SEQ ID NO: 108575 - RNA, 19 nt, Homo sapiens
  misc_RNA (1)...(19): siRNA sense strand
ggaaauugaugauauugug

SEQ ID NO: 108576 - RNA, 19 nt, Homo sapiens
  misc_RNA (1)...(19): siRNA sense strand
aaacucagcuauugccaua

SEQ ID NO: 108577 - RNA, 19 nt, Homo sapiens
  misc_RNA (1)...(19): siRNA sense strand
gaagauaauucugguugaa

SEQ ID NO: 108578 - RNA, 19 nt, Homo sapiens
  misc_RNA (1)...(19): siRNA sense strand
caaagauguuucucuguuu

SEQ ID NO: 108579 - RNA, 19 nt, Homo sapiens
  misc_RNA (1)...(19): siRNA sense strand
guacaagaguggauuaauc

SEQ ID NO: 108580 - RNA, 19 nt, Homo sapiens
  misc_RNA (1)...(19): siRNA sense strand
ggaagaguguucuaucuca

SEQ ID NO: 108581 - RNA, 19 nt, Homo sapiens
  misc_RNA (1)...(19): siRNA sense strand
gaaagacaacgaccuuaaa

SEQ ID NO: 108582 - RNA, 19 nt, Homo sapiens
  misc_RNA (1)...(19): siRNA sense strand
ggaaagacaacgaccuuaa

SEQ ID NO: 108583 - RNA, 19 nt, Homo sapiens
  misc_RNA (1)...(19): siRNA sense strand
caaagaguuucuacuaaga

SEQ ID NO: 108584 - RNA, 19 nt, Homo sapiens
  misc_RNA (1)...(19): siRNA sense strand
ccucagugguuucuaauaa

SEQ ID NO: 108585 - RNA, 19 nt, Homo sapiens
  misc_RNA (1)...(19): siRNA sense strand
ccagugaauuucugaguuu

SEQ ID NO: 108586 - RNA, 19 nt, Homo sapiens
  misc_RNA (1)...(19): siRNA sense strand
cagggaacauggaaugaua

SEQ ID NO: 108587 - RNA, 19 nt, Homo sapiens
  misc_RNA (1)...(19): siRNA sense strand
uaagagcgacaaaguauaa

SEQ ID NO: 108588 - RNA, 19 nt, Homo sapiens
  misc_RNA (1)...(19): siRNA sense strand
gagcaucuuuaacagaauu

SEQ ID NO: 108589 - RNA, 19 nt, Homo sapiens
  misc_RNA (1)...(19): siRNA sense strand
ccuggagacuuauuuaauu

SEQ ID NO: 108590 - RNA, 19 nt, Homo sapiens
  misc_RNA (1)...(19): siRNA sense strand
cgacaaaguauaacaaguu

SEQ ID NO: 108591 - RNA, 19 nt, Homo sapiens
  misc_RNA (1)...(19): siRNA sense strand
ggagcaugguauucaagua

SEQ ID NO: 108592 - RNA, 19 nt, Homo sapiens
  misc_RNA (1)...(19): siRNA sense strand
gaagaguguucuaucucaa

SEQ ID NO: 108593 - RNA, 19 nt, Homo sapiens
  misc_RNA (1)...(19): siRNA sense strand
ucaaagaguuucuacuaag

SEQ ID NO: 108594 - RNA, 19 nt, Homo sapiens
  misc_RNA (1)...(19): siRNA sense strand
gagaacugauaagaagaua

SEQ ID NO: 108595 - RNA, 19 nt, Homo sapiens
  misc_RNA (1)...(19): siRNA sense strand
gcucuuuacucagggaaua

SEQ ID NO: 108596 - RNA, 19 nt, Homo sapiens
  misc_RNA (1)...(19): siRNA sense strand
cgggauacauuacuuguug

SEQ ID NO: 108597 - RNA, 19 nt, Homo sapiens
  misc_RNA (1)...(19): siRNA sense strand
ucgauguccucuuauauuu

SEQ ID NO: 108598 - RNA, 19 nt, Homo sapiens
  misc_RNA (1)...(19): siRNA sense strand
agauuuaccuaaccaguuu

SEQ ID NO: 108599 - RNA, 19 nt, Homo sapiens
  misc_RNA (1)...(19): siRNA sense strand
ggaaguaugugaggauugg

SEQ ID NO: 108600 - RNA, 19 nt, Homo sapiens
  misc_RNA (1)...(19): siRNA sense strand
gauaucagaagugcaauaa

SEQ ID NO: 108601 - RNA, 19 nt, Homo sapiens
  misc_RNA (1)...(19): siRNA sense strand
gcaccaacaauuaugauga

SEQ ID NO: 108602 - RNA, 19 nt, Homo sapiens
  misc_RNA (1)...(19): siRNA sense strand
aaacaggguggaucuauuu

SEQ ID NO: 108603 - RNA, 19 nt, Homo sapiens
  misc_RNA (1)...(19): siRNA sense strand
gaugaucugagaacugaua

SEQ ID NO: 108604 - RNA, 19 nt, Homo sapiens
  misc_RNA (1)...(19): siRNA sense strand
ggguggaucuauuuuauua

SEQ ID NO: 108605 - RNA, 19 nt, Homo sapiens
  misc_RNA (1)...(19): siRNA sense strand
uaucagaagugcaauaaac

SEQ ID NO: 108606 - RNA, 19 nt, Homo sapiens
  misc_RNA (1)...(19): siRNA sense strand
ugugagagccagugaauuu

SEQ ID NO: 108607 - RNA, 19 nt, Homo sapiens
  misc_RNA (1)...(19): siRNA sense strand
caaaggagcaugguauuca

SEQ ID NO: 108608 - RNA, 19 nt, Homo sapiens
  misc_RNA (1)...(19): siRNA sense strand
ccggaaaccuggucucuuc

SEQ ID NO: 108609 - RNA, 19 nt, Homo sapiens
  misc_RNA (1)...(19): siRNA sense strand
gaagcgacacuuuggaaga

SEQ ID NO: 108610 - RNA, 19 nt, Homo sapiens
  misc_RNA (1)...(19): siRNA sense strand
cgagaggugugaugcauuc

SEQ ID NO: 108611 - RNA, 19 nt, Homo sapiens
  misc_RNA (1)...(19): siRNA sense strand
cagaugcugugcugucaaa

SEQ ID NO: 108612 - RNA, 19 nt, Homo sapiens
  misc_RNA (1)...(19): siRNA sense strand
caccaacaauuaugaugaa

SEQ ID NO: 108613 - RNA, 19 nt, Homo sapiens
  misc_RNA (1)...(19): siRNA sense strand
gaacgggauacauuacuug

SEQ ID NO: 108614 - RNA, 19 nt, Homo sapiens
  misc_RNA (1)...(19): siRNA sense strand
gaucugagaacugauaaga

SEQ ID NO: 108615 - RNA, 19 nt, Homo sapiens
  misc_RNA (1)...(19): siRNA sense strand
uaacaagaauggaggaaaa

SEQ ID NO: 108616 - RNA, 19 nt, Homo sapiens
  misc_RNA (1)...(19): siRNA sense strand
caaguacaagaguggauua

SEQ ID NO: 108617 - RNA, 19 nt, Homo sapiens
  misc_RNA (1)...(19): siRNA sense strand
gaaaccuggucucuuccuu

SEQ ID NO: 108618 - RNA, 19 nt, Homo sapiens
  misc_RNA (1)...(19): siRNA sense strand
guuauuguuucccaaagaa

SEQ ID NO: 108619 - RNA, 19 nt, Homo sapiens
  misc_RNA (1)...(19): siRNA sense strand
uacaugaaguucuaaggaa

SEQ ID NO: 108620 - RNA, 19 nt, Homo sapiens
  misc_RNA (1)...(19): siRNA sense strand
ucugagaacugauaagaag

SEQ ID NO: 108621 - RNA, 19 nt, Homo sapiens
  misc_RNA (1)...(19): siRNA sense strand
aauacacgcucuuuacuca

SEQ ID NO: 108622 - RNA, 19 nt, Homo sapiens
  misc_RNA (1)...(19): siRNA sense strand
caacuuacggccaaggaaa

SEQ ID NO: 108623 - RNA, 19 nt, Homo sapiens
  misc_RNA (1)...(19): siRNA sense strand
caaagaaauucaggaagag

SEQ ID NO: 108624 - RNA, 19 nt, Homo sapiens
  misc_RNA (1)...(19): siRNA sense strand
ggagguaguagaaauguca

SEQ ID NO: 108625 - RNA, 19 nt, Homo sapiens
  misc_RNA (1)...(19): siRNA sense strand
gccagugaauuucugaguu

SEQ ID NO: 108626 - RNA, 19 nt, Homo sapiens
  misc_RNA (1)...(19): siRNA sense strand
uacaaaugcuuggagauga

SEQ ID NO: 108627 - RNA, 19 nt, Homo sapiens
  misc_RNA (1)...(19): siRNA sense strand
ugaacuugcugugcauaaa

SEQ ID NO: 108628 - RNA, 19 nt, Homo sapiens
  misc_RNA (1)...(19): siRNA sense strand
ccucucauuuaucagaaua

SEQ ID NO: 108629 - RNA, 19 nt, Homo sapiens
  misc_RNA (1)...(19): siRNA sense strand
caagagguccaagcuauug

SEQ ID NO: 108630 - RNA, 19 nt, Homo sapiens
  misc_RNA (1)...(19): siRNA sense strand
ucgggauucucauacuuua

SEQ ID NO: 108631 - RNA, 19 nt, Homo sapiens
  misc_RNA (1)...(19): siRNA sense strand
gguuauuguuucccaaaga

SEQ ID NO: 108632 - RNA, 19 nt, Homo sapiens
  misc_RNA (1)...(19): siRNA sense strand
gccauaccuugcucuacua

SEQ ID NO: 108633 - RNA, 19 nt, Homo sapiens
  misc_RNA (1)...(19): siRNA sense strand
caaggaggaggaucaaguu

SEQ ID NO: 108634 - RNA, 19 nt, Homo sapiens
  misc_RNA (1)...(19): siRNA sense strand
ugugaugcauuccaacaaa

SEQ ID NO: 108635 - RNA, 19 nt, Homo sapiens
  misc_RNA (1)...(19): siRNA sense strand
gaggugugaugcauuccaa

SEQ ID NO: 108636 - RNA, 19 nt, Homo sapiens
  misc_RNA (1)...(19): siRNA sense strand
aaagauguuucucuguuuc

SEQ ID NO: 108637 - RNA, 19 nt, Homo sapiens
  misc_RNA (1)...(19): siRNA sense strand
gggauguucuggugauauc

SEQ ID NO: 108638 - RNA, 19 nt, Homo sapiens
  misc_RNA (1)...(19): siRNA sense strand
ugacaaaacuucucuagag

SEQ ID NO: 108639 - RNA, 19 nt, Homo sapiens
  misc_RNA (1)...(19): siRNA sense strand
caggaagaguguucuaucu

SEQ ID NO: 108640 - RNA, 19 nt, Homo sapiens
  misc_RNA (1)...(19): siRNA sense strand
ugaacgggauacauuacuu

SEQ ID NO: 108641 - RNA, 19 nt, Homo sapiens
  misc_RNA (1)...(19): siRNA sense strand
ggugauaucagaagugcaa

SEQ ID NO: 108642 - RNA, 19 nt, Homo sapiens
  misc_RNA (1)...(19): siRNA sense strand
agauaauucugguugaaga

SEQ ID NO: 108643 - RNA, 19 nt, Homo sapiens
  misc_RNA (1)...(19): siRNA sense strand
aaaggagcaugguauucaa

SEQ ID NO: 108644 - RNA, 19 nt, Homo sapiens
  misc_RNA (1)...(19): siRNA sense strand
aauaugaacgggauacauu

SEQ ID NO: 108645 - RNA, 19 nt, Homo sapiens
  misc_RNA (1)...(19): siRNA sense strand
cuauagaagcuaacaagaa

SEQ ID NO: 108646 - RNA, 19 nt, Homo sapiens
  misc_RNA (1)...(19): siRNA sense strand
cgauguccucuuauauuua

SEQ ID NO: 108647 - RNA, 19 nt, Homo sapiens
  misc_RNA (1)...(19): siRNA sense strand
auuggucgauguccucuua

SEQ ID NO: 108648 - RNA, 19 nt, Homo sapiens
  misc_RNA (1)...(19): siRNA sense strand
gaaguucuaaggaaguaug

SEQ ID NO: 108649 - RNA, 19 nt, Homo sapiens
  misc_RNA (1)...(19): siRNA sense strand
ccuguggcaccaacaauua

SEQ ID NO: 108650 - RNA, 19 nt, Homo sapiens
  misc_RNA (1)...(19): siRNA sense strand
gcgacacuuuggaagauug

SEQ ID NO: 108651 - RNA, 19 nt, Homo sapiens
  misc_RNA (1)...(19): siRNA sense strand
ggaggaggaucaaguuuuc

SEQ ID NO: 108652 - RNA, 19 nt, Homo sapiens
  misc_RNA (1)...(19): siRNA sense strand
gggauacauuacuuguuga

SEQ ID NO: 108653 - RNA, 19 nt, Homo sapiens
  misc_RNA (1)...(19): siRNA sense strand
uaucaaaggagcaugguau

SEQ ID NO: 108654 - RNA, 19 nt, Homo sapiens
  misc_RNA (1)...(19): siRNA sense strand
aaucaagcuuccauauguu

SEQ ID NO: 108655 - RNA, 19 nt, Homo sapiens
  misc_RNA (1)...(19): siRNA sense strand
caccaaaacuacauagauu

SEQ ID NO: 108656 - RNA, 19 nt, Homo sapiens
  misc_RNA (1)...(19): siRNA sense strand
caauaaacagccuccaguu

SEQ ID NO: 108657 - RNA, 19 nt, Homo sapiens
  misc_RNA (1)...(19): siRNA sense strand
gagcgacaaaguauaacaa

SEQ ID NO: 108658 - RNA, 19 nt, Homo sapiens
  misc_RNA (1)...(19): siRNA sense strand
ccaaggagacauggaagaa

SEQ ID NO: 108659 - RNA, 19 nt, Homo sapiens
  misc_RNA (1)...(19): siRNA sense strand
gaauacacgcucuuuacuc

SEQ ID NO: 108660 - RNA, 19 nt, Homo sapiens
  misc_RNA (1)...(19): siRNA sense strand
caguggagauaauaaucaa

SEQ ID NO: 108661 - RNA, 19 nt, Homo sapiens
  misc_RNA (1)...(19): siRNA sense strand
gcgacaaaguauaacaagu

SEQ ID NO: 108662 - RNA, 19 nt, Homo sapiens
  misc_RNA (1)...(19): siRNA sense strand
gcaugguauucaaguacaa

SEQ ID NO: 108663 - RNA, 19 nt, Homo sapiens
  misc_RNA (1)...(19): siRNA sense strand
ugacagggaacauggaaug

SEQ ID NO: 108664 - RNA, 19 nt, Homo sapiens
  misc_RNA (1)...(19): siRNA sense strand
ggaauacacgcucuuuacu

SEQ ID NO: 108665 - RNA, 19 nt, Homo sapiens
  misc_RNA (1)...(19): siRNA sense strand
ucgguugcccucucauuua

SEQ ID NO: 108666 - RNA, 19 nt, Homo sapiens
  misc_RNA (1)...(19): siRNA sense strand
gagagccagugaauuucug

SEQ ID NO: 108667 - RNA, 19 nt, Homo sapiens
  misc_RNA (1)...(19): siRNA sense strand
aaaaguaucgggaaaauug

SEQ ID NO: 108668 - RNA, 19 nt, Homo sapiens
  misc_RNA (1)...(19): siRNA sense strand
gcaugaacuugcugugcau

SEQ ID NO: 108669 - RNA, 19 nt, Homo sapiens
  misc_RNA (1)...(19): siRNA sense strand
gaaucaagcuuccauaugu

SEQ ID NO: 108670 - RNA, 19 nt, Homo sapiens
  misc_RNA (1)...(19): siRNA sense strand
gcaaagauguuucucuguu

SEQ ID NO: 108671 - RNA, 19 nt, Homo sapiens
  misc_RNA (1)...(19): siRNA sense strand
acacaugccuggagacuua

SEQ ID NO: 108672 - RNA, 19 nt, Homo sapiens
  misc_RNA (1)...(19): siRNA sense strand
caacaaagcccgaggauau

SEQ ID NO: 108673 - RNA, 19 nt, Homo sapiens
  misc_RNA (1)...(19): siRNA sense strand
ccaaagaaauucaggaaga

SEQ ID NO: 108674 - RNA, 19 nt, Homo sapiens
  misc_RNA (1)...(19): siRNA sense strand
cuacauagauuucuucaug

SEQ ID NO: 108675 - RNA, 19 nt, Homo sapiens
  misc_RNA (1)...(19): siRNA sense strand
ggaaauugaugauauugug

SEQ ID NO: 108676 - RNA, 19 nt, Homo sapiens
  misc_RNA (1)...(19): siRNA sense strand
aaacucagcuauugccaua

SEQ ID NO: 108677 - RNA, 19 nt, Homo sapiens
  misc_RNA (1)...(19): siRNA sense strand
gaagauaauucugguugaa

SEQ ID NO: 108678 - RNA, 19 nt, Homo sapiens
  misc_RNA (1)...(19): siRNA sense strand
caaagauguuucucuguuu

SEQ ID NO: 108679 - RNA, 19 nt, Homo sapiens
  misc_RNA (1)...(19): siRNA sense strand
guacaagaguggauuaauc

SEQ ID NO: 108680 - RNA, 19 nt, Homo sapiens
  misc_RNA (1)...(19): siRNA sense strand
ggaagaguguucuaucuca

SEQ ID NO: 108681 - RNA, 19 nt, Homo sapiens
  misc_RNA (1)...(19): siRNA sense strand
gaaagacaacgaccuuaaa

SEQ ID NO: 108682 - RNA, 19 nt, Homo sapiens
  misc_RNA (1)...(19): siRNA sense strand
ggaaagacaacgaccuuaa

SEQ ID NO: 108683 - RNA, 19 nt, Homo sapiens
  misc_RNA (1)...(19): siRNA sense strand
caaagaguuucuacuaaga

SEQ ID NO: 108684 - RNA, 19 nt, Homo sapiens
  misc_RNA (1)...(19): siRNA sense strand
ccucagugguuucuaauaa

SEQ ID NO: 108685 - RNA, 19 nt, Homo sapiens
  misc_RNA (1)...(19): siRNA sense strand
ccagugaauuucugaguuu

SEQ ID NO: 108686 - RNA, 19 nt, Homo sapiens
  misc_RNA (1)...(19): siRNA sense strand
cagggaacauggaaugaua

SEQ ID NO: 108687 - RNA, 19 nt, Homo sapiens
  misc_RNA (1)...(19): siRNA sense strand
uaagagcgacaaaguauaa

SEQ ID NO: 108688 - RNA, 19 nt, Homo sapiens
  misc_RNA (1)...(19): siRNA sense strand
gagcaucuuuaacagaauu

SEQ ID NO: 108689 - RNA, 19 nt, Homo sapiens
  misc_RNA (1)...(19): siRNA sense strand
ccuggagacuuauuuaauu

SEQ ID NO: 108690 - RNA, 19 nt, Homo sapiens
  misc_RNA (1)...(19): siRNA sense strand
cgacaaaguauaacaaguu

SEQ ID NO: 108691 - RNA, 19 nt, Homo sapiens
  misc_RNA (1)...(19): siRNA sense strand
ggagcaugguauucaagua

SEQ ID NO: 108692 - RNA, 19 nt, Homo sapiens
  misc_RNA (1)...(19): siRNA sense strand
gaagaguguucuaucucaa

SEQ ID NO: 108693 - RNA, 19 nt, Homo sapiens
  misc_RNA (1)...(19): siRNA sense strand
ucaaagaguuucuacuaag

SEQ ID NO: 108694 - RNA, 19 nt, Homo sapiens
  misc_RNA (1)...(19): siRNA sense strand
gagaacugauaagaagaua

SEQ ID NO: 108695 - RNA, 19 nt, Homo sapiens
  misc_RNA (1)...(19): siRNA sense strand
gcucuuuacucagggaaua

SEQ ID NO: 108696 - RNA, 19 nt, Homo sapiens
  misc_RNA (1)...(19): siRNA sense strand
cgggauacauuacuuguug

SEQ ID NO: 108697 - RNA, 19 nt, Homo sapiens
  misc_RNA (1)...(19): siRNA sense strand
ucgauguccucuuauauuu

SEQ ID NO: 108698 - RNA, 19 nt, Homo sapiens
  misc_RNA (1)...(19): siRNA sense strand
agauuuaccuaaccaguuu

SEQ ID NO: 108699 - RNA, 19 nt, Homo sapiens
  misc_RNA (1)...(19): siRNA sense strand
ggaaguaugugaggauugg

SEQ ID NO: 108700 - RNA, 19 nt, Homo sapiens
  misc_RNA (1)...(19): siRNA sense strand
gauaucagaagugcaauaa

SEQ ID NO: 108701 - RNA, 19 nt, Homo sapiens
  misc_RNA (1)...(19): siRNA sense strand
gcaccaacaauuaugauga

SEQ ID NO: 108702 - RNA, 19 nt, Homo sapiens
  misc_RNA (1)...(19): siRNA sense strand
aaacaggguggaucuauuu

SEQ ID NO: 108703 - RNA, 19 nt, Homo sapiens
  misc_RNA (1)...(19): siRNA sense strand
gaugaucugagaacugaua

SEQ ID NO: 108704 - RNA, 19 nt, Homo sapiens
  misc_RNA (1)...(19): siRNA sense strand
ggguggaucuauuuuauua

SEQ ID NO: 108705 - RNA, 19 nt, Homo sapiens
  misc_RNA (1)...(19): siRNA sense strand
uaucagaagugcaauaaac

SEQ ID NO: 108706 - RNA, 19 nt, Homo sapiens
  misc_RNA (1)...(19): siRNA sense strand
ugugagagccagugaauuu

SEQ ID NO: 108707 - RNA, 19 nt, Homo sapiens
  misc_RNA (1)...(19): siRNA sense strand
caaaggagcaugguauuca

SEQ ID NO: 108708 - RNA, 19 nt, Homo sapiens
  misc_RNA (1)...(19): siRNA sense strand
ccggaaaccuggucucuuc

SEQ ID NO: 108709 - RNA, 19 nt, Homo sapiens
  misc_RNA (1)...(19): siRNA sense strand
gaagcgacacuuuggaaga

SEQ ID NO: 108710 - RNA, 19 nt, Homo sapiens
  misc_RNA (1)...(19): siRNA sense strand
cgagaggugugaugcauuc

SEQ ID NO: 108711 - RNA, 19 nt, Homo sapiens
  misc_RNA (1)...(19): siRNA sense strand
cagaugcugugcugucaaa

SEQ ID NO: 108712 - RNA, 19 nt, Homo sapiens
  misc_RNA (1)...(19): siRNA sense strand
caccaacaauuaugaugaa

SEQ ID NO: 108713 - RNA, 19 nt, Homo sapiens
  misc_RNA (1)...(19): siRNA sense strand
gaacgggauacauuacuug

SEQ ID NO: 108714 - RNA, 19 nt, Homo sapiens
  misc_RNA (1)...(19): siRNA sense strand
gaucugagaacugauaaga

SEQ ID NO: 108715 - RNA, 19 nt, Homo sapiens
  misc_RNA (1)...(19): siRNA sense strand
uaacaagaauggaggaaaa

SEQ ID NO: 108716 - RNA, 19 nt, Homo sapiens
  misc_RNA (1)...(19): siRNA sense strand
caaguacaagaguggauua

SEQ ID NO: 108717 - RNA, 19 nt, Homo sapiens
  misc_RNA (1)...(19): siRNA sense strand
gaaaccuggucucuuccuu

SEQ ID NO: 108718 - RNA, 19 nt, Homo sapiens
  misc_RNA (1)...(19): siRNA sense strand
guuauuguuucccaaagaa

SEQ ID NO: 108719 - RNA, 19 nt, Homo sapiens
  misc_RNA (1)...(19): siRNA sense strand
uacaugaaguucuaaggaa

SEQ ID NO: 108720 - RNA, 19 nt, Homo sapiens
  misc_RNA (1)...(19): siRNA sense strand
ucugagaacugauaagaag

SEQ ID NO: 108721 - RNA, 19 nt, Homo sapiens
  misc_RNA (1)...(19): siRNA sense strand
aauacacgcucuuuacuca

SEQ ID NO: 108722 - RNA, 19 nt, Homo sapiens
  misc_RNA (1)...(19): siRNA sense strand
caacuuacggccaaggaaa

SEQ ID NO: 108723 - RNA, 19 nt, Homo sapiens
  misc_RNA (1)...(19): siRNA sense strand
caaagaaauucaggaagag

SEQ ID NO: 108724 - RNA, 19 nt, Homo sapiens
  misc_RNA (1)...(19): siRNA sense strand
ggagguaguagaaauguca

SEQ ID NO: 108725 - RNA, 19 nt, Homo sapiens
  misc_RNA (1)...(19): siRNA sense strand
gccagugaauuucugaguu

SEQ ID NO: 108726 - RNA, 19 nt, Homo sapiens
  misc_RNA (1)...(19): siRNA sense strand
uacaaaugcuuggagauga

SEQ ID NO: 108727 - RNA, 19 nt, Homo sapiens
  misc_RNA (1)...(19): siRNA sense strand
ugaacuugcugugcauaaa

SEQ ID NO: 108728 - RNA, 19 nt, Homo sapiens
  misc_RNA (1)...(19): siRNA sense strand
ccucucauuuaucagaaua

SEQ ID NO: 108729 - RNA, 19 nt, Homo sapiens
  misc_RNA (1)...(19): siRNA sense strand
caagagguccaagcuauug

SEQ ID NO: 108730 - RNA, 19 nt, Homo sapiens
  misc_RNA (1)...(19): siRNA sense strand
ucgggauucucauacuuua

SEQ ID NO: 108731 - RNA, 19 nt, Homo sapiens
  misc_RNA (1)...(19): siRNA sense strand
gguuauuguuucccaaaga

SEQ ID NO: 108732 - RNA, 19 nt, Homo sapiens
  misc_RNA (1)...(19): siRNA sense strand
gccauaccuugcucuacua

SEQ ID NO: 108733 - RNA, 19 nt, Homo sapiens
  misc_RNA (1)...(19): siRNA sense strand
caaggaggaggaucaaguu

SEQ ID NO: 108734 - RNA, 19 nt, Homo sapiens
  misc_RNA (1)...(19): siRNA sense strand
ugugaugcauuccaacaaa

SEQ ID NO: 108735 - RNA, 19 nt, Homo sapiens
  misc_RNA (1)...(19): siRNA sense strand
gaggugugaugcauuccaa

SEQ ID NO: 108736 - RNA, 19 nt, Homo sapiens
  misc_RNA (1)...(19): siRNA sense strand
aaagauguuucucuguuuc

SEQ ID NO: 108737 - RNA, 19 nt, Homo sapiens
  misc_RNA (1)...(19): siRNA sense strand
gggauguucuggugauauc

SEQ ID NO: 108738 - RNA, 19 nt, Homo sapiens
  misc_RNA (1)...(19): siRNA sense strand
ugacaaaacuucucuagag

SEQ ID NO: 108739 - RNA, 19 nt, Homo sapiens
  misc_RNA (1)...(19): siRNA sense strand
caggaagaguguucuaucu

SEQ ID NO: 108740 - RNA, 19 nt, Homo sapiens
  misc_RNA (1)...(19): siRNA sense strand
ugaacgggauacauuacuu

SEQ ID NO: 108741 - RNA, 19 nt, Homo sapiens
  misc_RNA (1)...(19): siRNA sense strand
ggugauaucagaagugcaa

SEQ ID NO: 108742 - RNA, 19 nt, Homo sapiens
  misc_RNA (1)...(19): siRNA sense strand
agauaauucugguugaaga

SEQ ID NO: 108743 - RNA, 19 nt, Homo sapiens
  misc_RNA (1)...(19): siRNA sense strand
aaaggagcaugguauucaa

SEQ ID NO: 108744 - RNA, 19 nt, Homo sapiens
  misc_RNA (1)...(19): siRNA sense strand
aauaugaacgggauacauu

SEQ ID NO: 108745 - RNA, 19 nt, Homo sapiens
  misc_RNA (1)...(19): siRNA sense strand
cuauagaagcuaacaagaa

SEQ ID NO: 108746 - RNA, 19 nt, Homo sapiens
  misc_RNA (1)...(19): siRNA sense strand
cgauguccucuuauauuua

SEQ ID NO: 108747 - RNA, 19 nt, Homo sapiens
  misc_RNA (1)...(19): siRNA sense strand
auuggucgauguccucuua

SEQ ID NO: 108748 - RNA, 19 nt, Homo sapiens
  misc_RNA (1)...(19): siRNA sense strand
gaaguucuaaggaaguaug

SEQ ID NO: 108749 - RNA, 19 nt, Homo sapiens
  misc_RNA (1)...(19): siRNA sense strand
ccuguggcaccaacaauua

SEQ ID NO: 108750 - RNA, 19 nt, Homo sapiens
  misc_RNA (1)...(19): siRNA sense strand
gcgacacuuuggaagauug

SEQ ID NO: 108751 - RNA, 19 nt, Homo sapiens
  misc_RNA (1)...(19): siRNA sense strand
ggaggaggaucaaguuuuc

SEQ ID NO: 108752 - RNA, 19 nt, Homo sapiens
  misc_RNA (1)...(19): siRNA sense strand
gggauacauuacuuguuga

SEQ ID NO: 108753 - RNA, 19 nt, Homo sapiens
  misc_RNA (1)...(19): siRNA sense strand
uaucaaaggagcaugguau

SEQ ID NO: 108754 - RNA, 19 nt, Homo sapiens
  misc_RNA (1)...(19): siRNA sense strand
aaucaagcuuccauauguu

SEQ ID NO: 108755 - RNA, 19 nt, Homo sapiens
  misc_RNA (1)...(19): siRNA sense strand
caccaaaacuacauagauu

SEQ ID NO: 108756 - RNA, 19 nt, Homo sapiens
  misc_RNA (1)...(19): siRNA sense strand
caauaaacagccuccaguu

SEQ ID NO: 108757 - RNA, 19 nt, Homo sapiens
  misc_RNA (1)...(19): siRNA sense strand
gagcgacaaaguauaacaa

SEQ ID NO: 108758 - RNA, 19 nt, Homo sapiens
  misc_RNA (1)...(19): siRNA sense strand
ccaaggagacauggaagaa

SEQ ID NO: 108759 - RNA, 19 nt, Homo sapiens
  misc_RNA (1)...(19): siRNA sense strand
gaauacacgcucuuuacuc

SEQ ID NO: 108760 - RNA, 19 nt, Homo sapiens
  misc_RNA (1)...(19): siRNA sense strand
caguggagauaauaaucaa

SEQ ID NO: 108761 - RNA, 19 nt, Homo sapiens
  misc_RNA (1)...(19): siRNA sense strand
gcgacaaaguauaacaagu

SEQ ID NO: 108762 - RNA, 19 nt, Homo sapiens
  misc_RNA (1)...(19): siRNA sense strand
gcaugguauucaaguacaa

SEQ ID NO: 108763 - RNA, 19 nt, Homo sapiens
  misc_RNA (1)...(19): siRNA sense strand
ugacagggaacauggaaug

SEQ ID NO: 108764 - RNA, 19 nt, Homo sapiens
  misc_RNA (1)...(19): siRNA sense strand
ggaauacacgcucuuuacu

SEQ ID NO: 108765 - RNA, 19 nt, Homo sapiens
  misc_RNA (1)...(19): siRNA sense strand
ucgguugcccucucauuua

SEQ ID NO: 108766 - RNA, 19 nt, Homo sapiens
  misc_RNA (1)...(19): siRNA sense strand
gagagccagugaauuucug

SEQ ID NO: 108767 - RNA, 19 nt, Homo sapiens
  misc_RNA (1)...(19): siRNA sense strand
aaaaguaucgggaaaauug

SEQ ID NO: 108768 - RNA, 19 nt, Homo sapiens
  misc_RNA (1)...(19): siRNA sense strand
gcaugaacuugcugugcau

SEQ ID NO: 108769 - RNA, 19 nt, Homo sapiens
  misc_RNA (1)...(19): siRNA sense strand
gaaucaagcuuccauaugu

SEQ ID NO: 108770 - RNA, 19 nt, Homo sapiens
  misc_RNA (1)...(19): siRNA sense strand
gcaaagauguuucucuguu

SEQ ID NO: 108771 - RNA, 19 nt, Homo sapiens
  misc_RNA (1)...(19): siRNA sense strand
acacaugccuggagacuua

SEQ ID NO: 108772 - RNA, 19 nt, Homo sapiens
  misc_RNA (1)...(19): siRNA sense strand
caacaaagcccgaggauau

SEQ ID NO: 108773 - RNA, 19 nt, Homo sapiens
  misc_RNA (1)...(19): siRNA sense strand
ccaaagaaauucaggaaga

SEQ ID NO: 108774 - RNA, 19 nt, Homo sapiens
  misc_RNA (1)...(19): siRNA sense strand
cuacauagauuucuucaug

SEQ ID NO: 108775 - RNA, 19 nt, Homo sapiens
  misc_RNA (1)...(19): siRNA sense strand
ggaaauugaugauauugug

SEQ ID NO: 108776 - RNA, 19 nt, Homo sapiens
  misc_RNA (1)...(19): siRNA sense strand
aaacucagcuauugccaua

SEQ ID NO: 108777 - RNA, 19 nt, Homo sapiens
  misc_RNA (1)...(19): siRNA sense strand
gaagauaauucugguugaa

SEQ ID NO: 108778 - RNA, 19 nt, Homo sapiens
  misc_RNA (1)...(19): siRNA sense strand
caaagauguuucucuguuu

SEQ ID NO: 108779 - RNA, 19 nt, Homo sapiens
  misc_RNA (1)...(19): siRNA sense strand
guacaagaguggauuaauc

SEQ ID NO: 108780 - RNA, 19 nt, Homo sapiens
  misc_RNA (1)...(19): siRNA sense strand
ggaagaguguucuaucuca

SEQ ID NO: 108781 - RNA, 19 nt, Homo sapiens
  misc_RNA (1)...(19): siRNA sense strand
gaaagacaacgaccuuaaa

SEQ ID NO: 108782 - RNA, 19 nt, Homo sapiens
  misc_RNA (1)...(19): siRNA sense strand
ggaaagacaacgaccuuaa

SEQ ID NO: 108783 - RNA, 19 nt, Homo sapiens
  misc_RNA (1)...(19): siRNA sense strand
caaagaguuucuacuaaga

SEQ ID NO: 108784 - RNA, 19 nt, Homo sapiens
  misc_RNA (1)...(19): siRNA sense strand
ccucagugguuucuaauaa

SEQ ID NO: 108785 - RNA, 19 nt, Homo sapiens
  misc_RNA (1)...(19): siRNA sense strand
ccagugaauuucugaguuu

SEQ ID NO: 108786 - RNA, 19 nt, Homo sapiens
  misc_RNA (1)...(19): siRNA sense strand
cagggaacauggaaugaua

SEQ ID NO: 108787 - RNA, 19 nt, Homo sapiens
  misc_RNA (1)...(19): siRNA sense strand
uaagagcgacaaaguauaa

SEQ ID NO: 108788 - RNA, 19 nt, Homo sapiens
  misc_RNA (1)...(19): siRNA sense strand
gagcaucuuuaacagaauu

SEQ ID NO: 108789 - RNA, 19 nt, Homo sapiens
  misc_RNA (1)...(19): siRNA sense strand
ccuggagacuuauuuaauu

SEQ ID NO: 108790 - RNA, 19 nt, Homo sapiens
  misc_RNA (1)...(19): siRNA sense strand
cgacaaaguauaacaaguu

SEQ ID NO: 108791 - RNA, 19 nt, Homo sapiens
  misc_RNA (1)...(19): siRNA sense strand
ggagcaugguauucaagua

SEQ ID NO: 108792 - RNA, 19 nt, Homo sapiens
  misc_RNA (1)...(19): siRNA sense strand
gaagaguguucuaucucaa

SEQ ID NO: 108793 - RNA, 19 nt, Homo sapiens
  misc_RNA (1)...(19): siRNA sense strand
ucaaagaguuucuacuaag

SEQ ID NO: 108794 - RNA, 19 nt, Homo sapiens
  misc_RNA (1)...(19): siRNA sense strand
gagaacugauaagaagaua

SEQ ID NO: 108795 - RNA, 19 nt, Homo sapiens
  misc_RNA (1)...(19): siRNA sense strand
gcucuuuacucagggaaua

SEQ ID NO: 108796 - RNA, 19 nt, Homo sapiens
  misc_RNA (1)...(19): siRNA sense strand
cgggauacauuacuuguug

SEQ ID NO: 108797 - RNA, 19 nt, Homo sapiens
  misc_RNA (1)...(19): siRNA sense strand
ucgauguccucuuauauuu

SEQ ID NO: 108798 - RNA, 19 nt, Homo sapiens
  misc_RNA (1)...(19): siRNA sense strand
agauuuaccuaaccaguuu

SEQ ID NO: 108799 - RNA, 19 nt, Homo sapiens
  misc_RNA (1)...(19): siRNA sense strand
ggaaguaugugaggauugg

SEQ ID NO: 108800 - RNA, 19 nt, Homo sapiens
  misc_RNA (1)...(19): siRNA sense strand
gauaucagaagugcaauaa

SEQ ID NO: 108801 - RNA, 19 nt, Homo sapiens
  misc_RNA (1)...(19): siRNA sense strand
gcaccaacaauuaugauga

SEQ ID NO: 108802 - RNA, 19 nt, Homo sapiens
  misc_RNA (1)...(19): siRNA sense strand
aaacaggguggaucuauuu

SEQ ID NO: 108803 - RNA, 19 nt, Homo sapiens
  misc_RNA (1)...(19): siRNA sense strand
gaugaucugagaacugaua

SEQ ID NO: 108804 - RNA, 19 nt, Homo sapiens
  misc_RNA (1)...(19): siRNA sense strand
ggguggaucuauuuuauua

SEQ ID NO: 108805 - RNA, 19 nt, Homo sapiens
  misc_RNA (1)...(19): siRNA sense strand
uaucagaagugcaauaaac

SEQ ID NO: 108806 - RNA, 19 nt, Homo sapiens
  misc_RNA (1)...(19): siRNA sense strand
ugugagagccagugaauuu

SEQ ID NO: 108807 - RNA, 19 nt, Homo sapiens
  misc_RNA (1)...(19): siRNA sense strand
caaaggagcaugguauuca

SEQ ID NO: 108808 - RNA, 19 nt, Homo sapiens
  misc_RNA (1)...(19): siRNA sense strand
ccggaaaccuggucucuuc

SEQ ID NO: 108809 - RNA, 19 nt, Homo sapiens
  misc_RNA (1)...(19): siRNA sense strand
gaagcgacacuuuggaaga

SEQ ID NO: 108810 - RNA, 19 nt, Homo sapiens
  misc_RNA (1)...(19): siRNA sense strand
cgagaggugugaugcauuc

SEQ ID NO: 108811 - RNA, 19 nt, Homo sapiens
  misc_RNA (1)...(19): siRNA sense strand
cagaugcugugcugucaaa

SEQ ID NO: 108812 - RNA, 19 nt, Homo sapiens
  misc_RNA (1)...(19): siRNA sense strand
caccaacaauuaugaugaa

SEQ ID NO: 108813 - RNA, 19 nt, Homo sapiens
  misc_RNA (1)...(19): siRNA sense strand
gaacgggauacauuacuug

SEQ ID NO: 108814 - RNA, 19 nt, Homo sapiens
  misc_RNA (1)...(19): siRNA sense strand
gaucugagaacugauaaga

SEQ ID NO: 108815 - RNA, 19 nt, Homo sapiens
  misc_RNA (1)...(19): siRNA sense strand
uaacaagaauggaggaaaa

SEQ ID NO: 108816 - RNA, 19 nt, Homo sapiens
  misc_RNA (1)...(19): siRNA sense strand
caaguacaagaguggauua

SEQ ID NO: 108817 - RNA, 19 nt, Homo sapiens
  misc_RNA (1)...(19): siRNA sense strand
gaaaccuggucucuuccuu

SEQ ID NO: 108818 - RNA, 19 nt, Homo sapiens
  misc_RNA (1)...(19): siRNA sense strand
guuauuguuucccaaagaa

SEQ ID NO: 108819 - RNA, 19 nt, Homo sapiens
  misc_RNA (1)...(19): siRNA sense strand
uacaugaaguucuaaggaa

SEQ ID NO: 108820 - RNA, 19 nt, Homo sapiens
  misc_RNA (1)...(19): siRNA sense strand
ucugagaacugauaagaag

SEQ ID NO: 108821 - RNA, 19 nt, Homo sapiens
  misc_RNA (1)...(19): siRNA sense strand
aauacacgcucuuuacuca

SEQ ID NO: 108822 - RNA, 19 nt, Homo sapiens
  misc_RNA (1)...(19): siRNA sense strand
caacuuacggccaaggaaa

SEQ ID NO: 108823 - RNA, 19 nt, Homo sapiens
  misc_RNA (1)...(19): siRNA sense strand
caaagaaauucaggaagag

SEQ ID NO: 108824 - RNA, 19 nt, Homo sapiens
  misc_RNA (1)...(19): siRNA sense strand
ggagguaguagaaauguca

SEQ ID NO: 108825 - RNA, 19 nt, Homo sapiens
  misc_RNA (1)...(19): siRNA sense strand
gccagugaauuucugaguu

SEQ ID NO: 108826 - RNA, 19 nt, Homo sapiens
  misc_RNA (1)...(19): siRNA sense strand
uacaaaugcuuggagauga

SEQ ID NO: 108827 - RNA, 19 nt, Homo sapiens
  misc_RNA (1)...(19): siRNA sense strand
ugaacuugcugugcauaaa

SEQ ID NO: 108828 - RNA, 19 nt, Homo sapiens
  misc_RNA (1)...(19): siRNA sense strand
ccucucauuuaucagaaua

SEQ ID NO: 108829 - RNA, 19 nt, Homo sapiens
  misc_RNA (1)...(19): siRNA sense strand
caagagguccaagcuauug

SEQ ID NO: 108830 - RNA, 19 nt, Homo sapiens
  misc_RNA (1)...(19): siRNA sense strand
ucgggauucucauacuuua

SEQ ID NO: 108831 - RNA, 19 nt, Homo sapiens
  misc_RNA (1)...(19): siRNA sense strand
gguuauuguuucccaaaga

SEQ ID NO: 108832 - RNA, 19 nt, Homo sapiens
  misc_RNA (1)...(19): siRNA sense strand
gccauaccuugcucuacua

SEQ ID NO: 108833 - RNA, 19 nt, Homo sapiens
  misc_RNA (1)...(19): siRNA sense strand
caaggaggaggaucaaguu

SEQ ID NO: 108834 - RNA, 19 nt, Homo sapiens
  misc_RNA (1)...(19): siRNA sense strand
ugugaugcauuccaacaaa

SEQ ID NO: 108835 - RNA, 19 nt, Homo sapiens
  misc_RNA (1)...(19): siRNA sense strand
gaggugugaugcauuccaa

SEQ ID NO: 108836 - RNA, 19 nt, Homo sapiens
  misc_RNA (1)...(19): siRNA sense strand
aaagauguuucucuguuuc

SEQ ID NO: 108837 - RNA, 19 nt, Homo sapiens
  misc_RNA (1)...(19): siRNA sense strand
gggauguucuggugauauc

SEQ ID NO: 108838 - RNA, 19 nt, Homo sapiens
  misc_RNA (1)...(19): siRNA sense strand
ugacaaaacuucucuagag

SEQ ID NO: 108839 - RNA, 19 nt, Homo sapiens
  misc_RNA (1)...(19): siRNA sense strand
caggaagaguguucuaucu

SEQ ID NO: 108840 - RNA, 19 nt, Homo sapiens
  misc_RNA (1)...(19): siRNA sense strand
ugaacgggauacauuacuu

SEQ ID NO: 108841 - RNA, 19 nt, Homo sapiens
  misc_RNA (1)...(19): siRNA sense strand
ggugauaucagaagugcaa

SEQ ID NO: 108842 - RNA, 19 nt, Homo sapiens
  misc_RNA (1)...(19): siRNA sense strand
agauaauucugguugaaga

SEQ ID NO: 108843 - RNA, 19 nt, Homo sapiens
  misc_RNA (1)...(19): siRNA sense strand
aaaggagcaugguauucaa

SEQ ID NO: 108844 - RNA, 19 nt, Homo sapiens
  misc_RNA (1)...(19): siRNA sense strand
aauaugaacgggauacauu

SEQ ID NO: 108845 - RNA, 19 nt, Homo sapiens
  misc_RNA (1)...(19): siRNA sense strand
cuauagaagcuaacaagaa

SEQ ID NO: 108846 - RNA, 19 nt, Homo sapiens
  misc_RNA (1)...(19): siRNA sense strand
cgauguccucuuauauuua

SEQ ID NO: 108847 - RNA, 19 nt, Homo sapiens
  misc_RNA (1)...(19): siRNA sense strand
auuggucgauguccucuua

SEQ ID NO: 108848 - RNA, 19 nt, Homo sapiens
  misc_RNA (1)...(19): siRNA sense strand
gaaguucuaaggaaguaug

SEQ ID NO: 108849 - RNA, 19 nt, Homo sapiens
  misc_RNA (1)...(19): siRNA sense strand
ccuguggcaccaacaauua

SEQ ID NO: 108850 - RNA, 19 nt, Homo sapiens
  misc_RNA (1)...(19): siRNA sense strand
gcgacacuuuggaagauug

SEQ ID NO: 108851 - RNA, 19 nt, Homo sapiens
  misc_RNA (1)...(19): siRNA sense strand
ggaggaggaucaaguuuuc

SEQ ID NO: 108852 - RNA, 19 nt, Homo sapiens
  misc_RNA (1)...(19): siRNA sense strand
gggauacauuacuuguuga

SEQ ID NO: 108853 - RNA, 19 nt, Homo sapiens
  misc_RNA (1)...(19): siRNA sense strand
uaucaaaggagcaugguau

SEQ ID NO: 108854 - RNA, 19 nt, Homo sapiens
  misc_RNA (1)...(19): siRNA sense strand
aaucaagcuuccauauguu

SEQ ID NO: 108855 - RNA, 19 nt, Homo sapiens
  misc_RNA (1)...(19): siRNA sense strand
caccaaaacuacauagauu

SEQ ID NO: 108856 - RNA, 19 nt, Homo sapiens
  misc_RNA (1)...(19): siRNA sense strand
caauaaacagccuccaguu

SEQ ID NO: 108857 - RNA, 19 nt, Homo sapiens
  misc_RNA (1)...(19): siRNA sense strand
gagcgacaaaguauaacaa

SEQ ID NO: 108858 - RNA, 19 nt, Homo sapiens
  misc_RNA (1)...(19): siRNA sense strand
ccaaggagacauggaagaa

SEQ ID NO: 108859 - RNA, 19 nt, Homo sapiens
  misc_RNA (1)...(19): siRNA sense strand
gaauacacgcucuuuacuc

SEQ ID NO: 108860 - RNA, 19 nt, Homo sapiens
  misc_RNA (1)...(19): siRNA sense strand
caguggagauaauaaucaa

SEQ ID NO: 108861 - RNA, 19 nt, Homo sapiens
  misc_RNA (1)...(19): siRNA sense strand
gcgacaaaguauaacaagu

SEQ ID NO: 108862 - RNA, 19 nt, Homo sapiens
  misc_RNA (1)...(19): siRNA sense strand
gcaugguauucaaguacaa

SEQ ID NO: 108863 - RNA, 19 nt, Homo sapiens
  misc_RNA (1)...(19): siRNA sense strand
ugacagggaacauggaaug

SEQ ID NO: 108864 - RNA, 19 nt, Homo sapiens
  misc_RNA (1)...(19): siRNA sense strand
ggaauacacgcucuuuacu

SEQ ID NO: 108865 - RNA, 19 nt, Homo sapiens
  misc_RNA (1)...(19): siRNA sense strand
ucgguugcccucucauuua

SEQ ID NO: 108866 - RNA, 19 nt, Homo sapiens
  misc_RNA (1)...(19): siRNA sense strand
gagagccagugaauuucug

SEQ ID NO: 108867 - RNA, 19 nt, Homo sapiens
  misc_RNA (1)...(19): siRNA sense strand
aaaaguaucgggaaaauug

SEQ ID NO: 108868 - RNA, 19 nt, Homo sapiens
  misc_RNA (1)...(19): siRNA sense strand
gcaugaacuugcugugcau

SEQ ID NO: 108869 - RNA, 19 nt, Homo sapiens
  misc_RNA (1)...(19): siRNA sense strand
gaaucaagcuuccauaugu

SEQ ID NO: 108870 - RNA, 19 nt, Homo sapiens
  misc_RNA (1)...(19): siRNA sense strand
gcaaagauguuucucuguu

SEQ ID NO: 108871 - RNA, 19 nt, Homo sapiens
  misc_RNA (1)...(19): siRNA sense strand
acacaugccuggagacuua

SEQ ID NO: 108872 - RNA, 19 nt, Homo sapiens
  misc_RNA (1)...(19): siRNA sense strand
caacaaagcccgaggauau

SEQ ID NO: 108873 - RNA, 19 nt, Homo sapiens
  misc_RNA (1)...(19): siRNA sense strand
ccaaagaaauucaggaaga

SEQ ID NO: 108874 - RNA, 19 nt, Homo sapiens
  misc_RNA (1)...(19): siRNA sense strand
cuacauagauuucuucaug

SEQ ID NO: 108875 - RNA, 19 nt, Homo sapiens
  misc_RNA (1)...(19): siRNA sense strand
ggaaauugaugauauugug

SEQ ID NO: 108876 - RNA, 19 nt, Homo sapiens
  misc_RNA (1)...(19): siRNA sense strand
aaacucagcuauugccaua

SEQ ID NO: 108877 - RNA, 19 nt, Homo sapiens
  misc_RNA (1)...(19): siRNA sense strand
gaagauaauucugguugaa

SEQ ID NO: 108878 - RNA, 19 nt, Homo sapiens
  misc_RNA (1)...(19): siRNA sense strand
caaagauguuucucuguuu

SEQ ID NO: 108879 - RNA, 19 nt, Homo sapiens
  misc_RNA (1)...(19): siRNA sense strand
guacaagaguggauuaauc

SEQ ID NO: 108880 - RNA, 19 nt, Homo sapiens
  misc_RNA (1)...(19): siRNA sense strand
ggaagaguguucuaucuca

SEQ ID NO: 108881 - RNA, 19 nt, Homo sapiens
  misc_RNA (1)...(19): siRNA sense strand
gaaagacaacgaccuuaaa

SEQ ID NO: 108882 - RNA, 19 nt, Homo sapiens
  misc_RNA (1)...(19): siRNA sense strand
ggaaagacaacgaccuuaa

SEQ ID NO: 108883 - RNA, 19 nt, Homo sapiens
  misc_RNA (1)...(19): siRNA sense strand
caaagaguuucuacuaaga

SEQ ID NO: 108884 - RNA, 19 nt, Homo sapiens
  misc_RNA (1)...(19): siRNA sense strand
ccucagugguuucuaauaa

SEQ ID NO: 108885 - RNA, 19 nt, Homo sapiens
  misc_RNA (1)...(19): siRNA sense strand
ccagugaauuucugaguuu

SEQ ID NO: 108886 - RNA, 19 nt, Homo sapiens
  misc_RNA (1)...(19): siRNA sense strand
cagggaacauggaaugaua

SEQ ID NO: 108887 - RNA, 19 nt, Homo sapiens
  misc_RNA (1)...(19): siRNA sense strand
uaagagcgacaaaguauaa

SEQ ID NO: 108888 - RNA, 19 nt, Homo sapiens
  misc_RNA (1)...(19): siRNA sense strand
gagcaucuuuaacagaauu

SEQ ID NO: 108889 - RNA, 19 nt, Homo sapiens
  misc_RNA (1)...(19): siRNA sense strand
ccuggagacuuauuuaauu

SEQ ID NO: 108890 - RNA, 19 nt, Homo sapiens
  misc_RNA (1)...(19): siRNA sense strand
cgacaaaguauaacaaguu

SEQ ID NO: 108891 - RNA, 19 nt, Homo sapiens
  misc_RNA (1)...(19): siRNA sense strand
ggagcaugguauucaagua

SEQ ID NO: 108892 - RNA, 19 nt, Homo sapiens
  misc_RNA (1)...(19): siRNA sense strand
gaagaguguucuaucucaa

SEQ ID NO: 108893 - RNA, 19 nt, Homo sapiens
  misc_RNA (1)...(19): siRNA sense strand
ucaaagaguuucuacuaag

SEQ ID NO: 108894 - RNA, 19 nt, Homo sapiens
  misc_RNA (1)...(19): siRNA sense strand
gagaacugauaagaagaua

SEQ ID NO: 108895 - RNA, 19 nt, Homo sapiens
  misc_RNA (1)...(19): siRNA sense strand
gcucuuuacucagggaaua

SEQ ID NO: 108896 - RNA, 19 nt, Homo sapiens
  misc_RNA (1)...(19): siRNA sense strand
cgggauacauuacuuguug

SEQ ID NO: 108897 - RNA, 19 nt, Homo sapiens
  misc_RNA (1)...(19): siRNA sense strand
ucgauguccucuuauauuu

SEQ ID NO: 108898 - RNA, 19 nt, Homo sapiens
  misc_RNA (1)...(19): siRNA sense strand
agauuuaccuaaccaguuu

SEQ ID NO: 108899 - RNA, 19 nt, Homo sapiens
  misc_RNA (1)...(19): siRNA sense strand
ggaaguaugugaggauugg

SEQ ID NO: 108900 - RNA, 19 nt, Homo sapiens
  misc_RNA (1)...(19): siRNA sense strand
gauaucagaagugcaauaa

SEQ ID NO: 108901 - RNA, 19 nt, Homo sapiens
  misc_RNA (1)...(19): siRNA sense strand
gcaccaacaauuaugauga

SEQ ID NO: 108902 - RNA, 19 nt, Homo sapiens
  misc_RNA (1)...(19): siRNA sense strand
aaacaggguggaucuauuu

SEQ ID NO: 108903 - RNA, 19 nt, Homo sapiens
  misc_RNA (1)...(19): siRNA sense strand
gaugaucugagaacugaua

SEQ ID NO: 108904 - RNA, 19 nt, Homo sapiens
  misc_RNA (1)...(19): siRNA sense strand
ggguggaucuauuuuauua

SEQ ID NO: 108905 - RNA, 19 nt, Homo sapiens
  misc_RNA (1)...(19): siRNA sense strand
uaucagaagugcaauaaac

SEQ ID NO: 108906 - RNA, 19 nt, Homo sapiens
  misc_RNA (1)...(19): siRNA sense strand
ugugagagccagugaauuu

SEQ ID NO: 108907 - RNA, 19 nt, Homo sapiens
  misc_RNA (1)...(19): siRNA sense strand
caaaggagcaugguauuca

SEQ ID NO: 108908 - RNA, 19 nt, Homo sapiens
  misc_RNA (1)...(19): siRNA sense strand
ccggaaaccuggucucuuc

SEQ ID NO: 108909 - RNA, 19 nt, Homo sapiens
  misc_RNA (1)...(19): siRNA sense strand
gaagcgacacuuuggaaga

SEQ ID NO: 108910 - RNA, 19 nt, Homo sapiens
  misc_RNA (1)...(19): siRNA sense strand
cgagaggugugaugcauuc

SEQ ID NO: 108911 - RNA, 19 nt, Homo sapiens
  misc_RNA (1)...(19): siRNA sense strand
cagaugcugugcugucaaa

SEQ ID NO: 108912 - RNA, 19 nt, Homo sapiens
  misc_RNA (1)...(19): siRNA sense strand
caccaacaauuaugaugaa

SEQ ID NO: 108913 - RNA, 19 nt, Homo sapiens
  misc_RNA (1)...(19): siRNA sense strand
gaacgggauacauuacuug

SEQ ID NO: 108914 - RNA, 19 nt, Homo sapiens
  misc_RNA (1)...(19): siRNA sense strand
gaucugagaacugauaaga

SEQ ID NO: 108915 - RNA, 19 nt, Homo sapiens
  misc_RNA (1)...(19): siRNA sense strand
uaacaagaauggaggaaaa

SEQ ID NO: 108916 - RNA, 19 nt, Homo sapiens
  misc_RNA (1)...(19): siRNA sense strand
caaguacaagaguggauua

SEQ ID NO: 108917 - RNA, 19 nt, Homo sapiens
  misc_RNA (1)...(19): siRNA sense strand
gaaaccuggucucuuccuu

SEQ ID NO: 108918 - RNA, 19 nt, Homo sapiens
  misc_RNA (1)...(19): siRNA sense strand
guuauuguuucccaaagaa

SEQ ID NO: 108919 - RNA, 19 nt, Homo sapiens
  misc_RNA (1)...(19): siRNA sense strand
uacaugaaguucuaaggaa

SEQ ID NO: 108920 - RNA, 19 nt, Homo sapiens
  misc_RNA (1)...(19): siRNA sense strand
ucugagaacugauaagaag

SEQ ID NO: 108921 - RNA, 19 nt, Homo sapiens
  misc_RNA (1)...(19): siRNA sense strand
aauacacgcucuuuacuca

SEQ ID NO: 108922 - RNA, 19 nt, Homo sapiens
  misc_RNA (1)...(19): siRNA sense strand
caacuuacggccaaggaaa

SEQ ID NO: 108923 - RNA, 19 nt, Homo sapiens
  misc_RNA (1)...(19): siRNA sense strand
caaagaaauucaggaagag

SEQ ID NO: 108924 - RNA, 19 nt, Homo sapiens
  misc_RNA (1)...(19): siRNA sense strand
ggagguaguagaaauguca

SEQ ID NO: 108925 - RNA, 19 nt, Homo sapiens
  misc_RNA (1)...(19): siRNA sense strand
gccagugaauuucugaguu

SEQ ID NO: 108926 - RNA, 19 nt, Homo sapiens
  misc_RNA (1)...(19): siRNA sense strand
uacaaaugcuuggagauga

SEQ ID NO: 108927 - RNA, 19 nt, Homo sapiens
  misc_RNA (1)...(19): siRNA sense strand
ugaacuugcugugcauaaa

SEQ ID NO: 108928 - RNA, 19 nt, Homo sapiens
  misc_RNA (1)...(19): siRNA sense strand
ccucucauuuaucagaaua

SEQ ID NO: 108929 - RNA, 19 nt, Homo sapiens
  misc_RNA (1)...(19): siRNA sense strand
caagagguccaagcuauug

SEQ ID NO: 108930 - RNA, 19 nt, Homo sapiens
  misc_RNA (1)...(19): siRNA sense strand
ucgggauucucauacuuua

SEQ ID NO: 108931 - RNA, 19 nt, Homo sapiens
  misc_RNA (1)...(19): siRNA sense strand
gguuauuguuucccaaaga

SEQ ID NO: 108932 - RNA, 19 nt, Homo sapiens
  misc_RNA (1)...(19): siRNA sense strand
gccauaccuugcucuacua

SEQ ID NO: 108933 - RNA, 19 nt, Homo sapiens
  misc_RNA (1)...(19): siRNA sense strand
caaggaggaggaucaaguu

SEQ ID NO: 108934 - RNA, 19 nt, Homo sapiens
  misc_RNA (1)...(19): siRNA sense strand
ugugaugcauuccaacaaa

SEQ ID NO: 108935 - RNA, 19 nt, Homo sapiens
  misc_RNA (1)...(19): siRNA sense strand
gaggugugaugcauuccaa

SEQ ID NO: 108936 - RNA, 19 nt, Homo sapiens
  misc_RNA (1)...(19): siRNA sense strand
aaagauguuucucuguuuc

SEQ ID NO: 108937 - RNA, 19 nt, Homo sapiens
  misc_RNA (1)...(19): siRNA sense strand
gggauguucuggugauauc

SEQ ID NO: 108938 - RNA, 19 nt, Homo sapiens
  misc_RNA (1)...(19): siRNA sense strand
ugacaaaacuucucuagag

SEQ ID NO: 108939 - RNA, 19 nt, Homo sapiens
  misc_RNA (1)...(19): siRNA sense strand
caggaagaguguucuaucu

SEQ ID NO: 108940 - RNA, 19 nt, Homo sapiens
  misc_RNA (1)...(19): siRNA sense strand
ugaacgggauacauuacuu

SEQ ID NO: 108941 - RNA, 19 nt, Homo sapiens
  misc_RNA (1)...(19): siRNA sense strand
ggugauaucagaagugcaa

SEQ ID NO: 108942 - RNA, 19 nt, Homo sapiens
  misc_RNA (1)...(19): siRNA sense strand
agauaauucugguugaaga

SEQ ID NO: 108943 - RNA, 19 nt, Homo sapiens
  misc_RNA (1)...(19): siRNA sense strand
aaaggagcaugguauucaa

SEQ ID NO: 108944 - RNA, 19 nt, Homo sapiens
  misc_RNA (1)...(19): siRNA sense strand
aauaugaacgggauacauu

SEQ ID NO: 108945 - RNA, 19 nt, Homo sapiens
  misc_RNA (1)...(19): siRNA sense strand
cuauagaagcuaacaagaa

SEQ ID NO: 108946 - RNA, 19 nt, Homo sapiens
  misc_RNA (1)...(19): siRNA sense strand
cgauguccucuuauauuua

SEQ ID NO: 108947 - RNA, 19 nt, Homo sapiens
  misc_RNA (1)...(19): siRNA sense strand
auuggucgauguccucuua

SEQ ID NO: 108948 - RNA, 19 nt, Homo sapiens
  misc_RNA (1)...(19): siRNA sense strand
gaaguucuaaggaaguaug

SEQ ID NO: 108949 - RNA, 19 nt, Homo sapiens
  misc_RNA (1)...(19): siRNA sense strand
ccuguggcaccaacaauua

SEQ ID NO: 108950 - RNA, 19 nt, Homo sapiens
  misc_RNA (1)...(19): siRNA sense strand
gcgacacuuuggaagauug

SEQ ID NO: 108951 - RNA, 19 nt, Homo sapiens
  misc_RNA (1)...(19): siRNA sense strand
ggaggaggaucaaguuuuc

SEQ ID NO: 108952 - RNA, 19 nt, Homo sapiens
  misc_RNA (1)...(19): siRNA sense strand
gggauacauuacuuguuga

SEQ ID NO: 108953 - RNA, 19 nt, Homo sapiens
  misc_RNA (1)...(19): siRNA sense strand
uaucaaaggagcaugguau

SEQ ID NO: 108954 - RNA, 19 nt, Homo sapiens
  misc_RNA (1)...(19): siRNA sense strand
aaucaagcuuccauauguu

SEQ ID NO: 108955 - RNA, 19 nt, Homo sapiens
  misc_RNA (1)...(19): siRNA sense strand
caccaaaacuacauagauu

SEQ ID NO: 108956 - RNA, 19 nt, Homo sapiens
  misc_RNA (1)...(19): siRNA sense strand
caauaaacagccuccaguu

SEQ ID NO: 108957 - RNA, 19 nt, Homo sapiens
  misc_RNA (1)...(19): siRNA sense strand
gagcgacaaaguauaacaa

SEQ ID NO: 108958 - RNA, 19 nt, Homo sapiens
  misc_RNA (1)...(19): siRNA sense strand
ccaaggagacauggaagaa

SEQ ID NO: 108959 - RNA, 19 nt, Homo sapiens
  misc_RNA (1)...(19): siRNA sense strand
gaauacacgcucuuuacuc

SEQ ID NO: 108960 - RNA, 19 nt, Homo sapiens
  misc_RNA (1)...(19): siRNA sense strand
caguggagauaauaaucaa

SEQ ID NO: 108961 - RNA, 19 nt, Homo sapiens
  misc_RNA (1)...(19): siRNA sense strand
gcgacaaaguauaacaagu

SEQ ID NO: 108962 - RNA, 19 nt, Homo sapiens
  misc_RNA (1)...(19): siRNA sense strand
gcaugguauucaaguacaa

SEQ ID NO: 108963 - RNA, 19 nt, Homo sapiens
  misc_RNA (1)...(19): siRNA sense strand
ugacagggaacauggaaug

SEQ ID NO: 108964 - RNA, 19 nt, Homo sapiens
  misc_RNA (1)...(19): siRNA sense strand
ggaauacacgcucuuuacu

SEQ ID NO: 108965 - RNA, 19 nt, Homo sapiens
  misc_RNA (1)...(19): siRNA sense strand
ucgguugcccucucauuua

SEQ ID NO: 108966 - RNA, 19 nt, Homo sapiens
  misc_RNA (1)...(19): siRNA sense strand
gagagccagugaauuucug

SEQ ID NO: 108967 - RNA, 19 nt, Homo sapiens
  misc_RNA (1)...(19): siRNA sense strand
aaaaguaucgggaaaauug

SEQ ID NO: 108968 - RNA, 19 nt, Homo sapiens
  misc_RNA (1)...(19): siRNA sense strand
gcaugaacuugcugugcau

SEQ ID NO: 108969 - RNA, 19 nt, Homo sapiens
  misc_RNA (1)...(19): siRNA sense strand
gugaaacccuccgagcuua

SEQ ID NO: 108970 - RNA, 19 nt, Homo sapiens
  misc_RNA (1)...(19): siRNA sense strand
guacagcacuggaacuucu

SEQ ID NO: 108971 - RNA, 19 nt, Homo sapiens
  misc_RNA (1)...(19): siRNA sense strand
guucagcacuagaugauau

SEQ ID NO: 108972 - RNA, 19 nt, Homo sapiens
  misc_RNA (1)...(19): siRNA sense strand
cuuagaaacucugcaaauu

SEQ ID NO: 108973 - RNA, 19 nt, Homo sapiens
  misc_RNA (1)...(19): siRNA sense strand
gcagaagccuuagaaacuc

SEQ ID NO: 108974 - RNA, 19 nt, Homo sapiens
  misc_RNA (1)...(19): siRNA sense strand
ggagugcccuuaaugaaaa

SEQ ID NO: 108975 - RNA, 19 nt, Homo sapiens
  misc_RNA (1)...(19): siRNA sense strand
gaaacucugcaaauuauca

SEQ ID NO: 108976 - RNA, 19 nt, Homo sapiens
  misc_RNA (1)...(19): siRNA sense strand
uaaagcagaagccuuagaa

SEQ ID NO: 108977 - RNA, 19 nt, Homo sapiens
  misc_RNA (1)...(19): siRNA sense strand
ccuccgagcuuagcaaaga

SEQ ID NO: 108978 - RNA, 19 nt, Homo sapiens
  misc_RNA (1)...(19): siRNA sense strand
acccagggcuucauaauca

SEQ ID NO: 108979 - RNA, 19 nt, Homo sapiens
  misc_RNA (1)...(19): siRNA sense strand
gauaugcugguacaucuga

SEQ ID NO: 108980 - RNA, 19 nt, Homo sapiens
  misc_RNA (1)...(19): siRNA sense strand
cauaaucaccuucuguuca

SEQ ID NO: 108981 - RNA, 19 nt, Homo sapiens
  misc_RNA (1)...(19): siRNA sense strand
ggugaaacccuccgagcuu

SEQ ID NO: 108982 - RNA, 19 nt, Homo sapiens
  misc_RNA (1)...(19): siRNA sense strand
gaaugucucacaaauaaac

SEQ ID NO: 108983 - RNA, 19 nt, Homo sapiens
  misc_RNA (1)...(19): siRNA sense strand
gaagacguuccgcuuugaa

SEQ ID NO: 108984 - RNA, 19 nt, Homo sapiens
  misc_RNA (1)...(19): siRNA sense strand
caaauaaaccaagauaugc

SEQ ID NO: 108985 - RNA, 19 nt, Homo sapiens
  misc_RNA (1)...(19): siRNA sense strand
caccuucuguucagcacua

SEQ ID NO: 108986 - RNA, 19 nt, Homo sapiens
  misc_RNA (1)...(19): siRNA sense strand
gcaaauuaucagaagagaa

SEQ ID NO: 108987 - RNA, 19 nt, Homo sapiens
  misc_RNA (1)...(19): siRNA sense strand
ucucacaaauaaaccaaga

SEQ ID NO: 108988 - RNA, 19 nt, Homo sapiens
  misc_RNA (1)...(19): siRNA sense strand
gcauacccagggcuucaua

SEQ ID NO: 108989 - RNA, 19 nt, Homo sapiens
  misc_RNA (1)...(19): siRNA sense strand
gcacuagaugauauucuug

SEQ ID NO: 108990 - RNA, 19 nt, Homo sapiens
  misc_RNA (1)...(19): siRNA sense strand
caagauaugcugguacauc

SEQ ID NO: 108991 - RNA, 19 nt, Homo sapiens
  misc_RNA (1)...(19): siRNA sense strand
gguggagugcccuuaauga

SEQ ID NO: 108992 - RNA, 19 nt, Homo sapiens
  misc_RNA (1)...(19): siRNA sense strand
caucugagucacacaagaa

SEQ ID NO: 108993 - RNA, 19 nt, Homo sapiens
  misc_RNA (1)...(19): siRNA sense strand
guacaucugagucacacaa

SEQ ID NO: 108994 - RNA, 19 nt, Homo sapiens
  misc_RNA (1)...(19): siRNA sense strand
gagcauacccagggcuuca

SEQ ID NO: 108995 - RNA, 19 nt, Homo sapiens
  misc_RNA (1)...(19): siRNA sense strand
uggagugcccuuaaugaaa

SEQ ID NO: 108996 - RNA, 19 nt, Homo sapiens
  misc_RNA (1)...(19): siRNA sense strand
gcagcgggauuuggugagu

SEQ ID NO: 108997 - RNA, 19 nt, Homo sapiens
  misc_RNA (1)...(19): siRNA sense strand
guggagugcccuuaaugaa

SEQ ID NO: 108998 - RNA, 19 nt, Homo sapiens
  misc_RNA (1)...(19): siRNA sense strand
gacguuccgcuuugaaaug

SEQ ID NO: 108999 - RNA, 19 nt, Homo sapiens
  misc_RNA (1)...(19): siRNA sense strand
cagaagccuuagaaacucu

SEQ ID NO: 109000 - RNA, 19 nt, Homo sapiens
  misc_RNA (1)...(19): siRNA sense strand
auaaucaccuucuguucag

SEQ ID NO: 109001 - RNA, 19 nt, Homo sapiens
  misc_RNA (1)...(19): siRNA sense strand
agcacuagaugauauucuu

SEQ ID NO: 109002 - RNA, 19 nt, Homo sapiens
  misc_RNA (1)...(19): siRNA sense strand
ccuuagaaacucugcaaau

SEQ ID NO: 109003 - RNA, 19 nt, Homo sapiens
  misc_RNA (1)...(19): siRNA sense strand
agcgggauuuggugaguuu

SEQ ID NO: 109004 - RNA, 19 nt, Homo sapiens
  misc_RNA (1)...(19): siRNA sense strand
cagcgggauuuggugaguu

SEQ ID NO: 109005 - RNA, 19 nt, Homo sapiens
  misc_RNA (1)...(19): siRNA sense strand
aucuaaagcagaagccuua

SEQ ID NO: 109006 - RNA, 19 nt, Homo sapiens
  misc_RNA (1)...(19): siRNA sense strand
ccagacugcugaggaacuc

SEQ ID NO: 109007 - RNA, 19 nt, Homo sapiens
  misc_RNA (1)...(19): siRNA sense strand
gugaaacccuccgagcuua

SEQ ID NO: 109008 - RNA, 19 nt, Homo sapiens
  misc_RNA (1)...(19): siRNA sense strand
guacagcacuggaacuucu

SEQ ID NO: 109009 - RNA, 19 nt, Homo sapiens
  misc_RNA (1)...(19): siRNA sense strand
guucagcacuagaugauau

SEQ ID NO: 109010 - RNA, 19 nt, Homo sapiens
  misc_RNA (1)...(19): siRNA sense strand
cuuagaaacucugcaaauu

SEQ ID NO: 109011 - RNA, 19 nt, Homo sapiens
  misc_RNA (1)...(19): siRNA sense strand
gcagaagccuuagaaacuc

SEQ ID NO: 109012 - RNA, 19 nt, Homo sapiens
  misc_RNA (1)...(19): siRNA sense strand
ggagugcccuuaaugaaaa

SEQ ID NO: 109013 - RNA, 19 nt, Homo sapiens
  misc_RNA (1)...(19): siRNA sense strand
gaaacucugcaaauuauca

SEQ ID NO: 109014 - RNA, 19 nt, Homo sapiens
  misc_RNA (1)...(19): siRNA sense strand
uaaagcagaagccuuagaa

SEQ ID NO: 109015 - RNA, 19 nt, Homo sapiens
  misc_RNA (1)...(19): siRNA sense strand
ccuccgagcuuagcaaaga

SEQ ID NO: 109016 - RNA, 19 nt, Homo sapiens
  misc_RNA (1)...(19): siRNA sense strand
acccagggcuucauaauca

SEQ ID NO: 109017 - RNA, 19 nt, Homo sapiens
  misc_RNA (1)...(19): siRNA sense strand
gauaugcugguacaucuga

SEQ ID NO: 109018 - RNA, 19 nt, Homo sapiens
  misc_RNA (1)...(19): siRNA sense strand
cauaaucaccuucuguuca

SEQ ID NO: 109019 - RNA, 19 nt, Homo sapiens
  misc_RNA (1)...(19): siRNA sense strand
ggugaaacccuccgagcuu

SEQ ID NO: 109020 - RNA, 19 nt, Homo sapiens
  misc_RNA (1)...(19): siRNA sense strand
gaaugucucacaaauaaac

SEQ ID NO: 109021 - RNA, 19 nt, Homo sapiens
  misc_RNA (1)...(19): siRNA sense strand
gaagacguuccgcuuugaa

SEQ ID NO: 109022 - RNA, 19 nt, Homo sapiens
  misc_RNA (1)...(19): siRNA sense strand
caaauaaaccaagauaugc

SEQ ID NO: 109023 - RNA, 19 nt, Homo sapiens
  misc_RNA (1)...(19): siRNA sense strand
caccuucuguucagcacua

SEQ ID NO: 109024 - RNA, 19 nt, Homo sapiens
  misc_RNA (1)...(19): siRNA sense strand
gcaaauuaucagaagagaa

SEQ ID NO: 109025 - RNA, 19 nt, Homo sapiens
  misc_RNA (1)...(19): siRNA sense strand
ucucacaaauaaaccaaga

SEQ ID NO: 109026 - RNA, 19 nt, Homo sapiens
  misc_RNA (1)...(19): siRNA sense strand
gcauacccagggcuucaua

SEQ ID NO: 109027 - RNA, 19 nt, Homo sapiens
  misc_RNA (1)...(19): siRNA sense strand
gcacuagaugauauucuug

SEQ ID NO: 109028 - RNA, 19 nt, Homo sapiens
  misc_RNA (1)...(19): siRNA sense strand
caagauaugcugguacauc

SEQ ID NO: 109029 - RNA, 19 nt, Homo sapiens
  misc_RNA (1)...(19): siRNA sense strand
gguggagugcccuuaauga

SEQ ID NO: 109030 - RNA, 19 nt, Homo sapiens
  misc_RNA (1)...(19): siRNA sense strand
caucugagucacacaagaa

SEQ ID NO: 109031 - RNA, 19 nt, Homo sapiens
  misc_RNA (1)...(19): siRNA sense strand
guacaucugagucacacaa

SEQ ID NO: 109032 - RNA, 19 nt, Homo sapiens
  misc_RNA (1)...(19): siRNA sense strand
gagcauacccagggcuuca

SEQ ID NO: 109033 - RNA, 19 nt, Homo sapiens
  misc_RNA (1)...(19): siRNA sense strand
uggagugcccuuaaugaaa

SEQ ID NO: 109034 - RNA, 19 nt, Homo sapiens
  misc_RNA (1)...(19): siRNA sense strand
gcagcgggauuuggugagu

SEQ ID NO: 109035 - RNA, 19 nt, Homo sapiens
  misc_RNA (1)...(19): siRNA sense strand
guggagugcccuuaaugaa

SEQ ID NO: 109036 - RNA, 19 nt, Homo sapiens
  misc_RNA (1)...(19): siRNA sense strand
gacguuccgcuuugaaaug

SEQ ID NO: 109037 - RNA, 19 nt, Homo sapiens
  misc_RNA (1)...(19): siRNA sense strand
cagaagccuuagaaacucu

SEQ ID NO: 109038 - RNA, 19 nt, Homo sapiens
  misc_RNA (1)...(19): siRNA sense strand
auaaucaccuucuguucag

SEQ ID NO: 109039 - RNA, 19 nt, Homo sapiens
  misc_RNA (1)...(19): siRNA sense strand
agcacuagaugauauucuu

SEQ ID NO: 109040 - RNA, 19 nt, Homo sapiens
  misc_RNA (1)...(19): siRNA sense strand
ccuuagaaacucugcaaau

SEQ ID NO: 109041 - RNA, 19 nt, Homo sapiens
  misc_RNA (1)...(19): siRNA sense strand
agcgggauuuggugaguuu

SEQ ID NO: 109042 - RNA, 19 nt, Homo sapiens
  misc_RNA (1)...(19): siRNA sense strand
cagcgggauuuggugaguu

SEQ ID NO: 109043 - RNA, 19 nt, Homo sapiens
  misc_RNA (1)...(19): siRNA sense strand
aucuaaagcagaagccuua

SEQ ID NO: 109044 - RNA, 19 nt, Homo sapiens
  misc_RNA (1)...(19): siRNA sense strand
ccagacugcugaggaacuc

SEQ ID NO: 109045 - RNA, 19 nt, Homo sapiens
  misc_RNA (1)...(19): siRNA sense strand
gugaaacccuccgagcuua

SEQ ID NO: 109046 - RNA, 19 nt, Homo sapiens
  misc_RNA (1)...(19): siRNA sense strand
guacagcacuggaacuucu

SEQ ID NO: 109047 - RNA, 19 nt, Homo sapiens
  misc_RNA (1)...(19): siRNA sense strand
guucagcacuagaugauau

SEQ ID NO: 109048 - RNA, 19 nt, Homo sapiens
  misc_RNA (1)...(19): siRNA sense strand
cuuagaaacucugcaaauu

SEQ ID NO: 109049 - RNA, 19 nt, Homo sapiens
  misc_RNA (1)...(19): siRNA sense strand
gcagaagccuuagaaacuc

SEQ ID NO: 109050 - RNA, 19 nt, Homo sapiens
  misc_RNA (1)...(19): siRNA sense strand
ggagugcccuuaaugaaaa

SEQ ID NO: 109051 - RNA, 19 nt, Homo sapiens
  misc_RNA (1)...(19): siRNA sense strand
gaaacucugcaaauuauca

SEQ ID NO: 109052 - RNA, 19 nt, Homo sapiens
  misc_RNA (1)...(19): siRNA sense strand
uaaagcagaagccuuagaa

SEQ ID NO: 109053 - RNA, 19 nt, Homo sapiens
  misc_RNA (1)...(19): siRNA sense strand
ccuccgagcuuagcaaaga

SEQ ID NO: 109054 - RNA, 19 nt, Homo sapiens
  misc_RNA (1)...(19): siRNA sense strand
acccagggcuucauaauca

SEQ ID NO: 109055 - RNA, 19 nt, Homo sapiens
  misc_RNA (1)...(19): siRNA sense strand
gauaugcugguacaucuga

SEQ ID NO: 109056 - RNA, 19 nt, Homo sapiens
  misc_RNA (1)...(19): siRNA sense strand
cauaaucaccuucuguuca

SEQ ID NO: 109057 - RNA, 19 nt, Homo sapiens
  misc_RNA (1)...(19): siRNA sense strand
ggugaaacccuccgagcuu

SEQ ID NO: 109058 - RNA, 19 nt, Homo sapiens
  misc_RNA (1)...(19): siRNA sense strand
gaaugucucacaaauaaac

SEQ ID NO: 109059 - RNA, 19 nt, Homo sapiens
  misc_RNA (1)...(19): siRNA sense strand
gaagacguuccgcuuugaa

SEQ ID NO: 109060 - RNA, 19 nt, Homo sapiens
  misc_RNA (1)...(19): siRNA sense strand
caaauaaaccaagauaugc

SEQ ID NO: 109061 - RNA, 19 nt, Homo sapiens
  misc_RNA (1)...(19): siRNA sense strand
caccuucuguucagcacua

SEQ ID NO: 109062 - RNA, 19 nt, Homo sapiens
  misc_RNA (1)...(19): siRNA sense strand
gcaaauuaucagaagagaa

SEQ ID NO: 109063 - RNA, 19 nt, Homo sapiens
  misc_RNA (1)...(19): siRNA sense strand
ucucacaaauaaaccaaga

SEQ ID NO: 109064 - RNA, 19 nt, Homo sapiens
  misc_RNA (1)...(19): siRNA sense strand
gcauacccagggcuucaua

SEQ ID NO: 109065 - RNA, 19 nt, Homo sapiens
  misc_RNA (1)...(19): siRNA sense strand
gcacuagaugauauucuug

SEQ ID NO: 109066 - RNA, 19 nt, Homo sapiens
  misc_RNA (1)...(19): siRNA sense strand
caagauaugcugguacauc

SEQ ID NO: 109067 - RNA, 19 nt, Homo sapiens
  misc_RNA (1)...(19): siRNA sense strand
gguggagugcccuuaauga

SEQ ID NO: 109068 - RNA, 19 nt, Homo sapiens
  misc_RNA (1)...(19): siRNA sense strand
caucugagucacacaagaa

SEQ ID NO: 109069 - RNA, 19 nt, Homo sapiens
  misc_RNA (1)...(19): siRNA sense strand
guacaucugagucacacaa

SEQ ID NO: 109070 - RNA, 19 nt, Homo sapiens
  misc_RNA (1)...(19): siRNA sense strand
gagcauacccagggcuuca

SEQ ID NO: 109071 - RNA, 19 nt, Homo sapiens
  misc_RNA (1)...(19): siRNA sense strand
uggagugcccuuaaugaaa

SEQ ID NO: 109072 - RNA, 19 nt, Homo sapiens
  misc_RNA (1)...(19): siRNA sense strand
gcagcgggauuuggugagu

SEQ ID NO: 109073 - RNA, 19 nt, Homo sapiens
  misc_RNA (1)...(19): siRNA sense strand
guggagugcccuuaaugaa

SEQ ID NO: 109074 - RNA, 19 nt, Homo sapiens
  misc_RNA (1)...(19): siRNA sense strand
gacguuccgcuuugaaaug

SEQ ID NO: 109075 - RNA, 19 nt, Homo sapiens
  misc_RNA (1)...(19): siRNA sense strand
cagaagccuuagaaacucu

SEQ ID NO: 109076 - RNA, 19 nt, Homo sapiens
  misc_RNA (1)...(19): siRNA sense strand
auaaucaccuucuguucag

SEQ ID NO: 109077 - RNA, 19 nt, Homo sapiens
  misc_RNA (1)...(19): siRNA sense strand
agcacuagaugauauucuu

SEQ ID NO: 109078 - RNA, 19 nt, Homo sapiens
  misc_RNA (1)...(19): siRNA sense strand
ccuuagaaacucugcaaau

SEQ ID NO: 109079 - RNA, 19 nt, Homo sapiens
  misc_RNA (1)...(19): siRNA sense strand
agcgggauuuggugaguuu

SEQ ID NO: 109080 - RNA, 19 nt, Homo sapiens
  misc_RNA (1)...(19): siRNA sense strand
cagcgggauuuggugaguu

SEQ ID NO: 109081 - RNA, 19 nt, Homo sapiens
  misc_RNA (1)...(19): siRNA sense strand
aucuaaagcagaagccuua

SEQ ID NO: 109082 - RNA, 19 nt, Homo sapiens
  misc_RNA (1)...(19): siRNA sense strand
ccagacugcugaggaacuc

SEQ ID NO: 109083 - RNA, 19 nt, Homo sapiens
  misc_RNA (1)...(19): siRNA sense strand
gcaaacggcuuaugggaua

SEQ ID NO: 109084 - RNA, 19 nt, Homo sapiens
  misc_RNA (1)...(19): siRNA sense strand
ggaaauaccuggagucaca

SEQ ID NO: 109085 - RNA, 19 nt, Homo sapiens
  misc_RNA (1)...(19): siRNA sense strand
gcacaaaggucugcugauu

SEQ ID NO: 109086 - RNA, 19 nt, Homo sapiens
  misc_RNA (1)...(19): siRNA sense strand
gaaggugacuggucugagu

SEQ ID NO: 109087 - RNA, 19 nt, Homo sapiens
  misc_RNA (1)...(19): siRNA sense strand
cuacuacccuuucugcuuu

SEQ ID NO: 109088 - RNA, 19 nt, Homo sapiens
  misc_RNA (1)...(19): siRNA sense strand
gagcugugguguacauuga

SEQ ID NO: 109089 - RNA, 19 nt, Homo sapiens
  misc_RNA (1)...(19): siRNA sense strand
ccaguuaucuugacgaauc

SEQ ID NO: 109090 - RNA, 19 nt, Homo sapiens
  misc_RNA (1)...(19): siRNA sense strand
acaaaggucugcugauuuc

SEQ ID NO: 109091 - RNA, 19 nt, Homo sapiens
  misc_RNA (1)...(19): siRNA sense strand
guauuuggcugaggaguuu

SEQ ID NO: 109092 - RNA, 19 nt, Homo sapiens
  misc_RNA (1)...(19): siRNA sense strand
caacaugggaggauuagaa

SEQ ID NO: 109093 - RNA, 19 nt, Homo sapiens
  misc_RNA (1)...(19): siRNA sense strand
ugaaagacugguugaaaua

SEQ ID NO: 109094 - RNA, 19 nt, Homo sapiens
  misc_RNA (1)...(19): siRNA sense strand
ucaaggcaaucucaaagaa

SEQ ID NO: 109095 - RNA, 19 nt, Homo sapiens
  misc_RNA (1)...(19): siRNA sense strand
ggaagaagaaauuaucuca

SEQ ID NO: 109096 - RNA, 19 nt, Homo sapiens
  misc_RNA (1)...(19): siRNA sense strand
caaagaugcaaacggcuua

SEQ ID NO: 109097 - RNA, 19 nt, Homo sapiens
  misc_RNA (1)...(19): siRNA sense strand
gaaguucuacaaaggauug

SEQ ID NO: 109098 - RNA, 19 nt, Homo sapiens
  misc_RNA (1)...(19): siRNA sense strand
uccaugaacuucuauguau

SEQ ID NO: 109099 - RNA, 19 nt, Homo sapiens
  misc_RNA (1)...(19): siRNA sense strand
ccagcauucuuaucuacua

SEQ ID NO: 109100 - RNA, 19 nt, Homo sapiens
  misc_RNA (1)...(19): siRNA sense strand
cauccuccuugaaguauuu

SEQ ID NO: 109101 - RNA, 19 nt, Homo sapiens
  misc_RNA (1)...(19): siRNA sense strand
guaccuugauucagagaga

SEQ ID NO: 109102 - RNA, 19 nt, Homo sapiens
  misc_RNA (1)...(19): siRNA sense strand
gcugaaagacugguugaaa

SEQ ID NO: 109103 - RNA, 19 nt, Homo sapiens
  misc_RNA (1)...(19): siRNA sense strand
ucaccagcauucuuaucua

SEQ ID NO: 109104 - RNA, 19 nt, Homo sapiens
  misc_RNA (1)...(19): siRNA sense strand
gugaugaaguucuacaaag

SEQ ID NO: 109105 - RNA, 19 nt, Homo sapiens
  misc_RNA (1)...(19): siRNA sense strand
cugaaagacugguugaaau

SEQ ID NO: 109106 - RNA, 19 nt, Homo sapiens
  misc_RNA (1)...(19): siRNA sense strand
gaaagacugguugaaauag

SEQ ID NO: 109107 - RNA, 19 nt, Homo sapiens
  misc_RNA (1)...(19): siRNA sense strand
agaaggagcugugguguac

SEQ ID NO: 109108 - RNA, 19 nt, Homo sapiens
  misc_RNA (1)...(19): siRNA sense strand
uccaguaccuugauucaga

SEQ ID NO: 109109 - RNA, 19 nt, Homo sapiens
  misc_RNA (1)...(19): siRNA sense strand
caaagaaagaaacaaguuc

SEQ ID NO: 109110 - RNA, 19 nt, Homo sapiens
  misc_RNA (1)...(19): siRNA sense strand
ccagauauuuuaacacuga

SEQ ID NO: 109111 - RNA, 19 nt, Homo sapiens
  misc_RNA (1)...(19): siRNA sense strand
gaguagacaucagauccuu

SEQ ID NO: 109112 - RNA, 19 nt, Homo sapiens
  misc_RNA (1)...(19): siRNA sense strand
ucagagagaagacagauuc

SEQ ID NO: 109113 - RNA, 19 nt, Homo sapiens
  misc_RNA (1)...(19): siRNA sense strand
ggauccagcugugugauag

SEQ ID NO: 109114 - RNA, 19 nt, Homo sapiens
  misc_RNA (1)...(19): siRNA sense strand
ggacgaagcccugcauggu

SEQ ID NO: 109115 - RNA, 19 nt, Homo sapiens
  misc_RNA (1)...(19): siRNA sense strand
cacaaaggucugcugauuu

SEQ ID NO: 109116 - RNA, 19 nt, Homo sapiens
  misc_RNA (1)...(19): siRNA sense strand
caaggcaaucucaaagaaa

SEQ ID NO: 109117 - RNA, 19 nt, Homo sapiens
  misc_RNA (1)...(19): siRNA sense strand
guggaucccucacagagau

SEQ ID NO: 109118 - RNA, 19 nt, Homo sapiens
  misc_RNA (1)...(19): siRNA sense strand
ugugauagccgcacuagga

SEQ ID NO: 109119 - RNA, 19 nt, Homo sapiens
  misc_RNA (1)...(19): siRNA sense strand
gaugaaguucuacaaagga

SEQ ID NO: 109120 - RNA, 19 nt, Homo sapiens
  misc_RNA (1)...(19): siRNA sense strand
ccaccaacaugggaggauu

SEQ ID NO: 109121 - RNA, 19 nt, Homo sapiens
  misc_RNA (1)...(19): siRNA sense strand
gauagccgcacuaggaaau

SEQ ID NO: 109122 - RNA, 19 nt, Homo sapiens
  misc_RNA (1)...(19): siRNA sense strand
caacuucaaggcaaucuca

SEQ ID NO: 109123 - RNA, 19 nt, Homo sapiens
  misc_RNA (1)...(19): siRNA sense strand
caccugugaugaaguucua

SEQ ID NO: 109124 - RNA, 19 nt, Homo sapiens
  misc_RNA (1)...(19): siRNA sense strand
ccaugaacuucuauguaug

SEQ ID NO: 109125 - RNA, 19 nt, Homo sapiens
  misc_RNA (1)...(19): siRNA sense strand
cacuggagcuuaugaaggu

SEQ ID NO: 109126 - RNA, 19 nt, Homo sapiens
  misc_RNA (1)...(19): siRNA sense strand
cgaguggguuuaucacaag

SEQ ID NO: 109127 - RNA, 19 nt, Homo sapiens
  misc_RNA (1)...(19): siRNA sense strand
guccaugaacuucuaugua

SEQ ID NO: 109128 - RNA, 19 nt, Homo sapiens
  misc_RNA (1)...(19): siRNA sense strand
ucauuugucuacaccauca

SEQ ID NO: 109129 - RNA, 19 nt, Homo sapiens
  misc_RNA (1)...(19): siRNA sense strand
ugaugaaguucuacaaagg

SEQ ID NO: 109130 - RNA, 19 nt, Homo sapiens
  misc_RNA (1)...(19): siRNA sense strand
gauuacaacccaucugagu

SEQ ID NO: 109131 - RNA, 19 nt, Homo sapiens
  misc_RNA (1)...(19): siRNA sense strand
ggaggaaggccugguucuu

SEQ ID NO: 109132 - RNA, 19 nt, Homo sapiens
  misc_RNA (1)...(19): siRNA sense strand
ugacuggucugaguuaucg

SEQ ID NO: 109133 - RNA, 19 nt, Homo sapiens
  misc_RNA (1)...(19): siRNA sense strand
gcauccuccuugaaguauu

SEQ ID NO: 109134 - RNA, 19 nt, Homo sapiens
  misc_RNA (1)...(19): siRNA sense strand
aaaggaguuugaugcacaa

SEQ ID NO: 109135 - RNA, 19 nt, Homo sapiens
  misc_RNA (1)...(19): siRNA sense strand
uuucucaccagcauucuua

SEQ ID NO: 109136 - RNA, 19 nt, Homo sapiens
  misc_RNA (1)...(19): siRNA sense strand
uuaucgagguguccaugaa

SEQ ID NO: 109137 - RNA, 19 nt, Homo sapiens
  misc_RNA (1)...(19): siRNA sense strand
aaggcaaucucaaagaaag

SEQ ID NO: 109138 - RNA, 19 nt, Homo sapiens
  misc_RNA (1)...(19): siRNA sense strand
uagaaggagcuguggugua

SEQ ID NO: 109139 - RNA, 19 nt, Homo sapiens
  misc_RNA (1)...(19): siRNA sense strand
caccaacaugggaggauua

SEQ ID NO: 109140 - RNA, 19 nt, Homo sapiens
  misc_RNA (1)...(19): siRNA sense strand
ugacaaguaguaaaguuca

SEQ ID NO: 109141 - RNA, 19 nt, Homo sapiens
  misc_RNA (1)...(19): siRNA sense strand
caaggaggaaggccugguu

SEQ ID NO: 109142 - RNA, 19 nt, Homo sapiens
  misc_RNA (1)...(19): siRNA sense strand
acgaguggguuuaucacaa

SEQ ID NO: 109143 - RNA, 19 nt, Homo sapiens
  misc_RNA (1)...(19): siRNA sense strand
caugggaggauuagaagga

SEQ ID NO: 109144 - RNA, 19 nt, Homo sapiens
  misc_RNA (1)...(19): siRNA sense strand
gucuccagcugaugauuug

SEQ ID NO: 109145 - RNA, 19 nt, Homo sapiens
  misc_RNA (1)...(19): siRNA sense strand
ggagcugugguguacauug

SEQ ID NO: 109146 - RNA, 19 nt, Homo sapiens
  misc_RNA (1)...(19): siRNA sense strand
guagacaucagauccuuac

SEQ ID NO: 109147 - RNA, 19 nt, Homo sapiens
  misc_RNA (1)...(19): siRNA sense strand
caccagcauucuuaucuac

SEQ ID NO: 109148 - RNA, 19 nt, Homo sapiens
  misc_RNA (1)...(19): siRNA sense strand
gaguggguuuaucacaaga

SEQ ID NO: 109149 - RNA, 19 nt, Homo sapiens
  misc_RNA (1)...(19): siRNA sense strand
gacaaguaguaaaguucau

SEQ ID NO: 109150 - RNA, 19 nt, Homo sapiens
  misc_RNA (1)...(19): siRNA sense strand
gcugugguguacauugaca

SEQ ID NO: 109151 - RNA, 19 nt, Homo sapiens
  misc_RNA (1)...(19): siRNA sense strand
gcaaucucaaagaaagaaa

SEQ ID NO: 109152 - RNA, 19 nt, Homo sapiens
  misc_RNA (1)...(19): siRNA sense strand
guacauugacacagagucu

SEQ ID NO: 109153 - RNA, 19 nt, Homo sapiens
  misc_RNA (1)...(19): siRNA sense strand
ggaucccucacagagauua

SEQ ID NO: 109154 - RNA, 19 nt, Homo sapiens
  misc_RNA (1)...(19): siRNA sense strand
aaggucugcugauuucuca

SEQ ID NO: 109155 - RNA, 19 nt, Homo sapiens
  misc_RNA (1)...(19): siRNA sense strand
cuacauuacccaccaacau

SEQ ID NO: 109156 - RNA, 19 nt, Homo sapiens
  misc_RNA (1)...(19): siRNA sense strand
uacauuacccaccaacaug

SEQ ID NO: 109157 - RNA, 19 nt, Homo sapiens
  misc_RNA (1)...(19): siRNA sense strand
gugauagccgcacuaggaa

SEQ ID NO: 109158 - RNA, 19 nt, Homo sapiens
  misc_RNA (1)...(19): siRNA sense strand
cagaaaggaguuugaugca

SEQ ID NO: 109159 - RNA, 19 nt, Homo sapiens
  misc_RNA (1)...(19): siRNA sense strand
ggcaaucucaaagaaagaa

SEQ ID NO: 109160 - RNA, 19 nt, Homo sapiens
  misc_RNA (1)...(19): siRNA sense strand
aaggagcugugguguacau

SEQ ID NO: 109161 - RNA, 19 nt, Homo sapiens
  misc_RNA (1)...(19): siRNA sense strand
ggugacuggucugaguuau

SEQ ID NO: 109162 - RNA, 19 nt, Homo sapiens
  misc_RNA (1)...(19): siRNA sense strand
aggcauccuccuugaagua

SEQ ID NO: 109163 - RNA, 19 nt, Homo sapiens
  misc_RNA (1)...(19): siRNA sense strand
ggucagaaaggaguuugau

SEQ ID NO: 109164 - RNA, 19 nt, Homo sapiens
  misc_RNA (1)...(19): siRNA sense strand
ugcauuuagugcugaaaga

SEQ ID NO: 109165 - RNA, 19 nt, Homo sapiens
  misc_RNA (1)...(19): siRNA sense strand
gagcauuuuggcuacauua

SEQ ID NO: 109166 - RNA, 19 nt, Homo sapiens
  misc_RNA (1)...(19): siRNA sense strand
ucccaguuaucuugacgaa

SEQ ID NO: 109167 - RNA, 19 nt, Homo sapiens
  misc_RNA (1)...(19): siRNA sense strand
caugaacuucuauguaugg

SEQ ID NO: 109168 - RNA, 19 nt, Homo sapiens
  misc_RNA (1)...(19): siRNA sense strand
aagacugguugaaauagca

SEQ ID NO: 109169 - RNA, 19 nt, Homo sapiens
  misc_RNA (1)...(19): siRNA sense strand
gcauggugguguggcuugu

SEQ ID NO: 109170 - RNA, 19 nt, Homo sapiens
  misc_RNA (1)...(19): siRNA sense strand
ccucauuugucuacaccau

SEQ ID NO: 109171 - RNA, 19 nt, Homo sapiens
  misc_RNA (1)...(19): siRNA sense strand
gcacaacuucaaggcaauc

SEQ ID NO: 109172 - RNA, 19 nt, Homo sapiens
  misc_RNA (1)...(19): siRNA sense strand
ugugaugaaguucuacaaa

SEQ ID NO: 109173 - RNA, 19 nt, Homo sapiens
  misc_RNA (1)...(19): siRNA sense strand
aaagacugguugaaauagc

SEQ ID NO: 109174 - RNA, 19 nt, Homo sapiens
  misc_RNA (1)...(19): siRNA sense strand
gcaaacggcuuaugggaua

SEQ ID NO: 109175 - RNA, 19 nt, Homo sapiens
  misc_RNA (1)...(19): siRNA sense strand
ggaaauaccuggagucaca

SEQ ID NO: 109176 - RNA, 19 nt, Homo sapiens
  misc_RNA (1)...(19): siRNA sense strand
gcacaaaggucugcugauu

SEQ ID NO: 109177 - RNA, 19 nt, Homo sapiens
  misc_RNA (1)...(19): siRNA sense strand
gaaggugacuggucugagu

SEQ ID NO: 109178 - RNA, 19 nt, Homo sapiens
  misc_RNA (1)...(19): siRNA sense strand
cuacuacccuuucugcuuu

SEQ ID NO: 109179 - RNA, 19 nt, Homo sapiens
  misc_RNA (1)...(19): siRNA sense strand
gagcugugguguacauuga

SEQ ID NO: 109180 - RNA, 19 nt, Homo sapiens
  misc_RNA (1)...(19): siRNA sense strand
ccaguuaucuugacgaauc

SEQ ID NO: 109181 - RNA, 19 nt, Homo sapiens
  misc_RNA (1)...(19): siRNA sense strand
acaaaggucugcugauuuc

SEQ ID NO: 109182 - RNA, 19 nt, Homo sapiens
  misc_RNA (1)...(19): siRNA sense strand
guauuuggcugaggaguuu

SEQ ID NO: 109183 - RNA, 19 nt, Homo sapiens
  misc_RNA (1)...(19): siRNA sense strand
caacaugggaggauuagaa

SEQ ID NO: 109184 - RNA, 19 nt, Homo sapiens
  misc_RNA (1)...(19): siRNA sense strand
ugaaagacugguugaaaua

SEQ ID NO: 109185 - RNA, 19 nt, Homo sapiens
  misc_RNA (1)...(19): siRNA sense strand
ucaaggcaaucucaaagaa

SEQ ID NO: 109186 - RNA, 19 nt, Homo sapiens
  misc_RNA (1)...(19): siRNA sense strand
ggaagaagaaauuaucuca

SEQ ID NO: 109187 - RNA, 19 nt, Homo sapiens
  misc_RNA (1)...(19): siRNA sense strand
caaagaugcaaacggcuua

SEQ ID NO: 109188 - RNA, 19 nt, Homo sapiens
  misc_RNA (1)...(19): siRNA sense strand
gaaguucuacaaaggauug

SEQ ID NO: 109189 - RNA, 19 nt, Homo sapiens
  misc_RNA (1)...(19): siRNA sense strand
uccaugaacuucuauguau

SEQ ID NO: 109190 - RNA, 19 nt, Homo sapiens
  misc_RNA (1)...(19): siRNA sense strand
ccagcauucuuaucuacua

SEQ ID NO: 109191 - RNA, 19 nt, Homo sapiens
  misc_RNA (1)...(19): siRNA sense strand
cauccuccuugaaguauuu

SEQ ID NO: 109192 - RNA, 19 nt, Homo sapiens
  misc_RNA (1)...(19): siRNA sense strand
guaccuugauucagagaga

SEQ ID NO: 109193 - RNA, 19 nt, Homo sapiens
  misc_RNA (1)...(19): siRNA sense strand
gcugaaagacugguugaaa

SEQ ID NO: 109194 - RNA, 19 nt, Homo sapiens
  misc_RNA (1)...(19): siRNA sense strand
ucaccagcauucuuaucua

SEQ ID NO: 109195 - RNA, 19 nt, Homo sapiens
  misc_RNA (1)...(19): siRNA sense strand
gugaugaaguucuacaaag

SEQ ID NO: 109196 - RNA, 19 nt, Homo sapiens
  misc_RNA (1)...(19): siRNA sense strand
cugaaagacugguugaaau

SEQ ID NO: 109197 - RNA, 19 nt, Homo sapiens
  misc_RNA (1)...(19): siRNA sense strand
gaaagacugguugaaauag

SEQ ID NO: 109198 - RNA, 19 nt, Homo sapiens
  misc_RNA (1)...(19): siRNA sense strand
agaaggagcugugguguac

SEQ ID NO: 109199 - RNA, 19 nt, Homo sapiens
  misc_RNA (1)...(19): siRNA sense strand
uccaguaccuugauucaga

SEQ ID NO: 109200 - RNA, 19 nt, Homo sapiens
  misc_RNA (1)...(19): siRNA sense strand
caaagaaagaaacaaguuc

SEQ ID NO: 109201 - RNA, 19 nt, Homo sapiens
  misc_RNA (1)...(19): siRNA sense strand
ccagauauuuuaacacuga

SEQ ID NO: 109202 - RNA, 19 nt, Homo sapiens
  misc_RNA (1)...(19): siRNA sense strand
gaguagacaucagauccuu

SEQ ID NO: 109203 - RNA, 19 nt, Homo sapiens
  misc_RNA (1)...(19): siRNA sense strand
ucagagagaagacagauuc

SEQ ID NO: 109204 - RNA, 19 nt, Homo sapiens
  misc_RNA (1)...(19): siRNA sense strand
ggauccagcugugugauag

SEQ ID NO: 109205 - RNA, 19 nt, Homo sapiens
  misc_RNA (1)...(19): siRNA sense strand
ggacgaagcccugcauggu

SEQ ID NO: 109206 - RNA, 19 nt, Homo sapiens
  misc_RNA (1)...(19): siRNA sense strand
cacaaaggucugcugauuu

SEQ ID NO: 109207 - RNA, 19 nt, Homo sapiens
  misc_RNA (1)...(19): siRNA sense strand
caaggcaaucucaaagaaa

SEQ ID NO: 109208 - RNA, 19 nt, Homo sapiens
  misc_RNA (1)...(19): siRNA sense strand
guggaucccucacagagau

SEQ ID NO: 109209 - RNA, 19 nt, Homo sapiens
  misc_RNA (1)...(19): siRNA sense strand
ugugauagccgcacuagga

SEQ ID NO: 109210 - RNA, 19 nt, Homo sapiens
  misc_RNA (1)...(19): siRNA sense strand
gaugaaguucuacaaagga

SEQ ID NO: 109211 - RNA, 19 nt, Homo sapiens
  misc_RNA (1)...(19): siRNA sense strand
ccaccaacaugggaggauu

SEQ ID NO: 109212 - RNA, 19 nt, Homo sapiens
  misc_RNA (1)...(19): siRNA sense strand
gauagccgcacuaggaaau

SEQ ID NO: 109213 - RNA, 19 nt, Homo sapiens
  misc_RNA (1)...(19): siRNA sense strand
caacuucaaggcaaucuca

SEQ ID NO: 109214 - RNA, 19 nt, Homo sapiens
  misc_RNA (1)...(19): siRNA sense strand
caccugugaugaaguucua

SEQ ID NO: 109215 - RNA, 19 nt, Homo sapiens
  misc_RNA (1)...(19): siRNA sense strand
ccaugaacuucuauguaug

SEQ ID NO: 109216 - RNA, 19 nt, Homo sapiens
  misc_RNA (1)...(19): siRNA sense strand
cacuggagcuuaugaaggu

SEQ ID NO: 109217 - RNA, 19 nt, Homo sapiens
  misc_RNA (1)...(19): siRNA sense strand
cgaguggguuuaucacaag

SEQ ID NO: 109218 - RNA, 19 nt, Homo sapiens
  misc_RNA (1)...(19): siRNA sense strand
guccaugaacuucuaugua

SEQ ID NO: 109219 - RNA, 19 nt, Homo sapiens
  misc_RNA (1)...(19): siRNA sense strand
ucauuugucuacaccauca

SEQ ID NO: 109220 - RNA, 19 nt, Homo sapiens
  misc_RNA (1)...(19): siRNA sense strand
ugaugaaguucuacaaagg

SEQ ID NO: 109221 - RNA, 19 nt, Homo sapiens
  misc_RNA (1)...(19): siRNA sense strand
gauuacaacccaucugagu

SEQ ID NO: 109222 - RNA, 19 nt, Homo sapiens
  misc_RNA (1)...(19): siRNA sense strand
ggaggaaggccugguucuu

SEQ ID NO: 109223 - RNA, 19 nt, Homo sapiens
  misc_RNA (1)...(19): siRNA sense strand
ugacuggucugaguuaucg

SEQ ID NO: 109224 - RNA, 19 nt, Homo sapiens
  misc_RNA (1)...(19): siRNA sense strand
gcauccuccuugaaguauu

SEQ ID NO: 109225 - RNA, 19 nt, Homo sapiens
  misc_RNA (1)...(19): siRNA sense strand
aaaggaguuugaugcacaa

SEQ ID NO: 109226 - RNA, 19 nt, Homo sapiens
  misc_RNA (1)...(19): siRNA sense strand
uuucucaccagcauucuua

SEQ ID NO: 109227 - RNA, 19 nt, Homo sapiens
  misc_RNA (1)...(19): siRNA sense strand
uuaucgagguguccaugaa

SEQ ID NO: 109228 - RNA, 19 nt, Homo sapiens
  misc_RNA (1)...(19): siRNA sense strand
aaggcaaucucaaagaaag

SEQ ID NO: 109229 - RNA, 19 nt, Homo sapiens
  misc_RNA (1)...(19): siRNA sense strand
uagaaggagcuguggugua

SEQ ID NO: 109230 - RNA, 19 nt, Homo sapiens
  misc_RNA (1)...(19): siRNA sense strand
caccaacaugggaggauua

SEQ ID NO: 109231 - RNA, 19 nt, Homo sapiens
  misc_RNA (1)...(19): siRNA sense strand
ugacaaguaguaaaguuca

SEQ ID NO: 109232 - RNA, 19 nt, Homo sapiens
  misc_RNA (1)...(19): siRNA sense strand
caaggaggaaggccugguu

SEQ ID NO: 109233 - RNA, 19 nt, Homo sapiens
  misc_RNA (1)...(19): siRNA sense strand
acgaguggguuuaucacaa

SEQ ID NO: 109234 - RNA, 19 nt, Homo sapiens
  misc_RNA (1)...(19): siRNA sense strand
caugggaggauuagaagga

SEQ ID NO: 109235 - RNA, 19 nt, Homo sapiens
  misc_RNA (1)...(19): siRNA sense strand
gucuccagcugaugauuug

SEQ ID NO: 109236 - RNA, 19 nt, Homo sapiens
  misc_RNA (1)...(19): siRNA sense strand
ggagcugugguguacauug

SEQ ID NO: 109237 - RNA, 19 nt, Homo sapiens
  misc_RNA (1)...(19): siRNA sense strand
guagacaucagauccuuac

SEQ ID NO: 109238 - RNA, 19 nt, Homo sapiens
  misc_RNA (1)...(19): siRNA sense strand
caccagcauucuuaucuac

SEQ ID NO: 109239 - RNA, 19 nt, Homo sapiens
  misc_RNA (1)...(19): siRNA sense strand
gaguggguuuaucacaaga

SEQ ID NO: 109240 - RNA, 19 nt, Homo sapiens
  misc_RNA (1)...(19): siRNA sense strand
gacaaguaguaaaguucau

SEQ ID NO: 109241 - RNA, 19 nt, Homo sapiens
  misc_RNA (1)...(19): siRNA sense strand
gcugugguguacauugaca

SEQ ID NO: 109242 - RNA, 19 nt, Homo sapiens
  misc_RNA (1)...(19): siRNA sense strand
gcaaucucaaagaaagaaa

SEQ ID NO: 109243 - RNA, 19 nt, Homo sapiens
  misc_RNA (1)...(19): siRNA sense strand
guacauugacacagagucu

SEQ ID NO: 109244 - RNA, 19 nt, Homo sapiens
  misc_RNA (1)...(19): siRNA sense strand
ggaucccucacagagauua

SEQ ID NO: 109245 - RNA, 19 nt, Homo sapiens
  misc_RNA (1)...(19): siRNA sense strand
aaggucugcugauuucuca

SEQ ID NO: 109246 - RNA, 19 nt, Homo sapiens
  misc_RNA (1)...(19): siRNA sense strand
cuacauuacccaccaacau

SEQ ID NO: 109247 - RNA, 19 nt, Homo sapiens
  misc_RNA (1)...(19): siRNA sense strand
uacauuacccaccaacaug

SEQ ID NO: 109248 - RNA, 19 nt, Homo sapiens
  misc_RNA (1)...(19): siRNA sense strand
gugauagccgcacuaggaa

SEQ ID NO: 109249 - RNA, 19 nt, Homo sapiens
  misc_RNA (1)...(19): siRNA sense strand
cagaaaggaguuugaugca

SEQ ID NO: 109250 - RNA, 19 nt, Homo sapiens
  misc_RNA (1)...(19): siRNA sense strand
ggcaaucucaaagaaagaa

SEQ ID NO: 109251 - RNA, 19 nt, Homo sapiens
  misc_RNA (1)...(19): siRNA sense strand
aaggagcugugguguacau

SEQ ID NO: 109252 - RNA, 19 nt, Homo sapiens
  misc_RNA (1)...(19): siRNA sense strand
ggugacuggucugaguuau

SEQ ID NO: 109253 - RNA, 19 nt, Homo sapiens
  misc_RNA (1)...(19): siRNA sense strand
aggcauccuccuugaagua

SEQ ID NO: 109254 - RNA, 19 nt, Homo sapiens
  misc_RNA (1)...(19): siRNA sense strand
ggucagaaaggaguuugau

SEQ ID NO: 109255 - RNA, 19 nt, Homo sapiens
  misc_RNA (1)...(19): siRNA sense strand
ugcauuuagugcugaaaga

SEQ ID NO: 109256 - RNA, 19 nt, Homo sapiens
  misc_RNA (1)...(19): siRNA sense strand
gagcauuuuggcuacauua

SEQ ID NO: 109257 - RNA, 19 nt, Homo sapiens
  misc_RNA (1)...(19): siRNA sense strand
ucccaguuaucuugacgaa

SEQ ID NO: 109258 - RNA, 19 nt, Homo sapiens
  misc_RNA (1)...(19): siRNA sense strand
caugaacuucuauguaugg

SEQ ID NO: 109259 - RNA, 19 nt, Homo sapiens
  misc_RNA (1)...(19): siRNA sense strand
aagacugguugaaauagca

SEQ ID NO: 109260 - RNA, 19 nt, Homo sapiens
  misc_RNA (1)...(19): siRNA sense strand
gcauggugguguggcuugu

SEQ ID NO: 109261 - RNA, 19 nt, Homo sapiens
  misc_RNA (1)...(19): siRNA sense strand
ccucauuugucuacaccau

SEQ ID NO: 109262 - RNA, 19 nt, Homo sapiens
  misc_RNA (1)...(19): siRNA sense strand
gcacaacuucaaggcaauc

SEQ ID NO: 109263 - RNA, 19 nt, Homo sapiens
  misc_RNA (1)...(19): siRNA sense strand
ugugaugaaguucuacaaa

SEQ ID NO: 109264 - RNA, 19 nt, Homo sapiens
  misc_RNA (1)...(19): siRNA sense strand
aaagacugguugaaauagc

SEQ ID NO: 109265 - RNA, 19 nt, Homo sapiens
  misc_RNA (1)...(19): siRNA sense strand
gcaaacggcuuaugggaua

SEQ ID NO: 109266 - RNA, 19 nt, Homo sapiens
  misc_RNA (1)...(19): siRNA sense strand
ggaaauaccuggagucaca

SEQ ID NO: 109267 - RNA, 19 nt, Homo sapiens
  misc_RNA (1)...(19): siRNA sense strand
gcacaaaggucugcugauu

SEQ ID NO: 109268 - RNA, 19 nt, Homo sapiens
  misc_RNA (1)...(19): siRNA sense strand
gaaggugacuggucugagu

SEQ ID NO: 109269 - RNA, 19 nt, Homo sapiens
  misc_RNA (1)...(19): siRNA sense strand
cuacuacccuuucugcuuu

SEQ ID NO: 109270 - RNA, 19 nt, Homo sapiens
  misc_RNA (1)...(19): siRNA sense strand
gagcugugguguacauuga

SEQ ID NO: 109271 - RNA, 19 nt, Homo sapiens
  misc_RNA (1)...(19): siRNA sense strand
ccaguuaucuugacgaauc

SEQ ID NO: 109272 - RNA, 19 nt, Homo sapiens
  misc_RNA (1)...(19): siRNA sense strand
acaaaggucugcugauuuc

SEQ ID NO: 109273 - RNA, 19 nt, Homo sapiens
  misc_RNA (1)...(19): siRNA sense strand
guauuuggcugaggaguuu

SEQ ID NO: 109274 - RNA, 19 nt, Homo sapiens
  misc_RNA (1)...(19): siRNA sense strand
caacaugggaggauuagaa

SEQ ID NO: 109275 - RNA, 19 nt, Homo sapiens
  misc_RNA (1)...(19): siRNA sense strand
ugaaagacugguugaaaua

SEQ ID NO: 109276 - RNA, 19 nt, Homo sapiens
  misc_RNA (1)...(19): siRNA sense strand
ucaaggcaaucucaaagaa

SEQ ID NO: 109277 - RNA, 19 nt, Homo sapiens
  misc_RNA (1)...(19): siRNA sense strand
ggaagaagaaauuaucuca

SEQ ID NO: 109278 - RNA, 19 nt, Homo sapiens
  misc_RNA (1)...(19): siRNA sense strand
caaagaugcaaacggcuua

SEQ ID NO: 109279 - RNA, 19 nt, Homo sapiens
  misc_RNA (1)...(19): siRNA sense strand
gaaguucuacaaaggauug

SEQ ID NO: 109280 - RNA, 19 nt, Homo sapiens
  misc_RNA (1)...(19): siRNA sense strand
uccaugaacuucuauguau

SEQ ID NO: 109281 - RNA, 19 nt, Homo sapiens
  misc_RNA (1)...(19): siRNA sense strand
ccagcauucuuaucuacua

SEQ ID NO: 109282 - RNA, 19 nt, Homo sapiens
  misc_RNA (1)...(19): siRNA sense strand
cauccuccuugaaguauuu

SEQ ID NO: 109283 - RNA, 19 nt, Homo sapiens
  misc_RNA (1)...(19): siRNA sense strand
guaccuugauucagagaga

SEQ ID NO: 109284 - RNA, 19 nt, Homo sapiens
  misc_RNA (1)...(19): siRNA sense strand
gcugaaagacugguugaaa

SEQ ID NO: 109285 - RNA, 19 nt, Homo sapiens
  misc_RNA (1)...(19): siRNA sense strand
ucaccagcauucuuaucua

SEQ ID NO: 109286 - RNA, 19 nt, Homo sapiens
  misc_RNA (1)...(19): siRNA sense strand
gugaugaaguucuacaaag

SEQ ID NO: 109287 - RNA, 19 nt, Homo sapiens
  misc_RNA (1)...(19): siRNA sense strand
cugaaagacugguugaaau

SEQ ID NO: 109288 - RNA, 19 nt, Homo sapiens
  misc_RNA (1)...(19): siRNA sense strand
gaaagacugguugaaauag

SEQ ID NO: 109289 - RNA, 19 nt, Homo sapiens
  misc_RNA (1)...(19): siRNA sense strand
agaaggagcugugguguac

SEQ ID NO: 109290 - RNA, 19 nt, Homo sapiens
  misc_RNA (1)...(19): siRNA sense strand
uccaguaccuugauucaga

SEQ ID NO: 109291 - RNA, 19 nt, Homo sapiens
  misc_RNA (1)...(19): siRNA sense strand
caaagaaagaaacaaguuc

SEQ ID NO: 109292 - RNA, 19 nt, Homo sapiens
  misc_RNA (1)...(19): siRNA sense strand
ccagauauuuuaacacuga

SEQ ID NO: 109293 - RNA, 19 nt, Homo sapiens
  misc_RNA (1)...(19): siRNA sense strand
gaguagacaucagauccuu

SEQ ID NO: 109294 - RNA, 19 nt, Homo sapiens
  misc_RNA (1)...(19): siRNA sense strand
ucagagagaagacagauuc

SEQ ID NO: 109295 - RNA, 19 nt, Homo sapiens
  misc_RNA (1)...(19): siRNA sense strand
ggauccagcugugugauag

SEQ ID NO: 109296 - RNA, 19 nt, Homo sapiens
  misc_RNA (1)...(19): siRNA sense strand
ggacgaagcccugcauggu

SEQ ID NO: 109297 - RNA, 19 nt, Homo sapiens
  misc_RNA (1)...(19): siRNA sense strand
cacaaaggucugcugauuu

SEQ ID NO: 109298 - RNA, 19 nt, Homo sapiens
  misc_RNA (1)...(19): siRNA sense strand
caaggcaaucucaaagaaa

SEQ ID NO: 109299 - RNA, 19 nt, Homo sapiens
  misc_RNA (1)...(19): siRNA sense strand
guggaucccucacagagau

SEQ ID NO: 109300 - RNA, 19 nt, Homo sapiens
  misc_RNA (1)...(19): siRNA sense strand
ugugauagccgcacuagga

SEQ ID NO: 109301 - RNA, 19 nt, Homo sapiens
  misc_RNA (1)...(19): siRNA sense strand
gaugaaguucuacaaagga

SEQ ID NO: 109302 - RNA, 19 nt, Homo sapiens
  misc_RNA (1)...(19): siRNA sense strand
ccaccaacaugggaggauu

SEQ ID NO: 109303 - RNA, 19 nt, Homo sapiens
  misc_RNA (1)...(19): siRNA sense strand
gauagccgcacuaggaaau

SEQ ID NO: 109304 - RNA, 19 nt, Homo sapiens
  misc_RNA (1)...(19): siRNA sense strand
caacuucaaggcaaucuca

SEQ ID NO: 109305 - RNA, 19 nt, Homo sapiens
  misc_RNA (1)...(19): siRNA sense strand
caccugugaugaaguucua

SEQ ID NO: 109306 - RNA, 19 nt, Homo sapiens
  misc_RNA (1)...(19): siRNA sense strand
ccaugaacuucuauguaug

SEQ ID NO: 109307 - RNA, 19 nt, Homo sapiens
  misc_RNA (1)...(19): siRNA sense strand
cacuggagcuuaugaaggu

SEQ ID NO: 109308 - RNA, 19 nt, Homo sapiens
  misc_RNA (1)...(19): siRNA sense strand
cgaguggguuuaucacaag

SEQ ID NO: 109309 - RNA, 19 nt, Homo sapiens
  misc_RNA (1)...(19): siRNA sense strand
guccaugaacuucuaugua

SEQ ID NO: 109310 - RNA, 19 nt, Homo sapiens
  misc_RNA (1)...(19): siRNA sense strand
ucauuugucuacaccauca

SEQ ID NO: 109311 - RNA, 19 nt, Homo sapiens
  misc_RNA (1)...(19): siRNA sense strand
ugaugaaguucuacaaagg

SEQ ID NO: 109312 - RNA, 19 nt, Homo sapiens
  misc_RNA (1)...(19): siRNA sense strand
gauuacaacccaucugagu

SEQ ID NO: 109313 - RNA, 19 nt, Homo sapiens
  misc_RNA (1)...(19): siRNA sense strand
ggaggaaggccugguucuu

SEQ ID NO: 109314 - RNA, 19 nt, Homo sapiens
  misc_RNA (1)...(19): siRNA sense strand
ugacuggucugaguuaucg

SEQ ID NO: 109315 - RNA, 19 nt, Homo sapiens
  misc_RNA (1)...(19): siRNA sense strand
gcauccuccuugaaguauu

SEQ ID NO: 109316 - RNA, 19 nt, Homo sapiens
  misc_RNA (1)...(19): siRNA sense strand
aaaggaguuugaugcacaa

SEQ ID NO: 109317 - RNA, 19 nt, Homo sapiens
  misc_RNA (1)...(19): siRNA sense strand
uuucucaccagcauucuua

SEQ ID NO: 109318 - RNA, 19 nt, Homo sapiens
  misc_RNA (1)...(19): siRNA sense strand
uuaucgagguguccaugaa

SEQ ID NO: 109319 - RNA, 19 nt, Homo sapiens
  misc_RNA (1)...(19): siRNA sense strand
aaggcaaucucaaagaaag

SEQ ID NO: 109320 - RNA, 19 nt, Homo sapiens
  misc_RNA (1)...(19): siRNA sense strand
uagaaggagcuguggugua

SEQ ID NO: 109321 - RNA, 19 nt, Homo sapiens
  misc_RNA (1)...(19): siRNA sense strand
caccaacaugggaggauua

SEQ ID NO: 109322 - RNA, 19 nt, Homo sapiens
  misc_RNA (1)...(19): siRNA sense strand
ugacaaguaguaaaguuca

SEQ ID NO: 109323 - RNA, 19 nt, Homo sapiens
  misc_RNA (1)...(19): siRNA sense strand
caaggaggaaggccugguu

SEQ ID NO: 109324 - RNA, 19 nt, Homo sapiens
  misc_RNA (1)...(19): siRNA sense strand
acgaguggguuuaucacaa

SEQ ID NO: 109325 - RNA, 19 nt, Homo sapiens
  misc_RNA (1)...(19): siRNA sense strand
caugggaggauuagaagga

SEQ ID NO: 109326 - RNA, 19 nt, Homo sapiens
  misc_RNA (1)...(19): siRNA sense strand
gucuccagcugaugauuug

SEQ ID NO: 109327 - RNA, 19 nt, Homo sapiens
  misc_RNA (1)...(19): siRNA sense strand
ggagcugugguguacauug

SEQ ID NO: 109328 - RNA, 19 nt, Homo sapiens
  misc_RNA (1)...(19): siRNA sense strand
guagacaucagauccuuac

SEQ ID NO: 109329 - RNA, 19 nt, Homo sapiens
  misc_RNA (1)...(19): siRNA sense strand
caccagcauucuuaucuac

SEQ ID NO: 109330 - RNA, 19 nt, Homo sapiens
  misc_RNA (1)...(19): siRNA sense strand
gaguggguuuaucacaaga

SEQ ID NO: 109331 - RNA, 19 nt, Homo sapiens
  misc_RNA (1)...(19): siRNA sense strand
gacaaguaguaaaguucau

SEQ ID NO: 109332 - RNA, 19 nt, Homo sapiens
  misc_RNA (1)...(19): siRNA sense strand
gcugugguguacauugaca

SEQ ID NO: 109333 - RNA, 19 nt, Homo sapiens
  misc_RNA (1)...(19): siRNA sense strand
gcaaucucaaagaaagaaa

SEQ ID NO: 109334 - RNA, 19 nt, Homo sapiens
  misc_RNA (1)...(19): siRNA sense strand
guacauugacacagagucu

SEQ ID NO: 109335 - RNA, 19 nt, Homo sapiens
  misc_RNA (1)...(19): siRNA sense strand
ggaucccucacagagauua

SEQ ID NO: 109336 - RNA, 19 nt, Homo sapiens
  misc_RNA (1)...(19): siRNA sense strand
aaggucugcugauuucuca

SEQ ID NO: 109337 - RNA, 19 nt, Homo sapiens
  misc_RNA (1)...(19): siRNA sense strand
cuacauuacccaccaacau

SEQ ID NO: 109338 - RNA, 19 nt, Homo sapiens
  misc_RNA (1)...(19): siRNA sense strand
uacauuacccaccaacaug

SEQ ID NO: 109339 - RNA, 19 nt, Homo sapiens
  misc_RNA (1)...(19): siRNA sense strand
gugauagccgcacuaggaa

SEQ ID NO: 109340 - RNA, 19 nt, Homo sapiens
  misc_RNA (1)...(19): siRNA sense strand
cagaaaggaguuugaugca

SEQ ID NO: 109341 - RNA, 19 nt, Homo sapiens
  misc_RNA (1)...(19): siRNA sense strand
ggcaaucucaaagaaagaa

SEQ ID NO: 109342 - RNA, 19 nt, Homo sapiens
  misc_RNA (1)...(19): siRNA sense strand
aaggagcugugguguacau

SEQ ID NO: 109343 - RNA, 19 nt, Homo sapiens
  misc_RNA (1)...(19): siRNA sense strand
ggugacuggucugaguuau

SEQ ID NO: 109344 - RNA, 19 nt, Homo sapiens
  misc_RNA (1)...(19): siRNA sense strand
aggcauccuccuugaagua

SEQ ID NO: 109345 - RNA, 19 nt, Homo sapiens
  misc_RNA (1)...(19): siRNA sense strand
ggucagaaaggaguuugau

SEQ ID NO: 109346 - RNA, 19 nt, Homo sapiens
  misc_RNA (1)...(19): siRNA sense strand
ugcauuuagugcugaaaga

SEQ ID NO: 109347 - RNA, 19 nt, Homo sapiens
  misc_RNA (1)...(19): siRNA sense strand
gagcauuuuggcuacauua

SEQ ID NO: 109348 - RNA, 19 nt, Homo sapiens
  misc_RNA (1)...(19): siRNA sense strand
ucccaguuaucuugacgaa

SEQ ID NO: 109349 - RNA, 19 nt, Homo sapiens
  misc_RNA (1)...(19): siRNA sense strand
caugaacuucuauguaugg

SEQ ID NO: 109350 - RNA, 19 nt, Homo sapiens
  misc_RNA (1)...(19): siRNA sense strand
aagacugguugaaauagca

SEQ ID NO: 109351 - RNA, 19 nt, Homo sapiens
  misc_RNA (1)...(19): siRNA sense strand
gcauggugguguggcuugu

SEQ ID NO: 109352 - RNA, 19 nt, Homo sapiens
  misc_RNA (1)...(19): siRNA sense strand
ccucauuugucuacaccau

SEQ ID NO: 109353 - RNA, 19 nt, Homo sapiens
  misc_RNA (1)...(19): siRNA sense strand
gcacaacuucaaggcaauc

SEQ ID NO: 109354 - RNA, 19 nt, Homo sapiens
  misc_RNA (1)...(19): siRNA sense strand
ugugaugaaguucuacaaa

SEQ ID NO: 109355 - RNA, 19 nt, Homo sapiens
  misc_RNA (1)...(19): siRNA sense strand
aaagacugguugaaauagc

SEQ ID NO: 109356 - RNA, 19 nt, Homo sapiens
  misc_RNA (1)...(19): siRNA sense strand
gaaaccgucuggagaauga

SEQ ID NO: 109357 - RNA, 19 nt, Homo sapiens
  misc_RNA (1)...(19): siRNA sense strand
ggaagauucuggacccuaa

SEQ ID NO: 109358 - RNA, 19 nt, Homo sapiens
  misc_RNA (1)...(19): siRNA sense strand
uaaaggagcugaacuuguc

SEQ ID NO: 109359 - RNA, 19 nt, Homo sapiens
  misc_RNA (1)...(19): siRNA sense strand
gagcugaacuugucauucu

SEQ ID NO: 109360 - RNA, 19 nt, Homo sapiens
  misc_RNA (1)...(19): siRNA sense strand
gacaacaccuucacugaga

SEQ ID NO: 109361 - RNA, 19 nt, Homo sapiens
  misc_RNA (1)...(19): siRNA sense strand
gcaagagccucaaacucaa

SEQ ID NO: 109362 - RNA, 19 nt, Homo sapiens
  misc_RNA (1)...(19): siRNA sense strand
gagaagaagucggaguuga

SEQ ID NO: 109363 - RNA, 19 nt, Homo sapiens
  misc_RNA (1)...(19): siRNA sense strand
ggaagaagaggaagcagaa

SEQ ID NO: 109364 - RNA, 19 nt, Homo sapiens
  misc_RNA (1)...(19): siRNA sense strand
gaacuugucauucugugaa

SEQ ID NO: 109365 - RNA, 19 nt, Homo sapiens
  misc_RNA (1)...(19): siRNA sense strand
gaccgaaugucaccggaaa

SEQ ID NO: 109366 - RNA, 19 nt, Homo sapiens
  misc_RNA (1)...(19): siRNA sense strand
ggcaagagccucaaacuca

SEQ ID NO: 109367 - RNA, 19 nt, Homo sapiens
  misc_RNA (1)...(19): siRNA sense strand
gcacaugggucugcucaag

SEQ ID NO: 109368 - RNA, 19 nt, Homo sapiens
  misc_RNA (1)...(19): siRNA sense strand
gcaagccucuggcccugaa

SEQ ID NO: 109369 - RNA, 19 nt, Homo sapiens
  misc_RNA (1)...(19): siRNA sense strand
caagagcuccgugcugaua

SEQ ID NO: 109370 - RNA, 19 nt, Homo sapiens
  misc_RNA (1)...(19): siRNA sense strand
ggaaggagaagaggaagaa

SEQ ID NO: 109371 - RNA, 19 nt, Homo sapiens
  misc_RNA (1)...(19): siRNA sense strand
ggaggaagaugaggaagag

SEQ ID NO: 109372 - RNA, 19 nt, Homo sapiens
  misc_RNA (1)...(19): siRNA sense strand
gguggucucugccuuccua

SEQ ID NO: 109373 - RNA, 19 nt, Homo sapiens
  misc_RNA (1)...(19): siRNA sense strand
gcaacacccugggagaaga

SEQ ID NO: 109374 - RNA, 19 nt, Homo sapiens
  misc_RNA (1)...(19): siRNA sense strand
cuaaaggugucaucugugu

SEQ ID NO: 109375 - RNA, 19 nt, Homo sapiens
  misc_RNA (1)...(19): siRNA sense strand
uggagaagcuggaccugaa

SEQ ID NO: 109376 - RNA, 19 nt, Homo sapiens
  misc_RNA (1)...(19): siRNA sense strand
ggaggaaggagaagaggaa

SEQ ID NO: 109377 - RNA, 19 nt, Homo sapiens
  misc_RNA (1)...(19): siRNA sense strand
agguggaggugauuaauuu

SEQ ID NO: 109378 - RNA, 19 nt, Homo sapiens
  misc_RNA (1)...(19): siRNA sense strand
gcucaagagugaagacaag

SEQ ID NO: 109379 - RNA, 19 nt, Homo sapiens
  misc_RNA (1)...(19): siRNA sense strand
uagaugcccugaugcagaa

SEQ ID NO: 109380 - RNA, 19 nt, Homo sapiens
  misc_RNA (1)...(19): siRNA sense strand
ggucaucgccaaggccuua

SEQ ID NO: 109381 - RNA, 19 nt, Homo sapiens
  misc_RNA (1)...(19): siRNA sense strand
cagaagaugcuaaagaugu

SEQ ID NO: 109382 - RNA, 19 nt, Homo sapiens
  misc_RNA (1)...(19): siRNA sense strand
gccaaggccuuagagaaga

SEQ ID NO: 109383 - RNA, 19 nt, Homo sapiens
  misc_RNA (1)...(19): siRNA sense strand
ccaaggccuuagagaagaa

SEQ ID NO: 109384 - RNA, 19 nt, Homo sapiens
  misc_RNA (1)...(19): siRNA sense strand
gaacucaagcucaacaacu

SEQ ID NO: 109385 - RNA, 19 nt, Homo sapiens
  misc_RNA (1)...(19): siRNA sense strand
acucaacacugcagaagau

SEQ ID NO: 109386 - RNA, 19 nt, Homo sapiens
  misc_RNA (1)...(19): siRNA sense strand
ugucaucuguguucaagga

SEQ ID NO: 109387 - RNA, 19 nt, Homo sapiens
  misc_RNA (1)...(19): siRNA sense strand
ugcagaagaugcuaaagau

SEQ ID NO: 109388 - RNA, 19 nt, Homo sapiens
  misc_RNA (1)...(19): siRNA sense strand
ggaggaggaagaugaggaa

SEQ ID NO: 109389 - RNA, 19 nt, Homo sapiens
  misc_RNA (1)...(19): siRNA sense strand
ggacagcugaguuucaaag

SEQ ID NO: 109390 - RNA, 19 nt, Homo sapiens
  misc_RNA (1)...(19): siRNA sense strand
caacacagugggcguggaa

SEQ ID NO: 109391 - RNA, 19 nt, Homo sapiens
  misc_RNA (1)...(19): siRNA sense strand
ggaagaggaggaagaagag

SEQ ID NO: 109392 - RNA, 19 nt, Homo sapiens
  misc_RNA (1)...(19): siRNA sense strand
agaagaugcuaaagaugug

SEQ ID NO: 109393 - RNA, 19 nt, Homo sapiens
  misc_RNA (1)...(19): siRNA sense strand
ggaggaggaggaaggagaa

SEQ ID NO: 109394 - RNA, 19 nt, Homo sapiens
  misc_RNA (1)...(19): siRNA sense strand
caaccacccuggcaucacu

SEQ ID NO: 109395 - RNA, 19 nt, Homo sapiens
  misc_RNA (1)...(19): siRNA sense strand
cugcagcucugaccgaaug

SEQ ID NO: 109396 - RNA, 19 nt, Homo sapiens
  misc_RNA (1)...(19): siRNA sense strand
gaagaagucggaguugaag

SEQ ID NO: 109397 - RNA, 19 nt, Homo sapiens
  misc_RNA (1)...(19): siRNA sense strand
gcagaagaugcuaaagaug

SEQ ID NO: 109398 - RNA, 19 nt, Homo sapiens
  misc_RNA (1)...(19): siRNA sense strand
agaagaagucggaguugaa

SEQ ID NO: 109399 - RNA, 19 nt, Homo sapiens
  misc_RNA (1)...(19): siRNA sense strand
ugcaguagaugcccugaug

SEQ ID NO: 109400 - RNA, 19 nt, Homo sapiens
  misc_RNA (1)...(19): siRNA sense strand
gcuaaaggagcugaacuug

SEQ ID NO: 109401 - RNA, 19 nt, Homo sapiens
  misc_RNA (1)...(19): siRNA sense strand
gggagaagaaggcugugaa

SEQ ID NO: 109402 - RNA, 19 nt, Homo sapiens
  misc_RNA (1)...(19): siRNA sense strand
gaugcuaaagaugugauua

SEQ ID NO: 109403 - RNA, 19 nt, Homo sapiens
  misc_RNA (1)...(19): siRNA sense strand
cggaagacauugccaagcu

SEQ ID NO: 109404 - RNA, 19 nt, Homo sapiens
  misc_RNA (1)...(19): siRNA sense strand
agaagaggaagcagaagaa

SEQ ID NO: 109405 - RNA, 19 nt, Homo sapiens
  misc_RNA (1)...(19): siRNA sense strand
uagagaagaagucggaguu

SEQ ID NO: 109406 - RNA, 19 nt, Homo sapiens
  misc_RNA (1)...(19): siRNA sense strand
aagaagaggaggaggaaga

SEQ ID NO: 109407 - RNA, 19 nt, Homo sapiens
  misc_RNA (1)...(19): siRNA sense strand
caagggugcaguugccauu

SEQ ID NO: 109408 - RNA, 19 nt, Homo sapiens
  misc_RNA (1)...(19): siRNA sense strand
aagaggaggaggaagauga

SEQ ID NO: 109409 - RNA, 19 nt, Homo sapiens
  misc_RNA (1)...(19): siRNA sense strand
ggugucaucuguguucaag

SEQ ID NO: 109410 - RNA, 19 nt, Homo sapiens
  misc_RNA (1)...(19): siRNA sense strand
ggaagcagccagggucauc

SEQ ID NO: 109411 - RNA, 19 nt, Homo sapiens
  misc_RNA (1)...(19): siRNA sense strand
cugcagacgucuccaccuu

SEQ ID NO: 109412 - RNA, 19 nt, Homo sapiens
  misc_RNA (1)...(19): siRNA sense strand
ggaggaggaggaggaagaa

SEQ ID NO: 109413 - RNA, 19 nt, Homo sapiens
  misc_RNA (1)...(19): siRNA sense strand
gaagaugcuaaagauguga

SEQ ID NO: 109414 - RNA, 19 nt, Homo sapiens
  misc_RNA (1)...(19): siRNA sense strand
gcugguggagcuggacuua

SEQ ID NO: 109415 - RNA, 19 nt, Homo sapiens
  misc_RNA (1)...(19): siRNA sense strand
caacagcgcccuggaaucc

SEQ ID NO: 109416 - RNA, 19 nt, Homo sapiens
  misc_RNA (1)...(19): siRNA sense strand
ugauggcgcugaaccacau

SEQ ID NO: 109417 - RNA, 19 nt, Homo sapiens
  misc_RNA (1)...(19): siRNA sense strand
gaaugucaccggaaaucca

SEQ ID NO: 109418 - RNA, 19 nt, Homo sapiens
  misc_RNA (1)...(19): siRNA sense strand
caccagcccugaucucacu

SEQ ID NO: 109419 - RNA, 19 nt, Homo sapiens
  misc_RNA (1)...(19): siRNA sense strand
uccuaaaggugucaucugu

SEQ ID NO: 109420 - RNA, 19 nt, Homo sapiens
  misc_RNA (1)...(19): siRNA sense strand
gcuaaagaugugauuaaag

SEQ ID NO: 109421 - RNA, 19 nt, Homo sapiens
  misc_RNA (1)...(19): siRNA sense strand
uggcgucccucagugauga

SEQ ID NO: 109422 - RNA, 19 nt, Homo sapiens
  misc_RNA (1)...(19): siRNA sense strand
gagaagaaggcugugaaca

SEQ ID NO: 109423 - RNA, 19 nt, Homo sapiens
  misc_RNA (1)...(19): siRNA sense strand
caacacccugggagaagaa

SEQ ID NO: 109424 - RNA, 19 nt, Homo sapiens
  misc_RNA (1)...(19): siRNA sense strand
ugguggagcuggacuuaag

SEQ ID NO: 109425 - RNA, 19 nt, Homo sapiens
  misc_RNA (1)...(19): siRNA sense strand
aaaggugucaucuguguuc

SEQ ID NO: 109426 - RNA, 19 nt, Homo sapiens
  misc_RNA (1)...(19): siRNA sense strand
caaacucaacacugcagaa

SEQ ID NO: 109427 - RNA, 19 nt, Homo sapiens
  misc_RNA (1)...(19): siRNA sense strand
ggaggaggaggaagaagag

SEQ ID NO: 109428 - RNA, 19 nt, Homo sapiens
  misc_RNA (1)...(19): siRNA sense strand
gcuggagggcuucaacaug

SEQ ID NO: 109429 - RNA, 19 nt, Homo sapiens
  misc_RNA (1)...(19): siRNA sense strand
gagaagcuggaccugaaug

SEQ ID NO: 109430 - RNA, 19 nt, Homo sapiens
  misc_RNA (1)...(19): siRNA sense strand
gcaguugccauugcagaug

SEQ ID NO: 109431 - RNA, 19 nt, Homo sapiens
  misc_RNA (1)...(19): siRNA sense strand
ugcaggaacucaagcucaa

SEQ ID NO: 109432 - RNA, 19 nt, Homo sapiens
  misc_RNA (1)...(19): siRNA sense strand
acaacaccuucacugagaa

SEQ ID NO: 109433 - RNA, 19 nt, Homo sapiens
  misc_RNA (1)...(19): siRNA sense strand
ugcagacgcuguacaaggu

SEQ ID NO: 109434 - RNA, 19 nt, Homo sapiens
  misc_RNA (1)...(19): siRNA sense strand
uugaagacuuugacagcuu

SEQ ID NO: 109435 - RNA, 19 nt, Homo sapiens
  misc_RNA (1)...(19): siRNA sense strand
gaagaggaagcagaagaag

SEQ ID NO: 109436 - RNA, 19 nt, Homo sapiens
  misc_RNA (1)...(19): siRNA sense strand
agaagaggaagaagaggaa

SEQ ID NO: 109437 - RNA, 19 nt, Homo sapiens
  misc_RNA (1)...(19): siRNA sense strand
ggaggaggaaggagaagag

SEQ ID NO: 109438 - RNA, 19 nt, Homo sapiens
  misc_RNA (1)...(19): siRNA sense strand
ggagaagcuggaccugaau

SEQ ID NO: 109439 - RNA, 19 nt, Homo sapiens
  misc_RNA (1)...(19): siRNA sense strand
gucauucugugaaaucaag

SEQ ID NO: 109440 - RNA, 19 nt, Homo sapiens
  misc_RNA (1)...(19): siRNA sense strand
cugcagaagaugcuaaaga

SEQ ID NO: 109441 - RNA, 19 nt, Homo sapiens
  misc_RNA (1)...(19): siRNA sense strand
ugauagcccagcagacuga

SEQ ID NO: 109442 - RNA, 19 nt, Homo sapiens
  misc_RNA (1)...(19): siRNA sense strand
agaggaagcagaagaagag

SEQ ID NO: 109443 - RNA, 19 nt, Homo sapiens
  misc_RNA (1)...(19): siRNA sense strand
cuaaaggagcugaacuugu

SEQ ID NO: 109444 - RNA, 19 nt, Homo sapiens
  misc_RNA (1)...(19): siRNA sense strand
gcagguggaggugauuaau

SEQ ID NO: 109445 - RNA, 19 nt, Homo sapiens
  misc_RNA (1)...(19): siRNA sense strand
ugggucugcucaagaguga

SEQ ID NO: 109446 - RNA, 19 nt, Homo sapiens
  misc_RNA (1)...(19): siRNA sense strand
ugaggaagaggaggaagaa

SEQ ID NO: 109447 - RNA, 19 nt, Homo sapiens
  misc_RNA (1)...(19): siRNA sense strand
aagaagaggaagcagaaga

SEQ ID NO: 109448 - RNA, 19 nt, Homo sapiens
  misc_RNA (1)...(19): siRNA sense strand
cagguggaggugauuaauu

SEQ ID NO: 109449 - RNA, 19 nt, Homo sapiens
  misc_RNA (1)...(19): siRNA sense strand
gauuaaagagauugaagac

SEQ ID NO: 109450 - RNA, 19 nt, Homo sapiens
  misc_RNA (1)...(19): siRNA sense strand
ggucucugccuuccuaaag

SEQ ID NO: 109451 - RNA, 19 nt, Homo sapiens
  misc_RNA (1)...(19): siRNA sense strand
aggaagaggaggaagaaga

SEQ ID NO: 109452 - RNA, 19 nt, Homo sapiens
  misc_RNA (1)...(19): siRNA sense strand
gaagaggaggaggaagaug

SEQ ID NO: 109453 - RNA, 19 nt, Homo sapiens
  misc_RNA (1)...(19): siRNA sense strand
ggagaagaaggcugugaac

SEQ ID NO: 109454 - RNA, 19 nt, Homo sapiens
  misc_RNA (1)...(19): siRNA sense strand
uggugcagcaggacuauuu

SEQ ID NO: 109455 - RNA, 19 nt, Homo sapiens
  misc_RNA (1)...(19): siRNA sense strand
acaugggucugcucaagag

SEQ ID NO: 109456 - RNA, 19 nt, Homo sapiens
  misc_RNA (1)...(19): siRNA sense strand
aaacaaagccucgguagac

SEQ ID NO: 109457 - RNA, 19 nt, Homo sapiens
  misc_RNA (1)...(19): siRNA sense strand
gaacggccagggcuucauc

SEQ ID NO: 109458 - RNA, 19 nt, Homo sapiens
  misc_RNA (1)...(19): siRNA sense strand
gagaucgugcggcagauga

SEQ ID NO: 109459 - RNA, 19 nt, Homo sapiens
  misc_RNA (1)...(19): siRNA sense strand
guacgacccgaccaucgaa

SEQ ID NO: 109460 - RNA, 19 nt, Homo sapiens
  misc_RNA (1)...(19): siRNA sense strand
cgagcuauuugccgagauc

SEQ ID NO: 109461 - RNA, 19 nt, Homo sapiens
  misc_RNA (1)...(19): siRNA sense strand
gaguggagcugccccuuca

SEQ ID NO: 109462 - RNA, 19 nt, Homo sapiens
  misc_RNA (1)...(19): siRNA sense strand
ugcgggaccuguacaucaa

SEQ ID NO: 109463 - RNA, 19 nt, Homo sapiens
  misc_RNA (1)...(19): siRNA sense strand
gagcuuccaggacaucaag

SEQ ID NO: 109464 - RNA, 19 nt, Homo sapiens
  misc_RNA (1)...(19): siRNA sense strand
uacgagcgcgugcccauga

SEQ ID NO: 109465 - RNA, 19 nt, Homo sapiens
  misc_RNA (1)...(19): siRNA sense strand
guacacggcucaucgagaa

SEQ ID NO: 109466 - RNA, 19 nt, Homo sapiens
  misc_RNA (1)...(19): siRNA sense strand
ggauuuggcuuuccuugga

SEQ ID NO: 109467 - RNA, 19 nt, Homo sapiens
  misc_RNA (1)...(19): siRNA sense strand
aaagagggauguaaaguuc

SEQ ID NO: 109468 - RNA, 19 nt, Homo sapiens
  misc_RNA (1)...(19): siRNA sense strand
gcaaaugaagcaacugaaa

SEQ ID NO: 109469 - RNA, 19 nt, Homo sapiens
  misc_RNA (1)...(19): siRNA sense strand
aaagacaacaagaggauua

SEQ ID NO: 109470 - RNA, 19 nt, Homo sapiens
  misc_RNA (1)...(19): siRNA sense strand
gauaaucauggacauauug

SEQ ID NO: 109471 - RNA, 19 nt, Homo sapiens
  misc_RNA (1)...(19): siRNA sense strand
uggcacagcucacuagugu

SEQ ID NO: 109472 - RNA, 19 nt, Homo sapiens
  misc_RNA (1)...(19): siRNA sense strand
uggaagcucuuacgugaug

SEQ ID NO: 109473 - RNA, 19 nt, Homo sapiens
  misc_RNA (1)...(19): siRNA sense strand
gcuacaacccagagucuuu

SEQ ID NO: 109474 - RNA, 19 nt, Homo sapiens
  misc_RNA (1)...(19): siRNA sense strand
gcgcuucacuucuucaacu

SEQ ID NO: 109475 - RNA, 19 nt, Homo sapiens
  misc_RNA (1)...(19): siRNA sense strand
cuacaacccagagucuuua

SEQ ID NO: 109476 - RNA, 19 nt, Homo sapiens
  misc_RNA (1)...(19): siRNA sense strand
caacccagagucuuuacuu

SEQ ID NO: 109477 - RNA, 19 nt, Homo sapiens
  misc_RNA (1)...(19): siRNA sense strand
ggaaauagucagcauaccu

SEQ ID NO: 109478 - RNA, 19 nt, Homo sapiens
  misc_RNA (1)...(19): siRNA sense strand
ggaaggugagggacguuug

SEQ ID NO: 109479 - RNA, 19 nt, Homo sapiens
  misc_RNA (1)...(19): siRNA sense strand
gaaaagacaacaagaggau

SEQ ID NO: 109480 - RNA, 19 nt, Homo sapiens
  misc_RNA (1)...(19): siRNA sense strand
caucugggauuuggcuuuc

SEQ ID NO: 109481 - RNA, 19 nt, Homo sapiens
  misc_RNA (1)...(19): siRNA sense strand
uacgugaugugggaaauga

SEQ ID NO: 109482 - RNA, 19 nt, Homo sapiens
  misc_RNA (1)...(19): siRNA sense strand
gugaggcaguggguaagaa

SEQ ID NO: 109483 - RNA, 19 nt, Homo sapiens
  misc_RNA (1)...(19): siRNA sense strand
caaaugaagcaacugaaaa

SEQ ID NO: 109484 - RNA, 19 nt, Homo sapiens
  misc_RNA (1)...(19): siRNA sense strand
acaagcaaaugaagcaacu

SEQ ID NO: 109485 - RNA, 19 nt, Homo sapiens
  misc_RNA (1)...(19): siRNA sense strand
agacucaucugggauuugg

SEQ ID NO: 109486 - RNA, 19 nt, Homo sapiens
  misc_RNA (1)...(19): siRNA sense strand
aaucagaaacccagaccaa

SEQ ID NO: 109487 - RNA, 19 nt, Homo sapiens
  misc_RNA (1)...(19): siRNA sense strand
cauauugaucccucucuga

SEQ ID NO: 109488 - RNA, 19 nt, Homo sapiens
  misc_RNA (1)...(19): siRNA sense strand
gaaggugagggacguuugg

SEQ ID NO: 109489 - RNA, 19 nt, Homo sapiens
  misc_RNA (1)...(19): siRNA sense strand
guaaaguucacguggucuu

SEQ ID NO: 109490 - RNA, 19 nt, Homo sapiens
  misc_RNA (1)...(19): siRNA sense strand
aagcaaaugaagcaacuga

SEQ ID NO: 109491 - RNA, 19 nt, Homo sapiens
  misc_RNA (1)...(19): siRNA sense strand
ugaggcaguggguaagaaa

SEQ ID NO: 109492 - RNA, 19 nt, Homo sapiens
  misc_RNA (1)...(19): siRNA sense strand
gaagaaacccgagugcaaa

SEQ ID NO: 109493 - RNA, 19 nt, Homo sapiens
  misc_RNA (1)...(19): siRNA sense strand
ggaagaaacccgagugcaa

SEQ ID NO: 109494 - RNA, 19 nt, Homo sapiens
  misc_RNA (1)...(19): siRNA sense strand
gaagagggacuggaagaaa

SEQ ID NO: 109495 - RNA, 19 nt, Homo sapiens
  misc_RNA (1)...(19): siRNA sense strand
cagacaagcugccggaaga

SEQ ID NO: 109496 - RNA, 19 nt, Homo sapiens
  misc_RNA (1)...(19): siRNA sense strand
gcaucaaacugggcucuga

SEQ ID NO: 109497 - RNA, 19 nt, Homo sapiens
  misc_RNA (1)...(19): siRNA sense strand
cuacuucccuggacaguuc

SEQ ID NO: 109498 - RNA, 19 nt, Homo sapiens
  misc_RNA (1)...(19): siRNA sense strand
ggaagagggacuggaagaa

SEQ ID NO: 109499 - RNA, 19 nt, Homo sapiens
  misc_RNA (1)...(19): siRNA sense strand
gaaacccgagugcaaaguc

SEQ ID NO: 109500 - RNA, 19 nt, Homo sapiens
  misc_RNA (1)...(19): siRNA sense strand
gcaaagucaggcccaaugg

SEQ ID NO: 109501 - RNA, 19 nt, Homo sapiens
  misc_RNA (1)...(19): siRNA sense strand
aaacccgagugcaaaguca

SEQ ID NO: 109502 - RNA, 19 nt, Homo sapiens
  misc_RNA (1)...(19): siRNA sense strand
aagagggacuggaagaaac

SEQ ID NO: 109503 - RNA, 19 nt, Homo sapiens
  misc_RNA (1)...(19): siRNA sense strand
uggaggaauuucacaagca

SEQ ID NO: 109504 - RNA, 19 nt, Homo sapiens
  misc_RNA (1)...(19): siRNA sense strand
cggaagagggacuggaaga

SEQ ID NO: 109505 - RNA, 19 nt, Homo sapiens
  misc_RNA (1)...(19): siRNA sense strand
guaaagagauguuugaaga

SEQ ID NO: 109506 - RNA, 19 nt, Homo sapiens
  misc_RNA (1)...(19): siRNA sense strand
gcaaauggcugaaaauauu

SEQ ID NO: 109507 - RNA, 19 nt, Homo sapiens
  misc_RNA (1)...(19): siRNA sense strand
gaagaagaauacaccguuu

SEQ ID NO: 109508 - RNA, 19 nt, Homo sapiens
  misc_RNA (1)...(19): siRNA sense strand
gcagaauccucacaucauu

SEQ ID NO: 109509 - RNA, 19 nt, Homo sapiens
  misc_RNA (1)...(19): siRNA sense strand
gaacuccuguuuauucaug

SEQ ID NO: 109510 - RNA, 19 nt, Homo sapiens
  misc_RNA (1)...(19): siRNA sense strand
ggauaagaccguagcuuua

SEQ ID NO: 109511 - RNA, 19 nt, Homo sapiens
  misc_RNA (1)...(19): siRNA sense strand
gaauacaccguuucuauau

SEQ ID NO: 109512 - RNA, 19 nt, Homo sapiens
  misc_RNA (1)...(19): siRNA sense strand
gaguacauauucccaauga

SEQ ID NO: 109513 - RNA, 19 nt, Homo sapiens
  misc_RNA (1)...(19): siRNA sense strand
cugcuaagauuucagauuu

SEQ ID NO: 109514 - RNA, 19 nt, Homo sapiens
  misc_RNA (1)...(19): siRNA sense strand
gauaacaucaugcagauau

SEQ ID NO: 109515 - RNA, 19 nt, Homo sapiens
  misc_RNA (1)...(19): siRNA sense strand
ccacucagcuguuguagag

SEQ ID NO: 109516 - RNA, 19 nt, Homo sapiens
  misc_RNA (1)...(19): siRNA sense strand
caaugaugaugcacaguuu

SEQ ID NO: 109517 - RNA, 19 nt, Homo sapiens
  misc_RNA (1)...(19): siRNA sense strand
ccacuggucuccacauaau

SEQ ID NO: 109518 - RNA, 19 nt, Homo sapiens
  misc_RNA (1)...(19): siRNA sense strand
gcuauggucucuccuggaa

SEQ ID NO: 109519 - RNA, 19 nt, Homo sapiens
  misc_RNA (1)...(19): siRNA sense strand
gaaguaaaccgugcucguu

SEQ ID NO: 109520 - RNA, 19 nt, Homo sapiens
  misc_RNA (1)...(19): siRNA sense strand
ggacacacugcuaagauuu

SEQ ID NO: 109521 - RNA, 19 nt, Homo sapiens
  misc_RNA (1)...(19): siRNA sense strand
ugacuaaaccugaaggaaa

SEQ ID NO: 109522 - RNA, 19 nt, Homo sapiens
  misc_RNA (1)...(19): siRNA sense strand
gaagaacaaucagcagaag

SEQ ID NO: 109523 - RNA, 19 nt, Homo sapiens
  misc_RNA (1)...(19): siRNA sense strand
gaagucaacugccucucau

SEQ ID NO: 109524 - RNA, 19 nt, Homo sapiens
  misc_RNA (1)...(19): siRNA sense strand
ggaagaacaaucagcagaa

SEQ ID NO: 109525 - RNA, 19 nt, Homo sapiens
  misc_RNA (1)...(19): siRNA sense strand
ccagaacuccuguuuauuc

SEQ ID NO: 109526 - RNA, 19 nt, Homo sapiens
  misc_RNA (1)...(19): siRNA sense strand
guacauauucccaaugaug

SEQ ID NO: 109527 - RNA, 19 nt, Homo sapiens
  misc_RNA (1)...(19): siRNA sense strand
ggaggagcgugucaucaau

SEQ ID NO: 109528 - RNA, 19 nt, Homo sapiens
  misc_RNA (1)...(19): siRNA sense strand
ggacaucuccuaagugcau

SEQ ID NO: 109529 - RNA, 19 nt, Homo sapiens
  misc_RNA (1)...(19): siRNA sense strand
auacaccguuucuauauga

SEQ ID NO: 109530 - RNA, 19 nt, Homo sapiens
  misc_RNA (1)...(19): siRNA sense strand
ugacaagggugaauuuggu

SEQ ID NO: 109531 - RNA, 19 nt, Homo sapiens
  misc_RNA (1)...(19): siRNA sense strand
ggagggacaaggaucuuaa

SEQ ID NO: 109532 - RNA, 19 nt, Homo sapiens
  misc_RNA (1)...(19): siRNA sense strand
uauggucucuccuggaauu

SEQ ID NO: 109533 - RNA, 19 nt, Homo sapiens
  misc_RNA (1)...(19): siRNA sense strand
uuacaaugaugaagaguca

SEQ ID NO: 109534 - RNA, 19 nt, Homo sapiens
  misc_RNA (1)...(19): siRNA sense strand
cuccagaacuccuguuuau

SEQ ID NO: 109535 - RNA, 19 nt, Homo sapiens
  misc_RNA (1)...(19): siRNA sense strand
gcaaaauuguggaugcuaa

SEQ ID NO: 109536 - RNA, 19 nt, Homo sapiens
  misc_RNA (1)...(19): siRNA sense strand
ugaagugacuaaaccugaa

SEQ ID NO: 109537 - RNA, 19 nt, Homo sapiens
  misc_RNA (1)...(19): siRNA sense strand
aaaccgugcucguuacaug

SEQ ID NO: 109538 - RNA, 19 nt, Homo sapiens
  misc_RNA (1)...(19): siRNA sense strand
gaugaagagucagauguca

SEQ ID NO: 109539 - RNA, 19 nt, Homo sapiens
  misc_RNA (1)...(19): siRNA sense strand
gaguggacaucuccuaagu

SEQ ID NO: 109540 - RNA, 19 nt, Homo sapiens
  misc_RNA (1)...(19): siRNA sense strand
cagaacuccuguuuauuca

SEQ ID NO: 109541 - RNA, 19 nt, Homo sapiens
  misc_RNA (1)...(19): siRNA sense strand
gaugaucagaaacuuauga

SEQ ID NO: 109542 - RNA, 19 nt, Homo sapiens
  misc_RNA (1)...(19): siRNA sense strand
gaagaugggccuccagaac

SEQ ID NO: 109543 - RNA, 19 nt, Homo sapiens
  misc_RNA (1)...(19): siRNA sense strand
aaacuauucuggcuucaag

SEQ ID NO: 109544 - RNA, 19 nt, Homo sapiens
  misc_RNA (1)...(19): siRNA sense strand
ucaacugccucucauucaa

SEQ ID NO: 109545 - RNA, 19 nt, Homo sapiens
  misc_RNA (1)...(19): siRNA sense strand
gacuaaaccugaaggaaaa

SEQ ID NO: 109546 - RNA, 19 nt, Homo sapiens
  misc_RNA (1)...(19): siRNA sense strand
cggauaagaccguagcuuu

SEQ ID NO: 109547 - RNA, 19 nt, Homo sapiens
  misc_RNA (1)...(19): siRNA sense strand
uaaaaucaaucacgaagga

SEQ ID NO: 109548 - RNA, 19 nt, Homo sapiens
  misc_RNA (1)...(19): siRNA sense strand
caucuuuacuggccacuca

SEQ ID NO: 109549 - RNA, 19 nt, Homo sapiens
  misc_RNA (1)...(19): siRNA sense strand
gggugaauuugguggcuuu

SEQ ID NO: 109550 - RNA, 19 nt, Homo sapiens
  misc_RNA (1)...(19): siRNA sense strand
cgaguaaagagauguuuga

SEQ ID NO: 109551 - RNA, 19 nt, Homo sapiens
  misc_RNA (1)...(19): siRNA sense strand
ccacauaaugaaacuauuc

SEQ ID NO: 109552 - RNA, 19 nt, Homo sapiens
  misc_RNA (1)...(19): siRNA sense strand
uauaugaccugguuaugac

SEQ ID NO: 109553 - RNA, 19 nt, Homo sapiens
  misc_RNA (1)...(19): siRNA sense strand
ccaaugaugaugcacaguu

SEQ ID NO: 109554 - RNA, 19 nt, Homo sapiens
  misc_RNA (1)...(19): siRNA sense strand
guccacuggucuccacaua

SEQ ID NO: 109555 - RNA, 19 nt, Homo sapiens
  misc_RNA (1)...(19): siRNA sense strand
uaagaggucaccagaagga

SEQ ID NO: 109556 - RNA, 19 nt, Homo sapiens
  misc_RNA (1)...(19): siRNA sense strand
uaugggaucugcguaacuu

SEQ ID NO: 109557 - RNA, 19 nt, Homo sapiens
  misc_RNA (1)...(19): siRNA sense strand
cugaaugugugggauuuaa

SEQ ID NO: 109558 - RNA, 19 nt, Homo sapiens
  misc_RNA (1)...(19): siRNA sense strand
ggugguugcucgaguacau

SEQ ID NO: 109559 - RNA, 19 nt, Homo sapiens
  misc_RNA (1)...(19): siRNA sense strand
gaacuggagggacaaggau

SEQ ID NO: 109560 - RNA, 19 nt, Homo sapiens
  misc_RNA (1)...(19): siRNA sense strand
aaguaaaccgugcucguua

SEQ ID NO: 109561 - RNA, 19 nt, Homo sapiens
  misc_RNA (1)...(19): siRNA sense strand
gaggacacacugcuaagau

SEQ ID NO: 109562 - RNA, 19 nt, Homo sapiens
  misc_RNA (1)...(19): siRNA sense strand
gauauaaacgcaggaccaa

SEQ ID NO: 109563 - RNA, 19 nt, Homo sapiens
  misc_RNA (1)...(19): siRNA sense strand
aagauuaugcccuucauug

SEQ ID NO: 109564 - RNA, 19 nt, Homo sapiens
  misc_RNA (1)...(19): siRNA sense strand
cagcagaagaugcagaaga

SEQ ID NO: 109565 - RNA, 19 nt, Homo sapiens
  misc_RNA (1)...(19): siRNA sense strand
gaacaaucagcagaagaug

SEQ ID NO: 109566 - RNA, 19 nt, Homo sapiens
  misc_RNA (1)...(19): siRNA sense strand
caaucacgaaggagaagua

SEQ ID NO: 109567 - RNA, 19 nt, Homo sapiens
  misc_RNA (1)...(19): siRNA sense strand
gaauuugguggcuuugguu

SEQ ID NO: 109568 - RNA, 19 nt, Homo sapiens
  misc_RNA (1)...(19): siRNA sense strand
agacccaaguggagaaugu

SEQ ID NO: 109569 - RNA, 19 nt, Homo sapiens
  misc_RNA (1)...(19): siRNA sense strand
ggaggacacacugcuaaga

SEQ ID NO: 109570 - RNA, 19 nt, Homo sapiens
  misc_RNA (1)...(19): siRNA sense strand
gaaugugugggauuuaagu

SEQ ID NO: 109571 - RNA, 19 nt, Homo sapiens
  misc_RNA (1)...(19): siRNA sense strand
gaaacuauucuggcuucaa

SEQ ID NO: 109572 - RNA, 19 nt, Homo sapiens
  misc_RNA (1)...(19): siRNA sense strand
guuugucugugggauauaa

SEQ ID NO: 109573 - RNA, 19 nt, Homo sapiens
  misc_RNA (1)...(19): siRNA sense strand
gaugaugcacaguuugaug

SEQ ID NO: 109574 - RNA, 19 nt, Homo sapiens
  misc_RNA (1)...(19): siRNA sense strand
aggacacacugcuaagauu

SEQ ID NO: 109575 - RNA, 19 nt, Homo sapiens
  misc_RNA (1)...(19): siRNA sense strand
caacugccucucauucaau

SEQ ID NO: 109576 - RNA, 19 nt, Homo sapiens
  misc_RNA (1)...(19): siRNA sense strand
gcacacugccgaagucaac

SEQ ID NO: 109577 - RNA, 19 nt, Homo sapiens
  misc_RNA (1)...(19): siRNA sense strand
ggucucuccuggaauucaa

SEQ ID NO: 109578 - RNA, 19 nt, Homo sapiens
  misc_RNA (1)...(19): siRNA sense strand
gagaauguaauccugaucu

SEQ ID NO: 109579 - RNA, 19 nt, Homo sapiens
  misc_RNA (1)...(19): siRNA sense strand
ucacaucauugcuacaaaa

SEQ ID NO: 109580 - RNA, 19 nt, Homo sapiens
  misc_RNA (1)...(19): siRNA sense strand
gccugaaugugugggauuu

SEQ ID NO: 109581 - RNA, 19 nt, Homo sapiens
  misc_RNA (1)...(19): siRNA sense strand
cuucaguggcccagucuua

SEQ ID NO: 109582 - RNA, 19 nt, Homo sapiens
  misc_RNA (1)...(19): siRNA sense strand
auuaagaggucaccagaag

SEQ ID NO: 109583 - RNA, 19 nt, Homo sapiens
  misc_RNA (1)...(19): siRNA sense strand
gaauguaauccugaucuca

SEQ ID NO: 109584 - RNA, 19 nt, Homo sapiens
  misc_RNA (1)...(19): siRNA sense strand
cuauaugaccugguuauga

SEQ ID NO: 109585 - RNA, 19 nt, Homo sapiens
  misc_RNA (1)...(19): siRNA sense strand
agcagaagaugcagaagau

SEQ ID NO: 109586 - RNA, 19 nt, Homo sapiens
  misc_RNA (1)...(19): siRNA sense strand
gggaucugcguaacuuaaa

SEQ ID NO: 109587 - RNA, 19 nt, Homo sapiens
  misc_RNA (1)...(19): siRNA sense strand
cgaagucaacugccucuca

SEQ ID NO: 109588 - RNA, 19 nt, Homo sapiens
  misc_RNA (1)...(19): siRNA sense strand
gaccauacuguuugucugu

SEQ ID NO: 109589 - RNA, 19 nt, Homo sapiens
  misc_RNA (1)...(19): siRNA sense strand
ugaauuugguggcuuuggu

SEQ ID NO: 109590 - RNA, 19 nt, Homo sapiens
  misc_RNA (1)...(19): siRNA sense strand
augcagauauggcaaaugg

SEQ ID NO: 109591 - RNA, 19 nt, Homo sapiens
  misc_RNA (1)...(19): siRNA sense strand
ggauaacaucaugcagaua

SEQ ID NO: 109592 - RNA, 19 nt, Homo sapiens
  misc_RNA (1)...(19): siRNA sense strand
gacaccagguccaauacca

SEQ ID NO: 109593 - RNA, 19 nt, Homo sapiens
  misc_RNA (1)...(19): siRNA sense strand
ucagaaacuuaugauaugg

SEQ ID NO: 109594 - RNA, 19 nt, Homo sapiens
  misc_RNA (1)...(19): siRNA sense strand
ucugaugaccauacuguuu

SEQ ID NO: 109595 - RNA, 19 nt, Homo sapiens
  misc_RNA (1)...(19): siRNA sense strand
ucacgaaggagaaguaaac

SEQ ID NO: 109596 - RNA, 19 nt, Homo sapiens
  misc_RNA (1)...(19): siRNA sense strand
guuugaugcuucccauugu

SEQ ID NO: 109597 - RNA, 19 nt, Homo sapiens
  misc_RNA (1)...(19): siRNA sense strand
aggauaacaucaugcagau

SEQ ID NO: 109598 - RNA, 19 nt, Homo sapiens
  misc_RNA (1)...(19): siRNA sense strand
gaggagcgugucaucaaug

SEQ ID NO: 109599 - RNA, 19 nt, Homo sapiens
  misc_RNA (1)...(19): siRNA sense strand
uuggaucuguugcugauga

SEQ ID NO: 109600 - RNA, 19 nt, Homo sapiens
  misc_RNA (1)...(19): siRNA sense strand
guuuggaucuguugcugau

SEQ ID NO: 109601 - RNA, 19 nt, Homo sapiens
  misc_RNA (1)...(19): siRNA sense strand
aauacaccguuucuauaug

SEQ ID NO: 109602 - RNA, 19 nt, Homo sapiens
  misc_RNA (1)...(19): siRNA sense strand
ucuggugguugcucgagua

SEQ ID NO: 109603 - RNA, 19 nt, Homo sapiens
  misc_RNA (1)...(19): siRNA sense strand
caaaagaaggcaaaauugu

SEQ ID NO: 109604 - RNA, 19 nt, Homo sapiens
  misc_RNA (1)...(19): siRNA sense strand
ggcccagucuuaccguuca

SEQ ID NO: 109605 - RNA, 19 nt, Homo sapiens
  misc_RNA (1)...(19): siRNA sense strand
gagcagaccuuucucagua

SEQ ID NO: 109606 - RNA, 19 nt, Homo sapiens
  misc_RNA (1)...(19): siRNA sense strand
ggaaagagguuauauuaag

SEQ ID NO: 109607 - RNA, 19 nt, Homo sapiens
  misc_RNA (1)...(19): siRNA sense strand
ggaaggaaaucacaagaaa

SEQ ID NO: 109608 - RNA, 19 nt, Homo sapiens
  misc_RNA (1)...(19): siRNA sense strand
gcaaggagcagaagacaua

SEQ ID NO: 109609 - RNA, 19 nt, Homo sapiens
  misc_RNA (1)...(19): siRNA sense strand
gauaacagccuucucauuu

SEQ ID NO: 109610 - RNA, 19 nt, Homo sapiens
  misc_RNA (1)...(19): siRNA sense strand
gaagugaacaagaucauua

SEQ ID NO: 109611 - RNA, 19 nt, Homo sapiens
  misc_RNA (1)...(19): siRNA sense strand
ggaagaaagugaacaugaa

SEQ ID NO: 109612 - RNA, 19 nt, Homo sapiens
  misc_RNA (1)...(19): siRNA sense strand
caaccaagauguauccuuu

SEQ ID NO: 109613 - RNA, 19 nt, Homo sapiens
  misc_RNA (1)...(19): siRNA sense strand
caagauguauccuuugaaa

SEQ ID NO: 109614 - RNA, 19 nt, Homo sapiens
  misc_RNA (1)...(19): siRNA sense strand
caaagaaacuacacacuca

SEQ ID NO: 109615 - RNA, 19 nt, Homo sapiens
  misc_RNA (1)...(19): siRNA sense strand
ggagcuaccucuaguauca

SEQ ID NO: 109616 - RNA, 19 nt, Homo sapiens
  misc_RNA (1)...(19): siRNA sense strand
ggaauacucuacaggaaga

SEQ ID NO: 109617 - RNA, 19 nt, Homo sapiens
  misc_RNA (1)...(19): siRNA sense strand
ggacaacacaugaagagua

SEQ ID NO: 109618 - RNA, 19 nt, Homo sapiens
  misc_RNA (1)...(19): siRNA sense strand
ggacauggacuguacauug

SEQ ID NO: 109619 - RNA, 19 nt, Homo sapiens
  misc_RNA (1)...(19): siRNA sense strand
aaugauagcuuggaagaua

SEQ ID NO: 109620 - RNA, 19 nt, Homo sapiens
  misc_RNA (1)...(19): siRNA sense strand
gagguuauauuaaggaaga

SEQ ID NO: 109621 - RNA, 19 nt, Homo sapiens
  misc_RNA (1)...(19): siRNA sense strand
uaaaugcucuccagacaau

SEQ ID NO: 109622 - RNA, 19 nt, Homo sapiens
  misc_RNA (1)...(19): siRNA sense strand
cagcagaaucuuaaacuua

SEQ ID NO: 109623 - RNA, 19 nt, Homo sapiens
  misc_RNA (1)...(19): siRNA sense strand
gagacuagcuugcaaaauu

SEQ ID NO: 109624 - RNA, 19 nt, Homo sapiens
  misc_RNA (1)...(19): siRNA sense strand
ggacaaaacuaaaagaaug

SEQ ID NO: 109625 - RNA, 19 nt, Homo sapiens
  misc_RNA (1)...(19): siRNA sense strand
gaagaaaacugaggaagaa

SEQ ID NO: 109626 - RNA, 19 nt, Homo sapiens
  misc_RNA (1)...(19): siRNA sense strand
gagacugugugauggauaa

SEQ ID NO: 109627 - RNA, 19 nt, Homo sapiens
  misc_RNA (1)...(19): siRNA sense strand
gaaagagguuauauuaagg

SEQ ID NO: 109628 - RNA, 19 nt, Homo sapiens
  misc_RNA (1)...(19): siRNA sense strand
gacaacacaugaagaguau

SEQ ID NO: 109629 - RNA, 19 nt, Homo sapiens
  misc_RNA (1)...(19): siRNA sense strand
caucaguucuucaguuaaa

SEQ ID NO: 109630 - RNA, 19 nt, Homo sapiens
  misc_RNA (1)...(19): siRNA sense strand
gcaagugacucuuuaugag

SEQ ID NO: 109631 - RNA, 19 nt, Homo sapiens
  misc_RNA (1)...(19): siRNA sense strand
gcacaaagacuagaagaau

SEQ ID NO: 109632 - RNA, 19 nt, Homo sapiens
  misc_RNA (1)...(19): siRNA sense strand
guaaagauucuaacacuga

SEQ ID NO: 109633 - RNA, 19 nt, Homo sapiens
  misc_RNA (1)...(19): siRNA sense strand
caacucauccacaacauaa

SEQ ID NO: 109634 - RNA, 19 nt, Homo sapiens
  misc_RNA (1)...(19): siRNA sense strand
gcagaaaguccuucaugaa

SEQ ID NO: 109635 - RNA, 19 nt, Homo sapiens
  misc_RNA (1)...(19): siRNA sense strand
gcagaccuuucucaguaua

SEQ ID NO: 109636 - RNA, 19 nt, Homo sapiens
  misc_RNA (1)...(19): siRNA sense strand
caaagucaaucuccaaugg

SEQ ID NO: 109637 - RNA, 19 nt, Homo sapiens
  misc_RNA (1)...(19): siRNA sense strand
ucuaguagcugacacuuau

SEQ ID NO: 109638 - RNA, 19 nt, Homo sapiens
  misc_RNA (1)...(19): siRNA sense strand
ggucugaagugaacaagau

SEQ ID NO: 109639 - RNA, 19 nt, Homo sapiens
  misc_RNA (1)...(19): siRNA sense strand
gugaaaccguucucuuaaa

SEQ ID NO: 109640 - RNA, 19 nt, Homo sapiens
  misc_RNA (1)...(19): siRNA sense strand
caagaaauacugaagauag

SEQ ID NO: 109641 - RNA, 19 nt, Homo sapiens
  misc_RNA (1)...(19): siRNA sense strand
gaauggagacugugugaug

SEQ ID NO: 109642 - RNA, 19 nt, Homo sapiens
  misc_RNA (1)...(19): siRNA sense strand
uagcaacacuuguauaucu

SEQ ID NO: 109643 - RNA, 19 nt, Homo sapiens
  misc_RNA (1)...(19): siRNA sense strand
cacaaagacuagaagaauu

SEQ ID NO: 109644 - RNA, 19 nt, Homo sapiens
  misc_RNA (1)...(19): siRNA sense strand
aguacaagguuuacaagua

SEQ ID NO: 109645 - RNA, 19 nt, Homo sapiens
  misc_RNA (1)...(19): siRNA sense strand
agaagaaucugaaacucaa

SEQ ID NO: 109646 - RNA, 19 nt, Homo sapiens
  misc_RNA (1)...(19): siRNA sense strand
cagaaaguccuucaugaaa

SEQ ID NO: 109647 - RNA, 19 nt, Homo sapiens
  misc_RNA (1)...(19): siRNA sense strand
gaaagugaacaugaaguaa

SEQ ID NO: 109648 - RNA, 19 nt, Homo sapiens
  misc_RNA (1)...(19): siRNA sense strand
gcagcagaaucuuaaacuu

SEQ ID NO: 109649 - RNA, 19 nt, Homo sapiens
  misc_RNA (1)...(19): siRNA sense strand
ugaggaaucuacaagaaau

SEQ ID NO: 109650 - RNA, 19 nt, Homo sapiens
  misc_RNA (1)...(19): siRNA sense strand
gcacguugcccaaagauuc

SEQ ID NO: 109651 - RNA, 19 nt, Homo sapiens
  misc_RNA (1)...(19): siRNA sense strand
caaagacuccuccucaaga

SEQ ID NO: 109652 - RNA, 19 nt, Homo sapiens
  misc_RNA (1)...(19): siRNA sense strand
caagaagaauuaccuacuc

SEQ ID NO: 109653 - RNA, 19 nt, Homo sapiens
  misc_RNA (1)...(19): siRNA sense strand
gauaaucaguuuuccauga

SEQ ID NO: 109654 - RNA, 19 nt, Homo sapiens
  misc_RNA (1)...(19): siRNA sense strand
gaaacagccuuuugaggaa

SEQ ID NO: 109655 - RNA, 19 nt, Homo sapiens
  misc_RNA (1)...(19): siRNA sense strand
gaggaggaauugucuacug

SEQ ID NO: 109656 - RNA, 19 nt, Homo sapiens
  misc_RNA (1)...(19): siRNA sense strand
caacacaugaagaguauga

SEQ ID NO: 109657 - RNA, 19 nt, Homo sapiens
  misc_RNA (1)...(19): siRNA sense strand
ucaguuaaauccauguaga

SEQ ID NO: 109658 - RNA, 19 nt, Homo sapiens
  misc_RNA (1)...(19): siRNA sense strand
ggauaaaccucuggaucug

SEQ ID NO: 109659 - RNA, 19 nt, Homo sapiens
  misc_RNA (1)...(19): siRNA sense strand
agugucaucuccuguauuu

SEQ ID NO: 109660 - RNA, 19 nt, Homo sapiens
  misc_RNA (1)...(19): siRNA sense strand
uagugaaaccguucucuua

SEQ ID NO: 109661 - RNA, 19 nt, Homo sapiens
  misc_RNA (1)...(19): siRNA sense strand
uuaggcaagugacucuuua

SEQ ID NO: 109662 - RNA, 19 nt, Homo sapiens
  misc_RNA (1)...(19): siRNA sense strand
gaacagaauaggacugagu

SEQ ID NO: 109663 - RNA, 19 nt, Homo sapiens
  misc_RNA (1)...(19): siRNA sense strand
gugaaaguuuggagacuga

SEQ ID NO: 109664 - RNA, 19 nt, Homo sapiens
  misc_RNA (1)...(19): siRNA sense strand
gacauggacuguacauugg

SEQ ID NO: 109665 - RNA, 19 nt, Homo sapiens
  misc_RNA (1)...(19): siRNA sense strand
gagagacaguggacaugga

SEQ ID NO: 109666 - RNA, 19 nt, Homo sapiens
  misc_RNA (1)...(19): siRNA sense strand
ugugaucgcugugcaguaa

SEQ ID NO: 109667 - RNA, 19 nt, Homo sapiens
  misc_RNA (1)...(19): siRNA sense strand
ugcaucaguucuucaguua

SEQ ID NO: 109668 - RNA, 19 nt, Homo sapiens
  misc_RNA (1)...(19): siRNA sense strand
ccugauaagucaucuuuua

SEQ ID NO: 109669 - RNA, 19 nt, Homo sapiens
  misc_RNA (1)...(19): siRNA sense strand
ccaacacaccagagaauuu

SEQ ID NO: 109670 - RNA, 19 nt, Homo sapiens
  misc_RNA (1)...(19): siRNA sense strand
caagaucauuauccaguca

SEQ ID NO: 109671 - RNA, 19 nt, Homo sapiens
  misc_RNA (1)...(19): siRNA sense strand
aaagacuccuccucaagaa

SEQ ID NO: 109672 - RNA, 19 nt, Homo sapiens
  misc_RNA (1)...(19): siRNA sense strand
gaaacucaaggucccauga

SEQ ID NO: 109673 - RNA, 19 nt, Homo sapiens
  misc_RNA (1)...(19): siRNA sense strand
gaacaacuccagcagaaaa

SEQ ID NO: 109674 - RNA, 19 nt, Homo sapiens
  misc_RNA (1)...(19): siRNA sense strand
gaagaaagugaacaugaag

SEQ ID NO: 109675 - RNA, 19 nt, Homo sapiens
  misc_RNA (1)...(19): siRNA sense strand
gcacacguguaaggaaugu

SEQ ID NO: 109676 - RNA, 19 nt, Homo sapiens
  misc_RNA (1)...(19): siRNA sense strand
gggcacacguguaaggaau

SEQ ID NO: 109677 - RNA, 19 nt, Homo sapiens
  misc_RNA (1)...(19): siRNA sense strand
auagagaaguacaagguuu

SEQ ID NO: 109678 - RNA, 19 nt, Homo sapiens
  misc_RNA (1)...(19): siRNA sense strand
uuaaauccauguagaacug

SEQ ID NO: 109679 - RNA, 19 nt, Homo sapiens
  misc_RNA (1)...(19): siRNA sense strand
gacaauaaaccaucauuac

SEQ ID NO: 109680 - RNA, 19 nt, Homo sapiens
  misc_RNA (1)...(19): siRNA sense strand
gaacuuaugaaugaaagga

SEQ ID NO: 109681 - RNA, 19 nt, Homo sapiens
  misc_RNA (1)...(19): siRNA sense strand
uagagaaguacaagguuua

SEQ ID NO: 109682 - RNA, 19 nt, Homo sapiens
  misc_RNA (1)...(19): siRNA sense strand
aauaaaugcucuccagaca

SEQ ID NO: 109683 - RNA, 19 nt, Homo sapiens
  misc_RNA (1)...(19): siRNA sense strand
gaaaguccuucaugaaacc

SEQ ID NO: 109684 - RNA, 19 nt, Homo sapiens
  misc_RNA (1)...(19): siRNA sense strand
cugaacaacuccagcagaa

SEQ ID NO: 109685 - RNA, 19 nt, Homo sapiens
  misc_RNA (1)...(19): siRNA sense strand
ggacugaguacgguaaaga

SEQ ID NO: 109686 - RNA, 19 nt, Homo sapiens
  misc_RNA (1)...(19): siRNA sense strand
ggcaagugacucuuuauga

SEQ ID NO: 109687 - RNA, 19 nt, Homo sapiens
  misc_RNA (1)...(19): siRNA sense strand
agaaagugaacaugaagua

SEQ ID NO: 109688 - RNA, 19 nt, Homo sapiens
  misc_RNA (1)...(19): siRNA sense strand
aaacugaggaagaaaguga

SEQ ID NO: 109689 - RNA, 19 nt, Homo sapiens
  misc_RNA (1)...(19): siRNA sense strand
ugaacaagaucauuaucca

SEQ ID NO: 109690 - RNA, 19 nt, Homo sapiens
  misc_RNA (1)...(19): siRNA sense strand
ugaagaagcaagagcagaa

SEQ ID NO: 109691 - RNA, 19 nt, Homo sapiens
  misc_RNA (1)...(19): siRNA sense strand
aaacaaauuuaggcaagug

SEQ ID NO: 109692 - RNA, 19 nt, Homo sapiens
  misc_RNA (1)...(19): siRNA sense strand
gaagacguuauuccagauu

SEQ ID NO: 109693 - RNA, 19 nt, Homo sapiens
  misc_RNA (1)...(19): siRNA sense strand
gaguaugaauccuguuugg

SEQ ID NO: 109694 - RNA, 19 nt, Homo sapiens
  misc_RNA (1)...(19): siRNA sense strand
gaggaaucuacaagaaaua

SEQ ID NO: 109695 - RNA, 19 nt, Homo sapiens
  misc_RNA (1)...(19): siRNA sense strand
caacacuuguauaucuaga

SEQ ID NO: 109696 - RNA, 19 nt, Homo sapiens
  misc_RNA (1)...(19): siRNA sense strand
ugaagaacauaugcggaaa

SEQ ID NO: 109697 - RNA, 19 nt, Homo sapiens
  misc_RNA (1)...(19): siRNA sense strand
gaagaggaggaauugucua

SEQ ID NO: 109698 - RNA, 19 nt, Homo sapiens
  misc_RNA (1)...(19): siRNA sense strand
uagcuuggaagauauguuu

SEQ ID NO: 109699 - RNA, 19 nt, Homo sapiens
  misc_RNA (1)...(19): siRNA sense strand
caagaagaaucugaaacuc

SEQ ID NO: 109700 - RNA, 19 nt, Homo sapiens
  misc_RNA (1)...(19): siRNA sense strand
ggccaaagcacauggaaca

SEQ ID NO: 109701 - RNA, 19 nt, Homo sapiens
  misc_RNA (1)...(19): siRNA sense strand
cagcaagaguuugaaaaua

SEQ ID NO: 109702 - RNA, 19 nt, Homo sapiens
  misc_RNA (1)...(19): siRNA sense strand
uuuagaagaucgguuaaga

SEQ ID NO: 109703 - RNA, 19 nt, Homo sapiens
  misc_RNA (1)...(19): siRNA sense strand
acucagacuuguauggaaa

SEQ ID NO: 109704 - RNA, 19 nt, Homo sapiens
  misc_RNA (1)...(19): siRNA sense strand
acacacucauggugauaaa

SEQ ID NO: 109705 - RNA, 19 nt, Homo sapiens
  misc_RNA (1)...(19): siRNA sense strand
ccauauaccuuucaaccua

SEQ ID NO: 109706 - RNA, 19 nt, Homo sapiens
  misc_RNA (1)...(19): siRNA sense strand
gacagaacccaaacaaaua

SEQ ID NO: 109707 - RNA, 19 nt, Homo sapiens
  misc_RNA (1)...(19): siRNA sense strand
gaaugacacuuacuuacga

SEQ ID NO: 109708 - RNA, 19 nt, Homo sapiens
  misc_RNA (1)...(19): siRNA sense strand
gaugcaaccucaaccauau

SEQ ID NO: 109709 - RNA, 19 nt, Homo sapiens
  misc_RNA (1)...(19): siRNA sense strand
gaagcucugucaaccauau

SEQ ID NO: 109710 - RNA, 19 nt, Homo sapiens
  misc_RNA (1)...(19): siRNA sense strand
caaguuauuucuacaagga

SEQ ID NO: 109711 - RNA, 19 nt, Homo sapiens
  misc_RNA (1)...(19): siRNA sense strand
acaaauacaucccuaaugg

SEQ ID NO: 109712 - RNA, 19 nt, Homo sapiens
  misc_RNA (1)...(19): siRNA sense strand
gaaccuuuauuguguaagu

SEQ ID NO: 109713 - RNA, 19 nt, Homo sapiens
  misc_RNA (1)...(19): siRNA sense strand
cuaccaaccucuacauuuc

SEQ ID NO: 109714 - RNA, 19 nt, Homo sapiens
  misc_RNA (1)...(19): siRNA sense strand
ggaagaccauggcauagag

SEQ ID NO: 109715 - RNA, 19 nt, Homo sapiens
  misc_RNA (1)...(19): siRNA sense strand
ggaugcaaccucaaccaua

SEQ ID NO: 109716 - RNA, 19 nt, Homo sapiens
  misc_RNA (1)...(19): siRNA sense strand
agacagaacccaaacaaau

SEQ ID NO: 109717 - RNA, 19 nt, Homo sapiens
  misc_RNA (1)...(19): siRNA sense strand
cgaaugaucacucaaacuu

SEQ ID NO: 109718 - RNA, 19 nt, Homo sapiens
  misc_RNA (1)...(19): siRNA sense strand
cauauaccuuucaaccuaa

SEQ ID NO: 109719 - RNA, 19 nt, Homo sapiens
  misc_RNA (1)...(19): siRNA sense strand
caaagcaacaggaacaaga

SEQ ID NO: 109720 - RNA, 19 nt, Homo sapiens
  misc_RNA (1)...(19): siRNA sense strand
cguguuaacucccucaaug

SEQ ID NO: 109721 - RNA, 19 nt, Homo sapiens
  misc_RNA (1)...(19): siRNA sense strand
uauauugcaucuccuguau

SEQ ID NO: 109722 - RNA, 19 nt, Homo sapiens
  misc_RNA (1)...(19): siRNA sense strand
ggacaaguuauuucuacaa

SEQ ID NO: 109723 - RNA, 19 nt, Homo sapiens
  misc_RNA (1)...(19): siRNA sense strand
ggaaaauagucuccacaaa

SEQ ID NO: 109724 - RNA, 19 nt, Homo sapiens
  misc_RNA (1)...(19): siRNA sense strand
gguguuggcuuugcuagga

SEQ ID NO: 109725 - RNA, 19 nt, Homo sapiens
  misc_RNA (1)...(19): siRNA sense strand
cagaaccuuuauuguguaa

SEQ ID NO: 109726 - RNA, 19 nt, Homo sapiens
  misc_RNA (1)...(19): siRNA sense strand
cuacagcccgcaucaauga

SEQ ID NO: 109727 - RNA, 19 nt, Homo sapiens
  misc_RNA (1)...(19): siRNA sense strand
gcaguaauaacaacaguag

SEQ ID NO: 109728 - RNA, 19 nt, Homo sapiens
  misc_RNA (1)...(19): siRNA sense strand
auacaucccuaauggaaga

SEQ ID NO: 109729 - RNA, 19 nt, Homo sapiens
  misc_RNA (1)...(19): siRNA sense strand
cuacgugauuccaguggua

SEQ ID NO: 109730 - RNA, 19 nt, Homo sapiens
  misc_RNA (1)...(19): siRNA sense strand
caaccucaaccauauauuc

SEQ ID NO: 109731 - RNA, 19 nt, Homo sapiens
  misc_RNA (1)...(19): siRNA sense strand
gcuacaaaccgaaugauca

SEQ ID NO: 109732 - RNA, 19 nt, Homo sapiens
  misc_RNA (1)...(19): siRNA sense strand
acagaaccuuuauugugua

SEQ ID NO: 109733 - RNA, 19 nt, Homo sapiens
  misc_RNA (1)...(19): siRNA sense strand
gacaaguuauuucuacaag

SEQ ID NO: 109734 - RNA, 19 nt, Homo sapiens
  misc_RNA (1)...(19): siRNA sense strand
caaaccgaaugaucacuca

SEQ ID NO: 109735 - RNA, 19 nt, Homo sapiens
  misc_RNA (1)...(19): siRNA sense strand
acaaggauacuacgugauu

SEQ ID NO: 109736 - RNA, 19 nt, Homo sapiens
  misc_RNA (1)...(19): siRNA sense strand
gcaaaacgaaccucuauau

SEQ ID NO: 109737 - RNA, 19 nt, Homo sapiens
  misc_RNA (1)...(19): siRNA sense strand
gugaagcucugucaaccau

SEQ ID NO: 109738 - RNA, 19 nt, Homo sapiens
  misc_RNA (1)...(19): siRNA sense strand
ucuauuacacccuauauug

SEQ ID NO: 109739 - RNA, 19 nt, Homo sapiens
  misc_RNA (1)...(19): siRNA sense strand
caaacaaauacaucccuaa

SEQ ID NO: 109740 - RNA, 19 nt, Homo sapiens
  misc_RNA (1)...(19): siRNA sense strand
ccucuacauuucuaauuug

SEQ ID NO: 109741 - RNA, 19 nt, Homo sapiens
  misc_RNA (1)...(19): siRNA sense strand
gaaaauagucuccacaaag

SEQ ID NO: 109742 - RNA, 19 nt, Homo sapiens
  misc_RNA (1)...(19): siRNA sense strand
aaauacaucccuaauggaa

SEQ ID NO: 109743 - RNA, 19 nt, Homo sapiens
  misc_RNA (1)...(19): siRNA sense strand
gagacagaacccaaacaaa

SEQ ID NO: 109744 - RNA, 19 nt, Homo sapiens
  misc_RNA (1)...(19): siRNA sense strand
gaaaauaugcucaaaccau

SEQ ID NO: 109745 - RNA, 19 nt, Homo sapiens
  misc_RNA (1)...(19): siRNA sense strand
ggaggcaaguggucaacag

SEQ ID NO: 109746 - RNA, 19 nt, Homo sapiens
  misc_RNA (1)...(19): siRNA sense strand
uaagacaccaccaggaguu

SEQ ID NO: 109747 - RNA, 19 nt, Homo sapiens
  misc_RNA (1)...(19): siRNA sense strand
gcaccaccagcaguaauaa

SEQ ID NO: 109748 - RNA, 19 nt, Homo sapiens
  misc_RNA (1)...(19): siRNA sense strand
gaacccaaacaaauacauc

SEQ ID NO: 109749 - RNA, 19 nt, Homo sapiens
  misc_RNA (1)...(19): siRNA sense strand
gagcacaccaugucacuac

SEQ ID NO: 109750 - RNA, 19 nt, Homo sapiens
  misc_RNA (1)...(19): siRNA sense strand
caacuacagcugcuauaca

SEQ ID NO: 109751 - RNA, 19 nt, Homo sapiens
  misc_RNA (1)...(19): siRNA sense strand
ggaaugacacuuacuuacg

SEQ ID NO: 109752 - RNA, 19 nt, Homo sapiens
  misc_RNA (1)...(19): siRNA sense strand
gagcaagaacuagaaaaua

SEQ ID NO: 109753 - RNA, 19 nt, Homo sapiens
  misc_RNA (1)...(19): siRNA sense strand
ccuuucaaccuaauaagua

SEQ ID NO: 109754 - RNA, 19 nt, Homo sapiens
  misc_RNA (1)...(19): siRNA sense strand
cuacagcugcuauacagaa

SEQ ID NO: 109755 - RNA, 19 nt, Homo sapiens
  misc_RNA (1)...(19): siRNA sense strand
aggauggaaucaacagaaa

SEQ ID NO: 109756 - RNA, 19 nt, Homo sapiens
  misc_RNA (1)...(19): siRNA sense strand
gaugagcaagaacuagaaa

SEQ ID NO: 109757 - RNA, 19 nt, Homo sapiens
  misc_RNA (1)...(19): siRNA sense strand
gaugggaucagcucagcaa

SEQ ID NO: 109758 - RNA, 19 nt, Homo sapiens
  misc_RNA (1)...(19): siRNA sense strand
ccuaccaaccucuacauuu

SEQ ID NO: 109759 - RNA, 19 nt, Homo sapiens
  misc_RNA (1)...(19): siRNA sense strand
gaaugaucacucaaacuuc

SEQ ID NO: 109760 - RNA, 19 nt, Homo sapiens
  misc_RNA (1)...(19): siRNA sense strand
uagcagcaguagcaacuca

SEQ ID NO: 109761 - RNA, 19 nt, Homo sapiens
  misc_RNA (1)...(19): siRNA sense strand
caaauacaucccuaaugga

SEQ ID NO: 109762 - RNA, 19 nt, Homo sapiens
  misc_RNA (1)...(19): siRNA sense strand
ggaugagcaagaacuagaa

SEQ ID NO: 109763 - RNA, 19 nt, Homo sapiens
  misc_RNA (1)...(19): siRNA sense strand
gauuuuauccuucaccaua

SEQ ID NO: 109764 - RNA, 19 nt, Homo sapiens
  misc_RNA (1)...(19): siRNA sense strand
caaggauacuacgugauuc

SEQ ID NO: 109765 - RNA, 19 nt, Homo sapiens
  misc_RNA (1)...(19): siRNA sense strand
aaugaucacucaaacuucu

SEQ ID NO: 109766 - RNA, 19 nt, Homo sapiens
  misc_RNA (1)...(19): siRNA sense strand
gaagaccauggcauagaga

SEQ ID NO: 109767 - RNA, 19 nt, Homo sapiens
  misc_RNA (1)...(19): siRNA sense strand
ccauuuggacaaguuauuu

SEQ ID NO: 109768 - RNA, 19 nt, Homo sapiens
  misc_RNA (1)...(19): siRNA sense strand
ccucaaccauauauucuac

SEQ ID NO: 109769 - RNA, 19 nt, Homo sapiens
  misc_RNA (1)...(19): siRNA sense strand
uauugcaucuccuguaucu

SEQ ID NO: 109770 - RNA, 19 nt, Homo sapiens
  misc_RNA (1)...(19): siRNA sense strand
cgagacgucuaaugaccau

SEQ ID NO: 109771 - RNA, 19 nt, Homo sapiens
  misc_RNA (1)...(19): siRNA sense strand
aagcuguuauuggucauuu

SEQ ID NO: 109772 - RNA, 19 nt, Homo sapiens
  misc_RNA (1)...(19): siRNA sense strand
cacucaaacuucuauuaca

SEQ ID NO: 109773 - RNA, 19 nt, Homo sapiens
  misc_RNA (1)...(19): siRNA sense strand
gcuggaaugacacuuacuu

SEQ ID NO: 109774 - RNA, 19 nt, Homo sapiens
  misc_RNA (1)...(19): siRNA sense strand
aagcucaaauggcaaagca

SEQ ID NO: 109775 - RNA, 19 nt, Homo sapiens
  misc_RNA (1)...(19): siRNA sense strand
ucacucaaacuucuauuac

SEQ ID NO: 109776 - RNA, 19 nt, Homo sapiens
  misc_RNA (1)...(19): siRNA sense strand
aaaauagucuccacaaagg

SEQ ID NO: 109777 - RNA, 19 nt, Homo sapiens
  misc_RNA (1)...(19): siRNA sense strand
cagcaguaauaacaacagu

SEQ ID NO: 109778 - RNA, 19 nt, Homo sapiens
  misc_RNA (1)...(19): siRNA sense strand
cuccauggaugagcaagaa

SEQ ID NO: 109779 - RNA, 19 nt, Homo sapiens
  misc_RNA (1)...(19): siRNA sense strand
agagacagaacccaaacaa

SEQ ID NO: 109780 - RNA, 19 nt, Homo sapiens
  misc_RNA (1)...(19): siRNA sense strand
uaggauggaaucaacagaa

SEQ ID NO: 109781 - RNA, 19 nt, Homo sapiens
  misc_RNA (1)...(19): siRNA sense strand
ucaaccauaugggaaaaua

SEQ ID NO: 109782 - RNA, 19 nt, Homo sapiens
  misc_RNA (1)...(19): siRNA sense strand
gcaaagcaacaggaacaag

SEQ ID NO: 109783 - RNA, 19 nt, Homo sapiens
  misc_RNA (1)...(19): siRNA sense strand
ggagccuacuugccacagu

SEQ ID NO: 109784 - RNA, 19 nt, Homo sapiens
  misc_RNA (1)...(19): siRNA sense strand
ggaacauacaugccugcaa

SEQ ID NO: 109785 - RNA, 19 nt, Homo sapiens
  misc_RNA (1)...(19): siRNA sense strand
aaaccauuuggacaaguua

SEQ ID NO: 109786 - RNA, 19 nt, Homo sapiens
  misc_RNA (1)...(19): siRNA sense strand
augcaaagguuaugguuuu

SEQ ID NO: 109787 - RNA, 19 nt, Homo sapiens
  misc_RNA (1)...(19): siRNA sense strand
caaaugcaaagguuauggu

SEQ ID NO: 109788 - RNA, 19 nt, Homo sapiens
  misc_RNA (1)...(19): siRNA sense strand
cuauauugcaucuccugua

SEQ ID NO: 109789 - RNA, 19 nt, Homo sapiens
  misc_RNA (1)...(19): siRNA sense strand
cuggaaugacacuuacuua

SEQ ID NO: 109790 - RNA, 19 nt, Homo sapiens
  misc_RNA (1)...(19): siRNA sense strand
gguacaagucgugguguug

SEQ ID NO: 109791 - RNA, 19 nt, Homo sapiens
  misc_RNA (1)...(19): siRNA sense strand
uggcaaagcaacaggaaca

SEQ ID NO: 109792 - RNA, 19 nt, Homo sapiens
  misc_RNA (1)...(19): siRNA sense strand
caaccucuacauuucuaau

SEQ ID NO: 109793 - RNA, 19 nt, Homo sapiens
  misc_RNA (1)...(19): siRNA sense strand
accaaccucuacauuucua

SEQ ID NO: 109794 - RNA, 19 nt, Homo sapiens
  misc_RNA (1)...(19): siRNA sense strand
gcaagaacuagaaaauaug

SEQ ID NO: 109795 - RNA, 19 nt, Homo sapiens
  misc_RNA (1)...(19): siRNA sense strand
ggagcacaccaugucacua

SEQ ID NO: 109796 - RNA, 19 nt, Homo sapiens
  misc_RNA (1)...(19): siRNA sense strand
gcaaccucaaccauauauu

SEQ ID NO: 109797 - RNA, 19 nt, Homo sapiens
  misc_RNA (1)...(19): siRNA sense strand
ccaccagcaguaauaacaa

SEQ ID NO: 109798 - RNA, 19 nt, Homo sapiens
  misc_RNA (1)...(19): siRNA sense strand
gaagcuguuauuggucauu

SEQ ID NO: 109799 - RNA, 19 nt, Homo sapiens
  misc_RNA (1)...(19): siRNA sense strand
cauggaugagcaagaacua

SEQ ID NO: 109800 - RNA, 19 nt, Homo sapiens
  misc_RNA (1)...(19): siRNA sense strand
ucaaccauauauucuacag

SEQ ID NO: 109801 - RNA, 19 nt, Homo sapiens
  misc_RNA (1)...(19): siRNA sense strand
gcuguuauuggucauuuua

SEQ ID NO: 109802 - RNA, 19 nt, Homo sapiens
  misc_RNA (1)...(19): siRNA sense strand
guguaaguuugcugaugga

SEQ ID NO: 109803 - RNA, 19 nt, Homo sapiens
  misc_RNA (1)...(19): siRNA sense strand
cacuacagcccgcaucaau

SEQ ID NO: 109804 - RNA, 19 nt, Homo sapiens
  misc_RNA (1)...(19): siRNA sense strand
caccagcaguaauaacaac

SEQ ID NO: 109805 - RNA, 19 nt, Homo sapiens
  misc_RNA (1)...(19): siRNA sense strand
ccauauaccuuucaaccua

SEQ ID NO: 109806 - RNA, 19 nt, Homo sapiens
  misc_RNA (1)...(19): siRNA sense strand
gacagaacccaaacaaaua

SEQ ID NO: 109807 - RNA, 19 nt, Homo sapiens
  misc_RNA (1)...(19): siRNA sense strand
gaaugacacuuacuuacga

SEQ ID NO: 109808 - RNA, 19 nt, Homo sapiens
  misc_RNA (1)...(19): siRNA sense strand
gaugcaaccucaaccauau

SEQ ID NO: 109809 - RNA, 19 nt, Homo sapiens
  misc_RNA (1)...(19): siRNA sense strand
gaagcucugucaaccauau

SEQ ID NO: 109810 - RNA, 19 nt, Homo sapiens
  misc_RNA (1)...(19): siRNA sense strand
caaguuauuucuacaagga

SEQ ID NO: 109811 - RNA, 19 nt, Homo sapiens
  misc_RNA (1)...(19): siRNA sense strand
acaaauacaucccuaaugg

SEQ ID NO: 109812 - RNA, 19 nt, Homo sapiens
  misc_RNA (1)...(19): siRNA sense strand
gaaccuuuauuguguaagu

SEQ ID NO: 109813 - RNA, 19 nt, Homo sapiens
  misc_RNA (1)...(19): siRNA sense strand
cuaccaaccucuacauuuc

SEQ ID NO: 109814 - RNA, 19 nt, Homo sapiens
  misc_RNA (1)...(19): siRNA sense strand
ggaagaccauggcauagag

SEQ ID NO: 109815 - RNA, 19 nt, Homo sapiens
  misc_RNA (1)...(19): siRNA sense strand
ggaugcaaccucaaccaua

SEQ ID NO: 109816 - RNA, 19 nt, Homo sapiens
  misc_RNA (1)...(19): siRNA sense strand
agacagaacccaaacaaau

SEQ ID NO: 109817 - RNA, 19 nt, Homo sapiens
  misc_RNA (1)...(19): siRNA sense strand
cgaaugaucacucaaacuu

SEQ ID NO: 109818 - RNA, 19 nt, Homo sapiens
  misc_RNA (1)...(19): siRNA sense strand
cauauaccuuucaaccuaa

SEQ ID NO: 109819 - RNA, 19 nt, Homo sapiens
  misc_RNA (1)...(19): siRNA sense strand
caaagcaacaggaacaaga

SEQ ID NO: 109820 - RNA, 19 nt, Homo sapiens
  misc_RNA (1)...(19): siRNA sense strand
cguguuaacucccucaaug

SEQ ID NO: 109821 - RNA, 19 nt, Homo sapiens
  misc_RNA (1)...(19): siRNA sense strand
uauauugcaucuccuguau

SEQ ID NO: 109822 - RNA, 19 nt, Homo sapiens
  misc_RNA (1)...(19): siRNA sense strand
ggacaaguuauuucuacaa

SEQ ID NO: 109823 - RNA, 19 nt, Homo sapiens
  misc_RNA (1)...(19): siRNA sense strand
ggaaaauagucuccacaaa

SEQ ID NO: 109824 - RNA, 19 nt, Homo sapiens
  misc_RNA (1)...(19): siRNA sense strand
gguguuggcuuugcuagga

SEQ ID NO: 109825 - RNA, 19 nt, Homo sapiens
  misc_RNA (1)...(19): siRNA sense strand
cagaaccuuuauuguguaa

SEQ ID NO: 109826 - RNA, 19 nt, Homo sapiens
  misc_RNA (1)...(19): siRNA sense strand
cuacagcccgcaucaauga

SEQ ID NO: 109827 - RNA, 19 nt, Homo sapiens
  misc_RNA (1)...(19): siRNA sense strand
gcaguaauaacaacaguag

SEQ ID NO: 109828 - RNA, 19 nt, Homo sapiens
  misc_RNA (1)...(19): siRNA sense strand
auacaucccuaauggaaga

SEQ ID NO: 109829 - RNA, 19 nt, Homo sapiens
  misc_RNA (1)...(19): siRNA sense strand
cuacgugauuccaguggua

SEQ ID NO: 109830 - RNA, 19 nt, Homo sapiens
  misc_RNA (1)...(19): siRNA sense strand
caaccucaaccauauauuc

SEQ ID NO: 109831 - RNA, 19 nt, Homo sapiens
  misc_RNA (1)...(19): siRNA sense strand
gcuacaaaccgaaugauca

SEQ ID NO: 109832 - RNA, 19 nt, Homo sapiens
  misc_RNA (1)...(19): siRNA sense strand
acagaaccuuuauugugua

SEQ ID NO: 109833 - RNA, 19 nt, Homo sapiens
  misc_RNA (1)...(19): siRNA sense strand
gacaaguuauuucuacaag

SEQ ID NO: 109834 - RNA, 19 nt, Homo sapiens
  misc_RNA (1)...(19): siRNA sense strand
caaaccgaaugaucacuca

SEQ ID NO: 109835 - RNA, 19 nt, Homo sapiens
  misc_RNA (1)...(19): siRNA sense strand
acaaggauacuacgugauu

SEQ ID NO: 109836 - RNA, 19 nt, Homo sapiens
  misc_RNA (1)...(19): siRNA sense strand
gcaaaacgaaccucuauau

SEQ ID NO: 109837 - RNA, 19 nt, Homo sapiens
  misc_RNA (1)...(19): siRNA sense strand
gugaagcucugucaaccau

SEQ ID NO: 109838 - RNA, 19 nt, Homo sapiens
  misc_RNA (1)...(19): siRNA sense strand
ucuauuacacccuauauug

SEQ ID NO: 109839 - RNA, 19 nt, Homo sapiens
  misc_RNA (1)...(19): siRNA sense strand
caaacaaauacaucccuaa

SEQ ID NO: 109840 - RNA, 19 nt, Homo sapiens
  misc_RNA (1)...(19): siRNA sense strand
ccucuacauuucuaauuug

SEQ ID NO: 109841 - RNA, 19 nt, Homo sapiens
  misc_RNA (1)...(19): siRNA sense strand
gaaaauagucuccacaaag

SEQ ID NO: 109842 - RNA, 19 nt, Homo sapiens
  misc_RNA (1)...(19): siRNA sense strand
aaauacaucccuaauggaa

SEQ ID NO: 109843 - RNA, 19 nt, Homo sapiens
  misc_RNA (1)...(19): siRNA sense strand
gagacagaacccaaacaaa

SEQ ID NO: 109844 - RNA, 19 nt, Homo sapiens
  misc_RNA (1)...(19): siRNA sense strand
gaaaauaugcucaaaccau

SEQ ID NO: 109845 - RNA, 19 nt, Homo sapiens
  misc_RNA (1)...(19): siRNA sense strand
ggaggcaaguggucaacag

SEQ ID NO: 109846 - RNA, 19 nt, Homo sapiens
  misc_RNA (1)...(19): siRNA sense strand
uaagacaccaccaggaguu

SEQ ID NO: 109847 - RNA, 19 nt, Homo sapiens
  misc_RNA (1)...(19): siRNA sense strand
gcaccaccagcaguaauaa

SEQ ID NO: 109848 - RNA, 19 nt, Homo sapiens
  misc_RNA (1)...(19): siRNA sense strand
gaacccaaacaaauacauc

SEQ ID NO: 109849 - RNA, 19 nt, Homo sapiens
  misc_RNA (1)...(19): siRNA sense strand
gagcacaccaugucacuac

SEQ ID NO: 109850 - RNA, 19 nt, Homo sapiens
  misc_RNA (1)...(19): siRNA sense strand
caacuacagcugcuauaca

SEQ ID NO: 109851 - RNA, 19 nt, Homo sapiens
  misc_RNA (1)...(19): siRNA sense strand
ggaaugacacuuacuuacg

SEQ ID NO: 109852 - RNA, 19 nt, Homo sapiens
  misc_RNA (1)...(19): siRNA sense strand
gagcaagaacuagaaaaua

SEQ ID NO: 109853 - RNA, 19 nt, Homo sapiens
  misc_RNA (1)...(19): siRNA sense strand
ccuuucaaccuaauaagua

SEQ ID NO: 109854 - RNA, 19 nt, Homo sapiens
  misc_RNA (1)...(19): siRNA sense strand
cuacagcugcuauacagaa

SEQ ID NO: 109855 - RNA, 19 nt, Homo sapiens
  misc_RNA (1)...(19): siRNA sense strand
aggauggaaucaacagaaa

SEQ ID NO: 109856 - RNA, 19 nt, Homo sapiens
  misc_RNA (1)...(19): siRNA sense strand
gaugagcaagaacuagaaa

SEQ ID NO: 109857 - RNA, 19 nt, Homo sapiens
  misc_RNA (1)...(19): siRNA sense strand
gaugggaucagcucagcaa

SEQ ID NO: 109858 - RNA, 19 nt, Homo sapiens
  misc_RNA (1)...(19): siRNA sense strand
ccuaccaaccucuacauuu

SEQ ID NO: 109859 - RNA, 19 nt, Homo sapiens
  misc_RNA (1)...(19): siRNA sense strand
gaaugaucacucaaacuuc

SEQ ID NO: 109860 - RNA, 19 nt, Homo sapiens
  misc_RNA (1)...(19): siRNA sense strand
uagcagcaguagcaacuca

SEQ ID NO: 109861 - RNA, 19 nt, Homo sapiens
  misc_RNA (1)...(19): siRNA sense strand
caaauacaucccuaaugga

SEQ ID NO: 109862 - RNA, 19 nt, Homo sapiens
  misc_RNA (1)...(19): siRNA sense strand
ggaugagcaagaacuagaa

SEQ ID NO: 109863 - RNA, 19 nt, Homo sapiens
  misc_RNA (1)...(19): siRNA sense strand
gauuuuauccuucaccaua

SEQ ID NO: 109864 - RNA, 19 nt, Homo sapiens
  misc_RNA (1)...(19): siRNA sense strand
caaggauacuacgugauuc

SEQ ID NO: 109865 - RNA, 19 nt, Homo sapiens
  misc_RNA (1)...(19): siRNA sense strand
aaugaucacucaaacuucu

SEQ ID NO: 109866 - RNA, 19 nt, Homo sapiens
  misc_RNA (1)...(19): siRNA sense strand
gaagaccauggcauagaga

SEQ ID NO: 109867 - RNA, 19 nt, Homo sapiens
  misc_RNA (1)...(19): siRNA sense strand
ccauuuggacaaguuauuu

SEQ ID NO: 109868 - RNA, 19 nt, Homo sapiens
  misc_RNA (1)...(19): siRNA sense strand
ccucaaccauauauucuac

SEQ ID NO: 109869 - RNA, 19 nt, Homo sapiens
  misc_RNA (1)...(19): siRNA sense strand
uauugcaucuccuguaucu

SEQ ID NO: 109870 - RNA, 19 nt, Homo sapiens
  misc_RNA (1)...(19): siRNA sense strand
cgagacgucuaaugaccau

SEQ ID NO: 109871 - RNA, 19 nt, Homo sapiens
  misc_RNA (1)...(19): siRNA sense strand
aagcuguuauuggucauuu

SEQ ID NO: 109872 - RNA, 19 nt, Homo sapiens
  misc_RNA (1)...(19): siRNA sense strand
cacucaaacuucuauuaca

SEQ ID NO: 109873 - RNA, 19 nt, Homo sapiens
  misc_RNA (1)...(19): siRNA sense strand
gcuggaaugacacuuacuu

SEQ ID NO: 109874 - RNA, 19 nt, Homo sapiens
  misc_RNA (1)...(19): siRNA sense strand
aagcucaaauggcaaagca

SEQ ID NO: 109875 - RNA, 19 nt, Homo sapiens
  misc_RNA (1)...(19): siRNA sense strand
ucacucaaacuucuauuac

SEQ ID NO: 109876 - RNA, 19 nt, Homo sapiens
  misc_RNA (1)...(19): siRNA sense strand
aaaauagucuccacaaagg

SEQ ID NO: 109877 - RNA, 19 nt, Homo sapiens
  misc_RNA (1)...(19): siRNA sense strand
cagcaguaauaacaacagu

SEQ ID NO: 109878 - RNA, 19 nt, Homo sapiens
  misc_RNA (1)...(19): siRNA sense strand
cuccauggaugagcaagaa

SEQ ID NO: 109879 - RNA, 19 nt, Homo sapiens
  misc_RNA (1)...(19): siRNA sense strand
agagacagaacccaaacaa

SEQ ID NO: 109880 - RNA, 19 nt, Homo sapiens
  misc_RNA (1)...(19): siRNA sense strand
uaggauggaaucaacagaa

SEQ ID NO: 109881 - RNA, 19 nt, Homo sapiens
  misc_RNA (1)...(19): siRNA sense strand
ucaaccauaugggaaaaua

SEQ ID NO: 109882 - RNA, 19 nt, Homo sapiens
  misc_RNA (1)...(19): siRNA sense strand
gcaaagcaacaggaacaag

SEQ ID NO: 109883 - RNA, 19 nt, Homo sapiens
  misc_RNA (1)...(19): siRNA sense strand
ggagccuacuugccacagu

SEQ ID NO: 109884 - RNA, 19 nt, Homo sapiens
  misc_RNA (1)...(19): siRNA sense strand
ggaacauacaugccugcaa

SEQ ID NO: 109885 - RNA, 19 nt, Homo sapiens
  misc_RNA (1)...(19): siRNA sense strand
aaaccauuuggacaaguua

SEQ ID NO: 109886 - RNA, 19 nt, Homo sapiens
  misc_RNA (1)...(19): siRNA sense strand
augcaaagguuaugguuuu

SEQ ID NO: 109887 - RNA, 19 nt, Homo sapiens
  misc_RNA (1)...(19): siRNA sense strand
caaaugcaaagguuauggu

SEQ ID NO: 109888 - RNA, 19 nt, Homo sapiens
  misc_RNA (1)...(19): siRNA sense strand
cuauauugcaucuccugua

SEQ ID NO: 109889 - RNA, 19 nt, Homo sapiens
  misc_RNA (1)...(19): siRNA sense strand
cuggaaugacacuuacuua

SEQ ID NO: 109890 - RNA, 19 nt, Homo sapiens
  misc_RNA (1)...(19): siRNA sense strand
gguacaagucgugguguug

SEQ ID NO: 109891 - RNA, 19 nt, Homo sapiens
  misc_RNA (1)...(19): siRNA sense strand
uggcaaagcaacaggaaca

SEQ ID NO: 109892 - RNA, 19 nt, Homo sapiens
  misc_RNA (1)...(19): siRNA sense strand
caaccucuacauuucuaau

SEQ ID NO: 109893 - RNA, 19 nt, Homo sapiens
  misc_RNA (1)...(19): siRNA sense strand
accaaccucuacauuucua

SEQ ID NO: 109894 - RNA, 19 nt, Homo sapiens
  misc_RNA (1)...(19): siRNA sense strand
gcaagaacuagaaaauaug

SEQ ID NO: 109895 - RNA, 19 nt, Homo sapiens
  misc_RNA (1)...(19): siRNA sense strand
ggagcacaccaugucacua

SEQ ID NO: 109896 - RNA, 19 nt, Homo sapiens
  misc_RNA (1)...(19): siRNA sense strand
gcaaccucaaccauauauu

SEQ ID NO: 109897 - RNA, 19 nt, Homo sapiens
  misc_RNA (1)...(19): siRNA sense strand
ccaccagcaguaauaacaa

SEQ ID NO: 109898 - RNA, 19 nt, Homo sapiens
  misc_RNA (1)...(19): siRNA sense strand
gaagcuguuauuggucauu

SEQ ID NO: 109899 - RNA, 19 nt, Homo sapiens
  misc_RNA (1)...(19): siRNA sense strand
cauggaugagcaagaacua

SEQ ID NO: 109900 - RNA, 19 nt, Homo sapiens
  misc_RNA (1)...(19): siRNA sense strand
ucaaccauauauucuacag

SEQ ID NO: 109901 - RNA, 19 nt, Homo sapiens
  misc_RNA (1)...(19): siRNA sense strand
gcuguuauuggucauuuua

SEQ ID NO: 109902 - RNA, 19 nt, Homo sapiens
  misc_RNA (1)...(19): siRNA sense strand
guguaaguuugcugaugga

SEQ ID NO: 109903 - RNA, 19 nt, Homo sapiens
  misc_RNA (1)...(19): siRNA sense strand
cacuacagcccgcaucaau

SEQ ID NO: 109904 - RNA, 19 nt, Homo sapiens
  misc_RNA (1)...(19): siRNA sense strand
caccagcaguaauaacaac

SEQ ID NO: 109905 - RNA, 19 nt, Homo sapiens
  misc_RNA (1)...(19): siRNA sense strand
ccauauaccuuucaaccua

SEQ ID NO: 109906 - RNA, 19 nt, Homo sapiens
  misc_RNA (1)...(19): siRNA sense strand
gacagaacccaaacaaaua

SEQ ID NO: 109907 - RNA, 19 nt, Homo sapiens
  misc_RNA (1)...(19): siRNA sense strand
gaaugacacuuacuuacga

SEQ ID NO: 109908 - RNA, 19 nt, Homo sapiens
  misc_RNA (1)...(19): siRNA sense strand
gaugcaaccucaaccauau

SEQ ID NO: 109909 - RNA, 19 nt, Homo sapiens
  misc_RNA (1)...(19): siRNA sense strand
gaagcucugucaaccauau

SEQ ID NO: 109910 - RNA, 19 nt, Homo sapiens
  misc_RNA (1)...(19): siRNA sense strand
caaguuauuucuacaagga

SEQ ID NO: 109911 - RNA, 19 nt, Homo sapiens
  misc_RNA (1)...(19): siRNA sense strand
acaaauacaucccuaaugg

SEQ ID NO: 109912 - RNA, 19 nt, Homo sapiens
  misc_RNA (1)...(19): siRNA sense strand
gaaccuuuauuguguaagu

SEQ ID NO: 109913 - RNA, 19 nt, Homo sapiens
  misc_RNA (1)...(19): siRNA sense strand
cuaccaaccucuacauuuc

SEQ ID NO: 109914 - RNA, 19 nt, Homo sapiens
  misc_RNA (1)...(19): siRNA sense strand
ggaagaccauggcauagag

SEQ ID NO: 109915 - RNA, 19 nt, Homo sapiens
  misc_RNA (1)...(19): siRNA sense strand
ggaugcaaccucaaccaua

SEQ ID NO: 109916 - RNA, 19 nt, Homo sapiens
  misc_RNA (1)...(19): siRNA sense strand
agacagaacccaaacaaau

SEQ ID NO: 109917 - RNA, 19 nt, Homo sapiens
  misc_RNA (1)...(19): siRNA sense strand
cgaaugaucacucaaacuu

SEQ ID NO: 109918 - RNA, 19 nt, Homo sapiens
  misc_RNA (1)...(19): siRNA sense strand
cauauaccuuucaaccuaa

SEQ ID NO: 109919 - RNA, 19 nt, Homo sapiens
  misc_RNA (1)...(19): siRNA sense strand
caaagcaacaggaacaaga

SEQ ID NO: 109920 - RNA, 19 nt, Homo sapiens
  misc_RNA (1)...(19): siRNA sense strand
cguguuaacucccucaaug

SEQ ID NO: 109921 - RNA, 19 nt, Homo sapiens
  misc_RNA (1)...(19): siRNA sense strand
uauauugcaucuccuguau

SEQ ID NO: 109922 - RNA, 19 nt, Homo sapiens
  misc_RNA (1)...(19): siRNA sense strand
ggacaaguuauuucuacaa

SEQ ID NO: 109923 - RNA, 19 nt, Homo sapiens
  misc_RNA (1)...(19): siRNA sense strand
ggaaaauagucuccacaaa

SEQ ID NO: 109924 - RNA, 19 nt, Homo sapiens
  misc_RNA (1)...(19): siRNA sense strand
gguguuggcuuugcuagga

SEQ ID NO: 109925 - RNA, 19 nt, Homo sapiens
  misc_RNA (1)...(19): siRNA sense strand
cagaaccuuuauuguguaa

SEQ ID NO: 109926 - RNA, 19 nt, Homo sapiens
  misc_RNA (1)...(19): siRNA sense strand
cuacagcccgcaucaauga

SEQ ID NO: 109927 - RNA, 19 nt, Homo sapiens
  misc_RNA (1)...(19): siRNA sense strand
gcaguaauaacaacaguag

SEQ ID NO: 109928 - RNA, 19 nt, Homo sapiens
  misc_RNA (1)...(19): siRNA sense strand
auacaucccuaauggaaga

SEQ ID NO: 109929 - RNA, 19 nt, Homo sapiens
  misc_RNA (1)...(19): siRNA sense strand
cuacgugauuccaguggua

SEQ ID NO: 109930 - RNA, 19 nt, Homo sapiens
  misc_RNA (1)...(19): siRNA sense strand
caaccucaaccauauauuc

SEQ ID NO: 109931 - RNA, 19 nt, Homo sapiens
  misc_RNA (1)...(19): siRNA sense strand
gcuacaaaccgaaugauca

SEQ ID NO: 109932 - RNA, 19 nt, Homo sapiens
  misc_RNA (1)...(19): siRNA sense strand
acagaaccuuuauugugua

SEQ ID NO: 109933 - RNA, 19 nt, Homo sapiens
  misc_RNA (1)...(19): siRNA sense strand
gacaaguuauuucuacaag

SEQ ID NO: 109934 - RNA, 19 nt, Homo sapiens
  misc_RNA (1)...(19): siRNA sense strand
caaaccgaaugaucacuca

SEQ ID NO: 109935 - RNA, 19 nt, Homo sapiens
  misc_RNA (1)...(19): siRNA sense strand
acaaggauacuacgugauu

SEQ ID NO: 109936 - RNA, 19 nt, Homo sapiens
  misc_RNA (1)...(19): siRNA sense strand
gcaaaacgaaccucuauau

SEQ ID NO: 109937 - RNA, 19 nt, Homo sapiens
  misc_RNA (1)...(19): siRNA sense strand
gugaagcucugucaaccau

SEQ ID NO: 109938 - RNA, 19 nt, Homo sapiens
  misc_RNA (1)...(19): siRNA sense strand
ucuauuacacccuauauug

SEQ ID NO: 109939 - RNA, 19 nt, Homo sapiens
  misc_RNA (1)...(19): siRNA sense strand
caaacaaauacaucccuaa

SEQ ID NO: 109940 - RNA, 19 nt, Homo sapiens
  misc_RNA (1)...(19): siRNA sense strand
ccucuacauuucuaauuug

SEQ ID NO: 109941 - RNA, 19 nt, Homo sapiens
  misc_RNA (1)...(19): siRNA sense strand
gaaaauagucuccacaaag

SEQ ID NO: 109942 - RNA, 19 nt, Homo sapiens
  misc_RNA (1)...(19): siRNA sense strand
aaauacaucccuaauggaa

SEQ ID NO: 109943 - RNA, 19 nt, Homo sapiens
  misc_RNA (1)...(19): siRNA sense strand
gagacagaacccaaacaaa

SEQ ID NO: 109944 - RNA, 19 nt, Homo sapiens
  misc_RNA (1)...(19): siRNA sense strand
gaaaauaugcucaaaccau

SEQ ID NO: 109945 - RNA, 19 nt, Homo sapiens
  misc_RNA (1)...(19): siRNA sense strand
ggaggcaaguggucaacag

SEQ ID NO: 109946 - RNA, 19 nt, Homo sapiens
  misc_RNA (1)...(19): siRNA sense strand
uaagacaccaccaggaguu

SEQ ID NO: 109947 - RNA, 19 nt, Homo sapiens
  misc_RNA (1)...(19): siRNA sense strand
gcaccaccagcaguaauaa

SEQ ID NO: 109948 - RNA, 19 nt, Homo sapiens
  misc_RNA (1)...(19): siRNA sense strand
gaacccaaacaaauacauc

SEQ ID NO: 109949 - RNA, 19 nt, Homo sapiens
  misc_RNA (1)...(19): siRNA sense strand
gagcacaccaugucacuac

SEQ ID NO: 109950 - RNA, 19 nt, Homo sapiens
  misc_RNA (1)...(19): siRNA sense strand
caacuacagcugcuauaca

SEQ ID NO: 109951 - RNA, 19 nt, Homo sapiens
  misc_RNA (1)...(19): siRNA sense strand
ggaaugacacuuacuuacg

SEQ ID NO: 109952 - RNA, 19 nt, Homo sapiens
  misc_RNA (1)...(19): siRNA sense strand
gagcaagaacuagaaaaua

SEQ ID NO: 109953 - RNA, 19 nt, Homo sapiens
  misc_RNA (1)...(19): siRNA sense strand
ccuuucaaccuaauaagua

SEQ ID NO: 109954 - RNA, 19 nt, Homo sapiens
  misc_RNA (1)...(19): siRNA sense strand
cuacagcugcuauacagaa

SEQ ID NO: 109955 - RNA, 19 nt, Homo sapiens
  misc_RNA (1)...(19): siRNA sense strand
aggauggaaucaacagaaa

SEQ ID NO: 109956 - RNA, 19 nt, Homo sapiens
  misc_RNA (1)...(19): siRNA sense strand
gaugagcaagaacuagaaa

SEQ ID NO: 109957 - RNA, 19 nt, Homo sapiens
  misc_RNA (1)...(19): siRNA sense strand
gaugggaucagcucagcaa

SEQ ID NO: 109958 - RNA, 19 nt, Homo sapiens
  misc_RNA (1)...(19): siRNA sense strand
ccuaccaaccucuacauuu

SEQ ID NO: 109959 - RNA, 19 nt, Homo sapiens
  misc_RNA (1)...(19): siRNA sense strand
gaaugaucacucaaacuuc

SEQ ID NO: 109960 - RNA, 19 nt, Homo sapiens
  misc_RNA (1)...(19): siRNA sense strand
uagcagcaguagcaacuca

SEQ ID NO: 109961 - RNA, 19 nt, Homo sapiens
  misc_RNA (1)...(19): siRNA sense strand
caaauacaucccuaaugga

SEQ ID NO: 109962 - RNA, 19 nt, Homo sapiens
  misc_RNA (1)...(19): siRNA sense strand
ggaugagcaagaacuagaa

SEQ ID NO: 109963 - RNA, 19 nt, Homo sapiens
  misc_RNA (1)...(19): siRNA sense strand
gauuuuauccuucaccaua

SEQ ID NO: 109964 - RNA, 19 nt, Homo sapiens
  misc_RNA (1)...(19): siRNA sense strand
caaggauacuacgugauuc

SEQ ID NO: 109965 - RNA, 19 nt, Homo sapiens
  misc_RNA (1)...(19): siRNA sense strand
aaugaucacucaaacuucu

SEQ ID NO: 109966 - RNA, 19 nt, Homo sapiens
  misc_RNA (1)...(19): siRNA sense strand
gaagaccauggcauagaga

SEQ ID NO: 109967 - RNA, 19 nt, Homo sapiens
  misc_RNA (1)...(19): siRNA sense strand
ccauuuggacaaguuauuu

SEQ ID NO: 109968 - RNA, 19 nt, Homo sapiens
  misc_RNA (1)...(19): siRNA sense strand
ccucaaccauauauucuac

SEQ ID NO: 109969 - RNA, 19 nt, Homo sapiens
  misc_RNA (1)...(19): siRNA sense strand
uauugcaucuccuguaucu

SEQ ID NO: 109970 - RNA, 19 nt, Homo sapiens
  misc_RNA (1)...(19): siRNA sense strand
cgagacgucuaaugaccau

SEQ ID NO: 109971 - RNA, 19 nt, Homo sapiens
  misc_RNA (1)...(19): siRNA sense strand
aagcuguuauuggucauuu

SEQ ID NO: 109972 - RNA, 19 nt, Homo sapiens
  misc_RNA (1)...(19): siRNA sense strand
cacucaaacuucuauuaca

SEQ ID NO: 109973 - RNA, 19 nt, Homo sapiens
  misc_RNA (1)...(19): siRNA sense strand
gcuggaaugacacuuacuu

SEQ ID NO: 109974 - RNA, 19 nt, Homo sapiens
  misc_RNA (1)...(19): siRNA sense strand
aagcucaaauggcaaagca

SEQ ID NO: 109975 - RNA, 19 nt, Homo sapiens
  misc_RNA (1)...(19): siRNA sense strand
ucacucaaacuucuauuac

SEQ ID NO: 109976 - RNA, 19 nt, Homo sapiens
  misc_RNA (1)...(19): siRNA sense strand
aaaauagucuccacaaagg

SEQ ID NO: 109977 - RNA, 19 nt, Homo sapiens
  misc_RNA (1)...(19): siRNA sense strand
cagcaguaauaacaacagu

SEQ ID NO: 109978 - RNA, 19 nt, Homo sapiens
  misc_RNA (1)...(19): siRNA sense strand
cuccauggaugagcaagaa

SEQ ID NO: 109979 - RNA, 19 nt, Homo sapiens
  misc_RNA (1)...(19): siRNA sense strand
agagacagaacccaaacaa

SEQ ID NO: 109980 - RNA, 19 nt, Homo sapiens
  misc_RNA (1)...(19): siRNA sense strand
uaggauggaaucaacagaa

SEQ ID NO: 109981 - RNA, 19 nt, Homo sapiens
  misc_RNA (1)...(19): siRNA sense strand
ucaaccauaugggaaaaua

SEQ ID NO: 109982 - RNA, 19 nt, Homo sapiens
  misc_RNA (1)...(19): siRNA sense strand
gcaaagcaacaggaacaag

SEQ ID NO: 109983 - RNA, 19 nt, Homo sapiens
  misc_RNA (1)...(19): siRNA sense strand
ggagccuacuugccacagu

SEQ ID NO: 109984 - RNA, 19 nt, Homo sapiens
  misc_RNA (1)...(19): siRNA sense strand
ggaacauacaugccugcaa

SEQ ID NO: 109985 - RNA, 19 nt, Homo sapiens
  misc_RNA (1)...(19): siRNA sense strand
aaaccauuuggacaaguua

SEQ ID NO: 109986 - RNA, 19 nt, Homo sapiens
  misc_RNA (1)...(19): siRNA sense strand
augcaaagguuaugguuuu

SEQ ID NO: 109987 - RNA, 19 nt, Homo sapiens
  misc_RNA (1)...(19): siRNA sense strand
caaaugcaaagguuauggu

SEQ ID NO: 109988 - RNA, 19 nt, Homo sapiens
  misc_RNA (1)...(19): siRNA sense strand
cuauauugcaucuccugua

SEQ ID NO: 109989 - RNA, 19 nt, Homo sapiens
  misc_RNA (1)...(19): siRNA sense strand
cuggaaugacacuuacuua

SEQ ID NO: 109990 - RNA, 19 nt, Homo sapiens
  misc_RNA (1)...(19): siRNA sense strand
gguacaagucgugguguug

SEQ ID NO: 109991 - RNA, 19 nt, Homo sapiens
  misc_RNA (1)...(19): siRNA sense strand
uggcaaagcaacaggaaca

SEQ ID NO: 109992 - RNA, 19 nt, Homo sapiens
  misc_RNA (1)...(19): siRNA sense strand
caaccucuacauuucuaau

SEQ ID NO: 109993 - RNA, 19 nt, Homo sapiens
  misc_RNA (1)...(19): siRNA sense strand
accaaccucuacauuucua

SEQ ID NO: 109994 - RNA, 19 nt, Homo sapiens
  misc_RNA (1)...(19): siRNA sense strand
gcaagaacuagaaaauaug

SEQ ID NO: 109995 - RNA, 19 nt, Homo sapiens
  misc_RNA (1)...(19): siRNA sense strand
ggagcacaccaugucacua

SEQ ID NO: 109996 - RNA, 19 nt, Homo sapiens
  misc_RNA (1)...(19): siRNA sense strand
gcaaccucaaccauauauu

SEQ ID NO: 109997 - RNA, 19 nt, Homo sapiens
  misc_RNA (1)...(19): siRNA sense strand
ccaccagcaguaauaacaa

SEQ ID NO: 109998 - RNA, 19 nt, Homo sapiens
  misc_RNA (1)...(19): siRNA sense strand
gaagcuguuauuggucauu

SEQ ID NO: 109999 - RNA, 19 nt, Homo sapiens
  misc_RNA (1)...(19): siRNA sense strand
cauggaugagcaagaacua

SEQ ID NO: 110000 - RNA, 19 nt, Homo sapiens
  misc_RNA (1)...(19): siRNA sense strand
ucaaccauauauucuacag

SEQ ID NO: 110001 - RNA, 19 nt, Homo sapiens
  misc_RNA (1)...(19): siRNA sense strand
gcuguuauuggucauuuua

SEQ ID NO: 110002 - RNA, 19 nt, Homo sapiens
  misc_RNA (1)...(19): siRNA sense strand
guguaaguuugcugaugga

SEQ ID NO: 110003 - RNA, 19 nt, Homo sapiens
  misc_RNA (1)...(19): siRNA sense strand
cacuacagcccgcaucaau

SEQ ID NO: 110004 - RNA, 19 nt, Homo sapiens
  misc_RNA (1)...(19): siRNA sense strand
caccagcaguaauaacaac

SEQ ID NO: 110005 - RNA, 19 nt, Homo sapiens
  misc_RNA (1)...(19): siRNA sense strand
ccauauaccuuucaaccua

SEQ ID NO: 110006 - RNA, 19 nt, Homo sapiens
  misc_RNA (1)...(19): siRNA sense strand
gacagaacccaaacaaaua

SEQ ID NO: 110007 - RNA, 19 nt, Homo sapiens
  misc_RNA (1)...(19): siRNA sense strand
gaaugacacuuacuuacga

SEQ ID NO: 110008 - RNA, 19 nt, Homo sapiens
  misc_RNA (1)...(19): siRNA sense strand
gaugcaaccucaaccauau

SEQ ID NO: 110009 - RNA, 19 nt, Homo sapiens
  misc_RNA (1)...(19): siRNA sense strand
gaagcucugucaaccauau

SEQ ID NO: 110010 - RNA, 19 nt, Homo sapiens
  misc_RNA (1)...(19): siRNA sense strand
caaguuauuucuacaagga

SEQ ID NO: 110011 - RNA, 19 nt, Homo sapiens
  misc_RNA (1)...(19): siRNA sense strand
acaaauacaucccuaaugg

SEQ ID NO: 110012 - RNA, 19 nt, Homo sapiens
  misc_RNA (1)...(19): siRNA sense strand
gaaccuuuauuguguaagu

SEQ ID NO: 110013 - RNA, 19 nt, Homo sapiens
  misc_RNA (1)...(19): siRNA sense strand
cuaccaaccucuacauuuc

SEQ ID NO: 110014 - RNA, 19 nt, Homo sapiens
  misc_RNA (1)...(19): siRNA sense strand
ggaagaccauggcauagag

SEQ ID NO: 110015 - RNA, 19 nt, Homo sapiens
  misc_RNA (1)...(19): siRNA sense strand
ggaugcaaccucaaccaua

SEQ ID NO: 110016 - RNA, 19 nt, Homo sapiens
  misc_RNA (1)...(19): siRNA sense strand
agacagaacccaaacaaau

SEQ ID NO: 110017 - RNA, 19 nt, Homo sapiens
  misc_RNA (1)...(19): siRNA sense strand
cgaaugaucacucaaacuu

SEQ ID NO: 110018 - RNA, 19 nt, Homo sapiens
  misc_RNA (1)...(19): siRNA sense strand
cauauaccuuucaaccuaa

SEQ ID NO: 110019 - RNA, 19 nt, Homo sapiens
  misc_RNA (1)...(19): siRNA sense strand
caaagcaacaggaacaaga

SEQ ID NO: 110020 - RNA, 19 nt, Homo sapiens
  misc_RNA (1)...(19): siRNA sense strand
cguguuaacucccucaaug

SEQ ID NO: 110021 - RNA, 19 nt, Homo sapiens
  misc_RNA (1)...(19): siRNA sense strand
uauauugcaucuccuguau

SEQ ID NO: 110022 - RNA, 19 nt, Homo sapiens
  misc_RNA (1)...(19): siRNA sense strand
ggacaaguuauuucuacaa

SEQ ID NO: 110023 - RNA, 19 nt, Homo sapiens
  misc_RNA (1)...(19): siRNA sense strand
ggaaaauagucuccacaaa

SEQ ID NO: 110024 - RNA, 19 nt, Homo sapiens
  misc_RNA (1)...(19): siRNA sense strand
gguguuggcuuugcuagga

SEQ ID NO: 110025 - RNA, 19 nt, Homo sapiens
  misc_RNA (1)...(19): siRNA sense strand
cagaaccuuuauuguguaa

SEQ ID NO: 110026 - RNA, 19 nt, Homo sapiens
  misc_RNA (1)...(19): siRNA sense strand
cuacagcccgcaucaauga

SEQ ID NO: 110027 - RNA, 19 nt, Homo sapiens
  misc_RNA (1)...(19): siRNA sense strand
gcaguaauaacaacaguag

SEQ ID NO: 110028 - RNA, 19 nt, Homo sapiens
  misc_RNA (1)...(19): siRNA sense strand
auacaucccuaauggaaga

SEQ ID NO: 110029 - RNA, 19 nt, Homo sapiens
  misc_RNA (1)...(19): siRNA sense strand
cuacgugauuccaguggua

SEQ ID NO: 110030 - RNA, 19 nt, Homo sapiens
  misc_RNA (1)...(19): siRNA sense strand
caaccucaaccauauauuc

SEQ ID NO: 110031 - RNA, 19 nt, Homo sapiens
  misc_RNA (1)...(19): siRNA sense strand
gcuacaaaccgaaugauca

SEQ ID NO: 110032 - RNA, 19 nt, Homo sapiens
  misc_RNA (1)...(19): siRNA sense strand
acagaaccuuuauugugua

SEQ ID NO: 110033 - RNA, 19 nt, Homo sapiens
  misc_RNA (1)...(19): siRNA sense strand
gacaaguuauuucuacaag

SEQ ID NO: 110034 - RNA, 19 nt, Homo sapiens
  misc_RNA (1)...(19): siRNA sense strand
caaaccgaaugaucacuca

SEQ ID NO: 110035 - RNA, 19 nt, Homo sapiens
  misc_RNA (1)...(19): siRNA sense strand
acaaggauacuacgugauu

SEQ ID NO: 110036 - RNA, 19 nt, Homo sapiens
  misc_RNA (1)...(19): siRNA sense strand
gcaaaacgaaccucuauau

SEQ ID NO: 110037 - RNA, 19 nt, Homo sapiens
  misc_RNA (1)...(19): siRNA sense strand
gugaagcucugucaaccau

SEQ ID NO: 110038 - RNA, 19 nt, Homo sapiens
  misc_RNA (1)...(19): siRNA sense strand
ucuauuacacccuauauug

SEQ ID NO: 110039 - RNA, 19 nt, Homo sapiens
  misc_RNA (1)...(19): siRNA sense strand
caaacaaauacaucccuaa

SEQ ID NO: 110040 - RNA, 19 nt, Homo sapiens
  misc_RNA (1)...(19): siRNA sense strand
ccucuacauuucuaauuug

SEQ ID NO: 110041 - RNA, 19 nt, Homo sapiens
  misc_RNA (1)...(19): siRNA sense strand
gaaaauagucuccacaaag

SEQ ID NO: 110042 - RNA, 19 nt, Homo sapiens
  misc_RNA (1)...(19): siRNA sense strand
aaauacaucccuaauggaa

SEQ ID NO: 110043 - RNA, 19 nt, Homo sapiens
  misc_RNA (1)...(19): siRNA sense strand
gagacagaacccaaacaaa

SEQ ID NO: 110044 - RNA, 19 nt, Homo sapiens
  misc_RNA (1)...(19): siRNA sense strand
gaaaauaugcucaaaccau

SEQ ID NO: 110045 - RNA, 19 nt, Homo sapiens
  misc_RNA (1)...(19): siRNA sense strand
ggaggcaaguggucaacag

SEQ ID NO: 110046 - RNA, 19 nt, Homo sapiens
  misc_RNA (1)...(19): siRNA sense strand
uaagacaccaccaggaguu

SEQ ID NO: 110047 - RNA, 19 nt, Homo sapiens
  misc_RNA (1)...(19): siRNA sense strand
gcaccaccagcaguaauaa

SEQ ID NO: 110048 - RNA, 19 nt, Homo sapiens
  misc_RNA (1)...(19): siRNA sense strand
gaacccaaacaaauacauc

SEQ ID NO: 110049 - RNA, 19 nt, Homo sapiens
  misc_RNA (1)...(19): siRNA sense strand
gagcacaccaugucacuac

SEQ ID NO: 110050 - RNA, 19 nt, Homo sapiens
  misc_RNA (1)...(19): siRNA sense strand
caacuacagcugcuauaca

SEQ ID NO: 110051 - RNA, 19 nt, Homo sapiens
  misc_RNA (1)...(19): siRNA sense strand
ggaaugacacuuacuuacg

SEQ ID NO: 110052 - RNA, 19 nt, Homo sapiens
  misc_RNA (1)...(19): siRNA sense strand
gagcaagaacuagaaaaua

SEQ ID NO: 110053 - RNA, 19 nt, Homo sapiens
  misc_RNA (1)...(19): siRNA sense strand
ccuuucaaccuaauaagua

SEQ ID NO: 110054 - RNA, 19 nt, Homo sapiens
  misc_RNA (1)...(19): siRNA sense strand
cuacagcugcuauacagaa

SEQ ID NO: 110055 - RNA, 19 nt, Homo sapiens
  misc_RNA (1)...(19): siRNA sense strand
aggauggaaucaacagaaa

SEQ ID NO: 110056 - RNA, 19 nt, Homo sapiens
  misc_RNA (1)...(19): siRNA sense strand
gaugagcaagaacuagaaa

SEQ ID NO: 110057 - RNA, 19 nt, Homo sapiens
  misc_RNA (1)...(19): siRNA sense strand
gaugggaucagcucagcaa

SEQ ID NO: 110058 - RNA, 19 nt, Homo sapiens
  misc_RNA (1)...(19): siRNA sense strand
ccuaccaaccucuacauuu

SEQ ID NO: 110059 - RNA, 19 nt, Homo sapiens
  misc_RNA (1)...(19): siRNA sense strand
gaaugaucacucaaacuuc

SEQ ID NO: 110060 - RNA, 19 nt, Homo sapiens
  misc_RNA (1)...(19): siRNA sense strand
uagcagcaguagcaacuca

SEQ ID NO: 110061 - RNA, 19 nt, Homo sapiens
  misc_RNA (1)...(19): siRNA sense strand
caaauacaucccuaaugga

SEQ ID NO: 110062 - RNA, 19 nt, Homo sapiens
  misc_RNA (1)...(19): siRNA sense strand
ggaugagcaagaacuagaa
